United States Patent Application Publication US 2005/0244851 A1 - sequence listing, part 64

SEQ ID NO: 2487595 - DNA, 25 bp, Homo sapien
tacgtggaaatgttctttgattacc

SEQ ID NO: 2487596 - DNA, 25 bp, Homo sapien
ctcagtgttcctgaacagactttta

SEQ ID NO: 2487597 - DNA, 25 bp, Homo sapien
cctgaacagacttttacgtggaaat

SEQ ID NO: 2487598 - DNA, 25 bp, Homo sapien
gaaatgttctttgattacctggtaa

SEQ ID NO: 2487599 - DNA, 25 bp, Homo sapien
tgtggaggcttgtgtacttttgtgg

SEQ ID NO: 2487600 - DNA, 25 bp, Homo sapien
gccatctgctaggagttcctgctgg

SEQ ID NO: 2487601 - DNA, 25 bp, Homo sapien
gtggtttcagtggaatgccatctgc

SEQ ID NO: 2487602 - DNA, 25 bp, Homo sapien
gaatgccatctgctaggagttcctg

SEQ ID NO: 2487603 - DNA, 25 bp, Homo sapien
tttttcatccacttagacctattca

SEQ ID NO: 2487604 - DNA, 25 bp, Homo sapien
ttcgtcttgaagactgatggcctgg

SEQ ID NO: 2487605 - DNA, 25 bp, Homo sapien
ggttctttctccttcgtcttgaaga

SEQ ID NO: 2487606 - DNA, 25 bp, Homo sapien
aatacatagctacttgtttgcccca

SEQ ID NO: 2487607 - DNA, 25 bp, Homo sapien
tgccagaaataggacggaaaaatgc

SEQ ID NO: 2487608 - DNA, 25 bp, Homo sapien
gacagttcaggttactccatggcag

SEQ ID NO: 2487609 - DNA, 25 bp, Homo sapien
tccagtgactgacagttcaggttac

SEQ ID NO: 2487610 - DNA, 25 bp, Homo sapien
aaaaatgctcctgtgtagcatgagc

SEQ ID NO: 2487611 - DNA, 25 bp, Homo sapien
cactaataacagtgagaagcgtcat

SEQ ID NO: 2487612 - DNA, 25 bp, Homo sapien
tgtctctcatgagatctctcttctg

SEQ ID NO: 2487613 - DNA, 25 bp, Homo sapien
ctcctagttccccttgtctctcatg

SEQ ID NO: 2487614 - DNA, 25 bp, Homo sapien
ttctggtgacccactaataacagtg

SEQ ID NO: 2487615 - DNA, 25 bp, Homo sapien
ttagccaacggcagtaagttgtttc

SEQ ID NO: 2487616 - DNA, 25 bp, Homo sapien
tagccaacggcagtaagttgtttca

SEQ ID NO: 2487617 - DNA, 25 bp, Homo sapien
catcagagtaagagtcttgtagctc

SEQ ID NO: 2487618 - DNA, 25 bp, Homo sapien
caagtcttctatggttagatcatca

SEQ ID NO: 2487619 - DNA, 25 bp, Homo sapien
atactgtttagcccaggcaagttta

SEQ ID NO: 2487620 - DNA, 25 bp, Homo sapien
ctgtttagcccaggcaagtttaact

SEQ ID NO: 2487621 - DNA, 25 bp, Homo sapien
tactgtttagcccaggcaagtttaa

SEQ ID NO: 2487622 - DNA, 25 bp, Homo sapien
catactgtttagcccaggcaagttt

SEQ ID NO: 2487623 - DNA, 25 bp, Homo sapien
caaaaggtttcaatgtagaatattt

SEQ ID NO: 2487624 - DNA, 25 bp, Homo sapien
tagatgatagtcaggtgtatgggta

SEQ ID NO: 2487625 - DNA, 25 bp, Homo sapien
tactttttgcacctatgctgttgat

SEQ ID NO: 2487626 - DNA, 25 bp, Homo sapien
actctaggactgtagtggtgactaa

SEQ ID NO: 2487627 - DNA, 25 bp, Homo sapien
aatcagttggaggagtcgctgatga

SEQ ID NO: 2487628 - DNA, 25 bp, Homo sapien
tggtttcccaatcatagtattttgg

SEQ ID NO: 2487629 - DNA, 25 bp, Homo sapien
tcagttggaggagtcgctgatgaaa

SEQ ID NO: 2487630 - DNA, 25 bp, Homo sapien
tcaatatctgcatcctgcttattgg

SEQ ID NO: 2487631 - DNA, 25 bp, Homo sapien
gctctagaacttcagcactctcttg

SEQ ID NO: 2487632 - DNA, 25 bp, Homo sapien
acttcagcactctcttgcctgatgg

SEQ ID NO: 2487633 - DNA, 25 bp, Homo sapien
tggctctagaacttcagcactctct

SEQ ID NO: 2487634 - DNA, 25 bp, Homo sapien
tagaacttcagcactctcttgcctg

SEQ ID NO: 2487635 - DNA, 25 bp, Homo sapien
cagtttctgtctgcagtgtagccaa

SEQ ID NO: 2487636 - DNA, 25 bp, Homo sapien
tgtagggagcccacactgggcaaac

SEQ ID NO: 2487637 - DNA, 25 bp, Homo sapien
caggattgaacacaacagaagaggt

SEQ ID NO: 2487638 - DNA, 25 bp, Homo sapien
tatggaaacatgtgcaccttacaat

SEQ ID NO: 2487639 - DNA, 25 bp, Homo sapien
tttcaaggagcaaagtaacgtggat

SEQ ID NO: 2487640 - DNA, 25 bp, Homo sapien
tattgcagtttaattacggaggact

SEQ ID NO: 2487641 - DNA, 25 bp, Homo sapien
tccttagagaattaacaacacctag

SEQ ID NO: 2487642 - DNA, 25 bp, Homo sapien
caagcaatatgctcaagggatcaaa

SEQ ID NO: 2487643 - DNA, 25 bp, Homo sapien
tccactatcctggctgttccagaga

SEQ ID NO: 2487644 - DNA, 25 bp, Homo sapien
actccactatcctggctgttccaga

SEQ ID NO: 2487645 - DNA, 25 bp, Homo sapien
tactccactatcctggctgttccag

SEQ ID NO: 2487646 - DNA, 25 bp, Homo sapien
ctactccactatcctggctgttcca

SEQ ID NO: 2487647 - DNA, 25 bp, Homo sapien
aagaagaaatctttttgccttccag

SEQ ID NO: 2487648 - DNA, 25 bp, Homo sapien
atctttttgccttccaggaagaagt

SEQ ID NO: 2487649 - DNA, 25 bp, Homo sapien
agaaatctttttgccttccaggaag

SEQ ID NO: 2487650 - DNA, 25 bp, Homo sapien
gaagaaatctttttgccttccagga

SEQ ID NO: 2487651 - DNA, 25 bp, Homo sapien
gaggtagagaacagacacagtctga

SEQ ID NO: 2487652 - DNA, 25 bp, Homo sapien
ccagcctatggaggagggttcttaa

SEQ ID NO: 2487653 - DNA, 25 bp, Homo sapien
ttagaagcacggacaagaatgaacc

SEQ ID NO: 2487654 - DNA, 25 bp, Homo sapien
ttagccttgaagaaactcagatttg

SEQ ID NO: 2487655 - DNA, 25 bp, Homo sapien
gatggttcctacatcatcttctggt

SEQ ID NO: 2487656 - DNA, 25 bp, Homo sapien
cagccatggcagtgcttggaaaatc

SEQ ID NO: 2487657 - DNA, 25 bp, Homo sapien
ttatgtatgcgtccacaagactttg

SEQ ID NO: 2487658 - DNA, 25 bp, Homo sapien
tagtcttaagggtttagatctctcc

SEQ ID NO: 2487659 - DNA, 25 bp, Homo sapien
gcttcatcagaactggtgcagccag

SEQ ID NO: 2487660 - DNA, 25 bp, Homo sapien
ctaagtatgccaagaaatggatgct

SEQ ID NO: 2487661 - DNA, 25 bp, Homo sapien
aaatctgaacaaatatgagagaccc

SEQ ID NO: 2487662 - DNA, 25 bp, Homo sapien
aaaagtcagcttctagcctaatgca

SEQ ID NO: 2487663 - DNA, 25 bp, Homo sapien
caaaaagccaataacagatatacac

SEQ ID NO: 2487664 - DNA, 25 bp, Homo sapien
aaaaagccaataacagatatacaca

SEQ ID NO: 2487665 - DNA, 25 bp, Homo sapien
aaaagccaataacagatatacacac

SEQ ID NO: 2487666 - DNA, 25 bp, Homo sapien
gactactgtagtcaatgcctagcct

SEQ ID NO: 2487667 - DNA, 25 bp, Homo sapien
ttccactggagactactgtagtcaa

SEQ ID NO: 2487668 - DNA, 25 bp, Homo sapien
ctactgtagtcaatgcctagcctca

SEQ ID NO: 2487669 - DNA, 25 bp, Homo sapien
tggagactactgtagtcaatgccta

SEQ ID NO: 2487670 - DNA, 25 bp, Homo sapien
agtggttcacaatgcctgcatggca

SEQ ID NO: 2487671 - DNA, 25 bp, Homo sapien
ttcacaatgcctgcatggcactgaa

SEQ ID NO: 2487672 - DNA, 25 bp, Homo sapien
gtggttcacaatgcctgcatggcac

SEQ ID NO: 2487673 - DNA, 25 bp, Homo sapien
tcaagtagagacatatttaacacaa

SEQ ID NO: 2487674 - DNA, 25 bp, Homo sapien
tccccttcaagtagagacatattta

SEQ ID NO: 2487675 - DNA, 25 bp, Homo sapien
agtaaaacaccagaatgccattgct

SEQ ID NO: 2487676 - DNA, 25 bp, Homo sapien
catttccccttcaagtagagacata

SEQ ID NO: 2487677 - DNA, 25 bp, Homo sapien
tggccaatttttggtattttcatgg

SEQ ID NO: 2487678 - DNA, 25 bp, Homo sapien
caatttttggtattttcatggagac

SEQ ID NO: 2487679 - DNA, 25 bp, Homo sapien
gccaatttttggtattttcatggag

SEQ ID NO: 2487680 - DNA, 25 bp, Homo sapien
atttttggtattttcatggagacag

SEQ ID NO: 2487681 - DNA, 25 bp, Homo sapien
ctgtattgcttccagggtactcagg

SEQ ID NO: 2487682 - DNA, 25 bp, Homo sapien
tactcaggctttaatttaaagaagc

SEQ ID NO: 2487683 - DNA, 25 bp, Homo sapien
gaaccaagaattctgtctaaggcaa

SEQ ID NO: 2487684 - DNA, 25 bp, Homo sapien
ccaagatagcaaaagcattttcaga

SEQ ID NO: 2487685 - DNA, 25 bp, Homo sapien
aatgctccagagatgaacaccgaga

SEQ ID NO: 2487686 - DNA, 25 bp, Homo sapien
tccagagatgaacaccgagaacttg

SEQ ID NO: 2487687 - DNA, 25 bp, Homo sapien
tgctccagagatgaacaccgagaac

SEQ ID NO: 2487688 - DNA, 25 bp, Homo sapien
gctccagagatgaacaccgagaact

SEQ ID NO: 2487689 - DNA, 25 bp, Homo sapien
gccttcttactctggtccagtgtca

SEQ ID NO: 2487690 - DNA, 25 bp, Homo sapien
tggccaatagactcagacacttctg

SEQ ID NO: 2487691 - DNA, 25 bp, Homo sapien
acttctggaccatttacaggcattg

SEQ ID NO: 2487692 - DNA, 25 bp, Homo sapien
catttacaggcattgtcctgagctc

SEQ ID NO: 2487693 - DNA, 25 bp, Homo sapien
ggagttttgtctagttcctcagcat

SEQ ID NO: 2487694 - DNA, 25 bp, Homo sapien
ctctgttcctatgtgcttgcattcc

SEQ ID NO: 2487695 - DNA, 25 bp, Homo sapien
agcatgctctgttcctatgtgcttg

SEQ ID NO: 2487696 - DNA, 25 bp, Homo sapien
ttgtctagttcctcagcatgctctg

SEQ ID NO: 2487697 - DNA, 25 bp, Homo sapien
tttcttcttgcatagtccacgtcct

SEQ ID NO: 2487698 - DNA, 25 bp, Homo sapien
ctgctgattcctcttgtatgtgttc

SEQ ID NO: 2487699 - DNA, 25 bp, Homo sapien
tctgatgccccctgtattctttttc

SEQ ID NO: 2487700 - DNA, 25 bp, Homo sapien
tcttcttgcatagtccacgtcctgc

SEQ ID NO: 2487701 - DNA, 25 bp, Homo sapien
ctatcttgttctgtagtgactgtgc

SEQ ID NO: 2487702 - DNA, 25 bp, Homo sapien
ctccatggacttttgagacctaatg

SEQ ID NO: 2487703 - DNA, 25 bp, Homo sapien
aatgattctcacactatcttgttct

SEQ ID NO: 2487704 - DNA, 25 bp, Homo sapien
ctgtgctgcaaataccttgtctaga

SEQ ID NO: 2487705 - DNA, 25 bp, Homo sapien
gagaaacaccataccaggtcacatc

SEQ ID NO: 2487706 - DNA, 25 bp, Homo sapien
gaaacaccataccaggtcacatcag

SEQ ID NO: 2487707 - DNA, 25 bp, Homo sapien
caccataccaggtcacatcagcaaa

SEQ ID NO: 2487708 - DNA, 25 bp, Homo sapien
cataccaggtcacatcagcaaacac

SEQ ID NO: 2487709 - DNA, 25 bp, Homo sapien
gagcctttggttttcaggtgaaata

SEQ ID NO: 2487710 - DNA, 25 bp, Homo sapien
caatgagcctttggttttcaggtga

SEQ ID NO: 2487711 - DNA, 25 bp, Homo sapien
gaaatacaatttctaaaccactcat

SEQ ID NO: 2487712 - DNA, 25 bp, Homo sapien
tgaaatacaatttctaaaccactca

SEQ ID NO: 2487713 - DNA, 25 bp, Homo sapien
gtgcctttttttctctgcattcttc

SEQ ID NO: 2487714 - DNA, 25 bp, Homo sapien
tgtgcctttttttctctgcattctt

SEQ ID NO: 2487715 - DNA, 25 bp, Homo sapien
tgcctttttttctctgcattcttca

SEQ ID NO: 2487716 - DNA, 25 bp, Homo sapien
gcctttttttctctgcattcttcat

SEQ ID NO: 2487717 - DNA, 25 bp, Homo sapien
tgcagggagagtaatgatagggaaa

SEQ ID NO: 2487718 - DNA, 25 bp, Homo sapien
tccaggataccagagctgatgtaag

SEQ ID NO: 2487719 - DNA, 25 bp, Homo sapien
gggtgcagggagagtaatgataggg

SEQ ID NO: 2487720 - DNA, 25 bp, Homo sapien
caggataccagagctgatgtaaggg

SEQ ID NO: 2487721 - DNA, 25 bp, Homo sapien
tatcccctggcatatatctccactt

SEQ ID NO: 2487722 - DNA, 25 bp, Homo sapien
cagttcttttggaggctgatcacag

SEQ ID NO: 2487723 - DNA, 25 bp, Homo sapien
ggttctcacctctctcaaggcagca

SEQ ID NO: 2487724 - DNA, 25 bp, Homo sapien
tgcagctttcctcttatcccctggc

SEQ ID NO: 2487725 - DNA, 25 bp, Homo sapien
atgctagatttactctagccacatc

SEQ ID NO: 2487726 - DNA, 25 bp, Homo sapien
tgctagatttactctagccacatct

SEQ ID NO: 2487727 - DNA, 25 bp, Homo sapien
tgctgaccctgagacaacacagtgc

SEQ ID NO: 2487728 - DNA, 25 bp, Homo sapien
ctgctgctgaccctgagacaacaca

SEQ ID NO: 2487729 - DNA, 25 bp, Homo sapien
gggaatgcctggtggccacactgct

SEQ ID NO: 2487730 - DNA, 25 bp, Homo sapien
gaccctgagacaacacagtgcacat

SEQ ID NO: 2487731 - DNA, 25 bp, Homo sapien
gagctaaattctccctggagtaaaa

SEQ ID NO: 2487732 - DNA, 25 bp, Homo sapien
ggctgccaagaggacccaaccctcc

SEQ ID NO: 2487733 - DNA, 25 bp, Homo sapien
cttccacaccagcatgagctaaatt

SEQ ID NO: 2487734 - DNA, 25 bp, Homo sapien
tgccaagaggacccaaccctcctct

SEQ ID NO: 2487735 - DNA, 25 bp, Homo sapien
gaggaggtaccctctggtactagag

SEQ ID NO: 2487736 - DNA, 25 bp, Homo sapien
aggaggtaccctctggtactagaga

SEQ ID NO: 2487737 - DNA, 25 bp, Homo sapien
gctgacattcaatgaacagaaaagt

SEQ ID NO: 2487738 - DNA, 25 bp, Homo sapien
taaggctgacattcaatgaacagaa

SEQ ID NO: 2487739 - DNA, 25 bp, Homo sapien
gcttaataaggctgacattcaatga

SEQ ID NO: 2487740 - DNA, 25 bp, Homo sapien
tgacaagcttaataaggctgacatt

SEQ ID NO: 2487741 - DNA, 25 bp, Homo sapien
tgccatagtaaaatgggtagtatcc

SEQ ID NO: 2487742 - DNA, 25 bp, Homo sapien
catagtaaaatgggtagtatccttc

SEQ ID NO: 2487743 - DNA, 25 bp, Homo sapien
gccatagtaaaatgggtagtatcct

SEQ ID NO: 2487744 - DNA, 25 bp, Homo sapien
tgtgccatagtaaaatgggtagtat

SEQ ID NO: 2487745 - DNA, 25 bp, Homo sapien
tctgtacacactattctgaaatact

SEQ ID NO: 2487746 - DNA, 25 bp, Homo sapien
tgttgtggttcagtagttccttcct

SEQ ID NO: 2487747 - DNA, 25 bp, Homo sapien
tcatatctgagctgtagttcctaca

SEQ ID NO: 2487748 - DNA, 25 bp, Homo sapien
tcatggacaaggctttttgtggaca

SEQ ID NO: 2487749 - DNA, 25 bp, Homo sapien
gcatgagagtttaagttgtatcagt

SEQ ID NO: 2487750 - DNA, 25 bp, Homo sapien
ttatctaagtgcataaatgttcagg

SEQ ID NO: 2487751 - DNA, 25 bp, Homo sapien
tgttcagggttgctacatcctcttg

SEQ ID NO: 2487752 - DNA, 25 bp, Homo sapien
gctctgttatctaagtgcataaatg

SEQ ID NO: 2487753 - DNA, 25 bp, Homo sapien
tcctcttgaaatatagatcccttct

SEQ ID NO: 2487754 - DNA, 25 bp, Homo sapien
aaagtagcctatagtagggtcttgc

SEQ ID NO: 2487755 - DNA, 25 bp, Homo sapien
cactgacaagtagtagcatcacatg

SEQ ID NO: 2487756 - DNA, 25 bp, Homo sapien
gctttgctgtgcaatctgacagttc

SEQ ID NO: 2487757 - DNA, 25 bp, Homo sapien
ggagctcgtaagtctaaaatcacag

SEQ ID NO: 2487758 - DNA, 25 bp, Homo sapien
catttccagcacatttgagtatttc

SEQ ID NO: 2487759 - DNA, 25 bp, Homo sapien
ttcttgtccatcttgaagtataaac

SEQ ID NO: 2487760 - DNA, 25 bp, Homo sapien
cagcagctgatagaacttcttgtcc

SEQ ID NO: 2487761 - DNA, 25 bp, Homo sapien
tctggcatcatttctcagcagctga

SEQ ID NO: 2487762 - DNA, 25 bp, Homo sapien
gtgtcattctaggagacaattaatg

SEQ ID NO: 2487763 - DNA, 25 bp, Homo sapien
gttttatgtctctagatgaaataat

SEQ ID NO: 2487764 - DNA, 25 bp, Homo sapien
tcttctgattgccaatgtgtcattc

SEQ ID NO: 2487765 - DNA, 25 bp, Homo sapien
gccaatgtgtcattctaggagacaa

SEQ ID NO: 2487766 - DNA, 25 bp, Homo sapien
taattcacatgtaactccaacaatt

SEQ ID NO: 2487767 - DNA, 25 bp, Homo sapien
ataataattcacatgtaactccaac

SEQ ID NO: 2487768 - DNA, 25 bp, Homo sapien
aataattcacatgtaactccaacaa

SEQ ID NO: 2487769 - DNA, 25 bp, Homo sapien
aattcacatgtaactccaacaattt

SEQ ID NO: 2487770 - DNA, 25 bp, Homo sapien
ctatatgtagaataaactatttttg

SEQ ID NO: 2487771 - DNA, 25 bp, Homo sapien
tagaataaactatttttgtccgagc

SEQ ID NO: 2487772 - DNA, 25 bp, Homo sapien
tatgtagaataaactatttttgtcc

SEQ ID NO: 2487773 - DNA, 25 bp, Homo sapien
tgtagaataaactatttttgtccga

SEQ ID NO: 2487774 - DNA, 25 bp, Homo sapien
aaattgaaatctcaatactcactgg

SEQ ID NO: 2487775 - DNA, 25 bp, Homo sapien
aaataaatgataatagaatagacta

SEQ ID NO: 2487776 - DNA, 25 bp, Homo sapien
aatgataatagaatagactaaaaaa

SEQ ID NO: 2487777 - DNA, 25 bp, Homo sapien
ataaatgataatagaatagactaaa

SEQ ID NO: 2487778 - DNA, 25 bp, Homo sapien
tgtcacaaaaagctagtcattggcc

SEQ ID NO: 2487779 - DNA, 25 bp, Homo sapien
gggatgctcagtcaccacagtggtt

SEQ ID NO: 2487780 - DNA, 25 bp, Homo sapien
caaaccatggctgtgagtaaaatcc

SEQ ID NO: 2487781 - DNA, 25 bp, Homo sapien
cattggccaccagtaagatctagaa

SEQ ID NO: 2487782 - DNA, 25 bp, Homo sapien
ctaagaattgggagttgccaagtga

SEQ ID NO: 2487783 - DNA, 25 bp, Homo sapien
tgccaagtgagtcttgaagaaatac

SEQ ID NO: 2487784 - DNA, 25 bp, Homo sapien
tgaagaaatactcatcagctgccaa

SEQ ID NO: 2487785 - DNA, 25 bp, Homo sapien
tgggagttgccaagtgagtcttgaa

SEQ ID NO: 2487786 - DNA, 25 bp, Homo sapien
acaatgggatgaagtgtagacagct

SEQ ID NO: 2487787 - DNA, 25 bp, Homo sapien
cacaatgggatgaagtgtagacagc

SEQ ID NO: 2487788 - DNA, 25 bp, Homo sapien
caatgggatgaagtgtagacagctt

SEQ ID NO: 2487789 - DNA, 25 bp, Homo sapien
cattgattacggaggtttgcataac

SEQ ID NO: 2487790 - DNA, 25 bp, Homo sapien
cttctcaaaacgaactctgcgaaaa

SEQ ID NO: 2487791 - DNA, 25 bp, Homo sapien
aaatgccaaagataaccttctcaaa

SEQ ID NO: 2487792 - DNA, 25 bp, Homo sapien
ctgatgtggtactgtatttgatcca

SEQ ID NO: 2487793 - DNA, 25 bp, Homo sapien
gcatatcaaggaagccataacacac

SEQ ID NO: 2487794 - DNA, 25 bp, Homo sapien
gagcatatcaaggaagccataacac

SEQ ID NO: 2487795 - DNA, 25 bp, Homo sapien
tatcaaggaagccataacacacatg

SEQ ID NO: 2487796 - DNA, 25 bp, Homo sapien
agagcatatcaaggaagccataaca

SEQ ID NO: 2487797 - DNA, 25 bp, Homo sapien
acactaacaactgcaatgtgtgaaa

SEQ ID NO: 2487798 - DNA, 25 bp, Homo sapien
tggcaagggcagtaaacactaacaa

SEQ ID NO: 2487799 - DNA, 25 bp, Homo sapien
gcaagggcagtaaacactaacaact

SEQ ID NO: 2487800 - DNA, 25 bp, Homo sapien
agtaaacactaacaactgcaatgtg

SEQ ID NO: 2487801 - DNA, 25 bp, Homo sapien
ctcactgtgttcaaggagctgtttt

SEQ ID NO: 2487802 - DNA, 25 bp, Homo sapien
tgtacacagctgaagttgacagtat

SEQ ID NO: 2487803 - DNA, 25 bp, Homo sapien
tccctgtgtatgcagttaacggagt

SEQ ID NO: 2487804 - DNA, 25 bp, Homo sapien
gacctctcatgaaacagccaatgca

SEQ ID NO: 2487805 - DNA, 25 bp, Homo sapien
tcccgaaatcttctaggcacaacag

SEQ ID NO: 2487806 - DNA, 25 bp, Homo sapien
gctaacaattcagcgagtatcaaga

SEQ ID NO: 2487807 - DNA, 25 bp, Homo sapien
gagagaagtacaaacacagcagtta

SEQ ID NO: 2487808 - DNA, 25 bp, Homo sapien
gctactatcgttggtggtaacaggt

SEQ ID NO: 2487809 - DNA, 25 bp, Homo sapien
tacagaaatgggatatagctaacaa

SEQ ID NO: 2487810 - DNA, 25 bp, Homo sapien
tgacctcgttatggactaatgcagc

SEQ ID NO: 2487811 - DNA, 25 bp, Homo sapien
taagttgatgtactagaccatttgg

SEQ ID NO: 2487812 - DNA, 25 bp, Homo sapien
tataacatgtaactttgaacttccc

SEQ ID NO: 2487813 - DNA, 25 bp, Homo sapien
taccactttgaaaatcctgaggcct

SEQ ID NO: 2487814 - DNA, 25 bp, Homo sapien
gaaaggcagtcacgcatgatggtca

SEQ ID NO: 2487815 - DNA, 25 bp, Homo sapien
ggaagaggcccaagacacactatta

SEQ ID NO: 2487816 - DNA, 25 bp, Homo sapien
gcaggcctcataatcagcagtccaa

SEQ ID NO: 2487817 - DNA, 25 bp, Homo sapien
agctacttacaatcagcacccaggg

SEQ ID NO: 2487818 - DNA, 25 bp, Homo sapien
taaatatcccaagtcccttcatgta

SEQ ID NO: 2487819 - DNA, 25 bp, Homo sapien
cagtgtccagggttctccattcatt

SEQ ID NO: 2487820 - DNA, 25 bp, Homo sapien
gaatgccaagacacatttccctgtg

SEQ ID NO: 2487821 - DNA, 25 bp, Homo sapien
tactccttatgggaacagtgtccag

SEQ ID NO: 2487822 - DNA, 25 bp, Homo sapien
tagataaatgtttgtagctaaaaca

SEQ ID NO: 2487823 - DNA, 25 bp, Homo sapien
aaacatatgaaatatcacgaacagt

SEQ ID NO: 2487824 - DNA, 25 bp, Homo sapien
cttagataaatgtttgtagctaaaa

SEQ ID NO: 2487825 - DNA, 25 bp, Homo sapien
gataaatgtttgtagctaaaacata

SEQ ID NO: 2487826 - DNA, 25 bp, Homo sapien
catgtaatcaccataacaactggaa

SEQ ID NO: 2487827 - DNA, 25 bp, Homo sapien
taaaacatgtaatcaccataacaac

SEQ ID NO: 2487828 - DNA, 25 bp, Homo sapien
aacatgtaatcaccataacaactgg

SEQ ID NO: 2487829 - DNA, 25 bp, Homo sapien
tgtaatcaccataacaactggaagc

SEQ ID NO: 2487830 - DNA, 25 bp, Homo sapien
tggctaactaattctgatgacctgt

SEQ ID NO: 2487831 - DNA, 25 bp, Homo sapien
tagtgaaactagagctaacaagaaa

SEQ ID NO: 2487832 - DNA, 25 bp, Homo sapien
tttgtcgtgctatagcaaactgcct

SEQ ID NO: 2487833 - DNA, 25 bp, Homo sapien
gcctcatggataactagtggtcaat

SEQ ID NO: 2487834 - DNA, 25 bp, Homo sapien
actcatcagtagcatacctttcttg

SEQ ID NO: 2487835 - DNA, 25 bp, Homo sapien
tgttcattaaaactcatcagtagca

SEQ ID NO: 2487836 - DNA, 25 bp, Homo sapien
cagtagcatacctttcttggtaaca

SEQ ID NO: 2487837 - DNA, 25 bp, Homo sapien
gcatacctttcttggtaacaccttg

SEQ ID NO: 2487838 - DNA, 25 bp, Homo sapien
gctgctataagatcactcaggcgaa

SEQ ID NO: 2487839 - DNA, 25 bp, Homo sapien
tttccatgaagtcaaattcgggagc

SEQ ID NO: 2487840 - DNA, 25 bp, Homo sapien
attcgggagcacaggtatatattaa

SEQ ID NO: 2487841 - DNA, 25 bp, Homo sapien
tctggctgctataagatcactcagg

SEQ ID NO: 2487842 - DNA, 25 bp, Homo sapien
tcaggtattcctcgtaactgtcaca

SEQ ID NO: 2487843 - DNA, 25 bp, Homo sapien
tagaataggcctggtgactaacagt

SEQ ID NO: 2487844 - DNA, 25 bp, Homo sapien
cctaatctaccagtactcaaggata

SEQ ID NO: 2487845 - DNA, 25 bp, Homo sapien
tatacaacctgctcttggtgagaca

SEQ ID NO: 2487846 - DNA, 25 bp, Homo sapien
gattttagatgtcagaaatttcaaa

SEQ ID NO: 2487847 - DNA, 25 bp, Homo sapien
caaaatgattgttccacaccaccag

SEQ ID NO: 2487848 - DNA, 25 bp, Homo sapien
ggtctgaaacgcctaagattttaga

SEQ ID NO: 2487849 - DNA, 25 bp, Homo sapien
ttcaaaatgattgttccacaccacc

SEQ ID NO: 2487850 - DNA, 25 bp, Homo sapien
gagtttagatactcccagtttttga

SEQ ID NO: 2487851 - DNA, 25 bp, Homo sapien
tgagtttagatactcccagtttttg

SEQ ID NO: 2487852 - DNA, 25 bp, Homo sapien
gaaagaacttctccgatgctagaaa

SEQ ID NO: 2487853 - DNA, 25 bp, Homo sapien
gggtcctcaaaactatacctgcagt

SEQ ID NO: 2487854 - DNA, 25 bp, Homo sapien
cagaagaggccttgggtctatgcaa

SEQ ID NO: 2487855 - DNA, 25 bp, Homo sapien
taatacataaagctagggtcctcaa

SEQ ID NO: 2487856 - DNA, 25 bp, Homo sapien
gaagataagtacattgaatttccaa

SEQ ID NO: 2487857 - DNA, 25 bp, Homo sapien
tcaaaatgaaactaagggtaactga

SEQ ID NO: 2487858 - DNA, 25 bp, Homo sapien
gataagtacattgaatttccaaaca

SEQ ID NO: 2487859 - DNA, 25 bp, Homo sapien
aagaagataagtacattgaatttcc

SEQ ID NO: 2487860 - DNA, 25 bp, Homo sapien
aatgtatcccacaacatacatggga

SEQ ID NO: 2487861 - DNA, 25 bp, Homo sapien
agtataaactgagcaaattgccagg

SEQ ID NO: 2487862 - DNA, 25 bp, Homo sapien
taaactgagcaaattgccagggaag

SEQ ID NO: 2487863 - DNA, 25 bp, Homo sapien
gccagggaagcataaaagcaacatt

SEQ ID NO: 2487864 - DNA, 25 bp, Homo sapien
caacattggaaagacagagtgcaat

SEQ ID NO: 2487865 - DNA, 25 bp, Homo sapien
gactgaccagactgatatcacttca

SEQ ID NO: 2487866 - DNA, 25 bp, Homo sapien
taagacacagagtatagcacatgcc

SEQ ID NO: 2487867 - DNA, 25 bp, Homo sapien
catcacctaatctttgagagaaggc

SEQ ID NO: 2487868 - DNA, 25 bp, Homo sapien
tattccatgaaacccctgactgacc

SEQ ID NO: 2487869 - DNA, 25 bp, Homo sapien
gtggtgtccacatcacacgggtggc

SEQ ID NO: 2487870 - DNA, 25 bp, Homo sapien
taaaatacacatctgaagtacaagg

SEQ ID NO: 2487871 - DNA, 25 bp, Homo sapien
aactttcacggagaggtggtgtcca

SEQ ID NO: 2487872 - DNA, 25 bp, Homo sapien
ctgaagtacaaggaaaggataggaa

SEQ ID NO: 2487873 - DNA, 25 bp, Homo sapien
actgtgtccctgctgtcaggcctga

SEQ ID NO: 2487874 - DNA, 25 bp, Homo sapien
tggcagtgtcttaactgtgtccctg

SEQ ID NO: 2487875 - DNA, 25 bp, Homo sapien
ctttcattgttgttaaggggagtgc

SEQ ID NO: 2487876 - DNA, 25 bp, Homo sapien
ggcctgaggcctctttcattgttgt

SEQ ID NO: 2487877 - DNA, 25 bp, Homo sapien
gtaataagacctcccagttgagtcc

SEQ ID NO: 2487878 - DNA, 25 bp, Homo sapien
gtactgtaataagacctcccagttg

SEQ ID NO: 2487879 - DNA, 25 bp, Homo sapien
ctgtaataagacctcccagttgagt

SEQ ID NO: 2487880 - DNA, 25 bp, Homo sapien
ctctccatggttgaaaaagaagcac

SEQ ID NO: 2487881 - DNA, 25 bp, Homo sapien
tgagactggtctcgctgctgcttca

SEQ ID NO: 2487882 - DNA, 25 bp, Homo sapien
ctgagactggtctcgctgctgcttc

SEQ ID NO: 2487883 - DNA, 25 bp, Homo sapien
gagactggtctcgctgctgcttcat

SEQ ID NO: 2487884 - DNA, 25 bp, Homo sapien
tcaggtatgctccatacatgaagaa

SEQ ID NO: 2487885 - DNA, 25 bp, Homo sapien
caggtatgctccatacatgaagaac

SEQ ID NO: 2487886 - DNA, 25 bp, Homo sapien
ctcaggtatgctccatacatgaaga

SEQ ID NO: 2487887 - DNA, 25 bp, Homo sapien
gaaaagatacagataatcagtgttt

SEQ ID NO: 2487888 - DNA, 25 bp, Homo sapien
ttgaaaagatacagataatcagtgt

SEQ ID NO: 2487889 - DNA, 25 bp, Homo sapien
aaagatacagataatcagtgtttaa

SEQ ID NO: 2487890 - DNA, 25 bp, Homo sapien
aatcagtgtttaatgaatatatgac

SEQ ID NO: 2487891 - DNA, 25 bp, Homo sapien
gactttagggtacagctttagtcta

SEQ ID NO: 2487892 - DNA, 25 bp, Homo sapien
gaactgtctgtagaaccacttaatg

SEQ ID NO: 2487893 - DNA, 25 bp, Homo sapien
tatttcactttaactggctggagcc

SEQ ID NO: 2487894 - DNA, 25 bp, Homo sapien
gctgctagtgttcagtgtctggaac

SEQ ID NO: 2487895 - DNA, 25 bp, Homo sapien
catgaatgtgcaataccaggaggct

SEQ ID NO: 2487896 - DNA, 25 bp, Homo sapien
aatgtgcaataccaggaggctatga

SEQ ID NO: 2487897 - DNA, 25 bp, Homo sapien
cccatgaatgtgcaataccaggagg

SEQ ID NO: 2487898 - DNA, 25 bp, Homo sapien
ttcccatgaatgtgcaataccagga

SEQ ID NO: 2487899 - DNA, 25 bp, Homo sapien
tgtgtcatcactcagtcaaccgcat

SEQ ID NO: 2487900 - DNA, 25 bp, Homo sapien
cagcggcactgatctatctgtgtca

SEQ ID NO: 2487901 - DNA, 25 bp, Homo sapien
cccaataaaagcgatggcctaggct

SEQ ID NO: 2487902 - DNA, 25 bp, Homo sapien
taagacctaggcacagatcaactct

SEQ ID NO: 2487903 - DNA, 25 bp, Homo sapien
taagctgaccctaacattagataga

SEQ ID NO: 2487904 - DNA, 25 bp, Homo sapien
attaataagctgaccctaacattag

SEQ ID NO: 2487905 - DNA, 25 bp, Homo sapien
aataagctgaccctaacattagata

SEQ ID NO: 2487906 - DNA, 25 bp, Homo sapien
agaaattaataagctgaccctaaca

SEQ ID NO: 2487907 - DNA, 25 bp, Homo sapien
cagggtctgacaattcaaaatctaa

SEQ ID NO: 2487908 - DNA, 25 bp, Homo sapien
catgtaagtcatacctcaaaaaagc

SEQ ID NO: 2487909 - DNA, 25 bp, Homo sapien
tgttgttgacagaagaacaaatcca

SEQ ID NO: 2487910 - DNA, 25 bp, Homo sapien
caaaaaagctgatttggtgacaaag

SEQ ID NO: 2487911 - DNA, 25 bp, Homo sapien
taactccaagatcactattcaagct

SEQ ID NO: 2487912 - DNA, 25 bp, Homo sapien
tcattcttcgagttcatgagagaac

SEQ ID NO: 2487913 - DNA, 25 bp, Homo sapien
ctggccattatttacacactaaggt

SEQ ID NO: 2487914 - DNA, 25 bp, Homo sapien
ggcttgtctattaccctggccatta

SEQ ID NO: 2487915 - DNA, 25 bp, Homo sapien
aagaggatattcagtaagcctgtca

SEQ ID NO: 2487916 - DNA, 25 bp, Homo sapien
tattcagtaagcctgtcattcataa

SEQ ID NO: 2487917 - DNA, 25 bp, Homo sapien
ggatattcagtaagcctgtcattca

SEQ ID NO: 2487918 - DNA, 25 bp, Homo sapien
tcagtaagcctgtcattcataatca

SEQ ID NO: 2487919 - DNA, 25 bp, Homo sapien
tcatctcccgttccaaagatgagag

SEQ ID NO: 2487920 - DNA, 25 bp, Homo sapien
gagaaatgacgatcattttcaaaaa

SEQ ID NO: 2487921 - DNA, 25 bp, Homo sapien
catttcagtgcgaaaagtcatctcc

SEQ ID NO: 2487922 - DNA, 25 bp, Homo sapien
atgagaggtgagagaaatgacgatc

SEQ ID NO: 2487923 - DNA, 25 bp, Homo sapien
caatgtaaaattgccacaaagacag

SEQ ID NO: 2487924 - DNA, 25 bp, Homo sapien
aagccttttcgctctttcagacttt

SEQ ID NO: 2487925 - DNA, 25 bp, Homo sapien
caggagccccttggcagtttcccgc

SEQ ID NO: 2487926 - DNA, 25 bp, Homo sapien
gccgagaagaaaggtcttggccacc

SEQ ID NO: 2487927 - DNA, 25 bp, Homo sapien
tctttcagactttggatcctccccg

SEQ ID NO: 2487928 - DNA, 25 bp, Homo sapien
ctgcggccggaagattgcagccgct

SEQ ID NO: 2487929 - DNA, 25 bp, Homo sapien
cggaagattgcagccgctttgagct

SEQ ID NO: 2487930 - DNA, 25 bp, Homo sapien
gcgccgccccttagactggctgcgg

SEQ ID NO: 2487931 - DNA, 25 bp, Homo sapien
gccccttagactggctgcggccgga

SEQ ID NO: 2487932 - DNA, 25 bp, Homo sapien
atcaaggagtatggtggagctgggt

SEQ ID NO: 2487933 - DNA, 25 bp, Homo sapien
aatcaaggagtatggtggagctggg

SEQ ID NO: 2487934 - DNA, 25 bp, Homo sapien
tcatgcctaggctttggagtgttcc

SEQ ID NO: 2487935 - DNA, 25 bp, Homo sapien
cagtagtgtgtttagaatgcagccc

SEQ ID NO: 2487936 - DNA, 25 bp, Homo sapien
ccgtggtgcattccctcagtggtag

SEQ ID NO: 2487937 - DNA, 25 bp, Homo sapien
tattagtaaactttcaggctggctg

SEQ ID NO: 2487938 - DNA, 25 bp, Homo sapien
ggtgccaagagcagtcagggactgt

SEQ ID NO: 2487939 - DNA, 25 bp, Homo sapien
acagcagaggaatggcgtagtcctt

SEQ ID NO: 2487940 - DNA, 25 bp, Homo sapien
tatggatgctgtgctggtgccaaga

SEQ ID NO: 2487941 - DNA, 25 bp, Homo sapien
atggtatcgcggcatgtggaatgaa

SEQ ID NO: 2487942 - DNA, 25 bp, Homo sapien
attatcagatgttgtaaaggctgac

SEQ ID NO: 2487943 - DNA, 25 bp, Homo sapien
ttatcagatgttgtaaaggctgacc

SEQ ID NO: 2487944 - DNA, 25 bp, Homo sapien
caaattatcagatgttgtaaaggct

SEQ ID NO: 2487945 - DNA, 25 bp, Homo sapien
aaattatcagatgttgtaaaggctg

SEQ ID NO: 2487946 - DNA, 25 bp, Homo sapien
tttggggttgtctgactctcatccc

SEQ ID NO: 2487947 - DNA, 25 bp, Homo sapien
ttttgaatcaggctctccacacttt

SEQ ID NO: 2487948 - DNA, 25 bp, Homo sapien
tttgaatcaggctctccacactttc

SEQ ID NO: 2487949 - DNA, 25 bp, Homo sapien
ctcgatttggggttgtctgactctc

SEQ ID NO: 2487950 - DNA, 25 bp, Homo sapien
ctgaccacaggaatatggaattcca

SEQ ID NO: 2487951 - DNA, 25 bp, Homo sapien
tgaccacaggaatatggaattccat

SEQ ID NO: 2487952 - DNA, 25 bp, Homo sapien
agtaagggcagcaccagccggcatg

SEQ ID NO: 2487953 - DNA, 25 bp, Homo sapien
gccggcatgccatccatcagcacat

SEQ ID NO: 2487954 - DNA, 25 bp, Homo sapien
tcatcaaaaccccaacttggagcaa

SEQ ID NO: 2487955 - DNA, 25 bp, Homo sapien
gaacaggttgccacgcagctggagt

SEQ ID NO: 2487956 - DNA, 25 bp, Homo sapien
tgctatctattttcagcttcgttat

SEQ ID NO: 2487957 - DNA, 25 bp, Homo sapien
ttggcaaaaggattgctatctattt

SEQ ID NO: 2487958 - DNA, 25 bp, Homo sapien
tggcaaaaggattgctatctatttt

SEQ ID NO: 2487959 - DNA, 25 bp, Homo sapien
ctggagaaagaatgggtacaaaaca

SEQ ID NO: 2487960 - DNA, 25 bp, Homo sapien
agaatgggtacaaaacagtatcatt

SEQ ID NO: 2487961 - DNA, 25 bp, Homo sapien
gagaaagaatgggtacaaaacagta

SEQ ID NO: 2487962 - DNA, 25 bp, Homo sapien
gaaagaatgggtacaaaacagtatc

SEQ ID NO: 2487963 - DNA, 25 bp, Homo sapien
ttgcctgtcccgagggtctccacac

SEQ ID NO: 2487964 - DNA, 25 bp, Homo sapien
cacaccacctcgcttccaggtgacc

SEQ ID NO: 2487965 - DNA, 25 bp, Homo sapien
acaccacctcgcttccaggtgacca

SEQ ID NO: 2487966 - DNA, 25 bp, Homo sapien
ttcatcttgcctgtcccgagggtct

SEQ ID NO: 2487967 - DNA, 25 bp, Homo sapien
ggtacttatgcattgagttcaaaat

SEQ ID NO: 2487968 - DNA, 25 bp, Homo sapien
ttcagacttcaggttgagcaatgag

SEQ ID NO: 2487969 - DNA, 25 bp, Homo sapien
tcttcttaatgatgtgcacccttgg

SEQ ID NO: 2487970 - DNA, 25 bp, Homo sapien
gtgcacccttggctggtacttatgc

SEQ ID NO: 2487971 - DNA, 25 bp, Homo sapien
gggaatgcctggtggccacactgct

SEQ ID NO: 2487972 - DNA, 25 bp, Homo sapien
ctgctgctgaccctgagacaacaca

SEQ ID NO: 2487973 - DNA, 25 bp, Homo sapien
tgctgaccctgagacaacacagtcc

SEQ ID NO: 2487974 - DNA, 25 bp, Homo sapien
cctgagacaacacagtccacatcat

SEQ ID NO: 2487975 - DNA, 25 bp, Homo sapien
agtggtactaaggtaccttggcaat

SEQ ID NO: 2487976 - DNA, 25 bp, Homo sapien
cactacccagggatatcggaagtaa

SEQ ID NO: 2487977 - DNA, 25 bp, Homo sapien
gagattgtgggaaaccagatcagac

SEQ ID NO: 2487978 - DNA, 25 bp, Homo sapien
tatcggaagtaataggctgcaggga

SEQ ID NO: 2487979 - DNA, 25 bp, Homo sapien
gtgcatggctaacaatcatgctgat

SEQ ID NO: 2487980 - DNA, 25 bp, Homo sapien
taacaatcatgctgatcttatggca

SEQ ID NO: 2487981 - DNA, 25 bp, Homo sapien
aggacagtggagcagacgacccaca

SEQ ID NO: 2487982 - DNA, 25 bp, Homo sapien
gcagacgacccacaaaactactatt

SEQ ID NO: 2487983 - DNA, 25 bp, Homo sapien
tctatcaacgtagtaggcactgtcc

SEQ ID NO: 2487984 - DNA, 25 bp, Homo sapien
ccttcatggaccaccgcgggtgttc

SEQ ID NO: 2487985 - DNA, 25 bp, Homo sapien
tcctaggcgctagggattccatgca

SEQ ID NO: 2487986 - DNA, 25 bp, Homo sapien
tgcaatgagtacacggcagaggtca

SEQ ID NO: 2487987 - DNA, 25 bp, Homo sapien
cagtgctcacaagcatccatgaggc

SEQ ID NO: 2487988 - DNA, 25 bp, Homo sapien
aagcactacactcttgactaaggga

SEQ ID NO: 2487989 - DNA, 25 bp, Homo sapien
tgatggcccatgcttataaagagct

SEQ ID NO: 2487990 - DNA, 25 bp, Homo sapien
tgcttacctcgtttgagcactgaaa

SEQ ID NO: 2487991 - DNA, 25 bp, Homo sapien
actggcccagcatcattctgaattc

SEQ ID NO: 2487992 - DNA, 25 bp, Homo sapien
gaatataggtatgcaacactggccc

SEQ ID NO: 2487993 - DNA, 25 bp, Homo sapien
tcttatctatgctttgggtctagac

SEQ ID NO: 2487994 - DNA, 25 bp, Homo sapien
actgttcacagacaagatcatagca

SEQ ID NO: 2487995 - DNA, 25 bp, Homo sapien
cttaatgagaggtgaatttataggc

SEQ ID NO: 2487996 - DNA, 25 bp, Homo sapien
aatataaaagttgggctatttctgt

SEQ ID NO: 2487997 - DNA, 25 bp, Homo sapien
gagaggtgaatttataggctgtgtc

SEQ ID NO: 2487998 - DNA, 25 bp, Homo sapien
ggtgaatttataggctgtgtcttca

SEQ ID NO: 2487999 - DNA, 25 bp, Homo sapien
cagaatgctatcgaatctatgaggc

SEQ ID NO: 2488000 - DNA, 25 bp, Homo sapien
tcctgtggtggaagacgtgatgaca

SEQ ID NO: 2488001 - DNA, 25 bp, Homo sapien
tgcagttactcaagtccatgggtgc

SEQ ID NO: 2488002 - DNA, 25 bp, Homo sapien
tatgaggcttgctcctatggctcca

SEQ ID NO: 2488003 - DNA, 25 bp, Homo sapien
ccgacgtgaccgaggcgatgctcta

SEQ ID NO: 2488004 - DNA, 25 bp, Homo sapien
cccgacgtgaccgaggcgatgctct

SEQ ID NO: 2488005 - DNA, 25 bp, Homo sapien
tatcccacagactcagaacggtgct

SEQ ID NO: 2488006 - DNA, 25 bp, Homo sapien
caaaagcaaatgttgggtgaacggc

SEQ ID NO: 2488007 - DNA, 25 bp, Homo sapien
tactcttgctggtaaaatcactggc

SEQ ID NO: 2488008 - DNA, 25 bp, Homo sapien
cacattataactatgctgcgggagt

SEQ ID NO: 2488009 - DNA, 25 bp, Homo sapien
ctctggagacctaaactccgccggg

SEQ ID NO: 2488010 - DNA, 25 bp, Homo sapien
gggactcgcgtcaggactgcgattc

SEQ ID NO: 2488011 - DNA, 25 bp, Homo sapien
gtgtgcctgtcactagcggcctcct

SEQ ID NO: 2488012 - DNA, 25 bp, Homo sapien
tttcgcctgccgagctgtagcggca

SEQ ID NO: 2488013 - DNA, 25 bp, Homo sapien
cgggacccttgagcgccggagccga

SEQ ID NO: 2488014 - DNA, 25 bp, Homo sapien
ggcgggacccttgagcgccggagcc

SEQ ID NO: 2488015 - DNA, 25 bp, Homo sapien
ggacccttgagcgccggagccgaca

SEQ ID NO: 2488016 - DNA, 25 bp, Homo sapien
gacccttgagcgccggagccgacag

SEQ ID NO: 2488017 - DNA, 25 bp, Homo sapien
ccccgagccgattcaagaaggacaa

SEQ ID NO: 2488018 - DNA, 25 bp, Homo sapien
catagccgagtatgaaagtcaagtc

SEQ ID NO: 2488019 - DNA, 25 bp, Homo sapien
tacaagccagttagttcccagttgc

SEQ ID NO: 2488020 - DNA, 25 bp, Homo sapien
cattgaaagcaaacccggaacagct

SEQ ID NO: 2488021 - DNA, 25 bp, Homo sapien
agtttatagcatggcctcaggagtc

SEQ ID NO: 2488022 - DNA, 25 bp, Homo sapien
gtatacatctcatgtaacctagtag

SEQ ID NO: 2488023 - DNA, 25 bp, Homo sapien
tgtagattagtatacatctcatgta

SEQ ID NO: 2488024 - DNA, 25 bp, Homo sapien
ggagtcaaactgctagggtctaaat

SEQ ID NO: 2488025 - DNA, 25 bp, Homo sapien
ccgcgcctggctgtctatatatttt

SEQ ID NO: 2488026 - DNA, 25 bp, Homo sapien
accgcgcctggctgtctatatattt

SEQ ID NO: 2488027 - DNA, 25 bp, Homo sapien
cctccgaagtagctgagcgcaccag

SEQ ID NO: 2488028 - DNA, 25 bp, Homo sapien
ccgaagtagctgagcgcaccagcaa

SEQ ID NO: 2488029 - DNA, 25 bp, Homo sapien
tacagttaccgccagctcttaggac

SEQ ID NO: 2488030 - DNA, 25 bp, Homo sapien
tagggcttcgctagcacatttcagt

SEQ ID NO: 2488031 - DNA, 25 bp, Homo sapien
tctaaagtgggagcctgatgagccc

SEQ ID NO: 2488032 - DNA, 25 bp, Homo sapien
gactctagaacaaccaaagtgcagg

SEQ ID NO: 2488033 - DNA, 25 bp, Homo sapien
tgcatctgttaatggccagcatcct

SEQ ID NO: 2488034 - DNA, 25 bp, Homo sapien
tttccctgggcatacgatgaatcct

SEQ ID NO: 2488035 - DNA, 25 bp, Homo sapien
tcctttcttttcttatatcctccca

SEQ ID NO: 2488036 - DNA, 25 bp, Homo sapien
tctgcttctgatcatagcacctctt

SEQ ID NO: 2488037 - DNA, 25 bp, Homo sapien
tgctgagaattgagtgagcccatgc

SEQ ID NO: 2488038 - DNA, 25 bp, Homo sapien
gagcccatgcatttgaaggccaacc

SEQ ID NO: 2488039 - DNA, 25 bp, Homo sapien
cacctcctagctgcaaagtccttgg

SEQ ID NO: 2488040 - DNA, 25 bp, Homo sapien
gcttttctagggatcagtcttctca

SEQ ID NO: 2488041 - DNA, 25 bp, Homo sapien
tgttcgtttgaggaatcccatatgg

SEQ ID NO: 2488042 - DNA, 25 bp, Homo sapien
cttgttgttatgaccaaacgccttc

SEQ ID NO: 2488043 - DNA, 25 bp, Homo sapien
cacatctcatagcaaatgttcttgt

SEQ ID NO: 2488044 - DNA, 25 bp, Homo sapien
cccatatggtagattgacacatctc

SEQ ID NO: 2488045 - DNA, 25 bp, Homo sapien
tcaaggaacagaatctaagatgata

SEQ ID NO: 2488046 - DNA, 25 bp, Homo sapien
ggaacagaatctaagatgataagaa

SEQ ID NO: 2488047 - DNA, 25 bp, Homo sapien
aaggaacagaatctaagatgataag

SEQ ID NO: 2488048 - DNA, 25 bp, Homo sapien
caaggaacagaatctaagatgataa

SEQ ID NO: 2488049 - DNA, 25 bp, Homo sapien
tgatctgccttgacaggtaatatcc

SEQ ID NO: 2488050 - DNA, 25 bp, Homo sapien
ctctgtcctgaagattttgaactgt

SEQ ID NO: 2488051 - DNA, 25 bp, Homo sapien
gttgaggttccctcaatccaaagct

SEQ ID NO: 2488052 - DNA, 25 bp, Homo sapien
tgttgagatgcacacaacccggcag

SEQ ID NO: 2488053 - DNA, 25 bp, Homo sapien
ccagttaccaactgtgttctcttct

SEQ ID NO: 2488054 - DNA, 25 bp, Homo sapien
gtgtcccagttaccaactgtgttct

SEQ ID NO: 2488055 - DNA, 25 bp, Homo sapien
caaggggagctgctaggtctttaac

SEQ ID NO: 2488056 - DNA, 25 bp, Homo sapien
tccaaggggagctgctaggtcttta

SEQ ID NO: 2488057 - DNA, 25 bp, Homo sapien
tacgggtgtgcccagtgtacttatt

SEQ ID NO: 2488058 - DNA, 25 bp, Homo sapien
aaactcctcccctgctgacatggag

SEQ ID NO: 2488059 - DNA, 25 bp, Homo sapien
tcttgttatccgaggaaactcctcc

SEQ ID NO: 2488060 - DNA, 25 bp, Homo sapien
tcactgcctgtcctacgggtgtgcc

SEQ ID NO: 2488061 - DNA, 25 bp, Homo sapien
ccaaagctggacttagaaagtggct

SEQ ID NO: 2488062 - DNA, 25 bp, Homo sapien
gtctccaaagctggacttagaaagt

SEQ ID NO: 2488063 - DNA, 25 bp, Homo sapien
cactctaagccagcattatgagaaa

SEQ ID NO: 2488064 - DNA, 25 bp, Homo sapien
gagaaacgttattgaggagatgcat

SEQ ID NO: 2488065 - DNA, 25 bp, Homo sapien
catggagtggaggtgtctcacaccc

SEQ ID NO: 2488066 - DNA, 25 bp, Homo sapien
aaagctttgggtacatggagtggag

SEQ ID NO: 2488067 - DNA, 25 bp, Homo sapien
gtgtctcacacccttggcacagctg

SEQ ID NO: 2488068 - DNA, 25 bp, Homo sapien
gagtggaggtgtctcacacccttgg

SEQ ID NO: 2488069 - DNA, 25 bp, Homo sapien
gagtcccagcacagtaatatcggat

SEQ ID NO: 2488070 - DNA, 25 bp, Homo sapien
agctgagcaaagaggagtcccagca

SEQ ID NO: 2488071 - DNA, 25 bp, Homo sapien
aatatcggatggtccaactatctga

SEQ ID NO: 2488072 - DNA, 25 bp, Homo sapien
tttgagtttagttgatgagagctga

SEQ ID NO: 2488073 - DNA, 25 bp, Homo sapien
cagtttgagacacctttaggtgggt

SEQ ID NO: 2488074 - DNA, 25 bp, Homo sapien
aaactgtgtgccatctttgaggagc

SEQ ID NO: 2488075 - DNA, 25 bp, Homo sapien
atgagaaactgtgtgccatctttga

SEQ ID NO: 2488076 - DNA, 25 bp, Homo sapien
agacacctttaggtgggtgatgaga

SEQ ID NO: 2488077 - DNA, 25 bp, Homo sapien
caccaatttcccacgctagctgtga

SEQ ID NO: 2488078 - DNA, 25 bp, Homo sapien
ctagctgtgagaagttcatgggatg

SEQ ID NO: 2488079 - DNA, 25 bp, Homo sapien
gctagtggctagcacaaatgcaaga

SEQ ID NO: 2488080 - DNA, 25 bp, Homo sapien
ctacagaaaaccgtgaataaatggc

SEQ ID NO: 2488081 - DNA, 25 bp, Homo sapien
gatttgaaagtagctccataggaaa

SEQ ID NO: 2488082 - DNA, 25 bp, Homo sapien
tacatccatacatcagtctcagtgt

SEQ ID NO: 2488083 - DNA, 25 bp, Homo sapien
catcgtcttggtagcagaggcactc

SEQ ID NO: 2488084 - DNA, 25 bp, Homo sapien
tcttctataaaactttgcagagata

SEQ ID NO: 2488085 - DNA, 25 bp, Homo sapien
gcttctgcctccttggcacactcac

SEQ ID NO: 2488086 - DNA, 25 bp, Homo sapien
ctgggcttctgcctccttggcacac

SEQ ID NO: 2488087 - DNA, 25 bp, Homo sapien
tcagcgccagtgagcttcctgggct

SEQ ID NO: 2488088 - DNA, 25 bp, Homo sapien
tgggcttctgcctccttggcacact

SEQ ID NO: 2488089 - DNA, 25 bp, Homo sapien
tgtaggtcatctgctcaggtttagg

SEQ ID NO: 2488090 - DNA, 25 bp, Homo sapien
taggtcatctgctcaggtttaggct

SEQ ID NO: 2488091 - DNA, 25 bp, Homo sapien
ttgtaggtcatctgctcaggtttag

SEQ ID NO: 2488092 - DNA, 25 bp, Homo sapien
aggtcatctgctcaggtttaggctt

SEQ ID NO: 2488093 - DNA, 25 bp, Homo sapien
tgaacaggaacaaatgcctgtggct

SEQ ID NO: 2488094 - DNA, 25 bp, Homo sapien
tgtggctgggccagcgaacccataa

SEQ ID NO: 2488095 - DNA, 25 bp, Homo sapien
aacatcctttcagactgagggttcc

SEQ ID NO: 2488096 - DNA, 25 bp, Homo sapien
tccaccaacatcctttcagactgag

SEQ ID NO: 2488097 - DNA, 25 bp, Homo sapien
ctgagggttcccctccggagcttct

SEQ ID NO: 2488098 - DNA, 25 bp, Homo sapien
tgagggttcccctccggagcttctg

SEQ ID NO: 2488099 - DNA, 25 bp, Homo sapien
tcatgggtgccaagtgctaggagcc

SEQ ID NO: 2488100 - DNA, 25 bp, Homo sapien
gctaggagcctaaatcaggccttct

SEQ ID NO: 2488101 - DNA, 25 bp, Homo sapien
tatagggctgggtagataggaactc

SEQ ID NO: 2488102 - DNA, 25 bp, Homo sapien
tctgagagacgtaatggcagaggcc

SEQ ID NO: 2488103 - DNA, 25 bp, Homo sapien
agagcgacatgaagaaaatttcaca

SEQ ID NO: 2488104 - DNA, 25 bp, Homo sapien
gagcgacatgaagaaaatttcacag

SEQ ID NO: 2488105 - DNA, 25 bp, Homo sapien
gagagcgacatgaagaaaatttcac

SEQ ID NO: 2488106 - DNA, 25 bp, Homo sapien
gtagcctatggcgtgatgaaggata

SEQ ID NO: 2488107 - DNA, 25 bp, Homo sapien
gaaggataaacagtgagtaacagct

SEQ ID NO: 2488108 - DNA, 25 bp, Homo sapien
gcctatggcgtgatgaaggataaac

SEQ ID NO: 2488109 - DNA, 25 bp, Homo sapien
tggtgttaggagtgtagcctatggc

SEQ ID NO: 2488110 - DNA, 25 bp, Homo sapien
tgccttcaaaaagttcttattattg

SEQ ID NO: 2488111 - DNA, 25 bp, Homo sapien
acattgccttcaaaaagttcttatt

SEQ ID NO: 2488112 - DNA, 25 bp, Homo sapien
aatgacattgccttcaaaaagttct

SEQ ID NO: 2488113 - DNA, 25 bp, Homo sapien
atgacattgccttcaaaaagttctt

SEQ ID NO: 2488114 - DNA, 25 bp, Homo sapien
gtgggggtaacatgaggtgctccct

SEQ ID NO: 2488115 - DNA, 25 bp, Homo sapien
agtgggggtaacatgaggtgctccc

SEQ ID NO: 2488116 - DNA, 25 bp, Homo sapien
caggattcagattaggacttgatgt

SEQ ID NO: 2488117 - DNA, 25 bp, Homo sapien
gattcagattaggacttgatgtttt

SEQ ID NO: 2488118 - DNA, 25 bp, Homo sapien
cccaggattcagattaggacttgat

SEQ ID NO: 2488119 - DNA, 25 bp, Homo sapien
ccccaggattcagattaggacttga

SEQ ID NO: 2488120 - DNA, 25 bp, Homo sapien
taatacctgggcaaaataatttggc

SEQ ID NO: 2488121 - DNA, 25 bp, Homo sapien
tacctatactacagatctgtacatg

SEQ ID NO: 2488122 - DNA, 25 bp, Homo sapien
tttacctatactacagatctgtaca

SEQ ID NO: 2488123 - DNA, 25 bp, Homo sapien
ttacctatactacagatctgtacat

SEQ ID NO: 2488124 - DNA, 25 bp, Homo sapien
tggatggcgggggagccgttcaccc

SEQ ID NO: 2488125 - DNA, 25 bp, Homo sapien
tttggtaaagtctgtttggatggcg

SEQ ID NO: 2488126 - DNA, 25 bp, Homo sapien
gatggcgggggagccgttcacccat

SEQ ID NO: 2488127 - DNA, 25 bp, Homo sapien
tttggatggcgggggagccgttcac

SEQ ID NO: 2488128 - DNA, 25 bp, Homo sapien
tgcatcgtgcatagaattttgtaca

SEQ ID NO: 2488129 - DNA, 25 bp, Homo sapien
aataaccaagttgcatcgtgcatag

SEQ ID NO: 2488130 - DNA, 25 bp, Homo sapien
gttgaagtaacaggcataaaataca

SEQ ID NO: 2488131 - DNA, 25 bp, Homo sapien
cattttggtcatgaacaaataacca

SEQ ID NO: 2488132 - DNA, 25 bp, Homo sapien
tataggatatcccaatctcctaagg

SEQ ID NO: 2488133 - DNA, 25 bp, Homo sapien
cttgtgtttgcattaagctggtgga

SEQ ID NO: 2488134 - DNA, 25 bp, Homo sapien
cctaaggaaattcatgacgtgggtc

SEQ ID NO: 2488135 - DNA, 25 bp, Homo sapien
tgctatgggagtacatttacatggc

SEQ ID NO: 2488136 - DNA, 25 bp, Homo sapien
gatccagtcttccatattcgactag

SEQ ID NO: 2488137 - DNA, 25 bp, Homo sapien
gaggagagacatcaacggcgaagct

SEQ ID NO: 2488138 - DNA, 25 bp, Homo sapien
caagctgaaagaggccgaaaaacaa

SEQ ID NO: 2488139 - DNA, 25 bp, Homo sapien
agagagcaagctgaaagaggccgaa

SEQ ID NO: 2488140 - DNA, 25 bp, Homo sapien
ttctggatccagtgcgagtcatcct

SEQ ID NO: 2488141 - DNA, 25 bp, Homo sapien
ggatccagtgcgagtcatcctccca

SEQ ID NO: 2488142 - DNA, 25 bp, Homo sapien
caccatatttctgggaccatttgtt

SEQ ID NO: 2488143 - DNA, 25 bp, Homo sapien
gtgcgagtcatcctcccagctgtgg

SEQ ID NO: 2488144 - DNA, 25 bp, Homo sapien
taagtacctgaatgctctgacaaaa

SEQ ID NO: 2488145 - DNA, 25 bp, Homo sapien
taatctctatgagagggcgcttcac

SEQ ID NO: 2488146 - DNA, 25 bp, Homo sapien
gactttgcccaggtcggtccttata

SEQ ID NO: 2488147 - DNA, 25 bp, Homo sapien
taaatgtggcaagtgaaaggactct

SEQ ID NO: 2488148 - DNA, 25 bp, Homo sapien
gaactggaatgtggatgggattctc

SEQ ID NO: 2488149 - DNA, 25 bp, Homo sapien
tctgtttgtctgttgcaaatcaaaa

SEQ ID NO: 2488150 - DNA, 25 bp, Homo sapien
caatgagataccatctcacaccagt

SEQ ID NO: 2488151 - DNA, 25 bp, Homo sapien
gtttgtctgttgcaaatcaaaacta

SEQ ID NO: 2488152 - DNA, 25 bp, Homo sapien
tagaatggcaatcattaaaaagtca

SEQ ID NO: 2488153 - DNA, 25 bp, Homo sapien
gactcgatggaaggaggtagaacct

SEQ ID NO: 2488154 - DNA, 25 bp, Homo sapien
ggtagaacctctgctgttactgctt

SEQ ID NO: 2488155 - DNA, 25 bp, Homo sapien
aaggaggtagaacctctgctgttac

SEQ ID NO: 2488156 - DNA, 25 bp, Homo sapien
cgatggaaggaggtagaacctctgc

SEQ ID NO: 2488157 - DNA, 25 bp, Homo sapien
cgaactcctccaaagatccgttatt

SEQ ID NO: 2488158 - DNA, 25 bp, Homo sapien
gatccgttattcaataactgcctag

SEQ ID NO: 2488159 - DNA, 25 bp, Homo sapien
tattcaataactgcctagaaaatgt

SEQ ID NO: 2488160 - DNA, 25 bp, Homo sapien
tcctccaaagatccgttattcaata

SEQ ID NO: 2488161 - DNA, 25 bp, Homo sapien
gttttggttttgtatgtgggctcta

SEQ ID NO: 2488162 - DNA, 25 bp, Homo sapien
tgtatgtgggctctatgtaactccc

SEQ ID NO: 2488163 - DNA, 25 bp, Homo sapien
gtaactcccatagtcagctgaactc

SEQ ID NO: 2488164 - DNA, 25 bp, Homo sapien
tatgtaactcccatagtcagctgaa

SEQ ID NO: 2488165 - DNA, 25 bp, Homo sapien
cagattccagagataagacaaggtg

SEQ ID NO: 2488166 - DNA, 25 bp, Homo sapien
cctacggtggaacgaggattgcctt

SEQ ID NO: 2488167 - DNA, 25 bp, Homo sapien
tctctgatgtgtccacctacggtgg

SEQ ID NO: 2488168 - DNA, 25 bp, Homo sapien
taatgaggccttgaggtgttctgcc

SEQ ID NO: 2488169 - DNA, 25 bp, Homo sapien
tagagctccatgttcacgttcagtg

SEQ ID NO: 2488170 - DNA, 25 bp, Homo sapien
gcacatcttcgtacaacataatctg

SEQ ID NO: 2488171 - DNA, 25 bp, Homo sapien
gtgtcaacaccattcaacagctttg

SEQ ID NO: 2488172 - DNA, 25 bp, Homo sapien
tgagtggcgctttgtagagctccat

SEQ ID NO: 2488173 - DNA, 25 bp, Homo sapien
tacccaggcgtaaatagagctccct

SEQ ID NO: 2488174 - DNA, 25 bp, Homo sapien
caggaaatgtgcttaggactcagtc

SEQ ID NO: 2488175 - DNA, 25 bp, Homo sapien
cagtggatatagtgctccaagagtc

SEQ ID NO: 2488176 - DNA, 25 bp, Homo sapien
catttaggaatgacatagcctctgg

SEQ ID NO: 2488177 - DNA, 25 bp, Homo sapien
gagctttcacttaccctagtatacg

SEQ ID NO: 2488178 - DNA, 25 bp, Homo sapien
ttgtcagatccataaagcaaactgg

SEQ ID NO: 2488179 - DNA, 25 bp, Homo sapien
cagggtgactttggcgaagttttgt

SEQ ID NO: 2488180 - DNA, 25 bp, Homo sapien
tgggctggagagtcaggcttggtgc

SEQ ID NO: 2488181 - DNA, 25 bp, Homo sapien
gtttgatcaattgcggtaccggtag

SEQ ID NO: 2488182 - DNA, 25 bp, Homo sapien
tacctaattgtgtcaatgtacatct

SEQ ID NO: 2488183 - DNA, 25 bp, Homo sapien
catctgtagtatgtacatgtgaaag

SEQ ID NO: 2488184 - DNA, 25 bp, Homo sapien
tgtcctttcctgtcggtttgatcaa

SEQ ID NO: 2488185 - DNA, 25 bp, Homo sapien
tgctgcccactcgagtgtttcgaag

SEQ ID NO: 2488186 - DNA, 25 bp, Homo sapien
tgcccactcgagtgtttcgaagctt

SEQ ID NO: 2488187 - DNA, 25 bp, Homo sapien
gctgcccactcgagtgtttcgaagc

SEQ ID NO: 2488188 - DNA, 25 bp, Homo sapien
ctgcccactcgagtgtttcgaagct

SEQ ID NO: 2488189 - DNA, 25 bp, Homo sapien
tcctgtgcctcggtgctcagtaatg

SEQ ID NO: 2488190 - DNA, 25 bp, Homo sapien
cttcctgtgcctcggtgctcagtaa

SEQ ID NO: 2488191 - DNA, 25 bp, Homo sapien
cctgtgcctcggtgctcagtaatgt

SEQ ID NO: 2488192 - DNA, 25 bp, Homo sapien
gccttcctgtgcctcggtgctcagt

SEQ ID NO: 2488193 - DNA, 25 bp, Homo sapien
cctgtcggtcctcagactgtctcgt

SEQ ID NO: 2488194 - DNA, 25 bp, Homo sapien
cttgtagacgtgattgtgcctttct

SEQ ID NO: 2488195 - DNA, 25 bp, Homo sapien
gtgattgtgcctttctcacccctgt

SEQ ID NO: 2488196 - DNA, 25 bp, Homo sapien
atcagtcccccgctcatgtgctgct

SEQ ID NO: 2488197 - DNA, 25 bp, Homo sapien
ttggaaatagggtgtcctgcacagg

SEQ ID NO: 2488198 - DNA, 25 bp, Homo sapien
tggaaatagggtgtcctgcacaggg

SEQ ID NO: 2488199 - DNA, 25 bp, Homo sapien
tttggaaatagggtgtcctgcacag

SEQ ID NO: 2488200 - DNA, 25 bp, Homo sapien
agcacagtactggacaacatccctg

SEQ ID NO: 2488201 - DNA, 25 bp, Homo sapien
ttttgagagctgtgtccaaagcaca

SEQ ID NO: 2488202 - DNA, 25 bp, Homo sapien
ccttggtcctgtactgatatgctga

SEQ ID NO: 2488203 - DNA, 25 bp, Homo sapien
gatgcagtagttgtctccttggtcc

SEQ ID NO: 2488204 - DNA, 25 bp, Homo sapien
cagcagcttcctccgaagcagcgaa

SEQ ID NO: 2488205 - DNA, 25 bp, Homo sapien
ctgcagggtaaacacagcagcagct

SEQ ID NO: 2488206 - DNA, 25 bp, Homo sapien
cagcagcagcttcctccgaagcagc

SEQ ID NO: 2488207 - DNA, 25 bp, Homo sapien
tgcagggtaaacacagcagcagctt

SEQ ID NO: 2488208 - DNA, 25 bp, Homo sapien
ttcatgccctttcttccctgcaggg

SEQ ID NO: 2488209 - DNA, 25 bp, Homo sapien
cttcatgccctttcttccctgcagg

SEQ ID NO: 2488210 - DNA, 25 bp, Homo sapien
gccctttcttccctgcaggggacat

SEQ ID NO: 2488211 - DNA, 25 bp, Homo sapien
catgccctttcttccctgcagggga

SEQ ID NO: 2488212 - DNA, 25 bp, Homo sapien
attgccatgacaactagtactccat

SEQ ID NO: 2488213 - DNA, 25 bp, Homo sapien
gacaactagtactccatcattgcca

SEQ ID NO: 2488214 - DNA, 25 bp, Homo sapien
catgacaactagtactccatcattg

SEQ ID NO: 2488215 - DNA, 25 bp, Homo sapien
aactagtactccatcattgccatgg

SEQ ID NO: 2488216 - DNA, 25 bp, Homo sapien
tgctaaagcaatggacttgaaagtg

SEQ ID NO: 2488217 - DNA, 25 bp, Homo sapien
gctaaagcaatggacttgaaagtgc

SEQ ID NO: 2488218 - DNA, 25 bp, Homo sapien
gttgctaaagcaatggacttgaaag

SEQ ID NO: 2488219 - DNA, 25 bp, Homo sapien
gagttgctaaagcaatggacttgaa

SEQ ID NO: 2488220 - DNA, 25 bp, Homo sapien
cagggatttttatcttgcgggccca

SEQ ID NO: 2488221 - DNA, 25 bp, Homo sapien
cctatttggacttcatcaagagctt

SEQ ID NO: 2488222 - DNA, 25 bp, Homo sapien
tagcctatttggacttcatcaagag

SEQ ID NO: 2488223 - DNA, 25 bp, Homo sapien
aatagcctatttggacttcatcaag

SEQ ID NO: 2488224 - DNA, 25 bp, Homo sapien
tctagacctaagctggatcaaccgg

SEQ ID NO: 2488225 - DNA, 25 bp, Homo sapien
cagattctgacattaggagggacta

SEQ ID NO: 2488226 - DNA, 25 bp, Homo sapien
gcagaattcactctctagggacaaa

SEQ ID NO: 2488227 - DNA, 25 bp, Homo sapien
tatttcaagcatcaaccaagcagac

SEQ ID NO: 2488228 - DNA, 25 bp, Homo sapien
tctggagaagcagcttagaataatt

SEQ ID NO: 2488229 - DNA, 25 bp, Homo sapien
ggcaaaaggccacgaaataattgca

SEQ ID NO: 2488230 - DNA, 25 bp, Homo sapien
caaaaggccacgaaataattgcatt

SEQ ID NO: 2488231 - DNA, 25 bp, Homo sapien
cagcttagaataattcaggcaaaag

SEQ ID NO: 2488232 - DNA, 25 bp, Homo sapien
ggtcaccctattagtatcaacactg

SEQ ID NO: 2488233 - DNA, 25 bp, Homo sapien
tacatacagcaatgcttggccgcag

SEQ ID NO: 2488234 - DNA, 25 bp, Homo sapien
ccttgtgtgttcatgaagtggctag

SEQ ID NO: 2488235 - DNA, 25 bp, Homo sapien
ggtcagagactactggtgtatgtcc

SEQ ID NO: 2488236 - DNA, 25 bp, Homo sapien
cattcacctgaaggaattccctggg

SEQ ID NO: 2488237 - DNA, 25 bp, Homo sapien
aaagcctttgttacacacatgatct

SEQ ID NO: 2488238 - DNA, 25 bp, Homo sapien
tccctgggaaagtagtgaagtacca

SEQ ID NO: 2488239 - DNA, 25 bp, Homo sapien
tctagatcaaaagggtggacattca

SEQ ID NO: 2488240 - DNA, 25 bp, Homo sapien
tatgctttacttacacctctctcgg

SEQ ID NO: 2488241 - DNA, 25 bp, Homo sapien
tcaatgttgtaaaatctgctgagac

SEQ ID NO: 2488242 - DNA, 25 bp, Homo sapien
ttccagtacagtctatgacagctgc

SEQ ID NO: 2488243 - DNA, 25 bp, Homo sapien
tcttggcagaacacaatagagagga

SEQ ID NO: 2488244 - DNA, 25 bp, Homo sapien
ataaaaaataggccagtagattctt

SEQ ID NO: 2488245 - DNA, 25 bp, Homo sapien
taaaaaataggccagtagattcttg

SEQ ID NO: 2488246 - DNA, 25 bp, Homo sapien
aataaaaaataggccagtagattct

SEQ ID NO: 2488247 - DNA, 25 bp, Homo sapien
tgccaggcagtccaccctaggtggg

SEQ ID NO: 2488248 - DNA, 25 bp, Homo sapien
tgttgctggcatacctgctgtggac

SEQ ID NO: 2488249 - DNA, 25 bp, Homo sapien
tgggcaggcttcctacatggactct

SEQ ID NO: 2488250 - DNA, 25 bp, Homo sapien
catgggaaaaaagacgaatatgacc

SEQ ID NO: 2488251 - DNA, 25 bp, Homo sapien
aatcaataatctagaagtgaaggtc

SEQ ID NO: 2488252 - DNA, 25 bp, Homo sapien
taatctagaagtgaaggtctccaca

SEQ ID NO: 2488253 - DNA, 25 bp, Homo sapien
ttttgaatcaataatctagaagtga

SEQ ID NO: 2488254 - DNA, 25 bp, Homo sapien
agcccattatgccttcactgatcca

SEQ ID NO: 2488255 - DNA, 25 bp, Homo sapien
gaaagaaataaggcagcatgtgcta

SEQ ID NO: 2488256 - DNA, 25 bp, Homo sapien
aaagaaataaggcagcatgtgctaa

SEQ ID NO: 2488257 - DNA, 25 bp, Homo sapien
caagtacagcgtatgaagaccttca

SEQ ID NO: 2488258 - DNA, 25 bp, Homo sapien
taaccaaggagtagagccaaacatg

SEQ ID NO: 2488259 - DNA, 25 bp, Homo sapien
gtggctgaaaaaccgactgcatgct

SEQ ID NO: 2488260 - DNA, 25 bp, Homo sapien
tatgaagaggtctttcaagcgcaca

SEQ ID NO: 2488261 - DNA, 25 bp, Homo sapien
gcttataaagtgtgcaacacaggga

SEQ ID NO: 2488262 - DNA, 25 bp, Homo sapien
cattagggcaattaagaacagtttc

SEQ ID NO: 2488263 - DNA, 25 bp, Homo sapien
ggtagcccatgaccacttcctagat

SEQ ID NO: 2488264 - DNA, 25 bp, Homo sapien
cagaccaccgtagatcattagggca

SEQ ID NO: 2488265 - DNA, 25 bp, Homo sapien
caggacgtcaacttccagctggaaa

SEQ ID NO: 2488266 - DNA, 25 bp, Homo sapien
ttcagatcagatgtgcggtccgtca

SEQ ID NO: 2488267 - DNA, 25 bp, Homo sapien
tgggcagagacactacagctggata

SEQ ID NO: 2488268 - DNA, 25 bp, Homo sapien
gaagcagtcgtttgtcggctcagag

SEQ ID NO: 2488269 - DNA, 25 bp, Homo sapien
cataggcatatgtgtaccacagtgg

SEQ ID NO: 2488270 - DNA, 25 bp, Homo sapien
ccatggcagaaggaggtatttataa

SEQ ID NO: 2488271 - DNA, 25 bp, Homo sapien
gtttgctgcacccaaagtgataaat

SEQ ID NO: 2488272 - DNA, 25 bp, Homo sapien
aattacccagagatttgccccactg

SEQ ID NO: 2488273 - DNA, 25 bp, Homo sapien
gattccatgctattcatcacactca

SEQ ID NO: 2488274 - DNA, 25 bp, Homo sapien
tcatctgtgaaagcagactagacac

SEQ ID NO: 2488275 - DNA, 25 bp, Homo sapien
ttaacaccattctactgtgaacaca

SEQ ID NO: 2488276 - DNA, 25 bp, Homo sapien
tttttaatacaaaggtatttcagca

SEQ ID NO: 2488277 - DNA, 25 bp, Homo sapien
tcatgatggcatccaaaaggccaac

SEQ ID NO: 2488278 - DNA, 25 bp, Homo sapien
aaggagttcttccacgtgaggagca

SEQ ID NO: 2488279 - DNA, 25 bp, Homo sapien
tgtgctgagggtgtacatcttctca

SEQ ID NO: 2488280 - DNA, 25 bp, Homo sapien
tagatggtgcggatggaatccttcc

SEQ ID NO: 2488281 - DNA, 25 bp, Homo sapien
gagctcagtaagttttcatctacca

SEQ ID NO: 2488282 - DNA, 25 bp, Homo sapien
cattgagctcagtaagttttcatct

SEQ ID NO: 2488283 - DNA, 25 bp, Homo sapien
tccaaacccattgagctcagtaagt

SEQ ID NO: 2488284 - DNA, 25 bp, Homo sapien
aacccattgagctcagtaagttttc

SEQ ID NO: 2488285 - DNA, 25 bp, Homo sapien
ccaagggattccaaaggaaatcagc

SEQ ID NO: 2488286 - DNA, 25 bp, Homo sapien
gaaaatcttagcactcttgacaagg

SEQ ID NO: 2488287 - DNA, 25 bp, Homo sapien
gaaaacagactactgggatcccagg

SEQ ID NO: 2488288 - DNA, 25 bp, Homo sapien
attctgcacccaccaaagggccaga

SEQ ID NO: 2488289 - DNA, 25 bp, Homo sapien
tggctgcagcgtcactaattaaaac

SEQ ID NO: 2488290 - DNA, 25 bp, Homo sapien
tctgggaatgccgagtcgagcctgc

SEQ ID NO: 2488291 - DNA, 25 bp, Homo sapien
taggactctaaatgtgactctcggg

SEQ ID NO: 2488292 - DNA, 25 bp, Homo sapien
tgcacgaggcaaaagggcaaaccct

SEQ ID NO: 2488293 - DNA, 25 bp, Homo sapien
ccactgccgactggggaatataccc

SEQ ID NO: 2488294 - DNA, 25 bp, Homo sapien
acagagacgggaaacccaagccact

SEQ ID NO: 2488295 - DNA, 25 bp, Homo sapien
caagccactgccgactggggaatat

SEQ ID NO: 2488296 - DNA, 25 bp, Homo sapien
cagagacgggaaacccaagccactg

SEQ ID NO: 2488297 - DNA, 25 bp, Homo sapien
gtaggtgaggctgtgatagaccttc

SEQ ID NO: 2488298 - DNA, 25 bp, Homo sapien
gctcttgttggcctctcgttccttc

SEQ ID NO: 2488299 - DNA, 25 bp, Homo sapien
tgtgatagaccttctcggccgcggc

SEQ ID NO: 2488300 - DNA, 25 bp, Homo sapien
ttagccttgtcgtaagagaagatac

SEQ ID NO: 2488301 - DNA, 25 bp, Homo sapien
ccaggtgagagaagaacgtctccag

SEQ ID NO: 2488302 - DNA, 25 bp, Homo sapien
aagaacgtctccagcaccgcctgtt

SEQ ID NO: 2488303 - DNA, 25 bp, Homo sapien
tgagagaagaacgtctccagcaccg

SEQ ID NO: 2488304 - DNA, 25 bp, Homo sapien
gggcggccagcgggatagactcccc

SEQ ID NO: 2488305 - DNA, 25 bp, Homo sapien
cgagctgcgccccagctcgacccac

SEQ ID NO: 2488306 - DNA, 25 bp, Homo sapien
agctgcgccccagctcgacccacgt

SEQ ID NO: 2488307 - DNA, 25 bp, Homo sapien
ccagctcgacccacgtggctctcct

SEQ ID NO: 2488308 - DNA, 25 bp, Homo sapien
gcgccccagctcgacccacgtggct

SEQ ID NO: 2488309 - DNA, 25 bp, Homo sapien
gggaccgctcctgggccttagagaa

SEQ ID NO: 2488310 - DNA, 25 bp, Homo sapien
ccttagagaagacgcggataagggc

SEQ ID NO: 2488311 - DNA, 25 bp, Homo sapien
aacgggcttgcgcacaagcgtgcgt

SEQ ID NO: 2488312 - DNA, 25 bp, Homo sapien
cggttgctgagctccttcggcgctt

SEQ ID NO: 2488313 - DNA, 25 bp, Homo sapien
tagaataggaggcggccagttcccc

SEQ ID NO: 2488314 - DNA, 25 bp, Homo sapien
gtagaataggaggcggccagttccc

SEQ ID NO: 2488315 - DNA, 25 bp, Homo sapien
agaataggaggcggccagttccccg

SEQ ID NO: 2488316 - DNA, 25 bp, Homo sapien
gaataggaggcggccagttccccgc

SEQ ID NO: 2488317 - DNA, 25 bp, Homo sapien
ctagccctgccaaaggaagacctca

SEQ ID NO: 2488318 - DNA, 25 bp, Homo sapien
tccagccattgagaaataagctcaa

SEQ ID NO: 2488319 - DNA, 25 bp, Homo sapien
gagaaataagctcaagttttgtgag

SEQ ID NO: 2488320 - DNA, 25 bp, Homo sapien
cattgagaaataagctcaagttttg

SEQ ID NO: 2488321 - DNA, 25 bp, Homo sapien
cagccattgagaaataagctcaagt

SEQ ID NO: 2488322 - DNA, 25 bp, Homo sapien
ttccagataaaatgggacagccaaa

SEQ ID NO: 2488323 - DNA, 25 bp, Homo sapien
aatgggacagccaaagctggtatca

SEQ ID NO: 2488324 - DNA, 25 bp, Homo sapien
taaaatgggacagccaaagctggta

SEQ ID NO: 2488325 - DNA, 25 bp, Homo sapien
ccttccagataaaatgggacagcca

SEQ ID NO: 2488326 - DNA, 25 bp, Homo sapien
tccaccgttagtggattagatgccc

SEQ ID NO: 2488327 - DNA, 25 bp, Homo sapien
gccctagctctgcaatgtgtacatc

SEQ ID NO: 2488328 - DNA, 25 bp, Homo sapien
gcaatgtgtacatcactccatgtca

SEQ ID NO: 2488329 - DNA, 25 bp, Homo sapien
gattagatgccctttcataaccttc

SEQ ID NO: 2488330 - DNA, 25 bp, Homo sapien
tttctttgttccacatgactgtgta

SEQ ID NO: 2488331 - DNA, 25 bp, Homo sapien
caggaaaatccccagtcgagagtca

SEQ ID NO: 2488332 - DNA, 25 bp, Homo sapien
gcacggataggtccacatgctcttg

SEQ ID NO: 2488333 - DNA, 25 bp, Homo sapien
ccagtcgagagtcagcacggatagg

SEQ ID NO: 2488334 - DNA, 25 bp, Homo sapien
gagtcagcacggataggtccacatg

SEQ ID NO: 2488335 - DNA, 25 bp, Homo sapien
gagtaggggaactactgaggtctga

SEQ ID NO: 2488336 - DNA, 25 bp, Homo sapien
ctactgaggtctgagtcacaaaagg

SEQ ID NO: 2488337 - DNA, 25 bp, Homo sapien
ggagtaggggaactactgaggtctg

SEQ ID NO: 2488338 - DNA, 25 bp, Homo sapien
tactgaggtctgagtcacaaaagga

SEQ ID NO: 2488339 - DNA, 25 bp, Homo sapien
tagccccacataaaaagattcagat

SEQ ID NO: 2488340 - DNA, 25 bp, Homo sapien
gcatgactactagcccagatccagg

SEQ ID NO: 2488341 - DNA, 25 bp, Homo sapien
tcatcctgcgggttcatcagtacat

SEQ ID NO: 2488342 - DNA, 25 bp, Homo sapien
cactgcggagaagctaaggcagagc

SEQ ID NO: 2488343 - DNA, 25 bp, Homo sapien
tccataggcttctgttcccttgata

SEQ ID NO: 2488344 - DNA, 25 bp, Homo sapien
ggagaaacgctactgtttagcacca

SEQ ID NO: 2488345 - DNA, 25 bp, Homo sapien
aatggatgtaggtttctttgtagca

SEQ ID NO: 2488346 - DNA, 25 bp, Homo sapien
tgtcagaatggatgtaggtttcttt

SEQ ID NO: 2488347 - DNA, 25 bp, Homo sapien
ctggaggcgtggctggcggatgaga

SEQ ID NO: 2488348 - DNA, 25 bp, Homo sapien
tggaggcgtggctggcggatgagat

SEQ ID NO: 2488349 - DNA, 25 bp, Homo sapien
aattccagaagtggcgtggatgcgc

SEQ ID NO: 2488350 - DNA, 25 bp, Homo sapien
ttgagtgagtgaccttaggcccaga

SEQ ID NO: 2488351 - DNA, 25 bp, Homo sapien
ctccaagaacctagtcgaaataatg

SEQ ID NO: 2488352 - DNA, 25 bp, Homo sapien
gtgagtgaccttaggcccagaccaa

SEQ ID NO: 2488353 - DNA, 25 bp, Homo sapien
actcttattaacattgcgtacattg

SEQ ID NO: 2488354 - DNA, 25 bp, Homo sapien
tttataggactcagagatagccaga

SEQ ID NO: 2488355 - DNA, 25 bp, Homo sapien
ttctcgtgaatatcaagttgactct

SEQ ID NO: 2488356 - DNA, 25 bp, Homo sapien
tctcatagagaggtattgatggaac

SEQ ID NO: 2488357 - DNA, 25 bp, Homo sapien
taggttgagtgatggggtaacacaa

SEQ ID NO: 2488358 - DNA, 25 bp, Homo sapien
tgaaaaagttgaatggtaggttgag

SEQ ID NO: 2488359 - DNA, 25 bp, Homo sapien
caatgggagccttttctgcaaggct

SEQ ID NO: 2488360 - DNA, 25 bp, Homo sapien
aacacaatgggagccttttctgcaa

SEQ ID NO: 2488361 - DNA, 25 bp, Homo sapien
ttcttggtttatcaggcaatgcgca

SEQ ID NO: 2488362 - DNA, 25 bp, Homo sapien
gactactagggccaagtcaagaggg

SEQ ID NO: 2488363 - DNA, 25 bp, Homo sapien
ttatcaggcaatgcgcagtgaggtg

SEQ ID NO: 2488364 - DNA, 25 bp, Homo sapien
gaaagggtcaagctgtggtgactac

SEQ ID NO: 2488365 - DNA, 25 bp, Homo sapien
tacaacagaactgcttggcagggac

SEQ ID NO: 2488366 - DNA, 25 bp, Homo sapien
cttgaggatgtaaaattgctggtac

SEQ ID NO: 2488367 - DNA, 25 bp, Homo sapien
gctgtgccgcagacagctcttgagg

SEQ ID NO: 2488368 - DNA, 25 bp, Homo sapien
taatatactcagctagagtcctgct

SEQ ID NO: 2488369 - DNA, 25 bp, Homo sapien
tgtagaaaggacattatccagctaa

SEQ ID NO: 2488370 - DNA, 25 bp, Homo sapien
tatccagctaatagcaaactttgtg

SEQ ID NO: 2488371 - DNA, 25 bp, Homo sapien
ttgtggatcccaatccgagatttcc

SEQ ID NO: 2488372 - DNA, 25 bp, Homo sapien
caaactttgtggatcccaatccgag

SEQ ID NO: 2488373 - DNA, 25 bp, Homo sapien
aaagtgctgtagcagtatttgtata

SEQ ID NO: 2488374 - DNA, 25 bp, Homo sapien
tgtatactccagaataagcttctgt

SEQ ID NO: 2488375 - DNA, 25 bp, Homo sapien
gtatctcatataaaagtgctgtagc

SEQ ID NO: 2488376 - DNA, 25 bp, Homo sapien
ttgtatactccagaataagcttctg

SEQ ID NO: 2488377 - DNA, 25 bp, Homo sapien
gactaaagctgaatcagccaccaac

SEQ ID NO: 2488378 - DNA, 25 bp, Homo sapien
atcagccaccaactggatatcaaac

SEQ ID NO: 2488379 - DNA, 25 bp, Homo sapien
aatctgaggctcactaattaaaatt

SEQ ID NO: 2488380 - DNA, 25 bp, Homo sapien
tctgactaaagctgaatcagccacc

SEQ ID NO: 2488381 - DNA, 25 bp, Homo sapien
gccaatgtgttcaggcgtgatgact

SEQ ID NO: 2488382 - DNA, 25 bp, Homo sapien
gaacatcaatactagggtctgtata

SEQ ID NO: 2488383 - DNA, 25 bp, Homo sapien
gttcaggcgtgatgactcggtttct

SEQ ID NO: 2488384 - DNA, 25 bp, Homo sapien
tctctgaacatcaatactagggtct

SEQ ID NO: 2488385 - DNA, 25 bp, Homo sapien
ttatccctagactccggcaagtact

SEQ ID NO: 2488386 - DNA, 25 bp, Homo sapien
tccggcaagtactcatgaagtttgt

SEQ ID NO: 2488387 - DNA, 25 bp, Homo sapien
tttgtagtgcattcttatccctaga

SEQ ID NO: 2488388 - DNA, 25 bp, Homo sapien
accagctcatcaaccctttggcttt

SEQ ID NO: 2488389 - DNA, 25 bp, Homo sapien
ctatgaaatagaaaaggtcactggt

SEQ ID NO: 2488390 - DNA, 25 bp, Homo sapien
caaggacatagaggaatcgaaaccc

SEQ ID NO: 2488391 - DNA, 25 bp, Homo sapien
catcgatagttgcacaaggccagga

SEQ ID NO: 2488392 - DNA, 25 bp, Homo sapien
caaagggcacaaggtgacattctgg

SEQ ID NO: 2488393 - DNA, 25 bp, Homo sapien
tggagtgacagagacgctctaaatc

SEQ ID NO: 2488394 - DNA, 25 bp, Homo sapien
gaatatgcatgcattgtgttttggc

SEQ ID NO: 2488395 - DNA, 25 bp, Homo sapien
agcacctggaatatgcatgcattgt

SEQ ID NO: 2488396 - DNA, 25 bp, Homo sapien
ctggaatatgcatgcattgtgtttt

SEQ ID NO: 2488397 - DNA, 25 bp, Homo sapien
gcacctggaatatgcatgcattgtg

SEQ ID NO: 2488398 - DNA, 25 bp, Homo sapien
ctttgggcactgtgccttttccatg

SEQ ID NO: 2488399 - DNA, 25 bp, Homo sapien
ccatgagcatctacatctggattca

SEQ ID NO: 2488400 - DNA, 25 bp, Homo sapien
cttttccatgagcatctacatctgg

SEQ ID NO: 2488401 - DNA, 25 bp, Homo sapien
gccttttccatgagcatctacatct

SEQ ID NO: 2488402 - DNA, 25 bp, Homo sapien
tcagatttaagttgactgaagtgct

SEQ ID NO: 2488403 - DNA, 25 bp, Homo sapien
ttttctgggctgctactttaagttc

SEQ ID NO: 2488404 - DNA, 25 bp, Homo sapien
tgaagtgcttaattttctcctcaga

SEQ ID NO: 2488405 - DNA, 25 bp, Homo sapien
tgggctgctactttaagttccataa

SEQ ID NO: 2488406 - DNA, 25 bp, Homo sapien
aggactgaactcactagcatagaag

SEQ ID NO: 2488407 - DNA, 25 bp, Homo sapien
gaagggatcttgtaaaagagtagct

SEQ ID NO: 2488408 - DNA, 25 bp, Homo sapien
cttttgacttccaatagcaggactg

SEQ ID NO: 2488409 - DNA, 25 bp, Homo sapien
tatggcttttgacttccaatagcag

SEQ ID NO: 2488410 - DNA, 25 bp, Homo sapien
gcagaaatattgatgaggttgtgga

SEQ ID NO: 2488411 - DNA, 25 bp, Homo sapien
ttttaagtgcagaaatattgatgag

SEQ ID NO: 2488412 - DNA, 25 bp, Homo sapien
tgtggaaataacatacaaatgaagt

SEQ ID NO: 2488413 - DNA, 25 bp, Homo sapien
ataacatacaaatgaagttctgact

SEQ ID NO: 2488414 - DNA, 25 bp, Homo sapien
tctgtgaaggggaatctaagaggga

SEQ ID NO: 2488415 - DNA, 25 bp, Homo sapien
ctctaaatttgagttgctctgtgaa

SEQ ID NO: 2488416 - DNA, 25 bp, Homo sapien
tctaaatttgagttgctctgtgaag

SEQ ID NO: 2488417 - DNA, 25 bp, Homo sapien
tatggagttgtgatctggaagtccc

SEQ ID NO: 2488418 - DNA, 25 bp, Homo sapien
gccttgccagttgttggtgcagact

SEQ ID NO: 2488419 - DNA, 25 bp, Homo sapien
gatggctcgctgacagccttgccag

SEQ ID NO: 2488420 - DNA, 25 bp, Homo sapien
gtgtttgttgtgcaagatggctcgc

SEQ ID NO: 2488421 - DNA, 25 bp, Homo sapien
aggacagagagttgagtccttggat

SEQ ID NO: 2488422 - DNA, 25 bp, Homo sapien
tggatggtgtactgctctcctgctg

SEQ ID NO: 2488423 - DNA, 25 bp, Homo sapien
gacgaggacagagagttgagtcctt

SEQ ID NO: 2488424 - DNA, 25 bp, Homo sapien
gagtccttggatggtgtactgctct

SEQ ID NO: 2488425 - DNA, 25 bp, Homo sapien
tccagaataattggccttaaggtta

SEQ ID NO: 2488426 - DNA, 25 bp, Homo sapien
gcagccattgtccaacaattttctt

SEQ ID NO: 2488427 - DNA, 25 bp, Homo sapien
atattaggtactgcagccattgtcc

SEQ ID NO: 2488428 - DNA, 25 bp, Homo sapien
gaatattaggtactgcagccattgt

SEQ ID NO: 2488429 - DNA, 25 bp, Homo sapien
gcaaggccgttcttttcttccttga

SEQ ID NO: 2488430 - DNA, 25 bp, Homo sapien
ttacaatccccattatatatctcaa

SEQ ID NO: 2488431 - DNA, 25 bp, Homo sapien
caagccccccgacttctggcatcat

SEQ ID NO: 2488432 - DNA, 25 bp, Homo sapien
ctgaacaagccccccgacttctggc

SEQ ID NO: 2488433 - DNA, 25 bp, Homo sapien
cctttatgttacaatccccattata

SEQ ID NO: 2488434 - DNA, 25 bp, Homo sapien
tttgcaccgcagactttaccagagg

SEQ ID NO: 2488435 - DNA, 25 bp, Homo sapien
ggacctcctggtcaatttggacatc

SEQ ID NO: 2488436 - DNA, 25 bp, Homo sapien
gcaactttgtacatagggatttcct

SEQ ID NO: 2488437 - DNA, 25 bp, Homo sapien
gaaatcttatttcctgcaacaaaca

SEQ ID NO: 2488438 - DNA, 25 bp, Homo sapien
cagggctccagcaactggtacaaac

SEQ ID NO: 2488439 - DNA, 25 bp, Homo sapien
tcagggctccagcaactggtacaaa

SEQ ID NO: 2488440 - DNA, 25 bp, Homo sapien
tggtaaggtcatccctcactctgag

SEQ ID NO: 2488441 - DNA, 25 bp, Homo sapien
tgtggtaaggtcatccctcactctg

SEQ ID NO: 2488442 - DNA, 25 bp, Homo sapien
gtaaggtcatccctcactctgagga

SEQ ID NO: 2488443 - DNA, 25 bp, Homo sapien
ctgtggtaaggtcatccctcactct

SEQ ID NO: 2488444 - DNA, 25 bp, Homo sapien
tctttgggtttgcacaaactgacct

SEQ ID NO: 2488445 - DNA, 25 bp, Homo sapien
tgcttgattcatcaaattggacatc

SEQ ID NO: 2488446 - DNA, 25 bp, Homo sapien
gcatgtcagcattgctgagagccat

SEQ ID NO: 2488447 - DNA, 25 bp, Homo sapien
catatgctttatctgcttttgcatg

SEQ ID NO: 2488448 - DNA, 25 bp, Homo sapien
gaatgtgttggctgatttctctatc

SEQ ID NO: 2488449 - DNA, 25 bp, Homo sapien
tatctggcgaactcaaaaattccgg

SEQ ID NO: 2488450 - DNA, 25 bp, Homo sapien
ttcctgacactgtttgactttttac

SEQ ID NO: 2488451 - DNA, 25 bp, Homo sapien
caaaacggttgaagaatagatgata

SEQ ID NO: 2488452 - DNA, 25 bp, Homo sapien
atcataacaagctttaagggtggta

SEQ ID NO: 2488453 - DNA, 25 bp, Homo sapien
tacatcataacaagctttaagggtg

SEQ ID NO: 2488454 - DNA, 25 bp, Homo sapien
gcctacatcataacaagctttaagg

SEQ ID NO: 2488455 - DNA, 25 bp, Homo sapien
cataacaagctttaagggtggtaca

SEQ ID NO: 2488456 - DNA, 25 bp, Homo sapien
gacccagcaagtgctaaattgtgag

SEQ ID NO: 2488457 - DNA, 25 bp, Homo sapien
cccagcaagtgctaaattgtgagac

SEQ ID NO: 2488458 - DNA, 25 bp, Homo sapien
acccagcaagtgctaaattgtgaga

SEQ ID NO: 2488459 - DNA, 25 bp, Homo sapien
ccagcaagtgctaaattgtgagaca

SEQ ID NO: 2488460 - DNA, 25 bp, Homo sapien
aagcaggccaggctgtaaaaggtgc

SEQ ID NO: 2488461 - DNA, 25 bp, Homo sapien
catttgttctagttcaagaggcctc

SEQ ID NO: 2488462 - DNA, 25 bp, Homo sapien
gaggacaaactgttcatggcaagca

SEQ ID NO: 2488463 - DNA, 25 bp, Homo sapien
caggctgtaaaaggtgcatttgttc

SEQ ID NO: 2488464 - DNA, 25 bp, Homo sapien
ttacagactcgttcaaaacaagcca

SEQ ID NO: 2488465 - DNA, 25 bp, Homo sapien
caagggaatgaaaaaacgaggctag

SEQ ID NO: 2488466 - DNA, 25 bp, Homo sapien
gctagacacctgtccccaacggaaa

SEQ ID NO: 2488467 - DNA, 25 bp, Homo sapien
aaaacagctccatcaagcgtctcgc

SEQ ID NO: 2488468 - DNA, 25 bp, Homo sapien
tccttccaagacgtttcccagcagg

SEQ ID NO: 2488469 - DNA, 25 bp, Homo sapien
ctattcctggacgaaaggggtacag

SEQ ID NO: 2488470 - DNA, 25 bp, Homo sapien
agcacccgaaaaccggcgacaggct

SEQ ID NO: 2488471 - DNA, 25 bp, Homo sapien
tggcaggcccgacgtctttcaagcc

SEQ ID NO: 2488472 - DNA, 25 bp, Homo sapien
ttaacgcatctgcttattcatgcat

SEQ ID NO: 2488473 - DNA, 25 bp, Homo sapien
agtgagccgcctgagattgccaagc

SEQ ID NO: 2488474 - DNA, 25 bp, Homo sapien
ctgcgcccagtttggatcaagtgag

SEQ ID NO: 2488475 - DNA, 25 bp, Homo sapien
gtcctgtgcgcatctcattaacgca

SEQ ID NO: 2488476 - DNA, 25 bp, Homo sapien
aaaagtaaatgagatataacagcac

SEQ ID NO: 2488477 - DNA, 25 bp, Homo sapien
acagcatttatttgcacgggtgttg

SEQ ID NO: 2488478 - DNA, 25 bp, Homo sapien
gatataacagcacttaacacacagc

SEQ ID NO: 2488479 - DNA, 25 bp, Homo sapien
gctctaagcatcgggggcaaaaaag

SEQ ID NO: 2488480 - DNA, 25 bp, Homo sapien
ttgatagggagctcggttctcaaac

SEQ ID NO: 2488481 - DNA, 25 bp, Homo sapien
gttctcaaacctgtagccctacgtg

SEQ ID NO: 2488482 - DNA, 25 bp, Homo sapien
taggagtgctcacagcaatccacag

SEQ ID NO: 2488483 - DNA, 25 bp, Homo sapien
tttgcatcctccgagtctagcacag

SEQ ID NO: 2488484 - DNA, 25 bp, Homo sapien
tgcgctcccgagcccgcctgcccac

SEQ ID NO: 2488485 - DNA, 25 bp, Homo sapien
actgcgctcccgagcccgcctgccc

SEQ ID NO: 2488486 - DNA, 25 bp, Homo sapien
cactgcgctcccgagcccgcctgcc

SEQ ID NO: 2488487 - DNA, 25 bp, Homo sapien
tcactgcgctcccgagcccgcctgc

SEQ ID NO: 2488488 - DNA, 25 bp, Homo sapien
acatccaggcggctgttcctgcgcg

SEQ ID NO: 2488489 - DNA, 25 bp, Homo sapien
tctcggttaggtagacgagccggtc

SEQ ID NO: 2488490 - DNA, 25 bp, Homo sapien
cgagccggtcgcttagcaccacata

SEQ ID NO: 2488491 - DNA, 25 bp, Homo sapien
actacccgccggatggacttgggcg

SEQ ID NO: 2488492 - DNA, 25 bp, Homo sapien
tggcggagtgctgggactcgaggcc

SEQ ID NO: 2488493 - DNA, 25 bp, Homo sapien
gcccgcagcgtggcggagtgctggg

SEQ ID NO: 2488494 - DNA, 25 bp, Homo sapien
gcgtggcggagtgctgggactcgag

SEQ ID NO: 2488495 - DNA, 25 bp, Homo sapien
cgcagcgtggcggagtgctgggact

SEQ ID NO: 2488496 - DNA, 25 bp, Homo sapien
gaacccgcgcgccacaaagccgccg

SEQ ID NO: 2488497 - DNA, 25 bp, Homo sapien
cgcaactgcaggaatcgacgctagg

SEQ ID NO: 2488498 - DNA, 25 bp, Homo sapien
gcgcgccacaaagccgccggccacg

SEQ ID NO: 2488499 - DNA, 25 bp, Homo sapien
ggccgcaactgcaggaatcgacgct

SEQ ID NO: 2488500 - DNA, 25 bp, Homo sapien
gcgcttcgcgctgactcagcggcgg

SEQ ID NO: 2488501 - DNA, 25 bp, Homo sapien
gagcgcgcttcgcgctgactcagcg

SEQ ID NO: 2488502 - DNA, 25 bp, Homo sapien
gggagcgcgcttcgcgctgactcag

SEQ ID NO: 2488503 - DNA, 25 bp, Homo sapien
gcggcgttagccggccctcgcgctc

SEQ ID NO: 2488504 - DNA, 25 bp, Homo sapien
ctcccagctctctgcgtgccgcgcc

SEQ ID NO: 2488505 - DNA, 25 bp, Homo sapien
gacaaggacgagggccgctctccca

SEQ ID NO: 2488506 - DNA, 25 bp, Homo sapien
agctctctgcgtgccgcgccgctcc

SEQ ID NO: 2488507 - DNA, 25 bp, Homo sapien
gctccgctccgctggctgaccatct

SEQ ID NO: 2488508 - DNA, 25 bp, Homo sapien
tttcatcacccgaattgccacgagg

SEQ ID NO: 2488509 - DNA, 25 bp, Homo sapien
cgtggccggcggttgcttggtgttt

SEQ ID NO: 2488510 - DNA, 25 bp, Homo sapien
gccgaggagcgcgtcccgagtgcgt

SEQ ID NO: 2488511 - DNA, 25 bp, Homo sapien
tgcttggtgtttcatcacccgaatt

SEQ ID NO: 2488512 - DNA, 25 bp, Homo sapien
tttcacatcatttagagtttgttcc

SEQ ID NO: 2488513 - DNA, 25 bp, Homo sapien
tttttcacatcatttagagtttgtt

SEQ ID NO: 2488514 - DNA, 25 bp, Homo sapien
ttttcacatcatttagagtttgttc

SEQ ID NO: 2488515 - DNA, 25 bp, Homo sapien
tatgggctcggtcttacaaaccgcc

SEQ ID NO: 2488516 - DNA, 25 bp, Homo sapien
tgacactaccaggattagcatcaca

SEQ ID NO: 2488517 - DNA, 25 bp, Homo sapien
cacatcccacaagttatgggctcgg

SEQ ID NO: 2488518 - DNA, 25 bp, Homo sapien
taagacactaattgagtccagaacc

SEQ ID NO: 2488519 - DNA, 25 bp, Homo sapien
ggcatgattgcgcgcttctgtattc

SEQ ID NO: 2488520 - DNA, 25 bp, Homo sapien
ccaggcatgattgcgcgcttctgta

SEQ ID NO: 2488521 - DNA, 25 bp, Homo sapien
catgattgcgcgcttctgtattccc

SEQ ID NO: 2488522 - DNA, 25 bp, Homo sapien
agccaggcatgattgcgcgcttctg

SEQ ID NO: 2488523 - DNA, 25 bp, Homo sapien
gtcctttataaagaccatagcagtg

SEQ ID NO: 2488524 - DNA, 25 bp, Homo sapien
agagaatggttttaggctccagtgt

SEQ ID NO: 2488525 - DNA, 25 bp, Homo sapien
taaactgtttcaacgccaatatgta

SEQ ID NO: 2488526 - DNA, 25 bp, Homo sapien
gacacaagagttatcctagaacctt

SEQ ID NO: 2488527 - DNA, 25 bp, Homo sapien
ttatagagctaagagaaatcagggc

SEQ ID NO: 2488528 - DNA, 25 bp, Homo sapien
gaagttgcctagagcaccatcacag

SEQ ID NO: 2488529 - DNA, 25 bp, Homo sapien
aaacatgtgaatgaaggcctgtggc

SEQ ID NO: 2488530 - DNA, 25 bp, Homo sapien
tgtttgacttgactagggaaccaca

SEQ ID NO: 2488531 - DNA, 25 bp, Homo sapien
gagacgataatctggctccactgca

SEQ ID NO: 2488532 - DNA, 25 bp, Homo sapien
gatgtaatcccttgctcagcgtcgg

SEQ ID NO: 2488533 - DNA, 25 bp, Homo sapien
tgtaaagtctgaattactgcgagac

SEQ ID NO: 2488534 - DNA, 25 bp, Homo sapien
actgcagccaaagtgggcccttaaa

SEQ ID NO: 2488535 - DNA, 25 bp, Homo sapien
agtaaagggcgagggcaacagtgga

SEQ ID NO: 2488536 - DNA, 25 bp, Homo sapien
cggaagccgactcggcagttgccgc

SEQ ID NO: 2488537 - DNA, 25 bp, Homo sapien
tggacggggtgtctccagacatccc

SEQ ID NO: 2488538 - DNA, 25 bp, Homo sapien
cccctcattaccgtggccgcggaag

SEQ ID NO: 2488539 - DNA, 25 bp, Homo sapien
cttgcgaagccggaagtgtcctgag

SEQ ID NO: 2488540 - DNA, 25 bp, Homo sapien
gacccggctgggtaagtgagacggc

SEQ ID NO: 2488541 - DNA, 25 bp, Homo sapien
taccagacgggccataggcgtgcgc

SEQ ID NO: 2488542 - DNA, 25 bp, Homo sapien
gtcacgtggcctccggccagggctt

SEQ ID NO: 2488543 - DNA, 25 bp, Homo sapien
ggtgtgtgtcgggtggccgtagccg

SEQ ID NO: 2488544 - DNA, 25 bp, Homo sapien
atccaggaccccggctgcgtggaca

SEQ ID NO: 2488545 - DNA, 25 bp, Homo sapien
tagccggtggaatggtcgcgcgggc

SEQ ID NO: 2488546 - DNA, 25 bp, Homo sapien
acgacccgaggccaagccatccagg

SEQ ID NO: 2488547 - DNA, 25 bp, Homo sapien
gacctgcatcccgtccggcggcttt

SEQ ID NO: 2488548 - DNA, 25 bp, Homo sapien
ggtcctcgacctgcatcccgtccgg

SEQ ID NO: 2488549 - DNA, 25 bp, Homo sapien
gcgcggccggtcctcgacctgcatc

SEQ ID NO: 2488550 - DNA, 25 bp, Homo sapien
catcccgtccggcggctttgggcat

SEQ ID NO: 2488551 - DNA, 25 bp, Homo sapien
cgagcgtcgacacaacgggcagttt

SEQ ID NO: 2488552 - DNA, 25 bp, Homo sapien
caagtattcttagtaggtggcctca

SEQ ID NO: 2488553 - DNA, 25 bp, Homo sapien
gcagaggttgactcacaccggaaat

SEQ ID NO: 2488554 - DNA, 25 bp, Homo sapien
tagtgatgttcagtccgcagaggtt

SEQ ID NO: 2488555 - DNA, 25 bp, Homo sapien
tcctagggatgtgctttgagaaacc

SEQ ID NO: 2488556 - DNA, 25 bp, Homo sapien
agtctagtatttagtccccaacagt

SEQ ID NO: 2488557 - DNA, 25 bp, Homo sapien
gcaactgtttaggactatatcctac

SEQ ID NO: 2488558 - DNA, 25 bp, Homo sapien
tgttcttaatgatggcagttgcaac

SEQ ID NO: 2488559 - DNA, 25 bp, Homo sapien
tatgtgtgaaaatggtcattggctc

SEQ ID NO: 2488560 - DNA, 25 bp, Homo sapien
tgaggtcagtgggtatattgcaaaa

SEQ ID NO: 2488561 - DNA, 25 bp, Homo sapien
tcccgataatctcacaggcatgatg

SEQ ID NO: 2488562 - DNA, 25 bp, Homo sapien
tagtacgtttccacctggatcccga

SEQ ID NO: 2488563 - DNA, 25 bp, Homo sapien
gagcccacacctgtcatagccaaag

SEQ ID NO: 2488564 - DNA, 25 bp, Homo sapien
ttcagtctggttccatcaggcccag

SEQ ID NO: 2488565 - DNA, 25 bp, Homo sapien
tagccaaagccacagtagatgaatg

SEQ ID NO: 2488566 - DNA, 25 bp, Homo sapien
caggacactactgttcccaggaggg

SEQ ID NO: 2488567 - DNA, 25 bp, Homo sapien
tattttacaaggtgcccagatccca

SEQ ID NO: 2488568 - DNA, 25 bp, Homo sapien
tattttctctgaccgcctactggaa

SEQ ID NO: 2488569 - DNA, 25 bp, Homo sapien
tcagtgatcacgagaagaaagccat

SEQ ID NO: 2488570 - DNA, 25 bp, Homo sapien
gaaccgcaccactgttatactggga

SEQ ID NO: 2488571 - DNA, 25 bp, Homo sapien
cactgagctggaaatggttgtcggg

SEQ ID NO: 2488572 - DNA, 25 bp, Homo sapien
catcccgaagggctccagatgtagc

SEQ ID NO: 2488573 - DNA, 25 bp, Homo sapien
aatggactaagccacatttacggca

SEQ ID NO: 2488574 - DNA, 25 bp, Homo sapien
tgtagccttctgatgaaagagatct

SEQ ID NO: 2488575 - DNA, 25 bp, Homo sapien
gctggcttggttgattcatctcaat

SEQ ID NO: 2488576 - DNA, 25 bp, Homo sapien
tctgctggcttggttgattcatctc

SEQ ID NO: 2488577 - DNA, 25 bp, Homo sapien
gcttggttgattcatctcaattgga

SEQ ID NO: 2488578 - DNA, 25 bp, Homo sapien
tgattcatctcaattggagaaggga

SEQ ID NO: 2488579 - DNA, 25 bp, Homo sapien
gaacacttgacggtccctgtgagca

SEQ ID NO: 2488580 - DNA, 25 bp, Homo sapien
ggaaaaatacatgaagccagggagt

SEQ ID NO: 2488581 - DNA, 25 bp, Homo sapien
tgggctctgagtcacgcaggtcagc

SEQ ID NO: 2488582 - DNA, 25 bp, Homo sapien
aactgcgatttataagctctcgggc

SEQ ID NO: 2488583 - DNA, 25 bp, Homo sapien
tggtaggttacccttgcttcggatg

SEQ ID NO: 2488584 - DNA, 25 bp, Homo sapien
acccttgcttcggatggtctgaggc

SEQ ID NO: 2488585 - DNA, 25 bp, Homo sapien
taggttacccttgcttcggatggtc

SEQ ID NO: 2488586 - DNA, 25 bp, Homo sapien
ttacccttgcttcggatggtctgag

SEQ ID NO: 2488587 - DNA, 25 bp, Homo sapien
cagtagttggtgtgtttgtgacagc

SEQ ID NO: 2488588 - DNA, 25 bp, Homo sapien
ccataagcggaggtagggatacagt

SEQ ID NO: 2488589 - DNA, 25 bp, Homo sapien
tctagcattgactcctatatgtttg

SEQ ID NO: 2488590 - DNA, 25 bp, Homo sapien
tctcctgagccccataagcggaggt

SEQ ID NO: 2488591 - DNA, 25 bp, Homo sapien
ttacagtaccagacatgtacaaagt

SEQ ID NO: 2488592 - DNA, 25 bp, Homo sapien
cactttacagtaccagacatgtaca

SEQ ID NO: 2488593 - DNA, 25 bp, Homo sapien
acagcactttacagtaccagacatg

SEQ ID NO: 2488594 - DNA, 25 bp, Homo sapien
acagtaccagacatgtacaaagtac

SEQ ID NO: 2488595 - DNA, 25 bp, Homo sapien
tatgcacagattaagagcaaggacg

SEQ ID NO: 2488596 - DNA, 25 bp, Homo sapien
gagcaaggacggtcaaggtatacag

SEQ ID NO: 2488597 - DNA, 25 bp, Homo sapien
ggacggtcaaggtatacagccgcat

SEQ ID NO: 2488598 - DNA, 25 bp, Homo sapien
gattaagagcaaggacggtcaaggt

SEQ ID NO: 2488599 - DNA, 25 bp, Homo sapien
aatgtgacgaaagcaaaggttcagg

SEQ ID NO: 2488600 - DNA, 25 bp, Homo sapien
cctgtagttttagcccattggccca

SEQ ID NO: 2488601 - DNA, 25 bp, Homo sapien
gcttagcaaatggagggattaatcc

SEQ ID NO: 2488602 - DNA, 25 bp, Homo sapien
catggttaggactatgcacttttgg

SEQ ID NO: 2488603 - DNA, 25 bp, Homo sapien
cagaactcattggaagcaaggtcac

SEQ ID NO: 2488604 - DNA, 25 bp, Homo sapien
aatttagtgtccagtcgggccttgc

SEQ ID NO: 2488605 - DNA, 25 bp, Homo sapien
ggaactcggcaagtatatcaaacag

SEQ ID NO: 2488606 - DNA, 25 bp, Homo sapien
aaacagacctggatgcctgaaaagg

SEQ ID NO: 2488607 - DNA, 25 bp, Homo sapien
cagtttacaaaatgcacgtggctgc

SEQ ID NO: 2488608 - DNA, 25 bp, Homo sapien
gacagcattaatctcccagcctcag

SEQ ID NO: 2488609 - DNA, 25 bp, Homo sapien
cagagatgacatgacttgacaagta

SEQ ID NO: 2488610 - DNA, 25 bp, Homo sapien
caagtagtggtgactcttcactttg

SEQ ID NO: 2488611 - DNA, 25 bp, Homo sapien
ttgaaggagataatgtaagagagtt

SEQ ID NO: 2488612 - DNA, 25 bp, Homo sapien
agagttgctcggaggattgaaggag

SEQ ID NO: 2488613 - DNA, 25 bp, Homo sapien
tgtaagagagtttggctagtttggc

SEQ ID NO: 2488614 - DNA, 25 bp, Homo sapien
ttgctcggaggattgaaggagataa

SEQ ID NO: 2488615 - DNA, 25 bp, Homo sapien
gcagcatgagcagcggctacagcag

SEQ ID NO: 2488616 - DNA, 25 bp, Homo sapien
tccttcttcaggagagcgccccagg

SEQ ID NO: 2488617 - DNA, 25 bp, Homo sapien
gacgccgaggacttcttcttcaccg

SEQ ID NO: 2488618 - DNA, 25 bp, Homo sapien
cgcgcgacgggaccggcagcatgag

SEQ ID NO: 2488619 - DNA, 25 bp, Homo sapien
catgccgtgggaagcacgagttggg

SEQ ID NO: 2488620 - DNA, 25 bp, Homo sapien
ctggactgaggagcccggtgctaga

SEQ ID NO: 2488621 - DNA, 25 bp, Homo sapien
tcctggcactaggagccgcaccagg

SEQ ID NO: 2488622 - DNA, 25 bp, Homo sapien
tgccagtttcgccagctgtagccgt

SEQ ID NO: 2488623 - DNA, 25 bp, Homo sapien
cagatttggtcacgtgaaactgtca

SEQ ID NO: 2488624 - DNA, 25 bp, Homo sapien
ccttggctgtcatgttgatggtctc

SEQ ID NO: 2488625 - DNA, 25 bp, Homo sapien
ggctgtcatgttgatggtctctgta

SEQ ID NO: 2488626 - DNA, 25 bp, Homo sapien
ctgtcaattagcatgaatgaggtgc

SEQ ID NO: 2488627 - DNA, 25 bp, Homo sapien
cacgcctggcaaatcgttgtacctc

SEQ ID NO: 2488628 - DNA, 25 bp, Homo sapien
tagggcaccctgtgtttaaatcagt

SEQ ID NO: 2488629 - DNA, 25 bp, Homo sapien
tttgtaaactagtaggatgcctgga

SEQ ID NO: 2488630 - DNA, 25 bp, Homo sapien
ttaattgcaagcagctatgtagggc

SEQ ID NO: 2488631 - DNA, 25 bp, Homo sapien
ttatctgcctctgatcacgggatcc

SEQ ID NO: 2488632 - DNA, 25 bp, Homo sapien
cacgggatcctggttagttttgctc

SEQ ID NO: 2488633 - DNA, 25 bp, Homo sapien
taaagcaagccactccagttgaaag

SEQ ID NO: 2488634 - DNA, 25 bp, Homo sapien
tttttggaatggagctgttgcctgc

SEQ ID NO: 2488635 - DNA, 25 bp, Homo sapien
ttcctcaaaaccaggacaggatgaa

SEQ ID NO: 2488636 - DNA, 25 bp, Homo sapien
aatcagtacttgagggttgctgcag

SEQ ID NO: 2488637 - DNA, 25 bp, Homo sapien
gaactatttaataagagcccaccag

SEQ ID NO: 2488638 - DNA, 25 bp, Homo sapien
aggacagaagggatagtttagccac

SEQ ID NO: 2488639 - DNA, 25 bp, Homo sapien
ttttttggtgagacggggtcttgca

SEQ ID NO: 2488640 - DNA, 25 bp, Homo sapien
caagtgatcttcctgagcagctggg

SEQ ID NO: 2488641 - DNA, 25 bp, Homo sapien
attgcaggcacacaccaccatgctc

SEQ ID NO: 2488642 - DNA, 25 bp, Homo sapien
tttggtgagacggggtcttgcactg

SEQ ID NO: 2488643 - DNA, 25 bp, Homo sapien
tctagggcatagtgggttaaccagc

SEQ ID NO: 2488644 - DNA, 25 bp, Homo sapien
cataaacttagtgagtaggtggccc

SEQ ID NO: 2488645 - DNA, 25 bp, Homo sapien
tcagggagactcttgaatgtcaggc

SEQ ID NO: 2488646 - DNA, 25 bp, Homo sapien
catttcccgctggacgattagttgg

SEQ ID NO: 2488647 - DNA, 25 bp, Homo sapien
agagtcatttctactttggcacagt

SEQ ID NO: 2488648 - DNA, 25 bp, Homo sapien
tttctactttggcacagtaatcttg

SEQ ID NO: 2488649 - DNA, 25 bp, Homo sapien
tactttggcacagtaatcttgccca

SEQ ID NO: 2488650 - DNA, 25 bp, Homo sapien
agaattaatttggtagcactgagaa

SEQ ID NO: 2488651 - DNA, 25 bp, Homo sapien
ctgggttgacggaacgagactctgt

SEQ ID NO: 2488652 - DNA, 25 bp, Homo sapien
cctgggttgacggaacgagactctg

SEQ ID NO: 2488653 - DNA, 25 bp, Homo sapien
ttctctcatctccaagtaaatgatt

SEQ ID NO: 2488654 - DNA, 25 bp, Homo sapien
tcctttgttccttgcatgtatgctg

SEQ ID NO: 2488655 - DNA, 25 bp, Homo sapien
cagtgtcaaataactatatactgaa

SEQ ID NO: 2488656 - DNA, 25 bp, Homo sapien
caatattgtgaatgaactcagtgtc

SEQ ID NO: 2488657 - DNA, 25 bp, Homo sapien
ccagggtatttggattgtctaccag

SEQ ID NO: 2488658 - DNA, 25 bp, Homo sapien
ccacgctgggcgatacagagtttca

SEQ ID NO: 2488659 - DNA, 25 bp, Homo sapien
cttcacatcagccttgtactttagc

SEQ ID NO: 2488660 - DNA, 25 bp, Homo sapien
acccgtccctttgcaagcagcagac

SEQ ID NO: 2488661 - DNA, 25 bp, Homo sapien
tactttagcacgtttccagtccagc

SEQ ID NO: 2488662 - DNA, 25 bp, Homo sapien
ctgttctccttgacccgtccctttg

SEQ ID NO: 2488663 - DNA, 25 bp, Homo sapien
ctcctcctcggttgctgcagcattc

SEQ ID NO: 2488664 - DNA, 25 bp, Homo sapien
ggtgcaggaccgatgtacaaaacag

SEQ ID NO: 2488665 - DNA, 25 bp, Homo sapien
gacagcatcagcaactaagggaagc

SEQ ID NO: 2488666 - DNA, 25 bp, Homo sapien
gaagaggcgctacacagcctacagg

SEQ ID NO: 2488667 - DNA, 25 bp, Homo sapien
acttagggatatggaggtctctggc

SEQ ID NO: 2488668 - DNA, 25 bp, Homo sapien
caaacactggttactgcagcagcat

SEQ ID NO: 2488669 - DNA, 25 bp, Homo sapien
cctaaagtagtagctgatgggtatc

SEQ ID NO: 2488670 - DNA, 25 bp, Homo sapien
aaaacctcgcttactgtcatgtgca

SEQ ID NO: 2488671 - DNA, 25 bp, Homo sapien
gattgtctgaataggcatcctcatc

SEQ ID NO: 2488672 - DNA, 25 bp, Homo sapien
gacaggaaggtagccctctacagag

SEQ ID NO: 2488673 - DNA, 25 bp, Homo sapien
ctcatccagccagtgttcacctttg

SEQ ID NO: 2488674 - DNA, 25 bp, Homo sapien
gcagctttgagacaggaaggtagcc

SEQ ID NO: 2488675 - DNA, 25 bp, Homo sapien
tagccctctacagagagacccggag

SEQ ID NO: 2488676 - DNA, 25 bp, Homo sapien
aggaccttcgttggcattacaggaa

SEQ ID NO: 2488677 - DNA, 25 bp, Homo sapien
ttgcaggccagagtgttgttatccc

SEQ ID NO: 2488678 - DNA, 25 bp, Homo sapien
caggatgattgcaggccagagtgtt

SEQ ID NO: 2488679 - DNA, 25 bp, Homo sapien
ttaaacaggaccttcgttggcatta

SEQ ID NO: 2488680 - DNA, 25 bp, Homo sapien
aggaccagacgtggcatcatgggct

SEQ ID NO: 2488681 - DNA, 25 bp, Homo sapien
tgcagaggaccagacgtggcatcat

SEQ ID NO: 2488682 - DNA, 25 bp, Homo sapien
cagaggaccagacgtggcatcatgg

SEQ ID NO: 2488683 - DNA, 25 bp, Homo sapien
ctgtgcagaggaccagacgtggcat

SEQ ID NO: 2488684 - DNA, 25 bp, Homo sapien
cattgagctttaggctgaagcctgc

SEQ ID NO: 2488685 - DNA, 25 bp, Homo sapien
agcattgatgggcattgagctttag

SEQ ID NO: 2488686 - DNA, 25 bp, Homo sapien
ctgtgggagcattgatgggcattga

SEQ ID NO: 2488687 - DNA, 25 bp, Homo sapien
gatgggcattgagctttaggctgaa

SEQ ID NO: 2488688 - DNA, 25 bp, Homo sapien
tgacaaagtgaatagtcacttgcac

SEQ ID NO: 2488689 - DNA, 25 bp, Homo sapien
gtgaatagtcacttgcaccagactg

SEQ ID NO: 2488690 - DNA, 25 bp, Homo sapien
caaagtgaatagtcacttgcaccag

SEQ ID NO: 2488691 - DNA, 25 bp, Homo sapien
aagtgaatagtcacttgcaccagac

SEQ ID NO: 2488692 - DNA, 25 bp, Homo sapien
ttttaattcattgaaaagtgcagca

SEQ ID NO: 2488693 - DNA, 25 bp, Homo sapien
aattttaattcattgaaaagtgcag

SEQ ID NO: 2488694 - DNA, 25 bp, Homo sapien
ataaattttaattcattgaaaagtg

SEQ ID NO: 2488695 - DNA, 25 bp, Homo sapien
taaattttaattcattgaaaagtgc

SEQ ID NO: 2488696 - DNA, 25 bp, Homo sapien
cagaataggaacagaggatgcaaac

SEQ ID NO: 2488697 - DNA, 25 bp, Homo sapien
aggtgttccctactttgcatgagag

SEQ ID NO: 2488698 - DNA, 25 bp, Homo sapien
gcagtgggtcccttaaacattatga

SEQ ID NO: 2488699 - DNA, 25 bp, Homo sapien
tctctactctgaagggcaccaacat

SEQ ID NO: 2488700 - DNA, 25 bp, Homo sapien
tatccaattgactgttagcccaaca

SEQ ID NO: 2488701 - DNA, 25 bp, Homo sapien
aagccgatacccatattcaacagtg

SEQ ID NO: 2488702 - DNA, 25 bp, Homo sapien
aaatttaggtgttcttagccaagcg

SEQ ID NO: 2488703 - DNA, 25 bp, Homo sapien
tattgcctgagttgaacaagttaca

SEQ ID NO: 2488704 - DNA, 25 bp, Homo sapien
tcagaaggccctcggaagagacaac

SEQ ID NO: 2488705 - DNA, 25 bp, Homo sapien
tgtggccccaggataaaaagaatac

SEQ ID NO: 2488706 - DNA, 25 bp, Homo sapien
cattgcacgaggaagtcagctgact

SEQ ID NO: 2488707 - DNA, 25 bp, Homo sapien
acttcatcagaaagaggcgtgcagg

SEQ ID NO: 2488708 - DNA, 25 bp, Homo sapien
tgccgcgattgctgaacatgagacg

SEQ ID NO: 2488709 - DNA, 25 bp, Homo sapien
ggaaaatcttcgagtcctgacactg

SEQ ID NO: 2488710 - DNA, 25 bp, Homo sapien
tgtttggaaaatcttcgagtcctga

SEQ ID NO: 2488711 - DNA, 25 bp, Homo sapien
agtcctgacactgccgcgattgctg

SEQ ID NO: 2488712 - DNA, 25 bp, Homo sapien
aagtgaaaaagtgaacgctcttgac

SEQ ID NO: 2488713 - DNA, 25 bp, Homo sapien
aagtgaacgctcttgacttaataag

SEQ ID NO: 2488714 - DNA, 25 bp, Homo sapien
caagagcctcaccataaacatgagt

SEQ ID NO: 2488715 - DNA, 25 bp, Homo sapien
cagcaagactgctaagacctacaag

SEQ ID NO: 2488716 - DNA, 25 bp, Homo sapien
gggccacagtgcatgacaaaagctt

SEQ ID NO: 2488717 - DNA, 25 bp, Homo sapien
aaacatcttccaactgatggcaact

SEQ ID NO: 2488718 - DNA, 25 bp, Homo sapien
gggcttcacgcatccactgtgggtt

SEQ ID NO: 2488719 - DNA, 25 bp, Homo sapien
tctagttttgctgccacaccttaaa

SEQ ID NO: 2488720 - DNA, 25 bp, Homo sapien
cagctggctccatctaccttgcatt

SEQ ID NO: 2488721 - DNA, 25 bp, Homo sapien
tttgggctctaagggctgtgtggaa

SEQ ID NO: 2488722 - DNA, 25 bp, Homo sapien
tctaacacttagagccagatgttca

SEQ ID NO: 2488723 - DNA, 25 bp, Homo sapien
catctaccttgcattggccaaccag

SEQ ID NO: 2488724 - DNA, 25 bp, Homo sapien
ggactgtaacatcattaaccgatag

SEQ ID NO: 2488725 - DNA, 25 bp, Homo sapien
tagcaatgttagtgatctggtctgg

SEQ ID NO: 2488726 - DNA, 25 bp, Homo sapien
tgggtctgcagtcagattatagact

SEQ ID NO: 2488727 - DNA, 25 bp, Homo sapien
agtgcgacaggttggcccagaacag

SEQ ID NO: 2488728 - DNA, 25 bp, Homo sapien
tggtcatcaaactcgcaatactgca

SEQ ID NO: 2488729 - DNA, 25 bp, Homo sapien
attccacaatgctgacattgtcctc

SEQ ID NO: 2488730 - DNA, 25 bp, Homo sapien
acaatgctgacattgtcctcacaca

SEQ ID NO: 2488731 - DNA, 25 bp, Homo sapien
gcataggtattgttataagcatctt

SEQ ID NO: 2488732 - DNA, 25 bp, Homo sapien
ccactcacagtcagtgacaaaggaa

SEQ ID NO: 2488733 - DNA, 25 bp, Homo sapien
gacaaaggaacaggactcagatgaa

SEQ ID NO: 2488734 - DNA, 25 bp, Homo sapien
gcaccttgccatgttgtcagtgaga

SEQ ID NO: 2488735 - DNA, 25 bp, Homo sapien
gatttacctttgtccatctactaac

SEQ ID NO: 2488736 - DNA, 25 bp, Homo sapien
tgttgggtcagtgacgttacggcct

SEQ ID NO: 2488737 - DNA, 25 bp, Homo sapien
tctccttggtattccaccaggacat

SEQ ID NO: 2488738 - DNA, 25 bp, Homo sapien
tccaccaggacatctgatcgccagg

SEQ ID NO: 2488739 - DNA, 25 bp, Homo sapien
gccaggtcaagttactggcacctct

SEQ ID NO: 2488740 - DNA, 25 bp, Homo sapien
caaaatagtaggacccaagtcaatg

SEQ ID NO: 2488741 - DNA, 25 bp, Homo sapien
tctgtgtcttatttaggtcgtagcc

SEQ ID NO: 2488742 - DNA, 25 bp, Homo sapien
gccagcaatgtccaaaatagtagga

SEQ ID NO: 2488743 - DNA, 25 bp, Homo sapien
cttatttaggtcgtagccagcaatg

SEQ ID NO: 2488744 - DNA, 25 bp, Homo sapien
ccgcccatgagacaacagcactatt

SEQ ID NO: 2488745 - DNA, 25 bp, Homo sapien
tttatacagcccatactttggtctg

SEQ ID NO: 2488746 - DNA, 25 bp, Homo sapien
tctacctatactaaagttctcttcc

SEQ ID NO: 2488747 - DNA, 25 bp, Homo sapien
gcactattaccttttatacagccca

SEQ ID NO: 2488748 - DNA, 25 bp, Homo sapien
aggtcctcgaaccaacagtggaact

SEQ ID NO: 2488749 - DNA, 25 bp, Homo sapien
ccaggtcctcgaaccaacagtggaa

SEQ ID NO: 2488750 - DNA, 25 bp, Homo sapien
ttgatcccaggtcctcgaaccaaca

SEQ ID NO: 2488751 - DNA, 25 bp, Homo sapien
atcccaggtcctcgaaccaacagtg

SEQ ID NO: 2488752 - DNA, 25 bp, Homo sapien
cacacaatgtaaagatggagccaag

SEQ ID NO: 2488753 - DNA, 25 bp, Homo sapien
ggagccttgctcatgttatgtttca

SEQ ID NO: 2488754 - DNA, 25 bp, Homo sapien
aaaacacacaatgtaaagatggagc

SEQ ID NO: 2488755 - DNA, 25 bp, Homo sapien
ccttgctcatgttatgtttcactca

SEQ ID NO: 2488756 - DNA, 25 bp, Homo sapien
cacaaggtcatcaactgagaggaga

SEQ ID NO: 2488757 - DNA, 25 bp, Homo sapien
gaggtatagaagatgtaagtgttgt

SEQ ID NO: 2488758 - DNA, 25 bp, Homo sapien
tctgaggtatagaagatgtaagtgt

SEQ ID NO: 2488759 - DNA, 25 bp, Homo sapien
tccacaaggtcatcaactgagagga

SEQ ID NO: 2488760 - DNA, 25 bp, Homo sapien
gcttgcctaattaaccagtgcttgt

SEQ ID NO: 2488761 - DNA, 25 bp, Homo sapien
ggagtcttggcttgcctaattaacc

SEQ ID NO: 2488762 - DNA, 25 bp, Homo sapien
ttagtcattggagtcttggcttgcc

SEQ ID NO: 2488763 - DNA, 25 bp, Homo sapien
gaagaattagtcattggagtcttgg

SEQ ID NO: 2488764 - DNA, 25 bp, Homo sapien
tggtactgaggtgcagctgtccaag

SEQ ID NO: 2488765 - DNA, 25 bp, Homo sapien
tggaaagccttctggtactgaggtg

SEQ ID NO: 2488766 - DNA, 25 bp, Homo sapien
gccttctggtactgaggtgcagctg

SEQ ID NO: 2488767 - DNA, 25 bp, Homo sapien
gcagctgtccaaggcgaatgaggcg

SEQ ID NO: 2488768 - DNA, 25 bp, Homo sapien
cttgtagtccagaaagtccaaggag

SEQ ID NO: 2488769 - DNA, 25 bp, Homo sapien
gacttgtagtccagaaagtccaagg

SEQ ID NO: 2488770 - DNA, 25 bp, Homo sapien
ctggagtggcgatcatcatgaagaa

SEQ ID NO: 2488771 - DNA, 25 bp, Homo sapien
ggacttgtagtccagaaagtccaag

SEQ ID NO: 2488772 - DNA, 25 bp, Homo sapien
tttcaagagcattagatctgagcct

SEQ ID NO: 2488773 - DNA, 25 bp, Homo sapien
tgtagtcgaagagattaacctttgg

SEQ ID NO: 2488774 - DNA, 25 bp, Homo sapien
ttcaagagcattagatctgagcctg

SEQ ID NO: 2488775 - DNA, 25 bp, Homo sapien
taaaacctctacaaagtaatctctg

SEQ ID NO: 2488776 - DNA, 25 bp, Homo sapien
gcttccgtgccttcccattgataga

SEQ ID NO: 2488777 - DNA, 25 bp, Homo sapien
gacagggtgtaattataatacttag

SEQ ID NO: 2488778 - DNA, 25 bp, Homo sapien
tatagttttcaccatgcttccgtgc

SEQ ID NO: 2488779 - DNA, 25 bp, Homo sapien
caaaacatctgtcaggtagtccaca

SEQ ID NO: 2488780 - DNA, 25 bp, Homo sapien
cagaggaacgtgttctagtccacct

SEQ ID NO: 2488781 - DNA, 25 bp, Homo sapien
gcataccagtaactccaacccagag

SEQ ID NO: 2488782 - DNA, 25 bp, Homo sapien
tccaacccagaggaacgtgttctag

SEQ ID NO: 2488783 - DNA, 25 bp, Homo sapien
aaggcataccagtaactccaaccca

SEQ ID NO: 2488784 - DNA, 25 bp, Homo sapien
caaaacaagtagggacaattacaag

SEQ ID NO: 2488785 - DNA, 25 bp, Homo sapien
gcaaaacaagtagggacaattacaa

SEQ ID NO: 2488786 - DNA, 25 bp, Homo sapien
agcaaaacaagtagggacaattaca

SEQ ID NO: 2488787 - DNA, 25 bp, Homo sapien
tgaaaagcaaaacaagtagggacaa

SEQ ID NO: 2488788 - DNA, 25 bp, Homo sapien
gacttttgtatgaacagcaagctaa

SEQ ID NO: 2488789 - DNA, 25 bp, Homo sapien
gctgaatagtagcaacagagacata

SEQ ID NO: 2488790 - DNA, 25 bp, Homo sapien
ttagatatgaccagaccagaaagaa

SEQ ID NO: 2488791 - DNA, 25 bp, Homo sapien
caatctttttagaccagtgcctgaa

SEQ ID NO: 2488792 - DNA, 25 bp, Homo sapien
tccctgcaaaaaaggtctgataacc

SEQ ID NO: 2488793 - DNA, 25 bp, Homo sapien
gcaaaaaaggtctgataaccacaca

SEQ ID NO: 2488794 - DNA, 25 bp, Homo sapien
aatatttccctgcaaaaaaggtctg

SEQ ID NO: 2488795 - DNA, 25 bp, Homo sapien
tatttccctgcaaaaaaggtctgat

SEQ ID NO: 2488796 - DNA, 25 bp, Homo sapien
gcagttcccctccagagtgttgttc

SEQ ID NO: 2488797 - DNA, 25 bp, Homo sapien
caacgtgatgattatgtgggtactt

SEQ ID NO: 2488798 - DNA, 25 bp, Homo sapien
ctttcctgtcaggatactggctctg

SEQ ID NO: 2488799 - DNA, 25 bp, Homo sapien
ccagagtgttgttcacaacgtgatg

SEQ ID NO: 2488800 - DNA, 25 bp, Homo sapien
ggcagcagagagcacttggcacata

SEQ ID NO: 2488801 - DNA, 25 bp, Homo sapien
gggcagcagagagcacttggcacat

SEQ ID NO: 2488802 - DNA, 25 bp, Homo sapien
ttgtaaaatacataggtcatagcca

SEQ ID NO: 2488803 - DNA, 25 bp, Homo sapien
tgtaaaatacataggtcatagccat

SEQ ID NO: 2488804 - DNA, 25 bp, Homo sapien
tttgtaaaatacataggtcatagcc

SEQ ID NO: 2488805 - DNA, 25 bp, Homo sapien
ctctccgatgagagctttggttttc

SEQ ID NO: 2488806 - DNA, 25 bp, Homo sapien
caataaattgagacacacagcccag

SEQ ID NO: 2488807 - DNA, 25 bp, Homo sapien
ttccaataaattgagacacacagcc

SEQ ID NO: 2488808 - DNA, 25 bp, Homo sapien
ccaataaattgagacacacagccca

SEQ ID NO: 2488809 - DNA, 25 bp, Homo sapien
tccaataaattgagacacacagccc

SEQ ID NO: 2488810 - DNA, 25 bp, Homo sapien
gacaagtttggttccggccagctcc

SEQ ID NO: 2488811 - DNA, 25 bp, Homo sapien
aacagccaaagagagtcttgtatga

SEQ ID NO: 2488812 - DNA, 25 bp, Homo sapien
gagtcttgtatgattctagagacaa

SEQ ID NO: 2488813 - DNA, 25 bp, Homo sapien
gagacaagtttggttccggccagct

SEQ ID NO: 2488814 - DNA, 25 bp, Homo sapien
aggccttgagtgctcttagacagca

SEQ ID NO: 2488815 - DNA, 25 bp, Homo sapien
ggccttgagtgctcttagacagcac

SEQ ID NO: 2488816 - DNA, 25 bp, Homo sapien
tcaggccttgagtgctcttagacag

SEQ ID NO: 2488817 - DNA, 25 bp, Homo sapien
caggccttgagtgctcttagacagc

SEQ ID NO: 2488818 - DNA, 25 bp, Homo sapien
ttacaccggcataaagggcctcagg

SEQ ID NO: 2488819 - DNA, 25 bp, Homo sapien
tacccaaggataagacagccagttc

SEQ ID NO: 2488820 - DNA, 25 bp, Homo sapien
tccacagcagtacggtccagactag

SEQ ID NO: 2488821 - DNA, 25 bp, Homo sapien
gagtattgcagtcccttacaccggc

SEQ ID NO: 2488822 - DNA, 25 bp, Homo sapien
cgtccgtgaggagcagcaccacgtt

SEQ ID NO: 2488823 - DNA, 25 bp, Homo sapien
atgccgccgagcacttcgtcctggt

SEQ ID NO: 2488824 - DNA, 25 bp, Homo sapien
cagcaccacgttgggcctccgggtt

SEQ ID NO: 2488825 - DNA, 25 bp, Homo sapien
cacttcgtcctggtcgtccgtgagg

SEQ ID NO: 2488826 - DNA, 25 bp, Homo sapien
cttgaaggccggtggctggagtcag

SEQ ID NO: 2488827 - DNA, 25 bp, Homo sapien
tagctgaagggcgagaggccgacca

SEQ ID NO: 2488828 - DNA, 25 bp, Homo sapien
cagccgaaggaataaaaagccgtgc

SEQ ID NO: 2488829 - DNA, 25 bp, Homo sapien
gttttctccctaggcgcgatcacgt

SEQ ID NO: 2488830 - DNA, 25 bp, Homo sapien
aatgcgcggagtcctaacaaggttt

SEQ ID NO: 2488831 - DNA, 25 bp, Homo sapien
gggtaatgcgcggagtcctaacaag

SEQ ID NO: 2488832 - DNA, 25 bp, Homo sapien
ggggtggtaactcacacaatagcat

SEQ ID NO: 2488833 - DNA, 25 bp, Homo sapien
ttgaggtaggggtggtaactcacac

SEQ ID NO: 2488834 - DNA, 25 bp, Homo sapien
tacccaccgtggcacagatttatgt

SEQ ID NO: 2488835 - DNA, 25 bp, Homo sapien
tctccggagtaattgaatcaagcgt

SEQ ID NO: 2488836 - DNA, 25 bp, Homo sapien
tcggcggagcgctcagatactgtct

SEQ ID NO: 2488837 - DNA, 25 bp, Homo sapien
tctctttggatctgacggtggtacc

SEQ ID NO: 2488838 - DNA, 25 bp, Homo sapien
gagaggcgaatggaatcagctcgta

SEQ ID NO: 2488839 - DNA, 25 bp, Homo sapien
tgaggacaggctggataaggtgagt

SEQ ID NO: 2488840 - DNA, 25 bp, Homo sapien
tgtgaggagtattgggagaggcgaa

SEQ ID NO: 2488841 - DNA, 25 bp, Homo sapien
gaatcagctcgtagagtcgatgggc

SEQ ID NO: 2488842 - DNA, 25 bp, Homo sapien
tttactttcagtggattatatgcta

SEQ ID NO: 2488843 - DNA, 25 bp, Homo sapien
tatgctattgaacaatgatgaaaca

SEQ ID NO: 2488844 - DNA, 25 bp, Homo sapien
cagtggattatatgctattgaacaa

SEQ ID NO: 2488845 - DNA, 25 bp, Homo sapien
gctattgaacaatgatgaaacatca

SEQ ID NO: 2488846 - DNA, 25 bp, Homo sapien
cagacctgccaaaccaacattattg

SEQ ID NO: 2488847 - DNA, 25 bp, Homo sapien
ggagcacacgttctacattgtttct

SEQ ID NO: 2488848 - DNA, 25 bp, Homo sapien
tcttcacacgtctcctcattggagc

SEQ ID NO: 2488849 - DNA, 25 bp, Homo sapien
aatgaactcaacctggagagcgaag

SEQ ID NO: 2488850 - DNA, 25 bp, Homo sapien
tgttttccaagacgacatagtaagg

SEQ ID NO: 2488851 - DNA, 25 bp, Homo sapien
tgaagagaatgacccagacgatgag

SEQ ID NO: 2488852 - DNA, 25 bp, Homo sapien
gacgacatagtaaggccagagacag

SEQ ID NO: 2488853 - DNA, 25 bp, Homo sapien
tgaggatgctgtcgttaatgcagtg

SEQ ID NO: 2488854 - DNA, 25 bp, Homo sapien
tgtcatggcaatttgcttcttttcg

SEQ ID NO: 2488855 - DNA, 25 bp, Homo sapien
tctgtcatggcaatttgcttctttt

SEQ ID NO: 2488856 - DNA, 25 bp, Homo sapien
catggcaatttgcttcttttcgatt

SEQ ID NO: 2488857 - DNA, 25 bp, Homo sapien
tggcaatttgcttcttttcgatttt

SEQ ID NO: 2488858 - DNA, 25 bp, Homo sapien
tgggtaccgccatgaaatgtatggt

SEQ ID NO: 2488859 - DNA, 25 bp, Homo sapien
ccgccatgaaatgtatggttctcca

SEQ ID NO: 2488860 - DNA, 25 bp, Homo sapien
taggtttgggtaccgccatgaaatg

SEQ ID NO: 2488861 - DNA, 25 bp, Homo sapien
gccatgaaatgtatggttctccaat

SEQ ID NO: 2488862 - DNA, 25 bp, Homo sapien
acagtttgggttctgtaagaacata

SEQ ID NO: 2488863 - DNA, 25 bp, Homo sapien
gatacctctgatccttagggaaaat

SEQ ID NO: 2488864 - DNA, 25 bp, Homo sapien
ttctgtaagaacatagaagttgcca

SEQ ID NO: 2488865 - DNA, 25 bp, Homo sapien
gatccttagggaaaatgacagtttg

SEQ ID NO: 2488866 - DNA, 25 bp, Homo sapien
cacaggacacacttggcatatgctt

SEQ ID NO: 2488867 - DNA, 25 bp, Homo sapien
tatgctttacgcagttgctccggac

SEQ ID NO: 2488868 - DNA, 25 bp, Homo sapien
tcctcagtggtacggatgacttgat

SEQ ID NO: 2488869 - DNA, 25 bp, Homo sapien
gtttgtgttcgcctctcaaggagag

SEQ ID NO: 2488870 - DNA, 25 bp, Homo sapien
tctagttagcaatgtcagcctgtgg

SEQ ID NO: 2488871 - DNA, 25 bp, Homo sapien
gaatcaactcattctgatgcctctg

SEQ ID NO: 2488872 - DNA, 25 bp, Homo sapien
cagtctaatcgctgggttgcagggt

SEQ ID NO: 2488873 - DNA, 25 bp, Homo sapien
gactgcagctgtttgggacattgta

SEQ ID NO: 2488874 - DNA, 25 bp, Homo sapien
cagaaggagaggtgattgtctttcc

SEQ ID NO: 2488875 - DNA, 25 bp, Homo sapien
aggagaggtgattgtctttccccag

SEQ ID NO: 2488876 - DNA, 25 bp, Homo sapien
gattgtctttccccagttttgtcta

SEQ ID NO: 2488877 - DNA, 25 bp, Homo sapien
aggtgattgtctttccccagttttg

SEQ ID NO: 2488878 - DNA, 25 bp, Homo sapien
gaacgcaatggaaacagagcgtggc

SEQ ID NO: 2488879 - DNA, 25 bp, Homo sapien
atttgtgggatttgtctgacagaac

SEQ ID NO: 2488880 - DNA, 25 bp, Homo sapien
tccatctgcattcccggaggagtcc

SEQ ID NO: 2488881 - DNA, 25 bp, Homo sapien
ggagtcctgttgagggcagagtgac

SEQ ID NO: 2488882 - DNA, 25 bp, Homo sapien
gtaggctttcagcatctcactgact

SEQ ID NO: 2488883 - DNA, 25 bp, Homo sapien
gctttggtcctagcccctctatagg

SEQ ID NO: 2488884 - DNA, 25 bp, Homo sapien
caataggagttaaccacattgcaga

SEQ ID NO: 2488885 - DNA, 25 bp, Homo sapien
cctggattgcccatgaaacttcaaa

SEQ ID NO: 2488886 - DNA, 25 bp, Homo sapien
tcttgggctgctggtacagtgggtg

SEQ ID NO: 2488887 - DNA, 25 bp, Homo sapien
tacagtgggtgcttggaaaatggtt

SEQ ID NO: 2488888 - DNA, 25 bp, Homo sapien
ccatgggcacacagcgtaatggcca

SEQ ID NO: 2488889 - DNA, 25 bp, Homo sapien
caggacaattctgaatgattcttgg

SEQ ID NO: 2488890 - DNA, 25 bp, Homo sapien
gcagagctgagtattcaaaccaagg

SEQ ID NO: 2488891 - DNA, 25 bp, Homo sapien
atgaggatagtaacttgcatatgag

SEQ ID NO: 2488892 - DNA, 25 bp, Homo sapien
catatgagcctacagctagtaagtg

SEQ ID NO: 2488893 - DNA, 25 bp, Homo sapien
actcttgacttctttgttataatgg

SEQ ID NO: 2488894 - DNA, 25 bp, Homo sapien
tatccggtacgtgcatagtgctgac

SEQ ID NO: 2488895 - DNA, 25 bp, Homo sapien
gacgtatcttggcattggctagcca

SEQ ID NO: 2488896 - DNA, 25 bp, Homo sapien
aaactgctcagtgagaatggctgtc

SEQ ID NO: 2488897 - DNA, 25 bp, Homo sapien
gagcatcccagcatgcatgcaaaga

SEQ ID NO: 2488898 - DNA, 25 bp, Homo sapien
catgtaaacaggatgtccactgaat

SEQ ID NO: 2488899 - DNA, 25 bp, Homo sapien
gatgtccactgaatggcagcatgga

SEQ ID NO: 2488900 - DNA, 25 bp, Homo sapien
caggatgtccactgaatggcagcat

SEQ ID NO: 2488901 - DNA, 25 bp, Homo sapien
taaacaggatgtccactgaatggca

SEQ ID NO: 2488902 - DNA, 25 bp, Homo sapien
tggagccgtaaattgttgaggtgtc

SEQ ID NO: 2488903 - DNA, 25 bp, Homo sapien
tgagctatggacctctgtcccaaga

SEQ ID NO: 2488904 - DNA, 25 bp, Homo sapien
ttctgagctatggacctctgtccca

SEQ ID NO: 2488905 - DNA, 25 bp, Homo sapien
tgtcccaagatcctggagccgtaaa

SEQ ID NO: 2488906 - DNA, 25 bp, Homo sapien
agggagggctacgctccttccctct

SEQ ID NO: 2488907 - DNA, 25 bp, Homo sapien
tggccagggagggctacgctccttc

SEQ ID NO: 2488908 - DNA, 25 bp, Homo sapien
agggctacgctccttccctctggtt

SEQ ID NO: 2488909 - DNA, 25 bp, Homo sapien
ggccagggagggctacgctccttcc

SEQ ID NO: 2488910 - DNA, 25 bp, Homo sapien
tcaaaaggatgctcataagagtctt

SEQ ID NO: 2488911 - DNA, 25 bp, Homo sapien
gaacaaacatgaggatcaaaaggat

SEQ ID NO: 2488912 - DNA, 25 bp, Homo sapien
gatgctcataagagtctttgtggaa

SEQ ID NO: 2488913 - DNA, 25 bp, Homo sapien
gaggatcaaaaggatgctcataaga

SEQ ID NO: 2488914 - DNA, 25 bp, Homo sapien
atcaggatttgatgtgtagttgtca

SEQ ID NO: 2488915 - DNA, 25 bp, Homo sapien
ggatttgatgtgtagttgtcattta

SEQ ID NO: 2488916 - DNA, 25 bp, Homo sapien
caggatttgatgtgtagttgtcatt

SEQ ID NO: 2488917 - DNA, 25 bp, Homo sapien
tcaggatttgatgtgtagttgtcat

SEQ ID NO: 2488918 - DNA, 25 bp, Homo sapien
cagcatatgccctgcatactctgct

SEQ ID NO: 2488919 - DNA, 25 bp, Homo sapien
caactggtgttattaggccctggga

SEQ ID NO: 2488920 - DNA, 25 bp, Homo sapien
cctgggaggagtgtactatttcaac

SEQ ID NO: 2488921 - DNA, 25 bp, Homo sapien
gtctctgagtatcccacaatttggg

SEQ ID NO: 2488922 - DNA, 25 bp, Homo sapien
tctagaacctcaaagagctacaggc

SEQ ID NO: 2488923 - DNA, 25 bp, Homo sapien
gtcctctgagtctcataaggacctg

SEQ ID NO: 2488924 - DNA, 25 bp, Homo sapien
tgagtctcataaggacctgggtacc

SEQ ID NO: 2488925 - DNA, 25 bp, Homo sapien
agtctcataaggacctgggtaccct

SEQ ID NO: 2488926 - DNA, 25 bp, Homo sapien
tctgagtctcataaggacctgggta

SEQ ID NO: 2488927 - DNA, 25 bp, Homo sapien
taggaaaatacaagcctgctgccac

SEQ ID NO: 2488928 - DNA, 25 bp, Homo sapien
ggaatcagggactggccaaactctg

SEQ ID NO: 2488929 - DNA, 25 bp, Homo sapien
tcagctcatcgcctaagcttgatag

SEQ ID NO: 2488930 - DNA, 25 bp, Homo sapien
gctgccacgtatcgtgaggccctct

SEQ ID NO: 2488931 - DNA, 25 bp, Homo sapien
tatgtgaatgtgtaaaacctgagct

SEQ ID NO: 2488932 - DNA, 25 bp, Homo sapien
gatagtctctgtatgtgaatgtgta

SEQ ID NO: 2488933 - DNA, 25 bp, Homo sapien
ttggagtggacttgatgtatggccc

SEQ ID NO: 2488934 - DNA, 25 bp, Homo sapien
taaaacctgagctgcatggagccct

SEQ ID NO: 2488935 - DNA, 25 bp, Homo sapien
catagttaagagagtaggcttagga

SEQ ID NO: 2488936 - DNA, 25 bp, Homo sapien
aacagtagggttttcattacaacat

SEQ ID NO: 2488937 - DNA, 25 bp, Homo sapien
tgttgcaaatattagcaaacctact

SEQ ID NO: 2488938 - DNA, 25 bp, Homo sapien
taagttacttaatcttggtgtctca

SEQ ID NO: 2488939 - DNA, 25 bp, Homo sapien
taacctacagtttgtcagcacaggg

SEQ ID NO: 2488940 - DNA, 25 bp, Homo sapien
caggctgctggttaacatactgtgg

SEQ ID NO: 2488941 - DNA, 25 bp, Homo sapien
tactgtggtttcaatcctttaagcc

SEQ ID NO: 2488942 - DNA, 25 bp, Homo sapien
ccctgaaggcagttggacattagcc

SEQ ID NO: 2488943 - DNA, 25 bp, Homo sapien
caaataccctggaaagagacaggcc

SEQ ID NO: 2488944 - DNA, 25 bp, Homo sapien
gatgcctgaaaaggagtaaccgtgg

SEQ ID NO: 2488945 - DNA, 25 bp, Homo sapien
tgttcatggttgtacctgcacagga

SEQ ID NO: 2488946 - DNA, 25 bp, Homo sapien
gagccagcgtgaggacaaagcagat

SEQ ID NO: 2488947 - DNA, 25 bp, Homo sapien
gaaatcatccgccttctgcatcaat

SEQ ID NO: 2488948 - DNA, 25 bp, Homo sapien
cagaaatcatccgccttctgcatca

SEQ ID NO: 2488949 - DNA, 25 bp, Homo sapien
cgccttctgcatcaatcttgctggg

SEQ ID NO: 2488950 - DNA, 25 bp, Homo sapien
tccgccttctgcatcaatcttgctg

SEQ ID NO: 2488951 - DNA, 25 bp, Homo sapien
tgggcaggaacgtggcctgactcct

SEQ ID NO: 2488952 - DNA, 25 bp, Homo sapien
tacaaagcagcctgctacagctgtg

SEQ ID NO: 2488953 - DNA, 25 bp, Homo sapien
gagccagagtattcagtgggcagga

SEQ ID NO: 2488954 - DNA, 25 bp, Homo sapien
gcctgactccttactggacacacag

SEQ ID NO: 2488955 - DNA, 25 bp, Homo sapien
tctttaattaacaaagcccacaggc

SEQ ID NO: 2488956 - DNA, 25 bp, Homo sapien
tcagagagtgcattcccttttgcaa

SEQ ID NO: 2488957 - DNA, 25 bp, Homo sapien
gcttcttcagagagtgcattccctt

SEQ ID NO: 2488958 - DNA, 25 bp, Homo sapien
gctggcatatgcttcttcagagagt

SEQ ID NO: 2488959 - DNA, 25 bp, Homo sapien
ggcatatgcttcttcagagagtgca

SEQ ID NO: 2488960 - DNA, 25 bp, Homo sapien
tcttcttgaactgccccatcacttt

SEQ ID NO: 2488961 - DNA, 25 bp, Homo sapien
caatagtcttgccaacaggctgact

SEQ ID NO: 2488962 - DNA, 25 bp, Homo sapien
gggaccccaaatgactctgcttatt

SEQ ID NO: 2488963 - DNA, 25 bp, Homo sapien
tcatttggagaagcattatgccctc

SEQ ID NO: 2488964 - DNA, 25 bp, Homo sapien
tttcccctccttgaacgccatgaag

SEQ ID NO: 2488965 - DNA, 25 bp, Homo sapien
ctccttgaacgccatgaagcagttt

SEQ ID NO: 2488966 - DNA, 25 bp, Homo sapien
gaacgccatgaagcagtttactaga

SEQ ID NO: 2488967 - DNA, 25 bp, Homo sapien
gaagcagtttactagagcagaattg

SEQ ID NO: 2488968 - DNA, 25 bp, Homo sapien
tttggctggctcttcaatagtgtgg

SEQ ID NO: 2488969 - DNA, 25 bp, Homo sapien
gctcttcaatagtgtggccattggc

SEQ ID NO: 2488970 - DNA, 25 bp, Homo sapien
tgggcaagcaattaggagagccaga

SEQ ID NO: 2488971 - DNA, 25 bp, Homo sapien
tggcatgagctgtaatgctccggta

SEQ ID NO: 2488972 - DNA, 25 bp, Homo sapien
cacagtcggccaaacaatgaagatc

SEQ ID NO: 2488973 - DNA, 25 bp, Homo sapien
ctaaacacagtcggccaaacaatga

SEQ ID NO: 2488974 - DNA, 25 bp, Homo sapien
ccatatgggatcaatcttggtgatg

SEQ ID NO: 2488975 - DNA, 25 bp, Homo sapien
aatgtgatagttccctttaagatcc

SEQ ID NO: 2488976 - DNA, 25 bp, Homo sapien
ttaagatccttcagatttgacatgg

SEQ ID NO: 2488977 - DNA, 25 bp, Homo sapien
tggtgatgatgataagtccttggtg

SEQ ID NO: 2488978 - DNA, 25 bp, Homo sapien
tttttttcaacgcaaacagtcctca

SEQ ID NO: 2488979 - DNA, 25 bp, Homo sapien
ttttttcaacgcaaacagtcctcat

SEQ ID NO: 2488980 - DNA, 25 bp, Homo sapien
agatggacacatggtgtcccaccat

SEQ ID NO: 2488981 - DNA, 25 bp, Homo sapien
gtgtcccaccatgttgcatgcatct

SEQ ID NO: 2488982 - DNA, 25 bp, Homo sapien
tgagatggacacatggtgtcccacc

SEQ ID NO: 2488983 - DNA, 25 bp, Homo sapien
gtgagatggacacatggtgtcccac

SEQ ID NO: 2488984 - DNA, 25 bp, Homo sapien
gcattaacacaatcacttattgggt

SEQ ID NO: 2488985 - DNA, 25 bp, Homo sapien
gggccccagaaagattattattaga

SEQ ID NO: 2488986 - DNA, 25 bp, Homo sapien
tattgggtactactttctgtgtgcc

SEQ ID NO: 2488987 - DNA, 25 bp, Homo sapien
tatgacatgtgacttgagaacccaa

SEQ ID NO: 2488988 - DNA, 25 bp, Homo sapien
aaactacttttgtgctgggctaaca

SEQ ID NO: 2488989 - DNA, 25 bp, Homo sapien
gactctcaataaggcatatctgcgg

SEQ ID NO: 2488990 - DNA, 25 bp, Homo sapien
cccctctgacagatgatggcacaca

SEQ ID NO: 2488991 - DNA, 25 bp, Homo sapien
tatctgcggaatgttgacctcggag

SEQ ID NO: 2488992 - DNA, 25 bp, Homo sapien
tgtccataatactgagagcattgtg

SEQ ID NO: 2488993 - DNA, 25 bp, Homo sapien
gcattgtgtattacatgacactctg

SEQ ID NO: 2488994 - DNA, 25 bp, Homo sapien
tcctctgctaccttggtagaaatgc

SEQ ID NO: 2488995 - DNA, 25 bp, Homo sapien
gacactctgacttctttacgagaac

SEQ ID NO: 2488996 - DNA, 25 bp, Homo sapien
tcttgtgacttacgcatttttgccc

SEQ ID NO: 2488997 - DNA, 25 bp, Homo sapien
cttaaaacgtttcagatgtcggagt

SEQ ID NO: 2488998 - DNA, 25 bp, Homo sapien
gtttaaatgccactaccacagtgta

SEQ ID NO: 2488999 - DNA, 25 bp, Homo sapien
tctataccatcatgctacagacgta

SEQ ID NO: 2489000 - DNA, 25 bp, Homo sapien
ttggattcaggtggatcccgccgct

SEQ ID NO: 2489001 - DNA, 25 bp, Homo sapien
gtaattggattcaggtggatcccgc

SEQ ID NO: 2489002 - DNA, 25 bp, Homo sapien
ttaagtgaaggcgtgtgctgcctga

SEQ ID NO: 2489003 - DNA, 25 bp, Homo sapien
gccgctcctcggcctttttaagtga

SEQ ID NO: 2489004 - DNA, 25 bp, Homo sapien
tcttcttggcatgcaatgcttggat

SEQ ID NO: 2489005 - DNA, 25 bp, Homo sapien
ttgcatttgaatcaagcaccaggtc

SEQ ID NO: 2489006 - DNA, 25 bp, Homo sapien
tttgaatcaagcaccaggtcatctt

SEQ ID NO: 2489007 - DNA, 25 bp, Homo sapien
tcagcagcataatctccaagtgggg

SEQ ID NO: 2489008 - DNA, 25 bp, Homo sapien
catggcaggttccatgtgcaccaca

SEQ ID NO: 2489009 - DNA, 25 bp, Homo sapien
ttcatggcaggttccatgtgcacca

SEQ ID NO: 2489010 - DNA, 25 bp, Homo sapien
tcatggcaggttccatgtgcaccac

SEQ ID NO: 2489011 - DNA, 25 bp, Homo sapien
acagaggtctccctggtaacctttg

SEQ ID NO: 2489012 - DNA, 25 bp, Homo sapien
cagaggtctccctggtaacctttgg

SEQ ID NO: 2489013 - DNA, 25 bp, Homo sapien
caggagacgttagacattcgaaagc

SEQ ID NO: 2489014 - DNA, 25 bp, Homo sapien
caccgcagtcaggaaggaggacgtt

SEQ ID NO: 2489015 - DNA, 25 bp, Homo sapien
tgaactacttggtgagcccgaattt

SEQ ID NO: 2489016 - DNA, 25 bp, Homo sapien
gaggacccttagattcaccgcagtc

SEQ ID NO: 2489017 - DNA, 25 bp, Homo sapien
taaagagagaggctacatgacttgc

SEQ ID NO: 2489018 - DNA, 25 bp, Homo sapien
gatgtgtggcacttcaccaatcaag

SEQ ID NO: 2489019 - DNA, 25 bp, Homo sapien
gacacttagtggacaggctgacctt

SEQ ID NO: 2489020 - DNA, 25 bp, Homo sapien
gacttgctgagagctacatggctgg

SEQ ID NO: 2489021 - DNA, 25 bp, Homo sapien
gaaacaggtccctccattaaagcag

SEQ ID NO: 2489022 - DNA, 25 bp, Homo sapien
cagggtagaaacaggtccctccatt

SEQ ID NO: 2489023 - DNA, 25 bp, Homo sapien
tgctctccctctagtcctggagggc

SEQ ID NO: 2489024 - DNA, 25 bp, Homo sapien
tagaaacaggtccctccattaaagc

SEQ ID NO: 2489025 - DNA, 25 bp, Homo sapien
agtgtcagtttctggaatttcactg

SEQ ID NO: 2489026 - DNA, 25 bp, Homo sapien
gtttctggaatttcactgctcacta

SEQ ID NO: 2489027 - DNA, 25 bp, Homo sapien
cagtttctggaatttcactgctcac

SEQ ID NO: 2489028 - DNA, 25 bp, Homo sapien
tctggaatttcactgctcactagca

SEQ ID NO: 2489029 - DNA, 25 bp, Homo sapien
tgtgacaccgtagcactagaaaaac

SEQ ID NO: 2489030 - DNA, 25 bp, Homo sapien
cataagaaggtctcacaaatggtct

SEQ ID NO: 2489031 - DNA, 25 bp, Homo sapien
caatggccacgcctacataagaagg

SEQ ID NO: 2489032 - DNA, 25 bp, Homo sapien
gagttcttcaactaaatctggagga

SEQ ID NO: 2489033 - DNA, 25 bp, Homo sapien
ctttgtcacagttcactccatagaa

SEQ ID NO: 2489034 - DNA, 25 bp, Homo sapien
tcacagttcactccatagaatccag

SEQ ID NO: 2489035 - DNA, 25 bp, Homo sapien
ttcatacatcgtggggtacaaaggg

SEQ ID NO: 2489036 - DNA, 25 bp, Homo sapien
aaagtccaccattcatacatcgtgg

SEQ ID NO: 2489037 - DNA, 25 bp, Homo sapien
ctcacagtgaggtccgtggaaccca

SEQ ID NO: 2489038 - DNA, 25 bp, Homo sapien
gatgcgtctttcattacaaaagcct

SEQ ID NO: 2489039 - DNA, 25 bp, Homo sapien
catcaggacactcgcagatgcgtct

SEQ ID NO: 2489040 - DNA, 25 bp, Homo sapien
gtggaacccatcaggacactcgcag

SEQ ID NO: 2489041 - DNA, 25 bp, Homo sapien
gagagaaacaaagcttatatggaca

SEQ ID NO: 2489042 - DNA, 25 bp, Homo sapien
gcagagagaaacaaagcttatatgg

SEQ ID NO: 2489043 - DNA, 25 bp, Homo sapien
cagagagaaacaaagcttatatgga

SEQ ID NO: 2489044 - DNA, 25 bp, Homo sapien
gagaaacaaagcttatatggacacc

SEQ ID NO: 2489045 - DNA, 25 bp, Homo sapien
aaatcatgttgggtgaatcacagcc

SEQ ID NO: 2489046 - DNA, 25 bp, Homo sapien
gttctagcccaccaattaatcataa

SEQ ID NO: 2489047 - DNA, 25 bp, Homo sapien
tgttcatttctgttctagcccacca

SEQ ID NO: 2489048 - DNA, 25 bp, Homo sapien
tgatcaaataccagtacttccaact

SEQ ID NO: 2489049 - DNA, 25 bp, Homo sapien
cataacaatcacatccacttcaaat

SEQ ID NO: 2489050 - DNA, 25 bp, Homo sapien
tgtttggagaatggtgttgccttca

SEQ ID NO: 2489051 - DNA, 25 bp, Homo sapien
tccacttcaaatgctgccaccccat

SEQ ID NO: 2489052 - DNA, 25 bp, Homo sapien
tccaagacatgggaaaccaacttga

SEQ ID NO: 2489053 - DNA, 25 bp, Homo sapien
agggacattgacggttggatctgcc

SEQ ID NO: 2489054 - DNA, 25 bp, Homo sapien
gggacattgacggttggatctgcca

SEQ ID NO: 2489055 - DNA, 25 bp, Homo sapien
gagggacattgacggttggatctgc

SEQ ID NO: 2489056 - DNA, 25 bp, Homo sapien
ggacattgacggttggatctgccat

SEQ ID NO: 2489057 - DNA, 25 bp, Homo sapien
ggagcgcaaggacaggaattcatag

SEQ ID NO: 2489058 - DNA, 25 bp, Homo sapien
tttatccagggagcgcaaggacagg

SEQ ID NO: 2489059 - DNA, 25 bp, Homo sapien
gatgcctttatccagggagcgcaag

SEQ ID NO: 2489060 - DNA, 25 bp, Homo sapien
cagggagcgcaaggacaggaattca

SEQ ID NO: 2489061 - DNA, 25 bp, Homo sapien
ttgccatctgcgtcatgcccatgct

SEQ ID NO: 2489062 - DNA, 25 bp, Homo sapien
gaagctcaggtattttcacagattg

SEQ ID NO: 2489063 - DNA, 25 bp, Homo sapien
gacagcaatgctcaacatgaaccat

SEQ ID NO: 2489064 - DNA, 25 bp, Homo sapien
gaaccatttccctgtagacagcaat

SEQ ID NO: 2489065 - DNA, 25 bp, Homo sapien
tcacagtaagcctgctccaactcaa

SEQ ID NO: 2489066 - DNA, 25 bp, Homo sapien
agcaaagtcctgggtcgatgccaac

SEQ ID NO: 2489067 - DNA, 25 bp, Homo sapien
actcaagcagtagcaaagtcctggg

SEQ ID NO: 2489068 - DNA, 25 bp, Homo sapien
tgctccaactcaagcagtagcaaag

SEQ ID NO: 2489069 - DNA, 25 bp, Homo sapien
gtgatgactgttgatctgatgtgat

SEQ ID NO: 2489070 - DNA, 25 bp, Homo sapien
aaagttcccgcatgtggataggtgg

SEQ ID NO: 2489071 - DNA, 25 bp, Homo sapien
catgtggataggtggattcggttcc

SEQ ID NO: 2489072 - DNA, 25 bp, Homo sapien
caactgtcatcttttagtgatgact

SEQ ID NO: 2489073 - DNA, 25 bp, Homo sapien
taaaaccatggcaaacagtgacggt

SEQ ID NO: 2489074 - DNA, 25 bp, Homo sapien
tacagtctcggcattagctaacagt

SEQ ID NO: 2489075 - DNA, 25 bp, Homo sapien
cagtgacggttctgtaattggacct

SEQ ID NO: 2489076 - DNA, 25 bp, Homo sapien
gtaattggacctttatgaattccat

SEQ ID NO: 2489077 - DNA, 25 bp, Homo sapien
agagctttgtaaacaggccagtctt

SEQ ID NO: 2489078 - DNA, 25 bp, Homo sapien
aaaatctgtatctgtagttcctttt

SEQ ID NO: 2489079 - DNA, 25 bp, Homo sapien
gttccttttgatgctcttggaatgt

SEQ ID NO: 2489080 - DNA, 25 bp, Homo sapien
gctttgtaaacaggccagtcttcac

SEQ ID NO: 2489081 - DNA, 25 bp, Homo sapien
aaagaccagctaattctgtgaattc

SEQ ID NO: 2489082 - DNA, 25 bp, Homo sapien
tatctacttttaagcattcgatggc

SEQ ID NO: 2489083 - DNA, 25 bp, Homo sapien
ctactttttcccgtgcaaagaccag

SEQ ID NO: 2489084 - DNA, 25 bp, Homo sapien
acttttaagcattcgatggctctga

SEQ ID NO: 2489085 - DNA, 25 bp, Homo sapien
agttccactgttacatgtctcctcg

SEQ ID NO: 2489086 - DNA, 25 bp, Homo sapien
ttcacgaacatcctttgagctccag

SEQ ID NO: 2489087 - DNA, 25 bp, Homo sapien
catgtctcctcggtgaagccttcct

SEQ ID NO: 2489088 - DNA, 25 bp, Homo sapien
tctgtgctcctagagctctgtgttc

SEQ ID NO: 2489089 - DNA, 25 bp, Homo sapien
tcccactttgaaaccatggaacagg

SEQ ID NO: 2489090 - DNA, 25 bp, Homo sapien
gcagatacaacagatggctggcaca

SEQ ID NO: 2489091 - DNA, 25 bp, Homo sapien
ggtatgacagcaaaccccaggagtg

SEQ ID NO: 2489092 - DNA, 25 bp, Homo sapien
gacagtacacattaagggatttcca

SEQ ID NO: 2489093 - DNA, 25 bp, Homo sapien
tacatgacaccttttgggtctaact

SEQ ID NO: 2489094 - DNA, 25 bp, Homo sapien
acatgacaccttttgggtctaactt

SEQ ID NO: 2489095 - DNA, 25 bp, Homo sapien
ttacatgacaccttttgggtctaac

SEQ ID NO: 2489096 - DNA, 25 bp, Homo sapien
tgaaatcatgtgtaaaaggtgccat

SEQ ID NO: 2489097 - DNA, 25 bp, Homo sapien
atggatattgacaggaatagctggc

SEQ ID NO: 2489098 - DNA, 25 bp, Homo sapien
tttctgaaatcatgtgtaaaaggtg

SEQ ID NO: 2489099 - DNA, 25 bp, Homo sapien
tcatgtgtaaaaggtgccattttcc

SEQ ID NO: 2489100 - DNA, 25 bp, Homo sapien
gatccataggtacaggctctcctcc

SEQ ID NO: 2489101 - DNA, 25 bp, Homo sapien
tgagcatcgatccataggtacaggc

SEQ ID NO: 2489102 - DNA, 25 bp, Homo sapien
aggatgctccagagccagagcgcgg

SEQ ID NO: 2489103 - DNA, 25 bp, Homo sapien
ctcttgcctggtgagcatcgatcca

SEQ ID NO: 2489104 - DNA, 25 bp, Homo sapien
acgtaagactggcaaagctggcgag

SEQ ID NO: 2489105 - DNA, 25 bp, Homo sapien
aacctggcgccgtcagatactctgc

SEQ ID NO: 2489106 - DNA, 25 bp, Homo sapien
tgccgggaaaactcctcgtgccgca

SEQ ID NO: 2489107 - DNA, 25 bp, Homo sapien
tgttcccgtttagacggctgggcgc

SEQ ID NO: 2489108 - DNA, 25 bp, Homo sapien
tgggccctggacgatagctgtacct

SEQ ID NO: 2489109 - DNA, 25 bp, Homo sapien
tcgactgtccgatggtgccgatggc

SEQ ID NO: 2489110 - DNA, 25 bp, Homo sapien
tgtctccctgataacccggcagtgc

SEQ ID NO: 2489111 - DNA, 25 bp, Homo sapien
tgcgcgctcccaagcagttaaaact

SEQ ID NO: 2489112 - DNA, 25 bp, Homo sapien
aatgcctcaaggatcaaatgtctgg

SEQ ID NO: 2489113 - DNA, 25 bp, Homo sapien
tgtgcaggcatcaagttaaatcagt

SEQ ID NO: 2489114 - DNA, 25 bp, Homo sapien
tagtacccgaagctgtgacaaatgc

SEQ ID NO: 2489115 - DNA, 25 bp, Homo sapien
cctttatagagtagcagatgcctca

SEQ ID NO: 2489116 - DNA, 25 bp, Homo sapien
aaatgttggagtacttctgggatca

SEQ ID NO: 2489117 - DNA, 25 bp, Homo sapien
tatatgattgaggagaaccttctgg

SEQ ID NO: 2489118 - DNA, 25 bp, Homo sapien
ccttaggtctttgtacagagagtcc

SEQ ID NO: 2489119 - DNA, 25 bp, Homo sapien
cagagagtccattatccatagagag

SEQ ID NO: 2489120 - DNA, 25 bp, Homo sapien
ggaaagaccgggcttcgctccagta

SEQ ID NO: 2489121 - DNA, 25 bp, Homo sapien
gcttcagctcggacgagtcggacgt

SEQ ID NO: 2489122 - DNA, 25 bp, Homo sapien
ggcctgtgccgaatctcggcctctg

SEQ ID NO: 2489123 - DNA, 25 bp, Homo sapien
ccgcggctggcagcaaagtgctgct

SEQ ID NO: 2489124 - DNA, 25 bp, Homo sapien
ggtggccgcctctagttcactcagg

SEQ ID NO: 2489125 - DNA, 25 bp, Homo sapien
taatactgggactgacttacctagg

SEQ ID NO: 2489126 - DNA, 25 bp, Homo sapien
gatcaatcacgccaatcatacgggc

SEQ ID NO: 2489127 - DNA, 25 bp, Homo sapien
caacagggagtttcagtgcccacta

SEQ ID NO: 2489128 - DNA, 25 bp, Homo sapien
ttaggagacaatctgaaaagcagtc

SEQ ID NO: 2489129 - DNA, 25 bp, Homo sapien
tcatttggatagcagttgaggccct

SEQ ID NO: 2489130 - DNA, 25 bp, Homo sapien
tgaggcccttctagtatatagacgg

SEQ ID NO: 2489131 - DNA, 25 bp, Homo sapien
gaagccagtagttagacatttaagc

SEQ ID NO: 2489132 - DNA, 25 bp, Homo sapien
taagcttcatgatcgattggcacag

SEQ ID NO: 2489133 - DNA, 25 bp, Homo sapien
gcacagcttgcaggtaattgtttta

SEQ ID NO: 2489134 - DNA, 25 bp, Homo sapien
cattacctatacagagtgatttttg

SEQ ID NO: 2489135 - DNA, 25 bp, Homo sapien
ccaagtccagtgttatatttgtgaa

SEQ ID NO: 2489136 - DNA, 25 bp, Homo sapien
tttaactacttgaaagacacaggga

SEQ ID NO: 2489137 - DNA, 25 bp, Homo sapien
gggaaaacatgacaattggagttca

SEQ ID NO: 2489138 - DNA, 25 bp, Homo sapien
catttggcaaggattttactttaat

SEQ ID NO: 2489139 - DNA, 25 bp, Homo sapien
taataaccacttatagtctaaagaa

SEQ ID NO: 2489140 - DNA, 25 bp, Homo sapien
gagacagtgaagaatttttaccgag

SEQ ID NO: 2489141 - DNA, 25 bp, Homo sapien
taccgagtaggaatatggttgttga

SEQ ID NO: 2489142 - DNA, 25 bp, Homo sapien
aatctacctcctgttagtcaacaag

SEQ ID NO: 2489143 - DNA, 25 bp, Homo sapien
gcgctctgcactcttttactggaaa

SEQ ID NO: 2489144 - DNA, 25 bp, Homo sapien
caaagggatttagcagtgaggcagc

SEQ ID NO: 2489145 - DNA, 25 bp, Homo sapien
agtttttggagctcagttaagccaa

SEQ ID NO: 2489146 - DNA, 25 bp, Homo sapien
gaatacatctctgaacgttccagaa

SEQ ID NO: 2489147 - DNA, 25 bp, Homo sapien
ttattgatgaatacatctctgaacg

SEQ ID NO: 2489148 - DNA, 25 bp, Homo sapien
cctgaaactgttaagccgaccaaga

SEQ ID NO: 2489149 - DNA, 25 bp, Homo sapien
tgcacagataatgcacgttttctgg

SEQ ID NO: 2489150 - DNA, 25 bp, Homo sapien
gaaagccctattgtgccttacctgt

SEQ ID NO: 2489151 - DNA, 25 bp, Homo sapien
tctggttaagtaaacatgatgcaca

SEQ ID NO: 2489152 - DNA, 25 bp, Homo sapien
caatatggctcggttgtacggcgga

SEQ ID NO: 2489153 - DNA, 25 bp, Homo sapien
tggctcggttgtacggcggacatcc

SEQ ID NO: 2489154 - DNA, 25 bp, Homo sapien
taacaatatggctcggttgtacggc

SEQ ID NO: 2489155 - DNA, 25 bp, Homo sapien
catcttgtaacaatatggctcggtt

SEQ ID NO: 2489156 - DNA, 25 bp, Homo sapien
tcaagttattactccaaatggatcc

SEQ ID NO: 2489157 - DNA, 25 bp, Homo sapien
tgtccaatcaagtaaggccacaggt

SEQ ID NO: 2489158 - DNA, 25 bp, Homo sapien
tgaaaggagccttatagtctgagcc

SEQ ID NO: 2489159 - DNA, 25 bp, Homo sapien
cataccatacactgtccaatcaagt

SEQ ID NO: 2489160 - DNA, 25 bp, Homo sapien
tattttaacacacttggtgactggg

SEQ ID NO: 2489161 - DNA, 25 bp, Homo sapien
tagccagtcagtattcacggtgtgc

SEQ ID NO: 2489162 - DNA, 25 bp, Homo sapien
tattcccactgtagcacattgaggc

SEQ ID NO: 2489163 - DNA, 25 bp, Homo sapien
tcagaggtgagagtattgaccgccc

SEQ ID NO: 2489164 - DNA, 25 bp, Homo sapien
tcttgaaaagctaagggtcatttgg

SEQ ID NO: 2489165 - DNA, 25 bp, Homo sapien
aggtcctgtcccattagtttgaggg

SEQ ID NO: 2489166 - DNA, 25 bp, Homo sapien
cagtgccaaggaaaattaggcaact

SEQ ID NO: 2489167 - DNA, 25 bp, Homo sapien
taccatcactttagttcacgttgaa

SEQ ID NO: 2489168 - DNA, 25 bp, Homo sapien
tctccgtattacagtgagtgctcgt

SEQ ID NO: 2489169 - DNA, 25 bp, Homo sapien
tcctctgctagagagggcccgctca

SEQ ID NO: 2489170 - DNA, 25 bp, Homo sapien
cgctcacctggaacgcaggcggctg

SEQ ID NO: 2489171 - DNA, 25 bp, Homo sapien
caggcggctggttctccgtattaca

SEQ ID NO: 2489172 - DNA, 25 bp, Homo sapien
gaacacgccaggtgggcgcttggct

SEQ ID NO: 2489173 - DNA, 25 bp, Homo sapien
tctcaacaacccctgacacgtcttc

SEQ ID NO: 2489174 - DNA, 25 bp, Homo sapien
tcagcggtctcaggtggaacacgcc

SEQ ID NO: 2489175 - DNA, 25 bp, Homo sapien
tccggtctcttcgtgttggtttgtc

SEQ ID NO: 2489176 - DNA, 25 bp, Homo sapien
cgcgggagcctctcgccccgcgcgg

SEQ ID NO: 2489177 - DNA, 25 bp, Homo sapien
agggatctggcggggcagcccgcgg

SEQ ID NO: 2489178 - DNA, 25 bp, Homo sapien
agagagggatctggcggggcagccc

SEQ ID NO: 2489179 - DNA, 25 bp, Homo sapien
agagggatctggcggggcagcccgc

SEQ ID NO: 2489180 - DNA, 25 bp, Homo sapien
taccgccagagagcatccaaacatt

SEQ ID NO: 2489181 - DNA, 25 bp, Homo sapien
gcccaggccttaagacagtttgata

SEQ ID NO: 2489182 - DNA, 25 bp, Homo sapien
taggtctgggttagggataccgcca

SEQ ID NO: 2489183 - DNA, 25 bp, Homo sapien
gctagttatctgtgagcattccaga

SEQ ID NO: 2489184 - DNA, 25 bp, Homo sapien
gatgctttcctgtaactgagatggc

SEQ ID NO: 2489185 - DNA, 25 bp, Homo sapien
tgaagacctaacgagaatagcggca

SEQ ID NO: 2489186 - DNA, 25 bp, Homo sapien
tagcggcaccgcagtagaagtgttg

SEQ ID NO: 2489187 - DNA, 25 bp, Homo sapien
tgttgagcacccagaatttaccaga

SEQ ID NO: 2489188 - DNA, 25 bp, Homo sapien
ggtcactataccctgatctctgaca

SEQ ID NO: 2489189 - DNA, 25 bp, Homo sapien
acacttggccgtggtagcctggagc

SEQ ID NO: 2489190 - DNA, 25 bp, Homo sapien
ttgagttggccactccggtcactat

SEQ ID NO: 2489191 - DNA, 25 bp, Homo sapien
tgacacttggccgtggtagcctgga

SEQ ID NO: 2489192 - DNA, 25 bp, Homo sapien
taagcctgtgctacatggtagaatc

SEQ ID NO: 2489193 - DNA, 25 bp, Homo sapien
caaatccttatggtttcttgggtca

SEQ ID NO: 2489194 - DNA, 25 bp, Homo sapien
tgcatgtgagtatacacctacaggt

SEQ ID NO: 2489195 - DNA, 25 bp, Homo sapien
ggagaccctttcatgtagtagtaac

SEQ ID NO: 2489196 - DNA, 25 bp, Homo sapien
cagccagtagcccttcgagcctgtg

SEQ ID NO: 2489197 - DNA, 25 bp, Homo sapien
ttccctcaggttgctgcttgttgta

SEQ ID NO: 2489198 - DNA, 25 bp, Homo sapien
tctgcattcaacctgctgcatttgg

SEQ ID NO: 2489199 - DNA, 25 bp, Homo sapien
cttcgagcctgtgggcttccctcag

SEQ ID NO: 2489200 - DNA, 25 bp, Homo sapien
gcacagggccaactgggtgtttctg

SEQ ID NO: 2489201 - DNA, 25 bp, Homo sapien
catagtgaaggcacagggccaactg

SEQ ID NO: 2489202 - DNA, 25 bp, Homo sapien
ctgtacatagtgaaggcacagggcc

SEQ ID NO: 2489203 - DNA, 25 bp, Homo sapien
gtacatagtgaaggcacagggccaa

SEQ ID NO: 2489204 - DNA, 25 bp, Homo sapien
tggtaaaagcccaaagaaactctca

SEQ ID NO: 2489205 - DNA, 25 bp, Homo sapien
gattccagacattccagacagagac

SEQ ID NO: 2489206 - DNA, 25 bp, Homo sapien
catactaacagaaaggtgtttctca

SEQ ID NO: 2489207 - DNA, 25 bp, Homo sapien
ggggagctgccctatacattgtagg

SEQ ID NO: 2489208 - DNA, 25 bp, Homo sapien
gacatactgctaagaggcagacata

SEQ ID NO: 2489209 - DNA, 25 bp, Homo sapien
cagcattctctatctgtaggtttga

SEQ ID NO: 2489210 - DNA, 25 bp, Homo sapien
tctatctgtaggtttgagttctaca

SEQ ID NO: 2489211 - DNA, 25 bp, Homo sapien
tttgagttctacagatgcacctttt

SEQ ID NO: 2489212 - DNA, 25 bp, Homo sapien
ttctacagatgcaccttttcgtccc

SEQ ID NO: 2489213 - DNA, 25 bp, Homo sapien
caaaggcttctgaatttacaaccag

SEQ ID NO: 2489214 - DNA, 25 bp, Homo sapien
gcttctgaatttacaaccagtatta

SEQ ID NO: 2489215 - DNA, 25 bp, Homo sapien
cccacagccgaactgagagcttcaa

SEQ ID NO: 2489216 - DNA, 25 bp, Homo sapien
agttttcccacagccgaactgagag

SEQ ID NO: 2489217 - DNA, 25 bp, Homo sapien
catttttggttgaaaacgctgacta

SEQ ID NO: 2489218 - DNA, 25 bp, Homo sapien
gcagcctctgaatcagatgtatgaa

SEQ ID NO: 2489219 - DNA, 25 bp, Homo sapien
aatctttggatcctgtgtcttctgc

SEQ ID NO: 2489220 - DNA, 25 bp, Homo sapien
ctagtttggtaactccagaaatctt

SEQ ID NO: 2489221 - DNA, 25 bp, Homo sapien
tgtgaccaaagattttatgcatgac

SEQ ID NO: 2489222 - DNA, 25 bp, Homo sapien
cactaggttcatcttgaaggtagaa

SEQ ID NO: 2489223 - DNA, 25 bp, Homo sapien
gctaaattcctgtactgaaggtaag

SEQ ID NO: 2489224 - DNA, 25 bp, Homo sapien
tagttataacagctgtacaggcaca

SEQ ID NO: 2489225 - DNA, 25 bp, Homo sapien
taagctccttttagcttatgactga

SEQ ID NO: 2489226 - DNA, 25 bp, Homo sapien
ttttggttagaaataaggtagcata

SEQ ID NO: 2489227 - DNA, 25 bp, Homo sapien
aataaggtagcatagggccgggcac

SEQ ID NO: 2489228 - DNA, 25 bp, Homo sapien
gctccttttagcttatgactgaaag

SEQ ID NO: 2489229 - DNA, 25 bp, Homo sapien
agaaagtatagtgtgattagcaccc

SEQ ID NO: 2489230 - DNA, 25 bp, Homo sapien
gaaatttgagtgacatacacgtcat

SEQ ID NO: 2489231 - DNA, 25 bp, Homo sapien
catgtccacatccagttgaaaactc

SEQ ID NO: 2489232 - DNA, 25 bp, Homo sapien
cgtcattgtgtaaaggatcgtggca

SEQ ID NO: 2489233 - DNA, 25 bp, Homo sapien
aatggaggattgctgttgagtacag

SEQ ID NO: 2489234 - DNA, 25 bp, Homo sapien
tcgaatcaaaatggaggattgctgt

SEQ ID NO: 2489235 - DNA, 25 bp, Homo sapien
aaaatggaggattgctgttgagtac

SEQ ID NO: 2489236 - DNA, 25 bp, Homo sapien
tttgagaagtcgaatcaaaatggag

SEQ ID NO: 2489237 - DNA, 25 bp, Homo sapien
ataaattggaatgaatcgatgatca

SEQ ID NO: 2489238 - DNA, 25 bp, Homo sapien
taaattggaatgaatcgatgatcat

SEQ ID NO: 2489239 - DNA, 25 bp, Homo sapien
agcagaacaaggattgtttggctat

SEQ ID NO: 2489240 - DNA, 25 bp, Homo sapien
gcagaacaaggattgtttggctatt

SEQ ID NO: 2489241 - DNA, 25 bp, Homo sapien
gcagcagaacaaggattgtttggct

SEQ ID NO: 2489242 - DNA, 25 bp, Homo sapien
cagcagaacaaggattgtttggcta

SEQ ID NO: 2489243 - DNA, 25 bp, Homo sapien
catgagctcttaagggatggcttct

SEQ ID NO: 2489244 - DNA, 25 bp, Homo sapien
taatccatgagctcttaagggatgg

SEQ ID NO: 2489245 - DNA, 25 bp, Homo sapien
cttcctcctcgtaaataatgatgtt

SEQ ID NO: 2489246 - DNA, 25 bp, Homo sapien
ttcttcctcctcgtaaataatgatg

SEQ ID NO: 2489247 - DNA, 25 bp, Homo sapien
ctggcaggcagtgatacatggcaat

SEQ ID NO: 2489248 - DNA, 25 bp, Homo sapien
gcagtgatacatggcaatctcagcc

SEQ ID NO: 2489249 - DNA, 25 bp, Homo sapien
cagtgatacatggcaatctcagcct

SEQ ID NO: 2489250 - DNA, 25 bp, Homo sapien
ggcaggcagtgatacatggcaatct

SEQ ID NO: 2489251 - DNA, 25 bp, Homo sapien
tcagttcttccgagccagctcgtca

SEQ ID NO: 2489252 - DNA, 25 bp, Homo sapien
tgccatgatcttggcaaggtcctga

SEQ ID NO: 2489253 - DNA, 25 bp, Homo sapien
ccatgatcttggcaaggtcctgaga

SEQ ID NO: 2489254 - DNA, 25 bp, Homo sapien
gctcgtcatattgggcccagatgtc

SEQ ID NO: 2489255 - DNA, 25 bp, Homo sapien
caagatcaaaccagagctgacaatc

SEQ ID NO: 2489256 - DNA, 25 bp, Homo sapien
ctccaagatcaaaccagagctgaca

SEQ ID NO: 2489257 - DNA, 25 bp, Homo sapien
tccaagatcaaaccagagctgacaa

SEQ ID NO: 2489258 - DNA, 25 bp, Homo sapien
gatcaaaccagagctgacaatctgg

SEQ ID NO: 2489259 - DNA, 25 bp, Homo sapien
gtcttgaaataatggacccagtctc

SEQ ID NO: 2489260 - DNA, 25 bp, Homo sapien
tccagttcttggtctctgggctcct

SEQ ID NO: 2489261 - DNA, 25 bp, Homo sapien
aaataatggacccagtctctgacct

SEQ ID NO: 2489262 - DNA, 25 bp, Homo sapien
tttactctccaccttccagttcttg

SEQ ID NO: 2489263 - DNA, 25 bp, Homo sapien
cagggatgggtaggtagttggtgga

SEQ ID NO: 2489264 - DNA, 25 bp, Homo sapien
tgcctgcatagacgttggttgtgct

SEQ ID NO: 2489265 - DNA, 25 bp, Homo sapien
aggtagtaggccaggcggtcttcag

SEQ ID NO: 2489266 - DNA, 25 bp, Homo sapien
cagacccctagccatccctccggcc

SEQ ID NO: 2489267 - DNA, 25 bp, Homo sapien
ttagcttgctagtaagctccagtgt

SEQ ID NO: 2489268 - DNA, 25 bp, Homo sapien
ttaactctaggttctggagtacaaa

SEQ ID NO: 2489269 - DNA, 25 bp, Homo sapien
acagcaagagcttaactctaggttc

SEQ ID NO: 2489270 - DNA, 25 bp, Homo sapien
ggtcacaggttgactcctgtttttc

SEQ ID NO: 2489271 - DNA, 25 bp, Homo sapien
gtcacaggttgactcctgtttttca

SEQ ID NO: 2489272 - DNA, 25 bp, Homo sapien
tgggtcacaggttgactcctgtttt

SEQ ID NO: 2489273 - DNA, 25 bp, Homo sapien
aagatatctggcattacagcctgtc

SEQ ID NO: 2489274 - DNA, 25 bp, Homo sapien
ttttagcagatgaagataggaacaa

SEQ ID NO: 2489275 - DNA, 25 bp, Homo sapien
tatctggcattacagcctgtctccc

SEQ ID NO: 2489276 - DNA, 25 bp, Homo sapien
gaacaaagatatctggcattacagc

SEQ ID NO: 2489277 - DNA, 25 bp, Homo sapien
gagatactttacaccatggcccaca

SEQ ID NO: 2489278 - DNA, 25 bp, Homo sapien
gacctgggaattatcactctggcct

SEQ ID NO: 2489279 - DNA, 25 bp, Homo sapien
cactgtgatggtctttctccaaggt

SEQ ID NO: 2489280 - DNA, 25 bp, Homo sapien
caccatcatgcacagaatggtgtga

SEQ ID NO: 2489281 - DNA, 25 bp, Homo sapien
ttggatcaaggttactaggtcaaca

SEQ ID NO: 2489282 - DNA, 25 bp, Homo sapien
taaggtcagttaagcacagtaaata

SEQ ID NO: 2489283 - DNA, 25 bp, Homo sapien
cttgtgaagcttcctaatggatgcc

SEQ ID NO: 2489284 - DNA, 25 bp, Homo sapien
aatctttgctcagcaagcaacccac

SEQ ID NO: 2489285 - DNA, 25 bp, Homo sapien
actagtttgcttcttgagactattg

SEQ ID NO: 2489286 - DNA, 25 bp, Homo sapien
tgtttgccaaaactaatgattttct

SEQ ID NO: 2489287 - DNA, 25 bp, Homo sapien
gactattgttggtttgaagtaatga

SEQ ID NO: 2489288 - DNA, 25 bp, Homo sapien
ctttgtctggactgaactagtttgc

SEQ ID NO: 2489289 - DNA, 25 bp, Homo sapien
gatctctgaatttacccacgttgga

SEQ ID NO: 2489290 - DNA, 25 bp, Homo sapien
attgggagccaatagcctaccaccg

SEQ ID NO: 2489291 - DNA, 25 bp, Homo sapien
aaatttactcgctttggtgggcaca

SEQ ID NO: 2489292 - DNA, 25 bp, Homo sapien
aacaagcaagggtcggagagattct

SEQ ID NO: 2489293 - DNA, 25 bp, Homo sapien
tggcactgcgtggttaggcttccct

SEQ ID NO: 2489294 - DNA, 25 bp, Homo sapien
ggcttccctcagacaaatggctttg

SEQ ID NO: 2489295 - DNA, 25 bp, Homo sapien
tccgtgcgcgtactctcagggagga

SEQ ID NO: 2489296 - DNA, 25 bp, Homo sapien
gaagctgcaaagaatgggctccgtg

SEQ ID NO: 2489297 - DNA, 25 bp, Homo sapien
tttgatgatgggcctcgtccaactg

SEQ ID NO: 2489298 - DNA, 25 bp, Homo sapien
atttttgatgatgggcctcgtccaa

SEQ ID NO: 2489299 - DNA, 25 bp, Homo sapien
tttttgatgatgggcctcgtccaac

SEQ ID NO: 2489300 - DNA, 25 bp, Homo sapien
ttttgatgatgggcctcgtccaact

SEQ ID NO: 2489301 - DNA, 25 bp, Homo sapien
tgtggcagagaagtaaacattacca

SEQ ID NO: 2489302 - DNA, 25 bp, Homo sapien
gcctacatgacaatgtgacactcca

SEQ ID NO: 2489303 - DNA, 25 bp, Homo sapien
tccatcgaaagcattggaggcccag

SEQ ID NO: 2489304 - DNA, 25 bp, Homo sapien
cattaccacactgttaggcctttat

SEQ ID NO: 2489305 - DNA, 25 bp, Homo sapien
tctggcggaatggatgtcactgtgc

SEQ ID NO: 2489306 - DNA, 25 bp, Homo sapien
tctggttctaattgcctcaaaggcc

SEQ ID NO: 2489307 - DNA, 25 bp, Homo sapien
taagtcaacattgctgtagccaggt

SEQ ID NO: 2489308 - DNA, 25 bp, Homo sapien
tatggaaacagttgggccaagagcc

SEQ ID NO: 2489309 - DNA, 25 bp, Homo sapien
ctaagaagcctgacatcccggtgga

SEQ ID NO: 2489310 - DNA, 25 bp, Homo sapien
agatgttccctcaggttccaagaca

SEQ ID NO: 2489311 - DNA, 25 bp, Homo sapien
tgtacacttgattccagatgagctc

SEQ ID NO: 2489312 - DNA, 25 bp, Homo sapien
tctggaattcgtaggcttcacgtct

SEQ ID NO: 2489313 - DNA, 25 bp, Homo sapien
catctgatgcagtctttggaagttg

SEQ ID NO: 2489314 - DNA, 25 bp, Homo sapien
ttaaccagctgacaagtctgtagtc

SEQ ID NO: 2489315 - DNA, 25 bp, Homo sapien
catggactggagtttgtagcagact

SEQ ID NO: 2489316 - DNA, 25 bp, Homo sapien
cagtctttggaagttgggtctctta

SEQ ID NO: 2489317 - DNA, 25 bp, Homo sapien
tattatcatggaaccagacaaattt

SEQ ID NO: 2489318 - DNA, 25 bp, Homo sapien
attatcatggaaccagacaaatttt

SEQ ID NO: 2489319 - DNA, 25 bp, Homo sapien
ccttattatcatggaaccagacaaa

SEQ ID NO: 2489320 - DNA, 25 bp, Homo sapien
cttattatcatggaaccagacaaat

SEQ ID NO: 2489321 - DNA, 25 bp, Homo sapien
tgtcagcgagctctctgaccccagg

SEQ ID NO: 2489322 - DNA, 25 bp, Homo sapien
aagagatggttgatgtcagcgagct

SEQ ID NO: 2489323 - DNA, 25 bp, Homo sapien
gaaatccatgccctgagattggcca

SEQ ID NO: 2489324 - DNA, 25 bp, Homo sapien
cagagccaggttaggggcccataga

SEQ ID NO: 2489325 - DNA, 25 bp, Homo sapien
tggcagatgtatgggaaatatatgc

SEQ ID NO: 2489326 - DNA, 25 bp, Homo sapien
tcccatagggtcgagtaagcccagt

SEQ ID NO: 2489327 - DNA, 25 bp, Homo sapien
tagggtcgagtaagcccagttgaca

SEQ ID NO: 2489328 - DNA, 25 bp, Homo sapien
tgccagccctcccatagggtcgagt

SEQ ID NO: 2489329 - DNA, 25 bp, Homo sapien
gttgaatgcgtctgatatttttgtg

SEQ ID NO: 2489330 - DNA, 25 bp, Homo sapien
ttttgtggttgctgattaggcagca

SEQ ID NO: 2489331 - DNA, 25 bp, Homo sapien
tttttgtggttgctgattaggcagc

SEQ ID NO: 2489332 - DNA, 25 bp, Homo sapien
atttttgtggttgctgattaggcag

SEQ ID NO: 2489333 - DNA, 25 bp, Homo sapien
ccatgagatctttgacaatgtgtac

SEQ ID NO: 2489334 - DNA, 25 bp, Homo sapien
gaaagtccaaaggatggtctaagag

SEQ ID NO: 2489335 - DNA, 25 bp, Homo sapien
tgtactttgagtccttctttgggaa

SEQ ID NO: 2489336 - DNA, 25 bp, Homo sapien
tcccctctgtgtagagacaatgtat

SEQ ID NO: 2489337 - DNA, 25 bp, Homo sapien
tcagttattatatttattcatccac

SEQ ID NO: 2489338 - DNA, 25 bp, Homo sapien
cagttattatatttattcatccact

SEQ ID NO: 2489339 - DNA, 25 bp, Homo sapien
gttattatatttattcatccactta

SEQ ID NO: 2489340 - DNA, 25 bp, Homo sapien
ttattatatttattcatccacttac

SEQ ID NO: 2489341 - DNA, 25 bp, Homo sapien
gaagatttgggaataattgtataaa

SEQ ID NO: 2489342 - DNA, 25 bp, Homo sapien
tgtggtgcaaatcttcaaatgacgt

SEQ ID NO: 2489343 - DNA, 25 bp, Homo sapien
caaatgacgttgagttgagcagtcc

SEQ ID NO: 2489344 - DNA, 25 bp, Homo sapien
ctttcaaattactctccctcactgt

SEQ ID NO: 2489345 - DNA, 25 bp, Homo sapien
gataaagagtggtccgcagatgatc

SEQ ID NO: 2489346 - DNA, 25 bp, Homo sapien
tgaagaccccaacaaagatctaagg

SEQ ID NO: 2489347 - DNA, 25 bp, Homo sapien
ctatctccagaagcagcaatgccag

SEQ ID NO: 2489348 - DNA, 25 bp, Homo sapien
gatctaaggagtgagaccaacagga

SEQ ID NO: 2489349 - DNA, 25 bp, Homo sapien
ccttgttctgcatagtagtttgtgg

SEQ ID NO: 2489350 - DNA, 25 bp, Homo sapien
tctgcatagtagtttgtggaatctg

SEQ ID NO: 2489351 - DNA, 25 bp, Homo sapien
aaatcttagaagatatgacactccc

SEQ ID NO: 2489352 - DNA, 25 bp, Homo sapien
agatatgacactcccttgttctgca

SEQ ID NO: 2489353 - DNA, 25 bp, Homo sapien
ctccaccatcattgtgctcttaggc

SEQ ID NO: 2489354 - DNA, 25 bp, Homo sapien
aatacctagtcatgggagttcctga

SEQ ID NO: 2489355 - DNA, 25 bp, Homo sapien
gaggaagcttgccaggttgagcaaa

SEQ ID NO: 2489356 - DNA, 25 bp, Homo sapien
tagtatgtcccaagcaatgtttgag

SEQ ID NO: 2489357 - DNA, 25 bp, Homo sapien
tttcagctgttagaagggacccagt

SEQ ID NO: 2489358 - DNA, 25 bp, Homo sapien
ttccccttggaaccacaaggaatga

SEQ ID NO: 2489359 - DNA, 25 bp, Homo sapien
ttgcttcggacaggcatcctcgaca

SEQ ID NO: 2489360 - DNA, 25 bp, Homo sapien
ctgttgcttcggacaggcatcctcg

SEQ ID NO: 2489361 - DNA, 25 bp, Homo sapien
cttcggacaggcatcctcgacatgg

SEQ ID NO: 2489362 - DNA, 25 bp, Homo sapien
tgttgcttcggacaggcatcctcga

SEQ ID NO: 2489363 - DNA, 25 bp, Homo sapien
tggccatccagtgtaggtctgggtc

SEQ ID NO: 2489364 - DNA, 25 bp, Homo sapien
atagagaagtgccacgtggccatcc

SEQ ID NO: 2489365 - DNA, 25 bp, Homo sapien
ttttcttcggatgtagagtctggca

SEQ ID NO: 2489366 - DNA, 25 bp, Homo sapien
tgtcttctgcaaggaggcaccgagt

SEQ ID NO: 2489367 - DNA, 25 bp, Homo sapien
ctctggggccgggttgtccaagcct

SEQ ID NO: 2489368 - DNA, 25 bp, Homo sapien
gtgcccccacgagggaagatgcact

SEQ ID NO: 2489369 - DNA, 25 bp, Homo sapien
cagtctaactcttcatgttggcatc

SEQ ID NO: 2489370 - DNA, 25 bp, Homo sapien
tgaattgcactttttgccagtctaa

SEQ ID NO: 2489371 - DNA, 25 bp, Homo sapien
tccatcggcttggaatgcacacaag

SEQ ID NO: 2489372 - DNA, 25 bp, Homo sapien
tgcacacaagcctcgggtctgctct

SEQ ID NO: 2489373 - DNA, 25 bp, Homo sapien
tgccaacagcgtgatggtattttca

SEQ ID NO: 2489374 - DNA, 25 bp, Homo sapien
gctctccccgcttttatcacaaagg

SEQ ID NO: 2489375 - DNA, 25 bp, Homo sapien
gtaggcatttgccatcccctgttta

SEQ ID NO: 2489376 - DNA, 25 bp, Homo sapien
tagcagagccactgagttgctgctg

SEQ ID NO: 2489377 - DNA, 25 bp, Homo sapien
gccatggaagggtggtgtgagtcca

SEQ ID NO: 2489378 - DNA, 25 bp, Homo sapien
tgtgagtccagaggctagcagagcc

SEQ ID NO: 2489379 - DNA, 25 bp, Homo sapien
gacataatccacctttcagagttga

SEQ ID NO: 2489380 - DNA, 25 bp, Homo sapien
tgtaaaggagcggtaattatcccag

SEQ ID NO: 2489381 - DNA, 25 bp, Homo sapien
ccagggatttgagacataatccacc

SEQ ID NO: 2489382 - DNA, 25 bp, Homo sapien
agttgaaagaggcacaagcgtcatg

SEQ ID NO: 2489383 - DNA, 25 bp, Homo sapien
acaggcaagtgggtgcaagaagttg

SEQ ID NO: 2489384 - DNA, 25 bp, Homo sapien
gaatgagggctccaatcgactgggc

SEQ ID NO: 2489385 - DNA, 25 bp, Homo sapien
tcttccttcatatgcccggtgctgg

SEQ ID NO: 2489386 - DNA, 25 bp, Homo sapien
gaaatttgggcatggcactacaggg

SEQ ID NO: 2489387 - DNA, 25 bp, Homo sapien
tcaggcaagtcatcaagacgagtcc

SEQ ID NO: 2489388 - DNA, 25 bp, Homo sapien
aaagcactggctacataataagccc

SEQ ID NO: 2489389 - DNA, 25 bp, Homo sapien
aggaaggacctcgtcaaagcactgg

SEQ ID NO: 2489390 - DNA, 25 bp, Homo sapien
tgtaaccgctcataaggaaggacct

SEQ ID NO: 2489391 - DNA, 25 bp, Homo sapien
ggtaagtccttgtaaccgctcataa

SEQ ID NO: 2489392 - DNA, 25 bp, Homo sapien
gggcctctggagaagaatgtcggca

SEQ ID NO: 2489393 - DNA, 25 bp, Homo sapien
ctttgagcttggaccagagagaggg

SEQ ID NO: 2489394 - DNA, 25 bp, Homo sapien
ggcctctggagaagaatgtcggcag

SEQ ID NO: 2489395 - DNA, 25 bp, Homo sapien
gagcttggaccagagagagggttgg

SEQ ID NO: 2489396 - DNA, 25 bp, Homo sapien
taacaatcccacattcatgaagtgg

SEQ ID NO: 2489397 - DNA, 25 bp, Homo sapien
gcaggactcgtgtttggaatggaaa

SEQ ID NO: 2489398 - DNA, 25 bp, Homo sapien
catgaagtggctcaaaccagcagga

SEQ ID NO: 2489399 - DNA, 25 bp, Homo sapien
agtctctgcaacgaccctaacaatc

SEQ ID NO: 2489400 - DNA, 25 bp, Homo sapien
gaccagggccctgtttcctgactga

SEQ ID NO: 2489401 - DNA, 25 bp, Homo sapien
gcaggtcaccccaaaagtctgacca

SEQ ID NO: 2489402 - DNA, 25 bp, Homo sapien
gcttggttgatggtatcttgtctga

SEQ ID NO: 2489403 - DNA, 25 bp, Homo sapien
acacttagcacgcttcccatggctg

SEQ ID NO: 2489404 - DNA, 25 bp, Homo sapien
gatctggtttgaatcaatctggcct

SEQ ID NO: 2489405 - DNA, 25 bp, Homo sapien
cagggcctggaagtagatctggttt

SEQ ID NO: 2489406 - DNA, 25 bp, Homo sapien
tattggaaacggtgtgaaacagggc

SEQ ID NO: 2489407 - DNA, 25 bp, Homo sapien
aatctggcctacacagacttgcttg

SEQ ID NO: 2489408 - DNA, 25 bp, Homo sapien
gaagagccttctggatataagcagc

SEQ ID NO: 2489409 - DNA, 25 bp, Homo sapien
gaagtgtaggaaagtacaccaaaga

SEQ ID NO: 2489410 - DNA, 25 bp, Homo sapien
gatgtggcttttcagtggaacttgc

SEQ ID NO: 2489411 - DNA, 25 bp, Homo sapien
gatataagcagcacggcgtgcaagg

SEQ ID NO: 2489412 - DNA, 25 bp, Homo sapien
ctgagtgtagaggagcaaggcatgt

SEQ ID NO: 2489413 - DNA, 25 bp, Homo sapien
tccacaccagatctcagagcaagct

SEQ ID NO: 2489414 - DNA, 25 bp, Homo sapien
tcagagcaagctccgaaggcagagt

SEQ ID NO: 2489415 - DNA, 25 bp, Homo sapien
ggtcaccaaactccacaccagatct

SEQ ID NO: 2489416 - DNA, 25 bp, Homo sapien
cctgtgctccaggggtcaccaaact

SEQ ID NO: 2489417 - DNA, 25 bp, Homo sapien
tcatgtggtttccaagatcccaacc

SEQ ID NO: 2489418 - DNA, 25 bp, Homo sapien
catgtggtttccaagatcccaaccc

SEQ ID NO: 2489419 - DNA, 25 bp, Homo sapien
cttcatgtggtttccaagatcccaa

SEQ ID NO: 2489420 - DNA, 25 bp, Homo sapien
ttcatgtggtttccaagatcccaac

SEQ ID NO: 2489421 - DNA, 25 bp, Homo sapien
cacatcccttaggaaaggctcgaga

SEQ ID NO: 2489422 - DNA, 25 bp, Homo sapien
gataatagtcgtctgtgctggccac

SEQ ID NO: 2489423 - DNA, 25 bp, Homo sapien
aatgtggaagtactcaaaagcccat

SEQ ID NO: 2489424 - DNA, 25 bp, Homo sapien
cttcctcaggatcaaaagggattgc

SEQ ID NO: 2489425 - DNA, 25 bp, Homo sapien
tttttggctcattcgcattgtgcgt

SEQ ID NO: 2489426 - DNA, 25 bp, Homo sapien
aacttttttggctcattcgcattgt

SEQ ID NO: 2489427 - DNA, 25 bp, Homo sapien
aattgggcgaagcatttccttcggg

SEQ ID NO: 2489428 - DNA, 25 bp, Homo sapien
cattgtgcgttgaattgggcgaagc

SEQ ID NO: 2489429 - DNA, 25 bp, Homo sapien
tgtaatcgtgaaggaatgctgttcc

SEQ ID NO: 2489430 - DNA, 25 bp, Homo sapien
tattgtggccttctacgcttatcct

SEQ ID NO: 2489431 - DNA, 25 bp, Homo sapien
gatacacccctaatgaatggcaaat

SEQ ID NO: 2489432 - DNA, 25 bp, Homo sapien
cagcaatctgaagtattattgtggc

SEQ ID NO: 2489433 - DNA, 25 bp, Homo sapien
gacctgaacacttgaggggacattc

SEQ ID NO: 2489434 - DNA, 25 bp, Homo sapien
tgttgctgttttggtctgcctgtac

SEQ ID NO: 2489435 - DNA, 25 bp, Homo sapien
gttttggtctgcctgtactcagcgg

SEQ ID NO: 2489436 - DNA, 25 bp, Homo sapien
ctgtactcagcggttgtggtatgtg

SEQ ID NO: 2489437 - DNA, 25 bp, Homo sapien
tgattggcaagaccaatctcccact

SEQ ID NO: 2489438 - DNA, 25 bp, Homo sapien
caggcactaggctagccctggagct

SEQ ID NO: 2489439 - DNA, 25 bp, Homo sapien
ttctctgattggcaagaccaatctc

SEQ ID NO: 2489440 - DNA, 25 bp, Homo sapien
ggcactaggctagccctggagcttc

SEQ ID NO: 2489441 - DNA, 25 bp, Homo sapien
gggtttctgtttctcataagtgact

SEQ ID NO: 2489442 - DNA, 25 bp, Homo sapien
ctgccattgaacagagtgctcttgg

SEQ ID NO: 2489443 - DNA, 25 bp, Homo sapien
tcccctcttctgcagtgccacatac

SEQ ID NO: 2489444 - DNA, 25 bp, Homo sapien
gaacagagtgctcttggggtttctg

SEQ ID NO: 2489445 - DNA, 25 bp, Homo sapien
gatttaggcagaatttaggatctag

SEQ ID NO: 2489446 - DNA, 25 bp, Homo sapien
tgttttatcaagacagaacttccca

SEQ ID NO: 2489447 - DNA, 25 bp, Homo sapien
tggatagagttttcctagtgtttta

SEQ ID NO: 2489448 - DNA, 25 bp, Homo sapien
cagaatttaggatctagctttgcag

SEQ ID NO: 2489449 - DNA, 25 bp, Homo sapien
gagcagtgcttggaggataatctga

SEQ ID NO: 2489450 - DNA, 25 bp, Homo sapien
ggagcatcctctatgagatctcagg

SEQ ID NO: 2489451 - DNA, 25 bp, Homo sapien
gaagacaatgtaacagcccagcact

SEQ ID NO: 2489452 - DNA, 25 bp, Homo sapien
gatcccctttggtatgcactcttgg

SEQ ID NO: 2489453 - DNA, 25 bp, Homo sapien
gcactctagacagggttgggcatag

SEQ ID NO: 2489454 - DNA, 25 bp, Homo sapien
tctaaaatcatgctgaggtgcactc

SEQ ID NO: 2489455 - DNA, 25 bp, Homo sapien
tcttgtaatgacaggccattgagct

SEQ ID NO: 2489456 - DNA, 25 bp, Homo sapien
tagagagaggcgaagaagatcagaa

SEQ ID NO: 2489457 - DNA, 25 bp, Homo sapien
gatgtgttactctctgaggtgctta

SEQ ID NO: 2489458 - DNA, 25 bp, Homo sapien
tcttacctaggatacgggcaaagtc

SEQ ID NO: 2489459 - DNA, 25 bp, Homo sapien
gcattctccatacaaaagccagcag

SEQ ID NO: 2489460 - DNA, 25 bp, Homo sapien
tccattgctgctaccattggtggag

SEQ ID NO: 2489461 - DNA, 25 bp, Homo sapien
cagtggttcttttcaagtgacttga

SEQ ID NO: 2489462 - DNA, 25 bp, Homo sapien
tgatattctactttcccttgacagg

SEQ ID NO: 2489463 - DNA, 25 bp, Homo sapien
tagacacactcctttaaatcaaaca

SEQ ID NO: 2489464 - DNA, 25 bp, Homo sapien
acactctgttagtgccttggagttg

SEQ ID NO: 2489465 - DNA, 25 bp, Homo sapien
tgtgtagtgaagactgagacccgct

SEQ ID NO: 2489466 - DNA, 25 bp, Homo sapien
tctaggacgttgaggaggaagcttc

SEQ ID NO: 2489467 - DNA, 25 bp, Homo sapien
aaggtctcttggctcgttgctggca

SEQ ID NO: 2489468 - DNA, 25 bp, Homo sapien
tcaaagttcccatcagtgacctgcg

SEQ ID NO: 2489469 - DNA, 25 bp, Homo sapien
gttcacgcctacacctgaagcagag

SEQ ID NO: 2489470 - DNA, 25 bp, Homo sapien
gtagtggtctggacttgttcacgcc

SEQ ID NO: 2489471 - DNA, 25 bp, Homo sapien
gagcctgggaaagccaactgtacca

SEQ ID NO: 2489472 - DNA, 25 bp, Homo sapien
gctcagtcaagtaggcgagtgctct

SEQ ID NO: 2489473 - DNA, 25 bp, Homo sapien
gatataactcagaccccatttcact

SEQ ID NO: 2489474 - DNA, 25 bp, Homo sapien
ctgtgatataactcagaccccattt

SEQ ID NO: 2489475 - DNA, 25 bp, Homo sapien
gaccccatttcactcatttcttaaa

SEQ ID NO: 2489476 - DNA, 25 bp, Homo sapien
taactcagaccccatttcactcatt

SEQ ID NO: 2489477 - DNA, 25 bp, Homo sapien
aaaatgctgtggaatggaacagcgg

SEQ ID NO: 2489478 - DNA, 25 bp, Homo sapien
tttaggacactcttgagaacctcct

SEQ ID NO: 2489479 - DNA, 25 bp, Homo sapien
cagcgggacagaccagaagtacatt

SEQ ID NO: 2489480 - DNA, 25 bp, Homo sapien
ggacactcttgagaacctcctaaaa

SEQ ID NO: 2489481 - DNA, 25 bp, Homo sapien
aagagaataaaaacaccattccttg

SEQ ID NO: 2489482 - DNA, 25 bp, Homo sapien
ggaagtgtcagaggcgttcaaacca

SEQ ID NO: 2489483 - DNA, 25 bp, Homo sapien
acaccattccttgagagtggaagtg

SEQ ID NO: 2489484 - DNA, 25 bp, Homo sapien
gtggaagtgtcagaggcgttcaaac

SEQ ID NO: 2489485 - DNA, 25 bp, Homo sapien
gcctctaaggcctgaatctttctgg

SEQ ID NO: 2489486 - DNA, 25 bp, Homo sapien
tctaattgttttcagtccagcacct

SEQ ID NO: 2489487 - DNA, 25 bp, Homo sapien
catagtacagtttcctagaaggcct

SEQ ID NO: 2489488 - DNA, 25 bp, Homo sapien
cagagaccttcaaccaaaccaagtt

SEQ ID NO: 2489489 - DNA, 25 bp, Homo sapien
cacttctgtgtgagatgccgggctg

SEQ ID NO: 2489490 - DNA, 25 bp, Homo sapien
gactgggttctgagcatctatggtg

SEQ ID NO: 2489491 - DNA, 25 bp, Homo sapien
tttatgctcaaaccagcccaaatgg

SEQ ID NO: 2489492 - DNA, 25 bp, Homo sapien
cgggctgtgttcctatgagcttagc

SEQ ID NO: 2489493 - DNA, 25 bp, Homo sapien
gaggctgatgcccaaagaacgagag

SEQ ID NO: 2489494 - DNA, 25 bp, Homo sapien
ccaaagaacgagagggattgtacct

SEQ ID NO: 2489495 - DNA, 25 bp, Homo sapien
gaacgagagggattgtacctcagct

SEQ ID NO: 2489496 - DNA, 25 bp, Homo sapien
agggattgtacctcagctgcacagc

SEQ ID NO: 2489497 - DNA, 25 bp, Homo sapien
gctccaggcatgaatgaggcaagtt

SEQ ID NO: 2489498 - DNA, 25 bp, Homo sapien
cctttgttgtaactggccagtgctc

SEQ ID NO: 2489499 - DNA, 25 bp, Homo sapien
aacagacgctgaagtttgagaagca

SEQ ID NO: 2489500 - DNA, 25 bp, Homo sapien
cagtgctccaggcatgaatgaggca

SEQ ID NO: 2489501 - DNA, 25 bp, Homo sapien
aacagaggacagacaatcatccatg

SEQ ID NO: 2489502 - DNA, 25 bp, Homo sapien
cagaggacagacaatcatccatgca

SEQ ID NO: 2489503 - DNA, 25 bp, Homo sapien
ggacagacaatcatccatgcaaagg

SEQ ID NO: 2489504 - DNA, 25 bp, Homo sapien
cttcagaaggggcccaacagaggac

SEQ ID NO: 2489505 - DNA, 25 bp, Homo sapien
ggcaagaggagcaacgacggtcatt

SEQ ID NO: 2489506 - DNA, 25 bp, Homo sapien
tctaaaggccactagttactcactc

SEQ ID NO: 2489507 - DNA, 25 bp, Homo sapien
gaagcaggagatgtcaaagatgagt

SEQ ID NO: 2489508 - DNA, 25 bp, Homo sapien
caggcttgcggttggctcatctaaa

SEQ ID NO: 2489509 - DNA, 25 bp, Homo sapien
gtagaaaagtgtgtgcgctttgtga

SEQ ID NO: 2489510 - DNA, 25 bp, Homo sapien
tgtgcgctttgtgaaccaggttttc

SEQ ID NO: 2489511 - DNA, 25 bp, Homo sapien
aagtgtgtgcgctttgtgaaccagg

SEQ ID NO: 2489512 - DNA, 25 bp, Homo sapien
agaaaagtgtgtgcgctttgtgaac

SEQ ID NO: 2489513 - DNA, 25 bp, Homo sapien
ctgacagaaggtcctgcttgcagag

SEQ ID NO: 2489514 - DNA, 25 bp, Homo sapien
agtctctgacagaaggtcctgcttg

SEQ ID NO: 2489515 - DNA, 25 bp, Homo sapien
ccagagtctctgacagaaggtcctg

SEQ ID NO: 2489516 - DNA, 25 bp, Homo sapien
acagaaggtcctgcttgcagaggaa

SEQ ID NO: 2489517 - DNA, 25 bp, Homo sapien
cagattctgacaactctgatttctt

SEQ ID NO: 2489518 - DNA, 25 bp, Homo sapien
ttgcaattgccccacagcctttcga

SEQ ID NO: 2489519 - DNA, 25 bp, Homo sapien
gttcagattctgacaactctgattt

SEQ ID NO: 2489520 - DNA, 25 bp, Homo sapien
atcttttgcaattgccccacagcct

SEQ ID NO: 2489521 - DNA, 25 bp, Homo sapien
tggttcttgaagaatggggagaatt

SEQ ID NO: 2489522 - DNA, 25 bp, Homo sapien
aagaatggggagaatttccatagat

SEQ ID NO: 2489523 - DNA, 25 bp, Homo sapien
tcaagatggttcttgaagaatgggg

SEQ ID NO: 2489524 - DNA, 25 bp, Homo sapien
ttcttgaagaatggggagaatttcc

SEQ ID NO: 2489525 - DNA, 25 bp, Homo sapien
tcccaagaaatagagttccaaggcc

SEQ ID NO: 2489526 - DNA, 25 bp, Homo sapien
gatagagccatcgtcaggagcagag

SEQ ID NO: 2489527 - DNA, 25 bp, Homo sapien
tgaacctatcccaagtaagagcagg

SEQ ID NO: 2489528 - DNA, 25 bp, Homo sapien
gagtgtgctgaaacatgcctgagaa

SEQ ID NO: 2489529 - DNA, 25 bp, Homo sapien
tgagctgcagtattctgagcttggt

SEQ ID NO: 2489530 - DNA, 25 bp, Homo sapien
gagctgcagtattctgagcttggtg

SEQ ID NO: 2489531 - DNA, 25 bp, Homo sapien
agctgcagtattctgagcttggtga

SEQ ID NO: 2489532 - DNA, 25 bp, Homo sapien
ctgagctgcagtattctgagcttgg

SEQ ID NO: 2489533 - DNA, 25 bp, Homo sapien
tgggctggatgggttctcacccgcc

SEQ ID NO: 2489534 - DNA, 25 bp, Homo sapien
gggctggatgggttctcacccgcca

SEQ ID NO: 2489535 - DNA, 25 bp, Homo sapien
ggctggatgggttctcacccgccat

SEQ ID NO: 2489536 - DNA, 25 bp, Homo sapien
tacactggcatatttctcttggaaa

SEQ ID NO: 2489537 - DNA, 25 bp, Homo sapien
aaatagcgaaccagggcttccttga

SEQ ID NO: 2489538 - DNA, 25 bp, Homo sapien
gacttctggtcatatcgaatcactg

SEQ ID NO: 2489539 - DNA, 25 bp, Homo sapien
tgatattccctgatgtacactggca

SEQ ID NO: 2489540 - DNA, 25 bp, Homo sapien
ctattaggacggctaatatccaaaa

SEQ ID NO: 2489541 - DNA, 25 bp, Homo sapien
ggacggctaatatccaaaacgctga

SEQ ID NO: 2489542 - DNA, 25 bp, Homo sapien
taatatccaaaacgctgacagtacc

SEQ ID NO: 2489543 - DNA, 25 bp, Homo sapien
caaaacgctgacagtaccaaatggt

SEQ ID NO: 2489544 - DNA, 25 bp, Homo sapien
caccgcctgctgaggactttcaata

SEQ ID NO: 2489545 - DNA, 25 bp, Homo sapien
ggctgctctagattcactcaccata

SEQ ID NO: 2489546 - DNA, 25 bp, Homo sapien
aggaaaaaagacacgcaccagctgt

SEQ ID NO: 2489547 - DNA, 25 bp, Homo sapien
tatccatattcagcgcagcaggaag

SEQ ID NO: 2489548 - DNA, 25 bp, Homo sapien
cactgatcgcttctcagagctgcga

SEQ ID NO: 2489549 - DNA, 25 bp, Homo sapien
tctacctaacgcaaatccaaagttg

SEQ ID NO: 2489550 - DNA, 25 bp, Homo sapien
ttcctcaggtcctccggtagctcca

SEQ ID NO: 2489551 - DNA, 25 bp, Homo sapien
gcccccatagtttctggttatcaga

SEQ ID NO: 2489552 - DNA, 25 bp, Homo sapien
accaactgcggtcagcgtttaattg

SEQ ID NO: 2489553 - DNA, 25 bp, Homo sapien
tagaacatctctaaggcgccttttc

SEQ ID NO: 2489554 - DNA, 25 bp, Homo sapien
cacagcatagtgagctaaccaactg

SEQ ID NO: 2489555 - DNA, 25 bp, Homo sapien
ggtgctctgcttttagaacatctct

SEQ ID NO: 2489556 - DNA, 25 bp, Homo sapien
tattccctggccgtttgtagtatgc

SEQ ID NO: 2489557 - DNA, 25 bp, Homo sapien
tccctggccgtttgtagtatgcaat

SEQ ID NO: 2489558 - DNA, 25 bp, Homo sapien
ttattccctggccgtttgtagtatg

SEQ ID NO: 2489559 - DNA, 25 bp, Homo sapien
tgtagtatgcaatgttttatgtgac

SEQ ID NO: 2489560 - DNA, 25 bp, Homo sapien
tctaagagatgccaagtactgtacc

SEQ ID NO: 2489561 - DNA, 25 bp, Homo sapien
cagccagacgaagcagtgagtcaca

SEQ ID NO: 2489562 - DNA, 25 bp, Homo sapien
caccatgtgtaatgaggactctctg

SEQ ID NO: 2489563 - DNA, 25 bp, Homo sapien
tacgtacttgtatagcagccagacg

SEQ ID NO: 2489564 - DNA, 25 bp, Homo sapien
tgattcaacataaattgaattcaac

SEQ ID NO: 2489565 - DNA, 25 bp, Homo sapien
caacataaattgaattcaacattga

SEQ ID NO: 2489566 - DNA, 25 bp, Homo sapien
ctgaagtgattcaacataaattgaa

SEQ ID NO: 2489567 - DNA, 25 bp, Homo sapien
ttcaacataaattgaattcaacatt

SEQ ID NO: 2489568 - DNA, 25 bp, Homo sapien
gcctgatggataaggtgtctaatta

SEQ ID NO: 2489569 - DNA, 25 bp, Homo sapien
ggaaagctctggatcaaatcatatg

SEQ ID NO: 2489570 - DNA, 25 bp, Homo sapien
cagggttttcttgcagcctgatgga

SEQ ID NO: 2489571 - DNA, 25 bp, Homo sapien
tctaattatgaagtactgtggaaag

SEQ ID NO: 2489572 - DNA, 25 bp, Homo sapien
ataattctaaattctgccagaccat

SEQ ID NO: 2489573 - DNA, 25 bp, Homo sapien
accagttcccagaaccataattcta

SEQ ID NO: 2489574 - DNA, 25 bp, Homo sapien
accataattctaaattctgccagac

SEQ ID NO: 2489575 - DNA, 25 bp, Homo sapien
ctgggaaccgcaccagttcccagaa

SEQ ID NO: 2489576 - DNA, 25 bp, Homo sapien
ttggatgattgtggtgcttgttcag

SEQ ID NO: 2489577 - DNA, 25 bp, Homo sapien
agggatatatctctggtcttctttg

SEQ ID NO: 2489578 - DNA, 25 bp, Homo sapien
ggtgcttgttcagggatatatctct

SEQ ID NO: 2489579 - DNA, 25 bp, Homo sapien
cttttttggatgattgtggtgcttg

SEQ ID NO: 2489580 - DNA, 25 bp, Homo sapien
taatcagatgtttgacatggggcca

SEQ ID NO: 2489581 - DNA, 25 bp, Homo sapien
aatcagatgtttgacatggggccat

SEQ ID NO: 2489582 - DNA, 25 bp, Homo sapien
ctttcagtttaacttcctgctccat

SEQ ID NO: 2489583 - DNA, 25 bp, Homo sapien
taaggcctctttttcgactgtgagt

SEQ ID NO: 2489584 - DNA, 25 bp, Homo sapien
ggcctctttttcgactgtgagtcaa

SEQ ID NO: 2489585 - DNA, 25 bp, Homo sapien
gcctctttttcgactgtgagtcaaa

SEQ ID NO: 2489586 - DNA, 25 bp, Homo sapien
tcctaaggcctctttttcgactgtg

SEQ ID NO: 2489587 - DNA, 25 bp, Homo sapien
gagtatatctcctcagttaccgagg

SEQ ID NO: 2489588 - DNA, 25 bp, Homo sapien
gttaagatctttctgacgcttccag

SEQ ID NO: 2489589 - DNA, 25 bp, Homo sapien
gtttgttccaagcagacatagtttg

SEQ ID NO: 2489590 - DNA, 25 bp, Homo sapien
cgcaaggagattgattgagtatatc

SEQ ID NO: 2489591 - DNA, 25 bp, Homo sapien
cgagaggtgtctgggcgcaatactc

SEQ ID NO: 2489592 - DNA, 25 bp, Homo sapien
ccaatctcccttcctcgagaggtgt

SEQ ID NO: 2489593 - DNA, 25 bp, Homo sapien
gggcgcaatactctccggcccgaag

SEQ ID NO: 2489594 - DNA, 25 bp, Homo sapien
tacaataactgtaaatgccagctct

SEQ ID NO: 2489595 - DNA, 25 bp, Homo sapien
ctgggagcactttggcgccgcagac

SEQ ID NO: 2489596 - DNA, 25 bp, Homo sapien
tcagtccccggtcctctgcaccgct

SEQ ID NO: 2489597 - DNA, 25 bp, Homo sapien
tggcctcggcaggaggcaccttcgg

SEQ ID NO: 2489598 - DNA, 25 bp, Homo sapien
gcagactcaggagccgacgccatct

SEQ ID NO: 2489599 - DNA, 25 bp, Homo sapien
ctatcctttatcatctgttttctgt

SEQ ID NO: 2489600 - DNA, 25 bp, Homo sapien
tatcctttatcatctgttttctgta

SEQ ID NO: 2489601 - DNA, 25 bp, Homo sapien
atcctttatcatctgttttctgtac

SEQ ID NO: 2489602 - DNA, 25 bp, Homo sapien
gttcaaaatcgttctgtgaaatatc

SEQ ID NO: 2489603 - DNA, 25 bp, Homo sapien
ctgcagttcaaaatcgttctgtgaa

SEQ ID NO: 2489604 - DNA, 25 bp, Homo sapien
tcttcaccactcagtttaagagtag

SEQ ID NO: 2489605 - DNA, 25 bp, Homo sapien
ctcagtttaagagtagcaaacacct

SEQ ID NO: 2489606 - DNA, 25 bp, Homo sapien
ttatccgtgtctgcaagtctggaga

SEQ ID NO: 2489607 - DNA, 25 bp, Homo sapien
tattatccgtgtctgcaagtctgga

SEQ ID NO: 2489608 - DNA, 25 bp, Homo sapien
attatccgtgtctgcaagtctggag

SEQ ID NO: 2489609 - DNA, 25 bp, Homo sapien
ttattatccgtgtctgcaagtctgg

SEQ ID NO: 2489610 - DNA, 25 bp, Homo sapien
gcgagaagaacatggcccggttccc

SEQ ID NO: 2489611 - DNA, 25 bp, Homo sapien
gggcgagaagaacatggcccggttc

SEQ ID NO: 2489612 - DNA, 25 bp, Homo sapien
ggcagggcgagaagaacatggcccg

SEQ ID NO: 2489613 - DNA, 25 bp, Homo sapien
cagggcgagaagaacatggcccggt

SEQ ID NO: 2489614 - DNA, 25 bp, Homo sapien
gagcccgggagcttcccattggctc

SEQ ID NO: 2489615 - DNA, 25 bp, Homo sapien
cggagcccgggagcttcccattggc

SEQ ID NO: 2489616 - DNA, 25 bp, Homo sapien
gccggagcccgggagcttcccattg

SEQ ID NO: 2489617 - DNA, 25 bp, Homo sapien
cggccggagcccgggagcttcccat

SEQ ID NO: 2489618 - DNA, 25 bp, Homo sapien
tattttcatgttgcttaagagtccg

SEQ ID NO: 2489619 - DNA, 25 bp, Homo sapien
ttttcatgttgcttaagagtccgtg

SEQ ID NO: 2489620 - DNA, 25 bp, Homo sapien
ttcatgttgcttaagagtccgtgca

SEQ ID NO: 2489621 - DNA, 25 bp, Homo sapien
tttcatgttgcttaagagtccgtgc

SEQ ID NO: 2489622 - DNA, 25 bp, Homo sapien
tgagccttccagtcttcagtagaaa

SEQ ID NO: 2489623 - DNA, 25 bp, Homo sapien
gagccttccagtcttcagtagaaac

SEQ ID NO: 2489624 - DNA, 25 bp, Homo sapien
ctgagccttccagtcttcagtagaa

SEQ ID NO: 2489625 - DNA, 25 bp, Homo sapien
gattagacattacctcccatgggtg

SEQ ID NO: 2489626 - DNA, 25 bp, Homo sapien
gagattagacattacctcccatggg

SEQ ID NO: 2489627 - DNA, 25 bp, Homo sapien
tagagattagacattacctcccatg

SEQ ID NO: 2489628 - DNA, 25 bp, Homo sapien
attagacattacctcccatgggtgt

SEQ ID NO: 2489629 - DNA, 25 bp, Homo sapien
ttttcaatgacaacaatggcatgac

SEQ ID NO: 2489630 - DNA, 25 bp, Homo sapien
agttttcaatgacaacaatggcatg

SEQ ID NO: 2489631 - DNA, 25 bp, Homo sapien
gagttttcaatgacaacaatggcat

SEQ ID NO: 2489632 - DNA, 25 bp, Homo sapien
tcctcttcagatttatgctgtagat

SEQ ID NO: 2489633 - DNA, 25 bp, Homo sapien
tcttcagatttatgctgtagatgcc

SEQ ID NO: 2489634 - DNA, 25 bp, Homo sapien
agatttatgctgtagatgccatcac

SEQ ID NO: 2489635 - DNA, 25 bp, Homo sapien
ttatgctgtagatgccatcactttc

SEQ ID NO: 2489636 - DNA, 25 bp, Homo sapien
tgccacctaattggattcccactgc

SEQ ID NO: 2489637 - DNA, 25 bp, Homo sapien
aaagtttctctttaagtcatgacag

SEQ ID NO: 2489638 - DNA, 25 bp, Homo sapien
gtgccacctaattggattcccactg

SEQ ID NO: 2489639 - DNA, 25 bp, Homo sapien
tttctctttaagtcatgacaggaat

SEQ ID NO: 2489640 - DNA, 25 bp, Homo sapien
ggaagcaggtatatgaagctgctgc

SEQ ID NO: 2489641 - DNA, 25 bp, Homo sapien
tctggaagcaggtatatgaagctgc

SEQ ID NO: 2489642 - DNA, 25 bp, Homo sapien
ccttatctggaagcaggtatatgaa

SEQ ID NO: 2489643 - DNA, 25 bp, Homo sapien
tatctggaagcaggtatatgaagct

SEQ ID NO: 2489644 - DNA, 25 bp, Homo sapien
tccttaggcttggagcaaaacttcg

SEQ ID NO: 2489645 - DNA, 25 bp, Homo sapien
cccagaggagagaactagatcccga

SEQ ID NO: 2489646 - DNA, 25 bp, Homo sapien
taatgaactgccctggtgaactggc

SEQ ID NO: 2489647 - DNA, 25 bp, Homo sapien
tagatcccgaattgttggaccagcc

SEQ ID NO: 2489648 - DNA, 25 bp, Homo sapien
ttctccccggagaagaggtctgtcc

SEQ ID NO: 2489649 - DNA, 25 bp, Homo sapien
aatgtttcccctatcagcaagttgg

SEQ ID NO: 2489650 - DNA, 25 bp, Homo sapien
cacattattgaaatttgaggcagcc

SEQ ID NO: 2489651 - DNA, 25 bp, Homo sapien
tgaggcagcccagttaataacacac

SEQ ID NO: 2489652 - DNA, 25 bp, Homo sapien
tccagtattgcctctttagggtcac

SEQ ID NO: 2489653 - DNA, 25 bp, Homo sapien
ggcttttatcttcaggccatcataa

SEQ ID NO: 2489654 - DNA, 25 bp, Homo sapien
cactcgaggcttgggctttagggtc

SEQ ID NO: 2489655 - DNA, 25 bp, Homo sapien
cattatgtgggtcctggaaattgag

SEQ ID NO: 2489656 - DNA, 25 bp, Homo sapien
ttcctaggggccaccaacgccatgt

SEQ ID NO: 2489657 - DNA, 25 bp, Homo sapien
taacttgatgtaccctccaagggtc

SEQ ID NO: 2489658 - DNA, 25 bp, Homo sapien
gggccaccaacgccatgttgcagct

SEQ ID NO: 2489659 - DNA, 25 bp, Homo sapien
ctttcatctcctctataacttgatg

SEQ ID NO: 2489660 - DNA, 25 bp, Homo sapien
tggcagtgttaaaccagtgtttccc

SEQ ID NO: 2489661 - DNA, 25 bp, Homo sapien
tgggaaatggtacccatactactgg

SEQ ID NO: 2489662 - DNA, 25 bp, Homo sapien
taagatctacaaatcgagcaccagg

SEQ ID NO: 2489663 - DNA, 25 bp, Homo sapien
tattaaggtctctacaaagttctcg

SEQ ID NO: 2489664 - DNA, 25 bp, Homo sapien
aaaatttatggctctgggcttcaga

SEQ ID NO: 2489665 - DNA, 25 bp, Homo sapien
gggacaacaaatgccccacagggag

SEQ ID NO: 2489666 - DNA, 25 bp, Homo sapien
cataggatgaatagcccctctgtca

SEQ ID NO: 2489667 - DNA, 25 bp, Homo sapien
taaacacagtgttagactccttaca

SEQ ID NO: 2489668 - DNA, 25 bp, Homo sapien
cagaaaacgttataaggtaggcaca

SEQ ID NO: 2489669 - DNA, 25 bp, Homo sapien
ttcaaacgacattaaggcctgtagc

SEQ ID NO: 2489670 - DNA, 25 bp, Homo sapien
ggattgaacttgactaaacacttga

SEQ ID NO: 2489671 - DNA, 25 bp, Homo sapien
agttgaacttagcagctccctagga

SEQ ID NO: 2489672 - DNA, 25 bp, Homo sapien
gcaggtgggccccttctgtcggcac

SEQ ID NO: 2489673 - DNA, 25 bp, Homo sapien
gcagctgaagtcctcacacactcag

SEQ ID NO: 2489674 - DNA, 25 bp, Homo sapien
acttagcctgagtgccatcacagcc

SEQ ID NO: 2489675 - DNA, 25 bp, Homo sapien
ttctgtcggcacttagcctgagtgc

SEQ ID NO: 2489676 - DNA, 25 bp, Homo sapien
gaaactctgttgtagacttctggaa

SEQ ID NO: 2489677 - DNA, 25 bp, Homo sapien
gggttgaccctgtggtgaaactctg

SEQ ID NO: 2489678 - DNA, 25 bp, Homo sapien
ttcctcgtcattgtccctgacattg

SEQ ID NO: 2489679 - DNA, 25 bp, Homo sapien
cgtcattgtccctgacattgaagat

SEQ ID NO: 2489680 - DNA, 25 bp, Homo sapien
gctgtaatttccaagccgcggcggg

SEQ ID NO: 2489681 - DNA, 25 bp, Homo sapien
tagccagggtcgcttccttgtcagg

SEQ ID NO: 2489682 - DNA, 25 bp, Homo sapien
aaccaattaagcgtgcagccggcgc

SEQ ID NO: 2489683 - DNA, 25 bp, Homo sapien
taatcctagagtcccaaagttgtcc

SEQ ID NO: 2489684 - DNA, 25 bp, Homo sapien
gaaaaatttgtctccgatgtgtttg

SEQ ID NO: 2489685 - DNA, 25 bp, Homo sapien
aaggcagagttcacaaagaaagaaa

SEQ ID NO: 2489686 - DNA, 25 bp, Homo sapien
ccacagaagcttgcagggaaccttc

SEQ ID NO: 2489687 - DNA, 25 bp, Homo sapien
gatgtgtttgctctcgatgtgccca

SEQ ID NO: 2489688 - DNA, 25 bp, Homo sapien
tggatgattcttatacatgaaacaa

SEQ ID NO: 2489689 - DNA, 25 bp, Homo sapien
gatgattcttatacatgaaacaata

SEQ ID NO: 2489690 - DNA, 25 bp, Homo sapien
catggatgattcttatacatgaaac

SEQ ID NO: 2489691 - DNA, 25 bp, Homo sapien
ccatggatgattcttatacatgaaa

SEQ ID NO: 2489692 - DNA, 25 bp, Homo sapien
ggtagtccaacttcagtattcctta

SEQ ID NO: 2489693 - DNA, 25 bp, Homo sapien
tgatgaggcatttgcatgcctgggc

SEQ ID NO: 2489694 - DNA, 25 bp, Homo sapien
tcctgccattattctctcaggtagt

SEQ ID NO: 2489695 - DNA, 25 bp, Homo sapien
tgaggcatttgcatgcctgggccca

SEQ ID NO: 2489696 - DNA, 25 bp, Homo sapien
taccattattttggcctggcacagt

SEQ ID NO: 2489697 - DNA, 25 bp, Homo sapien
cctgtaattccagcgagcagcttga

SEQ ID NO: 2489698 - DNA, 25 bp, Homo sapien
catgagcatccttgacagtggtgta

SEQ ID NO: 2489699 - DNA, 25 bp, Homo sapien
gaaatgaggctggtaatatctccat

SEQ ID NO: 2489700 - DNA, 25 bp, Homo sapien
ttgttatcttgttgacatcttctgt

SEQ ID NO: 2489701 - DNA, 25 bp, Homo sapien
tgttatcttgttgacatcttctgtt

SEQ ID NO: 2489702 - DNA, 25 bp, Homo sapien
gttatcttgttgacatcttctgttc

SEQ ID NO: 2489703 - DNA, 25 bp, Homo sapien
catgggcttgcaaaatggcctcaaa

SEQ ID NO: 2489704 - DNA, 25 bp, Homo sapien
tgtttgatgtgttaagcccctagct

SEQ ID NO: 2489705 - DNA, 25 bp, Homo sapien
ccctagtcagaagtgggctgtctca

SEQ ID NO: 2489706 - DNA, 25 bp, Homo sapien
gaaaacccagagcaattgtgtccag

SEQ ID NO: 2489707 - DNA, 25 bp, Homo sapien
gtgcaacatgtttctaagtgaacag

SEQ ID NO: 2489708 - DNA, 25 bp, Homo sapien
gtaccttcctttctgcagtacaagg

SEQ ID NO: 2489709 - DNA, 25 bp, Homo sapien
ctggctccagaagttggctgtacct

SEQ ID NO: 2489710 - DNA, 25 bp, Homo sapien
ggagcatttctgttggtttactaaa

SEQ ID NO: 2489711 - DNA, 25 bp, Homo sapien
gggcacaagtgcaagtcctggctcc

SEQ ID NO: 2489712 - DNA, 25 bp, Homo sapien
aattgactgcaccttcctttctgca

SEQ ID NO: 2489713 - DNA, 25 bp, Homo sapien
gcaagtcctggttcccgaaattgac

SEQ ID NO: 2489714 - DNA, 25 bp, Homo sapien
agggcacaagtgcaagtcctggttc

SEQ ID NO: 2489715 - DNA, 25 bp, Homo sapien
ggttcccgaaattgactgcaccttc

SEQ ID NO: 2489716 - DNA, 25 bp, Homo sapien
gcaggtgtcttaagagtcaggtaaa

SEQ ID NO: 2489717 - DNA, 25 bp, Homo sapien
tccaagggatatgttgcaggtgtct

SEQ ID NO: 2489718 - DNA, 25 bp, Homo sapien
ggctaactgagcattcacctttgtc

SEQ ID NO: 2489719 - DNA, 25 bp, Homo sapien
tatgagtgtgacaaggcggaacatc

SEQ ID NO: 2489720 - DNA, 25 bp, Homo sapien
gattgcttgccattgccctctcaac

SEQ ID NO: 2489721 - DNA, 25 bp, Homo sapien
gcagctgacatgtaccaagattgct

SEQ ID NO: 2489722 - DNA, 25 bp, Homo sapien
cctctcaacccatctgagtcaaatt

SEQ ID NO: 2489723 - DNA, 25 bp, Homo sapien
tctgctgctgtcaagataggaacat

SEQ ID NO: 2489724 - DNA, 25 bp, Homo sapien
taatcaccatttgtacataatcacc

SEQ ID NO: 2489725 - DNA, 25 bp, Homo sapien
tcacttgggcccaaagcaccaccta

SEQ ID NO: 2489726 - DNA, 25 bp, Homo sapien
cacctacgttgaatatggagaaaat

SEQ ID NO: 2489727 - DNA, 25 bp, Homo sapien
catggttcttatccaattcagtgca

SEQ ID NO: 2489728 - DNA, 25 bp, Homo sapien
cattgttaaagacagggaactgagg

SEQ ID NO: 2489729 - DNA, 25 bp, Homo sapien
gcttgcacaagagtaacaataatgg

SEQ ID NO: 2489730 - DNA, 25 bp, Homo sapien
catggaggtttaacatatggtcgct

SEQ ID NO: 2489731 - DNA, 25 bp, Homo sapien
aagtcttgcttgtggtatttgcccg

SEQ ID NO: 2489732 - DNA, 25 bp, Homo sapien
tgctaccctgatttacccgcagaac

SEQ ID NO: 2489733 - DNA, 25 bp, Homo sapien
tccagtttggtgctccatctcagaa

SEQ ID NO: 2489734 - DNA, 25 bp, Homo sapien
gcagaaccaccttaagacttggcaa

SEQ ID NO: 2489735 - DNA, 25 bp, Homo sapien
agagtttaaagatttgccccaatgg

SEQ ID NO: 2489736 - DNA, 25 bp, Homo sapien
aatgaaactgcattcaactagactg

SEQ ID NO: 2489737 - DNA, 25 bp, Homo sapien
gtgcaaggttacttagtagagaatg

SEQ ID NO: 2489738 - DNA, 25 bp, Homo sapien
ggttacttagtagagaatgagctca

SEQ ID NO: 2489739 - DNA, 25 bp, Homo sapien
tactatcattagagaatgtgcaagg

SEQ ID NO: 2489740 - DNA, 25 bp, Homo sapien
gcttgaggaattcattgttcttgtt

SEQ ID NO: 2489741 - DNA, 25 bp, Homo sapien
ggcttgaggaattcattgttcttgt

SEQ ID NO: 2489742 - DNA, 25 bp, Homo sapien
tgaggaattcattgttcttgtttga

SEQ ID NO: 2489743 - DNA, 25 bp, Homo sapien
ccttgtcacattcttgcttgggctt

SEQ ID NO: 2489744 - DNA, 25 bp, Homo sapien
caacaacgtttcttgtagaatgagg

SEQ ID NO: 2489745 - DNA, 25 bp, Homo sapien
tgaactggagccatagaaaactgtt

SEQ ID NO: 2489746 - DNA, 25 bp, Homo sapien
taaaatggttctctgcaacaacgtt

SEQ ID NO: 2489747 - DNA, 25 bp, Homo sapien
tccccactatgaaccccattttgaa

SEQ ID NO: 2489748 - DNA, 25 bp, Homo sapien
aacaagggatgcttgaagaactgcc

SEQ ID NO: 2489749 - DNA, 25 bp, Homo sapien
ctgtaaacaagggatgcttgaagaa

SEQ ID NO: 2489750 - DNA, 25 bp, Homo sapien
caagggatgcttgaagaactgccaa

SEQ ID NO: 2489751 - DNA, 25 bp, Homo sapien
taaacaagggatgcttgaagaactg

SEQ ID NO: 2489752 - DNA, 25 bp, Homo sapien
ctccagagtttgagagtttggtgtc

SEQ ID NO: 2489753 - DNA, 25 bp, Homo sapien
tccagagtttgagagtttggtgtca

SEQ ID NO: 2489754 - DNA, 25 bp, Homo sapien
ccagagtttgagagtttggtgtcat

SEQ ID NO: 2489755 - DNA, 25 bp, Homo sapien
ggtgggatgacagacacattccctt

SEQ ID NO: 2489756 - DNA, 25 bp, Homo sapien
taggtcccggagtatgtttccatgc

SEQ ID NO: 2489757 - DNA, 25 bp, Homo sapien
cctttgcagctgaacgtctccatct

SEQ ID NO: 2489758 - DNA, 25 bp, Homo sapien
tcccagtggttgctaatgaagagcc

SEQ ID NO: 2489759 - DNA, 25 bp, Homo sapien
aaagcaaccttagtcaatgacagag

SEQ ID NO: 2489760 - DNA, 25 bp, Homo sapien
cgctggcatggctctgtggagtttt

SEQ ID NO: 2489761 - DNA, 25 bp, Homo sapien
tccctgggcggtcagtcgctggcat

SEQ ID NO: 2489762 - DNA, 25 bp, Homo sapien
tggcggctgtactgacaaaagcaac

SEQ ID NO: 2489763 - DNA, 25 bp, Homo sapien
aagcctcggctgtgctccgggctgc

SEQ ID NO: 2489764 - DNA, 25 bp, Homo sapien
cgctgccagggttgcgtctgtagca

SEQ ID NO: 2489765 - DNA, 25 bp, Homo sapien
cagggttgcgtctgtagcaggtcca

SEQ ID NO: 2489766 - DNA, 25 bp, Homo sapien
cttttctgttcatactgaagcagcc

SEQ ID NO: 2489767 - DNA, 25 bp, Homo sapien
tgtgatcttgcctccttagacccag

SEQ ID NO: 2489768 - DNA, 25 bp, Homo sapien
tagatgcaaaggataaggaactcgg

SEQ ID NO: 2489769 - DNA, 25 bp, Homo sapien
taaggaactcggtttatagcaacag

SEQ ID NO: 2489770 - DNA, 25 bp, Homo sapien
aagaggaaaggcgatggatcacacc

SEQ ID NO: 2489771 - DNA, 25 bp, Homo sapien
aaatctgtatctgcatcaaaaagtg

SEQ ID NO: 2489772 - DNA, 25 bp, Homo sapien
gacggcagtgtatggaagtccctct

SEQ ID NO: 2489773 - DNA, 25 bp, Homo sapien
tcctctgcgagtgtgtctatgacag

SEQ ID NO: 2489774 - DNA, 25 bp, Homo sapien
actgatggctacactgcaccccggt

SEQ ID NO: 2489775 - DNA, 25 bp, Homo sapien
tgttagtgaatagctctccaaagat

SEQ ID NO: 2489776 - DNA, 25 bp, Homo sapien
gcaatcactttactacagttttgaa

SEQ ID NO: 2489777 - DNA, 25 bp, Homo sapien
ctttgcaatcactttactacagttt

SEQ ID NO: 2489778 - DNA, 25 bp, Homo sapien
gaatagctctccaaagatgcaagta

SEQ ID NO: 2489779 - DNA, 25 bp, Homo sapien
gataatggtgatagctcagcatatt

SEQ ID NO: 2489780 - DNA, 25 bp, Homo sapien
cttctttgtcctacatagtctgcct

SEQ ID NO: 2489781 - DNA, 25 bp, Homo sapien
tgcatatttggataatggtgatagc

SEQ ID NO: 2489782 - DNA, 25 bp, Homo sapien
tctttgtcctacatagtctgcctag

SEQ ID NO: 2489783 - DNA, 25 bp, Homo sapien
caaaaagactgtagtcacaagagca

SEQ ID NO: 2489784 - DNA, 25 bp, Homo sapien
tgtagtcacaagagcagaatgaaca

SEQ ID NO: 2489785 - DNA, 25 bp, Homo sapien
gactgtagtcacaagagcagaatga

SEQ ID NO: 2489786 - DNA, 25 bp, Homo sapien
tcacaagagcagaatgaacatactg

SEQ ID NO: 2489787 - DNA, 25 bp, Homo sapien
gcctgcagctaaactcatgtcggga

SEQ ID NO: 2489788 - DNA, 25 bp, Homo sapien
gatgatagcatcttatgggcataca

SEQ ID NO: 2489789 - DNA, 25 bp, Homo sapien
gttgccatgaggtcacacataacaa

SEQ ID NO: 2489790 - DNA, 25 bp, Homo sapien
gggtcagtgcctccgatgatagcat

SEQ ID NO: 2489791 - DNA, 25 bp, Homo sapien
tcaactcatagaatactcttgggga

SEQ ID NO: 2489792 - DNA, 25 bp, Homo sapien
tatttttgtttgatgctgattaggg

SEQ ID NO: 2489793 - DNA, 25 bp, Homo sapien
ttgtttgatgctgattagggctggt

SEQ ID NO: 2489794 - DNA, 25 bp, Homo sapien
tgatgctgattagggctggtggtac

SEQ ID NO: 2489795 - DNA, 25 bp, Homo sapien
tgggaactgccccatttaatataaa

SEQ ID NO: 2489796 - DNA, 25 bp, Homo sapien
acaaatttctgctgggaactgcccc

SEQ ID NO: 2489797 - DNA, 25 bp, Homo sapien
aattgttttgtctggcgccagcaca

SEQ ID NO: 2489798 - DNA, 25 bp, Homo sapien
caaaagtgcacatcaaagtaattgt

SEQ ID NO: 2489799 - DNA, 25 bp, Homo sapien
aacttcacttctccgcttttctccg

SEQ ID NO: 2489800 - DNA, 25 bp, Homo sapien
ttctgcggcagtttgcctctccttc

SEQ ID NO: 2489801 - DNA, 25 bp, Homo sapien
cattctgcggcagtttgcctctcct

SEQ ID NO: 2489802 - DNA, 25 bp, Homo sapien
tccttcagtggtcttccccatttta

SEQ ID NO: 2489803 - DNA, 25 bp, Homo sapien
gagcaatttggacaccagagttccg

SEQ ID NO: 2489804 - DNA, 25 bp, Homo sapien
ttataagtttttgccaccaggtgtg

SEQ ID NO: 2489805 - DNA, 25 bp, Homo sapien
gaacttagcctgaccaagtaacctg

SEQ ID NO: 2489806 - DNA, 25 bp, Homo sapien
agtaacctgacttgcagcttaggcg

SEQ ID NO: 2489807 - DNA, 25 bp, Homo sapien
tacggcacttcaaacatagtaggca

SEQ ID NO: 2489808 - DNA, 25 bp, Homo sapien
gaaaagcactatcaattaatcaggt

SEQ ID NO: 2489809 - DNA, 25 bp, Homo sapien
tgtgaacatcgtttcctgtatatct

SEQ ID NO: 2489810 - DNA, 25 bp, Homo sapien
tggttgtacatgatcagagttggag

SEQ ID NO: 2489811 - DNA, 25 bp, Homo sapien
gcggatctcgggcattttcagttgt

SEQ ID NO: 2489812 - DNA, 25 bp, Homo sapien
tgcactgacacgtgaatgtgtgtgt

SEQ ID NO: 2489813 - DNA, 25 bp, Homo sapien
taagttttcgatgatcttgcagatc

SEQ ID NO: 2489814 - DNA, 25 bp, Homo sapien
gatctttgagagaatgcggatctcg

SEQ ID NO: 2489815 - DNA, 25 bp, Homo sapien
caaggccagttcacaagtttgacac

SEQ ID NO: 2489816 - DNA, 25 bp, Homo sapien
gcagtaagcgagagataacaacagt

SEQ ID NO: 2489817 - DNA, 25 bp, Homo sapien
tctatagaattaatgcctcggaggt

SEQ ID NO: 2489818 - DNA, 25 bp, Homo sapien
agataatatattaccagctcccagg

SEQ ID NO: 2489819 - DNA, 25 bp, Homo sapien
tggccttctttcaacacacgggagt

SEQ ID NO: 2489820 - DNA, 25 bp, Homo sapien
cactgttaccatgcagtaatcaggg

SEQ ID NO: 2489821 - DNA, 25 bp, Homo sapien
ttggagactcctaggtgaatggcgt

SEQ ID NO: 2489822 - DNA, 25 bp, Homo sapien
cgtggatgttactcttttgcaaagc

SEQ ID NO: 2489823 - DNA, 25 bp, Homo sapien
tactctatagttcagtgttgcagcc

SEQ ID NO: 2489824 - DNA, 25 bp, Homo sapien
tataggtgtttggatactgtgcaga

SEQ ID NO: 2489825 - DNA, 25 bp, Homo sapien
gcagccttcccatacttgattttta

SEQ ID NO: 2489826 - DNA, 25 bp, Homo sapien
aagtttgtcaaaccatttctctgag

SEQ ID NO: 2489827 - DNA, 25 bp, Homo sapien
cagtagaagggaactgacagcgcct

SEQ ID NO: 2489828 - DNA, 25 bp, Homo sapien
ggtgttaccctgcaggacttaagag

SEQ ID NO: 2489829 - DNA, 25 bp, Homo sapien
gtgagtatccataaaggcaccagga

SEQ ID NO: 2489830 - DNA, 25 bp, Homo sapien
gagtgacttctctcaccagtggtca

SEQ ID NO: 2489831 - DNA, 25 bp, Homo sapien
tccattacctccttacatacactga

SEQ ID NO: 2489832 - DNA, 25 bp, Homo sapien
aaagtaactctctcatgctaacaac

SEQ ID NO: 2489833 - DNA, 25 bp, Homo sapien
tgtgtaagcattgttttcccatgac

SEQ ID NO: 2489834 - DNA, 25 bp, Homo sapien
tgatcagcaggaaatacagggagat

SEQ ID NO: 2489835 - DNA, 25 bp, Homo sapien
gggccccccaaatctaagagtcatg

SEQ ID NO: 2489836 - DNA, 25 bp, Homo sapien
tgggccccccaaatctaagagtcat

SEQ ID NO: 2489837 - DNA, 25 bp, Homo sapien
ctgggccccccaaatctaagagtca

SEQ ID NO: 2489838 - DNA, 25 bp, Homo sapien
aacacagcttctctgatactggagc

SEQ ID NO: 2489839 - DNA, 25 bp, Homo sapien
ggtgttatgctctgctcaatgtttg

SEQ ID NO: 2489840 - DNA, 25 bp, Homo sapien
tactggagcatgaagcagtgtgtcg

SEQ ID NO: 2489841 - DNA, 25 bp, Homo sapien
cagtgtgtcggtagctttgactagt

SEQ ID NO: 2489842 - DNA, 25 bp, Homo sapien
aaatgaacacatgcacgggagcacc

SEQ ID NO: 2489843 - DNA, 25 bp, Homo sapien
taaaggcaagagacgtggagatttc

SEQ ID NO: 2489844 - DNA, 25 bp, Homo sapien
tgggaaagactcgtatggcatctgt

SEQ ID NO: 2489845 - DNA, 25 bp, Homo sapien
catactggacaagggattaaaggca

SEQ ID NO: 2489846 - DNA, 25 bp, Homo sapien
ctgtgtgcgactgtttacttcagac

SEQ ID NO: 2489847 - DNA, 25 bp, Homo sapien
tgtgtgcgactgtttacttcagact

SEQ ID NO: 2489848 - DNA, 25 bp, Homo sapien
tatgttcctcagagcacaaccatct

SEQ ID NO: 2489849 - DNA, 25 bp, Homo sapien
ctttatgttcctcagagcacaacca

SEQ ID NO: 2489850 - DNA, 25 bp, Homo sapien
tctgagggtagctggtagaagttcc

SEQ ID NO: 2489851 - DNA, 25 bp, Homo sapien
tcaagggtctgtttgtttggtggtc

SEQ ID NO: 2489852 - DNA, 25 bp, Homo sapien
agttccgtgacacggactaggccgg

SEQ ID NO: 2489853 - DNA, 25 bp, Homo sapien
caacattgaaagtattcaagggtct

SEQ ID NO: 2489854 - DNA, 25 bp, Homo sapien
ccccatcactgggctaattaatttc

SEQ ID NO: 2489855 - DNA, 25 bp, Homo sapien
tctgtgggtggtgtgcacccgggca

SEQ ID NO: 2489856 - DNA, 25 bp, Homo sapien
ccttgattatcacgggatttcttcc

SEQ ID NO: 2489857 - DNA, 25 bp, Homo sapien
tgaatgtttttacagagacttcaag

SEQ ID NO: 2489858 - DNA, 25 bp, Homo sapien
ccgggcaaagaaatctcagtaagcc

SEQ ID NO: 2489859 - DNA, 25 bp, Homo sapien
tcacagggcagctgatctttggctc

SEQ ID NO: 2489860 - DNA, 25 bp, Homo sapien
gggacaaacgaggtgtgtatctgcc

SEQ ID NO: 2489861 - DNA, 25 bp, Homo sapien
tttcgtctgcccatggctttgatca

SEQ ID NO: 2489862 - DNA, 25 bp, Homo sapien
tgtatctgcctaacagcttagtgac

SEQ ID NO: 2489863 - DNA, 25 bp, Homo sapien
gctttaaggcatgctttactgaatg

SEQ ID NO: 2489864 - DNA, 25 bp, Homo sapien
gaatggaagtttggtcatataatgc

SEQ ID NO: 2489865 - DNA, 25 bp, Homo sapien
ggtcatataatgcagacaagcttta

SEQ ID NO: 2489866 - DNA, 25 bp, Homo sapien
ttactgaatggtgtactgtagtgac

SEQ ID NO: 2489867 - DNA, 25 bp, Homo sapien
ctaacgacgcttttatcggaaatgt

SEQ ID NO: 2489868 - DNA, 25 bp, Homo sapien
tattgtctccgctttaccacccatg

SEQ ID NO: 2489869 - DNA, 25 bp, Homo sapien
tgccgtcttatgagacaatgtgcag

SEQ ID NO: 2489870 - DNA, 25 bp, Homo sapien
ataaaaatcatcctctcactaacga

SEQ ID NO: 2489871 - DNA, 25 bp, Homo sapien
caggaggaaactgaagagacatcct

SEQ ID NO: 2489872 - DNA, 25 bp, Homo sapien
gtgccctttgtgtgttccaggagga

SEQ ID NO: 2489873 - DNA, 25 bp, Homo sapien
gccctttgtgtgttccaggaggaaa

SEQ ID NO: 2489874 - DNA, 25 bp, Homo sapien
gaggaaactgaagagacatcctcac

SEQ ID NO: 2489875 - DNA, 25 bp, Homo sapien
ggcgccaacgttcgatttctacctc

SEQ ID NO: 2489876 - DNA, 25 bp, Homo sapien
gacactgcagtgaccacttattctg

SEQ ID NO: 2489877 - DNA, 25 bp, Homo sapien
cgttcgatttctacctcagcagcag

SEQ ID NO: 2489878 - DNA, 25 bp, Homo sapien
gcagtgaccacttattctgtattgc

SEQ ID NO: 2489879 - DNA, 25 bp, Homo sapien
aatgagacgaaatgctgatgtatcc

SEQ ID NO: 2489880 - DNA, 25 bp, Homo sapien
tatcacacatatcagcaggagtaat

SEQ ID NO: 2489881 - DNA, 25 bp, Homo sapien
cagcacttgttttcaggacaacact

SEQ ID NO: 2489882 - DNA, 25 bp, Homo sapien
tgcatgatgaactcacctaattatg

SEQ ID NO: 2489883 - DNA, 25 bp, Homo sapien
gccagagatgcaatatatccccact

SEQ ID NO: 2489884 - DNA, 25 bp, Homo sapien
aatactacctctgaatgttacaacg

SEQ ID NO: 2489885 - DNA, 25 bp, Homo sapien
cgttttgacataagatggttgacca

SEQ ID NO: 2489886 - DNA, 25 bp, Homo sapien
gttgaccaaggtgcttttcttcggc

SEQ ID NO: 2489887 - DNA, 25 bp, Homo sapien
gcttcaccgaggatagggtcatgaa

SEQ ID NO: 2489888 - DNA, 25 bp, Homo sapien
catcagtaggtgagctctccatcag

SEQ ID NO: 2489889 - DNA, 25 bp, Homo sapien
tcagtctggaggttcagagaaagct

SEQ ID NO: 2489890 - DNA, 25 bp, Homo sapien
ggcagttaggagctcatcagtaggt

SEQ ID NO: 2489891 - DNA, 25 bp, Homo sapien
cttcactaggctctacactggggct

SEQ ID NO: 2489892 - DNA, 25 bp, Homo sapien
gggctcagttctaggtgatgtgttt

SEQ ID NO: 2489893 - DNA, 25 bp, Homo sapien
tcttcactaggctctacactggggc

SEQ ID NO: 2489894 - DNA, 25 bp, Homo sapien
tacactggggctcagttctaggtga

SEQ ID NO: 2489895 - DNA, 25 bp, Homo sapien
catggggtgattgtgatgtctcctt

SEQ ID NO: 2489896 - DNA, 25 bp, Homo sapien
aacctgttgtctcccaaacctgttg

SEQ ID NO: 2489897 - DNA, 25 bp, Homo sapien
ctttgagaatggaaacgtgtgattc

SEQ ID NO: 2489898 - DNA, 25 bp, Homo sapien
gatgtctccttcaaaagcaccctct

SEQ ID NO: 2489899 - DNA, 25 bp, Homo sapien
catgctgcctacgaagtcttctctt

SEQ ID NO: 2489900 - DNA, 25 bp, Homo sapien
tcaccccctgcagagaagtcttcat

SEQ ID NO: 2489901 - DNA, 25 bp, Homo sapien
gaatacaaagtccaatgcatagcat

SEQ ID NO: 2489902 - DNA, 25 bp, Homo sapien
tgctgcctcaactccgtggtaaaag

SEQ ID NO: 2489903 - DNA, 25 bp, Homo sapien
aactccggcagcctcttagggaaga

SEQ ID NO: 2489904 - DNA, 25 bp, Homo sapien
aatgtgtattaggaacccctccagc

SEQ ID NO: 2489905 - DNA, 25 bp, Homo sapien
gaatacttgcgctgactgaagccct

SEQ ID NO: 2489906 - DNA, 25 bp, Homo sapien
gctccttaagccagcgtcgcactgg

SEQ ID NO: 2489907 - DNA, 25 bp, Homo sapien
taaaacgtggtcagctaaaggcctg

SEQ ID NO: 2489908 - DNA, 25 bp, Homo sapien
tctcttgctattgcataaaacgtgg

SEQ ID NO: 2489909 - DNA, 25 bp, Homo sapien
tgcacttgagctaggaaattcttcc

SEQ ID NO: 2489910 - DNA, 25 bp, Homo sapien
tagaccaccatgctccatagctatg

SEQ ID NO: 2489911 - DNA, 25 bp, Homo sapien
tcttatgtgctgacccaggcctgct

SEQ ID NO: 2489912 - DNA, 25 bp, Homo sapien
ccttccaagttcagacgatgctgta

SEQ ID NO: 2489913 - DNA, 25 bp, Homo sapien
cctgtagtgagaccacgaggcatca

SEQ ID NO: 2489914 - DNA, 25 bp, Homo sapien
catgatctaatgacaccctgccagt

SEQ ID NO: 2489915 - DNA, 25 bp, Homo sapien
ggaacaggaaaccaacgaaatcagc

SEQ ID NO: 2489916 - DNA, 25 bp, Homo sapien
tattcagggctagtccttgctctct

SEQ ID NO: 2489917 - DNA, 25 bp, Homo sapien
gcagttcctaaaaccgaggcagcca

SEQ ID NO: 2489918 - DNA, 25 bp, Homo sapien
cgaaatcagcatcgttgaccaatta

SEQ ID NO: 2489919 - DNA, 25 bp, Homo sapien
tgattactgagtaattcttaaagtc

SEQ ID NO: 2489920 - DNA, 25 bp, Homo sapien
ttcttaagattccaagcgtgcagac

SEQ ID NO: 2489921 - DNA, 25 bp, Homo sapien
ttaaagtctctttactggagtgtga

SEQ ID NO: 2489922 - DNA, 25 bp, Homo sapien
gcgtgcagaccattgaattcacatg

SEQ ID NO: 2489923 - DNA, 25 bp, Homo sapien
ggaatttttaaatctgagtttctga

SEQ ID NO: 2489924 - DNA, 25 bp, Homo sapien
ctcttcttggttgctcccccatgaa

SEQ ID NO: 2489925 - DNA, 25 bp, Homo sapien
tgagtttctgaagaactcttcttgg

SEQ ID NO: 2489926 - DNA, 25 bp, Homo sapien
tatattttaattctctagaaaagga

SEQ ID NO: 2489927 - DNA, 25 bp, Homo sapien
ccaaatagttggtctggaaatgaac

SEQ ID NO: 2489928 - DNA, 25 bp, Homo sapien
aattccaaatagttggtctggaaat

SEQ ID NO: 2489929 - DNA, 25 bp, Homo sapien
agtgggtccctcctctattctggct

SEQ ID NO: 2489930 - DNA, 25 bp, Homo sapien
ggtccctcctctattctggctgaca

SEQ ID NO: 2489931 - DNA, 25 bp, Homo sapien
cactcaggctggtagaaacacgaag

SEQ ID NO: 2489932 - DNA, 25 bp, Homo sapien
tagtgtcttcacgagcacatgcaga

SEQ ID NO: 2489933 - DNA, 25 bp, Homo sapien
cagggagttcttcaccgcagtcttc

SEQ ID NO: 2489934 - DNA, 25 bp, Homo sapien
gaagtattcccggtcctctgtaagc

SEQ ID NO: 2489935 - DNA, 25 bp, Homo sapien
tttaacagccatactcccataaggg

SEQ ID NO: 2489936 - DNA, 25 bp, Homo sapien
attccaacaactgctgggcaggccc

SEQ ID NO: 2489937 - DNA, 25 bp, Homo sapien
tgcagcagaacaacaagatgcttct

SEQ ID NO: 2489938 - DNA, 25 bp, Homo sapien
ggctgaggcaaagtggtaaccatct

SEQ ID NO: 2489939 - DNA, 25 bp, Homo sapien
caagcataagaggacgtgattcatc

SEQ ID NO: 2489940 - DNA, 25 bp, Homo sapien
gctgtctgtccaagccgctgatgag

SEQ ID NO: 2489941 - DNA, 25 bp, Homo sapien
cctgtgcagatgatccggcagggct

SEQ ID NO: 2489942 - DNA, 25 bp, Homo sapien
taccgctggtagctgcaagcataag

SEQ ID NO: 2489943 - DNA, 25 bp, Homo sapien
ggagaagttctcacatctgaaatca

SEQ ID NO: 2489944 - DNA, 25 bp, Homo sapien
tggagaagttctcacatctgaaatc

SEQ ID NO: 2489945 - DNA, 25 bp, Homo sapien
ccagatagagaaagcaggttttctg

SEQ ID NO: 2489946 - DNA, 25 bp, Homo sapien
agcaggttttctggagaagttctca

SEQ ID NO: 2489947 - DNA, 25 bp, Homo sapien
ctacaatatatgaccagcgcctgga

SEQ ID NO: 2489948 - DNA, 25 bp, Homo sapien
cagcttcaatggtggcccaatttta

SEQ ID NO: 2489949 - DNA, 25 bp, Homo sapien
tcggtaggaaccaaactccatgttg

SEQ ID NO: 2489950 - DNA, 25 bp, Homo sapien
atctactggccgactctggattggg

SEQ ID NO: 2489951 - DNA, 25 bp, Homo sapien
tgatccacagcttcaatggtggccc

SEQ ID NO: 2489952 - DNA, 25 bp, Homo sapien
ccatcctgggagcatacagcattcc

SEQ ID NO: 2489953 - DNA, 25 bp, Homo sapien
tgatgcccatgagaaacgagggaag

SEQ ID NO: 2489954 - DNA, 25 bp, Homo sapien
cattcccagtaaagtgatgcccatg

SEQ ID NO: 2489955 - DNA, 25 bp, Homo sapien
ggagcatacagcattcccagtaaag

SEQ ID NO: 2489956 - DNA, 25 bp, Homo sapien
aacgaatccatttatcatcctgccc

SEQ ID NO: 2489957 - DNA, 25 bp, Homo sapien
taacgaatccatttatcatcctgcc

SEQ ID NO: 2489958 - DNA, 25 bp, Homo sapien
ttgtggacattccacacaacaataa

SEQ ID NO: 2489959 - DNA, 25 bp, Homo sapien
tcaggtgcaaaagggttcttgtgga

SEQ ID NO: 2489960 - DNA, 25 bp, Homo sapien
tgaaggtgagtccacctcggccaca

SEQ ID NO: 2489961 - DNA, 25 bp, Homo sapien
gccttgacgcttttgaaggtgagtc

SEQ ID NO: 2489962 - DNA, 25 bp, Homo sapien
cggccttgacgcttttgaaggtgag

SEQ ID NO: 2489963 - DNA, 25 bp, Homo sapien
tcagagctgccccagttgttgttga

SEQ ID NO: 2489964 - DNA, 25 bp, Homo sapien
acttcgtgtcggaaaccaggtctga

SEQ ID NO: 2489965 - DNA, 25 bp, Homo sapien
gactggatataactctttaagcccc

SEQ ID NO: 2489966 - DNA, 25 bp, Homo sapien
cacttgtatagttaggatgcattca

SEQ ID NO: 2489967 - DNA, 25 bp, Homo sapien
tctgccaatacatctgaacttcgtg

SEQ ID NO: 2489968 - DNA, 25 bp, Homo sapien
taatggaacgaataccagacctaac

SEQ ID NO: 2489969 - DNA, 25 bp, Homo sapien
ggccctctgtatctatgaattctgc

SEQ ID NO: 2489970 - DNA, 25 bp, Homo sapien
tgccaagacaattcatcgctttagg

SEQ ID NO: 2489971 - DNA, 25 bp, Homo sapien
caatgtgagagtaagaaagtgtttc

SEQ ID NO: 2489972 - DNA, 25 bp, Homo sapien
taaagcctacagcaggccgagtaca

SEQ ID NO: 2489973 - DNA, 25 bp, Homo sapien
ggtgttgctctcataggagatggca

SEQ ID NO: 2489974 - DNA, 25 bp, Homo sapien
aagttgactgtgaacagcctcaggc

SEQ ID NO: 2489975 - DNA, 25 bp, Homo sapien
ggagatggcaactccatgcctgtta

SEQ ID NO: 2489976 - DNA, 25 bp, Homo sapien
gccttagagggtactgacaacactg

SEQ ID NO: 2489977 - DNA, 25 bp, Homo sapien
tggacaaacttcatgactggacaca

SEQ ID NO: 2489978 - DNA, 25 bp, Homo sapien
tgccaaagatgtgaccatacccctg

SEQ ID NO: 2489979 - DNA, 25 bp, Homo sapien
ttccagaggccatgtgacacttgag

SEQ ID NO: 2489980 - DNA, 25 bp, Homo sapien
aaatgtctacattaggccgggtgtg

SEQ ID NO: 2489981 - DNA, 25 bp, Homo sapien
aaaatgtctacattaggccgggtgt

SEQ ID NO: 2489982 - DNA, 25 bp, Homo sapien
ttgttagaatttggtgcctggcccc

SEQ ID NO: 2489983 - DNA, 25 bp, Homo sapien
tcccaaattgttagaatttggtgcc

SEQ ID NO: 2489984 - DNA, 25 bp, Homo sapien
ccaagcatctggaaagtccctggcc

SEQ ID NO: 2489985 - DNA, 25 bp, Homo sapien
tattgtgccccaatttagcagtgtg

SEQ ID NO: 2489986 - DNA, 25 bp, Homo sapien
caaagtttgtgacctcatgaccaag

SEQ ID NO: 2489987 - DNA, 25 bp, Homo sapien
tcagccctatgagagcagaaatctt

SEQ ID NO: 2489988 - DNA, 25 bp, Homo sapien
ctaaagaacattaaatcagtttcca

SEQ ID NO: 2489989 - DNA, 25 bp, Homo sapien
ctaatttcctaaaaagcatactgat

SEQ ID NO: 2489990 - DNA, 25 bp, Homo sapien
taaaaaaccttaagcatacatgaaa

SEQ ID NO: 2489991 - DNA, 25 bp, Homo sapien
gaaatctggtcttctctaggactaa

SEQ ID NO: 2489992 - DNA, 25 bp, Homo sapien
cgttgaggcctgattataactggat

SEQ ID NO: 2489993 - DNA, 25 bp, Homo sapien
gggtagcatccagttaaagtatcag

SEQ ID NO: 2489994 - DNA, 25 bp, Homo sapien
taatacctgacagaacgttgaggcc

SEQ ID NO: 2489995 - DNA, 25 bp, Homo sapien
ggaatcaaagctccacacaagtact

SEQ ID NO: 2489996 - DNA, 25 bp, Homo sapien
atccatattgggtactgtccatgct

SEQ ID NO: 2489997 - DNA, 25 bp, Homo sapien
tcatccatattgggtactgtccatg

SEQ ID NO: 2489998 - DNA, 25 bp, Homo sapien
gccaaaccctttgccactttcactg

SEQ ID NO: 2489999 - DNA, 25 bp, Homo sapien
catattgggtactgtccatgctggt

SEQ ID NO: 2490000 - DNA, 25 bp, Homo sapien
cgtctagtttgagaatacttttaag

SEQ ID NO: 2490001 - DNA, 25 bp, Homo sapien
tctagtttgagaatacttttaagcc

SEQ ID NO: 2490002 - DNA, 25 bp, Homo sapien
gtctagtttgagaatacttttaagc

SEQ ID NO: 2490003 - DNA, 25 bp, Homo sapien
accaccacagttgctatctcttgaa

SEQ ID NO: 2490004 - DNA, 25 bp, Homo sapien
cactaacattttttgaacgccggca

SEQ ID NO: 2490005 - DNA, 25 bp, Homo sapien
tccggactggagctcaagtatagcc

SEQ ID NO: 2490006 - DNA, 25 bp, Homo sapien
tttatccagtgcactcggaagccgg

SEQ ID NO: 2490007 - DNA, 25 bp, Homo sapien
tatagcccagcgagtgtcaagaaac

SEQ ID NO: 2490008 - DNA, 25 bp, Homo sapien
cgccgaccggaagtctttgcacttc

SEQ ID NO: 2490009 - DNA, 25 bp, Homo sapien
tcacgccgaccggaagtctttgcac

SEQ ID NO: 2490010 - DNA, 25 bp, Homo sapien
gagaaacgaacacccacacctcacg

SEQ ID NO: 2490011 - DNA, 25 bp, Homo sapien
acgctcacgccgaccggaagtcttt

SEQ ID NO: 2490012 - DNA, 25 bp, Homo sapien
tcgccaaatgtcacttaagcacctg

SEQ ID NO: 2490013 - DNA, 25 bp, Homo sapien
tattcccattatgaagatgaggcag

SEQ ID NO: 2490014 - DNA, 25 bp, Homo sapien
taagcacctggttggactgcaatga

SEQ ID NO: 2490015 - DNA, 25 bp, Homo sapien
gagggaaggccatttaaagacacag

SEQ ID NO: 2490016 - DNA, 25 bp, Homo sapien
gatatacttaatggctgatgaccca

SEQ ID NO: 2490017 - DNA, 25 bp, Homo sapien
caaacgaactgctatgcgtggctaa

SEQ ID NO: 2490018 - DNA, 25 bp, Homo sapien
gatagctcttaactgagatcctaaa

SEQ ID NO: 2490019 - DNA, 25 bp, Homo sapien
ggtaaagactctactacttcagaat

SEQ ID NO: 2490020 - DNA, 25 bp, Homo sapien
taatgaaacagtttctatatactgc

SEQ ID NO: 2490021 - DNA, 25 bp, Homo sapien
ttcagttgagctgagatacttttaa

SEQ ID NO: 2490022 - DNA, 25 bp, Homo sapien
attacttaatgaaacagtttctata

SEQ ID NO: 2490023 - DNA, 25 bp, Homo sapien
cttcagttgagctgagatactttta

SEQ ID NO: 2490024 - DNA, 25 bp, Homo sapien
tatccaagtagaggctgatggcagc

SEQ ID NO: 2490025 - DNA, 25 bp, Homo sapien
ttccagaaaccgtaacaggtgcagg

SEQ ID NO: 2490026 - DNA, 25 bp, Homo sapien
gctaatacgtactcttcaggtgaca

SEQ ID NO: 2490027 - DNA, 25 bp, Homo sapien
gcagcggctaagaccaactccatta

SEQ ID NO: 2490028 - DNA, 25 bp, Homo sapien
taataaggaccaacacaagaccctg

SEQ ID NO: 2490029 - DNA, 25 bp, Homo sapien
cttgcctctgttggatggaaggatg

SEQ ID NO: 2490030 - DNA, 25 bp, Homo sapien
cagttgtaagcaagggcctctttct

SEQ ID NO: 2490031 - DNA, 25 bp, Homo sapien
aaaaggcaaggcaagtccaaacttg

SEQ ID NO: 2490032 - DNA, 25 bp, Homo sapien
agaatcctgacaggcacaatatcca

SEQ ID NO: 2490033 - DNA, 25 bp, Homo sapien
tcaagaatcctgacaggcacaatat

SEQ ID NO: 2490034 - DNA, 25 bp, Homo sapien
cttcaagaatcctgacaggcacaat

SEQ ID NO: 2490035 - DNA, 25 bp, Homo sapien
caagaatcctgacaggcacaatatc

SEQ ID NO: 2490036 - DNA, 25 bp, Homo sapien
caattttagtaatttgcaatattgt

SEQ ID NO: 2490037 - DNA, 25 bp, Homo sapien
taaaatatgggacttatcagctgct

SEQ ID NO: 2490038 - DNA, 25 bp, Homo sapien
gatggacacatctgacactgctata

SEQ ID NO: 2490039 - DNA, 25 bp, Homo sapien
tgcttcaggtcacagggaattacag

SEQ ID NO: 2490040 - DNA, 25 bp, Homo sapien
tcttggacactggacagcaaacagc

SEQ ID NO: 2490041 - DNA, 25 bp, Homo sapien
tgaactgaactttaattgattaaaa

SEQ ID NO: 2490042 - DNA, 25 bp, Homo sapien
tgaaacacaaatattctgattggaa

SEQ ID NO: 2490043 - DNA, 25 bp, Homo sapien
taagacattaggatagggctgccag

SEQ ID NO: 2490044 - DNA, 25 bp, Homo sapien
catttttatgacagggcccaggtga

SEQ ID NO: 2490045 - DNA, 25 bp, Homo sapien
aatctgacacacttaggctccctgg

SEQ ID NO: 2490046 - DNA, 25 bp, Homo sapien
gatgcatcaagctcctaggtctgag

SEQ ID NO: 2490047 - DNA, 25 bp, Homo sapien
tatgttctaggagtaggacctggcc

SEQ ID NO: 2490048 - DNA, 25 bp, Homo sapien
ggacctggccctagtactcaaagag

SEQ ID NO: 2490049 - DNA, 25 bp, Homo sapien
aaaataacagtgtagcacattcctc

SEQ ID NO: 2490050 - DNA, 25 bp, Homo sapien
aaagagatgatctcttattaccctc

SEQ ID NO: 2490051 - DNA, 25 bp, Homo sapien
tgtagtagtcagtatgaaagcttgc

SEQ ID NO: 2490052 - DNA, 25 bp, Homo sapien
gattgtagagtatacacagtcaaac

SEQ ID NO: 2490053 - DNA, 25 bp, Homo sapien
gaaatccttcttagattgtagagta

SEQ ID NO: 2490054 - DNA, 25 bp, Homo sapien
gtagtcagtatgaaagcttgcagaa

SEQ ID NO: 2490055 - DNA, 25 bp, Homo sapien
taatgcaattaacagtctccaaaaa

SEQ ID NO: 2490056 - DNA, 25 bp, Homo sapien
catccttgactacatgggtacagtg

SEQ ID NO: 2490057 - DNA, 25 bp, Homo sapien
tttctcctgtactttatgccaataa

SEQ ID NO: 2490058 - DNA, 25 bp, Homo sapien
cttatccatccttgactacatgggt

SEQ ID NO: 2490059 - DNA, 25 bp, Homo sapien
aacagaaacggccttcaaacacata

SEQ ID NO: 2490060 - DNA, 25 bp, Homo sapien
ccattacaggattaggaaggtgaac

SEQ ID NO: 2490061 - DNA, 25 bp, Homo sapien
cctcttggaggttaactgctttgaa

SEQ ID NO: 2490062 - DNA, 25 bp, Homo sapien
gaggcattacatagggtacatcaag

SEQ ID NO: 2490063 - DNA, 25 bp, Homo sapien
tacctgaaagatctatctacattaa

SEQ ID NO: 2490064 - DNA, 25 bp, Homo sapien
tctgaaatatgatattccatgatgt

SEQ ID NO: 2490065 - DNA, 25 bp, Homo sapien
tccatgatgttaaactttagcccca

SEQ ID NO: 2490066 - DNA, 25 bp, Homo sapien
tgtcctatgctatatttctgaaata

SEQ ID NO: 2490067 - DNA, 25 bp, Homo sapien
caacaactgccacagtcagagcttc

SEQ ID NO: 2490068 - DNA, 25 bp, Homo sapien
acaactgccacagtcagagcttcca

SEQ ID NO: 2490069 - DNA, 25 bp, Homo sapien
ccacagtcagagcttccaacagcgt

SEQ ID NO: 2490070 - DNA, 25 bp, Homo sapien
aactgccacagtcagagcttccaac

SEQ ID NO: 2490071 - DNA, 25 bp, Homo sapien
gtgactgtaaaatttatactatctc

SEQ ID NO: 2490072 - DNA, 25 bp, Homo sapien
aattagtgactgtaaaatttatact

SEQ ID NO: 2490073 - DNA, 25 bp, Homo sapien
ttagtgactgtaaaatttatactat

SEQ ID NO: 2490074 - DNA, 25 bp, Homo sapien
tagtgactgtaaaatttatactatc

SEQ ID NO: 2490075 - DNA, 25 bp, Homo sapien
cataatcagatagcagcaaagccag

SEQ ID NO: 2490076 - DNA, 25 bp, Homo sapien
gggaatagagaaagtcagagtactc

SEQ ID NO: 2490077 - DNA, 25 bp, Homo sapien
gaaaggataaatgccttgccaagtg

SEQ ID NO: 2490078 - DNA, 25 bp, Homo sapien
tagaggtagaaggtatcacaaggat

SEQ ID NO: 2490079 - DNA, 25 bp, Homo sapien
caggttaaggggatacttatgtctg

SEQ ID NO: 2490080 - DNA, 25 bp, Homo sapien
aaaatcaaacccagagatccgaggg

SEQ ID NO: 2490081 - DNA, 25 bp, Homo sapien
ccagagatccgagggcaaacagcaa

SEQ ID NO: 2490082 - DNA, 25 bp, Homo sapien
tcaaacccagagatccgagggcaaa

SEQ ID NO: 2490083 - DNA, 25 bp, Homo sapien
ctctcatgtacaaatgtccgtacag

SEQ ID NO: 2490084 - DNA, 25 bp, Homo sapien
aaactgttgaagtcactgtagttaa

SEQ ID NO: 2490085 - DNA, 25 bp, Homo sapien
ttgaagtcactgtagttaagagaac

SEQ ID NO: 2490086 - DNA, 25 bp, Homo sapien
tgttgaagtcactgtagttaagaga

SEQ ID NO: 2490087 - DNA, 25 bp, Homo sapien
actgttgaagtcactgtagttaaga

SEQ ID NO: 2490088 - DNA, 25 bp, Homo sapien
agagaaagaatgctgtagacttttc

SEQ ID NO: 2490089 - DNA, 25 bp, Homo sapien
tagactgtaaagaccgaaagctccc

SEQ ID NO: 2490090 - DNA, 25 bp, Homo sapien
agatgcagcctttctcagttccgca

SEQ ID NO: 2490091 - DNA, 25 bp, Homo sapien
tgaggaaccctaaacataccattaa

SEQ ID NO: 2490092 - DNA, 25 bp, Homo sapien
tcatttatagtacccctgcctctag

SEQ ID NO: 2490093 - DNA, 25 bp, Homo sapien
tctacaactgcttttgcacaatggc

SEQ ID NO: 2490094 - DNA, 25 bp, Homo sapien
cagatatcttatggcccagaaagct

SEQ ID NO: 2490095 - DNA, 25 bp, Homo sapien
tacatatcctctacaactgcttttg

SEQ ID NO: 2490096 - DNA, 25 bp, Homo sapien
aggagctgcaacagatatcttatgg

SEQ ID NO: 2490097 - DNA, 25 bp, Homo sapien
gatctaccagattgccggagatgaa

SEQ ID NO: 2490098 - DNA, 25 bp, Homo sapien
tgttcaccatccctgatctaccaga

SEQ ID NO: 2490099 - DNA, 25 bp, Homo sapien
gctgagggtgcagaaggtatcctca

SEQ ID NO: 2490100 - DNA, 25 bp, Homo sapien
gattgccggagatgaaaaaatctga

SEQ ID NO: 2490101 - DNA, 25 bp, Homo sapien
aaatgtacacattacaagcagctaa

SEQ ID NO: 2490102 - DNA, 25 bp, Homo sapien
ttttccaccaatgaaccttgacatt

SEQ ID NO: 2490103 - DNA, 25 bp, Homo sapien
gcccgacgggccttctcacataatt

SEQ ID NO: 2490104 - DNA, 25 bp, Homo sapien
tgctcctaacatcccagacggtgag

SEQ ID NO: 2490105 - DNA, 25 bp, Homo sapien
gactcacatttctacagcgggggaa

SEQ ID NO: 2490106 - DNA, 25 bp, Homo sapien
ttgactcacatttctacagcggggg

SEQ ID NO: 2490107 - DNA, 25 bp, Homo sapien
ctcacatttctacagcgggggaagg

SEQ ID NO: 2490108 - DNA, 25 bp, Homo sapien
tcacatttctacagcgggggaaggc

SEQ ID NO: 2490109 - DNA, 25 bp, Homo sapien
tggaaaaccgatgttcatactaccc

SEQ ID NO: 2490110 - DNA, 25 bp, Homo sapien
cctactttgggtagatttaatgcaa

SEQ ID NO: 2490111 - DNA, 25 bp, Homo sapien
aatggaaacacatccatcattatac

SEQ ID NO: 2490112 - DNA, 25 bp, Homo sapien
gaatgtcaggggaccccaaattgcc

SEQ ID NO: 2490113 - DNA, 25 bp, Homo sapien
ggtgtcacgcccaagaaatccattg

SEQ ID NO: 2490114 - DNA, 25 bp, Homo sapien
tgcacccaaccttgtgaatcttctt

SEQ ID NO: 2490115 - DNA, 25 bp, Homo sapien
gcctcttacaggatatatcatttgc

SEQ ID NO: 2490116 - DNA, 25 bp, Homo sapien
gaatgtgttctttgatacacagaag

SEQ ID NO: 2490117 - DNA, 25 bp, Homo sapien
tatggagacaatagaagatcagcag

SEQ ID NO: 2490118 - DNA, 25 bp, Homo sapien
taaaccttggtcttgggtgataatg

SEQ ID NO: 2490119 - DNA, 25 bp, Homo sapien
gaatatacaacactaagagcgaacc

SEQ ID NO: 2490120 - DNA, 25 bp, Homo sapien
tctggtacagaacgttattagtgca

SEQ ID NO: 2490121 - DNA, 25 bp, Homo sapien
caggcaatggcttccacgtagatga

SEQ ID NO: 2490122 - DNA, 25 bp, Homo sapien
ggctgtttcggcgatcaaatgacca

SEQ ID NO: 2490123 - DNA, 25 bp, Homo sapien
aaatgctaggcaccaagattcttgg

SEQ ID NO: 2490124 - DNA, 25 bp, Homo sapien
caagttccagctgcctaaacaggct

SEQ ID NO: 2490125 - DNA, 25 bp, Homo sapien
ggaagcttctgtgttgagcaacttc

SEQ ID NO: 2490126 - DNA, 25 bp, Homo sapien
gaagcttctgtgttgagcaacttcc

SEQ ID NO: 2490127 - DNA, 25 bp, Homo sapien
aatcctcaaagacctgttgcattct

SEQ ID NO: 2490128 - DNA, 25 bp, Homo sapien
tcaaagacctgttgcattctgggcc

SEQ ID NO: 2490129 - DNA, 25 bp, Homo sapien
ctcaaagacctgttgcattctgggc

SEQ ID NO: 2490130 - DNA, 25 bp, Homo sapien
tcaataatcctcaaagacctgttgc

SEQ ID NO: 2490131 - DNA, 25 bp, Homo sapien
caaattcaggctgcggcggtttcca

SEQ ID NO: 2490132 - DNA, 25 bp, Homo sapien
ggagctcagtgagcactccctgtga

SEQ ID NO: 2490133 - DNA, 25 bp, Homo sapien
ttctagaggccgagcagtgcagaca

SEQ ID NO: 2490134 - DNA, 25 bp, Homo sapien
cagtcctctggtacccggagaagga

SEQ ID NO: 2490135 - DNA, 25 bp, Homo sapien
gctgccatagttgaagtcgtcctcg

SEQ ID NO: 2490136 - DNA, 25 bp, Homo sapien
tcctcgatcgaggagcgagggtacc

SEQ ID NO: 2490137 - DNA, 25 bp, Homo sapien
gcacggtggcggaggccacgctgct

SEQ ID NO: 2490138 - DNA, 25 bp, Homo sapien
ttcggatgtgcacggtggcggaggc

SEQ ID NO: 2490139 - DNA, 25 bp, Homo sapien
gtccactaaccgcaaccgcctcctc

SEQ ID NO: 2490140 - DNA, 25 bp, Homo sapien
tccactaaccgcaaccgcctcctcc

SEQ ID NO: 2490141 - DNA, 25 bp, Homo sapien
tacgccactttaataggacacacag

SEQ ID NO: 2490142 - DNA, 25 bp, Homo sapien
cacccacatggcttgctgttcacaa

SEQ ID NO: 2490143 - DNA, 25 bp, Homo sapien
tcttcacttagtttagggcagcaga

SEQ ID NO: 2490144 - DNA, 25 bp, Homo sapien
gaaattcagtgagtccctgggaact

SEQ ID NO: 2490145 - DNA, 25 bp, Homo sapien
gaacagctactagatgaatttaagg

SEQ ID NO: 2490146 - DNA, 25 bp, Homo sapien
ttcttcatgtaagaacacctttctg

SEQ ID NO: 2490147 - DNA, 25 bp, Homo sapien
tatgcaccttatagaacttatagca

SEQ ID NO: 2490148 - DNA, 25 bp, Homo sapien
catgattgttcagccttcacaccct

SEQ ID NO: 2490149 - DNA, 25 bp, Homo sapien
ggctgtagtgacatggtgtgctcca

SEQ ID NO: 2490150 - DNA, 25 bp, Homo sapien
gaatggtcattagacgtctcgacag

SEQ ID NO: 2490151 - DNA, 25 bp, Homo sapien
ccattgagggagttaacacggcacc

SEQ ID NO: 2490152 - DNA, 25 bp, Homo sapien
catactgtggcaagtaggctccttg

SEQ ID NO: 2490153 - DNA, 25 bp, Homo sapien
aaaatccgttttgtatagcagctgt

SEQ ID NO: 2490154 - DNA, 25 bp, Homo sapien
aaatccgttttgtatagcagctgta

SEQ ID NO: 2490155 - DNA, 25 bp, Homo sapien
tctatgccatggtcttccattaggg

SEQ ID NO: 2490156 - DNA, 25 bp, Homo sapien
tccattagggatgtatttgtttggg

SEQ ID NO: 2490157 - DNA, 25 bp, Homo sapien
tgccatggtcttccattagggatgt

SEQ ID NO: 2490158 - DNA, 25 bp, Homo sapien
ccttctctatgccatggtcttccat

SEQ ID NO: 2490159 - DNA, 25 bp, Homo sapien
ttaaaatgaccagtaacagcttcac

SEQ ID NO: 2490160 - DNA, 25 bp, Homo sapien
ctcctggtggtgtcttaataaattt

SEQ ID NO: 2490161 - DNA, 25 bp, Homo sapien
tgtgggggcagaaactcctggtggt

SEQ ID NO: 2490162 - DNA, 25 bp, Homo sapien
ttttccattaaaatgaccagtaaca

SEQ ID NO: 2490163 - DNA, 25 bp, Homo sapien
cacgtagtatccttgtagaaataac

SEQ ID NO: 2490164 - DNA, 25 bp, Homo sapien
atcacgtagtatccttgtagaaata

SEQ ID NO: 2490165 - DNA, 25 bp, Homo sapien
aaagccaacaccacgacttgtacca

SEQ ID NO: 2490166 - DNA, 25 bp, Homo sapien
ctagcaaagccaacaccacgacttg

SEQ ID NO: 2490167 - DNA, 25 bp, Homo sapien
tagaaatgtagaggttggtaggatc

SEQ ID NO: 2490168 - DNA, 25 bp, Homo sapien
agttcttgcttatccatggagagtg

SEQ ID NO: 2490169 - DNA, 25 bp, Homo sapien
ttttctagttcttgcttatccatgg

SEQ ID NO: 2490170 - DNA, 25 bp, Homo sapien
atccatggagagtggcaaattagaa

SEQ ID NO: 2490171 - DNA, 25 bp, Homo sapien
ctattttcccatatggttgacagag

SEQ ID NO: 2490172 - DNA, 25 bp, Homo sapien
tattttcccatatggttgacagagc

SEQ ID NO: 2490173 - DNA, 25 bp, Homo sapien
ttttcccatatggttgacagagctt

SEQ ID NO: 2490174 - DNA, 25 bp, Homo sapien
tttcccatatggttgacagagcttc

SEQ ID NO: 2490175 - DNA, 25 bp, Homo sapien
aggcagtcctcggatatagaggttc

SEQ ID NO: 2490176 - DNA, 25 bp, Homo sapien
cctcggatatagaggttcgttttgc

SEQ ID NO: 2490177 - DNA, 25 bp, Homo sapien
gatatagaggttcgttttgctgagc

SEQ ID NO: 2490178 - DNA, 25 bp, Homo sapien
ggttcgttttgctgagctgatccca

SEQ ID NO: 2490179 - DNA, 25 bp, Homo sapien
gttgttattactgctggtggtgctg

SEQ ID NO: 2490180 - DNA, 25 bp, Homo sapien
ctactgttgttattactgctggtgg

SEQ ID NO: 2490181 - DNA, 25 bp, Homo sapien
ctgttgttattactgctggtggtgc

SEQ ID NO: 2490182 - DNA, 25 bp, Homo sapien
tgctactgttgttattactgctggt

SEQ ID NO: 2490183 - DNA, 25 bp, Homo sapien
ctgcttgcgatagggcgtccggcag

SEQ ID NO: 2490184 - DNA, 25 bp, Homo sapien
tagggcgtccggcagttgctgctgc

SEQ ID NO: 2490185 - DNA, 25 bp, Homo sapien
gcgatagggcgtccggcagttgctg

SEQ ID NO: 2490186 - DNA, 25 bp, Homo sapien
cttgcgatagggcgtccggcagttg

SEQ ID NO: 2490187 - DNA, 25 bp, Homo sapien
ctacagggaatgcaaagtgtctttc

SEQ ID NO: 2490188 - DNA, 25 bp, Homo sapien
tttctaagggatgccaaaacaatta

SEQ ID NO: 2490189 - DNA, 25 bp, Homo sapien
taacaggcatgtcaaagcctacagg

SEQ ID NO: 2490190 - DNA, 25 bp, Homo sapien
ggagcccagctcagtgtttaacagg

SEQ ID NO: 2490191 - DNA, 25 bp, Homo sapien
ctgtgtaggattctccatacttcct

SEQ ID NO: 2490192 - DNA, 25 bp, Homo sapien
tccatacttcctcagtgtacaacca

SEQ ID NO: 2490193 - DNA, 25 bp, Homo sapien
cttcctcagtgtacaaccaatgatc

SEQ ID NO: 2490194 - DNA, 25 bp, Homo sapien
tgtgtaggattctccatacttcctc

SEQ ID NO: 2490195 - DNA, 25 bp, Homo sapien
tccaggagcctcagacttgatctga

SEQ ID NO: 2490196 - DNA, 25 bp, Homo sapien
ctgcattcaaatgcccccaggactc

SEQ ID NO: 2490197 - DNA, 25 bp, Homo sapien
gagcctcagacttgatctgatccat

SEQ ID NO: 2490198 - DNA, 25 bp, Homo sapien
acttgatctgatccattgaagagtc

SEQ ID NO: 2490199 - DNA, 25 bp, Homo sapien
cagcatgtcgtactacaaatatgcc

SEQ ID NO: 2490200 - DNA, 25 bp, Homo sapien
acttcttgatatcccgtggctgttg

SEQ ID NO: 2490201 - DNA, 25 bp, Homo sapien
gttgctgtagcacttttagtaacag

SEQ ID NO: 2490202 - DNA, 25 bp, Homo sapien
ctgtatagggatagcaaagacttct

SEQ ID NO: 2490203 - DNA, 25 bp, Homo sapien
gcattagctactaaggtacaaagta

SEQ ID NO: 2490204 - DNA, 25 bp, Homo sapien
cacaccaatgcaaccgaagtaaatg

SEQ ID NO: 2490205 - DNA, 25 bp, Homo sapien
gctactaaggtacaaagtaagacac

SEQ ID NO: 2490206 - DNA, 25 bp, Homo sapien
gacagggcatctacccaagtcaaca

SEQ ID NO: 2490207 - DNA, 25 bp, Homo sapien
gcagctgtgcacaaccatccctaat

SEQ ID NO: 2490208 - DNA, 25 bp, Homo sapien
cactcaggatggctattcaaggaat

SEQ ID NO: 2490209 - DNA, 25 bp, Homo sapien
tagaaaagagcactgacgaagcact

SEQ ID NO: 2490210 - DNA, 25 bp, Homo sapien
tggttaacccttagagtcaccctga

SEQ ID NO: 2490211 - DNA, 25 bp, Homo sapien
ttttcttgtgttccaaattgcacaa

SEQ ID NO: 2490212 - DNA, 25 bp, Homo sapien
cttgtgttccaaattgcacaatgga

SEQ ID NO: 2490213 - DNA, 25 bp, Homo sapien
ttcttgtgttccaaattgcacaatg

SEQ ID NO: 2490214 - DNA, 25 bp, Homo sapien
caatggagtcactgccagttcaagc

SEQ ID NO: 2490215 - DNA, 25 bp, Homo sapien
tgttgattccacagatttttagtag

SEQ ID NO: 2490216 - DNA, 25 bp, Homo sapien
tagtaggtaccatgtctcctgcctt

SEQ ID NO: 2490217 - DNA, 25 bp, Homo sapien
caggcacccactgcagttacttgat

SEQ ID NO: 2490218 - DNA, 25 bp, Homo sapien
aagggatggatgtgaaaagtcattt

SEQ ID NO: 2490219 - DNA, 25 bp, Homo sapien
gggaaaggtctatgtcctgctcatt

SEQ ID NO: 2490220 - DNA, 25 bp, Homo sapien
cactatcacgtgatactggagttgc

SEQ ID NO: 2490221 - DNA, 25 bp, Homo sapien
tgtcatctagattgcacccgaagtt

SEQ ID NO: 2490222 - DNA, 25 bp, Homo sapien
tttggatccctaatggctggcacag

SEQ ID NO: 2490223 - DNA, 25 bp, Homo sapien
gagaaggcatgtgacaaagcaatgc

SEQ ID NO: 2490224 - DNA, 25 bp, Homo sapien
cttagtaattgaagctatgaaatgg

SEQ ID NO: 2490225 - DNA, 25 bp, Homo sapien
atttgtctggtatcccttgagtaac

SEQ ID NO: 2490226 - DNA, 25 bp, Homo sapien
cttgagtaacaagtcttgagaaggc

SEQ ID NO: 2490227 - DNA, 25 bp, Homo sapien
tattggggcactggtttcagagtcc

SEQ ID NO: 2490228 - DNA, 25 bp, Homo sapien
tctgtcctggtccaaaggcctggga

SEQ ID NO: 2490229 - DNA, 25 bp, Homo sapien
aatctgccgtctgcacactgaagag

SEQ ID NO: 2490230 - DNA, 25 bp, Homo sapien
aagtttcacaatctgccgtctgcac

SEQ ID NO: 2490231 - DNA, 25 bp, Homo sapien
catcaagcctcacagagttgtcccc

SEQ ID NO: 2490232 - DNA, 25 bp, Homo sapien
gagccatttcgacttcaccctttgg

SEQ ID NO: 2490233 - DNA, 25 bp, Homo sapien
tctggctgtgaatagaagaacacca

SEQ ID NO: 2490234 - DNA, 25 bp, Homo sapien
ccatggatcggtctttggtttaaag

SEQ ID NO: 2490235 - DNA, 25 bp, Homo sapien
aagtattgtcttgtacgacttcgta

SEQ ID NO: 2490236 - DNA, 25 bp, Homo sapien
tacaccagacttaatgcttctggca

SEQ ID NO: 2490237 - DNA, 25 bp, Homo sapien
tctggcactgaatctggaacccagt

SEQ ID NO: 2490238 - DNA, 25 bp, Homo sapien
gaatctggaacccagttgttttgaa

SEQ ID NO: 2490239 - DNA, 25 bp, Homo sapien
ctccttgccttttctatccctctgg

SEQ ID NO: 2490240 - DNA, 25 bp, Homo sapien
tttctatccctctggctctcaggca

SEQ ID NO: 2490241 - DNA, 25 bp, Homo sapien
ggctctcaggcactgcctctgcttt

SEQ ID NO: 2490242 - DNA, 25 bp, Homo sapien
ctctggctctcaggcactgcctctg

SEQ ID NO: 2490243 - DNA, 25 bp, Homo sapien
tcattagaattccactaggggtcac

SEQ ID NO: 2490244 - DNA, 25 bp, Homo sapien
ttcattagaattccactaggggtca

SEQ ID NO: 2490245 - DNA, 25 bp, Homo sapien
agaattccactaggggtcactttct

SEQ ID NO: 2490246 - DNA, 25 bp, Homo sapien
attagaattccactaggggtcactt

SEQ ID NO: 2490247 - DNA, 25 bp, Homo sapien
aagaaatagtgcaggcacttagcaa

SEQ ID NO: 2490248 - DNA, 25 bp, Homo sapien
gtgcaggcacttagcaaatcaactt

SEQ ID NO: 2490249 - DNA, 25 bp, Homo sapien
tagtgcaggcacttagcaaatcaac

SEQ ID NO: 2490250 - DNA, 25 bp, Homo sapien
aaatagtgcaggcacttagcaaatc

SEQ ID NO: 2490251 - DNA, 25 bp, Homo sapien
ctatcttagttgctctagattcagt

SEQ ID NO: 2490252 - DNA, 25 bp, Homo sapien
tcttagttgctctagattcagtttc

SEQ ID NO: 2490253 - DNA, 25 bp, Homo sapien
tatcttagttgctctagattcagtt

SEQ ID NO: 2490254 - DNA, 25 bp, Homo sapien
cttagttgctctagattcagtttcc

SEQ ID NO: 2490255 - DNA, 25 bp, Homo sapien
cagatagtctctgctgtctgtacat

SEQ ID NO: 2490256 - DNA, 25 bp, Homo sapien
tttgtcttcatgatcctccagctct

SEQ ID NO: 2490257 - DNA, 25 bp, Homo sapien
cttccttgttttccaattctttcag

SEQ ID NO: 2490258 - DNA, 25 bp, Homo sapien
tcttcatacattttcaccactgact

SEQ ID NO: 2490259 - DNA, 25 bp, Homo sapien
cgactacctaaacgacgacgtggag

SEQ ID NO: 2490260 - DNA, 25 bp, Homo sapien
catgcagttagccagggttttcccg

SEQ ID NO: 2490261 - DNA, 25 bp, Homo sapien
aagagtccgtgttcatcgacgccga

SEQ ID NO: 2490262 - DNA, 25 bp, Homo sapien
gttgagttcaggagaagcatggcca

SEQ ID NO: 2490263 - DNA, 25 bp, Homo sapien
tgtttgaggctgtgaggtcgaagct

SEQ ID NO: 2490264 - DNA, 25 bp, Homo sapien
gtttgaggctgtgaggtcgaagctg

SEQ ID NO: 2490265 - DNA, 25 bp, Homo sapien
ttgtttgaggctgtgaggtcgaagc

SEQ ID NO: 2490266 - DNA, 25 bp, Homo sapien
gattgtttgaggctgtgaggtcgaa

SEQ ID NO: 2490267 - DNA, 25 bp, Homo sapien
agctgtgattgtgacgtcccattcc

SEQ ID NO: 2490268 - DNA, 25 bp, Homo sapien
tagctgaacttggtagtgcatatct

SEQ ID NO: 2490269 - DNA, 25 bp, Homo sapien
gctgtgattgtgacgtcccattcca

SEQ ID NO: 2490270 - DNA, 25 bp, Homo sapien
ttagctgaacttggtagtgcatatc

SEQ ID NO: 2490271 - DNA, 25 bp, Homo sapien
ttctctaccgttgggactggcaggg

SEQ ID NO: 2490272 - DNA, 25 bp, Homo sapien
gctcagagcaaaagatagtccagtg

SEQ ID NO: 2490273 - DNA, 25 bp, Homo sapien
caatttcggtaagtggcatggctca

SEQ ID NO: 2490274 - DNA, 25 bp, Homo sapien
tggtctcctacgtgcatcattgctg

SEQ ID NO: 2490275 - DNA, 25 bp, Homo sapien
tgttctgttcactccaatctcctgg

SEQ ID NO: 2490276 - DNA, 25 bp, Homo sapien
taaccaggtccagcttattcccgga

SEQ ID NO: 2490277 - DNA, 25 bp, Homo sapien
tattagtgggttctcgtgtctccaa

SEQ ID NO: 2490278 - DNA, 25 bp, Homo sapien
cagcagtcaaagtctctggttcgga

SEQ ID NO: 2490279 - DNA, 25 bp, Homo sapien
tccatgtcagagtccttgtacaagg

SEQ ID NO: 2490280 - DNA, 25 bp, Homo sapien
tacactgaacccaaagtcctccatg

SEQ ID NO: 2490281 - DNA, 25 bp, Homo sapien
gctttaagccaccaagatctcctgg

SEQ ID NO: 2490282 - DNA, 25 bp, Homo sapien
cccagctgggcgaatatttttgaca

SEQ ID NO: 2490283 - DNA, 25 bp, Homo sapien
cacctgaccacctgcgagtgttcat

SEQ ID NO: 2490284 - DNA, 25 bp, Homo sapien
acaatctttgacatccctttgcacc

SEQ ID NO: 2490285 - DNA, 25 bp, Homo sapien
ccacaatctttgacatccctttgca

SEQ ID NO: 2490286 - DNA, 25 bp, Homo sapien
ctctaccttcctctgcatagtcaac

SEQ ID NO: 2490287 - DNA, 25 bp, Homo sapien
catcctctaccttcctctgcatagt

SEQ ID NO: 2490288 - DNA, 25 bp, Homo sapien
gcgtacatgctatgcagaatggctg

SEQ ID NO: 2490289 - DNA, 25 bp, Homo sapien
catgctatgcagaatggctgccaaa

SEQ ID NO: 2490290 - DNA, 25 bp, Homo sapien
tgcagaatggctgccaaatttgacc

SEQ ID NO: 2490291 - DNA, 25 bp, Homo sapien
atctcggcgtacatgctatgcagaa

SEQ ID NO: 2490292 - DNA, 25 bp, Homo sapien
tgttgctccgagttgtttggctgta

SEQ ID NO: 2490293 - DNA, 25 bp, Homo sapien
acaggagttggagacatgatctcct

SEQ ID NO: 2490294 - DNA, 25 bp, Homo sapien
tgttggagcctcatgattcaaactc

SEQ ID NO: 2490295 - DNA, 25 bp, Homo sapien
tgtcgccccagctgactgcgaggtg

SEQ ID NO: 2490296 - DNA, 25 bp, Homo sapien
ggaaaggatttggtgctcaacagta

SEQ ID NO: 2490297 - DNA, 25 bp, Homo sapien
cttctgcgaggtaaaaatacagtct

SEQ ID NO: 2490298 - DNA, 25 bp, Homo sapien
taacagatgggattcatgaggccac

SEQ ID NO: 2490299 - DNA, 25 bp, Homo sapien
tttaatcaaataccacccctggcag

SEQ ID NO: 2490300 - DNA, 25 bp, Homo sapien
agtcatgtttctcaaagacacacgc

SEQ ID NO: 2490301 - DNA, 25 bp, Homo sapien
aagagagtcatgtttctcaaagaca

SEQ ID NO: 2490302 - DNA, 25 bp, Homo sapien
caagagagtcatgtttctcaaagac

SEQ ID NO: 2490303 - DNA, 25 bp, Homo sapien
catgtttctcaaagacacacgcctg

SEQ ID NO: 2490304 - DNA, 25 bp, Homo sapien
tttaaatgaactggtgtgagaaatg

SEQ ID NO: 2490305 - DNA, 25 bp, Homo sapien
taaatgaactggtgtgagaaatgca

SEQ ID NO: 2490306 - DNA, 25 bp, Homo sapien
aagtaagtagcaggaccaaggctac

SEQ ID NO: 2490307 - DNA, 25 bp, Homo sapien
tgaactggtgtgagaaatgcaaact

SEQ ID NO: 2490308 - DNA, 25 bp, Homo sapien
attcctgactgtccgcaggtttcca

SEQ ID NO: 2490309 - DNA, 25 bp, Homo sapien
agaattcctgactgtccgcaggttt

SEQ ID NO: 2490310 - DNA, 25 bp, Homo sapien
tgtctctgcactatcggcagcccct

SEQ ID NO: 2490311 - DNA, 25 bp, Homo sapien
ctgactgtccgcaggtttccaaatc

SEQ ID NO: 2490312 - DNA, 25 bp, Homo sapien
tcagcagagggacgctttaggaaat

SEQ ID NO: 2490313 - DNA, 25 bp, Homo sapien
tggaaaggatggtccatggtcttac

SEQ ID NO: 2490314 - DNA, 25 bp, Homo sapien
cgctttaggaaatgcagtgttgtga

SEQ ID NO: 2490315 - DNA, 25 bp, Homo sapien
gcagtgttgtgaagatggaaaggat

SEQ ID NO: 2490316 - DNA, 25 bp, Homo sapien
cgtcggaaatgtatttcagctgcta

SEQ ID NO: 2490317 - DNA, 25 bp, Homo sapien
acatggccctgttggaatgggatgg

SEQ ID NO: 2490318 - DNA, 25 bp, Homo sapien
ctgctgctaaatgggctgcagccac

SEQ ID NO: 2490319 - DNA, 25 bp, Homo sapien
aatgggatggaacgtcggaaatgta

SEQ ID NO: 2490320 - DNA, 25 bp, Homo sapien
ctacaaggaacgagaaatcaaattt

SEQ ID NO: 2490321 - DNA, 25 bp, Homo sapien
gaccggtcccagtcttcataactca

SEQ ID NO: 2490322 - DNA, 25 bp, Homo sapien
gactcctccagtcataggtgttgaa

SEQ ID NO: 2490323 - DNA, 25 bp, Homo sapien
tcagccccacatctgggtaagtctg

SEQ ID NO: 2490324 - DNA, 25 bp, Homo sapien
gtaagtctggcttcgaggcttagtg

SEQ ID NO: 2490325 - DNA, 25 bp, Homo sapien
taaatggcctgattgcgtaagatga

SEQ ID NO: 2490326 - DNA, 25 bp, Homo sapien
cctgattgcgtaagatgattctgtc

SEQ ID NO: 2490327 - DNA, 25 bp, Homo sapien
acctgttgtcgaagcctctaatgcc

SEQ ID NO: 2490328 - DNA, 25 bp, Homo sapien
aggtacagttaaatggcctgattgc

SEQ ID NO: 2490329 - DNA, 25 bp, Homo sapien
catcagtagacctaatggaggcctg

SEQ ID NO: 2490330 - DNA, 25 bp, Homo sapien
gatgggatacttggccatcagtaga

SEQ ID NO: 2490331 - DNA, 25 bp, Homo sapien
gaaggacaagccctggatgggatac

SEQ ID NO: 2490332 - DNA, 25 bp, Homo sapien
tagtgtttggtaaaggttcatgcct

SEQ ID NO: 2490333 - DNA, 25 bp, Homo sapien
cttcttggggctcgatgctgactgg

SEQ ID NO: 2490334 - DNA, 25 bp, Homo sapien
tacatgtcggagagcttgcctggct

SEQ ID NO: 2490335 - DNA, 25 bp, Homo sapien
ccccaggtcactcaaatggctagaa

SEQ ID NO: 2490336 - DNA, 25 bp, Homo sapien
tattgcagacccatcccatgaatcc

SEQ ID NO: 2490337 - DNA, 25 bp, Homo sapien
taattttcaaggtgacagtctctcc

SEQ ID NO: 2490338 - DNA, 25 bp, Homo sapien
tcctgccatctgtaacaaatggatg

SEQ ID NO: 2490339 - DNA, 25 bp, Homo sapien
gtctcctatgtggattgcgccagtt

SEQ ID NO: 2490340 - DNA, 25 bp, Homo sapien
attgatggctaggattcggtctcct

SEQ ID NO: 2490341 - DNA, 25 bp, Homo sapien
cagctaatccccctttagtgaggct

SEQ ID NO: 2490342 - DNA, 25 bp, Homo sapien
aattgctccggaactttcttgctca

SEQ ID NO: 2490343 - DNA, 25 bp, Homo sapien
tataggatcaaacggctcttcagtt

SEQ ID NO: 2490344 - DNA, 25 bp, Homo sapien
gctccacggtgtaaataattgctcc

SEQ ID NO: 2490345 - DNA, 25 bp, Homo sapien
gtaataaatgccaaggaatcataat

SEQ ID NO: 2490346 - DNA, 25 bp, Homo sapien
aataaatgccaaggaatcataattg

SEQ ID NO: 2490347 - DNA, 25 bp, Homo sapien
taaatgccaaggaatcataattgat

SEQ ID NO: 2490348 - DNA, 25 bp, Homo sapien
ctgtaataaatgccaaggaatcata

SEQ ID NO: 2490349 - DNA, 25 bp, Homo sapien
cctaggacagccaagatcattcttg

SEQ ID NO: 2490350 - DNA, 25 bp, Homo sapien
taggacagccaagatcattcttggg

SEQ ID NO: 2490351 - DNA, 25 bp, Homo sapien
ctaggacagccaagatcattcttgg

SEQ ID NO: 2490352 - DNA, 25 bp, Homo sapien
tattgcgagcaatttatccccaagt

SEQ ID NO: 2490353 - DNA, 25 bp, Homo sapien
cagccggatattatctattgcgagc

SEQ ID NO: 2490354 - DNA, 25 bp, Homo sapien
catggaacagttgtccagccggata

SEQ ID NO: 2490355 - DNA, 25 bp, Homo sapien
gaggatctgaactgcatcttccatg

SEQ ID NO: 2490356 - DNA, 25 bp, Homo sapien
tctgaaatgacgagggggtctcctg

SEQ ID NO: 2490357 - DNA, 25 bp, Homo sapien
tatctgaaatgacgagggggtctcc

SEQ ID NO: 2490358 - DNA, 25 bp, Homo sapien
tgatatctgaaatgacgagggggtc

SEQ ID NO: 2490359 - DNA, 25 bp, Homo sapien
atatctgaaatgacgagggggtctc

SEQ ID NO: 2490360 - DNA, 25 bp, Homo sapien
tcttaggcagctttacatgaaatgt

SEQ ID NO: 2490361 - DNA, 25 bp, Homo sapien
gtgcttcttaggcagctttacatga

SEQ ID NO: 2490362 - DNA, 25 bp, Homo sapien
acattgtgcttcttaggcagcttta

SEQ ID NO: 2490363 - DNA, 25 bp, Homo sapien
acttatggttattccaagttccaca

SEQ ID NO: 2490364 - DNA, 25 bp, Homo sapien
cagtccactcctgagatgatatgat

SEQ ID NO: 2490365 - DNA, 25 bp, Homo sapien
cactcctgagatgatatgattatac

SEQ ID NO: 2490366 - DNA, 25 bp, Homo sapien
atgcagtccactcctgagatgatat

SEQ ID NO: 2490367 - DNA, 25 bp, Homo sapien
tccactcctgagatgatatgattat

SEQ ID NO: 2490368 - DNA, 25 bp, Homo sapien
cagtgtgaccttgctcgtgattgaa

SEQ ID NO: 2490369 - DNA, 25 bp, Homo sapien
gcaacatcaaactcgatttccagtg

SEQ ID NO: 2490370 - DNA, 25 bp, Homo sapien
ctggcttcttcgaaggtgctgtctt

SEQ ID NO: 2490371 - DNA, 25 bp, Homo sapien
gtctccaatctgtagcaccccacat

SEQ ID NO: 2490372 - DNA, 25 bp, Homo sapien
cagttggatcccaaatcctgtgaca

SEQ ID NO: 2490373 - DNA, 25 bp, Homo sapien
tgggctgtcagcttcgatataggaa

SEQ ID NO: 2490374 - DNA, 25 bp, Homo sapien
tcctgtgacaggatctgccgtcagc

SEQ ID NO: 2490375 - DNA, 25 bp, Homo sapien
tctgtgtgaacaacctgcccagcca

SEQ ID NO: 2490376 - DNA, 25 bp, Homo sapien
aataccagcatttccaaaatagatc

SEQ ID NO: 2490377 - DNA, 25 bp, Homo sapien
taccagcatttccaaaatagatcat

SEQ ID NO: 2490378 - DNA, 25 bp, Homo sapien
caggaataccagcatttccaaaata

SEQ ID NO: 2490379 - DNA, 25 bp, Homo sapien
ggaataccagcatttccaaaataga

SEQ ID NO: 2490380 - DNA, 25 bp, Homo sapien
cagcctcccaaggaataatgtgttt

SEQ ID NO: 2490381 - DNA, 25 bp, Homo sapien
tgccatagacctaacacatgtgtat

SEQ ID NO: 2490382 - DNA, 25 bp, Homo sapien
gatctggttcaggaacgcagtagag

SEQ ID NO: 2490383 - DNA, 25 bp, Homo sapien
agtgtcccacactatagtcaacctg

SEQ ID NO: 2490384 - DNA, 25 bp, Homo sapien
gagacttggcctctttggcagaaaa

SEQ ID NO: 2490385 - DNA, 25 bp, Homo sapien
cagactgggaagagacggagtctct

SEQ ID NO: 2490386 - DNA, 25 bp, Homo sapien
ggagtctctacactggcccagggta

SEQ ID NO: 2490387 - DNA, 25 bp, Homo sapien
tactctttgccgcaattcaggcaga

SEQ ID NO: 2490388 - DNA, 25 bp, Homo sapien
gcgttggttatgcatatcagtgaca

SEQ ID NO: 2490389 - DNA, 25 bp, Homo sapien
tagtggccaatgtctacagcaaaca

SEQ ID NO: 2490390 - DNA, 25 bp, Homo sapien
tacaaaatgtgtgatctcctgagac

SEQ ID NO: 2490391 - DNA, 25 bp, Homo sapien
tattgtgagtggtgctctagtggcc

SEQ ID NO: 2490392 - DNA, 25 bp, Homo sapien
gatactgggtatcgtgtcaacggtc

SEQ ID NO: 2490393 - DNA, 25 bp, Homo sapien
caatttcggtattttcaaggctcca

SEQ ID NO: 2490394 - DNA, 25 bp, Homo sapien
tccattgcccacaggttttttccag

SEQ ID NO: 2490395 - DNA, 25 bp, Homo sapien
cacttaagcaactgtgaaacactct

SEQ ID NO: 2490396 - DNA, 25 bp, Homo sapien
catcatggttccacgtgggctggtg

SEQ ID NO: 2490397 - DNA, 25 bp, Homo sapien
agaggcttcgaggtagagtccccat

SEQ ID NO: 2490398 - DNA, 25 bp, Homo sapien
cctcctcatcatggttccacgtggg

SEQ ID NO: 2490399 - DNA, 25 bp, Homo sapien
ctggtggagtagaggcttcgaggta

SEQ ID NO: 2490400 - DNA, 25 bp, Homo sapien
caggctgtatgcactcatggaggta

SEQ ID NO: 2490401 - DNA, 25 bp, Homo sapien
gttcagggaactcaggctgtatgca

SEQ ID NO: 2490402 - DNA, 25 bp, Homo sapien
tcagggaactcaggctgtatgcact

SEQ ID NO: 2490403 - DNA, 25 bp, Homo sapien
gaactcaggctgtatgcactcatgg

SEQ ID NO: 2490404 - DNA, 25 bp, Homo sapien
tgcacagagcactctcaggtgaggt

SEQ ID NO: 2490405 - DNA, 25 bp, Homo sapien
gtaacaatccagaaagacacacatg

SEQ ID NO: 2490406 - DNA, 25 bp, Homo sapien
aatggctaggaaggaccccagccag

SEQ ID NO: 2490407 - DNA, 25 bp, Homo sapien
gacacacatgatgcatagcaatggc

SEQ ID NO: 2490408 - DNA, 25 bp, Homo sapien
aatgtcagggctggtactctgcaat

SEQ ID NO: 2490409 - DNA, 25 bp, Homo sapien
tacgtgttatagtgatggttggtgt

SEQ ID NO: 2490410 - DNA, 25 bp, Homo sapien
tggaggaggtgctttcgggaatgtc

SEQ ID NO: 2490411 - DNA, 25 bp, Homo sapien
caatggtcagggtggtacgtgttat

SEQ ID NO: 2490412 - DNA, 25 bp, Homo sapien
gatctcaagcttgacctggtcagtg

SEQ ID NO: 2490413 - DNA, 25 bp, Homo sapien
catggtcgggcccctttagggccag

SEQ ID NO: 2490414 - DNA, 25 bp, Homo sapien
gcaagtgtacagtactccatgctgg

SEQ ID NO: 2490415 - DNA, 25 bp, Homo sapien
tccatcgatggagaggatgtgatct

SEQ ID NO: 2490416 - DNA, 25 bp, Homo sapien
ttttgtctatgacaatgacttgttt

SEQ ID NO: 2490417 - DNA, 25 bp, Homo sapien
tgattttgtctatgacaatgacttg

SEQ ID NO: 2490418 - DNA, 25 bp, Homo sapien
gattttgtctatgacaatgacttgt

SEQ ID NO: 2490419 - DNA, 25 bp, Homo sapien
tttgattttgtctatgacaatgact

SEQ ID NO: 2490420 - DNA, 25 bp, Homo sapien
caccaggagttttggcaacttcgac

SEQ ID NO: 2490421 - DNA, 25 bp, Homo sapien
ggcccggatgctgttgccacagagt

SEQ ID NO: 2490422 - DNA, 25 bp, Homo sapien
tttggcaacttcgactagtagtggc

SEQ ID NO: 2490423 - DNA, 25 bp, Homo sapien
tcgactagtagtggcccggatgctg

SEQ ID NO: 2490424 - DNA, 25 bp, Homo sapien
ggctgagcccagtgcacacaatatg

SEQ ID NO: 2490425 - DNA, 25 bp, Homo sapien
ttaacaaagatctgtggctgagccc

SEQ ID NO: 2490426 - DNA, 25 bp, Homo sapien
agcccagtgcacacaatatgatgcc

SEQ ID NO: 2490427 - DNA, 25 bp, Homo sapien
taacaaagatctgtggctgagccca

SEQ ID NO: 2490428 - DNA, 25 bp, Homo sapien
gggaatctacgaatgttaatgttta

SEQ ID NO: 2490429 - DNA, 25 bp, Homo sapien
cacagaagggaatctacgaatgtta

SEQ ID NO: 2490430 - DNA, 25 bp, Homo sapien
tgtttaattgatcattagccttttc

SEQ ID NO: 2490431 - DNA, 25 bp, Homo sapien
agccttttctggcaattgttttcca

SEQ ID NO: 2490432 - DNA, 25 bp, Homo sapien
ttcttaaaggtctttctgagctcag

SEQ ID NO: 2490433 - DNA, 25 bp, Homo sapien
gggcatacaggtcatctacaaagaa

SEQ ID NO: 2490434 - DNA, 25 bp, Homo sapien
gggcacactttgtacataccatcat

SEQ ID NO: 2490435 - DNA, 25 bp, Homo sapien
atggccctcattgcacaagctctgg

SEQ ID NO: 2490436 - DNA, 25 bp, Homo sapien
cactcagcacgaaatcgacttttaa

SEQ ID NO: 2490437 - DNA, 25 bp, Homo sapien
cgacttttaaggaactcaacagatg

SEQ ID NO: 2490438 - DNA, 25 bp, Homo sapien
ggaagcagattccacaaggcgaatg

SEQ ID NO: 2490439 - DNA, 25 bp, Homo sapien
agaattctgcgggaaaggctgccaa

SEQ ID NO: 2490440 - DNA, 25 bp, Homo sapien
caggagctggaccacgaatatggat

SEQ ID NO: 2490441 - DNA, 25 bp, Homo sapien
gctatataactagggacttctacca

SEQ ID NO: 2490442 - DNA, 25 bp, Homo sapien
tatggataccaagatttacattcct

SEQ ID NO: 2490443 - DNA, 25 bp, Homo sapien
cagctttcgatgagccaagttacca

SEQ ID NO: 2490444 - DNA, 25 bp, Homo sapien
cacagcagcatgttggctttacacc

SEQ ID NO: 2490445 - DNA, 25 bp, Homo sapien
gaatagtggagctggaaggacctct

SEQ ID NO: 2490446 - DNA, 25 bp, Homo sapien
ttcacagataatggcttcacagcag

SEQ ID NO: 2490447 - DNA, 25 bp, Homo sapien
tgttacgagttaggagtagtggccc

SEQ ID NO: 2490448 - DNA, 25 bp, Homo sapien
tagctttcctaaacagaccactgaa

SEQ ID NO: 2490449 - DNA, 25 bp, Homo sapien
tatatcttctgctctgacctgtgta

SEQ ID NO: 2490450 - DNA, 25 bp, Homo sapien
actcatacctccacttacatgattg

SEQ ID NO: 2490451 - DNA, 25 bp, Homo sapien
ggcatctcagacttagcatatccaa

SEQ ID NO: 2490452 - DNA, 25 bp, Homo sapien
tgtcaccgggtttgatcgtgccctc

SEQ ID NO: 2490453 - DNA, 25 bp, Homo sapien
tagttccaagaagccgaattccatc

SEQ ID NO: 2490454 - DNA, 25 bp, Homo sapien
catcatattctatcagcagtgctgc

SEQ ID NO: 2490455 - DNA, 25 bp, Homo sapien
tggcttcagcatgcgtagttccaag

SEQ ID NO: 2490456 - DNA, 25 bp, Homo sapien
gacgaacacatgttatcacaactgg

SEQ ID NO: 2490457 - DNA, 25 bp, Homo sapien
caggccctccaggacgaacacatgt

SEQ ID NO: 2490458 - DNA, 25 bp, Homo sapien
ggccctccaggacgaacacatgtta

SEQ ID NO: 2490459 - DNA, 25 bp, Homo sapien
tgttatcacaactggacgagattta

SEQ ID NO: 2490460 - DNA, 25 bp, Homo sapien
aaccaaaggtattgccttctttatg

SEQ ID NO: 2490461 - DNA, 25 bp, Homo sapien
ttctttatgtaatgtgacctccact

SEQ ID NO: 2490462 - DNA, 25 bp, Homo sapien
tccactgttcggaaaataacacttg

SEQ ID NO: 2490463 - DNA, 25 bp, Homo sapien
aaaataacacttgatccttgcacag

SEQ ID NO: 2490464 - DNA, 25 bp, Homo sapien
gcaagctgatgatctcgtcatggcg

SEQ ID NO: 2490465 - DNA, 25 bp, Homo sapien
agaccggtggaagctcgtactctac

SEQ ID NO: 2490466 - DNA, 25 bp, Homo sapien
ggttgattccattcactgctttgat

SEQ ID NO: 2490467 - DNA, 25 bp, Homo sapien
gcggaatttggccaggttgattcca

SEQ ID NO: 2490468 - DNA, 25 bp, Homo sapien
ttatcaattcctcccgataccgtca

SEQ ID NO: 2490469 - DNA, 25 bp, Homo sapien
tcatcagctcgacgactgtggagcc

SEQ ID NO: 2490470 - DNA, 25 bp, Homo sapien
cagacccagggtagtgccttccttc

SEQ ID NO: 2490471 - DNA, 25 bp, Homo sapien
ccttgccgcagattagatactcttg

SEQ ID NO: 2490472 - DNA, 25 bp, Homo sapien
catcactggaatcctgccttttcat

SEQ ID NO: 2490473 - DNA, 25 bp, Homo sapien
acagagaagatggtccaggcaacaa

SEQ ID NO: 2490474 - DNA, 25 bp, Homo sapien
caacaacgtagagcgaaggcctgag

SEQ ID NO: 2490475 - DNA, 25 bp, Homo sapien
tgctgtacttatcgaccagggttag

SEQ ID NO: 2490476 - DNA, 25 bp, Homo sapien
aaggcctgagattccaaatgcacca

SEQ ID NO: 2490477 - DNA, 25 bp, Homo sapien
atcaccagttttggaataattaata

SEQ ID NO: 2490478 - DNA, 25 bp, Homo sapien
tgtccccagagaaaggttcagtgtg

SEQ ID NO: 2490479 - DNA, 25 bp, Homo sapien
tggtaattctgtgcttcctgtcccc

SEQ ID NO: 2490480 - DNA, 25 bp, Homo sapien
gatgatgtttgcactatcaccagtt

SEQ ID NO: 2490481 - DNA, 25 bp, Homo sapien
tggtaatatccattgacactgaaag

SEQ ID NO: 2490482 - DNA, 25 bp, Homo sapien
taacgctcttatgctcctccatgga

SEQ ID NO: 2490483 - DNA, 25 bp, Homo sapien
tggtcaccaatgttcgcaaaaaggt

SEQ ID NO: 2490484 - DNA, 25 bp, Homo sapien
gacaagaagtgtgtggtaacgctct

SEQ ID NO: 2490485 - DNA, 25 bp, Homo sapien
catactaagcctaacctgtgacaag

SEQ ID NO: 2490486 - DNA, 25 bp, Homo sapien
ctttagtctgttttccgcactgcca

SEQ ID NO: 2490487 - DNA, 25 bp, Homo sapien
tatctgggcactttagtctgttttc

SEQ ID NO: 2490488 - DNA, 25 bp, Homo sapien
ttgatgacattcatcagcattgtag

SEQ ID NO: 2490489 - DNA, 25 bp, Homo sapien
caagattgacgcagattcagaagaa

SEQ ID NO: 2490490 - DNA, 25 bp, Homo sapien
gcaaatccttttgtgaggacttaaa

SEQ ID NO: 2490491 - DNA, 25 bp, Homo sapien
caggcaaatccttttgtgaggactt

SEQ ID NO: 2490492 - DNA, 25 bp, Homo sapien
caggtatcaggcaaatccttttgtg

SEQ ID NO: 2490493 - DNA, 25 bp, Homo sapien
tatcaggcaaatccttttgtgagga

SEQ ID NO: 2490494 - DNA, 25 bp, Homo sapien
tcaatctatctgtgccacctagaag

SEQ ID NO: 2490495 - DNA, 25 bp, Homo sapien
ggattccagggtactacattctcct

SEQ ID NO: 2490496 - DNA, 25 bp, Homo sapien
tgtggctcataacttggattccagg

SEQ ID NO: 2490497 - DNA, 25 bp, Homo sapien
tagtatgccccagtttcaaaccttg

SEQ ID NO: 2490498 - DNA, 25 bp, Homo sapien
ttggtgcacttttctctagaggcat

SEQ ID NO: 2490499 - DNA, 25 bp, Homo sapien
aggcatctttccatgctaccggggt

SEQ ID NO: 2490500 - DNA, 25 bp, Homo sapien
tttcattggtgcacttttctctaga

SEQ ID NO: 2490501 - DNA, 25 bp, Homo sapien
tctttccatgctaccggggtgttaa

SEQ ID NO: 2490502 - DNA, 25 bp, Homo sapien
gctttgtctggctggcggatttagt

SEQ ID NO: 2490503 - DNA, 25 bp, Homo sapien
gcggatttagtgtagggactctcat

SEQ ID NO: 2490504 - DNA, 25 bp, Homo sapien
agccaacgctccatcaggcggcttt

SEQ ID NO: 2490505 - DNA, 25 bp, Homo sapien
tccatcaggcggctttgtctggctg

SEQ ID NO: 2490506 - DNA, 25 bp, Homo sapien
ctgcaaaggtacaatgaagcgtttg

SEQ ID NO: 2490507 - DNA, 25 bp, Homo sapien
caatgaagcgtttggttaatttcca

SEQ ID NO: 2490508 - DNA, 25 bp, Homo sapien
caaaggtacaatgaagcgtttggtt

SEQ ID NO: 2490509 - DNA, 25 bp, Homo sapien
aggtacaatgaagcgtttggttaat

SEQ ID NO: 2490510 - DNA, 25 bp, Homo sapien
agatttttaacggattgcaatcctt

SEQ ID NO: 2490511 - DNA, 25 bp, Homo sapien
tgaagatttttaacggattgcaatc

SEQ ID NO: 2490512 - DNA, 25 bp, Homo sapien
agtgaagatttttaacggattgcaa

SEQ ID NO: 2490513 - DNA, 25 bp, Homo sapien
gaagatttttaacggattgcaatcc

SEQ ID NO: 2490514 - DNA, 25 bp, Homo sapien
cctcaattctcagactcaggagtag

SEQ ID NO: 2490515 - DNA, 25 bp, Homo sapien
agcagagtcactgggtagacaggca

SEQ ID NO: 2490516 - DNA, 25 bp, Homo sapien
caggagtagctcatgcagcagagtc

SEQ ID NO: 2490517 - DNA, 25 bp, Homo sapien
tctacaaagagccaagctccatggc

SEQ ID NO: 2490518 - DNA, 25 bp, Homo sapien
tgattaacccactagccattatttc

SEQ ID NO: 2490519 - DNA, 25 bp, Homo sapien
tgaaaccaaggtgattaacccacta

SEQ ID NO: 2490520 - DNA, 25 bp, Homo sapien
accaaggtgattaacccactagcca

SEQ ID NO: 2490521 - DNA, 25 bp, Homo sapien
caaggtgattaacccactagccatt

SEQ ID NO: 2490522 - DNA, 25 bp, Homo sapien
tctaactctccttgggttatgtcta

SEQ ID NO: 2490523 - DNA, 25 bp, Homo sapien
actctcaccttctggacattctact

SEQ ID NO: 2490524 - DNA, 25 bp, Homo sapien
tcaccttctggacattctacttcat

SEQ ID NO: 2490525 - DNA, 25 bp, Homo sapien
gaaccatgggaaagcttccactctc

SEQ ID NO: 2490526 - DNA, 25 bp, Homo sapien
catgggaaagcttccactctcacct

SEQ ID NO: 2490527 - DNA, 25 bp, Homo sapien
aggttgctatgattgtgattaatcc

SEQ ID NO: 2490528 - DNA, 25 bp, Homo sapien
aaatgtgtaataggttgctatgatt

SEQ ID NO: 2490529 - DNA, 25 bp, Homo sapien
aataggttgctatgattgtgattaa

SEQ ID NO: 2490530 - DNA, 25 bp, Homo sapien
tgtgtaataggttgctatgattgtg

SEQ ID NO: 2490531 - DNA, 25 bp, Homo sapien
cacagttctggacacgagcatagaa

SEQ ID NO: 2490532 - DNA, 25 bp, Homo sapien
tagtcagcgtcaccactcctcattt

SEQ ID NO: 2490533 - DNA, 25 bp, Homo sapien
tagaatcctgatgagaaacagtcct

SEQ ID NO: 2490534 - DNA, 25 bp, Homo sapien
taaaaggaggtatagtcagcgtcac

SEQ ID NO: 2490535 - DNA, 25 bp, Homo sapien
taccatggttctcatctttgggcct

SEQ ID NO: 2490536 - DNA, 25 bp, Homo sapien
ttttaccatggttctcatctttggg

SEQ ID NO: 2490537 - DNA, 25 bp, Homo sapien
tcccttgtaggtgtagaaacttgca

SEQ ID NO: 2490538 - DNA, 25 bp, Homo sapien
cattatcagcaagtcaagagtggcc

SEQ ID NO: 2490539 - DNA, 25 bp, Homo sapien
aaccaaggggactggagtataatga

SEQ ID NO: 2490540 - DNA, 25 bp, Homo sapien
aaaccaaggggactggagtataatg

SEQ ID NO: 2490541 - DNA, 25 bp, Homo sapien
tggccacagcctaagcaatttctgg

SEQ ID NO: 2490542 - DNA, 25 bp, Homo sapien
ggtcttaactgaagttgccaaaggc

SEQ ID NO: 2490543 - DNA, 25 bp, Homo sapien
tctctattggcaaggtcttaactga

SEQ ID NO: 2490544 - DNA, 25 bp, Homo sapien
ggattaacttgccactatctgcatt

SEQ ID NO: 2490545 - DNA, 25 bp, Homo sapien
ccatactgccaatagaaagggtatc

SEQ ID NO: 2490546 - DNA, 25 bp, Homo sapien
ggacagagtaatagttttcataaca

SEQ ID NO: 2490547 - DNA, 25 bp, Homo sapien
taacagccatactgccaatagaaag

SEQ ID NO: 2490548 - DNA, 25 bp, Homo sapien
cagagtaatagttttcataacagcc

SEQ ID NO: 2490549 - DNA, 25 bp, Homo sapien
atttgacttagcaagaaattcaaga

SEQ ID NO: 2490550 - DNA, 25 bp, Homo sapien
tttgacttagcaagaaattcaagag

SEQ ID NO: 2490551 - DNA, 25 bp, Homo sapien
ttgacttagcaagaaattcaagagg

SEQ ID NO: 2490552 - DNA, 25 bp, Homo sapien
tgacttagcaagaaattcaagagga

SEQ ID NO: 2490553 - DNA, 25 bp, Homo sapien
tctttatactgtatggagccatcag

SEQ ID NO: 2490554 - DNA, 25 bp, Homo sapien
aatcatcaatgtaagcgtctagggc

SEQ ID NO: 2490555 - DNA, 25 bp, Homo sapien
agccatcagtattaaaggatatgct

SEQ ID NO: 2490556 - DNA, 25 bp, Homo sapien
tcaatatcaggaggctcatagttta

SEQ ID NO: 2490557 - DNA, 25 bp, Homo sapien
ctttctcacaatgggccacaatgtc

SEQ ID NO: 2490558 - DNA, 25 bp, Homo sapien
ttcagccctttgaaatttaggtgga

SEQ ID NO: 2490559 - DNA, 25 bp, Homo sapien
tcagccctttgaaatttaggtggac

SEQ ID NO: 2490560 - DNA, 25 bp, Homo sapien
cagccctttgaaatttaggtggaca

SEQ ID NO: 2490561 - DNA, 25 bp, Homo sapien
gccctttgaaatttaggtggacatg

SEQ ID NO: 2490562 - DNA, 25 bp, Homo sapien
tatgttaatacaaagagagctagtg

SEQ ID NO: 2490563 - DNA, 25 bp, Homo sapien
tgaaggactggaactgtaagtattg

SEQ ID NO: 2490564 - DNA, 25 bp, Homo sapien
tatactgaagatcaggtgaaggact

SEQ ID NO: 2490565 - DNA, 25 bp, Homo sapien
atatatagggaataattgaactctg

SEQ ID NO: 2490566 - DNA, 25 bp, Homo sapien
caataatcaaggtgagtagctgcag

SEQ ID NO: 2490567 - DNA, 25 bp, Homo sapien
ttaccacggattattgcttgcactg

SEQ ID NO: 2490568 - DNA, 25 bp, Homo sapien
tatgcaacacagcttggaaactggc

SEQ ID NO: 2490569 - DNA, 25 bp, Homo sapien
gccagtcatggtgtgatactcaaca

SEQ ID NO: 2490570 - DNA, 25 bp, Homo sapien
tgcctaaccctcaaatgctagagaa

SEQ ID NO: 2490571 - DNA, 25 bp, Homo sapien
cccttggcttttgtagtgagtcaac

SEQ ID NO: 2490572 - DNA, 25 bp, Homo sapien
gagtaactattcacatctagcaggg

SEQ ID NO: 2490573 - DNA, 25 bp, Homo sapien
taaacacagtaagagcttcccctgc

SEQ ID NO: 2490574 - DNA, 25 bp, Homo sapien
cagtgtagtctcgatctccctgggt

SEQ ID NO: 2490575 - DNA, 25 bp, Homo sapien
tcaccagtgtagtctcgatctccct

SEQ ID NO: 2490576 - DNA, 25 bp, Homo sapien
ctcgatctccctgggtgaagagaac

SEQ ID NO: 2490577 - DNA, 25 bp, Homo sapien
tagtctcgatctccctgggtgaaga

SEQ ID NO: 2490578 - DNA, 25 bp, Homo sapien
gcattctatgttcctaaatctgtgc

SEQ ID NO: 2490579 - DNA, 25 bp, Homo sapien
gttaacagccctatacttccctgca

SEQ ID NO: 2490580 - DNA, 25 bp, Homo sapien
tgatggaatccctaaagcaggagat

SEQ ID NO: 2490581 - DNA, 25 bp, Homo sapien
ccaattgctttaaatctgggccaac

SEQ ID NO: 2490582 - DNA, 25 bp, Homo sapien
gcatctctatgaagctgccagtacg

SEQ ID NO: 2490583 - DNA, 25 bp, Homo sapien
tagaaacccctgaattgggtgctca

SEQ ID NO: 2490584 - DNA, 25 bp, Homo sapien
cagtacgttaggtccatggctccca

SEQ ID NO: 2490585 - DNA, 25 bp, Homo sapien
actgaagaagtctaagggagagctc

SEQ ID NO: 2490586 - DNA, 25 bp, Homo sapien
tctgtggcaaagtgtactcaaggct

SEQ ID NO: 2490587 - DNA, 25 bp, Homo sapien
gaattccttgcgcacataccaggag

SEQ ID NO: 2490588 - DNA, 25 bp, Homo sapien
tgatgcagaggtccgctacatgtca

SEQ ID NO: 2490589 - DNA, 25 bp, Homo sapien
catgtcatctggcaaatctgtgtca

SEQ ID NO: 2490590 - DNA, 25 bp, Homo sapien
tacacaaattctgaccaggtggcaa

SEQ ID NO: 2490591 - DNA, 25 bp, Homo sapien
tccagaagtggactgattagcccaa

SEQ ID NO: 2490592 - DNA, 25 bp, Homo sapien
tgtgacttgtcggtggttggctcca

SEQ ID NO: 2490593 - DNA, 25 bp, Homo sapien
gatacacagcacgagctatgggcca

SEQ ID NO: 2490594 - DNA, 25 bp, Homo sapien
tgccactctttagggtactttcaca

SEQ ID NO: 2490595 - DNA, 25 bp, Homo sapien
ttcacatctcaagaatggtcctttg

SEQ ID NO: 2490596 - DNA, 25 bp, Homo sapien
cctttgacccagtagacatacagaa

SEQ ID NO: 2490597 - DNA, 25 bp, Homo sapien
gagaatcaaatcacaatataggcat

SEQ ID NO: 2490598 - DNA, 25 bp, Homo sapien
catttgcacacaggatgtaaacact

SEQ ID NO: 2490599 - DNA, 25 bp, Homo sapien
ttgcacacaggatgtaaacacttga

SEQ ID NO: 2490600 - DNA, 25 bp, Homo sapien
tgcacacaggatgtaaacacttgaa

SEQ ID NO: 2490601 - DNA, 25 bp, Homo sapien
ttcatttgcacacaggatgtaaaca

SEQ ID NO: 2490602 - DNA, 25 bp, Homo sapien
tcctactgtatgattgtgggcaaac

SEQ ID NO: 2490603 - DNA, 25 bp, Homo sapien
tcctttgttggctctagggtggtcc

SEQ ID NO: 2490604 - DNA, 25 bp, Homo sapien
gaatctacctatcgtatctagctgc

SEQ ID NO: 2490605 - DNA, 25 bp, Homo sapien
cccctccagaggttaatatgaatct

SEQ ID NO: 2490606 - DNA, 25 bp, Homo sapien
taaggagggtaagtctagtgtccca

SEQ ID NO: 2490607 - DNA, 25 bp, Homo sapien
tctttcccttggagtactggatact

SEQ ID NO: 2490608 - DNA, 25 bp, Homo sapien
ggcttctgtggttcaataactaaca

SEQ ID NO: 2490609 - DNA, 25 bp, Homo sapien
cactaggttaccacatgtgtcccac

SEQ ID NO: 2490610 - DNA, 25 bp, Homo sapien
catgtctccttaacagcaatggctc

SEQ ID NO: 2490611 - DNA, 25 bp, Homo sapien
taagcttccttgagttaaccctaca

SEQ ID NO: 2490612 - DNA, 25 bp, Homo sapien
taaccctacacttgcttaaatggcg

SEQ ID NO: 2490613 - DNA, 25 bp, Homo sapien
cagagctggtcatgcaacacaaatt

SEQ ID NO: 2490614 - DNA, 25 bp, Homo sapien
cattggaaaggagctactatgagta

SEQ ID NO: 2490615 - DNA, 25 bp, Homo sapien
tgcaagatcgataacacagtaagcc

SEQ ID NO: 2490616 - DNA, 25 bp, Homo sapien
ggatttatgttctacctctccagag

SEQ ID NO: 2490617 - DNA, 25 bp, Homo sapien
tgagtaacccacacataagaagtga

SEQ ID NO: 2490618 - DNA, 25 bp, Homo sapien
gatccttctaacttctcagctgaaa

SEQ ID NO: 2490619 - DNA, 25 bp, Homo sapien
tccttcttcatcgacggccagggat

SEQ ID NO: 2490620 - DNA, 25 bp, Homo sapien
tttcatgtctgctttgtctcttcct

SEQ ID NO: 2490621 - DNA, 25 bp, Homo sapien
tatgcccacttccactgctctagtg

SEQ ID NO: 2490622 - DNA, 25 bp, Homo sapien
ctgcctgagggctaacccgatgtca

SEQ ID NO: 2490623 - DNA, 25 bp, Homo sapien
ggaagggacaatctgcctgagggct

SEQ ID NO: 2490624 - DNA, 25 bp, Homo sapien
gaagtggaagggacaatctgcctga

SEQ ID NO: 2490625 - DNA, 25 bp, Homo sapien
acccagggagttcagagaacctttg

SEQ ID NO: 2490626 - DNA, 25 bp, Homo sapien
gcaggcttgtctatatctgactgca

SEQ ID NO: 2490627 - DNA, 25 bp, Homo sapien
gctagctcgatgagcaggcttgtct

SEQ ID NO: 2490628 - DNA, 25 bp, Homo sapien
tccacttggacacccaaatgaaaag

SEQ ID NO: 2490629 - DNA, 25 bp, Homo sapien
tgcccacgggatctttctccacttg

SEQ ID NO: 2490630 - DNA, 25 bp, Homo sapien
gacaaattggaagagaacctgtact

SEQ ID NO: 2490631 - DNA, 25 bp, Homo sapien
ctagggctgaaagctggcactcagc

SEQ ID NO: 2490632 - DNA, 25 bp, Homo sapien
tggcactcagctctccaactatgcg

SEQ ID NO: 2490633 - DNA, 25 bp, Homo sapien
aactatgcgcttttccttgcttctg

SEQ ID NO: 2490634 - DNA, 25 bp, Homo sapien
caaaaaaggcagcattaggaaattc

SEQ ID NO: 2490635 - DNA, 25 bp, Homo sapien
agatcagtgtgggaagataacttca

SEQ ID NO: 2490636 - DNA, 25 bp, Homo sapien
gaaatgtggtttctacagtaacaac

SEQ ID NO: 2490637 - DNA, 25 bp, Homo sapien
aacaacagctcagattgattagggc

SEQ ID NO: 2490638 - DNA, 25 bp, Homo sapien
caagatccactatgacattttctgg

SEQ ID NO: 2490639 - DNA, 25 bp, Homo sapien
aaattgaatatacatcagtgcttgc

SEQ ID NO: 2490640 - DNA, 25 bp, Homo sapien
gatacattggaactagacaagatcc

SEQ ID NO: 2490641 - DNA, 25 bp, Homo sapien
tagtgaacccatgcaattcaagggt

SEQ ID NO: 2490642 - DNA, 25 bp, Homo sapien
gaaaccatcagaggatttcaagcag

SEQ ID NO: 2490643 - DNA, 25 bp, Homo sapien
tcaaggccccagtgatagtccaggg

SEQ ID NO: 2490644 - DNA, 25 bp, Homo sapien
gatatcctcctagtgcaatgacatg

SEQ ID NO: 2490645 - DNA, 25 bp, Homo sapien
taagtatggagaataaaggcgactc

SEQ ID NO: 2490646 - DNA, 25 bp, Homo sapien
tgcctctccactcatgccagaagcc

SEQ ID NO: 2490647 - DNA, 25 bp, Homo sapien
ttctccagtgaccacaaacaccggg

SEQ ID NO: 2490648 - DNA, 25 bp, Homo sapien
taataagtcagtacattctccagtg

SEQ ID NO: 2490649 - DNA, 25 bp, Homo sapien
gttccccaggaactttgatccttga

SEQ ID NO: 2490650 - DNA, 25 bp, Homo sapien
tccttgacttggagagccttatata

SEQ ID NO: 2490651 - DNA, 25 bp, Homo sapien
tgatgatgaatgtaaacctcacaga

SEQ ID NO: 2490652 - DNA, 25 bp, Homo sapien
gtctactgtaactcatgccaacagg

SEQ ID NO: 2490653 - DNA, 25 bp, Homo sapien
cttagaaggccaaagtaatttgcac

SEQ ID NO: 2490654 - DNA, 25 bp, Homo sapien
gccaacaggacaactaagagattag

SEQ ID NO: 2490655 - DNA, 25 bp, Homo sapien
ctccaagccccatgcaccagttaaa

SEQ ID NO: 2490656 - DNA, 25 bp, Homo sapien
tatcttctatgaaggaatctttggc

SEQ ID NO: 2490657 - DNA, 25 bp, Homo sapien
gaagctttatcttctatgaaggaat

SEQ ID NO: 2490658 - DNA, 25 bp, Homo sapien
aagcagaagctttatcttctatgaa

SEQ ID NO: 2490659 - DNA, 25 bp, Homo sapien
atttgtcaaactgattattgagatt

SEQ ID NO: 2490660 - DNA, 25 bp, Homo sapien
ttgtcaaactgattattgagattct

SEQ ID NO: 2490661 - DNA, 25 bp, Homo sapien
gggagcatttaatagtcctccatgg

SEQ ID NO: 2490662 - DNA, 25 bp, Homo sapien
gattcccttagtgaggggagcattt

SEQ ID NO: 2490663 - DNA, 25 bp, Homo sapien
gtctaggatactgtgcaaatcccca

SEQ ID NO: 2490664 - DNA, 25 bp, Homo sapien
tagtgatcatactttccaagggaca

SEQ ID NO: 2490665 - DNA, 25 bp, Homo sapien
tgtgtgtgtggccatgcactcaacc

SEQ ID NO: 2490666 - DNA, 25 bp, Homo sapien
taccagtggattgccacaagggcta

SEQ ID NO: 2490667 - DNA, 25 bp, Homo sapien
aactcattgcagacctccagctaca

SEQ ID NO: 2490668 - DNA, 25 bp, Homo sapien
tgtctttgcacattagcccagctac

SEQ ID NO: 2490669 - DNA, 25 bp, Homo sapien
aacttaggagtatcgctttgcaggg

SEQ ID NO: 2490670 - DNA, 25 bp, Homo sapien
cagctactagtgcttcagtctcagt

SEQ ID NO: 2490671 - DNA, 25 bp, Homo sapien
atcccagaggcaacagggtcaatcc

SEQ ID NO: 2490672 - DNA, 25 bp, Homo sapien
gaggcaacagggtcaatccaggttt

SEQ ID NO: 2490673 - DNA, 25 bp, Homo sapien
ccagaggcaacagggtcaatccagg

SEQ ID NO: 2490674 - DNA, 25 bp, Homo sapien
caacagggtcaatccaggtttgaca

SEQ ID NO: 2490675 - DNA, 25 bp, Homo sapien
gcctgggtcacctttgtctgttaaa

SEQ ID NO: 2490676 - DNA, 25 bp, Homo sapien
tgactgcacaatgaagattacggaa

SEQ ID NO: 2490677 - DNA, 25 bp, Homo sapien
caaatttactagtccatgcctctca

SEQ ID NO: 2490678 - DNA, 25 bp, Homo sapien
tttgagctctatggaacctccaact

SEQ ID NO: 2490679 - DNA, 25 bp, Homo sapien
gaagtgagaaacagcgaattccctg

SEQ ID NO: 2490680 - DNA, 25 bp, Homo sapien
caagggcacgggtaccattttcaga

SEQ ID NO: 2490681 - DNA, 25 bp, Homo sapien
tgaggcctcgtaaacttcaggtgcc

SEQ ID NO: 2490682 - DNA, 25 bp, Homo sapien
caccctgtgattatgctccctgaag

SEQ ID NO: 2490683 - DNA, 25 bp, Homo sapien
gagggaacagcaccgtgtcttacag

SEQ ID NO: 2490684 - DNA, 25 bp, Homo sapien
ctggagggaacagcaccgtgtctta

SEQ ID NO: 2490685 - DNA, 25 bp, Homo sapien
ggaacagcaccgtgtcttacagcaa

SEQ ID NO: 2490686 - DNA, 25 bp, Homo sapien
cagcaccgtgtcttacagcaaactg

SEQ ID NO: 2490687 - DNA, 25 bp, Homo sapien
tatatgggactatctctgaggtttg

SEQ ID NO: 2490688 - DNA, 25 bp, Homo sapien
ttacaactcaaactaagagatctct

SEQ ID NO: 2490689 - DNA, 25 bp, Homo sapien
tctgaggtttgctattacaactcaa

SEQ ID NO: 2490690 - DNA, 25 bp, Homo sapien
tgcccaggctatatgggactatctc

SEQ ID NO: 2490691 - DNA, 25 bp, Homo sapien
tggagaggaatagcatcggaatcat

SEQ ID NO: 2490692 - DNA, 25 bp, Homo sapien
ctcaaaacatctgttgcaggagctg

SEQ ID NO: 2490693 - DNA, 25 bp, Homo sapien
tagggcctagcatgcactgatctca

SEQ ID NO: 2490694 - DNA, 25 bp, Homo sapien
tctcaggagatcaagcataataaac

SEQ ID NO: 2490695 - DNA, 25 bp, Homo sapien
tattgttagccccagcatgcgagaa

SEQ ID NO: 2490696 - DNA, 25 bp, Homo sapien
aggtttattgttagccccagcatgc

SEQ ID NO: 2490697 - DNA, 25 bp, Homo sapien
catgcgagaaggaaccggaggatgg

SEQ ID NO: 2490698 - DNA, 25 bp, Homo sapien
tgttagccccagcatgcgagaagga

SEQ ID NO: 2490699 - DNA, 25 bp, Homo sapien
aaatgctctgaagcgtaataataga

SEQ ID NO: 2490700 - DNA, 25 bp, Homo sapien
ttcgaaaatgctctgaagcgtaata

SEQ ID NO: 2490701 - DNA, 25 bp, Homo sapien
tcgaaaatgctctgaagcgtaataa

SEQ ID NO: 2490702 - DNA, 25 bp, Homo sapien
gaaaatgctctgaagcgtaataata

SEQ ID NO: 2490703 - DNA, 25 bp, Homo sapien
atcctcatagccctcgtggtaatcc

SEQ ID NO: 2490704 - DNA, 25 bp, Homo sapien
tggtaatcctcttctggtcggtact

SEQ ID NO: 2490705 - DNA, 25 bp, Homo sapien
ctcgtggtaatcctcttctggtcgg

SEQ ID NO: 2490706 - DNA, 25 bp, Homo sapien
tagccctcgtggtaatcctcttctg

SEQ ID NO: 2490707 - DNA, 25 bp, Homo sapien
ttgacaaaacccaggaagcggtcca

SEQ ID NO: 2490708 - DNA, 25 bp, Homo sapien
tgacaaaacccaggaagcggtccat

SEQ ID NO: 2490709 - DNA, 25 bp, Homo sapien
acagctagcacaagagcacagcaac

SEQ ID NO: 2490710 - DNA, 25 bp, Homo sapien
cgtgcagcgcggcacagctagcaca

SEQ ID NO: 2490711 - DNA, 25 bp, Homo sapien
cagctagcacaagagcacagcaaca

SEQ ID NO: 2490712 - DNA, 25 bp, Homo sapien
gctgctctgcgagccggtggagcat

SEQ ID NO: 2490713 - DNA, 25 bp, Homo sapien
ggagatacacatcactgtcaaatcc

SEQ ID NO: 2490714 - DNA, 25 bp, Homo sapien
ttcttagtgcttcattggtggttgg

SEQ ID NO: 2490715 - DNA, 25 bp, Homo sapien
ctgagaagaaagtacgacactgtct

SEQ ID NO: 2490716 - DNA, 25 bp, Homo sapien
tgtcaaatcctggacttgccctaat

SEQ ID NO: 2490717 - DNA, 25 bp, Homo sapien
ctcactgttttctatgtcacgcagg

SEQ ID NO: 2490718 - DNA, 25 bp, Homo sapien
actgttttctatgtcacgcaggctg

SEQ ID NO: 2490719 - DNA, 25 bp, Homo sapien
cactgttttctatgtcacgcaggct

SEQ ID NO: 2490720 - DNA, 25 bp, Homo sapien
tcactgttttctatgtcacgcaggc

SEQ ID NO: 2490721 - DNA, 25 bp, Homo sapien
tcctgggaaccaacgaaaatctcaa

SEQ ID NO: 2490722 - DNA, 25 bp, Homo sapien
tacgaccctcctatagagacctggg

SEQ ID NO: 2490723 - DNA, 25 bp, Homo sapien
gatttactacagagtgatccctggt

SEQ ID NO: 2490724 - DNA, 25 bp, Homo sapien
cacttctgaggcttgcactgggtac

SEQ ID NO: 2490725 - DNA, 25 bp, Homo sapien
gggcagaatctaatcctagaattac

SEQ ID NO: 2490726 - DNA, 25 bp, Homo sapien
caacttagggcagaatctaatccta

SEQ ID NO: 2490727 - DNA, 25 bp, Homo sapien
tagaattaccaatttcatgaagcca

SEQ ID NO: 2490728 - DNA, 25 bp, Homo sapien
taatcctagaattaccaatttcatg

SEQ ID NO: 2490729 - DNA, 25 bp, Homo sapien
cttctatctggccataaccatttct

SEQ ID NO: 2490730 - DNA, 25 bp, Homo sapien
cttcctgctaaggagaccttgtcct

SEQ ID NO: 2490731 - DNA, 25 bp, Homo sapien
ttccatctcctacaaggctcatctc

SEQ ID NO: 2490732 - DNA, 25 bp, Homo sapien
accttgtcctcttctatctggccat

SEQ ID NO: 2490733 - DNA, 25 bp, Homo sapien
tctgaaagacggcatcctttacaac

SEQ ID NO: 2490734 - DNA, 25 bp, Homo sapien
catcatctgaaagacggcatccttt

SEQ ID NO: 2490735 - DNA, 25 bp, Homo sapien
gacggcatcctttacaacaccatta

SEQ ID NO: 2490736 - DNA, 25 bp, Homo sapien
aacaccattacctcctacacaggac

SEQ ID NO: 2490737 - DNA, 25 bp, Homo sapien
caaacacgggcacttggagcattcg

SEQ ID NO: 2490738 - DNA, 25 bp, Homo sapien
cccggtggtaggtatcctgacttga

SEQ ID NO: 2490739 - DNA, 25 bp, Homo sapien
taacatgctgcccattcaccgagtg

SEQ ID NO: 2490740 - DNA, 25 bp, Homo sapien
cagcataatatgtaccaaacacggg

SEQ ID NO: 2490741 - DNA, 25 bp, Homo sapien
tccactgcttggtgcagattaggct

SEQ ID NO: 2490742 - DNA, 25 bp, Homo sapien
aacacaagcccaagtccactgcttg

SEQ ID NO: 2490743 - DNA, 25 bp, Homo sapien
caagtccactgcttggtgcagatta

SEQ ID NO: 2490744 - DNA, 25 bp, Homo sapien
cccaagtccactgcttggtgcagat

SEQ ID NO: 2490745 - DNA, 25 bp, Homo sapien
tgtgacaccaaggtgctctgaaagc

SEQ ID NO: 2490746 - DNA, 25 bp, Homo sapien
tccttctatatgtaactctccattt

SEQ ID NO: 2490747 - DNA, 25 bp, Homo sapien
cttttccttctatatgtaactctcc

SEQ ID NO: 2490748 - DNA, 25 bp, Homo sapien
taactctccatttctttcggtcaac

SEQ ID NO: 2490749 - DNA, 25 bp, Homo sapien
tttccttctatatgtaactctccat

SEQ ID NO: 2490750 - DNA, 25 bp, Homo sapien
tggtctttctggaccacccaaccca

SEQ ID NO: 2490751 - DNA, 25 bp, Homo sapien
ttcctggtctttctggaccacccaa

SEQ ID NO: 2490752 - DNA, 25 bp, Homo sapien
tttcctggtctttctggaccaccca

SEQ ID NO: 2490753 - DNA, 25 bp, Homo sapien
tcctggtctttctggaccacccaac

SEQ ID NO: 2490754 - DNA, 25 bp, Homo sapien
gataaacaggtagcgggaagactca

SEQ ID NO: 2490755 - DNA, 25 bp, Homo sapien
ccagataaaacagagagtgacaggg

SEQ ID NO: 2490756 - DNA, 25 bp, Homo sapien
cacttatgggctatagaaggaaagc

SEQ ID NO: 2490757 - DNA, 25 bp, Homo sapien
tgaagcaacagaagccaccactgag

SEQ ID NO: 2490758 - DNA, 25 bp, Homo sapien
caagaactgacttttattaagatag

SEQ ID NO: 2490759 - DNA, 25 bp, Homo sapien
gccaagaactgacttttattaagat

SEQ ID NO: 2490760 - DNA, 25 bp, Homo sapien
ccaagaactgacttttattaagata

SEQ ID NO: 2490761 - DNA, 25 bp, Homo sapien
ggaaccacagatctagagaatttca

SEQ ID NO: 2490762 - DNA, 25 bp, Homo sapien
gctaacaggagctaaaatattgtga

SEQ ID NO: 2490763 - DNA, 25 bp, Homo sapien
tcaagttcctatttttgctaacagg

SEQ ID NO: 2490764 - DNA, 25 bp, Homo sapien
tctgagtaagagtgccctaaaaata

SEQ ID NO: 2490765 - DNA, 25 bp, Homo sapien
cgtgaacatagccatttggtggcaa

SEQ ID NO: 2490766 - DNA, 25 bp, Homo sapien
gttttgctccaaaggcaatgcttga

SEQ ID NO: 2490767 - DNA, 25 bp, Homo sapien
ttggtggcaaagtaaatttccgatc

SEQ ID NO: 2490768 - DNA, 25 bp, Homo sapien
ttccgatccaggtcagttttgctcc

SEQ ID NO: 2490769 - DNA, 25 bp, Homo sapien
ggtgaacacaagtcaaaactggata

SEQ ID NO: 2490770 - DNA, 25 bp, Homo sapien
cattcgaaagtactacagctgcaac

SEQ ID NO: 2490771 - DNA, 25 bp, Homo sapien
taatcttattgaatgcaaacccaac

SEQ ID NO: 2490772 - DNA, 25 bp, Homo sapien
tgctgagtaatgctgttaaagaact

SEQ ID NO: 2490773 - DNA, 25 bp, Homo sapien
caagggctcaagttttgcgtatcaa

SEQ ID NO: 2490774 - DNA, 25 bp, Homo sapien
tcaatggtccagaacctctcaaggg

SEQ ID NO: 2490775 - DNA, 25 bp, Homo sapien
gcagctacccctgggaaaatgttca

SEQ ID NO: 2490776 - DNA, 25 bp, Homo sapien
tctgaaggttgcaccagaaggatgt

SEQ ID NO: 2490777 - DNA, 25 bp, Homo sapien
tagcgagaaattccagttcaaacca

SEQ ID NO: 2490778 - DNA, 25 bp, Homo sapien
gggacatagcgagaaattccagttc

SEQ ID NO: 2490779 - DNA, 25 bp, Homo sapien
gaaattccagttcaaaccagacagc

SEQ ID NO: 2490780 - DNA, 25 bp, Homo sapien
cagttcaaaccagacagcaatcttc

SEQ ID NO: 2490781 - DNA, 25 bp, Homo sapien
cctgagccctgtactgaggtatggg

SEQ ID NO: 2490782 - DNA, 25 bp, Homo sapien
tctccccaaaggtaaagctggccgc

SEQ ID NO: 2490783 - DNA, 25 bp, Homo sapien
tgagatttgattagcaaccactgcc

SEQ ID NO: 2490784 - DNA, 25 bp, Homo sapien
gggtaatgttctctactgggcacca

SEQ ID NO: 2490785 - DNA, 25 bp, Homo sapien
ttagccgaggcaagaactgagattc

SEQ ID NO: 2490786 - DNA, 25 bp, Homo sapien
taatatcccgagacacagagtcctt

SEQ ID NO: 2490787 - DNA, 25 bp, Homo sapien
gagagaacattggtcagtgtcctcc

SEQ ID NO: 2490788 - DNA, 25 bp, Homo sapien
tcctagtccagcttgtgcccaatgt

SEQ ID NO: 2490789 - DNA, 25 bp, Homo sapien
tgtgagctttgcctaatgaaattct

SEQ ID NO: 2490790 - DNA, 25 bp, Homo sapien
tggcaatacttcaagagcgcttttt

SEQ ID NO: 2490791 - DNA, 25 bp, Homo sapien
cctcacctacttttacaatttgaag

SEQ ID NO: 2490792 - DNA, 25 bp, Homo sapien
ggttattaaccaacacagtagaata

SEQ ID NO: 2490793 - DNA, 25 bp, Homo sapien
ggtacgtccctaggccatagaattc

SEQ ID NO: 2490794 - DNA, 25 bp, Homo sapien
aggccatagaattccacttaaccag

SEQ ID NO: 2490795 - DNA, 25 bp, Homo sapien
aggactcagagggtacgtccctagg

SEQ ID NO: 2490796 - DNA, 25 bp, Homo sapien
ttccacttaaccagaacagctccat

SEQ ID NO: 2490797 - DNA, 25 bp, Homo sapien
aaatctcagtcttctgcagacaaat

SEQ ID NO: 2490798 - DNA, 25 bp, Homo sapien
gtccacatattggacagaaagtcca

SEQ ID NO: 2490799 - DNA, 25 bp, Homo sapien
ggagactggaatcttgcttttgaga

SEQ ID NO: 2490800 - DNA, 25 bp, Homo sapien
tgcttttgagatgttgcttctgaca

SEQ ID NO: 2490801 - DNA, 25 bp, Homo sapien
aaaggaataaatctcccagagaact

SEQ ID NO: 2490802 - DNA, 25 bp, Homo sapien
agtaacaccatgagagttagcctga

SEQ ID NO: 2490803 - DNA, 25 bp, Homo sapien
tttggtaaatgcctattaactggag

SEQ ID NO: 2490804 - DNA, 25 bp, Homo sapien
ccagagaactgactaagtgaggaaa

SEQ ID NO: 2490805 - DNA, 25 bp, Homo sapien
ggtagtggaaaagactgtaggcttc

SEQ ID NO: 2490806 - DNA, 25 bp, Homo sapien
gtggaaaagactgtaggcttcccag

SEQ ID NO: 2490807 - DNA, 25 bp, Homo sapien
cttggggtggtagtggaaaagactg

SEQ ID NO: 2490808 - DNA, 25 bp, Homo sapien
ggtggtagtggaaaagactgtaggc

SEQ ID NO: 2490809 - DNA, 25 bp, Homo sapien
tatttgcctgctcaagtattacctg

SEQ ID NO: 2490810 - DNA, 25 bp, Homo sapien
cataggtggacctttgagctcagtc

SEQ ID NO: 2490811 - DNA, 25 bp, Homo sapien
tatgaggatactgacaacaagaaac

SEQ ID NO: 2490812 - DNA, 25 bp, Homo sapien
tatgtctaccaagaagcctcctcta

SEQ ID NO: 2490813 - DNA, 25 bp, Homo sapien
ccaaacaagtgatttagagagctct

SEQ ID NO: 2490814 - DNA, 25 bp, Homo sapien
tgtgtctttatagcggagactctcc

SEQ ID NO: 2490815 - DNA, 25 bp, Homo sapien
tagcctctaaatctgattgccaggg

SEQ ID NO: 2490816 - DNA, 25 bp, Homo sapien
gaggagagttctatccagactcatg

SEQ ID NO: 2490817 - DNA, 25 bp, Homo sapien
cctctaggtctctgctcatgtctta

SEQ ID NO: 2490818 - DNA, 25 bp, Homo sapien
tcatgtcttactgactgcctggaaa

SEQ ID NO: 2490819 - DNA, 25 bp, Homo sapien
tgcccttgcccggaaaaacatctat

SEQ ID NO: 2490820 - DNA, 25 bp, Homo sapien
tctgtgcttccacaatacatgagaa

SEQ ID NO: 2490821 - DNA, 25 bp, Homo sapien
gggcgatacagtcctggtcctgttt

SEQ ID NO: 2490822 - DNA, 25 bp, Homo sapien
cagatctgaaaggggcgatacagtc

SEQ ID NO: 2490823 - DNA, 25 bp, Homo sapien
gaaaggggcgatacagtcctggtcc

SEQ ID NO: 2490824 - DNA, 25 bp, Homo sapien
gcgatacagtcctggtcctgtttgt

SEQ ID NO: 2490825 - DNA, 25 bp, Homo sapien
gcccttcacatgccaaagacacaaa

SEQ ID NO: 2490826 - DNA, 25 bp, Homo sapien
ccttcacatgccaaagacacaaaaa

SEQ ID NO: 2490827 - DNA, 25 bp, Homo sapien
ggtttcacacaatgcccttcacatg

SEQ ID NO: 2490828 - DNA, 25 bp, Homo sapien
tttcacacaatgcccttcacatgcc

SEQ ID NO: 2490829 - DNA, 25 bp, Homo sapien
tcgtggcagtttggcgtacagatta

SEQ ID NO: 2490830 - DNA, 25 bp, Homo sapien
ggcttacgatttggcaggctgtgca

SEQ ID NO: 2490831 - DNA, 25 bp, Homo sapien
catttatgtaactgctgtaataaac

SEQ ID NO: 2490832 - DNA, 25 bp, Homo sapien
tatctaggtaaattgtgtgtcgtgg

SEQ ID NO: 2490833 - DNA, 25 bp, Homo sapien
tcttactgctctgatgctcacgggt

SEQ ID NO: 2490834 - DNA, 25 bp, Homo sapien
ggactcctgttctcaccagggatga

SEQ ID NO: 2490835 - DNA, 25 bp, Homo sapien
caaaatctggtctcctgtttagcag

SEQ ID NO: 2490836 - DNA, 25 bp, Homo sapien
taaggatacggtctttctcagctcc

SEQ ID NO: 2490837 - DNA, 25 bp, Homo sapien
tattcattgagtattcttagcacac

SEQ ID NO: 2490838 - DNA, 25 bp, Homo sapien
gcaccctgcctatactacattattt

SEQ ID NO: 2490839 - DNA, 25 bp, Homo sapien
gatcaattggtgagaaaatgaaagc

SEQ ID NO: 2490840 - DNA, 25 bp, Homo sapien
cacagaagagctttcgagtgaatta

SEQ ID NO: 2490841 - DNA, 25 bp, Homo sapien
tatcaagcagccagagtgcagttaa

SEQ ID NO: 2490842 - DNA, 25 bp, Homo sapien
agtctcactctatcaagcagccaga

SEQ ID NO: 2490843 - DNA, 25 bp, Homo sapien
gagttcttgcatcttctgttgtttg

SEQ ID NO: 2490844 - DNA, 25 bp, Homo sapien
agagtgcagttaatagctaactgca

SEQ ID NO: 2490845 - DNA, 25 bp, Homo sapien
tagagaacattctgagcgcacttca

SEQ ID NO: 2490846 - DNA, 25 bp, Homo sapien
taaaatccatgtacgtgtgagaccc

SEQ ID NO: 2490847 - DNA, 25 bp, Homo sapien
cacaggaatctagaggtgcctcgag

SEQ ID NO: 2490848 - DNA, 25 bp, Homo sapien
tcatgaggacagctagcatttgcca

SEQ ID NO: 2490849 - DNA, 25 bp, Homo sapien
tggtggaccacctagctctaaaaca

SEQ ID NO: 2490850 - DNA, 25 bp, Homo sapien
tggaccacctagctctaaaacaacc

SEQ ID NO: 2490851 - DNA, 25 bp, Homo sapien
gctacagtggtggaccacctagctc

SEQ ID NO: 2490852 - DNA, 25 bp, Homo sapien
gaccagtggctacagtggtggacca

SEQ ID NO: 2490853 - DNA, 25 bp, Homo sapien
gcacactcagctaaggtccaaagat

SEQ ID NO: 2490854 - DNA, 25 bp, Homo sapien
tgaaagcagaccttaggaaccctag

SEQ ID NO: 2490855 - DNA, 25 bp, Homo sapien
ttagaggagagcttttagggccgcc

SEQ ID NO: 2490856 - DNA, 25 bp, Homo sapien
tcatatggtatattttgcagcccca

SEQ ID NO: 2490857 - DNA, 25 bp, Homo sapien
ccaagagtacatatcaggtacaagt

SEQ ID NO: 2490858 - DNA, 25 bp, Homo sapien
tcaaagcatcacaactctgccagta

SEQ ID NO: 2490859 - DNA, 25 bp, Homo sapien
gatcctaccgcctccatataggaga

SEQ ID NO: 2490860 - DNA, 25 bp, Homo sapien
tgccatccagtaaaagaccacatat

SEQ ID NO: 2490861 - DNA, 25 bp, Homo sapien
tacaaatgcaacaaacctgtggcag

SEQ ID NO: 2490862 - DNA, 25 bp, Homo sapien
tggctagactaaacgaaggctctct

SEQ ID NO: 2490863 - DNA, 25 bp, Homo sapien
ggatctgttatgactgctgttgcca

SEQ ID NO: 2490864 - DNA, 25 bp, Homo sapien
gatttccacctaccatgatagagga

SEQ ID NO: 2490865 - DNA, 25 bp, Homo sapien
tctgttcaagggcaaaatacagaga

SEQ ID NO: 2490866 - DNA, 25 bp, Homo sapien
cattctgaggcagtcagagcacagc

SEQ ID NO: 2490867 - DNA, 25 bp, Homo sapien
cagagaccagttaggagagtgttcc

SEQ ID NO: 2490868 - DNA, 25 bp, Homo sapien
cacgatggaggtttggaccaaggca

SEQ ID NO: 2490869 - DNA, 25 bp, Homo sapien
caagttatcagtccctagattagga

SEQ ID NO: 2490870 - DNA, 25 bp, Homo sapien
caggtgcaggtcaaactttcaaaaa

SEQ ID NO: 2490871 - DNA, 25 bp, Homo sapien
gttgttgcacgtaagaataatagcc

SEQ ID NO: 2490872 - DNA, 25 bp, Homo sapien
tagattaggaactggcacactacca

SEQ ID NO: 2490873 - DNA, 25 bp, Homo sapien
tctggtaccacgcactaagtctgtt

SEQ ID NO: 2490874 - DNA, 25 bp, Homo sapien
gaaatgtctgttgttctaggccacc

SEQ ID NO: 2490875 - DNA, 25 bp, Homo sapien
cacccagtttgtatagccctaggaa

SEQ ID NO: 2490876 - DNA, 25 bp, Homo sapien
tatgttaggagaatgccagtgaggc

SEQ ID NO: 2490877 - DNA, 25 bp, Homo sapien
tgagtttggttccatgttttaggag

SEQ ID NO: 2490878 - DNA, 25 bp, Homo sapien
taatacctggttgagtttggttcca

SEQ ID NO: 2490879 - DNA, 25 bp, Homo sapien
ccagaacaatggataggcaagctaa

SEQ ID NO: 2490880 - DNA, 25 bp, Homo sapien
tcccaagggtcacaggaaatttcca

SEQ ID NO: 2490881 - DNA, 25 bp, Homo sapien
tgagatcggctaacatgcaaaactc

SEQ ID NO: 2490882 - DNA, 25 bp, Homo sapien
cacaatcctggctctaaagctgtca

SEQ ID NO: 2490883 - DNA, 25 bp, Homo sapien
tggtcagattaatatataatgtttc

SEQ ID NO: 2490884 - DNA, 25 bp, Homo sapien
agttcctcagatgaatccatccgaa

SEQ ID NO: 2490885 - DNA, 25 bp, Homo sapien
tatttcactcatagagactttttta

SEQ ID NO: 2490886 - DNA, 25 bp, Homo sapien
ccgaataggttattaatcatcatta

SEQ ID NO: 2490887 - DNA, 25 bp, Homo sapien
tagtaatgattagagacacggcttc

SEQ ID NO: 2490888 - DNA, 25 bp, Homo sapien
aattcaggagaataaggcattgcca

SEQ ID NO: 2490889 - DNA, 25 bp, Homo sapien
aaaacatagagaaaacttgggcaca

SEQ ID NO: 2490890 - DNA, 25 bp, Homo sapien
tatttcttccctatagctgagtaag

SEQ ID NO: 2490891 - DNA, 25 bp, Homo sapien
actttgctgcctctctatataataa

SEQ ID NO: 2490892 - DNA, 25 bp, Homo sapien
taaaaccaactagaagtcataaaga

SEQ ID NO: 2490893 - DNA, 25 bp, Homo sapien
gattcagagtaaagacaccaaaaag

SEQ ID NO: 2490894 - DNA, 25 bp, Homo sapien
aatggcaaagggtattaaccatcac

SEQ ID NO: 2490895 - DNA, 25 bp, Homo sapien
cataatttttctcacgctgttctcc

SEQ ID NO: 2490896 - DNA, 25 bp, Homo sapien
tgttcatttgtcttacaccttcctg

SEQ ID NO: 2490897 - DNA, 25 bp, Homo sapien
actttttgttaatccttggtcatag

SEQ ID NO: 2490898 - DNA, 25 bp, Homo sapien
tttggtaacagatcatcacacctgc

SEQ ID NO: 2490899 - DNA, 25 bp, Homo sapien
ccaggcttggcagtgtacacctgca

SEQ ID NO: 2490900 - DNA, 25 bp, Homo sapien
tttctacccaaactccaatatacca

SEQ ID NO: 2490901 - DNA, 25 bp, Homo sapien
cctgatgctactataataagttacc

SEQ ID NO: 2490902 - DNA, 25 bp, Homo sapien
tcctgattaagtaattctacactgt

SEQ ID NO: 2490903 - DNA, 25 bp, Homo sapien
cagatctctgtactagactctaagc

SEQ ID NO: 2490904 - DNA, 25 bp, Homo sapien
ttactgcccagtctaaatgaggttc

SEQ ID NO: 2490905 - DNA, 25 bp, Homo sapien
ggacaagactgttttaccctcacca

SEQ ID NO: 2490906 - DNA, 25 bp, Homo sapien
gaaggctatagtctacagatctctg

SEQ ID NO: 2490907 - DNA, 25 bp, Homo sapien
gctttggagaagcactctaaaaaga

SEQ ID NO: 2490908 - DNA, 25 bp, Homo sapien
agacttctgacaggaattccatgtt

SEQ ID NO: 2490909 - DNA, 25 bp, Homo sapien
tacaacttgggcctggtgaactctt

SEQ ID NO: 2490910 - DNA, 25 bp, Homo sapien
gaagcactctaaaaagacttctgac

SEQ ID NO: 2490911 - DNA, 25 bp, Homo sapien
atagcatttacttaatctgaaacca

SEQ ID NO: 2490912 - DNA, 25 bp, Homo sapien
caaggatttaaggacacaatagcat

SEQ ID NO: 2490913 - DNA, 25 bp, Homo sapien
tgggttatggggatgcctaaagtcc

SEQ ID NO: 2490914 - DNA, 25 bp, Homo sapien
tatggggatgcctaaagtccttcat

SEQ ID NO: 2490915 - DNA, 25 bp, Homo sapien
actagagggtaagctcaaaccaggg

SEQ ID NO: 2490916 - DNA, 25 bp, Homo sapien
tccctgcagcaagcaaaaagccctt

SEQ ID NO: 2490917 - DNA, 25 bp, Homo sapien
taagcagattacagattagctcccc

SEQ ID NO: 2490918 - DNA, 25 bp, Homo sapien
tccagcggaccaggaactagagggt

SEQ ID NO: 2490919 - DNA, 25 bp, Homo sapien
ttctggctgggtccacgttaggaag

SEQ ID NO: 2490920 - DNA, 25 bp, Homo sapien
tggctgggtccacgttaggaagaac

SEQ ID NO: 2490921 - DNA, 25 bp, Homo sapien
caaggatctgcggagggaggacaga

SEQ ID NO: 2490922 - DNA, 25 bp, Homo sapien
ctgggtccacgttaggaagaacaca

SEQ ID NO: 2490923 - DNA, 25 bp, Homo sapien
tattgaaaaccttagatgctctctg

SEQ ID NO: 2490924 - DNA, 25 bp, Homo sapien
aacaaatgtcatgcctaatcttacc

SEQ ID NO: 2490925 - DNA, 25 bp, Homo sapien
caattaggaggttaactccctgtcg

SEQ ID NO: 2490926 - DNA, 25 bp, Homo sapien
tgtctactccctgaatactgcctgt

SEQ ID NO: 2490927 - DNA, 25 bp, Homo sapien
cagccagctgtttacttagacattt

SEQ ID NO: 2490928 - DNA, 25 bp, Homo sapien
ttggatgggaacatcatacaaatca

SEQ ID NO: 2490929 - DNA, 25 bp, Homo sapien
ttaatgttgtaattagatgtgcaaa

SEQ ID NO: 2490930 - DNA, 25 bp, Homo sapien
tgtaccctgaggtatgtttggatgg

SEQ ID NO: 2490931 - DNA, 25 bp, Homo sapien
gaaccttttataatagagccatgag

SEQ ID NO: 2490932 - DNA, 25 bp, Homo sapien
tcatgttacattcacctaagggatt

SEQ ID NO: 2490933 - DNA, 25 bp, Homo sapien
gtaaagctgaccctgagagaacctt

SEQ ID NO: 2490934 - DNA, 25 bp, Homo sapien
gctcccaacttgagagaactaggat

SEQ ID NO: 2490935 - DNA, 25 bp, Homo sapien
gggcaggcctaccatattcacattt

SEQ ID NO: 2490936 - DNA, 25 bp, Homo sapien
taattcattgtttaagggcaggcct

SEQ ID NO: 2490937 - DNA, 25 bp, Homo sapien
gaaaataaagctgtcttaggcctga

SEQ ID NO: 2490938 - DNA, 25 bp, Homo sapien
cacatttgtgtttccagcaactaga

SEQ ID NO: 2490939 - DNA, 25 bp, Homo sapien
aaagctaaaatcagtatcctgagac

SEQ ID NO: 2490940 - DNA, 25 bp, Homo sapien
cagatactgaacaaagcatgcactt

SEQ ID NO: 2490941 - DNA, 25 bp, Homo sapien
tcctgagacttaggcagatactgaa

SEQ ID NO: 2490942 - DNA, 25 bp, Homo sapien
aaagaacaacggaggagagacagac

SEQ ID NO: 2490943 - DNA, 25 bp, Homo sapien
ggcaagaagtaaatgtcagcatcct

SEQ ID NO: 2490944 - DNA, 25 bp, Homo sapien
tggcaagacttagggtatatggtgt

SEQ ID NO: 2490945 - DNA, 25 bp, Homo sapien
cagacaccaggaacataggcagagc

SEQ ID NO: 2490946 - DNA, 25 bp, Homo sapien
gcatcctgaaaaatcaggtaccaga

SEQ ID NO: 2490947 - DNA, 25 bp, Homo sapien
gaacatgaaacggagggacttggca

SEQ ID NO: 2490948 - DNA, 25 bp, Homo sapien
gctggactacaacctgtgggatgcc

SEQ ID NO: 2490949 - DNA, 25 bp, Homo sapien
ccaagatcggggctggactacaacc

SEQ ID NO: 2490950 - DNA, 25 bp, Homo sapien
tgcccatggatgctagtcacttgct

SEQ ID NO: 2490951 - DNA, 25 bp, Homo sapien
gaaaatgtgctctgcacataccaga

SEQ ID NO: 2490952 - DNA, 25 bp, Homo sapien
cataccagaaaattatacgtgtaaa

SEQ ID NO: 2490953 - DNA, 25 bp, Homo sapien
tgtgaaatggtaacaaagaaactaa

SEQ ID NO: 2490954 - DNA, 25 bp, Homo sapien
tctgattctagcctggcaaattttc

SEQ ID NO: 2490955 - DNA, 25 bp, Homo sapien
ttatatctaaaggggtccaaatatc

SEQ ID NO: 2490956 - DNA, 25 bp, Homo sapien
tctaaaggggtccaaatatccacaa

SEQ ID NO: 2490957 - DNA, 25 bp, Homo sapien
tatctaaaggggtccaaatatccac

SEQ ID NO: 2490958 - DNA, 25 bp, Homo sapien
ctgcatagtattctcatagatattt

SEQ ID NO: 2490959 - DNA, 25 bp, Homo sapien
gccgcttaacctcagcaccggctgt

SEQ ID NO: 2490960 - DNA, 25 bp, Homo sapien
gctgcgccgcttaacctcagcaccg

SEQ ID NO: 2490961 - DNA, 25 bp, Homo sapien
gcttaacctcagcaccggctgtttc

SEQ ID NO: 2490962 - DNA, 25 bp, Homo sapien
cacgctgcgccgcttaacctcagca

SEQ ID NO: 2490963 - DNA, 25 bp, Homo sapien
agaagcaaagggataaaccctggtg

SEQ ID NO: 2490964 - DNA, 25 bp, Homo sapien
ggacaggatagaagaagcaaaggga

SEQ ID NO: 2490965 - DNA, 25 bp, Homo sapien
ataaaccctggtggaccttgccagc

SEQ ID NO: 2490966 - DNA, 25 bp, Homo sapien
aggacaggatagaagaagcaaaggg

SEQ ID NO: 2490967 - DNA, 25 bp, Homo sapien
ccgtgcacatccctctagccccatg

SEQ ID NO: 2490968 - DNA, 25 bp, Homo sapien
gtgcacatccctctagccccatggg

SEQ ID NO: 2490969 - DNA, 25 bp, Homo sapien
ccaccgtgcacatccctctagcccc

SEQ ID NO: 2490970 - DNA, 25 bp, Homo sapien
caccgtgcacatccctctagcccca

SEQ ID NO: 2490971 - DNA, 25 bp, Homo sapien
tgcctgcaagcagatagggatattc

SEQ ID NO: 2490972 - DNA, 25 bp, Homo sapien
tcgctgtcgggctcgctctttctcg

SEQ ID NO: 2490973 - DNA, 25 bp, Homo sapien
agcagatagggatattcttcttcca

SEQ ID NO: 2490974 - DNA, 25 bp, Homo sapien
cgggcatggtgtcgctccctgcgct

SEQ ID NO: 2490975 - DNA, 25 bp, Homo sapien
tgtccctccggagtatctgatgtgg

SEQ ID NO: 2490976 - DNA, 25 bp, Homo sapien
cactgctatgaatgactcggtgtcc

SEQ ID NO: 2490977 - DNA, 25 bp, Homo sapien
ggcccctgaggctgtaactactggt

SEQ ID NO: 2490978 - DNA, 25 bp, Homo sapien
gcagtttgctctcccgaattgagga

SEQ ID NO: 2490979 - DNA, 25 bp, Homo sapien
gcaagaagacataatctcctactcc

SEQ ID NO: 2490980 - DNA, 25 bp, Homo sapien
agaagacataatctcctactcctag

SEQ ID NO: 2490981 - DNA, 25 bp, Homo sapien
ggcaagaagacataatctcctactc

SEQ ID NO: 2490982 - DNA, 25 bp, Homo sapien
gacataatctcctactcctagtacc

SEQ ID NO: 2490983 - DNA, 25 bp, Homo sapien
acaaatcctctttcaacattcaaaa

SEQ ID NO: 2490984 - DNA, 25 bp, Homo sapien
caggtcttccaagaattcctcatac

SEQ ID NO: 2490985 - DNA, 25 bp, Homo sapien
ttctgccacaattattgtacacgag

SEQ ID NO: 2490986 - DNA, 25 bp, Homo sapien
caagaattcctcatacctattctgt

SEQ ID NO: 2490987 - DNA, 25 bp, Homo sapien
acaattattgtacacgagcacacac

SEQ ID NO: 2490988 - DNA, 25 bp, Homo sapien
cttctttgcatcttgatttcaccca

SEQ ID NO: 2490989 - DNA, 25 bp, Homo sapien
catttcctctaccccctgcactacc

SEQ ID NO: 2490990 - DNA, 25 bp, Homo sapien
gcatcttgatttcacccatttcctc

SEQ ID NO: 2490991 - DNA, 25 bp, Homo sapien
tttgcatcttgatttcacccatttc

SEQ ID NO: 2490992 - DNA, 25 bp, Homo sapien
tctaaaatctgaatatttcttgtca

SEQ ID NO: 2490993 - DNA, 25 bp, Homo sapien
gggtgaggtcagcttgaagccaagt

SEQ ID NO: 2490994 - DNA, 25 bp, Homo sapien
aagtgtattaagacttgcaggtggg

SEQ ID NO: 2490995 - DNA, 25 bp, Homo sapien
ggcatgtccaagtgtattaagactt

SEQ ID NO: 2490996 - DNA, 25 bp, Homo sapien
tactgggacctggatcattctgaaa

SEQ ID NO: 2490997 - DNA, 25 bp, Homo sapien
caaccagcaagtagggagccagcta

SEQ ID NO: 2490998 - DNA, 25 bp, Homo sapien
cttacaagaagggaatgggaggatc

SEQ ID NO: 2490999 - DNA, 25 bp, Homo sapien
taaattcaagggatcaaggacaacc

SEQ ID NO: 2491000 - DNA, 25 bp, Homo sapien
taatacctcagaagatttcatgcag

SEQ ID NO: 2491001 - DNA, 25 bp, Homo sapien
tgtggaattctttatttatgttctc

SEQ ID NO: 2491002 - DNA, 25 bp, Homo sapien
cctcagaagatttcatgcagccagg

SEQ ID NO: 2491003 - DNA, 25 bp, Homo sapien
ttatgttctcaaaataatacctcag

SEQ ID NO: 2491004 - DNA, 25 bp, Homo sapien
gtactcttactgcagttgcccagtg

SEQ ID NO: 2491005 - DNA, 25 bp, Homo sapien
ccagtgctggctccgtagttctgta

SEQ ID NO: 2491006 - DNA, 25 bp, Homo sapien
ggctccgtagttctgtattctcttc

SEQ ID NO: 2491007 - DNA, 25 bp, Homo sapien
cagctcccagaactacctgtttagt

SEQ ID NO: 2491008 - DNA, 25 bp, Homo sapien
catcttctggcaaatttcctgattt

SEQ ID NO: 2491009 - DNA, 25 bp, Homo sapien
tgaatgacgcacaccaaaacagttg

SEQ ID NO: 2491010 - DNA, 25 bp, Homo sapien
cagttgattcctttgggctagggca

SEQ ID NO: 2491011 - DNA, 25 bp, Homo sapien
gaacctgtctaaacttgaccgagga

SEQ ID NO: 2491012 - DNA, 25 bp, Homo sapien
tcatcacaggagtaagggagctgga

SEQ ID NO: 2491013 - DNA, 25 bp, Homo sapien
gatgccttgtagacacagctttgga

SEQ ID NO: 2491014 - DNA, 25 bp, Homo sapien
tcccaagattgaaatgagttgttcc

SEQ ID NO: 2491015 - DNA, 25 bp, Homo sapien
cagctttggacagtagatggaatga

SEQ ID NO: 2491016 - DNA, 25 bp, Homo sapien
gaaggatcatgctagtttccctgaa

SEQ ID NO: 2491017 - DNA, 25 bp, Homo sapien
gaatccaagaatttttgctactcaa

SEQ ID NO: 2491018 - DNA, 25 bp, Homo sapien
gctactcaatagcaatcctatcaga

SEQ ID NO: 2491019 - DNA, 25 bp, Homo sapien
gcaatcctatcagaaggcaggcttt

SEQ ID NO: 2491020 - DNA, 25 bp, Homo sapien
gaatgggcttataatttgggagatg

SEQ ID NO: 2491021 - DNA, 25 bp, Homo sapien
tggttggttcaagaataagcactaa

SEQ ID NO: 2491022 - DNA, 25 bp, Homo sapien
taacagctaatggttctactgccct

SEQ ID NO: 2491023 - DNA, 25 bp, Homo sapien
ccagcactactttggttggttcaag

SEQ ID NO: 2491024 - DNA, 25 bp, Homo sapien
tactgccctattagacacagaaggg

SEQ ID NO: 2491025 - DNA, 25 bp, Homo sapien
ggaagggtgaatgcttaaagcttgc

SEQ ID NO: 2491026 - DNA, 25 bp, Homo sapien
cagctggtgcagctcggtttacaca

SEQ ID NO: 2491027 - DNA, 25 bp, Homo sapien
gaggagctagctctgtaacaattgc

SEQ ID NO: 2491028 - DNA, 25 bp, Homo sapien
gccacccttggtgctttgcaggcta

SEQ ID NO: 2491029 - DNA, 25 bp, Homo sapien
caatagtgatttttcggtctcctaa

SEQ ID NO: 2491030 - DNA, 25 bp, Homo sapien
ccaggatctcaagcaagaatcaaga

SEQ ID NO: 2491031 - DNA, 25 bp, Homo sapien
tttgattaagcaaagacccaatagt

SEQ ID NO: 2491032 - DNA, 25 bp, Homo sapien
caggatctcaagcaagaatcaagac

SEQ ID NO: 2491033 - DNA, 25 bp, Homo sapien
ggtacatcatggttacacctgaagt

SEQ ID NO: 2491034 - DNA, 25 bp, Homo sapien
tacacctgaagtgagtaggcagtgg

SEQ ID NO: 2491035 - DNA, 25 bp, Homo sapien
ttccatcaggtacatcatggttaca

SEQ ID NO: 2491036 - DNA, 25 bp, Homo sapien
tacatcatggttacacctgaagtga

SEQ ID NO: 2491037 - DNA, 25 bp, Homo sapien
gttgggctcgcctctcttggtgctg

SEQ ID NO: 2491038 - DNA, 25 bp, Homo sapien
cccagtcagggttaatattgagtgc

SEQ ID NO: 2491039 - DNA, 25 bp, Homo sapien
tcttgggtactgtcaacattgctgc

SEQ ID NO: 2491040 - DNA, 25 bp, Homo sapien
gggtctggtactgggacaccttctc

SEQ ID NO: 2491041 - DNA, 25 bp, Homo sapien
tgaaaggaaaaatgtgtgtttccaa

SEQ ID NO: 2491042 - DNA, 25 bp, Homo sapien
ttgaaaggaaaaatgtgtgtttcca

SEQ ID NO: 2491043 - DNA, 25 bp, Homo sapien
aaaaatgtgtgtttccaactgacat

SEQ ID NO: 2491044 - DNA, 25 bp, Homo sapien
aggaaaaatgtgtgtttccaactga

SEQ ID NO: 2491045 - DNA, 25 bp, Homo sapien
cactgttcggccttcaatgagttca

SEQ ID NO: 2491046 - DNA, 25 bp, Homo sapien
gggactatgtcgcactgttcggcct

SEQ ID NO: 2491047 - DNA, 25 bp, Homo sapien
tgtcgcactgttcggccttcaatga

SEQ ID NO: 2491048 - DNA, 25 bp, Homo sapien
caacagacataaaaccgggagctgg

SEQ ID NO: 2491049 - DNA, 25 bp, Homo sapien
agttcttcttttggtctggccacaa

SEQ ID NO: 2491050 - DNA, 25 bp, Homo sapien
aagttcttcttttggtctggccaca

SEQ ID NO: 2491051 - DNA, 25 bp, Homo sapien
atctgaaataactgctggggaatat

SEQ ID NO: 2491052 - DNA, 25 bp, Homo sapien
tgctggggaatatgccattcttggg

SEQ ID NO: 2491053 - DNA, 25 bp, Homo sapien
cattcttgggggctgttcagctttc

SEQ ID NO: 2491054 - DNA, 25 bp, Homo sapien
cttccagggccacatctgaaataac

SEQ ID NO: 2491055 - DNA, 25 bp, Homo sapien
tttctccaccctggaattctttctc

SEQ ID NO: 2491056 - DNA, 25 bp, Homo sapien
ctgatctgtatttagctggctcagg

SEQ ID NO: 2491057 - DNA, 25 bp, Homo sapien
tgatctgtatttagctggctcaggc

SEQ ID NO: 2491058 - DNA, 25 bp, Homo sapien
gatctgtatttagctggctcaggcc

SEQ ID NO: 2491059 - DNA, 25 bp, Homo sapien
gacaaacaagtagcaactttaggag

SEQ ID NO: 2491060 - DNA, 25 bp, Homo sapien
tcatactttgggaactaggagagat

SEQ ID NO: 2491061 - DNA, 25 bp, Homo sapien
atcaggcagcttgcaaaatggcagt

SEQ ID NO: 2491062 - DNA, 25 bp, Homo sapien
taggagagatgtagtggcccttttc

SEQ ID NO: 2491063 - DNA, 25 bp, Homo sapien
tcaactttccagtaccattgtcctg

SEQ ID NO: 2491064 - DNA, 25 bp, Homo sapien
ttcaactttccagtaccattgtcct

SEQ ID NO: 2491065 - DNA, 25 bp, Homo sapien
taaggatgtcctatcaaggtgtctc

SEQ ID NO: 2491066 - DNA, 25 bp, Homo sapien
gatagctccagtactttgtcagaaa

SEQ ID NO: 2491067 - DNA, 25 bp, Homo sapien
gttcaactgaccaagacaaatggag

SEQ ID NO: 2491068 - DNA, 25 bp, Homo sapien
tcatggctgatcaaacctagtactg

SEQ ID NO: 2491069 - DNA, 25 bp, Homo sapien
gatttttcgttattgtctttactgc

SEQ ID NO: 2491070 - DNA, 25 bp, Homo sapien
tgcttagatcaacaccaggaagact

SEQ ID NO: 2491071 - DNA, 25 bp, Homo sapien
gtaacggacaaatactggcctcatg

SEQ ID NO: 2491072 - DNA, 25 bp, Homo sapien
ttatagtaacggacaaatactggcc

SEQ ID NO: 2491073 - DNA, 25 bp, Homo sapien
gttttccaatgccattaacggtcca

SEQ ID NO: 2491074 - DNA, 25 bp, Homo sapien
atgccattaacggtccagcctcctc

SEQ ID NO: 2491075 - DNA, 25 bp, Homo sapien
tccaatgccattaacggtccagcct

SEQ ID NO: 2491076 - DNA, 25 bp, Homo sapien
tttccaatgccattaacggtccagc

SEQ ID NO: 2491077 - DNA, 25 bp, Homo sapien
cacatacctgcctaaagatctctga

SEQ ID NO: 2491078 - DNA, 25 bp, Homo sapien
gatattcctaatgttgtgcctaggc

SEQ ID NO: 2491079 - DNA, 25 bp, Homo sapien
gagttgttggcacatagtattatag

SEQ ID NO: 2491080 - DNA, 25 bp, Homo sapien
aatttcatgacagcagagattttgt

SEQ ID NO: 2491081 - DNA, 25 bp, Homo sapien
gattcctctttgtgtaagaatataa

SEQ ID NO: 2491082 - DNA, 25 bp, Homo sapien
cctctttgtgtaagaatataaccaa

SEQ ID NO: 2491083 - DNA, 25 bp, Homo sapien
aaccggccctcacatggaaaaatgc

SEQ ID NO: 2491084 - DNA, 25 bp, Homo sapien
accaaaataaaccggccctcacatg

SEQ ID NO: 2491085 - DNA, 25 bp, Homo sapien
caagaaatcctatttgactgagcca

SEQ ID NO: 2491086 - DNA, 25 bp, Homo sapien
tctatgatgtcgaatgggccacaag

SEQ ID NO: 2491087 - DNA, 25 bp, Homo sapien
ggccacaagaaatcctatttgactg

SEQ ID NO: 2491088 - DNA, 25 bp, Homo sapien
tcgaatgggccacaagaaatcctat

SEQ ID NO: 2491089 - DNA, 25 bp, Homo sapien
gaaattatgaagatccatttgtcca

SEQ ID NO: 2491090 - DNA, 25 bp, Homo sapien
cccaagagaaattatgaagatccat

SEQ ID NO: 2491091 - DNA, 25 bp, Homo sapien
ccatttgtccagattttggggattg

SEQ ID NO: 2491092 - DNA, 25 bp, Homo sapien
gagaaattatgaagatccatttgtc

SEQ ID NO: 2491093 - DNA, 25 bp, Homo sapien
cacagacaaagaaaacgtcaaatta

SEQ ID NO: 2491094 - DNA, 25 bp, Homo sapien
gtcaaattactactgccttcctcct

SEQ ID NO: 2491095 - DNA, 25 bp, Homo sapien
aaaggcctagcccatgtacaatact

SEQ ID NO: 2491096 - DNA, 25 bp, Homo sapien
gcttattccttataacacagacaaa

SEQ ID NO: 2491097 - DNA, 25 bp, Homo sapien
taagttgcagaatctggtagaccga

SEQ ID NO: 2491098 - DNA, 25 bp, Homo sapien
tgggcaaaacaagaagcatcttcca

SEQ ID NO: 2491099 - DNA, 25 bp, Homo sapien
cattcagtgcctggatccatgatgt

SEQ ID NO: 2491100 - DNA, 25 bp, Homo sapien
ggatctgaagacataagttgcagaa

SEQ ID NO: 2491101 - DNA, 25 bp, Homo sapien
gaatgtatgccaccgactccttctg

SEQ ID NO: 2491102 - DNA, 25 bp, Homo sapien
ccaaatggaatgtatgccaccgact

SEQ ID NO: 2491103 - DNA, 25 bp, Homo sapien
cttggcttcgaggtcatttttcctg

SEQ ID NO: 2491104 - DNA, 25 bp, Homo sapien
accaaaaatggctgcgtggtaataa

SEQ ID NO: 2491105 - DNA, 25 bp, Homo sapien
cctgttggtcttcatgcccacgatg

SEQ ID NO: 2491106 - DNA, 25 bp, Homo sapien
tgttggtcttcatgcccacgatgct

SEQ ID NO: 2491107 - DNA, 25 bp, Homo sapien
atgtgggccaacatgtgctccctgt

SEQ ID NO: 2491108 - DNA, 25 bp, Homo sapien
tgtgggccaacatgtgctccctgtt

SEQ ID NO: 2491109 - DNA, 25 bp, Homo sapien
tgacacaggcttcagccaaccgaat

SEQ ID NO: 2491110 - DNA, 25 bp, Homo sapien
tgaccttagctttccgtagcgcccg

SEQ ID NO: 2491111 - DNA, 25 bp, Homo sapien
tctcttctccacagcgtgcgtgggg

SEQ ID NO: 2491112 - DNA, 25 bp, Homo sapien
aggcttcagccaaccgaattgtttt

SEQ ID NO: 2491113 - DNA, 25 bp, Homo sapien
ccgtcgaggcgcctccctagtcagc

SEQ ID NO: 2491114 - DNA, 25 bp, Homo sapien
cagcccgtcgaggcgcctccctagt

SEQ ID NO: 2491115 - DNA, 25 bp, Homo sapien
acaggcccacgcctcgccagggagg

SEQ ID NO: 2491116 - DNA, 25 bp, Homo sapien
gaggcgcctccctagtcagcgtcgg

SEQ ID NO: 2491117 - DNA, 25 bp, Homo sapien
gactttaggtgaggccgagatccga

SEQ ID NO: 2491118 - DNA, 25 bp, Homo sapien
gacatccagcgacaaggactttagg

SEQ ID NO: 2491119 - DNA, 25 bp, Homo sapien
gatcgaggccgtcaacatggcgagc

SEQ ID NO: 2491120 - DNA, 25 bp, Homo sapien
gagcgcctcgtaccacatttccaat

SEQ ID NO: 2491121 - DNA, 25 bp, Homo sapien
ggccctggccgtcacgcaggccttg

SEQ ID NO: 2491122 - DNA, 25 bp, Homo sapien
agtctccagcccaccggtccgctgg

SEQ ID NO: 2491123 - DNA, 25 bp, Homo sapien
ccttcggccgtagccggtagcttct

SEQ ID NO: 2491124 - DNA, 25 bp, Homo sapien
gatccctgcggagcccctttcctct

SEQ ID NO: 2491125 - DNA, 25 bp, Homo sapien
gattatcacctatttcatgggaaga

SEQ ID NO: 2491126 - DNA, 25 bp, Homo sapien
aaaggtgagattatcacctatttca

SEQ ID NO: 2491127 - DNA, 25 bp, Homo sapien
gatttagattggtaataatgtagtc

SEQ ID NO: 2491128 - DNA, 25 bp, Homo sapien
ggtcttgactactaaactattgcta

SEQ ID NO: 2491129 - DNA, 25 bp, Homo sapien
gaatatctgccgtttgtcctgcaag

SEQ ID NO: 2491130 - DNA, 25 bp, Homo sapien
ctctgcatcagtggtgggccttaaa

SEQ ID NO: 2491131 - DNA, 25 bp, Homo sapien
cattagtgtgggcaaccttcctgaa

SEQ ID NO: 2491132 - DNA, 25 bp, Homo sapien
gaagtcaaatcagctgcatcctatg

SEQ ID NO: 2491133 - DNA, 25 bp, Homo sapien
catccccattagaacaagtaaaagg

SEQ ID NO: 2491134 - DNA, 25 bp, Homo sapien
cataatctgaagagcttgttgatac

SEQ ID NO: 2491135 - DNA, 25 bp, Homo sapien
ttcagatttaccagtgtcatcccca

SEQ ID NO: 2491136 - DNA, 25 bp, Homo sapien
tttgtgagggcgagatcgtccactg

SEQ ID NO: 2491137 - DNA, 25 bp, Homo sapien
ccatctcctgtagagcgaatttaca

SEQ ID NO: 2491138 - DNA, 25 bp, Homo sapien
taaaagacatctcctaatgctgtgc

SEQ ID NO: 2491139 - DNA, 25 bp, Homo sapien
tctgaagccagctatcacaggtttg

SEQ ID NO: 2491140 - DNA, 25 bp, Homo sapien
ggatgtctacattccttatcaaagg

SEQ ID NO: 2491141 - DNA, 25 bp, Homo sapien
ccagatactggaatggaagtggcag

SEQ ID NO: 2491142 - DNA, 25 bp, Homo sapien
gattaactccatactcctagtggtg

SEQ ID NO: 2491143 - DNA, 25 bp, Homo sapien
gatgtggagtccagacatagtctac

SEQ ID NO: 2491144 - DNA, 25 bp, Homo sapien
caggctctaggactgaacaggagac

SEQ ID NO: 2491145 - DNA, 25 bp, Homo sapien
caagggccaactcccatgtttggaa

SEQ ID NO: 2491146 - DNA, 25 bp, Homo sapien
gaagggccgactagtccagctgttc

SEQ ID NO: 2491147 - DNA, 25 bp, Homo sapien
aaaagcacctgtctgtctgttaacg

SEQ ID NO: 2491148 - DNA, 25 bp, Homo sapien
gaagtcttccctggacaagtaatga

SEQ ID NO: 2491149 - DNA, 25 bp, Homo sapien
tcaagaccaagcaagttttgccctt

SEQ ID NO: 2491150 - DNA, 25 bp, Homo sapien
aaaaatcaagaccaagcaagttttg

SEQ ID NO: 2491151 - DNA, 25 bp, Homo sapien
aagaccaagcaagttttgcccttgt

SEQ ID NO: 2491152 - DNA, 25 bp, Homo sapien
aatcaagaccaagcaagttttgccc

SEQ ID NO: 2491153 - DNA, 25 bp, Homo sapien
ggagagtctggatgttactgccatt

SEQ ID NO: 2491154 - DNA, 25 bp, Homo sapien
ggtcaacttccggtcaatgtctagg

SEQ ID NO: 2491155 - DNA, 25 bp, Homo sapien
tccggtcaatgtctaggagagtctg

SEQ ID NO: 2491156 - DNA, 25 bp, Homo sapien
ggccagaggtcaacttccggtcaat

SEQ ID NO: 2491157 - DNA, 25 bp, Homo sapien
ttatttctctttctctggcttttcc

SEQ ID NO: 2491158 - DNA, 25 bp, Homo sapien
tttctctggcttttcctcctgtctc

SEQ ID NO: 2491159 - DNA, 25 bp, Homo sapien
tctggcttttcctcctgtctcaaac

SEQ ID NO: 2491160 - DNA, 25 bp, Homo sapien
tctctggcttttcctcctgtctcaa

SEQ ID NO: 2491161 - DNA, 25 bp, Homo sapien
cgctggccagcttctaatgtctcca

SEQ ID NO: 2491162 - DNA, 25 bp, Homo sapien
gctgtcgtgtgaacatgctgcagac

SEQ ID NO: 2491163 - DNA, 25 bp, Homo sapien
gctggccagcttctaatgtctccag

SEQ ID NO: 2491164 - DNA, 25 bp, Homo sapien
gggaaggctgtcgtgtgaacatgct

SEQ ID NO: 2491165 - DNA, 25 bp, Homo sapien
caggatgttgaagtgaacttgacct

SEQ ID NO: 2491166 - DNA, 25 bp, Homo sapien
gatgttgaagtgaacttgaccttca

SEQ ID NO: 2491167 - DNA, 25 bp, Homo sapien
ggatgttgaagtgaacttgaccttc

SEQ ID NO: 2491168 - DNA, 25 bp, Homo sapien
tgttgaagtgaacttgaccttcatg

SEQ ID NO: 2491169 - DNA, 25 bp, Homo sapien
aagctgtcagctgaataccagctct

SEQ ID NO: 2491170 - DNA, 25 bp, Homo sapien
agctgtcagctgaataccagctctc

SEQ ID NO: 2491171 - DNA, 25 bp, Homo sapien
gctgtcagctgaataccagctctct

SEQ ID NO: 2491172 - DNA, 25 bp, Homo sapien
cagctgccagaagcaagctgtcagc

SEQ ID NO: 2491173 - DNA, 25 bp, Homo sapien
tctgtgatgagcgtcgctgttctag

SEQ ID NO: 2491174 - DNA, 25 bp, Homo sapien
gatgagcgtcgctgttctagctcta

SEQ ID NO: 2491175 - DNA, 25 bp, Homo sapien
cgctgttctagctctaagtgttggc

SEQ ID NO: 2491176 - DNA, 25 bp, Homo sapien
gcgtcgctgttctagctctaagtgt

SEQ ID NO: 2491177 - DNA, 25 bp, Homo sapien
ggcaatgtgccccactcaggcaata

SEQ ID NO: 2491178 - DNA, 25 bp, Homo sapien
caatgtgccccactcaggcaataca

SEQ ID NO: 2491179 - DNA, 25 bp, Homo sapien
tgtcagggggcaatgtgccccactc

SEQ ID NO: 2491180 - DNA, 25 bp, Homo sapien
gtgccccactcaggcaatacatggg

SEQ ID NO: 2491181 - DNA, 25 bp, Homo sapien
tctttatctcgtaaatgggtgtcat

SEQ ID NO: 2491182 - DNA, 25 bp, Homo sapien
tggagtactgccgtgatggacttaa

SEQ ID NO: 2491183 - DNA, 25 bp, Homo sapien
tccatttaagctgactgggaaacag

SEQ ID NO: 2491184 - DNA, 25 bp, Homo sapien
ggtgtaagagcagtccattttccat

SEQ ID NO: 2491185 - DNA, 25 bp, Homo sapien
ggcaccttctagtgagccctgggat

SEQ ID NO: 2491186 - DNA, 25 bp, Homo sapien
gaaagatcagtttgggcaccttcta

SEQ ID NO: 2491187 - DNA, 25 bp, Homo sapien
ggtgaaagatcagtttgggcacctt

SEQ ID NO: 2491188 - DNA, 25 bp, Homo sapien
cagtttgggcaccttctagtgagcc

SEQ ID NO: 2491189 - DNA, 25 bp, Homo sapien
tggttgttcagacgagacccatgcc

SEQ ID NO: 2491190 - DNA, 25 bp, Homo sapien
cctggttgttcagacgagacccatg

SEQ ID NO: 2491191 - DNA, 25 bp, Homo sapien
gttgttcagacgagacccatgcctt

SEQ ID NO: 2491192 - DNA, 25 bp, Homo sapien
ggttgttcagacgagacccatgcct

SEQ ID NO: 2491193 - DNA, 25 bp, Homo sapien
catcaacctcttgtctgaatccttg

SEQ ID NO: 2491194 - DNA, 25 bp, Homo sapien
tctaaggggattgtctgggagttct

SEQ ID NO: 2491195 - DNA, 25 bp, Homo sapien
gggagaagtatccatctaaggggat

SEQ ID NO: 2491196 - DNA, 25 bp, Homo sapien
aagggtctgggcacttgattgaagt

SEQ ID NO: 2491197 - DNA, 25 bp, Homo sapien
gaggatgcttgggttagatctttct

SEQ ID NO: 2491198 - DNA, 25 bp, Homo sapien
aagaccaatgagactgtcacgtcct

SEQ ID NO: 2491199 - DNA, 25 bp, Homo sapien
ccaatgagactgtcacgtccttcat

SEQ ID NO: 2491200 - DNA, 25 bp, Homo sapien
tagatctttcttcagtaaagaccaa

SEQ ID NO: 2491201 - DNA, 25 bp, Homo sapien
attttatcacaaggctttggacttc

SEQ ID NO: 2491202 - DNA, 25 bp, Homo sapien
gacatccgatgacagtctttccatt

SEQ ID NO: 2491203 - DNA, 25 bp, Homo sapien
ccttcttggccagacatccgatgac

SEQ ID NO: 2491204 - DNA, 25 bp, Homo sapien
atcacaaggctttggacttcagtca

SEQ ID NO: 2491205 - DNA, 25 bp, Homo sapien
tgaggcagtgcagaccctgatttgt

SEQ ID NO: 2491206 - DNA, 25 bp, Homo sapien
ctgaggcagtgcagaccctgatttg

SEQ ID NO: 2491207 - DNA, 25 bp, Homo sapien
ggtgacagtcaattgtagtggtccc

SEQ ID NO: 2491208 - DNA, 25 bp, Homo sapien
tgctctcattctcatatacaggata

SEQ ID NO: 2491209 - DNA, 25 bp, Homo sapien
gatgtgctgtgtagccagcctgatc

SEQ ID NO: 2491210 - DNA, 25 bp, Homo sapien
tagtggtccctattctgctctcatt

SEQ ID NO: 2491211 - DNA, 25 bp, Homo sapien
catcatttttgccaaaccaggtttt

SEQ ID NO: 2491212 - DNA, 25 bp, Homo sapien
tcctaacgtcctctggccacaggtt

SEQ ID NO: 2491213 - DNA, 25 bp, Homo sapien
ttctgcatcatttttgccaaaccag

SEQ ID NO: 2491214 - DNA, 25 bp, Homo sapien
caggttttcctcctaacgtcctctg

SEQ ID NO: 2491215 - DNA, 25 bp, Homo sapien
tttttccagtcgagaagcctgagcc

SEQ ID NO: 2491216 - DNA, 25 bp, Homo sapien
tattcttttgttcaccagctggtcc

SEQ ID NO: 2491217 - DNA, 25 bp, Homo sapien
tagtctcggcattcaggtgtgcaga

SEQ ID NO: 2491218 - DNA, 25 bp, Homo sapien
catttatgctgctggcgtctggtga

SEQ ID NO: 2491219 - DNA, 25 bp, Homo sapien
tgaatgaaggtcatgggagcataga

SEQ ID NO: 2491220 - DNA, 25 bp, Homo sapien
aatgaaggtcatgggagcatagagc

SEQ ID NO: 2491221 - DNA, 25 bp, Homo sapien
gaatgaaggtcatgggagcatagag

SEQ ID NO: 2491222 - DNA, 25 bp, Homo sapien
tgaaggtcatgggagcatagagcag

SEQ ID NO: 2491223 - DNA, 25 bp, Homo sapien
cttcgatgtaaggtgatgctgtgcc

SEQ ID NO: 2491224 - DNA, 25 bp, Homo sapien
gagaggcagattcgttgaatctgtc

SEQ ID NO: 2491225 - DNA, 25 bp, Homo sapien
atgctgtgcctacggggatgaaaga

SEQ ID NO: 2491226 - DNA, 25 bp, Homo sapien
agcttcccagaatacacctgggccc

SEQ ID NO: 2491227 - DNA, 25 bp, Homo sapien
tgaggttatttttagtcctgattaa

SEQ ID NO: 2491228 - DNA, 25 bp, Homo sapien
ttggaagagacatgacagctgggct

SEQ ID NO: 2491229 - DNA, 25 bp, Homo sapien
tatttggaagagacatgacagctgg

SEQ ID NO: 2491230 - DNA, 25 bp, Homo sapien
ttatttggaagagacatgacagctg

SEQ ID NO: 2491231 - DNA, 25 bp, Homo sapien
gtcaaagccgacatcttcatagcaa

SEQ ID NO: 2491232 - DNA, 25 bp, Homo sapien
catcttcatagcaaaaccgtgctct

SEQ ID NO: 2491233 - DNA, 25 bp, Homo sapien
tcttcatagcaaaaccgtgctctcc

SEQ ID NO: 2491234 - DNA, 25 bp, Homo sapien
caggtcaaagccgacatcttcatag

SEQ ID NO: 2491235 - DNA, 25 bp, Homo sapien
ttctgtggcactggtgtcagctttg

SEQ ID NO: 2491236 - DNA, 25 bp, Homo sapien
cagcgggttgcattttctgtggcac

SEQ ID NO: 2491237 - DNA, 25 bp, Homo sapien
tttctgtggcactggtgtcagcttt

SEQ ID NO: 2491238 - DNA, 25 bp, Homo sapien
gagagggcagcgggttgcattttct

SEQ ID NO: 2491239 - DNA, 25 bp, Homo sapien
gccggtgagtggagggagaaactgc

SEQ ID NO: 2491240 - DNA, 25 bp, Homo sapien
ccggtgagtggagggagaaactgct

SEQ ID NO: 2491241 - DNA, 25 bp, Homo sapien
gagccggtgagtggagggagaaact

SEQ ID NO: 2491242 - DNA, 25 bp, Homo sapien
tggagccggtgagtggagggagaaa

SEQ ID NO: 2491243 - DNA, 25 bp, Homo sapien
tttgggtagtcactctggattgatg

SEQ ID NO: 2491244 - DNA, 25 bp, Homo sapien
catgtgttgctattatgtgagaaaa

SEQ ID NO: 2491245 - DNA, 25 bp, Homo sapien
tgatttgggagcagtgtcatgtgtt

SEQ ID NO: 2491246 - DNA, 25 bp, Homo sapien
catactgatcttcataaaaccgtct

SEQ ID NO: 2491247 - DNA, 25 bp, Homo sapien
tgatagtgattgaagtgctaactcc

SEQ ID NO: 2491248 - DNA, 25 bp, Homo sapien
gagatttgcagaggagttcatgcaa

SEQ ID NO: 2491249 - DNA, 25 bp, Homo sapien
gaagtgctaactcctaagagatttg

SEQ ID NO: 2491250 - DNA, 25 bp, Homo sapien
gatttgcagaggagttcatgcaagg

SEQ ID NO: 2491251 - DNA, 25 bp, Homo sapien
tatgttccatcccaagccttatgag

SEQ ID NO: 2491252 - DNA, 25 bp, Homo sapien
gaggtgcagcatctgtataaccgaa

SEQ ID NO: 2491253 - DNA, 25 bp, Homo sapien
taggtttaccggagccacataagtg

SEQ ID NO: 2491254 - DNA, 25 bp, Homo sapien
cataagtgagagctaccattggcct

SEQ ID NO: 2491255 - DNA, 25 bp, Homo sapien
ctaagccctcagtacggtagtccat

SEQ ID NO: 2491256 - DNA, 25 bp, Homo sapien
cttcccgatatcttcctgctatgtc

SEQ ID NO: 2491257 - DNA, 25 bp, Homo sapien
gctcctaagccctcagtacggtagt

SEQ ID NO: 2491258 - DNA, 25 bp, Homo sapien
tcctaagccctcagtacggtagtcc

SEQ ID NO: 2491259 - DNA, 25 bp, Homo sapien
taaaatgaacgagccagtgcttgaa

SEQ ID NO: 2491260 - DNA, 25 bp, Homo sapien
cagagcaggccctatggatccagct

SEQ ID NO: 2491261 - DNA, 25 bp, Homo sapien
cataggtagcgatggtaactgccca

SEQ ID NO: 2491262 - DNA, 25 bp, Homo sapien
aactgaaactttccgtgctgttggg

SEQ ID NO: 2491263 - DNA, 25 bp, Homo sapien
cctctcccctaccaaaggtctgttg

SEQ ID NO: 2491264 - DNA, 25 bp, Homo sapien
caaaggtctgttggggcaactccca

SEQ ID NO: 2491265 - DNA, 25 bp, Homo sapien
tgtgtcagagacacctggatcccac

SEQ ID NO: 2491266 - DNA, 25 bp, Homo sapien
gcaactcccagagggaatccaacat

SEQ ID NO: 2491267 - DNA, 25 bp, Homo sapien
ttaggcaaatgtagctgtgaacgtt

SEQ ID NO: 2491268 - DNA, 25 bp, Homo sapien
gcccttgatttaggcaaatgtagct

SEQ ID NO: 2491269 - DNA, 25 bp, Homo sapien
tgatttaggcaaatgtagctgtgaa

SEQ ID NO: 2491270 - DNA, 25 bp, Homo sapien
gtgcccttgatttaggcaaatgtag

SEQ ID NO: 2491271 - DNA, 25 bp, Homo sapien
gaaaacacgatgatgagtatttcaa

SEQ ID NO: 2491272 - DNA, 25 bp, Homo sapien
caccctcgcaatgatggccttttct

SEQ ID NO: 2491273 - DNA, 25 bp, Homo sapien
ttcaggccaagtggatccttctgcc

SEQ ID NO: 2491274 - DNA, 25 bp, Homo sapien
ttctcttccaccctcgcaatgatgg

SEQ ID NO: 2491275 - DNA, 25 bp, Homo sapien
tcataggtctgatggtatcgacggg

SEQ ID NO: 2491276 - DNA, 25 bp, Homo sapien
gaaagtgcacagtcacacacctcac

SEQ ID NO: 2491277 - DNA, 25 bp, Homo sapien
gagggcagcccgtatttagaaagtg

SEQ ID NO: 2491278 - DNA, 25 bp, Homo sapien
tcgacgggttcctattgttccaaca

SEQ ID NO: 2491279 - DNA, 25 bp, Homo sapien
gagtcagtgcacactacaggctggt

SEQ ID NO: 2491280 - DNA, 25 bp, Homo sapien
ctgcaggtgcccgaggattgctggg

SEQ ID NO: 2491281 - DNA, 25 bp, Homo sapien
tcagtgcacactacaggctggtgta

SEQ ID NO: 2491282 - DNA, 25 bp, Homo sapien
cacactacaggctggtgtatgtgca

SEQ ID NO: 2491283 - DNA, 25 bp, Homo sapien
tcctaaagtacaaggaccttcagaa

SEQ ID NO: 2491284 - DNA, 25 bp, Homo sapien
ttcctaaagtacaaggaccttcaga

SEQ ID NO: 2491285 - DNA, 25 bp, Homo sapien
ctaaagtacaaggaccttcagaatc

SEQ ID NO: 2491286 - DNA, 25 bp, Homo sapien
cctaaagtacaaggaccttcagaat

SEQ ID NO: 2491287 - DNA, 25 bp, Homo sapien
tgaaagggattcagacaattcaaca

SEQ ID NO: 2491288 - DNA, 25 bp, Homo sapien
gaaagggattcagacaattcaacat

SEQ ID NO: 2491289 - DNA, 25 bp, Homo sapien
ctgaaagggattcagacaattcaac

SEQ ID NO: 2491290 - DNA, 25 bp, Homo sapien
caaatttgggatgcgtgtcctttgg

SEQ ID NO: 2491291 - DNA, 25 bp, Homo sapien
aatttgggatgcgtgtcctttggct

SEQ ID NO: 2491292 - DNA, 25 bp, Homo sapien
taacatagcccttggtcacccactt

SEQ ID NO: 2491293 - DNA, 25 bp, Homo sapien
gggcctgtaacatagcccttggtca

SEQ ID NO: 2491294 - DNA, 25 bp, Homo sapien
ggaggctcgacttcttcttgctgta

SEQ ID NO: 2491295 - DNA, 25 bp, Homo sapien
cttcttgctgtatccaaggactgac

SEQ ID NO: 2491296 - DNA, 25 bp, Homo sapien
cttgggaggctcgacttcttcttgc

SEQ ID NO: 2491297 - DNA, 25 bp, Homo sapien
aggactgactgaaacaacacaggca

SEQ ID NO: 2491298 - DNA, 25 bp, Homo sapien
gacctttacaaagtctgccctgaga

SEQ ID NO: 2491299 - DNA, 25 bp, Homo sapien
ggagcagcaacggtcacatttagga

SEQ ID NO: 2491300 - DNA, 25 bp, Homo sapien
tgccctgagaggaaatctcctgttc

SEQ ID NO: 2491301 - DNA, 25 bp, Homo sapien
gttgctgaaatgcacacactgatga

SEQ ID NO: 2491302 - DNA, 25 bp, Homo sapien
tgagtagccttaacctttcgggctg

SEQ ID NO: 2491303 - DNA, 25 bp, Homo sapien
cctttcgggctgctggctgttgctg

SEQ ID NO: 2491304 - DNA, 25 bp, Homo sapien
tgcagcaaaagcatctggcattctt

SEQ ID NO: 2491305 - DNA, 25 bp, Homo sapien
ctgcagcaaaagcatctggcattct

SEQ ID NO: 2491306 - DNA, 25 bp, Homo sapien
ctttaggaggacagagtgtgggggt

SEQ ID NO: 2491307 - DNA, 25 bp, Homo sapien
tttaggaggacagagtgtgggggtg

SEQ ID NO: 2491308 - DNA, 25 bp, Homo sapien
ttaggaggacagagtgtgggggtgt

SEQ ID NO: 2491309 - DNA, 25 bp, Homo sapien
tctctaaccactaccatgtgcagtg

SEQ ID NO: 2491310 - DNA, 25 bp, Homo sapien
tcagtgtgacagtaatctctaacca

SEQ ID NO: 2491311 - DNA, 25 bp, Homo sapien
tcacagtagggcttccaatgacagc

SEQ ID NO: 2491312 - DNA, 25 bp, Homo sapien
gatttcttcccattaaggacgtgat

SEQ ID NO: 2491313 - DNA, 25 bp, Homo sapien
gatgtctgaatcctgatctccgcct

SEQ ID NO: 2491314 - DNA, 25 bp, Homo sapien
catctctgatgccagacaacagcca

SEQ ID NO: 2491315 - DNA, 25 bp, Homo sapien
tgagcacacccttcgtcaggggagc

SEQ ID NO: 2491316 - DNA, 25 bp, Homo sapien
caggggagcagtccctattttccac

SEQ ID NO: 2491317 - DNA, 25 bp, Homo sapien
gactttctgagaattcgtaattgac

SEQ ID NO: 2491318 - DNA, 25 bp, Homo sapien
gacttgggcaggtatatgaagcagc

SEQ ID NO: 2491319 - DNA, 25 bp, Homo sapien
cttgactttctgagaattcgtaatt

SEQ ID NO: 2491320 - DNA, 25 bp, Homo sapien
aattcgtaattgacttgggcaggta

SEQ ID NO: 2491321 - DNA, 25 bp, Homo sapien
gagacgttttgcaatgcccgaggga

SEQ ID NO: 2491322 - DNA, 25 bp, Homo sapien
ttttcgaggaggatgctcctggaaa

SEQ ID NO: 2491323 - DNA, 25 bp, Homo sapien
cagaaccctgtttgtgctgcggacg

SEQ ID NO: 2491324 - DNA, 25 bp, Homo sapien
ctgtctctttttcgaggaggatgct

SEQ ID NO: 2491325 - DNA, 25 bp, Homo sapien
gtagctcattgacaccaaatgctac

SEQ ID NO: 2491326 - DNA, 25 bp, Homo sapien
aatgctacacctttgctttcaccaa

SEQ ID NO: 2491327 - DNA, 25 bp, Homo sapien
gtcttcacctggcatgggcctcagt

SEQ ID NO: 2491328 - DNA, 25 bp, Homo sapien
gagagagaaggcacctctgtagctc

SEQ ID NO: 2491329 - DNA, 25 bp, Homo sapien
ttgactgccgtggtcccagtagctt

SEQ ID NO: 2491330 - DNA, 25 bp, Homo sapien
tcagtgccaattgtctttaagatcc

SEQ ID NO: 2491331 - DNA, 25 bp, Homo sapien
cctgcacagttttatctaagatggg

SEQ ID NO: 2491332 - DNA, 25 bp, Homo sapien
tagggaaacagagggtggcattaaa

SEQ ID NO: 2491333 - DNA, 25 bp, Homo sapien
aaatgcttcccattctggcacttca

SEQ ID NO: 2491334 - DNA, 25 bp, Homo sapien
ggcactcacagcaaagaacctatca

SEQ ID NO: 2491335 - DNA, 25 bp, Homo sapien
tcacagcaaagaacctatcactaaa

SEQ ID NO: 2491336 - DNA, 25 bp, Homo sapien
caaagaacctatcactaaaatgctt

SEQ ID NO: 2491337 - DNA, 25 bp, Homo sapien
tggagttgccatgtaataatataaa

SEQ ID NO: 2491338 - DNA, 25 bp, Homo sapien
tacagagtactgcattggagttgcc

SEQ ID NO: 2491339 - DNA, 25 bp, Homo sapien
atcagggtgctttattacagagtac

SEQ ID NO: 2491340 - DNA, 25 bp, Homo sapien
cccgaaatgtgtctggtcccaaagt

SEQ ID NO: 2491341 - DNA, 25 bp, Homo sapien
cacggtaaggagtggttccaatttg

SEQ ID NO: 2491342 - DNA, 25 bp, Homo sapien
cgggatccacagatctctcctttct

SEQ ID NO: 2491343 - DNA, 25 bp, Homo sapien
caatttggggtgctcacgggatcca

SEQ ID NO: 2491344 - DNA, 25 bp, Homo sapien
ggtcttgctcttttgaggtacacca

SEQ ID NO: 2491345 - DNA, 25 bp, Homo sapien
gatcataacggtcccagaaaattca

SEQ ID NO: 2491346 - DNA, 25 bp, Homo sapien
tagcgtagctcaatccccttttgtt

SEQ ID NO: 2491347 - DNA, 25 bp, Homo sapien
gcatctccagtgttagcgtagctca

SEQ ID NO: 2491348 - DNA, 25 bp, Homo sapien
tgtcttgcggatctgaagccaccct

SEQ ID NO: 2491349 - DNA, 25 bp, Homo sapien
tgtctctaaagtcttcatgtctccc

SEQ ID NO: 2491350 - DNA, 25 bp, Homo sapien
atttctgcagtggttcctgtctcta

SEQ ID NO: 2491351 - DNA, 25 bp, Homo sapien
tctaaagtcttcatgtctccctcca

SEQ ID NO: 2491352 - DNA, 25 bp, Homo sapien
tctctaaagtcttcatgtctccctc

SEQ ID NO: 2491353 - DNA, 25 bp, Homo sapien
ttatttgagaaacatggaaaaactg

SEQ ID NO: 2491354 - DNA, 25 bp, Homo sapien
gtttcttgatgacaccagagtttta

SEQ ID NO: 2491355 - DNA, 25 bp, Homo sapien
ttgatgacaccagagttttatttga

SEQ ID NO: 2491356 - DNA, 25 bp, Homo sapien
atttgagaaacatggaaaaactggc

SEQ ID NO: 2491357 - DNA, 25 bp, Homo sapien
tactaaagtctcctctggtgccctg

SEQ ID NO: 2491358 - DNA, 25 bp, Homo sapien
tagctttggagctactaaagtctcc

SEQ ID NO: 2491359 - DNA, 25 bp, Homo sapien
agttcttgggttattggacagtcat

SEQ ID NO: 2491360 - DNA, 25 bp, Homo sapien
ggacagtcatgaatagctttggagc

SEQ ID NO: 2491361 - DNA, 25 bp, Homo sapien
agactccctccgaggcagcatggtt

SEQ ID NO: 2491362 - DNA, 25 bp, Homo sapien
tggtccacactgcagggcttcagac

SEQ ID NO: 2491363 - DNA, 25 bp, Homo sapien
gtagggccgcccttccagccatggt

SEQ ID NO: 2491364 - DNA, 25 bp, Homo sapien
aacccatgccattctcagcaccaga

SEQ ID NO: 2491365 - DNA, 25 bp, Homo sapien
gggtaacgattcatgacaggtaccc

SEQ ID NO: 2491366 - DNA, 25 bp, Homo sapien
gtttggggtaacgattcatgacagg

SEQ ID NO: 2491367 - DNA, 25 bp, Homo sapien
aacgattcatgacaggtacccaggg

SEQ ID NO: 2491368 - DNA, 25 bp, Homo sapien
tcatgcagttcgtttggggtaacga

SEQ ID NO: 2491369 - DNA, 25 bp, Homo sapien
cattgctgagccttactgggttgaa

SEQ ID NO: 2491370 - DNA, 25 bp, Homo sapien
taacctgaaagatacgacattgctg

SEQ ID NO: 2491371 - DNA, 25 bp, Homo sapien
cgtcccctgatgctggtaacctgaa

SEQ ID NO: 2491372 - DNA, 25 bp, Homo sapien
taatttggcgcagatgacagatgcc

SEQ ID NO: 2491373 - DNA, 25 bp, Homo sapien
taataccacacgtctgttgcttgca

SEQ ID NO: 2491374 - DNA, 25 bp, Homo sapien
ggttcatgttatatcctccccaggg

SEQ ID NO: 2491375 - DNA, 25 bp, Homo sapien
catgcacaggtgtagcatgtcctgc

SEQ ID NO: 2491376 - DNA, 25 bp, Homo sapien
gacattctaaaagccggcaaagcag

SEQ ID NO: 2491377 - DNA, 25 bp, Homo sapien
agaaagatttctgcctgtttggaca

SEQ ID NO: 2491378 - DNA, 25 bp, Homo sapien
taagtaagcttatatatgcacagag

SEQ ID NO: 2491379 - DNA, 25 bp, Homo sapien
ttagaagaaccccagagatagcatt

SEQ ID NO: 2491380 - DNA, 25 bp, Homo sapien
tctatatcaatttcaaggcacgtga

SEQ ID NO: 2491381 - DNA, 25 bp, Homo sapien
tctgtttcttgcaccaccagcgtgt

SEQ ID NO: 2491382 - DNA, 25 bp, Homo sapien
gcaagacactgtagattaacggtag

SEQ ID NO: 2491383 - DNA, 25 bp, Homo sapien
ttaacggtagaggagaaattgtgcc

SEQ ID NO: 2491384 - DNA, 25 bp, Homo sapien
tgctacagcagtggaacaacagagt

SEQ ID NO: 2491385 - DNA, 25 bp, Homo sapien
gctgcaactgtgtgtactgaaaata

SEQ ID NO: 2491386 - DNA, 25 bp, Homo sapien
tatcgagcaacaacttagacacgtg

SEQ ID NO: 2491387 - DNA, 25 bp, Homo sapien
aaaactgatctggtctcggtaaagg

SEQ ID NO: 2491388 - DNA, 25 bp, Homo sapien
gacacgtgactgtaatatgctgcaa

SEQ ID NO: 2491389 - DNA, 25 bp, Homo sapien
tataagtatgcagattccaagtgga

SEQ ID NO: 2491390 - DNA, 25 bp, Homo sapien
tcctttgtcaattagcctggagagg

SEQ ID NO: 2491391 - DNA, 25 bp, Homo sapien
cctggagagggtttagaatgcaaaa

SEQ ID NO: 2491392 - DNA, 25 bp, Homo sapien
gatagctctatatcagggtcttgag

SEQ ID NO: 2491393 - DNA, 25 bp, Homo sapien
cattcccatgtgtctcaaggaagct

SEQ ID NO: 2491394 - DNA, 25 bp, Homo sapien
aaaatgactgccagtgtgttgcaca

SEQ ID NO: 2491395 - DNA, 25 bp, Homo sapien
tcatctgtcgttaaggagcagcaag

SEQ ID NO: 2491396 - DNA, 25 bp, Homo sapien
taccccttacatagaaagctccttg

SEQ ID NO: 2491397 - DNA, 25 bp, Homo sapien
taatttgtaagagagtgacttctca

SEQ ID NO: 2491398 - DNA, 25 bp, Homo sapien
gttaaattttactgactgtagcagc

SEQ ID NO: 2491399 - DNA, 25 bp, Homo sapien
gaaaatatagaatgcctgccaggga

SEQ ID NO: 2491400 - DNA, 25 bp, Homo sapien
tgtagcagcaggtaaatctcttaaa

SEQ ID NO: 2491401 - DNA, 25 bp, Homo sapien
actgcaaggtgagtagaactgagtt

SEQ ID NO: 2491402 - DNA, 25 bp, Homo sapien
taactgcaaggtgagtagaactgag

SEQ ID NO: 2491403 - DNA, 25 bp, Homo sapien
ctctgctaactgcaaggtgagtaga

SEQ ID NO: 2491404 - DNA, 25 bp, Homo sapien
tgctaactgcaaggtgagtagaact

SEQ ID NO: 2491405 - DNA, 25 bp, Homo sapien
gggataaggctacgcaggattctga

SEQ ID NO: 2491406 - DNA, 25 bp, Homo sapien
ccaggaagccattgatgcatgtaca

SEQ ID NO: 2491407 - DNA, 25 bp, Homo sapien
agaaggccacacagaccatttggag

SEQ ID NO: 2491408 - DNA, 25 bp, Homo sapien
tcatttgatggaagaatggtcctcc

SEQ ID NO: 2491409 - DNA, 25 bp, Homo sapien
agtttcctcagggttcagcagaaaa

SEQ ID NO: 2491410 - DNA, 25 bp, Homo sapien
tggctgcctagaaccctgccttagg

SEQ ID NO: 2491411 - DNA, 25 bp, Homo sapien
ccttgaatgcttggtagtggctgcc

SEQ ID NO: 2491412 - DNA, 25 bp, Homo sapien
gcagtaggcattccacaactgtttg

SEQ ID NO: 2491413 - DNA, 25 bp, Homo sapien
aatatgaagagcacagatgcttttg

SEQ ID NO: 2491414 - DNA, 25 bp, Homo sapien
atatgaagagcacagatgcttttgt

SEQ ID NO: 2491415 - DNA, 25 bp, Homo sapien
tttgaaatactcacagttcctaata

SEQ ID NO: 2491416 - DNA, 25 bp, Homo sapien
acttttgaaatactcacagttccta

SEQ ID NO: 2491417 - DNA, 25 bp, Homo sapien
cttttgaaatactcacagttcctaa

SEQ ID NO: 2491418 - DNA, 25 bp, Homo sapien
ttaacttttgaaatactcacagttc

SEQ ID NO: 2491419 - DNA, 25 bp, Homo sapien
gaaagtaagcccttttccagtcatg

SEQ ID NO: 2491420 - DNA, 25 bp, Homo sapien
tctagtctggctgatgaaagtaagc

SEQ ID NO: 2491421 - DNA, 25 bp, Homo sapien
gagtactctaccaagtgattcatga

SEQ ID NO: 2491422 - DNA, 25 bp, Homo sapien
tgttccccttaatcctgtgggatgg

SEQ ID NO: 2491423 - DNA, 25 bp, Homo sapien
gatgtggagtaacagtgcacagtga

SEQ ID NO: 2491424 - DNA, 25 bp, Homo sapien
tctgctctctcaagtcttagcccct

SEQ ID NO: 2491425 - DNA, 25 bp, Homo sapien
cctccgattctcttagccttgacag

SEQ ID NO: 2491426 - DNA, 25 bp, Homo sapien
gccttgacagcccaccactgccttc

SEQ ID NO: 2491427 - DNA, 25 bp, Homo sapien
gtcttcaagctgatggaattctgtc

SEQ ID NO: 2491428 - DNA, 25 bp, Homo sapien
ttagataaggacagggatgggcagt

SEQ ID NO: 2491429 - DNA, 25 bp, Homo sapien
cagggatgggcagtgcttcctgcca

SEQ ID NO: 2491430 - DNA, 25 bp, Homo sapien
ctgtcttcaagctgatggaattctg

SEQ ID NO: 2491431 - DNA, 25 bp, Homo sapien
agttccgctgaatcctctgcaaaag

SEQ ID NO: 2491432 - DNA, 25 bp, Homo sapien
taaagttggctcaccttagatgggc

SEQ ID NO: 2491433 - DNA, 25 bp, Homo sapien
gaactgttaggtcgtccactgggct

SEQ ID NO: 2491434 - DNA, 25 bp, Homo sapien
gaaggcacggaagaccatactctgg

SEQ ID NO: 2491435 - DNA, 25 bp, Homo sapien
gcaatgcactttccgtgggtttcga

SEQ ID NO: 2491436 - DNA, 25 bp, Homo sapien
aagcaagtcttgaacccaggatcat

SEQ ID NO: 2491437 - DNA, 25 bp, Homo sapien
gggtttcgattaactccccacatga

SEQ ID NO: 2491438 - DNA, 25 bp, Homo sapien
ggtgtgggcatttatcagacaccca

SEQ ID NO: 2491439 - DNA, 25 bp, Homo sapien
ttcccttcaaaacaagaatatatgc

SEQ ID NO: 2491440 - DNA, 25 bp, Homo sapien
tcaaaacaagaatatatgcctacta

SEQ ID NO: 2491441 - DNA, 25 bp, Homo sapien
atttataagtgagaggtttgaaggg

SEQ ID NO: 2491442 - DNA, 25 bp, Homo sapien
atatatgcctactatatccctctgt

SEQ ID NO: 2491443 - DNA, 25 bp, Homo sapien
ggggagggcatcaatcatcaaatca

SEQ ID NO: 2491444 - DNA, 25 bp, Homo sapien
atgaaaattcctgaaggcattgacc

SEQ ID NO: 2491445 - DNA, 25 bp, Homo sapien
gatgaaaattcctgaaggcattgac

SEQ ID NO: 2491446 - DNA, 25 bp, Homo sapien
tggggagggcatcaatcatcaaatc

SEQ ID NO: 2491447 - DNA, 25 bp, Homo sapien
gtccagtggctgcaatcctgggatg

SEQ ID NO: 2491448 - DNA, 25 bp, Homo sapien
tctctctggtcccactgaagtgctt

SEQ ID NO: 2491449 - DNA, 25 bp, Homo sapien
agtggctgcaatcctgggatgcaca

SEQ ID NO: 2491450 - DNA, 25 bp, Homo sapien
tcctcgagttgctggagtccagtgg

SEQ ID NO: 2491451 - DNA, 25 bp, Homo sapien
caagaatgaaccctagctgatggga

SEQ ID NO: 2491452 - DNA, 25 bp, Homo sapien
tgaagtggttcccaagaatgaaccc

SEQ ID NO: 2491453 - DNA, 25 bp, Homo sapien
gaagacaagttgaagtggttcccaa

SEQ ID NO: 2491454 - DNA, 25 bp, Homo sapien
ctagctgatgggactcttgcatttc

SEQ ID NO: 2491455 - DNA, 25 bp, Homo sapien
gagtttggtcgtagccctgttcctg

SEQ ID NO: 2491456 - DNA, 25 bp, Homo sapien
caaagacactccttcgtctgagaga

SEQ ID NO: 2491457 - DNA, 25 bp, Homo sapien
gatactgacacgataggcaaatggg

SEQ ID NO: 2491458 - DNA, 25 bp, Homo sapien
ggactttttgagactgccgtaacag

SEQ ID NO: 2491459 - DNA, 25 bp, Homo sapien
agtgtgtctggaattggtgggtttt

SEQ ID NO: 2491460 - DNA, 25 bp, Homo sapien
aggatagtgtgtctggaattggtgg

SEQ ID NO: 2491461 - DNA, 25 bp, Homo sapien
caggatagtgtgtctggaattggtg

SEQ ID NO: 2491462 - DNA, 25 bp, Homo sapien
cacactttgagtagcgagggcttct

SEQ ID NO: 2491463 - DNA, 25 bp, Homo sapien
gcttctagagattcaggccctcagc

SEQ ID NO: 2491464 - DNA, 25 bp, Homo sapien
cctgagtgagagcacctggttggca

SEQ ID NO: 2491465 - DNA, 25 bp, Homo sapien
tctgtgcagctggagtgaatcccta

SEQ ID NO: 2491466 - DNA, 25 bp, Homo sapien
gtcccaggagcctggtcagccacat

SEQ ID NO: 2491467 - DNA, 25 bp, Homo sapien
tgtgcagatgtggaagtcccaggag

SEQ ID NO: 2491468 - DNA, 25 bp, Homo sapien
agtcccaggagcctggtcagccaca

SEQ ID NO: 2491469 - DNA, 25 bp, Homo sapien
gcagatgtggaagtcccaggagcct

SEQ ID NO: 2491470 - DNA, 25 bp, Homo sapien
ttgtcacatgccctttcttatctgg

SEQ ID NO: 2491471 - DNA, 25 bp, Homo sapien
gatttacatggcaagttctccaata

SEQ ID NO: 2491472 - DNA, 25 bp, Homo sapien
tccccaggtatttagttcatccaca

SEQ ID NO: 2491473 - DNA, 25 bp, Homo sapien
tgagagatgatgaactccccaggta

SEQ ID NO: 2491474 - DNA, 25 bp, Homo sapien
caaaatgcaactaatttgataatac

SEQ ID NO: 2491475 - DNA, 25 bp, Homo sapien
gaggatccagggtaatatcaaggaa

SEQ ID NO: 2491476 - DNA, 25 bp, Homo sapien
caactaatttgataataccagagca

SEQ ID NO: 2491477 - DNA, 25 bp, Homo sapien
tagttctagtggatgtcatcttcaa

SEQ ID NO: 2491478 - DNA, 25 bp, Homo sapien
ctctggtgcctttctcctaagcctc

SEQ ID NO: 2491479 - DNA, 25 bp, Homo sapien
tctctggtgcctttctcctaagcct

SEQ ID NO: 2491480 - DNA, 25 bp, Homo sapien
tctggtgcctttctcctaagcctcc

SEQ ID NO: 2491481 - DNA, 25 bp, Homo sapien
ctgcaccaagcgagatgatgaaaat

SEQ ID NO: 2491482 - DNA, 25 bp, Homo sapien
tgcaccaagcgagatgatgaaaatg

SEQ ID NO: 2491483 - DNA, 25 bp, Homo sapien
atctgcaatgaagaagatatactgt

SEQ ID NO: 2491484 - DNA, 25 bp, Homo sapien
tgaagaagatatactgtacacatac

SEQ ID NO: 2491485 - DNA, 25 bp, Homo sapien
tcacccaagaggagtggcgagctgt

SEQ ID NO: 2491486 - DNA, 25 bp, Homo sapien
gcgagctgtccacaaaggcagcatt

SEQ ID NO: 2491487 - DNA, 25 bp, Homo sapien
tgggccacattcacagatgtgcact

SEQ ID NO: 2491488 - DNA, 25 bp, Homo sapien
agaccctgctggctaggatgtaggt

SEQ ID NO: 2491489 - DNA, 25 bp, Homo sapien
cttgctcagtgcgggcttggtaact

SEQ ID NO: 2491490 - DNA, 25 bp, Homo sapien
tgctcagtgcgggcttggtaactaa

SEQ ID NO: 2491491 - DNA, 25 bp, Homo sapien
gtcttgctcagtgcgggcttggtaa

SEQ ID NO: 2491492 - DNA, 25 bp, Homo sapien
tgtcttgctcagtgcgggcttggta

SEQ ID NO: 2491493 - DNA, 25 bp, Homo sapien
tgtttgtgctttacctatcgctccc

SEQ ID NO: 2491494 - DNA, 25 bp, Homo sapien
gattctgtttgtgctttacctatcg

SEQ ID NO: 2491495 - DNA, 25 bp, Homo sapien
ctttacctatcgctccctttgaagg

SEQ ID NO: 2491496 - DNA, 25 bp, Homo sapien
ttgaaagctgattctgtttgtgctt

SEQ ID NO: 2491497 - DNA, 25 bp, Homo sapien
tgcggggaggctccggaggcctttg

SEQ ID NO: 2491498 - DNA, 25 bp, Homo sapien
ggaggcctttgctttagcccagcac

SEQ ID NO: 2491499 - DNA, 25 bp, Homo sapien
ttagaacatgtatgatcagtgcggg

SEQ ID NO: 2491500 - DNA, 25 bp, Homo sapien
cagattagaacatgtatgatcagtg

SEQ ID NO: 2491501 - DNA, 25 bp, Homo sapien
gctgtctgtggacttccactggctc

SEQ ID NO: 2491502 - DNA, 25 bp, Homo sapien
gaatggctgtctgtggacttccact

SEQ ID NO: 2491503 - DNA, 25 bp, Homo sapien
tggctgtctgtggacttccactggc

SEQ ID NO: 2491504 - DNA, 25 bp, Homo sapien
catgaatggctgtctgtggacttcc

SEQ ID NO: 2491505 - DNA, 25 bp, Homo sapien
tgaaatcagacaggcccacagagac

SEQ ID NO: 2491506 - DNA, 25 bp, Homo sapien
ataaaactctttgaacaacagagct

SEQ ID NO: 2491507 - DNA, 25 bp, Homo sapien
aatcagacaggcccacagagactgc

SEQ ID NO: 2491508 - DNA, 25 bp, Homo sapien
ttaataaaactctttgaacaacaga

SEQ ID NO: 2491509 - DNA, 25 bp, Homo sapien
ttgtcagtctgcaccaaactctgca

SEQ ID NO: 2491510 - DNA, 25 bp, Homo sapien
tgcatcaccaatacaaattccaggg

SEQ ID NO: 2491511 - DNA, 25 bp, Homo sapien
ccgacaatttgaggctctccatctg

SEQ ID NO: 2491512 - DNA, 25 bp, Homo sapien
gggagtttcaaatctgccgacaatt

SEQ ID NO: 2491513 - DNA, 25 bp, Homo sapien
cttttcataggaagaaaacacagca

SEQ ID NO: 2491514 - DNA, 25 bp, Homo sapien
ttcattctctgccacgaacaacatg

SEQ ID NO: 2491515 - DNA, 25 bp, Homo sapien
tctctgccacgaacaacatgtgaat

SEQ ID NO: 2491516 - DNA, 25 bp, Homo sapien
tctgccacgaacaacatgtgaatca

SEQ ID NO: 2491517 - DNA, 25 bp, Homo sapien
ccacgaacaacatgtgaatcaagcc

SEQ ID NO: 2491518 - DNA, 25 bp, Homo sapien
gatgcccacggtctacctggtgctg

SEQ ID NO: 2491519 - DNA, 25 bp, Homo sapien
ggtattctgggtgcaagaccaacaa

SEQ ID NO: 2491520 - DNA, 25 bp, Homo sapien
cgtcatgtaatgttaggtggtgcca

SEQ ID NO: 2491521 - DNA, 25 bp, Homo sapien
tgcctttcaggagaaatcaccactg

SEQ ID NO: 2491522 - DNA, 25 bp, Homo sapien
ccatgagcgcttcttcaaccactga

SEQ ID NO: 2491523 - DNA, 25 bp, Homo sapien
tgtctctgtgcatatccatgagcgc

SEQ ID NO: 2491524 - DNA, 25 bp, Homo sapien
acgtcacacttggtaaatggtctcc

SEQ ID NO: 2491525 - DNA, 25 bp, Homo sapien
tagccaaatatcgagcaacgtcaca

SEQ ID NO: 2491526 - DNA, 25 bp, Homo sapien
agcatttctacctgggattctgtga

SEQ ID NO: 2491527 - DNA, 25 bp, Homo sapien
ttctgtgatacaggttaacttctga

SEQ ID NO: 2491528 - DNA, 25 bp, Homo sapien
gttaacttctgaaacgactcagttc

SEQ ID NO: 2491529 - DNA, 25 bp, Homo sapien
gcatttctacctgggattctgtgat

SEQ ID NO: 2491530 - DNA, 25 bp, Homo sapien
ctttaagaggctaaacttggaagag

SEQ ID NO: 2491531 - DNA, 25 bp, Homo sapien
tttaagaggctaaacttggaagagc

SEQ ID NO: 2491532 - DNA, 25 bp, Homo sapien
ttaagaggctaaacttggaagagcc

SEQ ID NO: 2491533 - DNA, 25 bp, Homo sapien
gccctcagcagaagaacacctgtct

SEQ ID NO: 2491534 - DNA, 25 bp, Homo sapien
tgccaggacggaggctttcttccac

SEQ ID NO: 2491535 - DNA, 25 bp, Homo sapien
tgcaacctgagactccgcagagctc

SEQ ID NO: 2491536 - DNA, 25 bp, Homo sapien
tgtgccaggacggaggctttcttcc

SEQ ID NO: 2491537 - DNA, 25 bp, Homo sapien
gaagcatattgagcggcccatggaa

SEQ ID NO: 2491538 - DNA, 25 bp, Homo sapien
cataaatactgggaagcatattgag

SEQ ID NO: 2491539 - DNA, 25 bp, Homo sapien
tctgctgtaaagtaggcagggacac

SEQ ID NO: 2491540 - DNA, 25 bp, Homo sapien
tactgggaagcatattgagcggccc

SEQ ID NO: 2491541 - DNA, 25 bp, Homo sapien
agcagctgctcccacagaacagtct

SEQ ID NO: 2491542 - DNA, 25 bp, Homo sapien
ggcagcagctgctcccacagaacag

SEQ ID NO: 2491543 - DNA, 25 bp, Homo sapien
tttcctctttgtcctgggcagcagc

SEQ ID NO: 2491544 - DNA, 25 bp, Homo sapien
ctgttttcctctttgtcctgggcag

SEQ ID NO: 2491545 - DNA, 25 bp, Homo sapien
aagcagactggatcctggtttccag

SEQ ID NO: 2491546 - DNA, 25 bp, Homo sapien
gcagactggatcctggtttccaggt

SEQ ID NO: 2491547 - DNA, 25 bp, Homo sapien
aaagcagactggatcctggtttcca

SEQ ID NO: 2491548 - DNA, 25 bp, Homo sapien
agcagactggatcctggtttccagg

SEQ ID NO: 2491549 - DNA, 25 bp, Homo sapien
tcagggacagacttgattgggcctg

SEQ ID NO: 2491550 - DNA, 25 bp, Homo sapien
gctgaagagcgaccaggaatcacac

SEQ ID NO: 2491551 - DNA, 25 bp, Homo sapien
tgaagagcgaccaggaatcacactt

SEQ ID NO: 2491552 - DNA, 25 bp, Homo sapien
tggctgaagagcgaccaggaatcac

SEQ ID NO: 2491553 - DNA, 25 bp, Homo sapien
ttttttacactaccagtgtggcatg

SEQ ID NO: 2491554 - DNA, 25 bp, Homo sapien
tggcatgtgtaacatgacctggaca

SEQ ID NO: 2491555 - DNA, 25 bp, Homo sapien
acttcaggagtctggctctcagagg

SEQ ID NO: 2491556 - DNA, 25 bp, Homo sapien
ccacttcaggagtctggctctcaga

SEQ ID NO: 2491557 - DNA, 25 bp, Homo sapien
acttccttgtcatgcccttgcggtt

SEQ ID NO: 2491558 - DNA, 25 bp, Homo sapien
ccaagtcttgagaggtccaataaat

SEQ ID NO: 2491559 - DNA, 25 bp, Homo sapien
catatcacttcaccagactctgcta

SEQ ID NO: 2491560 - DNA, 25 bp, Homo sapien
tagtttgaacctgacctcagaaatg

SEQ ID NO: 2491561 - DNA, 25 bp, Homo sapien
cttatcctcagctgtaatctggtga

SEQ ID NO: 2491562 - DNA, 25 bp, Homo sapien
gcttatcctcagctgtaatctggtg

SEQ ID NO: 2491563 - DNA, 25 bp, Homo sapien
ccctgcttatcctcagctgtaatct

SEQ ID NO: 2491564 - DNA, 25 bp, Homo sapien
ctgcttatcctcagctgtaatctgg

SEQ ID NO: 2491565 - DNA, 25 bp, Homo sapien
tacctgataatgaggtaaatctctt

SEQ ID NO: 2491566 - DNA, 25 bp, Homo sapien
gacaaagcagagtgaaatacctgat

SEQ ID NO: 2491567 - DNA, 25 bp, Homo sapien
tgttggtcactctggataaaaccct

SEQ ID NO: 2491568 - DNA, 25 bp, Homo sapien
ctccattggtaaggacaaagcagag

SEQ ID NO: 2491569 - DNA, 25 bp, Homo sapien
aattcagcacaagggtcaagaagcc

SEQ ID NO: 2491570 - DNA, 25 bp, Homo sapien
gaagtctgtgcaactgaatgaagtg

SEQ ID NO: 2491571 - DNA, 25 bp, Homo sapien
gggagaaatccgtgaaaaagctgtg

SEQ ID NO: 2491572 - DNA, 25 bp, Homo sapien
ggctcgcaatgttgggcatgttaac

SEQ ID NO: 2491573 - DNA, 25 bp, Homo sapien
ctcctttcgtgtcagtttccctcat

SEQ ID NO: 2491574 - DNA, 25 bp, Homo sapien
tatcacatcatgttgaggctcttcc

SEQ ID NO: 2491575 - DNA, 25 bp, Homo sapien
tctcctttcgtgtcagtttccctca

SEQ ID NO: 2491576 - DNA, 25 bp, Homo sapien
ctgtagcccaaataatagacatctc

SEQ ID NO: 2491577 - DNA, 25 bp, Homo sapien
tgcactgtagcccaaataatagaca

SEQ ID NO: 2491578 - DNA, 25 bp, Homo sapien
ttcttctgcactgtagcccaaataa

SEQ ID NO: 2491579 - DNA, 25 bp, Homo sapien
ttctgcactgtagcccaaataatag

SEQ ID NO: 2491580 - DNA, 25 bp, Homo sapien
aaggcaatgattctggttgaaggct

SEQ ID NO: 2491581 - DNA, 25 bp, Homo sapien
aattcgtgcacgctggaaaaggcaa

SEQ ID NO: 2491582 - DNA, 25 bp, Homo sapien
ttcgtgcacgctggaaaaggcaatg

SEQ ID NO: 2491583 - DNA, 25 bp, Homo sapien
atgaattcgtgcacgctggaaaagg

SEQ ID NO: 2491584 - DNA, 25 bp, Homo sapien
tgcccctattagctaaggatcagaa

SEQ ID NO: 2491585 - DNA, 25 bp, Homo sapien
tcagtaacaaccacaacagagcagc

SEQ ID NO: 2491586 - DNA, 25 bp, Homo sapien
caagggccaaaatgttcgattacag

SEQ ID NO: 2491587 - DNA, 25 bp, Homo sapien
agttatgttttgaggtgcccagcaa

SEQ ID NO: 2491588 - DNA, 25 bp, Homo sapien
ccttgcaggctccgggtccactgaa

SEQ ID NO: 2491589 - DNA, 25 bp, Homo sapien
caggctccgggtccactgaaactaa

SEQ ID NO: 2491590 - DNA, 25 bp, Homo sapien
gacccttgcaggctccgggtccact

SEQ ID NO: 2491591 - DNA, 25 bp, Homo sapien
tgcaggctccgggtccactgaaact

SEQ ID NO: 2491592 - DNA, 25 bp, Homo sapien
acagactagccctgattctgaggcc

SEQ ID NO: 2491593 - DNA, 25 bp, Homo sapien
ggaatccacagatgatgttatacag

SEQ ID NO: 2491594 - DNA, 25 bp, Homo sapien
gagttggaatccacagatgatgtta

SEQ ID NO: 2491595 - DNA, 25 bp, Homo sapien
gatgatgttatacagactagccctg

SEQ ID NO: 2491596 - DNA, 25 bp, Homo sapien
cacttgcttcacgaagggtatcacc

SEQ ID NO: 2491597 - DNA, 25 bp, Homo sapien
ggtatcacctagagcccaagacctg

SEQ ID NO: 2491598 - DNA, 25 bp, Homo sapien
cactctgatcttgtggatagatgga

SEQ ID NO: 2491599 - DNA, 25 bp, Homo sapien
tacgaaatgcttaggttgtctgcca

SEQ ID NO: 2491600 - DNA, 25 bp, Homo sapien
tggcctgttctatatcatggtcagc

SEQ ID NO: 2491601 - DNA, 25 bp, Homo sapien
tgttctatatcatggtcagccagta

SEQ ID NO: 2491602 - DNA, 25 bp, Homo sapien
tcctaagggtttggcctgttctata

SEQ ID NO: 2491603 - DNA, 25 bp, Homo sapien
gggtttggcctgttctatatcatgg

SEQ ID NO: 2491604 - DNA, 25 bp, Homo sapien
tcaatggtcccagagtaggagtcat

SEQ ID NO: 2491605 - DNA, 25 bp, Homo sapien
gagtaggagtcatccctgactcctt

SEQ ID NO: 2491606 - DNA, 25 bp, Homo sapien
tcccagagtaggagtcatccctgac

SEQ ID NO: 2491607 - DNA, 25 bp, Homo sapien
tggtcccagagtaggagtcatccct

SEQ ID NO: 2491608 - DNA, 25 bp, Homo sapien
gggattttcagatccacagcaatgc

SEQ ID NO: 2491609 - DNA, 25 bp, Homo sapien
tcagatccacagcaatgcctgggtg

SEQ ID NO: 2491610 - DNA, 25 bp, Homo sapien
gggtggtgtggggattttcagatcc

SEQ ID NO: 2491611 - DNA, 25 bp, Homo sapien
tggtgtggggattttcagatccaca

SEQ ID NO: 2491612 - DNA, 25 bp, Homo sapien
ctatagaatgcaatgctttactgac

SEQ ID NO: 2491613 - DNA, 25 bp, Homo sapien
cttttcaattaatcttggttgtgct

SEQ ID NO: 2491614 - DNA, 25 bp, Homo sapien
gggctgtgttctctggcgatgctcc

SEQ ID NO: 2491615 - DNA, 25 bp, Homo sapien
aatcttggttgtgctggcctagtgg

SEQ ID NO: 2491616 - DNA, 25 bp, Homo sapien
ggctgtgttctctggcgatgctcca

SEQ ID NO: 2491617 - DNA, 25 bp, Homo sapien
tgtttggttgcatgtcctccattcc

SEQ ID NO: 2491618 - DNA, 25 bp, Homo sapien
ctctggtttttcctggcagcggctg

SEQ ID NO: 2491619 - DNA, 25 bp, Homo sapien
tccattccccaagaggagctgaaac

SEQ ID NO: 2491620 - DNA, 25 bp, Homo sapien
gcagcggctgctctcttaattgaag

SEQ ID NO: 2491621 - DNA, 25 bp, Homo sapien
atgattgtagatttactgagtcctc

SEQ ID NO: 2491622 - DNA, 25 bp, Homo sapien
cttgggtgtttatagcagtgggaaa

SEQ ID NO: 2491623 - DNA, 25 bp, Homo sapien
ttgcatatgttggagacagaaaatc

SEQ ID NO: 2491624 - DNA, 25 bp, Homo sapien
tctccaatgcctaatatactgactg

SEQ ID NO: 2491625 - DNA, 25 bp, Homo sapien
accttctgcacaccaagcgtggatt

SEQ ID NO: 2491626 - DNA, 25 bp, Homo sapien
gccagcaaaaactgtagtcatttgg

SEQ ID NO: 2491627 - DNA, 25 bp, Homo sapien
ccagcaaaaactgtagtcatttggg

SEQ ID NO: 2491628 - DNA, 25 bp, Homo sapien
tgccagcaaaaactgtagtcatttg

SEQ ID NO: 2491629 - DNA, 25 bp, Homo sapien
tgagggccacagacaaataagctac

SEQ ID NO: 2491630 - DNA, 25 bp, Homo sapien
ccagttgtgtttaacgggtatatga

SEQ ID NO: 2491631 - DNA, 25 bp, Homo sapien
cagttgtgtttaacgggtatatgaa

SEQ ID NO: 2491632 - DNA, 25 bp, Homo sapien
tcagtcttttattgtcagatttcat

SEQ ID NO: 2491633 - DNA, 25 bp, Homo sapien
cccagttgtgtttaacgggtatatg

SEQ ID NO: 2491634 - DNA, 25 bp, Homo sapien
ttttgaatcttcctatccaggctgt

SEQ ID NO: 2491635 - DNA, 25 bp, Homo sapien
caggctgttcttattgttgtgatac

SEQ ID NO: 2491636 - DNA, 25 bp, Homo sapien
ttgaatcttcctatccaggctgttc

SEQ ID NO: 2491637 - DNA, 25 bp, Homo sapien
cctatccaggctgttcttattgttg

SEQ ID NO: 2491638 - DNA, 25 bp, Homo sapien
tgtcaatattcagtactaaagtctc

SEQ ID NO: 2491639 - DNA, 25 bp, Homo sapien
catggacagcactcttttatacttg

SEQ ID NO: 2491640 - DNA, 25 bp, Homo sapien
cactgggtaccaatgcatggacagc

SEQ ID NO: 2491641 - DNA, 25 bp, Homo sapien
tataatcgtgtggtagcaagggaaa

SEQ ID NO: 2491642 - DNA, 25 bp, Homo sapien
tcttctatcccatttgcattcaggg

SEQ ID NO: 2491643 - DNA, 25 bp, Homo sapien
gttactctgagtttggtccatgaca

SEQ ID NO: 2491644 - DNA, 25 bp, Homo sapien
tttgccccatatgaggctctcttct

SEQ ID NO: 2491645 - DNA, 25 bp, Homo sapien
ggaaagcttttatctgccaccggcc

SEQ ID NO: 2491646 - DNA, 25 bp, Homo sapien
tctgctttgctcttcctgagcaatg

SEQ ID NO: 2491647 - DNA, 25 bp, Homo sapien
tgagcaatgtggggcccatgccttt

SEQ ID NO: 2491648 - DNA, 25 bp, Homo sapien
ctgagcaatgtggggcccatgcctt

SEQ ID NO: 2491649 - DNA, 25 bp, Homo sapien
ctttgctcttcctgagcaatgtggg

SEQ ID NO: 2491650 - DNA, 25 bp, Homo sapien
ttcggtgtctctcccaaaattctcc

SEQ ID NO: 2491651 - DNA, 25 bp, Homo sapien
tcttcggtgtctctcccaaaattct

SEQ ID NO: 2491652 - DNA, 25 bp, Homo sapien
catttcttcggtgtctctcccaaaa

SEQ ID NO: 2491653 - DNA, 25 bp, Homo sapien
ttcttcggtgtctctcccaaaattc

SEQ ID NO: 2491654 - DNA, 25 bp, Homo sapien
gatagtagccaaagggatatacatc

SEQ ID NO: 2491655 - DNA, 25 bp, Homo sapien
tatgaaccaaaggtataacagtggc

SEQ ID NO: 2491656 - DNA, 25 bp, Homo sapien
aaacaaggaagatggactgagcgtg

SEQ ID NO: 2491657 - DNA, 25 bp, Homo sapien
taacagtggctaccctcgaagctaa

SEQ ID NO: 2491658 - DNA, 25 bp, Homo sapien
gagccatgctcagggagtgaccatt

SEQ ID NO: 2491659 - DNA, 25 bp, Homo sapien
tgctctcaggaagctgcactatggc

SEQ ID NO: 2491660 - DNA, 25 bp, Homo sapien
gactagtgctccaactcttactcca

SEQ ID NO: 2491661 - DNA, 25 bp, Homo sapien
cagctcctgtcaagtttctcctggc

SEQ ID NO: 2491662 - DNA, 25 bp, Homo sapien
cgcaggctgggatttaaatggttct

SEQ ID NO: 2491663 - DNA, 25 bp, Homo sapien
ggttctgtttcaccagccaacttca

SEQ ID NO: 2491664 - DNA, 25 bp, Homo sapien
tgttgcctatgggatcaaatacgag

SEQ ID NO: 2491665 - DNA, 25 bp, Homo sapien
caaatacgagcttcgcaggctggga

SEQ ID NO: 2491666 - DNA, 25 bp, Homo sapien
tcaaatattgcaggcaggacaacca

SEQ ID NO: 2491667 - DNA, 25 bp, Homo sapien
gttggcccctgagataaagccttgt

SEQ ID NO: 2491668 - DNA, 25 bp, Homo sapien
aaagcactggctcagattgcaggca

SEQ ID NO: 2491669 - DNA, 25 bp, Homo sapien
catattttcaaaccggcagtaactg

SEQ ID NO: 2491670 - DNA, 25 bp, Homo sapien
ttactgggatgctcttcgacctcga

SEQ ID NO: 2491671 - DNA, 25 bp, Homo sapien
gctttgcgttggacattcaagtcag

SEQ ID NO: 2491672 - DNA, 25 bp, Homo sapien
ggcgacagttcagccatcacttgga

SEQ ID NO: 2491673 - DNA, 25 bp, Homo sapien
ggatgagttcatgtattgctttgcg

SEQ ID NO: 2491674 - DNA, 25 bp, Homo sapien
agacaatttggctctgcattatttt

SEQ ID NO: 2491675 - DNA, 25 bp, Homo sapien
ttcgaagtcatctcgtttctttttg

SEQ ID NO: 2491676 - DNA, 25 bp, Homo sapien
aagtcatctcgtttctttttgttgc

SEQ ID NO: 2491677 - DNA, 25 bp, Homo sapien
gaagtcatctcgtttctttttgttg

SEQ ID NO: 2491678 - DNA, 25 bp, Homo sapien
cattatccgctacatctgaatgacc

SEQ ID NO: 2491679 - DNA, 25 bp, Homo sapien
gagttccattatccgctacatctga

SEQ ID NO: 2491680 - DNA, 25 bp, Homo sapien
tccattatccgctacatctgaatga

SEQ ID NO: 2491681 - DNA, 25 bp, Homo sapien
aaagagttccattatccgctacatc

SEQ ID NO: 2491682 - DNA, 25 bp, Homo sapien
gccaagagaacccaaaacgatgcag

SEQ ID NO: 2491683 - DNA, 25 bp, Homo sapien
gaacccaaaacgatgcagagctgaa

SEQ ID NO: 2491684 - DNA, 25 bp, Homo sapien
acatatgggtcctggcagtaacagc

SEQ ID NO: 2491685 - DNA, 25 bp, Homo sapien
gctgaaaagccaagatataacttgt

SEQ ID NO: 2491686 - DNA, 25 bp, Homo sapien
tgtatcaagctgatcaggtccaaag

SEQ ID NO: 2491687 - DNA, 25 bp, Homo sapien
gaagttgaaatcagtagttcttgta

SEQ ID NO: 2491688 - DNA, 25 bp, Homo sapien
tccaaaggacttaactgatctttct

SEQ ID NO: 2491689 - DNA, 25 bp, Homo sapien
gagaattaagccaaagaagttgaaa

SEQ ID NO: 2491690 - DNA, 25 bp, Homo sapien
cagaggtgtcaagccaattctgacc

SEQ ID NO: 2491691 - DNA, 25 bp, Homo sapien
gacagaggtgtcaagccaattctga

SEQ ID NO: 2491692 - DNA, 25 bp, Homo sapien
ggtgtcaagccaattctgacctaac

SEQ ID NO: 2491693 - DNA, 25 bp, Homo sapien
aagccaattctgacctaacttccca

SEQ ID NO: 2491694 - DNA, 25 bp, Homo sapien
tctcttcagcccagcgtctcaatgc

SEQ ID NO: 2491695 - DNA, 25 bp, Homo sapien
agcccagcgtctcaatgcactcagg

SEQ ID NO: 2491696 - DNA, 25 bp, Homo sapien
aatgcactcagggacgcttctgcct

SEQ ID NO: 2491697 - DNA, 25 bp, Homo sapien
tctcaatgcactcagggacgcttct

SEQ ID NO: 2491698 - DNA, 25 bp, Homo sapien
agagcaaaggcttcaagtgatggcc

SEQ ID NO: 2491699 - DNA, 25 bp, Homo sapien
aagagcaaaggcttcaagtgatggc

SEQ ID NO: 2491700 - DNA, 25 bp, Homo sapien
ggcttgccttaaccctacaggattc

SEQ ID NO: 2491701 - DNA, 25 bp, Homo sapien
tgagcaggtcctgaataggcaagtg

SEQ ID NO: 2491702 - DNA, 25 bp, Homo sapien
ccctcttattttgcaggagtgggaa

SEQ ID NO: 2491703 - DNA, 25 bp, Homo sapien
tggagcactccccagtctaggctgg

SEQ ID NO: 2491704 - DNA, 25 bp, Homo sapien
agctgtatccaccatgacctcttga

SEQ ID NO: 2491705 - DNA, 25 bp, Homo sapien
gaacaatccacaagcctcacgaact

SEQ ID NO: 2491706 - DNA, 25 bp, Homo sapien
ccttcgtgtgcatctgaacaatcca

SEQ ID NO: 2491707 - DNA, 25 bp, Homo sapien
ggcttccctcccttcgagctgtatc

SEQ ID NO: 2491708 - DNA, 25 bp, Homo sapien
ctagcaccctctgtcaagagccaca

SEQ ID NO: 2491709 - DNA, 25 bp, Homo sapien
tagcaccctctgtcaagagccacag

SEQ ID NO: 2491710 - DNA, 25 bp, Homo sapien
actggtatctgtgggcaggttaaaa

SEQ ID NO: 2491711 - DNA, 25 bp, Homo sapien
gacgggagctctgaaaccattttga

SEQ ID NO: 2491712 - DNA, 25 bp, Homo sapien
tgaaacctgaacatcgtggcttgac

SEQ ID NO: 2491713 - DNA, 25 bp, Homo sapien
tccatctccggaaaaaatgacggga

SEQ ID NO: 2491714 - DNA, 25 bp, Homo sapien
gacaccaagtaatgggacagctctt

SEQ ID NO: 2491715 - DNA, 25 bp, Homo sapien
taatgggacagctcttaagctgtcc

SEQ ID NO: 2491716 - DNA, 25 bp, Homo sapien
tctggagacaccaagtaatgggaca

SEQ ID NO: 2491717 - DNA, 25 bp, Homo sapien
ccaagtaatgggacagctcttaagc

SEQ ID NO: 2491718 - DNA, 25 bp, Homo sapien
ctgccagtggtgccgaatcctggaa

SEQ ID NO: 2491719 - DNA, 25 bp, Homo sapien
tttggccttcgtggaagtccagcac

SEQ ID NO: 2491720 - DNA, 25 bp, Homo sapien
agctgccagtggtgccgaatcctgg

SEQ ID NO: 2491721 - DNA, 25 bp, Homo sapien
gctgccagtggtgccgaatcctgga

SEQ ID NO: 2491722 - DNA, 25 bp, Homo sapien
tattctgaatcacctaacatgccgt

SEQ ID NO: 2491723 - DNA, 25 bp, Homo sapien
gttaagtactaagttcacactgggc

SEQ ID NO: 2491724 - DNA, 25 bp, Homo sapien
tgcattccagaaatctgtcattccc

SEQ ID NO: 2491725 - DNA, 25 bp, Homo sapien
tacacgagttaattcaggttacata

SEQ ID NO: 2491726 - DNA, 25 bp, Homo sapien
ggaaagaagaatatccagttcactg

SEQ ID NO: 2491727 - DNA, 25 bp, Homo sapien
gaagaatatccagttcactgatggc

SEQ ID NO: 2491728 - DNA, 25 bp, Homo sapien
gctttgtagattcctttgtttccaa

SEQ ID NO: 2491729 - DNA, 25 bp, Homo sapien
ttcactgatggctttgtagattcct

SEQ ID NO: 2491730 - DNA, 25 bp, Homo sapien
tcatctctctagctgatgaagcaca

SEQ ID NO: 2491731 - DNA, 25 bp, Homo sapien
tctctagctgatgaagcacaggaaa

SEQ ID NO: 2491732 - DNA, 25 bp, Homo sapien
atctctctagctgatgaagcacagg

SEQ ID NO: 2491733 - DNA, 25 bp, Homo sapien
tttcatcctggtaatggatttcatc

SEQ ID NO: 2491734 - DNA, 25 bp, Homo sapien
accagtccgctttgtgcaagtgaat

SEQ ID NO: 2491735 - DNA, 25 bp, Homo sapien
agtatctcgagcagctggcttgtag

SEQ ID NO: 2491736 - DNA, 25 bp, Homo sapien
agcagcaggctagtatctcgagcag

SEQ ID NO: 2491737 - DNA, 25 bp, Homo sapien
gtgcaagtgaattctcaaaccctat

SEQ ID NO: 2491738 - DNA, 25 bp, Homo sapien
tcactcacaccaaaggcacatgcta

SEQ ID NO: 2491739 - DNA, 25 bp, Homo sapien
agagaggttttgtccctcactcaca

SEQ ID NO: 2491740 - DNA, 25 bp, Homo sapien
gatgtgcaatgcatcccacagcagg

SEQ ID NO: 2491741 - DNA, 25 bp, Homo sapien
tgggaaacttggatgtgcaatgcat

SEQ ID NO: 2491742 - DNA, 25 bp, Homo sapien
tccacaagcctacttgtttcttaaa

SEQ ID NO: 2491743 - DNA, 25 bp, Homo sapien
cactcataaaatgcctcatgtactc

SEQ ID NO: 2491744 - DNA, 25 bp, Homo sapien
tgggttacggagcactttagttgac

SEQ ID NO: 2491745 - DNA, 25 bp, Homo sapien
gcactttagttgaccacaagaaaaa

SEQ ID NO: 2491746 - DNA, 25 bp, Homo sapien
tactctgggctgaaatttgggttac

SEQ ID NO: 2491747 - DNA, 25 bp, Homo sapien
ggattgcaataaggctcccaaccca

SEQ ID NO: 2491748 - DNA, 25 bp, Homo sapien
gattgcaataaggctcccaacccaa

SEQ ID NO: 2491749 - DNA, 25 bp, Homo sapien
atctgcaagctacaactgcaggagg

SEQ ID NO: 2491750 - DNA, 25 bp, Homo sapien
aaggattgcaataaggctcccaacc

SEQ ID NO: 2491751 - DNA, 25 bp, Homo sapien
gaaaagcttcaatattccccacaga

SEQ ID NO: 2491752 - DNA, 25 bp, Homo sapien
cccacagaggcaactcgactaacat

SEQ ID NO: 2491753 - DNA, 25 bp, Homo sapien
gaaagcatacttggaccccaaccaa

SEQ ID NO: 2491754 - DNA, 25 bp, Homo sapien
gactaacattgcacagattctggct

SEQ ID NO: 2491755 - DNA, 25 bp, Homo sapien
catagaaatgtgatcacttttacct

SEQ ID NO: 2491756 - DNA, 25 bp, Homo sapien
cactggtctttattgctgtggaatt

SEQ ID NO: 2491757 - DNA, 25 bp, Homo sapien
tcatagaaatgtgatcacttttacc

SEQ ID NO: 2491758 - DNA, 25 bp, Homo sapien
gtctttattgctgtggaatttttca

SEQ ID NO: 2491759 - DNA, 25 bp, Homo sapien
acaggtttctaggatcaaatgcaca

SEQ ID NO: 2491760 - DNA, 25 bp, Homo sapien
aaacaggtttctaggatcaaatgca

SEQ ID NO: 2491761 - DNA, 25 bp, Homo sapien
tcttacatgctgacttctaaacagg

SEQ ID NO: 2491762 - DNA, 25 bp, Homo sapien
tacatgctgacttctaaacaggttt

SEQ ID NO: 2491763 - DNA, 25 bp, Homo sapien
tgcagttgaccaaaaacgtcttcca

SEQ ID NO: 2491764 - DNA, 25 bp, Homo sapien
gacagaagctgttcttgaaattgac

SEQ ID NO: 2491765 - DNA, 25 bp, Homo sapien
tatgaaagtcctccacaaagcgtat

SEQ ID NO: 2491766 - DNA, 25 bp, Homo sapien
tttcttgcagccttgcaattgcagt

SEQ ID NO: 2491767 - DNA, 25 bp, Homo sapien
aataatcgtatattttttatgcggt

SEQ ID NO: 2491768 - DNA, 25 bp, Homo sapien
taataatcgtatattttttatgcgg

SEQ ID NO: 2491769 - DNA, 25 bp, Homo sapien
gatatagagagcgtcaacagcttgg

SEQ ID NO: 2491770 - DNA, 25 bp, Homo sapien
gagccatgctgctttgatatagaga

SEQ ID NO: 2491771 - DNA, 25 bp, Homo sapien
tggcaatggcaagagacagagtgac

SEQ ID NO: 2491772 - DNA, 25 bp, Homo sapien
cagagtgactaacagcaacccacac

SEQ ID NO: 2491773 - DNA, 25 bp, Homo sapien
ttcaccccactcagcgtgtgtcact

SEQ ID NO: 2491774 - DNA, 25 bp, Homo sapien
tcaccccactcagcgtgtgtcactc

SEQ ID NO: 2491775 - DNA, 25 bp, Homo sapien
cccactcagcgtgtgtcactcacag

SEQ ID NO: 2491776 - DNA, 25 bp, Homo sapien
accccactcagcgtgtgtcactcac

SEQ ID NO: 2491777 - DNA, 25 bp, Homo sapien
caggtccatttggagggagggcaaa

SEQ ID NO: 2491778 - DNA, 25 bp, Homo sapien
tatttgaccaaacagattatgaggg

SEQ ID NO: 2491779 - DNA, 25 bp, Homo sapien
atatttgaccaaacagattatgagg

SEQ ID NO: 2491780 - DNA, 25 bp, Homo sapien
gggcaggtccatttggagggagggc

SEQ ID NO: 2491781 - DNA, 25 bp, Homo sapien
tgcattgcccacacaagctgtgctc

SEQ ID NO: 2491782 - DNA, 25 bp, Homo sapien
gctactggccgtttcccactgcatt

SEQ ID NO: 2491783 - DNA, 25 bp, Homo sapien
tgggtccttgggtccagaaagccat

SEQ ID NO: 2491784 - DNA, 25 bp, Homo sapien
tgtgctctagccacacggacttgtg

SEQ ID NO: 2491785 - DNA, 25 bp, Homo sapien
tattagccttacactcaagtagcaa

SEQ ID NO: 2491786 - DNA, 25 bp, Homo sapien
tatggaaacatgaagctatttaggg

SEQ ID NO: 2491787 - DNA, 25 bp, Homo sapien
gggttcatttggaatccacccatca

SEQ ID NO: 2491788 - DNA, 25 bp, Homo sapien
tctgtgtatagaacaccagttacaa

SEQ ID NO: 2491789 - DNA, 25 bp, Homo sapien
ccagttctccaattgctttgatctc

SEQ ID NO: 2491790 - DNA, 25 bp, Homo sapien
aatccagttctccaattgctttgat

SEQ ID NO: 2491791 - DNA, 25 bp, Homo sapien
tccagttctccaattgctttgatct

SEQ ID NO: 2491792 - DNA, 25 bp, Homo sapien
caaatccagttctccaattgctttg

SEQ ID NO: 2491793 - DNA, 25 bp, Homo sapien
ttttggggtgagtcactattgttag

SEQ ID NO: 2491794 - DNA, 25 bp, Homo sapien
gtcactattgttagtctaagccttc

SEQ ID NO: 2491795 - DNA, 25 bp, Homo sapien
tcactattgttagtctaagccttcc

SEQ ID NO: 2491796 - DNA, 25 bp, Homo sapien
ctccggttttggggtgagtcactat

SEQ ID NO: 2491797 - DNA, 25 bp, Homo sapien
ctctggatatgcaggtcatcacctt

SEQ ID NO: 2491798 - DNA, 25 bp, Homo sapien
ctataaaacaataacaagcataact

SEQ ID NO: 2491799 - DNA, 25 bp, Homo sapien
tataaaacaataacaagcataacta

SEQ ID NO: 2491800 - DNA, 25 bp, Homo sapien
acatgtgcttagcctgttgctgagc

SEQ ID NO: 2491801 - DNA, 25 bp, Homo sapien
tgtgcttagcctgttgctgagcctg

SEQ ID NO: 2491802 - DNA, 25 bp, Homo sapien
tgcttagcctgttgctgagcctggc

SEQ ID NO: 2491803 - DNA, 25 bp, Homo sapien
catgtgcttagcctgttgctgagcc

SEQ ID NO: 2491804 - DNA, 25 bp, Homo sapien
tcctgcatataaggctggaacctat

SEQ ID NO: 2491805 - DNA, 25 bp, Homo sapien
gaacctatcagattgagggaacagc

SEQ ID NO: 2491806 - DNA, 25 bp, Homo sapien
cagattgagggaacagcacttcttc

SEQ ID NO: 2491807 - DNA, 25 bp, Homo sapien
gcttcatcagatagcagcgctcact

SEQ ID NO: 2491808 - DNA, 25 bp, Homo sapien
ccgtggaacagtttctccccaatga

SEQ ID NO: 2491809 - DNA, 25 bp, Homo sapien
tttctccccaatgagacgaacgtct

SEQ ID NO: 2491810 - DNA, 25 bp, Homo sapien
ccaatgagacgaacgtctgtgttgt

SEQ ID NO: 2491811 - DNA, 25 bp, Homo sapien
actgactccgtggaacagtttctcc

SEQ ID NO: 2491812 - DNA, 25 bp, Homo sapien
tgcagtgggagctgatgggcgcagc

SEQ ID NO: 2491813 - DNA, 25 bp, Homo sapien
ggctgctggaagttggacttgtcaa

SEQ ID NO: 2491814 - DNA, 25 bp, Homo sapien
ggaagttggacttgtcaagcctgca

SEQ ID NO: 2491815 - DNA, 25 bp, Homo sapien
ccttagccagcatgaaggtgcggtt

SEQ ID NO: 2491816 - DNA, 25 bp, Homo sapien
gctcacagatttctgcagggcggcc

SEQ ID NO: 2491817 - DNA, 25 bp, Homo sapien
gacaattctaactcgagcaactggt

SEQ ID NO: 2491818 - DNA, 25 bp, Homo sapien
agacaattctaactcgagcaactgg

SEQ ID NO: 2491819 - DNA, 25 bp, Homo sapien
tgcagacaattctaactcgagcaac

SEQ ID NO: 2491820 - DNA, 25 bp, Homo sapien
caattctaactcgagcaactggtga

SEQ ID NO: 2491821 - DNA, 25 bp, Homo sapien
gatgctagaaaatccatgactggaa

SEQ ID NO: 2491822 - DNA, 25 bp, Homo sapien
tcccaactcattgactgatgctaga

SEQ ID NO: 2491823 - DNA, 25 bp, Homo sapien
caggtaaaaagatttgtactcatca

SEQ ID NO: 2491824 - DNA, 25 bp, Homo sapien
taagacacaaatctccctagaagaa

SEQ ID NO: 2491825 - DNA, 25 bp, Homo sapien
tcagccagttatgaaaacatactcc

SEQ ID NO: 2491826 - DNA, 25 bp, Homo sapien
cagccagttatgaaaacatactcct

SEQ ID NO: 2491827 - DNA, 25 bp, Homo sapien
gactataacggccaactaatgcata

SEQ ID NO: 2491828 - DNA, 25 bp, Homo sapien
cagatcactgagactataacggcca

SEQ ID NO: 2491829 - DNA, 25 bp, Homo sapien
ccaagggggcaccagatcactgaga

SEQ ID NO: 2491830 - DNA, 25 bp, Homo sapien
ctgtgttgccactacccaagggggc

SEQ ID NO: 2491831 - DNA, 25 bp, Homo sapien
gagatgtaagtagaggccagactgc

SEQ ID NO: 2491832 - DNA, 25 bp, Homo sapien
aaggcctcctgaagcacgtcaagga

SEQ ID NO: 2491833 - DNA, 25 bp, Homo sapien
gaactttgccctgtgagcgtgggaa

SEQ ID NO: 2491834 - DNA, 25 bp, Homo sapien
tgggcgtttgaactcctttcctgag

SEQ ID NO: 2491835 - DNA, 25 bp, Homo sapien
ggatgttgcgcagtctcttttttaa

SEQ ID NO: 2491836 - DNA, 25 bp, Homo sapien
cagcatttccactctgaagatgtag

SEQ ID NO: 2491837 - DNA, 25 bp, Homo sapien
actgattggtttagacagcatttcc

SEQ ID NO: 2491838 - DNA, 25 bp, Homo sapien
gacaagggaccaagctagaaaacat

SEQ ID NO: 2491839 - DNA, 25 bp, Homo sapien
gtcactgggcattcaagtcctccga

SEQ ID NO: 2491840 - DNA, 25 bp, Homo sapien
gattgtcaccaaacgtcactgggca

SEQ ID NO: 2491841 - DNA, 25 bp, Homo sapien
ccttggtggcttcagattgtcacca

SEQ ID NO: 2491842 - DNA, 25 bp, Homo sapien
ctccgaccgtatggttagctttgcc

SEQ ID NO: 2491843 - DNA, 25 bp, Homo sapien
aacaagttttgtgaggtcgcctgcc

SEQ ID NO: 2491844 - DNA, 25 bp, Homo sapien
gaaattagcagatctttggccaaca

SEQ ID NO: 2491845 - DNA, 25 bp, Homo sapien
gattgtacaatgttgcctaagtagg

SEQ ID NO: 2491846 - DNA, 25 bp, Homo sapien
caccccggaacagccatggaagctt

SEQ ID NO: 2491847 - DNA, 25 bp, Homo sapien
ggtctccaaggccagttaggcatgg

SEQ ID NO: 2491848 - DNA, 25 bp, Homo sapien
ggccagttaggcatggcttgcagcc

SEQ ID NO: 2491849 - DNA, 25 bp, Homo sapien
aaggatatggacttggcgaagttac

SEQ ID NO: 2491850 - DNA, 25 bp, Homo sapien
cccaactacaccatttatgaaggat

SEQ ID NO: 2491851 - DNA, 25 bp, Homo sapien
ccgaagagctaaagtagtgcccaca

SEQ ID NO: 2491852 - DNA, 25 bp, Homo sapien
tggtactacaactttccgaagagct

SEQ ID NO: 2491853 - DNA, 25 bp, Homo sapien
gaagagctaaagtagtgcccacaaa

SEQ ID NO: 2491854 - DNA, 25 bp, Homo sapien
gacacctccaatggtactacaactt

SEQ ID NO: 2491855 - DNA, 25 bp, Homo sapien
ctttgactgtccatgcccacaggca

SEQ ID NO: 2491856 - DNA, 25 bp, Homo sapien
gaatgatctttgactgtccatgccc

SEQ ID NO: 2491857 - DNA, 25 bp, Homo sapien
aatgatctttgactgtccatgccca

SEQ ID NO: 2491858 - DNA, 25 bp, Homo sapien
ctgaatgatctttgactgtccatgc

SEQ ID NO: 2491859 - DNA, 25 bp, Homo sapien
ctgggtaagctgaatgtaggtcaca

SEQ ID NO: 2491860 - DNA, 25 bp, Homo sapien
tgaaactgcctctgggtaagctgaa

SEQ ID NO: 2491861 - DNA, 25 bp, Homo sapien
ctgaaactgcctctgggtaagctga

SEQ ID NO: 2491862 - DNA, 25 bp, Homo sapien
taagctgaatgtaggtcacaactga

SEQ ID NO: 2491863 - DNA, 25 bp, Homo sapien
tgagaccagaaattaacatgcgaaa

SEQ ID NO: 2491864 - DNA, 25 bp, Homo sapien
gaaacctcccatgtatgtgttttgg

SEQ ID NO: 2491865 - DNA, 25 bp, Homo sapien
aattttgagttcagaattccatggg

SEQ ID NO: 2491866 - DNA, 25 bp, Homo sapien
tttataagggctctcaaacacggat

SEQ ID NO: 2491867 - DNA, 25 bp, Homo sapien
tgcgaaaatatcacagacttggctc

SEQ ID NO: 2491868 - DNA, 25 bp, Homo sapien
aattctttgtcccacatttgtgcga

SEQ ID NO: 2491869 - DNA, 25 bp, Homo sapien
tataactgttcattaacctgttagg

SEQ ID NO: 2491870 - DNA, 25 bp, Homo sapien
tctgtaaatgagtctgccttggaaa

SEQ ID NO: 2491871 - DNA, 25 bp, Homo sapien
tagaatacactcaaagatcaaaaat

SEQ ID NO: 2491872 - DNA, 25 bp, Homo sapien
caattatcttaacactgcaaacatg

SEQ ID NO: 2491873 - DNA, 25 bp, Homo sapien
tatacatatctttcagcaaactttg

SEQ ID NO: 2491874 - DNA, 25 bp, Homo sapien
agaaacactacagcaaaggttaaag

SEQ ID NO: 2491875 - DNA, 25 bp, Homo sapien
ttagataaaggcaactcagctaggt

SEQ ID NO: 2491876 - DNA, 25 bp, Homo sapien
tactctctggataggtgaaaatcta

SEQ ID NO: 2491877 - DNA, 25 bp, Homo sapien
tatccatgacacctattacgaaagt

SEQ ID NO: 2491878 - DNA, 25 bp, Homo sapien
tgtgaagaattcaataatctaggtc

SEQ ID NO: 2491879 - DNA, 25 bp, Homo sapien
gaaaagcccggagactagaagctgc

SEQ ID NO: 2491880 - DNA, 25 bp, Homo sapien
ccagagtttgaaaagcccggagact

SEQ ID NO: 2491881 - DNA, 25 bp, Homo sapien
tccttttcttagctcgtgccagagt

SEQ ID NO: 2491882 - DNA, 25 bp, Homo sapien
gcagagcgagcagaaatctcagaca

SEQ ID NO: 2491883 - DNA, 25 bp, Homo sapien
gaaattcctcattctgagtaagcaa

SEQ ID NO: 2491884 - DNA, 25 bp, Homo sapien
gagcacacggcctatgatttcagta

SEQ ID NO: 2491885 - DNA, 25 bp, Homo sapien
gaaatcccgtcattaacagagcaca

SEQ ID NO: 2491886 - DNA, 25 bp, Homo sapien
cccgagattatattcattgccaaaa

SEQ ID NO: 2491887 - DNA, 25 bp, Homo sapien
taaaggcttcatgttgaggtaactg

SEQ ID NO: 2491888 - DNA, 25 bp, Homo sapien
ttaaaggcttcatgttgaggtaact

SEQ ID NO: 2491889 - DNA, 25 bp, Homo sapien
aaaggcttcatgttgaggtaactgc

SEQ ID NO: 2491890 - DNA, 25 bp, Homo sapien
aaggcttcatgttgaggtaactgca

SEQ ID NO: 2491891 - DNA, 25 bp, Homo sapien
gcacaattggtcccaaggagggagt

SEQ ID NO: 2491892 - DNA, 25 bp, Homo sapien
gtgctactgtcatctatctagtgga

SEQ ID NO: 2491893 - DNA, 25 bp, Homo sapien
gcaaaaagtgaacttaggtgcagca

SEQ ID NO: 2491894 - DNA, 25 bp, Homo sapien
gattccctgtatgtgtatgaataag

SEQ ID NO: 2491895 - DNA, 25 bp, Homo sapien
gaatcttcccgcaaaggcagaggat

SEQ ID NO: 2491896 - DNA, 25 bp, Homo sapien
tctaagagagccctgaattcgtcga

SEQ ID NO: 2491897 - DNA, 25 bp, Homo sapien
cattgtgctgaaactctggatctct

SEQ ID NO: 2491898 - DNA, 25 bp, Homo sapien
gaaactggaagagttgcctcagcaa

SEQ ID NO: 2491899 - DNA, 25 bp, Homo sapien
ctggagaagtcagtagggatacagc

SEQ ID NO: 2491900 - DNA, 25 bp, Homo sapien
gtagggatacagcacgactttcttt

SEQ ID NO: 2491901 - DNA, 25 bp, Homo sapien
gaagtcagtagggatacagcacgac

SEQ ID NO: 2491902 - DNA, 25 bp, Homo sapien
tcagtagggatacagcacgactttc

SEQ ID NO: 2491903 - DNA, 25 bp, Homo sapien
gatggagacactaaaacagcaccac

SEQ ID NO: 2491904 - DNA, 25 bp, Homo sapien
gcttcatcttagatggagacactaa

SEQ ID NO: 2491905 - DNA, 25 bp, Homo sapien
ggcttcatcttagatggagacacta

SEQ ID NO: 2491906 - DNA, 25 bp, Homo sapien
gaagtttctaaacaatcctgagagg

SEQ ID NO: 2491907 - DNA, 25 bp, Homo sapien
aaaataaagatgacagtttcaatta

SEQ ID NO: 2491908 - DNA, 25 bp, Homo sapien
gaaaaataaagatgacagtttcaat

SEQ ID NO: 2491909 - DNA, 25 bp, Homo sapien
aataaagatgacagtttcaattaca

SEQ ID NO: 2491910 - DNA, 25 bp, Homo sapien
ggaaaaataaagatgacagtttcaa

SEQ ID NO: 2491911 - DNA, 25 bp, Homo sapien
gatcatgatgagtcctctggattcc

SEQ ID NO: 2491912 - DNA, 25 bp, Homo sapien
gatgagtcctctggattccaccaag

SEQ ID NO: 2491913 - DNA, 25 bp, Homo sapien
ctggagtagtgagatcatgatgagt

SEQ ID NO: 2491914 - DNA, 25 bp, Homo sapien
tagtgagatcatgatgagtcctctg

SEQ ID NO: 2491915 - DNA, 25 bp, Homo sapien
ttcatcttatctgccttagatttct

SEQ ID NO: 2491916 - DNA, 25 bp, Homo sapien
tcatcttatctgccttagatttctc

SEQ ID NO: 2491917 - DNA, 25 bp, Homo sapien
ggtatggtgggagctgacacaccca

SEQ ID NO: 2491918 - DNA, 25 bp, Homo sapien
cataaaagcctgcttgcccgttttc

SEQ ID NO: 2491919 - DNA, 25 bp, Homo sapien
tctccccgggctgtttctgtacgtc

SEQ ID NO: 2491920 - DNA, 25 bp, Homo sapien
agccagccgccttctaacgggtatg

SEQ ID NO: 2491921 - DNA, 25 bp, Homo sapien
tgaactcgcttcctataaaactcag

SEQ ID NO: 2491922 - DNA, 25 bp, Homo sapien
tctgatgttgctactaacggttcct

SEQ ID NO: 2491923 - DNA, 25 bp, Homo sapien
cagatggtcccgagaaaaatgcgtc

SEQ ID NO: 2491924 - DNA, 25 bp, Homo sapien
gaggagacatcccaacagcagttgc

SEQ ID NO: 2491925 - DNA, 25 bp, Homo sapien
tttatttcagaccagcaggcaggga

SEQ ID NO: 2491926 - DNA, 25 bp, Homo sapien
cattgcacaaatacagccagggacc

SEQ ID NO: 2491927 - DNA, 25 bp, Homo sapien
gcaaaattagccacatacagtcatc

SEQ ID NO: 2491928 - DNA, 25 bp, Homo sapien
tctttacaaacagcaccaagtagca

SEQ ID NO: 2491929 - DNA, 25 bp, Homo sapien
ctcagcataccacatggcatttaga

SEQ ID NO: 2491930 - DNA, 25 bp, Homo sapien
agcataccacatggcatttagagaa

SEQ ID NO: 2491931 - DNA, 25 bp, Homo sapien
tcagcataccacatggcatttagag

SEQ ID NO: 2491932 - DNA, 25 bp, Homo sapien
cataccacatggcatttagagaacc

SEQ ID NO: 2491933 - DNA, 25 bp, Homo sapien
acctctggaagagtacttacacgcc

SEQ ID NO: 2491934 - DNA, 25 bp, Homo sapien
tattaatgggaatcaatgaaacaca

SEQ ID NO: 2491935 - DNA, 25 bp, Homo sapien
ggaatacagaaacacacttaatgat

SEQ ID NO: 2491936 - DNA, 25 bp, Homo sapien
ccttctaaatatctaccaaacttgt

SEQ ID NO: 2491937 - DNA, 25 bp, Homo sapien
gtgttcaacaaagggacaggataaa

SEQ ID NO: 2491938 - DNA, 25 bp, Homo sapien
ctccaagtacaattccacaatgtaa

SEQ ID NO: 2491939 - DNA, 25 bp, Homo sapien
tccaagtacaattccacaatgtaaa

SEQ ID NO: 2491940 - DNA, 25 bp, Homo sapien
tgtgttcaacaaagggacaggataa

SEQ ID NO: 2491941 - DNA, 25 bp, Homo sapien
gcttcaaatgtttcagggccactcc

SEQ ID NO: 2491942 - DNA, 25 bp, Homo sapien
tataaagtgcctcgatatactccag

SEQ ID NO: 2491943 - DNA, 25 bp, Homo sapien
tacatctctagggaattggccaaag

SEQ ID NO: 2491944 - DNA, 25 bp, Homo sapien
caaaagacagcacctatatggcata

SEQ ID NO: 2491945 - DNA, 25 bp, Homo sapien
cagaaattttgctctatattcggaa

SEQ ID NO: 2491946 - DNA, 25 bp, Homo sapien
gccccagctttatataaatactgag

SEQ ID NO: 2491947 - DNA, 25 bp, Homo sapien
tttgctctatattcggaattcacct

SEQ ID NO: 2491948 - DNA, 25 bp, Homo sapien
ctttacatgtgtccaagccccagct

SEQ ID NO: 2491949 - DNA, 25 bp, Homo sapien
cttccttttaggctggtgtaagtct

SEQ ID NO: 2491950 - DNA, 25 bp, Homo sapien
gcttccaattttaaacgatcgtcta

SEQ ID NO: 2491951 - DNA, 25 bp, Homo sapien
aagcttccttttaggctggtgtaag

SEQ ID NO: 2491952 - DNA, 25 bp, Homo sapien
cttccaattttaaacgatcgtctat

SEQ ID NO: 2491953 - DNA, 25 bp, Homo sapien
gaatggtggaacaaactggctttta

SEQ ID NO: 2491954 - DNA, 25 bp, Homo sapien
cactggagataaacccttgaaattt

SEQ ID NO: 2491955 - DNA, 25 bp, Homo sapien
catggatgactgagttacctttgaa

SEQ ID NO: 2491956 - DNA, 25 bp, Homo sapien
tggttctttcactggagataaaccc

SEQ ID NO: 2491957 - DNA, 25 bp, Homo sapien
tttgttgattaaatatgcggaactt

SEQ ID NO: 2491958 - DNA, 25 bp, Homo sapien
tgcggaactttggtcttcaattact

SEQ ID NO: 2491959 - DNA, 25 bp, Homo sapien
acaaaacataaagttgaattacagg

SEQ ID NO: 2491960 - DNA, 25 bp, Homo sapien
aaatatgcggaactttggtcttcaa

SEQ ID NO: 2491961 - DNA, 25 bp, Homo sapien
gctttgaactaaccatgagcatttc

SEQ ID NO: 2491962 - DNA, 25 bp, Homo sapien
gacatagacattagctttaaggcaa

SEQ ID NO: 2491963 - DNA, 25 bp, Homo sapien
tactgccaaaaactgttctgactcc

SEQ ID NO: 2491964 - DNA, 25 bp, Homo sapien
tattaccactgattacaaggaaagc

SEQ ID NO: 2491965 - DNA, 25 bp, Homo sapien
agcagttacgcctttcttagaatac

SEQ ID NO: 2491966 - DNA, 25 bp, Homo sapien
atattcaaagcagttacgcctttct

SEQ ID NO: 2491967 - DNA, 25 bp, Homo sapien
agaatacaggaaacacgcaatatat

SEQ ID NO: 2491968 - DNA, 25 bp, Homo sapien
gaaacacgcaatatattagtcaaca

SEQ ID NO: 2491969 - DNA, 25 bp, Homo sapien
caagttttcattaccctgtctcata

SEQ ID NO: 2491970 - DNA, 25 bp, Homo sapien
taccctgtctcatatttagtatatg

SEQ ID NO: 2491971 - DNA, 25 bp, Homo sapien
cccaagttttcattaccctgtctca

SEQ ID NO: 2491972 - DNA, 25 bp, Homo sapien
tcattaccctgtctcatatttagta

SEQ ID NO: 2491973 - DNA, 25 bp, Homo sapien
ttttctagaacctacctccaggcta

SEQ ID NO: 2491974 - DNA, 25 bp, Homo sapien
ctaggacagtataatattactacca

SEQ ID NO: 2491975 - DNA, 25 bp, Homo sapien
tactagataagataatggtactcag

SEQ ID NO: 2491976 - DNA, 25 bp, Homo sapien
cctccaggctacttaagtacttaat

SEQ ID NO: 2491977 - DNA, 25 bp, Homo sapien
tgaaggaacaacagtcaatccagct

SEQ ID NO: 2491978 - DNA, 25 bp, Homo sapien
tgcctttgatattcagaatttctca

SEQ ID NO: 2491979 - DNA, 25 bp, Homo sapien
gctttcttacgcagaagtctatcca

SEQ ID NO: 2491980 - DNA, 25 bp, Homo sapien
tagaagtcttccaaacaaactgcct

SEQ ID NO: 2491981 - DNA, 25 bp, Homo sapien
gaaagcattgagatccccacacaag

SEQ ID NO: 2491982 - DNA, 25 bp, Homo sapien
catgcgcattgtggtacagcaaact

SEQ ID NO: 2491983 - DNA, 25 bp, Homo sapien
cccagtcagtggtggacatgaacca

SEQ ID NO: 2491984 - DNA, 25 bp, Homo sapien
tcaaaggactattaggcatcccagg

SEQ ID NO: 2491985 - DNA, 25 bp, Homo sapien
aggccagctgtgacataagagagca

SEQ ID NO: 2491986 - DNA, 25 bp, Homo sapien
ccagctgtgacataagagagcagaa

SEQ ID NO: 2491987 - DNA, 25 bp, Homo sapien
gacataagagagcagaaatgcaaga

SEQ ID NO: 2491988 - DNA, 25 bp, Homo sapien
tgtgacataagagagcagaaatgca

SEQ ID NO: 2491989 - DNA, 25 bp, Homo sapien
caaaatagcgagtagtcagaataga

SEQ ID NO: 2491990 - DNA, 25 bp, Homo sapien
taggactcaggtgctaatatatgat

SEQ ID NO: 2491991 - DNA, 25 bp, Homo sapien
gtctcaacttgatctctcccttagg

SEQ ID NO: 2491992 - DNA, 25 bp, Homo sapien
gctaggtagaagtcagctcagcacc

SEQ ID NO: 2491993 - DNA, 25 bp, Homo sapien
gaaaagaaatgcagtgaatatgcct

SEQ ID NO: 2491994 - DNA, 25 bp, Homo sapien
ttgaaaagaaatgcagtgaatatgc

SEQ ID NO: 2491995 - DNA, 25 bp, Homo sapien
gcctgttatcaactattcttataga

SEQ ID NO: 2491996 - DNA, 25 bp, Homo sapien
agtcaacagcctgttatcaactatt

SEQ ID NO: 2491997 - DNA, 25 bp, Homo sapien
cattttctgaaagaaccttggtaga

SEQ ID NO: 2491998 - DNA, 25 bp, Homo sapien
tctgaaagaaccttggtagaatgtt

SEQ ID NO: 2491999 - DNA, 25 bp, Homo sapien
gaaccttggtagaatgttccagttc

SEQ ID NO: 2492000 - DNA, 25 bp, Homo sapien
aaagaaccttggtagaatgttccag

SEQ ID NO: 2492001 - DNA, 25 bp, Homo sapien
cagagtgagatctggttcttttggg

SEQ ID NO: 2492002 - DNA, 25 bp, Homo sapien
agccccttcagctctggagtctgca

SEQ ID NO: 2492003 - DNA, 25 bp, Homo sapien
tattttccacatctgaagccccttc

SEQ ID NO: 2492004 - DNA, 25 bp, Homo sapien
tgaagccccttcagctctggagtct

SEQ ID NO: 2492005 - DNA, 25 bp, Homo sapien
ggcttctggttctggtgatgcaacc

SEQ ID NO: 2492006 - DNA, 25 bp, Homo sapien
tctggtgatgcaaccacattgctct

SEQ ID NO: 2492007 - DNA, 25 bp, Homo sapien
aagcttctagtgagtgaactctttc

SEQ ID NO: 2492008 - DNA, 25 bp, Homo sapien
cacattgctctctgagatagctcca

SEQ ID NO: 2492009 - DNA, 25 bp, Homo sapien
ttgaaatctgtgggtcatggtaagg

SEQ ID NO: 2492010 - DNA, 25 bp, Homo sapien
aaatctgtgggtcatggtaagggac

SEQ ID NO: 2492011 - DNA, 25 bp, Homo sapien
tgggtcatggtaagggactcttctt

SEQ ID NO: 2492012 - DNA, 25 bp, Homo sapien
tctgtgggtcatggtaagggactct

SEQ ID NO: 2492013 - DNA, 25 bp, Homo sapien
aacacggtatacaaaaatagtagct

SEQ ID NO: 2492014 - DNA, 25 bp, Homo sapien
tacacacaatatccttcagattata

SEQ ID NO: 2492015 - DNA, 25 bp, Homo sapien
taaatttagttcagatatatgtacc

SEQ ID NO: 2492016 - DNA, 25 bp, Homo sapien
cacaatatccttcagattataggat

SEQ ID NO: 2492017 - DNA, 25 bp, Homo sapien
aattgcaacgtgatagacctggcag

SEQ ID NO: 2492018 - DNA, 25 bp, Homo sapien
gaacaatgggccctggtactgtcaa

SEQ ID NO: 2492019 - DNA, 25 bp, Homo sapien
caggcagtacatgctgcctcgtttc

SEQ ID NO: 2492020 - DNA, 25 bp, Homo sapien
tgttccagttatcctaacaaaagtc

SEQ ID NO: 2492021 - DNA, 25 bp, Homo sapien
gtgctggatcttggttctacatctg

SEQ ID NO: 2492022 - DNA, 25 bp, Homo sapien
tatgtggagcagaccaagatgagaa

SEQ ID NO: 2492023 - DNA, 25 bp, Homo sapien
gatcttggttctacatctgccttga

SEQ ID NO: 2492024 - DNA, 25 bp, Homo sapien
tgagatgtcactgtgctggatcttg

SEQ ID NO: 2492025 - DNA, 25 bp, Homo sapien
gatggaggcctccattagtgaaacc

SEQ ID NO: 2492026 - DNA, 25 bp, Homo sapien
tagtcctggctcatagtaaaccttc

SEQ ID NO: 2492027 - DNA, 25 bp, Homo sapien
cacactagctgctgggaatagtcct

SEQ ID NO: 2492028 - DNA, 25 bp, Homo sapien
taaacttagcccaggttagaatggc

SEQ ID NO: 2492029 - DNA, 25 bp, Homo sapien
caagactcggacaaataagactttt

SEQ ID NO: 2492030 - DNA, 25 bp, Homo sapien
cccacggaggaattacaagactcgg

SEQ ID NO: 2492031 - DNA, 25 bp, Homo sapien
catgggtactttcgccccacggagg

SEQ ID NO: 2492032 - DNA, 25 bp, Homo sapien
taattgatctgatctaagtccagcc

SEQ ID NO: 2492033 - DNA, 25 bp, Homo sapien
cccgctactccgacagttaactgga

SEQ ID NO: 2492034 - DNA, 25 bp, Homo sapien
ggcggggcgataacagtgttcccta

SEQ ID NO: 2492035 - DNA, 25 bp, Homo sapien
agttaactggagaaaaagctccgag

SEQ ID NO: 2492036 - DNA, 25 bp, Homo sapien
tccgacagttaactggagaaaaagc

SEQ ID NO: 2492037 - DNA, 25 bp, Homo sapien
cagcccttagatgagaaaacgttta

SEQ ID NO: 2492038 - DNA, 25 bp, Homo sapien
cagggagtcatttcggacggcagaa

SEQ ID NO: 2492039 - DNA, 25 bp, Homo sapien
tatcggttcgtacaaacgacagccg

SEQ ID NO: 2492040 - DNA, 25 bp, Homo sapien
caataataagggctacaggatctgg

SEQ ID NO: 2492041 - DNA, 25 bp, Homo sapien
gctttccagcctacttctggttcaa

SEQ ID NO: 2492042 - DNA, 25 bp, Homo sapien
gacaaaacactggatctgcatctcc

SEQ ID NO: 2492043 - DNA, 25 bp, Homo sapien
tctggttcaaaactctcagagacaa

SEQ ID NO: 2492044 - DNA, 25 bp, Homo sapien
gctttgtggcaaagtggttatgttt

SEQ ID NO: 2492045 - DNA, 25 bp, Homo sapien
aacaggacatctgcttatgacgtcc

SEQ ID NO: 2492046 - DNA, 25 bp, Homo sapien
ttccagacattctggtaacgttggt

SEQ ID NO: 2492047 - DNA, 25 bp, Homo sapien
cattgaaacaatgaggaaagccaga

SEQ ID NO: 2492048 - DNA, 25 bp, Homo sapien
cagacattctggtaacgttggtgcc

SEQ ID NO: 2492049 - DNA, 25 bp, Homo sapien
aaggatgggaattgggtatagagaa

SEQ ID NO: 2492050 - DNA, 25 bp, Homo sapien
gaaggatgggaattgggtatagaga

SEQ ID NO: 2492051 - DNA, 25 bp, Homo sapien
tggctgagcggccaacaccctaatg

SEQ ID NO: 2492052 - DNA, 25 bp, Homo sapien
atgctcaaggcgacagccccaaatg

SEQ ID NO: 2492053 - DNA, 25 bp, Homo sapien
catcctcagaagggagtgcgaaggg

SEQ ID NO: 2492054 - DNA, 25 bp, Homo sapien
tgctgggctcttgccccaacactca

SEQ ID NO: 2492055 - DNA, 25 bp, Homo sapien
tggacttgaggcctctgaacctgtg

SEQ ID NO: 2492056 - DNA, 25 bp, Homo sapien
tacaggtgtctgtgctacccagaaa

SEQ ID NO: 2492057 - DNA, 25 bp, Homo sapien
gaattcgtccttggcgaccatagaa

SEQ ID NO: 2492058 - DNA, 25 bp, Homo sapien
cctttgagttacattgcgactggca

SEQ ID NO: 2492059 - DNA, 25 bp, Homo sapien
gcaatgttgcttgtgaatctttgtc

SEQ ID NO: 2492060 - DNA, 25 bp, Homo sapien
gcttgtgaatctttgtctcagggag

SEQ ID NO: 2492061 - DNA, 25 bp, Homo sapien
tgctgagcacaaacctagtccacag

SEQ ID NO: 2492062 - DNA, 25 bp, Homo sapien
agcacaaacctagtccacaggctgg

SEQ ID NO: 2492063 - DNA, 25 bp, Homo sapien
ttgactcgtcttggcagatccagca

SEQ ID NO: 2492064 - DNA, 25 bp, Homo sapien
tttgactcgtcttggcagatccagc

SEQ ID NO: 2492065 - DNA, 25 bp, Homo sapien
tggcagatccagcaaaacacattgc

SEQ ID NO: 2492066 - DNA, 25 bp, Homo sapien
gtttgactcgtcttggcagatccag

SEQ ID NO: 2492067 - DNA, 25 bp, Homo sapien
atttcacataaggatgcttttggct

SEQ ID NO: 2492068 - DNA, 25 bp, Homo sapien
taacagaatatccaactaacagtgg

SEQ ID NO: 2492069 - DNA, 25 bp, Homo sapien
cagaatatccaactaacagtggcat

SEQ ID NO: 2492070 - DNA, 25 bp, Homo sapien
aagtaacagaatatccaactaacag

SEQ ID NO: 2492071 - DNA, 25 bp, Homo sapien
gtgttctcccacatgagttcttcag

SEQ ID NO: 2492072 - DNA, 25 bp, Homo sapien
acttggcaccagctagggcacttga

SEQ ID NO: 2492073 - DNA, 25 bp, Homo sapien
tggcagcttgtctgctccacttggc

SEQ ID NO: 2492074 - DNA, 25 bp, Homo sapien
gggctcctcaggcatctcgatttct

SEQ ID NO: 2492075 - DNA, 25 bp, Homo sapien
tcccaaggcacatgtcagagagaag

SEQ ID NO: 2492076 - DNA, 25 bp, Homo sapien
ccgcatcacttgtgaacctagcatg

SEQ ID NO: 2492077 - DNA, 25 bp, Homo sapien
agaaaaaggcagaaaccgcatcact

SEQ ID NO: 2492078 - DNA, 25 bp, Homo sapien
caaggcacatgtcagagagaagaaa

SEQ ID NO: 2492079 - DNA, 25 bp, Homo sapien
tgtgctttaaggaggacgctgaatg

SEQ ID NO: 2492080 - DNA, 25 bp, Homo sapien
ccacagtgagagctccagtacaatc

SEQ ID NO: 2492081 - DNA, 25 bp, Homo sapien
caatgtctggttcatcctcagagaa

SEQ ID NO: 2492082 - DNA, 25 bp, Homo sapien
gatagtgtctagaactctctcccag

SEQ ID NO: 2492083 - DNA, 25 bp, Homo sapien
cacaggtggagcctcaggagtcaag

SEQ ID NO: 2492084 - DNA, 25 bp, Homo sapien
gagcctcaggagtcaagctctctga

SEQ ID NO: 2492085 - DNA, 25 bp, Homo sapien
ctctctgaattcacaccccagttta

SEQ ID NO: 2492086 - DNA, 25 bp, Homo sapien
cccagtttatctctcagtagctgga

SEQ ID NO: 2492087 - DNA, 25 bp, Homo sapien
cacgccaggccccacagttaaattt

SEQ ID NO: 2492088 - DNA, 25 bp, Homo sapien
gctttggccacaatggataacataa

SEQ ID NO: 2492089 - DNA, 25 bp, Homo sapien
tagccacgttggtctacctctaaga

SEQ ID NO: 2492090 - DNA, 25 bp, Homo sapien
ctagggaggaaatcattagcggctc

SEQ ID NO: 2492091 - DNA, 25 bp, Homo sapien
acatgctccataaggtagacttcta

SEQ ID NO: 2492092 - DNA, 25 bp, Homo sapien
catgctccataaggtagacttctat

SEQ ID NO: 2492093 - DNA, 25 bp, Homo sapien
atgctccataaggtagacttctatt

SEQ ID NO: 2492094 - DNA, 25 bp, Homo sapien
ctgacgctcttccatcttccagaac

SEQ ID NO: 2492095 - DNA, 25 bp, Homo sapien
acgctcttccatcttccagaacctg

SEQ ID NO: 2492096 - DNA, 25 bp, Homo sapien
tgacgctcttccatcttccagaacc

SEQ ID NO: 2492097 - DNA, 25 bp, Homo sapien
gacgctcttccatcttccagaacct

SEQ ID NO: 2492098 - DNA, 25 bp, Homo sapien
cacaggcctcgtagatccgagcgag

SEQ ID NO: 2492099 - DNA, 25 bp, Homo sapien
gaaagctgccagactgcaaagcggt

SEQ ID NO: 2492100 - DNA, 25 bp, Homo sapien
cctcggagtgcaataggaaagctgc

SEQ ID NO: 2492101 - DNA, 25 bp, Homo sapien
tccgagcgaggcgttcagcttgtcc

SEQ ID NO: 2492102 - DNA, 25 bp, Homo sapien
ccaaggtcatgctggatggtatgca

SEQ ID NO: 2492103 - DNA, 25 bp, Homo sapien
aagtgtccagcaggagactccaagg

SEQ ID NO: 2492104 - DNA, 25 bp, Homo sapien
aaatataatgtgatagggccgagca

SEQ ID NO: 2492105 - DNA, 25 bp, Homo sapien
aacacgtgctagtgaccgtccaggt

SEQ ID NO: 2492106 - DNA, 25 bp, Homo sapien
cagtaaaaggatcgtgacaggaaca

SEQ ID NO: 2492107 - DNA, 25 bp, Homo sapien
caaggaattagcatgtacgatagag

SEQ ID NO: 2492108 - DNA, 25 bp, Homo sapien
taatgcgctcagaccgtaaataaga

SEQ ID NO: 2492109 - DNA, 25 bp, Homo sapien
ggagtggtcaaaccataatgcgctc

SEQ ID NO: 2492110 - DNA, 25 bp, Homo sapien
gccctaaagagatcctgaccacaga

SEQ ID NO: 2492111 - DNA, 25 bp, Homo sapien
taaaagccagctagcacatagggtg

SEQ ID NO: 2492112 - DNA, 25 bp, Homo sapien
aactctaaaactagggtctgcagct

SEQ ID NO: 2492113 - DNA, 25 bp, Homo sapien
atagggtgccggctgcttcagatgc

SEQ ID NO: 2492114 - DNA, 25 bp, Homo sapien
ggtcacacaactgcagagaaactct

SEQ ID NO: 2492115 - DNA, 25 bp, Homo sapien
gtctagctctcttacaaaagatgca

SEQ ID NO: 2492116 - DNA, 25 bp, Homo sapien
gcagagaaactctccggcgtttgtc

SEQ ID NO: 2492117 - DNA, 25 bp, Homo sapien
gatgcaaagggagtttatcatggtt

SEQ ID NO: 2492118 - DNA, 25 bp, Homo sapien
acactgcccagagggatgagagcca

SEQ ID NO: 2492119 - DNA, 25 bp, Homo sapien
gattcgaaaagagaccaaatgaaag

SEQ ID NO: 2492120 - DNA, 25 bp, Homo sapien
tccaaatcacactgcccagagggat

SEQ ID NO: 2492121 - DNA, 25 bp, Homo sapien
tctgggtcttctgattcgaaaagag

SEQ ID NO: 2492122 - DNA, 25 bp, Homo sapien
gcagttacatgactgacctgaaatg

SEQ ID NO: 2492123 - DNA, 25 bp, Homo sapien
gaagtaaatgactgtgtgagcagct

SEQ ID NO: 2492124 - DNA, 25 bp, Homo sapien
gccagactcaggagtgacaaactga

SEQ ID NO: 2492125 - DNA, 25 bp, Homo sapien
ctttcatagccccagtttaggataa

SEQ ID NO: 2492126 - DNA, 25 bp, Homo sapien
cagcagataacttactctttttcat

SEQ ID NO: 2492127 - DNA, 25 bp, Homo sapien
tgcagcagataacttactctttttc

SEQ ID NO: 2492128 - DNA, 25 bp, Homo sapien
gcagcagataacttactctttttca

SEQ ID NO: 2492129 - DNA, 25 bp, Homo sapien
ggaacagcatatgaatggcccctat

SEQ ID NO: 2492130 - DNA, 25 bp, Homo sapien
taggctgagctaacataggctggga

SEQ ID NO: 2492131 - DNA, 25 bp, Homo sapien
ccctatcatgagagtgtggcctgtt

SEQ ID NO: 2492132 - DNA, 25 bp, Homo sapien
caagatcctgccctcacgtgtggaa

SEQ ID NO: 2492133 - DNA, 25 bp, Homo sapien
catggtgggaggcaaaaggtccttc

SEQ ID NO: 2492134 - DNA, 25 bp, Homo sapien
acgtggctggggaggacttagaatc

SEQ ID NO: 2492135 - DNA, 25 bp, Homo sapien
cgtggctggggaggacttagaatca

SEQ ID NO: 2492136 - DNA, 25 bp, Homo sapien
aggtccttcttacacggcggcagca

SEQ ID NO: 2492137 - DNA, 25 bp, Homo sapien
aaaaaactctttatagccactatgg

SEQ ID NO: 2492138 - DNA, 25 bp, Homo sapien
tgaatatatcacagagatatcagca

SEQ ID NO: 2492139 - DNA, 25 bp, Homo sapien
acaaatggaactactgtttgatcca

SEQ ID NO: 2492140 - DNA, 25 bp, Homo sapien
aaactacaaatggaactactgtttg

SEQ ID NO: 2492141 - DNA, 25 bp, Homo sapien
gcagaaacttacagactctcagact

SEQ ID NO: 2492142 - DNA, 25 bp, Homo sapien
gaatgtgcatgcctgcggcagaaac

SEQ ID NO: 2492143 - DNA, 25 bp, Homo sapien
aagtgaagggttccagtcaaggagt

SEQ ID NO: 2492144 - DNA, 25 bp, Homo sapien
caagcaaaagcgtggtgtcaggaat

SEQ ID NO: 2492145 - DNA, 25 bp, Homo sapien
atgggaaacaagggccgtggtcagt

SEQ ID NO: 2492146 - DNA, 25 bp, Homo sapien
aatgggaaacaagggccgtggtcag

SEQ ID NO: 2492147 - DNA, 25 bp, Homo sapien
aagggccgtggtcagtttctcctct

SEQ ID NO: 2492148 - DNA, 25 bp, Homo sapien
acaagggccgtggtcagtttctcct

SEQ ID NO: 2492149 - DNA, 25 bp, Homo sapien
cttgggcagggtccaaaaatagctc

SEQ ID NO: 2492150 - DNA, 25 bp, Homo sapien
ctcttgggcagggtccaaaaatagc

SEQ ID NO: 2492151 - DNA, 25 bp, Homo sapien
tgggcagggtccaaaaatagctcca

SEQ ID NO: 2492152 - DNA, 25 bp, Homo sapien
ggcagggtccaaaaatagctccagg

SEQ ID NO: 2492153 - DNA, 25 bp, Homo sapien
ttgacaaaagtaagctgaagccagg

SEQ ID NO: 2492154 - DNA, 25 bp, Homo sapien
ttcagtgggtaggaataatgcctcc

SEQ ID NO: 2492155 - DNA, 25 bp, Homo sapien
agggctatcggaacagatctgggaa

SEQ ID NO: 2492156 - DNA, 25 bp, Homo sapien
tgttacacggaccaccaggtatggg

SEQ ID NO: 2492157 - DNA, 25 bp, Homo sapien
aatagatgctattggtggttgtccg

SEQ ID NO: 2492158 - DNA, 25 bp, Homo sapien
tagacaagtacattggtgaaagtgc

SEQ ID NO: 2492159 - DNA, 25 bp, Homo sapien
tgtatctagttctattgtagacaag

SEQ ID NO: 2492160 - DNA, 25 bp, Homo sapien
ttgtccgttttctgagggtacttca

SEQ ID NO: 2492161 - DNA, 25 bp, Homo sapien
gatactctgcacagagttaaaatga

SEQ ID NO: 2492162 - DNA, 25 bp, Homo sapien
atggatggatttgatactctgcaca

SEQ ID NO: 2492163 - DNA, 25 bp, Homo sapien
aatggatggatttgatactctgcac

SEQ ID NO: 2492164 - DNA, 25 bp, Homo sapien
tggatggatttgatactctgcacag

SEQ ID NO: 2492165 - DNA, 25 bp, Homo sapien
ctgggaaccctgagaagcgcagagc

SEQ ID NO: 2492166 - DNA, 25 bp, Homo sapien
tctgccgcgggccagctgtgtgaat

SEQ ID NO: 2492167 - DNA, 25 bp, Homo sapien
ttagaggagccgaaacacgttctgc

SEQ ID NO: 2492168 - DNA, 25 bp, Homo sapien
tgcagtcatcatctaccgcacgcag

SEQ ID NO: 2492169 - DNA, 25 bp, Homo sapien
tcttgttcagatcacctctgggttc

SEQ ID NO: 2492170 - DNA, 25 bp, Homo sapien
tcataatatttcgaagcagaggatg

SEQ ID NO: 2492171 - DNA, 25 bp, Homo sapien
gcaattatctgatctcgtgccccac

SEQ ID NO: 2492172 - DNA, 25 bp, Homo sapien
tgcaagcctgttctgaggtggaaaa

SEQ ID NO: 2492173 - DNA, 25 bp, Homo sapien
catcaaccatttttccatgctgctt

SEQ ID NO: 2492174 - DNA, 25 bp, Homo sapien
tagaaactgatgcttattttccatc

SEQ ID NO: 2492175 - DNA, 25 bp, Homo sapien
ccatcaaccatttttccatgctgct

SEQ ID NO: 2492176 - DNA, 25 bp, Homo sapien
tgatgcttattttccatcaaccatt

SEQ ID NO: 2492177 - DNA, 25 bp, Homo sapien
cttccatggcaggctgagagctcca

SEQ ID NO: 2492178 - DNA, 25 bp, Homo sapien
gagggcacctgtacaccttcagacc

SEQ ID NO: 2492179 - DNA, 25 bp, Homo sapien
gtcttccatggcaggctgagagctc

SEQ ID NO: 2492180 - DNA, 25 bp, Homo sapien
gagctccagtcttcagtagggaatt

SEQ ID NO: 2492181 - DNA, 25 bp, Homo sapien
aggaaatggtgccaagcatgcacag

SEQ ID NO: 2492182 - DNA, 25 bp, Homo sapien
gcatgcacagaacttcccgagccag

SEQ ID NO: 2492183 - DNA, 25 bp, Homo sapien
tcacaggaaatggtgccaagcatgc

SEQ ID NO: 2492184 - DNA, 25 bp, Homo sapien
tgcacagaacttcccgagccagcat

SEQ ID NO: 2492185 - DNA, 25 bp, Homo sapien
caggagtgaagcgcccagcaattgg

SEQ ID NO: 2492186 - DNA, 25 bp, Homo sapien
ggcaacaatagcatgagctgccagc

SEQ ID NO: 2492187 - DNA, 25 bp, Homo sapien
aacttcagcacagccgtctggccag

SEQ ID NO: 2492188 - DNA, 25 bp, Homo sapien
cagcacagccgtctggccagtattc

SEQ ID NO: 2492189 - DNA, 25 bp, Homo sapien
tcctccctcatttgcaggacatcaa

SEQ ID NO: 2492190 - DNA, 25 bp, Homo sapien
aacttaaggacatcctcctccctca

SEQ ID NO: 2492191 - DNA, 25 bp, Homo sapien
gaacttaaggacatcctcctccctc

SEQ ID NO: 2492192 - DNA, 25 bp, Homo sapien
tccctcatttgcaggacatcaaggg

SEQ ID NO: 2492193 - DNA, 25 bp, Homo sapien
cgggaatccagaacagcgccgtatg

SEQ ID NO: 2492194 - DNA, 25 bp, Homo sapien
ttacaacgggaatccagaacagcgc

SEQ ID NO: 2492195 - DNA, 25 bp, Homo sapien
aagttacaacgggaatccagaacag

SEQ ID NO: 2492196 - DNA, 25 bp, Homo sapien
acaacgggaatccagaacagcgccg

SEQ ID NO: 2492197 - DNA, 25 bp, Homo sapien
catcatttcctgagataccgctgca

SEQ ID NO: 2492198 - DNA, 25 bp, Homo sapien
tgaggcctggccattcaataattcc

SEQ ID NO: 2492199 - DNA, 25 bp, Homo sapien
tccttagttccatccttcctgaggc

SEQ ID NO: 2492200 - DNA, 25 bp, Homo sapien
caacggtcactactataagcagcca

SEQ ID NO: 2492201 - DNA, 25 bp, Homo sapien
ccgtggcgcctagagtagcgacccg

SEQ ID NO: 2492202 - DNA, 25 bp, Homo sapien
gaggatcaaatgcagtattactcat

SEQ ID NO: 2492203 - DNA, 25 bp, Homo sapien
catactgttgttagagttgttgagg

SEQ ID NO: 2492204 - DNA, 25 bp, Homo sapien
gggataggatgagatatataacata

SEQ ID NO: 2492205 - DNA, 25 bp, Homo sapien
tgagtatcatccgtaatgccatcac

SEQ ID NO: 2492206 - DNA, 25 bp, Homo sapien
caggttcaagcaattcacctgcctc

SEQ ID NO: 2492207 - DNA, 25 bp, Homo sapien
tcttagagacggggcttcaccatat

SEQ ID NO: 2492208 - DNA, 25 bp, Homo sapien
tcttcgctcagtgcaacctctgctc

SEQ ID NO: 2492209 - DNA, 25 bp, Homo sapien
ttttcttagagacggggcttcacca

SEQ ID NO: 2492210 - DNA, 25 bp, Homo sapien
ggaaatgtacttgacccgacagcca

SEQ ID NO: 2492211 - DNA, 25 bp, Homo sapien
cacagggccacgattggaaatgtac

SEQ ID NO: 2492212 - DNA, 25 bp, Homo sapien
ttggaaatgtacttgacccgacagc

SEQ ID NO: 2492213 - DNA, 25 bp, Homo sapien
cgattggaaatgtacttgacccgac

SEQ ID NO: 2492214 - DNA, 25 bp, Homo sapien
gatgtggatcttctggcggccagaa

SEQ ID NO: 2492215 - DNA, 25 bp, Homo sapien
gagatgtggatcttctggcggccag

SEQ ID NO: 2492216 - DNA, 25 bp, Homo sapien
ctttgagatgtggatcttctggcgg

SEQ ID NO: 2492217 - DNA, 25 bp, Homo sapien
tgtggatcttctggcggccagaaaa

SEQ ID NO: 2492218 - DNA, 25 bp, Homo sapien
cagcttggtgtgaatggagatgata

SEQ ID NO: 2492219 - DNA, 25 bp, Homo sapien
ttctgcagcttggtgtgaatggaga

SEQ ID NO: 2492220 - DNA, 25 bp, Homo sapien
tgaatggagatgataacttggccag

SEQ ID NO: 2492221 - DNA, 25 bp, Homo sapien
tgtgaatggagatgataacttggcc

SEQ ID NO: 2492222 - DNA, 25 bp, Homo sapien
caaggtcagaaacatgaacatccat

SEQ ID NO: 2492223 - DNA, 25 bp, Homo sapien
ctacactggggtagtgcaaggtcag

SEQ ID NO: 2492224 - DNA, 25 bp, Homo sapien
acactggggtagtgcaaggtcagaa

SEQ ID NO: 2492225 - DNA, 25 bp, Homo sapien
tgcaaggtcagaaacatgaacatcc

SEQ ID NO: 2492226 - DNA, 25 bp, Homo sapien
atacaatacaacacacaggctgcat

SEQ ID NO: 2492227 - DNA, 25 bp, Homo sapien
gcccccccatgaggaaaggaactca

SEQ ID NO: 2492228 - DNA, 25 bp, Homo sapien
actcagttggcttaataggctgcag

SEQ ID NO: 2492229 - DNA, 25 bp, Homo sapien
gagcaacccatacaatacaacacac

SEQ ID NO: 2492230 - DNA, 25 bp, Homo sapien
cagattcgaagtacttttttgaggg

SEQ ID NO: 2492231 - DNA, 25 bp, Homo sapien
ctttggcagattcgaagtacttttt

SEQ ID NO: 2492232 - DNA, 25 bp, Homo sapien
tttttcatgtactttggcagattcg

SEQ ID NO: 2492233 - DNA, 25 bp, Homo sapien
cgccttgttgcccaaggattacagg

SEQ ID NO: 2492234 - DNA, 25 bp, Homo sapien
aaacttaacatctctaatctggtca

SEQ ID NO: 2492235 - DNA, 25 bp, Homo sapien
ttctcgttgcctcttgtatcctcct

SEQ ID NO: 2492236 - DNA, 25 bp, Homo sapien
tgttttctcgttgcctcttgtatcc

SEQ ID NO: 2492237 - DNA, 25 bp, Homo sapien
taatctggtcattgaaattgaggtg

SEQ ID NO: 2492238 - DNA, 25 bp, Homo sapien
tgtgtaatacaagggccagaacttc

SEQ ID NO: 2492239 - DNA, 25 bp, Homo sapien
cagaatgtgtaatacaagggccaga

SEQ ID NO: 2492240 - DNA, 25 bp, Homo sapien
taatacaagggccagaacttcctcc

SEQ ID NO: 2492241 - DNA, 25 bp, Homo sapien
tacaagggccagaacttcctcctgg

SEQ ID NO: 2492242 - DNA, 25 bp, Homo sapien
aattctcgattagttggtgaggcca

SEQ ID NO: 2492243 - DNA, 25 bp, Homo sapien
gtgaggccaataaggatactttttc

SEQ ID NO: 2492244 - DNA, 25 bp, Homo sapien
gcttcgttcaagtcctcagtggtca

SEQ ID NO: 2492245 - DNA, 25 bp, Homo sapien
ttctcgtctaatttggtttctggga

SEQ ID NO: 2492246 - DNA, 25 bp, Homo sapien
tcacatctttttcttcggcatccac

SEQ ID NO: 2492247 - DNA, 25 bp, Homo sapien
tggcctttgagagagacacccactc

SEQ ID NO: 2492248 - DNA, 25 bp, Homo sapien
gagagacacccactcagcacaagat

SEQ ID NO: 2492249 - DNA, 25 bp, Homo sapien
cagcacaagatttcacatctttttc

SEQ ID NO: 2492250 - DNA, 25 bp, Homo sapien
tatcctctggcacgggaaccttcag

SEQ ID NO: 2492251 - DNA, 25 bp, Homo sapien
tttatcctctggcacgggaaccttc

SEQ ID NO: 2492252 - DNA, 25 bp, Homo sapien
ttatcctctggcacgggaaccttca

SEQ ID NO: 2492253 - DNA, 25 bp, Homo sapien
agggtctcattccaggatttcagga

SEQ ID NO: 2492254 - DNA, 25 bp, Homo sapien
caggatttcaggaaactagcaatgg

SEQ ID NO: 2492255 - DNA, 25 bp, Homo sapien
atttcaggaaactagcaatggcctt

SEQ ID NO: 2492256 - DNA, 25 bp, Homo sapien
attccaggatttcaggaaactagca

SEQ ID NO: 2492257 - DNA, 25 bp, Homo sapien
ttttagagcaagttttcgcccagcc

SEQ ID NO: 2492258 - DNA, 25 bp, Homo sapien
gagcaagttttcgcccagccatgtt

SEQ ID NO: 2492259 - DNA, 25 bp, Homo sapien
gcccagccatgttgggattcttcac

SEQ ID NO: 2492260 - DNA, 25 bp, Homo sapien
aagttttcgcccagccatgttggga

SEQ ID NO: 2492261 - DNA, 25 bp, Homo sapien
tgcccacggtccactgcagccgcct

SEQ ID NO: 2492262 - DNA, 25 bp, Homo sapien
tgcagccgcctttaacttcttgaag

SEQ ID NO: 2492263 - DNA, 25 bp, Homo sapien
gcagccatcactacaaccagttttt

SEQ ID NO: 2492264 - DNA, 25 bp, Homo sapien
tagtgaatatatagttatgcagcca

SEQ ID NO: 2492265 - DNA, 25 bp, Homo sapien
agatggagtgttgcagtctcaccgg

SEQ ID NO: 2492266 - DNA, 25 bp, Homo sapien
gaaaggcatacgtctcttagaaaaa

SEQ ID NO: 2492267 - DNA, 25 bp, Homo sapien
tagtagctttgttaaccatgaccca

SEQ ID NO: 2492268 - DNA, 25 bp, Homo sapien
gtagaagcatatcctctgaggcaaa

SEQ ID NO: 2492269 - DNA, 25 bp, Homo sapien
taggaagttccatggttggcaaact

SEQ ID NO: 2492270 - DNA, 25 bp, Homo sapien
tgttagctatagaagcactgtcact

SEQ ID NO: 2492271 - DNA, 25 bp, Homo sapien
ctgccgtgaattgtggtatgttgcc

SEQ ID NO: 2492272 - DNA, 25 bp, Homo sapien
tgttgccactaatgtaatgcctaga

SEQ ID NO: 2492273 - DNA, 25 bp, Homo sapien
tttggaatgaaaaggtctgccgtga

SEQ ID NO: 2492274 - DNA, 25 bp, Homo sapien
tttaactgactttcaagagggcagc

SEQ ID NO: 2492275 - DNA, 25 bp, Homo sapien
agcatcagtagttcaataaatttgg

SEQ ID NO: 2492276 - DNA, 25 bp, Homo sapien
taaagtggtgcaattttgtataact

SEQ ID NO: 2492277 - DNA, 25 bp, Homo sapien
taaaagccttaattaaagtggtgca

SEQ ID NO: 2492278 - DNA, 25 bp, Homo sapien
attttgtataacttagcatcagtag

SEQ ID NO: 2492279 - DNA, 25 bp, Homo sapien
gattaatcaactaattccataggct

SEQ ID NO: 2492280 - DNA, 25 bp, Homo sapien
aagagaggtagattgagaacagaac

SEQ ID NO: 2492281 - DNA, 25 bp, Homo sapien
tccataggcttgacattagtttatc

SEQ ID NO: 2492282 - DNA, 25 bp, Homo sapien
tctgtgttgggatacctgttgaaac

SEQ ID NO: 2492283 - DNA, 25 bp, Homo sapien
tttattagggcccttgggagagcac

SEQ ID NO: 2492284 - DNA, 25 bp, Homo sapien
tgtagctggcatgaaccttaaccca

SEQ ID NO: 2492285 - DNA, 25 bp, Homo sapien
tggcttccgtgctgctaagacacag

SEQ ID NO: 2492286 - DNA, 25 bp, Homo sapien
tcacgtacttctctgcttggcatag

SEQ ID NO: 2492287 - DNA, 25 bp, Homo sapien
gtcccagatgagcctgaacaacata

SEQ ID NO: 2492288 - DNA, 25 bp, Homo sapien
caaggtggcttatcatcctaggact

SEQ ID NO: 2492289 - DNA, 25 bp, Homo sapien
gccggccttactgtactattcttat

SEQ ID NO: 2492290 - DNA, 25 bp, Homo sapien
actgcagccggccttactgtactat

SEQ ID NO: 2492291 - DNA, 25 bp, Homo sapien
ctgtgaaacccaaattgtcacttgc

SEQ ID NO: 2492292 - DNA, 25 bp, Homo sapien
ctgtgccactgcacgtaagccggga

SEQ ID NO: 2492293 - DNA, 25 bp, Homo sapien
cactgcacgtaagccgggacaatag

SEQ ID NO: 2492294 - DNA, 25 bp, Homo sapien
taagccgggacaataggacaagatc

SEQ ID NO: 2492295 - DNA, 25 bp, Homo sapien
aaggcttcagttaacacgctgagga

SEQ ID NO: 2492296 - DNA, 25 bp, Homo sapien
ccatatatcacatggagtacctgaa

SEQ ID NO: 2492297 - DNA, 25 bp, Homo sapien
tgaggattgtggaaccatatatcac

SEQ ID NO: 2492298 - DNA, 25 bp, Homo sapien
taacacgctgaggattgtggaacca

SEQ ID NO: 2492299 - DNA, 25 bp, Homo sapien
taaacgcaaccaggaacacattggc

SEQ ID NO: 2492300 - DNA, 25 bp, Homo sapien
tgtaggctgaagtcgcgcatgcgct

SEQ ID NO: 2492301 - DNA, 25 bp, Homo sapien
cgcatgcgctagatgggaacgttgt

SEQ ID NO: 2492302 - DNA, 25 bp, Homo sapien
tcttcccagtaggagaacccagggc

SEQ ID NO: 2492303 - DNA, 25 bp, Homo sapien
tgatctgggtactgtgctagccgcc

SEQ ID NO: 2492304 - DNA, 25 bp, Homo sapien
gctagccgcctacaacaaagatcag

SEQ ID NO: 2492305 - DNA, 25 bp, Homo sapien
gaaataggtgaaactagactcccag

SEQ ID NO: 2492306 - DNA, 25 bp, Homo sapien
tagcgcggcgttcgaaatgctaagt

SEQ ID NO: 2492307 - DNA, 25 bp, Homo sapien
aattggtgacagactcaatgatgga

SEQ ID NO: 2492308 - DNA, 25 bp, Homo sapien
tctctaaaaccgaaatggttcatgc

SEQ ID NO: 2492309 - DNA, 25 bp, Homo sapien
tcggaattaacacaaagcagatttt

SEQ ID NO: 2492310 - DNA, 25 bp, Homo sapien
gatggaatgatttgtcggaattaac

SEQ ID NO: 2492311 - DNA, 25 bp, Homo sapien
ggatacttatttaaccagccaagac

SEQ ID NO: 2492312 - DNA, 25 bp, Homo sapien
aaaaatgtctcgtaactactatgcc

SEQ ID NO: 2492313 - DNA, 25 bp, Homo sapien
tgccacaagaacaagcatggatact

SEQ ID NO: 2492314 - DNA, 25 bp, Homo sapien
ttaatttggaaagcagcatatcact

SEQ ID NO: 2492315 - DNA, 25 bp, Homo sapien
cccagtcaccttttaaaggcgccat

SEQ ID NO: 2492316 - DNA, 25 bp, Homo sapien
aaaaggccagacttggtagctaaca

SEQ ID NO: 2492317 - DNA, 25 bp, Homo sapien
gcagtaagctggaatcacactatta

SEQ ID NO: 2492318 - DNA, 25 bp, Homo sapien
taaaggcgccatctctcaatattgc

SEQ ID NO: 2492319 - DNA, 25 bp, Homo sapien
aagggcgggcctgctagcggacttg

SEQ ID NO: 2492320 - DNA, 25 bp, Homo sapien
tcagaggaagacctatcgaggatgg

SEQ ID NO: 2492321 - DNA, 25 bp, Homo sapien
cggtgtactcggcttcccactgtgc

SEQ ID NO: 2492322 - DNA, 25 bp, Homo sapien
tgcttctcctcgggttggcgctgcc

SEQ ID NO: 2492323 - DNA, 25 bp, Homo sapien
ccctggcccggagagtggaatgatc

SEQ ID NO: 2492324 - DNA, 25 bp, Homo sapien
tgctgctttcgcagccaggagcacc

SEQ ID NO: 2492325 - DNA, 25 bp, Homo sapien
cgaaaaccccggatggtgaggagca

SEQ ID NO: 2492326 - DNA, 25 bp, Homo sapien
attagtgcgtacgagcgcccagtgc

SEQ ID NO: 2492327 - DNA, 25 bp, Homo sapien
tccggatgatcgcaggtgcctgtcg

SEQ ID NO: 2492328 - DNA, 25 bp, Homo sapien
tgcccgttcgcagcctttgtgcggt

SEQ ID NO: 2492329 - DNA, 25 bp, Homo sapien
tcactagtgtgaacgctgcgcgtag

SEQ ID NO: 2492330 - DNA, 25 bp, Homo sapien
gacggtgtcccctctatcgctggtt

SEQ ID NO: 2492331 - DNA, 25 bp, Homo sapien
ttgagccttagttattttggagatc

SEQ ID NO: 2492332 - DNA, 25 bp, Homo sapien
agccttagttattttggagatcatt

SEQ ID NO: 2492333 - DNA, 25 bp, Homo sapien
atttgagccttagttattttggaga

SEQ ID NO: 2492334 - DNA, 25 bp, Homo sapien
gagccttagttattttggagatcat

SEQ ID NO: 2492335 - DNA, 25 bp, Homo sapien
gcacagtttactgtgccccactgga

SEQ ID NO: 2492336 - DNA, 25 bp, Homo sapien
actacagcaggcacagtttactgtg

SEQ ID NO: 2492337 - DNA, 25 bp, Homo sapien
tggagtttatagttagccaactctc

SEQ ID NO: 2492338 - DNA, 25 bp, Homo sapien
tctgttaagatagtaggaggtggct

SEQ ID NO: 2492339 - DNA, 25 bp, Homo sapien
aatgaagagataagggccgggcgca

SEQ ID NO: 2492340 - DNA, 25 bp, Homo sapien
aatggtagtacatacctatgagttt

SEQ ID NO: 2492341 - DNA, 25 bp, Homo sapien
aaatggtagtacatacctatgagtt

SEQ ID NO: 2492342 - DNA, 25 bp, Homo sapien
caggcatgtcatttagccctcaaga

SEQ ID NO: 2492343 - DNA, 25 bp, Homo sapien
aatactagccagttttatgtgacgg

SEQ ID NO: 2492344 - DNA, 25 bp, Homo sapien
ctttaatacacaaatgcaggatgcc

SEQ ID NO: 2492345 - DNA, 25 bp, Homo sapien
tgccagcctttaagagccagggctt

SEQ ID NO: 2492346 - DNA, 25 bp, Homo sapien
cattcaccagtttgtgaagggagtt

SEQ ID NO: 2492347 - DNA, 25 bp, Homo sapien
agtccctagttgtgaaagcttttgg

SEQ ID NO: 2492348 - DNA, 25 bp, Homo sapien
tttcaggttaagtccctagttgtga

SEQ ID NO: 2492349 - DNA, 25 bp, Homo sapien
ttgtagtcatcattgggtgtcatca

SEQ ID NO: 2492350 - DNA, 25 bp, Homo sapien
tacccttagagatctgtttcccaga

SEQ ID NO: 2492351 - DNA, 25 bp, Homo sapien
tttgaagttgaatctctcgactcag

SEQ ID NO: 2492352 - DNA, 25 bp, Homo sapien
ggacaagaactctcagatgaagatg

SEQ ID NO: 2492353 - DNA, 25 bp, Homo sapien
tcgactcagaagattatagccttag

SEQ ID NO: 2492354 - DNA, 25 bp, Homo sapien
catagacttgcttcaactaaaggaa

SEQ ID NO: 2492355 - DNA, 25 bp, Homo sapien
ttgagcctttaagggagtggatata

SEQ ID NO: 2492356 - DNA, 25 bp, Homo sapien
gaatagcgcctagggttgagccttt

SEQ ID NO: 2492357 - DNA, 25 bp, Homo sapien
tgcatgacagagtaaaagatcccat

SEQ ID NO: 2492358 - DNA, 25 bp, Homo sapien
cccttcgtgagaattggcttcctga

SEQ ID NO: 2492359 - DNA, 25 bp, Homo sapien
gagagtgtggaatctagtttgcccc

SEQ ID NO: 2492360 - DNA, 25 bp, Homo sapien
gcaaagttgctagcattcctgtgac

SEQ ID NO: 2492361 - DNA, 25 bp, Homo sapien
ggaataagccctgcccagtatgtag

SEQ ID NO: 2492362 - DNA, 25 bp, Homo sapien
gatgttatctgtgaaaatagccacc

SEQ ID NO: 2492363 - DNA, 25 bp, Homo sapien
ccacacccggctgtaaaaatgtact

SEQ ID NO: 2492364 - DNA, 25 bp, Homo sapien
acatggttcccagcctaggtttcag

SEQ ID NO: 2492365 - DNA, 25 bp, Homo sapien
tagccaccatttacccgtaagacaa

SEQ ID NO: 2492366 - DNA, 25 bp, Homo sapien
gaaaagttaattcagaaatttgata

SEQ ID NO: 2492367 - DNA, 25 bp, Homo sapien
cagttttagaaacccgtgaattcag

SEQ ID NO: 2492368 - DNA, 25 bp, Homo sapien
gaaatttgataaacagaattgttat

SEQ ID NO: 2492369 - DNA, 25 bp, Homo sapien
cagaaaagttaattcagaaatttga

SEQ ID NO: 2492370 - DNA, 25 bp, Homo sapien
ggcaaaactcatcttgacccctgtt

SEQ ID NO: 2492371 - DNA, 25 bp, Homo sapien
ccctgttgcaggcaaaggaacgcag

SEQ ID NO: 2492372 - DNA, 25 bp, Homo sapien
gccaagctatatttataatgaacaa

SEQ ID NO: 2492373 - DNA, 25 bp, Homo sapien
gactacggaaagttcaggacatcaa

SEQ ID NO: 2492374 - DNA, 25 bp, Homo sapien
gacatggcagaggtttcctaaaaat

SEQ ID NO: 2492375 - DNA, 25 bp, Homo sapien
gacttagaacctctaaattattgac

SEQ ID NO: 2492376 - DNA, 25 bp, Homo sapien
gaaaagatgatataacagttaacag

SEQ ID NO: 2492377 - DNA, 25 bp, Homo sapien
tctcctttggagacttagaacctct

SEQ ID NO: 2492378 - DNA, 25 bp, Homo sapien
tatttttcgagcctagcaatgatct

SEQ ID NO: 2492379 - DNA, 25 bp, Homo sapien
gaactgtaagcttagaataggactg

SEQ ID NO: 2492380 - DNA, 25 bp, Homo sapien
gtcattcctggtagaacaagcttta

SEQ ID NO: 2492381 - DNA, 25 bp, Homo sapien
gatgagagccgaataaggtttgcct

SEQ ID NO: 2492382 - DNA, 25 bp, Homo sapien
gtaggccttccttcaagatcacagt

SEQ ID NO: 2492383 - DNA, 25 bp, Homo sapien
cacagatctggtacttactcgccta

SEQ ID NO: 2492384 - DNA, 25 bp, Homo sapien
cactgtcctgtattaagtaggcctt

SEQ ID NO: 2492385 - DNA, 25 bp, Homo sapien
tactcgcctagtgaccttagagaca

SEQ ID NO: 2492386 - DNA, 25 bp, Homo sapien
ggagtcccgctgtttagcccaggcc

SEQ ID NO: 2492387 - DNA, 25 bp, Homo sapien
agtcccgctgtttagcccaggccgg

SEQ ID NO: 2492388 - DNA, 25 bp, Homo sapien
caccgcgcccagccgtatctccttt

SEQ ID NO: 2492389 - DNA, 25 bp, Homo sapien
ccgcgcccagccgtatctcctttca

SEQ ID NO: 2492390 - DNA, 25 bp, Homo sapien
gtttctttttataggaggcatctga

SEQ ID NO: 2492391 - DNA, 25 bp, Homo sapien
tcttaaaagttgatatggtgtcaga

SEQ ID NO: 2492392 - DNA, 25 bp, Homo sapien
catctgagaagaccaaatctcttca

SEQ ID NO: 2492393 - DNA, 25 bp, Homo sapien
agagagggtcttggctgaaaagcct

SEQ ID NO: 2492394 - DNA, 25 bp, Homo sapien
gaaatggtcccatagcttagcatgt

SEQ ID NO: 2492395 - DNA, 25 bp, Homo sapien
gaccagaaggcatactttccatcca

SEQ ID NO: 2492396 - DNA, 25 bp, Homo sapien
tccaaagggatggtacgaggctgta

SEQ ID NO: 2492397 - DNA, 25 bp, Homo sapien
gctgtattatttaaggaaatggtcc

SEQ ID NO: 2492398 - DNA, 25 bp, Homo sapien
cagaatcaccgttcagcgtggcggg

SEQ ID NO: 2492399 - DNA, 25 bp, Homo sapien
ccaggaaaactggtaagatcagcta

SEQ ID NO: 2492400 - DNA, 25 bp, Homo sapien
ggtacctggtttgaccacagttaga

SEQ ID NO: 2492401 - DNA, 25 bp, Homo sapien
ctaaattcagaggtagtcatggcct

SEQ ID NO: 2492402 - DNA, 25 bp, Homo sapien
tcttctgtcagcgttcatagtgagc

SEQ ID NO: 2492403 - DNA, 25 bp, Homo sapien
tctactagagaaggcacacatggag

SEQ ID NO: 2492404 - DNA, 25 bp, Homo sapien
tgggaggttgcctacgcattaagac

SEQ ID NO: 2492405 - DNA, 25 bp, Homo sapien
taaaatgactcaaagccctaggcag

SEQ ID NO: 2492406 - DNA, 25 bp, Homo sapien
cagtgggacgcgagtctgaagctca

SEQ ID NO: 2492407 - DNA, 25 bp, Homo sapien
cccagactgcctgcgaagaggtgaa

SEQ ID NO: 2492408 - DNA, 25 bp, Homo sapien
gatatgaggcctcaactctgcagtg

SEQ ID NO: 2492409 - DNA, 25 bp, Homo sapien
gcatccaggtgccaaaagctaggga

SEQ ID NO: 2492410 - DNA, 25 bp, Homo sapien
ttcaggaagatcgtggagtttctcc

SEQ ID NO: 2492411 - DNA, 25 bp, Homo sapien
gcttatattcatccggttctctgta

SEQ ID NO: 2492412 - DNA, 25 bp, Homo sapien
tccagtcaaggtcccactagagtga

SEQ ID NO: 2492413 - DNA, 25 bp, Homo sapien
ggagtgagcaatccctgattccagg

SEQ ID NO: 2492414 - DNA, 25 bp, Homo sapien
tgaagaatatgtgcaaaagactcac

SEQ ID NO: 2492415 - DNA, 25 bp, Homo sapien
tatttgaagaatatgtgcaaaagac

SEQ ID NO: 2492416 - DNA, 25 bp, Homo sapien
ttatttgaagaatatgtgcaaaaga

SEQ ID NO: 2492417 - DNA, 25 bp, Homo sapien
tttgaagaatatgtgcaaaagactc

SEQ ID NO: 2492418 - DNA, 25 bp, Homo sapien
cctttttaagagcactgaagttctg

SEQ ID NO: 2492419 - DNA, 25 bp, Homo sapien
caattgcccttggaatggaagtaga

SEQ ID NO: 2492420 - DNA, 25 bp, Homo sapien
tctgtatagaggaatcattgggcat

SEQ ID NO: 2492421 - DNA, 25 bp, Homo sapien
taggctttgttgcagctgagtggtc

SEQ ID NO: 2492422 - DNA, 25 bp, Homo sapien
gtggatcatgtccagggactgtaac

SEQ ID NO: 2492423 - DNA, 25 bp, Homo sapien
tgtgtggatcatgtccagggactgt

SEQ ID NO: 2492424 - DNA, 25 bp, Homo sapien
ttgtgatgtgtggatcatgtccagg

SEQ ID NO: 2492425 - DNA, 25 bp, Homo sapien
tgatgtgtggatcatgtccagggac

SEQ ID NO: 2492426 - DNA, 25 bp, Homo sapien
tttattatataagacccaggcaaga

SEQ ID NO: 2492427 - DNA, 25 bp, Homo sapien
tgatcaaaaacttgaccctttacac

SEQ ID NO: 2492428 - DNA, 25 bp, Homo sapien
tccacaattacattgggtaatggat

SEQ ID NO: 2492429 - DNA, 25 bp, Homo sapien
gagaaggagataatactctccatat

SEQ ID NO: 2492430 - DNA, 25 bp, Homo sapien
tgtattaatagggaattaataagaa

SEQ ID NO: 2492431 - DNA, 25 bp, Homo sapien
cagatgctctattttgtattaatag

SEQ ID NO: 2492432 - DNA, 25 bp, Homo sapien
agatgctctattttgtattaatagg

SEQ ID NO: 2492433 - DNA, 25 bp, Homo sapien
gatgctctattttgtattaataggg

SEQ ID NO: 2492434 - DNA, 25 bp, Homo sapien
tcctcacgaggatatttacagcatg

SEQ ID NO: 2492435 - DNA, 25 bp, Homo sapien
tatttacagcatgacagctccaacg

SEQ ID NO: 2492436 - DNA, 25 bp, Homo sapien
gctccaacgtaatttcaaaacactg

SEQ ID NO: 2492437 - DNA, 25 bp, Homo sapien
ccaaaaggatggaagcttctcctca

SEQ ID NO: 2492438 - DNA, 25 bp, Homo sapien
tatgggtaactggatcagagctgac

SEQ ID NO: 2492439 - DNA, 25 bp, Homo sapien
aatcagacagctacatgtaaacagg

SEQ ID NO: 2492440 - DNA, 25 bp, Homo sapien
tattgccaggtaccatatgaagtgc

SEQ ID NO: 2492441 - DNA, 25 bp, Homo sapien
tggagccaagtatcacgtgcctcgg

SEQ ID NO: 2492442 - DNA, 25 bp, Homo sapien
gccaacaaaacatccaggccaggcc

SEQ ID NO: 2492443 - DNA, 25 bp, Homo sapien
gcagatagccagaactgagaatgcc

SEQ ID NO: 2492444 - DNA, 25 bp, Homo sapien
ctagcagatagccagaactgagaat

SEQ ID NO: 2492445 - DNA, 25 bp, Homo sapien
aactgagaatgccaagcgtggaggg

SEQ ID NO: 2492446 - DNA, 25 bp, Homo sapien
gctctgccactggacaggatgggcc

SEQ ID NO: 2492447 - DNA, 25 bp, Homo sapien
agtgaacatgaaggacagctctgcc

SEQ ID NO: 2492448 - DNA, 25 bp, Homo sapien
aggatgggccctttcttagctacaa

SEQ ID NO: 2492449 - DNA, 25 bp, Homo sapien
ggatttgccttcgaaagttagacag

SEQ ID NO: 2492450 - DNA, 25 bp, Homo sapien
cttggagtggataccaagagtatcc

SEQ ID NO: 2492451 - DNA, 25 bp, Homo sapien
actcgtctcctttcttcatgttggg

SEQ ID NO: 2492452 - DNA, 25 bp, Homo sapien
tcatcatcaggcgttaagcttcggg

SEQ ID NO: 2492453 - DNA, 25 bp, Homo sapien
tttgtaacaccattaggaaagttca

SEQ ID NO: 2492454 - DNA, 25 bp, Homo sapien
catttaaaagatgaaccaagacctt

SEQ ID NO: 2492455 - DNA, 25 bp, Homo sapien
ctgcatttaaaagatgaaccaagac

SEQ ID NO: 2492456 - DNA, 25 bp, Homo sapien
aagatgaaccaagacctttaaactg

SEQ ID NO: 2492457 - DNA, 25 bp, Homo sapien
agatgaaccaagacctttaaactga

SEQ ID NO: 2492458 - DNA, 25 bp, Homo sapien
gaaatttcgattcaagtcatactgg

SEQ ID NO: 2492459 - DNA, 25 bp, Homo sapien
tgttttcagccacttcatgactgcc

SEQ ID NO: 2492460 - DNA, 25 bp, Homo sapien
gagaggacaaacgtctctgttttca

SEQ ID NO: 2492461 - DNA, 25 bp, Homo sapien
caaatgggtaactggccacgagggc

SEQ ID NO: 2492462 - DNA, 25 bp, Homo sapien
cagtcaggctttttgacggcttcaa

SEQ ID NO: 2492463 - DNA, 25 bp, Homo sapien
tacgagatagtcaatcagatggagc

SEQ ID NO: 2492464 - DNA, 25 bp, Homo sapien
tttgccatcactggttacgagatag

SEQ ID NO: 2492465 - DNA, 25 bp, Homo sapien
catggaaggcatgatgtgtatccgg

SEQ ID NO: 2492466 - DNA, 25 bp, Homo sapien
gccacgtatttgaactctggaatcc

SEQ ID NO: 2492467 - DNA, 25 bp, Homo sapien
tttgccacgtatttgaactctggaa

SEQ ID NO: 2492468 - DNA, 25 bp, Homo sapien
tgccacgtatttgaactctggaatc

SEQ ID NO: 2492469 - DNA, 25 bp, Homo sapien
atttgccacgtatttgaactctgga

SEQ ID NO: 2492470 - DNA, 25 bp, Homo sapien
accgccccacaacaagaacccacag

SEQ ID NO: 2492471 - DNA, 25 bp, Homo sapien
ccgccccacaacaagaacccacagg

SEQ ID NO: 2492472 - DNA, 25 bp, Homo sapien
cgccccacaacaagaacccacaggt

SEQ ID NO: 2492473 - DNA, 25 bp, Homo sapien
gagatgtgggtatgtttgatatccg

SEQ ID NO: 2492474 - DNA, 25 bp, Homo sapien
tgtgggtatgtttgatatccgtcat

SEQ ID NO: 2492475 - DNA, 25 bp, Homo sapien
gatgtgggtatgtttgatatccgtc

SEQ ID NO: 2492476 - DNA, 25 bp, Homo sapien
cttagagatgtgggtatgtttgata

SEQ ID NO: 2492477 - DNA, 25 bp, Homo sapien
catattctgtgtagtgggctgggaa

SEQ ID NO: 2492478 - DNA, 25 bp, Homo sapien
gccacaggatcccaatgaagcttaa

SEQ ID NO: 2492479 - DNA, 25 bp, Homo sapien
tgtacagatgtgatgccctctagcc

SEQ ID NO: 2492480 - DNA, 25 bp, Homo sapien
tgaactcgcaaagctgagagcctgt

SEQ ID NO: 2492481 - DNA, 25 bp, Homo sapien
tgtgttagtataaccctgggccttg

SEQ ID NO: 2492482 - DNA, 25 bp, Homo sapien
tctgcgtggatctgggaaccatgtc

SEQ ID NO: 2492483 - DNA, 25 bp, Homo sapien
tgagaaataggcaggcatttgactc

SEQ ID NO: 2492484 - DNA, 25 bp, Homo sapien
gaatttcccgttgcacagattctgg

SEQ ID NO: 2492485 - DNA, 25 bp, Homo sapien
cctgcaatggcactctgagggtagg

SEQ ID NO: 2492486 - DNA, 25 bp, Homo sapien
tggttgttaccagggactacctcat

SEQ ID NO: 2492487 - DNA, 25 bp, Homo sapien
tacctcatgctcaccagtcttcaca

SEQ ID NO: 2492488 - DNA, 25 bp, Homo sapien
ggtgtggagcgctggttgttaccag

SEQ ID NO: 2492489 - DNA, 25 bp, Homo sapien
tggagtccgagtcacctttggtccg

SEQ ID NO: 2492490 - DNA, 25 bp, Homo sapien
ttttccagtattgatggaaaagtcc

SEQ ID NO: 2492491 - DNA, 25 bp, Homo sapien
actgttttccagtattgatggaaaa

SEQ ID NO: 2492492 - DNA, 25 bp, Homo sapien
tggtccggggattagatgaaactgt

SEQ ID NO: 2492493 - DNA, 25 bp, Homo sapien
ttcagctgtactaagagcgagatcg

SEQ ID NO: 2492494 - DNA, 25 bp, Homo sapien
gaggaagaggtcaaacataaccaga

SEQ ID NO: 2492495 - DNA, 25 bp, Homo sapien
ctctagggacctcatactataaaaa

SEQ ID NO: 2492496 - DNA, 25 bp, Homo sapien
gatcgagcattaccttaaagtacaa

SEQ ID NO: 2492497 - DNA, 25 bp, Homo sapien
ccataagaactcatcctttagtggc

SEQ ID NO: 2492498 - DNA, 25 bp, Homo sapien
ccctattgtctatttattgctacca

SEQ ID NO: 2492499 - DNA, 25 bp, Homo sapien
gaaaagacagtttgttggaggtctg

SEQ ID NO: 2492500 - DNA, 25 bp, Homo sapien
ttatttgttatgagtgcctgcaggt

SEQ ID NO: 2492501 - DNA, 25 bp, Homo sapien
gaattctgaaaacccaacaataaga

SEQ ID NO: 2492502 - DNA, 25 bp, Homo sapien
cagcaaacaagctccttgttattta

SEQ ID NO: 2492503 - DNA, 25 bp, Homo sapien
gatgaaagagttatccaaaatacag

SEQ ID NO: 2492504 - DNA, 25 bp, Homo sapien
tatcaatgcattcctattagaatgg

SEQ ID NO: 2492505 - DNA, 25 bp, Homo sapien
gaaaaggactgacgaatacgatctc

SEQ ID NO: 2492506 - DNA, 25 bp, Homo sapien
gctaaaattgcaaactcctgggccc

SEQ ID NO: 2492507 - DNA, 25 bp, Homo sapien
cttctgtaaggccaaagatactgaa

SEQ ID NO: 2492508 - DNA, 25 bp, Homo sapien
cctttttaagtgaggcatggaacat

SEQ ID NO: 2492509 - DNA, 25 bp, Homo sapien
gatagctcctcaatttcaatacctg

SEQ ID NO: 2492510 - DNA, 25 bp, Homo sapien
cagatgataacttggtataaaggct

SEQ ID NO: 2492511 - DNA, 25 bp, Homo sapien
gaaacctatatctaaaatgactgcc

SEQ ID NO: 2492512 - DNA, 25 bp, Homo sapien
atttgtgtatttgtgagtatgggca

SEQ ID NO: 2492513 - DNA, 25 bp, Homo sapien
catgtgttttcccagtcgctttacc

SEQ ID NO: 2492514 - DNA, 25 bp, Homo sapien
ctgccacccaagcacagcatgtgtt

SEQ ID NO: 2492515 - DNA, 25 bp, Homo sapien
ttcccaaggacagcgaacagaatgt

SEQ ID NO: 2492516 - DNA, 25 bp, Homo sapien
gagaaattacgttcctgagtcaaaa

SEQ ID NO: 2492517 - DNA, 25 bp, Homo sapien
aagccagaggcatttatttaaacac

SEQ ID NO: 2492518 - DNA, 25 bp, Homo sapien
gcctggcccctgcttaactcttggg

SEQ ID NO: 2492519 - DNA, 25 bp, Homo sapien
tgacagacccttgaattattcctgg

SEQ ID NO: 2492520 - DNA, 25 bp, Homo sapien
tattcctggactgttcaaataaagc

SEQ ID NO: 2492521 - DNA, 25 bp, Homo sapien
tgctaggaagaatgtcaattgtttt

SEQ ID NO: 2492522 - DNA, 25 bp, Homo sapien
actacaggaccaagcctagctccaa

SEQ ID NO: 2492523 - DNA, 25 bp, Homo sapien
caggtgcgatcatagtgcagtacag

SEQ ID NO: 2492524 - DNA, 25 bp, Homo sapien
caggaagatttgactaaatttgact

SEQ ID NO: 2492525 - DNA, 25 bp, Homo sapien
tatgtcactaggcagtgggatttcc

SEQ ID NO: 2492526 - DNA, 25 bp, Homo sapien
atggtctactatggctgaagctggg

SEQ ID NO: 2492527 - DNA, 25 bp, Homo sapien
ttgaacgaacgaactgatgaacact

SEQ ID NO: 2492528 - DNA, 25 bp, Homo sapien
ggatttccttcaaaaggctcaactg

SEQ ID NO: 2492529 - DNA, 25 bp, Homo sapien
tactttcccttctgggtaagactgc

SEQ ID NO: 2492530 - DNA, 25 bp, Homo sapien
taaacatgtatttagttacttagga

SEQ ID NO: 2492531 - DNA, 25 bp, Homo sapien
gactgcccacgttaatacatgtaat

SEQ ID NO: 2492532 - DNA, 25 bp, Homo sapien
tatatttacataggcatagcacata

SEQ ID NO: 2492533 - DNA, 25 bp, Homo sapien
tactattcctcccaacaaaagcaga

SEQ ID NO: 2492534 - DNA, 25 bp, Homo sapien
ctactattcctcccaacaaaagcag

SEQ ID NO: 2492535 - DNA, 25 bp, Homo sapien
cctactattcctcccaacaaaagca

SEQ ID NO: 2492536 - DNA, 25 bp, Homo sapien
tcctactattcctcccaacaaaagc

SEQ ID NO: 2492537 - DNA, 25 bp, Homo sapien
ggtaccggttgacttgttctgtgcc

SEQ ID NO: 2492538 - DNA, 25 bp, Homo sapien
ccactcagagtaggtgcgtggaaga

SEQ ID NO: 2492539 - DNA, 25 bp, Homo sapien
tgttctgtgccactcagagtaggtg

SEQ ID NO: 2492540 - DNA, 25 bp, Homo sapien
ggttgacttgttctgtgccactcag

SEQ ID NO: 2492541 - DNA, 25 bp, Homo sapien
gtttggcaaagtgttcacgagacgg

SEQ ID NO: 2492542 - DNA, 25 bp, Homo sapien
gaaagggaggactgagggtttggca

SEQ ID NO: 2492543 - DNA, 25 bp, Homo sapien
caaagtgttcacgagacggacccta

SEQ ID NO: 2492544 - DNA, 25 bp, Homo sapien
ttggcaaagtgttcacgagacggac

SEQ ID NO: 2492545 - DNA, 25 bp, Homo sapien
agaactgtagttttgggcaacagtc

SEQ ID NO: 2492546 - DNA, 25 bp, Homo sapien
tgaaatccagcgcagctaccaaagg

SEQ ID NO: 2492547 - DNA, 25 bp, Homo sapien
tcctggcggtggtagttgaaatcca

SEQ ID NO: 2492548 - DNA, 25 bp, Homo sapien
ctagccagaggcacgggaagtccat

SEQ ID NO: 2492549 - DNA, 25 bp, Homo sapien
tctatctactgttggtgaagcaaaa

SEQ ID NO: 2492550 - DNA, 25 bp, Homo sapien
ggcactgcacttgctcctagggaat

SEQ ID NO: 2492551 - DNA, 25 bp, Homo sapien
gaacaaatctctgcccttaggtagc

SEQ ID NO: 2492552 - DNA, 25 bp, Homo sapien
tagggaatacgactgtaaacaagac

SEQ ID NO: 2492553 - DNA, 25 bp, Homo sapien
caatgagttctgtccaatttggatt

SEQ ID NO: 2492554 - DNA, 25 bp, Homo sapien
gcatactgtgtccacataaggcaaa

SEQ ID NO: 2492555 - DNA, 25 bp, Homo sapien
tccttccaaaatgcatactgtgtcc

SEQ ID NO: 2492556 - DNA, 25 bp, Homo sapien
ttgagaaatacagctccagtgactg

SEQ ID NO: 2492557 - DNA, 25 bp, Homo sapien
ttcttgaggattgagccatgactcc

SEQ ID NO: 2492558 - DNA, 25 bp, Homo sapien
tcttgaggattgagccatgactcct

SEQ ID NO: 2492559 - DNA, 25 bp, Homo sapien
ctttcttgaggattgagccatgact

SEQ ID NO: 2492560 - DNA, 25 bp, Homo sapien
ttctttcttgaggattgagccatga

SEQ ID NO: 2492561 - DNA, 25 bp, Homo sapien
tgtcccatacgcagaaggaagaaat

SEQ ID NO: 2492562 - DNA, 25 bp, Homo sapien
ggcgcggtggcgtgtcgctgtaata

SEQ ID NO: 2492563 - DNA, 25 bp, Homo sapien
ctgggcgcggtggcgtgtcgctgta

SEQ ID NO: 2492564 - DNA, 25 bp, Homo sapien
gcggtggcgtgtcgctgtaatacca

SEQ ID NO: 2492565 - DNA, 25 bp, Homo sapien
cgcggtggcgtgtcgctgtaatacc

SEQ ID NO: 2492566 - DNA, 25 bp, Homo sapien
tagtcaagccggagtaaaacaggga

SEQ ID NO: 2492567 - DNA, 25 bp, Homo sapien
gagctgatgtagtcaagccggagta

SEQ ID NO: 2492568 - DNA, 25 bp, Homo sapien
tacagggactgtactgcttatcaga

SEQ ID NO: 2492569 - DNA, 25 bp, Homo sapien
taaaacagggactatactgcttaca

SEQ ID NO: 2492570 - DNA, 25 bp, Homo sapien
tcatgaagggtatgtggcccaggca

SEQ ID NO: 2492571 - DNA, 25 bp, Homo sapien
aatgggtacatgacggcagctggca

SEQ ID NO: 2492572 - DNA, 25 bp, Homo sapien
gttctgaggatcaagcccagtcatg

SEQ ID NO: 2492573 - DNA, 25 bp, Homo sapien
cttgttaatgacttgttctgaggat

SEQ ID NO: 2492574 - DNA, 25 bp, Homo sapien
gcagcagcagcgccattagaaacag

SEQ ID NO: 2492575 - DNA, 25 bp, Homo sapien
tattaaatgcttggaccatcttccc

SEQ ID NO: 2492576 - DNA, 25 bp, Homo sapien
ggaccatcttccctacaggtatgtg

SEQ ID NO: 2492577 - DNA, 25 bp, Homo sapien
ccatcttccctacaggtatgtgtac

SEQ ID NO: 2492578 - DNA, 25 bp, Homo sapien
aatgcttggaccatcttccctacag

SEQ ID NO: 2492579 - DNA, 25 bp, Homo sapien
gcctgtttatgtttagtcactgagt

SEQ ID NO: 2492580 - DNA, 25 bp, Homo sapien
tcagcagacaggtacctttctcgtt

SEQ ID NO: 2492581 - DNA, 25 bp, Homo sapien
tacctttctcgttgttccctcgagc

SEQ ID NO: 2492582 - DNA, 25 bp, Homo sapien
cgttgttccctcgagcctgtttatg

SEQ ID NO: 2492583 - DNA, 25 bp, Homo sapien
cctctttcttgctgtggagatatcc

SEQ ID NO: 2492584 - DNA, 25 bp, Homo sapien
taggaagatccatctgcttagcccc

SEQ ID NO: 2492585 - DNA, 25 bp, Homo sapien
ccttttagcaaagggcccagatgtt

SEQ ID NO: 2492586 - DNA, 25 bp, Homo sapien
tccagttaccttgcactgacagatc

SEQ ID NO: 2492587 - DNA, 25 bp, Homo sapien
gtcatggcagatggttcgacacggg

SEQ ID NO: 2492588 - DNA, 25 bp, Homo sapien
cagatggttcgacacgggctgatgt

SEQ ID NO: 2492589 - DNA, 25 bp, Homo sapien
cgggctgatgtgggagaccctcctc

SEQ ID NO: 2492590 - DNA, 25 bp, Homo sapien
gggctgatgtgggagaccctcctct

SEQ ID NO: 2492591 - DNA, 25 bp, Homo sapien
gttgcctcttgaaccatttccaatg

SEQ ID NO: 2492592 - DNA, 25 bp, Homo sapien
tgtttctgcctgctaagttttagta

SEQ ID NO: 2492593 - DNA, 25 bp, Homo sapien
cagagaaatggctgctccagttgcc

SEQ ID NO: 2492594 - DNA, 25 bp, Homo sapien
tttagtaagaagtgctcctcctgga

SEQ ID NO: 2492595 - DNA, 25 bp, Homo sapien
ggcggcttttgtatttagactcagg

SEQ ID NO: 2492596 - DNA, 25 bp, Homo sapien
aaggcaaggcggcttttgtatttag

SEQ ID NO: 2492597 - DNA, 25 bp, Homo sapien
cttccaaaggcaaggcggcttttgt

SEQ ID NO: 2492598 - DNA, 25 bp, Homo sapien
aaggcggcttttgtatttagactca

SEQ ID NO: 2492599 - DNA, 25 bp, Homo sapien
cactagactgagcaagtctctgagc

SEQ ID NO: 2492600 - DNA, 25 bp, Homo sapien
gcacatggttccctcacaccagaat

SEQ ID NO: 2492601 - DNA, 25 bp, Homo sapien
gtctctgagcgcacatggttccctc

SEQ ID NO: 2492602 - DNA, 25 bp, Homo sapien
ggcagcccacacactagactgagca

SEQ ID NO: 2492603 - DNA, 25 bp, Homo sapien
cacgcagttgcacatcccatctctg

SEQ ID NO: 2492604 - DNA, 25 bp, Homo sapien
gatgtcgttcgacacgcagttgcac

SEQ ID NO: 2492605 - DNA, 25 bp, Homo sapien
gaatgcaggatgtcgttcgacacgc

SEQ ID NO: 2492606 - DNA, 25 bp, Homo sapien
ctgggaatgcaggatgtcgttcgac

SEQ ID NO: 2492607 - DNA, 25 bp, Homo sapien
cctccttgcctaggctccttccttg

SEQ ID NO: 2492608 - DNA, 25 bp, Homo sapien
gtcctaatacacctgtcgggtccat

SEQ ID NO: 2492609 - DNA, 25 bp, Homo sapien
ctgtcctaatacacctgtcgggtcc

SEQ ID NO: 2492610 - DNA, 25 bp, Homo sapien
taatacacctgtcgggtccattcat

SEQ ID NO: 2492611 - DNA, 25 bp, Homo sapien
gcgctgcctcgctccctattgttgg

SEQ ID NO: 2492612 - DNA, 25 bp, Homo sapien
tgtcgcctcatggaaggccgcgttc

SEQ ID NO: 2492613 - DNA, 25 bp, Homo sapien
gattcctcccatcgctccattttgt

SEQ ID NO: 2492614 - DNA, 25 bp, Homo sapien
tctcgggtttgcgacaggtttcggc

SEQ ID NO: 2492615 - DNA, 25 bp, Homo sapien
tcccttatccggatagctgggtgga

SEQ ID NO: 2492616 - DNA, 25 bp, Homo sapien
tttgtggacccaatgaggaactcct

SEQ ID NO: 2492617 - DNA, 25 bp, Homo sapien
gctgggtggattcttatccctgtgc

SEQ ID NO: 2492618 - DNA, 25 bp, Homo sapien
cctgtgcagtagcaagtgctgactg

SEQ ID NO: 2492619 - DNA, 25 bp, Homo sapien
ctactatgaacagcagataagattg

SEQ ID NO: 2492620 - DNA, 25 bp, Homo sapien
taacatagctggctagctactatga

SEQ ID NO: 2492621 - DNA, 25 bp, Homo sapien
gataattagaggaatgatgttgata

SEQ ID NO: 2492622 - DNA, 25 bp, Homo sapien
ctttatgtaacatagctggctagct

SEQ ID NO: 2492623 - DNA, 25 bp, Homo sapien
ttctgtgacagaataccaatttctt

SEQ ID NO: 2492624 - DNA, 25 bp, Homo sapien
caaacccctcataggtaaatactct

SEQ ID NO: 2492625 - DNA, 25 bp, Homo sapien
gaacacagatataagctcctacact

SEQ ID NO: 2492626 - DNA, 25 bp, Homo sapien
aacagatacgcaaatgaagtcctta

SEQ ID NO: 2492627 - DNA, 25 bp, Homo sapien
cattctagtaatgggtacacctaaa

SEQ ID NO: 2492628 - DNA, 25 bp, Homo sapien
caccatcataataaggtctgttgac

SEQ ID NO: 2492629 - DNA, 25 bp, Homo sapien
cctaatgtgcaaactattgttgaca

SEQ ID NO: 2492630 - DNA, 25 bp, Homo sapien
tactgtatgtgccttcatccaagaa

SEQ ID NO: 2492631 - DNA, 25 bp, Homo sapien
tgcattgtgtattcagcttattagc

SEQ ID NO: 2492632 - DNA, 25 bp, Homo sapien
cgcgcccagtctagtctgattactt

SEQ ID NO: 2492633 - DNA, 25 bp, Homo sapien
gttattgcccaagatttaggatgct

SEQ ID NO: 2492634 - DNA, 25 bp, Homo sapien
aatatcatgatcttaggatcttaga

SEQ ID NO: 2492635 - DNA, 25 bp, Homo sapien
gctagctttcattgctttagctctg

SEQ ID NO: 2492636 - DNA, 25 bp, Homo sapien
tctttgagtattcacaaaacctgtc

SEQ ID NO: 2492637 - DNA, 25 bp, Homo sapien
cacagctgacttaattgaagttaca

SEQ ID NO: 2492638 - DNA, 25 bp, Homo sapien
aaaacctgtctcactacacagctga

SEQ ID NO: 2492639 - DNA, 25 bp, Homo sapien
cttaattgtagagcaaaaagtattt

SEQ ID NO: 2492640 - DNA, 25 bp, Homo sapien
tatgtactgatgctcttaagataca

SEQ ID NO: 2492641 - DNA, 25 bp, Homo sapien
taagttattactgctaggcagtgtg

SEQ ID NO: 2492642 - DNA, 25 bp, Homo sapien
gaagtaactcttaattgtagagcaa

SEQ ID NO: 2492643 - DNA, 25 bp, Homo sapien
cataaggtttggagtaagttgcagt

SEQ ID NO: 2492644 - DNA, 25 bp, Homo sapien
ctgaatggtactgcttctgaggcaa

SEQ ID NO: 2492645 - DNA, 25 bp, Homo sapien
tgagtgatacagtacctgaatggta

SEQ ID NO: 2492646 - DNA, 25 bp, Homo sapien
tattagtgctatacagtcacattcc

SEQ ID NO: 2492647 - DNA, 25 bp, Homo sapien
aatgtttcccctagttgtatgtacg

SEQ ID NO: 2492648 - DNA, 25 bp, Homo sapien
catttgcatcccgtagccctctgta

SEQ ID NO: 2492649 - DNA, 25 bp, Homo sapien
tatgtacgtaaatgcacgcttatcc

SEQ ID NO: 2492650 - DNA, 25 bp, Homo sapien
gcttcagcttaagaggaagtttatg

SEQ ID NO: 2492651 - DNA, 25 bp, Homo sapien
tacagccctgtacagccttacaaag

SEQ ID NO: 2492652 - DNA, 25 bp, Homo sapien
gctattgactctatggtgacttcac

SEQ ID NO: 2492653 - DNA, 25 bp, Homo sapien
gaaaggatcctttgggtataaatca

SEQ ID NO: 2492654 - DNA, 25 bp, Homo sapien
attagcaaagtagtttacagccctg

SEQ ID NO: 2492655 - DNA, 25 bp, Homo sapien
gtgactgttcggcagtttgatatat

SEQ ID NO: 2492656 - DNA, 25 bp, Homo sapien
ggtgactgttcggcagtttgatata

SEQ ID NO: 2492657 - DNA, 25 bp, Homo sapien
ttaggtgactgttcggcagtttgat

SEQ ID NO: 2492658 - DNA, 25 bp, Homo sapien
taggtgactgttcggcagtttgata

SEQ ID NO: 2492659 - DNA, 25 bp, Homo sapien
agtaacaagcatggtatttatcttg

SEQ ID NO: 2492660 - DNA, 25 bp, Homo sapien
ctagtaacaagcatggtatttatct

SEQ ID NO: 2492661 - DNA, 25 bp, Homo sapien
aagcatggtatttatcttgtattga

SEQ ID NO: 2492662 - DNA, 25 bp, Homo sapien
aacaagcatggtatttatcttgtat

SEQ ID NO: 2492663 - DNA, 25 bp, Homo sapien
ttctaaacaagtgaatatgaacatg

SEQ ID NO: 2492664 - DNA, 25 bp, Homo sapien
gcttcagagtattaaaggtaacagt

SEQ ID NO: 2492665 - DNA, 25 bp, Homo sapien
cagagtattaaaggtaacagttcta

SEQ ID NO: 2492666 - DNA, 25 bp, Homo sapien
gaacatgagaaataatactaccatc

SEQ ID NO: 2492667 - DNA, 25 bp, Homo sapien
tacagctgtacaatggaatagtact

SEQ ID NO: 2492668 - DNA, 25 bp, Homo sapien
tcatcacggaaagcatatcagtggc

SEQ ID NO: 2492669 - DNA, 25 bp, Homo sapien
catgcaatgacatgggtgaatctta

SEQ ID NO: 2492670 - DNA, 25 bp, Homo sapien
tatgcagagttaagctagacaacaa

SEQ ID NO: 2492671 - DNA, 25 bp, Homo sapien
taaaacatcaatttgtggccgggcg

SEQ ID NO: 2492672 - DNA, 25 bp, Homo sapien
ggtgatcatttcaggtgtgtataca

SEQ ID NO: 2492673 - DNA, 25 bp, Homo sapien
ttggtggtgatcatttcaggtgtgt

SEQ ID NO: 2492674 - DNA, 25 bp, Homo sapien
ggtggtgatcatttcaggtgtgtat

SEQ ID NO: 2492675 - DNA, 25 bp, Homo sapien
gtgttggtattaacggatacatgta

SEQ ID NO: 2492676 - DNA, 25 bp, Homo sapien
cacctgttgaaagaggggctgtgcc

SEQ ID NO: 2492677 - DNA, 25 bp, Homo sapien
aacacctgttgaaagaggggctgtg

SEQ ID NO: 2492678 - DNA, 25 bp, Homo sapien
tgccacaactgattaggttccaatc

SEQ ID NO: 2492679 - DNA, 25 bp, Homo sapien
attggatttggagagctacgtcagg

SEQ ID NO: 2492680 - DNA, 25 bp, Homo sapien
taatcagtgggttacgacagtcatt

SEQ ID NO: 2492681 - DNA, 25 bp, Homo sapien
taactaattcatcggccttctgtaa

SEQ ID NO: 2492682 - DNA, 25 bp, Homo sapien
tgaaaacagtgacccagtagttggg

SEQ ID NO: 2492683 - DNA, 25 bp, Homo sapien
tgtcgcttgtaaacaaggagcactt

SEQ ID NO: 2492684 - DNA, 25 bp, Homo sapien
tccctgggcggtagctgttttactc

SEQ ID NO: 2492685 - DNA, 25 bp, Homo sapien
tgaacttccgggctgccgagccttt

SEQ ID NO: 2492686 - DNA, 25 bp, Homo sapien
tttactcttgtaaaagcgctgcctt

SEQ ID NO: 2492687 - DNA, 25 bp, Homo sapien
tgtttctgtgaacttccgggctgcc

SEQ ID NO: 2492688 - DNA, 25 bp, Homo sapien
gaggggtgctcgtcctgtttcacga

SEQ ID NO: 2492689 - DNA, 25 bp, Homo sapien
gtttcacgagactggtacacagcac

SEQ ID NO: 2492690 - DNA, 25 bp, Homo sapien
cgagactggtacacagcacctccat

SEQ ID NO: 2492691 - DNA, 25 bp, Homo sapien
cacaaggaagccattctgacccgtg

SEQ ID NO: 2492692 - DNA, 25 bp, Homo sapien
taggaattaagtgaaaggtcacact

SEQ ID NO: 2492693 - DNA, 25 bp, Homo sapien
gcaggagcaaaatatggcctttctt

SEQ ID NO: 2492694 - DNA, 25 bp, Homo sapien
aaggttgtggagtgtaactccagaa

SEQ ID NO: 2492695 - DNA, 25 bp, Homo sapien
tttgcaaatagaactaatactggtg

SEQ ID NO: 2492696 - DNA, 25 bp, Homo sapien
taccaaatgatagaaacagactgcc

SEQ ID NO: 2492697 - DNA, 25 bp, Homo sapien
caaaataccagctgatgaaggcatc

SEQ ID NO: 2492698 - DNA, 25 bp, Homo sapien
tcttgaatgatacgattatgcccaa

SEQ ID NO: 2492699 - DNA, 25 bp, Homo sapien
tgaggcagatgagcttacaagtatt

SEQ ID NO: 2492700 - DNA, 25 bp, Homo sapien
gaaacagagataggacatgtccaag

SEQ ID NO: 2492701 - DNA, 25 bp, Homo sapien
aaattcttggaccattctgacgtga

SEQ ID NO: 2492702 - DNA, 25 bp, Homo sapien
gcatatcgagataccctgaggtgta

SEQ ID NO: 2492703 - DNA, 25 bp, Homo sapien
tacaaaggatgagtcaaggtagcgg

SEQ ID NO: 2492704 - DNA, 25 bp, Homo sapien
ttttactacagcttcaatcttgttg

SEQ ID NO: 2492705 - DNA, 25 bp, Homo sapien
tttactacagcttcaatcttgttgc

SEQ ID NO: 2492706 - DNA, 25 bp, Homo sapien
ctcttcagtgcattgtccggtgaac

SEQ ID NO: 2492707 - DNA, 25 bp, Homo sapien
aactcggataaataacattatggtc

SEQ ID NO: 2492708 - DNA, 25 bp, Homo sapien
gcattgtccggtgaactcggataaa

SEQ ID NO: 2492709 - DNA, 25 bp, Homo sapien
cggtgaactcggataaataacatta

SEQ ID NO: 2492710 - DNA, 25 bp, Homo sapien
ccagcctgagtagattccttgtcca

SEQ ID NO: 2492711 - DNA, 25 bp, Homo sapien
tagagctcgcccatcaaaaatagtg

SEQ ID NO: 2492712 - DNA, 25 bp, Homo sapien
tatcagacggctgacttacactgcc

SEQ ID NO: 2492713 - DNA, 25 bp, Homo sapien
tgaatcgtggctccgttgcacactg

SEQ ID NO: 2492714 - DNA, 25 bp, Homo sapien
gagatccaatggcaaagatgggaga

SEQ ID NO: 2492715 - DNA, 25 bp, Homo sapien
ggagcaagcaatggacccagtgaca

SEQ ID NO: 2492716 - DNA, 25 bp, Homo sapien
aaagccaagactgtgtatggggaca

SEQ ID NO: 2492717 - DNA, 25 bp, Homo sapien
cagcctcaatgtgtaggaaaaggtg

SEQ ID NO: 2492718 - DNA, 25 bp, Homo sapien
aactgagccattacaccagccttgg

SEQ ID NO: 2492719 - DNA, 25 bp, Homo sapien
agaggcagctggatccttcaggcct

SEQ ID NO: 2492720 - DNA, 25 bp, Homo sapien
cagcacttctgtgagaactgagcca

SEQ ID NO: 2492721 - DNA, 25 bp, Homo sapien
tgtcatattctgtcagcacttctgt

SEQ ID NO: 2492722 - DNA, 25 bp, Homo sapien
tatttaagtgtgctaaatcctagtg

SEQ ID NO: 2492723 - DNA, 25 bp, Homo sapien
ctttctggaggaataatgatgccaa

SEQ ID NO: 2492724 - DNA, 25 bp, Homo sapien
tttaagtgtgctaaatcctagtgaa

SEQ ID NO: 2492725 - DNA, 25 bp, Homo sapien
gaactttctggaggaataatgatgc

SEQ ID NO: 2492726 - DNA, 25 bp, Homo sapien
tcaatttggactgattgcttgaaca

SEQ ID NO: 2492727 - DNA, 25 bp, Homo sapien
ctattcaatttggactgattgcttg

SEQ ID NO: 2492728 - DNA, 25 bp, Homo sapien
atgtaacctttggagcactgagttg

SEQ ID NO: 2492729 - DNA, 25 bp, Homo sapien
aatttggactgattgcttgaacaga

SEQ ID NO: 2492730 - DNA, 25 bp, Homo sapien
ctgctggccgagggcatggtgccac

SEQ ID NO: 2492731 - DNA, 25 bp, Homo sapien
atgaagccgacaggcacggggaggc

SEQ ID NO: 2492732 - DNA, 25 bp, Homo sapien
gaatgaagccgacaggcacggggag

SEQ ID NO: 2492733 - DNA, 25 bp, Homo sapien
agagagaatgaagccgacaggcacg

SEQ ID NO: 2492734 - DNA, 25 bp, Homo sapien
gcagagagaatgaagccgacaggca

SEQ ID NO: 2492735 - DNA, 25 bp, Homo sapien
catgtaggtgcggttcactatccat

SEQ ID NO: 2492736 - DNA, 25 bp, Homo sapien
tgccatcatgtaggtgcggttcact

SEQ ID NO: 2492737 - DNA, 25 bp, Homo sapien
ttagggaaaatccagcattcttggg

SEQ ID NO: 2492738 - DNA, 25 bp, Homo sapien
gatgggcatgcctgaagaaaatcat

SEQ ID NO: 2492739 - DNA, 25 bp, Homo sapien
actttcaccgcggcaccacctctcc

SEQ ID NO: 2492740 - DNA, 25 bp, Homo sapien
acaccactttcaccgcggcaccacc

SEQ ID NO: 2492741 - DNA, 25 bp, Homo sapien
tttcaccgcggcaccacctctccag

SEQ ID NO: 2492742 - DNA, 25 bp, Homo sapien
gtacaccactttcaccgcggcacca

SEQ ID NO: 2492743 - DNA, 25 bp, Homo sapien
tagcctcagcaagagaagtggaatc

SEQ ID NO: 2492744 - DNA, 25 bp, Homo sapien
tccacagctctgtataatgctatag

SEQ ID NO: 2492745 - DNA, 25 bp, Homo sapien
cctatcataagtggatttggaagag

SEQ ID NO: 2492746 - DNA, 25 bp, Homo sapien
tttagctgcctatcataagtggatt

SEQ ID NO: 2492747 - DNA, 25 bp, Homo sapien
cggcctctatacatgaaggtgagaa

SEQ ID NO: 2492748 - DNA, 25 bp, Homo sapien
ttacaccacagggttctgttctatg

SEQ ID NO: 2492749 - DNA, 25 bp, Homo sapien
tgcaggacggcaacatgaacaccgg

SEQ ID NO: 2492750 - DNA, 25 bp, Homo sapien
cacagggttctgttctatgtcattt

SEQ ID NO: 2492751 - DNA, 25 bp, Homo sapien
ccatttagaaggctcctggtcagta

SEQ ID NO: 2492752 - DNA, 25 bp, Homo sapien
gcatctctccatagtcaccatttag

SEQ ID NO: 2492753 - DNA, 25 bp, Homo sapien
gcctcagtgaaatccggctcccagt

SEQ ID NO: 2492754 - DNA, 25 bp, Homo sapien
ctttgtaggtgaaatacttcctgcc

SEQ ID NO: 2492755 - DNA, 25 bp, Homo sapien
tagaggcaggcgggtagagggatgc

SEQ ID NO: 2492756 - DNA, 25 bp, Homo sapien
gtagaggcaggcgggtagagggatg

SEQ ID NO: 2492757 - DNA, 25 bp, Homo sapien
cggtgagtggctagggaaacggact

SEQ ID NO: 2492758 - DNA, 25 bp, Homo sapien
tcgggatccgggctgagggctcggc

SEQ ID NO: 2492759 - DNA, 25 bp, Homo sapien
ccgggccagcgggacgggaagagct

SEQ ID NO: 2492760 - DNA, 25 bp, Homo sapien
gtcggagctggcgttctcgtgcccc

SEQ ID NO: 2492761 - DNA, 25 bp, Homo sapien
ccgacttttcgcctcctctgggtct

SEQ ID NO: 2492762 - DNA, 25 bp, Homo sapien
tgggctccagttcccgacttttcgc

SEQ ID NO: 2492763 - DNA, 25 bp, Homo sapien
gctccagttcccgacttttcgcctc

SEQ ID NO: 2492764 - DNA, 25 bp, Homo sapien
cagactcaatcttgggctccagttc

SEQ ID NO: 2492765 - DNA, 25 bp, Homo sapien
tcgatttggactgggctcggaaccg

SEQ ID NO: 2492766 - DNA, 25 bp, Homo sapien
tccgggatcgatttggactgggctc

SEQ ID NO: 2492767 - DNA, 25 bp, Homo sapien
gggcttttcatccagatttgcttca

SEQ ID NO: 2492768 - DNA, 25 bp, Homo sapien
tgcttcagggttgtccgggatcgat

SEQ ID NO: 2492769 - DNA, 25 bp, Homo sapien
caccagcatgctctgtatcatcttt

SEQ ID NO: 2492770 - DNA, 25 bp, Homo sapien
gcaccagcatgctctgtatcatctt

SEQ ID NO: 2492771 - DNA, 25 bp, Homo sapien
aggtcgctgtggcaccagcatgctc

SEQ ID NO: 2492772 - DNA, 25 bp, Homo sapien
ccatgaagtgtttacttcggataaa

SEQ ID NO: 2492773 - DNA, 25 bp, Homo sapien
ttgagagattccttacactgttaaa

SEQ ID NO: 2492774 - DNA, 25 bp, Homo sapien
ttgtttaaacttattccatgaagtg

SEQ ID NO: 2492775 - DNA, 25 bp, Homo sapien
tgtttacttcggataaactgaggat

SEQ ID NO: 2492776 - DNA, 25 bp, Homo sapien
cagtgacgctatctgcaactctcat

SEQ ID NO: 2492777 - DNA, 25 bp, Homo sapien
cttcttgaaaccagtgacgctatct

SEQ ID NO: 2492778 - DNA, 25 bp, Homo sapien
aaaccagtgacgctatctgcaactc

SEQ ID NO: 2492779 - DNA, 25 bp, Homo sapien
tcttgaaaccagtgacgctatctgc

SEQ ID NO: 2492780 - DNA, 25 bp, Homo sapien
gcctttgacatagtgaagcagcaga

SEQ ID NO: 2492781 - DNA, 25 bp, Homo sapien
tgattagccaacaagataaataact

SEQ ID NO: 2492782 - DNA, 25 bp, Homo sapien
gcctctggagaaaactgttgaactg

SEQ ID NO: 2492783 - DNA, 25 bp, Homo sapien
tgtgtttctcaaccagagcctctgg

SEQ ID NO: 2492784 - DNA, 25 bp, Homo sapien
gattgtttgatatgccagctaacat

SEQ ID NO: 2492785 - DNA, 25 bp, Homo sapien
gaatatactgattgtttgatatgcc

SEQ ID NO: 2492786 - DNA, 25 bp, Homo sapien
gagtgtttgaatctggcaaaggaat

SEQ ID NO: 2492787 - DNA, 25 bp, Homo sapien
cctgagtgtttgaatctggcaaagg

SEQ ID NO: 2492788 - DNA, 25 bp, Homo sapien
actgctcatctggagatttttctgg

SEQ ID NO: 2492789 - DNA, 25 bp, Homo sapien
taagtgttagattcactgtagaaat

SEQ ID NO: 2492790 - DNA, 25 bp, Homo sapien
gtagaaatatgctccactgctcatc

SEQ ID NO: 2492791 - DNA, 25 bp, Homo sapien
ttctcgaactctggagggtgtggac

SEQ ID NO: 2492792 - DNA, 25 bp, Homo sapien
aactggttgaacacgttggtgattc

SEQ ID NO: 2492793 - DNA, 25 bp, Homo sapien
aacaggtatagcttgtcttgagtgc

SEQ ID NO: 2492794 - DNA, 25 bp, Homo sapien
cacagcagtagttcagagaaaacag

SEQ ID NO: 2492795 - DNA, 25 bp, Homo sapien
aagttagggaggaccactgaattca

SEQ ID NO: 2492796 - DNA, 25 bp, Homo sapien
gcagctgagagggcaagttctcgat

SEQ ID NO: 2492797 - DNA, 25 bp, Homo sapien
agctgagagggcaagttctcgatgt

SEQ ID NO: 2492798 - DNA, 25 bp, Homo sapien
agagggcaagttctcgatgtgtgag

SEQ ID NO: 2492799 - DNA, 25 bp, Homo sapien
ctgagagggcaagttctcgatgtgt

SEQ ID NO: 2492800 - DNA, 25 bp, Homo sapien
cagtggcacgatcctttagcctcga

SEQ ID NO: 2492801 - DNA, 25 bp, Homo sapien
cgctactgtgctgggctgatttttt

SEQ ID NO: 2492802 - DNA, 25 bp, Homo sapien
catgcgctactgtgctgggctgatt

SEQ ID NO: 2492803 - DNA, 25 bp, Homo sapien
ctttagcctcgatctgctggactca

SEQ ID NO: 2492804 - DNA, 25 bp, Homo sapien
tgttgaccctctccagcgttcaatg

SEQ ID NO: 2492805 - DNA, 25 bp, Homo sapien
taacagcatctatcccatgctaggg

SEQ ID NO: 2492806 - DNA, 25 bp, Homo sapien
gaatacatcatatctgggacttagg

SEQ ID NO: 2492807 - DNA, 25 bp, Homo sapien
tcagagacatcattcacaagtaact

SEQ ID NO: 2492808 - DNA, 25 bp, Homo sapien
aatttagttcaagggctaagcaaca

SEQ ID NO: 2492809 - DNA, 25 bp, Homo sapien
gctgagctgatcatacactgacctg

SEQ ID NO: 2492810 - DNA, 25 bp, Homo sapien
agatgactttggattttgcaatgcc

SEQ ID NO: 2492811 - DNA, 25 bp, Homo sapien
aagttgatactggaagctgagctga

SEQ ID NO: 2492812 - DNA, 25 bp, Homo sapien
agcactgtgtgagaatactgattga

SEQ ID NO: 2492813 - DNA, 25 bp, Homo sapien
tatccagagtgtttatacactagca

SEQ ID NO: 2492814 - DNA, 25 bp, Homo sapien
tagatacatggtttggttacgtggt

SEQ ID NO: 2492815 - DNA, 25 bp, Homo sapien
gaatggataccacaaaatagctatc

SEQ ID NO: 2492816 - DNA, 25 bp, Homo sapien
tccgatgaagttaaattccgtcaag

SEQ ID NO: 2492817 - DNA, 25 bp, Homo sapien
gaatattgcgggcacaacattatcc

SEQ ID NO: 2492818 - DNA, 25 bp, Homo sapien
gacttttgcatgcttgtgtggcccc

SEQ ID NO: 2492819 - DNA, 25 bp, Homo sapien
gcttacagacttgatcagttagggt

SEQ ID NO: 2492820 - DNA, 25 bp, Homo sapien
gctggagtgcagaggcatgatctca

SEQ ID NO: 2492821 - DNA, 25 bp, Homo sapien
gatagagtttcactgttgttactca

SEQ ID NO: 2492822 - DNA, 25 bp, Homo sapien
tgagatagagtttcactgttgttac

SEQ ID NO: 2492823 - DNA, 25 bp, Homo sapien
atagagtttcactgttgttactcag

SEQ ID NO: 2492824 - DNA, 25 bp, Homo sapien
tgtaggcttatctacctactgagta

SEQ ID NO: 2492825 - DNA, 25 bp, Homo sapien
tctacctactgagtaaagtagttgg

SEQ ID NO: 2492826 - DNA, 25 bp, Homo sapien
tgagtaaagtagttgggtgtcctaa

SEQ ID NO: 2492827 - DNA, 25 bp, Homo sapien
gagctcatttgtaggcttatctacc

SEQ ID NO: 2492828 - DNA, 25 bp, Homo sapien
caagtgaagcgacaggttcttctga

SEQ ID NO: 2492829 - DNA, 25 bp, Homo sapien
aggtgattctgcgtgtggacaacat

SEQ ID NO: 2492830 - DNA, 25 bp, Homo sapien
tggacaacatcatcaaagcggcacc

SEQ ID NO: 2492831 - DNA, 25 bp, Homo sapien
gctatcctgggtataacagaaagtt

SEQ ID NO: 2492832 - DNA, 25 bp, Homo sapien
ggcagaacagtcctgatgtggtgca

SEQ ID NO: 2492833 - DNA, 25 bp, Homo sapien
tatatgatccctgtataatgctgta

SEQ ID NO: 2492834 - DNA, 25 bp, Homo sapien
gcagtcccatcctatataacccatt

SEQ ID NO: 2492835 - DNA, 25 bp, Homo sapien
gacacacatgcaaaccattgcagag

SEQ ID NO: 2492836 - DNA, 25 bp, Homo sapien
cacgtgctgtcgatctttggaccag

SEQ ID NO: 2492837 - DNA, 25 bp, Homo sapien
gaccagtttctagcaaagttgtgtt

SEQ ID NO: 2492838 - DNA, 25 bp, Homo sapien
cctgttaagcattcccacgtgctgt

SEQ ID NO: 2492839 - DNA, 25 bp, Homo sapien
tatcggtgcccattatatccttaag

SEQ ID NO: 2492840 - DNA, 25 bp, Homo sapien
ttgggagcagatcttgggacaaacc

SEQ ID NO: 2492841 - DNA, 25 bp, Homo sapien
caagtttaaggtgacagctgaaggc

SEQ ID NO: 2492842 - DNA, 25 bp, Homo sapien
tagacaggaatcacaacaaggcttg

SEQ ID NO: 2492843 - DNA, 25 bp, Homo sapien
gaaatgtccttttcggtggcctcag

SEQ ID NO: 2492844 - DNA, 25 bp, Homo sapien
ggtccttggcattgacttgcaactg

SEQ ID NO: 2492845 - DNA, 25 bp, Homo sapien
aacatgctgcagttgggtccttggc

SEQ ID NO: 2492846 - DNA, 25 bp, Homo sapien
tgtgatttatggcattccacctggc

SEQ ID NO: 2492847 - DNA, 25 bp, Homo sapien
tgaccagtcacttctggagagtgca

SEQ ID NO: 2492848 - DNA, 25 bp, Homo sapien
cttttctagggtcgggctctggcgt

SEQ ID NO: 2492849 - DNA, 25 bp, Homo sapien
tcaggagttggtaggaggaagtaga

SEQ ID NO: 2492850 - DNA, 25 bp, Homo sapien
tctgaccaacgcatagcgcctggct

SEQ ID NO: 2492851 - DNA, 25 bp, Homo sapien
tagagggactggtgcctgtagctcc

SEQ ID NO: 2492852 - DNA, 25 bp, Homo sapien
cgttggagccggcatgcagagtctt

SEQ ID NO: 2492853 - DNA, 25 bp, Homo sapien
ccaggaagggcatgtgaagcagcac

SEQ ID NO: 2492854 - DNA, 25 bp, Homo sapien
tgggaaagtcagttagccggttgcc

SEQ ID NO: 2492855 - DNA, 25 bp, Homo sapien
ttcagacttgacaggtgcgccaggc

SEQ ID NO: 2492856 - DNA, 25 bp, Homo sapien
cctgaccacatagttctggcaacgg

SEQ ID NO: 2492857 - DNA, 25 bp, Homo sapien
tctggcaacggtcagcagggatgaa

SEQ ID NO: 2492858 - DNA, 25 bp, Homo sapien
ggtccctgaccacatagttctggca

SEQ ID NO: 2492859 - DNA, 25 bp, Homo sapien
catagttctggcaacggtcagcagg

SEQ ID NO: 2492860 - DNA, 25 bp, Homo sapien
cagagaaaagtgctcctgatagcaa

SEQ ID NO: 2492861 - DNA, 25 bp, Homo sapien
gattgcatgacaaaagccagtcact

SEQ ID NO: 2492862 - DNA, 25 bp, Homo sapien
acatgcttgcctttaatcacctaag

SEQ ID NO: 2492863 - DNA, 25 bp, Homo sapien
tagcaacttgagtgtccggcgacag

SEQ ID NO: 2492864 - DNA, 25 bp, Homo sapien
tggcacacccttgctccgcgtccaa

SEQ ID NO: 2492865 - DNA, 25 bp, Homo sapien
gctgctgaattgcttgtaacggacc

SEQ ID NO: 2492866 - DNA, 25 bp, Homo sapien
gctgaattgcttgtaacggaccaca

SEQ ID NO: 2492867 - DNA, 25 bp, Homo sapien
ttgctccgcgtccaatgactttgct

SEQ ID NO: 2492868 - DNA, 25 bp, Homo sapien
gatttctttgatccaactcatgtcc

SEQ ID NO: 2492869 - DNA, 25 bp, Homo sapien
tttgatccaactcatgtccagcagg

SEQ ID NO: 2492870 - DNA, 25 bp, Homo sapien
aactcatgtccagcaggcatcatgt

SEQ ID NO: 2492871 - DNA, 25 bp, Homo sapien
taggatttctttgatccaactcatg

SEQ ID NO: 2492872 - DNA, 25 bp, Homo sapien
caccagcagatagttttcgcagcag

SEQ ID NO: 2492873 - DNA, 25 bp, Homo sapien
tatgtcttaagaccaagtcggcttg

SEQ ID NO: 2492874 - DNA, 25 bp, Homo sapien
agtcggcttgctccttcatcagaag

SEQ ID NO: 2492875 - DNA, 25 bp, Homo sapien
cacgcgtcaggtgcttgttatcaaa

SEQ ID NO: 2492876 - DNA, 25 bp, Homo sapien
gacacctgccctgaatatagtgcat

SEQ ID NO: 2492877 - DNA, 25 bp, Homo sapien
tctgtttggaagtgaggcagccaca

SEQ ID NO: 2492878 - DNA, 25 bp, Homo sapien
tgtcctgaggtttcacgtccacact

SEQ ID NO: 2492879 - DNA, 25 bp, Homo sapien
tatagtgcattcagatggaccccgt

SEQ ID NO: 2492880 - DNA, 25 bp, Homo sapien
ccttcagtacagcaccaggaatctc

SEQ ID NO: 2492881 - DNA, 25 bp, Homo sapien
tccttcagtacagcaccaggaatct

SEQ ID NO: 2492882 - DNA, 25 bp, Homo sapien
gcatgtcattcatggtgatttgtac

SEQ ID NO: 2492883 - DNA, 25 bp, Homo sapien
caggagcatgtcattcatggtgatt

SEQ ID NO: 2492884 - DNA, 25 bp, Homo sapien
gagcatgtcattcatggtgatttgt

SEQ ID NO: 2492885 - DNA, 25 bp, Homo sapien
ggagcatgtcattcatggtgatttg

SEQ ID NO: 2492886 - DNA, 25 bp, Homo sapien
gacagtctgatttggaatccttggt

SEQ ID NO: 2492887 - DNA, 25 bp, Homo sapien
agaggcacaatcactgacagtctga

SEQ ID NO: 2492888 - DNA, 25 bp, Homo sapien
aggcacaatcactgacagtctgatt

SEQ ID NO: 2492889 - DNA, 25 bp, Homo sapien
gaggcacaatcactgacagtctgat

SEQ ID NO: 2492890 - DNA, 25 bp, Homo sapien
gctgtcaccgccctctctgtgattt

SEQ ID NO: 2492891 - DNA, 25 bp, Homo sapien
tgatagtcgtatgctcctggccttc

SEQ ID NO: 2492892 - DNA, 25 bp, Homo sapien
gcttgccgccccgaatctttggcaa

SEQ ID NO: 2492893 - DNA, 25 bp, Homo sapien
atcacagtttacgtctggcttgccg

SEQ ID NO: 2492894 - DNA, 25 bp, Homo sapien
ttcttgagtgtctacccagtgccag

SEQ ID NO: 2492895 - DNA, 25 bp, Homo sapien
tacaggtagccaatagcccagcctg

SEQ ID NO: 2492896 - DNA, 25 bp, Homo sapien
gagtcacgtcagatatgaaatccca

SEQ ID NO: 2492897 - DNA, 25 bp, Homo sapien
aggtacagcatcgtgggccacatgg

SEQ ID NO: 2492898 - DNA, 25 bp, Homo sapien
gattgaagcggaggctctcatctgg

SEQ ID NO: 2492899 - DNA, 25 bp, Homo sapien
gcttctgccacgtgtagtttgttat

SEQ ID NO: 2492900 - DNA, 25 bp, Homo sapien
gaggcagcgtggagaaaccctcgct

SEQ ID NO: 2492901 - DNA, 25 bp, Homo sapien
gagaaaccctcgctggtgttcctcc

SEQ ID NO: 2492902 - DNA, 25 bp, Homo sapien
tacgtagagaagatacctggctggt

SEQ ID NO: 2492903 - DNA, 25 bp, Homo sapien
tctgctcttttaggttctaggaggc

SEQ ID NO: 2492904 - DNA, 25 bp, Homo sapien
cccctggtatactgtggaccacaga

SEQ ID NO: 2492905 - DNA, 25 bp, Homo sapien
catagaaagtacacattgtctgctg

SEQ ID NO: 2492906 - DNA, 25 bp, Homo sapien
tttccactctgacgctggctttctg

SEQ ID NO: 2492907 - DNA, 25 bp, Homo sapien
tgctctttgctctcaaacgcctcag

SEQ ID NO: 2492908 - DNA, 25 bp, Homo sapien
gttgtttccactctgacgctggctt

SEQ ID NO: 2492909 - DNA, 25 bp, Homo sapien
tttgctctcaaacgcctcagtgctc

SEQ ID NO: 2492910 - DNA, 25 bp, Homo sapien
agcctgccaggtaccgtgaacagca

SEQ ID NO: 2492911 - DNA, 25 bp, Homo sapien
aatgaagaggctcgagtttcctgag

SEQ ID NO: 2492912 - DNA, 25 bp, Homo sapien
ggctatacaaccctgaatgaagagg

SEQ ID NO: 2492913 - DNA, 25 bp, Homo sapien
tggcatggcaatgacatgctgttcc

SEQ ID NO: 2492914 - DNA, 25 bp, Homo sapien
tttcttaggaactccacatgcctgg

SEQ ID NO: 2492915 - DNA, 25 bp, Homo sapien
tcctgggaaggtaccatgttgggca

SEQ ID NO: 2492916 - DNA, 25 bp, Homo sapien
gggtgggccctaaagtcagcacaca

SEQ ID NO: 2492917 - DNA, 25 bp, Homo sapien
catgcctggatgctaaaaagtggag

SEQ ID NO: 2492918 - DNA, 25 bp, Homo sapien
cactcttagcacactggaattgagg

SEQ ID NO: 2492919 - DNA, 25 bp, Homo sapien
tccactcattcttaggcatctgttt

SEQ ID NO: 2492920 - DNA, 25 bp, Homo sapien
ttagcacactggaattgaggctgag

SEQ ID NO: 2492921 - DNA, 25 bp, Homo sapien
gggagtgggatttttatatcttcca

SEQ ID NO: 2492922 - DNA, 25 bp, Homo sapien
acatagcctctgcatcagggccagg

SEQ ID NO: 2492923 - DNA, 25 bp, Homo sapien
gagcatcaggggcacatagcctctg

SEQ ID NO: 2492924 - DNA, 25 bp, Homo sapien
gcacatagcctctgcatcagggcca

SEQ ID NO: 2492925 - DNA, 25 bp, Homo sapien
gggcacatagcctctgcatcagggc

SEQ ID NO: 2492926 - DNA, 25 bp, Homo sapien
gaggcgatacaccatgaagtagaca

SEQ ID NO: 2492927 - DNA, 25 bp, Homo sapien
tgaaggttccaggactcagggaaaa

SEQ ID NO: 2492928 - DNA, 25 bp, Homo sapien
gagcctgttcttggaatgggcaaac

SEQ ID NO: 2492929 - DNA, 25 bp, Homo sapien
gaacgcaacaaatagagcttggcct

SEQ ID NO: 2492930 - DNA, 25 bp, Homo sapien
agcattaagagcctggtgactggga

SEQ ID NO: 2492931 - DNA, 25 bp, Homo sapien
ggctcttgatcccatagtctatacg

SEQ ID NO: 2492932 - DNA, 25 bp, Homo sapien
gggctttcccagatgctaacactac

SEQ ID NO: 2492933 - DNA, 25 bp, Homo sapien
tatacgtagtgctttgggaataacg

SEQ ID NO: 2492934 - DNA, 25 bp, Homo sapien
cctgggaggagtaccaacatccgat

SEQ ID NO: 2492935 - DNA, 25 bp, Homo sapien
aaatagagaaccctgcgtgtctggg

SEQ ID NO: 2492936 - DNA, 25 bp, Homo sapien
aaatgtcaatggctgcaagggcacg

SEQ ID NO: 2492937 - DNA, 25 bp, Homo sapien
taaaaagtcgaccagccttcaggta

SEQ ID NO: 2492938 - DNA, 25 bp, Homo sapien
tccattaaatacagcatatcagaag

SEQ ID NO: 2492939 - DNA, 25 bp, Homo sapien
gttcagctctatgatatctgtttcc

SEQ ID NO: 2492940 - DNA, 25 bp, Homo sapien
tcatttgggtgattcctcagtttcc

SEQ ID NO: 2492941 - DNA, 25 bp, Homo sapien
actcgagagccagccacaatgttga

SEQ ID NO: 2492942 - DNA, 25 bp, Homo sapien
gtgatcaatacctcaggtaccagtg

SEQ ID NO: 2492943 - DNA, 25 bp, Homo sapien
ctcaagatggaggtagcggaatcat

SEQ ID NO: 2492944 - DNA, 25 bp, Homo sapien
ggctgaacccctgtaaactcagagc

SEQ ID NO: 2492945 - DNA, 25 bp, Homo sapien
gcactggtgcttcggctgctgtgat

SEQ ID NO: 2492946 - DNA, 25 bp, Homo sapien
tgttcgtgggcactcaggaaccgct

SEQ ID NO: 2492947 - DNA, 25 bp, Homo sapien
tcttgagggcacatccagtaggtcc

SEQ ID NO: 2492948 - DNA, 25 bp, Homo sapien
gactcttcttatcatggaatgccga

SEQ ID NO: 2492949 - DNA, 25 bp, Homo sapien
aatgccgatggccatgcttctcata

SEQ ID NO: 2492950 - DNA, 25 bp, Homo sapien
aagatccaggcagagtagcttcggg

SEQ ID NO: 2492951 - DNA, 25 bp, Homo sapien
aaacacacaatgacaagatccaggc

SEQ ID NO: 2492952 - DNA, 25 bp, Homo sapien
acacacaatgacaagatccaggcag

SEQ ID NO: 2492953 - DNA, 25 bp, Homo sapien
aatgacaagatccaggcagagtagc

SEQ ID NO: 2492954 - DNA, 25 bp, Homo sapien
gagaggtctgctccaatggtgaaaa

SEQ ID NO: 2492955 - DNA, 25 bp, Homo sapien
taaaactggatgatgcttgtctctc

SEQ ID NO: 2492956 - DNA, 25 bp, Homo sapien
tgatgaagatgtcagcagactgcca

SEQ ID NO: 2492957 - DNA, 25 bp, Homo sapien
aaaggttatcttaagccagtcaggc

SEQ ID NO: 2492958 - DNA, 25 bp, Homo sapien
tgctggccatctccatgtgaattgc

SEQ ID NO: 2492959 - DNA, 25 bp, Homo sapien
gatactgttctgattgctcccaccc

SEQ ID NO: 2492960 - DNA, 25 bp, Homo sapien
tggttctacgtactgataccagtaa

SEQ ID NO: 2492961 - DNA, 25 bp, Homo sapien
cccactctttggttctacgtactga

SEQ ID NO: 2492962 - DNA, 25 bp, Homo sapien
ctttgcgggcaacaaggcaaatctc

SEQ ID NO: 2492963 - DNA, 25 bp, Homo sapien
tctaagatgtgctttgcgggcaaca

SEQ ID NO: 2492964 - DNA, 25 bp, Homo sapien
tggctcctaaatcgttctcattatt

SEQ ID NO: 2492965 - DNA, 25 bp, Homo sapien
aaatctcctggctcctaaatcgttc

SEQ ID NO: 2492966 - DNA, 25 bp, Homo sapien
atggggattaggagacattcggcaa

SEQ ID NO: 2492967 - DNA, 25 bp, Homo sapien
gggattaggagacattcggcaaagg

SEQ ID NO: 2492968 - DNA, 25 bp, Homo sapien
gattaggagacattcggcaaaggga

SEQ ID NO: 2492969 - DNA, 25 bp, Homo sapien
ttaggagacattcggcaaagggaac

SEQ ID NO: 2492970 - DNA, 25 bp, Homo sapien
tcacagttggctactttaaattatt

SEQ ID NO: 2492971 - DNA, 25 bp, Homo sapien
catcacagttggctactttaaatta

SEQ ID NO: 2492972 - DNA, 25 bp, Homo sapien
atcacagttggctactttaaattat

SEQ ID NO: 2492973 - DNA, 25 bp, Homo sapien
cagaatcgtcccagtaaatgtcctt

SEQ ID NO: 2492974 - DNA, 25 bp, Homo sapien
cagcagctgccaatgtgtatggtgg

SEQ ID NO: 2492975 - DNA, 25 bp, Homo sapien
ggtaagctcatgtgcatttcgtcca

SEQ ID NO: 2492976 - DNA, 25 bp, Homo sapien
ccatctggactgttgaccccagaaa

SEQ ID NO: 2492977 - DNA, 25 bp, Homo sapien
ctaaatgagtgaatatacaaatgtc

SEQ ID NO: 2492978 - DNA, 25 bp, Homo sapien
tgggctaggacacagtctaaatgag

SEQ ID NO: 2492979 - DNA, 25 bp, Homo sapien
ttttgggcagatgagagttagattg

SEQ ID NO: 2492980 - DNA, 25 bp, Homo sapien
tattgttagaataactcagatgtaa

SEQ ID NO: 2492981 - DNA, 25 bp, Homo sapien
aatttctgtcaatgcaccagttagt

SEQ ID NO: 2492982 - DNA, 25 bp, Homo sapien
tgcaaatttctgtcaatgcaccagt

SEQ ID NO: 2492983 - DNA, 25 bp, Homo sapien
atgcaccagttagtttcaaaatcat

SEQ ID NO: 2492984 - DNA, 25 bp, Homo sapien
gcaaatttctgtcaatgcaccagtt

SEQ ID NO: 2492985 - DNA, 25 bp, Homo sapien
tccaatcaggcacgcaaagaagaag

SEQ ID NO: 2492986 - DNA, 25 bp, Homo sapien
tgtaaagatccaagtcatgccctgc

SEQ ID NO: 2492987 - DNA, 25 bp, Homo sapien
taagccatcctgcatagaagaagaa

SEQ ID NO: 2492988 - DNA, 25 bp, Homo sapien
tggtgggatccaaaaactggcgtcc

SEQ ID NO: 2492989 - DNA, 25 bp, Homo sapien
accaagagcggtatcgattcatttc

SEQ ID NO: 2492990 - DNA, 25 bp, Homo sapien
tgggtgtaaaccagcggaatcccaa

SEQ ID NO: 2492991 - DNA, 25 bp, Homo sapien
taaccgaataagaggctgcaccaag

SEQ ID NO: 2492992 - DNA, 25 bp, Homo sapien
ggaatcccaacccagtcataaccga

SEQ ID NO: 2492993 - DNA, 25 bp, Homo sapien
caacactgtctctgattctaccttc

SEQ ID NO: 2492994 - DNA, 25 bp, Homo sapien
cattccgggctttagttgcaagatt

SEQ ID NO: 2492995 - DNA, 25 bp, Homo sapien
gattgcagatcaacactgtctctga

SEQ ID NO: 2492996 - DNA, 25 bp, Homo sapien
taccttcattccgggctttagttgc

SEQ ID NO: 2492997 - DNA, 25 bp, Homo sapien
ttagtcatctaaagttgggaaccat

SEQ ID NO: 2492998 - DNA, 25 bp, Homo sapien
taaagttcccacatggtactcgctc

SEQ ID NO: 2492999 - DNA, 25 bp, Homo sapien
caagtcctacttaatcatgtcctcc

SEQ ID NO: 2493000 - DNA, 25 bp, Homo sapien
tagtgccgaacacatgactcacatg

SEQ ID NO: 2493001 - DNA, 25 bp, Homo sapien
tatgacccttttgaagggcaaagag

SEQ ID NO: 2493002 - DNA, 25 bp, Homo sapien
ttgaagggcaaagagtatattaatg

SEQ ID NO: 2493003 - DNA, 25 bp, Homo sapien
tgacccttttgaagggcaaagagta

SEQ ID NO: 2493004 - DNA, 25 bp, Homo sapien
cccttttgaagggcaaagagtatat

SEQ ID NO: 2493005 - DNA, 25 bp, Homo sapien
ccatagcattttgcacatactttaa

SEQ ID NO: 2493006 - DNA, 25 bp, Homo sapien
ctttaaaattgtttctttgtggcag

SEQ ID NO: 2493007 - DNA, 25 bp, Homo sapien
gtccccatagcattttgcacatact

SEQ ID NO: 2493008 - DNA, 25 bp, Homo sapien
aaaattgtttctttgtggcagggtg

SEQ ID NO: 2493009 - DNA, 25 bp, Homo sapien
tgggaactgcttacggcatacatgc

SEQ ID NO: 2493010 - DNA, 25 bp, Homo sapien
aatctctaggttgttggtcaagtcc

SEQ ID NO: 2493011 - DNA, 25 bp, Homo sapien
aaactgttctgaccgctttgggcac

SEQ ID NO: 2493012 - DNA, 25 bp, Homo sapien
tacagttcggcaacactctgagtgg

SEQ ID NO: 2493013 - DNA, 25 bp, Homo sapien
caaacgaggctctattagcagagga

SEQ ID NO: 2493014 - DNA, 25 bp, Homo sapien
ttcaagcagagtattcaaacgaggc

SEQ ID NO: 2493015 - DNA, 25 bp, Homo sapien
cttgattgaagttgaggcagatgtc

SEQ ID NO: 2493016 - DNA, 25 bp, Homo sapien
gacaaaattttattgccctcgagcc

SEQ ID NO: 2493017 - DNA, 25 bp, Homo sapien
ctaaaagctctgcatctcaaaactt

SEQ ID NO: 2493018 - DNA, 25 bp, Homo sapien
aagctctgcatctcaaaacttgaag

SEQ ID NO: 2493019 - DNA, 25 bp, Homo sapien
taaaagctctgcatctcaaaacttg

SEQ ID NO: 2493020 - DNA, 25 bp, Homo sapien
gctctgcatctcaaaacttgaaggc

SEQ ID NO: 2493021 - DNA, 25 bp, Homo sapien
aagagagagttgtgtattcagcatc

SEQ ID NO: 2493022 - DNA, 25 bp, Homo sapien
ctccaagggatgacactttttcagg

SEQ ID NO: 2493023 - DNA, 25 bp, Homo sapien
gaagagtgcaacgtgcctggcttgt

SEQ ID NO: 2493024 - DNA, 25 bp, Homo sapien
gagttgtgtattcagcatctgagcc

SEQ ID NO: 2493025 - DNA, 25 bp, Homo sapien
agaagacagtcaagaatctttacat

SEQ ID NO: 2493026 - DNA, 25 bp, Homo sapien
caggctccctgtagtcatagaagac

SEQ ID NO: 2493027 - DNA, 25 bp, Homo sapien
tcatcaggctccctgtagtcataga

SEQ ID NO: 2493028 - DNA, 25 bp, Homo sapien
cagtcaagaatctttacattaagat

SEQ ID NO: 2493029 - DNA, 25 bp, Homo sapien
ttataagggtagtcccagtgcccag

SEQ ID NO: 2493030 - DNA, 25 bp, Homo sapien
caggatctggaattgtgcatctgac

SEQ ID NO: 2493031 - DNA, 25 bp, Homo sapien
caaaggcgtaatagttctagcacca

SEQ ID NO: 2493032 - DNA, 25 bp, Homo sapien
aaggtcatcacttgactcagccagg

SEQ ID NO: 2493033 - DNA, 25 bp, Homo sapien
gccagatgcttcagaaggaggtgct

SEQ ID NO: 2493034 - DNA, 25 bp, Homo sapien
aaggatgagcaggtatgtgacctag

SEQ ID NO: 2493035 - DNA, 25 bp, Homo sapien
caaccagcgccagccaagaaattgc

SEQ ID NO: 2493036 - DNA, 25 bp, Homo sapien
tggccctctcgcttatttccttctg

SEQ ID NO: 2493037 - DNA, 25 bp, Homo sapien
caggtgctccggctttggactcagg

SEQ ID NO: 2493038 - DNA, 25 bp, Homo sapien
ctcagggaatctgccaaacattttc

SEQ ID NO: 2493039 - DNA, 25 bp, Homo sapien
ccggctttggactcagggaatctgc

SEQ ID NO: 2493040 - DNA, 25 bp, Homo sapien
aacattttccgccatccctgaactt

SEQ ID NO: 2493041 - DNA, 25 bp, Homo sapien
caaaggacagtcagagagtggcgga

SEQ ID NO: 2493042 - DNA, 25 bp, Homo sapien
agcagaccccatgtgcagactctga

SEQ ID NO: 2493043 - DNA, 25 bp, Homo sapien
aacttggaagcagaccccatgtgca

SEQ ID NO: 2493044 - DNA, 25 bp, Homo sapien
gagagtggcggaggcatatgcccag

SEQ ID NO: 2493045 - DNA, 25 bp, Homo sapien
tcctcggagctcatgtctgaccaga

SEQ ID NO: 2493046 - DNA, 25 bp, Homo sapien
gagctcatgtctgaccagaggcccc

SEQ ID NO: 2493047 - DNA, 25 bp, Homo sapien
gctcagtcctcggagctcatgtctg

SEQ ID NO: 2493048 - DNA, 25 bp, Homo sapien
tgagcacagctcagtcctcggagct

SEQ ID NO: 2493049 - DNA, 25 bp, Homo sapien
catgttttcttgaagtccaaatgaa

SEQ ID NO: 2493050 - DNA, 25 bp, Homo sapien
ttttcatgttttcttgaagtccaaa

SEQ ID NO: 2493051 - DNA, 25 bp, Homo sapien
tttttcatgttttcttgaagtccaa

SEQ ID NO: 2493052 - DNA, 25 bp, Homo sapien
ttcatgttttcttgaagtccaaatg

SEQ ID NO: 2493053 - DNA, 25 bp, Homo sapien
cacgtggtccattgtgggaaatctt

SEQ ID NO: 2493054 - DNA, 25 bp, Homo sapien
ttcaaccacgtggtccattgtggga

SEQ ID NO: 2493055 - DNA, 25 bp, Homo sapien
ctgcttcaaccacgtggtccattgt

SEQ ID NO: 2493056 - DNA, 25 bp, Homo sapien
caaccacgtggtccattgtgggaaa

SEQ ID NO: 2493057 - DNA, 25 bp, Homo sapien
ttccgtgaacactgctagagatgag

SEQ ID NO: 2493058 - DNA, 25 bp, Homo sapien
catcagcgtccttctaagcaggcgc

SEQ ID NO: 2493059 - DNA, 25 bp, Homo sapien
cgtgctcgtcgcttccgtgaacact

SEQ ID NO: 2493060 - DNA, 25 bp, Homo sapien
tgagattgacgtagcgcatcagcgt

SEQ ID NO: 2493061 - DNA, 25 bp, Homo sapien
gttccaccatcggttcactaccaga

SEQ ID NO: 2493062 - DNA, 25 bp, Homo sapien
aactggttccaccatcggttcacta

SEQ ID NO: 2493063 - DNA, 25 bp, Homo sapien
tggttccaccatcggttcactacca

SEQ ID NO: 2493064 - DNA, 25 bp, Homo sapien
caccatcggttcactaccagagtaa

SEQ ID NO: 2493065 - DNA, 25 bp, Homo sapien
tcttacagcagacacgttggtgaca

SEQ ID NO: 2493066 - DNA, 25 bp, Homo sapien
gcagacacgttggtgacactgatgc

SEQ ID NO: 2493067 - DNA, 25 bp, Homo sapien
agtttcttacagcagacacgttggt

SEQ ID NO: 2493068 - DNA, 25 bp, Homo sapien
tacagcagacacgttggtgacactg

SEQ ID NO: 2493069 - DNA, 25 bp, Homo sapien
caagcacaaaggttactggaatttg

SEQ ID NO: 2493070 - DNA, 25 bp, Homo sapien
tcagcatatctgtcacagtaaattg

SEQ ID NO: 2493071 - DNA, 25 bp, Homo sapien
gcatatctgtcacagtaaattgata

SEQ ID NO: 2493072 - DNA, 25 bp, Homo sapien
aaaggttactggaatttgttcagca

SEQ ID NO: 2493073 - DNA, 25 bp, Homo sapien
gaggagtaacctatgaaatccaaaa

SEQ ID NO: 2493074 - DNA, 25 bp, Homo sapien
tagatgctgcctctccacttgagga

SEQ ID NO: 2493075 - DNA, 25 bp, Homo sapien
caataaattccctgtacagtagttt

SEQ ID NO: 2493076 - DNA, 25 bp, Homo sapien
tactttactggagtaagtgacagtc

SEQ ID NO: 2493077 - DNA, 25 bp, Homo sapien
tctccgacaggaaagagaatcttca

SEQ ID NO: 2493078 - DNA, 25 bp, Homo sapien
ttcgctcgtgcacagtcagattttc

SEQ ID NO: 2493079 - DNA, 25 bp, Homo sapien
gtgccttcaggtcggtgctgcacgc

SEQ ID NO: 2493080 - DNA, 25 bp, Homo sapien
tatttggtttgtagtctccgacagg

SEQ ID NO: 2493081 - DNA, 25 bp, Homo sapien
tcttgcatctcctattggttgtgtg

SEQ ID NO: 2493082 - DNA, 25 bp, Homo sapien
tctcctattggttgtgtggtggccc

SEQ ID NO: 2493083 - DNA, 25 bp, Homo sapien
tattggttgtgtggtggccctgaca

SEQ ID NO: 2493084 - DNA, 25 bp, Homo sapien
tgcatctcctattggttgtgtggtg

SEQ ID NO: 2493085 - DNA, 25 bp, Homo sapien
caaacaccggattgcaaagttgaag

SEQ ID NO: 2493086 - DNA, 25 bp, Homo sapien
gcaaacgatatgatagacccttagg

SEQ ID NO: 2493087 - DNA, 25 bp, Homo sapien
gccttgtcgaaatagccctgcttag

SEQ ID NO: 2493088 - DNA, 25 bp, Homo sapien
ccctgcttagaggagacaagccact

SEQ ID NO: 2493089 - DNA, 25 bp, Homo sapien
aaaaagtactcaggacacatgtggc

SEQ ID NO: 2493090 - DNA, 25 bp, Homo sapien
aattccaggtctaggtgggcgaaca

SEQ ID NO: 2493091 - DNA, 25 bp, Homo sapien
catgtggcaaggctactggatgaca

SEQ ID NO: 2493092 - DNA, 25 bp, Homo sapien
tatgaaaccgcattgtgtactcagg

SEQ ID NO: 2493093 - DNA, 25 bp, Homo sapien
cctcagttaaggtcttttcctgtat

SEQ ID NO: 2493094 - DNA, 25 bp, Homo sapien
tctggagctctgcatttttacccat

SEQ ID NO: 2493095 - DNA, 25 bp, Homo sapien
tttccaccagcccactctggagctc

SEQ ID NO: 2493096 - DNA, 25 bp, Homo sapien
tgccccaggtgttcttttccaccag

SEQ ID NO: 2493097 - DNA, 25 bp, Homo sapien
ctgccccaggtgttcttttccacca

SEQ ID NO: 2493098 - DNA, 25 bp, Homo sapien
agcgttattataattaaatgtgatc

SEQ ID NO: 2493099 - DNA, 25 bp, Homo sapien
gcgttattataattaaatgtgatca

SEQ ID NO: 2493100 - DNA, 25 bp, Homo sapien
gtgatcaaaataattaaaattctat

SEQ ID NO: 2493101 - DNA, 25 bp, Homo sapien
aatgtgatcaaaataattaaaattc

SEQ ID NO: 2493102 - DNA, 25 bp, Homo sapien
ttttcctatacaatttctgctcaac

SEQ ID NO: 2493103 - DNA, 25 bp, Homo sapien
ctatacaatttctgctcaacctcag

SEQ ID NO: 2493104 - DNA, 25 bp, Homo sapien
gtctagctgaaccttcttgcagctg

SEQ ID NO: 2493105 - DNA, 25 bp, Homo sapien
cttttgcttgcagtgtctagctgaa

SEQ ID NO: 2493106 - DNA, 25 bp, Homo sapien
tgatgttgtcttctgcagtcggtag

SEQ ID NO: 2493107 - DNA, 25 bp, Homo sapien
tgcagtcggtaggcatttacatctt

SEQ ID NO: 2493108 - DNA, 25 bp, Homo sapien
tttgttgatgttgtcttctgcagtc

SEQ ID NO: 2493109 - DNA, 25 bp, Homo sapien
gatgttgtcttctgcagtcggtagg

SEQ ID NO: 2493110 - DNA, 25 bp, Homo sapien
gagccaccgcgtgcggccttttgtt

SEQ ID NO: 2493111 - DNA, 25 bp, Homo sapien
gagttcaagtgattcaaggttcaag

SEQ ID NO: 2493112 - DNA, 25 bp, Homo sapien
caccgcgtgcggccttttgttttgt

SEQ ID NO: 2493113 - DNA, 25 bp, Homo sapien
tcaagtgattcaaggttcaagtgat

SEQ ID NO: 2493114 - DNA, 25 bp, Homo sapien
gacattctcgaacgctctggcagtt

SEQ ID NO: 2493115 - DNA, 25 bp, Homo sapien
cacgtcgtaaggtgtatatggccgc

SEQ ID NO: 2493116 - DNA, 25 bp, Homo sapien
tcaggttggttctaggagtcctcaa

SEQ ID NO: 2493117 - DNA, 25 bp, Homo sapien
gacaggtacagacatgacattctcg

SEQ ID NO: 2493118 - DNA, 25 bp, Homo sapien
agggccgtgacacctgcgacgagcc

SEQ ID NO: 2493119 - DNA, 25 bp, Homo sapien
gcctctcgggcccggcgaaacagag

SEQ ID NO: 2493120 - DNA, 25 bp, Homo sapien
tccggctcgcgctggttcccaggga

SEQ ID NO: 2493121 - DNA, 25 bp, Homo sapien
gaaacagagcgcagctccggctcgc

SEQ ID NO: 2493122 - DNA, 25 bp, Homo sapien
gagagagttcccgaacaagtcggaa

SEQ ID NO: 2493123 - DNA, 25 bp, Homo sapien
agtcggaagcagctcacaacaccgg

SEQ ID NO: 2493124 - DNA, 25 bp, Homo sapien
ggcacgggcgcgttacacattaact

SEQ ID NO: 2493125 - DNA, 25 bp, Homo sapien
tcttaggaaactacgcgcgaggcac

SEQ ID NO: 2493126 - DNA, 25 bp, Homo sapien
tggaagtcgcagcatgtgaagagtt

SEQ ID NO: 2493127 - DNA, 25 bp, Homo sapien
gagttgccggttgttatgggattaa

SEQ ID NO: 2493128 - DNA, 25 bp, Homo sapien
ttactggctccagaagtgatgatgc

SEQ ID NO: 2493129 - DNA, 25 bp, Homo sapien
ccaggaagcgcgagcttactggctc

SEQ ID NO: 2493130 - DNA, 25 bp, Homo sapien
ggtgtgtatgaatcaggaactcaag

SEQ ID NO: 2493131 - DNA, 25 bp, Homo sapien
gctttatcctctgtacctatccagg

SEQ ID NO: 2493132 - DNA, 25 bp, Homo sapien
tacttctccggaccttcttggtgtg

SEQ ID NO: 2493133 - DNA, 25 bp, Homo sapien
gagcagactacctcaccaagtgtca

SEQ ID NO: 2493134 - DNA, 25 bp, Homo sapien
acctagccataatgtccaagttacc

SEQ ID NO: 2493135 - DNA, 25 bp, Homo sapien
gccataatgtccaagttaccattta

SEQ ID NO: 2493136 - DNA, 25 bp, Homo sapien
ttatatatttatgcaacacagtatg

SEQ ID NO: 2493137 - DNA, 25 bp, Homo sapien
ttttttaacctagccataatgtcca

SEQ ID NO: 2493138 - DNA, 25 bp, Homo sapien
gaagaattccaggtgtactagtgaa

SEQ ID NO: 2493139 - DNA, 25 bp, Homo sapien
tgatctatgctgtgtttgcttattc

SEQ ID NO: 2493140 - DNA, 25 bp, Homo sapien
tatttccaaggagtgagcctaagac

SEQ ID NO: 2493141 - DNA, 25 bp, Homo sapien
tctttagttgaacacactatgaaga

SEQ ID NO: 2493142 - DNA, 25 bp, Homo sapien
gagttctttcatgtggatgcctgga

SEQ ID NO: 2493143 - DNA, 25 bp, Homo sapien
cagtcctgttcagaggtttggtcaa

SEQ ID NO: 2493144 - DNA, 25 bp, Homo sapien
taccatgcctagctcaagaatgtga

SEQ ID NO: 2493145 - DNA, 25 bp, Homo sapien
ggtgaaaaccatcagtaccatgcct

SEQ ID NO: 2493146 - DNA, 25 bp, Homo sapien
gaaaatcagtatacccattaataat

SEQ ID NO: 2493147 - DNA, 25 bp, Homo sapien
ccttatacactagaagcatgctctt

SEQ ID NO: 2493148 - DNA, 25 bp, Homo sapien
tgcaacaggatgacgacttgatgta

SEQ ID NO: 2493149 - DNA, 25 bp, Homo sapien
actcagaaaaagtttgttgatgact

SEQ ID NO: 2493150 - DNA, 25 bp, Homo sapien
gacagatcaagtgtgaggtgcccac

SEQ ID NO: 2493151 - DNA, 25 bp, Homo sapien
gagtagttagccatgggatcagatg

SEQ ID NO: 2493152 - DNA, 25 bp, Homo sapien
catcaaagtggatatgttaagcagg

SEQ ID NO: 2493153 - DNA, 25 bp, Homo sapien
tcagatgggcgctttagggacactt

SEQ ID NO: 2493154 - DNA, 25 bp, Homo sapien
cagtggattatagtgtgatgactca

SEQ ID NO: 2493155 - DNA, 25 bp, Homo sapien
ccagaatcattacttggcagtggat

SEQ ID NO: 2493156 - DNA, 25 bp, Homo sapien
gactcatttccggtggtctccagga

SEQ ID NO: 2493157 - DNA, 25 bp, Homo sapien
tgctgagaacatgaagtctgtgggt

SEQ ID NO: 2493158 - DNA, 25 bp, Homo sapien
ttgcagtagcttcttaaactgctta

SEQ ID NO: 2493159 - DNA, 25 bp, Homo sapien
aaactttggatattgccccagccaa

SEQ ID NO: 2493160 - DNA, 25 bp, Homo sapien
ctttggatattgccccagccaacac

SEQ ID NO: 2493161 - DNA, 25 bp, Homo sapien
cttaaactgcttaaactttggatat

SEQ ID NO: 2493162 - DNA, 25 bp, Homo sapien
tcgcaccatactaggcacacaatct

SEQ ID NO: 2493163 - DNA, 25 bp, Homo sapien
tatctcctctcgcaccatactaggc

SEQ ID NO: 2493164 - DNA, 25 bp, Homo sapien
ttcagcctattttcctatctcctct

SEQ ID NO: 2493165 - DNA, 25 bp, Homo sapien
tctttcttcagcctattttcctatc

SEQ ID NO: 2493166 - DNA, 25 bp, Homo sapien
tgtgctgtcttccaagccattgctc

SEQ ID NO: 2493167 - DNA, 25 bp, Homo sapien
tgctgtcttccaagccattgctcat

SEQ ID NO: 2493168 - DNA, 25 bp, Homo sapien
gtgctgtcttccaagccattgctca

SEQ ID NO: 2493169 - DNA, 25 bp, Homo sapien
ctgtgctgtcttccaagccattgct

SEQ ID NO: 2493170 - DNA, 25 bp, Homo sapien
tgtttaatatatcctgtaccactgt

SEQ ID NO: 2493171 - DNA, 25 bp, Homo sapien
ggaaatatcattgtgtaccccatga

SEQ ID NO: 2493172 - DNA, 25 bp, Homo sapien
ttcaaatagctaatagctggaagga

SEQ ID NO: 2493173 - DNA, 25 bp, Homo sapien
tagctaatagctggaaggaagttgt

SEQ ID NO: 2493174 - DNA, 25 bp, Homo sapien
gtctgaattctctgggcgtcactgt

SEQ ID NO: 2493175 - DNA, 25 bp, Homo sapien
aattctctgggcgtcactgtgtgca

SEQ ID NO: 2493176 - DNA, 25 bp, Homo sapien
taaacaactagagttgttggaacaa

SEQ ID NO: 2493177 - DNA, 25 bp, Homo sapien
gaataaatcaagaagagggccttat

SEQ ID NO: 2493178 - DNA, 25 bp, Homo sapien
ctgttggggaaagtgatgaagaaag

SEQ ID NO: 2493179 - DNA, 25 bp, Homo sapien
gtcctgtgggtacaacttggttgtg

SEQ ID NO: 2493180 - DNA, 25 bp, Homo sapien
gtgtttgtagtactccctgatggac

SEQ ID NO: 2493181 - DNA, 25 bp, Homo sapien
tcatcttcataaccaagtgcctttt

SEQ ID NO: 2493182 - DNA, 25 bp, Homo sapien
tgtagattttttagtaggtcctgtg

SEQ ID NO: 2493183 - DNA, 25 bp, Homo sapien
cagtacatgttactgtcttacagct

SEQ ID NO: 2493184 - DNA, 25 bp, Homo sapien
cagcagtacatgttactgtcttaca

SEQ ID NO: 2493185 - DNA, 25 bp, Homo sapien
agcagcagtacatgttactgtctta

SEQ ID NO: 2493186 - DNA, 25 bp, Homo sapien
gcagtacatgttactgtcttacagc

SEQ ID NO: 2493187 - DNA, 25 bp, Homo sapien
ctgggggagcaggttggggccggtg

SEQ ID NO: 2493188 - DNA, 25 bp, Homo sapien
gagcaggttggggccggtgggtgat

SEQ ID NO: 2493189 - DNA, 25 bp, Homo sapien
ggagcaggttggggccggtgggtga

SEQ ID NO: 2493190 - DNA, 25 bp, Homo sapien
atgatttgtttcttgctactgccat

SEQ ID NO: 2493191 - DNA, 25 bp, Homo sapien
gtttcttgctactgccattttttct

SEQ ID NO: 2493192 - DNA, 25 bp, Homo sapien
ccattggatgatttgtttcttgcta

SEQ ID NO: 2493193 - DNA, 25 bp, Homo sapien
tttgtttcttgctactgccattttt

SEQ ID NO: 2493194 - DNA, 25 bp, Homo sapien
ctggcacgctctgcccttgatccct

SEQ ID NO: 2493195 - DNA, 25 bp, Homo sapien
gaggcatccgcatagaaaagtgttc

SEQ ID NO: 2493196 - DNA, 25 bp, Homo sapien
tcctgagagaggcatccgcatagaa

SEQ ID NO: 2493197 - DNA, 25 bp, Homo sapien
catccgcatagaaaagtgttccctc

SEQ ID NO: 2493198 - DNA, 25 bp, Homo sapien
ttaacatcagtcataacagaacatt

SEQ ID NO: 2493199 - DNA, 25 bp, Homo sapien
caaagtatctccccacaaattataa

SEQ ID NO: 2493200 - DNA, 25 bp, Homo sapien
ggcagacagtactttaaccaaggaa

SEQ ID NO: 2493201 - DNA, 25 bp, Homo sapien
acatcaaaacatgctaaaactattg

SEQ ID NO: 2493202 - DNA, 25 bp, Homo sapien
ctggaatgggcgactcctgccaaat

SEQ ID NO: 2493203 - DNA, 25 bp, Homo sapien
ctcctcgactctgggccgtgagaaa

SEQ ID NO: 2493204 - DNA, 25 bp, Homo sapien
cttcagcacatctggcactgttgct

SEQ ID NO: 2493205 - DNA, 25 bp, Homo sapien
caaatccacggaggctttcacagct

SEQ ID NO: 2493206 - DNA, 25 bp, Homo sapien
tggggataggttgttcttaccctca

SEQ ID NO: 2493207 - DNA, 25 bp, Homo sapien
tttgcggaaagcctcggagcagcct

SEQ ID NO: 2493208 - DNA, 25 bp, Homo sapien
tgcggaaagcctcggagcagcctgc

SEQ ID NO: 2493209 - DNA, 25 bp, Homo sapien
ctttgcggaaagcctcggagcagcc

SEQ ID NO: 2493210 - DNA, 25 bp, Homo sapien
cggaaagcctcggagcagcctgcct

SEQ ID NO: 2493211 - DNA, 25 bp, Homo sapien
tgttgagacgcgtataggacatcgc

SEQ ID NO: 2493212 - DNA, 25 bp, Homo sapien
tcgcgaggtcccagtgttcttggct

SEQ ID NO: 2493213 - DNA, 25 bp, Homo sapien
agatggcagtgttgagacgcgtata

SEQ ID NO: 2493214 - DNA, 25 bp, Homo sapien
gcgtataggacatcgcgaggtccca

SEQ ID NO: 2493215 - DNA, 25 bp, Homo sapien
gcctcattgcctccaaccaagaaga

SEQ ID NO: 2493216 - DNA, 25 bp, Homo sapien
aaagtgcacgcaggcactggaggac

SEQ ID NO: 2493217 - DNA, 25 bp, Homo sapien
atgccgagtgtgggcctgccactgc

SEQ ID NO: 2493218 - DNA, 25 bp, Homo sapien
tggtgtcttgattttagagcctcat

SEQ ID NO: 2493219 - DNA, 25 bp, Homo sapien
gctctggtagtttggttcttccctc

SEQ ID NO: 2493220 - DNA, 25 bp, Homo sapien
ggaacaagggcgatgccatcaaagc

SEQ ID NO: 2493221 - DNA, 25 bp, Homo sapien
caaagccttgggcattaaagcaagg

SEQ ID NO: 2493222 - DNA, 25 bp, Homo sapien
ttaccagcctttgagcagccctgca

SEQ ID NO: 2493223 - DNA, 25 bp, Homo sapien
gggctgctgccttttcctttgacag

SEQ ID NO: 2493224 - DNA, 25 bp, Homo sapien
aacacagtctctcttgctggggctg

SEQ ID NO: 2493225 - DNA, 25 bp, Homo sapien
gaaaaaacacagtctctcttgctgg

SEQ ID NO: 2493226 - DNA, 25 bp, Homo sapien
gggaaaaaacacagtctctcttgct

SEQ ID NO: 2493227 - DNA, 25 bp, Homo sapien
attctctgagggacctttggcgtca

SEQ ID NO: 2493228 - DNA, 25 bp, Homo sapien
tctctgagggacctttggcgtcagc

SEQ ID NO: 2493229 - DNA, 25 bp, Homo sapien
acctttggcgtcagctccagcgtgg

SEQ ID NO: 2493230 - DNA, 25 bp, Homo sapien
tgagggacctttggcgtcagctcca

SEQ ID NO: 2493231 - DNA, 25 bp, Homo sapien
tgtgtcacccctattggagcagctg

SEQ ID NO: 2493232 - DNA, 25 bp, Homo sapien
gaataagttctagcactaggctcag

SEQ ID NO: 2493233 - DNA, 25 bp, Homo sapien
taattccaggttctgatccctaggc

SEQ ID NO: 2493234 - DNA, 25 bp, Homo sapien
gagcagctgctgtgatacccttact

SEQ ID NO: 2493235 - DNA, 25 bp, Homo sapien
gagggtttggcatccacagctgact

SEQ ID NO: 2493236 - DNA, 25 bp, Homo sapien
cagccggaaggaagatgtcagagaa

SEQ ID NO: 2493237 - DNA, 25 bp, Homo sapien
tccaccggtggcacgcaaactgtgc

SEQ ID NO: 2493238 - DNA, 25 bp, Homo sapien
atctcccaatgcgacagtgccaatg

SEQ ID NO: 2493239 - DNA, 25 bp, Homo sapien
taatcttccactagtgacaggcacc

SEQ ID NO: 2493240 - DNA, 25 bp, Homo sapien
tcttccactagtgacaggcacctct

SEQ ID NO: 2493241 - DNA, 25 bp, Homo sapien
ccactagtgacaggcacctctgaga

SEQ ID NO: 2493242 - DNA, 25 bp, Homo sapien
ttccactagtgacaggcacctctga

SEQ ID NO: 2493243 - DNA, 25 bp, Homo sapien
tggtgtttctgtcagccgtggccat

SEQ ID NO: 2493244 - DNA, 25 bp, Homo sapien
caggagaactgctgatttataccaa

SEQ ID NO: 2493245 - DNA, 25 bp, Homo sapien
tatgcaatcacccaaggttccaagg

SEQ ID NO: 2493246 - DNA, 25 bp, Homo sapien
gaggcactggaccttgcttaagatt

SEQ ID NO: 2493247 - DNA, 25 bp, Homo sapien
tattactccaacagtggcgtttgaa

SEQ ID NO: 2493248 - DNA, 25 bp, Homo sapien
tgtccattgcaatgtccctgatgtg

SEQ ID NO: 2493249 - DNA, 25 bp, Homo sapien
ctcctcctggcaagtttgcctctgt

SEQ ID NO: 2493250 - DNA, 25 bp, Homo sapien
gaaagtatccactctatggcccctt

SEQ ID NO: 2493251 - DNA, 25 bp, Homo sapien
tgagatcaactctagaaggtgcaga

SEQ ID NO: 2493252 - DNA, 25 bp, Homo sapien
tgtcactggaggtgttcaaacagag

SEQ ID NO: 2493253 - DNA, 25 bp, Homo sapien
gtttccatagattgagcaagacatt

SEQ ID NO: 2493254 - DNA, 25 bp, Homo sapien
ttctgagatagcaatactaagatgg

SEQ ID NO: 2493255 - DNA, 25 bp, Homo sapien
tacattagcgtgtgtgattctgaga

SEQ ID NO: 2493256 - DNA, 25 bp, Homo sapien
tcacagagatgaactaggtcacaca

SEQ ID NO: 2493257 - DNA, 25 bp, Homo sapien
tcctgaacaagccttcaagattgac

SEQ ID NO: 2493258 - DNA, 25 bp, Homo sapien
gccctgactgggagagtgactgtaa

SEQ ID NO: 2493259 - DNA, 25 bp, Homo sapien
tggcaagaaatgcactcagcggccc

SEQ ID NO: 2493260 - DNA, 25 bp, Homo sapien
gctgggcttcaaattcagtccaccc

SEQ ID NO: 2493261 - DNA, 25 bp, Homo sapien
tccccagtgagatgagacatgtaag

SEQ ID NO: 2493262 - DNA, 25 bp, Homo sapien
tctgaaaatcacaggtagtaagtga

SEQ ID NO: 2493263 - DNA, 25 bp, Homo sapien
gagctactttccatgaagataaatg

SEQ ID NO: 2493264 - DNA, 25 bp, Homo sapien
cagttgcttgagaactctgagttcc

SEQ ID NO: 2493265 - DNA, 25 bp, Homo sapien
tgttgtggccactccctgatgctgc

SEQ ID NO: 2493266 - DNA, 25 bp, Homo sapien
tgtggtcccacttgctagacttgtc

SEQ ID NO: 2493267 - DNA, 25 bp, Homo sapien
taaacatattctccggagcatctgc

SEQ ID NO: 2493268 - DNA, 25 bp, Homo sapien
gagcatccagatatgttttgggagc

SEQ ID NO: 2493269 - DNA, 25 bp, Homo sapien
aaagcttctgggttgcaatgccctg

SEQ ID NO: 2493270 - DNA, 25 bp, Homo sapien
gatatgttttgggagctgtgacacc

SEQ ID NO: 2493271 - DNA, 25 bp, Homo sapien
gctggactctccagtgtaaaagctt

SEQ ID NO: 2493272 - DNA, 25 bp, Homo sapien
ttctttccagcaatttgtgtaggga

SEQ ID NO: 2493273 - DNA, 25 bp, Homo sapien
ggaagttctttccagcaatttgtgt

SEQ ID NO: 2493274 - DNA, 25 bp, Homo sapien
catgcctccttggaagttctttcca

SEQ ID NO: 2493275 - DNA, 25 bp, Homo sapien
aagttctttccagcaatttgtgtag

SEQ ID NO: 2493276 - DNA, 25 bp, Homo sapien
tcagagaagttaaccaacaggccgc

SEQ ID NO: 2493277 - DNA, 25 bp, Homo sapien
aggaagagcccaataagcttgtcac

SEQ ID NO: 2493278 - DNA, 25 bp, Homo sapien
tcagagtagggccacgcactgagaa

SEQ ID NO: 2493279 - DNA, 25 bp, Homo sapien
acagtctgttctcaaggcctgagca

SEQ ID NO: 2493280 - DNA, 25 bp, Homo sapien
ttcaggatcccagccaaaggaatta

SEQ ID NO: 2493281 - DNA, 25 bp, Homo sapien
ggcagcagcccctgatccttgaggg

SEQ ID NO: 2493282 - DNA, 25 bp, Homo sapien
gagagatagtgaatgagagagcaga

SEQ ID NO: 2493283 - DNA, 25 bp, Homo sapien
aaggaattaggaactgggtggccag

SEQ ID NO: 2493284 - DNA, 25 bp, Homo sapien
gctgacctattgctataatgtggga

SEQ ID NO: 2493285 - DNA, 25 bp, Homo sapien
gatgtaaacccttcaaaagcaggaa

SEQ ID NO: 2493286 - DNA, 25 bp, Homo sapien
ccatacattttactcagctgaccta

SEQ ID NO: 2493287 - DNA, 25 bp, Homo sapien
tatttacacgtgtctgctttgctgt

SEQ ID NO: 2493288 - DNA, 25 bp, Homo sapien
tgccccacatttgctagaacattgc

SEQ ID NO: 2493289 - DNA, 25 bp, Homo sapien
atttgctagaacattgctttcctcc

SEQ ID NO: 2493290 - DNA, 25 bp, Homo sapien
cacatttgctagaacattgctttcc

SEQ ID NO: 2493291 - DNA, 25 bp, Homo sapien
cccacatttgctagaacattgcttt

SEQ ID NO: 2493292 - DNA, 25 bp, Homo sapien
tggataggctgaatgcaaatagaga

SEQ ID NO: 2493293 - DNA, 25 bp, Homo sapien
tcctcttaactaaacaatgtacaca

SEQ ID NO: 2493294 - DNA, 25 bp, Homo sapien
acaagcatgatagacaacaataggc

SEQ ID NO: 2493295 - DNA, 25 bp, Homo sapien
aacaatgtacacacctagtcacaag

SEQ ID NO: 2493296 - DNA, 25 bp, Homo sapien
caaacagtgcttgcaaaagttcaca

SEQ ID NO: 2493297 - DNA, 25 bp, Homo sapien
tataagtaatttagggccaggttca

SEQ ID NO: 2493298 - DNA, 25 bp, Homo sapien
tgagtttgaaacttggtcttgccac

SEQ ID NO: 2493299 - DNA, 25 bp, Homo sapien
tctggagaaaatgatgcttgcgctg

SEQ ID NO: 2493300 - DNA, 25 bp, Homo sapien
tgtagcaagtgcaaaatgtccctcg

SEQ ID NO: 2493301 - DNA, 25 bp, Homo sapien
agcagatgtagtttccttgagtacc

SEQ ID NO: 2493302 - DNA, 25 bp, Homo sapien
gtcctctgagtctggaattcttgtt

SEQ ID NO: 2493303 - DNA, 25 bp, Homo sapien
cctcgtactctatacaaatgtgcaa

SEQ ID NO: 2493304 - DNA, 25 bp, Homo sapien
actttcttgttggttgtcagccggg

SEQ ID NO: 2493305 - DNA, 25 bp, Homo sapien
ttctcacgcggagtttgggatcctc

SEQ ID NO: 2493306 - DNA, 25 bp, Homo sapien
tctccaggatagaagtctgagcaca

SEQ ID NO: 2493307 - DNA, 25 bp, Homo sapien
acattgtcagtttgctctttcaagg

SEQ ID NO: 2493308 - DNA, 25 bp, Homo sapien
tgagagagaaagttgctactgagaa

SEQ ID NO: 2493309 - DNA, 25 bp, Homo sapien
tgttacagctacagaagacggactg

SEQ ID NO: 2493310 - DNA, 25 bp, Homo sapien
ctactgagaagtggggttgttgcta

SEQ ID NO: 2493311 - DNA, 25 bp, Homo sapien
tacagaagacggactgagagagaaa

SEQ ID NO: 2493312 - DNA, 25 bp, Homo sapien
aactgcttatagtgagatgctagag

SEQ ID NO: 2493313 - DNA, 25 bp, Homo sapien
gggacaaactaggatatctaacaga

SEQ ID NO: 2493314 - DNA, 25 bp, Homo sapien
tgaaaaagcatgtaagggcgcagcc

SEQ ID NO: 2493315 - DNA, 25 bp, Homo sapien
tttgcagcctggtcatgtaaaggat

SEQ ID NO: 2493316 - DNA, 25 bp, Homo sapien
ggattaatagctggtcgaaataggg

SEQ ID NO: 2493317 - DNA, 25 bp, Homo sapien
taacaaggctagcaacagaggtggc

SEQ ID NO: 2493318 - DNA, 25 bp, Homo sapien
cactgtggcatcctaaaggtttggg

SEQ ID NO: 2493319 - DNA, 25 bp, Homo sapien
agaagaaggctatagagtctcagag

SEQ ID NO: 2493320 - DNA, 25 bp, Homo sapien
gatgtggcctctgcctaaatgacct

SEQ ID NO: 2493321 - DNA, 25 bp, Homo sapien
caatgagtacaggatgcttagccag

SEQ ID NO: 2493322 - DNA, 25 bp, Homo sapien
tattgctaatgatacccagctgtgc

SEQ ID NO: 2493323 - DNA, 25 bp, Homo sapien
caaaatgagggcattctgacagacc

SEQ ID NO: 2493324 - DNA, 25 bp, Homo sapien
tatttctgttccataatgggttaaa

SEQ ID NO: 2493325 - DNA, 25 bp, Homo sapien
tttctgttccataatgggttaaatc

SEQ ID NO: 2493326 - DNA, 25 bp, Homo sapien
tctgttccataatgggttaaatcca

SEQ ID NO: 2493327 - DNA, 25 bp, Homo sapien
ctgttccataatgggttaaatccaa

SEQ ID NO: 2493328 - DNA, 25 bp, Homo sapien
cctgctcagaataggaaagtaggca

SEQ ID NO: 2493329 - DNA, 25 bp, Homo sapien
ccatattagggactcttccagggca

SEQ ID NO: 2493330 - DNA, 25 bp, Homo sapien
caaactcaatacaaaggcagccctg

SEQ ID NO: 2493331 - DNA, 25 bp, Homo sapien
cagtttgtcgtggtgtttgcctctc

SEQ ID NO: 2493332 - DNA, 25 bp, Homo sapien
ggattgctccttactgatcctaagg

SEQ ID NO: 2493333 - DNA, 25 bp, Homo sapien
tgtactctctcaacaatccatatct

SEQ ID NO: 2493334 - DNA, 25 bp, Homo sapien
tgtcagtcgctgtaggaaacctttt

SEQ ID NO: 2493335 - DNA, 25 bp, Homo sapien
ttcctctgagtataatgcttttcct

SEQ ID NO: 2493336 - DNA, 25 bp, Homo sapien
taacgctgatagcagttaaagcctc

SEQ ID NO: 2493337 - DNA, 25 bp, Homo sapien
taaacttcgttcatgaaacacaggg

SEQ ID NO: 2493338 - DNA, 25 bp, Homo sapien
ccataagttatagggctttgactcc

SEQ ID NO: 2493339 - DNA, 25 bp, Homo sapien
tattcaaacccagtagaagatgcca

SEQ ID NO: 2493340 - DNA, 25 bp, Homo sapien
ggagtctcatggagagcttgaatgt

SEQ ID NO: 2493341 - DNA, 25 bp, Homo sapien
gccctaacactttttgtcagctatg

SEQ ID NO: 2493342 - DNA, 25 bp, Homo sapien
agtctcatggagagcttgaatgttc

SEQ ID NO: 2493343 - DNA, 25 bp, Homo sapien
taacactttttgtcagctatggaca

SEQ ID NO: 2493344 - DNA, 25 bp, Homo sapien
gctgtcatctggaggtcacttggga

SEQ ID NO: 2493345 - DNA, 25 bp, Homo sapien
tattggtaaggcaggtcagaacgcc

SEQ ID NO: 2493346 - DNA, 25 bp, Homo sapien
gatagccttactcaaaagtctgctg

SEQ ID NO: 2493347 - DNA, 25 bp, Homo sapien
aatgtatacagatgggaagccggga

SEQ ID NO: 2493348 - DNA, 25 bp, Homo sapien
tggaggtaaatatagaggatactgc

SEQ ID NO: 2493349 - DNA, 25 bp, Homo sapien
aaatgataccttatacggtaaggct

SEQ ID NO: 2493350 - DNA, 25 bp, Homo sapien
tgaataattacagttaactggaacc

SEQ ID NO: 2493351 - DNA, 25 bp, Homo sapien
gatagaactctactggaaggatgag

SEQ ID NO: 2493352 - DNA, 25 bp, Homo sapien
ggcagattctgacccttctattggg

SEQ ID NO: 2493353 - DNA, 25 bp, Homo sapien
gagtacccttttgcaagatgtccac

SEQ ID NO: 2493354 - DNA, 25 bp, Homo sapien
tgaagaggacaaaatagtccaccct

SEQ ID NO: 2493355 - DNA, 25 bp, Homo sapien
tgggctcatatgtctatctacaagg

SEQ ID NO: 2493356 - DNA, 25 bp, Homo sapien
aatcacagcatctatgcataaagac

SEQ ID NO: 2493357 - DNA, 25 bp, Homo sapien
aggtgaggtaggagagaagatcagc

SEQ ID NO: 2493358 - DNA, 25 bp, Homo sapien
tacacacttaccttttagtatatgt

SEQ ID NO: 2493359 - DNA, 25 bp, Homo sapien
tggtctagtaggatcttgcaactgc

SEQ ID NO: 2493360 - DNA, 25 bp, Homo sapien
tttgtaaatagaggtattggctttc

SEQ ID NO: 2493361 - DNA, 25 bp, Homo sapien
cagtttgtaaatagaggtattggct

SEQ ID NO: 2493362 - DNA, 25 bp, Homo sapien
agcagtttgtaaatagaggtattgg

SEQ ID NO: 2493363 - DNA, 25 bp, Homo sapien
ttgtaaatagaggtattggctttct

SEQ ID NO: 2493364 - DNA, 25 bp, Homo sapien
taaaggtaacctcaatgaatgaaaa

SEQ ID NO: 2493365 - DNA, 25 bp, Homo sapien
taatgctaactcatatgtgtatagc

SEQ ID NO: 2493366 - DNA, 25 bp, Homo sapien
actcatatgtgtatagcatttacaa

SEQ ID NO: 2493367 - DNA, 25 bp, Homo sapien
tataacaactgtgtgagataggtaa

SEQ ID NO: 2493368 - DNA, 25 bp, Homo sapien
ttttacaggcaagtctcactactgc

SEQ ID NO: 2493369 - DNA, 25 bp, Homo sapien
caatcgtagttcactacagtggact

SEQ ID NO: 2493370 - DNA, 25 bp, Homo sapien
cctctggaatgtgccctctgttgta

SEQ ID NO: 2493371 - DNA, 25 bp, Homo sapien
tactgctcaatctggtgtctaactc

SEQ ID NO: 2493372 - DNA, 25 bp, Homo sapien
gacattcaaacgtaagcaatctgtg

SEQ ID NO: 2493373 - DNA, 25 bp, Homo sapien
gatttcctaggcaagtatattccaa

SEQ ID NO: 2493374 - DNA, 25 bp, Homo sapien
tgccctaggtactgagtgtccactc

SEQ ID NO: 2493375 - DNA, 25 bp, Homo sapien
ggatcatctaatacatgccctaggt

SEQ ID NO: 2493376 - DNA, 25 bp, Homo sapien
ggaagaaacggcacctctaatatct

SEQ ID NO: 2493377 - DNA, 25 bp, Homo sapien
ttcagacccaaggacttgacatctc

SEQ ID NO: 2493378 - DNA, 25 bp, Homo sapien
tcacaaaacggtacagtatacatct

SEQ ID NO: 2493379 - DNA, 25 bp, Homo sapien
gactgatccttaaactctaagttaa

SEQ ID NO: 2493380 - DNA, 25 bp, Homo sapien
cagtacccagaccaataccaagaat

SEQ ID NO: 2493381 - DNA, 25 bp, Homo sapien
ccatgggaattttgagagtgattgc

SEQ ID NO: 2493382 - DNA, 25 bp, Homo sapien
gatcaattgactgtaagtgcgtgga

SEQ ID NO: 2493383 - DNA, 25 bp, Homo sapien
tgtttttgtgcctggaccacgctgt

SEQ ID NO: 2493384 - DNA, 25 bp, Homo sapien
tggtgtcaaggtaatgctgttctca

SEQ ID NO: 2493385 - DNA, 25 bp, Homo sapien
gctccctgctcttgaatttttaagg

SEQ ID NO: 2493386 - DNA, 25 bp, Homo sapien
tccacttgattgtggcgtatgatcc

SEQ ID NO: 2493387 - DNA, 25 bp, Homo sapien
catgtgttgaactacctttgcagcc

SEQ ID NO: 2493388 - DNA, 25 bp, Homo sapien
catatggcactctcccttgtgtgtc

SEQ ID NO: 2493389 - DNA, 25 bp, Homo sapien
tttttaacttggctgggacagtctc

SEQ ID NO: 2493390 - DNA, 25 bp, Homo sapien
caagaagccttcctaactgatctaa

SEQ ID NO: 2493391 - DNA, 25 bp, Homo sapien
caagatgtggcagaatcatgctttc

SEQ ID NO: 2493392 - DNA, 25 bp, Homo sapien
gttccagccacaacatggcctatta

SEQ ID NO: 2493393 - DNA, 25 bp, Homo sapien
tagggagcaaatagagctacatccc

SEQ ID NO: 2493394 - DNA, 25 bp, Homo sapien
cgatgttacatggagaattagagga

SEQ ID NO: 2493395 - DNA, 25 bp, Homo sapien
taaatttttcttccgatgttacatg

SEQ ID NO: 2493396 - DNA, 25 bp, Homo sapien
tggaataaacctcatgagtgggcat

SEQ ID NO: 2493397 - DNA, 25 bp, Homo sapien
tatatttccaatcttggtttacaca

SEQ ID NO: 2493398 - DNA, 25 bp, Homo sapien
agtgggcataatgccctataaacag

SEQ ID NO: 2493399 - DNA, 25 bp, Homo sapien
cttggtttacacatgactttttgaa

SEQ ID NO: 2493400 - DNA, 25 bp, Homo sapien
taatctcctctggaactggattatt

SEQ ID NO: 2493401 - DNA, 25 bp, Homo sapien
cacccaactcctaatctcctctgga

SEQ ID NO: 2493402 - DNA, 25 bp, Homo sapien
aatctcctctggaactggattattc

SEQ ID NO: 2493403 - DNA, 25 bp, Homo sapien
tcacccaactcctaatctcctctgg

SEQ ID NO: 2493404 - DNA, 25 bp, Homo sapien
gagggatgactcctttaattatatc

SEQ ID NO: 2493405 - DNA, 25 bp, Homo sapien
ttcaatctccagctcaattcaaagc

SEQ ID NO: 2493406 - DNA, 25 bp, Homo sapien
attatatcctacatagattctctga

SEQ ID NO: 2493407 - DNA, 25 bp, Homo sapien
agtacagagaaaagggcgattattt

SEQ ID NO: 2493408 - DNA, 25 bp, Homo sapien
tggattttgataacctctgtgtgac

SEQ ID NO: 2493409 - DNA, 25 bp, Homo sapien
tgaggcttctttgagggagcctgca

SEQ ID NO: 2493410 - DNA, 25 bp, Homo sapien
tgactgggtaaggatgcagtcctca

SEQ ID NO: 2493411 - DNA, 25 bp, Homo sapien
ccaaaagctagatctataatgaggc

SEQ ID NO: 2493412 - DNA, 25 bp, Homo sapien
ctggtgttcataccatccatgggaa

SEQ ID NO: 2493413 - DNA, 25 bp, Homo sapien
tcttgctgaggtcagcgcgcatact

SEQ ID NO: 2493414 - DNA, 25 bp, Homo sapien
cacactaaatgatgggcatgaagac

SEQ ID NO: 2493415 - DNA, 25 bp, Homo sapien
ctgacaaaatggctgaagctcacct

SEQ ID NO: 2493416 - DNA, 25 bp, Homo sapien
tgaagccctcattagaagtcaggca

SEQ ID NO: 2493417 - DNA, 25 bp, Homo sapien
tcaccaaagttatggcagctgtagc

SEQ ID NO: 2493418 - DNA, 25 bp, Homo sapien
aaatacttcgacttgagtgcccatg

SEQ ID NO: 2493419 - DNA, 25 bp, Homo sapien
gcgcctggcccatccgataaaattt

SEQ ID NO: 2493420 - DNA, 25 bp, Homo sapien
cacagaaggctgaagaagttttaat

SEQ ID NO: 2493421 - DNA, 25 bp, Homo sapien
aaatagttacgtttgcaaggctgac

SEQ ID NO: 2493422 - DNA, 25 bp, Homo sapien
tgtcactatagccatcataacaaga

SEQ ID NO: 2493423 - DNA, 25 bp, Homo sapien
caaataactctaaggaactatccaa

SEQ ID NO: 2493424 - DNA, 25 bp, Homo sapien
gacactagtatgtgttgttcctcct

SEQ ID NO: 2493425 - DNA, 25 bp, Homo sapien
tgtctgctgatatgtcaaaacacct

SEQ ID NO: 2493426 - DNA, 25 bp, Homo sapien
gaggaagggactatttgcagaagac

SEQ ID NO: 2493427 - DNA, 25 bp, Homo sapien
caccagtaccactaggagttgaaat

SEQ ID NO: 2493428 - DNA, 25 bp, Homo sapien
taactgtactttactcaaatagaaa

SEQ ID NO: 2493429 - DNA, 25 bp, Homo sapien
gtccgaattgtctagtaattacaaa

SEQ ID NO: 2493430 - DNA, 25 bp, Homo sapien
gctctttttaagtccgaattgtcta

SEQ ID NO: 2493431 - DNA, 25 bp, Homo sapien
taattttcacattatgaagctacac

SEQ ID NO: 2493432 - DNA, 25 bp, Homo sapien
tcaaacggtcttgcggatgacccag

SEQ ID NO: 2493433 - DNA, 25 bp, Homo sapien
gtacgcgcacaagctccggaggttg

SEQ ID NO: 2493434 - DNA, 25 bp, Homo sapien
gagcaagttcacacgacacgaccgt

SEQ ID NO: 2493435 - DNA, 25 bp, Homo sapien
cactactcaggaggtgacggtgacg

SEQ ID NO: 2493436 - DNA, 25 bp, Homo sapien
gtagggaagtgaagcgcctctctcc

SEQ ID NO: 2493437 - DNA, 25 bp, Homo sapien
agagccttctgcgaagcaacctagc

SEQ ID NO: 2493438 - DNA, 25 bp, Homo sapien
gcagaagccccgctctctgtaacgg

SEQ ID NO: 2493439 - DNA, 25 bp, Homo sapien
tctctccaccttgttagaagcgcgc

SEQ ID NO: 2493440 - DNA, 25 bp, Homo sapien
gctgccgttttgcagtcgtcgctcc

SEQ ID NO: 2493441 - DNA, 25 bp, Homo sapien
atcgctgccgttttgcagtcgtcgc

SEQ ID NO: 2493442 - DNA, 25 bp, Homo sapien
gttttgcagtcgtcgctcccacctt

SEQ ID NO: 2493443 - DNA, 25 bp, Homo sapien
tgccgttttgcagtcgtcgctccca

SEQ ID NO: 2493444 - DNA, 25 bp, Homo sapien
gatccgcgggacaagaaaattcatg

SEQ ID NO: 2493445 - DNA, 25 bp, Homo sapien
taaattttcggaagtctggcagcgg

SEQ ID NO: 2493446 - DNA, 25 bp, Homo sapien
accgcttcccgttgcttttgtctcg

SEQ ID NO: 2493447 - DNA, 25 bp, Homo sapien
tccgcggtggatacgtcgccatctt

SEQ ID NO: 2493448 - DNA, 25 bp, Homo sapien
tgactttgtaagaatttgtcccttc

SEQ ID NO: 2493449 - DNA, 25 bp, Homo sapien
cttggtcagtttagctcaaagtttg

SEQ ID NO: 2493450 - DNA, 25 bp, Homo sapien
tctagttcacttatatcggctctca

SEQ ID NO: 2493451 - DNA, 25 bp, Homo sapien
gttatgcctaccctacaaagttgta

SEQ ID NO: 2493452 - DNA, 25 bp, Homo sapien
tctttctctgttacccaggctggag

SEQ ID NO: 2493453 - DNA, 25 bp, Homo sapien
gttatttgtgttttttgcgatggag

SEQ ID NO: 2493454 - DNA, 25 bp, Homo sapien
aggtaatctgtctacctcggcctct

SEQ ID NO: 2493455 - DNA, 25 bp, Homo sapien
ccggttatttgtgttttttgcgatg

SEQ ID NO: 2493456 - DNA, 25 bp, Homo sapien
tatggatgtgagacaactgtacagt

SEQ ID NO: 2493457 - DNA, 25 bp, Homo sapien
ccttggagtatggatgtgagacaac

SEQ ID NO: 2493458 - DNA, 25 bp, Homo sapien
tacagttgagttaaaagtagtacca

SEQ ID NO: 2493459 - DNA, 25 bp, Homo sapien
tcagatgtgtagaatcctccttgga

SEQ ID NO: 2493460 - DNA, 25 bp, Homo sapien
taattggtcacacttcttggacttc

SEQ ID NO: 2493461 - DNA, 25 bp, Homo sapien
aattggtcacacttcttggacttct

SEQ ID NO: 2493462 - DNA, 25 bp, Homo sapien
ttaattggtcacacttcttggactt

SEQ ID NO: 2493463 - DNA, 25 bp, Homo sapien
attggtcacacttcttggacttctg

SEQ ID NO: 2493464 - DNA, 25 bp, Homo sapien
tcagatctttactagtgactatata

SEQ ID NO: 2493465 - DNA, 25 bp, Homo sapien
cattgtacttaatggagctatttcc

SEQ ID NO: 2493466 - DNA, 25 bp, Homo sapien
gatgtgattcattgtctttgtctct

SEQ ID NO: 2493467 - DNA, 25 bp, Homo sapien
tacttaatggagctatttccgtttc

SEQ ID NO: 2493468 - DNA, 25 bp, Homo sapien
gcgggagattagcttgagccccaga

SEQ ID NO: 2493469 - DNA, 25 bp, Homo sapien
gagcaagaccctcagtcagtcgatt

SEQ ID NO: 2493470 - DNA, 25 bp, Homo sapien
ggatgcatcttacagctgatggtga

SEQ ID NO: 2493471 - DNA, 25 bp, Homo sapien
tagttgtgacaaacagtaccagcac

SEQ ID NO: 2493472 - DNA, 25 bp, Homo sapien
ggccaaccagtaatgtcaaatcaag

SEQ ID NO: 2493473 - DNA, 25 bp, Homo sapien
tggttggctcattgccgtgtgatgc

SEQ ID NO: 2493474 - DNA, 25 bp, Homo sapien
tgaatgcattatacgttctgatact

SEQ ID NO: 2493475 - DNA, 25 bp, Homo sapien
tgctaagtgttaacctttctttgaa

SEQ ID NO: 2493476 - DNA, 25 bp, Homo sapien
tctggaattctagcttttactctca

SEQ ID NO: 2493477 - DNA, 25 bp, Homo sapien
tcagccagggtgtaacattttaagg

SEQ ID NO: 2493478 - DNA, 25 bp, Homo sapien
tcctcacctgagaataatgtctggc

SEQ ID NO: 2493479 - DNA, 25 bp, Homo sapien
ccttgcaggttcagctgtacactta

SEQ ID NO: 2493480 - DNA, 25 bp, Homo sapien
gtaaatatactttcactgagtctga

SEQ ID NO: 2493481 - DNA, 25 bp, Homo sapien
gcttgattaaggtctatgtcggtat

SEQ ID NO: 2493482 - DNA, 25 bp, Homo sapien
ttttctctctggctaatattaagat

SEQ ID NO: 2493483 - DNA, 25 bp, Homo sapien
ttttttatgagtcttacacgtggga

SEQ ID NO: 2493484 - DNA, 25 bp, Homo sapien
tgagctttccaatccccagagtagc

SEQ ID NO: 2493485 - DNA, 25 bp, Homo sapien
tcaaagagcggaagaatcccatcgt

SEQ ID NO: 2493486 - DNA, 25 bp, Homo sapien
tggcgtcaaccctgctgtaatatct

SEQ ID NO: 2493487 - DNA, 25 bp, Homo sapien
tgaacttcagagctatggcgtcaac

SEQ ID NO: 2493488 - DNA, 25 bp, Homo sapien
gaatcttagatcaactggaactgta

SEQ ID NO: 2493489 - DNA, 25 bp, Homo sapien
gaagaccaccgtttatcacagcaga

SEQ ID NO: 2493490 - DNA, 25 bp, Homo sapien
agccatgtatggcaaacattttcca

SEQ ID NO: 2493491 - DNA, 25 bp, Homo sapien
gaactgtaatgtttcaggtcagggt

SEQ ID NO: 2493492 - DNA, 25 bp, Homo sapien
ttagttaccaacaggatctaggacc

SEQ ID NO: 2493493 - DNA, 25 bp, Homo sapien
gaagagtgccctctctagaagtaag

SEQ ID NO: 2493494 - DNA, 25 bp, Homo sapien
tgccatgaccctagaaagccatttg

SEQ ID NO: 2493495 - DNA, 25 bp, Homo sapien
ttctcctggatagtcaaagcattgg

SEQ ID NO: 2493496 - DNA, 25 bp, Homo sapien
cctcaattcactgtaagaagcctac

SEQ ID NO: 2493497 - DNA, 25 bp, Homo sapien
aaatgttgacattggttgggcatgg

SEQ ID NO: 2493498 - DNA, 25 bp, Homo sapien
gaactggtctacaccataatcctgg

SEQ ID NO: 2493499 - DNA, 25 bp, Homo sapien
cctgagttctagaatccaatccatt

SEQ ID NO: 2493500 - DNA, 25 bp, Homo sapien
ggcttacgcaaaaggtcaccatttg

SEQ ID NO: 2493501 - DNA, 25 bp, Homo sapien
gaactgatgtggctcaggcaccctg

SEQ ID NO: 2493502 - DNA, 25 bp, Homo sapien
gactttgtcgccctgtgcactaaaa

SEQ ID NO: 2493503 - DNA, 25 bp, Homo sapien
gccaaggacatccatacccaagtga

SEQ ID NO: 2493504 - DNA, 25 bp, Homo sapien
gacacttaggatcttcctgtaatta

SEQ ID NO: 2493505 - DNA, 25 bp, Homo sapien
agacacttaggatcttcctgtaatt

SEQ ID NO: 2493506 - DNA, 25 bp, Homo sapien
caaaataacgttatcagaactgcag

SEQ ID NO: 2493507 - DNA, 25 bp, Homo sapien
ggtactcaataccagttaagtaaca

SEQ ID NO: 2493508 - DNA, 25 bp, Homo sapien
gagaagtcaagaattccatgattcc

SEQ ID NO: 2493509 - DNA, 25 bp, Homo sapien
gaactgcagtcgaaaggtactcaat

SEQ ID NO: 2493510 - DNA, 25 bp, Homo sapien
ctgaagcattgttagcgtaattggg

SEQ ID NO: 2493511 - DNA, 25 bp, Homo sapien
gcgaaaacaatagaggctgaagcat

SEQ ID NO: 2493512 - DNA, 25 bp, Homo sapien
ggctgaagcattgttagcgtaattg

SEQ ID NO: 2493513 - DNA, 25 bp, Homo sapien
aaaggtcgcgaaaacaatagaggct

SEQ ID NO: 2493514 - DNA, 25 bp, Homo sapien
gtctgcccggcgctgtcgctttaag

SEQ ID NO: 2493515 - DNA, 25 bp, Homo sapien
tttaagcagcgctcctggaaacctc

SEQ ID NO: 2493516 - DNA, 25 bp, Homo sapien
gctgtcgctttaagcagcgctcctg

SEQ ID NO: 2493517 - DNA, 25 bp, Homo sapien
tcatctacaaatcctggggcgggtc

SEQ ID NO: 2493518 - DNA, 25 bp, Homo sapien
ccacaagggtcaccgacgacctaag

SEQ ID NO: 2493519 - DNA, 25 bp, Homo sapien
aagttgccacaagggtcaccgacga

SEQ ID NO: 2493520 - DNA, 25 bp, Homo sapien
ctaagttgccacaagggtcaccgac

SEQ ID NO: 2493521 - DNA, 25 bp, Homo sapien
ttgccacaagggtcaccgacgacct

SEQ ID NO: 2493522 - DNA, 25 bp, Homo sapien
aatcctgcagccctcccggcctcag

SEQ ID NO: 2493523 - DNA, 25 bp, Homo sapien
caatcctgcagccctcccggcctca

SEQ ID NO: 2493524 - DNA, 25 bp, Homo sapien
tccaatcctgcagccctcccggcct

SEQ ID NO: 2493525 - DNA, 25 bp, Homo sapien
atcctgcagccctcccggcctcagc

SEQ ID NO: 2493526 - DNA, 25 bp, Homo sapien
tgggtcacgcctccggcaccaccgc

SEQ ID NO: 2493527 - DNA, 25 bp, Homo sapien
gctgggtcacgcctccggcaccacc

SEQ ID NO: 2493528 - DNA, 25 bp, Homo sapien
gcctccggcaccaccgcgcgccagc

SEQ ID NO: 2493529 - DNA, 25 bp, Homo sapien
cgcggctgggtcacgcctccggcac

SEQ ID NO: 2493530 - DNA, 25 bp, Homo sapien
ttcatctcggacgtccctctaaggg

SEQ ID NO: 2493531 - DNA, 25 bp, Homo sapien
ccctccggttaagctaaattgatct

SEQ ID NO: 2493532 - DNA, 25 bp, Homo sapien
gaagattccgattgcaagtcgccgc

SEQ ID NO: 2493533 - DNA, 25 bp, Homo sapien
tttggagttcaagattcccgccgct

SEQ ID NO: 2493534 - DNA, 25 bp, Homo sapien
agagagacacccgacgagaggaggc

SEQ ID NO: 2493535 - DNA, 25 bp, Homo sapien
gagacacccgacgagaggaggcggg

SEQ ID NO: 2493536 - DNA, 25 bp, Homo sapien
acagagagacacccgacgagaggag

SEQ ID NO: 2493537 - DNA, 25 bp, Homo sapien
gccagcgggcgatggagacagagag

SEQ ID NO: 2493538 - DNA, 25 bp, Homo sapien
ccgaggcagtcgggctcggcgccgg

SEQ ID NO: 2493539 - DNA, 25 bp, Homo sapien
ggaggctctgaagcggctgctgcac

SEQ ID NO: 2493540 - DNA, 25 bp, Homo sapien
ctcctcccgcccgaggcagtcgggc

SEQ ID NO: 2493541 - DNA, 25 bp, Homo sapien
gcccctttgttctcgcgcgctcccc

SEQ ID NO: 2493542 - DNA, 25 bp, Homo sapien
tccgggtggcttacgagtacacgga

SEQ ID NO: 2493543 - DNA, 25 bp, Homo sapien
tgagtccaactctagggcgctgctg

SEQ ID NO: 2493544 - DNA, 25 bp, Homo sapien
tctcaaaagagtctacagggagcct

SEQ ID NO: 2493545 - DNA, 25 bp, Homo sapien
tcgcattgctaggaggagaccaggt

SEQ ID NO: 2493546 - DNA, 25 bp, Homo sapien
ggaatgactacatcagggagcccca

SEQ ID NO: 2493547 - DNA, 25 bp, Homo sapien
gacgaggatgtccactcttaccact

SEQ ID NO: 2493548 - DNA, 25 bp, Homo sapien
tggttcaacgtgctaaaaccaatca

SEQ ID NO: 2493549 - DNA, 25 bp, Homo sapien
tgaaacattgaaagctttaccccta

SEQ ID NO: 2493550 - DNA, 25 bp, Homo sapien
caacctgaaaaaggacacctatgaa

SEQ ID NO: 2493551 - DNA, 25 bp, Homo sapien
gcaacagtactggaaagatgagatt

SEQ ID NO: 2493552 - DNA, 25 bp, Homo sapien
ttggaaagtgtcatgaattggcaac

SEQ ID NO: 2493553 - DNA, 25 bp, Homo sapien
catgaattggcaacagtactggaaa

SEQ ID NO: 2493554 - DNA, 25 bp, Homo sapien
gaaagatgagattggttcccagcca

SEQ ID NO: 2493555 - DNA, 25 bp, Homo sapien
gattagaggagtcttagctttccac

SEQ ID NO: 2493556 - DNA, 25 bp, Homo sapien
tccagtgttgagtctgcagcggccg

SEQ ID NO: 2493557 - DNA, 25 bp, Homo sapien
tcctgttgaggcaagctgtattcca

SEQ ID NO: 2493558 - DNA, 25 bp, Homo sapien
ggcagtcagtctcggtgcggccatc

SEQ ID NO: 2493559 - DNA, 25 bp, Homo sapien
ttttcaggtataattcattacttcc

SEQ ID NO: 2493560 - DNA, 25 bp, Homo sapien
cttcctgccgccacagaatagctta

SEQ ID NO: 2493561 - DNA, 25 bp, Homo sapien
tgccgccacagaatagcttatcact

SEQ ID NO: 2493562 - DNA, 25 bp, Homo sapien
atcactctggtatcatggttgttac

SEQ ID NO: 2493563 - DNA, 25 bp, Homo sapien
gaatagcttatcactctggtatcat

SEQ ID NO: 2493564 - DNA, 25 bp, Homo sapien
taatggtacaatactgatgctggag

SEQ ID NO: 2493565 - DNA, 25 bp, Homo sapien
cagaaagacatgcagctgactttcc

SEQ ID NO: 2493566 - DNA, 25 bp, Homo sapien
ataatggtacaatactgatgctgga

SEQ ID NO: 2493567 - DNA, 25 bp, Homo sapien
tcagaaagacatgcagctgactttc

SEQ ID NO: 2493568 - DNA, 25 bp, Homo sapien
tctggctcaattgcacaatattgtg

SEQ ID NO: 2493569 - DNA, 25 bp, Homo sapien
aatatgtatgattcccaccactgtc

SEQ ID NO: 2493570 - DNA, 25 bp, Homo sapien
gaaagcattcaacatcagttaagag

SEQ ID NO: 2493571 - DNA, 25 bp, Homo sapien
taaagttttactccaagcgctctgg

SEQ ID NO: 2493572 - DNA, 25 bp, Homo sapien
tttctgtaatgggtttgaagcacaa

SEQ ID NO: 2493573 - DNA, 25 bp, Homo sapien
aactttctgtaatgggtttgaagca

SEQ ID NO: 2493574 - DNA, 25 bp, Homo sapien
actttctgtaatgggtttgaagcac

SEQ ID NO: 2493575 - DNA, 25 bp, Homo sapien
ttctgtaatgggtttgaagcacaaa

SEQ ID NO: 2493576 - DNA, 25 bp, Homo sapien
gatgtgcttctgcatcgcactcatg

SEQ ID NO: 2493577 - DNA, 25 bp, Homo sapien
ccattgtcttgcagaccagatgatg

SEQ ID NO: 2493578 - DNA, 25 bp, Homo sapien
ggcgttctcattgtggtcctgacca

SEQ ID NO: 2493579 - DNA, 25 bp, Homo sapien
tctggcccctggtgacatttgtggt

SEQ ID NO: 2493580 - DNA, 25 bp, Homo sapien
agaagctgtactcatcggcacgcgt

SEQ ID NO: 2493581 - DNA, 25 bp, Homo sapien
agctgtactcatcggcacgcgtcca

SEQ ID NO: 2493582 - DNA, 25 bp, Homo sapien
tacagaagctgtactcatcggcacg

SEQ ID NO: 2493583 - DNA, 25 bp, Homo sapien
caaagtacagaagctgtactcatcg

SEQ ID NO: 2493584 - DNA, 25 bp, Homo sapien
gcggaacctgtgtttcctggcgcag

SEQ ID NO: 2493585 - DNA, 25 bp, Homo sapien
gccacgacagggctctgagaggctc

SEQ ID NO: 2493586 - DNA, 25 bp, Homo sapien
gaacctgtgtttcctggcgcaggag

SEQ ID NO: 2493587 - DNA, 25 bp, Homo sapien
ctgcggaacctgtgtttcctggcgc

SEQ ID NO: 2493588 - DNA, 25 bp, Homo sapien
caagatcttagctgtatggagtaac

SEQ ID NO: 2493589 - DNA, 25 bp, Homo sapien
tttatgcttagaacaccagggttta

SEQ ID NO: 2493590 - DNA, 25 bp, Homo sapien
cacaactggaagacttggaacctca

SEQ ID NO: 2493591 - DNA, 25 bp, Homo sapien
gaagtctgaaccttactgtgtaacc

SEQ ID NO: 2493592 - DNA, 25 bp, Homo sapien
taggtgagatgtacatcgttagtgg

SEQ ID NO: 2493593 - DNA, 25 bp, Homo sapien
gatgtacatcgttagtggaggaaaa

SEQ ID NO: 2493594 - DNA, 25 bp, Homo sapien
tgagatgtacatcgttagtggagga

SEQ ID NO: 2493595 - DNA, 25 bp, Homo sapien
ttgtttaggtgagatgtacatcgtt

SEQ ID NO: 2493596 - DNA, 25 bp, Homo sapien
caatcccagtttccggttgcagcat

SEQ ID NO: 2493597 - DNA, 25 bp, Homo sapien
tagagtaacacgaaactgggagtcc

SEQ ID NO: 2493598 - DNA, 25 bp, Homo sapien
ctgggagtccgagaaataatcatct

SEQ ID NO: 2493599 - DNA, 25 bp, Homo sapien
tcacattatgggagacgaagtctgc

SEQ ID NO: 2493600 - DNA, 25 bp, Homo sapien
aaatcagaaaatgatctaaactgct

SEQ ID NO: 2493601 - DNA, 25 bp, Homo sapien
atcagaaaatgatctaaactgctgt

SEQ ID NO: 2493602 - DNA, 25 bp, Homo sapien
agaaaatgatctaaactgctgtaac

SEQ ID NO: 2493603 - DNA, 25 bp, Homo sapien
ctctttttgtataaatcagaaaatg

SEQ ID NO: 2493604 - DNA, 25 bp, Homo sapien
ggacttagagatagccaagagagtt

SEQ ID NO: 2493605 - DNA, 25 bp, Homo sapien
gatggtagtatagcattagtgcagc

SEQ ID NO: 2493606 - DNA, 25 bp, Homo sapien
tattcagaaggctacacaaggtatt

SEQ ID NO: 2493607 - DNA, 25 bp, Homo sapien
gggagaggtctatcctacagtatgg

SEQ ID NO: 2493608 - DNA, 25 bp, Homo sapien
ttcctagttctaagattcatgaagg

SEQ ID NO: 2493609 - DNA, 25 bp, Homo sapien
tgcttccccgaagaattaatcactt

SEQ ID NO: 2493610 - DNA, 25 bp, Homo sapien
gaaggtagaacaatgttgatgggct

SEQ ID NO: 2493611 - DNA, 25 bp, Homo sapien
aatgtgtacatacatctatcatttt

SEQ ID NO: 2493612 - DNA, 25 bp, Homo sapien
catcaccaccgggtattgggaagtt

SEQ ID NO: 2493613 - DNA, 25 bp, Homo sapien
agattgtcaaaattttccgatgcca

SEQ ID NO: 2493614 - DNA, 25 bp, Homo sapien
atcatcaccaccgggtattgggaag

SEQ ID NO: 2493615 - DNA, 25 bp, Homo sapien
caaatcatcaccaccgggtattggg

SEQ ID NO: 2493616 - DNA, 25 bp, Homo sapien
cacacagtatattcggcagctgaaa

SEQ ID NO: 2493617 - DNA, 25 bp, Homo sapien
caaagcttcggactctacagtgcac

SEQ ID NO: 2493618 - DNA, 25 bp, Homo sapien
catggctaaatgactgtactcgctc

SEQ ID NO: 2493619 - DNA, 25 bp, Homo sapien
cacagtctggcatatcaaaagggta

SEQ ID NO: 2493620 - DNA, 25 bp, Homo sapien
actttctgctctttggtcaactcct

SEQ ID NO: 2493621 - DNA, 25 bp, Homo sapien
taaaaaactttctgctctttggtca

SEQ ID NO: 2493622 - DNA, 25 bp, Homo sapien
tttctgctctttggtcaactcctga

SEQ ID NO: 2493623 - DNA, 25 bp, Homo sapien
gctctttggtcaactcctgactcat

SEQ ID NO: 2493624 - DNA, 25 bp, Homo sapien
gggcagtacctctgagagtacacca

SEQ ID NO: 2493625 - DNA, 25 bp, Homo sapien
cagtggaaatctagccagggcagta

SEQ ID NO: 2493626 - DNA, 25 bp, Homo sapien
aaatgccacactgtccgcaaatgtg

SEQ ID NO: 2493627 - DNA, 25 bp, Homo sapien
tcatggcgtctctttaccaaatgcc

SEQ ID NO: 2493628 - DNA, 25 bp, Homo sapien
cctgcacggacaacagtattattgg

SEQ ID NO: 2493629 - DNA, 25 bp, Homo sapien
caggccaggagcaatttcaagaagt

SEQ ID NO: 2493630 - DNA, 25 bp, Homo sapien
gaatggctagattaacctgcacgga

SEQ ID NO: 2493631 - DNA, 25 bp, Homo sapien
tattggacactgactacctaacatc

SEQ ID NO: 2493632 - DNA, 25 bp, Homo sapien
tatcttatatagacaatcttttaaa

SEQ ID NO: 2493633 - DNA, 25 bp, Homo sapien
aataagtgtatcttatatagacaat

SEQ ID NO: 2493634 - DNA, 25 bp, Homo sapien
tttaataagtgtatcttatatagac

SEQ ID NO: 2493635 - DNA, 25 bp, Homo sapien
atcttatatagacaatcttttaaaa

SEQ ID NO: 2493636 - DNA, 25 bp, Homo sapien
tacatttattccgagggagcctccc

SEQ ID NO: 2493637 - DNA, 25 bp, Homo sapien
tgaaatggaacccagaaagcccttg

SEQ ID NO: 2493638 - DNA, 25 bp, Homo sapien
tagagtgaatcctcaaaagggcaac

SEQ ID NO: 2493639 - DNA, 25 bp, Homo sapien
gaaaactgccccgaaaatgtctgtg

SEQ ID NO: 2493640 - DNA, 25 bp, Homo sapien
aaaatcacattcaactgggaaaaca

SEQ ID NO: 2493641 - DNA, 25 bp, Homo sapien
tgatgatgtggaacctgaaaggact

SEQ ID NO: 2493642 - DNA, 25 bp, Homo sapien
gggatagagaattacttaggacaaa

SEQ ID NO: 2493643 - DNA, 25 bp, Homo sapien
ttaggacaaatatgtgcaagcccag

SEQ ID NO: 2493644 - DNA, 25 bp, Homo sapien
cccaggagtaggagcgaatagtgaa

SEQ ID NO: 2493645 - DNA, 25 bp, Homo sapien
gatgccacacgttgtagatctctga

SEQ ID NO: 2493646 - DNA, 25 bp, Homo sapien
taagatgctagatgggactctccca

SEQ ID NO: 2493647 - DNA, 25 bp, Homo sapien
gatactaccctagatgttgccagag

SEQ ID NO: 2493648 - DNA, 25 bp, Homo sapien
taggtatagtcaatgattttcaatt

SEQ ID NO: 2493649 - DNA, 25 bp, Homo sapien
gaactattttaggtatagtcaatga

SEQ ID NO: 2493650 - DNA, 25 bp, Homo sapien
tattcacttacggactttatggtag

SEQ ID NO: 2493651 - DNA, 25 bp, Homo sapien
tatgtcaattacattcgttgtattc

SEQ ID NO: 2493652 - DNA, 25 bp, Homo sapien
tacagtatgggtgtggatgttcaca

SEQ ID NO: 2493653 - DNA, 25 bp, Homo sapien
taaacttggtacagtatgtagtgcc

SEQ ID NO: 2493654 - DNA, 25 bp, Homo sapien
gaatgctgtcggaactggaccttga

SEQ ID NO: 2493655 - DNA, 25 bp, Homo sapien
gcatgttatgtttccagtctgggta

SEQ ID NO: 2493656 - DNA, 25 bp, Homo sapien
gagctgaccactttggcttgaatcc

SEQ ID NO: 2493657 - DNA, 25 bp, Homo sapien
ttacatgatccctgagctgaccact

SEQ ID NO: 2493658 - DNA, 25 bp, Homo sapien
catgatccctgagctgaccactttg

SEQ ID NO: 2493659 - DNA, 25 bp, Homo sapien
tccctgagctgaccactttggcttg

SEQ ID NO: 2493660 - DNA, 25 bp, Homo sapien
ggcacctctgtagggcatgaagcaa

SEQ ID NO: 2493661 - DNA, 25 bp, Homo sapien
aggacatgtctgttggctctcgaga

SEQ ID NO: 2493662 - DNA, 25 bp, Homo sapien
tctcgagattcatgggacagcaatg

SEQ ID NO: 2493663 - DNA, 25 bp, Homo sapien
ctgaaggattgtctctgccaccacc

SEQ ID NO: 2493664 - DNA, 25 bp, Homo sapien
gatggactcttgctttgtggcccat

SEQ ID NO: 2493665 - DNA, 25 bp, Homo sapien
ggaactacaggcacacgtcaccatg

SEQ ID NO: 2493666 - DNA, 25 bp, Homo sapien
ttgagatggactcttgctttgtggc

SEQ ID NO: 2493667 - DNA, 25 bp, Homo sapien
ctggaactacaggcacacgtcacca

SEQ ID NO: 2493668 - DNA, 25 bp, Homo sapien
tcaaagaatcctccccaagtagtaa

SEQ ID NO: 2493669 - DNA, 25 bp, Homo sapien
tggaagagataccttgtgaaactgc

SEQ ID NO: 2493670 - DNA, 25 bp, Homo sapien
tagcaggcatcctcagctaggctgg

SEQ ID NO: 2493671 - DNA, 25 bp, Homo sapien
ggaccctgataccttgattgacaaa

SEQ ID NO: 2493672 - DNA, 25 bp, Homo sapien
atgcctggccagattgaccatatct

SEQ ID NO: 2493673 - DNA, 25 bp, Homo sapien
gattgaccatatcttgatgaagaaa

SEQ ID NO: 2493674 - DNA, 25 bp, Homo sapien
tggggaagtaagtgaagtaagtgcc

SEQ ID NO: 2493675 - DNA, 25 bp, Homo sapien
ggccagattgaccatatcttgatga

SEQ ID NO: 2493676 - DNA, 25 bp, Homo sapien
tgttcactccgtagctttcttgctc

SEQ ID NO: 2493677 - DNA, 25 bp, Homo sapien
cactgatgtaggtagacatactgac

SEQ ID NO: 2493678 - DNA, 25 bp, Homo sapien
tttcttgttcactccgtagctttct

SEQ ID NO: 2493679 - DNA, 25 bp, Homo sapien
cttgctctgaggacatctcttacac

SEQ ID NO: 2493680 - DNA, 25 bp, Homo sapien
ggtgtgtacaataagccccgctgga

SEQ ID NO: 2493681 - DNA, 25 bp, Homo sapien
tacaagggttacatagcgaggacag

SEQ ID NO: 2493682 - DNA, 25 bp, Homo sapien
ggttggcactagatactgtccctga

SEQ ID NO: 2493683 - DNA, 25 bp, Homo sapien
tagatgaacaaatgccggacactcc

SEQ ID NO: 2493684 - DNA, 25 bp, Homo sapien
aatcaagggcccaggtttctctaga

SEQ ID NO: 2493685 - DNA, 25 bp, Homo sapien
ttctctagaatagtggccaagccac

SEQ ID NO: 2493686 - DNA, 25 bp, Homo sapien
gatctgaccctgaggctagtacgct

SEQ ID NO: 2493687 - DNA, 25 bp, Homo sapien
aacacgagggtaagagaatttgagc

SEQ ID NO: 2493688 - DNA, 25 bp, Homo sapien
aagtcttaggtcgtgcactgctcca

SEQ ID NO: 2493689 - DNA, 25 bp, Homo sapien
tgaagtcttaggtcgtgcactgctc

SEQ ID NO: 2493690 - DNA, 25 bp, Homo sapien
ctgtgaagtcttaggtcgtgcactg

SEQ ID NO: 2493691 - DNA, 25 bp, Homo sapien
cttaggtcgtgcactgctccataaa

SEQ ID NO: 2493692 - DNA, 25 bp, Homo sapien
aactgctggaggattcggtccaatg

SEQ ID NO: 2493693 - DNA, 25 bp, Homo sapien
tgcaataaaggttccagtcctaccc

SEQ ID NO: 2493694 - DNA, 25 bp, Homo sapien
tccaatgcaataaaggttccagtcc

SEQ ID NO: 2493695 - DNA, 25 bp, Homo sapien
ggattcggtccaatgcaataaaggt

SEQ ID NO: 2493696 - DNA, 25 bp, Homo sapien
ttcaagattgcatctagagactctg

SEQ ID NO: 2493697 - DNA, 25 bp, Homo sapien
gcctttcaagattgcatctagagac

SEQ ID NO: 2493698 - DNA, 25 bp, Homo sapien
aatttgcctttcaagattgcatcta

SEQ ID NO: 2493699 - DNA, 25 bp, Homo sapien
tctagagactctggcacaatctttt

SEQ ID NO: 2493700 - DNA, 25 bp, Homo sapien
gcagtgcaccacagtgggcccagca

SEQ ID NO: 2493701 - DNA, 25 bp, Homo sapien
cagtgcaccacagtgggcccagcac

SEQ ID NO: 2493702 - DNA, 25 bp, Homo sapien
ctgcagtgcaccacagtgggcccag

SEQ ID NO: 2493703 - DNA, 25 bp, Homo sapien
tgcagtgcaccacagtgggcccagc

SEQ ID NO: 2493704 - DNA, 25 bp, Homo sapien
tgttgatgtagtccctgacagttct

SEQ ID NO: 2493705 - DNA, 25 bp, Homo sapien
ccgggcttctgttgatgtagtccct

SEQ ID NO: 2493706 - DNA, 25 bp, Homo sapien
atggtctggccacaccgtatagtga

SEQ ID NO: 2493707 - DNA, 25 bp, Homo sapien
tatagtgaaagtggcggatgagtct

SEQ ID NO: 2493708 - DNA, 25 bp, Homo sapien
catagtagagggaatcctggtccgc

SEQ ID NO: 2493709 - DNA, 25 bp, Homo sapien
cgcatatcttaaactcccggatggt

SEQ ID NO: 2493710 - DNA, 25 bp, Homo sapien
atggtccactcaggcaggacggact

SEQ ID NO: 2493711 - DNA, 25 bp, Homo sapien
gcaggatgaggtccccatagtagag

SEQ ID NO: 2493712 - DNA, 25 bp, Homo sapien
tactgagcgcagatactaggcactt

SEQ ID NO: 2493713 - DNA, 25 bp, Homo sapien
tatgtcactgtcctaacgtgggccg

SEQ ID NO: 2493714 - DNA, 25 bp, Homo sapien
gggccgtgtgccaagagatctttga

SEQ ID NO: 2493715 - DNA, 25 bp, Homo sapien
gttagaacgtttagctaagctcgcc

SEQ ID NO: 2493716 - DNA, 25 bp, Homo sapien
tgttttgcggggtttcactttgatg

SEQ ID NO: 2493717 - DNA, 25 bp, Homo sapien
tgatggggcagaattctatccaggt

SEQ ID NO: 2493718 - DNA, 25 bp, Homo sapien
ttgcggggtttcactttgatgatgg

SEQ ID NO: 2493719 - DNA, 25 bp, Homo sapien
gcagaattctatccaggtggcagaa

SEQ ID NO: 2493720 - DNA, 25 bp, Homo sapien
gaagcggtccctgagtgacaatgta

SEQ ID NO: 2493721 - DNA, 25 bp, Homo sapien
tgttgtgaacgttttgttcccacac

SEQ ID NO: 2493722 - DNA, 25 bp, Homo sapien
cacactgggtcaccatgacgatgtt

SEQ ID NO: 2493723 - DNA, 25 bp, Homo sapien
acaccattttccagaagtcatcctt

SEQ ID NO: 2493724 - DNA, 25 bp, Homo sapien
tgagtgccgttctcagaccagcagc

SEQ ID NO: 2493725 - DNA, 25 bp, Homo sapien
gggatattctccaagatgccccatg

SEQ ID NO: 2493726 - DNA, 25 bp, Homo sapien
cagcatggtgcctgcttggctgagc

SEQ ID NO: 2493727 - DNA, 25 bp, Homo sapien
tccttctgcactccggcaatgacag

SEQ ID NO: 2493728 - DNA, 25 bp, Homo sapien
catcctgaacactatggcctagtgg

SEQ ID NO: 2493729 - DNA, 25 bp, Homo sapien
cactatggcctagtgggtcacttac

SEQ ID NO: 2493730 - DNA, 25 bp, Homo sapien
cctcatcctgaacactatggcctag

SEQ ID NO: 2493731 - DNA, 25 bp, Homo sapien
gaacactatggcctagtgggtcact

SEQ ID NO: 2493732 - DNA, 25 bp, Homo sapien
tcatcatctacattggagagcttca

SEQ ID NO: 2493733 - DNA, 25 bp, Homo sapien
cattggagagcttcactcgcgtggc

SEQ ID NO: 2493734 - DNA, 25 bp, Homo sapien
catctacattggagagcttcactcg

SEQ ID NO: 2493735 - DNA, 25 bp, Homo sapien
ggagagcttcactcgcgtggcatca

SEQ ID NO: 2493736 - DNA, 25 bp, Homo sapien
tattgttgtatcgatttttccctct

SEQ ID NO: 2493737 - DNA, 25 bp, Homo sapien
tcacatgactggtttcggcccacgt

SEQ ID NO: 2493738 - DNA, 25 bp, Homo sapien
agggcaatatattgttgtatcgatt

SEQ ID NO: 2493739 - DNA, 25 bp, Homo sapien
tccggcaagagtgcaatgtcacatg

SEQ ID NO: 2493740 - DNA, 25 bp, Homo sapien
ctcaagctggcctctaagattagat

SEQ ID NO: 2493741 - DNA, 25 bp, Homo sapien
ccaggtagcccttggtttgctgtgt

SEQ ID NO: 2493742 - DNA, 25 bp, Homo sapien
gctggcctctaagattagatggtat

SEQ ID NO: 2493743 - DNA, 25 bp, Homo sapien
tgctgtgttattctggagctcaagc

SEQ ID NO: 2493744 - DNA, 25 bp, Homo sapien
cttggatagaaggtagttggagtca

SEQ ID NO: 2493745 - DNA, 25 bp, Homo sapien
ctgtagcttcatgaaatgcccttca

SEQ ID NO: 2493746 - DNA, 25 bp, Homo sapien
catgaaatgcccttcaaactgattt

SEQ ID NO: 2493747 - DNA, 25 bp, Homo sapien
ctcgtattccttggatagaaggtag

SEQ ID NO: 2493748 - DNA, 25 bp, Homo sapien
ttctggcccaggtttaagtggacag

SEQ ID NO: 2493749 - DNA, 25 bp, Homo sapien
gataatggtcgatccctacgaatgc

SEQ ID NO: 2493750 - DNA, 25 bp, Homo sapien
cctacgaatgctcagacgggcagag

SEQ ID NO: 2493751 - DNA, 25 bp, Homo sapien
ggcagagggtctttctcgaccatgg

SEQ ID NO: 2493752 - DNA, 25 bp, Homo sapien
caacaacagccactagcatgccaat

SEQ ID NO: 2493753 - DNA, 25 bp, Homo sapien
tctgtctgcagatcaataaggcaac

SEQ ID NO: 2493754 - DNA, 25 bp, Homo sapien
cacaccttcaatagctccaaacaag

SEQ ID NO: 2493755 - DNA, 25 bp, Homo sapien
taaaaacagaccagcactcacacct

SEQ ID NO: 2493756 - DNA, 25 bp, Homo sapien
gatagaaacaacaaacgcaggtggg

SEQ ID NO: 2493757 - DNA, 25 bp, Homo sapien
tagaaacaacaaacgcaggtgggaa

SEQ ID NO: 2493758 - DNA, 25 bp, Homo sapien
acaaacgcaggtgggaaaattagtg

SEQ ID NO: 2493759 - DNA, 25 bp, Homo sapien
caacaaacgcaggtgggaaaattag

SEQ ID NO: 2493760 - DNA, 25 bp, Homo sapien
tctaacacactagagaagtctcttt

SEQ ID NO: 2493761 - DNA, 25 bp, Homo sapien
tcttctagagaggttgtacaatccc

SEQ ID NO: 2493762 - DNA, 25 bp, Homo sapien
tgtagtaacttatattttggcctgt

SEQ ID NO: 2493763 - DNA, 25 bp, Homo sapien
gagatacacatcattaatactttgg

SEQ ID NO: 2493764 - DNA, 25 bp, Homo sapien
agctgtgtaaaagctcgaatgctga

SEQ ID NO: 2493765 - DNA, 25 bp, Homo sapien
gagctgtgtaaaagctcgaatgctg

SEQ ID NO: 2493766 - DNA, 25 bp, Homo sapien
ctgtgtaaaagctcgaatgctgatt

SEQ ID NO: 2493767 - DNA, 25 bp, Homo sapien
gctgtgtaaaagctcgaatgctgat

SEQ ID NO: 2493768 - DNA, 25 bp, Homo sapien
tagtctgatacacccgaatggaggc

SEQ ID NO: 2493769 - DNA, 25 bp, Homo sapien
cagtgtgtggcttcagtggtccatc

SEQ ID NO: 2493770 - DNA, 25 bp, Homo sapien
gggatcgcattttccacctaggctc

SEQ ID NO: 2493771 - DNA, 25 bp, Homo sapien
taggattttcggcacatttgctggc

SEQ ID NO: 2493772 - DNA, 25 bp, Homo sapien
tctcaccaccactgtgaagtatttc

SEQ ID NO: 2493773 - DNA, 25 bp, Homo sapien
cagctccattggtgtcgctgaacca

SEQ ID NO: 2493774 - DNA, 25 bp, Homo sapien
gcagttgacagtaaagttgatggaa

SEQ ID NO: 2493775 - DNA, 25 bp, Homo sapien
gaagacttgctaattagcacatcct

SEQ ID NO: 2493776 - DNA, 25 bp, Homo sapien
tgccggccgactgcactttgatgga

SEQ ID NO: 2493777 - DNA, 25 bp, Homo sapien
ttctgaggccggcaatgcaggtttt

SEQ ID NO: 2493778 - DNA, 25 bp, Homo sapien
gaaaactcaacttcttgggtgtcca

SEQ ID NO: 2493779 - DNA, 25 bp, Homo sapien
gatggacaccaggtacctcttatgg

SEQ ID NO: 2493780 - DNA, 25 bp, Homo sapien
tcaccctagcagagacacatgagca

SEQ ID NO: 2493781 - DNA, 25 bp, Homo sapien
taatagttagacgtggctgaggaca

SEQ ID NO: 2493782 - DNA, 25 bp, Homo sapien
gcagaacagaagatcgaaggaccat

SEQ ID NO: 2493783 - DNA, 25 bp, Homo sapien
caaatacagagtgtcgtggctcacc

SEQ ID NO: 2493784 - DNA, 25 bp, Homo sapien
cacatggtagatggcgaacaccaat

SEQ ID NO: 2493785 - DNA, 25 bp, Homo sapien
gggagtatcattccctgttgcaagc

SEQ ID NO: 2493786 - DNA, 25 bp, Homo sapien
aagagatggagagcctacacaccct

SEQ ID NO: 2493787 - DNA, 25 bp, Homo sapien
gttctgcttaagcatgtgtgtcaca

SEQ ID NO: 2493788 - DNA, 25 bp, Homo sapien
cctacctaattgtaagccccatgag

SEQ ID NO: 2493789 - DNA, 25 bp, Homo sapien
cctcaccttttatgctatggccaaa

SEQ ID NO: 2493790 - DNA, 25 bp, Homo sapien
tcaaatccagaccaatcccatgtaa

SEQ ID NO: 2493791 - DNA, 25 bp, Homo sapien
tgggtcagattacctaacaagtgtc

SEQ ID NO: 2493792 - DNA, 25 bp, Homo sapien
caaagtcgttgtagtctgtccagtc

SEQ ID NO: 2493793 - DNA, 25 bp, Homo sapien
ccaaggatgtgtttgcaatgtcagc

SEQ ID NO: 2493794 - DNA, 25 bp, Homo sapien
gacagtaagtgcatctctgggcaac

SEQ ID NO: 2493795 - DNA, 25 bp, Homo sapien
tggacgaagaccatacacaatgcgt

SEQ ID NO: 2493796 - DNA, 25 bp, Homo sapien
caggaacaaggccttgaaaccgcca

SEQ ID NO: 2493797 - DNA, 25 bp, Homo sapien
tggactccagttgaaccaaaggctg

SEQ ID NO: 2493798 - DNA, 25 bp, Homo sapien
ccgctgtgactttattgctgagatc

SEQ ID NO: 2493799 - DNA, 25 bp, Homo sapien
tgtctgtcgtgttccgattggaccc

SEQ ID NO: 2493800 - DNA, 25 bp, Homo sapien
aaaagatgttgtaccagctgagctc

SEQ ID NO: 2493801 - DNA, 25 bp, Homo sapien
gaagctctggactagtgggtcaact

SEQ ID NO: 2493802 - DNA, 25 bp, Homo sapien
gaaagactcattagacagctcccca

SEQ ID NO: 2493803 - DNA, 25 bp, Homo sapien
tgtgatcctcaggtcggtgacagct

SEQ ID NO: 2493804 - DNA, 25 bp, Homo sapien
gcttccttgctaaagaggcctccac

SEQ ID NO: 2493805 - DNA, 25 bp, Homo sapien
gcattgtctgcaattactccttgga

SEQ ID NO: 2493806 - DNA, 25 bp, Homo sapien
ggcctccactgacagttaggatctg

SEQ ID NO: 2493807 - DNA, 25 bp, Homo sapien
tgatgtgttgcgcagaaggattcca

SEQ ID NO: 2493808 - DNA, 25 bp, Homo sapien
ttttgactgtgcctgaatgccgaca

SEQ ID NO: 2493809 - DNA, 25 bp, Homo sapien
ggacccgctgactgaggcaatcatg

SEQ ID NO: 2493810 - DNA, 25 bp, Homo sapien
tatctgattcttcagggacccgctg

SEQ ID NO: 2493811 - DNA, 25 bp, Homo sapien
ccagtctgtggaacgtgtgctcaaa

SEQ ID NO: 2493812 - DNA, 25 bp, Homo sapien
cctgttgcgcaatgttagatcctta

SEQ ID NO: 2493813 - DNA, 25 bp, Homo sapien
caagaattttgtattggcggcctgg

SEQ ID NO: 2493814 - DNA, 25 bp, Homo sapien
tgtacatccccgctaatcgtcaaga

SEQ ID NO: 2493815 - DNA, 25 bp, Homo sapien
gagcagctggatctcatattggtcg

SEQ ID NO: 2493816 - DNA, 25 bp, Homo sapien
tacacattcgttttctgacttggga

SEQ ID NO: 2493817 - DNA, 25 bp, Homo sapien
agtgacactgtacaaccgtccaggg

SEQ ID NO: 2493818 - DNA, 25 bp, Homo sapien
gtctccagtggcatgcacccaggat

SEQ ID NO: 2493819 - DNA, 25 bp, Homo sapien
ccttaaatagtcactcctggctgag

SEQ ID NO: 2493820 - DNA, 25 bp, Homo sapien
tcattacgaccggaattgttcaccg

SEQ ID NO: 2493821 - DNA, 25 bp, Homo sapien
cttggcaatgacaagggactgaacc

SEQ ID NO: 2493822 - DNA, 25 bp, Homo sapien
gactgaaccaccttgccgtcatgag

SEQ ID NO: 2493823 - DNA, 25 bp, Homo sapien
gaaacgctgaggtagtcattacgac

SEQ ID NO: 2493824 - DNA, 25 bp, Homo sapien
cctgtgtggcagaatatggttcccc

SEQ ID NO: 2493825 - DNA, 25 bp, Homo sapien
taaaatgagaatcaacctgtgtggc

SEQ ID NO: 2493826 - DNA, 25 bp, Homo sapien
gagactgtatcccaaccaatagagg

SEQ ID NO: 2493827 - DNA, 25 bp, Homo sapien
atttctcaggctcccaggcagtcag

SEQ ID NO: 2493828 - DNA, 25 bp, Homo sapien
gacatcgagtgaggagttcttacat

SEQ ID NO: 2493829 - DNA, 25 bp, Homo sapien
tgtgaaacttagcttttgtaaaggc

SEQ ID NO: 2493830 - DNA, 25 bp, Homo sapien
catcgcccaatttccattccatata

SEQ ID NO: 2493831 - DNA, 25 bp, Homo sapien
tctggatggctagcttttgtgaaac

SEQ ID NO: 2493832 - DNA, 25 bp, Homo sapien
tacaggctgccggacttgagagagt

SEQ ID NO: 2493833 - DNA, 25 bp, Homo sapien
tgcctgggtccagttagtaaacaga

SEQ ID NO: 2493834 - DNA, 25 bp, Homo sapien
cacaaccacttgtcgggaagagatc

SEQ ID NO: 2493835 - DNA, 25 bp, Homo sapien
tgttgttaccaccacggagtacagg

SEQ ID NO: 2493836 - DNA, 25 bp, Homo sapien
aaagggaaatcttgatgactttgct

SEQ ID NO: 2493837 - DNA, 25 bp, Homo sapien
agtggcaggatctcgactcatgcaa

SEQ ID NO: 2493838 - DNA, 25 bp, Homo sapien
tggcaggatctcgactcatgcaacc

SEQ ID NO: 2493839 - DNA, 25 bp, Homo sapien
ggaaatcttgatgactttgcttcca

SEQ ID NO: 2493840 - DNA, 25 bp, Homo sapien
gggtctgccacatgatactcagtga

SEQ ID NO: 2493841 - DNA, 25 bp, Homo sapien
taagaggtctctgtcagctagggaa

SEQ ID NO: 2493842 - DNA, 25 bp, Homo sapien
catgtattttcgtccaggcaccagg

SEQ ID NO: 2493843 - DNA, 25 bp, Homo sapien
cattggcatgtttgacacgaagctg

SEQ ID NO: 2493844 - DNA, 25 bp, Homo sapien
gagtaggatccgatactgctcccag

SEQ ID NO: 2493845 - DNA, 25 bp, Homo sapien
tacgagccccgtgtcatccatgaca

SEQ ID NO: 2493846 - DNA, 25 bp, Homo sapien
cagcaccacagaatcattgaagagt

SEQ ID NO: 2493847 - DNA, 25 bp, Homo sapien
gccttggcaacgctcagaattcttc

SEQ ID NO: 2493848 - DNA, 25 bp, Homo sapien
tgccattattgtttgcctccaggtt

SEQ ID NO: 2493849 - DNA, 25 bp, Homo sapien
catcctgccattattgtttgcctcc

SEQ ID NO: 2493850 - DNA, 25 bp, Homo sapien
ctacaagagacctcatcctgccatt

SEQ ID NO: 2493851 - DNA, 25 bp, Homo sapien
gtttgcctccaggtttgcaactttg

SEQ ID NO: 2493852 - DNA, 25 bp, Homo sapien
acattcaaggtctctctataatctg

SEQ ID NO: 2493853 - DNA, 25 bp, Homo sapien
agttcagaccccatatccttccagt

SEQ ID NO: 2493854 - DNA, 25 bp, Homo sapien
ttaactgagactactttctgaagcc

SEQ ID NO: 2493855 - DNA, 25 bp, Homo sapien
ccttccagtcttaactgagactact

SEQ ID NO: 2493856 - DNA, 25 bp, Homo sapien
tgggccatactacagacaccttcag

SEQ ID NO: 2493857 - DNA, 25 bp, Homo sapien
cttgagggctaaacaaaatcaggcc

SEQ ID NO: 2493858 - DNA, 25 bp, Homo sapien
taagtgactcagaagaatgggccat

SEQ ID NO: 2493859 - DNA, 25 bp, Homo sapien
tcagagagtgatttgagcaaccaag

SEQ ID NO: 2493860 - DNA, 25 bp, Homo sapien
tgagtttcagtaatccaaggtgcta

SEQ ID NO: 2493861 - DNA, 25 bp, Homo sapien
cagtaacttgataaagtcgaccggg

SEQ ID NO: 2493862 - DNA, 25 bp, Homo sapien
gacagttcaccagagacacagctga

SEQ ID NO: 2493863 - DNA, 25 bp, Homo sapien
cttttagagaggtcaaactgccatc

SEQ ID NO: 2493864 - DNA, 25 bp, Homo sapien
ctgtggtattgggtcccaggtcata

SEQ ID NO: 2493865 - DNA, 25 bp, Homo sapien
catatggttagatagaaaattttgg

SEQ ID NO: 2493866 - DNA, 25 bp, Homo sapien
tattgggtcccaggtcatatggtta

SEQ ID NO: 2493867 - DNA, 25 bp, Homo sapien
ggtattgggtcccaggtcatatggt

SEQ ID NO: 2493868 - DNA, 25 bp, Homo sapien
atagcatggagaaagtaactctggt

SEQ ID NO: 2493869 - DNA, 25 bp, Homo sapien
agtagggtatgtatagcatggagaa

SEQ ID NO: 2493870 - DNA, 25 bp, Homo sapien
agtaactctggttcactgtgagtga

SEQ ID NO: 2493871 - DNA, 25 bp, Homo sapien
gtgatgtcataaagacagcagttgc

SEQ ID NO: 2493872 - DNA, 25 bp, Homo sapien
tgcctacttcaaaatgttgccaagg

SEQ ID NO: 2493873 - DNA, 25 bp, Homo sapien
ggaagtaggaatccttagcaaggag

SEQ ID NO: 2493874 - DNA, 25 bp, Homo sapien
tgccaagggctagcctaaactttag

SEQ ID NO: 2493875 - DNA, 25 bp, Homo sapien
gaagagaagctaggtccatatcagt

SEQ ID NO: 2493876 - DNA, 25 bp, Homo sapien
tatccattagcatcagccggtatcg

SEQ ID NO: 2493877 - DNA, 25 bp, Homo sapien
aacaccgccatgaactaggatccct

SEQ ID NO: 2493878 - DNA, 25 bp, Homo sapien
ggaagtagcatgtttgtccacaaca

SEQ ID NO: 2493879 - DNA, 25 bp, Homo sapien
ggtcagcccgtgaaaagcataggaa

SEQ ID NO: 2493880 - DNA, 25 bp, Homo sapien
taggtattaaggtggcttttgccag

SEQ ID NO: 2493881 - DNA, 25 bp, Homo sapien
cattgcacagcagtaagtagaagag

SEQ ID NO: 2493882 - DNA, 25 bp, Homo sapien
tcaaagtctgcagcctcaagttaca

SEQ ID NO: 2493883 - DNA, 25 bp, Homo sapien
ttgccagtgaagtatataacattgc

SEQ ID NO: 2493884 - DNA, 25 bp, Homo sapien
caagttaccagcatagccacgcatc

SEQ ID NO: 2493885 - DNA, 25 bp, Homo sapien
gccacgcatcctattttcagtccag

SEQ ID NO: 2493886 - DNA, 25 bp, Homo sapien
tagaagggccattagggagtatcca

SEQ ID NO: 2493887 - DNA, 25 bp, Homo sapien
ggagaaaactccaattccacagaag

SEQ ID NO: 2493888 - DNA, 25 bp, Homo sapien
cctcatatgaggtgacttttccgga

SEQ ID NO: 2493889 - DNA, 25 bp, Homo sapien
agaaggagtccaccaaacatgcaag

SEQ ID NO: 2493890 - DNA, 25 bp, Homo sapien
atttactaccagcagtgagattgaa

SEQ ID NO: 2493891 - DNA, 25 bp, Homo sapien
aaacagctgtgatggcaatattgta

SEQ ID NO: 2493892 - DNA, 25 bp, Homo sapien
cataagactatgtatggctgaccaa

SEQ ID NO: 2493893 - DNA, 25 bp, Homo sapien
gaagtcctgctttgcctatgttgaa

SEQ ID NO: 2493894 - DNA, 25 bp, Homo sapien
ggctgaccaatagacaccataggct

SEQ ID NO: 2493895 - DNA, 25 bp, Homo sapien
ggcaaatcttgcacccagctgttca

SEQ ID NO: 2493896 - DNA, 25 bp, Homo sapien
gtcacttgatatgtacttctaaacc

SEQ ID NO: 2493897 - DNA, 25 bp, Homo sapien
tgtcacttgatatgtacttctaaac

SEQ ID NO: 2493898 - DNA, 25 bp, Homo sapien
ctgtcacttgatatgtacttctaaa

SEQ ID NO: 2493899 - DNA, 25 bp, Homo sapien
cacgacttggattgtatcaaaatga

SEQ ID NO: 2493900 - DNA, 25 bp, Homo sapien
tacatggtagttcattatactatcc

SEQ ID NO: 2493901 - DNA, 25 bp, Homo sapien
tattgtggttattactcagagatgt

SEQ ID NO: 2493902 - DNA, 25 bp, Homo sapien
tccctgcaaacctagatatatactt

SEQ ID NO: 2493903 - DNA, 25 bp, Homo sapien
gcgttgaccgtttaatgaccaagta

SEQ ID NO: 2493904 - DNA, 25 bp, Homo sapien
aaggatattcttgttgcgttgaccg

SEQ ID NO: 2493905 - DNA, 25 bp, Homo sapien
gtgagttcacactaaatactttggc

SEQ ID NO: 2493906 - DNA, 25 bp, Homo sapien
tgaccaagtaaacctgagaattgcc

SEQ ID NO: 2493907 - DNA, 25 bp, Homo sapien
cgaccctttcagtagctagttggct

SEQ ID NO: 2493908 - DNA, 25 bp, Homo sapien
gcactaagggagtctctgaaagtcc

SEQ ID NO: 2493909 - DNA, 25 bp, Homo sapien
caagctgcttctggctagatccgag

SEQ ID NO: 2493910 - DNA, 25 bp, Homo sapien
tagatccgaggaaaccagacatttc

SEQ ID NO: 2493911 - DNA, 25 bp, Homo sapien
tctatccgaaaggtagggcacaacg

SEQ ID NO: 2493912 - DNA, 25 bp, Homo sapien
ccgtatgtggtgttgtctatccgaa

SEQ ID NO: 2493913 - DNA, 25 bp, Homo sapien
tccgccagggtgaagttacatctct

SEQ ID NO: 2493914 - DNA, 25 bp, Homo sapien
gttacagggtgagcccaaaattctc

SEQ ID NO: 2493915 - DNA, 25 bp, Homo sapien
cagacacaacagtttaagtccacag

SEQ ID NO: 2493916 - DNA, 25 bp, Homo sapien
taagtccacagtctggactgctcag

SEQ ID NO: 2493917 - DNA, 25 bp, Homo sapien
ccacagtctggactgctcagggaca

SEQ ID NO: 2493918 - DNA, 25 bp, Homo sapien
ctgcaaaggaatcagacacaacagt

SEQ ID NO: 2493919 - DNA, 25 bp, Homo sapien
tgatccacaaggccaacccggctcc

SEQ ID NO: 2493920 - DNA, 25 bp, Homo sapien
agtgtgatccacaaggccaacccgg

SEQ ID NO: 2493921 - DNA, 25 bp, Homo sapien
tgtgatccacaaggccaacccggct

SEQ ID NO: 2493922 - DNA, 25 bp, Homo sapien
gtgtgatccacaaggccaacccggc

SEQ ID NO: 2493923 - DNA, 25 bp, Homo sapien
tcagtagttaagatccagaggagac

SEQ ID NO: 2493924 - DNA, 25 bp, Homo sapien
cagtagttaagatccagaggagacc

SEQ ID NO: 2493925 - DNA, 25 bp, Homo sapien
tgcgctcagtagttaagatccagag

SEQ ID NO: 2493926 - DNA, 25 bp, Homo sapien
gctcagtagttaagatccagaggag

SEQ ID NO: 2493927 - DNA, 25 bp, Homo sapien
tcggggctggcgacgcgcaggggcc

SEQ ID NO: 2493928 - DNA, 25 bp, Homo sapien
tcagcgcgccccgtgggcgcagcgc

SEQ ID NO: 2493929 - DNA, 25 bp, Homo sapien
cagggggtcacctgttgcgcgcgct

SEQ ID NO: 2493930 - DNA, 25 bp, Homo sapien
cgccccgtgggcgcagcgcgcttcc

SEQ ID NO: 2493931 - DNA, 25 bp, Homo sapien
gagccccgaggagccaacgcctgag

SEQ ID NO: 2493932 - DNA, 25 bp, Homo sapien
cggcaaaggaacaatgcgccggcga

SEQ ID NO: 2493933 - DNA, 25 bp, Homo sapien
aggcaatttcctcgtctcccggcaa

SEQ ID NO: 2493934 - DNA, 25 bp, Homo sapien
ctcgtctcccggcaaaggaacaatg

SEQ ID NO: 2493935 - DNA, 25 bp, Homo sapien
ggtggagttttctgcatttgcaggg

SEQ ID NO: 2493936 - DNA, 25 bp, Homo sapien
ttatcccagacttgcagggggtgga

SEQ ID NO: 2493937 - DNA, 25 bp, Homo sapien
ctgcatttgcctcctcatttatctg

SEQ ID NO: 2493938 - DNA, 25 bp, Homo sapien
ttatctggagactcacactgggctg

SEQ ID NO: 2493939 - DNA, 25 bp, Homo sapien
tcctgagacgtgcacagaccacact

SEQ ID NO: 2493940 - DNA, 25 bp, Homo sapien
aagcaatgagcctcctgagacgtgc

SEQ ID NO: 2493941 - DNA, 25 bp, Homo sapien
agcctcctgagacgtgcacagacca

SEQ ID NO: 2493942 - DNA, 25 bp, Homo sapien
caatgagcctcctgagacgtgcaca

SEQ ID NO: 2493943 - DNA, 25 bp, Homo sapien
tctcgctgctgttttggctgtagtt

SEQ ID NO: 2493944 - DNA, 25 bp, Homo sapien
gctgttttggctgtagttttctgca

SEQ ID NO: 2493945 - DNA, 25 bp, Homo sapien
agggctgagtagtcgacaaaaccca

SEQ ID NO: 2493946 - DNA, 25 bp, Homo sapien
tccagtcatgtgcagattgggatgc

SEQ ID NO: 2493947 - DNA, 25 bp, Homo sapien
tattcctaataaggaataccaggcc

SEQ ID NO: 2493948 - DNA, 25 bp, Homo sapien
gagccgtgtttctagtgctcctcac

SEQ ID NO: 2493949 - DNA, 25 bp, Homo sapien
ccatctggaactgcattaaaggtag

SEQ ID NO: 2493950 - DNA, 25 bp, Homo sapien
gcattaaaggtagtgagaatctggg

SEQ ID NO: 2493951 - DNA, 25 bp, Homo sapien
ggccttcttgaccactactctggag

SEQ ID NO: 2493952 - DNA, 25 bp, Homo sapien
ctgggaacagcggtccaagatggct

SEQ ID NO: 2493953 - DNA, 25 bp, Homo sapien
tcctgatcatagcaggtccatcggg

SEQ ID NO: 2493954 - DNA, 25 bp, Homo sapien
tctggagccttgtttctggagaaag

SEQ ID NO: 2493955 - DNA, 25 bp, Homo sapien
gatggtcctgttgcatgagcccacg

SEQ ID NO: 2493956 - DNA, 25 bp, Homo sapien
ttctggacatggacaatctgaaacc

SEQ ID NO: 2493957 - DNA, 25 bp, Homo sapien
caagcacagtgcagatttaacatga

SEQ ID NO: 2493958 - DNA, 25 bp, Homo sapien
tgagcccacgaccactttctcattt

SEQ ID NO: 2493959 - DNA, 25 bp, Homo sapien
gaagatcaagcaggtaagaatcacc

SEQ ID NO: 2493960 - DNA, 25 bp, Homo sapien
gatcaagcaggtaagaatcaccatg

SEQ ID NO: 2493961 - DNA, 25 bp, Homo sapien
caagcaggtaagaatcaccatgtaa

SEQ ID NO: 2493962 - DNA, 25 bp, Homo sapien
ctgaagatcaagcaggtaagaatca

SEQ ID NO: 2493963 - DNA, 25 bp, Homo sapien
ttagcaactgttcatgcttcgcttg

SEQ ID NO: 2493964 - DNA, 25 bp, Homo sapien
gcaactgttcatgcttcgcttgggg

SEQ ID NO: 2493965 - DNA, 25 bp, Homo sapien
cacttagcaactgttcatgcttcgc

SEQ ID NO: 2493966 - DNA, 25 bp, Homo sapien
tttccacttagcaactgttcatgct

SEQ ID NO: 2493967 - DNA, 25 bp, Homo sapien
gccatacatgggcttcagagcttct

SEQ ID NO: 2493968 - DNA, 25 bp, Homo sapien
tacatacatacattctgtgtggcag

SEQ ID NO: 2493969 - DNA, 25 bp, Homo sapien
ccccaagagattgatggtctgacaa

SEQ ID NO: 2493970 - DNA, 25 bp, Homo sapien
taaggagcctcgaaaatgggacaga

SEQ ID NO: 2493971 - DNA, 25 bp, Homo sapien
gaaagtctgctctcatacaggcaca

SEQ ID NO: 2493972 - DNA, 25 bp, Homo sapien
aagtctgctctcatacaggcacaga

SEQ ID NO: 2493973 - DNA, 25 bp, Homo sapien
agtctgctctcatacaggcacagag

SEQ ID NO: 2493974 - DNA, 25 bp, Homo sapien
aaagtctgctctcatacaggcacag

SEQ ID NO: 2493975 - DNA, 25 bp, Homo sapien
caaagtagacctcttgttgtgatct

SEQ ID NO: 2493976 - DNA, 25 bp, Homo sapien
tctcaggaattataatgtcaagtaa

SEQ ID NO: 2493977 - DNA, 25 bp, Homo sapien
cctcttgttgtgatctcaggaatta

SEQ ID NO: 2493978 - DNA, 25 bp, Homo sapien
gtagacctcttgttgtgatctcagg

SEQ ID NO: 2493979 - DNA, 25 bp, Homo sapien
tgttgacagccaatggatgtagcaa

SEQ ID NO: 2493980 - DNA, 25 bp, Homo sapien
gatgtagcaataaaacaccctgttc

SEQ ID NO: 2493981 - DNA, 25 bp, Homo sapien
gacaatgcttagtgcatccacaact

SEQ ID NO: 2493982 - DNA, 25 bp, Homo sapien
ctatccatacgaagctggcagacaa

SEQ ID NO: 2493983 - DNA, 25 bp, Homo sapien
gtctgtcttcttctacatccagcat

SEQ ID NO: 2493984 - DNA, 25 bp, Homo sapien
gtctggagtcttgtgatcaggccat

SEQ ID NO: 2493985 - DNA, 25 bp, Homo sapien
tcttcttctacatccagcatgagct

SEQ ID NO: 2493986 - DNA, 25 bp, Homo sapien
ggtgtaccagtaatgcttcacatgt

SEQ ID NO: 2493987 - DNA, 25 bp, Homo sapien
gtcatccaaaccacaatactgaatg

SEQ ID NO: 2493988 - DNA, 25 bp, Homo sapien
caaatgcctcattcacttgtagaac

SEQ ID NO: 2493989 - DNA, 25 bp, Homo sapien
gccaccaaatgcctcattcacttgt

SEQ ID NO: 2493990 - DNA, 25 bp, Homo sapien
tgaatgccttttatcacccccatct

SEQ ID NO: 2493991 - DNA, 25 bp, Homo sapien
ctcttttccggccagtatagcacac

SEQ ID NO: 2493992 - DNA, 25 bp, Homo sapien
tacactgataaccagaacctcaact

SEQ ID NO: 2493993 - DNA, 25 bp, Homo sapien
gtagttatcacattcatttacactg

SEQ ID NO: 2493994 - DNA, 25 bp, Homo sapien
caaggtttcgaatggtgtagttatc

SEQ ID NO: 2493995 - DNA, 25 bp, Homo sapien
catgcctcccgatgagtccaagaag

SEQ ID NO: 2493996 - DNA, 25 bp, Homo sapien
caattatttcgctgtaagacccgag

SEQ ID NO: 2493997 - DNA, 25 bp, Homo sapien
gcattcattcagtagtccagcagtc

SEQ ID NO: 2493998 - DNA, 25 bp, Homo sapien
cgagctactgtgtatcttaaaaccc

SEQ ID NO: 2493999 - DNA, 25 bp, Homo sapien
cccattgtccacgatcagacctgag

SEQ ID NO: 2494000 - DNA, 25 bp, Homo sapien
aagcaggagcttgccgcctgcaccc

SEQ ID NO: 2494001 - DNA, 25 bp, Homo sapien
cctctttaggaaggtggctctcaaa

SEQ ID NO: 2494002 - DNA, 25 bp, Homo sapien
tccacgatcagacctgagcagcagg

SEQ ID NO: 2494003 - DNA, 25 bp, Homo sapien
tgggtataaagttctgggtagtcaa

SEQ ID NO: 2494004 - DNA, 25 bp, Homo sapien
gagatgtgtctagctgtgatttaca

SEQ ID NO: 2494005 - DNA, 25 bp, Homo sapien
gctgtgtcttgtttgatgctaaacc

SEQ ID NO: 2494006 - DNA, 25 bp, Homo sapien
tgtctttcacacctggccctgtagg

SEQ ID NO: 2494007 - DNA, 25 bp, Homo sapien
taggtccaattggtctattgtgtgg

SEQ ID NO: 2494008 - DNA, 25 bp, Homo sapien
ttccaaagactttgatatgctgtct

SEQ ID NO: 2494009 - DNA, 25 bp, Homo sapien
ccttgaggtgtgtcattaagttatc

SEQ ID NO: 2494010 - DNA, 25 bp, Homo sapien
tcttgtgctgttaagaaaaacgtgt

SEQ ID NO: 2494011 - DNA, 25 bp, Homo sapien
tgagatgcatacatggctggtgagc

SEQ ID NO: 2494012 - DNA, 25 bp, Homo sapien
aagcatggggcttggcttgccaact

SEQ ID NO: 2494013 - DNA, 25 bp, Homo sapien
cagtgtacttggctggcaagcatgg

SEQ ID NO: 2494014 - DNA, 25 bp, Homo sapien
tgccagcttgggttagggattctct

SEQ ID NO: 2494015 - DNA, 25 bp, Homo sapien
ggcatccttagaagtagtgcaccca

SEQ ID NO: 2494016 - DNA, 25 bp, Homo sapien
gggactcgctttggaatggtgcatt

SEQ ID NO: 2494017 - DNA, 25 bp, Homo sapien
actgttgagtgcaccagggacatgc

SEQ ID NO: 2494018 - DNA, 25 bp, Homo sapien
tatatgcggacaggtctgccagctc

SEQ ID NO: 2494019 - DNA, 25 bp, Homo sapien
gatcaagattgtctgttcctttgag

SEQ ID NO: 2494020 - DNA, 25 bp, Homo sapien
tctgctgatcaagattgtctgttcc

SEQ ID NO: 2494021 - DNA, 25 bp, Homo sapien
gattgtctgttcctttgagggcaag

SEQ ID NO: 2494022 - DNA, 25 bp, Homo sapien
ttctctgctgatcaagattgtctgt

SEQ ID NO: 2494023 - DNA, 25 bp, Homo sapien
caggttatctagtctgctgtattac

SEQ ID NO: 2494024 - DNA, 25 bp, Homo sapien
tggctcctgcaagatcaggctttgt

SEQ ID NO: 2494025 - DNA, 25 bp, Homo sapien
tatgtaggaatgcacaaatgtacac

SEQ ID NO: 2494026 - DNA, 25 bp, Homo sapien
gtctccagttcttgtattaccatta

SEQ ID NO: 2494027 - DNA, 25 bp, Homo sapien
atcagattcatagaagtgtgtttag

SEQ ID NO: 2494028 - DNA, 25 bp, Homo sapien
ggaaacagctgagaatattaggggt

SEQ ID NO: 2494029 - DNA, 25 bp, Homo sapien
tccagaatatagtgtgtttagttag

SEQ ID NO: 2494030 - DNA, 25 bp, Homo sapien
taatgccacctcaggctttaatatc

SEQ ID NO: 2494031 - DNA, 25 bp, Homo sapien
ccctgcgtggcaatgaaggctttct

SEQ ID NO: 2494032 - DNA, 25 bp, Homo sapien
cagaaatcatccacggtgttgatca

SEQ ID NO: 2494033 - DNA, 25 bp, Homo sapien
ctgccagaaatcatccacggtgttg

SEQ ID NO: 2494034 - DNA, 25 bp, Homo sapien
tgtgatcataacaatcacagggctg

SEQ ID NO: 2494035 - DNA, 25 bp, Homo sapien
tcaatgaatcggttacattttttgg

SEQ ID NO: 2494036 - DNA, 25 bp, Homo sapien
ctcaatgaatcggttacattttttg

SEQ ID NO: 2494037 - DNA, 25 bp, Homo sapien
caatgaatcggttacattttttggt

SEQ ID NO: 2494038 - DNA, 25 bp, Homo sapien
tgctcaatgaatcggttacattttt

SEQ ID NO: 2494039 - DNA, 25 bp, Homo sapien
aacaggtaaggactgttcgaatcag

SEQ ID NO: 2494040 - DNA, 25 bp, Homo sapien
agtggaacaggtaaggactgttcga

SEQ ID NO: 2494041 - DNA, 25 bp, Homo sapien
taaggactgttcgaatcaggatata

SEQ ID NO: 2494042 - DNA, 25 bp, Homo sapien
ctgttcgaatcaggatataacctaa

SEQ ID NO: 2494043 - DNA, 25 bp, Homo sapien
ttggtaaaatggtcttatagcgatt

SEQ ID NO: 2494044 - DNA, 25 bp, Homo sapien
atttttagttccatgacgcggaata

SEQ ID NO: 2494045 - DNA, 25 bp, Homo sapien
tccatgacgcggaatatcaatttct

SEQ ID NO: 2494046 - DNA, 25 bp, Homo sapien
tatcaatttctttgggatccacaaa

SEQ ID NO: 2494047 - DNA, 25 bp, Homo sapien
ccttgtgagaattcggctggctgac

SEQ ID NO: 2494048 - DNA, 25 bp, Homo sapien
gagtaaatgtgaacttgccacgacg

SEQ ID NO: 2494049 - DNA, 25 bp, Homo sapien
cttgtgagaattcggctggctgact

SEQ ID NO: 2494050 - DNA, 25 bp, Homo sapien
cgacgtccctcagctgagaccttgt

SEQ ID NO: 2494051 - DNA, 25 bp, Homo sapien
gggttcaatgttccccaagctactc

SEQ ID NO: 2494052 - DNA, 25 bp, Homo sapien
tgttggtatagacacaaagggttca

SEQ ID NO: 2494053 - DNA, 25 bp, Homo sapien
cacaaagggttcaatgttccccaag

SEQ ID NO: 2494054 - DNA, 25 bp, Homo sapien
taccttctcccgtggtgttggtata

SEQ ID NO: 2494055 - DNA, 25 bp, Homo sapien
tgtaagagatacgttggaccctctt

SEQ ID NO: 2494056 - DNA, 25 bp, Homo sapien
ccaatgtaagagatacgttggaccc

SEQ ID NO: 2494057 - DNA, 25 bp, Homo sapien
aatgtaagagatacgttggaccctc

SEQ ID NO: 2494058 - DNA, 25 bp, Homo sapien
gtccaatgtaagagatacgttggac

SEQ ID NO: 2494059 - DNA, 25 bp, Homo sapien
cagagcaaccctcctaatgtagtag

SEQ ID NO: 2494060 - DNA, 25 bp, Homo sapien
tgcctgggtatttggtcaaacctta

SEQ ID NO: 2494061 - DNA, 25 bp, Homo sapien
gataaatgcctaatgaaatccttgg

SEQ ID NO: 2494062 - DNA, 25 bp, Homo sapien
tacattggaagacggagtgaagcag

SEQ ID NO: 2494063 - DNA, 25 bp, Homo sapien
gtatctggttaggacaggaatcacc

SEQ ID NO: 2494064 - DNA, 25 bp, Homo sapien
tatctggttaggacaggaatcaccc

SEQ ID NO: 2494065 - DNA, 25 bp, Homo sapien
agtatctggttaggacaggaatcac

SEQ ID NO: 2494066 - DNA, 25 bp, Homo sapien
cagtatctggttaggacaggaatca

SEQ ID NO: 2494067 - DNA, 25 bp, Homo sapien
taggtcttgtgcctaggacttgcaa

SEQ ID NO: 2494068 - DNA, 25 bp, Homo sapien
ttgcaaatgcctcgggtgaataaga

SEQ ID NO: 2494069 - DNA, 25 bp, Homo sapien
cctcgggtgaataagaatgcttttc

SEQ ID NO: 2494070 - DNA, 25 bp, Homo sapien
tgtgcctaggacttgcaaatgcctc

SEQ ID NO: 2494071 - DNA, 25 bp, Homo sapien
caccttcctgcattgttaccttcct

SEQ ID NO: 2494072 - DNA, 25 bp, Homo sapien
gtttatctaaatcccaccttcctgc

SEQ ID NO: 2494073 - DNA, 25 bp, Homo sapien
cccaccttcctgcattgttaccttc

SEQ ID NO: 2494074 - DNA, 25 bp, Homo sapien
ttcctgcattgttaccttccttcat

SEQ ID NO: 2494075 - DNA, 25 bp, Homo sapien
gggctccctctcgatgtctaatgag

SEQ ID NO: 2494076 - DNA, 25 bp, Homo sapien
caaggggctccctctcgatgtctaa

SEQ ID NO: 2494077 - DNA, 25 bp, Homo sapien
tctaatgaggccaggcaacctgcca

SEQ ID NO: 2494078 - DNA, 25 bp, Homo sapien
ccaggtgcagcgtgacattgccaag

SEQ ID NO: 2494079 - DNA, 25 bp, Homo sapien
gcggggagcctccatacagaagaga

SEQ ID NO: 2494080 - DNA, 25 bp, Homo sapien
aagagaggtagctgaatcagtagtg

SEQ ID NO: 2494081 - DNA, 25 bp, Homo sapien
taaagcagcggggagcctccataca

SEQ ID NO: 2494082 - DNA, 25 bp, Homo sapien
gaagagaggtagctgaatcagtagt

SEQ ID NO: 2494083 - DNA, 25 bp, Homo sapien
cagagggagcctcaaattggcttcc

SEQ ID NO: 2494084 - DNA, 25 bp, Homo sapien
cacctttggacctttgctgtattcg

SEQ ID NO: 2494085 - DNA, 25 bp, Homo sapien
gctgtattcgggctgccagggtttt

SEQ ID NO: 2494086 - DNA, 25 bp, Homo sapien
agtgatgcttgaatgcccctccctg

SEQ ID NO: 2494087 - DNA, 25 bp, Homo sapien
ctaccctggtgttcaaagttggata

SEQ ID NO: 2494088 - DNA, 25 bp, Homo sapien
tctcccactaccctggtgttcaaag

SEQ ID NO: 2494089 - DNA, 25 bp, Homo sapien
accctggtgttcaaagttggataca

SEQ ID NO: 2494090 - DNA, 25 bp, Homo sapien
cactaccctggtgttcaaagttgga

SEQ ID NO: 2494091 - DNA, 25 bp, Homo sapien
ctcttgaagtcctatgggcttcatt

SEQ ID NO: 2494092 - DNA, 25 bp, Homo sapien
cggtggtagctttgatctcaggagc

SEQ ID NO: 2494093 - DNA, 25 bp, Homo sapien
aaggagaagggcaaacagaggtagc

SEQ ID NO: 2494094 - DNA, 25 bp, Homo sapien
ggccttgagggtccacgacaacatt

SEQ ID NO: 2494095 - DNA, 25 bp, Homo sapien
ggcctgctcaggttggaccatgctg

SEQ ID NO: 2494096 - DNA, 25 bp, Homo sapien
gggcctgctcaggttggaccatgct

SEQ ID NO: 2494097 - DNA, 25 bp, Homo sapien
tgatgggcgataggtggatctcctg

SEQ ID NO: 2494098 - DNA, 25 bp, Homo sapien
cagtgctggctgtaatgtgatgggc

SEQ ID NO: 2494099 - DNA, 25 bp, Homo sapien
acaacagcataaaatccttctttgc

SEQ ID NO: 2494100 - DNA, 25 bp, Homo sapien
cttctttgctccagattttgtccgc

SEQ ID NO: 2494101 - DNA, 25 bp, Homo sapien
tttgctccagattttgtccgcttca

SEQ ID NO: 2494102 - DNA, 25 bp, Homo sapien
tccagattttgtccgcttcatgctg

SEQ ID NO: 2494103 - DNA, 25 bp, Homo sapien
cgttaaatgagagcttgagaaaact

SEQ ID NO: 2494104 - DNA, 25 bp, Homo sapien
aacagaaagtccgacgttaaatgag

SEQ ID NO: 2494105 - DNA, 25 bp, Homo sapien
tagccttattccattcagtgtagtg

SEQ ID NO: 2494106 - DNA, 25 bp, Homo sapien
gaaaactggcgttcttatcagacac

SEQ ID NO: 2494107 - DNA, 25 bp, Homo sapien
cagactgccatccttatatatcgag

SEQ ID NO: 2494108 - DNA, 25 bp, Homo sapien
caagcgtgcctgacatggcatctgc

SEQ ID NO: 2494109 - DNA, 25 bp, Homo sapien
ttatttagtctcctatgcaggagca

SEQ ID NO: 2494110 - DNA, 25 bp, Homo sapien
taaacatccctcagcgtctctcttg

SEQ ID NO: 2494111 - DNA, 25 bp, Homo sapien
ctgtgtggaggaaattgtttctgat

SEQ ID NO: 2494112 - DNA, 25 bp, Homo sapien
tgtgtggaggaaattgtttctgatt

SEQ ID NO: 2494113 - DNA, 25 bp, Homo sapien
actggggtatattggaggatgccca

SEQ ID NO: 2494114 - DNA, 25 bp, Homo sapien
gtgactcagtaagttgctctattct

SEQ ID NO: 2494115 - DNA, 25 bp, Homo sapien
cagctctttttgtatagggagcttc

SEQ ID NO: 2494116 - DNA, 25 bp, Homo sapien
tttgcaaatctgagtgactcagtaa

SEQ ID NO: 2494117 - DNA, 25 bp, Homo sapien
agaataaagcaacagggaaggccgt

SEQ ID NO: 2494118 - DNA, 25 bp, Homo sapien
gagaataaagcaacagggaaggccg

SEQ ID NO: 2494119 - DNA, 25 bp, Homo sapien
aagcaacagggaaggccgtttacat

SEQ ID NO: 2494120 - DNA, 25 bp, Homo sapien
aacagggaaggccgtttacatgatt

SEQ ID NO: 2494121 - DNA, 25 bp, Homo sapien
caggagagacttctgtaattccaaa

SEQ ID NO: 2494122 - DNA, 25 bp, Homo sapien
ccaaactgggataaactttgatgca

SEQ ID NO: 2494123 - DNA, 25 bp, Homo sapien
tattaagtgaacgaagaacttcctc

SEQ ID NO: 2494124 - DNA, 25 bp, Homo sapien
tgtttttcggtttatgggagacaca

SEQ ID NO: 2494125 - DNA, 25 bp, Homo sapien
taagagtcctaaagctgcagccact

SEQ ID NO: 2494126 - DNA, 25 bp, Homo sapien
cactccttggcggaagatccgaagc

SEQ ID NO: 2494127 - DNA, 25 bp, Homo sapien
aatgaggcgattgatgtgcacttgc

SEQ ID NO: 2494128 - DNA, 25 bp, Homo sapien
gatccgaagcaaggttatgttcagc

SEQ ID NO: 2494129 - DNA, 25 bp, Homo sapien
ctttgcaagtggtaaagtaagccca

SEQ ID NO: 2494130 - DNA, 25 bp, Homo sapien
tgttctttgcaagtggtaaagtaag

SEQ ID NO: 2494131 - DNA, 25 bp, Homo sapien
aagaccatataatctggtctgttct

SEQ ID NO: 2494132 - DNA, 25 bp, Homo sapien
agtggtaaagtaagcccaaaggcat

SEQ ID NO: 2494133 - DNA, 25 bp, Homo sapien
catgttgtgatgaagtcgacttcca

SEQ ID NO: 2494134 - DNA, 25 bp, Homo sapien
ctgtttggaaattgactgcatgttg

SEQ ID NO: 2494135 - DNA, 25 bp, Homo sapien
gactgcatgttgtgatgaagtcgac

SEQ ID NO: 2494136 - DNA, 25 bp, Homo sapien
tgaagtcgacttccatttgcactct

SEQ ID NO: 2494137 - DNA, 25 bp, Homo sapien
tagcaagcaggactaatcgtaaagc

SEQ ID NO: 2494138 - DNA, 25 bp, Homo sapien
ttccttaccatagcaagcaggacta

SEQ ID NO: 2494139 - DNA, 25 bp, Homo sapien
ttaccatagcaagcaggactaatcg

SEQ ID NO: 2494140 - DNA, 25 bp, Homo sapien
ggactaatcgtaaagctttctaagc

SEQ ID NO: 2494141 - DNA, 25 bp, Homo sapien
gcttgctgtttcaacagtttactag

SEQ ID NO: 2494142 - DNA, 25 bp, Homo sapien
taaccgcctggtactgtttctagag

SEQ ID NO: 2494143 - DNA, 25 bp, Homo sapien
gagacactgcggatcccaggtctac

SEQ ID NO: 2494144 - DNA, 25 bp, Homo sapien
tgctttcccaagagatatcccaggt

SEQ ID NO: 2494145 - DNA, 25 bp, Homo sapien
ccaaatgtactgttacactttttgc

SEQ ID NO: 2494146 - DNA, 25 bp, Homo sapien
caaatgtactgttacactttttgca

SEQ ID NO: 2494147 - DNA, 25 bp, Homo sapien
tgtactgttacactttttgcaaaca

SEQ ID NO: 2494148 - DNA, 25 bp, Homo sapien
aatgtactgttacactttttgcaaa

SEQ ID NO: 2494149 - DNA, 25 bp, Homo sapien
cagaaaggctagtgcagctggagct

SEQ ID NO: 2494150 - DNA, 25 bp, Homo sapien
gcccggctgcgatcactcttttatt

SEQ ID NO: 2494151 - DNA, 25 bp, Homo sapien
tttggcgtgcttaagaactagcaga

SEQ ID NO: 2494152 - DNA, 25 bp, Homo sapien
tcttttattgccttgacctcaggca

SEQ ID NO: 2494153 - DNA, 25 bp, Homo sapien
tgatcaaagaaaggatggcaggctc

SEQ ID NO: 2494154 - DNA, 25 bp, Homo sapien
ggttctacaagattacccagcagtt

SEQ ID NO: 2494155 - DNA, 25 bp, Homo sapien
tgtcaagtgacatggaagcatccag

SEQ ID NO: 2494156 - DNA, 25 bp, Homo sapien
tgaaacacattgacccacagtacgg

SEQ ID NO: 2494157 - DNA, 25 bp, Homo sapien
aacctgatgaaagactcctggtgga

SEQ ID NO: 2494158 - DNA, 25 bp, Homo sapien
actcctggtggatctaagtgtgaca

SEQ ID NO: 2494159 - DNA, 25 bp, Homo sapien
cttgtatgtggcaacctgatgaaag

SEQ ID NO: 2494160 - DNA, 25 bp, Homo sapien
ctaagtgtgacatctgtaatagtcc

SEQ ID NO: 2494161 - DNA, 25 bp, Homo sapien
ctgaaaaggccccagatgacatgta

SEQ ID NO: 2494162 - DNA, 25 bp, Homo sapien
acttcaagtttttctgggctgctca

SEQ ID NO: 2494163 - DNA, 25 bp, Homo sapien
gaacttcaagtttttctgggctgct

SEQ ID NO: 2494164 - DNA, 25 bp, Homo sapien
ccccagatgacatgtattgaataca

SEQ ID NO: 2494165 - DNA, 25 bp, Homo sapien
tatctcggagataaaacagccctgc

SEQ ID NO: 2494166 - DNA, 25 bp, Homo sapien
gataaaacagccctgcaaccaagtt

SEQ ID NO: 2494167 - DNA, 25 bp, Homo sapien
ctgtcagtaactaagtcttgagttg

SEQ ID NO: 2494168 - DNA, 25 bp, Homo sapien
ggtccaggagaatttcctgcactaa

SEQ ID NO: 2494169 - DNA, 25 bp, Homo sapien
ctgtgaatcagcaagaaagtaaaat

SEQ ID NO: 2494170 - DNA, 25 bp, Homo sapien
agaaagtaaaatacagcttctcggt

SEQ ID NO: 2494171 - DNA, 25 bp, Homo sapien
gtgaatcagcaagaaagtaaaatac

SEQ ID NO: 2494172 - DNA, 25 bp, Homo sapien
aagtaaaatacagcttctcggtatg

SEQ ID NO: 2494173 - DNA, 25 bp, Homo sapien
tcgattgcaaattaaacaggctaca

SEQ ID NO: 2494174 - DNA, 25 bp, Homo sapien
taagactgtatgattctgcgccgag

SEQ ID NO: 2494175 - DNA, 25 bp, Homo sapien
aatgaagttcagagcttgccgaggc

SEQ ID NO: 2494176 - DNA, 25 bp, Homo sapien
tcttatcccagaaatgtcgattgca

SEQ ID NO: 2494177 - DNA, 25 bp, Homo sapien
tccatgtagtgttttacagagatct

SEQ ID NO: 2494178 - DNA, 25 bp, Homo sapien
gatttatcaaccagcaacattctga

SEQ ID NO: 2494179 - DNA, 25 bp, Homo sapien
tgtgaaaatcccacaataaggtttg

SEQ ID NO: 2494180 - DNA, 25 bp, Homo sapien
catgtagtgttttacagagatctga

SEQ ID NO: 2494181 - DNA, 25 bp, Homo sapien
tttattctgtcatcctgtgtctgga

SEQ ID NO: 2494182 - DNA, 25 bp, Homo sapien
actgaatcccctacatcaacatctt

SEQ ID NO: 2494183 - DNA, 25 bp, Homo sapien
ccaaactccaagaagcaaattgaaa

SEQ ID NO: 2494184 - DNA, 25 bp, Homo sapien
tattctgtcatcctgtgtctggacc

SEQ ID NO: 2494185 - DNA, 25 bp, Homo sapien
cagcatcgtccttgctgctttaata

SEQ ID NO: 2494186 - DNA, 25 bp, Homo sapien
agcatcgtccttgctgctttaatag

SEQ ID NO: 2494187 - DNA, 25 bp, Homo sapien
agagtgcattccagcatcgtccttg

SEQ ID NO: 2494188 - DNA, 25 bp, Homo sapien
gcttataaatgaataccggcttccc

SEQ ID NO: 2494189 - DNA, 25 bp, Homo sapien
tccatggccagcagattgagagacg

SEQ ID NO: 2494190 - DNA, 25 bp, Homo sapien
catatgcgggtctaggaaatgctga

SEQ ID NO: 2494191 - DNA, 25 bp, Homo sapien
gaattgacaatctggtggcgtttgc

SEQ ID NO: 2494192 - DNA, 25 bp, Homo sapien
aggcagccttccacatggacctaca

SEQ ID NO: 2494193 - DNA, 25 bp, Homo sapien
cattatgttcttcccatacccatgc

SEQ ID NO: 2494194 - DNA, 25 bp, Homo sapien
tccacatggacctacagcccaatgg

SEQ ID NO: 2494195 - DNA, 25 bp, Homo sapien
atacccatgcccctccttctatccc

SEQ ID NO: 2494196 - DNA, 25 bp, Homo sapien
gagggtggtacttctgcaaatcatc

SEQ ID NO: 2494197 - DNA, 25 bp, Homo sapien
tgagggtggtacttctgcaaatcac

SEQ ID NO: 2494198 - DNA, 25 bp, Homo sapien
gagagagactctagaccattgtaag

SEQ ID NO: 2494199 - DNA, 25 bp, Homo sapien
ttcaggagatacattgaaggcagtc

SEQ ID NO: 2494200 - DNA, 25 bp, Homo sapien
caggcacagcgcagggaagcagact

SEQ ID NO: 2494201 - DNA, 25 bp, Homo sapien
cagggaagcagactgctctccgcat

SEQ ID NO: 2494202 - DNA, 25 bp, Homo sapien
cagcgtgaagattaaggagcaggca

SEQ ID NO: 2494203 - DNA, 25 bp, Homo sapien
gcgtgaagattaaggagcaggcaca

SEQ ID NO: 2494204 - DNA, 25 bp, Homo sapien
aagtgctattagaaagagccaccgc

SEQ ID NO: 2494205 - DNA, 25 bp, Homo sapien
gagccaccgccaagggtcttctagt

SEQ ID NO: 2494206 - DNA, 25 bp, Homo sapien
gggtcttctagtctccgggattcag

SEQ ID NO: 2494207 - DNA, 25 bp, Homo sapien
cacgaccccacttcaggtaaagtgc

SEQ ID NO: 2494208 - DNA, 25 bp, Homo sapien
agcagcgccgcggctactgagcatg

SEQ ID NO: 2494209 - DNA, 25 bp, Homo sapien
caaagtgaaattccgcttctccggg

SEQ ID NO: 2494210 - DNA, 25 bp, Homo sapien
gccctcacgaggcaagggaatttca

SEQ ID NO: 2494211 - DNA, 25 bp, Homo sapien
ttctccgggtcttagcggcggcttg

SEQ ID NO: 2494212 - DNA, 25 bp, Homo sapien
tggagaggctaagttgttttatatc

SEQ ID NO: 2494213 - DNA, 25 bp, Homo sapien
actctggttgattctaggtttatcc

SEQ ID NO: 2494214 - DNA, 25 bp, Homo sapien
atcctagctttagcctcttctttgg

SEQ ID NO: 2494215 - DNA, 25 bp, Homo sapien
actctgagaactctggttgattcta

SEQ ID NO: 2494216 - DNA, 25 bp, Homo sapien
ccttcatgggtcttcgatgtgtcca

SEQ ID NO: 2494217 - DNA, 25 bp, Homo sapien
ttaacacatcatcagtgctgtccat

SEQ ID NO: 2494218 - DNA, 25 bp, Homo sapien
gctccagaggttagaaactcacaaa

SEQ ID NO: 2494219 - DNA, 25 bp, Homo sapien
cttccacgaaggctccagaggttag

SEQ ID NO: 2494220 - DNA, 25 bp, Homo sapien
gacctgatcctcatttgacctgtct

SEQ ID NO: 2494221 - DNA, 25 bp, Homo sapien
gtctccttagttccagagattccca

SEQ ID NO: 2494222 - DNA, 25 bp, Homo sapien
tatggaccacattcaaagtgtacgc

SEQ ID NO: 2494223 - DNA, 25 bp, Homo sapien
aagtgtacgctcttccctctctgct

SEQ ID NO: 2494224 - DNA, 25 bp, Homo sapien
gtccattggggccactaggacagga

SEQ ID NO: 2494225 - DNA, 25 bp, Homo sapien
tgtccattggggccactaggacagg

SEQ ID NO: 2494226 - DNA, 25 bp, Homo sapien
cttgtccattggggccactaggaca

SEQ ID NO: 2494227 - DNA, 25 bp, Homo sapien
ttgtccattggggccactaggacag

SEQ ID NO: 2494228 - DNA, 25 bp, Homo sapien
tcatctcaggcgacctcttactata

SEQ ID NO: 2494229 - DNA, 25 bp, Homo sapien
tatactcgcagagctctataaacat

SEQ ID NO: 2494230 - DNA, 25 bp, Homo sapien
gtctcctcatctcaggcgacctctt

SEQ ID NO: 2494231 - DNA, 25 bp, Homo sapien
ggcgacctcttactatactcgcaga

SEQ ID NO: 2494232 - DNA, 25 bp, Homo sapien
ccaggttgaatttgaggactacaca

SEQ ID NO: 2494233 - DNA, 25 bp, Homo sapien
tacacaggttgaaagtagtggcact

SEQ ID NO: 2494234 - DNA, 25 bp, Homo sapien
ccaactaatcaggacggaagctggc

SEQ ID NO: 2494235 - DNA, 25 bp, Homo sapien
taaaaagcctaggaagtcctgtgag

SEQ ID NO: 2494236 - DNA, 25 bp, Homo sapien
tttgcttaaacagctgcccgcagaa

SEQ ID NO: 2494237 - DNA, 25 bp, Homo sapien
gcccgcagaattgatgagtgtaaga

SEQ ID NO: 2494238 - DNA, 25 bp, Homo sapien
taagactaggatatgaacatttccc

SEQ ID NO: 2494239 - DNA, 25 bp, Homo sapien
ccttgaacggatttccacagtagta

SEQ ID NO: 2494240 - DNA, 25 bp, Homo sapien
tgactgatatgatcctggcattctc

SEQ ID NO: 2494241 - DNA, 25 bp, Homo sapien
tctgatgactgatatgatcctggca

SEQ ID NO: 2494242 - DNA, 25 bp, Homo sapien
cccacaaggctcctttctgatgact

SEQ ID NO: 2494243 - DNA, 25 bp, Homo sapien
tttctgatgactgatatgatcctgg

SEQ ID NO: 2494244 - DNA, 25 bp, Homo sapien
tggcttcccgactgtcagaagtagc

SEQ ID NO: 2494245 - DNA, 25 bp, Homo sapien
ctgctgtgtatcagtggcttcccga

SEQ ID NO: 2494246 - DNA, 25 bp, Homo sapien
gtatcagtggcttcccgactgtcag

SEQ ID NO: 2494247 - DNA, 25 bp, Homo sapien
cgactgtcagaagtagcaaatggtt

SEQ ID NO: 2494248 - DNA, 25 bp, Homo sapien
tctcttccctctaccgagtctggag

SEQ ID NO: 2494249 - DNA, 25 bp, Homo sapien
gaagtcaagcagtctctccaaagtc

SEQ ID NO: 2494250 - DNA, 25 bp, Homo sapien
caatggaaatggctctagtggagag

SEQ ID NO: 2494251 - DNA, 25 bp, Homo sapien
aagtcacctctgtccagtcaagctg

SEQ ID NO: 2494252 - DNA, 25 bp, Homo sapien
catgtacgcaacatgttgggcttta

SEQ ID NO: 2494253 - DNA, 25 bp, Homo sapien
caaacatgtacgcaacatgttgggc

SEQ ID NO: 2494254 - DNA, 25 bp, Homo sapien
tgttgggctttagcattgtccttca

SEQ ID NO: 2494255 - DNA, 25 bp, Homo sapien
cttcaaacatgtacgcaacatgttg

SEQ ID NO: 2494256 - DNA, 25 bp, Homo sapien
cacatggcctttcctaagtgagttc

SEQ ID NO: 2494257 - DNA, 25 bp, Homo sapien
aatcagagccccatccttattactt

SEQ ID NO: 2494258 - DNA, 25 bp, Homo sapien
ccaaggctacagtcaattgagtttc

SEQ ID NO: 2494259 - DNA, 25 bp, Homo sapien
gctagacgtctataaccaaggctac

SEQ ID NO: 2494260 - DNA, 25 bp, Homo sapien
cttcccataggcaaagaagagcata

SEQ ID NO: 2494261 - DNA, 25 bp, Homo sapien
cataggcaaagaagagcatatcctg

SEQ ID NO: 2494262 - DNA, 25 bp, Homo sapien
tagggcatagaatgcagcccacaat

SEQ ID NO: 2494263 - DNA, 25 bp, Homo sapien
gaatgtgtagggcatagaatgcagc

SEQ ID NO: 2494264 - DNA, 25 bp, Homo sapien
actgaagaaggctgccacgtcaagt

SEQ ID NO: 2494265 - DNA, 25 bp, Homo sapien
actgtagtgtatgaaacaaattcaa

SEQ ID NO: 2494266 - DNA, 25 bp, Homo sapien
cagcaaaactgtagtgtatgaaaca

SEQ ID NO: 2494267 - DNA, 25 bp, Homo sapien
aattcaaatgctccttccttttcca

SEQ ID NO: 2494268 - DNA, 25 bp, Homo sapien
ttttaatcagcaaaactgtagtgta

SEQ ID NO: 2494269 - DNA, 25 bp, Homo sapien
ctttcaccaacccacttagtgacca

SEQ ID NO: 2494270 - DNA, 25 bp, Homo sapien
tttgtcttagaccaacaaagtgatg

SEQ ID NO: 2494271 - DNA, 25 bp, Homo sapien
caaagtgatgtgcatgttgttttac

SEQ ID NO: 2494272 - DNA, 25 bp, Homo sapien
tcctctgggccgcatttggatgaat

SEQ ID NO: 2494273 - DNA, 25 bp, Homo sapien
gttcagtacatgtttctcagcttga

SEQ ID NO: 2494274 - DNA, 25 bp, Homo sapien
cagagttcagtacatgtttctcagc

SEQ ID NO: 2494275 - DNA, 25 bp, Homo sapien
ttcagagttcagtacatgtttctca

SEQ ID NO: 2494276 - DNA, 25 bp, Homo sapien
gagttcagtacatgtttctcagctt

SEQ ID NO: 2494277 - DNA, 25 bp, Homo sapien
aattcagctgaatactggtagactg

SEQ ID NO: 2494278 - DNA, 25 bp, Homo sapien
gaatactggtagactgtatagcctc

SEQ ID NO: 2494279 - DNA, 25 bp, Homo sapien
cagctgaatactggtagactgtata

SEQ ID NO: 2494280 - DNA, 25 bp, Homo sapien
ctaattcagctgaatactggtagac

SEQ ID NO: 2494281 - DNA, 25 bp, Homo sapien
agtttgatggcttagatttaagcct

SEQ ID NO: 2494282 - DNA, 25 bp, Homo sapien
taatctcttctcagatgggtagtct

SEQ ID NO: 2494283 - DNA, 25 bp, Homo sapien
ctcttctcagatgggtagtctgaaa

SEQ ID NO: 2494284 - DNA, 25 bp, Homo sapien
gtctattttctgatctgattattag

SEQ ID NO: 2494285 - DNA, 25 bp, Homo sapien
ggcaagactgctgagtcctacatac

SEQ ID NO: 2494286 - DNA, 25 bp, Homo sapien
tggaagacagaacaatattagttgc

SEQ ID NO: 2494287 - DNA, 25 bp, Homo sapien
caatccttccacattcgacaatgga

SEQ ID NO: 2494288 - DNA, 25 bp, Homo sapien
gcaaagattcaagtctaggaaaaag

SEQ ID NO: 2494289 - DNA, 25 bp, Homo sapien
gaagatgaagttgttgatgggccta

SEQ ID NO: 2494290 - DNA, 25 bp, Homo sapien
tgaagttgttgatgggcctaaactt

SEQ ID NO: 2494291 - DNA, 25 bp, Homo sapien
gatgaagttgttgatgggcctaaac

SEQ ID NO: 2494292 - DNA, 25 bp, Homo sapien
tcaaaaactcagagctttgaagatg

SEQ ID NO: 2494293 - DNA, 25 bp, Homo sapien
ttcagatgcttctctcttccgtgtg

SEQ ID NO: 2494294 - DNA, 25 bp, Homo sapien
gggtctggagttcttatcggcacag

SEQ ID NO: 2494295 - DNA, 25 bp, Homo sapien
gaatgtgcaggcagtcttcccctgg

SEQ ID NO: 2494296 - DNA, 25 bp, Homo sapien
tggagttcttatcggcacaggatgg

SEQ ID NO: 2494297 - DNA, 25 bp, Homo sapien
gcaagaagtagttcaactgcaagcc

SEQ ID NO: 2494298 - DNA, 25 bp, Homo sapien
aggaactgaataggccagcaccccg

SEQ ID NO: 2494299 - DNA, 25 bp, Homo sapien
gcaccccgatccttgacttctcaga

SEQ ID NO: 2494300 - DNA, 25 bp, Homo sapien
gaagacagcccttaccaggaactga

SEQ ID NO: 2494301 - DNA, 25 bp, Homo sapien
ttctgcatttccatctgaggtaccg

SEQ ID NO: 2494302 - DNA, 25 bp, Homo sapien
gaggagccaagatgtccgaatagga

SEQ ID NO: 2494303 - DNA, 25 bp, Homo sapien
gtgagcgacacagaagacgggtgat

SEQ ID NO: 2494304 - DNA, 25 bp, Homo sapien
acagctccggtctacagctcccagc

SEQ ID NO: 2494305 - DNA, 25 bp, Homo sapien
tcaaagaaaggggtgacggacgcac

SEQ ID NO: 2494306 - DNA, 25 bp, Homo sapien
attgcctcacttgggaagcacaagg

SEQ ID NO: 2494307 - DNA, 25 bp, Homo sapien
ggtgcgcgcaccgtgcgcgagccga

SEQ ID NO: 2494308 - DNA, 25 bp, Homo sapien
aggtcagtgggtgcgcgcaccgtgc

SEQ ID NO: 2494309 - DNA, 25 bp, Homo sapien
taccctcacggagtctcgatgattg

SEQ ID NO: 2494310 - DNA, 25 bp, Homo sapien
cctaccctcacggagtctcgatgat

SEQ ID NO: 2494311 - DNA, 25 bp, Homo sapien
accctcacggagtctcgatgattgc

SEQ ID NO: 2494312 - DNA, 25 bp, Homo sapien
ctgggagggtcctaccctcacggag

SEQ ID NO: 2494313 - DNA, 25 bp, Homo sapien
tgggtggctccagaagaacatttta

SEQ ID NO: 2494314 - DNA, 25 bp, Homo sapien
gattcagtcttatcaccaatggttg

SEQ ID NO: 2494315 - DNA, 25 bp, Homo sapien
gagtgtcgtttctgaaaagccccag

SEQ ID NO: 2494316 - DNA, 25 bp, Homo sapien
tatggccctgtcaccttagagatga

SEQ ID NO: 2494317 - DNA, 25 bp, Homo sapien
ctgctcctgacttatatagcactta

SEQ ID NO: 2494318 - DNA, 25 bp, Homo sapien
gtctagctagccgagacattttaaa

SEQ ID NO: 2494319 - DNA, 25 bp, Homo sapien
tatgtctagaagatatctgtggtct

SEQ ID NO: 2494320 - DNA, 25 bp, Homo sapien
tatcattttcccttatatccctcaa

SEQ ID NO: 2494321 - DNA, 25 bp, Homo sapien
gactgacgataggttgatgcatcca

SEQ ID NO: 2494322 - DNA, 25 bp, Homo sapien
ctgacgataggttgatgcatccaca

SEQ ID NO: 2494323 - DNA, 25 bp, Homo sapien
ggtttgactgacgataggttgatgc

SEQ ID NO: 2494324 - DNA, 25 bp, Homo sapien
tttgactgacgataggttgatgcat

SEQ ID NO: 2494325 - DNA, 25 bp, Homo sapien
gatctggcaatacaggaccatagaa

SEQ ID NO: 2494326 - DNA, 25 bp, Homo sapien
tcatttgttcccgatctggcaatac

SEQ ID NO: 2494327 - DNA, 25 bp, Homo sapien
tgttcccgatctggcaatacaggac

SEQ ID NO: 2494328 - DNA, 25 bp, Homo sapien
ggcaatacaggaccatagaaaacac

SEQ ID NO: 2494329 - DNA, 25 bp, Homo sapien
aaataacaggattaacatggaattt

SEQ ID NO: 2494330 - DNA, 25 bp, Homo sapien
ttgtatattgacagttccaatctta

SEQ ID NO: 2494331 - DNA, 25 bp, Homo sapien
ccaaatgatattccaataactataa

SEQ ID NO: 2494332 - DNA, 25 bp, Homo sapien
caataactataatcaaattttttgc

SEQ ID NO: 2494333 - DNA, 25 bp, Homo sapien
ctcaataactgccagtccaaatgat

SEQ ID NO: 2494334 - DNA, 25 bp, Homo sapien
agtccaaatgatattccaataacta

SEQ ID NO: 2494335 - DNA, 25 bp, Homo sapien
gcttcacctttgctccaaaaggttg

SEQ ID NO: 2494336 - DNA, 25 bp, Homo sapien
ttgcttgactgcctaattgttgaat

SEQ ID NO: 2494337 - DNA, 25 bp, Homo sapien
tccctgcttcacctttgctccaaaa

SEQ ID NO: 2494338 - DNA, 25 bp, Homo sapien
ttttgcttgactgcctaattgttga

SEQ ID NO: 2494339 - DNA, 25 bp, Homo sapien
ttccattatagctttggcatggtct

SEQ ID NO: 2494340 - DNA, 25 bp, Homo sapien
ttgttttccattatagctttggcat

SEQ ID NO: 2494341 - DNA, 25 bp, Homo sapien
gttttccattatagctttggcatgg

SEQ ID NO: 2494342 - DNA, 25 bp, Homo sapien
cattatagctttggcatggtctctg

SEQ ID NO: 2494343 - DNA, 25 bp, Homo sapien
cacataattcaggatagtgttgaaa

SEQ ID NO: 2494344 - DNA, 25 bp, Homo sapien
agctccattgaccaaaccgcagcat

SEQ ID NO: 2494345 - DNA, 25 bp, Homo sapien
ccattgaccaaaccgcagcatttaa

SEQ ID NO: 2494346 - DNA, 25 bp, Homo sapien
ctagacaggcacataattcaggata

SEQ ID NO: 2494347 - DNA, 25 bp, Homo sapien
catagagagtttcattcacaatgcg

SEQ ID NO: 2494348 - DNA, 25 bp, Homo sapien
tgaaacacaattatggcttcctgga

SEQ ID NO: 2494349 - DNA, 25 bp, Homo sapien
cccctgtggcgctcaaaagctttgt

SEQ ID NO: 2494350 - DNA, 25 bp, Homo sapien
tcactttcccctgtggcgctcaaaa

SEQ ID NO: 2494351 - DNA, 25 bp, Homo sapien
taggatacctgtcgccacctgcagg

SEQ ID NO: 2494352 - DNA, 25 bp, Homo sapien
cttagatttgaaaacagctcctagg

SEQ ID NO: 2494353 - DNA, 25 bp, Homo sapien
acagctcctaggatacctgtcgcca

SEQ ID NO: 2494354 - DNA, 25 bp, Homo sapien
ttagatttgaaaacagctcctagga

SEQ ID NO: 2494355 - DNA, 25 bp, Homo sapien
cagttttgccggtctcctgccatac

SEQ ID NO: 2494356 - DNA, 25 bp, Homo sapien
tctcctgccatacccaaggcttctc

SEQ ID NO: 2494357 - DNA, 25 bp, Homo sapien
ggaaacagttttgccggtctcctgc

SEQ ID NO: 2494358 - DNA, 25 bp, Homo sapien
aaacagttttgccggtctcctgcca

SEQ ID NO: 2494359 - DNA, 25 bp, Homo sapien
gatggcacctacagcaatcaatatg

SEQ ID NO: 2494360 - DNA, 25 bp, Homo sapien
gaagcatgcagcgactttcttttat

SEQ ID NO: 2494361 - DNA, 25 bp, Homo sapien
tccacagcaacgtaggagctagagc

SEQ ID NO: 2494362 - DNA, 25 bp, Homo sapien
tcttttatagcaccgcagcatccca

SEQ ID NO: 2494363 - DNA, 25 bp, Homo sapien
tgcttgagagtcattgcttactcgt

SEQ ID NO: 2494364 - DNA, 25 bp, Homo sapien
atgctaggatcaagataccacatag

SEQ ID NO: 2494365 - DNA, 25 bp, Homo sapien
ttactcgtacccatattgctaatgc

SEQ ID NO: 2494366 - DNA, 25 bp, Homo sapien
catattgctaatgctaggatcaaga

SEQ ID NO: 2494367 - DNA, 25 bp, Homo sapien
agaatacaattaggatcatatgaaa

SEQ ID NO: 2494368 - DNA, 25 bp, Homo sapien
gaatacaattaggatcatatgaaac

SEQ ID NO: 2494369 - DNA, 25 bp, Homo sapien
aagaatacaattaggatcatatgaa

SEQ ID NO: 2494370 - DNA, 25 bp, Homo sapien
tcctatctatccggtgacagtagtt

SEQ ID NO: 2494371 - DNA, 25 bp, Homo sapien
ctatctatccggtgacagtagttca

SEQ ID NO: 2494372 - DNA, 25 bp, Homo sapien
cctcctatctatccggtgacagtag

SEQ ID NO: 2494373 - DNA, 25 bp, Homo sapien
tatctatccggtgacagtagttcat

SEQ ID NO: 2494374 - DNA, 25 bp, Homo sapien
tgctgctgctactgttattgttcat

SEQ ID NO: 2494375 - DNA, 25 bp, Homo sapien
taggactgtactgctgctgctactg

SEQ ID NO: 2494376 - DNA, 25 bp, Homo sapien
actgctgctgctactgttattgttc

SEQ ID NO: 2494377 - DNA, 25 bp, Homo sapien
gtactgctgctgctactgttattgt

SEQ ID NO: 2494378 - DNA, 25 bp, Homo sapien
tatcagtttgggattctatgtcact

SEQ ID NO: 2494379 - DNA, 25 bp, Homo sapien
gagtacagcttattttgggtttcca

SEQ ID NO: 2494380 - DNA, 25 bp, Homo sapien
acttgccatctgcatacaggtatgt

SEQ ID NO: 2494381 - DNA, 25 bp, Homo sapien
tctctacagtgaagtttaattctgc

SEQ ID NO: 2494382 - DNA, 25 bp, Homo sapien
tgtctatgtcaatggactttcaaga

SEQ ID NO: 2494383 - DNA, 25 bp, Homo sapien
ataacaaattgctaaaatacaaatc

SEQ ID NO: 2494384 - DNA, 25 bp, Homo sapien
caatttgttggttatgtctatgtca

SEQ ID NO: 2494385 - DNA, 25 bp, Homo sapien
caatggactttcaagagaaacataa

SEQ ID NO: 2494386 - DNA, 25 bp, Homo sapien
cacattctgaagtgcacttttttga

SEQ ID NO: 2494387 - DNA, 25 bp, Homo sapien
catgtttttaccacagagtccttaa

SEQ ID NO: 2494388 - DNA, 25 bp, Homo sapien
aattagggaggcctgcttgatatac

SEQ ID NO: 2494389 - DNA, 25 bp, Homo sapien
gatatacaactaaggaaaattgtcc

SEQ ID NO: 2494390 - DNA, 25 bp, Homo sapien
gaagttgaaggtaaacatagaatat

SEQ ID NO: 2494391 - DNA, 25 bp, Homo sapien
catagaatattttatacaggcactc

SEQ ID NO: 2494392 - DNA, 25 bp, Homo sapien
atattttatacaggcactcacacct

SEQ ID NO: 2494393 - DNA, 25 bp, Homo sapien
agaatattttatacaggcactcaca

SEQ ID NO: 2494394 - DNA, 25 bp, Homo sapien
aatttaactattcgttacaggcttg

SEQ ID NO: 2494395 - DNA, 25 bp, Homo sapien
aactattcgttacaggcttgtcctg

SEQ ID NO: 2494396 - DNA, 25 bp, Homo sapien
taggaatccagatgccgtgaattta

SEQ ID NO: 2494397 - DNA, 25 bp, Homo sapien
tccagatgccgtgaatttaactatt

SEQ ID NO: 2494398 - DNA, 25 bp, Homo sapien
aagcaaagaagtagagggaggaata

SEQ ID NO: 2494399 - DNA, 25 bp, Homo sapien
gcaaagaagtagagggaggaataaa

SEQ ID NO: 2494400 - DNA, 25 bp, Homo sapien
gaaagcaaagaagtagagggaggaa

SEQ ID NO: 2494401 - DNA, 25 bp, Homo sapien
gagaaagcaaagaagtagagggagg

SEQ ID NO: 2494402 - DNA, 25 bp, Homo sapien
atttaaatatcgcaaaggctattaa

SEQ ID NO: 2494403 - DNA, 25 bp, Homo sapien
aggctatctccaggcaagtatgttc

SEQ ID NO: 2494404 - DNA, 25 bp, Homo sapien
tatgttcctttgcttgtcatagctc

SEQ ID NO: 2494405 - DNA, 25 bp, Homo sapien
cctcctctaaagtaaacagatatca

SEQ ID NO: 2494406 - DNA, 25 bp, Homo sapien
tttaaatatcgcaaaggctatctcc

SEQ ID NO: 2494407 - DNA, 25 bp, Homo sapien
gatatgatacgctgacaagtctaga

SEQ ID NO: 2494408 - DNA, 25 bp, Homo sapien
gctgtgatacaccaccaaattcgtt

SEQ ID NO: 2494409 - DNA, 25 bp, Homo sapien
aaaccttccagaggagttcagtggt

SEQ ID NO: 2494410 - DNA, 25 bp, Homo sapien
agttcagtggtcttagcatcctctc

SEQ ID NO: 2494411 - DNA, 25 bp, Homo sapien
aactaggagtcctgagagtatgaca

SEQ ID NO: 2494412 - DNA, 25 bp, Homo sapien
gcctacaccgtgagccagtcaaaaa

SEQ ID NO: 2494413 - DNA, 25 bp, Homo sapien
agtcattgttagcatacctctccca

SEQ ID NO: 2494414 - DNA, 25 bp, Homo sapien
gaaatcacacgtttgaaagaagcag

SEQ ID NO: 2494415 - DNA, 25 bp, Homo sapien
gagaacagctgtttgcatctggata

SEQ ID NO: 2494416 - DNA, 25 bp, Homo sapien
caattcctattgctgcaggtgtcca

SEQ ID NO: 2494417 - DNA, 25 bp, Homo sapien
cctgtgatagctacatgaggactct

SEQ ID NO: 2494418 - DNA, 25 bp, Homo sapien
cagaaccatgcagggctcgacttaa

SEQ ID NO: 2494419 - DNA, 25 bp, Homo sapien
tcaggtttaagaccatcagtaaaga

SEQ ID NO: 2494420 - DNA, 25 bp, Homo sapien
ctcaggtttaagaccatcagtaaag

SEQ ID NO: 2494421 - DNA, 25 bp, Homo sapien
tatgtacacggataaatcagatggt

SEQ ID NO: 2494422 - DNA, 25 bp, Homo sapien
ggtcttatctcccagcagttcatag

SEQ ID NO: 2494423 - DNA, 25 bp, Homo sapien
atggtcttatctcccagcagttcat

SEQ ID NO: 2494424 - DNA, 25 bp, Homo sapien
ctgctgtatgtacacggataaatca

SEQ ID NO: 2494425 - DNA, 25 bp, Homo sapien
tattccagttccgagattgcagaga

SEQ ID NO: 2494426 - DNA, 25 bp, Homo sapien
aaggcatgaggtctggagcaacaag

SEQ ID NO: 2494427 - DNA, 25 bp, Homo sapien
agatgtctgggtccagaaggcatga

SEQ ID NO: 2494428 - DNA, 25 bp, Homo sapien
ttgctagtaccttgacaagaagtgg

SEQ ID NO: 2494429 - DNA, 25 bp, Homo sapien
attgaattgccagcatggtacattt

SEQ ID NO: 2494430 - DNA, 25 bp, Homo sapien
ttattgaattgccagcatggtacat

SEQ ID NO: 2494431 - DNA, 25 bp, Homo sapien
tattgaattgccagcatggtacatt

SEQ ID NO: 2494432 - DNA, 25 bp, Homo sapien
tgcaggctggcccactccatgacct

SEQ ID NO: 2494433 - DNA, 25 bp, Homo sapien
tgacctccaccacgtggacaaaaac

SEQ ID NO: 2494434 - DNA, 25 bp, Homo sapien
ctccatgacctccaccacgtggaca

SEQ ID NO: 2494435 - DNA, 25 bp, Homo sapien
ctggtgcaggctggcccactccatg

SEQ ID NO: 2494436 - DNA, 25 bp, Homo sapien
taggggtgggcttcattaggcccca

SEQ ID NO: 2494437 - DNA, 25 bp, Homo sapien
gggtgggcttcattaggccccaggc

SEQ ID NO: 2494438 - DNA, 25 bp, Homo sapien
aggggtgggcttcattaggccccag

SEQ ID NO: 2494439 - DNA, 25 bp, Homo sapien
gtgggcttcattaggccccaggcac

SEQ ID NO: 2494440 - DNA, 25 bp, Homo sapien
ccaacttcagaagggcaaatacctc

SEQ ID NO: 2494441 - DNA, 25 bp, Homo sapien
ttccaacttcagaagggcaaatacc

SEQ ID NO: 2494442 - DNA, 25 bp, Homo sapien
tccaacttcagaagggcaaatacct

SEQ ID NO: 2494443 - DNA, 25 bp, Homo sapien
caactgaatcagtaccaggccaaat

SEQ ID NO: 2494444 - DNA, 25 bp, Homo sapien
tcagcccaactgaatcagtaccagg

SEQ ID NO: 2494445 - DNA, 25 bp, Homo sapien
gcccaactgaatcagtaccaggcca

SEQ ID NO: 2494446 - DNA, 25 bp, Homo sapien
ccaactgaatcagtaccaggccaaa

SEQ ID NO: 2494447 - DNA, 25 bp, Homo sapien
catttaccgctgaaattgttgaatt

SEQ ID NO: 2494448 - DNA, 25 bp, Homo sapien
ccaaacccagacatttaccgctgaa

SEQ ID NO: 2494449 - DNA, 25 bp, Homo sapien
cccagacatttaccgctgaaattgt

SEQ ID NO: 2494450 - DNA, 25 bp, Homo sapien
gacatttaccgctgaaattgttgaa

SEQ ID NO: 2494451 - DNA, 25 bp, Homo sapien
tggtaagttggaactcggaatatat

SEQ ID NO: 2494452 - DNA, 25 bp, Homo sapien
gcttatgacgcagactttcagcagt

SEQ ID NO: 2494453 - DNA, 25 bp, Homo sapien
gactttcagcagtagccagaggacc

SEQ ID NO: 2494454 - DNA, 25 bp, Homo sapien
agcagtagccagaggaccctctttt

SEQ ID NO: 2494455 - DNA, 25 bp, Homo sapien
ccccaaatggccacgaggagcttat

SEQ ID NO: 2494456 - DNA, 25 bp, Homo sapien
taatgaaaagatactggaagaacca

SEQ ID NO: 2494457 - DNA, 25 bp, Homo sapien
ttccagacatggcaacaattaacca

SEQ ID NO: 2494458 - DNA, 25 bp, Homo sapien
taatggattaacacaaccgctaaga

SEQ ID NO: 2494459 - DNA, 25 bp, Homo sapien
tgcagagggaaccaagaaaccaact

SEQ ID NO: 2494460 - DNA, 25 bp, Homo sapien
cctgccacactcatgactccgttca

SEQ ID NO: 2494461 - DNA, 25 bp, Homo sapien
taatgtaggatatcacctgccacac

SEQ ID NO: 2494462 - DNA, 25 bp, Homo sapien
attctgccccactgggttccataat

SEQ ID NO: 2494463 - DNA, 25 bp, Homo sapien
cccactgggttccataatgtaggat

SEQ ID NO: 2494464 - DNA, 25 bp, Homo sapien
gagactagcaacaacagcaaaggtg

SEQ ID NO: 2494465 - DNA, 25 bp, Homo sapien
gtcagccctctgctaaacgcatcat

SEQ ID NO: 2494466 - DNA, 25 bp, Homo sapien
gcaacatttgcacttttcgtcagcc

SEQ ID NO: 2494467 - DNA, 25 bp, Homo sapien
gtttcatccctatctttagcaacat

SEQ ID NO: 2494468 - DNA, 25 bp, Homo sapien
cccatcccacccatttccagcaatc

SEQ ID NO: 2494469 - DNA, 25 bp, Homo sapien
ccccatcccacccatttccagcaat

SEQ ID NO: 2494470 - DNA, 25 bp, Homo sapien
gactgtgcccagtaatggctgctca

SEQ ID NO: 2494471 - DNA, 25 bp, Homo sapien
gggactgtgcccagtaatggctgct

SEQ ID NO: 2494472 - DNA, 25 bp, Homo sapien
ctgcaaaggggactgtgcccagtaa

SEQ ID NO: 2494473 - DNA, 25 bp, Homo sapien
aaaggggactgtgcccagtaatggc

SEQ ID NO: 2494474 - DNA, 25 bp, Homo sapien
tgcataagcatacagagtgttaaaa

SEQ ID NO: 2494475 - DNA, 25 bp, Homo sapien
tattgcatctcagttcacaattgta

SEQ ID NO: 2494476 - DNA, 25 bp, Homo sapien
gcatacagagtgttaaaacggattt

SEQ ID NO: 2494477 - DNA, 25 bp, Homo sapien
acatacagcatggaagagtactcag

SEQ ID NO: 2494478 - DNA, 25 bp, Homo sapien
tgtcactcacataggtgggactgct

SEQ ID NO: 2494479 - DNA, 25 bp, Homo sapien
gagagcgctgggacacttaagatga

SEQ ID NO: 2494480 - DNA, 25 bp, Homo sapien
gattttagggcaaaagcgagccaga

SEQ ID NO: 2494481 - DNA, 25 bp, Homo sapien
cagtgcggcagacgtaaggatcaaa

SEQ ID NO: 2494482 - DNA, 25 bp, Homo sapien
tattctgtttaatcacttcaagtat

SEQ ID NO: 2494483 - DNA, 25 bp, Homo sapien
attctgtttaatcacttcaagtatc

SEQ ID NO: 2494484 - DNA, 25 bp, Homo sapien
catccattatttgaagcgggctcgg

SEQ ID NO: 2494485 - DNA, 25 bp, Homo sapien
tgtttaggtctctccgaagcaggtc

SEQ ID NO: 2494486 - DNA, 25 bp, Homo sapien
gaagcaggtccctctcgactcttag

SEQ ID NO: 2494487 - DNA, 25 bp, Homo sapien
ctgggtctccagcacgcatgaaggg

SEQ ID NO: 2494488 - DNA, 25 bp, Homo sapien
cgcgcggcgttgagcactgaatctt

SEQ ID NO: 2494489 - DNA, 25 bp, Homo sapien
gaggctcagtgggagcgccgagaac

SEQ ID NO: 2494490 - DNA, 25 bp, Homo sapien
gagaactcgccagtaccgcgcgctg

SEQ ID NO: 2494491 - DNA, 25 bp, Homo sapien
tgaatcttccaggcggaggctcagt

SEQ ID NO: 2494492 - DNA, 25 bp, Homo sapien
aaacgagcgtgcaagcagagatgct

SEQ ID NO: 2494493 - DNA, 25 bp, Homo sapien
tcactgggcgcgcaattcgggctgg

SEQ ID NO: 2494494 - DNA, 25 bp, Homo sapien
cgcaattcgggctggagcgctttaa

SEQ ID NO: 2494495 - DNA, 25 bp, Homo sapien
ggctggagcgctttaaaaaacgagc

SEQ ID NO: 2494496 - DNA, 25 bp, Homo sapien
caggccgcgagcagcagcaaggcgc

SEQ ID NO: 2494497 - DNA, 25 bp, Homo sapien
cgctcaggccgcgagcagcagcaag

SEQ ID NO: 2494498 - DNA, 25 bp, Homo sapien
ctcaggccgcgagcagcagcaaggc

SEQ ID NO: 2494499 - DNA, 25 bp, Homo sapien
ggccgcgagcagcagcaaggcgcac

SEQ ID NO: 2494500 - DNA, 25 bp, Homo sapien
ttgcagaagcccacggagcggcgcc

SEQ ID NO: 2494501 - DNA, 25 bp, Homo sapien
gtagcagtccggtgctgctctccgc

SEQ ID NO: 2494502 - DNA, 25 bp, Homo sapien
gaacgcggcgtctggcgctgcagac

SEQ ID NO: 2494503 - DNA, 25 bp, Homo sapien
tgcagacgcccgctgagttgcagaa

SEQ ID NO: 2494504 - DNA, 25 bp, Homo sapien
gtggactgctccgacctggggctct

SEQ ID NO: 2494505 - DNA, 25 bp, Homo sapien
acacactgtcattgcgagcccgacg

SEQ ID NO: 2494506 - DNA, 25 bp, Homo sapien
ttcacctcctacctgtaagtacttc

SEQ ID NO: 2494507 - DNA, 25 bp, Homo sapien
tcccggctcggtgtgctcctgtcct

SEQ ID NO: 2494508 - DNA, 25 bp, Homo sapien
agtgcaacccgggaaagcgctgctg

SEQ ID NO: 2494509 - DNA, 25 bp, Homo sapien
gcgctagaaacatcgcagggcgaat

SEQ ID NO: 2494510 - DNA, 25 bp, Homo sapien
cagagaaatggcttcgagtgcaacc

SEQ ID NO: 2494511 - DNA, 25 bp, Homo sapien
gtagcgtgccggcactttctggacc

SEQ ID NO: 2494512 - DNA, 25 bp, Homo sapien
agcggcaccgacacccaaagggaga

SEQ ID NO: 2494513 - DNA, 25 bp, Homo sapien
tgttgggctggtaaacagcggcacc

SEQ ID NO: 2494514 - DNA, 25 bp, Homo sapien
cctgaagctctctatcatccctggg

SEQ ID NO: 2494515 - DNA, 25 bp, Homo sapien
cccgcggccgctgtgtaatctttaa

SEQ ID NO: 2494516 - DNA, 25 bp, Homo sapien
gaaacaggtgctccttaccacaagg

SEQ ID NO: 2494517 - DNA, 25 bp, Homo sapien
caggcccgaaggtaacaggtagttg

SEQ ID NO: 2494518 - DNA, 25 bp, Homo sapien
ggaggaaccctattctcggagacca

SEQ ID NO: 2494519 - DNA, 25 bp, Homo sapien
aagcccatgcagtcccagttttcgg

SEQ ID NO: 2494520 - DNA, 25 bp, Homo sapien
agagagttgggatgtttgtgaacca

SEQ ID NO: 2494521 - DNA, 25 bp, Homo sapien
gagagagttgggatgtttgtgaacc

SEQ ID NO: 2494522 - DNA, 25 bp, Homo sapien
ggagagagttgggatgtttgtgaac

SEQ ID NO: 2494523 - DNA, 25 bp, Homo sapien
aggagagagttgggatgtttgtgaa

SEQ ID NO: 2494524 - DNA, 25 bp, Homo sapien
gcacaacattttccactaggtagtg

SEQ ID NO: 2494525 - DNA, 25 bp, Homo sapien
cattttccactaggtagtgattctt

SEQ ID NO: 2494526 - DNA, 25 bp, Homo sapien
agggaagaaacatgaagaggcttgc

SEQ ID NO: 2494527 - DNA, 25 bp, Homo sapien
acatgaagaggcttgcacaacattt

SEQ ID NO: 2494528 - DNA, 25 bp, Homo sapien
caccaggtttcccttcaattgcact

SEQ ID NO: 2494529 - DNA, 25 bp, Homo sapien
tatcgttccaggaatggaaatctct

SEQ ID NO: 2494530 - DNA, 25 bp, Homo sapien
aaatgatcacgctctcagaattcac

SEQ ID NO: 2494531 - DNA, 25 bp, Homo sapien
caattgcactcgtgcatgtggtagt

SEQ ID NO: 2494532 - DNA, 25 bp, Homo sapien
tcacttgttaaatcggcccatgagt

SEQ ID NO: 2494533 - DNA, 25 bp, Homo sapien
gcccatgagttctagcccactgcaa

SEQ ID NO: 2494534 - DNA, 25 bp, Homo sapien
tacatgcccaatttcacctatggaa

SEQ ID NO: 2494535 - DNA, 25 bp, Homo sapien
tgagctgagtatctagtcctgttgc

SEQ ID NO: 2494536 - DNA, 25 bp, Homo sapien
cttgccttcagaaggagtgtttgct

SEQ ID NO: 2494537 - DNA, 25 bp, Homo sapien
tgccttcagaaggagtgtttgcttc

SEQ ID NO: 2494538 - DNA, 25 bp, Homo sapien
ttgccttcagaaggagtgtttgctt

SEQ ID NO: 2494539 - DNA, 25 bp, Homo sapien
ttccacacactcattttatccttct

SEQ ID NO: 2494540 - DNA, 25 bp, Homo sapien
aagggggaagaaagtgtctcgtgca

SEQ ID NO: 2494541 - DNA, 25 bp, Homo sapien
agtgtctcgtgcacactaatacaca

SEQ ID NO: 2494542 - DNA, 25 bp, Homo sapien
gaagaaagtgtctcgtgcacactaa

SEQ ID NO: 2494543 - DNA, 25 bp, Homo sapien
aaagtgtctcgtgcacactaataca

SEQ ID NO: 2494544 - DNA, 25 bp, Homo sapien
aggcaccttcagttcggttcagaaa

SEQ ID NO: 2494545 - DNA, 25 bp, Homo sapien
caactccagctgagaacgcgtgcat

SEQ ID NO: 2494546 - DNA, 25 bp, Homo sapien
gaagacaatcgtcctggcaaaggga

SEQ ID NO: 2494547 - DNA, 25 bp, Homo sapien
aatgatacaaacattggcagggcat

SEQ ID NO: 2494548 - DNA, 25 bp, Homo sapien
tcagacacttttcccaccaagggcg

SEQ ID NO: 2494549 - DNA, 25 bp, Homo sapien
ctcagacacttttcccaccaagggc

SEQ ID NO: 2494550 - DNA, 25 bp, Homo sapien
gacacttttcccaccaagggcgtca

SEQ ID NO: 2494551 - DNA, 25 bp, Homo sapien
cagacacttttcccaccaagggcgt

SEQ ID NO: 2494552 - DNA, 25 bp, Homo sapien
gaagatcttaactcatgcgcagccc

SEQ ID NO: 2494553 - DNA, 25 bp, Homo sapien
cctgtggtggaagatcttaactcat

SEQ ID NO: 2494554 - DNA, 25 bp, Homo sapien
aagctacattactgttcctgtggtg

SEQ ID NO: 2494555 - DNA, 25 bp, Homo sapien
taactcatgcgcagcccctgttctt

SEQ ID NO: 2494556 - DNA, 25 bp, Homo sapien
tgtgctcttagaagcaccagtatca

SEQ ID NO: 2494557 - DNA, 25 bp, Homo sapien
gaagcaccagtatcagccgttgatt

SEQ ID NO: 2494558 - DNA, 25 bp, Homo sapien
ccaccctcatgactttttctgactg

SEQ ID NO: 2494559 - DNA, 25 bp, Homo sapien
agaaaaattcaggttgatagcttct

SEQ ID NO: 2494560 - DNA, 25 bp, Homo sapien
gttaaaagtcggctgggcattggca

SEQ ID NO: 2494561 - DNA, 25 bp, Homo sapien
gcagctgcattgtgattccgcttgg

SEQ ID NO: 2494562 - DNA, 25 bp, Homo sapien
ggcattggcagctgcaataaaggga

SEQ ID NO: 2494563 - DNA, 25 bp, Homo sapien
caatggatgttttgtattgtgccca

SEQ ID NO: 2494564 - DNA, 25 bp, Homo sapien
tgtctggtcctaaagcattgttggt

SEQ ID NO: 2494565 - DNA, 25 bp, Homo sapien
ggaacctgacgccacagatgcttca

SEQ ID NO: 2494566 - DNA, 25 bp, Homo sapien
tatttgaaccccaagctgttgctgc

SEQ ID NO: 2494567 - DNA, 25 bp, Homo sapien
gcttgggatcctacaatcctggaca

SEQ ID NO: 2494568 - DNA, 25 bp, Homo sapien
gtctcacccaatagatgccagtcat

SEQ ID NO: 2494569 - DNA, 25 bp, Homo sapien
tgcaagctcttctcaactacagtct

SEQ ID NO: 2494570 - DNA, 25 bp, Homo sapien
cagtttctcccatgggcaaaagtcc

SEQ ID NO: 2494571 - DNA, 25 bp, Homo sapien
ggctgggagtaatcgtctcacccaa

SEQ ID NO: 2494572 - DNA, 25 bp, Homo sapien
gagcagcacgctctggccttgtttg

SEQ ID NO: 2494573 - DNA, 25 bp, Homo sapien
tgaggtcaaagcggagaaactgaga

SEQ ID NO: 2494574 - DNA, 25 bp, Homo sapien
ccgctgacagtgatctgacagaaag

SEQ ID NO: 2494575 - DNA, 25 bp, Homo sapien
gacagaaagcgacactgacacaaag

SEQ ID NO: 2494576 - DNA, 25 bp, Homo sapien
cccctccaatgagctcccgcagcat

SEQ ID NO: 2494577 - DNA, 25 bp, Homo sapien
ccatgttccccttgtctgaagtatg

SEQ ID NO: 2494578 - DNA, 25 bp, Homo sapien
atgttccccttgtctgaagtatgct

SEQ ID NO: 2494579 - DNA, 25 bp, Homo sapien
tatgctcccctccaatgagctcccg

SEQ ID NO: 2494580 - DNA, 25 bp, Homo sapien
cattataaagatataagcatgggtc

SEQ ID NO: 2494581 - DNA, 25 bp, Homo sapien
aatatgcgcttcttgagttcccacc

SEQ ID NO: 2494582 - DNA, 25 bp, Homo sapien
taaatttccatgagtgttagctctc

SEQ ID NO: 2494583 - DNA, 25 bp, Homo sapien
catggtggatacaactccttgcctc

SEQ ID NO: 2494584 - DNA, 25 bp, Homo sapien
tgacaattaggacactatgaaagtg

SEQ ID NO: 2494585 - DNA, 25 bp, Homo sapien
ctttcattcagcttattcagctcat

SEQ ID NO: 2494586 - DNA, 25 bp, Homo sapien
acgaccacccatacagctagaaatg

SEQ ID NO: 2494587 - DNA, 25 bp, Homo sapien
taatattaagaaacctcccatcata

SEQ ID NO: 2494588 - DNA, 25 bp, Homo sapien
tcactgtacctgttcttacttagtc

SEQ ID NO: 2494589 - DNA, 25 bp, Homo sapien
ttcactgtacctgttcttacttagt

SEQ ID NO: 2494590 - DNA, 25 bp, Homo sapien
cttcactgtacctgttcttacttag

SEQ ID NO: 2494591 - DNA, 25 bp, Homo sapien
tctgaattcgaataagaaatagtgc

SEQ ID NO: 2494592 - DNA, 25 bp, Homo sapien
cttgcttctgaattcgaataagaaa

SEQ ID NO: 2494593 - DNA, 25 bp, Homo sapien
ctacattcccttgtaatattcttgc

SEQ ID NO: 2494594 - DNA, 25 bp, Homo sapien
gaattcgaataagaaatagtgcttt

SEQ ID NO: 2494595 - DNA, 25 bp, Homo sapien
aaatggtgataatggcggtagccag

SEQ ID NO: 2494596 - DNA, 25 bp, Homo sapien
tgataatggcggtagccagtaggaa

SEQ ID NO: 2494597 - DNA, 25 bp, Homo sapien
tggcggtagccagtaggaactttaa

SEQ ID NO: 2494598 - DNA, 25 bp, Homo sapien
caaaacagcctcaagttggggtatc

SEQ ID NO: 2494599 - DNA, 25 bp, Homo sapien
ggaattaaccaagatcaatggctta

SEQ ID NO: 2494600 - DNA, 25 bp, Homo sapien
gatatgtataaagggccattttctg

SEQ ID NO: 2494601 - DNA, 25 bp, Homo sapien
tgtgtgatacattgacaaggtgtca

SEQ ID NO: 2494602 - DNA, 25 bp, Homo sapien
ctataaactgtattatgcagctgca

SEQ ID NO: 2494603 - DNA, 25 bp, Homo sapien
tgctccaagtgacgttatctcagct

SEQ ID NO: 2494604 - DNA, 25 bp, Homo sapien
caggcacattgttgctagagaaagg

SEQ ID NO: 2494605 - DNA, 25 bp, Homo sapien
tatttgagcataagccaggcacatt

SEQ ID NO: 2494606 - DNA, 25 bp, Homo sapien
tactttcaatgcataaacgactggc

SEQ ID NO: 2494607 - DNA, 25 bp, Homo sapien
caaaaattcctcaacggcagtatcc

SEQ ID NO: 2494608 - DNA, 25 bp, Homo sapien
cattcagtgcagtgttcaccttccc

SEQ ID NO: 2494609 - DNA, 25 bp, Homo sapien
tcttgtgctgcagatgaacgtgacc

SEQ ID NO: 2494610 - DNA, 25 bp, Homo sapien
caagaaagctagagcacaaggaatt

SEQ ID NO: 2494611 - DNA, 25 bp, Homo sapien
ctcatttctccatcaataccctgga

SEQ ID NO: 2494612 - DNA, 25 bp, Homo sapien
ggaacaggagcaccgggtgtactca

SEQ ID NO: 2494613 - DNA, 25 bp, Homo sapien
ataccctggaacaggagcaccgggt

SEQ ID NO: 2494614 - DNA, 25 bp, Homo sapien
tcatttctccatcaataccctggaa

SEQ ID NO: 2494615 - DNA, 25 bp, Homo sapien
gttattaggctgtttttgaccatta

SEQ ID NO: 2494616 - DNA, 25 bp, Homo sapien
tggcttgagatagtggagcatgcac

SEQ ID NO: 2494617 - DNA, 25 bp, Homo sapien
gagcatgcacatgggcactgtgtgt

SEQ ID NO: 2494618 - DNA, 25 bp, Homo sapien
ctgcagaagatccagggtgacagtg

SEQ ID NO: 2494619 - DNA, 25 bp, Homo sapien
tggaccatagcagttctggcactta

SEQ ID NO: 2494620 - DNA, 25 bp, Homo sapien
tgtgaacacctgcttgatggctggc

SEQ ID NO: 2494621 - DNA, 25 bp, Homo sapien
tgatggctggctgatcagaattgga

SEQ ID NO: 2494622 - DNA, 25 bp, Homo sapien
gttgtaaaccctaatttgatactca

SEQ ID NO: 2494623 - DNA, 25 bp, Homo sapien
gcagtgaacatgctcacgggagtct

SEQ ID NO: 2494624 - DNA, 25 bp, Homo sapien
tgtggatgcgttcacttttggcagc

SEQ ID NO: 2494625 - DNA, 25 bp, Homo sapien
tttggcagctttgcacgacatggtg

SEQ ID NO: 2494626 - DNA, 25 bp, Homo sapien
catgggctacatggtcgctctcatc

SEQ ID NO: 2494627 - DNA, 25 bp, Homo sapien
tcaaattacagctaactttccaatg

SEQ ID NO: 2494628 - DNA, 25 bp, Homo sapien
gccagattcagaagattgctgagga

SEQ ID NO: 2494629 - DNA, 25 bp, Homo sapien
tccaatgacgaacattttggatgaa

SEQ ID NO: 2494630 - DNA, 25 bp, Homo sapien
tggatgaatgcttgttagtcttctc

SEQ ID NO: 2494631 - DNA, 25 bp, Homo sapien
ttctctaacagggaaagaatctggt

SEQ ID NO: 2494632 - DNA, 25 bp, Homo sapien
gctcaataaaggtgtagccattatc

SEQ ID NO: 2494633 - DNA, 25 bp, Homo sapien
tgtttagtataccatacatgctcaa

SEQ ID NO: 2494634 - DNA, 25 bp, Homo sapien
ccattatctagagtttggattggca

SEQ ID NO: 2494635 - DNA, 25 bp, Homo sapien
gaattattaatatcaaagtgtttag

SEQ ID NO: 2494636 - DNA, 25 bp, Homo sapien
ccaataaagctgatcgaagatggca

SEQ ID NO: 2494637 - DNA, 25 bp, Homo sapien
gaagatggcagggtttttatccacc

SEQ ID NO: 2494638 - DNA, 25 bp, Homo sapien
tttatccaccggcaagtaagcttcc

SEQ ID NO: 2494639 - DNA, 25 bp, Homo sapien
aatgtgagaattccgcagatttgtc

SEQ ID NO: 2494640 - DNA, 25 bp, Homo sapien
taagccagaagtgtggctgtcctct

SEQ ID NO: 2494641 - DNA, 25 bp, Homo sapien
agaacagttttattccaccttcaca

SEQ ID NO: 2494642 - DNA, 25 bp, Homo sapien
cagaagtgtggctgtcctctcagag

SEQ ID NO: 2494643 - DNA, 25 bp, Homo sapien
aagtgcagacagaacagttttattc

SEQ ID NO: 2494644 - DNA, 25 bp, Homo sapien
ggagatttggtctctagaaggctct

SEQ ID NO: 2494645 - DNA, 25 bp, Homo sapien
ggaggagcgggagatttggtctcta

SEQ ID NO: 2494646 - DNA, 25 bp, Homo sapien
ggagcgggagatttggtctctagaa

SEQ ID NO: 2494647 - DNA, 25 bp, Homo sapien
gcgggagatttggtctctagaaggc

SEQ ID NO: 2494648 - DNA, 25 bp, Homo sapien
tgctataagttatggtgaatatccg

SEQ ID NO: 2494649 - DNA, 25 bp, Homo sapien
gaatatccgtatctccgacttcaac

SEQ ID NO: 2494650 - DNA, 25 bp, Homo sapien
aaaagtgaataaagacagcaagagt

SEQ ID NO: 2494651 - DNA, 25 bp, Homo sapien
aaacaatttcaatactacaaagtag

SEQ ID NO: 2494652 - DNA, 25 bp, Homo sapien
ttacaaaaaaattgcacataatatt

SEQ ID NO: 2494653 - DNA, 25 bp, Homo sapien
ctttacaaaaaaattgcacataata

SEQ ID NO: 2494654 - DNA, 25 bp, Homo sapien
caaaaaaattgcacataatatttga

SEQ ID NO: 2494655 - DNA, 25 bp, Homo sapien
aaaaaaattgcacataatatttgac

SEQ ID NO: 2494656 - DNA, 25 bp, Homo sapien
gcaactagcagacttgtggccatgg

SEQ ID NO: 2494657 - DNA, 25 bp, Homo sapien
caagttaaacagtctcggcaaggag

SEQ ID NO: 2494658 - DNA, 25 bp, Homo sapien
caaggagtccagaacgtagaaaggg

SEQ ID NO: 2494659 - DNA, 25 bp, Homo sapien
cactcttaggttctgatgcactggc

SEQ ID NO: 2494660 - DNA, 25 bp, Homo sapien
gaatctctcaggcatcagagagtgt

SEQ ID NO: 2494661 - DNA, 25 bp, Homo sapien
aaaataaatgtcagtcactttgagg

SEQ ID NO: 2494662 - DNA, 25 bp, Homo sapien
gtaaacacagccctggatattaaat

SEQ ID NO: 2494663 - DNA, 25 bp, Homo sapien
gatattaaatcccaaacaggaatct

SEQ ID NO: 2494664 - DNA, 25 bp, Homo sapien
tatgatgttatgagaatctggcagg

SEQ ID NO: 2494665 - DNA, 25 bp, Homo sapien
atgatgttatgagaatctggcaggg

SEQ ID NO: 2494666 - DNA, 25 bp, Homo sapien
cattgcttccggttttgaggacagg

SEQ ID NO: 2494667 - DNA, 25 bp, Homo sapien
gaagcaggccaaacaggaagttcat

SEQ ID NO: 2494668 - DNA, 25 bp, Homo sapien
gaagttcatttatccaaccgaagag

SEQ ID NO: 2494669 - DNA, 25 bp, Homo sapien
gccttacacagaccttagccaggga

SEQ ID NO: 2494670 - DNA, 25 bp, Homo sapien
aatttaagagctcatttaggctgac

SEQ ID NO: 2494671 - DNA, 25 bp, Homo sapien
catttaggctgactccaatctcttg

SEQ ID NO: 2494672 - DNA, 25 bp, Homo sapien
cttctgatgcttcaaacaagagttg

SEQ ID NO: 2494673 - DNA, 25 bp, Homo sapien
ccttctgatgcttcaaacaagagtt

SEQ ID NO: 2494674 - DNA, 25 bp, Homo sapien
tccttctgatgcttcaaacaagagt

SEQ ID NO: 2494675 - DNA, 25 bp, Homo sapien
ctccttctgatgcttcaaacaagag

SEQ ID NO: 2494676 - DNA, 25 bp, Homo sapien
aagacagggaagcatagaagtaaga

SEQ ID NO: 2494677 - DNA, 25 bp, Homo sapien
cagggaagcatagaagtaagactta

SEQ ID NO: 2494678 - DNA, 25 bp, Homo sapien
gaagtaagacttagctagagtttga

SEQ ID NO: 2494679 - DNA, 25 bp, Homo sapien
gtaaaagacagggaagcatagaagt

SEQ ID NO: 2494680 - DNA, 25 bp, Homo sapien
cacatcaatggatatggcacatgca

SEQ ID NO: 2494681 - DNA, 25 bp, Homo sapien
caatggatatggcacatgcagaaaa

SEQ ID NO: 2494682 - DNA, 25 bp, Homo sapien
tatggcacatgcagaaaatttacag

SEQ ID NO: 2494683 - DNA, 25 bp, Homo sapien
tggatatggcacatgcagaaaattt

SEQ ID NO: 2494684 - DNA, 25 bp, Homo sapien
tttccacagtgatgcacaaagaggt

SEQ ID NO: 2494685 - DNA, 25 bp, Homo sapien
ccacagtgatgcacaaagaggtaac

SEQ ID NO: 2494686 - DNA, 25 bp, Homo sapien
agaggtaacttctgtaaggctctct

SEQ ID NO: 2494687 - DNA, 25 bp, Homo sapien
caaagaggtaacttctgtaaggctc

SEQ ID NO: 2494688 - DNA, 25 bp, Homo sapien
caaaatggttatgctgagttttgga

SEQ ID NO: 2494689 - DNA, 25 bp, Homo sapien
ttaaaagtgacccatctgagattca

SEQ ID NO: 2494690 - DNA, 25 bp, Homo sapien
tgcatgaaatgttaacttctgtgct

SEQ ID NO: 2494691 - DNA, 25 bp, Homo sapien
tggagtttccgaatatttggtactc

SEQ ID NO: 2494692 - DNA, 25 bp, Homo sapien
tttgtccctttagaacaatctcagc

SEQ ID NO: 2494693 - DNA, 25 bp, Homo sapien
gtccctttagaacaatctcagcagc

SEQ ID NO: 2494694 - DNA, 25 bp, Homo sapien
ctttagaacaatctcagcagcaatg

SEQ ID NO: 2494695 - DNA, 25 bp, Homo sapien
ctctctttgtccctttagaacaatc

SEQ ID NO: 2494696 - DNA, 25 bp, Homo sapien
tatatctttgaacaaaatgaaacac

SEQ ID NO: 2494697 - DNA, 25 bp, Homo sapien
agaaaaatttatatatctttgaaca

SEQ ID NO: 2494698 - DNA, 25 bp, Homo sapien
ttatatatctttgaacaaaatgaaa

SEQ ID NO: 2494699 - DNA, 25 bp, Homo sapien
gaaaaatttatatatctttgaacaa

SEQ ID NO: 2494700 - DNA, 25 bp, Homo sapien
tgtgggaatctgagtacaaaacttc

SEQ ID NO: 2494701 - DNA, 25 bp, Homo sapien
tcagactacaacaggtgacacacca

SEQ ID NO: 2494702 - DNA, 25 bp, Homo sapien
tagaggctattcaatgagtactcac

SEQ ID NO: 2494703 - DNA, 25 bp, Homo sapien
cagtactgtcacctaaatgttgtcc

SEQ ID NO: 2494704 - DNA, 25 bp, Homo sapien
ttaagaatagcaatctgtccaggaa

SEQ ID NO: 2494705 - DNA, 25 bp, Homo sapien
catcttggcttgaagtttcagaatc

SEQ ID NO: 2494706 - DNA, 25 bp, Homo sapien
caggcatgttgggatattatatgta

SEQ ID NO: 2494707 - DNA, 25 bp, Homo sapien
gcatgttgggatattatatgtaaac

SEQ ID NO: 2494708 - DNA, 25 bp, Homo sapien
gccaggcatgttgggatattatatg

SEQ ID NO: 2494709 - DNA, 25 bp, Homo sapien
aagtgtaacgaaccccaaatgtgct

SEQ ID NO: 2494710 - DNA, 25 bp, Homo sapien
aacaaagcattgcaagtgtaacgaa

SEQ ID NO: 2494711 - DNA, 25 bp, Homo sapien
aagcattgcaagtgtaacgaacccc

SEQ ID NO: 2494712 - DNA, 25 bp, Homo sapien
tgcaagtgtaacgaaccccaaatgt

SEQ ID NO: 2494713 - DNA, 25 bp, Homo sapien
gaactaaaatgcatgtatagtaact

SEQ ID NO: 2494714 - DNA, 25 bp, Homo sapien
tttctttcttagagtatgatcagtc

SEQ ID NO: 2494715 - DNA, 25 bp, Homo sapien
ttcttgaactaaaatgcatgtatag

SEQ ID NO: 2494716 - DNA, 25 bp, Homo sapien
gatcagtcttgaatgtttcttgaac

SEQ ID NO: 2494717 - DNA, 25 bp, Homo sapien
aatattttaggcatcttatgatcca

SEQ ID NO: 2494718 - DNA, 25 bp, Homo sapien
aatgagcttctacagattggcaggc

SEQ ID NO: 2494719 - DNA, 25 bp, Homo sapien
tctatttcacgttttatcaaaggtg

SEQ ID NO: 2494720 - DNA, 25 bp, Homo sapien
aagaacagggatgaccagaggaaat

SEQ ID NO: 2494721 - DNA, 25 bp, Homo sapien
tcatgaggacatagtggaacaacag

SEQ ID NO: 2494722 - DNA, 25 bp, Homo sapien
tgccgtggaaaacaagcttactgct

SEQ ID NO: 2494723 - DNA, 25 bp, Homo sapien
ccattaggcagaggaccaaaagaat

SEQ ID NO: 2494724 - DNA, 25 bp, Homo sapien
tatttgagagcaactgacctaggtg

SEQ ID NO: 2494725 - DNA, 25 bp, Homo sapien
gttttggaatgctgggtctttggaa

SEQ ID NO: 2494726 - DNA, 25 bp, Homo sapien
ctcaatgcaagtccagaattagctg

SEQ ID NO: 2494727 - DNA, 25 bp, Homo sapien
caagtccagaattagctggcataac

SEQ ID NO: 2494728 - DNA, 25 bp, Homo sapien
gaatgctgggtctttggaacacagc

SEQ ID NO: 2494729 - DNA, 25 bp, Homo sapien
gatgttgtgagttacagttcctacc

SEQ ID NO: 2494730 - DNA, 25 bp, Homo sapien
gagagccatgggcagaacactgaca

SEQ ID NO: 2494731 - DNA, 25 bp, Homo sapien
gaaatatggtctagtgatgagagcc

SEQ ID NO: 2494732 - DNA, 25 bp, Homo sapien
cctgagtctacctttacttgctgta

SEQ ID NO: 2494733 - DNA, 25 bp, Homo sapien
caaacatctattcactaaatcagta

SEQ ID NO: 2494734 - DNA, 25 bp, Homo sapien
tatcgggcagggactgtaaccaaac

SEQ ID NO: 2494735 - DNA, 25 bp, Homo sapien
ggatccagcagctctattatttgca

SEQ ID NO: 2494736 - DNA, 25 bp, Homo sapien
tagttggaccagtaatcagcactgc

SEQ ID NO: 2494737 - DNA, 25 bp, Homo sapien
cactgtttctttaatacttgattga

SEQ ID NO: 2494738 - DNA, 25 bp, Homo sapien
tagccacccctaatgctgcctcata

SEQ ID NO: 2494739 - DNA, 25 bp, Homo sapien
gctgcctcatatgcctccactgttt

SEQ ID NO: 2494740 - DNA, 25 bp, Homo sapien
tgtactatatcacatctcatagcca

SEQ ID NO: 2494741 - DNA, 25 bp, Homo sapien
tagtatgcaatatctctccacagtg

SEQ ID NO: 2494742 - DNA, 25 bp, Homo sapien
caggtgaaggaatgacaaagtattt

SEQ ID NO: 2494743 - DNA, 25 bp, Homo sapien
gaaggaaaacatatgtctatcattc

SEQ ID NO: 2494744 - DNA, 25 bp, Homo sapien
gtgcttcaatgactttaacatcaag

SEQ ID NO: 2494745 - DNA, 25 bp, Homo sapien
tggtggttaaacatatcatcatcaa

SEQ ID NO: 2494746 - DNA, 25 bp, Homo sapien
gatggaatgtcaattggtcctggaa

SEQ ID NO: 2494747 - DNA, 25 bp, Homo sapien
ccctttacataaacgagatggaatg

SEQ ID NO: 2494748 - DNA, 25 bp, Homo sapien
cagccacaaataaggaacttggtgg

SEQ ID NO: 2494749 - DNA, 25 bp, Homo sapien
gaatcctctgaaacgtcttactcta

SEQ ID NO: 2494750 - DNA, 25 bp, Homo sapien
tggtaatagactacatggcctgcta

SEQ ID NO: 2494751 - DNA, 25 bp, Homo sapien
tttacttatgatcggcaaaccatgc

SEQ ID NO: 2494752 - DNA, 25 bp, Homo sapien
ttgctaaccccataaagagatgagg

SEQ ID NO: 2494753 - DNA, 25 bp, Homo sapien
tgcaataaatttccgcaaaaatgga

SEQ ID NO: 2494754 - DNA, 25 bp, Homo sapien
aaaatggaagaagattatcgcctcg

SEQ ID NO: 2494755 - DNA, 25 bp, Homo sapien
cgaaacagatccaagttattatact

SEQ ID NO: 2494756 - DNA, 25 bp, Homo sapien
agaaggatgcaataaatttccgcaa

SEQ ID NO: 2494757 - DNA, 25 bp, Homo sapien
gagcttccagcaactggcagttaat

SEQ ID NO: 2494758 - DNA, 25 bp, Homo sapien
aatataatgcaacaagagcttccag

SEQ ID NO: 2494759 - DNA, 25 bp, Homo sapien
ggcagttaataggacatgattccaa

SEQ ID NO: 2494760 - DNA, 25 bp, Homo sapien
agatttacaaagctccattgcagcc

SEQ ID NO: 2494761 - DNA, 25 bp, Homo sapien
tcatctgtgcaagctttcactgcat

SEQ ID NO: 2494762 - DNA, 25 bp, Homo sapien
acagcaaggctctcatctgtgcaag

SEQ ID NO: 2494763 - DNA, 25 bp, Homo sapien
tttcctcaacagcaaggctctcatc

SEQ ID NO: 2494764 - DNA, 25 bp, Homo sapien
catgtttgtgtaaagtggaaggcag

SEQ ID NO: 2494765 - DNA, 25 bp, Homo sapien
gaatgtctctccaaactagatcctt

SEQ ID NO: 2494766 - DNA, 25 bp, Homo sapien
tccttacccaatggtaccacagctt

SEQ ID NO: 2494767 - DNA, 25 bp, Homo sapien
tgccacttattaaacggtacaatgt

SEQ ID NO: 2494768 - DNA, 25 bp, Homo sapien
tgatctttttgccacttattaaacg

SEQ ID NO: 2494769 - DNA, 25 bp, Homo sapien
ccctagtctcttttacgtagcatac

SEQ ID NO: 2494770 - DNA, 25 bp, Homo sapien
ccatgccaaacatcgatcactggtt

SEQ ID NO: 2494771 - DNA, 25 bp, Homo sapien
caaaaactgctaacaacatgtcagg

SEQ ID NO: 2494772 - DNA, 25 bp, Homo sapien
tacatcttgaacagcttgccatggc

SEQ ID NO: 2494773 - DNA, 25 bp, Homo sapien
tcaataagatgtatgtaggccaacc

SEQ ID NO: 2494774 - DNA, 25 bp, Homo sapien
ccagtaaatatgtgcagctgaactc

SEQ ID NO: 2494775 - DNA, 25 bp, Homo sapien
ctttggcatcttccagtaaatatgt

SEQ ID NO: 2494776 - DNA, 25 bp, Homo sapien
tatgtgcagctgaactctaaacaaa

SEQ ID NO: 2494777 - DNA, 25 bp, Homo sapien
ggcatcttccagtaaatatgtgcag

SEQ ID NO: 2494778 - DNA, 25 bp, Homo sapien
tcacatacgtaatccttttcttcaa

SEQ ID NO: 2494779 - DNA, 25 bp, Homo sapien
tccaacattctctcacatacgtaat

SEQ ID NO: 2494780 - DNA, 25 bp, Homo sapien
cattctctcacatacgtaatccttt

SEQ ID NO: 2494781 - DNA, 25 bp, Homo sapien
tctctcacatacgtaatccttttct

SEQ ID NO: 2494782 - DNA, 25 bp, Homo sapien
tattttccaatgctcgcgccagaac

SEQ ID NO: 2494783 - DNA, 25 bp, Homo sapien
agaacatttaaagcagaatccaagg

SEQ ID NO: 2494784 - DNA, 25 bp, Homo sapien
taatctggagcatattcaacagctg

SEQ ID NO: 2494785 - DNA, 25 bp, Homo sapien
acaatctgaggtaatggcaccaaat

SEQ ID NO: 2494786 - DNA, 25 bp, Homo sapien
agtacttgtacgcaagcttgagcca

SEQ ID NO: 2494787 - DNA, 25 bp, Homo sapien
tttatttggttctctggctggaaag

SEQ ID NO: 2494788 - DNA, 25 bp, Homo sapien
tgacatcatctggagtgacaactgt

SEQ ID NO: 2494789 - DNA, 25 bp, Homo sapien
gcttctaaattagcgatgtcatcag

SEQ ID NO: 2494790 - DNA, 25 bp, Homo sapien
tctttgtaggttgtaaatggaggag

SEQ ID NO: 2494791 - DNA, 25 bp, Homo sapien
tattgctaacaaggagaacagccat

SEQ ID NO: 2494792 - DNA, 25 bp, Homo sapien
ttgacattcgatctttgtttactcc

SEQ ID NO: 2494793 - DNA, 25 bp, Homo sapien
ctttcattgatattgctaacaagga

SEQ ID NO: 2494794 - DNA, 25 bp, Homo sapien
agccatctggtccattgacattcga

SEQ ID NO: 2494795 - DNA, 25 bp, Homo sapien
tcatgataaatatcaattacagaga

SEQ ID NO: 2494796 - DNA, 25 bp, Homo sapien
gaaataagagcaatgcaatcttcat

SEQ ID NO: 2494797 - DNA, 25 bp, Homo sapien
ctgaaataagagcaatgcaatcttc

SEQ ID NO: 2494798 - DNA, 25 bp, Homo sapien
aatgcaatcttcatgataaatatca

SEQ ID NO: 2494799 - DNA, 25 bp, Homo sapien
tttcggctaagtgtatagtcttgta

SEQ ID NO: 2494800 - DNA, 25 bp, Homo sapien
gtacttgtctctgcacaaccaatca

SEQ ID NO: 2494801 - DNA, 25 bp, Homo sapien
gaatgtcctggaataactgttttcg

SEQ ID NO: 2494802 - DNA, 25 bp, Homo sapien
gacagattatatgacagaatgtcct

SEQ ID NO: 2494803 - DNA, 25 bp, Homo sapien
gatccggttcaatcatattactgta

SEQ ID NO: 2494804 - DNA, 25 bp, Homo sapien
tactgtatgatactgagctcagggg

SEQ ID NO: 2494805 - DNA, 25 bp, Homo sapien
ccttggttcgataatatggactaaa

SEQ ID NO: 2494806 - DNA, 25 bp, Homo sapien
tgttaaatcaaaacggcagaaacac

SEQ ID NO: 2494807 - DNA, 25 bp, Homo sapien
ttccattgttttactttgtgctgtg

SEQ ID NO: 2494808 - DNA, 25 bp, Homo sapien
aaggacatggcttcacttccattgt

SEQ ID NO: 2494809 - DNA, 25 bp, Homo sapien
gtctaaaaggacatggcttcacttc

SEQ ID NO: 2494810 - DNA, 25 bp, Homo sapien
gaagaggactatggtagggtctaaa

SEQ ID NO: 2494811 - DNA, 25 bp, Homo sapien
aaaatcagctgttttaggctgtcag

SEQ ID NO: 2494812 - DNA, 25 bp, Homo sapien
ctgaccatgcaaaaccttctctgta

SEQ ID NO: 2494813 - DNA, 25 bp, Homo sapien
aaatcagctgttttaggctgtcagc

SEQ ID NO: 2494814 - DNA, 25 bp, Homo sapien
ttctctgtaatgcctgtggtggttt

SEQ ID NO: 2494815 - DNA, 25 bp, Homo sapien
tcttgtgtcagatcatgaagtgagg

SEQ ID NO: 2494816 - DNA, 25 bp, Homo sapien
cagtgtccagggttaatttatcttg

SEQ ID NO: 2494817 - DNA, 25 bp, Homo sapien
cagtatcagtgtgcttaaggttagg

SEQ ID NO: 2494818 - DNA, 25 bp, Homo sapien
tcgctctctgcttgaaccagacaaa

SEQ ID NO: 2494819 - DNA, 25 bp, Homo sapien
catagcaattagttctgctgaatgc

SEQ ID NO: 2494820 - DNA, 25 bp, Homo sapien
gaactgtccagtctcatcattttgt

SEQ ID NO: 2494821 - DNA, 25 bp, Homo sapien
agaactgtccagtctcatcattttg

SEQ ID NO: 2494822 - DNA, 25 bp, Homo sapien
ttatatatacatcttacccttaaaa

SEQ ID NO: 2494823 - DNA, 25 bp, Homo sapien
caaagctttaatcttaatctcttgg

SEQ ID NO: 2494824 - DNA, 25 bp, Homo sapien
tatatacatcttacccttaaaacta

SEQ ID NO: 2494825 - DNA, 25 bp, Homo sapien
aaacaaagctttaatcttaatctct

SEQ ID NO: 2494826 - DNA, 25 bp, Homo sapien
ggccactgcctttgcccgagcaagc

SEQ ID NO: 2494827 - DNA, 25 bp, Homo sapien
tgcctttgcccgagcaagctcttct

SEQ ID NO: 2494828 - DNA, 25 bp, Homo sapien
tcttaattgtaacacgctgttgaac

SEQ ID NO: 2494829 - DNA, 25 bp, Homo sapien
taacacgctgttgaactctgtgaat

SEQ ID NO: 2494830 - DNA, 25 bp, Homo sapien
ctgtaagttttgtaatctttgcttc

SEQ ID NO: 2494831 - DNA, 25 bp, Homo sapien
cttagcttcttgttgcactaaattc

SEQ ID NO: 2494832 - DNA, 25 bp, Homo sapien
cagcatttctaacagattctttctt

SEQ ID NO: 2494833 - DNA, 25 bp, Homo sapien
gcttcttgttgcactaaattcttta

SEQ ID NO: 2494834 - DNA, 25 bp, Homo sapien
caatttccacatcagagtttgctgg

SEQ ID NO: 2494835 - DNA, 25 bp, Homo sapien
tagtaaccattgctatcctgccaat

SEQ ID NO: 2494836 - DNA, 25 bp, Homo sapien
gcatctgtaacctgcttagtaacca

SEQ ID NO: 2494837 - DNA, 25 bp, Homo sapien
tttaatcaaacgctgtttctcacgg

SEQ ID NO: 2494838 - DNA, 25 bp, Homo sapien
tcttcctttaacaatctatattcaa

SEQ ID NO: 2494839 - DNA, 25 bp, Homo sapien
ccggtgttcgcagaggatcattttc

SEQ ID NO: 2494840 - DNA, 25 bp, Homo sapien
tgttcgcagaggatcattttctttt

SEQ ID NO: 2494841 - DNA, 25 bp, Homo sapien
gcaaagcctccggtgttcgcagagg

SEQ ID NO: 2494842 - DNA, 25 bp, Homo sapien
gactctaatccaccaaaaacactat

SEQ ID NO: 2494843 - DNA, 25 bp, Homo sapien
tcatggactctaatccaccaaaaac

SEQ ID NO: 2494844 - DNA, 25 bp, Homo sapien
cttggaagcctctccatcagattca

SEQ ID NO: 2494845 - DNA, 25 bp, Homo sapien
taatcatggactctaatccaccaaa

SEQ ID NO: 2494846 - DNA, 25 bp, Homo sapien
gattctgtatcctaggctgagacac

SEQ ID NO: 2494847 - DNA, 25 bp, Homo sapien
cgagatcacagttcgtggaagacgg

SEQ ID NO: 2494848 - DNA, 25 bp, Homo sapien
gaaggtgggtcactattactggatg

SEQ ID NO: 2494849 - DNA, 25 bp, Homo sapien
tcttggcacaggatgtgaattgttc

SEQ ID NO: 2494850 - DNA, 25 bp, Homo sapien
gtagttcttctcgaagcagcatttc

SEQ ID NO: 2494851 - DNA, 25 bp, Homo sapien
taagtagttcttctcgaagcagcat

SEQ ID NO: 2494852 - DNA, 25 bp, Homo sapien
ttaagtagttcttctcgaagcagca

SEQ ID NO: 2494853 - DNA, 25 bp, Homo sapien
ttcttctcgaagcagcatttcttcc

SEQ ID NO: 2494854 - DNA, 25 bp, Homo sapien
tagaggaggtagaggttcaagagaa

SEQ ID NO: 2494855 - DNA, 25 bp, Homo sapien
acacacaagccttccacataaggct

SEQ ID NO: 2494856 - DNA, 25 bp, Homo sapien
aaacacacaagccttccacataagg

SEQ ID NO: 2494857 - DNA, 25 bp, Homo sapien
gaaacacacaagccttccacataag

SEQ ID NO: 2494858 - DNA, 25 bp, Homo sapien
tctaccaaatggatagcttgctggt

SEQ ID NO: 2494859 - DNA, 25 bp, Homo sapien
gataggtaccgaaaagtcaacatga

SEQ ID NO: 2494860 - DNA, 25 bp, Homo sapien
gacagtccaaaacagtagataactt

SEQ ID NO: 2494861 - DNA, 25 bp, Homo sapien
tctgagtagctactatctgagagta

SEQ ID NO: 2494862 - DNA, 25 bp, Homo sapien
ctggagaaaaataccccaatgaaca

SEQ ID NO: 2494863 - DNA, 25 bp, Homo sapien
aaaataccccaatgaacattcagag

SEQ ID NO: 2494864 - DNA, 25 bp, Homo sapien
aaatggcggttgcactggtgaagga

SEQ ID NO: 2494865 - DNA, 25 bp, Homo sapien
agaaaaataccccaatgaacattca

SEQ ID NO: 2494866 - DNA, 25 bp, Homo sapien
aggagaggcttctgaggactttctg

SEQ ID NO: 2494867 - DNA, 25 bp, Homo sapien
gacctttgtgttgggtcagccacta

SEQ ID NO: 2494868 - DNA, 25 bp, Homo sapien
gaggactttctgacctttgtgttgg

SEQ ID NO: 2494869 - DNA, 25 bp, Homo sapien
ctttgtgttgggtcagccactaggg

SEQ ID NO: 2494870 - DNA, 25 bp, Homo sapien
ggaataggtctctcacagccaatca

SEQ ID NO: 2494871 - DNA, 25 bp, Homo sapien
ctagactatgcaacctaaaggagag

SEQ ID NO: 2494872 - DNA, 25 bp, Homo sapien
aaaatcaagtctctggccctcaaag

SEQ ID NO: 2494873 - DNA, 25 bp, Homo sapien
taaaggagagttacagccctgacca

SEQ ID NO: 2494874 - DNA, 25 bp, Homo sapien
gcttatctaaggatcgcctcaggtc

SEQ ID NO: 2494875 - DNA, 25 bp, Homo sapien
tatctgtatccatagcaacttcttc

SEQ ID NO: 2494876 - DNA, 25 bp, Homo sapien
cctcctccactatcagtaggttgct

SEQ ID NO: 2494877 - DNA, 25 bp, Homo sapien
gcaacttcttcatagttatcatact

SEQ ID NO: 2494878 - DNA, 25 bp, Homo sapien
gtgcctatcacatctttgggaaatt

SEQ ID NO: 2494879 - DNA, 25 bp, Homo sapien
caaatgataggtacactggttgaca

SEQ ID NO: 2494880 - DNA, 25 bp, Homo sapien
tgtcatcacgactacatacagaata

SEQ ID NO: 2494881 - DNA, 25 bp, Homo sapien
tacgagctatacagacgaaatcccc

SEQ ID NO: 2494882 - DNA, 25 bp, Homo sapien
gagaaaaagacaagacgacaagtat

SEQ ID NO: 2494883 - DNA, 25 bp, Homo sapien
tagccacatgcactaaggttattac

SEQ ID NO: 2494884 - DNA, 25 bp, Homo sapien
gatgctttcccaattataacctacc

SEQ ID NO: 2494885 - DNA, 25 bp, Homo sapien
taaggtagtccatactagtcatgac

SEQ ID NO: 2494886 - DNA, 25 bp, Homo sapien
tcttcagcttgtttccgctgatcct

SEQ ID NO: 2494887 - DNA, 25 bp, Homo sapien
tgaatcgattgtactgttcttcctg

SEQ ID NO: 2494888 - DNA, 25 bp, Homo sapien
cttcctgatttgagagatctcgaat

SEQ ID NO: 2494889 - DNA, 25 bp, Homo sapien
gtttgctgcttcctcaatgcttgtt

SEQ ID NO: 2494890 - DNA, 25 bp, Homo sapien
gctgtacagttttcgtcttagtcaa

SEQ ID NO: 2494891 - DNA, 25 bp, Homo sapien
ggcgaagctgtaattcagatagttc

SEQ ID NO: 2494892 - DNA, 25 bp, Homo sapien
tagtgctaacttttttggccgaatg

SEQ ID NO: 2494893 - DNA, 25 bp, Homo sapien
gactgaagagccaaaaggcgaagct

SEQ ID NO: 2494894 - DNA, 25 bp, Homo sapien
gacagaatatctgaggtactaattc

SEQ ID NO: 2494895 - DNA, 25 bp, Homo sapien
tttcagacagaatatctgaggtact

SEQ ID NO: 2494896 - DNA, 25 bp, Homo sapien
tgaggtactaattcttcttgttaaa

SEQ ID NO: 2494897 - DNA, 25 bp, Homo sapien
tatctgaggtactaattcttcttgt

SEQ ID NO: 2494898 - DNA, 25 bp, Homo sapien
tagccttgggcccagatgactgatg

SEQ ID NO: 2494899 - DNA, 25 bp, Homo sapien
tgctcaagtgaaccaaagaatacgt

SEQ ID NO: 2494900 - DNA, 25 bp, Homo sapien
gaaggcaatgaccaaatttcaagac

SEQ ID NO: 2494901 - DNA, 25 bp, Homo sapien
tagaaaataattcgagcagccaggc

SEQ ID NO: 2494902 - DNA, 25 bp, Homo sapien
ggcagcacctccctttaacgtagca

SEQ ID NO: 2494903 - DNA, 25 bp, Homo sapien
taacgtagcatagaggcaagtatct

SEQ ID NO: 2494904 - DNA, 25 bp, Homo sapien
ttatatgccacggacaaagtttttg

SEQ ID NO: 2494905 - DNA, 25 bp, Homo sapien
ggaaatgcatatgtcccactgtaga

SEQ ID NO: 2494906 - DNA, 25 bp, Homo sapien
tgtattaaacgcaagcatacaaggg

SEQ ID NO: 2494907 - DNA, 25 bp, Homo sapien
tcataaactgtattaaacgcaagca

SEQ ID NO: 2494908 - DNA, 25 bp, Homo sapien
taaacgcaagcatacaagggtggtt

SEQ ID NO: 2494909 - DNA, 25 bp, Homo sapien
taaactgtattaaacgcaagcatac

SEQ ID NO: 2494910 - DNA, 25 bp, Homo sapien
tgaaaatttcaaaccaggaatagga

SEQ ID NO: 2494911 - DNA, 25 bp, Homo sapien
cacgctgaaaatttcaaaccaggaa

SEQ ID NO: 2494912 - DNA, 25 bp, Homo sapien
cgctgaaaatttcaaaccaggaata

SEQ ID NO: 2494913 - DNA, 25 bp, Homo sapien
gctgaaaatttcaaaccaggaatag

SEQ ID NO: 2494914 - DNA, 25 bp, Homo sapien
caatgttttaggatcttcctgcaca

SEQ ID NO: 2494915 - DNA, 25 bp, Homo sapien
cattatcagtgctagtttggtcctc

SEQ ID NO: 2494916 - DNA, 25 bp, Homo sapien
tcagtagtgtcggatttcagggaaa

SEQ ID NO: 2494917 - DNA, 25 bp, Homo sapien
cctggtaaagtcaatttttgcctga

SEQ ID NO: 2494918 - DNA, 25 bp, Homo sapien
cttcaaaagtttcttccacacagtt

SEQ ID NO: 2494919 - DNA, 25 bp, Homo sapien
agtttcttccacacagttttcattt

SEQ ID NO: 2494920 - DNA, 25 bp, Homo sapien
agcaaatcttcaaaagtttcttcca

SEQ ID NO: 2494921 - DNA, 25 bp, Homo sapien
aaagtttcttccacacagttttcat

SEQ ID NO: 2494922 - DNA, 25 bp, Homo sapien
cttgatggagaccttccaaaacttt

SEQ ID NO: 2494923 - DNA, 25 bp, Homo sapien
tgatggagaccttccaaaacttttg

SEQ ID NO: 2494924 - DNA, 25 bp, Homo sapien
agtctcgcactgtcagccagtctgg

SEQ ID NO: 2494925 - DNA, 25 bp, Homo sapien
cgggattacaggtgtgagccactgc

SEQ ID NO: 2494926 - DNA, 25 bp, Homo sapien
gattacaggtgtgagccactgcacc

SEQ ID NO: 2494927 - DNA, 25 bp, Homo sapien
gagtctcgcactgtcagccagtctg

SEQ ID NO: 2494928 - DNA, 25 bp, Homo sapien
tcttcagggagcactacttagcctc

SEQ ID NO: 2494929 - DNA, 25 bp, Homo sapien
tcttggcttccataactccgcatct

SEQ ID NO: 2494930 - DNA, 25 bp, Homo sapien
tggagccatttaaaggcacaactgc

SEQ ID NO: 2494931 - DNA, 25 bp, Homo sapien
taccacaggagagtttaccctggtg

SEQ ID NO: 2494932 - DNA, 25 bp, Homo sapien
tgctaagatgtactgacaaagtgtc

SEQ ID NO: 2494933 - DNA, 25 bp, Homo sapien
tgttagctctcctcagatttgaaag

SEQ ID NO: 2494934 - DNA, 25 bp, Homo sapien
cacctctaggatggattactgatac

SEQ ID NO: 2494935 - DNA, 25 bp, Homo sapien
tatgccacagagtaacctgcattct

SEQ ID NO: 2494936 - DNA, 25 bp, Homo sapien
gggaaaacaatgagcaggacatcaa

SEQ ID NO: 2494937 - DNA, 25 bp, Homo sapien
gcaagcttaccaattaataaaggtc

SEQ ID NO: 2494938 - DNA, 25 bp, Homo sapien
tactacggaaatcaaagtcacacaa

SEQ ID NO: 2494939 - DNA, 25 bp, Homo sapien
tcacacaagcagactggatattttc

SEQ ID NO: 2494940 - DNA, 25 bp, Homo sapien
gcaacatcatatgccagtttactaa

SEQ ID NO: 2494941 - DNA, 25 bp, Homo sapien
aatgacgctaaagggaactttagtg

SEQ ID NO: 2494942 - DNA, 25 bp, Homo sapien
gctaaagggaactttagtgacacac

SEQ ID NO: 2494943 - DNA, 25 bp, Homo sapien
cgctaaagggaactttagtgacaca

SEQ ID NO: 2494944 - DNA, 25 bp, Homo sapien
gacgctaaagggaactttagtgaca

SEQ ID NO: 2494945 - DNA, 25 bp, Homo sapien
agcgccgaccgccacgttaaggata

SEQ ID NO: 2494946 - DNA, 25 bp, Homo sapien
ccagcgccgaccgccacgttaagga

SEQ ID NO: 2494947 - DNA, 25 bp, Homo sapien
gcgccgaccgccacgttaaggatac

SEQ ID NO: 2494948 - DNA, 25 bp, Homo sapien
cagcgccgaccgccacgttaaggat

SEQ ID NO: 2494949 - DNA, 25 bp, Homo sapien
ctgactgctgctgaacccggatcct

SEQ ID NO: 2494950 - DNA, 25 bp, Homo sapien
tgactgctgctgaacccggatcctg

SEQ ID NO: 2494951 - DNA, 25 bp, Homo sapien
ggtggagagggctctcgccagctct

SEQ ID NO: 2494952 - DNA, 25 bp, Homo sapien
agagggctctcgccagctctgactg

SEQ ID NO: 2494953 - DNA, 25 bp, Homo sapien
tcctcctcccagaggaggtctgcac

SEQ ID NO: 2494954 - DNA, 25 bp, Homo sapien
ctcctcctcccagaggaggtctgca

SEQ ID NO: 2494955 - DNA, 25 bp, Homo sapien
cgcccccgactccagcgactcccac

SEQ ID NO: 2494956 - DNA, 25 bp, Homo sapien
tgagctcgaaggcatccgtacagaa

SEQ ID NO: 2494957 - DNA, 25 bp, Homo sapien
cgtgccgcgagcgtgagaaattcct

SEQ ID NO: 2494958 - DNA, 25 bp, Homo sapien
cttcgccgcggatagggtaacagcc

SEQ ID NO: 2494959 - DNA, 25 bp, Homo sapien
tacagaaggcggatgagaccggaac

SEQ ID NO: 2494960 - DNA, 25 bp, Homo sapien
ccggggccggagtatctgcggtcgc

SEQ ID NO: 2494961 - DNA, 25 bp, Homo sapien
gccggggccggagtatctgcggtcg

SEQ ID NO: 2494962 - DNA, 25 bp, Homo sapien
gggccggagtatctgcggtcgccat

SEQ ID NO: 2494963 - DNA, 25 bp, Homo sapien
cggggccggagtatctgcggtcgcc

SEQ ID NO: 2494964 - DNA, 25 bp, Homo sapien
ggagcagcgccttccacacaacctt

SEQ ID NO: 2494965 - DNA, 25 bp, Homo sapien
cgacaattgcctcgtttcccttctt

SEQ ID NO: 2494966 - DNA, 25 bp, Homo sapien
ctaacggactgggtcggtgcggtct

SEQ ID NO: 2494967 - DNA, 25 bp, Homo sapien
ttccacacaaccttagccctccgtc

SEQ ID NO: 2494968 - DNA, 25 bp, Homo sapien
actcggacaccaagcggcctctgct

SEQ ID NO: 2494969 - DNA, 25 bp, Homo sapien
tgctcctcagcgatcggggttcttc

SEQ ID NO: 2494970 - DNA, 25 bp, Homo sapien
gttcttccgcctcgcgagaaaggga

SEQ ID NO: 2494971 - DNA, 25 bp, Homo sapien
tggtagcggctgtacccgaaacgtc

SEQ ID NO: 2494972 - DNA, 25 bp, Homo sapien
tgcatgcagaagtaggtggagctgc

SEQ ID NO: 2494973 - DNA, 25 bp, Homo sapien
tacagttgggtgcatgcagaagtag

SEQ ID NO: 2494974 - DNA, 25 bp, Homo sapien
tgctgttgcagccttgagagagttt

SEQ ID NO: 2494975 - DNA, 25 bp, Homo sapien
cttgtaatttatagtaatcggaggg

SEQ ID NO: 2494976 - DNA, 25 bp, Homo sapien
gagaaagaacgggttgtgtccgcca

SEQ ID NO: 2494977 - DNA, 25 bp, Homo sapien
ccaaagaaacgcagtagatccgctc

SEQ ID NO: 2494978 - DNA, 25 bp, Homo sapien
gaccgctgccaaagaaacgcagtag

SEQ ID NO: 2494979 - DNA, 25 bp, Homo sapien
ctctgaggaccgctgccaaagaaac

SEQ ID NO: 2494980 - DNA, 25 bp, Homo sapien
gagcttgatgcctatccttcattct

SEQ ID NO: 2494981 - DNA, 25 bp, Homo sapien
gataattatggcacttatgccaaaa

SEQ ID NO: 2494982 - DNA, 25 bp, Homo sapien
aatttagcttgcacagagcttgatg

SEQ ID NO: 2494983 - DNA, 25 bp, Homo sapien
tctaaaacagaccaagagtaccttc

SEQ ID NO: 2494984 - DNA, 25 bp, Homo sapien
gatttatgaatacaccaccaccaga

SEQ ID NO: 2494985 - DNA, 25 bp, Homo sapien
ccaccagagtggataatgcttagaa

SEQ ID NO: 2494986 - DNA, 25 bp, Homo sapien
tattggtggccctactatggtgatg

SEQ ID NO: 2494987 - DNA, 25 bp, Homo sapien
tatacattggaagcaccagggcatg

SEQ ID NO: 2494988 - DNA, 25 bp, Homo sapien
gaaagagctctatgtaacagcataa

SEQ ID NO: 2494989 - DNA, 25 bp, Homo sapien
aatcacttttcatggaaagagctct

SEQ ID NO: 2494990 - DNA, 25 bp, Homo sapien
catggaaagagctctatgtaacagc

SEQ ID NO: 2494991 - DNA, 25 bp, Homo sapien
gtattttactgtaacatcttttgaa

SEQ ID NO: 2494992 - DNA, 25 bp, Homo sapien
tctaattgccctctgactgaagttt

SEQ ID NO: 2494993 - DNA, 25 bp, Homo sapien
gaaagcataggtgatagacactcag

SEQ ID NO: 2494994 - DNA, 25 bp, Homo sapien
gcagcatgtaggtccaacaagggat

SEQ ID NO: 2494995 - DNA, 25 bp, Homo sapien
aaaactatagctcgttcagccagca

SEQ ID NO: 2494996 - DNA, 25 bp, Homo sapien
cacatgctccatgggaaaaatccct

SEQ ID NO: 2494997 - DNA, 25 bp, Homo sapien
ctcatgatagggtttcaccgggtca

SEQ ID NO: 2494998 - DNA, 25 bp, Homo sapien
ctctccggcagtgatcttggccaag

SEQ ID NO: 2494999 - DNA, 25 bp, Homo sapien
gccaagatttaagacaacctcatga

SEQ ID NO: 2495000 - DNA, 25 bp, Homo sapien
agcaattaccaatggcctttttaca

SEQ ID NO: 2495001 - DNA, 25 bp, Homo sapien
gcaattaccaatggcctttttacat

SEQ ID NO: 2495002 - DNA, 25 bp, Homo sapien
aatgaggaataatatgcatgtagaa

SEQ ID NO: 2495003 - DNA, 25 bp, Homo sapien
ctttaatgaggaataatatgcatgt

SEQ ID NO: 2495004 - DNA, 25 bp, Homo sapien
tctgtcttaacttgaacatggcgtg

SEQ ID NO: 2495005 - DNA, 25 bp, Homo sapien
tgcacaggcccgtaactgtctacta

SEQ ID NO: 2495006 - DNA, 25 bp, Homo sapien
tctgcttttacaagcgcaaggtgca

SEQ ID NO: 2495007 - DNA, 25 bp, Homo sapien
tgatgattgagcagtagcatttgcc

SEQ ID NO: 2495008 - DNA, 25 bp, Homo sapien
ccacgttgtgtattaaaagcagtag

SEQ ID NO: 2495009 - DNA, 25 bp, Homo sapien
cagtaggtaggttgtgccagtattt

SEQ ID NO: 2495010 - DNA, 25 bp, Homo sapien
acaatagacaacatgatatggctgc

SEQ ID NO: 2495011 - DNA, 25 bp, Homo sapien
cagccagtaagcatatacagttaac

SEQ ID NO: 2495012 - DNA, 25 bp, Homo sapien
acatttgctgctctgctaagactaa

SEQ ID NO: 2495013 - DNA, 25 bp, Homo sapien
catttgctgctctgctaagactaaa

SEQ ID NO: 2495014 - DNA, 25 bp, Homo sapien
atttgctgctctgctaagactaaag

SEQ ID NO: 2495015 - DNA, 25 bp, Homo sapien
ctgtcatctcttggaaacactggaa

SEQ ID NO: 2495016 - DNA, 25 bp, Homo sapien
catctcttggaaacactggaactag

SEQ ID NO: 2495017 - DNA, 25 bp, Homo sapien
agctcattaggatgatacctgtcat

SEQ ID NO: 2495018 - DNA, 25 bp, Homo sapien
gagaactggaggtgttcacccccat

SEQ ID NO: 2495019 - DNA, 25 bp, Homo sapien
ggcaccatgcccaacatataacaat

SEQ ID NO: 2495020 - DNA, 25 bp, Homo sapien
ctattaatcaagaaagactttttag

SEQ ID NO: 2495021 - DNA, 25 bp, Homo sapien
agacaaaactatactgagataccag

SEQ ID NO: 2495022 - DNA, 25 bp, Homo sapien
aaaaaaccaccataagcatagtcta

SEQ ID NO: 2495023 - DNA, 25 bp, Homo sapien
cttttatatcgtcttgactttcaga

SEQ ID NO: 2495024 - DNA, 25 bp, Homo sapien
ttagttcgcccatgtcctgtcttac

SEQ ID NO: 2495025 - DNA, 25 bp, Homo sapien
gagagtgttctaattgcctgcaagc

SEQ ID NO: 2495026 - DNA, 25 bp, Homo sapien
ttcttactcccttagttcgcccatg

SEQ ID NO: 2495027 - DNA, 25 bp, Homo sapien
gggaatcaggactgcagaaaagaaa

SEQ ID NO: 2495028 - DNA, 25 bp, Homo sapien
gtctggggaatcaggactgcagaaa

SEQ ID NO: 2495029 - DNA, 25 bp, Homo sapien
caagtctgaccagcaggtaatctac

SEQ ID NO: 2495030 - DNA, 25 bp, Homo sapien
tggggaatcaggactgcagaaaaga

SEQ ID NO: 2495031 - DNA, 25 bp, Homo sapien
ggagtgtgtgggcacccagcaggta

SEQ ID NO: 2495032 - DNA, 25 bp, Homo sapien
agtcctcatgacagaagtataatgc

SEQ ID NO: 2495033 - DNA, 25 bp, Homo sapien
tgacagaagtataatgcaagagatt

SEQ ID NO: 2495034 - DNA, 25 bp, Homo sapien
cttttctaaaatgcaagtcctcatg

SEQ ID NO: 2495035 - DNA, 25 bp, Homo sapien
tgcagagtgtaaccagccaggactg

SEQ ID NO: 2495036 - DNA, 25 bp, Homo sapien
taaccagccaggactgcatgggctc

SEQ ID NO: 2495037 - DNA, 25 bp, Homo sapien
ctagctgcagagtgtaaccagccag

SEQ ID NO: 2495038 - DNA, 25 bp, Homo sapien
agagtgtaaccagccaggactgcat

SEQ ID NO: 2495039 - DNA, 25 bp, Homo sapien
ctagaaggacagcagtcactttgct

SEQ ID NO: 2495040 - DNA, 25 bp, Homo sapien
atctcctctacgatcccagccttca

SEQ ID NO: 2495041 - DNA, 25 bp, Homo sapien
ctcctctacgatcccagccttcaac

SEQ ID NO: 2495042 - DNA, 25 bp, Homo sapien
cctctacgatcccagccttcaacat

SEQ ID NO: 2495043 - DNA, 25 bp, Homo sapien
catctcctctacgatcccagccttc

SEQ ID NO: 2495044 - DNA, 25 bp, Homo sapien
tttctgtgtccggacaacccgtggc

SEQ ID NO: 2495045 - DNA, 25 bp, Homo sapien
cacaagcgtagcgttaggcctgaga

SEQ ID NO: 2495046 - DNA, 25 bp, Homo sapien
tatgtccgagagacacgtgaggttc

SEQ ID NO: 2495047 - DNA, 25 bp, Homo sapien
gaggttctgctacgtcattaccagg

SEQ ID NO: 2495048 - DNA, 25 bp, Homo sapien
tgtaggagaagactgggtggtacca

SEQ ID NO: 2495049 - DNA, 25 bp, Homo sapien
ctgtaggagaagactgggtggtacc

SEQ ID NO: 2495050 - DNA, 25 bp, Homo sapien
gtaggagaagactgggtggtaccag

SEQ ID NO: 2495051 - DNA, 25 bp, Homo sapien
tactggctcttttaaaggataggtg

SEQ ID NO: 2495052 - DNA, 25 bp, Homo sapien
ctactggctcttttaaaggataggt

SEQ ID NO: 2495053 - DNA, 25 bp, Homo sapien
actggctcttttaaaggataggtgg

SEQ ID NO: 2495054 - DNA, 25 bp, Homo sapien
tactgctagtttagtcagacacttt

SEQ ID NO: 2495055 - DNA, 25 bp, Homo sapien
ataatactgctagtttagtcagaca

SEQ ID NO: 2495056 - DNA, 25 bp, Homo sapien
tagtttagtcagacacttttccttg

SEQ ID NO: 2495057 - DNA, 25 bp, Homo sapien
tgctagtttagtcagacacttttcc

SEQ ID NO: 2495058 - DNA, 25 bp, Homo sapien
gctacatttaaaatatttgggttga

SEQ ID NO: 2495059 - DNA, 25 bp, Homo sapien
tgctacatttaaaatatttgggttg

SEQ ID NO: 2495060 - DNA, 25 bp, Homo sapien
gtatcagaagttaactgtgattata

SEQ ID NO: 2495061 - DNA, 25 bp, Homo sapien
tcttctgttgcctcacatcatgtct

SEQ ID NO: 2495062 - DNA, 25 bp, Homo sapien
aaaagtatcagaagttaactgtgat

SEQ ID NO: 2495063 - DNA, 25 bp, Homo sapien
ttctgttgcctcacatcatgtctat

SEQ ID NO: 2495064 - DNA, 25 bp, Homo sapien
tttgttccacgcttctatctgccag

SEQ ID NO: 2495065 - DNA, 25 bp, Homo sapien
taaggaggctatcataggaggcaat

SEQ ID NO: 2495066 - DNA, 25 bp, Homo sapien
catggtttgttaggatactcctgcc

SEQ ID NO: 2495067 - DNA, 25 bp, Homo sapien
acttcagtgtccatagggttgttcc

SEQ ID NO: 2495068 - DNA, 25 bp, Homo sapien
caccaaagcttccagcgtcttgagg

SEQ ID NO: 2495069 - DNA, 25 bp, Homo sapien
tctcctacctcagcctcctgaatag

SEQ ID NO: 2495070 - DNA, 25 bp, Homo sapien
ccaccatgcctggctaattattttt

SEQ ID NO: 2495071 - DNA, 25 bp, Homo sapien
ctcccagtttctgggttcaggcagt

SEQ ID NO: 2495072 - DNA, 25 bp, Homo sapien
ctgggactacaagcatgtgccacca

SEQ ID NO: 2495073 - DNA, 25 bp, Homo sapien
gttgctctgaatataaacttcctgt

SEQ ID NO: 2495074 - DNA, 25 bp, Homo sapien
aattagcctttctgggatgagatgg

SEQ ID NO: 2495075 - DNA, 25 bp, Homo sapien
gatacctatttagcttatttgccca

SEQ ID NO: 2495076 - DNA, 25 bp, Homo sapien
gattgaggattgcaatccagtagca

SEQ ID NO: 2495077 - DNA, 25 bp, Homo sapien
gaactgttctgctcttacaagaaga

SEQ ID NO: 2495078 - DNA, 25 bp, Homo sapien
aagcttttattctagtggagggcct

SEQ ID NO: 2495079 - DNA, 25 bp, Homo sapien
taaggcatatagagacttactgaac

SEQ ID NO: 2495080 - DNA, 25 bp, Homo sapien
gactacttactgtatgctagccact

SEQ ID NO: 2495081 - DNA, 25 bp, Homo sapien
cctgaggcatttgttataaaggtct

SEQ ID NO: 2495082 - DNA, 25 bp, Homo sapien
tatttggaaggattatcaatgcagt

SEQ ID NO: 2495083 - DNA, 25 bp, Homo sapien
tccatttactcccaagtgctctaga

SEQ ID NO: 2495084 - DNA, 25 bp, Homo sapien
ggtctgtacagctgatactaattac

SEQ ID NO: 2495085 - DNA, 25 bp, Homo sapien
caaccataataagtggattggcagt

SEQ ID NO: 2495086 - DNA, 25 bp, Homo sapien
cattaactgaataaacgacttgatt

SEQ ID NO: 2495087 - DNA, 25 bp, Homo sapien
catgagattatgttcaaccctgtac

SEQ ID NO: 2495088 - DNA, 25 bp, Homo sapien
caaaatttaacatggcttcagtatg

SEQ ID NO: 2495089 - DNA, 25 bp, Homo sapien
gatccaggaacctcactgtatgcaa

SEQ ID NO: 2495090 - DNA, 25 bp, Homo sapien
tgtatgcaaagtcttgtggatgtac

SEQ ID NO: 2495091 - DNA, 25 bp, Homo sapien
tcactgtatgcaaagtcttgtggat

SEQ ID NO: 2495092 - DNA, 25 bp, Homo sapien
atccaggaacctcactgtatgcaaa

SEQ ID NO: 2495093 - DNA, 25 bp, Homo sapien
tcagaattagacataaagaagtaag

SEQ ID NO: 2495094 - DNA, 25 bp, Homo sapien
ccctcagaattagacataaagaagt

SEQ ID NO: 2495095 - DNA, 25 bp, Homo sapien
tacccctcagaattagacataaaga

SEQ ID NO: 2495096 - DNA, 25 bp, Homo sapien
ctctacccctcagaattagacataa

SEQ ID NO: 2495097 - DNA, 25 bp, Homo sapien
ctttctcccgaacacatttctttgc

SEQ ID NO: 2495098 - DNA, 25 bp, Homo sapien
gcactgctgaagcctagatttctct

SEQ ID NO: 2495099 - DNA, 25 bp, Homo sapien
tctttctcccgaacacatttctttg

SEQ ID NO: 2495100 - DNA, 25 bp, Homo sapien
cctagatttctcttcacgacattgc

SEQ ID NO: 2495101 - DNA, 25 bp, Homo sapien
tctcactaggtccataatgagagga

SEQ ID NO: 2495102 - DNA, 25 bp, Homo sapien
cactaggtccataatgagaggaaaa

SEQ ID NO: 2495103 - DNA, 25 bp, Homo sapien
cagatgtctctcactaggtccataa

SEQ ID NO: 2495104 - DNA, 25 bp, Homo sapien
tgtctctcactaggtccataatgag

SEQ ID NO: 2495105 - DNA, 25 bp, Homo sapien
ttgggctataccgagggccagttaa

SEQ ID NO: 2495106 - DNA, 25 bp, Homo sapien
tcctgctttgtaactggtgcacata

SEQ ID NO: 2495107 - DNA, 25 bp, Homo sapien
gccagttaagatgttagaggcccca

SEQ ID NO: 2495108 - DNA, 25 bp, Homo sapien
tgctctcccttaggagaagtccggt

SEQ ID NO: 2495109 - DNA, 25 bp, Homo sapien
catttggaatagcagtaaccgtagt

SEQ ID NO: 2495110 - DNA, 25 bp, Homo sapien
atttggaatagcagtaaccgtagtt

SEQ ID NO: 2495111 - DNA, 25 bp, Homo sapien
tggaatagcagtaaccgtagttttc

SEQ ID NO: 2495112 - DNA, 25 bp, Homo sapien
tgcaaacagcattctcataatccag

SEQ ID NO: 2495113 - DNA, 25 bp, Homo sapien
gcatctgtggttatggtgcctgcaa

SEQ ID NO: 2495114 - DNA, 25 bp, Homo sapien
cagatgtgggcagggtaatttgaaa

SEQ ID NO: 2495115 - DNA, 25 bp, Homo sapien
ctctttccaagaaggatgggtctgg

SEQ ID NO: 2495116 - DNA, 25 bp, Homo sapien
tgaagaacacattagatttgccact

SEQ ID NO: 2495117 - DNA, 25 bp, Homo sapien
tcaggattgattgaggcaaactttc

SEQ ID NO: 2495118 - DNA, 25 bp, Homo sapien
ttcacagacgctaatgaggccaatt

SEQ ID NO: 2495119 - DNA, 25 bp, Homo sapien
tagcgaacagctaacttcacagacg

SEQ ID NO: 2495120 - DNA, 25 bp, Homo sapien
atactccttgttccttgcaggtaca

SEQ ID NO: 2495121 - DNA, 25 bp, Homo sapien
gcaatatggcccgtacaagcactgt

SEQ ID NO: 2495122 - DNA, 25 bp, Homo sapien
ggtacagattggcaatatggcccgt

SEQ ID NO: 2495123 - DNA, 25 bp, Homo sapien
gatgagctacacaatatactccttg

SEQ ID NO: 2495124 - DNA, 25 bp, Homo sapien
ttcctcctggtccatccaagttttg

SEQ ID NO: 2495125 - DNA, 25 bp, Homo sapien
ctgagctaaacatgtctgagagaac

SEQ ID NO: 2495126 - DNA, 25 bp, Homo sapien
gctaaacatgtctgagagaacagtt

SEQ ID NO: 2495127 - DNA, 25 bp, Homo sapien
cctggtccatccaagttttgttgat

SEQ ID NO: 2495128 - DNA, 25 bp, Homo sapien
agttcgtgctgacacttctttcaca

SEQ ID NO: 2495129 - DNA, 25 bp, Homo sapien
tgaagttcgtgctgacacttctttc

SEQ ID NO: 2495130 - DNA, 25 bp, Homo sapien
ttcgtgctgacacttctttcacact

SEQ ID NO: 2495131 - DNA, 25 bp, Homo sapien
aagttcgtgctgacacttctttcac

SEQ ID NO: 2495132 - DNA, 25 bp, Homo sapien
tcagtttccaaacctcagaacttct

SEQ ID NO: 2495133 - DNA, 25 bp, Homo sapien
tcctctcctctaccatggaaactca

SEQ ID NO: 2495134 - DNA, 25 bp, Homo sapien
ccaaggcttccttgaagtttatgtg

SEQ ID NO: 2495135 - DNA, 25 bp, Homo sapien
cccaaggcttccttgaagtttatgt

SEQ ID NO: 2495136 - DNA, 25 bp, Homo sapien
caaggcttccttgaagtttatgtgt

SEQ ID NO: 2495137 - DNA, 25 bp, Homo sapien
aaggcttccttgaagtttatgtgta

SEQ ID NO: 2495138 - DNA, 25 bp, Homo sapien
tagggcatctgttcagcactgacat

SEQ ID NO: 2495139 - DNA, 25 bp, Homo sapien
tcactcaggactggtcgtgtctgct

SEQ ID NO: 2495140 - DNA, 25 bp, Homo sapien
aaagtaaccgtgattagccattcag

SEQ ID NO: 2495141 - DNA, 25 bp, Homo sapien
tatttcttagaggtctcactcagga

SEQ ID NO: 2495142 - DNA, 25 bp, Homo sapien
aactttctatatgacctgggtcctt

SEQ ID NO: 2495143 - DNA, 25 bp, Homo sapien
ctttgaactttctatatgacctggg

SEQ ID NO: 2495144 - DNA, 25 bp, Homo sapien
ttgaactttctatatgacctgggtc

SEQ ID NO: 2495145 - DNA, 25 bp, Homo sapien
tgaactttctatatgacctgggtcc

SEQ ID NO: 2495146 - DNA, 25 bp, Homo sapien
gagtttaggtttatgccaggggctc

SEQ ID NO: 2495147 - DNA, 25 bp, Homo sapien
gcattcagagaaatttgggtccaag

SEQ ID NO: 2495148 - DNA, 25 bp, Homo sapien
tatcctcttatttctgagtttaggt

SEQ ID NO: 2495149 - DNA, 25 bp, Homo sapien
tgcattcagagaaatttgggtccaa

SEQ ID NO: 2495150 - DNA, 25 bp, Homo sapien
gacttccctggtggacattcccatt

SEQ ID NO: 2495151 - DNA, 25 bp, Homo sapien
cattttcaatggtcccgaaacagag

SEQ ID NO: 2495152 - DNA, 25 bp, Homo sapien
ctctgaggagtcgtgaccatattcc

SEQ ID NO: 2495153 - DNA, 25 bp, Homo sapien
tattccgttgtccagtgcttgtagg

SEQ ID NO: 2495154 - DNA, 25 bp, Homo sapien
agagtggttgaaactcatttctgct

SEQ ID NO: 2495155 - DNA, 25 bp, Homo sapien
gcatttcccatattaaacggactaa

SEQ ID NO: 2495156 - DNA, 25 bp, Homo sapien
taaacggactaagtaggcctctgtc

SEQ ID NO: 2495157 - DNA, 25 bp, Homo sapien
catattaaacggactaagtaggcct

SEQ ID NO: 2495158 - DNA, 25 bp, Homo sapien
gactaagtaggcctctgtctcagtt

SEQ ID NO: 2495159 - DNA, 25 bp, Homo sapien
cctataacagcttgtctgaggcagg

SEQ ID NO: 2495160 - DNA, 25 bp, Homo sapien
ggatgacggttctcttcttgcagta

SEQ ID NO: 2495161 - DNA, 25 bp, Homo sapien
gaggcaggttcctctcaaagggatg

SEQ ID NO: 2495162 - DNA, 25 bp, Homo sapien
gttgattttgcctcccttgaatacc

SEQ ID NO: 2495163 - DNA, 25 bp, Homo sapien
tagacctaggctcgagtaaccttac

SEQ ID NO: 2495164 - DNA, 25 bp, Homo sapien
gaagtagacctaggctcgagtaacc

SEQ ID NO: 2495165 - DNA, 25 bp, Homo sapien
tgaagaagtagacctaggctcgagt

SEQ ID NO: 2495166 - DNA, 25 bp, Homo sapien
gaagaagtagacctaggctcgagta

SEQ ID NO: 2495167 - DNA, 25 bp, Homo sapien
ggataagcattctgtacagcgatca

SEQ ID NO: 2495168 - DNA, 25 bp, Homo sapien
taagcattctgtacagcgatcatac

SEQ ID NO: 2495169 - DNA, 25 bp, Homo sapien
gcattctgtacagcgatcataccac

SEQ ID NO: 2495170 - DNA, 25 bp, Homo sapien
gccaggataagcattctgtacagcg

SEQ ID NO: 2495171 - DNA, 25 bp, Homo sapien
gcttcaggccttgactgtatctgat

SEQ ID NO: 2495172 - DNA, 25 bp, Homo sapien
tgatttggaggtgaagggtatggct

SEQ ID NO: 2495173 - DNA, 25 bp, Homo sapien
gaggtgaagggtatggctttttgcc

SEQ ID NO: 2495174 - DNA, 25 bp, Homo sapien
agagcttcaggccttgactgtatct

SEQ ID NO: 2495175 - DNA, 25 bp, Homo sapien
ttttctaccagacagtctaggcttg

SEQ ID NO: 2495176 - DNA, 25 bp, Homo sapien
tttctaccagacagtctaggcttgt

SEQ ID NO: 2495177 - DNA, 25 bp, Homo sapien
attttctaccagacagtctaggctt

SEQ ID NO: 2495178 - DNA, 25 bp, Homo sapien
ggatcaagacgtagacattgttgag

SEQ ID NO: 2495179 - DNA, 25 bp, Homo sapien
atcaagacgtagacattgttgaggc

SEQ ID NO: 2495180 - DNA, 25 bp, Homo sapien
caggatcaagacgtagacattgttg

SEQ ID NO: 2495181 - DNA, 25 bp, Homo sapien
tccaggatcaagacgtagacattgt

SEQ ID NO: 2495182 - DNA, 25 bp, Homo sapien
cagtaacatggcttcttcttgacat

SEQ ID NO: 2495183 - DNA, 25 bp, Homo sapien
tctcagtaacatggcttcttcttga

SEQ ID NO: 2495184 - DNA, 25 bp, Homo sapien
tcttctcagtaacatggcttcttct

SEQ ID NO: 2495185 - DNA, 25 bp, Homo sapien
acatggcttcttcttgacatgacag

SEQ ID NO: 2495186 - DNA, 25 bp, Homo sapien
gaaatgtgcccatggcatatcaatg

SEQ ID NO: 2495187 - DNA, 25 bp, Homo sapien
ttggcgctcagaaatggttggagtc

SEQ ID NO: 2495188 - DNA, 25 bp, Homo sapien
actggatggcggcagtgacacctga

SEQ ID NO: 2495189 - DNA, 25 bp, Homo sapien
tcttcagcaggagtttaaaaggaca

SEQ ID NO: 2495190 - DNA, 25 bp, Homo sapien
catgactccgcagatgatatttgtc

SEQ ID NO: 2495191 - DNA, 25 bp, Homo sapien
caaggaccgtgtaccaaaagctgtc

SEQ ID NO: 2495192 - DNA, 25 bp, Homo sapien
gggaccacagattagctggatgcta

SEQ ID NO: 2495193 - DNA, 25 bp, Homo sapien
atgatatttgtctaggtgtcagcaa

SEQ ID NO: 2495194 - DNA, 25 bp, Homo sapien
cagctgtcgtaacagttgcttcagt

SEQ ID NO: 2495195 - DNA, 25 bp, Homo sapien
tacatgaatgcattggcaataagac

SEQ ID NO: 2495196 - DNA, 25 bp, Homo sapien
cttcttacatgaatgcattggcaat

SEQ ID NO: 2495197 - DNA, 25 bp, Homo sapien
tcttacatgaatgcattggcaataa

SEQ ID NO: 2495198 - DNA, 25 bp, Homo sapien
cctgatataaccaataatctgtgtt

SEQ ID NO: 2495199 - DNA, 25 bp, Homo sapien
ccaataatctgtgttttgcaaaaca

SEQ ID NO: 2495200 - DNA, 25 bp, Homo sapien
gatcctgatataaccaataatctgt

SEQ ID NO: 2495201 - DNA, 25 bp, Homo sapien
caataatctgtgttttgcaaaacat

SEQ ID NO: 2495202 - DNA, 25 bp, Homo sapien
cacgaactcttgatgatgctggaga

SEQ ID NO: 2495203 - DNA, 25 bp, Homo sapien
ctggagaatcaagcaccctctggca

SEQ ID NO: 2495204 - DNA, 25 bp, Homo sapien
ccctctggcagaagcgacaaatata

SEQ ID NO: 2495205 - DNA, 25 bp, Homo sapien
gcgacaaatatagaaaccatcatgt

SEQ ID NO: 2495206 - DNA, 25 bp, Homo sapien
ctcttgctttggttagttctaatac

SEQ ID NO: 2495207 - DNA, 25 bp, Homo sapien
tgttattaagtgttggaaaagtcat

SEQ ID NO: 2495208 - DNA, 25 bp, Homo sapien
cctcttgctttggttagttctaata

SEQ ID NO: 2495209 - DNA, 25 bp, Homo sapien
cttgctttggttagttctaatactt

SEQ ID NO: 2495210 - DNA, 25 bp, Homo sapien
cagcacaattacctggagatgcatc

SEQ ID NO: 2495211 - DNA, 25 bp, Homo sapien
aactgctgggatgtatggtaactcc

SEQ ID NO: 2495212 - DNA, 25 bp, Homo sapien
gcaatgcatgagtgattcgattcct

SEQ ID NO: 2495213 - DNA, 25 bp, Homo sapien
cctgagacggttccaatttttggct

SEQ ID NO: 2495214 - DNA, 25 bp, Homo sapien
tgcttcagttacaccacagctgagg

SEQ ID NO: 2495215 - DNA, 25 bp, Homo sapien
tgtgagtaggttccccaaggttcga

SEQ ID NO: 2495216 - DNA, 25 bp, Homo sapien
gagaaagctgcctcgagcagatgga

SEQ ID NO: 2495217 - DNA, 25 bp, Homo sapien
tatgagcatttaggcccaacagtcc

SEQ ID NO: 2495218 - DNA, 25 bp, Homo sapien
tgccaacatgatgcactccaggtaa

SEQ ID NO: 2495219 - DNA, 25 bp, Homo sapien
aacttcaggctatggtgtttaaagg

SEQ ID NO: 2495220 - DNA, 25 bp, Homo sapien
aaagcaccaggctatctaatacagg

SEQ ID NO: 2495221 - DNA, 25 bp, Homo sapien
tccacacctgactttaggtaatggg

SEQ ID NO: 2495222 - DNA, 25 bp, Homo sapien
catgaacagtatggtggactcctga

SEQ ID NO: 2495223 - DNA, 25 bp, Homo sapien
gaatatacttctcccagagacccga

SEQ ID NO: 2495224 - DNA, 25 bp, Homo sapien
agttcaggagaagacgttacactcc

SEQ ID NO: 2495225 - DNA, 25 bp, Homo sapien
gagacccgattcaagttttgccagt

SEQ ID NO: 2495226 - DNA, 25 bp, Homo sapien
aagctctcttttatagctgctagtg

SEQ ID NO: 2495227 - DNA, 25 bp, Homo sapien
ttatagctgctagtggaccttcttt

SEQ ID NO: 2495228 - DNA, 25 bp, Homo sapien
ttattgttcattagtaagctctctt

SEQ ID NO: 2495229 - DNA, 25 bp, Homo sapien
tgctagtggaccttcttttgctgct

SEQ ID NO: 2495230 - DNA, 25 bp, Homo sapien
gagggtatagctcctgctctgaaca

SEQ ID NO: 2495231 - DNA, 25 bp, Homo sapien
caaaggctggtgaaatgagactgag

SEQ ID NO: 2495232 - DNA, 25 bp, Homo sapien
ggaaactcctatagaacattgaaca

SEQ ID NO: 2495233 - DNA, 25 bp, Homo sapien
gactgaggtcaagactacaattcgt

SEQ ID NO: 2495234 - DNA, 25 bp, Homo sapien
ttgtacatagttcagtccccattgc

SEQ ID NO: 2495235 - DNA, 25 bp, Homo sapien
cctagttggatgttagcgcttctaa

SEQ ID NO: 2495236 - DNA, 25 bp, Homo sapien
tccactcttaatagggcaggaggag

SEQ ID NO: 2495237 - DNA, 25 bp, Homo sapien
aagccgtttctctagtgtgtgtgca

SEQ ID NO: 2495238 - DNA, 25 bp, Homo sapien
tgaatatcgatttttgtgtagactc

SEQ ID NO: 2495239 - DNA, 25 bp, Homo sapien
tgtgtagactccaatatttctaatc

SEQ ID NO: 2495240 - DNA, 25 bp, Homo sapien
tatttctaatctatgagaaactgtt

SEQ ID NO: 2495241 - DNA, 25 bp, Homo sapien
ataagtttagtgatgatcttgtaaa

SEQ ID NO: 2495242 - DNA, 25 bp, Homo sapien
gactgtatctttgaccagaatcctc

SEQ ID NO: 2495243 - DNA, 25 bp, Homo sapien
gcgatatgacctcaatactagcgat

SEQ ID NO: 2495244 - DNA, 25 bp, Homo sapien
ggactagaagatacatgtggatgaa

SEQ ID NO: 2495245 - DNA, 25 bp, Homo sapien
gatctagtctctaacagaaggtgtg

SEQ ID NO: 2495246 - DNA, 25 bp, Homo sapien
aatttgcgctgtcaaataagcctgg

SEQ ID NO: 2495247 - DNA, 25 bp, Homo sapien
tagaccaggcatgtttgcttcagtg

SEQ ID NO: 2495248 - DNA, 25 bp, Homo sapien
taacaaacacgtagcacttaccatg

SEQ ID NO: 2495249 - DNA, 25 bp, Homo sapien
tctccaaggagagtatagaccaggc

SEQ ID NO: 2495250 - DNA, 25 bp, Homo sapien
tgatggacaccttaaataccctgat

SEQ ID NO: 2495251 - DNA, 25 bp, Homo sapien
tgggtcttagactccccgggatgat

SEQ ID NO: 2495252 - DNA, 25 bp, Homo sapien
catatggacagcaagagtacagaca

SEQ ID NO: 2495253 - DNA, 25 bp, Homo sapien
gataacagactgagaaccgtgagtg

SEQ ID NO: 2495254 - DNA, 25 bp, Homo sapien
catggaatgtattcgttcaccgttc

SEQ ID NO: 2495255 - DNA, 25 bp, Homo sapien
tgttacactgtagacattgtgtgtt

SEQ ID NO: 2495256 - DNA, 25 bp, Homo sapien
ggttttggtcctgaatgttacactg

SEQ ID NO: 2495257 - DNA, 25 bp, Homo sapien
tcaccgttctaataagcccagcttt

SEQ ID NO: 2495258 - DNA, 25 bp, Homo sapien
gtcatctccggagggcagagcaaga

SEQ ID NO: 2495259 - DNA, 25 bp, Homo sapien
gacggatctccgtcgtagcttcgcg

SEQ ID NO: 2495260 - DNA, 25 bp, Homo sapien
caagactggaatgagggagtctcgc

SEQ ID NO: 2495261 - DNA, 25 bp, Homo sapien
cgccgcttaaagtgcccagggtgga

SEQ ID NO: 2495262 - DNA, 25 bp, Homo sapien
tgtatggctcgggtgcctcccgtgc

SEQ ID NO: 2495263 - DNA, 25 bp, Homo sapien
gagcacattccacccagaggaccga

SEQ ID NO: 2495264 - DNA, 25 bp, Homo sapien
ccagctgcagggtgtatggctcggg

SEQ ID NO: 2495265 - DNA, 25 bp, Homo sapien
cgtgctgtggccgccgtcactgctg

SEQ ID NO: 2495266 - DNA, 25 bp, Homo sapien
aagctgccgtcgcttgtgtccagaa

SEQ ID NO: 2495267 - DNA, 25 bp, Homo sapien
gctttccaagttgggcgcgtcccag

SEQ ID NO: 2495268 - DNA, 25 bp, Homo sapien
tctccctagccgagaaccggttgga

SEQ ID NO: 2495269 - DNA, 25 bp, Homo sapien
cgcgctgggcaagcaagacgctttc

SEQ ID NO: 2495270 - DNA, 25 bp, Homo sapien
tgaataggacactggacgcgcagag

SEQ ID NO: 2495271 - DNA, 25 bp, Homo sapien
aatctgatgctcaccgccttcatgg

SEQ ID NO: 2495272 - DNA, 25 bp, Homo sapien
gaagccgctgcactacaatctgatg

SEQ ID NO: 2495273 - DNA, 25 bp, Homo sapien
tcgtggcattgctcgcggtcacaat

SEQ ID NO: 2495274 - DNA, 25 bp, Homo sapien
tcttgtgatatagcagcaaacaaag

SEQ ID NO: 2495275 - DNA, 25 bp, Homo sapien
acaaagcagaaaaggttcctgctcc

SEQ ID NO: 2495276 - DNA, 25 bp, Homo sapien
cttatattctaatgaggtgagagaa

SEQ ID NO: 2495277 - DNA, 25 bp, Homo sapien
tattctaatgaggtgagagaagcaa

SEQ ID NO: 2495278 - DNA, 25 bp, Homo sapien
atccagagggtagcctaggactgtg

SEQ ID NO: 2495279 - DNA, 25 bp, Homo sapien
ggtggtgactcacttacatgaggca

SEQ ID NO: 2495280 - DNA, 25 bp, Homo sapien
tgatcaatcctatagacatttggag

SEQ ID NO: 2495281 - DNA, 25 bp, Homo sapien
cagtttcacttaatccagaccgctt

SEQ ID NO: 2495282 - DNA, 25 bp, Homo sapien
tatgcttcaagctctcaccaacagc

SEQ ID NO: 2495283 - DNA, 25 bp, Homo sapien
gcctggaaatctccatagctagaaa

SEQ ID NO: 2495284 - DNA, 25 bp, Homo sapien
catttttaatgctcactgcggagag

SEQ ID NO: 2495285 - DNA, 25 bp, Homo sapien
caaggcttttgatatgacagtgccc

SEQ ID NO: 2495286 - DNA, 25 bp, Homo sapien
cacttttaaggacatccgcaggaag

SEQ ID NO: 2495287 - DNA, 25 bp, Homo sapien
tagctaggatagctaggtagggcct

SEQ ID NO: 2495288 - DNA, 25 bp, Homo sapien
gggaactgaatccagtgcagactct

SEQ ID NO: 2495289 - DNA, 25 bp, Homo sapien
agaaatgggatggttcctgtgagca

SEQ ID NO: 2495290 - DNA, 25 bp, Homo sapien
ggctgccatttgggtctagctcagc

SEQ ID NO: 2495291 - DNA, 25 bp, Homo sapien
gccatttgggtctagctcagctttc

SEQ ID NO: 2495292 - DNA, 25 bp, Homo sapien
tgccatttgggtctagctcagcttt

SEQ ID NO: 2495293 - DNA, 25 bp, Homo sapien
ctgccatttgggtctagctcagctt

SEQ ID NO: 2495294 - DNA, 25 bp, Homo sapien
ctaatggtaactatgaatccaggag

SEQ ID NO: 2495295 - DNA, 25 bp, Homo sapien
caagaatcgtttgcctcttcagtaa

SEQ ID NO: 2495296 - DNA, 25 bp, Homo sapien
actatgaatccaggaggattttggc

SEQ ID NO: 2495297 - DNA, 25 bp, Homo sapien
gattttggctacaagaatcgtttgc

SEQ ID NO: 2495298 - DNA, 25 bp, Homo sapien
tcctgtattgctgcccattatgcag

SEQ ID NO: 2495299 - DNA, 25 bp, Homo sapien
ttcctgtattgctgcccattatgca

SEQ ID NO: 2495300 - DNA, 25 bp, Homo sapien
tgtattgctgcccattatgcagcat

SEQ ID NO: 2495301 - DNA, 25 bp, Homo sapien
cctgtattgctgcccattatgcagc

SEQ ID NO: 2495302 - DNA, 25 bp, Homo sapien
gcccgaattcctgagaaagtagaat

SEQ ID NO: 2495303 - DNA, 25 bp, Homo sapien
cttgtggtagctcatataggaccgc

SEQ ID NO: 2495304 - DNA, 25 bp, Homo sapien
taaagatgaagatgtttgggcctaa

SEQ ID NO: 2495305 - DNA, 25 bp, Homo sapien
taggaccgcatttaatacaagcccg

SEQ ID NO: 2495306 - DNA, 25 bp, Homo sapien
catttaggtggtcatgcctctgaag

SEQ ID NO: 2495307 - DNA, 25 bp, Homo sapien
tttaggtggtcatgcctctgaaggg

SEQ ID NO: 2495308 - DNA, 25 bp, Homo sapien
tttgtccttcccacaactccattta

SEQ ID NO: 2495309 - DNA, 25 bp, Homo sapien
tccatttaggtggtcatgcctctga

SEQ ID NO: 2495310 - DNA, 25 bp, Homo sapien
tattgcctccatgaatacaggaagg

SEQ ID NO: 2495311 - DNA, 25 bp, Homo sapien
tgataccatagtccctgatatttac

SEQ ID NO: 2495312 - DNA, 25 bp, Homo sapien
caatttaaaactgacaggaatctta

SEQ ID NO: 2495313 - DNA, 25 bp, Homo sapien
gaaccttggtctccctgataccata

SEQ ID NO: 2495314 - DNA, 25 bp, Homo sapien
gaaggatagtctgacttaggagatg

SEQ ID NO: 2495315 - DNA, 25 bp, Homo sapien
cacctttgaaggatagtctgactta

SEQ ID NO: 2495316 - DNA, 25 bp, Homo sapien
tgaaggatagtctgacttaggagat

SEQ ID NO: 2495317 - DNA, 25 bp, Homo sapien
ttagtactctttggagcaattagat

SEQ ID NO: 2495318 - DNA, 25 bp, Homo sapien
tctttggagcaattagatgcaacag

SEQ ID NO: 2495319 - DNA, 25 bp, Homo sapien
tactctttggagcaattagatgcaa

SEQ ID NO: 2495320 - DNA, 25 bp, Homo sapien
tggagcaattagatgcaacagtgaa

SEQ ID NO: 2495321 - DNA, 25 bp, Homo sapien
cacttcgctgcttgagttttagaaa

SEQ ID NO: 2495322 - DNA, 25 bp, Homo sapien
tagaaaggtccggttgctccagctt

SEQ ID NO: 2495323 - DNA, 25 bp, Homo sapien
acgaagcccacttcgctgcttgagt

SEQ ID NO: 2495324 - DNA, 25 bp, Homo sapien
ctgcttgagttttagaaaggtccgg

SEQ ID NO: 2495325 - DNA, 25 bp, Homo sapien
gctcctgtagttgttcttttcaggc

SEQ ID NO: 2495326 - DNA, 25 bp, Homo sapien
tggcagagacaagtctcaggagtgt

SEQ ID NO: 2495327 - DNA, 25 bp, Homo sapien
tttcaggctgggatgagctgcatgg

SEQ ID NO: 2495328 - DNA, 25 bp, Homo sapien
gtgtcagctgacagaggtcttttcc

SEQ ID NO: 2495329 - DNA, 25 bp, Homo sapien
ccttctgtggacgttgaggcctgtt

SEQ ID NO: 2495330 - DNA, 25 bp, Homo sapien
gggatcctcgacaaagagttgatga

SEQ ID NO: 2495331 - DNA, 25 bp, Homo sapien
tggctccagcaaactaccgtttggg

SEQ ID NO: 2495332 - DNA, 25 bp, Homo sapien
tattggagcacaggattctgagttc

SEQ ID NO: 2495333 - DNA, 25 bp, Homo sapien
tgcatcttaagttctgttgcctaaa

SEQ ID NO: 2495334 - DNA, 25 bp, Homo sapien
tgttgcctaaataatctccctttgt

SEQ ID NO: 2495335 - DNA, 25 bp, Homo sapien
tcaatgcatcttaagttctgttgcc

SEQ ID NO: 2495336 - DNA, 25 bp, Homo sapien
aatctccctttgtcgttttcaatca

SEQ ID NO: 2495337 - DNA, 25 bp, Homo sapien
gggtggtgccataagcatatttttc

SEQ ID NO: 2495338 - DNA, 25 bp, Homo sapien
ttttgtgttggttactacagtgatt

SEQ ID NO: 2495339 - DNA, 25 bp, Homo sapien
tagctcattgctatgatgtattacc

SEQ ID NO: 2495340 - DNA, 25 bp, Homo sapien
tatgatgtattaccaccagggtggt

SEQ ID NO: 2495341 - DNA, 25 bp, Homo sapien
ttatgggggctcagagtggagtgga

SEQ ID NO: 2495342 - DNA, 25 bp, Homo sapien
tagttgaagatggttttcagcaggc

SEQ ID NO: 2495343 - DNA, 25 bp, Homo sapien
atggttttcagcaggcatttctgat

SEQ ID NO: 2495344 - DNA, 25 bp, Homo sapien
tggagggggtaggtcatagttgaag

SEQ ID NO: 2495345 - DNA, 25 bp, Homo sapien
gcattatctctgtctcattaactcc

SEQ ID NO: 2495346 - DNA, 25 bp, Homo sapien
tccctcaatattcaaacatttcttt

SEQ ID NO: 2495347 - DNA, 25 bp, Homo sapien
aaggctcactagctcgtaggacttt

SEQ ID NO: 2495348 - DNA, 25 bp, Homo sapien
ctttgctttgtaggacttgccaact

SEQ ID NO: 2495349 - DNA, 25 bp, Homo sapien
ttctcaatttcacgagcaaattcag

SEQ ID NO: 2495350 - DNA, 25 bp, Homo sapien
tcaatttcacgagcaaattcagaac

SEQ ID NO: 2495351 - DNA, 25 bp, Homo sapien
atttcacgagcaaattcagaacaca

SEQ ID NO: 2495352 - DNA, 25 bp, Homo sapien
aatttcacgagcaaattcagaacac

SEQ ID NO: 2495353 - DNA, 25 bp, Homo sapien
gttgatgtcctcaaaaaggtcaacc

SEQ ID NO: 2495354 - DNA, 25 bp, Homo sapien
gatgtcctcaaaaaggtcaaccaga

SEQ ID NO: 2495355 - DNA, 25 bp, Homo sapien
accagataggtctcacttcctgcaa

SEQ ID NO: 2495356 - DNA, 25 bp, Homo sapien
agataggtctcacttcctgcaaagc

SEQ ID NO: 2495357 - DNA, 25 bp, Homo sapien
gcaggtggtctgctttatataagcc

SEQ ID NO: 2495358 - DNA, 25 bp, Homo sapien
caggtggtctgctttatataagcca

SEQ ID NO: 2495359 - DNA, 25 bp, Homo sapien
atttgcaggtggtctgctttatata

SEQ ID NO: 2495360 - DNA, 25 bp, Homo sapien
ttgcaggtggtctgctttatataag

SEQ ID NO: 2495361 - DNA, 25 bp, Homo sapien
cataggtgtatttatcccatactca

SEQ ID NO: 2495362 - DNA, 25 bp, Homo sapien
tatagatgaagatgaactgtggaat

SEQ ID NO: 2495363 - DNA, 25 bp, Homo sapien
tctccagatagcttctaagacgtct

SEQ ID NO: 2495364 - DNA, 25 bp, Homo sapien
aaatattgccctgttcataggtgta

SEQ ID NO: 2495365 - DNA, 25 bp, Homo sapien
aagctagatttccatatgtcaaaga

SEQ ID NO: 2495366 - DNA, 25 bp, Homo sapien
caacgatatcttggtgtgatgcacc

SEQ ID NO: 2495367 - DNA, 25 bp, Homo sapien
caagaagacacgatgagaaaaagat

SEQ ID NO: 2495368 - DNA, 25 bp, Homo sapien
gactcttgtcttacaccatccatag

SEQ ID NO: 2495369 - DNA, 25 bp, Homo sapien
tggccaatccttgtgtccacaggga

SEQ ID NO: 2495370 - DNA, 25 bp, Homo sapien
ttactggccaatccttgtgtccaca

SEQ ID NO: 2495371 - DNA, 25 bp, Homo sapien
tccacagggatggggtattctgact

SEQ ID NO: 2495372 - DNA, 25 bp, Homo sapien
gtcagtgaaggtcatgagctcatcc

SEQ ID NO: 2495373 - DNA, 25 bp, Homo sapien
ttaaagtgtaatggaagcaggaaaa

SEQ ID NO: 2495374 - DNA, 25 bp, Homo sapien
tgtccatagacaggaaggactggaa

SEQ ID NO: 2495375 - DNA, 25 bp, Homo sapien
aggactggaatagatggattgagac

SEQ ID NO: 2495376 - DNA, 25 bp, Homo sapien
gaatagatggattgagacagtctct

SEQ ID NO: 2495377 - DNA, 25 bp, Homo sapien
agccatgtaacccttagcttgcaaa

SEQ ID NO: 2495378 - DNA, 25 bp, Homo sapien
gggtcagagccatgtaacccttagc

SEQ ID NO: 2495379 - DNA, 25 bp, Homo sapien
ctttcacggctttcagaaatacttc

SEQ ID NO: 2495380 - DNA, 25 bp, Homo sapien
tgagattctgctttcacggctttca

SEQ ID NO: 2495381 - DNA, 25 bp, Homo sapien
gtctgacggaccattgatctgcccc

SEQ ID NO: 2495382 - DNA, 25 bp, Homo sapien
tccacatcccctgatgcatttgtca

SEQ ID NO: 2495383 - DNA, 25 bp, Homo sapien
gctcacagtctgacggaccattgat

SEQ ID NO: 2495384 - DNA, 25 bp, Homo sapien
tttgtcagctcacagtctgacggac

SEQ ID NO: 2495385 - DNA, 25 bp, Homo sapien
tgggcttgctgaatacactctaata

SEQ ID NO: 2495386 - DNA, 25 bp, Homo sapien
tgacataaaaacttgggctgattct

SEQ ID NO: 2495387 - DNA, 25 bp, Homo sapien
tacaccactgtcagaagagtttgct

SEQ ID NO: 2495388 - DNA, 25 bp, Homo sapien
tgattctgctcgtgatacaccactg

SEQ ID NO: 2495389 - DNA, 25 bp, Homo sapien
tttgagttttgaaattctccaggga

SEQ ID NO: 2495390 - DNA, 25 bp, Homo sapien
tagttccctggacgatatgtttttg

SEQ ID NO: 2495391 - DNA, 25 bp, Homo sapien
ttgagttttgaaattctccagggac

SEQ ID NO: 2495392 - DNA, 25 bp, Homo sapien
ccctggacgatatgtttttgagttt

SEQ ID NO: 2495393 - DNA, 25 bp, Homo sapien
acagcatccacactgaagttgtgac

SEQ ID NO: 2495394 - DNA, 25 bp, Homo sapien
tcctggaatcttgcttcaataatga

SEQ ID NO: 2495395 - DNA, 25 bp, Homo sapien
gtcttcagtttctatctccactggg

SEQ ID NO: 2495396 - DNA, 25 bp, Homo sapien
gtttctatctccactgggtcatctt

SEQ ID NO: 2495397 - DNA, 25 bp, Homo sapien
ctttcctggaatcttgcttcaataa

SEQ ID NO: 2495398 - DNA, 25 bp, Homo sapien
ctaaattctgtatatctgctaatgt

SEQ ID NO: 2495399 - DNA, 25 bp, Homo sapien
tcttctaaattctgtatatctgcta

SEQ ID NO: 2495400 - DNA, 25 bp, Homo sapien
ctttcttctaaattctgtatatctg

SEQ ID NO: 2495401 - DNA, 25 bp, Homo sapien
cagcactttcttctaaattctgtat

SEQ ID NO: 2495402 - DNA, 25 bp, Homo sapien
tcttagttatttccatgctgttatg

SEQ ID NO: 2495403 - DNA, 25 bp, Homo sapien
taacttcttagttatttccatgctg

SEQ ID NO: 2495404 - DNA, 25 bp, Homo sapien
tagttatttccatgctgttatgcat

SEQ ID NO: 2495405 - DNA, 25 bp, Homo sapien
tcttctaacttcttagttatttcca

SEQ ID NO: 2495406 - DNA, 25 bp, Homo sapien
cgttacgggtttgaaatgatggtga

SEQ ID NO: 2495407 - DNA, 25 bp, Homo sapien
gagaaagcaagtaagtagtgatagc

SEQ ID NO: 2495408 - DNA, 25 bp, Homo sapien
gagccagaggatatagaaggactga

SEQ ID NO: 2495409 - DNA, 25 bp, Homo sapien
ggcagtcgttcatgtgaatcgttac

SEQ ID NO: 2495410 - DNA, 25 bp, Homo sapien
taatgtttgctacaggattgtgccc

SEQ ID NO: 2495411 - DNA, 25 bp, Homo sapien
tactgctgtctaccctaatgtttgc

SEQ ID NO: 2495412 - DNA, 25 bp, Homo sapien
ggaggagaagcctttgtgtcatccg

SEQ ID NO: 2495413 - DNA, 25 bp, Homo sapien
gtgtcatccgtttattactgctgtc

SEQ ID NO: 2495414 - DNA, 25 bp, Homo sapien
tactaaagtgttttctatacaaaga

SEQ ID NO: 2495415 - DNA, 25 bp, Homo sapien
ggatactaaagtgttttctatacaa

SEQ ID NO: 2495416 - DNA, 25 bp, Homo sapien
gaggatactaaagtgttttctatac

SEQ ID NO: 2495417 - DNA, 25 bp, Homo sapien
agaggatactaaagtgttttctata

SEQ ID NO: 2495418 - DNA, 25 bp, Homo sapien
tagcattgagggattttaactctaa

SEQ ID NO: 2495419 - DNA, 25 bp, Homo sapien
caatagcattgagggattttaactc

SEQ ID NO: 2495420 - DNA, 25 bp, Homo sapien
gcattgagggattttaactctaatt

SEQ ID NO: 2495421 - DNA, 25 bp, Homo sapien
tgcaatagcattgagggattttaac

SEQ ID NO: 2495422 - DNA, 25 bp, Homo sapien
gtgagagaagatcaactgggaaatc

SEQ ID NO: 2495423 - DNA, 25 bp, Homo sapien
ttttctcatgtaagcatagtccgtg

SEQ ID NO: 2495424 - DNA, 25 bp, Homo sapien
taagcatagtccgtgtagtgagaga

SEQ ID NO: 2495425 - DNA, 25 bp, Homo sapien
tcatcttgaaagaccacgtggcaca

SEQ ID NO: 2495426 - DNA, 25 bp, Homo sapien
agaggactgctgctgggtagcacag

SEQ ID NO: 2495427 - DNA, 25 bp, Homo sapien
tttcactttcccgagaggactgctg

SEQ ID NO: 2495428 - DNA, 25 bp, Homo sapien
tacatttcactttcccgagaggact

SEQ ID NO: 2495429 - DNA, 25 bp, Homo sapien
tcactttcccgagaggactgctgct

SEQ ID NO: 2495430 - DNA, 25 bp, Homo sapien
caccatgaccttgatatctgggaat

SEQ ID NO: 2495431 - DNA, 25 bp, Homo sapien
accatgaccttgatatctgggaatg

SEQ ID NO: 2495432 - DNA, 25 bp, Homo sapien
ctgggcttggtgcagcagaatccaa

SEQ ID NO: 2495433 - DNA, 25 bp, Homo sapien
ggtgcagcagaatccaaaaccccac

SEQ ID NO: 2495434 - DNA, 25 bp, Homo sapien
aggcaaagactacaccaaaatgcat

SEQ ID NO: 2495435 - DNA, 25 bp, Homo sapien
aagtagagttgtttcggcatggccc

SEQ ID NO: 2495436 - DNA, 25 bp, Homo sapien
cattgcctttagaccaataagtaga

SEQ ID NO: 2495437 - DNA, 25 bp, Homo sapien
cccattgcctttagaccaataagta

SEQ ID NO: 2495438 - DNA, 25 bp, Homo sapien
tcggcatggcccaagtaatgaaata

SEQ ID NO: 2495439 - DNA, 25 bp, Homo sapien
tatcaaatgcctacacccccattgt

SEQ ID NO: 2495440 - DNA, 25 bp, Homo sapien
cctacacccccattgtatccaggaa

SEQ ID NO: 2495441 - DNA, 25 bp, Homo sapien
cagtcttggttttgaaacgtgagga

SEQ ID NO: 2495442 - DNA, 25 bp, Homo sapien
aaaactcttcttatagcttccataa

SEQ ID NO: 2495443 - DNA, 25 bp, Homo sapien
tcccagtagccaacatccttgagcg

SEQ ID NO: 2495444 - DNA, 25 bp, Homo sapien
gattggttcaatagcacctaattgc

SEQ ID NO: 2495445 - DNA, 25 bp, Homo sapien
aatgtacaatgttctactggtatga

SEQ ID NO: 2495446 - DNA, 25 bp, Homo sapien
tttttgagtcctaagggtgattaca

SEQ ID NO: 2495447 - DNA, 25 bp, Homo sapien
catgccgtagtagatgaaggctttg

SEQ ID NO: 2495448 - DNA, 25 bp, Homo sapien
gcactgttcatctgcatgccgtagt

SEQ ID NO: 2495449 - DNA, 25 bp, Homo sapien
gatgaaggctttgggtggacccatt

SEQ ID NO: 2495450 - DNA, 25 bp, Homo sapien
ttgtcattctccatagcactgttca

SEQ ID NO: 2495451 - DNA, 25 bp, Homo sapien
gcaactttgaggataatatcgttgt

SEQ ID NO: 2495452 - DNA, 25 bp, Homo sapien
aatatcgttgtggtaatgtgctgac

SEQ ID NO: 2495453 - DNA, 25 bp, Homo sapien
aagtctctatggcttcataatgcct

SEQ ID NO: 2495454 - DNA, 25 bp, Homo sapien
tcttctgtttctatagaggtgaaag

SEQ ID NO: 2495455 - DNA, 25 bp, Homo sapien
gcagtaccctcaaagctcagggggg

SEQ ID NO: 2495456 - DNA, 25 bp, Homo sapien
ctcaggggggacgtggacttcaaat

SEQ ID NO: 2495457 - DNA, 25 bp, Homo sapien
gacgtggacttcaaatgccctctac

SEQ ID NO: 2495458 - DNA, 25 bp, Homo sapien
cagtaccctcaaagctcagggggga

SEQ ID NO: 2495459 - DNA, 25 bp, Homo sapien
caatttgaaaagacacgtctacctc

SEQ ID NO: 2495460 - DNA, 25 bp, Homo sapien
tgaaaagacacgtctacctcagtct

SEQ ID NO: 2495461 - DNA, 25 bp, Homo sapien
tcactgcttccaatatcaacagcca

SEQ ID NO: 2495462 - DNA, 25 bp, Homo sapien
tccaatatcaacagccaaggttttt

SEQ ID NO: 2495463 - DNA, 25 bp, Homo sapien
ttaattcttcgtacagtggagcaga

SEQ ID NO: 2495464 - DNA, 25 bp, Homo sapien
tctgcactgtcaggtctaagcaatt

SEQ ID NO: 2495465 - DNA, 25 bp, Homo sapien
ctgtcaggtctaagcaattaacttg

SEQ ID NO: 2495466 - DNA, 25 bp, Homo sapien
tgttctttctacaacccagtacacc

SEQ ID NO: 2495467 - DNA, 25 bp, Homo sapien
aagcaattaacttgcacagactggc

SEQ ID NO: 2495468 - DNA, 25 bp, Homo sapien
ctttaaataggactcagtcagctca

SEQ ID NO: 2495469 - DNA, 25 bp, Homo sapien
ccctaaggtgtctaaatataagcag

SEQ ID NO: 2495470 - DNA, 25 bp, Homo sapien
aatccctaaggtgtctaaatataag

SEQ ID NO: 2495471 - DNA, 25 bp, Homo sapien
tctctttaaataggactcagtcagc

SEQ ID NO: 2495472 - DNA, 25 bp, Homo sapien
cccctggtgtacactagctatggaa

SEQ ID NO: 2495473 - DNA, 25 bp, Homo sapien
tccaaaagataccaacagcattgag

SEQ ID NO: 2495474 - DNA, 25 bp, Homo sapien
tcagaagcctcagaatagactccaa

SEQ ID NO: 2495475 - DNA, 25 bp, Homo sapien
tcagctccctggatatctggcatca

SEQ ID NO: 2495476 - DNA, 25 bp, Homo sapien
cctttttgatcaccagcactaactt

SEQ ID NO: 2495477 - DNA, 25 bp, Homo sapien
ctctgatacctttttgatcaccagc

SEQ ID NO: 2495478 - DNA, 25 bp, Homo sapien
tgatacctttttgatcaccagcact

SEQ ID NO: 2495479 - DNA, 25 bp, Homo sapien
tttgatcaccagcactaactttcat

SEQ ID NO: 2495480 - DNA, 25 bp, Homo sapien
tcagttagggcacattgccggagga

SEQ ID NO: 2495481 - DNA, 25 bp, Homo sapien
aatcaccatcagttagggcacattg

SEQ ID NO: 2495482 - DNA, 25 bp, Homo sapien
ttgcattgaagtaccgtggagtgca

SEQ ID NO: 2495483 - DNA, 25 bp, Homo sapien
ccgtggagtgcagtatgaaaaatca

SEQ ID NO: 2495484 - DNA, 25 bp, Homo sapien
gcttattgtcaaacaccatcactat

SEQ ID NO: 2495485 - DNA, 25 bp, Homo sapien
cactatgaaggttgtcatgggtctc

SEQ ID NO: 2495486 - DNA, 25 bp, Homo sapien
ttgtcaaacaccatcactatgaagg

SEQ ID NO: 2495487 - DNA, 25 bp, Homo sapien
tgggtctcctaacttggcacatgag

SEQ ID NO: 2495488 - DNA, 25 bp, Homo sapien
tctgtggagatatgtcttaaactct

SEQ ID NO: 2495489 - DNA, 25 bp, Homo sapien
cttcagcagtcactaggacaatctt

SEQ ID NO: 2495490 - DNA, 25 bp, Homo sapien
cactaggacaatcttttgattccag

SEQ ID NO: 2495491 - DNA, 25 bp, Homo sapien
ggaatcttttgattcacaaaagaaa

SEQ ID NO: 2495492 - DNA, 25 bp, Homo sapien
gacaatcttttgattccaggtggaa

SEQ ID NO: 2495493 - DNA, 25 bp, Homo sapien
agattgcctgctcattgactggcaa

SEQ ID NO: 2495494 - DNA, 25 bp, Homo sapien
taatataaatagtaacctgaattgg

SEQ ID NO: 2495495 - DNA, 25 bp, Homo sapien
aatataaatagtaacctgaattggg

SEQ ID NO: 2495496 - DNA, 25 bp, Homo sapien
tgcctgctcattgactggcaagttg

SEQ ID NO: 2495497 - DNA, 25 bp, Homo sapien
cattacagttgcgagtgttctattg

SEQ ID NO: 2495498 - DNA, 25 bp, Homo sapien
tgttgactttcatatggttaccgta

SEQ ID NO: 2495499 - DNA, 25 bp, Homo sapien
tcttgcttggtactaacttcctgaa

SEQ ID NO: 2495500 - DNA, 25 bp, Homo sapien
tgttttccgaactttgacgatttga

SEQ ID NO: 2495501 - DNA, 25 bp, Homo sapien
tgtgaaattcaaacaagtgcatgat

SEQ ID NO: 2495502 - DNA, 25 bp, Homo sapien
gatgtccagaaatttgtactgatgt

SEQ ID NO: 2495503 - DNA, 25 bp, Homo sapien
catttctctgtgatcagcatgttct

SEQ ID NO: 2495504 - DNA, 25 bp, Homo sapien
caaacaagtgcatgatgtccagaaa

SEQ ID NO: 2495505 - DNA, 25 bp, Homo sapien
aactgtccaaacatgtatccagagg

SEQ ID NO: 2495506 - DNA, 25 bp, Homo sapien
gaaaggccactcatcctaaactgtc

SEQ ID NO: 2495507 - DNA, 25 bp, Homo sapien
acatattgtcctggtcagaaaggcc

SEQ ID NO: 2495508 - DNA, 25 bp, Homo sapien
caatgtttagttcttagcaatgagt

SEQ ID NO: 2495509 - DNA, 25 bp, Homo sapien
tcaacaatttcccaccgttctgaac

SEQ ID NO: 2495510 - DNA, 25 bp, Homo sapien
atttcccaccgttctgaacttctgg

SEQ ID NO: 2495511 - DNA, 25 bp, Homo sapien
caatttcccaccgttctgaacttct

SEQ ID NO: 2495512 - DNA, 25 bp, Homo sapien
ttctcaacaatttcccaccgttctg

SEQ ID NO: 2495513 - DNA, 25 bp, Homo sapien
catataaactaatgagacagaatag

SEQ ID NO: 2495514 - DNA, 25 bp, Homo sapien
gagtagatatgtgggactacatcaa

SEQ ID NO: 2495515 - DNA, 25 bp, Homo sapien
gaaaacatgcaaatagcctagaagt

SEQ ID NO: 2495516 - DNA, 25 bp, Homo sapien
gagtgaaacaccaacctatagaatt

SEQ ID NO: 2495517 - DNA, 25 bp, Homo sapien
aaccatcaggacaggcttgctgacc

SEQ ID NO: 2495518 - DNA, 25 bp, Homo sapien
catctgaaccatcaggacaggcttg

SEQ ID NO: 2495519 - DNA, 25 bp, Homo sapien
ccttgggagactggcccatctgaac

SEQ ID NO: 2495520 - DNA, 25 bp, Homo sapien
acagggatcccttgggagactggcc

SEQ ID NO: 2495521 - DNA, 25 bp, Homo sapien
tcccagtaccaccacttggttacat

SEQ ID NO: 2495522 - DNA, 25 bp, Homo sapien
ttatgctagtccaatattttggtca

SEQ ID NO: 2495523 - DNA, 25 bp, Homo sapien
ccaatattttggtcatgaaaattgt

SEQ ID NO: 2495524 - DNA, 25 bp, Homo sapien
tcccagtgtctgctgtgtatctttc

SEQ ID NO: 2495525 - DNA, 25 bp, Homo sapien
ggagtaatgtgtagaagcaactgaa

SEQ ID NO: 2495526 - DNA, 25 bp, Homo sapien
tgtctggaaaatcatctgagcaaat

SEQ ID NO: 2495527 - DNA, 25 bp, Homo sapien
atgatgaatcagtttgaatgtctgg

SEQ ID NO: 2495528 - DNA, 25 bp, Homo sapien
atgtctggaaaatcatctgagcaaa

SEQ ID NO: 2495529 - DNA, 25 bp, Homo sapien
tggaagatccagagagcagagggag

SEQ ID NO: 2495530 - DNA, 25 bp, Homo sapien
ccagagagcagagggagatagcatc

SEQ ID NO: 2495531 - DNA, 25 bp, Homo sapien
ctggaagatccagagagcagaggga

SEQ ID NO: 2495532 - DNA, 25 bp, Homo sapien
gatccagagagcagagggagatagc

SEQ ID NO: 2495533 - DNA, 25 bp, Homo sapien
accttgatttgtaattggggtccag

SEQ ID NO: 2495534 - DNA, 25 bp, Homo sapien
cttgacacaaaacaccacaagcttc

SEQ ID NO: 2495535 - DNA, 25 bp, Homo sapien
tttgcatttgactgcacttgacaca

SEQ ID NO: 2495536 - DNA, 25 bp, Homo sapien
acaagcttcttgaaaccttgatttg

SEQ ID NO: 2495537 - DNA, 25 bp, Homo sapien
ggcagtctaattccagaacgcaggt

SEQ ID NO: 2495538 - DNA, 25 bp, Homo sapien
gaactgtatctgtaaggtctccgta

SEQ ID NO: 2495539 - DNA, 25 bp, Homo sapien
taggcaggcataccctatgtgaaag

SEQ ID NO: 2495540 - DNA, 25 bp, Homo sapien
gagatgagctttaaacgccggcagt

SEQ ID NO: 2495541 - DNA, 25 bp, Homo sapien
tcattccaaattgttgatggagact

SEQ ID NO: 2495542 - DNA, 25 bp, Homo sapien
ttgatggagacttctagagttagat

SEQ ID NO: 2495543 - DNA, 25 bp, Homo sapien
caaattgttgatggagacttctaga

SEQ ID NO: 2495544 - DNA, 25 bp, Homo sapien
aaatcattccaaattgttgatggag

SEQ ID NO: 2495545 - DNA, 25 bp, Homo sapien
ctctacagatgaatgtgctttcccc

SEQ ID NO: 2495546 - DNA, 25 bp, Homo sapien
cttcactgcagtttgagaagctcag

SEQ ID NO: 2495547 - DNA, 25 bp, Homo sapien
tggagtttttctttgggtgcacaga

SEQ ID NO: 2495548 - DNA, 25 bp, Homo sapien
tacagatgaatgtgctttcccctgg

SEQ ID NO: 2495549 - DNA, 25 bp, Homo sapien
cagaagaaggcagttactgactgat

SEQ ID NO: 2495550 - DNA, 25 bp, Homo sapien
agaaggcagttactgactgatgttt

SEQ ID NO: 2495551 - DNA, 25 bp, Homo sapien
ccagaagaaggcagttactgactga

SEQ ID NO: 2495552 - DNA, 25 bp, Homo sapien
gaagaaggcagttactgactgatgt

SEQ ID NO: 2495553 - DNA, 25 bp, Homo sapien
tgcatagagcttacattggttttgt

SEQ ID NO: 2495554 - DNA, 25 bp, Homo sapien
tgcctgcatagagcttacattggtt

SEQ ID NO: 2495555 - DNA, 25 bp, Homo sapien
ctgcatagagcttacattggttttg

SEQ ID NO: 2495556 - DNA, 25 bp, Homo sapien
gcctgcatagagcttacattggttt

SEQ ID NO: 2495557 - DNA, 25 bp, Homo sapien
cctgagtttggtggagctcaagtaa

SEQ ID NO: 2495558 - DNA, 25 bp, Homo sapien
gctcaagtaagacggaggagactct

SEQ ID NO: 2495559 - DNA, 25 bp, Homo sapien
tttggtggagctcaagtaagacgga

SEQ ID NO: 2495560 - DNA, 25 bp, Homo sapien
gcacgcttcctgagtttggtggagc

SEQ ID NO: 2495561 - DNA, 25 bp, Homo sapien
gagacttttagggattattcagtcc

SEQ ID NO: 2495562 - DNA, 25 bp, Homo sapien
tcatagaattactagagacttttag

SEQ ID NO: 2495563 - DNA, 25 bp, Homo sapien
agggattattcagtcccagtgaaca

SEQ ID NO: 2495564 - DNA, 25 bp, Homo sapien
catagaattactagagacttttagg

SEQ ID NO: 2495565 - DNA, 25 bp, Homo sapien
tttgatgtctccacagtacttggtt

SEQ ID NO: 2495566 - DNA, 25 bp, Homo sapien
tgtctccacagtacttggttatggc

SEQ ID NO: 2495567 - DNA, 25 bp, Homo sapien
cttttgatgtctccacagtacttgg

SEQ ID NO: 2495568 - DNA, 25 bp, Homo sapien
atgtctccacagtacttggttatgg

SEQ ID NO: 2495569 - DNA, 25 bp, Homo sapien
ctatattcgtcgatacttggtcctt

SEQ ID NO: 2495570 - DNA, 25 bp, Homo sapien
atattcgtcgatacttggtccttac

SEQ ID NO: 2495571 - DNA, 25 bp, Homo sapien
tatattcgtcgatacttggtcctta

SEQ ID NO: 2495572 - DNA, 25 bp, Homo sapien
gctctaatccagagttggctgtact

SEQ ID NO: 2495573 - DNA, 25 bp, Homo sapien
cctgagctctaatccagagttggct

SEQ ID NO: 2495574 - DNA, 25 bp, Homo sapien
tttctccagcaatattatctcttat

SEQ ID NO: 2495575 - DNA, 25 bp, Homo sapien
ctctccctgagctctaatccagagt

SEQ ID NO: 2495576 - DNA, 25 bp, Homo sapien
tatgggcaccaaattcattaacctc

SEQ ID NO: 2495577 - DNA, 25 bp, Homo sapien
tgaatgtttgtcacctcagtatggg

SEQ ID NO: 2495578 - DNA, 25 bp, Homo sapien
tggcatcataatattcccagtcact

SEQ ID NO: 2495579 - DNA, 25 bp, Homo sapien
ttactcctcttacaaattccatttc

SEQ ID NO: 2495580 - DNA, 25 bp, Homo sapien
taaaccaaagtttctcagtggagcc

SEQ ID NO: 2495581 - DNA, 25 bp, Homo sapien
aaaccaaagtttctcagtggagcct

SEQ ID NO: 2495582 - DNA, 25 bp, Homo sapien
ctgaataaaccaaagtttctcagtg

SEQ ID NO: 2495583 - DNA, 25 bp, Homo sapien
gaataaaccaaagtttctcagtgga

SEQ ID NO: 2495584 - DNA, 25 bp, Homo sapien
tagaagaacaaggattatatgtttc

SEQ ID NO: 2495585 - DNA, 25 bp, Homo sapien
tcttgtttggagttagaagaacaag

SEQ ID NO: 2495586 - DNA, 25 bp, Homo sapien
tgtgttcctcattcggaacaaattg

SEQ ID NO: 2495587 - DNA, 25 bp, Homo sapien
gttcctcattcggaacaaattgaaa

SEQ ID NO: 2495588 - DNA, 25 bp, Homo sapien
gctttattgcatacacagctaccat

SEQ ID NO: 2495589 - DNA, 25 bp, Homo sapien
agctttattgcatacacagctacca

SEQ ID NO: 2495590 - DNA, 25 bp, Homo sapien
tagctttattgcatacacagctacc

SEQ ID NO: 2495591 - DNA, 25 bp, Homo sapien
tttagctttattgcatacacagcta

SEQ ID NO: 2495592 - DNA, 25 bp, Homo sapien
cagagaaattaggattgtgtgggtt

SEQ ID NO: 2495593 - DNA, 25 bp, Homo sapien
gattgtgtgggttgggcctccagaa

SEQ ID NO: 2495594 - DNA, 25 bp, Homo sapien
aattaggattgtgtgggttgggcct

SEQ ID NO: 2495595 - DNA, 25 bp, Homo sapien
gcagagaaattaggattgtgtgggt

SEQ ID NO: 2495596 - DNA, 25 bp, Homo sapien
aaccaccagtgccagagcacagcgg

SEQ ID NO: 2495597 - DNA, 25 bp, Homo sapien
agtgccagagcacagcggtgttcta

SEQ ID NO: 2495598 - DNA, 25 bp, Homo sapien
tcaatctgtgacacccttgggttta

SEQ ID NO: 2495599 - DNA, 25 bp, Homo sapien
caatctgtgacacccttgggtttaa

SEQ ID NO: 2495600 - DNA, 25 bp, Homo sapien
ggcaaagaaatccaacactctgagt

SEQ ID NO: 2495601 - DNA, 25 bp, Homo sapien
catggcattgagatggatcttagtc

SEQ ID NO: 2495602 - DNA, 25 bp, Homo sapien
tcaggataatcattgctagcatggc

SEQ ID NO: 2495603 - DNA, 25 bp, Homo sapien
gggagaattgccactgaatctcaag

SEQ ID NO: 2495604 - DNA, 25 bp, Homo sapien
gacaggagaggtaaaattgataggc

SEQ ID NO: 2495605 - DNA, 25 bp, Homo sapien
tgataggcgattactactgaaagaa

SEQ ID NO: 2495606 - DNA, 25 bp, Homo sapien
gaatgattgacagcaagacaatgca

SEQ ID NO: 2495607 - DNA, 25 bp, Homo sapien
taaaaatcacttgacaggagaggta

SEQ ID NO: 2495608 - DNA, 25 bp, Homo sapien
cttacaatcgcatctgggagacagt

SEQ ID NO: 2495609 - DNA, 25 bp, Homo sapien
tgtgcttacaatcgcatctgggaga

SEQ ID NO: 2495610 - DNA, 25 bp, Homo sapien
tgcttacaatcgcatctgggagaca

SEQ ID NO: 2495611 - DNA, 25 bp, Homo sapien
aaatgtgcttacaatcgcatctggg

SEQ ID NO: 2495612 - DNA, 25 bp, Homo sapien
gagtcagagtcatggctccaatatc

SEQ ID NO: 2495613 - DNA, 25 bp, Homo sapien
caaggtaatgcttcagaatgaccct

SEQ ID NO: 2495614 - DNA, 25 bp, Homo sapien
tgggcactccgattaagtctgttcc

SEQ ID NO: 2495615 - DNA, 25 bp, Homo sapien
tatatatgataaccacagcactgtg

SEQ ID NO: 2495616 - DNA, 25 bp, Homo sapien
tgccaaaccaagaagggattctctg

SEQ ID NO: 2495617 - DNA, 25 bp, Homo sapien
caaatcctggttatgggatgaagcc

SEQ ID NO: 2495618 - DNA, 25 bp, Homo sapien
gactccagttgcctcgaaatagttg

SEQ ID NO: 2495619 - DNA, 25 bp, Homo sapien
tatactgtccttcaacatctggctg

SEQ ID NO: 2495620 - DNA, 25 bp, Homo sapien
tcagggtgtttccacacaataagtt

SEQ ID NO: 2495621 - DNA, 25 bp, Homo sapien
ggtgtttccacacaataagttgaat

SEQ ID NO: 2495622 - DNA, 25 bp, Homo sapien
catttttatagatcaactggatgat

SEQ ID NO: 2495623 - DNA, 25 bp, Homo sapien
ttccacacaataagttgaatacatt

SEQ ID NO: 2495624 - DNA, 25 bp, Homo sapien
ataagggccgtcttgctcggtcatc

SEQ ID NO: 2495625 - DNA, 25 bp, Homo sapien
caagactgagggtctacatctgata

SEQ ID NO: 2495626 - DNA, 25 bp, Homo sapien
gtccaagactgagggtctacatctg

SEQ ID NO: 2495627 - DNA, 25 bp, Homo sapien
tctacatctgataagggccgtcttg

SEQ ID NO: 2495628 - DNA, 25 bp, Homo sapien
gcgtagcagtatccagtgagtcaca

SEQ ID NO: 2495629 - DNA, 25 bp, Homo sapien
gctttagttttacgaatcctgcagt

SEQ ID NO: 2495630 - DNA, 25 bp, Homo sapien
gcatagccacatgatgcaagagcgt

SEQ ID NO: 2495631 - DNA, 25 bp, Homo sapien
aacagctttagttttacgaatcctg

SEQ ID NO: 2495632 - DNA, 25 bp, Homo sapien
ctggtctctgaattactattctacc

SEQ ID NO: 2495633 - DNA, 25 bp, Homo sapien
ccctgtgatcttgggtatccttcac

SEQ ID NO: 2495634 - DNA, 25 bp, Homo sapien
tcacagttcaagtggattcccattt

SEQ ID NO: 2495635 - DNA, 25 bp, Homo sapien
cagacaccatcacaggagctgtttg

SEQ ID NO: 2495636 - DNA, 25 bp, Homo sapien
gacaccatcacaggagctgtttgct

SEQ ID NO: 2495637 - DNA, 25 bp, Homo sapien
tctagagaggatcctgtcccgctct

SEQ ID NO: 2495638 - DNA, 25 bp, Homo sapien
gatcaacattctagagaggatcctg

SEQ ID NO: 2495639 - DNA, 25 bp, Homo sapien
ggtcataagatcaacattctagaga

SEQ ID NO: 2495640 - DNA, 25 bp, Homo sapien
gatcctgtcccgctctcagaggaag

SEQ ID NO: 2495641 - DNA, 25 bp, Homo sapien
cccagaatctcatatttgagcaaac

SEQ ID NO: 2495642 - DNA, 25 bp, Homo sapien
cctgaggaaatttgttgccactaga

SEQ ID NO: 2495643 - DNA, 25 bp, Homo sapien
tatttgagcaaactaagctttatca

SEQ ID NO: 2495644 - DNA, 25 bp, Homo sapien
ctgtaccctgcccaatattggatat

SEQ ID NO: 2495645 - DNA, 25 bp, Homo sapien
cattcctgctagaactactccagaa

SEQ ID NO: 2495646 - DNA, 25 bp, Homo sapien
tccagaatattgagggaaggaagga

SEQ ID NO: 2495647 - DNA, 25 bp, Homo sapien
gctaaattctaccacctgtacaaag

SEQ ID NO: 2495648 - DNA, 25 bp, Homo sapien
gaactactccagaatattgagggaa

SEQ ID NO: 2495649 - DNA, 25 bp, Homo sapien
tcaatggttgcctagggacagagga

SEQ ID NO: 2495650 - DNA, 25 bp, Homo sapien
ggagaaactgcacagcccaataatc

SEQ ID NO: 2495651 - DNA, 25 bp, Homo sapien
gaggaaacatccaaaaaattgcatg

SEQ ID NO: 2495652 - DNA, 25 bp, Homo sapien
cttaagtgaaagctagcaaatgcaa

SEQ ID NO: 2495653 - DNA, 25 bp, Homo sapien
ttcttaatattgaaagatgccacca

SEQ ID NO: 2495654 - DNA, 25 bp, Homo sapien
tcttaatattgaaagatgccaccat

SEQ ID NO: 2495655 - DNA, 25 bp, Homo sapien
atactgtagcaggaaattataccag

SEQ ID NO: 2495656 - DNA, 25 bp, Homo sapien
gaccattataacgaaatactgtagc

SEQ ID NO: 2495657 - DNA, 25 bp, Homo sapien
taaataatgtgcattcttgaagagc

SEQ ID NO: 2495658 - DNA, 25 bp, Homo sapien
taactatggtcattataacatcagg

SEQ ID NO: 2495659 - DNA, 25 bp, Homo sapien
ctttgtgaaacttctgcttcagctg

SEQ ID NO: 2495660 - DNA, 25 bp, Homo sapien
cttaacctttgtgtggtcttattct

SEQ ID NO: 2495661 - DNA, 25 bp, Homo sapien
tcttaacctttgtgtggtcttattc

SEQ ID NO: 2495662 - DNA, 25 bp, Homo sapien
gaattcactcatgatcagtgtcaaa

SEQ ID NO: 2495663 - DNA, 25 bp, Homo sapien
ttcactcatgatcagtgtcaaatag

SEQ ID NO: 2495664 - DNA, 25 bp, Homo sapien
catgatcagtgtcaaatagaatatt

SEQ ID NO: 2495665 - DNA, 25 bp, Homo sapien
cactcatgatcagtgtcaaatagaa

SEQ ID NO: 2495666 - DNA, 25 bp, Homo sapien
tgatataaccaaacaccacctgttg

SEQ ID NO: 2495667 - DNA, 25 bp, Homo sapien
atataaccaaacaccacctgttggc

SEQ ID NO: 2495668 - DNA, 25 bp, Homo sapien
tataaccaaacaccacctgttggcc

SEQ ID NO: 2495669 - DNA, 25 bp, Homo sapien
gatataaccaaacaccacctgttgg

SEQ ID NO: 2495670 - DNA, 25 bp, Homo sapien
aaaccttttctcaccagggatgctc

SEQ ID NO: 2495671 - DNA, 25 bp, Homo sapien
accttttctcaccagggatgctcat

SEQ ID NO: 2495672 - DNA, 25 bp, Homo sapien
ccttgcagcaacagctcctcaggaa

SEQ ID NO: 2495673 - DNA, 25 bp, Homo sapien
acagctcctcaggaaaccttttctc

SEQ ID NO: 2495674 - DNA, 25 bp, Homo sapien
gcttaagcggctgaactttgttccc

SEQ ID NO: 2495675 - DNA, 25 bp, Homo sapien
gaaccacttccagaagcaaatgaaa

SEQ ID NO: 2495676 - DNA, 25 bp, Homo sapien
cattgagtgcgtggattcttggaag

SEQ ID NO: 2495677 - DNA, 25 bp, Homo sapien
gatgggtagatttgaattactggct

SEQ ID NO: 2495678 - DNA, 25 bp, Homo sapien
ctctgagaacgacaaataagaaatt

SEQ ID NO: 2495679 - DNA, 25 bp, Homo sapien
ctgagaacgacaaataagaaatttc

SEQ ID NO: 2495680 - DNA, 25 bp, Homo sapien
tctgagaacgacaaataagaaattt

SEQ ID NO: 2495681 - DNA, 25 bp, Homo sapien
taattgtcgtcttccttgtcatcag

SEQ ID NO: 2495682 - DNA, 25 bp, Homo sapien
aattgtcgtcttccttgtcatcagc

SEQ ID NO: 2495683 - DNA, 25 bp, Homo sapien
ttaattgtcgtcttccttgtcatca

SEQ ID NO: 2495684 - DNA, 25 bp, Homo sapien
ttgtcgtcttccttgtcatcagcat

SEQ ID NO: 2495685 - DNA, 25 bp, Homo sapien
gacagctttgtggtctgccttctag

SEQ ID NO: 2495686 - DNA, 25 bp, Homo sapien
gatatccactggctgatggttactt

SEQ ID NO: 2495687 - DNA, 25 bp, Homo sapien
cagtaaaaattatgtgatgaccaca

SEQ ID NO: 2495688 - DNA, 25 bp, Homo sapien
gcagtattttaggagtgaatccaga

SEQ ID NO: 2495689 - DNA, 25 bp, Homo sapien
gatgtggagattgacctctaatagt

SEQ ID NO: 2495690 - DNA, 25 bp, Homo sapien
ggaaagtgaatcccactgtttgatg

SEQ ID NO: 2495691 - DNA, 25 bp, Homo sapien
atgtggagattgacctctaatagtc

SEQ ID NO: 2495692 - DNA, 25 bp, Homo sapien
tgtggagattgacctctaatagtct

SEQ ID NO: 2495693 - DNA, 25 bp, Homo sapien
taatcagccagagtcagctttttgc

SEQ ID NO: 2495694 - DNA, 25 bp, Homo sapien
aatcagccagagtcagctttttgct

SEQ ID NO: 2495695 - DNA, 25 bp, Homo sapien
ttaatcagccagagtcagctttttg

SEQ ID NO: 2495696 - DNA, 25 bp, Homo sapien
tccgtcatagatggtggtcgctcaa

SEQ ID NO: 2495697 - DNA, 25 bp, Homo sapien
tagaaatgtgcttttctcacctata

SEQ ID NO: 2495698 - DNA, 25 bp, Homo sapien
gatgtgccttgaaccaatgcttcca

SEQ ID NO: 2495699 - DNA, 25 bp, Homo sapien
gattaattgaccctcgttatctgag

SEQ ID NO: 2495700 - DNA, 25 bp, Homo sapien
tacacagaagccatactaattgtct

SEQ ID NO: 2495701 - DNA, 25 bp, Homo sapien
agaagccatactaattgtctctgta

SEQ ID NO: 2495702 - DNA, 25 bp, Homo sapien
ttctccacaaatttgtgtgtatcct

SEQ ID NO: 2495703 - DNA, 25 bp, Homo sapien
tgtgtgtatccttacacagaagcca

SEQ ID NO: 2495704 - DNA, 25 bp, Homo sapien
gtttgccagggcatgttcgaaggta

SEQ ID NO: 2495705 - DNA, 25 bp, Homo sapien
ttgccagggcatgttcgaaggtagt

SEQ ID NO: 2495706 - DNA, 25 bp, Homo sapien
ccagggcatgttcgaaggtagtaat

SEQ ID NO: 2495707 - DNA, 25 bp, Homo sapien
gggcatgttcgaaggtagtaattta

SEQ ID NO: 2495708 - DNA, 25 bp, Homo sapien
cgctttgaccaaattgacctgagct

SEQ ID NO: 2495709 - DNA, 25 bp, Homo sapien
gtcacacaactctctagcttttgca

SEQ ID NO: 2495710 - DNA, 25 bp, Homo sapien
tctgtaagagccgttggctgctgtt

SEQ ID NO: 2495711 - DNA, 25 bp, Homo sapien
gacctgagcttccatggtatcttaa

SEQ ID NO: 2495712 - DNA, 25 bp, Homo sapien
tcaagtcgtgattatgtatagatgt

SEQ ID NO: 2495713 - DNA, 25 bp, Homo sapien
catgttataatctgtcctccaaaag

SEQ ID NO: 2495714 - DNA, 25 bp, Homo sapien
gcaatcaggatgtttcaagtcgtga

SEQ ID NO: 2495715 - DNA, 25 bp, Homo sapien
gatcatgtttcttgcatctccaata

SEQ ID NO: 2495716 - DNA, 25 bp, Homo sapien
tttattctgaaaagcctcacaaggc

SEQ ID NO: 2495717 - DNA, 25 bp, Homo sapien
gaggtagatcaacccctttctgtac

SEQ ID NO: 2495718 - DNA, 25 bp, Homo sapien
aatggtgtcccacaattttcgtagc

SEQ ID NO: 2495719 - DNA, 25 bp, Homo sapien
tagcaataactttagggcagtgaag

SEQ ID NO: 2495720 - DNA, 25 bp, Homo sapien
gctgactataagaatcaccctgaca

SEQ ID NO: 2495721 - DNA, 25 bp, Homo sapien
tcagttatggagaaatatgatacag

SEQ ID NO: 2495722 - DNA, 25 bp, Homo sapien
tacattttgatccattaactcttga

SEQ ID NO: 2495723 - DNA, 25 bp, Homo sapien
tagtagcagcatcatctatcacagc

SEQ ID NO: 2495724 - DNA, 25 bp, Homo sapien
gtctcttcacacggacgcgcattaa

SEQ ID NO: 2495725 - DNA, 25 bp, Homo sapien
ctcttcacacggacgcgcattaaac

SEQ ID NO: 2495726 - DNA, 25 bp, Homo sapien
ctattgacaggtctcttcacacgga

SEQ ID NO: 2495727 - DNA, 25 bp, Homo sapien
tgacaggtctcttcacacggacgcg

SEQ ID NO: 2495728 - DNA, 25 bp, Homo sapien
cactacatgcaaactcggtgtaatt

SEQ ID NO: 2495729 - DNA, 25 bp, Homo sapien
tactggggattaacttacggctata

SEQ ID NO: 2495730 - DNA, 25 bp, Homo sapien
ttgaaaatatcatgtcactacatgc

SEQ ID NO: 2495731 - DNA, 25 bp, Homo sapien
tacggctataatgcctaagttccat

SEQ ID NO: 2495732 - DNA, 25 bp, Homo sapien
aaagcaatgcatcagggcacacaca

SEQ ID NO: 2495733 - DNA, 25 bp, Homo sapien
catggtactgctcaaatgctgtctc

SEQ ID NO: 2495734 - DNA, 25 bp, Homo sapien
gcagctgctatattgctgaaagcaa

SEQ ID NO: 2495735 - DNA, 25 bp, Homo sapien
caatactagtaaaagcccaagtcca

SEQ ID NO: 2495736 - DNA, 25 bp, Homo sapien
agaggataaggtcctggaacaaatg

SEQ ID NO: 2495737 - DNA, 25 bp, Homo sapien
taaggtcctggaacaaatggacagc

SEQ ID NO: 2495738 - DNA, 25 bp, Homo sapien
gataaggtcctggaacaaatggaca

SEQ ID NO: 2495739 - DNA, 25 bp, Homo sapien
tcctggaacaaatggacagcatagt

SEQ ID NO: 2495740 - DNA, 25 bp, Homo sapien
gagtctagctttgcagtcctttcca

SEQ ID NO: 2495741 - DNA, 25 bp, Homo sapien
tccttcccaaattgagtctagcttt

SEQ ID NO: 2495742 - DNA, 25 bp, Homo sapien
ttgggtggggtagactcaagatcta

SEQ ID NO: 2495743 - DNA, 25 bp, Homo sapien
ggtggggtagactcaagatctactc

SEQ ID NO: 2495744 - DNA, 25 bp, Homo sapien
aaacccaggataggtgctgggtcca

SEQ ID NO: 2495745 - DNA, 25 bp, Homo sapien
taaaacccaggataggtgctgggtc

SEQ ID NO: 2495746 - DNA, 25 bp, Homo sapien
atccataaaacccaggataggtgct

SEQ ID NO: 2495747 - DNA, 25 bp, Homo sapien
cataaaacccaggataggtgctggg

SEQ ID NO: 2495748 - DNA, 25 bp, Homo sapien
tataccaatcagtagtgggacgtgg

SEQ ID NO: 2495749 - DNA, 25 bp, Homo sapien
ccacaggagcctttccaatttctca

SEQ ID NO: 2495750 - DNA, 25 bp, Homo sapien
tcagagaaagactcggtgttcaggc

SEQ ID NO: 2495751 - DNA, 25 bp, Homo sapien
tcaggctgtgaggtgtataccaatc

SEQ ID NO: 2495752 - DNA, 25 bp, Homo sapien
ctctgtctctagcgtgtccaggctc

SEQ ID NO: 2495753 - DNA, 25 bp, Homo sapien
tctgtctctagcgtgtccaggctcc

SEQ ID NO: 2495754 - DNA, 25 bp, Homo sapien
tttcattattccagtatgattttct

SEQ ID NO: 2495755 - DNA, 25 bp, Homo sapien
taccactgctgacaatggtaaatat

SEQ ID NO: 2495756 - DNA, 25 bp, Homo sapien
ccctaccactgctgacaatggtaaa

SEQ ID NO: 2495757 - DNA, 25 bp, Homo sapien
cctaccactgctgacaatggtaaat

SEQ ID NO: 2495758 - DNA, 25 bp, Homo sapien
ctaccactgctgacaatggtaaata

SEQ ID NO: 2495759 - DNA, 25 bp, Homo sapien
ttcatcccatccgtagttgtgatca

SEQ ID NO: 2495760 - DNA, 25 bp, Homo sapien
tcccatccgtagttgtgatcatcac

SEQ ID NO: 2495761 - DNA, 25 bp, Homo sapien
catcccatccgtagttgtgatcatc

SEQ ID NO: 2495762 - DNA, 25 bp, Homo sapien
cctttcatcccatccgtagttgtga

SEQ ID NO: 2495763 - DNA, 25 bp, Homo sapien
tcacaagaggaatgtgtgcagacca

SEQ ID NO: 2495764 - DNA, 25 bp, Homo sapien
tccccttgcattggctgagagcctg

SEQ ID NO: 2495765 - DNA, 25 bp, Homo sapien
tgtcctttatccgaatcacaagagg

SEQ ID NO: 2495766 - DNA, 25 bp, Homo sapien
gcatcaactcccgtactatatgggt

SEQ ID NO: 2495767 - DNA, 25 bp, Homo sapien
gtgaggaccaccaatattctaagcc

SEQ ID NO: 2495768 - DNA, 25 bp, Homo sapien
tggtgaggaccaccaatattctaag

SEQ ID NO: 2495769 - DNA, 25 bp, Homo sapien
ggtgaggaccaccaatattctaagc

SEQ ID NO: 2495770 - DNA, 25 bp, Homo sapien
ttagaggtgtagtagcccatattgc

SEQ ID NO: 2495771 - DNA, 25 bp, Homo sapien
tgtctcattagaggtgtagtagccc

SEQ ID NO: 2495772 - DNA, 25 bp, Homo sapien
ggtgtagtagcccatattgctgtag

SEQ ID NO: 2495773 - DNA, 25 bp, Homo sapien
ttgctgtgtctcattagaggtgtag

SEQ ID NO: 2495774 - DNA, 25 bp, Homo sapien
ttcttgcttataattgtttttctta

SEQ ID NO: 2495775 - DNA, 25 bp, Homo sapien
cattcttgcttataattgtttttct

SEQ ID NO: 2495776 - DNA, 25 bp, Homo sapien
tcattcttgcttataattgtttttc

SEQ ID NO: 2495777 - DNA, 25 bp, Homo sapien
catactggaagaggcagtcctccat

SEQ ID NO: 2495778 - DNA, 25 bp, Homo sapien
taagtaggtcaagatggccagagga

SEQ ID NO: 2495779 - DNA, 25 bp, Homo sapien
ttgcttgctactaaaggtcttgagc

SEQ ID NO: 2495780 - DNA, 25 bp, Homo sapien
gcttgctactaaaggtcttgagccc

SEQ ID NO: 2495781 - DNA, 25 bp, Homo sapien
aaataagtaggtcaagatggccaga

SEQ ID NO: 2495782 - DNA, 25 bp, Homo sapien
ccattgtgagtgaaattgactggaa

SEQ ID NO: 2495783 - DNA, 25 bp, Homo sapien
tcacacaatcttcgtcaatttccca

SEQ ID NO: 2495784 - DNA, 25 bp, Homo sapien
tgtaaaaatcagttcttctaggcaa

SEQ ID NO: 2495785 - DNA, 25 bp, Homo sapien
tcagttcttctaggcaagggtgctg

SEQ ID NO: 2495786 - DNA, 25 bp, Homo sapien
aaaaatcagttcttctaggcaaggg

SEQ ID NO: 2495787 - DNA, 25 bp, Homo sapien
tgctgccagcacatgatgtgccctg

SEQ ID NO: 2495788 - DNA, 25 bp, Homo sapien
gaggaagaataggagatgacctgct

SEQ ID NO: 2495789 - DNA, 25 bp, Homo sapien
gatgtgccctgtgttagtaagctcc

SEQ ID NO: 2495790 - DNA, 25 bp, Homo sapien
tgttagtaagctcccctgattttta

SEQ ID NO: 2495791 - DNA, 25 bp, Homo sapien
ctgttagggaactcaatttgcacat

SEQ ID NO: 2495792 - DNA, 25 bp, Homo sapien
tgcgacgaatatacaggtgcctgtg

SEQ ID NO: 2495793 - DNA, 25 bp, Homo sapien
tacactctcacgaacagtgtttaag

SEQ ID NO: 2495794 - DNA, 25 bp, Homo sapien
tagttcaactctcagttctctaagg

SEQ ID NO: 2495795 - DNA, 25 bp, Homo sapien
tgttgatgggtacctaggttaattc

SEQ ID NO: 2495796 - DNA, 25 bp, Homo sapien
tttggcttttcaagatcatttttgg

SEQ ID NO: 2495797 - DNA, 25 bp, Homo sapien
ggattgctttggcttttcaagatca

SEQ ID NO: 2495798 - DNA, 25 bp, Homo sapien
gctttggcttttcaagatcattttt

SEQ ID NO: 2495799 - DNA, 25 bp, Homo sapien
tggcttttcaagatcatttttggtc

SEQ ID NO: 2495800 - DNA, 25 bp, Homo sapien
tctcttattcgaccacatgctatct

SEQ ID NO: 2495801 - DNA, 25 bp, Homo sapien
ttttctcttattcgaccacatgcta

SEQ ID NO: 2495802 - DNA, 25 bp, Homo sapien
attttctcttattcgaccacatgct

SEQ ID NO: 2495803 - DNA, 25 bp, Homo sapien
ttctcttattcgaccacatgctatc

SEQ ID NO: 2495804 - DNA, 25 bp, Homo sapien
tgcatagatccagatttcacaattg

SEQ ID NO: 2495805 - DNA, 25 bp, Homo sapien
tagatccagatttcacaattgaaga

SEQ ID NO: 2495806 - DNA, 25 bp, Homo sapien
cacaattgaagaagtcaagcagaaa

SEQ ID NO: 2495807 - DNA, 25 bp, Homo sapien
ttcacaattgaagaagtcaagcaga

SEQ ID NO: 2495808 - DNA, 25 bp, Homo sapien
ggtcttcattaataccatgtgaggg

SEQ ID NO: 2495809 - DNA, 25 bp, Homo sapien
ggagagaaggaatgtcttggtaccc

SEQ ID NO: 2495810 - DNA, 25 bp, Homo sapien
tgtgagggtccttgttaccacctgg

SEQ ID NO: 2495811 - DNA, 25 bp, Homo sapien
ttggtacccaattcagccttctctg

SEQ ID NO: 2495812 - DNA, 25 bp, Homo sapien
tcggagagactgcaccatctctgtg

SEQ ID NO: 2495813 - DNA, 25 bp, Homo sapien
tgctactccttccatagtcatcctg

SEQ ID NO: 2495814 - DNA, 25 bp, Homo sapien
gaaacttttcaccaatgctactcct

SEQ ID NO: 2495815 - DNA, 25 bp, Homo sapien
catagtcatcctgccttcggagaga

SEQ ID NO: 2495816 - DNA, 25 bp, Homo sapien
aatatctgctatactgtttctggct

SEQ ID NO: 2495817 - DNA, 25 bp, Homo sapien
taagagccaatggatacttgcttgg

SEQ ID NO: 2495818 - DNA, 25 bp, Homo sapien
cattttataggttggcatagattct

SEQ ID NO: 2495819 - DNA, 25 bp, Homo sapien
tattgcagtttgtctacagtgcaga

SEQ ID NO: 2495820 - DNA, 25 bp, Homo sapien
tggtaaaatcaagtatcagtgtgag

SEQ ID NO: 2495821 - DNA, 25 bp, Homo sapien
atcaagtatcagtgtgagtccatct

SEQ ID NO: 2495822 - DNA, 25 bp, Homo sapien
gctgtagtgaaaaatcttggtaaaa

SEQ ID NO: 2495823 - DNA, 25 bp, Homo sapien
tgtaatattttttagtcgctttctc

SEQ ID NO: 2495824 - DNA, 25 bp, Homo sapien
gcagtgtttgactttctgttcctgt

SEQ ID NO: 2495825 - DNA, 25 bp, Homo sapien
cagtgtttgactttctgttcctgtg

SEQ ID NO: 2495826 - DNA, 25 bp, Homo sapien
agtgtttgactttctgttcctgtgt

SEQ ID NO: 2495827 - DNA, 25 bp, Homo sapien
acatcctttgtgaatggcagcaggc

SEQ ID NO: 2495828 - DNA, 25 bp, Homo sapien
agtcacatcctttgtgaatggcagc

SEQ ID NO: 2495829 - DNA, 25 bp, Homo sapien
tgtgagacccattcatgatcacatg

SEQ ID NO: 2495830 - DNA, 25 bp, Homo sapien
ggagtaacacagaacctagcacgtt

SEQ ID NO: 2495831 - DNA, 25 bp, Homo sapien
taaatgaaatatctcgccctactag

SEQ ID NO: 2495832 - DNA, 25 bp, Homo sapien
taggctaagagttcgcatgcatgct

SEQ ID NO: 2495833 - DNA, 25 bp, Homo sapien
ggaggcaaggtccaccataaagatg

SEQ ID NO: 2495834 - DNA, 25 bp, Homo sapien
caataatcttgaccctgcgtagacc

SEQ ID NO: 2495835 - DNA, 25 bp, Homo sapien
tgcgtagacccaggctaatataggt

SEQ ID NO: 2495836 - DNA, 25 bp, Homo sapien
cctgctcaagtctcatgggagtggt

SEQ ID NO: 2495837 - DNA, 25 bp, Homo sapien
catatgtgttattgctcctcaagac

SEQ ID NO: 2495838 - DNA, 25 bp, Homo sapien
tggttcaaggaatgccttgtatttc

SEQ ID NO: 2495839 - DNA, 25 bp, Homo sapien
cacattccacttctctcaaggatga

SEQ ID NO: 2495840 - DNA, 25 bp, Homo sapien
tcctctacagacatggtaatgaagt

SEQ ID NO: 2495841 - DNA, 25 bp, Homo sapien
gaagtattatgcttccccctctatg

SEQ ID NO: 2495842 - DNA, 25 bp, Homo sapien
acttcattagagcatgagatgttat

SEQ ID NO: 2495843 - DNA, 25 bp, Homo sapien
tagagcatgagatgttataatttcc

SEQ ID NO: 2495844 - DNA, 25 bp, Homo sapien
gagcatgagatgttataatttccat

SEQ ID NO: 2495845 - DNA, 25 bp, Homo sapien
cattagagcatgagatgttataatt

SEQ ID NO: 2495846 - DNA, 25 bp, Homo sapien
catgcagacgggaggcaaataataa

SEQ ID NO: 2495847 - DNA, 25 bp, Homo sapien
cttccatgcagacgggaggcaaata

SEQ ID NO: 2495848 - DNA, 25 bp, Homo sapien
agacttcttccatgcagacgggagg

SEQ ID NO: 2495849 - DNA, 25 bp, Homo sapien
gacttcttccatgcagacgggaggc

SEQ ID NO: 2495850 - DNA, 25 bp, Homo sapien
gagatggacttgtgatgattaatac

SEQ ID NO: 2495851 - DNA, 25 bp, Homo sapien
gagggtgttgccagaaggtattaac

SEQ ID NO: 2495852 - DNA, 25 bp, Homo sapien
tgtatttgttcaaattcacaagaga

SEQ ID NO: 2495853 - DNA, 25 bp, Homo sapien
tgttcaaattcacaagagatggact

SEQ ID NO: 2495854 - DNA, 25 bp, Homo sapien
tcatggatagtcttgttgtttagtt

SEQ ID NO: 2495855 - DNA, 25 bp, Homo sapien
tttgagtttcatggatagtcttgtt

SEQ ID NO: 2495856 - DNA, 25 bp, Homo sapien
cttttgagtttcatggatagtcttg

SEQ ID NO: 2495857 - DNA, 25 bp, Homo sapien
tggatagtcttgttgtttagtttac

SEQ ID NO: 2495858 - DNA, 25 bp, Homo sapien
ggtgctggttaggccttctatgtaa

SEQ ID NO: 2495859 - DNA, 25 bp, Homo sapien
gtcttcttcccctatgtcagatgat

SEQ ID NO: 2495860 - DNA, 25 bp, Homo sapien
tatgtaagtcttcttcccctatgtc

SEQ ID NO: 2495861 - DNA, 25 bp, Homo sapien
ggccttctatgtaagtcttcttccc

SEQ ID NO: 2495862 - DNA, 25 bp, Homo sapien
ttgcagataatgagtaacatcattc

SEQ ID NO: 2495863 - DNA, 25 bp, Homo sapien
agttctctcacatgtctgatagata

SEQ ID NO: 2495864 - DNA, 25 bp, Homo sapien
tctgatagataatgatgtcagtcac

SEQ ID NO: 2495865 - DNA, 25 bp, Homo sapien
cattctaaggagttctctcacatgt

SEQ ID NO: 2495866 - DNA, 25 bp, Homo sapien
aactcagttgcctggatttcatcac

SEQ ID NO: 2495867 - DNA, 25 bp, Homo sapien
tgctgctttgggctgaaacacaact

SEQ ID NO: 2495868 - DNA, 25 bp, Homo sapien
gttgcctggatttcatcacagctca

SEQ ID NO: 2495869 - DNA, 25 bp, Homo sapien
ttgggctgaaacacaactcagttgc

SEQ ID NO: 2495870 - DNA, 25 bp, Homo sapien
tacaatatattgacaacatagtaac

SEQ ID NO: 2495871 - DNA, 25 bp, Homo sapien
caatatattgacaacatagtaacat

SEQ ID NO: 2495872 - DNA, 25 bp, Homo sapien
tattgacaacatagtaacattaaaa

SEQ ID NO: 2495873 - DNA, 25 bp, Homo sapien
gctttacaatatattgacaacatag

SEQ ID NO: 2495874 - DNA, 25 bp, Homo sapien
ctttggctccgtggactggctctcc

SEQ ID NO: 2495875 - DNA, 25 bp, Homo sapien
agctttggctccgtggactggctct

SEQ ID NO: 2495876 - DNA, 25 bp, Homo sapien
ccagctttggctccgtggactggct

SEQ ID NO: 2495877 - DNA, 25 bp, Homo sapien
tggctccgtggactggctctcccag

SEQ ID NO: 2495878 - DNA, 25 bp, Homo sapien
aggtcctcaaatcggcctgcgccgg

SEQ ID NO: 2495879 - DNA, 25 bp, Homo sapien
cctcaaatcggcctgcgccggagag

SEQ ID NO: 2495880 - DNA, 25 bp, Homo sapien
ctaggtcctcaaatcggcctgcgcc

SEQ ID NO: 2495881 - DNA, 25 bp, Homo sapien
tcaaatcggcctgcgccggagagga

SEQ ID NO: 2495882 - DNA, 25 bp, Homo sapien
cactgagtagttccgcgccttggag

SEQ ID NO: 2495883 - DNA, 25 bp, Homo sapien
gtagttccgcgccttggagaccgtc

SEQ ID NO: 2495884 - DNA, 25 bp, Homo sapien
ccactgagtagttccgcgccttgga

SEQ ID NO: 2495885 - DNA, 25 bp, Homo sapien
gttccgcgccttggagaccgtcttc

SEQ ID NO: 2495886 - DNA, 25 bp, Homo sapien
caggactcccagctgaatagtccct

SEQ ID NO: 2495887 - DNA, 25 bp, Homo sapien
tctgggaggtccagataaaaacctg

SEQ ID NO: 2495888 - DNA, 25 bp, Homo sapien
cagctgaatagtcccttctctgagt

SEQ ID NO: 2495889 - DNA, 25 bp, Homo sapien
ctctcaagagcggaagaggctggcc

SEQ ID NO: 2495890 - DNA, 25 bp, Homo sapien
acaggaacaaaagtgtggtcctgtg

SEQ ID NO: 2495891 - DNA, 25 bp, Homo sapien
gcaagttccactttccccttgctca

SEQ ID NO: 2495892 - DNA, 25 bp, Homo sapien
ccacgtccacagcaagttccacttt

SEQ ID NO: 2495893 - DNA, 25 bp, Homo sapien
agtgtggtcctgtggccacgtccac

SEQ ID NO: 2495894 - DNA, 25 bp, Homo sapien
tgttggaggtgtttacaaccagcat

SEQ ID NO: 2495895 - DNA, 25 bp, Homo sapien
tttgcatttagcttctagggtcacc

SEQ ID NO: 2495896 - DNA, 25 bp, Homo sapien
tcactttgtgatctttttcgttcca

SEQ ID NO: 2495897 - DNA, 25 bp, Homo sapien
gaattgggatcaccacactgatgtt

SEQ ID NO: 2495898 - DNA, 25 bp, Homo sapien
ttaagttgatggctaacgagaactg

SEQ ID NO: 2495899 - DNA, 25 bp, Homo sapien
gctgttgctagagaaagaatgacct

SEQ ID NO: 2495900 - DNA, 25 bp, Homo sapien
tcagctaaagcctgcaatagcatta

SEQ ID NO: 2495901 - DNA, 25 bp, Homo sapien
gcaatagcattatccactgctgttg

SEQ ID NO: 2495902 - DNA, 25 bp, Homo sapien
tccaaatcttctgttagtgcaaggc

SEQ ID NO: 2495903 - DNA, 25 bp, Homo sapien
ggagaagagccatctagcttttggg

SEQ ID NO: 2495904 - DNA, 25 bp, Homo sapien
gcatcgtgaacgtcttgtgctgaat

SEQ ID NO: 2495905 - DNA, 25 bp, Homo sapien
agagccatctagcttttgggttttc

SEQ ID NO: 2495906 - DNA, 25 bp, Homo sapien
acttgtgtttgcatcgtgaacgtct

SEQ ID NO: 2495907 - DNA, 25 bp, Homo sapien
gaatcccactcatcaggatcagcca

SEQ ID NO: 2495908 - DNA, 25 bp, Homo sapien
ttttgcctaagtatcacctgtggag

SEQ ID NO: 2495909 - DNA, 25 bp, Homo sapien
aggtctcctgtacgaggtgtctggt

SEQ ID NO: 2495910 - DNA, 25 bp, Homo sapien
tcccagaagagcactgacctgatgc

SEQ ID NO: 2495911 - DNA, 25 bp, Homo sapien
cagagtttggaattctatattgctg

SEQ ID NO: 2495912 - DNA, 25 bp, Homo sapien
gaaacggagctcaagtgacgcagtg

SEQ ID NO: 2495913 - DNA, 25 bp, Homo sapien
tgacgcagtggtattgctgagccaa

SEQ ID NO: 2495914 - DNA, 25 bp, Homo sapien
gaagtagacggaattttcaaggcag

SEQ ID NO: 2495915 - DNA, 25 bp, Homo sapien
tcaaacgctctcaaagcagcagcgc

SEQ ID NO: 2495916 - DNA, 25 bp, Homo sapien
gaagtcatacactaagttcatcctg

SEQ ID NO: 2495917 - DNA, 25 bp, Homo sapien
gttgagaagccccaagagtctgcgc

SEQ ID NO: 2495918 - DNA, 25 bp, Homo sapien
tgttccttttcataaactcaaacgc

SEQ ID NO: 2495919 - DNA, 25 bp, Homo sapien
tgaggggcggaagcggagaggcggg

SEQ ID NO: 2495920 - DNA, 25 bp, Homo sapien
ctgaggggcggaagcggagaggcgg

SEQ ID NO: 2495921 - DNA, 25 bp, Homo sapien
tctgctttgaggtgcaccgggcagt

SEQ ID NO: 2495922 - DNA, 25 bp, Homo sapien
ctcaggagatttacgtagacctgat

SEQ ID NO: 2495923 - DNA, 25 bp, Homo sapien
ggcagtcaagtgtggctacttctac

SEQ ID NO: 2495924 - DNA, 25 bp, Homo sapien
tttacgtagacctgatagaggattc

SEQ ID NO: 2495925 - DNA, 25 bp, Homo sapien
actggtagcgtgaaggattttggca

SEQ ID NO: 2495926 - DNA, 25 bp, Homo sapien
caaaatgagagtctgaaagtggcca

SEQ ID NO: 2495927 - DNA, 25 bp, Homo sapien
catagactggtcctgtggcttcgag

SEQ ID NO: 2495928 - DNA, 25 bp, Homo sapien
tccggaattccagtagctgcaaaat

SEQ ID NO: 2495929 - DNA, 25 bp, Homo sapien
cagctgccctcaataatgtgaatgg

SEQ ID NO: 2495930 - DNA, 25 bp, Homo sapien
gattagtgctaggagccaaggagca

SEQ ID NO: 2495931 - DNA, 25 bp, Homo sapien
tctgtctgccgctcgaaagggatag

SEQ ID NO: 2495932 - DNA, 25 bp, Homo sapien
tacctagccagtccatgggtgtgac

SEQ ID NO: 2495933 - DNA, 25 bp, Homo sapien
catttcaatactgccggttaggacc

SEQ ID NO: 2495934 - DNA, 25 bp, Homo sapien
tcataaggagttgtatcttcccacc

SEQ ID NO: 2495935 - DNA, 25 bp, Homo sapien
gagactctggcctacttcctaacaa

SEQ ID NO: 2495936 - DNA, 25 bp, Homo sapien
gaaaccatagagtttgggccttgga

SEQ ID NO: 2495937 - DNA, 25 bp, Homo sapien
tataaggtgggcttggtccaacagg

SEQ ID NO: 2495938 - DNA, 25 bp, Homo sapien
gagaatgctccctaccatatagttg

SEQ ID NO: 2495939 - DNA, 25 bp, Homo sapien
agttgacagtggttaggaactctcc

SEQ ID NO: 2495940 - DNA, 25 bp, Homo sapien
cattatcgcatgctgggatcatcgg

SEQ ID NO: 2495941 - DNA, 25 bp, Homo sapien
aggatgagcaggagtaattcagagt

SEQ ID NO: 2495942 - DNA, 25 bp, Homo sapien
tgagcaggagtaattcagagtgact

SEQ ID NO: 2495943 - DNA, 25 bp, Homo sapien
caggagtaattcagagtgacttgct

SEQ ID NO: 2495944 - DNA, 25 bp, Homo sapien
agcatcattaaacagaggatgagca

SEQ ID NO: 2495945 - DNA, 25 bp, Homo sapien
tcctccctcttccaaaaacgcagga

SEQ ID NO: 2495946 - DNA, 25 bp, Homo sapien
caactcaaaggcttgctgaataaac

SEQ ID NO: 2495947 - DNA, 25 bp, Homo sapien
cattagagatagagacttgatggca

SEQ ID NO: 2495948 - DNA, 25 bp, Homo sapien
agagatagagacttgatggcatttc

SEQ ID NO: 2495949 - DNA, 25 bp, Homo sapien
aatcttggtttttggttacttgcat

SEQ ID NO: 2495950 - DNA, 25 bp, Homo sapien
cttctactcaaatcttggtttttgg

SEQ ID NO: 2495951 - DNA, 25 bp, Homo sapien
tgttttcttctcgtcctgaagggca

SEQ ID NO: 2495952 - DNA, 25 bp, Homo sapien
aaccatgttttcttctcgtcctgaa

SEQ ID NO: 2495953 - DNA, 25 bp, Homo sapien
taaccatgttttcttctcgtcctga

SEQ ID NO: 2495954 - DNA, 25 bp, Homo sapien
tataaccatgttttcttctcgtcct

SEQ ID NO: 2495955 - DNA, 25 bp, Homo sapien
catcccaaatgtctcctgggagaga

SEQ ID NO: 2495956 - DNA, 25 bp, Homo sapien
tcatcccaaatgtctcctgggagag

SEQ ID NO: 2495957 - DNA, 25 bp, Homo sapien
aatgtctcctgggagagacatagac

SEQ ID NO: 2495958 - DNA, 25 bp, Homo sapien
cccaaatgtctcctgggagagacat

SEQ ID NO: 2495959 - DNA, 25 bp, Homo sapien
tacgcctctgagattggtgtggaga

SEQ ID NO: 2495960 - DNA, 25 bp, Homo sapien
ttcatacttctcactctcatacgcc

SEQ ID NO: 2495961 - DNA, 25 bp, Homo sapien
ctctgagattggtgtggagacgctc

SEQ ID NO: 2495962 - DNA, 25 bp, Homo sapien
tacttctcactctcatacgcctctg

SEQ ID NO: 2495963 - DNA, 25 bp, Homo sapien
cattgagatgtaagcgctttgtaat

SEQ ID NO: 2495964 - DNA, 25 bp, Homo sapien
accttttattcaggacaggaagctg

SEQ ID NO: 2495965 - DNA, 25 bp, Homo sapien
tcaggtacaaggaaccttttattca

SEQ ID NO: 2495966 - DNA, 25 bp, Homo sapien
gatgtaagcgctttgtaattatctt

SEQ ID NO: 2495967 - DNA, 25 bp, Homo sapien
cttatatccttctattatccctggg

SEQ ID NO: 2495968 - DNA, 25 bp, Homo sapien
tagaatgagtcggacatcttctgct

SEQ ID NO: 2495969 - DNA, 25 bp, Homo sapien
ttctgctcttcgttggaaggtgcgg

SEQ ID NO: 2495970 - DNA, 25 bp, Homo sapien
ttggttggatgctgcgctagaatga

SEQ ID NO: 2495971 - DNA, 25 bp, Homo sapien
ccatcggtgtctccgatgggaaatg

SEQ ID NO: 2495972 - DNA, 25 bp, Homo sapien
cccatgatctcattttcagaagcca

SEQ ID NO: 2495973 - DNA, 25 bp, Homo sapien
gaaatgctgtcacactaagataaag

SEQ ID NO: 2495974 - DNA, 25 bp, Homo sapien
aaagataagactttcttgaatctcc

SEQ ID NO: 2495975 - DNA, 25 bp, Homo sapien
ctgtgtgataagagttgaaggactc

SEQ ID NO: 2495976 - DNA, 25 bp, Homo sapien
tgaaggactcaagaattctcataca

SEQ ID NO: 2495977 - DNA, 25 bp, Homo sapien
tctaggtccaactgtgtgataagag

SEQ ID NO: 2495978 - DNA, 25 bp, Homo sapien
tggtcgacccttctaggtccaactg

SEQ ID NO: 2495979 - DNA, 25 bp, Homo sapien
gggactatcattctgctgagattcc

SEQ ID NO: 2495980 - DNA, 25 bp, Homo sapien
gagattcccataccagaacccggta

SEQ ID NO: 2495981 - DNA, 25 bp, Homo sapien
tcctctcgcccttcataaatggggt

SEQ ID NO: 2495982 - DNA, 25 bp, Homo sapien
tgtagtcactgggactatcattctg

SEQ ID NO: 2495983 - DNA, 25 bp, Homo sapien
gcttttggacctaaataatgattga

SEQ ID NO: 2495984 - DNA, 25 bp, Homo sapien
aagcagaaagctgtactgtaaacct

SEQ ID NO: 2495985 - DNA, 25 bp, Homo sapien
tgattaattggaacactctttactg

SEQ ID NO: 2495986 - DNA, 25 bp, Homo sapien
tggcaatattttgtggtgactccat

SEQ ID NO: 2495987 - DNA, 25 bp, Homo sapien
aatgtaggattacttggtctgctag

SEQ ID NO: 2495988 - DNA, 25 bp, Homo sapien
taactgaaccaatgcttaaccatgg

SEQ ID NO: 2495989 - DNA, 25 bp, Homo sapien
ggaattgttactcttcctgcagaag

SEQ ID NO: 2495990 - DNA, 25 bp, Homo sapien
gcacctaatgtaggattacttggtc

SEQ ID NO: 2495991 - DNA, 25 bp, Homo sapien
cctgttggttggtcagctggtcagt

SEQ ID NO: 2495992 - DNA, 25 bp, Homo sapien
ctcatctaaaattgtagtcacatac

SEQ ID NO: 2495993 - DNA, 25 bp, Homo sapien
aaaaacctgttggttggtcagctgg

SEQ ID NO: 2495994 - DNA, 25 bp, Homo sapien
tgtctcatctaaaattgtagtcaca

SEQ ID NO: 2495995 - DNA, 25 bp, Homo sapien
tatttgtgccattatctgtgtatct

SEQ ID NO: 2495996 - DNA, 25 bp, Homo sapien
gatttataactctaagttcatactt

SEQ ID NO: 2495997 - DNA, 25 bp, Homo sapien
tcagtatttgtgccattatctgtgt

SEQ ID NO: 2495998 - DNA, 25 bp, Homo sapien
ttcccacatgctcttgggagagggc

SEQ ID NO: 2495999 - DNA, 25 bp, Homo sapien
cgtgatgagacttccccagctaaat

SEQ ID NO: 2496000 - DNA, 25 bp, Homo sapien
gatacctcgtgatgagacttcccca

SEQ ID NO: 2496001 - DNA, 25 bp, Homo sapien
aatcactcacattaatgtattccat

SEQ ID NO: 2496002 - DNA, 25 bp, Homo sapien
gagacttccccagctaaatcactca

SEQ ID NO: 2496003 - DNA, 25 bp, Homo sapien
ttccagaccctggtgtaacgtgatg

SEQ ID NO: 2496004 - DNA, 25 bp, Homo sapien
ccctggtgtaacgtgatggctccca

SEQ ID NO: 2496005 - DNA, 25 bp, Homo sapien
tctgatcttgatgcaagttctttgc

SEQ ID NO: 2496006 - DNA, 25 bp, Homo sapien
ggtgtaacgtgatggctcccagtgt

SEQ ID NO: 2496007 - DNA, 25 bp, Homo sapien
ttaaaacatctcttgtgtctttctc

SEQ ID NO: 2496008 - DNA, 25 bp, Homo sapien
ttttaaaacatctcttgtgtctttc

SEQ ID NO: 2496009 - DNA, 25 bp, Homo sapien
aaacatctcttgtgtctttctcatc

SEQ ID NO: 2496010 - DNA, 25 bp, Homo sapien
taaaacatctcttgtgtctttctca

SEQ ID NO: 2496011 - DNA, 25 bp, Homo sapien
taaaagtcaaaatagcatggcctac

SEQ ID NO: 2496012 - DNA, 25 bp, Homo sapien
tgaagaatgtatcccagaagaagac

SEQ ID NO: 2496013 - DNA, 25 bp, Homo sapien
gaagacatctgatagagaatcataa

SEQ ID NO: 2496014 - DNA, 25 bp, Homo sapien
gattgtcaacagaacattccatgaa

SEQ ID NO: 2496015 - DNA, 25 bp, Homo sapien
tgtgttcacgttggatattttctgt

SEQ ID NO: 2496016 - DNA, 25 bp, Homo sapien
tcacgttggatattttctgtgtggt

SEQ ID NO: 2496017 - DNA, 25 bp, Homo sapien
ctgagcatgctcaatgggcactctt

SEQ ID NO: 2496018 - DNA, 25 bp, Homo sapien
agcatgctcaatgggcactcttcct

SEQ ID NO: 2496019 - DNA, 25 bp, Homo sapien
tcataggatcttaaaagcctttaaa

SEQ ID NO: 2496020 - DNA, 25 bp, Homo sapien
agcctttaaaaagaccaccaggctg

SEQ ID NO: 2496021 - DNA, 25 bp, Homo sapien
gaccaccaggctgccagtctttctt

SEQ ID NO: 2496022 - DNA, 25 bp, Homo sapien
ccctactgtttttgtaataccacag

SEQ ID NO: 2496023 - DNA, 25 bp, Homo sapien
tatgcatgtatagttgtactatggg

SEQ ID NO: 2496024 - DNA, 25 bp, Homo sapien
tgcatgtatagttgtactatgggaa

SEQ ID NO: 2496025 - DNA, 25 bp, Homo sapien
cttatgcatgtatagttgtactatg

SEQ ID NO: 2496026 - DNA, 25 bp, Homo sapien
catgtatagttgtactatgggaagc

SEQ ID NO: 2496027 - DNA, 25 bp, Homo sapien
gctttattaacagtttagtgtcaca

SEQ ID NO: 2496028 - DNA, 25 bp, Homo sapien
agtgtcacactgatcaactttgagg

SEQ ID NO: 2496029 - DNA, 25 bp, Homo sapien
tgacaaaatctcaacctttggtcct

SEQ ID NO: 2496030 - DNA, 25 bp, Homo sapien
caactttgagggtgacatgtagcat

SEQ ID NO: 2496031 - DNA, 25 bp, Homo sapien
tattccctcgcctgacaaaatatct

SEQ ID NO: 2496032 - DNA, 25 bp, Homo sapien
tcctgggcggcctcaaggtaagaga

SEQ ID NO: 2496033 - DNA, 25 bp, Homo sapien
caaaatgccggctgcctgttcattt

SEQ ID NO: 2496034 - DNA, 25 bp, Homo sapien
gcctcaaggtaagagaacaaaatgc

SEQ ID NO: 2496035 - DNA, 25 bp, Homo sapien
tacgtgtacacaagggctctatggg

SEQ ID NO: 2496036 - DNA, 25 bp, Homo sapien
ctctatgggccagtaaataggtgct

SEQ ID NO: 2496037 - DNA, 25 bp, Homo sapien
tttggtttgccaacagtcagcatca

SEQ ID NO: 2496038 - DNA, 25 bp, Homo sapien
tgtctccagatagcttcagcaatga

SEQ ID NO: 2496039 - DNA, 25 bp, Homo sapien
cagcatcaggtgatccatggagcca

SEQ ID NO: 2496040 - DNA, 25 bp, Homo sapien
gctttgccagcatcaggtgatccat

SEQ ID NO: 2496041 - DNA, 25 bp, Homo sapien
catcaggtgatccatggagccaggt

SEQ ID NO: 2496042 - DNA, 25 bp, Homo sapien
tgccagcatcaggtgatccatggag

SEQ ID NO: 2496043 - DNA, 25 bp, Homo sapien
cttaactgtataatcctggatccct

SEQ ID NO: 2496044 - DNA, 25 bp, Homo sapien
taactgtataatcctggatcccttg

SEQ ID NO: 2496045 - DNA, 25 bp, Homo sapien
acttaactgtataatcctggatccc

SEQ ID NO: 2496046 - DNA, 25 bp, Homo sapien
aactgtataatcctggatcccttga

SEQ ID NO: 2496047 - DNA, 25 bp, Homo sapien
agcttgaccacaaatacgtccagaa

SEQ ID NO: 2496048 - DNA, 25 bp, Homo sapien
gcttgaccacaaatacgtccagaaa

SEQ ID NO: 2496049 - DNA, 25 bp, Homo sapien
agagcttgaccacaaatacgtccag

SEQ ID NO: 2496050 - DNA, 25 bp, Homo sapien
gagcttgaccacaaatacgtccaga

SEQ ID NO: 2496051 - DNA, 25 bp, Homo sapien
tccaggcttttgagtggctgccaag

SEQ ID NO: 2496052 - DNA, 25 bp, Homo sapien
tatttcaccaggtgaagcaggggca

SEQ ID NO: 2496053 - DNA, 25 bp, Homo sapien
gtcacaaggtcaactaaactgaaaa

SEQ ID NO: 2496054 - DNA, 25 bp, Homo sapien
gcagcacccctggtcacaaggtcaa

SEQ ID NO: 2496055 - DNA, 25 bp, Homo sapien
cctgtgttaacctgagaattaacca

SEQ ID NO: 2496056 - DNA, 25 bp, Homo sapien
tgggtcagccctgtgttaacctgag

SEQ ID NO: 2496057 - DNA, 25 bp, Homo sapien
gcaatagccactctcaaagttagca

SEQ ID NO: 2496058 - DNA, 25 bp, Homo sapien
gaaagcaatagccactctcaaagtt

SEQ ID NO: 2496059 - DNA, 25 bp, Homo sapien
tccaggtttttggtggatgcttcac

SEQ ID NO: 2496060 - DNA, 25 bp, Homo sapien
tttggtggatgcttcactctctctt

SEQ ID NO: 2496061 - DNA, 25 bp, Homo sapien
actgtccaggtttttggtggatgct

SEQ ID NO: 2496062 - DNA, 25 bp, Homo sapien
ggtttttggtggatgcttcactctc

SEQ ID NO: 2496063 - DNA, 25 bp, Homo sapien
caggcacactactgtctcttcagat

SEQ ID NO: 2496064 - DNA, 25 bp, Homo sapien
ttcttgttgctaagaaatcacaaag

SEQ ID NO: 2496065 - DNA, 25 bp, Homo sapien
tattcctcactaaatgatcttcata

SEQ ID NO: 2496066 - DNA, 25 bp, Homo sapien
cagatgcaggttctttattcctcac

SEQ ID NO: 2496067 - DNA, 25 bp, Homo sapien
atgctttctctctaggccaaacagc

SEQ ID NO: 2496068 - DNA, 25 bp, Homo sapien
ctttgctgtttctctaaatcctgca

SEQ ID NO: 2496069 - DNA, 25 bp, Homo sapien
gctctttgctgtttctctaaatcct

SEQ ID NO: 2496070 - DNA, 25 bp, Homo sapien
gccaaacagctctttgctgtttctc

SEQ ID NO: 2496071 - DNA, 25 bp, Homo sapien
ttagaacaattaaagcctgcattat

SEQ ID NO: 2496072 - DNA, 25 bp, Homo sapien
cattatcaaacatgcttgatatgca

SEQ ID NO: 2496073 - DNA, 25 bp, Homo sapien
tcagtagactcaagccaatttagaa

SEQ ID NO: 2496074 - DNA, 25 bp, Homo sapien
tgaccgcaaattgccagatacagaa

SEQ ID NO: 2496075 - DNA, 25 bp, Homo sapien
gctctagtccctctactagcaatgg

SEQ ID NO: 2496076 - DNA, 25 bp, Homo sapien
aatggctgcatattggctcaactcc

SEQ ID NO: 2496077 - DNA, 25 bp, Homo sapien
ttcagggacagttgagtagtcagtt

SEQ ID NO: 2496078 - DNA, 25 bp, Homo sapien
tctgacttccatggtcactgtactg

SEQ ID NO: 2496079 - DNA, 25 bp, Homo sapien
aatggtacgatcacagctcctgggt

SEQ ID NO: 2496080 - DNA, 25 bp, Homo sapien
tggagcacaatggtacgatcacagc

SEQ ID NO: 2496081 - DNA, 25 bp, Homo sapien
cacacacataaatgtttagtagaga

SEQ ID NO: 2496082 - DNA, 25 bp, Homo sapien
ccacacacacataaatgtttagtag

SEQ ID NO: 2496083 - DNA, 25 bp, Homo sapien
cttgcaatagaggttgggcacgtcc

SEQ ID NO: 2496084 - DNA, 25 bp, Homo sapien
caggaccactgtacttgcaatagag

SEQ ID NO: 2496085 - DNA, 25 bp, Homo sapien
tgtgtgtgcacgagctacaaggcag

SEQ ID NO: 2496086 - DNA, 25 bp, Homo sapien
cccagagtctctcgtggatgtgtgt

SEQ ID NO: 2496087 - DNA, 25 bp, Homo sapien
tactgggttccacataggaagaggt

SEQ ID NO: 2496088 - DNA, 25 bp, Homo sapien
ctaaagaagtacatgtaaccgctgg

SEQ ID NO: 2496089 - DNA, 25 bp, Homo sapien
taaccgctggtagattcaaggtaag

SEQ ID NO: 2496090 - DNA, 25 bp, Homo sapien
ccaaggctccacctcaatgggcaga

SEQ ID NO: 2496091 - DNA, 25 bp, Homo sapien
gctttgggaactaactcggtcattg

SEQ ID NO: 2496092 - DNA, 25 bp, Homo sapien
ttaagtatgcttatctacaaagcgt

SEQ ID NO: 2496093 - DNA, 25 bp, Homo sapien
caggacccaataacttgtgcttgct

SEQ ID NO: 2496094 - DNA, 25 bp, Homo sapien
gatgaatgcgaatttctggctttgg

SEQ ID NO: 2496095 - DNA, 25 bp, Homo sapien
agaatcctgccagtacccagtgtga

SEQ ID NO: 2496096 - DNA, 25 bp, Homo sapien
catgtagagcatttaaactagtgcc

SEQ ID NO: 2496097 - DNA, 25 bp, Homo sapien
aactagtgccctttattgccagaga

SEQ ID NO: 2496098 - DNA, 25 bp, Homo sapien
cccagtgtgataacgaacagctatt

SEQ ID NO: 2496099 - DNA, 25 bp, Homo sapien
caacaacccagttcagaaagtttgg

SEQ ID NO: 2496100 - DNA, 25 bp, Homo sapien
tgtaattgccatgagtatttgctcc

SEQ ID NO: 2496101 - DNA, 25 bp, Homo sapien
caagtaaaccagctgaggtgcttgc

SEQ ID NO: 2496102 - DNA, 25 bp, Homo sapien
ccatatccagtgattaaggtcagtg

SEQ ID NO: 2496103 - DNA, 25 bp, Homo sapien
catggaaaaaccctaaatgtgtatt

SEQ ID NO: 2496104 - DNA, 25 bp, Homo sapien
gaatgtagagtacctatagtgaact

SEQ ID NO: 2496105 - DNA, 25 bp, Homo sapien
aatacatactgtaccattccaacta

SEQ ID NO: 2496106 - DNA, 25 bp, Homo sapien
tggtatgtccagagaatgcaattat

SEQ ID NO: 2496107 - DNA, 25 bp, Homo sapien
gacagaagccatctttgatagggca

SEQ ID NO: 2496108 - DNA, 25 bp, Homo sapien
gatagggcatttacaactagaggcc

SEQ ID NO: 2496109 - DNA, 25 bp, Homo sapien
gagaggcctgttacccaaaggtgag

SEQ ID NO: 2496110 - DNA, 25 bp, Homo sapien
ggaaggccaactatgtatgatgtgc

SEQ ID NO: 2496111 - DNA, 25 bp, Homo sapien
gcacaacctaatgtgggcccatgaa

SEQ ID NO: 2496112 - DNA, 25 bp, Homo sapien
tccttcattgcatacaagagcctgg

SEQ ID NO: 2496113 - DNA, 25 bp, Homo sapien
ttcacaaaaggtccacgatacaggg

SEQ ID NO: 2496114 - DNA, 25 bp, Homo sapien
tatcatcaaggttgtgcatgcgcct

SEQ ID NO: 2496115 - DNA, 25 bp, Homo sapien
agaaatggccaagactgttgaccca

SEQ ID NO: 2496116 - DNA, 25 bp, Homo sapien
tgaaacttcagagatgttgatcatg

SEQ ID NO: 2496117 - DNA, 25 bp, Homo sapien
gccaagactgttgacccatgcacac

SEQ ID NO: 2496118 - DNA, 25 bp, Homo sapien
gaaacttcagagatgttgatcatga

SEQ ID NO: 2496119 - DNA, 25 bp, Homo sapien
cagtctacaagcagagcactctcat

SEQ ID NO: 2496120 - DNA, 25 bp, Homo sapien
taagctttaagtgcctcatgaagac

SEQ ID NO: 2496121 - DNA, 25 bp, Homo sapien
ttcatggacactggccagtctacaa

SEQ ID NO: 2496122 - DNA, 25 bp, Homo sapien
accagatgagttccagccgcagttc

SEQ ID NO: 2496123 - DNA, 25 bp, Homo sapien
tccagtatagtccttggtatggcta

SEQ ID NO: 2496124 - DNA, 25 bp, Homo sapien
ctcagcagtcaataatccatgataa

SEQ ID NO: 2496125 - DNA, 25 bp, Homo sapien
ggtatggctaaattccactgtccct

SEQ ID NO: 2496126 - DNA, 25 bp, Homo sapien
tagtccttggtatggctaaattcca

SEQ ID NO: 2496127 - DNA, 25 bp, Homo sapien
cagactgaatatgactccctaagga

SEQ ID NO: 2496128 - DNA, 25 bp, Homo sapien
gtgaaattgctgcttaaaccctgct

SEQ ID NO: 2496129 - DNA, 25 bp, Homo sapien
tgtacaacatctccaacatgcaggt

SEQ ID NO: 2496130 - DNA, 25 bp, Homo sapien
tcagcagtctcaaggctcccaaatg

SEQ ID NO: 2496131 - DNA, 25 bp, Homo sapien
tctcatgttttgtgccttccccaag

SEQ ID NO: 2496132 - DNA, 25 bp, Homo sapien
ttctctcatgttttgtgccttcccc

SEQ ID NO: 2496133 - DNA, 25 bp, Homo sapien
tctctcatgttttgtgccttcccca

SEQ ID NO: 2496134 - DNA, 25 bp, Homo sapien
catgttttgtgccttccccaagtca

SEQ ID NO: 2496135 - DNA, 25 bp, Homo sapien
ggcttgcgtgtaaccagtaatgaca

SEQ ID NO: 2496136 - DNA, 25 bp, Homo sapien
cagtaatgacaacctctttgcagtt

SEQ ID NO: 2496137 - DNA, 25 bp, Homo sapien
tctggcctcggcttgcgtgtaacca

SEQ ID NO: 2496138 - DNA, 25 bp, Homo sapien
aagagatctggcctcggcttgcgtg

SEQ ID NO: 2496139 - DNA, 25 bp, Homo sapien
tgtcaaggagaaaagtgccctccct

SEQ ID NO: 2496140 - DNA, 25 bp, Homo sapien
caagatggtccatgcaaatgagctg

SEQ ID NO: 2496141 - DNA, 25 bp, Homo sapien
caggatggttcgatgcaagtacaca

SEQ ID NO: 2496142 - DNA, 25 bp, Homo sapien
taagattcattagctacccaagtgg

SEQ ID NO: 2496143 - DNA, 25 bp, Homo sapien
tgccaagcccgctatgttgtttaag

SEQ ID NO: 2496144 - DNA, 25 bp, Homo sapien
tttaagcttcgggatttttcatatc

SEQ ID NO: 2496145 - DNA, 25 bp, Homo sapien
gatcgagagcgcctcagaggacaag

SEQ ID NO: 2496146 - DNA, 25 bp, Homo sapien
tggagagagcctcagagcattgcct

SEQ ID NO: 2496147 - DNA, 25 bp, Homo sapien
cttttatgaaaaaatgcacagacat

SEQ ID NO: 2496148 - DNA, 25 bp, Homo sapien
tctaatcagacctcagtgtactcga

SEQ ID NO: 2496149 - DNA, 25 bp, Homo sapien
gacagttaaacgaggtggaaagcac

SEQ ID NO: 2496150 - DNA, 25 bp, Homo sapien
ggtatggatcgcagtaacagctctc

SEQ ID NO: 2496151 - DNA, 25 bp, Homo sapien
tgaaatatcttaaagcagggcaact

SEQ ID NO: 2496152 - DNA, 25 bp, Homo sapien
gaagcacacgtgtaatcacctgtcg

SEQ ID NO: 2496153 - DNA, 25 bp, Homo sapien
cacctgtcgtcagtaggaaacatgt

SEQ ID NO: 2496154 - DNA, 25 bp, Homo sapien
tgatccctccatcagaagcacacgt

SEQ ID NO: 2496155 - DNA, 25 bp, Homo sapien
tctctggtactagagcgtctgatgg

SEQ ID NO: 2496156 - DNA, 25 bp, Homo sapien
gggtgatagtggcggctcacttcct

SEQ ID NO: 2496157 - DNA, 25 bp, Homo sapien
gatagtggcggctcacttcctgtac

SEQ ID NO: 2496158 - DNA, 25 bp, Homo sapien
ctgggggtgatagtggcggctcact

SEQ ID NO: 2496159 - DNA, 25 bp, Homo sapien
tgatagtggcggctcacttcctgta

SEQ ID NO: 2496160 - DNA, 25 bp, Homo sapien
tcttgtgaattaggttgagatgcat

SEQ ID NO: 2496161 - DNA, 25 bp, Homo sapien
aaataactgcttcttgtgaattagg

SEQ ID NO: 2496162 - DNA, 25 bp, Homo sapien
atgcatggcaccatgtggcagaggt

SEQ ID NO: 2496163 - DNA, 25 bp, Homo sapien
aattaggttgagatgcatggcacca

SEQ ID NO: 2496164 - DNA, 25 bp, Homo sapien
cagacctacaaaatggcgggtgagc

SEQ ID NO: 2496165 - DNA, 25 bp, Homo sapien
tgagtcccacctctaagtagaaagg

SEQ ID NO: 2496166 - DNA, 25 bp, Homo sapien
cagctttggatgacagcccactgag

SEQ ID NO: 2496167 - DNA, 25 bp, Homo sapien
gaagagtatgtccaagcaccctcag

SEQ ID NO: 2496168 - DNA, 25 bp, Homo sapien
atttcatactgtagaacaacacttg

SEQ ID NO: 2496169 - DNA, 25 bp, Homo sapien
gatgaattcaagtttattgggtgaa

SEQ ID NO: 2496170 - DNA, 25 bp, Homo sapien
tctacatacgtcaaggcaggatccg

SEQ ID NO: 2496171 - DNA, 25 bp, Homo sapien
tgtaattgaaaccaggatgaagaat

SEQ ID NO: 2496172 - DNA, 25 bp, Homo sapien
ccaccccaactacactcttcaccat

SEQ ID NO: 2496173 - DNA, 25 bp, Homo sapien
cccaccccaactacactcttcacca

SEQ ID NO: 2496174 - DNA, 25 bp, Homo sapien
tcccaccccaactacactcttcacc

SEQ ID NO: 2496175 - DNA, 25 bp, Homo sapien
tcaagaattcccttaatgtggtcct

SEQ ID NO: 2496176 - DNA, 25 bp, Homo sapien
tgcactactgcatctggacatagaa

SEQ ID NO: 2496177 - DNA, 25 bp, Homo sapien
gagtctggcaaagaactactaagta

SEQ ID NO: 2496178 - DNA, 25 bp, Homo sapien
tctccgttgatagaaaataagcttg

SEQ ID NO: 2496179 - DNA, 25 bp, Homo sapien
ttaatgacaatgttggtagtaaact

SEQ ID NO: 2496180 - DNA, 25 bp, Homo sapien
aacagttaatgacaatgttggtagt

SEQ ID NO: 2496181 - DNA, 25 bp, Homo sapien
tagtaaactcaataaagtgtttgag

SEQ ID NO: 2496182 - DNA, 25 bp, Homo sapien
gtagtaaactcaataaagtgtttga

SEQ ID NO: 2496183 - DNA, 25 bp, Homo sapien
tattcccttgctacactactctaag

SEQ ID NO: 2496184 - DNA, 25 bp, Homo sapien
caaatagatgagtactgaaaagcaa

SEQ ID NO: 2496185 - DNA, 25 bp, Homo sapien
cacatgtcatgtaatctcaattaag

SEQ ID NO: 2496186 - DNA, 25 bp, Homo sapien
caaaatctccccacatattggataa

SEQ ID NO: 2496187 - DNA, 25 bp, Homo sapien
ctctgagtagaagcttcttgcagat

SEQ ID NO: 2496188 - DNA, 25 bp, Homo sapien
tcaacctctgagtagaagcttcttg

SEQ ID NO: 2496189 - DNA, 25 bp, Homo sapien
caacctctgagtagaagcttcttgc

SEQ ID NO: 2496190 - DNA, 25 bp, Homo sapien
acctctgagtagaagcttcttgcag

SEQ ID NO: 2496191 - DNA, 25 bp, Homo sapien
tccccaagagggaatgaataactgc

SEQ ID NO: 2496192 - DNA, 25 bp, Homo sapien
gatgaataggacttactgagcaaaa

SEQ ID NO: 2496193 - DNA, 25 bp, Homo sapien
gagttttaagaactgagctcccaga

SEQ ID NO: 2496194 - DNA, 25 bp, Homo sapien
tatgctgttaagagttattccggtg

SEQ ID NO: 2496195 - DNA, 25 bp, Homo sapien
gctctccagacactcttactttctg

SEQ ID NO: 2496196 - DNA, 25 bp, Homo sapien
agctctccagacactcttactttct

SEQ ID NO: 2496197 - DNA, 25 bp, Homo sapien
aagtagaatcctgcatatacatcta

SEQ ID NO: 2496198 - DNA, 25 bp, Homo sapien
cctgcatatacatctaatttacttt

SEQ ID NO: 2496199 - DNA, 25 bp, Homo sapien
tgccagattaggagaagaccctgcc

SEQ ID NO: 2496200 - DNA, 25 bp, Homo sapien
ccagattaggagaagaccctgccat

SEQ ID NO: 2496201 - DNA, 25 bp, Homo sapien
gccagattaggagaagaccctgcca

SEQ ID NO: 2496202 - DNA, 25 bp, Homo sapien
caaaactctcagtcctcttacaaga

SEQ ID NO: 2496203 - DNA, 25 bp, Homo sapien
gaaatcacaggtcaacatccactac

SEQ ID NO: 2496204 - DNA, 25 bp, Homo sapien
aagaacagtggagacatctctgccc

SEQ ID NO: 2496205 - DNA, 25 bp, Homo sapien
tctgccctcttatagatccatggac

SEQ ID NO: 2496206 - DNA, 25 bp, Homo sapien
tcagggtttggttctgtatgtgctg

SEQ ID NO: 2496207 - DNA, 25 bp, Homo sapien
cagggtttggttctgtatgtgctga

SEQ ID NO: 2496208 - DNA, 25 bp, Homo sapien
aaggtcaaagcgttcaaatcttcct

SEQ ID NO: 2496209 - DNA, 25 bp, Homo sapien
tcttcctgcatgaaacttgatcttc

SEQ ID NO: 2496210 - DNA, 25 bp, Homo sapien
ctttgggaggtcgaggcgggtggat

SEQ ID NO: 2496211 - DNA, 25 bp, Homo sapien
cacgaggtcaggagatcgagaccat

SEQ ID NO: 2496212 - DNA, 25 bp, Homo sapien
gtggctcacgcctgtaatcccagca

SEQ ID NO: 2496213 - DNA, 25 bp, Homo sapien
aataagaatttatcggccgggcgcg

SEQ ID NO: 2496214 - DNA, 25 bp, Homo sapien
ttcttcttgtaagttgcccccacta

SEQ ID NO: 2496215 - DNA, 25 bp, Homo sapien
tgtaagttgcccccactaagcagac

SEQ ID NO: 2496216 - DNA, 25 bp, Homo sapien
ttgtaagttgcccccactaagcaga

SEQ ID NO: 2496217 - DNA, 25 bp, Homo sapien
ttcttgtaagttgcccccactaagc

SEQ ID NO: 2496218 - DNA, 25 bp, Homo sapien
tttggttgaccgtagaagtggatct

SEQ ID NO: 2496219 - DNA, 25 bp, Homo sapien
gttgaccgtagaagtggatctgcag

SEQ ID NO: 2496220 - DNA, 25 bp, Homo sapien
agatccagatctgtctctcctcgtg

SEQ ID NO: 2496221 - DNA, 25 bp, Homo sapien
ctatttggttgaccgtagaagtgga

SEQ ID NO: 2496222 - DNA, 25 bp, Homo sapien
taaggccagtaataccgcttcccag

SEQ ID NO: 2496223 - DNA, 25 bp, Homo sapien
ctaaggccagtaataccgcttccca

SEQ ID NO: 2496224 - DNA, 25 bp, Homo sapien
aggccagtaataccgcttcccagca

SEQ ID NO: 2496225 - DNA, 25 bp, Homo sapien
gccagtaataccgcttcccagcaaa

SEQ ID NO: 2496226 - DNA, 25 bp, Homo sapien
ttggaaagagactatcatcttcatc

SEQ ID NO: 2496227 - DNA, 25 bp, Homo sapien
actatcatcttcatcaatctcaatt

SEQ ID NO: 2496228 - DNA, 25 bp, Homo sapien
atcatcttcatcaatctcaattttc

SEQ ID NO: 2496229 - DNA, 25 bp, Homo sapien
cttggaaagagactatcatcttcat

SEQ ID NO: 2496230 - DNA, 25 bp, Homo sapien
tctcagattcttggagttccagcat

SEQ ID NO: 2496231 - DNA, 25 bp, Homo sapien
ctctcagattcttggagttccagca

SEQ ID NO: 2496232 - DNA, 25 bp, Homo sapien
cacctctcagattcttggagttcca

SEQ ID NO: 2496233 - DNA, 25 bp, Homo sapien
ctgcctttgccaacttgccacttct

SEQ ID NO: 2496234 - DNA, 25 bp, Homo sapien
tgtcttaaataatggccaagctcaa

SEQ ID NO: 2496235 - DNA, 25 bp, Homo sapien
ccaaattggtatcttacatctcagt

SEQ ID NO: 2496236 - DNA, 25 bp, Homo sapien
gttgttgataccttagcacattagg

SEQ ID NO: 2496237 - DNA, 25 bp, Homo sapien
catacaatgttgagctaaatcctta

SEQ ID NO: 2496238 - DNA, 25 bp, Homo sapien
gaagaaagttaccaccatggtcacg

SEQ ID NO: 2496239 - DNA, 25 bp, Homo sapien
cattagtgttttgatagttcaggag

SEQ ID NO: 2496240 - DNA, 25 bp, Homo sapien
tggtcacgttctctacaaccagcgg

SEQ ID NO: 2496241 - DNA, 25 bp, Homo sapien
caaccagcggtgtaacagaggacaa

SEQ ID NO: 2496242 - DNA, 25 bp, Homo sapien
tcttcagcatcttttcctaggacac

SEQ ID NO: 2496243 - DNA, 25 bp, Homo sapien
tccttgctgccgcaacatccattct

SEQ ID NO: 2496244 - DNA, 25 bp, Homo sapien
cagcatcttttcctaggacacggca

SEQ ID NO: 2496245 - DNA, 25 bp, Homo sapien
atcttttcctaggacacggcatcct

SEQ ID NO: 2496246 - DNA, 25 bp, Homo sapien
ccctcttcagctacaaaggtttcag

SEQ ID NO: 2496247 - DNA, 25 bp, Homo sapien
ttgccgctgctcttaaaatccttca

SEQ ID NO: 2496248 - DNA, 25 bp, Homo sapien
gaaagaccagaacttctcaagagaa

SEQ ID NO: 2496249 - DNA, 25 bp, Homo sapien
caaaatctctccattaccagcagag

SEQ ID NO: 2496250 - DNA, 25 bp, Homo sapien
tgcagatctccaatagctctaaatg

SEQ ID NO: 2496251 - DNA, 25 bp, Homo sapien
tacaacaacatttaactttgtttgc

SEQ ID NO: 2496252 - DNA, 25 bp, Homo sapien
tgtttgcagatctccaatagctcta

SEQ ID NO: 2496253 - DNA, 25 bp, Homo sapien
gatctccaatagctctaaatgcttt

SEQ ID NO: 2496254 - DNA, 25 bp, Homo sapien
gtggttggatatacacctgcactga

SEQ ID NO: 2496255 - DNA, 25 bp, Homo sapien
tcaagtgaaaatgcgactgagatta

SEQ ID NO: 2496256 - DNA, 25 bp, Homo sapien
cggttacccttgcaggtggttggat

SEQ ID NO: 2496257 - DNA, 25 bp, Homo sapien
gagattatctaatcggttacccttg

SEQ ID NO: 2496258 - DNA, 25 bp, Homo sapien
agctgaacatcttcatgggtttcat

SEQ ID NO: 2496259 - DNA, 25 bp, Homo sapien
atgacagagccacagcaaaatgatt

SEQ ID NO: 2496260 - DNA, 25 bp, Homo sapien
ttcatgggtttcatgacagagccac

SEQ ID NO: 2496261 - DNA, 25 bp, Homo sapien
ttcctgagatcaatatgtggttgag

SEQ ID NO: 2496262 - DNA, 25 bp, Homo sapien
tttctatggtaaccacagcagtagc

SEQ ID NO: 2496263 - DNA, 25 bp, Homo sapien
aaccacagcagtagctacccaacag

SEQ ID NO: 2496264 - DNA, 25 bp, Homo sapien
taaccacagcagtagctacccaaca

SEQ ID NO: 2496265 - DNA, 25 bp, Homo sapien
ctgtttctatggtaaccacagcagt

SEQ ID NO: 2496266 - DNA, 25 bp, Homo sapien
aagtgacaggcccaaacaacgttct

SEQ ID NO: 2496267 - DNA, 25 bp, Homo sapien
tccccagacacatagatacattcca

SEQ ID NO: 2496268 - DNA, 25 bp, Homo sapien
tagtattcgtctcccttggaaagtg

SEQ ID NO: 2496269 - DNA, 25 bp, Homo sapien
gattcaacccccaattggagccacg

SEQ ID NO: 2496270 - DNA, 25 bp, Homo sapien
gacattggccctctaggtcccatct

SEQ ID NO: 2496271 - DNA, 25 bp, Homo sapien
tcgacattggccctctaggtcccat

SEQ ID NO: 2496272 - DNA, 25 bp, Homo sapien
aaaagtcgacattggccctctaggt

SEQ ID NO: 2496273 - DNA, 25 bp, Homo sapien
ggccctctaggtcccatctgctaaa

SEQ ID NO: 2496274 - DNA, 25 bp, Homo sapien
tccagcggccagatttgccgtcggg

SEQ ID NO: 2496275 - DNA, 25 bp, Homo sapien
cggggtcgccgccaatgaggtcggg

SEQ ID NO: 2496276 - DNA, 25 bp, Homo sapien
cggctctggacgagtaggggtcttc

SEQ ID NO: 2496277 - DNA, 25 bp, Homo sapien
aggtcgggggtctcgaagatgtcca

SEQ ID NO: 2496278 - DNA, 25 bp, Homo sapien
tgcggtagtaattgagcacataggc

SEQ ID NO: 2496279 - DNA, 25 bp, Homo sapien
ggccgccaccgggatggtcgctggc

SEQ ID NO: 2496280 - DNA, 25 bp, Homo sapien
cgaagaagaactcgcggccgccacc

SEQ ID NO: 2496281 - DNA, 25 bp, Homo sapien
cacataggcgaagacgcccgggtgc

SEQ ID NO: 2496282 - DNA, 25 bp, Homo sapien
ggcaagaagggccaggcgtgttcca

SEQ ID NO: 2496283 - DNA, 25 bp, Homo sapien
gggtgcccccgacattgaggatcac

SEQ ID NO: 2496284 - DNA, 25 bp, Homo sapien
tgcggtaggtttcgtgccgggtgcc

SEQ ID NO: 2496285 - DNA, 25 bp, Homo sapien
gctgcagcttgtcgcccgccgtggt

SEQ ID NO: 2496286 - DNA, 25 bp, Homo sapien
ctctcgttgttctcgatcttgccca

SEQ ID NO: 2496287 - DNA, 25 bp, Homo sapien
tctcgttgttctcgatcttgcccat

SEQ ID NO: 2496288 - DNA, 25 bp, Homo sapien
cctctcgttgttctcgatcttgccc

SEQ ID NO: 2496289 - DNA, 25 bp, Homo sapien
acacagcgccgagttaaagatctta

SEQ ID NO: 2496290 - DNA, 25 bp, Homo sapien
gttaaagatcttagccgtcaaagac

SEQ ID NO: 2496291 - DNA, 25 bp, Homo sapien
gccgagttaaagatcttagccgtca

SEQ ID NO: 2496292 - DNA, 25 bp, Homo sapien
gggaggcaaacacagcgccgagtta

SEQ ID NO: 2496293 - DNA, 25 bp, Homo sapien
ttcatgacaccgttttccctgcctc

SEQ ID NO: 2496294 - DNA, 25 bp, Homo sapien
atgacaccgttttccctgcctcccg

SEQ ID NO: 2496295 - DNA, 25 bp, Homo sapien
tcatgacaccgttttccctgcctcc

SEQ ID NO: 2496296 - DNA, 25 bp, Homo sapien
tgacaccgttttccctgcctcccgc

SEQ ID NO: 2496297 - DNA, 25 bp, Homo sapien
caacttggcagtgttgggtgagagc

SEQ ID NO: 2496298 - DNA, 25 bp, Homo sapien
gcaacttggcagtgttgggtgagag

SEQ ID NO: 2496299 - DNA, 25 bp, Homo sapien
cctcaggcaacttggcagtgttggg

SEQ ID NO: 2496300 - DNA, 25 bp, Homo sapien
tttcctcaggcaacttggcagtgtt

SEQ ID NO: 2496301 - DNA, 25 bp, Homo sapien
tctgctttggtttccgagtggacga

SEQ ID NO: 2496302 - DNA, 25 bp, Homo sapien
tgagccgcccttctccgacgagaaa

SEQ ID NO: 2496303 - DNA, 25 bp, Homo sapien
cttaacgagaccgagagaaaagtgg

SEQ ID NO: 2496304 - DNA, 25 bp, Homo sapien
ttctctgggcagcgggactgagtct

SEQ ID NO: 2496305 - DNA, 25 bp, Homo sapien
tgtgatctgcggatttgccagtcgc

SEQ ID NO: 2496306 - DNA, 25 bp, Homo sapien
tcaggtggttgagccgcttccctgg

SEQ ID NO: 2496307 - DNA, 25 bp, Homo sapien
cagggttgggcaaaccatggagctc

SEQ ID NO: 2496308 - DNA, 25 bp, Homo sapien
tacttgttggcgttttccggattca

SEQ ID NO: 2496309 - DNA, 25 bp, Homo sapien
gccctgctcggattccatctgcaga

SEQ ID NO: 2496310 - DNA, 25 bp, Homo sapien
agtcgccctgctcggattccatctg

SEQ ID NO: 2496311 - DNA, 25 bp, Homo sapien
cacttgaaggtgaagtcgccctgct

SEQ ID NO: 2496312 - DNA, 25 bp, Homo sapien
ggtgaagtcgccctgctcggattcc

SEQ ID NO: 2496313 - DNA, 25 bp, Homo sapien
tcccgccgccatccgaagcacaggg

SEQ ID NO: 2496314 - DNA, 25 bp, Homo sapien
aaatttccctttgtcgatggcatca

SEQ ID NO: 2496315 - DNA, 25 bp, Homo sapien
gattaagtctcatcctgatatcgtc

SEQ ID NO: 2496316 - DNA, 25 bp, Homo sapien
ggttgccttcatcctcctacatgtg

SEQ ID NO: 2496317 - DNA, 25 bp, Homo sapien
gatatcgtcaaaaacccaatttggc

SEQ ID NO: 2496318 - DNA, 25 bp, Homo sapien
catactactggtctcctggcagctg

SEQ ID NO: 2496319 - DNA, 25 bp, Homo sapien
ttccatactactggtctcctggcag

SEQ ID NO: 2496320 - DNA, 25 bp, Homo sapien
ctcttccatactactggtctcctgg

SEQ ID NO: 2496321 - DNA, 25 bp, Homo sapien
ccatactactggtctcctggcagct

SEQ ID NO: 2496322 - DNA, 25 bp, Homo sapien
gaaatcagtttacctcagaagttta

SEQ ID NO: 2496323 - DNA, 25 bp, Homo sapien
tattaagtacatccaagaaatcagt

SEQ ID NO: 2496324 - DNA, 25 bp, Homo sapien
gaacgatatgtatgacaagagcctc

SEQ ID NO: 2496325 - DNA, 25 bp, Homo sapien
tctcatgatcagaaacgaatacatc

SEQ ID NO: 2496326 - DNA, 25 bp, Homo sapien
tgcaagcactacaaactataatctc

SEQ ID NO: 2496327 - DNA, 25 bp, Homo sapien
taatgtacacaattctctcctgaaa

SEQ ID NO: 2496328 - DNA, 25 bp, Homo sapien
cttgataacaaacaacttaaactgg

SEQ ID NO: 2496329 - DNA, 25 bp, Homo sapien
cataatctgcagtaaacatagccta

SEQ ID NO: 2496330 - DNA, 25 bp, Homo sapien
caaatgtaaggacatgtgaacaggc

SEQ ID NO: 2496331 - DNA, 25 bp, Homo sapien
tgctgccaagtatagatggatacag

SEQ ID NO: 2496332 - DNA, 25 bp, Homo sapien
gggttcacatgtatcacacttctca

SEQ ID NO: 2496333 - DNA, 25 bp, Homo sapien
taacaatcgtatgctggtaaaaagg

SEQ ID NO: 2496334 - DNA, 25 bp, Homo sapien
tgacacttcatcagacttgctgcag

SEQ ID NO: 2496335 - DNA, 25 bp, Homo sapien
tcccccatggagtacgtaagatgtt

SEQ ID NO: 2496336 - DNA, 25 bp, Homo sapien
ccttcatagtaatcttcaaattcac

SEQ ID NO: 2496337 - DNA, 25 bp, Homo sapien
gtcttcatcatctactattcctata

SEQ ID NO: 2496338 - DNA, 25 bp, Homo sapien
gtttcctgaaaagttcagtgaaatg

SEQ ID NO: 2496339 - DNA, 25 bp, Homo sapien
acagtttcctgaaaagttcagtgaa

SEQ ID NO: 2496340 - DNA, 25 bp, Homo sapien
ctgagtatgaaacagtttcctgaaa

SEQ ID NO: 2496341 - DNA, 25 bp, Homo sapien
cagtttcctgaaaagttcagtgaaa

SEQ ID NO: 2496342 - DNA, 25 bp, Homo sapien
gaataatggtgctacgtagagatgg

SEQ ID NO: 2496343 - DNA, 25 bp, Homo sapien
tcctctcggagaccagaaaatattt

SEQ ID NO: 2496344 - DNA, 25 bp, Homo sapien
taccagccatacttttgaacagagg

SEQ ID NO: 2496345 - DNA, 25 bp, Homo sapien
cttagatgggaatactactcaaacc

SEQ ID NO: 2496346 - DNA, 25 bp, Homo sapien
taggcacactgccacttttgttgaa

SEQ ID NO: 2496347 - DNA, 25 bp, Homo sapien
tacttgagaatgcttctttgcacag

SEQ ID NO: 2496348 - DNA, 25 bp, Homo sapien
tataataggcacactgccacttttg

SEQ ID NO: 2496349 - DNA, 25 bp, Homo sapien
ctgaaattacttgagaatgcttctt

SEQ ID NO: 2496350 - DNA, 25 bp, Homo sapien
catttcaccaataataccacgtttg

SEQ ID NO: 2496351 - DNA, 25 bp, Homo sapien
tcgaacatatgatttcctgtattca

SEQ ID NO: 2496352 - DNA, 25 bp, Homo sapien
caaccttgccattgccattgtcatt

SEQ ID NO: 2496353 - DNA, 25 bp, Homo sapien
aataccacgtttgaattctccataa

SEQ ID NO: 2496354 - DNA, 25 bp, Homo sapien
ttagagcttgcttaaaatctgcctt

SEQ ID NO: 2496355 - DNA, 25 bp, Homo sapien
cttttagagcttgcttaaaatctgc

SEQ ID NO: 2496356 - DNA, 25 bp, Homo sapien
tccagtcaaaatacgaacacctctt

SEQ ID NO: 2496357 - DNA, 25 bp, Homo sapien
ttcccaatccagtcaaaatacgaac

SEQ ID NO: 2496358 - DNA, 25 bp, Homo sapien
ggtttcttgaatgattatatcatcc

SEQ ID NO: 2496359 - DNA, 25 bp, Homo sapien
gctttgaagaccagcctatcattgg

SEQ ID NO: 2496360 - DNA, 25 bp, Homo sapien
cattggtttcttgaatgattatatc

SEQ ID NO: 2496361 - DNA, 25 bp, Homo sapien
ttgaatgattatatcatcctcctgt

SEQ ID NO: 2496362 - DNA, 25 bp, Homo sapien
tgtgattcggagtttaagtaatgtg

SEQ ID NO: 2496363 - DNA, 25 bp, Homo sapien
caatatttgtgattcggagtttaag

SEQ ID NO: 2496364 - DNA, 25 bp, Homo sapien
tatttgatcaatatttgtgattcgg

SEQ ID NO: 2496365 - DNA, 25 bp, Homo sapien
gagaatccaaagctatttgatcaat

SEQ ID NO: 2496366 - DNA, 25 bp, Homo sapien
ctgagatgatcagaactcaaaaatg

SEQ ID NO: 2496367 - DNA, 25 bp, Homo sapien
gatgatcagaactcaaaaatgtcaa

SEQ ID NO: 2496368 - DNA, 25 bp, Homo sapien
gagatgatcagaactcaaaaatgtc

SEQ ID NO: 2496369 - DNA, 25 bp, Homo sapien
tgatcagaactcaaaaatgtcaagg

SEQ ID NO: 2496370 - DNA, 25 bp, Homo sapien
caaagtacgaagatacaacttcatc

SEQ ID NO: 2496371 - DNA, 25 bp, Homo sapien
cttttcaaagtacgaagatacaact

SEQ ID NO: 2496372 - DNA, 25 bp, Homo sapien
tttcaaagtacgaagatacaacttc

SEQ ID NO: 2496373 - DNA, 25 bp, Homo sapien
gtacgaagatacaacttcatctgga

SEQ ID NO: 2496374 - DNA, 25 bp, Homo sapien
acataaaaatcaccaagtcggtatt

SEQ ID NO: 2496375 - DNA, 25 bp, Homo sapien
ttttcttcgtccacactgatgacta

SEQ ID NO: 2496376 - DNA, 25 bp, Homo sapien
cgtccacactgatgactataaatgc

SEQ ID NO: 2496377 - DNA, 25 bp, Homo sapien
atcaccaagtcggtattgttttcct

SEQ ID NO: 2496378 - DNA, 25 bp, Homo sapien
taagggattggtcatgagtgaaaaa

SEQ ID NO: 2496379 - DNA, 25 bp, Homo sapien
gagtgaaaaagaacccaatgagctc

SEQ ID NO: 2496380 - DNA, 25 bp, Homo sapien
gctctctgcaagcatcacgtccatt

SEQ ID NO: 2496381 - DNA, 25 bp, Homo sapien
atttttcccaaattgtcgatattca

SEQ ID NO: 2496382 - DNA, 25 bp, Homo sapien
ccatcaaactgtaatttatgagaaa

SEQ ID NO: 2496383 - DNA, 25 bp, Homo sapien
agttaatgtagaatgagttcttatc

SEQ ID NO: 2496384 - DNA, 25 bp, Homo sapien
gatacgatcctaccatcaaactgta

SEQ ID NO: 2496385 - DNA, 25 bp, Homo sapien
cgtgatacgatcctaccatcaaact

SEQ ID NO: 2496386 - DNA, 25 bp, Homo sapien
ttttctaaatcgaagaggtgtcatc

SEQ ID NO: 2496387 - DNA, 25 bp, Homo sapien
ttgctctggatcactgatgacagcc

SEQ ID NO: 2496388 - DNA, 25 bp, Homo sapien
tttgctcaatggctaaattttgctc

SEQ ID NO: 2496389 - DNA, 25 bp, Homo sapien
tcatctttgaatctggaaggatatg

SEQ ID NO: 2496390 - DNA, 25 bp, Homo sapien
cagaaggcgcacgacgagctcgtgt

SEQ ID NO: 2496391 - DNA, 25 bp, Homo sapien
agctcgtgtggtacatgcgggtcaa

SEQ ID NO: 2496392 - DNA, 25 bp, Homo sapien
cgggtcaaggaccagaagaagatga

SEQ ID NO: 2496393 - DNA, 25 bp, Homo sapien
cgagcgaccggaaggctcagcagca

SEQ ID NO: 2496394 - DNA, 25 bp, Homo sapien
attagtgatggaggggcatattcag

SEQ ID NO: 2496395 - DNA, 25 bp, Homo sapien
ctacaattagtgatggaggggcata

SEQ ID NO: 2496396 - DNA, 25 bp, Homo sapien
tacaattagtgatggaggggcatat

SEQ ID NO: 2496397 - DNA, 25 bp, Homo sapien
caattagtgatggaggggcatattc

SEQ ID NO: 2496398 - DNA, 25 bp, Homo sapien
gtgttcgggatgcaccgcagaggct

SEQ ID NO: 2496399 - DNA, 25 bp, Homo sapien
ctcgcccaggtgttcgggatgcacc

SEQ ID NO: 2496400 - DNA, 25 bp, Homo sapien
ccaggtgttcgggatgcaccgcaga

SEQ ID NO: 2496401 - DNA, 25 bp, Homo sapien
gttcgggatgcaccgcagaggctga

SEQ ID NO: 2496402 - DNA, 25 bp, Homo sapien
accatgaagtctgcgctggtgaaag

SEQ ID NO: 2496403 - DNA, 25 bp, Homo sapien
cctgaggctgtccaacctccacacc

SEQ ID NO: 2496404 - DNA, 25 bp, Homo sapien
cacctgaggctgtccaacctccaca

SEQ ID NO: 2496405 - DNA, 25 bp, Homo sapien
acaccatgaagtctgcgctggtgaa

SEQ ID NO: 2496406 - DNA, 25 bp, Homo sapien
gcccgaggagcatggacagggtggc

SEQ ID NO: 2496407 - DNA, 25 bp, Homo sapien
gagcccgaggagcatggacagggtg

SEQ ID NO: 2496408 - DNA, 25 bp, Homo sapien
ggagcccgaggagcatggacagggt

SEQ ID NO: 2496409 - DNA, 25 bp, Homo sapien
cccgaggagcatggacagggtggct

SEQ ID NO: 2496410 - DNA, 25 bp, Homo sapien
agggtcctgacaggcctcctgctca

SEQ ID NO: 2496411 - DNA, 25 bp, Homo sapien
cagggtcctgacaggcctcctgctc

SEQ ID NO: 2496412 - DNA, 25 bp, Homo sapien
catcaccgaggagttcgtccagcag

SEQ ID NO: 2496413 - DNA, 25 bp, Homo sapien
tccacattcgggaacgtgcggaagc

SEQ ID NO: 2496414 - DNA, 25 bp, Homo sapien
gtctagaacgtgctgcgcgtcctgg

SEQ ID NO: 2496415 - DNA, 25 bp, Homo sapien
ctcattctacttgaagggccgcggc

SEQ ID NO: 2496416 - DNA, 25 bp, Homo sapien
aacatgcaaatcatggagttcctgg

SEQ ID NO: 2496417 - DNA, 25 bp, Homo sapien
cgggccagccgcgaaattacgaaca

SEQ ID NO: 2496418 - DNA, 25 bp, Homo sapien
gcccggcccctacgtggagcagctg

SEQ ID NO: 2496419 - DNA, 25 bp, Homo sapien
gccgcgaaattacgaacatgcaaat

SEQ ID NO: 2496420 - DNA, 25 bp, Homo sapien
gcaaagctggcctaaccaagagaaa

SEQ ID NO: 2496421 - DNA, 25 bp, Homo sapien
cagcaaagctggcctaaccaagaga

SEQ ID NO: 2496422 - DNA, 25 bp, Homo sapien
aagagaaaagtcaaggcccctctct

SEQ ID NO: 2496423 - DNA, 25 bp, Homo sapien
ccaagagaaaagtcaaggcccctct

SEQ ID NO: 2496424 - DNA, 25 bp, Homo sapien
ttcttcttctctgcagccacaattt

SEQ ID NO: 2496425 - DNA, 25 bp, Homo sapien
ttgctctgcaacaatctgtttcttc

SEQ ID NO: 2496426 - DNA, 25 bp, Homo sapien
cacttgctctgcaacaatctgtttc

SEQ ID NO: 2496427 - DNA, 25 bp, Homo sapien
gtttcttcttctctgcagccacaat

SEQ ID NO: 2496428 - DNA, 25 bp, Homo sapien
tatctaagagtgattcataaagtgg

SEQ ID NO: 2496429 - DNA, 25 bp, Homo sapien
gtggacactgactaaaacattaaaa

SEQ ID NO: 2496430 - DNA, 25 bp, Homo sapien
gatccacatcggctgaacacagatg

SEQ ID NO: 2496431 - DNA, 25 bp, Homo sapien
ccacatcggctgaacacagatgtaa

SEQ ID NO: 2496432 - DNA, 25 bp, Homo sapien
ttaattaacaccatagagcccatgc

SEQ ID NO: 2496433 - DNA, 25 bp, Homo sapien
ggttagaacccgtaggcacactgat

SEQ ID NO: 2496434 - DNA, 25 bp, Homo sapien
cagtgttgaagcttgtggtggttta

SEQ ID NO: 2496435 - DNA, 25 bp, Homo sapien
gcccatcttcagtgttgaagcttgt

SEQ ID NO: 2496436 - DNA, 25 bp, Homo sapien
caaaggagctagatgagatggacac

SEQ ID NO: 2496437 - DNA, 25 bp, Homo sapien
aaataggtgctaatttcagatgccc

SEQ ID NO: 2496438 - DNA, 25 bp, Homo sapien
gacacaaaatccgtagtttcactgc

SEQ ID NO: 2496439 - DNA, 25 bp, Homo sapien
gcagattacaagcagaagtgacact

SEQ ID NO: 2496440 - DNA, 25 bp, Homo sapien
ataagtaaaaatgctgacaacttac

SEQ ID NO: 2496441 - DNA, 25 bp, Homo sapien
aaataagtaaaaatgctgacaactt

SEQ ID NO: 2496442 - DNA, 25 bp, Homo sapien
aataagtaaaaatgctgacaactta

SEQ ID NO: 2496443 - DNA, 25 bp, Homo sapien
caaataagtaaaaatgctgacaact

SEQ ID NO: 2496444 - DNA, 25 bp, Homo sapien
ctgcataaccttgctgtaagatggc

SEQ ID NO: 2496445 - DNA, 25 bp, Homo sapien
tatcgcaagagttgtctgcataacc

SEQ ID NO: 2496446 - DNA, 25 bp, Homo sapien
tttcttgccctctgttgtttatcgc

SEQ ID NO: 2496447 - DNA, 25 bp, Homo sapien
gagtcgtaaggtcatctgtgttggc

SEQ ID NO: 2496448 - DNA, 25 bp, Homo sapien
ccttgtagagtcattctcggtcttc

SEQ ID NO: 2496449 - DNA, 25 bp, Homo sapien
ttaatgtcctgcacattcatccttg

SEQ ID NO: 2496450 - DNA, 25 bp, Homo sapien
cattcatccttgtagagtcattctc

SEQ ID NO: 2496451 - DNA, 25 bp, Homo sapien
taatgtcctgcacattcatccttgt

SEQ ID NO: 2496452 - DNA, 25 bp, Homo sapien
tcttggagactgtttatgtgtaaca

SEQ ID NO: 2496453 - DNA, 25 bp, Homo sapien
ctttaatttcagttttacattgctg

SEQ ID NO: 2496454 - DNA, 25 bp, Homo sapien
gagactgtttatgtgtaacatttga

SEQ ID NO: 2496455 - DNA, 25 bp, Homo sapien
tctgactatactgcttatagccctc

SEQ ID NO: 2496456 - DNA, 25 bp, Homo sapien
gtgtgacccagccaagagtagaaga

SEQ ID NO: 2496457 - DNA, 25 bp, Homo sapien
tagaagatgaatttggcaggtttgc

SEQ ID NO: 2496458 - DNA, 25 bp, Homo sapien
gatactgagtatatggagtttgaca

SEQ ID NO: 2496459 - DNA, 25 bp, Homo sapien
gctgtactaagtggaatatatgaaa

SEQ ID NO: 2496460 - DNA, 25 bp, Homo sapien
gcttcccaaatcaagtcgtgggacc

SEQ ID NO: 2496461 - DNA, 25 bp, Homo sapien
agaattctggtttgtccatgactca

SEQ ID NO: 2496462 - DNA, 25 bp, Homo sapien
tttgtccatgactcagaagtccacc

SEQ ID NO: 2496463 - DNA, 25 bp, Homo sapien
gaattctggtttgtccatgactcag

SEQ ID NO: 2496464 - DNA, 25 bp, Homo sapien
tggtttgtccatgactcagaagtcc

SEQ ID NO: 2496465 - DNA, 25 bp, Homo sapien
gcagcaactcctttaacctctaaat

SEQ ID NO: 2496466 - DNA, 25 bp, Homo sapien
acctctaaatccatttgagttcctg

SEQ ID NO: 2496467 - DNA, 25 bp, Homo sapien
tttgagttcctgtgtttatcatgca

SEQ ID NO: 2496468 - DNA, 25 bp, Homo sapien
ggcagcaactcctttaacctctaaa

SEQ ID NO: 2496469 - DNA, 25 bp, Homo sapien
tgcagtgtagcagaaggaattcccc

SEQ ID NO: 2496470 - DNA, 25 bp, Homo sapien
agtgtagcagaaggaattccccatc

SEQ ID NO: 2496471 - DNA, 25 bp, Homo sapien
gcagtgtagcagaaggaattcccca

SEQ ID NO: 2496472 - DNA, 25 bp, Homo sapien
ctgcagtgtagcagaaggaattccc

SEQ ID NO: 2496473 - DNA, 25 bp, Homo sapien
taacaagctcggtaagaagaggtcc

SEQ ID NO: 2496474 - DNA, 25 bp, Homo sapien
ccgcattcagaaagctttagacagg

SEQ ID NO: 2496475 - DNA, 25 bp, Homo sapien
ttagacaggacagtctagacagtcc

SEQ ID NO: 2496476 - DNA, 25 bp, Homo sapien
actagcgcgattcctccaaaaaccg

SEQ ID NO: 2496477 - DNA, 25 bp, Homo sapien
tgtattacaatccagacgcgctctg

SEQ ID NO: 2496478 - DNA, 25 bp, Homo sapien
tgctttgcactcgactggcccattg

SEQ ID NO: 2496479 - DNA, 25 bp, Homo sapien
gagtctaccagtcaccatacagtgg

SEQ ID NO: 2496480 - DNA, 25 bp, Homo sapien
taaaaatctatacacggaagctgcg

SEQ ID NO: 2496481 - DNA, 25 bp, Homo sapien
aatgtgtgttgatccccccatgtgt

SEQ ID NO: 2496482 - DNA, 25 bp, Homo sapien
ccttctgcctacaggccccaatgtg

SEQ ID NO: 2496483 - DNA, 25 bp, Homo sapien
ctcccaccgccttctgcctacaggc

SEQ ID NO: 2496484 - DNA, 25 bp, Homo sapien
ccccaatgtgtgttgatccccccat

SEQ ID NO: 2496485 - DNA, 25 bp, Homo sapien
gagattatagttccctccctcaaca

SEQ ID NO: 2496486 - DNA, 25 bp, Homo sapien
tgttgcagtctttcttccccttagc

SEQ ID NO: 2496487 - DNA, 25 bp, Homo sapien
tagcagacttctgcctagatatcca

SEQ ID NO: 2496488 - DNA, 25 bp, Homo sapien
gctataggccctgcacaagtccaaa

SEQ ID NO: 2496489 - DNA, 25 bp, Homo sapien
ccataggcaagatcaatggccagta

SEQ ID NO: 2496490 - DNA, 25 bp, Homo sapien
tattgccaagggacctagatccaaa

SEQ ID NO: 2496491 - DNA, 25 bp, Homo sapien
cagatgggaatggacatagacaggc

SEQ ID NO: 2496492 - DNA, 25 bp, Homo sapien
taatgagacatgtctgacctcccct

SEQ ID NO: 2496493 - DNA, 25 bp, Homo sapien
tagttttagcaacagagcatatgca

SEQ ID NO: 2496494 - DNA, 25 bp, Homo sapien
tgtaatctcatgcaaccacctcttg

SEQ ID NO: 2496495 - DNA, 25 bp, Homo sapien
tctgtaggttttgtcaaatcatctg

SEQ ID NO: 2496496 - DNA, 25 bp, Homo sapien
cagatcaggctcaatgggattccaa

SEQ ID NO: 2496497 - DNA, 25 bp, Homo sapien
tactagtaaacctggcatgccctca

SEQ ID NO: 2496498 - DNA, 25 bp, Homo sapien
gagttgcagattgacctttgggcta

SEQ ID NO: 2496499 - DNA, 25 bp, Homo sapien
aactaacacggcacctcaaagtgga

SEQ ID NO: 2496500 - DNA, 25 bp, Homo sapien
cctctgagagggctaaaaatgccaa

SEQ ID NO: 2496501 - DNA, 25 bp, Homo sapien
tgcaatgttgagcataagctgtaac

SEQ ID NO: 2496502 - DNA, 25 bp, Homo sapien
aatccaatttggtcatgaggtttcc

SEQ ID NO: 2496503 - DNA, 25 bp, Homo sapien
gaggtttccttaagagatggctaga

SEQ ID NO: 2496504 - DNA, 25 bp, Homo sapien
taagtgatgccccagtaatacaata

SEQ ID NO: 2496505 - DNA, 25 bp, Homo sapien
gtcgggaagccgacaattcagcctt

SEQ ID NO: 2496506 - DNA, 25 bp, Homo sapien
cctggtttattctagctggcagccg

SEQ ID NO: 2496507 - DNA, 25 bp, Homo sapien
taaaccactgatgtaaatccgagag

SEQ ID NO: 2496508 - DNA, 25 bp, Homo sapien
tgatctataggtgaagtcccatctg

SEQ ID NO: 2496509 - DNA, 25 bp, Homo sapien
tgtgaatgccacaattagtgaaaaa

SEQ ID NO: 2496510 - DNA, 25 bp, Homo sapien
tgaatgccacaattagtgaaaaaga

SEQ ID NO: 2496511 - DNA, 25 bp, Homo sapien
aaaagatgaatcttgatattccggg

SEQ ID NO: 2496512 - DNA, 25 bp, Homo sapien
aatcttgatattccgggctgtctga

SEQ ID NO: 2496513 - DNA, 25 bp, Homo sapien
gtttgtcagacatctattaccagct

SEQ ID NO: 2496514 - DNA, 25 bp, Homo sapien
tattaactgtaaatagtatagtcta

SEQ ID NO: 2496515 - DNA, 25 bp, Homo sapien
tggacatcactcagcttatttaaac

SEQ ID NO: 2496516 - DNA, 25 bp, Homo sapien
tagtctatcataatagtatggccta

SEQ ID NO: 2496517 - DNA, 25 bp, Homo sapien
ttctttagcagatttggacatcact

SEQ ID NO: 2496518 - DNA, 25 bp, Homo sapien
gccatgagaagtgcaagagatttat

SEQ ID NO: 2496519 - DNA, 25 bp, Homo sapien
agttcagacgctccactactaaaac

SEQ ID NO: 2496520 - DNA, 25 bp, Homo sapien
accagccatgagaagtgcaagagat

SEQ ID NO: 2496521 - DNA, 25 bp, Homo sapien
gttcagacgctccactactaaaacc

SEQ ID NO: 2496522 - DNA, 25 bp, Homo sapien
tcagcatgccaaatatatagaggtc

SEQ ID NO: 2496523 - DNA, 25 bp, Homo sapien
ttgggatacaatcttggagaagcgg

SEQ ID NO: 2496524 - DNA, 25 bp, Homo sapien
gacagaatgagcaacttatccggcc

SEQ ID NO: 2496525 - DNA, 25 bp, Homo sapien
caatgtgtatgaatgggcctggtac

SEQ ID NO: 2496526 - DNA, 25 bp, Homo sapien
gaagacctcattcaattattaccac

SEQ ID NO: 2496527 - DNA, 25 bp, Homo sapien
cagatattagatatgttggaaggct

SEQ ID NO: 2496528 - DNA, 25 bp, Homo sapien
cctgatgtcatttagctagtaagat

SEQ ID NO: 2496529 - DNA, 25 bp, Homo sapien
tgtttagctctctacactgaagacc

SEQ ID NO: 2496530 - DNA, 25 bp, Homo sapien
aagggtagatccttacataagctgg

SEQ ID NO: 2496531 - DNA, 25 bp, Homo sapien
tctgatagctaggtgaaagactgtt

SEQ ID NO: 2496532 - DNA, 25 bp, Homo sapien
gggactcaaaactactcaattgctg

SEQ ID NO: 2496533 - DNA, 25 bp, Homo sapien
catcatgacaagaaatcttcctggg

SEQ ID NO: 2496534 - DNA, 25 bp, Homo sapien
gggagcaccccttttagatcatgga

SEQ ID NO: 2496535 - DNA, 25 bp, Homo sapien
gggacaggcccaagatcattttaaa

SEQ ID NO: 2496536 - DNA, 25 bp, Homo sapien
ctttcgcagtgagacagaggcctaa

SEQ ID NO: 2496537 - DNA, 25 bp, Homo sapien
catggagtagggaagtacactcgcc

SEQ ID NO: 2496538 - DNA, 25 bp, Homo sapien
gagatggctcctattactacccctg

SEQ ID NO: 2496539 - DNA, 25 bp, Homo sapien
tactagcacgtaaagactgtgacca

SEQ ID NO: 2496540 - DNA, 25 bp, Homo sapien
ggtaccaccatcctgttgaagaatt

SEQ ID NO: 2496541 - DNA, 25 bp, Homo sapien
aaacagatatagttcccactttggg

SEQ ID NO: 2496542 - DNA, 25 bp, Homo sapien
gctatgaaagtgacaagagaaggct

SEQ ID NO: 2496543 - DNA, 25 bp, Homo sapien
tacaggacccatcacttagagtagc

SEQ ID NO: 2496544 - DNA, 25 bp, Homo sapien
tccaatagatcagggttacaggacc

SEQ ID NO: 2496545 - DNA, 25 bp, Homo sapien
agtacagtggctcgcttacggttca

SEQ ID NO: 2496546 - DNA, 25 bp, Homo sapien
aaggcagttgcagatctagcgggaa

SEQ ID NO: 2496547 - DNA, 25 bp, Homo sapien
tagtaccagtgtgcttaggccgtca

SEQ ID NO: 2496548 - DNA, 25 bp, Homo sapien
tgactcccatctagacaaatccagg

SEQ ID NO: 2496549 - DNA, 25 bp, Homo sapien
tggtgccctcggtctgctaaacaga

SEQ ID NO: 2496550 - DNA, 25 bp, Homo sapien
tgtgtctaaggtgagagttctcaac

SEQ ID NO: 2496551 - DNA, 25 bp, Homo sapien
taaagttgtgtgtctaaggtgagag

SEQ ID NO: 2496552 - DNA, 25 bp, Homo sapien
ttctcaactttggaggtaattgtag

SEQ ID NO: 2496553 - DNA, 25 bp, Homo sapien
taaggtatcgttataaagttgtgtg

SEQ ID NO: 2496554 - DNA, 25 bp, Homo sapien
caacttggccatataagagaggagc

SEQ ID NO: 2496555 - DNA, 25 bp, Homo sapien
tatgttgagaaagagcccataggcc

SEQ ID NO: 2496556 - DNA, 25 bp, Homo sapien
taacggctatcttcaaggaaactgg

SEQ ID NO: 2496557 - DNA, 25 bp, Homo sapien
tacagagggaattacccaacttggc

SEQ ID NO: 2496558 - DNA, 25 bp, Homo sapien
caggtcatccaaacaaacagaattc

SEQ ID NO: 2496559 - DNA, 25 bp, Homo sapien
aaactgtcagaaactgtagactaag

SEQ ID NO: 2496560 - DNA, 25 bp, Homo sapien
gtagactaagattcctaagatttgc

SEQ ID NO: 2496561 - DNA, 25 bp, Homo sapien
tttagttctaattggtcaaacaaca

SEQ ID NO: 2496562 - DNA, 25 bp, Homo sapien
gtgacacagtgagggtctatctcca

SEQ ID NO: 2496563 - DNA, 25 bp, Homo sapien
gaagaagtgtagaagctgcaagcag

SEQ ID NO: 2496564 - DNA, 25 bp, Homo sapien
aactgaactcagagcagccgggcta

SEQ ID NO: 2496565 - DNA, 25 bp, Homo sapien
tataaggtcccttgcaggcctaaaa

SEQ ID NO: 2496566 - DNA, 25 bp, Homo sapien
taagggctaaaactatggatttcag

SEQ ID NO: 2496567 - DNA, 25 bp, Homo sapien
ggatttcagaaccagtatgccaagt

SEQ ID NO: 2496568 - DNA, 25 bp, Homo sapien
tgaaaacccttggactcttgagaaa

SEQ ID NO: 2496569 - DNA, 25 bp, Homo sapien
gctgtagtccaataatgaaaaccct

SEQ ID NO: 2496570 - DNA, 25 bp, Homo sapien
acccttggaggccaaatcaggactg

SEQ ID NO: 2496571 - DNA, 25 bp, Homo sapien
tggtattccttcgtggtctcctaga

SEQ ID NO: 2496572 - DNA, 25 bp, Homo sapien
gacaaattatggcaagcactggagc

SEQ ID NO: 2496573 - DNA, 25 bp, Homo sapien
cactggagcataaattccttcgtgg

SEQ ID NO: 2496574 - DNA, 25 bp, Homo sapien
gaacatcacactcttgatttcatcg

SEQ ID NO: 2496575 - DNA, 25 bp, Homo sapien
cacactcttgatttcatcgacataa

SEQ ID NO: 2496576 - DNA, 25 bp, Homo sapien
catcacactcttgatttcatcgaca

SEQ ID NO: 2496577 - DNA, 25 bp, Homo sapien
agaacatcacactcttgatttcatc

SEQ ID NO: 2496578 - DNA, 25 bp, Homo sapien
gacttgatagccaaacatcgtaatg

SEQ ID NO: 2496579 - DNA, 25 bp, Homo sapien
tgggttctaccacgagcatctaata

SEQ ID NO: 2496580 - DNA, 25 bp, Homo sapien
cagtacccagaggaccagatgattg

SEQ ID NO: 2496581 - DNA, 25 bp, Homo sapien
gcatctaatagcgactgctgcagaa

SEQ ID NO: 2496582 - DNA, 25 bp, Homo sapien
aagcattatttgcaggttgccacag

SEQ ID NO: 2496583 - DNA, 25 bp, Homo sapien
tgctgcttcgactctaaatatctgg

SEQ ID NO: 2496584 - DNA, 25 bp, Homo sapien
gagaccaagtcaaacgtacgtacat

SEQ ID NO: 2496585 - DNA, 25 bp, Homo sapien
tacagttaaccgacagcgagaccaa

SEQ ID NO: 2496586 - DNA, 25 bp, Homo sapien
cagacactggatttaatggataatc

SEQ ID NO: 2496587 - DNA, 25 bp, Homo sapien
gaacactcttctatgaacaaccacc

SEQ ID NO: 2496588 - DNA, 25 bp, Homo sapien
ttctcacaaataaggcaactaatgc

SEQ ID NO: 2496589 - DNA, 25 bp, Homo sapien
caatggtcgtaatgtatacaaagac

SEQ ID NO: 2496590 - DNA, 25 bp, Homo sapien
tctgcctccatcttaagtgcaattt

SEQ ID NO: 2496591 - DNA, 25 bp, Homo sapien
atctgcctccatcttaagtgcaatt

SEQ ID NO: 2496592 - DNA, 25 bp, Homo sapien
tgcctccatcttaagtgcaatttct

SEQ ID NO: 2496593 - DNA, 25 bp, Homo sapien
ctggccacatcaattttagtttcag

SEQ ID NO: 2496594 - DNA, 25 bp, Homo sapien
tggcataaatggcataattgaacca

SEQ ID NO: 2496595 - DNA, 25 bp, Homo sapien
tactggattcaactatattaagact

SEQ ID NO: 2496596 - DNA, 25 bp, Homo sapien
ctttatatattagtacaagtataca

SEQ ID NO: 2496597 - DNA, 25 bp, Homo sapien
gaataattgaaaggtgatcacagta

SEQ ID NO: 2496598 - DNA, 25 bp, Homo sapien
tcaaactacccagcaacctgagaag

SEQ ID NO: 2496599 - DNA, 25 bp, Homo sapien
tgagtatattgagtaccttcaaagc

SEQ ID NO: 2496600 - DNA, 25 bp, Homo sapien
gaagcacagagtgttaaagcctcca

SEQ ID NO: 2496601 - DNA, 25 bp, Homo sapien
tcaaagcactcaactgacaggtttt

SEQ ID NO: 2496602 - DNA, 25 bp, Homo sapien
ttgagaggcatgacagcagagctca

SEQ ID NO: 2496603 - DNA, 25 bp, Homo sapien
ccatgttaccgatatagaagccaaa

SEQ ID NO: 2496604 - DNA, 25 bp, Homo sapien
tcaggagaggactgtcaatccagtt

SEQ ID NO: 2496605 - DNA, 25 bp, Homo sapien
taatagctcctgaataagacctgtc

SEQ ID NO: 2496606 - DNA, 25 bp, Homo sapien
tcttgtctcttactgatggcttctg

SEQ ID NO: 2496607 - DNA, 25 bp, Homo sapien
gtctcttactgatggcttctgcttg

SEQ ID NO: 2496608 - DNA, 25 bp, Homo sapien
ttgtctcttactgatggcttctgct

SEQ ID NO: 2496609 - DNA, 25 bp, Homo sapien
ctcttactgatggcttctgcttgtt

SEQ ID NO: 2496610 - DNA, 25 bp, Homo sapien
ccattttctgccgcttcttctgatt

SEQ ID NO: 2496611 - DNA, 25 bp, Homo sapien
ctttattgcttccattttctgccgc

SEQ ID NO: 2496612 - DNA, 25 bp, Homo sapien
tgcttccattttctgccgcttcttc

SEQ ID NO: 2496613 - DNA, 25 bp, Homo sapien
ttttctgccgcttcttctgatttgc

SEQ ID NO: 2496614 - DNA, 25 bp, Homo sapien
tcaccactagccaattctttatcga

SEQ ID NO: 2496615 - DNA, 25 bp, Homo sapien
ttcaccactagccaattctttatcg

SEQ ID NO: 2496616 - DNA, 25 bp, Homo sapien
caccactagccaattctttatcgat

SEQ ID NO: 2496617 - DNA, 25 bp, Homo sapien
taaacgaacttttatccatggaaca

SEQ ID NO: 2496618 - DNA, 25 bp, Homo sapien
aagaacaaccatagagcacacagtc

SEQ ID NO: 2496619 - DNA, 25 bp, Homo sapien
catttacagtggctacagggtcaca

SEQ ID NO: 2496620 - DNA, 25 bp, Homo sapien
tataatcaatgtgaacgccccactg

SEQ ID NO: 2496621 - DNA, 25 bp, Homo sapien
catttttgtgtttgaactgtggcaa

SEQ ID NO: 2496622 - DNA, 25 bp, Homo sapien
gaatcttttgccaactctctcttaa

SEQ ID NO: 2496623 - DNA, 25 bp, Homo sapien
tctcccaactttgtgatcgtaattc

SEQ ID NO: 2496624 - DNA, 25 bp, Homo sapien
tgccaactctctcttaatcattaag

SEQ ID NO: 2496625 - DNA, 25 bp, Homo sapien
tttgtcagactcagacattataaat

SEQ ID NO: 2496626 - DNA, 25 bp, Homo sapien
cataagcaaaaaggtaggttatcac

SEQ ID NO: 2496627 - DNA, 25 bp, Homo sapien
tacataagcaaaaaggtaggttatc

SEQ ID NO: 2496628 - DNA, 25 bp, Homo sapien
catttgtcagactcagacattataa

SEQ ID NO: 2496629 - DNA, 25 bp, Homo sapien
ttagctgatgttccctgcaagcagg

SEQ ID NO: 2496630 - DNA, 25 bp, Homo sapien
cagggagggctcttaattagctgat

SEQ ID NO: 2496631 - DNA, 25 bp, Homo sapien
cagaccatggaacatcagaggatgc

SEQ ID NO: 2496632 - DNA, 25 bp, Homo sapien
tgcacacagggatataacagttctc

SEQ ID NO: 2496633 - DNA, 25 bp, Homo sapien
aatgttataaattggatgaatattc

SEQ ID NO: 2496634 - DNA, 25 bp, Homo sapien
atagtatcaaggactacttttctaa

SEQ ID NO: 2496635 - DNA, 25 bp, Homo sapien
tcttcatagtatcaaggactacttt

SEQ ID NO: 2496636 - DNA, 25 bp, Homo sapien
gaatattcttcatagtatcaaggac

SEQ ID NO: 2496637 - DNA, 25 bp, Homo sapien
tgaatcgaagataatacatagttct

SEQ ID NO: 2496638 - DNA, 25 bp, Homo sapien
taaagcattatccaataaactatat

SEQ ID NO: 2496639 - DNA, 25 bp, Homo sapien
gctgaaaatgaatcgaagataatac

SEQ ID NO: 2496640 - DNA, 25 bp, Homo sapien
ctgctgaaaatgaatcgaagataat

SEQ ID NO: 2496641 - DNA, 25 bp, Homo sapien
tgtaacaattagttaagagttccaa

SEQ ID NO: 2496642 - DNA, 25 bp, Homo sapien
aacaattagttaagagttccaatgc

SEQ ID NO: 2496643 - DNA, 25 bp, Homo sapien
gtgtttccctgaaccataatgtaac

SEQ ID NO: 2496644 - DNA, 25 bp, Homo sapien
ttccctgaaccataatgtaacaatt

SEQ ID NO: 2496645 - DNA, 25 bp, Homo sapien
ctgtatcaagagatcaagttaaaat

SEQ ID NO: 2496646 - DNA, 25 bp, Homo sapien
tatcaagagatcaagttaaaattca

SEQ ID NO: 2496647 - DNA, 25 bp, Homo sapien
aagtattaaggaagagactcaagtt

SEQ ID NO: 2496648 - DNA, 25 bp, Homo sapien
gaagagactcaagttttccactaat

SEQ ID NO: 2496649 - DNA, 25 bp, Homo sapien
tgggaccaataagccgttgtcttcg

SEQ ID NO: 2496650 - DNA, 25 bp, Homo sapien
ttgggaccaataagccgttgtcttc

SEQ ID NO: 2496651 - DNA, 25 bp, Homo sapien
gccctaatgatgatatatggatcaa

SEQ ID NO: 2496652 - DNA, 25 bp, Homo sapien
gttttatcagatctctggccctaat

SEQ ID NO: 2496653 - DNA, 25 bp, Homo sapien
tgatatatggatcaaaagtcttctt

SEQ ID NO: 2496654 - DNA, 25 bp, Homo sapien
actccttgctaacagttttatcaga

SEQ ID NO: 2496655 - DNA, 25 bp, Homo sapien
tgccttcgatcaggtccagggttgc

SEQ ID NO: 2496656 - DNA, 25 bp, Homo sapien
ccaatggccaacactctttcaagta

SEQ ID NO: 2496657 - DNA, 25 bp, Homo sapien
ttgggaacaaagttgcgaaactgct

SEQ ID NO: 2496658 - DNA, 25 bp, Homo sapien
ggaaccgtaaggagttctgattcat

SEQ ID NO: 2496659 - DNA, 25 bp, Homo sapien
ccatcaggaaccgtaaggagttctg

SEQ ID NO: 2496660 - DNA, 25 bp, Homo sapien
gacaactttcgtccactcctagtgg

SEQ ID NO: 2496661 - DNA, 25 bp, Homo sapien
caggagtttcacaattaaggaagcc

SEQ ID NO: 2496662 - DNA, 25 bp, Homo sapien
tacaatgtttacctgacgaagtccc

SEQ ID NO: 2496663 - DNA, 25 bp, Homo sapien
gggaacaaaactgacactagcactt

SEQ ID NO: 2496664 - DNA, 25 bp, Homo sapien
taaaaccagactacaacgcaggagt

SEQ ID NO: 2496665 - DNA, 25 bp, Homo sapien
tcaactacacagtacaggctccagg

SEQ ID NO: 2496666 - DNA, 25 bp, Homo sapien
caaactagagctaaggacatgtcgg

SEQ ID NO: 2496667 - DNA, 25 bp, Homo sapien
gcttacaaggttctgcgtcgcccta

SEQ ID NO: 2496668 - DNA, 25 bp, Homo sapien
ttttccagcgcctttttctggccgc

SEQ ID NO: 2496669 - DNA, 25 bp, Homo sapien
ttggttctccggcttcggcttctgg

SEQ ID NO: 2496670 - DNA, 25 bp, Homo sapien
cggcttctggttacgaaattcactt

SEQ ID NO: 2496671 - DNA, 25 bp, Homo sapien
tacgaaattcactttttccagcgcc

SEQ ID NO: 2496672 - DNA, 25 bp, Homo sapien
tgcttccggtggctccggaaatgaa

SEQ ID NO: 2496673 - DNA, 25 bp, Homo sapien
ctgcttccggtggctccggaaatga

SEQ ID NO: 2496674 - DNA, 25 bp, Homo sapien
gctccggaaatgaaactgttcttaa

SEQ ID NO: 2496675 - DNA, 25 bp, Homo sapien
gctgcttccggtggctccggaaatg

SEQ ID NO: 2496676 - DNA, 25 bp, Homo sapien
cagacgaggagatctgcgcagtctc

SEQ ID NO: 2496677 - DNA, 25 bp, Homo sapien
tgcgtacgtgcgttaagcccgcgct

SEQ ID NO: 2496678 - DNA, 25 bp, Homo sapien
tcaaaatgagttccgcggaactcag

SEQ ID NO: 2496679 - DNA, 25 bp, Homo sapien
cagtctccgtgcgtacgtgcgttaa

SEQ ID NO: 2496680 - DNA, 25 bp, Homo sapien
actccaaacgcctcgctttgattcc

SEQ ID NO: 2496681 - DNA, 25 bp, Homo sapien
aacgcctcgctttgattcctatata

SEQ ID NO: 2496682 - DNA, 25 bp, Homo sapien
cctcgctttgattcctatataacct

SEQ ID NO: 2496683 - DNA, 25 bp, Homo sapien
ccaaacgcctcgctttgattcctat

SEQ ID NO: 2496684 - DNA, 25 bp, Homo sapien
ccacctgctgtcattaccagcataa

SEQ ID NO: 2496685 - DNA, 25 bp, Homo sapien
cagcataaaactccatctgctactt

SEQ ID NO: 2496686 - DNA, 25 bp, Homo sapien
tgtcattaccagcataaaactccat

SEQ ID NO: 2496687 - DNA, 25 bp, Homo sapien
cattaccagcataaaactccatctg

SEQ ID NO: 2496688 - DNA, 25 bp, Homo sapien
tgttcttgaagcaagtgtatcttca

SEQ ID NO: 2496689 - DNA, 25 bp, Homo sapien
tcttcaacatcttgtccagctgaag

SEQ ID NO: 2496690 - DNA, 25 bp, Homo sapien
tatcttcaacatcttgtccagctga

SEQ ID NO: 2496691 - DNA, 25 bp, Homo sapien
tcaaggatatgagggtgttcttgaa

SEQ ID NO: 2496692 - DNA, 25 bp, Homo sapien
agcctcctcgagtccacaacttaaa

SEQ ID NO: 2496693 - DNA, 25 bp, Homo sapien
tcgagtccacaacttaaacggtgct

SEQ ID NO: 2496694 - DNA, 25 bp, Homo sapien
tccacaacttaaacggtgctttctc

SEQ ID NO: 2496695 - DNA, 25 bp, Homo sapien
taaacggtgctttctctattattct

SEQ ID NO: 2496696 - DNA, 25 bp, Homo sapien
caaagagtgatagacatctgccagc

SEQ ID NO: 2496697 - DNA, 25 bp, Homo sapien
gattatgccctgaggaatctgttgc

SEQ ID NO: 2496698 - DNA, 25 bp, Homo sapien
caacaaacgagtaacaatttgaagg

SEQ ID NO: 2496699 - DNA, 25 bp, Homo sapien
ccagtaatgtgcttctgcagttggc

SEQ ID NO: 2496700 - DNA, 25 bp, Homo sapien
cagtccttgacggagatggtctcca

SEQ ID NO: 2496701 - DNA, 25 bp, Homo sapien
cattgcactgattggactggctgtc

SEQ ID NO: 2496702 - DNA, 25 bp, Homo sapien
gatttcttggcaacaaggcaaaggg

SEQ ID NO: 2496703 - DNA, 25 bp, Homo sapien
tctggcagctggtatatccttcact

SEQ ID NO: 2496704 - DNA, 25 bp, Homo sapien
taatcttttgcctaagatcaagtta

SEQ ID NO: 2496705 - DNA, 25 bp, Homo sapien
ccttaatcttttgcctaagatcaag

SEQ ID NO: 2496706 - DNA, 25 bp, Homo sapien
ttaatcttttgcctaagatcaagtt

SEQ ID NO: 2496707 - DNA, 25 bp, Homo sapien
agccttaatcttttgcctaagatca

SEQ ID NO: 2496708 - DNA, 25 bp, Homo sapien
agatgttgcattccctcacgaaacg

SEQ ID NO: 2496709 - DNA, 25 bp, Homo sapien
cacagcagagatagatttggaccct

SEQ ID NO: 2496710 - DNA, 25 bp, Homo sapien
tgtgagcaggtctctaagccttggt

SEQ ID NO: 2496711 - DNA, 25 bp, Homo sapien
tttggaccctagacccagatgttgc

SEQ ID NO: 2496712 - DNA, 25 bp, Homo sapien
ctgatttgtgaaaaacgggcattta

SEQ ID NO: 2496713 - DNA, 25 bp, Homo sapien
tgagtgctactctctgtttccaaga

SEQ ID NO: 2496714 - DNA, 25 bp, Homo sapien
tgcaattgaaaagccacatccattc

SEQ ID NO: 2496715 - DNA, 25 bp, Homo sapien
aagccacatccactctaatcacaag

SEQ ID NO: 2496716 - DNA, 25 bp, Homo sapien
cagcagtttctttaatgacatctaa

SEQ ID NO: 2496717 - DNA, 25 bp, Homo sapien
tgacatctaagaaaacagcacagtt

SEQ ID NO: 2496718 - DNA, 25 bp, Homo sapien
ctttaatgacatctaagaaaacagc

SEQ ID NO: 2496719 - DNA, 25 bp, Homo sapien
ttactcatctcccacagcagtttct

SEQ ID NO: 2496720 - DNA, 25 bp, Homo sapien
tagaacgcccatttgccatttctca

SEQ ID NO: 2496721 - DNA, 25 bp, Homo sapien
agaacgcccatttgccatttctcac

SEQ ID NO: 2496722 - DNA, 25 bp, Homo sapien
ctagaacgcccatttgccatttctc

SEQ ID NO: 2496723 - DNA, 25 bp, Homo sapien
tttcttgatcccagtggtaacctgg

SEQ ID NO: 2496724 - DNA, 25 bp, Homo sapien
ttcttgatcccagtggtaacctggg

SEQ ID NO: 2496725 - DNA, 25 bp, Homo sapien
agtggtaacctgggcaaggtctttg

SEQ ID NO: 2496726 - DNA, 25 bp, Homo sapien
tgttctaacaagtaattgacagtat

SEQ ID NO: 2496727 - DNA, 25 bp, Homo sapien
gataattgctgtacatgtagttccc

SEQ ID NO: 2496728 - DNA, 25 bp, Homo sapien
tgtagttcccctgagttttatttca

SEQ ID NO: 2496729 - DNA, 25 bp, Homo sapien
cactggcatccattaaggtagtgat

SEQ ID NO: 2496730 - DNA, 25 bp, Homo sapien
ggtcagtcaattcccagagtgcaaa

SEQ ID NO: 2496731 - DNA, 25 bp, Homo sapien
tctgaatcgactaattaggtcagtc

SEQ ID NO: 2496732 - DNA, 25 bp, Homo sapien
aattgttttctcatgatgaaaggtc

SEQ ID NO: 2496733 - DNA, 25 bp, Homo sapien
agagtgcaaaggctaaattttcttg

SEQ ID NO: 2496734 - DNA, 25 bp, Homo sapien
gcagcagctctacccattgcatcag

SEQ ID NO: 2496735 - DNA, 25 bp, Homo sapien
tctgacagttatggaaaggaattct

SEQ ID NO: 2496736 - DNA, 25 bp, Homo sapien
gcttgctgtgctcgcctggtgtctg

SEQ ID NO: 2496737 - DNA, 25 bp, Homo sapien
tcccttgtctgacagttatggaaag

SEQ ID NO: 2496738 - DNA, 25 bp, Homo sapien
tgcaggtgtaacttttataagcaag

SEQ ID NO: 2496739 - DNA, 25 bp, Homo sapien
ttgcaggtgtaacttttataagcaa

SEQ ID NO: 2496740 - DNA, 25 bp, Homo sapien
ttttgcaggtgtaacttttataagc

SEQ ID NO: 2496741 - DNA, 25 bp, Homo sapien
tttgcaggtgtaacttttataagca

SEQ ID NO: 2496742 - DNA, 25 bp, Homo sapien
ggagctctcctctgttgttgttaaa

SEQ ID NO: 2496743 - DNA, 25 bp, Homo sapien
acttccaggcaagttttcgggctat

SEQ ID NO: 2496744 - DNA, 25 bp, Homo sapien
caggcaagttttcgggctatcttca

SEQ ID NO: 2496745 - DNA, 25 bp, Homo sapien
tcttggcttttgatgataaaggagc

SEQ ID NO: 2496746 - DNA, 25 bp, Homo sapien
gaggtgtgctttgactagccaatag

SEQ ID NO: 2496747 - DNA, 25 bp, Homo sapien
tcacgaatcctgtaagaacagcctc

SEQ ID NO: 2496748 - DNA, 25 bp, Homo sapien
cacttagggaactatgaggtgtgct

SEQ ID NO: 2496749 - DNA, 25 bp, Homo sapien
tctcggatgatttccagtggtgaca

SEQ ID NO: 2496750 - DNA, 25 bp, Homo sapien
actttagcttgtttggattattctt

SEQ ID NO: 2496751 - DNA, 25 bp, Homo sapien
cactttagcttgtttggattattct

SEQ ID NO: 2496752 - DNA, 25 bp, Homo sapien
ctttagcttgtttggattattcttt

SEQ ID NO: 2496753 - DNA, 25 bp, Homo sapien
tgcttgctgccttctgctttttttt

SEQ ID NO: 2496754 - DNA, 25 bp, Homo sapien
ggtttgcttgctgccttctgctttt

SEQ ID NO: 2496755 - DNA, 25 bp, Homo sapien
tttgcttgctgccttctgctttttt

SEQ ID NO: 2496756 - DNA, 25 bp, Homo sapien
gcttgctgccttctgcttttttttt

SEQ ID NO: 2496757 - DNA, 25 bp, Homo sapien
atttccaataggcttcctacctaga

SEQ ID NO: 2496758 - DNA, 25 bp, Homo sapien
catcatcatttccaataggcttcct

SEQ ID NO: 2496759 - DNA, 25 bp, Homo sapien
tccaataggcttcctacctagaaaa

SEQ ID NO: 2496760 - DNA, 25 bp, Homo sapien
catcatttccaataggcttcctacc

SEQ ID NO: 2496761 - DNA, 25 bp, Homo sapien
tttaagtttacaccatagtcctgcc

SEQ ID NO: 2496762 - DNA, 25 bp, Homo sapien
tgcaagcctctttaccatgaagcct

SEQ ID NO: 2496763 - DNA, 25 bp, Homo sapien
cttttctatttatccgagtaccact

SEQ ID NO: 2496764 - DNA, 25 bp, Homo sapien
tatccaaggccctatgcaagcctct

SEQ ID NO: 2496765 - DNA, 25 bp, Homo sapien
ttggtgagtattaagagggggaagc

SEQ ID NO: 2496766 - DNA, 25 bp, Homo sapien
tattaagagggggaagcacagtgaa

SEQ ID NO: 2496767 - DNA, 25 bp, Homo sapien
agtattaagagggggaagcacagtg

SEQ ID NO: 2496768 - DNA, 25 bp, Homo sapien
ttaggtggacaggaagtagaattta

SEQ ID NO: 2496769 - DNA, 25 bp, Homo sapien
cacttctctagagggccacaactgg

SEQ ID NO: 2496770 - DNA, 25 bp, Homo sapien
gccacaactgggaaggtacttgacc

SEQ ID NO: 2496771 - DNA, 25 bp, Homo sapien
tctctagagggccacaactgggaag

SEQ ID NO: 2496772 - DNA, 25 bp, Homo sapien
tagagggccacaactgggaaggtac

SEQ ID NO: 2496773 - DNA, 25 bp, Homo sapien
tgataacttggccaactggccacag

SEQ ID NO: 2496774 - DNA, 25 bp, Homo sapien
acttggccaactggccacagtgccc

SEQ ID NO: 2496775 - DNA, 25 bp, Homo sapien
gataacttggccaactggccacagt

SEQ ID NO: 2496776 - DNA, 25 bp, Homo sapien
taacttggccaactggccacagtgc

SEQ ID NO: 2496777 - DNA, 25 bp, Homo sapien
caaaaacatgtacatccatctgaaa

SEQ ID NO: 2496778 - DNA, 25 bp, Homo sapien
gtgcaaggtcaaaaacatgtacatc

SEQ ID NO: 2496779 - DNA, 25 bp, Homo sapien
aaggtcaaaaacatgtacatccatc

SEQ ID NO: 2496780 - DNA, 25 bp, Homo sapien
ggtcaaaaacatgtacatccatctg

SEQ ID NO: 2496781 - DNA, 25 bp, Homo sapien
caaggaagctgctgtttgcagccat

SEQ ID NO: 2496782 - DNA, 25 bp, Homo sapien
gctgcatacactaccaaggaagctg

SEQ ID NO: 2496783 - DNA, 25 bp, Homo sapien
ggactgtctccaaggccctttagag

SEQ ID NO: 2496784 - DNA, 25 bp, Homo sapien
ccgtacaacaaacaggctgcataca

SEQ ID NO: 2496785 - DNA, 25 bp, Homo sapien
gagttggttagtgcaatatacttaa

SEQ ID NO: 2496786 - DNA, 25 bp, Homo sapien
acagatcatgagttggttagtgcaa

SEQ ID NO: 2496787 - DNA, 25 bp, Homo sapien
ggactcattattttgacctcggctt

SEQ ID NO: 2496788 - DNA, 25 bp, Homo sapien
aaatggaagtttgacgtagatatac

SEQ ID NO: 2496789 - DNA, 25 bp, Homo sapien
acgctctctagtggagtgttgtttc

SEQ ID NO: 2496790 - DNA, 25 bp, Homo sapien
gtagaagaaagtagagtaccaggag

SEQ ID NO: 2496791 - DNA, 25 bp, Homo sapien
ctcggctgggacgttgtagaagaaa

SEQ ID NO: 2496792 - DNA, 25 bp, Homo sapien
aattctaagattctacgctctctag

SEQ ID NO: 2496793 - DNA, 25 bp, Homo sapien
tgcagtgagaacattcgggatttcc

SEQ ID NO: 2496794 - DNA, 25 bp, Homo sapien
tatggttggagaaaaccgtgcctgc

SEQ ID NO: 2496795 - DNA, 25 bp, Homo sapien
gatgttctcacagacagttcagtag

SEQ ID NO: 2496796 - DNA, 25 bp, Homo sapien
tgtcaagtcatcacggacagcggct

SEQ ID NO: 2496797 - DNA, 25 bp, Homo sapien
gggctggtaacctgaagcagctggt

SEQ ID NO: 2496798 - DNA, 25 bp, Homo sapien
acagacaggtgtgggctggtaacct

SEQ ID NO: 2496799 - DNA, 25 bp, Homo sapien
tcagaggtgagacagacaggtgtgg

SEQ ID NO: 2496800 - DNA, 25 bp, Homo sapien
ggtgagacagacaggtgtgggctgg

SEQ ID NO: 2496801 - DNA, 25 bp, Homo sapien
tggtacaatgaaagaacggtaatct

SEQ ID NO: 2496802 - DNA, 25 bp, Homo sapien
accagtcccgcaacatggtggcctg

SEQ ID NO: 2496803 - DNA, 25 bp, Homo sapien
gtaacaatgactgagcctgagatgg

SEQ ID NO: 2496804 - DNA, 25 bp, Homo sapien
tggtggcctgcttaagtaacaatga

SEQ ID NO: 2496805 - DNA, 25 bp, Homo sapien
gagaattagccaaaccaattccatg

SEQ ID NO: 2496806 - DNA, 25 bp, Homo sapien
tccagtgctccaacaaatagagaaa

SEQ ID NO: 2496807 - DNA, 25 bp, Homo sapien
ctgtttcaacagctgtagtaatggc

SEQ ID NO: 2496808 - DNA, 25 bp, Homo sapien
ttccatgaacaattccggtaagtca

SEQ ID NO: 2496809 - DNA, 25 bp, Homo sapien
gaaaacatcttaaggcactccaata

SEQ ID NO: 2496810 - DNA, 25 bp, Homo sapien
aaggcactccaataaaacaatcttc

SEQ ID NO: 2496811 - DNA, 25 bp, Homo sapien
ttgaaaacatcttaaggcactccaa

SEQ ID NO: 2496812 - DNA, 25 bp, Homo sapien
caaatgtgtaagtattatgttgaac

SEQ ID NO: 2496813 - DNA, 25 bp, Homo sapien
ggacagacctctgaatggtactgct

SEQ ID NO: 2496814 - DNA, 25 bp, Homo sapien
catcctcccaactggtgcaagtgtg

SEQ ID NO: 2496815 - DNA, 25 bp, Homo sapien
gaatatatcttaagagggacagacc

SEQ ID NO: 2496816 - DNA, 25 bp, Homo sapien
gcatggatgcagtcaatattgaaag

SEQ ID NO: 2496817 - DNA, 25 bp, Homo sapien
gattcactggacaccactcttcaag

SEQ ID NO: 2496818 - DNA, 25 bp, Homo sapien
gacaccactcttcaagggcagcaag

SEQ ID NO: 2496819 - DNA, 25 bp, Homo sapien
ttgaaagattcactggacaccactc

SEQ ID NO: 2496820 - DNA, 25 bp, Homo sapien
aacaatgaagctcagtatcattctt

SEQ ID NO: 2496821 - DNA, 25 bp, Homo sapien
ctggggcactggctaatactggaag

SEQ ID NO: 2496822 - DNA, 25 bp, Homo sapien
ctgaggggctgagtggtgctcttaa

SEQ ID NO: 2496823 - DNA, 25 bp, Homo sapien
cctggggcactggctaatactggaa

SEQ ID NO: 2496824 - DNA, 25 bp, Homo sapien
ggtgctcttaacaacatcccaggaa

SEQ ID NO: 2496825 - DNA, 25 bp, Homo sapien
caagaactgtttaggttgaccttct

SEQ ID NO: 2496826 - DNA, 25 bp, Homo sapien
tggaatttcccgaaatgaaatccaa

SEQ ID NO: 2496827 - DNA, 25 bp, Homo sapien
gacatgcacagaacgagctgagctg

SEQ ID NO: 2496828 - DNA, 25 bp, Homo sapien
ccgagcctcggtaggtggacatgca

SEQ ID NO: 2496829 - DNA, 25 bp, Homo sapien
tgttctagcgccaaaatgcagagtt

SEQ ID NO: 2496830 - DNA, 25 bp, Homo sapien
tacaaatgtgtaaacagcggctcta

SEQ ID NO: 2496831 - DNA, 25 bp, Homo sapien
aacctgagcctttttgactttggag

SEQ ID NO: 2496832 - DNA, 25 bp, Homo sapien
cagttatttcaatggacaggagcac

SEQ ID NO: 2496833 - DNA, 25 bp, Homo sapien
caacattcacctttgcagccaagag

SEQ ID NO: 2496834 - DNA, 25 bp, Homo sapien
aacacgaaaattggaaatgagccac

SEQ ID NO: 2496835 - DNA, 25 bp, Homo sapien
tctgcatgcagctctaacacgaaaa

SEQ ID NO: 2496836 - DNA, 25 bp, Homo sapien
aaattctgaagcctcggagatgtga

SEQ ID NO: 2496837 - DNA, 25 bp, Homo sapien
gatatcctatcagggtcacattagg

SEQ ID NO: 2496838 - DNA, 25 bp, Homo sapien
cacacaaaagcataggttacttcgg

SEQ ID NO: 2496839 - DNA, 25 bp, Homo sapien
gaacattttcattgcgccccattgt

SEQ ID NO: 2496840 - DNA, 25 bp, Homo sapien
tgtcccagcaacgaaagcacatgtt

SEQ ID NO: 2496841 - DNA, 25 bp, Homo sapien
ggccattcatggcaacacacatgtc

SEQ ID NO: 2496842 - DNA, 25 bp, Homo sapien
gccattcatggcaacacacatgtct

SEQ ID NO: 2496843 - DNA, 25 bp, Homo sapien
cattcatggcaacacacatgtctgt

SEQ ID NO: 2496844 - DNA, 25 bp, Homo sapien
ccattcatggcaacacacatgtctg

SEQ ID NO: 2496845 - DNA, 25 bp, Homo sapien
accacttctcacttcaaatgtaata

SEQ ID NO: 2496846 - DNA, 25 bp, Homo sapien
tacttgtacggcatcatcccttcac

SEQ ID NO: 2496847 - DNA, 25 bp, Homo sapien
cttcaccacttctcacttcaaatgt

SEQ ID NO: 2496848 - DNA, 25 bp, Homo sapien
ctacttgtacggcatcatcccttca

SEQ ID NO: 2496849 - DNA, 25 bp, Homo sapien
tctcctcctcccttctctgctgaat

SEQ ID NO: 2496850 - DNA, 25 bp, Homo sapien
ctcctcccttctctgctgaatacat

SEQ ID NO: 2496851 - DNA, 25 bp, Homo sapien
tcctcctcccttctctgctgaatac

SEQ ID NO: 2496852 - DNA, 25 bp, Homo sapien
ctttgactgttctcctcctcccttc

SEQ ID NO: 2496853 - DNA, 25 bp, Homo sapien
tccccccgttcctctctcaacattc

SEQ ID NO: 2496854 - DNA, 25 bp, Homo sapien
cttcccttatccctcctctccacat

SEQ ID NO: 2496855 - DNA, 25 bp, Homo sapien
tgtctagaatcttcagagtagaaaa

SEQ ID NO: 2496856 - DNA, 25 bp, Homo sapien
cagagtagaaaaatacacatgaaaa

SEQ ID NO: 2496857 - DNA, 25 bp, Homo sapien
tctcagcacctatcacaggtcctgg

SEQ ID NO: 2496858 - DNA, 25 bp, Homo sapien
tcagcacctatcacaggtcctggca

SEQ ID NO: 2496859 - DNA, 25 bp, Homo sapien
ctctctcagcacctatcacaggtcc

SEQ ID NO: 2496860 - DNA, 25 bp, Homo sapien
tctctcagcacctatcacaggtcct

SEQ ID NO: 2496861 - DNA, 25 bp, Homo sapien
tttaggcaccttcgtctttccatga

SEQ ID NO: 2496862 - DNA, 25 bp, Homo sapien
tgaaactttctccattagctgtgag

SEQ ID NO: 2496863 - DNA, 25 bp, Homo sapien
gagtgtgccctgctgaaccttgtgg

SEQ ID NO: 2496864 - DNA, 25 bp, Homo sapien
taacacggcttgaagggcccttctg

SEQ ID NO: 2496865 - DNA, 25 bp, Homo sapien
atgatactgccttcatcatgctcat

SEQ ID NO: 2496866 - DNA, 25 bp, Homo sapien
gacctgaactttccggccactgtat

SEQ ID NO: 2496867 - DNA, 25 bp, Homo sapien
ttccggccactgtatcaagcacaaa

SEQ ID NO: 2496868 - DNA, 25 bp, Homo sapien
caggatgccacccagacctgaactt

SEQ ID NO: 2496869 - DNA, 25 bp, Homo sapien
tcgagtcctctatcacacataattg

SEQ ID NO: 2496870 - DNA, 25 bp, Homo sapien
aattgacctgaggaattttgcgcag

SEQ ID NO: 2496871 - DNA, 25 bp, Homo sapien
catccaattttctaggtacgtcggg

SEQ ID NO: 2496872 - DNA, 25 bp, Homo sapien
gaacaaaatcataagctgacagctc

SEQ ID NO: 2496873 - DNA, 25 bp, Homo sapien
ttacagatgcctgtccacaagccag

SEQ ID NO: 2496874 - DNA, 25 bp, Homo sapien
atgcctgtccacaagccaggctaat

SEQ ID NO: 2496875 - DNA, 25 bp, Homo sapien
cgcacccagctgagacagacttctt

SEQ ID NO: 2496876 - DNA, 25 bp, Homo sapien
atactcacaaatttgggtaaacaca

SEQ ID NO: 2496877 - DNA, 25 bp, Homo sapien
tggagcactcgagcttctgtgatag

SEQ ID NO: 2496878 - DNA, 25 bp, Homo sapien
aggaatttatggagcactcgagctt

SEQ ID NO: 2496879 - DNA, 25 bp, Homo sapien
tgagcagccacttcaagttcagcag

SEQ ID NO: 2496880 - DNA, 25 bp, Homo sapien
tacttgagcagccacttcaagttca

SEQ ID NO: 2496881 - DNA, 25 bp, Homo sapien
ccttcctagcctctagctggcttag

SEQ ID NO: 2496882 - DNA, 25 bp, Homo sapien
tccttcctagcctctagctggctta

SEQ ID NO: 2496883 - DNA, 25 bp, Homo sapien
aagcagcaacgtttatttcctctgc

SEQ ID NO: 2496884 - DNA, 25 bp, Homo sapien
tttcaaagcagcaacgtttatttcc

SEQ ID NO: 2496885 - DNA, 25 bp, Homo sapien
tttctctcttcctcaactaaattca

SEQ ID NO: 2496886 - DNA, 25 bp, Homo sapien
tgaaaccagttcttgccagttcctg

SEQ ID NO: 2496887 - DNA, 25 bp, Homo sapien
ttctctcttcctcaactaaattcat

SEQ ID NO: 2496888 - DNA, 25 bp, Homo sapien
ctgattgtagggcttacaataagcc

SEQ ID NO: 2496889 - DNA, 25 bp, Homo sapien
gattgtagggcttacaataagccat

SEQ ID NO: 2496890 - DNA, 25 bp, Homo sapien
ggataaaaagggcatgcaattctgc

SEQ ID NO: 2496891 - DNA, 25 bp, Homo sapien
gcaattctgcataaagggcttgaga

SEQ ID NO: 2496892 - DNA, 25 bp, Homo sapien
gggtgtgtgctcatcgagtttgaat

SEQ ID NO: 2496893 - DNA, 25 bp, Homo sapien
gtttgaatcagtcccattggcaggt

SEQ ID NO: 2496894 - DNA, 25 bp, Homo sapien
tgtgctcatcgagtttgaatcagtc

SEQ ID NO: 2496895 - DNA, 25 bp, Homo sapien
cattggcaggtgactctaagccact

SEQ ID NO: 2496896 - DNA, 25 bp, Homo sapien
ctctgagctgccttgcacctggtat

SEQ ID NO: 2496897 - DNA, 25 bp, Homo sapien
ctgagctgccttgcacctggtatat

SEQ ID NO: 2496898 - DNA, 25 bp, Homo sapien
tctgagctgccttgcacctggtata

SEQ ID NO: 2496899 - DNA, 25 bp, Homo sapien
tgcccagagcagcaacttgcttcat

SEQ ID NO: 2496900 - DNA, 25 bp, Homo sapien
gacatctccgtactgttttccgtag

SEQ ID NO: 2496901 - DNA, 25 bp, Homo sapien
tatgtagtcattggttgttgggaac

SEQ ID NO: 2496902 - DNA, 25 bp, Homo sapien
tgttgggaacttaggctggctccat

SEQ ID NO: 2496903 - DNA, 25 bp, Homo sapien
cgtagaggttatactgtacattccc

SEQ ID NO: 2496904 - DNA, 25 bp, Homo sapien
cagcagttgccgatacacacagtga

SEQ ID NO: 2496905 - DNA, 25 bp, Homo sapien
caagaagtgggcgtgtgacacaaac

SEQ ID NO: 2496906 - DNA, 25 bp, Homo sapien
gcccctgtgatagtgattggtccaa

SEQ ID NO: 2496907 - DNA, 25 bp, Homo sapien
tgaggaccagtccacgccagttggt

SEQ ID NO: 2496908 - DNA, 25 bp, Homo sapien
cagctctcattgagctaaacaattt

SEQ ID NO: 2496909 - DNA, 25 bp, Homo sapien
tcagctctcattgagctaaacaatt

SEQ ID NO: 2496910 - DNA, 25 bp, Homo sapien
tctcagctctcattgagctaaacaa

SEQ ID NO: 2496911 - DNA, 25 bp, Homo sapien
ctctcagctctcattgagctaaaca

SEQ ID NO: 2496912 - DNA, 25 bp, Homo sapien
aaaaagaccatgagcagccctttca

SEQ ID NO: 2496913 - DNA, 25 bp, Homo sapien
gctgtactggtttgctttatattcc

SEQ ID NO: 2496914 - DNA, 25 bp, Homo sapien
aaagaccatgagcagccctttcaat

SEQ ID NO: 2496915 - DNA, 25 bp, Homo sapien
ctttctgctgtactggtttgcttta

SEQ ID NO: 2496916 - DNA, 25 bp, Homo sapien
ggataaacaattgcagggtcactgg

SEQ ID NO: 2496917 - DNA, 25 bp, Homo sapien
taaccagtgaaggacaaccgagcag

SEQ ID NO: 2496918 - DNA, 25 bp, Homo sapien
tacccagctttcgaagtgtcacagg

SEQ ID NO: 2496919 - DNA, 25 bp, Homo sapien
tgacagatgaaaggctgacaggccc

SEQ ID NO: 2496920 - DNA, 25 bp, Homo sapien
tgtgccgaaagcgtacttaaatccg

SEQ ID NO: 2496921 - DNA, 25 bp, Homo sapien
attaactgtgccgaaagcgtactta

SEQ ID NO: 2496922 - DNA, 25 bp, Homo sapien
aaagcgtacttaaatccgagatgtc

SEQ ID NO: 2496923 - DNA, 25 bp, Homo sapien
tgccgaaagcgtacttaaatccgag

SEQ ID NO: 2496924 - DNA, 25 bp, Homo sapien
gaaaggcctgagctctcctccgtgg

SEQ ID NO: 2496925 - DNA, 25 bp, Homo sapien
agggatgtccgggagtccaattgcc

SEQ ID NO: 2496926 - DNA, 25 bp, Homo sapien
tgccaagctcttacacagtgcgatg

SEQ ID NO: 2496927 - DNA, 25 bp, Homo sapien
cttgtacacacagttggggggctga

SEQ ID NO: 2496928 - DNA, 25 bp, Homo sapien
ccgtgtatagcattaatcttgctgc

SEQ ID NO: 2496929 - DNA, 25 bp, Homo sapien
cccgtgtatagcattaatcttgctg

SEQ ID NO: 2496930 - DNA, 25 bp, Homo sapien
cgtgtatagcattaatcttgctgct

SEQ ID NO: 2496931 - DNA, 25 bp, Homo sapien
ctcccgtgtatagcattaatcttgc

SEQ ID NO: 2496932 - DNA, 25 bp, Homo sapien
atgtaaataagagctttgcataagc

SEQ ID NO: 2496933 - DNA, 25 bp, Homo sapien
gtaaataagagctttgcataagcca

SEQ ID NO: 2496934 - DNA, 25 bp, Homo sapien
gcagtatgagtcacttcctttttaa

SEQ ID NO: 2496935 - DNA, 25 bp, Homo sapien
atctgcagtatgagtcacttccttt

SEQ ID NO: 2496936 - DNA, 25 bp, Homo sapien
tgactctgactgagcccttgcagat

SEQ ID NO: 2496937 - DNA, 25 bp, Homo sapien
tctagccttgtagattgactctgac

SEQ ID NO: 2496938 - DNA, 25 bp, Homo sapien
gcttctctggctaatagtagcatct

SEQ ID NO: 2496939 - DNA, 25 bp, Homo sapien
tggctaatagtagcatctagccttg

SEQ ID NO: 2496940 - DNA, 25 bp, Homo sapien
tgatctgccagtcaatctccagagc

SEQ ID NO: 2496941 - DNA, 25 bp, Homo sapien
ccacaccagcttgagtaatcagctg

SEQ ID NO: 2496942 - DNA, 25 bp, Homo sapien
ccctattggtgagaacagtccaagt

SEQ ID NO: 2496943 - DNA, 25 bp, Homo sapien
ctccaagggaaaacctcccatgtag

SEQ ID NO: 2496944 - DNA, 25 bp, Homo sapien
agctcccagttgactgcaggaatgc

SEQ ID NO: 2496945 - DNA, 25 bp, Homo sapien
acagctcccagttgactgcaggaat

SEQ ID NO: 2496946 - DNA, 25 bp, Homo sapien
ccacagctcccagttgactgcagga

SEQ ID NO: 2496947 - DNA, 25 bp, Homo sapien
aggagagagcaagtgctgcagcccc

SEQ ID NO: 2496948 - DNA, 25 bp, Homo sapien
tgccaataccgatcagtgtgggagt

SEQ ID NO: 2496949 - DNA, 25 bp, Homo sapien
acactcaattggcatcatgcactac

SEQ ID NO: 2496950 - DNA, 25 bp, Homo sapien
tggcatcatgcactacagccaagaa

SEQ ID NO: 2496951 - DNA, 25 bp, Homo sapien
gaggcaggtttcagtatgttgtcca

SEQ ID NO: 2496952 - DNA, 25 bp, Homo sapien
tcctgttctctgacacacagcaaag

SEQ ID NO: 2496953 - DNA, 25 bp, Homo sapien
ctcctgggatgtccagtctcagtag

SEQ ID NO: 2496954 - DNA, 25 bp, Homo sapien
ttaaacttcaagagcagtcatagca

SEQ ID NO: 2496955 - DNA, 25 bp, Homo sapien
agccacctggtcctcttaaacttca

SEQ ID NO: 2496956 - DNA, 25 bp, Homo sapien
tttctaatatcacaggagtgtagtc

SEQ ID NO: 2496957 - DNA, 25 bp, Homo sapien
tatctttgcacgatgtagcagaacc

SEQ ID NO: 2496958 - DNA, 25 bp, Homo sapien
aaagtatctttgcacgatgtagcag

SEQ ID NO: 2496959 - DNA, 25 bp, Homo sapien
caggagtgtagtcattgtgtgctct

SEQ ID NO: 2496960 - DNA, 25 bp, Homo sapien
caaccacttggggtcattatcatgt

SEQ ID NO: 2496961 - DNA, 25 bp, Homo sapien
tggcactgaagacatggtatctttc

SEQ ID NO: 2496962 - DNA, 25 bp, Homo sapien
gggtcattatcatgtgaggccaagt

SEQ ID NO: 2496963 - DNA, 25 bp, Homo sapien
cactgaagacatggtatctttcagc

SEQ ID NO: 2496964 - DNA, 25 bp, Homo sapien
gagagactgcagagtctctccttca

SEQ ID NO: 2496965 - DNA, 25 bp, Homo sapien
agagactgcagagtctctccttcag

SEQ ID NO: 2496966 - DNA, 25 bp, Homo sapien
agactgcagagtctctccttcagca

SEQ ID NO: 2496967 - DNA, 25 bp, Homo sapien
gagactgcagagtctctccttcagc

SEQ ID NO: 2496968 - DNA, 25 bp, Homo sapien
cttatcttcacctctggtaatgcag

SEQ ID NO: 2496969 - DNA, 25 bp, Homo sapien
tcttcacctctggtaatgcagtctc

SEQ ID NO: 2496970 - DNA, 25 bp, Homo sapien
tcacctctggtaatgcagtctctaa

SEQ ID NO: 2496971 - DNA, 25 bp, Homo sapien
tggtaatgcagtctctaacaagatg

SEQ ID NO: 2496972 - DNA, 25 bp, Homo sapien
ttgatagtagctttgtccattaagg

SEQ ID NO: 2496973 - DNA, 25 bp, Homo sapien
aagggttaacaccaggtattcaatg

SEQ ID NO: 2496974 - DNA, 25 bp, Homo sapien
gcagcagccatggttgatagtagct

SEQ ID NO: 2496975 - DNA, 25 bp, Homo sapien
caccaggtattcaatgagctgccta

SEQ ID NO: 2496976 - DNA, 25 bp, Homo sapien
ccaactgtacttgccaccagggaaa

SEQ ID NO: 2496977 - DNA, 25 bp, Homo sapien
caggttcattcctttgctggtgatg

SEQ ID NO: 2496978 - DNA, 25 bp, Homo sapien
agctccccacgaggcctctgtgttt

SEQ ID NO: 2496979 - DNA, 25 bp, Homo sapien
tgtgttttcttagccgtgagtctga

SEQ ID NO: 2496980 - DNA, 25 bp, Homo sapien
caggcattccatgagagaagcctcc

SEQ ID NO: 2496981 - DNA, 25 bp, Homo sapien
ctctgcagtctctgaagtaaaatga

SEQ ID NO: 2496982 - DNA, 25 bp, Homo sapien
aggagaagggtcatggtcagctgcc

SEQ ID NO: 2496983 - DNA, 25 bp, Homo sapien
ttccacactcccacgctgagcctca

SEQ ID NO: 2496984 - DNA, 25 bp, Homo sapien
gagcaacctggattctgcagactga

SEQ ID NO: 2496985 - DNA, 25 bp, Homo sapien
ggattatctgcccaaccgtgcaagt

SEQ ID NO: 2496986 - DNA, 25 bp, Homo sapien
tgtgcagatgcttctaacccagagt

SEQ ID NO: 2496987 - DNA, 25 bp, Homo sapien
gacctggaaggactccctgttgtta

SEQ ID NO: 2496988 - DNA, 25 bp, Homo sapien
taagaagaaggctgacctcggaatg

SEQ ID NO: 2496989 - DNA, 25 bp, Homo sapien
aaccagttagtttgacacacacgaa

SEQ ID NO: 2496990 - DNA, 25 bp, Homo sapien
tactctgccgaggacattttattgg

SEQ ID NO: 2496991 - DNA, 25 bp, Homo sapien
tggagccaagctaaaactacatgac

SEQ ID NO: 2496992 - DNA, 25 bp, Homo sapien
gattctgtgctataaaattgctcca

SEQ ID NO: 2496993 - DNA, 25 bp, Homo sapien
ctattaagaaccatggccaccacgg

SEQ ID NO: 2496994 - DNA, 25 bp, Homo sapien
catgattccggtggccctattaaga

SEQ ID NO: 2496995 - DNA, 25 bp, Homo sapien
cactcagtgaggcaagagacagcat

SEQ ID NO: 2496996 - DNA, 25 bp, Homo sapien
tcatgatgtttagcctgtcccagaa

SEQ ID NO: 2496997 - DNA, 25 bp, Homo sapien
tctgtcctggtggattttgaacatc

SEQ ID NO: 2496998 - DNA, 25 bp, Homo sapien
caacagactcctcaacaagtggctt

SEQ ID NO: 2496999 - DNA, 25 bp, Homo sapien
caagtggcttctaagacaagactgg

SEQ ID NO: 2497000 - DNA, 25 bp, Homo sapien
cagaaaccagttagtaaagccatgc

SEQ ID NO: 2497001 - DNA, 25 bp, Homo sapien
aacaacgagatttttcagtgtgctt

SEQ ID NO: 2497002 - DNA, 25 bp, Homo sapien
ctttaaacaacgagatttttcagtg

SEQ ID NO: 2497003 - DNA, 25 bp, Homo sapien
taaacaacgagatttttcagtgtgc

SEQ ID NO: 2497004 - DNA, 25 bp, Homo sapien
caaattgtactttaaacaacgagat

SEQ ID NO: 2497005 - DNA, 25 bp, Homo sapien
tttcctacaatagatgtggccctac

SEQ ID NO: 2497006 - DNA, 25 bp, Homo sapien
cagcctggacaggagtacaaatatt

SEQ ID NO: 2497007 - DNA, 25 bp, Homo sapien
tctcgaagaaaggtcctgcagcctg

SEQ ID NO: 2497008 - DNA, 25 bp, Homo sapien
tcacaaatcagtcaaaaggcctctt

SEQ ID NO: 2497009 - DNA, 25 bp, Homo sapien
gactttctgaaagtactcgagaaat

SEQ ID NO: 2497010 - DNA, 25 bp, Homo sapien
cacaacaatgaaagtgtcagacttt

SEQ ID NO: 2497011 - DNA, 25 bp, Homo sapien
agtactcgagaaataatgaataaat

SEQ ID NO: 2497012 - DNA, 25 bp, Homo sapien
gaatcgcaagttttcagtagggtga

SEQ ID NO: 2497013 - DNA, 25 bp, Homo sapien
tgtccaaactacttgatctggtgcg

SEQ ID NO: 2497014 - DNA, 25 bp, Homo sapien
gaaatcgtttcctgcatcgtgatga

SEQ ID NO: 2497015 - DNA, 25 bp, Homo sapien
gaaaattcaccatacaagacgatcc

SEQ ID NO: 2497016 - DNA, 25 bp, Homo sapien
gagaccagttctgttcgggccagtc

SEQ ID NO: 2497017 - DNA, 25 bp, Homo sapien
ggagccgaacctgtgaacaagcttc

SEQ ID NO: 2497018 - DNA, 25 bp, Homo sapien
gggctcagaaagacaccgtggtgtt

SEQ ID NO: 2497019 - DNA, 25 bp, Homo sapien
gagtgaagtaggtggctaagaaccc

SEQ ID NO: 2497020 - DNA, 25 bp, Homo sapien
cttgtcttgcccgggagctgcccct

SEQ ID NO: 2497021 - DNA, 25 bp, Homo sapien
ttgtcttgcccgggagctgcccctt

SEQ ID NO: 2497022 - DNA, 25 bp, Homo sapien
ctgcggagaagccggtgcccgtgcg

SEQ ID NO: 2497023 - DNA, 25 bp, Homo sapien
tgcggagaagccggtgcccgtgcgg

SEQ ID NO: 2497024 - DNA, 25 bp, Homo sapien
tatttggtgcggatgcgggtgcggg

SEQ ID NO: 2497025 - DNA, 25 bp, Homo sapien
tgtgggtgcgagtgaggatgagagt

SEQ ID NO: 2497026 - DNA, 25 bp, Homo sapien
tggatgcggatacgggtggagctgc

SEQ ID NO: 2497027 - DNA, 25 bp, Homo sapien
tgtgggtgtgggtgcggtatttggt

SEQ ID NO: 2497028 - DNA, 25 bp, Homo sapien
ttctgccgcgtggatttgaccgcca

SEQ ID NO: 2497029 - DNA, 25 bp, Homo sapien
tgcttctgccgcgtggatttgaccg

SEQ ID NO: 2497030 - DNA, 25 bp, Homo sapien
ccgcgtggatttgaccgccaggatg

SEQ ID NO: 2497031 - DNA, 25 bp, Homo sapien
tgctgcttctgccgcgtggatttga

SEQ ID NO: 2497032 - DNA, 25 bp, Homo sapien
gtgatctcggcgttccagccctggt

SEQ ID NO: 2497033 - DNA, 25 bp, Homo sapien
tccttgagcttgaccggcggctcga

SEQ ID NO: 2497034 - DNA, 25 bp, Homo sapien
cacagtccacggtcttcatgttgga

SEQ ID NO: 2497035 - DNA, 25 bp, Homo sapien
agccctggtcttgcgggcaccgaaa

SEQ ID NO: 2497036 - DNA, 25 bp, Homo sapien
tgggacggctcggccggcccctgcc

SEQ ID NO: 2497037 - DNA, 25 bp, Homo sapien
gcccctgcccgggctgttgttgctg

SEQ ID NO: 2497038 - DNA, 25 bp, Homo sapien
ccggcccctgcccgggctgttgttg

SEQ ID NO: 2497039 - DNA, 25 bp, Homo sapien
ttgggacggctcggccggcccctgc

SEQ ID NO: 2497040 - DNA, 25 bp, Homo sapien
cagctgcttgggcgggataagcagc

SEQ ID NO: 2497041 - DNA, 25 bp, Homo sapien
ctgcttgggcgggataagcagcagc

SEQ ID NO: 2497042 - DNA, 25 bp, Homo sapien
ttgcagctgcttgggcgggataagc

SEQ ID NO: 2497043 - DNA, 25 bp, Homo sapien
tgcttgggcgggataagcagcagcc

SEQ ID NO: 2497044 - DNA, 25 bp, Homo sapien
agcgcgcagaggaggctaacacgca

SEQ ID NO: 2497045 - DNA, 25 bp, Homo sapien
tcgcggcgcttttgaatgggccatc

SEQ ID NO: 2497046 - DNA, 25 bp, Homo sapien
cgagtgacacccagcggaaaaggcg

SEQ ID NO: 2497047 - DNA, 25 bp, Homo sapien
tcttgcgagcgctcactgaagggca

SEQ ID NO: 2497048 - DNA, 25 bp, Homo sapien
tctacccagggcgatcgcccaagga

SEQ ID NO: 2497049 - DNA, 25 bp, Homo sapien
acgccctccagcgtctcttgctccg

SEQ ID NO: 2497050 - DNA, 25 bp, Homo sapien
ctctcgccgcccacttgcttccgcg

SEQ ID NO: 2497051 - DNA, 25 bp, Homo sapien
cttgcttccgcgctcgttcccctgg

SEQ ID NO: 2497052 - DNA, 25 bp, Homo sapien
ttttcaggtatcagagacttagtgc

SEQ ID NO: 2497053 - DNA, 25 bp, Homo sapien
taaaccaatccctgaaaccaaagca

SEQ ID NO: 2497054 - DNA, 25 bp, Homo sapien
catgtaagtgatcctcaatcagtcc

SEQ ID NO: 2497055 - DNA, 25 bp, Homo sapien
gaacttacactcttctgcactacca

SEQ ID NO: 2497056 - DNA, 25 bp, Homo sapien
tgggctgctggaaactacaatcaga

SEQ ID NO: 2497057 - DNA, 25 bp, Homo sapien
tgtggaacacttaccctacttgagt

SEQ ID NO: 2497058 - DNA, 25 bp, Homo sapien
taagtaccactctacaagccagttc

SEQ ID NO: 2497059 - DNA, 25 bp, Homo sapien
tttacagaacatagtggcctcagca

SEQ ID NO: 2497060 - DNA, 25 bp, Homo sapien
accacatcccctttatgtaacaaga

SEQ ID NO: 2497061 - DNA, 25 bp, Homo sapien
catcccctttatgtaacaagactag

SEQ ID NO: 2497062 - DNA, 25 bp, Homo sapien
atcccctttatgtaacaagactagg

SEQ ID NO: 2497063 - DNA, 25 bp, Homo sapien
cacatcccctttatgtaacaagact

SEQ ID NO: 2497064 - DNA, 25 bp, Homo sapien
taagagcaggaaatctagaccttcc

SEQ ID NO: 2497065 - DNA, 25 bp, Homo sapien
tgtgttcacattccaagaccttaac

SEQ ID NO: 2497066 - DNA, 25 bp, Homo sapien
gcatttcgatgaactatggttaaaa

SEQ ID NO: 2497067 - DNA, 25 bp, Homo sapien
aggagaggaatggatagcactacaa

SEQ ID NO: 2497068 - DNA, 25 bp, Homo sapien
taattagcctgaggtattgtaaatg

SEQ ID NO: 2497069 - DNA, 25 bp, Homo sapien
tgtaaatgtggctctacagtctgaa

SEQ ID NO: 2497070 - DNA, 25 bp, Homo sapien
agtctgaaatttaatggcatctttt

SEQ ID NO: 2497071 - DNA, 25 bp, Homo sapien
taatgacaatccaataatccaccct

SEQ ID NO: 2497072 - DNA, 25 bp, Homo sapien
attacacagtaaacagaagcacggg

SEQ ID NO: 2497073 - DNA, 25 bp, Homo sapien
aacaaaatgcttagtgtcacactgg

SEQ ID NO: 2497074 - DNA, 25 bp, Homo sapien
tcaaagcgtggtgtgaacaaaatgc

SEQ ID NO: 2497075 - DNA, 25 bp, Homo sapien
ccttgtgaaatagtgcatccctcca

SEQ ID NO: 2497076 - DNA, 25 bp, Homo sapien
aacttgaaaataggcttgtcaaatg

SEQ ID NO: 2497077 - DNA, 25 bp, Homo sapien
ttgaaaataggcttgtcaaatgatg

SEQ ID NO: 2497078 - DNA, 25 bp, Homo sapien
gaaaagatgcttagttaatggaggt

SEQ ID NO: 2497079 - DNA, 25 bp, Homo sapien
aagaaaagatgcttagttaatggag

SEQ ID NO: 2497080 - DNA, 25 bp, Homo sapien
gatgcttagttaatggaggttaaat

SEQ ID NO: 2497081 - DNA, 25 bp, Homo sapien
aaagatgcttagttaatggaggtta

SEQ ID NO: 2497082 - DNA, 25 bp, Homo sapien
tgaaaatcccgttttattcacctca

SEQ ID NO: 2497083 - DNA, 25 bp, Homo sapien
taatccattaacactctaataacag

SEQ ID NO: 2497084 - DNA, 25 bp, Homo sapien
ttaacactctaataacagttattgg

SEQ ID NO: 2497085 - DNA, 25 bp, Homo sapien
cactctaataacagttattgggtgt

SEQ ID NO: 2497086 - DNA, 25 bp, Homo sapien
atgaatgaacatgcgtgacagaatt

SEQ ID NO: 2497087 - DNA, 25 bp, Homo sapien
ttatgtagcaatgaatgaacatgcg

SEQ ID NO: 2497088 - DNA, 25 bp, Homo sapien
cataaggctgtaagtaaataagagt

SEQ ID NO: 2497089 - DNA, 25 bp, Homo sapien
gctgtaagtaaataagagttgtgtt

SEQ ID NO: 2497090 - DNA, 25 bp, Homo sapien
gcaggttatcctcaaggccacatac

SEQ ID NO: 2497091 - DNA, 25 bp, Homo sapien
tgcaggttatcctcaaggccacata

SEQ ID NO: 2497092 - DNA, 25 bp, Homo sapien
agtgcaggttatcctcaaggccaca

SEQ ID NO: 2497093 - DNA, 25 bp, Homo sapien
gtgcaggttatcctcaaggccacat

SEQ ID NO: 2497094 - DNA, 25 bp, Homo sapien
tcactgctgcttgcactctgctggg

SEQ ID NO: 2497095 - DNA, 25 bp, Homo sapien
ttgcactctgctgggttttgatcct

SEQ ID NO: 2497096 - DNA, 25 bp, Homo sapien
tgctgcttgcactctgctgggtttt

SEQ ID NO: 2497097 - DNA, 25 bp, Homo sapien
actgctgcttgcactctgctgggtt

SEQ ID NO: 2497098 - DNA, 25 bp, Homo sapien
gtgaatttctcaatagtaattactg

SEQ ID NO: 2497099 - DNA, 25 bp, Homo sapien
ttctcaatagtaattactgccttaa

SEQ ID NO: 2497100 - DNA, 25 bp, Homo sapien
ctgccttaattataacagtagctca

SEQ ID NO: 2497101 - DNA, 25 bp, Homo sapien
tgccttaattataacagtagctcac

SEQ ID NO: 2497102 - DNA, 25 bp, Homo sapien
tgtgacacacgctaaaccataatct

SEQ ID NO: 2497103 - DNA, 25 bp, Homo sapien
gaatcctagggttcactgtacctga

SEQ ID NO: 2497104 - DNA, 25 bp, Homo sapien
gttggaaggatctaacaaactgcac

SEQ ID NO: 2497105 - DNA, 25 bp, Homo sapien
taatagactaggactctcagggact

SEQ ID NO: 2497106 - DNA, 25 bp, Homo sapien
ctttgggtcatagtctggatcattt

SEQ ID NO: 2497107 - DNA, 25 bp, Homo sapien
gtcatagtctggatcattttcctca

SEQ ID NO: 2497108 - DNA, 25 bp, Homo sapien
ggtcatagtctggatcattttcctc

SEQ ID NO: 2497109 - DNA, 25 bp, Homo sapien
tgggtcatagtctggatcattttcc

SEQ ID NO: 2497110 - DNA, 25 bp, Homo sapien
gcatccatgaagtatgtacatagta

SEQ ID NO: 2497111 - DNA, 25 bp, Homo sapien
tgcatccatgaagtatgtacatagt

SEQ ID NO: 2497112 - DNA, 25 bp, Homo sapien
catccatgaagtatgtacatagtag

SEQ ID NO: 2497113 - DNA, 25 bp, Homo sapien
aatgcatccatgaagtatgtacata

SEQ ID NO: 2497114 - DNA, 25 bp, Homo sapien
aatacaagttactctacggatcaac

SEQ ID NO: 2497115 - DNA, 25 bp, Homo sapien
tcatgattacagactttgatgataa

SEQ ID NO: 2497116 - DNA, 25 bp, Homo sapien
gattacagactttgatgataataca

SEQ ID NO: 2497117 - DNA, 25 bp, Homo sapien
ggatcaacagattttcatgattaca

SEQ ID NO: 2497118 - DNA, 25 bp, Homo sapien
tactgcagccaacgttggaaaagtt

SEQ ID NO: 2497119 - DNA, 25 bp, Homo sapien
gttactgcagccaacgttggaaaag

SEQ ID NO: 2497120 - DNA, 25 bp, Homo sapien
tgcagccaacgttggaaaagtttac

SEQ ID NO: 2497121 - DNA, 25 bp, Homo sapien
agttactgcagccaacgttggaaaa

SEQ ID NO: 2497122 - DNA, 25 bp, Homo sapien
tgcagcagaacaaaattatttgaaa

SEQ ID NO: 2497123 - DNA, 25 bp, Homo sapien
ctgcagcagaacaaaattatttgaa

SEQ ID NO: 2497124 - DNA, 25 bp, Homo sapien
cagcagaacaaaattatttgaaata

SEQ ID NO: 2497125 - DNA, 25 bp, Homo sapien
gcagaacaaaattatttgaaataaa

SEQ ID NO: 2497126 - DNA, 25 bp, Homo sapien
tattgaaaccttatacatacattgt

SEQ ID NO: 2497127 - DNA, 25 bp, Homo sapien
tcatccgcttcttcaccttcttcat

SEQ ID NO: 2497128 - DNA, 25 bp, Homo sapien
atccgcttcttcaccttcttcatca

SEQ ID NO: 2497129 - DNA, 25 bp, Homo sapien
ccgcttcttcaccttcttcatcata

SEQ ID NO: 2497130 - DNA, 25 bp, Homo sapien
ctcatccgcttcttcaccttcttca

SEQ ID NO: 2497131 - DNA, 25 bp, Homo sapien
tacgctcacgtaaaaagtgaccaat

SEQ ID NO: 2497132 - DNA, 25 bp, Homo sapien
gtaaaatataacactgatcttggga

SEQ ID NO: 2497133 - DNA, 25 bp, Homo sapien
gaccaatttcgaagtctgcagcaag

SEQ ID NO: 2497134 - DNA, 25 bp, Homo sapien
ctgcagcaaggatagcttcagcatc

SEQ ID NO: 2497135 - DNA, 25 bp, Homo sapien
cgaactgtcccacgtcccttgtgtt

SEQ ID NO: 2497136 - DNA, 25 bp, Homo sapien
tagtcacagtacgaactgtcccacg

SEQ ID NO: 2497137 - DNA, 25 bp, Homo sapien
aactgttttagtcacagtacgaact

SEQ ID NO: 2497138 - DNA, 25 bp, Homo sapien
agtacgaactgtcccacgtcccttg

SEQ ID NO: 2497139 - DNA, 25 bp, Homo sapien
tctggtccatcaaaagaaaagggat

SEQ ID NO: 2497140 - DNA, 25 bp, Homo sapien
tacaacccataatttctggtccatc

SEQ ID NO: 2497141 - DNA, 25 bp, Homo sapien
ggtccatcaaaagaaaagggatcag

SEQ ID NO: 2497142 - DNA, 25 bp, Homo sapien
cctgtacaacccataatttctggtc

SEQ ID NO: 2497143 - DNA, 25 bp, Homo sapien
tttgtcagcacttcatttgtaaaat

SEQ ID NO: 2497144 - DNA, 25 bp, Homo sapien
tgtaaaatattcattgggttcaaag

SEQ ID NO: 2497145 - DNA, 25 bp, Homo sapien
aatattcattgggttcaaagtgaaa

SEQ ID NO: 2497146 - DNA, 25 bp, Homo sapien
ctcatcctgtatgtctttgtcagca

SEQ ID NO: 2497147 - DNA, 25 bp, Homo sapien
aagagcaccaaccttacccttgaat

SEQ ID NO: 2497148 - DNA, 25 bp, Homo sapien
agagcaccaaccttacccttgaatg

SEQ ID NO: 2497149 - DNA, 25 bp, Homo sapien
gaaaaggaataaatactgcctcaca

SEQ ID NO: 2497150 - DNA, 25 bp, Homo sapien
tgcctcacaattagcagcatccaaa

SEQ ID NO: 2497151 - DNA, 25 bp, Homo sapien
tggccagcatctgagaacttcactt

SEQ ID NO: 2497152 - DNA, 25 bp, Homo sapien
gcttcagaataggttcatcgtgttc

SEQ ID NO: 2497153 - DNA, 25 bp, Homo sapien
ctttaatatctttcaagtgcttcag

SEQ ID NO: 2497154 - DNA, 25 bp, Homo sapien
agtgcttcagaataggttcatcgtg

SEQ ID NO: 2497155 - DNA, 25 bp, Homo sapien
taacatggcattcgaggactgtgtt

SEQ ID NO: 2497156 - DNA, 25 bp, Homo sapien
aataacatggcattcgaggactgtg

SEQ ID NO: 2497157 - DNA, 25 bp, Homo sapien
catggcattcgaggactgtgttctg

SEQ ID NO: 2497158 - DNA, 25 bp, Homo sapien
tgaataacatggcattcgaggactg

SEQ ID NO: 2497159 - DNA, 25 bp, Homo sapien
gaaaacaccagtcgataatgagcca

SEQ ID NO: 2497160 - DNA, 25 bp, Homo sapien
taatgagccattatcaatgggacca

SEQ ID NO: 2497161 - DNA, 25 bp, Homo sapien
ggcacagggttataagaaaacacca

SEQ ID NO: 2497162 - DNA, 25 bp, Homo sapien
caaatttctcctggaagagttaagg

SEQ ID NO: 2497163 - DNA, 25 bp, Homo sapien
ccatatcactgagcaagtcaacatt

SEQ ID NO: 2497164 - DNA, 25 bp, Homo sapien
ctgaaccatatcactgagcaagtca

SEQ ID NO: 2497165 - DNA, 25 bp, Homo sapien
aaccatatcactgagcaagtcaaca

SEQ ID NO: 2497166 - DNA, 25 bp, Homo sapien
gaaccatatcactgagcaagtcaac

SEQ ID NO: 2497167 - DNA, 25 bp, Homo sapien
gacgtttccgattccaatagggctg

SEQ ID NO: 2497168 - DNA, 25 bp, Homo sapien
tacaactgatgctctagggaggccc

SEQ ID NO: 2497169 - DNA, 25 bp, Homo sapien
gcatttgtcggctcagctggcaaca

SEQ ID NO: 2497170 - DNA, 25 bp, Homo sapien
gctgactgcaaaggagacccaagga

SEQ ID NO: 2497171 - DNA, 25 bp, Homo sapien
gctgttatcaagtccaccctatggg

SEQ ID NO: 2497172 - DNA, 25 bp, Homo sapien
ccatcagatgaattcgaactttaag

SEQ ID NO: 2497173 - DNA, 25 bp, Homo sapien
cccggtagactttgcggtgaccatt

SEQ ID NO: 2497174 - DNA, 25 bp, Homo sapien
ccacgtatgtgcactgtttgaacca

SEQ ID NO: 2497175 - DNA, 25 bp, Homo sapien
ttcacattcttcttccgtaggttca

SEQ ID NO: 2497176 - DNA, 25 bp, Homo sapien
ttcttccgtaggttcataaattgca

SEQ ID NO: 2497177 - DNA, 25 bp, Homo sapien
tcttcttccgtaggttcataaattg

SEQ ID NO: 2497178 - DNA, 25 bp, Homo sapien
cattcttcttccgtaggttcataaa

SEQ ID NO: 2497179 - DNA, 25 bp, Homo sapien
ttcaagatcgtgaacttcctcatag

SEQ ID NO: 2497180 - DNA, 25 bp, Homo sapien
tttcaagatcgtgaacttcctcata

SEQ ID NO: 2497181 - DNA, 25 bp, Homo sapien
gaagcattggagttagtgaatgaca

SEQ ID NO: 2497182 - DNA, 25 bp, Homo sapien
gtcatactgaaactgaagcattgga

SEQ ID NO: 2497183 - DNA, 25 bp, Homo sapien
agaaatcagttatatagcatcagag

SEQ ID NO: 2497184 - DNA, 25 bp, Homo sapien
gttagaaatcagttatatagcatca

SEQ ID NO: 2497185 - DNA, 25 bp, Homo sapien
tgaaaagcactattctgccaaggtg

SEQ ID NO: 2497186 - DNA, 25 bp, Homo sapien
tgtgcaacagatacaaaatccaggt

SEQ ID NO: 2497187 - DNA, 25 bp, Homo sapien
cacagcaggtagcagtgcggacaaa

SEQ ID NO: 2497188 - DNA, 25 bp, Homo sapien
gaagatagcagttccgcaagaaagc

SEQ ID NO: 2497189 - DNA, 25 bp, Homo sapien
gatattaggttataagccactacca

SEQ ID NO: 2497190 - DNA, 25 bp, Homo sapien
tgccattaactttggaaccagaagg

SEQ ID NO: 2497191 - DNA, 25 bp, Homo sapien
aaccagaaggcgacttgatctatcc

SEQ ID NO: 2497192 - DNA, 25 bp, Homo sapien
gaagcaaacattgaggccgagtgtg

SEQ ID NO: 2497193 - DNA, 25 bp, Homo sapien
gcatcatctgaacagttagctgacg

SEQ ID NO: 2497194 - DNA, 25 bp, Homo sapien
catcaagtctttcttgaagggctgc

SEQ ID NO: 2497195 - DNA, 25 bp, Homo sapien
gaatctgaggattttgcatcatctg

SEQ ID NO: 2497196 - DNA, 25 bp, Homo sapien
caatgtatcctgttggtgtttctac

SEQ ID NO: 2497197 - DNA, 25 bp, Homo sapien
tagtcaagacagttctcaaggccac

SEQ ID NO: 2497198 - DNA, 25 bp, Homo sapien
gatgcctatctatgactcttgacag

SEQ ID NO: 2497199 - DNA, 25 bp, Homo sapien
actgacagttttaggcccaggagaa

SEQ ID NO: 2497200 - DNA, 25 bp, Homo sapien
tatctaatgagtagagacgggcagg

SEQ ID NO: 2497201 - DNA, 25 bp, Homo sapien
tcaatattggtcactgaggatacag

SEQ ID NO: 2497202 - DNA, 25 bp, Homo sapien
tgtacacacagccaggataaccaat

SEQ ID NO: 2497203 - DNA, 25 bp, Homo sapien
ggtaccttaatattcttggcgcaga

SEQ ID NO: 2497204 - DNA, 25 bp, Homo sapien
ttggcgcagatctacaagacatacc

SEQ ID NO: 2497205 - DNA, 25 bp, Homo sapien
ttcttcaacatcatccaaatcttga

SEQ ID NO: 2497206 - DNA, 25 bp, Homo sapien
ttgatcaagttcagactgttctttg

SEQ ID NO: 2497207 - DNA, 25 bp, Homo sapien
caaatcttgatcaagttcagactgt

SEQ ID NO: 2497208 - DNA, 25 bp, Homo sapien
tgagttttgtttcttcaccagtttc

SEQ ID NO: 2497209 - DNA, 25 bp, Homo sapien
taagagcaaatggactataaagatg

SEQ ID NO: 2497210 - DNA, 25 bp, Homo sapien
tccaatcttaatgagcagccaacca

SEQ ID NO: 2497211 - DNA, 25 bp, Homo sapien
gaagcaggtcttggaaactaaaaca

SEQ ID NO: 2497212 - DNA, 25 bp, Homo sapien
gaaagcatcctagattgagaccaaa

SEQ ID NO: 2497213 - DNA, 25 bp, Homo sapien
tccggcataaaggtagaatagtcgt

SEQ ID NO: 2497214 - DNA, 25 bp, Homo sapien
caatccaaattagaggtgtgacaca

SEQ ID NO: 2497215 - DNA, 25 bp, Homo sapien
gacacaggagacaatcactttggga

SEQ ID NO: 2497216 - DNA, 25 bp, Homo sapien
tgtcaccaaggttaagcaatccaaa

SEQ ID NO: 2497217 - DNA, 25 bp, Homo sapien
tacccaactgcagtcacataacgtt

SEQ ID NO: 2497218 - DNA, 25 bp, Homo sapien
aagaaaccattacccaactgcagtc

SEQ ID NO: 2497219 - DNA, 25 bp, Homo sapien
actgactgaactaattggatacata

SEQ ID NO: 2497220 - DNA, 25 bp, Homo sapien
gagctgacataaggctaagaaacca

SEQ ID NO: 2497221 - DNA, 25 bp, Homo sapien
tgctcacgtacgtaaccacggacgg

SEQ ID NO: 2497222 - DNA, 25 bp, Homo sapien
aatgttgatgctacctgtctctaag

SEQ ID NO: 2497223 - DNA, 25 bp, Homo sapien
tatagcagaacagtgtaagtcaaca

SEQ ID NO: 2497224 - DNA, 25 bp, Homo sapien
tggcaagcccactaatgtactctaa

SEQ ID NO: 2497225 - DNA, 25 bp, Homo sapien
attaccacgtgtggagcgaagccgc

SEQ ID NO: 2497226 - DNA, 25 bp, Homo sapien
gccagtggccatgaagcccattacc

SEQ ID NO: 2497227 - DNA, 25 bp, Homo sapien
tccaccgtctctacaactttcaaag

SEQ ID NO: 2497228 - DNA, 25 bp, Homo sapien
ttcaaagtaagcacagaccgagggc

SEQ ID NO: 2497229 - DNA, 25 bp, Homo sapien
gcctccaggccgcgccaacccctac

SEQ ID NO: 2497230 - DNA, 25 bp, Homo sapien
ggtcctgtccgacctcacaggacga

SEQ ID NO: 2497231 - DNA, 25 bp, Homo sapien
cggactccgcggtcctgtccgacct

SEQ ID NO: 2497232 - DNA, 25 bp, Homo sapien
tcagccgtccccgataaaagcgctg

SEQ ID NO: 2497233 - DNA, 25 bp, Homo sapien
cgataaaagcgctggtcggccccgg

SEQ ID NO: 2497234 - DNA, 25 bp, Homo sapien
gcaggccgcccagccaacaccacgt

SEQ ID NO: 2497235 - DNA, 25 bp, Homo sapien
aggccgcccagccaacaccacgttc

SEQ ID NO: 2497236 - DNA, 25 bp, Homo sapien
gcgcaggccgcccagccaacaccac

SEQ ID NO: 2497237 - DNA, 25 bp, Homo sapien
ctgcgcaggccgcccagccaacacc

SEQ ID NO: 2497238 - DNA, 25 bp, Homo sapien
gagctgcgcaggcagtgactcaggg

SEQ ID NO: 2497239 - DNA, 25 bp, Homo sapien
gactagtatggggagccaggcggcc

SEQ ID NO: 2497240 - DNA, 25 bp, Homo sapien
gcagtgactcagggcggcagcggca

SEQ ID NO: 2497241 - DNA, 25 bp, Homo sapien
gaggcggcgccgcgagcagatggcg

SEQ ID NO: 2497242 - DNA, 25 bp, Homo sapien
aaagacccaagagcccgccgctcgc

SEQ ID NO: 2497243 - DNA, 25 bp, Homo sapien
aaaagacccaagagcccgccgctcg

SEQ ID NO: 2497244 - DNA, 25 bp, Homo sapien
tcatcaatctgttagagtccctccc

SEQ ID NO: 2497245 - DNA, 25 bp, Homo sapien
cactggccagacaataacagggagc

SEQ ID NO: 2497246 - DNA, 25 bp, Homo sapien
cagaggaacaatgagcatgtgcttc

SEQ ID NO: 2497247 - DNA, 25 bp, Homo sapien
gaaacatattggcacgatgaggcac

SEQ ID NO: 2497248 - DNA, 25 bp, Homo sapien
ctcgtccctttctcctcacccgtga

SEQ ID NO: 2497249 - DNA, 25 bp, Homo sapien
cctcacccgtgaacaggttctgtgg

SEQ ID NO: 2497250 - DNA, 25 bp, Homo sapien
ctcacccgtgaacaggttctgtgga

SEQ ID NO: 2497251 - DNA, 25 bp, Homo sapien
ccgtaagtgaaacaagaaccatcca

SEQ ID NO: 2497252 - DNA, 25 bp, Homo sapien
tgaacacagccgcagtctacactgc

SEQ ID NO: 2497253 - DNA, 25 bp, Homo sapien
ccacaggcctgtgcgttggaatgca

SEQ ID NO: 2497254 - DNA, 25 bp, Homo sapien
gagtgggtagtggtctgaaccttcc

SEQ ID NO: 2497255 - DNA, 25 bp, Homo sapien
attagcacaaagaatgcatttatgc

SEQ ID NO: 2497256 - DNA, 25 bp, Homo sapien
ttccattagcacaaagaatgcattt

SEQ ID NO: 2497257 - DNA, 25 bp, Homo sapien
ctgttccattagcacaaagaatgca

SEQ ID NO: 2497258 - DNA, 25 bp, Homo sapien
tagcacaaagaatgcatttatgcat

SEQ ID NO: 2497259 - DNA, 25 bp, Homo sapien
caaaccagagggctgttctatgaca

SEQ ID NO: 2497260 - DNA, 25 bp, Homo sapien
gctgttctatgacaggctacagaca

SEQ ID NO: 2497261 - DNA, 25 bp, Homo sapien
taagtggttctttggcaaaccagag

SEQ ID NO: 2497262 - DNA, 25 bp, Homo sapien
tctttggcaaaccagagggctgttc

SEQ ID NO: 2497263 - DNA, 25 bp, Homo sapien
tttgctgtaatgtttggtgatttct

SEQ ID NO: 2497264 - DNA, 25 bp, Homo sapien
tgctgtaatgtttggtgatttctct

SEQ ID NO: 2497265 - DNA, 25 bp, Homo sapien
tgtaatgtttggtgatttctcttga

SEQ ID NO: 2497266 - DNA, 25 bp, Homo sapien
agtgctggctcccttgtgcacaagc

SEQ ID NO: 2497267 - DNA, 25 bp, Homo sapien
attgcaagaatccagggtggtggta

SEQ ID NO: 2497268 - DNA, 25 bp, Homo sapien
tgcaagaatccagggtggtggtaac

SEQ ID NO: 2497269 - DNA, 25 bp, Homo sapien
ctgggagattgcaagaatccagggt

SEQ ID NO: 2497270 - DNA, 25 bp, Homo sapien
caagaatccagggtggtggtaacat

SEQ ID NO: 2497271 - DNA, 25 bp, Homo sapien
gagagtggcggtataccttgaagac

SEQ ID NO: 2497272 - DNA, 25 bp, Homo sapien
gacttcatggcaactacaggcagag

SEQ ID NO: 2497273 - DNA, 25 bp, Homo sapien
catggcaactacaggcagagcttta

SEQ ID NO: 2497274 - DNA, 25 bp, Homo sapien
tggcggtataccttgaagacaggga

SEQ ID NO: 2497275 - DNA, 25 bp, Homo sapien
ctttcagcacaaattaatggagggc

SEQ ID NO: 2497276 - DNA, 25 bp, Homo sapien
aatggagggctgagacacttaaaga

SEQ ID NO: 2497277 - DNA, 25 bp, Homo sapien
gatcttcgggcattattgaccgtca

SEQ ID NO: 2497278 - DNA, 25 bp, Homo sapien
tgagaagtccctcgcctgtcagttc

SEQ ID NO: 2497279 - DNA, 25 bp, Homo sapien
tctggcaccgctgtaggctttgttg

SEQ ID NO: 2497280 - DNA, 25 bp, Homo sapien
ggtccttgacatctggcaccgctgt

SEQ ID NO: 2497281 - DNA, 25 bp, Homo sapien
ggagcactgctaatacctttgtctt

SEQ ID NO: 2497282 - DNA, 25 bp, Homo sapien
gtctttttggtggaggcagcaaaga

SEQ ID NO: 2497283 - DNA, 25 bp, Homo sapien
aagacacatgttagtgccagcattt

SEQ ID NO: 2497284 - DNA, 25 bp, Homo sapien
catatgtctgataagaaaagacaca

SEQ ID NO: 2497285 - DNA, 25 bp, Homo sapien
tgccagcatttgtgtagccacttgc

SEQ ID NO: 2497286 - DNA, 25 bp, Homo sapien
gcagtgtttggtaacatatgtctga

SEQ ID NO: 2497287 - DNA, 25 bp, Homo sapien
cagcccagcctgtggccagggccat

SEQ ID NO: 2497288 - DNA, 25 bp, Homo sapien
tatcaagcaggacgtgcaccccagc

SEQ ID NO: 2497289 - DNA, 25 bp, Homo sapien
tcaagcaggacgtgcaccccagcag

SEQ ID NO: 2497290 - DNA, 25 bp, Homo sapien
agtatcaagcaggacgtgcacccca

SEQ ID NO: 2497291 - DNA, 25 bp, Homo sapien
tctaccagtcaggatagttgccaag

SEQ ID NO: 2497292 - DNA, 25 bp, Homo sapien
ccagtcaggatagttgccaagttat

SEQ ID NO: 2497293 - DNA, 25 bp, Homo sapien
caggatagttgccaagttatttgct

SEQ ID NO: 2497294 - DNA, 25 bp, Homo sapien
gagtctaccagtcaggatagttgcc

SEQ ID NO: 2497295 - DNA, 25 bp, Homo sapien
tggactgctgggctgttgaagtaca

SEQ ID NO: 2497296 - DNA, 25 bp, Homo sapien
gaagtacattcgtgcactgatagaa

SEQ ID NO: 2497297 - DNA, 25 bp, Homo sapien
tagaatgacgcctgcaaaggaacag

SEQ ID NO: 2497298 - DNA, 25 bp, Homo sapien
gcaaggctacgggtcctggactgct

SEQ ID NO: 2497299 - DNA, 25 bp, Homo sapien
cacatcactgaacgcatactccaag

SEQ ID NO: 2497300 - DNA, 25 bp, Homo sapien
gacacatcactgaacgcatactcca

SEQ ID NO: 2497301 - DNA, 25 bp, Homo sapien
actccaagtacatgtgtccagcatc

SEQ ID NO: 2497302 - DNA, 25 bp, Homo sapien
catactccaagtacatgtgtccagc

SEQ ID NO: 2497303 - DNA, 25 bp, Homo sapien
gccacacaggtcgttgcataaggta

SEQ ID NO: 2497304 - DNA, 25 bp, Homo sapien
gcagagggcctttcatgttatgtca

SEQ ID NO: 2497305 - DNA, 25 bp, Homo sapien
tccagggttggcagaacagtcgatt

SEQ ID NO: 2497306 - DNA, 25 bp, Homo sapien
caagaaggaaatggtgtcatgccaa

SEQ ID NO: 2497307 - DNA, 25 bp, Homo sapien
ccaaatagactgagtcattcactat

SEQ ID NO: 2497308 - DNA, 25 bp, Homo sapien
gcccaaatagactgagtcattcact

SEQ ID NO: 2497309 - DNA, 25 bp, Homo sapien
acagcccaaatagactgagtcattc

SEQ ID NO: 2497310 - DNA, 25 bp, Homo sapien
tataacagcccaaatagactgagtc

SEQ ID NO: 2497311 - DNA, 25 bp, Homo sapien
gctatggattctagctcttccaaag

SEQ ID NO: 2497312 - DNA, 25 bp, Homo sapien
ttgaaagatttcctatgtcatttcc

SEQ ID NO: 2497313 - DNA, 25 bp, Homo sapien
aaagatttcctatgtcatttcctga

SEQ ID NO: 2497314 - DNA, 25 bp, Homo sapien
tggctatggattctagctcttccaa

SEQ ID NO: 2497315 - DNA, 25 bp, Homo sapien
aaagatgaacacgttcagtgtgaca

SEQ ID NO: 2497316 - DNA, 25 bp, Homo sapien
ctgaaagatgaacacgttcagtgtg

SEQ ID NO: 2497317 - DNA, 25 bp, Homo sapien
gaaagatgaacacgttcagtgtgac

SEQ ID NO: 2497318 - DNA, 25 bp, Homo sapien
gatgaacacgttcagtgtgacatct

SEQ ID NO: 2497319 - DNA, 25 bp, Homo sapien
gagacacgactgagcgtaagacact

SEQ ID NO: 2497320 - DNA, 25 bp, Homo sapien
taagacactagggtgctgcatagct

SEQ ID NO: 2497321 - DNA, 25 bp, Homo sapien
gatttaaatgtgagacacgactgag

SEQ ID NO: 2497322 - DNA, 25 bp, Homo sapien
ggtgctgcatagctcctccggcagg

SEQ ID NO: 2497323 - DNA, 25 bp, Homo sapien
tcatgcagaccagaggacttcagca

SEQ ID NO: 2497324 - DNA, 25 bp, Homo sapien
cctcggtccactgtactgtgcttgt

SEQ ID NO: 2497325 - DNA, 25 bp, Homo sapien
tgatcactttcagcccatgccgaat

SEQ ID NO: 2497326 - DNA, 25 bp, Homo sapien
gaatcccctcggtccactgtactgt

SEQ ID NO: 2497327 - DNA, 25 bp, Homo sapien
ggcttctccacaagctgtagacctg

SEQ ID NO: 2497328 - DNA, 25 bp, Homo sapien
tctcaacatctcttaacttatatcc

SEQ ID NO: 2497329 - DNA, 25 bp, Homo sapien
gcacgttaatttccttctcccagac

SEQ ID NO: 2497330 - DNA, 25 bp, Homo sapien
tgtagacctgctgctagcatctcaa

SEQ ID NO: 2497331 - DNA, 25 bp, Homo sapien
ggtcactctgtataccagggaagac

SEQ ID NO: 2497332 - DNA, 25 bp, Homo sapien
gacaaacgggtttggcttcatgcct

SEQ ID NO: 2497333 - DNA, 25 bp, Homo sapien
ctctctaactccctagagcttttaa

SEQ ID NO: 2497334 - DNA, 25 bp, Homo sapien
gtcccctgtggtcactctgtatacc

SEQ ID NO: 2497335 - DNA, 25 bp, Homo sapien
gcactgaactgaaaatccaaaggaa

SEQ ID NO: 2497336 - DNA, 25 bp, Homo sapien
gaacacagatgatcgtcatggacat

SEQ ID NO: 2497337 - DNA, 25 bp, Homo sapien
tgggaacacagatgatcgtcatgga

SEQ ID NO: 2497338 - DNA, 25 bp, Homo sapien
agatgatcgtcatggacatttttac

SEQ ID NO: 2497339 - DNA, 25 bp, Homo sapien
tatttccagatagacccagacgctg

SEQ ID NO: 2497340 - DNA, 25 bp, Homo sapien
aactctgcatacttctgcttgtcca

SEQ ID NO: 2497341 - DNA, 25 bp, Homo sapien
gcaagaagtcgctgtgccaagcagt

SEQ ID NO: 2497342 - DNA, 25 bp, Homo sapien
ttccacacagactcctaagagcctg

SEQ ID NO: 2497343 - DNA, 25 bp, Homo sapien
taagccacaagcatttttttgagaa

SEQ ID NO: 2497344 - DNA, 25 bp, Homo sapien
aagcatttttttgagaatttctcat

SEQ ID NO: 2497345 - DNA, 25 bp, Homo sapien
cacaagcatttttttgagaatttct

SEQ ID NO: 2497346 - DNA, 25 bp, Homo sapien
ctaagccacaagcatttttttgaga

SEQ ID NO: 2497347 - DNA, 25 bp, Homo sapien
ggctggtccatgctccatctctaag

SEQ ID NO: 2497348 - DNA, 25 bp, Homo sapien
taagtcagaccaaatgcagtcatgg

SEQ ID NO: 2497349 - DNA, 25 bp, Homo sapien
cctatgacagtaaagctgaccatgc

SEQ ID NO: 2497350 - DNA, 25 bp, Homo sapien
ctaaatcgaacaggctggtccatgc

SEQ ID NO: 2497351 - DNA, 25 bp, Homo sapien
attctctccatattcacagaaacaa

SEQ ID NO: 2497352 - DNA, 25 bp, Homo sapien
ttctctccatattcacagaaacaaa

SEQ ID NO: 2497353 - DNA, 25 bp, Homo sapien
cccaagtaagaatctgttgaataag

SEQ ID NO: 2497354 - DNA, 25 bp, Homo sapien
ccaagtaagaatctgttgaataagt

SEQ ID NO: 2497355 - DNA, 25 bp, Homo sapien
tcccaagtaagaatctgttgaataa

SEQ ID NO: 2497356 - DNA, 25 bp, Homo sapien
tgacatatccttacaagctcttggg

SEQ ID NO: 2497357 - DNA, 25 bp, Homo sapien
gtggaactctggctatgcaccagat

SEQ ID NO: 2497358 - DNA, 25 bp, Homo sapien
tgaagtggcagtaaaccaatgacca

SEQ ID NO: 2497359 - DNA, 25 bp, Homo sapien
tccttgtccatgataagatgcatca

SEQ ID NO: 2497360 - DNA, 25 bp, Homo sapien
actaaacatgtaacgatgaaggagg

SEQ ID NO: 2497361 - DNA, 25 bp, Homo sapien
tgaactaaacatgtaacgatgaagg

SEQ ID NO: 2497362 - DNA, 25 bp, Homo sapien
ctaaacatgtaacgatgaaggaggg

SEQ ID NO: 2497363 - DNA, 25 bp, Homo sapien
ctatgaactaaacatgtaacgatga

SEQ ID NO: 2497364 - DNA, 25 bp, Homo sapien
cataggctaacacagagctgagaca

SEQ ID NO: 2497365 - DNA, 25 bp, Homo sapien
aatatttgtatctggtctggtgacc

SEQ ID NO: 2497366 - DNA, 25 bp, Homo sapien
tctggtgaccttagtgtgcttcttc

SEQ ID NO: 2497367 - DNA, 25 bp, Homo sapien
gactttagaaccagtggtcacatga

SEQ ID NO: 2497368 - DNA, 25 bp, Homo sapien
tgtctgactgcttaccaagggttga

SEQ ID NO: 2497369 - DNA, 25 bp, Homo sapien
tgattggtttgcagtgcatggacag

SEQ ID NO: 2497370 - DNA, 25 bp, Homo sapien
gactttgggaatgcctaaaagtgca

SEQ ID NO: 2497371 - DNA, 25 bp, Homo sapien
gagggtgtctcttaacagtgattac

SEQ ID NO: 2497372 - DNA, 25 bp, Homo sapien
tagatgaggaaaggtaactctggga

SEQ ID NO: 2497373 - DNA, 25 bp, Homo sapien
aggtaactctgggaagtacccatat

SEQ ID NO: 2497374 - DNA, 25 bp, Homo sapien
ctctgggaagtacccatattcggta

SEQ ID NO: 2497375 - DNA, 25 bp, Homo sapien
gatgaggaaaggtaactctgggaag

SEQ ID NO: 2497376 - DNA, 25 bp, Homo sapien
tggtgcttgataactttctccactg

SEQ ID NO: 2497377 - DNA, 25 bp, Homo sapien
gacaaacatgtcagcgtttcaactg

SEQ ID NO: 2497378 - DNA, 25 bp, Homo sapien
tctgcaactgtgtcctgataaggcc

SEQ ID NO: 2497379 - DNA, 25 bp, Homo sapien
gccattaccaggatctggtgcttga

SEQ ID NO: 2497380 - DNA, 25 bp, Homo sapien
cattttaagtgctccatgtaaagca

SEQ ID NO: 2497381 - DNA, 25 bp, Homo sapien
tggtcattggtttgtgtcatgtaat

SEQ ID NO: 2497382 - DNA, 25 bp, Homo sapien
tgtaatttagatcaaggtctttaaa

SEQ ID NO: 2497383 - DNA, 25 bp, Homo sapien
ctttaaataattgccgaagcatttt

SEQ ID NO: 2497384 - DNA, 25 bp, Homo sapien
tgctgggcggtacacagaaaaatct

SEQ ID NO: 2497385 - DNA, 25 bp, Homo sapien
tgcactggtccacaaagaactatag

SEQ ID NO: 2497386 - DNA, 25 bp, Homo sapien
gaaagaccaatgatcctccggataa

SEQ ID NO: 2497387 - DNA, 25 bp, Homo sapien
cgaaaaggcctgtggtggtacaaat

SEQ ID NO: 2497388 - DNA, 25 bp, Homo sapien
ctgtctgtgattgcatgaagtcctc

SEQ ID NO: 2497389 - DNA, 25 bp, Homo sapien
aagtgtctacttaggtactggtcca

SEQ ID NO: 2497390 - DNA, 25 bp, Homo sapien
tgtgtctgaaacgttaggagagcct

SEQ ID NO: 2497391 - DNA, 25 bp, Homo sapien
caatttttccaatgccttccatggg

SEQ ID NO: 2497392 - DNA, 25 bp, Homo sapien
tgggacaagagctccacagaggctg

SEQ ID NO: 2497393 - DNA, 25 bp, Homo sapien
gagcatacagcggtttcacccgagg

SEQ ID NO: 2497394 - DNA, 25 bp, Homo sapien
ccttgggcagggctctaattccgag

SEQ ID NO: 2497395 - DNA, 25 bp, Homo sapien
tttctaagtacgcatcgcctcagga

SEQ ID NO: 2497396 - DNA, 25 bp, Homo sapien
acgcagcagctcacgatggcttcca

SEQ ID NO: 2497397 - DNA, 25 bp, Homo sapien
gctctaagtgtagcgcctccaggag

SEQ ID NO: 2497398 - DNA, 25 bp, Homo sapien
gcggcctccattccggctgagaagc

SEQ ID NO: 2497399 - DNA, 25 bp, Homo sapien
tgggcttcgtacacaaaacttgccg

SEQ ID NO: 2497400 - DNA, 25 bp, Homo sapien
tagcacggcttcttggttgggcgag

SEQ ID NO: 2497401 - DNA, 25 bp, Homo sapien
ttttgaccagcttgcagaacacccg

SEQ ID NO: 2497402 - DNA, 25 bp, Homo sapien
atatctgggccgcttcccctttttg

SEQ ID NO: 2497403 - DNA, 25 bp, Homo sapien
cccggaagccaggagtcgaagccgg

SEQ ID NO: 2497404 - DNA, 25 bp, Homo sapien
ctgcagctttgccaggtggggtgag

SEQ ID NO: 2497405 - DNA, 25 bp, Homo sapien
ggcccgttgtacgcgaaggcagaaa

SEQ ID NO: 2497406 - DNA, 25 bp, Homo sapien
gcccgttgtacgcgaaggcagaaaa

SEQ ID NO: 2497407 - DNA, 25 bp, Homo sapien
tggcccgttgtacgcgaaggcagaa

SEQ ID NO: 2497408 - DNA, 25 bp, Homo sapien
ctggcccgttgtacgcgaaggcaga

SEQ ID NO: 2497409 - DNA, 25 bp, Homo sapien
taacggaaataatttgtagatgcag

SEQ ID NO: 2497410 - DNA, 25 bp, Homo sapien
aataatttgtagatgcaggacaggt

SEQ ID NO: 2497411 - DNA, 25 bp, Homo sapien
cggaaataatttgtagatgcaggac

SEQ ID NO: 2497412 - DNA, 25 bp, Homo sapien
aatttgtagatgcaggacaggtgag

SEQ ID NO: 2497413 - DNA, 25 bp, Homo sapien
tcctgacatttagaagtgaagtgct

SEQ ID NO: 2497414 - DNA, 25 bp, Homo sapien
gagttctatttaagtgtaccacgga

SEQ ID NO: 2497415 - DNA, 25 bp, Homo sapien
tcttaaagtaagagtcggctaccac

SEQ ID NO: 2497416 - DNA, 25 bp, Homo sapien
tactcaatatagattcaagcagtgg

SEQ ID NO: 2497417 - DNA, 25 bp, Homo sapien
catgggtttcacgtggctcttctaa

SEQ ID NO: 2497418 - DNA, 25 bp, Homo sapien
tggaatgcggttaccaactgagctg

SEQ ID NO: 2497419 - DNA, 25 bp, Homo sapien
tgtgattccatcgaaaaggcactgt

SEQ ID NO: 2497420 - DNA, 25 bp, Homo sapien
caaagtcctaagaggtgggtcacca

SEQ ID NO: 2497421 - DNA, 25 bp, Homo sapien
ctacttgaacatgaagtttattatg

SEQ ID NO: 2497422 - DNA, 25 bp, Homo sapien
tacttgaacatgaagtttattatga

SEQ ID NO: 2497423 - DNA, 25 bp, Homo sapien
acttgaacatgaagtttattatgac

SEQ ID NO: 2497424 - DNA, 25 bp, Homo sapien
gccggtgtgcttgaaactaaatgat

SEQ ID NO: 2497425 - DNA, 25 bp, Homo sapien
tgcagaaaataatccgtggccggtg

SEQ ID NO: 2497426 - DNA, 25 bp, Homo sapien
aatccgtggccggtgtgcttgaaac

SEQ ID NO: 2497427 - DNA, 25 bp, Homo sapien
gaaactaaatgatttcgaagagcca

SEQ ID NO: 2497428 - DNA, 25 bp, Homo sapien
gttttatagattcgatggaactctg

SEQ ID NO: 2497429 - DNA, 25 bp, Homo sapien
tagattcgatggaactctgaatgtc

SEQ ID NO: 2497430 - DNA, 25 bp, Homo sapien
tatagattcgatggaactctgaatg

SEQ ID NO: 2497431 - DNA, 25 bp, Homo sapien
ttgttttatagattcgatggaactc

SEQ ID NO: 2497432 - DNA, 25 bp, Homo sapien
ggaggaatagccttttgctactttc

SEQ ID NO: 2497433 - DNA, 25 bp, Homo sapien
tggggaggaatagccttttgctact

SEQ ID NO: 2497434 - DNA, 25 bp, Homo sapien
tctggggaggaatagccttttgcta

SEQ ID NO: 2497435 - DNA, 25 bp, Homo sapien
gaggaatagccttttgctactttct

SEQ ID NO: 2497436 - DNA, 25 bp, Homo sapien
tgactccacgtttcatatccagatc

SEQ ID NO: 2497437 - DNA, 25 bp, Homo sapien
tttgactccacgtttcatatccaga

SEQ ID NO: 2497438 - DNA, 25 bp, Homo sapien
ttgactccacgtttcatatccagat

SEQ ID NO: 2497439 - DNA, 25 bp, Homo sapien
gcatctcgtaagttttgttatacta

SEQ ID NO: 2497440 - DNA, 25 bp, Homo sapien
cagtttctcacggaatgaagtaagg

SEQ ID NO: 2497441 - DNA, 25 bp, Homo sapien
ctcttaatgtagatgttcacagata

SEQ ID NO: 2497442 - DNA, 25 bp, Homo sapien
tccttacctttgctgcatctcgtaa

SEQ ID NO: 2497443 - DNA, 25 bp, Homo sapien
caaactgtatcatatcattaagtgg

SEQ ID NO: 2497444 - DNA, 25 bp, Homo sapien
gtacgatgtttcactttggtctgaa

SEQ ID NO: 2497445 - DNA, 25 bp, Homo sapien
actttggtctgaataacaccatctt

SEQ ID NO: 2497446 - DNA, 25 bp, Homo sapien
cattggagtacgatgtttcactttg

SEQ ID NO: 2497447 - DNA, 25 bp, Homo sapien
caagttcaaataatttgcaagacca

SEQ ID NO: 2497448 - DNA, 25 bp, Homo sapien
caaataatttgcaagaccactcttc

SEQ ID NO: 2497449 - DNA, 25 bp, Homo sapien
ctcctgtgagtggatcaagttcaaa

SEQ ID NO: 2497450 - DNA, 25 bp, Homo sapien
ccctggcagcttgtctttgagcttc

SEQ ID NO: 2497451 - DNA, 25 bp, Homo sapien
catttatggctcgagttacccgttg

SEQ ID NO: 2497452 - DNA, 25 bp, Homo sapien
ctttggcatttatggctcgagttac

SEQ ID NO: 2497453 - DNA, 25 bp, Homo sapien
tggctcgagttacccgttgccagag

SEQ ID NO: 2497454 - DNA, 25 bp, Homo sapien
tggtctttggcatttatggctcgag

SEQ ID NO: 2497455 - DNA, 25 bp, Homo sapien
aatgagtagttttgagctacagaaa

SEQ ID NO: 2497456 - DNA, 25 bp, Homo sapien
cagaaaagcaagacgatttatatta

SEQ ID NO: 2497457 - DNA, 25 bp, Homo sapien
tgaattaagatatgacagaaggtga

SEQ ID NO: 2497458 - DNA, 25 bp, Homo sapien
ttgctgaattaagatatgacagaag

SEQ ID NO: 2497459 - DNA, 25 bp, Homo sapien
tctctgattcaaaatctccctgttc

SEQ ID NO: 2497460 - DNA, 25 bp, Homo sapien
ttaatctccattgcttaatgtcagg

SEQ ID NO: 2497461 - DNA, 25 bp, Homo sapien
tttacagtgtgccttattaatctcc

SEQ ID NO: 2497462 - DNA, 25 bp, Homo sapien
tgattcaaaatctccctgttcttca

SEQ ID NO: 2497463 - DNA, 25 bp, Homo sapien
tatagtatagtaatatgacggtgat

SEQ ID NO: 2497464 - DNA, 25 bp, Homo sapien
taaaaacattaagattgactacgta

SEQ ID NO: 2497465 - DNA, 25 bp, Homo sapien
tggttaatcctccagttaaaagcat

SEQ ID NO: 2497466 - DNA, 25 bp, Homo sapien
aatatgacggtgataatttcttctg

SEQ ID NO: 2497467 - DNA, 25 bp, Homo sapien
ttccagaagactctcagatttaagg

SEQ ID NO: 2497468 - DNA, 25 bp, Homo sapien
tgcatgcagaaaggagcatatactc

SEQ ID NO: 2497469 - DNA, 25 bp, Homo sapien
tgtatgtggccacttaacaaagtcc

SEQ ID NO: 2497470 - DNA, 25 bp, Homo sapien
tactcagtgctcatagtatggtata

SEQ ID NO: 2497471 - DNA, 25 bp, Homo sapien
taaagctcatatacaaaatacttac

SEQ ID NO: 2497472 - DNA, 25 bp, Homo sapien
gtaaagctcatatacaaaatactta

SEQ ID NO: 2497473 - DNA, 25 bp, Homo sapien
tgtaaagctcatatacaaaatactt

SEQ ID NO: 2497474 - DNA, 25 bp, Homo sapien
ttgtaaagctcatatacaaaatact

SEQ ID NO: 2497475 - DNA, 25 bp, Homo sapien
ccagtttaagtttccctgatatttg

SEQ ID NO: 2497476 - DNA, 25 bp, Homo sapien
cctgatatttgattaacacagtcac

SEQ ID NO: 2497477 - DNA, 25 bp, Homo sapien
tatttgattaacacagtcactactc

SEQ ID NO: 2497478 - DNA, 25 bp, Homo sapien
ttccctgatatttgattaacacagt

SEQ ID NO: 2497479 - DNA, 25 bp, Homo sapien
aaaattgcttgtatagttacagtac

SEQ ID NO: 2497480 - DNA, 25 bp, Homo sapien
tattgaatgcacaagcagtaaaaaa

SEQ ID NO: 2497481 - DNA, 25 bp, Homo sapien
tacagtactattgaatgcacaagca

SEQ ID NO: 2497482 - DNA, 25 bp, Homo sapien
gcttgtatagttacagtactattga

SEQ ID NO: 2497483 - DNA, 25 bp, Homo sapien
taactattgagtcacccatggccta

SEQ ID NO: 2497484 - DNA, 25 bp, Homo sapien
ggtgattacagtccctaactattga

SEQ ID NO: 2497485 - DNA, 25 bp, Homo sapien
cacagaactcatgaggaacagcaca

SEQ ID NO: 2497486 - DNA, 25 bp, Homo sapien
gaagcagagataagctatccccagt

SEQ ID NO: 2497487 - DNA, 25 bp, Homo sapien
attgcactgtatccagttttttgac

SEQ ID NO: 2497488 - DNA, 25 bp, Homo sapien
taaattcaagtattgcactgtatcc

SEQ ID NO: 2497489 - DNA, 25 bp, Homo sapien
tattgactgttccaccaagctccag

SEQ ID NO: 2497490 - DNA, 25 bp, Homo sapien
gacatgtaatattgactgttccacc

SEQ ID NO: 2497491 - DNA, 25 bp, Homo sapien
tcaagaaagttaaccgtgcttctcc

SEQ ID NO: 2497492 - DNA, 25 bp, Homo sapien
tttacaatgagcgtatggcattgtc

SEQ ID NO: 2497493 - DNA, 25 bp, Homo sapien
cacctctattcaagaaagttaaccg

SEQ ID NO: 2497494 - DNA, 25 bp, Homo sapien
gcattgtcattacataatcttcacc

SEQ ID NO: 2497495 - DNA, 25 bp, Homo sapien
ctctaatattgcagataatgagttt

SEQ ID NO: 2497496 - DNA, 25 bp, Homo sapien
tctaatattgcagataatgagtttc

SEQ ID NO: 2497497 - DNA, 25 bp, Homo sapien
tgcagtcaacgataaaatactatgg

SEQ ID NO: 2497498 - DNA, 25 bp, Homo sapien
ccaggacaccaatggtgcattttaa

SEQ ID NO: 2497499 - DNA, 25 bp, Homo sapien
tgagcagtcaatcctttcccttagc

SEQ ID NO: 2497500 - DNA, 25 bp, Homo sapien
ttggaaattgcagagtcatataacc

SEQ ID NO: 2497501 - DNA, 25 bp, Homo sapien
cccaggagagggtgcaagttgggac

SEQ ID NO: 2497502 - DNA, 25 bp, Homo sapien
gagagggtgcaagttgggacgggaa

SEQ ID NO: 2497503 - DNA, 25 bp, Homo sapien
tgcaagttgggacgggaaaactcac

SEQ ID NO: 2497504 - DNA, 25 bp, Homo sapien
gtgcaagttgggacgggaaaactca

SEQ ID NO: 2497505 - DNA, 25 bp, Homo sapien
ttagacttagccaggatactaccgc

SEQ ID NO: 2497506 - DNA, 25 bp, Homo sapien
gcaaaatccatcttttcgattacta

SEQ ID NO: 2497507 - DNA, 25 bp, Homo sapien
cgattactaacataaaaggcagata

SEQ ID NO: 2497508 - DNA, 25 bp, Homo sapien
tactaccgctaaggcaaaatccatc

SEQ ID NO: 2497509 - DNA, 25 bp, Homo sapien
tccaataacttccagatcagttttg

SEQ ID NO: 2497510 - DNA, 25 bp, Homo sapien
aatattgagtttactgggtaaatat

SEQ ID NO: 2497511 - DNA, 25 bp, Homo sapien
ggaaagtctcgccaagtataggatt

SEQ ID NO: 2497512 - DNA, 25 bp, Homo sapien
ccaagtataggattataaggtttct

SEQ ID NO: 2497513 - DNA, 25 bp, Homo sapien
ccataaacaacggaaagtctcgcca

SEQ ID NO: 2497514 - DNA, 25 bp, Homo sapien
ataaacaacggaaagtctcgccaag

SEQ ID NO: 2497515 - DNA, 25 bp, Homo sapien
ggctttttatagaatcctgacaaat

SEQ ID NO: 2497516 - DNA, 25 bp, Homo sapien
gctttttatagaatcctgacaaata

SEQ ID NO: 2497517 - DNA, 25 bp, Homo sapien
aataccatttcactactttcttcaa

SEQ ID NO: 2497518 - DNA, 25 bp, Homo sapien
gcatgatagtagtaatctgaaagtt

SEQ ID NO: 2497519 - DNA, 25 bp, Homo sapien
atagtagtaatctgaaagtttatcc

SEQ ID NO: 2497520 - DNA, 25 bp, Homo sapien
tcagataggaaatctgcatgatagt

SEQ ID NO: 2497521 - DNA, 25 bp, Homo sapien
gataggaaatctgcatgatagtagt

SEQ ID NO: 2497522 - DNA, 25 bp, Homo sapien
tgtttcaatagtgtccagataaggc

SEQ ID NO: 2497523 - DNA, 25 bp, Homo sapien
tgtaggcagaaccaccttggatagg

SEQ ID NO: 2497524 - DNA, 25 bp, Homo sapien
caatagtgtccagataaggcttttg

SEQ ID NO: 2497525 - DNA, 25 bp, Homo sapien
gtccatgccaggacggacttgtttc

SEQ ID NO: 2497526 - DNA, 25 bp, Homo sapien
acagatatgtaaacaagccagctaa

SEQ ID NO: 2497527 - DNA, 25 bp, Homo sapien
tgaactcttctcaggactactccaa

SEQ ID NO: 2497528 - DNA, 25 bp, Homo sapien
ctcttctcaggactactccaagcat

SEQ ID NO: 2497529 - DNA, 25 bp, Homo sapien
gtaaacaagccagctaatgttgaaa

SEQ ID NO: 2497530 - DNA, 25 bp, Homo sapien
aatatcacattctatcacagaaaaa

SEQ ID NO: 2497531 - DNA, 25 bp, Homo sapien
gaatatgaaaatccagaacctctaa

SEQ ID NO: 2497532 - DNA, 25 bp, Homo sapien
aattcccaagaatatgaaaatccag

SEQ ID NO: 2497533 - DNA, 25 bp, Homo sapien
ggcaatagatcaagcaaataatatc

SEQ ID NO: 2497534 - DNA, 25 bp, Homo sapien
taaaggctcaacaggctcaggttcg

SEQ ID NO: 2497535 - DNA, 25 bp, Homo sapien
tcatggctctgttcagtgtaggtag

SEQ ID NO: 2497536 - DNA, 25 bp, Homo sapien
tgtaggtagtctcctttaaaggctc

SEQ ID NO: 2497537 - DNA, 25 bp, Homo sapien
tatcttggtccttaaaatgttgtcg

SEQ ID NO: 2497538 - DNA, 25 bp, Homo sapien
gatgaaacgctcaggtcatgttcct

SEQ ID NO: 2497539 - DNA, 25 bp, Homo sapien
tggaagttatcaccactgtggagat

SEQ ID NO: 2497540 - DNA, 25 bp, Homo sapien
cgtagtaagccatagaaagtcacat

SEQ ID NO: 2497541 - DNA, 25 bp, Homo sapien
ctgatcattgtacgtttaagaagac

SEQ ID NO: 2497542 - DNA, 25 bp, Homo sapien
taactgctaggtaagggttgagtaa

SEQ ID NO: 2497543 - DNA, 25 bp, Homo sapien
tgactctgaagtagctcggatgatc

SEQ ID NO: 2497544 - DNA, 25 bp, Homo sapien
gttgagtaatggatccaaccgcttc

SEQ ID NO: 2497545 - DNA, 25 bp, Homo sapien
gtaatggatccaaccgcttcacctt

SEQ ID NO: 2497546 - DNA, 25 bp, Homo sapien
tgatggacgttcaatgatttcacag

SEQ ID NO: 2497547 - DNA, 25 bp, Homo sapien
ggtttcaacacacaccataacttgg

SEQ ID NO: 2497548 - DNA, 25 bp, Homo sapien
ggtccagctctttagagtaccacga

SEQ ID NO: 2497549 - DNA, 25 bp, Homo sapien
caaatagattgctccaaaggatgga

SEQ ID NO: 2497550 - DNA, 25 bp, Homo sapien
ccaatcagccataacaataacagaa

SEQ ID NO: 2497551 - DNA, 25 bp, Homo sapien
tgtgattgtactgagcagctccttt

SEQ ID NO: 2497552 - DNA, 25 bp, Homo sapien
ataacagaaggatctgtgattgtac

SEQ ID NO: 2497553 - DNA, 25 bp, Homo sapien
ctttaaccaatcagccataacaata

SEQ ID NO: 2497554 - DNA, 25 bp, Homo sapien
ccccaacctattccaatcctctgaa

SEQ ID NO: 2497555 - DNA, 25 bp, Homo sapien
tgatgactgttaaccttctggaaaa

SEQ ID NO: 2497556 - DNA, 25 bp, Homo sapien
gatgactgttaaccttctggaaaac

SEQ ID NO: 2497557 - DNA, 25 bp, Homo sapien
attgatgactgttaaccttctggaa

SEQ ID NO: 2497558 - DNA, 25 bp, Homo sapien
gtgagtttgcttgaagttgaactgt

SEQ ID NO: 2497559 - DNA, 25 bp, Homo sapien
gagccattataaagtttagattcag

SEQ ID NO: 2497560 - DNA, 25 bp, Homo sapien
ctgagccattataaagtttagattc

SEQ ID NO: 2497561 - DNA, 25 bp, Homo sapien
tgcttgaagttgaactgtccttctc

SEQ ID NO: 2497562 - DNA, 25 bp, Homo sapien
tcgtacagcgtgtaaacaccaatat

SEQ ID NO: 2497563 - DNA, 25 bp, Homo sapien
tactacttcctacctatcgagtgag

SEQ ID NO: 2497564 - DNA, 25 bp, Homo sapien
caagctgatgcacatattgccctgc

SEQ ID NO: 2497565 - DNA, 25 bp, Homo sapien
gccactctatctaattcgtacagcg

SEQ ID NO: 2497566 - DNA, 25 bp, Homo sapien
atagaaagtgaagattcatctttat

SEQ ID NO: 2497567 - DNA, 25 bp, Homo sapien
tgacatagaaagtgaagattcatct

SEQ ID NO: 2497568 - DNA, 25 bp, Homo sapien
catagaaagtgaagattcatcttta

SEQ ID NO: 2497569 - DNA, 25 bp, Homo sapien
gacatagaaagtgaagattcatctt

SEQ ID NO: 2497570 - DNA, 25 bp, Homo sapien
cgaacaagctttcggccatcaatcc

SEQ ID NO: 2497571 - DNA, 25 bp, Homo sapien
ccaaatgaagcattccgaacaagct

SEQ ID NO: 2497572 - DNA, 25 bp, Homo sapien
cattgtatcctccaaatgaagcatt

SEQ ID NO: 2497573 - DNA, 25 bp, Homo sapien
ggaagaaaatctacgttgtgagctc

SEQ ID NO: 2497574 - DNA, 25 bp, Homo sapien
ttaatgtatatgctcacccaaaggc

SEQ ID NO: 2497575 - DNA, 25 bp, Homo sapien
tatgtttctgtactatccggccaca

SEQ ID NO: 2497576 - DNA, 25 bp, Homo sapien
ggaccaaagactgtcaaatcagcaa

SEQ ID NO: 2497577 - DNA, 25 bp, Homo sapien
ccaatatggcaaagacaggcttttc

SEQ ID NO: 2497578 - DNA, 25 bp, Homo sapien
taagcctaatgtactaaggcatcca

SEQ ID NO: 2497579 - DNA, 25 bp, Homo sapien
ttacgtcaacaacaatactggaagc

SEQ ID NO: 2497580 - DNA, 25 bp, Homo sapien
aagatatctttagacatgcaaggtc

SEQ ID NO: 2497581 - DNA, 25 bp, Homo sapien
taattcacagcaccaagttcctctg

SEQ ID NO: 2497582 - DNA, 25 bp, Homo sapien
taccaacaattctgctggtacatgc

SEQ ID NO: 2497583 - DNA, 25 bp, Homo sapien
ctgctggtacatgcgtgagagtatt

SEQ ID NO: 2497584 - DNA, 25 bp, Homo sapien
aacaattctgctggtacatgcgtga

SEQ ID NO: 2497585 - DNA, 25 bp, Homo sapien
aattctgctggtacatgcgtgagag

SEQ ID NO: 2497586 - DNA, 25 bp, Homo sapien
catggttaggaaagatcaagtctat

SEQ ID NO: 2497587 - DNA, 25 bp, Homo sapien
aacatcaaccttcctgtactcaagc

SEQ ID NO: 2497588 - DNA, 25 bp, Homo sapien
tagattctaacttcacatggttagg

SEQ ID NO: 2497589 - DNA, 25 bp, Homo sapien
gatgaagtgtaaatagtccacgtct

SEQ ID NO: 2497590 - DNA, 25 bp, Homo sapien
aatctgtccgacttgcaaaacatag

SEQ ID NO: 2497591 - DNA, 25 bp, Homo sapien
aaatacagaaagtcctctctaggcc

SEQ ID NO: 2497592 - DNA, 25 bp, Homo sapien
catagaaggctaaatcccaacagaa

SEQ ID NO: 2497593 - DNA, 25 bp, Homo sapien
aacgattgaacccatggagatacag

SEQ ID NO: 2497594 - DNA, 25 bp, Homo sapien
caccctggggaatctggtacagtat

SEQ ID NO: 2497595 - DNA, 25 bp, Homo sapien
taatgtgtaacgctgtcaccctggg

SEQ ID NO: 2497596 - DNA, 25 bp, Homo sapien
acagtatcttcacatcagtaaattg

SEQ ID NO: 2497597 - DNA, 25 bp, Homo sapien
tcacctgagattataccagtaatgt

SEQ ID NO: 2497598 - DNA, 25 bp, Homo sapien
tggactaagagatggctgatgcaaa

SEQ ID NO: 2497599 - DNA, 25 bp, Homo sapien
aggacttgctggactaagagatggc

SEQ ID NO: 2497600 - DNA, 25 bp, Homo sapien
ttggttggcgttggataagcttctt

SEQ ID NO: 2497601 - DNA, 25 bp, Homo sapien
tgatgcaaatctttggttggcgttg

SEQ ID NO: 2497602 - DNA, 25 bp, Homo sapien
ctttcctggtgtcagaagctgagat

SEQ ID NO: 2497603 - DNA, 25 bp, Homo sapien
tttcctggtgtcagaagctgagatt

SEQ ID NO: 2497604 - DNA, 25 bp, Homo sapien
gtgtcagaagctgagattcgtcact

SEQ ID NO: 2497605 - DNA, 25 bp, Homo sapien
agaagctgagattcgtcactgtttg

SEQ ID NO: 2497606 - DNA, 25 bp, Homo sapien
gcccaaggacatctttgctatcacc

SEQ ID NO: 2497607 - DNA, 25 bp, Homo sapien
cccaaggacatctttgctatcacca

SEQ ID NO: 2497608 - DNA, 25 bp, Homo sapien
cagcaacttctgaatatggcaatat

SEQ ID NO: 2497609 - DNA, 25 bp, Homo sapien
tcagcaacttctgaatatggcaata

SEQ ID NO: 2497610 - DNA, 25 bp, Homo sapien
ttcagcaacttctgaatatggcaat

SEQ ID NO: 2497611 - DNA, 25 bp, Homo sapien
tctattatcaggtcggattgcaggg

SEQ ID NO: 2497612 - DNA, 25 bp, Homo sapien
acagagctccatgtgttcctagcaa

SEQ ID NO: 2497613 - DNA, 25 bp, Homo sapien
cttgataagggatttcctgacctcc

SEQ ID NO: 2497614 - DNA, 25 bp, Homo sapien
cagatatgcaagctttacactcagt

SEQ ID NO: 2497615 - DNA, 25 bp, Homo sapien
aaatacctaacaaaatgtagattgg

SEQ ID NO: 2497616 - DNA, 25 bp, Homo sapien
aacaaaatgtagattggattgtaca

SEQ ID NO: 2497617 - DNA, 25 bp, Homo sapien
accccatcatccatgtgatcattac

SEQ ID NO: 2497618 - DNA, 25 bp, Homo sapien
cctaacaaaatgtagattggattgt

SEQ ID NO: 2497619 - DNA, 25 bp, Homo sapien
aatcaatgtgacaacagccttcttc

SEQ ID NO: 2497620 - DNA, 25 bp, Homo sapien
taaatcaatgtgacaacagccttct

SEQ ID NO: 2497621 - DNA, 25 bp, Homo sapien
ttaaatcaatgtgacaacagccttc

SEQ ID NO: 2497622 - DNA, 25 bp, Homo sapien
atttaaatcaatgtgacaacagcct

SEQ ID NO: 2497623 - DNA, 25 bp, Homo sapien
cgaagttcgatcaggttctccatct

SEQ ID NO: 2497624 - DNA, 25 bp, Homo sapien
ctccatctgccaaacctccctccat

SEQ ID NO: 2497625 - DNA, 25 bp, Homo sapien
aagaagataggtttatgcttctctt

SEQ ID NO: 2497626 - DNA, 25 bp, Homo sapien
tccattaatgtgcagccattctgta

SEQ ID NO: 2497627 - DNA, 25 bp, Homo sapien
tttccattaatgtgcagccattctg

SEQ ID NO: 2497628 - DNA, 25 bp, Homo sapien
agaagataggtttatgcttctcttt

SEQ ID NO: 2497629 - DNA, 25 bp, Homo sapien
gtgtcttggttatgctgttgcccag

SEQ ID NO: 2497630 - DNA, 25 bp, Homo sapien
ccagacctggctaatacattttttt

SEQ ID NO: 2497631 - DNA, 25 bp, Homo sapien
tacaacctcaaccacctgggtgcaa

SEQ ID NO: 2497632 - DNA, 25 bp, Homo sapien
gggtgcaagcaatcttctcacccca

SEQ ID NO: 2497633 - DNA, 25 bp, Homo sapien
gagactcggttatgtacatttcagt

SEQ ID NO: 2497634 - DNA, 25 bp, Homo sapien
taacatcgcgtgtaaatagcacaat

SEQ ID NO: 2497635 - DNA, 25 bp, Homo sapien
tgtagtgtttcaggttaacatcgcg

SEQ ID NO: 2497636 - DNA, 25 bp, Homo sapien
tactttcgactttgcagatgatagg

SEQ ID NO: 2497637 - DNA, 25 bp, Homo sapien
atctcacctcaacctccagactagc

SEQ ID NO: 2497638 - DNA, 25 bp, Homo sapien
accatgcccagctacgtttattgtt

SEQ ID NO: 2497639 - DNA, 25 bp, Homo sapien
agtggtgccatcacatctccctgca

SEQ ID NO: 2497640 - DNA, 25 bp, Homo sapien
tgccatcacatctccctgcagcctt

SEQ ID NO: 2497641 - DNA, 25 bp, Homo sapien
tactgtttttctagagtaccctgac

SEQ ID NO: 2497642 - DNA, 25 bp, Homo sapien
caatttggtgggtttccagcctgtt

SEQ ID NO: 2497643 - DNA, 25 bp, Homo sapien
tcaatatgtgggtggatctcatcca

SEQ ID NO: 2497644 - DNA, 25 bp, Homo sapien
tcagactcaagactgcaacatcagc

SEQ ID NO: 2497645 - DNA, 25 bp, Homo sapien
acaggcaggtacaatgatcagcagc

SEQ ID NO: 2497646 - DNA, 25 bp, Homo sapien
taagctgcaaatcacggagacctca

SEQ ID NO: 2497647 - DNA, 25 bp, Homo sapien
gcaatgactaacctgaaagctagga

SEQ ID NO: 2497648 - DNA, 25 bp, Homo sapien
tattttcctcgacgaacctgacctg

SEQ ID NO: 2497649 - DNA, 25 bp, Homo sapien
tttcagacattttcacagggccaag

SEQ ID NO: 2497650 - DNA, 25 bp, Homo sapien
tacagtcactcgcaggacactctgg

SEQ ID NO: 2497651 - DNA, 25 bp, Homo sapien
tctttaagtatgttgtaggccctcc

SEQ ID NO: 2497652 - DNA, 25 bp, Homo sapien
catgagccggctagaaatgaaattc

SEQ ID NO: 2497653 - DNA, 25 bp, Homo sapien
gatctcatgggtgcttatataaggg

SEQ ID NO: 2497654 - DNA, 25 bp, Homo sapien
taagaggccttttagaggactcaaa

SEQ ID NO: 2497655 - DNA, 25 bp, Homo sapien
gattacagcgttatgtcacagtgcc

SEQ ID NO: 2497656 - DNA, 25 bp, Homo sapien
agggttggctttgtgatgacacacc

SEQ ID NO: 2497657 - DNA, 25 bp, Homo sapien
cagccaccacaaggtttttgtatct

SEQ ID NO: 2497658 - DNA, 25 bp, Homo sapien
catcaaaacaagttaattcaaatgc

SEQ ID NO: 2497659 - DNA, 25 bp, Homo sapien
atgcataaccaacatctatagtcat

SEQ ID NO: 2497660 - DNA, 25 bp, Homo sapien
atcaaaacaagttaattcaaatgca

SEQ ID NO: 2497661 - DNA, 25 bp, Homo sapien
tcatcaaaacaagttaattcaaatg

SEQ ID NO: 2497662 - DNA, 25 bp, Homo sapien
gcttcaggcaaggataggaatgttt

SEQ ID NO: 2497663 - DNA, 25 bp, Homo sapien
tgcttcaggcaaggataggaatgtt

SEQ ID NO: 2497664 - DNA, 25 bp, Homo sapien
tcagtctcttggaggttagccacag

SEQ ID NO: 2497665 - DNA, 25 bp, Homo sapien
agtctcttggaggttagccacagtt

SEQ ID NO: 2497666 - DNA, 25 bp, Homo sapien
cagtctcttggaggttagccacagt

SEQ ID NO: 2497667 - DNA, 25 bp, Homo sapien
aacgcagtagcaccaatggagattg

SEQ ID NO: 2497668 - DNA, 25 bp, Homo sapien
ctttaaacgcagtagcaccaatgga

SEQ ID NO: 2497669 - DNA, 25 bp, Homo sapien
taaacgcagtagcaccaatggagat

SEQ ID NO: 2497670 - DNA, 25 bp, Homo sapien
tttaaacgcagtagcaccaatggag

SEQ ID NO: 2497671 - DNA, 25 bp, Homo sapien
ccagggaggcgggacgcaaggagcc

SEQ ID NO: 2497672 - DNA, 25 bp, Homo sapien
gcaaggagccggttcctccgaggtc

SEQ ID NO: 2497673 - DNA, 25 bp, Homo sapien
aacttctctcggccgctgtcgtcgg

SEQ ID NO: 2497674 - DNA, 25 bp, Homo sapien
taagcgtctagtcagaccccaactt

SEQ ID NO: 2497675 - DNA, 25 bp, Homo sapien
ttgctaccggcagcggctactgcgg

SEQ ID NO: 2497676 - DNA, 25 bp, Homo sapien
gcgcgtcgcggcctaatgttgtcat

SEQ ID NO: 2497677 - DNA, 25 bp, Homo sapien
ttctgggcacccagaaccgcgaaga

SEQ ID NO: 2497678 - DNA, 25 bp, Homo sapien
tgcggcgtccaaagctaacactaca

SEQ ID NO: 2497679 - DNA, 25 bp, Homo sapien
tgcttcgccagggtgttatcgccag

SEQ ID NO: 2497680 - DNA, 25 bp, Homo sapien
ctgggccggtcatactgggcccttc

SEQ ID NO: 2497681 - DNA, 25 bp, Homo sapien
gcccagcgcctgttgatcggccagg

SEQ ID NO: 2497682 - DNA, 25 bp, Homo sapien
ggcgggagtcactgtccaccttgct

SEQ ID NO: 2497683 - DNA, 25 bp, Homo sapien
gccagagcagagtgatagtcatcac

SEQ ID NO: 2497684 - DNA, 25 bp, Homo sapien
gtgatagtcatcacttgagatggca

SEQ ID NO: 2497685 - DNA, 25 bp, Homo sapien
gttttctctagtgaaacagcaaaca

SEQ ID NO: 2497686 - DNA, 25 bp, Homo sapien
gaacttacctcttaatctgcaaaac

SEQ ID NO: 2497687 - DNA, 25 bp, Homo sapien
tctgtaaactatcagtgttcctggg

SEQ ID NO: 2497688 - DNA, 25 bp, Homo sapien
tcctgggtcttatttggaaacataa

SEQ ID NO: 2497689 - DNA, 25 bp, Homo sapien
cctccacatgggaatgttacgttgc

SEQ ID NO: 2497690 - DNA, 25 bp, Homo sapien
tctccgagaagtttctagctgacgt

SEQ ID NO: 2497691 - DNA, 25 bp, Homo sapien
gataagaacatggagtgtaatcccc

SEQ ID NO: 2497692 - DNA, 25 bp, Homo sapien
gttacgttgcgatgttataggacca

SEQ ID NO: 2497693 - DNA, 25 bp, Homo sapien
ttgtcaggtaatggggatgaaatca

SEQ ID NO: 2497694 - DNA, 25 bp, Homo sapien
ggtccttcagaccaggtgatgtcag

SEQ ID NO: 2497695 - DNA, 25 bp, Homo sapien
aaattggggtcattgttttgtcagg

SEQ ID NO: 2497696 - DNA, 25 bp, Homo sapien
tctttggtgagtcatctcttcatgg

SEQ ID NO: 2497697 - DNA, 25 bp, Homo sapien
tccaaagagctgtagcacattccag

SEQ ID NO: 2497698 - DNA, 25 bp, Homo sapien
tcagtgacgttttcagtgggtctgc

SEQ ID NO: 2497699 - DNA, 25 bp, Homo sapien
tacagctgttccaaagaattcaggg

SEQ ID NO: 2497700 - DNA, 25 bp, Homo sapien
agtggccccggcaatatcttcagtg

SEQ ID NO: 2497701 - DNA, 25 bp, Homo sapien
agctgatcagcacaacaaggaccct

SEQ ID NO: 2497702 - DNA, 25 bp, Homo sapien
tagctgatcagcacaacaaggaccc

SEQ ID NO: 2497703 - DNA, 25 bp, Homo sapien
ttagctgatcagcacaacaaggacc

SEQ ID NO: 2497704 - DNA, 25 bp, Homo sapien
gagaactgtattggatgatttacca

SEQ ID NO: 2497705 - DNA, 25 bp, Homo sapien
tcatcctctgaggattatagagaac

SEQ ID NO: 2497706 - DNA, 25 bp, Homo sapien
actgtattggatgatttaccagatg

SEQ ID NO: 2497707 - DNA, 25 bp, Homo sapien
ctgaggattatagagaactgtattg

SEQ ID NO: 2497708 - DNA, 25 bp, Homo sapien
taggtaacattctcccagttgggtg

SEQ ID NO: 2497709 - DNA, 25 bp, Homo sapien
ttctcagccatttccggtagatggc

SEQ ID NO: 2497710 - DNA, 25 bp, Homo sapien
cccagttgggtggagcttctcagcc

SEQ ID NO: 2497711 - DNA, 25 bp, Homo sapien
ccatttccggtagatggctgcatat

SEQ ID NO: 2497712 - DNA, 25 bp, Homo sapien
taaggctctgccgtactccaggagc

SEQ ID NO: 2497713 - DNA, 25 bp, Homo sapien
ttgtaaggctctgccgtactccagg

SEQ ID NO: 2497714 - DNA, 25 bp, Homo sapien
ctctgccgtactccaggagctggga

SEQ ID NO: 2497715 - DNA, 25 bp, Homo sapien
ctctttgtaaggctctgccgtactc

SEQ ID NO: 2497716 - DNA, 25 bp, Homo sapien
catggtgttgtgtttattttgggtt

SEQ ID NO: 2497717 - DNA, 25 bp, Homo sapien
tgtgtttattttgggtttgatgaac

SEQ ID NO: 2497718 - DNA, 25 bp, Homo sapien
tgttgtgtttattttgggtttgatg

SEQ ID NO: 2497719 - DNA, 25 bp, Homo sapien
tcatggtgttgtgtttattttgggt

SEQ ID NO: 2497720 - DNA, 25 bp, Homo sapien
gaggatctgcaatgttctacttggg

SEQ ID NO: 2497721 - DNA, 25 bp, Homo sapien
gagttacttgacccgataccgttca

SEQ ID NO: 2497722 - DNA, 25 bp, Homo sapien
tcagagaggatctgcaatgttctac

SEQ ID NO: 2497723 - DNA, 25 bp, Homo sapien
gcaatgttctacttgggatccaggg

SEQ ID NO: 2497724 - DNA, 25 bp, Homo sapien
cacatctttctggtgcctaacccta

SEQ ID NO: 2497725 - DNA, 25 bp, Homo sapien
tgtagacttcaaagcaccaatcagc

SEQ ID NO: 2497726 - DNA, 25 bp, Homo sapien
cagttcctgctgttaccaagtgtga

SEQ ID NO: 2497727 - DNA, 25 bp, Homo sapien
ggtaagctatatgtaagtcccacac

SEQ ID NO: 2497728 - DNA, 25 bp, Homo sapien
cagagatccttcctcagttatctca

SEQ ID NO: 2497729 - DNA, 25 bp, Homo sapien
ttgcagggccttgatatggttggtc

SEQ ID NO: 2497730 - DNA, 25 bp, Homo sapien
cccagttatttgcagggccttgata

SEQ ID NO: 2497731 - DNA, 25 bp, Homo sapien
ctatacccagttatttgcagggcct

SEQ ID NO: 2497732 - DNA, 25 bp, Homo sapien
cttttagggatatagcagaggacac

SEQ ID NO: 2497733 - DNA, 25 bp, Homo sapien
ccttcctcatattctcttggctcac

SEQ ID NO: 2497734 - DNA, 25 bp, Homo sapien
tccttcctcatattctcttggctca

SEQ ID NO: 2497735 - DNA, 25 bp, Homo sapien
tctgacatcgccttgcctcaagtgc

SEQ ID NO: 2497736 - DNA, 25 bp, Homo sapien
gccttgcctcaagtgcacggagcat

SEQ ID NO: 2497737 - DNA, 25 bp, Homo sapien
caactatgctctgacatcgccttgc

SEQ ID NO: 2497738 - DNA, 25 bp, Homo sapien
tgctgctgccaactatgctctgaca

SEQ ID NO: 2497739 - DNA, 25 bp, Homo sapien
aggtctcgactcaagcctgacgggc

SEQ ID NO: 2497740 - DNA, 25 bp, Homo sapien
taggtttcccaagcgactgtctcaa

SEQ ID NO: 2497741 - DNA, 25 bp, Homo sapien
gactctgcccgagttcctgaagagg

SEQ ID NO: 2497742 - DNA, 25 bp, Homo sapien
cttcaggaatgatgcaggtctcgac

SEQ ID NO: 2497743 - DNA, 25 bp, Homo sapien
gatgagtacgataccgaagcgggct

SEQ ID NO: 2497744 - DNA, 25 bp, Homo sapien
ttttgaaccgcagcttagaccctag

SEQ ID NO: 2497745 - DNA, 25 bp, Homo sapien
tttaacaccaagatggcggacggcc

SEQ ID NO: 2497746 - DNA, 25 bp, Homo sapien
ccttcgccagggtgaatgacggtat

SEQ ID NO: 2497747 - DNA, 25 bp, Homo sapien
tctgttcctgtgaaagtattcgtga

SEQ ID NO: 2497748 - DNA, 25 bp, Homo sapien
tcagaactggcattgtagacatctc

SEQ ID NO: 2497749 - DNA, 25 bp, Homo sapien
cacttgtctgaccaaagtggtaaca

SEQ ID NO: 2497750 - DNA, 25 bp, Homo sapien
acttaggccctaacatacgtcagga

SEQ ID NO: 2497751 - DNA, 25 bp, Homo sapien
aatgcatagtgcattgccccttggg

SEQ ID NO: 2497752 - DNA, 25 bp, Homo sapien
gatgtatgtgacgtggttcttctgg

SEQ ID NO: 2497753 - DNA, 25 bp, Homo sapien
tcattcaatgcatagtgcattgccc

SEQ ID NO: 2497754 - DNA, 25 bp, Homo sapien
tatttggcaaccaaattctggatgt

SEQ ID NO: 2497755 - DNA, 25 bp, Homo sapien
cacaaagtatgcagtgctgatgtac

SEQ ID NO: 2497756 - DNA, 25 bp, Homo sapien
tggtaagtagacaagtccctaaggc

SEQ ID NO: 2497757 - DNA, 25 bp, Homo sapien
tccctaaggcttgtagatcagagct

SEQ ID NO: 2497758 - DNA, 25 bp, Homo sapien
tagtcattcaatacagatagcagtt

SEQ ID NO: 2497759 - DNA, 25 bp, Homo sapien
ggtgcctgaaaattgtgtctgtccg

SEQ ID NO: 2497760 - DNA, 25 bp, Homo sapien
ggtaccagctggtgtagcgacatct

SEQ ID NO: 2497761 - DNA, 25 bp, Homo sapien
ccaaatatcaggatctgggtaccag

SEQ ID NO: 2497762 - DNA, 25 bp, Homo sapien
tctttgaatttcgatgctgtggcct

SEQ ID NO: 2497763 - DNA, 25 bp, Homo sapien
gctaatggtgaattttacagtcttt

SEQ ID NO: 2497764 - DNA, 25 bp, Homo sapien
gtgtagggctaatggtgaattttac

SEQ ID NO: 2497765 - DNA, 25 bp, Homo sapien
gggctaatggtgaattttacagtct

SEQ ID NO: 2497766 - DNA, 25 bp, Homo sapien
ctatgtgtagggctaatggtgaatt

SEQ ID NO: 2497767 - DNA, 25 bp, Homo sapien
tacggtctgataatgaagcacttgc

SEQ ID NO: 2497768 - DNA, 25 bp, Homo sapien
cttactctgaggttttacggtctga

SEQ ID NO: 2497769 - DNA, 25 bp, Homo sapien
taaaagccctgctaattgcatgaca

SEQ ID NO: 2497770 - DNA, 25 bp, Homo sapien
tgcatgacacaccacatagaatgta

SEQ ID NO: 2497771 - DNA, 25 bp, Homo sapien
tactagtcactgcttccataaatat

SEQ ID NO: 2497772 - DNA, 25 bp, Homo sapien
ccataaatattgtttacagggtgag

SEQ ID NO: 2497773 - DNA, 25 bp, Homo sapien
attgtttacagggtgagatttggtt

SEQ ID NO: 2497774 - DNA, 25 bp, Homo sapien
ggtggactactagtcactgcttcca

SEQ ID NO: 2497775 - DNA, 25 bp, Homo sapien
tgcaagttcactgcatgtctgatgc

SEQ ID NO: 2497776 - DNA, 25 bp, Homo sapien
tgtctgatgcttggtaaaactagtc

SEQ ID NO: 2497777 - DNA, 25 bp, Homo sapien
actaatgagcttctagtgatgttca

SEQ ID NO: 2497778 - DNA, 25 bp, Homo sapien
taataggcattataccctgcaagtt

SEQ ID NO: 2497779 - DNA, 25 bp, Homo sapien
gcatctcctccaaaagattaattaa

SEQ ID NO: 2497780 - DNA, 25 bp, Homo sapien
cactaactgaaatcagagcatctcc

SEQ ID NO: 2497781 - DNA, 25 bp, Homo sapien
ttaattaaaagacaatgaacaccca

SEQ ID NO: 2497782 - DNA, 25 bp, Homo sapien
gactttccactaactgaaatcagag

SEQ ID NO: 2497783 - DNA, 25 bp, Homo sapien
tcagtgtgtgatgtttagttcaggg

SEQ ID NO: 2497784 - DNA, 25 bp, Homo sapien
cagtgtgtgatgtttagttcagggt

SEQ ID NO: 2497785 - DNA, 25 bp, Homo sapien
gtgtgtgatgtttagttcagggttt

SEQ ID NO: 2497786 - DNA, 25 bp, Homo sapien
aggataccatacagtgctctcttcc

SEQ ID NO: 2497787 - DNA, 25 bp, Homo sapien
tggccatagccaaatcccttgggcc

SEQ ID NO: 2497788 - DNA, 25 bp, Homo sapien
cttggccatagccaaatcccttggg

SEQ ID NO: 2497789 - DNA, 25 bp, Homo sapien
ctccttggccatagccaaatccctt

SEQ ID NO: 2497790 - DNA, 25 bp, Homo sapien
catagccaaatcccttgggcccaaa

SEQ ID NO: 2497791 - DNA, 25 bp, Homo sapien
agtccattaagctttgctagcactg

SEQ ID NO: 2497792 - DNA, 25 bp, Homo sapien
gacaagtccacacattctggcccta

SEQ ID NO: 2497793 - DNA, 25 bp, Homo sapien
gaggaaggatagttagtgcaagtcc

SEQ ID NO: 2497794 - DNA, 25 bp, Homo sapien
catgtactaaatatcttaaagctgc

SEQ ID NO: 2497795 - DNA, 25 bp, Homo sapien
catatggacagcagtaactgaaatg

SEQ ID NO: 2497796 - DNA, 25 bp, Homo sapien
taaacaagaaccagtgtggaatatt

SEQ ID NO: 2497797 - DNA, 25 bp, Homo sapien
ccagtgtggaatattcatatggaca

SEQ ID NO: 2497798 - DNA, 25 bp, Homo sapien
gaatattcatatggacagcagtaac

SEQ ID NO: 2497799 - DNA, 25 bp, Homo sapien
gagttgttgattcaagactcttccc

SEQ ID NO: 2497800 - DNA, 25 bp, Homo sapien
agttgttgattcaagactcttccca

SEQ ID NO: 2497801 - DNA, 25 bp, Homo sapien
caattatcttctcggcagcatatac

SEQ ID NO: 2497802 - DNA, 25 bp, Homo sapien
ttatcttctcggcagcatatacaga

SEQ ID NO: 2497803 - DNA, 25 bp, Homo sapien
tcttctcggcagcatatacagaatc

SEQ ID NO: 2497804 - DNA, 25 bp, Homo sapien
tccaattatcttctcggcagcatat

SEQ ID NO: 2497805 - DNA, 25 bp, Homo sapien
gtcactatttacagatcactgagta

SEQ ID NO: 2497806 - DNA, 25 bp, Homo sapien
tgctatcagtaggaactgtttccat

SEQ ID NO: 2497807 - DNA, 25 bp, Homo sapien
cactgagtaaaccatatttcttgct

SEQ ID NO: 2497808 - DNA, 25 bp, Homo sapien
ttccattcagtaaggtgtacctagt

SEQ ID NO: 2497809 - DNA, 25 bp, Homo sapien
taggaggaaattccaggttgggcac

SEQ ID NO: 2497810 - DNA, 25 bp, Homo sapien
gaaatactaagtgaactttcacaaa

SEQ ID NO: 2497811 - DNA, 25 bp, Homo sapien
aaatttagcaccttgatacgttggc

SEQ ID NO: 2497812 - DNA, 25 bp, Homo sapien
tgtttacatagaaggagtgacttag

SEQ ID NO: 2497813 - DNA, 25 bp, Homo sapien
cacgactccttgatacagcttggaa

SEQ ID NO: 2497814 - DNA, 25 bp, Homo sapien
tcatgattcacacagcacatttctc

SEQ ID NO: 2497815 - DNA, 25 bp, Homo sapien
atttcatgacatccggtctccaagg

SEQ ID NO: 2497816 - DNA, 25 bp, Homo sapien
atacaaatcacttgcttttgagaac

SEQ ID NO: 2497817 - DNA, 25 bp, Homo sapien
taactgtcgcaactcatttctgaag

SEQ ID NO: 2497818 - DNA, 25 bp, Homo sapien
tgccaggttcctgttcagcaagcgg

SEQ ID NO: 2497819 - DNA, 25 bp, Homo sapien
tctgaaggtaaccaacggtctccca

SEQ ID NO: 2497820 - DNA, 25 bp, Homo sapien
caatattttgaactagttgacatta

SEQ ID NO: 2497821 - DNA, 25 bp, Homo sapien
gccactgttgtgctatctaaatttt

SEQ ID NO: 2497822 - DNA, 25 bp, Homo sapien
tgccactgttgtgctatctaaattt

SEQ ID NO: 2497823 - DNA, 25 bp, Homo sapien
ccactgttgtgctatctaaattttt

SEQ ID NO: 2497824 - DNA, 25 bp, Homo sapien
cactgttgtgctatctaaatttttc

SEQ ID NO: 2497825 - DNA, 25 bp, Homo sapien
actagtctagactgggaagtatcac

SEQ ID NO: 2497826 - DNA, 25 bp, Homo sapien
tctgtcccaaaggagaatgcattct

SEQ ID NO: 2497827 - DNA, 25 bp, Homo sapien
ttgatggatctcttgccacaggaca

SEQ ID NO: 2497828 - DNA, 25 bp, Homo sapien
gagtctgcctgaaaatcgtcaagtg

SEQ ID NO: 2497829 - DNA, 25 bp, Homo sapien
taacctaacaccatgcactgctgaa

SEQ ID NO: 2497830 - DNA, 25 bp, Homo sapien
tactctggaatctaactgttgaggc

SEQ ID NO: 2497831 - DNA, 25 bp, Homo sapien
gaggctcaagtgctgaaatacatgt

SEQ ID NO: 2497832 - DNA, 25 bp, Homo sapien
gaagcaggactagctggctggttta

SEQ ID NO: 2497833 - DNA, 25 bp, Homo sapien
cctcttctgcgtggtacacggtcct

SEQ ID NO: 2497834 - DNA, 25 bp, Homo sapien
ttctgcgtggtacacggtcctccca

SEQ ID NO: 2497835 - DNA, 25 bp, Homo sapien
gcgtggtacacggtcctcccacagg

SEQ ID NO: 2497836 - DNA, 25 bp, Homo sapien
acctcttctgcgtggtacacggtcc

SEQ ID NO: 2497837 - DNA, 25 bp, Homo sapien
tggtggtaccttccctagactgtct

SEQ ID NO: 2497838 - DNA, 25 bp, Homo sapien
tgaacacaaagatgaggcctctcca

SEQ ID NO: 2497839 - DNA, 25 bp, Homo sapien
gcttgcctctctaggaaataggtgg

SEQ ID NO: 2497840 - DNA, 25 bp, Homo sapien
tggatgggccactattcttgttacc

SEQ ID NO: 2497841 - DNA, 25 bp, Homo sapien
gcaataagtttctggtcccttgatg

SEQ ID NO: 2497842 - DNA, 25 bp, Homo sapien
aataagtttctggtcccttgatggt

SEQ ID NO: 2497843 - DNA, 25 bp, Homo sapien
gtgcaataagtttctggtcccttga

SEQ ID NO: 2497844 - DNA, 25 bp, Homo sapien
tgtgcaataagtttctggtcccttg

SEQ ID NO: 2497845 - DNA, 25 bp, Homo sapien
tagggagacgctatattacctatat

SEQ ID NO: 2497846 - DNA, 25 bp, Homo sapien
tggaatttggaatttagggagacgc

SEQ ID NO: 2497847 - DNA, 25 bp, Homo sapien
cttgtgctgggaatgtcaaggctac

SEQ ID NO: 2497848 - DNA, 25 bp, Homo sapien
attgcttgtgctgggaatgtcaagg

SEQ ID NO: 2497849 - DNA, 25 bp, Homo sapien
tgtattctgctaccactcgtgtctt

SEQ ID NO: 2497850 - DNA, 25 bp, Homo sapien
tctgtattctgctaccactcgtgtc

SEQ ID NO: 2497851 - DNA, 25 bp, Homo sapien
tactacttctgtattctgctaccac

SEQ ID NO: 2497852 - DNA, 25 bp, Homo sapien
attctgctaccactcgtgtcttcaa

SEQ ID NO: 2497853 - DNA, 25 bp, Homo sapien
tcttaagctgagtagttcctgcact

SEQ ID NO: 2497854 - DNA, 25 bp, Homo sapien
cactgccgtgtgctggatgaggatt

SEQ ID NO: 2497855 - DNA, 25 bp, Homo sapien
tagtaccgacctccatggctatggc

SEQ ID NO: 2497856 - DNA, 25 bp, Homo sapien
taaacccctggtagcaatacagatg

SEQ ID NO: 2497857 - DNA, 25 bp, Homo sapien
ggtgccttgaggaaacctgtgaaca

SEQ ID NO: 2497858 - DNA, 25 bp, Homo sapien
tgctggcagtcagggtaaggtgcct

SEQ ID NO: 2497859 - DNA, 25 bp, Homo sapien
cccaacagaacccaagggatggcat

SEQ ID NO: 2497860 - DNA, 25 bp, Homo sapien
gaacccaagggatggcatgctggca

SEQ ID NO: 2497861 - DNA, 25 bp, Homo sapien
cccagaatgtgattcgcaggacctg

SEQ ID NO: 2497862 - DNA, 25 bp, Homo sapien
aatttcacaaccaagcattcttgca

SEQ ID NO: 2497863 - DNA, 25 bp, Homo sapien
caggacctgtcgcataatttcacaa

SEQ ID NO: 2497864 - DNA, 25 bp, Homo sapien
tcctgaatctggctctggagaaccc

SEQ ID NO: 2497865 - DNA, 25 bp, Homo sapien
tgttccttcaacatagaggggttcg

SEQ ID NO: 2497866 - DNA, 25 bp, Homo sapien
gagtaagtgattgacattccctgct

SEQ ID NO: 2497867 - DNA, 25 bp, Homo sapien
tctggaaaaagctaggagtaagtga

SEQ ID NO: 2497868 - DNA, 25 bp, Homo sapien
ggtacggcggcaggagcagtaccct

SEQ ID NO: 2497869 - DNA, 25 bp, Homo sapien
gccgctggacgaggggaccgacggc

SEQ ID NO: 2497870 - DNA, 25 bp, Homo sapien
cagagagagcctgccgctggacgag

SEQ ID NO: 2497871 - DNA, 25 bp, Homo sapien
ggtcgccctcggtgctcaccacact

SEQ ID NO: 2497872 - DNA, 25 bp, Homo sapien
gacagaacccagtaaggtcgccctc

SEQ ID NO: 2497873 - DNA, 25 bp, Homo sapien
tagcagaaacgcgaaactcacaacc

SEQ ID NO: 2497874 - DNA, 25 bp, Homo sapien
ctaagaggcggattagcagaaacgc

SEQ ID NO: 2497875 - DNA, 25 bp, Homo sapien
gattagcagaaacgcgaaactcaca

SEQ ID NO: 2497876 - DNA, 25 bp, Homo sapien
ggcggattagcagaaacgcgaaact

SEQ ID NO: 2497877 - DNA, 25 bp, Homo sapien
atgtcggaggagaccggggcgcgcc

SEQ ID NO: 2497878 - DNA, 25 bp, Homo sapien
ggatgtcggaggagaccggggcgcg

SEQ ID NO: 2497879 - DNA, 25 bp, Homo sapien
gagagaaaatctggggcgcagggat

SEQ ID NO: 2497880 - DNA, 25 bp, Homo sapien
ggcatggcctggacggcctcgggga

SEQ ID NO: 2497881 - DNA, 25 bp, Homo sapien
ttgagtcggaggcgggagcacgtac

SEQ ID NO: 2497882 - DNA, 25 bp, Homo sapien
caggcggagctagcgaggctgggct

SEQ ID NO: 2497883 - DNA, 25 bp, Homo sapien
gagggtccagggagtccgagatccc

SEQ ID NO: 2497884 - DNA, 25 bp, Homo sapien
cgcaggcggagctagcgaggctggg

SEQ ID NO: 2497885 - DNA, 25 bp, Homo sapien
gggagggtccagggagtccgagatc

SEQ ID NO: 2497886 - DNA, 25 bp, Homo sapien
ctcaatgcctctttgtggaaggggc

SEQ ID NO: 2497887 - DNA, 25 bp, Homo sapien
tctcaatgcctctttgtggaagggg

SEQ ID NO: 2497888 - DNA, 25 bp, Homo sapien
gttcttctcaatgcctctttgtgga

SEQ ID NO: 2497889 - DNA, 25 bp, Homo sapien
cctgagttcttctcaatgcctcttt

SEQ ID NO: 2497890 - DNA, 25 bp, Homo sapien
tgagctgtttgctttccgtcaagct

SEQ ID NO: 2497891 - DNA, 25 bp, Homo sapien
ctgagctgtttgctttccgtcaagc

SEQ ID NO: 2497892 - DNA, 25 bp, Homo sapien
agctgtttgctttccgtcaagctca

SEQ ID NO: 2497893 - DNA, 25 bp, Homo sapien
gctgtttgctttccgtcaagctcat

SEQ ID NO: 2497894 - DNA, 25 bp, Homo sapien
catatgctacagaaagaggttgatt

SEQ ID NO: 2497895 - DNA, 25 bp, Homo sapien
aattttctgttcttttgcattccct

SEQ ID NO: 2497896 - DNA, 25 bp, Homo sapien
caaaaattttctgttcttttgcatt

SEQ ID NO: 2497897 - DNA, 25 bp, Homo sapien
ttcaaaaattttctgttcttttgca

SEQ ID NO: 2497898 - DNA, 25 bp, Homo sapien
ttttctgttcttttgcattccctac

SEQ ID NO: 2497899 - DNA, 25 bp, Homo sapien
cagcagctccttttcaaggtggtgc

SEQ ID NO: 2497900 - DNA, 25 bp, Homo sapien
tggtgctgcagacttctggagggct

SEQ ID NO: 2497901 - DNA, 25 bp, Homo sapien
agctccttttcaaggtggtgctgca

SEQ ID NO: 2497902 - DNA, 25 bp, Homo sapien
tgctgcagacttctggagggctgag

SEQ ID NO: 2497903 - DNA, 25 bp, Homo sapien
ttttattaacagtgaatgcattttc

SEQ ID NO: 2497904 - DNA, 25 bp, Homo sapien
ggcatgtactgaagagaattctatt

SEQ ID NO: 2497905 - DNA, 25 bp, Homo sapien
cagaacgactctgatgtgctgaaca

SEQ ID NO: 2497906 - DNA, 25 bp, Homo sapien
tgctgacagtcgataggcatgtact

SEQ ID NO: 2497907 - DNA, 25 bp, Homo sapien
tctcgagtgagtgttgcttggcatc

SEQ ID NO: 2497908 - DNA, 25 bp, Homo sapien
ctgcccatcctctcgagtgagtgtt

SEQ ID NO: 2497909 - DNA, 25 bp, Homo sapien
catcctctcgagtgagtgttgcttg

SEQ ID NO: 2497910 - DNA, 25 bp, Homo sapien
cctctcgagtgagtgttgcttggca

SEQ ID NO: 2497911 - DNA, 25 bp, Homo sapien
ccccagatgggagggccagatgcac

SEQ ID NO: 2497912 - DNA, 25 bp, Homo sapien
agaaccccagatgggagggccagat

SEQ ID NO: 2497913 - DNA, 25 bp, Homo sapien
aaccccagatgggagggccagatgc

SEQ ID NO: 2497914 - DNA, 25 bp, Homo sapien
ttacagaaccccagatgggagggcc

SEQ ID NO: 2497915 - DNA, 25 bp, Homo sapien
tacactggtagtgcttttctcaaca

SEQ ID NO: 2497916 - DNA, 25 bp, Homo sapien
caatcaggtttgctaccaagaggaa

SEQ ID NO: 2497917 - DNA, 25 bp, Homo sapien
tggagagccagcagtattacactgg

SEQ ID NO: 2497918 - DNA, 25 bp, Homo sapien
gaaagacactctcccctctaacagt

SEQ ID NO: 2497919 - DNA, 25 bp, Homo sapien
gctcatctggtagaatgatacccac

SEQ ID NO: 2497920 - DNA, 25 bp, Homo sapien
ctgcttgaataaagagccctccagc

SEQ ID NO: 2497921 - DNA, 25 bp, Homo sapien
tccagcaccctcagaaccaggtgaa

SEQ ID NO: 2497922 - DNA, 25 bp, Homo sapien
ccaggtgaaggagctcttcactgcc

SEQ ID NO: 2497923 - DNA, 25 bp, Homo sapien
cttcactgccactggaggccaccat

SEQ ID NO: 2497924 - DNA, 25 bp, Homo sapien
ttgatgactataaataagtgtttcc

SEQ ID NO: 2497925 - DNA, 25 bp, Homo sapien
tgatgactataaataagtgtttcca

SEQ ID NO: 2497926 - DNA, 25 bp, Homo sapien
ccttcaccgagagagcttctagctt

SEQ ID NO: 2497927 - DNA, 25 bp, Homo sapien
tccttcaccgagagagcttctagct

SEQ ID NO: 2497928 - DNA, 25 bp, Homo sapien
cttcaccgagagagcttctagcttt

SEQ ID NO: 2497929 - DNA, 25 bp, Homo sapien
tgaatttctgtgcattctcagcatt

SEQ ID NO: 2497930 - DNA, 25 bp, Homo sapien
agcattcaggaagcagatggccagc

SEQ ID NO: 2497931 - DNA, 25 bp, Homo sapien
cattctcagcattcaggaagcagat

SEQ ID NO: 2497932 - DNA, 25 bp, Homo sapien
atggccagcagctccggcttgggta

SEQ ID NO: 2497933 - DNA, 25 bp, Homo sapien
caggcacggtcactacctgcttggg

SEQ ID NO: 2497934 - DNA, 25 bp, Homo sapien
cacggtcactacctgcttgggcttc

SEQ ID NO: 2497935 - DNA, 25 bp, Homo sapien
ttcagctccatcatccgcatgatgt

SEQ ID NO: 2497936 - DNA, 25 bp, Homo sapien
ctccatcatccgcatgatgtagtgg

SEQ ID NO: 2497937 - DNA, 25 bp, Homo sapien
aacagggacacttgaagcacatctt

SEQ ID NO: 2497938 - DNA, 25 bp, Homo sapien
gcaacagggacacttgaagcacatc

SEQ ID NO: 2497939 - DNA, 25 bp, Homo sapien
caacagggacacttgaagcacatct

SEQ ID NO: 2497940 - DNA, 25 bp, Homo sapien
tgcaacagggacacttgaagcacat

SEQ ID NO: 2497941 - DNA, 25 bp, Homo sapien
ggtagattcccggtgcattgtatca

SEQ ID NO: 2497942 - DNA, 25 bp, Homo sapien
gcagggtagattcccggtgcattgt

SEQ ID NO: 2497943 - DNA, 25 bp, Homo sapien
gattcccggtgcattgtatcagtgc

SEQ ID NO: 2497944 - DNA, 25 bp, Homo sapien
ggtgcattgtatcagtgccttggct

SEQ ID NO: 2497945 - DNA, 25 bp, Homo sapien
tgggcactcgggcaggttatatctc

SEQ ID NO: 2497946 - DNA, 25 bp, Homo sapien
ttagcaagtcaagtattctgtagcc

SEQ ID NO: 2497947 - DNA, 25 bp, Homo sapien
gaagggaagaagctaacactaactc

SEQ ID NO: 2497948 - DNA, 25 bp, Homo sapien
cagagattgctaggtattctccaaa

SEQ ID NO: 2497949 - DNA, 25 bp, Homo sapien
catccgggactctcagggcgtttga

SEQ ID NO: 2497950 - DNA, 25 bp, Homo sapien
aaaatatccaagtctagcgcagcag

SEQ ID NO: 2497951 - DNA, 25 bp, Homo sapien
taatgcacccctaaagtaatgtggg

SEQ ID NO: 2497952 - DNA, 25 bp, Homo sapien
tgtgacaccatgcagagtcggaact

SEQ ID NO: 2497953 - DNA, 25 bp, Homo sapien
tcctctgggccgagctggtgtttcg

SEQ ID NO: 2497954 - DNA, 25 bp, Homo sapien
gccgggtgtcttgaaaaacgtctca

SEQ ID NO: 2497955 - DNA, 25 bp, Homo sapien
ctcacgatgtgtgcgttggatgctc

SEQ ID NO: 2497956 - DNA, 25 bp, Homo sapien
ggtctccaaggctgccgggtgtctt

SEQ ID NO: 2497957 - DNA, 25 bp, Homo sapien
gataactctaggtctacaacggaag

SEQ ID NO: 2497958 - DNA, 25 bp, Homo sapien
aggtctacaacggaagccaggtgga

SEQ ID NO: 2497959 - DNA, 25 bp, Homo sapien
tagtgcctctgtccggcagtcatgt

SEQ ID NO: 2497960 - DNA, 25 bp, Homo sapien
ggtggagcctgacctagtgcctctg

SEQ ID NO: 2497961 - DNA, 25 bp, Homo sapien
ttgacatcactggacttaggtttag

SEQ ID NO: 2497962 - DNA, 25 bp, Homo sapien
tgagactggatgtcccacgtaaacg

SEQ ID NO: 2497963 - DNA, 25 bp, Homo sapien
gagtgtggacgactttggattaacc

SEQ ID NO: 2497964 - DNA, 25 bp, Homo sapien
gggactcaggttgttggacgacact

SEQ ID NO: 2497965 - DNA, 25 bp, Homo sapien
ctgtggggccgacgagaagctgggc

SEQ ID NO: 2497966 - DNA, 25 bp, Homo sapien
ccgacgagaagctgggctattgatc

SEQ ID NO: 2497967 - DNA, 25 bp, Homo sapien
ggccgacgagaagctgggctattga

SEQ ID NO: 2497968 - DNA, 25 bp, Homo sapien
ggggccgacgagaagctgggctatt

SEQ ID NO: 2497969 - DNA, 25 bp, Homo sapien
aattcacaggtcctgtgtttgggag

SEQ ID NO: 2497970 - DNA, 25 bp, Homo sapien
agctgaaattcacaggtcctgtgtt

SEQ ID NO: 2497971 - DNA, 25 bp, Homo sapien
caaggccaggcaagctgaaattcac

SEQ ID NO: 2497972 - DNA, 25 bp, Homo sapien
acaggtcctgtgtttgggagagcac

SEQ ID NO: 2497973 - DNA, 25 bp, Homo sapien
tagaagaaaccgggcccggcattgc

SEQ ID NO: 2497974 - DNA, 25 bp, Homo sapien
cccggcattgcaggagaatagagaa

SEQ ID NO: 2497975 - DNA, 25 bp, Homo sapien
aaccgggcccggcattgcaggagaa

SEQ ID NO: 2497976 - DNA, 25 bp, Homo sapien
ccgggcccggcattgcaggagaata

SEQ ID NO: 2497977 - DNA, 25 bp, Homo sapien
aggtggagatggtaagaccatgcaa

SEQ ID NO: 2497978 - DNA, 25 bp, Homo sapien
catgcaagggacactgaaagacggc

SEQ ID NO: 2497979 - DNA, 25 bp, Homo sapien
ctgaaagacggcagctgacctgagg

SEQ ID NO: 2497980 - DNA, 25 bp, Homo sapien
gactgccagataaaagtacattgaa

SEQ ID NO: 2497981 - DNA, 25 bp, Homo sapien
tgcacacaaagatattgtagcaaag

SEQ ID NO: 2497982 - DNA, 25 bp, Homo sapien
gaaggctctttggtgctttcatttt

SEQ ID NO: 2497983 - DNA, 25 bp, Homo sapien
caaagatattgtagcaaagaaggct

SEQ ID NO: 2497984 - DNA, 25 bp, Homo sapien
tattgtagcaaagaaggctctttgg

SEQ ID NO: 2497985 - DNA, 25 bp, Homo sapien
tgtctttgaggggtatagatgccct

SEQ ID NO: 2497986 - DNA, 25 bp, Homo sapien
agatgccctgttacccatagtcttg

SEQ ID NO: 2497987 - DNA, 25 bp, Homo sapien
gaaacaagagagtttgctgttgcct

SEQ ID NO: 2497988 - DNA, 25 bp, Homo sapien
agcagggagttggccattcacatga

SEQ ID NO: 2497989 - DNA, 25 bp, Homo sapien
tcacagaggcgcttctgagctgagg

SEQ ID NO: 2497990 - DNA, 25 bp, Homo sapien
cctgcaggtccgtctgagcaacaga

SEQ ID NO: 2497991 - DNA, 25 bp, Homo sapien
gacagcgggccgtcttcatattccc

SEQ ID NO: 2497992 - DNA, 25 bp, Homo sapien
ccgttctgcatggagaatgcctgca

SEQ ID NO: 2497993 - DNA, 25 bp, Homo sapien
gcttgatggaggcaccactctctta

SEQ ID NO: 2497994 - DNA, 25 bp, Homo sapien
ggcaccactctcttactggcaaagg

SEQ ID NO: 2497995 - DNA, 25 bp, Homo sapien
acagggtccaagctgcttgatggag

SEQ ID NO: 2497996 - DNA, 25 bp, Homo sapien
caacagggtccaagctgcttgatgg

SEQ ID NO: 2497997 - DNA, 25 bp, Homo sapien
caacacctaacctcttttgctgaat

SEQ ID NO: 2497998 - DNA, 25 bp, Homo sapien
tccaacacctaacctcttttgctga

SEQ ID NO: 2497999 - DNA, 25 bp, Homo sapien
acacctaacctcttttgctgaatga

SEQ ID NO: 2498000 - DNA, 25 bp, Homo sapien
tgcctccaacacctaacctcttttg

SEQ ID NO: 2498001 - DNA, 25 bp, Homo sapien
tattttctgtctatagacagctgcc

SEQ ID NO: 2498002 - DNA, 25 bp, Homo sapien
ccaatttctaaagagtagccacctg

SEQ ID NO: 2498003 - DNA, 25 bp, Homo sapien
tttctgtctatagacagctgccagg

SEQ ID NO: 2498004 - DNA, 25 bp, Homo sapien
cttccaatttctaaagagtagccac

SEQ ID NO: 2498005 - DNA, 25 bp, Homo sapien
tcagaagcctgaactgtgttaaaag

SEQ ID NO: 2498006 - DNA, 25 bp, Homo sapien
tgttaaaagaaccatggcgagccag

SEQ ID NO: 2498007 - DNA, 25 bp, Homo sapien
tgttcttctctgtacgggctgctcg

SEQ ID NO: 2498008 - DNA, 25 bp, Homo sapien
tcaattctggtaagacagatgcaga

SEQ ID NO: 2498009 - DNA, 25 bp, Homo sapien
atacagctgtaattcaggataattt

SEQ ID NO: 2498010 - DNA, 25 bp, Homo sapien
ctacataaacgagagaattggtagt

SEQ ID NO: 2498011 - DNA, 25 bp, Homo sapien
acgagagaattggtagtgttgttat

SEQ ID NO: 2498012 - DNA, 25 bp, Homo sapien
cataaacgagagaattggtagtgtt

SEQ ID NO: 2498013 - DNA, 25 bp, Homo sapien
taatgtgctacaagtgaggtggaga

SEQ ID NO: 2498014 - DNA, 25 bp, Homo sapien
ggctttttcccaggcagtacagcta

SEQ ID NO: 2498015 - DNA, 25 bp, Homo sapien
tatacgcctgggttaagtggctcac

SEQ ID NO: 2498016 - DNA, 25 bp, Homo sapien
aaaacagcctgctagcaaaaccacg

SEQ ID NO: 2498017 - DNA, 25 bp, Homo sapien
gctatgtcatagaggcgtcgtacct

SEQ ID NO: 2498018 - DNA, 25 bp, Homo sapien
ttgaaggctggtttacgacctcgct

SEQ ID NO: 2498019 - DNA, 25 bp, Homo sapien
cacaggcccgatccacttgaaggct

SEQ ID NO: 2498020 - DNA, 25 bp, Homo sapien
acttgagctgaagtccacaggcccg

SEQ ID NO: 2498021 - DNA, 25 bp, Homo sapien
taaaacacgattacggtcatgctgc

SEQ ID NO: 2498022 - DNA, 25 bp, Homo sapien
gaagatataaaacacgattacggtc

SEQ ID NO: 2498023 - DNA, 25 bp, Homo sapien
cttgaagatataaaacacgattacg

SEQ ID NO: 2498024 - DNA, 25 bp, Homo sapien
gatataaaacacgattacggtcatg

SEQ ID NO: 2498025 - DNA, 25 bp, Homo sapien
ctgcagtatctgaaggctaagggaa

SEQ ID NO: 2498026 - DNA, 25 bp, Homo sapien
cacaacttcacacctcttacaagag

SEQ ID NO: 2498027 - DNA, 25 bp, Homo sapien
gctaagggaaggtcagtgtgtcctt

SEQ ID NO: 2498028 - DNA, 25 bp, Homo sapien
acttcacacctcttacaagaggcac

SEQ ID NO: 2498029 - DNA, 25 bp, Homo sapien
tttatgtgctagtaagttgatggag

SEQ ID NO: 2498030 - DNA, 25 bp, Homo sapien
aaatatcaacacatgaaatcccacc

SEQ ID NO: 2498031 - DNA, 25 bp, Homo sapien
aaatcccaccctttatgtgctagta

SEQ ID NO: 2498032 - DNA, 25 bp, Homo sapien
tgaaatcccaccctttatgtgctag

SEQ ID NO: 2498033 - DNA, 25 bp, Homo sapien
gacaaacttctggctcataattctc

SEQ ID NO: 2498034 - DNA, 25 bp, Homo sapien
caatcttggttttggagacgaggaa

SEQ ID NO: 2498035 - DNA, 25 bp, Homo sapien
gacaatcttggttttggagacgagg

SEQ ID NO: 2498036 - DNA, 25 bp, Homo sapien
gcatgacaaacttctggctcataat

SEQ ID NO: 2498037 - DNA, 25 bp, Homo sapien
tatcagcagatggaaagatcaccct

SEQ ID NO: 2498038 - DNA, 25 bp, Homo sapien
tactctacagtaggcataaactctg

SEQ ID NO: 2498039 - DNA, 25 bp, Homo sapien
tatacttgcagcttgccaaaatgat

SEQ ID NO: 2498040 - DNA, 25 bp, Homo sapien
caaaatgatctagccctatcagcag

SEQ ID NO: 2498041 - DNA, 25 bp, Homo sapien
tcccaacaggccaaactcgagtgaa

SEQ ID NO: 2498042 - DNA, 25 bp, Homo sapien
gggctgccaatctaaaaatgggagt

SEQ ID NO: 2498043 - DNA, 25 bp, Homo sapien
cagttgcacaaaaagaaccagcatg

SEQ ID NO: 2498044 - DNA, 25 bp, Homo sapien
aaatgggagtaatgctagtgatcta

SEQ ID NO: 2498045 - DNA, 25 bp, Homo sapien
cagggttgtcaacctggcacttccc

SEQ ID NO: 2498046 - DNA, 25 bp, Homo sapien
ttatttcaatgaggtcaagtgggca

SEQ ID NO: 2498047 - DNA, 25 bp, Homo sapien
tctgcagaagagaccatcacttgct

SEQ ID NO: 2498048 - DNA, 25 bp, Homo sapien
aggagaataagagaacatctccctc

SEQ ID NO: 2498049 - DNA, 25 bp, Homo sapien
gcagcgactccagcacatttacaat

SEQ ID NO: 2498050 - DNA, 25 bp, Homo sapien
gacagtcgggttcagagaaatccag

SEQ ID NO: 2498051 - DNA, 25 bp, Homo sapien
tttacaatgtcatagatgcgtctcc

SEQ ID NO: 2498052 - DNA, 25 bp, Homo sapien
catactgattcttagccacccggct

SEQ ID NO: 2498053 - DNA, 25 bp, Homo sapien
ggcacaggagtcctaaacttttctg

SEQ ID NO: 2498054 - DNA, 25 bp, Homo sapien
tctcagttgacaagggataacttgg

SEQ ID NO: 2498055 - DNA, 25 bp, Homo sapien
ttggatagcgagctagaaacttctg

SEQ ID NO: 2498056 - DNA, 25 bp, Homo sapien
tttcaaattcgtccacagcactgtc

SEQ ID NO: 2498057 - DNA, 25 bp, Homo sapien
gaagactccagtgtacacttgggag

SEQ ID NO: 2498058 - DNA, 25 bp, Homo sapien
tgaaagaactacagctacatgcgaa

SEQ ID NO: 2498059 - DNA, 25 bp, Homo sapien
taattacatcgcatccatttttggg

SEQ ID NO: 2498060 - DNA, 25 bp, Homo sapien
aatgggagttcaaatggcaaaggtc

SEQ ID NO: 2498061 - DNA, 25 bp, Homo sapien
gatggcttaacttcaataaagcccc

SEQ ID NO: 2498062 - DNA, 25 bp, Homo sapien
taaccaactgaacatatataagaat

SEQ ID NO: 2498063 - DNA, 25 bp, Homo sapien
gcactggttccccacagaacaggta

SEQ ID NO: 2498064 - DNA, 25 bp, Homo sapien
ccctggtccagggagtatcatacag

SEQ ID NO: 2498065 - DNA, 25 bp, Homo sapien
gcttcgataaatcaattggttcatt

SEQ ID NO: 2498066 - DNA, 25 bp, Homo sapien
tcccttatatctgggctggcagcac

SEQ ID NO: 2498067 - DNA, 25 bp, Homo sapien
gctgtctgtcaacaaacttaactgg

SEQ ID NO: 2498068 - DNA, 25 bp, Homo sapien
gggtgtccatggttccgcttgctgt

SEQ ID NO: 2498069 - DNA, 25 bp, Homo sapien
ccttgatcgatcaacaaatatattt

SEQ ID NO: 2498070 - DNA, 25 bp, Homo sapien
tctaacgtcattctccagagcagtg

SEQ ID NO: 2498071 - DNA, 25 bp, Homo sapien
ttttaagccaacctagagagctctc

SEQ ID NO: 2498072 - DNA, 25 bp, Homo sapien
tgtgcaacacaactcccaccagatg

SEQ ID NO: 2498073 - DNA, 25 bp, Homo sapien
cagcacttagtagcaggaccagtta

SEQ ID NO: 2498074 - DNA, 25 bp, Homo sapien
tattccccggagagattccaagaag

SEQ ID NO: 2498075 - DNA, 25 bp, Homo sapien
gaccttgaccaacgggcaaatggcc

SEQ ID NO: 2498076 - DNA, 25 bp, Homo sapien
taaatgaccgctgatccagcaagac

SEQ ID NO: 2498077 - DNA, 25 bp, Homo sapien
gaaggatcaactcagcaccactagc

SEQ ID NO: 2498078 - DNA, 25 bp, Homo sapien
tgatcaggtcttttagtgttaaaca

SEQ ID NO: 2498079 - DNA, 25 bp, Homo sapien
gctgatcaggtcttttagtgttaaa

SEQ ID NO: 2498080 - DNA, 25 bp, Homo sapien
actgcaaaatctagtctgggctgcc

SEQ ID NO: 2498081 - DNA, 25 bp, Homo sapien
tcaactgcaaaatctagtctgggct

SEQ ID NO: 2498082 - DNA, 25 bp, Homo sapien
aggcgcgcagatccccgcgccgagt

SEQ ID NO: 2498083 - DNA, 25 bp, Homo sapien
ccacggacccaagccgatgagggaa

SEQ ID NO: 2498084 - DNA, 25 bp, Homo sapien
aagggagagcgaggcgcgcagatcc

SEQ ID NO: 2498085 - DNA, 25 bp, Homo sapien
tggtgcggcgatcagcagccgggcg

SEQ ID NO: 2498086 - DNA, 25 bp, Homo sapien
ggaccccgcggcgtccgggcagcgc

SEQ ID NO: 2498087 - DNA, 25 bp, Homo sapien
cgcggcgtccgggcagcgccagcgc

SEQ ID NO: 2498088 - DNA, 25 bp, Homo sapien
accccgcggcgtccgggcagcgcca

SEQ ID NO: 2498089 - DNA, 25 bp, Homo sapien
cccgcggcgtccgggcagcgccagc

SEQ ID NO: 2498090 - DNA, 25 bp, Homo sapien
tcagaccggccgagcgcaactccag

SEQ ID NO: 2498091 - DNA, 25 bp, Homo sapien
cagcctggatcgtagtccccgctaa

SEQ ID NO: 2498092 - DNA, 25 bp, Homo sapien
cccgctaaaacacctcctctggcgc

SEQ ID NO: 2498093 - DNA, 25 bp, Homo sapien
ctggatcgtagtccccgctaaaaca

SEQ ID NO: 2498094 - DNA, 25 bp, Homo sapien
aaatgaggaatctgatgagcagggt

SEQ ID NO: 2498095 - DNA, 25 bp, Homo sapien
ggtttaaaggggctgcatctcgctg

SEQ ID NO: 2498096 - DNA, 25 bp, Homo sapien
gctgccctccagagtaggcacagag

SEQ ID NO: 2498097 - DNA, 25 bp, Homo sapien
tctcgctggtttgtggcaatgtcac

SEQ ID NO: 2498098 - DNA, 25 bp, Homo sapien
ctgctaactaagctgtcatcactca

SEQ ID NO: 2498099 - DNA, 25 bp, Homo sapien
gctgtcatcactcagaagggcaggg

SEQ ID NO: 2498100 - DNA, 25 bp, Homo sapien
aactaagctgtcatcactcagaagg

SEQ ID NO: 2498101 - DNA, 25 bp, Homo sapien
ctgtcatcactcagaagggcaggga

SEQ ID NO: 2498102 - DNA, 25 bp, Homo sapien
ctctgtgatgttctttgtttgtcca

SEQ ID NO: 2498103 - DNA, 25 bp, Homo sapien
tgtttgtccattatacttcctggca

SEQ ID NO: 2498104 - DNA, 25 bp, Homo sapien
ctgtgctctctgtgatgttctttgt

SEQ ID NO: 2498105 - DNA, 25 bp, Homo sapien
tgtccattatacttcctggcagtat

SEQ ID NO: 2498106 - DNA, 25 bp, Homo sapien
gcctagaactgggtatggtcacagc

SEQ ID NO: 2498107 - DNA, 25 bp, Homo sapien
ctgggttgctaaatggcaatggtgt

SEQ ID NO: 2498108 - DNA, 25 bp, Homo sapien
gctaccctctcccacatagatgaag

SEQ ID NO: 2498109 - DNA, 25 bp, Homo sapien
gagtcctgtcttgtaatatgtagta

SEQ ID NO: 2498110 - DNA, 25 bp, Homo sapien
cacactccttcatcacaggaaacaa

SEQ ID NO: 2498111 - DNA, 25 bp, Homo sapien
cctctcagtttttctatttgggact

SEQ ID NO: 2498112 - DNA, 25 bp, Homo sapien
tctatttgggacttaaaattccaca

SEQ ID NO: 2498113 - DNA, 25 bp, Homo sapien
aaaattccacactccttcatcacag

SEQ ID NO: 2498114 - DNA, 25 bp, Homo sapien
gtgttaaaatactccatgcttagtg

SEQ ID NO: 2498115 - DNA, 25 bp, Homo sapien
caaatattccatgcttaatgttctc

SEQ ID NO: 2498116 - DNA, 25 bp, Homo sapien
ggacccgcgttactgcagctagtca

SEQ ID NO: 2498117 - DNA, 25 bp, Homo sapien
caagtaccgtagctacttatgaggg

SEQ ID NO: 2498118 - DNA, 25 bp, Homo sapien
acagttctatgagggtcattaaaat

SEQ ID NO: 2498119 - DNA, 25 bp, Homo sapien
cagttctatgagggtcattaaaata

SEQ ID NO: 2498120 - DNA, 25 bp, Homo sapien
cattgttcagagagtcaaacagttc

SEQ ID NO: 2498121 - DNA, 25 bp, Homo sapien
taggcagcagtaggacagccacatt

SEQ ID NO: 2498122 - DNA, 25 bp, Homo sapien
aggcagcagtaggacagccacattg

SEQ ID NO: 2498123 - DNA, 25 bp, Homo sapien
gtccatgaaggcgaactgagcgact

SEQ ID NO: 2498124 - DNA, 25 bp, Homo sapien
catgaaggcgaactgagcgactact

SEQ ID NO: 2498125 - DNA, 25 bp, Homo sapien
caggtccatgaaggcgaactgagcg

SEQ ID NO: 2498126 - DNA, 25 bp, Homo sapien
aaggcgaactgagcgactactgaaa

SEQ ID NO: 2498127 - DNA, 25 bp, Homo sapien
tattgtaggagggtctgacactcag

SEQ ID NO: 2498128 - DNA, 25 bp, Homo sapien
gatgtagatctttggagtcatgtag

SEQ ID NO: 2498129 - DNA, 25 bp, Homo sapien
caaaatctgcaagcttattgtagga

SEQ ID NO: 2498130 - DNA, 25 bp, Homo sapien
gataagggccttcttcaagcaggac

SEQ ID NO: 2498131 - DNA, 25 bp, Homo sapien
ttagtaagtccccaaggtacaatgc

SEQ ID NO: 2498132 - DNA, 25 bp, Homo sapien
cgatgtgcttggattggattcctgc

SEQ ID NO: 2498133 - DNA, 25 bp, Homo sapien
tccccaaggtacaatgcgatgtgct

SEQ ID NO: 2498134 - DNA, 25 bp, Homo sapien
atgcgatgtgcttggattggattcc

SEQ ID NO: 2498135 - DNA, 25 bp, Homo sapien
tttcctatagtgttgccactgccct

SEQ ID NO: 2498136 - DNA, 25 bp, Homo sapien
gttttcctatagtgttgccactgcc

SEQ ID NO: 2498137 - DNA, 25 bp, Homo sapien
atagtgttgccactgccctcaccta

SEQ ID NO: 2498138 - DNA, 25 bp, Homo sapien
tcctatagtgttgccactgccctca

SEQ ID NO: 2498139 - DNA, 25 bp, Homo sapien
caggccttttaccttggtgaattca

SEQ ID NO: 2498140 - DNA, 25 bp, Homo sapien
tacttgtctgcttttcctgatccca

SEQ ID NO: 2498141 - DNA, 25 bp, Homo sapien
tgatcccaggccttttaccttggtg

SEQ ID NO: 2498142 - DNA, 25 bp, Homo sapien
tgtctgcttttcctgatcccaggcc

SEQ ID NO: 2498143 - DNA, 25 bp, Homo sapien
ttttggcatttgtatttgcttcttg

SEQ ID NO: 2498144 - DNA, 25 bp, Homo sapien
tttggcatttgtatttgcttcttgt

SEQ ID NO: 2498145 - DNA, 25 bp, Homo sapien
ctttgtctttgtctcatattttggc

SEQ ID NO: 2498146 - DNA, 25 bp, Homo sapien
tgtctttgtctcatattttggcatt

SEQ ID NO: 2498147 - DNA, 25 bp, Homo sapien
ttttctttgggcacattttgagaca

SEQ ID NO: 2498148 - DNA, 25 bp, Homo sapien
tatctggctctagcccacagatcct

SEQ ID NO: 2498149 - DNA, 25 bp, Homo sapien
gacatttcggcccttcttaagttgc

SEQ ID NO: 2498150 - DNA, 25 bp, Homo sapien
cttaagttgctgttatatctggctc

SEQ ID NO: 2498151 - DNA, 25 bp, Homo sapien
caaagacaagatggaaagccagaac

SEQ ID NO: 2498152 - DNA, 25 bp, Homo sapien
cctttagatgtgtcaaagggcaaag

SEQ ID NO: 2498153 - DNA, 25 bp, Homo sapien
agtcattgggattaagaggagtaga

SEQ ID NO: 2498154 - DNA, 25 bp, Homo sapien
agaacttgagtctcagtattacagg

SEQ ID NO: 2498155 - DNA, 25 bp, Homo sapien
ggtagaacctgctccatatggtgac

SEQ ID NO: 2498156 - DNA, 25 bp, Homo sapien
gttaagcaaataagatgccttattt

SEQ ID NO: 2498157 - DNA, 25 bp, Homo sapien
gtgttaagcaaataagatgccttat

SEQ ID NO: 2498158 - DNA, 25 bp, Homo sapien
aggtagaacctgctccatatggtga

SEQ ID NO: 2498159 - DNA, 25 bp, Homo sapien
ttttgggacatatctccaagaatcc

SEQ ID NO: 2498160 - DNA, 25 bp, Homo sapien
tctttagctccttgaactcagataa

SEQ ID NO: 2498161 - DNA, 25 bp, Homo sapien
gcagaacacacatatctctttggag

SEQ ID NO: 2498162 - DNA, 25 bp, Homo sapien
caagaatcctatttacgcagaacac

SEQ ID NO: 2498163 - DNA, 25 bp, Homo sapien
tcttcccaggcagctttagtttttc

SEQ ID NO: 2498164 - DNA, 25 bp, Homo sapien
atcttcccaggcagctttagttttt

SEQ ID NO: 2498165 - DNA, 25 bp, Homo sapien
tttcccaagctgtatctgttgttgg

SEQ ID NO: 2498166 - DNA, 25 bp, Homo sapien
gctttagtttttcccaagctgtatc

SEQ ID NO: 2498167 - DNA, 25 bp, Homo sapien
ttctgaatgttgaacagtaagtcca

SEQ ID NO: 2498168 - DNA, 25 bp, Homo sapien
tgtgttagtctctgtatctataaga

SEQ ID NO: 2498169 - DNA, 25 bp, Homo sapien
gaagataccaggagattctgaatgt

SEQ ID NO: 2498170 - DNA, 25 bp, Homo sapien
cacttctcgtgtttgtaacatagga

SEQ ID NO: 2498171 - DNA, 25 bp, Homo sapien
agagggatgtgaagatgcactcgtc

SEQ ID NO: 2498172 - DNA, 25 bp, Homo sapien
gcactcgtcactgcaggcacattgt

SEQ ID NO: 2498173 - DNA, 25 bp, Homo sapien
gaagatgcactcgtcactgcaggca

SEQ ID NO: 2498174 - DNA, 25 bp, Homo sapien
ggatgtgaagatgcactcgtcactg

SEQ ID NO: 2498175 - DNA, 25 bp, Homo sapien
tttcacaggtgctgttatacagtcc

SEQ ID NO: 2498176 - DNA, 25 bp, Homo sapien
ggcatttcacaggtgctgttataca

SEQ ID NO: 2498177 - DNA, 25 bp, Homo sapien
catttcacaggtgctgttatacagt

SEQ ID NO: 2498178 - DNA, 25 bp, Homo sapien
tcacaggtgctgttatacagtccat

SEQ ID NO: 2498179 - DNA, 25 bp, Homo sapien
gggagctttactactgcttgaatac

SEQ ID NO: 2498180 - DNA, 25 bp, Homo sapien
ttcagattttcccaagataggcccc

SEQ ID NO: 2498181 - DNA, 25 bp, Homo sapien
gataggccccaaggtctagtactgg

SEQ ID NO: 2498182 - DNA, 25 bp, Homo sapien
cacacagttggttgagtaagagatc

SEQ ID NO: 2498183 - DNA, 25 bp, Homo sapien
gggaggcccatctcacaagaatgtg

SEQ ID NO: 2498184 - DNA, 25 bp, Homo sapien
gaggcccatctcacaagaatgtgga

SEQ ID NO: 2498185 - DNA, 25 bp, Homo sapien
ggcccatctcacaagaatgtggaaa

SEQ ID NO: 2498186 - DNA, 25 bp, Homo sapien
ccatctcacaagaatgtggaaaccc

SEQ ID NO: 2498187 - DNA, 25 bp, Homo sapien
ttccagaaggttgcctatgcttgcc

SEQ ID NO: 2498188 - DNA, 25 bp, Homo sapien
ttttcttccagaaggttgcctatgc

SEQ ID NO: 2498189 - DNA, 25 bp, Homo sapien
tcttccagaaggttgcctatgcttg

SEQ ID NO: 2498190 - DNA, 25 bp, Homo sapien
cagaaggttgcctatgcttgccaac

SEQ ID NO: 2498191 - DNA, 25 bp, Homo sapien
ctgttagaaactggtatgcttcttg

SEQ ID NO: 2498192 - DNA, 25 bp, Homo sapien
tgttagaaactggtatgcttcttgt

SEQ ID NO: 2498193 - DNA, 25 bp, Homo sapien
cttgttctccctgaatgttccacag

SEQ ID NO: 2498194 - DNA, 25 bp, Homo sapien
ttgttctccctgaatgttccacaga

SEQ ID NO: 2498195 - DNA, 25 bp, Homo sapien
ttggctgccaggtctggtgctatca

SEQ ID NO: 2498196 - DNA, 25 bp, Homo sapien
tggctgccaggtctggtgctatcag

SEQ ID NO: 2498197 - DNA, 25 bp, Homo sapien
ggctgccaggtctggtgctatcagt

SEQ ID NO: 2498198 - DNA, 25 bp, Homo sapien
ccagcatccgaagatcacaagttct

SEQ ID NO: 2498199 - DNA, 25 bp, Homo sapien
aaagcaatcatctttggcagctgag

SEQ ID NO: 2498200 - DNA, 25 bp, Homo sapien
tatgtggtagaaaaaaccccagcat

SEQ ID NO: 2498201 - DNA, 25 bp, Homo sapien
ggccgccttaggctgatgttacaag

SEQ ID NO: 2498202 - DNA, 25 bp, Homo sapien
tttcatgctcgtttgaatttgctgt

SEQ ID NO: 2498203 - DNA, 25 bp, Homo sapien
tcatgctcgtttgaatttgctgtgt

SEQ ID NO: 2498204 - DNA, 25 bp, Homo sapien
ctgtgtctcttcatgcaacactggg

SEQ ID NO: 2498205 - DNA, 25 bp, Homo sapien
tgctgtgtctcttcatgcaacactg

SEQ ID NO: 2498206 - DNA, 25 bp, Homo sapien
tcatttccaatttaactcggaggcc

SEQ ID NO: 2498207 - DNA, 25 bp, Homo sapien
caatttaactcggaggccactcttg

SEQ ID NO: 2498208 - DNA, 25 bp, Homo sapien
cggaggccactcttgtacttttcca

SEQ ID NO: 2498209 - DNA, 25 bp, Homo sapien
aaaacatgacatctggataacctgc

SEQ ID NO: 2498210 - DNA, 25 bp, Homo sapien
cttgagtgttctagcaatcaatacc

SEQ ID NO: 2498211 - DNA, 25 bp, Homo sapien
gggcattactatatagcttccacag

SEQ ID NO: 2498212 - DNA, 25 bp, Homo sapien
tgaaatttaacagcagggcattact

SEQ ID NO: 2498213 - DNA, 25 bp, Homo sapien
ctacactggcacaagctgttgtttc

SEQ ID NO: 2498214 - DNA, 25 bp, Homo sapien
tttaatcaggatttcctcaaattaa

SEQ ID NO: 2498215 - DNA, 25 bp, Homo sapien
tgaaacactccccttgactgaaaaa

SEQ ID NO: 2498216 - DNA, 25 bp, Homo sapien
taccgggggaaagctaattcactca

SEQ ID NO: 2498217 - DNA, 25 bp, Homo sapien
tggacagcagagagttatgaaacac

SEQ ID NO: 2498218 - DNA, 25 bp, Homo sapien
gcctcattacattaatagctcaaaa

SEQ ID NO: 2498219 - DNA, 25 bp, Homo sapien
gagtctagcctcattacattaatag

SEQ ID NO: 2498220 - DNA, 25 bp, Homo sapien
taatagctcaaaaccttctcaggcg

SEQ ID NO: 2498221 - DNA, 25 bp, Homo sapien
tttttgagtctagcctcattacatt

SEQ ID NO: 2498222 - DNA, 25 bp, Homo sapien
tagggtgtaggatgtagaataagct

SEQ ID NO: 2498223 - DNA, 25 bp, Homo sapien
ggaagatgctgatcttatagggtgt

SEQ ID NO: 2498224 - DNA, 25 bp, Homo sapien
agaataagctgggtagtgatgaaag

SEQ ID NO: 2498225 - DNA, 25 bp, Homo sapien
gatgctgatcttatagggtgtagga

SEQ ID NO: 2498226 - DNA, 25 bp, Homo sapien
aagatgattccaggtgagacttatg

SEQ ID NO: 2498227 - DNA, 25 bp, Homo sapien
ccaggtgagacttatgtgagaagct

SEQ ID NO: 2498228 - DNA, 25 bp, Homo sapien
agatgtggatgaagtggttaaagaa

SEQ ID NO: 2498229 - DNA, 25 bp, Homo sapien
gacttatgtgagaagctaagagaga

SEQ ID NO: 2498230 - DNA, 25 bp, Homo sapien
cgctatttcctttgtgatccaagct

SEQ ID NO: 2498231 - DNA, 25 bp, Homo sapien
agccgctatttcctttgtgatccaa

SEQ ID NO: 2498232 - DNA, 25 bp, Homo sapien
ctatgggtcaggtaactctccacag

SEQ ID NO: 2498233 - DNA, 25 bp, Homo sapien
ctatttcctttgtgatccaagctgc

SEQ ID NO: 2498234 - DNA, 25 bp, Homo sapien
agttccttctctagagctactttcc

SEQ ID NO: 2498235 - DNA, 25 bp, Homo sapien
ttccttctctagagctactttcctg

SEQ ID NO: 2498236 - DNA, 25 bp, Homo sapien
tccttctctagagctactttcctga

SEQ ID NO: 2498237 - DNA, 25 bp, Homo sapien
ttagttccttctctagagctacttt

SEQ ID NO: 2498238 - DNA, 25 bp, Homo sapien
ctgagataggaatgtaggataaagt

SEQ ID NO: 2498239 - DNA, 25 bp, Homo sapien
agataggaatgtaggataaagtgag

SEQ ID NO: 2498240 - DNA, 25 bp, Homo sapien
ataggaatgtaggataaagtgaggt

SEQ ID NO: 2498241 - DNA, 25 bp, Homo sapien
gaatgtaggataaagtgaggtgtcc

SEQ ID NO: 2498242 - DNA, 25 bp, Homo sapien
ttgctagggtatacaaagcactctc

SEQ ID NO: 2498243 - DNA, 25 bp, Homo sapien
cttgctagggtatacaaagcactct

SEQ ID NO: 2498244 - DNA, 25 bp, Homo sapien
aatgtgttcctctagtctcagttct

SEQ ID NO: 2498245 - DNA, 25 bp, Homo sapien
tttctgacaaccttgtcagacccag

SEQ ID NO: 2498246 - DNA, 25 bp, Homo sapien
actgtaccatcatatcatttctgac

SEQ ID NO: 2498247 - DNA, 25 bp, Homo sapien
tccaactgtaccatcatatcatttc

SEQ ID NO: 2498248 - DNA, 25 bp, Homo sapien
tctgttcagggtacatagcaatgcc

SEQ ID NO: 2498249 - DNA, 25 bp, Homo sapien
tgttcagggtagcagagacggctcc

SEQ ID NO: 2498250 - DNA, 25 bp, Homo sapien
cctgaaaggaactggcttgctctga

SEQ ID NO: 2498251 - DNA, 25 bp, Homo sapien
ggttagctcatcctttatgggccag

SEQ ID NO: 2498252 - DNA, 25 bp, Homo sapien
ggctccacttatctgcccacacaca

SEQ ID NO: 2498253 - DNA, 25 bp, Homo sapien
aaatcttggctccacttatctgccc

SEQ ID NO: 2498254 - DNA, 25 bp, Homo sapien
gtccacaaatcttggctccacttat

SEQ ID NO: 2498255 - DNA, 25 bp, Homo sapien
ctccacttatctgcccacacacatg

SEQ ID NO: 2498256 - DNA, 25 bp, Homo sapien
tgtcaagtgatattagttccccagt

SEQ ID NO: 2498257 - DNA, 25 bp, Homo sapien
tcttcagatatttagggaaacacaa

SEQ ID NO: 2498258 - DNA, 25 bp, Homo sapien
ccagtaagtgtgttgcactgtggac

SEQ ID NO: 2498259 - DNA, 25 bp, Homo sapien
gatctagctaatacaatgtgtctgc

SEQ ID NO: 2498260 - DNA, 25 bp, Homo sapien
tatcttagaagtgcacctcagcgtg

SEQ ID NO: 2498261 - DNA, 25 bp, Homo sapien
gccacaggttctaaaggtcattcca

SEQ ID NO: 2498262 - DNA, 25 bp, Homo sapien
tgggaaaatcattgctaacacctgg

SEQ ID NO: 2498263 - DNA, 25 bp, Homo sapien
taacacctggttcaaagactcagag

SEQ ID NO: 2498264 - DNA, 25 bp, Homo sapien
gaaatcattgcaaaggagcccttga

SEQ ID NO: 2498265 - DNA, 25 bp, Homo sapien
ggagattgctctgctagtgacacta

SEQ ID NO: 2498266 - DNA, 25 bp, Homo sapien
gagcccttgatgctgcaggatccct

SEQ ID NO: 2498267 - DNA, 25 bp, Homo sapien
tgtcaccacccatatgaactggaga

SEQ ID NO: 2498268 - DNA, 25 bp, Homo sapien
caatgtcttcagtccctgtggatct

SEQ ID NO: 2498269 - DNA, 25 bp, Homo sapien
tcagtccctgtggatctccattcag

SEQ ID NO: 2498270 - DNA, 25 bp, Homo sapien
tgtggatctccattcagttttaaac

SEQ ID NO: 2498271 - DNA, 25 bp, Homo sapien
cctgttccaatgtcttcagtccctg

SEQ ID NO: 2498272 - DNA, 25 bp, Homo sapien
gctggtactccgatatttgtacctt

SEQ ID NO: 2498273 - DNA, 25 bp, Homo sapien
agtagttaatactctttacttccag

SEQ ID NO: 2498274 - DNA, 25 bp, Homo sapien
aaagcactgagcatatagctggtac

SEQ ID NO: 2498275 - DNA, 25 bp, Homo sapien
tttggctcctttgatctctccatag

SEQ ID NO: 2498276 - DNA, 25 bp, Homo sapien
tctctctttgaccacacttgccttg

SEQ ID NO: 2498277 - DNA, 25 bp, Homo sapien
tctctttgaccacacttgccttgac

SEQ ID NO: 2498278 - DNA, 25 bp, Homo sapien
ctctctttgaccacacttgccttga

SEQ ID NO: 2498279 - DNA, 25 bp, Homo sapien
ctctttgaccacacttgccttgact

SEQ ID NO: 2498280 - DNA, 25 bp, Homo sapien
caacagtaagcgttgtcatgaagcc

SEQ ID NO: 2498281 - DNA, 25 bp, Homo sapien
ttgtcatgaagcctttgggagagaa

SEQ ID NO: 2498282 - DNA, 25 bp, Homo sapien
gaaagaaatgtaattctgagcactg

SEQ ID NO: 2498283 - DNA, 25 bp, Homo sapien
gctgctgctctctagatcaacagta

SEQ ID NO: 2498284 - DNA, 25 bp, Homo sapien
tccaaatatgtggtggtctcaaacc

SEQ ID NO: 2498285 - DNA, 25 bp, Homo sapien
tagaaaagggccaggctagactcct

SEQ ID NO: 2498286 - DNA, 25 bp, Homo sapien
tctcagcaatagaagtagacctgcc

SEQ ID NO: 2498287 - DNA, 25 bp, Homo sapien
tagacctgccttcctagctgtagag

SEQ ID NO: 2498288 - DNA, 25 bp, Homo sapien
taaattccagctgcgcggctgggaa

SEQ ID NO: 2498289 - DNA, 25 bp, Homo sapien
ggctgggaaacagcgccactcgccg

SEQ ID NO: 2498290 - DNA, 25 bp, Homo sapien
cctgtctctttaaattccagctgcg

SEQ ID NO: 2498291 - DNA, 25 bp, Homo sapien
tgcgcggctgggaaacagcgccact

SEQ ID NO: 2498292 - DNA, 25 bp, Homo sapien
agttttaggctcttcaatgtatagt

SEQ ID NO: 2498293 - DNA, 25 bp, Homo sapien
taggctcttcaatgtatagtgacat

SEQ ID NO: 2498294 - DNA, 25 bp, Homo sapien
aggcaagagggagtagactttagtt

SEQ ID NO: 2498295 - DNA, 25 bp, Homo sapien
aaggcaagagggagtagactttagt

SEQ ID NO: 2498296 - DNA, 25 bp, Homo sapien
ggcttctgcaaagtcaatagtgatg

SEQ ID NO: 2498297 - DNA, 25 bp, Homo sapien
tagtgatggcgaattagtagttgca

SEQ ID NO: 2498298 - DNA, 25 bp, Homo sapien
tagtcatacctctacaatgttggga

SEQ ID NO: 2498299 - DNA, 25 bp, Homo sapien
gggcattctcaactatgataggact

SEQ ID NO: 2498300 - DNA, 25 bp, Homo sapien
aggcctctggatgtggaggccacat

SEQ ID NO: 2498301 - DNA, 25 bp, Homo sapien
atgtggaggccacatggctatgctg

SEQ ID NO: 2498302 - DNA, 25 bp, Homo sapien
caggcctctggatgtggaggccaca

SEQ ID NO: 2498303 - DNA, 25 bp, Homo sapien
tggaggccacatggctatgctgaag

SEQ ID NO: 2498304 - DNA, 25 bp, Homo sapien
tttttccactagctagcaagaagcc

SEQ ID NO: 2498305 - DNA, 25 bp, Homo sapien
gcatttgtgggacttcagtgagttt

SEQ ID NO: 2498306 - DNA, 25 bp, Homo sapien
ttgatagcccaaatggggcttggcc

SEQ ID NO: 2498307 - DNA, 25 bp, Homo sapien
ggtcagcatttgtgggacttcagtg

SEQ ID NO: 2498308 - DNA, 25 bp, Homo sapien
tcacgtggcagtctacagacacaag

SEQ ID NO: 2498309 - DNA, 25 bp, Homo sapien
aatacatgccctaaggttcacgtgg

SEQ ID NO: 2498310 - DNA, 25 bp, Homo sapien
agagttcatttcagggaggcacaga

SEQ ID NO: 2498311 - DNA, 25 bp, Homo sapien
caggtcagggatgtcagccacaaat

SEQ ID NO: 2498312 - DNA, 25 bp, Homo sapien
tgctaagggtttagaacccgtggca

SEQ ID NO: 2498313 - DNA, 25 bp, Homo sapien
aggaagtagtttctgatcacatcat

SEQ ID NO: 2498314 - DNA, 25 bp, Homo sapien
gtttctgatcacatcatctgtgcct

SEQ ID NO: 2498315 - DNA, 25 bp, Homo sapien
catctgtgcctgatgatgagtccat

SEQ ID NO: 2498316 - DNA, 25 bp, Homo sapien
tcatctgtgcctgatgatgagtcca

SEQ ID NO: 2498317 - DNA, 25 bp, Homo sapien
gaaggtatagccgaagagctatcac

SEQ ID NO: 2498318 - DNA, 25 bp, Homo sapien
ctgctgaaggtatagccgaagagct

SEQ ID NO: 2498319 - DNA, 25 bp, Homo sapien
gaaatagctgctgaaggtatagccg

SEQ ID NO: 2498320 - DNA, 25 bp, Homo sapien
gtatagccgaagagctatcacagtc

SEQ ID NO: 2498321 - DNA, 25 bp, Homo sapien
ttctttggcgttgtctcctgttgga

SEQ ID NO: 2498322 - DNA, 25 bp, Homo sapien
ctttggcgttgtctcctgttggata

SEQ ID NO: 2498323 - DNA, 25 bp, Homo sapien
cagttctttggcgttgtctcctgtt

SEQ ID NO: 2498324 - DNA, 25 bp, Homo sapien
ggcgttgtctcctgttggatataac

SEQ ID NO: 2498325 - DNA, 25 bp, Homo sapien
caaagtcattcggttaactggagtg

SEQ ID NO: 2498326 - DNA, 25 bp, Homo sapien
aagtcattcggttaactggagtgtg

SEQ ID NO: 2498327 - DNA, 25 bp, Homo sapien
gtcattcggttaactggagtgtggt

SEQ ID NO: 2498328 - DNA, 25 bp, Homo sapien
cattcggttaactggagtgtggtga

SEQ ID NO: 2498329 - DNA, 25 bp, Homo sapien
ctaggatttctcagtactcagacat

SEQ ID NO: 2498330 - DNA, 25 bp, Homo sapien
cagtactcagacattcctcattttg

SEQ ID NO: 2498331 - DNA, 25 bp, Homo sapien
acattcctcattttgtctgaagtgg

SEQ ID NO: 2498332 - DNA, 25 bp, Homo sapien
cctcattttgtctgaagtggtaata

SEQ ID NO: 2498333 - DNA, 25 bp, Homo sapien
acttgaggcacagaatctgaatagt

SEQ ID NO: 2498334 - DNA, 25 bp, Homo sapien
cttgaggcacagaatctgaatagtg

SEQ ID NO: 2498335 - DNA, 25 bp, Homo sapien
ttgaggcacagaatctgaatagtga

SEQ ID NO: 2498336 - DNA, 25 bp, Homo sapien
tcatatggaactcttaggtgtgagg

SEQ ID NO: 2498337 - DNA, 25 bp, Homo sapien
taatgaggtagtcaaagtaagcctt

SEQ ID NO: 2498338 - DNA, 25 bp, Homo sapien
caaagtaagcctttgtatcatatgg

SEQ ID NO: 2498339 - DNA, 25 bp, Homo sapien
ggtggtaatgaggtagtcaaagtaa

SEQ ID NO: 2498340 - DNA, 25 bp, Homo sapien
aggaatggaaatttctttatattct

SEQ ID NO: 2498341 - DNA, 25 bp, Homo sapien
aatttctttatattctttagccagc

SEQ ID NO: 2498342 - DNA, 25 bp, Homo sapien
gaaatttctttatattctttagcca

SEQ ID NO: 2498343 - DNA, 25 bp, Homo sapien
tttctttatattctttagccagcat

SEQ ID NO: 2498344 - DNA, 25 bp, Homo sapien
ccatatacagtccaggagacagact

SEQ ID NO: 2498345 - DNA, 25 bp, Homo sapien
tgtctgcctaatccatatacagtcc

SEQ ID NO: 2498346 - DNA, 25 bp, Homo sapien
tcttcagtatcatgtactgtctgcc

SEQ ID NO: 2498347 - DNA, 25 bp, Homo sapien
tatcatgtactgtctgcctaatcca

SEQ ID NO: 2498348 - DNA, 25 bp, Homo sapien
ctagaataagatatcagtattcaag

SEQ ID NO: 2498349 - DNA, 25 bp, Homo sapien
gaacctctcaaacctagaataagat

SEQ ID NO: 2498350 - DNA, 25 bp, Homo sapien
agtgatagtaacagagaacctctca

SEQ ID NO: 2498351 - DNA, 25 bp, Homo sapien
agaatcattggccttaaaggggagg

SEQ ID NO: 2498352 - DNA, 25 bp, Homo sapien
gcctgattctcatcgtgagaaaaat

SEQ ID NO: 2498353 - DNA, 25 bp, Homo sapien
agagcctgattctcatcgtgagaaa

SEQ ID NO: 2498354 - DNA, 25 bp, Homo sapien
tctcatcgtgagaaaaatgattagt

SEQ ID NO: 2498355 - DNA, 25 bp, Homo sapien
gagaaaaatgattagttgggtagca

SEQ ID NO: 2498356 - DNA, 25 bp, Homo sapien
tggtgaagtggcattagagccacat

SEQ ID NO: 2498357 - DNA, 25 bp, Homo sapien
ccaaggctagcctcagactgaagtg

SEQ ID NO: 2498358 - DNA, 25 bp, Homo sapien
agtgcccattccatgggccacacca

SEQ ID NO: 2498359 - DNA, 25 bp, Homo sapien
cacatgtgggaaacgcaccaaggct

SEQ ID NO: 2498360 - DNA, 25 bp, Homo sapien
cctctgggaccctgctcaaatagag

SEQ ID NO: 2498361 - DNA, 25 bp, Homo sapien
taatattaaaatcggcagcctggaa

SEQ ID NO: 2498362 - DNA, 25 bp, Homo sapien
caagggctagggtcattttgtgcca

SEQ ID NO: 2498363 - DNA, 25 bp, Homo sapien
caagtactagcatcatttccgacag

SEQ ID NO: 2498364 - DNA, 25 bp, Homo sapien
gggtgggtactggggcagagcctta

SEQ ID NO: 2498365 - DNA, 25 bp, Homo sapien
ggtactggggcagagccttatgcat

SEQ ID NO: 2498366 - DNA, 25 bp, Homo sapien
ggtgggtactggggcagagccttat

SEQ ID NO: 2498367 - DNA, 25 bp, Homo sapien
tgggtactggggcagagccttatgc

SEQ ID NO: 2498368 - DNA, 25 bp, Homo sapien
gactctgctagtacaggataggtgt

SEQ ID NO: 2498369 - DNA, 25 bp, Homo sapien
gagagagagccccactcgtactgaa

SEQ ID NO: 2498370 - DNA, 25 bp, Homo sapien
cactcgtactgaaatgtatcatctt

SEQ ID NO: 2498371 - DNA, 25 bp, Homo sapien
ttttgcagtgctcttatggactctg

SEQ ID NO: 2498372 - DNA, 25 bp, Homo sapien
gatggcctctgcaactgacattgtc

SEQ ID NO: 2498373 - DNA, 25 bp, Homo sapien
attgttgatggcctctgcaactgac

SEQ ID NO: 2498374 - DNA, 25 bp, Homo sapien
tgccagtacctgtttccacgtccaa

SEQ ID NO: 2498375 - DNA, 25 bp, Homo sapien
agctgccgacagagctgccagtacc

SEQ ID NO: 2498376 - DNA, 25 bp, Homo sapien
gcccttgtttgatctgatccatgcg

SEQ ID NO: 2498377 - DNA, 25 bp, Homo sapien
gtttgatctgatccatgcgatgatg

SEQ ID NO: 2498378 - DNA, 25 bp, Homo sapien
catgcgatgatgaacccgtgattct

SEQ ID NO: 2498379 - DNA, 25 bp, Homo sapien
tgaacccgtgattctagttttctct

SEQ ID NO: 2498380 - DNA, 25 bp, Homo sapien
tttaagctgacctggcaatgctgag

SEQ ID NO: 2498381 - DNA, 25 bp, Homo sapien
tctgcattgtgattggagcttaaaa

SEQ ID NO: 2498382 - DNA, 25 bp, Homo sapien
tgtagtaacaagatcccaactggct

SEQ ID NO: 2498383 - DNA, 25 bp, Homo sapien
taaagtgtaattgtgataactggcc

SEQ ID NO: 2498384 - DNA, 25 bp, Homo sapien
ccttgtgagatctgaggtcctggga

SEQ ID NO: 2498385 - DNA, 25 bp, Homo sapien
tttctggccctgatctacctggttg

SEQ ID NO: 2498386 - DNA, 25 bp, Homo sapien
tggactttgatcctggccagtactg

SEQ ID NO: 2498387 - DNA, 25 bp, Homo sapien
tacctggttgacacatggccttctg

SEQ ID NO: 2498388 - DNA, 25 bp, Homo sapien
catcgaaccagaagtaatgggcagt

SEQ ID NO: 2498389 - DNA, 25 bp, Homo sapien
aaccagaagtaatgggcagtgtgga

SEQ ID NO: 2498390 - DNA, 25 bp, Homo sapien
tgggcagtgtggaggtacgcgtcat

SEQ ID NO: 2498391 - DNA, 25 bp, Homo sapien
tcgaaccagaagtaatgggcagtgt

SEQ ID NO: 2498392 - DNA, 25 bp, Homo sapien
gacatctgcctgtgtttacaatctt

SEQ ID NO: 2498393 - DNA, 25 bp, Homo sapien
tctggactaccaaactcagtttatt

SEQ ID NO: 2498394 - DNA, 25 bp, Homo sapien
ttctctcaagtcatcgtgctgcata

SEQ ID NO: 2498395 - DNA, 25 bp, Homo sapien
tgtttacaatctttaatcccaactg

SEQ ID NO: 2498396 - DNA, 25 bp, Homo sapien
tcatctttggtgatatagttgaaaa

SEQ ID NO: 2498397 - DNA, 25 bp, Homo sapien
catctttggtgatatagttgaaaac

SEQ ID NO: 2498398 - DNA, 25 bp, Homo sapien
ctcttgctggcatgttccttctggc

SEQ ID NO: 2498399 - DNA, 25 bp, Homo sapien
gttccttctggcagctggatgcttc

SEQ ID NO: 2498400 - DNA, 25 bp, Homo sapien
tccttctggcagctggatgcttcac

SEQ ID NO: 2498401 - DNA, 25 bp, Homo sapien
cttgctggcatgttccttctggcag

SEQ ID NO: 2498402 - DNA, 25 bp, Homo sapien
cttggtatcctgtgtaaattctcct

SEQ ID NO: 2498403 - DNA, 25 bp, Homo sapien
gtctaactaactccttcagccctgt

SEQ ID NO: 2498404 - DNA, 25 bp, Homo sapien
cctgtgtaaattctcctggactgga

SEQ ID NO: 2498405 - DNA, 25 bp, Homo sapien
cctgggatgtctaactaactccttc

SEQ ID NO: 2498406 - DNA, 25 bp, Homo sapien
tctggacctttgtaagtgcattgta

SEQ ID NO: 2498407 - DNA, 25 bp, Homo sapien
atctggacctttgtaagtgcattgt

SEQ ID NO: 2498408 - DNA, 25 bp, Homo sapien
tggacctttgtaagtgcattgtaaa

SEQ ID NO: 2498409 - DNA, 25 bp, Homo sapien
ctggacctttgtaagtgcattgtaa

SEQ ID NO: 2498410 - DNA, 25 bp, Homo sapien
gcttttctgtgtgccaattgtggtc

SEQ ID NO: 2498411 - DNA, 25 bp, Homo sapien
tgtgcgcttttctgtgtgccaattg

SEQ ID NO: 2498412 - DNA, 25 bp, Homo sapien
tttgtctgtgcgcttttctgtgtgc

SEQ ID NO: 2498413 - DNA, 25 bp, Homo sapien
tctttgaggctatcttttcttacca

SEQ ID NO: 2498414 - DNA, 25 bp, Homo sapien
caactgttgaacttagcagtagcca

SEQ ID NO: 2498415 - DNA, 25 bp, Homo sapien
gacaatccctaggtctacatctact

SEQ ID NO: 2498416 - DNA, 25 bp, Homo sapien
ccgaaatctaatgacagcttcttgg

SEQ ID NO: 2498417 - DNA, 25 bp, Homo sapien
tcttggatgcagcacatgtgtgttc

SEQ ID NO: 2498418 - DNA, 25 bp, Homo sapien
gttaaaacttggacagctgcagaaa

SEQ ID NO: 2498419 - DNA, 25 bp, Homo sapien
ccgttaaaacttggacagctgcaga

SEQ ID NO: 2498420 - DNA, 25 bp, Homo sapien
aaacttggacagctgcagaaaacat

SEQ ID NO: 2498421 - DNA, 25 bp, Homo sapien
taaaacttggacagctgcagaaaac

SEQ ID NO: 2498422 - DNA, 25 bp, Homo sapien
catgagaattaaggccttgaagccc

SEQ ID NO: 2498423 - DNA, 25 bp, Homo sapien
tacttggaatctctctttcccagtc

SEQ ID NO: 2498424 - DNA, 25 bp, Homo sapien
caggatgtcctgacctttagtctcg

SEQ ID NO: 2498425 - DNA, 25 bp, Homo sapien
gaagcccacattgttcttcaacagg

SEQ ID NO: 2498426 - DNA, 25 bp, Homo sapien
tcatgcctttcctctgctcggattc

SEQ ID NO: 2498427 - DNA, 25 bp, Homo sapien
gcctttcctctgctcggattccacc

SEQ ID NO: 2498428 - DNA, 25 bp, Homo sapien
tcatccccagtgctgtcatgccttt

SEQ ID NO: 2498429 - DNA, 25 bp, Homo sapien
cagtgctgtcatgcctttcctctgc

SEQ ID NO: 2498430 - DNA, 25 bp, Homo sapien
ggtattttatctgcaactgtcaaac

SEQ ID NO: 2498431 - DNA, 25 bp, Homo sapien
taaagtgccatgtatatgttaactc

SEQ ID NO: 2498432 - DNA, 25 bp, Homo sapien
taaactatggcaggataagctttcc

SEQ ID NO: 2498433 - DNA, 25 bp, Homo sapien
cgttcagagagaacagtaaagtgcc

SEQ ID NO: 2498434 - DNA, 25 bp, Homo sapien
gaacatgaacctctccaactctgta

SEQ ID NO: 2498435 - DNA, 25 bp, Homo sapien
taaacctcattttacgaacatgaac

SEQ ID NO: 2498436 - DNA, 25 bp, Homo sapien
cattgtgaggattacaagttgcata

SEQ ID NO: 2498437 - DNA, 25 bp, Homo sapien
caaaataacttacttcctcagagag

SEQ ID NO: 2498438 - DNA, 25 bp, Homo sapien
gttaaatatatagaagagagcagtt

SEQ ID NO: 2498439 - DNA, 25 bp, Homo sapien
gctgaataatgtaatagtcctctaa

SEQ ID NO: 2498440 - DNA, 25 bp, Homo sapien
taatttcatgttctatatcattaaa

SEQ ID NO: 2498441 - DNA, 25 bp, Homo sapien
gaagagagcagttaatcagctaatt

SEQ ID NO: 2498442 - DNA, 25 bp, Homo sapien
gcataggtgcatttaattaggaaat

SEQ ID NO: 2498443 - DNA, 25 bp, Homo sapien
agtggcttttcagcataggtgcatt

SEQ ID NO: 2498444 - DNA, 25 bp, Homo sapien
agcataggtgcatttaattaggaaa

SEQ ID NO: 2498445 - DNA, 25 bp, Homo sapien
ggttcctcagccactggtctagtag

SEQ ID NO: 2498446 - DNA, 25 bp, Homo sapien
cctcagccactggtctagtagaagc

SEQ ID NO: 2498447 - DNA, 25 bp, Homo sapien
ggtgtggttcctcagccactggtct

SEQ ID NO: 2498448 - DNA, 25 bp, Homo sapien
gaaggtgtcattgaacccttcattc

SEQ ID NO: 2498449 - DNA, 25 bp, Homo sapien
cttcacagcagtttgaattgcaagc

SEQ ID NO: 2498450 - DNA, 25 bp, Homo sapien
tatccatgaacaaagaggtcttttc

SEQ ID NO: 2498451 - DNA, 25 bp, Homo sapien
tttccttgccagaccttggttgtac

SEQ ID NO: 2498452 - DNA, 25 bp, Homo sapien
gcaagctggtaagctgtcctaggct

SEQ ID NO: 2498453 - DNA, 25 bp, Homo sapien
ttttcctactgactgggtgtatttg

SEQ ID NO: 2498454 - DNA, 25 bp, Homo sapien
cttggcgtaattagaatgattcaca

SEQ ID NO: 2498455 - DNA, 25 bp, Homo sapien
ctataacttattttaggtcttggcg

SEQ ID NO: 2498456 - DNA, 25 bp, Homo sapien
tcaagctcagataattcaaatcagt

SEQ ID NO: 2498457 - DNA, 25 bp, Homo sapien
gaaagcaagcagtgacctggacatg

SEQ ID NO: 2498458 - DNA, 25 bp, Homo sapien
gacccctcgaggttcatgtatacca

SEQ ID NO: 2498459 - DNA, 25 bp, Homo sapien
gctatcctcgcagtggtaccagtcg

SEQ ID NO: 2498460 - DNA, 25 bp, Homo sapien
tctctaggctgggaaacatgtcaca

SEQ ID NO: 2498461 - DNA, 25 bp, Homo sapien
ctagaagtctgaaccgaataccaga

SEQ ID NO: 2498462 - DNA, 25 bp, Homo sapien
gacagatggaggacttaacctatat

SEQ ID NO: 2498463 - DNA, 25 bp, Homo sapien
ttcccgggacatcatccagagaggg

SEQ ID NO: 2498464 - DNA, 25 bp, Homo sapien
gaataccagacacagcaacttcccg

SEQ ID NO: 2498465 - DNA, 25 bp, Homo sapien
gatgacagcagttcagtgagcagtg

SEQ ID NO: 2498466 - DNA, 25 bp, Homo sapien
cgtcccctctaggaagaatactcag

SEQ ID NO: 2498467 - DNA, 25 bp, Homo sapien
tcagtgacacccttgataacatcag

SEQ ID NO: 2498468 - DNA, 25 bp, Homo sapien
tcagctcttactccaacatcaccgt

SEQ ID NO: 2498469 - DNA, 25 bp, Homo sapien
gattcagagaaacgctccaccacag

SEQ ID NO: 2498470 - DNA, 25 bp, Homo sapien
cacagacgagacctgggatagtcct

SEQ ID NO: 2498471 - DNA, 25 bp, Homo sapien
tctgtttcacagacaggttcctgga

SEQ ID NO: 2498472 - DNA, 25 bp, Homo sapien
cagaaagctggaacaagtgcactca

SEQ ID NO: 2498473 - DNA, 25 bp, Homo sapien
cattggaagatcgactgccaccagc

SEQ ID NO: 2498474 - DNA, 25 bp, Homo sapien
gaaaaccgatgatgccaaagcttct

SEQ ID NO: 2498475 - DNA, 25 bp, Homo sapien
ccagtttggacggttcacagaatca

SEQ ID NO: 2498476 - DNA, 25 bp, Homo sapien
taacaagtggctctgcaacactggg

SEQ ID NO: 2498477 - DNA, 25 bp, Homo sapien
tgctcgggaatcccctgctttcctg

SEQ ID NO: 2498478 - DNA, 25 bp, Homo sapien
gcatgctcgggaatcccctgctttc

SEQ ID NO: 2498479 - DNA, 25 bp, Homo sapien
tgcatgctcgggaatcccctgcttt

SEQ ID NO: 2498480 - DNA, 25 bp, Homo sapien
agtctctggtttgatcttcctagca

SEQ ID NO: 2498481 - DNA, 25 bp, Homo sapien
gcttatccaacttgggttgcaggga

SEQ ID NO: 2498482 - DNA, 25 bp, Homo sapien
tctgtctttgtagatcatagaactt

SEQ ID NO: 2498483 - DNA, 25 bp, Homo sapien
aatgactgcgtagagggagatgccc

SEQ ID NO: 2498484 - DNA, 25 bp, Homo sapien
aaaaactttatgtcagtcctgacct

SEQ ID NO: 2498485 - DNA, 25 bp, Homo sapien
cagagaagcaccgtgggtcctcaag

SEQ ID NO: 2498486 - DNA, 25 bp, Homo sapien
agaagcaccgtgggtcctcaagtgc

SEQ ID NO: 2498487 - DNA, 25 bp, Homo sapien
cacagagaagcaccgtgggtcctca

SEQ ID NO: 2498488 - DNA, 25 bp, Homo sapien
gagaagcaccgtgggtcctcaagtg

SEQ ID NO: 2498489 - DNA, 25 bp, Homo sapien
cctcttgttgtcttttagcatcacc

SEQ ID NO: 2498490 - DNA, 25 bp, Homo sapien
cttgttgtcttttagcatcacccat

SEQ ID NO: 2498491 - DNA, 25 bp, Homo sapien
cttaaatatgtcctcttgttgtctt

SEQ ID NO: 2498492 - DNA, 25 bp, Homo sapien
tgtcctcttgttgtcttttagcatc

SEQ ID NO: 2498493 - DNA, 25 bp, Homo sapien
aacctaagacatgtggcgaaattcc

SEQ ID NO: 2498494 - DNA, 25 bp, Homo sapien
cagaaggcagaagattttgaattat

SEQ ID NO: 2498495 - DNA, 25 bp, Homo sapien
tagccttgtgaatagatcgctttgc

SEQ ID NO: 2498496 - DNA, 25 bp, Homo sapien
cagaaatgctctttgaccgtcactt

SEQ ID NO: 2498497 - DNA, 25 bp, Homo sapien
ccaatgggtcagttgctatagaaca

SEQ ID NO: 2498498 - DNA, 25 bp, Homo sapien
aatacatcccagtaggtccacctag

SEQ ID NO: 2498499 - DNA, 25 bp, Homo sapien
tacacggtgctattgccctaaggga

SEQ ID NO: 2498500 - DNA, 25 bp, Homo sapien
aagtcaataggtccttacacggtgc

SEQ ID NO: 2498501 - DNA, 25 bp, Homo sapien
tgtgaatgtgagattgaggtcccca

SEQ ID NO: 2498502 - DNA, 25 bp, Homo sapien
tcggctgggatgaacacttatttga

SEQ ID NO: 2498503 - DNA, 25 bp, Homo sapien
tctgattccgtggttagattgagcc

SEQ ID NO: 2498504 - DNA, 25 bp, Homo sapien
catctagataatcacctttgggcac

SEQ ID NO: 2498505 - DNA, 25 bp, Homo sapien
tgagcagttacaggcccaaagaaaa

SEQ ID NO: 2498506 - DNA, 25 bp, Homo sapien
cgaagagtctgtgcgtgaagaagca

SEQ ID NO: 2498507 - DNA, 25 bp, Homo sapien
gacaacagttccgttgccaaattct

SEQ ID NO: 2498508 - DNA, 25 bp, Homo sapien
tcttatggtcattggtgctttgggc

SEQ ID NO: 2498509 - DNA, 25 bp, Homo sapien
gaatagcctcatgtagacagccact

SEQ ID NO: 2498510 - DNA, 25 bp, Homo sapien
cattaacggttcttgtcagtggcag

SEQ ID NO: 2498511 - DNA, 25 bp, Homo sapien
gagcaagctcatcgtgttcccagtg

SEQ ID NO: 2498512 - DNA, 25 bp, Homo sapien
gcttgaagactttgagggcacctat

SEQ ID NO: 2498513 - DNA, 25 bp, Homo sapien
ggtttctaatgaagggctagcccaa

SEQ ID NO: 2498514 - DNA, 25 bp, Homo sapien
aatatcaggatatggccccttgggc

SEQ ID NO: 2498515 - DNA, 25 bp, Homo sapien
tagcccaactattctgcagcaggaa

SEQ ID NO: 2498516 - DNA, 25 bp, Homo sapien
gagcaagtgctccaactaagggttc

SEQ ID NO: 2498517 - DNA, 25 bp, Homo sapien
gttgtttgtcctcctatgtagctaa

SEQ ID NO: 2498518 - DNA, 25 bp, Homo sapien
ggccaggtgtgtcccatagtcaatg

SEQ ID NO: 2498519 - DNA, 25 bp, Homo sapien
tgaaggccaggtgtgtcccatagtc

SEQ ID NO: 2498520 - DNA, 25 bp, Homo sapien
atgttaggttgtttgtcctcctatg

SEQ ID NO: 2498521 - DNA, 25 bp, Homo sapien
agccttgagttggagaaatttggaa

SEQ ID NO: 2498522 - DNA, 25 bp, Homo sapien
ctgaaatacacatagccttgagttg

SEQ ID NO: 2498523 - DNA, 25 bp, Homo sapien
cacatagccttgagttggagaaatt

SEQ ID NO: 2498524 - DNA, 25 bp, Homo sapien
tacacatagccttgagttggagaaa

SEQ ID NO: 2498525 - DNA, 25 bp, Homo sapien
aggagggctgtcagagtggccattt

SEQ ID NO: 2498526 - DNA, 25 bp, Homo sapien
tgtgcatcctaatagctcctctgct

SEQ ID NO: 2498527 - DNA, 25 bp, Homo sapien
cttctgtgcatcctaatagctcctc

SEQ ID NO: 2498528 - DNA, 25 bp, Homo sapien
ggagggctgtcagagtggccattta

SEQ ID NO: 2498529 - DNA, 25 bp, Homo sapien
tccgtaagatttgattatgtggcag

SEQ ID NO: 2498530 - DNA, 25 bp, Homo sapien
ctttaagatggatcccaaataactg

SEQ ID NO: 2498531 - DNA, 25 bp, Homo sapien
gcatagcgtctcagttctccgtaag

SEQ ID NO: 2498532 - DNA, 25 bp, Homo sapien
tgctgctgagaagggtaacaggata

SEQ ID NO: 2498533 - DNA, 25 bp, Homo sapien
atgtcaaaacataaaggatccccat

SEQ ID NO: 2498534 - DNA, 25 bp, Homo sapien
gaaatgtcaaaacataaaggatccc

SEQ ID NO: 2498535 - DNA, 25 bp, Homo sapien
aatgtcaaaacataaaggatcccca

SEQ ID NO: 2498536 - DNA, 25 bp, Homo sapien
ctggaaatgtcaaaacataaaggat

SEQ ID NO: 2498537 - DNA, 25 bp, Homo sapien
gcagctcggattaaatagtgaatta

SEQ ID NO: 2498538 - DNA, 25 bp, Homo sapien
ctgcagctcggattaaatagtgaat

SEQ ID NO: 2498539 - DNA, 25 bp, Homo sapien
aattaaagtatagcacagcagggac

SEQ ID NO: 2498540 - DNA, 25 bp, Homo sapien
gtgaattaaagtatagcacagcagg

SEQ ID NO: 2498541 - DNA, 25 bp, Homo sapien
actgtctgagtactgaacaccacag

SEQ ID NO: 2498542 - DNA, 25 bp, Homo sapien
cactgtctgagtactgaacaccaca

SEQ ID NO: 2498543 - DNA, 25 bp, Homo sapien
acaaactatggtgttcatgccactg

SEQ ID NO: 2498544 - DNA, 25 bp, Homo sapien
tgtaacagaaacatagttgagacac

SEQ ID NO: 2498545 - DNA, 25 bp, Homo sapien
tctcacaaatcattaatgaccagtg

SEQ ID NO: 2498546 - DNA, 25 bp, Homo sapien
tgccactgaaaggattatctcttaa

SEQ ID NO: 2498547 - DNA, 25 bp, Homo sapien
ttcttcatatactgctttgtgattt

SEQ ID NO: 2498548 - DNA, 25 bp, Homo sapien
cacattgtctgataacttttctttg

SEQ ID NO: 2498549 - DNA, 25 bp, Homo sapien
gatttttcctgtgctcactcactct

SEQ ID NO: 2498550 - DNA, 25 bp, Homo sapien
tcttcacattgtctgataacttttc

SEQ ID NO: 2498551 - DNA, 25 bp, Homo sapien
taactgatcttctcatctgtagcct

SEQ ID NO: 2498552 - DNA, 25 bp, Homo sapien
tgacaaggacttgacagtaaacatg

SEQ ID NO: 2498553 - DNA, 25 bp, Homo sapien
ttgacattgaagttaggaacccatc

SEQ ID NO: 2498554 - DNA, 25 bp, Homo sapien
tctgtagccttagagactgaacttc

SEQ ID NO: 2498555 - DNA, 25 bp, Homo sapien
ctttaccagcataactccccgtggg

SEQ ID NO: 2498556 - DNA, 25 bp, Homo sapien
tgctttaccagcataactccccgtg

SEQ ID NO: 2498557 - DNA, 25 bp, Homo sapien
aacgtgtggttgctgctttaccagc

SEQ ID NO: 2498558 - DNA, 25 bp, Homo sapien
ctgactcaaatgaacgtgtggttgc

SEQ ID NO: 2498559 - DNA, 25 bp, Homo sapien
aatgaaattcagaggaaacagaaat

SEQ ID NO: 2498560 - DNA, 25 bp, Homo sapien
cctgtagtagtggtttggaagtgct

SEQ ID NO: 2498561 - DNA, 25 bp, Homo sapien
gtgtattttcataaacttcagcaac

SEQ ID NO: 2498562 - DNA, 25 bp, Homo sapien
cagtgcaccgtcactctttcaagtg

SEQ ID NO: 2498563 - DNA, 25 bp, Homo sapien
taatagccaccgtagagataagaca

SEQ ID NO: 2498564 - DNA, 25 bp, Homo sapien
tccccttccatgcaatatgcattaa

SEQ ID NO: 2498565 - DNA, 25 bp, Homo sapien
gagataagacatttccgatccttca

SEQ ID NO: 2498566 - DNA, 25 bp, Homo sapien
atatgcattaatagccaccgtagag

SEQ ID NO: 2498567 - DNA, 25 bp, Homo sapien
tcaggaatatcaatcagcagaagat

SEQ ID NO: 2498568 - DNA, 25 bp, Homo sapien
aattctactcaggaatatcaatcag

SEQ ID NO: 2498569 - DNA, 25 bp, Homo sapien
cagcagaagattaacttgcaattta

SEQ ID NO: 2498570 - DNA, 25 bp, Homo sapien
tcaatcagcagaagattaacttgca

SEQ ID NO: 2498571 - DNA, 25 bp, Homo sapien
tagtaaagctactctggcaagtgga

SEQ ID NO: 2498572 - DNA, 25 bp, Homo sapien
tgcctggcaggtgagactgtagcct

SEQ ID NO: 2498573 - DNA, 25 bp, Homo sapien
tgatggtcagccaagatctgcagct

SEQ ID NO: 2498574 - DNA, 25 bp, Homo sapien
tggagagaaatgatcaggcagcatc

SEQ ID NO: 2498575 - DNA, 25 bp, Homo sapien
gccagcattctgagtcataccaagt

SEQ ID NO: 2498576 - DNA, 25 bp, Homo sapien
cataccaagttggtaagactctcca

SEQ ID NO: 2498577 - DNA, 25 bp, Homo sapien
tgtaccaaccatcaggaagaagcct

SEQ ID NO: 2498578 - DNA, 25 bp, Homo sapien
gagataatggatatgcaagaacctc

SEQ ID NO: 2498579 - DNA, 25 bp, Homo sapien
gaagacattcccaacctttcagatg

SEQ ID NO: 2498580 - DNA, 25 bp, Homo sapien
tcctatgacttgactgtgacagacc

SEQ ID NO: 2498581 - DNA, 25 bp, Homo sapien
tgaggctccaaggtcctatgagaaa

SEQ ID NO: 2498582 - DNA, 25 bp, Homo sapien
tacaaaccgtactataacactggcc

SEQ ID NO: 2498583 - DNA, 25 bp, Homo sapien
aaaatgtgtagcaccttcctctgct

SEQ ID NO: 2498584 - DNA, 25 bp, Homo sapien
taactctagctttcagaaacattaa

SEQ ID NO: 2498585 - DNA, 25 bp, Homo sapien
gctcctcaggtggttgtaatgtaac

SEQ ID NO: 2498586 - DNA, 25 bp, Homo sapien
accttatgtggagttgtaatcccca

SEQ ID NO: 2498587 - DNA, 25 bp, Homo sapien
taacccattcagctactcaatgtct

SEQ ID NO: 2498588 - DNA, 25 bp, Homo sapien
gatgaattcaccttttagtcctcct

SEQ ID NO: 2498589 - DNA, 25 bp, Homo sapien
tcgtctgtggacttactgttactag

SEQ ID NO: 2498590 - DNA, 25 bp, Homo sapien
gtattataatattcctcgtctgtgg

SEQ ID NO: 2498591 - DNA, 25 bp, Homo sapien
caggctagttatccttctgtactga

SEQ ID NO: 2498592 - DNA, 25 bp, Homo sapien
caccaaatattttgcaggaagagct

SEQ ID NO: 2498593 - DNA, 25 bp, Homo sapien
tatagtaccatgtgatctggcacct

SEQ ID NO: 2498594 - DNA, 25 bp, Homo sapien
cctaatcaccaaacgttacagtctg

SEQ ID NO: 2498595 - DNA, 25 bp, Homo sapien
tactctgtatatgtggagacaaaag

SEQ ID NO: 2498596 - DNA, 25 bp, Homo sapien
tatagtctagtggatgatacaaacc

SEQ ID NO: 2498597 - DNA, 25 bp, Homo sapien
gacacttacagaaggcatggcacat

SEQ ID NO: 2498598 - DNA, 25 bp, Homo sapien
tctctaaactagaattgggtgacta

SEQ ID NO: 2498599 - DNA, 25 bp, Homo sapien
tatcttccaggcattgcctcatata

SEQ ID NO: 2498600 - DNA, 25 bp, Homo sapien
gagttaggaagatcatcccttcttg

SEQ ID NO: 2498601 - DNA, 25 bp, Homo sapien
agctagatgagttaggaagatcatc

SEQ ID NO: 2498602 - DNA, 25 bp, Homo sapien
attgcctcatatattaagccatttc

SEQ ID NO: 2498603 - DNA, 25 bp, Homo sapien
tatcaggccgggagtagaaaagttc

SEQ ID NO: 2498604 - DNA, 25 bp, Homo sapien
catcatttagagcacttttcctgca

SEQ ID NO: 2498605 - DNA, 25 bp, Homo sapien
tattgcttagcattatatcaggccg

SEQ ID NO: 2498606 - DNA, 25 bp, Homo sapien
tcaatcaacccgagttccaggactg

SEQ ID NO: 2498607 - DNA, 25 bp, Homo sapien
cctctttctgatcagccaggaatat

SEQ ID NO: 2498608 - DNA, 25 bp, Homo sapien
ttcttggcagcttctccctgggctg

SEQ ID NO: 2498609 - DNA, 25 bp, Homo sapien
cctgggctgccaaatctgcctcttt

SEQ ID NO: 2498610 - DNA, 25 bp, Homo sapien
tcagccaggaatatggcttgctcct

SEQ ID NO: 2498611 - DNA, 25 bp, Homo sapien
ggttgaggataaaagggcactacat

SEQ ID NO: 2498612 - DNA, 25 bp, Homo sapien
tttgttccgctgttaacctccgtca

SEQ ID NO: 2498613 - DNA, 25 bp, Homo sapien
tggttagagcaatgggaacttctgg

SEQ ID NO: 2498614 - DNA, 25 bp, Homo sapien
aagattgtcaatctcacaaagtggg

SEQ ID NO: 2498615 - DNA, 25 bp, Homo sapien
agcttctgctgaatttttgaacttg

SEQ ID NO: 2498616 - DNA, 25 bp, Homo sapien
gtttttttcaaagcttctgctgaat

SEQ ID NO: 2498617 - DNA, 25 bp, Homo sapien
ttctgctgaatttttgaacttgtaa

SEQ ID NO: 2498618 - DNA, 25 bp, Homo sapien
tgctgaatttttgaacttgtaaagg

SEQ ID NO: 2498619 - DNA, 25 bp, Homo sapien
tggtgaacacctggttgacgttccc

SEQ ID NO: 2498620 - DNA, 25 bp, Homo sapien
caccaatgaaatttatcaacttcca

SEQ ID NO: 2498621 - DNA, 25 bp, Homo sapien
cctttttgatctacacaccaatgaa

SEQ ID NO: 2498622 - DNA, 25 bp, Homo sapien
gttgacgttccctttttgatctaca

SEQ ID NO: 2498623 - DNA, 25 bp, Homo sapien
tgtacctcaaccctgggcaatcagt

SEQ ID NO: 2498624 - DNA, 25 bp, Homo sapien
gctctagtaggaagatccagcatcc

SEQ ID NO: 2498625 - DNA, 25 bp, Homo sapien
ggcaatcagtgagctctagtaggaa

SEQ ID NO: 2498626 - DNA, 25 bp, Homo sapien
tcataattcttgtacctcaaccctg

SEQ ID NO: 2498627 - DNA, 25 bp, Homo sapien
gggaagtcttactgagatccatgca

SEQ ID NO: 2498628 - DNA, 25 bp, Homo sapien
tcggggaagtcttactgagatccat

SEQ ID NO: 2498629 - DNA, 25 bp, Homo sapien
gaagtcttactgagatccatgcaag

SEQ ID NO: 2498630 - DNA, 25 bp, Homo sapien
gaacttcggggaagtcttactgaga

SEQ ID NO: 2498631 - DNA, 25 bp, Homo sapien
tgtcatgatgctttagaaggagtgt

SEQ ID NO: 2498632 - DNA, 25 bp, Homo sapien
ttacaaggcgttgtgtcatgatgct

SEQ ID NO: 2498633 - DNA, 25 bp, Homo sapien
tcaggacatctgaaagttacaaggc

SEQ ID NO: 2498634 - DNA, 25 bp, Homo sapien
atgctttagaaggagtgtggtagaa

SEQ ID NO: 2498635 - DNA, 25 bp, Homo sapien
gaaaatatcgctgttgttcccgttg

SEQ ID NO: 2498636 - DNA, 25 bp, Homo sapien
tgggaagaaaatatcgctgttgttc

SEQ ID NO: 2498637 - DNA, 25 bp, Homo sapien
aaatatcgctgttgttcccgttggc

SEQ ID NO: 2498638 - DNA, 25 bp, Homo sapien
aagaaaatatcgctgttgttcccgt

SEQ ID NO: 2498639 - DNA, 25 bp, Homo sapien
ctttattagattcattagcacaatt

SEQ ID NO: 2498640 - DNA, 25 bp, Homo sapien
tattagattcattagcacaattcat

SEQ ID NO: 2498641 - DNA, 25 bp, Homo sapien
tctaagcatgcttcccctgtcagct

SEQ ID NO: 2498642 - DNA, 25 bp, Homo sapien
cgtctaagcatgcttcccctgtcag

SEQ ID NO: 2498643 - DNA, 25 bp, Homo sapien
ctgctggagagtatttctcaagtct

SEQ ID NO: 2498644 - DNA, 25 bp, Homo sapien
tggagagtatttctcaagtcttcct

SEQ ID NO: 2498645 - DNA, 25 bp, Homo sapien
ctgcttgataccctctagcaaacag

SEQ ID NO: 2498646 - DNA, 25 bp, Homo sapien
ctctagcaaacagttacctttcagg

SEQ ID NO: 2498647 - DNA, 25 bp, Homo sapien
ctggggcccttaagaggagccctca

SEQ ID NO: 2498648 - DNA, 25 bp, Homo sapien
tggggcccttaagaggagccctcat

SEQ ID NO: 2498649 - DNA, 25 bp, Homo sapien
gacatcagggtaggagcccaccgag

SEQ ID NO: 2498650 - DNA, 25 bp, Homo sapien
atcagggtaggagcccaccgagctg

SEQ ID NO: 2498651 - DNA, 25 bp, Homo sapien
aaatgtcttcagagcgcttatgacc

SEQ ID NO: 2498652 - DNA, 25 bp, Homo sapien
cttatgaccaattggaagggccgtc

SEQ ID NO: 2498653 - DNA, 25 bp, Homo sapien
tgaccaattggaagggccgtcttcc

SEQ ID NO: 2498654 - DNA, 25 bp, Homo sapien
cagagcgcttatgaccaattggaag

SEQ ID NO: 2498655 - DNA, 25 bp, Homo sapien
gctgtaagtaggatccaggagctat

SEQ ID NO: 2498656 - DNA, 25 bp, Homo sapien
tctccctgcattgatagaatacatc

SEQ ID NO: 2498657 - DNA, 25 bp, Homo sapien
ttaagtctggtacccattcaagccg

SEQ ID NO: 2498658 - DNA, 25 bp, Homo sapien
gctatacaactgaagatggctttcc

SEQ ID NO: 2498659 - DNA, 25 bp, Homo sapien
cttgatctttcctctaattctcctt

SEQ ID NO: 2498660 - DNA, 25 bp, Homo sapien
gatctttcctctaattctcctttgc

SEQ ID NO: 2498661 - DNA, 25 bp, Homo sapien
tccttgatctttcctctaattctcc

SEQ ID NO: 2498662 - DNA, 25 bp, Homo sapien
tttccttgatctttcctctaattct

SEQ ID NO: 2498663 - DNA, 25 bp, Homo sapien
ggaggctataaaagtcacccattac

SEQ ID NO: 2498664 - DNA, 25 bp, Homo sapien
gacaatagtctctctgaatagggtg

SEQ ID NO: 2498665 - DNA, 25 bp, Homo sapien
cttagagacaacatggaatagcaga

SEQ ID NO: 2498666 - DNA, 25 bp, Homo sapien
aaagtaaagtcatcaggcacacagt

SEQ ID NO: 2498667 - DNA, 25 bp, Homo sapien
tgtcattatttaacctgcctggcgg

SEQ ID NO: 2498668 - DNA, 25 bp, Homo sapien
gcccaaattcgtagtgcagcctgga

SEQ ID NO: 2498669 - DNA, 25 bp, Homo sapien
tctggagtggtgaataacagtgcaa

SEQ ID NO: 2498670 - DNA, 25 bp, Homo sapien
tggaagaccctagttgcaaggctgt

SEQ ID NO: 2498671 - DNA, 25 bp, Homo sapien
tgctgcatagcaaaccactctaaat

SEQ ID NO: 2498672 - DNA, 25 bp, Homo sapien
ctgggctcagccaaatttctctttg

SEQ ID NO: 2498673 - DNA, 25 bp, Homo sapien
caggagactctcatgaggccaggag

SEQ ID NO: 2498674 - DNA, 25 bp, Homo sapien
tgtgatggaagtccgtgactggaac

SEQ ID NO: 2498675 - DNA, 25 bp, Homo sapien
atgttctccactggcagaaagtgat

SEQ ID NO: 2498676 - DNA, 25 bp, Homo sapien
agaaagtgatttccagggaccagca

SEQ ID NO: 2498677 - DNA, 25 bp, Homo sapien
tctccactggcagaaagtgatttcc

SEQ ID NO: 2498678 - DNA, 25 bp, Homo sapien
gaaagtgatttccagggaccagcat

SEQ ID NO: 2498679 - DNA, 25 bp, Homo sapien
tttctctcattaaatcaaaaagtac

SEQ ID NO: 2498680 - DNA, 25 bp, Homo sapien
gaatttctctcattaaatcaaaaag

SEQ ID NO: 2498681 - DNA, 25 bp, Homo sapien
tcgaatttctctcattaaatcaaaa

SEQ ID NO: 2498682 - DNA, 25 bp, Homo sapien
aatttctctcattaaatcaaaaagt

SEQ ID NO: 2498683 - DNA, 25 bp, Homo sapien
cttgtcaacattagctgtgttttag

SEQ ID NO: 2498684 - DNA, 25 bp, Homo sapien
gctgtgttttagcagatgtttccac

SEQ ID NO: 2498685 - DNA, 25 bp, Homo sapien
tgtcaacattagctgtgttttagca

SEQ ID NO: 2498686 - DNA, 25 bp, Homo sapien
tcaacattagctgtgttttagcaga

SEQ ID NO: 2498687 - DNA, 25 bp, Homo sapien
gatttgttaccaaccagtagaaatg

SEQ ID NO: 2498688 - DNA, 25 bp, Homo sapien
ctgaagtcagctgtagctgcaaagg

SEQ ID NO: 2498689 - DNA, 25 bp, Homo sapien
tgaagtcagctgtagctgcaaagga

SEQ ID NO: 2498690 - DNA, 25 bp, Homo sapien
taaatctgatttgttaccaaccagt

SEQ ID NO: 2498691 - DNA, 25 bp, Homo sapien
aatagttgtccctaattgcagcata

SEQ ID NO: 2498692 - DNA, 25 bp, Homo sapien
gctgtttctaagataccgatctgta

SEQ ID NO: 2498693 - DNA, 25 bp, Homo sapien
agctgtttctaagataccgatctgt

SEQ ID NO: 2498694 - DNA, 25 bp, Homo sapien
cccctctctgcttcggaaatagttg

SEQ ID NO: 2498695 - DNA, 25 bp, Homo sapien
gtagagtcagagctgccttgcccac

SEQ ID NO: 2498696 - DNA, 25 bp, Homo sapien
ctgtagagtcagagctgccttgccc

SEQ ID NO: 2498697 - DNA, 25 bp, Homo sapien
agagtcagagctgccttgcccacac

SEQ ID NO: 2498698 - DNA, 25 bp, Homo sapien
tgtagagtcagagctgccttgccca

SEQ ID NO: 2498699 - DNA, 25 bp, Homo sapien
actttgtgtaaggccaaattattct

SEQ ID NO: 2498700 - DNA, 25 bp, Homo sapien
gactttgtgtaaggccaaattattc

SEQ ID NO: 2498701 - DNA, 25 bp, Homo sapien
gatgactttgtgtaaggccaaatta

SEQ ID NO: 2498702 - DNA, 25 bp, Homo sapien
tgactttgtgtaaggccaaattatt

SEQ ID NO: 2498703 - DNA, 25 bp, Homo sapien
ccaaaaggcagctctgctttgggcc

SEQ ID NO: 2498704 - DNA, 25 bp, Homo sapien
tttgggccagccacccctgcaggag

SEQ ID NO: 2498705 - DNA, 25 bp, Homo sapien
aaggcagctctgctttgggccagcc

SEQ ID NO: 2498706 - DNA, 25 bp, Homo sapien
ctgctttgggccagccacccctgca

SEQ ID NO: 2498707 - DNA, 25 bp, Homo sapien
ttttgcacccatagtaggttcccgc

SEQ ID NO: 2498708 - DNA, 25 bp, Homo sapien
taggatagatgtggggacacacatc

SEQ ID NO: 2498709 - DNA, 25 bp, Homo sapien
caggagatgtcgtttttttgcaccc

SEQ ID NO: 2498710 - DNA, 25 bp, Homo sapien
tatggtccaggagatgtcgtttttt

SEQ ID NO: 2498711 - DNA, 25 bp, Homo sapien
cttcaatatccaaaagacttaaata

SEQ ID NO: 2498712 - DNA, 25 bp, Homo sapien
tgtcttcaatatccaaaagacttaa

SEQ ID NO: 2498713 - DNA, 25 bp, Homo sapien
gtccctatcacctctagcatgtctt

SEQ ID NO: 2498714 - DNA, 25 bp, Homo sapien
agcatgtcttcaatatccaaaagac

SEQ ID NO: 2498715 - DNA, 25 bp, Homo sapien
tgggacggagctgcttctcccgcat

SEQ ID NO: 2498716 - DNA, 25 bp, Homo sapien
tatgggacggagctgcttctcccgc

SEQ ID NO: 2498717 - DNA, 25 bp, Homo sapien
ctatgggacggagctgcttctcccg

SEQ ID NO: 2498718 - DNA, 25 bp, Homo sapien
atgggacggagctgcttctcccgca

SEQ ID NO: 2498719 - DNA, 25 bp, Homo sapien
gggatgctctagaccgagtactgcc

SEQ ID NO: 2498720 - DNA, 25 bp, Homo sapien
ggatgctctagaccgagtactgccc

SEQ ID NO: 2498721 - DNA, 25 bp, Homo sapien
acttgaggctgcaccccgggcaagt

SEQ ID NO: 2498722 - DNA, 25 bp, Homo sapien
gcagcagttagcagcggcaacttga

SEQ ID NO: 2498723 - DNA, 25 bp, Homo sapien
gttctttaaggcgtctggtattctg

SEQ ID NO: 2498724 - DNA, 25 bp, Homo sapien
tactttggagcgcaaggttctttaa

SEQ ID NO: 2498725 - DNA, 25 bp, Homo sapien
tattctgaggcttcctgcatttaca

SEQ ID NO: 2498726 - DNA, 25 bp, Homo sapien
cctgctcactgtcacttctattttt

SEQ ID NO: 2498727 - DNA, 25 bp, Homo sapien
cagtttctgtccattgtaaccagtc

SEQ ID NO: 2498728 - DNA, 25 bp, Homo sapien
gtttctgtccattgtaaccagtctt

SEQ ID NO: 2498729 - DNA, 25 bp, Homo sapien
tctgtccattgtaaccagtctttca

SEQ ID NO: 2498730 - DNA, 25 bp, Homo sapien
cacagtttctgtccattgtaaccag

SEQ ID NO: 2498731 - DNA, 25 bp, Homo sapien
gattctcttcataaactcctcacga

SEQ ID NO: 2498732 - DNA, 25 bp, Homo sapien
gttcccttacattttgatacgcatc

SEQ ID NO: 2498733 - DNA, 25 bp, Homo sapien
tggcagagacttgtacccaagcctt

SEQ ID NO: 2498734 - DNA, 25 bp, Homo sapien
tcttttactctgattgagcctcagt

SEQ ID NO: 2498735 - DNA, 25 bp, Homo sapien
tattgaaatgagtaactcatgagaa

SEQ ID NO: 2498736 - DNA, 25 bp, Homo sapien
actcatgagaatattacttttttga

SEQ ID NO: 2498737 - DNA, 25 bp, Homo sapien
ttgtgacatttaggattataggatt

SEQ ID NO: 2498738 - DNA, 25 bp, Homo sapien
taggattaagtaatcagcatattaa

SEQ ID NO: 2498739 - DNA, 25 bp, Homo sapien
cctaatgtttattccgtactgtaca

SEQ ID NO: 2498740 - DNA, 25 bp, Homo sapien
aatgtttattccgtactgtacaagg

SEQ ID NO: 2498741 - DNA, 25 bp, Homo sapien
ctaatgtttattccgtactgtacaa

SEQ ID NO: 2498742 - DNA, 25 bp, Homo sapien
tgtttattccgtactgtacaaggca

SEQ ID NO: 2498743 - DNA, 25 bp, Homo sapien
aaacttaaggtggtgtagtatatat

SEQ ID NO: 2498744 - DNA, 25 bp, Homo sapien
cttaaggtggtgtagtatatatgca

SEQ ID NO: 2498745 - DNA, 25 bp, Homo sapien
taaggtggtgtagtatatatgcagt

SEQ ID NO: 2498746 - DNA, 25 bp, Homo sapien
ggtggtgtagtatatatgcagtata

SEQ ID NO: 2498747 - DNA, 25 bp, Homo sapien
tgagcttccagggacttgcatgtat

SEQ ID NO: 2498748 - DNA, 25 bp, Homo sapien
gcttccagggacttgcatgtatatt

SEQ ID NO: 2498749 - DNA, 25 bp, Homo sapien
tatgccgatgtctgagcttccaggg

SEQ ID NO: 2498750 - DNA, 25 bp, Homo sapien
ttcccatggcatatgccgatgtctg

SEQ ID NO: 2498751 - DNA, 25 bp, Homo sapien
gtaaaatatattgcctggaaccagc

SEQ ID NO: 2498752 - DNA, 25 bp, Homo sapien
gtgtcccactgtctgaaagcattta

SEQ ID NO: 2498753 - DNA, 25 bp, Homo sapien
gcaaacatcgtcaaacctgaggtcc

SEQ ID NO: 2498754 - DNA, 25 bp, Homo sapien
tcgccatccgtatgaacaacagttg

SEQ ID NO: 2498755 - DNA, 25 bp, Homo sapien
tatgtgtcattcagggcatctctgg

SEQ ID NO: 2498756 - DNA, 25 bp, Homo sapien
tggtgggataaacagaaaagactcc

SEQ ID NO: 2498757 - DNA, 25 bp, Homo sapien
tagcttagtcggcatagcatctggt

SEQ ID NO: 2498758 - DNA, 25 bp, Homo sapien
ccagctttcgaaggagactccacta

SEQ ID NO: 2498759 - DNA, 25 bp, Homo sapien
gttggacaattctagcaagagacac

SEQ ID NO: 2498760 - DNA, 25 bp, Homo sapien
cattattctgttggacaattctagc

SEQ ID NO: 2498761 - DNA, 25 bp, Homo sapien
gggaacttcgccatagatatccatt

SEQ ID NO: 2498762 - DNA, 25 bp, Homo sapien
tcgccatagatatccattattctgt

SEQ ID NO: 2498763 - DNA, 25 bp, Homo sapien
aacaaatgttctcgcgtgcttcctg

SEQ ID NO: 2498764 - DNA, 25 bp, Homo sapien
caatctggcaatatagtgacctgca

SEQ ID NO: 2498765 - DNA, 25 bp, Homo sapien
tgaagaggaccaagttcagagcggc

SEQ ID NO: 2498766 - DNA, 25 bp, Homo sapien
tcagagcggcaccatcagtgtcatg

SEQ ID NO: 2498767 - DNA, 25 bp, Homo sapien
ccggcacatgctcactcattttgga

SEQ ID NO: 2498768 - DNA, 25 bp, Homo sapien
tgtccccggcacatgctcactcatt

SEQ ID NO: 2498769 - DNA, 25 bp, Homo sapien
agctgtccccggcacatgctcactc

SEQ ID NO: 2498770 - DNA, 25 bp, Homo sapien
tgcttcagctgtccccggcacatgc

SEQ ID NO: 2498771 - DNA, 25 bp, Homo sapien
cttgtagtaggaaaactcaaatctt

SEQ ID NO: 2498772 - DNA, 25 bp, Homo sapien
aataacagagtgttgccatgtcagc

SEQ ID NO: 2498773 - DNA, 25 bp, Homo sapien
ataacagagtgttgccatgtcagct

SEQ ID NO: 2498774 - DNA, 25 bp, Homo sapien
tcaaataacagagtgttgccatgtc

SEQ ID NO: 2498775 - DNA, 25 bp, Homo sapien
catggttcattatctgtagatgatc

SEQ ID NO: 2498776 - DNA, 25 bp, Homo sapien
actctatcaaatccaaagttgtcat

SEQ ID NO: 2498777 - DNA, 25 bp, Homo sapien
tgtcatggttcattatctgtagatg

SEQ ID NO: 2498778 - DNA, 25 bp, Homo sapien
gttgtcatggttcattatctgtaga

SEQ ID NO: 2498779 - DNA, 25 bp, Homo sapien
aattctgctattctactgggactcc

SEQ ID NO: 2498780 - DNA, 25 bp, Homo sapien
catgttgcttactggcatggatgcc

SEQ ID NO: 2498781 - DNA, 25 bp, Homo sapien
tattccttatcagaacaaccaggtg

SEQ ID NO: 2498782 - DNA, 25 bp, Homo sapien
gaagcaactgcacatccatagaatc

SEQ ID NO: 2498783 - DNA, 25 bp, Homo sapien
tgtaaagatgtaatcacctgaagca

SEQ ID NO: 2498784 - DNA, 25 bp, Homo sapien
cctgaagcagctatataagcaacag

SEQ ID NO: 2498785 - DNA, 25 bp, Homo sapien
gcagctttctccagagagtaattaa

SEQ ID NO: 2498786 - DNA, 25 bp, Homo sapien
tataagcaacagcagtctcaagagc

SEQ ID NO: 2498787 - DNA, 25 bp, Homo sapien
ggctagtatgtaagaagtggttccc

SEQ ID NO: 2498788 - DNA, 25 bp, Homo sapien
ggatcaagtgactcctgtatggctg

SEQ ID NO: 2498789 - DNA, 25 bp, Homo sapien
aattgccaaggccaaagagtggcta

SEQ ID NO: 2498790 - DNA, 25 bp, Homo sapien
tggttaagactagccaatggatcaa

SEQ ID NO: 2498791 - DNA, 25 bp, Homo sapien
gatattctcggaaagcttcagagct

SEQ ID NO: 2498792 - DNA, 25 bp, Homo sapien
taatgggtaattaagatgtcttgca

SEQ ID NO: 2498793 - DNA, 25 bp, Homo sapien
gcgtagtaagtctgattgcaatggg

SEQ ID NO: 2498794 - DNA, 25 bp, Homo sapien
ctatcagccatgctgatgcttttgg

SEQ ID NO: 2498795 - DNA, 25 bp, Homo sapien
ccagattcacaatactgagctctga

SEQ ID NO: 2498796 - DNA, 25 bp, Homo sapien
tcatggcactttcccctcattgctg

SEQ ID NO: 2498797 - DNA, 25 bp, Homo sapien
gattcacaatactgagctctgataa

SEQ ID NO: 2498798 - DNA, 25 bp, Homo sapien
tggcactttcccctcattgctgtca

SEQ ID NO: 2498799 - DNA, 25 bp, Homo sapien
tgctatgtgagtctgaggtttgtac

SEQ ID NO: 2498800 - DNA, 25 bp, Homo sapien
tactattactgtaggttaatgtttc

SEQ ID NO: 2498801 - DNA, 25 bp, Homo sapien
tgtctgtgaatggaatactgctatg

SEQ ID NO: 2498802 - DNA, 25 bp, Homo sapien
gggtttcttgttattgctagatgaa

SEQ ID NO: 2498803 - DNA, 25 bp, Homo sapien
ttctcactgattatgcctttgttcc

SEQ ID NO: 2498804 - DNA, 25 bp, Homo sapien
tagaggtcatcctaatcatttcacc

SEQ ID NO: 2498805 - DNA, 25 bp, Homo sapien
caagtcatccctatggaagttcaaa

SEQ ID NO: 2498806 - DNA, 25 bp, Homo sapien
cataaagtcctgtcctgctatcagt

SEQ ID NO: 2498807 - DNA, 25 bp, Homo sapien
gaatttgtagcggtaagaggtccag

SEQ ID NO: 2498808 - DNA, 25 bp, Homo sapien
tgagaacctggaatttgtagcggta

SEQ ID NO: 2498809 - DNA, 25 bp, Homo sapien
gttgaggagtagacagaccacacat

SEQ ID NO: 2498810 - DNA, 25 bp, Homo sapien
tttttgggaatcagcacagtcagtg

SEQ ID NO: 2498811 - DNA, 25 bp, Homo sapien
gacctttctcattaaagaactgtac

SEQ ID NO: 2498812 - DNA, 25 bp, Homo sapien
gcttccttataggaatattgccatg

SEQ ID NO: 2498813 - DNA, 25 bp, Homo sapien
tcatgtgataagtgccctggcctct

SEQ ID NO: 2498814 - DNA, 25 bp, Homo sapien
gaatcataagagacattctgctctg

SEQ ID NO: 2498815 - DNA, 25 bp, Homo sapien
cacttggggatgctaaacgtggaag

SEQ ID NO: 2498816 - DNA, 25 bp, Homo sapien
cttggggatgctaaacgtggaagca

SEQ ID NO: 2498817 - DNA, 25 bp, Homo sapien
cttcacttggggatgctaaacgtgg

SEQ ID NO: 2498818 - DNA, 25 bp, Homo sapien
gggatgctaaacgtggaagcaggaa

SEQ ID NO: 2498819 - DNA, 25 bp, Homo sapien
gtagacagcactgttcctattcggc

SEQ ID NO: 2498820 - DNA, 25 bp, Homo sapien
ctgggagctgtagacagcactgttc

SEQ ID NO: 2498821 - DNA, 25 bp, Homo sapien
tgtagacagcactgttcctattcgg

SEQ ID NO: 2498822 - DNA, 25 bp, Homo sapien
gagctgtagacagcactgttcctat

SEQ ID NO: 2498823 - DNA, 25 bp, Homo sapien
cttactgtatccagcaaattccaaa

SEQ ID NO: 2498824 - DNA, 25 bp, Homo sapien
catagttgaatgttacaaacttact

SEQ ID NO: 2498825 - DNA, 25 bp, Homo sapien
aactatatgctagaacttgcagaga

SEQ ID NO: 2498826 - DNA, 25 bp, Homo sapien
gcaaattccaaactatatgctagaa

SEQ ID NO: 2498827 - DNA, 25 bp, Homo sapien
acctgtggtaatagtttctctgtca

SEQ ID NO: 2498828 - DNA, 25 bp, Homo sapien
gacctcagagaaaccgtctgcctgc

SEQ ID NO: 2498829 - DNA, 25 bp, Homo sapien
ggctgttgtttcattgtgcagagaa

SEQ ID NO: 2498830 - DNA, 25 bp, Homo sapien
gaaggtctatcaggtaatagccctc

SEQ ID NO: 2498831 - DNA, 25 bp, Homo sapien
ccatccgttcattcaaccaaggctt

SEQ ID NO: 2498832 - DNA, 25 bp, Homo sapien
gaaatgaactcatgagcagacctca

SEQ ID NO: 2498833 - DNA, 25 bp, Homo sapien
acatatgttgaaatgaactcatgag

SEQ ID NO: 2498834 - DNA, 25 bp, Homo sapien
gttgaaatgaactcatgagcagacc

SEQ ID NO: 2498835 - DNA, 25 bp, Homo sapien
gaaggcctgagtaggcaagttgctc

SEQ ID NO: 2498836 - DNA, 25 bp, Homo sapien
tccaaatagagaagcactgatgtag

SEQ ID NO: 2498837 - DNA, 25 bp, Homo sapien
aatccacgagcagctctccaaatag

SEQ ID NO: 2498838 - DNA, 25 bp, Homo sapien
taagattctatctgggctcctctga

SEQ ID NO: 2498839 - DNA, 25 bp, Homo sapien
ttatccatgcggacccacaatgctc

SEQ ID NO: 2498840 - DNA, 25 bp, Homo sapien
tcaatttcagaaggagcaaccaact

SEQ ID NO: 2498841 - DNA, 25 bp, Homo sapien
tccacagtggatgactgctgactgc

SEQ ID NO: 2498842 - DNA, 25 bp, Homo sapien
caatgctccgtgttaaattcgccaa

SEQ ID NO: 2498843 - DNA, 25 bp, Homo sapien
tcagaggaaagtaatggacatttgt

SEQ ID NO: 2498844 - DNA, 25 bp, Homo sapien
tgaaataatgggacttacactgtat

SEQ ID NO: 2498845 - DNA, 25 bp, Homo sapien
gaaacatgatttagcctgtcctcta

SEQ ID NO: 2498846 - DNA, 25 bp, Homo sapien
aataacatctgcgacataggcctgg

SEQ ID NO: 2498847 - DNA, 25 bp, Homo sapien
ttttgtcttctgcagtagcataaat

SEQ ID NO: 2498848 - DNA, 25 bp, Homo sapien
ttgtcttctgcagtagcataaatgc

SEQ ID NO: 2498849 - DNA, 25 bp, Homo sapien
gaatttcatgcccaaatcaacttga

SEQ ID NO: 2498850 - DNA, 25 bp, Homo sapien
attacttttatatgagctttttgtc

SEQ ID NO: 2498851 - DNA, 25 bp, Homo sapien
ttcactgaggaagtagttataatct

SEQ ID NO: 2498852 - DNA, 25 bp, Homo sapien
tctgatgtcagttgacattctgata

SEQ ID NO: 2498853 - DNA, 25 bp, Homo sapien
cttctgtgctgatattctgatgtca

SEQ ID NO: 2498854 - DNA, 25 bp, Homo sapien
cactgaggaagtagttataatcttt

SEQ ID NO: 2498855 - DNA, 25 bp, Homo sapien
tggcctcagtccaatgagctgccat

SEQ ID NO: 2498856 - DNA, 25 bp, Homo sapien
gagctgccattgaatcaggtacaca

SEQ ID NO: 2498857 - DNA, 25 bp, Homo sapien
cacattcctcctcaaatttgctgtg

SEQ ID NO: 2498858 - DNA, 25 bp, Homo sapien
gccaaacagtgtcattggcctcagt

SEQ ID NO: 2498859 - DNA, 25 bp, Homo sapien
tgtgcatgagctctttcccaccttt

SEQ ID NO: 2498860 - DNA, 25 bp, Homo sapien
gtcacacaatgtgcatgagctcttt

SEQ ID NO: 2498861 - DNA, 25 bp, Homo sapien
cacaatgtgcatgagctctttccca

SEQ ID NO: 2498862 - DNA, 25 bp, Homo sapien
ctgtagggggtggtcacacaatgtg

SEQ ID NO: 2498863 - DNA, 25 bp, Homo sapien
caaggctaacactttgtaatgcatc

SEQ ID NO: 2498864 - DNA, 25 bp, Homo sapien
ggacactttatatactgtctcataa

SEQ ID NO: 2498865 - DNA, 25 bp, Homo sapien
tgtttttacctaacactcccatgta

SEQ ID NO: 2498866 - DNA, 25 bp, Homo sapien
atttccaggtttatagatggctacc

SEQ ID NO: 2498867 - DNA, 25 bp, Homo sapien
ttgacactgctaccctggagaaatt

SEQ ID NO: 2498868 - DNA, 25 bp, Homo sapien
gagccaggatcttgggacaataaac

SEQ ID NO: 2498869 - DNA, 25 bp, Homo sapien
tattggcccattgaaagatttcctc

SEQ ID NO: 2498870 - DNA, 25 bp, Homo sapien
tgtcttttgagtgaacctaggtaac

SEQ ID NO: 2498871 - DNA, 25 bp, Homo sapien
tgaggacaaggaaaactctggcctg

SEQ ID NO: 2498872 - DNA, 25 bp, Homo sapien
cttgaaatgctgatttatgcactgg

SEQ ID NO: 2498873 - DNA, 25 bp, Homo sapien
tcttctcttgggctagttatgtcta

SEQ ID NO: 2498874 - DNA, 25 bp, Homo sapien
tgattgtcctaatagccaccattgg

SEQ ID NO: 2498875 - DNA, 25 bp, Homo sapien
gagtttatcacctgtgactttacag

SEQ ID NO: 2498876 - DNA, 25 bp, Homo sapien
tctcacctgtatagaaaatgcattc

SEQ ID NO: 2498877 - DNA, 25 bp, Homo sapien
gtataactcatgaggcagggaaggc

SEQ ID NO: 2498878 - DNA, 25 bp, Homo sapien
cagtgtatggtttttatagagcaga

SEQ ID NO: 2498879 - DNA, 25 bp, Homo sapien
tttgagccagaagttagtgctaagt

SEQ ID NO: 2498880 - DNA, 25 bp, Homo sapien
tgagccagaagttagtgctaagtac

SEQ ID NO: 2498881 - DNA, 25 bp, Homo sapien
ttgagccagaagttagtgctaagta

SEQ ID NO: 2498882 - DNA, 25 bp, Homo sapien
tttgcagataaccaagcaggtaatg

SEQ ID NO: 2498883 - DNA, 25 bp, Homo sapien
caggtaatgtggcagccaatagcag

SEQ ID NO: 2498884 - DNA, 25 bp, Homo sapien
aatgtggcagccaatagcagcagcc

SEQ ID NO: 2498885 - DNA, 25 bp, Homo sapien
gcccagccttggtgatgactttact

SEQ ID NO: 2498886 - DNA, 25 bp, Homo sapien
caagagaaggttaggtcaccattcc

SEQ ID NO: 2498887 - DNA, 25 bp, Homo sapien
gttttgaaccccaacatcagaagtg

SEQ ID NO: 2498888 - DNA, 25 bp, Homo sapien
ccaaatcagaataaggcaaattaag

SEQ ID NO: 2498889 - DNA, 25 bp, Homo sapien
gcaaattaagaaagctagaactcct

SEQ ID NO: 2498890 - DNA, 25 bp, Homo sapien
cagttagcagccaggtataacaaac

SEQ ID NO: 2498891 - DNA, 25 bp, Homo sapien
aacacatcccagttagcagccaggt

SEQ ID NO: 2498892 - DNA, 25 bp, Homo sapien
tcaacacatcccagttagcagccag

SEQ ID NO: 2498893 - DNA, 25 bp, Homo sapien
atcccagttagcagccaggtataac

SEQ ID NO: 2498894 - DNA, 25 bp, Homo sapien
tcagctctgaaagacccactgggtg

SEQ ID NO: 2498895 - DNA, 25 bp, Homo sapien
agcacaagattcagtggacttcagc

SEQ ID NO: 2498896 - DNA, 25 bp, Homo sapien
tctttattgtgctgatccaagctca

SEQ ID NO: 2498897 - DNA, 25 bp, Homo sapien
caaactgtgttatccaagcacaaga

SEQ ID NO: 2498898 - DNA, 25 bp, Homo sapien
tttcctgccaagttaattctccaat

SEQ ID NO: 2498899 - DNA, 25 bp, Homo sapien
taaactttatacatggtccgtgaca

SEQ ID NO: 2498900 - DNA, 25 bp, Homo sapien
attgctccccttctggaaacattga

SEQ ID NO: 2498901 - DNA, 25 bp, Homo sapien
aatatcactattgcctgtagcttag

SEQ ID NO: 2498902 - DNA, 25 bp, Homo sapien
ttctcatgtgatttgtcaacacaca

SEQ ID NO: 2498903 - DNA, 25 bp, Homo sapien
tctcatgtgatttgtcaacacacat

SEQ ID NO: 2498904 - DNA, 25 bp, Homo sapien
ctcatgtgatttgtcaacacacata

SEQ ID NO: 2498905 - DNA, 25 bp, Homo sapien
tcatgtgatttgtcaacacacatat

SEQ ID NO: 2498906 - DNA, 25 bp, Homo sapien
ttccattgacttagagaaatcatcc

SEQ ID NO: 2498907 - DNA, 25 bp, Homo sapien
ccattgacttagagaaatcatccat

SEQ ID NO: 2498908 - DNA, 25 bp, Homo sapien
catttccattgacttagagaaatca

SEQ ID NO: 2498909 - DNA, 25 bp, Homo sapien
tcaccatttccattgacttagagaa

SEQ ID NO: 2498910 - DNA, 25 bp, Homo sapien
tcaaggatcctgtctcactgaacct

SEQ ID NO: 2498911 - DNA, 25 bp, Homo sapien
caaataggcccaaacacgtaatggg

SEQ ID NO: 2498912 - DNA, 25 bp, Homo sapien
attaattatttcaggctaggctaca

SEQ ID NO: 2498913 - DNA, 25 bp, Homo sapien
ttcagcatgtagcttccaaggtcac

SEQ ID NO: 2498914 - DNA, 25 bp, Homo sapien
tgggccttttaactcaagagagata

SEQ ID NO: 2498915 - DNA, 25 bp, Homo sapien
tctaaatgatcataagaatttgggc

SEQ ID NO: 2498916 - DNA, 25 bp, Homo sapien
gatcataagaatttgggccttttaa

SEQ ID NO: 2498917 - DNA, 25 bp, Homo sapien
gagataggagacctacttaaggatt

SEQ ID NO: 2498918 - DNA, 25 bp, Homo sapien
gcgtgtcttactgaccactgtgccc

SEQ ID NO: 2498919 - DNA, 25 bp, Homo sapien
ttcaaattgctatccttattcccca

SEQ ID NO: 2498920 - DNA, 25 bp, Homo sapien
actgttattttgttgactttgcgtg

SEQ ID NO: 2498921 - DNA, 25 bp, Homo sapien
catacctcaccaaacatgcctttta

SEQ ID NO: 2498922 - DNA, 25 bp, Homo sapien
catggtgcactggagttatctcgtc

SEQ ID NO: 2498923 - DNA, 25 bp, Homo sapien
gaattgtttaatcatcagggttgcc

SEQ ID NO: 2498924 - DNA, 25 bp, Homo sapien
tatcacacactgtaggtattcgtgg

SEQ ID NO: 2498925 - DNA, 25 bp, Homo sapien
tatctcgtcccatgatttatcacac

SEQ ID NO: 2498926 - DNA, 25 bp, Homo sapien
caccttgtagttctatcactatcca

SEQ ID NO: 2498927 - DNA, 25 bp, Homo sapien
ccaccttgtagttctatcactatcc

SEQ ID NO: 2498928 - DNA, 25 bp, Homo sapien
tctcccaccttgtagttctatcact

SEQ ID NO: 2498929 - DNA, 25 bp, Homo sapien
tcccaccttgtagttctatcactat

SEQ ID NO: 2498930 - DNA, 25 bp, Homo sapien
gttagaataacatctgccaagaata

SEQ ID NO: 2498931 - DNA, 25 bp, Homo sapien
ctgttagaataacatctgccaagaa

SEQ ID NO: 2498932 - DNA, 25 bp, Homo sapien
tctgttagaataacatctgccaaga

SEQ ID NO: 2498933 - DNA, 25 bp, Homo sapien
tgttagaataacatctgccaagaat

SEQ ID NO: 2498934 - DNA, 25 bp, Homo sapien
gactatcaggagaggtaaaccaatt

SEQ ID NO: 2498935 - DNA, 25 bp, Homo sapien
tgcacaagtaagaatttacaccggt

SEQ ID NO: 2498936 - DNA, 25 bp, Homo sapien
ttacaccggtttacagcaaatgagg

SEQ ID NO: 2498937 - DNA, 25 bp, Homo sapien
gaggatggaggatactttactcccc

SEQ ID NO: 2498938 - DNA, 25 bp, Homo sapien
cgagcaggcccccacatgtgatgtt

SEQ ID NO: 2498939 - DNA, 25 bp, Homo sapien
tctgtcctcgtggtattttgctgag

SEQ ID NO: 2498940 - DNA, 25 bp, Homo sapien
ccgagcaggcccccacatgtgatgt

SEQ ID NO: 2498941 - DNA, 25 bp, Homo sapien
cccgagcaggcccccacatgtgatg

SEQ ID NO: 2498942 - DNA, 25 bp, Homo sapien
taaattggctttgtttatagtcgga

SEQ ID NO: 2498943 - DNA, 25 bp, Homo sapien
gcagactaagtgttgtcaagtatac

SEQ ID NO: 2498944 - DNA, 25 bp, Homo sapien
tcttcagtaggtaatcccaaggaat

SEQ ID NO: 2498945 - DNA, 25 bp, Homo sapien
tatagtcggaacagtctatgttaac

SEQ ID NO: 2498946 - DNA, 25 bp, Homo sapien
catacccagtattcaggacgtctcc

SEQ ID NO: 2498947 - DNA, 25 bp, Homo sapien
aaagtaggtactaggacccatggca

SEQ ID NO: 2498948 - DNA, 25 bp, Homo sapien
tgaaattccctgctaatcctagagt

SEQ ID NO: 2498949 - DNA, 25 bp, Homo sapien
tcctagagtgtatcagacggaaact

SEQ ID NO: 2498950 - DNA, 25 bp, Homo sapien
aaacacaaaggggataatttgatgg

SEQ ID NO: 2498951 - DNA, 25 bp, Homo sapien
gcctcagtagtgcatttggtttcca

SEQ ID NO: 2498952 - DNA, 25 bp, Homo sapien
gttttcataagcctcagtagtgcat

SEQ ID NO: 2498953 - DNA, 25 bp, Homo sapien
gttgcctgggctattgccatgtttt

SEQ ID NO: 2498954 - DNA, 25 bp, Homo sapien
tcataagcctcagtagtgcatttgg

SEQ ID NO: 2498955 - DNA, 25 bp, Homo sapien
ggtcaaatttctcatcgggccagca

SEQ ID NO: 2498956 - DNA, 25 bp, Homo sapien
ttatccatgctcctgtcatctgtgg

SEQ ID NO: 2498957 - DNA, 25 bp, Homo sapien
taataaagcaagcagttagttccac

SEQ ID NO: 2498958 - DNA, 25 bp, Homo sapien
tataatttcccggagagttatggca

SEQ ID NO: 2498959 - DNA, 25 bp, Homo sapien
cagtagatctacagggtaataaagg

SEQ ID NO: 2498960 - DNA, 25 bp, Homo sapien
taataaagggaacactatgatggga

SEQ ID NO: 2498961 - DNA, 25 bp, Homo sapien
cagctgtaatggaattgaagacctc

SEQ ID NO: 2498962 - DNA, 25 bp, Homo sapien
gcaatcttgctagagaagtaaaacc

SEQ ID NO: 2498963 - DNA, 25 bp, Homo sapien
caaaacagaatagcacctgtctgta

SEQ ID NO: 2498964 - DNA, 25 bp, Homo sapien
aaaatagcatgatctgagcagcagc

SEQ ID NO: 2498965 - DNA, 25 bp, Homo sapien
gaagcaactgaacaggagtcaatga

SEQ ID NO: 2498966 - DNA, 25 bp, Homo sapien
gaataacaacaaggtgttccgtgtg

SEQ ID NO: 2498967 - DNA, 25 bp, Homo sapien
tagacccgtagtttcctcagtggat

SEQ ID NO: 2498968 - DNA, 25 bp, Homo sapien
tgactgccgtgtgtgcttagacccg

SEQ ID NO: 2498969 - DNA, 25 bp, Homo sapien
taaaaccaggttagaaggaatgcag

SEQ ID NO: 2498970 - DNA, 25 bp, Homo sapien
tgtgtgtagcacaaacagttctcat

SEQ ID NO: 2498971 - DNA, 25 bp, Homo sapien
aaaataaccgtctgccgatggtccg

SEQ ID NO: 2498972 - DNA, 25 bp, Homo sapien
tgatggaacctgctttatgaccaag

SEQ ID NO: 2498973 - DNA, 25 bp, Homo sapien
tcagtcttcaggatatcacaccacg

SEQ ID NO: 2498974 - DNA, 25 bp, Homo sapien
tccaggccacaagacagtagtgatg

SEQ ID NO: 2498975 - DNA, 25 bp, Homo sapien
taaaggaactggcaggagtcatcca

SEQ ID NO: 2498976 - DNA, 25 bp, Homo sapien
taagtttatgcaccctccctgggag

SEQ ID NO: 2498977 - DNA, 25 bp, Homo sapien
catagccccaggagttagtggagac

SEQ ID NO: 2498978 - DNA, 25 bp, Homo sapien
tttcggaatctctgaagcgccatct

SEQ ID NO: 2498979 - DNA, 25 bp, Homo sapien
tagtattcatggagcccgagactgg

SEQ ID NO: 2498980 - DNA, 25 bp, Homo sapien
gcagagacagtagagtaacccagag

SEQ ID NO: 2498981 - DNA, 25 bp, Homo sapien
ttggagaaggttgcatggagacccc

SEQ ID NO: 2498982 - DNA, 25 bp, Homo sapien
tatttattcggtgtactagccagga

SEQ ID NO: 2498983 - DNA, 25 bp, Homo sapien
ttcaacgcggatgattacttttaag

SEQ ID NO: 2498984 - DNA, 25 bp, Homo sapien
ctaaaccaggaagttcaacgcggat

SEQ ID NO: 2498985 - DNA, 25 bp, Homo sapien
ccccataaactctgctatccttagt

SEQ ID NO: 2498986 - DNA, 25 bp, Homo sapien
caggaagttcaacgcggatgattac

SEQ ID NO: 2498987 - DNA, 25 bp, Homo sapien
gaggccttaggtgagaattcgttcc

SEQ ID NO: 2498988 - DNA, 25 bp, Homo sapien
tccttggctagtggctccttgctcc

SEQ ID NO: 2498989 - DNA, 25 bp, Homo sapien
tattcacatttcagggatcttggac

SEQ ID NO: 2498990 - DNA, 25 bp, Homo sapien
tggacccacctgtatgattcttgac

SEQ ID NO: 2498991 - DNA, 25 bp, Homo sapien
gatccaagatggctatcagaactcg

SEQ ID NO: 2498992 - DNA, 25 bp, Homo sapien
tgtctcattggctaggctaagtcca

SEQ ID NO: 2498993 - DNA, 25 bp, Homo sapien
tcttgggcttgttgctagtgatcca

SEQ ID NO: 2498994 - DNA, 25 bp, Homo sapien
tcccaggattggtttaatgccgtaa

SEQ ID NO: 2498995 - DNA, 25 bp, Homo sapien
gatcctcccacatctcttgtattcc

SEQ ID NO: 2498996 - DNA, 25 bp, Homo sapien
tccacaaattctgaacaatacttat

SEQ ID NO: 2498997 - DNA, 25 bp, Homo sapien
agagcacagcaatactaagagatgc

SEQ ID NO: 2498998 - DNA, 25 bp, Homo sapien
ccctccacaaattctgaacaatact

SEQ ID NO: 2498999 - DNA, 25 bp, Homo sapien
tctaggccagcaatgtgaatgtcgt

SEQ ID NO: 2499000 - DNA, 25 bp, Homo sapien
tgaatgtcgtggaaacaggaagcaa

SEQ ID NO: 2499001 - DNA, 25 bp, Homo sapien
gcaaatgggtactcagcagtggcca

SEQ ID NO: 2499002 - DNA, 25 bp, Homo sapien
tggagagctttgtctcagccctgca

SEQ ID NO: 2499003 - DNA, 25 bp, Homo sapien
aatgtcactggtcccatttctaggc

SEQ ID NO: 2499004 - DNA, 25 bp, Homo sapien
tacgctgtgctgtatttaggcattg

SEQ ID NO: 2499005 - DNA, 25 bp, Homo sapien
caggaggtcaaggtgtcttagctgt

SEQ ID NO: 2499006 - DNA, 25 bp, Homo sapien
ttctaggcttccaggaggtcaaggt

SEQ ID NO: 2499007 - DNA, 25 bp, Homo sapien
ttttcttggctagtctcacaactgg

SEQ ID NO: 2499008 - DNA, 25 bp, Homo sapien
cccttgcatccctgtaagaaattcc

SEQ ID NO: 2499009 - DNA, 25 bp, Homo sapien
caggaatgttgggtaggtctagccc

SEQ ID NO: 2499010 - DNA, 25 bp, Homo sapien
ttttgtaggttatatgcgtctagga

SEQ ID NO: 2499011 - DNA, 25 bp, Homo sapien
agccccaagaaacttagacacccag

SEQ ID NO: 2499012 - DNA, 25 bp, Homo sapien
gaactcactccacaagggtcttcag

SEQ ID NO: 2499013 - DNA, 25 bp, Homo sapien
gcagagccccaagaaacttagacac

SEQ ID NO: 2499014 - DNA, 25 bp, Homo sapien
cttcatgaactcactccacaagggt

SEQ ID NO: 2499015 - DNA, 25 bp, Homo sapien
tctgccctccttggtctcccaatgt

SEQ ID NO: 2499016 - DNA, 25 bp, Homo sapien
gatctgccctccttggtctcccaat

SEQ ID NO: 2499017 - DNA, 25 bp, Homo sapien
tgccctccttggtctcccaatgtgc

SEQ ID NO: 2499018 - DNA, 25 bp, Homo sapien
tgatctgccctccttggtctcccaa

SEQ ID NO: 2499019 - DNA, 25 bp, Homo sapien
ttttagcacgaaaggctgttcagtt

SEQ ID NO: 2499020 - DNA, 25 bp, Homo sapien
tttttagcacgaaaggctgttcagt

SEQ ID NO: 2499021 - DNA, 25 bp, Homo sapien
gtttttagcacgaaaggctgttcag

SEQ ID NO: 2499022 - DNA, 25 bp, Homo sapien
gaacacatggactgacatgaataca

SEQ ID NO: 2499023 - DNA, 25 bp, Homo sapien
gggaatcactgaacacatggactga

SEQ ID NO: 2499024 - DNA, 25 bp, Homo sapien
tggactgacatgaatacatatagga

SEQ ID NO: 2499025 - DNA, 25 bp, Homo sapien
tgacatgaatacatataggaaaaca

SEQ ID NO: 2499026 - DNA, 25 bp, Homo sapien
tggtcccgaattgggaggtcactac

SEQ ID NO: 2499027 - DNA, 25 bp, Homo sapien
tacattgtggccaaacatagtgtgg

SEQ ID NO: 2499028 - DNA, 25 bp, Homo sapien
cctcctgaatagttgtgatgatagg

SEQ ID NO: 2499029 - DNA, 25 bp, Homo sapien
ctacagcccaaaacggctggaccca

SEQ ID NO: 2499030 - DNA, 25 bp, Homo sapien
tgtgatacgatttgcatccctaagc

SEQ ID NO: 2499031 - DNA, 25 bp, Homo sapien
ccatcttagtgcagttacagctcca

SEQ ID NO: 2499032 - DNA, 25 bp, Homo sapien
tgttcagaattagcacacctggaag

SEQ ID NO: 2499033 - DNA, 25 bp, Homo sapien
tatgttacctaagtgaccagtgaga

SEQ ID NO: 2499034 - DNA, 25 bp, Homo sapien
cttactatgttatagggctaggacc

SEQ ID NO: 2499035 - DNA, 25 bp, Homo sapien
aatgccataggaggaagtaccattc

SEQ ID NO: 2499036 - DNA, 25 bp, Homo sapien
ggcctagaccaattactttgcatga

SEQ ID NO: 2499037 - DNA, 25 bp, Homo sapien
gctaggaccaagtgtaaagcaaaac

SEQ ID NO: 2499038 - DNA, 25 bp, Homo sapien
taagtgcaacgcgaagaacagactg

SEQ ID NO: 2499039 - DNA, 25 bp, Homo sapien
tataacagtactaggctctgccagg

SEQ ID NO: 2499040 - DNA, 25 bp, Homo sapien
tagggatagaaggagcaaaccaacc

SEQ ID NO: 2499041 - DNA, 25 bp, Homo sapien
gcaagtctgaactgaccaaataggg

SEQ ID NO: 2499042 - DNA, 25 bp, Homo sapien
tagagccgtcagtatgtaaagtaac

SEQ ID NO: 2499043 - DNA, 25 bp, Homo sapien
tataaactccaccttacagacaagg

SEQ ID NO: 2499044 - DNA, 25 bp, Homo sapien
tcaaactttgggtgcatgagaacct

SEQ ID NO: 2499045 - DNA, 25 bp, Homo sapien
gagaacaaagatctataacccacac

SEQ ID NO: 2499046 - DNA, 25 bp, Homo sapien
gctgaggcttctcctgatacaatct

SEQ ID NO: 2499047 - DNA, 25 bp, Homo sapien
tgatgaaagcgcattattgttacca

SEQ ID NO: 2499048 - DNA, 25 bp, Homo sapien
gacttgagaatccatttgagtttca

SEQ ID NO: 2499049 - DNA, 25 bp, Homo sapien
aagtcttcaggcaataacagagata

SEQ ID NO: 2499050 - DNA, 25 bp, Homo sapien
tctaacaggtttctaagtgaagtca

SEQ ID NO: 2499051 - DNA, 25 bp, Homo sapien
tatataaagcacctaacacagcctg

SEQ ID NO: 2499052 - DNA, 25 bp, Homo sapien
caatgctactggtgtcagaaacaca

SEQ ID NO: 2499053 - DNA, 25 bp, Homo sapien
tacatgaagcgcttgttaaaacaga

SEQ ID NO: 2499054 - DNA, 25 bp, Homo sapien
ttgtatagacggcataaccctgtgt

SEQ ID NO: 2499055 - DNA, 25 bp, Homo sapien
gaaacaagatgcacttttaggcctc

SEQ ID NO: 2499056 - DNA, 25 bp, Homo sapien
gctttaggcttttgcactacacaaa

SEQ ID NO: 2499057 - DNA, 25 bp, Homo sapien
taggcctttgactgatagctttagg

SEQ ID NO: 2499058 - DNA, 25 bp, Homo sapien
tatatccaggagaaacttagcatgg

SEQ ID NO: 2499059 - DNA, 25 bp, Homo sapien
cactactagatggaaagttggtcca

SEQ ID NO: 2499060 - DNA, 25 bp, Homo sapien
cacctatttggtatccagaggagga

SEQ ID NO: 2499061 - DNA, 25 bp, Homo sapien
ctttaatatggtagcagcaggatgc

SEQ ID NO: 2499062 - DNA, 25 bp, Homo sapien
gattctgatgattggccaagctgga

SEQ ID NO: 2499063 - DNA, 25 bp, Homo sapien
gacaagtcttttagggtagtgcaca

SEQ ID NO: 2499064 - DNA, 25 bp, Homo sapien
cctacataggagctacagccaggga

SEQ ID NO: 2499065 - DNA, 25 bp, Homo sapien
ttgtacactttccaggcccgaagaa

SEQ ID NO: 2499066 - DNA, 25 bp, Homo sapien
tgagtcatcaacacataaaaggttg

SEQ ID NO: 2499067 - DNA, 25 bp, Homo sapien
cagtaataggacatgtgaaggtaac

SEQ ID NO: 2499068 - DNA, 25 bp, Homo sapien
caaacggctgtgactttaaaccatg

SEQ ID NO: 2499069 - DNA, 25 bp, Homo sapien
catgacagtgactttataagagctt

SEQ ID NO: 2499070 - DNA, 25 bp, Homo sapien
taggaatattgtgctagcattgacc

SEQ ID NO: 2499071 - DNA, 25 bp, Homo sapien
gctagcattgaccattaacattcaa

SEQ ID NO: 2499072 - DNA, 25 bp, Homo sapien
tattttttccacattgagtcttgaa

SEQ ID NO: 2499073 - DNA, 25 bp, Homo sapien
tattttaatgtattgcagcatagga

SEQ ID NO: 2499074 - DNA, 25 bp, Homo sapien
tggtcagctgacccacaactttcaa

SEQ ID NO: 2499075 - DNA, 25 bp, Homo sapien
ggtcagctgacccacaactttcaaa

SEQ ID NO: 2499076 - DNA, 25 bp, Homo sapien
gtcagctgacccacaactttcaaaa

SEQ ID NO: 2499077 - DNA, 25 bp, Homo sapien
ctggtcagctgacccacaactttca

SEQ ID NO: 2499078 - DNA, 25 bp, Homo sapien
gcatcagtctcacaagtcttaggtt

SEQ ID NO: 2499079 - DNA, 25 bp, Homo sapien
catcagtctcacaagtcttaggttt

SEQ ID NO: 2499080 - DNA, 25 bp, Homo sapien
aaccatccatatcccttagctgctg

SEQ ID NO: 2499081 - DNA, 25 bp, Homo sapien
tgtggaactcacgaagcctttctgg

SEQ ID NO: 2499082 - DNA, 25 bp, Homo sapien
gcctttctgggcaactatcttcaaa

SEQ ID NO: 2499083 - DNA, 25 bp, Homo sapien
catcttatttagaatccagggcact

SEQ ID NO: 2499084 - DNA, 25 bp, Homo sapien
tgtctatggcacaaacctgagaccc

SEQ ID NO: 2499085 - DNA, 25 bp, Homo sapien
cctgagaccctatggttaataaatt

SEQ ID NO: 2499086 - DNA, 25 bp, Homo sapien
caccaaagatggacctaactcagat

SEQ ID NO: 2499087 - DNA, 25 bp, Homo sapien
cagttggcagaaaagcgcacatatt

SEQ ID NO: 2499088 - DNA, 25 bp, Homo sapien
ggaacccacttctatctgttcgaga

SEQ ID NO: 2499089 - DNA, 25 bp, Homo sapien
ttcgagaatatctacttgagacatc

SEQ ID NO: 2499090 - DNA, 25 bp, Homo sapien
catttgcatccctgttatatctagg

SEQ ID NO: 2499091 - DNA, 25 bp, Homo sapien
ttccagtgtgctacttgaaaccaga

SEQ ID NO: 2499092 - DNA, 25 bp, Homo sapien
tctggatactgaagacgtaacagca

SEQ ID NO: 2499093 - DNA, 25 bp, Homo sapien
gaactacgataggacagatctccca

SEQ ID NO: 2499094 - DNA, 25 bp, Homo sapien
caaacacaaacatggactctgccct

SEQ ID NO: 2499095 - DNA, 25 bp, Homo sapien
tagatcgcccagactatgtgtggtg

SEQ ID NO: 2499096 - DNA, 25 bp, Homo sapien
catttgttaatctaggttggaccga

SEQ ID NO: 2499097 - DNA, 25 bp, Homo sapien
aatgcaatttcaacaagctcggaca

SEQ ID NO: 2499098 - DNA, 25 bp, Homo sapien
cggtcataacgcaacctcaaaagtg

SEQ ID NO: 2499099 - DNA, 25 bp, Homo sapien
cagaagctgcagtgtcggtcataac

SEQ ID NO: 2499100 - DNA, 25 bp, Homo sapien
gccacggcacttgaactactctata

SEQ ID NO: 2499101 - DNA, 25 bp, Homo sapien
tgattagcatgcaacttgccacggc

SEQ ID NO: 2499102 - DNA, 25 bp, Homo sapien
aggctgatgtacagaggtgccacca

SEQ ID NO: 2499103 - DNA, 25 bp, Homo sapien
tcacacattgtaacagccctgctgg

SEQ ID NO: 2499104 - DNA, 25 bp, Homo sapien
ttatacaggtatggagctacaggca

SEQ ID NO: 2499105 - DNA, 25 bp, Homo sapien
gagtagaagtctgagctaccacgcc

SEQ ID NO: 2499106 - DNA, 25 bp, Homo sapien
aatgtccaggctactgacttcagca

SEQ ID NO: 2499107 - DNA, 25 bp, Homo sapien
cctggccctgaaagctattttatgg

SEQ ID NO: 2499108 - DNA, 25 bp, Homo sapien
gttttagggaatactgtcataattg

SEQ ID NO: 2499109 - DNA, 25 bp, Homo sapien
cacccggccttcattatgcaaatgc

SEQ ID NO: 2499110 - DNA, 25 bp, Homo sapien
tgtgttacttgatcttattgccaaa

SEQ ID NO: 2499111 - DNA, 25 bp, Homo sapien
atgcaaatgcaaggaatagtgaaaa

SEQ ID NO: 2499112 - DNA, 25 bp, Homo sapien
tacaagactcaagggtaaatcctac

SEQ ID NO: 2499113 - DNA, 25 bp, Homo sapien
gattatagctagaggaattttccac

SEQ ID NO: 2499114 - DNA, 25 bp, Homo sapien
agataaatgccaccccttactggaa

SEQ ID NO: 2499115 - DNA, 25 bp, Homo sapien
cgcatcttatgtagaaacaccaggg

SEQ ID NO: 2499116 - DNA, 25 bp, Homo sapien
ccttgctctgtgtagggtttatctc

SEQ ID NO: 2499117 - DNA, 25 bp, Homo sapien
taacagctccttgctctgtgtaggg

SEQ ID NO: 2499118 - DNA, 25 bp, Homo sapien
tcccactcctcgtaacagctccttg

SEQ ID NO: 2499119 - DNA, 25 bp, Homo sapien
gctctgtgtagggtttatctctctt

SEQ ID NO: 2499120 - DNA, 25 bp, Homo sapien
gatcagtttagtggttaatttccaa

SEQ ID NO: 2499121 - DNA, 25 bp, Homo sapien
taaacactgtgaatgccctaaaaat

SEQ ID NO: 2499122 - DNA, 25 bp, Homo sapien
cagaggaagaatggatatgaacggt

SEQ ID NO: 2499123 - DNA, 25 bp, Homo sapien
tccttcagggtagaacaattttgga

SEQ ID NO: 2499124 - DNA, 25 bp, Homo sapien
tacgggttaccaaagcagtgacagt

SEQ ID NO: 2499125 - DNA, 25 bp, Homo sapien
taggaccaatttgcatttcgaaagc

SEQ ID NO: 2499126 - DNA, 25 bp, Homo sapien
taaaattacacattgaggccaggca

SEQ ID NO: 2499127 - DNA, 25 bp, Homo sapien
gctacacttcgtttaaaaggcagaa

SEQ ID NO: 2499128 - DNA, 25 bp, Homo sapien
tgctctaggctatgagaatacaagt

SEQ ID NO: 2499129 - DNA, 25 bp, Homo sapien
agaatgtggtatgggaacaggccac

SEQ ID NO: 2499130 - DNA, 25 bp, Homo sapien
tatcacaagtaatggtctcaaaagt

SEQ ID NO: 2499131 - DNA, 25 bp, Homo sapien
tattaatggcaaacgaaagcaggtt

SEQ ID NO: 2499132 - DNA, 25 bp, Homo sapien
tttatatctgcctgaaactgttcta

SEQ ID NO: 2499133 - DNA, 25 bp, Homo sapien
ttatatctgcctgaaactgttctag

SEQ ID NO: 2499134 - DNA, 25 bp, Homo sapien
tatatctgcctgaaactgttctagg

SEQ ID NO: 2499135 - DNA, 25 bp, Homo sapien
cttttatatctgcctgaaactgttc

SEQ ID NO: 2499136 - DNA, 25 bp, Homo sapien
cagggcagagcaacgtgagaaaaca

SEQ ID NO: 2499137 - DNA, 25 bp, Homo sapien
agcaatccgacatgagttctccgag

SEQ ID NO: 2499138 - DNA, 25 bp, Homo sapien
gccagagtcccaagtagaatgtgaa

SEQ ID NO: 2499139 - DNA, 25 bp, Homo sapien
gcctatcaaaggatgcacaagccgg

SEQ ID NO: 2499140 - DNA, 25 bp, Homo sapien
taggaactgcctggatctagtaagt

SEQ ID NO: 2499141 - DNA, 25 bp, Homo sapien
catcatcttcgtactcatctaagca

SEQ ID NO: 2499142 - DNA, 25 bp, Homo sapien
tgttgtgtaattgcatcttctcgtt

SEQ ID NO: 2499143 - DNA, 25 bp, Homo sapien
agtaagtttacagcttcattctgaa

SEQ ID NO: 2499144 - DNA, 25 bp, Homo sapien
tgtagaacacagaattactgagaat

SEQ ID NO: 2499145 - DNA, 25 bp, Homo sapien
tttgtagaacacagaattactgaga

SEQ ID NO: 2499146 - DNA, 25 bp, Homo sapien
tagaacacagaattactgagaattg

SEQ ID NO: 2499147 - DNA, 25 bp, Homo sapien
aacacagaattactgagaattgcag

SEQ ID NO: 2499148 - DNA, 25 bp, Homo sapien
gagaagtacaggatttgtaaatgta

SEQ ID NO: 2499149 - DNA, 25 bp, Homo sapien
gcaggagaagtacaggatttgtaaa

SEQ ID NO: 2499150 - DNA, 25 bp, Homo sapien
aaagcaggagaagtacaggatttgt

SEQ ID NO: 2499151 - DNA, 25 bp, Homo sapien
aaacaaagcaggagaagtacaggat

SEQ ID NO: 2499152 - DNA, 25 bp, Homo sapien
tgcgtaaggatcttggatgagagct

SEQ ID NO: 2499153 - DNA, 25 bp, Homo sapien
tgaatacacatatccctggcatgta

SEQ ID NO: 2499154 - DNA, 25 bp, Homo sapien
ttggcggtggttacatactaaagaa

SEQ ID NO: 2499155 - DNA, 25 bp, Homo sapien
agaagactgattagttgggaacaca

SEQ ID NO: 2499156 - DNA, 25 bp, Homo sapien
aaatctcagtcaatacgcatagtag

SEQ ID NO: 2499157 - DNA, 25 bp, Homo sapien
aaaaagattctcatacccaaagata

SEQ ID NO: 2499158 - DNA, 25 bp, Homo sapien
aaatgttgccactttaataaatgat

SEQ ID NO: 2499159 - DNA, 25 bp, Homo sapien
gggcatattacctaaatgacagaaa

SEQ ID NO: 2499160 - DNA, 25 bp, Homo sapien
tacatctactattgctgtaaaccaa

SEQ ID NO: 2499161 - DNA, 25 bp, Homo sapien
aatagtgattattgtgcaagtatag

SEQ ID NO: 2499162 - DNA, 25 bp, Homo sapien
catttacaactacacaacatctctt

SEQ ID NO: 2499163 - DNA, 25 bp, Homo sapien
tacacaacatctcttcaatttccaa

SEQ ID NO: 2499164 - DNA, 25 bp, Homo sapien
agtgcttcctcccgcaaaagccacc

SEQ ID NO: 2499165 - DNA, 25 bp, Homo sapien
caaaagccacctgatgaagtgctgt

SEQ ID NO: 2499166 - DNA, 25 bp, Homo sapien
tcttttatcttacttctgaactctt

SEQ ID NO: 2499167 - DNA, 25 bp, Homo sapien
gcttcacgaaatagccctgaagtag

SEQ ID NO: 2499168 - DNA, 25 bp, Homo sapien
ccccttttctgtgctagttcagtac

SEQ ID NO: 2499169 - DNA, 25 bp, Homo sapien
tatactaacctctaattatttatct

SEQ ID NO: 2499170 - DNA, 25 bp, Homo sapien
gaagttccttaaagactggtgaata

SEQ ID NO: 2499171 - DNA, 25 bp, Homo sapien
tgctagttcagtactttgctctttt

SEQ ID NO: 2499172 - DNA, 25 bp, Homo sapien
taaagaagctctggatagatcgact

SEQ ID NO: 2499173 - DNA, 25 bp, Homo sapien
taagaccgctgtcagatgaacaatg

SEQ ID NO: 2499174 - DNA, 25 bp, Homo sapien
gaggaggcgctcaagaagtatgtct

SEQ ID NO: 2499175 - DNA, 25 bp, Homo sapien
tgcagcttgaaacggacagagacat

SEQ ID NO: 2499176 - DNA, 25 bp, Homo sapien
tagcaaaccgcagaggacagttttg

SEQ ID NO: 2499177 - DNA, 25 bp, Homo sapien
gatcttttgtgcaagtagcaaaccg

SEQ ID NO: 2499178 - DNA, 25 bp, Homo sapien
tacgtcctacaaagacacactatga

SEQ ID NO: 2499179 - DNA, 25 bp, Homo sapien
tttgctggctgataaaaatctctga

SEQ ID NO: 2499180 - DNA, 25 bp, Homo sapien
ctgtaacgtttcgaaaatgctccaa

SEQ ID NO: 2499181 - DNA, 25 bp, Homo sapien
tgtaacgtttcgaaaatgctccaaa

SEQ ID NO: 2499182 - DNA, 25 bp, Homo sapien
gctgtcttggatattgctaaggcaa

SEQ ID NO: 2499183 - DNA, 25 bp, Homo sapien
gagctcactgtaagataaagctgtc

SEQ ID NO: 2499184 - DNA, 25 bp, Homo sapien
caaaaagagatcgtcttagcgaaca

SEQ ID NO: 2499185 - DNA, 25 bp, Homo sapien
aacactgtgtgtttaggagcacaac

SEQ ID NO: 2499186 - DNA, 25 bp, Homo sapien
agccaagtccaggtgggcaagtcct

SEQ ID NO: 2499187 - DNA, 25 bp, Homo sapien
tcaagcataaacagccaagtccagg

SEQ ID NO: 2499188 - DNA, 25 bp, Homo sapien
gagaatgtcgtcaccattaatcaat

SEQ ID NO: 2499189 - DNA, 25 bp, Homo sapien
cataagttgtctttctaccacggta

SEQ ID NO: 2499190 - DNA, 25 bp, Homo sapien
ctgcctgcctaactcggtgaaggga

SEQ ID NO: 2499191 - DNA, 25 bp, Homo sapien
agcacgtgtcctactctgagtttgg

SEQ ID NO: 2499192 - DNA, 25 bp, Homo sapien
aaaagcacgtgtcctactctgagtt

SEQ ID NO: 2499193 - DNA, 25 bp, Homo sapien
tcggtgaagggacaagtacgagcca

SEQ ID NO: 2499194 - DNA, 25 bp, Homo sapien
actggggcccgagctcttgcccttc

SEQ ID NO: 2499195 - DNA, 25 bp, Homo sapien
tcttctcgatctgccccttgccttt

SEQ ID NO: 2499196 - DNA, 25 bp, Homo sapien
tctgcggcagggatgttgaccacgc

SEQ ID NO: 2499197 - DNA, 25 bp, Homo sapien
atgttgaccacgccggtggagcgcc

SEQ ID NO: 2499198 - DNA, 25 bp, Homo sapien
gcgccgcccgggaggttgttgttga

SEQ ID NO: 2499199 - DNA, 25 bp, Homo sapien
tggtccggtagccaccggtcgccat

SEQ ID NO: 2499200 - DNA, 25 bp, Homo sapien
atggcggagccgaccgcgcagttca

SEQ ID NO: 2499201 - DNA, 25 bp, Homo sapien
tgcttggcgcgcatcttctcgcgtt

SEQ ID NO: 2499202 - DNA, 25 bp, Homo sapien
ccgaggatgccaggagacgacctcc

SEQ ID NO: 2499203 - DNA, 25 bp, Homo sapien
aggatgccaggagacgacctccagg

SEQ ID NO: 2499204 - DNA, 25 bp, Homo sapien
tgccaggagacgacctccaggagag

SEQ ID NO: 2499205 - DNA, 25 bp, Homo sapien
ccccgaggatgccaggagacgacct

SEQ ID NO: 2499206 - DNA, 25 bp, Homo sapien
ggctgcgccccttggagtcctcgag

SEQ ID NO: 2499207 - DNA, 25 bp, Homo sapien
ccttggagtcctcgagcgcgcccac

SEQ ID NO: 2499208 - DNA, 25 bp, Homo sapien
cccttggagtcctcgagcgcgccca

SEQ ID NO: 2499209 - DNA, 25 bp, Homo sapien
cccgggctgcgccccttggagtcct

SEQ ID NO: 2499210 - DNA, 25 bp, Homo sapien
cagtcactaccggccagcagccgcc

SEQ ID NO: 2499211 - DNA, 25 bp, Homo sapien
accctgcaaagtttctcccacgcac

SEQ ID NO: 2499212 - DNA, 25 bp, Homo sapien
gacgatcgccgcccctagaagggag

SEQ ID NO: 2499213 - DNA, 25 bp, Homo sapien
ctacagtacggaccccgacgatcgc

SEQ ID NO: 2499214 - DNA, 25 bp, Homo sapien
gaccccgacgatcgccgcccctaga

SEQ ID NO: 2499215 - DNA, 25 bp, Homo sapien
cccgacgatcgccgcccctagaagg

SEQ ID NO: 2499216 - DNA, 25 bp, Homo sapien
gatccggctcccaggtgtgccgaag

SEQ ID NO: 2499217 - DNA, 25 bp, Homo sapien
tgtgccgaagctggcgcgcgctctt

SEQ ID NO: 2499218 - DNA, 25 bp, Homo sapien
aaagtgccgcggcaaactcgcggtg

SEQ ID NO: 2499219 - DNA, 25 bp, Homo sapien
agctccaggcaatcccaggacagga

SEQ ID NO: 2499220 - DNA, 25 bp, Homo sapien
tctcaatgacgttaatcacattggg

SEQ ID NO: 2499221 - DNA, 25 bp, Homo sapien
tcacattgggtaagctatcagttct

SEQ ID NO: 2499222 - DNA, 25 bp, Homo sapien
catcccctgctttaatatggattga

SEQ ID NO: 2499223 - DNA, 25 bp, Homo sapien
ctacacgcccgtagtattatgacta

SEQ ID NO: 2499224 - DNA, 25 bp, Homo sapien
gacaagtcacatattgaaagcagaa

SEQ ID NO: 2499225 - DNA, 25 bp, Homo sapien
cacaacgagaccttgacttaaagaa

SEQ ID NO: 2499226 - DNA, 25 bp, Homo sapien
taaaaatggtctaatcacacttgta

SEQ ID NO: 2499227 - DNA, 25 bp, Homo sapien
cagttgaaggctacagtgatgagct

SEQ ID NO: 2499228 - DNA, 25 bp, Homo sapien
ctggtttggctgctttgctgaagac

SEQ ID NO: 2499229 - DNA, 25 bp, Homo sapien
gctgctttgctgaagacactccgta

SEQ ID NO: 2499230 - DNA, 25 bp, Homo sapien
ggctgctttgctgaagacactccgt

SEQ ID NO: 2499231 - DNA, 25 bp, Homo sapien
gctttgctgaagacactccgtacat

SEQ ID NO: 2499232 - DNA, 25 bp, Homo sapien
ttgttacattatagaaataagtctc

SEQ ID NO: 2499233 - DNA, 25 bp, Homo sapien
gaagttacagtaataaggtagaatc

SEQ ID NO: 2499234 - DNA, 25 bp, Homo sapien
taaggtagaatccattatttgttac

SEQ ID NO: 2499235 - DNA, 25 bp, Homo sapien
tacagtaataaggtagaatccatta

SEQ ID NO: 2499236 - DNA, 25 bp, Homo sapien
tcatatgtacattatccctgctgaa

SEQ ID NO: 2499237 - DNA, 25 bp, Homo sapien
gaaagagcactcgtttgtatggcaa

SEQ ID NO: 2499238 - DNA, 25 bp, Homo sapien
gaaatggattcagttagacagagat

SEQ ID NO: 2499239 - DNA, 25 bp, Homo sapien
ggaacatcaaagcagactccatcag

SEQ ID NO: 2499240 - DNA, 25 bp, Homo sapien
aaagcaactaccctgaaactcactg

SEQ ID NO: 2499241 - DNA, 25 bp, Homo sapien
gaagcgaaatcttgtgctacaaagc

SEQ ID NO: 2499242 - DNA, 25 bp, Homo sapien
cgctaagcctatgtttgcagataag

SEQ ID NO: 2499243 - DNA, 25 bp, Homo sapien
tgtgttagcaggtcgaaccttggac

SEQ ID NO: 2499244 - DNA, 25 bp, Homo sapien
aatcctgagcttggtagtaagagca

SEQ ID NO: 2499245 - DNA, 25 bp, Homo sapien
tgttgcagtcactcaaactgatcag

SEQ ID NO: 2499246 - DNA, 25 bp, Homo sapien
taaaccatagcatgcctaactgttg

SEQ ID NO: 2499247 - DNA, 25 bp, Homo sapien
gaaacaaggtctgctcaatactacc

SEQ ID NO: 2499248 - DNA, 25 bp, Homo sapien
taagagggcatttggcaggatatcc

SEQ ID NO: 2499249 - DNA, 25 bp, Homo sapien
caggatatccgaaaatgacagtctc

SEQ ID NO: 2499250 - DNA, 25 bp, Homo sapien
gatggtggtatcaaagtcgatgcct

SEQ ID NO: 2499251 - DNA, 25 bp, Homo sapien
gaaaaactcgaaactgtggcacatc

SEQ ID NO: 2499252 - DNA, 25 bp, Homo sapien
tgatcaaggccccattttcatcctt

SEQ ID NO: 2499253 - DNA, 25 bp, Homo sapien
tggttgtctgcttttaggtctggta

SEQ ID NO: 2499254 - DNA, 25 bp, Homo sapien
tttggaaagtttgcttataactctg

SEQ ID NO: 2499255 - DNA, 25 bp, Homo sapien
tgtctgcttttaggtctggtaacat

SEQ ID NO: 2499256 - DNA, 25 bp, Homo sapien
aaaacacatgatcaagctttgtcag

SEQ ID NO: 2499257 - DNA, 25 bp, Homo sapien
gattttatgactcacaagcacacca

SEQ ID NO: 2499258 - DNA, 25 bp, Homo sapien
ccacacctggatttgtaaagctaat

SEQ ID NO: 2499259 - DNA, 25 bp, Homo sapien
cttaaaagaggttcctgtcagcacc

SEQ ID NO: 2499260 - DNA, 25 bp, Homo sapien
atcagctttgagaacaattaatgta

SEQ ID NO: 2499261 - DNA, 25 bp, Homo sapien
cagttcacaaattgggtaatcagct

SEQ ID NO: 2499262 - DNA, 25 bp, Homo sapien
cactaaaacctggattcaggaagaa

SEQ ID NO: 2499263 - DNA, 25 bp, Homo sapien
aagagaagcaccagatatagacagt

SEQ ID NO: 2499264 - DNA, 25 bp, Homo sapien
ttcttctttctagagctcttcgttc

SEQ ID NO: 2499265 - DNA, 25 bp, Homo sapien
atttcagatattcttctttctagag

SEQ ID NO: 2499266 - DNA, 25 bp, Homo sapien
tccatttcagatattcttctttcta

SEQ ID NO: 2499267 - DNA, 25 bp, Homo sapien
tattcttctttctagagctcttcgt

SEQ ID NO: 2499268 - DNA, 25 bp, Homo sapien
gatgagctgtaaaactggttaggtc

SEQ ID NO: 2499269 - DNA, 25 bp, Homo sapien
tgccagtgatatgtaaagagctttc

SEQ ID NO: 2499270 - DNA, 25 bp, Homo sapien
gaattaaaggtccaatcaggagcag

SEQ ID NO: 2499271 - DNA, 25 bp, Homo sapien
tgtttcaaagagtgacaggcaaagc

SEQ ID NO: 2499272 - DNA, 25 bp, Homo sapien
gaaaccctaccaagtctagctactg

SEQ ID NO: 2499273 - DNA, 25 bp, Homo sapien
cctaggtgaaaggatgcataaagcc

SEQ ID NO: 2499274 - DNA, 25 bp, Homo sapien
catttcagaatcaaggcaagacagt

SEQ ID NO: 2499275 - DNA, 25 bp, Homo sapien
tgagaggtaatctccctatgagcct

SEQ ID NO: 2499276 - DNA, 25 bp, Homo sapien
ttccatttccaacagtgatctatca

SEQ ID NO: 2499277 - DNA, 25 bp, Homo sapien
tttccaacagtgatctatcagcaaa

SEQ ID NO: 2499278 - DNA, 25 bp, Homo sapien
catttccaacagtgatctatcagca

SEQ ID NO: 2499279 - DNA, 25 bp, Homo sapien
tccatttccaacagtgatctatcag

SEQ ID NO: 2499280 - DNA, 25 bp, Homo sapien
cagcaggttgaatgactctgtatcc

SEQ ID NO: 2499281 - DNA, 25 bp, Homo sapien
tcagattccaggaccttgattgaaa

SEQ ID NO: 2499282 - DNA, 25 bp, Homo sapien
cacaggttcgtgagtaaagcaaaga

SEQ ID NO: 2499283 - DNA, 25 bp, Homo sapien
caccatcaggagtggctaatcagaa

SEQ ID NO: 2499284 - DNA, 25 bp, Homo sapien
tcatccataaacagcattatcttct

SEQ ID NO: 2499285 - DNA, 25 bp, Homo sapien
tataagttgacttttgactatgact

SEQ ID NO: 2499286 - DNA, 25 bp, Homo sapien
ccatttttagatgggataaatcaca

SEQ ID NO: 2499287 - DNA, 25 bp, Homo sapien
ccacaacattggtattaaaaggctt

SEQ ID NO: 2499288 - DNA, 25 bp, Homo sapien
ttccaactgtaatttaagatctgtt

SEQ ID NO: 2499289 - DNA, 25 bp, Homo sapien
ccaactgtaatttaagatctgttag

SEQ ID NO: 2499290 - DNA, 25 bp, Homo sapien
ctgtaatttaagatctgttagttcc

SEQ ID NO: 2499291 - DNA, 25 bp, Homo sapien
caactgtaatttaagatctgttagt

SEQ ID NO: 2499292 - DNA, 25 bp, Homo sapien
tgtttgtcccatataaagtcttaaa

SEQ ID NO: 2499293 - DNA, 25 bp, Homo sapien
tccttcatggttgcaaagcagagac

SEQ ID NO: 2499294 - DNA, 25 bp, Homo sapien
aagcagagactgttcgttatgcaag

SEQ ID NO: 2499295 - DNA, 25 bp, Homo sapien
gcatatgagctataaaggatacatt

SEQ ID NO: 2499296 - DNA, 25 bp, Homo sapien
caactgcagctagggctaaggagtc

SEQ ID NO: 2499297 - DNA, 25 bp, Homo sapien
ggagtccgtgagattttctgcccat

SEQ ID NO: 2499298 - DNA, 25 bp, Homo sapien
ttcccaaaaatgagacggagtacca

SEQ ID NO: 2499299 - DNA, 25 bp, Homo sapien
tataaggcactgcatgatctggtct

SEQ ID NO: 2499300 - DNA, 25 bp, Homo sapien
gaatcatatcgatcaccagctgatg

SEQ ID NO: 2499301 - DNA, 25 bp, Homo sapien
tctaagtaactgtatgatccagagc

SEQ ID NO: 2499302 - DNA, 25 bp, Homo sapien
cagagcgacccagcaaggaatcata

SEQ ID NO: 2499303 - DNA, 25 bp, Homo sapien
agctgatgtagaactggtttcatat

SEQ ID NO: 2499304 - DNA, 25 bp, Homo sapien
aattctgtacttttggtagggatgg

SEQ ID NO: 2499305 - DNA, 25 bp, Homo sapien
taattctgtacttttggtagggatg

SEQ ID NO: 2499306 - DNA, 25 bp, Homo sapien
tctcttattatctggttctgaaatt

SEQ ID NO: 2499307 - DNA, 25 bp, Homo sapien
cttactggtaaaggagaattctctt

SEQ ID NO: 2499308 - DNA, 25 bp, Homo sapien
ttattatctggttctgaaattcagg

SEQ ID NO: 2499309 - DNA, 25 bp, Homo sapien
tcttattatctggttctgaaattca

SEQ ID NO: 2499310 - DNA, 25 bp, Homo sapien
gatgccattggctctgcatttcaat

SEQ ID NO: 2499311 - DNA, 25 bp, Homo sapien
atgccattggctctgcatttcaatt

SEQ ID NO: 2499312 - DNA, 25 bp, Homo sapien
agatgccattggctctgcatttcaa

SEQ ID NO: 2499313 - DNA, 25 bp, Homo sapien
gaaatggaatggagatcaaaatcaa

SEQ ID NO: 2499314 - DNA, 25 bp, Homo sapien
ggaatggagatcaaaatcaaggata

SEQ ID NO: 2499315 - DNA, 25 bp, Homo sapien
gatatagtggaggttctctgaaaag

SEQ ID NO: 2499316 - DNA, 25 bp, Homo sapien
gtggaggttctctgaaaagatggat

SEQ ID NO: 2499317 - DNA, 25 bp, Homo sapien
cagcagctagaaatagaggagcata

SEQ ID NO: 2499318 - DNA, 25 bp, Homo sapien
gattaagggttgagctagatgacac

SEQ ID NO: 2499319 - DNA, 25 bp, Homo sapien
tcttttgtctaaagcagggctacaa

SEQ ID NO: 2499320 - DNA, 25 bp, Homo sapien
gaaaaatcttacttgctctgactag

SEQ ID NO: 2499321 - DNA, 25 bp, Homo sapien
acacctaaggttctttatgcataac

SEQ ID NO: 2499322 - DNA, 25 bp, Homo sapien
gaagcaaacgaatgaacacctaagg

SEQ ID NO: 2499323 - DNA, 25 bp, Homo sapien
tagtatcaatagaagcaaacgaatg

SEQ ID NO: 2499324 - DNA, 25 bp, Homo sapien
aatttaatgtagtatcaatagaagc

SEQ ID NO: 2499325 - DNA, 25 bp, Homo sapien
ttctcaatacaaaaagtaatggtat

SEQ ID NO: 2499326 - DNA, 25 bp, Homo sapien
ctcaatacaaaaagtaatggtattt

SEQ ID NO: 2499327 - DNA, 25 bp, Homo sapien
tcaatacaaaaagtaatggtattta

SEQ ID NO: 2499328 - DNA, 25 bp, Homo sapien
tctcaatacaaaaagtaatggtatt

SEQ ID NO: 2499329 - DNA, 25 bp, Homo sapien
tttcttattggatccctcttctgtg

SEQ ID NO: 2499330 - DNA, 25 bp, Homo sapien
ttcttattggatccctcttctgtgt

SEQ ID NO: 2499331 - DNA, 25 bp, Homo sapien
tttctttcttattggatccctcttc

SEQ ID NO: 2499332 - DNA, 25 bp, Homo sapien
tctttcttattggatccctcttctg

SEQ ID NO: 2499333 - DNA, 25 bp, Homo sapien
aaaatgaaactcctgtagatcttct

SEQ ID NO: 2499334 - DNA, 25 bp, Homo sapien
cttttctctcttggtcgtcgtcgtt

SEQ ID NO: 2499335 - DNA, 25 bp, Homo sapien
tgaaactcctgtagatcttcttttc

SEQ ID NO: 2499336 - DNA, 25 bp, Homo sapien
tttctctcttggtcgtcgtcgttct

SEQ ID NO: 2499337 - DNA, 25 bp, Homo sapien
tttaggttgtgatttatcttctcct

SEQ ID NO: 2499338 - DNA, 25 bp, Homo sapien
gattgatttaggttgtgatttatct

SEQ ID NO: 2499339 - DNA, 25 bp, Homo sapien
ttgatttaggttgtgatttatcttc

SEQ ID NO: 2499340 - DNA, 25 bp, Homo sapien
gatttaggttgtgatttatcttctc

SEQ ID NO: 2499341 - DNA, 25 bp, Homo sapien
tggagtaagcagaagttatgcctac

SEQ ID NO: 2499342 - DNA, 25 bp, Homo sapien
gatactggcctataacgctggtaag

SEQ ID NO: 2499343 - DNA, 25 bp, Homo sapien
tgacttgaagcatacagtgaactgc

SEQ ID NO: 2499344 - DNA, 25 bp, Homo sapien
tatgcctacaagactatttggcctg

SEQ ID NO: 2499345 - DNA, 25 bp, Homo sapien
catacgttctggagtacttttgttt

SEQ ID NO: 2499346 - DNA, 25 bp, Homo sapien
ctcatcatacgttctggagtacttt

SEQ ID NO: 2499347 - DNA, 25 bp, Homo sapien
tgtttatattcatcttctctagatg

SEQ ID NO: 2499348 - DNA, 25 bp, Homo sapien
cgttctggagtacttttgtttatat

SEQ ID NO: 2499349 - DNA, 25 bp, Homo sapien
tgttctctggttcgggtagaacgac

SEQ ID NO: 2499350 - DNA, 25 bp, Homo sapien
cttgttctctggttcgggtagaacg

SEQ ID NO: 2499351 - DNA, 25 bp, Homo sapien
ttgttctctggttcgggtagaacga

SEQ ID NO: 2499352 - DNA, 25 bp, Homo sapien
cagcttcttgaagatcagttaatgt

SEQ ID NO: 2499353 - DNA, 25 bp, Homo sapien
tcttgaagatcagttaatgtcactc

SEQ ID NO: 2499354 - DNA, 25 bp, Homo sapien
gcttcttgaagatcagttaatgtca

SEQ ID NO: 2499355 - DNA, 25 bp, Homo sapien
cttgaagatcagttaatgtcactcc

SEQ ID NO: 2499356 - DNA, 25 bp, Homo sapien
ggtaaggatagacagctgaatctgg

SEQ ID NO: 2499357 - DNA, 25 bp, Homo sapien
ctaagtaatggtaaggatagacagc

SEQ ID NO: 2499358 - DNA, 25 bp, Homo sapien
gtaaggatagacagctgaatctgga

SEQ ID NO: 2499359 - DNA, 25 bp, Homo sapien
gtaatggtaaggatagacagctgaa

SEQ ID NO: 2499360 - DNA, 25 bp, Homo sapien
gactcttcatccctaacaggagtga

SEQ ID NO: 2499361 - DNA, 25 bp, Homo sapien
gatcttctagattgtcttgcttgtc

SEQ ID NO: 2499362 - DNA, 25 bp, Homo sapien
ctgtgttgatcttctagattgtctt

SEQ ID NO: 2499363 - DNA, 25 bp, Homo sapien
catccctaacaggagtgaggtatga

SEQ ID NO: 2499364 - DNA, 25 bp, Homo sapien
taatgacacgtcagacaacatatta

SEQ ID NO: 2499365 - DNA, 25 bp, Homo sapien
tcagtgtgctcttactaatgacacg

SEQ ID NO: 2499366 - DNA, 25 bp, Homo sapien
tctgtgtcaaaagttaagtagggct

SEQ ID NO: 2499367 - DNA, 25 bp, Homo sapien
tattggaagacaggtatcaaattcc

SEQ ID NO: 2499368 - DNA, 25 bp, Homo sapien
ggagacagtgccagcagtagttgta

SEQ ID NO: 2499369 - DNA, 25 bp, Homo sapien
agtgccagcagtagttgtagtcagg

SEQ ID NO: 2499370 - DNA, 25 bp, Homo sapien
tagttgtagtcagggttgtggtaga

SEQ ID NO: 2499371 - DNA, 25 bp, Homo sapien
gacagtgccagcagtagttgtagtc

SEQ ID NO: 2499372 - DNA, 25 bp, Homo sapien
tgcagcatttacaacagttggagca

SEQ ID NO: 2499373 - DNA, 25 bp, Homo sapien
cactgccgtaggaacactgtccttt

SEQ ID NO: 2499374 - DNA, 25 bp, Homo sapien
gtactatcctcagcccacaaacgat

SEQ ID NO: 2499375 - DNA, 25 bp, Homo sapien
agttggagcaacaggaatggtcact

SEQ ID NO: 2499376 - DNA, 25 bp, Homo sapien
ctatagcatcataagcagcaacaca

SEQ ID NO: 2499377 - DNA, 25 bp, Homo sapien
atagcatcataagcagcaacacaaa

SEQ ID NO: 2499378 - DNA, 25 bp, Homo sapien
tatagcatcataagcagcaacacaa

SEQ ID NO: 2499379 - DNA, 25 bp, Homo sapien
tagcatcataagcagcaacacaaaa

SEQ ID NO: 2499380 - DNA, 25 bp, Homo sapien
tgatgtggtgcttggaacactagaa

SEQ ID NO: 2499381 - DNA, 25 bp, Homo sapien
cccgttgtaatctttgtagtagtgc

SEQ ID NO: 2499382 - DNA, 25 bp, Homo sapien
tgctgaggaagaacccgttgtaatc

SEQ ID NO: 2499383 - DNA, 25 bp, Homo sapien
cagctgcagaggtaactgttggtgt

SEQ ID NO: 2499384 - DNA, 25 bp, Homo sapien
aactagatccattaagacactggcc

SEQ ID NO: 2499385 - DNA, 25 bp, Homo sapien
aaaatgatgttaaactgagggctcc

SEQ ID NO: 2499386 - DNA, 25 bp, Homo sapien
actaccaacattccaactgaaggca

SEQ ID NO: 2499387 - DNA, 25 bp, Homo sapien
ccatagctctgagttctagggcaag

SEQ ID NO: 2499388 - DNA, 25 bp, Homo sapien
ccttgtatatgaactacttgttcgc

SEQ ID NO: 2499389 - DNA, 25 bp, Homo sapien
tacttgttcgcaaacttgaagaatc

SEQ ID NO: 2499390 - DNA, 25 bp, Homo sapien
gttgatccttcattaactgagctat

SEQ ID NO: 2499391 - DNA, 25 bp, Homo sapien
tatgatacgttgatccttcattaac

SEQ ID NO: 2499392 - DNA, 25 bp, Homo sapien
ctgttaaaagaacacccttcagatt

SEQ ID NO: 2499393 - DNA, 25 bp, Homo sapien
gcggtacactagtaaatattagtat

SEQ ID NO: 2499394 - DNA, 25 bp, Homo sapien
aataggattaagaaagcggtacact

SEQ ID NO: 2499395 - DNA, 25 bp, Homo sapien
taagaaagcggtacactagtaaata

SEQ ID NO: 2499396 - DNA, 25 bp, Homo sapien
aggattaagaaagcggtacactagt

SEQ ID NO: 2499397 - DNA, 25 bp, Homo sapien
tattgtaggtgcaacatatgcaagc

SEQ ID NO: 2499398 - DNA, 25 bp, Homo sapien
gcaacatatgcaagcctagttcctt

SEQ ID NO: 2499399 - DNA, 25 bp, Homo sapien
aatgtcagatgtactggctagtcgt

SEQ ID NO: 2499400 - DNA, 25 bp, Homo sapien
tagtcgtcttggtattgtaggtgca

SEQ ID NO: 2499401 - DNA, 25 bp, Homo sapien
gacttgaagctgaacgtgtaacacc

SEQ ID NO: 2499402 - DNA, 25 bp, Homo sapien
taacctccaagttgcaggagactca

SEQ ID NO: 2499403 - DNA, 25 bp, Homo sapien
catagctgcccgtctttctaagtcc

SEQ ID NO: 2499404 - DNA, 25 bp, Homo sapien
gatttcagcaagtgcaccatagctg

SEQ ID NO: 2499405 - DNA, 25 bp, Homo sapien
aatgccagttttgcgcaagccctgc

SEQ ID NO: 2499406 - DNA, 25 bp, Homo sapien
gcaggatctactgattccaccacag

SEQ ID NO: 2499407 - DNA, 25 bp, Homo sapien
acaatgccagttttgcgcaagccct

SEQ ID NO: 2499408 - DNA, 25 bp, Homo sapien
atgatgcaggatctactgattccac

SEQ ID NO: 2499409 - DNA, 25 bp, Homo sapien
tatttactagtgtgtgaccctcagc

SEQ ID NO: 2499410 - DNA, 25 bp, Homo sapien
gagggtctttacttcctcaggctaa

SEQ ID NO: 2499411 - DNA, 25 bp, Homo sapien
taatggctgatatacctccactctg

SEQ ID NO: 2499412 - DNA, 25 bp, Homo sapien
tgtaacgttccttatacaggctgtg

SEQ ID NO: 2499413 - DNA, 25 bp, Homo sapien
gcgaaagtattccatattatcccca

SEQ ID NO: 2499414 - DNA, 25 bp, Homo sapien
caccctataaatcaatcaaatggaa

SEQ ID NO: 2499415 - DNA, 25 bp, Homo sapien
caaggtttacaagcccttcttctct

SEQ ID NO: 2499416 - DNA, 25 bp, Homo sapien
tcttctctcaggtggagtactacct

SEQ ID NO: 2499417 - DNA, 25 bp, Homo sapien
tgcttgacctgatgacacagtaggt

SEQ ID NO: 2499418 - DNA, 25 bp, Homo sapien
cacagtaggtgttgtaacagctaca

SEQ ID NO: 2499419 - DNA, 25 bp, Homo sapien
ctgcttgtgtactagaagtgttggc

SEQ ID NO: 2499420 - DNA, 25 bp, Homo sapien
gttggcattagttacagaagccagg

SEQ ID NO: 2499421 - DNA, 25 bp, Homo sapien
tccaaaccgggaacaaatacaatgc

SEQ ID NO: 2499422 - DNA, 25 bp, Homo sapien
tgagaggaaaggaaccacacagcgt

SEQ ID NO: 2499423 - DNA, 25 bp, Homo sapien
ggcacaactgccactagcaacagga

SEQ ID NO: 2499424 - DNA, 25 bp, Homo sapien
gaaccatccaggtcatatagcccga

SEQ ID NO: 2499425 - DNA, 25 bp, Homo sapien
gcttctgattccgagtcatcttcct

SEQ ID NO: 2499426 - DNA, 25 bp, Homo sapien
gttccagagattcaatacgggatgc

SEQ ID NO: 2499427 - DNA, 25 bp, Homo sapien
gattcaatacgggatgcatttttct

SEQ ID NO: 2499428 - DNA, 25 bp, Homo sapien
tcagcttctgattccgagtcatctt

SEQ ID NO: 2499429 - DNA, 25 bp, Homo sapien
aaggtcttctgtgactgattattgt

SEQ ID NO: 2499430 - DNA, 25 bp, Homo sapien
tttgctgttgattcaattagtggag

SEQ ID NO: 2499431 - DNA, 25 bp, Homo sapien
gattcaattagtggagatttcttgt

SEQ ID NO: 2499432 - DNA, 25 bp, Homo sapien
cttctgtgactgattattgtccata

SEQ ID NO: 2499433 - DNA, 25 bp, Homo sapien
taaggtaagtaatataggcaattat

SEQ ID NO: 2499434 - DNA, 25 bp, Homo sapien
gtaatataggcaattattagtcatc

SEQ ID NO: 2499435 - DNA, 25 bp, Homo sapien
ggcaattattagtcatcaaacatac

SEQ ID NO: 2499436 - DNA, 25 bp, Homo sapien
tataggcaattattagtcatcaaac

SEQ ID NO: 2499437 - DNA, 25 bp, Homo sapien
atctgctacatcaaaggctgtttgg

SEQ ID NO: 2499438 - DNA, 25 bp, Homo sapien
catctgctacatcaaaggctgtttg

SEQ ID NO: 2499439 - DNA, 25 bp, Homo sapien
tctgctacatcaaaggctgtttggc

SEQ ID NO: 2499440 - DNA, 25 bp, Homo sapien
ctgctacatcaaaggctgtttggcc

SEQ ID NO: 2499441 - DNA, 25 bp, Homo sapien
taggtctacctatgctaggcatttc

SEQ ID NO: 2499442 - DNA, 25 bp, Homo sapien
gagacagaagctgagaatatctccc

SEQ ID NO: 2499443 - DNA, 25 bp, Homo sapien
taggaacataccctttagtagtcac

SEQ ID NO: 2499444 - DNA, 25 bp, Homo sapien
caactctaaggcaatgtatgtgaaa

SEQ ID NO: 2499445 - DNA, 25 bp, Homo sapien
tatggcacaaagtcctttagaatgc

SEQ ID NO: 2499446 - DNA, 25 bp, Homo sapien
taagtactaaggaaggtatccaatg

SEQ ID NO: 2499447 - DNA, 25 bp, Homo sapien
taaactctggtagtaccttaagtgc

SEQ ID NO: 2499448 - DNA, 25 bp, Homo sapien
tataaattcacataggcaggcttac

SEQ ID NO: 2499449 - DNA, 25 bp, Homo sapien
gcactccttctctgatagcaaaatt

SEQ ID NO: 2499450 - DNA, 25 bp, Homo sapien
actgctgtgcagtgccacaaccatg

SEQ ID NO: 2499451 - DNA, 25 bp, Homo sapien
tagagtgacataaggagctgctact

SEQ ID NO: 2499452 - DNA, 25 bp, Homo sapien
ttagacaattgttggccagatgcca

SEQ ID NO: 2499453 - DNA, 25 bp, Homo sapien
tataagtacaaaccaatcattcccc

SEQ ID NO: 2499454 - DNA, 25 bp, Homo sapien
gaattagccctgttttgaataaaga

SEQ ID NO: 2499455 - DNA, 25 bp, Homo sapien
cacgacttgcgaagctaaaattagc

SEQ ID NO: 2499456 - DNA, 25 bp, Homo sapien
aaattagctggccttttacttgaat

SEQ ID NO: 2499457 - DNA, 25 bp, Homo sapien
caacacagagtaggaagagactagc

SEQ ID NO: 2499458 - DNA, 25 bp, Homo sapien
taatcaaacccactagaggagacgt

SEQ ID NO: 2499459 - DNA, 25 bp, Homo sapien
actggtgactggctattgactgata

SEQ ID NO: 2499460 - DNA, 25 bp, Homo sapien
gagactagcaggaatactggtgact

SEQ ID NO: 2499461 - DNA, 25 bp, Homo sapien
cttctttaccccaatgagctgcagc

SEQ ID NO: 2499462 - DNA, 25 bp, Homo sapien
gaagaggtgtccagccatcatagtc

SEQ ID NO: 2499463 - DNA, 25 bp, Homo sapien
ctttaatattaacatcatagcctgc

SEQ ID NO: 2499464 - DNA, 25 bp, Homo sapien
tgtccactaaaattcgacatgcttc

SEQ ID NO: 2499465 - DNA, 25 bp, Homo sapien
cacacaaacaggtgaacgaacacta

SEQ ID NO: 2499466 - DNA, 25 bp, Homo sapien
tgaaatctagttaacctttacctca

SEQ ID NO: 2499467 - DNA, 25 bp, Homo sapien
cataaattatgttagtatgcccttc

SEQ ID NO: 2499468 - DNA, 25 bp, Homo sapien
taaactgcacatagcatagccccac

SEQ ID NO: 2499469 - DNA, 25 bp, Homo sapien
tccagattttgcatgccggacatca

SEQ ID NO: 2499470 - DNA, 25 bp, Homo sapien
tagcctttagcagctgcaacgtgaa

SEQ ID NO: 2499471 - DNA, 25 bp, Homo sapien
gcctggcatctctaagcatgatccg

SEQ ID NO: 2499472 - DNA, 25 bp, Homo sapien
tatatgaccactatttagccactgc

SEQ ID NO: 2499473 - DNA, 25 bp, Homo sapien
atatctaaaggtgtatctccttcac

SEQ ID NO: 2499474 - DNA, 25 bp, Homo sapien
gacagcccctacatgtgctccttga

SEQ ID NO: 2499475 - DNA, 25 bp, Homo sapien
gaagtagctcttccattgcctcctc

SEQ ID NO: 2499476 - DNA, 25 bp, Homo sapien
ctcctccgcaatatctaaaggtgta

SEQ ID NO: 2499477 - DNA, 25 bp, Homo sapien
tgtagcctctactaatacccctggg

SEQ ID NO: 2499478 - DNA, 25 bp, Homo sapien
tctctggctgagaagctactgctcc

SEQ ID NO: 2499479 - DNA, 25 bp, Homo sapien
tagtgaggtgccatttcatttcggc

SEQ ID NO: 2499480 - DNA, 25 bp, Homo sapien
gcacactttgggtattataagactc

SEQ ID NO: 2499481 - DNA, 25 bp, Homo sapien
gcctttgcagctatgagtgtgacca

SEQ ID NO: 2499482 - DNA, 25 bp, Homo sapien
taaaagactgggcttttgctggcgc

SEQ ID NO: 2499483 - DNA, 25 bp, Homo sapien
tggaaatctaggatccctacttggc

SEQ ID NO: 2499484 - DNA, 25 bp, Homo sapien
agggtgcctcataacagcttggtga

SEQ ID NO: 2499485 - DNA, 25 bp, Homo sapien
tggaatcgtatctgttgaccttaac

SEQ ID NO: 2499486 - DNA, 25 bp, Homo sapien
tctcagaggcaaaagtactacttat

SEQ ID NO: 2499487 - DNA, 25 bp, Homo sapien
gactttgtataattgatgttggcca

SEQ ID NO: 2499488 - DNA, 25 bp, Homo sapien
ggcagacatgactgggttgtcatta

SEQ ID NO: 2499489 - DNA, 25 bp, Homo sapien
cagtaagcacttggtaaacgttagc

SEQ ID NO: 2499490 - DNA, 25 bp, Homo sapien
caaaggacaaactcagcctggcata

SEQ ID NO: 2499491 - DNA, 25 bp, Homo sapien
gaaattatggctccaataaggccct

SEQ ID NO: 2499492 - DNA, 25 bp, Homo sapien
ttgtaaccccagctgacttgcccag

SEQ ID NO: 2499493 - DNA, 25 bp, Homo sapien
tatgggaacgtctacagctttcagc

SEQ ID NO: 2499494 - DNA, 25 bp, Homo sapien
tcagaatttacgtctcaagaatgag

SEQ ID NO: 2499495 - DNA, 25 bp, Homo sapien
gaaatacttgccacatattgtgcca

SEQ ID NO: 2499496 - DNA, 25 bp, Homo sapien
catggatctgccaactttcctatgg

SEQ ID NO: 2499497 - DNA, 25 bp, Homo sapien
gatttcgacctggaaacaatgacca

SEQ ID NO: 2499498 - DNA, 25 bp, Homo sapien
catgtcccaaggtcttaggaagcca

SEQ ID NO: 2499499 - DNA, 25 bp, Homo sapien
gagcctctcaatgaccaaagatggt

SEQ ID NO: 2499500 - DNA, 25 bp, Homo sapien
tcagtagccatcctaaggaacaggg

SEQ ID NO: 2499501 - DNA, 25 bp, Homo sapien
aaaaggtcacttttgtttgcacaag

SEQ ID NO: 2499502 - DNA, 25 bp, Homo sapien
tagctgggacacatcattgtaactg

SEQ ID NO: 2499503 - DNA, 25 bp, Homo sapien
cattcggaaggattttgggctatca

SEQ ID NO: 2499504 - DNA, 25 bp, Homo sapien
gattagcaactatagtcaaccttgg

SEQ ID NO: 2499505 - DNA, 25 bp, Homo sapien
taaagaactcgagattgagcgggaa

SEQ ID NO: 2499506 - DNA, 25 bp, Homo sapien
gagccaggtcctacgtttgatgaat

SEQ ID NO: 2499507 - DNA, 25 bp, Homo sapien
ccactgctgttttgcaacgggaaaa

SEQ ID NO: 2499508 - DNA, 25 bp, Homo sapien
ttcagaccttatcgttcccaggccg

SEQ ID NO: 2499509 - DNA, 25 bp, Homo sapien
gctgctgcatgtagtggtatccagc

SEQ ID NO: 2499510 - DNA, 25 bp, Homo sapien
catatcaacattgtcatcaatgcaa

SEQ ID NO: 2499511 - DNA, 25 bp, Homo sapien
cagccttcattatcaggttgattaa

SEQ ID NO: 2499512 - DNA, 25 bp, Homo sapien
acttcaccatatcaacattgtcatc

SEQ ID NO: 2499513 - DNA, 25 bp, Homo sapien
ctttctggaattggcactattcata

SEQ ID NO: 2499514 - DNA, 25 bp, Homo sapien
tgagataggttgtattcataaacac

SEQ ID NO: 2499515 - DNA, 25 bp, Homo sapien
ttggcactattcataatcatcatca

SEQ ID NO: 2499516 - DNA, 25 bp, Homo sapien
ctgtcctatgagataggttgtattc

SEQ ID NO: 2499517 - DNA, 25 bp, Homo sapien
caactggtattcctagtagtctccc

SEQ ID NO: 2499518 - DNA, 25 bp, Homo sapien
tgcaactggtattcctagtagtctc

SEQ ID NO: 2499519 - DNA, 25 bp, Homo sapien
aactggtattcctagtagtctccca

SEQ ID NO: 2499520 - DNA, 25 bp, Homo sapien
aaatgcaactggtattcctagtagt

SEQ ID NO: 2499521 - DNA, 25 bp, Homo sapien
tcataggccatcagacataagcata

SEQ ID NO: 2499522 - DNA, 25 bp, Homo sapien
cataaagcatggaggcctagctcaa

SEQ ID NO: 2499523 - DNA, 25 bp, Homo sapien
ggttagttacggacaatcaacatta

SEQ ID NO: 2499524 - DNA, 25 bp, Homo sapien
accttgcctgcaataaactcatagg

SEQ ID NO: 2499525 - DNA, 25 bp, Homo sapien
ggatcactcacaacctgggataagc

SEQ ID NO: 2499526 - DNA, 25 bp, Homo sapien
gcctcccctagactgggtgacttgt

SEQ ID NO: 2499527 - DNA, 25 bp, Homo sapien
tgagacagaagtaataagatgtcac

SEQ ID NO: 2499528 - DNA, 25 bp, Homo sapien
taagccaaatgtcatgctggaaggc

SEQ ID NO: 2499529 - DNA, 25 bp, Homo sapien
gagcaatcacatgaagcaactcctg

SEQ ID NO: 2499530 - DNA, 25 bp, Homo sapien
cctgtaaaatgtagagggctagccc

SEQ ID NO: 2499531 - DNA, 25 bp, Homo sapien
aaaaatcacgtgaggacttctccct

SEQ ID NO: 2499532 - DNA, 25 bp, Homo sapien
tagcccataggcaagtaatgtcaaa

SEQ ID NO: 2499533 - DNA, 25 bp, Homo sapien
aaacaggagaaactctaagaaaatg

SEQ ID NO: 2499534 - DNA, 25 bp, Homo sapien
ggagaaactctaagaaaatgtagaa

SEQ ID NO: 2499535 - DNA, 25 bp, Homo sapien
caggagaaactctaagaaaatgtag

SEQ ID NO: 2499536 - DNA, 25 bp, Homo sapien
aaactctaagaaaatgtagaaagat

SEQ ID NO: 2499537 - DNA, 25 bp, Homo sapien
tccagtatcattctgcaatatcaat

SEQ ID NO: 2499538 - DNA, 25 bp, Homo sapien
atcattctgcaatatcaatactctg

SEQ ID NO: 2499539 - DNA, 25 bp, Homo sapien
ctcctccagtatcattctgcaatat

SEQ ID NO: 2499540 - DNA, 25 bp, Homo sapien
gcaatatcaatactctgctgctgac

SEQ ID NO: 2499541 - DNA, 25 bp, Homo sapien
tattgataatcagtaatagatctca

SEQ ID NO: 2499542 - DNA, 25 bp, Homo sapien
gttacataaactgaagcgtctattg

SEQ ID NO: 2499543 - DNA, 25 bp, Homo sapien
catccagcctagagattacttttct

SEQ ID NO: 2499544 - DNA, 25 bp, Homo sapien
cactcaaggatttgtttaaagaatt

SEQ ID NO: 2499545 - DNA, 25 bp, Homo sapien
aggagagccggcggcggggcgcaca

SEQ ID NO: 2499546 - DNA, 25 bp, Homo sapien
tcaggagagccggcggcggggcgca

SEQ ID NO: 2499547 - DNA, 25 bp, Homo sapien
agagccggcggcggggcgcacagac

SEQ ID NO: 2499548 - DNA, 25 bp, Homo sapien
ggagagccggcggcggggcgcacag

SEQ ID NO: 2499549 - DNA, 25 bp, Homo sapien
ggaagacggcgccatcgtcgaactt

SEQ ID NO: 2499550 - DNA, 25 bp, Homo sapien
tctcggagccgatccagcgtttcag

SEQ ID NO: 2499551 - DNA, 25 bp, Homo sapien
cagtgagtccgtccacattggcgta

SEQ ID NO: 2499552 - DNA, 25 bp, Homo sapien
cattggcgtaattgatgtcggcgcc

SEQ ID NO: 2499553 - DNA, 25 bp, Homo sapien
tgtgaatgtttctatgagtgcgggc

SEQ ID NO: 2499554 - DNA, 25 bp, Homo sapien
atgtttctatgagtgcgggccagag

SEQ ID NO: 2499555 - DNA, 25 bp, Homo sapien
cagaggagggctgggaacccggagc

SEQ ID NO: 2499556 - DNA, 25 bp, Homo sapien
gaatgtttctatgagtgcgggccag

SEQ ID NO: 2499557 - DNA, 25 bp, Homo sapien
gccgagcggacctcccttcctacca

SEQ ID NO: 2499558 - DNA, 25 bp, Homo sapien
gacttccagtatcccacagagcact

SEQ ID NO: 2499559 - DNA, 25 bp, Homo sapien
gcacggccacccgtcaccggcggcc

SEQ ID NO: 2499560 - DNA, 25 bp, Homo sapien
cgcacccggccgagcggacctccct

SEQ ID NO: 2499561 - DNA, 25 bp, Homo sapien
aaggaaggttgtcctgtcgggctgg

SEQ ID NO: 2499562 - DNA, 25 bp, Homo sapien
agcagtggaaccgcaaggctctaca

SEQ ID NO: 2499563 - DNA, 25 bp, Homo sapien
cagcagtggaaccgcaaggctctac

SEQ ID NO: 2499564 - DNA, 25 bp, Homo sapien
aggaaggttgtcctgtcgggctggg

SEQ ID NO: 2499565 - DNA, 25 bp, Homo sapien
gatagcgatagaatccaggtcaggg

SEQ ID NO: 2499566 - DNA, 25 bp, Homo sapien
gcaaatactatgcacctgttctggg

SEQ ID NO: 2499567 - DNA, 25 bp, Homo sapien
gaagtaggattagaattcactcagc

SEQ ID NO: 2499568 - DNA, 25 bp, Homo sapien
taggaaactgtctgcctgtgagaca

SEQ ID NO: 2499569 - DNA, 25 bp, Homo sapien
gaaattttcgccttgtcttccatga

SEQ ID NO: 2499570 - DNA, 25 bp, Homo sapien
ttgaccacggtgaatatttcctccc

SEQ ID NO: 2499571 - DNA, 25 bp, Homo sapien
ggcaaaatattgcacctaagtccca

SEQ ID NO: 2499572 - DNA, 25 bp, Homo sapien
tacacgactgcctactgacatgaaa

SEQ ID NO: 2499573 - DNA, 25 bp, Homo sapien
agcttctgtgcaaaactgccctgtt

SEQ ID NO: 2499574 - DNA, 25 bp, Homo sapien
tgtgcaaaactgccctgtttttgcc

SEQ ID NO: 2499575 - DNA, 25 bp, Homo sapien
gcaaagcttctgtgcaaaactgccc

SEQ ID NO: 2499576 - DNA, 25 bp, Homo sapien
aaagcttctgtgcaaaactgccctg

SEQ ID NO: 2499577 - DNA, 25 bp, Homo sapien
gtttgctcacaggatcttaaaccag

SEQ ID NO: 2499578 - DNA, 25 bp, Homo sapien
tgctcacaggatcttaaaccagaag

SEQ ID NO: 2499579 - DNA, 25 bp, Homo sapien
tactagaagcaatattgcgggaact

SEQ ID NO: 2499580 - DNA, 25 bp, Homo sapien
ccacactcaggtctggtccacactg

SEQ ID NO: 2499581 - DNA, 25 bp, Homo sapien
agggagtctggattcaaagccaaat

SEQ ID NO: 2499582 - DNA, 25 bp, Homo sapien
gggagtctggattcaaagccaaata

SEQ ID NO: 2499583 - DNA, 25 bp, Homo sapien
aatgggagtggaggttcaaactgcc

SEQ ID NO: 2499584 - DNA, 25 bp, Homo sapien
caaccacaccctgcttagatttcat

SEQ ID NO: 2499585 - DNA, 25 bp, Homo sapien
tcaaactgcctccttgtgagaattc

SEQ ID NO: 2499586 - DNA, 25 bp, Homo sapien
aaactggagtttgagcagaatggga

SEQ ID NO: 2499587 - DNA, 25 bp, Homo sapien
gtgactccacctgaaagtttgccag

SEQ ID NO: 2499588 - DNA, 25 bp, Homo sapien
accaaacttcagtgcagtgactcca

SEQ ID NO: 2499589 - DNA, 25 bp, Homo sapien
tgtcccaccaaacttcagtgcagtg

SEQ ID NO: 2499590 - DNA, 25 bp, Homo sapien
ttcagtgcagtgactccacctgaaa

SEQ ID NO: 2499591 - DNA, 25 bp, Homo sapien
ttgtaatcgttggagtcctgattct

SEQ ID NO: 2499592 - DNA, 25 bp, Homo sapien
tgtaatcgttggagtcctgattcta

SEQ ID NO: 2499593 - DNA, 25 bp, Homo sapien
ctttgtaatcgttggagtcctgatt

SEQ ID NO: 2499594 - DNA, 25 bp, Homo sapien
tttgtaatcgttggagtcctgattc

SEQ ID NO: 2499595 - DNA, 25 bp, Homo sapien
tcaaggtatgtcagtgacatcagct

SEQ ID NO: 2499596 - DNA, 25 bp, Homo sapien
gacatcagctggtacattctaactt

SEQ ID NO: 2499597 - DNA, 25 bp, Homo sapien
tttcagccagctggtaaagtcagga

SEQ ID NO: 2499598 - DNA, 25 bp, Homo sapien
caggagcatgccaatttaaatttat

SEQ ID NO: 2499599 - DNA, 25 bp, Homo sapien
tcacaggattccatagtcattatag

SEQ ID NO: 2499600 - DNA, 25 bp, Homo sapien
ccatagtcattatagtgaaagagaa

SEQ ID NO: 2499601 - DNA, 25 bp, Homo sapien
aagagaaacagaaccttgtgttgag

SEQ ID NO: 2499602 - DNA, 25 bp, Homo sapien
tgttgagaccacacgactcccttct

SEQ ID NO: 2499603 - DNA, 25 bp, Homo sapien
tgccattctcttcggttgtctcttc

SEQ ID NO: 2499604 - DNA, 25 bp, Homo sapien
tttgccattctcttcggttgtctct

SEQ ID NO: 2499605 - DNA, 25 bp, Homo sapien
tgcttactgacaccgttttgccatt

SEQ ID NO: 2499606 - DNA, 25 bp, Homo sapien
gttattctgcttactgacaccgttt

SEQ ID NO: 2499607 - DNA, 25 bp, Homo sapien
ctgcagctagcttggtatctgcaca

SEQ ID NO: 2499608 - DNA, 25 bp, Homo sapien
ggtttgcagattgtgaagaccatgg

SEQ ID NO: 2499609 - DNA, 25 bp, Homo sapien
tcctggtttgcagattgtgaagacc

SEQ ID NO: 2499610 - DNA, 25 bp, Homo sapien
agcttggtatctgcacaaatggcca

SEQ ID NO: 2499611 - DNA, 25 bp, Homo sapien
tcaggatcagaaatgcaatacctct

SEQ ID NO: 2499612 - DNA, 25 bp, Homo sapien
tatgtgtatctagtgcactttctaa

SEQ ID NO: 2499613 - DNA, 25 bp, Homo sapien
caagactggtacattggttctcaaa

SEQ ID NO: 2499614 - DNA, 25 bp, Homo sapien
tatccataggtatactttcacactg

SEQ ID NO: 2499615 - DNA, 25 bp, Homo sapien
tgtatataagattattcctccatct

SEQ ID NO: 2499616 - DNA, 25 bp, Homo sapien
cctgtaaacctggaccactttgcca

SEQ ID NO: 2499617 - DNA, 25 bp, Homo sapien
gccttttcccgctgcacccattcaa

SEQ ID NO: 2499618 - DNA, 25 bp, Homo sapien
gcacccattcaatgtagataacata

SEQ ID NO: 2499619 - DNA, 25 bp, Homo sapien
cttgctggagtgaatgcctatgtgg

SEQ ID NO: 2499620 - DNA, 25 bp, Homo sapien
aacctgaacttcatcgtcctttcgg

SEQ ID NO: 2499621 - DNA, 25 bp, Homo sapien
aacttcatcgtcctttcggatgggc

SEQ ID NO: 2499622 - DNA, 25 bp, Homo sapien
cctgaacttcatcgtcctttcggat

SEQ ID NO: 2499623 - DNA, 25 bp, Homo sapien
tgaacttcatcgtcctttcggatgg

SEQ ID NO: 2499624 - DNA, 25 bp, Homo sapien
tttgcgattcttgcttcggtcggaa

SEQ ID NO: 2499625 - DNA, 25 bp, Homo sapien
tgcgattcttgcttcggtcggaagt

SEQ ID NO: 2499626 - DNA, 25 bp, Homo sapien
cttttgcgattcttgcttcggtcgg

SEQ ID NO: 2499627 - DNA, 25 bp, Homo sapien
cgattcttgcttcggtcggaagtca

SEQ ID NO: 2499628 - DNA, 25 bp, Homo sapien
gtatgcaaacactcaaataacagca

SEQ ID NO: 2499629 - DNA, 25 bp, Homo sapien
gaaacagtatgcaaacactcaaata

SEQ ID NO: 2499630 - DNA, 25 bp, Homo sapien
aacagtatgcaaacactcaaataac

SEQ ID NO: 2499631 - DNA, 25 bp, Homo sapien
cagtatgcaaacactcaaataacag

SEQ ID NO: 2499632 - DNA, 25 bp, Homo sapien
aagagcttggtaaggacttggtcac

SEQ ID NO: 2499633 - DNA, 25 bp, Homo sapien
gacttggtcactaccactaccgctg

SEQ ID NO: 2499634 - DNA, 25 bp, Homo sapien
accactaccgctgccatgaccttga

SEQ ID NO: 2499635 - DNA, 25 bp, Homo sapien
ggtaaggacttggtcactaccacta

SEQ ID NO: 2499636 - DNA, 25 bp, Homo sapien
tactttagtggtcaaatgattccaa

SEQ ID NO: 2499637 - DNA, 25 bp, Homo sapien
ccaacactgaaagccaatagctaca

SEQ ID NO: 2499638 - DNA, 25 bp, Homo sapien
tcaaagactagttatgagagctttt

SEQ ID NO: 2499639 - DNA, 25 bp, Homo sapien
ctgccagttgcaagataagaacatc

SEQ ID NO: 2499640 - DNA, 25 bp, Homo sapien
cttggagatggcagctccttgatca

SEQ ID NO: 2499641 - DNA, 25 bp, Homo sapien
ttggagatggcagctccttgatcat

SEQ ID NO: 2499642 - DNA, 25 bp, Homo sapien
tgtagctcagagtaatttgatcgtc

SEQ ID NO: 2499643 - DNA, 25 bp, Homo sapien
ctgtagctcagagtaatttgatcgt

SEQ ID NO: 2499644 - DNA, 25 bp, Homo sapien
cgaatcagatgtagatttggttttt

SEQ ID NO: 2499645 - DNA, 25 bp, Homo sapien
acacgaatcagatgtagatttggtt

SEQ ID NO: 2499646 - DNA, 25 bp, Homo sapien
gcatcctcaggttctatataagctt

SEQ ID NO: 2499647 - DNA, 25 bp, Homo sapien
atgcacttcaggtgtggttcttgtc

SEQ ID NO: 2499648 - DNA, 25 bp, Homo sapien
gacttggcaactctatgcacttcag

SEQ ID NO: 2499649 - DNA, 25 bp, Homo sapien
cagtaacctgtgtcagactgagtga

SEQ ID NO: 2499650 - DNA, 25 bp, Homo sapien
catagtggttaggtacactggctct

SEQ ID NO: 2499651 - DNA, 25 bp, Homo sapien
tatatggaggcaacacagtttcctg

SEQ ID NO: 2499652 - DNA, 25 bp, Homo sapien
tgtaaatggcatcctaaagtggagc

SEQ ID NO: 2499653 - DNA, 25 bp, Homo sapien
gccccggatgccaatgctctgttaa

SEQ ID NO: 2499654 - DNA, 25 bp, Homo sapien
tccagcagaaatatggaggaaggat

SEQ ID NO: 2499655 - DNA, 25 bp, Homo sapien
gaggaaggatgacacgaagcccagg

SEQ ID NO: 2499656 - DNA, 25 bp, Homo sapien
gcagaaatatggaggaaggatgaca

SEQ ID NO: 2499657 - DNA, 25 bp, Homo sapien
aagatccagcagaaatatggaggaa

SEQ ID NO: 2499658 - DNA, 25 bp, Homo sapien
tgatttgcataatgtaattacctgc

SEQ ID NO: 2499659 - DNA, 25 bp, Homo sapien
ttagaaagcaataggaggaacagtg

SEQ ID NO: 2499660 - DNA, 25 bp, Homo sapien
ctggtcaggcactgtattcagctaa

SEQ ID NO: 2499661 - DNA, 25 bp, Homo sapien
taaacacaaagctggtcagtgtcat

SEQ ID NO: 2499662 - DNA, 25 bp, Homo sapien
ggatagtcgtcctttcaaccaaatg

SEQ ID NO: 2499663 - DNA, 25 bp, Homo sapien
gccgtcagtaggatgacagatgtca

SEQ ID NO: 2499664 - DNA, 25 bp, Homo sapien
aaccaaatgtacaccttcaggaggg

SEQ ID NO: 2499665 - DNA, 25 bp, Homo sapien
gaagggacacttgcttagcgagcca

SEQ ID NO: 2499666 - DNA, 25 bp, Homo sapien
tgcccatgactgtcctgaatgatat

SEQ ID NO: 2499667 - DNA, 25 bp, Homo sapien
cccatgactgtcctgaatgatattg

SEQ ID NO: 2499668 - DNA, 25 bp, Homo sapien
tttgcccatgactgtcctgaatgat

SEQ ID NO: 2499669 - DNA, 25 bp, Homo sapien
catgactgtcctgaatgatattgcc

SEQ ID NO: 2499670 - DNA, 25 bp, Homo sapien
tcccaggttggaatagaaagccaat

SEQ ID NO: 2499671 - DNA, 25 bp, Homo sapien
gccaatccagatccagtgaaacaaa

SEQ ID NO: 2499672 - DNA, 25 bp, Homo sapien
tgtggtgagtagaagaatgccatac

SEQ ID NO: 2499673 - DNA, 25 bp, Homo sapien
tatgaagaccaatagaaccggatgt

SEQ ID NO: 2499674 - DNA, 25 bp, Homo sapien
aaggcagagctattgagtaatatgg

SEQ ID NO: 2499675 - DNA, 25 bp, Homo sapien
ctttaaatcattaatgcaggcaaca

SEQ ID NO: 2499676 - DNA, 25 bp, Homo sapien
cattaattgtgtacttgccagaagg

SEQ ID NO: 2499677 - DNA, 25 bp, Homo sapien
gctattgagtaatatgggctcatta

SEQ ID NO: 2499678 - DNA, 25 bp, Homo sapien
tcctggtactaggtacgatataacc

SEQ ID NO: 2499679 - DNA, 25 bp, Homo sapien
gatgtttccaatgtcgttcctggta

SEQ ID NO: 2499680 - DNA, 25 bp, Homo sapien
atttctacaacatacacctcacctg

SEQ ID NO: 2499681 - DNA, 25 bp, Homo sapien
taggtacgatataaccatctcttca

SEQ ID NO: 2499682 - DNA, 25 bp, Homo sapien
tgtcactacaaaactgataggctct

SEQ ID NO: 2499683 - DNA, 25 bp, Homo sapien
ggctggctgtactccataaaaaaga

SEQ ID NO: 2499684 - DNA, 25 bp, Homo sapien
tataaggtctcaagtgtgtcactac

SEQ ID NO: 2499685 - DNA, 25 bp, Homo sapien
tacgcgatggaggtgtaactctacc

SEQ ID NO: 2499686 - DNA, 25 bp, Homo sapien
tgctgaagcgttgtaggcctcaact

SEQ ID NO: 2499687 - DNA, 25 bp, Homo sapien
catttggttgccgaggtaaatacca

SEQ ID NO: 2499688 - DNA, 25 bp, Homo sapien
gcctcaactgtgagattcaccactt

SEQ ID NO: 2499689 - DNA, 25 bp, Homo sapien
tctggcatgcttgacactaatcttg

SEQ ID NO: 2499690 - DNA, 25 bp, Homo sapien
agagaaatggatcactaaacactcc

SEQ ID NO: 2499691 - DNA, 25 bp, Homo sapien
aagagaaatggatcactaaacactc

SEQ ID NO: 2499692 - DNA, 25 bp, Homo sapien
gagaaatggatcactaaacactcca

SEQ ID NO: 2499693 - DNA, 25 bp, Homo sapien
tacacagaaacagacatggatacac

SEQ ID NO: 2499694 - DNA, 25 bp, Homo sapien
tcaatacttggctgaagtactcttt

SEQ ID NO: 2499695 - DNA, 25 bp, Homo sapien
aatacttggctgaagtactctttca

SEQ ID NO: 2499696 - DNA, 25 bp, Homo sapien
tgttcaatacttggctgaagtactc

SEQ ID NO: 2499697 - DNA, 25 bp, Homo sapien
tattgttcaatacttggctgaagta

SEQ ID NO: 2499698 - DNA, 25 bp, Homo sapien
cacttgactgtatgatctgatcaca

SEQ ID NO: 2499699 - DNA, 25 bp, Homo sapien
atagtatcccaacttgtcagagagg

SEQ ID NO: 2499700 - DNA, 25 bp, Homo sapien
gctggtccttctttatccaggagag

SEQ ID NO: 2499701 - DNA, 25 bp, Homo sapien
tggttggccctctgccacttgactg

SEQ ID NO: 2499702 - DNA, 25 bp, Homo sapien
agccactggcttctcggtggtattc

SEQ ID NO: 2499703 - DNA, 25 bp, Homo sapien
acctggagcagacactgatatgact

SEQ ID NO: 2499704 - DNA, 25 bp, Homo sapien
cctggagcagacactgatatgactg

SEQ ID NO: 2499705 - DNA, 25 bp, Homo sapien
tctcggtggtattcaaacgccaagc

SEQ ID NO: 2499706 - DNA, 25 bp, Homo sapien
tttgtacagggaccgggaatcttga

SEQ ID NO: 2499707 - DNA, 25 bp, Homo sapien
cctggctggcttttagctaagggct

SEQ ID NO: 2499708 - DNA, 25 bp, Homo sapien
tccttcttgagagccaacaatagag

SEQ ID NO: 2499709 - DNA, 25 bp, Homo sapien
tataaggtcaggtccactggatagc

SEQ ID NO: 2499710 - DNA, 25 bp, Homo sapien
tcatcatccaaaacactacagttgg

SEQ ID NO: 2499711 - DNA, 25 bp, Homo sapien
gatcatcatccaaaacactacagtt

SEQ ID NO: 2499712 - DNA, 25 bp, Homo sapien
tctgatcatcatccaaaacactaca

SEQ ID NO: 2499713 - DNA, 25 bp, Homo sapien
catccaaaacactacagttggccct

SEQ ID NO: 2499714 - DNA, 25 bp, Homo sapien
tacaaatatgggatttagacctggg

SEQ ID NO: 2499715 - DNA, 25 bp, Homo sapien
aaacagcccgtaatgtcagtggtcc

SEQ ID NO: 2499716 - DNA, 25 bp, Homo sapien
gaatttcactgagaggatcacaaca

SEQ ID NO: 2499717 - DNA, 25 bp, Homo sapien
gacttaagccctaatgttgactcca

SEQ ID NO: 2499718 - DNA, 25 bp, Homo sapien
cacattaaagcgtttcacagaaaag

SEQ ID NO: 2499719 - DNA, 25 bp, Homo sapien
ccatcataggagtcatgcttgtcac

SEQ ID NO: 2499720 - DNA, 25 bp, Homo sapien
caaatatccatcataggagtcatgc

SEQ ID NO: 2499721 - DNA, 25 bp, Homo sapien
acagttcacattaaagcgtttcaca

SEQ ID NO: 2499722 - DNA, 25 bp, Homo sapien
gccagggaaagatgttgagtagcca

SEQ ID NO: 2499723 - DNA, 25 bp, Homo sapien
gaggctcctgagtgacggcgtcttc

SEQ ID NO: 2499724 - DNA, 25 bp, Homo sapien
tgagaactacccttactgacagagg

SEQ ID NO: 2499725 - DNA, 25 bp, Homo sapien
ccagcttttgcgagtttctgctctg

SEQ ID NO: 2499726 - DNA, 25 bp, Homo sapien
ctctttttatctggcgtagccctgg

SEQ ID NO: 2499727 - DNA, 25 bp, Homo sapien
tctggcgtagccctggataccgtat

SEQ ID NO: 2499728 - DNA, 25 bp, Homo sapien
ttttatctggcgtagccctggatac

SEQ ID NO: 2499729 - DNA, 25 bp, Homo sapien
gcgtagccctggataccgtattcat

SEQ ID NO: 2499730 - DNA, 25 bp, Homo sapien
tctcagcaggatggacgtgatggat

SEQ ID NO: 2499731 - DNA, 25 bp, Homo sapien
cgcccgggatttgcccatcggcgga

SEQ ID NO: 2499732 - DNA, 25 bp, Homo sapien
catccctctcgctgccgtccaggtg

SEQ ID NO: 2499733 - DNA, 25 bp, Homo sapien
agactagggagctccgcccgggatt

SEQ ID NO: 2499734 - DNA, 25 bp, Homo sapien
ggtaaattggcacatctttccatta

SEQ ID NO: 2499735 - DNA, 25 bp, Homo sapien
attccagggagtagacggtaaattg

SEQ ID NO: 2499736 - DNA, 25 bp, Homo sapien
ctttccattaagtaggacttgtttg

SEQ ID NO: 2499737 - DNA, 25 bp, Homo sapien
cattaagtaggacttgtttgccttc

SEQ ID NO: 2499738 - DNA, 25 bp, Homo sapien
taagattgagttcccaccctgtgtt

SEQ ID NO: 2499739 - DNA, 25 bp, Homo sapien
tgtagcaccaaatagacacagcggc

SEQ ID NO: 2499740 - DNA, 25 bp, Homo sapien
gaaacttaagagaaccacaggtggc

SEQ ID NO: 2499741 - DNA, 25 bp, Homo sapien
tttctatcaggtgtgaagaggaccc

SEQ ID NO: 2499742 - DNA, 25 bp, Homo sapien
cagtggcggttcaagcccagagaaa

SEQ ID NO: 2499743 - DNA, 25 bp, Homo sapien
gaaggtcaatgtatgtaaagcccac

SEQ ID NO: 2499744 - DNA, 25 bp, Homo sapien
ctgggattctgaagcacggtttcaa

SEQ ID NO: 2499745 - DNA, 25 bp, Homo sapien
taaagcccacgtgagcagtggcggt

SEQ ID NO: 2499746 - DNA, 25 bp, Homo sapien
agcagtcttgccagatactaccccc

SEQ ID NO: 2499747 - DNA, 25 bp, Homo sapien
cagtcttgccagatactacccccat

SEQ ID NO: 2499748 - DNA, 25 bp, Homo sapien
gcagtcttgccagatactaccccca

SEQ ID NO: 2499749 - DNA, 25 bp, Homo sapien
taaccctggattatttagttcaatc

SEQ ID NO: 2499750 - DNA, 25 bp, Homo sapien
ctaagaagcctatgttaaaataggg

SEQ ID NO: 2499751 - DNA, 25 bp, Homo sapien
ccctggattatttagttcaatccaa

SEQ ID NO: 2499752 - DNA, 25 bp, Homo sapien
tgtgggaaccaaaaaatcaatcatc

SEQ ID NO: 2499753 - DNA, 25 bp, Homo sapien
caatctacatgtactgcaggtatcc

SEQ ID NO: 2499754 - DNA, 25 bp, Homo sapien
tgaagctggacacctacgttgctcc

SEQ ID NO: 2499755 - DNA, 25 bp, Homo sapien
tatgtatgtctatttagctgaagct

SEQ ID NO: 2499756 - DNA, 25 bp, Homo sapien
gcacctggccgagtctaacttttta

SEQ ID NO: 2499757 - DNA, 25 bp, Homo sapien
taggcccatccacgctgacaaaaat

SEQ ID NO: 2499758 - DNA, 25 bp, Homo sapien
taccaagttgtataatagatcatct

SEQ ID NO: 2499759 - DNA, 25 bp, Homo sapien
tggtatttgtctgcccatgcttggc

SEQ ID NO: 2499760 - DNA, 25 bp, Homo sapien
caaatcaggctaccaaagttgttac

SEQ ID NO: 2499761 - DNA, 25 bp, Homo sapien
tgctgctgctgaattagcaattgct

SEQ ID NO: 2499762 - DNA, 25 bp, Homo sapien
tgctgaattagcaattgctgctgct

SEQ ID NO: 2499763 - DNA, 25 bp, Homo sapien
gctgctgaattagcaattgctgctg

SEQ ID NO: 2499764 - DNA, 25 bp, Homo sapien
ctatgacatgtggttttgttgtgtt

SEQ ID NO: 2499765 - DNA, 25 bp, Homo sapien
gcctggctgttcgtagcttttcaaa

SEQ ID NO: 2499766 - DNA, 25 bp, Homo sapien
tgttcgtagcttttcaaagcgagcc

SEQ ID NO: 2499767 - DNA, 25 bp, Homo sapien
tagcttttcaaagcgagcctccatt

SEQ ID NO: 2499768 - DNA, 25 bp, Homo sapien
ggctgttcgtagcttttcaaagcga

SEQ ID NO: 2499769 - DNA, 25 bp, Homo sapien
ccagcttgacgctgtctttagcagc

SEQ ID NO: 2499770 - DNA, 25 bp, Homo sapien
caccagcttgacgctgtctttagca

SEQ ID NO: 2499771 - DNA, 25 bp, Homo sapien
accagcttgacgctgtctttagcag

SEQ ID NO: 2499772 - DNA, 25 bp, Homo sapien
cttgagtagttccacagctttctca

SEQ ID NO: 2499773 - DNA, 25 bp, Homo sapien
agagttgagagaaaaacggctggct

SEQ ID NO: 2499774 - DNA, 25 bp, Homo sapien
ggtggtgaagagttgagagaaaaac

SEQ ID NO: 2499775 - DNA, 25 bp, Homo sapien
gtgaagagttgagagaaaaacggct

SEQ ID NO: 2499776 - DNA, 25 bp, Homo sapien
agagaaaaacggctggctggtgcac

SEQ ID NO: 2499777 - DNA, 25 bp, Homo sapien
gtatcaaaagcagactccacagttt

SEQ ID NO: 2499778 - DNA, 25 bp, Homo sapien
ccctgcaaaaccatcaaggttatcc

SEQ ID NO: 2499779 - DNA, 25 bp, Homo sapien
caatgtatcaaaagcagactccaca

SEQ ID NO: 2499780 - DNA, 25 bp, Homo sapien
atcaaggttatcctcttccagtccc

SEQ ID NO: 2499781 - DNA, 25 bp, Homo sapien
tacgtatatgtaaaaatagcagtgc

SEQ ID NO: 2499782 - DNA, 25 bp, Homo sapien
aaaaggtctatgtacagatgaggca

SEQ ID NO: 2499783 - DNA, 25 bp, Homo sapien
gatgaggcaaaatctccaagacatt

SEQ ID NO: 2499784 - DNA, 25 bp, Homo sapien
ccaagaaagcaagtcatagataata

SEQ ID NO: 2499785 - DNA, 25 bp, Homo sapien
gctggaacggattgaggaaaacagt

SEQ ID NO: 2499786 - DNA, 25 bp, Homo sapien
tcattgtctggaggctgacctctta

SEQ ID NO: 2499787 - DNA, 25 bp, Homo sapien
agaaacgttcagatgcatgctcact

SEQ ID NO: 2499788 - DNA, 25 bp, Homo sapien
catggccacaccgttaatgggtaac

SEQ ID NO: 2499789 - DNA, 25 bp, Homo sapien
ggaaaggtcattctagaacaaacca

SEQ ID NO: 2499790 - DNA, 25 bp, Homo sapien
tatagtctgtgggagcttcaaaacc

SEQ ID NO: 2499791 - DNA, 25 bp, Homo sapien
tgtttaaatagtactttcaggcaga

SEQ ID NO: 2499792 - DNA, 25 bp, Homo sapien
gcccagtatcatcccataaggatca

SEQ ID NO: 2499793 - DNA, 25 bp, Homo sapien
catcgttaatttgctgaaacccaag

SEQ ID NO: 2499794 - DNA, 25 bp, Homo sapien
cagtcacaatgtaatgccaatgata

SEQ ID NO: 2499795 - DNA, 25 bp, Homo sapien
ctgtttgaactatcatgactgaatg

SEQ ID NO: 2499796 - DNA, 25 bp, Homo sapien
tcacttatacggcatggcagatcat

SEQ ID NO: 2499797 - DNA, 25 bp, Homo sapien
taattctggccacttctaaaccact

SEQ ID NO: 2499798 - DNA, 25 bp, Homo sapien
tgcttttcatctaatggctcctgag

SEQ ID NO: 2499799 - DNA, 25 bp, Homo sapien
ccacagagagtaatcagttgaccta

SEQ ID NO: 2499800 - DNA, 25 bp, Homo sapien
tcttgatagatgtgagattccacag

SEQ ID NO: 2499801 - DNA, 25 bp, Homo sapien
tcatttagagacttgccgtttagca

SEQ ID NO: 2499802 - DNA, 25 bp, Homo sapien
gggaatgcttccctcatttagagac

SEQ ID NO: 2499803 - DNA, 25 bp, Homo sapien
cgactgactgtgagtgtgttctggc

SEQ ID NO: 2499804 - DNA, 25 bp, Homo sapien
taggtcagtctgatcccatgtgtgg

SEQ ID NO: 2499805 - DNA, 25 bp, Homo sapien
cgcaattgtgtgacctagctctaga

SEQ ID NO: 2499806 - DNA, 25 bp, Homo sapien
tagagtcctctaccagaaagttaga

SEQ ID NO: 2499807 - DNA, 25 bp, Homo sapien
gggcataagcctctatgtgacgcaa

SEQ ID NO: 2499808 - DNA, 25 bp, Homo sapien
caagttcatactctggggcataagc

SEQ ID NO: 2499809 - DNA, 25 bp, Homo sapien
gaaagctggttagacataaaatgaa

SEQ ID NO: 2499810 - DNA, 25 bp, Homo sapien
tatccatcaatgcttagaaagctgg

SEQ ID NO: 2499811 - DNA, 25 bp, Homo sapien
tgtgcttaaggagaaaatctctggt

SEQ ID NO: 2499812 - DNA, 25 bp, Homo sapien
aacgttgacttcagtaatagcaggg

SEQ ID NO: 2499813 - DNA, 25 bp, Homo sapien
catcacattaaaaccaaggccttca

SEQ ID NO: 2499814 - DNA, 25 bp, Homo sapien
tggcagttcaactactcgagggtgg

SEQ ID NO: 2499815 - DNA, 25 bp, Homo sapien
tccgttcactgatagcagctggtct

SEQ ID NO: 2499816 - DNA, 25 bp, Homo sapien
tccaggaattatgcgagagatataa

SEQ ID NO: 2499817 - DNA, 25 bp, Homo sapien
tgccactgatgtctaaattctctta

SEQ ID NO: 2499818 - DNA, 25 bp, Homo sapien
ctgccactgatgtctaaattctctt

SEQ ID NO: 2499819 - DNA, 25 bp, Homo sapien
tagtactggttctagactctgggct

SEQ ID NO: 2499820 - DNA, 25 bp, Homo sapien
gagaagtagtactggttctagactc

SEQ ID NO: 2499821 - DNA, 25 bp, Homo sapien
gaattcgggacagccattaacagtt

SEQ ID NO: 2499822 - DNA, 25 bp, Homo sapien
tcgtttcatgcatatattgatacac

SEQ ID NO: 2499823 - DNA, 25 bp, Homo sapien
ctcgcacggaattcgggacagccat

SEQ ID NO: 2499824 - DNA, 25 bp, Homo sapien
ccattaacagttatcgtttcatgca

SEQ ID NO: 2499825 - DNA, 25 bp, Homo sapien
gagtgtctgggactaatctcttccc

SEQ ID NO: 2499826 - DNA, 25 bp, Homo sapien
caaagtagtctgtactaaaaaggca

SEQ ID NO: 2499827 - DNA, 25 bp, Homo sapien
cccaggtgacatggttagaaggaaa

SEQ ID NO: 2499828 - DNA, 25 bp, Homo sapien
ggttgaatctccactaacgctgact

SEQ ID NO: 2499829 - DNA, 25 bp, Homo sapien
gctgctaaacgtacttccagattat

SEQ ID NO: 2499830 - DNA, 25 bp, Homo sapien
tgaacagctgctaaacgtacttcca

SEQ ID NO: 2499831 - DNA, 25 bp, Homo sapien
cagctgctaaacgtacttccagatt

SEQ ID NO: 2499832 - DNA, 25 bp, Homo sapien
aacagctgctaaacgtacttccaga

SEQ ID NO: 2499833 - DNA, 25 bp, Homo sapien
tcatcaaggctcaaatcgacccagt

SEQ ID NO: 2499834 - DNA, 25 bp, Homo sapien
gagggctccaccattaaagcagata

SEQ ID NO: 2499835 - DNA, 25 bp, Homo sapien
cctgcggccagccattttttgcaaa

SEQ ID NO: 2499836 - DNA, 25 bp, Homo sapien
tgaaaacatgtcacccgtcggacaa

SEQ ID NO: 2499837 - DNA, 25 bp, Homo sapien
gtgtggttgatcagcatgcaggaac

SEQ ID NO: 2499838 - DNA, 25 bp, Homo sapien
ctgtttattagttgccccaatatcc

SEQ ID NO: 2499839 - DNA, 25 bp, Homo sapien
gcatgcaggaactgtacaaggtcat

SEQ ID NO: 2499840 - DNA, 25 bp, Homo sapien
ttagttgccccaatatccttatgga

SEQ ID NO: 2499841 - DNA, 25 bp, Homo sapien
tgctggcaggaatcaaagtcttcag

SEQ ID NO: 2499842 - DNA, 25 bp, Homo sapien
tgtaactgctgagcctcttctggtg

SEQ ID NO: 2499843 - DNA, 25 bp, Homo sapien
gcaactggataaactgcacaggagt

SEQ ID NO: 2499844 - DNA, 25 bp, Homo sapien
ccgcaaatatgttcaggtgctcaca

SEQ ID NO: 2499845 - DNA, 25 bp, Homo sapien
tgtgcccacatttgatggtgacggg

SEQ ID NO: 2499846 - DNA, 25 bp, Homo sapien
ccagcgctgcttgatggaggagtga

SEQ ID NO: 2499847 - DNA, 25 bp, Homo sapien
ccacatttgatggtgacggggtcac

SEQ ID NO: 2499848 - DNA, 25 bp, Homo sapien
atggaggagtgacagaagttgtgcc

SEQ ID NO: 2499849 - DNA, 25 bp, Homo sapien
gatagttgaggttataactgtctca

SEQ ID NO: 2499850 - DNA, 25 bp, Homo sapien
cagatagttgaggttataactgtct

SEQ ID NO: 2499851 - DNA, 25 bp, Homo sapien
tgaggttataactgtctcaactatc

SEQ ID NO: 2499852 - DNA, 25 bp, Homo sapien
gttataactgtctcaactatcacca

SEQ ID NO: 2499853 - DNA, 25 bp, Homo sapien
gacctcattggtagtaacatgtgaa

SEQ ID NO: 2499854 - DNA, 25 bp, Homo sapien
gatgcttaaccatagggtaaggaca

SEQ ID NO: 2499855 - DNA, 25 bp, Homo sapien
gttatagacacaacagacatctctg

SEQ ID NO: 2499856 - DNA, 25 bp, Homo sapien
tgcagaaacctcactgaattgagtg

SEQ ID NO: 2499857 - DNA, 25 bp, Homo sapien
tatttgccaggaagtagacatgtgt

SEQ ID NO: 2499858 - DNA, 25 bp, Homo sapien
ttatttgccaggaagtagacatgtg

SEQ ID NO: 2499859 - DNA, 25 bp, Homo sapien
tttgccaggaagtagacatgtgttt

SEQ ID NO: 2499860 - DNA, 25 bp, Homo sapien
gccaggaagtagacatgtgttttca

SEQ ID NO: 2499861 - DNA, 25 bp, Homo sapien
cagacactgattattcctctcacat

SEQ ID NO: 2499862 - DNA, 25 bp, Homo sapien
cactgattattcctctcacattgct

SEQ ID NO: 2499863 - DNA, 25 bp, Homo sapien
gacactgattattcctctcacattg

SEQ ID NO: 2499864 - DNA, 25 bp, Homo sapien
tgattattcctctcacattgctcat

SEQ ID NO: 2499865 - DNA, 25 bp, Homo sapien
gttgagagccccaggttggtaagac

SEQ ID NO: 2499866 - DNA, 25 bp, Homo sapien
cacattgtctccatatgggcttata

SEQ ID NO: 2499867 - DNA, 25 bp, Homo sapien
tcagttgcactgtaaggtagaattc

SEQ ID NO: 2499868 - DNA, 25 bp, Homo sapien
tattcctcagaacagttagccctga

SEQ ID NO: 2499869 - DNA, 25 bp, Homo sapien
gcagtaggatacgtctgagatgtcc

SEQ ID NO: 2499870 - DNA, 25 bp, Homo sapien
tactcttgggctggactttaggcag

SEQ ID NO: 2499871 - DNA, 25 bp, Homo sapien
tgctagcaaatagggaataggcagc

SEQ ID NO: 2499872 - DNA, 25 bp, Homo sapien
acttattatatggtgaacaggtccc

SEQ ID NO: 2499873 - DNA, 25 bp, Homo sapien
actagaactagactgggacctggga

SEQ ID NO: 2499874 - DNA, 25 bp, Homo sapien
ttaactgaggcaaagaaaggacaaa

SEQ ID NO: 2499875 - DNA, 25 bp, Homo sapien
tcattgttgttggtacaaatggaac

SEQ ID NO: 2499876 - DNA, 25 bp, Homo sapien
taaaataatgtttcggctggccgcg

SEQ ID NO: 2499877 - DNA, 25 bp, Homo sapien
tctgaaattgaaagactagcctcat

SEQ ID NO: 2499878 - DNA, 25 bp, Homo sapien
aatctgaaattgaaagactagcctc

SEQ ID NO: 2499879 - DNA, 25 bp, Homo sapien
aaaatctgaaattgaaagactagcc

SEQ ID NO: 2499880 - DNA, 25 bp, Homo sapien
gaaaatctgaaattgaaagactagc

SEQ ID NO: 2499881 - DNA, 25 bp, Homo sapien
tataaatgtgagagtaagtccttac

SEQ ID NO: 2499882 - DNA, 25 bp, Homo sapien
ttataaatgtgagagtaagtcctta

SEQ ID NO: 2499883 - DNA, 25 bp, Homo sapien
gaccactgttagcagcacatcatcc

SEQ ID NO: 2499884 - DNA, 25 bp, Homo sapien
cactgttagcagcacatcatcctcc

SEQ ID NO: 2499885 - DNA, 25 bp, Homo sapien
acagaccactgttagcagcacatca

SEQ ID NO: 2499886 - DNA, 25 bp, Homo sapien
cagaccactgttagcagcacatcat

SEQ ID NO: 2499887 - DNA, 25 bp, Homo sapien
ctctcgaatagctgtacaaaactca

SEQ ID NO: 2499888 - DNA, 25 bp, Homo sapien
tgtacaaaactcactctgaagcact

SEQ ID NO: 2499889 - DNA, 25 bp, Homo sapien
agggattgtagcttgtgcactggta

SEQ ID NO: 2499890 - DNA, 25 bp, Homo sapien
tctgaagcacttttttgagggattg

SEQ ID NO: 2499891 - DNA, 25 bp, Homo sapien
tctctgaagcagcttcagttgctat

SEQ ID NO: 2499892 - DNA, 25 bp, Homo sapien
ctctgaagcagcttcagttgctatc

SEQ ID NO: 2499893 - DNA, 25 bp, Homo sapien
tctgaagcagcttcagttgctatca

SEQ ID NO: 2499894 - DNA, 25 bp, Homo sapien
ctgaagcagcttcagttgctatcat

SEQ ID NO: 2499895 - DNA, 25 bp, Homo sapien
atggacaaactgctggcataagcct

SEQ ID NO: 2499896 - DNA, 25 bp, Homo sapien
tacactagaagtacagctgtaggaa

SEQ ID NO: 2499897 - DNA, 25 bp, Homo sapien
gatataactcaacagtgcactgctg

SEQ ID NO: 2499898 - DNA, 25 bp, Homo sapien
tgatgggcacttaggcactacctaa

SEQ ID NO: 2499899 - DNA, 25 bp, Homo sapien
gacctcaattgattttagatgcagc

SEQ ID NO: 2499900 - DNA, 25 bp, Homo sapien
taggcagttttggactaactcaacg

SEQ ID NO: 2499901 - DNA, 25 bp, Homo sapien
tatagtgtaaaggattgaggttcaa

SEQ ID NO: 2499902 - DNA, 25 bp, Homo sapien
tacagtaccattattgaagaaagct

SEQ ID NO: 2499903 - DNA, 25 bp, Homo sapien
taactcaacgcctcaaagattttct

SEQ ID NO: 2499904 - DNA, 25 bp, Homo sapien
aatgccaaagaagtttgaaagcagt

SEQ ID NO: 2499905 - DNA, 25 bp, Homo sapien
ggaatgcaaattcaaatgccaaaga

SEQ ID NO: 2499906 - DNA, 25 bp, Homo sapien
tgacatttccataatggaatgcaaa

SEQ ID NO: 2499907 - DNA, 25 bp, Homo sapien
catttccataatggaatgcaaattc

SEQ ID NO: 2499908 - DNA, 25 bp, Homo sapien
tacctgcataagcattttagaaatt

SEQ ID NO: 2499909 - DNA, 25 bp, Homo sapien
catacctgcataagcattttagaaa

SEQ ID NO: 2499910 - DNA, 25 bp, Homo sapien
ctccatacctgcataagcattttag

SEQ ID NO: 2499911 - DNA, 25 bp, Homo sapien
ccatacctgcataagcattttagaa

SEQ ID NO: 2499912 - DNA, 25 bp, Homo sapien
agactccatattctgaccttgaaaa

SEQ ID NO: 2499913 - DNA, 25 bp, Homo sapien
attctgaccttgaaaatgcatctac

SEQ ID NO: 2499914 - DNA, 25 bp, Homo sapien
tatttctcttccagactccatattc

SEQ ID NO: 2499915 - DNA, 25 bp, Homo sapien
aaaatgcatctacatattttgctac

SEQ ID NO: 2499916 - DNA, 25 bp, Homo sapien
cgaggaaacgggagcctgggattgt

SEQ ID NO: 2499917 - DNA, 25 bp, Homo sapien
tgtgttcgcaatgaattatgaggca

SEQ ID NO: 2499918 - DNA, 25 bp, Homo sapien
tctgagaatgtggagacgaggaaac

SEQ ID NO: 2499919 - DNA, 25 bp, Homo sapien
gggattgtgatcttgatgtgttcgc

SEQ ID NO: 2499920 - DNA, 25 bp, Homo sapien
ccaaagaatgatcgggttccgtgaa

SEQ ID NO: 2499921 - DNA, 25 bp, Homo sapien
tgtttataaagcacgaatcttcccc

SEQ ID NO: 2499922 - DNA, 25 bp, Homo sapien
ttccgtgaacagagtttcgtcgtct

SEQ ID NO: 2499923 - DNA, 25 bp, Homo sapien
tcctcctcaagttaagatcagatca

SEQ ID NO: 2499924 - DNA, 25 bp, Homo sapien
tgcctcaattgttccttgcaagttc

SEQ ID NO: 2499925 - DNA, 25 bp, Homo sapien
cctcaattgttccttgcaagttcat

SEQ ID NO: 2499926 - DNA, 25 bp, Homo sapien
gcctcaattgttccttgcaagttca

SEQ ID NO: 2499927 - DNA, 25 bp, Homo sapien
gtgcctcaattgttccttgcaagtt

SEQ ID NO: 2499928 - DNA, 25 bp, Homo sapien
tttccccgttcaagtcagagagcag

SEQ ID NO: 2499929 - DNA, 25 bp, Homo sapien
gaaaggttgctatgggcaccacaga

SEQ ID NO: 2499930 - DNA, 25 bp, Homo sapien
cgagagttgctatcgaccgggagct

SEQ ID NO: 2499931 - DNA, 25 bp, Homo sapien
tttcgatctcgaagccgcggagagc

SEQ ID NO: 2499932 - DNA, 25 bp, Homo sapien
caatgtcgccatgtctgccgtggga

SEQ ID NO: 2499933 - DNA, 25 bp, Homo sapien
ccatgtctgccgtgggagccgaagt

SEQ ID NO: 2499934 - DNA, 25 bp, Homo sapien
gagccgaagtgacgctcggcttcag

SEQ ID NO: 2499935 - DNA, 25 bp, Homo sapien
gctggaccactgtcaatgtcgccat

SEQ ID NO: 2499936 - DNA, 25 bp, Homo sapien
gggttggtagccagatggagacgca

SEQ ID NO: 2499937 - DNA, 25 bp, Homo sapien
agcttgggtgggttggtagccagat

SEQ ID NO: 2499938 - DNA, 25 bp, Homo sapien
cagcaaccgctcgtagtgagaaaaa

SEQ ID NO: 2499939 - DNA, 25 bp, Homo sapien
gacgcaactgttccgcggcggcaga

SEQ ID NO: 2499940 - DNA, 25 bp, Homo sapien
gagaaattgccaatccaataatccc

SEQ ID NO: 2499941 - DNA, 25 bp, Homo sapien
ctggcgggttgcttcctttcaactt

SEQ ID NO: 2499942 - DNA, 25 bp, Homo sapien
ggagatgagttttctcagattaaga

SEQ ID NO: 2499943 - DNA, 25 bp, Homo sapien
ggagcgctgggtgggtgtagctggc

SEQ ID NO: 2499944 - DNA, 25 bp, Homo sapien
cggaatgttgacctataacggcata

SEQ ID NO: 2499945 - DNA, 25 bp, Homo sapien
gactaaaggccagcgttccatcagt

SEQ ID NO: 2499946 - DNA, 25 bp, Homo sapien
taacggcatataaagataactgact

SEQ ID NO: 2499947 - DNA, 25 bp, Homo sapien
tgaagtttttcggaatgttgaccta

SEQ ID NO: 2499948 - DNA, 25 bp, Homo sapien
ggatgtagaacaataaccgaactga

SEQ ID NO: 2499949 - DNA, 25 bp, Homo sapien
taggaaatcatggtggacagtgacc

SEQ ID NO: 2499950 - DNA, 25 bp, Homo sapien
tgcatatagtgctctctactggcct

SEQ ID NO: 2499951 - DNA, 25 bp, Homo sapien
tattacaactacaatcagtgtcgag

SEQ ID NO: 2499952 - DNA, 25 bp, Homo sapien
gactgcctgactgagtaaacgtgga

SEQ ID NO: 2499953 - DNA, 25 bp, Homo sapien
taaacgtggatggaggaaaccctca

SEQ ID NO: 2499954 - DNA, 25 bp, Homo sapien
tagttcggctattgcttagtggcct

SEQ ID NO: 2499955 - DNA, 25 bp, Homo sapien
gatctttcccatcatgactgcctga

SEQ ID NO: 2499956 - DNA, 25 bp, Homo sapien
atttgaactgatacgactacttctt

SEQ ID NO: 2499957 - DNA, 25 bp, Homo sapien
tttgaactgatacgactacttcttt

SEQ ID NO: 2499958 - DNA, 25 bp, Homo sapien
gctctgcttgtgctagtattgcagt

SEQ ID NO: 2499959 - DNA, 25 bp, Homo sapien
tgcttgtgctagtattgcagtttac

SEQ ID NO: 2499960 - DNA, 25 bp, Homo sapien
tgtgctagtattgcagtttactgag

SEQ ID NO: 2499961 - DNA, 25 bp, Homo sapien
ggctctgcttgtgctagtattgcag

SEQ ID NO: 2499962 - DNA, 25 bp, Homo sapien
tgaggagctcatctgacactgctgc

SEQ ID NO: 2499963 - DNA, 25 bp, Homo sapien
ctgctgaggagctcatctgacactg

SEQ ID NO: 2499964 - DNA, 25 bp, Homo sapien
actgctgctatttctgctgaggcca

SEQ ID NO: 2499965 - DNA, 25 bp, Homo sapien
gagctcatctgacactgctgctatt

SEQ ID NO: 2499966 - DNA, 25 bp, Homo sapien
tactcagtcggttctagttatgccc

SEQ ID NO: 2499967 - DNA, 25 bp, Homo sapien
ctataagacccctgaaggatggtgt

SEQ ID NO: 2499968 - DNA, 25 bp, Homo sapien
ttcactctgtgactactctaccggc

SEQ ID NO: 2499969 - DNA, 25 bp, Homo sapien
tttaggagtcaaagagtcagctgct

SEQ ID NO: 2499970 - DNA, 25 bp, Homo sapien
tgcctacgtcgttgttcccttcatg

SEQ ID NO: 2499971 - DNA, 25 bp, Homo sapien
gttaggcaatcaactacactttatg

SEQ ID NO: 2499972 - DNA, 25 bp, Homo sapien
tgccagtatttgagtaccacacagt

SEQ ID NO: 2499973 - DNA, 25 bp, Homo sapien
ccacacagtggtattagttaggaat

SEQ ID NO: 2499974 - DNA, 25 bp, Homo sapien
gatcacatgcggagtctggtcagca

SEQ ID NO: 2499975 - DNA, 25 bp, Homo sapien
tctgctagtgatgaccaaacctggt

SEQ ID NO: 2499976 - DNA, 25 bp, Homo sapien
gagtttgagcgcgatttttcccgga

SEQ ID NO: 2499977 - DNA, 25 bp, Homo sapien
tcagtggtcaggaaatcccggagca

SEQ ID NO: 2499978 - DNA, 25 bp, Homo sapien
aactccagacctggatcaatccaat

SEQ ID NO: 2499979 - DNA, 25 bp, Homo sapien
gtcttcattactgtatctgatacgt

SEQ ID NO: 2499980 - DNA, 25 bp, Homo sapien
cttcattactgtatctgatacgttg

SEQ ID NO: 2499981 - DNA, 25 bp, Homo sapien
cattactgtatctgatacgttgaat

SEQ ID NO: 2499982 - DNA, 25 bp, Homo sapien
ggtgattatatctgcgccaatggcc

SEQ ID NO: 2499983 - DNA, 25 bp, Homo sapien
caggattgccgagtaggtgtctata

SEQ ID NO: 2499984 - DNA, 25 bp, Homo sapien
tatgtgatggttactcccagtggca

SEQ ID NO: 2499985 - DNA, 25 bp, Homo sapien
cattttacacatcccgcctgggtga

SEQ ID NO: 2499986 - DNA, 25 bp, Homo sapien
cagatgtccttttaggtatgggaga

SEQ ID NO: 2499987 - DNA, 25 bp, Homo sapien
aatattccagcaaccacatgtgagc

SEQ ID NO: 2499988 - DNA, 25 bp, Homo sapien
tcctgatgggcacttacttcctgcc

SEQ ID NO: 2499989 - DNA, 25 bp, Homo sapien
ccctggagttgtcaagttgctgtat

SEQ ID NO: 2499990 - DNA, 25 bp, Homo sapien
agcttctgacttaggctgggttgtt

SEQ ID NO: 2499991 - DNA, 25 bp, Homo sapien
ctgacttaggctgggttgttggaca

SEQ ID NO: 2499992 - DNA, 25 bp, Homo sapien
ttctgacttaggctgggttgttgga

SEQ ID NO: 2499993 - DNA, 25 bp, Homo sapien
acttaggctgggttgttggacattc

SEQ ID NO: 2499994 - DNA, 25 bp, Homo sapien
gctcaagaagagtgtagatgctcta

SEQ ID NO: 2499995 - DNA, 25 bp, Homo sapien
tttgcgctatttaccatgggctttt

SEQ ID NO: 2499996 - DNA, 25 bp, Homo sapien
catgatattaacactgtgatggagg

SEQ ID NO: 2499997 - DNA, 25 bp, Homo sapien
tatgacaaagccaaagatgctaaca

SEQ ID NO: 2499998 - DNA, 25 bp, Homo sapien
tgttttatgttggagctagcaagct

SEQ ID NO: 2499999 - DNA, 25 bp, Homo sapien
tcagatatggccttccaccaaaggc

SEQ ID NO: 2500000 - DNA, 25 bp, Homo sapien
aggctctgacaatatattcaaggaa

SEQ ID NO: 2500001 - DNA, 25 bp, Homo sapien
gatttttcccatgactagttgttaa

SEQ ID NO: 2500002 - DNA, 25 bp, Homo sapien
tactttccttgagtcaactagctag

SEQ ID NO: 2500003 - DNA, 25 bp, Homo sapien
gggagtaggataagaccagtgtctc

SEQ ID NO: 2500004 - DNA, 25 bp, Homo sapien
ccagtgtctcatagctcgaattaat

SEQ ID NO: 2500005 - DNA, 25 bp, Homo sapien
tccacagttagaggcaatgtgctat

SEQ ID NO: 2500006 - DNA, 25 bp, Homo sapien
aattgcctctatgcccatcgtgatg

SEQ ID NO: 2500007 - DNA, 25 bp, Homo sapien
cagtactaggttgctgcattgattt

SEQ ID NO: 2500008 - DNA, 25 bp, Homo sapien
gctttctttctgctacctattcaag

SEQ ID NO: 2500009 - DNA, 25 bp, Homo sapien
tgtgattaatatgattcagcagtac

SEQ ID NO: 2500010 - DNA, 25 bp, Homo sapien
ggttgggatcatcagtttagtgctc

SEQ ID NO: 2500011 - DNA, 25 bp, Homo sapien
caattctgagcaaatcgcctttaca

SEQ ID NO: 2500012 - DNA, 25 bp, Homo sapien
gctccagttagcaactgaagagatt

SEQ ID NO: 2500013 - DNA, 25 bp, Homo sapien
gtatccagacaatcaccaagacctt

SEQ ID NO: 2500014 - DNA, 25 bp, Homo sapien
gactggactgttggtcctgctgata

SEQ ID NO: 2500015 - DNA, 25 bp, Homo sapien
caggcacacagactgatttcagctg

SEQ ID NO: 2500016 - DNA, 25 bp, Homo sapien
taggcccctgatctttatcatggga

SEQ ID NO: 2500017 - DNA, 25 bp, Homo sapien
gaagtatgcattaactagtcagcaa

SEQ ID NO: 2500018 - DNA, 25 bp, Homo sapien
cccaaaagtataccatgctcattgt

SEQ ID NO: 2500019 - DNA, 25 bp, Homo sapien
tcaggaacattactatcaagagcag

SEQ ID NO: 2500020 - DNA, 25 bp, Homo sapien
cttagggatctatatgacatcagtt

SEQ ID NO: 2500021 - DNA, 25 bp, Homo sapien
gaatgggccagttaactaaggtaga

SEQ ID NO: 2500022 - DNA, 25 bp, Homo sapien
ggccatctcggctaaaagcttataa

SEQ ID NO: 2500023 - DNA, 25 bp, Homo sapien
gtagagtagactgaaaagacgccat

SEQ ID NO: 2500024 - DNA, 25 bp, Homo sapien
tagacatgagtctggctaatgccct

SEQ ID NO: 2500025 - DNA, 25 bp, Homo sapien
cttcagggaagtcgcaacaaggcca

SEQ ID NO: 2500026 - DNA, 25 bp, Homo sapien
tgggagacctcttatttagccaaat

SEQ ID NO: 2500027 - DNA, 25 bp, Homo sapien
tgtgtggcacttttagttcaaggca

SEQ ID NO: 2500028 - DNA, 25 bp, Homo sapien
cacaaggtgagttgttcctctgtct

SEQ ID NO: 2500029 - DNA, 25 bp, Homo sapien
caaatagtgatccaaataaggcagc

SEQ ID NO: 2500030 - DNA, 25 bp, Homo sapien
agtgctgcctcctttgagtggctgg

SEQ ID NO: 2500031 - DNA, 25 bp, Homo sapien
tcagtgctgcctcctttgagtggct

SEQ ID NO: 2500032 - DNA, 25 bp, Homo sapien
agcaggtcagtgctgcctcctttga

SEQ ID NO: 2500033 - DNA, 25 bp, Homo sapien
ggtcagtgctgcctcctttgagtgg

SEQ ID NO: 2500034 - DNA, 25 bp, Homo sapien
gcgaacagtggagttgtctaacctc

SEQ ID NO: 2500035 - DNA, 25 bp, Homo sapien
agtatgtgcgaacagtggagttgtc

SEQ ID NO: 2500036 - DNA, 25 bp, Homo sapien
acatgagtatgtgcgaacagtggag

SEQ ID NO: 2500037 - DNA, 25 bp, Homo sapien
tcaacatgagtatgtgcgaacagtg

SEQ ID NO: 2500038 - DNA, 25 bp, Homo sapien
cgatgtttattgttcctcctagagg

SEQ ID NO: 2500039 - DNA, 25 bp, Homo sapien
tagggagacagtggagttaatttcc

SEQ ID NO: 2500040 - DNA, 25 bp, Homo sapien
cagtatttaaacatgtagggagaca

SEQ ID NO: 2500041 - DNA, 25 bp, Homo sapien
gatgacatataaaactcgcagtatt

SEQ ID NO: 2500042 - DNA, 25 bp, Homo sapien
ttttcttgactgcccagaggttgtg

SEQ ID NO: 2500043 - DNA, 25 bp, Homo sapien
ggacccaggcatcatgctgattcca

SEQ ID NO: 2500044 - DNA, 25 bp, Homo sapien
ggttgatccacgtctgaagttcttg

SEQ ID NO: 2500045 - DNA, 25 bp, Homo sapien
tgtacttcacgaggaggaaactgcc

SEQ ID NO: 2500046 - DNA, 25 bp, Homo sapien
tgattccatgtacttcacgaggagg

SEQ ID NO: 2500047 - DNA, 25 bp, Homo sapien
cattttgtttcagtgtggtagccat

SEQ ID NO: 2500048 - DNA, 25 bp, Homo sapien
gcacattaagagatgtccgctactc

SEQ ID NO: 2500049 - DNA, 25 bp, Homo sapien
gggacatttaaagtcaatcagggaa

SEQ ID NO: 2500050 - DNA, 25 bp, Homo sapien
tgccatagataggtatagccaagta

SEQ ID NO: 2500051 - DNA, 25 bp, Homo sapien
gccaagaggttattgtattctcttt

SEQ ID NO: 2500052 - DNA, 25 bp, Homo sapien
caagaggttattgtattctctttca

SEQ ID NO: 2500053 - DNA, 25 bp, Homo sapien
gggccaagaggttattgtattctct

SEQ ID NO: 2500054 - DNA, 25 bp, Homo sapien
tcatccagtcgcctttcagttccca

SEQ ID NO: 2500055 - DNA, 25 bp, Homo sapien
tactatatttcaattgagtattttg

SEQ ID NO: 2500056 - DNA, 25 bp, Homo sapien
actatatttcaattgagtattttgt

SEQ ID NO: 2500057 - DNA, 25 bp, Homo sapien
ttcatccagggctataagtgagcca

SEQ ID NO: 2500058 - DNA, 25 bp, Homo sapien
catccagggctataagtgagccatg

SEQ ID NO: 2500059 - DNA, 25 bp, Homo sapien
ttttcatccagggctataagtgagc

SEQ ID NO: 2500060 - DNA, 25 bp, Homo sapien
tccagggctataagtgagccatgca

SEQ ID NO: 2500061 - DNA, 25 bp, Homo sapien
tattctcgaagtccaattgcttgta

SEQ ID NO: 2500062 - DNA, 25 bp, Homo sapien
gtccaattgcttgtatccagcgaat

SEQ ID NO: 2500063 - DNA, 25 bp, Homo sapien
tatccagcgaataactcggtcattg

SEQ ID NO: 2500064 - DNA, 25 bp, Homo sapien
aactcggtcattgctccacaccaac

SEQ ID NO: 2500065 - DNA, 25 bp, Homo sapien
acaaaaatatctacatggagacatc

SEQ ID NO: 2500066 - DNA, 25 bp, Homo sapien
tatcattcctgcataaaatcaccat

SEQ ID NO: 2500067 - DNA, 25 bp, Homo sapien
ggagacatctttagtataagcagaa

SEQ ID NO: 2500068 - DNA, 25 bp, Homo sapien
aaaccaaagatgaactgccataaaa

SEQ ID NO: 2500069 - DNA, 25 bp, Homo sapien
gttggcttgcttcccgtcttctttc

SEQ ID NO: 2500070 - DNA, 25 bp, Homo sapien
tctaacattcttgcatctaccaagc

SEQ ID NO: 2500071 - DNA, 25 bp, Homo sapien
gattcatatctccataagccagggt

SEQ ID NO: 2500072 - DNA, 25 bp, Homo sapien
taacttctgtactgaggtaacccca

SEQ ID NO: 2500073 - DNA, 25 bp, Homo sapien
caagcattccataaagtaacttctg

SEQ ID NO: 2500074 - DNA, 25 bp, Homo sapien
cctttagatccaacttgaatgcttc

SEQ ID NO: 2500075 - DNA, 25 bp, Homo sapien
ttgcattatatctgaaggcatgtgc

SEQ ID NO: 2500076 - DNA, 25 bp, Homo sapien
tgttccccctttagatccaacttga

SEQ ID NO: 2500077 - DNA, 25 bp, Homo sapien
ctctcttcatacactttgcattata

SEQ ID NO: 2500078 - DNA, 25 bp, Homo sapien
ggcccagcttccttcctcagattct

SEQ ID NO: 2500079 - DNA, 25 bp, Homo sapien
ctgggcccagcttccttcctcagat

SEQ ID NO: 2500080 - DNA, 25 bp, Homo sapien
cccagcttccttcctcagattcttt

SEQ ID NO: 2500081 - DNA, 25 bp, Homo sapien
tgggcccagcttccttcctcagatt

SEQ ID NO: 2500082 - DNA, 25 bp, Homo sapien
tttccttcaggttcaacaaagccat

SEQ ID NO: 2500083 - DNA, 25 bp, Homo sapien
ttcaggttcaacaaagccattaaga

SEQ ID NO: 2500084 - DNA, 25 bp, Homo sapien
cactttccttcaggttcaacaaagc

SEQ ID NO: 2500085 - DNA, 25 bp, Homo sapien
gttcaacaaagccattaagactaac

SEQ ID NO: 2500086 - DNA, 25 bp, Homo sapien
catttcttcatgagtcacccaaacg

SEQ ID NO: 2500087 - DNA, 25 bp, Homo sapien
ccatttcttcatgagtcacccaaac

SEQ ID NO: 2500088 - DNA, 25 bp, Homo sapien
tcttcatgagtcacccaaacgttgc

SEQ ID NO: 2500089 - DNA, 25 bp, Homo sapien
tttcttcatgagtcacccaaacgtt

SEQ ID NO: 2500090 - DNA, 25 bp, Homo sapien
gcaacaacataattacaagcacata

SEQ ID NO: 2500091 - DNA, 25 bp, Homo sapien
aatatgcattccgtatacacaaata

SEQ ID NO: 2500092 - DNA, 25 bp, Homo sapien
aataaccacagtttatgcaacaaca

SEQ ID NO: 2500093 - DNA, 25 bp, Homo sapien
ctaaaagtgatgttgcagttgcata

SEQ ID NO: 2500094 - DNA, 25 bp, Homo sapien
aaggggaggagcagaaactgactca

SEQ ID NO: 2500095 - DNA, 25 bp, Homo sapien
gaaggggaggagcagaaactgactc

SEQ ID NO: 2500096 - DNA, 25 bp, Homo sapien
gctgattccaatttctctctggatc

SEQ ID NO: 2500097 - DNA, 25 bp, Homo sapien
catctcctggattgctaatcgaagt

SEQ ID NO: 2500098 - DNA, 25 bp, Homo sapien
cgatgcagtggattgctgattccaa

SEQ ID NO: 2500099 - DNA, 25 bp, Homo sapien
ggctgccacgtaccacgcaggcatt

SEQ ID NO: 2500100 - DNA, 25 bp, Homo sapien
aggtaatccctttctccgagcttct

SEQ ID NO: 2500101 - DNA, 25 bp, Homo sapien
tagccatgcgaccacagttggccca

SEQ ID NO: 2500102 - DNA, 25 bp, Homo sapien
ccctttctccgagcttcttcaagaa

SEQ ID NO: 2500103 - DNA, 25 bp, Homo sapien
ctctagccatgcgaccacagttggc

SEQ ID NO: 2500104 - DNA, 25 bp, Homo sapien
tatatagcaaagattattaggcagg

SEQ ID NO: 2500105 - DNA, 25 bp, Homo sapien
tatgggatctaaatgtggcttccac

SEQ ID NO: 2500106 - DNA, 25 bp, Homo sapien
aatggcccaaatgttcatattcaag

SEQ ID NO: 2500107 - DNA, 25 bp, Homo sapien
gaaaatgcttatatagagaggcaga

SEQ ID NO: 2500108 - DNA, 25 bp, Homo sapien
gcttcgaagggcaggtaggaaagag

SEQ ID NO: 2500109 - DNA, 25 bp, Homo sapien
gttaatagccattgaaggtgttgtg

SEQ ID NO: 2500110 - DNA, 25 bp, Homo sapien
ttgtggcaatggagctggcttcgaa

SEQ ID NO: 2500111 - DNA, 25 bp, Homo sapien
gcattgtggcaatggagctggcttc

SEQ ID NO: 2500112 - DNA, 25 bp, Homo sapien
tatcttacacaaagacgcttcacaa

SEQ ID NO: 2500113 - DNA, 25 bp, Homo sapien
ggctttttctgctcaactaacacaa

SEQ ID NO: 2500114 - DNA, 25 bp, Homo sapien
gctattacccaaatacctcattcga

SEQ ID NO: 2500115 - DNA, 25 bp, Homo sapien
tgtttaaaagcctccctgactgtcc

SEQ ID NO: 2500116 - DNA, 25 bp, Homo sapien
ggttcaccaatattaccagaaatca

SEQ ID NO: 2500117 - DNA, 25 bp, Homo sapien
tcaacacaatccctggcaatagaaa

SEQ ID NO: 2500118 - DNA, 25 bp, Homo sapien
tgtgtaaagtccattccagatccat

SEQ ID NO: 2500119 - DNA, 25 bp, Homo sapien
tcctcttcttcggtggccatattac

SEQ ID NO: 2500120 - DNA, 25 bp, Homo sapien
aataggcaatttctgagctttccag

SEQ ID NO: 2500121 - DNA, 25 bp, Homo sapien
ctacgatgagctctgaaaaaatagg

SEQ ID NO: 2500122 - DNA, 25 bp, Homo sapien
gctttccaggaaaattgccaaaagc

SEQ ID NO: 2500123 - DNA, 25 bp, Homo sapien
gtgaactctacgatgagctctgaaa

SEQ ID NO: 2500124 - DNA, 25 bp, Homo sapien
ttgcctaaccccagggactcctgag

SEQ ID NO: 2500125 - DNA, 25 bp, Homo sapien
tgagttccgagtttgcctaacccca

SEQ ID NO: 2500126 - DNA, 25 bp, Homo sapien
gatccttctcagcttgagttccgag

SEQ ID NO: 2500127 - DNA, 25 bp, Homo sapien
tctttagtcttcgatccttctcagc

SEQ ID NO: 2500128 - DNA, 25 bp, Homo sapien
aagaactatacttttagagtaggag

SEQ ID NO: 2500129 - DNA, 25 bp, Homo sapien
gaactatacttttagagtaggagaa

SEQ ID NO: 2500130 - DNA, 25 bp, Homo sapien
aactatacttttagagtaggagaat

SEQ ID NO: 2500131 - DNA, 25 bp, Homo sapien
tcacttaggattcctccccttatta

SEQ ID NO: 2500132 - DNA, 25 bp, Homo sapien
aacgtcctattgaagacttgattcc

SEQ ID NO: 2500133 - DNA, 25 bp, Homo sapien
tttgtgaagagagtcttggctgctg

SEQ ID NO: 2500134 - DNA, 25 bp, Homo sapien
ggagctgcccaagtcgagctttttc

SEQ ID NO: 2500135 - DNA, 25 bp, Homo sapien
taccaaacaaacgtcctattgaaga

SEQ ID NO: 2500136 - DNA, 25 bp, Homo sapien
gcccgaggctttctggctcaagaga

SEQ ID NO: 2500137 - DNA, 25 bp, Homo sapien
ccgaggctttctggctcaagagaga

SEQ ID NO: 2500138 - DNA, 25 bp, Homo sapien
ctaccaagcccgaggctttctggct

SEQ ID NO: 2500139 - DNA, 25 bp, Homo sapien
ccaagcccgaggctttctggctcaa

SEQ ID NO: 2500140 - DNA, 25 bp, Homo sapien
ttcgagcatcattgtggtaggaaga

SEQ ID NO: 2500141 - DNA, 25 bp, Homo sapien
tgtgagtcattctgagggctctagg

SEQ ID NO: 2500142 - DNA, 25 bp, Homo sapien
gaagggagagtgtgagtcattctga

SEQ ID NO: 2500143 - DNA, 25 bp, Homo sapien
tgttgctttgtcctctcgaccatct

SEQ ID NO: 2500144 - DNA, 25 bp, Homo sapien
tttctccgatgtttcctcagatcac

SEQ ID NO: 2500145 - DNA, 25 bp, Homo sapien
tccgatgtttcctcagatcacttgg

SEQ ID NO: 2500146 - DNA, 25 bp, Homo sapien
tctccgatgtttcctcagatcactt

SEQ ID NO: 2500147 - DNA, 25 bp, Homo sapien
ctttctccgatgtttcctcagatca

SEQ ID NO: 2500148 - DNA, 25 bp, Homo sapien
gtgattggcagtaataaaaacataa

SEQ ID NO: 2500149 - DNA, 25 bp, Homo sapien
cagtaataaaaacataaaacacaat

SEQ ID NO: 2500150 - DNA, 25 bp, Homo sapien
cacaattaattaagaattaacaatc

SEQ ID NO: 2500151 - DNA, 25 bp, Homo sapien
acataaaacacaattaattaagaat

SEQ ID NO: 2500152 - DNA, 25 bp, Homo sapien
ggagatgaactggccagcgatgaag

SEQ ID NO: 2500153 - DNA, 25 bp, Homo sapien
gtcatgactcccatccgatccattt

SEQ ID NO: 2500154 - DNA, 25 bp, Homo sapien
agtgtcatgactcccatccgatcca

SEQ ID NO: 2500155 - DNA, 25 bp, Homo sapien
gagctttggagttgagtgtccactg

SEQ ID NO: 2500156 - DNA, 25 bp, Homo sapien
tgtaacagaggcagtaatggaggta

SEQ ID NO: 2500157 - DNA, 25 bp, Homo sapien
gtaacagaggcagtaatggaggtac

SEQ ID NO: 2500158 - DNA, 25 bp, Homo sapien
ctgtaacagaggcagtaatggaggt

SEQ ID NO: 2500159 - DNA, 25 bp, Homo sapien
cacactagccactctattttcaatt

SEQ ID NO: 2500160 - DNA, 25 bp, Homo sapien
ttgccaaattcaggccttcgaggct

SEQ ID NO: 2500161 - DNA, 25 bp, Homo sapien
agcacgcaactctgtagattctttt

SEQ ID NO: 2500162 - DNA, 25 bp, Homo sapien
ttcgaggctcacactagccactcta

SEQ ID NO: 2500163 - DNA, 25 bp, Homo sapien
cgtttactatgggaagttgagctac

SEQ ID NO: 2500164 - DNA, 25 bp, Homo sapien
ggcacaaataggaaagagctttagc

SEQ ID NO: 2500165 - DNA, 25 bp, Homo sapien
gggatcccctcttatatagaacctg

SEQ ID NO: 2500166 - DNA, 25 bp, Homo sapien
taagtagtatgtgtttgctggccag

SEQ ID NO: 2500167 - DNA, 25 bp, Homo sapien
gaactgaaggacagtactacgttcc

SEQ ID NO: 2500168 - DNA, 25 bp, Homo sapien
taagacctgcaaataaaggtgagca

SEQ ID NO: 2500169 - DNA, 25 bp, Homo sapien
tatcaagcgaagtgctaagacctgc

SEQ ID NO: 2500170 - DNA, 25 bp, Homo sapien
caactatattaacctactggccaag

SEQ ID NO: 2500171 - DNA, 25 bp, Homo sapien
tagcgtctgggcatcggaatgacca

SEQ ID NO: 2500172 - DNA, 25 bp, Homo sapien
tcactttcaaaagggtggctgctta

SEQ ID NO: 2500173 - DNA, 25 bp, Homo sapien
tattccactcgtgatccccaagaga

SEQ ID NO: 2500174 - DNA, 25 bp, Homo sapien
gctgcttagtactccaatctgttga

SEQ ID NO: 2500175 - DNA, 25 bp, Homo sapien
caacaacaggcatgcttttacaact

SEQ ID NO: 2500176 - DNA, 25 bp, Homo sapien
caggcatgcttttacaactgacctt

SEQ ID NO: 2500177 - DNA, 25 bp, Homo sapien
caacaggcatgcttttacaactgac

SEQ ID NO: 2500178 - DNA, 25 bp, Homo sapien
catgcttttacaactgaccttgcaa

SEQ ID NO: 2500179 - DNA, 25 bp, Homo sapien
caactcagctgaggtgtctagatga

SEQ ID NO: 2500180 - DNA, 25 bp, Homo sapien
tagttgttctgtaatcagactggct

SEQ ID NO: 2500181 - DNA, 25 bp, Homo sapien
cactagggatcccactgagtaccgc

SEQ ID NO: 2500182 - DNA, 25 bp, Homo sapien
tttggctcatctcttcgcacaccca

SEQ ID NO: 2500183 - DNA, 25 bp, Homo sapien
tactatctgctgttttactggcaat

SEQ ID NO: 2500184 - DNA, 25 bp, Homo sapien
ttactatctgctgttttactggcaa

SEQ ID NO: 2500185 - DNA, 25 bp, Homo sapien
ataaacctcaagaaagataaccgat

SEQ ID NO: 2500186 - DNA, 25 bp, Homo sapien
caagaaagataaccgataaattgtc

SEQ ID NO: 2500187 - DNA, 25 bp, Homo sapien
ttgtaccagtcctcaaactcatctc

SEQ ID NO: 2500188 - DNA, 25 bp, Homo sapien
tttattgtaccagtcctcaaactca

SEQ ID NO: 2500189 - DNA, 25 bp, Homo sapien
tattgtaccagtcctcaaactcatc

SEQ ID NO: 2500190 - DNA, 25 bp, Homo sapien
ttttattgtaccagtcctcaaactc

SEQ ID NO: 2500191 - DNA, 25 bp, Homo sapien
ggtcaagttcagatctcagcttttc

SEQ ID NO: 2500192 - DNA, 25 bp, Homo sapien
tggtcaagttcagatctcagctttt

SEQ ID NO: 2500193 - DNA, 25 bp, Homo sapien
aattaaagagccagttctcattttc

SEQ ID NO: 2500194 - DNA, 25 bp, Homo sapien
attgtgggttcaattaaagagccag

SEQ ID NO: 2500195 - DNA, 25 bp, Homo sapien
aagactgctggtgtgttaggttaga

SEQ ID NO: 2500196 - DNA, 25 bp, Homo sapien
aagtggcatgatcattctaatggct

SEQ ID NO: 2500197 - DNA, 25 bp, Homo sapien
tagaatatataaactctctcaggga

SEQ ID NO: 2500198 - DNA, 25 bp, Homo sapien
tacatttgaggtacctaggtgtcca

SEQ ID NO: 2500199 - DNA, 25 bp, Homo sapien
cattcatcagtggaatagaaaataa

SEQ ID NO: 2500200 - DNA, 25 bp, Homo sapien
atcatgtaaagattcttcaagattc

SEQ ID NO: 2500201 - DNA, 25 bp, Homo sapien
tcatgtaaagattcttcaagattct

SEQ ID NO: 2500202 - DNA, 25 bp, Homo sapien
ctcttgctggtctggtagctgccaa

SEQ ID NO: 2500203 - DNA, 25 bp, Homo sapien
gctctcataactcttgctggtctgg

SEQ ID NO: 2500204 - DNA, 25 bp, Homo sapien
tggtaaccagctctcataactcttg

SEQ ID NO: 2500205 - DNA, 25 bp, Homo sapien
tgctctggaattggtaaccagctct

SEQ ID NO: 2500206 - DNA, 25 bp, Homo sapien
taggcgttcattggattcagtcaga

SEQ ID NO: 2500207 - DNA, 25 bp, Homo sapien
tcaaccgtatccgataatctcttgt

SEQ ID NO: 2500208 - DNA, 25 bp, Homo sapien
ctttaagtgtagttgtaggcgttca

SEQ ID NO: 2500209 - DNA, 25 bp, Homo sapien
aatctcttgttatgctcctcattca

SEQ ID NO: 2500210 - DNA, 25 bp, Homo sapien
tgtctcatacgttcttcaatatttc

SEQ ID NO: 2500211 - DNA, 25 bp, Homo sapien
gtctcatacgttcttcaatatttcc

SEQ ID NO: 2500212 - DNA, 25 bp, Homo sapien
tcttcaagttgaccctctaaatgtc

SEQ ID NO: 2500213 - DNA, 25 bp, Homo sapien
tcaagttgaccctctaaatgtctca

SEQ ID NO: 2500214 - DNA, 25 bp, Homo sapien
ataaactttcttcaaacaggcagct

SEQ ID NO: 2500215 - DNA, 25 bp, Homo sapien
aaataaactttcttcaaacaggcag

SEQ ID NO: 2500216 - DNA, 25 bp, Homo sapien
aataaactttcttcaaacaggcagc

SEQ ID NO: 2500217 - DNA, 25 bp, Homo sapien
catattgataatcatcagatgaggt

SEQ ID NO: 2500218 - DNA, 25 bp, Homo sapien
gatgaggtagaagaggttggatcag

SEQ ID NO: 2500219 - DNA, 25 bp, Homo sapien
cttgtagtttagcttccataacata

SEQ ID NO: 2500220 - DNA, 25 bp, Homo sapien
tggagatcatttcttgtagtttagc

SEQ ID NO: 2500221 - DNA, 25 bp, Homo sapien
tttctcatggtctgctgcaactttt

SEQ ID NO: 2500222 - DNA, 25 bp, Homo sapien
ggcaaggtttcagcctttctcatgg

SEQ ID NO: 2500223 - DNA, 25 bp, Homo sapien
agttcagcctctacttcaggcaagg

SEQ ID NO: 2500224 - DNA, 25 bp, Homo sapien
gcaacttttgttcagctagctcaag

SEQ ID NO: 2500225 - DNA, 25 bp, Homo sapien
ttttgtgagaatgatgagaacgcac

SEQ ID NO: 2500226 - DNA, 25 bp, Homo sapien
tccgttttgtgagaatgatgagaac

SEQ ID NO: 2500227 - DNA, 25 bp, Homo sapien
gtgagaatgatgagaacgcacagac

SEQ ID NO: 2500228 - DNA, 25 bp, Homo sapien
ttgtgagaatgatgagaacgcacag

SEQ ID NO: 2500229 - DNA, 25 bp, Homo sapien
cagaagaaaaccaagacagagatac

SEQ ID NO: 2500230 - DNA, 25 bp, Homo sapien
atagcttctttatttgctaactcat

SEQ ID NO: 2500231 - DNA, 25 bp, Homo sapien
tcatgtcatgtatggaggtagattc

SEQ ID NO: 2500232 - DNA, 25 bp, Homo sapien
aggatagcttctttatttgctaact

SEQ ID NO: 2500233 - DNA, 25 bp, Homo sapien
ttcatgtcatgtatggaggtagatt

SEQ ID NO: 2500234 - DNA, 25 bp, Homo sapien
ctgaggtaacgcttttcaagggttg

SEQ ID NO: 2500235 - DNA, 25 bp, Homo sapien
gctagcaatgctataggagtatcaa

SEQ ID NO: 2500236 - DNA, 25 bp, Homo sapien
tactaagaaacttgcaatccgtggc

SEQ ID NO: 2500237 - DNA, 25 bp, Homo sapien
gataccttagaatgtcctcacatgc

SEQ ID NO: 2500238 - DNA, 25 bp, Homo sapien
tgaaaattttagctactggcacagc

SEQ ID NO: 2500239 - DNA, 25 bp, Homo sapien
tcaactatttgactagtttcatcgg

SEQ ID NO: 2500240 - DNA, 25 bp, Homo sapien
gagtctatagaaccattggacaaac

SEQ ID NO: 2500241 - DNA, 25 bp, Homo sapien
caagcaattcttgtagttcaactat

SEQ ID NO: 2500242 - DNA, 25 bp, Homo sapien
taaacgttctttcatctgggccatt

SEQ ID NO: 2500243 - DNA, 25 bp, Homo sapien
ctcagttatctcaaatttggaaata

SEQ ID NO: 2500244 - DNA, 25 bp, Homo sapien
aaatttggaaataactgactggcaa

SEQ ID NO: 2500245 - DNA, 25 bp, Homo sapien
ttggaaataactgactggcaattgg

SEQ ID NO: 2500246 - DNA, 25 bp, Homo sapien
ctgactggcaattggttccacccat

SEQ ID NO: 2500247 - DNA, 25 bp, Homo sapien
tgagggaagtaagagtatgaatttg

SEQ ID NO: 2500248 - DNA, 25 bp, Homo sapien
aactatggtccaacacccagtggtg

SEQ ID NO: 2500249 - DNA, 25 bp, Homo sapien
ggttctggcatggaatctgaaagac

SEQ ID NO: 2500250 - DNA, 25 bp, Homo sapien
aatctgaaagaccttcctggctcag

SEQ ID NO: 2500251 - DNA, 25 bp, Homo sapien
cagtcatcgttgataatctgccaaa

SEQ ID NO: 2500252 - DNA, 25 bp, Homo sapien
tgtcaacagagttctcaatccaccg

SEQ ID NO: 2500253 - DNA, 25 bp, Homo sapien
taataaggcctatttcagattgtgc

SEQ ID NO: 2500254 - DNA, 25 bp, Homo sapien
cccaccctgactgtgtaacttaagc

SEQ ID NO: 2500255 - DNA, 25 bp, Homo sapien
aaagacaattgctttgggtcaccaa

SEQ ID NO: 2500256 - DNA, 25 bp, Homo sapien
ttagttacaccaacacaagaagtga

SEQ ID NO: 2500257 - DNA, 25 bp, Homo sapien
tgaaatgccttcactaagaactgga

SEQ ID NO: 2500258 - DNA, 25 bp, Homo sapien
tatctgtgaagaccaatagagacaa

SEQ ID NO: 2500259 - DNA, 25 bp, Homo sapien
tggtccagcacagacaccttttgtc

SEQ ID NO: 2500260 - DNA, 25 bp, Homo sapien
ctgttggaaagaggtggtccagcac

SEQ ID NO: 2500261 - DNA, 25 bp, Homo sapien
tcttcctcttctgttggaaagaggt

SEQ ID NO: 2500262 - DNA, 25 bp, Homo sapien
gtccagcacagacaccttttgtctt

SEQ ID NO: 2500263 - DNA, 25 bp, Homo sapien
cttcaagatgttctgactctgtgga

SEQ ID NO: 2500264 - DNA, 25 bp, Homo sapien
ctgtccaggttccatcccttcaaga

SEQ ID NO: 2500265 - DNA, 25 bp, Homo sapien
tgtccaggttccatcccttcaagat

SEQ ID NO: 2500266 - DNA, 25 bp, Homo sapien
tctgtccaggttccatcccttcaag

SEQ ID NO: 2500267 - DNA, 25 bp, Homo sapien
ttgtatatgaacattttgttcacgc

SEQ ID NO: 2500268 - DNA, 25 bp, Homo sapien
aacattttgttcacgcaaggcaaca

SEQ ID NO: 2500269 - DNA, 25 bp, Homo sapien
tgaacattttgttcacgcaaggcaa

SEQ ID NO: 2500270 - DNA, 25 bp, Homo sapien
tatatgaacattttgttcacgcaag

SEQ ID NO: 2500271 - DNA, 25 bp, Homo sapien
tatggacaataaaatctgactctaa

SEQ ID NO: 2500272 - DNA, 25 bp, Homo sapien
tcaagtaggagggaatagcagtaca

SEQ ID NO: 2500273 - DNA, 25 bp, Homo sapien
taccttccagcattagtgtactgac

SEQ ID NO: 2500274 - DNA, 25 bp, Homo sapien
taagtgctccataaaatgatctagt

SEQ ID NO: 2500275 - DNA, 25 bp, Homo sapien
tcttttctacagaagtcatggttga

SEQ ID NO: 2500276 - DNA, 25 bp, Homo sapien
cagaagtcatggttgaattcctgga

SEQ ID NO: 2500277 - DNA, 25 bp, Homo sapien
ttctgtagagctcagaagagtatat

SEQ ID NO: 2500278 - DNA, 25 bp, Homo sapien
ttttctgtagagctcagaagagtat

SEQ ID NO: 2500279 - DNA, 25 bp, Homo sapien
ggagtatccaccacattaactattt

SEQ ID NO: 2500280 - DNA, 25 bp, Homo sapien
caaaggagtttgtactgagaagatt

SEQ ID NO: 2500281 - DNA, 25 bp, Homo sapien
gtctgtatgcataatgtatatgtaa

SEQ ID NO: 2500282 - DNA, 25 bp, Homo sapien
tctttactgatattagcctcatata

SEQ ID NO: 2500283 - DNA, 25 bp, Homo sapien
tataataaaagtgacgtgaaacaca

SEQ ID NO: 2500284 - DNA, 25 bp, Homo sapien
tgacgtgaaacacaagggatgtaat

SEQ ID NO: 2500285 - DNA, 25 bp, Homo sapien
tgacagttataataaaagtgacgtg

SEQ ID NO: 2500286 - DNA, 25 bp, Homo sapien
taaaagtgacgtgaaacacaaggga

SEQ ID NO: 2500287 - DNA, 25 bp, Homo sapien
gcgatattgcacctcaaaagaggag

SEQ ID NO: 2500288 - DNA, 25 bp, Homo sapien
cagcgatattgcacctcaaaagagg

SEQ ID NO: 2500289 - DNA, 25 bp, Homo sapien
tcagcgatattgcacctcaaaagag

SEQ ID NO: 2500290 - DNA, 25 bp, Homo sapien
gatattgcacctcaaaagaggagaa

SEQ ID NO: 2500291 - DNA, 25 bp, Homo sapien
ctcctgattagcagcagctagttct

SEQ ID NO: 2500292 - DNA, 25 bp, Homo sapien
ccagtgcagagactctttctaaaga

SEQ ID NO: 2500293 - DNA, 25 bp, Homo sapien
ttagcagcagctagttcttcttcca

SEQ ID NO: 2500294 - DNA, 25 bp, Homo sapien
cttccagtgcagagactctttctaa

SEQ ID NO: 2500295 - DNA, 25 bp, Homo sapien
tgggcttgccgttttaccaccgtca

SEQ ID NO: 2500296 - DNA, 25 bp, Homo sapien
ggagactgggcttgccgttttacca

SEQ ID NO: 2500297 - DNA, 25 bp, Homo sapien
gaacttcaacttcactggatactcc

SEQ ID NO: 2500298 - DNA, 25 bp, Homo sapien
ttcactggatactcctgagggagac

SEQ ID NO: 2500299 - DNA, 25 bp, Homo sapien
tcttagtgatctttcatgtcgtgac

SEQ ID NO: 2500300 - DNA, 25 bp, Homo sapien
tagtgatctttcatgtcgtgacaca

SEQ ID NO: 2500301 - DNA, 25 bp, Homo sapien
tttcatgtcgtgacacaaggcactc

SEQ ID NO: 2500302 - DNA, 25 bp, Homo sapien
tgatctttcatgtcgtgacacaagg

SEQ ID NO: 2500303 - DNA, 25 bp, Homo sapien
tttttgcaatgtcaacgaggtgttt

SEQ ID NO: 2500304 - DNA, 25 bp, Homo sapien
aatttttgcaatgtcaacgaggtgt

SEQ ID NO: 2500305 - DNA, 25 bp, Homo sapien
caaatttttgcaatgtcaacgaggt

SEQ ID NO: 2500306 - DNA, 25 bp, Homo sapien
tcaaatttttgcaatgtcaacgagg

SEQ ID NO: 2500307 - DNA, 25 bp, Homo sapien
ttgtacggattctgtcaccaaatct

SEQ ID NO: 2500308 - DNA, 25 bp, Homo sapien
gcaaacacaatagcctcgggtattt

SEQ ID NO: 2500309 - DNA, 25 bp, Homo sapien
ctttgcaaacacaatagcctcgggt

SEQ ID NO: 2500310 - DNA, 25 bp, Homo sapien
tatgatgaaaattgtacggattctg

SEQ ID NO: 2500311 - DNA, 25 bp, Homo sapien
taattcttttgtcagtgcagcaaat

SEQ ID NO: 2500312 - DNA, 25 bp, Homo sapien
cttttctagaagttgttccctgcag

SEQ ID NO: 2500313 - DNA, 25 bp, Homo sapien
ttgtgttgtttctttcagctttaag

SEQ ID NO: 2500314 - DNA, 25 bp, Homo sapien
tgttccctgcaggcatttaattctt

SEQ ID NO: 2500315 - DNA, 25 bp, Homo sapien
ttcaaacacacttctacagattcct

SEQ ID NO: 2500316 - DNA, 25 bp, Homo sapien
caaacacacttctacagattccttt

SEQ ID NO: 2500317 - DNA, 25 bp, Homo sapien
tcaaacacacttctacagattcctt

SEQ ID NO: 2500318 - DNA, 25 bp, Homo sapien
cacttctacagattccttttaattc

SEQ ID NO: 2500319 - DNA, 25 bp, Homo sapien
ctttgggctcctgctctaagtttga

SEQ ID NO: 2500320 - DNA, 25 bp, Homo sapien
gtttgagtggctgccttgttcccat

SEQ ID NO: 2500321 - DNA, 25 bp, Homo sapien
tacaatatcctggtactttcagagt

SEQ ID NO: 2500322 - DNA, 25 bp, Homo sapien
acaatatcctggtactttcagagtt

SEQ ID NO: 2500323 - DNA, 25 bp, Homo sapien
caatatcctggtactttcagagttt

SEQ ID NO: 2500324 - DNA, 25 bp, Homo sapien
aatatcctggtactttcagagtttc

SEQ ID NO: 2500325 - DNA, 25 bp, Homo sapien
tttgcatttgcacatgtttcaatgc

SEQ ID NO: 2500326 - DNA, 25 bp, Homo sapien
gtttgcatttgcacatgtttcaatg

SEQ ID NO: 2500327 - DNA, 25 bp, Homo sapien
acacctgaccctcatagttgtcttt

SEQ ID NO: 2500328 - DNA, 25 bp, Homo sapien
ttggaaggtctaccacaaaattgca

SEQ ID NO: 2500329 - DNA, 25 bp, Homo sapien
tgtttggtgttttattgagctcttg

SEQ ID NO: 2500330 - DNA, 25 bp, Homo sapien
caagtgagcctaatctatatgcagc

SEQ ID NO: 2500331 - DNA, 25 bp, Homo sapien
aggcttgtccatgaaagttggaagg

SEQ ID NO: 2500332 - DNA, 25 bp, Homo sapien
tccttagaaataggctcagagcatt

SEQ ID NO: 2500333 - DNA, 25 bp, Homo sapien
taaggaatgagaccaaaagaagacc

SEQ ID NO: 2500334 - DNA, 25 bp, Homo sapien
tttggctctatggtcctaaggatac

SEQ ID NO: 2500335 - DNA, 25 bp, Homo sapien
ggctgaagcacagagcatccgacag

SEQ ID NO: 2500336 - DNA, 25 bp, Homo sapien
ctgatgtcctggtcggcctctggct

SEQ ID NO: 2500337 - DNA, 25 bp, Homo sapien
cctgattgctaatgcaggccaattt

SEQ ID NO: 2500338 - DNA, 25 bp, Homo sapien
catgtggccctgattgctaatgcag

SEQ ID NO: 2500339 - DNA, 25 bp, Homo sapien
tcctgatagttgagaataagggtgc

SEQ ID NO: 2500340 - DNA, 25 bp, Homo sapien
caatttgtggctgtgagcttttgcc

SEQ ID NO: 2500341 - DNA, 25 bp, Homo sapien
aaattcatgataagttccccaccgg

SEQ ID NO: 2500342 - DNA, 25 bp, Homo sapien
tagcagttaagactgatgggaaagt

SEQ ID NO: 2500343 - DNA, 25 bp, Homo sapien
taagcatcttccaatgaagcactta

SEQ ID NO: 2500344 - DNA, 25 bp, Homo sapien
acaatacagccctaaagtctgagtg

SEQ ID NO: 2500345 - DNA, 25 bp, Homo sapien
tcagttttctactttatcatcttct

SEQ ID NO: 2500346 - DNA, 25 bp, Homo sapien
ttatcatcttctgataccaccatac

SEQ ID NO: 2500347 - DNA, 25 bp, Homo sapien
ttctactttatcatcttctgatacc

SEQ ID NO: 2500348 - DNA, 25 bp, Homo sapien
ctttatcatcttctgataccaccat

SEQ ID NO: 2500349 - DNA, 25 bp, Homo sapien
tgttctcgggtcagagtttgacctg

SEQ ID NO: 2500350 - DNA, 25 bp, Homo sapien
ggcctcctctaagcagtaggatgat

SEQ ID NO: 2500351 - DNA, 25 bp, Homo sapien
gacctgggcctcctctaagcagtag

SEQ ID NO: 2500352 - DNA, 25 bp, Homo sapien
gcagttgttgttctcgggtcagagt

SEQ ID NO: 2500353 - DNA, 25 bp, Homo sapien
aggataagatggggggcgggtgcca

SEQ ID NO: 2500354 - DNA, 25 bp, Homo sapien
taagatggggggcgggtgccacatg

SEQ ID NO: 2500355 - DNA, 25 bp, Homo sapien
gataagatggggggcgggtgccaca

SEQ ID NO: 2500356 - DNA, 25 bp, Homo sapien
tagagtacaatggaggataagatgg

SEQ ID NO: 2500357 - DNA, 25 bp, Homo sapien
aaagagtgctgctgatatactgctg

SEQ ID NO: 2500358 - DNA, 25 bp, Homo sapien
gctgatatactgctgccaaacaaat

SEQ ID NO: 2500359 - DNA, 25 bp, Homo sapien
ctaaaaagagtgctgctgatatact

SEQ ID NO: 2500360 - DNA, 25 bp, Homo sapien
agagtgctgctgatatactgctgcc

SEQ ID NO: 2500361 - DNA, 25 bp, Homo sapien
tcctggtccagaattttcatatgct

SEQ ID NO: 2500362 - DNA, 25 bp, Homo sapien
ctggtccagaattttcatatgcttg

SEQ ID NO: 2500363 - DNA, 25 bp, Homo sapien
aatcctggtccagaattttcatatg

SEQ ID NO: 2500364 - DNA, 25 bp, Homo sapien
cagtccagaatcctggtccagaatt

SEQ ID NO: 2500365 - DNA, 25 bp, Homo sapien
agttgcaccatggctagaattctgc

SEQ ID NO: 2500366 - DNA, 25 bp, Homo sapien
tgcaccatggctagaattctgcagt

SEQ ID NO: 2500367 - DNA, 25 bp, Homo sapien
ttgcaccatggctagaattctgcag

SEQ ID NO: 2500368 - DNA, 25 bp, Homo sapien
gttgcaccatggctagaattctgca

SEQ ID NO: 2500369 - DNA, 25 bp, Homo sapien
aataaagactggcatcaggggtcct

SEQ ID NO: 2500370 - DNA, 25 bp, Homo sapien
ataaagactggcatcaggggtcctg

SEQ ID NO: 2500371 - DNA, 25 bp, Homo sapien
gaataaagactggcatcaggggtcc

SEQ ID NO: 2500372 - DNA, 25 bp, Homo sapien
ctcagaatatggtggcatagaatat

SEQ ID NO: 2500373 - DNA, 25 bp, Homo sapien
aatatggtggcatagaatattgacc

SEQ ID NO: 2500374 - DNA, 25 bp, Homo sapien
caacggtgggaaatgcacaatactc

SEQ ID NO: 2500375 - DNA, 25 bp, Homo sapien
gaaatgcacaatactcagaatatgg

SEQ ID NO: 2500376 - DNA, 25 bp, Homo sapien
caatagcaatcagaatataaggcat

SEQ ID NO: 2500377 - DNA, 25 bp, Homo sapien
gcaatcagaatataaggcattctta

SEQ ID NO: 2500378 - DNA, 25 bp, Homo sapien
tatgcataaacaatagcaatcagaa

SEQ ID NO: 2500379 - DNA, 25 bp, Homo sapien
ataaggcttttgtgtgcttatgagg

SEQ ID NO: 2500380 - DNA, 25 bp, Homo sapien
gggctcacagattcacatagaagga

SEQ ID NO: 2500381 - DNA, 25 bp, Homo sapien
ctttcgaaactctgtctacctggga

SEQ ID NO: 2500382 - DNA, 25 bp, Homo sapien
gacgaattacttagcaggaggcact

SEQ ID NO: 2500383 - DNA, 25 bp, Homo sapien
ggaaaacatttgtcaaggcataacg

SEQ ID NO: 2500384 - DNA, 25 bp, Homo sapien
ctgcccacgttttaaatcaatgagc

SEQ ID NO: 2500385 - DNA, 25 bp, Homo sapien
tctgcccacgttttaaatcaatgag

SEQ ID NO: 2500386 - DNA, 25 bp, Homo sapien
ttctgcccacgttttaaatcaatga

SEQ ID NO: 2500387 - DNA, 25 bp, Homo sapien
ctatagagcttcctgaatgggtggc

SEQ ID NO: 2500388 - DNA, 25 bp, Homo sapien
ggctggcccaattgcaggccttcag

SEQ ID NO: 2500389 - DNA, 25 bp, Homo sapien
tctcagggagatttgatctgagaac

SEQ ID NO: 2500390 - DNA, 25 bp, Homo sapien
tctgagaactcataagtctttccat

SEQ ID NO: 2500391 - DNA, 25 bp, Homo sapien
ggccttcaggcactcaaatctgcag

SEQ ID NO: 2500392 - DNA, 25 bp, Homo sapien
ttttagtcatatctccagaataccc

SEQ ID NO: 2500393 - DNA, 25 bp, Homo sapien
ctttttagtcatatctccagaatac

SEQ ID NO: 2500394 - DNA, 25 bp, Homo sapien
tagtcatatctccagaataccccat

SEQ ID NO: 2500395 - DNA, 25 bp, Homo sapien
tttagtcatatctccagaatacccc

SEQ ID NO: 2500396 - DNA, 25 bp, Homo sapien
aaccgggtcccattaggaggatgca

SEQ ID NO: 2500397 - DNA, 25 bp, Homo sapien
taggggagccagaaacggtgttcat

SEQ ID NO: 2500398 - DNA, 25 bp, Homo sapien
ttaggggagccagaaacggtgttca

SEQ ID NO: 2500399 - DNA, 25 bp, Homo sapien
caacgataaatggagcttgtgcaga

SEQ ID NO: 2500400 - DNA, 25 bp, Homo sapien
tccgtgcatgcattgagggagacta

SEQ ID NO: 2500401 - DNA, 25 bp, Homo sapien
tgcagagcagagagcttagcgtaca

SEQ ID NO: 2500402 - DNA, 25 bp, Homo sapien
tgaaagatcatcagccaccgacctt

SEQ ID NO: 2500403 - DNA, 25 bp, Homo sapien
aatgaaggtatttagggctatagac

SEQ ID NO: 2500404 - DNA, 25 bp, Homo sapien
gagatttggataagttttataccta

SEQ ID NO: 2500405 - DNA, 25 bp, Homo sapien
acattgcttcagttgtatcctagag

SEQ ID NO: 2500406 - DNA, 25 bp, Homo sapien
ttcacccagggattattcaggagta

SEQ ID NO: 2500407 - DNA, 25 bp, Homo sapien
tgtgacagggagatatgccgcaccg

SEQ ID NO: 2500408 - DNA, 25 bp, Homo sapien
gcaccgtttatgaaccagctcttca

SEQ ID NO: 2500409 - DNA, 25 bp, Homo sapien
catgtctgctctcgggccttgtggg

SEQ ID NO: 2500410 - DNA, 25 bp, Homo sapien
aggccacgagcctctcttgggcaaa

SEQ ID NO: 2500411 - DNA, 25 bp, Homo sapien
caggcagagaataagatgcaaatcc

SEQ ID NO: 2500412 - DNA, 25 bp, Homo sapien
caaatccaaaggtgctaggtaggca

SEQ ID NO: 2500413 - DNA, 25 bp, Homo sapien
gggctcaaagagcataacaggcaga

SEQ ID NO: 2500414 - DNA, 25 bp, Homo sapien
gtaattagggaacccctcaatgaga

SEQ ID NO: 2500415 - DNA, 25 bp, Homo sapien
taagaagtatatgatgaagaattcc

SEQ ID NO: 2500416 - DNA, 25 bp, Homo sapien
ctaagaagtatatgatgaagaattc

SEQ ID NO: 2500417 - DNA, 25 bp, Homo sapien
gatccaaataagagaacttcttgca

SEQ ID NO: 2500418 - DNA, 25 bp, Homo sapien
tgtctgtaacattgcaatagcaggt

SEQ ID NO: 2500419 - DNA, 25 bp, Homo sapien
ttttgttctcatgggctgctctgta

SEQ ID NO: 2500420 - DNA, 25 bp, Homo sapien
tgggctgctctgtataattggttag

SEQ ID NO: 2500421 - DNA, 25 bp, Homo sapien
ttgtagcttgcaatatgaattttgg

SEQ ID NO: 2500422 - DNA, 25 bp, Homo sapien
ttttgtagcttgcaatatgaatttt

SEQ ID NO: 2500423 - DNA, 25 bp, Homo sapien
gtagcttgcaatatgaattttggag

SEQ ID NO: 2500424 - DNA, 25 bp, Homo sapien
ctttttgtagcttgcaatatgaatt

SEQ ID NO: 2500425 - DNA, 25 bp, Homo sapien
tctgatgtgagacaatgggagcaac

SEQ ID NO: 2500426 - DNA, 25 bp, Homo sapien
gcaagaatgtctgtagcctcaacca

SEQ ID NO: 2500427 - DNA, 25 bp, Homo sapien
tagtgatggcttacccttgtgcaag

SEQ ID NO: 2500428 - DNA, 25 bp, Homo sapien
gacctggcagctgaaatcacctgga

SEQ ID NO: 2500429 - DNA, 25 bp, Homo sapien
tctctctaagttgggttttaactgc

SEQ ID NO: 2500430 - DNA, 25 bp, Homo sapien
gctgaactctgctgttaaaagaaaa

SEQ ID NO: 2500431 - DNA, 25 bp, Homo sapien
catgtttagtgttaactactagctg

SEQ ID NO: 2500432 - DNA, 25 bp, Homo sapien
tccacatgtgtcaatatgtagtatc

SEQ ID NO: 2500433 - DNA, 25 bp, Homo sapien
tagtgtttctgaataggtgtatgcg

SEQ ID NO: 2500434 - DNA, 25 bp, Homo sapien
agtcattcatgtagattagccattg

SEQ ID NO: 2500435 - DNA, 25 bp, Homo sapien
gacttcgccatgcacaatatgtcca

SEQ ID NO: 2500436 - DNA, 25 bp, Homo sapien
ggtgtatgcggaagatttctccaga

SEQ ID NO: 2500437 - DNA, 25 bp, Homo sapien
catctaacccatggaagtacttgat

SEQ ID NO: 2500438 - DNA, 25 bp, Homo sapien
tctaacccatggaagtacttgatat

SEQ ID NO: 2500439 - DNA, 25 bp, Homo sapien
ttacatctaacccatggaagtactt

SEQ ID NO: 2500440 - DNA, 25 bp, Homo sapien
acccatggaagtacttgatatattg

SEQ ID NO: 2500441 - DNA, 25 bp, Homo sapien
caaaatacgaaaataccactgcttc

SEQ ID NO: 2500442 - DNA, 25 bp, Homo sapien
cttctttctatgagtcattgctttg

SEQ ID NO: 2500443 - DNA, 25 bp, Homo sapien
aatatcaaaatacgaaaataccact

SEQ ID NO: 2500444 - DNA, 25 bp, Homo sapien
accactgcttctttctatgagtcat

SEQ ID NO: 2500445 - DNA, 25 bp, Homo sapien
gaatgacattgatgtcgtttgcctt

SEQ ID NO: 2500446 - DNA, 25 bp, Homo sapien
gggaatgacattgatgtcgtttgcc

SEQ ID NO: 2500447 - DNA, 25 bp, Homo sapien
ggaatgacattgatgtcgtttgcct

SEQ ID NO: 2500448 - DNA, 25 bp, Homo sapien
tgggaatgacattgatgtcgtttgc

SEQ ID NO: 2500449 - DNA, 25 bp, Homo sapien
ggtctaggggataaatacaagcagc

SEQ ID NO: 2500450 - DNA, 25 bp, Homo sapien
ttgccttacattgtaatgtaatagg

SEQ ID NO: 2500451 - DNA, 25 bp, Homo sapien
taggtctaggggataaatacaagca

SEQ ID NO: 2500452 - DNA, 25 bp, Homo sapien
acattgtaatgtaataggtctaggg

SEQ ID NO: 2500453 - DNA, 25 bp, Homo sapien
agcccccttagaaccagccagccct

SEQ ID NO: 2500454 - DNA, 25 bp, Homo sapien
agccctcctgttagggattcgatat

SEQ ID NO: 2500455 - DNA, 25 bp, Homo sapien
gcccccttagaaccagccagccctc

SEQ ID NO: 2500456 - DNA, 25 bp, Homo sapien
gccctcctgttagggattcgatatc

SEQ ID NO: 2500457 - DNA, 25 bp, Homo sapien
cataaatctgcagaacaacatgagg

SEQ ID NO: 2500458 - DNA, 25 bp, Homo sapien
aatgcatattgggtaagtgtctcca

SEQ ID NO: 2500459 - DNA, 25 bp, Homo sapien
gaggcactgtactcttcatgggagg

SEQ ID NO: 2500460 - DNA, 25 bp, Homo sapien
gagtaaatcaaggtcacaggtttca

SEQ ID NO: 2500461 - DNA, 25 bp, Homo sapien
tgctaattcctgactcagtctcaat

SEQ ID NO: 2500462 - DNA, 25 bp, Homo sapien
cattcctttccatatggctgaggcg

SEQ ID NO: 2500463 - DNA, 25 bp, Homo sapien
ccatatggctgaggcgataaaggga

SEQ ID NO: 2500464 - DNA, 25 bp, Homo sapien
tttgtgtgtcgctttttcttgtcca

SEQ ID NO: 2500465 - DNA, 25 bp, Homo sapien
tgatgcatccttgctatctcaaact

SEQ ID NO: 2500466 - DNA, 25 bp, Homo sapien
cactgatgcatccttgctatctcaa

SEQ ID NO: 2500467 - DNA, 25 bp, Homo sapien
tgcatccttgctatctcaaactcac

SEQ ID NO: 2500468 - DNA, 25 bp, Homo sapien
actgatgcatccttgctatctcaaa

SEQ ID NO: 2500469 - DNA, 25 bp, Homo sapien
catcttctttatcagccattgccat

SEQ ID NO: 2500470 - DNA, 25 bp, Homo sapien
acatcatcttctttatcagccattg

SEQ ID NO: 2500471 - DNA, 25 bp, Homo sapien
tcatcttctttatcagccattgcca

SEQ ID NO: 2500472 - DNA, 25 bp, Homo sapien
tatatccaaataagacatcatcttc

SEQ ID NO: 2500473 - DNA, 25 bp, Homo sapien
ttctgttagcagatttgtgctaaaa

SEQ ID NO: 2500474 - DNA, 25 bp, Homo sapien
tcagcacatttggcaacttcacaag

SEQ ID NO: 2500475 - DNA, 25 bp, Homo sapien
caggcatttcgacctgctttttccc

SEQ ID NO: 2500476 - DNA, 25 bp, Homo sapien
gctcagcacatttggcaacttcaca

SEQ ID NO: 2500477 - DNA, 25 bp, Homo sapien
tcaggcatttcgacctgctttttcc

SEQ ID NO: 2500478 - DNA, 25 bp, Homo sapien
ttaggaataactattagtctttgta

SEQ ID NO: 2500479 - DNA, 25 bp, Homo sapien
tctttgtacttgcctggaagacaac

SEQ ID NO: 2500480 - DNA, 25 bp, Homo sapien
taggaataactattagtctttgtac

SEQ ID NO: 2500481 - DNA, 25 bp, Homo sapien
ttgtacttgcctggaagacaacctg

SEQ ID NO: 2500482 - DNA, 25 bp, Homo sapien
tgagtctcggtcatagatgacatcc

SEQ ID NO: 2500483 - DNA, 25 bp, Homo sapien
caccatcagctgctcaaaatgggag

SEQ ID NO: 2500484 - DNA, 25 bp, Homo sapien
ctgagtccgagccactgctttggga

SEQ ID NO: 2500485 - DNA, 25 bp, Homo sapien
cctgaagtctttgctgggcaagtga

SEQ ID NO: 2500486 - DNA, 25 bp, Homo sapien
ctaatgtctgtgatttcgggtcctt

SEQ ID NO: 2500487 - DNA, 25 bp, Homo sapien
tgacaaccgcagtctccggcttgag

SEQ ID NO: 2500488 - DNA, 25 bp, Homo sapien
ccttgcttcttcaattgatcaatga

SEQ ID NO: 2500489 - DNA, 25 bp, Homo sapien
caatgacaaccgcagtctccggctt

SEQ ID NO: 2500490 - DNA, 25 bp, Homo sapien
gcgtccatcggaaaaatggcatatt

SEQ ID NO: 2500491 - DNA, 25 bp, Homo sapien
aaggagaagcgtccatcggaaaaat

SEQ ID NO: 2500492 - DNA, 25 bp, Homo sapien
gctccgtcagcagccaaaaggagaa

SEQ ID NO: 2500493 - DNA, 25 bp, Homo sapien
gcgtggcaggagctcggcatcttcc

SEQ ID NO: 2500494 - DNA, 25 bp, Homo sapien
cggtgaggacgctacagcatcttct

SEQ ID NO: 2500495 - DNA, 25 bp, Homo sapien
gcagccggtgaggacgctacagcat

SEQ ID NO: 2500496 - DNA, 25 bp, Homo sapien
gaggacgctacagcatcttctctcc

SEQ ID NO: 2500497 - DNA, 25 bp, Homo sapien
tgctggcagccggtgaggacgctac

SEQ ID NO: 2500498 - DNA, 25 bp, Homo sapien
tgggcttctttcacacaatgggctc

SEQ ID NO: 2500499 - DNA, 25 bp, Homo sapien
ttctgaagtaatcacgtctttgctc

SEQ ID NO: 2500500 - DNA, 25 bp, Homo sapien
tacagccttcgcttgtgtcagcctg

SEQ ID NO: 2500501 - DNA, 25 bp, Homo sapien
ttggctccccggtcttctgtgcttg

SEQ ID NO: 2500502 - DNA, 25 bp, Homo sapien
ctttccgttgctgctgtccattcat

SEQ ID NO: 2500503 - DNA, 25 bp, Homo sapien
tttccgttgctgctgtccattcata

SEQ ID NO: 2500504 - DNA, 25 bp, Homo sapien
tctttccgttgctgctgtccattca

SEQ ID NO: 2500505 - DNA, 25 bp, Homo sapien
ttctgtgagggagagtcacgaatcc

SEQ ID NO: 2500506 - DNA, 25 bp, Homo sapien
acgaatcctgctgggtttggtgaaa

SEQ ID NO: 2500507 - DNA, 25 bp, Homo sapien
tctgagcagaaagggaacgtttctg

SEQ ID NO: 2500508 - DNA, 25 bp, Homo sapien
gagtcacgaatcctgctgggtttgg

SEQ ID NO: 2500509 - DNA, 25 bp, Homo sapien
tagtgaattttattactttctaaca

SEQ ID NO: 2500510 - DNA, 25 bp, Homo sapien
agcatgttccttattgcggcttgaa

SEQ ID NO: 2500511 - DNA, 25 bp, Homo sapien
cagctcagcaaataaagcatgttcc

SEQ ID NO: 2500512 - DNA, 25 bp, Homo sapien
agccagctcagcaaataaagcatgt

SEQ ID NO: 2500513 - DNA, 25 bp, Homo sapien
ccttattgcggcttgaaacagtaaa

SEQ ID NO: 2500514 - DNA, 25 bp, Homo sapien
gaagggaatgagctgtcatcatctt

SEQ ID NO: 2500515 - DNA, 25 bp, Homo sapien
gggaaagccatgcaaccgattttcg

SEQ ID NO: 2500516 - DNA, 25 bp, Homo sapien
gattttcgtttcatgtgctataaga

SEQ ID NO: 2500517 - DNA, 25 bp, Homo sapien
taacagttgggaactctgaataagt

SEQ ID NO: 2500518 - DNA, 25 bp, Homo sapien
tcttcctgaaagcaatcaagctttt

SEQ ID NO: 2500519 - DNA, 25 bp, Homo sapien
agcaatcaagcttttccatctgcat

SEQ ID NO: 2500520 - DNA, 25 bp, Homo sapien
gaaagcaatcaagcttttccatctg

SEQ ID NO: 2500521 - DNA, 25 bp, Homo sapien
ctgcttcttcctgaaagcaatcaag

SEQ ID NO: 2500522 - DNA, 25 bp, Homo sapien
catgtagtgacctgaagagtatttt

SEQ ID NO: 2500523 - DNA, 25 bp, Homo sapien
catgttaccccggtcacatgtagtg

SEQ ID NO: 2500524 - DNA, 25 bp, Homo sapien
cggtcacatgtagtgacctgaagag

SEQ ID NO: 2500525 - DNA, 25 bp, Homo sapien
taccccggtcacatgtagtgacctg

SEQ ID NO: 2500526 - DNA, 25 bp, Homo sapien
ttatgttgatacacaatgacttccc

SEQ ID NO: 2500527 - DNA, 25 bp, Homo sapien
tgagaaacactcagtctggttaaat

SEQ ID NO: 2500528 - DNA, 25 bp, Homo sapien
tcatctgtaagactaagcataagca

SEQ ID NO: 2500529 - DNA, 25 bp, Homo sapien
gctaaacagcccatcctcatcacat

SEQ ID NO: 2500530 - DNA, 25 bp, Homo sapien
gaaatcctacttcctatcctgcata

SEQ ID NO: 2500531 - DNA, 25 bp, Homo sapien
ttcctatcctgcataactccgcggg

SEQ ID NO: 2500532 - DNA, 25 bp, Homo sapien
tcctatccacatggaaatcctactt

SEQ ID NO: 2500533 - DNA, 25 bp, Homo sapien
tccgcgggagcactaagcaggccct

SEQ ID NO: 2500534 - DNA, 25 bp, Homo sapien
tcaccccaggtcacattcattttct

SEQ ID NO: 2500535 - DNA, 25 bp, Homo sapien
gaagtctgcagactgcaggatcttt

SEQ ID NO: 2500536 - DNA, 25 bp, Homo sapien
tcccctgcatgtgcattgtctcctc

SEQ ID NO: 2500537 - DNA, 25 bp, Homo sapien
gcaggtgattagatgatgtctcccc

SEQ ID NO: 2500538 - DNA, 25 bp, Homo sapien
tgggcatcagaagacaccagcaggt

SEQ ID NO: 2500539 - DNA, 25 bp, Homo sapien
caccagcaggtgattagatgatgtc

SEQ ID NO: 2500540 - DNA, 25 bp, Homo sapien
gaggagttgagataatcaatgaaca

SEQ ID NO: 2500541 - DNA, 25 bp, Homo sapien
aggagttgagataatcaatgaacat

SEQ ID NO: 2500542 - DNA, 25 bp, Homo sapien
cttttttttgtgagcaacagggctg

SEQ ID NO: 2500543 - DNA, 25 bp, Homo sapien
cagtcagcaaaaggagataggcgtg

SEQ ID NO: 2500544 - DNA, 25 bp, Homo sapien
agacagtcagcaaaaggagataggc

SEQ ID NO: 2500545 - DNA, 25 bp, Homo sapien
tcttttttttgtgagcaacagggct

SEQ ID NO: 2500546 - DNA, 25 bp, Homo sapien
gagagtaacgagaggcacctaactg

SEQ ID NO: 2500547 - DNA, 25 bp, Homo sapien
aggcaagagagtaacgagaggcacc

SEQ ID NO: 2500548 - DNA, 25 bp, Homo sapien
ggcacctaactggaccacatggctg

SEQ ID NO: 2500549 - DNA, 25 bp, Homo sapien
taacgagaggcacctaactggacca

SEQ ID NO: 2500550 - DNA, 25 bp, Homo sapien
tgaaaagaaaggatacatgatcctt

SEQ ID NO: 2500551 - DNA, 25 bp, Homo sapien
gaaaagaaaggatacatgatccttc

SEQ ID NO: 2500552 - DNA, 25 bp, Homo sapien
aaaagaaaggatacatgatccttcc

SEQ ID NO: 2500553 - DNA, 25 bp, Homo sapien
aacagggagtcaaaatgatgatttt

SEQ ID NO: 2500554 - DNA, 25 bp, Homo sapien
tgttttgggaagtcaggtactgtag

SEQ ID NO: 2500555 - DNA, 25 bp, Homo sapien
tatatccatataaaagctgcaactc

SEQ ID NO: 2500556 - DNA, 25 bp, Homo sapien
ttttcattagccttacctcccctga

SEQ ID NO: 2500557 - DNA, 25 bp, Homo sapien
tcccctgactaggaatagttttgaa

SEQ ID NO: 2500558 - DNA, 25 bp, Homo sapien
caaaaagcagttatacggatttcat

SEQ ID NO: 2500559 - DNA, 25 bp, Homo sapien
tcaaaaagcagttatacggatttca

SEQ ID NO: 2500560 - DNA, 25 bp, Homo sapien
caggaataacttgtcatcaggggcc

SEQ ID NO: 2500561 - DNA, 25 bp, Homo sapien
aaacaggaataacttgtcatcaggg

SEQ ID NO: 2500562 - DNA, 25 bp, Homo sapien
caaaacaggaataacttgtcatcag

SEQ ID NO: 2500563 - DNA, 25 bp, Homo sapien
accaaaacaggaataacttgtcatc

SEQ ID NO: 2500564 - DNA, 25 bp, Homo sapien
aaatctataaacaatgtctgtagta

SEQ ID NO: 2500565 - DNA, 25 bp, Homo sapien
aacttcccccatgatcacgaacatt

SEQ ID NO: 2500566 - DNA, 25 bp, Homo sapien
tctgtagtatagataacccatgtaa

SEQ ID NO: 2500567 - DNA, 25 bp, Homo sapien
catgatcacgaacattagcaagaaa

SEQ ID NO: 2500568 - DNA, 25 bp, Homo sapien
gtataattgtcagttcaatggctag

SEQ ID NO: 2500569 - DNA, 25 bp, Homo sapien
cgaataattgagcttgttccaagga

SEQ ID NO: 2500570 - DNA, 25 bp, Homo sapien
caaggataattctcaagttgagaga

SEQ ID NO: 2500571 - DNA, 25 bp, Homo sapien
ctttattttacagggcttagagcat

SEQ ID NO: 2500572 - DNA, 25 bp, Homo sapien
aattccagctcatatgtgaagtgtc

SEQ ID NO: 2500573 - DNA, 25 bp, Homo sapien
tccccaaggatgattaattgcttct

SEQ ID NO: 2500574 - DNA, 25 bp, Homo sapien
taggcccctagacatattcattctt

SEQ ID NO: 2500575 - DNA, 25 bp, Homo sapien
aaatttgtagcctttgatccacatc

SEQ ID NO: 2500576 - DNA, 25 bp, Homo sapien
tcatactgtacattaggcccctaga

SEQ ID NO: 2500577 - DNA, 25 bp, Homo sapien
tttcttcctctcataataactacag

SEQ ID NO: 2500578 - DNA, 25 bp, Homo sapien
aaaacactgaaactggacaattgcg

SEQ ID NO: 2500579 - DNA, 25 bp, Homo sapien
tccattcgtctgtcagtgggcactt

SEQ ID NO: 2500580 - DNA, 25 bp, Homo sapien
gggacttaagcaaccacagattttg

SEQ ID NO: 2500581 - DNA, 25 bp, Homo sapien
cagagggattatttgctaacaagcc

SEQ ID NO: 2500582 - DNA, 25 bp, Homo sapien
tggtgatgaacttcgggccacggat

SEQ ID NO: 2500583 - DNA, 25 bp, Homo sapien
tgaacttcgggccacggatggtcac

SEQ ID NO: 2500584 - DNA, 25 bp, Homo sapien
cttcgggccacggatggtcactagg

SEQ ID NO: 2500585 - DNA, 25 bp, Homo sapien
tatctggtgatgaacttcgggccac

SEQ ID NO: 2500586 - DNA, 25 bp, Homo sapien
tacaccggatagattttcaaagtaa

SEQ ID NO: 2500587 - DNA, 25 bp, Homo sapien
tttgaacgagattcaaaatggaagt

SEQ ID NO: 2500588 - DNA, 25 bp, Homo sapien
ctagaggtacaccggatagattttc

SEQ ID NO: 2500589 - DNA, 25 bp, Homo sapien
catcttttgaacgagattcaaaatg

SEQ ID NO: 2500590 - DNA, 25 bp, Homo sapien
caccttcctcaataacacatttctt

SEQ ID NO: 2500591 - DNA, 25 bp, Homo sapien
gtgccttgagaaggaagtatcctca

SEQ ID NO: 2500592 - DNA, 25 bp, Homo sapien
gtatcctcaactgccccactttaag

SEQ ID NO: 2500593 - DNA, 25 bp, Homo sapien
cctcaataacacatttcttagtgcc

SEQ ID NO: 2500594 - DNA, 25 bp, Homo sapien
ttatcagaagaagccgggtgacacc

SEQ ID NO: 2500595 - DNA, 25 bp, Homo sapien
tatctatgctgctcaaacgtctctg

SEQ ID NO: 2500596 - DNA, 25 bp, Homo sapien
tcagcataagagacctagagatgtt

SEQ ID NO: 2500597 - DNA, 25 bp, Homo sapien
tctctatggccgtaggaaatgagag

SEQ ID NO: 2500598 - DNA, 25 bp, Homo sapien
acagggttatactctgtcaaccaag

SEQ ID NO: 2500599 - DNA, 25 bp, Homo sapien
tagcgtcaacacatacaaaggtctc

SEQ ID NO: 2500600 - DNA, 25 bp, Homo sapien
aaaggtctccctacctgaactactg

SEQ ID NO: 2500601 - DNA, 25 bp, Homo sapien
tgccttacatgagatagatagcgtc

SEQ ID NO: 2500602 - DNA, 25 bp, Homo sapien
agtaaatgccacattggcagaagct

SEQ ID NO: 2500603 - DNA, 25 bp, Homo sapien
aagtaaatgccacattggcagaagc

SEQ ID NO: 2500604 - DNA, 25 bp, Homo sapien
accagtttggcagctgctgccacct

SEQ ID NO: 2500605 - DNA, 25 bp, Homo sapien
caccagtttggcagctgctgccacc

SEQ ID NO: 2500606 - DNA, 25 bp, Homo sapien
tcaccagtttggcagctgctgccac

SEQ ID NO: 2500607 - DNA, 25 bp, Homo sapien
ccagtttggcagctgctgccacctc

SEQ ID NO: 2500608 - DNA, 25 bp, Homo sapien
gacagatagcatacactgctgggat

SEQ ID NO: 2500609 - DNA, 25 bp, Homo sapien
tccaatatgtggtatagtagacccc

SEQ ID NO: 2500610 - DNA, 25 bp, Homo sapien
gagaatggaccctcaaagaaaagtc

SEQ ID NO: 2500611 - DNA, 25 bp, Homo sapien
gacccctagaggatgcataaaacca

SEQ ID NO: 2500612 - DNA, 25 bp, Homo sapien
tcagtaggaaggaagataaccggtg

SEQ ID NO: 2500613 - DNA, 25 bp, Homo sapien
gctttagccttatcagaatgccagt

SEQ ID NO: 2500614 - DNA, 25 bp, Homo sapien
tcactcacaggcagaaatgttctta

SEQ ID NO: 2500615 - DNA, 25 bp, Homo sapien
caataactctatggtgtgcctcaac

SEQ ID NO: 2500616 - DNA, 25 bp, Homo sapien
catgagaccacttgcacatgccagt

SEQ ID NO: 2500617 - DNA, 25 bp, Homo sapien
ccactacagtagcttgctaagcctc

SEQ ID NO: 2500618 - DNA, 25 bp, Homo sapien
catatttaatgtaggccaaggtcaa

SEQ ID NO: 2500619 - DNA, 25 bp, Homo sapien
caaggtcaagctgcagtagcctgca

SEQ ID NO: 2500620 - DNA, 25 bp, Homo sapien
atctggtgaggacatccatgaggcc

SEQ ID NO: 2500621 - DNA, 25 bp, Homo sapien
gtctttgctgaagccaatatgtctc

SEQ ID NO: 2500622 - DNA, 25 bp, Homo sapien
tgaagccaatatgtctccatcaccc

SEQ ID NO: 2500623 - DNA, 25 bp, Homo sapien
gcatctggtgaggacatccatgagg

SEQ ID NO: 2500624 - DNA, 25 bp, Homo sapien
tcaaaatcccacgtgccttaagtct

SEQ ID NO: 2500625 - DNA, 25 bp, Homo sapien
tgaggcctgcgcatatgtgcttaaa

SEQ ID NO: 2500626 - DNA, 25 bp, Homo sapien
cagtattgcacattgtctctataga

SEQ ID NO: 2500627 - DNA, 25 bp, Homo sapien
tcttaaagcctcttgccaaaactgc

SEQ ID NO: 2500628 - DNA, 25 bp, Homo sapien
tgagggcagtttatttcagcaccca

SEQ ID NO: 2500629 - DNA, 25 bp, Homo sapien
caagccatgtacatccatttaaggg

SEQ ID NO: 2500630 - DNA, 25 bp, Homo sapien
tcacaagggtaccaacaagggagac

SEQ ID NO: 2500631 - DNA, 25 bp, Homo sapien
cgctttgttatatggtgagggcagt

SEQ ID NO: 2500632 - DNA, 25 bp, Homo sapien
aagtattacatgcttgggcctgtct

SEQ ID NO: 2500633 - DNA, 25 bp, Homo sapien
tagcaatccagtttatgtcgacaaa

SEQ ID NO: 2500634 - DNA, 25 bp, Homo sapien
gtcacagaagaacctaataggcagc

SEQ ID NO: 2500635 - DNA, 25 bp, Homo sapien
tttcagttcttcaggccaaccttcc

SEQ ID NO: 2500636 - DNA, 25 bp, Homo sapien
tttgtactgcctttgggcttcttct

SEQ ID NO: 2500637 - DNA, 25 bp, Homo sapien
tgtacattcaagtttggttggccct

SEQ ID NO: 2500638 - DNA, 25 bp, Homo sapien
tttgaagaaggtactccatttgtac

SEQ ID NO: 2500639 - DNA, 25 bp, Homo sapien
ttttgtactgcctttgggcttcttc

SEQ ID NO: 2500640 - DNA, 25 bp, Homo sapien
gcactgtttctcctaattgaagcaa

SEQ ID NO: 2500641 - DNA, 25 bp, Homo sapien
aagctgtgctagttaatactggtcc

SEQ ID NO: 2500642 - DNA, 25 bp, Homo sapien
tactggtccagtattcccatgaaga

SEQ ID NO: 2500643 - DNA, 25 bp, Homo sapien
attttcatgatcacaaagccccagc

SEQ ID NO: 2500644 - DNA, 25 bp, Homo sapien
tcttagcagcacgtttggcttgtat

SEQ ID NO: 2500645 - DNA, 25 bp, Homo sapien
ttgtttcttagcagcacgtttggct

SEQ ID NO: 2500646 - DNA, 25 bp, Homo sapien
tagcagcacgtttggcttgtatctg

SEQ ID NO: 2500647 - DNA, 25 bp, Homo sapien
cacgtttggcttgtatctgttcata

SEQ ID NO: 2500648 - DNA, 25 bp, Homo sapien
gactgcctagtccacaaatccagag

SEQ ID NO: 2500649 - DNA, 25 bp, Homo sapien
tttatagtacagtagcacacccctt

SEQ ID NO: 2500650 - DNA, 25 bp, Homo sapien
tactaatcactagcgactttggact

SEQ ID NO: 2500651 - DNA, 25 bp, Homo sapien
tagtcatgaatcaccataccttgga

SEQ ID NO: 2500652 - DNA, 25 bp, Homo sapien
tgaaacaccttaggaacacctgagt

SEQ ID NO: 2500653 - DNA, 25 bp, Homo sapien
catgttgagtctggctctagaaccc

SEQ ID NO: 2500654 - DNA, 25 bp, Homo sapien
aactcgctgagtcttcacaacaatg

SEQ ID NO: 2500655 - DNA, 25 bp, Homo sapien
tagtagtagctaacgctcaagagca

SEQ ID NO: 2500656 - DNA, 25 bp, Homo sapien
tgaggctggtcaaagctacactgat

SEQ ID NO: 2500657 - DNA, 25 bp, Homo sapien
gctgaggctggtcaaagctacactg

SEQ ID NO: 2500658 - DNA, 25 bp, Homo sapien
ggctgaggctggtcaaagctacact

SEQ ID NO: 2500659 - DNA, 25 bp, Homo sapien
gtcaatgctacactgttcttcaagc

SEQ ID NO: 2500660 - DNA, 25 bp, Homo sapien
aaaggatggtcgacttttcttgctt

SEQ ID NO: 2500661 - DNA, 25 bp, Homo sapien
tttcctcttcagctaaatagagatg

SEQ ID NO: 2500662 - DNA, 25 bp, Homo sapien
tctttcctcttcagctaaatagaga

SEQ ID NO: 2500663 - DNA, 25 bp, Homo sapien
tcttgcttgcttcctatgtctttcc

SEQ ID NO: 2500664 - DNA, 25 bp, Homo sapien
gtggttaggccgccatgtcttctgt

SEQ ID NO: 2500665 - DNA, 25 bp, Homo sapien
gaaggcttgcgggtggttaggccgc

SEQ ID NO: 2500666 - DNA, 25 bp, Homo sapien
tgcgggtggttaggccgccatgtct

SEQ ID NO: 2500667 - DNA, 25 bp, Homo sapien
cccacgaaggcttgcgggtggttag

SEQ ID NO: 2500668 - DNA, 25 bp, Homo sapien
caaaatacgtcaccaagccgaagca

SEQ ID NO: 2500669 - DNA, 25 bp, Homo sapien
gaatccggctcggagctctactgag

SEQ ID NO: 2500670 - DNA, 25 bp, Homo sapien
tgagggatgccctgtccatttccaa

SEQ ID NO: 2500671 - DNA, 25 bp, Homo sapien
tcaatcgctcagaaggaatccggct

SEQ ID NO: 2500672 - DNA, 25 bp, Homo sapien
gtgggaggagctggtcgacttgcca

SEQ ID NO: 2500673 - DNA, 25 bp, Homo sapien
aggaagtcagcgtcggagacggagg

SEQ ID NO: 2500674 - DNA, 25 bp, Homo sapien
gctggtcgacttgccaccggagaca

SEQ ID NO: 2500675 - DNA, 25 bp, Homo sapien
cgtggatttctacacagaatccgtg

SEQ ID NO: 2500676 - DNA, 25 bp, Homo sapien
aagttcagctcttgggttgcaggct

SEQ ID NO: 2500677 - DNA, 25 bp, Homo sapien
ctaaggtaccagaagttcagctctt

SEQ ID NO: 2500678 - DNA, 25 bp, Homo sapien
ttgggttgcaggctccaatcagttc

SEQ ID NO: 2500679 - DNA, 25 bp, Homo sapien
tcagctcttgggttgcaggctccaa

SEQ ID NO: 2500680 - DNA, 25 bp, Homo sapien
cagtgttaactattggacctccatg

SEQ ID NO: 2500681 - DNA, 25 bp, Homo sapien
ttggttctcaaggtgcagttcatcc

SEQ ID NO: 2500682 - DNA, 25 bp, Homo sapien
ctagagcatagtatccagtgttaac

SEQ ID NO: 2500683 - DNA, 25 bp, Homo sapien
tggacctccatgttggttctcaagg

SEQ ID NO: 2500684 - DNA, 25 bp, Homo sapien
tctgacagctgtatgtgatcttcag

SEQ ID NO: 2500685 - DNA, 25 bp, Homo sapien
ttttctagaatactggcgctgattt

SEQ ID NO: 2500686 - DNA, 25 bp, Homo sapien
tgtatgtgatcttcagtcagctctg

SEQ ID NO: 2500687 - DNA, 25 bp, Homo sapien
aatactggcgctgattttatttttg

SEQ ID NO: 2500688 - DNA, 25 bp, Homo sapien
taagaccatcttttattatgctcca

SEQ ID NO: 2500689 - DNA, 25 bp, Homo sapien
ggtgtgatggctcccttgctggctt

SEQ ID NO: 2500690 - DNA, 25 bp, Homo sapien
ccttgctggcttccatctgtatcac

SEQ ID NO: 2500691 - DNA, 25 bp, Homo sapien
aaacatttttgaagtaagaccatct

SEQ ID NO: 2500692 - DNA, 25 bp, Homo sapien
gttgtcctccttctattcttactca

SEQ ID NO: 2500693 - DNA, 25 bp, Homo sapien
gcattccgtattgttgtcctccttc

SEQ ID NO: 2500694 - DNA, 25 bp, Homo sapien
aaagcattccgtattgttgtcctcc

SEQ ID NO: 2500695 - DNA, 25 bp, Homo sapien
tcttaaaagcattccgtattgttgt

SEQ ID NO: 2500696 - DNA, 25 bp, Homo sapien
tatgggacatctcccatatctcttt

SEQ ID NO: 2500697 - DNA, 25 bp, Homo sapien
ttggagcccttctcttcagctattg

SEQ ID NO: 2500698 - DNA, 25 bp, Homo sapien
acctttgaacctttatgggacatct

SEQ ID NO: 2500699 - DNA, 25 bp, Homo sapien
aaacaatcgtgcttcattggagccc

SEQ ID NO: 2500700 - DNA, 25 bp, Homo sapien
ctctgttgaaaccatgcttacttgt

SEQ ID NO: 2500701 - DNA, 25 bp, Homo sapien
gaaaccatgcttacttgttcataca

SEQ ID NO: 2500702 - DNA, 25 bp, Homo sapien
tccgaactgtgtatagacaattaaa

SEQ ID NO: 2500703 - DNA, 25 bp, Homo sapien
tctttcttctccgaactgtgtatag

SEQ ID NO: 2500704 - DNA, 25 bp, Homo sapien
tacagaggctaggtgtctccaagct

SEQ ID NO: 2500705 - DNA, 25 bp, Homo sapien
tcagagaagatggagttacagaggc

SEQ ID NO: 2500706 - DNA, 25 bp, Homo sapien
gggcagatctcatccaatcagagaa

SEQ ID NO: 2500707 - DNA, 25 bp, Homo sapien
taagtctgtgggtacagaacctgca

SEQ ID NO: 2500708 - DNA, 25 bp, Homo sapien
gaaattacaacaggccgggcacgat

SEQ ID NO: 2500709 - DNA, 25 bp, Homo sapien
tagagaaggaaattacaacaggccg

SEQ ID NO: 2500710 - DNA, 25 bp, Homo sapien
tataaaacaccttttagtatagaga

SEQ ID NO: 2500711 - DNA, 25 bp, Homo sapien
aaaaatacaggcgtgctggcacatg

SEQ ID NO: 2500712 - DNA, 25 bp, Homo sapien
catttgtcagagattacgctgggca

SEQ ID NO: 2500713 - DNA, 25 bp, Homo sapien
cagagattacgctgggcattgacag

SEQ ID NO: 2500714 - DNA, 25 bp, Homo sapien
gattacgctgggcattgacagtatg

SEQ ID NO: 2500715 - DNA, 25 bp, Homo sapien
gctgggcattgacagtatggagaca

SEQ ID NO: 2500716 - DNA, 25 bp, Homo sapien
taaagagaaattgaagtccttcaca

SEQ ID NO: 2500717 - DNA, 25 bp, Homo sapien
taggcagtaggcaactggagtttgc

SEQ ID NO: 2500718 - DNA, 25 bp, Homo sapien
tcccaagtacgctggcagacaggag

SEQ ID NO: 2500719 - DNA, 25 bp, Homo sapien
gaggcatggtcccaagtacgctggc

SEQ ID NO: 2500720 - DNA, 25 bp, Homo sapien
tctagctagtctgggttacatgggc

SEQ ID NO: 2500721 - DNA, 25 bp, Homo sapien
tgttcctcccgtttgtactgtggta

SEQ ID NO: 2500722 - DNA, 25 bp, Homo sapien
gaaggaaactgctaaggccaaggag

SEQ ID NO: 2500723 - DNA, 25 bp, Homo sapien
gagttattagccaggtgttcctccc

SEQ ID NO: 2500724 - DNA, 25 bp, Homo sapien
ttctggggaaaagggactgagagaa

SEQ ID NO: 2500725 - DNA, 25 bp, Homo sapien
cagtttctggggaaaagggactgag

SEQ ID NO: 2500726 - DNA, 25 bp, Homo sapien
tttctggggaaaagggactgagaga

SEQ ID NO: 2500727 - DNA, 25 bp, Homo sapien
ctggggaaaagggactgagagaaag

SEQ ID NO: 2500728 - DNA, 25 bp, Homo sapien
attctctttcatctctacttcatgc

SEQ ID NO: 2500729 - DNA, 25 bp, Homo sapien
cattctctttcatctctacttcatg

SEQ ID NO: 2500730 - DNA, 25 bp, Homo sapien
tccaggattcctcatgcacatcaat

SEQ ID NO: 2500731 - DNA, 25 bp, Homo sapien
ttcttattctccaggattcctcatg

SEQ ID NO: 2500732 - DNA, 25 bp, Homo sapien
catgcacatcaattcctgagggaag

SEQ ID NO: 2500733 - DNA, 25 bp, Homo sapien
ggattcctcatgcacatcaattcct

SEQ ID NO: 2500734 - DNA, 25 bp, Homo sapien
cagaggtggaagacggacacagtct

SEQ ID NO: 2500735 - DNA, 25 bp, Homo sapien
tgacacaggaattggtgttggtgca

SEQ ID NO: 2500736 - DNA, 25 bp, Homo sapien
ccgatgatttccatttgttggaaac

SEQ ID NO: 2500737 - DNA, 25 bp, Homo sapien
taccatcaccactgaacttggcggt

SEQ ID NO: 2500738 - DNA, 25 bp, Homo sapien
tcttatgtcattgaggcccctcagt

SEQ ID NO: 2500739 - DNA, 25 bp, Homo sapien
tgcatttccaccatatcttatgtca

SEQ ID NO: 2500740 - DNA, 25 bp, Homo sapien
tttcttactgagtctatcagcccca

SEQ ID NO: 2500741 - DNA, 25 bp, Homo sapien
gaagctccctgctgggttaagatca

SEQ ID NO: 2500742 - DNA, 25 bp, Homo sapien
tcacaaccagttctagcccctgaga

SEQ ID NO: 2500743 - DNA, 25 bp, Homo sapien
ttccctggcagaccatgcacttgag

SEQ ID NO: 2500744 - DNA, 25 bp, Homo sapien
tcctgccctggctggtatagtcgct

SEQ ID NO: 2500745 - DNA, 25 bp, Homo sapien
catgggcaggcctttagcattggtg

SEQ ID NO: 2500746 - DNA, 25 bp, Homo sapien
aagagcaattataagttttttcttg

SEQ ID NO: 2500747 - DNA, 25 bp, Homo sapien
agagcaattataagttttttcttgg

SEQ ID NO: 2500748 - DNA, 25 bp, Homo sapien
gagcaattataagttttttcttgga

SEQ ID NO: 2500749 - DNA, 25 bp, Homo sapien
tcgtgaaatcctcccttcgatttgt

SEQ ID NO: 2500750 - DNA, 25 bp, Homo sapien
cactagcctaatgtcgtgaaatcct

SEQ ID NO: 2500751 - DNA, 25 bp, Homo sapien
tagcctaatgtcgtgaaatcctccc

SEQ ID NO: 2500752 - DNA, 25 bp, Homo sapien
taatgtcgtgaaatcctcccttcga

SEQ ID NO: 2500753 - DNA, 25 bp, Homo sapien
aaggacaaaattcagactcctttgg

SEQ ID NO: 2500754 - DNA, 25 bp, Homo sapien
attcagactcctttggaaaatatcc

SEQ ID NO: 2500755 - DNA, 25 bp, Homo sapien
tcagactcctttggaaaatatccat

SEQ ID NO: 2500756 - DNA, 25 bp, Homo sapien
aaattcagactcctttggaaaatat

SEQ ID NO: 2500757 - DNA, 25 bp, Homo sapien
caatcttagttgtagtacgagtcat

SEQ ID NO: 2500758 - DNA, 25 bp, Homo sapien
caaagtagtaatcgttggtgtagtc

SEQ ID NO: 2500759 - DNA, 25 bp, Homo sapien
tacgagtcatggtactcataacagt

SEQ ID NO: 2500760 - DNA, 25 bp, Homo sapien
tgttgtcataagagtcaaagtagta

SEQ ID NO: 2500761 - DNA, 25 bp, Homo sapien
gttgccatgctaccaaaagtaagct

SEQ ID NO: 2500762 - DNA, 25 bp, Homo sapien
agtaataaggagctttcaaatgcag

SEQ ID NO: 2500763 - DNA, 25 bp, Homo sapien
tgccatgtgtgctccaaggaagaac

SEQ ID NO: 2500764 - DNA, 25 bp, Homo sapien
aaagtaagctccagtgtgttttcag

SEQ ID NO: 2500765 - DNA, 25 bp, Homo sapien
aaatggtccatccaaagtccccagt

SEQ ID NO: 2500766 - DNA, 25 bp, Homo sapien
taaatggtccatccaaagtccccag

SEQ ID NO: 2500767 - DNA, 25 bp, Homo sapien
aaccacaagccatcaatgtgtaaaa

SEQ ID NO: 2500768 - DNA, 25 bp, Homo sapien
tatttcaggctcttgtgtgatattg

SEQ ID NO: 2500769 - DNA, 25 bp, Homo sapien
tctgggtcattttgacattgagact

SEQ ID NO: 2500770 - DNA, 25 bp, Homo sapien
taatgtgcttatacgtgtaaattaa

SEQ ID NO: 2500771 - DNA, 25 bp, Homo sapien
ctcttgtgtgatattgaggctctca

SEQ ID NO: 2500772 - DNA, 25 bp, Homo sapien
aagttagtgtcagctctcacagatt

SEQ ID NO: 2500773 - DNA, 25 bp, Homo sapien
ggctgacttctctgaaaataccctt

SEQ ID NO: 2500774 - DNA, 25 bp, Homo sapien
tctctgaaaatacccttggttgtca

SEQ ID NO: 2500775 - DNA, 25 bp, Homo sapien
attagctgagaagatgttagtgact

SEQ ID NO: 2500776 - DNA, 25 bp, Homo sapien
gagacttagggtcagagctttctgt

SEQ ID NO: 2500777 - DNA, 25 bp, Homo sapien
tgtgtactgggatcatccacatttg

SEQ ID NO: 2500778 - DNA, 25 bp, Homo sapien
gcactacctcaaggcaacaatagag

SEQ ID NO: 2500779 - DNA, 25 bp, Homo sapien
caaagtgtagcatgtgtgtactggg

SEQ ID NO: 2500780 - DNA, 25 bp, Homo sapien
aatcggtcagtacctgtcctgagaa

SEQ ID NO: 2500781 - DNA, 25 bp, Homo sapien
taaatcggtcagtacctgtcctgag

SEQ ID NO: 2500782 - DNA, 25 bp, Homo sapien
tgactaaatcggtcagtacctgtcc

SEQ ID NO: 2500783 - DNA, 25 bp, Homo sapien
tcggtcagtacctgtcctgagaaca

SEQ ID NO: 2500784 - DNA, 25 bp, Homo sapien
acaagatttggctgtccaccatctg

SEQ ID NO: 2500785 - DNA, 25 bp, Homo sapien
aacaagatttggctgtccaccatct

SEQ ID NO: 2500786 - DNA, 25 bp, Homo sapien
cagcagtccgagaagcgtcaggttg

SEQ ID NO: 2500787 - DNA, 25 bp, Homo sapien
gagaccggcctgctttgtaaacatt

SEQ ID NO: 2500788 - DNA, 25 bp, Homo sapien
aagggcagcagtccgagaagcgtca

SEQ ID NO: 2500789 - DNA, 25 bp, Homo sapien
tcaggttggtgagaccggcctgctt

SEQ ID NO: 2500790 - DNA, 25 bp, Homo sapien
actggagcacggaaagaatgaagct

SEQ ID NO: 2500791 - DNA, 25 bp, Homo sapien
gaaccaacagcatagatggatactg

SEQ ID NO: 2500792 - DNA, 25 bp, Homo sapien
gatcacttgagaactggacgactta

SEQ ID NO: 2500793 - DNA, 25 bp, Homo sapien
tcaagggaaatcttacagaaccaac

SEQ ID NO: 2500794 - DNA, 25 bp, Homo sapien
cagagtccaaagatgcgtgatgaag

SEQ ID NO: 2500795 - DNA, 25 bp, Homo sapien
gaatacagccaaaggagcccatagg

SEQ ID NO: 2500796 - DNA, 25 bp, Homo sapien
gattccagcaggtatggctatccaa

SEQ ID NO: 2500797 - DNA, 25 bp, Homo sapien
tcatgagggaactctctcgcagtcc

SEQ ID NO: 2500798 - DNA, 25 bp, Homo sapien
cctgtcaaagctaggcaggatgtca

SEQ ID NO: 2500799 - DNA, 25 bp, Homo sapien
gatgtatacatagattcgctccata

SEQ ID NO: 2500800 - DNA, 25 bp, Homo sapien
gctctatatccagatggctttgaaa

SEQ ID NO: 2500801 - DNA, 25 bp, Homo sapien
ggcttgggtgtagggaaaagctcta

SEQ ID NO: 2500802 - DNA, 25 bp, Homo sapien
tggtcccctccacttgctgatggtg

SEQ ID NO: 2500803 - DNA, 25 bp, Homo sapien
ggaaagcaatgattcaacaggcaaa

SEQ ID NO: 2500804 - DNA, 25 bp, Homo sapien
gaaacaggaagcatatggacccctg

SEQ ID NO: 2500805 - DNA, 25 bp, Homo sapien
taaaatagttccatgagagggcaaa

SEQ ID NO: 2500806 - DNA, 25 bp, Homo sapien
ccagcctgttttgctagtcgatatt

SEQ ID NO: 2500807 - DNA, 25 bp, Homo sapien
catattttaatcctacccagcctgt

SEQ ID NO: 2500808 - DNA, 25 bp, Homo sapien
gaagggatgacactcacatatttta

SEQ ID NO: 2500809 - DNA, 25 bp, Homo sapien
aacaagagccaaattatagggactt

SEQ ID NO: 2500810 - DNA, 25 bp, Homo sapien
aagcttttagcatgtggaacccaaa

SEQ ID NO: 2500811 - DNA, 25 bp, Homo sapien
cacgggtattcctgcagacttgatg

SEQ ID NO: 2500812 - DNA, 25 bp, Homo sapien
tgaaaaactgtgaacctgctccctt

SEQ ID NO: 2500813 - DNA, 25 bp, Homo sapien
ccttggttaatacttcacgatcttt

SEQ ID NO: 2500814 - DNA, 25 bp, Homo sapien
caaacaataaatcagcgatgaaaat

SEQ ID NO: 2500815 - DNA, 25 bp, Homo sapien
cgacaaacaataaatcagcgatgaa

SEQ ID NO: 2500816 - DNA, 25 bp, Homo sapien
ctaacgacaaacaataaatcagcga

SEQ ID NO: 2500817 - DNA, 25 bp, Homo sapien
taaatcagcgatgaaaatttttgga

SEQ ID NO: 2500818 - DNA, 25 bp, Homo sapien
ttaagtataatgctgtaccggcttg

SEQ ID NO: 2500819 - DNA, 25 bp, Homo sapien
tgctgtaccggcttgcactagaggt

SEQ ID NO: 2500820 - DNA, 25 bp, Homo sapien
tataatgctgtaccggcttgcacta

SEQ ID NO: 2500821 - DNA, 25 bp, Homo sapien
taccggcttgcactagaggtttctc

SEQ ID NO: 2500822 - DNA, 25 bp, Homo sapien
cactgtatctactcctttgggctgt

SEQ ID NO: 2500823 - DNA, 25 bp, Homo sapien
cagggtgcactgtatctactccttt

SEQ ID NO: 2500824 - DNA, 25 bp, Homo sapien
gggcgaccgaccacctcctcctcga

SEQ ID NO: 2500825 - DNA, 25 bp, Homo sapien
tatctactcctttgggctgtcttcc

SEQ ID NO: 2500826 - DNA, 25 bp, Homo sapien
ccagagtgaaatcgaaggtgaaaga

SEQ ID NO: 2500827 - DNA, 25 bp, Homo sapien
tttccagagtgaaatcgaaggtgaa

SEQ ID NO: 2500828 - DNA, 25 bp, Homo sapien
tccagagtgaaatcgaaggtgaaag

SEQ ID NO: 2500829 - DNA, 25 bp, Homo sapien
agtgaaatcgaaggtgaaagaaaca

SEQ ID NO: 2500830 - DNA, 25 bp, Homo sapien
taaggctcaaagtgcgtcttggagg

SEQ ID NO: 2500831 - DNA, 25 bp, Homo sapien
cagcacctgatggtttaggcgacac

SEQ ID NO: 2500832 - DNA, 25 bp, Homo sapien
attgcagagttggtgagcagcgctc

SEQ ID NO: 2500833 - DNA, 25 bp, Homo sapien
ccctgagtgcggatttctgctatga

SEQ ID NO: 2500834 - DNA, 25 bp, Homo sapien
ctaaatcaaacaccggggacgtgag

SEQ ID NO: 2500835 - DNA, 25 bp, Homo sapien
gtttgcagcaggttctctcccttgc

SEQ ID NO: 2500836 - DNA, 25 bp, Homo sapien
agggagtttccgctcctagtttgca

SEQ ID NO: 2500837 - DNA, 25 bp, Homo sapien
gagtttccgctcctagtttgcagca

SEQ ID NO: 2500838 - DNA, 25 bp, Homo sapien
tcttcttctcgtcgtaattagccac

SEQ ID NO: 2500839 - DNA, 25 bp, Homo sapien
tcgtcgtaattagccacattctgta

SEQ ID NO: 2500840 - DNA, 25 bp, Homo sapien
tcttctcgtcgtaattagccacatt

SEQ ID NO: 2500841 - DNA, 25 bp, Homo sapien
tctcgtcgtaattagccacattctg

SEQ ID NO: 2500842 - DNA, 25 bp, Homo sapien
cactaaaaccagcttgggtcagtgt

SEQ ID NO: 2500843 - DNA, 25 bp, Homo sapien
gcatattcgtggaaaaagcccttgt

SEQ ID NO: 2500844 - DNA, 25 bp, Homo sapien
tttgtgtaatggtgcacctgctatt

SEQ ID NO: 2500845 - DNA, 25 bp, Homo sapien
tgattttagcaactacacagcatgc

SEQ ID NO: 2500846 - DNA, 25 bp, Homo sapien
taggtggtggctatagagattacat

SEQ ID NO: 2500847 - DNA, 25 bp, Homo sapien
gaagtgacatccctgcaaattgtgt

SEQ ID NO: 2500848 - DNA, 25 bp, Homo sapien
gagattacattcataggcttgactg

SEQ ID NO: 2500849 - DNA, 25 bp, Homo sapien
ggttgtcagtgcatgtagaagtgac

SEQ ID NO: 2500850 - DNA, 25 bp, Homo sapien
aaatgcttagccgtgttagggatca

SEQ ID NO: 2500851 - DNA, 25 bp, Homo sapien
tcagtgtgggatgccttcagctcat

SEQ ID NO: 2500852 - DNA, 25 bp, Homo sapien
tatctcccgagaaagcatcagtgtg

SEQ ID NO: 2500853 - DNA, 25 bp, Homo sapien
tagggtctggtagggagacaaccaa

SEQ ID NO: 2500854 - DNA, 25 bp, Homo sapien
tcctcaggtaggaaagtcagtgtca

SEQ ID NO: 2500855 - DNA, 25 bp, Homo sapien
aagccatgtttttgccgtgatctgg

SEQ ID NO: 2500856 - DNA, 25 bp, Homo sapien
ggattgcctactgcagagttatatc

SEQ ID NO: 2500857 - DNA, 25 bp, Homo sapien
cagtttgaatgtggttgtcctcagg

SEQ ID NO: 2500858 - DNA, 25 bp, Homo sapien
gcttctggtaagacaaatggatatt

SEQ ID NO: 2500859 - DNA, 25 bp, Homo sapien
ttccatacaacccaggatgcaagct

SEQ ID NO: 2500860 - DNA, 25 bp, Homo sapien
ccaagttcatgaatcttttgaattc

SEQ ID NO: 2500861 - DNA, 25 bp, Homo sapien
tacaacccaggatgcaagcttctgg

SEQ ID NO: 2500862 - DNA, 25 bp, Homo sapien
catggcaaatagtacaggctaggca

SEQ ID NO: 2500863 - DNA, 25 bp, Homo sapien
tttctaactgttgtgaccacaggca

SEQ ID NO: 2500864 - DNA, 25 bp, Homo sapien
accacaggcaagttatgcattctcg

SEQ ID NO: 2500865 - DNA, 25 bp, Homo sapien
caggtgtctgtgactgtctctacaa

SEQ ID NO: 2500866 - DNA, 25 bp, Homo sapien
tataaggggatgctacctggttagg

SEQ ID NO: 2500867 - DNA, 25 bp, Homo sapien
gatgctacctggttagggacgaagc

SEQ ID NO: 2500868 - DNA, 25 bp, Homo sapien
agggacgaagctcatatttttgcag

SEQ ID NO: 2500869 - DNA, 25 bp, Homo sapien
ggcagctgctgggtcggtttataag

SEQ ID NO: 2500870 - DNA, 25 bp, Homo sapien
ttgtaagtcatgagggctttccctt

SEQ ID NO: 2500871 - DNA, 25 bp, Homo sapien
tcttggatcatggtaatatatgcaa

SEQ ID NO: 2500872 - DNA, 25 bp, Homo sapien
taaatggttctgacttcagttcttg

SEQ ID NO: 2500873 - DNA, 25 bp, Homo sapien
taatatagagccaattcttgattaa

SEQ ID NO: 2500874 - DNA, 25 bp, Homo sapien
ctgtgtctgcatccttatgacccaa

SEQ ID NO: 2500875 - DNA, 25 bp, Homo sapien
gtgacctcgagaccctcctgtgtct

SEQ ID NO: 2500876 - DNA, 25 bp, Homo sapien
tgtctgcatccttatgacccaaatc

SEQ ID NO: 2500877 - DNA, 25 bp, Homo sapien
tctgcatccttatgacccaaatcct

SEQ ID NO: 2500878 - DNA, 25 bp, Homo sapien
tgttccttctaacaatatcgaccca

SEQ ID NO: 2500879 - DNA, 25 bp, Homo sapien
cttctaatgatgttgctattatttg

SEQ ID NO: 2500880 - DNA, 25 bp, Homo sapien
cttcaatggagtattgttccttcta

SEQ ID NO: 2500881 - DNA, 25 bp, Homo sapien
taacaatatcgacccactgctgaat

SEQ ID NO: 2500882 - DNA, 25 bp, Homo sapien
tatgtgcatagcacctctttgacgg

SEQ ID NO: 2500883 - DNA, 25 bp, Homo sapien
gacggtggctcagagtatgtttgct

SEQ ID NO: 2500884 - DNA, 25 bp, Homo sapien
gtttgctgacaactggaggagttaa

SEQ ID NO: 2500885 - DNA, 25 bp, Homo sapien
atttcacgtcaaatatgtgcatagc

SEQ ID NO: 2500886 - DNA, 25 bp, Homo sapien
caggcagataccagatatatgaggc

SEQ ID NO: 2500887 - DNA, 25 bp, Homo sapien
tatgaggcggtcctttcagctgctc

SEQ ID NO: 2500888 - DNA, 25 bp, Homo sapien
cattctccgtaggtgagctgtgtaa

SEQ ID NO: 2500889 - DNA, 25 bp, Homo sapien
tcaggagccaggtcattctccgtag

SEQ ID NO: 2500890 - DNA, 25 bp, Homo sapien
gccacctctatttgtaggcgaaggg

SEQ ID NO: 2500891 - DNA, 25 bp, Homo sapien
cacctctatttgtaggcgaagggta

SEQ ID NO: 2500892 - DNA, 25 bp, Homo sapien
aagccacctctatttgtaggcgaag

SEQ ID NO: 2500893 - DNA, 25 bp, Homo sapien
ctctttctcattcaccttaaagcca

SEQ ID NO: 2500894 - DNA, 25 bp, Homo sapien
gtgctgaagttctaaactcctgcag

SEQ ID NO: 2500895 - DNA, 25 bp, Homo sapien
ctcttaggttcttggcctactctgc

SEQ ID NO: 2500896 - DNA, 25 bp, Homo sapien
ttcagaaccaagaggttctgaatgg

SEQ ID NO: 2500897 - DNA, 25 bp, Homo sapien
gggtgctgaagttctaaactcctgc

SEQ ID NO: 2500898 - DNA, 25 bp, Homo sapien
gtattgtaggaccagatgcttctcc

SEQ ID NO: 2500899 - DNA, 25 bp, Homo sapien
tgagtgagctcatccatatgacctg

SEQ ID NO: 2500900 - DNA, 25 bp, Homo sapien
gggagccagttgagtgagctcatcc

SEQ ID NO: 2500901 - DNA, 25 bp, Homo sapien
tggaaacatagcttatctttgacat

SEQ ID NO: 2500902 - DNA, 25 bp, Homo sapien
tcaccatcacatgtgccagcaggtg

SEQ ID NO: 2500903 - DNA, 25 bp, Homo sapien
ttaccggcaaggaacatcaagtttc

SEQ ID NO: 2500904 - DNA, 25 bp, Homo sapien
gaacatcaagtttcatggcaaagct

SEQ ID NO: 2500905 - DNA, 25 bp, Homo sapien
tttgtccaggatcctaatcccagtc

SEQ ID NO: 2500906 - DNA, 25 bp, Homo sapien
tacttaagtagtaaggagttatgac

SEQ ID NO: 2500907 - DNA, 25 bp, Homo sapien
ctgatactccatggcaaccatagtc

SEQ ID NO: 2500908 - DNA, 25 bp, Homo sapien
cttaagtagtaaggagttatgactg

SEQ ID NO: 2500909 - DNA, 25 bp, Homo sapien
tggcaaccatagtcaaattcctcca

SEQ ID NO: 2500910 - DNA, 25 bp, Homo sapien
ttcaaggtttattgatgttggcatc

SEQ ID NO: 2500911 - DNA, 25 bp, Homo sapien
tgaaagtttgtaggccaaaacatta

SEQ ID NO: 2500912 - DNA, 25 bp, Homo sapien
caaggtttattgatgttggcatctg

SEQ ID NO: 2500913 - DNA, 25 bp, Homo sapien
aatgaaagtttgtaggccaaaacat

SEQ ID NO: 2500914 - DNA, 25 bp, Homo sapien
aagataacactgtccattctccgga

SEQ ID NO: 2500915 - DNA, 25 bp, Homo sapien
cattctccggaaggaataatgggct

SEQ ID NO: 2500916 - DNA, 25 bp, Homo sapien
aacttcagactgacatgttgaatca

SEQ ID NO: 2500917 - DNA, 25 bp, Homo sapien
tcaataaacttcagactgacatgtt

SEQ ID NO: 2500918 - DNA, 25 bp, Homo sapien
gcacgctgcagtacgttgtattctc

SEQ ID NO: 2500919 - DNA, 25 bp, Homo sapien
cgtggtagtctagtctgatgtaaca

SEQ ID NO: 2500920 - DNA, 25 bp, Homo sapien
gcttcgtatagctgggcacgctgca

SEQ ID NO: 2500921 - DNA, 25 bp, Homo sapien
gaccatcttgctctggtgtagtcat

SEQ ID NO: 2500922 - DNA, 25 bp, Homo sapien
taaaaccggactcatggctaggtct

SEQ ID NO: 2500923 - DNA, 25 bp, Homo sapien
gaatctccttcaggatcgtacgaag

SEQ ID NO: 2500924 - DNA, 25 bp, Homo sapien
cattatgtcgctgactaaaaccgga

SEQ ID NO: 2500925 - DNA, 25 bp, Homo sapien
tacgaagaacttttgatgaggccga

SEQ ID NO: 2500926 - DNA, 25 bp, Homo sapien
ctgtgtaccctgtcatcactggcag

SEQ ID NO: 2500927 - DNA, 25 bp, Homo sapien
atccgtgtgtccgaaaaaactctga

SEQ ID NO: 2500928 - DNA, 25 bp, Homo sapien
aactctgatttagctgtgaggctga

SEQ ID NO: 2500929 - DNA, 25 bp, Homo sapien
tctgtttttcatcagcgctcgcata

SEQ ID NO: 2500930 - DNA, 25 bp, Homo sapien
ggaatcccatcacaaagctacatag

SEQ ID NO: 2500931 - DNA, 25 bp, Homo sapien
gccgtgctatcaagactaatcagga

SEQ ID NO: 2500932 - DNA, 25 bp, Homo sapien
tgcatttcaacaaggaaggaagctt

SEQ ID NO: 2500933 - DNA, 25 bp, Homo sapien
cccagaaactccatggacgcacatt

SEQ ID NO: 2500934 - DNA, 25 bp, Homo sapien
cccacagtggcagccacaagtccta

SEQ ID NO: 2500935 - DNA, 25 bp, Homo sapien
ccacagtggcagccacaagtcctac

SEQ ID NO: 2500936 - DNA, 25 bp, Homo sapien
ctaacccacagtggcagccacaagt

SEQ ID NO: 2500937 - DNA, 25 bp, Homo sapien
aacccacagtggcagccacaagtcc

SEQ ID NO: 2500938 - DNA, 25 bp, Homo sapien
aatgtcctgttgcatgcagcagtca

SEQ ID NO: 2500939 - DNA, 25 bp, Homo sapien
ccattcacacggaggcagtggcagg

SEQ ID NO: 2500940 - DNA, 25 bp, Homo sapien
gagctaccatcttgtcaatgtcctg

SEQ ID NO: 2500941 - DNA, 25 bp, Homo sapien
tttcgcctgaaccatgccattggag

SEQ ID NO: 2500942 - DNA, 25 bp, Homo sapien
gccagggtttgccaactttggtcat

SEQ ID NO: 2500943 - DNA, 25 bp, Homo sapien
actgggccagggtttgccaactttg

SEQ ID NO: 2500944 - DNA, 25 bp, Homo sapien
tgactttggcgtgaagacggaactg

SEQ ID NO: 2500945 - DNA, 25 bp, Homo sapien
ttgctttgactttggcgtgaagacg

SEQ ID NO: 2500946 - DNA, 25 bp, Homo sapien
tatgtgttcttgacaggcattgcta

SEQ ID NO: 2500947 - DNA, 25 bp, Homo sapien
attacagaggctccttgtaattcag

SEQ ID NO: 2500948 - DNA, 25 bp, Homo sapien
acagaggctccttgtaattcagata

SEQ ID NO: 2500949 - DNA, 25 bp, Homo sapien
caggcattgctaatacaggaaaata

SEQ ID NO: 2500950 - DNA, 25 bp, Homo sapien
gaggagtgcattggtggttgtgaca

SEQ ID NO: 2500951 - DNA, 25 bp, Homo sapien
ttaagtcttggtgaggagtgcattg

SEQ ID NO: 2500952 - DNA, 25 bp, Homo sapien
ttggtgaggagtgcattggtggttg

SEQ ID NO: 2500953 - DNA, 25 bp, Homo sapien
cattggtggttgtgacatatttcag

SEQ ID NO: 2500954 - DNA, 25 bp, Homo sapien
cgtgaatttgtgtattaactttccg

SEQ ID NO: 2500955 - DNA, 25 bp, Homo sapien
ttccgacatcgtaatttccattcat

SEQ ID NO: 2500956 - DNA, 25 bp, Homo sapien
taactttccgacatcgtaatttcca

SEQ ID NO: 2500957 - DNA, 25 bp, Homo sapien
gtgtattaactttccgacatcgtaa

SEQ ID NO: 2500958 - DNA, 25 bp, Homo sapien
ggtacttcctgatggcctgatatta

SEQ ID NO: 2500959 - DNA, 25 bp, Homo sapien
tacttcctgatggcctgatattatg

SEQ ID NO: 2500960 - DNA, 25 bp, Homo sapien
gtacttcctgatggcctgatattat

SEQ ID NO: 2500961 - DNA, 25 bp, Homo sapien
tctctccctgtggtacttcctgatg

SEQ ID NO: 2500962 - DNA, 25 bp, Homo sapien
tagaaatgctttgtactaccgcagc

SEQ ID NO: 2500963 - DNA, 25 bp, Homo sapien
ggtaaccttggaaatgttctgaaga

SEQ ID NO: 2500964 - DNA, 25 bp, Homo sapien
tctgaagctgaaagcgcctatagaa

SEQ ID NO: 2500965 - DNA, 25 bp, Homo sapien
taattggattgatgctcagtctgaa

SEQ ID NO: 2500966 - DNA, 25 bp, Homo sapien
ctgtgtcctgcttcaccatgtatct

SEQ ID NO: 2500967 - DNA, 25 bp, Homo sapien
tgtcctgcttcaccatgtatcttac

SEQ ID NO: 2500968 - DNA, 25 bp, Homo sapien
tcctgcttcaccatgtatcttacca

SEQ ID NO: 2500969 - DNA, 25 bp, Homo sapien
tgtgtcctgcttcaccatgtatctt

SEQ ID NO: 2500970 - DNA, 25 bp, Homo sapien
cattagaaggttctttcttggagtt

SEQ ID NO: 2500971 - DNA, 25 bp, Homo sapien
ttttttcctctggtggggcctctgc

SEQ ID NO: 2500972 - DNA, 25 bp, Homo sapien
ctttcttggagttttcccaaatatg

SEQ ID NO: 2500973 - DNA, 25 bp, Homo sapien
catactatttgtgctgcctgcaaca

SEQ ID NO: 2500974 - DNA, 25 bp, Homo sapien
aagcaatgcaggattcttgtgctgc

SEQ ID NO: 2500975 - DNA, 25 bp, Homo sapien
gaggaagtgcgctcctttcaggtga

SEQ ID NO: 2500976 - DNA, 25 bp, Homo sapien
gctgctcgtgacatgaccaaacctg

SEQ ID NO: 2500977 - DNA, 25 bp, Homo sapien
aggacttctgccttacagctagcag

SEQ ID NO: 2500978 - DNA, 25 bp, Homo sapien
tcttgggtaggtgttcctttcatgg

SEQ ID NO: 2500979 - DNA, 25 bp, Homo sapien
cttgggtaggtgttcctttcatggg

SEQ ID NO: 2500980 - DNA, 25 bp, Homo sapien
taggtgttcctttcatgggttccca

SEQ ID NO: 2500981 - DNA, 25 bp, Homo sapien
ccaaaagaatgaaggtcaagacgag

SEQ ID NO: 2500982 - DNA, 25 bp, Homo sapien
tatgttgtcaagtattccatgtcca

SEQ ID NO: 2500983 - DNA, 25 bp, Homo sapien
ccatgtccatgtgaagcaaattata

SEQ ID NO: 2500984 - DNA, 25 bp, Homo sapien
tctctgtgaattcccctgtactctc

SEQ ID NO: 2500985 - DNA, 25 bp, Homo sapien
ttagcttccaagatcagacaagata

SEQ ID NO: 2500986 - DNA, 25 bp, Homo sapien
tcccatctaagtactaaccagccca

SEQ ID NO: 2500987 - DNA, 25 bp, Homo sapien
ccatctaagtactaaccagcccaac

SEQ ID NO: 2500988 - DNA, 25 bp, Homo sapien
tagcttccaagatcagacaagatag

SEQ ID NO: 2500989 - DNA, 25 bp, Homo sapien
ccactgaggagactctttttaagat

SEQ ID NO: 2500990 - DNA, 25 bp, Homo sapien
gctctgatttcatgcattttaccct

SEQ ID NO: 2500991 - DNA, 25 bp, Homo sapien
aaatactaggctgcatgagagagaa

SEQ ID NO: 2500992 - DNA, 25 bp, Homo sapien
cccatatgttctgctgttctccctg

SEQ ID NO: 2500993 - DNA, 25 bp, Homo sapien
tatctaagcattgcaattttaaccc

SEQ ID NO: 2500994 - DNA, 25 bp, Homo sapien
cctactgtttgtaagcaatgggcca

SEQ ID NO: 2500995 - DNA, 25 bp, Homo sapien
tgagcacttgatgggattcttggac

SEQ ID NO: 2500996 - DNA, 25 bp, Homo sapien
gcaaaaactaaaggctaaactgaga

SEQ ID NO: 2500997 - DNA, 25 bp, Homo sapien
tgaatagacctgaagactagccacg

SEQ ID NO: 2500998 - DNA, 25 bp, Homo sapien
cctccctcgtggacaggttttagag

SEQ ID NO: 2500999 - DNA, 25 bp, Homo sapien
caatgtatcaatccattgcttcctc

SEQ ID NO: 2501000 - DNA, 25 bp, Homo sapien
tttagagttgaatagacctgaagac

SEQ ID NO: 2501001 - DNA, 25 bp, Homo sapien
tgagaagggtaaatgtagtgagaaa

SEQ ID NO: 2501002 - DNA, 25 bp, Homo sapien
cctatggcattagtgtttttgtgag

SEQ ID NO: 2501003 - DNA, 25 bp, Homo sapien
agtgggttgaagtgtattattcatc

SEQ ID NO: 2501004 - DNA, 25 bp, Homo sapien
atggcattaataagaaagcccttct

SEQ ID NO: 2501005 - DNA, 25 bp, Homo sapien
ttggagaggtaaaggatttgattag

SEQ ID NO: 2501006 - DNA, 25 bp, Homo sapien
tgattagaacagtttgagactgtct

SEQ ID NO: 2501007 - DNA, 25 bp, Homo sapien
ccagtaatctaccaagatagggtcg

SEQ ID NO: 2501008 - DNA, 25 bp, Homo sapien
gtctgtattctttttggttgcccag

SEQ ID NO: 2501009 - DNA, 25 bp, Homo sapien
catttgcctattgcagactggtgca

SEQ ID NO: 2501010 - DNA, 25 bp, Homo sapien
gatcccaccagacgtaacaagtcgg

SEQ ID NO: 2501011 - DNA, 25 bp, Homo sapien
gactggtgcaatgtgcaagatccca

SEQ ID NO: 2501012 - DNA, 25 bp, Homo sapien
aacaagtcggatgcgatccttcatg

SEQ ID NO: 2501013 - DNA, 25 bp, Homo sapien
ccagttttggtgaatatcgggctct

SEQ ID NO: 2501014 - DNA, 25 bp, Homo sapien
tccatgtttctataggatgtctggt

SEQ ID NO: 2501015 - DNA, 25 bp, Homo sapien
tgaaatcattggcacaggccgacat

SEQ ID NO: 2501016 - DNA, 25 bp, Homo sapien
cctgatttgggccattccatgtttc

SEQ ID NO: 2501017 - DNA, 25 bp, Homo sapien
cagaacctcatagcctctctaaacg

SEQ ID NO: 2501018 - DNA, 25 bp, Homo sapien
tcatgatgcagtaccctgcacacag

SEQ ID NO: 2501019 - DNA, 25 bp, Homo sapien
cgtctttacactctggctgggactg

SEQ ID NO: 2501020 - DNA, 25 bp, Homo sapien
gcagaagtctttagaccctgggtac

SEQ ID NO: 2501021 - DNA, 25 bp, Homo sapien
aggacttgtaaatgtagagctccca

SEQ ID NO: 2501022 - DNA, 25 bp, Homo sapien
ccactttctcacaaggacttgtaaa

SEQ ID NO: 2501023 - DNA, 25 bp, Homo sapien
ttgtaaatgtagagctcccaactga

SEQ ID NO: 2501024 - DNA, 25 bp, Homo sapien
gacttgtaaatgtagagctcccaac

SEQ ID NO: 2501025 - DNA, 25 bp, Homo sapien
gaacaatgatatgcaagcgtgcaag

SEQ ID NO: 2501026 - DNA, 25 bp, Homo sapien
cattatttataagagattgtcactg

SEQ ID NO: 2501027 - DNA, 25 bp, Homo sapien
tcaacgtggatgaagctaaagaaca

SEQ ID NO: 2501028 - DNA, 25 bp, Homo sapien
gcattagctattagacagcagtgaa

SEQ ID NO: 2501029 - DNA, 25 bp, Homo sapien
cccagcctcctgtatagcatcaaaa

SEQ ID NO: 2501030 - DNA, 25 bp, Homo sapien
tccacttgcgcaagaatctggagat

SEQ ID NO: 2501031 - DNA, 25 bp, Homo sapien
tcataagcttttggcctagtttccc

SEQ ID NO: 2501032 - DNA, 25 bp, Homo sapien
caaattccatggaggtaagacgagc

SEQ ID NO: 2501033 - DNA, 25 bp, Homo sapien
taacgaacatctgattgagctccat

SEQ ID NO: 2501034 - DNA, 25 bp, Homo sapien
cttaacgaacatctgattgagctcc

SEQ ID NO: 2501035 - DNA, 25 bp, Homo sapien
ttaacgaacatctgattgagctcca

SEQ ID NO: 2501036 - DNA, 25 bp, Homo sapien
gaatgcttctatttcacagagggct

SEQ ID NO: 2501037 - DNA, 25 bp, Homo sapien
cacagaatgcttctatttcacagag

SEQ ID NO: 2501038 - DNA, 25 bp, Homo sapien
cagaatgcttctatttcacagaggg

SEQ ID NO: 2501039 - DNA, 25 bp, Homo sapien
agaatgcttctatttcacagagggc

SEQ ID NO: 2501040 - DNA, 25 bp, Homo sapien
gtggcagtattgacatttgtagcca

SEQ ID NO: 2501041 - DNA, 25 bp, Homo sapien
tttagcttgtatgttgtgattttag

SEQ ID NO: 2501042 - DNA, 25 bp, Homo sapien
attatagaatgttaagaggcatccc

SEQ ID NO: 2501043 - DNA, 25 bp, Homo sapien
taagaggcaacactaaaccaattta

SEQ ID NO: 2501044 - DNA, 25 bp, Homo sapien
catattctccacgaagagctcgcat

SEQ ID NO: 2501045 - DNA, 25 bp, Homo sapien
aacatattctccacgaagagctcgc

SEQ ID NO: 2501046 - DNA, 25 bp, Homo sapien
tcaaaaacatattctccacgaagag

SEQ ID NO: 2501047 - DNA, 25 bp, Homo sapien
aaaacatattctccacgaagagctc

SEQ ID NO: 2501048 - DNA, 25 bp, Homo sapien
tctaggctccagatggagatgacat

SEQ ID NO: 2501049 - DNA, 25 bp, Homo sapien
ttctaggctccagatggagatgaca

SEQ ID NO: 2501050 - DNA, 25 bp, Homo sapien
ctaggctccagatggagatgacatt

SEQ ID NO: 2501051 - DNA, 25 bp, Homo sapien
ctgttcagaatatggaatatgtctc

SEQ ID NO: 2501052 - DNA, 25 bp, Homo sapien
tggctacttgtaagtccacaactaa

SEQ ID NO: 2501053 - DNA, 25 bp, Homo sapien
gctacttgtaagtccacaactaagg

SEQ ID NO: 2501054 - DNA, 25 bp, Homo sapien
cttcttggctacttgtaagtccaca

SEQ ID NO: 2501055 - DNA, 25 bp, Homo sapien
tgtaagtccacaactaaggaatgcc

SEQ ID NO: 2501056 - DNA, 25 bp, Homo sapien
gaaaccacacttatcggccagagat

SEQ ID NO: 2501057 - DNA, 25 bp, Homo sapien
tatcggccagagatatccactttgc

SEQ ID NO: 2501058 - DNA, 25 bp, Homo sapien
ctgaaaccacacttatcggccagag

SEQ ID NO: 2501059 - DNA, 25 bp, Homo sapien
acacttatcggccagagatatccac

SEQ ID NO: 2501060 - DNA, 25 bp, Homo sapien
taacctggtcacagccttgttgaga

SEQ ID NO: 2501061 - DNA, 25 bp, Homo sapien
aaggccggagtctggcatgtctgac

SEQ ID NO: 2501062 - DNA, 25 bp, Homo sapien
gagtctggcatgtctgacagcagca

SEQ ID NO: 2501063 - DNA, 25 bp, Homo sapien
tcagaggccactccatatctcatta

SEQ ID NO: 2501064 - DNA, 25 bp, Homo sapien
tcagtcactgtatctatctctaggt

SEQ ID NO: 2501065 - DNA, 25 bp, Homo sapien
atctatctctaggtgggcgatgttc

SEQ ID NO: 2501066 - DNA, 25 bp, Homo sapien
cccatcagtcactgtatctatctct

SEQ ID NO: 2501067 - DNA, 25 bp, Homo sapien
ctatctctaggtgggcgatgttcat

SEQ ID NO: 2501068 - DNA, 25 bp, Homo sapien
cagggagcccatttcaatagcatca

SEQ ID NO: 2501069 - DNA, 25 bp, Homo sapien
gtcagggagcccatttcaatagcat

SEQ ID NO: 2501070 - DNA, 25 bp, Homo sapien
ttctcacagtcagggagcccatttc

SEQ ID NO: 2501071 - DNA, 25 bp, Homo sapien
acagtcagggagcccatttcaatag

SEQ ID NO: 2501072 - DNA, 25 bp, Homo sapien
taatagagcatatttagcactatgg

SEQ ID NO: 2501073 - DNA, 25 bp, Homo sapien
gcactatggacttgatccaactaaa

SEQ ID NO: 2501074 - DNA, 25 bp, Homo sapien
cagtctgaaatgtgaggctgtataa

SEQ ID NO: 2501075 - DNA, 25 bp, Homo sapien
ccatgggaatggatataatagagca

SEQ ID NO: 2501076 - DNA, 25 bp, Homo sapien
tttccgtgtagctatatcttgaatt

SEQ ID NO: 2501077 - DNA, 25 bp, Homo sapien
ctttttttccgtgtagctatatctt

SEQ ID NO: 2501078 - DNA, 25 bp, Homo sapien
ttttttccgtgtagctatatcttga

SEQ ID NO: 2501079 - DNA, 25 bp, Homo sapien
ccgtgtagctatatcttgaatttct

SEQ ID NO: 2501080 - DNA, 25 bp, Homo sapien
agacagaagagattgtggctgggtg

SEQ ID NO: 2501081 - DNA, 25 bp, Homo sapien
tctcagacagaagagattgtggctg

SEQ ID NO: 2501082 - DNA, 25 bp, Homo sapien
gattgtggctgggtggttactctca

SEQ ID NO: 2501083 - DNA, 25 bp, Homo sapien
aaatctcagacagaagagattgtgg

SEQ ID NO: 2501084 - DNA, 25 bp, Homo sapien
catctccggagaatggtttcatatc

SEQ ID NO: 2501085 - DNA, 25 bp, Homo sapien
ggtttgaccaccctgatatacagat

SEQ ID NO: 2501086 - DNA, 25 bp, Homo sapien
tcaagctgctgatactggacacacg

SEQ ID NO: 2501087 - DNA, 25 bp, Homo sapien
tcagctgtagtaattttatgtgaaa

SEQ ID NO: 2501088 - DNA, 25 bp, Homo sapien
taatgcagcaagtcagtgccagacg

SEQ ID NO: 2501089 - DNA, 25 bp, Homo sapien
ggctccaaccctacgtccttgagaa

SEQ ID NO: 2501090 - DNA, 25 bp, Homo sapien
tatgattggcacaagtcgctgttac

SEQ ID NO: 2501091 - DNA, 25 bp, Homo sapien
taatactaactaatccttggaggac

SEQ ID NO: 2501092 - DNA, 25 bp, Homo sapien
ttttataagccttcagatagcctag

SEQ ID NO: 2501093 - DNA, 25 bp, Homo sapien
agatagcctaggagagatactggag

SEQ ID NO: 2501094 - DNA, 25 bp, Homo sapien
tcagatagcctaggagagatactgg

SEQ ID NO: 2501095 - DNA, 25 bp, Homo sapien
tagcctaggagagatactggaggaa

SEQ ID NO: 2501096 - DNA, 25 bp, Homo sapien
tactacttcacgcatacttgttaaa

SEQ ID NO: 2501097 - DNA, 25 bp, Homo sapien
tctgtacatcctactacttcacgca

SEQ ID NO: 2501098 - DNA, 25 bp, Homo sapien
catcctactacttcacgcatacttg

SEQ ID NO: 2501099 - DNA, 25 bp, Homo sapien
tgtacatcctactacttcacgcata

SEQ ID NO: 2501100 - DNA, 25 bp, Homo sapien
actccttattaacaggcccattgac

SEQ ID NO: 2501101 - DNA, 25 bp, Homo sapien
aactccttattaacaggcccattga

SEQ ID NO: 2501102 - DNA, 25 bp, Homo sapien
taactccttattaacaggcccattg

SEQ ID NO: 2501103 - DNA, 25 bp, Homo sapien
ctccttattaacaggcccattgact

SEQ ID NO: 2501104 - DNA, 25 bp, Homo sapien
cctgataatggtgcatggaatgacc

SEQ ID NO: 2501105 - DNA, 25 bp, Homo sapien
tattgcatgcctgaatacctgagac

SEQ ID NO: 2501106 - DNA, 25 bp, Homo sapien
caagaagaatggctggctgaatcag

SEQ ID NO: 2501107 - DNA, 25 bp, Homo sapien
tgcaacgttcatctcttcacggtac

SEQ ID NO: 2501108 - DNA, 25 bp, Homo sapien
gctaaatagtctctcaaataacagg

SEQ ID NO: 2501109 - DNA, 25 bp, Homo sapien
tagtacctactgtaaagcctgttga

SEQ ID NO: 2501110 - DNA, 25 bp, Homo sapien
ttgacatgctggtaattaggctaaa

SEQ ID NO: 2501111 - DNA, 25 bp, Homo sapien
gcttctgtgagtgagtcttgcctca

SEQ ID NO: 2501112 - DNA, 25 bp, Homo sapien
taagcccttggctgtaggtgaactg

SEQ ID NO: 2501113 - DNA, 25 bp, Homo sapien
gactttagagtcttgttgctgccag

SEQ ID NO: 2501114 - DNA, 25 bp, Homo sapien
tctgacaatgtatgctataagccct

SEQ ID NO: 2501115 - DNA, 25 bp, Homo sapien
tgctgccagtgtctataaacacatg

SEQ ID NO: 2501116 - DNA, 25 bp, Homo sapien
ttggagacaatttcttggttaataa

SEQ ID NO: 2501117 - DNA, 25 bp, Homo sapien
tcttggttaataacttgtgtataca

SEQ ID NO: 2501118 - DNA, 25 bp, Homo sapien
tggttaataacttgtgtatacacat

SEQ ID NO: 2501119 - DNA, 25 bp, Homo sapien
agacaatttcttggttaataacttg

SEQ ID NO: 2501120 - DNA, 25 bp, Homo sapien
gctgtaccacagattgaggttccca

SEQ ID NO: 2501121 - DNA, 25 bp, Homo sapien
gagttgctaaactgactttatccag

SEQ ID NO: 2501122 - DNA, 25 bp, Homo sapien
tatccagttctttgacactaatttc

SEQ ID NO: 2501123 - DNA, 25 bp, Homo sapien
taatttcaatctttgctgtaccaca

SEQ ID NO: 2501124 - DNA, 25 bp, Homo sapien
ctgcccaggtatcttagcttgctat

SEQ ID NO: 2501125 - DNA, 25 bp, Homo sapien
tgatctcatcgaaaggcactggcag

SEQ ID NO: 2501126 - DNA, 25 bp, Homo sapien
gcactggcagattaaaccatttttg

SEQ ID NO: 2501127 - DNA, 25 bp, Homo sapien
gcttgctattgatctcatcgaaagg

SEQ ID NO: 2501128 - DNA, 25 bp, Homo sapien
tcaatgagtatttcggcatttaagt

SEQ ID NO: 2501129 - DNA, 25 bp, Homo sapien
ctgtccttcagaatgaaagtttctc

SEQ ID NO: 2501130 - DNA, 25 bp, Homo sapien
tctttttcactcctggctacctctt

SEQ ID NO: 2501131 - DNA, 25 bp, Homo sapien
tctcccccataggaaactcttctca

SEQ ID NO: 2501132 - DNA, 25 bp, Homo sapien
tccttcagaatgaaagtttctcccc

SEQ ID NO: 2501133 - DNA, 25 bp, Homo sapien
gctagtggcaatgtacttctttaca

SEQ ID NO: 2501134 - DNA, 25 bp, Homo sapien
tacttctttacatcctgtacttcct

SEQ ID NO: 2501135 - DNA, 25 bp, Homo sapien
gtgggctagtggcaatgtacttctt

SEQ ID NO: 2501136 - DNA, 25 bp, Homo sapien
catcctgtacttcctcatcatgtga

SEQ ID NO: 2501137 - DNA, 25 bp, Homo sapien
tattgtacatttctgcagaatcttc

SEQ ID NO: 2501138 - DNA, 25 bp, Homo sapien
gcttattgtacatttctgcagaatc

SEQ ID NO: 2501139 - DNA, 25 bp, Homo sapien
cttattgtacatttctgcagaatct

SEQ ID NO: 2501140 - DNA, 25 bp, Homo sapien
tgcttattgtacatttctgcagaat

SEQ ID NO: 2501141 - DNA, 25 bp, Homo sapien
tatttgagaaatatcaagtggttga

SEQ ID NO: 2501142 - DNA, 25 bp, Homo sapien
tcaagtggttgaattagactggatc

SEQ ID NO: 2501143 - DNA, 25 bp, Homo sapien
ggatcgcaaggtttgtgtatcaaaa

SEQ ID NO: 2501144 - DNA, 25 bp, Homo sapien
tagactggatcgcaaggtttgtgta

SEQ ID NO: 2501145 - DNA, 25 bp, Homo sapien
tcaaggcataggtgacttttactct

SEQ ID NO: 2501146 - DNA, 25 bp, Homo sapien
ttttcaaggcataggtgacttttac

SEQ ID NO: 2501147 - DNA, 25 bp, Homo sapien
attttcaaggcataggtgactttta

SEQ ID NO: 2501148 - DNA, 25 bp, Homo sapien
ttcaaggcataggtgacttttactc

SEQ ID NO: 2501149 - DNA, 25 bp, Homo sapien
tgtactttaaactatcagcatgatg

SEQ ID NO: 2501150 - DNA, 25 bp, Homo sapien
gtactttaaactatcagcatgatga

SEQ ID NO: 2501151 - DNA, 25 bp, Homo sapien
tactttaaactatcagcatgatgaa

SEQ ID NO: 2501152 - DNA, 25 bp, Homo sapien
actgtactttaaactatcagcatga

SEQ ID NO: 2501153 - DNA, 25 bp, Homo sapien
gcccagcctcacagtcgctttcttg

SEQ ID NO: 2501154 - DNA, 25 bp, Homo sapien
tggcacaaacttggatctcggctca

SEQ ID NO: 2501155 - DNA, 25 bp, Homo sapien
atggcacaaacttggatctcggctc

SEQ ID NO: 2501156 - DNA, 25 bp, Homo sapien
cacagtcgctttcttgacaggctat

SEQ ID NO: 2501157 - DNA, 25 bp, Homo sapien
gaaaaatgtctattcgtgaccttcg

SEQ ID NO: 2501158 - DNA, 25 bp, Homo sapien
tccatagaagtactagtttatattc

SEQ ID NO: 2501159 - DNA, 25 bp, Homo sapien
tattcgtgaccttcgcccactttat

SEQ ID NO: 2501160 - DNA, 25 bp, Homo sapien
gtgaccttcgcccactttataatgg

SEQ ID NO: 2501161 - DNA, 25 bp, Homo sapien
taggatacattgttagctgctgaac

SEQ ID NO: 2501162 - DNA, 25 bp, Homo sapien
gaactctgaatccaatacgatgctg

SEQ ID NO: 2501163 - DNA, 25 bp, Homo sapien
cacctttttgaggatatggcccatc

SEQ ID NO: 2501164 - DNA, 25 bp, Homo sapien
gctgagctgatccaaacctgggtat

SEQ ID NO: 2501165 - DNA, 25 bp, Homo sapien
caatctccgtttcataagaaagtaa

SEQ ID NO: 2501166 - DNA, 25 bp, Homo sapien
tgaattgacaatctccgtttcataa

SEQ ID NO: 2501167 - DNA, 25 bp, Homo sapien
ttgacaatctccgtttcataagaaa

SEQ ID NO: 2501168 - DNA, 25 bp, Homo sapien
gaattgacaatctccgtttcataag

SEQ ID NO: 2501169 - DNA, 25 bp, Homo sapien
gcagaaaatggctgctatttcctga

SEQ ID NO: 2501170 - DNA, 25 bp, Homo sapien
ggctgagcacgttcagggcatgcct

SEQ ID NO: 2501171 - DNA, 25 bp, Homo sapien
gggcatgcctctgcaaggtttagca

SEQ ID NO: 2501172 - DNA, 25 bp, Homo sapien
cagcaatgcacgtgatcatgcaggg

SEQ ID NO: 2501173 - DNA, 25 bp, Homo sapien
gaaggaccataatctagagtgacct

SEQ ID NO: 2501174 - DNA, 25 bp, Homo sapien
accataatctagagtgaccttgtcc

SEQ ID NO: 2501175 - DNA, 25 bp, Homo sapien
ggaccataatctagagtgaccttgt

SEQ ID NO: 2501176 - DNA, 25 bp, Homo sapien
tggaaggaccataatctagagtgac

SEQ ID NO: 2501177 - DNA, 25 bp, Homo sapien
taaaagcttgacaaatgacaaccgt

SEQ ID NO: 2501178 - DNA, 25 bp, Homo sapien
aatgacaaccgtgggaacaaaatct

SEQ ID NO: 2501179 - DNA, 25 bp, Homo sapien
tctttaaaaccatggacggattggc

SEQ ID NO: 2501180 - DNA, 25 bp, Homo sapien
aaaccatggacggattggctgaaca

SEQ ID NO: 2501181 - DNA, 25 bp, Homo sapien
tgcccaatggcagtagctctttcca

SEQ ID NO: 2501182 - DNA, 25 bp, Homo sapien
cgcgtagttttataactagaggcct

SEQ ID NO: 2501183 - DNA, 25 bp, Homo sapien
gaggcctgacgtctctgcccaatgg

SEQ ID NO: 2501184 - DNA, 25 bp, Homo sapien
ctgggtctaatgagtaaacgcgtag

SEQ ID NO: 2501185 - DNA, 25 bp, Homo sapien
aggccatttgcctttattctgtggg

SEQ ID NO: 2501186 - DNA, 25 bp, Homo sapien
cagccagggagttctacatgcacca

SEQ ID NO: 2501187 - DNA, 25 bp, Homo sapien
caatattcctccggttaggtttctg

SEQ ID NO: 2501188 - DNA, 25 bp, Homo sapien
ccagggagttctacatgcaccagga

SEQ ID NO: 2501189 - DNA, 25 bp, Homo sapien
agttctacatgcaccaggagttttg

SEQ ID NO: 2501190 - DNA, 25 bp, Homo sapien
tgtcttttctgatgcccctgagctt

SEQ ID NO: 2501191 - DNA, 25 bp, Homo sapien
ctttgaaggataatctctgtgaatc

SEQ ID NO: 2501192 - DNA, 25 bp, Homo sapien
tcttttctgatgcccctgagctttt

SEQ ID NO: 2501193 - DNA, 25 bp, Homo sapien
gtcttttctgatgcccctgagcttt

SEQ ID NO: 2501194 - DNA, 25 bp, Homo sapien
cactggattatgaggttgtcttatg

SEQ ID NO: 2501195 - DNA, 25 bp, Homo sapien
catgcttatcactctcttaaggacc

SEQ ID NO: 2501196 - DNA, 25 bp, Homo sapien
cttatggtgtcagtaggctgtgtac

SEQ ID NO: 2501197 - DNA, 25 bp, Homo sapien
gatcactgaaaataggtcctccatc

SEQ ID NO: 2501198 - DNA, 25 bp, Homo sapien
gattcatacgttggttcttcagctt

SEQ ID NO: 2501199 - DNA, 25 bp, Homo sapien
caactgctggaccacagattcatac

SEQ ID NO: 2501200 - DNA, 25 bp, Homo sapien
acaaatcgggcttgtgatctgtctc

SEQ ID NO: 2501201 - DNA, 25 bp, Homo sapien
tggccagtgctcacaaatcgggctt

SEQ ID NO: 2501202 - DNA, 25 bp, Homo sapien
cagggccagcggtttgcaatctgct

SEQ ID NO: 2501203 - DNA, 25 bp, Homo sapien
tggggtgaccgctgaacctgacact

SEQ ID NO: 2501204 - DNA, 25 bp, Homo sapien
cctgcaccttagaaggaggctttgc

SEQ ID NO: 2501205 - DNA, 25 bp, Homo sapien
gctttgcgtggtgccgccctgcatt

SEQ ID NO: 2501206 - DNA, 25 bp, Homo sapien
aggagggcccgcgagccaggccagg

SEQ ID NO: 2501207 - DNA, 25 bp, Homo sapien
caggccaggggtaggccagggccgc

SEQ ID NO: 2501208 - DNA, 25 bp, Homo sapien
cgagccaggccaggggtaggccagg

SEQ ID NO: 2501209 - DNA, 25 bp, Homo sapien
ggcccgcgagccaggccaggggtag

SEQ ID NO: 2501210 - DNA, 25 bp, Homo sapien
ttaaagcggtcagacttgataaaca

SEQ ID NO: 2501211 - DNA, 25 bp, Homo sapien
gtcattaaagcggtcagacttgata

SEQ ID NO: 2501212 - DNA, 25 bp, Homo sapien
aaggtcattaaagcggtcagacttg

SEQ ID NO: 2501213 - DNA, 25 bp, Homo sapien
cttaaggtcattaaagcggtcagac

SEQ ID NO: 2501214 - DNA, 25 bp, Homo sapien
tcgaatcattaagggataagcttgt

SEQ ID NO: 2501215 - DNA, 25 bp, Homo sapien
ggttcttcaaagatccacctacttc

SEQ ID NO: 2501216 - DNA, 25 bp, Homo sapien
cacctacttctcgaatcattaaggg

SEQ ID NO: 2501217 - DNA, 25 bp, Homo sapien
aaagatccacctacttctcgaatca

SEQ ID NO: 2501218 - DNA, 25 bp, Homo sapien
ctagaataacagttcaaagctcctt

SEQ ID NO: 2501219 - DNA, 25 bp, Homo sapien
gaataacagttcaaagctcctttcc

SEQ ID NO: 2501220 - DNA, 25 bp, Homo sapien
tcaagtttccgtgtggaataattta

SEQ ID NO: 2501221 - DNA, 25 bp, Homo sapien
gtggaataatttactagaataacag

SEQ ID NO: 2501222 - DNA, 25 bp, Homo sapien
tggtcatggataatatgattaaagg

SEQ ID NO: 2501223 - DNA, 25 bp, Homo sapien
ggtcatggataatatgattaaagga

SEQ ID NO: 2501224 - DNA, 25 bp, Homo sapien
ctggtcatggataatatgattaaag

SEQ ID NO: 2501225 - DNA, 25 bp, Homo sapien
tgagcatcccgggaagttggagcat

SEQ ID NO: 2501226 - DNA, 25 bp, Homo sapien
caagtgcttcaagaatcccaggagc

SEQ ID NO: 2501227 - DNA, 25 bp, Homo sapien
ccaattttgcatgatgtagtaggat

SEQ ID NO: 2501228 - DNA, 25 bp, Homo sapien
tttatattgctctccaaggcactgg

SEQ ID NO: 2501229 - DNA, 25 bp, Homo sapien
cagaatggagccttaaaacttcttg

SEQ ID NO: 2501230 - DNA, 25 bp, Homo sapien
cttcatgagcagctagatcacagaa

SEQ ID NO: 2501231 - DNA, 25 bp, Homo sapien
agcttgacagtgtcacctaaatata

SEQ ID NO: 2501232 - DNA, 25 bp, Homo sapien
gagaagtatccctgtgtttgtccag

SEQ ID NO: 2501233 - DNA, 25 bp, Homo sapien
agatgcactgcaggttccttcaaca

SEQ ID NO: 2501234 - DNA, 25 bp, Homo sapien
tcctgacaaagctgagttaagactg

SEQ ID NO: 2501235 - DNA, 25 bp, Homo sapien
taagactgctgaactcaacatgcca

SEQ ID NO: 2501236 - DNA, 25 bp, Homo sapien
ccttcaacatttgaccacagaacca

SEQ ID NO: 2501237 - DNA, 25 bp, Homo sapien
catgttatcactgtagaagtgtgtt

SEQ ID NO: 2501238 - DNA, 25 bp, Homo sapien
tagaagtgtgtttggaacggagaca

SEQ ID NO: 2501239 - DNA, 25 bp, Homo sapien
ctggccctccagtttgaaatcaaac

SEQ ID NO: 2501240 - DNA, 25 bp, Homo sapien
agaaactggccctccagtttgaaat

SEQ ID NO: 2501241 - DNA, 25 bp, Homo sapien
ctttgtccactgaaagggctgaaag

SEQ ID NO: 2501242 - DNA, 25 bp, Homo sapien
tcagaacttggccttatataccaat

SEQ ID NO: 2501243 - DNA, 25 bp, Homo sapien
tagtaagcacacctcagaacttggc

SEQ ID NO: 2501244 - DNA, 25 bp, Homo sapien
ggctgaaagttagtaagcacacctc

SEQ ID NO: 2501245 - DNA, 25 bp, Homo sapien
ttgtctgtgaattccgtgaaacaag

SEQ ID NO: 2501246 - DNA, 25 bp, Homo sapien
ttccgtgaaacaagaagctatgcgc

SEQ ID NO: 2501247 - DNA, 25 bp, Homo sapien
gaagctatgcgcacccttgggtcat

SEQ ID NO: 2501248 - DNA, 25 bp, Homo sapien
tatgcgcacccttgggtcataatga

SEQ ID NO: 2501249 - DNA, 25 bp, Homo sapien
ttaaacttgaaaaggatgcaactga

SEQ ID NO: 2501250 - DNA, 25 bp, Homo sapien
taaacttgaaaaggatgcaactgaa

SEQ ID NO: 2501251 - DNA, 25 bp, Homo sapien
taagtcatcagcataacacttgacc

SEQ ID NO: 2501252 - DNA, 25 bp, Homo sapien
agtcatcagcataacacttgaccat

SEQ ID NO: 2501253 - DNA, 25 bp, Homo sapien
aagtcatcagcataacacttgacca

SEQ ID NO: 2501254 - DNA, 25 bp, Homo sapien
cctgtttctcagcaaccgctgatga

SEQ ID NO: 2501255 - DNA, 25 bp, Homo sapien
tgagccctgtttctcagcaaccgct

SEQ ID NO: 2501256 - DNA, 25 bp, Homo sapien
tcagcaaccgctgatgaactatcct

SEQ ID NO: 2501257 - DNA, 25 bp, Homo sapien
ccgctgatgaactatcctctgtgct

SEQ ID NO: 2501258 - DNA, 25 bp, Homo sapien
cactgagccgcgaatcatctgcatt

SEQ ID NO: 2501259 - DNA, 25 bp, Homo sapien
tggactctggcgtggtccacactga

SEQ ID NO: 2501260 - DNA, 25 bp, Homo sapien
cattggccattggactctggcgtgg

SEQ ID NO: 2501261 - DNA, 25 bp, Homo sapien
tgccattggacgtcatacgccatca

SEQ ID NO: 2501262 - DNA, 25 bp, Homo sapien
gatcaagttgcttgtcttggcatga

SEQ ID NO: 2501263 - DNA, 25 bp, Homo sapien
tgatcaagttgcttgtcttggcatg

SEQ ID NO: 2501264 - DNA, 25 bp, Homo sapien
tcaagttgcttgtcttggcatgaat

SEQ ID NO: 2501265 - DNA, 25 bp, Homo sapien
tttgatcaagttgcttgtcttggca

SEQ ID NO: 2501266 - DNA, 25 bp, Homo sapien
caaaatgatggctatccatgaagca

SEQ ID NO: 2501267 - DNA, 25 bp, Homo sapien
gactctagagaacttgttattccct

SEQ ID NO: 2501268 - DNA, 25 bp, Homo sapien
taattaggtcatgggagtagagacc

SEQ ID NO: 2501269 - DNA, 25 bp, Homo sapien
taagacaactagtacaccatgcagg

SEQ ID NO: 2501270 - DNA, 25 bp, Homo sapien
cattgcaactcttgtgccagaatat

SEQ ID NO: 2501271 - DNA, 25 bp, Homo sapien
aggactccctaagcatgcgttccca

SEQ ID NO: 2501272 - DNA, 25 bp, Homo sapien
gactccctaagcatgcgttcccatt

SEQ ID NO: 2501273 - DNA, 25 bp, Homo sapien
gcgttcccattgcaactcttgtgcc

SEQ ID NO: 2501274 - DNA, 25 bp, Homo sapien
caatggctgaagaagcattggcagc

SEQ ID NO: 2501275 - DNA, 25 bp, Homo sapien
cattctcttatacccaatggctgaa

SEQ ID NO: 2501276 - DNA, 25 bp, Homo sapien
gtaagttgccattctcttataccca

SEQ ID NO: 2501277 - DNA, 25 bp, Homo sapien
aagaagcattggcagcaggaacagg

SEQ ID NO: 2501278 - DNA, 25 bp, Homo sapien
gccaaatgaatcctgtatacatcag

SEQ ID NO: 2501279 - DNA, 25 bp, Homo sapien
ggcttcagtaccaagacatccataa

SEQ ID NO: 2501280 - DNA, 25 bp, Homo sapien
tttgactgtttaccgctgcctgata

SEQ ID NO: 2501281 - DNA, 25 bp, Homo sapien
aaatgcgtggttcagcttcattgtg

SEQ ID NO: 2501282 - DNA, 25 bp, Homo sapien
cataactaaagaatggttctttaca

SEQ ID NO: 2501283 - DNA, 25 bp, Homo sapien
aattcaacaattgctttagctttcc

SEQ ID NO: 2501284 - DNA, 25 bp, Homo sapien
ctttggagtaatggagtaattcagc

SEQ ID NO: 2501285 - DNA, 25 bp, Homo sapien
tggagtaatggagtaattcagcaaa

SEQ ID NO: 2501286 - DNA, 25 bp, Homo sapien
cattcaaacgctaactcctttccaa

SEQ ID NO: 2501287 - DNA, 25 bp, Homo sapien
caaaacctcttggatgtttctgctc

SEQ ID NO: 2501288 - DNA, 25 bp, Homo sapien
tttgcaagagccattcaaacgctaa

SEQ ID NO: 2501289 - DNA, 25 bp, Homo sapien
ccaaaacctcttggatgtttctgct

SEQ ID NO: 2501290 - DNA, 25 bp, Homo sapien
gttttacacagagaatcacctgcag

SEQ ID NO: 2501291 - DNA, 25 bp, Homo sapien
cacctgcagcagattcggaattgaa

SEQ ID NO: 2501292 - DNA, 25 bp, Homo sapien
gcatgtgcccattaaatgactcaga

SEQ ID NO: 2501293 - DNA, 25 bp, Homo sapien
tgcctgctaaggaagaagctgcctc

SEQ ID NO: 2501294 - DNA, 25 bp, Homo sapien
gcaaactgagattaggcattgttcc

SEQ ID NO: 2501295 - DNA, 25 bp, Homo sapien
aaactgagattaggcattgttccac

SEQ ID NO: 2501296 - DNA, 25 bp, Homo sapien
ttattcactatgtagtatctttgca

SEQ ID NO: 2501297 - DNA, 25 bp, Homo sapien
tcactatgtagtatctttgcaaact

SEQ ID NO: 2501298 - DNA, 25 bp, Homo sapien
tgatttttcccactcggattttggc

SEQ ID NO: 2501299 - DNA, 25 bp, Homo sapien
tttggcaagctatccagtgtggtgc

SEQ ID NO: 2501300 - DNA, 25 bp, Homo sapien
tcccactcggattttggcaagctat

SEQ ID NO: 2501301 - DNA, 25 bp, Homo sapien
tcggattttggcaagctatccagtg

SEQ ID NO: 2501302 - DNA, 25 bp, Homo sapien
gcctggttctttttcctgtgtgctc

SEQ ID NO: 2501303 - DNA, 25 bp, Homo sapien
tctttttcctgtgtgctcttaatgg

SEQ ID NO: 2501304 - DNA, 25 bp, Homo sapien
tcctgtgtgctcttaatggcatttg

SEQ ID NO: 2501305 - DNA, 25 bp, Homo sapien
tttcctgtgtgctcttaatggcatt

SEQ ID NO: 2501306 - DNA, 25 bp, Homo sapien
tagcagagaatgatcctcgaggaat

SEQ ID NO: 2501307 - DNA, 25 bp, Homo sapien
ttctacatgtgtctgtgtccgctaa

SEQ ID NO: 2501308 - DNA, 25 bp, Homo sapien
tgtccgctaatacgttgccaactgc

SEQ ID NO: 2501309 - DNA, 25 bp, Homo sapien
ctcttctttgaaagggttggcttca

SEQ ID NO: 2501310 - DNA, 25 bp, Homo sapien
tgttgtacaccttagatgtatactt

SEQ ID NO: 2501311 - DNA, 25 bp, Homo sapien
agaagaatggtgctatttggcaata

SEQ ID NO: 2501312 - DNA, 25 bp, Homo sapien
ttggcaatacattattgtgttacgg

SEQ ID NO: 2501313 - DNA, 25 bp, Homo sapien
tattaaagattagggtaccatataa

SEQ ID NO: 2501314 - DNA, 25 bp, Homo sapien
ctatagcagagcgagaatactggct

SEQ ID NO: 2501315 - DNA, 25 bp, Homo sapien
gaaagacaatccagttcaggtgata

SEQ ID NO: 2501316 - DNA, 25 bp, Homo sapien
ccttagactctgaagcggtggtaac

SEQ ID NO: 2501317 - DNA, 25 bp, Homo sapien
gcaagcagtcaattgtacacatggt

SEQ ID NO: 2501318 - DNA, 25 bp, Homo sapien
tgagaggcacccacttacagaactg

SEQ ID NO: 2501319 - DNA, 25 bp, Homo sapien
tgtgacactggaagttaccctgaag

SEQ ID NO: 2501320 - DNA, 25 bp, Homo sapien
taggattaaagatcacagccacgga

SEQ ID NO: 2501321 - DNA, 25 bp, Homo sapien
gcctaagaaggtgtcaatgctacca

SEQ ID NO: 2501322 - DNA, 25 bp, Homo sapien
gatggcatctcgctcggtatttttc

SEQ ID NO: 2501323 - DNA, 25 bp, Homo sapien
tggcatatctggcataatatctgcc

SEQ ID NO: 2501324 - DNA, 25 bp, Homo sapien
tattccataccgtccattgggagca

SEQ ID NO: 2501325 - DNA, 25 bp, Homo sapien
tgaatgaggcttgtatcatcgccct

SEQ ID NO: 2501326 - DNA, 25 bp, Homo sapien
gagacacaaacaaccagtccccatg

SEQ ID NO: 2501327 - DNA, 25 bp, Homo sapien
gagtattgcaaagacaaccagagag

SEQ ID NO: 2501328 - DNA, 25 bp, Homo sapien
tatcatctataaggttgaagcgacg

SEQ ID NO: 2501329 - DNA, 25 bp, Homo sapien
agtccccatgttggatagctcagaa

SEQ ID NO: 2501330 - DNA, 25 bp, Homo sapien
caatgataatagcattagaggagaa

SEQ ID NO: 2501331 - DNA, 25 bp, Homo sapien
taatcccatattcacaacactagct

SEQ ID NO: 2501332 - DNA, 25 bp, Homo sapien
gttatagccaggaggacttaatccc

SEQ ID NO: 2501333 - DNA, 25 bp, Homo sapien
tagtagtaatatctgctgggagcaa

SEQ ID NO: 2501334 - DNA, 25 bp, Homo sapien
tataatataatacccacctttgagg

SEQ ID NO: 2501335 - DNA, 25 bp, Homo sapien
taagaattctacacctgccctttag

SEQ ID NO: 2501336 - DNA, 25 bp, Homo sapien
tagtaaagcttagagaaacctggcc

SEQ ID NO: 2501337 - DNA, 25 bp, Homo sapien
tggtacaaaatcgacagatgcatct

SEQ ID NO: 2501338 - DNA, 25 bp, Homo sapien
tttccagagcgttgcacaaatatca

SEQ ID NO: 2501339 - DNA, 25 bp, Homo sapien
aagcatacagcaatattctccaaaa

SEQ ID NO: 2501340 - DNA, 25 bp, Homo sapien
aattagcagaggcagtgtagcagaa

SEQ ID NO: 2501341 - DNA, 25 bp, Homo sapien
atatcaggccaatacaaaatgccag

SEQ ID NO: 2501342 - DNA, 25 bp, Homo sapien
caaggcctagattgaccagcatgag

SEQ ID NO: 2501343 - DNA, 25 bp, Homo sapien
tgaaagtgtccacaataggcgtgac

SEQ ID NO: 2501344 - DNA, 25 bp, Homo sapien
ttccaaacatactgccaaggcctag

SEQ ID NO: 2501345 - DNA, 25 bp, Homo sapien
caataaaagctaagccggtcccctg

SEQ ID NO: 2501346 - DNA, 25 bp, Homo sapien
acagttgaaaggttgatatgatggg

SEQ ID NO: 2501347 - DNA, 25 bp, Homo sapien
aatatcctgactaatgttccccatt

SEQ ID NO: 2501348 - DNA, 25 bp, Homo sapien
taaatgataatcttctgcagtaaca

SEQ ID NO: 2501349 - DNA, 25 bp, Homo sapien
ctttcactttttgaatgatgtcata

SEQ ID NO: 2501350 - DNA, 25 bp, Homo sapien
caaagaacacttgagtagcagcttc

SEQ ID NO: 2501351 - DNA, 25 bp, Homo sapien
tgtctctcttgttgtagcttgaaaa

SEQ ID NO: 2501352 - DNA, 25 bp, Homo sapien
tgttgccaggacagaagtgaaaaaa

SEQ ID NO: 2501353 - DNA, 25 bp, Homo sapien
accaatgttgccaggacagaagtga

SEQ ID NO: 2501354 - DNA, 25 bp, Homo sapien
caatgatatttatgcatccaaagtt

SEQ ID NO: 2501355 - DNA, 25 bp, Homo sapien
tagcaaaacaggtcaattaccaata

SEQ ID NO: 2501356 - DNA, 25 bp, Homo sapien
aagttgatcagtcctttacatggag

SEQ ID NO: 2501357 - DNA, 25 bp, Homo sapien
aagttaatagttgcttcactaacac

SEQ ID NO: 2501358 - DNA, 25 bp, Homo sapien
gggtaaacatgtggcgaatgccatc

SEQ ID NO: 2501359 - DNA, 25 bp, Homo sapien
aataagtaccacatatggaaacaga

SEQ ID NO: 2501360 - DNA, 25 bp, Homo sapien
ggcgaatgccatcaattgaaccatt

SEQ ID NO: 2501361 - DNA, 25 bp, Homo sapien
aaaaggaatgctctgatgaggaagc

SEQ ID NO: 2501362 - DNA, 25 bp, Homo sapien
tccagaacccaaacaatcaaacgtg

SEQ ID NO: 2501363 - DNA, 25 bp, Homo sapien
ctgtatcttccagaacccaaacaat

SEQ ID NO: 2501364 - DNA, 25 bp, Homo sapien
caatcaaacgtgtaaagattttact

SEQ ID NO: 2501365 - DNA, 25 bp, Homo sapien
ttactttccgcttcagcaattttca

SEQ ID NO: 2501366 - DNA, 25 bp, Homo sapien
gatgctgagctctctaccattgagg

SEQ ID NO: 2501367 - DNA, 25 bp, Homo sapien
tctgtagcccagttttagccctgtc

SEQ ID NO: 2501368 - DNA, 25 bp, Homo sapien
tgttttgaccaagcacatcaccagc

SEQ ID NO: 2501369 - DNA, 25 bp, Homo sapien
gatatgtgcctacctagcccaaagg

SEQ ID NO: 2501370 - DNA, 25 bp, Homo sapien
gacttctgccctaaaagagttgact

SEQ ID NO: 2501371 - DNA, 25 bp, Homo sapien
tccttagaacacctacagcagagag

SEQ ID NO: 2501372 - DNA, 25 bp, Homo sapien
aatgtgacgggaatgtggctctgac

SEQ ID NO: 2501373 - DNA, 25 bp, Homo sapien
tagcaattactttcctagagcgtcc

SEQ ID NO: 2501374 - DNA, 25 bp, Homo sapien
atctgtaacagaatttgagagaggg

SEQ ID NO: 2501375 - DNA, 25 bp, Homo sapien
tgtaacagaatttgagagagggatg

SEQ ID NO: 2501376 - DNA, 25 bp, Homo sapien
gtgatttgcccacagaaatctgtaa

SEQ ID NO: 2501377 - DNA, 25 bp, Homo sapien
agagagggatgaatccagaaatggt

SEQ ID NO: 2501378 - DNA, 25 bp, Homo sapien
cctgtaccagtaataggtggtggca

SEQ ID NO: 2501379 - DNA, 25 bp, Homo sapien
actgaatgcctttgatcatagccaa

SEQ ID NO: 2501380 - DNA, 25 bp, Homo sapien
gccaagcaaaccatgacccaggcag

SEQ ID NO: 2501381 - DNA, 25 bp, Homo sapien
tggtggcagaactttgttcacattc

SEQ ID NO: 2501382 - DNA, 25 bp, Homo sapien
aaaggacactgatcccaaggcaggg

SEQ ID NO: 2501383 - DNA, 25 bp, Homo sapien
ataaaacaaactccagccaatgatg

SEQ ID NO: 2501384 - DNA, 25 bp, Homo sapien
actccagccaatgatgacgttgtag

SEQ ID NO: 2501385 - DNA, 25 bp, Homo sapien
tagtagagagctacaaaatagcaca

SEQ ID NO: 2501386 - DNA, 25 bp, Homo sapien
aattccatacaccaatgctgcctcg

SEQ ID NO: 2501387 - DNA, 25 bp, Homo sapien
tttgacccacagagagttccaagaa

SEQ ID NO: 2501388 - DNA, 25 bp, Homo sapien
tgctgcctcgccgaattctttgacc

SEQ ID NO: 2501389 - DNA, 25 bp, Homo sapien
tgcaaatccaatcccgcccagttta

SEQ ID NO: 2501390 - DNA, 25 bp, Homo sapien
tcatcagctgcgtcttcattggaaa

SEQ ID NO: 2501391 - DNA, 25 bp, Homo sapien
tcctggccatcaacaattagttcac

SEQ ID NO: 2501392 - DNA, 25 bp, Homo sapien
tgtagtttactgttccaagctggtc

SEQ ID NO: 2501393 - DNA, 25 bp, Homo sapien
gacataggtatggaaatcgccacac

SEQ ID NO: 2501394 - DNA, 25 bp, Homo sapien
gataggaagtaaagaccgaggatga

SEQ ID NO: 2501395 - DNA, 25 bp, Homo sapien
cgtatgtccagtattctgtaggtac

SEQ ID NO: 2501396 - DNA, 25 bp, Homo sapien
tcccttatggcaaatgtgttaactc

SEQ ID NO: 2501397 - DNA, 25 bp, Homo sapien
taaagccttatggattctgaatccg

SEQ ID NO: 2501398 - DNA, 25 bp, Homo sapien
cttagcaaaaaggccgagaagcgat

SEQ ID NO: 2501399 - DNA, 25 bp, Homo sapien
atcttagcaaaaaggccgagaagcg

SEQ ID NO: 2501400 - DNA, 25 bp, Homo sapien
gatcttagcaaaaaggccgagaagc

SEQ ID NO: 2501401 - DNA, 25 bp, Homo sapien
tcttagcaaaaaggccgagaagcga

SEQ ID NO: 2501402 - DNA, 25 bp, Homo sapien
ataatttagaagccagatcaatttc

SEQ ID NO: 2501403 - DNA, 25 bp, Homo sapien
acccactgaacataagaattgactt

SEQ ID NO: 2501404 - DNA, 25 bp, Homo sapien
tgcacccactgaacataagaattga

SEQ ID NO: 2501405 - DNA, 25 bp, Homo sapien
tttcatacagccaaaagtaaataga

SEQ ID NO: 2501406 - DNA, 25 bp, Homo sapien
agtgatagagtactgatctcctaga

SEQ ID NO: 2501407 - DNA, 25 bp, Homo sapien
gatcactgggtaaggtagtaactat

SEQ ID NO: 2501408 - DNA, 25 bp, Homo sapien
tacaatttcaactatgatcactggg

SEQ ID NO: 2501409 - DNA, 25 bp, Homo sapien
acaaggaaggcatctcatctgatta

SEQ ID NO: 2501410 - DNA, 25 bp, Homo sapien
tgagagaaaaaaatacatactgttt

SEQ ID NO: 2501411 - DNA, 25 bp, Homo sapien
taagaacgtacaagtcaagcccagt

SEQ ID NO: 2501412 - DNA, 25 bp, Homo sapien
tactgggcgcctaagacataaatag

SEQ ID NO: 2501413 - DNA, 25 bp, Homo sapien
tacgtcttaagtagtgaaccgcaag

SEQ ID NO: 2501414 - DNA, 25 bp, Homo sapien
tatccagttggtgcgctacgttaga

SEQ ID NO: 2501415 - DNA, 25 bp, Homo sapien
tatcacaggatacctcaagcaaagg

SEQ ID NO: 2501416 - DNA, 25 bp, Homo sapien
caaattccaggatgcgcagaaacac

SEQ ID NO: 2501417 - DNA, 25 bp, Homo sapien
cttggcttggaaacgagtaggtctc

SEQ ID NO: 2501418 - DNA, 25 bp, Homo sapien
tgtggtcacgtgaaaacactctgtc

SEQ ID NO: 2501419 - DNA, 25 bp, Homo sapien
gatggcggcacgtttcaacccatgt

SEQ ID NO: 2501420 - DNA, 25 bp, Homo sapien
gatgcagagttagacggttgcccgc

SEQ ID NO: 2501421 - DNA, 25 bp, Homo sapien
catcaattcgttcccggtgctggtg

SEQ ID NO: 2501422 - DNA, 25 bp, Homo sapien
ttccacgacgggaagaaaggatggc

SEQ ID NO: 2501423 - DNA, 25 bp, Homo sapien
gcccttagcgtaggcgcttgccatt

SEQ ID NO: 2501424 - DNA, 25 bp, Homo sapien
acccccagttgtgcccttagcgtag

SEQ ID NO: 2501425 - DNA, 25 bp, Homo sapien
tgtgcccttagcgtaggcgcttgcc

SEQ ID NO: 2501426 - DNA, 25 bp, Homo sapien
cagttgtgcccttagcgtaggcgct

SEQ ID NO: 2501427 - DNA, 25 bp, Homo sapien
ttgaccaagcgcctcttgctgcttc

SEQ ID NO: 2501428 - DNA, 25 bp, Homo sapien
ttgctgcttccacgtccgggcagca

SEQ ID NO: 2501429 - DNA, 25 bp, Homo sapien
cgtcagtgtgtcttgaccaagcgcc

SEQ ID NO: 2501430 - DNA, 25 bp, Homo sapien
agcagtcgcgaaagggtagggtcca

SEQ ID NO: 2501431 - DNA, 25 bp, Homo sapien
ctgtgacggaggccgaagaggagct

SEQ ID NO: 2501432 - DNA, 25 bp, Homo sapien
agctgttggcagagaagcagcttct

SEQ ID NO: 2501433 - DNA, 25 bp, Homo sapien
cggaggccgaagaggagctgttggc

SEQ ID NO: 2501434 - DNA, 25 bp, Homo sapien
gctgttggcagagaagcagcttctt

SEQ ID NO: 2501435 - DNA, 25 bp, Homo sapien
ctcgtgagcgcctgtgtgtctgcca

SEQ ID NO: 2501436 - DNA, 25 bp, Homo sapien
gccagggaaacagcacgggatacag

SEQ ID NO: 2501437 - DNA, 25 bp, Homo sapien
tgcgcgtgtacatgcgtatgtgtgt

SEQ ID NO: 2501438 - DNA, 25 bp, Homo sapien
caaggagagactcgtgagcgcctgt

SEQ ID NO: 2501439 - DNA, 25 bp, Homo sapien
cagccgctgacttttgtctcagtga

SEQ ID NO: 2501440 - DNA, 25 bp, Homo sapien
agccgctgacttttgtctcagtgag

SEQ ID NO: 2501441 - DNA, 25 bp, Homo sapien
gacttttgtctcagtgagaataata

SEQ ID NO: 2501442 - DNA, 25 bp, Homo sapien
tgagcgagttcctcagaaccacgat

SEQ ID NO: 2501443 - DNA, 25 bp, Homo sapien
gaaccacgatgtctctgtcctcacg

SEQ ID NO: 2501444 - DNA, 25 bp, Homo sapien
tgtcctcacgcaggaacgtcttgga

SEQ ID NO: 2501445 - DNA, 25 bp, Homo sapien
tctttcttgattggcgtggacttct

SEQ ID NO: 2501446 - DNA, 25 bp, Homo sapien
tttttcccttccaggacataggcca

SEQ ID NO: 2501447 - DNA, 25 bp, Homo sapien
ttttcccttccaggacataggccat

SEQ ID NO: 2501448 - DNA, 25 bp, Homo sapien
cctgtcttcattggtgctggcactc

SEQ ID NO: 2501449 - DNA, 25 bp, Homo sapien
ataacatcgaaagtggcttaggtgc

SEQ ID NO: 2501450 - DNA, 25 bp, Homo sapien
ggtgcttctcctacaagaaatctgt

SEQ ID NO: 2501451 - DNA, 25 bp, Homo sapien
ccatcttgcagatctaccttctttg

SEQ ID NO: 2501452 - DNA, 25 bp, Homo sapien
cgaaagtggcttaggtgcttctcct

SEQ ID NO: 2501453 - DNA, 25 bp, Homo sapien
atctccataattaggcataagcagc

SEQ ID NO: 2501454 - DNA, 25 bp, Homo sapien
cacagcccagattgaggagacaaac

SEQ ID NO: 2501455 - DNA, 25 bp, Homo sapien
gtactggtgaccagcagtccacagc

SEQ ID NO: 2501456 - DNA, 25 bp, Homo sapien
aagcagcaggcaacttgtactggtg

SEQ ID NO: 2501457 - DNA, 25 bp, Homo sapien
tactgatccatgaaagaatggtttc

SEQ ID NO: 2501458 - DNA, 25 bp, Homo sapien
ccaaaatgattgacaactgttcaga

SEQ ID NO: 2501459 - DNA, 25 bp, Homo sapien
ttcttcaccaaaatgattgacaact

SEQ ID NO: 2501460 - DNA, 25 bp, Homo sapien
ttactgatccatgaaagaatggttt

SEQ ID NO: 2501461 - DNA, 25 bp, Homo sapien
gtgtagtatactttagcttcattct

SEQ ID NO: 2501462 - DNA, 25 bp, Homo sapien
tttcttttgtgtagtatactttagc

SEQ ID NO: 2501463 - DNA, 25 bp, Homo sapien
tctgaacttttcgattcactagttt

SEQ ID NO: 2501464 - DNA, 25 bp, Homo sapien
tcattctgaacttttcgattcacta

SEQ ID NO: 2501465 - DNA, 25 bp, Homo sapien
attgaaatccaaaggtcacatttct

SEQ ID NO: 2501466 - DNA, 25 bp, Homo sapien
aattgaaatccaaaggtcacatttc

SEQ ID NO: 2501467 - DNA, 25 bp, Homo sapien
gttttattatagtattcagtaattc

SEQ ID NO: 2501468 - DNA, 25 bp, Homo sapien
taccaagttcacgtacagaggagaa

SEQ ID NO: 2501469 - DNA, 25 bp, Homo sapien
tgagctacatgcctggacaaactgc

SEQ ID NO: 2501470 - DNA, 25 bp, Homo sapien
aggaatcacctgtacaactcttgga

SEQ ID NO: 2501471 - DNA, 25 bp, Homo sapien
gagtcttcaagaataacccacctgt

SEQ ID NO: 2501472 - DNA, 25 bp, Homo sapien
aacattataccatgcactgatttta

SEQ ID NO: 2501473 - DNA, 25 bp, Homo sapien
gaaagctttctacggcagcaggaca

SEQ ID NO: 2501474 - DNA, 25 bp, Homo sapien
gcatctgcatcatgaatacactgga

SEQ ID NO: 2501475 - DNA, 25 bp, Homo sapien
taattggcgaactggacttttagtc

SEQ ID NO: 2501476 - DNA, 25 bp, Homo sapien
gtatcccacacctgtaaatcgcagt

SEQ ID NO: 2501477 - DNA, 25 bp, Homo sapien
ctttccaatcttatgcaccaaggct

SEQ ID NO: 2501478 - DNA, 25 bp, Homo sapien
tcttttactcctggtgttttagctc

SEQ ID NO: 2501479 - DNA, 25 bp, Homo sapien
tggtgttttagctccctttccaatc

SEQ ID NO: 2501480 - DNA, 25 bp, Homo sapien
caccaaggctttgacagaagtgcct

SEQ ID NO: 2501481 - DNA, 25 bp, Homo sapien
cgtattatacactggaaatgacact

SEQ ID NO: 2501482 - DNA, 25 bp, Homo sapien
gactgatgatatcccaagttccaag

SEQ ID NO: 2501483 - DNA, 25 bp, Homo sapien
tggattaagaatgtagccaccgtca

SEQ ID NO: 2501484 - DNA, 25 bp, Homo sapien
tacgtgttcaacttagggaagtgga

SEQ ID NO: 2501485 - DNA, 25 bp, Homo sapien
agttgactttgtgcaagaacatggc

SEQ ID NO: 2501486 - DNA, 25 bp, Homo sapien
ctgtgtaattatgttggccacaaca

SEQ ID NO: 2501487 - DNA, 25 bp, Homo sapien
ctttatccagtctgtgtaattatgt

SEQ ID NO: 2501488 - DNA, 25 bp, Homo sapien
tttgtgcaagaacatggcacctgtc

SEQ ID NO: 2501489 - DNA, 25 bp, Homo sapien
ttttgtcatgccatagttgctgaac

SEQ ID NO: 2501490 - DNA, 25 bp, Homo sapien
tatcttcaggcttatctttagatcc

SEQ ID NO: 2501491 - DNA, 25 bp, Homo sapien
ttttctgtaaggcattcagaatagt

SEQ ID NO: 2501492 - DNA, 25 bp, Homo sapien
caaaatcaattttgtcatgccatag

SEQ ID NO: 2501493 - DNA, 25 bp, Homo sapien
aaagtacaacctgaacagcaaaggt

SEQ ID NO: 2501494 - DNA, 25 bp, Homo sapien
aggtccatgttatcaatactgcata

SEQ ID NO: 2501495 - DNA, 25 bp, Homo sapien
agcaaaggtccatgttatcaatact

SEQ ID NO: 2501496 - DNA, 25 bp, Homo sapien
tacaacctgaacagcaaaggtccat

SEQ ID NO: 2501497 - DNA, 25 bp, Homo sapien
attccagctacttcggaatctgagg

SEQ ID NO: 2501498 - DNA, 25 bp, Homo sapien
tgagccgagatcgtgccactgcact

SEQ ID NO: 2501499 - DNA, 25 bp, Homo sapien
tccgggaggtggaggttgcagtgag

SEQ ID NO: 2501500 - DNA, 25 bp, Homo sapien
caggagaatcgcttgaatccgggag

SEQ ID NO: 2501501 - DNA, 25 bp, Homo sapien
gaacagtagaagatcccattccaat

SEQ ID NO: 2501502 - DNA, 25 bp, Homo sapien
aggagccatctgatttcgttgtgaa

SEQ ID NO: 2501503 - DNA, 25 bp, Homo sapien
tcgttgtgaattcctatataaccca

SEQ ID NO: 2501504 - DNA, 25 bp, Homo sapien
tgagaaataggtactatgaagtgat

SEQ ID NO: 2501505 - DNA, 25 bp, Homo sapien
atttctatctaataagagccatgca

SEQ ID NO: 2501506 - DNA, 25 bp, Homo sapien
atcccatgaataaaagtccaagaac

SEQ ID NO: 2501507 - DNA, 25 bp, Homo sapien
ctatctaataagagccatgcaccaa

SEQ ID NO: 2501508 - DNA, 25 bp, Homo sapien
accaaatcccatgaataaaagtcca

SEQ ID NO: 2501509 - DNA, 25 bp, Homo sapien
ccattaatgagattaagaaagtact

SEQ ID NO: 2501510 - DNA, 25 bp, Homo sapien
attacttgagtacaagagttggagg

SEQ ID NO: 2501511 - DNA, 25 bp, Homo sapien
ttacttgagtacaagagttggaggc

SEQ ID NO: 2501512 - DNA, 25 bp, Homo sapien
gctgcgttcgtttcaatttagaatc

SEQ ID NO: 2501513 - DNA, 25 bp, Homo sapien
ctgtaaaaaaccgtaagctcctcat

SEQ ID NO: 2501514 - DNA, 25 bp, Homo sapien
aaaaaaccgtaagctcctcatccag

SEQ ID NO: 2501515 - DNA, 25 bp, Homo sapien
tccctgaaatgctgcgttcgtttca

SEQ ID NO: 2501516 - DNA, 25 bp, Homo sapien
cacccaactccccaattgctgcttt

SEQ ID NO: 2501517 - DNA, 25 bp, Homo sapien
aactccccaattgctgctttcctgg

SEQ ID NO: 2501518 - DNA, 25 bp, Homo sapien
ccaactccccaattgctgctttcct

SEQ ID NO: 2501519 - DNA, 25 bp, Homo sapien
acccaactccccaattgctgctttc

SEQ ID NO: 2501520 - DNA, 25 bp, Homo sapien
ccgctgtccttgagacaggattcat

SEQ ID NO: 2501521 - DNA, 25 bp, Homo sapien
tcttccgctgtccttgagacaggat

SEQ ID NO: 2501522 - DNA, 25 bp, Homo sapien
ctttcattttcttccgctgtccttg

SEQ ID NO: 2501523 - DNA, 25 bp, Homo sapien
cattttcttccgctgtccttgagac

SEQ ID NO: 2501524 - DNA, 25 bp, Homo sapien
atcatgaaattcctattttgacctg

SEQ ID NO: 2501525 - DNA, 25 bp, Homo sapien
tatacataccaggagagtcattcaa

SEQ ID NO: 2501526 - DNA, 25 bp, Homo sapien
acatatatatagaccttgacatttt

SEQ ID NO: 2501527 - DNA, 25 bp, Homo sapien
tctatatccagacacataatgttgg

SEQ ID NO: 2501528 - DNA, 25 bp, Homo sapien
cccttatttatagaggtagatgcta

SEQ ID NO: 2501529 - DNA, 25 bp, Homo sapien
gagctgttactctcccgagtctgga

SEQ ID NO: 2501530 - DNA, 25 bp, Homo sapien
taatagcatccagtgaactttagta

SEQ ID NO: 2501531 - DNA, 25 bp, Homo sapien
acttttggatccctattgcattgca

SEQ ID NO: 2501532 - DNA, 25 bp, Homo sapien
tcccttttgcgagccacagagagct

SEQ ID NO: 2501533 - DNA, 25 bp, Homo sapien
ctttgggaagtggttcagcgcgatc

SEQ ID NO: 2501534 - DNA, 25 bp, Homo sapien
ctaacgagatgtctgtctacagctg

SEQ ID NO: 2501535 - DNA, 25 bp, Homo sapien
gagctttttgttccgaaactctcat

SEQ ID NO: 2501536 - DNA, 25 bp, Homo sapien
gaaaaactagagatcagcattaagg

SEQ ID NO: 2501537 - DNA, 25 bp, Homo sapien
gagcacaacaaaatcgaaaacacgg

SEQ ID NO: 2501538 - DNA, 25 bp, Homo sapien
gattaattgtactttgcgtctcata

SEQ ID NO: 2501539 - DNA, 25 bp, Homo sapien
cattaaggtctattgcaaaatgagg

SEQ ID NO: 2501540 - DNA, 25 bp, Homo sapien
gtaaacccagctgataaaccccatg

SEQ ID NO: 2501541 - DNA, 25 bp, Homo sapien
gaaagagcagctaccaattcgttgg

SEQ ID NO: 2501542 - DNA, 25 bp, Homo sapien
tcgttggacagcacagtaagtaagc

SEQ ID NO: 2501543 - DNA, 25 bp, Homo sapien
ggaagctgctcatctaccatgggcc

SEQ ID NO: 2501544 - DNA, 25 bp, Homo sapien
gccgtgctgcctgaattatggtatg

SEQ ID NO: 2501545 - DNA, 25 bp, Homo sapien
ggatttatgtagcttctggtgttca

SEQ ID NO: 2501546 - DNA, 25 bp, Homo sapien
acatttttccacacggcaggcataa

SEQ ID NO: 2501547 - DNA, 25 bp, Homo sapien
tttgtttatgatgggccgtgctgcc

SEQ ID NO: 2501548 - DNA, 25 bp, Homo sapien
gcatcaatacttgaagtgaaattgc

SEQ ID NO: 2501549 - DNA, 25 bp, Homo sapien
aaaccacagctgtacttgcatcaat

SEQ ID NO: 2501550 - DNA, 25 bp, Homo sapien
tatacacctccttaaaaaccacagc

SEQ ID NO: 2501551 - DNA, 25 bp, Homo sapien
tcatgtatacacctccttaaaaacc

SEQ ID NO: 2501552 - DNA, 25 bp, Homo sapien
tgttgttcgtatttctcctttacat

SEQ ID NO: 2501553 - DNA, 25 bp, Homo sapien
ttgttgttcgtatttctcctttaca

SEQ ID NO: 2501554 - DNA, 25 bp, Homo sapien
atttctcccttttatcaccacactt

SEQ ID NO: 2501555 - DNA, 25 bp, Homo sapien
cccttttatcaccacacttctccat

SEQ ID NO: 2501556 - DNA, 25 bp, Homo sapien
caaatttctcccttttatcaccaca

SEQ ID NO: 2501557 - DNA, 25 bp, Homo sapien
ttcaaatttctcccttttatcacca

SEQ ID NO: 2501558 - DNA, 25 bp, Homo sapien
taactagtgaaatttaacacggatg

SEQ ID NO: 2501559 - DNA, 25 bp, Homo sapien
ggccactgggagaatcttgttttgg

SEQ ID NO: 2501560 - DNA, 25 bp, Homo sapien
ccctcagtttagaaaaggctattgc

SEQ ID NO: 2501561 - DNA, 25 bp, Homo sapien
gatggtgtcggctttttatttagag

SEQ ID NO: 2501562 - DNA, 25 bp, Homo sapien
tacaatatagaatctatgccataca

SEQ ID NO: 2501563 - DNA, 25 bp, Homo sapien
catcattacaatatagaatctatgc

SEQ ID NO: 2501564 - DNA, 25 bp, Homo sapien
tatagaatctatgccatacaaaata

SEQ ID NO: 2501565 - DNA, 25 bp, Homo sapien
tctttttgcataggacatcattaca

SEQ ID NO: 2501566 - DNA, 25 bp, Homo sapien
ccagggtggttcaatttcaagttga

SEQ ID NO: 2501567 - DNA, 25 bp, Homo sapien
gctgtttccccatcagctgtgtagc

SEQ ID NO: 2501568 - DNA, 25 bp, Homo sapien
catcagctgtgtagcggccatgaaa

SEQ ID NO: 2501569 - DNA, 25 bp, Homo sapien
ccatgaaatgattgacggcccttgc

SEQ ID NO: 2501570 - DNA, 25 bp, Homo sapien
caaagagttttatatgagtaatgga

SEQ ID NO: 2501571 - DNA, 25 bp, Homo sapien
tatggtcttgtagacttttggataa

SEQ ID NO: 2501572 - DNA, 25 bp, Homo sapien
gagtaatggatatggtcttgtagac

SEQ ID NO: 2501573 - DNA, 25 bp, Homo sapien
ctcttttctgtgtcatgtggtcaaa

SEQ ID NO: 2501574 - DNA, 25 bp, Homo sapien
taagctggcactgggtgaacccgct

SEQ ID NO: 2501575 - DNA, 25 bp, Homo sapien
tgaaacccatagctagtctgattgc

SEQ ID NO: 2501576 - DNA, 25 bp, Homo sapien
tatacacgcccgttgtaagctggca

SEQ ID NO: 2501577 - DNA, 25 bp, Homo sapien
gaacccgctgattctaaccatatgg

SEQ ID NO: 2501578 - DNA, 25 bp, Homo sapien
tacaaatcccatttcaggtaggtct

SEQ ID NO: 2501579 - DNA, 25 bp, Homo sapien
aaatcccatttcaggtaggtcttgg

SEQ ID NO: 2501580 - DNA, 25 bp, Homo sapien
tagcttgttgagttggttttccttc

SEQ ID NO: 2501581 - DNA, 25 bp, Homo sapien
tctccatatctgcatgtacaaatcc

SEQ ID NO: 2501582 - DNA, 25 bp, Homo sapien
agggctttccaggtatagccgacag

SEQ ID NO: 2501583 - DNA, 25 bp, Homo sapien
tgtagtaatgggcaaaccctggtgc

SEQ ID NO: 2501584 - DNA, 25 bp, Homo sapien
catattacatgtagtaatgggcaaa

SEQ ID NO: 2501585 - DNA, 25 bp, Homo sapien
tatagccgacagttgccacatcaca

SEQ ID NO: 2501586 - DNA, 25 bp, Homo sapien
ctgttggtcagtgtcagaccctgct

SEQ ID NO: 2501587 - DNA, 25 bp, Homo sapien
tgtcagaccctgctcgtgaaggctg

SEQ ID NO: 2501588 - DNA, 25 bp, Homo sapien
gtcagtgtcagaccctgctcgtgaa

SEQ ID NO: 2501589 - DNA, 25 bp, Homo sapien
taaaggcagttgatctataaagttg

SEQ ID NO: 2501590 - DNA, 25 bp, Homo sapien
tgaccgcaactggtttttctaagta

SEQ ID NO: 2501591 - DNA, 25 bp, Homo sapien
tgttcccagatacggtcacacccat

SEQ ID NO: 2501592 - DNA, 25 bp, Homo sapien
ccacagattctaaacctggttggag

SEQ ID NO: 2501593 - DNA, 25 bp, Homo sapien
aggacccgatgcctgtttgttctcc

SEQ ID NO: 2501594 - DNA, 25 bp, Homo sapien
cctgattggattgatatgctttttc

SEQ ID NO: 2501595 - DNA, 25 bp, Homo sapien
gactgacgttcctcaatactgggac

SEQ ID NO: 2501596 - DNA, 25 bp, Homo sapien
tgacgttcctcaatactgggacaca

SEQ ID NO: 2501597 - DNA, 25 bp, Homo sapien
gttcctcaatactgggacacaccac

SEQ ID NO: 2501598 - DNA, 25 bp, Homo sapien
agctgactgacgttcctcaatactg

SEQ ID NO: 2501599 - DNA, 25 bp, Homo sapien
tgtcatatggccctgcataatgcag

SEQ ID NO: 2501600 - DNA, 25 bp, Homo sapien
tctgtgcacagccatttggccaata

SEQ ID NO: 2501601 - DNA, 25 bp, Homo sapien
tgtggattggacatgacaagtgcca

SEQ ID NO: 2501602 - DNA, 25 bp, Homo sapien
agagacaaggccagggaactcacac

SEQ ID NO: 2501603 - DNA, 25 bp, Homo sapien
tatgtgacaagtactctcacaactc

SEQ ID NO: 2501604 - DNA, 25 bp, Homo sapien
tgtgacaagtactctcacaactcct

SEQ ID NO: 2501605 - DNA, 25 bp, Homo sapien
tgtatgtgacaagtactctcacaac

SEQ ID NO: 2501606 - DNA, 25 bp, Homo sapien
gtgacaagtactctcacaactcctc

SEQ ID NO: 2501607 - DNA, 25 bp, Homo sapien
tacagcaagccctagaaacagtgcc

SEQ ID NO: 2501608 - DNA, 25 bp, Homo sapien
gcaagccctagaaacagtgccttca

SEQ ID NO: 2501609 - DNA, 25 bp, Homo sapien
cagcaagccctagaaacagtgcctt

SEQ ID NO: 2501610 - DNA, 25 bp, Homo sapien
ctggatatcatcttttacagcaagc

SEQ ID NO: 2501611 - DNA, 25 bp, Homo sapien
gcagcctatcttcggcttttgttca

SEQ ID NO: 2501612 - DNA, 25 bp, Homo sapien
tcaaattggtgaaagtaggctaact

SEQ ID NO: 2501613 - DNA, 25 bp, Homo sapien
gaaagtaggctaacttctctagcaa

SEQ ID NO: 2501614 - DNA, 25 bp, Homo sapien
aatgcagcctatcttcggcttttgt

SEQ ID NO: 2501615 - DNA, 25 bp, Homo sapien
gcctgtgggctgggtagtgagtttt

SEQ ID NO: 2501616 - DNA, 25 bp, Homo sapien
ctcttctgagacacaccgctggccg

SEQ ID NO: 2501617 - DNA, 25 bp, Homo sapien
cctgtgggctgggtagtgagttttt

SEQ ID NO: 2501618 - DNA, 25 bp, Homo sapien
ttctgagacacaccgctggccgcct

SEQ ID NO: 2501619 - DNA, 25 bp, Homo sapien
gagtccacatagaaagaatctccac

SEQ ID NO: 2501620 - DNA, 25 bp, Homo sapien
tgagaagagtccacatagaaagaat

SEQ ID NO: 2501621 - DNA, 25 bp, Homo sapien
gatgtccagatacgcccacatgaga

SEQ ID NO: 2501622 - DNA, 25 bp, Homo sapien
acttgatgtccagatacgcccacat

SEQ ID NO: 2501623 - DNA, 25 bp, Homo sapien
tagagacagttagttgtactactcc

SEQ ID NO: 2501624 - DNA, 25 bp, Homo sapien
attcttagagacagttagttgtact

SEQ ID NO: 2501625 - DNA, 25 bp, Homo sapien
cagttagttgtactactccttttct

SEQ ID NO: 2501626 - DNA, 25 bp, Homo sapien
gagacagttagttgtactactcctt

SEQ ID NO: 2501627 - DNA, 25 bp, Homo sapien
cagagcttggttccccatgtggggc

SEQ ID NO: 2501628 - DNA, 25 bp, Homo sapien
agagcttggttccccatgtggggcc

SEQ ID NO: 2501629 - DNA, 25 bp, Homo sapien
agcttggttccccatgtggggccaa

SEQ ID NO: 2501630 - DNA, 25 bp, Homo sapien
gcttggttccccatgtggggccaac

SEQ ID NO: 2501631 - DNA, 25 bp, Homo sapien
taagatctggatgaggtaataagtc

SEQ ID NO: 2501632 - DNA, 25 bp, Homo sapien
aaccttccttcattttaagatctgg

SEQ ID NO: 2501633 - DNA, 25 bp, Homo sapien
tcattcaatatcactctttcgctgt

SEQ ID NO: 2501634 - DNA, 25 bp, Homo sapien
tcactctttcgctgtaaaaaccttc

SEQ ID NO: 2501635 - DNA, 25 bp, Homo sapien
tacacgggtaggcaatacgcaaata

SEQ ID NO: 2501636 - DNA, 25 bp, Homo sapien
tagtgccttctacattgtcaagtac

SEQ ID NO: 2501637 - DNA, 25 bp, Homo sapien
tagaactggatttctaaggtagagc

SEQ ID NO: 2501638 - DNA, 25 bp, Homo sapien
taggatggaaacatgtagtgccttc

SEQ ID NO: 2501639 - DNA, 25 bp, Homo sapien
gcccatgaggtgataacttaaagct

SEQ ID NO: 2501640 - DNA, 25 bp, Homo sapien
tagctcctccccttccatacttttc

SEQ ID NO: 2501641 - DNA, 25 bp, Homo sapien
gatacagaagcccatgaggtgataa

SEQ ID NO: 2501642 - DNA, 25 bp, Homo sapien
gaagcccatgaggtgataacttaaa

SEQ ID NO: 2501643 - DNA, 25 bp, Homo sapien
acaaaagtattggtccgcaatggac

SEQ ID NO: 2501644 - DNA, 25 bp, Homo sapien
tgcacccagcctcggaatgttctta

SEQ ID NO: 2501645 - DNA, 25 bp, Homo sapien
cactgctaaacataggtgattgaaa

SEQ ID NO: 2501646 - DNA, 25 bp, Homo sapien
taagcggagcttagtcctttaaaca

SEQ ID NO: 2501647 - DNA, 25 bp, Homo sapien
cctgctaactcgcttgttgccgtct

SEQ ID NO: 2501648 - DNA, 25 bp, Homo sapien
ctccgagtggcatagtgtggaagtc

SEQ ID NO: 2501649 - DNA, 25 bp, Homo sapien
gctaactcgcttgttgccgtctggg

SEQ ID NO: 2501650 - DNA, 25 bp, Homo sapien
agtgcctgctaactcgcttgttgcc

SEQ ID NO: 2501651 - DNA, 25 bp, Homo sapien
ttgaaccttgcaaacaatgaagagc

SEQ ID NO: 2501652 - DNA, 25 bp, Homo sapien
gatagccctagacacttgcataaag

SEQ ID NO: 2501653 - DNA, 25 bp, Homo sapien
gctaagagacattggtaattcacca

SEQ ID NO: 2501654 - DNA, 25 bp, Homo sapien
ggttcaaccctctcagtaaggtaga

SEQ ID NO: 2501655 - DNA, 25 bp, Homo sapien
ttttcaaaagccagatctccatcct

SEQ ID NO: 2501656 - DNA, 25 bp, Homo sapien
ctagttggcatctctctatggctcc

SEQ ID NO: 2501657 - DNA, 25 bp, Homo sapien
gttggcatctctctatggctccttc

SEQ ID NO: 2501658 - DNA, 25 bp, Homo sapien
ctaagctagttggcatctctctatg

SEQ ID NO: 2501659 - DNA, 25 bp, Homo sapien
caaagtttaacttgtgtgttcgctt

SEQ ID NO: 2501660 - DNA, 25 bp, Homo sapien
aggtatagttatctgctttgctcac

SEQ ID NO: 2501661 - DNA, 25 bp, Homo sapien
ctgcacaggtacttcgaggacagta

SEQ ID NO: 2501662 - DNA, 25 bp, Homo sapien
gcattagaacactaccctcacttgg

SEQ ID NO: 2501663 - DNA, 25 bp, Homo sapien
catataaacttcattacggcaggta

SEQ ID NO: 2501664 - DNA, 25 bp, Homo sapien
ttccccgagattacacaatagtcag

SEQ ID NO: 2501665 - DNA, 25 bp, Homo sapien
ccttccccgagattacacaatagtc

SEQ ID NO: 2501666 - DNA, 25 bp, Homo sapien
cccctgaggatctactgccctctgg

SEQ ID NO: 2501667 - DNA, 25 bp, Homo sapien
tcccttccccgagattacacaatag

SEQ ID NO: 2501668 - DNA, 25 bp, Homo sapien
ctccacccatatgtccatcctcctc

SEQ ID NO: 2501669 - DNA, 25 bp, Homo sapien
cacccatatgtccatcctcctctcc

SEQ ID NO: 2501670 - DNA, 25 bp, Homo sapien
tgtcctccacccatatgtccatcct

SEQ ID NO: 2501671 - DNA, 25 bp, Homo sapien
gtgtcctccacccatatgtccatcc

SEQ ID NO: 2501672 - DNA, 25 bp, Homo sapien
gaagagagggccactaaatttgatc

SEQ ID NO: 2501673 - DNA, 25 bp, Homo sapien
tgcctggagccaagctattatagaa

SEQ ID NO: 2501674 - DNA, 25 bp, Homo sapien
gaagatgcctttaatctcaaactgg

SEQ ID NO: 2501675 - DNA, 25 bp, Homo sapien
tcaaactgggtggtcttagaagaga

SEQ ID NO: 2501676 - DNA, 25 bp, Homo sapien
tctgtatgttttggacctgcttgaa

SEQ ID NO: 2501677 - DNA, 25 bp, Homo sapien
tttccttagatgagccaacttggtg

SEQ ID NO: 2501678 - DNA, 25 bp, Homo sapien
gtctgactgatactgacttgcccag

SEQ ID NO: 2501679 - DNA, 25 bp, Homo sapien
taaattccggtgcagagctttccat

SEQ ID NO: 2501680 - DNA, 25 bp, Homo sapien
taatggattagaatagcttctacac

SEQ ID NO: 2501681 - DNA, 25 bp, Homo sapien
tattaaaccaatcaggcagtatgaa

SEQ ID NO: 2501682 - DNA, 25 bp, Homo sapien
ggatcagttacaacatgataaaatg

SEQ ID NO: 2501683 - DNA, 25 bp, Homo sapien
aaatagattatgtctacttggaaaa

SEQ ID NO: 2501684 - DNA, 25 bp, Homo sapien
aaaaaatcgtagtagcatgaagatt

SEQ ID NO: 2501685 - DNA, 25 bp, Homo sapien
ttaagtctgctaaaatacgtattca

SEQ ID NO: 2501686 - DNA, 25 bp, Homo sapien
atttagccactcaattcaaaaaggg

SEQ ID NO: 2501687 - DNA, 25 bp, Homo sapien
atgtacaagcatcatttaccatcta

SEQ ID NO: 2501688 - DNA, 25 bp, Homo sapien
aaatagaattcattgaaggagggga

SEQ ID NO: 2501689 - DNA, 25 bp, Homo sapien
taagaattcattggtcgggcacggt

SEQ ID NO: 2501690 - DNA, 25 bp, Homo sapien
ttaataagaattcattggtcgggca

SEQ ID NO: 2501691 - DNA, 25 bp, Homo sapien
gaggggaattaggtaagtgcataaa

SEQ ID NO: 2501692 - DNA, 25 bp, Homo sapien
taaccgatgccagaattattactct

SEQ ID NO: 2501693 - DNA, 25 bp, Homo sapien
gatagtataaatgctcacgaaactg

SEQ ID NO: 2501694 - DNA, 25 bp, Homo sapien
taccagccaacttgaaataagacct

SEQ ID NO: 2501695 - DNA, 25 bp, Homo sapien
gattgggacccttaaccaatgtcca

SEQ ID NO: 2501696 - DNA, 25 bp, Homo sapien
tctgtgttctacaacgacaagctat

SEQ ID NO: 2501697 - DNA, 25 bp, Homo sapien
tggactgtctaatattgaggattgc

SEQ ID NO: 2501698 - DNA, 25 bp, Homo sapien
cagttacaacacagtagctcccata

SEQ ID NO: 2501699 - DNA, 25 bp, Homo sapien
tatgtaaatcgttttccacagacgc

SEQ ID NO: 2501700 - DNA, 25 bp, Homo sapien
tcctgactgtggttagaactgatac

SEQ ID NO: 2501701 - DNA, 25 bp, Homo sapien
tctttgagtaaagggaggaatctcc

SEQ ID NO: 2501702 - DNA, 25 bp, Homo sapien
cagaggtggtgcgtttagtcagccc

SEQ ID NO: 2501703 - DNA, 25 bp, Homo sapien
cctactgttgtttcggagtcctgac

SEQ ID NO: 2501704 - DNA, 25 bp, Homo sapien
cacccaatagccacttgcagaactg

SEQ ID NO: 2501705 - DNA, 25 bp, Homo sapien
ttcttagggttatcagaaatctctt

SEQ ID NO: 2501706 - DNA, 25 bp, Homo sapien
tcctctccttgactgttacgatgcc

SEQ ID NO: 2501707 - DNA, 25 bp, Homo sapien
cagaactgatctgacatatcctctt

SEQ ID NO: 2501708 - DNA, 25 bp, Homo sapien
tataaattccgcctccatggtgact

SEQ ID NO: 2501709 - DNA, 25 bp, Homo sapien
cccatatggttgtcaggagggatga

SEQ ID NO: 2501710 - DNA, 25 bp, Homo sapien
gtcctagataatttggctgccccag

SEQ ID NO: 2501711 - DNA, 25 bp, Homo sapien
catgtcaggtgcaatgtgtccaaac

SEQ ID NO: 2501712 - DNA, 25 bp, Homo sapien
tcataatctaaatccaattgttgaa

SEQ ID NO: 2501713 - DNA, 25 bp, Homo sapien
gaatggtaaataggttcataatcta

SEQ ID NO: 2501714 - DNA, 25 bp, Homo sapien
catgaatctcaaatggactggtgtt

SEQ ID NO: 2501715 - DNA, 25 bp, Homo sapien
tttactactttagcttttatgtgag

SEQ ID NO: 2501716 - DNA, 25 bp, Homo sapien
ccgagtctttagcaagtttcttcca

SEQ ID NO: 2501717 - DNA, 25 bp, Homo sapien
tatgccgagtctttagcaagtttct

SEQ ID NO: 2501718 - DNA, 25 bp, Homo sapien
tgtttttatgccgagtctttagcaa

SEQ ID NO: 2501719 - DNA, 25 bp, Homo sapien
gagtctttagcaagtttcttccaaa

SEQ ID NO: 2501720 - DNA, 25 bp, Homo sapien
gcttcagcctcgaagaaggcgtttg

SEQ ID NO: 2501721 - DNA, 25 bp, Homo sapien
tggctgctgcacctctggagacctg

SEQ ID NO: 2501722 - DNA, 25 bp, Homo sapien
gctgcttaactttgaactgcgggat

SEQ ID NO: 2501723 - DNA, 25 bp, Homo sapien
ttagtagccggctgagaaagttgct

SEQ ID NO: 2501724 - DNA, 25 bp, Homo sapien
catgaagaggagcttgttgcaagaa

SEQ ID NO: 2501725 - DNA, 25 bp, Homo sapien
tgatggtttagcacactaggaattc

SEQ ID NO: 2501726 - DNA, 25 bp, Homo sapien
gaagatgactctgctaaatgtttgc

SEQ ID NO: 2501727 - DNA, 25 bp, Homo sapien
tcctactgctttagatggctttagc

SEQ ID NO: 2501728 - DNA, 25 bp, Homo sapien
ttcaccaatcagtcccacagtctga

SEQ ID NO: 2501729 - DNA, 25 bp, Homo sapien
tgtgagaaattgggaacttcggaaa

SEQ ID NO: 2501730 - DNA, 25 bp, Homo sapien
tttcaccaatcagtcccacagtctg

SEQ ID NO: 2501731 - DNA, 25 bp, Homo sapien
caatttcaccaatcagtcccacagt

SEQ ID NO: 2501732 - DNA, 25 bp, Homo sapien
gccatcaagcatactggttcaccat

SEQ ID NO: 2501733 - DNA, 25 bp, Homo sapien
gctgtttagccttcataatttcaaa

SEQ ID NO: 2501734 - DNA, 25 bp, Homo sapien
caggacaaaggtttacaataactat

SEQ ID NO: 2501735 - DNA, 25 bp, Homo sapien
tgtgctagctaatgaagaaacctct

SEQ ID NO: 2501736 - DNA, 25 bp, Homo sapien
gacatgagattgaaggtgactctga

SEQ ID NO: 2501737 - DNA, 25 bp, Homo sapien
tgttgaattgacacaagcacagaaa

SEQ ID NO: 2501738 - DNA, 25 bp, Homo sapien
ggtggtcttcctattgtaacagctg

SEQ ID NO: 2501739 - DNA, 25 bp, Homo sapien
taccgtggcccaagtaatgtttgaa

SEQ ID NO: 2501740 - DNA, 25 bp, Homo sapien
tacaatacatgtagactcagcatcc

SEQ ID NO: 2501741 - DNA, 25 bp, Homo sapien
caagttctacctgataaagtggtgg

SEQ ID NO: 2501742 - DNA, 25 bp, Homo sapien
gcagaggaggcgattcagttacttc

SEQ ID NO: 2501743 - DNA, 25 bp, Homo sapien
aaatacaagtgcatagggcagagga

SEQ ID NO: 2501744 - DNA, 25 bp, Homo sapien
taaagaaaattgttgcacggactac

SEQ ID NO: 2501745 - DNA, 25 bp, Homo sapien
gatctgtgcaaatagctatataaaa

SEQ ID NO: 2501746 - DNA, 25 bp, Homo sapien
taaacttatttagatcaaggtcagt

SEQ ID NO: 2501747 - DNA, 25 bp, Homo sapien
tactcctctgtagaactgtgaagat

SEQ ID NO: 2501748 - DNA, 25 bp, Homo sapien
tgtcccacccattattcacatatag

SEQ ID NO: 2501749 - DNA, 25 bp, Homo sapien
tagaatgggttgcattatcctctcc

SEQ ID NO: 2501750 - DNA, 25 bp, Homo sapien
taatgagaaaactactttgaagact

SEQ ID NO: 2501751 - DNA, 25 bp, Homo sapien
tatctttcaaagtgggtaatgagaa

SEQ ID NO: 2501752 - DNA, 25 bp, Homo sapien
tccagaacttcgagtgcactataaa

SEQ ID NO: 2501753 - DNA, 25 bp, Homo sapien
cagaatgatttaggttatgccagct

SEQ ID NO: 2501754 - DNA, 25 bp, Homo sapien
cacctactttaaggagatggctact

SEQ ID NO: 2501755 - DNA, 25 bp, Homo sapien
taagagaccgtctagacagagtgaa

SEQ ID NO: 2501756 - DNA, 25 bp, Homo sapien
ttccttagaaaattgacccagtgtc

SEQ ID NO: 2501757 - DNA, 25 bp, Homo sapien
taggaaatagaacattgggccatgc

SEQ ID NO: 2501758 - DNA, 25 bp, Homo sapien
tctgagacaagattactagaccctt

SEQ ID NO: 2501759 - DNA, 25 bp, Homo sapien
catgtctcatgccagtctttttcaa

SEQ ID NO: 2501760 - DNA, 25 bp, Homo sapien
aatatttagcctcttatgaaaggtt

SEQ ID NO: 2501761 - DNA, 25 bp, Homo sapien
tattaatatttagcctcttatgaaa

SEQ ID NO: 2501762 - DNA, 25 bp, Homo sapien
atttagcctcttatgaaaggttcgt

SEQ ID NO: 2501763 - DNA, 25 bp, Homo sapien
ttaatatttagcctcttatgaaagg

SEQ ID NO: 2501764 - DNA, 25 bp, Homo sapien
cgaatgagctaactactataggcct

SEQ ID NO: 2501765 - DNA, 25 bp, Homo sapien
taaagacaccacttctatgaggagg

SEQ ID NO: 2501766 - DNA, 25 bp, Homo sapien
tagatgtacagaagtcaacggaaac

SEQ ID NO: 2501767 - DNA, 25 bp, Homo sapien
caaaggtagcaaaagacgaagcagg

SEQ ID NO: 2501768 - DNA, 25 bp, Homo sapien
aaactgaacatactgatttaattgg

SEQ ID NO: 2501769 - DNA, 25 bp, Homo sapien
cagaaactgaacatactgatttaat

SEQ ID NO: 2501770 - DNA, 25 bp, Homo sapien
ttcagaaactgaacatactgattta

SEQ ID NO: 2501771 - DNA, 25 bp, Homo sapien
gaaactgaacatactgatttaattg

SEQ ID NO: 2501772 - DNA, 25 bp, Homo sapien
tgtttgctaggcataacgttttccc

SEQ ID NO: 2501773 - DNA, 25 bp, Homo sapien
tttccccaacatctagggctccatg

SEQ ID NO: 2501774 - DNA, 25 bp, Homo sapien
aattctcctagtcttaagtaagtag

SEQ ID NO: 2501775 - DNA, 25 bp, Homo sapien
tcattttgccgatcttctgttccag

SEQ ID NO: 2501776 - DNA, 25 bp, Homo sapien
tggtttcccccaaaagtactcatca

SEQ ID NO: 2501777 - DNA, 25 bp, Homo sapien
tcacaaaaacatctcctgttgaagg

SEQ ID NO: 2501778 - DNA, 25 bp, Homo sapien
catctcctgttgaaggtggtttccc

SEQ ID NO: 2501779 - DNA, 25 bp, Homo sapien
taattggattttcaaatacaatcac

SEQ ID NO: 2501780 - DNA, 25 bp, Homo sapien
aattttcaaacacattcatgttggt

SEQ ID NO: 2501781 - DNA, 25 bp, Homo sapien
agccttgcttgcttcataattttca

SEQ ID NO: 2501782 - DNA, 25 bp, Homo sapien
aacacattcatgttggtgtacagac

SEQ ID NO: 2501783 - DNA, 25 bp, Homo sapien
ttcaaacacattcatgttggtgtac

SEQ ID NO: 2501784 - DNA, 25 bp, Homo sapien
aaaatgggccaaacgtgggagatca

SEQ ID NO: 2501785 - DNA, 25 bp, Homo sapien
aatgagtcaatagccaatcacaagg

SEQ ID NO: 2501786 - DNA, 25 bp, Homo sapien
tgagccaacagaccacggaaatgag

SEQ ID NO: 2501787 - DNA, 25 bp, Homo sapien
gatagagtttaccaatgtagccaag

SEQ ID NO: 2501788 - DNA, 25 bp, Homo sapien
ttaaagtctgctaggtgaaccacca

SEQ ID NO: 2501789 - DNA, 25 bp, Homo sapien
tccttctagggatgcaatgactttc

SEQ ID NO: 2501790 - DNA, 25 bp, Homo sapien
gccatctaggattgggtaatactcc

SEQ ID NO: 2501791 - DNA, 25 bp, Homo sapien
tggaccatggcatcacgccaggaag

SEQ ID NO: 2501792 - DNA, 25 bp, Homo sapien
gaattcagaagcaatacaaatgtga

SEQ ID NO: 2501793 - DNA, 25 bp, Homo sapien
aaaaagaattcagaagcaatacaaa

SEQ ID NO: 2501794 - DNA, 25 bp, Homo sapien
agaattcagaagcaatacaaatgtg

SEQ ID NO: 2501795 - DNA, 25 bp, Homo sapien
aaagaattcagaagcaatacaaatg

SEQ ID NO: 2501796 - DNA, 25 bp, Homo sapien
ttaagatcatgatagcactgtattt

SEQ ID NO: 2501797 - DNA, 25 bp, Homo sapien
aagatcatgatagcactgtatttta

SEQ ID NO: 2501798 - DNA, 25 bp, Homo sapien
tattaagatcatgatagcactgtat

SEQ ID NO: 2501799 - DNA, 25 bp, Homo sapien
tttattaagatcatgatagcactgt

SEQ ID NO: 2501800 - DNA, 25 bp, Homo sapien
cagctaggtagcgataggtgacatt

SEQ ID NO: 2501801 - DNA, 25 bp, Homo sapien
tatgaacatagcgttctgaattcag

SEQ ID NO: 2501802 - DNA, 25 bp, Homo sapien
ttcagttgatgtgtggatgtttccc

SEQ ID NO: 2501803 - DNA, 25 bp, Homo sapien
catttatggctcctgagaaattaga

SEQ ID NO: 2501804 - DNA, 25 bp, Homo sapien
cagaacatagctatcttcaatgtac

SEQ ID NO: 2501805 - DNA, 25 bp, Homo sapien
acaagaactcccaagaatgacactg

SEQ ID NO: 2501806 - DNA, 25 bp, Homo sapien
aaaatgacaagaactcccaagaatg

SEQ ID NO: 2501807 - DNA, 25 bp, Homo sapien
aagaatgacactgtagaacgttttc

SEQ ID NO: 2501808 - DNA, 25 bp, Homo sapien
aaaaatatgtttcatttgatgaaat

SEQ ID NO: 2501809 - DNA, 25 bp, Homo sapien
tttcaaaaatatgtttcatttgatg

SEQ ID NO: 2501810 - DNA, 25 bp, Homo sapien
tatgtttcatttgatgaaatttaaa

SEQ ID NO: 2501811 - DNA, 25 bp, Homo sapien
gtttcatttgatgaaatttaaacat

SEQ ID NO: 2501812 - DNA, 25 bp, Homo sapien
gctgagagagcctgagtacactata

SEQ ID NO: 2501813 - DNA, 25 bp, Homo sapien
tctctgttaggaaggtactggctga

SEQ ID NO: 2501814 - DNA, 25 bp, Homo sapien
cataactttcaagggactctaggac

SEQ ID NO: 2501815 - DNA, 25 bp, Homo sapien
cattggtgatttcgactcctgagcc

SEQ ID NO: 2501816 - DNA, 25 bp, Homo sapien
gtaaaactttggtctcaaatttgca

SEQ ID NO: 2501817 - DNA, 25 bp, Homo sapien
ggtgagcacaccctgataatataaa

SEQ ID NO: 2501818 - DNA, 25 bp, Homo sapien
ctcaaatttgcaaccaggtgagcac

SEQ ID NO: 2501819 - DNA, 25 bp, Homo sapien
caggtgagcacaccctgataatata

SEQ ID NO: 2501820 - DNA, 25 bp, Homo sapien
ctagtgtcagtcaggtccacagaat

SEQ ID NO: 2501821 - DNA, 25 bp, Homo sapien
ggcttttctagtgtcagtcaggtcc

SEQ ID NO: 2501822 - DNA, 25 bp, Homo sapien
gcttttctagtgtcagtcaggtcca

SEQ ID NO: 2501823 - DNA, 25 bp, Homo sapien
tttctagtgtcagtcaggtccacag

SEQ ID NO: 2501824 - DNA, 25 bp, Homo sapien
gcattacattactgatggttttccc

SEQ ID NO: 2501825 - DNA, 25 bp, Homo sapien
tctcactgccataatcaaagttccg

SEQ ID NO: 2501826 - DNA, 25 bp, Homo sapien
cataatcaaagttccggttaatact

SEQ ID NO: 2501827 - DNA, 25 bp, Homo sapien
cttcctttaattttggcaacggcat

SEQ ID NO: 2501828 - DNA, 25 bp, Homo sapien
tctcagatactggtaagagcacatg

SEQ ID NO: 2501829 - DNA, 25 bp, Homo sapien
tgtggaaggctgcatatgccctcag

SEQ ID NO: 2501830 - DNA, 25 bp, Homo sapien
gccctcagggcagtattcggtactt

SEQ ID NO: 2501831 - DNA, 25 bp, Homo sapien
catctgtctgacatgtgccactgta

SEQ ID NO: 2501832 - DNA, 25 bp, Homo sapien
tcgcttgaggcccggagcttgacac

SEQ ID NO: 2501833 - DNA, 25 bp, Homo sapien
gcttgaggcccggagcttgacacca

SEQ ID NO: 2501834 - DNA, 25 bp, Homo sapien
gcctgggcaacgtagtgagaacttg

SEQ ID NO: 2501835 - DNA, 25 bp, Homo sapien
gatcgcttgaggcccggagcttgac

SEQ ID NO: 2501836 - DNA, 25 bp, Homo sapien
tttcttacaacaaatctgaccatgt

SEQ ID NO: 2501837 - DNA, 25 bp, Homo sapien
aagcatgagacgttccaagattcca

SEQ ID NO: 2501838 - DNA, 25 bp, Homo sapien
ttcccaagcatgagacgttccaaga

SEQ ID NO: 2501839 - DNA, 25 bp, Homo sapien
ccaagcatgagacgttccaagattc

SEQ ID NO: 2501840 - DNA, 25 bp, Homo sapien
tttgagttgaccttcaatatctgat

SEQ ID NO: 2501841 - DNA, 25 bp, Homo sapien
ctttgagttgaccttcaatatctga

SEQ ID NO: 2501842 - DNA, 25 bp, Homo sapien
cggagtgcatggtacagtcctaatg

SEQ ID NO: 2501843 - DNA, 25 bp, Homo sapien
gctgtaatccgaggatcctggtggt

SEQ ID NO: 2501844 - DNA, 25 bp, Homo sapien
tgtgttgcgaaaaccatgggaaagc

SEQ ID NO: 2501845 - DNA, 25 bp, Homo sapien
tgtgggcactggagtgaatctcctg

SEQ ID NO: 2501846 - DNA, 25 bp, Homo sapien
tattagtgtagctacttgtttgtcc

SEQ ID NO: 2501847 - DNA, 25 bp, Homo sapien
gctgtttagcaccataagtttccct

SEQ ID NO: 2501848 - DNA, 25 bp, Homo sapien
ctgctagctttgaagttgagatact

SEQ ID NO: 2501849 - DNA, 25 bp, Homo sapien
tgcagttcccctaggtctgatgtta

SEQ ID NO: 2501850 - DNA, 25 bp, Homo sapien
ggtgttcacattgcaagtgaccttc

SEQ ID NO: 2501851 - DNA, 25 bp, Homo sapien
taccatctgtattagggttcctaga

SEQ ID NO: 2501852 - DNA, 25 bp, Homo sapien
ctgctggtagcctgatggtgttcac

SEQ ID NO: 2501853 - DNA, 25 bp, Homo sapien
catcttatgtagtatctcacaaggg

SEQ ID NO: 2501854 - DNA, 25 bp, Homo sapien
ttaagaaagacgctgtcataatctg

SEQ ID NO: 2501855 - DNA, 25 bp, Homo sapien
aaagacgctgtcataatctgtgctg

SEQ ID NO: 2501856 - DNA, 25 bp, Homo sapien
aatctgtgctgtacagaaaccgttg

SEQ ID NO: 2501857 - DNA, 25 bp, Homo sapien
tgtgctgtacagaaaccgttgatac

SEQ ID NO: 2501858 - DNA, 25 bp, Homo sapien
tccacagacagcaagaatagttgca

SEQ ID NO: 2501859 - DNA, 25 bp, Homo sapien
cattttgaaacagtagtaggtattt

SEQ ID NO: 2501860 - DNA, 25 bp, Homo sapien
tgtcttcttccgtagcttccacaga

SEQ ID NO: 2501861 - DNA, 25 bp, Homo sapien
gaatagttgcaattggagactgaca

SEQ ID NO: 2501862 - DNA, 25 bp, Homo sapien
gtgcaacacagatcaaccacaattt

SEQ ID NO: 2501863 - DNA, 25 bp, Homo sapien
tatttaaattatcagtgccaatgga

SEQ ID NO: 2501864 - DNA, 25 bp, Homo sapien
tgatccaacagaaagtctaatataa

SEQ ID NO: 2501865 - DNA, 25 bp, Homo sapien
gcacagttgtgagtagtaaatggca

SEQ ID NO: 2501866 - DNA, 25 bp, Homo sapien
cactattataagctattgacatcaa

SEQ ID NO: 2501867 - DNA, 25 bp, Homo sapien
ctattgacatcaatactttagggac

SEQ ID NO: 2501868 - DNA, 25 bp, Homo sapien
tgatttcactattataagctattga

SEQ ID NO: 2501869 - DNA, 25 bp, Homo sapien
ttcactattataagctattgacatc

SEQ ID NO: 2501870 - DNA, 25 bp, Homo sapien
tgcacaatgggcagatttttcctgc

SEQ ID NO: 2501871 - DNA, 25 bp, Homo sapien
tgggcctcagtcttatgattaaata

SEQ ID NO: 2501872 - DNA, 25 bp, Homo sapien
agtgaataaaactgggttccaggag

SEQ ID NO: 2501873 - DNA, 25 bp, Homo sapien
caggagtgtgtcaaaaggaaatgcc

SEQ ID NO: 2501874 - DNA, 25 bp, Homo sapien
cagagagaaaaacagagagttaatt

SEQ ID NO: 2501875 - DNA, 25 bp, Homo sapien
agacagttattcaattaagacatgc

SEQ ID NO: 2501876 - DNA, 25 bp, Homo sapien
gctgcacagctagagaaacagtctt

SEQ ID NO: 2501877 - DNA, 25 bp, Homo sapien
cagttattcaattaagacatgcatt

SEQ ID NO: 2501878 - DNA, 25 bp, Homo sapien
ccaaggagctgcaatttacaatgaa

SEQ ID NO: 2501879 - DNA, 25 bp, Homo sapien
aatacaatcagggttacttcactgg

SEQ ID NO: 2501880 - DNA, 25 bp, Homo sapien
tttagagcgtagagagtgggaaaca

SEQ ID NO: 2501881 - DNA, 25 bp, Homo sapien
tacttaagcattgcagtagcctgcc

SEQ ID NO: 2501882 - DNA, 25 bp, Homo sapien
gagctccattacagacttcagactt

SEQ ID NO: 2501883 - DNA, 25 bp, Homo sapien
cccagagtcaccttatatacattct

SEQ ID NO: 2501884 - DNA, 25 bp, Homo sapien
atacattctttccaagtcgaaatga

SEQ ID NO: 2501885 - DNA, 25 bp, Homo sapien
ctatctggtgtcctgagctccatta

SEQ ID NO: 2501886 - DNA, 25 bp, Homo sapien
cttcacgttcaataggttcaatcat

SEQ ID NO: 2501887 - DNA, 25 bp, Homo sapien
tactctgtgtaggtagtacagcttt

SEQ ID NO: 2501888 - DNA, 25 bp, Homo sapien
tctttactctgtgtaggtagtacag

SEQ ID NO: 2501889 - DNA, 25 bp, Homo sapien
ttgtctttactctgtgtaggtagta

SEQ ID NO: 2501890 - DNA, 25 bp, Homo sapien
tgtgtaggtagtacagctttacttc

SEQ ID NO: 2501891 - DNA, 25 bp, Homo sapien
gttgaaaatcttatacactaccagt

SEQ ID NO: 2501892 - DNA, 25 bp, Homo sapien
tgaacacttggtagtttctagtctt

SEQ ID NO: 2501893 - DNA, 25 bp, Homo sapien
taaatacctagctgcattatggtgc

SEQ ID NO: 2501894 - DNA, 25 bp, Homo sapien
tttgactcttacctataaagctttc

SEQ ID NO: 2501895 - DNA, 25 bp, Homo sapien
tagagtagcatcaaaaccattggaa

SEQ ID NO: 2501896 - DNA, 25 bp, Homo sapien
taactgctgcaaagaagcttataga

SEQ ID NO: 2501897 - DNA, 25 bp, Homo sapien
catttaagacccaggatgatggtgg

SEQ ID NO: 2501898 - DNA, 25 bp, Homo sapien
tggtgggtccctacaggaaagatgt

SEQ ID NO: 2501899 - DNA, 25 bp, Homo sapien
gcatatactatattcgattatgagt

SEQ ID NO: 2501900 - DNA, 25 bp, Homo sapien
aaagatttgctgacacttatatagc

SEQ ID NO: 2501901 - DNA, 25 bp, Homo sapien
tttacttcaagtcctgggttacatg

SEQ ID NO: 2501902 - DNA, 25 bp, Homo sapien
tgtccatgtgttctacactatgcat

SEQ ID NO: 2501903 - DNA, 25 bp, Homo sapien
aaacagttatcagggtatggtggca

SEQ ID NO: 2501904 - DNA, 25 bp, Homo sapien
gcttgaacccacatgatgaaggttg

SEQ ID NO: 2501905 - DNA, 25 bp, Homo sapien
tcgcttgaacccacatgatgaaggt

SEQ ID NO: 2501906 - DNA, 25 bp, Homo sapien
acaaaacagttatcagggtatggtg

SEQ ID NO: 2501907 - DNA, 25 bp, Homo sapien
tgatattcactcataagctcagctt

SEQ ID NO: 2501908 - DNA, 25 bp, Homo sapien
gaacatgctttttgaatcgtggtct

SEQ ID NO: 2501909 - DNA, 25 bp, Homo sapien
tgatatgagatgtaagcccttgcct

SEQ ID NO: 2501910 - DNA, 25 bp, Homo sapien
gcttgcaggtgcaatgttcagcaaa

SEQ ID NO: 2501911 - DNA, 25 bp, Homo sapien
cagaggaacacaatttcacttatgg

SEQ ID NO: 2501912 - DNA, 25 bp, Homo sapien
aaaatcagttaaagacagctcagct

SEQ ID NO: 2501913 - DNA, 25 bp, Homo sapien
cacagttgtagcaggttggacttga

SEQ ID NO: 2501914 - DNA, 25 bp, Homo sapien
cttgttaatagcaaagcagaggaac

SEQ ID NO: 2501915 - DNA, 25 bp, Homo sapien
tgcaaagctcttggccgacactggt

SEQ ID NO: 2501916 - DNA, 25 bp, Homo sapien
gacagttcttgggtacgtagtcaga

SEQ ID NO: 2501917 - DNA, 25 bp, Homo sapien
tatgcacacttgagagaaactctcc

SEQ ID NO: 2501918 - DNA, 25 bp, Homo sapien
tatcttagactaatgtagagccagc

SEQ ID NO: 2501919 - DNA, 25 bp, Homo sapien
tagttttgttcagacctgaatggac

SEQ ID NO: 2501920 - DNA, 25 bp, Homo sapien
taaaggagacaattcgaacaacagt

SEQ ID NO: 2501921 - DNA, 25 bp, Homo sapien
gagacaattcgaacaacagtaatgt

SEQ ID NO: 2501922 - DNA, 25 bp, Homo sapien
ttcagacctgaatggactaaaggag

SEQ ID NO: 2501923 - DNA, 25 bp, Homo sapien
cagagaaaacaattcgttcagctag

SEQ ID NO: 2501924 - DNA, 25 bp, Homo sapien
gttcagctagatccaacagtgctct

SEQ ID NO: 2501925 - DNA, 25 bp, Homo sapien
tagatccaacagtgctctgtgcagc

SEQ ID NO: 2501926 - DNA, 25 bp, Homo sapien
gaaaacaattcgttcagctagatcc

SEQ ID NO: 2501927 - DNA, 25 bp, Homo sapien
cccaagctttccctactgaaaggag

SEQ ID NO: 2501928 - DNA, 25 bp, Homo sapien
gcagcttgctgccagagggacaaaa

SEQ ID NO: 2501929 - DNA, 25 bp, Homo sapien
caggcttaaatccagtgggagagga

SEQ ID NO: 2501930 - DNA, 25 bp, Homo sapien
gataatgggctaagctggttgcagc

SEQ ID NO: 2501931 - DNA, 25 bp, Homo sapien
ccatttatgatactagctgcaactc

SEQ ID NO: 2501932 - DNA, 25 bp, Homo sapien
ttgttgtgttaagctatattccttc

SEQ ID NO: 2501933 - DNA, 25 bp, Homo sapien
ctagctgcaactctgtcatatatgg

SEQ ID NO: 2501934 - DNA, 25 bp, Homo sapien
gtgggcatccttggcacgctttctg

SEQ ID NO: 2501935 - DNA, 25 bp, Homo sapien
tagagaggccctaattaaaattcca

SEQ ID NO: 2501936 - DNA, 25 bp, Homo sapien
taagtggccatgcactatgtctaca

SEQ ID NO: 2501937 - DNA, 25 bp, Homo sapien
taaaatatcaccaggaaactagcct

SEQ ID NO: 2501938 - DNA, 25 bp, Homo sapien
aatgctagcctagcatgactttggc

SEQ ID NO: 2501939 - DNA, 25 bp, Homo sapien
aaaaagcattagcttgcattgtagc

SEQ ID NO: 2501940 - DNA, 25 bp, Homo sapien
aaagcattagcttgcattgtagctt

SEQ ID NO: 2501941 - DNA, 25 bp, Homo sapien
taaccaagaagtgatagcactacta

SEQ ID NO: 2501942 - DNA, 25 bp, Homo sapien
ttgttttaaccaagaagtgatagca

SEQ ID NO: 2501943 - DNA, 25 bp, Homo sapien
gcttcaaatagcaggacacttgtca

SEQ ID NO: 2501944 - DNA, 25 bp, Homo sapien
tgtattttgatgtcaggaagccttt

SEQ ID NO: 2501945 - DNA, 25 bp, Homo sapien
tagtcctgtgacaagccatattgaa

SEQ ID NO: 2501946 - DNA, 25 bp, Homo sapien
ctcaagataatagacatgtaaggac

SEQ ID NO: 2501947 - DNA, 25 bp, Homo sapien
tagagatagcctttctcacgcagaa

SEQ ID NO: 2501948 - DNA, 25 bp, Homo sapien
gtagagatagcctttctcacgcaga

SEQ ID NO: 2501949 - DNA, 25 bp, Homo sapien
tgtagagatagcctttctcacgcag

SEQ ID NO: 2501950 - DNA, 25 bp, Homo sapien
ttattctgattgtctatcaaaagag

SEQ ID NO: 2501951 - DNA, 25 bp, Homo sapien
gataatctatgggaaaattataggg

SEQ ID NO: 2501952 - DNA, 25 bp, Homo sapien
tctagcagcagcagataatctatgg

SEQ ID NO: 2501953 - DNA, 25 bp, Homo sapien
gagaattacctctgtacatcagcaa

SEQ ID NO: 2501954 - DNA, 25 bp, Homo sapien
tatggttcggataattgttctaccc

SEQ ID NO: 2501955 - DNA, 25 bp, Homo sapien
tgacatttagatttccagaagttag

SEQ ID NO: 2501956 - DNA, 25 bp, Homo sapien
ctaccccttgctggtaaagtgacat

SEQ ID NO: 2501957 - DNA, 25 bp, Homo sapien
aagtgacatttagatttccagaagt

SEQ ID NO: 2501958 - DNA, 25 bp, Homo sapien
attgattgattgaactgaagctcat

SEQ ID NO: 2501959 - DNA, 25 bp, Homo sapien
tgagcttctgggaattaataacacc

SEQ ID NO: 2501960 - DNA, 25 bp, Homo sapien
tctgcaagtgaatccaaaggccgaa

SEQ ID NO: 2501961 - DNA, 25 bp, Homo sapien
tggcaacttattagacagacatggc

SEQ ID NO: 2501962 - DNA, 25 bp, Homo sapien
taaatcatggatgtaactgagcaac

SEQ ID NO: 2501963 - DNA, 25 bp, Homo sapien
caaccttgctatagcgttttctgca

SEQ ID NO: 2501964 - DNA, 25 bp, Homo sapien
tctgcagctcttgtttgaaagacag

SEQ ID NO: 2501965 - DNA, 25 bp, Homo sapien
gaaagacagatccacagcagctttg

SEQ ID NO: 2501966 - DNA, 25 bp, Homo sapien
gcagctttgtgcatacaagtgatct

SEQ ID NO: 2501967 - DNA, 25 bp, Homo sapien
gaagtttgactgtattgtgccccat

SEQ ID NO: 2501968 - DNA, 25 bp, Homo sapien
tcatgaagtttgactgtattgtgcc

SEQ ID NO: 2501969 - DNA, 25 bp, Homo sapien
atgaagtttgactgtattgtgcccc

SEQ ID NO: 2501970 - DNA, 25 bp, Homo sapien
tttcatgaagtttgactgtattgtg

SEQ ID NO: 2501971 - DNA, 25 bp, Homo sapien
agtggtactttcagcagaactccct

SEQ ID NO: 2501972 - DNA, 25 bp, Homo sapien
ttcagcagaactccctcctgcttta

SEQ ID NO: 2501973 - DNA, 25 bp, Homo sapien
ctagattgaattcagtggtactttc

SEQ ID NO: 2501974 - DNA, 25 bp, Homo sapien
ctttcagcagaactccctcctgctt

SEQ ID NO: 2501975 - DNA, 25 bp, Homo sapien
tttgtcaatgcgaggcacatgccca

SEQ ID NO: 2501976 - DNA, 25 bp, Homo sapien
gcggctgaaagggatataccattaa

SEQ ID NO: 2501977 - DNA, 25 bp, Homo sapien
ggcacatgcccaattttaggcggct

SEQ ID NO: 2501978 - DNA, 25 bp, Homo sapien
aatcagatttgtcaatgcgaggcac

SEQ ID NO: 2501979 - DNA, 25 bp, Homo sapien
tatatcaactgttggattgaaaagt

SEQ ID NO: 2501980 - DNA, 25 bp, Homo sapien
tatcaactgttggattgaaaagttg

SEQ ID NO: 2501981 - DNA, 25 bp, Homo sapien
atatcaactgttggattgaaaagtt

SEQ ID NO: 2501982 - DNA, 25 bp, Homo sapien
agaagttgaccccctgaataggcca

SEQ ID NO: 2501983 - DNA, 25 bp, Homo sapien
gaagaagttgaccccctgaataggc

SEQ ID NO: 2501984 - DNA, 25 bp, Homo sapien
gaagttgaccccctgaataggccaa

SEQ ID NO: 2501985 - DNA, 25 bp, Homo sapien
agttgaccccctgaataggccaata

SEQ ID NO: 2501986 - DNA, 25 bp, Homo sapien
gctagcagggacactcagtatttcc

SEQ ID NO: 2501987 - DNA, 25 bp, Homo sapien
ggctagcagggacactcagtatttc

SEQ ID NO: 2501988 - DNA, 25 bp, Homo sapien
agaggctagcagggacactcagtat

SEQ ID NO: 2501989 - DNA, 25 bp, Homo sapien
gaggctagcagggacactcagtatt

SEQ ID NO: 2501990 - DNA, 25 bp, Homo sapien
tccagaacattatctttcaaacttg

SEQ ID NO: 2501991 - DNA, 25 bp, Homo sapien
attgcttatgtttatagcaaccact

SEQ ID NO: 2501992 - DNA, 25 bp, Homo sapien
ttatagcaaccactatgtcctcctc

SEQ ID NO: 2501993 - DNA, 25 bp, Homo sapien
cagaacattatctttcaaacttgaa

SEQ ID NO: 2501994 - DNA, 25 bp, Homo sapien
catattgctgttgtgtattgcggtg

SEQ ID NO: 2501995 - DNA, 25 bp, Homo sapien
tctgggacgcttattaaagaaactg

SEQ ID NO: 2501996 - DNA, 25 bp, Homo sapien
gaatcttttgctcttgacttatacg

SEQ ID NO: 2501997 - DNA, 25 bp, Homo sapien
taaacaggaagcatctttcaagatc

SEQ ID NO: 2501998 - DNA, 25 bp, Homo sapien
ctgtggtgatgcagtgcctgtcaag

SEQ ID NO: 2501999 - DNA, 25 bp, Homo sapien
tgcacccggctgaatgcttgtgatt

SEQ ID NO: 2502000 - DNA, 25 bp, Homo sapien
ggttttggcatcatgatgatactgt

SEQ ID NO: 2502001 - DNA, 25 bp, Homo sapien
gaattttcacattgatcttcatcgg

SEQ ID NO: 2502002 - DNA, 25 bp, Homo sapien
ttggcatcatgatgatactgtcctc

SEQ ID NO: 2502003 - DNA, 25 bp, Homo sapien
gatcttcatcggagatactggcctg

SEQ ID NO: 2502004 - DNA, 25 bp, Homo sapien
gtcaatattgttatgggttaatttg

SEQ ID NO: 2502005 - DNA, 25 bp, Homo sapien
aggtcaatattgttatgggttaatt

SEQ ID NO: 2502006 - DNA, 25 bp, Homo sapien
gaatctttggctagcaagtttagca

SEQ ID NO: 2502007 - DNA, 25 bp, Homo sapien
aatctttggctagcaagtttagcat

SEQ ID NO: 2502008 - DNA, 25 bp, Homo sapien
aagaatctttggctagcaagtttag

SEQ ID NO: 2502009 - DNA, 25 bp, Homo sapien
agaagaatctttggctagcaagttt

SEQ ID NO: 2502010 - DNA, 25 bp, Homo sapien
ggagctagggaagactgaactatca

SEQ ID NO: 2502011 - DNA, 25 bp, Homo sapien
gagctagggaagactgaactatcat

SEQ ID NO: 2502012 - DNA, 25 bp, Homo sapien
gggagctagggaagactgaactatc

SEQ ID NO: 2502013 - DNA, 25 bp, Homo sapien
ggggagctagggaagactgaactat

SEQ ID NO: 2502014 - DNA, 25 bp, Homo sapien
ccatccaagtagaatgtaacagcag

SEQ ID NO: 2502015 - DNA, 25 bp, Homo sapien
caagtagaatgtaacagcagctgag

SEQ ID NO: 2502016 - DNA, 25 bp, Homo sapien
agtagaatgtaacagcagctgagaa

SEQ ID NO: 2502017 - DNA, 25 bp, Homo sapien
tccaagtagaatgtaacagcagctg

SEQ ID NO: 2502018 - DNA, 25 bp, Homo sapien
tgaaatgaggtatatcttgtcaaaa

SEQ ID NO: 2502019 - DNA, 25 bp, Homo sapien
cttgtcaaaatttagacaaatggga

SEQ ID NO: 2502020 - DNA, 25 bp, Homo sapien
ctagttcccatatgactgaactgaa

SEQ ID NO: 2502021 - DNA, 25 bp, Homo sapien
tcaaaatttagacaaatgggaagat

SEQ ID NO: 2502022 - DNA, 25 bp, Homo sapien
cattaaccaggtaagtgtgcagatg

SEQ ID NO: 2502023 - DNA, 25 bp, Homo sapien
aacgaacattaaccaggtaagtgtg

SEQ ID NO: 2502024 - DNA, 25 bp, Homo sapien
accaggtaagtgtgcagatgtaaaa

SEQ ID NO: 2502025 - DNA, 25 bp, Homo sapien
agtgtgcagatgtaaaaatccaata

SEQ ID NO: 2502026 - DNA, 25 bp, Homo sapien
tatttcatgctgatctggtaggaga

SEQ ID NO: 2502027 - DNA, 25 bp, Homo sapien
ccagggcttagtttatgtcatgagg

SEQ ID NO: 2502028 - DNA, 25 bp, Homo sapien
tgatgctactccagattccagggct

SEQ ID NO: 2502029 - DNA, 25 bp, Homo sapien
tatgtgactccccagtataggcatc

SEQ ID NO: 2502030 - DNA, 25 bp, Homo sapien
ctgtctttcagtttgcctgcccctg

SEQ ID NO: 2502031 - DNA, 25 bp, Homo sapien
ctgtggtatgtttcacactgtcttt

SEQ ID NO: 2502032 - DNA, 25 bp, Homo sapien
ctttcagtttgcctgcccctgtcat

SEQ ID NO: 2502033 - DNA, 25 bp, Homo sapien
gtctttcagtttgcctgcccctgtc

SEQ ID NO: 2502034 - DNA, 25 bp, Homo sapien
tagatcccgggttgcattctgttcc

SEQ ID NO: 2502035 - DNA, 25 bp, Homo sapien
tgatggagagtttcattccctgggc

SEQ ID NO: 2502036 - DNA, 25 bp, Homo sapien
tcttaagcgacagagagcattttca

SEQ ID NO: 2502037 - DNA, 25 bp, Homo sapien
aatgtgacagctctctagatcccgg

SEQ ID NO: 2502038 - DNA, 25 bp, Homo sapien
ccaggcgaggcccaacaaacaccat

SEQ ID NO: 2502039 - DNA, 25 bp, Homo sapien
gggaaagactgatgcttcaccaaac

SEQ ID NO: 2502040 - DNA, 25 bp, Homo sapien
aagtctgtcattggattgctccgcc

SEQ ID NO: 2502041 - DNA, 25 bp, Homo sapien
agtctgtcattggattgctccgcca

SEQ ID NO: 2502042 - DNA, 25 bp, Homo sapien
ctgtcattggattgctccgccacat

SEQ ID NO: 2502043 - DNA, 25 bp, Homo sapien
taattccatacccttgagtgtgggc

SEQ ID NO: 2502044 - DNA, 25 bp, Homo sapien
taaggatttgtagcagacagactgc

SEQ ID NO: 2502045 - DNA, 25 bp, Homo sapien
tagataactccatgaccgaagaggg

SEQ ID NO: 2502046 - DNA, 25 bp, Homo sapien
gctgctccaatgaagccaatgtgag

SEQ ID NO: 2502047 - DNA, 25 bp, Homo sapien
cacagcctctttaatctgttgcttt

SEQ ID NO: 2502048 - DNA, 25 bp, Homo sapien
cattaggcccgaacagggtgttgac

SEQ ID NO: 2502049 - DNA, 25 bp, Homo sapien
tggccttaacatccaaaagcgtgtt

SEQ ID NO: 2502050 - DNA, 25 bp, Homo sapien
tctggagctgcagtatcttgggcca

SEQ ID NO: 2502051 - DNA, 25 bp, Homo sapien
tgatgtgcagatcctctttattttt

SEQ ID NO: 2502052 - DNA, 25 bp, Homo sapien
gtgatgtgcagatcctctttatttt

SEQ ID NO: 2502053 - DNA, 25 bp, Homo sapien
gaaagctgctgcgtaaatgcaaagt

SEQ ID NO: 2502054 - DNA, 25 bp, Homo sapien
tcccaattccctaagacaatcagga

SEQ ID NO: 2502055 - DNA, 25 bp, Homo sapien
caaagtaataatggatagtggctgg

SEQ ID NO: 2502056 - DNA, 25 bp, Homo sapien
aactacagtactttaggctccttag

SEQ ID NO: 2502057 - DNA, 25 bp, Homo sapien
gaagtcaaggaaactactaggccag

SEQ ID NO: 2502058 - DNA, 25 bp, Homo sapien
catagatgaatttacttgagaggac

SEQ ID NO: 2502059 - DNA, 25 bp, Homo sapien
catttagtcttttgtataggtgcac

SEQ ID NO: 2502060 - DNA, 25 bp, Homo sapien
tctataaagctatcatcgtggaaag

SEQ ID NO: 2502061 - DNA, 25 bp, Homo sapien
cattcaaagttgcatagcttagcca

SEQ ID NO: 2502062 - DNA, 25 bp, Homo sapien
tatgatgctaggctttatatagtca

SEQ ID NO: 2502063 - DNA, 25 bp, Homo sapien
atacactcatagagggatctgcaag

SEQ ID NO: 2502064 - DNA, 25 bp, Homo sapien
tctaagccaaactattgttgctggg

SEQ ID NO: 2502065 - DNA, 25 bp, Homo sapien
cattctcattcgatgaaccatatca

SEQ ID NO: 2502066 - DNA, 25 bp, Homo sapien
tattttctcgtgtgcattctcattc

SEQ ID NO: 2502067 - DNA, 25 bp, Homo sapien
gaaccatatcatggagcccttgatg

SEQ ID NO: 2502068 - DNA, 25 bp, Homo sapien
tcattcgatgaaccatatcatggag

SEQ ID NO: 2502069 - DNA, 25 bp, Homo sapien
tgtccctcctgacggatagcgggag

SEQ ID NO: 2502070 - DNA, 25 bp, Homo sapien
tagcgggagctgtagaaaggttgtc

SEQ ID NO: 2502071 - DNA, 25 bp, Homo sapien
tgaatgtctaagcaataaaggatcc

SEQ ID NO: 2502072 - DNA, 25 bp, Homo sapien
gggttgtccctcctgacggatagcg

SEQ ID NO: 2502073 - DNA, 25 bp, Homo sapien
gtcatttccaattctttttgtctca

SEQ ID NO: 2502074 - DNA, 25 bp, Homo sapien
catttccaattctttttgtctcaca

SEQ ID NO: 2502075 - DNA, 25 bp, Homo sapien
tttccaattctttttgtctcacatt

SEQ ID NO: 2502076 - DNA, 25 bp, Homo sapien
tttgtcatttccaattctttttgtc

SEQ ID NO: 2502077 - DNA, 25 bp, Homo sapien
tctgtagcaccccaggttataacaa

SEQ ID NO: 2502078 - DNA, 25 bp, Homo sapien
tgtatccctcatctccagtcttagg

SEQ ID NO: 2502079 - DNA, 25 bp, Homo sapien
aagcctcgtcgtcttatctgctcag

SEQ ID NO: 2502080 - DNA, 25 bp, Homo sapien
gcaccccaggttataacaatccttg

SEQ ID NO: 2502081 - DNA, 25 bp, Homo sapien
gttaacactgatatactctctctcc

SEQ ID NO: 2502082 - DNA, 25 bp, Homo sapien
tcggtgatgttaacactgatatact

SEQ ID NO: 2502083 - DNA, 25 bp, Homo sapien
gatgttaacactgatatactctctc

SEQ ID NO: 2502084 - DNA, 25 bp, Homo sapien
ggtgatgttaacactgatatactct

SEQ ID NO: 2502085 - DNA, 25 bp, Homo sapien
tccaaggggtgatctacaagcatac

SEQ ID NO: 2502086 - DNA, 25 bp, Homo sapien
caaggggtgatctacaagcatacag

SEQ ID NO: 2502087 - DNA, 25 bp, Homo sapien
ccaaggggtgatctacaagcataca

SEQ ID NO: 2502088 - DNA, 25 bp, Homo sapien
tcgttagacggtttgtgtctgcctt

SEQ ID NO: 2502089 - DNA, 25 bp, Homo sapien
cctcttcgttagacggtttgtgtct

SEQ ID NO: 2502090 - DNA, 25 bp, Homo sapien
acatccctcttcgttagacggtttg

SEQ ID NO: 2502091 - DNA, 25 bp, Homo sapien
cttcgttagacggtttgtgtctgcc

SEQ ID NO: 2502092 - DNA, 25 bp, Homo sapien
aaaaggaaagatatgggcagtggaa

SEQ ID NO: 2502093 - DNA, 25 bp, Homo sapien
gcagtggaatatggagcatccttgc

SEQ ID NO: 2502094 - DNA, 25 bp, Homo sapien
gatttatcgaggtcatacactatgt

SEQ ID NO: 2502095 - DNA, 25 bp, Homo sapien
acactatgtttctaatgtagagcat

SEQ ID NO: 2502096 - DNA, 25 bp, Homo sapien
gggctcaaagcatggcccaaaccag

SEQ ID NO: 2502097 - DNA, 25 bp, Homo sapien
acaggttatcaaagagagacaagag

SEQ ID NO: 2502098 - DNA, 25 bp, Homo sapien
ccaggttacagtcagtaaatgaggt

SEQ ID NO: 2502099 - DNA, 25 bp, Homo sapien
taaatgaggttacaatggcaaaaca

SEQ ID NO: 2502100 - DNA, 25 bp, Homo sapien
tgggtcttgcatgcattttgggccg

SEQ ID NO: 2502101 - DNA, 25 bp, Homo sapien
tgtctacttttaccgaaaatggcat

SEQ ID NO: 2502102 - DNA, 25 bp, Homo sapien
cctgttgtgggtcttgcatgcattt

SEQ ID NO: 2502103 - DNA, 25 bp, Homo sapien
cattttgggccgataaaggttgtgg

SEQ ID NO: 2502104 - DNA, 25 bp, Homo sapien
ggaggctctcgataggaattgacat

SEQ ID NO: 2502105 - DNA, 25 bp, Homo sapien
gcatgtgctactccaccactgtggg

SEQ ID NO: 2502106 - DNA, 25 bp, Homo sapien
cgataggaattgacatggatgctgg

SEQ ID NO: 2502107 - DNA, 25 bp, Homo sapien
cactgtgggctggatacggtgctaa

SEQ ID NO: 2502108 - DNA, 25 bp, Homo sapien
ccataagatatcagcaggtagatac

SEQ ID NO: 2502109 - DNA, 25 bp, Homo sapien
agatatattcttttcgtagtgacat

SEQ ID NO: 2502110 - DNA, 25 bp, Homo sapien
cagcaggtagatacaagatatattc

SEQ ID NO: 2502111 - DNA, 25 bp, Homo sapien
cttttttctcccataagatatcagc

SEQ ID NO: 2502112 - DNA, 25 bp, Homo sapien
ctctttttttgcatataaacagagc

SEQ ID NO: 2502113 - DNA, 25 bp, Homo sapien
gacgacgtgattgtacatctagaaa

SEQ ID NO: 2502114 - DNA, 25 bp, Homo sapien
ggctctttttttgcatataaacaga

SEQ ID NO: 2502115 - DNA, 25 bp, Homo sapien
cgggctctttttttgcatataaaca

SEQ ID NO: 2502116 - DNA, 25 bp, Homo sapien
tatatgcaatcacatcaggaacttc

SEQ ID NO: 2502117 - DNA, 25 bp, Homo sapien
ccagccatcaactttttcatatatg

SEQ ID NO: 2502118 - DNA, 25 bp, Homo sapien
tcatctgcatgtgtcaaaaggaaaa

SEQ ID NO: 2502119 - DNA, 25 bp, Homo sapien
atgtaaaagatgtatatttcatgac

SEQ ID NO: 2502120 - DNA, 25 bp, Homo sapien
catcttacctctgaactaaaacagt

SEQ ID NO: 2502121 - DNA, 25 bp, Homo sapien
tcttttcaggcgtgcaccctctcca

SEQ ID NO: 2502122 - DNA, 25 bp, Homo sapien
tgtacttcggtcaccttcttttcag

SEQ ID NO: 2502123 - DNA, 25 bp, Homo sapien
cttattctcatgctgtggtgtacac

SEQ ID NO: 2502124 - DNA, 25 bp, Homo sapien
ggatttactcacaaatacccaggga

SEQ ID NO: 2502125 - DNA, 25 bp, Homo sapien
tcaaacctgatatcggagaaggaat

SEQ ID NO: 2502126 - DNA, 25 bp, Homo sapien
cagattcatgcagactcaagttaag

SEQ ID NO: 2502127 - DNA, 25 bp, Homo sapien
tagaatagaatgcacaatccacatg

SEQ ID NO: 2502128 - DNA, 25 bp, Homo sapien
ttggcaacaggtagattgccaactt

SEQ ID NO: 2502129 - DNA, 25 bp, Homo sapien
caacaggtagattgccaacttgatt

SEQ ID NO: 2502130 - DNA, 25 bp, Homo sapien
agtatttcaacaaagaatttcatct

SEQ ID NO: 2502131 - DNA, 25 bp, Homo sapien
ggcaacaggtagattgccaacttga

SEQ ID NO: 2502132 - DNA, 25 bp, Homo sapien
cataactgaaagtttccgaaggcct

SEQ ID NO: 2502133 - DNA, 25 bp, Homo sapien
tggactaatacattgcctgacttac

SEQ ID NO: 2502134 - DNA, 25 bp, Homo sapien
ccccagaagtcctatgcttcctgaa

SEQ ID NO: 2502135 - DNA, 25 bp, Homo sapien
tcaccttccgtcataactgaaagtt

SEQ ID NO: 2502136 - DNA, 25 bp, Homo sapien
cttcttgtaatatcttgctaaaggc

SEQ ID NO: 2502137 - DNA, 25 bp, Homo sapien
ctcatattctagttcttcataacaa

SEQ ID NO: 2502138 - DNA, 25 bp, Homo sapien
tattagccaacaatggctctcatat

SEQ ID NO: 2502139 - DNA, 25 bp, Homo sapien
ttgctaaaggcagccaatattagcc

SEQ ID NO: 2502140 - DNA, 25 bp, Homo sapien
tttggggaacacgaagattgccagg

SEQ ID NO: 2502141 - DNA, 25 bp, Homo sapien
cgtttggggaacacgaagattgcca

SEQ ID NO: 2502142 - DNA, 25 bp, Homo sapien
aacacgaagattgccagggacagca

SEQ ID NO: 2502143 - DNA, 25 bp, Homo sapien
gggaacacgaagattgccagggaca

SEQ ID NO: 2502144 - DNA, 25 bp, Homo sapien
tcttttttttttcttgtgccagtca

SEQ ID NO: 2502145 - DNA, 25 bp, Homo sapien
cttttttttttcttgtgccagtcat

SEQ ID NO: 2502146 - DNA, 25 bp, Homo sapien
tcacacagtgtagcatagaactttg

SEQ ID NO: 2502147 - DNA, 25 bp, Homo sapien
catagaactttgcatatttttcgct

SEQ ID NO: 2502148 - DNA, 25 bp, Homo sapien
aatatgaacgatttcctgatgataa

SEQ ID NO: 2502149 - DNA, 25 bp, Homo sapien
catatttttcgcttaatatgaacga

SEQ ID NO: 2502150 - DNA, 25 bp, Homo sapien
catgtggtaagatccgtctggctgc

SEQ ID NO: 2502151 - DNA, 25 bp, Homo sapien
ggtaagatccgtctggctgcttttc

SEQ ID NO: 2502152 - DNA, 25 bp, Homo sapien
ccaggcatgtggtaagatccgtctg

SEQ ID NO: 2502153 - DNA, 25 bp, Homo sapien
ggcatgtggtaagatccgtctggct

SEQ ID NO: 2502154 - DNA, 25 bp, Homo sapien
gcaatttgttcgtggaaccagtccg

SEQ ID NO: 2502155 - DNA, 25 bp, Homo sapien
tggaaccagtccgtagaaagctgcc

SEQ ID NO: 2502156 - DNA, 25 bp, Homo sapien
tgctctcagttcttctacaatataa

SEQ ID NO: 2502157 - DNA, 25 bp, Homo sapien
tgccgtcaagatgggaatataccac

SEQ ID NO: 2502158 - DNA, 25 bp, Homo sapien
ggtattcactgtaatcatcttcaaa

SEQ ID NO: 2502159 - DNA, 25 bp, Homo sapien
ttcatctaaataccgaggtggtagg

SEQ ID NO: 2502160 - DNA, 25 bp, Homo sapien
tgttctggaactctctggctgtatt

SEQ ID NO: 2502161 - DNA, 25 bp, Homo sapien
catcatcaatccattggaaaagtct

SEQ ID NO: 2502162 - DNA, 25 bp, Homo sapien
tcctgactctaaggaaacctctaaa

SEQ ID NO: 2502163 - DNA, 25 bp, Homo sapien
ttttcttgactctactaaggacttc

SEQ ID NO: 2502164 - DNA, 25 bp, Homo sapien
taagttctacatagataagcatgtc

SEQ ID NO: 2502165 - DNA, 25 bp, Homo sapien
taactgtaagcacaatctcatcatc

SEQ ID NO: 2502166 - DNA, 25 bp, Homo sapien
ccagctcctcatgaaacaagtcgct

SEQ ID NO: 2502167 - DNA, 25 bp, Homo sapien
gctcctcatgaaacaagtcgctctc

SEQ ID NO: 2502168 - DNA, 25 bp, Homo sapien
tcctcatgaaacaagtcgctctcat

SEQ ID NO: 2502169 - DNA, 25 bp, Homo sapien
ctcatgaaacaagtcgctctcatct

SEQ ID NO: 2502170 - DNA, 25 bp, Homo sapien
ttcatcgttgtcaaaggggctgctg

SEQ ID NO: 2502171 - DNA, 25 bp, Homo sapien
aagcaacaactcacccagctcaaag

SEQ ID NO: 2502172 - DNA, 25 bp, Homo sapien
aactcacccagctcaaaggtgacaa

SEQ ID NO: 2502173 - DNA, 25 bp, Homo sapien
aacctcttcttcatcgttgtcaaag

SEQ ID NO: 2502174 - DNA, 25 bp, Homo sapien
ctcaatgagttcccagaagtggttc

SEQ ID NO: 2502175 - DNA, 25 bp, Homo sapien
caatgagttcccagaagtggttcct

SEQ ID NO: 2502176 - DNA, 25 bp, Homo sapien
tcaatgagttcccagaagtggttcc

SEQ ID NO: 2502177 - DNA, 25 bp, Homo sapien
tcattgggccgggtatctgcttgat

SEQ ID NO: 2502178 - DNA, 25 bp, Homo sapien
cattgggccgggtatctgcttgatg

SEQ ID NO: 2502179 - DNA, 25 bp, Homo sapien
acggccatcagggtacacatgctta

SEQ ID NO: 2502180 - DNA, 25 bp, Homo sapien
gtacacatgcttataaaaaccgttc

SEQ ID NO: 2502181 - DNA, 25 bp, Homo sapien
cacatgcttataaaaaccgttccct

SEQ ID NO: 2502182 - DNA, 25 bp, Homo sapien
cagggtacacatgcttataaaaacc

SEQ ID NO: 2502183 - DNA, 25 bp, Homo sapien
tgcagctctcacacaccatttcctc

SEQ ID NO: 2502184 - DNA, 25 bp, Homo sapien
gcagctctcacacaccatttcctcg

SEQ ID NO: 2502185 - DNA, 25 bp, Homo sapien
tctcatgggcctcaaagcatgattt

SEQ ID NO: 2502186 - DNA, 25 bp, Homo sapien
tttctcatgggcctcaaagcatgat

SEQ ID NO: 2502187 - DNA, 25 bp, Homo sapien
tcatgggcctcaaagcatgatttta

SEQ ID NO: 2502188 - DNA, 25 bp, Homo sapien
caaatgagagctccctgtctttctc

SEQ ID NO: 2502189 - DNA, 25 bp, Homo sapien
tctgggcagcatccatcagatgcag

SEQ ID NO: 2502190 - DNA, 25 bp, Homo sapien
gggcagcatccatcagatgcaggac

SEQ ID NO: 2502191 - DNA, 25 bp, Homo sapien
ctctgggcagcatccatcagatgca

SEQ ID NO: 2502192 - DNA, 25 bp, Homo sapien
tgggcagcatccatcagatgcagga

SEQ ID NO: 2502193 - DNA, 25 bp, Homo sapien
cacacaagttctcccgatatcggca

SEQ ID NO: 2502194 - DNA, 25 bp, Homo sapien
gtcacacgaatctccatatacacac

SEQ ID NO: 2502195 - DNA, 25 bp, Homo sapien
gaatctccatatacacacaagttct

SEQ ID NO: 2502196 - DNA, 25 bp, Homo sapien
tccatatacacacaagttctcccga

SEQ ID NO: 2502197 - DNA, 25 bp, Homo sapien
tctttgtttccacggcagtttgctc

SEQ ID NO: 2502198 - DNA, 25 bp, Homo sapien
cttgactcagcttcacccgtattca

SEQ ID NO: 2502199 - DNA, 25 bp, Homo sapien
gctcctacagttacaaagtttgaat

SEQ ID NO: 2502200 - DNA, 25 bp, Homo sapien
caggaaggcgcagtgcggccacagt

SEQ ID NO: 2502201 - DNA, 25 bp, Homo sapien
aactcttgtacactacattatacgg

SEQ ID NO: 2502202 - DNA, 25 bp, Homo sapien
catgcaacttgcaacagttatctcc

SEQ ID NO: 2502203 - DNA, 25 bp, Homo sapien
tcagagaggtcatgcaacttgcaac

SEQ ID NO: 2502204 - DNA, 25 bp, Homo sapien
tcttgtacactacattatacggact

SEQ ID NO: 2502205 - DNA, 25 bp, Homo sapien
gggacagaatggtgactgtggggat

SEQ ID NO: 2502206 - DNA, 25 bp, Homo sapien
ggacagaatggtgactgtggggatc

SEQ ID NO: 2502207 - DNA, 25 bp, Homo sapien
ctggggacagaatggtgactgtggg

SEQ ID NO: 2502208 - DNA, 25 bp, Homo sapien
tggggacagaatggtgactgtgggg

SEQ ID NO: 2502209 - DNA, 25 bp, Homo sapien
atgttgtggctgttggtctgagagc

SEQ ID NO: 2502210 - DNA, 25 bp, Homo sapien
gccactgccgcccctgatgttgtgg

SEQ ID NO: 2502211 - DNA, 25 bp, Homo sapien
cactgccgcccctgatgttgtggct

SEQ ID NO: 2502212 - DNA, 25 bp, Homo sapien
tgtggctgttggtctgagagctgca

SEQ ID NO: 2502213 - DNA, 25 bp, Homo sapien
ttcttcgaatactcagtgtttccag

SEQ ID NO: 2502214 - DNA, 25 bp, Homo sapien
tgtatccagagataaactgtctggt

SEQ ID NO: 2502215 - DNA, 25 bp, Homo sapien
ttcaccatccacaagtagtgtatcc

SEQ ID NO: 2502216 - DNA, 25 bp, Homo sapien
atatcaatgttatttcttcgaatac

SEQ ID NO: 2502217 - DNA, 25 bp, Homo sapien
catctagtgttgtctacaactatta

SEQ ID NO: 2502218 - DNA, 25 bp, Homo sapien
tattatccaacactcaaggcccaac

SEQ ID NO: 2502219 - DNA, 25 bp, Homo sapien
aaggcccaactccaatcgtacctca

SEQ ID NO: 2502220 - DNA, 25 bp, Homo sapien
cgtacctcacccatgaagtatagca

SEQ ID NO: 2502221 - DNA, 25 bp, Homo sapien
gctgggagctgaacacgatatctga

SEQ ID NO: 2502222 - DNA, 25 bp, Homo sapien
ggcagtagagctcaaagaaatccct

SEQ ID NO: 2502223 - DNA, 25 bp, Homo sapien
catttagcttccactgtagggcgca

SEQ ID NO: 2502224 - DNA, 25 bp, Homo sapien
tatctgagagaaatgcccgttagga

SEQ ID NO: 2502225 - DNA, 25 bp, Homo sapien
accaggacaggaagagtaaacaaga

SEQ ID NO: 2502226 - DNA, 25 bp, Homo sapien
tagaatagcagagtgccattctgga

SEQ ID NO: 2502227 - DNA, 25 bp, Homo sapien
agaattgtgagcatgaaccaggaca

SEQ ID NO: 2502228 - DNA, 25 bp, Homo sapien
taaacaagatcctcacggggactca

SEQ ID NO: 2502229 - DNA, 25 bp, Homo sapien
caagtttccaacatggctaccctcc

SEQ ID NO: 2502230 - DNA, 25 bp, Homo sapien
acatggctaccctccacattggagt

SEQ ID NO: 2502231 - DNA, 25 bp, Homo sapien
tggccttttgctcccatccaagttt

SEQ ID NO: 2502232 - DNA, 25 bp, Homo sapien
caacatggctaccctccacattgga

SEQ ID NO: 2502233 - DNA, 25 bp, Homo sapien
cagatagaccaatattcctcagagc

SEQ ID NO: 2502234 - DNA, 25 bp, Homo sapien
cagagcagcctcatatctatggaat

SEQ ID NO: 2502235 - DNA, 25 bp, Homo sapien
tacagcagaaatagacatcctcagg

SEQ ID NO: 2502236 - DNA, 25 bp, Homo sapien
cattccgctgtggttacaaatcaga

SEQ ID NO: 2502237 - DNA, 25 bp, Homo sapien
caggcttgacttcatgggcttacat

SEQ ID NO: 2502238 - DNA, 25 bp, Homo sapien
gcttgacttcatgggcttacatgat

SEQ ID NO: 2502239 - DNA, 25 bp, Homo sapien
tgacttcatgggcttacatgatcct

SEQ ID NO: 2502240 - DNA, 25 bp, Homo sapien
tgcaggcttgacttcatgggcttac

SEQ ID NO: 2502241 - DNA, 25 bp, Homo sapien
ctatgtggatgtcattgttatcttt

SEQ ID NO: 2502242 - DNA, 25 bp, Homo sapien
tgtggtcacatgatggttcatgatg

SEQ ID NO: 2502243 - DNA, 25 bp, Homo sapien
tggtcacatgatggttcatgatgct

SEQ ID NO: 2502244 - DNA, 25 bp, Homo sapien
atctgtggtcacatgatggttcatg

SEQ ID NO: 2502245 - DNA, 25 bp, Homo sapien
tctgtggtcacatgatggttcatga

SEQ ID NO: 2502246 - DNA, 25 bp, Homo sapien
tgctactcggatccactcatcaagg

SEQ ID NO: 2502247 - DNA, 25 bp, Homo sapien
gttgacactggtatcctgtgactgg

SEQ ID NO: 2502248 - DNA, 25 bp, Homo sapien
tgtgactggagatgctaccttggga

SEQ ID NO: 2502249 - DNA, 25 bp, Homo sapien
gattgcatcaagttgaacactggca

SEQ ID NO: 2502250 - DNA, 25 bp, Homo sapien
gtccacctcgccattgctgaagaga

SEQ ID NO: 2502251 - DNA, 25 bp, Homo sapien
cagtggctgaaatggtctctagaca

SEQ ID NO: 2502252 - DNA, 25 bp, Homo sapien
ttatcttccccaatgaaagggtgtc

SEQ ID NO: 2502253 - DNA, 25 bp, Homo sapien
tgctgaagagagacaaaactgatgg

SEQ ID NO: 2502254 - DNA, 25 bp, Homo sapien
gcatcaagagaacaatatgccttgg

SEQ ID NO: 2502255 - DNA, 25 bp, Homo sapien
atttcaacaagggcatcaagagaac

SEQ ID NO: 2502256 - DNA, 25 bp, Homo sapien
caagggcatcaagagaacaatatgc

SEQ ID NO: 2502257 - DNA, 25 bp, Homo sapien
agaacaatatgccttggagtgtccc

SEQ ID NO: 2502258 - DNA, 25 bp, Homo sapien
tatggcagagacgtacaaatacctg

SEQ ID NO: 2502259 - DNA, 25 bp, Homo sapien
tattcctctattcatggaccattga

SEQ ID NO: 2502260 - DNA, 25 bp, Homo sapien
tctctgtttgtcattgtagcctctg

SEQ ID NO: 2502261 - DNA, 25 bp, Homo sapien
gtagcctctgaggtaatcaatccct

SEQ ID NO: 2502262 - DNA, 25 bp, Homo sapien
gaaagagcacaatgtacttcctgca

SEQ ID NO: 2502263 - DNA, 25 bp, Homo sapien
tggagtaatgcacggaatgaattcc

SEQ ID NO: 2502264 - DNA, 25 bp, Homo sapien
tttggctatccactacataacatgg

SEQ ID NO: 2502265 - DNA, 25 bp, Homo sapien
cataaatacactggcagctgttggt

SEQ ID NO: 2502266 - DNA, 25 bp, Homo sapien
ttacttgctcccatttcttcttggc

SEQ ID NO: 2502267 - DNA, 25 bp, Homo sapien
tacttgctcccatttcttcttggct

SEQ ID NO: 2502268 - DNA, 25 bp, Homo sapien
cttttgctaattacttgccgtaaat

SEQ ID NO: 2502269 - DNA, 25 bp, Homo sapien
tcttttgctaattacttgccgtaaa

SEQ ID NO: 2502270 - DNA, 25 bp, Homo sapien
tttcttgtttagcgcactgatattt

SEQ ID NO: 2502271 - DNA, 25 bp, Homo sapien
ttattgcattatccccacagtatcc

SEQ ID NO: 2502272 - DNA, 25 bp, Homo sapien
tattattgcattatccccacagtat

SEQ ID NO: 2502273 - DNA, 25 bp, Homo sapien
tctattattgcattatccccacagt

SEQ ID NO: 2502274 - DNA, 25 bp, Homo sapien
ctctattattgcattatccccacag

SEQ ID NO: 2502275 - DNA, 25 bp, Homo sapien
ctagaggaacagactcatggcagct

SEQ ID NO: 2502276 - DNA, 25 bp, Homo sapien
tcctttcctccagtagtccatctgt

SEQ ID NO: 2502277 - DNA, 25 bp, Homo sapien
gaggaacagactcatggcagcttgt

SEQ ID NO: 2502278 - DNA, 25 bp, Homo sapien
gaacagactcatggcagcttgtgtt

SEQ ID NO: 2502279 - DNA, 25 bp, Homo sapien
aaggaattcgttttcgccaggctga

SEQ ID NO: 2502280 - DNA, 25 bp, Homo sapien
gctgaatcattatatgatgttgacg

SEQ ID NO: 2502281 - DNA, 25 bp, Homo sapien
tcgttttcgccaggctgaatcatta

SEQ ID NO: 2502282 - DNA, 25 bp, Homo sapien
cgccaggctgaatcattatatgatg

SEQ ID NO: 2502283 - DNA, 25 bp, Homo sapien
gaagtgacttccatgttcgcagtaa

SEQ ID NO: 2502284 - DNA, 25 bp, Homo sapien
tcctggaggaacaaagtgcagtgct

SEQ ID NO: 2502285 - DNA, 25 bp, Homo sapien
tctagggaggtgcaatctgaagtca

SEQ ID NO: 2502286 - DNA, 25 bp, Homo sapien
taattggtgtgatgcaataccgacc

SEQ ID NO: 2502287 - DNA, 25 bp, Homo sapien
tcaacgcgacagtcctgacagcatc

SEQ ID NO: 2502288 - DNA, 25 bp, Homo sapien
tataggatgcattctccgcatttcg

SEQ ID NO: 2502289 - DNA, 25 bp, Homo sapien
tttattgtaggacccatgcgtgggc

SEQ ID NO: 2502290 - DNA, 25 bp, Homo sapien
tgcgggaaggtgcattcaacgcgac

SEQ ID NO: 2502291 - DNA, 25 bp, Homo sapien
gttctgtggttcatcataaatccat

SEQ ID NO: 2502292 - DNA, 25 bp, Homo sapien
ctctgcattccagagttaggaaagt

SEQ ID NO: 2502293 - DNA, 25 bp, Homo sapien
tagcatttaatacatgcgttgtagg

SEQ ID NO: 2502294 - DNA, 25 bp, Homo sapien
tactagtcgggtagttagggaatgc

SEQ ID NO: 2502295 - DNA, 25 bp, Homo sapien
catgcgttgtaggtactagtcgggt

SEQ ID NO: 2502296 - DNA, 25 bp, Homo sapien
cttcatactgatattctcagtagca

SEQ ID NO: 2502297 - DNA, 25 bp, Homo sapien
ctctgtggaacataacagtcacctc

SEQ ID NO: 2502298 - DNA, 25 bp, Homo sapien
actccaagaaatatgaccctctgtg

SEQ ID NO: 2502299 - DNA, 25 bp, Homo sapien
aagcttcactttcatcgactccaag

SEQ ID NO: 2502300 - DNA, 25 bp, Homo sapien
ttcagttaaagcttcactttcatcg

SEQ ID NO: 2502301 - DNA, 25 bp, Homo sapien
ttttcaaaagcagcaatgtcagtct

SEQ ID NO: 2502302 - DNA, 25 bp, Homo sapien
tttgtcggaactgtaagactatctc

SEQ ID NO: 2502303 - DNA, 25 bp, Homo sapien
tttttatttcaccttgcctttcata

SEQ ID NO: 2502304 - DNA, 25 bp, Homo sapien
gcctttcatattggctaagttttgt

SEQ ID NO: 2502305 - DNA, 25 bp, Homo sapien
tgatgacaaaatatctggaggagta

SEQ ID NO: 2502306 - DNA, 25 bp, Homo sapien
ttcaggggtctttgtccataaacta

SEQ ID NO: 2502307 - DNA, 25 bp, Homo sapien
cttcaggggtctttgtccataaact

SEQ ID NO: 2502308 - DNA, 25 bp, Homo sapien
tcaggggtctttgtccataaactag

SEQ ID NO: 2502309 - DNA, 25 bp, Homo sapien
ggtggatgggtcgtgatatattttc

SEQ ID NO: 2502310 - DNA, 25 bp, Homo sapien
aaactaaaggatggtggatgggtcg

SEQ ID NO: 2502311 - DNA, 25 bp, Homo sapien
ctgaggtttcagaggttcttgactc

SEQ ID NO: 2502312 - DNA, 25 bp, Homo sapien
ctctgggactggagtggaattcctt

SEQ ID NO: 2502313 - DNA, 25 bp, Homo sapien
caaggtgttccagtatccccttctg

SEQ ID NO: 2502314 - DNA, 25 bp, Homo sapien
aaggtgttccagtatccccttctgg

SEQ ID NO: 2502315 - DNA, 25 bp, Homo sapien
ggtgttccagtatccccttctggga

SEQ ID NO: 2502316 - DNA, 25 bp, Homo sapien
ctgcaaggtgttccagtatcccctt

SEQ ID NO: 2502317 - DNA, 25 bp, Homo sapien
attcactggtttacactgtggtgtc

SEQ ID NO: 2502318 - DNA, 25 bp, Homo sapien
ttctgtatccacttcccagaaccaa

SEQ ID NO: 2502319 - DNA, 25 bp, Homo sapien
tacactgtggtgtcttctgtatcca

SEQ ID NO: 2502320 - DNA, 25 bp, Homo sapien
ggtttacactgtggtgtcttctgta

SEQ ID NO: 2502321 - DNA, 25 bp, Homo sapien
tgatcttcacacaaccaagaggctg

SEQ ID NO: 2502322 - DNA, 25 bp, Homo sapien
aaagatacagctgatcttcacacaa

SEQ ID NO: 2502323 - DNA, 25 bp, Homo sapien
gctacttggtggcaaaaataatcca

SEQ ID NO: 2502324 - DNA, 25 bp, Homo sapien
cgaggtttgctgtgataaaagatac

SEQ ID NO: 2502325 - DNA, 25 bp, Homo sapien
cagtgtcggaatcggcactgggaac

SEQ ID NO: 2502326 - DNA, 25 bp, Homo sapien
tctctccataatgagcacacagtgt

SEQ ID NO: 2502327 - DNA, 25 bp, Homo sapien
gcaaagtggatctaaacatttcctc

SEQ ID NO: 2502328 - DNA, 25 bp, Homo sapien
agtgtcactgccaagggcctcttca

SEQ ID NO: 2502329 - DNA, 25 bp, Homo sapien
aaaagaaatagcagtcattcccaac

SEQ ID NO: 2502330 - DNA, 25 bp, Homo sapien
ctttatgcatgtggaattaaaaaag

SEQ ID NO: 2502331 - DNA, 25 bp, Homo sapien
agaaatagcagtcattcccaacttc

SEQ ID NO: 2502332 - DNA, 25 bp, Homo sapien
aaaaaagaaatagcagtcattccca

SEQ ID NO: 2502333 - DNA, 25 bp, Homo sapien
tcctgttgacagtatattacgcaat

SEQ ID NO: 2502334 - DNA, 25 bp, Homo sapien
aggctatcagtagtattcctttaaa

SEQ ID NO: 2502335 - DNA, 25 bp, Homo sapien
tacaagaactatcagtgtgtaaggg

SEQ ID NO: 2502336 - DNA, 25 bp, Homo sapien
tttcaggaatgcaaatacaagaact

SEQ ID NO: 2502337 - DNA, 25 bp, Homo sapien
gaaagtggttgctagtaagcacaca

SEQ ID NO: 2502338 - DNA, 25 bp, Homo sapien
ggttgctagtaagcacacaaactca

SEQ ID NO: 2502339 - DNA, 25 bp, Homo sapien
tttgcagaaacgctgaaagtggttg

SEQ ID NO: 2502340 - DNA, 25 bp, Homo sapien
gaaacgctgaaagtggttgctagta

SEQ ID NO: 2502341 - DNA, 25 bp, Homo sapien
ctgagtgaacactgtatttccctta

SEQ ID NO: 2502342 - DNA, 25 bp, Homo sapien
gtatttcccttactcagttttagca

SEQ ID NO: 2502343 - DNA, 25 bp, Homo sapien
cactgtatttcccttactcagtttt

SEQ ID NO: 2502344 - DNA, 25 bp, Homo sapien
tgaacactgtatttcccttactcag

SEQ ID NO: 2502345 - DNA, 25 bp, Homo sapien
tacagtggctggtagcaactccttg

SEQ ID NO: 2502346 - DNA, 25 bp, Homo sapien
tataaccgtgagttgatcctgtgcc

SEQ ID NO: 2502347 - DNA, 25 bp, Homo sapien
gaaacacgccgctttttagaatgcc

SEQ ID NO: 2502348 - DNA, 25 bp, Homo sapien
caaagttgatggctgctacccgtca

SEQ ID NO: 2502349 - DNA, 25 bp, Homo sapien
taacaggcaagcagtttccattgga

SEQ ID NO: 2502350 - DNA, 25 bp, Homo sapien
aaaatcattagttactaggtattgc

SEQ ID NO: 2502351 - DNA, 25 bp, Homo sapien
ggaactgtgttaaatcgacatctga

SEQ ID NO: 2502352 - DNA, 25 bp, Homo sapien
ccccacgaactaaagataacaggca

SEQ ID NO: 2502353 - DNA, 25 bp, Homo sapien
gaagccgcttctggacgggcgttcc

SEQ ID NO: 2502354 - DNA, 25 bp, Homo sapien
agccgcttctggacgggcgttcccg

SEQ ID NO: 2502355 - DNA, 25 bp, Homo sapien
gccgcttctggacgggcgttcccgc

SEQ ID NO: 2502356 - DNA, 25 bp, Homo sapien
tgcttcagggcttctccgcgactgg

SEQ ID NO: 2502357 - DNA, 25 bp, Homo sapien
tgagccgtgcgggtgactgcttcag

SEQ ID NO: 2502358 - DNA, 25 bp, Homo sapien
actggaccgggcgccgctcgaaagc

SEQ ID NO: 2502359 - DNA, 25 bp, Homo sapien
gctgggcgcggagtgtgcgtggcct

SEQ ID NO: 2502360 - DNA, 25 bp, Homo sapien
gttagactcaaagatataatatttg

SEQ ID NO: 2502361 - DNA, 25 bp, Homo sapien
ttagactcaaagatataatatttga

SEQ ID NO: 2502362 - DNA, 25 bp, Homo sapien
tgatggctgtaacaagtcttcaagt

SEQ ID NO: 2502363 - DNA, 25 bp, Homo sapien
gattctcttcactataactgagtgg

SEQ ID NO: 2502364 - DNA, 25 bp, Homo sapien
taagcttggacaaaggctggattct

SEQ ID NO: 2502365 - DNA, 25 bp, Homo sapien
gagaaattcaccagagctcactgcc

SEQ ID NO: 2502366 - DNA, 25 bp, Homo sapien
aggaaatactacagttcggagaact

SEQ ID NO: 2502367 - DNA, 25 bp, Homo sapien
gtataaaggtacaaggtagtgagaa

SEQ ID NO: 2502368 - DNA, 25 bp, Homo sapien
ttcggagaactgcttatttccaagt

SEQ ID NO: 2502369 - DNA, 25 bp, Homo sapien
tatttattaagaattccaatctaag

SEQ ID NO: 2502370 - DNA, 25 bp, Homo sapien
aagcagcaacagggctagttaattc

SEQ ID NO: 2502371 - DNA, 25 bp, Homo sapien
tcacttcttccttgtaattatactt

SEQ ID NO: 2502372 - DNA, 25 bp, Homo sapien
acagggctagttaattcaactccca

SEQ ID NO: 2502373 - DNA, 25 bp, Homo sapien
cagcaacagggctagttaattcaac

SEQ ID NO: 2502374 - DNA, 25 bp, Homo sapien
gaaacctttgggacttctgacaggc

SEQ ID NO: 2502375 - DNA, 25 bp, Homo sapien
ctgttgccaatgtgacccaaaactt

SEQ ID NO: 2502376 - DNA, 25 bp, Homo sapien
ctatttagaatagccagtgatcact

SEQ ID NO: 2502377 - DNA, 25 bp, Homo sapien
gagcttgtcaatagagcaatcaatc

SEQ ID NO: 2502378 - DNA, 25 bp, Homo sapien
ttttgagctgtgtctctagatcttt

SEQ ID NO: 2502379 - DNA, 25 bp, Homo sapien
tgagctgtgtctctagatcttttat

SEQ ID NO: 2502380 - DNA, 25 bp, Homo sapien
tttgagctgtgtctctagatctttt

SEQ ID NO: 2502381 - DNA, 25 bp, Homo sapien
ttgagctgtgtctctagatctttta

SEQ ID NO: 2502382 - DNA, 25 bp, Homo sapien
ttcccactacgaatgagttcaaggt

SEQ ID NO: 2502383 - DNA, 25 bp, Homo sapien
tacaaattagactcagctttttccc

SEQ ID NO: 2502384 - DNA, 25 bp, Homo sapien
tcagctttttcccactacgaatgag

SEQ ID NO: 2502385 - DNA, 25 bp, Homo sapien
cgaatgagttcaaggtaatggattt

SEQ ID NO: 2502386 - DNA, 25 bp, Homo sapien
gaagtgttacatgactctcctaagg

SEQ ID NO: 2502387 - DNA, 25 bp, Homo sapien
tacgggaaatatgtacagacatgca

SEQ ID NO: 2502388 - DNA, 25 bp, Homo sapien
cacaatggcataattaggtcaatag

SEQ ID NO: 2502389 - DNA, 25 bp, Homo sapien
tataatcctttggagagaatggcat

SEQ ID NO: 2502390 - DNA, 25 bp, Homo sapien
ctccactttggtccttgttagcttc

SEQ ID NO: 2502391 - DNA, 25 bp, Homo sapien
agctccactttggtccttgttagct

SEQ ID NO: 2502392 - DNA, 25 bp, Homo sapien
tccactttggtccttgttagcttct

SEQ ID NO: 2502393 - DNA, 25 bp, Homo sapien
gctccactttggtccttgttagctt

SEQ ID NO: 2502394 - DNA, 25 bp, Homo sapien
tgaagctcccgtttaaggccttgct

SEQ ID NO: 2502395 - DNA, 25 bp, Homo sapien
agctcccgtttaaggccttgctctg

SEQ ID NO: 2502396 - DNA, 25 bp, Homo sapien
gaagctcccgtttaaggccttgctc

SEQ ID NO: 2502397 - DNA, 25 bp, Homo sapien
cttgaagctcccgtttaaggccttg

SEQ ID NO: 2502398 - DNA, 25 bp, Homo sapien
tacaagctgtttaaggtcagtaatg

SEQ ID NO: 2502399 - DNA, 25 bp, Homo sapien
acaagctgtttaaggtcagtaatgc

SEQ ID NO: 2502400 - DNA, 25 bp, Homo sapien
ttacaagctgtttaaggtcagtaat

SEQ ID NO: 2502401 - DNA, 25 bp, Homo sapien
tttacaagctgtttaaggtcagtaa

SEQ ID NO: 2502402 - DNA, 25 bp, Homo sapien
ccttagacttggttgacagaggcaa

SEQ ID NO: 2502403 - DNA, 25 bp, Homo sapien
ggacattggaggtgcatggacataa

SEQ ID NO: 2502404 - DNA, 25 bp, Homo sapien
gcagacatggaagatgaaaacctca

SEQ ID NO: 2502405 - DNA, 25 bp, Homo sapien
tgtagcctcacggtactaagactcc

SEQ ID NO: 2502406 - DNA, 25 bp, Homo sapien
ccagtctcttctagttgaactgtca

SEQ ID NO: 2502407 - DNA, 25 bp, Homo sapien
gctttctgcaaactgcaatctctta

SEQ ID NO: 2502408 - DNA, 25 bp, Homo sapien
agcaccttcaagctgtggacctctg

SEQ ID NO: 2502409 - DNA, 25 bp, Homo sapien
ggatttccagctcttactgtcagca

SEQ ID NO: 2502410 - DNA, 25 bp, Homo sapien
tgcccaagatgagctttaagttttt

SEQ ID NO: 2502411 - DNA, 25 bp, Homo sapien
ttggtcttggattcatagtgcatgc

SEQ ID NO: 2502412 - DNA, 25 bp, Homo sapien
tcatagtgcatgctcaactgatgcc

SEQ ID NO: 2502413 - DNA, 25 bp, Homo sapien
tgatgcccaagatgagctttaagtt

SEQ ID NO: 2502414 - DNA, 25 bp, Homo sapien
ttttcctgctcaatattagccattt

SEQ ID NO: 2502415 - DNA, 25 bp, Homo sapien
tcattttcctgctcaatattagcca

SEQ ID NO: 2502416 - DNA, 25 bp, Homo sapien
cctgctcaatattagccattttttc

SEQ ID NO: 2502417 - DNA, 25 bp, Homo sapien
tcaatattagccattttttcactag

SEQ ID NO: 2502418 - DNA, 25 bp, Homo sapien
catggccaagtttccgctgaacttc

SEQ ID NO: 2502419 - DNA, 25 bp, Homo sapien
ctctaacatggccaagtttccgctg

SEQ ID NO: 2502420 - DNA, 25 bp, Homo sapien
caagtttccgctgaacttctgcttt

SEQ ID NO: 2502421 - DNA, 25 bp, Homo sapien
taacatggccaagtttccgctgaac

SEQ ID NO: 2502422 - DNA, 25 bp, Homo sapien
ttatttgcttgttcaagctgaaatt

SEQ ID NO: 2502423 - DNA, 25 bp, Homo sapien
tgacaatgatcatctgactctattc

SEQ ID NO: 2502424 - DNA, 25 bp, Homo sapien
tctctctgacaatgatcatctgact

SEQ ID NO: 2502425 - DNA, 25 bp, Homo sapien
ttttcagatgacaacttcaagtttt

SEQ ID NO: 2502426 - DNA, 25 bp, Homo sapien
gaataatccggttaaaagccatcaa

SEQ ID NO: 2502427 - DNA, 25 bp, Homo sapien
gataatgcctagtggaagtctcaaa

SEQ ID NO: 2502428 - DNA, 25 bp, Homo sapien
gacttaggtgactggaatatctcag

SEQ ID NO: 2502429 - DNA, 25 bp, Homo sapien
taagctagccaaaagtagtacgtac

SEQ ID NO: 2502430 - DNA, 25 bp, Homo sapien
ctcactcttgcctatcttattctct

SEQ ID NO: 2502431 - DNA, 25 bp, Homo sapien
tctcactcttgcctatcttattctc

SEQ ID NO: 2502432 - DNA, 25 bp, Homo sapien
ttttgacaacattcttgattaattt

SEQ ID NO: 2502433 - DNA, 25 bp, Homo sapien
tttctcactcttgcctatcttattc

SEQ ID NO: 2502434 - DNA, 25 bp, Homo sapien
ctacaacagaatctcgaggaagagc

SEQ ID NO: 2502435 - DNA, 25 bp, Homo sapien
tttcttggaggtatctattttgtaa

SEQ ID NO: 2502436 - DNA, 25 bp, Homo sapien
acagaatctcgaggaagagcttggt

SEQ ID NO: 2502437 - DNA, 25 bp, Homo sapien
attttgtaaatgtaaatcttctaca

SEQ ID NO: 2502438 - DNA, 25 bp, Homo sapien
ccaaaacctgatcaacagtcatgcc

SEQ ID NO: 2502439 - DNA, 25 bp, Homo sapien
ctgactccaaagctcgtattcccaa

SEQ ID NO: 2502440 - DNA, 25 bp, Homo sapien
ttcccaaaacctgatcaacagtcat

SEQ ID NO: 2502441 - DNA, 25 bp, Homo sapien
tgactccaaagctcgtattcccaaa

SEQ ID NO: 2502442 - DNA, 25 bp, Homo sapien
caaagtattcaactgctttgttaaa

SEQ ID NO: 2502443 - DNA, 25 bp, Homo sapien
atccttcaaagtattcaactgcttt

SEQ ID NO: 2502444 - DNA, 25 bp, Homo sapien
ccttcaaagtattcaactgctttgt

SEQ ID NO: 2502445 - DNA, 25 bp, Homo sapien
aagtattcaactgctttgttaaagt

SEQ ID NO: 2502446 - DNA, 25 bp, Homo sapien
agttcttcaattagactttgtttat

SEQ ID NO: 2502447 - DNA, 25 bp, Homo sapien
tggagttcttcaattagactttgtt

SEQ ID NO: 2502448 - DNA, 25 bp, Homo sapien
ttcttcaattagactttgtttatta

SEQ ID NO: 2502449 - DNA, 25 bp, Homo sapien
gagttcttcaattagactttgttta

SEQ ID NO: 2502450 - DNA, 25 bp, Homo sapien
tatcagttagtgagttttctctgtt

SEQ ID NO: 2502451 - DNA, 25 bp, Homo sapien
ttatcagttagtgagttttctctgt

SEQ ID NO: 2502452 - DNA, 25 bp, Homo sapien
attatcagttagtgagttttctctg

SEQ ID NO: 2502453 - DNA, 25 bp, Homo sapien
ttctgcccggagttctaaaagtgcc

SEQ ID NO: 2502454 - DNA, 25 bp, Homo sapien
tttgttgaacattgagatgggcctc

SEQ ID NO: 2502455 - DNA, 25 bp, Homo sapien
gcagaaataatacgttcttcagcag

SEQ ID NO: 2502456 - DNA, 25 bp, Homo sapien
tagctctctagtatgtcgatcaacg

SEQ ID NO: 2502457 - DNA, 25 bp, Homo sapien
tctccttcaaggctaattggctctt

SEQ ID NO: 2502458 - DNA, 25 bp, Homo sapien
taaacactgtgactccttttgtgac

SEQ ID NO: 2502459 - DNA, 25 bp, Homo sapien
ggctctttagccgttctactagatt

SEQ ID NO: 2502460 - DNA, 25 bp, Homo sapien
cattgtagttgttggagctcttgaa

SEQ ID NO: 2502461 - DNA, 25 bp, Homo sapien
aagcaaaaatagtgttaattctgtc

SEQ ID NO: 2502462 - DNA, 25 bp, Homo sapien
aaagcaaaaatagtgttaattctgt

SEQ ID NO: 2502463 - DNA, 25 bp, Homo sapien
caaagcaaaaatagtgttaattctg

SEQ ID NO: 2502464 - DNA, 25 bp, Homo sapien
tctgctactgtctgttccatctcag

SEQ ID NO: 2502465 - DNA, 25 bp, Homo sapien
ctttctttagtttgaccaagagtga

SEQ ID NO: 2502466 - DNA, 25 bp, Homo sapien
tgaggaaagagagtcatcttgttct

SEQ ID NO: 2502467 - DNA, 25 bp, Homo sapien
gagtgggagactgtttcattaaatc

SEQ ID NO: 2502468 - DNA, 25 bp, Homo sapien
tctgtgatgaagaatatgaaggtct

SEQ ID NO: 2502469 - DNA, 25 bp, Homo sapien
agtgaactatcagcctgtagttcta

SEQ ID NO: 2502470 - DNA, 25 bp, Homo sapien
gcctgtagttctaatctgtgatgaa

SEQ ID NO: 2502471 - DNA, 25 bp, Homo sapien
gatgaagaatatgaaggtcttcctc

SEQ ID NO: 2502472 - DNA, 25 bp, Homo sapien
tctgcagtggcaggcaatcgaagcc

SEQ ID NO: 2502473 - DNA, 25 bp, Homo sapien
tcttttctgcctagctcagctatga

SEQ ID NO: 2502474 - DNA, 25 bp, Homo sapien
ggctttttctagaagacgttgatac

SEQ ID NO: 2502475 - DNA, 25 bp, Homo sapien
catgtttgcaatggtttgatgagca

SEQ ID NO: 2502476 - DNA, 25 bp, Homo sapien
taattttccttagagcgatctcaag

SEQ ID NO: 2502477 - DNA, 25 bp, Homo sapien
tgcaagttgcccgtgtttctagaat

SEQ ID NO: 2502478 - DNA, 25 bp, Homo sapien
caaactagggtcagggattgatcct

SEQ ID NO: 2502479 - DNA, 25 bp, Homo sapien
tctagaattattcgaatgttctcct

SEQ ID NO: 2502480 - DNA, 25 bp, Homo sapien
tagttggcgttccaggtcaacttct

SEQ ID NO: 2502481 - DNA, 25 bp, Homo sapien
ttttgtgccgcatttagtatttcat

SEQ ID NO: 2502482 - DNA, 25 bp, Homo sapien
tcattttgctgacggtcaaaaatgt

SEQ ID NO: 2502483 - DNA, 25 bp, Homo sapien
tctctttgatcccaggccatttgtc

SEQ ID NO: 2502484 - DNA, 25 bp, Homo sapien
gaggttgcttatgtattgccgtttt

SEQ ID NO: 2502485 - DNA, 25 bp, Homo sapien
gttgcttatgtattgccgtttttaa

SEQ ID NO: 2502486 - DNA, 25 bp, Homo sapien
ggttgcttatgtattgccgttttta

SEQ ID NO: 2502487 - DNA, 25 bp, Homo sapien
atgaggttgcttatgtattgccgtt

SEQ ID NO: 2502488 - DNA, 25 bp, Homo sapien
aatttcttcttcaagactgctgatt

SEQ ID NO: 2502489 - DNA, 25 bp, Homo sapien
tcttcttcaagactgctgattgtac

SEQ ID NO: 2502490 - DNA, 25 bp, Homo sapien
ttcttcttcaagactgctgattgta

SEQ ID NO: 2502491 - DNA, 25 bp, Homo sapien
tttcttcttcaagactgctgattgt

SEQ ID NO: 2502492 - DNA, 25 bp, Homo sapien
aagttcttgaagacgaagttcttct

SEQ ID NO: 2502493 - DNA, 25 bp, Homo sapien
agttcttgaagacgaagttcttcta

SEQ ID NO: 2502494 - DNA, 25 bp, Homo sapien
atccttgactaattcccgatttagt

SEQ ID NO: 2502495 - DNA, 25 bp, Homo sapien
ctttatccttgactaattcccgatt

SEQ ID NO: 2502496 - DNA, 25 bp, Homo sapien
tgtgccaagggtaaagctccactaa

SEQ ID NO: 2502497 - DNA, 25 bp, Homo sapien
gagaacttttcctgttgtgccaagg

SEQ ID NO: 2502498 - DNA, 25 bp, Homo sapien
tctaagcgcaagttgtaggcctcca

SEQ ID NO: 2502499 - DNA, 25 bp, Homo sapien
tccaaacgagcataatagagagcct

SEQ ID NO: 2502500 - DNA, 25 bp, Homo sapien
agacattatgttggtgcaacttggc

SEQ ID NO: 2502501 - DNA, 25 bp, Homo sapien
cactcagttgaagagagacattatg

SEQ ID NO: 2502502 - DNA, 25 bp, Homo sapien
taccaagagcagtagcctcactcag

SEQ ID NO: 2502503 - DNA, 25 bp, Homo sapien
gcaacttggcaatgagcgacttttc

SEQ ID NO: 2502504 - DNA, 25 bp, Homo sapien
cattctgagggactctacttccttg

SEQ ID NO: 2502505 - DNA, 25 bp, Homo sapien
tctggcaatatcagaaatctctctc

SEQ ID NO: 2502506 - DNA, 25 bp, Homo sapien
gatagtctagcagttgcattctgag

SEQ ID NO: 2502507 - DNA, 25 bp, Homo sapien
ccttgtccctagattgttgttgtgc

SEQ ID NO: 2502508 - DNA, 25 bp, Homo sapien
tgttccaccttctgtgcatccaaat

SEQ ID NO: 2502509 - DNA, 25 bp, Homo sapien
gaatccgttgcctatcagcatcact

SEQ ID NO: 2502510 - DNA, 25 bp, Homo sapien
tgctcacactatcagctaattcatc

SEQ ID NO: 2502511 - DNA, 25 bp, Homo sapien
agcatcacttactgccttgctcaca

SEQ ID NO: 2502512 - DNA, 25 bp, Homo sapien
gagatccagacaaaccacttaacaa

SEQ ID NO: 2502513 - DNA, 25 bp, Homo sapien
taacaataatacaatgtctaccaaa

SEQ ID NO: 2502514 - DNA, 25 bp, Homo sapien
acataggcactatattaataagata

SEQ ID NO: 2502515 - DNA, 25 bp, Homo sapien
caatgtctaccaaaactaattcttt

SEQ ID NO: 2502516 - DNA, 25 bp, Homo sapien
tcaaaattacgttcctccatttgct

SEQ ID NO: 2502517 - DNA, 25 bp, Homo sapien
aacgaagtccgtaagtgttcataca

SEQ ID NO: 2502518 - DNA, 25 bp, Homo sapien
gatttctttgccttatccatgctag

SEQ ID NO: 2502519 - DNA, 25 bp, Homo sapien
ttttgacaatgttcagcccgctgcc

SEQ ID NO: 2502520 - DNA, 25 bp, Homo sapien
tcccaggcttgttcaatagtgtgaa

SEQ ID NO: 2502521 - DNA, 25 bp, Homo sapien
aatttacagagtgcatccatggtcc

SEQ ID NO: 2502522 - DNA, 25 bp, Homo sapien
tttcacaaggttcaagaatcacaca

SEQ ID NO: 2502523 - DNA, 25 bp, Homo sapien
cctaaggagaatgatctagataatc

SEQ ID NO: 2502524 - DNA, 25 bp, Homo sapien
taaatcatgcaagtgacctaaggag

SEQ ID NO: 2502525 - DNA, 25 bp, Homo sapien
aacactattatctacaactttttgg

SEQ ID NO: 2502526 - DNA, 25 bp, Homo sapien
ggagagctgcaatcttgaaaatggc

SEQ ID NO: 2502527 - DNA, 25 bp, Homo sapien
gtccctgtacttagcagtcagttca

SEQ ID NO: 2502528 - DNA, 25 bp, Homo sapien
ttattagccagttctagttcagaca

SEQ ID NO: 2502529 - DNA, 25 bp, Homo sapien
taaactatgtttggcagcagtgctg

SEQ ID NO: 2502530 - DNA, 25 bp, Homo sapien
tcttatgatcggaaaacaacttgcc

SEQ ID NO: 2502531 - DNA, 25 bp, Homo sapien
taagttacctacagagggtggagca

SEQ ID NO: 2502532 - DNA, 25 bp, Homo sapien
tgatggaaacattagcgggagagct

SEQ ID NO: 2502533 - DNA, 25 bp, Homo sapien
tcagcctccattgacaacaattcat

SEQ ID NO: 2502534 - DNA, 25 bp, Homo sapien
aggttgtatattgccttataagtga

SEQ ID NO: 2502535 - DNA, 25 bp, Homo sapien
gctccaattctactaaggttgtata

SEQ ID NO: 2502536 - DNA, 25 bp, Homo sapien
tctaagttgtcgctccaattctact

SEQ ID NO: 2502537 - DNA, 25 bp, Homo sapien
tatagcatcttgttggacttgatcc

SEQ ID NO: 2502538 - DNA, 25 bp, Homo sapien
attgttttagattctgttttccagg

SEQ ID NO: 2502539 - DNA, 25 bp, Homo sapien
cttgatcctcaagttttctcttttc

SEQ ID NO: 2502540 - DNA, 25 bp, Homo sapien
catcttgttggacttgatcctcaag

SEQ ID NO: 2502541 - DNA, 25 bp, Homo sapien
gacctgccctacaactagctttgtg

SEQ ID NO: 2502542 - DNA, 25 bp, Homo sapien
gatcggagtcaatgtctgccaggta

SEQ ID NO: 2502543 - DNA, 25 bp, Homo sapien
tatgtgccacacactagtccgagca

SEQ ID NO: 2502544 - DNA, 25 bp, Homo sapien
tcttggcataaacccagtatagcgg

SEQ ID NO: 2502545 - DNA, 25 bp, Homo sapien
tacaacaaactttgttgatgacgaa

SEQ ID NO: 2502546 - DNA, 25 bp, Homo sapien
ttctgttgtaatcttcaagagaatc

SEQ ID NO: 2502547 - DNA, 25 bp, Homo sapien
tgttgatgacgaattacagcaaatt

SEQ ID NO: 2502548 - DNA, 25 bp, Homo sapien
caaactttgttgatgacgaattaca

SEQ ID NO: 2502549 - DNA, 25 bp, Homo sapien
tataaactcgcctctagtcactcgg

SEQ ID NO: 2502550 - DNA, 25 bp, Homo sapien
tatgctaggcttgttgtcaggtgct

SEQ ID NO: 2502551 - DNA, 25 bp, Homo sapien
gagagtctaagtacctgttttgcca

SEQ ID NO: 2502552 - DNA, 25 bp, Homo sapien
tacagccttaggattgagagtctaa

SEQ ID NO: 2502553 - DNA, 25 bp, Homo sapien
tgttattcacatgtaaaattttcaa

SEQ ID NO: 2502554 - DNA, 25 bp, Homo sapien
tattcacatgtaaaattttcaatac

SEQ ID NO: 2502555 - DNA, 25 bp, Homo sapien
caatgatttttgttattcacatgta

SEQ ID NO: 2502556 - DNA, 25 bp, Homo sapien
tgatttttgttattcacatgtaaaa

SEQ ID NO: 2502557 - DNA, 25 bp, Homo sapien
tatcccatcaggtaagtcaattcct

SEQ ID NO: 2502558 - DNA, 25 bp, Homo sapien
taatgatactggcactagatggtgc

SEQ ID NO: 2502559 - DNA, 25 bp, Homo sapien
gatccttctgattgtcgtaaaagac

SEQ ID NO: 2502560 - DNA, 25 bp, Homo sapien
tagatggtgctatcccatcaggtaa

SEQ ID NO: 2502561 - DNA, 25 bp, Homo sapien
ttccctgagctcctgtcttaattct

SEQ ID NO: 2502562 - DNA, 25 bp, Homo sapien
taagctgatcaacttgggctttcaa

SEQ ID NO: 2502563 - DNA, 25 bp, Homo sapien
tatagcctctttccgagattccctg

SEQ ID NO: 2502564 - DNA, 25 bp, Homo sapien
tcatttcttccggtaagctgatcaa

SEQ ID NO: 2502565 - DNA, 25 bp, Homo sapien
tcaaagattccttctgcattctttg

SEQ ID NO: 2502566 - DNA, 25 bp, Homo sapien
aagattccttctgcattctttgatt

SEQ ID NO: 2502567 - DNA, 25 bp, Homo sapien
caaagattccttctgcattctttga

SEQ ID NO: 2502568 - DNA, 25 bp, Homo sapien
aaagattccttctgcattctttgat

SEQ ID NO: 2502569 - DNA, 25 bp, Homo sapien
ttcaaggctagggataattagagat

SEQ ID NO: 2502570 - DNA, 25 bp, Homo sapien
cctttaacatcaggatctttctgca

SEQ ID NO: 2502571 - DNA, 25 bp, Homo sapien
attagagatgtttctcctcctttaa

SEQ ID NO: 2502572 - DNA, 25 bp, Homo sapien
caaggctagggataattagagatgt

SEQ ID NO: 2502573 - DNA, 25 bp, Homo sapien
tgtcctactcctttctaaatctctt

SEQ ID NO: 2502574 - DNA, 25 bp, Homo sapien
tatcactgtcctactcctttctaaa

SEQ ID NO: 2502575 - DNA, 25 bp, Homo sapien
atttggctatcactgtcctactcct

SEQ ID NO: 2502576 - DNA, 25 bp, Homo sapien
tggctatcactgtcctactcctttc

SEQ ID NO: 2502577 - DNA, 25 bp, Homo sapien
tgatgttcaagctctatatctgcat

SEQ ID NO: 2502578 - DNA, 25 bp, Homo sapien
tcaagctctatatctgcatttctac

SEQ ID NO: 2502579 - DNA, 25 bp, Homo sapien
ctgcttctttgatcaagaattcctg

SEQ ID NO: 2502580 - DNA, 25 bp, Homo sapien
ttctttgatcaagaattcctgtgct

SEQ ID NO: 2502581 - DNA, 25 bp, Homo sapien
tcaatatctctgtctgtaagggtac

SEQ ID NO: 2502582 - DNA, 25 bp, Homo sapien
gaaatactagctctctccgtaactg

SEQ ID NO: 2502583 - DNA, 25 bp, Homo sapien
tatgtctgaagctgttgataagcca

SEQ ID NO: 2502584 - DNA, 25 bp, Homo sapien
tactaaaggtgctgactaacgattc

SEQ ID NO: 2502585 - DNA, 25 bp, Homo sapien
ctatctccttgagaaatgttttcag

SEQ ID NO: 2502586 - DNA, 25 bp, Homo sapien
tttttgaggctcaataaatccaatt

SEQ ID NO: 2502587 - DNA, 25 bp, Homo sapien
agaaatgttttcagttaggttcagg

SEQ ID NO: 2502588 - DNA, 25 bp, Homo sapien
gaggctcaataaatccaattttctt

SEQ ID NO: 2502589 - DNA, 25 bp, Homo sapien
tgtagcagatccacaatagaacagc

SEQ ID NO: 2502590 - DNA, 25 bp, Homo sapien
ttcaggactgaacccactgacactc

SEQ ID NO: 2502591 - DNA, 25 bp, Homo sapien
atttcagattcaggactgaacccac

SEQ ID NO: 2502592 - DNA, 25 bp, Homo sapien
ttattaaatttgtagcagatccaca

SEQ ID NO: 2502593 - DNA, 25 bp, Homo sapien
taaaggtttagaataactgagtata

SEQ ID NO: 2502594 - DNA, 25 bp, Homo sapien
tttttcagatcaagtcgttcttcct

SEQ ID NO: 2502595 - DNA, 25 bp, Homo sapien
ttttttcagatcaagtcgttcttcc

SEQ ID NO: 2502596 - DNA, 25 bp, Homo sapien
tttttttcagatcaagtcgttcttc

SEQ ID NO: 2502597 - DNA, 25 bp, Homo sapien
tatttctctatagttcagccaagaa

SEQ ID NO: 2502598 - DNA, 25 bp, Homo sapien
ctgcaaagtataaattattagtatt

SEQ ID NO: 2502599 - DNA, 25 bp, Homo sapien
tctctatagttcagccaagaaaata

SEQ ID NO: 2502600 - DNA, 25 bp, Homo sapien
tagtatttctctatagttcagccaa

SEQ ID NO: 2502601 - DNA, 25 bp, Homo sapien
taaattcagttaaatcaatcattgt

SEQ ID NO: 2502602 - DNA, 25 bp, Homo sapien
ctaaattcagttaaatcaatcattg

SEQ ID NO: 2502603 - DNA, 25 bp, Homo sapien
attcacttagccagtatcactgaag

SEQ ID NO: 2502604 - DNA, 25 bp, Homo sapien
ttcacttagccagtatcactgaaga

SEQ ID NO: 2502605 - DNA, 25 bp, Homo sapien
ttataattcacttagccagtatcac

SEQ ID NO: 2502606 - DNA, 25 bp, Homo sapien
gaatgaggtaactttctgtgaaaga

SEQ ID NO: 2502607 - DNA, 25 bp, Homo sapien
ttatttcaacgacagcatcttctaa

SEQ ID NO: 2502608 - DNA, 25 bp, Homo sapien
caatctctcgatctcttattttaat

SEQ ID NO: 2502609 - DNA, 25 bp, Homo sapien
gaaatcactgatcttcaattcaagt

SEQ ID NO: 2502610 - DNA, 25 bp, Homo sapien
tacaattctttatttcaacgacagc

SEQ ID NO: 2502611 - DNA, 25 bp, Homo sapien
atccttttccctagcatcagcctca

SEQ ID NO: 2502612 - DNA, 25 bp, Homo sapien
taacctcttcagagcctcaactaat

SEQ ID NO: 2502613 - DNA, 25 bp, Homo sapien
gagcctcaactaattctttatcctt

SEQ ID NO: 2502614 - DNA, 25 bp, Homo sapien
ttttccctagcatcagcctcagcca

SEQ ID NO: 2502615 - DNA, 25 bp, Homo sapien
aaaatgtctaacgttgactgaattt

SEQ ID NO: 2502616 - DNA, 25 bp, Homo sapien
tgtctaacgttgactgaattttcat

SEQ ID NO: 2502617 - DNA, 25 bp, Homo sapien
tttaaaatgtctaacgttgactgaa

SEQ ID NO: 2502618 - DNA, 25 bp, Homo sapien
aatgtctaacgttgactgaattttc

SEQ ID NO: 2502619 - DNA, 25 bp, Homo sapien
ctttgtttctttggagctcattttt

SEQ ID NO: 2502620 - DNA, 25 bp, Homo sapien
tgtttctttggagctcatttttcaa

SEQ ID NO: 2502621 - DNA, 25 bp, Homo sapien
ttctttggagctcatttttcaaatc

SEQ ID NO: 2502622 - DNA, 25 bp, Homo sapien
ctttggagctcatttttcaaatctt

SEQ ID NO: 2502623 - DNA, 25 bp, Homo sapien
tctacttgttcggtgagcatcttaa

SEQ ID NO: 2502624 - DNA, 25 bp, Homo sapien
cggtgagcatcttaatttgactgtc

SEQ ID NO: 2502625 - DNA, 25 bp, Homo sapien
ttgttctacttgttcggtgagcatc

SEQ ID NO: 2502626 - DNA, 25 bp, Homo sapien
aatttgactgtctcgttcctgtata

SEQ ID NO: 2502627 - DNA, 25 bp, Homo sapien
tctcccttaggttatgtaacatttg

SEQ ID NO: 2502628 - DNA, 25 bp, Homo sapien
ctgagcattcttaagtttctccctt

SEQ ID NO: 2502629 - DNA, 25 bp, Homo sapien
ccttaggttatgtaacatttgctga

SEQ ID NO: 2502630 - DNA, 25 bp, Homo sapien
tgagcattcttaagtttctccctta

SEQ ID NO: 2502631 - DNA, 25 bp, Homo sapien
cacttgcagcaatttattccacaga

SEQ ID NO: 2502632 - DNA, 25 bp, Homo sapien
tatggcccaaaggtcaaatctggcc

SEQ ID NO: 2502633 - DNA, 25 bp, Homo sapien
gaaaaccaccttgctcactcattta

SEQ ID NO: 2502634 - DNA, 25 bp, Homo sapien
caacattcaatctggtaaagacaac

SEQ ID NO: 2502635 - DNA, 25 bp, Homo sapien
ttgatttcagaagatctgtaagctc

SEQ ID NO: 2502636 - DNA, 25 bp, Homo sapien
tcagaagatctgtaagctcctgcac

SEQ ID NO: 2502637 - DNA, 25 bp, Homo sapien
gacagctaccataattggatcatct

SEQ ID NO: 2502638 - DNA, 25 bp, Homo sapien
attgacagctaccataattggatca

SEQ ID NO: 2502639 - DNA, 25 bp, Homo sapien
gtctgatgcacaatagctttcattc

SEQ ID NO: 2502640 - DNA, 25 bp, Homo sapien
ctgatctattacattatctgtctga

SEQ ID NO: 2502641 - DNA, 25 bp, Homo sapien
ttgaagttgataatgatcgttttct

SEQ ID NO: 2502642 - DNA, 25 bp, Homo sapien
tctgtctgatgcacaatagctttca

SEQ ID NO: 2502643 - DNA, 25 bp, Homo sapien
ttttagacaactgtgatcggtagtc

SEQ ID NO: 2502644 - DNA, 25 bp, Homo sapien
caactgtgatcggtagtcactgtct

SEQ ID NO: 2502645 - DNA, 25 bp, Homo sapien
tcggtagtcactgtcttcccctctt

SEQ ID NO: 2502646 - DNA, 25 bp, Homo sapien
tcaagatattggataagctcatagt

SEQ ID NO: 2502647 - DNA, 25 bp, Homo sapien
tctgcctcctcatttcgaagagcca

SEQ ID NO: 2502648 - DNA, 25 bp, Homo sapien
ctgcctcctcatttcgaagagccaa

SEQ ID NO: 2502649 - DNA, 25 bp, Homo sapien
taacacataaataataggccaaaat

SEQ ID NO: 2502650 - DNA, 25 bp, Homo sapien
tattaaggatttaatatcaacctaa

SEQ ID NO: 2502651 - DNA, 25 bp, Homo sapien
tcaacctaacacataaataataggc

SEQ ID NO: 2502652 - DNA, 25 bp, Homo sapien
ggatttaatatcaacctaacacata

SEQ ID NO: 2502653 - DNA, 25 bp, Homo sapien
gactattatttgctctcagtgaaca

SEQ ID NO: 2502654 - DNA, 25 bp, Homo sapien
aatctaaaatcacaccggcctaggt

SEQ ID NO: 2502655 - DNA, 25 bp, Homo sapien
tatgtgatccttgacagaactttgg

SEQ ID NO: 2502656 - DNA, 25 bp, Homo sapien
ggcctaggtttatgtccctcatcaa

SEQ ID NO: 2502657 - DNA, 25 bp, Homo sapien
ctcagtttacagatcacatcctgca

SEQ ID NO: 2502658 - DNA, 25 bp, Homo sapien
tctctccagagtatgccagaatatg

SEQ ID NO: 2502659 - DNA, 25 bp, Homo sapien
cctcaaggctgattacggtatctct

SEQ ID NO: 2502660 - DNA, 25 bp, Homo sapien
cagtctaactatacttcaggtctca

SEQ ID NO: 2502661 - DNA, 25 bp, Homo sapien
tccaggaaatacaagttgatctgca

SEQ ID NO: 2502662 - DNA, 25 bp, Homo sapien
caatgacctaaaggacacaaaggtg

SEQ ID NO: 2502663 - DNA, 25 bp, Homo sapien
gacaggacagttaccacatgtaggc

SEQ ID NO: 2502664 - DNA, 25 bp, Homo sapien
cgtttctgagtataagggacaggac

SEQ ID NO: 2502665 - DNA, 25 bp, Homo sapien
caagtcatattcactagaagtacca

SEQ ID NO: 2502666 - DNA, 25 bp, Homo sapien
taaactatggcactagaaagatcac

SEQ ID NO: 2502667 - DNA, 25 bp, Homo sapien
gaatatatcgaaagattcatttgcg

SEQ ID NO: 2502668 - DNA, 25 bp, Homo sapien
tctcacataaaataaggtacaacca

SEQ ID NO: 2502669 - DNA, 25 bp, Homo sapien
cattacgtaaaaaccgagtatctcg

SEQ ID NO: 2502670 - DNA, 25 bp, Homo sapien
tcattacgtaaaaaccgagtatctc

SEQ ID NO: 2502671 - DNA, 25 bp, Homo sapien
caagttggcaaatttcattacgtaa

SEQ ID NO: 2502672 - DNA, 25 bp, Homo sapien
cagttcattttccagtttcattact

SEQ ID NO: 2502673 - DNA, 25 bp, Homo sapien
ttcattttccagtttcattacttta

SEQ ID NO: 2502674 - DNA, 25 bp, Homo sapien
ctccagttcattttccagtttcatt

SEQ ID NO: 2502675 - DNA, 25 bp, Homo sapien
cattttccagtttcattactttagt

SEQ ID NO: 2502676 - DNA, 25 bp, Homo sapien
gccagctccacttcttgagctttca

SEQ ID NO: 2502677 - DNA, 25 bp, Homo sapien
ccagctccacttcttgagctttcat

SEQ ID NO: 2502678 - DNA, 25 bp, Homo sapien
ttctgaaaaggtgtatcacattttc

SEQ ID NO: 2502679 - DNA, 25 bp, Homo sapien
agtaattctgaaaaggtgtatcaca

SEQ ID NO: 2502680 - DNA, 25 bp, Homo sapien
attctgaaaaggtgtatcacatttt

SEQ ID NO: 2502681 - DNA, 25 bp, Homo sapien
tctttccagtttatattaggtggca

SEQ ID NO: 2502682 - DNA, 25 bp, Homo sapien
cagttcttcttgacggggcaggtca

SEQ ID NO: 2502683 - DNA, 25 bp, Homo sapien
aggaaatcaataaattatctgccag

SEQ ID NO: 2502684 - DNA, 25 bp, Homo sapien
atcaataaattatctgccagttctt

SEQ ID NO: 2502685 - DNA, 25 bp, Homo sapien
cttgaattctttcactgtgctccac

SEQ ID NO: 2502686 - DNA, 25 bp, Homo sapien
tgaattctttcactgtgctccacct

SEQ ID NO: 2502687 - DNA, 25 bp, Homo sapien
ttgaattctttcactgtgctccacc

SEQ ID NO: 2502688 - DNA, 25 bp, Homo sapien
agcctggcaaccagcggaggcctct

SEQ ID NO: 2502689 - DNA, 25 bp, Homo sapien
caagcctggcaaccagcggaggcct

SEQ ID NO: 2502690 - DNA, 25 bp, Homo sapien
ctagaccaagcctggcaaccagcgg

SEQ ID NO: 2502691 - DNA, 25 bp, Homo sapien
gaccaagcctggcaaccagcggagg

SEQ ID NO: 2502692 - DNA, 25 bp, Homo sapien
tccgccaaggccagaataagatccc

SEQ ID NO: 2502693 - DNA, 25 bp, Homo sapien
tctgggtccagccaaatggtcccga

SEQ ID NO: 2502694 - DNA, 25 bp, Homo sapien
atggtcccgagcaagccaaagcggc

SEQ ID NO: 2502695 - DNA, 25 bp, Homo sapien
gccctgacagatccctatcgcggtt

SEQ ID NO: 2502696 - DNA, 25 bp, Homo sapien
ctacagttcacgaccgtgggtgatg

SEQ ID NO: 2502697 - DNA, 25 bp, Homo sapien
tacagttcacgaccgtgggtgatgc

SEQ ID NO: 2502698 - DNA, 25 bp, Homo sapien
gttcacgaccgtgggtgatgcttta

SEQ ID NO: 2502699 - DNA, 25 bp, Homo sapien
cagttcacgaccgtgggtgatgctt

SEQ ID NO: 2502700 - DNA, 25 bp, Homo sapien
catgcaacgcgtaagactgcgacgg

SEQ ID NO: 2502701 - DNA, 25 bp, Homo sapien
tttcagtggcgtcactcgctgggct

SEQ ID NO: 2502702 - DNA, 25 bp, Homo sapien
gagtcccagagctcggtgttcagga

SEQ ID NO: 2502703 - DNA, 25 bp, Homo sapien
cctgcaaactggtggcctgaacgag

SEQ ID NO: 2502704 - DNA, 25 bp, Homo sapien
ggatgaacaggcttaagtctacttg

SEQ ID NO: 2502705 - DNA, 25 bp, Homo sapien
aagcatggcaacagcgtcttcttgg

SEQ ID NO: 2502706 - DNA, 25 bp, Homo sapien
acttgtgtgccagaaagttacagca

SEQ ID NO: 2502707 - DNA, 25 bp, Homo sapien
ggatctgcacactgtacaagcatgg

SEQ ID NO: 2502708 - DNA, 25 bp, Homo sapien
tatagagccaatattcccaaccagt

SEQ ID NO: 2502709 - DNA, 25 bp, Homo sapien
tagtcagggataagatttcctcatc

SEQ ID NO: 2502710 - DNA, 25 bp, Homo sapien
aagaaattagaggtgaatccagaca

SEQ ID NO: 2502711 - DNA, 25 bp, Homo sapien
ggcattagcaccacatgaagaatat

SEQ ID NO: 2502712 - DNA, 25 bp, Homo sapien
aagtttctggaattgcacctacatg

SEQ ID NO: 2502713 - DNA, 25 bp, Homo sapien
aaagtttatctgttggaagccgcca

SEQ ID NO: 2502714 - DNA, 25 bp, Homo sapien
taaagcaagcactgataccagtggg

SEQ ID NO: 2502715 - DNA, 25 bp, Homo sapien
gaagccgccagccattcatgtagag

SEQ ID NO: 2502716 - DNA, 25 bp, Homo sapien
tccgagctgccatgagtgttatcag

SEQ ID NO: 2502717 - DNA, 25 bp, Homo sapien
cctccgagctgccatgagtgttatc

SEQ ID NO: 2502718 - DNA, 25 bp, Homo sapien
agcccctccgagctgccatgagtgt

SEQ ID NO: 2502719 - DNA, 25 bp, Homo sapien
cgagctgccatgagtgttatcagtc

SEQ ID NO: 2502720 - DNA, 25 bp, Homo sapien
tcctttacttaacatactcgtatag

SEQ ID NO: 2502721 - DNA, 25 bp, Homo sapien
aaatgcaacaatcctttacttaaca

SEQ ID NO: 2502722 - DNA, 25 bp, Homo sapien
cttaacatactcgtatagaaaaatc

SEQ ID NO: 2502723 - DNA, 25 bp, Homo sapien
ggaggaaaaatgcaacaatccttta

SEQ ID NO: 2502724 - DNA, 25 bp, Homo sapien
ggagctcgtatgagtgaagtgaaca

SEQ ID NO: 2502725 - DNA, 25 bp, Homo sapien
tatgcaagggagctcgtatgagtga

SEQ ID NO: 2502726 - DNA, 25 bp, Homo sapien
gctcgtatgagtgaagtgaacagtg

SEQ ID NO: 2502727 - DNA, 25 bp, Homo sapien
aattgctgggtatgcaagggagctc

SEQ ID NO: 2502728 - DNA, 25 bp, Homo sapien
tagacattcccccttagttactagc

SEQ ID NO: 2502729 - DNA, 25 bp, Homo sapien
ctgtggtatgggatagacattcccc

SEQ ID NO: 2502730 - DNA, 25 bp, Homo sapien
tatgggatagacattcccccttagt

SEQ ID NO: 2502731 - DNA, 25 bp, Homo sapien
gacattcccccttagttactagcat

SEQ ID NO: 2502732 - DNA, 25 bp, Homo sapien
cagtaagaggggtggtgtgcatatt

SEQ ID NO: 2502733 - DNA, 25 bp, Homo sapien
catattccacaagtggactgatgaa

SEQ ID NO: 2502734 - DNA, 25 bp, Homo sapien
agtaagaggggtggtgtgcatattc

SEQ ID NO: 2502735 - DNA, 25 bp, Homo sapien
tgcatattccacaagtggactgatg

SEQ ID NO: 2502736 - DNA, 25 bp, Homo sapien
tgtgaatgggcttcctaagaatggt

SEQ ID NO: 2502737 - DNA, 25 bp, Homo sapien
tcagaaatttgcagtagcctgtgaa

SEQ ID NO: 2502738 - DNA, 25 bp, Homo sapien
tgacttgcacatggaccactggata

SEQ ID NO: 2502739 - DNA, 25 bp, Homo sapien
aatcccagtcagagtaccatatagc

SEQ ID NO: 2502740 - DNA, 25 bp, Homo sapien
atggcaggagccaagagaatctttc

SEQ ID NO: 2502741 - DNA, 25 bp, Homo sapien
gcaggagccaagagaatctttctag

SEQ ID NO: 2502742 - DNA, 25 bp, Homo sapien
ggcaggagccaagagaatctttcta

SEQ ID NO: 2502743 - DNA, 25 bp, Homo sapien
tggcaggagccaagagaatctttct

SEQ ID NO: 2502744 - DNA, 25 bp, Homo sapien
tttcacactgtggtagatcctccac

SEQ ID NO: 2502745 - DNA, 25 bp, Homo sapien
caattctctgccctcgagtgctcat

SEQ ID NO: 2502746 - DNA, 25 bp, Homo sapien
gaatctagaatctgacttccacact

SEQ ID NO: 2502747 - DNA, 25 bp, Homo sapien
ccaggtgggcacaatgaatctagaa

SEQ ID NO: 2502748 - DNA, 25 bp, Homo sapien
gaatgatggcaaatatgaatgcttt

SEQ ID NO: 2502749 - DNA, 25 bp, Homo sapien
cttttgtaatgagaagttgaggcat

SEQ ID NO: 2502750 - DNA, 25 bp, Homo sapien
ctgaatgatggcaaatatgaatgct

SEQ ID NO: 2502751 - DNA, 25 bp, Homo sapien
tgaatgcttttgtaatgagaagttg

SEQ ID NO: 2502752 - DNA, 25 bp, Homo sapien
agcctgttcaggatgtccagcatac

SEQ ID NO: 2502753 - DNA, 25 bp, Homo sapien
cagagctgttgctatagcctctcca

SEQ ID NO: 2502754 - DNA, 25 bp, Homo sapien
aggatgtccagcataccaccctgtc

SEQ ID NO: 2502755 - DNA, 25 bp, Homo sapien
gagctgttgctatagcctctccatt

SEQ ID NO: 2502756 - DNA, 25 bp, Homo sapien
tcatattctgagctgtaagctttgg

SEQ ID NO: 2502757 - DNA, 25 bp, Homo sapien
ccagggctcagatctctctctttgt

SEQ ID NO: 2502758 - DNA, 25 bp, Homo sapien
tcaatgtctaagatccacccttttc

SEQ ID NO: 2502759 - DNA, 25 bp, Homo sapien
gggccagggctcagatctctctctt

SEQ ID NO: 2502760 - DNA, 25 bp, Homo sapien
tactctgtttcatactgctatacta

SEQ ID NO: 2502761 - DNA, 25 bp, Homo sapien
gcaataccctacttctctggtatga

SEQ ID NO: 2502762 - DNA, 25 bp, Homo sapien
tgacagaaagtggaaagggcaaaga

SEQ ID NO: 2502763 - DNA, 25 bp, Homo sapien
taacaattgtatagacttggaagtc

SEQ ID NO: 2502764 - DNA, 25 bp, Homo sapien
gcaaagccgtcatggcctaaacacc

SEQ ID NO: 2502765 - DNA, 25 bp, Homo sapien
caaaacggctgcattgaggatcaag

SEQ ID NO: 2502766 - DNA, 25 bp, Homo sapien
tatcaagacccttaagaggcgttac

SEQ ID NO: 2502767 - DNA, 25 bp, Homo sapien
tcagcatacattcatgcaaagccgt

SEQ ID NO: 2502768 - DNA, 25 bp, Homo sapien
taatcttcaaggaagctgcaatcag

SEQ ID NO: 2502769 - DNA, 25 bp, Homo sapien
ccagcaaaggatcatagcactgcat

SEQ ID NO: 2502770 - DNA, 25 bp, Homo sapien
tactagctaagcagcaacgaaactg

SEQ ID NO: 2502771 - DNA, 25 bp, Homo sapien
aattggccagtttgtagattgtgcc

SEQ ID NO: 2502772 - DNA, 25 bp, Homo sapien
ccttgctgtacagaaagccagtcac

SEQ ID NO: 2502773 - DNA, 25 bp, Homo sapien
ggtctagatcctgttccttgctgta

SEQ ID NO: 2502774 - DNA, 25 bp, Homo sapien
gctacatgtgggaaaacgggaataa

SEQ ID NO: 2502775 - DNA, 25 bp, Homo sapien
agttccttgatactcagagccctga

SEQ ID NO: 2502776 - DNA, 25 bp, Homo sapien
agggacacatctgtaggaaacgggt

SEQ ID NO: 2502777 - DNA, 25 bp, Homo sapien
tctaggtcttcagcatgattttgcc

SEQ ID NO: 2502778 - DNA, 25 bp, Homo sapien
ttttgccctcggcttcaaagagtgg

SEQ ID NO: 2502779 - DNA, 25 bp, Homo sapien
gcttcaaagagtggagggacacatc

SEQ ID NO: 2502780 - DNA, 25 bp, Homo sapien
agaggagagagcaatcaccatttgc

SEQ ID NO: 2502781 - DNA, 25 bp, Homo sapien
tcttttgagtgcattccctaaggag

SEQ ID NO: 2502782 - DNA, 25 bp, Homo sapien
tctccaaatcctgtatcaagggcta

SEQ ID NO: 2502783 - DNA, 25 bp, Homo sapien
aaggttttaacaggagttgtccatg

SEQ ID NO: 2502784 - DNA, 25 bp, Homo sapien
ttggatgtacacagcaaaggagtaa

SEQ ID NO: 2502785 - DNA, 25 bp, Homo sapien
cagccagccctacagtttggcggtg

SEQ ID NO: 2502786 - DNA, 25 bp, Homo sapien
tataccagccagccctacagtttgg

SEQ ID NO: 2502787 - DNA, 25 bp, Homo sapien
cagcccaagtcagagagtttctcta

SEQ ID NO: 2502788 - DNA, 25 bp, Homo sapien
gccctacagtttggcggtgtgtcca

SEQ ID NO: 2502789 - DNA, 25 bp, Homo sapien
aatagcagcctgaattatctatacc

SEQ ID NO: 2502790 - DNA, 25 bp, Homo sapien
acctcttctcagtcgagtctcaaaa

SEQ ID NO: 2502791 - DNA, 25 bp, Homo sapien
ttctgctcagtcaggataaaggaca

SEQ ID NO: 2502792 - DNA, 25 bp, Homo sapien
gaaatcaagacatgcctctgctcaa

SEQ ID NO: 2502793 - DNA, 25 bp, Homo sapien
tagtgccttgttgccacagtgagct

SEQ ID NO: 2502794 - DNA, 25 bp, Homo sapien
cactggagctgcttgttaccaaaca

SEQ ID NO: 2502795 - DNA, 25 bp, Homo sapien
aagtaattggtatccaccatagtgc

SEQ ID NO: 2502796 - DNA, 25 bp, Homo sapien
ttacgatgtattggaaagtaattgg

SEQ ID NO: 2502797 - DNA, 25 bp, Homo sapien
attgaggtggccctggttatctctg

SEQ ID NO: 2502798 - DNA, 25 bp, Homo sapien
gccctggttatctctggaagctgca

SEQ ID NO: 2502799 - DNA, 25 bp, Homo sapien
gtggccctggttatctctggaagct

SEQ ID NO: 2502800 - DNA, 25 bp, Homo sapien
gaggtggccctggttatctctggaa

SEQ ID NO: 2502801 - DNA, 25 bp, Homo sapien
gagtttcggctctgttatgaacaac

SEQ ID NO: 2502802 - DNA, 25 bp, Homo sapien
tagaaaaaccgaagtccatgagaca

SEQ ID NO: 2502803 - DNA, 25 bp, Homo sapien
ttagagacgtaaacatcttcctgca

SEQ ID NO: 2502804 - DNA, 25 bp, Homo sapien
aacaggttatcagttgagtttcggc

SEQ ID NO: 2502805 - DNA, 25 bp, Homo sapien
tatttagaacaataaagtatatgta

SEQ ID NO: 2502806 - DNA, 25 bp, Homo sapien
gtatatatcatgtaattttaaattc

SEQ ID NO: 2502807 - DNA, 25 bp, Homo sapien
tttaaaaagtacacatacagtatat

SEQ ID NO: 2502808 - DNA, 25 bp, Homo sapien
taaaaagtacacatacagtatatac

SEQ ID NO: 2502809 - DNA, 25 bp, Homo sapien
gaaaaggcggactttcccaggatgc

SEQ ID NO: 2502810 - DNA, 25 bp, Homo sapien
gaactgagggtatatctgcgcatcc

SEQ ID NO: 2502811 - DNA, 25 bp, Homo sapien
tgaattagagtaggaaaacgtgccc

SEQ ID NO: 2502812 - DNA, 25 bp, Homo sapien
taatgacagactggaggctccggat

SEQ ID NO: 2502813 - DNA, 25 bp, Homo sapien
atgaagcaaacatgaactgttacca

SEQ ID NO: 2502814 - DNA, 25 bp, Homo sapien
gaagcaaacatgaactgttaccagc

SEQ ID NO: 2502815 - DNA, 25 bp, Homo sapien
tgaagcaaacatgaactgttaccag

SEQ ID NO: 2502816 - DNA, 25 bp, Homo sapien
tatgaagcaaacatgaactgttacc

SEQ ID NO: 2502817 - DNA, 25 bp, Homo sapien
gaaagttcgtttggcctcagcatag

SEQ ID NO: 2502818 - DNA, 25 bp, Homo sapien
ggcaccgcatcccaacaaagttctg

SEQ ID NO: 2502819 - DNA, 25 bp, Homo sapien
aaagagatccctaagacaggtggag

SEQ ID NO: 2502820 - DNA, 25 bp, Homo sapien
ggagaagctggtcaatggccaccaa

SEQ ID NO: 2502821 - DNA, 25 bp, Homo sapien
cccttgtgaaataagaagagtacat

SEQ ID NO: 2502822 - DNA, 25 bp, Homo sapien
gacatgaactgataactgatataaa

SEQ ID NO: 2502823 - DNA, 25 bp, Homo sapien
tatcactaaccctcattacacatga

SEQ ID NO: 2502824 - DNA, 25 bp, Homo sapien
ggttcttgcaagaacccttgtgaaa

SEQ ID NO: 2502825 - DNA, 25 bp, Homo sapien
cctattgttagtgatttctctctcc

SEQ ID NO: 2502826 - DNA, 25 bp, Homo sapien
aagcttttctcctattgttagtgat

SEQ ID NO: 2502827 - DNA, 25 bp, Homo sapien
caccacttacaaagtgaagcttttc

SEQ ID NO: 2502828 - DNA, 25 bp, Homo sapien
ctccaccacttacaaagtgaagctt

SEQ ID NO: 2502829 - DNA, 25 bp, Homo sapien
tatgtgacctgagccttggtggagc

SEQ ID NO: 2502830 - DNA, 25 bp, Homo sapien
catgcacatgtatgactgaggctgg

SEQ ID NO: 2502831 - DNA, 25 bp, Homo sapien
gagggtgctattcatgctacggaca

SEQ ID NO: 2502832 - DNA, 25 bp, Homo sapien
caatgcacgggcagcaagttaggtg

SEQ ID NO: 2502833 - DNA, 25 bp, Homo sapien
tacgaaagtaacagtgttgatacaa

SEQ ID NO: 2502834 - DNA, 25 bp, Homo sapien
gaaagtaacagtgttgatacaagcc

SEQ ID NO: 2502835 - DNA, 25 bp, Homo sapien
gtaacagtgttgatacaagccacaa

SEQ ID NO: 2502836 - DNA, 25 bp, Homo sapien
caatgtacgaaagtaacagtgttga

SEQ ID NO: 2502837 - DNA, 25 bp, Homo sapien
cttcttgaaactctctctctttctc

SEQ ID NO: 2502838 - DNA, 25 bp, Homo sapien
acacttcttgaaactctctctcttt

SEQ ID NO: 2502839 - DNA, 25 bp, Homo sapien
cacttcttgaaactctctctctttc

SEQ ID NO: 2502840 - DNA, 25 bp, Homo sapien
tacacttcttgaaactctctctctt

SEQ ID NO: 2502841 - DNA, 25 bp, Homo sapien
ttcagctttagagaaaacaacgagt

SEQ ID NO: 2502842 - DNA, 25 bp, Homo sapien
gatctcggcattgtaaaaggcagct

SEQ ID NO: 2502843 - DNA, 25 bp, Homo sapien
taagggaacatatgagtgctgggca

SEQ ID NO: 2502844 - DNA, 25 bp, Homo sapien
tctgaggtacaccatgatctcggca

SEQ ID NO: 2502845 - DNA, 25 bp, Homo sapien
caggtacacagtgtgtgaaatggca

SEQ ID NO: 2502846 - DNA, 25 bp, Homo sapien
gcaatgtcatgcttgattgggcaca

SEQ ID NO: 2502847 - DNA, 25 bp, Homo sapien
gctactgtcatgagtgaaggacttc

SEQ ID NO: 2502848 - DNA, 25 bp, Homo sapien
taaagacattatgggcaggtacaca

SEQ ID NO: 2502849 - DNA, 25 bp, Homo sapien
tgcccttgtaagacttggctgtctc

SEQ ID NO: 2502850 - DNA, 25 bp, Homo sapien
atattttcaactgcccttgtaagac

SEQ ID NO: 2502851 - DNA, 25 bp, Homo sapien
tttcaactgcccttgtaagacttgg

SEQ ID NO: 2502852 - DNA, 25 bp, Homo sapien
caactgcccttgtaagacttggctg

SEQ ID NO: 2502853 - DNA, 25 bp, Homo sapien
cagtataaggctccaaaagcaaagc

SEQ ID NO: 2502854 - DNA, 25 bp, Homo sapien
ccagtataaggctccaaaagcaaag

SEQ ID NO: 2502855 - DNA, 25 bp, Homo sapien
cttccagtataaggctccaaaagca

SEQ ID NO: 2502856 - DNA, 25 bp, Homo sapien
tccagtataaggctccaaaagcaaa

SEQ ID NO: 2502857 - DNA, 25 bp, Homo sapien
tggagtctccagggggatttttggc

SEQ ID NO: 2502858 - DNA, 25 bp, Homo sapien
ctgcccagtgtaggctggagtctcc

SEQ ID NO: 2502859 - DNA, 25 bp, Homo sapien
gcccagtgtaggctggagtctccag

SEQ ID NO: 2502860 - DNA, 25 bp, Homo sapien
ggctgcccagtgtaggctggagtct

SEQ ID NO: 2502861 - DNA, 25 bp, Homo sapien
cataaatggttttgtgacactgact

SEQ ID NO: 2502862 - DNA, 25 bp, Homo sapien
aatggttttgtgacactgactctgg

SEQ ID NO: 2502863 - DNA, 25 bp, Homo sapien
ctgcaacagggggtaacataaatgg

SEQ ID NO: 2502864 - DNA, 25 bp, Homo sapien
taaatggttttgtgacactgactct

SEQ ID NO: 2502865 - DNA, 25 bp, Homo sapien
tgaagaaaccacacaatcactagtt

SEQ ID NO: 2502866 - DNA, 25 bp, Homo sapien
gacttaatgttgaagaaaccacaca

SEQ ID NO: 2502867 - DNA, 25 bp, Homo sapien
taatgttgaagaaaccacacaatca

SEQ ID NO: 2502868 - DNA, 25 bp, Homo sapien
gaaaccacacaatcactagtttcag

SEQ ID NO: 2502869 - DNA, 25 bp, Homo sapien
tcaggagtaaagagcctgggttctg

SEQ ID NO: 2502870 - DNA, 25 bp, Homo sapien
aattcttcaggagtaaagagcctgg

SEQ ID NO: 2502871 - DNA, 25 bp, Homo sapien
taaagaattcttcaggagtaaagag

SEQ ID NO: 2502872 - DNA, 25 bp, Homo sapien
tgggttctgggctcttgaatgattt

SEQ ID NO: 2502873 - DNA, 25 bp, Homo sapien
ttctttcacgcactccacaaggtca

SEQ ID NO: 2502874 - DNA, 25 bp, Homo sapien
gatggaataattactcaagccttca

SEQ ID NO: 2502875 - DNA, 25 bp, Homo sapien
gtccagaagatcagtcaagctgtct

SEQ ID NO: 2502876 - DNA, 25 bp, Homo sapien
aagctgtctgacaattgtactacca

SEQ ID NO: 2502877 - DNA, 25 bp, Homo sapien
atatctctgtgggaaaagtcaagcc

SEQ ID NO: 2502878 - DNA, 25 bp, Homo sapien
ctattgtaataggaggagggactct

SEQ ID NO: 2502879 - DNA, 25 bp, Homo sapien
aaagctatcgttttagttactcaag

SEQ ID NO: 2502880 - DNA, 25 bp, Homo sapien
taaaatgttgtaataggaggacagg

SEQ ID NO: 2502881 - DNA, 25 bp, Homo sapien
ataattccttatagaccgtcagccc

SEQ ID NO: 2502882 - DNA, 25 bp, Homo sapien
tgcagataggtaagccccaattcct

SEQ ID NO: 2502883 - DNA, 25 bp, Homo sapien
caagtggccatttcaactcgtcata

SEQ ID NO: 2502884 - DNA, 25 bp, Homo sapien
tccaaagtatgtgcagaacagagtc

SEQ ID NO: 2502885 - DNA, 25 bp, Homo sapien
catcccggggacatatttgagggtt

SEQ ID NO: 2502886 - DNA, 25 bp, Homo sapien
atatttgagggttatcatgtagtct

SEQ ID NO: 2502887 - DNA, 25 bp, Homo sapien
tttgagggttatcatgtagtctttt

SEQ ID NO: 2502888 - DNA, 25 bp, Homo sapien
caaaacatccatcccggggacatat

SEQ ID NO: 2502889 - DNA, 25 bp, Homo sapien
gaaaaacgcagcaagaagtggcagg

SEQ ID NO: 2502890 - DNA, 25 bp, Homo sapien
tggcaggtattctgaacacaagctg

SEQ ID NO: 2502891 - DNA, 25 bp, Homo sapien
agtctctaccacaaccccatgagag

SEQ ID NO: 2502892 - DNA, 25 bp, Homo sapien
aggaagttccctgataaaaacactg

SEQ ID NO: 2502893 - DNA, 25 bp, Homo sapien
tcagcacacagcgaactctccaagg

SEQ ID NO: 2502894 - DNA, 25 bp, Homo sapien
acacagcgaactctccaaggtcctt

SEQ ID NO: 2502895 - DNA, 25 bp, Homo sapien
cacacagcgaactctccaaggtcct

SEQ ID NO: 2502896 - DNA, 25 bp, Homo sapien
agcacacagcgaactctccaaggtc

SEQ ID NO: 2502897 - DNA, 25 bp, Homo sapien
cattattagtcacacgattcctgca

SEQ ID NO: 2502898 - DNA, 25 bp, Homo sapien
gcagctgaagataaatgcaagtgag

SEQ ID NO: 2502899 - DNA, 25 bp, Homo sapien
gattcctgcagatcccttcagtttt

SEQ ID NO: 2502900 - DNA, 25 bp, Homo sapien
agaggattaaataggagcagctgaa

SEQ ID NO: 2502901 - DNA, 25 bp, Homo sapien
gactcatgttctgtccccctaattc

SEQ ID NO: 2502902 - DNA, 25 bp, Homo sapien
ttgggaatgcgagctctgaatccga

SEQ ID NO: 2502903 - DNA, 25 bp, Homo sapien
gggaatgactcatgttctgtccccc

SEQ ID NO: 2502904 - DNA, 25 bp, Homo sapien
tgtccccctaattccaggtaaagca

SEQ ID NO: 2502905 - DNA, 25 bp, Homo sapien
ggcaccgggcgcgatttttcctgga

SEQ ID NO: 2502906 - DNA, 25 bp, Homo sapien
tgggagctcccgggcgcgccctact

SEQ ID NO: 2502907 - DNA, 25 bp, Homo sapien
ctgcaagtcccagggagcgccggct

SEQ ID NO: 2502908 - DNA, 25 bp, Homo sapien
ccctgcacgccccagctgcaagtcc

SEQ ID NO: 2502909 - DNA, 25 bp, Homo sapien
agcatattgcacgaacagcggcggc

SEQ ID NO: 2502910 - DNA, 25 bp, Homo sapien
ggcgactccgtttagctgttctgga

SEQ ID NO: 2502911 - DNA, 25 bp, Homo sapien
tagtccacgcattgggtagcccgag

SEQ ID NO: 2502912 - DNA, 25 bp, Homo sapien
cacaaacagtggtgtggcgactccg

SEQ ID NO: 2502913 - DNA, 25 bp, Homo sapien
gggacagacgaaatacctcgcgcgc

SEQ ID NO: 2502914 - DNA, 25 bp, Homo sapien
ccggggacagacgaaatacctcgcg

SEQ ID NO: 2502915 - DNA, 25 bp, Homo sapien
cgccagagagggctcggagctccct

SEQ ID NO: 2502916 - DNA, 25 bp, Homo sapien
gacgaaatacctcgcgcgccagaga

SEQ ID NO: 2502917 - DNA, 25 bp, Homo sapien
actgactttctcatacgtaactgta

SEQ ID NO: 2502918 - DNA, 25 bp, Homo sapien
tccctggttctagctttcttaatat

SEQ ID NO: 2502919 - DNA, 25 bp, Homo sapien
tcactgactttctcatacgtaactg

SEQ ID NO: 2502920 - DNA, 25 bp, Homo sapien
attccctggttctagctttcttaat

SEQ ID NO: 2502921 - DNA, 25 bp, Homo sapien
gagtgatatgctgggtttctggatc

SEQ ID NO: 2502922 - DNA, 25 bp, Homo sapien
gatatgctgggtttctggatcattg

SEQ ID NO: 2502923 - DNA, 25 bp, Homo sapien
ctactgagtgatatgctgggtttct

SEQ ID NO: 2502924 - DNA, 25 bp, Homo sapien
caggggcttgcttcttctctttgat

SEQ ID NO: 2502925 - DNA, 25 bp, Homo sapien
tagtacgttgcctgcttctaactaa

SEQ ID NO: 2502926 - DNA, 25 bp, Homo sapien
agacagtcgctgaaggaaagcactt

SEQ ID NO: 2502927 - DNA, 25 bp, Homo sapien
gaagaggtaaagacagtcgctgaag

SEQ ID NO: 2502928 - DNA, 25 bp, Homo sapien
ttgtacagcagggtagtacgttgcc

SEQ ID NO: 2502929 - DNA, 25 bp, Homo sapien
cctagggtgccaatttctttataag

SEQ ID NO: 2502930 - DNA, 25 bp, Homo sapien
ggcctttggatacagcttgagtaat

SEQ ID NO: 2502931 - DNA, 25 bp, Homo sapien
ttcaataactgtccctagggtgcca

SEQ ID NO: 2502932 - DNA, 25 bp, Homo sapien
ttggatacagcttgagtaatgacac

SEQ ID NO: 2502933 - DNA, 25 bp, Homo sapien
taacataacgtctctgaagttcccc

SEQ ID NO: 2502934 - DNA, 25 bp, Homo sapien
taacgtctctgaagttccccataag

SEQ ID NO: 2502935 - DNA, 25 bp, Homo sapien
agttccccataaggccctagggctg

SEQ ID NO: 2502936 - DNA, 25 bp, Homo sapien
tctgaagttccccataaggccctag

SEQ ID NO: 2502937 - DNA, 25 bp, Homo sapien
ttctcccaagagacatatgacccat

SEQ ID NO: 2502938 - DNA, 25 bp, Homo sapien
tataaagtccaaagttctcccaaga

SEQ ID NO: 2502939 - DNA, 25 bp, Homo sapien
aaagttctcccaagagacatatgac

SEQ ID NO: 2502940 - DNA, 25 bp, Homo sapien
agttctcccaagagacatatgaccc

SEQ ID NO: 2502941 - DNA, 25 bp, Homo sapien
tgccgtgagatgcacagccagtatt

SEQ ID NO: 2502942 - DNA, 25 bp, Homo sapien
tggccctcggtcgtgacagatgttc

SEQ ID NO: 2502943 - DNA, 25 bp, Homo sapien
ggagttataaatcgatgctgcaggc

SEQ ID NO: 2502944 - DNA, 25 bp, Homo sapien
gatgttgtgacctattaccagctcc

SEQ ID NO: 2502945 - DNA, 25 bp, Homo sapien
attggttttgtctataggagtggat

SEQ ID NO: 2502946 - DNA, 25 bp, Homo sapien
tcttctttacaattccactacccag

SEQ ID NO: 2502947 - DNA, 25 bp, Homo sapien
tttgtctataggagtggatttcttc

SEQ ID NO: 2502948 - DNA, 25 bp, Homo sapien
ctacccagtgtaacccagggactgc

SEQ ID NO: 2502949 - DNA, 25 bp, Homo sapien
cagtttcaagattcctccttttcat

SEQ ID NO: 2502950 - DNA, 25 bp, Homo sapien
gacagtttcaagattcctccttttc

SEQ ID NO: 2502951 - DNA, 25 bp, Homo sapien
gggttgtgccagttaacctctggac

SEQ ID NO: 2502952 - DNA, 25 bp, Homo sapien
ttatctcgtttcctggtgctgtgca

SEQ ID NO: 2502953 - DNA, 25 bp, Homo sapien
ccgaatcctggtcatagtagtgatg

SEQ ID NO: 2502954 - DNA, 25 bp, Homo sapien
cacttaatccctgtttgctggaaga

SEQ ID NO: 2502955 - DNA, 25 bp, Homo sapien
agagtctgtgtaagcccctcaccct

SEQ ID NO: 2502956 - DNA, 25 bp, Homo sapien
cctacatccagagtctgtgtaagcc

SEQ ID NO: 2502957 - DNA, 25 bp, Homo sapien
tccagagtctgtgtaagcccctcac

SEQ ID NO: 2502958 - DNA, 25 bp, Homo sapien
catccagagtctgtgtaagcccctc

SEQ ID NO: 2502959 - DNA, 25 bp, Homo sapien
tccatatcggagagaggcatatgtt

SEQ ID NO: 2502960 - DNA, 25 bp, Homo sapien
caattagtgcattcaatatggtcat

SEQ ID NO: 2502961 - DNA, 25 bp, Homo sapien
taactagtttggatattttggctcc

SEQ ID NO: 2502962 - DNA, 25 bp, Homo sapien
cagcatgtatagcaccaattagtgc

SEQ ID NO: 2502963 - DNA, 25 bp, Homo sapien
catctcagagttataccagtcctct

SEQ ID NO: 2502964 - DNA, 25 bp, Homo sapien
tagtcctggatgctcaaaacctttt

SEQ ID NO: 2502965 - DNA, 25 bp, Homo sapien
aaaatgcatgcactgacaactttaa

SEQ ID NO: 2502966 - DNA, 25 bp, Homo sapien
tctttagctaccaaaatgcatgcac

SEQ ID NO: 2502967 - DNA, 25 bp, Homo sapien
aataagtggatcaaaaacttgctcc

SEQ ID NO: 2502968 - DNA, 25 bp, Homo sapien
gatcaaaaacttgctcctcggtcag

SEQ ID NO: 2502969 - DNA, 25 bp, Homo sapien
caaaaacttgctcctcggtcagctt

SEQ ID NO: 2502970 - DNA, 25 bp, Homo sapien
agtggatcaaaaacttgctcctcgg

SEQ ID NO: 2502971 - DNA, 25 bp, Homo sapien
ctgccagattactgtcaagtccagt

SEQ ID NO: 2502972 - DNA, 25 bp, Homo sapien
gccagattactgtcaagtccagtat

SEQ ID NO: 2502973 - DNA, 25 bp, Homo sapien
tgccagattactgtcaagtccagta

SEQ ID NO: 2502974 - DNA, 25 bp, Homo sapien
cagattactgtcaagtccagtatct

SEQ ID NO: 2502975 - DNA, 25 bp, Homo sapien
ggtccaagaaggaacatggaggttg

SEQ ID NO: 2502976 - DNA, 25 bp, Homo sapien
ccaagaaggaacatggaggttggta

SEQ ID NO: 2502977 - DNA, 25 bp, Homo sapien
ggaggttggtaagtctgacctccat

SEQ ID NO: 2502978 - DNA, 25 bp, Homo sapien
aacatggaggttggtaagtctgacc

SEQ ID NO: 2502979 - DNA, 25 bp, Homo sapien
agggtttccgtgttgtgtaactgct

SEQ ID NO: 2502980 - DNA, 25 bp, Homo sapien
gggtttccgtgttgtgtaactgcta

SEQ ID NO: 2502981 - DNA, 25 bp, Homo sapien
ggtttccgtgttgtgtaactgctac

SEQ ID NO: 2502982 - DNA, 25 bp, Homo sapien
caagggtttccgtgttgtgtaactg

SEQ ID NO: 2502983 - DNA, 25 bp, Homo sapien
gttgtaggcctttgtatagcatgca

SEQ ID NO: 2502984 - DNA, 25 bp, Homo sapien
acagctggggtcgtctctgagctat

SEQ ID NO: 2502985 - DNA, 25 bp, Homo sapien
ctctgagctatggtattacaagtaa

SEQ ID NO: 2502986 - DNA, 25 bp, Homo sapien
tgcatgaaaaacaaccataagggca

SEQ ID NO: 2502987 - DNA, 25 bp, Homo sapien
cttgggctttcctgatctcactgga

SEQ ID NO: 2502988 - DNA, 25 bp, Homo sapien
ctttcctgatctcactggaaatcag

SEQ ID NO: 2502989 - DNA, 25 bp, Homo sapien
tgagactaggagaaacaatgtatgg

SEQ ID NO: 2502990 - DNA, 25 bp, Homo sapien
tccagattcagggataaagtctcct

SEQ ID NO: 2502991 - DNA, 25 bp, Homo sapien
taatatctacccaaacatgtatcat

SEQ ID NO: 2502992 - DNA, 25 bp, Homo sapien
ttcttatgcatttgccctgcttcag

SEQ ID NO: 2502993 - DNA, 25 bp, Homo sapien
gctttctcgtttttattaatatcta

SEQ ID NO: 2502994 - DNA, 25 bp, Homo sapien
gcttcagacatcttgaagcattgat

SEQ ID NO: 2502995 - DNA, 25 bp, Homo sapien
tgccgatgaggaaaggaatgctttg

SEQ ID NO: 2502996 - DNA, 25 bp, Homo sapien
ctgccgatgaggaaaggaatgcttt

SEQ ID NO: 2502997 - DNA, 25 bp, Homo sapien
tttgaagtttgacattaatctcctt

SEQ ID NO: 2502998 - DNA, 25 bp, Homo sapien
tattaaatgcaaatgtcgtatccat

SEQ ID NO: 2502999 - DNA, 25 bp, Homo sapien
tttattaaatgcaaatgtcgtatcc

SEQ ID NO: 2503000 - DNA, 25 bp, Homo sapien
agtttgacattaatctcctttctgt

SEQ ID NO: 2503001 - DNA, 25 bp, Homo sapien
tgctgctaggagttgaggaatcctt

SEQ ID NO: 2503002 - DNA, 25 bp, Homo sapien
catttttgctgctaggagttgagga

SEQ ID NO: 2503003 - DNA, 25 bp, Homo sapien
tgctaggagttgaggaatcctttat

SEQ ID NO: 2503004 - DNA, 25 bp, Homo sapien
ttttgctgctaggagttgaggaatc

SEQ ID NO: 2503005 - DNA, 25 bp, Homo sapien
acgatgagttttggtattgggagac

SEQ ID NO: 2503006 - DNA, 25 bp, Homo sapien
tttaagagagaaacgatgagttttg

SEQ ID NO: 2503007 - DNA, 25 bp, Homo sapien
gagaaacgatgagttttggtattgg

SEQ ID NO: 2503008 - DNA, 25 bp, Homo sapien
gagacagtgctccacaaatattttc

SEQ ID NO: 2503009 - DNA, 25 bp, Homo sapien
tagggccctctcagacaatccagga

SEQ ID NO: 2503010 - DNA, 25 bp, Homo sapien
tatccgtatgaacatggacagggcc

SEQ ID NO: 2503011 - DNA, 25 bp, Homo sapien
gagcctatagtatgtgccaagcact

SEQ ID NO: 2503012 - DNA, 25 bp, Homo sapien
tacatgcgattgcatctagggccct

SEQ ID NO: 2503013 - DNA, 25 bp, Homo sapien
ttcatgatgcaaacaaacttctggg

SEQ ID NO: 2503014 - DNA, 25 bp, Homo sapien
tgctacgcccagtgttgagagcctg

SEQ ID NO: 2503015 - DNA, 25 bp, Homo sapien
cctacacatagaatgggacctggca

SEQ ID NO: 2503016 - DNA, 25 bp, Homo sapien
tggaactggagctgggtctgccaac

SEQ ID NO: 2503017 - DNA, 25 bp, Homo sapien
ggccggatgacttccaatgctctct

SEQ ID NO: 2503018 - DNA, 25 bp, Homo sapien
tgacatccacaaaagaagggatttc

SEQ ID NO: 2503019 - DNA, 25 bp, Homo sapien
tatttttcaccgagagatggtagag

SEQ ID NO: 2503020 - DNA, 25 bp, Homo sapien
gctttgaattgcacaagggaattgg

SEQ ID NO: 2503021 - DNA, 25 bp, Homo sapien
tatttacaagatgccaagcctatgc

SEQ ID NO: 2503022 - DNA, 25 bp, Homo sapien
cctatgctagaaactgtaggtgcaa

SEQ ID NO: 2503023 - DNA, 25 bp, Homo sapien
cagttgaactcttggcagggatgga

SEQ ID NO: 2503024 - DNA, 25 bp, Homo sapien
gaagacatggtgtccatctagccac

SEQ ID NO: 2503025 - DNA, 25 bp, Homo sapien
gagacaggagcagcgacgcaagcta

SEQ ID NO: 2503026 - DNA, 25 bp, Homo sapien
taagctcacggttgatgccaaaatc

SEQ ID NO: 2503027 - DNA, 25 bp, Homo sapien
cttctacccctaagctcacggttga

SEQ ID NO: 2503028 - DNA, 25 bp, Homo sapien
tattgtgagttacacggagacagga

SEQ ID NO: 2503029 - DNA, 25 bp, Homo sapien
tttctcttctaagagacattttttc

SEQ ID NO: 2503030 - DNA, 25 bp, Homo sapien
cttctaagagacattttttccaggg

SEQ ID NO: 2503031 - DNA, 25 bp, Homo sapien
ttctaagagacattttttccagggc

SEQ ID NO: 2503032 - DNA, 25 bp, Homo sapien
tcttctaagagacattttttccagg

SEQ ID NO: 2503033 - DNA, 25 bp, Homo sapien
ctaggatgatccaagcgggagaaga

SEQ ID NO: 2503034 - DNA, 25 bp, Homo sapien
gatgggtgagaaacaagaaccttct

SEQ ID NO: 2503035 - DNA, 25 bp, Homo sapien
agaactatacggagaggagggctta

SEQ ID NO: 2503036 - DNA, 25 bp, Homo sapien
ctcggagacgggctcacactcattt

SEQ ID NO: 2503037 - DNA, 25 bp, Homo sapien
tcagtccagctcctctggtgggcca

SEQ ID NO: 2503038 - DNA, 25 bp, Homo sapien
agctcctctggtgggccatctctca

SEQ ID NO: 2503039 - DNA, 25 bp, Homo sapien
agtccagctcctctggtgggccatc

SEQ ID NO: 2503040 - DNA, 25 bp, Homo sapien
ccagctcctctggtgggccatctct

SEQ ID NO: 2503041 - DNA, 25 bp, Homo sapien
gaacgtttgtactgagttgtggcct

SEQ ID NO: 2503042 - DNA, 25 bp, Homo sapien
gaaacaagcacattgggatattctg

SEQ ID NO: 2503043 - DNA, 25 bp, Homo sapien
ttggcattggttgtgggattcatcc

SEQ ID NO: 2503044 - DNA, 25 bp, Homo sapien
tcccacattgttactaggcttcagc

SEQ ID NO: 2503045 - DNA, 25 bp, Homo sapien
tgtcacgcccaatgtcaataatgtc

SEQ ID NO: 2503046 - DNA, 25 bp, Homo sapien
gggtcctccacaacaaagcattgtc

SEQ ID NO: 2503047 - DNA, 25 bp, Homo sapien
ttaagagcaagacggttctcaatgg

SEQ ID NO: 2503048 - DNA, 25 bp, Homo sapien
tacctaataggaaccgttaagagca

SEQ ID NO: 2503049 - DNA, 25 bp, Homo sapien
acctgcttttctcacgataatgatg

SEQ ID NO: 2503050 - DNA, 25 bp, Homo sapien
gcactgtggcatggtattagtatcc

SEQ ID NO: 2503051 - DNA, 25 bp, Homo sapien
gattacgaggtaaagctgcattggc

SEQ ID NO: 2503052 - DNA, 25 bp, Homo sapien
tgcattggctgaccgctctatcagg

SEQ ID NO: 2503053 - DNA, 25 bp, Homo sapien
caatcttcgaattgccgcactgtgg

SEQ ID NO: 2503054 - DNA, 25 bp, Homo sapien
taggaagcacagtcttgtagtcaca

SEQ ID NO: 2503055 - DNA, 25 bp, Homo sapien
agtaggaagcacagtcttgtagtca

SEQ ID NO: 2503056 - DNA, 25 bp, Homo sapien
gaagcacagtcttgtagtcacagtc

SEQ ID NO: 2503057 - DNA, 25 bp, Homo sapien
agcacagtcttgtagtcacagtcac

SEQ ID NO: 2503058 - DNA, 25 bp, Homo sapien
tgtattagcaacacaatgagtcacc

SEQ ID NO: 2503059 - DNA, 25 bp, Homo sapien
tagtgacaggaagcaatccagctgc

SEQ ID NO: 2503060 - DNA, 25 bp, Homo sapien
tctccaaggacagaatagtgacagg

SEQ ID NO: 2503061 - DNA, 25 bp, Homo sapien
gttgaaatggaatccgtgggctccc

SEQ ID NO: 2503062 - DNA, 25 bp, Homo sapien
aattacggtcctggtggactgctgc

SEQ ID NO: 2503063 - DNA, 25 bp, Homo sapien
ggagctaaagaaggctttatgtctg

SEQ ID NO: 2503064 - DNA, 25 bp, Homo sapien
tgtctgttcctccaaaaattgcagg

SEQ ID NO: 2503065 - DNA, 25 bp, Homo sapien
cactcttgtaccaagaggagctaaa

SEQ ID NO: 2503066 - DNA, 25 bp, Homo sapien
acacatgctgtaaggatgtaaccag

SEQ ID NO: 2503067 - DNA, 25 bp, Homo sapien
ccccactcttacatcaccagggacc

SEQ ID NO: 2503068 - DNA, 25 bp, Homo sapien
gggaccacaagccaacacatgctgt

SEQ ID NO: 2503069 - DNA, 25 bp, Homo sapien
cacaagccaacacatgctgtaagga

SEQ ID NO: 2503070 - DNA, 25 bp, Homo sapien
cctgccttgcaaccatgagaatagc

SEQ ID NO: 2503071 - DNA, 25 bp, Homo sapien
tgtaggtcgcggtgtctcctgcctt

SEQ ID NO: 2503072 - DNA, 25 bp, Homo sapien
tctccagtgaggaagcttcctgtag

SEQ ID NO: 2503073 - DNA, 25 bp, Homo sapien
caaccatgagaatagctggagctca

SEQ ID NO: 2503074 - DNA, 25 bp, Homo sapien
aatcgcgtgcaaagggctgacagca

SEQ ID NO: 2503075 - DNA, 25 bp, Homo sapien
taaaggaatcgcgtgcaaagggctg

SEQ ID NO: 2503076 - DNA, 25 bp, Homo sapien
ccagaaatccgacagccacagtggc

SEQ ID NO: 2503077 - DNA, 25 bp, Homo sapien
acccagaaatccgacagccacagtg

SEQ ID NO: 2503078 - DNA, 25 bp, Homo sapien
ctcctccatcatggcctgataccat

SEQ ID NO: 2503079 - DNA, 25 bp, Homo sapien
ctgctcttactcctccatcatggcc

SEQ ID NO: 2503080 - DNA, 25 bp, Homo sapien
cttactcctccatcatggcctgata

SEQ ID NO: 2503081 - DNA, 25 bp, Homo sapien
tactcctccatcatggcctgatacc

SEQ ID NO: 2503082 - DNA, 25 bp, Homo sapien
gcccatcccttatattcatcagttc

SEQ ID NO: 2503083 - DNA, 25 bp, Homo sapien
tcccccagcatctgatcttgctgcc

SEQ ID NO: 2503084 - DNA, 25 bp, Homo sapien
cccattaacatggtaagaaactgtt

SEQ ID NO: 2503085 - DNA, 25 bp, Homo sapien
cttctcctcggcagatttcccccag

SEQ ID NO: 2503086 - DNA, 25 bp, Homo sapien
ttttttcccattgtactcatactgc

SEQ ID NO: 2503087 - DNA, 25 bp, Homo sapien
tttcccattgtactcatactgcaga

SEQ ID NO: 2503088 - DNA, 25 bp, Homo sapien
ttttcccattgtactcatactgcag

SEQ ID NO: 2503089 - DNA, 25 bp, Homo sapien
ttcccattgtactcatactgcagaa

SEQ ID NO: 2503090 - DNA, 25 bp, Homo sapien
tgccaaaaacatcaccctactaagg

SEQ ID NO: 2503091 - DNA, 25 bp, Homo sapien
acatcaccctactaagggaacatcc

SEQ ID NO: 2503092 - DNA, 25 bp, Homo sapien
catcagttgtactgttgccaaaaac

SEQ ID NO: 2503093 - DNA, 25 bp, Homo sapien
gtttcccttcttgcaacatcagttg

SEQ ID NO: 2503094 - DNA, 25 bp, Homo sapien
tttaaaatatatcacaactttaaca

SEQ ID NO: 2503095 - DNA, 25 bp, Homo sapien
tgaaaatttaaaatatatcacaact

SEQ ID NO: 2503096 - DNA, 25 bp, Homo sapien
tagaggactgaaaatttaaaatata

SEQ ID NO: 2503097 - DNA, 25 bp, Homo sapien
aaaatatatcacaactttaacatac

SEQ ID NO: 2503098 - DNA, 25 bp, Homo sapien
aaaataatggacttctgagagtgtc

SEQ ID NO: 2503099 - DNA, 25 bp, Homo sapien
tggtagctgtgatgaagaataccgc

SEQ ID NO: 2503100 - DNA, 25 bp, Homo sapien
acatcaagttgctgggtacatccca

SEQ ID NO: 2503101 - DNA, 25 bp, Homo sapien
taccgcacactcttttccatcaaga

SEQ ID NO: 2503102 - DNA, 25 bp, Homo sapien
atagtcatacacagtcttgagtgtc

SEQ ID NO: 2503103 - DNA, 25 bp, Homo sapien
gctgtccatgccaatagatgcccat

SEQ ID NO: 2503104 - DNA, 25 bp, Homo sapien
attttgagcttgttggtttgtccca

SEQ ID NO: 2503105 - DNA, 25 bp, Homo sapien
cagattgtggttcatagtcatacac

SEQ ID NO: 2503106 - DNA, 25 bp, Homo sapien
tcccatgagaactgccaatcacaag

SEQ ID NO: 2503107 - DNA, 25 bp, Homo sapien
tgagtatctgcaaattgggacttac

SEQ ID NO: 2503108 - DNA, 25 bp, Homo sapien
ccatcttccctcacgccactacatg

SEQ ID NO: 2503109 - DNA, 25 bp, Homo sapien
ccatgagaactgccaatcacaagag

SEQ ID NO: 2503110 - DNA, 25 bp, Homo sapien
tccttctctgatatcaaggcttagg

SEQ ID NO: 2503111 - DNA, 25 bp, Homo sapien
agtctgagaaggaggtaaccttgtg

SEQ ID NO: 2503112 - DNA, 25 bp, Homo sapien
tatcaaggcttaggatctgagtctg

SEQ ID NO: 2503113 - DNA, 25 bp, Homo sapien
aaaacgggacaatccttctctgata

SEQ ID NO: 2503114 - DNA, 25 bp, Homo sapien
gaacttaagaatgcaatggttgagt

SEQ ID NO: 2503115 - DNA, 25 bp, Homo sapien
tagtcagaatacaacaagatataga

SEQ ID NO: 2503116 - DNA, 25 bp, Homo sapien
tagaagtacggaaagacagatctga

SEQ ID NO: 2503117 - DNA, 25 bp, Homo sapien
taaactgagggttagatcaaaagaa

SEQ ID NO: 2503118 - DNA, 25 bp, Homo sapien
gcctcttgcagaaactacatttggt

SEQ ID NO: 2503119 - DNA, 25 bp, Homo sapien
tatttacctttgactataaatagct

SEQ ID NO: 2503120 - DNA, 25 bp, Homo sapien
gcttgtggtttcaaaaggagaccta

SEQ ID NO: 2503121 - DNA, 25 bp, Homo sapien
catttggttccgcttgtggtttcaa

SEQ ID NO: 2503122 - DNA, 25 bp, Homo sapien
gagcccaccagagcaaagcataagg

SEQ ID NO: 2503123 - DNA, 25 bp, Homo sapien
tgagcttcagtgttcccaagtcaca

SEQ ID NO: 2503124 - DNA, 25 bp, Homo sapien
gaaagtaaccatagcagtaccctgt

SEQ ID NO: 2503125 - DNA, 25 bp, Homo sapien
tccagtaggctaactatggagccca

SEQ ID NO: 2503126 - DNA, 25 bp, Homo sapien
accatgtctcctgataaaggttttg

SEQ ID NO: 2503127 - DNA, 25 bp, Homo sapien
ggagagaagtcaccatgtctcctga

SEQ ID NO: 2503128 - DNA, 25 bp, Homo sapien
gtggataagtttgcagtgctggaaa

SEQ ID NO: 2503129 - DNA, 25 bp, Homo sapien
tgcaagattctgccttttagtagaa

SEQ ID NO: 2503130 - DNA, 25 bp, Homo sapien
gtggtgaagctgaaatatacaccca

SEQ ID NO: 2503131 - DNA, 25 bp, Homo sapien
aatatacacccaattcagccttact

SEQ ID NO: 2503132 - DNA, 25 bp, Homo sapien
tcttgcgtatgaatccaagtcctgg

SEQ ID NO: 2503133 - DNA, 25 bp, Homo sapien
ttggcaatagcttgtgctttagtgg

SEQ ID NO: 2503134 - DNA, 25 bp, Homo sapien
tgcttaaccactgtgtgacagtaac

SEQ ID NO: 2503135 - DNA, 25 bp, Homo sapien
atggagccagaatttgcacctagcc

SEQ ID NO: 2503136 - DNA, 25 bp, Homo sapien
tagccaacttgcttagcgtcagaca

SEQ ID NO: 2503137 - DNA, 25 bp, Homo sapien
gaatttgcacctagccatcaagctc

SEQ ID NO: 2503138 - DNA, 25 bp, Homo sapien
cagtaaatagccgtgctcagtgcag

SEQ ID NO: 2503139 - DNA, 25 bp, Homo sapien
gcagagatgtgtgagtagccagtaa

SEQ ID NO: 2503140 - DNA, 25 bp, Homo sapien
taataaacgtcaggaaggtcttgca

SEQ ID NO: 2503141 - DNA, 25 bp, Homo sapien
tgctcagtgcagttggttgcacagg

SEQ ID NO: 2503142 - DNA, 25 bp, Homo sapien
gagtgcagacgtgatccaggaaaag

SEQ ID NO: 2503143 - DNA, 25 bp, Homo sapien
tagaagaccaaggactccgagtgca

SEQ ID NO: 2503144 - DNA, 25 bp, Homo sapien
tgatggcatcattgccgaccattcc

SEQ ID NO: 2503145 - DNA, 25 bp, Homo sapien
tccaggaaaaggatgatggcatcat

SEQ ID NO: 2503146 - DNA, 25 bp, Homo sapien
gctttctcggatgtcattatcaaaa

SEQ ID NO: 2503147 - DNA, 25 bp, Homo sapien
tttcctttgagtgtctgagagttca

SEQ ID NO: 2503148 - DNA, 25 bp, Homo sapien
ttttccagacttgcttcgtgctttc

SEQ ID NO: 2503149 - DNA, 25 bp, Homo sapien
gcttcgtgctttctcggatgtcatt

SEQ ID NO: 2503150 - DNA, 25 bp, Homo sapien
ctttggggccagtttagttgtgtca

SEQ ID NO: 2503151 - DNA, 25 bp, Homo sapien
tgaggaagtgaacttctttggggcc

SEQ ID NO: 2503152 - DNA, 25 bp, Homo sapien
gtttgcctctaggagggataagagt

SEQ ID NO: 2503153 - DNA, 25 bp, Homo sapien
taggagggataagagtgaggaagtg

SEQ ID NO: 2503154 - DNA, 25 bp, Homo sapien
atggcttgtggcacttagccagaaa

SEQ ID NO: 2503155 - DNA, 25 bp, Homo sapien
gcttgtggcacttagccagaaaaca

SEQ ID NO: 2503156 - DNA, 25 bp, Homo sapien
gtggcacttagccagaaaacattat

SEQ ID NO: 2503157 - DNA, 25 bp, Homo sapien
ttgtggcacttagccagaaaacatt

SEQ ID NO: 2503158 - DNA, 25 bp, Homo sapien
gaggccagctgtcggcttgagccaa

SEQ ID NO: 2503159 - DNA, 25 bp, Homo sapien
ccacagtaaaacgagaggaagtgct

SEQ ID NO: 2503160 - DNA, 25 bp, Homo sapien
gcttgagccaagcagtaggaactca

SEQ ID NO: 2503161 - DNA, 25 bp, Homo sapien
caacaaacccacagtaaaacgagag

SEQ ID NO: 2503162 - DNA, 25 bp, Homo sapien
cacggtgaggaagcttagatatgcc

SEQ ID NO: 2503163 - DNA, 25 bp, Homo sapien
tggattcagcattctcacactagga

SEQ ID NO: 2503164 - DNA, 25 bp, Homo sapien
tatgccttgccatgcgcatgctagg

SEQ ID NO: 2503165 - DNA, 25 bp, Homo sapien
taaagccatatcctgacacggtgag

SEQ ID NO: 2503166 - DNA, 25 bp, Homo sapien
tggttctaccctatgcgcctggaag

SEQ ID NO: 2503167 - DNA, 25 bp, Homo sapien
tatagtcagttccagatgcaaaagg

SEQ ID NO: 2503168 - DNA, 25 bp, Homo sapien
tgatgctgccaagagaaactgctga

SEQ ID NO: 2503169 - DNA, 25 bp, Homo sapien
tccctgcatgggtaggctgtacaca

SEQ ID NO: 2503170 - DNA, 25 bp, Homo sapien
gccagccaagcaatgtaccaagaca

SEQ ID NO: 2503171 - DNA, 25 bp, Homo sapien
tcgttcatcgacagattgagcttct

SEQ ID NO: 2503172 - DNA, 25 bp, Homo sapien
cacagtgactgagcggctaatgcca

SEQ ID NO: 2503173 - DNA, 25 bp, Homo sapien
gacaatgtcataggcgtcgttcatc

SEQ ID NO: 2503174 - DNA, 25 bp, Homo sapien
tgtcgacacggcctgaaaatgagtt

SEQ ID NO: 2503175 - DNA, 25 bp, Homo sapien
tttgcctcggcatgtgaataccaga

SEQ ID NO: 2503176 - DNA, 25 bp, Homo sapien
gacggcccattaggaggaacaggat

SEQ ID NO: 2503177 - DNA, 25 bp, Homo sapien
tacacagacaaccagactgcaaggg

SEQ ID NO: 2503178 - DNA, 25 bp, Homo sapien
gcatttaaatgtcagagcgacgact

SEQ ID NO: 2503179 - DNA, 25 bp, Homo sapien
tctaggaacattagagacctgcagt

SEQ ID NO: 2503180 - DNA, 25 bp, Homo sapien
taaaccagaattaaggacgctctag

SEQ ID NO: 2503181 - DNA, 25 bp, Homo sapien
tagcaagcagcaagaacgattaaca

SEQ ID NO: 2503182 - DNA, 25 bp, Homo sapien
gaagagtcagagctgatccgcaggc

SEQ ID NO: 2503183 - DNA, 25 bp, Homo sapien
ggagaactcggcttggaacttactg

SEQ ID NO: 2503184 - DNA, 25 bp, Homo sapien
tacacgagccgtctagattggtctc

SEQ ID NO: 2503185 - DNA, 25 bp, Homo sapien
gatgtacttgatgccgaattcctcc

SEQ ID NO: 2503186 - DNA, 25 bp, Homo sapien
tcacagcttgtaagaaccgcagccc

SEQ ID NO: 2503187 - DNA, 25 bp, Homo sapien
agcccggcgcaagaaacaccacaag

SEQ ID NO: 2503188 - DNA, 25 bp, Homo sapien
ctaacctgagaagccgtagtagttt

SEQ ID NO: 2503189 - DNA, 25 bp, Homo sapien
tgccagaacgagaaaagcaatcatc

SEQ ID NO: 2503190 - DNA, 25 bp, Homo sapien
cgaagctccagctgagcggagcaga

SEQ ID NO: 2503191 - DNA, 25 bp, Homo sapien
gctgccggtccctaggcgggcagcg

SEQ ID NO: 2503192 - DNA, 25 bp, Homo sapien
tccgaagctccagctgagcggagca

SEQ ID NO: 2503193 - DNA, 25 bp, Homo sapien
ggctccgaagctccagctgagcgga

SEQ ID NO: 2503194 - DNA, 25 bp, Homo sapien
cgtattctcgttccagtcgctgctg

SEQ ID NO: 2503195 - DNA, 25 bp, Homo sapien
gcgacgactcgtatagctcctgcgg

SEQ ID NO: 2503196 - DNA, 25 bp, Homo sapien
tgatcgccatttccgacgcgaaggg

SEQ ID NO: 2503197 - DNA, 25 bp, Homo sapien
gctctcgtcgtagagcaccactgtg

SEQ ID NO: 2503198 - DNA, 25 bp, Homo sapien
ccgagcgcaccgcgcgcgaagctgc

SEQ ID NO: 2503199 - DNA, 25 bp, Homo sapien
cgcaccgcgcgcgaagctgccgctc

SEQ ID NO: 2503200 - DNA, 25 bp, Homo sapien
caccgcgcgcgaagctgccgctctc

SEQ ID NO: 2503201 - DNA, 25 bp, Homo sapien
agcgcaccgcgcgcgaagctgccgc

SEQ ID NO: 2503202 - DNA, 25 bp, Homo sapien
agtaaagccggaggttctctctgca

SEQ ID NO: 2503203 - DNA, 25 bp, Homo sapien
tctccccggattatttaagactcga

SEQ ID NO: 2503204 - DNA, 25 bp, Homo sapien
tgttcctccccagtgaatgaaatcc

SEQ ID NO: 2503205 - DNA, 25 bp, Homo sapien
ttcggactccgtgctactgagaggg

SEQ ID NO: 2503206 - DNA, 25 bp, Homo sapien
tggatacaaacagcgagcgtctcaa

SEQ ID NO: 2503207 - DNA, 25 bp, Homo sapien
gccagccaatgagcgtgctgcggaa

SEQ ID NO: 2503208 - DNA, 25 bp, Homo sapien
gaggcagctcctcaatggatacaaa

SEQ ID NO: 2503209 - DNA, 25 bp, Homo sapien
caatggatacattctccgggccagc

SEQ ID NO: 2503210 - DNA, 25 bp, Homo sapien
ggagcagggcacataaaccagggca

SEQ ID NO: 2503211 - DNA, 25 bp, Homo sapien
gaggagcagggcacataaaccaggg

SEQ ID NO: 2503212 - DNA, 25 bp, Homo sapien
ctgcaacagcgggctcggcgggagg

SEQ ID NO: 2503213 - DNA, 25 bp, Homo sapien
aggagcagggcacataaaccagggc

SEQ ID NO: 2503214 - DNA, 25 bp, Homo sapien
gctcgacgattggttacagttggca

SEQ ID NO: 2503215 - DNA, 25 bp, Homo sapien
atgatttctgggcaaggagctcggc

SEQ ID NO: 2503216 - DNA, 25 bp, Homo sapien
gaggtcgcgctggttaatgatttct

SEQ ID NO: 2503217 - DNA, 25 bp, Homo sapien
cttttactgtattccgctccggcgg

SEQ ID NO: 2503218 - DNA, 25 bp, Homo sapien
gggagtgtcccttgctgcgctttgc

SEQ ID NO: 2503219 - DNA, 25 bp, Homo sapien
tttggggagtgtcccttgctgcgct

SEQ ID NO: 2503220 - DNA, 25 bp, Homo sapien
gtgtcccttgctgcgctttgcgcct

SEQ ID NO: 2503221 - DNA, 25 bp, Homo sapien
gagtgtcccttgctgcgctttgcgc

SEQ ID NO: 2503222 - DNA, 25 bp, Homo sapien
cgtgaacaccgcgagggcgcctaag

SEQ ID NO: 2503223 - DNA, 25 bp, Homo sapien
gtctcccttcgcccgacgccccgca

SEQ ID NO: 2503224 - DNA, 25 bp, Homo sapien
gaacaccgcgagggcgcctaaggtc

SEQ ID NO: 2503225 - DNA, 25 bp, Homo sapien
tctcccttcgcccgacgccccgcac

SEQ ID NO: 2503226 - DNA, 25 bp, Homo sapien
atgcatattgggcacttaactgcat

SEQ ID NO: 2503227 - DNA, 25 bp, Homo sapien
acaatgcatattgggcacttaactg

SEQ ID NO: 2503228 - DNA, 25 bp, Homo sapien
acaacaatgcatattgggcacttaa

SEQ ID NO: 2503229 - DNA, 25 bp, Homo sapien
caacaatgcatattgggcacttaac

SEQ ID NO: 2503230 - DNA, 25 bp, Homo sapien
gagcttccccatgaacgagatggca

SEQ ID NO: 2503231 - DNA, 25 bp, Homo sapien
tcacgcattgccaggatgataccac

SEQ ID NO: 2503232 - DNA, 25 bp, Homo sapien
gaatcacacccacaagcatatctag

SEQ ID NO: 2503233 - DNA, 25 bp, Homo sapien
ggtagctggacagcaacaccagaat

SEQ ID NO: 2503234 - DNA, 25 bp, Homo sapien
catttctgcagtacatttctgagta

SEQ ID NO: 2503235 - DNA, 25 bp, Homo sapien
tacatttctgagtaagcgcatttac

SEQ ID NO: 2503236 - DNA, 25 bp, Homo sapien
ctattttgaaagccccagcgatgat

SEQ ID NO: 2503237 - DNA, 25 bp, Homo sapien
tattttgaaagccccagcgatgatc

SEQ ID NO: 2503238 - DNA, 25 bp, Homo sapien
tgaagtagcaggcactttccctgct

SEQ ID NO: 2503239 - DNA, 25 bp, Homo sapien
gctgaagtagcaggcactttccctg

SEQ ID NO: 2503240 - DNA, 25 bp, Homo sapien
ctgctgaagtagcaggcactttccc

SEQ ID NO: 2503241 - DNA, 25 bp, Homo sapien
gtagcaggcactttccctgctccat

SEQ ID NO: 2503242 - DNA, 25 bp, Homo sapien
ccaaggtacaagacagcagacagct

SEQ ID NO: 2503243 - DNA, 25 bp, Homo sapien
ggcaggacacatggaccttgcatga

SEQ ID NO: 2503244 - DNA, 25 bp, Homo sapien
tgtggcaggacacatggaccttgca

SEQ ID NO: 2503245 - DNA, 25 bp, Homo sapien
gaccttgcatgaccaaggtacaaga

SEQ ID NO: 2503246 - DNA, 25 bp, Homo sapien
ctttcctccatagcagagctgatag

SEQ ID NO: 2503247 - DNA, 25 bp, Homo sapien
tgactcatagaggttgctgcctgct

SEQ ID NO: 2503248 - DNA, 25 bp, Homo sapien
gtaaagagcacagtccaccaagtcc

SEQ ID NO: 2503249 - DNA, 25 bp, Homo sapien
ccctgtgtgcgccttttgagtaaag

SEQ ID NO: 2503250 - DNA, 25 bp, Homo sapien
gagtccactcaccctctgggtgctc

SEQ ID NO: 2503251 - DNA, 25 bp, Homo sapien
tctgagtccactcaccctctgggtg

SEQ ID NO: 2503252 - DNA, 25 bp, Homo sapien
cttctgagtccactcaccctctggg

SEQ ID NO: 2503253 - DNA, 25 bp, Homo sapien
tgagtccactcaccctctgggtgct

SEQ ID NO: 2503254 - DNA, 25 bp, Homo sapien
cacggcgccacaacatcctgaggag

SEQ ID NO: 2503255 - DNA, 25 bp, Homo sapien
ccaaagggaagccacggcgccacaa

SEQ ID NO: 2503256 - DNA, 25 bp, Homo sapien
agccacggcgccacaacatcctgag

SEQ ID NO: 2503257 - DNA, 25 bp, Homo sapien
aaagggaagccacggcgccacaaca

SEQ ID NO: 2503258 - DNA, 25 bp, Homo sapien
gttccacaagcccatcacatgccat

SEQ ID NO: 2503259 - DNA, 25 bp, Homo sapien
agaagttccacaagcccatcacatg

SEQ ID NO: 2503260 - DNA, 25 bp, Homo sapien
ccagaagttccacaagcccatcaca

SEQ ID NO: 2503261 - DNA, 25 bp, Homo sapien
gaagttccacaagcccatcacatgc

SEQ ID NO: 2503262 - DNA, 25 bp, Homo sapien
gaacatcctccacaatgtggaatgg

SEQ ID NO: 2503263 - DNA, 25 bp, Homo sapien
caccattctttaccctgtttacctg

SEQ ID NO: 2503264 - DNA, 25 bp, Homo sapien
cagcagggcattgcaccattcttta

SEQ ID NO: 2503265 - DNA, 25 bp, Homo sapien
aggaaggcgccctctgagtatagtc

SEQ ID NO: 2503266 - DNA, 25 bp, Homo sapien
gttcaacaaagcaggttagggccat

SEQ ID NO: 2503267 - DNA, 25 bp, Homo sapien
agtcacactgttcagatactggttc

SEQ ID NO: 2503268 - DNA, 25 bp, Homo sapien
cacactgttcagatactggttcaac

SEQ ID NO: 2503269 - DNA, 25 bp, Homo sapien
tcagatactggttcaacaaagcagg

SEQ ID NO: 2503270 - DNA, 25 bp, Homo sapien
ggagaaacattctatgcttatggat

SEQ ID NO: 2503271 - DNA, 25 bp, Homo sapien
catcacgctgcctagaattttatca

SEQ ID NO: 2503272 - DNA, 25 bp, Homo sapien
gctctcttgaataagtttgtactgg

SEQ ID NO: 2503273 - DNA, 25 bp, Homo sapien
tggaagctactaaattaggaccctc

SEQ ID NO: 2503274 - DNA, 25 bp, Homo sapien
tagctgcccaaatcaccctaagcaa

SEQ ID NO: 2503275 - DNA, 25 bp, Homo sapien
catttccttcaggttggccaatgga

SEQ ID NO: 2503276 - DNA, 25 bp, Homo sapien
gtatcttgtactaccttcctgagtg

SEQ ID NO: 2503277 - DNA, 25 bp, Homo sapien
tgtccagaagctcacacttagtatg

SEQ ID NO: 2503278 - DNA, 25 bp, Homo sapien
ctctgtcaaagtcagtcgctgctcc

SEQ ID NO: 2503279 - DNA, 25 bp, Homo sapien
agtcagtcgctgctccaagattgaa

SEQ ID NO: 2503280 - DNA, 25 bp, Homo sapien
gacagcactgaaaagcttttgctga

SEQ ID NO: 2503281 - DNA, 25 bp, Homo sapien
tctttcagcttatcctctgtcaaag

SEQ ID NO: 2503282 - DNA, 25 bp, Homo sapien
gttccataatatgctctaaagcatc

SEQ ID NO: 2503283 - DNA, 25 bp, Homo sapien
ctgtgtcaaaacattgagttgttcc

SEQ ID NO: 2503284 - DNA, 25 bp, Homo sapien
cagcgagaggtatgctcctttgact

SEQ ID NO: 2503285 - DNA, 25 bp, Homo sapien
tgctctaaagcatcagtcacagcga

SEQ ID NO: 2503286 - DNA, 25 bp, Homo sapien
ctttttcgtggttgttggcaaacat

SEQ ID NO: 2503287 - DNA, 25 bp, Homo sapien
tctttttcgtggttgttggcaaaca

SEQ ID NO: 2503288 - DNA, 25 bp, Homo sapien
acccttgtctggcagagtcctacca

SEQ ID NO: 2503289 - DNA, 25 bp, Homo sapien
tggcagagtcctaccactggtttct

SEQ ID NO: 2503290 - DNA, 25 bp, Homo sapien
aggaagggttcaagaaatatccaca

SEQ ID NO: 2503291 - DNA, 25 bp, Homo sapien
ctggtgacattaaggaagggttcaa

SEQ ID NO: 2503292 - DNA, 25 bp, Homo sapien
tactgaaaacgtccagaagaaaggc

SEQ ID NO: 2503293 - DNA, 25 bp, Homo sapien
cagcaaggactaaaatgggagcact

SEQ ID NO: 2503294 - DNA, 25 bp, Homo sapien
tgactaccctactgaagctggacct

SEQ ID NO: 2503295 - DNA, 25 bp, Homo sapien
cacttatctacatgggtctgcagct

SEQ ID NO: 2503296 - DNA, 25 bp, Homo sapien
aggatggcagggcaatcactattct

SEQ ID NO: 2503297 - DNA, 25 bp, Homo sapien
gatggcagggcaatcactattctta

SEQ ID NO: 2503298 - DNA, 25 bp, Homo sapien
ggatggcagggcaatcactattctt

SEQ ID NO: 2503299 - DNA, 25 bp, Homo sapien
gaaatatatcacaaatgtgtgctga

SEQ ID NO: 2503300 - DNA, 25 bp, Homo sapien
tatggtgagacgagccaagatggct

SEQ ID NO: 2503301 - DNA, 25 bp, Homo sapien
ggggataactactcgataaatgggc

SEQ ID NO: 2503302 - DNA, 25 bp, Homo sapien
gtgtgctgatagaaagagcaagcat

SEQ ID NO: 2503303 - DNA, 25 bp, Homo sapien
caaacctgaaatgtccggtttcctg

SEQ ID NO: 2503304 - DNA, 25 bp, Homo sapien
tgttcctcaaactcatgcaatgctg

SEQ ID NO: 2503305 - DNA, 25 bp, Homo sapien
tgtcctcgttcctcttattatcagg

SEQ ID NO: 2503306 - DNA, 25 bp, Homo sapien
tcttagggtgaatccaaatacctcc

SEQ ID NO: 2503307 - DNA, 25 bp, Homo sapien
ttccactcaaattctccgggtacat

SEQ ID NO: 2503308 - DNA, 25 bp, Homo sapien
ttttgggaagctgtatctgtaactt

SEQ ID NO: 2503309 - DNA, 25 bp, Homo sapien
ctgtcttccactcaaattctccggg

SEQ ID NO: 2503310 - DNA, 25 bp, Homo sapien
tgggaagctgtatctgtaacttttc

SEQ ID NO: 2503311 - DNA, 25 bp, Homo sapien
tgtgcccggccttgagtagcaaggt

SEQ ID NO: 2503312 - DNA, 25 bp, Homo sapien
taccctaaattcagctcccatggaa

SEQ ID NO: 2503313 - DNA, 25 bp, Homo sapien
tccattgaacgtgacttaagctgag

SEQ ID NO: 2503314 - DNA, 25 bp, Homo sapien
tcatgatgctaacaccacaagatgc

SEQ ID NO: 2503315 - DNA, 25 bp, Homo sapien
catggtcagatccaaatatcccacc

SEQ ID NO: 2503316 - DNA, 25 bp, Homo sapien
gatagaatatcaaaagactgtagac

SEQ ID NO: 2503317 - DNA, 25 bp, Homo sapien
ggcagccagcttggtatctccctca

SEQ ID NO: 2503318 - DNA, 25 bp, Homo sapien
gagaagtcctctagcttactgcagc

SEQ ID NO: 2503319 - DNA, 25 bp, Homo sapien
cctcagttacttctgtctggctagg

SEQ ID NO: 2503320 - DNA, 25 bp, Homo sapien
gacacaagtgcaagccacaaagata

SEQ ID NO: 2503321 - DNA, 25 bp, Homo sapien
cacctgttaaagactgtatgccaca

SEQ ID NO: 2503322 - DNA, 25 bp, Homo sapien
gataccacctgttaaagactgtatg

SEQ ID NO: 2503323 - DNA, 25 bp, Homo sapien
gccacaaagataccacctgttaaag

SEQ ID NO: 2503324 - DNA, 25 bp, Homo sapien
gggagtagagatctgcaaatcgatt

SEQ ID NO: 2503325 - DNA, 25 bp, Homo sapien
tctgcaaatcgattacctcaagctt

SEQ ID NO: 2503326 - DNA, 25 bp, Homo sapien
tagagatctgcaaatcgattacctc

SEQ ID NO: 2503327 - DNA, 25 bp, Homo sapien
cataacagggggagtagagatctgc

SEQ ID NO: 2503328 - DNA, 25 bp, Homo sapien
aggctcaaataagtagaaactgtat

SEQ ID NO: 2503329 - DNA, 25 bp, Homo sapien
gaatagtcagagtttaagttagtcc

SEQ ID NO: 2503330 - DNA, 25 bp, Homo sapien
tagtcagagtttaagttagtcccaa

SEQ ID NO: 2503331 - DNA, 25 bp, Homo sapien
agaatagtcagagtttaagttagtc

SEQ ID NO: 2503332 - DNA, 25 bp, Homo sapien
cacggcatatgacggctctttaata

SEQ ID NO: 2503333 - DNA, 25 bp, Homo sapien
gaaacacggcatatgacggctcttt

SEQ ID NO: 2503334 - DNA, 25 bp, Homo sapien
ggcatatgacggctctttaataaaa

SEQ ID NO: 2503335 - DNA, 25 bp, Homo sapien
gaggaaacacggcatatgacggctc

SEQ ID NO: 2503336 - DNA, 25 bp, Homo sapien
ctgcaatgctatagtaaagaaggaa

SEQ ID NO: 2503337 - DNA, 25 bp, Homo sapien
aaggaataaagctgtgcatggtaag

SEQ ID NO: 2503338 - DNA, 25 bp, Homo sapien
attatccagccagtgtgttaaaggg

SEQ ID NO: 2503339 - DNA, 25 bp, Homo sapien
aatcagctcagctagccaaaaccgt

SEQ ID NO: 2503340 - DNA, 25 bp, Homo sapien
cacaacatgggtagggtcaagatac

SEQ ID NO: 2503341 - DNA, 25 bp, Homo sapien
gagctatcgccatcgcttagagtgg

SEQ ID NO: 2503342 - DNA, 25 bp, Homo sapien
taggccaggagtactacgaaggatc

SEQ ID NO: 2503343 - DNA, 25 bp, Homo sapien
tacatttagtcagctggtacccaag

SEQ ID NO: 2503344 - DNA, 25 bp, Homo sapien
cgcacctggcccaagagattttttc

SEQ ID NO: 2503345 - DNA, 25 bp, Homo sapien
gcacctggcccaagagattttttca

SEQ ID NO: 2503346 - DNA, 25 bp, Homo sapien
gaactcctgacatcattagccgccc

SEQ ID NO: 2503347 - DNA, 25 bp, Homo sapien
cctgacatcattagccgcccacctc

SEQ ID NO: 2503348 - DNA, 25 bp, Homo sapien
tgttcttgggtagatatcaagaaga

SEQ ID NO: 2503349 - DNA, 25 bp, Homo sapien
tgggtagatatcaagaagatgtggt

SEQ ID NO: 2503350 - DNA, 25 bp, Homo sapien
caactttttcctcatggggatgtgg

SEQ ID NO: 2503351 - DNA, 25 bp, Homo sapien
tcttgggtagatatcaagaagatgt

SEQ ID NO: 2503352 - DNA, 25 bp, Homo sapien
tcaaagttagtcctccataataaga

SEQ ID NO: 2503353 - DNA, 25 bp, Homo sapien
caaagttagtcctccataataagac

SEQ ID NO: 2503354 - DNA, 25 bp, Homo sapien
ggtaagacctttacaatgcaattca

SEQ ID NO: 2503355 - DNA, 25 bp, Homo sapien
tcttttggtaagacctttacaatgc

SEQ ID NO: 2503356 - DNA, 25 bp, Homo sapien
tcctgatgcaaatagctctccacct

SEQ ID NO: 2503357 - DNA, 25 bp, Homo sapien
gcacctcctgatgcaaatagctctc

SEQ ID NO: 2503358 - DNA, 25 bp, Homo sapien
tgtgtgtctgcacctcctgatgcaa

SEQ ID NO: 2503359 - DNA, 25 bp, Homo sapien
gcaaatagctctccaccttttgaaa

SEQ ID NO: 2503360 - DNA, 25 bp, Homo sapien
gctgtgatgagatagttacccgaag

SEQ ID NO: 2503361 - DNA, 25 bp, Homo sapien
ccagaatcttaagggtaccatctga

SEQ ID NO: 2503362 - DNA, 25 bp, Homo sapien
tacccgaaggatggaatgatatgca

SEQ ID NO: 2503363 - DNA, 25 bp, Homo sapien
tgtccttgaagtgtatagatgagcc

SEQ ID NO: 2503364 - DNA, 25 bp, Homo sapien
gaccctgctgttgatgggagctaat

SEQ ID NO: 2503365 - DNA, 25 bp, Homo sapien
taattatactattctctagcctgtt

SEQ ID NO: 2503366 - DNA, 25 bp, Homo sapien
gggagctaattatactattctctag

SEQ ID NO: 2503367 - DNA, 25 bp, Homo sapien
ctgttgatgggagctaattatacta

SEQ ID NO: 2503368 - DNA, 25 bp, Homo sapien
aggagtccattcggtaactgaattt

SEQ ID NO: 2503369 - DNA, 25 bp, Homo sapien
aaggagtccattcggtaactgaatt

SEQ ID NO: 2503370 - DNA, 25 bp, Homo sapien
aaaggagtccattcggtaactgaat

SEQ ID NO: 2503371 - DNA, 25 bp, Homo sapien
caaaaggagtccattcggtaactga

SEQ ID NO: 2503372 - DNA, 25 bp, Homo sapien
cagactttcacagtttgatcagaac

SEQ ID NO: 2503373 - DNA, 25 bp, Homo sapien
taatgctgtagtaatttgttcactc

SEQ ID NO: 2503374 - DNA, 25 bp, Homo sapien
tgttcactcttacatcccagacttt

SEQ ID NO: 2503375 - DNA, 25 bp, Homo sapien
actttcacagtttgatcagaacctg

SEQ ID NO: 2503376 - DNA, 25 bp, Homo sapien
gctatgcatgtaccactagggttaa

SEQ ID NO: 2503377 - DNA, 25 bp, Homo sapien
ctgaagctatgcatgtaccactagg

SEQ ID NO: 2503378 - DNA, 25 bp, Homo sapien
gaagctatgcatgtaccactagggt

SEQ ID NO: 2503379 - DNA, 25 bp, Homo sapien
gcatgtaccactagggttaaagtcc

SEQ ID NO: 2503380 - DNA, 25 bp, Homo sapien
caattagtcttccatcgggtgaaaa

SEQ ID NO: 2503381 - DNA, 25 bp, Homo sapien
cacattgcttatttgtggtatccca

SEQ ID NO: 2503382 - DNA, 25 bp, Homo sapien
caacggaatctgagaagttattaac

SEQ ID NO: 2503383 - DNA, 25 bp, Homo sapien
tatcctcactacatgacacaattag

SEQ ID NO: 2503384 - DNA, 25 bp, Homo sapien
tgcagtaaagtcatattctgcagcc

SEQ ID NO: 2503385 - DNA, 25 bp, Homo sapien
ttaccatcccatgcagtaaagtcat

SEQ ID NO: 2503386 - DNA, 25 bp, Homo sapien
tgttaccatcccatgcagtaaagtc

SEQ ID NO: 2503387 - DNA, 25 bp, Homo sapien
gaccactgttaccatcccatgcagt

SEQ ID NO: 2503388 - DNA, 25 bp, Homo sapien
gcattatccatatgattcaagagag

SEQ ID NO: 2503389 - DNA, 25 bp, Homo sapien
catatgattcaagagagagccttta

SEQ ID NO: 2503390 - DNA, 25 bp, Homo sapien
tgccagcattatccatatgattcaa

SEQ ID NO: 2503391 - DNA, 25 bp, Homo sapien
tatccatatgattcaagagagagcc

SEQ ID NO: 2503392 - DNA, 25 bp, Homo sapien
gccataggtgataatcaacatctcc

SEQ ID NO: 2503393 - DNA, 25 bp, Homo sapien
tcttcttaggctcatggccataggt

SEQ ID NO: 2503394 - DNA, 25 bp, Homo sapien
caacatctcctgagcaataatgtcc

SEQ ID NO: 2503395 - DNA, 25 bp, Homo sapien
cacagagaccataacgacagtgagg

SEQ ID NO: 2503396 - DNA, 25 bp, Homo sapien
aaggaatacaggaagcgctggcgat

SEQ ID NO: 2503397 - DNA, 25 bp, Homo sapien
acccagtgtgtatgtcgatacaagg

SEQ ID NO: 2503398 - DNA, 25 bp, Homo sapien
ttggcacagcgtacccagtgtgtat

SEQ ID NO: 2503399 - DNA, 25 bp, Homo sapien
tgtgtatgtcgatacaaggaataca

SEQ ID NO: 2503400 - DNA, 25 bp, Homo sapien
cttcagaagctgtagctagaaactg

SEQ ID NO: 2503401 - DNA, 25 bp, Homo sapien
aaaagtctacacttcgaactggagc

SEQ ID NO: 2503402 - DNA, 25 bp, Homo sapien
actggagctgtatgagctttaaatt

SEQ ID NO: 2503403 - DNA, 25 bp, Homo sapien
tcagaagctgtagctagaaactggc

SEQ ID NO: 2503404 - DNA, 25 bp, Homo sapien
taaatcccagcgtaaatgtgtcact

SEQ ID NO: 2503405 - DNA, 25 bp, Homo sapien
gaggtatcctgccactcacactgaa

SEQ ID NO: 2503406 - DNA, 25 bp, Homo sapien
tgtactcggaacagtcacagccctt

SEQ ID NO: 2503407 - DNA, 25 bp, Homo sapien
gtaactccaagcatgtaaatcccag

SEQ ID NO: 2503408 - DNA, 25 bp, Homo sapien
acaaagggatggatagctaccacta

SEQ ID NO: 2503409 - DNA, 25 bp, Homo sapien
aaaaaacttagacatattaagcata

SEQ ID NO: 2503410 - DNA, 25 bp, Homo sapien
tagctaccactactccctcaaaaaa

SEQ ID NO: 2503411 - DNA, 25 bp, Homo sapien
ggatggatagctaccactactccct

SEQ ID NO: 2503412 - DNA, 25 bp, Homo sapien
tccatagcatgagaaaggtatccca

SEQ ID NO: 2503413 - DNA, 25 bp, Homo sapien
gttctgtctcgtgaggcagacgcca

SEQ ID NO: 2503414 - DNA, 25 bp, Homo sapien
gcagacgccaataagtttccatgtg

SEQ ID NO: 2503415 - DNA, 25 bp, Homo sapien
tccatgtggagaaaactgcacgctg

SEQ ID NO: 2503416 - DNA, 25 bp, Homo sapien
ctcttggagatcctttgcagccagc

SEQ ID NO: 2503417 - DNA, 25 bp, Homo sapien
gcagccagcaatggtaaaggaccca

SEQ ID NO: 2503418 - DNA, 25 bp, Homo sapien
gacccagaaacaagagagattattc

SEQ ID NO: 2503419 - DNA, 25 bp, Homo sapien
aaggacccagaaacaagagagatta

SEQ ID NO: 2503420 - DNA, 25 bp, Homo sapien
gccccacctaatactaagcagactg

SEQ ID NO: 2503421 - DNA, 25 bp, Homo sapien
tgctgtggacaactatacaactcag

SEQ ID NO: 2503422 - DNA, 25 bp, Homo sapien
tacaactcaggagctcatttcacct

SEQ ID NO: 2503423 - DNA, 25 bp, Homo sapien
gttctaaagtctagcatgcacagag

SEQ ID NO: 2503424 - DNA, 25 bp, Homo sapien
ggtgctaatatgtccaggtgcccat

SEQ ID NO: 2503425 - DNA, 25 bp, Homo sapien
gctgcaagtcacttagagagtaagg

SEQ ID NO: 2503426 - DNA, 25 bp, Homo sapien
gatgaagtgatttacacagagctgc

SEQ ID NO: 2503427 - DNA, 25 bp, Homo sapien
gctaaatgcagctataagaccatct

SEQ ID NO: 2503428 - DNA, 25 bp, Homo sapien
gctgcacgtggaatctggacaattt

SEQ ID NO: 2503429 - DNA, 25 bp, Homo sapien
ttttgagtcatagggatcctcctgg

SEQ ID NO: 2503430 - DNA, 25 bp, Homo sapien
tttcgttctcccatataacaggtgg

SEQ ID NO: 2503431 - DNA, 25 bp, Homo sapien
tgggtcacacctagcaatttagggc

SEQ ID NO: 2503432 - DNA, 25 bp, Homo sapien
tactgtcagctcatgacgaaagtgc

SEQ ID NO: 2503433 - DNA, 25 bp, Homo sapien
tatgtctgcatgttaaaaaggcctc

SEQ ID NO: 2503434 - DNA, 25 bp, Homo sapien
ccaggctcggtgctaggagattgaa

SEQ ID NO: 2503435 - DNA, 25 bp, Homo sapien
gattaagcattaacaaagggaggca

SEQ ID NO: 2503436 - DNA, 25 bp, Homo sapien
tctatgtgtcgatgcagggaaatcc

SEQ ID NO: 2503437 - DNA, 25 bp, Homo sapien
taaagcggtcgagacaaatcctccg

SEQ ID NO: 2503438 - DNA, 25 bp, Homo sapien
tacggagcaaagtcgaccaggcttc

SEQ ID NO: 2503439 - DNA, 25 bp, Homo sapien
tcatttgtacatcaggtcggccctc

SEQ ID NO: 2503440 - DNA, 25 bp, Homo sapien
cacgaagatataggccactgttaaa

SEQ ID NO: 2503441 - DNA, 25 bp, Homo sapien
agagctccacgaagatataggccac

SEQ ID NO: 2503442 - DNA, 25 bp, Homo sapien
ggccactgttaaaaacgccagcagc

SEQ ID NO: 2503443 - DNA, 25 bp, Homo sapien
cactgttaaaaacgccagcagcagg

SEQ ID NO: 2503444 - DNA, 25 bp, Homo sapien
ggaagggcggcggaacccacagctc

SEQ ID NO: 2503445 - DNA, 25 bp, Homo sapien
ggttcttcctttcatgcaggcgcta

SEQ ID NO: 2503446 - DNA, 25 bp, Homo sapien
tcggtcctcggcctccggcacagcc

SEQ ID NO: 2503447 - DNA, 25 bp, Homo sapien
gtcacctgagccctctcggtcctcg

SEQ ID NO: 2503448 - DNA, 25 bp, Homo sapien
ccagaccgctggataggaggctctt

SEQ ID NO: 2503449 - DNA, 25 bp, Homo sapien
gtttgcgaaagtcgtccgccaggcc

SEQ ID NO: 2503450 - DNA, 25 bp, Homo sapien
gccaggcccagaccgctggatagga

SEQ ID NO: 2503451 - DNA, 25 bp, Homo sapien
tcctcctggtggttagtttgcgaaa

SEQ ID NO: 2503452 - DNA, 25 bp, Homo sapien
tgaaataacgctccagaacggggtc

SEQ ID NO: 2503453 - DNA, 25 bp, Homo sapien
aggtgatcgcagctttgtggccttt

SEQ ID NO: 2503454 - DNA, 25 bp, Homo sapien
tgatcgcagctttgtggcctttgaa

SEQ ID NO: 2503455 - DNA, 25 bp, Homo sapien
tcgcagctttgtggcctttgaaata

SEQ ID NO: 2503456 - DNA, 25 bp, Homo sapien
gacctcgaattctggcggctgggat

SEQ ID NO: 2503457 - DNA, 25 bp, Homo sapien
gcggctgggatccacgctgccactt

SEQ ID NO: 2503458 - DNA, 25 bp, Homo sapien
tgaaagccgccgcagacctcgaatt

SEQ ID NO: 2503459 - DNA, 25 bp, Homo sapien
agtccggcttgggaatggccaccca

SEQ ID NO: 2503460 - DNA, 25 bp, Homo sapien
gcggcggggccgggcagcagcccac

SEQ ID NO: 2503461 - DNA, 25 bp, Homo sapien
ggcggcggggccgggcagcagccca

SEQ ID NO: 2503462 - DNA, 25 bp, Homo sapien
ctgggcggcggggccgggcagcagc

SEQ ID NO: 2503463 - DNA, 25 bp, Homo sapien
tgggcggcggggccgggcagcagcc

SEQ ID NO: 2503464 - DNA, 25 bp, Homo sapien
aaaacgctctgttcgcgcttcccag

SEQ ID NO: 2503465 - DNA, 25 bp, Homo sapien
agtcctgctacagggagacgccggc

SEQ ID NO: 2503466 - DNA, 25 bp, Homo sapien
agagtccagcgcatcgcaggaaccg

SEQ ID NO: 2503467 - DNA, 25 bp, Homo sapien
gcggcgcccagtcctgctacaggga

SEQ ID NO: 2503468 - DNA, 25 bp, Homo sapien
aggcaggtgcgaggatgcgcctcgg

SEQ ID NO: 2503469 - DNA, 25 bp, Homo sapien
gaggatgcgcctcggctttggtact

SEQ ID NO: 2503470 - DNA, 25 bp, Homo sapien
caggtgcgaggatgcgcctcggctt

SEQ ID NO: 2503471 - DNA, 25 bp, Homo sapien
gcgaggatgcgcctcggctttggta

SEQ ID NO: 2503472 - DNA, 25 bp, Homo sapien
cggagaggggaggggagaggatggg

SEQ ID NO: 2503473 - DNA, 25 bp, Homo sapien
ggaggggagaggatggggaaggaga

SEQ ID NO: 2503474 - DNA, 25 bp, Homo sapien
cccggagaggggaggggagaggatg

SEQ ID NO: 2503475 - DNA, 25 bp, Homo sapien
gagaggatggggaaggagaggggac

SEQ ID NO: 2503476 - DNA, 25 bp, Homo sapien
ccggaaccgtctgcccagagcggca

SEQ ID NO: 2503477 - DNA, 25 bp, Homo sapien
ggcggcccagtcaaaccccgcgctc

SEQ ID NO: 2503478 - DNA, 25 bp, Homo sapien
agcgcctcccggtcactacaacaac

SEQ ID NO: 2503479 - DNA, 25 bp, Homo sapien
gtgcggctcccggaaccgtctgccc

SEQ ID NO: 2503480 - DNA, 25 bp, Homo sapien
gagaggacgggaggtatgcgccggg

SEQ ID NO: 2503481 - DNA, 25 bp, Homo sapien
gacgggaggtatgcgccgggtcagc

SEQ ID NO: 2503482 - DNA, 25 bp, Homo sapien
ggtatgcgccgggtcagctgtggcc

SEQ ID NO: 2503483 - DNA, 25 bp, Homo sapien
aggacgggaggtatgcgccgggtca

SEQ ID NO: 2503484 - DNA, 25 bp, Homo sapien
atgtcaggaagtggggtagtaacca

SEQ ID NO: 2503485 - DNA, 25 bp, Homo sapien
gactggaataagagcgatgaatgga

SEQ ID NO: 2503486 - DNA, 25 bp, Homo sapien
caagccatgttaactaacactcgcg

SEQ ID NO: 2503487 - DNA, 25 bp, Homo sapien
tcgcgttctccctggtttgatgtca

SEQ ID NO: 2503488 - DNA, 25 bp, Homo sapien
gaatgcctgtgctactctcttgctc

SEQ ID NO: 2503489 - DNA, 25 bp, Homo sapien
tttggagcctttgctagagcggttt

SEQ ID NO: 2503490 - DNA, 25 bp, Homo sapien
agcggtttctgtactcatgaatgcc

SEQ ID NO: 2503491 - DNA, 25 bp, Homo sapien
tctgtactcatgaatgcctgtgcta

SEQ ID NO: 2503492 - DNA, 25 bp, Homo sapien
acttgggaagatatgttcatgtaaa

SEQ ID NO: 2503493 - DNA, 25 bp, Homo sapien
aggcaagaggatgcggctggctggc

SEQ ID NO: 2503494 - DNA, 25 bp, Homo sapien
gcagagagaaaagaccagacagctc

SEQ ID NO: 2503495 - DNA, 25 bp, Homo sapien
catgagtgtatctccaggactggat

SEQ ID NO: 2503496 - DNA, 25 bp, Homo sapien
tccagtgacgatggggacaaagatg

SEQ ID NO: 2503497 - DNA, 25 bp, Homo sapien
cttgccacaggatccgggtggttcc

SEQ ID NO: 2503498 - DNA, 25 bp, Homo sapien
ggtggttccatctttgttgagttgc

SEQ ID NO: 2503499 - DNA, 25 bp, Homo sapien
gggtgagccaaaccttccttgccac

SEQ ID NO: 2503500 - DNA, 25 bp, Homo sapien
ccatctttgttgagttgctgccgtt

SEQ ID NO: 2503501 - DNA, 25 bp, Homo sapien
ccgaccaaacatctgatggtacaac

SEQ ID NO: 2503502 - DNA, 25 bp, Homo sapien
tcatgctggctcctgcttatgcctt

SEQ ID NO: 2503503 - DNA, 25 bp, Homo sapien
tacaaggtccttataatcatgctgg

SEQ ID NO: 2503504 - DNA, 25 bp, Homo sapien
ctactttcaggaataaaagctcaaa

SEQ ID NO: 2503505 - DNA, 25 bp, Homo sapien
ggtgtgaactaccactcctaaccag

SEQ ID NO: 2503506 - DNA, 25 bp, Homo sapien
tgtaaacgtagtttggaaattctga

SEQ ID NO: 2503507 - DNA, 25 bp, Homo sapien
cgaagcgataaagcaaacatgccat

SEQ ID NO: 2503508 - DNA, 25 bp, Homo sapien
ggttcagtgtcgaagcgataaagca

SEQ ID NO: 2503509 - DNA, 25 bp, Homo sapien
attcctttagatggttcagtgtcga

SEQ ID NO: 2503510 - DNA, 25 bp, Homo sapien
acaactaacgttgtgcagcattacg

SEQ ID NO: 2503511 - DNA, 25 bp, Homo sapien
gataaggtaaagctcagggactgaa

SEQ ID NO: 2503512 - DNA, 25 bp, Homo sapien
caataacactgagctaccatagaga

SEQ ID NO: 2503513 - DNA, 25 bp, Homo sapien
tagacgctgtcctcaaagggatgtc

SEQ ID NO: 2503514 - DNA, 25 bp, Homo sapien
taagacacaatcttaaaggcgcggg

SEQ ID NO: 2503515 - DNA, 25 bp, Homo sapien
gctaatgtgaaaaactaatctgtac

SEQ ID NO: 2503516 - DNA, 25 bp, Homo sapien
gattacattcccatagactgcagaa

SEQ ID NO: 2503517 - DNA, 25 bp, Homo sapien
taagagtcttagagtagcacaggtt

SEQ ID NO: 2503518 - DNA, 25 bp, Homo sapien
tagatggtaagcatcattgaaagaa

SEQ ID NO: 2503519 - DNA, 25 bp, Homo sapien
gctaaaatagatggtaagcatcatt

SEQ ID NO: 2503520 - DNA, 25 bp, Homo sapien
tcaacaccatcacggtatctcagtt

SEQ ID NO: 2503521 - DNA, 25 bp, Homo sapien
ttgaaagaaatcaacaccatcacgg

SEQ ID NO: 2503522 - DNA, 25 bp, Homo sapien
tctcagttatagtagcagtcctcgt

SEQ ID NO: 2503523 - DNA, 25 bp, Homo sapien
cgtaaactttatgtcagcctgagga

SEQ ID NO: 2503524 - DNA, 25 bp, Homo sapien
gattaccagcaaggaattaaagcgg

SEQ ID NO: 2503525 - DNA, 25 bp, Homo sapien
tgtgtatctggtgaaatctgggccc

SEQ ID NO: 2503526 - DNA, 25 bp, Homo sapien
tcttttaaaaaaacattgccatgaa

SEQ ID NO: 2503527 - DNA, 25 bp, Homo sapien
gttcactcacagttcaccaagacat

SEQ ID NO: 2503528 - DNA, 25 bp, Homo sapien
agccctcatgctgtgtgaaggtctc

SEQ ID NO: 2503529 - DNA, 25 bp, Homo sapien
caagacatcactaaactaacatgtt

SEQ ID NO: 2503530 - DNA, 25 bp, Homo sapien
catgtatgcttctacttattaacct

SEQ ID NO: 2503531 - DNA, 25 bp, Homo sapien
tgatccacaggtcacttacgctgag

SEQ ID NO: 2503532 - DNA, 25 bp, Homo sapien
gcatcagttataaggaagcttccca

SEQ ID NO: 2503533 - DNA, 25 bp, Homo sapien
tacactgttcaggaccatgcttggg

SEQ ID NO: 2503534 - DNA, 25 bp, Homo sapien
catgcttgggtactactgatgatcc

SEQ ID NO: 2503535 - DNA, 25 bp, Homo sapien
gaggctctgaatcttctatcctaaa

SEQ ID NO: 2503536 - DNA, 25 bp, Homo sapien
tccaaactatgtagtgggcttcctg

SEQ ID NO: 2503537 - DNA, 25 bp, Homo sapien
ggtgaattccactgtcaacagcatt

SEQ ID NO: 2503538 - DNA, 25 bp, Homo sapien
aggagcatcatcttcggcatcagtg

SEQ ID NO: 2503539 - DNA, 25 bp, Homo sapien
tacgaaatgcattcaccactcgaat

SEQ ID NO: 2503540 - DNA, 25 bp, Homo sapien
ctacgaaatgcattcaccactcgaa

SEQ ID NO: 2503541 - DNA, 25 bp, Homo sapien
ccacatactctaagaattaagaggt

SEQ ID NO: 2503542 - DNA, 25 bp, Homo sapien
taagacactacagaacaacaaaacc

SEQ ID NO: 2503543 - DNA, 25 bp, Homo sapien
taatgcagtggaacttgcaatacac

SEQ ID NO: 2503544 - DNA, 25 bp, Homo sapien
caaacagctaggtatgagtgaatca

SEQ ID NO: 2503545 - DNA, 25 bp, Homo sapien
ggtcacaagtatcgaggccagggct

SEQ ID NO: 2503546 - DNA, 25 bp, Homo sapien
ttagcacactacaaacttaaaacaa

SEQ ID NO: 2503547 - DNA, 25 bp, Homo sapien
ggccagggcttctcgaactttaatg

SEQ ID NO: 2503548 - DNA, 25 bp, Homo sapien
taaagctgctggtccatgatccaca

SEQ ID NO: 2503549 - DNA, 25 bp, Homo sapien
taaccaggaatcatcgaaccagagt

SEQ ID NO: 2503550 - DNA, 25 bp, Homo sapien
tactctgtggagcatacttataccc

SEQ ID NO: 2503551 - DNA, 25 bp, Homo sapien
tactaggccagttcagcaatgctcg

SEQ ID NO: 2503552 - DNA, 25 bp, Homo sapien
tctaaggcatgacactgagctggct

SEQ ID NO: 2503553 - DNA, 25 bp, Homo sapien
aagcagtagaagaggaaaacactac

SEQ ID NO: 2503554 - DNA, 25 bp, Homo sapien
tagtagaagcagtagaagaggaaaa

SEQ ID NO: 2503555 - DNA, 25 bp, Homo sapien
gaagcagtagaagaggaaaacacta

SEQ ID NO: 2503556 - DNA, 25 bp, Homo sapien
tagaagcagtagaagaggaaaacac

SEQ ID NO: 2503557 - DNA, 25 bp, Homo sapien
tggctggcgatggagggttgccgcc

SEQ ID NO: 2503558 - DNA, 25 bp, Homo sapien
tttgttacatcatgatgctggctgg

SEQ ID NO: 2503559 - DNA, 25 bp, Homo sapien
ttgccgccttagagccccctgaatg

SEQ ID NO: 2503560 - DNA, 25 bp, Homo sapien
aaatatttgttacatcatgatgctg

SEQ ID NO: 2503561 - DNA, 25 bp, Homo sapien
caaggaatcagagattgtgacagct

SEQ ID NO: 2503562 - DNA, 25 bp, Homo sapien
ctgcaaggaatcagagattgtgaca

SEQ ID NO: 2503563 - DNA, 25 bp, Homo sapien
gcaaggaatcagagattgtgacagc

SEQ ID NO: 2503564 - DNA, 25 bp, Homo sapien
aggaatcagagattgtgacagcttg

SEQ ID NO: 2503565 - DNA, 25 bp, Homo sapien
tgatcaatctcttcaacatcctctg

SEQ ID NO: 2503566 - DNA, 25 bp, Homo sapien
tggattctgttcagacctctaaacc

SEQ ID NO: 2503567 - DNA, 25 bp, Homo sapien
gcaactccctttcagcgtgatcaat

SEQ ID NO: 2503568 - DNA, 25 bp, Homo sapien
taaaccacaagatttggccacgccg

SEQ ID NO: 2503569 - DNA, 25 bp, Homo sapien
ctaggaatattgaccatagccactg

SEQ ID NO: 2503570 - DNA, 25 bp, Homo sapien
gccactgttctattgaaagttctga

SEQ ID NO: 2503571 - DNA, 25 bp, Homo sapien
ctattgaaagttctgaacaactgaa

SEQ ID NO: 2503572 - DNA, 25 bp, Homo sapien
attcctaggaatattgaccatagcc

SEQ ID NO: 2503573 - DNA, 25 bp, Homo sapien
tctttcaccatgaattttccgggca

SEQ ID NO: 2503574 - DNA, 25 bp, Homo sapien
gatggcattgttaaagattccttcg

SEQ ID NO: 2503575 - DNA, 25 bp, Homo sapien
tttcgttgaaaagttgcatcagcac

SEQ ID NO: 2503576 - DNA, 25 bp, Homo sapien
ctaaaacaattgtgcagaagatggc

SEQ ID NO: 2503577 - DNA, 25 bp, Homo sapien
tatctaaattagtggagagccaggg

SEQ ID NO: 2503578 - DNA, 25 bp, Homo sapien
gaaacctgggattatctagtacaac

SEQ ID NO: 2503579 - DNA, 25 bp, Homo sapien
aaactatggtgataatctcaggatc

SEQ ID NO: 2503580 - DNA, 25 bp, Homo sapien
tactaagcactcactgattaagaag

SEQ ID NO: 2503581 - DNA, 25 bp, Homo sapien
tggttccgttgccagagccagggaa

SEQ ID NO: 2503582 - DNA, 25 bp, Homo sapien
tacaagttgatagaatgcatgaccc

SEQ ID NO: 2503583 - DNA, 25 bp, Homo sapien
gaggtttacccacagcatctgcaca

SEQ ID NO: 2503584 - DNA, 25 bp, Homo sapien
tctgcacagccttaagcggtgagtc

SEQ ID NO: 2503585 - DNA, 25 bp, Homo sapien
tctgtgagaataatatcggatgctt

SEQ ID NO: 2503586 - DNA, 25 bp, Homo sapien
ttgagtaatgcaggcgcccgtaaaa

SEQ ID NO: 2503587 - DNA, 25 bp, Homo sapien
tttcgtccccacataactgctttaa

SEQ ID NO: 2503588 - DNA, 25 bp, Homo sapien
gcttctttagctacatcagttccag

SEQ ID NO: 2503589 - DNA, 25 bp, Homo sapien
taatataccatgttggcgagactgg

SEQ ID NO: 2503590 - DNA, 25 bp, Homo sapien
agagacaggattttaatataccatg

SEQ ID NO: 2503591 - DNA, 25 bp, Homo sapien
gattttaatataccatgttggcgag

SEQ ID NO: 2503592 - DNA, 25 bp, Homo sapien
tagctaagattacagtcacacatca

SEQ ID NO: 2503593 - DNA, 25 bp, Homo sapien
catcatcagaagtaggcttggcaaa

SEQ ID NO: 2503594 - DNA, 25 bp, Homo sapien
attcgctgatgaatgagggcctctt

SEQ ID NO: 2503595 - DNA, 25 bp, Homo sapien
tctctacaggcagagtcaaggactt

SEQ ID NO: 2503596 - DNA, 25 bp, Homo sapien
tccgggactggaatactgaacacag

SEQ ID NO: 2503597 - DNA, 25 bp, Homo sapien
catgaagagcttaaaaaacactaac

SEQ ID NO: 2503598 - DNA, 25 bp, Homo sapien
cagcctgtttttgaactaaatttag

SEQ ID NO: 2503599 - DNA, 25 bp, Homo sapien
gtatctgtcttacattcaagttttg

SEQ ID NO: 2503600 - DNA, 25 bp, Homo sapien
ccaacaagccattgtattgtgtatt

SEQ ID NO: 2503601 - DNA, 25 bp, Homo sapien
tgttcctaaagggaatgagcctgtt

SEQ ID NO: 2503602 - DNA, 25 bp, Homo sapien
ctaccaatgcagctgccaaccattt

SEQ ID NO: 2503603 - DNA, 25 bp, Homo sapien
ctgccaccatggtagatcttctaaa

SEQ ID NO: 2503604 - DNA, 25 bp, Homo sapien
taattattccatagacctcttcagc

SEQ ID NO: 2503605 - DNA, 25 bp, Homo sapien
taccatcaccagttacagctacaac

SEQ ID NO: 2503606 - DNA, 25 bp, Homo sapien
acatctgctttctttagtgctgggc

SEQ ID NO: 2503607 - DNA, 25 bp, Homo sapien
aacctggcgttggtctgagacagtg

SEQ ID NO: 2503608 - DNA, 25 bp, Homo sapien
tgctttctttagtgctgggccatca

SEQ ID NO: 2503609 - DNA, 25 bp, Homo sapien
tgatcttgcaagtactcgaagtttt

SEQ ID NO: 2503610 - DNA, 25 bp, Homo sapien
taaccagtgtatgcttatcagtagg

SEQ ID NO: 2503611 - DNA, 25 bp, Homo sapien
gcttatcagtaggagatgatcttgc

SEQ ID NO: 2503612 - DNA, 25 bp, Homo sapien
agttttggccaaatcttgtctatcc

SEQ ID NO: 2503613 - DNA, 25 bp, Homo sapien
gaacaatcagaaactcctgggaact

SEQ ID NO: 2503614 - DNA, 25 bp, Homo sapien
taaaatatgcccaaacatagtttct

SEQ ID NO: 2503615 - DNA, 25 bp, Homo sapien
tcttaaatcctaatgagctatctgg

SEQ ID NO: 2503616 - DNA, 25 bp, Homo sapien
ggcatatttatcagtagctctcaaa

SEQ ID NO: 2503617 - DNA, 25 bp, Homo sapien
ttaaattcctaatatattaaacatc

SEQ ID NO: 2503618 - DNA, 25 bp, Homo sapien
cctaaggtatagactgcatttattt

SEQ ID NO: 2503619 - DNA, 25 bp, Homo sapien
ttgagttaaattcctaatatattaa

SEQ ID NO: 2503620 - DNA, 25 bp, Homo sapien
gcatttatttcatgcatggtgccta

SEQ ID NO: 2503621 - DNA, 25 bp, Homo sapien
tatcaccagtgaccatccgcacagt

SEQ ID NO: 2503622 - DNA, 25 bp, Homo sapien
acatttggtagcaatggcccgagca

SEQ ID NO: 2503623 - DNA, 25 bp, Homo sapien
ggcccgagcagtattaatattatca

SEQ ID NO: 2503624 - DNA, 25 bp, Homo sapien
gtaattccagccctctgacactttt

SEQ ID NO: 2503625 - DNA, 25 bp, Homo sapien
taaagtgggtatcgattcaggtgtc

SEQ ID NO: 2503626 - DNA, 25 bp, Homo sapien
gagagtcatagttccacctgtaaag

SEQ ID NO: 2503627 - DNA, 25 bp, Homo sapien
tagggttaagggtggctcacaatcc

SEQ ID NO: 2503628 - DNA, 25 bp, Homo sapien
tacctgtctagcagaaacctaagag

SEQ ID NO: 2503629 - DNA, 25 bp, Homo sapien
agaacagggaccaagtcttattcct

SEQ ID NO: 2503630 - DNA, 25 bp, Homo sapien
cccagaatatcttaaggcctatgag

SEQ ID NO: 2503631 - DNA, 25 bp, Homo sapien
ggcagacccactatgaaccatcaga

SEQ ID NO: 2503632 - DNA, 25 bp, Homo sapien
cctcacagcccagtaaggccagaga

SEQ ID NO: 2503633 - DNA, 25 bp, Homo sapien
taaggccggtgacaatatcattttc

SEQ ID NO: 2503634 - DNA, 25 bp, Homo sapien
tgatgccatcggttcaatcacagtt

SEQ ID NO: 2503635 - DNA, 25 bp, Homo sapien
gacatatggttctcaagccttctga

SEQ ID NO: 2503636 - DNA, 25 bp, Homo sapien
caacagcaatgcatgtaaggccggt

SEQ ID NO: 2503637 - DNA, 25 bp, Homo sapien
tgcacccttgctgaatattcgataa

SEQ ID NO: 2503638 - DNA, 25 bp, Homo sapien
cagttttattaccaacgtgacgagg

SEQ ID NO: 2503639 - DNA, 25 bp, Homo sapien
gaagtcccaacaaggcacattcagt

SEQ ID NO: 2503640 - DNA, 25 bp, Homo sapien
cctaacagaattgaaggtgtagact

SEQ ID NO: 2503641 - DNA, 25 bp, Homo sapien
tggtttcacaagcatccagatgcct

SEQ ID NO: 2503642 - DNA, 25 bp, Homo sapien
tcattgtcaaagttcctgttttatc

SEQ ID NO: 2503643 - DNA, 25 bp, Homo sapien
taagcttgaacgactgtcattctgt

SEQ ID NO: 2503644 - DNA, 25 bp, Homo sapien
aattcacagaaattcctgttacaag

SEQ ID NO: 2503645 - DNA, 25 bp, Homo sapien
gaatcaattcaggtacctacatccg

SEQ ID NO: 2503646 - DNA, 25 bp, Homo sapien
aatactgaatatatgtctccaacgg

SEQ ID NO: 2503647 - DNA, 25 bp, Homo sapien
tattgctgcataacataacctagtg

SEQ ID NO: 2503648 - DNA, 25 bp, Homo sapien
ggattaagcctccttattaagtgga

SEQ ID NO: 2503649 - DNA, 25 bp, Homo sapien
ggcactgcgaccactaaaactgtaa

SEQ ID NO: 2503650 - DNA, 25 bp, Homo sapien
tgaacccagaaggtgtcaatgacaa

SEQ ID NO: 2503651 - DNA, 25 bp, Homo sapien
agcaagccatggtcttttctgaacc

SEQ ID NO: 2503652 - DNA, 25 bp, Homo sapien
ctgaataagccagtgagatcgtgac

SEQ ID NO: 2503653 - DNA, 25 bp, Homo sapien
gaatgataactgtgatggcagacat

SEQ ID NO: 2503654 - DNA, 25 bp, Homo sapien
ctagaatgataactgtgatggcaga

SEQ ID NO: 2503655 - DNA, 25 bp, Homo sapien
tagaatgataactgtgatggcagac

SEQ ID NO: 2503656 - DNA, 25 bp, Homo sapien
aatgataactgtgatggcagacatc

SEQ ID NO: 2503657 - DNA, 25 bp, Homo sapien
ctgcatttccatggctgcaccatcc

SEQ ID NO: 2503658 - DNA, 25 bp, Homo sapien
ggctgcatttccatggctgcaccat

SEQ ID NO: 2503659 - DNA, 25 bp, Homo sapien
gctgcatttccatggctgcaccatc

SEQ ID NO: 2503660 - DNA, 25 bp, Homo sapien
acatttaagagcaaatagaacttca

SEQ ID NO: 2503661 - DNA, 25 bp, Homo sapien
tcaatagctccatcttgtttcttat

SEQ ID NO: 2503662 - DNA, 25 bp, Homo sapien
gattctcaatagctccatcttgttt

SEQ ID NO: 2503663 - DNA, 25 bp, Homo sapien
ctttgttgcgattctcaatagctcc

SEQ ID NO: 2503664 - DNA, 25 bp, Homo sapien
tgcgattctcaatagctccatcttg

SEQ ID NO: 2503665 - DNA, 25 bp, Homo sapien
tgatgagagtgaggacaaaatatgt

SEQ ID NO: 2503666 - DNA, 25 bp, Homo sapien
aatacgaatgtatagaataagccag

SEQ ID NO: 2503667 - DNA, 25 bp, Homo sapien
caaaagataggagaggtaacttagt

SEQ ID NO: 2503668 - DNA, 25 bp, Homo sapien
aaagacaactggcacacaggagagt

SEQ ID NO: 2503669 - DNA, 25 bp, Homo sapien
gagtaatcgctaaggcagtcaaggg

SEQ ID NO: 2503670 - DNA, 25 bp, Homo sapien
ctcaagtttggagagaccagacggc

SEQ ID NO: 2503671 - DNA, 25 bp, Homo sapien
taatacctagctacttttaatgagc

SEQ ID NO: 2503672 - DNA, 25 bp, Homo sapien
ggaactgagacacattaccccggac

SEQ ID NO: 2503673 - DNA, 25 bp, Homo sapien
tcatctttcttctcttcctcttcac

SEQ ID NO: 2503674 - DNA, 25 bp, Homo sapien
ttctcatctttcttctcttcctctt

SEQ ID NO: 2503675 - DNA, 25 bp, Homo sapien
cctttttcttctcatctttcttctc

SEQ ID NO: 2503676 - DNA, 25 bp, Homo sapien
tcctttttcttctcatctttcttct

SEQ ID NO: 2503677 - DNA, 25 bp, Homo sapien
ccagtttgagaatttacacctacag

SEQ ID NO: 2503678 - DNA, 25 bp, Homo sapien
acctacagctgtaactaccattctt

SEQ ID NO: 2503679 - DNA, 25 bp, Homo sapien
ccagctccaagtaaggtaaagataa

SEQ ID NO: 2503680 - DNA, 25 bp, Homo sapien
gctgtaactaccattcttccagagc

SEQ ID NO: 2503681 - DNA, 25 bp, Homo sapien
agatctccttgctaccaccaaattt

SEQ ID NO: 2503682 - DNA, 25 bp, Homo sapien
tagatctccttgctaccaccaaatt

SEQ ID NO: 2503683 - DNA, 25 bp, Homo sapien
tcatatccaagttcaaagctcaatc

SEQ ID NO: 2503684 - DNA, 25 bp, Homo sapien
cctgtctgtacacttcatagaaata

SEQ ID NO: 2503685 - DNA, 25 bp, Homo sapien
gccaccatgtcttgatcaataaaat

SEQ ID NO: 2503686 - DNA, 25 bp, Homo sapien
tgcttagcatactgcctagaatttg

SEQ ID NO: 2503687 - DNA, 25 bp, Homo sapien
cactaaaaggcttctaatccgtcta

SEQ ID NO: 2503688 - DNA, 25 bp, Homo sapien
cgtgctcggcctgaaggttatacaa

SEQ ID NO: 2503689 - DNA, 25 bp, Homo sapien
gataagtctgcttacggttctccga

SEQ ID NO: 2503690 - DNA, 25 bp, Homo sapien
ggttctccgacttgtacatccacat

SEQ ID NO: 2503691 - DNA, 25 bp, Homo sapien
caactcaagagatatcattaggcct

SEQ ID NO: 2503692 - DNA, 25 bp, Homo sapien
tgtgactgctagacctactcttggt

SEQ ID NO: 2503693 - DNA, 25 bp, Homo sapien
tctgactagatggaggtgtgactgc

SEQ ID NO: 2503694 - DNA, 25 bp, Homo sapien
tcacaatgaggttactacaagagcc

SEQ ID NO: 2503695 - DNA, 25 bp, Homo sapien
catcaattttaagatcgttgccttg

SEQ ID NO: 2503696 - DNA, 25 bp, Homo sapien
tttttaacatgatctgattcaccag

SEQ ID NO: 2503697 - DNA, 25 bp, Homo sapien
ttgaataagtatgccgtcagctgga

SEQ ID NO: 2503698 - DNA, 25 bp, Homo sapien
tgattcaccagtcaatgagctttca

SEQ ID NO: 2503699 - DNA, 25 bp, Homo sapien
ggtatctgaatgacctgaccacccc

SEQ ID NO: 2503700 - DNA, 25 bp, Homo sapien
caattcggctctgcaaacctctaaa

SEQ ID NO: 2503701 - DNA, 25 bp, Homo sapien
tgaccacccctgatgacagtgaact

SEQ ID NO: 2503702 - DNA, 25 bp, Homo sapien
cactacagacaagaggattgcagct

SEQ ID NO: 2503703 - DNA, 25 bp, Homo sapien
taaagtgacatcttgtaatgcttcc

SEQ ID NO: 2503704 - DNA, 25 bp, Homo sapien
catactaattgaagaaaggtttttg

SEQ ID NO: 2503705 - DNA, 25 bp, Homo sapien
ttctggaggctgataaaaagaaagg

SEQ ID NO: 2503706 - DNA, 25 bp, Homo sapien
gaaaggcccaatgatactatggctg

SEQ ID NO: 2503707 - DNA, 25 bp, Homo sapien
caaatttcagtgaacagttttactt

SEQ ID NO: 2503708 - DNA, 25 bp, Homo sapien
tagggactgttctacatgctgagga

SEQ ID NO: 2503709 - DNA, 25 bp, Homo sapien
tatcctggaggtagacagtagacaa

SEQ ID NO: 2503710 - DNA, 25 bp, Homo sapien
gaagactttcgagcagaacattccc

SEQ ID NO: 2503711 - DNA, 25 bp, Homo sapien
caatagaactctcttagtgggctac

SEQ ID NO: 2503712 - DNA, 25 bp, Homo sapien
gctggctatccatattgagaactca

SEQ ID NO: 2503713 - DNA, 25 bp, Homo sapien
cactgatgttcaaatagggcaagag

SEQ ID NO: 2503714 - DNA, 25 bp, Homo sapien
ggtagtcatattccaagacaggcaa

SEQ ID NO: 2503715 - DNA, 25 bp, Homo sapien
ggctacagcgttggagcacccaaca

SEQ ID NO: 2503716 - DNA, 25 bp, Homo sapien
gaactcttctgcctaattggctcag

SEQ ID NO: 2503717 - DNA, 25 bp, Homo sapien
ggtaataccacaggtaagccttcga

SEQ ID NO: 2503718 - DNA, 25 bp, Homo sapien
ggaattgatcttcttatggcccagt

SEQ ID NO: 2503719 - DNA, 25 bp, Homo sapien
aattcagggctgcaatgtttgtcta

SEQ ID NO: 2503720 - DNA, 25 bp, Homo sapien
atttttcgtaatgcatctgtggacc

SEQ ID NO: 2503721 - DNA, 25 bp, Homo sapien
ccgcagctctgcgagcgtaattcca

SEQ ID NO: 2503722 - DNA, 25 bp, Homo sapien
gtgcaaattccatagacatctccat

SEQ ID NO: 2503723 - DNA, 25 bp, Homo sapien
tccaaagtctccatcatgattagct

SEQ ID NO: 2503724 - DNA, 25 bp, Homo sapien
tgacctttggcccatgactagtttc

SEQ ID NO: 2503725 - DNA, 25 bp, Homo sapien
tcccagagaagtatcttgacctttg

SEQ ID NO: 2503726 - DNA, 25 bp, Homo sapien
taaaccaaacactcattgtatgact

SEQ ID NO: 2503727 - DNA, 25 bp, Homo sapien
tatcaatcatgagatatacacatct

SEQ ID NO: 2503728 - DNA, 25 bp, Homo sapien
tggacaagctgaaacttagcactgc

SEQ ID NO: 2503729 - DNA, 25 bp, Homo sapien
cagtgacagctacctcgtgagttta

SEQ ID NO: 2503730 - DNA, 25 bp, Homo sapien
tgatctccatatcttatcaagagag

SEQ ID NO: 2503731 - DNA, 25 bp, Homo sapien
taattgagcctaaatttatggccca

SEQ ID NO: 2503732 - DNA, 25 bp, Homo sapien
accaccatatccagctaatttttgt

SEQ ID NO: 2503733 - DNA, 25 bp, Homo sapien
gcatgcaccaccatatccagctaat

SEQ ID NO: 2503734 - DNA, 25 bp, Homo sapien
ctccgtgatctgcccgcctcggcct

SEQ ID NO: 2503735 - DNA, 25 bp, Homo sapien
tctcatgcctcagctgggattacag

SEQ ID NO: 2503736 - DNA, 25 bp, Homo sapien
aatatccttaccaaagctgtgacgg

SEQ ID NO: 2503737 - DNA, 25 bp, Homo sapien
aacagaatgtatactgagcagcaaa

SEQ ID NO: 2503738 - DNA, 25 bp, Homo sapien
gcagcaaactttggcttaacaatca

SEQ ID NO: 2503739 - DNA, 25 bp, Homo sapien
agatcccgtcgtgcaagtattgaac

SEQ ID NO: 2503740 - DNA, 25 bp, Homo sapien
gaaatactaggctacagggtctata

SEQ ID NO: 2503741 - DNA, 25 bp, Homo sapien
ctcctttaccccaagagaggagata

SEQ ID NO: 2503742 - DNA, 25 bp, Homo sapien
tgcaatctctatcctgagaggtccc

SEQ ID NO: 2503743 - DNA, 25 bp, Homo sapien
gaggtccctttagagacagcaagtc

SEQ ID NO: 2503744 - DNA, 25 bp, Homo sapien
aactgggccctctgatgtatgtata

SEQ ID NO: 2503745 - DNA, 25 bp, Homo sapien
tgggccctctgatgtatgtatattc

SEQ ID NO: 2503746 - DNA, 25 bp, Homo sapien
actgggccctctgatgtatgtatat

SEQ ID NO: 2503747 - DNA, 25 bp, Homo sapien
ggccctctgatgtatgtatattcct

SEQ ID NO: 2503748 - DNA, 25 bp, Homo sapien
ggaatatatagtccaatattagaaa

SEQ ID NO: 2503749 - DNA, 25 bp, Homo sapien
tttataccaggaatatatagtccaa

SEQ ID NO: 2503750 - DNA, 25 bp, Homo sapien
tataccaggaatatatagtccaata

SEQ ID NO: 2503751 - DNA, 25 bp, Homo sapien
ccaggaatatatagtccaatattag

SEQ ID NO: 2503752 - DNA, 25 bp, Homo sapien
gggaaacgaaacatgcaaaaatagc

SEQ ID NO: 2503753 - DNA, 25 bp, Homo sapien
tgatagataaaaagaccaatggact

SEQ ID NO: 2503754 - DNA, 25 bp, Homo sapien
tccaccacgatagcaaccaaaaaag

SEQ ID NO: 2503755 - DNA, 25 bp, Homo sapien
gccaagaaaccacagcgaagaataa

SEQ ID NO: 2503756 - DNA, 25 bp, Homo sapien
taatgcttacaaagctaccgcttgc

SEQ ID NO: 2503757 - DNA, 25 bp, Homo sapien
gaagcaactaggaaaagtaccctca

SEQ ID NO: 2503758 - DNA, 25 bp, Homo sapien
caaatatcagcagtcctcttagtcc

SEQ ID NO: 2503759 - DNA, 25 bp, Homo sapien
tattagcagtcctcttagttcctcc

SEQ ID NO: 2503760 - DNA, 25 bp, Homo sapien
ctgcgctcggccaaagacagggtaa

SEQ ID NO: 2503761 - DNA, 25 bp, Homo sapien
tgcgctcggccaaagacagggtaac

SEQ ID NO: 2503762 - DNA, 25 bp, Homo sapien
actgcgctcggccaaagacagggta

SEQ ID NO: 2503763 - DNA, 25 bp, Homo sapien
cgctcggccaaagacagggtaacat

SEQ ID NO: 2503764 - DNA, 25 bp, Homo sapien
ttctgagactcgacatgcagacagt

SEQ ID NO: 2503765 - DNA, 25 bp, Homo sapien
aaaggggttgactgacgaatccttg

SEQ ID NO: 2503766 - DNA, 25 bp, Homo sapien
gactgacgaatccttgtttttctga

SEQ ID NO: 2503767 - DNA, 25 bp, Homo sapien
gcagacagtttgatgctagaggagc

SEQ ID NO: 2503768 - DNA, 25 bp, Homo sapien
tattagttgtcaggagtgtccacac

SEQ ID NO: 2503769 - DNA, 25 bp, Homo sapien
tgtcagtatcatccatgagtgtccc

SEQ ID NO: 2503770 - DNA, 25 bp, Homo sapien
ttctggtctgaagtcctccgggttg

SEQ ID NO: 2503771 - DNA, 25 bp, Homo sapien
tcaatagcagtgcacctgtaaggtc

SEQ ID NO: 2503772 - DNA, 25 bp, Homo sapien
gactctaagaccgtcacacagtgga

SEQ ID NO: 2503773 - DNA, 25 bp, Homo sapien
tactacagtatgcaacacagctctc

SEQ ID NO: 2503774 - DNA, 25 bp, Homo sapien
gttgtatgtgaacagcatcccctgg

SEQ ID NO: 2503775 - DNA, 25 bp, Homo sapien
gacttataggcatcaagcacagcat

SEQ ID NO: 2503776 - DNA, 25 bp, Homo sapien
caggccccagtgagctgtctactgt

SEQ ID NO: 2503777 - DNA, 25 bp, Homo sapien
tacaaggctttgagtcgtgacatct

SEQ ID NO: 2503778 - DNA, 25 bp, Homo sapien
agatattggctttagaagatctctc

SEQ ID NO: 2503779 - DNA, 25 bp, Homo sapien
tatgctcagtttgaaaacgagtctt

SEQ ID NO: 2503780 - DNA, 25 bp, Homo sapien
ggaaaactggtccaggactgaagct

SEQ ID NO: 2503781 - DNA, 25 bp, Homo sapien
tgaggtaccaaatcactgaccccag

SEQ ID NO: 2503782 - DNA, 25 bp, Homo sapien
tagttttcaggcctaaggacaggac

SEQ ID NO: 2503783 - DNA, 25 bp, Homo sapien
catgctgctgataccatcctgaggt

SEQ ID NO: 2503784 - DNA, 25 bp, Homo sapien
ctagcatatgccatcatgttccttt

SEQ ID NO: 2503785 - DNA, 25 bp, Homo sapien
tgctcttgcaaacttctgattgcct

SEQ ID NO: 2503786 - DNA, 25 bp, Homo sapien
tacatagtccagatggtgcctggcc

SEQ ID NO: 2503787 - DNA, 25 bp, Homo sapien
ccagtcctcctacatagtccagatg

SEQ ID NO: 2503788 - DNA, 25 bp, Homo sapien
tgtggagactaattttgaaggcctg

SEQ ID NO: 2503789 - DNA, 25 bp, Homo sapien
atgtgctgcttttctaagaaactct

SEQ ID NO: 2503790 - DNA, 25 bp, Homo sapien
tgtgctgcttttctaagaaactctt

SEQ ID NO: 2503791 - DNA, 25 bp, Homo sapien
gtgctgcttttctaagaaactcttc

SEQ ID NO: 2503792 - DNA, 25 bp, Homo sapien
aagtgcaaattgatctgtaaccctc

SEQ ID NO: 2503793 - DNA, 25 bp, Homo sapien
aactcagaagcgaatccccactcag

SEQ ID NO: 2503794 - DNA, 25 bp, Homo sapien
tgttcgattcaagaagatagcttca

SEQ ID NO: 2503795 - DNA, 25 bp, Homo sapien
tcacatttgtcatagaactcagaag

SEQ ID NO: 2503796 - DNA, 25 bp, Homo sapien
ctgacaattctccattactgatgcc

SEQ ID NO: 2503797 - DNA, 25 bp, Homo sapien
tctgttggttctctgacaattctcc

SEQ ID NO: 2503798 - DNA, 25 bp, Homo sapien
tcttcctaccaccttgcaggcattg

SEQ ID NO: 2503799 - DNA, 25 bp, Homo sapien
ttactgatgccaaagcattgctttc

SEQ ID NO: 2503800 - DNA, 25 bp, Homo sapien
attaatcttatcaacgatggcctct

SEQ ID NO: 2503801 - DNA, 25 bp, Homo sapien
cattaatcttatcaacgatggcctc

SEQ ID NO: 2503802 - DNA, 25 bp, Homo sapien
ttaatcttatcaacgatggcctctt

SEQ ID NO: 2503803 - DNA, 25 bp, Homo sapien
aaatgcatttgccaatagcctgggt

SEQ ID NO: 2503804 - DNA, 25 bp, Homo sapien
tttgccaatagcctgggtcaggtgc

SEQ ID NO: 2503805 - DNA, 25 bp, Homo sapien
tgggttcctttgactgccacgtccc

SEQ ID NO: 2503806 - DNA, 25 bp, Homo sapien
tttgatgggccagtagaaaatgcat

SEQ ID NO: 2503807 - DNA, 25 bp, Homo sapien
ttcccagtttgctatcagtctttct

SEQ ID NO: 2503808 - DNA, 25 bp, Homo sapien
ctttctgggccagtcttgcagaact

SEQ ID NO: 2503809 - DNA, 25 bp, Homo sapien
ccagtttgctatcagtctttctggg

SEQ ID NO: 2503810 - DNA, 25 bp, Homo sapien
gtctttctgggccagtcttgcagaa

SEQ ID NO: 2503811 - DNA, 25 bp, Homo sapien
atcagaatggccccacctttaatca

SEQ ID NO: 2503812 - DNA, 25 bp, Homo sapien
agaatggccccacctttaatcagca

SEQ ID NO: 2503813 - DNA, 25 bp, Homo sapien
tcagaatggccccacctttaatcag

SEQ ID NO: 2503814 - DNA, 25 bp, Homo sapien
cagaatggccccacctttaatcagc

SEQ ID NO: 2503815 - DNA, 25 bp, Homo sapien
ttctgagatgctgtcttcaaaggca

SEQ ID NO: 2503816 - DNA, 25 bp, Homo sapien
ttatctcgatcatctgtcctctcca

SEQ ID NO: 2503817 - DNA, 25 bp, Homo sapien
ccccttccagtatattcttgaactt

SEQ ID NO: 2503818 - DNA, 25 bp, Homo sapien
gaatgccctccaaatttatctcgat

SEQ ID NO: 2503819 - DNA, 25 bp, Homo sapien
ccaaacactagacccaaaccaaatg

SEQ ID NO: 2503820 - DNA, 25 bp, Homo sapien
ggaagatgcgtgtctacagcaggac

SEQ ID NO: 2503821 - DNA, 25 bp, Homo sapien
tcagctgtgtcatcgatttgaaggg

SEQ ID NO: 2503822 - DNA, 25 bp, Homo sapien
caaaccaaatggatagttcagctgt

SEQ ID NO: 2503823 - DNA, 25 bp, Homo sapien
gccgcgctgaggcttgacgaggccg

SEQ ID NO: 2503824 - DNA, 25 bp, Homo sapien
gagcgagcgtgctagccaagcatgt

SEQ ID NO: 2503825 - DNA, 25 bp, Homo sapien
aacacagacccggtgagaggtactg

SEQ ID NO: 2503826 - DNA, 25 bp, Homo sapien
cccttttcctgaggcacgtgcgccg

SEQ ID NO: 2503827 - DNA, 25 bp, Homo sapien
caaaatctgtggaatctggtgttaa

SEQ ID NO: 2503828 - DNA, 25 bp, Homo sapien
ccacactcaggcagcttattgtctt

SEQ ID NO: 2503829 - DNA, 25 bp, Homo sapien
gttaatgtgaagtgactcttgctct

SEQ ID NO: 2503830 - DNA, 25 bp, Homo sapien
tatagatatttcacaccacactcag

SEQ ID NO: 2503831 - DNA, 25 bp, Homo sapien
aaacctgtggtgttggatgggtcca

SEQ ID NO: 2503832 - DNA, 25 bp, Homo sapien
gcagttctgctgttcaggcttgaca

SEQ ID NO: 2503833 - DNA, 25 bp, Homo sapien
cattgatgatgttcggccaacacct

SEQ ID NO: 2503834 - DNA, 25 bp, Homo sapien
gccaacacctcagtgaaggactctc

SEQ ID NO: 2503835 - DNA, 25 bp, Homo sapien
ccttcgttgtggtcagtgaatgagg

SEQ ID NO: 2503836 - DNA, 25 bp, Homo sapien
ggactgtactctgggaaggctcgat

SEQ ID NO: 2503837 - DNA, 25 bp, Homo sapien
aggactgtactctgggaaggctcga

SEQ ID NO: 2503838 - DNA, 25 bp, Homo sapien
aatgcttggccaccttcgttgtggt

SEQ ID NO: 2503839 - DNA, 25 bp, Homo sapien
aaccattaactgctggtgaatcacc

SEQ ID NO: 2503840 - DNA, 25 bp, Homo sapien
gagttttaattctaggaggtctgtg

SEQ ID NO: 2503841 - DNA, 25 bp, Homo sapien
ccagggtcataaaatggtataaact

SEQ ID NO: 2503842 - DNA, 25 bp, Homo sapien
tccagagatcagaaaaccattaact

SEQ ID NO: 2503843 - DNA, 25 bp, Homo sapien
tatttattgtccacaatgccatttt

SEQ ID NO: 2503844 - DNA, 25 bp, Homo sapien
ttatttattgtccacaatgccattt

SEQ ID NO: 2503845 - DNA, 25 bp, Homo sapien
cttcccccagttcttggcacacagg

SEQ ID NO: 2503846 - DNA, 25 bp, Homo sapien
tggcacacaggcagcagggacacca

SEQ ID NO: 2503847 - DNA, 25 bp, Homo sapien
ggcacacaggcagcagggacaccat

SEQ ID NO: 2503848 - DNA, 25 bp, Homo sapien
cccccagttcttggcacacaggcag

SEQ ID NO: 2503849 - DNA, 25 bp, Homo sapien
gcaaaccgggttggacggcatggct

SEQ ID NO: 2503850 - DNA, 25 bp, Homo sapien
ctgcacctccgggtagctgcccacc

SEQ ID NO: 2503851 - DNA, 25 bp, Homo sapien
acctccgggtagctgcccaccctgg

SEQ ID NO: 2503852 - DNA, 25 bp, Homo sapien
tctgcttgctgcaaaccgggttgga

SEQ ID NO: 2503853 - DNA, 25 bp, Homo sapien
ttgcagggatggtggtcgttaggaa

SEQ ID NO: 2503854 - DNA, 25 bp, Homo sapien
atggtggtcgttaggaagtgacaca

SEQ ID NO: 2503855 - DNA, 25 bp, Homo sapien
tgtttcattcctgccaattaagagc

SEQ ID NO: 2503856 - DNA, 25 bp, Homo sapien
tcctgccaattaagagcaacagctg

SEQ ID NO: 2503857 - DNA, 25 bp, Homo sapien
gagtaactcaattcgggaattttgc

SEQ ID NO: 2503858 - DNA, 25 bp, Homo sapien
tggctgattacagtgcgttaagagt

SEQ ID NO: 2503859 - DNA, 25 bp, Homo sapien
ggctcgatataacccaggcatttaa

SEQ ID NO: 2503860 - DNA, 25 bp, Homo sapien
tgagtggggctcgatataacccagg

SEQ ID NO: 2503861 - DNA, 25 bp, Homo sapien
gatgtcccttggtgcagaccttgtc

SEQ ID NO: 2503862 - DNA, 25 bp, Homo sapien
tattaataagagacaggcatctatc

SEQ ID NO: 2503863 - DNA, 25 bp, Homo sapien
caaagctagcttcctaaaggctctg

SEQ ID NO: 2503864 - DNA, 25 bp, Homo sapien
ctagacaagctgtaaatgtagggtc

SEQ ID NO: 2503865 - DNA, 25 bp, Homo sapien
catgggatcatctttgtgaatcggc

SEQ ID NO: 2503866 - DNA, 25 bp, Homo sapien
gggacaatctgtaaggagtactagg

SEQ ID NO: 2503867 - DNA, 25 bp, Homo sapien
tctttttgagaggtccatcatggga

SEQ ID NO: 2503868 - DNA, 25 bp, Homo sapien
gaatcggcacaagtgttttcatggt

SEQ ID NO: 2503869 - DNA, 25 bp, Homo sapien
tggaaatctgagagctatatgtttc

SEQ ID NO: 2503870 - DNA, 25 bp, Homo sapien
ttgctccactctgcattgtgggggc

SEQ ID NO: 2503871 - DNA, 25 bp, Homo sapien
tccactctgcattgtgggggctgga

SEQ ID NO: 2503872 - DNA, 25 bp, Homo sapien
ggaaatctgagagctatatgtttcc

SEQ ID NO: 2503873 - DNA, 25 bp, Homo sapien
ttctccatcaaccccactagctgct

SEQ ID NO: 2503874 - DNA, 25 bp, Homo sapien
cttctccatcaaccccactagctgc

SEQ ID NO: 2503875 - DNA, 25 bp, Homo sapien
tctccatcaaccccactagctgctg

SEQ ID NO: 2503876 - DNA, 25 bp, Homo sapien
gtagacactcaggctcctctggcat

SEQ ID NO: 2503877 - DNA, 25 bp, Homo sapien
tgtagacactcaggctcctctggca

SEQ ID NO: 2503878 - DNA, 25 bp, Homo sapien
ctgtagacactcaggctcctctggc

SEQ ID NO: 2503879 - DNA, 25 bp, Homo sapien
taaaacaccccagtgaatgcattct

SEQ ID NO: 2503880 - DNA, 25 bp, Homo sapien
tctaaaacaccccagtgaatgcatt

SEQ ID NO: 2503881 - DNA, 25 bp, Homo sapien
aacaccccagtgaatgcattcttct

SEQ ID NO: 2503882 - DNA, 25 bp, Homo sapien
aatcctctaaaacaccccagtgaat

SEQ ID NO: 2503883 - DNA, 25 bp, Homo sapien
gctcctttgttgtgaaccttggtcc

SEQ ID NO: 2503884 - DNA, 25 bp, Homo sapien
ccaaggatcctgaggacaaaggcat

SEQ ID NO: 2503885 - DNA, 25 bp, Homo sapien
tgaatttggctcatgcctgactttg

SEQ ID NO: 2503886 - DNA, 25 bp, Homo sapien
ggtccaactttgtcttatgcctgaa

SEQ ID NO: 2503887 - DNA, 25 bp, Homo sapien
aggagggcatatgcttttccagtag

SEQ ID NO: 2503888 - DNA, 25 bp, Homo sapien
tagcagtgataggtctgaccagatc

SEQ ID NO: 2503889 - DNA, 25 bp, Homo sapien
gagggcatatgcttttccagtagca

SEQ ID NO: 2503890 - DNA, 25 bp, Homo sapien
agtagcagtgataggtctgaccaga

SEQ ID NO: 2503891 - DNA, 25 bp, Homo sapien
tattctctgaccaccagaggtccgt

SEQ ID NO: 2503892 - DNA, 25 bp, Homo sapien
gaggtccgtgggtatgtgttcgtga

SEQ ID NO: 2503893 - DNA, 25 bp, Homo sapien
tatgtgttcgtgagtatgtgggctt

SEQ ID NO: 2503894 - DNA, 25 bp, Homo sapien
tctctgaccaccagaggtccgtggg

SEQ ID NO: 2503895 - DNA, 25 bp, Homo sapien
aggctggtgaaaatgcacttggaga

SEQ ID NO: 2503896 - DNA, 25 bp, Homo sapien
aaggctggtgaaaatgcacttggag

SEQ ID NO: 2503897 - DNA, 25 bp, Homo sapien
ggttttgatgctacgactaagttga

SEQ ID NO: 2503898 - DNA, 25 bp, Homo sapien
ctttggttttgatgctacgactaag

SEQ ID NO: 2503899 - DNA, 25 bp, Homo sapien
tctgatctccaatgaactgtgtctc

SEQ ID NO: 2503900 - DNA, 25 bp, Homo sapien
ttatgaatgtggcagttgattccac

SEQ ID NO: 2503901 - DNA, 25 bp, Homo sapien
tgtctcttggaaaattatttggtag

SEQ ID NO: 2503902 - DNA, 25 bp, Homo sapien
tttggtagacattgatcttatgaat

SEQ ID NO: 2503903 - DNA, 25 bp, Homo sapien
ggaactgtagttgccttcaagggac

SEQ ID NO: 2503904 - DNA, 25 bp, Homo sapien
caaatccacttgtgctgccagggtg

SEQ ID NO: 2503905 - DNA, 25 bp, Homo sapien
aatgtggcacttgctggagctgaca

SEQ ID NO: 2503906 - DNA, 25 bp, Homo sapien
tattttgtctggtaatgatcggaac

SEQ ID NO: 2503907 - DNA, 25 bp, Homo sapien
aatgcagttttcgtccctgaatcca

SEQ ID NO: 2503908 - DNA, 25 bp, Homo sapien
gaaaatgcagttttcgtccctgaat

SEQ ID NO: 2503909 - DNA, 25 bp, Homo sapien
caagctgtttttgatgatgaagttt

SEQ ID NO: 2503910 - DNA, 25 bp, Homo sapien
aagctgtttttgatgatgaagtttt

SEQ ID NO: 2503911 - DNA, 25 bp, Homo sapien
ccaagatttatggtttaccttcttg

SEQ ID NO: 2503912 - DNA, 25 bp, Homo sapien
agatttatggtttaccttcttgtga

SEQ ID NO: 2503913 - DNA, 25 bp, Homo sapien
tatggtttaccttcttgtgaacaat

SEQ ID NO: 2503914 - DNA, 25 bp, Homo sapien
tttatggtttaccttcttgtgaaca

SEQ ID NO: 2503915 - DNA, 25 bp, Homo sapien
gagttaaggctattatgtgtattaa

SEQ ID NO: 2503916 - DNA, 25 bp, Homo sapien
aaacatggtcactgattagggaatc

SEQ ID NO: 2503917 - DNA, 25 bp, Homo sapien
tccagatggtgagagttaaggctat

SEQ ID NO: 2503918 - DNA, 25 bp, Homo sapien
attagggaatccaagcagaaaagtc

SEQ ID NO: 2503919 - DNA, 25 bp, Homo sapien
cactaacagtatattccaatatcca

SEQ ID NO: 2503920 - DNA, 25 bp, Homo sapien
caatatccaaggagaaccggtgtgg

SEQ ID NO: 2503921 - DNA, 25 bp, Homo sapien
tgcaccatttgacaatctgcagtgc

SEQ ID NO: 2503922 - DNA, 25 bp, Homo sapien
gacaatctgcagtgctatgctcttt

SEQ ID NO: 2503923 - DNA, 25 bp, Homo sapien
catttgacaatctgcagtgctatgc

SEQ ID NO: 2503924 - DNA, 25 bp, Homo sapien
ctgcagtgctatgctctttctgtga

SEQ ID NO: 2503925 - DNA, 25 bp, Homo sapien
gaaagtagactgctgtcccacagtg

SEQ ID NO: 2503926 - DNA, 25 bp, Homo sapien
aggagaaagtagactgctgtcccac

SEQ ID NO: 2503927 - DNA, 25 bp, Homo sapien
gagaaagtagactgctgtcccacag

SEQ ID NO: 2503928 - DNA, 25 bp, Homo sapien
aaagtagactgctgtcccacagtgc

SEQ ID NO: 2503929 - DNA, 25 bp, Homo sapien
cagattcctcagagatgagggtctg

SEQ ID NO: 2503930 - DNA, 25 bp, Homo sapien
ttcagattcctcagagatgagggtc

SEQ ID NO: 2503931 - DNA, 25 bp, Homo sapien
acttcagattcctcagagatgaggg

SEQ ID NO: 2503932 - DNA, 25 bp, Homo sapien
tcagattcctcagagatgagggtct

SEQ ID NO: 2503933 - DNA, 25 bp, Homo sapien
ccaccaagaccagcagaagtgttag

SEQ ID NO: 2503934 - DNA, 25 bp, Homo sapien
ctaggtaagccaccaagaccagcag

SEQ ID NO: 2503935 - DNA, 25 bp, Homo sapien
agccaccaagaccagcagaagtgtt

SEQ ID NO: 2503936 - DNA, 25 bp, Homo sapien
gtaagccaccaagaccagcagaagt

SEQ ID NO: 2503937 - DNA, 25 bp, Homo sapien
gtgagtgagaggaatcccaaatcaa

SEQ ID NO: 2503938 - DNA, 25 bp, Homo sapien
ggaatcccaaatcaataatataggg

SEQ ID NO: 2503939 - DNA, 25 bp, Homo sapien
gaggaatcccaaatcaataatatag

SEQ ID NO: 2503940 - DNA, 25 bp, Homo sapien
tgagaggaatcccaaatcaataata

SEQ ID NO: 2503941 - DNA, 25 bp, Homo sapien
cagtcagcactgatggcaccgtaag

SEQ ID NO: 2503942 - DNA, 25 bp, Homo sapien
caccgtaagtactaaatggcaagca

SEQ ID NO: 2503943 - DNA, 25 bp, Homo sapien
cattgcttgtatcagcctgtattgc

SEQ ID NO: 2503944 - DNA, 25 bp, Homo sapien
aaatcttggtaggatcgtgggccac

SEQ ID NO: 2503945 - DNA, 25 bp, Homo sapien
gatcttcaatgagtaagatgctgcc

SEQ ID NO: 2503946 - DNA, 25 bp, Homo sapien
tatattttgtacctggaagacaggc

SEQ ID NO: 2503947 - DNA, 25 bp, Homo sapien
caagggaatttgaaggaagccttag

SEQ ID NO: 2503948 - DNA, 25 bp, Homo sapien
tgaggaaaaacatagggatgaataa

SEQ ID NO: 2503949 - DNA, 25 bp, Homo sapien
agtactgaccgggaccaatactaga

SEQ ID NO: 2503950 - DNA, 25 bp, Homo sapien
tttcctgtatcgtctttccatctga

SEQ ID NO: 2503951 - DNA, 25 bp, Homo sapien
ctacaccagtactgaccgggaccaa

SEQ ID NO: 2503952 - DNA, 25 bp, Homo sapien
catctgaaattcactactacaccag

SEQ ID NO: 2503953 - DNA, 25 bp, Homo sapien
gagagcatgtcaaaccaccggaaga

SEQ ID NO: 2503954 - DNA, 25 bp, Homo sapien
catgtcaaaccaccggaagacctca

SEQ ID NO: 2503955 - DNA, 25 bp, Homo sapien
caaaccaccggaagacctcagtcat

SEQ ID NO: 2503956 - DNA, 25 bp, Homo sapien
cctgaggagagcatgtcaaaccacc

SEQ ID NO: 2503957 - DNA, 25 bp, Homo sapien
tatgcaagcctagagcctcatcctc

SEQ ID NO: 2503958 - DNA, 25 bp, Homo sapien
tcatcctcaggacgactgctgggaa

SEQ ID NO: 2503959 - DNA, 25 bp, Homo sapien
tcaggacgactgctgggaatctctg

SEQ ID NO: 2503960 - DNA, 25 bp, Homo sapien
taagtgccctgacaaatatgcaagc

SEQ ID NO: 2503961 - DNA, 25 bp, Homo sapien
tatgcttttcggattaggcttcctg

SEQ ID NO: 2503962 - DNA, 25 bp, Homo sapien
taccagtgttccagaattactcatg

SEQ ID NO: 2503963 - DNA, 25 bp, Homo sapien
ctctggatctcaggcttattaccag

SEQ ID NO: 2503964 - DNA, 25 bp, Homo sapien
aattactcatggctctcttgggtcc

SEQ ID NO: 2503965 - DNA, 25 bp, Homo sapien
tctcaacttgtgaccaaggcttaat

SEQ ID NO: 2503966 - DNA, 25 bp, Homo sapien
tgctctcaacttgtgaccaaggctt

SEQ ID NO: 2503967 - DNA, 25 bp, Homo sapien
ttctgctctcaacttgtgaccaagg

SEQ ID NO: 2503968 - DNA, 25 bp, Homo sapien
acttgtgaccaaggcttaattcttt

SEQ ID NO: 2503969 - DNA, 25 bp, Homo sapien
tttttctggttctgtattgccatac

SEQ ID NO: 2503970 - DNA, 25 bp, Homo sapien
tctggttctgtattgccatactggt

SEQ ID NO: 2503971 - DNA, 25 bp, Homo sapien
tggttctgtattgccatactggttc

SEQ ID NO: 2503972 - DNA, 25 bp, Homo sapien
tctgtattgccatactggttctttc

SEQ ID NO: 2503973 - DNA, 25 bp, Homo sapien
aggtcttgttggcacaggtttctcc

SEQ ID NO: 2503974 - DNA, 25 bp, Homo sapien
ccctgtttttcctgttgacatacat

SEQ ID NO: 2503975 - DNA, 25 bp, Homo sapien
gccctgtttttcctgttgacataca

SEQ ID NO: 2503976 - DNA, 25 bp, Homo sapien
ctagccctgtttttcctgttgacat

SEQ ID NO: 2503977 - DNA, 25 bp, Homo sapien
tagccctgtttttcctgttgacata

SEQ ID NO: 2503978 - DNA, 25 bp, Homo sapien
tgtaagtactcctcacaggtacctc

SEQ ID NO: 2503979 - DNA, 25 bp, Homo sapien
tcaccacgactgattccactctgct

SEQ ID NO: 2503980 - DNA, 25 bp, Homo sapien
taagtactcctcacaggtacctcac

SEQ ID NO: 2503981 - DNA, 25 bp, Homo sapien
caggtacctcaccacgactgattcc

SEQ ID NO: 2503982 - DNA, 25 bp, Homo sapien
ggcaaataactgatattgaccatcc

SEQ ID NO: 2503983 - DNA, 25 bp, Homo sapien
caaataactgatattgaccatccat

SEQ ID NO: 2503984 - DNA, 25 bp, Homo sapien
ttctggcaaataactgatattgacc

SEQ ID NO: 2503985 - DNA, 25 bp, Homo sapien
tctggcaaataactgatattgacca

SEQ ID NO: 2503986 - DNA, 25 bp, Homo sapien
gaggcagccattcccgttgctgtct

SEQ ID NO: 2503987 - DNA, 25 bp, Homo sapien
agccattcccgttgctgtctctttg

SEQ ID NO: 2503988 - DNA, 25 bp, Homo sapien
cccgttgctgtctctttgccacaga

SEQ ID NO: 2503989 - DNA, 25 bp, Homo sapien
cagagaggcagccattcccgttgct

SEQ ID NO: 2503990 - DNA, 25 bp, Homo sapien
ggtattctgagtggtctaacatctc

SEQ ID NO: 2503991 - DNA, 25 bp, Homo sapien
gttcttccaggatgataattcgtat

SEQ ID NO: 2503992 - DNA, 25 bp, Homo sapien
tctgagtggtctaacatctccagag

SEQ ID NO: 2503993 - DNA, 25 bp, Homo sapien
tccaggatgataattcgtatgaatt

SEQ ID NO: 2503994 - DNA, 25 bp, Homo sapien
ataaaatgcaaaacctagagtcacc

SEQ ID NO: 2503995 - DNA, 25 bp, Homo sapien
aaatgcaaaacctagagtcacccaa

SEQ ID NO: 2503996 - DNA, 25 bp, Homo sapien
aaaatgcaaaacctagagtcaccca

SEQ ID NO: 2503997 - DNA, 25 bp, Homo sapien
taaaatgcaaaacctagagtcaccc

SEQ ID NO: 2503998 - DNA, 25 bp, Homo sapien
gaggttgatgacaccaggaaagtct

SEQ ID NO: 2503999 - DNA, 25 bp, Homo sapien
cactagcaacatagacaaagaggtt

SEQ ID NO: 2504000 - DNA, 25 bp, Homo sapien
tctgtctaccatcagtaagaaaaca

SEQ ID NO: 2504001 - DNA, 25 bp, Homo sapien
acatctaagttaggcagatttttgc

SEQ ID NO: 2504002 - DNA, 25 bp, Homo sapien
gactaagttgtaatgatttgatctc

SEQ ID NO: 2504003 - DNA, 25 bp, Homo sapien
tcatttgtactggtgcagttgactc

SEQ ID NO: 2504004 - DNA, 25 bp, Homo sapien
tccagtgtttctcacaagaggaact

SEQ ID NO: 2504005 - DNA, 25 bp, Homo sapien
cagttgactcttggtgcagttgact

SEQ ID NO: 2504006 - DNA, 25 bp, Homo sapien
ttccacctcaacgttgttctttctg

SEQ ID NO: 2504007 - DNA, 25 bp, Homo sapien
ctcaacgttgttctttctgtctgcc

SEQ ID NO: 2504008 - DNA, 25 bp, Homo sapien
tgtctgccctaacctttacaaccat

SEQ ID NO: 2504009 - DNA, 25 bp, Homo sapien
tttctgtctgccctaacctttacaa

SEQ ID NO: 2504010 - DNA, 25 bp, Homo sapien
atgtaaagtggtcaaaaaatcaagt

SEQ ID NO: 2504011 - DNA, 25 bp, Homo sapien
gagttcttgaagtcaatcttgtaag

SEQ ID NO: 2504012 - DNA, 25 bp, Homo sapien
gagactatcttctgtgcatgtaaag

SEQ ID NO: 2504013 - DNA, 25 bp, Homo sapien
caagtttccatttactgccacttct

SEQ ID NO: 2504014 - DNA, 25 bp, Homo sapien
aactacagctttaggactgggggca

SEQ ID NO: 2504015 - DNA, 25 bp, Homo sapien
cttctattaacatgcttgtaacagc

SEQ ID NO: 2504016 - DNA, 25 bp, Homo sapien
catgtgagacagttgcttgtggagt

SEQ ID NO: 2504017 - DNA, 25 bp, Homo sapien
aatggcttttatatccagcgtgtag

SEQ ID NO: 2504018 - DNA, 25 bp, Homo sapien
gaagatttgcctcccatttcatcag

SEQ ID NO: 2504019 - DNA, 25 bp, Homo sapien
tctccaagcttcctgtttaatgccc

SEQ ID NO: 2504020 - DNA, 25 bp, Homo sapien
cagcttgttcccttgcaagcagaag

SEQ ID NO: 2504021 - DNA, 25 bp, Homo sapien
tttcatcaggagatcgtttggtctc

SEQ ID NO: 2504022 - DNA, 25 bp, Homo sapien
tatctgttcccactcgagctggaaa

SEQ ID NO: 2504023 - DNA, 25 bp, Homo sapien
cctggtaaataggtataacacatat

SEQ ID NO: 2504024 - DNA, 25 bp, Homo sapien
ctggtaaataggtataacacatatt

SEQ ID NO: 2504025 - DNA, 25 bp, Homo sapien
gccatctaagattccatcaggtaca

SEQ ID NO: 2504026 - DNA, 25 bp, Homo sapien
tctgtcaggcaatcatccattggct

SEQ ID NO: 2504027 - DNA, 25 bp, Homo sapien
aagaagttttgccacacatgagtca

SEQ ID NO: 2504028 - DNA, 25 bp, Homo sapien
tagttatgtcagaggaaaaatagcc

SEQ ID NO: 2504029 - DNA, 25 bp, Homo sapien
tatttaggaaacgttcaatacatgt

SEQ ID NO: 2504030 - DNA, 25 bp, Homo sapien
cattatgctgcattgtacttgcaca

SEQ ID NO: 2504031 - DNA, 25 bp, Homo sapien
tttgtcactgggaattgggccttct

SEQ ID NO: 2504032 - DNA, 25 bp, Homo sapien
tcttctctatcctcagtgcgatatt

SEQ ID NO: 2504033 - DNA, 25 bp, Homo sapien
gttaacagctacttcacagaacttg

SEQ ID NO: 2504034 - DNA, 25 bp, Homo sapien
cctctactagtgaagtgacctatca

SEQ ID NO: 2504035 - DNA, 25 bp, Homo sapien
tcatggattatataagagtcaccca

SEQ ID NO: 2504036 - DNA, 25 bp, Homo sapien
gtatattctctagctcctattccag

SEQ ID NO: 2504037 - DNA, 25 bp, Homo sapien
cacaagaaggttgcatcataatcat

SEQ ID NO: 2504038 - DNA, 25 bp, Homo sapien
tctttgagctctgaggtttcaacgg

SEQ ID NO: 2504039 - DNA, 25 bp, Homo sapien
ggtggaaacagtgctgaacctccag

SEQ ID NO: 2504040 - DNA, 25 bp, Homo sapien
ctgaggtttcaacggcaagagaagg

SEQ ID NO: 2504041 - DNA, 25 bp, Homo sapien
ctaagctagaattgggtgaagtcct

SEQ ID NO: 2504042 - DNA, 25 bp, Homo sapien
gatatcctgatatcctgttgaacat

SEQ ID NO: 2504043 - DNA, 25 bp, Homo sapien
gaaaactgatatcctgatatcctgt

SEQ ID NO: 2504044 - DNA, 25 bp, Homo sapien
gactattatctctagtgccattgat

SEQ ID NO: 2504045 - DNA, 25 bp, Homo sapien
tgattggtcgggttagtaaaactga

SEQ ID NO: 2504046 - DNA, 25 bp, Homo sapien
ccttgggcacgacgagatggtccat

SEQ ID NO: 2504047 - DNA, 25 bp, Homo sapien
ttgggcacgacgagatggtccattc

SEQ ID NO: 2504048 - DNA, 25 bp, Homo sapien
gggcacgacgagatggtccattcaa

SEQ ID NO: 2504049 - DNA, 25 bp, Homo sapien
cccttgggcacgacgagatggtcca

SEQ ID NO: 2504050 - DNA, 25 bp, Homo sapien
catgtccatagtttttatccaaagt

SEQ ID NO: 2504051 - DNA, 25 bp, Homo sapien
gtttctaatctatagcatctaacat

SEQ ID NO: 2504052 - DNA, 25 bp, Homo sapien
taatctatagcatctaacatctggt

SEQ ID NO: 2504053 - DNA, 25 bp, Homo sapien
ttatccaaagtttctaatctatagc

SEQ ID NO: 2504054 - DNA, 25 bp, Homo sapien
tttgtctcctactccagcatgtgta

SEQ ID NO: 2504055 - DNA, 25 bp, Homo sapien
caaaactttagatcttactttgata

SEQ ID NO: 2504056 - DNA, 25 bp, Homo sapien
cttactttgatattgccattttgtc

SEQ ID NO: 2504057 - DNA, 25 bp, Homo sapien
tactccagcatgtgtatttcttact

SEQ ID NO: 2504058 - DNA, 25 bp, Homo sapien
atatttgtgccacttccctagagaa

SEQ ID NO: 2504059 - DNA, 25 bp, Homo sapien
catatttgtgccacttccctagaga

SEQ ID NO: 2504060 - DNA, 25 bp, Homo sapien
cctttgagccaacttgggcttccat

SEQ ID NO: 2504061 - DNA, 25 bp, Homo sapien
ggtgccaagaatagtcctggagctt

SEQ ID NO: 2504062 - DNA, 25 bp, Homo sapien
tgatgctggtgccaagaatagtcct

SEQ ID NO: 2504063 - DNA, 25 bp, Homo sapien
ctggcttgatgctggtgccaagaat

SEQ ID NO: 2504064 - DNA, 25 bp, Homo sapien
ggaagtagcctctgcactatttctc

SEQ ID NO: 2504065 - DNA, 25 bp, Homo sapien
ccaactgttcaaatgacttattctg

SEQ ID NO: 2504066 - DNA, 25 bp, Homo sapien
gttcaaatgacttattctggtccat

SEQ ID NO: 2504067 - DNA, 25 bp, Homo sapien
actgttcaaatgacttattctggtc

SEQ ID NO: 2504068 - DNA, 25 bp, Homo sapien
caactgttcaaatgacttattctgg

SEQ ID NO: 2504069 - DNA, 25 bp, Homo sapien
cacaatgaagttgtaacccaaacca

SEQ ID NO: 2504070 - DNA, 25 bp, Homo sapien
tttgggtcacaatgaagttgtaacc

SEQ ID NO: 2504071 - DNA, 25 bp, Homo sapien
tttagaattttttgggtcacaatga

SEQ ID NO: 2504072 - DNA, 25 bp, Homo sapien
agaattttttgggtcacaatgaagt

SEQ ID NO: 2504073 - DNA, 25 bp, Homo sapien
gtcaagtgaagatgacaaattggga

SEQ ID NO: 2504074 - DNA, 25 bp, Homo sapien
tgccacattaagttttgcaaaaggt

SEQ ID NO: 2504075 - DNA, 25 bp, Homo sapien
cacatggtacatcataataacccag

SEQ ID NO: 2504076 - DNA, 25 bp, Homo sapien
tgcaaaaggttgcaaatgagtcata

SEQ ID NO: 2504077 - DNA, 25 bp, Homo sapien
gttctgcaagccctgcaacatctcc

SEQ ID NO: 2504078 - DNA, 25 bp, Homo sapien
ttgggactcagggttcctttgtgta

SEQ ID NO: 2504079 - DNA, 25 bp, Homo sapien
tgggactcagggttcctttgtgtac

SEQ ID NO: 2504080 - DNA, 25 bp, Homo sapien
actcagggttcctttgtgtactcat

SEQ ID NO: 2504081 - DNA, 25 bp, Homo sapien
ggactcagggttcctttgtgtactc

SEQ ID NO: 2504082 - DNA, 25 bp, Homo sapien
ctgacttcttctaagggctttaggg

SEQ ID NO: 2504083 - DNA, 25 bp, Homo sapien
tgactgtagggtagccagggttctt

SEQ ID NO: 2504084 - DNA, 25 bp, Homo sapien
ttcactgacttcttctaagggcttt

SEQ ID NO: 2504085 - DNA, 25 bp, Homo sapien
tcaggcaactggtgactgtagggta

SEQ ID NO: 2504086 - DNA, 25 bp, Homo sapien
gcaccattccaatacacactagtgg

SEQ ID NO: 2504087 - DNA, 25 bp, Homo sapien
tctcatgcagatcagtaggcagtgt

SEQ ID NO: 2504088 - DNA, 25 bp, Homo sapien
gaattgttcctagtacgagttgtta

SEQ ID NO: 2504089 - DNA, 25 bp, Homo sapien
taggatcctattgctagcttgatgg

SEQ ID NO: 2504090 - DNA, 25 bp, Homo sapien
tgatggttgccttgctaattactgc

SEQ ID NO: 2504091 - DNA, 25 bp, Homo sapien
tattgattaatgagcatgcttcagc

SEQ ID NO: 2504092 - DNA, 25 bp, Homo sapien
gggactctcccttactattgattaa

SEQ ID NO: 2504093 - DNA, 25 bp, Homo sapien
cccaaggaaggttatatagctgtta

SEQ ID NO: 2504094 - DNA, 25 bp, Homo sapien
ttcctgcacactacctaataagatg

SEQ ID NO: 2504095 - DNA, 25 bp, Homo sapien
tcttcctgcacactacctaataaga

SEQ ID NO: 2504096 - DNA, 25 bp, Homo sapien
gcacactacctaataagatgaaact

SEQ ID NO: 2504097 - DNA, 25 bp, Homo sapien
cctgcacactacctaataagatgaa

SEQ ID NO: 2504098 - DNA, 25 bp, Homo sapien
ccattagagcattaatgtcaaccgt

SEQ ID NO: 2504099 - DNA, 25 bp, Homo sapien
aattcttagcaccaaccattagagc

SEQ ID NO: 2504100 - DNA, 25 bp, Homo sapien
cattgcttctatggaaaaggacggg

SEQ ID NO: 2504101 - DNA, 25 bp, Homo sapien
tcaaccgtaaaaggaaacatcattg

SEQ ID NO: 2504102 - DNA, 25 bp, Homo sapien
taccttggactttaactagatgtgc

SEQ ID NO: 2504103 - DNA, 25 bp, Homo sapien
cctaagccatgttccactgtttgca

SEQ ID NO: 2504104 - DNA, 25 bp, Homo sapien
gactatatccaataacgaggcttca

SEQ ID NO: 2504105 - DNA, 25 bp, Homo sapien
tctggaaatatgctatggatggaac

SEQ ID NO: 2504106 - DNA, 25 bp, Homo sapien
catggggaatcctctccatgactgg

SEQ ID NO: 2504107 - DNA, 25 bp, Homo sapien
atggggaatcctctccatgactgga

SEQ ID NO: 2504108 - DNA, 25 bp, Homo sapien
ggcagataaccagttccacagaagc

SEQ ID NO: 2504109 - DNA, 25 bp, Homo sapien
gagcactggtgaacatttagtagcg

SEQ ID NO: 2504110 - DNA, 25 bp, Homo sapien
aaatacagggattgaaaatggcttc

SEQ ID NO: 2504111 - DNA, 25 bp, Homo sapien
tccaagctcattaagtggccaagtt

SEQ ID NO: 2504112 - DNA, 25 bp, Homo sapien
taagcgatgacacaagagcctgcaa

SEQ ID NO: 2504113 - DNA, 25 bp, Homo sapien
acatagatctgtttattaatggaac

SEQ ID NO: 2504114 - DNA, 25 bp, Homo sapien
agatctgtttattaatggaactcac

SEQ ID NO: 2504115 - DNA, 25 bp, Homo sapien
atagatctgtttattaatggaactc

SEQ ID NO: 2504116 - DNA, 25 bp, Homo sapien
ttacatagatctgtttattaatgga

SEQ ID NO: 2504117 - DNA, 25 bp, Homo sapien
tttagcctcaaatcagttccatccc

SEQ ID NO: 2504118 - DNA, 25 bp, Homo sapien
aaattgctaatccagtttagcctca

SEQ ID NO: 2504119 - DNA, 25 bp, Homo sapien
tagcctcaaatcagttccatccctt

SEQ ID NO: 2504120 - DNA, 25 bp, Homo sapien
agtttagcctcaaatcagttccatc

SEQ ID NO: 2504121 - DNA, 25 bp, Homo sapien
cctgtgccatgaacagggattcctg

SEQ ID NO: 2504122 - DNA, 25 bp, Homo sapien
tgggtttaaaaaagtgcagcttata

SEQ ID NO: 2504123 - DNA, 25 bp, Homo sapien
aagtgcagcttataaagttctctct

SEQ ID NO: 2504124 - DNA, 25 bp, Homo sapien
gtggcactttgggaattatctgctc

SEQ ID NO: 2504125 - DNA, 25 bp, Homo sapien
cctctgggttgggactgaatgctag

SEQ ID NO: 2504126 - DNA, 25 bp, Homo sapien
cagcagcggggcaagagactggttt

SEQ ID NO: 2504127 - DNA, 25 bp, Homo sapien
tcctcgctcgcctcctttgcatcac

SEQ ID NO: 2504128 - DNA, 25 bp, Homo sapien
acatattcagcctcttcgacctctt

SEQ ID NO: 2504129 - DNA, 25 bp, Homo sapien
cgcgtcgtttccggaggatctggct

SEQ ID NO: 2504130 - DNA, 25 bp, Homo sapien
cgtcgtttccggaggatctggctgg

SEQ ID NO: 2504131 - DNA, 25 bp, Homo sapien
ggcgcgtcgtttccggaggatctgg

SEQ ID NO: 2504132 - DNA, 25 bp, Homo sapien
gggcgcgtcgtttccggaggatctg

SEQ ID NO: 2504133 - DNA, 25 bp, Homo sapien
actcatacagcttgaccggccgcgg

SEQ ID NO: 2504134 - DNA, 25 bp, Homo sapien
ctcatgtcctcgtagatctggttca

SEQ ID NO: 2504135 - DNA, 25 bp, Homo sapien
gcaggccatacacccgaaacacttg

SEQ ID NO: 2504136 - DNA, 25 bp, Homo sapien
gaaacacttgcaccgggcaggggaa

SEQ ID NO: 2504137 - DNA, 25 bp, Homo sapien
gtctattgtacgctggagcacccgg

SEQ ID NO: 2504138 - DNA, 25 bp, Homo sapien
ccccagttagagcacacgggtggtt

SEQ ID NO: 2504139 - DNA, 25 bp, Homo sapien
ggctatatcggtgcggtctattgta

SEQ ID NO: 2504140 - DNA, 25 bp, Homo sapien
ctgttgcttcggctgcttccttggg

SEQ ID NO: 2504141 - DNA, 25 bp, Homo sapien
ctcaaggaggccgagtgtgcccagc

SEQ ID NO: 2504142 - DNA, 25 bp, Homo sapien
agctcaaggaggccgagtgtgccca

SEQ ID NO: 2504143 - DNA, 25 bp, Homo sapien
gaggccgagtgtgcccagccacagc

SEQ ID NO: 2504144 - DNA, 25 bp, Homo sapien
caaggaggccgagtgtgcccagcca

SEQ ID NO: 2504145 - DNA, 25 bp, Homo sapien
cggtagtaatcgcttgtccttcgca

SEQ ID NO: 2504146 - DNA, 25 bp, Homo sapien
tgggatcacgttttcctctccagga

SEQ ID NO: 2504147 - DNA, 25 bp, Homo sapien
gaagagcctcgtctcgtcaacctgt

SEQ ID NO: 2504148 - DNA, 25 bp, Homo sapien
cagatggtagcgacctgaagctgtc

SEQ ID NO: 2504149 - DNA, 25 bp, Homo sapien
gctcaattcaagcaagtctggaggc

SEQ ID NO: 2504150 - DNA, 25 bp, Homo sapien
cagtttatccgaaagctttgtatca

SEQ ID NO: 2504151 - DNA, 25 bp, Homo sapien
gtctggaggcagtttatccgaaagc

SEQ ID NO: 2504152 - DNA, 25 bp, Homo sapien
tccaggtgaacattcgcagggggct

SEQ ID NO: 2504153 - DNA, 25 bp, Homo sapien
tgagttttgaaaaccccacattcta

SEQ ID NO: 2504154 - DNA, 25 bp, Homo sapien
tgggccttcatctgaacccggtggg

SEQ ID NO: 2504155 - DNA, 25 bp, Homo sapien
cccacattctacacctttggagggc

SEQ ID NO: 2504156 - DNA, 25 bp, Homo sapien
cttgaggcgggggtttagaagatgg

SEQ ID NO: 2504157 - DNA, 25 bp, Homo sapien
gaacttcagtctatataaggctcca

SEQ ID NO: 2504158 - DNA, 25 bp, Homo sapien
taaggctccattaaatgccagaaaa

SEQ ID NO: 2504159 - DNA, 25 bp, Homo sapien
tgctgagtggaattgcacaaaatgg

SEQ ID NO: 2504160 - DNA, 25 bp, Homo sapien
gcaaaatgtgtgaaagccctgaagc

SEQ ID NO: 2504161 - DNA, 25 bp, Homo sapien
cttttattcttgtcgtagaattggg

SEQ ID NO: 2504162 - DNA, 25 bp, Homo sapien
tttattcttgtcgtagaattgggtg

SEQ ID NO: 2504163 - DNA, 25 bp, Homo sapien
attcttgtcgtagaattgggtgttt

SEQ ID NO: 2504164 - DNA, 25 bp, Homo sapien
tattcttgtcgtagaattgggtgtt

SEQ ID NO: 2504165 - DNA, 25 bp, Homo sapien
tctaaaatgagttgtcagctcttta

SEQ ID NO: 2504166 - DNA, 25 bp, Homo sapien
taactaatcagtttatcgaagatct

SEQ ID NO: 2504167 - DNA, 25 bp, Homo sapien
atttgcatggtgtcattataatgac

SEQ ID NO: 2504168 - DNA, 25 bp, Homo sapien
gcacacagaaatacactacataact

SEQ ID NO: 2504169 - DNA, 25 bp, Homo sapien
tagtcatatcatctctcagaacaca

SEQ ID NO: 2504170 - DNA, 25 bp, Homo sapien
tcctaaaacttgcaagtgatacatg

SEQ ID NO: 2504171 - DNA, 25 bp, Homo sapien
tgaaatgatataggatatgaactcc

SEQ ID NO: 2504172 - DNA, 25 bp, Homo sapien
ggtttattcctaactcatctggtgt

SEQ ID NO: 2504173 - DNA, 25 bp, Homo sapien
tagacaaggctcccaacaggcagac

SEQ ID NO: 2504174 - DNA, 25 bp, Homo sapien
ttagacaaggctcccaacaggcaga

SEQ ID NO: 2504175 - DNA, 25 bp, Homo sapien
tctagtgccttacgaatataagtca

SEQ ID NO: 2504176 - DNA, 25 bp, Homo sapien
tccaatcgaatgtcctctagtgcct

SEQ ID NO: 2504177 - DNA, 25 bp, Homo sapien
gaacgtatcttcgtgcatttccaga

SEQ ID NO: 2504178 - DNA, 25 bp, Homo sapien
gtcaaatttttaacattgcagaacg

SEQ ID NO: 2504179 - DNA, 25 bp, Homo sapien
tctaaagaagatttgtgtaccaaaa

SEQ ID NO: 2504180 - DNA, 25 bp, Homo sapien
tttctaaagaagatttgtgtaccaa

SEQ ID NO: 2504181 - DNA, 25 bp, Homo sapien
ttttcttcaacacgtgaaactttca

SEQ ID NO: 2504182 - DNA, 25 bp, Homo sapien
tcaacacgtgaaactttcagtggtt

SEQ ID NO: 2504183 - DNA, 25 bp, Homo sapien
gagggatgtggtccaagttgttatc

SEQ ID NO: 2504184 - DNA, 25 bp, Homo sapien
gtggtccaagttgttatcagtgagg

SEQ ID NO: 2504185 - DNA, 25 bp, Homo sapien
acagatgatggagatcatacatgtc

SEQ ID NO: 2504186 - DNA, 25 bp, Homo sapien
tgaagggctcgtagattttctggga

SEQ ID NO: 2504187 - DNA, 25 bp, Homo sapien
caagctctcgaagttgaggcagttt

SEQ ID NO: 2504188 - DNA, 25 bp, Homo sapien
tgttgtcacgcaggacaagctctcg

SEQ ID NO: 2504189 - DNA, 25 bp, Homo sapien
tcaataaatgtcaaagtggttggca

SEQ ID NO: 2504190 - DNA, 25 bp, Homo sapien
ggcagttttcggaatgcatcttcat

SEQ ID NO: 2504191 - DNA, 25 bp, Homo sapien
caggctttggcattcaagtttcatt

SEQ ID NO: 2504192 - DNA, 25 bp, Homo sapien
gaaggccgttaatgctgtcatccat

SEQ ID NO: 2504193 - DNA, 25 bp, Homo sapien
tgtgtaaagcggtgaaggccgttaa

SEQ ID NO: 2504194 - DNA, 25 bp, Homo sapien
tcattctcagtgctaacatttaaca

SEQ ID NO: 2504195 - DNA, 25 bp, Homo sapien
tcatggtcatcacagtacacggtgg

SEQ ID NO: 2504196 - DNA, 25 bp, Homo sapien
gcgggaatagaaataagcggtgttc

SEQ ID NO: 2504197 - DNA, 25 bp, Homo sapien
tctttggcagcggaggaatagcatc

SEQ ID NO: 2504198 - DNA, 25 bp, Homo sapien
tacacggtggtacttatacaagtac

SEQ ID NO: 2504199 - DNA, 25 bp, Homo sapien
tatcctgctcatcaattactctctg

SEQ ID NO: 2504200 - DNA, 25 bp, Homo sapien
agattttatcctgctcatcaattac

SEQ ID NO: 2504201 - DNA, 25 bp, Homo sapien
tggcctaatctcagaggcaaagatt

SEQ ID NO: 2504202 - DNA, 25 bp, Homo sapien
aactgctgtggcctaatctcagagg

SEQ ID NO: 2504203 - DNA, 25 bp, Homo sapien
tggggagaagagccatcaatcagcc

SEQ ID NO: 2504204 - DNA, 25 bp, Homo sapien
ccagaacccctgtgaattcaggctc

SEQ ID NO: 2504205 - DNA, 25 bp, Homo sapien
gccccagaacccctgtgaattcagg

SEQ ID NO: 2504206 - DNA, 25 bp, Homo sapien
aatcagcctgggagtagattcctcc

SEQ ID NO: 2504207 - DNA, 25 bp, Homo sapien
cctgaaggcatcactgtggctattt

SEQ ID NO: 2504208 - DNA, 25 bp, Homo sapien
aaggcatcactgtggctatttcaat

SEQ ID NO: 2504209 - DNA, 25 bp, Homo sapien
ctgttccctgaaggcatcactgtgg

SEQ ID NO: 2504210 - DNA, 25 bp, Homo sapien
tgaaggcatcactgtggctatttca

SEQ ID NO: 2504211 - DNA, 25 bp, Homo sapien
tctctgacggtctcgtaagcttggg

SEQ ID NO: 2504212 - DNA, 25 bp, Homo sapien
taagcttgggctgaaaatttgctcc

SEQ ID NO: 2504213 - DNA, 25 bp, Homo sapien
tgtggtatccccagaaatcccagac

SEQ ID NO: 2504214 - DNA, 25 bp, Homo sapien
gctccaggcaattgggatggcgaca

SEQ ID NO: 2504215 - DNA, 25 bp, Homo sapien
tgatttcttgttactaggtctaccc

SEQ ID NO: 2504216 - DNA, 25 bp, Homo sapien
aaggctgaagtatgtaaagacgcaa

SEQ ID NO: 2504217 - DNA, 25 bp, Homo sapien
tctgatcatgagttcatcaccaagg

SEQ ID NO: 2504218 - DNA, 25 bp, Homo sapien
cacaagggattgttagtggctctct

SEQ ID NO: 2504219 - DNA, 25 bp, Homo sapien
aatctgactcttgtattcataaggc

SEQ ID NO: 2504220 - DNA, 25 bp, Homo sapien
tacactttaaagattgcccaaaata

SEQ ID NO: 2504221 - DNA, 25 bp, Homo sapien
ttgtcagtgttgcacattagttaca

SEQ ID NO: 2504222 - DNA, 25 bp, Homo sapien
tctatccttggttatcaaaagtagt

SEQ ID NO: 2504223 - DNA, 25 bp, Homo sapien
tgaaggaaataacatgagctttaaa

SEQ ID NO: 2504224 - DNA, 25 bp, Homo sapien
cagtggagttccaaactattgttct

SEQ ID NO: 2504225 - DNA, 25 bp, Homo sapien
aagcacattcactgttgagctacag

SEQ ID NO: 2504226 - DNA, 25 bp, Homo sapien
caaattttccacatcattgcgtgca

SEQ ID NO: 2504227 - DNA, 25 bp, Homo sapien
agttgtacaaattatccaggtcttc

SEQ ID NO: 2504228 - DNA, 25 bp, Homo sapien
cataggtttctgagtcatagttgat

SEQ ID NO: 2504229 - DNA, 25 bp, Homo sapien
ggtttctgagtcatagttgatggac

SEQ ID NO: 2504230 - DNA, 25 bp, Homo sapien
atcataggtttctgagtcatagttg

SEQ ID NO: 2504231 - DNA, 25 bp, Homo sapien
agcagcatcaaagatgacaagtccc

SEQ ID NO: 2504232 - DNA, 25 bp, Homo sapien
gcagcatcaaagatgacaagtccca

SEQ ID NO: 2504233 - DNA, 25 bp, Homo sapien
gtatttgcccctgaccaatggctgt

SEQ ID NO: 2504234 - DNA, 25 bp, Homo sapien
ctagtggtatttgcccctgaccaat

SEQ ID NO: 2504235 - DNA, 25 bp, Homo sapien
tggtatttgcccctgaccaatggct

SEQ ID NO: 2504236 - DNA, 25 bp, Homo sapien
agctagtggtatttgcccctgacca

SEQ ID NO: 2504237 - DNA, 25 bp, Homo sapien
gcaaattaatgcaggctgtgatgca

SEQ ID NO: 2504238 - DNA, 25 bp, Homo sapien
atggtaatgaactagaagtgactgc

SEQ ID NO: 2504239 - DNA, 25 bp, Homo sapien
aatgaaaatggtggccgagagcaat

SEQ ID NO: 2504240 - DNA, 25 bp, Homo sapien
gattcattccatacccattctcaag

SEQ ID NO: 2504241 - DNA, 25 bp, Homo sapien
gaagatgaggtccataactgaagga

SEQ ID NO: 2504242 - DNA, 25 bp, Homo sapien
cattaaagccattggaattggtggt

SEQ ID NO: 2504243 - DNA, 25 bp, Homo sapien
ttcatttccatccagacggaggtag

SEQ ID NO: 2504244 - DNA, 25 bp, Homo sapien
agtctgaagcaggtcattaaagcca

SEQ ID NO: 2504245 - DNA, 25 bp, Homo sapien
ggatgggctgggacatattacagag

SEQ ID NO: 2504246 - DNA, 25 bp, Homo sapien
gatgggctgggacatattacagaga

SEQ ID NO: 2504247 - DNA, 25 bp, Homo sapien
atgggctgggacatattacagagac

SEQ ID NO: 2504248 - DNA, 25 bp, Homo sapien
gcataatttgtaagcaagggctcta

SEQ ID NO: 2504249 - DNA, 25 bp, Homo sapien
ctatgtggagtcacttgaagtttac

SEQ ID NO: 2504250 - DNA, 25 bp, Homo sapien
tgaaatgcataatttgtaagcaagg

SEQ ID NO: 2504251 - DNA, 25 bp, Homo sapien
agggctctatgtggagtcacttgaa

SEQ ID NO: 2504252 - DNA, 25 bp, Homo sapien
atcaattgtccgtggggcttttaag

SEQ ID NO: 2504253 - DNA, 25 bp, Homo sapien
cacatcaattgtccgtggggctttt

SEQ ID NO: 2504254 - DNA, 25 bp, Homo sapien
cccacatcaattgtccgtggggctt

SEQ ID NO: 2504255 - DNA, 25 bp, Homo sapien
catcaattgtccgtggggcttttaa

SEQ ID NO: 2504256 - DNA, 25 bp, Homo sapien
tcttggaggcatattcctcagggca

SEQ ID NO: 2504257 - DNA, 25 bp, Homo sapien
tccagattgctaaaggtcccttgag

SEQ ID NO: 2504258 - DNA, 25 bp, Homo sapien
tgtgatttagtctcaaaaaggccac

SEQ ID NO: 2504259 - DNA, 25 bp, Homo sapien
aaatcctcttgatgggagaccctca

SEQ ID NO: 2504260 - DNA, 25 bp, Homo sapien
tagatttatccatcttagctgggtg

SEQ ID NO: 2504261 - DNA, 25 bp, Homo sapien
tggagaaggtacctcctctagctca

SEQ ID NO: 2504262 - DNA, 25 bp, Homo sapien
gacactcgaagtcatgaatagtcca

SEQ ID NO: 2504263 - DNA, 25 bp, Homo sapien
tcttcagctggcttagggctccttt

SEQ ID NO: 2504264 - DNA, 25 bp, Homo sapien
gaatcctcggtaaaatatatgcact

SEQ ID NO: 2504265 - DNA, 25 bp, Homo sapien
gaaacagtgaaacctactcgtccca

SEQ ID NO: 2504266 - DNA, 25 bp, Homo sapien
cacggaatcttagtgcctacacagc

SEQ ID NO: 2504267 - DNA, 25 bp, Homo sapien
tatttaccaataggcagctgaaggc

SEQ ID NO: 2504268 - DNA, 25 bp, Homo sapien
gaagaaataaactgcactgatggta

SEQ ID NO: 2504269 - DNA, 25 bp, Homo sapien
gtaatggagattccagaaaccactg

SEQ ID NO: 2504270 - DNA, 25 bp, Homo sapien
tgatggtaacacagccaagttttct

SEQ ID NO: 2504271 - DNA, 25 bp, Homo sapien
tttggtgccagtggatagtaatgga

SEQ ID NO: 2504272 - DNA, 25 bp, Homo sapien
catattctttacaaatttctgaatt

SEQ ID NO: 2504273 - DNA, 25 bp, Homo sapien
atattctttacaaatttctgaattc

SEQ ID NO: 2504274 - DNA, 25 bp, Homo sapien
gagcagacaagtctggaagctatat

SEQ ID NO: 2504275 - DNA, 25 bp, Homo sapien
gctatatagagaggcagtaaaaggg

SEQ ID NO: 2504276 - DNA, 25 bp, Homo sapien
tgagcagacaagtctggaagctata

SEQ ID NO: 2504277 - DNA, 25 bp, Homo sapien
tggaagctatatagagaggcagtaa

SEQ ID NO: 2504278 - DNA, 25 bp, Homo sapien
tgctaaggttccaagatgacatatt

SEQ ID NO: 2504279 - DNA, 25 bp, Homo sapien
ggttccaagatgacatattgtcccg

SEQ ID NO: 2504280 - DNA, 25 bp, Homo sapien
tcaaatgctaaggttccaagatgac

SEQ ID NO: 2504281 - DNA, 25 bp, Homo sapien
gatgacatattgtcccgaacctcat

SEQ ID NO: 2504282 - DNA, 25 bp, Homo sapien
taggtcccatctcccaacattattg

SEQ ID NO: 2504283 - DNA, 25 bp, Homo sapien
aaagtcaaggcgctcacatctggtg

SEQ ID NO: 2504284 - DNA, 25 bp, Homo sapien
tgtcatctcatgttggaagggtagg

SEQ ID NO: 2504285 - DNA, 25 bp, Homo sapien
ttcatttatttgggcagagccctca

SEQ ID NO: 2504286 - DNA, 25 bp, Homo sapien
cttaaaagcactggcaataaaagca

SEQ ID NO: 2504287 - DNA, 25 bp, Homo sapien
ttagtctcagcgaatatttttagga

SEQ ID NO: 2504288 - DNA, 25 bp, Homo sapien
tatggtcagttaagtttcaacaaag

SEQ ID NO: 2504289 - DNA, 25 bp, Homo sapien
gagattggatccttagttcatacca

SEQ ID NO: 2504290 - DNA, 25 bp, Homo sapien
cctctgatgaaaggccgctgtacca

SEQ ID NO: 2504291 - DNA, 25 bp, Homo sapien
taaactgaggctgctatcacactct

SEQ ID NO: 2504292 - DNA, 25 bp, Homo sapien
cagtctcaatgatgatcctctgatg

SEQ ID NO: 2504293 - DNA, 25 bp, Homo sapien
gcacatatctgccagtcaactcagt

SEQ ID NO: 2504294 - DNA, 25 bp, Homo sapien
caggccagagatatcttttgatttc

SEQ ID NO: 2504295 - DNA, 25 bp, Homo sapien
tatatactcatagaaagctgaaagc

SEQ ID NO: 2504296 - DNA, 25 bp, Homo sapien
tgaaccagtaaaaacaccaggaatg

SEQ ID NO: 2504297 - DNA, 25 bp, Homo sapien
cactggtatgggatgagcagacctt

SEQ ID NO: 2504298 - DNA, 25 bp, Homo sapien
gatttccatgcaaccagtaaaaggt

SEQ ID NO: 2504299 - DNA, 25 bp, Homo sapien
tatgtatttaatccaagctttgagg

SEQ ID NO: 2504300 - DNA, 25 bp, Homo sapien
tcttggcctcaatatctaccaccta

SEQ ID NO: 2504301 - DNA, 25 bp, Homo sapien
gaaaagtttcactaggtaagtatgc

SEQ ID NO: 2504302 - DNA, 25 bp, Homo sapien
atatggatactatgaaaactgacac

SEQ ID NO: 2504303 - DNA, 25 bp, Homo sapien
taaaatatggatactatgaaaactg

SEQ ID NO: 2504304 - DNA, 25 bp, Homo sapien
tgtgatgaaataggcctgcctttca

SEQ ID NO: 2504305 - DNA, 25 bp, Homo sapien
gatgaaataggcctgcctttcatct

SEQ ID NO: 2504306 - DNA, 25 bp, Homo sapien
ttaattaagagtgacttcgttagca

SEQ ID NO: 2504307 - DNA, 25 bp, Homo sapien
taagagtgacttcgttagcaacacg

SEQ ID NO: 2504308 - DNA, 25 bp, Homo sapien
gacttcgttagcaacacgtagacat

SEQ ID NO: 2504309 - DNA, 25 bp, Homo sapien
tcgttagcaacacgtagacattcat

SEQ ID NO: 2504310 - DNA, 25 bp, Homo sapien
aaatgcttgatcttggagtaggata

SEQ ID NO: 2504311 - DNA, 25 bp, Homo sapien
gagtaggataatggccccaggatct

SEQ ID NO: 2504312 - DNA, 25 bp, Homo sapien
catccaaacgcaaatgcttgatctt

SEQ ID NO: 2504313 - DNA, 25 bp, Homo sapien
ggtttctgagatgcgattgccatcc

SEQ ID NO: 2504314 - DNA, 25 bp, Homo sapien
tctatcttaccgtgttgcatgaaga

SEQ ID NO: 2504315 - DNA, 25 bp, Homo sapien
tgggcaacactggaacacttatctg

SEQ ID NO: 2504316 - DNA, 25 bp, Homo sapien
agtcccatcttggaattctacctct

SEQ ID NO: 2504317 - DNA, 25 bp, Homo sapien
ctgatcttgttagaaataacacatc

SEQ ID NO: 2504318 - DNA, 25 bp, Homo sapien
tgttgtgcagcccaggtatttaaac

SEQ ID NO: 2504319 - DNA, 25 bp, Homo sapien
aacacttgagcacacatcaaacaca

SEQ ID NO: 2504320 - DNA, 25 bp, Homo sapien
ggtatttaaacacttgagcacacat

SEQ ID NO: 2504321 - DNA, 25 bp, Homo sapien
cagcgcccgggcgacattttgtttt

SEQ ID NO: 2504322 - DNA, 25 bp, Homo sapien
aagtgggcccacagactctgtcagg

SEQ ID NO: 2504323 - DNA, 25 bp, Homo sapien
ggtattccactatcagccagttcgt

SEQ ID NO: 2504324 - DNA, 25 bp, Homo sapien
cagatccagctcaaccagggatgac

SEQ ID NO: 2504325 - DNA, 25 bp, Homo sapien
gttatgagtaagctgcagatcctcc

SEQ ID NO: 2504326 - DNA, 25 bp, Homo sapien
gaaaatcataatcatagtactggcc

SEQ ID NO: 2504327 - DNA, 25 bp, Homo sapien
tgcacagtttggtgatgattgccca

SEQ ID NO: 2504328 - DNA, 25 bp, Homo sapien
tactggccactggtaccaccaatca

SEQ ID NO: 2504329 - DNA, 25 bp, Homo sapien
caatctggttattcctaaggtaaag

SEQ ID NO: 2504330 - DNA, 25 bp, Homo sapien
cttgacactgctttcgttaattctt

SEQ ID NO: 2504331 - DNA, 25 bp, Homo sapien
gctttcgttaattcttaaagcagat

SEQ ID NO: 2504332 - DNA, 25 bp, Homo sapien
tcgttaattcttaaagcagatgcac

SEQ ID NO: 2504333 - DNA, 25 bp, Homo sapien
tgacactgctttcgttaattcttaa

SEQ ID NO: 2504334 - DNA, 25 bp, Homo sapien
ccaccaatatatgctgtgaactctg

SEQ ID NO: 2504335 - DNA, 25 bp, Homo sapien
tctgtcaggacggaactggctgcca

SEQ ID NO: 2504336 - DNA, 25 bp, Homo sapien
gtgaactctgtcaggacggaactgg

SEQ ID NO: 2504337 - DNA, 25 bp, Homo sapien
accaatatatgctgtgaactctgtc

SEQ ID NO: 2504338 - DNA, 25 bp, Homo sapien
cacgccagtctctgaatggagttat

SEQ ID NO: 2504339 - DNA, 25 bp, Homo sapien
tggtgtggcatgtgaacactgctct

SEQ ID NO: 2504340 - DNA, 25 bp, Homo sapien
ttacaagcctctttacatctgtggc

SEQ ID NO: 2504341 - DNA, 25 bp, Homo sapien
tgctctctaacgaagtgcaggtgaa

SEQ ID NO: 2504342 - DNA, 25 bp, Homo sapien
ttgtcttgtgatttgtaggtggcct

SEQ ID NO: 2504343 - DNA, 25 bp, Homo sapien
cagaaacatctggtcccataagctt

SEQ ID NO: 2504344 - DNA, 25 bp, Homo sapien
ggtggcctggtatttcttacaatgt

SEQ ID NO: 2504345 - DNA, 25 bp, Homo sapien
cctgaacctcagtaaaagctttgtc

SEQ ID NO: 2504346 - DNA, 25 bp, Homo sapien
caaattggccctgtaaaatgtgttg

SEQ ID NO: 2504347 - DNA, 25 bp, Homo sapien
acaatctatattccggcatctctag

SEQ ID NO: 2504348 - DNA, 25 bp, Homo sapien
tctgtgctgataaagaaggatcaca

SEQ ID NO: 2504349 - DNA, 25 bp, Homo sapien
ccttgacacctccatatggaagttg

SEQ ID NO: 2504350 - DNA, 25 bp, Homo sapien
tgtcatgtcctggaatgtctcctcc

SEQ ID NO: 2504351 - DNA, 25 bp, Homo sapien
gagggcaaggcattatgcactgctg

SEQ ID NO: 2504352 - DNA, 25 bp, Homo sapien
tatgtgctagtagatatatctgatc

SEQ ID NO: 2504353 - DNA, 25 bp, Homo sapien
gaagcattcattcagccctcacagt

SEQ ID NO: 2504354 - DNA, 25 bp, Homo sapien
ccttacagaggccaataagcaggag

SEQ ID NO: 2504355 - DNA, 25 bp, Homo sapien
taataacaatggcagtagcaacacc

SEQ ID NO: 2504356 - DNA, 25 bp, Homo sapien
tacaataggaaacgagaggactctc

SEQ ID NO: 2504357 - DNA, 25 bp, Homo sapien
gattatagctcgaactgtgtgcctg

SEQ ID NO: 2504358 - DNA, 25 bp, Homo sapien
catggagtgtgcatcattgaaggct

SEQ ID NO: 2504359 - DNA, 25 bp, Homo sapien
cacacttgtcagttaagcagcagga

SEQ ID NO: 2504360 - DNA, 25 bp, Homo sapien
gacaagagtgctggagaatcaggcc

SEQ ID NO: 2504361 - DNA, 25 bp, Homo sapien
agtgtccaaaatggtcttcccctct

SEQ ID NO: 2504362 - DNA, 25 bp, Homo sapien
tcaactgttatctcctcaagttttt

SEQ ID NO: 2504363 - DNA, 25 bp, Homo sapien
gtttttcatgttccactgcactcat

SEQ ID NO: 2504364 - DNA, 25 bp, Homo sapien
tcaagtttttcatgttccactgcac

SEQ ID NO: 2504365 - DNA, 25 bp, Homo sapien
ctcaactgttatctcctcaagtttt

SEQ ID NO: 2504366 - DNA, 25 bp, Homo sapien
gtaagtaaatcatccccaggcttat

SEQ ID NO: 2504367 - DNA, 25 bp, Homo sapien
aattgttgatagcacaaatgtacaa

SEQ ID NO: 2504368 - DNA, 25 bp, Homo sapien
gaaatgttcagcctgattacatgaa

SEQ ID NO: 2504369 - DNA, 25 bp, Homo sapien
cagaaaacatttctaacatgggtgg

SEQ ID NO: 2504370 - DNA, 25 bp, Homo sapien
gatgacataagttaccatactcaaa

SEQ ID NO: 2504371 - DNA, 25 bp, Homo sapien
tactcaaatgtaagatagggagagg

SEQ ID NO: 2504372 - DNA, 25 bp, Homo sapien
tctagaccagtcaggaaatgtatgc

SEQ ID NO: 2504373 - DNA, 25 bp, Homo sapien
gggtaaattgaaacatcagttctct

SEQ ID NO: 2504374 - DNA, 25 bp, Homo sapien
taatgacattagtaaaaattttaca

SEQ ID NO: 2504375 - DNA, 25 bp, Homo sapien
tgacattagtaaaaattttacatag

SEQ ID NO: 2504376 - DNA, 25 bp, Homo sapien
cattagtaaaaattttacatagcct

SEQ ID NO: 2504377 - DNA, 25 bp, Homo sapien
tagtaaaaattttacatagcctgta

SEQ ID NO: 2504378 - DNA, 25 bp, Homo sapien
tgaattcacacattcaaatgaggct

SEQ ID NO: 2504379 - DNA, 25 bp, Homo sapien
gactttatctcaaatgagctaactg

SEQ ID NO: 2504380 - DNA, 25 bp, Homo sapien
ttcaaatgaggctttaccagtaatg

SEQ ID NO: 2504381 - DNA, 25 bp, Homo sapien
gattaatacagagctagtgtttggc

SEQ ID NO: 2504382 - DNA, 25 bp, Homo sapien
tctctagtagctcagttaacatcaa

SEQ ID NO: 2504383 - DNA, 25 bp, Homo sapien
tctagtagctcagttaacatcaaca

SEQ ID NO: 2504384 - DNA, 25 bp, Homo sapien
aatatctctagtagctcagttaaca

SEQ ID NO: 2504385 - DNA, 25 bp, Homo sapien
tagtagctcagttaacatcaacaga

SEQ ID NO: 2504386 - DNA, 25 bp, Homo sapien
cttaaactggaaatttggctttatg

SEQ ID NO: 2504387 - DNA, 25 bp, Homo sapien
gtcatgtgggtaaaacatccacatt

SEQ ID NO: 2504388 - DNA, 25 bp, Homo sapien
catgtgggtaaaacatccacattgc

SEQ ID NO: 2504389 - DNA, 25 bp, Homo sapien
tcatgtgggtaaaacatccacattg

SEQ ID NO: 2504390 - DNA, 25 bp, Homo sapien
tgtgggtaaaacatccacattgcag

SEQ ID NO: 2504391 - DNA, 25 bp, Homo sapien
cattaacaagattttgccaggttat

SEQ ID NO: 2504392 - DNA, 25 bp, Homo sapien
attaacaagattttgccaggttata

SEQ ID NO: 2504393 - DNA, 25 bp, Homo sapien
tatagtttccgagttgaatggcaga

SEQ ID NO: 2504394 - DNA, 25 bp, Homo sapien
ttccgagttgaatggcagagcgcac

SEQ ID NO: 2504395 - DNA, 25 bp, Homo sapien
tagtttccgagttgaatggcagagc

SEQ ID NO: 2504396 - DNA, 25 bp, Homo sapien
gtttccgagttgaatggcagagcgc

SEQ ID NO: 2504397 - DNA, 25 bp, Homo sapien
aagtcacttgatccaactacagaga

SEQ ID NO: 2504398 - DNA, 25 bp, Homo sapien
cccagtactggaccgggttgctgaa

SEQ ID NO: 2504399 - DNA, 25 bp, Homo sapien
tgaaaagactcacacccgaataaga

SEQ ID NO: 2504400 - DNA, 25 bp, Homo sapien
ctgaaggtggatggctgtatctccc

SEQ ID NO: 2504401 - DNA, 25 bp, Homo sapien
tatgttgaggcccttcaggtaaaca

SEQ ID NO: 2504402 - DNA, 25 bp, Homo sapien
tctttgcctcagaactccagtggtt

SEQ ID NO: 2504403 - DNA, 25 bp, Homo sapien
tagagtaaaagctccatgagacaag

SEQ ID NO: 2504404 - DNA, 25 bp, Homo sapien
gatgctcaggctatatacattgtca

SEQ ID NO: 2504405 - DNA, 25 bp, Homo sapien
cacagagagggtaacaaaacacaca

SEQ ID NO: 2504406 - DNA, 25 bp, Homo sapien
tgatgaggccatgtcaaaaagaatc

SEQ ID NO: 2504407 - DNA, 25 bp, Homo sapien
gaatcaggagctagaccaaagaagc

SEQ ID NO: 2504408 - DNA, 25 bp, Homo sapien
gtcagtagggccagcaaaccaccat

SEQ ID NO: 2504409 - DNA, 25 bp, Homo sapien
ttggatattcctcacataagcagtg

SEQ ID NO: 2504410 - DNA, 25 bp, Homo sapien
tttggatattcctcacataagcagt

SEQ ID NO: 2504411 - DNA, 25 bp, Homo sapien
tggatattcctcacataagcagtgg

SEQ ID NO: 2504412 - DNA, 25 bp, Homo sapien
ttatgctctgccagcccaccaggta

SEQ ID NO: 2504413 - DNA, 25 bp, Homo sapien
tactctggtaagcttgttgttgtcc

SEQ ID NO: 2504414 - DNA, 25 bp, Homo sapien
gccagagagccattgtcaacagcag

SEQ ID NO: 2504415 - DNA, 25 bp, Homo sapien
tccctcagatgaggcgtgttggcca

SEQ ID NO: 2504416 - DNA, 25 bp, Homo sapien
tatgctaggcattgtgagggacaga

SEQ ID NO: 2504417 - DNA, 25 bp, Homo sapien
gacagaggtctcatggatcaaaaac

SEQ ID NO: 2504418 - DNA, 25 bp, Homo sapien
catttattgttaaggtctcggctca

SEQ ID NO: 2504419 - DNA, 25 bp, Homo sapien
cagaacgtgattggacatagtctcc

SEQ ID NO: 2504420 - DNA, 25 bp, Homo sapien
ggctagctgcatcaactctgctgat

SEQ ID NO: 2504421 - DNA, 25 bp, Homo sapien
gccaaattattcagtcctttcaggc

SEQ ID NO: 2504422 - DNA, 25 bp, Homo sapien
caagatgtaattccgtaagggaagg

SEQ ID NO: 2504423 - DNA, 25 bp, Homo sapien
tgattttgttgccatcaagatgtaa

SEQ ID NO: 2504424 - DNA, 25 bp, Homo sapien
aatgttttggagaatcttctatcac

SEQ ID NO: 2504425 - DNA, 25 bp, Homo sapien
ttcaaaatgttttggagaatcttct

SEQ ID NO: 2504426 - DNA, 25 bp, Homo sapien
caaaatgttttggagaatcttctat

SEQ ID NO: 2504427 - DNA, 25 bp, Homo sapien
aaatgttttggagaatcttctatca

SEQ ID NO: 2504428 - DNA, 25 bp, Homo sapien
gagcttcttcattccctggaaagcc

SEQ ID NO: 2504429 - DNA, 25 bp, Homo sapien
tgaggaatgctggtgatattggtat

SEQ ID NO: 2504430 - DNA, 25 bp, Homo sapien
atattggtatcagcaatgcggatgt

SEQ ID NO: 2504431 - DNA, 25 bp, Homo sapien
ctcttcagcggattggtgcccagtt

SEQ ID NO: 2504432 - DNA, 25 bp, Homo sapien
gataaagtcgttccaacttcaccaa

SEQ ID NO: 2504433 - DNA, 25 bp, Homo sapien
gatctcattctcatgggcacgcagc

SEQ ID NO: 2504434 - DNA, 25 bp, Homo sapien
tcaccaaaggtgtaaatgctccagg

SEQ ID NO: 2504435 - DNA, 25 bp, Homo sapien
tcagctgattcttggacagataaag

SEQ ID NO: 2504436 - DNA, 25 bp, Homo sapien
catagtactcttggccttatctagg

SEQ ID NO: 2504437 - DNA, 25 bp, Homo sapien
ggtacatagtactcttggccttatc

SEQ ID NO: 2504438 - DNA, 25 bp, Homo sapien
tactcttggccttatctaggtagtg

SEQ ID NO: 2504439 - DNA, 25 bp, Homo sapien
tgttggtacatagtactcttggcct

SEQ ID NO: 2504440 - DNA, 25 bp, Homo sapien
ggggaagatcctttggcactttgtc

SEQ ID NO: 2504441 - DNA, 25 bp, Homo sapien
gttcttcaggttcttaaagtctcca

SEQ ID NO: 2504442 - DNA, 25 bp, Homo sapien
ttgcaggtctagcagagttgtgtca

SEQ ID NO: 2504443 - DNA, 25 bp, Homo sapien
tgtcagggggaagatcctttggcac

SEQ ID NO: 2504444 - DNA, 25 bp, Homo sapien
ctagcataagagtaataggagtgtg

SEQ ID NO: 2504445 - DNA, 25 bp, Homo sapien
taagattagaagacatattgaggcc

SEQ ID NO: 2504446 - DNA, 25 bp, Homo sapien
tcatatttaaacatgctcctataat

SEQ ID NO: 2504447 - DNA, 25 bp, Homo sapien
tagaagacatattgaggccgggcgc

SEQ ID NO: 2504448 - DNA, 25 bp, Homo sapien
tctttaagattagaagacatattga

SEQ ID NO: 2504449 - DNA, 25 bp, Homo sapien
gatgcctctaggaatcaatagcctg

SEQ ID NO: 2504450 - DNA, 25 bp, Homo sapien
tagtaacaggagcatagtggtttcc

SEQ ID NO: 2504451 - DNA, 25 bp, Homo sapien
cctttgaattcaggatggccttgtg

SEQ ID NO: 2504452 - DNA, 25 bp, Homo sapien
cacactattttcaaggtagcctgga

SEQ ID NO: 2504453 - DNA, 25 bp, Homo sapien
tgcgttatcagttagaccaggcttc

SEQ ID NO: 2504454 - DNA, 25 bp, Homo sapien
ttaattcaagaaccaagccatgcat

SEQ ID NO: 2504455 - DNA, 25 bp, Homo sapien
tgtggcaggagtccaaattctaaga

SEQ ID NO: 2504456 - DNA, 25 bp, Homo sapien
catgttggacaaaggccaggttgtc

SEQ ID NO: 2504457 - DNA, 25 bp, Homo sapien
ttcaggagacttgtttaaccaggtc

SEQ ID NO: 2504458 - DNA, 25 bp, Homo sapien
ccttttggtgcattcgaaactctga

SEQ ID NO: 2504459 - DNA, 25 bp, Homo sapien
caatgtcaatttaggcaatccagtg

SEQ ID NO: 2504460 - DNA, 25 bp, Homo sapien
gctgcaatctcacaaaatgccttga

SEQ ID NO: 2504461 - DNA, 25 bp, Homo sapien
tatgtcccaagtggtaacttctgac

SEQ ID NO: 2504462 - DNA, 25 bp, Homo sapien
gagagtctctaataagtatatggcc

SEQ ID NO: 2504463 - DNA, 25 bp, Homo sapien
taaggtctgcttctggaaaaccagt

SEQ ID NO: 2504464 - DNA, 25 bp, Homo sapien
gccaagcgagaagctgtagtacaat

SEQ ID NO: 2504465 - DNA, 25 bp, Homo sapien
caacttggccaatatctatgaggaa

SEQ ID NO: 2504466 - DNA, 25 bp, Homo sapien
ttacaaggtaagttgcaacaagttc

SEQ ID NO: 2504467 - DNA, 25 bp, Homo sapien
cagaggcatcaaattatcctgcaga

SEQ ID NO: 2504468 - DNA, 25 bp, Homo sapien
tgctataattaagagggaactggtt

SEQ ID NO: 2504469 - DNA, 25 bp, Homo sapien
gcttcatgcttagatcactagagga

SEQ ID NO: 2504470 - DNA, 25 bp, Homo sapien
caggtacctcacacgattaatagga

SEQ ID NO: 2504471 - DNA, 25 bp, Homo sapien
gaagctgctactatgacccaggtac

SEQ ID NO: 2504472 - DNA, 25 bp, Homo sapien
taagtgtctgccaaggataatccac

SEQ ID NO: 2504473 - DNA, 25 bp, Homo sapien
aaataccttgcatgagaccactgct

SEQ ID NO: 2504474 - DNA, 25 bp, Homo sapien
gatgtcaaggctctcaacagcttgc

SEQ ID NO: 2504475 - DNA, 25 bp, Homo sapien
gatgtacactttgagctcctagaaa

SEQ ID NO: 2504476 - DNA, 25 bp, Homo sapien
gaacttgctgcttcctaagactaca

SEQ ID NO: 2504477 - DNA, 25 bp, Homo sapien
gatgggttcccgatatagcttctga

SEQ ID NO: 2504478 - DNA, 25 bp, Homo sapien
gagtaatccaatctcccctgtggca

SEQ ID NO: 2504479 - DNA, 25 bp, Homo sapien
cataagatccacaagaactagggcc

SEQ ID NO: 2504480 - DNA, 25 bp, Homo sapien
gaaggaagtacacatggcggaatca

SEQ ID NO: 2504481 - DNA, 25 bp, Homo sapien
atccactgagcttcaatctttctgg

SEQ ID NO: 2504482 - DNA, 25 bp, Homo sapien
cccatccactgagcttcaatctttc

SEQ ID NO: 2504483 - DNA, 25 bp, Homo sapien
ccatccactgagcttcaatctttct

SEQ ID NO: 2504484 - DNA, 25 bp, Homo sapien
catccactgagcttcaatctttctg

SEQ ID NO: 2504485 - DNA, 25 bp, Homo sapien
ctgttgaaacggtccagcccaggaa

SEQ ID NO: 2504486 - DNA, 25 bp, Homo sapien
actcgaagatggcattgacagcgga

SEQ ID NO: 2504487 - DNA, 25 bp, Homo sapien
caaatcagaacactggaccactcga

SEQ ID NO: 2504488 - DNA, 25 bp, Homo sapien
ctcgaagtcgcggtcatcaggaact

SEQ ID NO: 2504489 - DNA, 25 bp, Homo sapien
cttgtgcaagcagaaggaggatgat

SEQ ID NO: 2504490 - DNA, 25 bp, Homo sapien
tcatgtattttcacaaccagggaac

SEQ ID NO: 2504491 - DNA, 25 bp, Homo sapien
tatctcatgtattttcacaaccagg

SEQ ID NO: 2504492 - DNA, 25 bp, Homo sapien
tctcatgtattttcacaaccaggga

SEQ ID NO: 2504493 - DNA, 25 bp, Homo sapien
tttatctcatgtattttcacaacca

SEQ ID NO: 2504494 - DNA, 25 bp, Homo sapien
tgctcccaaagcacgttgctcttac

SEQ ID NO: 2504495 - DNA, 25 bp, Homo sapien
tgttttgcgtgcttggtctgtccct

SEQ ID NO: 2504496 - DNA, 25 bp, Homo sapien
cctggctcatccaggcaagatgctg

SEQ ID NO: 2504497 - DNA, 25 bp, Homo sapien
tgtccctcactagacgatgtactcc

SEQ ID NO: 2504498 - DNA, 25 bp, Homo sapien
aatcttacagctgttttgagtcatt

SEQ ID NO: 2504499 - DNA, 25 bp, Homo sapien
cttacagctgttttgagtcattatc

SEQ ID NO: 2504500 - DNA, 25 bp, Homo sapien
gctgtacgttcgtaagtagaatctt

SEQ ID NO: 2504501 - DNA, 25 bp, Homo sapien
cttagacgaatccatattaaagctg

SEQ ID NO: 2504502 - DNA, 25 bp, Homo sapien
tttttgcctagattctctagagaag

SEQ ID NO: 2504503 - DNA, 25 bp, Homo sapien
cttctgggaatttttgcctagattc

SEQ ID NO: 2504504 - DNA, 25 bp, Homo sapien
gtatcttctgggaatttttgcctag

SEQ ID NO: 2504505 - DNA, 25 bp, Homo sapien
gggaatttttgcctagattctctag

SEQ ID NO: 2504506 - DNA, 25 bp, Homo sapien
taattgcatgtccagaaactttgtg

SEQ ID NO: 2504507 - DNA, 25 bp, Homo sapien
tagtgtcatggtacttcaagaccca

SEQ ID NO: 2504508 - DNA, 25 bp, Homo sapien
tgtgtgtgtgcatttaaccctgact

SEQ ID NO: 2504509 - DNA, 25 bp, Homo sapien
taatgtgggctgtcaatactgataa

SEQ ID NO: 2504510 - DNA, 25 bp, Homo sapien
caaacaagggttactataggaggca

SEQ ID NO: 2504511 - DNA, 25 bp, Homo sapien
ggcggcatttatccacaaacaaggg

SEQ ID NO: 2504512 - DNA, 25 bp, Homo sapien
aggtatttacatcactgggagccca

SEQ ID NO: 2504513 - DNA, 25 bp, Homo sapien
ttttcagctaatcaccagagttcag

SEQ ID NO: 2504514 - DNA, 25 bp, Homo sapien
tcaggacaattattgaaaaccatac

SEQ ID NO: 2504515 - DNA, 25 bp, Homo sapien
caaataatcccttttgctcgcaact

SEQ ID NO: 2504516 - DNA, 25 bp, Homo sapien
gcagagttcaggacaattattgaaa

SEQ ID NO: 2504517 - DNA, 25 bp, Homo sapien
acttgaccgaagttttattagtctg

SEQ ID NO: 2504518 - DNA, 25 bp, Homo sapien
aatccggctgacacccacattagat

SEQ ID NO: 2504519 - DNA, 25 bp, Homo sapien
tcagcccaagtaaaagagtttgcag

SEQ ID NO: 2504520 - DNA, 25 bp, Homo sapien
tgctctgtgactaggttgaaaacct

SEQ ID NO: 2504521 - DNA, 25 bp, Homo sapien
tccctcaatgaacacaatccggctg

SEQ ID NO: 2504522 - DNA, 25 bp, Homo sapien
tcctgttgaggtgaagtaccctgac

SEQ ID NO: 2504523 - DNA, 25 bp, Homo sapien
cctctgcaacatgatggggcacaag

SEQ ID NO: 2504524 - DNA, 25 bp, Homo sapien
tcattgcctctgcaacatgatgggg

SEQ ID NO: 2504525 - DNA, 25 bp, Homo sapien
actgtgtgtcctgttgaggtgaagt

SEQ ID NO: 2504526 - DNA, 25 bp, Homo sapien
acccttcaggacgtcagcagaggca

SEQ ID NO: 2504527 - DNA, 25 bp, Homo sapien
tcagcaagaaggagcacagaaccct

SEQ ID NO: 2504528 - DNA, 25 bp, Homo sapien
aaggagcacagaacccttcaggacg

SEQ ID NO: 2504529 - DNA, 25 bp, Homo sapien
catctgaaatgacacatcagcaaga

SEQ ID NO: 2504530 - DNA, 25 bp, Homo sapien
ccaagttgaatctttatcagttgaa

SEQ ID NO: 2504531 - DNA, 25 bp, Homo sapien
agtaagtagatccctttccaagttg

SEQ ID NO: 2504532 - DNA, 25 bp, Homo sapien
agttgaatctttatcagttgaacac

SEQ ID NO: 2504533 - DNA, 25 bp, Homo sapien
agtagatccctttccaagttgaatc

SEQ ID NO: 2504534 - DNA, 25 bp, Homo sapien
cagtacaaccttcacttgacacaaa

SEQ ID NO: 2504535 - DNA, 25 bp, Homo sapien
tcttctccgcatgtatttgggagta

SEQ ID NO: 2504536 - DNA, 25 bp, Homo sapien
acttgacacaaatcttctccgcatg

SEQ ID NO: 2504537 - DNA, 25 bp, Homo sapien
gctgccccagtacaaccttcacttg

SEQ ID NO: 2504538 - DNA, 25 bp, Homo sapien
acttttatccgctaatttgctgtag

SEQ ID NO: 2504539 - DNA, 25 bp, Homo sapien
aacacttttatccgctaatttgctg

SEQ ID NO: 2504540 - DNA, 25 bp, Homo sapien
tttatccgctaatttgctgtagttc

SEQ ID NO: 2504541 - DNA, 25 bp, Homo sapien
tatccgctaatttgctgtagttcat

SEQ ID NO: 2504542 - DNA, 25 bp, Homo sapien
cataaaaggcagaaatcttatgttt

SEQ ID NO: 2504543 - DNA, 25 bp, Homo sapien
catgctatgggagctgctgaatctg

SEQ ID NO: 2504544 - DNA, 25 bp, Homo sapien
tgtcctggtagattcccatgctatg

SEQ ID NO: 2504545 - DNA, 25 bp, Homo sapien
aaggcagaaatcttatgtttctggg

SEQ ID NO: 2504546 - DNA, 25 bp, Homo sapien
tcaatggatcttggcgggagatttc

SEQ ID NO: 2504547 - DNA, 25 bp, Homo sapien
tatcaatggataagaagtgggagcc

SEQ ID NO: 2504548 - DNA, 25 bp, Homo sapien
tattcaagaaagatggatacccaat

SEQ ID NO: 2504549 - DNA, 25 bp, Homo sapien
taatcaagacaggatggtatcggtg

SEQ ID NO: 2504550 - DNA, 25 bp, Homo sapien
atcccgtcgtctcctgaatgtccag

SEQ ID NO: 2504551 - DNA, 25 bp, Homo sapien
gagctttgcccatgcgttctgccac

SEQ ID NO: 2504552 - DNA, 25 bp, Homo sapien
cattcagcccctttatcactgtggc

SEQ ID NO: 2504553 - DNA, 25 bp, Homo sapien
tgccaggaattacacctgtcccatc

SEQ ID NO: 2504554 - DNA, 25 bp, Homo sapien
catagcattgagtgctgtcatagca

SEQ ID NO: 2504555 - DNA, 25 bp, Homo sapien
gtcatagcattgaggacgaccagag

SEQ ID NO: 2504556 - DNA, 25 bp, Homo sapien
tcctagtgctgggacatagcattga

SEQ ID NO: 2504557 - DNA, 25 bp, Homo sapien
tgagtgctgtcatagcattgaggac

SEQ ID NO: 2504558 - DNA, 25 bp, Homo sapien
tagactccggatttccactggccaa

SEQ ID NO: 2504559 - DNA, 25 bp, Homo sapien
taattgtctttagactccggatttc

SEQ ID NO: 2504560 - DNA, 25 bp, Homo sapien
cttggagtgctttggcgggctttct

SEQ ID NO: 2504561 - DNA, 25 bp, Homo sapien
ccactggccaaatattgtttatctt

SEQ ID NO: 2504562 - DNA, 25 bp, Homo sapien
cacctttttcccaatctccatgaaa

SEQ ID NO: 2504563 - DNA, 25 bp, Homo sapien
cccaatctccatgaaacttaatgtc

SEQ ID NO: 2504564 - DNA, 25 bp, Homo sapien
aatctccatgaaacttaatgtccat

SEQ ID NO: 2504565 - DNA, 25 bp, Homo sapien
acccacctttttcccaatctccatg

SEQ ID NO: 2504566 - DNA, 25 bp, Homo sapien
tcactcttgtaaagcgactgagccc

SEQ ID NO: 2504567 - DNA, 25 bp, Homo sapien
taatatttacgtagctgcagctgag

SEQ ID NO: 2504568 - DNA, 25 bp, Homo sapien
tatgtcaatcagactgcctcgcctg

SEQ ID NO: 2504569 - DNA, 25 bp, Homo sapien
gactgagcccgaaggtagtacagct

SEQ ID NO: 2504570 - DNA, 25 bp, Homo sapien
cacagttgtgcatgtgaagttagag

SEQ ID NO: 2504571 - DNA, 25 bp, Homo sapien
tgaggaaagaggcacagttgtgcat

SEQ ID NO: 2504572 - DNA, 25 bp, Homo sapien
agtgaccagtaggttttttccatca

SEQ ID NO: 2504573 - DNA, 25 bp, Homo sapien
ctgctgttagcagtgaccagtaggt

SEQ ID NO: 2504574 - DNA, 25 bp, Homo sapien
ttggacagcggacgaacctcttcag

SEQ ID NO: 2504575 - DNA, 25 bp, Homo sapien
gttggacagcggacgaacctcttca

SEQ ID NO: 2504576 - DNA, 25 bp, Homo sapien
tggacagcggacgaacctcttcagg

SEQ ID NO: 2504577 - DNA, 25 bp, Homo sapien
tgttggacagcggacgaacctcttc

SEQ ID NO: 2504578 - DNA, 25 bp, Homo sapien
tacacaagcacttgagaactgccag

SEQ ID NO: 2504579 - DNA, 25 bp, Homo sapien
gaactgccagatgtcaaggggatct

SEQ ID NO: 2504580 - DNA, 25 bp, Homo sapien
ctgagactggtacacaagcacttga

SEQ ID NO: 2504581 - DNA, 25 bp, Homo sapien
tcttctggatagtgaaaaaatcaga

SEQ ID NO: 2504582 - DNA, 25 bp, Homo sapien
gaagaaacagcatacgcacaaccat

SEQ ID NO: 2504583 - DNA, 25 bp, Homo sapien
agagcagttaaggatcagatcaaga

SEQ ID NO: 2504584 - DNA, 25 bp, Homo sapien
agtaagagagtccaaaacagaagaa

SEQ ID NO: 2504585 - DNA, 25 bp, Homo sapien
ttgaagagcagttaaggatcagatc

SEQ ID NO: 2504586 - DNA, 25 bp, Homo sapien
aaccaagtaggttgccgcttcctgg

SEQ ID NO: 2504587 - DNA, 25 bp, Homo sapien
ttactcagctgttgcgtgaccaaaa

SEQ ID NO: 2504588 - DNA, 25 bp, Homo sapien
tgttgcgtgaccaaaattagaatga

SEQ ID NO: 2504589 - DNA, 25 bp, Homo sapien
aaatacaaccaagtaggttgccgct

SEQ ID NO: 2504590 - DNA, 25 bp, Homo sapien
gcttagctctgctttgaagtcagga

SEQ ID NO: 2504591 - DNA, 25 bp, Homo sapien
atgtgcaccacaaggatactgggct

SEQ ID NO: 2504592 - DNA, 25 bp, Homo sapien
gaagtcaggatctagctggtttctt

SEQ ID NO: 2504593 - DNA, 25 bp, Homo sapien
cacaaggatactgggcttagctctg

SEQ ID NO: 2504594 - DNA, 25 bp, Homo sapien
tcccattttctgagcatgtcttgca

SEQ ID NO: 2504595 - DNA, 25 bp, Homo sapien
cccattttctgagcatgtcttgcat

SEQ ID NO: 2504596 - DNA, 25 bp, Homo sapien
cattttctgagcatgtcttgcattt

SEQ ID NO: 2504597 - DNA, 25 bp, Homo sapien
tttctgagcatgtcttgcattttct

SEQ ID NO: 2504598 - DNA, 25 bp, Homo sapien
gatgctcgcctattgtctcttagag

SEQ ID NO: 2504599 - DNA, 25 bp, Homo sapien
ctcttagagatttcccatgtggaaa

SEQ ID NO: 2504600 - DNA, 25 bp, Homo sapien
aattctgtatgcctctgatgctcgc

SEQ ID NO: 2504601 - DNA, 25 bp, Homo sapien
tctgcacccttactggacacaattc

SEQ ID NO: 2504602 - DNA, 25 bp, Homo sapien
ttaaatgtagataccacagaagcac

SEQ ID NO: 2504603 - DNA, 25 bp, Homo sapien
tctcattacaacatccatgaaagag

SEQ ID NO: 2504604 - DNA, 25 bp, Homo sapien
aagagttaaatgtagataccacaga

SEQ ID NO: 2504605 - DNA, 25 bp, Homo sapien
gagttaaatgtagataccacagaag

SEQ ID NO: 2504606 - DNA, 25 bp, Homo sapien
agagagcagtacttccttggttcat

SEQ ID NO: 2504607 - DNA, 25 bp, Homo sapien
ccagagagcagtacttccttggttc

SEQ ID NO: 2504608 - DNA, 25 bp, Homo sapien
accctttctggcaaactctgattca

SEQ ID NO: 2504609 - DNA, 25 bp, Homo sapien
ccctttctggcaaactctgattcat

SEQ ID NO: 2504610 - DNA, 25 bp, Homo sapien
taccctttctggcaaactctgattc

SEQ ID NO: 2504611 - DNA, 25 bp, Homo sapien
ttttttctgccattttccattttca

SEQ ID NO: 2504612 - DNA, 25 bp, Homo sapien
agctctgtttttacacgacattcca

SEQ ID NO: 2504613 - DNA, 25 bp, Homo sapien
actgtcatgaaagtgagctctgttt

SEQ ID NO: 2504614 - DNA, 25 bp, Homo sapien
acacgacattccactcttattaccg

SEQ ID NO: 2504615 - DNA, 25 bp, Homo sapien
taccgtcttcgtcccaagaatgaaa

SEQ ID NO: 2504616 - DNA, 25 bp, Homo sapien
cacctattgtgacaggattgaaagc

SEQ ID NO: 2504617 - DNA, 25 bp, Homo sapien
aaatgaagcctttccgatcccagcc

SEQ ID NO: 2504618 - DNA, 25 bp, Homo sapien
atcttcatgacacctattgtgacag

SEQ ID NO: 2504619 - DNA, 25 bp, Homo sapien
aaaatgaagcctttccgatcccagc

SEQ ID NO: 2504620 - DNA, 25 bp, Homo sapien
ttagcagtaggcagatacgaaaatc

SEQ ID NO: 2504621 - DNA, 25 bp, Homo sapien
gttgatagaacttgaactccaatct

SEQ ID NO: 2504622 - DNA, 25 bp, Homo sapien
tggcatggcccttctgagagctcgg

SEQ ID NO: 2504623 - DNA, 25 bp, Homo sapien
cggtgaaaagctctgtgtacttaca

SEQ ID NO: 2504624 - DNA, 25 bp, Homo sapien
tcagaattgctccatgtagacacca

SEQ ID NO: 2504625 - DNA, 25 bp, Homo sapien
tagacaccacagctgatacctcttg

SEQ ID NO: 2504626 - DNA, 25 bp, Homo sapien
tgttactgctagaaacatcactgct

SEQ ID NO: 2504627 - DNA, 25 bp, Homo sapien
gctacactcctaggaatggcttcaa

SEQ ID NO: 2504628 - DNA, 25 bp, Homo sapien
tgtggatgtaaccttctgtgcatga

SEQ ID NO: 2504629 - DNA, 25 bp, Homo sapien
tgtaaccttctgtgcatgattctgc

SEQ ID NO: 2504630 - DNA, 25 bp, Homo sapien
ttctgtggatgtaaccttctgtgca

SEQ ID NO: 2504631 - DNA, 25 bp, Homo sapien
ctgcattctgtggatgtaaccttct

SEQ ID NO: 2504632 - DNA, 25 bp, Homo sapien
tcattcttctgatgctttaatgtag

SEQ ID NO: 2504633 - DNA, 25 bp, Homo sapien
tcttctgatgctttaatgtagcttc

SEQ ID NO: 2504634 - DNA, 25 bp, Homo sapien
cattcttctgatgctttaatgtagc

SEQ ID NO: 2504635 - DNA, 25 bp, Homo sapien
attcttctgatgctttaatgtagct

SEQ ID NO: 2504636 - DNA, 25 bp, Homo sapien
cttatacaattatttagaagcattg

SEQ ID NO: 2504637 - DNA, 25 bp, Homo sapien
attactttcgtatcctctttaagag

SEQ ID NO: 2504638 - DNA, 25 bp, Homo sapien
tcaaggtctttaaaatggtgtctta

SEQ ID NO: 2504639 - DNA, 25 bp, Homo sapien
atttagaagcattgttttgttcttc

SEQ ID NO: 2504640 - DNA, 25 bp, Homo sapien
tggtgagtcttgtggtactctgttg

SEQ ID NO: 2504641 - DNA, 25 bp, Homo sapien
tcttcccagaggattggacgttagc

SEQ ID NO: 2504642 - DNA, 25 bp, Homo sapien
tagcatagaagagggtcatagaagg

SEQ ID NO: 2504643 - DNA, 25 bp, Homo sapien
catagaaggtgggagggcttcaaaa

SEQ ID NO: 2504644 - DNA, 25 bp, Homo sapien
cacatcagatctgccctatgagagc

SEQ ID NO: 2504645 - DNA, 25 bp, Homo sapien
tttgcgggacttagcgattccagct

SEQ ID NO: 2504646 - DNA, 25 bp, Homo sapien
ttatctgggacagagttaccagagg

SEQ ID NO: 2504647 - DNA, 25 bp, Homo sapien
gattccagctttcaggttttggaga

SEQ ID NO: 2504648 - DNA, 25 bp, Homo sapien
taggattttcctccatcactatctt

SEQ ID NO: 2504649 - DNA, 25 bp, Homo sapien
tttcctccatcactatcttccagga

SEQ ID NO: 2504650 - DNA, 25 bp, Homo sapien
ttttcctccatcactatcttccagg

SEQ ID NO: 2504651 - DNA, 25 bp, Homo sapien
gattttcctccatcactatcttcca

SEQ ID NO: 2504652 - DNA, 25 bp, Homo sapien
tgagttgtcggtgttcatcagagct

SEQ ID NO: 2504653 - DNA, 25 bp, Homo sapien
gagtagatgtaaagaactgcaggta

SEQ ID NO: 2504654 - DNA, 25 bp, Homo sapien
ggagatgctttaattcgcctttctg

SEQ ID NO: 2504655 - DNA, 25 bp, Homo sapien
gagctgctatggagtagatgtaaag

SEQ ID NO: 2504656 - DNA, 25 bp, Homo sapien
tgtagcctctgtaccaacagcaaaa

SEQ ID NO: 2504657 - DNA, 25 bp, Homo sapien
cattttgagtatcctcctgggaccc

SEQ ID NO: 2504658 - DNA, 25 bp, Homo sapien
tgggaccccagcaggtagtgtcaat

SEQ ID NO: 2504659 - DNA, 25 bp, Homo sapien
gggaccatgtcaagtctctccattt

SEQ ID NO: 2504660 - DNA, 25 bp, Homo sapien
acttgatcccgcattcctaccttga

SEQ ID NO: 2504661 - DNA, 25 bp, Homo sapien
tctaaacttgatcccgcattccagt

SEQ ID NO: 2504662 - DNA, 25 bp, Homo sapien
cagtcatacactgggcaaactgtta

SEQ ID NO: 2504663 - DNA, 25 bp, Homo sapien
gaggagtgcctggtacatgatagat

SEQ ID NO: 2504664 - DNA, 25 bp, Homo sapien
tatgccttaattttggaatgacaag

SEQ ID NO: 2504665 - DNA, 25 bp, Homo sapien
tcttctggaccgattaactaatgag

SEQ ID NO: 2504666 - DNA, 25 bp, Homo sapien
ggcaaagcctgtgatgtttcatatg

SEQ ID NO: 2504667 - DNA, 25 bp, Homo sapien
tagatagcttgagtacccttcaagt

SEQ ID NO: 2504668 - DNA, 25 bp, Homo sapien
gagccccatgggcaataattgttcc

SEQ ID NO: 2504669 - DNA, 25 bp, Homo sapien
tgtaccgtctgcacagtgtttctca

SEQ ID NO: 2504670 - DNA, 25 bp, Homo sapien
cataggacaaagcacatcatgggcg

SEQ ID NO: 2504671 - DNA, 25 bp, Homo sapien
cagactgtgaaacgcttttacggga

SEQ ID NO: 2504672 - DNA, 25 bp, Homo sapien
gacttatatggaatccaatcacacg

SEQ ID NO: 2504673 - DNA, 25 bp, Homo sapien
tatatggaatccaatcacacgccat

SEQ ID NO: 2504674 - DNA, 25 bp, Homo sapien
cttatatggaatccaatcacacgcc

SEQ ID NO: 2504675 - DNA, 25 bp, Homo sapien
ctgacttatatggaatccaatcaca

SEQ ID NO: 2504676 - DNA, 25 bp, Homo sapien
tagtagactatccaaaatgctgtgc

SEQ ID NO: 2504677 - DNA, 25 bp, Homo sapien
aaaccacgcgctttacttctcatag

SEQ ID NO: 2504678 - DNA, 25 bp, Homo sapien
gaatcaaaagggcatctaacaccaa

SEQ ID NO: 2504679 - DNA, 25 bp, Homo sapien
tgtagtttgtacagcaggcttgggc

SEQ ID NO: 2504680 - DNA, 25 bp, Homo sapien
tcatccaacataattcccttcttgg

SEQ ID NO: 2504681 - DNA, 25 bp, Homo sapien
catccaacataattcccttcttggt

SEQ ID NO: 2504682 - DNA, 25 bp, Homo sapien
tctttctcagataagttattgtggt

SEQ ID NO: 2504683 - DNA, 25 bp, Homo sapien
ccctttttcctggacaagtcagcat

SEQ ID NO: 2504684 - DNA, 25 bp, Homo sapien
cttctggtataagctgtggaatgtg

SEQ ID NO: 2504685 - DNA, 25 bp, Homo sapien
gtgataatctttctcagataagtta

SEQ ID NO: 2504686 - DNA, 25 bp, Homo sapien
tggggagaagaagtaacaaatgctt

SEQ ID NO: 2504687 - DNA, 25 bp, Homo sapien
ggggagaagaagtaacaaatgcttc

SEQ ID NO: 2504688 - DNA, 25 bp, Homo sapien
gggagaagaagtaacaaatgcttca

SEQ ID NO: 2504689 - DNA, 25 bp, Homo sapien
ggagaagaagtaacaaatgcttcat

SEQ ID NO: 2504690 - DNA, 25 bp, Homo sapien
catggccaggagtagggttgttccc

SEQ ID NO: 2504691 - DNA, 25 bp, Homo sapien
tgtctgagggaggatacaaccttga

SEQ ID NO: 2504692 - DNA, 25 bp, Homo sapien
tatcgaattagcctgcctgttgctc

SEQ ID NO: 2504693 - DNA, 25 bp, Homo sapien
cttgacgaggttgtgtgcatggcca

SEQ ID NO: 2504694 - DNA, 25 bp, Homo sapien
tgaagattctaggtcttcggagtct

SEQ ID NO: 2504695 - DNA, 25 bp, Homo sapien
taggtcttcggagtctccaagtagc

SEQ ID NO: 2504696 - DNA, 25 bp, Homo sapien
tcggagtctccaagtagcatgctac

SEQ ID NO: 2504697 - DNA, 25 bp, Homo sapien
agcatgctacatgccatgccaatca

SEQ ID NO: 2504698 - DNA, 25 bp, Homo sapien
agagagatggtcacagctccaagtt

SEQ ID NO: 2504699 - DNA, 25 bp, Homo sapien
acagagagagatggtcacagctcca

SEQ ID NO: 2504700 - DNA, 25 bp, Homo sapien
tcaagttcacgaaagagatagagac

SEQ ID NO: 2504701 - DNA, 25 bp, Homo sapien
aattccatttgatatctcctcatac

SEQ ID NO: 2504702 - DNA, 25 bp, Homo sapien
ctggcctgaattcccccaggatttt

SEQ ID NO: 2504703 - DNA, 25 bp, Homo sapien
tggcctgaattcccccaggattttc

SEQ ID NO: 2504704 - DNA, 25 bp, Homo sapien
tgagtaagcttttacttccaaagct

SEQ ID NO: 2504705 - DNA, 25 bp, Homo sapien
tattgaggcagcatgattcagggga

SEQ ID NO: 2504706 - DNA, 25 bp, Homo sapien
tcaggggagttgctatatctctact

SEQ ID NO: 2504707 - DNA, 25 bp, Homo sapien
tccaaagctatgttgttgagagggt

SEQ ID NO: 2504708 - DNA, 25 bp, Homo sapien
ttctgctcccttgttcgtgtgacca

SEQ ID NO: 2504709 - DNA, 25 bp, Homo sapien
gctcccttgttcgtgtgaccaccca

SEQ ID NO: 2504710 - DNA, 25 bp, Homo sapien
tgctcccttgttcgtgtgaccaccc

SEQ ID NO: 2504711 - DNA, 25 bp, Homo sapien
ctcccttgttcgtgtgaccacccat

SEQ ID NO: 2504712 - DNA, 25 bp, Homo sapien
taaacattcagattccacagagttc

SEQ ID NO: 2504713 - DNA, 25 bp, Homo sapien
ttcagattccacagagttcctccac

SEQ ID NO: 2504714 - DNA, 25 bp, Homo sapien
aactccagatggaaataaacattca

SEQ ID NO: 2504715 - DNA, 25 bp, Homo sapien
ctctgctaacaactccagatggaaa

SEQ ID NO: 2504716 - DNA, 25 bp, Homo sapien
gctgtatggtgagcattcctctccc

SEQ ID NO: 2504717 - DNA, 25 bp, Homo sapien
tgtatggtgagcattcctctcccag

SEQ ID NO: 2504718 - DNA, 25 bp, Homo sapien
tcaggtagctgtatggtgagcattc

SEQ ID NO: 2504719 - DNA, 25 bp, Homo sapien
ggtagctgtatggtgagcattcctc

SEQ ID NO: 2504720 - DNA, 25 bp, Homo sapien
ctgtgaaaacgatcaaaggcaggtc

SEQ ID NO: 2504721 - DNA, 25 bp, Homo sapien
tgaaaacgatcaaaggcaggtccca

SEQ ID NO: 2504722 - DNA, 25 bp, Homo sapien
aaaacgatcaaaggcaggtcccaga

SEQ ID NO: 2504723 - DNA, 25 bp, Homo sapien
tgtgaaaacgatcaaaggcaggtcc

SEQ ID NO: 2504724 - DNA, 25 bp, Homo sapien
tattttgcattggatatttttagct

SEQ ID NO: 2504725 - DNA, 25 bp, Homo sapien
ttattttgcattggatatttttagc

SEQ ID NO: 2504726 - DNA, 25 bp, Homo sapien
cttcaacgtcagtggtttcttcttc

SEQ ID NO: 2504727 - DNA, 25 bp, Homo sapien
ttcaacgtcagtggtttcttcttct

SEQ ID NO: 2504728 - DNA, 25 bp, Homo sapien
gatgggttcccaccgaataatagaa

SEQ ID NO: 2504729 - DNA, 25 bp, Homo sapien
cagaaaactagactgatgggttccc

SEQ ID NO: 2504730 - DNA, 25 bp, Homo sapien
aatagaatctgtgcccaagacataa

SEQ ID NO: 2504731 - DNA, 25 bp, Homo sapien
gctgtttagagtcttcatgcctcaa

SEQ ID NO: 2504732 - DNA, 25 bp, Homo sapien
tgtcaaacctctcactactcaatgc

SEQ ID NO: 2504733 - DNA, 25 bp, Homo sapien
tctttgctaatgacaagcacaccac

SEQ ID NO: 2504734 - DNA, 25 bp, Homo sapien
taggtccattcattgctcgcttttc

SEQ ID NO: 2504735 - DNA, 25 bp, Homo sapien
catctaccacgtacctaggtccatt

SEQ ID NO: 2504736 - DNA, 25 bp, Homo sapien
ggcttgcctattggatgaccttctg

SEQ ID NO: 2504737 - DNA, 25 bp, Homo sapien
ctttgacattgaaaactggataggg

SEQ ID NO: 2504738 - DNA, 25 bp, Homo sapien
cttctgccagagctggaaacccttc

SEQ ID NO: 2504739 - DNA, 25 bp, Homo sapien
catcggtgtctttcagtggcttgcc

SEQ ID NO: 2504740 - DNA, 25 bp, Homo sapien
acatgggtgcatgggatccacgtca

SEQ ID NO: 2504741 - DNA, 25 bp, Homo sapien
taaagagtgatggacatgggtgcat

SEQ ID NO: 2504742 - DNA, 25 bp, Homo sapien
cattcggatgttctttgaaagtgcc

SEQ ID NO: 2504743 - DNA, 25 bp, Homo sapien
agtgccaatttgtctatagaggtaa

SEQ ID NO: 2504744 - DNA, 25 bp, Homo sapien
tgtgttcgtaatgatttcagcagta

SEQ ID NO: 2504745 - DNA, 25 bp, Homo sapien
tccccaaaagtgtgtaagtgccttg

SEQ ID NO: 2504746 - DNA, 25 bp, Homo sapien
cccaatgggagttaagagtgagata

SEQ ID NO: 2504747 - DNA, 25 bp, Homo sapien
tacccagtatggtgatgttcagcaa

SEQ ID NO: 2504748 - DNA, 25 bp, Homo sapien
cagtgattcccaaagtgtgctacat

SEQ ID NO: 2504749 - DNA, 25 bp, Homo sapien
tattttctcattgagaaggaaagga

SEQ ID NO: 2504750 - DNA, 25 bp, Homo sapien
ttcattcaagaaccttgtatgaaac

SEQ ID NO: 2504751 - DNA, 25 bp, Homo sapien
caagaaccttgtatgaaacacagac

SEQ ID NO: 2504752 - DNA, 25 bp, Homo sapien
gttaaatatcaacagattattttca

SEQ ID NO: 2504753 - DNA, 25 bp, Homo sapien
aactgcccagcgtgaacaataggac

SEQ ID NO: 2504754 - DNA, 25 bp, Homo sapien
cctggctagggaaatatgcggtcac

SEQ ID NO: 2504755 - DNA, 25 bp, Homo sapien
tgtaatgaatataggcaagcccggt

SEQ ID NO: 2504756 - DNA, 25 bp, Homo sapien
taaacagctggaccacaagtcgtgg

SEQ ID NO: 2504757 - DNA, 25 bp, Homo sapien
ctctgcttatctgagctctcaaaat

SEQ ID NO: 2504758 - DNA, 25 bp, Homo sapien
tctgcttatctgagctctcaaaatg

SEQ ID NO: 2504759 - DNA, 25 bp, Homo sapien
ctgcttatctgagctctcaaaatgc

SEQ ID NO: 2504760 - DNA, 25 bp, Homo sapien
tctctgcttatctgagctctcaaaa

SEQ ID NO: 2504761 - DNA, 25 bp, Homo sapien
cttggtagcagttgtactctaagca

SEQ ID NO: 2504762 - DNA, 25 bp, Homo sapien
gcaatgacctcacgaagcacatagg

SEQ ID NO: 2504763 - DNA, 25 bp, Homo sapien
ggtttccctctgtgagtgccaaatt

SEQ ID NO: 2504764 - DNA, 25 bp, Homo sapien
caaaagagtttgcagggaatgttct

SEQ ID NO: 2504765 - DNA, 25 bp, Homo sapien
gagcagcgtgcttctcatccatgac

SEQ ID NO: 2504766 - DNA, 25 bp, Homo sapien
taggtggatgtttcaggacccaaac

SEQ ID NO: 2504767 - DNA, 25 bp, Homo sapien
gaccaggcaggctagcaaagggaaa

SEQ ID NO: 2504768 - DNA, 25 bp, Homo sapien
ggtgatcaggtctatgtccgcttgc

SEQ ID NO: 2504769 - DNA, 25 bp, Homo sapien
acacataatgggcattgttgttcct

SEQ ID NO: 2504770 - DNA, 25 bp, Homo sapien
cataatgggcattgttgttcctaag

SEQ ID NO: 2504771 - DNA, 25 bp, Homo sapien
ctactccacacataatgggcattgt

SEQ ID NO: 2504772 - DNA, 25 bp, Homo sapien
tccacacataatgggcattgttgtt

SEQ ID NO: 2504773 - DNA, 25 bp, Homo sapien
ctgttgttttgctagatttccagga

SEQ ID NO: 2504774 - DNA, 25 bp, Homo sapien
gactaaaatacatctacctcaaaag

SEQ ID NO: 2504775 - DNA, 25 bp, Homo sapien
caaaacataaggctggtcatagaac

SEQ ID NO: 2504776 - DNA, 25 bp, Homo sapien
gttgttggcttactattgagagaag

SEQ ID NO: 2504777 - DNA, 25 bp, Homo sapien
atggaccacactttgctagaccact

SEQ ID NO: 2504778 - DNA, 25 bp, Homo sapien
cacactttgctagaccactttctag

SEQ ID NO: 2504779 - DNA, 25 bp, Homo sapien
taacaagcagtttgcagatcaaact

SEQ ID NO: 2504780 - DNA, 25 bp, Homo sapien
ctttctagatgaaggtttccaaact

SEQ ID NO: 2504781 - DNA, 25 bp, Homo sapien
taaaacagggaatccaacagtgagc

SEQ ID NO: 2504782 - DNA, 25 bp, Homo sapien
tgagccaaacggacaaagatgcttg

SEQ ID NO: 2504783 - DNA, 25 bp, Homo sapien
caacagtgagccaaacggacaaaga

SEQ ID NO: 2504784 - DNA, 25 bp, Homo sapien
ggaatccaacagtgagccaaacgga

SEQ ID NO: 2504785 - DNA, 25 bp, Homo sapien
tgtcttgcggtcagtcatcttccca

SEQ ID NO: 2504786 - DNA, 25 bp, Homo sapien
aaatcaagatactggccaatttggt

SEQ ID NO: 2504787 - DNA, 25 bp, Homo sapien
tcttcccaccgtatcttcacatagt

SEQ ID NO: 2504788 - DNA, 25 bp, Homo sapien
ttctcatggttcttgaggttgagaa

SEQ ID NO: 2504789 - DNA, 25 bp, Homo sapien
gaattggttcatttgttatctttcc

SEQ ID NO: 2504790 - DNA, 25 bp, Homo sapien
gtgtcaactctggagtaaggaattg

SEQ ID NO: 2504791 - DNA, 25 bp, Homo sapien
ttaaaatcatttccgtggctatagg

SEQ ID NO: 2504792 - DNA, 25 bp, Homo sapien
tgccagaagagtctgccaacagatg

SEQ ID NO: 2504793 - DNA, 25 bp, Homo sapien
cattggtagatgatgagaatagcac

SEQ ID NO: 2504794 - DNA, 25 bp, Homo sapien
agtgtggctatcttaatgacactgg

SEQ ID NO: 2504795 - DNA, 25 bp, Homo sapien
tatcttaatgacactggttcttcca

SEQ ID NO: 2504796 - DNA, 25 bp, Homo sapien
cctaagcatatgtatagctattgta

SEQ ID NO: 2504797 - DNA, 25 bp, Homo sapien
ctgagagaacaaggtctgcaaagat

SEQ ID NO: 2504798 - DNA, 25 bp, Homo sapien
aggtctgcaaagatggaacaacttc

SEQ ID NO: 2504799 - DNA, 25 bp, Homo sapien
actgagagaacaaggtctgcaaaga

SEQ ID NO: 2504800 - DNA, 25 bp, Homo sapien
gcaaagatggaacaacttctccctt

SEQ ID NO: 2504801 - DNA, 25 bp, Homo sapien
gttccactactccatatatctaaat

SEQ ID NO: 2504802 - DNA, 25 bp, Homo sapien
cttgcttgttccactactccatata

SEQ ID NO: 2504803 - DNA, 25 bp, Homo sapien
taacttgcttgttccactactccat

SEQ ID NO: 2504804 - DNA, 25 bp, Homo sapien
gcttgttccactactccatatatct

SEQ ID NO: 2504805 - DNA, 25 bp, Homo sapien
tcttgaaggactaacatcttccagg

SEQ ID NO: 2504806 - DNA, 25 bp, Homo sapien
tctgaggctactggatcataagaga

SEQ ID NO: 2504807 - DNA, 25 bp, Homo sapien
tacgtgctgcctgtgaaaagcagag

SEQ ID NO: 2504808 - DNA, 25 bp, Homo sapien
caatgaaaccagagtgtgctaacct

SEQ ID NO: 2504809 - DNA, 25 bp, Homo sapien
cctgttcgttttagctctgagtctc

SEQ ID NO: 2504810 - DNA, 25 bp, Homo sapien
tgtccgtgtcatcataaattggttg

SEQ ID NO: 2504811 - DNA, 25 bp, Homo sapien
gcccagaagacctcacgatggcaaa

SEQ ID NO: 2504812 - DNA, 25 bp, Homo sapien
ggaaatcgtttactggcccagaaga

SEQ ID NO: 2504813 - DNA, 25 bp, Homo sapien
aaaagcaagtttctgtggacgatag

SEQ ID NO: 2504814 - DNA, 25 bp, Homo sapien
caagtttctgtggacgatagctgca

SEQ ID NO: 2504815 - DNA, 25 bp, Homo sapien
tctgtggacgatagctgcaatttat

SEQ ID NO: 2504816 - DNA, 25 bp, Homo sapien
attattattgttgctagcctccctg

SEQ ID NO: 2504817 - DNA, 25 bp, Homo sapien
gcttctagagggtagccgcattcct

SEQ ID NO: 2504818 - DNA, 25 bp, Homo sapien
cacgtgtctgagtctgctaccatcg

SEQ ID NO: 2504819 - DNA, 25 bp, Homo sapien
caaagccagtgatgaagcacgtgtc

SEQ ID NO: 2504820 - DNA, 25 bp, Homo sapien
tcaaggtgtcagctagcctgggctt

SEQ ID NO: 2504821 - DNA, 25 bp, Homo sapien
catggaggtagcttaggtgttgccc

SEQ ID NO: 2504822 - DNA, 25 bp, Homo sapien
ggtgttgcccaaatcatgcaggaag

SEQ ID NO: 2504823 - DNA, 25 bp, Homo sapien
tagtctgagtctggcgtggccttcg

SEQ ID NO: 2504824 - DNA, 25 bp, Homo sapien
caccactaaggaagggctgcacgat

SEQ ID NO: 2504825 - DNA, 25 bp, Homo sapien
tctttaacattgtctatactccttc

SEQ ID NO: 2504826 - DNA, 25 bp, Homo sapien
ttcctttgtagcacttatcagtatc

SEQ ID NO: 2504827 - DNA, 25 bp, Homo sapien
taacattgtctatactccttcattt

SEQ ID NO: 2504828 - DNA, 25 bp, Homo sapien
cacttatcagtatctaatactctaa

SEQ ID NO: 2504829 - DNA, 25 bp, Homo sapien
cctaccttcaggaaggaacaattca

SEQ ID NO: 2504830 - DNA, 25 bp, Homo sapien
tcaggaaggaacaattcaaccaaag

SEQ ID NO: 2504831 - DNA, 25 bp, Homo sapien
ttacctttaggcagagaggtatcct

SEQ ID NO: 2504832 - DNA, 25 bp, Homo sapien
ctggaccttacctttaggcagagag

SEQ ID NO: 2504833 - DNA, 25 bp, Homo sapien
tcaccaactctcatcaaacagcgaa

SEQ ID NO: 2504834 - DNA, 25 bp, Homo sapien
tctcatcaaacagcgaagtagactc

SEQ ID NO: 2504835 - DNA, 25 bp, Homo sapien
tccaggaatttagaggacacagcaa

SEQ ID NO: 2504836 - DNA, 25 bp, Homo sapien
tagactctacaagctccttgtgaat

SEQ ID NO: 2504837 - DNA, 25 bp, Homo sapien
gctcgggcctgacattacctagcca

SEQ ID NO: 2504838 - DNA, 25 bp, Homo sapien
aatgcagggtttgcactttcccagc

SEQ ID NO: 2504839 - DNA, 25 bp, Homo sapien
gcaacgcatttcattaacttaggag

SEQ ID NO: 2504840 - DNA, 25 bp, Homo sapien
caaagagagccccaaacagtgtgat

SEQ ID NO: 2504841 - DNA, 25 bp, Homo sapien
cctgaaccggcaaaagcaaaggttg

SEQ ID NO: 2504842 - DNA, 25 bp, Homo sapien
caaaggttgcacatggaattgcctg

SEQ ID NO: 2504843 - DNA, 25 bp, Homo sapien
tatgtctattgtcttacccgggcca

SEQ ID NO: 2504844 - DNA, 25 bp, Homo sapien
cacacacgggaagagaaagggactt

SEQ ID NO: 2504845 - DNA, 25 bp, Homo sapien
cttagccagaaaatatccttctccc

SEQ ID NO: 2504846 - DNA, 25 bp, Homo sapien
tcagctcctctcctatccattgtaa

SEQ ID NO: 2504847 - DNA, 25 bp, Homo sapien
tttagctcgacaatatcctctcttg

SEQ ID NO: 2504848 - DNA, 25 bp, Homo sapien
ctctgcactcgtggtgttctttagc

SEQ ID NO: 2504849 - DNA, 25 bp, Homo sapien
actcagtgtggtatggcatgccatc

SEQ ID NO: 2504850 - DNA, 25 bp, Homo sapien
gaattgtatggttttccagcagtga

SEQ ID NO: 2504851 - DNA, 25 bp, Homo sapien
tcaaggataagtagcacagacccag

SEQ ID NO: 2504852 - DNA, 25 bp, Homo sapien
taaaacctttgtcttgacagccaga

SEQ ID NO: 2504853 - DNA, 25 bp, Homo sapien
cctctgtggccattttgctgccacg

SEQ ID NO: 2504854 - DNA, 25 bp, Homo sapien
aaacctctgtggccattttgctgcc

SEQ ID NO: 2504855 - DNA, 25 bp, Homo sapien
tgctggactgtaaggtgtaaacaca

SEQ ID NO: 2504856 - DNA, 25 bp, Homo sapien
ggccattttgctgccacgagagaag

SEQ ID NO: 2504857 - DNA, 25 bp, Homo sapien
tattcaagaaacatgcctaaaacca

SEQ ID NO: 2504858 - DNA, 25 bp, Homo sapien
aaggcacatggaaaattacaccacg

SEQ ID NO: 2504859 - DNA, 25 bp, Homo sapien
aaacccttgtgcattatttgcaacc

SEQ ID NO: 2504860 - DNA, 25 bp, Homo sapien
cacaaaccatgcctggactagatct

SEQ ID NO: 2504861 - DNA, 25 bp, Homo sapien
ttaagcatgccagctctcctttcca

SEQ ID NO: 2504862 - DNA, 25 bp, Homo sapien
tgccagctctcctttccattcacca

SEQ ID NO: 2504863 - DNA, 25 bp, Homo sapien
tttccattcaccatggctttaattc

SEQ ID NO: 2504864 - DNA, 25 bp, Homo sapien
catgccagctctcctttccattcac

SEQ ID NO: 2504865 - DNA, 25 bp, Homo sapien
gaaagctggacacttagtggttgca

SEQ ID NO: 2504866 - DNA, 25 bp, Homo sapien
tggacacttagtggttgcaatattt

SEQ ID NO: 2504867 - DNA, 25 bp, Homo sapien
gctggacacttagtggttgcaatat

SEQ ID NO: 2504868 - DNA, 25 bp, Homo sapien
gctggaaagctggacacttagtggt

SEQ ID NO: 2504869 - DNA, 25 bp, Homo sapien
ctacaggcactttcccaattaattt

SEQ ID NO: 2504870 - DNA, 25 bp, Homo sapien
gattctcactcctgccaattccatg

SEQ ID NO: 2504871 - DNA, 25 bp, Homo sapien
ggcactttcccaattaatttatgga

SEQ ID NO: 2504872 - DNA, 25 bp, Homo sapien
ttaatttatggattctcactcctgc

SEQ ID NO: 2504873 - DNA, 25 bp, Homo sapien
cagtgcttcctataatgtccaggtt

SEQ ID NO: 2504874 - DNA, 25 bp, Homo sapien
tatcaagactcagcctgccatgagg

SEQ ID NO: 2504875 - DNA, 25 bp, Homo sapien
tgcaagtccaaaggataaggagaac

SEQ ID NO: 2504876 - DNA, 25 bp, Homo sapien
ggacaaggccttacttacacacata

SEQ ID NO: 2504877 - DNA, 25 bp, Homo sapien
tatcactgtgggacaaaaagccttt

SEQ ID NO: 2504878 - DNA, 25 bp, Homo sapien
tcaggcaacaggacttacaatggag

SEQ ID NO: 2504879 - DNA, 25 bp, Homo sapien
aaatgaattcacaacttgcagccag

SEQ ID NO: 2504880 - DNA, 25 bp, Homo sapien
agtttggaaaactggcacagacagg

SEQ ID NO: 2504881 - DNA, 25 bp, Homo sapien
ctgctggattgggtccaaggccaga

SEQ ID NO: 2504882 - DNA, 25 bp, Homo sapien
cagaggtcagaagagaggatgtgcc

SEQ ID NO: 2504883 - DNA, 25 bp, Homo sapien
cagctgctggattgggtccaaggcc

SEQ ID NO: 2504884 - DNA, 25 bp, Homo sapien
cagcagctgctggattgggtccaag

SEQ ID NO: 2504885 - DNA, 25 bp, Homo sapien
gccaaagaatcatagccagcatttt

SEQ ID NO: 2504886 - DNA, 25 bp, Homo sapien
gatctgcattgatgaatctgagaga

SEQ ID NO: 2504887 - DNA, 25 bp, Homo sapien
tgatctgcattgatgaatctgagag

SEQ ID NO: 2504888 - DNA, 25 bp, Homo sapien
tcatagccagcattttgataaagga

SEQ ID NO: 2504889 - DNA, 25 bp, Homo sapien
ggctataatcactatccgtatccat

SEQ ID NO: 2504890 - DNA, 25 bp, Homo sapien
aaggctataatcactatccgtatcc

SEQ ID NO: 2504891 - DNA, 25 bp, Homo sapien
acaaggctataatcactatccgtat

SEQ ID NO: 2504892 - DNA, 25 bp, Homo sapien
tgggagagatgccatagattattac

SEQ ID NO: 2504893 - DNA, 25 bp, Homo sapien
taaaagtcacgcagggagaagtcca

SEQ ID NO: 2504894 - DNA, 25 bp, Homo sapien
taaacactagccatcgggaatacgg

SEQ ID NO: 2504895 - DNA, 25 bp, Homo sapien
ttaaggactcagttaagcagctggg

SEQ ID NO: 2504896 - DNA, 25 bp, Homo sapien
gctgggtcggctggtattacaaact

SEQ ID NO: 2504897 - DNA, 25 bp, Homo sapien
agctcctcacaagccagacatcacc

SEQ ID NO: 2504898 - DNA, 25 bp, Homo sapien
caaacttataaacagctcctcacaa

SEQ ID NO: 2504899 - DNA, 25 bp, Homo sapien
cagctcaattgtctggggaaggtaa

SEQ ID NO: 2504900 - DNA, 25 bp, Homo sapien
gctggtctcagagtgatgtgtgcaa

SEQ ID NO: 2504901 - DNA, 25 bp, Homo sapien
taacaattggcaagggtagtccatg

SEQ ID NO: 2504902 - DNA, 25 bp, Homo sapien
tagtccatgtgttgcgggtctacga

SEQ ID NO: 2504903 - DNA, 25 bp, Homo sapien
aaataccgaggagctttttcacaga

SEQ ID NO: 2504904 - DNA, 25 bp, Homo sapien
gggtctacgaattctaactctcgag

SEQ ID NO: 2504905 - DNA, 25 bp, Homo sapien
tagatgctaccgtggtctcttatcc

SEQ ID NO: 2504906 - DNA, 25 bp, Homo sapien
ttaagactatgggtcacctgccccg

SEQ ID NO: 2504907 - DNA, 25 bp, Homo sapien
tgaccagtgtgcaacagagattcag

SEQ ID NO: 2504908 - DNA, 25 bp, Homo sapien
gatcattagcctgtgaatgtgtcca

SEQ ID NO: 2504909 - DNA, 25 bp, Homo sapien
tgtctgggagaaactgaaaccaccc

SEQ ID NO: 2504910 - DNA, 25 bp, Homo sapien
gtaatagtgcaaattcccctgcgag

SEQ ID NO: 2504911 - DNA, 25 bp, Homo sapien
tgaaaggtactgtccaaactatggc

SEQ ID NO: 2504912 - DNA, 25 bp, Homo sapien
gatcatttacttggactcacaggct

SEQ ID NO: 2504913 - DNA, 25 bp, Homo sapien
gattcggctgtctaccatttgcacg

SEQ ID NO: 2504914 - DNA, 25 bp, Homo sapien
ttgatgcgaatacaacggtaacccg

SEQ ID NO: 2504915 - DNA, 25 bp, Homo sapien
tgactgctcagtccaatccgctgtg

SEQ ID NO: 2504916 - DNA, 25 bp, Homo sapien
cggtaacccgatcccttgcatggct

SEQ ID NO: 2504917 - DNA, 25 bp, Homo sapien
tcgttagctcccactgcggattcct

SEQ ID NO: 2504918 - DNA, 25 bp, Homo sapien
caacgcttaggatcgttagctccca

SEQ ID NO: 2504919 - DNA, 25 bp, Homo sapien
gaacagagaaacaacgcttaggatc

SEQ ID NO: 2504920 - DNA, 25 bp, Homo sapien
taggatcgttagctcccactgcgga

SEQ ID NO: 2504921 - DNA, 25 bp, Homo sapien
cggttgagccgccaaaacaggaatc

SEQ ID NO: 2504922 - DNA, 25 bp, Homo sapien
tatggccaggcgagaaactgtttac

SEQ ID NO: 2504923 - DNA, 25 bp, Homo sapien
ctttggagatgagaagcgccaccgg

SEQ ID NO: 2504924 - DNA, 25 bp, Homo sapien
taattgtgccggtgacaaatccgat

SEQ ID NO: 2504925 - DNA, 25 bp, Homo sapien
ggccgccgaccacgcaacggttgga

SEQ ID NO: 2504926 - DNA, 25 bp, Homo sapien
ccgccgaccacgcaacggttggagg

SEQ ID NO: 2504927 - DNA, 25 bp, Homo sapien
tgggccgccgaccacgcaacggttg

SEQ ID NO: 2504928 - DNA, 25 bp, Homo sapien
gctgggccgccgaccacgcaacggt

SEQ ID NO: 2504929 - DNA, 25 bp, Homo sapien
atccgccgacggtcctcggaccgca

SEQ ID NO: 2504930 - DNA, 25 bp, Homo sapien
gacggtcctcggaccgcagctcccg

SEQ ID NO: 2504931 - DNA, 25 bp, Homo sapien
cagctcccgcctcggtgggcttaag

SEQ ID NO: 2504932 - DNA, 25 bp, Homo sapien
tgtcttctcctctccgttttgccag

SEQ ID NO: 2504933 - DNA, 25 bp, Homo sapien
gcgtccctccgacgccctcgccctg

SEQ ID NO: 2504934 - DNA, 25 bp, Homo sapien
tgtggggcccgcgtccctccgacgc

SEQ ID NO: 2504935 - DNA, 25 bp, Homo sapien
cgcggcggggcccaagcgcgaccgg

SEQ ID NO: 2504936 - DNA, 25 bp, Homo sapien
ccgacggccggactctgacccaggg

SEQ ID NO: 2504937 - DNA, 25 bp, Homo sapien
tgcagctgtcgctcgctcgtgagcc

SEQ ID NO: 2504938 - DNA, 25 bp, Homo sapien
cggcgatctcgcctatcatggtggc

SEQ ID NO: 2504939 - DNA, 25 bp, Homo sapien
ggtgcggagaaacttggagatgaag

SEQ ID NO: 2504940 - DNA, 25 bp, Homo sapien
cggcccgggtgtagaagggatgcat

SEQ ID NO: 2504941 - DNA, 25 bp, Homo sapien
gagggcgtgaggggcggacgactac

SEQ ID NO: 2504942 - DNA, 25 bp, Homo sapien
cgtgaggggcggacgactacttttg

SEQ ID NO: 2504943 - DNA, 25 bp, Homo sapien
agggcgtgaggggcggacgactact

SEQ ID NO: 2504944 - DNA, 25 bp, Homo sapien
tgaggggcggacgactacttttgtc

SEQ ID NO: 2504945 - DNA, 25 bp, Homo sapien
gctccgcagcattcgaagatctcaa

SEQ ID NO: 2504946 - DNA, 25 bp, Homo sapien
gaggagctgacgtaatccgcttgta

SEQ ID NO: 2504947 - DNA, 25 bp, Homo sapien
tgcatttccagctccgagaggcgaa

SEQ ID NO: 2504948 - DNA, 25 bp, Homo sapien
tcgcaccattgtgacgcaagccggt

SEQ ID NO: 2504949 - DNA, 25 bp, Homo sapien
gggtctcggtgactggctcctcaag

SEQ ID NO: 2504950 - DNA, 25 bp, Homo sapien
agacgagctgccaacgccgcggagc

SEQ ID NO: 2504951 - DNA, 25 bp, Homo sapien
tgcggggcgttctgtccaagaaaaa

SEQ ID NO: 2504952 - DNA, 25 bp, Homo sapien
tcctcaagccggagacgcgtgtggt

SEQ ID NO: 2504953 - DNA, 25 bp, Homo sapien
tcatagacatcaaaggagtgggtac

SEQ ID NO: 2504954 - DNA, 25 bp, Homo sapien
gctgaaagagtctaccttgttcccc

SEQ ID NO: 2504955 - DNA, 25 bp, Homo sapien
aagatgagaggcaccccatatgtga

SEQ ID NO: 2504956 - DNA, 25 bp, Homo sapien
ggaaccaccatcatccggtaatttg

SEQ ID NO: 2504957 - DNA, 25 bp, Homo sapien
gttgtagacaccatgcactcagacc

SEQ ID NO: 2504958 - DNA, 25 bp, Homo sapien
tgtagacaccatgcactcagaccag

SEQ ID NO: 2504959 - DNA, 25 bp, Homo sapien
aattagttgtagacaccatgcactc

SEQ ID NO: 2504960 - DNA, 25 bp, Homo sapien
tagttgtagacaccatgcactcaga

SEQ ID NO: 2504961 - DNA, 25 bp, Homo sapien
tgtggactccctctgctattgtttc

SEQ ID NO: 2504962 - DNA, 25 bp, Homo sapien
ctaaaatgagaaggatcagtgcgtc

SEQ ID NO: 2504963 - DNA, 25 bp, Homo sapien
taagaattaagctttgtaactgccc

SEQ ID NO: 2504964 - DNA, 25 bp, Homo sapien
tattgtttcctccatagtgattgac

SEQ ID NO: 2504965 - DNA, 25 bp, Homo sapien
agaaaccccatcctggccgggcaca

SEQ ID NO: 2504966 - DNA, 25 bp, Homo sapien
taagaaaccccatcctggccgggca

SEQ ID NO: 2504967 - DNA, 25 bp, Homo sapien
cagctttttaagaaaccccatcctg

SEQ ID NO: 2504968 - DNA, 25 bp, Homo sapien
cagctccaggtgtagtgagaactca

SEQ ID NO: 2504969 - DNA, 25 bp, Homo sapien
ggcagaggagttcaagtattcattc

SEQ ID NO: 2504970 - DNA, 25 bp, Homo sapien
acagattctactgctctgggtccag

SEQ ID NO: 2504971 - DNA, 25 bp, Homo sapien
tgagcacacgttcttgccagaagaa

SEQ ID NO: 2504972 - DNA, 25 bp, Homo sapien
gagatcctccagatgtaggccttga

SEQ ID NO: 2504973 - DNA, 25 bp, Homo sapien
tagtcctcaccaagtaaagcatgcc

SEQ ID NO: 2504974 - DNA, 25 bp, Homo sapien
taggccttgaagaacaaaggtggcc

SEQ ID NO: 2504975 - DNA, 25 bp, Homo sapien
tgccatgcgcctgccagagttgatt

SEQ ID NO: 2504976 - DNA, 25 bp, Homo sapien
tgcacagggctacacaaaaggccca

SEQ ID NO: 2504977 - DNA, 25 bp, Homo sapien
gagccacatttgtccacacccattg

SEQ ID NO: 2504978 - DNA, 25 bp, Homo sapien
aactgcacccagatgaacgaagctg

SEQ ID NO: 2504979 - DNA, 25 bp, Homo sapien
tatttcaccatgcatatcctgagcc

SEQ ID NO: 2504980 - DNA, 25 bp, Homo sapien
tcaggagctcaataacttacgtggc

SEQ ID NO: 2504981 - DNA, 25 bp, Homo sapien
catttgctcttcctacaagtcagga

SEQ ID NO: 2504982 - DNA, 25 bp, Homo sapien
aaaggtgtgagtcgccatgcccatc

SEQ ID NO: 2504983 - DNA, 25 bp, Homo sapien
cttaactggtgagcttatctgagga

SEQ ID NO: 2504984 - DNA, 25 bp, Homo sapien
cttcctaacattcgaaggtccatat

SEQ ID NO: 2504985 - DNA, 25 bp, Homo sapien
tcttcctaacattcgaaggtccata

SEQ ID NO: 2504986 - DNA, 25 bp, Homo sapien
actgatgataactcccccaggcttt

SEQ ID NO: 2504987 - DNA, 25 bp, Homo sapien
ctggggtcagacatgtatcactgat

SEQ ID NO: 2504988 - DNA, 25 bp, Homo sapien
tcagacatgtatcactgatgataac

SEQ ID NO: 2504989 - DNA, 25 bp, Homo sapien
tgataactcccccaggcttttccag

SEQ ID NO: 2504990 - DNA, 25 bp, Homo sapien
tgagctcttgccatatctttgcttt

SEQ ID NO: 2504991 - DNA, 25 bp, Homo sapien
ttctgagctcttgccatatctttgc

SEQ ID NO: 2504992 - DNA, 25 bp, Homo sapien
cttctgagctcttgccatatctttg

SEQ ID NO: 2504993 - DNA, 25 bp, Homo sapien
gctcttgccatatctttgctttcat

SEQ ID NO: 2504994 - DNA, 25 bp, Homo sapien
tttcatcaccttcttgagttgggca

SEQ ID NO: 2504995 - DNA, 25 bp, Homo sapien
atcaccttcttgagttgggcagggg

SEQ ID NO: 2504996 - DNA, 25 bp, Homo sapien
acttctgcagcctatttcatcacct

SEQ ID NO: 2504997 - DNA, 25 bp, Homo sapien
ggaacttctgcagcctatttcatca

SEQ ID NO: 2504998 - DNA, 25 bp, Homo sapien
caggcagcttcctccgttttcttag

SEQ ID NO: 2504999 - DNA, 25 bp, Homo sapien
cctgatagtcccgtttttgcttgtt

SEQ ID NO: 2505000 - DNA, 25 bp, Homo sapien
gtgtctgcctctcctgatagtcccg

SEQ ID NO: 2505001 - DNA, 25 bp, Homo sapien
tggtgacaactcagggtatgtagtt

SEQ ID NO: 2505002 - DNA, 25 bp, Homo sapien
gaaacagtgccgatgaaatgccagt

SEQ ID NO: 2505003 - DNA, 25 bp, Homo sapien
tggaactcccaagtgaaggtgctgg

SEQ ID NO: 2505004 - DNA, 25 bp, Homo sapien
caaataccctgtgtggatgtctatc

SEQ ID NO: 2505005 - DNA, 25 bp, Homo sapien
gactggccagcgacctattagaaag

SEQ ID NO: 2505006 - DNA, 25 bp, Homo sapien
ccagagctccactttgttatgtgaa

SEQ ID NO: 2505007 - DNA, 25 bp, Homo sapien
tacttagggtctggacggaatcaaa

SEQ ID NO: 2505008 - DNA, 25 bp, Homo sapien
actggagcagcccagatatttcccc

SEQ ID NO: 2505009 - DNA, 25 bp, Homo sapien
tggattcagagtaggcacattcagg

SEQ ID NO: 2505010 - DNA, 25 bp, Homo sapien
ttaaagcaagaccaacgagtttctg

SEQ ID NO: 2505011 - DNA, 25 bp, Homo sapien
tgtttgtcatcctatatagaaatga

SEQ ID NO: 2505012 - DNA, 25 bp, Homo sapien
accaacgagtttctgggtgaccttg

SEQ ID NO: 2505013 - DNA, 25 bp, Homo sapien
ttctgtagtttcttaaagcaagacc

SEQ ID NO: 2505014 - DNA, 25 bp, Homo sapien
cttccttgcctaaaagcacccattg

SEQ ID NO: 2505015 - DNA, 25 bp, Homo sapien
acttccttgcctaaaagcacccatt

SEQ ID NO: 2505016 - DNA, 25 bp, Homo sapien
aacttccttgcctaaaagcacccat

SEQ ID NO: 2505017 - DNA, 25 bp, Homo sapien
gaacttccttgcctaaaagcaccca

SEQ ID NO: 2505018 - DNA, 25 bp, Homo sapien
ccaggaaggtgccagtaggactcat

SEQ ID NO: 2505019 - DNA, 25 bp, Homo sapien
gctgtggcttatggtcttctgaaag

SEQ ID NO: 2505020 - DNA, 25 bp, Homo sapien
tcactgccagtagattggagttgcc

SEQ ID NO: 2505021 - DNA, 25 bp, Homo sapien
taacacatctgctctattggaaaga

SEQ ID NO: 2505022 - DNA, 25 bp, Homo sapien
aagtcaggctcacgagttttcactg

SEQ ID NO: 2505023 - DNA, 25 bp, Homo sapien
caggctcacgagttttcactgtaat

SEQ ID NO: 2505024 - DNA, 25 bp, Homo sapien
gaaagtcaggctcacgagttttcac

SEQ ID NO: 2505025 - DNA, 25 bp, Homo sapien
aggaaagtcaggctcacgagttttc

SEQ ID NO: 2505026 - DNA, 25 bp, Homo sapien
ctgacatacaaaccaattgccaagt

SEQ ID NO: 2505027 - DNA, 25 bp, Homo sapien
gtcctgccaattttgcctcttctgc

SEQ ID NO: 2505028 - DNA, 25 bp, Homo sapien
tacaaaccaattgccaagtcctgcc

SEQ ID NO: 2505029 - DNA, 25 bp, Homo sapien
agtcctgccaattttgcctcttctg

SEQ ID NO: 2505030 - DNA, 25 bp, Homo sapien
ttcttacaggtttaccctgtgtcag

SEQ ID NO: 2505031 - DNA, 25 bp, Homo sapien
agttattgtactaagctctgagaat

SEQ ID NO: 2505032 - DNA, 25 bp, Homo sapien
tattagtcatacatccattcacgca

SEQ ID NO: 2505033 - DNA, 25 bp, Homo sapien
tgtgcccgaccacaaagttctatgt

SEQ ID NO: 2505034 - DNA, 25 bp, Homo sapien
ggagtgcgccagtgctgtagcctct

SEQ ID NO: 2505035 - DNA, 25 bp, Homo sapien
gtgcgccagtgctgtagcctcttcc

SEQ ID NO: 2505036 - DNA, 25 bp, Homo sapien
ctgggagtgcgccagtgctgtagcc

SEQ ID NO: 2505037 - DNA, 25 bp, Homo sapien
gagtgcgccagtgctgtagcctctt

SEQ ID NO: 2505038 - DNA, 25 bp, Homo sapien
acgaagccatggggtccaaacaggc

SEQ ID NO: 2505039 - DNA, 25 bp, Homo sapien
cattacgaagccatggggtccaaac

SEQ ID NO: 2505040 - DNA, 25 bp, Homo sapien
ttacgaagccatggggtccaaacag

SEQ ID NO: 2505041 - DNA, 25 bp, Homo sapien
gaagccatggggtccaaacaggcac

SEQ ID NO: 2505042 - DNA, 25 bp, Homo sapien
atactcttcacacaggacccacagg

SEQ ID NO: 2505043 - DNA, 25 bp, Homo sapien
cgacactggaatgaatgcatactct

SEQ ID NO: 2505044 - DNA, 25 bp, Homo sapien
cctccccgacactggaatgaatgca

SEQ ID NO: 2505045 - DNA, 25 bp, Homo sapien
atgcatactcttcacacaggaccca

SEQ ID NO: 2505046 - DNA, 25 bp, Homo sapien
tctcttccccacgattggagatgag

SEQ ID NO: 2505047 - DNA, 25 bp, Homo sapien
ttctctcttccccacgattggagat

SEQ ID NO: 2505048 - DNA, 25 bp, Homo sapien
tctctcttccccacgattggagatg

SEQ ID NO: 2505049 - DNA, 25 bp, Homo sapien
ctcttccccacgattggagatgagg

SEQ ID NO: 2505050 - DNA, 25 bp, Homo sapien
tatcagtcactgtctcatccataga

SEQ ID NO: 2505051 - DNA, 25 bp, Homo sapien
tgagttcagacatttggtaagtgga

SEQ ID NO: 2505052 - DNA, 25 bp, Homo sapien
tatgccttaagactgtcgatttgtg

SEQ ID NO: 2505053 - DNA, 25 bp, Homo sapien
tgaaagggtcggcatcacagtcaca

SEQ ID NO: 2505054 - DNA, 25 bp, Homo sapien
aagtttggtcacatctggggcatcc

SEQ ID NO: 2505055 - DNA, 25 bp, Homo sapien
gggcatcctgcaacagcagtgcttc

SEQ ID NO: 2505056 - DNA, 25 bp, Homo sapien
agttttattgttgacctcttgacct

SEQ ID NO: 2505057 - DNA, 25 bp, Homo sapien
tcttgacctcttaaaagtttggtca

SEQ ID NO: 2505058 - DNA, 25 bp, Homo sapien
gaaatgaagactcccaagtttcctg

SEQ ID NO: 2505059 - DNA, 25 bp, Homo sapien
gcaacaccacaagctcctgaaatga

SEQ ID NO: 2505060 - DNA, 25 bp, Homo sapien
caaaggtaagcacagaattcgagag

SEQ ID NO: 2505061 - DNA, 25 bp, Homo sapien
aattcgagagatatgcaaaatccag

SEQ ID NO: 2505062 - DNA, 25 bp, Homo sapien
cccagggaataatctgcaggaggct

SEQ ID NO: 2505063 - DNA, 25 bp, Homo sapien
caggaggctgtccatccagtgcttc

SEQ ID NO: 2505064 - DNA, 25 bp, Homo sapien
caccctctgttaggtcatgtcccag

SEQ ID NO: 2505065 - DNA, 25 bp, Homo sapien
gatctctctttgctatctgcctcac

SEQ ID NO: 2505066 - DNA, 25 bp, Homo sapien
ggagtgactggttgaatcctctttc

SEQ ID NO: 2505067 - DNA, 25 bp, Homo sapien
cttgtcacatgcaaggggtttgtgt

SEQ ID NO: 2505068 - DNA, 25 bp, Homo sapien
ctctttcaggagccttaaattgtcc

SEQ ID NO: 2505069 - DNA, 25 bp, Homo sapien
ttggccagataagaaatggagtgac

SEQ ID NO: 2505070 - DNA, 25 bp, Homo sapien
catgaaaactcctccacgacttggg

SEQ ID NO: 2505071 - DNA, 25 bp, Homo sapien
catgtctgtaagtcctcggctttct

SEQ ID NO: 2505072 - DNA, 25 bp, Homo sapien
tattcttagcccaaggtgatctgcc

SEQ ID NO: 2505073 - DNA, 25 bp, Homo sapien
aaaacagcatgtgtattcttagccc

SEQ ID NO: 2505074 - DNA, 25 bp, Homo sapien
gcaaaggagataccagatcaatctc

SEQ ID NO: 2505075 - DNA, 25 bp, Homo sapien
ttgcaaaggagataccagatcaatc

SEQ ID NO: 2505076 - DNA, 25 bp, Homo sapien
gattgcaaaggagataccagatcaa

SEQ ID NO: 2505077 - DNA, 25 bp, Homo sapien
cagattgcaaaggagataccagatc

SEQ ID NO: 2505078 - DNA, 25 bp, Homo sapien
gaatcttctcacatagcgccaaaca

SEQ ID NO: 2505079 - DNA, 25 bp, Homo sapien
ttacagccctcagagaatcttctca

SEQ ID NO: 2505080 - DNA, 25 bp, Homo sapien
tgaattctggtgagaacgacacgtc

SEQ ID NO: 2505081 - DNA, 25 bp, Homo sapien
caacggcccaacattcctgaagtca

SEQ ID NO: 2505082 - DNA, 25 bp, Homo sapien
gcataccttacacgggctggcactg

SEQ ID NO: 2505083 - DNA, 25 bp, Homo sapien
ctgcataccttacacgggctggcac

SEQ ID NO: 2505084 - DNA, 25 bp, Homo sapien
caaacttcacaatggttagattcat

SEQ ID NO: 2505085 - DNA, 25 bp, Homo sapien
gctgggggtacaaagtagatgccaa

SEQ ID NO: 2505086 - DNA, 25 bp, Homo sapien
tctccctcagcctgtgaaattctgg

SEQ ID NO: 2505087 - DNA, 25 bp, Homo sapien
tcagcctgtgaaattctggaacttc

SEQ ID NO: 2505088 - DNA, 25 bp, Homo sapien
cctcagcctgtgaaattctggaact

SEQ ID NO: 2505089 - DNA, 25 bp, Homo sapien
agcctgtgaaattctggaacttctc

SEQ ID NO: 2505090 - DNA, 25 bp, Homo sapien
ccagatggcaccacattcataaacc

SEQ ID NO: 2505091 - DNA, 25 bp, Homo sapien
cagatggcaccacattcataaacca

SEQ ID NO: 2505092 - DNA, 25 bp, Homo sapien
ctggaagacgagcagagtgaacaca

SEQ ID NO: 2505093 - DNA, 25 bp, Homo sapien
gtgaacacatcaggggttgtcagtt

SEQ ID NO: 2505094 - DNA, 25 bp, Homo sapien
gaatgtaggaagcttagttaaggcc

SEQ ID NO: 2505095 - DNA, 25 bp, Homo sapien
ctccaggagaatgtaggaagcttag

SEQ ID NO: 2505096 - DNA, 25 bp, Homo sapien
tgtaggaagcttagttaaggccaaa

SEQ ID NO: 2505097 - DNA, 25 bp, Homo sapien
caggagaatgtaggaagcttagtta

SEQ ID NO: 2505098 - DNA, 25 bp, Homo sapien
ggaggtaaacttgttagcaaggcca

SEQ ID NO: 2505099 - DNA, 25 bp, Homo sapien
catttcctttgcccgctctcacata

SEQ ID NO: 2505100 - DNA, 25 bp, Homo sapien
atttcctttgcccgctctcacatat

SEQ ID NO: 2505101 - DNA, 25 bp, Homo sapien
gaaatctcatagtttggaggtaaac

SEQ ID NO: 2505102 - DNA, 25 bp, Homo sapien
catcagccaaatttgcaggtaggag

SEQ ID NO: 2505103 - DNA, 25 bp, Homo sapien
aatttgcaggtaggaggattggctc

SEQ ID NO: 2505104 - DNA, 25 bp, Homo sapien
caaatttgcaggtaggaggattggc

SEQ ID NO: 2505105 - DNA, 25 bp, Homo sapien
cagccaaatttgcaggtaggaggat

SEQ ID NO: 2505106 - DNA, 25 bp, Homo sapien
gagagaaattggttaattggccatg

SEQ ID NO: 2505107 - DNA, 25 bp, Homo sapien
ctctatgccgtggagagaaattggt

SEQ ID NO: 2505108 - DNA, 25 bp, Homo sapien
ttaagatgttcccatgcgagtgaac

SEQ ID NO: 2505109 - DNA, 25 bp, Homo sapien
taagatgttcccatgcgagtgaact

SEQ ID NO: 2505110 - DNA, 25 bp, Homo sapien
tatgacatccttactaagaaggcct

SEQ ID NO: 2505111 - DNA, 25 bp, Homo sapien
gtatatgggaaacggccacacacca

SEQ ID NO: 2505112 - DNA, 25 bp, Homo sapien
ggccagctttctttgactgagcaga

SEQ ID NO: 2505113 - DNA, 25 bp, Homo sapien
ttaaaccattcactgacacccgggc

SEQ ID NO: 2505114 - DNA, 25 bp, Homo sapien
gacctgtgttgagtgacagaattcc

SEQ ID NO: 2505115 - DNA, 25 bp, Homo sapien
taggagacctgtgttgagtgacaga

SEQ ID NO: 2505116 - DNA, 25 bp, Homo sapien
aggcaaagtaggagacctgtgttga

SEQ ID NO: 2505117 - DNA, 25 bp, Homo sapien
gtgttgagtgacagaattcctttac

SEQ ID NO: 2505118 - DNA, 25 bp, Homo sapien
gggctatagcatcccagagaatgtc

SEQ ID NO: 2505119 - DNA, 25 bp, Homo sapien
tgggctatagcatcccagagaatgt

SEQ ID NO: 2505120 - DNA, 25 bp, Homo sapien
cttctgggctatagcatcccagaga

SEQ ID NO: 2505121 - DNA, 25 bp, Homo sapien
tctgggctatagcatcccagagaat

SEQ ID NO: 2505122 - DNA, 25 bp, Homo sapien
gaagatctacatccagttaacttaa

SEQ ID NO: 2505123 - DNA, 25 bp, Homo sapien
ccaggaagatctacatccagttaac

SEQ ID NO: 2505124 - DNA, 25 bp, Homo sapien
ttaacttaactatggcagctgaatc

SEQ ID NO: 2505125 - DNA, 25 bp, Homo sapien
tacatccagttaacttaactatggc

SEQ ID NO: 2505126 - DNA, 25 bp, Homo sapien
tggagccagtccataagtcaaattc

SEQ ID NO: 2505127 - DNA, 25 bp, Homo sapien
ctgttctggaagatgaatatgcatt

SEQ ID NO: 2505128 - DNA, 25 bp, Homo sapien
ttgtgttggagccagtccataagtc

SEQ ID NO: 2505129 - DNA, 25 bp, Homo sapien
atgcatttttgtgttggagccagtc

SEQ ID NO: 2505130 - DNA, 25 bp, Homo sapien
gaacagctgcgatcttcacatgtaa

SEQ ID NO: 2505131 - DNA, 25 bp, Homo sapien
taaagcaagcgtaattcaagagccc

SEQ ID NO: 2505132 - DNA, 25 bp, Homo sapien
ggatttttcctcaccgcgtttgcag

SEQ ID NO: 2505133 - DNA, 25 bp, Homo sapien
gatggcttattactcgcacacggca

SEQ ID NO: 2505134 - DNA, 25 bp, Homo sapien
aacattcttaggctcatcggcatga

SEQ ID NO: 2505135 - DNA, 25 bp, Homo sapien
tatccacgctgaactggctatcggg

SEQ ID NO: 2505136 - DNA, 25 bp, Homo sapien
ggttccagcaactctgtgtgcagca

SEQ ID NO: 2505137 - DNA, 25 bp, Homo sapien
cagcaactctgtgtgcagcaggcag

SEQ ID NO: 2505138 - DNA, 25 bp, Homo sapien
catttatcccccctagtggaatcct

SEQ ID NO: 2505139 - DNA, 25 bp, Homo sapien
gaagtattgattccatctagttaaa

SEQ ID NO: 2505140 - DNA, 25 bp, Homo sapien
ttaaacatgtcgagtgagaggaagt

SEQ ID NO: 2505141 - DNA, 25 bp, Homo sapien
agtgatcaatggattacttcttcaa

SEQ ID NO: 2505142 - DNA, 25 bp, Homo sapien
gcagcagaattgcttagaaactgca

SEQ ID NO: 2505143 - DNA, 25 bp, Homo sapien
tgcagaacatccacaaggcaagcac

SEQ ID NO: 2505144 - DNA, 25 bp, Homo sapien
cccagtagtgcttctgcagcagaat

SEQ ID NO: 2505145 - DNA, 25 bp, Homo sapien
gggtgtcccccagtagtgcttctgc

SEQ ID NO: 2505146 - DNA, 25 bp, Homo sapien
caaatagaggaatggctagttgcca

SEQ ID NO: 2505147 - DNA, 25 bp, Homo sapien
ctagttgccatttgctgagggcatc

SEQ ID NO: 2505148 - DNA, 25 bp, Homo sapien
tgtctgactgtctttcaaatagagg

SEQ ID NO: 2505149 - DNA, 25 bp, Homo sapien
tatatggatgatatcgccgagactc

SEQ ID NO: 2505150 - DNA, 25 bp, Homo sapien
tcagtcccatgaagctgaactttct

SEQ ID NO: 2505151 - DNA, 25 bp, Homo sapien
tatttcctgaaagtagctcagtccc

SEQ ID NO: 2505152 - DNA, 25 bp, Homo sapien
ctgaaagtagctcagtcccatgaag

SEQ ID NO: 2505153 - DNA, 25 bp, Homo sapien
ttgttccagattggttcctgggatc

SEQ ID NO: 2505154 - DNA, 25 bp, Homo sapien
ctttgttccagattggttcctggga

SEQ ID NO: 2505155 - DNA, 25 bp, Homo sapien
tgtcctttgttccagattggttcct

SEQ ID NO: 2505156 - DNA, 25 bp, Homo sapien
tcctttgttccagattggttcctgg

SEQ ID NO: 2505157 - DNA, 25 bp, Homo sapien
tgtggcaatgggaagttttcttgct

SEQ ID NO: 2505158 - DNA, 25 bp, Homo sapien
tggcaatgggaagttttcttgctga

SEQ ID NO: 2505159 - DNA, 25 bp, Homo sapien
ggcaatgggaagttttcttgctgac

SEQ ID NO: 2505160 - DNA, 25 bp, Homo sapien
ctgggacaatttcccatggccattg

SEQ ID NO: 2505161 - DNA, 25 bp, Homo sapien
cagctcttgtccctgggacaatttc

SEQ ID NO: 2505162 - DNA, 25 bp, Homo sapien
cttgtccctgggacaatttcccatg

SEQ ID NO: 2505163 - DNA, 25 bp, Homo sapien
tccctgggacaatttcccatggcca

SEQ ID NO: 2505164 - DNA, 25 bp, Homo sapien
aactacaacattagctgtgggcggg

SEQ ID NO: 2505165 - DNA, 25 bp, Homo sapien
ggtgtattggcacacgcctagagtt

SEQ ID NO: 2505166 - DNA, 25 bp, Homo sapien
ctagagttctagctcctcaggaagc

SEQ ID NO: 2505167 - DNA, 25 bp, Homo sapien
taagtcatcatctgagggcctgaaa

SEQ ID NO: 2505168 - DNA, 25 bp, Homo sapien
caagagtggaagcaagaggacgcat

SEQ ID NO: 2505169 - DNA, 25 bp, Homo sapien
ttaaagacgcagaacctgttcaggc

SEQ ID NO: 2505170 - DNA, 25 bp, Homo sapien
aacctgttcaggcaagagtggaagc

SEQ ID NO: 2505171 - DNA, 25 bp, Homo sapien
gacgcataccacagtctggaattga

SEQ ID NO: 2505172 - DNA, 25 bp, Homo sapien
gaatggtccgttcctatttcgatag

SEQ ID NO: 2505173 - DNA, 25 bp, Homo sapien
tgaaccatacgctgaatgaaagaat

SEQ ID NO: 2505174 - DNA, 25 bp, Homo sapien
ctcaaactctgaaccatacgctgaa

SEQ ID NO: 2505175 - DNA, 25 bp, Homo sapien
aagaatggtccgttcctatttcgat

SEQ ID NO: 2505176 - DNA, 25 bp, Homo sapien
catttttataagtgcacagcttcag

SEQ ID NO: 2505177 - DNA, 25 bp, Homo sapien
gcattcaccgacatgaaacatgctg

SEQ ID NO: 2505178 - DNA, 25 bp, Homo sapien
ggagttctcaactattgaagccagt

SEQ ID NO: 2505179 - DNA, 25 bp, Homo sapien
gccagtgagctaacttctgcattca

SEQ ID NO: 2505180 - DNA, 25 bp, Homo sapien
aactaacaatagattcccgccaact

SEQ ID NO: 2505181 - DNA, 25 bp, Homo sapien
caatagattcccgccaactaaaagg

SEQ ID NO: 2505182 - DNA, 25 bp, Homo sapien
taacaatagattcccgccaactaaa

SEQ ID NO: 2505183 - DNA, 25 bp, Homo sapien
actaacaatagattcccgccaacta

SEQ ID NO: 2505184 - DNA, 25 bp, Homo sapien
gggaagttcaggttcgctccaggaa

SEQ ID NO: 2505185 - DNA, 25 bp, Homo sapien
ttggctcatagtttcacagacttca

SEQ ID NO: 2505186 - DNA, 25 bp, Homo sapien
cttcactacaggaagcttagggctt

SEQ ID NO: 2505187 - DNA, 25 bp, Homo sapien
aggttcgctccaggaaacatagcag

SEQ ID NO: 2505188 - DNA, 25 bp, Homo sapien
tactctgactcagtacaggctgcag

SEQ ID NO: 2505189 - DNA, 25 bp, Homo sapien
tgtaactcccttgatgagtaagctg

SEQ ID NO: 2505190 - DNA, 25 bp, Homo sapien
tcagatactctgactcagtacaggc

SEQ ID NO: 2505191 - DNA, 25 bp, Homo sapien
ctctctcagatactctgactcagta

SEQ ID NO: 2505192 - DNA, 25 bp, Homo sapien
gggcggatgcattcccatacatctg

SEQ ID NO: 2505193 - DNA, 25 bp, Homo sapien
tgtatcttggagtatggccaatcag

SEQ ID NO: 2505194 - DNA, 25 bp, Homo sapien
tctgctggagtgttttgatgtatct

SEQ ID NO: 2505195 - DNA, 25 bp, Homo sapien
tcacccagtccgagggcggatgcat

SEQ ID NO: 2505196 - DNA, 25 bp, Homo sapien
tctacagttatcttatattttcttc

SEQ ID NO: 2505197 - DNA, 25 bp, Homo sapien
tctccatttctacagttatcttata

SEQ ID NO: 2505198 - DNA, 25 bp, Homo sapien
tccatttctacagttatcttatatt

SEQ ID NO: 2505199 - DNA, 25 bp, Homo sapien
gtctctccatttctacagttatctt

SEQ ID NO: 2505200 - DNA, 25 bp, Homo sapien
aggagatgcatcagcaggtgccgct

SEQ ID NO: 2505201 - DNA, 25 bp, Homo sapien
gagcaataagatttcctggtgaatc

SEQ ID NO: 2505202 - DNA, 25 bp, Homo sapien
cagcaggtgccgctctgagatggac

SEQ ID NO: 2505203 - DNA, 25 bp, Homo sapien
catttcatagcgtagagcaataaga

SEQ ID NO: 2505204 - DNA, 25 bp, Homo sapien
cctgttttccctatgaggagacctt

SEQ ID NO: 2505205 - DNA, 25 bp, Homo sapien
tccatctttccattacctgcagaag

SEQ ID NO: 2505206 - DNA, 25 bp, Homo sapien
tctacctcctggagtagagcaccct

SEQ ID NO: 2505207 - DNA, 25 bp, Homo sapien
gaagcagtttccctccttgccacta

SEQ ID NO: 2505208 - DNA, 25 bp, Homo sapien
cactgaattgtaaacagtacttctc

SEQ ID NO: 2505209 - DNA, 25 bp, Homo sapien
gaacgagttctgcaggtttttcttg

SEQ ID NO: 2505210 - DNA, 25 bp, Homo sapien
ctgaaattgctgaacgagttctgca

SEQ ID NO: 2505211 - DNA, 25 bp, Homo sapien
ccctctggattacttgtttatagtc

SEQ ID NO: 2505212 - DNA, 25 bp, Homo sapien
aatgattagacagggttgagcaaag

SEQ ID NO: 2505213 - DNA, 25 bp, Homo sapien
cttgcaatgattagacagggttgag

SEQ ID NO: 2505214 - DNA, 25 bp, Homo sapien
cttctgtcattagctttgactgttg

SEQ ID NO: 2505215 - DNA, 25 bp, Homo sapien
tctgtcattagctttgactgttgac

SEQ ID NO: 2505216 - DNA, 25 bp, Homo sapien
tgttcagacttcagtcccaactcaa

SEQ ID NO: 2505217 - DNA, 25 bp, Homo sapien
gacttcagtcccaactcaagttcct

SEQ ID NO: 2505218 - DNA, 25 bp, Homo sapien
tataattgttcagacttcagtccca

SEQ ID NO: 2505219 - DNA, 25 bp, Homo sapien
taattgttcagacttcagtcccaac

SEQ ID NO: 2505220 - DNA, 25 bp, Homo sapien
tgggatgagaactccaagaagggct

SEQ ID NO: 2505221 - DNA, 25 bp, Homo sapien
ccttatgtgtatggtcttgatagaa

SEQ ID NO: 2505222 - DNA, 25 bp, Homo sapien
aagatgtagacagccaatgggatga

SEQ ID NO: 2505223 - DNA, 25 bp, Homo sapien
tgtcaaagcccttaggaggctcatg

SEQ ID NO: 2505224 - DNA, 25 bp, Homo sapien
ctgatgctgacagctatgctggaaa

SEQ ID NO: 2505225 - DNA, 25 bp, Homo sapien
ccactgccacacttaccagaggcat

SEQ ID NO: 2505226 - DNA, 25 bp, Homo sapien
gttctgtggaatcctttgaatggtt

SEQ ID NO: 2505227 - DNA, 25 bp, Homo sapien
cctttgaatggtttaatctggttgt

SEQ ID NO: 2505228 - DNA, 25 bp, Homo sapien
gtggaatcctttgaatggtttaatc

SEQ ID NO: 2505229 - DNA, 25 bp, Homo sapien
gaatcctttgaatggtttaatctgg

SEQ ID NO: 2505230 - DNA, 25 bp, Homo sapien
gacatctatagcttgctgtgagcct

SEQ ID NO: 2505231 - DNA, 25 bp, Homo sapien
atccaggacatctatagcttgctgt

SEQ ID NO: 2505232 - DNA, 25 bp, Homo sapien
cagtaaccagcatgcgaatttcata

SEQ ID NO: 2505233 - DNA, 25 bp, Homo sapien
catgcgaatttcatagagatgccaa

SEQ ID NO: 2505234 - DNA, 25 bp, Homo sapien
gacaagaactggatactatgaaaaa

SEQ ID NO: 2505235 - DNA, 25 bp, Homo sapien
aatacagtgctttcattagacaaga

SEQ ID NO: 2505236 - DNA, 25 bp, Homo sapien
tctcaaaaggatattaaggtggcca

SEQ ID NO: 2505237 - DNA, 25 bp, Homo sapien
tgcagaaattccaacacccttagaa

SEQ ID NO: 2505238 - DNA, 25 bp, Homo sapien
tccagtatcgccttccatttggaga

SEQ ID NO: 2505239 - DNA, 25 bp, Homo sapien
taaacagccattaattctctaatgt

SEQ ID NO: 2505240 - DNA, 25 bp, Homo sapien
acaagatgtagagtgttctccagta

SEQ ID NO: 2505241 - DNA, 25 bp, Homo sapien
cagtatcgccttccatttggagaca

SEQ ID NO: 2505242 - DNA, 25 bp, Homo sapien
caccaagcctaaaagggatacaagt

SEQ ID NO: 2505243 - DNA, 25 bp, Homo sapien
tcttgattcagaacaccaagcctaa

SEQ ID NO: 2505244 - DNA, 25 bp, Homo sapien
cacgtggggctgatatcttgattca

SEQ ID NO: 2505245 - DNA, 25 bp, Homo sapien
tagtaaatttagaagccgattccac

SEQ ID NO: 2505246 - DNA, 25 bp, Homo sapien
taacaaaatgtccatgagtcccgcc

SEQ ID NO: 2505247 - DNA, 25 bp, Homo sapien
tgtgacacaaatctggaccactttg

SEQ ID NO: 2505248 - DNA, 25 bp, Homo sapien
gttctcagttatacccacgtggcag

SEQ ID NO: 2505249 - DNA, 25 bp, Homo sapien
taatcatctattgctcccaatggag

SEQ ID NO: 2505250 - DNA, 25 bp, Homo sapien
ggaacgtagaagatgcttgcttgta

SEQ ID NO: 2505251 - DNA, 25 bp, Homo sapien
cacaaaaccatagtcagatttacct

SEQ ID NO: 2505252 - DNA, 25 bp, Homo sapien
aattggaacgtagaagatgcttgct

SEQ ID NO: 2505253 - DNA, 25 bp, Homo sapien
ttcccagaaattggaacgtagaaga

SEQ ID NO: 2505254 - DNA, 25 bp, Homo sapien
acaagtcctcggcagccagaattat

SEQ ID NO: 2505255 - DNA, 25 bp, Homo sapien
tataacatggccagtcgttactaca

SEQ ID NO: 2505256 - DNA, 25 bp, Homo sapien
tacacctacttctgaacattgactg

SEQ ID NO: 2505257 - DNA, 25 bp, Homo sapien
agggtacaagtcctcggcagccaga

SEQ ID NO: 2505258 - DNA, 25 bp, Homo sapien
ctggtgaaaagcaatgcacctccag

SEQ ID NO: 2505259 - DNA, 25 bp, Homo sapien
gctcacttagagcattcactggtga

SEQ ID NO: 2505260 - DNA, 25 bp, Homo sapien
catccaaacacttgctcacttagag

SEQ ID NO: 2505261 - DNA, 25 bp, Homo sapien
catcttgcgacttgggtccaggaac

SEQ ID NO: 2505262 - DNA, 25 bp, Homo sapien
tcaactctaatatcacacgtaagcc

SEQ ID NO: 2505263 - DNA, 25 bp, Homo sapien
caactagtctgcagtctcatgatgc

SEQ ID NO: 2505264 - DNA, 25 bp, Homo sapien
cattcctcccagtgtttgatcaaaa

SEQ ID NO: 2505265 - DNA, 25 bp, Homo sapien
aaaatgctgccactccgatgaatcc

SEQ ID NO: 2505266 - DNA, 25 bp, Homo sapien
tacacagtgccacacatgttgaggc

SEQ ID NO: 2505267 - DNA, 25 bp, Homo sapien
aaagcaagccatctttgtgcataga

SEQ ID NO: 2505268 - DNA, 25 bp, Homo sapien
gggctgcttttctatacctaatgga

SEQ ID NO: 2505269 - DNA, 25 bp, Homo sapien
gatctgattccatggcaattggccc

SEQ ID NO: 2505270 - DNA, 25 bp, Homo sapien
agcctgagtcactggaatgttttca

SEQ ID NO: 2505271 - DNA, 25 bp, Homo sapien
ttttttcagcctgagtcactggaat

SEQ ID NO: 2505272 - DNA, 25 bp, Homo sapien
atgtacatttgcatcatcgtcattc

SEQ ID NO: 2505273 - DNA, 25 bp, Homo sapien
tgcatcatcgtcattctccttacag

SEQ ID NO: 2505274 - DNA, 25 bp, Homo sapien
ttctgagttggctccatctaatgag

SEQ ID NO: 2505275 - DNA, 25 bp, Homo sapien
tgagttggctccatctaatgagatc

SEQ ID NO: 2505276 - DNA, 25 bp, Homo sapien
tagattctgagttggctccatctaa

SEQ ID NO: 2505277 - DNA, 25 bp, Homo sapien
ctgcttagattctgagttggctcca

SEQ ID NO: 2505278 - DNA, 25 bp, Homo sapien
cggacagaactcaaactgtctttta

SEQ ID NO: 2505279 - DNA, 25 bp, Homo sapien
tgatgcttgacacggacagaactca

SEQ ID NO: 2505280 - DNA, 25 bp, Homo sapien
gcttgacacggacagaactcaaact

SEQ ID NO: 2505281 - DNA, 25 bp, Homo sapien
agatgtgtgatgcttgacacggaca

SEQ ID NO: 2505282 - DNA, 25 bp, Homo sapien
cagtgaaaaggtccttgaaatggaa

SEQ ID NO: 2505283 - DNA, 25 bp, Homo sapien
agtgaaaaggtccttgaaatggaat

SEQ ID NO: 2505284 - DNA, 25 bp, Homo sapien
aacttcatgcacttgcctcaggtcc

SEQ ID NO: 2505285 - DNA, 25 bp, Homo sapien
gactgaaacttcatgcacttgcctc

SEQ ID NO: 2505286 - DNA, 25 bp, Homo sapien
taaccgccctgcacagactgaaact

SEQ ID NO: 2505287 - DNA, 25 bp, Homo sapien
ttgtctgacacactgtttctaaccg

SEQ ID NO: 2505288 - DNA, 25 bp, Homo sapien
ttgttactcctctgcataaccacaa

SEQ ID NO: 2505289 - DNA, 25 bp, Homo sapien
caagtagatctttcttaagtgctgc

SEQ ID NO: 2505290 - DNA, 25 bp, Homo sapien
tgaaaatatcttaatagtatcctgc

SEQ ID NO: 2505291 - DNA, 25 bp, Homo sapien
tagtatcctgcttccaatttgggtc

SEQ ID NO: 2505292 - DNA, 25 bp, Homo sapien
tctccaggtggatggttccacttcc

SEQ ID NO: 2505293 - DNA, 25 bp, Homo sapien
agttcccatgtcatagctcagggcc

SEQ ID NO: 2505294 - DNA, 25 bp, Homo sapien
gaggccccagacttcttgtaggtgc

SEQ ID NO: 2505295 - DNA, 25 bp, Homo sapien
gctcagggccaaagtagaggcccca

SEQ ID NO: 2505296 - DNA, 25 bp, Homo sapien
caacaaatggctgcaggactgccat

SEQ ID NO: 2505297 - DNA, 25 bp, Homo sapien
tgcaacaaatggctgcaggactgcc

SEQ ID NO: 2505298 - DNA, 25 bp, Homo sapien
ctgtgcaacaaatggctgcaggact

SEQ ID NO: 2505299 - DNA, 25 bp, Homo sapien
tgtgcaacaaatggctgcaggactg

SEQ ID NO: 2505300 - DNA, 25 bp, Homo sapien
ttcaggtagaattgaatgttgttat

SEQ ID NO: 2505301 - DNA, 25 bp, Homo sapien
tcaggtagaattgaatgttgttatt

SEQ ID NO: 2505302 - DNA, 25 bp, Homo sapien
attcaggtagaattgaatgttgtta

SEQ ID NO: 2505303 - DNA, 25 bp, Homo sapien
tgaagactttcacgtttctgtgtgt

SEQ ID NO: 2505304 - DNA, 25 bp, Homo sapien
aaatccacttctttgttggagcaag

SEQ ID NO: 2505305 - DNA, 25 bp, Homo sapien
gggaacttctggaataggctatcga

SEQ ID NO: 2505306 - DNA, 25 bp, Homo sapien
gttgagtttagacagctttttgtgg

SEQ ID NO: 2505307 - DNA, 25 bp, Homo sapien
gtccaggagttaaaatctacagtga

SEQ ID NO: 2505308 - DNA, 25 bp, Homo sapien
agatcaacaaaacaaatcgtggtgt

SEQ ID NO: 2505309 - DNA, 25 bp, Homo sapien
gctgaggtggagaaaacccttgagt

SEQ ID NO: 2505310 - DNA, 25 bp, Homo sapien
ctgtgcacctgagattctagctact

SEQ ID NO: 2505311 - DNA, 25 bp, Homo sapien
ttctcatcatcacgtccctttacta

SEQ ID NO: 2505312 - DNA, 25 bp, Homo sapien
tcatcacgtccctttactaccaaag

SEQ ID NO: 2505313 - DNA, 25 bp, Homo sapien
ctaccaaagtaagttgacctgccat

SEQ ID NO: 2505314 - DNA, 25 bp, Homo sapien
ttactaccaaagtaagttgacctgc

SEQ ID NO: 2505315 - DNA, 25 bp, Homo sapien
tcatagatcatagcggaacttccac

SEQ ID NO: 2505316 - DNA, 25 bp, Homo sapien
actgtggtcagtctcatagatcata

SEQ ID NO: 2505317 - DNA, 25 bp, Homo sapien
cctccttgtgcactgtggtcagtct

SEQ ID NO: 2505318 - DNA, 25 bp, Homo sapien
aattctcagcaagcttatctggggg

SEQ ID NO: 2505319 - DNA, 25 bp, Homo sapien
agctctgggaaggcccaacactgtt

SEQ ID NO: 2505320 - DNA, 25 bp, Homo sapien
ggggaagcagtaagtaagcaatctc

SEQ ID NO: 2505321 - DNA, 25 bp, Homo sapien
cagtaaaccttcagaccatgagctc

SEQ ID NO: 2505322 - DNA, 25 bp, Homo sapien
ggcagcccatgtttccccagaatca

SEQ ID NO: 2505323 - DNA, 25 bp, Homo sapien
accttcagagttggaataagccaag

SEQ ID NO: 2505324 - DNA, 25 bp, Homo sapien
tggcagtagctggagataaatctca

SEQ ID NO: 2505325 - DNA, 25 bp, Homo sapien
ccaagggctggagacgtgagtggca

SEQ ID NO: 2505326 - DNA, 25 bp, Homo sapien
ggagacgtgagtggcagtagctgga

SEQ ID NO: 2505327 - DNA, 25 bp, Homo sapien
gcccacttccttgaacagctgcttg

SEQ ID NO: 2505328 - DNA, 25 bp, Homo sapien
tgctccctatgtgcaaattcaactc

SEQ ID NO: 2505329 - DNA, 25 bp, Homo sapien
caagccgttcacaagccggttatct

SEQ ID NO: 2505330 - DNA, 25 bp, Homo sapien
tcaaggtcatggatcaagccgttca

SEQ ID NO: 2505331 - DNA, 25 bp, Homo sapien
cattagtgggttttgaacaccaagg

SEQ ID NO: 2505332 - DNA, 25 bp, Homo sapien
catgatttgcaaagacttctgtgtt

SEQ ID NO: 2505333 - DNA, 25 bp, Homo sapien
gtatgcatgatttgcaaagacttct

SEQ ID NO: 2505334 - DNA, 25 bp, Homo sapien
tgctgccttctgaggcagtatgcat

SEQ ID NO: 2505335 - DNA, 25 bp, Homo sapien
ggcagtatgcatgatttgcaaagac

SEQ ID NO: 2505336 - DNA, 25 bp, Homo sapien
tggagctgctgattacctatgccat

SEQ ID NO: 2505337 - DNA, 25 bp, Homo sapien
gcccactgtggaacagatattgcca

SEQ ID NO: 2505338 - DNA, 25 bp, Homo sapien
tcaggttctgttcattcagtatact

SEQ ID NO: 2505339 - DNA, 25 bp, Homo sapien
tctgctgctgaattcaggttctgtt

SEQ ID NO: 2505340 - DNA, 25 bp, Homo sapien
tgcttcttgccaattgttacctgga

SEQ ID NO: 2505341 - DNA, 25 bp, Homo sapien
tgccaattgttacctggaggagttt

SEQ ID NO: 2505342 - DNA, 25 bp, Homo sapien
tcttgccaattgttacctggaggag

SEQ ID NO: 2505343 - DNA, 25 bp, Homo sapien
caattgttacctggaggagtttggt

SEQ ID NO: 2505344 - DNA, 25 bp, Homo sapien
ctgttccccacagcagggcaatttg

SEQ ID NO: 2505345 - DNA, 25 bp, Homo sapien
tgttccccacagcagggcaatttgg

SEQ ID NO: 2505346 - DNA, 25 bp, Homo sapien
tgaaggtagcactggaacgctgctg

SEQ ID NO: 2505347 - DNA, 25 bp, Homo sapien
gagtcaacatggaaatcagccgcta

SEQ ID NO: 2505348 - DNA, 25 bp, Homo sapien
ccagccttatcttcatctgtcgtgc

SEQ ID NO: 2505349 - DNA, 25 bp, Homo sapien
tcagccgctaaagcatagccctgct

SEQ ID NO: 2505350 - DNA, 25 bp, Homo sapien
atgcaaaatggttaatacagtgttc

SEQ ID NO: 2505351 - DNA, 25 bp, Homo sapien
ggcaaaatggcattaataatttctc

SEQ ID NO: 2505352 - DNA, 25 bp, Homo sapien
taattactattcgaaattgaacaac

SEQ ID NO: 2505353 - DNA, 25 bp, Homo sapien
tgaacaacattaaaacaccactgtc

SEQ ID NO: 2505354 - DNA, 25 bp, Homo sapien
caactgacagcgagggtaagaagct

SEQ ID NO: 2505355 - DNA, 25 bp, Homo sapien
tgtaaaaagcaaactcaggttcctg

SEQ ID NO: 2505356 - DNA, 25 bp, Homo sapien
gattctaaatggacaatgcgtggga

SEQ ID NO: 2505357 - DNA, 25 bp, Homo sapien
tgtccaaaccaaatagtagtccaag

SEQ ID NO: 2505358 - DNA, 25 bp, Homo sapien
aaggagttaaggcatttttggctga

SEQ ID NO: 2505359 - DNA, 25 bp, Homo sapien
tcacagacacgaacaggcttcttgg

SEQ ID NO: 2505360 - DNA, 25 bp, Homo sapien
gaagatatttccacactgtcggcag

SEQ ID NO: 2505361 - DNA, 25 bp, Homo sapien
cttgcaagtcattgaaacatgcatc

SEQ ID NO: 2505362 - DNA, 25 bp, Homo sapien
tcttcggcccactttctattcaacg

SEQ ID NO: 2505363 - DNA, 25 bp, Homo sapien
ttgtacttcattgtcttcggcccac

SEQ ID NO: 2505364 - DNA, 25 bp, Homo sapien
ctattcaacgcttgtgtatgtttga

SEQ ID NO: 2505365 - DNA, 25 bp, Homo sapien
tttcccacaggccatacagttttgt

SEQ ID NO: 2505366 - DNA, 25 bp, Homo sapien
ctttgcaattctaatactttggttt

SEQ ID NO: 2505367 - DNA, 25 bp, Homo sapien
caattctaatactttggtttgaagc

SEQ ID NO: 2505368 - DNA, 25 bp, Homo sapien
tgctgcagttgtattatccagcttt

SEQ ID NO: 2505369 - DNA, 25 bp, Homo sapien
ttgcaattctaatactttggtttga

SEQ ID NO: 2505370 - DNA, 25 bp, Homo sapien
tctgaaccgttgcttctaatactgc

SEQ ID NO: 2505371 - DNA, 25 bp, Homo sapien
tactgcaatttcaccccgtaagtca

SEQ ID NO: 2505372 - DNA, 25 bp, Homo sapien
taagtcatccgtttgtttctcaagc

SEQ ID NO: 2505373 - DNA, 25 bp, Homo sapien
gctcactaactctccgttgactaga

SEQ ID NO: 2505374 - DNA, 25 bp, Homo sapien
tggtcttttagtatctgctgatttc

SEQ ID NO: 2505375 - DNA, 25 bp, Homo sapien
cacctggtcttttagtatctgctga

SEQ ID NO: 2505376 - DNA, 25 bp, Homo sapien
cctggtcttttagtatctgctgatt

SEQ ID NO: 2505377 - DNA, 25 bp, Homo sapien
tcacctggtcttttagtatctgctg

SEQ ID NO: 2505378 - DNA, 25 bp, Homo sapien
tctaatttctgctgaattagaagct

SEQ ID NO: 2505379 - DNA, 25 bp, Homo sapien
agctgccttcagggagtccgctttt

SEQ ID NO: 2505380 - DNA, 25 bp, Homo sapien
atttctgctgaattagaagctgttt

SEQ ID NO: 2505381 - DNA, 25 bp, Homo sapien
aagttctaatttctgctgaattaga

SEQ ID NO: 2505382 - DNA, 25 bp, Homo sapien
ctttatgctttctagtttgtgggac

SEQ ID NO: 2505383 - DNA, 25 bp, Homo sapien
tgagttcttcgtttagtttagtgat

SEQ ID NO: 2505384 - DNA, 25 bp, Homo sapien
tttctagtttgtgggacttgagttc

SEQ ID NO: 2505385 - DNA, 25 bp, Homo sapien
cttgagttcttcgtttagtttagtg

SEQ ID NO: 2505386 - DNA, 25 bp, Homo sapien
ttaatttcttctatctctgccaatt

SEQ ID NO: 2505387 - DNA, 25 bp, Homo sapien
tttcttctatctctgccaatttaga

SEQ ID NO: 2505388 - DNA, 25 bp, Homo sapien
ttctatctctgccaatttagacttc

SEQ ID NO: 2505389 - DNA, 25 bp, Homo sapien
tatctctgccaatttagacttctca

SEQ ID NO: 2505390 - DNA, 25 bp, Homo sapien
gccttggcagtcttcagttcttgaa

SEQ ID NO: 2505391 - DNA, 25 bp, Homo sapien
caatgtagccttggcagtcttcagt

SEQ ID NO: 2505392 - DNA, 25 bp, Homo sapien
ttacatcgctcctgcaattgctgtt

SEQ ID NO: 2505393 - DNA, 25 bp, Homo sapien
ttgtagtgctttacatcgctcctgc

SEQ ID NO: 2505394 - DNA, 25 bp, Homo sapien
taaaatggaagctacacagggcagg

SEQ ID NO: 2505395 - DNA, 25 bp, Homo sapien
cagtagaacactaaaccccttgagg

SEQ ID NO: 2505396 - DNA, 25 bp, Homo sapien
cagaaggctctataccacatgtggg

SEQ ID NO: 2505397 - DNA, 25 bp, Homo sapien
gagttgagtacatcgcccaaaaagc

SEQ ID NO: 2505398 - DNA, 25 bp, Homo sapien
gaaatcagattgaagctgtttgaaa

SEQ ID NO: 2505399 - DNA, 25 bp, Homo sapien
tctgctgcaagttcctgggctgcct

SEQ ID NO: 2505400 - DNA, 25 bp, Homo sapien
actgctgctgtagtttattctcaag

SEQ ID NO: 2505401 - DNA, 25 bp, Homo sapien
taagatcttgcctggtggctagaag

SEQ ID NO: 2505402 - DNA, 25 bp, Homo sapien
caactacattctgagggagcatgca

SEQ ID NO: 2505403 - DNA, 25 bp, Homo sapien
gaagtactatcaggtctcgggagaa

SEQ ID NO: 2505404 - DNA, 25 bp, Homo sapien
gacctgtcaagttgtacctgatata

SEQ ID NO: 2505405 - DNA, 25 bp, Homo sapien
catgcagtgctagatgcctcagctg

SEQ ID NO: 2505406 - DNA, 25 bp, Homo sapien
gttcccctgaagttgttgctcttct

SEQ ID NO: 2505407 - DNA, 25 bp, Homo sapien
ttagctcatttatgttcccctgaag

SEQ ID NO: 2505408 - DNA, 25 bp, Homo sapien
tccttggagtgcttcaatttgtttt

SEQ ID NO: 2505409 - DNA, 25 bp, Homo sapien
tctgttcacttgattgctttagctc

SEQ ID NO: 2505410 - DNA, 25 bp, Homo sapien
aagttgttcctgcattgaattgagt

SEQ ID NO: 2505411 - DNA, 25 bp, Homo sapien
tcctgcattgaattgagttccaatt

SEQ ID NO: 2505412 - DNA, 25 bp, Homo sapien
tgttcctgcattgaattgagttcca

SEQ ID NO: 2505413 - DNA, 25 bp, Homo sapien
gttgttcctgcattgaattgagttc

SEQ ID NO: 2505414 - DNA, 25 bp, Homo sapien
catctacaacacaagtctgctttca

SEQ ID NO: 2505415 - DNA, 25 bp, Homo sapien
gcatctacaacacaagtctgctttc

SEQ ID NO: 2505416 - DNA, 25 bp, Homo sapien
tacaacacaagtctgctttcaatca

SEQ ID NO: 2505417 - DNA, 25 bp, Homo sapien
tctacaacacaagtctgctttcaat

SEQ ID NO: 2505418 - DNA, 25 bp, Homo sapien
gttccttaagtgtgttttccatctg

SEQ ID NO: 2505419 - DNA, 25 bp, Homo sapien
ctctttttcaagtgactttttcagt

SEQ ID NO: 2505420 - DNA, 25 bp, Homo sapien
ttccatctgcacttgaagttgatgc

SEQ ID NO: 2505421 - DNA, 25 bp, Homo sapien
agttgatgctttaattctttgcaag

SEQ ID NO: 2505422 - DNA, 25 bp, Homo sapien
aataatcacttctacctaagaaagt

SEQ ID NO: 2505423 - DNA, 25 bp, Homo sapien
tctgttattcaattcctcatgctga

SEQ ID NO: 2505424 - DNA, 25 bp, Homo sapien
caagtctaatatagcggcttttcct

SEQ ID NO: 2505425 - DNA, 25 bp, Homo sapien
gcttttgcttgatactttcaagggc

SEQ ID NO: 2505426 - DNA, 25 bp, Homo sapien
ttgtcctttactgtagaaagctctg

SEQ ID NO: 2505427 - DNA, 25 bp, Homo sapien
ctgtagatccaatcttgtactggat

SEQ ID NO: 2505428 - DNA, 25 bp, Homo sapien
tgtagatccaatcttgtactggata

SEQ ID NO: 2505429 - DNA, 25 bp, Homo sapien
caagttgtttactcaattctgtggc

SEQ ID NO: 2505430 - DNA, 25 bp, Homo sapien
tgctccttgcttgctttaacttcaa

SEQ ID NO: 2505431 - DNA, 25 bp, Homo sapien
tagatcttgcaaagcctgctccttg

SEQ ID NO: 2505432 - DNA, 25 bp, Homo sapien
gtggctctgagctctaaatctgtgt

SEQ ID NO: 2505433 - DNA, 25 bp, Homo sapien
ggaaaagtctaccatatctgaaatg

SEQ ID NO: 2505434 - DNA, 25 bp, Homo sapien
gatacctggttatctgtctttggaa

SEQ ID NO: 2505435 - DNA, 25 bp, Homo sapien
tccttgtaatggtagagtagatacc

SEQ ID NO: 2505436 - DNA, 25 bp, Homo sapien
catgtaggtcatgagattccattgc

SEQ ID NO: 2505437 - DNA, 25 bp, Homo sapien
gacctgatccaactgagtagtaatc

SEQ ID NO: 2505438 - DNA, 25 bp, Homo sapien
accttctagctcttcggttttctgt

SEQ ID NO: 2505439 - DNA, 25 bp, Homo sapien
tttctgttctaaagagaggtatttc

SEQ ID NO: 2505440 - DNA, 25 bp, Homo sapien
gcttgtcttgtaactttgcagtgac

SEQ ID NO: 2505441 - DNA, 25 bp, Homo sapien
tctgaagatcagctctttgagcagt

SEQ ID NO: 2505442 - DNA, 25 bp, Homo sapien
gctgatagtaatagttcggttttgg

SEQ ID NO: 2505443 - DNA, 25 bp, Homo sapien
gctgtgtccaaatgattctgaagat

SEQ ID NO: 2505444 - DNA, 25 bp, Homo sapien
gcttctgctgatagtaatagttcgg

SEQ ID NO: 2505445 - DNA, 25 bp, Homo sapien
tgtacctggtcatgcaaattctcct

SEQ ID NO: 2505446 - DNA, 25 bp, Homo sapien
gaaaggacacggtcttgtgcagctc

SEQ ID NO: 2505447 - DNA, 25 bp, Homo sapien
tgtgccttctgctcttgtacctggt

SEQ ID NO: 2505448 - DNA, 25 bp, Homo sapien
ctgtatgtcaagctgggagaccttc

SEQ ID NO: 2505449 - DNA, 25 bp, Homo sapien
ccagcctgaatttttgcataaagat

SEQ ID NO: 2505450 - DNA, 25 bp, Homo sapien
tgtaataaagcttcaaggttctgga

SEQ ID NO: 2505451 - DNA, 25 bp, Homo sapien
tctggatcttttggtccttatcgcc

SEQ ID NO: 2505452 - DNA, 25 bp, Homo sapien
caatttgacgtagaacttgttccaa

SEQ ID NO: 2505453 - DNA, 25 bp, Homo sapien
ggtactctcatgatttgtgccaata

SEQ ID NO: 2505454 - DNA, 25 bp, Homo sapien
taaatcacatatacccgcaggctca

SEQ ID NO: 2505455 - DNA, 25 bp, Homo sapien
aattaggactactctgaccattcca

SEQ ID NO: 2505456 - DNA, 25 bp, Homo sapien
tccatcgatatagcaagagatccct

SEQ ID NO: 2505457 - DNA, 25 bp, Homo sapien
ttgttttatctaattgatgctgcaa

SEQ ID NO: 2505458 - DNA, 25 bp, Homo sapien
agttttgccgtggtgctttgctgaa

SEQ ID NO: 2505459 - DNA, 25 bp, Homo sapien
taattgatgctgcaattctgtagaa

SEQ ID NO: 2505460 - DNA, 25 bp, Homo sapien
ttcttgatgctgttgctttgtttta

SEQ ID NO: 2505461 - DNA, 25 bp, Homo sapien
aaaaatgtagattgtcaattgagaa

SEQ ID NO: 2505462 - DNA, 25 bp, Homo sapien
aaaaaatgtagattgtcaattgaga

SEQ ID NO: 2505463 - DNA, 25 bp, Homo sapien
aaaaaaatgtagattgtcaattgag

SEQ ID NO: 2505464 - DNA, 25 bp, Homo sapien
ttcccctagttggcgctctgtctcc

SEQ ID NO: 2505465 - DNA, 25 bp, Homo sapien
ctgctcttctaaccgagaaagtttg

SEQ ID NO: 2505466 - DNA, 25 bp, Homo sapien
tctaaccgagaaagtttgagttgta

SEQ ID NO: 2505467 - DNA, 25 bp, Homo sapien
ccgagaaagtttgagttgtaaatca

SEQ ID NO: 2505468 - DNA, 25 bp, Homo sapien
cagtgaggtttcagatgcagacaat

SEQ ID NO: 2505469 - DNA, 25 bp, Homo sapien
tagatgctggtacttggtctctacc

SEQ ID NO: 2505470 - DNA, 25 bp, Homo sapien
tgttgtagctgcttaaactccgcct

SEQ ID NO: 2505471 - DNA, 25 bp, Homo sapien
tgcagacaatcttgactgaagctgt

SEQ ID NO: 2505472 - DNA, 25 bp, Homo sapien
gaaggggatgacactgaaataggaa

SEQ ID NO: 2505473 - DNA, 25 bp, Homo sapien
gaaataggaaagaacaatcaaagcc

SEQ ID NO: 2505474 - DNA, 25 bp, Homo sapien
taggaaagaacaatcaaagccttca

SEQ ID NO: 2505475 - DNA, 25 bp, Homo sapien
tgctggaaggggatgacactgaaat

SEQ ID NO: 2505476 - DNA, 25 bp, Homo sapien
tatggtcttcccatggaatctgaag

SEQ ID NO: 2505477 - DNA, 25 bp, Homo sapien
gactgtttaaaattgccttgtccca

SEQ ID NO: 2505478 - DNA, 25 bp, Homo sapien
tactttgtagctcgccaacgtctct

SEQ ID NO: 2505479 - DNA, 25 bp, Homo sapien
aacatatggtaacaactagggactg

SEQ ID NO: 2505480 - DNA, 25 bp, Homo sapien
gggcctttggcaagttcactcctta

SEQ ID NO: 2505481 - DNA, 25 bp, Homo sapien
gcaagttcactccttagctggctta

SEQ ID NO: 2505482 - DNA, 25 bp, Homo sapien
cactccttagctggcttattgtggc

SEQ ID NO: 2505483 - DNA, 25 bp, Homo sapien
catatacagcaacttcctgggggcc

SEQ ID NO: 2505484 - DNA, 25 bp, Homo sapien
taataataccagtaggacaagagct

SEQ ID NO: 2505485 - DNA, 25 bp, Homo sapien
tcagaggtctactttacataaggga

SEQ ID NO: 2505486 - DNA, 25 bp, Homo sapien
tattatacaagggatttacaggcca

SEQ ID NO: 2505487 - DNA, 25 bp, Homo sapien
gacaagagcttttaactggcttcag

SEQ ID NO: 2505488 - DNA, 25 bp, Homo sapien
atttaagtacaatgaacttcattac

SEQ ID NO: 2505489 - DNA, 25 bp, Homo sapien
tctgagctagcatattgtgactgca

SEQ ID NO: 2505490 - DNA, 25 bp, Homo sapien
agcacggcaacatcttctataccag

SEQ ID NO: 2505491 - DNA, 25 bp, Homo sapien
tcgctcacgttccaaggtcatgtta

SEQ ID NO: 2505492 - DNA, 25 bp, Homo sapien
ggaccagttctttctttagcacggc

SEQ ID NO: 2505493 - DNA, 25 bp, Homo sapien
gttcagcagcttctcgaagactcct

SEQ ID NO: 2505494 - DNA, 25 bp, Homo sapien
gacgtgtcactttttgttcagcagc

SEQ ID NO: 2505495 - DNA, 25 bp, Homo sapien
cttgaattacagttgcctctttgtt

SEQ ID NO: 2505496 - DNA, 25 bp, Homo sapien
ttaattcttctgtcagacgtgtcac

SEQ ID NO: 2505497 - DNA, 25 bp, Homo sapien
gcaatttcagtagcaagttgggctg

SEQ ID NO: 2505498 - DNA, 25 bp, Homo sapien
ttcagtagcaagttgggctgctttc

SEQ ID NO: 2505499 - DNA, 25 bp, Homo sapien
ctgcaatttcagtagcaagttgggc

SEQ ID NO: 2505500 - DNA, 25 bp, Homo sapien
atttcagtagcaagttgggctgctt

SEQ ID NO: 2505501 - DNA, 25 bp, Homo sapien
cttctaattgctgttccaaagactg

SEQ ID NO: 2505502 - DNA, 25 bp, Homo sapien
tcttctaattgctgttccaaagact

SEQ ID NO: 2505503 - DNA, 25 bp, Homo sapien
ttctaattgctgttccaaagactgt

SEQ ID NO: 2505504 - DNA, 25 bp, Homo sapien
gctgatgaatcagtcaccaacccat

SEQ ID NO: 2505505 - DNA, 25 bp, Homo sapien
ctgctgatgaatcagtcaccaaccc

SEQ ID NO: 2505506 - DNA, 25 bp, Homo sapien
tcaccaacccatcaggtttggcctc

SEQ ID NO: 2505507 - DNA, 25 bp, Homo sapien
cagtcaccaacccatcaggtttggc

SEQ ID NO: 2505508 - DNA, 25 bp, Homo sapien
aacaaaagacataaacaaatgaatt

SEQ ID NO: 2505509 - DNA, 25 bp, Homo sapien
taaaacaaaagacataaacaaatga

SEQ ID NO: 2505510 - DNA, 25 bp, Homo sapien
tcaattaaaacaaaagacataaaca

SEQ ID NO: 2505511 - DNA, 25 bp, Homo sapien
gacataaacaaatgaattaaaagga

SEQ ID NO: 2505512 - DNA, 25 bp, Homo sapien
tagcctaatgatctaacttcagttt

SEQ ID NO: 2505513 - DNA, 25 bp, Homo sapien
ccagcaggcagactagcctaatgat

SEQ ID NO: 2505514 - DNA, 25 bp, Homo sapien
gagaccagcaggcagactagcctaa

SEQ ID NO: 2505515 - DNA, 25 bp, Homo sapien
ggcagactagcctaatgatctaact

SEQ ID NO: 2505516 - DNA, 25 bp, Homo sapien
ccactatatggttaatatacctcat

SEQ ID NO: 2505517 - DNA, 25 bp, Homo sapien
tacaggcgtgggcccatccagtaac

SEQ ID NO: 2505518 - DNA, 25 bp, Homo sapien
gttatttatatcaggccgccacctg

SEQ ID NO: 2505519 - DNA, 25 bp, Homo sapien
gcgtgggcccatccagtaactcatt

SEQ ID NO: 2505520 - DNA, 25 bp, Homo sapien
aaacaactaataaacatgctttaag

SEQ ID NO: 2505521 - DNA, 25 bp, Homo sapien
ttgctgctgcagcccttgatatttt

SEQ ID NO: 2505522 - DNA, 25 bp, Homo sapien
cttctttaattcttccgagtaccat

SEQ ID NO: 2505523 - DNA, 25 bp, Homo sapien
gctgcagcccttgatatttttctaa

SEQ ID NO: 2505524 - DNA, 25 bp, Homo sapien
gctgctgcagcccttgatatttttc

SEQ ID NO: 2505525 - DNA, 25 bp, Homo sapien
aagaggtattatctgaaacactgaa

SEQ ID NO: 2505526 - DNA, 25 bp, Homo sapien
taaaaagaggtattatctgaaacac

SEQ ID NO: 2505527 - DNA, 25 bp, Homo sapien
ttaaaaagaggtattatctgaaaca

SEQ ID NO: 2505528 - DNA, 25 bp, Homo sapien
aaaagaggtattatctgaaacactg

SEQ ID NO: 2505529 - DNA, 25 bp, Homo sapien
cctgtaggtcttggacctcttgtct

SEQ ID NO: 2505530 - DNA, 25 bp, Homo sapien
ggaattaatagtcaatgtcctttaa

SEQ ID NO: 2505531 - DNA, 25 bp, Homo sapien
gggaggaaggaattaatagtcaatg

SEQ ID NO: 2505532 - DNA, 25 bp, Homo sapien
tatataaatccctcagaaaaacgat

SEQ ID NO: 2505533 - DNA, 25 bp, Homo sapien
atatataaatccctcagaaaaacga

SEQ ID NO: 2505534 - DNA, 25 bp, Homo sapien
taaacgacgataccacatgcatatt

SEQ ID NO: 2505535 - DNA, 25 bp, Homo sapien
ttaaacgacgataccacatgcatat

SEQ ID NO: 2505536 - DNA, 25 bp, Homo sapien
taccagcatcatgaacagcttcata

SEQ ID NO: 2505537 - DNA, 25 bp, Homo sapien
atgacctgagtcattaccagcatca

SEQ ID NO: 2505538 - DNA, 25 bp, Homo sapien
tcaaagcaagattagactctcctcc

SEQ ID NO: 2505539 - DNA, 25 bp, Homo sapien
cgcttcaaagcaagattagactctc

SEQ ID NO: 2505540 - DNA, 25 bp, Homo sapien
ccactgttgtacaacactagtagat

SEQ ID NO: 2505541 - DNA, 25 bp, Homo sapien
agtagatatgcctttagtgcaacag

SEQ ID NO: 2505542 - DNA, 25 bp, Homo sapien
gtagatatgcctttagtgcaacagt

SEQ ID NO: 2505543 - DNA, 25 bp, Homo sapien
ttaataccctgaaataaatgattca

SEQ ID NO: 2505544 - DNA, 25 bp, Homo sapien
aaaaccagctattttgagcaaccca

SEQ ID NO: 2505545 - DNA, 25 bp, Homo sapien
tcacaaaaagacagctgcaaacagg

SEQ ID NO: 2505546 - DNA, 25 bp, Homo sapien
tcccttgtagcataaaaagttaagc

SEQ ID NO: 2505547 - DNA, 25 bp, Homo sapien
aagttaagcaacaccgaggcaagga

SEQ ID NO: 2505548 - DNA, 25 bp, Homo sapien
taacactggagtcattaagaagttc

SEQ ID NO: 2505549 - DNA, 25 bp, Homo sapien
cattttcatcgtgcactttctggta

SEQ ID NO: 2505550 - DNA, 25 bp, Homo sapien
caatagcagttatacatcttttcat

SEQ ID NO: 2505551 - DNA, 25 bp, Homo sapien
tttctggtaatgctccaataaatca

SEQ ID NO: 2505552 - DNA, 25 bp, Homo sapien
tctaaaattagttcccatccttatg

SEQ ID NO: 2505553 - DNA, 25 bp, Homo sapien
aaaataactagtgtatctcttctgg

SEQ ID NO: 2505554 - DNA, 25 bp, Homo sapien
tctcttctggtatacgtaaggaaaa

SEQ ID NO: 2505555 - DNA, 25 bp, Homo sapien
tgaaaatctatccaaagtaggactt

SEQ ID NO: 2505556 - DNA, 25 bp, Homo sapien
gtaagtagatggaggaaattaaata

SEQ ID NO: 2505557 - DNA, 25 bp, Homo sapien
gtagatggaggaaattaaatataaa

SEQ ID NO: 2505558 - DNA, 25 bp, Homo sapien
caaagtaagtagatggaggaaatta

SEQ ID NO: 2505559 - DNA, 25 bp, Homo sapien
tccaaagtaagtagatggaggaaat

SEQ ID NO: 2505560 - DNA, 25 bp, Homo sapien
tcccaaaaagaaagctccaagccca

SEQ ID NO: 2505561 - DNA, 25 bp, Homo sapien
tctagcagtatacaggctgagcacc

SEQ ID NO: 2505562 - DNA, 25 bp, Homo sapien
gcttgagacacttttggattctgga

SEQ ID NO: 2505563 - DNA, 25 bp, Homo sapien
gactgatatccctcatgaccaaatg

SEQ ID NO: 2505564 - DNA, 25 bp, Homo sapien
caacagtcggattttcaaccactgc

SEQ ID NO: 2505565 - DNA, 25 bp, Homo sapien
cccaacagtcggattttcaaccact

SEQ ID NO: 2505566 - DNA, 25 bp, Homo sapien
ccaacagtcggattttcaaccactg

SEQ ID NO: 2505567 - DNA, 25 bp, Homo sapien
tacccaacagtcggattttcaacca

SEQ ID NO: 2505568 - DNA, 25 bp, Homo sapien
ttgaagtgactcaaatcatgactca

SEQ ID NO: 2505569 - DNA, 25 bp, Homo sapien
cggacgccactgaagaagcatcgtt

SEQ ID NO: 2505570 - DNA, 25 bp, Homo sapien
attgaagtgactcaaatcatgactc

SEQ ID NO: 2505571 - DNA, 25 bp, Homo sapien
ttgttcttttctgcccgcggacgcc

SEQ ID NO: 2505572 - DNA, 25 bp, Homo sapien
aacctttgacgaccatgactccgtg

SEQ ID NO: 2505573 - DNA, 25 bp, Homo sapien
cctttgacgaccatgactccgtgga

SEQ ID NO: 2505574 - DNA, 25 bp, Homo sapien
tgcctttgtaacctttgacgaccat

SEQ ID NO: 2505575 - DNA, 25 bp, Homo sapien
tgtaacctttgacgaccatgactcc

SEQ ID NO: 2505576 - DNA, 25 bp, Homo sapien
ggttttggcaggaatgacaacactg

SEQ ID NO: 2505577 - DNA, 25 bp, Homo sapien
tctagaaactttggcggtggtcgtg

SEQ ID NO: 2505578 - DNA, 25 bp, Homo sapien
aacactggtagtggaggaaacttca

SEQ ID NO: 2505579 - DNA, 25 bp, Homo sapien
caggaatgacaacactggtagtgga

SEQ ID NO: 2505580 - DNA, 25 bp, Homo sapien
gtgactaattgtataacaagtcatt

SEQ ID NO: 2505581 - DNA, 25 bp, Homo sapien
attgtataacaagtcattttagttt

SEQ ID NO: 2505582 - DNA, 25 bp, Homo sapien
ctaattgtataacaagtcattttag

SEQ ID NO: 2505583 - DNA, 25 bp, Homo sapien
gactaattgtataacaagtcatttt

SEQ ID NO: 2505584 - DNA, 25 bp, Homo sapien
taatgctgagcaaatcctcgctgca

SEQ ID NO: 2505585 - DNA, 25 bp, Homo sapien
aagaacatcgacatagcccacaaag

SEQ ID NO: 2505586 - DNA, 25 bp, Homo sapien
cacaagccattacgagtgacatcca

SEQ ID NO: 2505587 - DNA, 25 bp, Homo sapien
gtgacatccaacagaaagaactggc

SEQ ID NO: 2505588 - DNA, 25 bp, Homo sapien
ggagttgctgatgaatctaaatcag

SEQ ID NO: 2505589 - DNA, 25 bp, Homo sapien
gacgtccactgtgtttataggagtt

SEQ ID NO: 2505590 - DNA, 25 bp, Homo sapien
ctttcattattgacgtccactgtgt

SEQ ID NO: 2505591 - DNA, 25 bp, Homo sapien
ttgctgatgaatctaaatcagaacc

SEQ ID NO: 2505592 - DNA, 25 bp, Homo sapien
ggctcaaacgattgttggcatttta

SEQ ID NO: 2505593 - DNA, 25 bp, Homo sapien
cattatagaccggatgacagagcga

SEQ ID NO: 2505594 - DNA, 25 bp, Homo sapien
tagactacagtatgccgtgaatata

SEQ ID NO: 2505595 - DNA, 25 bp, Homo sapien
taccagtgacaataggaaggctgag

SEQ ID NO: 2505596 - DNA, 25 bp, Homo sapien
gcaataactgtatcctgtccaagaa

SEQ ID NO: 2505597 - DNA, 25 bp, Homo sapien
tcgataccaggagacagtacccact

SEQ ID NO: 2505598 - DNA, 25 bp, Homo sapien
cactttattgccaggtcttggagcc

SEQ ID NO: 2505599 - DNA, 25 bp, Homo sapien
tacaggctttagagaggctgcactt

SEQ ID NO: 2505600 - DNA, 25 bp, Homo sapien
tgtctcctccaatggctctgataat

SEQ ID NO: 2505601 - DNA, 25 bp, Homo sapien
gtgtctcctccaatggctctgataa

SEQ ID NO: 2505602 - DNA, 25 bp, Homo sapien
tggatcagttatcatgggaatggct

SEQ ID NO: 2505603 - DNA, 25 bp, Homo sapien
tgactaggtcatgggagttccaccc

SEQ ID NO: 2505604 - DNA, 25 bp, Homo sapien
tgaatggattgccattattgtgaac

SEQ ID NO: 2505605 - DNA, 25 bp, Homo sapien
ctttgttataaagacaagcttgtgg

SEQ ID NO: 2505606 - DNA, 25 bp, Homo sapien
agaccgagaagggtagatcaccgga

SEQ ID NO: 2505607 - DNA, 25 bp, Homo sapien
catggtgagaccccgccttaataaa

SEQ ID NO: 2505608 - DNA, 25 bp, Homo sapien
ctggtcaatgtggagaaaccttgtc

SEQ ID NO: 2505609 - DNA, 25 bp, Homo sapien
cttaataaatttaggttgggcacag

SEQ ID NO: 2505610 - DNA, 25 bp, Homo sapien
tgggacgcattcaaagcagtgtgta

SEQ ID NO: 2505611 - DNA, 25 bp, Homo sapien
tctgggacgcattcaaagcagtgtg

SEQ ID NO: 2505612 - DNA, 25 bp, Homo sapien
ctctgggacgcattcaaagcagtgt

SEQ ID NO: 2505613 - DNA, 25 bp, Homo sapien
ggacgcattcaaagcagtgtgtaga

SEQ ID NO: 2505614 - DNA, 25 bp, Homo sapien
cacataatttcaaagcacagagtcc

SEQ ID NO: 2505615 - DNA, 25 bp, Homo sapien
gagtccatttcaaataaatctctaa

SEQ ID NO: 2505616 - DNA, 25 bp, Homo sapien
cacccagccaaggaatgccacataa

SEQ ID NO: 2505617 - DNA, 25 bp, Homo sapien
taaatctctaaattaacaatagctt

SEQ ID NO: 2505618 - DNA, 25 bp, Homo sapien
tcaaagggactcttacgtcctctca

SEQ ID NO: 2505619 - DNA, 25 bp, Homo sapien
cacagtactacctgcgccttttatg

SEQ ID NO: 2505620 - DNA, 25 bp, Homo sapien
tggtctctagccaccacggtagctt

SEQ ID NO: 2505621 - DNA, 25 bp, Homo sapien
cgtcctctcacaatttggtctctag

SEQ ID NO: 2505622 - DNA, 25 bp, Homo sapien
tgttactgccaaaatcatcgcttac

SEQ ID NO: 2505623 - DNA, 25 bp, Homo sapien
ccttgttactgccaaaatcatcgct

SEQ ID NO: 2505624 - DNA, 25 bp, Homo sapien
ttgttactgccaaaatcatcgctta

SEQ ID NO: 2505625 - DNA, 25 bp, Homo sapien
cccttgttactgccaaaatcatcgc

SEQ ID NO: 2505626 - DNA, 25 bp, Homo sapien
ctggcccgtcccacgggcaccaact

SEQ ID NO: 2505627 - DNA, 25 bp, Homo sapien
catggggcgttctccagcccggcag

SEQ ID NO: 2505628 - DNA, 25 bp, Homo sapien
aaggcgaagcaagccgcccgaatct

SEQ ID NO: 2505629 - DNA, 25 bp, Homo sapien
caggtgcgcatcgtgtcaaattggg

SEQ ID NO: 2505630 - DNA, 25 bp, Homo sapien
gccactcactactcggggtgcgcgg

SEQ ID NO: 2505631 - DNA, 25 bp, Homo sapien
agagcgagcgaacgactaggcagcc

SEQ ID NO: 2505632 - DNA, 25 bp, Homo sapien
cgagagggagcacgcgagagagagc

SEQ ID NO: 2505633 - DNA, 25 bp, Homo sapien
gaacgactaggcagcctgcgagcgc

SEQ ID NO: 2505634 - DNA, 25 bp, Homo sapien
tctgcatctctatgggacaaaggtt

SEQ ID NO: 2505635 - DNA, 25 bp, Homo sapien
aaaaagaacttagccacctgtggtg

SEQ ID NO: 2505636 - DNA, 25 bp, Homo sapien
gagagtcaacaacaggagaaagcca

SEQ ID NO: 2505637 - DNA, 25 bp, Homo sapien
taaaaactggttagtgccgcatagg

SEQ ID NO: 2505638 - DNA, 25 bp, Homo sapien
tccccgtggttcatggataacctta

SEQ ID NO: 2505639 - DNA, 25 bp, Homo sapien
tctggtgaacagtctccacagtgtc

SEQ ID NO: 2505640 - DNA, 25 bp, Homo sapien
ggaaatggtacatgatctgtccttt

SEQ ID NO: 2505641 - DNA, 25 bp, Homo sapien
caggaccagcattgaggaaatggta

SEQ ID NO: 2505642 - DNA, 25 bp, Homo sapien
ccttctccgctataggattttggga

SEQ ID NO: 2505643 - DNA, 25 bp, Homo sapien
aaacaccagccttctccgctatagg

SEQ ID NO: 2505644 - DNA, 25 bp, Homo sapien
cagccttctccgctataggattttg

SEQ ID NO: 2505645 - DNA, 25 bp, Homo sapien
caccagccttctccgctataggatt

SEQ ID NO: 2505646 - DNA, 25 bp, Homo sapien
agctgcttgatgtcctgagtgtaag

SEQ ID NO: 2505647 - DNA, 25 bp, Homo sapien
acagctgcttgatgtcctgagtgta

SEQ ID NO: 2505648 - DNA, 25 bp, Homo sapien
ctgcttgatgtcctgagtgtaagct

SEQ ID NO: 2505649 - DNA, 25 bp, Homo sapien
ctacagctgcttgatgtcctgagtg

SEQ ID NO: 2505650 - DNA, 25 bp, Homo sapien
taatgaggtgtagccaaaatacaac

SEQ ID NO: 2505651 - DNA, 25 bp, Homo sapien
taggagtagatttggcaagccagac

SEQ ID NO: 2505652 - DNA, 25 bp, Homo sapien
gaatttatgaatccggctcctctcc

SEQ ID NO: 2505653 - DNA, 25 bp, Homo sapien
caacatgtgggaggcagtaaatgta

SEQ ID NO: 2505654 - DNA, 25 bp, Homo sapien
tttggcacagtgcaaggaaaacatc

SEQ ID NO: 2505655 - DNA, 25 bp, Homo sapien
caataaagggcaaggaatgagtttg

SEQ ID NO: 2505656 - DNA, 25 bp, Homo sapien
gcagaatccataagtgctctgacag

SEQ ID NO: 2505657 - DNA, 25 bp, Homo sapien
tagtactctagacgtcatattccag

SEQ ID NO: 2505658 - DNA, 25 bp, Homo sapien
aagctcaggactgctctgcttttgg

SEQ ID NO: 2505659 - DNA, 25 bp, Homo sapien
ttccatggttgcagaaaatcagcat

SEQ ID NO: 2505660 - DNA, 25 bp, Homo sapien
tagtaacgtaatggagtctgtaata

SEQ ID NO: 2505661 - DNA, 25 bp, Homo sapien
ccatggttgcagaaaatcagcataa

SEQ ID NO: 2505662 - DNA, 25 bp, Homo sapien
ttttagcagctaccagcaattagta

SEQ ID NO: 2505663 - DNA, 25 bp, Homo sapien
ttatattcttgaaggtttcagagca

SEQ ID NO: 2505664 - DNA, 25 bp, Homo sapien
caaatttcttcgtactttggtcctg

SEQ ID NO: 2505665 - DNA, 25 bp, Homo sapien
cgtactttggtcctgaaaaagctat

SEQ ID NO: 2505666 - DNA, 25 bp, Homo sapien
aggtttcagagcatgagaaaaagac

SEQ ID NO: 2505667 - DNA, 25 bp, Homo sapien
taaatacaaaacgagactatatcaa

SEQ ID NO: 2505668 - DNA, 25 bp, Homo sapien
aataaatacaaaacgagactatatc

SEQ ID NO: 2505669 - DNA, 25 bp, Homo sapien
gagactatatcaaaaagccaggcac

SEQ ID NO: 2505670 - DNA, 25 bp, Homo sapien
aaaacgagactatatcaaaaagcca

SEQ ID NO: 2505671 - DNA, 25 bp, Homo sapien
gctaagctgctttgcgtcaagagaa

SEQ ID NO: 2505672 - DNA, 25 bp, Homo sapien
acttccggaaatagcatgagtcttc

SEQ ID NO: 2505673 - DNA, 25 bp, Homo sapien
tataccaagggctttcagtggattc

SEQ ID NO: 2505674 - DNA, 25 bp, Homo sapien
agaagagcccactgatgcctgactg

SEQ ID NO: 2505675 - DNA, 25 bp, Homo sapien
cataccatggaaatagctgcatgag

SEQ ID NO: 2505676 - DNA, 25 bp, Homo sapien
tcgagagcatcaggttttgatacaa

SEQ ID NO: 2505677 - DNA, 25 bp, Homo sapien
tgaggtaattgccatgtcataccat

SEQ ID NO: 2505678 - DNA, 25 bp, Homo sapien
caaaagtagaacttgaccgtgaggt

SEQ ID NO: 2505679 - DNA, 25 bp, Homo sapien
tgagcaaccaagttcttacagcgct

SEQ ID NO: 2505680 - DNA, 25 bp, Homo sapien
tgcatgcaagcgatactgcagggcc

SEQ ID NO: 2505681 - DNA, 25 bp, Homo sapien
ttacagcgctaactagagaaggtgc

SEQ ID NO: 2505682 - DNA, 25 bp, Homo sapien
tcagaatcatcagcacgtagcaact

SEQ ID NO: 2505683 - DNA, 25 bp, Homo sapien
ttatcttgtgtccttatgatcatca

SEQ ID NO: 2505684 - DNA, 25 bp, Homo sapien
tatcttgtgtccttatgatcatcat

SEQ ID NO: 2505685 - DNA, 25 bp, Homo sapien
aagctgggaatttttacaataggtg

SEQ ID NO: 2505686 - DNA, 25 bp, Homo sapien
cgtggctatgggttgaatccacagc

SEQ ID NO: 2505687 - DNA, 25 bp, Homo sapien
agcctgagactctgcgtggctatgg

SEQ ID NO: 2505688 - DNA, 25 bp, Homo sapien
tcccactggtaagttaaacacagta

SEQ ID NO: 2505689 - DNA, 25 bp, Homo sapien
tgagggatacgtcgttgttagactg

SEQ ID NO: 2505690 - DNA, 25 bp, Homo sapien
aattctgagggatacgtcgttgtta

SEQ ID NO: 2505691 - DNA, 25 bp, Homo sapien
tggttatcatgaaattctgagggat

SEQ ID NO: 2505692 - DNA, 25 bp, Homo sapien
tctgagggatacgtcgttgttagac

SEQ ID NO: 2505693 - DNA, 25 bp, Homo sapien
aatgcagtgctgtcgcccaagtgtg

SEQ ID NO: 2505694 - DNA, 25 bp, Homo sapien
tgcgggtctgagaacaaagttagcc

SEQ ID NO: 2505695 - DNA, 25 bp, Homo sapien
taggcaccagtaccagctttaagag

SEQ ID NO: 2505696 - DNA, 25 bp, Homo sapien
cagtcaccttttgagctaggcacca

SEQ ID NO: 2505697 - DNA, 25 bp, Homo sapien
cagagcaagatcatgtctcaaaata

SEQ ID NO: 2505698 - DNA, 25 bp, Homo sapien
aaatgtaacatattcccaccccagg

SEQ ID NO: 2505699 - DNA, 25 bp, Homo sapien
tgtaagtactacaagggcaaagaca

SEQ ID NO: 2505700 - DNA, 25 bp, Homo sapien
cactctttccctagagagctatata

SEQ ID NO: 2505701 - DNA, 25 bp, Homo sapien
tgttcagtcgccacctcattatagg

SEQ ID NO: 2505702 - DNA, 25 bp, Homo sapien
ggaagagtctaggatctggacacct

SEQ ID NO: 2505703 - DNA, 25 bp, Homo sapien
aaaacagtccagatgaccatgagga

SEQ ID NO: 2505704 - DNA, 25 bp, Homo sapien
gacaccttcacgagctaactgatgg

SEQ ID NO: 2505705 - DNA, 25 bp, Homo sapien
accttgagaagcgagagcaggcatg

SEQ ID NO: 2505706 - DNA, 25 bp, Homo sapien
cattgaggccgaaactaaagatcgg

SEQ ID NO: 2505707 - DNA, 25 bp, Homo sapien
agagaaaggtcgtgagcctgctgcc

SEQ ID NO: 2505708 - DNA, 25 bp, Homo sapien
taaagatcggaagagttagtgcatc

SEQ ID NO: 2505709 - DNA, 25 bp, Homo sapien
tggacactggagttacccagctggc

SEQ ID NO: 2505710 - DNA, 25 bp, Homo sapien
aagtcccaatacaagcggttttgtg

SEQ ID NO: 2505711 - DNA, 25 bp, Homo sapien
tattgagaactttctacatgccagt

SEQ ID NO: 2505712 - DNA, 25 bp, Homo sapien
tacatgccagttccattctacatac

SEQ ID NO: 2505713 - DNA, 25 bp, Homo sapien
tgtaagtgaatgagtaccctaccct

SEQ ID NO: 2505714 - DNA, 25 bp, Homo sapien
tatttcaagattagaagattctcct

SEQ ID NO: 2505715 - DNA, 25 bp, Homo sapien
aataccaactatggtaggtgatgac

SEQ ID NO: 2505716 - DNA, 25 bp, Homo sapien
cattagctcacttagtgtttgaaac

SEQ ID NO: 2505717 - DNA, 25 bp, Homo sapien
ctacctcaagaaaagggcattatta

SEQ ID NO: 2505718 - DNA, 25 bp, Homo sapien
catcccccaaccatcactatcatcc

SEQ ID NO: 2505719 - DNA, 25 bp, Homo sapien
ctaaaacccttccatcatcagccac

SEQ ID NO: 2505720 - DNA, 25 bp, Homo sapien
taaaacccttccatcatcagccact

SEQ ID NO: 2505721 - DNA, 25 bp, Homo sapien
atcccccaaccatcactatcatcca

SEQ ID NO: 2505722 - DNA, 25 bp, Homo sapien
attatatggttgttacactcggcca

SEQ ID NO: 2505723 - DNA, 25 bp, Homo sapien
tatatggttgttacactcggccaca

SEQ ID NO: 2505724 - DNA, 25 bp, Homo sapien
ttatatggttgttacactcggccac

SEQ ID NO: 2505725 - DNA, 25 bp, Homo sapien
tattatatggttgttacactcggcc

SEQ ID NO: 2505726 - DNA, 25 bp, Homo sapien
tcttttgcgcttcagcctgcgcatt

SEQ ID NO: 2505727 - DNA, 25 bp, Homo sapien
ttgcgcttcagcctgcgcattcgct

SEQ ID NO: 2505728 - DNA, 25 bp, Homo sapien
tgcgcttcagcctgcgcattcgctt

SEQ ID NO: 2505729 - DNA, 25 bp, Homo sapien
tcttcttttgcgcttcagcctgcgc

SEQ ID NO: 2505730 - DNA, 25 bp, Homo sapien
aaaaaaatggcgctaaggccgagag

SEQ ID NO: 2505731 - DNA, 25 bp, Homo sapien
caaaaaaaatggcgctaaggccgag

SEQ ID NO: 2505732 - DNA, 25 bp, Homo sapien
tcttgctaacatctatgggaatcat

SEQ ID NO: 2505733 - DNA, 25 bp, Homo sapien
tggaggtggtcatcgagctaccatt

SEQ ID NO: 2505734 - DNA, 25 bp, Homo sapien
caaactggagaacggtactgtcatc

SEQ ID NO: 2505735 - DNA, 25 bp, Homo sapien
ggaacaccatatgcactagataaat

SEQ ID NO: 2505736 - DNA, 25 bp, Homo sapien
actaggcccctattagtgctggtcc

SEQ ID NO: 2505737 - DNA, 25 bp, Homo sapien
taaatgttcagtttgcccctgagtc

SEQ ID NO: 2505738 - DNA, 25 bp, Homo sapien
taaataacttgcctctatcttgggt

SEQ ID NO: 2505739 - DNA, 25 bp, Homo sapien
caaaaccctatgctccagccagaaa

SEQ ID NO: 2505740 - DNA, 25 bp, Homo sapien
tccttgtcagtggatccagacgcat

SEQ ID NO: 2505741 - DNA, 25 bp, Homo sapien
gaaagcaactctggtctatatcatc

SEQ ID NO: 2505742 - DNA, 25 bp, Homo sapien
ctcactatggatggctttccccagg

SEQ ID NO: 2505743 - DNA, 25 bp, Homo sapien
gaagaaggcattctagacagaaaac

SEQ ID NO: 2505744 - DNA, 25 bp, Homo sapien
tcccgcaggcagtctctgccagcca

SEQ ID NO: 2505745 - DNA, 25 bp, Homo sapien
ctctcccgcaggcagtctctgccag

SEQ ID NO: 2505746 - DNA, 25 bp, Homo sapien
ctcccgcaggcagtctctgccagcc

SEQ ID NO: 2505747 - DNA, 25 bp, Homo sapien
tctcccgcaggcagtctctgccagc

SEQ ID NO: 2505748 - DNA, 25 bp, Homo sapien
tttgttcttccaggctccaactgcc

SEQ ID NO: 2505749 - DNA, 25 bp, Homo sapien
tctggacacattcccttgtgacatg

SEQ ID NO: 2505750 - DNA, 25 bp, Homo sapien
gcctttgctctggacacattccctt

SEQ ID NO: 2505751 - DNA, 25 bp, Homo sapien
caggctccaactgcctttgctctgg

SEQ ID NO: 2505752 - DNA, 25 bp, Homo sapien
tgaatttcgcagcagttgctacttg

SEQ ID NO: 2505753 - DNA, 25 bp, Homo sapien
tggcttctgccaaaacgatataggt

SEQ ID NO: 2505754 - DNA, 25 bp, Homo sapien
cgatataggtatccgaagcagggct

SEQ ID NO: 2505755 - DNA, 25 bp, Homo sapien
cctgaactttgaatttcgcagcagt

SEQ ID NO: 2505756 - DNA, 25 bp, Homo sapien
tccaactctgttgtgctttactgac

SEQ ID NO: 2505757 - DNA, 25 bp, Homo sapien
tatggctataccagttaggaagagc

SEQ ID NO: 2505758 - DNA, 25 bp, Homo sapien
gcaccctttattatggctataccag

SEQ ID NO: 2505759 - DNA, 25 bp, Homo sapien
caaatcacagagatacctcaagcag

SEQ ID NO: 2505760 - DNA, 25 bp, Homo sapien
gagcaattggatgcaaatcacagag

SEQ ID NO: 2505761 - DNA, 25 bp, Homo sapien
tctggccagtggggaccagactgat

SEQ ID NO: 2505762 - DNA, 25 bp, Homo sapien
ggaatataggattatcttccaggat

SEQ ID NO: 2505763 - DNA, 25 bp, Homo sapien
tgtaggaatataggattatcttcca

SEQ ID NO: 2505764 - DNA, 25 bp, Homo sapien
ctttgtaggaatataggattatctt

SEQ ID NO: 2505765 - DNA, 25 bp, Homo sapien
gaacgcaacagaggcaagaatggat

SEQ ID NO: 2505766 - DNA, 25 bp, Homo sapien
ggaaagccgaaagagaacgcaacag

SEQ ID NO: 2505767 - DNA, 25 bp, Homo sapien
tgctcaaggtcagaacaagccgttc

SEQ ID NO: 2505768 - DNA, 25 bp, Homo sapien
cagcgttgattttaccaacctttcg

SEQ ID NO: 2505769 - DNA, 25 bp, Homo sapien
gggtacaaagtactgcgtgttcagc

SEQ ID NO: 2505770 - DNA, 25 bp, Homo sapien
tgcgcaattccgacaggcactgggt

SEQ ID NO: 2505771 - DNA, 25 bp, Homo sapien
ccacctggcggagacaagctttagt

SEQ ID NO: 2505772 - DNA, 25 bp, Homo sapien
aagtgcttctgcgtaaaccttgcgc

SEQ ID NO: 2505773 - DNA, 25 bp, Homo sapien
cttggccctggtttccggcagttct

SEQ ID NO: 2505774 - DNA, 25 bp, Homo sapien
cttatgtaatgtgtgatcaggcccc

SEQ ID NO: 2505775 - DNA, 25 bp, Homo sapien
ctccgaaggtgcgtggaatggctca

SEQ ID NO: 2505776 - DNA, 25 bp, Homo sapien
gcagttctttgctccgaaggtgcgt

SEQ ID NO: 2505777 - DNA, 25 bp, Homo sapien
gagatacagaaaagtgccacgggtt

SEQ ID NO: 2505778 - DNA, 25 bp, Homo sapien
tctctggcaccagtacacaggaggc

SEQ ID NO: 2505779 - DNA, 25 bp, Homo sapien
gctggcgatgctccccagatgggct

SEQ ID NO: 2505780 - DNA, 25 bp, Homo sapien
agtgccacgggttgatctttctctg

SEQ ID NO: 2505781 - DNA, 25 bp, Homo sapien
gtggctgtctgtaaatgaactgaag

SEQ ID NO: 2505782 - DNA, 25 bp, Homo sapien
cagtgtcactgtgttcctcaagtgg

SEQ ID NO: 2505783 - DNA, 25 bp, Homo sapien
aatgaactgaagcatgtggcgttcc

SEQ ID NO: 2505784 - DNA, 25 bp, Homo sapien
agcatgtggcgttccaggccttgtg

SEQ ID NO: 2505785 - DNA, 25 bp, Homo sapien
cctgtgcctctttgttcatgagttg

SEQ ID NO: 2505786 - DNA, 25 bp, Homo sapien
ttcagccctaaaagaggttccattg

SEQ ID NO: 2505787 - DNA, 25 bp, Homo sapien
ttgtctgtgtgaaaagtgggccgac

SEQ ID NO: 2505788 - DNA, 25 bp, Homo sapien
aaaagaggttccattgccaggtgca

SEQ ID NO: 2505789 - DNA, 25 bp, Homo sapien
gggcttagcaaagcatcatgcatgt

SEQ ID NO: 2505790 - DNA, 25 bp, Homo sapien
aatggatgaatgacactgctccagc

SEQ ID NO: 2505791 - DNA, 25 bp, Homo sapien
cccaagggcttagcaaagcatcatg

SEQ ID NO: 2505792 - DNA, 25 bp, Homo sapien
gcatgtggtagttatgcattaaata

SEQ ID NO: 2505793 - DNA, 25 bp, Homo sapien
ctggattcggatctgggctccatca

SEQ ID NO: 2505794 - DNA, 25 bp, Homo sapien
gctagatagcctttggtaaatactt

SEQ ID NO: 2505795 - DNA, 25 bp, Homo sapien
catcactccctagctagatagcctt

SEQ ID NO: 2505796 - DNA, 25 bp, Homo sapien
tgggctccatcactccctagctaga

SEQ ID NO: 2505797 - DNA, 25 bp, Homo sapien
gcccaaggagtggacccagctcagg

SEQ ID NO: 2505798 - DNA, 25 bp, Homo sapien
caccaagggcagctcgtttgttgcc

SEQ ID NO: 2505799 - DNA, 25 bp, Homo sapien
aagcccaaggagtggacccagctca

SEQ ID NO: 2505800 - DNA, 25 bp, Homo sapien
gggcagctcgtttgttgccttctac

SEQ ID NO: 2505801 - DNA, 25 bp, Homo sapien
acctggacaaagatctaaggcctgg

SEQ ID NO: 2505802 - DNA, 25 bp, Homo sapien
acacctggacaaagatctaaggcct

SEQ ID NO: 2505803 - DNA, 25 bp, Homo sapien
tggacaaagatctaaggcctgggaa

SEQ ID NO: 2505804 - DNA, 25 bp, Homo sapien
acagccacgcgcaacacctggacaa

SEQ ID NO: 2505805 - DNA, 25 bp, Homo sapien
gctgaagctggatggcgtctacctg

SEQ ID NO: 2505806 - DNA, 25 bp, Homo sapien
acacatccatccacaagttgagagg

SEQ ID NO: 2505807 - DNA, 25 bp, Homo sapien
ggaagaagcaaagataccactggaa

SEQ ID NO: 2505808 - DNA, 25 bp, Homo sapien
tgtacaaccggcatgatcgttcatc

SEQ ID NO: 2505809 - DNA, 25 bp, Homo sapien
cactttggttgagctaggaattccc

SEQ ID NO: 2505810 - DNA, 25 bp, Homo sapien
ggttccaggtccaagttggccaaga

SEQ ID NO: 2505811 - DNA, 25 bp, Homo sapien
tccatgagttcccttggcaggacaa

SEQ ID NO: 2505812 - DNA, 25 bp, Homo sapien
gaagggcagttctttactctgtgaa

SEQ ID NO: 2505813 - DNA, 25 bp, Homo sapien
aaagaatcagcataaggccacaaac

SEQ ID NO: 2505814 - DNA, 25 bp, Homo sapien
caaatgaaaatgaacccgcatttat

SEQ ID NO: 2505815 - DNA, 25 bp, Homo sapien
tattcatgctactcaacatcccaaa

SEQ ID NO: 2505816 - DNA, 25 bp, Homo sapien
atttctctattcatgctactcaaca

SEQ ID NO: 2505817 - DNA, 25 bp, Homo sapien
tgtccttgcagagagcccatttcca

SEQ ID NO: 2505818 - DNA, 25 bp, Homo sapien
cacctaaataaacaggcaagcctgt

SEQ ID NO: 2505819 - DNA, 25 bp, Homo sapien
ttttctcaaggccacatagctcctc

SEQ ID NO: 2505820 - DNA, 25 bp, Homo sapien
ggttcagttgatcctgacagctgcg

SEQ ID NO: 2505821 - DNA, 25 bp, Homo sapien
cagctgttgatcagcggtcactcag

SEQ ID NO: 2505822 - DNA, 25 bp, Homo sapien
tcggcagggcctcctatggtaagcc

SEQ ID NO: 2505823 - DNA, 25 bp, Homo sapien
aggatagctcccatgcagcgtgcca

SEQ ID NO: 2505824 - DNA, 25 bp, Homo sapien
catgcgacactctccttctgaaggc

SEQ ID NO: 2505825 - DNA, 25 bp, Homo sapien
tataatgggcaatcatgagccatgc

SEQ ID NO: 2505826 - DNA, 25 bp, Homo sapien
aaaccattagccctggagcattggc

SEQ ID NO: 2505827 - DNA, 25 bp, Homo sapien
agaggatctgatactgcgggtcagc

SEQ ID NO: 2505828 - DNA, 25 bp, Homo sapien
caggatccatgtcagctgaagctat

SEQ ID NO: 2505829 - DNA, 25 bp, Homo sapien
ggcttgataggtatcgcgactcggt

SEQ ID NO: 2505830 - DNA, 25 bp, Homo sapien
atttccattagattattcctgtttc

SEQ ID NO: 2505831 - DNA, 25 bp, Homo sapien
acggggcttgataggtatcgcgact

SEQ ID NO: 2505832 - DNA, 25 bp, Homo sapien
aggtatcgcgactcggtctatttcc

SEQ ID NO: 2505833 - DNA, 25 bp, Homo sapien
tggttacttctgcagatataccttg

SEQ ID NO: 2505834 - DNA, 25 bp, Homo sapien
ttacttctgcagatataccttgtgc

SEQ ID NO: 2505835 - DNA, 25 bp, Homo sapien
tacttctgcagatataccttgtgcc

SEQ ID NO: 2505836 - DNA, 25 bp, Homo sapien
gttacttctgcagatataccttgtg

SEQ ID NO: 2505837 - DNA, 25 bp, Homo sapien
ggaagtaactgtccctgtcacactg

SEQ ID NO: 2505838 - DNA, 25 bp, Homo sapien
tgtggtatcacaaccccaagttcct

SEQ ID NO: 2505839 - DNA, 25 bp, Homo sapien
gcatggtccatgtagctcaccgcag

SEQ ID NO: 2505840 - DNA, 25 bp, Homo sapien
gcatcccagctgatagaataaggaa

SEQ ID NO: 2505841 - DNA, 25 bp, Homo sapien
gaaaagggtgtccttccatggacta

SEQ ID NO: 2505842 - DNA, 25 bp, Homo sapien
cttccatggactactacacagccat

SEQ ID NO: 2505843 - DNA, 25 bp, Homo sapien
gtaaggtgagatatgagatccagtt

SEQ ID NO: 2505844 - DNA, 25 bp, Homo sapien
tgagatatgagatccagttttattc

SEQ ID NO: 2505845 - DNA, 25 bp, Homo sapien
ttctccagtccttccctgattggct

SEQ ID NO: 2505846 - DNA, 25 bp, Homo sapien
agtccttccctgattggcttaataa

SEQ ID NO: 2505847 - DNA, 25 bp, Homo sapien
tctgaaggaaggcctaggactgaag

SEQ ID NO: 2505848 - DNA, 25 bp, Homo sapien
tccgttcatttcctgaatcattttt

SEQ ID NO: 2505849 - DNA, 25 bp, Homo sapien
tcccaggtcctgcagaagcagtcca

SEQ ID NO: 2505850 - DNA, 25 bp, Homo sapien
tgcagaagcagtccacttctttcag

SEQ ID NO: 2505851 - DNA, 25 bp, Homo sapien
cagaagcagtccacttctttcagag

SEQ ID NO: 2505852 - DNA, 25 bp, Homo sapien
cctgcagaagcagtccacttctttc

SEQ ID NO: 2505853 - DNA, 25 bp, Homo sapien
ggtagcgtccaaagacgaggagaca

SEQ ID NO: 2505854 - DNA, 25 bp, Homo sapien
gagaggaagaggtagcgtccaaaga

SEQ ID NO: 2505855 - DNA, 25 bp, Homo sapien
agaggaagaggtagcgtccaaagac

SEQ ID NO: 2505856 - DNA, 25 bp, Homo sapien
aagaggtagcgtccaaagacgagga

SEQ ID NO: 2505857 - DNA, 25 bp, Homo sapien
ttcagccagatgagaatggtaagtg

SEQ ID NO: 2505858 - DNA, 25 bp, Homo sapien
cagattcagccagatgagaatggta

SEQ ID NO: 2505859 - DNA, 25 bp, Homo sapien
caacaagagagaagtcctcggtcat

SEQ ID NO: 2505860 - DNA, 25 bp, Homo sapien
gccagattcagccagatgagaatgg

SEQ ID NO: 2505861 - DNA, 25 bp, Homo sapien
ttgcctttggtctactccaggtggt

SEQ ID NO: 2505862 - DNA, 25 bp, Homo sapien
tttggtctactccaggtggttgagg

SEQ ID NO: 2505863 - DNA, 25 bp, Homo sapien
gggatgacttcagaacagtaattca

SEQ ID NO: 2505864 - DNA, 25 bp, Homo sapien
cagaacagtaattcaatgggtggtc

SEQ ID NO: 2505865 - DNA, 25 bp, Homo sapien
gaggtttaagggaggtacagctcac

SEQ ID NO: 2505866 - DNA, 25 bp, Homo sapien
cgaggtttaagggaggtacagctca

SEQ ID NO: 2505867 - DNA, 25 bp, Homo sapien
gaggaaacatgagggtcctcacagg

SEQ ID NO: 2505868 - DNA, 25 bp, Homo sapien
taagttggtcaaggtcattcacaga

SEQ ID NO: 2505869 - DNA, 25 bp, Homo sapien
gggcttcctattattaggcctatgg

SEQ ID NO: 2505870 - DNA, 25 bp, Homo sapien
tgttcctatagcttagaaacttccc

SEQ ID NO: 2505871 - DNA, 25 bp, Homo sapien
cataatgactttagttccttagagg

SEQ ID NO: 2505872 - DNA, 25 bp, Homo sapien
cgaggtgtaatttctgccattttga

SEQ ID NO: 2505873 - DNA, 25 bp, Homo sapien
ttttaaaagatcaggaactactgct

SEQ ID NO: 2505874 - DNA, 25 bp, Homo sapien
ggaactactgcttggcaccgaggtg

SEQ ID NO: 2505875 - DNA, 25 bp, Homo sapien
ggagaaggtagatgcacagaatgcc

SEQ ID NO: 2505876 - DNA, 25 bp, Homo sapien
catagcagtgaattccctgggtttc

SEQ ID NO: 2505877 - DNA, 25 bp, Homo sapien
tgcagactactaggaatctcaggac

SEQ ID NO: 2505878 - DNA, 25 bp, Homo sapien
tacattagggacatctgctttgaga

SEQ ID NO: 2505879 - DNA, 25 bp, Homo sapien
tctccactgggatggtgtcagagta

SEQ ID NO: 2505880 - DNA, 25 bp, Homo sapien
ctggcattaataaagaggtggctcc

SEQ ID NO: 2505881 - DNA, 25 bp, Homo sapien
tacacccggcactaatgaggagccc

SEQ ID NO: 2505882 - DNA, 25 bp, Homo sapien
taagatccagagtcccataacacaa

SEQ ID NO: 2505883 - DNA, 25 bp, Homo sapien
aggcggaagcccacagccgaggcca

SEQ ID NO: 2505884 - DNA, 25 bp, Homo sapien
ggcggaagcccacagccgaggccat

SEQ ID NO: 2505885 - DNA, 25 bp, Homo sapien
acaggcggaagcccacagccgaggc

SEQ ID NO: 2505886 - DNA, 25 bp, Homo sapien
aaacaggcggaagcccacagccgag

SEQ ID NO: 2505887 - DNA, 25 bp, Homo sapien
gttatctcatttgatacttgagcaa

SEQ ID NO: 2505888 - DNA, 25 bp, Homo sapien
catgtggttcacagtagcttcaacc

SEQ ID NO: 2505889 - DNA, 25 bp, Homo sapien
agttcattttacaggcatctgatag

SEQ ID NO: 2505890 - DNA, 25 bp, Homo sapien
ttgagttcattttacaggcatctga

SEQ ID NO: 2505891 - DNA, 25 bp, Homo sapien
tttacagtccaatgaccgccgtggg

SEQ ID NO: 2505892 - DNA, 25 bp, Homo sapien
ggaagaactctgcacccaaatggca

SEQ ID NO: 2505893 - DNA, 25 bp, Homo sapien
ggagcgtgttttcctcgagtcatca

SEQ ID NO: 2505894 - DNA, 25 bp, Homo sapien
gaagcaggctccttatatcaacgtg

SEQ ID NO: 2505895 - DNA, 25 bp, Homo sapien
taggccagtgttgtccaacagaaac

SEQ ID NO: 2505896 - DNA, 25 bp, Homo sapien
ttctgtaggccagtgttgtccaaca

SEQ ID NO: 2505897 - DNA, 25 bp, Homo sapien
tagagtcttagcaactagaggaaac

SEQ ID NO: 2505898 - DNA, 25 bp, Homo sapien
caaaatgtgagctacatataacttt

SEQ ID NO: 2505899 - DNA, 25 bp, Homo sapien
gattgtgccagggtgatccaacctc

SEQ ID NO: 2505900 - DNA, 25 bp, Homo sapien
catgagtcacagcacaaccaagagg

SEQ ID NO: 2505901 - DNA, 25 bp, Homo sapien
gcccgagttcaagaaaacagccatt

SEQ ID NO: 2505902 - DNA, 25 bp, Homo sapien
tagggtagcatccttgacaccaccg

SEQ ID NO: 2505903 - DNA, 25 bp, Homo sapien
gaagtgagagaatggcttgagcctg

SEQ ID NO: 2505904 - DNA, 25 bp, Homo sapien
ggaggcagaggttgcaatgagctga

SEQ ID NO: 2505905 - DNA, 25 bp, Homo sapien
caggaggctgaagtgagagaatggc

SEQ ID NO: 2505906 - DNA, 25 bp, Homo sapien
ggctgaagtgagagaatggcttgag

SEQ ID NO: 2505907 - DNA, 25 bp, Homo sapien
tgaggtcctctagtgcacaaggcat

SEQ ID NO: 2505908 - DNA, 25 bp, Homo sapien
cgcgtctgatttgtaaggagttgca

SEQ ID NO: 2505909 - DNA, 25 bp, Homo sapien
tcaccagagccaacgcgtctgattt

SEQ ID NO: 2505910 - DNA, 25 bp, Homo sapien
tatctgatatctgagccagcattag

SEQ ID NO: 2505911 - DNA, 25 bp, Homo sapien
tgtgagaagtgccactccccacttc

SEQ ID NO: 2505912 - DNA, 25 bp, Homo sapien
tttgatgtcgctgtgagaagtgcca

SEQ ID NO: 2505913 - DNA, 25 bp, Homo sapien
gccagcaactcccagatctgatcat

SEQ ID NO: 2505914 - DNA, 25 bp, Homo sapien
tctgatcatatttgatgtcgctgtg

SEQ ID NO: 2505915 - DNA, 25 bp, Homo sapien
cttccttgaaacataacttgtgcca

SEQ ID NO: 2505916 - DNA, 25 bp, Homo sapien
ggtaacaacatgacatatgccaccg

SEQ ID NO: 2505917 - DNA, 25 bp, Homo sapien
tatgccaccgcaagtacattcatcc

SEQ ID NO: 2505918 - DNA, 25 bp, Homo sapien
catgttacagggctatgcactgcga

SEQ ID NO: 2505919 - DNA, 25 bp, Homo sapien
ttatggcagatgcacgggccttccc

SEQ ID NO: 2505920 - DNA, 25 bp, Homo sapien
cctccaaatcgcatattccagatca

SEQ ID NO: 2505921 - DNA, 25 bp, Homo sapien
agcacagcccactgaaatgattcga

SEQ ID NO: 2505922 - DNA, 25 bp, Homo sapien
aatttcctgattaggtcacatgacc

SEQ ID NO: 2505923 - DNA, 25 bp, Homo sapien
ttcataccttgctgatacaaagctg

SEQ ID NO: 2505924 - DNA, 25 bp, Homo sapien
ccctgccaacctaggtacaaagatg

SEQ ID NO: 2505925 - DNA, 25 bp, Homo sapien
tccctgccaacctaggtacaaagat

SEQ ID NO: 2505926 - DNA, 25 bp, Homo sapien
catccctgccaacctaggtacaaag

SEQ ID NO: 2505927 - DNA, 25 bp, Homo sapien
ctctttcctcctggcttaatttcat

SEQ ID NO: 2505928 - DNA, 25 bp, Homo sapien
tgtacaacttcattaataacctgag

SEQ ID NO: 2505929 - DNA, 25 bp, Homo sapien
tgagataccatgttataaacaatga

SEQ ID NO: 2505930 - DNA, 25 bp, Homo sapien
ccccaattcgcaatgttggtcatgg

SEQ ID NO: 2505931 - DNA, 25 bp, Homo sapien
aattgactgagatcaaagactcccc

SEQ ID NO: 2505932 - DNA, 25 bp, Homo sapien
gcaaaggcttacctataatgatatt

SEQ ID NO: 2505933 - DNA, 25 bp, Homo sapien
aatcagaatttccatcaataggaat

SEQ ID NO: 2505934 - DNA, 25 bp, Homo sapien
gcaatttcacttctacgaatgtaaa

SEQ ID NO: 2505935 - DNA, 25 bp, Homo sapien
acaattaagctttatgtgcaaaggc

SEQ ID NO: 2505936 - DNA, 25 bp, Homo sapien
gcccggcctacttatatgaccattt

SEQ ID NO: 2505937 - DNA, 25 bp, Homo sapien
ttttagtcattggtttccttcagcc

SEQ ID NO: 2505938 - DNA, 25 bp, Homo sapien
ttttaaaagctctcactaccagcaa

SEQ ID NO: 2505939 - DNA, 25 bp, Homo sapien
gaccatttttctactactaggcatt

SEQ ID NO: 2505940 - DNA, 25 bp, Homo sapien
aacaccctgagagatgggtaggcca

SEQ ID NO: 2505941 - DNA, 25 bp, Homo sapien
gagtgggcagccagatgttatttca

SEQ ID NO: 2505942 - DNA, 25 bp, Homo sapien
tatttcacagaattcacacggctgg

SEQ ID NO: 2505943 - DNA, 25 bp, Homo sapien
cacggctggaatcgctgctgtgaga

SEQ ID NO: 2505944 - DNA, 25 bp, Homo sapien
gttacatcccctgtagtgcagctgg

SEQ ID NO: 2505945 - DNA, 25 bp, Homo sapien
acagtcaccgcggagtctgcaatcg

SEQ ID NO: 2505946 - DNA, 25 bp, Homo sapien
ggcgaattctggacgtatctacaca

SEQ ID NO: 2505947 - DNA, 25 bp, Homo sapien
gccaggctgcaactttggtgacggt

SEQ ID NO: 2505948 - DNA, 25 bp, Homo sapien
gcgctcctgcgcccgactcgccctc

SEQ ID NO: 2505949 - DNA, 25 bp, Homo sapien
ctcctgcgcccgactcgccctcgcc

SEQ ID NO: 2505950 - DNA, 25 bp, Homo sapien
tcctgcgcccgactcgccctcgccc

SEQ ID NO: 2505951 - DNA, 25 bp, Homo sapien
gctcctgcgcccgactcgccctcgc

SEQ ID NO: 2505952 - DNA, 25 bp, Homo sapien
cccccacggcggcggccggagcagc

SEQ ID NO: 2505953 - DNA, 25 bp, Homo sapien
gcccccacggcggcggccggagcag

SEQ ID NO: 2505954 - DNA, 25 bp, Homo sapien
ccccacggcggcggccggagcagca

SEQ ID NO: 2505955 - DNA, 25 bp, Homo sapien
cagcagcagcagcaggagcccgcct

SEQ ID NO: 2505956 - DNA, 25 bp, Homo sapien
cgtgcctgtgcttccggagcgagca

SEQ ID NO: 2505957 - DNA, 25 bp, Homo sapien
cagacgcggacctacgaccgcgagg

SEQ ID NO: 2505958 - DNA, 25 bp, Homo sapien
gggcttcaagaagcgggcggcgtgc

SEQ ID NO: 2505959 - DNA, 25 bp, Homo sapien
gatgaagttcaagcccaaccagacg

SEQ ID NO: 2505960 - DNA, 25 bp, Homo sapien
cattgggctgagaatgagacccttg

SEQ ID NO: 2505961 - DNA, 25 bp, Homo sapien
taatggcttccttactgctagtccc

SEQ ID NO: 2505962 - DNA, 25 bp, Homo sapien
tagtagccttttggtattgccactc

SEQ ID NO: 2505963 - DNA, 25 bp, Homo sapien
gagtagcctttctcgttctcagagc

SEQ ID NO: 2505964 - DNA, 25 bp, Homo sapien
tattatccaataatttgagagtttt

SEQ ID NO: 2505965 - DNA, 25 bp, Homo sapien
tgtttttatcctttgttattatcca

SEQ ID NO: 2505966 - DNA, 25 bp, Homo sapien
attatccaataatttgagagtttta

SEQ ID NO: 2505967 - DNA, 25 bp, Homo sapien
ttatccaataatttgagagttttac

SEQ ID NO: 2505968 - DNA, 25 bp, Homo sapien
gttgtttatatacgaagtgcttctc

SEQ ID NO: 2505969 - DNA, 25 bp, Homo sapien
tacgaagtgcttctcaggctggaag

SEQ ID NO: 2505970 - DNA, 25 bp, Homo sapien
tatacagttatggttcaccttacag

SEQ ID NO: 2505971 - DNA, 25 bp, Homo sapien
caggctggaagtatacagttatggt

SEQ ID NO: 2505972 - DNA, 25 bp, Homo sapien
gtgctgccgtgagggaagtttatga

SEQ ID NO: 2505973 - DNA, 25 bp, Homo sapien
gctggtgagtagcagccggtaccca

SEQ ID NO: 2505974 - DNA, 25 bp, Homo sapien
atggaacccgaggaggaacctggcg

SEQ ID NO: 2505975 - DNA, 25 bp, Homo sapien
agaccagtggattgtcccaggagga

SEQ ID NO: 2505976 - DNA, 25 bp, Homo sapien
cgagacgggtccaggagtgcttttt

SEQ ID NO: 2505977 - DNA, 25 bp, Homo sapien
tttgctacataacactaagacagcg

SEQ ID NO: 2505978 - DNA, 25 bp, Homo sapien
cacacaaattctgtttcggagtttt

SEQ ID NO: 2505979 - DNA, 25 bp, Homo sapien
ctttcacacaaattctgtttcggag

SEQ ID NO: 2505980 - DNA, 25 bp, Homo sapien
aggcctggagtacagtggagcgatc

SEQ ID NO: 2505981 - DNA, 25 bp, Homo sapien
ttgccaggcctggagtacagtggag

SEQ ID NO: 2505982 - DNA, 25 bp, Homo sapien
tgccaggcctggagtacagtggagc

SEQ ID NO: 2505983 - DNA, 25 bp, Homo sapien
ccaggcctggagtacagtggagcga

SEQ ID NO: 2505984 - DNA, 25 bp, Homo sapien
tggagtcaaaggaaaactaggcaga

SEQ ID NO: 2505985 - DNA, 25 bp, Homo sapien
gagtcaaaggaaaactaggcagact

SEQ ID NO: 2505986 - DNA, 25 bp, Homo sapien
taggcagacttctgggcatatttga

SEQ ID NO: 2505987 - DNA, 25 bp, Homo sapien
ctaggcagacttctgggcatatttg

SEQ ID NO: 2505988 - DNA, 25 bp, Homo sapien
ttagaagattgggaagattctgtta

SEQ ID NO: 2505989 - DNA, 25 bp, Homo sapien
gattgggaagattctgttaatattg

SEQ ID NO: 2505990 - DNA, 25 bp, Homo sapien
cagaacatatgtttatgttctaaca

SEQ ID NO: 2505991 - DNA, 25 bp, Homo sapien
aaccaagaccgaaagcacagaacat

SEQ ID NO: 2505992 - DNA, 25 bp, Homo sapien
tggactgtcttgtaaccaatgtcat

SEQ ID NO: 2505993 - DNA, 25 bp, Homo sapien
tattcatcttaattattccccaaca

SEQ ID NO: 2505994 - DNA, 25 bp, Homo sapien
agtaagtggacattacttatatggc

SEQ ID NO: 2505995 - DNA, 25 bp, Homo sapien
ccccaacatattgttgtctaagtca

SEQ ID NO: 2505996 - DNA, 25 bp, Homo sapien
tatgtcactagctacctgatacggc

SEQ ID NO: 2505997 - DNA, 25 bp, Homo sapien
cagattacttgtgggtatacctacc

SEQ ID NO: 2505998 - DNA, 25 bp, Homo sapien
ttgtaaccgctgcacagacctctgg

SEQ ID NO: 2505999 - DNA, 25 bp, Homo sapien
gaaccgttatttccctcagtgtaga

SEQ ID NO: 2506000 - DNA, 25 bp, Homo sapien
tatatagacttcagccctttgtaaa

SEQ ID NO: 2506001 - DNA, 25 bp, Homo sapien
ccagcaacatttcaagtacgtagtg

SEQ ID NO: 2506002 - DNA, 25 bp, Homo sapien
caacaggtactatttgtcacataac

SEQ ID NO: 2506003 - DNA, 25 bp, Homo sapien
taactaactttcgaggcactggaac

SEQ ID NO: 2506004 - DNA, 25 bp, Homo sapien
tcttagaggtaataaggtaatgatg

SEQ ID NO: 2506005 - DNA, 25 bp, Homo sapien
catgatattcttagaggtaataagg

SEQ ID NO: 2506006 - DNA, 25 bp, Homo sapien
ttgtacatgatattcttagaggtaa

SEQ ID NO: 2506007 - DNA, 25 bp, Homo sapien
gatattcttagaggtaataaggtaa

SEQ ID NO: 2506008 - DNA, 25 bp, Homo sapien
atacctttcagtgcatagtgcattg

SEQ ID NO: 2506009 - DNA, 25 bp, Homo sapien
gcattgtgtgcttaccctgggttgt

SEQ ID NO: 2506010 - DNA, 25 bp, Homo sapien
gaactcagatttgcaaaccaggttt

SEQ ID NO: 2506011 - DNA, 25 bp, Homo sapien
gtaaggtgtatgcttttaactttga

SEQ ID NO: 2506012 - DNA, 25 bp, Homo sapien
tgtggttgctttactgctgttctcc

SEQ ID NO: 2506013 - DNA, 25 bp, Homo sapien
tgtgagctcttgacttactctagaa

SEQ ID NO: 2506014 - DNA, 25 bp, Homo sapien
gatgtcagtattctcctcatggata

SEQ ID NO: 2506015 - DNA, 25 bp, Homo sapien
gccagtctaatagtatagtatgtgg

SEQ ID NO: 2506016 - DNA, 25 bp, Homo sapien
aggttcaacgtcttctagccaggga

SEQ ID NO: 2506017 - DNA, 25 bp, Homo sapien
gaaaagtaatctatcgctggtgcta

SEQ ID NO: 2506018 - DNA, 25 bp, Homo sapien
taccttcctgactggtgccactggc

SEQ ID NO: 2506019 - DNA, 25 bp, Homo sapien
tctagcagtacgatgagagggccat

SEQ ID NO: 2506020 - DNA, 25 bp, Homo sapien
tatggtccacaaaggccgaaatatt

SEQ ID NO: 2506021 - DNA, 25 bp, Homo sapien
tacaaatcgtctgtgggtgctttct

SEQ ID NO: 2506022 - DNA, 25 bp, Homo sapien
caagttcaatctagtgcaatcagcc

SEQ ID NO: 2506023 - DNA, 25 bp, Homo sapien
gacttacttggttgctcagtcctga

SEQ ID NO: 2506024 - DNA, 25 bp, Homo sapien
ccctaagatgggtggcatgccaagt

SEQ ID NO: 2506025 - DNA, 25 bp, Homo sapien
ggttgtattgctactgcaactaaca

SEQ ID NO: 2506026 - DNA, 25 bp, Homo sapien
taaaccctcatataattccctaaga

SEQ ID NO: 2506027 - DNA, 25 bp, Homo sapien
aattaggtaccctattatcatggta

SEQ ID NO: 2506028 - DNA, 25 bp, Homo sapien
tgctagacagcctttgagaggatga

SEQ ID NO: 2506029 - DNA, 25 bp, Homo sapien
gaagtcctagaaccagttcccgaca

SEQ ID NO: 2506030 - DNA, 25 bp, Homo sapien
taactagagcagaagcaaatcgcag

SEQ ID NO: 2506031 - DNA, 25 bp, Homo sapien
gttcccgacaaataccaagagatga

SEQ ID NO: 2506032 - DNA, 25 bp, Homo sapien
tccaaaagtctgtccaagttacttc

SEQ ID NO: 2506033 - DNA, 25 bp, Homo sapien
ccaaaagtctgtccaagttacttct

SEQ ID NO: 2506034 - DNA, 25 bp, Homo sapien
tttagcccagggattacaaagtcaa

SEQ ID NO: 2506035 - DNA, 25 bp, Homo sapien
tctagccaactggagagtaactggt

SEQ ID NO: 2506036 - DNA, 25 bp, Homo sapien
gcacaaaggtgggtcaggtctactg

SEQ ID NO: 2506037 - DNA, 25 bp, Homo sapien
gatcctctcagttaagtcccgtgca

SEQ ID NO: 2506038 - DNA, 25 bp, Homo sapien
taaccatgagcaatattacgggcag

SEQ ID NO: 2506039 - DNA, 25 bp, Homo sapien
catggtttgtaaatcactatgtgat

SEQ ID NO: 2506040 - DNA, 25 bp, Homo sapien
gacatttttgtagtgcaacagattt

SEQ ID NO: 2506041 - DNA, 25 bp, Homo sapien
agcagacatcatttagacatttttg

SEQ ID NO: 2506042 - DNA, 25 bp, Homo sapien
ggaaggataccagttaccagtcatc

SEQ ID NO: 2506043 - DNA, 25 bp, Homo sapien
gataccagttaccagtcatcaaaag

SEQ ID NO: 2506044 - DNA, 25 bp, Homo sapien
tatttggaaggataccagttaccag

SEQ ID NO: 2506045 - DNA, 25 bp, Homo sapien
aaggataccagttaccagtcatcaa

SEQ ID NO: 2506046 - DNA, 25 bp, Homo sapien
tcaggaattagatatggagagaggt

SEQ ID NO: 2506047 - DNA, 25 bp, Homo sapien
tgcaagagacaaggttgcaacccga

SEQ ID NO: 2506048 - DNA, 25 bp, Homo sapien
tatccattaccttaaactgcaagag

SEQ ID NO: 2506049 - DNA, 25 bp, Homo sapien
tgcaacccgaaggttaacatttatg

SEQ ID NO: 2506050 - DNA, 25 bp, Homo sapien
agaataaaacgagctcccacagcaa

SEQ ID NO: 2506051 - DNA, 25 bp, Homo sapien
aagaataaaacgagctcccacagca

SEQ ID NO: 2506052 - DNA, 25 bp, Homo sapien
ttaaagaataaaacgagctcccaca

SEQ ID NO: 2506053 - DNA, 25 bp, Homo sapien
gaataaaacgagctcccacagcaaa

SEQ ID NO: 2506054 - DNA, 25 bp, Homo sapien
gaaagtcctacatgtcagtcacaac

SEQ ID NO: 2506055 - DNA, 25 bp, Homo sapien
tctgctcatcaggtttataaggaag

SEQ ID NO: 2506056 - DNA, 25 bp, Homo sapien
tgtggcaagacaccaatgatcatct

SEQ ID NO: 2506057 - DNA, 25 bp, Homo sapien
tcaatttgtcagatggtgaagacca

SEQ ID NO: 2506058 - DNA, 25 bp, Homo sapien
gctaatgtgcatttaatcaccaaag

SEQ ID NO: 2506059 - DNA, 25 bp, Homo sapien
aatgtgcatttaatcaccaaaggac

SEQ ID NO: 2506060 - DNA, 25 bp, Homo sapien
taatgtgcatttaatcaccaaagga

SEQ ID NO: 2506061 - DNA, 25 bp, Homo sapien
ctaatgtgcatttaatcaccaaagg

SEQ ID NO: 2506062 - DNA, 25 bp, Homo sapien
aacaaagaggaggaagtcttggcag

SEQ ID NO: 2506063 - DNA, 25 bp, Homo sapien
gtgatgcacacttgatgatcgtatc

SEQ ID NO: 2506064 - DNA, 25 bp, Homo sapien
aagtgatgcacacttgatgatcgta

SEQ ID NO: 2506065 - DNA, 25 bp, Homo sapien
gatgcacacttgatgatcgtatcaa

SEQ ID NO: 2506066 - DNA, 25 bp, Homo sapien
ggcatatagcctagtccatgctcta

SEQ ID NO: 2506067 - DNA, 25 bp, Homo sapien
aaatattattcatggcatatagcct

SEQ ID NO: 2506068 - DNA, 25 bp, Homo sapien
attattcatggcatatagcctagtc

SEQ ID NO: 2506069 - DNA, 25 bp, Homo sapien
gcatatagcctagtccatgctctag

SEQ ID NO: 2506070 - DNA, 25 bp, Homo sapien
tgttaagacgtatttacatactata

SEQ ID NO: 2506071 - DNA, 25 bp, Homo sapien
aatttgtaaaagtggaagtggtgtg

SEQ ID NO: 2506072 - DNA, 25 bp, Homo sapien
atttgtaaaagtggaagtggtgtga

SEQ ID NO: 2506073 - DNA, 25 bp, Homo sapien
ttggggggtcccatagcaagccatt

SEQ ID NO: 2506074 - DNA, 25 bp, Homo sapien
ttgggcttcgttggtcttccactgc

SEQ ID NO: 2506075 - DNA, 25 bp, Homo sapien
gaactgtgcggatctgcagtgctgg

SEQ ID NO: 2506076 - DNA, 25 bp, Homo sapien
ggagcacttaacaaggcctggatcg

SEQ ID NO: 2506077 - DNA, 25 bp, Homo sapien
cctggatcgatagcagaactgtgcg

SEQ ID NO: 2506078 - DNA, 25 bp, Homo sapien
ggcaacaggcccagtatgataaagc

SEQ ID NO: 2506079 - DNA, 25 bp, Homo sapien
gagaaagcttaataatagcatatgc

SEQ ID NO: 2506080 - DNA, 25 bp, Homo sapien
tggaatgcttaagagaaaaaggaga

SEQ ID NO: 2506081 - DNA, 25 bp, Homo sapien
aaaaacaggcccagaactgcttcac

SEQ ID NO: 2506082 - DNA, 25 bp, Homo sapien
aatatctaaacatattcttcccaac

SEQ ID NO: 2506083 - DNA, 25 bp, Homo sapien
tcttcccaacttgtctacattagga

SEQ ID NO: 2506084 - DNA, 25 bp, Homo sapien
ccaacttgtctacattaggatgata

SEQ ID NO: 2506085 - DNA, 25 bp, Homo sapien
gataaattttggtcatgaaacgtac

SEQ ID NO: 2506086 - DNA, 25 bp, Homo sapien
atcctgagggccagcaatgaccaca

SEQ ID NO: 2506087 - DNA, 25 bp, Homo sapien
aataacgggcgttgctctcatctgg

SEQ ID NO: 2506088 - DNA, 25 bp, Homo sapien
aactggttctgccagcaaacgctgg

SEQ ID NO: 2506089 - DNA, 25 bp, Homo sapien
tctcatctggttcggctttgatgcc

SEQ ID NO: 2506090 - DNA, 25 bp, Homo sapien
ctctgaaaaatgtaacggactaaag

SEQ ID NO: 2506091 - DNA, 25 bp, Homo sapien
caagcgaatactaatgatgttatca

SEQ ID NO: 2506092 - DNA, 25 bp, Homo sapien
ttacataagtaaggcaacttgctct

SEQ ID NO: 2506093 - DNA, 25 bp, Homo sapien
gtatgggccaacacactcggccaaa

SEQ ID NO: 2506094 - DNA, 25 bp, Homo sapien
tgtcacgtactcttggctagggcca

SEQ ID NO: 2506095 - DNA, 25 bp, Homo sapien
tcagttcccactgtagcatttggac

SEQ ID NO: 2506096 - DNA, 25 bp, Homo sapien
tgcatctgcacccatacactctggt

SEQ ID NO: 2506097 - DNA, 25 bp, Homo sapien
tagggccaatcggtcttgagcacta

SEQ ID NO: 2506098 - DNA, 25 bp, Homo sapien
ccaagatatccatatggcttgctcc

SEQ ID NO: 2506099 - DNA, 25 bp, Homo sapien
aagatatccatatggcttgctccct

SEQ ID NO: 2506100 - DNA, 25 bp, Homo sapien
ccccaagatatccatatggcttgct

SEQ ID NO: 2506101 - DNA, 25 bp, Homo sapien
agatatccatatggcttgctccctc

SEQ ID NO: 2506102 - DNA, 25 bp, Homo sapien
gctcagtacgaagcaatgacaggtc

SEQ ID NO: 2506103 - DNA, 25 bp, Homo sapien
gctcatctcaaacaagagctgtctg

SEQ ID NO: 2506104 - DNA, 25 bp, Homo sapien
caaacagggttctggacaaagttgt

SEQ ID NO: 2506105 - DNA, 25 bp, Homo sapien
tttgggatcactaataaagcaagtc

SEQ ID NO: 2506106 - DNA, 25 bp, Homo sapien
cagcacgggagttaaaagggctatt

SEQ ID NO: 2506107 - DNA, 25 bp, Homo sapien
tgtctaatgtttggcagggacagta

SEQ ID NO: 2506108 - DNA, 25 bp, Homo sapien
tcttgatggtatacaataaagacaa

SEQ ID NO: 2506109 - DNA, 25 bp, Homo sapien
ccttcataatcgtgaagtggtgctt

SEQ ID NO: 2506110 - DNA, 25 bp, Homo sapien
aaaatgaggttggtagtatgcatcc

SEQ ID NO: 2506111 - DNA, 25 bp, Homo sapien
gcctggaagcatttagggcaaaatg

SEQ ID NO: 2506112 - DNA, 25 bp, Homo sapien
gtatgcatccagcacttcttgcgca

SEQ ID NO: 2506113 - DNA, 25 bp, Homo sapien
cacaaaaggactgcctggaagcatt

SEQ ID NO: 2506114 - DNA, 25 bp, Homo sapien
taataggtaaggcaagacaagaaca

SEQ ID NO: 2506115 - DNA, 25 bp, Homo sapien
acaaaatttaatgcctgaggactcc

SEQ ID NO: 2506116 - DNA, 25 bp, Homo sapien
gactccataataggtaaggcaagac

SEQ ID NO: 2506117 - DNA, 25 bp, Homo sapien
aatgcagcaatcacaacaaaattta

SEQ ID NO: 2506118 - DNA, 25 bp, Homo sapien
tcgagctcctgacctcaagggattg

SEQ ID NO: 2506119 - DNA, 25 bp, Homo sapien
gagctcctgacctcaagggattggc

SEQ ID NO: 2506120 - DNA, 25 bp, Homo sapien
gctcctgacctcaagggattggccc

SEQ ID NO: 2506121 - DNA, 25 bp, Homo sapien
ctcgagctcctgacctcaagggatt

SEQ ID NO: 2506122 - DNA, 25 bp, Homo sapien
gttggaaatccctgttctaaagcaa

SEQ ID NO: 2506123 - DNA, 25 bp, Homo sapien
cacatgtgactagttttatgagagc

SEQ ID NO: 2506124 - DNA, 25 bp, Homo sapien
aaagcaatgcaggcttcacatgtga

SEQ ID NO: 2506125 - DNA, 25 bp, Homo sapien
tgagagccaatacagattacctatc

SEQ ID NO: 2506126 - DNA, 25 bp, Homo sapien
aaagaatatgccatccagaccagag

SEQ ID NO: 2506127 - DNA, 25 bp, Homo sapien
gaaaagaatatgccatccagaccag

SEQ ID NO: 2506128 - DNA, 25 bp, Homo sapien
acaaaattcctcaaatccaggactg

SEQ ID NO: 2506129 - DNA, 25 bp, Homo sapien
aaaattcctcaaatccaggactggc

SEQ ID NO: 2506130 - DNA, 25 bp, Homo sapien
caaagtaggctaatacaggaggcca

SEQ ID NO: 2506131 - DNA, 25 bp, Homo sapien
ttaagaagataacactagctgctgc

SEQ ID NO: 2506132 - DNA, 25 bp, Homo sapien
cagtgtggctacagtggagtgaccc

SEQ ID NO: 2506133 - DNA, 25 bp, Homo sapien
agtgcagatgcgctcagaagtaggc

SEQ ID NO: 2506134 - DNA, 25 bp, Homo sapien
cacttcgcagagataaacgagcgga

SEQ ID NO: 2506135 - DNA, 25 bp, Homo sapien
gagcggaaacgtattcagaagagag

SEQ ID NO: 2506136 - DNA, 25 bp, Homo sapien
cagagtaaaatcacttcgcagagat

SEQ ID NO: 2506137 - DNA, 25 bp, Homo sapien
agagatcgcggaagcaagggcagcg

SEQ ID NO: 2506138 - DNA, 25 bp, Homo sapien
tcgggcctcccagagcgggccgcgg

SEQ ID NO: 2506139 - DNA, 25 bp, Homo sapien
cgcgggccgaaggaggcgagaggcc

SEQ ID NO: 2506140 - DNA, 25 bp, Homo sapien
gccgaaggaggcgagaggccgcgct

SEQ ID NO: 2506141 - DNA, 25 bp, Homo sapien
aaggaggcgagaggccgcgctgcct

SEQ ID NO: 2506142 - DNA, 25 bp, Homo sapien
tgatcctgcggggcagcccggccat

SEQ ID NO: 2506143 - DNA, 25 bp, Homo sapien
cttgatgatcctgcggggcagcccg

SEQ ID NO: 2506144 - DNA, 25 bp, Homo sapien
atgatcctgcggggcagcccggcca

SEQ ID NO: 2506145 - DNA, 25 bp, Homo sapien
tgatgatcctgcggggcagcccggc

SEQ ID NO: 2506146 - DNA, 25 bp, Homo sapien
ttgtcagaacccgagttcggcctct

SEQ ID NO: 2506147 - DNA, 25 bp, Homo sapien
gttcggcctctggtctcgtctccgg

SEQ ID NO: 2506148 - DNA, 25 bp, Homo sapien
tcagaacccgagttcggcctctggt

SEQ ID NO: 2506149 - DNA, 25 bp, Homo sapien
ccgagttcggcctctggtctcgtct

SEQ ID NO: 2506150 - DNA, 25 bp, Homo sapien
aaatgtagtccctgctcgggcgcgg

SEQ ID NO: 2506151 - DNA, 25 bp, Homo sapien
tgcgccccgccccaaccgctgccgg

SEQ ID NO: 2506152 - DNA, 25 bp, Homo sapien
cgccgaggcccctcgggaaatgtag

SEQ ID NO: 2506153 - DNA, 25 bp, Homo sapien
gttgccgcgcccgtcgccgcagccg

SEQ ID NO: 2506154 - DNA, 25 bp, Homo sapien
gctctggcgctcgtggccgagcctg

SEQ ID NO: 2506155 - DNA, 25 bp, Homo sapien
gagcctgcccgcgacggtggtacgg

SEQ ID NO: 2506156 - DNA, 25 bp, Homo sapien
gtggtacggcacgacccgcgcgcga

SEQ ID NO: 2506157 - DNA, 25 bp, Homo sapien
ggacttgggacaggccgcgagggga

SEQ ID NO: 2506158 - DNA, 25 bp, Homo sapien
gaaactgtttcgtgggtgatcaaga

SEQ ID NO: 2506159 - DNA, 25 bp, Homo sapien
tcgtgggtgatcaagacagtagaat

SEQ ID NO: 2506160 - DNA, 25 bp, Homo sapien
tattgtttcttgcagcgtagggaaa

SEQ ID NO: 2506161 - DNA, 25 bp, Homo sapien
agtatttgtttgcaagttcccttat

SEQ ID NO: 2506162 - DNA, 25 bp, Homo sapien
gttaatagagatgctgttgtaacat

SEQ ID NO: 2506163 - DNA, 25 bp, Homo sapien
gtaaacaccgctgcacttgaaccag

SEQ ID NO: 2506164 - DNA, 25 bp, Homo sapien
ttgtaaacaccgctgcacttgaacc

SEQ ID NO: 2506165 - DNA, 25 bp, Homo sapien
taggccagtcaagtgaagcagcggg

SEQ ID NO: 2506166 - DNA, 25 bp, Homo sapien
aaacaccgctgcacttgaaccagcc

SEQ ID NO: 2506167 - DNA, 25 bp, Homo sapien
ggacggcgcgcgcagcgctgtttcg

SEQ ID NO: 2506168 - DNA, 25 bp, Homo sapien
tgggacggcgcgcgcagcgctgttt

SEQ ID NO: 2506169 - DNA, 25 bp, Homo sapien
ctgggacggcgcgcgcagcgctgtt

SEQ ID NO: 2506170 - DNA, 25 bp, Homo sapien
ggctgggacggcgcgcgcagcgctg

SEQ ID NO: 2506171 - DNA, 25 bp, Homo sapien
gattgaaacaagatggcgggttcgt

SEQ ID NO: 2506172 - DNA, 25 bp, Homo sapien
ggcagtcccacagtgttggtcggca

SEQ ID NO: 2506173 - DNA, 25 bp, Homo sapien
tgagaagccgtcaaggtaaccgctt

SEQ ID NO: 2506174 - DNA, 25 bp, Homo sapien
agttgtagaggtctcccgcctgtcg

SEQ ID NO: 2506175 - DNA, 25 bp, Homo sapien
gtttgacagtcaaagcatggaccca

SEQ ID NO: 2506176 - DNA, 25 bp, Homo sapien
tgcgaataaagggtaaattcacagt

SEQ ID NO: 2506177 - DNA, 25 bp, Homo sapien
cagtggcgtgattacttttttagta

SEQ ID NO: 2506178 - DNA, 25 bp, Homo sapien
tttctcgaaagcttgttaatacatg

SEQ ID NO: 2506179 - DNA, 25 bp, Homo sapien
tacctagcttagtatgaaccaggag

SEQ ID NO: 2506180 - DNA, 25 bp, Homo sapien
caaatgcatgaataatagtaccact

SEQ ID NO: 2506181 - DNA, 25 bp, Homo sapien
taagagctgtagaccagtgttccag

SEQ ID NO: 2506182 - DNA, 25 bp, Homo sapien
tatagggcaatcttacaaatgcatg

SEQ ID NO: 2506183 - DNA, 25 bp, Homo sapien
tacagtgactcgaaccttacccaaa

SEQ ID NO: 2506184 - DNA, 25 bp, Homo sapien
tctagaagtttcaagtggccagtga

SEQ ID NO: 2506185 - DNA, 25 bp, Homo sapien
taatggtgaccctctgttaagtggt

SEQ ID NO: 2506186 - DNA, 25 bp, Homo sapien
agagccaggagccaaactatcaggc

SEQ ID NO: 2506187 - DNA, 25 bp, Homo sapien
aatgcttcacagccatgactgcttg

SEQ ID NO: 2506188 - DNA, 25 bp, Homo sapien
gagtcttcaattcagcaagaatgtc

SEQ ID NO: 2506189 - DNA, 25 bp, Homo sapien
gtcttcaattcagcaagaatgtctc

SEQ ID NO: 2506190 - DNA, 25 bp, Homo sapien
tcttctgagtcttcaattcagcaag

SEQ ID NO: 2506191 - DNA, 25 bp, Homo sapien
tctgagtcttcaattcagcaagaat

SEQ ID NO: 2506192 - DNA, 25 bp, Homo sapien
taagttcagcataaatgtagtgacc

SEQ ID NO: 2506193 - DNA, 25 bp, Homo sapien
agcataaatgtagtgacctcctggg

SEQ ID NO: 2506194 - DNA, 25 bp, Homo sapien
gagctatgtcaatcaggtgtttgca

SEQ ID NO: 2506195 - DNA, 25 bp, Homo sapien
agttgcctaaggagcgtcagaagtg

SEQ ID NO: 2506196 - DNA, 25 bp, Homo sapien
gagcttgccctagaatgtaaatcaa

SEQ ID NO: 2506197 - DNA, 25 bp, Homo sapien
gagaacattccggaataattaccta

SEQ ID NO: 2506198 - DNA, 25 bp, Homo sapien
tagcagcagtggtaagagaacattc

SEQ ID NO: 2506199 - DNA, 25 bp, Homo sapien
tacagtgtgttcagtgacttagtaa

SEQ ID NO: 2506200 - DNA, 25 bp, Homo sapien
gagagaccttgctcataaagtgact

SEQ ID NO: 2506201 - DNA, 25 bp, Homo sapien
tattcgttttctaggaccaacagag

SEQ ID NO: 2506202 - DNA, 25 bp, Homo sapien
ggatttgaaaaaccagagctggcgc

SEQ ID NO: 2506203 - DNA, 25 bp, Homo sapien
attcctggtctgtgagccccgggtg

SEQ ID NO: 2506204 - DNA, 25 bp, Homo sapien
gagaagaaaccctctgtgccctcat

SEQ ID NO: 2506205 - DNA, 25 bp, Homo sapien
tcacccagagaagaaaccctctgtg

SEQ ID NO: 2506206 - DNA, 25 bp, Homo sapien
acccagagaagaaaccctctgtgcc

SEQ ID NO: 2506207 - DNA, 25 bp, Homo sapien
ccagagaagaaaccctctgtgccct

SEQ ID NO: 2506208 - DNA, 25 bp, Homo sapien
cattaagagtgtatccgccatcatc

SEQ ID NO: 2506209 - DNA, 25 bp, Homo sapien
catgttggcattaagagtgtatccg

SEQ ID NO: 2506210 - DNA, 25 bp, Homo sapien
tgttggcattaagagtgtatccgcc

SEQ ID NO: 2506211 - DNA, 25 bp, Homo sapien
tggcattaagagtgtatccgccatc

SEQ ID NO: 2506212 - DNA, 25 bp, Homo sapien
gagggatgcccttttgctcctccac

SEQ ID NO: 2506213 - DNA, 25 bp, Homo sapien
ggatgcccttttgctcctccactac

SEQ ID NO: 2506214 - DNA, 25 bp, Homo sapien
ctgagggatgcccttttgctcctcc

SEQ ID NO: 2506215 - DNA, 25 bp, Homo sapien
gggatgcccttttgctcctccacta

SEQ ID NO: 2506216 - DNA, 25 bp, Homo sapien
agacatcttggagggcctctgtttc

SEQ ID NO: 2506217 - DNA, 25 bp, Homo sapien
cgttggcttgctctacttgaattgc

SEQ ID NO: 2506218 - DNA, 25 bp, Homo sapien
ttcaaaagatggttcgttggcttgc

SEQ ID NO: 2506219 - DNA, 25 bp, Homo sapien
aagatggttcgttggcttgctctac

SEQ ID NO: 2506220 - DNA, 25 bp, Homo sapien
gcttgctctacttgaattgcttttc

SEQ ID NO: 2506221 - DNA, 25 bp, Homo sapien
tgctatgtggccatatttcccaaat

SEQ ID NO: 2506222 - DNA, 25 bp, Homo sapien
tcataggcgcatccctctgatctct

SEQ ID NO: 2506223 - DNA, 25 bp, Homo sapien
cttggcgttccttagctcataggcg

SEQ ID NO: 2506224 - DNA, 25 bp, Homo sapien
aaagtccaaactcaaggcgtcggca

SEQ ID NO: 2506225 - DNA, 25 bp, Homo sapien
tgcagggagagtccgttccacgtct

SEQ ID NO: 2506226 - DNA, 25 bp, Homo sapien
tagacagagtcttctttcgttgctc

SEQ ID NO: 2506227 - DNA, 25 bp, Homo sapien
ttagacagagtcttctttcgttgct

SEQ ID NO: 2506228 - DNA, 25 bp, Homo sapien
cttagatctggagggtgattggtac

SEQ ID NO: 2506229 - DNA, 25 bp, Homo sapien
tatgcccagcctctaggtgtgttaa

SEQ ID NO: 2506230 - DNA, 25 bp, Homo sapien
tcttgggtggaacctttaaggatgc

SEQ ID NO: 2506231 - DNA, 25 bp, Homo sapien
gctttcttgtagaagagctcttggg

SEQ ID NO: 2506232 - DNA, 25 bp, Homo sapien
tgaatctgggcatgacacaacagca

SEQ ID NO: 2506233 - DNA, 25 bp, Homo sapien
gagacagtaactattgccagggaag

SEQ ID NO: 2506234 - DNA, 25 bp, Homo sapien
ggtctggcgtctctgtctggataca

SEQ ID NO: 2506235 - DNA, 25 bp, Homo sapien
cctgactggcatcccgcttgttgga

SEQ ID NO: 2506236 - DNA, 25 bp, Homo sapien
acttaaggccatcttagggttcaca

SEQ ID NO: 2506237 - DNA, 25 bp, Homo sapien
tatctgagcgtggtgaatccatggc

SEQ ID NO: 2506238 - DNA, 25 bp, Homo sapien
cactggctaacttggcagataagtg

SEQ ID NO: 2506239 - DNA, 25 bp, Homo sapien
gataagtgggtagtcagcagcatct

SEQ ID NO: 2506240 - DNA, 25 bp, Homo sapien
gagctgcgggtcttgtattaaccaa

SEQ ID NO: 2506241 - DNA, 25 bp, Homo sapien
cattataaagccagttcccaatggc

SEQ ID NO: 2506242 - DNA, 25 bp, Homo sapien
cacttctcagggtaaatagatcgta

SEQ ID NO: 2506243 - DNA, 25 bp, Homo sapien
tgtgattgttcagtagtgagctgcg

SEQ ID NO: 2506244 - DNA, 25 bp, Homo sapien
ggtgcaaagcattgctccacagtgt

SEQ ID NO: 2506245 - DNA, 25 bp, Homo sapien
tcctcttttcctcagtaaaatcgtg

SEQ ID NO: 2506246 - DNA, 25 bp, Homo sapien
tgaaaaggtgcaaagcattgctcca

SEQ ID NO: 2506247 - DNA, 25 bp, Homo sapien
gctccacagtgtgactttcctcttt

SEQ ID NO: 2506248 - DNA, 25 bp, Homo sapien
ctgatgactttctattgctccctat

SEQ ID NO: 2506249 - DNA, 25 bp, Homo sapien
ttctattgctccctatttaccctct

SEQ ID NO: 2506250 - DNA, 25 bp, Homo sapien
gatgactttctattgctccctattt

SEQ ID NO: 2506251 - DNA, 25 bp, Homo sapien
ttgctccctatttaccctctgctgt

SEQ ID NO: 2506252 - DNA, 25 bp, Homo sapien
gggctgtgtctagggcatattccct

SEQ ID NO: 2506253 - DNA, 25 bp, Homo sapien
gaaataaaataggttcttggagctg

SEQ ID NO: 2506254 - DNA, 25 bp, Homo sapien
gaccatgctaaattcctattagtag

SEQ ID NO: 2506255 - DNA, 25 bp, Homo sapien
tactgagagcagctttcgaccatgc

SEQ ID NO: 2506256 - DNA, 25 bp, Homo sapien
cccagcctccaatgcaatattatta

SEQ ID NO: 2506257 - DNA, 25 bp, Homo sapien
gcccagcctccaatgcaatattatt

SEQ ID NO: 2506258 - DNA, 25 bp, Homo sapien
cgcccagcctccaatgcaatattat

SEQ ID NO: 2506259 - DNA, 25 bp, Homo sapien
cccaaaccctgactatggcagagaa

SEQ ID NO: 2506260 - DNA, 25 bp, Homo sapien
caggcagaggcactagcaatgtaca

SEQ ID NO: 2506261 - DNA, 25 bp, Homo sapien
gaagtcatagatcctgccctttgag

SEQ ID NO: 2506262 - DNA, 25 bp, Homo sapien
taaacaggagaggtggacataaaac

SEQ ID NO: 2506263 - DNA, 25 bp, Homo sapien
gatcaacatggacaggtatcacaag

SEQ ID NO: 2506264 - DNA, 25 bp, Homo sapien
tcctcttcccaagcatgccgtcttc

SEQ ID NO: 2506265 - DNA, 25 bp, Homo sapien
atgaaatgcccagatcaacatggac

SEQ ID NO: 2506266 - DNA, 25 bp, Homo sapien
ggtatcacaagggaacacttcctct

SEQ ID NO: 2506267 - DNA, 25 bp, Homo sapien
tcatatcttaatttacgttccccaa

SEQ ID NO: 2506268 - DNA, 25 bp, Homo sapien
gtttgataatgtcactccttgtaat

SEQ ID NO: 2506269 - DNA, 25 bp, Homo sapien
gttactccacatgcttgtcattgtt

SEQ ID NO: 2506270 - DNA, 25 bp, Homo sapien
ggtgtgcaatggtactttgtcatat

SEQ ID NO: 2506271 - DNA, 25 bp, Homo sapien
taaaataggtagactgccagctgga

SEQ ID NO: 2506272 - DNA, 25 bp, Homo sapien
tgtcacatggtgcttactctaaaac

SEQ ID NO: 2506273 - DNA, 25 bp, Homo sapien
tgccttcctagaatatgcccaagta

SEQ ID NO: 2506274 - DNA, 25 bp, Homo sapien
cacaacacaaagctagaaggatctg

SEQ ID NO: 2506275 - DNA, 25 bp, Homo sapien
gttacttgccaagctactttttcac

SEQ ID NO: 2506276 - DNA, 25 bp, Homo sapien
tgttggaatagtacacagtgatttg

SEQ ID NO: 2506277 - DNA, 25 bp, Homo sapien
ggacaatttgtttacaagtacagaa

SEQ ID NO: 2506278 - DNA, 25 bp, Homo sapien
tcaattctttatcccggtcctatgt

SEQ ID NO: 2506279 - DNA, 25 bp, Homo sapien
actcccttagaacaagtgttctcac

SEQ ID NO: 2506280 - DNA, 25 bp, Homo sapien
gaggtcaacagacccatgcggattt

SEQ ID NO: 2506281 - DNA, 25 bp, Homo sapien
tgcagagaaagtcttaggtgtagcc

SEQ ID NO: 2506282 - DNA, 25 bp, Homo sapien
ggtgtagcctgccaataaatgcctg

SEQ ID NO: 2506283 - DNA, 25 bp, Homo sapien
ccccaaatctgtgcatctagaacat

SEQ ID NO: 2506284 - DNA, 25 bp, Homo sapien
tgggacccagtattgacagacctta

SEQ ID NO: 2506285 - DNA, 25 bp, Homo sapien
tgagtcaaatatggtcccgataggc

SEQ ID NO: 2506286 - DNA, 25 bp, Homo sapien
cactgccttgaggaaatgggaccca

SEQ ID NO: 2506287 - DNA, 25 bp, Homo sapien
caaacgggagggcacatgccttcta

SEQ ID NO: 2506288 - DNA, 25 bp, Homo sapien
ggcatgtgggattcaagcactcagg

SEQ ID NO: 2506289 - DNA, 25 bp, Homo sapien
gacctgtatggtcattatcactcat

SEQ ID NO: 2506290 - DNA, 25 bp, Homo sapien
tattgagaagtccaagtgtggtgcg

SEQ ID NO: 2506291 - DNA, 25 bp, Homo sapien
aggctccctccaagtggtggaaaag

SEQ ID NO: 2506292 - DNA, 25 bp, Homo sapien
ggtggtggtggtacggagatggcaa

SEQ ID NO: 2506293 - DNA, 25 bp, Homo sapien
cccaggatcacagggagtcttgagg

SEQ ID NO: 2506294 - DNA, 25 bp, Homo sapien
ctcttcgttgagtgcatcccaggat

SEQ ID NO: 2506295 - DNA, 25 bp, Homo sapien
gggccacacactcttcgttgagtgc

SEQ ID NO: 2506296 - DNA, 25 bp, Homo sapien
tagccgcggcctcaactaaaagtgg

SEQ ID NO: 2506297 - DNA, 25 bp, Homo sapien
taactagggttcagttagctccgcc

SEQ ID NO: 2506298 - DNA, 25 bp, Homo sapien
gaaacatgattaagggcacacggct

SEQ ID NO: 2506299 - DNA, 25 bp, Homo sapien
cagagacactctccggactgaggga

SEQ ID NO: 2506300 - DNA, 25 bp, Homo sapien
cttaaggaggcgctgctctcccgct

SEQ ID NO: 2506301 - DNA, 25 bp, Homo sapien
ctaaggacggccggcgccgcttaag

SEQ ID NO: 2506302 - DNA, 25 bp, Homo sapien
ggccggcgccgcttaaggaggcgct

SEQ ID NO: 2506303 - DNA, 25 bp, Homo sapien
gcgccgcttaaggaggcgctgctct

SEQ ID NO: 2506304 - DNA, 25 bp, Homo sapien
gtccccacgccatcgatgtgtctta

SEQ ID NO: 2506305 - DNA, 25 bp, Homo sapien
catcgatgtgtcttagagccggaga

SEQ ID NO: 2506306 - DNA, 25 bp, Homo sapien
tgggcaccgggacgagcacggcgtc

SEQ ID NO: 2506307 - DNA, 25 bp, Homo sapien
gagagtctggtttccgaggacccac

SEQ ID NO: 2506308 - DNA, 25 bp, Homo sapien
gggagatctctagcttgcgcccgag

SEQ ID NO: 2506309 - DNA, 25 bp, Homo sapien
gcgccgccgggatgtttagaggaac

SEQ ID NO: 2506310 - DNA, 25 bp, Homo sapien
ccccgcaaaagtgcggccaggaggg

SEQ ID NO: 2506311 - DNA, 25 bp, Homo sapien
caaggatcgctatccttccctgaac

SEQ ID NO: 2506312 - DNA, 25 bp, Homo sapien
cacgtgaggccgattcctggaaagt

SEQ ID NO: 2506313 - DNA, 25 bp, Homo sapien
gcccgcggtcacgtgaggccgattc

SEQ ID NO: 2506314 - DNA, 25 bp, Homo sapien
tccctgaagcctgtgtattgcgacc

SEQ ID NO: 2506315 - DNA, 25 bp, Homo sapien
cgagcctctttaaagcagtagcggg

SEQ ID NO: 2506316 - DNA, 25 bp, Homo sapien
gaggcgcgtcggtctgggaagtcgc

SEQ ID NO: 2506317 - DNA, 25 bp, Homo sapien
gcgtcggtctgggaagtcgcgcgca

SEQ ID NO: 2506318 - DNA, 25 bp, Homo sapien
caagggaggcgcgtcggtctgggaa

SEQ ID NO: 2506319 - DNA, 25 bp, Homo sapien
gggagcaagggaggcgcgtcggtct

SEQ ID NO: 2506320 - DNA, 25 bp, Homo sapien
tgggaccgacgtttaactcttgcca

SEQ ID NO: 2506321 - DNA, 25 bp, Homo sapien
cgctgctcctgggaccgacgtttaa

SEQ ID NO: 2506322 - DNA, 25 bp, Homo sapien
aactcttgccaagtctcgtcgcagc

SEQ ID NO: 2506323 - DNA, 25 bp, Homo sapien
gacgtttaactcttgccaagtctcg

SEQ ID NO: 2506324 - DNA, 25 bp, Homo sapien
aacccggcagcagtccgagagtgga

SEQ ID NO: 2506325 - DNA, 25 bp, Homo sapien
tttgtgtgccctctgcgcacggaac

SEQ ID NO: 2506326 - DNA, 25 bp, Homo sapien
ggtcgaggcaatgatcctcgaggct

SEQ ID NO: 2506327 - DNA, 25 bp, Homo sapien
ctccagggtcgcagccggagggaaa

SEQ ID NO: 2506328 - DNA, 25 bp, Homo sapien
ccaggtgtgagaccggaatgccaat

SEQ ID NO: 2506329 - DNA, 25 bp, Homo sapien
aagagcgcggcgttggtggtttgca

SEQ ID NO: 2506330 - DNA, 25 bp, Homo sapien
cgcagcgctttagggcggagaacca

SEQ ID NO: 2506331 - DNA, 25 bp, Homo sapien
ttgcattttccgcagcgctcgcgac

SEQ ID NO: 2506332 - DNA, 25 bp, Homo sapien
ctgacactgccgcgagggcggctgc

SEQ ID NO: 2506333 - DNA, 25 bp, Homo sapien
agagtaggctgcgaagcccccgccg

SEQ ID NO: 2506334 - DNA, 25 bp, Homo sapien
cgtcgagagtaggctgcgaagcccc

SEQ ID NO: 2506335 - DNA, 25 bp, Homo sapien
gcccgggcgtcgagagtaggctgcg

SEQ ID NO: 2506336 - DNA, 25 bp, Homo sapien
aactggctcgccgtttgtgttcata

SEQ ID NO: 2506337 - DNA, 25 bp, Homo sapien
gttaaaagtgtcatgcttcatcagc

SEQ ID NO: 2506338 - DNA, 25 bp, Homo sapien
tactgaaagtatttgtggtggcccg

SEQ ID NO: 2506339 - DNA, 25 bp, Homo sapien
tggtggcccggtaaactttcgctca

SEQ ID NO: 2506340 - DNA, 25 bp, Homo sapien
gggactgcctttaccaacaagacta

SEQ ID NO: 2506341 - DNA, 25 bp, Homo sapien
gagtatctccgaatgcagctatgta

SEQ ID NO: 2506342 - DNA, 25 bp, Homo sapien
tgaagtcgcgttttatcagaatgcc

SEQ ID NO: 2506343 - DNA, 25 bp, Homo sapien
tatacaggtgcaactcaatccccgt

SEQ ID NO: 2506344 - DNA, 25 bp, Homo sapien
actttcatggtaatagaggattgcc

SEQ ID NO: 2506345 - DNA, 25 bp, Homo sapien
aaactacaggcattgtcaagtggcc

SEQ ID NO: 2506346 - DNA, 25 bp, Homo sapien
tgaataggcataacactgatgtcct

SEQ ID NO: 2506347 - DNA, 25 bp, Homo sapien
gacatggccagtcttttacaagttg

SEQ ID NO: 2506348 - DNA, 25 bp, Homo sapien
caggaatctggtgtatgccagccat

SEQ ID NO: 2506349 - DNA, 25 bp, Homo sapien
aatctggtgtatgccagccatcatc

SEQ ID NO: 2506350 - DNA, 25 bp, Homo sapien
tttcattatcaagggatctggaagg

SEQ ID NO: 2506351 - DNA, 25 bp, Homo sapien
ctttggatgaattttcattatcaag

SEQ ID NO: 2506352 - DNA, 25 bp, Homo sapien
gaccttatgtaacccagcgtcggca

SEQ ID NO: 2506353 - DNA, 25 bp, Homo sapien
tctagcgtctacgatgtgcacacac

SEQ ID NO: 2506354 - DNA, 25 bp, Homo sapien
tcacaggctgaccaacgtcaaggcg

SEQ ID NO: 2506355 - DNA, 25 bp, Homo sapien
tcaaggcgtttcactttggaagcgc

SEQ ID NO: 2506356 - DNA, 25 bp, Homo sapien
tgcttttcactttagttgttgaatt

SEQ ID NO: 2506357 - DNA, 25 bp, Homo sapien
atgtgacctgtacaacatatcggca

SEQ ID NO: 2506358 - DNA, 25 bp, Homo sapien
acaacatatcggcatgagaatgtgt

SEQ ID NO: 2506359 - DNA, 25 bp, Homo sapien
tcatgtgacctgtacaacatatcgg

SEQ ID NO: 2506360 - DNA, 25 bp, Homo sapien
acatatcggcatgagaatgtgtgaa

SEQ ID NO: 2506361 - DNA, 25 bp, Homo sapien
gttcacagggtgcttcgtaacaaaa

SEQ ID NO: 2506362 - DNA, 25 bp, Homo sapien
tcacagggtgcttcgtaacaaaact

SEQ ID NO: 2506363 - DNA, 25 bp, Homo sapien
aaaactccccttcacttctcagctc

SEQ ID NO: 2506364 - DNA, 25 bp, Homo sapien
cacagggtgcttcgtaacaaaactc

SEQ ID NO: 2506365 - DNA, 25 bp, Homo sapien
ttctgtaatccactaagatactcac

SEQ ID NO: 2506366 - DNA, 25 bp, Homo sapien
gaaaacacagaagtcagtgaactca

SEQ ID NO: 2506367 - DNA, 25 bp, Homo sapien
ggaaaacacagaagtcagtgaactc

SEQ ID NO: 2506368 - DNA, 25 bp, Homo sapien
aacacagaagtcagtgaactcatac

SEQ ID NO: 2506369 - DNA, 25 bp, Homo sapien
cacagaagtcagtgaactcatacaa

SEQ ID NO: 2506370 - DNA, 25 bp, Homo sapien
taggtgaagtagctgacaaagggcc

SEQ ID NO: 2506371 - DNA, 25 bp, Homo sapien
aagtagctgacaaagggcctggcct

SEQ ID NO: 2506372 - DNA, 25 bp, Homo sapien
gttttctaggtgaagtagctgacaa

SEQ ID NO: 2506373 - DNA, 25 bp, Homo sapien
aagggcctggcctagagagcgctgc

SEQ ID NO: 2506374 - DNA, 25 bp, Homo sapien
ttccacatcccataatggcatccat

SEQ ID NO: 2506375 - DNA, 25 bp, Homo sapien
ctttccacatcccataatggcatcc

SEQ ID NO: 2506376 - DNA, 25 bp, Homo sapien
tttccacatcccataatggcatcca

SEQ ID NO: 2506377 - DNA, 25 bp, Homo sapien
taaattagtttagaggccaattcag

SEQ ID NO: 2506378 - DNA, 25 bp, Homo sapien
gaactccggcacttctttctatcag

SEQ ID NO: 2506379 - DNA, 25 bp, Homo sapien
tagaggccaattcaggaactccggc

SEQ ID NO: 2506380 - DNA, 25 bp, Homo sapien
ctttctatcagagcctgtgtggagc

SEQ ID NO: 2506381 - DNA, 25 bp, Homo sapien
cattcctctgattaacccaatacca

SEQ ID NO: 2506382 - DNA, 25 bp, Homo sapien
catcgggcattcctctgattaaccc

SEQ ID NO: 2506383 - DNA, 25 bp, Homo sapien
cgggcattcctctgattaacccaat

SEQ ID NO: 2506384 - DNA, 25 bp, Homo sapien
ccacatcgggcattcctctgattaa

SEQ ID NO: 2506385 - DNA, 25 bp, Homo sapien
tgcagatacacgaccagtgaagaag

SEQ ID NO: 2506386 - DNA, 25 bp, Homo sapien
cacatgcagatacacgaccagtgaa

SEQ ID NO: 2506387 - DNA, 25 bp, Homo sapien
gatgtctttttactggtctcttttc

SEQ ID NO: 2506388 - DNA, 25 bp, Homo sapien
agagatgtctttttactggtctctt

SEQ ID NO: 2506389 - DNA, 25 bp, Homo sapien
gatcccactcccattctatatgatc

SEQ ID NO: 2506390 - DNA, 25 bp, Homo sapien
cccactcccattctatatgatctat

SEQ ID NO: 2506391 - DNA, 25 bp, Homo sapien
tgatcccactcccattctatatgat

SEQ ID NO: 2506392 - DNA, 25 bp, Homo sapien
tcccactcccattctatatgatcta

SEQ ID NO: 2506393 - DNA, 25 bp, Homo sapien
tctcttctactttgacactcagaag

SEQ ID NO: 2506394 - DNA, 25 bp, Homo sapien
cataactacgtattatttgatcaga

SEQ ID NO: 2506395 - DNA, 25 bp, Homo sapien
tactttgacactcagaagtgacttt

SEQ ID NO: 2506396 - DNA, 25 bp, Homo sapien
tagtacataactacgtattatttga

SEQ ID NO: 2506397 - DNA, 25 bp, Homo sapien
gatcctatattggtatgaggaatgg

SEQ ID NO: 2506398 - DNA, 25 bp, Homo sapien
acagttatgctcagatgaacactgg

SEQ ID NO: 2506399 - DNA, 25 bp, Homo sapien
cctcagaggtcaaggagctgatcct

SEQ ID NO: 2506400 - DNA, 25 bp, Homo sapien
gtacagttatgctcagatgaacact

SEQ ID NO: 2506401 - DNA, 25 bp, Homo sapien
ccccaggcagtaggcagtggcctga

SEQ ID NO: 2506402 - DNA, 25 bp, Homo sapien
cccccaggcagtaggcagtggcctg

SEQ ID NO: 2506403 - DNA, 25 bp, Homo sapien
cacatcaccacgcaggttacattcg

SEQ ID NO: 2506404 - DNA, 25 bp, Homo sapien
atcaccacgcaggttacattcgtct

SEQ ID NO: 2506405 - DNA, 25 bp, Homo sapien
gcagaagagcagaggacagactccg

SEQ ID NO: 2506406 - DNA, 25 bp, Homo sapien
tgcagaagagcagaggacagactcc

SEQ ID NO: 2506407 - DNA, 25 bp, Homo sapien
agagcagaggacagactccgctcat

SEQ ID NO: 2506408 - DNA, 25 bp, Homo sapien
agaagagcagaggacagactccgct

SEQ ID NO: 2506409 - DNA, 25 bp, Homo sapien
tgggtgcaggcgacaaaatggctaa

SEQ ID NO: 2506410 - DNA, 25 bp, Homo sapien
tggggacagtatcctccccgccggc

SEQ ID NO: 2506411 - DNA, 25 bp, Homo sapien
aagtccttagtaaacaaagcactcg

SEQ ID NO: 2506412 - DNA, 25 bp, Homo sapien
gactgagaacctgtgctctagaact

SEQ ID NO: 2506413 - DNA, 25 bp, Homo sapien
ggctgcaatcagtacacgtttcccc

SEQ ID NO: 2506414 - DNA, 25 bp, Homo sapien
gctgcaatcagtacacgtttcccct

SEQ ID NO: 2506415 - DNA, 25 bp, Homo sapien
ttctgctttattgagaccggttaga

SEQ ID NO: 2506416 - DNA, 25 bp, Homo sapien
tgagaccggttagacccccatagtg

SEQ ID NO: 2506417 - DNA, 25 bp, Homo sapien
cgccaagtcctcaccactggcagcc

SEQ ID NO: 2506418 - DNA, 25 bp, Homo sapien
tagtgccgctcattgaggcgccaag

SEQ ID NO: 2506419 - DNA, 25 bp, Homo sapien
cccgccgcgcttcgcctcctcgtgg

SEQ ID NO: 2506420 - DNA, 25 bp, Homo sapien
ccgcgcttcgcctcctcgtggcccg

SEQ ID NO: 2506421 - DNA, 25 bp, Homo sapien
gccgcgcttcgcctcctcgtggccc

SEQ ID NO: 2506422 - DNA, 25 bp, Homo sapien
gcgggctggggatgcggcaccgact

SEQ ID NO: 2506423 - DNA, 25 bp, Homo sapien
cggcgggctggggatgcggcaccga

SEQ ID NO: 2506424 - DNA, 25 bp, Homo sapien
cgggctggggatgcggcaccgactg

SEQ ID NO: 2506425 - DNA, 25 bp, Homo sapien
ggcgggctggggatgcggcaccgac

SEQ ID NO: 2506426 - DNA, 25 bp, Homo sapien
ttcgttttccaccatctacagcttc

SEQ ID NO: 2506427 - DNA, 25 bp, Homo sapien
gggtcaggagccacttctgtaaagt

SEQ ID NO: 2506428 - DNA, 25 bp, Homo sapien
tgggtcaggagccacttctgtaaag

SEQ ID NO: 2506429 - DNA, 25 bp, Homo sapien
tacccctgtttgtcttgaagtaatg

SEQ ID NO: 2506430 - DNA, 25 bp, Homo sapien
agtgttcctgtacccctgtttgtct

SEQ ID NO: 2506431 - DNA, 25 bp, Homo sapien
aactgtgttgttctgcattctgctc

SEQ ID NO: 2506432 - DNA, 25 bp, Homo sapien
caaatacacattaggcttattcact

SEQ ID NO: 2506433 - DNA, 25 bp, Homo sapien
cacgttcaaatacacattaggctta

SEQ ID NO: 2506434 - DNA, 25 bp, Homo sapien
tacacattaggcttattcactaatt

SEQ ID NO: 2506435 - DNA, 25 bp, Homo sapien
ctttcacgttcaaatacacattagg

SEQ ID NO: 2506436 - DNA, 25 bp, Homo sapien
tggcagaccaatggtgaggtaattc

SEQ ID NO: 2506437 - DNA, 25 bp, Homo sapien
ttactgataaatcatcctggcagac

SEQ ID NO: 2506438 - DNA, 25 bp, Homo sapien
aagttcttttgtggtcaatatggcc

SEQ ID NO: 2506439 - DNA, 25 bp, Homo sapien
aagaaattctcagtagggtccacgg

SEQ ID NO: 2506440 - DNA, 25 bp, Homo sapien
tgaaagtcctgcattgtagcgtctg

SEQ ID NO: 2506441 - DNA, 25 bp, Homo sapien
gtggttgcagacgtaagtaacagga

SEQ ID NO: 2506442 - DNA, 25 bp, Homo sapien
ttgcagacgtaagtaacaggaatcc

SEQ ID NO: 2506443 - DNA, 25 bp, Homo sapien
cattgtagcgtctgcgacctgggcc

SEQ ID NO: 2506444 - DNA, 25 bp, Homo sapien
gaaaggtagtgcaggatacagtcac

SEQ ID NO: 2506445 - DNA, 25 bp, Homo sapien
gctgagattcagacttcggtggagt

SEQ ID NO: 2506446 - DNA, 25 bp, Homo sapien
tggtctgtaagagcagcctacctgg

SEQ ID NO: 2506447 - DNA, 25 bp, Homo sapien
gactgtcacactagctggtctgtaa

SEQ ID NO: 2506448 - DNA, 25 bp, Homo sapien
aaggtatcaaaagcattccatcaga

SEQ ID NO: 2506449 - DNA, 25 bp, Homo sapien
aatagaagctagagagcccttgtcc

SEQ ID NO: 2506450 - DNA, 25 bp, Homo sapien
caatcccctaaggaatataacattt

SEQ ID NO: 2506451 - DNA, 25 bp, Homo sapien
tttaagtgctcgtagagtgctgtgg

SEQ ID NO: 2506452 - DNA, 25 bp, Homo sapien
tgtgttacctttactcttctccctg

SEQ ID NO: 2506453 - DNA, 25 bp, Homo sapien
gatgctctaaagcatttgctaccaa

SEQ ID NO: 2506454 - DNA, 25 bp, Homo sapien
gaaaaatgtgggtgatagactatga

SEQ ID NO: 2506455 - DNA, 25 bp, Homo sapien
ggtgagtgtgaattcatagtatgaa

SEQ ID NO: 2506456 - DNA, 25 bp, Homo sapien
gatggagactctaaaagtggcatga

SEQ ID NO: 2506457 - DNA, 25 bp, Homo sapien
taagggaatcccattccaagtggca

SEQ ID NO: 2506458 - DNA, 25 bp, Homo sapien
tagcaatttattactctcctgaggt

SEQ ID NO: 2506459 - DNA, 25 bp, Homo sapien
ggttcaggtggcttaaagtgcaaat

SEQ ID NO: 2506460 - DNA, 25 bp, Homo sapien
gagcacaagaaggagaagtaatcaa

SEQ ID NO: 2506461 - DNA, 25 bp, Homo sapien
gtaatcaatagaggcttagctaggg

SEQ ID NO: 2506462 - DNA, 25 bp, Homo sapien
tatgactgattcttgccgttgagac

SEQ ID NO: 2506463 - DNA, 25 bp, Homo sapien
aaagtacaggtgataagagcacaag

SEQ ID NO: 2506464 - DNA, 25 bp, Homo sapien
catgaagtccaaagtggtggccatt

SEQ ID NO: 2506465 - DNA, 25 bp, Homo sapien
gaagccagggcattgtctgccttat

SEQ ID NO: 2506466 - DNA, 25 bp, Homo sapien
tcagatctctggtcaactgtgctct

SEQ ID NO: 2506467 - DNA, 25 bp, Homo sapien
ggccattacctacaagtccctttga

SEQ ID NO: 2506468 - DNA, 25 bp, Homo sapien
gggtaccaatcttgttcatgaaggc

SEQ ID NO: 2506469 - DNA, 25 bp, Homo sapien
gagggtcaagatagctctctcgggc

SEQ ID NO: 2506470 - DNA, 25 bp, Homo sapien
gtcttcacatggtaggagggtcaag

SEQ ID NO: 2506471 - DNA, 25 bp, Homo sapien
ggctctgccaaaggtaagatttagc

SEQ ID NO: 2506472 - DNA, 25 bp, Homo sapien
tcaaaggcatcagagcgagtgtctc

SEQ ID NO: 2506473 - DNA, 25 bp, Homo sapien
tcctcgtagtagcaaggcagtcaca

SEQ ID NO: 2506474 - DNA, 25 bp, Homo sapien
cattgggcagaattgtctcatggcc

SEQ ID NO: 2506475 - DNA, 25 bp, Homo sapien
gaagaggcacggaagttgctcagcc

SEQ ID NO: 2506476 - DNA, 25 bp, Homo sapien
gaagggaatagcactgttgtcaaag

SEQ ID NO: 2506477 - DNA, 25 bp, Homo sapien
ggaaccttgaaattgctcctctttg

SEQ ID NO: 2506478 - DNA, 25 bp, Homo sapien
gcatttggccgtctcagtttcacga

SEQ ID NO: 2506479 - DNA, 25 bp, Homo sapien
gataacaagacgaagcaggaacctt

SEQ ID NO: 2506480 - DNA, 25 bp, Homo sapien
gcaagccaaagggatttgctgccat

SEQ ID NO: 2506481 - DNA, 25 bp, Homo sapien
tcctgaagttatatgagcagaggca

SEQ ID NO: 2506482 - DNA, 25 bp, Homo sapien
gctcggtgacccacagtgctcagtg

SEQ ID NO: 2506483 - DNA, 25 bp, Homo sapien
agctgagccatggagaggccagcaa

SEQ ID NO: 2506484 - DNA, 25 bp, Homo sapien
gctgcttggcaagcattggtgatgc

SEQ ID NO: 2506485 - DNA, 25 bp, Homo sapien
cagccgtctggaatagctgctggag

SEQ ID NO: 2506486 - DNA, 25 bp, Homo sapien
gatgctgtgacattgagttcctggg

SEQ ID NO: 2506487 - DNA, 25 bp, Homo sapien
gaggtgcccagtgtgccagcactga

SEQ ID NO: 2506488 - DNA, 25 bp, Homo sapien
gactgccacatgctgtatgtcttgc

SEQ ID NO: 2506489 - DNA, 25 bp, Homo sapien
ccacatgctgtatgtcttgcttcat

SEQ ID NO: 2506490 - DNA, 25 bp, Homo sapien
ctgctcaggtggactgccacatgct

SEQ ID NO: 2506491 - DNA, 25 bp, Homo sapien
caggtggactgccacatgctgtatg

SEQ ID NO: 2506492 - DNA, 25 bp, Homo sapien
aaagtcagtcgagtacagtagttca

SEQ ID NO: 2506493 - DNA, 25 bp, Homo sapien
cgagtacagtagttcaagcctgtaa

SEQ ID NO: 2506494 - DNA, 25 bp, Homo sapien
ataggaaaagtcagtcgagtacagt

SEQ ID NO: 2506495 - DNA, 25 bp, Homo sapien
tcagtcgagtacagtagttcaagcc

SEQ ID NO: 2506496 - DNA, 25 bp, Homo sapien
tagtactaatctgcatctggagaac

SEQ ID NO: 2506497 - DNA, 25 bp, Homo sapien
tccagagaatcaatatagtagccag

SEQ ID NO: 2506498 - DNA, 25 bp, Homo sapien
tttcaagtcacccaactaaagcagt

SEQ ID NO: 2506499 - DNA, 25 bp, Homo sapien
aaagcagtgcaaattcagtgtcacc

SEQ ID NO: 2506500 - DNA, 25 bp, Homo sapien
tggaacctcggatgttgtacacctt

SEQ ID NO: 2506501 - DNA, 25 bp, Homo sapien
cttgtccactccgtgctgcctgagg

SEQ ID NO: 2506502 - DNA, 25 bp, Homo sapien
ctccgtgctgcctgagggtgaaatg

SEQ ID NO: 2506503 - DNA, 25 bp, Homo sapien
ggtgaaatggaacctcggatgttgt

SEQ ID NO: 2506504 - DNA, 25 bp, Homo sapien
gccagggagctgtgtagtcagttta

SEQ ID NO: 2506505 - DNA, 25 bp, Homo sapien
ggcaagcaggagagtttcataaaca

SEQ ID NO: 2506506 - DNA, 25 bp, Homo sapien
gttgcctgtttcatagccttcccgg

SEQ ID NO: 2506507 - DNA, 25 bp, Homo sapien
gttctaagaaccagagcaggactgc

SEQ ID NO: 2506508 - DNA, 25 bp, Homo sapien
agtgttgaattgagctaggaggatc

SEQ ID NO: 2506509 - DNA, 25 bp, Homo sapien
aaaaggaaggactggccgaagaatg

SEQ ID NO: 2506510 - DNA, 25 bp, Homo sapien
tcttagctgttttgtcagttggaac

SEQ ID NO: 2506511 - DNA, 25 bp, Homo sapien
gttggaacaaaacaacagcgctgct

SEQ ID NO: 2506512 - DNA, 25 bp, Homo sapien
ctttttgaagcctgttgacaatctc

SEQ ID NO: 2506513 - DNA, 25 bp, Homo sapien
tggaactctgcctttttgaagcctg

SEQ ID NO: 2506514 - DNA, 25 bp, Homo sapien
gaggcccatgagacctcaggcatgg

SEQ ID NO: 2506515 - DNA, 25 bp, Homo sapien
agaagggccaaaagtgtcagactgt

SEQ ID NO: 2506516 - DNA, 25 bp, Homo sapien
ccatattcttaacatcaatgcctac

SEQ ID NO: 2506517 - DNA, 25 bp, Homo sapien
aaagccatattcttaacatcaatgc

SEQ ID NO: 2506518 - DNA, 25 bp, Homo sapien
gccatattcttaacatcaatgccta

SEQ ID NO: 2506519 - DNA, 25 bp, Homo sapien
aagccatattcttaacatcaatgcc

SEQ ID NO: 2506520 - DNA, 25 bp, Homo sapien
cattccgcggatcttgttttgaagg

SEQ ID NO: 2506521 - DNA, 25 bp, Homo sapien
acaggttgccggcaatttcttgttg

SEQ ID NO: 2506522 - DNA, 25 bp, Homo sapien
cgagtcaggtgtttgtgcggctcca

SEQ ID NO: 2506523 - DNA, 25 bp, Homo sapien
caatttcttgttgtgtcccgagcca

SEQ ID NO: 2506524 - DNA, 25 bp, Homo sapien
cacagagtggtccaagaagattggc

SEQ ID NO: 2506525 - DNA, 25 bp, Homo sapien
gaagattggccattctttccggaag

SEQ ID NO: 2506526 - DNA, 25 bp, Homo sapien
tcctcggtccacattctaatattcc

SEQ ID NO: 2506527 - DNA, 25 bp, Homo sapien
aatatgctcctcagcacacagagtg

SEQ ID NO: 2506528 - DNA, 25 bp, Homo sapien
gttcagtagatggtaatatccttca

SEQ ID NO: 2506529 - DNA, 25 bp, Homo sapien
cacagaatgcgagttcagtagatgg

SEQ ID NO: 2506530 - DNA, 25 bp, Homo sapien
tgcgagttcagtagatggtaatatc

SEQ ID NO: 2506531 - DNA, 25 bp, Homo sapien
gatggtaatatccttcatcattgtt

SEQ ID NO: 2506532 - DNA, 25 bp, Homo sapien
cagaaatcctttccttgtctccctg

SEQ ID NO: 2506533 - DNA, 25 bp, Homo sapien
ccagaaatcctttccttgtctccct

SEQ ID NO: 2506534 - DNA, 25 bp, Homo sapien
tgagaagcagggagccacagtgcag

SEQ ID NO: 2506535 - DNA, 25 bp, Homo sapien
ctgagaagcagggagccacagtgca

SEQ ID NO: 2506536 - DNA, 25 bp, Homo sapien
tagcagtaagccctccaagaagcca

SEQ ID NO: 2506537 - DNA, 25 bp, Homo sapien
gcctagcaggagtagcagtaagccc

SEQ ID NO: 2506538 - DNA, 25 bp, Homo sapien
atgtgagggctgatagtgccttgcc

SEQ ID NO: 2506539 - DNA, 25 bp, Homo sapien
agggctgatagtgccttgccttatc

SEQ ID NO: 2506540 - DNA, 25 bp, Homo sapien
tgctaagggcgctatgaccattccc

SEQ ID NO: 2506541 - DNA, 25 bp, Homo sapien
gcagtgtacttgagaacctttgaaa

SEQ ID NO: 2506542 - DNA, 25 bp, Homo sapien
ggcatgtatgcttgagagcccttta

SEQ ID NO: 2506543 - DNA, 25 bp, Homo sapien
gaaagcatctgtacttgccaagggt

SEQ ID NO: 2506544 - DNA, 25 bp, Homo sapien
tctccactttgttgcactttgccct

SEQ ID NO: 2506545 - DNA, 25 bp, Homo sapien
ctccactttgttgcactttgccctc

SEQ ID NO: 2506546 - DNA, 25 bp, Homo sapien
tataatttgtcctaccccacagtca

SEQ ID NO: 2506547 - DNA, 25 bp, Homo sapien
aaatgagctaggttagcagtgtccg

SEQ ID NO: 2506548 - DNA, 25 bp, Homo sapien
cagtatgcccaatcagagcacagac

SEQ ID NO: 2506549 - DNA, 25 bp, Homo sapien
tgcccaattatggaaggtcttaaac

SEQ ID NO: 2506550 - DNA, 25 bp, Homo sapien
tcattcaacaagcacccactgcata

SEQ ID NO: 2506551 - DNA, 25 bp, Homo sapien
attcattcaacaagcacccactgca

SEQ ID NO: 2506552 - DNA, 25 bp, Homo sapien
cattcaacaagcacccactgcatac

SEQ ID NO: 2506553 - DNA, 25 bp, Homo sapien
tcattcattcaacaagcacccactg

SEQ ID NO: 2506554 - DNA, 25 bp, Homo sapien
gagtgtgagaatcgccttactcttc

SEQ ID NO: 2506555 - DNA, 25 bp, Homo sapien
tgtgagaatcgccttactcttcagg

SEQ ID NO: 2506556 - DNA, 25 bp, Homo sapien
gaatcgccttactcttcaggtgcct

SEQ ID NO: 2506557 - DNA, 25 bp, Homo sapien
gggtgagtgtgagaatcgccttact

SEQ ID NO: 2506558 - DNA, 25 bp, Homo sapien
gctttagcagatattggaagggtgc

SEQ ID NO: 2506559 - DNA, 25 bp, Homo sapien
cagatattggaagggtgccccagaa

SEQ ID NO: 2506560 - DNA, 25 bp, Homo sapien
ccaaaacctaagtgatgatcaaggg

SEQ ID NO: 2506561 - DNA, 25 bp, Homo sapien
aggtggctttagcagatattggaag

SEQ ID NO: 2506562 - DNA, 25 bp, Homo sapien
cagctcacacttcctacaactcttt

SEQ ID NO: 2506563 - DNA, 25 bp, Homo sapien
cacttcctacaactctttaagttca

SEQ ID NO: 2506564 - DNA, 25 bp, Homo sapien
ggctcctagaagacacagctcacac

SEQ ID NO: 2506565 - DNA, 25 bp, Homo sapien
tcacacttcctacaactctttaagt

SEQ ID NO: 2506566 - DNA, 25 bp, Homo sapien
aatgagagaaataaacccgatttct

SEQ ID NO: 2506567 - DNA, 25 bp, Homo sapien
atttcttttggttgttctatcattc

SEQ ID NO: 2506568 - DNA, 25 bp, Homo sapien
ctgtggccttcttgttaaatgagag

SEQ ID NO: 2506569 - DNA, 25 bp, Homo sapien
ccgatttcttttggttgttctatca

SEQ ID NO: 2506570 - DNA, 25 bp, Homo sapien
tttcctagagcatattattgatatt

SEQ ID NO: 2506571 - DNA, 25 bp, Homo sapien
tgatgttagattgactcttttaagg

SEQ ID NO: 2506572 - DNA, 25 bp, Homo sapien
tatttcctagagcatattattgata

SEQ ID NO: 2506573 - DNA, 25 bp, Homo sapien
tgttagattgactcttttaagggaa

SEQ ID NO: 2506574 - DNA, 25 bp, Homo sapien
gattgagtcagatccagggttggac

SEQ ID NO: 2506575 - DNA, 25 bp, Homo sapien
gtgtatttatgtaggagcggcacct

SEQ ID NO: 2506576 - DNA, 25 bp, Homo sapien
aggcctgctgatcgtgccctgcact

SEQ ID NO: 2506577 - DNA, 25 bp, Homo sapien
tctggtttcctagctaggcctgctg

SEQ ID NO: 2506578 - DNA, 25 bp, Homo sapien
tcaacggaatgagggttaatctcac

SEQ ID NO: 2506579 - DNA, 25 bp, Homo sapien
tagctcaacggaatgagggttaatc

SEQ ID NO: 2506580 - DNA, 25 bp, Homo sapien
ggataaaatttagctcaacggaatg

SEQ ID NO: 2506581 - DNA, 25 bp, Homo sapien
aaatttagctcaacggaatgagggt

SEQ ID NO: 2506582 - DNA, 25 bp, Homo sapien
ttgcggctgtttgaacttgctcttt

SEQ ID NO: 2506583 - DNA, 25 bp, Homo sapien
tgcttgcggctgtttgaacttgctc

SEQ ID NO: 2506584 - DNA, 25 bp, Homo sapien
gcttgcggctgtttgaacttgctct

SEQ ID NO: 2506585 - DNA, 25 bp, Homo sapien
ggtgcttgcggctgtttgaacttgc

SEQ ID NO: 2506586 - DNA, 25 bp, Homo sapien
cacaatagctggaagtggaacatcc

SEQ ID NO: 2506587 - DNA, 25 bp, Homo sapien
tatatctggctgctagagccccgaa

SEQ ID NO: 2506588 - DNA, 25 bp, Homo sapien
gaaacccctcgtggtccattcagtg

SEQ ID NO: 2506589 - DNA, 25 bp, Homo sapien
tttgctgttcaggtggaaacccctc

SEQ ID NO: 2506590 - DNA, 25 bp, Homo sapien
tcccagtccgaacctctgacatctc

SEQ ID NO: 2506591 - DNA, 25 bp, Homo sapien
gcctctgtgtttgcccctggcagtc

SEQ ID NO: 2506592 - DNA, 25 bp, Homo sapien
tgctaccatcccagtccgaacctct

SEQ ID NO: 2506593 - DNA, 25 bp, Homo sapien
cactggacttccatatcacctccta

SEQ ID NO: 2506594 - DNA, 25 bp, Homo sapien
caaatataccaagtgggagtcttac

SEQ ID NO: 2506595 - DNA, 25 bp, Homo sapien
ttggcatcccatagcacttagaagg

SEQ ID NO: 2506596 - DNA, 25 bp, Homo sapien
ttgtgatgtacctgctgcctatgtc

SEQ ID NO: 2506597 - DNA, 25 bp, Homo sapien
tttgacctgaccaccctatgtaaag

SEQ ID NO: 2506598 - DNA, 25 bp, Homo sapien
ccactgttctgcaggtaaatgtatc

SEQ ID NO: 2506599 - DNA, 25 bp, Homo sapien
tatcccaatggccaactggtcatgg

SEQ ID NO: 2506600 - DNA, 25 bp, Homo sapien
tctagtgcaagctcaagaggtgtgg

SEQ ID NO: 2506601 - DNA, 25 bp, Homo sapien
tgtgaaaacagactagaaccaggta

SEQ ID NO: 2506602 - DNA, 25 bp, Homo sapien
aacaatgtgtagcaaatgccttggt

SEQ ID NO: 2506603 - DNA, 25 bp, Homo sapien
caatgtgtagcaaatgccttggtga

SEQ ID NO: 2506604 - DNA, 25 bp, Homo sapien
tgcttgtcggccatggaacaatgtg

SEQ ID NO: 2506605 - DNA, 25 bp, Homo sapien
ttgtcggccatggaacaatgtgtag

SEQ ID NO: 2506606 - DNA, 25 bp, Homo sapien
aaggagagaataggaatgctcccca

SEQ ID NO: 2506607 - DNA, 25 bp, Homo sapien
gaaggagagaataggaatgctcccc

SEQ ID NO: 2506608 - DNA, 25 bp, Homo sapien
aggagagaataggaatgctccccat

SEQ ID NO: 2506609 - DNA, 25 bp, Homo sapien
gatagtagctctcctaatgagtgtg

SEQ ID NO: 2506610 - DNA, 25 bp, Homo sapien
caaagagtgagataatcccaaggag

SEQ ID NO: 2506611 - DNA, 25 bp, Homo sapien
cacgatggacatagctgaaaatcaa

SEQ ID NO: 2506612 - DNA, 25 bp, Homo sapien
cagccatccagcatatggagcaaga

SEQ ID NO: 2506613 - DNA, 25 bp, Homo sapien
agaacggtaactccactcttgtggc

SEQ ID NO: 2506614 - DNA, 25 bp, Homo sapien
tgttagcagctacacgttttctcgg

SEQ ID NO: 2506615 - DNA, 25 bp, Homo sapien
taaggtcagatttcctcgttgcccc

SEQ ID NO: 2506616 - DNA, 25 bp, Homo sapien
tcaagttcaacctcatcggcgaggg

SEQ ID NO: 2506617 - DNA, 25 bp, Homo sapien
tggaggccttcatccgttggcggca

SEQ ID NO: 2506618 - DNA, 25 bp, Homo sapien
caggcaggtgtctcatatgtaaaac

SEQ ID NO: 2506619 - DNA, 25 bp, Homo sapien
ggatatctaccgctgtaaggccaac

SEQ ID NO: 2506620 - DNA, 25 bp, Homo sapien
cacatgttggagtgatggtgcctcc

SEQ ID NO: 2506621 - DNA, 25 bp, Homo sapien
ttaaggagatgaatcttgagctggg

SEQ ID NO: 2506622 - DNA, 25 bp, Homo sapien
gacaccaccttgtatagatacagtt

SEQ ID NO: 2506623 - DNA, 25 bp, Homo sapien
tagaaagaaagttcgctgtagggaa

SEQ ID NO: 2506624 - DNA, 25 bp, Homo sapien
gtatagatacagtttcacagtagaa

SEQ ID NO: 2506625 - DNA, 25 bp, Homo sapien
ctacattggttctggctctgtaact

SEQ ID NO: 2506626 - DNA, 25 bp, Homo sapien
ggttctggctctgtaactggagttt

SEQ ID NO: 2506627 - DNA, 25 bp, Homo sapien
tacattggttctggctctgtaactg

SEQ ID NO: 2506628 - DNA, 25 bp, Homo sapien
attggttctggctctgtaactggag

SEQ ID NO: 2506629 - DNA, 25 bp, Homo sapien
attttgcttcttctaacatttttca

SEQ ID NO: 2506630 - DNA, 25 bp, Homo sapien
tcattttgcttcttctaacattttt

SEQ ID NO: 2506631 - DNA, 25 bp, Homo sapien
cgtcttgctttttcattttgcttct

SEQ ID NO: 2506632 - DNA, 25 bp, Homo sapien
tttcattttgcttcttctaacattt

SEQ ID NO: 2506633 - DNA, 25 bp, Homo sapien
ccactgtctggaatgccctttggca

SEQ ID NO: 2506634 - DNA, 25 bp, Homo sapien
tgcagaactgactgcgggacatgcg

SEQ ID NO: 2506635 - DNA, 25 bp, Homo sapien
gtaatttatagtcacagggcgcctg

SEQ ID NO: 2506636 - DNA, 25 bp, Homo sapien
acatgcggtgcatcagccggagctg

SEQ ID NO: 2506637 - DNA, 25 bp, Homo sapien
tatttggggacggctgttgctcaga

SEQ ID NO: 2506638 - DNA, 25 bp, Homo sapien
cagctgccggcccgtggtatttggg

SEQ ID NO: 2506639 - DNA, 25 bp, Homo sapien
agggaggaagcaagttccacagagg

SEQ ID NO: 2506640 - DNA, 25 bp, Homo sapien
gaggaagcaagttccacagaggccc

SEQ ID NO: 2506641 - DNA, 25 bp, Homo sapien
gccaagcccgtcaactgctttcttg

SEQ ID NO: 2506642 - DNA, 25 bp, Homo sapien
gatggcctattgaacatttccagaa

SEQ ID NO: 2506643 - DNA, 25 bp, Homo sapien
acattcaataaggatggcggtcctc

SEQ ID NO: 2506644 - DNA, 25 bp, Homo sapien
agcagcggtccctgccagaagatgg

SEQ ID NO: 2506645 - DNA, 25 bp, Homo sapien
cgcagacaggaaggcgattcaggct

SEQ ID NO: 2506646 - DNA, 25 bp, Homo sapien
ttgctgtgttcgttcagacaccccg

SEQ ID NO: 2506647 - DNA, 25 bp, Homo sapien
taggccctgccgacttcttctaact

SEQ ID NO: 2506648 - DNA, 25 bp, Homo sapien
acaccccgcagacaggaaggcgatt

SEQ ID NO: 2506649 - DNA, 25 bp, Homo sapien
catcagcagggggagtattttcttc

SEQ ID NO: 2506650 - DNA, 25 bp, Homo sapien
ccaagtagaaccaaaggagcatcag

SEQ ID NO: 2506651 - DNA, 25 bp, Homo sapien
ggaacgtttattgcagtccctcctc

SEQ ID NO: 2506652 - DNA, 25 bp, Homo sapien
tgtgagcttcactcccaagtagaac

SEQ ID NO: 2506653 - DNA, 25 bp, Homo sapien
gatttggctgccacaattctttgaa

SEQ ID NO: 2506654 - DNA, 25 bp, Homo sapien
gatgattcagaaaacccttcaacag

SEQ ID NO: 2506655 - DNA, 25 bp, Homo sapien
cattcatggattgaggattttcgaa

SEQ ID NO: 2506656 - DNA, 25 bp, Homo sapien
tcgaaaaattgggatctaaacaaca

SEQ ID NO: 2506657 - DNA, 25 bp, Homo sapien
aggcacaggcgttgaatagaataga

SEQ ID NO: 2506658 - DNA, 25 bp, Homo sapien
ttgtagcttggcacgccctctggca

SEQ ID NO: 2506659 - DNA, 25 bp, Homo sapien
tctccagggaaatcgaaggtgattg

SEQ ID NO: 2506660 - DNA, 25 bp, Homo sapien
aaatcgaaggtgattgtcttgtagc

SEQ ID NO: 2506661 - DNA, 25 bp, Homo sapien
tgaatgtaattagcatgagcctgcc

SEQ ID NO: 2506662 - DNA, 25 bp, Homo sapien
ttcttacgagaagtgaataacttgg

SEQ ID NO: 2506663 - DNA, 25 bp, Homo sapien
aatgtattgatcctagaaacttcgg

SEQ ID NO: 2506664 - DNA, 25 bp, Homo sapien
tctaaagatggtttcttacgagaag

SEQ ID NO: 2506665 - DNA, 25 bp, Homo sapien
tccagatacagacactcatcagtct

SEQ ID NO: 2506666 - DNA, 25 bp, Homo sapien
tgatcgacatccagatacagacact

SEQ ID NO: 2506667 - DNA, 25 bp, Homo sapien
tcttcctatattcacaatgatcgac

SEQ ID NO: 2506668 - DNA, 25 bp, Homo sapien
ttttatccatccgtttcttcctata

SEQ ID NO: 2506669 - DNA, 25 bp, Homo sapien
tgtcgccatggtaaaaaggcaggag

SEQ ID NO: 2506670 - DNA, 25 bp, Homo sapien
gcaggagacagcaaacgcttgatcc

SEQ ID NO: 2506671 - DNA, 25 bp, Homo sapien
tcaaagtgcgctcggtgtgtcgtgt

SEQ ID NO: 2506672 - DNA, 25 bp, Homo sapien
gagctgcaccatgcctcgttttcac

SEQ ID NO: 2506673 - DNA, 25 bp, Homo sapien
ttaacctaagtccttctcgatcagg

SEQ ID NO: 2506674 - DNA, 25 bp, Homo sapien
gtttgagcagggaaacacagctact

SEQ ID NO: 2506675 - DNA, 25 bp, Homo sapien
ggtgatggatgtcccagaaagttca

SEQ ID NO: 2506676 - DNA, 25 bp, Homo sapien
agtccttctcgatcaggaatggtca

SEQ ID NO: 2506677 - DNA, 25 bp, Homo sapien
tagaggtttggtagagtgagttcat

SEQ ID NO: 2506678 - DNA, 25 bp, Homo sapien
ctagaggtttggtagagtgagttca

SEQ ID NO: 2506679 - DNA, 25 bp, Homo sapien
tgaaactgctgcaaaaaccacacgt

SEQ ID NO: 2506680 - DNA, 25 bp, Homo sapien
gctgcaaaaaccacacgtgttttaa

SEQ ID NO: 2506681 - DNA, 25 bp, Homo sapien
aaatggtgaaactgctgcaaaaacc

SEQ ID NO: 2506682 - DNA, 25 bp, Homo sapien
tatgcactaaatggtgaaactgctg

SEQ ID NO: 2506683 - DNA, 25 bp, Homo sapien
gcatcagggcatcaatagctatcct

SEQ ID NO: 2506684 - DNA, 25 bp, Homo sapien
gtcagcatgatcacatgtgatgcca

SEQ ID NO: 2506685 - DNA, 25 bp, Homo sapien
catcctctaggaggacagtcagcat

SEQ ID NO: 2506686 - DNA, 25 bp, Homo sapien
taaggtgtgacagatggcatcatcc

SEQ ID NO: 2506687 - DNA, 25 bp, Homo sapien
gtgactgcataaaggctgtccagga

SEQ ID NO: 2506688 - DNA, 25 bp, Homo sapien
cagagcacacaagtgactgcataaa

SEQ ID NO: 2506689 - DNA, 25 bp, Homo sapien
aaagaccgaagtggaacagcagcat

SEQ ID NO: 2506690 - DNA, 25 bp, Homo sapien
aggagctgcaaaagaccgaagtgga

SEQ ID NO: 2506691 - DNA, 25 bp, Homo sapien
tcatctcagtaaggtcatggacgtc

SEQ ID NO: 2506692 - DNA, 25 bp, Homo sapien
agagcatcaaatcttttgggaatat

SEQ ID NO: 2506693 - DNA, 25 bp, Homo sapien
ggtcatggacgtcccctcagggctc

SEQ ID NO: 2506694 - DNA, 25 bp, Homo sapien
aacatacttgtgtactgtcagtggg

SEQ ID NO: 2506695 - DNA, 25 bp, Homo sapien
cacatgctgcaataagagtaggtag

SEQ ID NO: 2506696 - DNA, 25 bp, Homo sapien
taaggagtgttcagcataatggtgg

SEQ ID NO: 2506697 - DNA, 25 bp, Homo sapien
gattcctagcacaagacagcaagac

SEQ ID NO: 2506698 - DNA, 25 bp, Homo sapien
taggagccagatacaggcacgtatt

SEQ ID NO: 2506699 - DNA, 25 bp, Homo sapien
tcttctttggattccaaaccaatgg

SEQ ID NO: 2506700 - DNA, 25 bp, Homo sapien
tctcttctttggattccaaaccaat

SEQ ID NO: 2506701 - DNA, 25 bp, Homo sapien
ctttggattccaaaccaatggagaa

SEQ ID NO: 2506702 - DNA, 25 bp, Homo sapien
ttctttggattccaaaccaatggag

SEQ ID NO: 2506703 - DNA, 25 bp, Homo sapien
ggcattcttgccctgaaggctggtt

SEQ ID NO: 2506704 - DNA, 25 bp, Homo sapien
caagaccaaagggagtatcttctcg

SEQ ID NO: 2506705 - DNA, 25 bp, Homo sapien
tcatccaggaggatcaaagatcgca

SEQ ID NO: 2506706 - DNA, 25 bp, Homo sapien
taagacttgtcctggatccaagacc

SEQ ID NO: 2506707 - DNA, 25 bp, Homo sapien
ctggtcacagagcaagcaatggtgg

SEQ ID NO: 2506708 - DNA, 25 bp, Homo sapien
cagagcaagcaatggtggggcaggc

SEQ ID NO: 2506709 - DNA, 25 bp, Homo sapien
agagcaagcaatggtggggcaggca

SEQ ID NO: 2506710 - DNA, 25 bp, Homo sapien
tgcatatggcctgtttcactcagcg

SEQ ID NO: 2506711 - DNA, 25 bp, Homo sapien
aatcattgcctctatctactccggg

SEQ ID NO: 2506712 - DNA, 25 bp, Homo sapien
gggttaatttctcccagcgccagca

SEQ ID NO: 2506713 - DNA, 25 bp, Homo sapien
ttaaagacagggtcacagtattccc

SEQ ID NO: 2506714 - DNA, 25 bp, Homo sapien
aactctgggaaccactagttcatac

SEQ ID NO: 2506715 - DNA, 25 bp, Homo sapien
gcttgcatccttggcacaaaacacc

SEQ ID NO: 2506716 - DNA, 25 bp, Homo sapien
tttgcttgcatccttggcacaaaac

SEQ ID NO: 2506717 - DNA, 25 bp, Homo sapien
cacccaatacctaggaggtgttcca

SEQ ID NO: 2506718 - DNA, 25 bp, Homo sapien
tgtctctaatgttttgcttgcatcc

SEQ ID NO: 2506719 - DNA, 25 bp, Homo sapien
catccgcttctgggaggctattatt

SEQ ID NO: 2506720 - DNA, 25 bp, Homo sapien
cacggcgatgctggtttcactgggc

SEQ ID NO: 2506721 - DNA, 25 bp, Homo sapien
gaagcacttgctgtcccgtcaacag

SEQ ID NO: 2506722 - DNA, 25 bp, Homo sapien
cactgggcttttcagaaggcgtgct

SEQ ID NO: 2506723 - DNA, 25 bp, Homo sapien
taaaagactttggagcgtagggtgc

SEQ ID NO: 2506724 - DNA, 25 bp, Homo sapien
cccctgtccattggtccacagtact

SEQ ID NO: 2506725 - DNA, 25 bp, Homo sapien
ccttgccccctgtccattggtccac

SEQ ID NO: 2506726 - DNA, 25 bp, Homo sapien
ctgtccattggtccacagtactcat

SEQ ID NO: 2506727 - DNA, 25 bp, Homo sapien
tgccccctgtccattggtccacagt

SEQ ID NO: 2506728 - DNA, 25 bp, Homo sapien
gatgaagacaacttctgtcttccct

SEQ ID NO: 2506729 - DNA, 25 bp, Homo sapien
tctgtcttccctcactaattcccat

SEQ ID NO: 2506730 - DNA, 25 bp, Homo sapien
ctccaggagatgaagacaacttctg

SEQ ID NO: 2506731 - DNA, 25 bp, Homo sapien
ttctgtcttccctcactaattccca

SEQ ID NO: 2506732 - DNA, 25 bp, Homo sapien
gttctcgtggtctgcttgcctccat

SEQ ID NO: 2506733 - DNA, 25 bp, Homo sapien
ggttctcgtggtctgcttgcctcca

SEQ ID NO: 2506734 - DNA, 25 bp, Homo sapien
ctgggttctcgtggtctgcttgcct

SEQ ID NO: 2506735 - DNA, 25 bp, Homo sapien
cactgggttctcgtggtctgcttgc

SEQ ID NO: 2506736 - DNA, 25 bp, Homo sapien
gtggtccttcatggttgaagatgtc

SEQ ID NO: 2506737 - DNA, 25 bp, Homo sapien
tccttcatggttgaagatgtcagtg

SEQ ID NO: 2506738 - DNA, 25 bp, Homo sapien
ccagtggtccttcatggttgaagat

SEQ ID NO: 2506739 - DNA, 25 bp, Homo sapien
ggtccttcatggttgaagatgtcag

SEQ ID NO: 2506740 - DNA, 25 bp, Homo sapien
gtttccgtggtagcaggcctctgtc

SEQ ID NO: 2506741 - DNA, 25 bp, Homo sapien
ctgattgtggatggcctggttaacc

SEQ ID NO: 2506742 - DNA, 25 bp, Homo sapien
tctgtctggaggataaatctgcacc

SEQ ID NO: 2506743 - DNA, 25 bp, Homo sapien
tggttaacccagattgccttcggtg

SEQ ID NO: 2506744 - DNA, 25 bp, Homo sapien
cttatggtcccagtagaatggcagg

SEQ ID NO: 2506745 - DNA, 25 bp, Homo sapien
cgtcgcctacgtttttcatgccaaa

SEQ ID NO: 2506746 - DNA, 25 bp, Homo sapien
gggaggcaaaagaagcccactctta

SEQ ID NO: 2506747 - DNA, 25 bp, Homo sapien
tctttcaccgtaggagtctgcatac

SEQ ID NO: 2506748 - DNA, 25 bp, Homo sapien
cgagcgccagcgctgcacacaggaa

SEQ ID NO: 2506749 - DNA, 25 bp, Homo sapien
gcgcctccccgcgagcgccagcgct

SEQ ID NO: 2506750 - DNA, 25 bp, Homo sapien
agcgccagcgctgcacacaggaact

SEQ ID NO: 2506751 - DNA, 25 bp, Homo sapien
ccgcgcctccccgcgagcgccagcg

SEQ ID NO: 2506752 - DNA, 25 bp, Homo sapien
aaatccacgttttggctcaatcagg

SEQ ID NO: 2506753 - DNA, 25 bp, Homo sapien
agagagctgccccttggaaatcaag

SEQ ID NO: 2506754 - DNA, 25 bp, Homo sapien
gagcttctgcgagagagctgcccct

SEQ ID NO: 2506755 - DNA, 25 bp, Homo sapien
tggcagaggaagtcgcggagcttct

SEQ ID NO: 2506756 - DNA, 25 bp, Homo sapien
tccttttggtcatttgagtccccag

SEQ ID NO: 2506757 - DNA, 25 bp, Homo sapien
tccttcagacgatcagagagctgcc

SEQ ID NO: 2506758 - DNA, 25 bp, Homo sapien
agagagctgccataacttagtcaga

SEQ ID NO: 2506759 - DNA, 25 bp, Homo sapien
cagatcccggtcaacactgtataca

SEQ ID NO: 2506760 - DNA, 25 bp, Homo sapien
tcacactgtgttcagtagctgcaga

SEQ ID NO: 2506761 - DNA, 25 bp, Homo sapien
ggcaacggctcttcctagctccata

SEQ ID NO: 2506762 - DNA, 25 bp, Homo sapien
caaatagggcgattttaggagttgc

SEQ ID NO: 2506763 - DNA, 25 bp, Homo sapien
ctcagtttcctgtcgttgaaggcag

SEQ ID NO: 2506764 - DNA, 25 bp, Homo sapien
cctggttggattcgccgtcgccatg

SEQ ID NO: 2506765 - DNA, 25 bp, Homo sapien
agtttcctagcgtcgctgggcccgg

SEQ ID NO: 2506766 - DNA, 25 bp, Homo sapien
tcgccatggcaacccagtactgggg

SEQ ID NO: 2506767 - DNA, 25 bp, Homo sapien
ccgccatggcagtttcctagcgtcg

SEQ ID NO: 2506768 - DNA, 25 bp, Homo sapien
atgtgggagggcttctgagagacac

SEQ ID NO: 2506769 - DNA, 25 bp, Homo sapien
ctgagtcaaatgtgggagggcttct

SEQ ID NO: 2506770 - DNA, 25 bp, Homo sapien
aaatgtgggagggcttctgagagac

SEQ ID NO: 2506771 - DNA, 25 bp, Homo sapien
gtcaaatgtgggagggcttctgaga

SEQ ID NO: 2506772 - DNA, 25 bp, Homo sapien
gcctgtttgggctgcatgggaaacg

SEQ ID NO: 2506773 - DNA, 25 bp, Homo sapien
gatggacagaggtgtcggttactga

SEQ ID NO: 2506774 - DNA, 25 bp, Homo sapien
tacagcggaaggagtgcaggcatct

SEQ ID NO: 2506775 - DNA, 25 bp, Homo sapien
cattgaagctggtgttgagattaca

SEQ ID NO: 2506776 - DNA, 25 bp, Homo sapien
aggtagtacgtctcccagtgcatcc

SEQ ID NO: 2506777 - DNA, 25 bp, Homo sapien
catggggccccacttgctctggttt

SEQ ID NO: 2506778 - DNA, 25 bp, Homo sapien
tccccactgggagaggtagtacgtc

SEQ ID NO: 2506779 - DNA, 25 bp, Homo sapien
gagaggtagtacgtctcccagtgca

SEQ ID NO: 2506780 - DNA, 25 bp, Homo sapien
tgtgtagaagcaagtaggacaactg

SEQ ID NO: 2506781 - DNA, 25 bp, Homo sapien
caagcttgacgtctgtgcggtgaca

SEQ ID NO: 2506782 - DNA, 25 bp, Homo sapien
tgaggaccccattgtgccgactaat

SEQ ID NO: 2506783 - DNA, 25 bp, Homo sapien
gcggtgacacttctttatggtccag

SEQ ID NO: 2506784 - DNA, 25 bp, Homo sapien
atgctctctgacttccaacaagcac

SEQ ID NO: 2506785 - DNA, 25 bp, Homo sapien
accatctctaatggatgctctctga

SEQ ID NO: 2506786 - DNA, 25 bp, Homo sapien
ctgcaccatctctaatggatgctct

SEQ ID NO: 2506787 - DNA, 25 bp, Homo sapien
tctctaatggatgctctctgacttc

SEQ ID NO: 2506788 - DNA, 25 bp, Homo sapien
gatgattcagcaataaggccctcgc

SEQ ID NO: 2506789 - DNA, 25 bp, Homo sapien
tgccaatcatagaagggcttcaggc

SEQ ID NO: 2506790 - DNA, 25 bp, Homo sapien
gaaaatgtcacctaaaaagcgtgtg

SEQ ID NO: 2506791 - DNA, 25 bp, Homo sapien
tagtaagagatagatgccagtgcca

SEQ ID NO: 2506792 - DNA, 25 bp, Homo sapien
tgctcttggtgaacaattagattag

SEQ ID NO: 2506793 - DNA, 25 bp, Homo sapien
gctcttggtgaacaattagattaga

SEQ ID NO: 2506794 - DNA, 25 bp, Homo sapien
ctgctcttggtgaacaattagatta

SEQ ID NO: 2506795 - DNA, 25 bp, Homo sapien
ctcttggtgaacaattagattagag

SEQ ID NO: 2506796 - DNA, 25 bp, Homo sapien
tcttctctgtttctggggtccccat

SEQ ID NO: 2506797 - DNA, 25 bp, Homo sapien
tgtcttctctgtttctggggtcccc

SEQ ID NO: 2506798 - DNA, 25 bp, Homo sapien
cttctgtcttctctgtttctggggt

SEQ ID NO: 2506799 - DNA, 25 bp, Homo sapien
tctgtcttctctgtttctggggtcc

SEQ ID NO: 2506800 - DNA, 25 bp, Homo sapien
tccaccctgcaaccactggttgagg

SEQ ID NO: 2506801 - DNA, 25 bp, Homo sapien
tgtcctctattaagtggtggttagg

SEQ ID NO: 2506802 - DNA, 25 bp, Homo sapien
ggaagccaggaggaactatgaatgt

SEQ ID NO: 2506803 - DNA, 25 bp, Homo sapien
cctgcaaccactggttgaggtccca

SEQ ID NO: 2506804 - DNA, 25 bp, Homo sapien
tcagtgtggttggttaagtctttga

SEQ ID NO: 2506805 - DNA, 25 bp, Homo sapien
gatggatggattgattgctggagat

SEQ ID NO: 2506806 - DNA, 25 bp, Homo sapien
gtgtggttggttaagtctttgattg

SEQ ID NO: 2506807 - DNA, 25 bp, Homo sapien
tgatggatggattgattgctggaga

SEQ ID NO: 2506808 - DNA, 25 bp, Homo sapien
cagacacatgaatgcgggtatttga

SEQ ID NO: 2506809 - DNA, 25 bp, Homo sapien
ttccaggacacacgctagaggaaac

SEQ ID NO: 2506810 - DNA, 25 bp, Homo sapien
atttgaagcagaggaaccagcatat

SEQ ID NO: 2506811 - DNA, 25 bp, Homo sapien
gaagattccaggacacacgctagag

SEQ ID NO: 2506812 - DNA, 25 bp, Homo sapien
cctcaatatgcttatcactataggg

SEQ ID NO: 2506813 - DNA, 25 bp, Homo sapien
tatgcttatcactatagggcagaaa

SEQ ID NO: 2506814 - DNA, 25 bp, Homo sapien
tacaaagtcatatcccctggcaatt

SEQ ID NO: 2506815 - DNA, 25 bp, Homo sapien
aagcatacaaagtcatatcccctgg

SEQ ID NO: 2506816 - DNA, 25 bp, Homo sapien
ctgtgccgtgtagcacctgtgtgtg

SEQ ID NO: 2506817 - DNA, 25 bp, Homo sapien
tgcaaaaccagtccaaagcgctgat

SEQ ID NO: 2506818 - DNA, 25 bp, Homo sapien
gacgactgtgccgtgtagcacctgt

SEQ ID NO: 2506819 - DNA, 25 bp, Homo sapien
cagtccaaagcgctgatgagtgatg

SEQ ID NO: 2506820 - DNA, 25 bp, Homo sapien
tacattaagtccattgagccacaga

SEQ ID NO: 2506821 - DNA, 25 bp, Homo sapien
gccacagaaagtatcgacattaggg

SEQ ID NO: 2506822 - DNA, 25 bp, Homo sapien
caacgtgatagtaacgggagcaaac

SEQ ID NO: 2506823 - DNA, 25 bp, Homo sapien
ggagcaaactttacccgggcatcga

SEQ ID NO: 2506824 - DNA, 25 bp, Homo sapien
ctgtgataaggatgtgtgagtcgaa

SEQ ID NO: 2506825 - DNA, 25 bp, Homo sapien
gatgtgtgagtcgaaatactaataa

SEQ ID NO: 2506826 - DNA, 25 bp, Homo sapien
tatcctcggtaacgtaacgctcaaa

SEQ ID NO: 2506827 - DNA, 25 bp, Homo sapien
tttatcctcggtaacgtaacgctca

SEQ ID NO: 2506828 - DNA, 25 bp, Homo sapien
ttcgctctgactctgaaagggcgcc

SEQ ID NO: 2506829 - DNA, 25 bp, Homo sapien
cagcctggatactccttagggagca

SEQ ID NO: 2506830 - DNA, 25 bp, Homo sapien
aaagggcgccaagcatcagctgttg

SEQ ID NO: 2506831 - DNA, 25 bp, Homo sapien
gaatgtcggagaaagcttcgctctg

SEQ ID NO: 2506832 - DNA, 25 bp, Homo sapien
acatcccgaaactttggaagactca

SEQ ID NO: 2506833 - DNA, 25 bp, Homo sapien
aacgtgacgccctttattttcatgg

SEQ ID NO: 2506834 - DNA, 25 bp, Homo sapien
tacaggaagatgattgcctagctgc

SEQ ID NO: 2506835 - DNA, 25 bp, Homo sapien
tcttcacgatctcgttagtggagga

SEQ ID NO: 2506836 - DNA, 25 bp, Homo sapien
tgctggagggtttcacccgcttgag

SEQ ID NO: 2506837 - DNA, 25 bp, Homo sapien
aaacaccagtcgctaggcagcatgc

SEQ ID NO: 2506838 - DNA, 25 bp, Homo sapien
tgagcatctagcagaatcgcccaga

SEQ ID NO: 2506839 - DNA, 25 bp, Homo sapien
ggagtttccgatgcagtaaatccag

SEQ ID NO: 2506840 - DNA, 25 bp, Homo sapien
gaagctgagctgaaagtcaacactt

SEQ ID NO: 2506841 - DNA, 25 bp, Homo sapien
catggttggcagttgtacgagaagc

SEQ ID NO: 2506842 - DNA, 25 bp, Homo sapien
gatttgccggtacataagatttgag

SEQ ID NO: 2506843 - DNA, 25 bp, Homo sapien
tgagccttgaaaaggaatgggccac

SEQ ID NO: 2506844 - DNA, 25 bp, Homo sapien
gatccgttctatgcttgtgtgacaa

SEQ ID NO: 2506845 - DNA, 25 bp, Homo sapien
gaaaggaggcagcaacgttcctgct

SEQ ID NO: 2506846 - DNA, 25 bp, Homo sapien
tgttcccaggccgtgtgcagaagag

SEQ ID NO: 2506847 - DNA, 25 bp, Homo sapien
catgtgacgggacgatgggtaaaac

SEQ ID NO: 2506848 - DNA, 25 bp, Homo sapien
gagacagtgaggtagccagatcatc

SEQ ID NO: 2506849 - DNA, 25 bp, Homo sapien
tgaactacagctctttgcgacccaa

SEQ ID NO: 2506850 - DNA, 25 bp, Homo sapien
aatccctaaaatgctccgtctgtac

SEQ ID NO: 2506851 - DNA, 25 bp, Homo sapien
tagacttcctgacctgatagcctga

SEQ ID NO: 2506852 - DNA, 25 bp, Homo sapien
gcctgagtgagtgattgaagcttcc

SEQ ID NO: 2506853 - DNA, 25 bp, Homo sapien
taagcccttgaatgcatgatcacat

SEQ ID NO: 2506854 - DNA, 25 bp, Homo sapien
tccctaacaatgctagaaggccggt

SEQ ID NO: 2506855 - DNA, 25 bp, Homo sapien
catttttaagttgaggtaggcctga

SEQ ID NO: 2506856 - DNA, 25 bp, Homo sapien
tctgtctctgtatgggcgagcatct

SEQ ID NO: 2506857 - DNA, 25 bp, Homo sapien
gattcttcgaaggaagcacggtcct

SEQ ID NO: 2506858 - DNA, 25 bp, Homo sapien
aggttgttcctggagggcatgtcta

SEQ ID NO: 2506859 - DNA, 25 bp, Homo sapien
ggtccttcaaagatggcgtttgttg

SEQ ID NO: 2506860 - DNA, 25 bp, Homo sapien
ggcatcctgattcttcgaaggaagc

SEQ ID NO: 2506861 - DNA, 25 bp, Homo sapien
cctgagactgcacggaatcaccttg

SEQ ID NO: 2506862 - DNA, 25 bp, Homo sapien
tattaagtatatgctccgtcctccc

SEQ ID NO: 2506863 - DNA, 25 bp, Homo sapien
tcagattgatgagattgcaggccct

SEQ ID NO: 2506864 - DNA, 25 bp, Homo sapien
cagactctgggtgttaactctagcc

SEQ ID NO: 2506865 - DNA, 25 bp, Homo sapien
tacaaaggacatgggcataccccgc

SEQ ID NO: 2506866 - DNA, 25 bp, Homo sapien
gaaaccagccatcaactgtactgaa

SEQ ID NO: 2506867 - DNA, 25 bp, Homo sapien
tgggactacagaaagcagtggagct

SEQ ID NO: 2506868 - DNA, 25 bp, Homo sapien
taatgggaaaggactcgccatccaa

SEQ ID NO: 2506869 - DNA, 25 bp, Homo sapien
tgtcttcagtggctttacttccagg

SEQ ID NO: 2506870 - DNA, 25 bp, Homo sapien
tgctgggaccttcgcacactgatgc

SEQ ID NO: 2506871 - DNA, 25 bp, Homo sapien
gcataggttagcagccttggccaga

SEQ ID NO: 2506872 - DNA, 25 bp, Homo sapien
gaagagcttagtcgtccctcataga

SEQ ID NO: 2506873 - DNA, 25 bp, Homo sapien
taagagcaagacttgaccccgtgtc

SEQ ID NO: 2506874 - DNA, 25 bp, Homo sapien
ttcagagcttcaaatgggcacacga

SEQ ID NO: 2506875 - DNA, 25 bp, Homo sapien
gacagttcctccgtgattcttgaag

SEQ ID NO: 2506876 - DNA, 25 bp, Homo sapien
cattggccactatgaggtaagagca

SEQ ID NO: 2506877 - DNA, 25 bp, Homo sapien
tgagcactagcatttccctccaaag

SEQ ID NO: 2506878 - DNA, 25 bp, Homo sapien
tatttgattaagcagcgcctccgca

SEQ ID NO: 2506879 - DNA, 25 bp, Homo sapien
ccctccaaagagacaagatgctaat

SEQ ID NO: 2506880 - DNA, 25 bp, Homo sapien
gcctccgcagactcaacatttggga

SEQ ID NO: 2506881 - DNA, 25 bp, Homo sapien
ggcccatccgaggtatttgtgatta

SEQ ID NO: 2506882 - DNA, 25 bp, Homo sapien
gctgttgccagctcttgaggagaca

SEQ ID NO: 2506883 - DNA, 25 bp, Homo sapien
tgtgattatagagtaagggtgctcg

SEQ ID NO: 2506884 - DNA, 25 bp, Homo sapien
ttggcagcgttccttatcagaaggc

SEQ ID NO: 2506885 - DNA, 25 bp, Homo sapien
ggctcaacactcaatgggagacatt

SEQ ID NO: 2506886 - DNA, 25 bp, Homo sapien
caaaacaaagcgtctgacagtagtg

SEQ ID NO: 2506887 - DNA, 25 bp, Homo sapien
gacagtagtgaagtactggctcaac

SEQ ID NO: 2506888 - DNA, 25 bp, Homo sapien
cttttggcaaaacaaagcgtctgac

SEQ ID NO: 2506889 - DNA, 25 bp, Homo sapien
gaggacctcttgagggctggctctt

SEQ ID NO: 2506890 - DNA, 25 bp, Homo sapien
cctctggcctaaacttagcggctgg

SEQ ID NO: 2506891 - DNA, 25 bp, Homo sapien
tttgaggacctcttgagggctggct

SEQ ID NO: 2506892 - DNA, 25 bp, Homo sapien
taaacttagcggctggctggacagc

SEQ ID NO: 2506893 - DNA, 25 bp, Homo sapien
gatttgcgagtgcccatcagggtgt

SEQ ID NO: 2506894 - DNA, 25 bp, Homo sapien
ccttgcttggggatttgcgagtgcc

SEQ ID NO: 2506895 - DNA, 25 bp, Homo sapien
tccttcttgccacccgtttgtcttg

SEQ ID NO: 2506896 - DNA, 25 bp, Homo sapien
gcactgtagggccacttgaccctgg

SEQ ID NO: 2506897 - DNA, 25 bp, Homo sapien
aattacaaatcgctccctatcagga

SEQ ID NO: 2506898 - DNA, 25 bp, Homo sapien
catgctatcatgagttcaggtgccg

SEQ ID NO: 2506899 - DNA, 25 bp, Homo sapien
tatttctgtggactaaggacctaca

SEQ ID NO: 2506900 - DNA, 25 bp, Homo sapien
tacccatgtggcgtgtaacagtagt

SEQ ID NO: 2506901 - DNA, 25 bp, Homo sapien
gatatcccaacctacaaagaagaag

SEQ ID NO: 2506902 - DNA, 25 bp, Homo sapien
ggttactttacgtcatttcagaatc

SEQ ID NO: 2506903 - DNA, 25 bp, Homo sapien
caggaagcaccaactaataagcttc

SEQ ID NO: 2506904 - DNA, 25 bp, Homo sapien
tattacaaagcaatcagggatttgc

SEQ ID NO: 2506905 - DNA, 25 bp, Homo sapien
caaggccagtaagcgaatgtcagta

SEQ ID NO: 2506906 - DNA, 25 bp, Homo sapien
cataatgcataaagcagggcctagg

SEQ ID NO: 2506907 - DNA, 25 bp, Homo sapien
tgcctgtgtgtataccgtgggaacc

SEQ ID NO: 2506908 - DNA, 25 bp, Homo sapien
caatcatgctgggacaggctatcca

SEQ ID NO: 2506909 - DNA, 25 bp, Homo sapien
tttcagtggtcatcaactgcactcc

SEQ ID NO: 2506910 - DNA, 25 bp, Homo sapien
gaacgatctgtggaagagtaactcc

SEQ ID NO: 2506911 - DNA, 25 bp, Homo sapien
agatttctggtgaaccctgtggtta

SEQ ID NO: 2506912 - DNA, 25 bp, Homo sapien
ttttgaaagtattcctcgcaggaga

SEQ ID NO: 2506913 - DNA, 25 bp, Homo sapien
gctaaatggtgctaaggactgctca

SEQ ID NO: 2506914 - DNA, 25 bp, Homo sapien
ggcttccaatgggtgtagaccaaaa

SEQ ID NO: 2506915 - DNA, 25 bp, Homo sapien
cttttgactatgaacaccttgggat

SEQ ID NO: 2506916 - DNA, 25 bp, Homo sapien
gagagcatacttagggacacaaaac

SEQ ID NO: 2506917 - DNA, 25 bp, Homo sapien
cagccataggatttaattatttgca

SEQ ID NO: 2506918 - DNA, 25 bp, Homo sapien
caatggcccccttgttaatacagcc

SEQ ID NO: 2506919 - DNA, 25 bp, Homo sapien
gactgtcatattgctaaatatatgc

SEQ ID NO: 2506920 - DNA, 25 bp, Homo sapien
tatatgctatatggttgatgtaaaa

SEQ ID NO: 2506921 - DNA, 25 bp, Homo sapien
taaaatcctgacagtcatacaatac

SEQ ID NO: 2506922 - DNA, 25 bp, Homo sapien
gatgtgtatggaccctgttatggcc

SEQ ID NO: 2506923 - DNA, 25 bp, Homo sapien
aagctctttaattatgtgcacacag

SEQ ID NO: 2506924 - DNA, 25 bp, Homo sapien
tttgtatatagtaaaccagaagatg

SEQ ID NO: 2506925 - DNA, 25 bp, Homo sapien
aatgtcaagttttactgagtcacca

SEQ ID NO: 2506926 - DNA, 25 bp, Homo sapien
aatgccacaggttaaaatgtcaagt

SEQ ID NO: 2506927 - DNA, 25 bp, Homo sapien
taaaatgtcaagttttactgagtca

SEQ ID NO: 2506928 - DNA, 25 bp, Homo sapien
gtcaagttttactgagtcaccaact

SEQ ID NO: 2506929 - DNA, 25 bp, Homo sapien
ttgatctgcctgttctccaagaaca

SEQ ID NO: 2506930 - DNA, 25 bp, Homo sapien
tttgatctgcctgttctccaagaac

SEQ ID NO: 2506931 - DNA, 25 bp, Homo sapien
ctcttttgatctgcctgttctccaa

SEQ ID NO: 2506932 - DNA, 25 bp, Homo sapien
cttttgatctgcctgttctccaaga

SEQ ID NO: 2506933 - DNA, 25 bp, Homo sapien
gatccaagttcctctagttgttttc

SEQ ID NO: 2506934 - DNA, 25 bp, Homo sapien
tccggaagatccaagttcctctagt

SEQ ID NO: 2506935 - DNA, 25 bp, Homo sapien
gaagatccaagttcctctagttgtt

SEQ ID NO: 2506936 - DNA, 25 bp, Homo sapien
attctccggaagatccaagttcctc

SEQ ID NO: 2506937 - DNA, 25 bp, Homo sapien
cttttgcgaagtagagagagttccc

SEQ ID NO: 2506938 - DNA, 25 bp, Homo sapien
gcgaagtagagagagttccctttga

SEQ ID NO: 2506939 - DNA, 25 bp, Homo sapien
agtagagagagttccctttgatgtt

SEQ ID NO: 2506940 - DNA, 25 bp, Homo sapien
ttgcgaagtagagagagttcccttt

SEQ ID NO: 2506941 - DNA, 25 bp, Homo sapien
aggaaatggtagttccatgcttgga

SEQ ID NO: 2506942 - DNA, 25 bp, Homo sapien
tagttccatgcttggaaccatggct

SEQ ID NO: 2506943 - DNA, 25 bp, Homo sapien
ctgaaagctaacaggattgatagat

SEQ ID NO: 2506944 - DNA, 25 bp, Homo sapien
acaggattgatagatgctgttggag

SEQ ID NO: 2506945 - DNA, 25 bp, Homo sapien
accaaaattagacttcgaaattcat

SEQ ID NO: 2506946 - DNA, 25 bp, Homo sapien
attagacttcgaaattcattatgtc

SEQ ID NO: 2506947 - DNA, 25 bp, Homo sapien
ttagtcttttttgaagccttgtata

SEQ ID NO: 2506948 - DNA, 25 bp, Homo sapien
tttttgaagccttgtatagtcttca

SEQ ID NO: 2506949 - DNA, 25 bp, Homo sapien
ctttgcctccaagacttctactttc

SEQ ID NO: 2506950 - DNA, 25 bp, Homo sapien
tctttgcctccaagacttctacttt

SEQ ID NO: 2506951 - DNA, 25 bp, Homo sapien
actagaaacaaaggttagtagacat

SEQ ID NO: 2506952 - DNA, 25 bp, Homo sapien
agtatgttaatacataatctcttat

SEQ ID NO: 2506953 - DNA, 25 bp, Homo sapien
atgaacaagtatgttaatacataat

SEQ ID NO: 2506954 - DNA, 25 bp, Homo sapien
tactagaaacaaaggttagtagaca

SEQ ID NO: 2506955 - DNA, 25 bp, Homo sapien
actctggccaggacttttaatacta

SEQ ID NO: 2506956 - DNA, 25 bp, Homo sapien
ctactctggccaggacttttaatac

SEQ ID NO: 2506957 - DNA, 25 bp, Homo sapien
tactctggccaggacttttaatact

SEQ ID NO: 2506958 - DNA, 25 bp, Homo sapien
ctcttgcctaactactctggccagg

SEQ ID NO: 2506959 - DNA, 25 bp, Homo sapien
caggttaacttccatgtaaatggtt

SEQ ID NO: 2506960 - DNA, 25 bp, Homo sapien
gtaaatggttttgagcaattatatt

SEQ ID NO: 2506961 - DNA, 25 bp, Homo sapien
gcaggttaacttccatgtaaatggt

SEQ ID NO: 2506962 - DNA, 25 bp, Homo sapien
catgtaaatggttttgagcaattat

SEQ ID NO: 2506963 - DNA, 25 bp, Homo sapien
tcaggcaagctcagggtagttgtgc

SEQ ID NO: 2506964 - DNA, 25 bp, Homo sapien
gaactagtggccatttgacactccg

SEQ ID NO: 2506965 - DNA, 25 bp, Homo sapien
gaaattattcagcttggtctctctc

SEQ ID NO: 2506966 - DNA, 25 bp, Homo sapien
cactccgaccatctgtgttgctaga

SEQ ID NO: 2506967 - DNA, 25 bp, Homo sapien
tctgtaccaggggatcactccagtc

SEQ ID NO: 2506968 - DNA, 25 bp, Homo sapien
taaccaactcagactccctagagcc

SEQ ID NO: 2506969 - DNA, 25 bp, Homo sapien
ggatcactccagtccctaaccaact

SEQ ID NO: 2506970 - DNA, 25 bp, Homo sapien
tgtagacctcagtcgggagatccca

SEQ ID NO: 2506971 - DNA, 25 bp, Homo sapien
tccacataattctgtgtaacaggct

SEQ ID NO: 2506972 - DNA, 25 bp, Homo sapien
tcactcccaagtggatgactgtcct

SEQ ID NO: 2506973 - DNA, 25 bp, Homo sapien
ctgtgtcactcccaagtggatgact

SEQ ID NO: 2506974 - DNA, 25 bp, Homo sapien
taattctgtgtaacaggctgcagac

SEQ ID NO: 2506975 - DNA, 25 bp, Homo sapien
ttctgggcaattgcagctcgctgca

SEQ ID NO: 2506976 - DNA, 25 bp, Homo sapien
tacgctcatgaagcttatgcttttc

SEQ ID NO: 2506977 - DNA, 25 bp, Homo sapien
ctttttctgggcaattgcagctcgc

SEQ ID NO: 2506978 - DNA, 25 bp, Homo sapien
ttcttctctgtctgtgatacgctca

SEQ ID NO: 2506979 - DNA, 25 bp, Homo sapien
ggcttctaaaatttcggcattcttg

SEQ ID NO: 2506980 - DNA, 25 bp, Homo sapien
tcagcttctagttgcgctttttcag

SEQ ID NO: 2506981 - DNA, 25 bp, Homo sapien
gcaagtcattctctgactgtgcaag

SEQ ID NO: 2506982 - DNA, 25 bp, Homo sapien
agttgcgctttttcagcttggcttc

SEQ ID NO: 2506983 - DNA, 25 bp, Homo sapien
gagaagaaagaagataaattaaagc

SEQ ID NO: 2506984 - DNA, 25 bp, Homo sapien
agagaagaaagaagataaattaaag

SEQ ID NO: 2506985 - DNA, 25 bp, Homo sapien
tctctgcattttcaatagtcacaat

SEQ ID NO: 2506986 - DNA, 25 bp, Homo sapien
cattttcaatagtcacaatttgttg

SEQ ID NO: 2506987 - DNA, 25 bp, Homo sapien
ctgttttaggtcagaattttcattt

SEQ ID NO: 2506988 - DNA, 25 bp, Homo sapien
ttcaatagtcacaatttgttgctga

SEQ ID NO: 2506989 - DNA, 25 bp, Homo sapien
aagattgagacttcaagaaactagg

SEQ ID NO: 2506990 - DNA, 25 bp, Homo sapien
actaggttgtgttcacgtataacaa

SEQ ID NO: 2506991 - DNA, 25 bp, Homo sapien
ctgtttgacaccagagcacaaacac

SEQ ID NO: 2506992 - DNA, 25 bp, Homo sapien
caacaaaaggcattattaagaatcc

SEQ ID NO: 2506993 - DNA, 25 bp, Homo sapien
tccaagaagcgtctaggtgtacaag

SEQ ID NO: 2506994 - DNA, 25 bp, Homo sapien
tacactgtaggtcattaactgcaag

SEQ ID NO: 2506995 - DNA, 25 bp, Homo sapien
cagttctaggtgacgacaaggtcca

SEQ ID NO: 2506996 - DNA, 25 bp, Homo sapien
tcagaatagggattccagaggctac

SEQ ID NO: 2506997 - DNA, 25 bp, Homo sapien
atatgctatttcgacattcaacaaa

SEQ ID NO: 2506998 - DNA, 25 bp, Homo sapien
tggcctcccaatatatgctatttcg

SEQ ID NO: 2506999 - DNA, 25 bp, Homo sapien
ggcctcccaatatatgctatttcga

SEQ ID NO: 2507000 - DNA, 25 bp, Homo sapien
tgctatttcgacattcaacaaatat

SEQ ID NO: 2507001 - DNA, 25 bp, Homo sapien
cttccaatatgatagtcactagcaa

SEQ ID NO: 2507002 - DNA, 25 bp, Homo sapien
gagtttatactccaacagtgttgtc

SEQ ID NO: 2507003 - DNA, 25 bp, Homo sapien
tccaatatgatagtcactagcaaca

SEQ ID NO: 2507004 - DNA, 25 bp, Homo sapien
ctacccttgagtttatactccaaca

SEQ ID NO: 2507005 - DNA, 25 bp, Homo sapien
tctcatgagaatggcagtagccttc

SEQ ID NO: 2507006 - DNA, 25 bp, Homo sapien
gcactggaaattgacactggccatt

SEQ ID NO: 2507007 - DNA, 25 bp, Homo sapien
caaagagtcctacaagtctcatgag

SEQ ID NO: 2507008 - DNA, 25 bp, Homo sapien
taatgtgagtccctgctatcaaagg

SEQ ID NO: 2507009 - DNA, 25 bp, Homo sapien
tactcttggcactatgataagctag

SEQ ID NO: 2507010 - DNA, 25 bp, Homo sapien
gataggacagcagacaaacgagaga

SEQ ID NO: 2507011 - DNA, 25 bp, Homo sapien
gagttgcgttgctgtcataaccaaa

SEQ ID NO: 2507012 - DNA, 25 bp, Homo sapien
gaataaatgtgcagcggagcagcct

SEQ ID NO: 2507013 - DNA, 25 bp, Homo sapien
catgttccttcaagatatgactaca

SEQ ID NO: 2507014 - DNA, 25 bp, Homo sapien
tatgactacatttcgagatagggcc

SEQ ID NO: 2507015 - DNA, 25 bp, Homo sapien
gagaggtcttaggagaaaccaagcc

SEQ ID NO: 2507016 - DNA, 25 bp, Homo sapien
taaaaaaccttctgttatagactga

SEQ ID NO: 2507017 - DNA, 25 bp, Homo sapien
tgaattaccttacccgacagcaggt

SEQ ID NO: 2507018 - DNA, 25 bp, Homo sapien
caagaactcacccatgtgctaggag

SEQ ID NO: 2507019 - DNA, 25 bp, Homo sapien
tcataagacccgcatttctgaaggg

SEQ ID NO: 2507020 - DNA, 25 bp, Homo sapien
actcaagaggacagggtaccgcaag

SEQ ID NO: 2507021 - DNA, 25 bp, Homo sapien
gtatcataataatggtacaggcgcc

SEQ ID NO: 2507022 - DNA, 25 bp, Homo sapien
tacaggcgcctaaagttccaactac

SEQ ID NO: 2507023 - DNA, 25 bp, Homo sapien
cattaaagcatactataaagcctct

SEQ ID NO: 2507024 - DNA, 25 bp, Homo sapien
ggactgagtaccacaaccagacatt

SEQ ID NO: 2507025 - DNA, 25 bp, Homo sapien
cctcagttcagggagagagtactaa

SEQ ID NO: 2507026 - DNA, 25 bp, Homo sapien
aaaggactgctgacacacactggca

SEQ ID NO: 2507027 - DNA, 25 bp, Homo sapien
tggcacatgaacagacaaccagatg

SEQ ID NO: 2507028 - DNA, 25 bp, Homo sapien
tggcccttaaacacatggaacattg

SEQ ID NO: 2507029 - DNA, 25 bp, Homo sapien
gaaatatcatatgggcaaccacaga

SEQ ID NO: 2507030 - DNA, 25 bp, Homo sapien
taactaaatgcaacatgtgatcctg

SEQ ID NO: 2507031 - DNA, 25 bp, Homo sapien
gaaagacatcagtgggacaactggt

SEQ ID NO: 2507032 - DNA, 25 bp, Homo sapien
tgatcctgaattgggttttagacca

SEQ ID NO: 2507033 - DNA, 25 bp, Homo sapien
ctgccatctgtgaagcccgcaattt

SEQ ID NO: 2507034 - DNA, 25 bp, Homo sapien
tctgctaatctgttctcgagttcta

SEQ ID NO: 2507035 - DNA, 25 bp, Homo sapien
ccttcctggtgatctcttctgccat

SEQ ID NO: 2507036 - DNA, 25 bp, Homo sapien
tgaagcccgcaatttctcttcatac

SEQ ID NO: 2507037 - DNA, 25 bp, Homo sapien
ttgataaccttcttctttggcagct

SEQ ID NO: 2507038 - DNA, 25 bp, Homo sapien
tggcagcttgtactttacgtattaa

SEQ ID NO: 2507039 - DNA, 25 bp, Homo sapien
tttctactaagagcactttgtgatg

SEQ ID NO: 2507040 - DNA, 25 bp, Homo sapien
tacgtattaattcacgatccttttc

SEQ ID NO: 2507041 - DNA, 25 bp, Homo sapien
taaagaggttctgtgacctaagcct

SEQ ID NO: 2507042 - DNA, 25 bp, Homo sapien
taaaaataagcctactcggctgggc

SEQ ID NO: 2507043 - DNA, 25 bp, Homo sapien
tcaagcatagctacaggccaaaggt

SEQ ID NO: 2507044 - DNA, 25 bp, Homo sapien
tctgcactaggctacaatgaactgg

SEQ ID NO: 2507045 - DNA, 25 bp, Homo sapien
tagctcactcttagctcttgctgtc

SEQ ID NO: 2507046 - DNA, 25 bp, Homo sapien
tcttgctgtctccagtttgatgtct

SEQ ID NO: 2507047 - DNA, 25 bp, Homo sapien
tccagttcactttgaatcttattcc

SEQ ID NO: 2507048 - DNA, 25 bp, Homo sapien
tctctttctagctcactcttagctc

SEQ ID NO: 2507049 - DNA, 25 bp, Homo sapien
tgttcactgcttgattgtagctctt

SEQ ID NO: 2507050 - DNA, 25 bp, Homo sapien
ttttgttcactgcttgattgtagct

SEQ ID NO: 2507051 - DNA, 25 bp, Homo sapien
ggatctgactgtagcctgcatctca

SEQ ID NO: 2507052 - DNA, 25 bp, Homo sapien
caactgccgcacctgtattctttgg

SEQ ID NO: 2507053 - DNA, 25 bp, Homo sapien
tgtgagatcaacattaagcagctgg

SEQ ID NO: 2507054 - DNA, 25 bp, Homo sapien
cgagcaagttgttccactcgtttgc

SEQ ID NO: 2507055 - DNA, 25 bp, Homo sapien
tagaaccacatcagagttaaaattt

SEQ ID NO: 2507056 - DNA, 25 bp, Homo sapien
tacccacagttctgtttaccatgta

SEQ ID NO: 2507057 - DNA, 25 bp, Homo sapien
ggaagtctattacatatacccacag

SEQ ID NO: 2507058 - DNA, 25 bp, Homo sapien
taacttatcatggtctactgaattc

SEQ ID NO: 2507059 - DNA, 25 bp, Homo sapien
aacctgactatggtatctcttgctg

SEQ ID NO: 2507060 - DNA, 25 bp, Homo sapien
tgtttgtgcctttaccaaacttgga

SEQ ID NO: 2507061 - DNA, 25 bp, Homo sapien
cagcacttgataatgtgccacttcc

SEQ ID NO: 2507062 - DNA, 25 bp, Homo sapien
cttcttgaagctacatgtttgtgcc

SEQ ID NO: 2507063 - DNA, 25 bp, Homo sapien
ccactataactgtgttaactgtaca

SEQ ID NO: 2507064 - DNA, 25 bp, Homo sapien
tgaacaattcatgttgtgggaagtc

SEQ ID NO: 2507065 - DNA, 25 bp, Homo sapien
cctcaggaccactataactgtgtta

SEQ ID NO: 2507066 - DNA, 25 bp, Homo sapien
caaatttgattgtaaaacgtgtgtt

SEQ ID NO: 2507067 - DNA, 25 bp, Homo sapien
aacagacatgcaataaggaagatat

SEQ ID NO: 2507068 - DNA, 25 bp, Homo sapien
aaacagacatgcaataaggaagata

SEQ ID NO: 2507069 - DNA, 25 bp, Homo sapien
taaacagacatgcaataaggaagat

SEQ ID NO: 2507070 - DNA, 25 bp, Homo sapien
gttcatagcgaagcttattatatac

SEQ ID NO: 2507071 - DNA, 25 bp, Homo sapien
agaaatgtatgttcatagcgaagct

SEQ ID NO: 2507072 - DNA, 25 bp, Homo sapien
tgtatgttcatagcgaagcttatta

SEQ ID NO: 2507073 - DNA, 25 bp, Homo sapien
catagcgaagcttattatatacagc

SEQ ID NO: 2507074 - DNA, 25 bp, Homo sapien
acaagtatcctacatacagaagtag

SEQ ID NO: 2507075 - DNA, 25 bp, Homo sapien
taaacaaaattcgtactcactccaa

SEQ ID NO: 2507076 - DNA, 25 bp, Homo sapien
tcactccaatagtcacttttacaaa

SEQ ID NO: 2507077 - DNA, 25 bp, Homo sapien
atgaatttggaaaggtcttcataac

SEQ ID NO: 2507078 - DNA, 25 bp, Homo sapien
gtatagtatgaggaaagtgttgatc

SEQ ID NO: 2507079 - DNA, 25 bp, Homo sapien
agtgtatagtatgaggaaagtgttg

SEQ ID NO: 2507080 - DNA, 25 bp, Homo sapien
tagtatgaggaaagtgttgatctct

SEQ ID NO: 2507081 - DNA, 25 bp, Homo sapien
tatagtatgaggaaagtgttgatct

SEQ ID NO: 2507082 - DNA, 25 bp, Homo sapien
taacatgtaagaatgtagcacacct

SEQ ID NO: 2507083 - DNA, 25 bp, Homo sapien
tgtaagaatgtagcacacctttcaa

SEQ ID NO: 2507084 - DNA, 25 bp, Homo sapien
gtagcacacctttcaaaatatagat

SEQ ID NO: 2507085 - DNA, 25 bp, Homo sapien
taaaataacatgtaagaatgtagca

SEQ ID NO: 2507086 - DNA, 25 bp, Homo sapien
tacaactgttttgggcaattaccgc

SEQ ID NO: 2507087 - DNA, 25 bp, Homo sapien
aaagctgctggcattctgaataccc

SEQ ID NO: 2507088 - DNA, 25 bp, Homo sapien
gaaagatacaggagacactaacagg

SEQ ID NO: 2507089 - DNA, 25 bp, Homo sapien
ggaacacatgcaattccctggagtg

SEQ ID NO: 2507090 - DNA, 25 bp, Homo sapien
gtataccaaaatctgttctaggaac

SEQ ID NO: 2507091 - DNA, 25 bp, Homo sapien
ttctaggaacttggaatataacaat

SEQ ID NO: 2507092 - DNA, 25 bp, Homo sapien
tataccaaaatctgttctaggaact

SEQ ID NO: 2507093 - DNA, 25 bp, Homo sapien
tctaggaacttggaatataacaatg

SEQ ID NO: 2507094 - DNA, 25 bp, Homo sapien
tctagattcctaaaacgttctctca

SEQ ID NO: 2507095 - DNA, 25 bp, Homo sapien
ttcatctagattcctaaaacgttct

SEQ ID NO: 2507096 - DNA, 25 bp, Homo sapien
tcatctagattcctaaaacgttctc

SEQ ID NO: 2507097 - DNA, 25 bp, Homo sapien
catctagattcctaaaacgttctct

SEQ ID NO: 2507098 - DNA, 25 bp, Homo sapien
ttcttgttgtatttgggctcttagc

SEQ ID NO: 2507099 - DNA, 25 bp, Homo sapien
cttgttgtatttgggctcttagcaa

SEQ ID NO: 2507100 - DNA, 25 bp, Homo sapien
gtatttgggctcttagcaattccaa

SEQ ID NO: 2507101 - DNA, 25 bp, Homo sapien
ttgtatttgggctcttagcaattcc

SEQ ID NO: 2507102 - DNA, 25 bp, Homo sapien
tgttggcagctaagactatcatgtt

SEQ ID NO: 2507103 - DNA, 25 bp, Homo sapien
tctggcacataggaaccactcaact

SEQ ID NO: 2507104 - DNA, 25 bp, Homo sapien
aaggctcatttttactctcacactg

SEQ ID NO: 2507105 - DNA, 25 bp, Homo sapien
tgttaggaataactatgttggcagc

SEQ ID NO: 2507106 - DNA, 25 bp, Homo sapien
catcagcaagctatggcagaacttt

SEQ ID NO: 2507107 - DNA, 25 bp, Homo sapien
aaattgagcttccagagacgaaaac

SEQ ID NO: 2507108 - DNA, 25 bp, Homo sapien
tacactgcatggaattaatggcagg

SEQ ID NO: 2507109 - DNA, 25 bp, Homo sapien
aaactgtaaacccatagacctatgg

SEQ ID NO: 2507110 - DNA, 25 bp, Homo sapien
gggaagacaagcatgtaccactaca

SEQ ID NO: 2507111 - DNA, 25 bp, Homo sapien
tgggaagacaagcatgtaccactac

SEQ ID NO: 2507112 - DNA, 25 bp, Homo sapien
ttcattaaacaggtgcttgagttca

SEQ ID NO: 2507113 - DNA, 25 bp, Homo sapien
taaacaggtgcttgagttcattttg

SEQ ID NO: 2507114 - DNA, 25 bp, Homo sapien
gttttctctactaattctcctctta

SEQ ID NO: 2507115 - DNA, 25 bp, Homo sapien
ttgcttttcattaaacaggtgcttg

SEQ ID NO: 2507116 - DNA, 25 bp, Homo sapien
aggcttataaattcataacccactt

SEQ ID NO: 2507117 - DNA, 25 bp, Homo sapien
taacccacttgatatcatacttagt

SEQ ID NO: 2507118 - DNA, 25 bp, Homo sapien
acatttagccatctggatacattta

SEQ ID NO: 2507119 - DNA, 25 bp, Homo sapien
catttaatcttatacgtcctgctac

SEQ ID NO: 2507120 - DNA, 25 bp, Homo sapien
tctggaactccgactgagaacctgt

SEQ ID NO: 2507121 - DNA, 25 bp, Homo sapien
tattgggaaaagtgtccatatcggt

SEQ ID NO: 2507122 - DNA, 25 bp, Homo sapien
catatcggtaaatgtgctgacaacc

SEQ ID NO: 2507123 - DNA, 25 bp, Homo sapien
gagaacctgtcaatccactgtctcc

SEQ ID NO: 2507124 - DNA, 25 bp, Homo sapien
tcctttcttgctaaggcagaatctc

SEQ ID NO: 2507125 - DNA, 25 bp, Homo sapien
ttcccactcctttcttgctaaggca

SEQ ID NO: 2507126 - DNA, 25 bp, Homo sapien
cactcctttcttgctaaggcagaat

SEQ ID NO: 2507127 - DNA, 25 bp, Homo sapien
ttcttgctaaggcagaatctcagga

SEQ ID NO: 2507128 - DNA, 25 bp, Homo sapien
tctccagggtatcagggaagatcac

SEQ ID NO: 2507129 - DNA, 25 bp, Homo sapien
ggctgactagctatggacctgagaa

SEQ ID NO: 2507130 - DNA, 25 bp, Homo sapien
caagcaaagattaggtggaagccaa

SEQ ID NO: 2507131 - DNA, 25 bp, Homo sapien
cctgcaatgtcagaggagaccacat

SEQ ID NO: 2507132 - DNA, 25 bp, Homo sapien
taaaacaggacacagcccataaact

SEQ ID NO: 2507133 - DNA, 25 bp, Homo sapien
gaaaactgtggctagctactgaaac

SEQ ID NO: 2507134 - DNA, 25 bp, Homo sapien
tgtgagaaacttaacatgctgattc

SEQ ID NO: 2507135 - DNA, 25 bp, Homo sapien
gagacaaattctccccaatctacag

SEQ ID NO: 2507136 - DNA, 25 bp, Homo sapien
ccgacggatggtctccattcctggt

SEQ ID NO: 2507137 - DNA, 25 bp, Homo sapien
agtgttagtccttagcagggccgac

SEQ ID NO: 2507138 - DNA, 25 bp, Homo sapien
gaaaaacgatggctaagtgttagtc

SEQ ID NO: 2507139 - DNA, 25 bp, Homo sapien
ggcccaggcctgtgaaaaacgatgg

SEQ ID NO: 2507140 - DNA, 25 bp, Homo sapien
ctgcagccgtcagcatatacatgcc

SEQ ID NO: 2507141 - DNA, 25 bp, Homo sapien
tgcagccgtcagcatatacatgcct

SEQ ID NO: 2507142 - DNA, 25 bp, Homo sapien
cagccgtcagcatatacatgcctgt

SEQ ID NO: 2507143 - DNA, 25 bp, Homo sapien
gcagccgtcagcatatacatgcctg

SEQ ID NO: 2507144 - DNA, 25 bp, Homo sapien
cgaaggatacgggtggagataacct

SEQ ID NO: 2507145 - DNA, 25 bp, Homo sapien
tctcgaaggatacgggtggagataa

SEQ ID NO: 2507146 - DNA, 25 bp, Homo sapien
cactggtatctcgaaggatacgggt

SEQ ID NO: 2507147 - DNA, 25 bp, Homo sapien
gctggtcccactggtatctcgaagg

SEQ ID NO: 2507148 - DNA, 25 bp, Homo sapien
cccctccagttcctgctcatccatt

SEQ ID NO: 2507149 - DNA, 25 bp, Homo sapien
cctccagttcctgctcatccattga

SEQ ID NO: 2507150 - DNA, 25 bp, Homo sapien
ccctccagttcctgctcatccattg

SEQ ID NO: 2507151 - DNA, 25 bp, Homo sapien
ctccagttcctgctcatccattgac

SEQ ID NO: 2507152 - DNA, 25 bp, Homo sapien
tacatttgtttgtggtcttgtccag

SEQ ID NO: 2507153 - DNA, 25 bp, Homo sapien
agtagtgcctggttgcaatcctcgg

SEQ ID NO: 2507154 - DNA, 25 bp, Homo sapien
gacaagatcttggtcagtagtgcct

SEQ ID NO: 2507155 - DNA, 25 bp, Homo sapien
ggccttagtggaaacaatcttgcca

SEQ ID NO: 2507156 - DNA, 25 bp, Homo sapien
gcctggaagtcacggatagcagcat

SEQ ID NO: 2507157 - DNA, 25 bp, Homo sapien
ctactgctgttaggtgtactgttgc

SEQ ID NO: 2507158 - DNA, 25 bp, Homo sapien
ttgcttgggctaggtggtgccatct

SEQ ID NO: 2507159 - DNA, 25 bp, Homo sapien
tgccatctgctgagccaatgacaca

SEQ ID NO: 2507160 - DNA, 25 bp, Homo sapien
agcagaggggcaaactctaaagctg

SEQ ID NO: 2507161 - DNA, 25 bp, Homo sapien
gcagaggggcaaactctaaagctgg

SEQ ID NO: 2507162 - DNA, 25 bp, Homo sapien
cagaggggcaaactctaaagctggc

SEQ ID NO: 2507163 - DNA, 25 bp, Homo sapien
agaggggcaaactctaaagctggct

SEQ ID NO: 2507164 - DNA, 25 bp, Homo sapien
gtcacaatattaggtaggcaaaagc

SEQ ID NO: 2507165 - DNA, 25 bp, Homo sapien
tctttttataggttacaatgacacc

SEQ ID NO: 2507166 - DNA, 25 bp, Homo sapien
cagcagagacgtaagaaaaccggtt

SEQ ID NO: 2507167 - DNA, 25 bp, Homo sapien
caaaaccatagtaatgagttaatgt

SEQ ID NO: 2507168 - DNA, 25 bp, Homo sapien
cttcctctaaagtaggtcataagat

SEQ ID NO: 2507169 - DNA, 25 bp, Homo sapien
ctctaaagtaggtcataagatcctc

SEQ ID NO: 2507170 - DNA, 25 bp, Homo sapien
agatcctcaatccagaggtgtcctc

SEQ ID NO: 2507171 - DNA, 25 bp, Homo sapien
tcctctaaagtaggtcataagatcc

SEQ ID NO: 2507172 - DNA, 25 bp, Homo sapien
gctccatgaagagtttcacgtgcgt

SEQ ID NO: 2507173 - DNA, 25 bp, Homo sapien
tcacgtgcgtctctctgcctacttt

SEQ ID NO: 2507174 - DNA, 25 bp, Homo sapien
ggccaattaccaaactggctacaca

SEQ ID NO: 2507175 - DNA, 25 bp, Homo sapien
gctggaggtacttaaacgtctggcc

SEQ ID NO: 2507176 - DNA, 25 bp, Homo sapien
ccacgtgctgacgtatggcccagaa

SEQ ID NO: 2507177 - DNA, 25 bp, Homo sapien
aatgtgaagtatcccgggagaggtc

SEQ ID NO: 2507178 - DNA, 25 bp, Homo sapien
tccgcttacggaggcattgggacta

SEQ ID NO: 2507179 - DNA, 25 bp, Homo sapien
gctcccgtccctagggaaatgtgaa

SEQ ID NO: 2507180 - DNA, 25 bp, Homo sapien
ggcgggagcggccacgggtgacagc

SEQ ID NO: 2507181 - DNA, 25 bp, Homo sapien
ccggagccgttagagggaggagaca

SEQ ID NO: 2507182 - DNA, 25 bp, Homo sapien
ccaccgacgccggttgctgccggag

SEQ ID NO: 2507183 - DNA, 25 bp, Homo sapien
ctgcgctcccgaaggcgttcctgga

SEQ ID NO: 2507184 - DNA, 25 bp, Homo sapien
actacttgtcttaaggctgtaaaca

SEQ ID NO: 2507185 - DNA, 25 bp, Homo sapien
gggtcacatggggaactacttgtct

SEQ ID NO: 2507186 - DNA, 25 bp, Homo sapien
ggctgtaaacaatagttggaagagg

SEQ ID NO: 2507187 - DNA, 25 bp, Homo sapien
aacaatagttggaagaggagttgct

SEQ ID NO: 2507188 - DNA, 25 bp, Homo sapien
tgtatcttgagttttggaggtgaat

SEQ ID NO: 2507189 - DNA, 25 bp, Homo sapien
gtatcttgagttttggaggtgaatc

SEQ ID NO: 2507190 - DNA, 25 bp, Homo sapien
tatcttgagttttggaggtgaatca

SEQ ID NO: 2507191 - DNA, 25 bp, Homo sapien
gaagaaaggcgcaggataacaaaac

SEQ ID NO: 2507192 - DNA, 25 bp, Homo sapien
tgaaagaactcaacatatgccccat

SEQ ID NO: 2507193 - DNA, 25 bp, Homo sapien
caaaattggttgtgaagtccagtca

SEQ ID NO: 2507194 - DNA, 25 bp, Homo sapien
tttgaatgcaaccataccagcccat

SEQ ID NO: 2507195 - DNA, 25 bp, Homo sapien
tcatacctggttctcgggcgttcat

SEQ ID NO: 2507196 - DNA, 25 bp, Homo sapien
gtcatacctggttctcgggcgttca

SEQ ID NO: 2507197 - DNA, 25 bp, Homo sapien
catatgactgtgtcatacctggttc

SEQ ID NO: 2507198 - DNA, 25 bp, Homo sapien
cttcgagggcatatgactgtgtcat

SEQ ID NO: 2507199 - DNA, 25 bp, Homo sapien
taaatctcttcattgcagacatgta

SEQ ID NO: 2507200 - DNA, 25 bp, Homo sapien
tcacagcaatggcagtttttccaat

SEQ ID NO: 2507201 - DNA, 25 bp, Homo sapien
gacatgtatggctgtttggtagtat

SEQ ID NO: 2507202 - DNA, 25 bp, Homo sapien
ccaattggtgtgtagtcctcaataa

SEQ ID NO: 2507203 - DNA, 25 bp, Homo sapien
gcatgcatcattttcaggattgtta

SEQ ID NO: 2507204 - DNA, 25 bp, Homo sapien
ttatgcatgcatcattttcaggatt

SEQ ID NO: 2507205 - DNA, 25 bp, Homo sapien
gcatcattttcaggattgttagtaa

SEQ ID NO: 2507206 - DNA, 25 bp, Homo sapien
gtaagactgcatttatgcatgcatc

SEQ ID NO: 2507207 - DNA, 25 bp, Homo sapien
cccatctccaacaaagcagacttta

SEQ ID NO: 2507208 - DNA, 25 bp, Homo sapien
ggcccaattcgctcatatttacttc

SEQ ID NO: 2507209 - DNA, 25 bp, Homo sapien
aactttgcctccttgcatcacaagg

SEQ ID NO: 2507210 - DNA, 25 bp, Homo sapien
tacttcaatgacagtacctttggta

SEQ ID NO: 2507211 - DNA, 25 bp, Homo sapien
caaatggtatccatagtgtttacag

SEQ ID NO: 2507212 - DNA, 25 bp, Homo sapien
aacgctctccatttttgggtctcag

SEQ ID NO: 2507213 - DNA, 25 bp, Homo sapien
cagtccctggggtgcgaaaacgctc

SEQ ID NO: 2507214 - DNA, 25 bp, Homo sapien
gcatggtgacagccacagagctgcc

SEQ ID NO: 2507215 - DNA, 25 bp, Homo sapien
gcgatatttctaattcacactcaag

SEQ ID NO: 2507216 - DNA, 25 bp, Homo sapien
caagtctacagtgctatgccttaac

SEQ ID NO: 2507217 - DNA, 25 bp, Homo sapien
cagggatgccctatgttacttggta

SEQ ID NO: 2507218 - DNA, 25 bp, Homo sapien
aaaacatttcatgacttgacagcga

SEQ ID NO: 2507219 - DNA, 25 bp, Homo sapien
gcctcgcagatggttgaattgtgtg

SEQ ID NO: 2507220 - DNA, 25 bp, Homo sapien
aatctgtccaaatgtcgctgcctcg

SEQ ID NO: 2507221 - DNA, 25 bp, Homo sapien
aattcccaagcaacgtacccagtgt

SEQ ID NO: 2507222 - DNA, 25 bp, Homo sapien
cgtacccagtgtgctctgttgcctc

SEQ ID NO: 2507223 - DNA, 25 bp, Homo sapien
gcgcgtaaaagccttgggcctctgt

SEQ ID NO: 2507224 - DNA, 25 bp, Homo sapien
ctaatcatgcgcgtaaaagccttgg

SEQ ID NO: 2507225 - DNA, 25 bp, Homo sapien
ttatgagcacagctagtgggccacc

SEQ ID NO: 2507226 - DNA, 25 bp, Homo sapien
gttatgagcacagctagtgggccac

SEQ ID NO: 2507227 - DNA, 25 bp, Homo sapien
tagatttgaggaaaatcccttcctg

SEQ ID NO: 2507228 - DNA, 25 bp, Homo sapien
agatttgaggaaaatcccttcctga

SEQ ID NO: 2507229 - DNA, 25 bp, Homo sapien
gatttgaggaaaatcccttcctgac

SEQ ID NO: 2507230 - DNA, 25 bp, Homo sapien
ccaattatgcaggagtcaacccgct

SEQ ID NO: 2507231 - DNA, 25 bp, Homo sapien
tgtgctctgtaaacactcctctctg

SEQ ID NO: 2507232 - DNA, 25 bp, Homo sapien
tgtggatactgagcaaacacgtggg

SEQ ID NO: 2507233 - DNA, 25 bp, Homo sapien
tcttaaagaacgaggacccactgtg

SEQ ID NO: 2507234 - DNA, 25 bp, Homo sapien
tcgtttatctcttacacctcatcct

SEQ ID NO: 2507235 - DNA, 25 bp, Homo sapien
tcaaattgtgttgggtatcagtatc

SEQ ID NO: 2507236 - DNA, 25 bp, Homo sapien
tcctcccaggatctaccagttgatg

SEQ ID NO: 2507237 - DNA, 25 bp, Homo sapien
atatacttaataatggaaggtctgc

SEQ ID NO: 2507238 - DNA, 25 bp, Homo sapien
aggctgccaagcagtcgccagcttg

SEQ ID NO: 2507239 - DNA, 25 bp, Homo sapien
tgccctgtcggacagctcagtctgt

SEQ ID NO: 2507240 - DNA, 25 bp, Homo sapien
tgccaaggagctgaaacgttctgcc

SEQ ID NO: 2507241 - DNA, 25 bp, Homo sapien
agtctgtccccagtagaaagagttc

SEQ ID NO: 2507242 - DNA, 25 bp, Homo sapien
gagtcgatagcctcagggaggccat

SEQ ID NO: 2507243 - DNA, 25 bp, Homo sapien
atccccgcctgctctagggacacag

SEQ ID NO: 2507244 - DNA, 25 bp, Homo sapien
gaatgattgcttattgactgaatgg

SEQ ID NO: 2507245 - DNA, 25 bp, Homo sapien
ccagaaacccagaagaccgagtgca

SEQ ID NO: 2507246 - DNA, 25 bp, Homo sapien
ccagaagaccgagtgcagctggcca

SEQ ID NO: 2507247 - DNA, 25 bp, Homo sapien
tacagggtgagtgaccaaagtagaa

SEQ ID NO: 2507248 - DNA, 25 bp, Homo sapien
cagacatcaaatgacaaaagtgtgc

SEQ ID NO: 2507249 - DNA, 25 bp, Homo sapien
acatttaggaatatgctgggctgga

SEQ ID NO: 2507250 - DNA, 25 bp, Homo sapien
gtaaggtgttttccctaatgcaaca

SEQ ID NO: 2507251 - DNA, 25 bp, Homo sapien
gaagatacacggatcacaggtctga

SEQ ID NO: 2507252 - DNA, 25 bp, Homo sapien
tatacacatcaacgcggtagaccag

SEQ ID NO: 2507253 - DNA, 25 bp, Homo sapien
tgaatagctgacaaggatcacgcag

SEQ ID NO: 2507254 - DNA, 25 bp, Homo sapien
gagaaggataacagcctcaccggct

SEQ ID NO: 2507255 - DNA, 25 bp, Homo sapien
tgagcaatatttagcagagccctgt

SEQ ID NO: 2507256 - DNA, 25 bp, Homo sapien
cagctcagaggcagtatggtcgtcc

SEQ ID NO: 2507257 - DNA, 25 bp, Homo sapien
gacactgagtacatgacgggaccta

SEQ ID NO: 2507258 - DNA, 25 bp, Homo sapien
gctgaaggcggtgaatggtatcccc

SEQ ID NO: 2507259 - DNA, 25 bp, Homo sapien
catcatgggtgagacgaacttcgcg

SEQ ID NO: 2507260 - DNA, 25 bp, Homo sapien
tgtggcagcgactcttcatcatggg

SEQ ID NO: 2507261 - DNA, 25 bp, Homo sapien
ggcacacaggatatggtcccagttt

SEQ ID NO: 2507262 - DNA, 25 bp, Homo sapien
tatagcaagaagagtcacggcaaag

SEQ ID NO: 2507263 - DNA, 25 bp, Homo sapien
tagcattcacggtgtctgtctgcag

SEQ ID NO: 2507264 - DNA, 25 bp, Homo sapien
gagctccagcttagaaatgcgagtc

SEQ ID NO: 2507265 - DNA, 25 bp, Homo sapien
aggatcacgttgatgcacctcccca

SEQ ID NO: 2507266 - DNA, 25 bp, Homo sapien
tccccaggagaactttagcattcac

SEQ ID NO: 2507267 - DNA, 25 bp, Homo sapien
gagtccgtgtcgtgtaaattggcca

SEQ ID NO: 2507268 - DNA, 25 bp, Homo sapien
gaataggctcaagtcttactcaggg

SEQ ID NO: 2507269 - DNA, 25 bp, Homo sapien
tatgacagacgtgggactgaacgtg

SEQ ID NO: 2507270 - DNA, 25 bp, Homo sapien
catggctaaatttctgtggctcaca

SEQ ID NO: 2507271 - DNA, 25 bp, Homo sapien
cgctcgtaggcctggtaggccacct

SEQ ID NO: 2507272 - DNA, 25 bp, Homo sapien
tgatgcaggtccgtcaggtcatgca

SEQ ID NO: 2507273 - DNA, 25 bp, Homo sapien
gatgtcccgcgagcgctcgtaggcc

SEQ ID NO: 2507274 - DNA, 25 bp, Homo sapien
ggctgtctcatgctgatgcaggtcc

SEQ ID NO: 2507275 - DNA, 25 bp, Homo sapien
aaagacttgcttgatacgtcccgcc

SEQ ID NO: 2507276 - DNA, 25 bp, Homo sapien
tttgttcacgatggtagcgctgccc

SEQ ID NO: 2507277 - DNA, 25 bp, Homo sapien
tattgaaaacgaacacaggtggagt

SEQ ID NO: 2507278 - DNA, 25 bp, Homo sapien
cagttcgagatttcacgtgggcatc

SEQ ID NO: 2507279 - DNA, 25 bp, Homo sapien
ctttcaggcgtcacctcacctgaag

SEQ ID NO: 2507280 - DNA, 25 bp, Homo sapien
ggcgtcacctcacctgaaggacccc

SEQ ID NO: 2507281 - DNA, 25 bp, Homo sapien
gcgtcacctcacctgaaggacccct

SEQ ID NO: 2507282 - DNA, 25 bp, Homo sapien
tcaggcgtcacctcacctgaaggac

SEQ ID NO: 2507283 - DNA, 25 bp, Homo sapien
aaccgagcagtaaataaacacctgt

SEQ ID NO: 2507284 - DNA, 25 bp, Homo sapien
tgttcttactcctttaattctcaac

SEQ ID NO: 2507285 - DNA, 25 bp, Homo sapien
caaaccgagcagtaaataaacacct

SEQ ID NO: 2507286 - DNA, 25 bp, Homo sapien
cagtaaataaacacctgttcttact

SEQ ID NO: 2507287 - DNA, 25 bp, Homo sapien
gacagccttgtatgcacaggaatgt

SEQ ID NO: 2507288 - DNA, 25 bp, Homo sapien
gacctctcgttacaggacagccttg

SEQ ID NO: 2507289 - DNA, 25 bp, Homo sapien
tgctctcacagacctctcgttacag

SEQ ID NO: 2507290 - DNA, 25 bp, Homo sapien
tctgagtctcaaggcaaagcctcat

SEQ ID NO: 2507291 - DNA, 25 bp, Homo sapien
ttttctttccggcactggagacatt

SEQ ID NO: 2507292 - DNA, 25 bp, Homo sapien
aggcagatccgcctactgaaacgcc

SEQ ID NO: 2507293 - DNA, 25 bp, Homo sapien
ctactgaaacgccattcctcattgt

SEQ ID NO: 2507294 - DNA, 25 bp, Homo sapien
tggagacatttccactgtcacccca

SEQ ID NO: 2507295 - DNA, 25 bp, Homo sapien
agtgcggcttggacacactgtgcag

SEQ ID NO: 2507296 - DNA, 25 bp, Homo sapien
acggaaggctgtctcccaggacact

SEQ ID NO: 2507297 - DNA, 25 bp, Homo sapien
actcagtcaccaccagtgcggcttg

SEQ ID NO: 2507298 - DNA, 25 bp, Homo sapien
actgtgcaggattcacggaaggctg

SEQ ID NO: 2507299 - DNA, 25 bp, Homo sapien
tgtgacagatgacaacggcctgctt

SEQ ID NO: 2507300 - DNA, 25 bp, Homo sapien
gatgcagagctatcacaacaatgtg

SEQ ID NO: 2507301 - DNA, 25 bp, Homo sapien
caaacagaaccagaatgtagggctc

SEQ ID NO: 2507302 - DNA, 25 bp, Homo sapien
ggaggccacagagtagccacaatgt

SEQ ID NO: 2507303 - DNA, 25 bp, Homo sapien
ggtatgtaagtcagtatcactgaca

SEQ ID NO: 2507304 - DNA, 25 bp, Homo sapien
cttttacaagtcttcgtggccttgg

SEQ ID NO: 2507305 - DNA, 25 bp, Homo sapien
gcttttacaagtcttcgtggccttg

SEQ ID NO: 2507306 - DNA, 25 bp, Homo sapien
gtggccttggtatgtaagtcagtat

SEQ ID NO: 2507307 - DNA, 25 bp, Homo sapien
tctgcaatgcccttaacatggtcat

SEQ ID NO: 2507308 - DNA, 25 bp, Homo sapien
tgcaatgcccttaacatggtcatcc

SEQ ID NO: 2507309 - DNA, 25 bp, Homo sapien
caatgcccttaacatggtcatccat

SEQ ID NO: 2507310 - DNA, 25 bp, Homo sapien
ctcagccccagatcccgcgagaacc

SEQ ID NO: 2507311 - DNA, 25 bp, Homo sapien
ctcactgcaaattccaatgttcaag

SEQ ID NO: 2507312 - DNA, 25 bp, Homo sapien
tgcaaattccaatgttcaagtgatt

SEQ ID NO: 2507313 - DNA, 25 bp, Homo sapien
tcactgcaaattccaatgttcaagt

SEQ ID NO: 2507314 - DNA, 25 bp, Homo sapien
actgcaaattccaatgttcaagtga

SEQ ID NO: 2507315 - DNA, 25 bp, Homo sapien
ccgcgactactatagaaattgatga

SEQ ID NO: 2507316 - DNA, 25 bp, Homo sapien
gagatgaggaagaaaccgcgactac

SEQ ID NO: 2507317 - DNA, 25 bp, Homo sapien
aattgatgaagaaacatacgaagag

SEQ ID NO: 2507318 - DNA, 25 bp, Homo sapien
tacgaagagatatataaatcaagga

SEQ ID NO: 2507319 - DNA, 25 bp, Homo sapien
ttgcaaaatgtctagccagagtcag

SEQ ID NO: 2507320 - DNA, 25 bp, Homo sapien
atataagatacagtggctggatgca

SEQ ID NO: 2507321 - DNA, 25 bp, Homo sapien
tgcagagctctttttcaggacttgt

SEQ ID NO: 2507322 - DNA, 25 bp, Homo sapien
tacatatatgagagatacccctagc

SEQ ID NO: 2507323 - DNA, 25 bp, Homo sapien
gagcaccaattgcaaggcaaggaca

SEQ ID NO: 2507324 - DNA, 25 bp, Homo sapien
caccaattgcaaggcaaggacagcc

SEQ ID NO: 2507325 - DNA, 25 bp, Homo sapien
gcaccaattgcaaggcaaggacagc

SEQ ID NO: 2507326 - DNA, 25 bp, Homo sapien
atgagcaccaattgcaaggcaagga

SEQ ID NO: 2507327 - DNA, 25 bp, Homo sapien
gaacgaactctatcaggccatgctg

SEQ ID NO: 2507328 - DNA, 25 bp, Homo sapien
gccatgctgtgttcattataggcac

SEQ ID NO: 2507329 - DNA, 25 bp, Homo sapien
tgcagagtctttcggcatctccagc

SEQ ID NO: 2507330 - DNA, 25 bp, Homo sapien
cgatagttacaaatccagcacctgt

SEQ ID NO: 2507331 - DNA, 25 bp, Homo sapien
cacagacgtttaaaggctccaaaga

SEQ ID NO: 2507332 - DNA, 25 bp, Homo sapien
acagacgtttaaaggctccaaagat

SEQ ID NO: 2507333 - DNA, 25 bp, Homo sapien
ggctccaaagattcgtgtttcaggc

SEQ ID NO: 2507334 - DNA, 25 bp, Homo sapien
aaggctccaaagattcgtgtttcag

SEQ ID NO: 2507335 - DNA, 25 bp, Homo sapien
tccatgaggcctttccaaaggactt

SEQ ID NO: 2507336 - DNA, 25 bp, Homo sapien
cattccttcaagatctcttccatga

SEQ ID NO: 2507337 - DNA, 25 bp, Homo sapien
attccttcaagatctcttccatgag

SEQ ID NO: 2507338 - DNA, 25 bp, Homo sapien
tcttccatgaggcctttccaaagga

SEQ ID NO: 2507339 - DNA, 25 bp, Homo sapien
tctgttactattaggtctgtaaggc

SEQ ID NO: 2507340 - DNA, 25 bp, Homo sapien
agggccttgcagctctcatatgcag

SEQ ID NO: 2507341 - DNA, 25 bp, Homo sapien
taggtcctcgtaaagaagcaaggtg

SEQ ID NO: 2507342 - DNA, 25 bp, Homo sapien
agacaactgaactagatcactcggg

SEQ ID NO: 2507343 - DNA, 25 bp, Homo sapien
gcaggcaggctagatattccaaaca

SEQ ID NO: 2507344 - DNA, 25 bp, Homo sapien
gatactgctcacattatctcggggt

SEQ ID NO: 2507345 - DNA, 25 bp, Homo sapien
agcagagcaggatcggcagctagct

SEQ ID NO: 2507346 - DNA, 25 bp, Homo sapien
ttccaaacagcacctaccatatgac

SEQ ID NO: 2507347 - DNA, 25 bp, Homo sapien
cttcaaaacccagatcaggacctgc

SEQ ID NO: 2507348 - DNA, 25 bp, Homo sapien
ttactttcttcaaaacccagatcag

SEQ ID NO: 2507349 - DNA, 25 bp, Homo sapien
tttcttcaaaacccagatcaggacc

SEQ ID NO: 2507350 - DNA, 25 bp, Homo sapien
ccagggctgccttactttcttcaaa

SEQ ID NO: 2507351 - DNA, 25 bp, Homo sapien
gtttcagctggaactttccaaagaa

SEQ ID NO: 2507352 - DNA, 25 bp, Homo sapien
tcttcagccaaagctagctcatgtt

SEQ ID NO: 2507353 - DNA, 25 bp, Homo sapien
cagccaaagctagctcatgtttcag

SEQ ID NO: 2507354 - DNA, 25 bp, Homo sapien
agctcatgtttcagctggaactttc

SEQ ID NO: 2507355 - DNA, 25 bp, Homo sapien
ctcccaggtcatggtcgtcagaaga

SEQ ID NO: 2507356 - DNA, 25 bp, Homo sapien
gtttctcccaggtcatggtcgtcag

SEQ ID NO: 2507357 - DNA, 25 bp, Homo sapien
ggatgttccactcttcggcctatcg

SEQ ID NO: 2507358 - DNA, 25 bp, Homo sapien
tcgtcatccattacctcagtttctc

SEQ ID NO: 2507359 - DNA, 25 bp, Homo sapien
ggcacagtctcctcgaatgccttta

SEQ ID NO: 2507360 - DNA, 25 bp, Homo sapien
acagtctcctcgaatgcctttaaga

SEQ ID NO: 2507361 - DNA, 25 bp, Homo sapien
tctggtgtggacaccgggctatgtt

SEQ ID NO: 2507362 - DNA, 25 bp, Homo sapien
cagggagttctggtgtggacaccgg

SEQ ID NO: 2507363 - DNA, 25 bp, Homo sapien
tctctacagcggatgtgacaggcgg

SEQ ID NO: 2507364 - DNA, 25 bp, Homo sapien
ggtggtggccggcagttccttctcc

SEQ ID NO: 2507365 - DNA, 25 bp, Homo sapien
ggtctgaagcaaaatacaccctgag

SEQ ID NO: 2507366 - DNA, 25 bp, Homo sapien
gagatccaacttggtagcagctgtc

SEQ ID NO: 2507367 - DNA, 25 bp, Homo sapien
ctgtgagaagggctacagcatcctc

SEQ ID NO: 2507368 - DNA, 25 bp, Homo sapien
ccactgtgagaagggctacagcatc

SEQ ID NO: 2507369 - DNA, 25 bp, Homo sapien
gttccactgtgagaagggctacagc

SEQ ID NO: 2507370 - DNA, 25 bp, Homo sapien
gtgagaagggctacagcatcctctt

SEQ ID NO: 2507371 - DNA, 25 bp, Homo sapien
ggtcacccagttaagaagctcgaag

SEQ ID NO: 2507372 - DNA, 25 bp, Homo sapien
actgtatagaaagcagacggcctgt

SEQ ID NO: 2507373 - DNA, 25 bp, Homo sapien
gaatacaacccacgtaggtccagag

SEQ ID NO: 2507374 - DNA, 25 bp, Homo sapien
gctatttaggaccttgccccagtgg

SEQ ID NO: 2507375 - DNA, 25 bp, Homo sapien
ttggcggagcaaagaacaactccag

SEQ ID NO: 2507376 - DNA, 25 bp, Homo sapien
aagtagttggcggagcaaagaacaa

SEQ ID NO: 2507377 - DNA, 25 bp, Homo sapien
caaatccccagttctcggacaagcg

SEQ ID NO: 2507378 - DNA, 25 bp, Homo sapien
tcggacaagcgagtaagtagttggc

SEQ ID NO: 2507379 - DNA, 25 bp, Homo sapien
gttccggccacacgccccgaggaca

SEQ ID NO: 2507380 - DNA, 25 bp, Homo sapien
ttcggcggggagggcaccgtcacac

SEQ ID NO: 2507381 - DNA, 25 bp, Homo sapien
cggccacacgccccgaggacaggga

SEQ ID NO: 2507382 - DNA, 25 bp, Homo sapien
caccgtcacacccagggcgagaccc

SEQ ID NO: 2507383 - DNA, 25 bp, Homo sapien
cgacgcccacccttttagctcggag

SEQ ID NO: 2507384 - DNA, 25 bp, Homo sapien
cacccttttagctcggaggatcggg

SEQ ID NO: 2507385 - DNA, 25 bp, Homo sapien
gcaggcggacctgggatcccagaac

SEQ ID NO: 2507386 - DNA, 25 bp, Homo sapien
cgcccacccttttagctcggaggat

SEQ ID NO: 2507387 - DNA, 25 bp, Homo sapien
tcttgcagcggtggtgccggccggg

SEQ ID NO: 2507388 - DNA, 25 bp, Homo sapien
gctcttgcagcggtggtgccggccg

SEQ ID NO: 2507389 - DNA, 25 bp, Homo sapien
ccggctcttgcagcggtggtgccgg

SEQ ID NO: 2507390 - DNA, 25 bp, Homo sapien
ggctcttgcagcggtggtgccggcc

SEQ ID NO: 2507391 - DNA, 25 bp, Homo sapien
aggtccggtccacggtgagcgccgt

SEQ ID NO: 2507392 - DNA, 25 bp, Homo sapien
gagtaggtccggtccacggtgagcg

SEQ ID NO: 2507393 - DNA, 25 bp, Homo sapien
gtaggtccggtccacggtgagcgcc

SEQ ID NO: 2507394 - DNA, 25 bp, Homo sapien
tccggtccacggtgagcgccgtgtc

SEQ ID NO: 2507395 - DNA, 25 bp, Homo sapien
ctgccgcgccgcgagccaccggctg

SEQ ID NO: 2507396 - DNA, 25 bp, Homo sapien
cggccgcgaactttcccgtcttctg

SEQ ID NO: 2507397 - DNA, 25 bp, Homo sapien
cgccgcgagccaccggctgtgctcg

SEQ ID NO: 2507398 - DNA, 25 bp, Homo sapien
ctccgcgctccggccgcgaactttc

SEQ ID NO: 2507399 - DNA, 25 bp, Homo sapien
ctgggagccgcgggcgagggggcgg

SEQ ID NO: 2507400 - DNA, 25 bp, Homo sapien
ggcgagggggcggcgcggctgctgc

SEQ ID NO: 2507401 - DNA, 25 bp, Homo sapien
agggggcggcgcggctgctgcagct

SEQ ID NO: 2507402 - DNA, 25 bp, Homo sapien
gagggggcggcgcggctgctgcagc

SEQ ID NO: 2507403 - DNA, 25 bp, Homo sapien
gtgcatgctgtgtctcaaccacaca

SEQ ID NO: 2507404 - DNA, 25 bp, Homo sapien
acagtgcatgctgtgtctcaaccac

SEQ ID NO: 2507405 - DNA, 25 bp, Homo sapien
caagttcagggccaacggcaatgtc

SEQ ID NO: 2507406 - DNA, 25 bp, Homo sapien
gttcagggccaacggcaatgtccat

SEQ ID NO: 2507407 - DNA, 25 bp, Homo sapien
ccatcagtgtggagcaaagcacctg

SEQ ID NO: 2507408 - DNA, 25 bp, Homo sapien
catcagtgtggagcaaagcacctgg

SEQ ID NO: 2507409 - DNA, 25 bp, Homo sapien
atcagtgtggagcaaagcacctggc

SEQ ID NO: 2507410 - DNA, 25 bp, Homo sapien
gataaagctctactgagatggggct

SEQ ID NO: 2507411 - DNA, 25 bp, Homo sapien
ctggataaagctctactgagatggg

SEQ ID NO: 2507412 - DNA, 25 bp, Homo sapien
tctggataaagctctactgagatgg

SEQ ID NO: 2507413 - DNA, 25 bp, Homo sapien
ataaagctctactgagatggggctt

SEQ ID NO: 2507414 - DNA, 25 bp, Homo sapien
cagcaatgcactgagtctctttcct

SEQ ID NO: 2507415 - DNA, 25 bp, Homo sapien
tgtagaacgagaaaagcgaaggacc

SEQ ID NO: 2507416 - DNA, 25 bp, Homo sapien
aaataaaatctgactgtagaacgag

SEQ ID NO: 2507417 - DNA, 25 bp, Homo sapien
cgaaggacctggagtgccttcagca

SEQ ID NO: 2507418 - DNA, 25 bp, Homo sapien
tgaggagactctggactatagtccc

SEQ ID NO: 2507419 - DNA, 25 bp, Homo sapien
tctctggttcatgccaatagtggct

SEQ ID NO: 2507420 - DNA, 25 bp, Homo sapien
catagaaggatttcccctctttgtg

SEQ ID NO: 2507421 - DNA, 25 bp, Homo sapien
ggtaaatcatgtggacaagcctcag

SEQ ID NO: 2507422 - DNA, 25 bp, Homo sapien
aaacaacagggagcgggaacaatag

SEQ ID NO: 2507423 - DNA, 25 bp, Homo sapien
cacatacccctgtttggaaccttga

SEQ ID NO: 2507424 - DNA, 25 bp, Homo sapien
cagaccaagacgtggaacacaggaa

SEQ ID NO: 2507425 - DNA, 25 bp, Homo sapien
taactgaacagacttagctgaccac

SEQ ID NO: 2507426 - DNA, 25 bp, Homo sapien
tgatgatatcacataagcgcagtgg

SEQ ID NO: 2507427 - DNA, 25 bp, Homo sapien
tcattcctatctgcagacgacaagg

SEQ ID NO: 2507428 - DNA, 25 bp, Homo sapien
gatcttcctccaacatgtacagcaa

SEQ ID NO: 2507429 - DNA, 25 bp, Homo sapien
tgtgcaatgagtctaaaacacccca

SEQ ID NO: 2507430 - DNA, 25 bp, Homo sapien
tgaagttcgcaagctaaaagggcaa

SEQ ID NO: 2507431 - DNA, 25 bp, Homo sapien
tagcataaccccaattgtgttcagg

SEQ ID NO: 2507432 - DNA, 25 bp, Homo sapien
taaacaggacgagtagctatggtga

SEQ ID NO: 2507433 - DNA, 25 bp, Homo sapien
cagtttaacgccagggctagcctaa

SEQ ID NO: 2507434 - DNA, 25 bp, Homo sapien
ggcagagttggtgagagaaatcctt

SEQ ID NO: 2507435 - DNA, 25 bp, Homo sapien
gaggacaaaagccaacataccatgt

SEQ ID NO: 2507436 - DNA, 25 bp, Homo sapien
caaaagccaacataccatgtagctc

SEQ ID NO: 2507437 - DNA, 25 bp, Homo sapien
aggcagagttggtgagagaaatcct

SEQ ID NO: 2507438 - DNA, 25 bp, Homo sapien
gaagacacatacattggacacctaa

SEQ ID NO: 2507439 - DNA, 25 bp, Homo sapien
tatgactttacttagcaacctttgc

SEQ ID NO: 2507440 - DNA, 25 bp, Homo sapien
ggacacctaaaatcaacaagagcag

SEQ ID NO: 2507441 - DNA, 25 bp, Homo sapien
tgtgttgttcctcgagtcaaactaa

SEQ ID NO: 2507442 - DNA, 25 bp, Homo sapien
aagtagcatcgaaaccttccctggg

SEQ ID NO: 2507443 - DNA, 25 bp, Homo sapien
cctgcttctgccacgtggattggaa

SEQ ID NO: 2507444 - DNA, 25 bp, Homo sapien
cagctcacgctgacttaagggattc

SEQ ID NO: 2507445 - DNA, 25 bp, Homo sapien
cctgggctgagctcttgaaaggtaa

SEQ ID NO: 2507446 - DNA, 25 bp, Homo sapien
caaagtccattcgtttgcctaacct

SEQ ID NO: 2507447 - DNA, 25 bp, Homo sapien
ttcagggatcggattgtcaccccag

SEQ ID NO: 2507448 - DNA, 25 bp, Homo sapien
tccctcgaggcatcagcacatgctg

SEQ ID NO: 2507449 - DNA, 25 bp, Homo sapien
ttgctgcgaggcacccgaaccatga

SEQ ID NO: 2507450 - DNA, 25 bp, Homo sapien
gaattgatcaaaccatctggcctga

SEQ ID NO: 2507451 - DNA, 25 bp, Homo sapien
aaatggtttccatggcgaatgctcc

SEQ ID NO: 2507452 - DNA, 25 bp, Homo sapien
tccgtgggattgtgccatgagccaa

SEQ ID NO: 2507453 - DNA, 25 bp, Homo sapien
taaactaccgccagtgcaaaacagg

SEQ ID NO: 2507454 - DNA, 25 bp, Homo sapien
taaactcccttcatggtaaatgccc

SEQ ID NO: 2507455 - DNA, 25 bp, Homo sapien
tattggtttttagcctaggagcaac

SEQ ID NO: 2507456 - DNA, 25 bp, Homo sapien
gagcaacaggctacagcatatagtg

SEQ ID NO: 2507457 - DNA, 25 bp, Homo sapien
gcacgacagtgcagtaagggctcac

SEQ ID NO: 2507458 - DNA, 25 bp, Homo sapien
tcaatcaagcaggaggcaagacgtc

SEQ ID NO: 2507459 - DNA, 25 bp, Homo sapien
tcaaagacaaaggtaggaccagtcc

SEQ ID NO: 2507460 - DNA, 25 bp, Homo sapien
gacatccagagctcacattccaggg

SEQ ID NO: 2507461 - DNA, 25 bp, Homo sapien
tctaaccacttgacaggactgatgg

SEQ ID NO: 2507462 - DNA, 25 bp, Homo sapien
tggaaactgctctcaccagggtcac

SEQ ID NO: 2507463 - DNA, 25 bp, Homo sapien
cattttgtgcagaaaacagccgttc

SEQ ID NO: 2507464 - DNA, 25 bp, Homo sapien
ctaagtccaaatcagtcaggtcaag

SEQ ID NO: 2507465 - DNA, 25 bp, Homo sapien
taaccaacttgcaacagggctggaa

SEQ ID NO: 2507466 - DNA, 25 bp, Homo sapien
tctagcagtgtctgaggggttgacg

SEQ ID NO: 2507467 - DNA, 25 bp, Homo sapien
taggtagtggggactttctcttcca

SEQ ID NO: 2507468 - DNA, 25 bp, Homo sapien
gaggggttgacgcagacacccactt

SEQ ID NO: 2507469 - DNA, 25 bp, Homo sapien
gtacatttttgttggtctagcagtg

SEQ ID NO: 2507470 - DNA, 25 bp, Homo sapien
tctaaaccagaattggaacatctgt

SEQ ID NO: 2507471 - DNA, 25 bp, Homo sapien
ttctaaaccagaattggaacatctg

SEQ ID NO: 2507472 - DNA, 25 bp, Homo sapien
taaaccagaattggaacatctgtgt

SEQ ID NO: 2507473 - DNA, 25 bp, Homo sapien
aaccagaattggaacatctgtgtct

SEQ ID NO: 2507474 - DNA, 25 bp, Homo sapien
tacagggaactatgggctctgtcat

SEQ ID NO: 2507475 - DNA, 25 bp, Homo sapien
gtacagggaactatgggctctgtca

SEQ ID NO: 2507476 - DNA, 25 bp, Homo sapien
ctttgccatttgatgacatctctgt

SEQ ID NO: 2507477 - DNA, 25 bp, Homo sapien
ctctttgccatttgatgacatctct

SEQ ID NO: 2507478 - DNA, 25 bp, Homo sapien
gtttctatatgactgatcatcctcc

SEQ ID NO: 2507479 - DNA, 25 bp, Homo sapien
taccgagagtttctatatgactgat

SEQ ID NO: 2507480 - DNA, 25 bp, Homo sapien
ccgagagtttctatatgactgatca

SEQ ID NO: 2507481 - DNA, 25 bp, Homo sapien
tcaataccgagagtttctatatgac

SEQ ID NO: 2507482 - DNA, 25 bp, Homo sapien
taatgatgagaatggagcactttcc

SEQ ID NO: 2507483 - DNA, 25 bp, Homo sapien
catgaaaggcgcttagagtaagggc

SEQ ID NO: 2507484 - DNA, 25 bp, Homo sapien
tgggaataaaacagcacctattgca

SEQ ID NO: 2507485 - DNA, 25 bp, Homo sapien
gactctggcgccagaatgcctcatt

SEQ ID NO: 2507486 - DNA, 25 bp, Homo sapien
tggcacctgccggtaaagcagcagc

SEQ ID NO: 2507487 - DNA, 25 bp, Homo sapien
tatttttcgtttttccacaggcagc

SEQ ID NO: 2507488 - DNA, 25 bp, Homo sapien
gtaagaacgagctgcactagggcct

SEQ ID NO: 2507489 - DNA, 25 bp, Homo sapien
cgccttccaaatgccggagtgcagg

SEQ ID NO: 2507490 - DNA, 25 bp, Homo sapien
catggtgtctgggccgtccgggcgg

SEQ ID NO: 2507491 - DNA, 25 bp, Homo sapien
atggtgtctgggccgtccgggcggg

SEQ ID NO: 2507492 - DNA, 25 bp, Homo sapien
cggggcggggtagcgctggccgcgg

SEQ ID NO: 2507493 - DNA, 25 bp, Homo sapien
cgcggccgccaagccggcgggggcg

SEQ ID NO: 2507494 - DNA, 25 bp, Homo sapien
gcgccgcggccgccaagccggcggg

SEQ ID NO: 2507495 - DNA, 25 bp, Homo sapien
gaggcgcggagccggccaagggcgc

SEQ ID NO: 2507496 - DNA, 25 bp, Homo sapien
gcggagcgagtctccgatgcctgcc

SEQ ID NO: 2507497 - DNA, 25 bp, Homo sapien
gccccaccaggagcggagcgagtct

SEQ ID NO: 2507498 - DNA, 25 bp, Homo sapien
ttcctcgagttctggccccaccagg

SEQ ID NO: 2507499 - DNA, 25 bp, Homo sapien
tcctcttcctcgagttctggcccca

SEQ ID NO: 2507500 - DNA, 25 bp, Homo sapien
tcagcatccccattccagcgaaacc

SEQ ID NO: 2507501 - DNA, 25 bp, Homo sapien
gagctcggcaggggaagaggtcagc

SEQ ID NO: 2507502 - DNA, 25 bp, Homo sapien
agcatccccattccagcgaaaccca

SEQ ID NO: 2507503 - DNA, 25 bp, Homo sapien
gtcagcatccccattccagcgaaac

SEQ ID NO: 2507504 - DNA, 25 bp, Homo sapien
gtcccctgtgtgcacagctttctct

SEQ ID NO: 2507505 - DNA, 25 bp, Homo sapien
cacaatcgacctccaccccaacttt

SEQ ID NO: 2507506 - DNA, 25 bp, Homo sapien
tttctcttcacaatcgacctccacc

SEQ ID NO: 2507507 - DNA, 25 bp, Homo sapien
ctagcagtcccctgtgtgcacagct

SEQ ID NO: 2507508 - DNA, 25 bp, Homo sapien
cagatattcctgtcagataacaaaa

SEQ ID NO: 2507509 - DNA, 25 bp, Homo sapien
cactttctcttgacagatattcctg

SEQ ID NO: 2507510 - DNA, 25 bp, Homo sapien
cttcagggattcctgttatctctat

SEQ ID NO: 2507511 - DNA, 25 bp, Homo sapien
ctgttatctctatcttggatcatct

SEQ ID NO: 2507512 - DNA, 25 bp, Homo sapien
tctgaacttgcctagtgcatctgaa

SEQ ID NO: 2507513 - DNA, 25 bp, Homo sapien
tttgaacagtaaggccattccttgg

SEQ ID NO: 2507514 - DNA, 25 bp, Homo sapien
tattgatgaataccaagcttgcttg

SEQ ID NO: 2507515 - DNA, 25 bp, Homo sapien
gagaaagaatcgtcctcagtgtgag

SEQ ID NO: 2507516 - DNA, 25 bp, Homo sapien
tgggaagcagcctttctataccttt

SEQ ID NO: 2507517 - DNA, 25 bp, Homo sapien
ctaagcagatatgctgctccaggct

SEQ ID NO: 2507518 - DNA, 25 bp, Homo sapien
ctggcgcctgagacaactgctccat

SEQ ID NO: 2507519 - DNA, 25 bp, Homo sapien
tgactgcacttgcagctggcgcctg

SEQ ID NO: 2507520 - DNA, 25 bp, Homo sapien
aaccatggcacttggtgggccagcc

SEQ ID NO: 2507521 - DNA, 25 bp, Homo sapien
ccactgaaccatggcacttggtggg

SEQ ID NO: 2507522 - DNA, 25 bp, Homo sapien
ctgctctggcttggaaaaccactga

SEQ ID NO: 2507523 - DNA, 25 bp, Homo sapien
gcttggaaaaccactgaaccatggc

SEQ ID NO: 2507524 - DNA, 25 bp, Homo sapien
cattgtacatgaggatacagatatg

SEQ ID NO: 2507525 - DNA, 25 bp, Homo sapien
gagaggacagagcattcattgagat

SEQ ID NO: 2507526 - DNA, 25 bp, Homo sapien
gcagatggcggtgccaagtcattaa

SEQ ID NO: 2507527 - DNA, 25 bp, Homo sapien
ggatacagatatgaaatctacaggg

SEQ ID NO: 2507528 - DNA, 25 bp, Homo sapien
gggaagccctgatcccagactctgc

SEQ ID NO: 2507529 - DNA, 25 bp, Homo sapien
cagtataaggcagggtccgtcggca

SEQ ID NO: 2507530 - DNA, 25 bp, Homo sapien
aggaaacgggaagccctgatcccag

SEQ ID NO: 2507531 - DNA, 25 bp, Homo sapien
ctggctttccatcattaaggcagta

SEQ ID NO: 2507532 - DNA, 25 bp, Homo sapien
gctgggaggcatcaggcaatcctct

SEQ ID NO: 2507533 - DNA, 25 bp, Homo sapien
tgcagcatctcctaacaaagtgttg

SEQ ID NO: 2507534 - DNA, 25 bp, Homo sapien
cgctattagaggaaagctttgctga

SEQ ID NO: 2507535 - DNA, 25 bp, Homo sapien
cccttaatcaagcaacgctattaga

SEQ ID NO: 2507536 - DNA, 25 bp, Homo sapien
tccgttacaaagctggctacgtgct

SEQ ID NO: 2507537 - DNA, 25 bp, Homo sapien
caaggcttgagtcctgtctaccagg

SEQ ID NO: 2507538 - DNA, 25 bp, Homo sapien
gcacgttcagctggatactcagagg

SEQ ID NO: 2507539 - DNA, 25 bp, Homo sapien
tctatattgggatcagcgggcactc

SEQ ID NO: 2507540 - DNA, 25 bp, Homo sapien
ctgaggaaggatttgaaagagacaa

SEQ ID NO: 2507541 - DNA, 25 bp, Homo sapien
tgaggaaggatttgaaagagacaag

SEQ ID NO: 2507542 - DNA, 25 bp, Homo sapien
cctctcatctctaccctaccttcaa

SEQ ID NO: 2507543 - DNA, 25 bp, Homo sapien
ctttttcctctcatctctaccctac

SEQ ID NO: 2507544 - DNA, 25 bp, Homo sapien
ttcctctcatctctaccctaccttc

SEQ ID NO: 2507545 - DNA, 25 bp, Homo sapien
tttcctctcatctctaccctacctt

SEQ ID NO: 2507546 - DNA, 25 bp, Homo sapien
catgggccacgaggactctgctcat

SEQ ID NO: 2507547 - DNA, 25 bp, Homo sapien
tggcccatgggccacgaggactctg

SEQ ID NO: 2507548 - DNA, 25 bp, Homo sapien
gtggcccatgggccacgaggactct

SEQ ID NO: 2507549 - DNA, 25 bp, Homo sapien
gcccatgggccacgaggactctgct

SEQ ID NO: 2507550 - DNA, 25 bp, Homo sapien
tccagatccacaactagagtcagat

SEQ ID NO: 2507551 - DNA, 25 bp, Homo sapien
gatccacaactagagtcagattcta

SEQ ID NO: 2507552 - DNA, 25 bp, Homo sapien
ccacaactagagtcagattctagaa

SEQ ID NO: 2507553 - DNA, 25 bp, Homo sapien
ggtctccagatccacaactagagtc

SEQ ID NO: 2507554 - DNA, 25 bp, Homo sapien
ccttcaggggcaagcacgtcctgat

SEQ ID NO: 2507555 - DNA, 25 bp, Homo sapien
tttccttggggggcaaacatcagct

SEQ ID NO: 2507556 - DNA, 25 bp, Homo sapien
cattcttgaaaagcggatgccctct

SEQ ID NO: 2507557 - DNA, 25 bp, Homo sapien
caaacatcagctttaaccttcaggg

SEQ ID NO: 2507558 - DNA, 25 bp, Homo sapien
tccaggcatccgtttgttgggtcct

SEQ ID NO: 2507559 - DNA, 25 bp, Homo sapien
aagctgcaatcgcatttctgaccaa

SEQ ID NO: 2507560 - DNA, 25 bp, Homo sapien
gactgaggacctccgttttttgctg

SEQ ID NO: 2507561 - DNA, 25 bp, Homo sapien
gactgcagtctcattcacacggttg

SEQ ID NO: 2507562 - DNA, 25 bp, Homo sapien
tccaccaatcctctgataagaaagg

SEQ ID NO: 2507563 - DNA, 25 bp, Homo sapien
ggtatccaccaatcctctgataaga

SEQ ID NO: 2507564 - DNA, 25 bp, Homo sapien
tgtggtatccaccaatcctctgata

SEQ ID NO: 2507565 - DNA, 25 bp, Homo sapien
atccaccaatcctctgataagaaag

SEQ ID NO: 2507566 - DNA, 25 bp, Homo sapien
acaggggcccccgactgacggctgc

SEQ ID NO: 2507567 - DNA, 25 bp, Homo sapien
aggggcccccgactgacggctgcat

SEQ ID NO: 2507568 - DNA, 25 bp, Homo sapien
gggtccccggatgacggccgcttca

SEQ ID NO: 2507569 - DNA, 25 bp, Homo sapien
gatgacggccgcttcacacaggggc

SEQ ID NO: 2507570 - DNA, 25 bp, Homo sapien
cacaaaaagttgtcagcacagagcc

SEQ ID NO: 2507571 - DNA, 25 bp, Homo sapien
accagctaaatgtccctgggaacag

SEQ ID NO: 2507572 - DNA, 25 bp, Homo sapien
cacaggttggctgttgagaattaaa

SEQ ID NO: 2507573 - DNA, 25 bp, Homo sapien
gattacctgggtcattataaactgt

SEQ ID NO: 2507574 - DNA, 25 bp, Homo sapien
tcaggcccaaactggccattgtaag

SEQ ID NO: 2507575 - DNA, 25 bp, Homo sapien
gtaagctaatcttgctgttaggatg

SEQ ID NO: 2507576 - DNA, 25 bp, Homo sapien
cccaaactggccattgtaagctaat

SEQ ID NO: 2507577 - DNA, 25 bp, Homo sapien
ggccattgtaagctaatcttgctgt

SEQ ID NO: 2507578 - DNA, 25 bp, Homo sapien
ttgtgaattatagtgaatggtaaac

SEQ ID NO: 2507579 - DNA, 25 bp, Homo sapien
aaagagtaattacatgaaaagctcc

SEQ ID NO: 2507580 - DNA, 25 bp, Homo sapien
attgtgaattatagtgaatggtaaa

SEQ ID NO: 2507581 - DNA, 25 bp, Homo sapien
catgaaaagctccatattttgcatg

SEQ ID NO: 2507582 - DNA, 25 bp, Homo sapien
taaggtgttgaaggtgggatccact

SEQ ID NO: 2507583 - DNA, 25 bp, Homo sapien
tgaatttatggttcgtccaaatgaa

SEQ ID NO: 2507584 - DNA, 25 bp, Homo sapien
aatttacgagcagtaagtggttttg

SEQ ID NO: 2507585 - DNA, 25 bp, Homo sapien
gggtgccagtcacgttgaatttatg

SEQ ID NO: 2507586 - DNA, 25 bp, Homo sapien
tagtggtagaataaggtacatattg

SEQ ID NO: 2507587 - DNA, 25 bp, Homo sapien
acagcatagtggaaggacggttaaa

SEQ ID NO: 2507588 - DNA, 25 bp, Homo sapien
cagcatagtggaaggacggttaaaa

SEQ ID NO: 2507589 - DNA, 25 bp, Homo sapien
ataataaatgctgggaggatacgga

SEQ ID NO: 2507590 - DNA, 25 bp, Homo sapien
aataataaatgctgggaggatacgg

SEQ ID NO: 2507591 - DNA, 25 bp, Homo sapien
taaggctaccgctctggtccacaag

SEQ ID NO: 2507592 - DNA, 25 bp, Homo sapien
gagattaaggctaccgctctggtcc

SEQ ID NO: 2507593 - DNA, 25 bp, Homo sapien
acacagtgactatagtctataataa

SEQ ID NO: 2507594 - DNA, 25 bp, Homo sapien
aaaaaagaacaacatcctgtcatta

SEQ ID NO: 2507595 - DNA, 25 bp, Homo sapien
caacacagtgactatagtctataat

SEQ ID NO: 2507596 - DNA, 25 bp, Homo sapien
acaacacagtgactatagtctataa

SEQ ID NO: 2507597 - DNA, 25 bp, Homo sapien
tcagtagtatatacaacccatcggt

SEQ ID NO: 2507598 - DNA, 25 bp, Homo sapien
agtagtatatacaacccatcggtga

SEQ ID NO: 2507599 - DNA, 25 bp, Homo sapien
gtatatacaacccatcggtgacggc

SEQ ID NO: 2507600 - DNA, 25 bp, Homo sapien
tagtatatacaacccatcggtgacg

SEQ ID NO: 2507601 - DNA, 25 bp, Homo sapien
gagctattggaggaataacaccctg

SEQ ID NO: 2507602 - DNA, 25 bp, Homo sapien
gcaaactttaagcagcaacccgcag

SEQ ID NO: 2507603 - DNA, 25 bp, Homo sapien
gaattcgtgaaggtaagctccagga

SEQ ID NO: 2507604 - DNA, 25 bp, Homo sapien
ccacagagggagtagcagacaggat

SEQ ID NO: 2507605 - DNA, 25 bp, Homo sapien
tcttaagaatagctaactaaaagta

SEQ ID NO: 2507606 - DNA, 25 bp, Homo sapien
tgggaaaggtttcataagtcaagcc

SEQ ID NO: 2507607 - DNA, 25 bp, Homo sapien
gccctgacaatacagttaggctata

SEQ ID NO: 2507608 - DNA, 25 bp, Homo sapien
ggcagatggaggagaccttgggaaa

SEQ ID NO: 2507609 - DNA, 25 bp, Homo sapien
ggtaaagatacttccttgggcctca

SEQ ID NO: 2507610 - DNA, 25 bp, Homo sapien
gtaaagatacttccttgggcctcag

SEQ ID NO: 2507611 - DNA, 25 bp, Homo sapien
tggtaaagatacttccttgggcctc

SEQ ID NO: 2507612 - DNA, 25 bp, Homo sapien
caaaaaattgcttgttgtcttcata

SEQ ID NO: 2507613 - DNA, 25 bp, Homo sapien
aaaaaattgcttgttgtcttcatag

SEQ ID NO: 2507614 - DNA, 25 bp, Homo sapien
gttgtcttcatagtatttgtttcca

SEQ ID NO: 2507615 - DNA, 25 bp, Homo sapien
gcttgttgtcttcatagtatttgtt

SEQ ID NO: 2507616 - DNA, 25 bp, Homo sapien
tgcagcccgcgtttcaggacctgca

SEQ ID NO: 2507617 - DNA, 25 bp, Homo sapien
gtttcaggacctgcactaactccat

SEQ ID NO: 2507618 - DNA, 25 bp, Homo sapien
aacccgtagatagcctcggagaccg

SEQ ID NO: 2507619 - DNA, 25 bp, Homo sapien
ccgccgtggccggtgatctgctgca

SEQ ID NO: 2507620 - DNA, 25 bp, Homo sapien
ggtgcgccgagcaaaacccaccgga

SEQ ID NO: 2507621 - DNA, 25 bp, Homo sapien
cgggtgcgccgagcaaaacccaccg

SEQ ID NO: 2507622 - DNA, 25 bp, Homo sapien
tgcgccgagcaaaacccaccggatg

SEQ ID NO: 2507623 - DNA, 25 bp, Homo sapien
cgccgagcaaaacccaccggatgga

SEQ ID NO: 2507624 - DNA, 25 bp, Homo sapien
aaatatactggtaagacacagaaat

SEQ ID NO: 2507625 - DNA, 25 bp, Homo sapien
tactgtggaagacatccgaggagtc

SEQ ID NO: 2507626 - DNA, 25 bp, Homo sapien
gccctcccgtgctttacagtgaaaa

SEQ ID NO: 2507627 - DNA, 25 bp, Homo sapien
tggctaaaacccatacatgacaggt

SEQ ID NO: 2507628 - DNA, 25 bp, Homo sapien
tgtagcagtaacaaggcttcaggct

SEQ ID NO: 2507629 - DNA, 25 bp, Homo sapien
ctttctttttacagagacgaggtct

SEQ ID NO: 2507630 - DNA, 25 bp, Homo sapien
aggtcttgctatattgcccaggctg

SEQ ID NO: 2507631 - DNA, 25 bp, Homo sapien
tctttctttttacagagacgaggtc

SEQ ID NO: 2507632 - DNA, 25 bp, Homo sapien
ttctttttacagagacgaggtcttg

SEQ ID NO: 2507633 - DNA, 25 bp, Homo sapien
ggcaactcttaagatcatgaatggc

SEQ ID NO: 2507634 - DNA, 25 bp, Homo sapien
cactgccagcaatgagagtagtata

SEQ ID NO: 2507635 - DNA, 25 bp, Homo sapien
aatgcaaggaactaactccttaggg

SEQ ID NO: 2507636 - DNA, 25 bp, Homo sapien
tagtatatgctaagggacaccatga

SEQ ID NO: 2507637 - DNA, 25 bp, Homo sapien
gaagttaaatatgactagaacacaa

SEQ ID NO: 2507638 - DNA, 25 bp, Homo sapien
tgaagttaaatatgactagaacaca

SEQ ID NO: 2507639 - DNA, 25 bp, Homo sapien
taatgaagttaaatatgactagaac

SEQ ID NO: 2507640 - DNA, 25 bp, Homo sapien
atgaagttaaatatgactagaacac

SEQ ID NO: 2507641 - DNA, 25 bp, Homo sapien
ttcaatttggtgtcttgtgttctgg

SEQ ID NO: 2507642 - DNA, 25 bp, Homo sapien
gctgcctgcccagtcacttcaaaaa

SEQ ID NO: 2507643 - DNA, 25 bp, Homo sapien
tctggcaaagaacagttaagtttac

SEQ ID NO: 2507644 - DNA, 25 bp, Homo sapien
gagcgcttagtttagataatcaaga

SEQ ID NO: 2507645 - DNA, 25 bp, Homo sapien
gtatattgccaatgagacctttgaa

SEQ ID NO: 2507646 - DNA, 25 bp, Homo sapien
caatctgagtagtagtctggataac

SEQ ID NO: 2507647 - DNA, 25 bp, Homo sapien
tagcattcatcagtcttaaagctgg

SEQ ID NO: 2507648 - DNA, 25 bp, Homo sapien
gagagttataatctgcaggctccat

SEQ ID NO: 2507649 - DNA, 25 bp, Homo sapien
tctgcatgtggcctaatttaataaa

SEQ ID NO: 2507650 - DNA, 25 bp, Homo sapien
tggcaattacctggctattaatgca

SEQ ID NO: 2507651 - DNA, 25 bp, Homo sapien
tattctcaagccttagaacatatgg

SEQ ID NO: 2507652 - DNA, 25 bp, Homo sapien
aacatatggcaattacctggctatt

SEQ ID NO: 2507653 - DNA, 25 bp, Homo sapien
ctgtaggtgtcatctggatatgttt

SEQ ID NO: 2507654 - DNA, 25 bp, Homo sapien
ggaattccacataagccttttcctg

SEQ ID NO: 2507655 - DNA, 25 bp, Homo sapien
ggtgtcatctggatatgttttggtt

SEQ ID NO: 2507656 - DNA, 25 bp, Homo sapien
tggttatataatcttggaattccac

SEQ ID NO: 2507657 - DNA, 25 bp, Homo sapien
tttaagacagagtggatatgaaaag

SEQ ID NO: 2507658 - DNA, 25 bp, Homo sapien
ttggtaccctagttctgaatgttca

SEQ ID NO: 2507659 - DNA, 25 bp, Homo sapien
ggtaccctagttctgaatgttcatt

SEQ ID NO: 2507660 - DNA, 25 bp, Homo sapien
catttaagacagagtggatatgaaa

SEQ ID NO: 2507661 - DNA, 25 bp, Homo sapien
gtctaacatccttaaaattcaccaa

SEQ ID NO: 2507662 - DNA, 25 bp, Homo sapien
ctaacatccttaaaattcaccaatt

SEQ ID NO: 2507663 - DNA, 25 bp, Homo sapien
atgtctaacatccttaaaattcacc

SEQ ID NO: 2507664 - DNA, 25 bp, Homo sapien
aaagtatacaattcaggccaggcgg

SEQ ID NO: 2507665 - DNA, 25 bp, Homo sapien
aagagtactattgccttcaggtagg

SEQ ID NO: 2507666 - DNA, 25 bp, Homo sapien
tatccatcaatgcagagtttaacca

SEQ ID NO: 2507667 - DNA, 25 bp, Homo sapien
ctggactgaagagtactattgcctt

SEQ ID NO: 2507668 - DNA, 25 bp, Homo sapien
ccttcaggtaggcatattcgtatcc

SEQ ID NO: 2507669 - DNA, 25 bp, Homo sapien
gtagtttgaagatgtgctccatcaa

SEQ ID NO: 2507670 - DNA, 25 bp, Homo sapien
gctgttacaaaactcctgtagtttg

SEQ ID NO: 2507671 - DNA, 25 bp, Homo sapien
aaactcctgtagtttgaagatgtgc

SEQ ID NO: 2507672 - DNA, 25 bp, Homo sapien
tgaagatgtgctccatcaataattt

SEQ ID NO: 2507673 - DNA, 25 bp, Homo sapien
ttgctttcaagatatacctttgaga

SEQ ID NO: 2507674 - DNA, 25 bp, Homo sapien
taaccatctgaaacactagacaact

SEQ ID NO: 2507675 - DNA, 25 bp, Homo sapien
gaggtggggtaccacaatgttgtcc

SEQ ID NO: 2507676 - DNA, 25 bp, Homo sapien
gataggatgtaaagataaccatctg

SEQ ID NO: 2507677 - DNA, 25 bp, Homo sapien
gaatgtgatgctgccttctagtaga

SEQ ID NO: 2507678 - DNA, 25 bp, Homo sapien
caggcatataagacatgaaccaggg

SEQ ID NO: 2507679 - DNA, 25 bp, Homo sapien
tgtagagggacatgtttaaaaccca

SEQ ID NO: 2507680 - DNA, 25 bp, Homo sapien
ggctttataaccattacaggcatat

SEQ ID NO: 2507681 - DNA, 25 bp, Homo sapien
gggcactgttttgggtagtcataag

SEQ ID NO: 2507682 - DNA, 25 bp, Homo sapien
tgggtagtcataagccattctatag

SEQ ID NO: 2507683 - DNA, 25 bp, Homo sapien
cataagccattctatagttaagcat

SEQ ID NO: 2507684 - DNA, 25 bp, Homo sapien
taagaaatagaatatgctaaagaac

SEQ ID NO: 2507685 - DNA, 25 bp, Homo sapien
ttgtgaaatgaatgagggctgcaat

SEQ ID NO: 2507686 - DNA, 25 bp, Homo sapien
aatgagggctgcaattaccttggca

SEQ ID NO: 2507687 - DNA, 25 bp, Homo sapien
gtgattgctcgtcttgtgaaatgaa

SEQ ID NO: 2507688 - DNA, 25 bp, Homo sapien
aatgaatgagggctgcaattacctt

SEQ ID NO: 2507689 - DNA, 25 bp, Homo sapien
aaaaggattgttcctgactcttcag

SEQ ID NO: 2507690 - DNA, 25 bp, Homo sapien
caacctatcttaggattcaaagggc

SEQ ID NO: 2507691 - DNA, 25 bp, Homo sapien
tatttaggtgagagaatacactctg

SEQ ID NO: 2507692 - DNA, 25 bp, Homo sapien
cactctgatgaattgatacaaaatc

SEQ ID NO: 2507693 - DNA, 25 bp, Homo sapien
ccagcactgggcaagaccaagagta

SEQ ID NO: 2507694 - DNA, 25 bp, Homo sapien
cttgttgaagactattgtgaagaca

SEQ ID NO: 2507695 - DNA, 25 bp, Homo sapien
tgtgaagacaattgacaaatgttgc

SEQ ID NO: 2507696 - DNA, 25 bp, Homo sapien
tccagtaagctttcaccagtgatat

SEQ ID NO: 2507697 - DNA, 25 bp, Homo sapien
caaaatcatactggtgaatagggtc

SEQ ID NO: 2507698 - DNA, 25 bp, Homo sapien
gaatagggtcctaggagttgaataa

SEQ ID NO: 2507699 - DNA, 25 bp, Homo sapien
gctttgcctttagacacaccagtta

SEQ ID NO: 2507700 - DNA, 25 bp, Homo sapien
gtaggccattttctatctcatctga

SEQ ID NO: 2507701 - DNA, 25 bp, Homo sapien
gaacctagggcagtcttacagtctc

SEQ ID NO: 2507702 - DNA, 25 bp, Homo sapien
gatgaggcctgttacaaatgctagc

SEQ ID NO: 2507703 - DNA, 25 bp, Homo sapien
gctctttagtaacatgcctgggatg

SEQ ID NO: 2507704 - DNA, 25 bp, Homo sapien
gagaaaatactagttagctgccatg

SEQ ID NO: 2507705 - DNA, 25 bp, Homo sapien
gtgcccagtgcattgataagaacag

SEQ ID NO: 2507706 - DNA, 25 bp, Homo sapien
gataagaacagcagtctggaggcag

SEQ ID NO: 2507707 - DNA, 25 bp, Homo sapien
ggcagactccccaatgtagtgcaca

SEQ ID NO: 2507708 - DNA, 25 bp, Homo sapien
ctggaaagaaggaatcgaaagtgcc

SEQ ID NO: 2507709 - DNA, 25 bp, Homo sapien
atcttatgactgaaaagttctaaat

SEQ ID NO: 2507710 - DNA, 25 bp, Homo sapien
ggcaagtaagatgcaaaacaacaac

SEQ ID NO: 2507711 - DNA, 25 bp, Homo sapien
ggaaggggcaagtaagatgcaaaac

SEQ ID NO: 2507712 - DNA, 25 bp, Homo sapien
tatatcatatcttttcagaattacc

SEQ ID NO: 2507713 - DNA, 25 bp, Homo sapien
aaagtcctttgtaaggctaggcgtg

SEQ ID NO: 2507714 - DNA, 25 bp, Homo sapien
ccttggaggctgagcacaagcacag

SEQ ID NO: 2507715 - DNA, 25 bp, Homo sapien
ttggaggctgagcacaagcacagtg

SEQ ID NO: 2507716 - DNA, 25 bp, Homo sapien
tccaagactgctatatattgctaag

SEQ ID NO: 2507717 - DNA, 25 bp, Homo sapien
tattgctaagtgaaatctatatgca

SEQ ID NO: 2507718 - DNA, 25 bp, Homo sapien
ccctttgcatacatcttgctaagag

SEQ ID NO: 2507719 - DNA, 25 bp, Homo sapien
tatagtaaaagtatgagcagtcacc

SEQ ID NO: 2507720 - DNA, 25 bp, Homo sapien
ttccatgcccgctactgagctctgg

SEQ ID NO: 2507721 - DNA, 25 bp, Homo sapien
tgcttttgcaagagtgtcaaatgcc

SEQ ID NO: 2507722 - DNA, 25 bp, Homo sapien
gaatctccagtgattaggtgtacac

SEQ ID NO: 2507723 - DNA, 25 bp, Homo sapien
catgtgaatcgctgagaagtggccc

SEQ ID NO: 2507724 - DNA, 25 bp, Homo sapien
tcatcactagaaattgaggagcagg

SEQ ID NO: 2507725 - DNA, 25 bp, Homo sapien
agacaagtgtttcgctctccataca

SEQ ID NO: 2507726 - DNA, 25 bp, Homo sapien
tagttgccggttgactcaaaatccc

SEQ ID NO: 2507727 - DNA, 25 bp, Homo sapien
tgataaacgcagtgtaggaaaaccc

SEQ ID NO: 2507728 - DNA, 25 bp, Homo sapien
cttgaaacatcaccgttggtctgca

SEQ ID NO: 2507729 - DNA, 25 bp, Homo sapien
tccaagattcgctaatgatgtaacc

SEQ ID NO: 2507730 - DNA, 25 bp, Homo sapien
tgatgtaaccacattggccaatgta

SEQ ID NO: 2507731 - DNA, 25 bp, Homo sapien
tgtacttaaatctccctgacatgat

SEQ ID NO: 2507732 - DNA, 25 bp, Homo sapien
caattatagattatgatatgccaac

SEQ ID NO: 2507733 - DNA, 25 bp, Homo sapien
gtatgataaatgaaacctggaaagt

SEQ ID NO: 2507734 - DNA, 25 bp, Homo sapien
cctggaaagttaaagggctgagctt

SEQ ID NO: 2507735 - DNA, 25 bp, Homo sapien
gccaacaaaagaacagtatgataaa

SEQ ID NO: 2507736 - DNA, 25 bp, Homo sapien
aagccttttaagttgccttctatgg

SEQ ID NO: 2507737 - DNA, 25 bp, Homo sapien
ctttcccatcctaacctaatgagaa

SEQ ID NO: 2507738 - DNA, 25 bp, Homo sapien
gagcaagaagctgatatcctagcaa

SEQ ID NO: 2507739 - DNA, 25 bp, Homo sapien
cagaaatataatttgtacgggaaag

SEQ ID NO: 2507740 - DNA, 25 bp, Homo sapien
gacagggctaagtgaagttttccaa

SEQ ID NO: 2507741 - DNA, 25 bp, Homo sapien
taaccttgaatcatgcagacagggc

SEQ ID NO: 2507742 - DNA, 25 bp, Homo sapien
tatataaaatcagatcccggccggg

SEQ ID NO: 2507743 - DNA, 25 bp, Homo sapien
tccgagcctaagtatttagagcgcc

SEQ ID NO: 2507744 - DNA, 25 bp, Homo sapien
aagccattactgtgccaccaccgta

SEQ ID NO: 2507745 - DNA, 25 bp, Homo sapien
tgcagcaagccattactgtgccacc

SEQ ID NO: 2507746 - DNA, 25 bp, Homo sapien
ttgagagaaaccctgatcataggct

SEQ ID NO: 2507747 - DNA, 25 bp, Homo sapien
gaaaccctgatcataggcttcctaa

SEQ ID NO: 2507748 - DNA, 25 bp, Homo sapien
gcaaaggaagtgattagaaaacatt

SEQ ID NO: 2507749 - DNA, 25 bp, Homo sapien
aagcaaaggaagtgattagaaaaca

SEQ ID NO: 2507750 - DNA, 25 bp, Homo sapien
aaaaggcaacttgtaatatggaata

SEQ ID NO: 2507751 - DNA, 25 bp, Homo sapien
atggaatatttaagaacaaagcaat

SEQ ID NO: 2507752 - DNA, 25 bp, Homo sapien
gaacattcctgaatctaacagtcct

SEQ ID NO: 2507753 - DNA, 25 bp, Homo sapien
aacattcctgaatctaacagtcctg

SEQ ID NO: 2507754 - DNA, 25 bp, Homo sapien
ctcagtttttactccagatggatga

SEQ ID NO: 2507755 - DNA, 25 bp, Homo sapien
ggagttgcagttaatgggctacgaa

SEQ ID NO: 2507756 - DNA, 25 bp, Homo sapien
gatttttctcgtgatacttcaatgg

SEQ ID NO: 2507757 - DNA, 25 bp, Homo sapien
atgggttttctttcacattggacag

SEQ ID NO: 2507758 - DNA, 25 bp, Homo sapien
ttgaagcggcacagttggaagattt

SEQ ID NO: 2507759 - DNA, 25 bp, Homo sapien
ggtaagcttaatgctgctaatagga

SEQ ID NO: 2507760 - DNA, 25 bp, Homo sapien
ggctaccatactaaactccaaagat

SEQ ID NO: 2507761 - DNA, 25 bp, Homo sapien
ttagaaatgtaagctgtaggtaagc

SEQ ID NO: 2507762 - DNA, 25 bp, Homo sapien
gctaataggagacatggctaccata

SEQ ID NO: 2507763 - DNA, 25 bp, Homo sapien
tttgttaatttcaatactcttgtag

SEQ ID NO: 2507764 - DNA, 25 bp, Homo sapien
tgttaatttcaatactcttgtagtt

SEQ ID NO: 2507765 - DNA, 25 bp, Homo sapien
ttgttaatttcaatactcttgtagt

SEQ ID NO: 2507766 - DNA, 25 bp, Homo sapien
tgtaacctgcagtattgacagcggt

SEQ ID NO: 2507767 - DNA, 25 bp, Homo sapien
cagcggtttcggtggtgcttattaa

SEQ ID NO: 2507768 - DNA, 25 bp, Homo sapien
caagttactgctccataatgacgtc

SEQ ID NO: 2507769 - DNA, 25 bp, Homo sapien
caatcctttgatcctcgacatgaat

SEQ ID NO: 2507770 - DNA, 25 bp, Homo sapien
cacatactacgcaaagatcaaaaac

SEQ ID NO: 2507771 - DNA, 25 bp, Homo sapien
tactacgcaaagatcaaaaacctta

SEQ ID NO: 2507772 - DNA, 25 bp, Homo sapien
gctttgtctccacatactacgcaaa

SEQ ID NO: 2507773 - DNA, 25 bp, Homo sapien
tgtctccacatactacgcaaagatc

SEQ ID NO: 2507774 - DNA, 25 bp, Homo sapien
caaatggtgctaatcttttatctat

SEQ ID NO: 2507775 - DNA, 25 bp, Homo sapien
ctgttgcaaatggtgctaatctttt

SEQ ID NO: 2507776 - DNA, 25 bp, Homo sapien
aaatggtgctaatcttttatctatt

SEQ ID NO: 2507777 - DNA, 25 bp, Homo sapien
tgttgcaaatggtgctaatctttta

SEQ ID NO: 2507778 - DNA, 25 bp, Homo sapien
agacagatcaggagtggtaaaaaat

SEQ ID NO: 2507779 - DNA, 25 bp, Homo sapien
cagacagatcaggagtggtaaaaaa

SEQ ID NO: 2507780 - DNA, 25 bp, Homo sapien
gacagatcaggagtggtaaaaaata

SEQ ID NO: 2507781 - DNA, 25 bp, Homo sapien
caggtgttgtgcagacagatcagga

SEQ ID NO: 2507782 - DNA, 25 bp, Homo sapien
tcccggagtggaatcttgcctggcc

SEQ ID NO: 2507783 - DNA, 25 bp, Homo sapien
aatgactttgcttggagtagagccg

SEQ ID NO: 2507784 - DNA, 25 bp, Homo sapien
agtagagccgtcgtgatttgtcaga

SEQ ID NO: 2507785 - DNA, 25 bp, Homo sapien
cagaatgaactgcttgccttgggta

SEQ ID NO: 2507786 - DNA, 25 bp, Homo sapien
ttaaactaccgattctattgccaca

SEQ ID NO: 2507787 - DNA, 25 bp, Homo sapien
ttttaaactaccgattctattgcca

SEQ ID NO: 2507788 - DNA, 25 bp, Homo sapien
tttaaactaccgattctattgccac

SEQ ID NO: 2507789 - DNA, 25 bp, Homo sapien
tttgtaggccaaacaaaagtctaga

SEQ ID NO: 2507790 - DNA, 25 bp, Homo sapien
ccaccaaagggtttggagcagagga

SEQ ID NO: 2507791 - DNA, 25 bp, Homo sapien
taaatttagtgtgaagaacagactg

SEQ ID NO: 2507792 - DNA, 25 bp, Homo sapien
gccaaacaaaagtctagatttccta

SEQ ID NO: 2507793 - DNA, 25 bp, Homo sapien
gtgcaatttcttctatggttgccat

SEQ ID NO: 2507794 - DNA, 25 bp, Homo sapien
ctgttgttcaataatttgatgtgca

SEQ ID NO: 2507795 - DNA, 25 bp, Homo sapien
ttgatgtgcaatttcttctatggtt

SEQ ID NO: 2507796 - DNA, 25 bp, Homo sapien
ctctcccatctgttgttcaataatt

SEQ ID NO: 2507797 - DNA, 25 bp, Homo sapien
cacaaaaatggtatctgcccgagtt

SEQ ID NO: 2507798 - DNA, 25 bp, Homo sapien
tctatcggaagcttggacatgcccc

SEQ ID NO: 2507799 - DNA, 25 bp, Homo sapien
tggcaacattcgtactgcacaaaaa

SEQ ID NO: 2507800 - DNA, 25 bp, Homo sapien
tcttaacaaaagagctatctatcgg

SEQ ID NO: 2507801 - DNA, 25 bp, Homo sapien
gattcacggcggagagagctttctg

SEQ ID NO: 2507802 - DNA, 25 bp, Homo sapien
ctttctgtgtttgggtatttctggg

SEQ ID NO: 2507803 - DNA, 25 bp, Homo sapien
tcccgcggctgccactcgtggattg

SEQ ID NO: 2507804 - DNA, 25 bp, Homo sapien
tctttctcggctcggcggcgcgcta

SEQ ID NO: 2507805 - DNA, 25 bp, Homo sapien
gacgtgttccatgccaagtcactgg

SEQ ID NO: 2507806 - DNA, 25 bp, Homo sapien
tgttggaagactgctctggccgtgt

SEQ ID NO: 2507807 - DNA, 25 bp, Homo sapien
tactgagtgtccactgcatgcaagg

SEQ ID NO: 2507808 - DNA, 25 bp, Homo sapien
gactaagggtcagctatcacagaga

SEQ ID NO: 2507809 - DNA, 25 bp, Homo sapien
aaaactgcaacgattctaacatgga

SEQ ID NO: 2507810 - DNA, 25 bp, Homo sapien
gaaattttagtgtacctgctatgac

SEQ ID NO: 2507811 - DNA, 25 bp, Homo sapien
aataacttgtcttgctaaatgccag

SEQ ID NO: 2507812 - DNA, 25 bp, Homo sapien
tcttagaagatagaatagcctggct

SEQ ID NO: 2507813 - DNA, 25 bp, Homo sapien
catcattgacttgggctcagaactc

SEQ ID NO: 2507814 - DNA, 25 bp, Homo sapien
tcatggttgctgttaaggatcacac

SEQ ID NO: 2507815 - DNA, 25 bp, Homo sapien
tctagtagggactctggtgctgtac

SEQ ID NO: 2507816 - DNA, 25 bp, Homo sapien
caccgctcatggcagttaagataat

SEQ ID NO: 2507817 - DNA, 25 bp, Homo sapien
tgacatatattgaaaagcagtactt

SEQ ID NO: 2507818 - DNA, 25 bp, Homo sapien
tctgacaatattagggcaattacta

SEQ ID NO: 2507819 - DNA, 25 bp, Homo sapien
ggtggcatttctatcttgtcaactc

SEQ ID NO: 2507820 - DNA, 25 bp, Homo sapien
gcatgttatactgccatagcaaggc

SEQ ID NO: 2507821 - DNA, 25 bp, Homo sapien
gtttaaactcctgctgttccatggc

SEQ ID NO: 2507822 - DNA, 25 bp, Homo sapien
gttccatggcacaaatgaatcgctg

SEQ ID NO: 2507823 - DNA, 25 bp, Homo sapien
ccccaaagaagttagcgagcagctg

SEQ ID NO: 2507824 - DNA, 25 bp, Homo sapien
gattcttaccctcatagaaggagag

SEQ ID NO: 2507825 - DNA, 25 bp, Homo sapien
ttctgagccgaatgagcatcctctg

SEQ ID NO: 2507826 - DNA, 25 bp, Homo sapien
gaaatactttagactcggaattctc

SEQ ID NO: 2507827 - DNA, 25 bp, Homo sapien
aacatgtttttgtgcagtaactgaa

SEQ ID NO: 2507828 - DNA, 25 bp, Homo sapien
taacagtgaatcctaataaaggctg

SEQ ID NO: 2507829 - DNA, 25 bp, Homo sapien
ggtaagctattcacctggatctcac

SEQ ID NO: 2507830 - DNA, 25 bp, Homo sapien
gaaaagtgtggaccctacagcagtg

SEQ ID NO: 2507831 - DNA, 25 bp, Homo sapien
gatcaatgcaatctaacgatgacag

SEQ ID NO: 2507832 - DNA, 25 bp, Homo sapien
ttcataggatggtggaacacagggt

SEQ ID NO: 2507833 - DNA, 25 bp, Homo sapien
ggtacaaagcaagaacactgttcac

SEQ ID NO: 2507834 - DNA, 25 bp, Homo sapien
agagctctccaggtacaaagcaaga

SEQ ID NO: 2507835 - DNA, 25 bp, Homo sapien
taattacttgcagttggcattacaa

SEQ ID NO: 2507836 - DNA, 25 bp, Homo sapien
tgtaattacttgcagttggcattac

SEQ ID NO: 2507837 - DNA, 25 bp, Homo sapien
gccctttgatctgtacaagtagcca

SEQ ID NO: 2507838 - DNA, 25 bp, Homo sapien
gatctgtacaagtagccactcatag

SEQ ID NO: 2507839 - DNA, 25 bp, Homo sapien
tttgatctgtacaagtagccactca

SEQ ID NO: 2507840 - DNA, 25 bp, Homo sapien
tgtacaagtagccactcatagaaga

SEQ ID NO: 2507841 - DNA, 25 bp, Homo sapien
gatttccaggagatccaatcctagg

SEQ ID NO: 2507842 - DNA, 25 bp, Homo sapien
gataaggcacttgaaggagatttgt

SEQ ID NO: 2507843 - DNA, 25 bp, Homo sapien
ccctgatggaatgctatgtaagact

SEQ ID NO: 2507844 - DNA, 25 bp, Homo sapien
ctatgtaagactgatgataaggcac

SEQ ID NO: 2507845 - DNA, 25 bp, Homo sapien
tagacgaacaagcttggcatacaat

SEQ ID NO: 2507846 - DNA, 25 bp, Homo sapien
ttttcaggtaatctaagccatactt

SEQ ID NO: 2507847 - DNA, 25 bp, Homo sapien
tacttattagacgaacaagcttggc

SEQ ID NO: 2507848 - DNA, 25 bp, Homo sapien
taatctaagccatacttattagacg

SEQ ID NO: 2507849 - DNA, 25 bp, Homo sapien
gaatccagatgggagccttcgatcc

SEQ ID NO: 2507850 - DNA, 25 bp, Homo sapien
tccaggtgagagtgaattcgcttgt

SEQ ID NO: 2507851 - DNA, 25 bp, Homo sapien
ccttcgatccaagaggactaacttc

SEQ ID NO: 2507852 - DNA, 25 bp, Homo sapien
gtgcagatcatacacattgtggctc

SEQ ID NO: 2507853 - DNA, 25 bp, Homo sapien
gaaatcgcttctagccattcatccc

SEQ ID NO: 2507854 - DNA, 25 bp, Homo sapien
tcaagactcctactaggacagaagg

SEQ ID NO: 2507855 - DNA, 25 bp, Homo sapien
gcatactcttctattgccctggaaa

SEQ ID NO: 2507856 - DNA, 25 bp, Homo sapien
gacagaaggtgattcttttcttggc

SEQ ID NO: 2507857 - DNA, 25 bp, Homo sapien
atctggtggatgcttcaggtacccc

SEQ ID NO: 2507858 - DNA, 25 bp, Homo sapien
caaaccctagacacaggtatttgtc

SEQ ID NO: 2507859 - DNA, 25 bp, Homo sapien
tgctagctgcgaagcatttgacaaa

SEQ ID NO: 2507860 - DNA, 25 bp, Homo sapien
gaaatttgcttgttctgactgctag

SEQ ID NO: 2507861 - DNA, 25 bp, Homo sapien
cagccacttccttgcatggtaaatc

SEQ ID NO: 2507862 - DNA, 25 bp, Homo sapien
aatctctgtgcttctagcatactgt

SEQ ID NO: 2507863 - DNA, 25 bp, Homo sapien
ccttgcatggtaaatcaagagtaaa

SEQ ID NO: 2507864 - DNA, 25 bp, Homo sapien
gcttctagcatactgttgcctctgc

SEQ ID NO: 2507865 - DNA, 25 bp, Homo sapien
tctgataggcttcttgggtaggttt

SEQ ID NO: 2507866 - DNA, 25 bp, Homo sapien
gagagaatgaaggaacgttctacac

SEQ ID NO: 2507867 - DNA, 25 bp, Homo sapien
gaacgttctacactttcaatcttta

SEQ ID NO: 2507868 - DNA, 25 bp, Homo sapien
tgataggcttcttgggtaggttttc

SEQ ID NO: 2507869 - DNA, 25 bp, Homo sapien
ttgttcagtttatacatcccagact

SEQ ID NO: 2507870 - DNA, 25 bp, Homo sapien
gttgtatacagcagggcatcattaa

SEQ ID NO: 2507871 - DNA, 25 bp, Homo sapien
cagtttatacatcccagactgcact

SEQ ID NO: 2507872 - DNA, 25 bp, Homo sapien
cccagactgcactggtgttgtatac

SEQ ID NO: 2507873 - DNA, 25 bp, Homo sapien
cattcgaggttgcatcactttccga

SEQ ID NO: 2507874 - DNA, 25 bp, Homo sapien
caggaaaaacattcgaggttgcatc

SEQ ID NO: 2507875 - DNA, 25 bp, Homo sapien
ctttccgagacagcttcatcagaat

SEQ ID NO: 2507876 - DNA, 25 bp, Homo sapien
gcatcactttccgagacagcttcat

SEQ ID NO: 2507877 - DNA, 25 bp, Homo sapien
caggctgcacaatttcatggtgtcc

SEQ ID NO: 2507878 - DNA, 25 bp, Homo sapien
gctgcacaatttcatggtgtccatt

SEQ ID NO: 2507879 - DNA, 25 bp, Homo sapien
ccgaccaggctgcacaatttcatgg

SEQ ID NO: 2507880 - DNA, 25 bp, Homo sapien
ttaagctgtactgaatttgcataag

SEQ ID NO: 2507881 - DNA, 25 bp, Homo sapien
cattggcgtggttggctacctctat

SEQ ID NO: 2507882 - DNA, 25 bp, Homo sapien
gtgtcattggcgtggttggctacct

SEQ ID NO: 2507883 - DNA, 25 bp, Homo sapien
gcgtggttggctacctctataacaa

SEQ ID NO: 2507884 - DNA, 25 bp, Homo sapien
tggttggctacctctataacaacag

SEQ ID NO: 2507885 - DNA, 25 bp, Homo sapien
actgtgagtaggcagaaatataagg

SEQ ID NO: 2507886 - DNA, 25 bp, Homo sapien
tgactgtgagtaggcagaaatataa

SEQ ID NO: 2507887 - DNA, 25 bp, Homo sapien
ttgactgtgagtaggcagaaatata

SEQ ID NO: 2507888 - DNA, 25 bp, Homo sapien
tattgactgtgagtaggcagaaata

SEQ ID NO: 2507889 - DNA, 25 bp, Homo sapien
gagtgtctctgtaatctccagcatc

SEQ ID NO: 2507890 - DNA, 25 bp, Homo sapien
cttgagtgtctctgtaatctccagc

SEQ ID NO: 2507891 - DNA, 25 bp, Homo sapien
tgtctctgtaatctccagcatcttc

SEQ ID NO: 2507892 - DNA, 25 bp, Homo sapien
tgagtgtctctgtaatctccagcat

SEQ ID NO: 2507893 - DNA, 25 bp, Homo sapien
gtctctaatagtccctttttctcca

SEQ ID NO: 2507894 - DNA, 25 bp, Homo sapien
ttgtctctaatagtccctttttctc

SEQ ID NO: 2507895 - DNA, 25 bp, Homo sapien
tgtctctaatagtccctttttctcc

SEQ ID NO: 2507896 - DNA, 25 bp, Homo sapien
tctctaatagtccctttttctccat

SEQ ID NO: 2507897 - DNA, 25 bp, Homo sapien
gggcctggatctccttaaacagtta

SEQ ID NO: 2507898 - DNA, 25 bp, Homo sapien
tcacctggggccttaactgcagcat

SEQ ID NO: 2507899 - DNA, 25 bp, Homo sapien
ttaactgcagcataagaatgtgact

SEQ ID NO: 2507900 - DNA, 25 bp, Homo sapien
cttaaacagttaagaatcacctggg

SEQ ID NO: 2507901 - DNA, 25 bp, Homo sapien
taataacaacgaggagagcagtcat

SEQ ID NO: 2507902 - DNA, 25 bp, Homo sapien
ttcctaataacaacgaggagagcag

SEQ ID NO: 2507903 - DNA, 25 bp, Homo sapien
gctttcctaataacaacgaggagag

SEQ ID NO: 2507904 - DNA, 25 bp, Homo sapien
tattcggcagaagctttcctaataa

SEQ ID NO: 2507905 - DNA, 25 bp, Homo sapien
catctatgcatatctcagtgggagg

SEQ ID NO: 2507906 - DNA, 25 bp, Homo sapien
cagtgggaggcacaaacctacttac

SEQ ID NO: 2507907 - DNA, 25 bp, Homo sapien
cttacattgaatcaggcaggactcc

SEQ ID NO: 2507908 - DNA, 25 bp, Homo sapien
ggttatttgaacagcagtgacagac

SEQ ID NO: 2507909 - DNA, 25 bp, Homo sapien
ggacaccatttcttaaggagagtaa

SEQ ID NO: 2507910 - DNA, 25 bp, Homo sapien
cactaggcaagctttgaagtgctga

SEQ ID NO: 2507911 - DNA, 25 bp, Homo sapien
gctaaaaggtaggtcttcctcgtga

SEQ ID NO: 2507912 - DNA, 25 bp, Homo sapien
gagtaacagaaacccagtacctcca

SEQ ID NO: 2507913 - DNA, 25 bp, Homo sapien
aggcaagaagagttggctgatggat

SEQ ID NO: 2507914 - DNA, 25 bp, Homo sapien
caactgggtggttggcaaaatgctg

SEQ ID NO: 2507915 - DNA, 25 bp, Homo sapien
aaccaactgggtggttggcaaaatg

SEQ ID NO: 2507916 - DNA, 25 bp, Homo sapien
tggataaaccaactgggtggttggc

SEQ ID NO: 2507917 - DNA, 25 bp, Homo sapien
tgcttgagggccagattagcacagc

SEQ ID NO: 2507918 - DNA, 25 bp, Homo sapien
caggtagtgcttgagggccagatta

SEQ ID NO: 2507919 - DNA, 25 bp, Homo sapien
ggccagattagcacagcgagggctc

SEQ ID NO: 2507920 - DNA, 25 bp, Homo sapien
ttgagggccagattagcacagcgag

SEQ ID NO: 2507921 - DNA, 25 bp, Homo sapien
ccagcaaggctatattcttatcaaa

SEQ ID NO: 2507922 - DNA, 25 bp, Homo sapien
ttttcttgcactgttcatccagcaa

SEQ ID NO: 2507923 - DNA, 25 bp, Homo sapien
ttctttgatgtatgtggaatacatt

SEQ ID NO: 2507924 - DNA, 25 bp, Homo sapien
cccttctttacaaagatatcagcaa

SEQ ID NO: 2507925 - DNA, 25 bp, Homo sapien
tccagttccttcaagagatcccggt

SEQ ID NO: 2507926 - DNA, 25 bp, Homo sapien
cggttgagctcatacagctgaggca

SEQ ID NO: 2507927 - DNA, 25 bp, Homo sapien
ttagaatccggtcctcaatcactgg

SEQ ID NO: 2507928 - DNA, 25 bp, Homo sapien
tcccaagttgcctggaagcatgagc

SEQ ID NO: 2507929 - DNA, 25 bp, Homo sapien
tgaactgaccagtgagatggctgcc

SEQ ID NO: 2507930 - DNA, 25 bp, Homo sapien
tgttttcaggtagctcggaatggac

SEQ ID NO: 2507931 - DNA, 25 bp, Homo sapien
ttgtcacacaccaggcaaaactctg

SEQ ID NO: 2507932 - DNA, 25 bp, Homo sapien
ggacccggtttgacacagcttttgc

SEQ ID NO: 2507933 - DNA, 25 bp, Homo sapien
catctggatccaggcctagggtagc

SEQ ID NO: 2507934 - DNA, 25 bp, Homo sapien
tctcacatgaaagaagctgctccag

SEQ ID NO: 2507935 - DNA, 25 bp, Homo sapien
tccagagtgaaggtttggtagccat

SEQ ID NO: 2507936 - DNA, 25 bp, Homo sapien
gaaatgtacgtctccacctaaagaa

SEQ ID NO: 2507937 - DNA, 25 bp, Homo sapien
gcaacagaataagatgctctctcaa

SEQ ID NO: 2507938 - DNA, 25 bp, Homo sapien
tgaagactttggacatatagctact

SEQ ID NO: 2507939 - DNA, 25 bp, Homo sapien
gatgctcttcatgtattgctaatgc

SEQ ID NO: 2507940 - DNA, 25 bp, Homo sapien
taatctctcctaaatggaggtagta

SEQ ID NO: 2507941 - DNA, 25 bp, Homo sapien
gcaaaagttttaacacatccacaaa

SEQ ID NO: 2507942 - DNA, 25 bp, Homo sapien
actttctctgagctcatgatctcct

SEQ ID NO: 2507943 - DNA, 25 bp, Homo sapien
ttggcaatatgatgaactttacttt

SEQ ID NO: 2507944 - DNA, 25 bp, Homo sapien
ctccttggcaatatgatgaacttta

SEQ ID NO: 2507945 - DNA, 25 bp, Homo sapien
ccttggcaatatgatgaactttact

SEQ ID NO: 2507946 - DNA, 25 bp, Homo sapien
tgaattccgcccaatatctggctga

SEQ ID NO: 2507947 - DNA, 25 bp, Homo sapien
tatttgtacactcccacccctgtag

SEQ ID NO: 2507948 - DNA, 25 bp, Homo sapien
gtagccactaatcttacagtttgtg

SEQ ID NO: 2507949 - DNA, 25 bp, Homo sapien
tatgcaataccaagaaatcctgacc

SEQ ID NO: 2507950 - DNA, 25 bp, Homo sapien
gagaaacatgggtatgagacttcag

SEQ ID NO: 2507951 - DNA, 25 bp, Homo sapien
caaactgagctatgtgaggtatgca

SEQ ID NO: 2507952 - DNA, 25 bp, Homo sapien
tgatatacttcacacccacacaatg

SEQ ID NO: 2507953 - DNA, 25 bp, Homo sapien
tggtagcccctactcatacggtgtg

SEQ ID NO: 2507954 - DNA, 25 bp, Homo sapien
caaacaaagaacccacttgtggcca

SEQ ID NO: 2507955 - DNA, 25 bp, Homo sapien
caaagaacccacttgtggccaggca

SEQ ID NO: 2507956 - DNA, 25 bp, Homo sapien
aacaaagaacccacttgtggccagg

SEQ ID NO: 2507957 - DNA, 25 bp, Homo sapien
acaaagaacccacttgtggccaggc

SEQ ID NO: 2507958 - DNA, 25 bp, Homo sapien
ttaagcacagtaggttcctcttatc

SEQ ID NO: 2507959 - DNA, 25 bp, Homo sapien
ccttcatagcttgtaacactctgaa

SEQ ID NO: 2507960 - DNA, 25 bp, Homo sapien
catagcttgtaacactctgaagttc

SEQ ID NO: 2507961 - DNA, 25 bp, Homo sapien
agcttgtaacactctgaagttcttc

SEQ ID NO: 2507962 - DNA, 25 bp, Homo sapien
tttatcttccagtgggtcaggctct

SEQ ID NO: 2507963 - DNA, 25 bp, Homo sapien
tcatcagaactgttgatgatttcct

SEQ ID NO: 2507964 - DNA, 25 bp, Homo sapien
tcatcttcatcagaactgttgatga

SEQ ID NO: 2507965 - DNA, 25 bp, Homo sapien
tgtttatcttccagtgggtcaggct

SEQ ID NO: 2507966 - DNA, 25 bp, Homo sapien
accaagaccaagatcattctgttcc

SEQ ID NO: 2507967 - DNA, 25 bp, Homo sapien
agagggaaggtcaccaagaccaaga

SEQ ID NO: 2507968 - DNA, 25 bp, Homo sapien
caccaagaccaagatcattctgttc

SEQ ID NO: 2507969 - DNA, 25 bp, Homo sapien
ctcatcagagggaaggtcaccaaga

SEQ ID NO: 2507970 - DNA, 25 bp, Homo sapien
tcccactgtccgaatgataacatcc

SEQ ID NO: 2507971 - DNA, 25 bp, Homo sapien
ggaacaggacatagggcttcctcca

SEQ ID NO: 2507972 - DNA, 25 bp, Homo sapien
gataacatcctaagactgtctgctt

SEQ ID NO: 2507973 - DNA, 25 bp, Homo sapien
ccacgtctttctgcctagttagttc

SEQ ID NO: 2507974 - DNA, 25 bp, Homo sapien
cctccactggaagtatatcaaattt

SEQ ID NO: 2507975 - DNA, 25 bp, Homo sapien
gtaataagtcacaactaaagtgaag

SEQ ID NO: 2507976 - DNA, 25 bp, Homo sapien
taaagtgaagtccttctcttttaga

SEQ ID NO: 2507977 - DNA, 25 bp, Homo sapien
tatatatttacagcacacctccact

SEQ ID NO: 2507978 - DNA, 25 bp, Homo sapien
tgttccagaaatgtggcatattcca

SEQ ID NO: 2507979 - DNA, 25 bp, Homo sapien
atgttccagaaatgtggcatattcc

SEQ ID NO: 2507980 - DNA, 25 bp, Homo sapien
gttccagaaatgtggcatattccat

SEQ ID NO: 2507981 - DNA, 25 bp, Homo sapien
ccagcttaaaggtctgagtcaagaa

SEQ ID NO: 2507982 - DNA, 25 bp, Homo sapien
tgagccacggttttgcagcaggtta

SEQ ID NO: 2507983 - DNA, 25 bp, Homo sapien
cagcaggttactcctagagctcatt

SEQ ID NO: 2507984 - DNA, 25 bp, Homo sapien
gtacagtaatatcctgaagctcaga

SEQ ID NO: 2507985 - DNA, 25 bp, Homo sapien
tttgtagagtacaaaagagcacaca

SEQ ID NO: 2507986 - DNA, 25 bp, Homo sapien
ttaacactgtgagggctcaataaga

SEQ ID NO: 2507987 - DNA, 25 bp, Homo sapien
tcactgctatcaagagtcaatctag

SEQ ID NO: 2507988 - DNA, 25 bp, Homo sapien
caagatttcaaagaccaggcagaga

SEQ ID NO: 2507989 - DNA, 25 bp, Homo sapien
ccaacctgggttgacagagcgagac

SEQ ID NO: 2507990 - DNA, 25 bp, Homo sapien
caacctgggttgacagagcgagacc

SEQ ID NO: 2507991 - DNA, 25 bp, Homo sapien
ttggctctacagaagcctgttacat

SEQ ID NO: 2507992 - DNA, 25 bp, Homo sapien
tggtggcgcacgtctctaatcagct

SEQ ID NO: 2507993 - DNA, 25 bp, Homo sapien
ttcaaatcagtttggctctacagaa

SEQ ID NO: 2507994 - DNA, 25 bp, Homo sapien
cacagtaacagcaggttgtgcatag

SEQ ID NO: 2507995 - DNA, 25 bp, Homo sapien
caggtttggctgttcgtcctttctc

SEQ ID NO: 2507996 - DNA, 25 bp, Homo sapien
taaatgatgacctatctggaacacc

SEQ ID NO: 2507997 - DNA, 25 bp, Homo sapien
tgcactaccaacaaaactgcctctg

SEQ ID NO: 2507998 - DNA, 25 bp, Homo sapien
tctgagaacccggagcggtgactaa

SEQ ID NO: 2507999 - DNA, 25 bp, Homo sapien
tgggcacgattttaataagagagat

SEQ ID NO: 2508000 - DNA, 25 bp, Homo sapien
ataagagagatggagtaggtattcc

SEQ ID NO: 2508001 - DNA, 25 bp, Homo sapien
aagagagatggagtaggtattccac

SEQ ID NO: 2508002 - DNA, 25 bp, Homo sapien
tgaggatgggcacgattttaataag

SEQ ID NO: 2508003 - DNA, 25 bp, Homo sapien
tcatacacatttgcatcagcgtcct

SEQ ID NO: 2508004 - DNA, 25 bp, Homo sapien
catctggagcttcatacggctcttc

SEQ ID NO: 2508005 - DNA, 25 bp, Homo sapien
ggcaagttctcgtactctggtattt

SEQ ID NO: 2508006 - DNA, 25 bp, Homo sapien
aactcttgagttttccgtatagcca

SEQ ID NO: 2508007 - DNA, 25 bp, Homo sapien
accattagctgcactggtctggccc

SEQ ID NO: 2508008 - DNA, 25 bp, Homo sapien
gactcccgggagagcatttggtcat

SEQ ID NO: 2508009 - DNA, 25 bp, Homo sapien
aaggtgcctgagatgatgactcccg

SEQ ID NO: 2508010 - DNA, 25 bp, Homo sapien
aaagactcagctctcagaccattag

SEQ ID NO: 2508011 - DNA, 25 bp, Homo sapien
gacacaccacggttttgggcacaca

SEQ ID NO: 2508012 - DNA, 25 bp, Homo sapien
ctttttaagcactcctgtagcaggc

SEQ ID NO: 2508013 - DNA, 25 bp, Homo sapien
gacgatacggtgacagactttaaga

SEQ ID NO: 2508014 - DNA, 25 bp, Homo sapien
gaaggctcactgtttgacgatacgg

SEQ ID NO: 2508015 - DNA, 25 bp, Homo sapien
gagctactgtctgaattccccggtt

SEQ ID NO: 2508016 - DNA, 25 bp, Homo sapien
taggcaggctcatagatacagtaca

SEQ ID NO: 2508017 - DNA, 25 bp, Homo sapien
cacttttggcgtaacagacgagcag

SEQ ID NO: 2508018 - DNA, 25 bp, Homo sapien
gactgcccaatctctcgaacaggtg

SEQ ID NO: 2508019 - DNA, 25 bp, Homo sapien
tcgactgtggaacactagaaatcac

SEQ ID NO: 2508020 - DNA, 25 bp, Homo sapien
tagaaatcacaatgtcgggtttagg

SEQ ID NO: 2508021 - DNA, 25 bp, Homo sapien
caatgtcgggtttaggtgcaatagg

SEQ ID NO: 2508022 - DNA, 25 bp, Homo sapien
tttctttgtcgactgtggaacacta

SEQ ID NO: 2508023 - DNA, 25 bp, Homo sapien
tgttccttaagaatgttcagaaaca

SEQ ID NO: 2508024 - DNA, 25 bp, Homo sapien
ttgttccttaagaatgttcagaaac

SEQ ID NO: 2508025 - DNA, 25 bp, Homo sapien
aattgttccttaagaatgttcagaa

SEQ ID NO: 2508026 - DNA, 25 bp, Homo sapien
aaattgttccttaagaatgttcaga

SEQ ID NO: 2508027 - DNA, 25 bp, Homo sapien
aaagatagaggctttgtcatttgga

SEQ ID NO: 2508028 - DNA, 25 bp, Homo sapien
caaagatagaggctttgtcatttgg

SEQ ID NO: 2508029 - DNA, 25 bp, Homo sapien
ttgaacacgctgagaacactgcctt

SEQ ID NO: 2508030 - DNA, 25 bp, Homo sapien
tggaagggagatcccgagaaatccc

SEQ ID NO: 2508031 - DNA, 25 bp, Homo sapien
gctggagagatgagcgaacgccctt

SEQ ID NO: 2508032 - DNA, 25 bp, Homo sapien
cacatcgcatttcacctggtgcaga

SEQ ID NO: 2508033 - DNA, 25 bp, Homo sapien
tacactattttcacatgcaaaggcg

SEQ ID NO: 2508034 - DNA, 25 bp, Homo sapien
gctcggcccctcaatccatcttccc

SEQ ID NO: 2508035 - DNA, 25 bp, Homo sapien
tcgcttccccgctcggcccctcaat

SEQ ID NO: 2508036 - DNA, 25 bp, Homo sapien
agcgcccacattccgtcccgccgcc

SEQ ID NO: 2508037 - DNA, 25 bp, Homo sapien
cattgttcccacagttcgggtagga

SEQ ID NO: 2508038 - DNA, 25 bp, Homo sapien
aaggacgcggccgactctagcgacc

SEQ ID NO: 2508039 - DNA, 25 bp, Homo sapien
ctagtcgcggccgtaaaaggcagac

SEQ ID NO: 2508040 - DNA, 25 bp, Homo sapien
atcggagggctcgagcttcagctcg

SEQ ID NO: 2508041 - DNA, 25 bp, Homo sapien
gcgcgggcacgagcagtgctctctt

SEQ ID NO: 2508042 - DNA, 25 bp, Homo sapien
ctcttctccaataagcgggctcgaa

SEQ ID NO: 2508043 - DNA, 25 bp, Homo sapien
cttctccaataagcgggctcgaaaa

SEQ ID NO: 2508044 - DNA, 25 bp, Homo sapien
ggctcgaaaagggggcgtgagcggc

SEQ ID NO: 2508045 - DNA, 25 bp, Homo sapien
cgaaaagggggcgtgagcggcgagg

SEQ ID NO: 2508046 - DNA, 25 bp, Homo sapien
tgggaattgtagttttctggaccca

SEQ ID NO: 2508047 - DNA, 25 bp, Homo sapien
ggagctccgtgccgcctgtactccc

SEQ ID NO: 2508048 - DNA, 25 bp, Homo sapien
ctgtactcccgccttcatttcccat

SEQ ID NO: 2508049 - DNA, 25 bp, Homo sapien
tccgtgccgcctgtactcccgcctt

SEQ ID NO: 2508050 - DNA, 25 bp, Homo sapien
gccgcctgtactcccgccttcattt

SEQ ID NO: 2508051 - DNA, 25 bp, Homo sapien
gaaatcgaggaagcaaggcgttccc

SEQ ID NO: 2508052 - DNA, 25 bp, Homo sapien
gaaccccagcgatttcagggcctag

SEQ ID NO: 2508053 - DNA, 25 bp, Homo sapien
gatgacaccggagtttgacgaagag

SEQ ID NO: 2508054 - DNA, 25 bp, Homo sapien
tttgagaaggacgagacggaaatcg

SEQ ID NO: 2508055 - DNA, 25 bp, Homo sapien
taaccctgatcaagaggtcatgggc

SEQ ID NO: 2508056 - DNA, 25 bp, Homo sapien
aaacctgttgccttcacaccctaga

SEQ ID NO: 2508057 - DNA, 25 bp, Homo sapien
cctcattatgatcagcgaggcctgg

SEQ ID NO: 2508058 - DNA, 25 bp, Homo sapien
gaagatgctctctttttggactgaa

SEQ ID NO: 2508059 - DNA, 25 bp, Homo sapien
aatgcttcattctgcagtcactcag

SEQ ID NO: 2508060 - DNA, 25 bp, Homo sapien
tcaaactgttcaagttatataggca

SEQ ID NO: 2508061 - DNA, 25 bp, Homo sapien
gaatcaagaagtacactaaatcact

SEQ ID NO: 2508062 - DNA, 25 bp, Homo sapien
cattcattggcctcaaggttctgta

SEQ ID NO: 2508063 - DNA, 25 bp, Homo sapien
caagtttgcttgacagggtcagtgc

SEQ ID NO: 2508064 - DNA, 25 bp, Homo sapien
tcagcatctcatcggtcttcggaaa

SEQ ID NO: 2508065 - DNA, 25 bp, Homo sapien
taagagccaacttccaagcagcaag

SEQ ID NO: 2508066 - DNA, 25 bp, Homo sapien
ggaaagctgtctaccgaactctaag

SEQ ID NO: 2508067 - DNA, 25 bp, Homo sapien
tagtaagctctctttagatgtttct

SEQ ID NO: 2508068 - DNA, 25 bp, Homo sapien
ttcctactaagtatttagtaagctc

SEQ ID NO: 2508069 - DNA, 25 bp, Homo sapien
aattagtgcaagtattgttgttagc

SEQ ID NO: 2508070 - DNA, 25 bp, Homo sapien
ccttgataccgtgaaaattagtgca

SEQ ID NO: 2508071 - DNA, 25 bp, Homo sapien
catatttgccttttgtgccagcacc

SEQ ID NO: 2508072 - DNA, 25 bp, Homo sapien
aaagcaatttcaatttgaggatact

SEQ ID NO: 2508073 - DNA, 25 bp, Homo sapien
atcaattcttcactgccatctgtgg

SEQ ID NO: 2508074 - DNA, 25 bp, Homo sapien
tgccttttgtgccagcaccaagtct

SEQ ID NO: 2508075 - DNA, 25 bp, Homo sapien
ttcactgccagataaaggttttctt

SEQ ID NO: 2508076 - DNA, 25 bp, Homo sapien
tcactgccagataaaggttttcttt

SEQ ID NO: 2508077 - DNA, 25 bp, Homo sapien
tttgtcaacagcatctcttctttga

SEQ ID NO: 2508078 - DNA, 25 bp, Homo sapien
ttggtttgtcaacagcatctcttct

SEQ ID NO: 2508079 - DNA, 25 bp, Homo sapien
actttcccattccctgcgtgtctat

SEQ ID NO: 2508080 - DNA, 25 bp, Homo sapien
tcccattccctgcgtgtctatctag

SEQ ID NO: 2508081 - DNA, 25 bp, Homo sapien
tttcccattccctgcgtgtctatct

SEQ ID NO: 2508082 - DNA, 25 bp, Homo sapien
ttcccattccctgcgtgtctatcta

SEQ ID NO: 2508083 - DNA, 25 bp, Homo sapien
gaaccctggtttgaataactgatct

SEQ ID NO: 2508084 - DNA, 25 bp, Homo sapien
taagggctcttttgaataaactgct

SEQ ID NO: 2508085 - DNA, 25 bp, Homo sapien
gcttcaagactggaaagggaatatg

SEQ ID NO: 2508086 - DNA, 25 bp, Homo sapien
gatgtggatttacaggaagaaccct

SEQ ID NO: 2508087 - DNA, 25 bp, Homo sapien
tactcccagtgattcttagttggtc

SEQ ID NO: 2508088 - DNA, 25 bp, Homo sapien
ccaataaaatctaggaacctctgtc

SEQ ID NO: 2508089 - DNA, 25 bp, Homo sapien
caggccaatgtaatatgagtaggtt

SEQ ID NO: 2508090 - DNA, 25 bp, Homo sapien
gcaaattttagaccatactcccagt

SEQ ID NO: 2508091 - DNA, 25 bp, Homo sapien
gaagtcattgagtaggaaatatccc

SEQ ID NO: 2508092 - DNA, 25 bp, Homo sapien
gctatagccattgaaaattaagttg

SEQ ID NO: 2508093 - DNA, 25 bp, Homo sapien
tatcccatatagtagtccttccttg

SEQ ID NO: 2508094 - DNA, 25 bp, Homo sapien
tttgaaggtctttagcagatgtgct

SEQ ID NO: 2508095 - DNA, 25 bp, Homo sapien
tttagaagcagatacaatgttatat

SEQ ID NO: 2508096 - DNA, 25 bp, Homo sapien
gcaaccgaaaggaatccgaatgact

SEQ ID NO: 2508097 - DNA, 25 bp, Homo sapien
gggattatattgtgcctttgaacca

SEQ ID NO: 2508098 - DNA, 25 bp, Homo sapien
tgttatatttgagcaaccgaaagga

SEQ ID NO: 2508099 - DNA, 25 bp, Homo sapien
tcagcaggttacaagcccatagtcc

SEQ ID NO: 2508100 - DNA, 25 bp, Homo sapien
ggttacaagcccatagtcctagaaa

SEQ ID NO: 2508101 - DNA, 25 bp, Homo sapien
ctagctcagcaggttacaagcccat

SEQ ID NO: 2508102 - DNA, 25 bp, Homo sapien
tacaagcccatagtcctagaaacac

SEQ ID NO: 2508103 - DNA, 25 bp, Homo sapien
ggagaagacatagactatgatgacc

SEQ ID NO: 2508104 - DNA, 25 bp, Homo sapien
gatgctgtgagagctacattggcac

SEQ ID NO: 2508105 - DNA, 25 bp, Homo sapien
tatgatgacctggtccgcagaggac

SEQ ID NO: 2508106 - DNA, 25 bp, Homo sapien
cagtgttctccttaggaccatggga

SEQ ID NO: 2508107 - DNA, 25 bp, Homo sapien
gcaaaccaggtatccttgctttcaa

SEQ ID NO: 2508108 - DNA, 25 bp, Homo sapien
gaagcaaaccaggtatccttgcttt

SEQ ID NO: 2508109 - DNA, 25 bp, Homo sapien
ctgggaagcaaaccaggtatccttg

SEQ ID NO: 2508110 - DNA, 25 bp, Homo sapien
gggaagcaaaccaggtatccttgct

SEQ ID NO: 2508111 - DNA, 25 bp, Homo sapien
cgcagtagagagaccaagctgctcc

SEQ ID NO: 2508112 - DNA, 25 bp, Homo sapien
aaggcttcgcttaaggcttccaaag

SEQ ID NO: 2508113 - DNA, 25 bp, Homo sapien
gagagagtgacacacggccttctct

SEQ ID NO: 2508114 - DNA, 25 bp, Homo sapien
cttccaaaggctgccacgcagtaga

SEQ ID NO: 2508115 - DNA, 25 bp, Homo sapien
tgaaggtactccttatcctcgcctt

SEQ ID NO: 2508116 - DNA, 25 bp, Homo sapien
ggtatttcggcattgaaggtactcc

SEQ ID NO: 2508117 - DNA, 25 bp, Homo sapien
ggcttcaagacacccttttgttcta

SEQ ID NO: 2508118 - DNA, 25 bp, Homo sapien
cctgggtactatttgtggaaacttg

SEQ ID NO: 2508119 - DNA, 25 bp, Homo sapien
tcacatgaatatctgatgggctaac

SEQ ID NO: 2508120 - DNA, 25 bp, Homo sapien
tctcccagtagtgtgagctttcaca

SEQ ID NO: 2508121 - DNA, 25 bp, Homo sapien
ttttggagccatacacataattcac

SEQ ID NO: 2508122 - DNA, 25 bp, Homo sapien
tcacagatagatgtctgacacttag

SEQ ID NO: 2508123 - DNA, 25 bp, Homo sapien
ggttttagcctagacttcctcaaca

SEQ ID NO: 2508124 - DNA, 25 bp, Homo sapien
aatatgtaagccctatgctgtttct

SEQ ID NO: 2508125 - DNA, 25 bp, Homo sapien
tcaaaatcaatcaagctagctcact

SEQ ID NO: 2508126 - DNA, 25 bp, Homo sapien
tgtttcacctcttgacaaacaaagg

SEQ ID NO: 2508127 - DNA, 25 bp, Homo sapien
ctaccactttgggtaggcatggagg

SEQ ID NO: 2508128 - DNA, 25 bp, Homo sapien
atgccacttgtagaccaaggtggtg

SEQ ID NO: 2508129 - DNA, 25 bp, Homo sapien
cttgtagaccaaggtggtggcagaa

SEQ ID NO: 2508130 - DNA, 25 bp, Homo sapien
gacctaccactttgggtaggcatgg

SEQ ID NO: 2508131 - DNA, 25 bp, Homo sapien
gaggaacgttgaggatcacacagga

SEQ ID NO: 2508132 - DNA, 25 bp, Homo sapien
catttgcaacaggtcagaggaacgt

SEQ ID NO: 2508133 - DNA, 25 bp, Homo sapien
taccttcacccctgtgtcagagtgg

SEQ ID NO: 2508134 - DNA, 25 bp, Homo sapien
tgtaggagcccttagtcagagccag

SEQ ID NO: 2508135 - DNA, 25 bp, Homo sapien
ggtaccagcatgagctaactttatg

SEQ ID NO: 2508136 - DNA, 25 bp, Homo sapien
tcctatcggtgcctggtaccagcat

SEQ ID NO: 2508137 - DNA, 25 bp, Homo sapien
tagagatgcccctgcctttgacaaa

SEQ ID NO: 2508138 - DNA, 25 bp, Homo sapien
tgagagcacgccctccagaaagtcc

SEQ ID NO: 2508139 - DNA, 25 bp, Homo sapien
caacagggaagatcagtttactttt

SEQ ID NO: 2508140 - DNA, 25 bp, Homo sapien
aatttgagcgcgcatccaacaggga

SEQ ID NO: 2508141 - DNA, 25 bp, Homo sapien
ctttatggaatttgagcgcgcatcc

SEQ ID NO: 2508142 - DNA, 25 bp, Homo sapien
ttgagcgcgcatccaacagggaaga

SEQ ID NO: 2508143 - DNA, 25 bp, Homo sapien
tatcctgaccctcactaacattaaa

SEQ ID NO: 2508144 - DNA, 25 bp, Homo sapien
tgaccttatcctgaccctcactaac

SEQ ID NO: 2508145 - DNA, 25 bp, Homo sapien
cttatcctgaccctcactaacatta

SEQ ID NO: 2508146 - DNA, 25 bp, Homo sapien
accttatcctgaccctcactaacat

SEQ ID NO: 2508147 - DNA, 25 bp, Homo sapien
aggagccatccaccagagcgtaatg

SEQ ID NO: 2508148 - DNA, 25 bp, Homo sapien
tttttgacaattggcatctgaggct

SEQ ID NO: 2508149 - DNA, 25 bp, Homo sapien
caggtcctcatagcggcgccggata

SEQ ID NO: 2508150 - DNA, 25 bp, Homo sapien
gataagttgtttgttgacgccctct

SEQ ID NO: 2508151 - DNA, 25 bp, Homo sapien
acactgagaccctgatatgaaggta

SEQ ID NO: 2508152 - DNA, 25 bp, Homo sapien
ctgagaccctgatatgaaggtagca

SEQ ID NO: 2508153 - DNA, 25 bp, Homo sapien
cactgagaccctgatatgaaggtag

SEQ ID NO: 2508154 - DNA, 25 bp, Homo sapien
tgagaccctgatatgaaggtagcat

SEQ ID NO: 2508155 - DNA, 25 bp, Homo sapien
gcaggtatcgtgataaggtgacttg

SEQ ID NO: 2508156 - DNA, 25 bp, Homo sapien
tcatattacagatacaataggcagg

SEQ ID NO: 2508157 - DNA, 25 bp, Homo sapien
tatcgtgataaggtgacttgtctgg

SEQ ID NO: 2508158 - DNA, 25 bp, Homo sapien
tacaataggcaggtatcgtgataag

SEQ ID NO: 2508159 - DNA, 25 bp, Homo sapien
ggctacttgtagtctcttcacagct

SEQ ID NO: 2508160 - DNA, 25 bp, Homo sapien
tatggctacttgtagtctcttcaca

SEQ ID NO: 2508161 - DNA, 25 bp, Homo sapien
tttgaattatggctacttgtagtct

SEQ ID NO: 2508162 - DNA, 25 bp, Homo sapien
ttcacagctatactggggactgtct

SEQ ID NO: 2508163 - DNA, 25 bp, Homo sapien
agataaggctctttagcttctccca

SEQ ID NO: 2508164 - DNA, 25 bp, Homo sapien
gataaggctctttagcttctcccag

SEQ ID NO: 2508165 - DNA, 25 bp, Homo sapien
tagctcttgaggtgcattttgggtg

SEQ ID NO: 2508166 - DNA, 25 bp, Homo sapien
ttagctcttgaggtgcattttgggt

SEQ ID NO: 2508167 - DNA, 25 bp, Homo sapien
ttcccatctttccgttcaggtttca

SEQ ID NO: 2508168 - DNA, 25 bp, Homo sapien
tcccatctttccgttcaggtttcaa

SEQ ID NO: 2508169 - DNA, 25 bp, Homo sapien
ctgatcaaagaaatagataggccca

SEQ ID NO: 2508170 - DNA, 25 bp, Homo sapien
gatcaaagaaatagataggcccaga

SEQ ID NO: 2508171 - DNA, 25 bp, Homo sapien
tcaaagaaatagataggcccagagt

SEQ ID NO: 2508172 - DNA, 25 bp, Homo sapien
ggcttggctttggtaaattccttca

SEQ ID NO: 2508173 - DNA, 25 bp, Homo sapien
tcattccaattttactatatgtgct

SEQ ID NO: 2508174 - DNA, 25 bp, Homo sapien
gtcatccttgtgcagggcccatgct

SEQ ID NO: 2508175 - DNA, 25 bp, Homo sapien
aatcttctctgtatcattccaattt

SEQ ID NO: 2508176 - DNA, 25 bp, Homo sapien
aatggaacgcttcacgaatttgtgt

SEQ ID NO: 2508177 - DNA, 25 bp, Homo sapien
tctgtcctcacattggcagagatat

SEQ ID NO: 2508178 - DNA, 25 bp, Homo sapien
tcctgcctcaggtttatttgtacaa

SEQ ID NO: 2508179 - DNA, 25 bp, Homo sapien
gccccatgcagatggtagcccaggg

SEQ ID NO: 2508180 - DNA, 25 bp, Homo sapien
cagccccatgcagatggtagcccag

SEQ ID NO: 2508181 - DNA, 25 bp, Homo sapien
ccctttggcaatatgggcacaagca

SEQ ID NO: 2508182 - DNA, 25 bp, Homo sapien
cctgagccctttggcaatatgggca

SEQ ID NO: 2508183 - DNA, 25 bp, Homo sapien
gagccctttggcaatatgggcacaa

SEQ ID NO: 2508184 - DNA, 25 bp, Homo sapien
agcctgagccctttggcaatatggg

SEQ ID NO: 2508185 - DNA, 25 bp, Homo sapien
gctgacaccctttgggatcttgggc

SEQ ID NO: 2508186 - DNA, 25 bp, Homo sapien
tcaatcgagcttgtggctgacaccc

SEQ ID NO: 2508187 - DNA, 25 bp, Homo sapien
gatcttgggcttaacctccttgggc

SEQ ID NO: 2508188 - DNA, 25 bp, Homo sapien
tgggatcttgggcttaacctccttg

SEQ ID NO: 2508189 - DNA, 25 bp, Homo sapien
cctcggcacgtgcactcatggcctt

SEQ ID NO: 2508190 - DNA, 25 bp, Homo sapien
ggccttgatagcctcggcacgtgca

SEQ ID NO: 2508191 - DNA, 25 bp, Homo sapien
cggcacgtgcactcatggccttggc

SEQ ID NO: 2508192 - DNA, 25 bp, Homo sapien
gagggccttgatagcctcggcacgt

SEQ ID NO: 2508193 - DNA, 25 bp, Homo sapien
ttcgtatctttgtgatcggggtttc

SEQ ID NO: 2508194 - DNA, 25 bp, Homo sapien
ttgtgatcggggtttcttgatacca

SEQ ID NO: 2508195 - DNA, 25 bp, Homo sapien
cacccccttaagagattcgtatctt

SEQ ID NO: 2508196 - DNA, 25 bp, Homo sapien
tccacccccttaagagattcgtatc

SEQ ID NO: 2508197 - DNA, 25 bp, Homo sapien
ttcaggactggttgtgtgtggtgtg

SEQ ID NO: 2508198 - DNA, 25 bp, Homo sapien
tgtgccattttcaggactggttgtg

SEQ ID NO: 2508199 - DNA, 25 bp, Homo sapien
cattttcaggactggttgtgtgtgg

SEQ ID NO: 2508200 - DNA, 25 bp, Homo sapien
tgccattttcaggactggttgtgtg

SEQ ID NO: 2508201 - DNA, 25 bp, Homo sapien
ttctagtctcatctcatcacactca

SEQ ID NO: 2508202 - DNA, 25 bp, Homo sapien
ccttctccacctctttgcattccag

SEQ ID NO: 2508203 - DNA, 25 bp, Homo sapien
ctttctagtctcatctcatcacact

SEQ ID NO: 2508204 - DNA, 25 bp, Homo sapien
tctccacctctttgcattccagcca

SEQ ID NO: 2508205 - DNA, 25 bp, Homo sapien
gataggtgctgcctgaagctttaag

SEQ ID NO: 2508206 - DNA, 25 bp, Homo sapien
taaactcactggcaataaggctctt

SEQ ID NO: 2508207 - DNA, 25 bp, Homo sapien
caaactgcggtttgaacatgaggct

SEQ ID NO: 2508208 - DNA, 25 bp, Homo sapien
taacgacattttgatgcccatgaag

SEQ ID NO: 2508209 - DNA, 25 bp, Homo sapien
tccgggaacggctgaactgtttggc

SEQ ID NO: 2508210 - DNA, 25 bp, Homo sapien
gaatggcgacctggatccagacgac

SEQ ID NO: 2508211 - DNA, 25 bp, Homo sapien
gagccccgactagactgattcttgg

SEQ ID NO: 2508212 - DNA, 25 bp, Homo sapien
caaagccgggctatagattcctagt

SEQ ID NO: 2508213 - DNA, 25 bp, Homo sapien
tacaggagtcatggatcttattccc

SEQ ID NO: 2508214 - DNA, 25 bp, Homo sapien
tatgacctcaagtggaaggatgact

SEQ ID NO: 2508215 - DNA, 25 bp, Homo sapien
aaaagaaattcgttagcactggcag

SEQ ID NO: 2508216 - DNA, 25 bp, Homo sapien
aaatgtgagccatgtctttcaagga

SEQ ID NO: 2508217 - DNA, 25 bp, Homo sapien
gaacataccatcctgttgcgtccaa

SEQ ID NO: 2508218 - DNA, 25 bp, Homo sapien
gaatgactacatccagttctgcacc

SEQ ID NO: 2508219 - DNA, 25 bp, Homo sapien
tcagcagaggagatgactattaaac

SEQ ID NO: 2508220 - DNA, 25 bp, Homo sapien
ctggcatagtggctaaaacaagatc

SEQ ID NO: 2508221 - DNA, 25 bp, Homo sapien
tacaacgatgtaccttattggcaac

SEQ ID NO: 2508222 - DNA, 25 bp, Homo sapien
gagctcgccagttcatgcctggaca

SEQ ID NO: 2508223 - DNA, 25 bp, Homo sapien
tcaacttagcagaatgtagacgtcc

SEQ ID NO: 2508224 - DNA, 25 bp, Homo sapien
gaaacctatgacttgtgtacctaga

SEQ ID NO: 2508225 - DNA, 25 bp, Homo sapien
aaaatgacgtgctaaaatgtataac

SEQ ID NO: 2508226 - DNA, 25 bp, Homo sapien
gacgtgctaaaatgtataacgttaa

SEQ ID NO: 2508227 - DNA, 25 bp, Homo sapien
gaaattagaaaagagtagactctgg

SEQ ID NO: 2508228 - DNA, 25 bp, Homo sapien
aatgacgtgctaaaatgtataacgt

SEQ ID NO: 2508229 - DNA, 25 bp, Homo sapien
taatcctagcaagagtaaatcaagc

SEQ ID NO: 2508230 - DNA, 25 bp, Homo sapien
catgtcacttcaataactccaaggg

SEQ ID NO: 2508231 - DNA, 25 bp, Homo sapien
cagggccagtgttttaagaggctcc

SEQ ID NO: 2508232 - DNA, 25 bp, Homo sapien
aagaggctcctacctagtagtcaca

SEQ ID NO: 2508233 - DNA, 25 bp, Homo sapien
tcatccgagccaattaagacataaa

SEQ ID NO: 2508234 - DNA, 25 bp, Homo sapien
aactttgttggtagaagattgcaca

SEQ ID NO: 2508235 - DNA, 25 bp, Homo sapien
gattgcacaagttcatcatccgagc

SEQ ID NO: 2508236 - DNA, 25 bp, Homo sapien
aacatcagtctgaggtaaacaccaa

SEQ ID NO: 2508237 - DNA, 25 bp, Homo sapien
tgtccattctcagtaactcgttggg

SEQ ID NO: 2508238 - DNA, 25 bp, Homo sapien
gatttcattagacgaggtatcagcg

SEQ ID NO: 2508239 - DNA, 25 bp, Homo sapien
tagtttggaatcattgcagtgtacc

SEQ ID NO: 2508240 - DNA, 25 bp, Homo sapien
tgttggctccccaacaggagctctg

SEQ ID NO: 2508241 - DNA, 25 bp, Homo sapien
cagtgtagtgccctgagccaaatcc

SEQ ID NO: 2508242 - DNA, 25 bp, Homo sapien
tcagaattatagcagtaggcagtgt

SEQ ID NO: 2508243 - DNA, 25 bp, Homo sapien
tcaccaccgcggacaagtcatagat

SEQ ID NO: 2508244 - DNA, 25 bp, Homo sapien
taagatttcctcaaagccaacatga

SEQ ID NO: 2508245 - DNA, 25 bp, Homo sapien
ctggtcatacttcccattactggat

SEQ ID NO: 2508246 - DNA, 25 bp, Homo sapien
gctggtcatacttcccattactgga

SEQ ID NO: 2508247 - DNA, 25 bp, Homo sapien
gtgtttatcaatatgcataatgagt

SEQ ID NO: 2508248 - DNA, 25 bp, Homo sapien
tatcaatatgcataatgagttggtg

SEQ ID NO: 2508249 - DNA, 25 bp, Homo sapien
gcaatgtgtttatcaatatgcataa

SEQ ID NO: 2508250 - DNA, 25 bp, Homo sapien
ggcaagcaatgtgtttatcaatatg

SEQ ID NO: 2508251 - DNA, 25 bp, Homo sapien
ggtggcatatcataagttgtttctg

SEQ ID NO: 2508252 - DNA, 25 bp, Homo sapien
gaatcgtttgaggtgcagtctgaga

SEQ ID NO: 2508253 - DNA, 25 bp, Homo sapien
cttctgtgagtacaactggtttgga

SEQ ID NO: 2508254 - DNA, 25 bp, Homo sapien
tgcagtctgagaacctgaggtaggt

SEQ ID NO: 2508255 - DNA, 25 bp, Homo sapien
cttcctctcatctgcgtttctcttt

SEQ ID NO: 2508256 - DNA, 25 bp, Homo sapien
cctctcatctgcgtttctctttatc

SEQ ID NO: 2508257 - DNA, 25 bp, Homo sapien
ttcctctcatctgcgtttctcttta

SEQ ID NO: 2508258 - DNA, 25 bp, Homo sapien
tctcatctgcgtttctctttatcat

SEQ ID NO: 2508259 - DNA, 25 bp, Homo sapien
tttccactgcattgatacctttctg

SEQ ID NO: 2508260 - DNA, 25 bp, Homo sapien
cactggtcacatacgtagatttttc

SEQ ID NO: 2508261 - DNA, 25 bp, Homo sapien
cccagaaaggttctatggtatttga

SEQ ID NO: 2508262 - DNA, 25 bp, Homo sapien
acatttcagtaaccagacatggctg

SEQ ID NO: 2508263 - DNA, 25 bp, Homo sapien
gagctggtaaactggtaccagttgt

SEQ ID NO: 2508264 - DNA, 25 bp, Homo sapien
taccagttgtctctaattcacgttg

SEQ ID NO: 2508265 - DNA, 25 bp, Homo sapien
aaattcctgagcgtcttgttgggcg

SEQ ID NO: 2508266 - DNA, 25 bp, Homo sapien
gcgtaaccacgaaaggcaggaatga

SEQ ID NO: 2508267 - DNA, 25 bp, Homo sapien
tactgtgaagttggctcctttggct

SEQ ID NO: 2508268 - DNA, 25 bp, Homo sapien
aatggtgagaccaacgcccactttc

SEQ ID NO: 2508269 - DNA, 25 bp, Homo sapien
aaagtatgcaattcatgacaaagag

SEQ ID NO: 2508270 - DNA, 25 bp, Homo sapien
ggctgaataagttccatctttctac

SEQ ID NO: 2508271 - DNA, 25 bp, Homo sapien
tgttacaccaggagttactattggc

SEQ ID NO: 2508272 - DNA, 25 bp, Homo sapien
tagccagccattggttcagatcaag

SEQ ID NO: 2508273 - DNA, 25 bp, Homo sapien
tactactgtatctgtgactggtgga

SEQ ID NO: 2508274 - DNA, 25 bp, Homo sapien
tcttctcgctagcagtcatagccag

SEQ ID NO: 2508275 - DNA, 25 bp, Homo sapien
ttcattttctgaggtagagagtact

SEQ ID NO: 2508276 - DNA, 25 bp, Homo sapien
tgatgctggcgtttgtgctggcacc

SEQ ID NO: 2508277 - DNA, 25 bp, Homo sapien
gtcactgactttttgagatatttca

SEQ ID NO: 2508278 - DNA, 25 bp, Homo sapien
tcgtttaactgaggagtcactgact

SEQ ID NO: 2508279 - DNA, 25 bp, Homo sapien
tgagcgagcccttgtaaacgtaaac

SEQ ID NO: 2508280 - DNA, 25 bp, Homo sapien
tctattatggtcgactgagcgagcc

SEQ ID NO: 2508281 - DNA, 25 bp, Homo sapien
ttccaatgggtgattgttcaaacca

SEQ ID NO: 2508282 - DNA, 25 bp, Homo sapien
taacttgatactccaattcctgccg

SEQ ID NO: 2508283 - DNA, 25 bp, Homo sapien
ttgggcaccgtcatgtaagaaataa

SEQ ID NO: 2508284 - DNA, 25 bp, Homo sapien
cttcactttgaagcagagattgggc

SEQ ID NO: 2508285 - DNA, 25 bp, Homo sapien
aaacctcccactacgagttgtgcag

SEQ ID NO: 2508286 - DNA, 25 bp, Homo sapien
tcacctgtacccatggaccgtaaaa

SEQ ID NO: 2508287 - DNA, 25 bp, Homo sapien
tcttgaaagtgcttgagtgcatgct

SEQ ID NO: 2508288 - DNA, 25 bp, Homo sapien
tacgtcgtagtaacttcaggtctcc

SEQ ID NO: 2508289 - DNA, 25 bp, Homo sapien
tgatggcacttaatgtacgtcgtag

SEQ ID NO: 2508290 - DNA, 25 bp, Homo sapien
tatatcttccacaggcaacatggga

SEQ ID NO: 2508291 - DNA, 25 bp, Homo sapien
ttgaggctggaatggtcttgagcaa

SEQ ID NO: 2508292 - DNA, 25 bp, Homo sapien
aaggcaagcccaaatggactcggtc

SEQ ID NO: 2508293 - DNA, 25 bp, Homo sapien
agtgccatttctgagggttgaggct

SEQ ID NO: 2508294 - DNA, 25 bp, Homo sapien
gtcgtgttgcagtccacacagtgcc

SEQ ID NO: 2508295 - DNA, 25 bp, Homo sapien
ttatttagtctagctgagaaatgca

SEQ ID NO: 2508296 - DNA, 25 bp, Homo sapien
aatgcataatccaaacaagtctctg

SEQ ID NO: 2508297 - DNA, 25 bp, Homo sapien
ctgttcacaacacttgaagcatctg

SEQ ID NO: 2508298 - DNA, 25 bp, Homo sapien
aagtctctgttcacaacacttgaag

SEQ ID NO: 2508299 - DNA, 25 bp, Homo sapien
gaggccgaacagacttgacagttgg

SEQ ID NO: 2508300 - DNA, 25 bp, Homo sapien
ttcatggctctataacatactctga

SEQ ID NO: 2508301 - DNA, 25 bp, Homo sapien
taacatactctgaggccgaacagac

SEQ ID NO: 2508302 - DNA, 25 bp, Homo sapien
tttaattcatggctctataacatac

SEQ ID NO: 2508303 - DNA, 25 bp, Homo sapien
gacagaatgagggaaatggcaaaaa

SEQ ID NO: 2508304 - DNA, 25 bp, Homo sapien
gaagaaatataagtaccactgggca

SEQ ID NO: 2508305 - DNA, 25 bp, Homo sapien
ttaacatggcacataaaagcctttg

SEQ ID NO: 2508306 - DNA, 25 bp, Homo sapien
ccgccatagctcatatttagtcaaa

SEQ ID NO: 2508307 - DNA, 25 bp, Homo sapien
cagtttctgcctccgggttatttga

SEQ ID NO: 2508308 - DNA, 25 bp, Homo sapien
gcagctaacttcgtaacaatgggag

SEQ ID NO: 2508309 - DNA, 25 bp, Homo sapien
aatttacacatcaatctaccgcagc

SEQ ID NO: 2508310 - DNA, 25 bp, Homo sapien
taatactgagcatcctaccaagggt

SEQ ID NO: 2508311 - DNA, 25 bp, Homo sapien
catcgaaggccatcgggaatggctt

SEQ ID NO: 2508312 - DNA, 25 bp, Homo sapien
tccgcgcacactgacatatttctta

SEQ ID NO: 2508313 - DNA, 25 bp, Homo sapien
gattttcaagctttaagcggcagca

SEQ ID NO: 2508314 - DNA, 25 bp, Homo sapien
tatggcattctttcccatcgaaggc

SEQ ID NO: 2508315 - DNA, 25 bp, Homo sapien
cagcccgagccggggcggccatctt

SEQ ID NO: 2508316 - DNA, 25 bp, Homo sapien
agtccctgcaggatcgcccagtttc

SEQ ID NO: 2508317 - DNA, 25 bp, Homo sapien
tcctaagtgaaaagtcctggcggct

SEQ ID NO: 2508318 - DNA, 25 bp, Homo sapien
ccagtttccatcagggcaaatgctg

SEQ ID NO: 2508319 - DNA, 25 bp, Homo sapien
caggtcggcctttggataactcaga

SEQ ID NO: 2508320 - DNA, 25 bp, Homo sapien
aaacgtttctacagaggctctcttg

SEQ ID NO: 2508321 - DNA, 25 bp, Homo sapien
aacgtttctacagaggctctcttgt

SEQ ID NO: 2508322 - DNA, 25 bp, Homo sapien
cgtttctacagaggctctcttgtct

SEQ ID NO: 2508323 - DNA, 25 bp, Homo sapien
ctaaacgtttctacagaggctctct

SEQ ID NO: 2508324 - DNA, 25 bp, Homo sapien
ctattttctgacgagtgggaataac

SEQ ID NO: 2508325 - DNA, 25 bp, Homo sapien
atgtcttgctgatatcttactgttt

SEQ ID NO: 2508326 - DNA, 25 bp, Homo sapien
cttactgttttcgtcttttctatcg

SEQ ID NO: 2508327 - DNA, 25 bp, Homo sapien
tgacgagtgggaataacctgatttt

SEQ ID NO: 2508328 - DNA, 25 bp, Homo sapien
tggccgattgcttcctgtctcaacc

SEQ ID NO: 2508329 - DNA, 25 bp, Homo sapien
gcttggccgattgcttcctgtctca

SEQ ID NO: 2508330 - DNA, 25 bp, Homo sapien
cttcggctttcaagcatgcatattt

SEQ ID NO: 2508331 - DNA, 25 bp, Homo sapien
agaaattgcttggccgattgcttcc

SEQ ID NO: 2508332 - DNA, 25 bp, Homo sapien
taagacggtctcagtcgtatttttc

SEQ ID NO: 2508333 - DNA, 25 bp, Homo sapien
gtctcagtcgtatttttctcaatcc

SEQ ID NO: 2508334 - DNA, 25 bp, Homo sapien
agccatggcaataagacggtctcag

SEQ ID NO: 2508335 - DNA, 25 bp, Homo sapien
ggcaataagacggtctcagtcgtat

SEQ ID NO: 2508336 - DNA, 25 bp, Homo sapien
aattccctaggagccgacgactgcc

SEQ ID NO: 2508337 - DNA, 25 bp, Homo sapien
actgccatcggaaggaagagaaatt

SEQ ID NO: 2508338 - DNA, 25 bp, Homo sapien
ttaattccctaggagccgacgactg

SEQ ID NO: 2508339 - DNA, 25 bp, Homo sapien
aagagaaattgtgagctcgcgctgg

SEQ ID NO: 2508340 - DNA, 25 bp, Homo sapien
tcttccgtgtcagaaaagatttaaa

SEQ ID NO: 2508341 - DNA, 25 bp, Homo sapien
tcttccaatggtggccgtgagtcag

SEQ ID NO: 2508342 - DNA, 25 bp, Homo sapien
gggatttctcagtccagatttttcc

SEQ ID NO: 2508343 - DNA, 25 bp, Homo sapien
gtctctgactaacaagatgtcttag

SEQ ID NO: 2508344 - DNA, 25 bp, Homo sapien
tgtttatactgccagtttggagttt

SEQ ID NO: 2508345 - DNA, 25 bp, Homo sapien
ccagtttggagttttgcagtagcag

SEQ ID NO: 2508346 - DNA, 25 bp, Homo sapien
ttgcagtagcaggtgtgattgtctt

SEQ ID NO: 2508347 - DNA, 25 bp, Homo sapien
aactcttttgatatagccaatgtca

SEQ ID NO: 2508348 - DNA, 25 bp, Homo sapien
tctggcactaatcttttaaatacct

SEQ ID NO: 2508349 - DNA, 25 bp, Homo sapien
aaataccttgtcagaggaatactgt

SEQ ID NO: 2508350 - DNA, 25 bp, Homo sapien
gaggaatactgtttcctgggtgtgt

SEQ ID NO: 2508351 - DNA, 25 bp, Homo sapien
tgtcagaggaatactgtttcctggg

SEQ ID NO: 2508352 - DNA, 25 bp, Homo sapien
gaattgcaacctgctagctggtggc

SEQ ID NO: 2508353 - DNA, 25 bp, Homo sapien
caggcacccagcgtatcaggtaaat

SEQ ID NO: 2508354 - DNA, 25 bp, Homo sapien
aaaccggcaagtaccttggcaggca

SEQ ID NO: 2508355 - DNA, 25 bp, Homo sapien
cgctccaggtaggaaagaattgcaa

SEQ ID NO: 2508356 - DNA, 25 bp, Homo sapien
taaacacgagtttcctatctgcaaa

SEQ ID NO: 2508357 - DNA, 25 bp, Homo sapien
tgtcttcagtgcctacctcagtgcc

SEQ ID NO: 2508358 - DNA, 25 bp, Homo sapien
gagtcagagacagggtgctcccatc

SEQ ID NO: 2508359 - DNA, 25 bp, Homo sapien
gctcgatgaggtcaggcgccgtatt

SEQ ID NO: 2508360 - DNA, 25 bp, Homo sapien
catccagtgggatatctgaaggcct

SEQ ID NO: 2508361 - DNA, 25 bp, Homo sapien
tcaacttgggatgaccctgaagggt

SEQ ID NO: 2508362 - DNA, 25 bp, Homo sapien
tgtgtggccgatactcctgcaatgg

SEQ ID NO: 2508363 - DNA, 25 bp, Homo sapien
ttcagccacagagagatttccccaa

SEQ ID NO: 2508364 - DNA, 25 bp, Homo sapien
gtcttctctagaatgtcttccacag

SEQ ID NO: 2508365 - DNA, 25 bp, Homo sapien
tagacctagttcagatcgtcttctc

SEQ ID NO: 2508366 - DNA, 25 bp, Homo sapien
gagattcaaaagctgggaagctgat

SEQ ID NO: 2508367 - DNA, 25 bp, Homo sapien
tgttataaaccacaacagggagctc

SEQ ID NO: 2508368 - DNA, 25 bp, Homo sapien
tcttgccttaagaaaacttgaagca

SEQ ID NO: 2508369 - DNA, 25 bp, Homo sapien
tgaagcaacttcttttgttagtctt

SEQ ID NO: 2508370 - DNA, 25 bp, Homo sapien
ctcccttccttcactattgttgtta

SEQ ID NO: 2508371 - DNA, 25 bp, Homo sapien
ctggcctcaggaacacttcttaatg

SEQ ID NO: 2508372 - DNA, 25 bp, Homo sapien
cctttctcaatgttacttcctgttc

SEQ ID NO: 2508373 - DNA, 25 bp, Homo sapien
ctgtggcttgaatgtacatttctga

SEQ ID NO: 2508374 - DNA, 25 bp, Homo sapien
aaagtgtggagtccgtgtggatttc

SEQ ID NO: 2508375 - DNA, 25 bp, Homo sapien
gagagggtaagtgaatccactctcc

SEQ ID NO: 2508376 - DNA, 25 bp, Homo sapien
gggtgtgtgtgcaggactgctactg

SEQ ID NO: 2508377 - DNA, 25 bp, Homo sapien
ggtgtgtgtgcaggactgctactgc

SEQ ID NO: 2508378 - DNA, 25 bp, Homo sapien
aaaaaggttctgtatgtgaaattat

SEQ ID NO: 2508379 - DNA, 25 bp, Homo sapien
ctatgtatagtggttatgcgtgggt

SEQ ID NO: 2508380 - DNA, 25 bp, Homo sapien
catgttttgtatattcaagtacaaa

SEQ ID NO: 2508381 - DNA, 25 bp, Homo sapien
tgcgtgggtacagaagatgaataat

SEQ ID NO: 2508382 - DNA, 25 bp, Homo sapien
agtttcatcatggctgtcatcttgg

SEQ ID NO: 2508383 - DNA, 25 bp, Homo sapien
tttcatcatggctgtcatcttggaa

SEQ ID NO: 2508384 - DNA, 25 bp, Homo sapien
gtttcatcatggctgtcatcttgga

SEQ ID NO: 2508385 - DNA, 25 bp, Homo sapien
gcatcaaacgtaagtaacatcgctg

SEQ ID NO: 2508386 - DNA, 25 bp, Homo sapien
tactatatacacatggagaggttcc

SEQ ID NO: 2508387 - DNA, 25 bp, Homo sapien
catcgctgaagctggaaggcgtcct

SEQ ID NO: 2508388 - DNA, 25 bp, Homo sapien
tcatgcgtaacacacaagagaaggc

SEQ ID NO: 2508389 - DNA, 25 bp, Homo sapien
tcatattcacaattagtttgcctgt

SEQ ID NO: 2508390 - DNA, 25 bp, Homo sapien
tcttatatcctcatgtcctgctaca

SEQ ID NO: 2508391 - DNA, 25 bp, Homo sapien
catgtcctgctacaaggtattccaa

SEQ ID NO: 2508392 - DNA, 25 bp, Homo sapien
aaatatccatgacttttcttccaag

SEQ ID NO: 2508393 - DNA, 25 bp, Homo sapien
gggctatacagtatcatactttgtt

SEQ ID NO: 2508394 - DNA, 25 bp, Homo sapien
tacagtatcatactttgttgaaggg

SEQ ID NO: 2508395 - DNA, 25 bp, Homo sapien
catactttgttgaagggagagatgt

SEQ ID NO: 2508396 - DNA, 25 bp, Homo sapien
caaaattaggggctatacagtatca

SEQ ID NO: 2508397 - DNA, 25 bp, Homo sapien
aagcatttgggaaaacatataggaa

SEQ ID NO: 2508398 - DNA, 25 bp, Homo sapien
cactgatgggaggttatccaggtac

SEQ ID NO: 2508399 - DNA, 25 bp, Homo sapien
tttggcaatggagagatcagactgc

SEQ ID NO: 2508400 - DNA, 25 bp, Homo sapien
gatagggcatctgacctggtttcct

SEQ ID NO: 2508401 - DNA, 25 bp, Homo sapien
ggtcaagcttagagacactgatggg

SEQ ID NO: 2508402 - DNA, 25 bp, Homo sapien
ggaaaataatgacacagagaggttt

SEQ ID NO: 2508403 - DNA, 25 bp, Homo sapien
gaggtttcaaacactggagagtaca

SEQ ID NO: 2508404 - DNA, 25 bp, Homo sapien
ctgcaccctgctaaaagattattaa

SEQ ID NO: 2508405 - DNA, 25 bp, Homo sapien
aagctattatggtgttttcagaaaa

SEQ ID NO: 2508406 - DNA, 25 bp, Homo sapien
ttgctacacgtctgagaacacgaag

SEQ ID NO: 2508407 - DNA, 25 bp, Homo sapien
gaagcagcatcacaccaaaaacaaa

SEQ ID NO: 2508408 - DNA, 25 bp, Homo sapien
tatgcagggatacccaataggattg

SEQ ID NO: 2508409 - DNA, 25 bp, Homo sapien
gctttctttggccttggctgttgaa

SEQ ID NO: 2508410 - DNA, 25 bp, Homo sapien
ggatataatgttcgctttcctcgga

SEQ ID NO: 2508411 - DNA, 25 bp, Homo sapien
catgagtacctttatcatgagctga

SEQ ID NO: 2508412 - DNA, 25 bp, Homo sapien
gtgcatcctctgtccgtccatgatt

SEQ ID NO: 2508413 - DNA, 25 bp, Homo sapien
caggattgaggattggacaagtgca

SEQ ID NO: 2508414 - DNA, 25 bp, Homo sapien
tacattaagagcgttcaaattcttc

SEQ ID NO: 2508415 - DNA, 25 bp, Homo sapien
tattgcacttaataagaccaagatg

SEQ ID NO: 2508416 - DNA, 25 bp, Homo sapien
tccaagtcttagcagtattgcactt

SEQ ID NO: 2508417 - DNA, 25 bp, Homo sapien
cagagagctaccaagttgatgtgat

SEQ ID NO: 2508418 - DNA, 25 bp, Homo sapien
tattctttgctcttaatagtcaatg

SEQ ID NO: 2508419 - DNA, 25 bp, Homo sapien
ctttgctcttaatagtcaatgccat

SEQ ID NO: 2508420 - DNA, 25 bp, Homo sapien
atattctttgctcttaatagtcaat

SEQ ID NO: 2508421 - DNA, 25 bp, Homo sapien
ttctttgctcttaatagtcaatgcc

SEQ ID NO: 2508422 - DNA, 25 bp, Homo sapien
taagattcatgaggtttttaccact

SEQ ID NO: 2508423 - DNA, 25 bp, Homo sapien
tagagagggaagtgtacatataatt

SEQ ID NO: 2508424 - DNA, 25 bp, Homo sapien
gagacaatgttatccagaacctaaa

SEQ ID NO: 2508425 - DNA, 25 bp, Homo sapien
gcctttcctttattgagcgctgtac

SEQ ID NO: 2508426 - DNA, 25 bp, Homo sapien
cacagaatgccttggcatttcctaa

SEQ ID NO: 2508427 - DNA, 25 bp, Homo sapien
ccacagaatgccttggcatttccta

SEQ ID NO: 2508428 - DNA, 25 bp, Homo sapien
aaaattatggataggaaattcacag

SEQ ID NO: 2508429 - DNA, 25 bp, Homo sapien
tgaatggccaagaataaagacaggt

SEQ ID NO: 2508430 - DNA, 25 bp, Homo sapien
gccacatgacagaggtacttaataa

SEQ ID NO: 2508431 - DNA, 25 bp, Homo sapien
ccattcttagggcaggtagcccgca

SEQ ID NO: 2508432 - DNA, 25 bp, Homo sapien
cgctcttattgtgcacgggacggaa

SEQ ID NO: 2508433 - DNA, 25 bp, Homo sapien
ttcatgataccagtctatgtctgtg

SEQ ID NO: 2508434 - DNA, 25 bp, Homo sapien
cacgggacggaagtcaggaacttca

SEQ ID NO: 2508435 - DNA, 25 bp, Homo sapien
cactcccaggctggttcgctcttat

SEQ ID NO: 2508436 - DNA, 25 bp, Homo sapien
tctccggtgatagggtcacagctcc

SEQ ID NO: 2508437 - DNA, 25 bp, Homo sapien
ttgcaagggcagtcaccattgctgg

SEQ ID NO: 2508438 - DNA, 25 bp, Homo sapien
gtcacatggtcgacagccatagtct

SEQ ID NO: 2508439 - DNA, 25 bp, Homo sapien
gaaggacagctgatcctactggatg

SEQ ID NO: 2508440 - DNA, 25 bp, Homo sapien
gaaatcacataatctagtatgaaaa

SEQ ID NO: 2508441 - DNA, 25 bp, Homo sapien
tataattttgagatgacgaaaccta

SEQ ID NO: 2508442 - DNA, 25 bp, Homo sapien
ttttattatgagaacatttaggcat

SEQ ID NO: 2508443 - DNA, 25 bp, Homo sapien
cttaaagtatcaaagcactattgat

SEQ ID NO: 2508444 - DNA, 25 bp, Homo sapien
ggccgaaggccctgacatctttcat

SEQ ID NO: 2508445 - DNA, 25 bp, Homo sapien
cagcgtgacttctcacataattaca

SEQ ID NO: 2508446 - DNA, 25 bp, Homo sapien
tacaagataaagataccatttggaa

SEQ ID NO: 2508447 - DNA, 25 bp, Homo sapien
gctagtagatttctgtcagcgtgac

SEQ ID NO: 2508448 - DNA, 25 bp, Homo sapien
acgtaagctagggaagcagacacag

SEQ ID NO: 2508449 - DNA, 25 bp, Homo sapien
gaaccagagtaatattctggaagca

SEQ ID NO: 2508450 - DNA, 25 bp, Homo sapien
ggaagcagatgccagtaaggaaacg

SEQ ID NO: 2508451 - DNA, 25 bp, Homo sapien
tgccccaaatgtatcctggaatagt

SEQ ID NO: 2508452 - DNA, 25 bp, Homo sapien
aattattgtgatggctcctagtacc

SEQ ID NO: 2508453 - DNA, 25 bp, Homo sapien
gctttgaaattaatctgagctatac

SEQ ID NO: 2508454 - DNA, 25 bp, Homo sapien
taatctgagctatacatcattaaaa

SEQ ID NO: 2508455 - DNA, 25 bp, Homo sapien
tactaattgaattattgtgatggct

SEQ ID NO: 2508456 - DNA, 25 bp, Homo sapien
tgtgaaaactcggattgctgggccc

SEQ ID NO: 2508457 - DNA, 25 bp, Homo sapien
tgaaatctcaccttcccagtgctgg

SEQ ID NO: 2508458 - DNA, 25 bp, Homo sapien
gaaaactaagtcagaccatgccact

SEQ ID NO: 2508459 - DNA, 25 bp, Homo sapien
cagttgatctgtctcagggtccgag

SEQ ID NO: 2508460 - DNA, 25 bp, Homo sapien
gaagtgacaggtatcagcatgccca

SEQ ID NO: 2508461 - DNA, 25 bp, Homo sapien
agacaccaccactacgattccctga

SEQ ID NO: 2508462 - DNA, 25 bp, Homo sapien
aagggtctccgcaggtcacgataga

SEQ ID NO: 2508463 - DNA, 25 bp, Homo sapien
tgatgcctcccacacattaacgtcg

SEQ ID NO: 2508464 - DNA, 25 bp, Homo sapien
ggaaataagaagcgtggagagaaac

SEQ ID NO: 2508465 - DNA, 25 bp, Homo sapien
gaaataagaagcgtggagagaaaca

SEQ ID NO: 2508466 - DNA, 25 bp, Homo sapien
tggaaataagaagcgtggagagaaa

SEQ ID NO: 2508467 - DNA, 25 bp, Homo sapien
gctgtgttgtgcttacacatacact

SEQ ID NO: 2508468 - DNA, 25 bp, Homo sapien
tgttgtgcttacacatacacttccc

SEQ ID NO: 2508469 - DNA, 25 bp, Homo sapien
ccatggccggtcattgtataacggg

SEQ ID NO: 2508470 - DNA, 25 bp, Homo sapien
ttgggagcccccgttttgccatcag

SEQ ID NO: 2508471 - DNA, 25 bp, Homo sapien
caatgcagaacattcctggaatcat

SEQ ID NO: 2508472 - DNA, 25 bp, Homo sapien
tactagattgtaagaccttgcaggg

SEQ ID NO: 2508473 - DNA, 25 bp, Homo sapien
cttgcagggaacaaacagtggctta

SEQ ID NO: 2508474 - DNA, 25 bp, Homo sapien
ggaggcctgaaacctactgtcagaa

SEQ ID NO: 2508475 - DNA, 25 bp, Homo sapien
caaacagtgcttattctatggacca

SEQ ID NO: 2508476 - DNA, 25 bp, Homo sapien
tctatacagcatggccacttttgta

SEQ ID NO: 2508477 - DNA, 25 bp, Homo sapien
ttctctatacagcatggccactttt

SEQ ID NO: 2508478 - DNA, 25 bp, Homo sapien
agagaaaagcgcagcttggcctttt

SEQ ID NO: 2508479 - DNA, 25 bp, Homo sapien
cagctagaactaagacctaaagtca

SEQ ID NO: 2508480 - DNA, 25 bp, Homo sapien
tcttcggccccaatctccggagtat

SEQ ID NO: 2508481 - DNA, 25 bp, Homo sapien
ttcggccccaatctccggagtatct

SEQ ID NO: 2508482 - DNA, 25 bp, Homo sapien
attcttcggccccaatctccggagt

SEQ ID NO: 2508483 - DNA, 25 bp, Homo sapien
cggccccaatctccggagtatctgg

SEQ ID NO: 2508484 - DNA, 25 bp, Homo sapien
tctacagccgtgtacataaaataaa

SEQ ID NO: 2508485 - DNA, 25 bp, Homo sapien
ggcacaatcagatttcagttcttct

SEQ ID NO: 2508486 - DNA, 25 bp, Homo sapien
agttcttctacagccgtgtacataa

SEQ ID NO: 2508487 - DNA, 25 bp, Homo sapien
tctgcaggcacaatcagatttcagt

SEQ ID NO: 2508488 - DNA, 25 bp, Homo sapien
tggctaactggatcatggctgctgg

SEQ ID NO: 2508489 - DNA, 25 bp, Homo sapien
gctaactggatcatggctgctggtg

SEQ ID NO: 2508490 - DNA, 25 bp, Homo sapien
tgatgctgccccagcgactcagccc

SEQ ID NO: 2508491 - DNA, 25 bp, Homo sapien
gctggtggcctatcgtatactaggg

SEQ ID NO: 2508492 - DNA, 25 bp, Homo sapien
tactgctgagccactctgtatcttt

SEQ ID NO: 2508493 - DNA, 25 bp, Homo sapien
ttactgctgagccactctgtatctt

SEQ ID NO: 2508494 - DNA, 25 bp, Homo sapien
actgctgagccactctgtatctttt

SEQ ID NO: 2508495 - DNA, 25 bp, Homo sapien
gatcagcgtggccattgcagaagca

SEQ ID NO: 2508496 - DNA, 25 bp, Homo sapien
tcagcagctgcacgcgaaggttggt

SEQ ID NO: 2508497 - DNA, 25 bp, Homo sapien
gaagcagctgcccttgacaatgaaa

SEQ ID NO: 2508498 - DNA, 25 bp, Homo sapien
gacaagactgtcgtttcagcagctg

SEQ ID NO: 2508499 - DNA, 25 bp, Homo sapien
attttcctggtcttgccttatttct

SEQ ID NO: 2508500 - DNA, 25 bp, Homo sapien
cctgaggatggggattcttggctca

SEQ ID NO: 2508501 - DNA, 25 bp, Homo sapien
agcctcgaatcccttgaactttgcc

SEQ ID NO: 2508502 - DNA, 25 bp, Homo sapien
cttgccttatttctctaagcctcga

SEQ ID NO: 2508503 - DNA, 25 bp, Homo sapien
caggcatcagaatcttcaaaaatgg

SEQ ID NO: 2508504 - DNA, 25 bp, Homo sapien
tgtcccagagctcactaatgctata

SEQ ID NO: 2508505 - DNA, 25 bp, Homo sapien
taaagtcctcagctactaactgtat

SEQ ID NO: 2508506 - DNA, 25 bp, Homo sapien
gcaggtcttgattagctgctaggta

SEQ ID NO: 2508507 - DNA, 25 bp, Homo sapien
ataatttgtgatacctattattatg

SEQ ID NO: 2508508 - DNA, 25 bp, Homo sapien
taatttgtgatacctattattatga

SEQ ID NO: 2508509 - DNA, 25 bp, Homo sapien
tcaaataatttgtgatacctattat

SEQ ID NO: 2508510 - DNA, 25 bp, Homo sapien
tgaggattagttgcaagagttgaat

SEQ ID NO: 2508511 - DNA, 25 bp, Homo sapien
tcggtctgaagtatgaggattagtt

SEQ ID NO: 2508512 - DNA, 25 bp, Homo sapien
tcccattaagtttcggtctgaagta

SEQ ID NO: 2508513 - DNA, 25 bp, Homo sapien
agagttgaattaagaaagagaactg

SEQ ID NO: 2508514 - DNA, 25 bp, Homo sapien
tccttggagcctcggaaggtgctag

SEQ ID NO: 2508515 - DNA, 25 bp, Homo sapien
tcgagtgacaggatgaactggcccc

SEQ ID NO: 2508516 - DNA, 25 bp, Homo sapien
ttacgactgggttgtgctctaaaga

SEQ ID NO: 2508517 - DNA, 25 bp, Homo sapien
gctagacatatagaggcacccacat

SEQ ID NO: 2508518 - DNA, 25 bp, Homo sapien
ttggatttgcagagggatgtaaccc

SEQ ID NO: 2508519 - DNA, 25 bp, Homo sapien
tccatctaaatgggaaccctttgtg

SEQ ID NO: 2508520 - DNA, 25 bp, Homo sapien
tgcatactgggaatagagcctgtgg

SEQ ID NO: 2508521 - DNA, 25 bp, Homo sapien
ttgtgctaggcctttgcatactggg

SEQ ID NO: 2508522 - DNA, 25 bp, Homo sapien
ttagagtttgcacccaccattctga

SEQ ID NO: 2508523 - DNA, 25 bp, Homo sapien
ctgtgattttagagtttgcacccac

SEQ ID NO: 2508524 - DNA, 25 bp, Homo sapien
tttagagtttgcacccaccattctg

SEQ ID NO: 2508525 - DNA, 25 bp, Homo sapien
tgattttagagtttgcacccaccat

SEQ ID NO: 2508526 - DNA, 25 bp, Homo sapien
tgagaataagggatgcagcgcactg

SEQ ID NO: 2508527 - DNA, 25 bp, Homo sapien
acagatttcgccagttgaagactac

SEQ ID NO: 2508528 - DNA, 25 bp, Homo sapien
tgggaaggcttcaacagctattagc

SEQ ID NO: 2508529 - DNA, 25 bp, Homo sapien
taactactgctactgtggagatagg

SEQ ID NO: 2508530 - DNA, 25 bp, Homo sapien
gagacagtaactacatccctttaga

SEQ ID NO: 2508531 - DNA, 25 bp, Homo sapien
tagagttacttttgggccacactgg

SEQ ID NO: 2508532 - DNA, 25 bp, Homo sapien
gcaagtcgtgctcccttctaaggag

SEQ ID NO: 2508533 - DNA, 25 bp, Homo sapien
cagtgatcatcgcaattccagtgtc

SEQ ID NO: 2508534 - DNA, 25 bp, Homo sapien
acactatcaggaagatacccgtgtg

SEQ ID NO: 2508535 - DNA, 25 bp, Homo sapien
tattaacactatcaggaagataccc

SEQ ID NO: 2508536 - DNA, 25 bp, Homo sapien
ggctccaggaacagactgtctcagt

SEQ ID NO: 2508537 - DNA, 25 bp, Homo sapien
gaacagactgtctcagtaactcttc

SEQ ID NO: 2508538 - DNA, 25 bp, Homo sapien
tgctacaagtatagcttcatgcttt

SEQ ID NO: 2508539 - DNA, 25 bp, Homo sapien
ttcatgttgctacaagtatagcttc

SEQ ID NO: 2508540 - DNA, 25 bp, Homo sapien
aaatgcgggctggtaacatttttct

SEQ ID NO: 2508541 - DNA, 25 bp, Homo sapien
aatgcgggctggtaacatttttcta

SEQ ID NO: 2508542 - DNA, 25 bp, Homo sapien
tccaggccaaatgtagcggagcagt

SEQ ID NO: 2508543 - DNA, 25 bp, Homo sapien
ttttcacagcgggaactcactccag

SEQ ID NO: 2508544 - DNA, 25 bp, Homo sapien
tttgggctgccgacaagtcagatcc

SEQ ID NO: 2508545 - DNA, 25 bp, Homo sapien
catccgagggttgcaggctttttca

SEQ ID NO: 2508546 - DNA, 25 bp, Homo sapien
caccaggtcagggacaccagcgatg

SEQ ID NO: 2508547 - DNA, 25 bp, Homo sapien
gcgatgggcttctaccagagaccgg

SEQ ID NO: 2508548 - DNA, 25 bp, Homo sapien
tcatcattccttaggccatgaagtg

SEQ ID NO: 2508549 - DNA, 25 bp, Homo sapien
ctcctcatcattccttaggccatga

SEQ ID NO: 2508550 - DNA, 25 bp, Homo sapien
gcggccaccaccgtgcagccccaga

SEQ ID NO: 2508551 - DNA, 25 bp, Homo sapien
gccaccaccgtgcagccccagagca

SEQ ID NO: 2508552 - DNA, 25 bp, Homo sapien
ctgcggccaccaccgtgcagcccca

SEQ ID NO: 2508553 - DNA, 25 bp, Homo sapien
ggccaccaccgtgcagccccagagc

SEQ ID NO: 2508554 - DNA, 25 bp, Homo sapien
ctgcgggatgaagcgccgccgtcct

SEQ ID NO: 2508555 - DNA, 25 bp, Homo sapien
gaagcgccgccgtcctcgggaggga

SEQ ID NO: 2508556 - DNA, 25 bp, Homo sapien
ggagccgagacctctgggctgcggg

SEQ ID NO: 2508557 - DNA, 25 bp, Homo sapien
gcgggtgccggagggagccgagacc

SEQ ID NO: 2508558 - DNA, 25 bp, Homo sapien
gaggtggggtgaccctcgcgcaccg

SEQ ID NO: 2508559 - DNA, 25 bp, Homo sapien
gggaggtggggtgaccctcgcgcac

SEQ ID NO: 2508560 - DNA, 25 bp, Homo sapien
ggaggtggggtgaccctcgcgcacc

SEQ ID NO: 2508561 - DNA, 25 bp, Homo sapien
cccgggaccatagccggcctggctg

SEQ ID NO: 2508562 - DNA, 25 bp, Homo sapien
tttgcgagacctttcacttcccggc

SEQ ID NO: 2508563 - DNA, 25 bp, Homo sapien
tgcgggctcgtctgccgctagcccg

SEQ ID NO: 2508564 - DNA, 25 bp, Homo sapien
cgcagccgccgctgaactttgcgag

SEQ ID NO: 2508565 - DNA, 25 bp, Homo sapien
acctcttctggctgccccggctccg

SEQ ID NO: 2508566 - DNA, 25 bp, Homo sapien
tcttctggctgccccggctccgtcc

SEQ ID NO: 2508567 - DNA, 25 bp, Homo sapien
cctcttctggctgccccggctccgt

SEQ ID NO: 2508568 - DNA, 25 bp, Homo sapien
ccacctcttctggctgccccggctc

SEQ ID NO: 2508569 - DNA, 25 bp, Homo sapien
tggcaaaagttaagtcgacagcaat

SEQ ID NO: 2508570 - DNA, 25 bp, Homo sapien
cgttccagataccatttagtcgttg

SEQ ID NO: 2508571 - DNA, 25 bp, Homo sapien
cccagccaggaacatataagaagtt

SEQ ID NO: 2508572 - DNA, 25 bp, Homo sapien
tattatttacaatgacccagccagg

SEQ ID NO: 2508573 - DNA, 25 bp, Homo sapien
tgccattctcatgcagaggccatgc

SEQ ID NO: 2508574 - DNA, 25 bp, Homo sapien
tgtatgccattctcatgcagaggcc

SEQ ID NO: 2508575 - DNA, 25 bp, Homo sapien
cacaaatttgtatgccattctcatg

SEQ ID NO: 2508576 - DNA, 25 bp, Homo sapien
tatgccattctcatgcagaggccat

SEQ ID NO: 2508577 - DNA, 25 bp, Homo sapien
catgtaaatagcttgcactagcaga

SEQ ID NO: 2508578 - DNA, 25 bp, Homo sapien
caggtctagacctcacagggggtaa

SEQ ID NO: 2508579 - DNA, 25 bp, Homo sapien
caaagtgcagagtaagtgcatgtaa

SEQ ID NO: 2508580 - DNA, 25 bp, Homo sapien
taatgtgtgcaaagtgcagagtaag

SEQ ID NO: 2508581 - DNA, 25 bp, Homo sapien
cctgaagcctaaggatgtgacgtcc

SEQ ID NO: 2508582 - DNA, 25 bp, Homo sapien
agattactgatcatgctgcaaaagc

SEQ ID NO: 2508583 - DNA, 25 bp, Homo sapien
tgaaatgattaggagcctagacgct

SEQ ID NO: 2508584 - DNA, 25 bp, Homo sapien
tagacgctcatgttctaactctagg

SEQ ID NO: 2508585 - DNA, 25 bp, Homo sapien
ttagagtcgtaacctttcccttgca

SEQ ID NO: 2508586 - DNA, 25 bp, Homo sapien
tggaaggtgtgctttcaacagctcg

SEQ ID NO: 2508587 - DNA, 25 bp, Homo sapien
aatgctccaatgaactgagatacaa

SEQ ID NO: 2508588 - DNA, 25 bp, Homo sapien
cactgaccacaagccgggctttgaa

SEQ ID NO: 2508589 - DNA, 25 bp, Homo sapien
gagaaatattggtcagcatcaggac

SEQ ID NO: 2508590 - DNA, 25 bp, Homo sapien
tgttttgctatctgttgtctgagaa

SEQ ID NO: 2508591 - DNA, 25 bp, Homo sapien
ctgagaaatattggtcagcatcagg

SEQ ID NO: 2508592 - DNA, 25 bp, Homo sapien
tttgctatctgttgtctgagaaata

SEQ ID NO: 2508593 - DNA, 25 bp, Homo sapien
gcggcccggcagaagtgcccctcac

SEQ ID NO: 2508594 - DNA, 25 bp, Homo sapien
gggcggcccggcagaagtgcccctc

SEQ ID NO: 2508595 - DNA, 25 bp, Homo sapien
ggcccggcagaagtgcccctcacct

SEQ ID NO: 2508596 - DNA, 25 bp, Homo sapien
gcccggcagaagtgcccctcacctc

SEQ ID NO: 2508597 - DNA, 25 bp, Homo sapien
tccgtgacagaggaaatattgctta

SEQ ID NO: 2508598 - DNA, 25 bp, Homo sapien
ttacatcgaaagttttaatccgtga

SEQ ID NO: 2508599 - DNA, 25 bp, Homo sapien
cgaaagttttaatccgtgacagagg

SEQ ID NO: 2508600 - DNA, 25 bp, Homo sapien
gttttaatccgtgacagaggaaata

SEQ ID NO: 2508601 - DNA, 25 bp, Homo sapien
tcgacctcgtttgcaagaaattctg

SEQ ID NO: 2508602 - DNA, 25 bp, Homo sapien
gtttcgccgcccctagtctagtctg

SEQ ID NO: 2508603 - DNA, 25 bp, Homo sapien
tttcaaatgcacgtatgaaggccgt

SEQ ID NO: 2508604 - DNA, 25 bp, Homo sapien
gcgggtttctgcaggcgaagcaaaa

SEQ ID NO: 2508605 - DNA, 25 bp, Homo sapien
gaacattctcacgggtgtaaaaaga

SEQ ID NO: 2508606 - DNA, 25 bp, Homo sapien
cgaacattctcacgggtgtaaaaag

SEQ ID NO: 2508607 - DNA, 25 bp, Homo sapien
acattctcacgggtgtaaaaagaca

SEQ ID NO: 2508608 - DNA, 25 bp, Homo sapien
cattctcacgggtgtaaaaagacaa

SEQ ID NO: 2508609 - DNA, 25 bp, Homo sapien
ctccagtccttggctgcctcacagc

SEQ ID NO: 2508610 - DNA, 25 bp, Homo sapien
tctcttgaaactgcggctcgggacc

SEQ ID NO: 2508611 - DNA, 25 bp, Homo sapien
gcacctctttgcgtccaatcacaga

SEQ ID NO: 2508612 - DNA, 25 bp, Homo sapien
caagccgctgctggttgctaggaga

SEQ ID NO: 2508613 - DNA, 25 bp, Homo sapien
ggtcatagtcctgtttggcggccat

SEQ ID NO: 2508614 - DNA, 25 bp, Homo sapien
gtagtcacgagggacgggcggcggc

SEQ ID NO: 2508615 - DNA, 25 bp, Homo sapien
ctgtagtcacgagggacgggcggcg

SEQ ID NO: 2508616 - DNA, 25 bp, Homo sapien
tgtagtcacgagggacgggcggcgg

SEQ ID NO: 2508617 - DNA, 25 bp, Homo sapien
cattccgtgaaagtaatgatacggc

SEQ ID NO: 2508618 - DNA, 25 bp, Homo sapien
tcattccgtgaaagtaatgatacgg

SEQ ID NO: 2508619 - DNA, 25 bp, Homo sapien
tccgtgaaagtaatgatacggccat

SEQ ID NO: 2508620 - DNA, 25 bp, Homo sapien
tttcattccgtgaaagtaatgatac

SEQ ID NO: 2508621 - DNA, 25 bp, Homo sapien
gatggagctttgtctggacatctgg

SEQ ID NO: 2508622 - DNA, 25 bp, Homo sapien
tactggtgagcattaggaatacctg

SEQ ID NO: 2508623 - DNA, 25 bp, Homo sapien
ggacatctgggtgaagttttaataa

SEQ ID NO: 2508624 - DNA, 25 bp, Homo sapien
caatagtaatagaaagctcatcttc

SEQ ID NO: 2508625 - DNA, 25 bp, Homo sapien
aatcgactttttctatttacaggtg

SEQ ID NO: 2508626 - DNA, 25 bp, Homo sapien
aatactttacagttagacttcagaa

SEQ ID NO: 2508627 - DNA, 25 bp, Homo sapien
tctggttggaacaacaaaatcgact

SEQ ID NO: 2508628 - DNA, 25 bp, Homo sapien
ccaattgggaaagattactcactga

SEQ ID NO: 2508629 - DNA, 25 bp, Homo sapien
cagacagggcacaacagaaattggg

SEQ ID NO: 2508630 - DNA, 25 bp, Homo sapien
gagaatggccattattacacttcag

SEQ ID NO: 2508631 - DNA, 25 bp, Homo sapien
tgctatgaacttccctacagatggg

SEQ ID NO: 2508632 - DNA, 25 bp, Homo sapien
caggctgaaggcatacggtttgttc

SEQ ID NO: 2508633 - DNA, 25 bp, Homo sapien
tctggtaataaaatgtcttactgct

SEQ ID NO: 2508634 - DNA, 25 bp, Homo sapien
gtaataaaatgtcttactgctttta

SEQ ID NO: 2508635 - DNA, 25 bp, Homo sapien
taataaaatgtcttactgcttttat

SEQ ID NO: 2508636 - DNA, 25 bp, Homo sapien
tggtaataaaatgtcttactgcttt

SEQ ID NO: 2508637 - DNA, 25 bp, Homo sapien
tgtttgttaccagatggaggttttg

SEQ ID NO: 2508638 - DNA, 25 bp, Homo sapien
tgttaccagatggaggttttgaatg

SEQ ID NO: 2508639 - DNA, 25 bp, Homo sapien
tttgttaccagatggaggttttgaa

SEQ ID NO: 2508640 - DNA, 25 bp, Homo sapien
ttaccagatggaggttttgaatgaa

SEQ ID NO: 2508641 - DNA, 25 bp, Homo sapien
ttggttgtgctactgctttttccag

SEQ ID NO: 2508642 - DNA, 25 bp, Homo sapien
tttctttggttgtgctactgctttt

SEQ ID NO: 2508643 - DNA, 25 bp, Homo sapien
ggttgtgctactgctttttccagag

SEQ ID NO: 2508644 - DNA, 25 bp, Homo sapien
ctttggttgtgctactgctttttcc

SEQ ID NO: 2508645 - DNA, 25 bp, Homo sapien
tctttactcataaccgtggcttttg

SEQ ID NO: 2508646 - DNA, 25 bp, Homo sapien
catgtgactagaagacctcctttaa

SEQ ID NO: 2508647 - DNA, 25 bp, Homo sapien
tcaggtaaatctcgacaacaaatac

SEQ ID NO: 2508648 - DNA, 25 bp, Homo sapien
actatttgttaatgagccatgtgac

SEQ ID NO: 2508649 - DNA, 25 bp, Homo sapien
atcctctcaattgcctccacatttt

SEQ ID NO: 2508650 - DNA, 25 bp, Homo sapien
tctaccaggcgagattctactttta

SEQ ID NO: 2508651 - DNA, 25 bp, Homo sapien
tgaggtcacacagttctaccaggcg

SEQ ID NO: 2508652 - DNA, 25 bp, Homo sapien
ctttgggaatggattcgatgaggtc

SEQ ID NO: 2508653 - DNA, 25 bp, Homo sapien
agcttttgaattgggttgaggccgt

SEQ ID NO: 2508654 - DNA, 25 bp, Homo sapien
tctttttactaagtgagtctatcag

SEQ ID NO: 2508655 - DNA, 25 bp, Homo sapien
gaattgggttgaggccgtcatcctc

SEQ ID NO: 2508656 - DNA, 25 bp, Homo sapien
gagtaatctttttactaagtgagtc

SEQ ID NO: 2508657 - DNA, 25 bp, Homo sapien
tctgtctccattgtgaacccggtgt

SEQ ID NO: 2508658 - DNA, 25 bp, Homo sapien
caaactgctgggcaatgtgaatcac

SEQ ID NO: 2508659 - DNA, 25 bp, Homo sapien
tggtaggtaacttgtctcaggaccg

SEQ ID NO: 2508660 - DNA, 25 bp, Homo sapien
cccggtgtttgcaattaagaagagc

SEQ ID NO: 2508661 - DNA, 25 bp, Homo sapien
tctccaaagctaaagagcttggact

SEQ ID NO: 2508662 - DNA, 25 bp, Homo sapien
tcttgctccaaaagaaactctatgt

SEQ ID NO: 2508663 - DNA, 25 bp, Homo sapien
ggactttaattgcaattctgctgct

SEQ ID NO: 2508664 - DNA, 25 bp, Homo sapien
tctcacacagttagctttaagcatt

SEQ ID NO: 2508665 - DNA, 25 bp, Homo sapien
cagctctctgaggacttgaagtaac

SEQ ID NO: 2508666 - DNA, 25 bp, Homo sapien
tcatctacatcttgggaatattgaa

SEQ ID NO: 2508667 - DNA, 25 bp, Homo sapien
aggacttgaagtaactcctctggtt

SEQ ID NO: 2508668 - DNA, 25 bp, Homo sapien
tctctgaggacttgaagtaactcct

SEQ ID NO: 2508669 - DNA, 25 bp, Homo sapien
caaactgtcttctgaaccgaaactt

SEQ ID NO: 2508670 - DNA, 25 bp, Homo sapien
tgtcttctgaaccgaaactttcagc

SEQ ID NO: 2508671 - DNA, 25 bp, Homo sapien
caaatcaacgtccatttcatcatct

SEQ ID NO: 2508672 - DNA, 25 bp, Homo sapien
aaatcaacgtccatttcatcatcta

SEQ ID NO: 2508673 - DNA, 25 bp, Homo sapien
taaacctgccattctgaacagagcc

SEQ ID NO: 2508674 - DNA, 25 bp, Homo sapien
tgcagtgcccatgtactccttgagc

SEQ ID NO: 2508675 - DNA, 25 bp, Homo sapien
ttaaaacatacagtgtctccccagg

SEQ ID NO: 2508676 - DNA, 25 bp, Homo sapien
taagccgttcaaagtcctgtcagtg

SEQ ID NO: 2508677 - DNA, 25 bp, Homo sapien
tctctggagtgcgagtcaggcttct

SEQ ID NO: 2508678 - DNA, 25 bp, Homo sapien
ctctggagtgcgagtcaggcttctg

SEQ ID NO: 2508679 - DNA, 25 bp, Homo sapien
tctggagtgcgagtcaggcttctgc

SEQ ID NO: 2508680 - DNA, 25 bp, Homo sapien
tgccaacggcagaaggcaggtccgc

SEQ ID NO: 2508681 - DNA, 25 bp, Homo sapien
cagaaggcaggtccgcgccagagaa

SEQ ID NO: 2508682 - DNA, 25 bp, Homo sapien
caggtccgcgccagagaaacgaggg

SEQ ID NO: 2508683 - DNA, 25 bp, Homo sapien
agtgggcctgccaacggcagaaggc

SEQ ID NO: 2508684 - DNA, 25 bp, Homo sapien
tctgtctccactttgagatggacac

SEQ ID NO: 2508685 - DNA, 25 bp, Homo sapien
aggttggcttgtagtcctctgtctc

SEQ ID NO: 2508686 - DNA, 25 bp, Homo sapien
gacacattcgcaggttttactttca

SEQ ID NO: 2508687 - DNA, 25 bp, Homo sapien
gagatggacacattcgcaggtttta

SEQ ID NO: 2508688 - DNA, 25 bp, Homo sapien
ctgtcctcccggactcctcaaggat

SEQ ID NO: 2508689 - DNA, 25 bp, Homo sapien
cagctgtcctcccggactcctcaag

SEQ ID NO: 2508690 - DNA, 25 bp, Homo sapien
gctgtcctcccggactcctcaagga

SEQ ID NO: 2508691 - DNA, 25 bp, Homo sapien
ggacagctgtcctcccggactcctc

SEQ ID NO: 2508692 - DNA, 25 bp, Homo sapien
tactccctgaggaggaattctgttt

SEQ ID NO: 2508693 - DNA, 25 bp, Homo sapien
tatttgctttactttttgatgcctg

SEQ ID NO: 2508694 - DNA, 25 bp, Homo sapien
actccctgaggaggaattctgtttt

SEQ ID NO: 2508695 - DNA, 25 bp, Homo sapien
tggatttgccaatgttttggagaca

SEQ ID NO: 2508696 - DNA, 25 bp, Homo sapien
cccttgctccactacaggcttgttt

SEQ ID NO: 2508697 - DNA, 25 bp, Homo sapien
ccactacaggcttgtttttcatgat

SEQ ID NO: 2508698 - DNA, 25 bp, Homo sapien
catctcgagccataaagagagaaga

SEQ ID NO: 2508699 - DNA, 25 bp, Homo sapien
tcctggggccatctcgagccataaa

SEQ ID NO: 2508700 - DNA, 25 bp, Homo sapien
tggaaatttggccacgagaagattg

SEQ ID NO: 2508701 - DNA, 25 bp, Homo sapien
acgagaagattgtgcccaccctcac

SEQ ID NO: 2508702 - DNA, 25 bp, Homo sapien
aatttggccacgagaagattgtgcc

SEQ ID NO: 2508703 - DNA, 25 bp, Homo sapien
ttaatgggtcgtggaaatttggcca

SEQ ID NO: 2508704 - DNA, 25 bp, Homo sapien
tctgctgtcatttggagtttgttta

SEQ ID NO: 2508705 - DNA, 25 bp, Homo sapien
attttcagagcgtctacagatctct

SEQ ID NO: 2508706 - DNA, 25 bp, Homo sapien
agatctctggtcattttctcgaagg

SEQ ID NO: 2508707 - DNA, 25 bp, Homo sapien
ctcttcaaaggccagtgcatcatct

SEQ ID NO: 2508708 - DNA, 25 bp, Homo sapien
tctctgctttttttagttgccgttc

SEQ ID NO: 2508709 - DNA, 25 bp, Homo sapien
tgtttcttttggttgacaaagcata

SEQ ID NO: 2508710 - DNA, 25 bp, Homo sapien
ttgtgtttcttttggttgacaaagc

SEQ ID NO: 2508711 - DNA, 25 bp, Homo sapien
tgattgtgtttcttttggttgacaa

SEQ ID NO: 2508712 - DNA, 25 bp, Homo sapien
tgtgtttcttttggttgacaaagca

SEQ ID NO: 2508713 - DNA, 25 bp, Homo sapien
gcagtttcaactctgccatgccagt

SEQ ID NO: 2508714 - DNA, 25 bp, Homo sapien
caactctgccatgccagtgatgcat

SEQ ID NO: 2508715 - DNA, 25 bp, Homo sapien
tgcagtcacaaaagctaccagcttc

SEQ ID NO: 2508716 - DNA, 25 bp, Homo sapien
tttcaactctgccatgccagtgatg

SEQ ID NO: 2508717 - DNA, 25 bp, Homo sapien
aaacacaactttgacatctgccttc

SEQ ID NO: 2508718 - DNA, 25 bp, Homo sapien
gagataacaaccaataattagaccc

SEQ ID NO: 2508719 - DNA, 25 bp, Homo sapien
tagaccctccaagtttatagcaaaa

SEQ ID NO: 2508720 - DNA, 25 bp, Homo sapien
actttattccgcaagtacttactga

SEQ ID NO: 2508721 - DNA, 25 bp, Homo sapien
ttctgtcactatagacgaacttgca

SEQ ID NO: 2508722 - DNA, 25 bp, Homo sapien
gccaaactgatatctaaagagggtt

SEQ ID NO: 2508723 - DNA, 25 bp, Homo sapien
taaagatgccatgaaaccacttcag

SEQ ID NO: 2508724 - DNA, 25 bp, Homo sapien
taatgtgatatctaaagagggtccc

SEQ ID NO: 2508725 - DNA, 25 bp, Homo sapien
tcaggcactatcctggtcatagaag

SEQ ID NO: 2508726 - DNA, 25 bp, Homo sapien
acctggcacactgttctgacatgaa

SEQ ID NO: 2508727 - DNA, 25 bp, Homo sapien
gctgcattaaatagggcatctcagg

SEQ ID NO: 2508728 - DNA, 25 bp, Homo sapien
taaaagactccataagggacctggc

SEQ ID NO: 2508729 - DNA, 25 bp, Homo sapien
aaattcatggacagtcctttttgtg

SEQ ID NO: 2508730 - DNA, 25 bp, Homo sapien
taataaattcatggacagtcctttt

SEQ ID NO: 2508731 - DNA, 25 bp, Homo sapien
tggacagtcctttttgtgtcggaac

SEQ ID NO: 2508732 - DNA, 25 bp, Homo sapien
ttcatggacagtcctttttgtgtcg

SEQ ID NO: 2508733 - DNA, 25 bp, Homo sapien
ggatgggatttatgttgcctccagg

SEQ ID NO: 2508734 - DNA, 25 bp, Homo sapien
tcggatgggatttatgttgcctcca

SEQ ID NO: 2508735 - DNA, 25 bp, Homo sapien
gatcggatgggatttatgttgcctc

SEQ ID NO: 2508736 - DNA, 25 bp, Homo sapien
ggatcggatgggatttatgttgcct

SEQ ID NO: 2508737 - DNA, 25 bp, Homo sapien
tataactccagcaacatcctagaca

SEQ ID NO: 2508738 - DNA, 25 bp, Homo sapien
gctataactccagcaacatcctaga

SEQ ID NO: 2508739 - DNA, 25 bp, Homo sapien
tgctataactccagcaacatcctag

SEQ ID NO: 2508740 - DNA, 25 bp, Homo sapien
ataactccagcaacatcctagacag

SEQ ID NO: 2508741 - DNA, 25 bp, Homo sapien
agaaagctagttggctcaggtatga

SEQ ID NO: 2508742 - DNA, 25 bp, Homo sapien
cttctattaatctaggaatcggagc

SEQ ID NO: 2508743 - DNA, 25 bp, Homo sapien
ttagggtagaaagctagttggctca

SEQ ID NO: 2508744 - DNA, 25 bp, Homo sapien
tctaggaatcggagcaggacctggc

SEQ ID NO: 2508745 - DNA, 25 bp, Homo sapien
gatgaaaaagtagttttctggtaga

SEQ ID NO: 2508746 - DNA, 25 bp, Homo sapien
aagtagttttctggtagactttcat

SEQ ID NO: 2508747 - DNA, 25 bp, Homo sapien
attctggatgaaaaagtagttttct

SEQ ID NO: 2508748 - DNA, 25 bp, Homo sapien
tctggatgaaaaagtagttttctgg

SEQ ID NO: 2508749 - DNA, 25 bp, Homo sapien
ctctttggttgagccatcttttact

SEQ ID NO: 2508750 - DNA, 25 bp, Homo sapien
aaagatcttataaggcctgtcctct

SEQ ID NO: 2508751 - DNA, 25 bp, Homo sapien
tgaaaaagatcttataaggcctgtc

SEQ ID NO: 2508752 - DNA, 25 bp, Homo sapien
tcttataaggcctgtcctctttggt

SEQ ID NO: 2508753 - DNA, 25 bp, Homo sapien
atacaaggaactcttatttgcccag

SEQ ID NO: 2508754 - DNA, 25 bp, Homo sapien
cagaataggcatattcatggagata

SEQ ID NO: 2508755 - DNA, 25 bp, Homo sapien
gaaagtaggtgagtagttgcttggg

SEQ ID NO: 2508756 - DNA, 25 bp, Homo sapien
aactgattaacgataaacaaaatgc

SEQ ID NO: 2508757 - DNA, 25 bp, Homo sapien
gaaccagtcaagtggatatctgagg

SEQ ID NO: 2508758 - DNA, 25 bp, Homo sapien
tttaaaggagttgagagaaccagtc

SEQ ID NO: 2508759 - DNA, 25 bp, Homo sapien
aatgaagcctcaactatgtgccagg

SEQ ID NO: 2508760 - DNA, 25 bp, Homo sapien
taggcactgatgttacactggtgaa

SEQ ID NO: 2508761 - DNA, 25 bp, Homo sapien
cttttactgtctccaatcgtactga

SEQ ID NO: 2508762 - DNA, 25 bp, Homo sapien
tactgtctccaatcgtactgatgta

SEQ ID NO: 2508763 - DNA, 25 bp, Homo sapien
tctccaatcgtactgatgtattcat

SEQ ID NO: 2508764 - DNA, 25 bp, Homo sapien
tgtctccaatcgtactgatgtattc

SEQ ID NO: 2508765 - DNA, 25 bp, Homo sapien
taatttcacccatttgattggcaaa

SEQ ID NO: 2508766 - DNA, 25 bp, Homo sapien
tagagttatgattggcacaactact

SEQ ID NO: 2508767 - DNA, 25 bp, Homo sapien
tactcagctaacgtcagattcagca

SEQ ID NO: 2508768 - DNA, 25 bp, Homo sapien
taaagagcactaacaacctaaagaa

SEQ ID NO: 2508769 - DNA, 25 bp, Homo sapien
tcagcggaagtggtgaatgcaactt

SEQ ID NO: 2508770 - DNA, 25 bp, Homo sapien
gttgggcccctgatgtgaacctcca

SEQ ID NO: 2508771 - DNA, 25 bp, Homo sapien
gaagcagccgtcttggaccaagaac

SEQ ID NO: 2508772 - DNA, 25 bp, Homo sapien
gaggaaaatcttagccctgtcacag

SEQ ID NO: 2508773 - DNA, 25 bp, Homo sapien
cagtgttggcaataaatttgaggac

SEQ ID NO: 2508774 - DNA, 25 bp, Homo sapien
ccagaattcagtgttggcaataaat

SEQ ID NO: 2508775 - DNA, 25 bp, Homo sapien
ttcagtgttggcaataaatttgagg

SEQ ID NO: 2508776 - DNA, 25 bp, Homo sapien
ctccagaattcagtgttggcaataa

SEQ ID NO: 2508777 - DNA, 25 bp, Homo sapien
aacgcagctggccaacggataagtg

SEQ ID NO: 2508778 - DNA, 25 bp, Homo sapien
caacctatcgttcgggaaggcgttg

SEQ ID NO: 2508779 - DNA, 25 bp, Homo sapien
gaccgtctggtagctgatcccggaa

SEQ ID NO: 2508780 - DNA, 25 bp, Homo sapien
gtcccagcaccctaggcagaggttt

SEQ ID NO: 2508781 - DNA, 25 bp, Homo sapien
cccgcccggccagccgccctgtccg

SEQ ID NO: 2508782 - DNA, 25 bp, Homo sapien
cagccgccccatccgggagggaggt

SEQ ID NO: 2508783 - DNA, 25 bp, Homo sapien
tctgcccggccagccgccccatccg

SEQ ID NO: 2508784 - DNA, 25 bp, Homo sapien
cccggccagccgccctgtccgggag

SEQ ID NO: 2508785 - DNA, 25 bp, Homo sapien
ccctctgcccggccagccgccccgt

SEQ ID NO: 2508786 - DNA, 25 bp, Homo sapien
tctgcccggccagccgccccgtccg

SEQ ID NO: 2508787 - DNA, 25 bp, Homo sapien
gagcccctctgcccggccagccgcc

SEQ ID NO: 2508788 - DNA, 25 bp, Homo sapien
gcccctctgcccggccagccgcccc

SEQ ID NO: 2508789 - DNA, 25 bp, Homo sapien
gaaatctaagtgatacgccccaatg

SEQ ID NO: 2508790 - DNA, 25 bp, Homo sapien
tagagcttcccagcagcgttcaaga

SEQ ID NO: 2508791 - DNA, 25 bp, Homo sapien
tctcaatctcagcaatagagcttcc

SEQ ID NO: 2508792 - DNA, 25 bp, Homo sapien
tacattacaattgggtgaaacacat

SEQ ID NO: 2508793 - DNA, 25 bp, Homo sapien
tgggtcttgaaccacgacaacagga

SEQ ID NO: 2508794 - DNA, 25 bp, Homo sapien
gagccacggtttcagaccacttgaa

SEQ ID NO: 2508795 - DNA, 25 bp, Homo sapien
caaactggagcgaagagcaccatga

SEQ ID NO: 2508796 - DNA, 25 bp, Homo sapien
tattgtgaaatccactgttcggccc

SEQ ID NO: 2508797 - DNA, 25 bp, Homo sapien
aatgtatggagcagctacttcccaa

SEQ ID NO: 2508798 - DNA, 25 bp, Homo sapien
cagactccgggattttggtggattt

SEQ ID NO: 2508799 - DNA, 25 bp, Homo sapien
ttcaatgtatggagcagctacttcc

SEQ ID NO: 2508800 - DNA, 25 bp, Homo sapien
aagaggtcttgattctggaatatgc

SEQ ID NO: 2508801 - DNA, 25 bp, Homo sapien
tctatacatgaccagacacagctgc

SEQ ID NO: 2508802 - DNA, 25 bp, Homo sapien
gttgctccagggtcttaacagtacc

SEQ ID NO: 2508803 - DNA, 25 bp, Homo sapien
gatagagtgaaggatagttgctcca

SEQ ID NO: 2508804 - DNA, 25 bp, Homo sapien
taagccatttgacacatgacctgtg

SEQ ID NO: 2508805 - DNA, 25 bp, Homo sapien
tgccccagagcagagcaactgtttt

SEQ ID NO: 2508806 - DNA, 25 bp, Homo sapien
cagagcactagacagaccgaaagtc

SEQ ID NO: 2508807 - DNA, 25 bp, Homo sapien
tgtgatagcatcacccagaagggaa

SEQ ID NO: 2508808 - DNA, 25 bp, Homo sapien
cctggcagctgagtatacggtcaat

SEQ ID NO: 2508809 - DNA, 25 bp, Homo sapien
tgtttctccatccccgactttgctt

SEQ ID NO: 2508810 - DNA, 25 bp, Homo sapien
gaaaacaatagaataaggcaatgtt

SEQ ID NO: 2508811 - DNA, 25 bp, Homo sapien
caaggaatggccagaaaacaataga

SEQ ID NO: 2508812 - DNA, 25 bp, Homo sapien
atgtttctccatccccgactttgct

SEQ ID NO: 2508813 - DNA, 25 bp, Homo sapien
ctcgatgtccggggccatgaagcga

SEQ ID NO: 2508814 - DNA, 25 bp, Homo sapien
tcgatgtccggggccatgaagcgat

SEQ ID NO: 2508815 - DNA, 25 bp, Homo sapien
cctgtgggctgcctcgatgtccggg

SEQ ID NO: 2508816 - DNA, 25 bp, Homo sapien
gcctgtgggctgcctcgatgtccgg

SEQ ID NO: 2508817 - DNA, 25 bp, Homo sapien
gggacgtagaaactctatgccctgg

SEQ ID NO: 2508818 - DNA, 25 bp, Homo sapien
accaggtcatagaccttctccagcg

SEQ ID NO: 2508819 - DNA, 25 bp, Homo sapien
tctccagcggagtggttgttttcag

SEQ ID NO: 2508820 - DNA, 25 bp, Homo sapien
gacgtagaaactctatgccctggca

SEQ ID NO: 2508821 - DNA, 25 bp, Homo sapien
agacgtggtcctccgtggctgcgct

SEQ ID NO: 2508822 - DNA, 25 bp, Homo sapien
gctcgatgaccctgagggctttcct

SEQ ID NO: 2508823 - DNA, 25 bp, Homo sapien
ttgctccacatgctcgatgaccctg

SEQ ID NO: 2508824 - DNA, 25 bp, Homo sapien
gagtcaacagacgagggatggcaca

SEQ ID NO: 2508825 - DNA, 25 bp, Homo sapien
gagggattgcagagccgctcgattc

SEQ ID NO: 2508826 - DNA, 25 bp, Homo sapien
gagccgctcgattcttctctcactg

SEQ ID NO: 2508827 - DNA, 25 bp, Homo sapien
ctatcatgaacccagagttcagacc

SEQ ID NO: 2508828 - DNA, 25 bp, Homo sapien
gcagtgagctatcatgaacccagag

SEQ ID NO: 2508829 - DNA, 25 bp, Homo sapien
gtttcctccagaaactgtctctccc

SEQ ID NO: 2508830 - DNA, 25 bp, Homo sapien
tggaagtttcctccagaaactgtct

SEQ ID NO: 2508831 - DNA, 25 bp, Homo sapien
aagtttcctccagaaactgtctctc

SEQ ID NO: 2508832 - DNA, 25 bp, Homo sapien
catggaagtttcctccagaaactgt

SEQ ID NO: 2508833 - DNA, 25 bp, Homo sapien
tcaaaaggtttatagcctgaaacta

SEQ ID NO: 2508834 - DNA, 25 bp, Homo sapien
ctcaaaaggtttatagcctgaaact

SEQ ID NO: 2508835 - DNA, 25 bp, Homo sapien
gccctcaaaaggtttatagcctgaa

SEQ ID NO: 2508836 - DNA, 25 bp, Homo sapien
ctgccctcaaaaggtttatagcctg

SEQ ID NO: 2508837 - DNA, 25 bp, Homo sapien
tggtgtcagcgttcaacagcagatg

SEQ ID NO: 2508838 - DNA, 25 bp, Homo sapien
catgaatccattttaagtaggtggc

SEQ ID NO: 2508839 - DNA, 25 bp, Homo sapien
acagcagatggtggccaatatgtcc

SEQ ID NO: 2508840 - DNA, 25 bp, Homo sapien
gaatgggaaactctgctgatgagca

SEQ ID NO: 2508841 - DNA, 25 bp, Homo sapien
ctctgaatccctatagcaatggaat

SEQ ID NO: 2508842 - DNA, 25 bp, Homo sapien
cattgggtctagctccttggtcttg

SEQ ID NO: 2508843 - DNA, 25 bp, Homo sapien
cattaacctactcaagtgtggatta

SEQ ID NO: 2508844 - DNA, 25 bp, Homo sapien
tgttctgcatgtgtaactgtgagcc

SEQ ID NO: 2508845 - DNA, 25 bp, Homo sapien
tttctttgaacaaacgcaaaagcac

SEQ ID NO: 2508846 - DNA, 25 bp, Homo sapien
tctttgaacaaacgcaaaagcacta

SEQ ID NO: 2508847 - DNA, 25 bp, Homo sapien
tttgaacaaacgcaaaagcactaat

SEQ ID NO: 2508848 - DNA, 25 bp, Homo sapien
tgaacaaacgcaaaagcactaattt

SEQ ID NO: 2508849 - DNA, 25 bp, Homo sapien
gtgaaatggagcaatggaactgaga

SEQ ID NO: 2508850 - DNA, 25 bp, Homo sapien
tgattcatttactctgtgaaatgga

SEQ ID NO: 2508851 - DNA, 25 bp, Homo sapien
tggagcaatggaactgagaagctac

SEQ ID NO: 2508852 - DNA, 25 bp, Homo sapien
gagtaagttcacaggtcacctctgc

SEQ ID NO: 2508853 - DNA, 25 bp, Homo sapien
attctataattgcaggttagtatac

SEQ ID NO: 2508854 - DNA, 25 bp, Homo sapien
gcaggttagtatacaatcaaaagat

SEQ ID NO: 2508855 - DNA, 25 bp, Homo sapien
aggttagtatacaatcaaaagatac

SEQ ID NO: 2508856 - DNA, 25 bp, Homo sapien
aattctataattgcaggttagtata

SEQ ID NO: 2508857 - DNA, 25 bp, Homo sapien
aggattatctgttgcgctgttcagt

SEQ ID NO: 2508858 - DNA, 25 bp, Homo sapien
tatctgttgcgctgttcagttctgt

SEQ ID NO: 2508859 - DNA, 25 bp, Homo sapien
tcacaaatgctattgtatcattcac

SEQ ID NO: 2508860 - DNA, 25 bp, Homo sapien
ttgtatcattcaccacaccatggac

SEQ ID NO: 2508861 - DNA, 25 bp, Homo sapien
tatgcatcctggacgcgatcacaga

SEQ ID NO: 2508862 - DNA, 25 bp, Homo sapien
cagcgcaaggtgtatgcatcctgga

SEQ ID NO: 2508863 - DNA, 25 bp, Homo sapien
tggacagcagcgcaaggtgtatgca

SEQ ID NO: 2508864 - DNA, 25 bp, Homo sapien
caaggtgtatgcatcctggacgcga

SEQ ID NO: 2508865 - DNA, 25 bp, Homo sapien
aggggatgagacagggatcatgtta

SEQ ID NO: 2508866 - DNA, 25 bp, Homo sapien
ggggatgagacagggatcatgttac

SEQ ID NO: 2508867 - DNA, 25 bp, Homo sapien
cgtaaccaaataggtcactcccata

SEQ ID NO: 2508868 - DNA, 25 bp, Homo sapien
cacgtaaccaaataggtcactccca

SEQ ID NO: 2508869 - DNA, 25 bp, Homo sapien
ccaaataggtcactcccataaacat

SEQ ID NO: 2508870 - DNA, 25 bp, Homo sapien
taaccaaataggtcactcccataaa

SEQ ID NO: 2508871 - DNA, 25 bp, Homo sapien
tgaccgaaaccgaaaagcaacttca

SEQ ID NO: 2508872 - DNA, 25 bp, Homo sapien
gctatttctgatgggtggtgatctg

SEQ ID NO: 2508873 - DNA, 25 bp, Homo sapien
atttctgatgggtggtgatctgagt

SEQ ID NO: 2508874 - DNA, 25 bp, Homo sapien
cacggtgaggtcgaagagcatgaat

SEQ ID NO: 2508875 - DNA, 25 bp, Homo sapien
tggttcaggaccatctacggtgctg

SEQ ID NO: 2508876 - DNA, 25 bp, Homo sapien
tacggtgctgacacagccctcaaaa

SEQ ID NO: 2508877 - DNA, 25 bp, Homo sapien
ccatgccaggtcgagtaattctgat

SEQ ID NO: 2508878 - DNA, 25 bp, Homo sapien
gaattgatgaaggagaaaaagtctg

SEQ ID NO: 2508879 - DNA, 25 bp, Homo sapien
aatagcactggctcgctctacagct

SEQ ID NO: 2508880 - DNA, 25 bp, Homo sapien
tgcgtcccattgatgagtgccaggc

SEQ ID NO: 2508881 - DNA, 25 bp, Homo sapien
tacagcttcacagcccagggatgtg

SEQ ID NO: 2508882 - DNA, 25 bp, Homo sapien
caatgtcagcctgccgtgcaatagc

SEQ ID NO: 2508883 - DNA, 25 bp, Homo sapien
tgaactcgtaagcacaaatctggca

SEQ ID NO: 2508884 - DNA, 25 bp, Homo sapien
tatttaagcccttgaagaataagtg

SEQ ID NO: 2508885 - DNA, 25 bp, Homo sapien
tctaaagtgcgggacagtaatgttt

SEQ ID NO: 2508886 - DNA, 25 bp, Homo sapien
tgtaacgaacctacatacccgtgga

SEQ ID NO: 2508887 - DNA, 25 bp, Homo sapien
aataactggtttcaatccatgggct

SEQ ID NO: 2508888 - DNA, 25 bp, Homo sapien
taactggtttcaatccatgggcttc

SEQ ID NO: 2508889 - DNA, 25 bp, Homo sapien
ataactggtttcaatccatgggctt

SEQ ID NO: 2508890 - DNA, 25 bp, Homo sapien
gaaccacacatagaagggattaggg

SEQ ID NO: 2508891 - DNA, 25 bp, Homo sapien
gcagaaataggagagagaagaacgt

SEQ ID NO: 2508892 - DNA, 25 bp, Homo sapien
tatttgtaccagaccctctgcccag

SEQ ID NO: 2508893 - DNA, 25 bp, Homo sapien
tatgtagaggcggagcctcgctttc

SEQ ID NO: 2508894 - DNA, 25 bp, Homo sapien
gtgaaataatcaaagacaagcctgc

SEQ ID NO: 2508895 - DNA, 25 bp, Homo sapien
gggaagctcccagcagttcatcagg

SEQ ID NO: 2508896 - DNA, 25 bp, Homo sapien
gcctgcacggaagacagatgatcta

SEQ ID NO: 2508897 - DNA, 25 bp, Homo sapien
tggtcggaggaaaacgctgtccata

SEQ ID NO: 2508898 - DNA, 25 bp, Homo sapien
caccaaagctttatcaaaaacaggc

SEQ ID NO: 2508899 - DNA, 25 bp, Homo sapien
gaagaaaacaccaaagctttatcaa

SEQ ID NO: 2508900 - DNA, 25 bp, Homo sapien
atgaagaaaacaccaaagctttatc

SEQ ID NO: 2508901 - DNA, 25 bp, Homo sapien
tcaaaaacaggcttttttgattagc

SEQ ID NO: 2508902 - DNA, 25 bp, Homo sapien
agatagaagctgctacgagtcttac

SEQ ID NO: 2508903 - DNA, 25 bp, Homo sapien
gggcaattgctgcagatagaagctg

SEQ ID NO: 2508904 - DNA, 25 bp, Homo sapien
gatacgaagcatgcaagcacagttg

SEQ ID NO: 2508905 - DNA, 25 bp, Homo sapien
aggtgatacgaagcatgcaagcaca

SEQ ID NO: 2508906 - DNA, 25 bp, Homo sapien
ccaactagcccaagagcaagatgag

SEQ ID NO: 2508907 - DNA, 25 bp, Homo sapien
tccactggcaccaacggttcctttc

SEQ ID NO: 2508908 - DNA, 25 bp, Homo sapien
agccactcttcggagaccacatctt

SEQ ID NO: 2508909 - DNA, 25 bp, Homo sapien
gtatttagcatcagcccagccactc

SEQ ID NO: 2508910 - DNA, 25 bp, Homo sapien
ccccttatcaatgaacacgtgccat

SEQ ID NO: 2508911 - DNA, 25 bp, Homo sapien
caaagcattaacaaggtttcccagg

SEQ ID NO: 2508912 - DNA, 25 bp, Homo sapien
tcatttgaccaagtttagccattca

SEQ ID NO: 2508913 - DNA, 25 bp, Homo sapien
gggaagagaagtcataggcaactga

SEQ ID NO: 2508914 - DNA, 25 bp, Homo sapien
tgttctacccttgcaagaagttgga

SEQ ID NO: 2508915 - DNA, 25 bp, Homo sapien
gcttgtccttacctgtgagaaggga

SEQ ID NO: 2508916 - DNA, 25 bp, Homo sapien
ggattttagtgtgcaagtctggcca

SEQ ID NO: 2508917 - DNA, 25 bp, Homo sapien
gagtctccactgacctagaaggctt

SEQ ID NO: 2508918 - DNA, 25 bp, Homo sapien
gtatcctttggctaagacattgatc

SEQ ID NO: 2508919 - DNA, 25 bp, Homo sapien
cactgtatcctttggctaagacatt

SEQ ID NO: 2508920 - DNA, 25 bp, Homo sapien
tgccactgtatcctttggctaagac

SEQ ID NO: 2508921 - DNA, 25 bp, Homo sapien
tgtatcctttggctaagacattgat

SEQ ID NO: 2508922 - DNA, 25 bp, Homo sapien
ccaagagcatccgacacctctcagg

SEQ ID NO: 2508923 - DNA, 25 bp, Homo sapien
aaagccaagagcatccgacacctct

SEQ ID NO: 2508924 - DNA, 25 bp, Homo sapien
cttaaagccaagagcatccgacacc

SEQ ID NO: 2508925 - DNA, 25 bp, Homo sapien
caagagcatccgacacctctcagga

SEQ ID NO: 2508926 - DNA, 25 bp, Homo sapien
gaatgtgagcgtactaagttgacct

SEQ ID NO: 2508927 - DNA, 25 bp, Homo sapien
tgagcgtactaagttgacctgaagc

SEQ ID NO: 2508928 - DNA, 25 bp, Homo sapien
gcgtactaagttgacctgaagctcc

SEQ ID NO: 2508929 - DNA, 25 bp, Homo sapien
ctgaagaatgtgagcgtactaagtt

SEQ ID NO: 2508930 - DNA, 25 bp, Homo sapien
tcttagatacattgcagtgagaaaa

SEQ ID NO: 2508931 - DNA, 25 bp, Homo sapien
ctcttagatacattgcagtgagaaa

SEQ ID NO: 2508932 - DNA, 25 bp, Homo sapien
cttagatacattgcagtgagaaaat

SEQ ID NO: 2508933 - DNA, 25 bp, Homo sapien
ttacagttctggcaaatttcccaaa

SEQ ID NO: 2508934 - DNA, 25 bp, Homo sapien
ataggaattacagttctggcaaatt

SEQ ID NO: 2508935 - DNA, 25 bp, Homo sapien
tgtagcttattgataggaattacag

SEQ ID NO: 2508936 - DNA, 25 bp, Homo sapien
ggaattacagttctggcaaatttcc

SEQ ID NO: 2508937 - DNA, 25 bp, Homo sapien
gatgctatctatgacctccctggat

SEQ ID NO: 2508938 - DNA, 25 bp, Homo sapien
ttttctcttttatgatgctatctat

SEQ ID NO: 2508939 - DNA, 25 bp, Homo sapien
tgatgctatctatgacctccctgga

SEQ ID NO: 2508940 - DNA, 25 bp, Homo sapien
tttctcttttatgatgctatctatg

SEQ ID NO: 2508941 - DNA, 25 bp, Homo sapien
gatcctccgtggtcagacggtctcc

SEQ ID NO: 2508942 - DNA, 25 bp, Homo sapien
tagcgtccctttcccaagttgacca

SEQ ID NO: 2508943 - DNA, 25 bp, Homo sapien
gacggtctccatctaactcgatgta

SEQ ID NO: 2508944 - DNA, 25 bp, Homo sapien
caagttgaccagatcctccgtggtc

SEQ ID NO: 2508945 - DNA, 25 bp, Homo sapien
ctcagtgagtctgaacagcttgatt

SEQ ID NO: 2508946 - DNA, 25 bp, Homo sapien
agtgagtctgaacagcttgattatt

SEQ ID NO: 2508947 - DNA, 25 bp, Homo sapien
cagtgagtctgaacagcttgattat

SEQ ID NO: 2508948 - DNA, 25 bp, Homo sapien
tcagtgagtctgaacagcttgatta

SEQ ID NO: 2508949 - DNA, 25 bp, Homo sapien
gatcattgcgtgaaacatgaatatg

SEQ ID NO: 2508950 - DNA, 25 bp, Homo sapien
tctgatcattgcgtgaaacatgaat

SEQ ID NO: 2508951 - DNA, 25 bp, Homo sapien
ttcagagatctgatcattgcgtgaa

SEQ ID NO: 2508952 - DNA, 25 bp, Homo sapien
agatctgatcattgcgtgaaacatg

SEQ ID NO: 2508953 - DNA, 25 bp, Homo sapien
aaggaacatatagggtggtgtggaa

SEQ ID NO: 2508954 - DNA, 25 bp, Homo sapien
ggaacatatagggtggtgtggaaaa

SEQ ID NO: 2508955 - DNA, 25 bp, Homo sapien
gaacatatagggtggtgtggaaaaa

SEQ ID NO: 2508956 - DNA, 25 bp, Homo sapien
aaaggaacatatagggtggtgtgga

SEQ ID NO: 2508957 - DNA, 25 bp, Homo sapien
gataaactccttctggttgagatgg

SEQ ID NO: 2508958 - DNA, 25 bp, Homo sapien
agataaactccttctggttgagatg

SEQ ID NO: 2508959 - DNA, 25 bp, Homo sapien
ggagacatggcatcaccctctataa

SEQ ID NO: 2508960 - DNA, 25 bp, Homo sapien
gcggccctctcctgcagccactcac

SEQ ID NO: 2508961 - DNA, 25 bp, Homo sapien
ccgttcgcggccctctcctgcagcc

SEQ ID NO: 2508962 - DNA, 25 bp, Homo sapien
cgttcgcggccctctcctgcagcca

SEQ ID NO: 2508963 - DNA, 25 bp, Homo sapien
ttcgcggccctctcctgcagccact

SEQ ID NO: 2508964 - DNA, 25 bp, Homo sapien
aagtgcgcgtcatccacggaggtga

SEQ ID NO: 2508965 - DNA, 25 bp, Homo sapien
cttgcaccggcgcacaaggaagtgc

SEQ ID NO: 2508966 - DNA, 25 bp, Homo sapien
accattgtcgggcttattcttgata

SEQ ID NO: 2508967 - DNA, 25 bp, Homo sapien
cgtacgtgcaccgtgtatctgggca

SEQ ID NO: 2508968 - DNA, 25 bp, Homo sapien
ggctccgctgcagcctgaggtcctc

SEQ ID NO: 2508969 - DNA, 25 bp, Homo sapien
ctccgctgcagcctgaggtcctcag

SEQ ID NO: 2508970 - DNA, 25 bp, Homo sapien
gctccgctgcagcctgaggtcctca

SEQ ID NO: 2508971 - DNA, 25 bp, Homo sapien
gggagagctttatgcaggagtggct

SEQ ID NO: 2508972 - DNA, 25 bp, Homo sapien
gagctttatgcaggagtggctaccg

SEQ ID NO: 2508973 - DNA, 25 bp, Homo sapien
agctttatgcaggagtggctaccgg

SEQ ID NO: 2508974 - DNA, 25 bp, Homo sapien
gagagctttatgcaggagtggctac

SEQ ID NO: 2508975 - DNA, 25 bp, Homo sapien
gaaggatgagaatagactttcaaac

SEQ ID NO: 2508976 - DNA, 25 bp, Homo sapien
ggatgagaatagactttcaaaccac

SEQ ID NO: 2508977 - DNA, 25 bp, Homo sapien
ctggaaggatgagaatagactttca

SEQ ID NO: 2508978 - DNA, 25 bp, Homo sapien
tgagaatagactttcaaaccactcc

SEQ ID NO: 2508979 - DNA, 25 bp, Homo sapien
ggaggtgctgttcttgtccctgatg

SEQ ID NO: 2508980 - DNA, 25 bp, Homo sapien
taagggcagcttataaacaccatgt

SEQ ID NO: 2508981 - DNA, 25 bp, Homo sapien
cctgatggcacctacctgctgctgg

SEQ ID NO: 2508982 - DNA, 25 bp, Homo sapien
gatgcagacgggtgagcctcctgtc

SEQ ID NO: 2508983 - DNA, 25 bp, Homo sapien
tgttaaaatttacaaagaatatgcc

SEQ ID NO: 2508984 - DNA, 25 bp, Homo sapien
cttgttaaaatttacaaagaatatg

SEQ ID NO: 2508985 - DNA, 25 bp, Homo sapien
ttaaaatttacaaagaatatgccac

SEQ ID NO: 2508986 - DNA, 25 bp, Homo sapien
gttaaaatttacaaagaatatgcca

SEQ ID NO: 2508987 - DNA, 25 bp, Homo sapien
tcagtaaaatcaccaacaaaacaat

SEQ ID NO: 2508988 - DNA, 25 bp, Homo sapien
cagtaaaatcaccaacaaaacaata

SEQ ID NO: 2508989 - DNA, 25 bp, Homo sapien
ttatttcagtaaaatcaccaacaaa

SEQ ID NO: 2508990 - DNA, 25 bp, Homo sapien
caactttatttcagtaaaatcacca

SEQ ID NO: 2508991 - DNA, 25 bp, Homo sapien
aaatctctaaaatcatcaatacgca

SEQ ID NO: 2508992 - DNA, 25 bp, Homo sapien
tatatttctttacgaattccattta

SEQ ID NO: 2508993 - DNA, 25 bp, Homo sapien
tctaaaatcatcaatacgcaggtct

SEQ ID NO: 2508994 - DNA, 25 bp, Homo sapien
aaagacagttttaattgtgagctga

SEQ ID NO: 2508995 - DNA, 25 bp, Homo sapien
taggttcggacagcttgatcatggg

SEQ ID NO: 2508996 - DNA, 25 bp, Homo sapien
gatcatgggatttgtcaaaggcagc

SEQ ID NO: 2508997 - DNA, 25 bp, Homo sapien
gtcacgggatgcatgcttgctttgt

SEQ ID NO: 2508998 - DNA, 25 bp, Homo sapien
tgtgctcttggtaggttcggacagc

SEQ ID NO: 2508999 - DNA, 25 bp, Homo sapien
caaagtacggtctgagtgggttctt

SEQ ID NO: 2509000 - DNA, 25 bp, Homo sapien
aagcaacctacccttgacctctatg

SEQ ID NO: 2509001 - DNA, 25 bp, Homo sapien
tgaacacaaaagagttagctttatc

SEQ ID NO: 2509002 - DNA, 25 bp, Homo sapien
tataagtgtgaatccctattccaaa

SEQ ID NO: 2509003 - DNA, 25 bp, Homo sapien
cattcttccttgttcagttgccatc

SEQ ID NO: 2509004 - DNA, 25 bp, Homo sapien
tcagttgccatctttagcgccaaag

SEQ ID NO: 2509005 - DNA, 25 bp, Homo sapien
tggattgaatgcagagccgcagcca

SEQ ID NO: 2509006 - DNA, 25 bp, Homo sapien
aaggaattgcgtcctcccacttgga

SEQ ID NO: 2509007 - DNA, 25 bp, Homo sapien
cactatagttatactgtacaccact

SEQ ID NO: 2509008 - DNA, 25 bp, Homo sapien
gggcaggatatgacaggtatatctt

SEQ ID NO: 2509009 - DNA, 25 bp, Homo sapien
tatgaataaccccactatagttata

SEQ ID NO: 2509010 - DNA, 25 bp, Homo sapien
gggagcatggagtagaaaatgagga

SEQ ID NO: 2509011 - DNA, 25 bp, Homo sapien
tttcttccacagagacaagttaaaa

SEQ ID NO: 2509012 - DNA, 25 bp, Homo sapien
ccactataagtatttatatagaagc

SEQ ID NO: 2509013 - DNA, 25 bp, Homo sapien
gactcaagtatgtctcatactctgc

SEQ ID NO: 2509014 - DNA, 25 bp, Homo sapien
gacaaggaattctcaagactcaagt

SEQ ID NO: 2509015 - DNA, 25 bp, Homo sapien
ttcgctttatgtgccccaatggaag

SEQ ID NO: 2509016 - DNA, 25 bp, Homo sapien
ttatgtgccccaatggaagaggtgc

SEQ ID NO: 2509017 - DNA, 25 bp, Homo sapien
tcttgcattcgctttatgtgcccca

SEQ ID NO: 2509018 - DNA, 25 bp, Homo sapien
tgcattcgctttatgtgccccaatg

SEQ ID NO: 2509019 - DNA, 25 bp, Homo sapien
aaataaagaagtataccgtatcatt

SEQ ID NO: 2509020 - DNA, 25 bp, Homo sapien
ggagagaaatgcatagccagattaa

SEQ ID NO: 2509021 - DNA, 25 bp, Homo sapien
aaacttattccagatgaggatattc

SEQ ID NO: 2509022 - DNA, 25 bp, Homo sapien
cacactaagtaaattctgtgcaaac

SEQ ID NO: 2509023 - DNA, 25 bp, Homo sapien
tattctactgggagcacagggataa

SEQ ID NO: 2509024 - DNA, 25 bp, Homo sapien
tctggagcgtctgtgctaaaaactc

SEQ ID NO: 2509025 - DNA, 25 bp, Homo sapien
ttcaattgatgagaagagagatcct

SEQ ID NO: 2509026 - DNA, 25 bp, Homo sapien
attgatgagaagagagatccttcag

SEQ ID NO: 2509027 - DNA, 25 bp, Homo sapien
ctggagcgtctgtgctaaaaactca

SEQ ID NO: 2509028 - DNA, 25 bp, Homo sapien
tctcacaagtgagagctaaacgact

SEQ ID NO: 2509029 - DNA, 25 bp, Homo sapien
taaagaattatcaagggctcatcct

SEQ ID NO: 2509030 - DNA, 25 bp, Homo sapien
tagctgaactgattgcacagctgga

SEQ ID NO: 2509031 - DNA, 25 bp, Homo sapien
gctaaacgactgtatattcatggac

SEQ ID NO: 2509032 - DNA, 25 bp, Homo sapien
aaagagcaaaagtgcttcgattctt

SEQ ID NO: 2509033 - DNA, 25 bp, Homo sapien
tggtcacccaagatcattttagatt

SEQ ID NO: 2509034 - DNA, 25 bp, Homo sapien
tctttgcaccactaatagtcagcag

SEQ ID NO: 2509035 - DNA, 25 bp, Homo sapien
gaagctcctctttaagaagcttcat

SEQ ID NO: 2509036 - DNA, 25 bp, Homo sapien
gaagaaaggtaagatgcaaatattt

SEQ ID NO: 2509037 - DNA, 25 bp, Homo sapien
agaagaaaggtaagatgcaaatatt

SEQ ID NO: 2509038 - DNA, 25 bp, Homo sapien
catattggaagcagtatcttataaa

SEQ ID NO: 2509039 - DNA, 25 bp, Homo sapien
ggaagcagtatcttataaatgattt

SEQ ID NO: 2509040 - DNA, 25 bp, Homo sapien
gtaatccatctttgacttaaggcaa

SEQ ID NO: 2509041 - DNA, 25 bp, Homo sapien
cttaaggcaatacaagcatttgtca

SEQ ID NO: 2509042 - DNA, 25 bp, Homo sapien
agtaatccatctttgacttaaggca

SEQ ID NO: 2509043 - DNA, 25 bp, Homo sapien
acaagcatttgtcagagtcatatca

SEQ ID NO: 2509044 - DNA, 25 bp, Homo sapien
gagagcccgataccattgcctgatg

SEQ ID NO: 2509045 - DNA, 25 bp, Homo sapien
gcatatttagtacatggcaggaaca

SEQ ID NO: 2509046 - DNA, 25 bp, Homo sapien
tgctacataattggcaccgttctag

SEQ ID NO: 2509047 - DNA, 25 bp, Homo sapien
tctaggcactcaagacaacaagatg

SEQ ID NO: 2509048 - DNA, 25 bp, Homo sapien
taagggatctagaatgaaccaacgc

SEQ ID NO: 2509049 - DNA, 25 bp, Homo sapien
ctagaatgggagatttgacctggcc

SEQ ID NO: 2509050 - DNA, 25 bp, Homo sapien
aaaaggatcccttagcagcggtgat

SEQ ID NO: 2509051 - DNA, 25 bp, Homo sapien
tctttacagaattcccgggcacacg

SEQ ID NO: 2509052 - DNA, 25 bp, Homo sapien
gatgatttgtgccacctgtttccaa

SEQ ID NO: 2509053 - DNA, 25 bp, Homo sapien
tctccaagacgatgtccaaatccat

SEQ ID NO: 2509054 - DNA, 25 bp, Homo sapien
gacttcaggtcctcataatctctag

SEQ ID NO: 2509055 - DNA, 25 bp, Homo sapien
taacgagataatgtatggcacttct

SEQ ID NO: 2509056 - DNA, 25 bp, Homo sapien
tcttttggcctcagggttaaggcca

SEQ ID NO: 2509057 - DNA, 25 bp, Homo sapien
ggccaaaacacctaagaactctgct

SEQ ID NO: 2509058 - DNA, 25 bp, Homo sapien
gaaaggaggcactcaattacttgaa

SEQ ID NO: 2509059 - DNA, 25 bp, Homo sapien
tcaggaaggcatactattctttcag

SEQ ID NO: 2509060 - DNA, 25 bp, Homo sapien
aatcaacttgattgagaacatcaac

SEQ ID NO: 2509061 - DNA, 25 bp, Homo sapien
gagccaggcattccaatcaacttga

SEQ ID NO: 2509062 - DNA, 25 bp, Homo sapien
tgggctttatgggaggcagtccagg

SEQ ID NO: 2509063 - DNA, 25 bp, Homo sapien
ccaggagagtagagccaggcattcc

SEQ ID NO: 2509064 - DNA, 25 bp, Homo sapien
tatgctcttataggaaaacttctca

SEQ ID NO: 2509065 - DNA, 25 bp, Homo sapien
cagtagttatgctcttataggaaaa

SEQ ID NO: 2509066 - DNA, 25 bp, Homo sapien
aacttctcaacataagcttttaaga

SEQ ID NO: 2509067 - DNA, 25 bp, Homo sapien
taggaaaacttctcaacataagctt

SEQ ID NO: 2509068 - DNA, 25 bp, Homo sapien
gacagacagccttccaagtcaatca

SEQ ID NO: 2509069 - DNA, 25 bp, Homo sapien
aaatctacgaggactttcagagtga

SEQ ID NO: 2509070 - DNA, 25 bp, Homo sapien
tcagcatagctttatcatgaactag

SEQ ID NO: 2509071 - DNA, 25 bp, Homo sapien
gacaggcagaatggatccaggtgac

SEQ ID NO: 2509072 - DNA, 25 bp, Homo sapien
aagcccttctcatagggaactgaag

SEQ ID NO: 2509073 - DNA, 25 bp, Homo sapien
tgaagaataagctacatcagggtct

SEQ ID NO: 2509074 - DNA, 25 bp, Homo sapien
tggtgaaaggatgtgtctccccaaa

SEQ ID NO: 2509075 - DNA, 25 bp, Homo sapien
tctgtcagatcaaccacaagtttgg

SEQ ID NO: 2509076 - DNA, 25 bp, Homo sapien
cagtggtgtaactttaggggaatct

SEQ ID NO: 2509077 - DNA, 25 bp, Homo sapien
ctcagtggtgtaactttaggggaat

SEQ ID NO: 2509078 - DNA, 25 bp, Homo sapien
tcagtggtgtaactttaggggaatc

SEQ ID NO: 2509079 - DNA, 25 bp, Homo sapien
aagtacacagtatgtccctcattta

SEQ ID NO: 2509080 - DNA, 25 bp, Homo sapien
gtccgcaaatgtggcgttccaagta

SEQ ID NO: 2509081 - DNA, 25 bp, Homo sapien
tcctcccagagcattaaaatgtctg

SEQ ID NO: 2509082 - DNA, 25 bp, Homo sapien
ttcaccaaacaatcgtccgcaaatg

SEQ ID NO: 2509083 - DNA, 25 bp, Homo sapien
ccctgtccagctatgagatatttca

SEQ ID NO: 2509084 - DNA, 25 bp, Homo sapien
tttgttggtcactagattccctgtc

SEQ ID NO: 2509085 - DNA, 25 bp, Homo sapien
tagattccctgtccagctatgagat

SEQ ID NO: 2509086 - DNA, 25 bp, Homo sapien
ggtcactagattccctgtccagcta

SEQ ID NO: 2509087 - DNA, 25 bp, Homo sapien
gaccaataggtcatactgtccccat

SEQ ID NO: 2509088 - DNA, 25 bp, Homo sapien
cccagatcttctgctattttaagca

SEQ ID NO: 2509089 - DNA, 25 bp, Homo sapien
catacatacggtcctcccagatctt

SEQ ID NO: 2509090 - DNA, 25 bp, Homo sapien
aggattctccatgccaccataaggg

SEQ ID NO: 2509091 - DNA, 25 bp, Homo sapien
gaaaactcataagcagacttttcca

SEQ ID NO: 2509092 - DNA, 25 bp, Homo sapien
aaaactcataagcagacttttccac

SEQ ID NO: 2509093 - DNA, 25 bp, Homo sapien
catgcacttaaaggttgaatactct

SEQ ID NO: 2509094 - DNA, 25 bp, Homo sapien
ctgtcagatgctataacgtggataa

SEQ ID NO: 2509095 - DNA, 25 bp, Homo sapien
tcagatgctataacgtggataaacc

SEQ ID NO: 2509096 - DNA, 25 bp, Homo sapien
taaactttgtcatgcacttaaaggt

SEQ ID NO: 2509097 - DNA, 25 bp, Homo sapien
ctaaagcaatcaggtagcagggtat

SEQ ID NO: 2509098 - DNA, 25 bp, Homo sapien
caatcaggtagcagggtattggaac

SEQ ID NO: 2509099 - DNA, 25 bp, Homo sapien
agctccaacaactaaagcaatcagg

SEQ ID NO: 2509100 - DNA, 25 bp, Homo sapien
caacaactaaagcaatcaggtagca

SEQ ID NO: 2509101 - DNA, 25 bp, Homo sapien
tgccaccagttctttagggacagac

SEQ ID NO: 2509102 - DNA, 25 bp, Homo sapien
ggtcttctgggtcaggtgtttctcc

SEQ ID NO: 2509103 - DNA, 25 bp, Homo sapien
atagcactcataagtgccaccagtt

SEQ ID NO: 2509104 - DNA, 25 bp, Homo sapien
tgtttctccatcacgaatagcactc

SEQ ID NO: 2509105 - DNA, 25 bp, Homo sapien
aaggagtgtcctgacaaggaaggat

SEQ ID NO: 2509106 - DNA, 25 bp, Homo sapien
tgcagtataggttaatttcacagaa

SEQ ID NO: 2509107 - DNA, 25 bp, Homo sapien
tgtcctgacaaggaaggattgctct

SEQ ID NO: 2509108 - DNA, 25 bp, Homo sapien
ctctgcagtataggttaatttcaca

SEQ ID NO: 2509109 - DNA, 25 bp, Homo sapien
ctaaagagatatgggtgttccttcc

SEQ ID NO: 2509110 - DNA, 25 bp, Homo sapien
ctgactaaagagatatgggtgttcc

SEQ ID NO: 2509111 - DNA, 25 bp, Homo sapien
ctggcactgactaaagagatatggg

SEQ ID NO: 2509112 - DNA, 25 bp, Homo sapien
aaagagatatgggtgttccttccca

SEQ ID NO: 2509113 - DNA, 25 bp, Homo sapien
gaagattttggagaggtctcaaaag

SEQ ID NO: 2509114 - DNA, 25 bp, Homo sapien
agaagattttggagaggtctcaaaa

SEQ ID NO: 2509115 - DNA, 25 bp, Homo sapien
gaagagagatttccattggcgatcc

SEQ ID NO: 2509116 - DNA, 25 bp, Homo sapien
cttgtccattgatcactactttttc

SEQ ID NO: 2509117 - DNA, 25 bp, Homo sapien
ttggcgatcccttgtaactttgtct

SEQ ID NO: 2509118 - DNA, 25 bp, Homo sapien
cttcttgtccattgatcactacttt

SEQ ID NO: 2509119 - DNA, 25 bp, Homo sapien
cagaccaaatgattctgcagaggat

SEQ ID NO: 2509120 - DNA, 25 bp, Homo sapien
tggtatggtaactcagaccaaatga

SEQ ID NO: 2509121 - DNA, 25 bp, Homo sapien
gaccaaatgattctgcagaggattg

SEQ ID NO: 2509122 - DNA, 25 bp, Homo sapien
accaaatgattctgcagaggattgg

SEQ ID NO: 2509123 - DNA, 25 bp, Homo sapien
atctacttgccatggccaattaagg

SEQ ID NO: 2509124 - DNA, 25 bp, Homo sapien
gccatggccaattaaggacaactgc

SEQ ID NO: 2509125 - DNA, 25 bp, Homo sapien
tggccaattaaggacaactgctttg

SEQ ID NO: 2509126 - DNA, 25 bp, Homo sapien
acttgccatggccaattaaggacaa

SEQ ID NO: 2509127 - DNA, 25 bp, Homo sapien
cagggactgttagtttcaaagtagg

SEQ ID NO: 2509128 - DNA, 25 bp, Homo sapien
gaaataactacttggctccttggaa

SEQ ID NO: 2509129 - DNA, 25 bp, Homo sapien
agagttagcaagcagggactgttag

SEQ ID NO: 2509130 - DNA, 25 bp, Homo sapien
cattccaatggttatagagtttgta

SEQ ID NO: 2509131 - DNA, 25 bp, Homo sapien
tcgacaggacatgggatctgagact

SEQ ID NO: 2509132 - DNA, 25 bp, Homo sapien
gccatggagtaattagagccaggaa

SEQ ID NO: 2509133 - DNA, 25 bp, Homo sapien
ccagggacctcggagagaggatcca

SEQ ID NO: 2509134 - DNA, 25 bp, Homo sapien
caaagatgacacctaagggctgggt

SEQ ID NO: 2509135 - DNA, 25 bp, Homo sapien
agtgcacaacatgagttggatggag

SEQ ID NO: 2509136 - DNA, 25 bp, Homo sapien
gaagggatgcagaggcgtaagcggg

SEQ ID NO: 2509137 - DNA, 25 bp, Homo sapien
gggctgaagtgcacaacatgagttg

SEQ ID NO: 2509138 - DNA, 25 bp, Homo sapien
gctgaagtgcacaacatgagttgga

SEQ ID NO: 2509139 - DNA, 25 bp, Homo sapien
agcccgcaaggactagggtcgaggg

SEQ ID NO: 2509140 - DNA, 25 bp, Homo sapien
gcaaggactagggtcgaggggcagg

SEQ ID NO: 2509141 - DNA, 25 bp, Homo sapien
cgggagcccgcaaggactagggtcg

SEQ ID NO: 2509142 - DNA, 25 bp, Homo sapien
ggagcccgcaaggactagggtcgag

SEQ ID NO: 2509143 - DNA, 25 bp, Homo sapien
gaacaggtatccactatctcgggca

SEQ ID NO: 2509144 - DNA, 25 bp, Homo sapien
cctgagactggaccgtgagagcagc

SEQ ID NO: 2509145 - DNA, 25 bp, Homo sapien
taaagtcgacgctgcagcgcaggtg

SEQ ID NO: 2509146 - DNA, 25 bp, Homo sapien
tcagcgtccggcgagtaaagtcgac

SEQ ID NO: 2509147 - DNA, 25 bp, Homo sapien
tcgtcgatagagaacctgaggagga

SEQ ID NO: 2509148 - DNA, 25 bp, Homo sapien
cagactcgtcgatagagaacctgag

SEQ ID NO: 2509149 - DNA, 25 bp, Homo sapien
acagcgacctacagcccaacgctca

SEQ ID NO: 2509150 - DNA, 25 bp, Homo sapien
aacgctcagctaccagactcgtcga

SEQ ID NO: 2509151 - DNA, 25 bp, Homo sapien
agcgtgtgtgttagggatgttgagg

SEQ ID NO: 2509152 - DNA, 25 bp, Homo sapien
gatgttgagggggaccaagcgtgct

SEQ ID NO: 2509153 - DNA, 25 bp, Homo sapien
gagggggaccaagcgtgctcctgga

SEQ ID NO: 2509154 - DNA, 25 bp, Homo sapien
gggagcgtgtgtgttagggatgttg

SEQ ID NO: 2509155 - DNA, 25 bp, Homo sapien
taaggctgcaagaagtcgacgagtc

SEQ ID NO: 2509156 - DNA, 25 bp, Homo sapien
catggtcggtacttgtcttttagaa

SEQ ID NO: 2509157 - DNA, 25 bp, Homo sapien
gcatgggagacagattagaggaggt

SEQ ID NO: 2509158 - DNA, 25 bp, Homo sapien
tcgacgagtcttaactgggatatgc

SEQ ID NO: 2509159 - DNA, 25 bp, Homo sapien
attattgcacatgagctggagtagc

SEQ ID NO: 2509160 - DNA, 25 bp, Homo sapien
gttccttttggtggttgaggtggca

SEQ ID NO: 2509161 - DNA, 25 bp, Homo sapien
agcaggggaggttcagttccttttg

SEQ ID NO: 2509162 - DNA, 25 bp, Homo sapien
atggacacaggacgaaccccacttt

SEQ ID NO: 2509163 - DNA, 25 bp, Homo sapien
tgcggagtccctttggttgggttga

SEQ ID NO: 2509164 - DNA, 25 bp, Homo sapien
atgacaactggccattcagtttccc

SEQ ID NO: 2509165 - DNA, 25 bp, Homo sapien
gatgacaactggccattcagtttcc

SEQ ID NO: 2509166 - DNA, 25 bp, Homo sapien
cagcaacccggttccttaggaagag

SEQ ID NO: 2509167 - DNA, 25 bp, Homo sapien
cagcggtagcccctgcaatttacac

SEQ ID NO: 2509168 - DNA, 25 bp, Homo sapien
gtgggaaacgggctgcagcatccaa

SEQ ID NO: 2509169 - DNA, 25 bp, Homo sapien
gaaacaggctgtgatccaatggagt

SEQ ID NO: 2509170 - DNA, 25 bp, Homo sapien
aggagggagagtcggccaactccaa

SEQ ID NO: 2509171 - DNA, 25 bp, Homo sapien
acctggacgctggcccggaagcagc

SEQ ID NO: 2509172 - DNA, 25 bp, Homo sapien
cctcgggggtgtgcatggagcagca

SEQ ID NO: 2509173 - DNA, 25 bp, Homo sapien
tggcccgtccgtggacagctcctcg

SEQ ID NO: 2509174 - DNA, 25 bp, Homo sapien
agtggctattcaccgacactatccc

SEQ ID NO: 2509175 - DNA, 25 bp, Homo sapien
tggctattcaccgacactatcccac

SEQ ID NO: 2509176 - DNA, 25 bp, Homo sapien
ttcaccgacactatcccactagtga

SEQ ID NO: 2509177 - DNA, 25 bp, Homo sapien
tattcaccgacactatcccactagt

SEQ ID NO: 2509178 - DNA, 25 bp, Homo sapien
ccagagtaggttgctttcacccagc

SEQ ID NO: 2509179 - DNA, 25 bp, Homo sapien
gccctcatgggcataagctcaccca

SEQ ID NO: 2509180 - DNA, 25 bp, Homo sapien
acaccaccccagagtaggttgcttt

SEQ ID NO: 2509181 - DNA, 25 bp, Homo sapien
taggttgctttcacccagctggcct

SEQ ID NO: 2509182 - DNA, 25 bp, Homo sapien
aatggaaagcatctgccgaaacagg

SEQ ID NO: 2509183 - DNA, 25 bp, Homo sapien
gagggtgaccatgatccctgaaggt

SEQ ID NO: 2509184 - DNA, 25 bp, Homo sapien
gctacccctactgagacccaaagtg

SEQ ID NO: 2509185 - DNA, 25 bp, Homo sapien
gacccaaagtgaatcctcagagagg

SEQ ID NO: 2509186 - DNA, 25 bp, Homo sapien
gtgaaaaggcaggtcataagaaact

SEQ ID NO: 2509187 - DNA, 25 bp, Homo sapien
caaatgtaaagtagtcgtatgtttt

SEQ ID NO: 2509188 - DNA, 25 bp, Homo sapien
aatgtaaagtagtcgtatgttttat

SEQ ID NO: 2509189 - DNA, 25 bp, Homo sapien
ttcaaatgtaaagtagtcgtatgtt

SEQ ID NO: 2509190 - DNA, 25 bp, Homo sapien
tcaaatgtaaagtagtcgtatgttt

SEQ ID NO: 2509191 - DNA, 25 bp, Homo sapien
ttattggcctggatgaaccaccgct

SEQ ID NO: 2509192 - DNA, 25 bp, Homo sapien
caccgctgagttggtaaagctccac

SEQ ID NO: 2509193 - DNA, 25 bp, Homo sapien
gctccacaaggagctagagtaccct

SEQ ID NO: 2509194 - DNA, 25 bp, Homo sapien
tgtttgagggtgacccataatgctg

SEQ ID NO: 2509195 - DNA, 25 bp, Homo sapien
tgctgctgccaatttcctcatggtc

SEQ ID NO: 2509196 - DNA, 25 bp, Homo sapien
gctgctgccaatttcctcatggtcc

SEQ ID NO: 2509197 - DNA, 25 bp, Homo sapien
ctgctgccaatttcctcatggtcca

SEQ ID NO: 2509198 - DNA, 25 bp, Homo sapien
ctgctgctgccaatttcctcatggt

SEQ ID NO: 2509199 - DNA, 25 bp, Homo sapien
tacagggacaccattcacagcagag

SEQ ID NO: 2509200 - DNA, 25 bp, Homo sapien
ctacagggacaccattcacagcaga

SEQ ID NO: 2509201 - DNA, 25 bp, Homo sapien
gaaatcttgcgtgaattttcccaag

SEQ ID NO: 2509202 - DNA, 25 bp, Homo sapien
cgtgaattttcccaagtcaaaatct

SEQ ID NO: 2509203 - DNA, 25 bp, Homo sapien
ttttggaaatcttgcgtgaattttc

SEQ ID NO: 2509204 - DNA, 25 bp, Homo sapien
tcttgcgtgaattttcccaagtcaa

SEQ ID NO: 2509205 - DNA, 25 bp, Homo sapien
cgccccatccgggaagtgaggggcg

SEQ ID NO: 2509206 - DNA, 25 bp, Homo sapien
ccatccgggaagtgaggggcgcctc

SEQ ID NO: 2509207 - DNA, 25 bp, Homo sapien
ccggccagccgccccatccgggaag

SEQ ID NO: 2509208 - DNA, 25 bp, Homo sapien
cggccagccgccccatccgggaagt

SEQ ID NO: 2509209 - DNA, 25 bp, Homo sapien
tatcaaattagggtctgtgatgacg

SEQ ID NO: 2509210 - DNA, 25 bp, Homo sapien
tgatgacggtgaccgtttctgcact

SEQ ID NO: 2509211 - DNA, 25 bp, Homo sapien
gacggtgaccgtttctgcactttta

SEQ ID NO: 2509212 - DNA, 25 bp, Homo sapien
aattagggtctgtgatgacggtgac

SEQ ID NO: 2509213 - DNA, 25 bp, Homo sapien
taaagtctcagctatggccacttgc

SEQ ID NO: 2509214 - DNA, 25 bp, Homo sapien
taatgttaattaggcccctgtgaag

SEQ ID NO: 2509215 - DNA, 25 bp, Homo sapien
tcacctctaggctgcagaagaagtt

SEQ ID NO: 2509216 - DNA, 25 bp, Homo sapien
ttcttagtgttgacatgcccagagg

SEQ ID NO: 2509217 - DNA, 25 bp, Homo sapien
caaaggacaagacaaccagtgcagc

SEQ ID NO: 2509218 - DNA, 25 bp, Homo sapien
agtgcagccccgatgcaccggtggt

SEQ ID NO: 2509219 - DNA, 25 bp, Homo sapien
tatccacaatccttgaagctcaggt

SEQ ID NO: 2509220 - DNA, 25 bp, Homo sapien
tactgcgttgtccatggatgctggg

SEQ ID NO: 2509221 - DNA, 25 bp, Homo sapien
cagacagtcgcagggagcacacgaa

SEQ ID NO: 2509222 - DNA, 25 bp, Homo sapien
tgattaagtatggaagtagccaggg

SEQ ID NO: 2509223 - DNA, 25 bp, Homo sapien
tggagcatttcaagatgaacaagac

SEQ ID NO: 2509224 - DNA, 25 bp, Homo sapien
tactgttgtgcaaaacatggagcat

SEQ ID NO: 2509225 - DNA, 25 bp, Homo sapien
tcgaaagatcacaccctcttgaatc

SEQ ID NO: 2509226 - DNA, 25 bp, Homo sapien
ggccatcagtcaaatcaggcttccc

SEQ ID NO: 2509227 - DNA, 25 bp, Homo sapien
ggtgatgctatccacgggccatcag

SEQ ID NO: 2509228 - DNA, 25 bp, Homo sapien
gaccttgttgcatgaccccttcgaa

SEQ ID NO: 2509229 - DNA, 25 bp, Homo sapien
tctctcccatcttgggttacattgg

SEQ ID NO: 2509230 - DNA, 25 bp, Homo sapien
aaatcggcctgtgggtacacatgag

SEQ ID NO: 2509231 - DNA, 25 bp, Homo sapien
cattggtagctaaatcggcctgtgg

SEQ ID NO: 2509232 - DNA, 25 bp, Homo sapien
caaaccaccatgtatggctcccaaa

SEQ ID NO: 2509233 - DNA, 25 bp, Homo sapien
aatctctccctgctcatatggaaat

SEQ ID NO: 2509234 - DNA, 25 bp, Homo sapien
gttaggacattgttcaatctctccc

SEQ ID NO: 2509235 - DNA, 25 bp, Homo sapien
tatggaaattcaatacccactcctt

SEQ ID NO: 2509236 - DNA, 25 bp, Homo sapien
ccacagatgccccagttaggacatt

SEQ ID NO: 2509237 - DNA, 25 bp, Homo sapien
gttgtttctcaagagtgccaaggtg

SEQ ID NO: 2509238 - DNA, 25 bp, Homo sapien
tccagttgtttctcaagagtgccaa

SEQ ID NO: 2509239 - DNA, 25 bp, Homo sapien
cacacgacctggctggggttttagg

SEQ ID NO: 2509240 - DNA, 25 bp, Homo sapien
caaggtggggtctcacacgacctgg

SEQ ID NO: 2509241 - DNA, 25 bp, Homo sapien
tcaattgagaggtatacccaggagc

SEQ ID NO: 2509242 - DNA, 25 bp, Homo sapien
aatcaattgagaggtatacccagga

SEQ ID NO: 2509243 - DNA, 25 bp, Homo sapien
cagaatcaattgagaggtataccca

SEQ ID NO: 2509244 - DNA, 25 bp, Homo sapien
gaatcaattgagaggtatacccagg

SEQ ID NO: 2509245 - DNA, 25 bp, Homo sapien
cccatgcaaatagattcttgaggag

SEQ ID NO: 2509246 - DNA, 25 bp, Homo sapien
cttgcacttagtgtcatggtcctgg

SEQ ID NO: 2509247 - DNA, 25 bp, Homo sapien
tgtgccttggagcttctacttgttc

SEQ ID NO: 2509248 - DNA, 25 bp, Homo sapien
gagaaggaattttacgcttgtgcct

SEQ ID NO: 2509249 - DNA, 25 bp, Homo sapien
agtgagccggctcggcctgactgct

SEQ ID NO: 2509250 - DNA, 25 bp, Homo sapien
gtttacacagactgcacaccgcctg

SEQ ID NO: 2509251 - DNA, 25 bp, Homo sapien
gggcggaaaagcctgtttacacaga

SEQ ID NO: 2509252 - DNA, 25 bp, Homo sapien
aataatgcagtaaaggaagtgagcc

SEQ ID NO: 2509253 - DNA, 25 bp, Homo sapien
ggctcccctcgagtgggcaaagtgc

SEQ ID NO: 2509254 - DNA, 25 bp, Homo sapien
tggaggacatgggtcgcgaaggtgt

SEQ ID NO: 2509255 - DNA, 25 bp, Homo sapien
caaagtgcactggtgctcggatcca

SEQ ID NO: 2509256 - DNA, 25 bp, Homo sapien
ctgggggctgcgtccactctcgctt

SEQ ID NO: 2509257 - DNA, 25 bp, Homo sapien
ttcacagatgaaagggctatgccct

SEQ ID NO: 2509258 - DNA, 25 bp, Homo sapien
gaaggctcgcctttagaggctcaga

SEQ ID NO: 2509259 - DNA, 25 bp, Homo sapien
tgtatgcgcctttacggatgtgggc

SEQ ID NO: 2509260 - DNA, 25 bp, Homo sapien
tacccatgtaggattgaagccctgg

SEQ ID NO: 2509261 - DNA, 25 bp, Homo sapien
cctgagaagagcatgcaatggcgtc

SEQ ID NO: 2509262 - DNA, 25 bp, Homo sapien
tcatgcattgtgagaagcaggcact

SEQ ID NO: 2509263 - DNA, 25 bp, Homo sapien
cagttcccaagaaaattatagcctg

SEQ ID NO: 2509264 - DNA, 25 bp, Homo sapien
tccaaggagcctatgagatgcactg

SEQ ID NO: 2509265 - DNA, 25 bp, Homo sapien
ggaggaagaggctctataactctct

SEQ ID NO: 2509266 - DNA, 25 bp, Homo sapien
ccagggaggtagaatggctgtgcag

SEQ ID NO: 2509267 - DNA, 25 bp, Homo sapien
ggctctataactctctccaagatag

SEQ ID NO: 2509268 - DNA, 25 bp, Homo sapien
tctccaagatagaaccagggaggta

SEQ ID NO: 2509269 - DNA, 25 bp, Homo sapien
agggcagacgtgatgttaaaggcca

SEQ ID NO: 2509270 - DNA, 25 bp, Homo sapien
gcacacgtgcaaaacagagacaggg

SEQ ID NO: 2509271 - DNA, 25 bp, Homo sapien
gggcagacgtgatgttaaaggccat

SEQ ID NO: 2509272 - DNA, 25 bp, Homo sapien
tgcacacgtgcaaaacagagacagg

SEQ ID NO: 2509273 - DNA, 25 bp, Homo sapien
tagtaagtttcactgactgcggaac

SEQ ID NO: 2509274 - DNA, 25 bp, Homo sapien
ttttccattcaagcaaaggcctctg

SEQ ID NO: 2509275 - DNA, 25 bp, Homo sapien
ctgaaacaggcttccctagaggtgt

SEQ ID NO: 2509276 - DNA, 25 bp, Homo sapien
tgggtactagggaccttgccagatc

SEQ ID NO: 2509277 - DNA, 25 bp, Homo sapien
gcgtcggcctgtatgctggtgctca

SEQ ID NO: 2509278 - DNA, 25 bp, Homo sapien
ctggcgtaaatgagaccccgcgggt

SEQ ID NO: 2509279 - DNA, 25 bp, Homo sapien
tctaatctaaggtgccctgggcgtc

SEQ ID NO: 2509280 - DNA, 25 bp, Homo sapien
gagacgctgctaacaaagtccaggt

SEQ ID NO: 2509281 - DNA, 25 bp, Homo sapien
agctgtggtcatagcgtaggtaata

SEQ ID NO: 2509282 - DNA, 25 bp, Homo sapien
gaaagcagcactactctgagaaagc

SEQ ID NO: 2509283 - DNA, 25 bp, Homo sapien
caaacagctgcttcgctgaaagcag

SEQ ID NO: 2509284 - DNA, 25 bp, Homo sapien
aactgatgccgccatcgcatgtcag

SEQ ID NO: 2509285 - DNA, 25 bp, Homo sapien
ctctggactggattctgcccaggat

SEQ ID NO: 2509286 - DNA, 25 bp, Homo sapien
gagcacctgaaagcagctctgggcc

SEQ ID NO: 2509287 - DNA, 25 bp, Homo sapien
cacctgaaagcagctctgggccact

SEQ ID NO: 2509288 - DNA, 25 bp, Homo sapien
actgtcctctccacgctttctctgg

SEQ ID NO: 2509289 - DNA, 25 bp, Homo sapien
taagggggtcaccagctacactggg

SEQ ID NO: 2509290 - DNA, 25 bp, Homo sapien
cacgcaaaactaagggggtcaccag

SEQ ID NO: 2509291 - DNA, 25 bp, Homo sapien
tgggagatggtagagcctcgggact

SEQ ID NO: 2509292 - DNA, 25 bp, Homo sapien
caggcagtcctctaaaccacgcaaa

SEQ ID NO: 2509293 - DNA, 25 bp, Homo sapien
acttattcagagttgagttcttgca

SEQ ID NO: 2509294 - DNA, 25 bp, Homo sapien
gtggtacttattcagagttgagttc

SEQ ID NO: 2509295 - DNA, 25 bp, Homo sapien
tcagagttgagttcttgcagccggt

SEQ ID NO: 2509296 - DNA, 25 bp, Homo sapien
cagagttgagttcttgcagccggtt

SEQ ID NO: 2509297 - DNA, 25 bp, Homo sapien
gacagccagaaacagcgtggctctc

SEQ ID NO: 2509298 - DNA, 25 bp, Homo sapien
gtggctctcaacagccaggcattct

SEQ ID NO: 2509299 - DNA, 25 bp, Homo sapien
gaaacagcgtggctctcaacagcca

SEQ ID NO: 2509300 - DNA, 25 bp, Homo sapien
gccagaaacagcgtggctctcaaca

SEQ ID NO: 2509301 - DNA, 25 bp, Homo sapien
aaccacatggttctttaaggccaca

SEQ ID NO: 2509302 - DNA, 25 bp, Homo sapien
tcccggagataacccagagcaggtg

SEQ ID NO: 2509303 - DNA, 25 bp, Homo sapien
actgtcccggagataacccagagca

SEQ ID NO: 2509304 - DNA, 25 bp, Homo sapien
catggttctttaaggccacaggatt

SEQ ID NO: 2509305 - DNA, 25 bp, Homo sapien
tcattgatggataaactaggaggcc

SEQ ID NO: 2509306 - DNA, 25 bp, Homo sapien
gaaccttgctccagagtaacatgca

SEQ ID NO: 2509307 - DNA, 25 bp, Homo sapien
catgggtatacgttttagaccagag

SEQ ID NO: 2509308 - DNA, 25 bp, Homo sapien
catctcaaatccagacatgggtata

SEQ ID NO: 2509309 - DNA, 25 bp, Homo sapien
ttatgaatcatcattaagttctcct

SEQ ID NO: 2509310 - DNA, 25 bp, Homo sapien
tatgaatcatcattaagttctcctt

SEQ ID NO: 2509311 - DNA, 25 bp, Homo sapien
gccacaattaaggactcattaactg

SEQ ID NO: 2509312 - DNA, 25 bp, Homo sapien
tcagaaatcctgatgacgtctggcc

SEQ ID NO: 2509313 - DNA, 25 bp, Homo sapien
tcctgatgacgtctggccacaatta

SEQ ID NO: 2509314 - DNA, 25 bp, Homo sapien
taactgatgaaacaaatttgtcccc

SEQ ID NO: 2509315 - DNA, 25 bp, Homo sapien
ttttcataacatggatagtctagat

SEQ ID NO: 2509316 - DNA, 25 bp, Homo sapien
tatgaaaatctgtttggcattaagt

SEQ ID NO: 2509317 - DNA, 25 bp, Homo sapien
ctgtgtcgtgagaaggacattgtga

SEQ ID NO: 2509318 - DNA, 25 bp, Homo sapien
taatttggtttgcacttttcataac

SEQ ID NO: 2509319 - DNA, 25 bp, Homo sapien
gaatggaccttgaaaggctagcctc

SEQ ID NO: 2509320 - DNA, 25 bp, Homo sapien
ggctagcctccttagctgtttacag

SEQ ID NO: 2509321 - DNA, 25 bp, Homo sapien
tatcttttagatgcctcccagacaa

SEQ ID NO: 2509322 - DNA, 25 bp, Homo sapien
tatatagactataaccagttgtgcc

SEQ ID NO: 2509323 - DNA, 25 bp, Homo sapien
cagtgttaaactgctatgggaaaag

SEQ ID NO: 2509324 - DNA, 25 bp, Homo sapien
actatataacctgaatgttggtctc

SEQ ID NO: 2509325 - DNA, 25 bp, Homo sapien
gaataactcactcatatagctctgc

SEQ ID NO: 2509326 - DNA, 25 bp, Homo sapien
tgatggatgaaaatactcctgtaac

SEQ ID NO: 2509327 - DNA, 25 bp, Homo sapien
gtaacctactggctctaatggcaga

SEQ ID NO: 2509328 - DNA, 25 bp, Homo sapien
cctgaacagaaatggtaggacccct

SEQ ID NO: 2509329 - DNA, 25 bp, Homo sapien
gcagcagtaaaacaattcgtgagga

SEQ ID NO: 2509330 - DNA, 25 bp, Homo sapien
agcaagacctttcgcgtttgaacag

SEQ ID NO: 2509331 - DNA, 25 bp, Homo sapien
cagttctgagtccttgattggtaag

SEQ ID NO: 2509332 - DNA, 25 bp, Homo sapien
gacagtgtagacaaacggagattcc

SEQ ID NO: 2509333 - DNA, 25 bp, Homo sapien
gtccttgattggtaagaaaggctgg

SEQ ID NO: 2509334 - DNA, 25 bp, Homo sapien
tgaagaggacagtgtagacaaacgg

SEQ ID NO: 2509335 - DNA, 25 bp, Homo sapien
taaaagagcatgctctgtcttctgt

SEQ ID NO: 2509336 - DNA, 25 bp, Homo sapien
ctctgtcttctgttcttcccatgtc

SEQ ID NO: 2509337 - DNA, 25 bp, Homo sapien
atgctctgtcttctgttcttcccat

SEQ ID NO: 2509338 - DNA, 25 bp, Homo sapien
ttaaaagagcatgctctgtcttctg

SEQ ID NO: 2509339 - DNA, 25 bp, Homo sapien
cagaaaagtgagtacgtgcaatgct

SEQ ID NO: 2509340 - DNA, 25 bp, Homo sapien
tcttaaatgacccttctgttgacgg

SEQ ID NO: 2509341 - DNA, 25 bp, Homo sapien
caaaagcttggttccacgcaaaaat

SEQ ID NO: 2509342 - DNA, 25 bp, Homo sapien
tacagttatttggtgactaggaagc

SEQ ID NO: 2509343 - DNA, 25 bp, Homo sapien
tgatcgacacgtgaaatggtttatg

SEQ ID NO: 2509344 - DNA, 25 bp, Homo sapien
tcatgatcgacacgtgaaatggttt

SEQ ID NO: 2509345 - DNA, 25 bp, Homo sapien
cgacacgtgaaatggtttatgacaa

SEQ ID NO: 2509346 - DNA, 25 bp, Homo sapien
cacgtgaaatggtttatgacaaaca

SEQ ID NO: 2509347 - DNA, 25 bp, Homo sapien
tctggataagaagaatttcgaaaac

SEQ ID NO: 2509348 - DNA, 25 bp, Homo sapien
caggccctcaagctatctttggaat

SEQ ID NO: 2509349 - DNA, 25 bp, Homo sapien
gttgggagacccagtcaaaatatat

SEQ ID NO: 2509350 - DNA, 25 bp, Homo sapien
gtttgtataaccataactgcctacc

SEQ ID NO: 2509351 - DNA, 25 bp, Homo sapien
tctgtctccttacaatgacatgaag

SEQ ID NO: 2509352 - DNA, 25 bp, Homo sapien
caggcatgggaaatctgctattaca

SEQ ID NO: 2509353 - DNA, 25 bp, Homo sapien
gactttgacaatatgctcactgctg

SEQ ID NO: 2509354 - DNA, 25 bp, Homo sapien
cctacagaggagtgacaatgtgctc

SEQ ID NO: 2509355 - DNA, 25 bp, Homo sapien
cgctaaatcgaagctagattgggcc

SEQ ID NO: 2509356 - DNA, 25 bp, Homo sapien
taaagcatgtattcttggtcccaga

SEQ ID NO: 2509357 - DNA, 25 bp, Homo sapien
cagacttcgaaagtacacatgtttc

SEQ ID NO: 2509358 - DNA, 25 bp, Homo sapien
agtacacatgtttcatggcctcttc

SEQ ID NO: 2509359 - DNA, 25 bp, Homo sapien
tcttggtcccagacttcgaaagtac

SEQ ID NO: 2509360 - DNA, 25 bp, Homo sapien
tcctccaaaggctgtacgtataagg

SEQ ID NO: 2509361 - DNA, 25 bp, Homo sapien
tgttgtaggtgacaagagacccaga

SEQ ID NO: 2509362 - DNA, 25 bp, Homo sapien
cacagctgatcaatgccagtaacca

SEQ ID NO: 2509363 - DNA, 25 bp, Homo sapien
caataccgaggaagtactactgagc

SEQ ID NO: 2509364 - DNA, 25 bp, Homo sapien
ttttgttatcaactcaattccttca

SEQ ID NO: 2509365 - DNA, 25 bp, Homo sapien
gaaattttgttatcaactcaattcc

SEQ ID NO: 2509366 - DNA, 25 bp, Homo sapien
aattttgttatcaactcaattcctt

SEQ ID NO: 2509367 - DNA, 25 bp, Homo sapien
aagaaattttgttatcaactcaatt

SEQ ID NO: 2509368 - DNA, 25 bp, Homo sapien
taaggataagccataaataacttgg

SEQ ID NO: 2509369 - DNA, 25 bp, Homo sapien
gctctcttagctgataaaacttttc

SEQ ID NO: 2509370 - DNA, 25 bp, Homo sapien
aatgccctaaaatagtcactcttgt

SEQ ID NO: 2509371 - DNA, 25 bp, Homo sapien
gtcttaaaagactggccttgctatt

SEQ ID NO: 2509372 - DNA, 25 bp, Homo sapien
cagtctggcctgggcggaagagcga

SEQ ID NO: 2509373 - DNA, 25 bp, Homo sapien
tgcagtctggcctgggcggaagagc

SEQ ID NO: 2509374 - DNA, 25 bp, Homo sapien
ctgcagtctggcctgggcggaagag

SEQ ID NO: 2509375 - DNA, 25 bp, Homo sapien
cactgcagtctggcctgggcggaag

SEQ ID NO: 2509376 - DNA, 25 bp, Homo sapien
atcataatctctgtggtacggaata

SEQ ID NO: 2509377 - DNA, 25 bp, Homo sapien
cctgaatccttactgtggctaatcc

SEQ ID NO: 2509378 - DNA, 25 bp, Homo sapien
cggaataaggcattaatcaatgtct

SEQ ID NO: 2509379 - DNA, 25 bp, Homo sapien
atacgtaagggttatgtgtattatg

SEQ ID NO: 2509380 - DNA, 25 bp, Homo sapien
ttggaaagttgtagttcttgaactc

SEQ ID NO: 2509381 - DNA, 25 bp, Homo sapien
tggaaagttgtagttcttgaactcc

SEQ ID NO: 2509382 - DNA, 25 bp, Homo sapien
ttagaggctgtggtttatattttgg

SEQ ID NO: 2509383 - DNA, 25 bp, Homo sapien
ctgggtgcgtggttaattagaggct

SEQ ID NO: 2509384 - DNA, 25 bp, Homo sapien
ttcatcttccacggttgatcctgga

SEQ ID NO: 2509385 - DNA, 25 bp, Homo sapien
ctagcagtcggaaaattaagtgcag

SEQ ID NO: 2509386 - DNA, 25 bp, Homo sapien
agttcatcttccacggttgatcctg

SEQ ID NO: 2509387 - DNA, 25 bp, Homo sapien
cggttgatcctggaaataaaggtct

SEQ ID NO: 2509388 - DNA, 25 bp, Homo sapien
taacatcacctacaacacttcaaag

SEQ ID NO: 2509389 - DNA, 25 bp, Homo sapien
gtgtctcataaagcactcttctgag

SEQ ID NO: 2509390 - DNA, 25 bp, Homo sapien
gttaacacatagttctaaatggcag

SEQ ID NO: 2509391 - DNA, 25 bp, Homo sapien
taggtaatctaattcccatgccaga

SEQ ID NO: 2509392 - DNA, 25 bp, Homo sapien
caagaagcacatcaggtggccggta

SEQ ID NO: 2509393 - DNA, 25 bp, Homo sapien
caatctgtgttgagtactccgagga

SEQ ID NO: 2509394 - DNA, 25 bp, Homo sapien
tggccggtaccatagtgtgacaact

SEQ ID NO: 2509395 - DNA, 25 bp, Homo sapien
ctttgtgggaactgacttggctcgg

SEQ ID NO: 2509396 - DNA, 25 bp, Homo sapien
aaagctttaatggatctctcagacc

SEQ ID NO: 2509397 - DNA, 25 bp, Homo sapien
catgtggccctaagtaagcaaatcc

SEQ ID NO: 2509398 - DNA, 25 bp, Homo sapien
taattcgtagcttcttgaggcttca

SEQ ID NO: 2509399 - DNA, 25 bp, Homo sapien
tgaattcgttgagtgcatgtggccc

SEQ ID NO: 2509400 - DNA, 25 bp, Homo sapien
ctatgcccaagaagagactttatga

SEQ ID NO: 2509401 - DNA, 25 bp, Homo sapien
taacaacataaactatgcccaagaa

SEQ ID NO: 2509402 - DNA, 25 bp, Homo sapien
taaactatgcccaagaagagacttt

SEQ ID NO: 2509403 - DNA, 25 bp, Homo sapien
cccaagaagagactttatgaaagca

SEQ ID NO: 2509404 - DNA, 25 bp, Homo sapien
gagtaatacttgaaacactcatatt

SEQ ID NO: 2509405 - DNA, 25 bp, Homo sapien
aatggcaaagtattaaacgagcaaa

SEQ ID NO: 2509406 - DNA, 25 bp, Homo sapien
ccatttaatgacagtgaagagtaat

SEQ ID NO: 2509407 - DNA, 25 bp, Homo sapien
taccataatcaaagccaggtgtgat

SEQ ID NO: 2509408 - DNA, 25 bp, Homo sapien
gtggtttcaagtctcgatgcaatac

SEQ ID NO: 2509409 - DNA, 25 bp, Homo sapien
gccaaaccacgtagaatttggtaca

SEQ ID NO: 2509410 - DNA, 25 bp, Homo sapien
tctcattaatgaggaggttctgtgg

SEQ ID NO: 2509411 - DNA, 25 bp, Homo sapien
tacctttcttctatggcaatatgcc

SEQ ID NO: 2509412 - DNA, 25 bp, Homo sapien
ggcattagcaccgtagtgttctgaa

SEQ ID NO: 2509413 - DNA, 25 bp, Homo sapien
aacagggcatccgaacactgaggca

SEQ ID NO: 2509414 - DNA, 25 bp, Homo sapien
taaaataaggcactggaattggcga

SEQ ID NO: 2509415 - DNA, 25 bp, Homo sapien
caaggcagcaggtcaacggtatgcc

SEQ ID NO: 2509416 - DNA, 25 bp, Homo sapien
tccacagtcatccatgtactgtttc

SEQ ID NO: 2509417 - DNA, 25 bp, Homo sapien
acgttgtgcatactcatgatgtttc

SEQ ID NO: 2509418 - DNA, 25 bp, Homo sapien
caatgtcatgtaaggttactatatt

SEQ ID NO: 2509419 - DNA, 25 bp, Homo sapien
acaatgtcatgtaaggttactatat

SEQ ID NO: 2509420 - DNA, 25 bp, Homo sapien
aaagaaaattgtttagtctgtggca

SEQ ID NO: 2509421 - DNA, 25 bp, Homo sapien
ctgaagtaagttgaacatacgaact

SEQ ID NO: 2509422 - DNA, 25 bp, Homo sapien
gaaaattgtttagtctgtggcagtc

SEQ ID NO: 2509423 - DNA, 25 bp, Homo sapien
tgaacatacgaactgattaaaagat

SEQ ID NO: 2509424 - DNA, 25 bp, Homo sapien
catttccctatgacaaatagttgtc

SEQ ID NO: 2509425 - DNA, 25 bp, Homo sapien
tagttaccatgttcctcatgtacca

SEQ ID NO: 2509426 - DNA, 25 bp, Homo sapien
tattacttgtatatctgagctcttt

SEQ ID NO: 2509427 - DNA, 25 bp, Homo sapien
tagacacttattccaccactttgat

SEQ ID NO: 2509428 - DNA, 25 bp, Homo sapien
tttaatgccaccaaattctctgtca

SEQ ID NO: 2509429 - DNA, 25 bp, Homo sapien
tgttccaatcggatctcttttaatg

SEQ ID NO: 2509430 - DNA, 25 bp, Homo sapien
tccaatcggatctcttttaatgcca

SEQ ID NO: 2509431 - DNA, 25 bp, Homo sapien
tcttcatgttccaatcggatctctt

SEQ ID NO: 2509432 - DNA, 25 bp, Homo sapien
ccgcgcccggcaatcataaaaattt

SEQ ID NO: 2509433 - DNA, 25 bp, Homo sapien
tagactggcagtagactaagtgaca

SEQ ID NO: 2509434 - DNA, 25 bp, Homo sapien
tctattattgccaggacagccctca

SEQ ID NO: 2509435 - DNA, 25 bp, Homo sapien
catgcaatttcccatggtggcacag

SEQ ID NO: 2509436 - DNA, 25 bp, Homo sapien
tccaagcttttccaatttgatgtag

SEQ ID NO: 2509437 - DNA, 25 bp, Homo sapien
ccaagcttttccaatttgatgtagg

SEQ ID NO: 2509438 - DNA, 25 bp, Homo sapien
aaatggttgaatatctatcaagttt

SEQ ID NO: 2509439 - DNA, 25 bp, Homo sapien
aatggttgaatatctatcaagtttt

SEQ ID NO: 2509440 - DNA, 25 bp, Homo sapien
ccttggataaacctcgggtatgata

SEQ ID NO: 2509441 - DNA, 25 bp, Homo sapien
gataaacctcgggtatgatactatc

SEQ ID NO: 2509442 - DNA, 25 bp, Homo sapien
ccaatgccaactataatcacaagtt

SEQ ID NO: 2509443 - DNA, 25 bp, Homo sapien
gggtatgatactatcactgctcaaa

SEQ ID NO: 2509444 - DNA, 25 bp, Homo sapien
taaggaagctctacgagaccttcga

SEQ ID NO: 2509445 - DNA, 25 bp, Homo sapien
atcaggtattctgatgtctgcaggc

SEQ ID NO: 2509446 - DNA, 25 bp, Homo sapien
ggactgtttatctgcaacttttcaa

SEQ ID NO: 2509447 - DNA, 25 bp, Homo sapien
cattggttggtcaaatggtggactg

SEQ ID NO: 2509448 - DNA, 25 bp, Homo sapien
ccattgagatccgtctatgtatacg

SEQ ID NO: 2509449 - DNA, 25 bp, Homo sapien
cacctgtaggtgactggacttcatc

SEQ ID NO: 2509450 - DNA, 25 bp, Homo sapien
catcagatgatgtcccagaagcttg

SEQ ID NO: 2509451 - DNA, 25 bp, Homo sapien
gaagcttggtcactctcaccatctg

SEQ ID NO: 2509452 - DNA, 25 bp, Homo sapien
cctccaataacactgtgtggtctcc

SEQ ID NO: 2509453 - DNA, 25 bp, Homo sapien
aacactgtgtggtctccgcaatggg

SEQ ID NO: 2509454 - DNA, 25 bp, Homo sapien
catgaaggagccaaggctccctcca

SEQ ID NO: 2509455 - DNA, 25 bp, Homo sapien
gcaatgggggcttcttgaaagatcc

SEQ ID NO: 2509456 - DNA, 25 bp, Homo sapien
actgtgagacgttggaggcctgcca

SEQ ID NO: 2509457 - DNA, 25 bp, Homo sapien
ggcctgccattcttcacaataggct

SEQ ID NO: 2509458 - DNA, 25 bp, Homo sapien
tgagagccatgtgcctagatatgca

SEQ ID NO: 2509459 - DNA, 25 bp, Homo sapien
tatgtgccatgtgacgtttcagaca

SEQ ID NO: 2509460 - DNA, 25 bp, Homo sapien
gatctagagtatgcatgagagccat

SEQ ID NO: 2509461 - DNA, 25 bp, Homo sapien
tgggttcaacccacctgtcaatgtg

SEQ ID NO: 2509462 - DNA, 25 bp, Homo sapien
taagcatagtagattatggtagcct

SEQ ID NO: 2509463 - DNA, 25 bp, Homo sapien
tagcaatctttgtaacccaagagga

SEQ ID NO: 2509464 - DNA, 25 bp, Homo sapien
aatgtctcttatgacgtcttgaagt

SEQ ID NO: 2509465 - DNA, 25 bp, Homo sapien
ggagaaactcaatagatcgcctatt

SEQ ID NO: 2509466 - DNA, 25 bp, Homo sapien
gagtgtgagggatagccttctctta

SEQ ID NO: 2509467 - DNA, 25 bp, Homo sapien
ctgacttcctcggagtgtgagggat

SEQ ID NO: 2509468 - DNA, 25 bp, Homo sapien
tcagccaattcagacaatgattcat

SEQ ID NO: 2509469 - DNA, 25 bp, Homo sapien
caatgattcatcaatagtctgactt

SEQ ID NO: 2509470 - DNA, 25 bp, Homo sapien
tcaattgaatgtggcttgaaaaatc

SEQ ID NO: 2509471 - DNA, 25 bp, Homo sapien
ctatcaattgaatgtggcttgaaaa

SEQ ID NO: 2509472 - DNA, 25 bp, Homo sapien
atcaattgaatgtggcttgaaaaat

SEQ ID NO: 2509473 - DNA, 25 bp, Homo sapien
tatcaattgaatgtggcttgaaaaa

SEQ ID NO: 2509474 - DNA, 25 bp, Homo sapien
gactccaactttttcaaacacaggc

SEQ ID NO: 2509475 - DNA, 25 bp, Homo sapien
ctccaactttttcaaacacaggcat

SEQ ID NO: 2509476 - DNA, 25 bp, Homo sapien
tcggactccaactttttcaaacaca

SEQ ID NO: 2509477 - DNA, 25 bp, Homo sapien
cggactccaactttttcaaacacag

SEQ ID NO: 2509478 - DNA, 25 bp, Homo sapien
tcataaatacctacagaatgaagga

SEQ ID NO: 2509479 - DNA, 25 bp, Homo sapien
aacgtgcccggcatatattggtcta

SEQ ID NO: 2509480 - DNA, 25 bp, Homo sapien
tgaaggaatgatagcaaatactaac

SEQ ID NO: 2509481 - DNA, 25 bp, Homo sapien
gaacaaatcctgacactcaacaggt

SEQ ID NO: 2509482 - DNA, 25 bp, Homo sapien
aaacattcacacacaggccctatca

SEQ ID NO: 2509483 - DNA, 25 bp, Homo sapien
agcaatataggaggcattaagggca

SEQ ID NO: 2509484 - DNA, 25 bp, Homo sapien
catgaaaactgtttgagccatgtga

SEQ ID NO: 2509485 - DNA, 25 bp, Homo sapien
aatagcccacatactcaaagtgaac

SEQ ID NO: 2509486 - DNA, 25 bp, Homo sapien
ttggcccaccaacgtatctaatacc

SEQ ID NO: 2509487 - DNA, 25 bp, Homo sapien
tacctgctactatttggcccacaaa

SEQ ID NO: 2509488 - DNA, 25 bp, Homo sapien
taagatgtatcactccattcttggc

SEQ ID NO: 2509489 - DNA, 25 bp, Homo sapien
tacaccatgggagaacaactgtttt

SEQ ID NO: 2509490 - DNA, 25 bp, Homo sapien
gggatttatacaggccaaggtgacc

SEQ ID NO: 2509491 - DNA, 25 bp, Homo sapien
gagacattcaagctatctatagtca

SEQ ID NO: 2509492 - DNA, 25 bp, Homo sapien
aatgacacaagagcctataacatgc

SEQ ID NO: 2509493 - DNA, 25 bp, Homo sapien
cctataaagtaaaccgagacattca

SEQ ID NO: 2509494 - DNA, 25 bp, Homo sapien
tccataggcttgctctttacttgag

SEQ ID NO: 2509495 - DNA, 25 bp, Homo sapien
ttccataggcttgctctttacttga

SEQ ID NO: 2509496 - DNA, 25 bp, Homo sapien
ataggcttgctctttacttgagtcc

SEQ ID NO: 2509497 - DNA, 25 bp, Homo sapien
cataggcttgctctttacttgagtc

SEQ ID NO: 2509498 - DNA, 25 bp, Homo sapien
tctaggtataataaatcacagccgc

SEQ ID NO: 2509499 - DNA, 25 bp, Homo sapien
gacccagtccctcatataagggaaa

SEQ ID NO: 2509500 - DNA, 25 bp, Homo sapien
ttttgtaagcagtatgacccagtcc

SEQ ID NO: 2509501 - DNA, 25 bp, Homo sapien
tgaaaaccactcttagttctaggta

SEQ ID NO: 2509502 - DNA, 25 bp, Homo sapien
aaagtgttcaacagcctccttactg

SEQ ID NO: 2509503 - DNA, 25 bp, Homo sapien
tcattaggctggtagagaataacat

SEQ ID NO: 2509504 - DNA, 25 bp, Homo sapien
cctttgagagtacttctgaagcacc

SEQ ID NO: 2509505 - DNA, 25 bp, Homo sapien
tatcctacctaggaagtggttctct

SEQ ID NO: 2509506 - DNA, 25 bp, Homo sapien
ggatatcgcatgttcaagtttgtca

SEQ ID NO: 2509507 - DNA, 25 bp, Homo sapien
gatatcagaaaagggttcacagact

SEQ ID NO: 2509508 - DNA, 25 bp, Homo sapien
tgtcacagcaccgatttaaaatagt

SEQ ID NO: 2509509 - DNA, 25 bp, Homo sapien
cacattattcgtggtactggtacaa

SEQ ID NO: 2509510 - DNA, 25 bp, Homo sapien
gttgaggatgcaacgagctgggact

SEQ ID NO: 2509511 - DNA, 25 bp, Homo sapien
tcagaaaaacgtgaggcagggcatg

SEQ ID NO: 2509512 - DNA, 25 bp, Homo sapien
ttataaccagttactctattttgat

SEQ ID NO: 2509513 - DNA, 25 bp, Homo sapien
tataatactaagcatccaggcagat

SEQ ID NO: 2509514 - DNA, 25 bp, Homo sapien
ggaaagcttacagatatgcttacaa

SEQ ID NO: 2509515 - DNA, 25 bp, Homo sapien
taaatgataaagcacaggcctaaac

SEQ ID NO: 2509516 - DNA, 25 bp, Homo sapien
ctagactattaagatgtcaagtaaa

SEQ ID NO: 2509517 - DNA, 25 bp, Homo sapien
ggaaagcaaatactgtctagactat

SEQ ID NO: 2509518 - DNA, 25 bp, Homo sapien
taaaaaggcactgactcccacaaat

SEQ ID NO: 2509519 - DNA, 25 bp, Homo sapien
caatagaaacctaagttgcagatct

SEQ ID NO: 2509520 - DNA, 25 bp, Homo sapien
ccaacttatgggcaaaaattattgc

SEQ ID NO: 2509521 - DNA, 25 bp, Homo sapien
caaccattttatagcttcttaggaa

SEQ ID NO: 2509522 - DNA, 25 bp, Homo sapien
cacacttcaaacaagacgttaccaa

SEQ ID NO: 2509523 - DNA, 25 bp, Homo sapien
cacacctactatagaagagggtttt

SEQ ID NO: 2509524 - DNA, 25 bp, Homo sapien
aacacacctactatagaagagggtt

SEQ ID NO: 2509525 - DNA, 25 bp, Homo sapien
gccataatctcgaactaatatttaa

SEQ ID NO: 2509526 - DNA, 25 bp, Homo sapien
agtttaaaagtagaccatggaacag

SEQ ID NO: 2509527 - DNA, 25 bp, Homo sapien
ttcaagtttaaaagtagaccatgga

SEQ ID NO: 2509528 - DNA, 25 bp, Homo sapien
ccttcaagtttaaaagtagaccatg

SEQ ID NO: 2509529 - DNA, 25 bp, Homo sapien
tcaagtttaaaagtagaccatggaa

SEQ ID NO: 2509530 - DNA, 25 bp, Homo sapien
gactactggtatatgaagctgcaat

SEQ ID NO: 2509531 - DNA, 25 bp, Homo sapien
catgtttccttactatgtatgtatc

SEQ ID NO: 2509532 - DNA, 25 bp, Homo sapien
gatcaattcctccaatttcatgttt

SEQ ID NO: 2509533 - DNA, 25 bp, Homo sapien
ccagagtacatatgacaggctgcat

SEQ ID NO: 2509534 - DNA, 25 bp, Homo sapien
aatcccaccattcgtaaaccttgct

SEQ ID NO: 2509535 - DNA, 25 bp, Homo sapien
aatcaatggagcctcaatatggcct

SEQ ID NO: 2509536 - DNA, 25 bp, Homo sapien
ggtagatttccatctagtaacactg

SEQ ID NO: 2509537 - DNA, 25 bp, Homo sapien
taattcagacactagccctcaaact

SEQ ID NO: 2509538 - DNA, 25 bp, Homo sapien
caaggcaagctttgtctacccaagg

SEQ ID NO: 2509539 - DNA, 25 bp, Homo sapien
gatcttctcacacgaacgcctttta

SEQ ID NO: 2509540 - DNA, 25 bp, Homo sapien
gcatttcctgataagtgactgaagg

SEQ ID NO: 2509541 - DNA, 25 bp, Homo sapien
gaatacactttgctgaccctaggaa

SEQ ID NO: 2509542 - DNA, 25 bp, Homo sapien
tattcatgtaaaggaggcgagagcc

SEQ ID NO: 2509543 - DNA, 25 bp, Homo sapien
ggacctgatgtcaatttgacgaaga

SEQ ID NO: 2509544 - DNA, 25 bp, Homo sapien
gatttcagctaaacgctttttgcca

SEQ ID NO: 2509545 - DNA, 25 bp, Homo sapien
tagaacatgaccaacgaggtgtctt

SEQ ID NO: 2509546 - DNA, 25 bp, Homo sapien
ctgggaagcagctcgcagacactca

SEQ ID NO: 2509547 - DNA, 25 bp, Homo sapien
cagcgccagcgtctccaaggagctg

SEQ ID NO: 2509548 - DNA, 25 bp, Homo sapien
gggcgacccaaggtcctcgctggac

SEQ ID NO: 2509549 - DNA, 25 bp, Homo sapien
gcgtctatatctgtcggcgcctcct

SEQ ID NO: 2509550 - DNA, 25 bp, Homo sapien
acgcccgcggcgaccggatgcaagt

SEQ ID NO: 2509551 - DNA, 25 bp, Homo sapien
tgaggcgcttccgagcgcaggcctc

SEQ ID NO: 2509552 - DNA, 25 bp, Homo sapien
agcggccggcagacgtgaggcgctt

SEQ ID NO: 2509553 - DNA, 25 bp, Homo sapien
ccgaggcgaggcgaagagaggcgcg

SEQ ID NO: 2509554 - DNA, 25 bp, Homo sapien
ttgccaagtccctcggtcaacatgg

SEQ ID NO: 2509555 - DNA, 25 bp, Homo sapien
cgttcgctccttgcgtgtgcgtcgc

SEQ ID NO: 2509556 - DNA, 25 bp, Homo sapien
tgtgcgtcgctttcacactcggcgg

SEQ ID NO: 2509557 - DNA, 25 bp, Homo sapien
ttattgaaacgatccaaccagcggc

SEQ ID NO: 2509558 - DNA, 25 bp, Homo sapien
ctgtttttattagtcattataagaa

SEQ ID NO: 2509559 - DNA, 25 bp, Homo sapien
aactgtttttattagtcattataag

SEQ ID NO: 2509560 - DNA, 25 bp, Homo sapien
tgtttttattagtcattataagaag

SEQ ID NO: 2509561 - DNA, 25 bp, Homo sapien
actgtttttattagtcattataaga

SEQ ID NO: 2509562 - DNA, 25 bp, Homo sapien
gcagggtgcgcagagagagcagtga

SEQ ID NO: 2509563 - DNA, 25 bp, Homo sapien
agctcagccgagtcagtgctgacga

SEQ ID NO: 2509564 - DNA, 25 bp, Homo sapien
cgagtcagtgctgacgaacaaaggg

SEQ ID NO: 2509565 - DNA, 25 bp, Homo sapien
ctgacgaacaaaggggcagcaaatg

SEQ ID NO: 2509566 - DNA, 25 bp, Homo sapien
ggagttcaagaccagccttgtcaac

SEQ ID NO: 2509567 - DNA, 25 bp, Homo sapien
tgtaatctcggcactttcagaggct

SEQ ID NO: 2509568 - DNA, 25 bp, Homo sapien
ccagccttgtcaacatagtgagacc

SEQ ID NO: 2509569 - DNA, 25 bp, Homo sapien
gaggcagcaggattgcttgagtcca

SEQ ID NO: 2509570 - DNA, 25 bp, Homo sapien
ggtctggcgataatttccagacctt

SEQ ID NO: 2509571 - DNA, 25 bp, Homo sapien
cagaccttctccctgtaaccagtta

SEQ ID NO: 2509572 - DNA, 25 bp, Homo sapien
tgtctttagatgaatatagcttaga

SEQ ID NO: 2509573 - DNA, 25 bp, Homo sapien
tagatgaatatagcttagaaagtat

SEQ ID NO: 2509574 - DNA, 25 bp, Homo sapien
gattacaaggaggtacatctgcaga

SEQ ID NO: 2509575 - DNA, 25 bp, Homo sapien
gaatgacggcttttgcggattacaa

SEQ ID NO: 2509576 - DNA, 25 bp, Homo sapien
gaactagagacttcagtagcaacag

SEQ ID NO: 2509577 - DNA, 25 bp, Homo sapien
tagcaacaggcaaatggctggccag

SEQ ID NO: 2509578 - DNA, 25 bp, Homo sapien
tgtgagtatgtgcagcctagtgaca

SEQ ID NO: 2509579 - DNA, 25 bp, Homo sapien
tgcacttagcaactgaaagagcgtg

SEQ ID NO: 2509580 - DNA, 25 bp, Homo sapien
aacatactgtggcaatccagtgcac

SEQ ID NO: 2509581 - DNA, 25 bp, Homo sapien
catttgagagcaatctggagcctct

SEQ ID NO: 2509582 - DNA, 25 bp, Homo sapien
tttccagcaactgctctgatgactg

SEQ ID NO: 2509583 - DNA, 25 bp, Homo sapien
gctttccagcaactgctctgatgac

SEQ ID NO: 2509584 - DNA, 25 bp, Homo sapien
ctttccagcaactgctctgatgact

SEQ ID NO: 2509585 - DNA, 25 bp, Homo sapien
tgctttccagcaactgctctgatga

SEQ ID NO: 2509586 - DNA, 25 bp, Homo sapien
tgaagcattgatctgataatgttcc

SEQ ID NO: 2509587 - DNA, 25 bp, Homo sapien
tattgaagaaaaggtcggaaggctc

SEQ ID NO: 2509588 - DNA, 25 bp, Homo sapien
cattgcatatgtcctgagaacccag

SEQ ID NO: 2509589 - DNA, 25 bp, Homo sapien
cctaataacttaatgagatgacttc

SEQ ID NO: 2509590 - DNA, 25 bp, Homo sapien
gctgggtgcagtggcgccgtcttag

SEQ ID NO: 2509591 - DNA, 25 bp, Homo sapien
gtgatcttcccgcctcaagccttcc

SEQ ID NO: 2509592 - DNA, 25 bp, Homo sapien
atcttcccgcctcaagccttccaaa

SEQ ID NO: 2509593 - DNA, 25 bp, Homo sapien
ctgggtgcagtggcgccgtcttagc

SEQ ID NO: 2509594 - DNA, 25 bp, Homo sapien
actcagtctggagtgcattggctaa

SEQ ID NO: 2509595 - DNA, 25 bp, Homo sapien
tcgtgatctacctgctttggtctct

SEQ ID NO: 2509596 - DNA, 25 bp, Homo sapien
tctggagtgcattggctaactgcaa

SEQ ID NO: 2509597 - DNA, 25 bp, Homo sapien
tcagtctggagtgcattggctaact

SEQ ID NO: 2509598 - DNA, 25 bp, Homo sapien
ctatagttaccttcgcattataggg

SEQ ID NO: 2509599 - DNA, 25 bp, Homo sapien
tgtagctgtgaggataaatgaactg

SEQ ID NO: 2509600 - DNA, 25 bp, Homo sapien
tgggacatattcctccaagtaacac

SEQ ID NO: 2509601 - DNA, 25 bp, Homo sapien
ctagagtaaacttggcatcattgca

SEQ ID NO: 2509602 - DNA, 25 bp, Homo sapien
tagtggaggtcttcgtgtgttaccc

SEQ ID NO: 2509603 - DNA, 25 bp, Homo sapien
gatagtggaggtcttcgtgtgttac

SEQ ID NO: 2509604 - DNA, 25 bp, Homo sapien
ggtattggtatcaggacttgccatc

SEQ ID NO: 2509605 - DNA, 25 bp, Homo sapien
cagagtttgacagcttattggtatt

SEQ ID NO: 2509606 - DNA, 25 bp, Homo sapien
gttttatgatgactgaatctggtct

SEQ ID NO: 2509607 - DNA, 25 bp, Homo sapien
ctaatcttgggtcttcttagagcct

SEQ ID NO: 2509608 - DNA, 25 bp, Homo sapien
tcttgttttatgatgactgaatctg

SEQ ID NO: 2509609 - DNA, 25 bp, Homo sapien
tactaatcttgggtcttcttagagc

SEQ ID NO: 2509610 - DNA, 25 bp, Homo sapien
gaggaagcctgtcctgtcgctgatc

SEQ ID NO: 2509611 - DNA, 25 bp, Homo sapien
ctgtcctgtcgctgatctccctgaa

SEQ ID NO: 2509612 - DNA, 25 bp, Homo sapien
gaagcctgtcctgtcgctgatctcc

SEQ ID NO: 2509613 - DNA, 25 bp, Homo sapien
tgatctccctgaactatcgcactct

SEQ ID NO: 2509614 - DNA, 25 bp, Homo sapien
gctcatcttgtgtggacataacgcc

SEQ ID NO: 2509615 - DNA, 25 bp, Homo sapien
ccataaaacaagctgagacaatccc

SEQ ID NO: 2509616 - DNA, 25 bp, Homo sapien
tgtttgttccctagttgtatcgcga

SEQ ID NO: 2509617 - DNA, 25 bp, Homo sapien
ggatagacctcccaaggagacagaa

SEQ ID NO: 2509618 - DNA, 25 bp, Homo sapien
tctagctgcgcctctggtagcttct

SEQ ID NO: 2509619 - DNA, 25 bp, Homo sapien
aacgcagcagttggtcaatatagcc

SEQ ID NO: 2509620 - DNA, 25 bp, Homo sapien
ccttatagttttgccgtgttcagca

SEQ ID NO: 2509621 - DNA, 25 bp, Homo sapien
ctttgtgtaagaagagcctcaggct

SEQ ID NO: 2509622 - DNA, 25 bp, Homo sapien
tattcctccttcgtggcctatagga

SEQ ID NO: 2509623 - DNA, 25 bp, Homo sapien
tcatctcctattcctccttcgtggc

SEQ ID NO: 2509624 - DNA, 25 bp, Homo sapien
ccttcgtggcctataggaggaattt

SEQ ID NO: 2509625 - DNA, 25 bp, Homo sapien
gaatttgattgatgttgaatggata

SEQ ID NO: 2509626 - DNA, 25 bp, Homo sapien
ggaaagcagggctggatcttggggc

SEQ ID NO: 2509627 - DNA, 25 bp, Homo sapien
tgtgggaaagcagggctggatcttg

SEQ ID NO: 2509628 - DNA, 25 bp, Homo sapien
ctgtgggaaagcagggctggatctt

SEQ ID NO: 2509629 - DNA, 25 bp, Homo sapien
tgggaaagcagggctggatcttggg

SEQ ID NO: 2509630 - DNA, 25 bp, Homo sapien
ttatgaaagcattttccgctgatta

SEQ ID NO: 2509631 - DNA, 25 bp, Homo sapien
agcattttccgctgattaggaagac

SEQ ID NO: 2509632 - DNA, 25 bp, Homo sapien
tgaaagcattttccgctgattagga

SEQ ID NO: 2509633 - DNA, 25 bp, Homo sapien
aagcattttccgctgattaggaaga

SEQ ID NO: 2509634 - DNA, 25 bp, Homo sapien
cctgctccttcccttggctcagtgc

SEQ ID NO: 2509635 - DNA, 25 bp, Homo sapien
ggctcagtgctctctggacacccat

SEQ ID NO: 2509636 - DNA, 25 bp, Homo sapien
ccttcccttggctcagtgctctctg

SEQ ID NO: 2509637 - DNA, 25 bp, Homo sapien
tcccttggctcagtgctctctggac

SEQ ID NO: 2509638 - DNA, 25 bp, Homo sapien
gactttttgatctggctaatggttg

SEQ ID NO: 2509639 - DNA, 25 bp, Homo sapien
ccatttgatatctcactgccgtcta

SEQ ID NO: 2509640 - DNA, 25 bp, Homo sapien
tagtgtcaattattccctgaatatc

SEQ ID NO: 2509641 - DNA, 25 bp, Homo sapien
gccgtctatattcaatcttgagaga

SEQ ID NO: 2509642 - DNA, 25 bp, Homo sapien
taactttctgtgcaaggcggtaagg

SEQ ID NO: 2509643 - DNA, 25 bp, Homo sapien
tgcaccagaccatacagtaacagtt

SEQ ID NO: 2509644 - DNA, 25 bp, Homo sapien
gcaacactcactggttaaagctgta

SEQ ID NO: 2509645 - DNA, 25 bp, Homo sapien
tgagtgttgttttgcctgagagaaa

SEQ ID NO: 2509646 - DNA, 25 bp, Homo sapien
ggccccagatgaagctgacaagtga

SEQ ID NO: 2509647 - DNA, 25 bp, Homo sapien
gagccctcagttttgcaaagagaac

SEQ ID NO: 2509648 - DNA, 25 bp, Homo sapien
ttttgcaaagagaacactcttctcc

SEQ ID NO: 2509649 - DNA, 25 bp, Homo sapien
ggtctctactgtgctaccctctaga

SEQ ID NO: 2509650 - DNA, 25 bp, Homo sapien
agactggagtggcaggtcttaggga

SEQ ID NO: 2509651 - DNA, 25 bp, Homo sapien
taagactggagtggcaggtcttagg

SEQ ID NO: 2509652 - DNA, 25 bp, Homo sapien
aagactggagtggcaggtcttaggg

SEQ ID NO: 2509653 - DNA, 25 bp, Homo sapien
gacccagaggaggattgtccaagaa

SEQ ID NO: 2509654 - DNA, 25 bp, Homo sapien
aacgacccagaggaggattgtccaa

SEQ ID NO: 2509655 - DNA, 25 bp, Homo sapien
gcaaaacgacccagaggaggattgt

SEQ ID NO: 2509656 - DNA, 25 bp, Homo sapien
aggaggattgtccaagaacttctca

SEQ ID NO: 2509657 - DNA, 25 bp, Homo sapien
tgggctttccaggagccatatcaac

SEQ ID NO: 2509658 - DNA, 25 bp, Homo sapien
ggctttccaggagccatatcaacaa

SEQ ID NO: 2509659 - DNA, 25 bp, Homo sapien
tttccaggagccatatcaacaatgg

SEQ ID NO: 2509660 - DNA, 25 bp, Homo sapien
ctttccaggagccatatcaacaatg

SEQ ID NO: 2509661 - DNA, 25 bp, Homo sapien
gggcatggtcagcaccaatatggcc

SEQ ID NO: 2509662 - DNA, 25 bp, Homo sapien
tggtcagcaccaatatggcctggac

SEQ ID NO: 2509663 - DNA, 25 bp, Homo sapien
aaatgtgtgacaattcattagaggg

SEQ ID NO: 2509664 - DNA, 25 bp, Homo sapien
tgtgaaatgtgtgacaattcattag

SEQ ID NO: 2509665 - DNA, 25 bp, Homo sapien
cttgacattgaagcccacattgtcc

SEQ ID NO: 2509666 - DNA, 25 bp, Homo sapien
gcccacattgtccccaggaagagct

SEQ ID NO: 2509667 - DNA, 25 bp, Homo sapien
aagcccacattgtccccaggaagag

SEQ ID NO: 2509668 - DNA, 25 bp, Homo sapien
cattgaagcccacattgtccccagg

SEQ ID NO: 2509669 - DNA, 25 bp, Homo sapien
tccacttggcctacaagcatagtac

SEQ ID NO: 2509670 - DNA, 25 bp, Homo sapien
ggagaggtagacacaagggcttatt

SEQ ID NO: 2509671 - DNA, 25 bp, Homo sapien
accacgaccatcagttttgcagaca

SEQ ID NO: 2509672 - DNA, 25 bp, Homo sapien
acaagcatagtaccacgaccatcag

SEQ ID NO: 2509673 - DNA, 25 bp, Homo sapien
cattgccatctttatgggtgaattc

SEQ ID NO: 2509674 - DNA, 25 bp, Homo sapien
ttgccatctttatgggtgaattcca

SEQ ID NO: 2509675 - DNA, 25 bp, Homo sapien
ccatctttatgggtgaattccatcc

SEQ ID NO: 2509676 - DNA, 25 bp, Homo sapien
tgccatctttatgggtgaattccat

SEQ ID NO: 2509677 - DNA, 25 bp, Homo sapien
gcgtgttgtcactatttgaaccaga

SEQ ID NO: 2509678 - DNA, 25 bp, Homo sapien
tagcatgtgacttgagcgtgttgtc

SEQ ID NO: 2509679 - DNA, 25 bp, Homo sapien
caatgcatgttagcatgtgacttga

SEQ ID NO: 2509680 - DNA, 25 bp, Homo sapien
gacttgagcgtgttgtcactatttg

SEQ ID NO: 2509681 - DNA, 25 bp, Homo sapien
taatataagtgctatcgttttttgc

SEQ ID NO: 2509682 - DNA, 25 bp, Homo sapien
cttaatataagtgctatcgtttttt

SEQ ID NO: 2509683 - DNA, 25 bp, Homo sapien
tataagtgctatcgttttttgcaat

SEQ ID NO: 2509684 - DNA, 25 bp, Homo sapien
agtgctatcgttttttgcaatttcc

SEQ ID NO: 2509685 - DNA, 25 bp, Homo sapien
tctgtgtcctgagacatcaaatttc

SEQ ID NO: 2509686 - DNA, 25 bp, Homo sapien
catgatcatcggtctgcccattctt

SEQ ID NO: 2509687 - DNA, 25 bp, Homo sapien
ccagtgtataagcaagagcaccatg

SEQ ID NO: 2509688 - DNA, 25 bp, Homo sapien
gatgtgcctggattcatgtttatga

SEQ ID NO: 2509689 - DNA, 25 bp, Homo sapien
gtaactgaactccctctggaggcag

SEQ ID NO: 2509690 - DNA, 25 bp, Homo sapien
ggcagttcagtccacaggcatggaa

SEQ ID NO: 2509691 - DNA, 25 bp, Homo sapien
atagggatgtgaggttctgctgagg

SEQ ID NO: 2509692 - DNA, 25 bp, Homo sapien
agaagtcacttatcctcttggagcc

SEQ ID NO: 2509693 - DNA, 25 bp, Homo sapien
ctggcccagggaatccagccatgac

SEQ ID NO: 2509694 - DNA, 25 bp, Homo sapien
gctgtttccagtggtatgaccttgg

SEQ ID NO: 2509695 - DNA, 25 bp, Homo sapien
agtactcttaggtgccagtctggta

SEQ ID NO: 2509696 - DNA, 25 bp, Homo sapien
attctggatatctcaggagccccga

SEQ ID NO: 2509697 - DNA, 25 bp, Homo sapien
taggccatttggactctgccttcaa

SEQ ID NO: 2509698 - DNA, 25 bp, Homo sapien
tcagggttcccttgaaagctttatt

SEQ ID NO: 2509699 - DNA, 25 bp, Homo sapien
ggagccccgaaattctagctctgac

SEQ ID NO: 2509700 - DNA, 25 bp, Homo sapien
aataaagctttcaagggaaccctga

SEQ ID NO: 2509701 - DNA, 25 bp, Homo sapien
gtcagagctagaatttcggggctcc

SEQ ID NO: 2509702 - DNA, 25 bp, Homo sapien
ggctccaagaggataagtgacttct

SEQ ID NO: 2509703 - DNA, 25 bp, Homo sapien
gtcatggctggattccctgggccag

SEQ ID NO: 2509704 - DNA, 25 bp, Homo sapien
ctgcctccagagggagttcagttac

SEQ ID NO: 2509705 - DNA, 25 bp, Homo sapien
taccagactggcacctaagagtact

SEQ ID NO: 2509706 - DNA, 25 bp, Homo sapien
ttgaaggcagagtccaaatggccta

SEQ ID NO: 2509707 - DNA, 25 bp, Homo sapien
cctcagcagaacctcacatccctat

SEQ ID NO: 2509708 - DNA, 25 bp, Homo sapien
ccaaggtcataccactggaaacagc

SEQ ID NO: 2509709 - DNA, 25 bp, Homo sapien
ttccatgcctgtggactgaactgcc

SEQ ID NO: 2509710 - DNA, 25 bp, Homo sapien
tcggggctcctgagatatccagaat

SEQ ID NO: 2509711 - DNA, 25 bp, Homo sapien
gggaggagcccttttccatctcagc

SEQ ID NO: 2509712 - DNA, 25 bp, Homo sapien
cagcagcttccttctcagcagattt

SEQ ID NO: 2509713 - DNA, 25 bp, Homo sapien
ttccttctcagcagatttttcgatg

SEQ ID NO: 2509714 - DNA, 25 bp, Homo sapien
gcagatttttcgatggttcttttgt

SEQ ID NO: 2509715 - DNA, 25 bp, Homo sapien
tggtggtggacttgaccaaatctat

SEQ ID NO: 2509716 - DNA, 25 bp, Homo sapien
accaaatctatgtgtccaatgacga

SEQ ID NO: 2509717 - DNA, 25 bp, Homo sapien
tgatcagtggtggtggacttgacca

SEQ ID NO: 2509718 - DNA, 25 bp, Homo sapien
atttgttgatcagatgatcagtggt

SEQ ID NO: 2509719 - DNA, 25 bp, Homo sapien
tctcacaagtgaagaacatcacttt

SEQ ID NO: 2509720 - DNA, 25 bp, Homo sapien
ggcttttcaagccagtgttattaaa

SEQ ID NO: 2509721 - DNA, 25 bp, Homo sapien
caagccagtgttattaaatttgaca

SEQ ID NO: 2509722 - DNA, 25 bp, Homo sapien
tttctctcacaagtgaagaacatca

SEQ ID NO: 2509723 - DNA, 25 bp, Homo sapien
gaagggactgcgttagccagggtgg

SEQ ID NO: 2509724 - DNA, 25 bp, Homo sapien
aaatcaggtattgggatatagggta

SEQ ID NO: 2509725 - DNA, 25 bp, Homo sapien
tgctaagtcccttaccaggtaagga

SEQ ID NO: 2509726 - DNA, 25 bp, Homo sapien
acactgaggtgagaatgactttgcc

SEQ ID NO: 2509727 - DNA, 25 bp, Homo sapien
tgggagaggagaagaaacaaggcaa

SEQ ID NO: 2509728 - DNA, 25 bp, Homo sapien
gaggagaagaaacaaggcaatctgt

SEQ ID NO: 2509729 - DNA, 25 bp, Homo sapien
tgtaaacacctctgcactgggacct

SEQ ID NO: 2509730 - DNA, 25 bp, Homo sapien
gtaaacacctctgcactgggacctg

SEQ ID NO: 2509731 - DNA, 25 bp, Homo sapien
tcctttgagggagaattccaaggga

SEQ ID NO: 2509732 - DNA, 25 bp, Homo sapien
tcagtagtttaagttgtcatctctg

SEQ ID NO: 2509733 - DNA, 25 bp, Homo sapien
agtttaagttgtcatctctgatcag

SEQ ID NO: 2509734 - DNA, 25 bp, Homo sapien
taagttgtcatctctgatcagttcc

SEQ ID NO: 2509735 - DNA, 25 bp, Homo sapien
ggaacctaagcccacagcagcgcgg

SEQ ID NO: 2509736 - DNA, 25 bp, Homo sapien
ctctgtcggcgctcggttggaggcg

SEQ ID NO: 2509737 - DNA, 25 bp, Homo sapien
agacgcgcaggtgagcggacccgcg

SEQ ID NO: 2509738 - DNA, 25 bp, Homo sapien
ggccccgcgagcagacgcgcaggtg

SEQ ID NO: 2509739 - DNA, 25 bp, Homo sapien
ctggggtgcggggcaggtgcgcggc

SEQ ID NO: 2509740 - DNA, 25 bp, Homo sapien
tggggtgcggggcaggtgcgcggcc

SEQ ID NO: 2509741 - DNA, 25 bp, Homo sapien
gtttgctttcatatttggaagtgct

SEQ ID NO: 2509742 - DNA, 25 bp, Homo sapien
tgtttgctttcatatttggaagtgc

SEQ ID NO: 2509743 - DNA, 25 bp, Homo sapien
atgtttgctttcatatttggaagtg

SEQ ID NO: 2509744 - DNA, 25 bp, Homo sapien
cgggagacctcttggcctctttaag

SEQ ID NO: 2509745 - DNA, 25 bp, Homo sapien
tgggtttcagggcagtcatccttga

SEQ ID NO: 2509746 - DNA, 25 bp, Homo sapien
gcagtcatccttgagacctcttgtt

SEQ ID NO: 2509747 - DNA, 25 bp, Homo sapien
cttgttcctcgggagacctcttggc

SEQ ID NO: 2509748 - DNA, 25 bp, Homo sapien
tctagtccaccagtaagtagccttg

SEQ ID NO: 2509749 - DNA, 25 bp, Homo sapien
tgttctgtaagaaaccatgctttgg

SEQ ID NO: 2509750 - DNA, 25 bp, Homo sapien
ggtcagtactgcctgtgagcctaag

SEQ ID NO: 2509751 - DNA, 25 bp, Homo sapien
tatgagatcctacaacactgaagtt

SEQ ID NO: 2509752 - DNA, 25 bp, Homo sapien
ccaatgtactcatgggctgacttca

SEQ ID NO: 2509753 - DNA, 25 bp, Homo sapien
gccaggacggtacctgcgtgtttaa

SEQ ID NO: 2509754 - DNA, 25 bp, Homo sapien
caatcagaacctgaaagccaggacg

SEQ ID NO: 2509755 - DNA, 25 bp, Homo sapien
caggacaccttctttgcacagaaag

SEQ ID NO: 2509756 - DNA, 25 bp, Homo sapien
ggctgggcacacgttttcgtgtttg

SEQ ID NO: 2509757 - DNA, 25 bp, Homo sapien
cccatgtttcatgttccacagttcc

SEQ ID NO: 2509758 - DNA, 25 bp, Homo sapien
tcctgaggtgacacttttaagcccc

SEQ ID NO: 2509759 - DNA, 25 bp, Homo sapien
ttatgtctcagaaagtggtttgggg

SEQ ID NO: 2509760 - DNA, 25 bp, Homo sapien
taacaagctggtggaattacaaaga

SEQ ID NO: 2509761 - DNA, 25 bp, Homo sapien
tagcagagtgattcttagagcaaaa

SEQ ID NO: 2509762 - DNA, 25 bp, Homo sapien
tcaagcaagccggagtcatggaagg

SEQ ID NO: 2509763 - DNA, 25 bp, Homo sapien
ggttatggttatcaagctggaggac

SEQ ID NO: 2509764 - DNA, 25 bp, Homo sapien
tggtttgggtgtatgcctcggaggc

SEQ ID NO: 2509765 - DNA, 25 bp, Homo sapien
gaggtgtttcctttcggaatgtcat

SEQ ID NO: 2509766 - DNA, 25 bp, Homo sapien
cctcggaggctgaactgtgcaagaa

SEQ ID NO: 2509767 - DNA, 25 bp, Homo sapien
tgtgcaagaagtgtcatccgtggag

SEQ ID NO: 2509768 - DNA, 25 bp, Homo sapien
tacaagactgttattgaccaagtgt

SEQ ID NO: 2509769 - DNA, 25 bp, Homo sapien
tgtgagtttgcataaggtctttcac

SEQ ID NO: 2509770 - DNA, 25 bp, Homo sapien
ttcacatctattgccatggccagca

SEQ ID NO: 2509771 - DNA, 25 bp, Homo sapien
cataaggtctttcacatctattgcc

SEQ ID NO: 2509772 - DNA, 25 bp, Homo sapien
gaatgtgcattttagatgtgggtcc

SEQ ID NO: 2509773 - DNA, 25 bp, Homo sapien
tcttggccatcaattcgaatgtgca

SEQ ID NO: 2509774 - DNA, 25 bp, Homo sapien
tctatgaaagcgtgccatgtagttc

SEQ ID NO: 2509775 - DNA, 25 bp, Homo sapien
gtccaagcgttttctatgaaagcgt

SEQ ID NO: 2509776 - DNA, 25 bp, Homo sapien
cctctaggaggatctaaatgactca

SEQ ID NO: 2509777 - DNA, 25 bp, Homo sapien
ccaccctctaggaggatctaaatga

SEQ ID NO: 2509778 - DNA, 25 bp, Homo sapien
cagggactaaatgtagcaacaaggc

SEQ ID NO: 2509779 - DNA, 25 bp, Homo sapien
aatgtagcaacaaggcctctttctt

SEQ ID NO: 2509780 - DNA, 25 bp, Homo sapien
cagccaatacgttgcttggtaacca

SEQ ID NO: 2509781 - DNA, 25 bp, Homo sapien
gagttatgcccatgcaagtgtgtgc

SEQ ID NO: 2509782 - DNA, 25 bp, Homo sapien
tggtaaccagctacctgcacacctg

SEQ ID NO: 2509783 - DNA, 25 bp, Homo sapien
tgtgtgctctaatccccagccaata

SEQ ID NO: 2509784 - DNA, 25 bp, Homo sapien
cactgggaacttagcatacttgaga

SEQ ID NO: 2509785 - DNA, 25 bp, Homo sapien
tggagacagctcctatcattgggtc

SEQ ID NO: 2509786 - DNA, 25 bp, Homo sapien
gctgcttcgcagtttaaaaggcgca

SEQ ID NO: 2509787 - DNA, 25 bp, Homo sapien
tacaatggtaactgcgtggagtccc

SEQ ID NO: 2509788 - DNA, 25 bp, Homo sapien
agcacactgcagtagactggcaggg

SEQ ID NO: 2509789 - DNA, 25 bp, Homo sapien
gggaagagatcagctttcagtaagt

SEQ ID NO: 2509790 - DNA, 25 bp, Homo sapien
ttagcacactgcagtagactggcag

SEQ ID NO: 2509791 - DNA, 25 bp, Homo sapien
tcagctttcagtaagtcaaggctcc

SEQ ID NO: 2509792 - DNA, 25 bp, Homo sapien
ctggcgtctgctgctccatcatcac

SEQ ID NO: 2509793 - DNA, 25 bp, Homo sapien
ggcgtctgctgctccatcatcactg

SEQ ID NO: 2509794 - DNA, 25 bp, Homo sapien
ctgctgctccatcatcactgcatcc

SEQ ID NO: 2509795 - DNA, 25 bp, Homo sapien
gctgctccatcatcactgcatccat

SEQ ID NO: 2509796 - DNA, 25 bp, Homo sapien
cctctccttctgtgggtgagttctg

SEQ ID NO: 2509797 - DNA, 25 bp, Homo sapien
gacctgggcacactgagctcagcca

SEQ ID NO: 2509798 - DNA, 25 bp, Homo sapien
ccttctgtgggtgagttctggagaa

SEQ ID NO: 2509799 - DNA, 25 bp, Homo sapien
gttctggagaagacctgggcacact

SEQ ID NO: 2509800 - DNA, 25 bp, Homo sapien
aattaaggagacttcagcatggtgc

SEQ ID NO: 2509801 - DNA, 25 bp, Homo sapien
acaaagccacaaagggcatcaatat

SEQ ID NO: 2509802 - DNA, 25 bp, Homo sapien
gggagatgatcaaagacgacaaagc

SEQ ID NO: 2509803 - DNA, 25 bp, Homo sapien
agatgatcaaagacgacaaagccac

SEQ ID NO: 2509804 - DNA, 25 bp, Homo sapien
caaagccacaaagggcatcaatatg

SEQ ID NO: 2509805 - DNA, 25 bp, Homo sapien
tgtcactgaggacccgtgaactctg

SEQ ID NO: 2509806 - DNA, 25 bp, Homo sapien
aaaggacctattttcttggccagag

SEQ ID NO: 2509807 - DNA, 25 bp, Homo sapien
aaggcagctttttataggaagtgaa

SEQ ID NO: 2509808 - DNA, 25 bp, Homo sapien
tcatgtcactgaggacccgtgaact

SEQ ID NO: 2509809 - DNA, 25 bp, Homo sapien
agcagcagaggcggtggcagtcaag

SEQ ID NO: 2509810 - DNA, 25 bp, Homo sapien
agaggcggtggcagtcaagggagag

SEQ ID NO: 2509811 - DNA, 25 bp, Homo sapien
gagagcagcagaggcggtggcagtc

SEQ ID NO: 2509812 - DNA, 25 bp, Homo sapien
cagaggcggtggcagtcaagggaga

SEQ ID NO: 2509813 - DNA, 25 bp, Homo sapien
gcatctgttatcacaaccaaggcca

SEQ ID NO: 2509814 - DNA, 25 bp, Homo sapien
tggttggactcttgattcatctgca

SEQ ID NO: 2509815 - DNA, 25 bp, Homo sapien
catgaagagccacccttcataagag

SEQ ID NO: 2509816 - DNA, 25 bp, Homo sapien
tctttgctgcctggttggactcttg

SEQ ID NO: 2509817 - DNA, 25 bp, Homo sapien
tggcattcacaaatgactgagttct

SEQ ID NO: 2509818 - DNA, 25 bp, Homo sapien
ctggcattcacaaatgactgagttc

SEQ ID NO: 2509819 - DNA, 25 bp, Homo sapien
cattcacaaatgactgagttctcat

SEQ ID NO: 2509820 - DNA, 25 bp, Homo sapien
gcattcacaaatgactgagttctca

SEQ ID NO: 2509821 - DNA, 25 bp, Homo sapien
gcaaacattgtccttactatcctat

SEQ ID NO: 2509822 - DNA, 25 bp, Homo sapien
cttactatcctatgtctttgctcac

SEQ ID NO: 2509823 - DNA, 25 bp, Homo sapien
agcagcaaacattgtccttactatc

SEQ ID NO: 2509824 - DNA, 25 bp, Homo sapien
cattgtccttactatcctatgtctt

SEQ ID NO: 2509825 - DNA, 25 bp, Homo sapien
tctgatgatgtctcctctgaaccca

SEQ ID NO: 2509826 - DNA, 25 bp, Homo sapien
ctgatgatgtctcctctgaacccag

SEQ ID NO: 2509827 - DNA, 25 bp, Homo sapien
ggtttacacccaaagctgtctggta

SEQ ID NO: 2509828 - DNA, 25 bp, Homo sapien
tccggacattatggagcttgcccaa

SEQ ID NO: 2509829 - DNA, 25 bp, Homo sapien
tataatcaagtacaaggctccggac

SEQ ID NO: 2509830 - DNA, 25 bp, Homo sapien
gcaaggcgcaagagtggtttacacc

SEQ ID NO: 2509831 - DNA, 25 bp, Homo sapien
tggttgctccatgggctcagtgaaa

SEQ ID NO: 2509832 - DNA, 25 bp, Homo sapien
ccaggttgatggtagcctctggttg

SEQ ID NO: 2509833 - DNA, 25 bp, Homo sapien
gaaaacttcctctggactgtggtcc

SEQ ID NO: 2509834 - DNA, 25 bp, Homo sapien
tcttctctccaggttgatggtagcc

SEQ ID NO: 2509835 - DNA, 25 bp, Homo sapien
cagagaacctctggccattgatgtt

SEQ ID NO: 2509836 - DNA, 25 bp, Homo sapien
tagtgccttcctccagtaatgccaa

SEQ ID NO: 2509837 - DNA, 25 bp, Homo sapien
gaccacatagttcctagagaagtag

SEQ ID NO: 2509838 - DNA, 25 bp, Homo sapien
tgtctcggaccacatagttcctaga

SEQ ID NO: 2509839 - DNA, 25 bp, Homo sapien
tctctgtatgatgaaaaggattttc

SEQ ID NO: 2509840 - DNA, 25 bp, Homo sapien
ctgacatctctgtatgatgaaaagg

SEQ ID NO: 2509841 - DNA, 25 bp, Homo sapien
ccacaggtcaaatcctattacaaag

SEQ ID NO: 2509842 - DNA, 25 bp, Homo sapien
tacaaagaatgctgctactgctgac

SEQ ID NO: 2509843 - DNA, 25 bp, Homo sapien
ctactgagtacgtttggtggccact

SEQ ID NO: 2509844 - DNA, 25 bp, Homo sapien
aagaagtcctgaagtaatcccatag

SEQ ID NO: 2509845 - DNA, 25 bp, Homo sapien
cccagcttccccagtgcagataaaa

SEQ ID NO: 2509846 - DNA, 25 bp, Homo sapien
taacggaaggcatctaagaagtcct

SEQ ID NO: 2509847 - DNA, 25 bp, Homo sapien
tgtcacatataccaagaacaaagcc

SEQ ID NO: 2509848 - DNA, 25 bp, Homo sapien
gaacaaagccaactaaggtgcccaa

SEQ ID NO: 2509849 - DNA, 25 bp, Homo sapien
gggatccatgacaactcgcccctgg

SEQ ID NO: 2509850 - DNA, 25 bp, Homo sapien
gcttcaggaagttccatgagcctct

SEQ ID NO: 2509851 - DNA, 25 bp, Homo sapien
agtggtagctgtgtcccctgttgga

SEQ ID NO: 2509852 - DNA, 25 bp, Homo sapien
tggagcgcgtccatggaagcccttg

SEQ ID NO: 2509853 - DNA, 25 bp, Homo sapien
cccaatcacaagtccagtggtagct

SEQ ID NO: 2509854 - DNA, 25 bp, Homo sapien
gtgtcccctgttggagcgcgtccat

SEQ ID NO: 2509855 - DNA, 25 bp, Homo sapien
tgagatgtgcagatgaacagtcccc

SEQ ID NO: 2509856 - DNA, 25 bp, Homo sapien
ttttatcagctgtagaggtcccgaa

SEQ ID NO: 2509857 - DNA, 25 bp, Homo sapien
taatgaaatagtagcagctccaggc

SEQ ID NO: 2509858 - DNA, 25 bp, Homo sapien
tattggcttaaatcagagtcgggtc

SEQ ID NO: 2509859 - DNA, 25 bp, Homo sapien
ctgcggtaggagtgtggtatcttaa

SEQ ID NO: 2509860 - DNA, 25 bp, Homo sapien
gtatcttaaatagctgtaatgcgat

SEQ ID NO: 2509861 - DNA, 25 bp, Homo sapien
taggagtgtggtatcttaaatagct

SEQ ID NO: 2509862 - DNA, 25 bp, Homo sapien
gctgtaatgcgatatgggacaccat

SEQ ID NO: 2509863 - DNA, 25 bp, Homo sapien
tattaactcatttaggagaggcagg

SEQ ID NO: 2509864 - DNA, 25 bp, Homo sapien
ttttggacaccgaggctaggccagt

SEQ ID NO: 2509865 - DNA, 25 bp, Homo sapien
aaaagccatgctcttggcgggaaga

SEQ ID NO: 2509866 - DNA, 25 bp, Homo sapien
aacattagatgtgcctcctgagaga

SEQ ID NO: 2509867 - DNA, 25 bp, Homo sapien
aattgtgatgcattccacctaaccc

SEQ ID NO: 2509868 - DNA, 25 bp, Homo sapien
gactgcagtgtatcttgctttcaag

SEQ ID NO: 2509869 - DNA, 25 bp, Homo sapien
tcttttgaaggtggtagagagtcag

SEQ ID NO: 2509870 - DNA, 25 bp, Homo sapien
tctgaaaactctgttgctaaatgaa

SEQ ID NO: 2509871 - DNA, 25 bp, Homo sapien
gagttttcaagtcatggttcaattg

SEQ ID NO: 2509872 - DNA, 25 bp, Homo sapien
tgcttattgagttttcaagtcatgg

SEQ ID NO: 2509873 - DNA, 25 bp, Homo sapien
tattgagttttcaagtcatggttca

SEQ ID NO: 2509874 - DNA, 25 bp, Homo sapien
caagtcatggttcaattgcttcctc

SEQ ID NO: 2509875 - DNA, 25 bp, Homo sapien
aaaattgggttatgttacatcttcg

SEQ ID NO: 2509876 - DNA, 25 bp, Homo sapien
tttcagcctgtacagaatgctagag

SEQ ID NO: 2509877 - DNA, 25 bp, Homo sapien
attttgcaagtaagactttattaga

SEQ ID NO: 2509878 - DNA, 25 bp, Homo sapien
tgtacagaatgctagagtccaaatc

SEQ ID NO: 2509879 - DNA, 25 bp, Homo sapien
catacagcaagagttcattaactgc

SEQ ID NO: 2509880 - DNA, 25 bp, Homo sapien
acagcaagagttcattaactgcttc

SEQ ID NO: 2509881 - DNA, 25 bp, Homo sapien
catgcctgacatacagcaagagttc

SEQ ID NO: 2509882 - DNA, 25 bp, Homo sapien
gacatacagcaagagttcattaact

SEQ ID NO: 2509883 - DNA, 25 bp, Homo sapien
gcatgtactcatgaccatccactga

SEQ ID NO: 2509884 - DNA, 25 bp, Homo sapien
gccacttcctggcatgtactcatga

SEQ ID NO: 2509885 - DNA, 25 bp, Homo sapien
ccagggacctgttgacgaaagggca

SEQ ID NO: 2509886 - DNA, 25 bp, Homo sapien
ctgccgagccacttcctggcatgta

SEQ ID NO: 2509887 - DNA, 25 bp, Homo sapien
ccatcttggacattggattgaaggg

SEQ ID NO: 2509888 - DNA, 25 bp, Homo sapien
caaacactataactcttggcattaa

SEQ ID NO: 2509889 - DNA, 25 bp, Homo sapien
ccccaaacactataactcttggcat

SEQ ID NO: 2509890 - DNA, 25 bp, Homo sapien
ttccatcttggacattggattgaag

SEQ ID NO: 2509891 - DNA, 25 bp, Homo sapien
gggaagtgttgctatttcttacatt

SEQ ID NO: 2509892 - DNA, 25 bp, Homo sapien
tgggaagtgttgctatttcttacat

SEQ ID NO: 2509893 - DNA, 25 bp, Homo sapien
gatgggaagtgttgctatttcttac

SEQ ID NO: 2509894 - DNA, 25 bp, Homo sapien
gctgatgggaagtgttgctatttct

SEQ ID NO: 2509895 - DNA, 25 bp, Homo sapien
gggattccacaactacgcagggtag

SEQ ID NO: 2509896 - DNA, 25 bp, Homo sapien
tatgcctcctgtatgcaaggaccct

SEQ ID NO: 2509897 - DNA, 25 bp, Homo sapien
actgctgtcatctgagggattccac

SEQ ID NO: 2509898 - DNA, 25 bp, Homo sapien
taatggaggttcttgcaggtcttgg

SEQ ID NO: 2509899 - DNA, 25 bp, Homo sapien
ttttcctggttcttaacatccacaa

SEQ ID NO: 2509900 - DNA, 25 bp, Homo sapien
ttaaaatgtctacaggctctttcaa

SEQ ID NO: 2509901 - DNA, 25 bp, Homo sapien
ttaacatccacaagtctagcagcta

SEQ ID NO: 2509902 - DNA, 25 bp, Homo sapien
actgtttcaccaaatgaatcataaa

SEQ ID NO: 2509903 - DNA, 25 bp, Homo sapien
catcaggcttcttgtaaaacgttgc

SEQ ID NO: 2509904 - DNA, 25 bp, Homo sapien
taatatgaatgacgggctccatccc

SEQ ID NO: 2509905 - DNA, 25 bp, Homo sapien
gaaccacatttcttttagccacact

SEQ ID NO: 2509906 - DNA, 25 bp, Homo sapien
taaaacgttgctgtgaagtggttct

SEQ ID NO: 2509907 - DNA, 25 bp, Homo sapien
gagccatgtaactgacagcagaaag

SEQ ID NO: 2509908 - DNA, 25 bp, Homo sapien
ctgtcaatggagaatgagccatgta

SEQ ID NO: 2509909 - DNA, 25 bp, Homo sapien
ggagaatgagccatgtaactgacag

SEQ ID NO: 2509910 - DNA, 25 bp, Homo sapien
tcaatggagaatgagccatgtaact

SEQ ID NO: 2509911 - DNA, 25 bp, Homo sapien
aggaaacaaaagcagctgctgtctc

SEQ ID NO: 2509912 - DNA, 25 bp, Homo sapien
tcttgacagcatatgtgcacaggca

SEQ ID NO: 2509913 - DNA, 25 bp, Homo sapien
tgtcttccctacttggtctgaggcc

SEQ ID NO: 2509914 - DNA, 25 bp, Homo sapien
tctgggctttcctcggcatccgcga

SEQ ID NO: 2509915 - DNA, 25 bp, Homo sapien
aacaaaatctaagctaccagaaagg

SEQ ID NO: 2509916 - DNA, 25 bp, Homo sapien
atctaagctaccagaaaggtggtcc

SEQ ID NO: 2509917 - DNA, 25 bp, Homo sapien
aaaggtggtccatggcttctatagg

SEQ ID NO: 2509918 - DNA, 25 bp, Homo sapien
gcttctatagggaacctggaaatca

SEQ ID NO: 2509919 - DNA, 25 bp, Homo sapien
ccccatatccccagaatagctctcc

SEQ ID NO: 2509920 - DNA, 25 bp, Homo sapien
gctgctgattcactgcttggatgag

SEQ ID NO: 2509921 - DNA, 25 bp, Homo sapien
tgggggtgtctaggagttcttcctc

SEQ ID NO: 2509922 - DNA, 25 bp, Homo sapien
ggcctctcaaagtcaatacccccat

SEQ ID NO: 2509923 - DNA, 25 bp, Homo sapien
ttcgctaggttctttttcactctag

SEQ ID NO: 2509924 - DNA, 25 bp, Homo sapien
tcattctttggttcgctaggttctt

SEQ ID NO: 2509925 - DNA, 25 bp, Homo sapien
cgctaggttctttttcactctagcc

SEQ ID NO: 2509926 - DNA, 25 bp, Homo sapien
tcatttatcattctttggttcgcta

SEQ ID NO: 2509927 - DNA, 25 bp, Homo sapien
taatgagtccagaatgagtccatgg

SEQ ID NO: 2509928 - DNA, 25 bp, Homo sapien
ccaacaggttataggaggagctact

SEQ ID NO: 2509929 - DNA, 25 bp, Homo sapien
tacccagagcctattaatacagagc

SEQ ID NO: 2509930 - DNA, 25 bp, Homo sapien
agcactgtgtaagaaagtgggcccc

SEQ ID NO: 2509931 - DNA, 25 bp, Homo sapien
tgtttcctaatctgagaccatctcc

SEQ ID NO: 2509932 - DNA, 25 bp, Homo sapien
tattcttctacttccgttgcactgg

SEQ ID NO: 2509933 - DNA, 25 bp, Homo sapien
tgaatccctaattcccactctaatg

SEQ ID NO: 2509934 - DNA, 25 bp, Homo sapien
cactctaatgcaggacttgtcctcc

SEQ ID NO: 2509935 - DNA, 25 bp, Homo sapien
tgagcatttaggcgccatagatatc

SEQ ID NO: 2509936 - DNA, 25 bp, Homo sapien
ctgagcatttaggcgccatagatat

SEQ ID NO: 2509937 - DNA, 25 bp, Homo sapien
gcatttaggcgccatagatatcatc

SEQ ID NO: 2509938 - DNA, 25 bp, Homo sapien
gagcatttaggcgccatagatatca

SEQ ID NO: 2509939 - DNA, 25 bp, Homo sapien
gagttatttgggctgcgtgctttat

SEQ ID NO: 2509940 - DNA, 25 bp, Homo sapien
tccattagtgggatcagccctgttt

SEQ ID NO: 2509941 - DNA, 25 bp, Homo sapien
tggcaggctgactttagtgtgagct

SEQ ID NO: 2509942 - DNA, 25 bp, Homo sapien
ttccaagccttttccattagtggga

SEQ ID NO: 2509943 - DNA, 25 bp, Homo sapien
ttctttccacaagatctagtttgct

SEQ ID NO: 2509944 - DNA, 25 bp, Homo sapien
tccacaagatctagtttgctgaata

SEQ ID NO: 2509945 - DNA, 25 bp, Homo sapien
agatctagtttgctgaatatacatg

SEQ ID NO: 2509946 - DNA, 25 bp, Homo sapien
caagatctagtttgctgaatataca

SEQ ID NO: 2509947 - DNA, 25 bp, Homo sapien
gggcaatggcctttgcagacgtttg

SEQ ID NO: 2509948 - DNA, 25 bp, Homo sapien
gacgtttgcatcctacatagtagtg

SEQ ID NO: 2509949 - DNA, 25 bp, Homo sapien
ttgcagacgtttgcatcctacatag

SEQ ID NO: 2509950 - DNA, 25 bp, Homo sapien
ggcctttgcagacgtttgcatccta

SEQ ID NO: 2509951 - DNA, 25 bp, Homo sapien
taaacactagactcatacttagcct

SEQ ID NO: 2509952 - DNA, 25 bp, Homo sapien
tctcacattgaaaagtcagcacaaa

SEQ ID NO: 2509953 - DNA, 25 bp, Homo sapien
tgctctacatacttgataaatgggt

SEQ ID NO: 2509954 - DNA, 25 bp, Homo sapien
acttagcctaggaagatgctgatgc

SEQ ID NO: 2509955 - DNA, 25 bp, Homo sapien
tccacgtgaagaggcactgctgagt

SEQ ID NO: 2509956 - DNA, 25 bp, Homo sapien
tgagtgtgatactcgcgacctcgtt

SEQ ID NO: 2509957 - DNA, 25 bp, Homo sapien
aaatatttccatccacgtgaagagg

SEQ ID NO: 2509958 - DNA, 25 bp, Homo sapien
tgatactcgcgacctcgttccagct

SEQ ID NO: 2509959 - DNA, 25 bp, Homo sapien
tgtgtgtgcatagttctgccccttt

SEQ ID NO: 2509960 - DNA, 25 bp, Homo sapien
atttgttcgattttggacttgggca

SEQ ID NO: 2509961 - DNA, 25 bp, Homo sapien
gaatctggtctgtgagtttatgctc

SEQ ID NO: 2509962 - DNA, 25 bp, Homo sapien
ttatgctcttgattgtctttggcca

SEQ ID NO: 2509963 - DNA, 25 bp, Homo sapien
gtcctcttgtttgcacagataaaac

SEQ ID NO: 2509964 - DNA, 25 bp, Homo sapien
gatgatagcactccttatgttttgt

SEQ ID NO: 2509965 - DNA, 25 bp, Homo sapien
aagtcctcttgtttgcacagataaa

SEQ ID NO: 2509966 - DNA, 25 bp, Homo sapien
tgtggctggatgatagcactcctta

SEQ ID NO: 2509967 - DNA, 25 bp, Homo sapien
gatctgattgaaattgctgtgaata

SEQ ID NO: 2509968 - DNA, 25 bp, Homo sapien
agggtagatctgattgaaattgctg

SEQ ID NO: 2509969 - DNA, 25 bp, Homo sapien
tttttacacaactgcctagattctc

SEQ ID NO: 2509970 - DNA, 25 bp, Homo sapien
atttaagtttgaaagggtagatctg

SEQ ID NO: 2509971 - DNA, 25 bp, Homo sapien
gcacctttggtctagaaacagttta

SEQ ID NO: 2509972 - DNA, 25 bp, Homo sapien
gatttccttgacagcagttttgcac

SEQ ID NO: 2509973 - DNA, 25 bp, Homo sapien
tccatacaccaaaaccctgttcagg

SEQ ID NO: 2509974 - DNA, 25 bp, Homo sapien
cagcagttttgcacctttggtctag

SEQ ID NO: 2509975 - DNA, 25 bp, Homo sapien
cagtctgccctctagtgcagataat

SEQ ID NO: 2509976 - DNA, 25 bp, Homo sapien
ttgttatagtaacggcagatgtgcc

SEQ ID NO: 2509977 - DNA, 25 bp, Homo sapien
tatagtaacggcagatgtgccttct

SEQ ID NO: 2509978 - DNA, 25 bp, Homo sapien
tccgtagacgctgcctttctgttgt

SEQ ID NO: 2509979 - DNA, 25 bp, Homo sapien
aaccaattgtgttgggtttcttgct

SEQ ID NO: 2509980 - DNA, 25 bp, Homo sapien
tgttgggtttcttgctctgaagaaa

SEQ ID NO: 2509981 - DNA, 25 bp, Homo sapien
accaattgtgttgggtttcttgctc

SEQ ID NO: 2509982 - DNA, 25 bp, Homo sapien
ttgtgttgggtttcttgctctgaag

SEQ ID NO: 2509983 - DNA, 25 bp, Homo sapien
tgctgaatttcactaaattgaaaac

SEQ ID NO: 2509984 - DNA, 25 bp, Homo sapien
aatcttgggtgaacgttataaatat

SEQ ID NO: 2509985 - DNA, 25 bp, Homo sapien
gagaatgaagtagattgtatggtat

SEQ ID NO: 2509986 - DNA, 25 bp, Homo sapien
tattgtcagcatattaaatcttggg

SEQ ID NO: 2509987 - DNA, 25 bp, Homo sapien
agacagtggaacatttctagagcct

SEQ ID NO: 2509988 - DNA, 25 bp, Homo sapien
tcatcgtagcagagaaccagtgctt

SEQ ID NO: 2509989 - DNA, 25 bp, Homo sapien
tctcagtgacatagacaaaagaggc

SEQ ID NO: 2509990 - DNA, 25 bp, Homo sapien
cttagtccactccttagtgccagga

SEQ ID NO: 2509991 - DNA, 25 bp, Homo sapien
tgtgcagccaatacactctgaaagc

SEQ ID NO: 2509992 - DNA, 25 bp, Homo sapien
gctgatagtctgctccgctttccac

SEQ ID NO: 2509993 - DNA, 25 bp, Homo sapien
tctggttgctgatagtctgctccgc

SEQ ID NO: 2509994 - DNA, 25 bp, Homo sapien
agcacccggactcccactgtgcacc

SEQ ID NO: 2509995 - DNA, 25 bp, Homo sapien
ctaacagagcatgtcagcatcctta

SEQ ID NO: 2509996 - DNA, 25 bp, Homo sapien
gcatgtcagcatccttaccatcctt

SEQ ID NO: 2509997 - DNA, 25 bp, Homo sapien
cagagcatgtcagcatccttaccat

SEQ ID NO: 2509998 - DNA, 25 bp, Homo sapien
tgtcagcatccttaccatccttctt

SEQ ID NO: 2509999 - DNA, 25 bp, Homo sapien
tttaattggcccttagctcctgagg

SEQ ID NO: 2510000 - DNA, 25 bp, Homo sapien
ttgtgcgttggatgaaatttctgct

SEQ ID NO: 2510001 - DNA, 25 bp, Homo sapien
gaaagaactttgtgcgttggatgaa

SEQ ID NO: 2510002 - DNA, 25 bp, Homo sapien
tgttgctttaattggcccttagctc

SEQ ID NO: 2510003 - DNA, 25 bp, Homo sapien
aggctaaagctcatacagttgtctg

SEQ ID NO: 2510004 - DNA, 25 bp, Homo sapien
ggctaaagctcatacagttgtctgc

SEQ ID NO: 2510005 - DNA, 25 bp, Homo sapien
aaacatgttgataaggacttcttgt

SEQ ID NO: 2510006 - DNA, 25 bp, Homo sapien
gaaacatgttgataaggacttcttg

SEQ ID NO: 2510007 - DNA, 25 bp, Homo sapien
aacatgttgataaggacttcttgta

SEQ ID NO: 2510008 - DNA, 25 bp, Homo sapien
ccttttattggtgcaatataatctg

SEQ ID NO: 2510009 - DNA, 25 bp, Homo sapien
ctaagtaggcagtgacttttcttgt

SEQ ID NO: 2510010 - DNA, 25 bp, Homo sapien
ttcctttagcttgttcactgaactg

SEQ ID NO: 2510011 - DNA, 25 bp, Homo sapien
gaatgcatctagttaaatccacagg

SEQ ID NO: 2510012 - DNA, 25 bp, Homo sapien
attgacttggcgtgggattctcctc

SEQ ID NO: 2510013 - DNA, 25 bp, Homo sapien
tccacactggtagcccaagcagtga

SEQ ID NO: 2510014 - DNA, 25 bp, Homo sapien
aagacagcatgttggcagattccaa

SEQ ID NO: 2510015 - DNA, 25 bp, Homo sapien
gatgctagaactctgatacagagat

SEQ ID NO: 2510016 - DNA, 25 bp, Homo sapien
tcaggagacctgagctgagtccgac

SEQ ID NO: 2510017 - DNA, 25 bp, Homo sapien
tacagagatcaggagacctgagctg

SEQ ID NO: 2510018 - DNA, 25 bp, Homo sapien
tctgatacagagatcaggagacctg

SEQ ID NO: 2510019 - DNA, 25 bp, Homo sapien
aaaagccagcttatcttcttgattt

SEQ ID NO: 2510020 - DNA, 25 bp, Homo sapien
aatagcattgcttccacgccgacca

SEQ ID NO: 2510021 - DNA, 25 bp, Homo sapien
gatttccctgtttcgggtaatagca

SEQ ID NO: 2510022 - DNA, 25 bp, Homo sapien
ttccaaatgccttgtcagcatttct

SEQ ID NO: 2510023 - DNA, 25 bp, Homo sapien
gaggcagccactatactgttctcaa

SEQ ID NO: 2510024 - DNA, 25 bp, Homo sapien
tatggaagggccagtttgggaagag

SEQ ID NO: 2510025 - DNA, 25 bp, Homo sapien
aaagccacccctattactgcttcca

SEQ ID NO: 2510026 - DNA, 25 bp, Homo sapien
tgcagatatggaagggccagtttgg

SEQ ID NO: 2510027 - DNA, 25 bp, Homo sapien
tactccagcactgaataccttggga

SEQ ID NO: 2510028 - DNA, 25 bp, Homo sapien
gcatgaattccggtagtcttgtgca

SEQ ID NO: 2510029 - DNA, 25 bp, Homo sapien
tggcctgtcaggtgttgcagcttca

SEQ ID NO: 2510030 - DNA, 25 bp, Homo sapien
tgtcgtgtcatctaggtagttcgga

SEQ ID NO: 2510031 - DNA, 25 bp, Homo sapien
taagttgcgatcatcagaaatcttg

SEQ ID NO: 2510032 - DNA, 25 bp, Homo sapien
agctttcatgccaaacccgtattcg

SEQ ID NO: 2510033 - DNA, 25 bp, Homo sapien
gccaaacccgtattcgctctctaat

SEQ ID NO: 2510034 - DNA, 25 bp, Homo sapien
gattccacatgagctttcatgccaa

SEQ ID NO: 2510035 - DNA, 25 bp, Homo sapien
ggatctgctttgcaattgccaagcg

SEQ ID NO: 2510036 - DNA, 25 bp, Homo sapien
tgtcgccttcagtcgcaggctggtt

SEQ ID NO: 2510037 - DNA, 25 bp, Homo sapien
ttgccaagcgctaaggcacaagctg

SEQ ID NO: 2510038 - DNA, 25 bp, Homo sapien
ggtgcctgtgaaaccggcaggctct

SEQ ID NO: 2510039 - DNA, 25 bp, Homo sapien
tcttctggcttgaaaattctttacg

SEQ ID NO: 2510040 - DNA, 25 bp, Homo sapien
ttaggtgatgtcaaaaggtctcttc

SEQ ID NO: 2510041 - DNA, 25 bp, Homo sapien
aggtgatgtcaaaaggtctcttctg

SEQ ID NO: 2510042 - DNA, 25 bp, Homo sapien
ctggcttgaaaattctttacgaagt

SEQ ID NO: 2510043 - DNA, 25 bp, Homo sapien
caaaagttccatgcttcggcgtaca

SEQ ID NO: 2510044 - DNA, 25 bp, Homo sapien
tctaaaggagccaataagcatgcct

SEQ ID NO: 2510045 - DNA, 25 bp, Homo sapien
gcatgcctatattattgtaatcgca

SEQ ID NO: 2510046 - DNA, 25 bp, Homo sapien
tgtaatcgcacttattcaaccaatg

SEQ ID NO: 2510047 - DNA, 25 bp, Homo sapien
aaggagctaggactacaggtgcaca

SEQ ID NO: 2510048 - DNA, 25 bp, Homo sapien
cagtggcacagtcatagcccgctgc

SEQ ID NO: 2510049 - DNA, 25 bp, Homo sapien
acagtcatagcccgctgcagcctca

SEQ ID NO: 2510050 - DNA, 25 bp, Homo sapien
tggcacagtcatagcccgctgcagc

SEQ ID NO: 2510051 - DNA, 25 bp, Homo sapien
tgcatttgaccccattgatagctcc

SEQ ID NO: 2510052 - DNA, 25 bp, Homo sapien
ttccactgtaccataccctctgggt

SEQ ID NO: 2510053 - DNA, 25 bp, Homo sapien
tactgatgaaccagtagttcctgaa

SEQ ID NO: 2510054 - DNA, 25 bp, Homo sapien
tatttcctagatctctctgtgcatt

SEQ ID NO: 2510055 - DNA, 25 bp, Homo sapien
tacccagtagctccatacaagtgag

SEQ ID NO: 2510056 - DNA, 25 bp, Homo sapien
taaacataagcctataagcactcag

SEQ ID NO: 2510057 - DNA, 25 bp, Homo sapien
cactgccatcgaggtcaatttgact

SEQ ID NO: 2510058 - DNA, 25 bp, Homo sapien
gcctcaaagagttgggacttaaaca

SEQ ID NO: 2510059 - DNA, 25 bp, Homo sapien
catttcattcacagcaggatggcag

SEQ ID NO: 2510060 - DNA, 25 bp, Homo sapien
cagcaataagactgcgtggctacat

SEQ ID NO: 2510061 - DNA, 25 bp, Homo sapien
gaaacctctattgtattccagttgg

SEQ ID NO: 2510062 - DNA, 25 bp, Homo sapien
caatgtgaagaaggtctgggatgac

SEQ ID NO: 2510063 - DNA, 25 bp, Homo sapien
ggaaaaacattagccctgctccctg

SEQ ID NO: 2510064 - DNA, 25 bp, Homo sapien
cactctcttgtgttggatgtctttt

SEQ ID NO: 2510065 - DNA, 25 bp, Homo sapien
tgggctgtggaattgtctttttgga

SEQ ID NO: 2510066 - DNA, 25 bp, Homo sapien
tgctccctgaatagtaatgggctgt

SEQ ID NO: 2510067 - DNA, 25 bp, Homo sapien
gccaggatctgcaatacaaggcaca

SEQ ID NO: 2510068 - DNA, 25 bp, Homo sapien
ctgccaggatctgcaatacaaggca

SEQ ID NO: 2510069 - DNA, 25 bp, Homo sapien
ccaggatctgcaatacaaggcacac

SEQ ID NO: 2510070 - DNA, 25 bp, Homo sapien
tgccaggatctgcaatacaaggcac

SEQ ID NO: 2510071 - DNA, 25 bp, Homo sapien
tggcctcaagtgatggctcactcct

SEQ ID NO: 2510072 - DNA, 25 bp, Homo sapien
gagagcaatggtcccatctcaactc

SEQ ID NO: 2510073 - DNA, 25 bp, Homo sapien
gagcaatggtcccatctcaactcag

SEQ ID NO: 2510074 - DNA, 25 bp, Homo sapien
caatggtcccatctcaactcagtgc

SEQ ID NO: 2510075 - DNA, 25 bp, Homo sapien
caaagtgtctttacaagtgtcgcag

SEQ ID NO: 2510076 - DNA, 25 bp, Homo sapien
taattgatcacgaggtaggcacact

SEQ ID NO: 2510077 - DNA, 25 bp, Homo sapien
gcaggtgcgagcttccaaagtgtct

SEQ ID NO: 2510078 - DNA, 25 bp, Homo sapien
gttcaagcgcttggtaaagtcacct

SEQ ID NO: 2510079 - DNA, 25 bp, Homo sapien
gaaattctaattgtgctactatcgc

SEQ ID NO: 2510080 - DNA, 25 bp, Homo sapien
agttagcatagggaggaaattctaa

SEQ ID NO: 2510081 - DNA, 25 bp, Homo sapien
agaattcacataactggccgggcgc

SEQ ID NO: 2510082 - DNA, 25 bp, Homo sapien
tgttcagcaaggtaagcatgagaaa

SEQ ID NO: 2510083 - DNA, 25 bp, Homo sapien
gacctatgttcacttcatggataac

SEQ ID NO: 2510084 - DNA, 25 bp, Homo sapien
gctgtatagacctatgttcacttca

SEQ ID NO: 2510085 - DNA, 25 bp, Homo sapien
caattgctgtatagacctatgttca

SEQ ID NO: 2510086 - DNA, 25 bp, Homo sapien
cacttcatggataacatttgctcta

SEQ ID NO: 2510087 - DNA, 25 bp, Homo sapien
tattcttggttccaaatcaatcttg

SEQ ID NO: 2510088 - DNA, 25 bp, Homo sapien
gtcactcctcggaaagcaatgcaag

SEQ ID NO: 2510089 - DNA, 25 bp, Homo sapien
agcaatgcaagataataagtagtat

SEQ ID NO: 2510090 - DNA, 25 bp, Homo sapien
ctaggaactactgtctgagatctga

SEQ ID NO: 2510091 - DNA, 25 bp, Homo sapien
gaaactggaagctctcggaatctaa

SEQ ID NO: 2510092 - DNA, 25 bp, Homo sapien
tctgtgacacgtatgagaaaggaac

SEQ ID NO: 2510093 - DNA, 25 bp, Homo sapien
cagctggtgacgcatgtcttcctga

SEQ ID NO: 2510094 - DNA, 25 bp, Homo sapien
gattgctttcctgctccgagacagc

SEQ ID NO: 2510095 - DNA, 25 bp, Homo sapien
tgtagaaatgaactcttgtcagagt

SEQ ID NO: 2510096 - DNA, 25 bp, Homo sapien
agatgtgtagaaatgaactcttgtc

SEQ ID NO: 2510097 - DNA, 25 bp, Homo sapien
taaagagtgagaagattagtgatac

SEQ ID NO: 2510098 - DNA, 25 bp, Homo sapien
gaaatgaactcttgtcagagtttca

SEQ ID NO: 2510099 - DNA, 25 bp, Homo sapien
tgttagggtgattaacccttctgaa

SEQ ID NO: 2510100 - DNA, 25 bp, Homo sapien
aaaagccagagctgaattattctgc

SEQ ID NO: 2510101 - DNA, 25 bp, Homo sapien
caaacatcgagcaggtcgtatgtca

SEQ ID NO: 2510102 - DNA, 25 bp, Homo sapien
cacttctgagtggtatgctgcttta

SEQ ID NO: 2510103 - DNA, 25 bp, Homo sapien
ctccatggaaatgccgacagtaaat

SEQ ID NO: 2510104 - DNA, 25 bp, Homo sapien
catggaaatgccgacagtaaattaa

SEQ ID NO: 2510105 - DNA, 25 bp, Homo sapien
ctttcctccatggaaatgccgacag

SEQ ID NO: 2510106 - DNA, 25 bp, Homo sapien
aaatgccgacagtaaattaacatcc

SEQ ID NO: 2510107 - DNA, 25 bp, Homo sapien
caaacaggtactaagatcccgactc

SEQ ID NO: 2510108 - DNA, 25 bp, Homo sapien
gcaagaggcttgaaataattcctct

SEQ ID NO: 2510109 - DNA, 25 bp, Homo sapien
tatttaggtgtagagaaagcttaac

SEQ ID NO: 2510110 - DNA, 25 bp, Homo sapien
gcttaacgcttacatagtcaaacag

SEQ ID NO: 2510111 - DNA, 25 bp, Homo sapien
tgtctttccgtatgtgtttccaagt

SEQ ID NO: 2510112 - DNA, 25 bp, Homo sapien
ggtgaattcaatggctgaatgttgc

SEQ ID NO: 2510113 - DNA, 25 bp, Homo sapien
tgtttttggtgaattcaatggctga

SEQ ID NO: 2510114 - DNA, 25 bp, Homo sapien
gtcttctgtctttccgtatgtgttt

SEQ ID NO: 2510115 - DNA, 25 bp, Homo sapien
aaataagttttgcatccgaccaaga

SEQ ID NO: 2510116 - DNA, 25 bp, Homo sapien
ccatcagtatagagaacgttagcct

SEQ ID NO: 2510117 - DNA, 25 bp, Homo sapien
aagtctcatgtagggatggaagcca

SEQ ID NO: 2510118 - DNA, 25 bp, Homo sapien
tgtcacaattcaagtgtgcttcctg

SEQ ID NO: 2510119 - DNA, 25 bp, Homo sapien
tcgggtaggcagcattcaatccttc

SEQ ID NO: 2510120 - DNA, 25 bp, Homo sapien
tgccttctttcgccacctgttgagg

SEQ ID NO: 2510121 - DNA, 25 bp, Homo sapien
gcagcattcaatccttctatgcctt

SEQ ID NO: 2510122 - DNA, 25 bp, Homo sapien
cagtcgggtaggcagcattcaatcc

SEQ ID NO: 2510123 - DNA, 25 bp, Homo sapien
acctttatcagcaaagtcacccaca

SEQ ID NO: 2510124 - DNA, 25 bp, Homo sapien
cctttatcagcaaagtcacccacat

SEQ ID NO: 2510125 - DNA, 25 bp, Homo sapien
ctaagactcttgcacaatctggctc

SEQ ID NO: 2510126 - DNA, 25 bp, Homo sapien
tctaagactcttgcacaatctggct

SEQ ID NO: 2510127 - DNA, 25 bp, Homo sapien
tatctaagactcttgcacaatctgg

SEQ ID NO: 2510128 - DNA, 25 bp, Homo sapien
ttagcttgttccagaatcttttgtt

SEQ ID NO: 2510129 - DNA, 25 bp, Homo sapien
agcaagataaaaggcttctccactt

SEQ ID NO: 2510130 - DNA, 25 bp, Homo sapien
taataaggaggtttgccggtgcagc

SEQ ID NO: 2510131 - DNA, 25 bp, Homo sapien
ccttaatgagtgattgccccggatg

SEQ ID NO: 2510132 - DNA, 25 bp, Homo sapien
gacattccccgaacaaagaaagcca

SEQ ID NO: 2510133 - DNA, 25 bp, Homo sapien
atgaacaaacaaattggcgattttg

SEQ ID NO: 2510134 - DNA, 25 bp, Homo sapien
ctgggtaatgaacaaacaaattggc

SEQ ID NO: 2510135 - DNA, 25 bp, Homo sapien
ggtaatgaacaaacaaattggcgat

SEQ ID NO: 2510136 - DNA, 25 bp, Homo sapien
gaacaaacaaattggcgattttgta

SEQ ID NO: 2510137 - DNA, 25 bp, Homo sapien
tgagggaatcaattgacctatgcat

SEQ ID NO: 2510138 - DNA, 25 bp, Homo sapien
aaggggatgagggaatcaattgacc

SEQ ID NO: 2510139 - DNA, 25 bp, Homo sapien
gggatgagggaatcaattgacctat

SEQ ID NO: 2510140 - DNA, 25 bp, Homo sapien
gatgagggaatcaattgacctatgc

SEQ ID NO: 2510141 - DNA, 25 bp, Homo sapien
atgtctggcccttagcattcatgag

SEQ ID NO: 2510142 - DNA, 25 bp, Homo sapien
cggaaatcaatgtctggcccttagc

SEQ ID NO: 2510143 - DNA, 25 bp, Homo sapien
caataccaatctcagtgtgcacatg

SEQ ID NO: 2510144 - DNA, 25 bp, Homo sapien
ctccaaaacggaaatcaatgtctgg

SEQ ID NO: 2510145 - DNA, 25 bp, Homo sapien
cttccgtcctaaactgagaaatcct

SEQ ID NO: 2510146 - DNA, 25 bp, Homo sapien
tctagcttccgtcctaaactgagaa

SEQ ID NO: 2510147 - DNA, 25 bp, Homo sapien
tagcttccgtcctaaactgagaaat

SEQ ID NO: 2510148 - DNA, 25 bp, Homo sapien
cttctagcttccgtcctaaactgag

SEQ ID NO: 2510149 - DNA, 25 bp, Homo sapien
ggagatgcctcatcaacagccacat

SEQ ID NO: 2510150 - DNA, 25 bp, Homo sapien
gagtaatcatctttagttgtgggag

SEQ ID NO: 2510151 - DNA, 25 bp, Homo sapien
taaagcaggtatcatggagaatgca

SEQ ID NO: 2510152 - DNA, 25 bp, Homo sapien
gtggaggatgagaacgatcaccatt

SEQ ID NO: 2510153 - DNA, 25 bp, Homo sapien
tgggctagcataccaattagaggcc

SEQ ID NO: 2510154 - DNA, 25 bp, Homo sapien
tctgtccctgccagttactgaatgc

SEQ ID NO: 2510155 - DNA, 25 bp, Homo sapien
atatgtgatgcattcccttctaaac

SEQ ID NO: 2510156 - DNA, 25 bp, Homo sapien
cagatagcttttgcgtgggctagca

SEQ ID NO: 2510157 - DNA, 25 bp, Homo sapien
gctaaactgtgagcatttgtcttca

SEQ ID NO: 2510158 - DNA, 25 bp, Homo sapien
tcattaaccaaatctgtagctaaac

SEQ ID NO: 2510159 - DNA, 25 bp, Homo sapien
caaatctgtagctaaactgtgagca

SEQ ID NO: 2510160 - DNA, 25 bp, Homo sapien
tctgtagctaaactgtgagcatttg

SEQ ID NO: 2510161 - DNA, 25 bp, Homo sapien
gcaaaaatagatcttcccaacagga

SEQ ID NO: 2510162 - DNA, 25 bp, Homo sapien
caatggaaacataactgttactgca

SEQ ID NO: 2510163 - DNA, 25 bp, Homo sapien
caacaggacataaatcagaagcgct

SEQ ID NO: 2510164 - DNA, 25 bp, Homo sapien
gctgaccagacgtgaccacgaaaat

SEQ ID NO: 2510165 - DNA, 25 bp, Homo sapien
tgctgctgactagccaaggggtctc

SEQ ID NO: 2510166 - DNA, 25 bp, Homo sapien
cacatcttgtgatataagatcaggc

SEQ ID NO: 2510167 - DNA, 25 bp, Homo sapien
tctccatctgacttgggccctagga

SEQ ID NO: 2510168 - DNA, 25 bp, Homo sapien
cctaggaggtacactgggaagtcca

SEQ ID NO: 2510169 - DNA, 25 bp, Homo sapien
tttacaattccaataatgtgttctg

SEQ ID NO: 2510170 - DNA, 25 bp, Homo sapien
cttttacaattccaataatgtgttc

SEQ ID NO: 2510171 - DNA, 25 bp, Homo sapien
attccaataatgtgttctgcccctt

SEQ ID NO: 2510172 - DNA, 25 bp, Homo sapien
caataatgtgttctgccccttcatc

SEQ ID NO: 2510173 - DNA, 25 bp, Homo sapien
atcaggatctctactgaatccttgc

SEQ ID NO: 2510174 - DNA, 25 bp, Homo sapien
tacattgtcttgagctgccttcagg

SEQ ID NO: 2510175 - DNA, 25 bp, Homo sapien
tgccaagaagcaacgtgaaatgtgt

SEQ ID NO: 2510176 - DNA, 25 bp, Homo sapien
gttctcagaaccatatccctccttg

SEQ ID NO: 2510177 - DNA, 25 bp, Homo sapien
aattctggagcaaattctgtttctc

SEQ ID NO: 2510178 - DNA, 25 bp, Homo sapien
caaatgcaggacttcagggcttgtg

SEQ ID NO: 2510179 - DNA, 25 bp, Homo sapien
cataaagctgtgatggagacaccta

SEQ ID NO: 2510180 - DNA, 25 bp, Homo sapien
tgtctgcccaagataaatgcacgtg

SEQ ID NO: 2510181 - DNA, 25 bp, Homo sapien
tctgacttgaaagcgagctcacatt

SEQ ID NO: 2510182 - DNA, 25 bp, Homo sapien
ctaagaagcatggagcccctttgct

SEQ ID NO: 2510183 - DNA, 25 bp, Homo sapien
ctgtaaaggccattgctaagaagca

SEQ ID NO: 2510184 - DNA, 25 bp, Homo sapien
tcctgcttgaaattgatgccctttc

SEQ ID NO: 2510185 - DNA, 25 bp, Homo sapien
ctgttgtccatggcagggatgtgtc

SEQ ID NO: 2510186 - DNA, 25 bp, Homo sapien
ctgctccctttggaggatgaatggg

SEQ ID NO: 2510187 - DNA, 25 bp, Homo sapien
cataaaagtgctcctggaagtcacc

SEQ ID NO: 2510188 - DNA, 25 bp, Homo sapien
gatgaatggggtaccgcaaaggaaa

SEQ ID NO: 2510189 - DNA, 25 bp, Homo sapien
tttccaaagggtcataaaagtgctc

SEQ ID NO: 2510190 - DNA, 25 bp, Homo sapien
cagtctctatgttcaagaagctcaa

SEQ ID NO: 2510191 - DNA, 25 bp, Homo sapien
aatgtaacccagtctctatgttcaa

SEQ ID NO: 2510192 - DNA, 25 bp, Homo sapien
atgcctctcatgtgctcgtcattga

SEQ ID NO: 2510193 - DNA, 25 bp, Homo sapien
tcgtcattgaggtggaccccagatt

SEQ ID NO: 2510194 - DNA, 25 bp, Homo sapien
tacgtgcaaggccagtgtaaatccc

SEQ ID NO: 2510195 - DNA, 25 bp, Homo sapien
gattaacgctgatgggagccagtca

SEQ ID NO: 2510196 - DNA, 25 bp, Homo sapien
aaagtactgccatttgccttgcgag

SEQ ID NO: 2510197 - DNA, 25 bp, Homo sapien
gcataactgatcaaggaagctggga

SEQ ID NO: 2510198 - DNA, 25 bp, Homo sapien
tcagggtgcatgaagcccccgtctg

SEQ ID NO: 2510199 - DNA, 25 bp, Homo sapien
gcactgtcagggtgcatgaagcccc

SEQ ID NO: 2510200 - DNA, 25 bp, Homo sapien
atggcactgtcagggtgcatgaagc

SEQ ID NO: 2510201 - DNA, 25 bp, Homo sapien
agggtgcatgaagcccccgtctgta

SEQ ID NO: 2510202 - DNA, 25 bp, Homo sapien
catggggtctcccacaaacacaacg

SEQ ID NO: 2510203 - DNA, 25 bp, Homo sapien
gtctcccacaaacacaacgttaggc

SEQ ID NO: 2510204 - DNA, 25 bp, Homo sapien
cacaaacacaacgttaggctttttg

SEQ ID NO: 2510205 - DNA, 25 bp, Homo sapien
ctcccacaaacacaacgttaggctt

SEQ ID NO: 2510206 - DNA, 25 bp, Homo sapien
ttctacactcacgtagagagtccat

SEQ ID NO: 2510207 - DNA, 25 bp, Homo sapien
gatatccatctgtcgtctccttgaa

SEQ ID NO: 2510208 - DNA, 25 bp, Homo sapien
tgagtcggcttgattcattctacac

SEQ ID NO: 2510209 - DNA, 25 bp, Homo sapien
tgctgtgtttgagtcggcttgattc

SEQ ID NO: 2510210 - DNA, 25 bp, Homo sapien
cattgacgggtggtgcgtctgtcac

SEQ ID NO: 2510211 - DNA, 25 bp, Homo sapien
tggtgcgtctgtcactcgctcagtc

SEQ ID NO: 2510212 - DNA, 25 bp, Homo sapien
tctgtcactcgctcagtccctgtgg

SEQ ID NO: 2510213 - DNA, 25 bp, Homo sapien
cagggttgcagcattgacgggtggt

SEQ ID NO: 2510214 - DNA, 25 bp, Homo sapien
tgttatcggcatgctcttaagccaa

SEQ ID NO: 2510215 - DNA, 25 bp, Homo sapien
gattgcctttcaagcacatacctct

SEQ ID NO: 2510216 - DNA, 25 bp, Homo sapien
ccctaccgctcatgataaatatcgc

SEQ ID NO: 2510217 - DNA, 25 bp, Homo sapien
cttaagccaaactactgggtgtgtg

SEQ ID NO: 2510218 - DNA, 25 bp, Homo sapien
tgcgatgtctggaggcatctatttc

SEQ ID NO: 2510219 - DNA, 25 bp, Homo sapien
aataagaagactttgtaatgcgatg

SEQ ID NO: 2510220 - DNA, 25 bp, Homo sapien
gaagactttgtaatgcgatgtctgg

SEQ ID NO: 2510221 - DNA, 25 bp, Homo sapien
tgtaatgcgatgtctggaggcatct

SEQ ID NO: 2510222 - DNA, 25 bp, Homo sapien
gaacagactgggaagcatgatgcca

SEQ ID NO: 2510223 - DNA, 25 bp, Homo sapien
gcctctaagtagaagtgcattcccc

SEQ ID NO: 2510224 - DNA, 25 bp, Homo sapien
ctgaacggcttatctcaaccaaggt

SEQ ID NO: 2510225 - DNA, 25 bp, Homo sapien
acaagatctttggtttgcttcgcca

SEQ ID NO: 2510226 - DNA, 25 bp, Homo sapien
acaatccaatcagctctcaatgcag

SEQ ID NO: 2510227 - DNA, 25 bp, Homo sapien
aaagttagacagttggtttagtgat

SEQ ID NO: 2510228 - DNA, 25 bp, Homo sapien
tacttaagcattttacctatacagc

SEQ ID NO: 2510229 - DNA, 25 bp, Homo sapien
tcaatgcagccagaataaactaggc

SEQ ID NO: 2510230 - DNA, 25 bp, Homo sapien
tatctttttggcctcaaaagggctg

SEQ ID NO: 2510231 - DNA, 25 bp, Homo sapien
cattcattgattggttcagtcacag

SEQ ID NO: 2510232 - DNA, 25 bp, Homo sapien
tcagtcacagatgggctgacctcgt

SEQ ID NO: 2510233 - DNA, 25 bp, Homo sapien
tcttatcttcggaccatgggatgga

SEQ ID NO: 2510234 - DNA, 25 bp, Homo sapien
tcaaaagcacatattgcaagaggga

SEQ ID NO: 2510235 - DNA, 25 bp, Homo sapien
ttctcagcagtttcatgatcaaaag

SEQ ID NO: 2510236 - DNA, 25 bp, Homo sapien
tgtggtttagaaggagccttttctc

SEQ ID NO: 2510237 - DNA, 25 bp, Homo sapien
tttcatgatcaaaagcacatattgc

SEQ ID NO: 2510238 - DNA, 25 bp, Homo sapien
tcctttttcttgtcgggattctgaa

SEQ ID NO: 2510239 - DNA, 25 bp, Homo sapien
tcgggtatatttgctcaggaaggga

SEQ ID NO: 2510240 - DNA, 25 bp, Homo sapien
gaatttgcagggcttacataagtag

SEQ ID NO: 2510241 - DNA, 25 bp, Homo sapien
gtgggtcacaactataaatgctctg

SEQ ID NO: 2510242 - DNA, 25 bp, Homo sapien
tacagagtttgttggtcgggctgaa

SEQ ID NO: 2510243 - DNA, 25 bp, Homo sapien
tgtttgggcacagcattagctgtag

SEQ ID NO: 2510244 - DNA, 25 bp, Homo sapien
tgtagcaggattccttttatgcaac

SEQ ID NO: 2510245 - DNA, 25 bp, Homo sapien
ttatgcaactgttgtgtatgaatgg

SEQ ID NO: 2510246 - DNA, 25 bp, Homo sapien
tggattccggacttcacccatagct

SEQ ID NO: 2510247 - DNA, 25 bp, Homo sapien
tattggattccggacttcacccata

SEQ ID NO: 2510248 - DNA, 25 bp, Homo sapien
catttttattggattccggacttca

SEQ ID NO: 2510249 - DNA, 25 bp, Homo sapien
ttccggacttcacccatagcttgct

SEQ ID NO: 2510250 - DNA, 25 bp, Homo sapien
tacttccaggacatttgatacctcc

SEQ ID NO: 2510251 - DNA, 25 bp, Homo sapien
tcttctcctgctatacttccaggac

SEQ ID NO: 2510252 - DNA, 25 bp, Homo sapien
ccttggtagtattcatcacatgaca

SEQ ID NO: 2510253 - DNA, 25 bp, Homo sapien
gacatttgatacctccttggtagta

SEQ ID NO: 2510254 - DNA, 25 bp, Homo sapien
ctgatgggagtcttatggttaaacc

SEQ ID NO: 2510255 - DNA, 25 bp, Homo sapien
gaaacctgcagtagggctcacagag

SEQ ID NO: 2510256 - DNA, 25 bp, Homo sapien
cttctttaaggactctgatgggagt

SEQ ID NO: 2510257 - DNA, 25 bp, Homo sapien
aggaaaacagaaacctgcagtaggg

SEQ ID NO: 2510258 - DNA, 25 bp, Homo sapien
cgaggaaatccagccgtttgcttgg

SEQ ID NO: 2510259 - DNA, 25 bp, Homo sapien
ccctgtgtgcacgtaattatgagta

SEQ ID NO: 2510260 - DNA, 25 bp, Homo sapien
cactacaggaggtgaaaagacaaac

SEQ ID NO: 2510261 - DNA, 25 bp, Homo sapien
ccaccaaccagaaggtctgtcgagg

SEQ ID NO: 2510262 - DNA, 25 bp, Homo sapien
ttctaaggccataatgaccataatg

SEQ ID NO: 2510263 - DNA, 25 bp, Homo sapien
cccagcttctaaggccataatgacc

SEQ ID NO: 2510264 - DNA, 25 bp, Homo sapien
agcttctaaggccataatgaccata

SEQ ID NO: 2510265 - DNA, 25 bp, Homo sapien
tctcccagcttctaaggccataatg

SEQ ID NO: 2510266 - DNA, 25 bp, Homo sapien
tgtgtctgacttcttggccttacta

SEQ ID NO: 2510267 - DNA, 25 bp, Homo sapien
ttagcttcttacttcccactttgtg

SEQ ID NO: 2510268 - DNA, 25 bp, Homo sapien
tactatgtgtagcttgtggatcaac

SEQ ID NO: 2510269 - DNA, 25 bp, Homo sapien
tcttacttcccactttgtgtctgac

SEQ ID NO: 2510270 - DNA, 25 bp, Homo sapien
ctctttgcagaacaacttgctctaa

SEQ ID NO: 2510271 - DNA, 25 bp, Homo sapien
gtctctttgcagaacaacttgctct

SEQ ID NO: 2510272 - DNA, 25 bp, Homo sapien
tctctttgcagaacaacttgctcta

SEQ ID NO: 2510273 - DNA, 25 bp, Homo sapien
tacatctttcatacaccataacagc

SEQ ID NO: 2510274 - DNA, 25 bp, Homo sapien
ctacttcttccttaagccctttcat

SEQ ID NO: 2510275 - DNA, 25 bp, Homo sapien
taacagcttgaagtctccctctctc

SEQ ID NO: 2510276 - DNA, 25 bp, Homo sapien
tacaccataacagcttgaagtctcc

SEQ ID NO: 2510277 - DNA, 25 bp, Homo sapien
gccctctgctatcctgccatgtagt

SEQ ID NO: 2510278 - DNA, 25 bp, Homo sapien
aggaagataactggccctctgctat

SEQ ID NO: 2510279 - DNA, 25 bp, Homo sapien
gataactggccctctgctatcctgc

SEQ ID NO: 2510280 - DNA, 25 bp, Homo sapien
caaaggaagataactggccctctgc

SEQ ID NO: 2510281 - DNA, 25 bp, Homo sapien
cttagacaaacagctacactgggag

SEQ ID NO: 2510282 - DNA, 25 bp, Homo sapien
aaccctcatctccactatggcaatc

SEQ ID NO: 2510283 - DNA, 25 bp, Homo sapien
gaaagagtgtaaaccctcatctcca

SEQ ID NO: 2510284 - DNA, 25 bp, Homo sapien
cagctacactgggagaaagagtgta

SEQ ID NO: 2510285 - DNA, 25 bp, Homo sapien
agaacatccatgtcgttcacacagg

SEQ ID NO: 2510286 - DNA, 25 bp, Homo sapien
aatgagaggctagggcattctgtgc

SEQ ID NO: 2510287 - DNA, 25 bp, Homo sapien
taagtgtacgcatggtcagaacatc

SEQ ID NO: 2510288 - DNA, 25 bp, Homo sapien
gattttccatagacgtcatgtgtgg

SEQ ID NO: 2510289 - DNA, 25 bp, Homo sapien
ggcttatcgttttgcatgaagcata

SEQ ID NO: 2510290 - DNA, 25 bp, Homo sapien
gaccctgtgtattagttcgctctca

SEQ ID NO: 2510291 - DNA, 25 bp, Homo sapien
ggtactgccctaacgtagcactgtg

SEQ ID NO: 2510292 - DNA, 25 bp, Homo sapien
aagcaggacttgtgtggtactgccc

SEQ ID NO: 2510293 - DNA, 25 bp, Homo sapien
ctagcatcattaggcatgtcagatt

SEQ ID NO: 2510294 - DNA, 25 bp, Homo sapien
tacactggattcatcaatttgagaa

SEQ ID NO: 2510295 - DNA, 25 bp, Homo sapien
aaattggctgctttaagaaattgac

SEQ ID NO: 2510296 - DNA, 25 bp, Homo sapien
gaaattgacaggagttctactagca

SEQ ID NO: 2510297 - DNA, 25 bp, Homo sapien
tctggattctgccttataattggcc

SEQ ID NO: 2510298 - DNA, 25 bp, Homo sapien
tggcatccaggatgtatccaacagg

SEQ ID NO: 2510299 - DNA, 25 bp, Homo sapien
aatgaatctgcaagcaagcctttgg

SEQ ID NO: 2510300 - DNA, 25 bp, Homo sapien
gcctttggttcgtcaaggagataat

SEQ ID NO: 2510301 - DNA, 25 bp, Homo sapien
agcccaaagagggaaatttcttcat

SEQ ID NO: 2510302 - DNA, 25 bp, Homo sapien
tccatacagaaagcccaaagaggga

SEQ ID NO: 2510303 - DNA, 25 bp, Homo sapien
ttccatacagaaagcccaaagaggg

SEQ ID NO: 2510304 - DNA, 25 bp, Homo sapien
atacagaaagcccaaagagggaaat

SEQ ID NO: 2510305 - DNA, 25 bp, Homo sapien
ttcttaacattgacccaatatatat

SEQ ID NO: 2510306 - DNA, 25 bp, Homo sapien
tcaatctggcagtttcttaacattg

SEQ ID NO: 2510307 - DNA, 25 bp, Homo sapien
tctgccatgcaaatgtccattaagg

SEQ ID NO: 2510308 - DNA, 25 bp, Homo sapien
gcataaagtgggaatactggggtta

SEQ ID NO: 2510309 - DNA, 25 bp, Homo sapien
gcccctggattcatccggtaactca

SEQ ID NO: 2510310 - DNA, 25 bp, Homo sapien
atcccacggcccctggattcatccg

SEQ ID NO: 2510311 - DNA, 25 bp, Homo sapien
gattcatccggtaactcatcttctg

SEQ ID NO: 2510312 - DNA, 25 bp, Homo sapien
cacggcccctggattcatccggtaa

SEQ ID NO: 2510313 - DNA, 25 bp, Homo sapien
aaggctccagccatcgtatctttat

SEQ ID NO: 2510314 - DNA, 25 bp, Homo sapien
taaggctccagccatcgtatcttta

SEQ ID NO: 2510315 - DNA, 25 bp, Homo sapien
aggctccagccatcgtatctttatt

SEQ ID NO: 2510316 - DNA, 25 bp, Homo sapien
ctaaggctccagccatcgtatcttt

SEQ ID NO: 2510317 - DNA, 25 bp, Homo sapien
tgaactgtgggtcttggttgctttc

SEQ ID NO: 2510318 - DNA, 25 bp, Homo sapien
agcagcatgaactgtgggtcttggt

SEQ ID NO: 2510319 - DNA, 25 bp, Homo sapien
tgtgggtcttggttgctttccaact

SEQ ID NO: 2510320 - DNA, 25 bp, Homo sapien
gggtcttggttgctttccaactgcc

SEQ ID NO: 2510321 - DNA, 25 bp, Homo sapien
tctgttgtgatcttcctttggcaca

SEQ ID NO: 2510322 - DNA, 25 bp, Homo sapien
actgagcattgccagtcaccaggag

SEQ ID NO: 2510323 - DNA, 25 bp, Homo sapien
tacatatggctgtgcaaactgagca

SEQ ID NO: 2510324 - DNA, 25 bp, Homo sapien
cacaattctgatggcagcatctgtc

SEQ ID NO: 2510325 - DNA, 25 bp, Homo sapien
tatttttaactttggttgtgcgtgc

SEQ ID NO: 2510326 - DNA, 25 bp, Homo sapien
ttctgagatcgtcacagccctgatt

SEQ ID NO: 2510327 - DNA, 25 bp, Homo sapien
gagatcgtcacagccctgattacct

SEQ ID NO: 2510328 - DNA, 25 bp, Homo sapien
catatttttaactttggttgtgcgt

SEQ ID NO: 2510329 - DNA, 25 bp, Homo sapien
atatactgagctgtgtaactgcaca

SEQ ID NO: 2510330 - DNA, 25 bp, Homo sapien
tatatactgagctgtgtaactgcac

SEQ ID NO: 2510331 - DNA, 25 bp, Homo sapien
ttatatactgagctgtgtaactgca

SEQ ID NO: 2510332 - DNA, 25 bp, Homo sapien
tttcctccttcccatcaaaatgtgc

SEQ ID NO: 2510333 - DNA, 25 bp, Homo sapien
ctccctgagcaacctcatgttctga

SEQ ID NO: 2510334 - DNA, 25 bp, Homo sapien
ccttcccatcaaaatgtgccttttc

SEQ ID NO: 2510335 - DNA, 25 bp, Homo sapien
tgagcaacctcatgttctgaacctt

SEQ ID NO: 2510336 - DNA, 25 bp, Homo sapien
attgctctaataaagccctccctgc

SEQ ID NO: 2510337 - DNA, 25 bp, Homo sapien
cattgctctaataaagccctccctg

SEQ ID NO: 2510338 - DNA, 25 bp, Homo sapien
tctttcctttgacacctgagacata

SEQ ID NO: 2510339 - DNA, 25 bp, Homo sapien
tcctttgacacctgagacatatgag

SEQ ID NO: 2510340 - DNA, 25 bp, Homo sapien
tccagggagctctaagatccaggac

SEQ ID NO: 2510341 - DNA, 25 bp, Homo sapien
ggagctctaagatccaggacatcca

SEQ ID NO: 2510342 - DNA, 25 bp, Homo sapien
caatgtttgaagtagcaaatttgta

SEQ ID NO: 2510343 - DNA, 25 bp, Homo sapien
tgatgttagcttttggcctgcattg

SEQ ID NO: 2510344 - DNA, 25 bp, Homo sapien
gcattgttcttcgtatttgtcacta

SEQ ID NO: 2510345 - DNA, 25 bp, Homo sapien
gccaggatcatgcagatctggtgtg

SEQ ID NO: 2510346 - DNA, 25 bp, Homo sapien
atgccaacccacttagcttctcctg

SEQ ID NO: 2510347 - DNA, 25 bp, Homo sapien
aatgccaacccacttagcttctcct

SEQ ID NO: 2510348 - DNA, 25 bp, Homo sapien
atttcacatgtaaatgccaacccac

SEQ ID NO: 2510349 - DNA, 25 bp, Homo sapien
ttgatagggagtggattcgacacgc

SEQ ID NO: 2510350 - DNA, 25 bp, Homo sapien
tcaatgaaaactctggttgactggt

SEQ ID NO: 2510351 - DNA, 25 bp, Homo sapien
gattcgacacgctgtcaatgaaaac

SEQ ID NO: 2510352 - DNA, 25 bp, Homo sapien
ggttgactggttgtctggttgtcca

SEQ ID NO: 2510353 - DNA, 25 bp, Homo sapien
aggaaatagtgtgagagttttcagc

SEQ ID NO: 2510354 - DNA, 25 bp, Homo sapien
aaggaaatagtgtgagagttttcag

SEQ ID NO: 2510355 - DNA, 25 bp, Homo sapien
cccacaagccatgggctcatgtctg

SEQ ID NO: 2510356 - DNA, 25 bp, Homo sapien
cctcaatactcctaggttgtaactg

SEQ ID NO: 2510357 - DNA, 25 bp, Homo sapien
tggcccattccctcaatactcctag

SEQ ID NO: 2510358 - DNA, 25 bp, Homo sapien
aactgtagtgaacagctttttcagt

SEQ ID NO: 2510359 - DNA, 25 bp, Homo sapien
atctataacagctgcctggcacacc

SEQ ID NO: 2510360 - DNA, 25 bp, Homo sapien
tctataacagctgcctggcacacca

SEQ ID NO: 2510361 - DNA, 25 bp, Homo sapien
agtccaaccaatactctactgagga

SEQ ID NO: 2510362 - DNA, 25 bp, Homo sapien
gaggacaatgatctcatctataaca

SEQ ID NO: 2510363 - DNA, 25 bp, Homo sapien
tctcagagtcctggatgctgaaagt

SEQ ID NO: 2510364 - DNA, 25 bp, Homo sapien
tcttctgtgtcttcacaggcttttt

SEQ ID NO: 2510365 - DNA, 25 bp, Homo sapien
gagtcctggatgctgaaagtccaag

SEQ ID NO: 2510366 - DNA, 25 bp, Homo sapien
tttctttggtttgcagatgactgtc

SEQ ID NO: 2510367 - DNA, 25 bp, Homo sapien
ctgccagagtggtatttgaaatagc

SEQ ID NO: 2510368 - DNA, 25 bp, Homo sapien
acctttgttagcagagcaaatgagg

SEQ ID NO: 2510369 - DNA, 25 bp, Homo sapien
ctctcaaattagagctttgtctgcc

SEQ ID NO: 2510370 - DNA, 25 bp, Homo sapien
taggtggaactatctggtgtttctc

SEQ ID NO: 2510371 - DNA, 25 bp, Homo sapien
tggtgcacagaggtagactcatact

SEQ ID NO: 2510372 - DNA, 25 bp, Homo sapien
tgtggtgcacagaggtagactcata

SEQ ID NO: 2510373 - DNA, 25 bp, Homo sapien
agactcatactccaggtctttattg

SEQ ID NO: 2510374 - DNA, 25 bp, Homo sapien
acagaggtagactcatactccaggt

SEQ ID NO: 2510375 - DNA, 25 bp, Homo sapien
caagagaactaagtgcttggtcaac

SEQ ID NO: 2510376 - DNA, 25 bp, Homo sapien
aacattggtacatgttttggctggc

SEQ ID NO: 2510377 - DNA, 25 bp, Homo sapien
ggctacggccaatgggagcaagaga

SEQ ID NO: 2510378 - DNA, 25 bp, Homo sapien
ccgcagaggctgattccaacattgg

SEQ ID NO: 2510379 - DNA, 25 bp, Homo sapien
cactaaataatctccacatgggtca

SEQ ID NO: 2510380 - DNA, 25 bp, Homo sapien
ccccgttgcctcattgattgtataa

SEQ ID NO: 2510381 - DNA, 25 bp, Homo sapien
agatttctcttgtccattgaggcca

SEQ ID NO: 2510382 - DNA, 25 bp, Homo sapien
cacatgggtcaagctctgtaatcac

SEQ ID NO: 2510383 - DNA, 25 bp, Homo sapien
gaccacatccatctggttcaggtga

SEQ ID NO: 2510384 - DNA, 25 bp, Homo sapien
tgtaagacctctgaacttgaccaca

SEQ ID NO: 2510385 - DNA, 25 bp, Homo sapien
tgtgaagctcagtgctcaattctac

SEQ ID NO: 2510386 - DNA, 25 bp, Homo sapien
gacatctgccccagaaagaagcatg

SEQ ID NO: 2510387 - DNA, 25 bp, Homo sapien
ccagttataacctctgggggcactc

SEQ ID NO: 2510388 - DNA, 25 bp, Homo sapien
gtcttttgcctgttgccaaattttc

SEQ ID NO: 2510389 - DNA, 25 bp, Homo sapien
gccaaattttcacgacatctccagt

SEQ ID NO: 2510390 - DNA, 25 bp, Homo sapien
tgggggcactcaccgttagccacat

SEQ ID NO: 2510391 - DNA, 25 bp, Homo sapien
tgtattggtcatactgaggacaact

SEQ ID NO: 2510392 - DNA, 25 bp, Homo sapien
tggtcatactgaggacaacttgcat

SEQ ID NO: 2510393 - DNA, 25 bp, Homo sapien
tattggtcatactgaggacaacttg

SEQ ID NO: 2510394 - DNA, 25 bp, Homo sapien
cttgtattggtcatactgaggacaa

SEQ ID NO: 2510395 - DNA, 25 bp, Homo sapien
agaggctaatgaaagctgaaatgag

SEQ ID NO: 2510396 - DNA, 25 bp, Homo sapien
gaggctaatgaaagctgaaatgagc

SEQ ID NO: 2510397 - DNA, 25 bp, Homo sapien
aggctaatgaaagctgaaatgagcc

SEQ ID NO: 2510398 - DNA, 25 bp, Homo sapien
tcagctagttctgggtagaggacgt

SEQ ID NO: 2510399 - DNA, 25 bp, Homo sapien
tggtgctgtcttcagctagttctgg

SEQ ID NO: 2510400 - DNA, 25 bp, Homo sapien
atggccacagaagcgccaggcctgc

SEQ ID NO: 2510401 - DNA, 25 bp, Homo sapien
gacgtggatggccacagaagcgcca

SEQ ID NO: 2510402 - DNA, 25 bp, Homo sapien
taattctggtgatgtgtataggcca

SEQ ID NO: 2510403 - DNA, 25 bp, Homo sapien
gctcataccacccatatgaatagtg

SEQ ID NO: 2510404 - DNA, 25 bp, Homo sapien
tgttatgactttagcgctgtgataa

SEQ ID NO: 2510405 - DNA, 25 bp, Homo sapien
catatgaatagtgggcagcagcaaa

SEQ ID NO: 2510406 - DNA, 25 bp, Homo sapien
gaaagacctgagaaacactcaaaag

SEQ ID NO: 2510407 - DNA, 25 bp, Homo sapien
tgaggataagtgaaacctggagctg

SEQ ID NO: 2510408 - DNA, 25 bp, Homo sapien
tgatgtaagattagccctaccaaac

SEQ ID NO: 2510409 - DNA, 25 bp, Homo sapien
aaaggcaaccacattcttagaagga

SEQ ID NO: 2510410 - DNA, 25 bp, Homo sapien
gaaaaggtagtatacttgcccatgc

SEQ ID NO: 2510411 - DNA, 25 bp, Homo sapien
tgccaggagcaagctagattttacc

SEQ ID NO: 2510412 - DNA, 25 bp, Homo sapien
tggatataacccagcagcaaagcac

SEQ ID NO: 2510413 - DNA, 25 bp, Homo sapien
ggtataaaccggcagcatagtcccc

SEQ ID NO: 2510414 - DNA, 25 bp, Homo sapien
tccagggttgctgaatgcacaactc

SEQ ID NO: 2510415 - DNA, 25 bp, Homo sapien
gcagccaggaccaaataaagccttc

SEQ ID NO: 2510416 - DNA, 25 bp, Homo sapien
tgaagcgagctgtaatgggccactg

SEQ ID NO: 2510417 - DNA, 25 bp, Homo sapien
tattcttgggagcttcgactctgaa

SEQ ID NO: 2510418 - DNA, 25 bp, Homo sapien
tgttaggaattaagatcccgtcctg

SEQ ID NO: 2510419 - DNA, 25 bp, Homo sapien
acatgcaaacctgttaggaattaag

SEQ ID NO: 2510420 - DNA, 25 bp, Homo sapien
cctgctgtaaacgattgttggcaac

SEQ ID NO: 2510421 - DNA, 25 bp, Homo sapien
gatcccgtcctgctgtaaacgattg

SEQ ID NO: 2510422 - DNA, 25 bp, Homo sapien
aagagccccgtgtcatgcacctgtt

SEQ ID NO: 2510423 - DNA, 25 bp, Homo sapien
aaagagccccgtgtcatgcacctgt

SEQ ID NO: 2510424 - DNA, 25 bp, Homo sapien
caaagagccccgtgtcatgcacctg

SEQ ID NO: 2510425 - DNA, 25 bp, Homo sapien
tatatttggcaaatctgttttatct

SEQ ID NO: 2510426 - DNA, 25 bp, Homo sapien
taagaaaagcctccgaaaagcacac

SEQ ID NO: 2510427 - DNA, 25 bp, Homo sapien
gagcgtccgttaatgctaagaaaag

SEQ ID NO: 2510428 - DNA, 25 bp, Homo sapien
tcctctcccagagcgtccgttaatg

SEQ ID NO: 2510429 - DNA, 25 bp, Homo sapien
tgaagcaacttctgaaacaactcca

SEQ ID NO: 2510430 - DNA, 25 bp, Homo sapien
tctcggatgataggcacttatttgg

SEQ ID NO: 2510431 - DNA, 25 bp, Homo sapien
attcccacgggcacaaaggctggag

SEQ ID NO: 2510432 - DNA, 25 bp, Homo sapien
acaggtcccttgagctttgcttcag

SEQ ID NO: 2510433 - DNA, 25 bp, Homo sapien
gtagttcattgaatgaagcatctgg

SEQ ID NO: 2510434 - DNA, 25 bp, Homo sapien
tagttcattgaatgaagcatctggg

SEQ ID NO: 2510435 - DNA, 25 bp, Homo sapien
agttcattgaatgaagcatctgggt

SEQ ID NO: 2510436 - DNA, 25 bp, Homo sapien
taaaactgggtggtctctcacaact

SEQ ID NO: 2510437 - DNA, 25 bp, Homo sapien
catacacaattgactctggaaccca

SEQ ID NO: 2510438 - DNA, 25 bp, Homo sapien
tggaacccacctggcaaggctctct

SEQ ID NO: 2510439 - DNA, 25 bp, Homo sapien
tgtgtgtgcattcaattgtcactgc

SEQ ID NO: 2510440 - DNA, 25 bp, Homo sapien
tccctgtgtctgttagactggcctt

SEQ ID NO: 2510441 - DNA, 25 bp, Homo sapien
ctgtgtctgttagactggccttggc

SEQ ID NO: 2510442 - DNA, 25 bp, Homo sapien
aggttgtctccatttcatgtattct

SEQ ID NO: 2510443 - DNA, 25 bp, Homo sapien
ccatttcatgtattctagaatgtca

SEQ ID NO: 2510444 - DNA, 25 bp, Homo sapien
gggatctctgagatctcctacatct

SEQ ID NO: 2510445 - DNA, 25 bp, Homo sapien
gaaatcctaatcctgcaaggtcccc

SEQ ID NO: 2510446 - DNA, 25 bp, Homo sapien
tgtaatctaaccaggaaatcctaat

SEQ ID NO: 2510447 - DNA, 25 bp, Homo sapien
cattgttgtaattggccagttgttc

SEQ ID NO: 2510448 - DNA, 25 bp, Homo sapien
taaagttcaggcttatgtccttatg

SEQ ID NO: 2510449 - DNA, 25 bp, Homo sapien
tttaaggcgtgaatgtttgggctcg

SEQ ID NO: 2510450 - DNA, 25 bp, Homo sapien
gaagccgcattgaagatattgcaac

SEQ ID NO: 2510451 - DNA, 25 bp, Homo sapien
tcttgaaacaaaagagcttcctagc

SEQ ID NO: 2510452 - DNA, 25 bp, Homo sapien
gtttagtctctccagtatgcaattg

SEQ ID NO: 2510453 - DNA, 25 bp, Homo sapien
tagtctctccagtatgcaattgacc

SEQ ID NO: 2510454 - DNA, 25 bp, Homo sapien
ttggtttagtctctccagtatgcaa

SEQ ID NO: 2510455 - DNA, 25 bp, Homo sapien
gtctctccagtatgcaattgacctg

SEQ ID NO: 2510456 - DNA, 25 bp, Homo sapien
tcagccatgtggcttttcttcacac

SEQ ID NO: 2510457 - DNA, 25 bp, Homo sapien
gctgtctccatgcacagaggacata

SEQ ID NO: 2510458 - DNA, 25 bp, Homo sapien
gcacagaggacatagcctcttgctt

SEQ ID NO: 2510459 - DNA, 25 bp, Homo sapien
tgctgtctccatgcacagaggacat

SEQ ID NO: 2510460 - DNA, 25 bp, Homo sapien
agaggacatagcctcttgcttcatc

SEQ ID NO: 2510461 - DNA, 25 bp, Homo sapien
ggctcattgtatcctgttttaccat

SEQ ID NO: 2510462 - DNA, 25 bp, Homo sapien
tgggaaggtcagaacgtctttttgc

SEQ ID NO: 2510463 - DNA, 25 bp, Homo sapien
tttcagatctcaaggcctctattat

SEQ ID NO: 2510464 - DNA, 25 bp, Homo sapien
gatctcaaggcctctattatatttg

SEQ ID NO: 2510465 - DNA, 25 bp, Homo sapien
ctgtctacagctgggtcaatatttt

SEQ ID NO: 2510466 - DNA, 25 bp, Homo sapien
tgctgtctacagctgggtcaatatt

SEQ ID NO: 2510467 - DNA, 25 bp, Homo sapien
gctgtctacagctgggtcaatattt

SEQ ID NO: 2510468 - DNA, 25 bp, Homo sapien
tctgaacaacgtaattgggttcaga

SEQ ID NO: 2510469 - DNA, 25 bp, Homo sapien
gagtcgcccttctaacaatttagga

SEQ ID NO: 2510470 - DNA, 25 bp, Homo sapien
ctgagtcgcccttctaacaatttag

SEQ ID NO: 2510471 - DNA, 25 bp, Homo sapien
tgagtcgcccttctaacaatttagg

SEQ ID NO: 2510472 - DNA, 25 bp, Homo sapien
ggctggctttcctgctatattagta

SEQ ID NO: 2510473 - DNA, 25 bp, Homo sapien
tactccctattgttaggccttctgg

SEQ ID NO: 2510474 - DNA, 25 bp, Homo sapien
agattgtcgccattggctcccctgg

SEQ ID NO: 2510475 - DNA, 25 bp, Homo sapien
tccgctggagccaggacatccatct

SEQ ID NO: 2510476 - DNA, 25 bp, Homo sapien
ctgttgcagacaactgattgtggaa

SEQ ID NO: 2510477 - DNA, 25 bp, Homo sapien
tgctgttgcagacaactgattgtgg

SEQ ID NO: 2510478 - DNA, 25 bp, Homo sapien
tgttgcagacaactgattgtggaac

SEQ ID NO: 2510479 - DNA, 25 bp, Homo sapien
gctgttgcagacaactgattgtgga

SEQ ID NO: 2510480 - DNA, 25 bp, Homo sapien
ttcctggagaagacgtgtctttgag

SEQ ID NO: 2510481 - DNA, 25 bp, Homo sapien
gtctgatggtcctcctccccatagg

SEQ ID NO: 2510482 - DNA, 25 bp, Homo sapien
tagaaaccgcaacaggattgtctga

SEQ ID NO: 2510483 - DNA, 25 bp, Homo sapien
gtctttgaggacaatagaaaccgca

SEQ ID NO: 2510484 - DNA, 25 bp, Homo sapien
caatgtgaaggtaagttcgtttcct

SEQ ID NO: 2510485 - DNA, 25 bp, Homo sapien
gcaatgtgaaggtaagttcgtttcc

SEQ ID NO: 2510486 - DNA, 25 bp, Homo sapien
agcaatgtgaaggtaagttcgtttc

SEQ ID NO: 2510487 - DNA, 25 bp, Homo sapien
tgtgatttgtgccaagttgctagac

SEQ ID NO: 2510488 - DNA, 25 bp, Homo sapien
tccttagcatagtgcctagaacatg

SEQ ID NO: 2510489 - DNA, 25 bp, Homo sapien
gaagtcaatgtaccatgagcaggac

SEQ ID NO: 2510490 - DNA, 25 bp, Homo sapien
cttaatccaggaacttaaccagaga

SEQ ID NO: 2510491 - DNA, 25 bp, Homo sapien
gcctgatttgtgaccttcagctgtc

SEQ ID NO: 2510492 - DNA, 25 bp, Homo sapien
cagtgcctgatttgtgaccttcagc

SEQ ID NO: 2510493 - DNA, 25 bp, Homo sapien
ggcagtgcctgatttgtgaccttca

SEQ ID NO: 2510494 - DNA, 25 bp, Homo sapien
gtgcctgatttgtgaccttcagctg

SEQ ID NO: 2510495 - DNA, 25 bp, Homo sapien
tctgcagactgtttgggtttccgaa

SEQ ID NO: 2510496 - DNA, 25 bp, Homo sapien
aattgtgttcggttttctgcagact

SEQ ID NO: 2510497 - DNA, 25 bp, Homo sapien
ttgattaaaggtcatggcaacggta

SEQ ID NO: 2510498 - DNA, 25 bp, Homo sapien
ttaacggttggatgattgattaaag

SEQ ID NO: 2510499 - DNA, 25 bp, Homo sapien
cacggcatctacactcagagcactt

SEQ ID NO: 2510500 - DNA, 25 bp, Homo sapien
tacactcagagcacttcaaagccat

SEQ ID NO: 2510501 - DNA, 25 bp, Homo sapien
ggcctctctctgctgagtcatcctt

SEQ ID NO: 2510502 - DNA, 25 bp, Homo sapien
cacgtccccccacggcatctacact

SEQ ID NO: 2510503 - DNA, 25 bp, Homo sapien
ccacagagctgtgacatttaaaatc

SEQ ID NO: 2510504 - DNA, 25 bp, Homo sapien
tctcattaaccttgaatcgcctcct

SEQ ID NO: 2510505 - DNA, 25 bp, Homo sapien
tgggttctcattaaccttgaatcgc

SEQ ID NO: 2510506 - DNA, 25 bp, Homo sapien
taaaatcttatcagagtactctaaa

SEQ ID NO: 2510507 - DNA, 25 bp, Homo sapien
tcttggactccggtaaattcaccaa

SEQ ID NO: 2510508 - DNA, 25 bp, Homo sapien
tcttttcctgggcttgcaattgcat

SEQ ID NO: 2510509 - DNA, 25 bp, Homo sapien
atgttcatttgacaaccaccatatg

SEQ ID NO: 2510510 - DNA, 25 bp, Homo sapien
cattcccttctgcatgccatgttca

SEQ ID NO: 2510511 - DNA, 25 bp, Homo sapien
tcagaactaggtagtaagcactgga

SEQ ID NO: 2510512 - DNA, 25 bp, Homo sapien
ccctcagaactaggtagtaagcact

SEQ ID NO: 2510513 - DNA, 25 bp, Homo sapien
aaaacaaggatcaggaagtcattgg

SEQ ID NO: 2510514 - DNA, 25 bp, Homo sapien
tctcagcaccctcagaactaggtag

SEQ ID NO: 2510515 - DNA, 25 bp, Homo sapien
gagttccgataccaaaccaccacaa

SEQ ID NO: 2510516 - DNA, 25 bp, Homo sapien
ttctggaaggtgccctatggaggtt

SEQ ID NO: 2510517 - DNA, 25 bp, Homo sapien
tgccctatggaggttggaaaggatg

SEQ ID NO: 2510518 - DNA, 25 bp, Homo sapien
gaaaggatgatgatgagttccgata

SEQ ID NO: 2510519 - DNA, 25 bp, Homo sapien
gatcctgaggaattctctgacagca

SEQ ID NO: 2510520 - DNA, 25 bp, Homo sapien
ttcctggatggtcaaagatcctgag

SEQ ID NO: 2510521 - DNA, 25 bp, Homo sapien
gcttctggtgaaggtagtaggaacc

SEQ ID NO: 2510522 - DNA, 25 bp, Homo sapien
taggaaccttgccttggtcagcaga

SEQ ID NO: 2510523 - DNA, 25 bp, Homo sapien
caaagcaagatagaggaagacggga

SEQ ID NO: 2510524 - DNA, 25 bp, Homo sapien
tacttcttcaagatgccataaggag

SEQ ID NO: 2510525 - DNA, 25 bp, Homo sapien
tgccataaggagaggcattttcccc

SEQ ID NO: 2510526 - DNA, 25 bp, Homo sapien
ggaagacacccttaacattcttcaa

SEQ ID NO: 2510527 - DNA, 25 bp, Homo sapien
ctatttataccaccccccagaagtg

SEQ ID NO: 2510528 - DNA, 25 bp, Homo sapien
tgtattttaaccttcatgtggtaaa

SEQ ID NO: 2510529 - DNA, 25 bp, Homo sapien
aagtgggtgtattttaaccttcatg

SEQ ID NO: 2510530 - DNA, 25 bp, Homo sapien
taaccttcatgtggtaaaacttcat

SEQ ID NO: 2510531 - DNA, 25 bp, Homo sapien
gctggcccatgcaggatggccaagc

SEQ ID NO: 2510532 - DNA, 25 bp, Homo sapien
atgtgctggcccatgcaggatggcc

SEQ ID NO: 2510533 - DNA, 25 bp, Homo sapien
ggcccatgcaggatggccaagccac

SEQ ID NO: 2510534 - DNA, 25 bp, Homo sapien
tgcaggatggccaagccactcactg

SEQ ID NO: 2510535 - DNA, 25 bp, Homo sapien
agatgaggtagttggccacccacaa

SEQ ID NO: 2510536 - DNA, 25 bp, Homo sapien
ggagtgccaatgagccagacacact

SEQ ID NO: 2510537 - DNA, 25 bp, Homo sapien
tcagtaagccctccttcaaattcag

SEQ ID NO: 2510538 - DNA, 25 bp, Homo sapien
cgtaatttgaacagcacaggtagta

SEQ ID NO: 2510539 - DNA, 25 bp, Homo sapien
actagccataatcgggcctcggata

SEQ ID NO: 2510540 - DNA, 25 bp, Homo sapien
caatacagactgcaaaaattgccca

SEQ ID NO: 2510541 - DNA, 25 bp, Homo sapien
ttttcaactagccataatcgggcct

SEQ ID NO: 2510542 - DNA, 25 bp, Homo sapien
gcccatgccgactatattttaaatc

SEQ ID NO: 2510543 - DNA, 25 bp, Homo sapien
aagggtcatggatcaggcctcttga

SEQ ID NO: 2510544 - DNA, 25 bp, Homo sapien
tgctattgagacaagcagctgtcat

SEQ ID NO: 2510545 - DNA, 25 bp, Homo sapien
tggatcaggcctcttgaccagatgt

SEQ ID NO: 2510546 - DNA, 25 bp, Homo sapien
ggtcatggatcaggcctcttgacca

SEQ ID NO: 2510547 - DNA, 25 bp, Homo sapien
tccaactcaaaaagatagtctgagg

SEQ ID NO: 2510548 - DNA, 25 bp, Homo sapien
tccctgcacaagctcaaagttgccg

SEQ ID NO: 2510549 - DNA, 25 bp, Homo sapien
caggcagattcactatgcattccaa

SEQ ID NO: 2510550 - DNA, 25 bp, Homo sapien
tgccgaagaataggtctgcgtttgt

SEQ ID NO: 2510551 - DNA, 25 bp, Homo sapien
tcccttatgatgttctcatattcca

SEQ ID NO: 2510552 - DNA, 25 bp, Homo sapien
atcccttatgatgttctcatattcc

SEQ ID NO: 2510553 - DNA, 25 bp, Homo sapien
catcccttatgatgttctcatattc

SEQ ID NO: 2510554 - DNA, 25 bp, Homo sapien
cccttatgatgttctcatattccat

SEQ ID NO: 2510555 - DNA, 25 bp, Homo sapien
tttgtggcagatgctcttgtaatac

SEQ ID NO: 2510556 - DNA, 25 bp, Homo sapien
tccaatgggaagcatttgtggggct

SEQ ID NO: 2510557 - DNA, 25 bp, Homo sapien
acagtataccatggccttgcagtag

SEQ ID NO: 2510558 - DNA, 25 bp, Homo sapien
cttgcagtaggaggagcccagatgc

SEQ ID NO: 2510559 - DNA, 25 bp, Homo sapien
gctctggaacgctcagacataagcc

SEQ ID NO: 2510560 - DNA, 25 bp, Homo sapien
ctgaaggagctgacttggtccgttg

SEQ ID NO: 2510561 - DNA, 25 bp, Homo sapien
gacataagccatgatgtcctgctgg

SEQ ID NO: 2510562 - DNA, 25 bp, Homo sapien
gtttgtgctctggaacgctcagaca

SEQ ID NO: 2510563 - DNA, 25 bp, Homo sapien
cctggagttcgggaagtgcagagac

SEQ ID NO: 2510564 - DNA, 25 bp, Homo sapien
agagactggtgcctgattctcccct

SEQ ID NO: 2510565 - DNA, 25 bp, Homo sapien
gttcgggaagtgcagagactggtgc

SEQ ID NO: 2510566 - DNA, 25 bp, Homo sapien
agactggtgcctgattctcccctag

SEQ ID NO: 2510567 - DNA, 25 bp, Homo sapien
aaactgctgaagtagggacgagggc

SEQ ID NO: 2510568 - DNA, 25 bp, Homo sapien
gccagaaagaggtgacgtactgtaa

SEQ ID NO: 2510569 - DNA, 25 bp, Homo sapien
gaggtgacgtactgtaaactgctga

SEQ ID NO: 2510570 - DNA, 25 bp, Homo sapien
gaaagaggtgacgtactgtaaactg

SEQ ID NO: 2510571 - DNA, 25 bp, Homo sapien
gtgtactgagatgcaacctcttgta

SEQ ID NO: 2510572 - DNA, 25 bp, Homo sapien
tcaagcaacattagggcttgaagcc

SEQ ID NO: 2510573 - DNA, 25 bp, Homo sapien
ggtagcataaaagtcaggaatcctg

SEQ ID NO: 2510574 - DNA, 25 bp, Homo sapien
taagagaccattaaagtatgctatt

SEQ ID NO: 2510575 - DNA, 25 bp, Homo sapien
cctccagactcgtggaggcagtgtg

SEQ ID NO: 2510576 - DNA, 25 bp, Homo sapien
tccccataggtcaatgtgaggtcgc

SEQ ID NO: 2510577 - DNA, 25 bp, Homo sapien
tccagaggaaacactaggcgggtac

SEQ ID NO: 2510578 - DNA, 25 bp, Homo sapien
tgtgggaacctgagaagccatttgc

SEQ ID NO: 2510579 - DNA, 25 bp, Homo sapien
aaaatcagagtttccctctctcagt

SEQ ID NO: 2510580 - DNA, 25 bp, Homo sapien
cttcagtcagaataaaatcagagtt

SEQ ID NO: 2510581 - DNA, 25 bp, Homo sapien
ccctctctcagtggctcttggttat

SEQ ID NO: 2510582 - DNA, 25 bp, Homo sapien
tcagtggctcttggttatcgtacac

SEQ ID NO: 2510583 - DNA, 25 bp, Homo sapien
ttagcggggagccgctgtgtctcca

SEQ ID NO: 2510584 - DNA, 25 bp, Homo sapien
ggagccgctttgtctacaccaggca

SEQ ID NO: 2510585 - DNA, 25 bp, Homo sapien
gttagcggggagccgctgtgtctcc

SEQ ID NO: 2510586 - DNA, 25 bp, Homo sapien
tagcaagctacaccaggcgggagag

SEQ ID NO: 2510587 - DNA, 25 bp, Homo sapien
caggcgggagagtggtggttagcgg

SEQ ID NO: 2510588 - DNA, 25 bp, Homo sapien
tggttagcggggagccgctgtgtgt

SEQ ID NO: 2510589 - DNA, 25 bp, Homo sapien
caggtaattgtgatcaaagctgtac

SEQ ID NO: 2510590 - DNA, 25 bp, Homo sapien
tgggcttcaggtaattgtgatcaaa

SEQ ID NO: 2510591 - DNA, 25 bp, Homo sapien
catgtgctctcctgttttgtccagt

SEQ ID NO: 2510592 - DNA, 25 bp, Homo sapien
tttgtccagtttcctctggcagaat

SEQ ID NO: 2510593 - DNA, 25 bp, Homo sapien
ttgtccagtttcctctggcagaatc

SEQ ID NO: 2510594 - DNA, 25 bp, Homo sapien
caccgcctgaatatccatgtgctct

SEQ ID NO: 2510595 - DNA, 25 bp, Homo sapien
cttgatcagggtcaacaccaactct

SEQ ID NO: 2510596 - DNA, 25 bp, Homo sapien
cattgttgggtggtggatcttgatc

SEQ ID NO: 2510597 - DNA, 25 bp, Homo sapien
cagggtcaacaccaactctgaagta

SEQ ID NO: 2510598 - DNA, 25 bp, Homo sapien
ggtggatcttgatcagggtcaacac

SEQ ID NO: 2510599 - DNA, 25 bp, Homo sapien
taactctgatattaagccatgacaa

SEQ ID NO: 2510600 - DNA, 25 bp, Homo sapien
tggtgaagaacacgatgaaaggcgt

SEQ ID NO: 2510601 - DNA, 25 bp, Homo sapien
ggaaggtaaatagcgccaggatcat

SEQ ID NO: 2510602 - DNA, 25 bp, Homo sapien
tcggtggtgttcgttgtggtcctct

SEQ ID NO: 2510603 - DNA, 25 bp, Homo sapien
cctgtaaatccgcaagcttctgcca

SEQ ID NO: 2510604 - DNA, 25 bp, Homo sapien
ctacaacgcctgtaaatccgcaagc

SEQ ID NO: 2510605 - DNA, 25 bp, Homo sapien
gtaaatccgcaagcttctgccaaga

SEQ ID NO: 2510606 - DNA, 25 bp, Homo sapien
acgcctgtaaatccgcaagcttctg

SEQ ID NO: 2510607 - DNA, 25 bp, Homo sapien
tccagtttggtaaacttggtcacta

SEQ ID NO: 2510608 - DNA, 25 bp, Homo sapien
ttggtaaacttggtcactaaagcag

SEQ ID NO: 2510609 - DNA, 25 bp, Homo sapien
tttggtaaacttggtcactaaagca

SEQ ID NO: 2510610 - DNA, 25 bp, Homo sapien
aaacagccactaaatatacctagaa

SEQ ID NO: 2510611 - DNA, 25 bp, Homo sapien
acagccactaaatatacctagaaaa

SEQ ID NO: 2510612 - DNA, 25 bp, Homo sapien
gtaaaacagccactaaatataccta

SEQ ID NO: 2510613 - DNA, 25 bp, Homo sapien
taaaacagccactaaatatacctag

SEQ ID NO: 2510614 - DNA, 25 bp, Homo sapien
gaattgttttacacccagatctaac

SEQ ID NO: 2510615 - DNA, 25 bp, Homo sapien
gttagatctgggtgtaaaacaattc

SEQ ID NO: 2510616 - DNA, 25 bp, Homo sapien
caacgtcatttaggatgctctctcc

SEQ ID NO: 2510617 - DNA, 25 bp, Homo sapien
gaaagtacaacataacaacgtcatt

SEQ ID NO: 2510618 - DNA, 25 bp, Homo sapien
aatacggaagcacgaaacagcagtc

SEQ ID NO: 2510619 - DNA, 25 bp, Homo sapien
cgtgagttgaagttcagtcctgctg

SEQ ID NO: 2510620 - DNA, 25 bp, Homo sapien
tcttttcagggtgtattcgaagaat

SEQ ID NO: 2510621 - DNA, 25 bp, Homo sapien
ggtgtattcgaagaatttaccgctg

SEQ ID NO: 2510622 - DNA, 25 bp, Homo sapien
cagggtgtattcgaagaatttaccg

SEQ ID NO: 2510623 - DNA, 25 bp, Homo sapien
ttcagggtgtattcgaagaatttac

SEQ ID NO: 2510624 - DNA, 25 bp, Homo sapien
gtgcacccggcagtacttgaagagc

SEQ ID NO: 2510625 - DNA, 25 bp, Homo sapien
cactactaaagtgctgaaggcctga

SEQ ID NO: 2510626 - DNA, 25 bp, Homo sapien
gagtaatttgtcacggcccctggtg

SEQ ID NO: 2510627 - DNA, 25 bp, Homo sapien
gaggcctcggccgttactcgaagtc

SEQ ID NO: 2510628 - DNA, 25 bp, Homo sapien
taaagcgcatgttttggcaggcgcc

SEQ ID NO: 2510629 - DNA, 25 bp, Homo sapien
gacaatcctgcacccactgatgaag

SEQ ID NO: 2510630 - DNA, 25 bp, Homo sapien
cccctgcggagaacaacttgacgat

SEQ ID NO: 2510631 - DNA, 25 bp, Homo sapien
caggcgccatgagttgtgtacccca

SEQ ID NO: 2510632 - DNA, 25 bp, Homo sapien
tgtgcggtttgtccggttatacctc

SEQ ID NO: 2510633 - DNA, 25 bp, Homo sapien
gcttgtcggtgtgtgattccttcct

SEQ ID NO: 2510634 - DNA, 25 bp, Homo sapien
ttcaaagactaagcctgccatgctt

SEQ ID NO: 2510635 - DNA, 25 bp, Homo sapien
cgctgtgtgaaaatggctgtgatct

SEQ ID NO: 2510636 - DNA, 25 bp, Homo sapien
caaggagggccagcacttgtttttc

SEQ ID NO: 2510637 - DNA, 25 bp, Homo sapien
ctttaaatctcgaatcaaagtccat

SEQ ID NO: 2510638 - DNA, 25 bp, Homo sapien
tttctttaaatctcgaatcaaagtc

SEQ ID NO: 2510639 - DNA, 25 bp, Homo sapien
agggcgcaaggagggccagcacttg

SEQ ID NO: 2510640 - DNA, 25 bp, Homo sapien
actttctacctctgtagccttcatc

SEQ ID NO: 2510641 - DNA, 25 bp, Homo sapien
tcacttccagttaaactgtagccac

SEQ ID NO: 2510642 - DNA, 25 bp, Homo sapien
tgtcacttccagttaaactgtagcc

SEQ ID NO: 2510643 - DNA, 25 bp, Homo sapien
gtttgtcacttccagttaaactgta

SEQ ID NO: 2510644 - DNA, 25 bp, Homo sapien
tttgtcacttccagttaaactgtag

SEQ ID NO: 2510645 - DNA, 25 bp, Homo sapien
agaaaacgctctgaaggcctctgcc

SEQ ID NO: 2510646 - DNA, 25 bp, Homo sapien
gaaaacgctctgaaggcctctgccc

SEQ ID NO: 2510647 - DNA, 25 bp, Homo sapien
aaaagaaaacgctctgaaggcctct

SEQ ID NO: 2510648 - DNA, 25 bp, Homo sapien
aagaaaacgctctgaaggcctctgc

SEQ ID NO: 2510649 - DNA, 25 bp, Homo sapien
gaggtgacacccttaaattcacaac

SEQ ID NO: 2510650 - DNA, 25 bp, Homo sapien
caatcctccgcaaaatgggataatg

SEQ ID NO: 2510651 - DNA, 25 bp, Homo sapien
cgacgcccggccgagaactaaacat

SEQ ID NO: 2510652 - DNA, 25 bp, Homo sapien
acttaaagtgcaacttaccctcctg

SEQ ID NO: 2510653 - DNA, 25 bp, Homo sapien
gaagttgaggcaaggtcaccagcta

SEQ ID NO: 2510654 - DNA, 25 bp, Homo sapien
tgaggaaaacctacggcaagcagct

SEQ ID NO: 2510655 - DNA, 25 bp, Homo sapien
gaatagcattgccagccagtgttga

SEQ ID NO: 2510656 - DNA, 25 bp, Homo sapien
tagccttagggtacgcagaatctga

SEQ ID NO: 2510657 - DNA, 25 bp, Homo sapien
caaacattttaattgcagtcaatgt

SEQ ID NO: 2510658 - DNA, 25 bp, Homo sapien
caggcaaacattttaattgcagtca

SEQ ID NO: 2510659 - DNA, 25 bp, Homo sapien
tccaggcaaacattttaattgcagt

SEQ ID NO: 2510660 - DNA, 25 bp, Homo sapien
ggcaaacattttaattgcagtcaat

SEQ ID NO: 2510661 - DNA, 25 bp, Homo sapien
taagtgcccgattgtagaggtctgg

SEQ ID NO: 2510662 - DNA, 25 bp, Homo sapien
tcacactggcgtggaattcggcgcg

SEQ ID NO: 2510663 - DNA, 25 bp, Homo sapien
tcttggagcttcagtgtcccgggag

SEQ ID NO: 2510664 - DNA, 25 bp, Homo sapien
tcgaccccagagacgaaagctgctt

SEQ ID NO: 2510665 - DNA, 25 bp, Homo sapien
caagttgaagagtgagttggtcgcc

SEQ ID NO: 2510666 - DNA, 25 bp, Homo sapien
tcgccaacaatgtgacgctgccggc

SEQ ID NO: 2510667 - DNA, 25 bp, Homo sapien
ggagcagcgcaaagacgtgtacgtc

SEQ ID NO: 2510668 - DNA, 25 bp, Homo sapien
caaagacgtgtacgtccagctctac

SEQ ID NO: 2510669 - DNA, 25 bp, Homo sapien
ttctccagtgacgaagagcgcgagc

SEQ ID NO: 2510670 - DNA, 25 bp, Homo sapien
ttcgcgttctttgacgtgtgggtct

SEQ ID NO: 2510671 - DNA, 25 bp, Homo sapien
ccggagcggagaggccagaagttgg

SEQ ID NO: 2510672 - DNA, 25 bp, Homo sapien
ttgttttgcacgcagtcgacgccgc

SEQ ID NO: 2510673 - DNA, 25 bp, Homo sapien
gcaatggcccgatttcatctctgcc

SEQ ID NO: 2510674 - DNA, 25 bp, Homo sapien
aatgttttcctatcagccacttggt

SEQ ID NO: 2510675 - DNA, 25 bp, Homo sapien
tgagttcctaccaagtgttcttaac

SEQ ID NO: 2510676 - DNA, 25 bp, Homo sapien
aagagagtttatgtccccatctacc

SEQ ID NO: 2510677 - DNA, 25 bp, Homo sapien
gaggaataacctaatagctacttaa

SEQ ID NO: 2510678 - DNA, 25 bp, Homo sapien
taatcagattgaggagtacatgcca

SEQ ID NO: 2510679 - DNA, 25 bp, Homo sapien
taatgtcagggcaatatagtgcaat

SEQ ID NO: 2510680 - DNA, 25 bp, Homo sapien
tatgtgaagtgtctagtgcttagta

SEQ ID NO: 2510681 - DNA, 25 bp, Homo sapien
aaatgacatcacttttctggaactt

SEQ ID NO: 2510682 - DNA, 25 bp, Homo sapien
tctggaacttttttcctgacagatt

SEQ ID NO: 2510683 - DNA, 25 bp, Homo sapien
tggtgttgcgcgcttgtaatttcag

SEQ ID NO: 2510684 - DNA, 25 bp, Homo sapien
tagtcgggtatggtgttgcgcgctt

SEQ ID NO: 2510685 - DNA, 25 bp, Homo sapien
tagctaaggctatgcaggcagacat

SEQ ID NO: 2510686 - DNA, 25 bp, Homo sapien
tagtcgtacccaccaagcgcttggg

SEQ ID NO: 2510687 - DNA, 25 bp, Homo sapien
gaaatgccactgtaggtcgtcgata

SEQ ID NO: 2510688 - DNA, 25 bp, Homo sapien
tttgatgaagtgaagatggctgccc

SEQ ID NO: 2510689 - DNA, 25 bp, Homo sapien
gcaacatcaatcatagtagtctaga

SEQ ID NO: 2510690 - DNA, 25 bp, Homo sapien
gatcaatgcaactcaaagcaccagt

SEQ ID NO: 2510691 - DNA, 25 bp, Homo sapien
tatcctgggatagtgcatgttcacc

SEQ ID NO: 2510692 - DNA, 25 bp, Homo sapien
ggtagcaaccaattcatggaccagt

SEQ ID NO: 2510693 - DNA, 25 bp, Homo sapien
ggttggtcagatccatgtccagttt

SEQ ID NO: 2510694 - DNA, 25 bp, Homo sapien
tatagcggccttcctgttacatcgt

SEQ ID NO: 2510695 - DNA, 25 bp, Homo sapien
tgcgcctggcggaaactatgtttta

SEQ ID NO: 2510696 - DNA, 25 bp, Homo sapien
tattggacggcacagatccagaggg

SEQ ID NO: 2510697 - DNA, 25 bp, Homo sapien
tgttttctggaatagtaagacgtcc

SEQ ID NO: 2510698 - DNA, 25 bp, Homo sapien
tgtatacttcctgcgtcatgcctgg

SEQ ID NO: 2510699 - DNA, 25 bp, Homo sapien
gccatctgtagccattaggaattac

SEQ ID NO: 2510700 - DNA, 25 bp, Homo sapien
taagacgtcccaggctcatgtatac

SEQ ID NO: 2510701 - DNA, 25 bp, Homo sapien
cttgatggtactgtgccacaaggat

SEQ ID NO: 2510702 - DNA, 25 bp, Homo sapien
taaaaagcagttactctgtgtatgt

SEQ ID NO: 2510703 - DNA, 25 bp, Homo sapien
tgccacaaggattgagaatctcaga

SEQ ID NO: 2510704 - DNA, 25 bp, Homo sapien
gcagttactctgtgtatgtctgtaa

SEQ ID NO: 2510705 - DNA, 25 bp, Homo sapien
tgtgtacacttgttgactccaagaa

SEQ ID NO: 2510706 - DNA, 25 bp, Homo sapien
tgtgatttcgcctcaataaatgtag

SEQ ID NO: 2510707 - DNA, 25 bp, Homo sapien
aactgaatggtatctctttggcacg

SEQ ID NO: 2510708 - DNA, 25 bp, Homo sapien
gactagtaggagatcactttgtgcc

SEQ ID NO: 2510709 - DNA, 25 bp, Homo sapien
gccgaagatgtatatttagaccagc

SEQ ID NO: 2510710 - DNA, 25 bp, Homo sapien
gacttgtaggtctttctgcagaatg

SEQ ID NO: 2510711 - DNA, 25 bp, Homo sapien
tagcaaaaataggaccaggtgaaac

SEQ ID NO: 2510712 - DNA, 25 bp, Homo sapien
cacccggccggcattatgattttgt

SEQ ID NO: 2510713 - DNA, 25 bp, Homo sapien
aatggcgaaaactcgtcgctataaa

SEQ ID NO: 2510714 - DNA, 25 bp, Homo sapien
tggcgaaaactcgtcgctataaaaa

SEQ ID NO: 2510715 - DNA, 25 bp, Homo sapien
gaaaaatggcgaaaactcgtcgcta

SEQ ID NO: 2510716 - DNA, 25 bp, Homo sapien
aaaatggcgaaaactcgtcgctata

SEQ ID NO: 2510717 - DNA, 25 bp, Homo sapien
gcataatatgccttgacagccagga

SEQ ID NO: 2510718 - DNA, 25 bp, Homo sapien
ttctctgccctctcaacttataggg

SEQ ID NO: 2510719 - DNA, 25 bp, Homo sapien
cccaagaaaacaccaccgtggctgg

SEQ ID NO: 2510720 - DNA, 25 bp, Homo sapien
ccgtggctggcttgtgatttttgat

SEQ ID NO: 2510721 - DNA, 25 bp, Homo sapien
gaaactgtatgcttccggatgaagt

SEQ ID NO: 2510722 - DNA, 25 bp, Homo sapien
agaaactgtatgcttccggatgaag

SEQ ID NO: 2510723 - DNA, 25 bp, Homo sapien
cagaaactgtatgcttccggatgaa

SEQ ID NO: 2510724 - DNA, 25 bp, Homo sapien
aaactgtatgcttccggatgaagtt

SEQ ID NO: 2510725 - DNA, 25 bp, Homo sapien
cggcccaagggctccgtgtcaaaga

SEQ ID NO: 2510726 - DNA, 25 bp, Homo sapien
cccaagggctccgtgtcaaagaaca

SEQ ID NO: 2510727 - DNA, 25 bp, Homo sapien
aagggctccgtgtcaaagaacacgg

SEQ ID NO: 2510728 - DNA, 25 bp, Homo sapien
ccaagggctccgtgtcaaagaacac

SEQ ID NO: 2510729 - DNA, 25 bp, Homo sapien
ggtaagtattactcccatccagaac

SEQ ID NO: 2510730 - DNA, 25 bp, Homo sapien
aaagcgtggccccttgttcatacat

SEQ ID NO: 2510731 - DNA, 25 bp, Homo sapien
gtggccccttgttcatacatgtatt

SEQ ID NO: 2510732 - DNA, 25 bp, Homo sapien
aggtaagtattactcccatccagaa

SEQ ID NO: 2510733 - DNA, 25 bp, Homo sapien
taaggccatgtgtgactgtaccagt

SEQ ID NO: 2510734 - DNA, 25 bp, Homo sapien
cttacatctagggaacaggtacaca

SEQ ID NO: 2510735 - DNA, 25 bp, Homo sapien
tgtaccagtgtgaacctatgaggcc

SEQ ID NO: 2510736 - DNA, 25 bp, Homo sapien
gcattaaatgaagtgtaaggccatg

SEQ ID NO: 2510737 - DNA, 25 bp, Homo sapien
tcctccgggtcctaagatgtgtgcc

SEQ ID NO: 2510738 - DNA, 25 bp, Homo sapien
gaagtcttacgacagcttgccgcgt

SEQ ID NO: 2510739 - DNA, 25 bp, Homo sapien
tcccttggaaaggttgcggctcaca

SEQ ID NO: 2510740 - DNA, 25 bp, Homo sapien
cacacgactgtattgggcagggtct

SEQ ID NO: 2510741 - DNA, 25 bp, Homo sapien
caggcgcgcgttccgggtctatatt

SEQ ID NO: 2510742 - DNA, 25 bp, Homo sapien
tacgcgtcgcccattggtggagaag

SEQ ID NO: 2510743 - DNA, 25 bp, Homo sapien
cacatcttaggacccggaggacgtc

SEQ ID NO: 2510744 - DNA, 25 bp, Homo sapien
caccaatgggcgacgcgtacttgca

SEQ ID NO: 2510745 - DNA, 25 bp, Homo sapien
tgtgagccgcaacctttccaaggga

SEQ ID NO: 2510746 - DNA, 25 bp, Homo sapien
taagtgaagcgaactgaagcccgtg

SEQ ID NO: 2510747 - DNA, 25 bp, Homo sapien
tagattactgtgataacgcggcaag

SEQ ID NO: 2510748 - DNA, 25 bp, Homo sapien
gttgctaggagaacgcgatgacgct

SEQ ID NO: 2510749 - DNA, 25 bp, Homo sapien
gaagtagaccttcacggagtcatag

SEQ ID NO: 2510750 - DNA, 25 bp, Homo sapien
taaatctgaaactcttgccttaagc

SEQ ID NO: 2510751 - DNA, 25 bp, Homo sapien
tgccttaagcaagagtactacagta

SEQ ID NO: 2510752 - DNA, 25 bp, Homo sapien
catttgctttgatctaactactgag

SEQ ID NO: 2510753 - DNA, 25 bp, Homo sapien
gtcatagataaaccactgtagtgca

SEQ ID NO: 2510754 - DNA, 25 bp, Homo sapien
cagagactctggcatctcgggtgga

SEQ ID NO: 2510755 - DNA, 25 bp, Homo sapien
gaagaagcttgggttaactcagtag

SEQ ID NO: 2510756 - DNA, 25 bp, Homo sapien
tctatgactccgtgaaggtctactt

SEQ ID NO: 2510757 - DNA, 25 bp, Homo sapien
tccacccgagatgccagagtctctg

SEQ ID NO: 2510758 - DNA, 25 bp, Homo sapien
tactgtagtactcttgcttaaggca

SEQ ID NO: 2510759 - DNA, 25 bp, Homo sapien
tgcactacagtggtttatctatgac

SEQ ID NO: 2510760 - DNA, 25 bp, Homo sapien
tcaaagcaaatgtggactgaatctg

SEQ ID NO: 2510761 - DNA, 25 bp, Homo sapien
agtcttctcatgagaggtcccatta

SEQ ID NO: 2510762 - DNA, 25 bp, Homo sapien
taccttagtctaatctcaataatgt

SEQ ID NO: 2510763 - DNA, 25 bp, Homo sapien
tttttgatttaccagtcttctcatg

SEQ ID NO: 2510764 - DNA, 25 bp, Homo sapien
ccttagtctaatctcaataatgtca

SEQ ID NO: 2510765 - DNA, 25 bp, Homo sapien
catctttaatatccttaatctcagc

SEQ ID NO: 2510766 - DNA, 25 bp, Homo sapien
taatctcagcttggactattgttaa

SEQ ID NO: 2510767 - DNA, 25 bp, Homo sapien
tctctttgtagtaagtcggtaacca

SEQ ID NO: 2510768 - DNA, 25 bp, Homo sapien
tctcccaatgcgtagtgttaaatca

SEQ ID NO: 2510769 - DNA, 25 bp, Homo sapien
ggctctgtcaccttctaagcttaga

SEQ ID NO: 2510770 - DNA, 25 bp, Homo sapien
cagatgctgtctttcggagcgttgc

SEQ ID NO: 2510771 - DNA, 25 bp, Homo sapien
tcctgtagacgctttagatgagcaa

SEQ ID NO: 2510772 - DNA, 25 bp, Homo sapien
taatgtcttgagaaagcgtcgtcag

SEQ ID NO: 2510773 - DNA, 25 bp, Homo sapien
ttaaatgtattagaagcttaccatt

SEQ ID NO: 2510774 - DNA, 25 bp, Homo sapien
atgtattagaagcttaccatttaaa

SEQ ID NO: 2510775 - DNA, 25 bp, Homo sapien
gattaaatgtattagaagcttacca

SEQ ID NO: 2510776 - DNA, 25 bp, Homo sapien
gaaaatataatatcacaatgattaa

SEQ ID NO: 2510777 - DNA, 25 bp, Homo sapien
taggaagaagctgttagtaaacctc

SEQ ID NO: 2510778 - DNA, 25 bp, Homo sapien
ggttaacctatttgcctaggatgga

SEQ ID NO: 2510779 - DNA, 25 bp, Homo sapien
ccaagggagaaaggactagacggct

SEQ ID NO: 2510780 - DNA, 25 bp, Homo sapien
gagttagagtctatcagtagctgaa

SEQ ID NO: 2510781 - DNA, 25 bp, Homo sapien
gcctggatctacaagcacagcaaca

SEQ ID NO: 2510782 - DNA, 25 bp, Homo sapien
atgttaaacattgcctggatctaca

SEQ ID NO: 2510783 - DNA, 25 bp, Homo sapien
cctatcatatattcaaggtatgagg

SEQ ID NO: 2510784 - DNA, 25 bp, Homo sapien
tagatgctgtcctgtaatgttaaac

SEQ ID NO: 2510785 - DNA, 25 bp, Homo sapien
tcatgttatacttgtagaagtgcag

SEQ ID NO: 2510786 - DNA, 25 bp, Homo sapien
taagagatcacatttgccttgacag

SEQ ID NO: 2510787 - DNA, 25 bp, Homo sapien
catattaaatgtggtgatcggtgag

SEQ ID NO: 2510788 - DNA, 25 bp, Homo sapien
agaacagtagccaccttgtttccat

SEQ ID NO: 2510789 - DNA, 25 bp, Homo sapien
cagtgcacgcaaataagagacattc

SEQ ID NO: 2510790 - DNA, 25 bp, Homo sapien
tattaattcatagcaaaggcaccag

SEQ ID NO: 2510791 - DNA, 25 bp, Homo sapien
gagaccatggatctagcaaactcat

SEQ ID NO: 2510792 - DNA, 25 bp, Homo sapien
tgaggcaggcacattaccaaccaac

SEQ ID NO: 2510793 - DNA, 25 bp, Homo sapien
tgtggataatccatttgtgtggaca

SEQ ID NO: 2510794 - DNA, 25 bp, Homo sapien
aaatactctttattagcccctggag

SEQ ID NO: 2510795 - DNA, 25 bp, Homo sapien
caataatgtaggataagatgaggcg

SEQ ID NO: 2510796 - DNA, 25 bp, Homo sapien
ctcaaaatcaatggactaatcaatt

SEQ ID NO: 2510797 - DNA, 25 bp, Homo sapien
ccaccaattcctttattttctatat

SEQ ID NO: 2510798 - DNA, 25 bp, Homo sapien
caattcctttattttctatattata

SEQ ID NO: 2510799 - DNA, 25 bp, Homo sapien
atcaccaccaattcctttattttct

SEQ ID NO: 2510800 - DNA, 25 bp, Homo sapien
tctatattatattcttttaaagttc

SEQ ID NO: 2510801 - DNA, 25 bp, Homo sapien
ttgagtatgctataaaatcatgaac

SEQ ID NO: 2510802 - DNA, 25 bp, Homo sapien
catctctggcaaagagggcatgctg

SEQ ID NO: 2510803 - DNA, 25 bp, Homo sapien
tgcctttgtatcagagcctagctgc

SEQ ID NO: 2510804 - DNA, 25 bp, Homo sapien
aatcttttagccgttcagtgagcaa

SEQ ID NO: 2510805 - DNA, 25 bp, Homo sapien
tcaaactgggtcatcaaagacatgg

SEQ ID NO: 2510806 - DNA, 25 bp, Homo sapien
tgcaggatgctttcagtagactcaa

SEQ ID NO: 2510807 - DNA, 25 bp, Homo sapien
ctgcaggatgctttcagtagactca

SEQ ID NO: 2510808 - DNA, 25 bp, Homo sapien
tttactttgaagttgttggaattca

SEQ ID NO: 2510809 - DNA, 25 bp, Homo sapien
tagagaggagatctggctattttgt

SEQ ID NO: 2510810 - DNA, 25 bp, Homo sapien
agagaggagatctggctattttgtt

SEQ ID NO: 2510811 - DNA, 25 bp, Homo sapien
tgttcgttttttgaggcagctgaag

SEQ ID NO: 2510812 - DNA, 25 bp, Homo sapien
catatggccttgtggaagagtgaga

SEQ ID NO: 2510813 - DNA, 25 bp, Homo sapien
gagacctcatacagatctatctagg

SEQ ID NO: 2510814 - DNA, 25 bp, Homo sapien
catgagccattgcagtctatagaga

SEQ ID NO: 2510815 - DNA, 25 bp, Homo sapien
tagcgtaggccttacaaaaagaatc

SEQ ID NO: 2510816 - DNA, 25 bp, Homo sapien
gctactataacgtttgctcctttgg

SEQ ID NO: 2510817 - DNA, 25 bp, Homo sapien
cataatgcatgcacggtgatcaaaa

SEQ ID NO: 2510818 - DNA, 25 bp, Homo sapien
tcctaatgacaccaatatatcgcca

SEQ ID NO: 2510819 - DNA, 25 bp, Homo sapien
tgatcaaaatatgagcactcctcca

SEQ ID NO: 2510820 - DNA, 25 bp, Homo sapien
tataacaacgtgaacgcttctgacg

SEQ ID NO: 2510821 - DNA, 25 bp, Homo sapien
tgagatacaagaaacgcccgaaagg

SEQ ID NO: 2510822 - DNA, 25 bp, Homo sapien
cttctgacgtgtagcgggagcttca

SEQ ID NO: 2510823 - DNA, 25 bp, Homo sapien
ggttggatcacctccggctggatgt

SEQ ID NO: 2510824 - DNA, 25 bp, Homo sapien
caggcacgttcgggggtctgcccag

SEQ ID NO: 2510825 - DNA, 25 bp, Homo sapien
aggcccaggcacgtccccagcgaca

SEQ ID NO: 2510826 - DNA, 25 bp, Homo sapien
aggcacgtccccagcgacagcaggc

SEQ ID NO: 2510827 - DNA, 25 bp, Homo sapien
gcccaggcacgtccccagcgacagc

SEQ ID NO: 2510828 - DNA, 25 bp, Homo sapien
tcttccggctcttcacctcagacat

SEQ ID NO: 2510829 - DNA, 25 bp, Homo sapien
ttcttccggctcttcacctcagaca

SEQ ID NO: 2510830 - DNA, 25 bp, Homo sapien
ctaggacgacaagcccagggcagct

SEQ ID NO: 2510831 - DNA, 25 bp, Homo sapien
ggacgacaagcccagggcagcttct

SEQ ID NO: 2510832 - DNA, 25 bp, Homo sapien
gacgacaagcccagggcagcttctt

SEQ ID NO: 2510833 - DNA, 25 bp, Homo sapien
gacaagcccagggcagcttcttcac

SEQ ID NO: 2510834 - DNA, 25 bp, Homo sapien
cctctccccggcatcctcgttgctt

SEQ ID NO: 2510835 - DNA, 25 bp, Homo sapien
tcacagacttggcaccgcccagagc

SEQ ID NO: 2510836 - DNA, 25 bp, Homo sapien
gcatcctcgttgcttcactgagtct

SEQ ID NO: 2510837 - DNA, 25 bp, Homo sapien
tgggaaccctgggcggtgaccgcgc

SEQ ID NO: 2510838 - DNA, 25 bp, Homo sapien
ggtgggcggcgacctcaacccacag

SEQ ID NO: 2510839 - DNA, 25 bp, Homo sapien
gcgacctcaacccacagcgccttcc

SEQ ID NO: 2510840 - DNA, 25 bp, Homo sapien
gagaggtgggcggcgacctcaaccc

SEQ ID NO: 2510841 - DNA, 25 bp, Homo sapien
gaggtgggcggcgacctcaacccac

SEQ ID NO: 2510842 - DNA, 25 bp, Homo sapien
gccgctgcccgagtccggcattggt

SEQ ID NO: 2510843 - DNA, 25 bp, Homo sapien
ccgagtccggcattggtgggaacgc

SEQ ID NO: 2510844 - DNA, 25 bp, Homo sapien
tccggcattggtgggaacgcggcgc

SEQ ID NO: 2510845 - DNA, 25 bp, Homo sapien
cattggtgggaacgcggcgcgtccc

SEQ ID NO: 2510846 - DNA, 25 bp, Homo sapien
ctcgccaaccttcggaggtccctgg

SEQ ID NO: 2510847 - DNA, 25 bp, Homo sapien
tggacgcccacctcgccaaccttcg

SEQ ID NO: 2510848 - DNA, 25 bp, Homo sapien
tgcgttgggtggacgcccacctcgc

SEQ ID NO: 2510849 - DNA, 25 bp, Homo sapien
gctgcgttgggtggacgcccacctc

SEQ ID NO: 2510850 - DNA, 25 bp, Homo sapien
cttggtagctgatttcagggactga

SEQ ID NO: 2510851 - DNA, 25 bp, Homo sapien
ggactgagaatttgaggacatggaa

SEQ ID NO: 2510852 - DNA, 25 bp, Homo sapien
gttttcgtggataaacgtgcgctgt

SEQ ID NO: 2510853 - DNA, 25 bp, Homo sapien
ggaatatttgataaccatcctgctc

SEQ ID NO: 2510854 - DNA, 25 bp, Homo sapien
tgtgttttcccaattaccaatgatg

SEQ ID NO: 2510855 - DNA, 25 bp, Homo sapien
gcagttccctgttttaccatgctaa

SEQ ID NO: 2510856 - DNA, 25 bp, Homo sapien
gttccttaactgcatgtagatcccg

SEQ ID NO: 2510857 - DNA, 25 bp, Homo sapien
ttctgaggaaccactagatttttcc

SEQ ID NO: 2510858 - DNA, 25 bp, Homo sapien
agagatggaggtttcaccagtgttg

SEQ ID NO: 2510859 - DNA, 25 bp, Homo sapien
agatggaggtttcaccagtgttgcc

SEQ ID NO: 2510860 - DNA, 25 bp, Homo sapien
caggctggccttaaactcttgggct

SEQ ID NO: 2510861 - DNA, 25 bp, Homo sapien
ggctcaagtgatctacccatcttgg

SEQ ID NO: 2510862 - DNA, 25 bp, Homo sapien
gagtatacagtttgcaggaacagag

SEQ ID NO: 2510863 - DNA, 25 bp, Homo sapien
tctgtgtctgtggaaatatagtacc

SEQ ID NO: 2510864 - DNA, 25 bp, Homo sapien
gaggatctaaaactccaggaacagg

SEQ ID NO: 2510865 - DNA, 25 bp, Homo sapien
gggatgactactttggtaaccagtg

SEQ ID NO: 2510866 - DNA, 25 bp, Homo sapien
gaaggagctgctacccatggaggct

SEQ ID NO: 2510867 - DNA, 25 bp, Homo sapien
tgtgtgctccgctttcagaagaagg

SEQ ID NO: 2510868 - DNA, 25 bp, Homo sapien
caaaatgcttatctctgctggagga

SEQ ID NO: 2510869 - DNA, 25 bp, Homo sapien
agtaaaaaggctgctactccggagg

SEQ ID NO: 2510870 - DNA, 25 bp, Homo sapien
tcttcggctatattagctgctgaca

SEQ ID NO: 2510871 - DNA, 25 bp, Homo sapien
tgcttagaggagagtcattgctgtc

SEQ ID NO: 2510872 - DNA, 25 bp, Homo sapien
caattgttctcctttagtgtaaaga

SEQ ID NO: 2510873 - DNA, 25 bp, Homo sapien
tttattcagttattaggagatcctg

SEQ ID NO: 2510874 - DNA, 25 bp, Homo sapien
tacaattgatggatccacattgaca

SEQ ID NO: 2510875 - DNA, 25 bp, Homo sapien
gaagtatggaatacatggtgataaa

SEQ ID NO: 2510876 - DNA, 25 bp, Homo sapien
cttttggccttgagataggctgcct

SEQ ID NO: 2510877 - DNA, 25 bp, Homo sapien
tgaccttgcacaagattgtttaact

SEQ ID NO: 2510878 - DNA, 25 bp, Homo sapien
cagtatctgagttggacactattcc

SEQ ID NO: 2510879 - DNA, 25 bp, Homo sapien
gcctggccttcagcagttctttttg

SEQ ID NO: 2510880 - DNA, 25 bp, Homo sapien
gccctgtgccatatctggactctag

SEQ ID NO: 2510881 - DNA, 25 bp, Homo sapien
aaacttgtatgttggaaagagtaga

SEQ ID NO: 2510882 - DNA, 25 bp, Homo sapien
catgcagtcggtcaagaggaggatt

SEQ ID NO: 2510883 - DNA, 25 bp, Homo sapien
gggctcatctcatgtaggcagagta

SEQ ID NO: 2510884 - DNA, 25 bp, Homo sapien
gatacctagtatgatggagctgcaa

SEQ ID NO: 2510885 - DNA, 25 bp, Homo sapien
tgaatggcccttgtcttaaaaagaa

SEQ ID NO: 2510886 - DNA, 25 bp, Homo sapien
tctctctgatggttcctgcccggta

SEQ ID NO: 2510887 - DNA, 25 bp, Homo sapien
tctgatggttcctgcccggtatggc

SEQ ID NO: 2510888 - DNA, 25 bp, Homo sapien
tcctgcccggtatggctggcatgaa

SEQ ID NO: 2510889 - DNA, 25 bp, Homo sapien
cggtatggctggcatgaagaagatc

SEQ ID NO: 2510890 - DNA, 25 bp, Homo sapien
ttgctctactgcagttaagggccag

SEQ ID NO: 2510891 - DNA, 25 bp, Homo sapien
tacggttttagatggactggctctt

SEQ ID NO: 2510892 - DNA, 25 bp, Homo sapien
gctgacacttgtacagacctgaaag

SEQ ID NO: 2510893 - DNA, 25 bp, Homo sapien
aatattgagatgtaccatgtgcctg

SEQ ID NO: 2510894 - DNA, 25 bp, Homo sapien
gcctgtagagattgctctttgaaaa

SEQ ID NO: 2510895 - DNA, 25 bp, Homo sapien
gatgcatcactactaagctctcgga

SEQ ID NO: 2510896 - DNA, 25 bp, Homo sapien
gaaggcatcagatgctgtctgctcc

SEQ ID NO: 2510897 - DNA, 25 bp, Homo sapien
tctgcttaacttgtatctgtgcctg

SEQ ID NO: 2510898 - DNA, 25 bp, Homo sapien
agcccatgatgctgcgatgtctgcc

SEQ ID NO: 2510899 - DNA, 25 bp, Homo sapien
ctcctttagcacagcccatgatgct

SEQ ID NO: 2510900 - DNA, 25 bp, Homo sapien
gatgtctgccaatgcagcatgcccc

SEQ ID NO: 2510901 - DNA, 25 bp, Homo sapien
ccatgatgctgcgatgtctgccaat

SEQ ID NO: 2510902 - DNA, 25 bp, Homo sapien
ttactgccacttgagagggagggct

SEQ ID NO: 2510903 - DNA, 25 bp, Homo sapien
ggagcagctgttgggatgcttgatt

SEQ ID NO: 2510904 - DNA, 25 bp, Homo sapien
gccttttgacttcccacgtgtctta

SEQ ID NO: 2510905 - DNA, 25 bp, Homo sapien
cacgtgtcttactgccacttgagag

SEQ ID NO: 2510906 - DNA, 25 bp, Homo sapien
caaaaggcctgagcaagttcaaagc

SEQ ID NO: 2510907 - DNA, 25 bp, Homo sapien
tggtcaaaaggcctgagcaagttca

SEQ ID NO: 2510908 - DNA, 25 bp, Homo sapien
ttggaaccggtttctgtgggaagca

SEQ ID NO: 2510909 - DNA, 25 bp, Homo sapien
gttcaaagcgccgtctctgccggct

SEQ ID NO: 2510910 - DNA, 25 bp, Homo sapien
aggcagtaaatgtggggctggctgg

SEQ ID NO: 2510911 - DNA, 25 bp, Homo sapien
gaggcagtaaatgtggggctggctg

SEQ ID NO: 2510912 - DNA, 25 bp, Homo sapien
agaggcagtaaatgtggggctggct

SEQ ID NO: 2510913 - DNA, 25 bp, Homo sapien
gaaggtgctcacagaacgatgccaa

SEQ ID NO: 2510914 - DNA, 25 bp, Homo sapien
cagaggcctgtgtatctttctcaga

SEQ ID NO: 2510915 - DNA, 25 bp, Homo sapien
tgggcctttggttctgctcctaaat

SEQ ID NO: 2510916 - DNA, 25 bp, Homo sapien
gactggttgaacttggaactgtgca

SEQ ID NO: 2510917 - DNA, 25 bp, Homo sapien
gagtcatcagaaataccttgggagg

SEQ ID NO: 2510918 - DNA, 25 bp, Homo sapien
gaatctcctggcaatcatatcacgg

SEQ ID NO: 2510919 - DNA, 25 bp, Homo sapien
tgatggctgcgtcagcacttccggg

SEQ ID NO: 2510920 - DNA, 25 bp, Homo sapien
gagtcgggagcatcagggaaaaccc

SEQ ID NO: 2510921 - DNA, 25 bp, Homo sapien
ccagtggcctttcgcccgtaacaag

SEQ ID NO: 2510922 - DNA, 25 bp, Homo sapien
tcactggtgcagaaagaacttcccc

SEQ ID NO: 2510923 - DNA, 25 bp, Homo sapien
gcctctcaggggttgcgactggaaa

SEQ ID NO: 2510924 - DNA, 25 bp, Homo sapien
gcgactggaaagtcttgcgttttcc

SEQ ID NO: 2510925 - DNA, 25 bp, Homo sapien
gggtggacgcggaggcgcgaaggaa

SEQ ID NO: 2510926 - DNA, 25 bp, Homo sapien
aggcaccgcgaggacaggaggacgg

SEQ ID NO: 2510927 - DNA, 25 bp, Homo sapien
gaccgcttggcgagcaaggcaccgc

SEQ ID NO: 2510928 - DNA, 25 bp, Homo sapien
acgcggaggcgcgaaggaaagcctg

SEQ ID NO: 2510929 - DNA, 25 bp, Homo sapien
cggtagattggccagagtcttttgc

SEQ ID NO: 2510930 - DNA, 25 bp, Homo sapien
aaatcgtggtttcatacttggtatt

SEQ ID NO: 2510931 - DNA, 25 bp, Homo sapien
tacttggtattaatgcccctcttgg

SEQ ID NO: 2510932 - DNA, 25 bp, Homo sapien
ccggctccacaatccacggtagatt

SEQ ID NO: 2510933 - DNA, 25 bp, Homo sapien
gacacacatttaccgcataccgact

SEQ ID NO: 2510934 - DNA, 25 bp, Homo sapien
tgtgggcacacacaccttgggagcc

SEQ ID NO: 2510935 - DNA, 25 bp, Homo sapien
ggtgacggtgaataaggcacagccc

SEQ ID NO: 2510936 - DNA, 25 bp, Homo sapien
tgatgcctgttatacggtcgccgcg

SEQ ID NO: 2510937 - DNA, 25 bp, Homo sapien
tatttaaatggacagccgaaggacc

SEQ ID NO: 2510938 - DNA, 25 bp, Homo sapien
tggcaaccccgtaaataataggcac

SEQ ID NO: 2510939 - DNA, 25 bp, Homo sapien
gacctgagacgatgaaagaactgga

SEQ ID NO: 2510940 - DNA, 25 bp, Homo sapien
tctccaaaacgcagaaaagctcctg

SEQ ID NO: 2510941 - DNA, 25 bp, Homo sapien
gagagattggttaataggtacaaaa

SEQ ID NO: 2510942 - DNA, 25 bp, Homo sapien
tctcatggagattgagtagaatggt

SEQ ID NO: 2510943 - DNA, 25 bp, Homo sapien
gttctcatatgtggaggctataaaa

SEQ ID NO: 2510944 - DNA, 25 bp, Homo sapien
catatgtggaggctataaaaagtgg

SEQ ID NO: 2510945 - DNA, 25 bp, Homo sapien
gcagctgccttctaccgtgccttga

SEQ ID NO: 2510946 - DNA, 25 bp, Homo sapien
caggaacggccctcaggtggatcta

SEQ ID NO: 2510947 - DNA, 25 bp, Homo sapien
ggtggatctacaccatggctgcctc

SEQ ID NO: 2510948 - DNA, 25 bp, Homo sapien
gtacaaatacaacgggacactcctg

SEQ ID NO: 2510949 - DNA, 25 bp, Homo sapien
tttcctatttcccttgaaggcatct

SEQ ID NO: 2510950 - DNA, 25 bp, Homo sapien
ctagaatactaatgcctgtcgaggg

SEQ ID NO: 2510951 - DNA, 25 bp, Homo sapien
tattctatgagctcttatgccaccc

SEQ ID NO: 2510952 - DNA, 25 bp, Homo sapien
gggactgatcttgaagcacataaat

SEQ ID NO: 2510953 - DNA, 25 bp, Homo sapien
caagcctgttgggacaggatgtctg

SEQ ID NO: 2510954 - DNA, 25 bp, Homo sapien
cctgttgggacaggatgtctgcaga

SEQ ID NO: 2510955 - DNA, 25 bp, Homo sapien
tcatgcaagcctgttgggacaggat

SEQ ID NO: 2510956 - DNA, 25 bp, Homo sapien
tgcaagcctgttgggacaggatgtc

SEQ ID NO: 2510957 - DNA, 25 bp, Homo sapien
catggcgcaggccttgcatatagca

SEQ ID NO: 2510958 - DNA, 25 bp, Homo sapien
cttctgaacaggcaccatgccgcag

SEQ ID NO: 2510959 - DNA, 25 bp, Homo sapien
tcagctgcgggagacaaagcacgca

SEQ ID NO: 2510960 - DNA, 25 bp, Homo sapien
gggaccgaggacatcatcactgtgt

SEQ ID NO: 2510961 - DNA, 25 bp, Homo sapien
gaggccaggggcttgtaggaggctt

SEQ ID NO: 2510962 - DNA, 25 bp, Homo sapien
ctctgcaaacctctctggaggccag

SEQ ID NO: 2510963 - DNA, 25 bp, Homo sapien
aggggcttgtaggaggctttgccct

SEQ ID NO: 2510964 - DNA, 25 bp, Homo sapien
gccaggggcttgtaggaggctttgc

SEQ ID NO: 2510965 - DNA, 25 bp, Homo sapien
ggatggcagctgaagccccagggaa

SEQ ID NO: 2510966 - DNA, 25 bp, Homo sapien
gaacactgctcccaagctttcctga

SEQ ID NO: 2510967 - DNA, 25 bp, Homo sapien
ctgatgggatggcagctgaagcccc

SEQ ID NO: 2510968 - DNA, 25 bp, Homo sapien
ccagggaacactgctcccaagcttt

SEQ ID NO: 2510969 - DNA, 25 bp, Homo sapien
cacggacttgcgaatgctaacgcgg

SEQ ID NO: 2510970 - DNA, 25 bp, Homo sapien
ccttttcttgcttgtagtgctagct

SEQ ID NO: 2510971 - DNA, 25 bp, Homo sapien
cctgtcccagggttaggatgatttc

SEQ ID NO: 2510972 - DNA, 25 bp, Homo sapien
tagctggtaagcgacttcgaatgcc

SEQ ID NO: 2510973 - DNA, 25 bp, Homo sapien
agatccccagttagccccaggagga

SEQ ID NO: 2510974 - DNA, 25 bp, Homo sapien
agtcctgggagcacttcaaccttgc

SEQ ID NO: 2510975 - DNA, 25 bp, Homo sapien
acaccattcaaagctctccctgtgg

SEQ ID NO: 2510976 - DNA, 25 bp, Homo sapien
tgggcagttggtttgtccccaaggc

SEQ ID NO: 2510977 - DNA, 25 bp, Homo sapien
ctgtgaggatgatcccacacactcc

SEQ ID NO: 2510978 - DNA, 25 bp, Homo sapien
tgggtctttttacctcaaacatctg

SEQ ID NO: 2510979 - DNA, 25 bp, Homo sapien
ggtctttttacctcaaacatctgtg

SEQ ID NO: 2510980 - DNA, 25 bp, Homo sapien
cttgtcttctctcactgagaaacca

SEQ ID NO: 2510981 - DNA, 25 bp, Homo sapien
ttgtcttctctcactgagaaaccat

SEQ ID NO: 2510982 - DNA, 25 bp, Homo sapien
tctcaagatgatttctagctttctt

SEQ ID NO: 2510983 - DNA, 25 bp, Homo sapien
tccactgcctacacttggcactcac

SEQ ID NO: 2510984 - DNA, 25 bp, Homo sapien
tttccactgcctacacttggcactc

SEQ ID NO: 2510985 - DNA, 25 bp, Homo sapien
ctttccactgcctacacttggcact

SEQ ID NO: 2510986 - DNA, 25 bp, Homo sapien
ttccactgcctacacttggcactca

SEQ ID NO: 2510987 - DNA, 25 bp, Homo sapien
ctcttagtgtttgcgtgggtcccct

SEQ ID NO: 2510988 - DNA, 25 bp, Homo sapien
tttgcctcttagtgtttgcgtgggt

SEQ ID NO: 2510989 - DNA, 25 bp, Homo sapien
gcctcttagtgtttgcgtgggtccc

SEQ ID NO: 2510990 - DNA, 25 bp, Homo sapien
cagctttgcctcttagtgtttgcgt

SEQ ID NO: 2510991 - DNA, 25 bp, Homo sapien
gctgtgttgcccatcccgacacacc

SEQ ID NO: 2510992 - DNA, 25 bp, Homo sapien
tttgtggtactgatgctggatgcca

SEQ ID NO: 2510993 - DNA, 25 bp, Homo sapien
ttgtggtactgatgctggatgccag

SEQ ID NO: 2510994 - DNA, 25 bp, Homo sapien
gttgcccatcccgacacaccagggc

SEQ ID NO: 2510995 - DNA, 25 bp, Homo sapien
gatgctcatcccatgggacctcagg

SEQ ID NO: 2510996 - DNA, 25 bp, Homo sapien
aacagatgctcatcccatgggacct

SEQ ID NO: 2510997 - DNA, 25 bp, Homo sapien
agatgctcatcccatgggacctcag

SEQ ID NO: 2510998 - DNA, 25 bp, Homo sapien
ggaaacagatgctcatcccatggga

SEQ ID NO: 2510999 - DNA, 25 bp, Homo sapien
gacatgacccaatatctgtgctcaa

SEQ ID NO: 2511000 - DNA, 25 bp, Homo sapien
cttaataggtgtgagagatgtgcca

SEQ ID NO: 2511001 - DNA, 25 bp, Homo sapien
gaatgaatgaatatccacaggacta

SEQ ID NO: 2511002 - DNA, 25 bp, Homo sapien
aacatattatccctgcaactgtggg

SEQ ID NO: 2511003 - DNA, 25 bp, Homo sapien
cagatgcagacacgttcaagggaag

SEQ ID NO: 2511004 - DNA, 25 bp, Homo sapien
gggcacagatgcagacacgttcaag

SEQ ID NO: 2511005 - DNA, 25 bp, Homo sapien
taaagtaccttgagatgtctgattg

SEQ ID NO: 2511006 - DNA, 25 bp, Homo sapien
tctgtatgtgggagtccagggcaga

SEQ ID NO: 2511007 - DNA, 25 bp, Homo sapien
acagactaagtgttcagcttccaac

SEQ ID NO: 2511008 - DNA, 25 bp, Homo sapien
tgcagtgcccgggtggcatggatct

SEQ ID NO: 2511009 - DNA, 25 bp, Homo sapien
ctgctggtgcagtgcccgggtggca

SEQ ID NO: 2511010 - DNA, 25 bp, Homo sapien
tgttgtaactatttgcttgtgtccc

SEQ ID NO: 2511011 - DNA, 25 bp, Homo sapien
ggcatggatctgattctgttgtaac

SEQ ID NO: 2511012 - DNA, 25 bp, Homo sapien
gctcctcttaggagctgcgtccttc

SEQ ID NO: 2511013 - DNA, 25 bp, Homo sapien
ggccatttgctcctcttaggagctg

SEQ ID NO: 2511014 - DNA, 25 bp, Homo sapien
tcagggccatttgctcctcttagga

SEQ ID NO: 2511015 - DNA, 25 bp, Homo sapien
catttgctcctcttaggagctgcgt

SEQ ID NO: 2511016 - DNA, 25 bp, Homo sapien
gaattttaagccttcaagactggac

SEQ ID NO: 2511017 - DNA, 25 bp, Homo sapien
tgacaaactgttcacctggagaaga

SEQ ID NO: 2511018 - DNA, 25 bp, Homo sapien
tattgaactgccctacataaggata

SEQ ID NO: 2511019 - DNA, 25 bp, Homo sapien
gcatctcagaattgctcaaagtccc

SEQ ID NO: 2511020 - DNA, 25 bp, Homo sapien
gctgttaactgacgtcagcaggcag

SEQ ID NO: 2511021 - DNA, 25 bp, Homo sapien
tgaacacctgttatttatgaagcac

SEQ ID NO: 2511022 - DNA, 25 bp, Homo sapien
ttcaatcctttcgtaatggcagtag

SEQ ID NO: 2511023 - DNA, 25 bp, Homo sapien
ttagcagaaaaagggtcaggctgtt

SEQ ID NO: 2511024 - DNA, 25 bp, Homo sapien
gactcacggaccttaagctggtata

SEQ ID NO: 2511025 - DNA, 25 bp, Homo sapien
aagcaatttgtaccaccttgagggc

SEQ ID NO: 2511026 - DNA, 25 bp, Homo sapien
gatatttagagcagtctcgcagggc

SEQ ID NO: 2511027 - DNA, 25 bp, Homo sapien
ggctggcctctcacgaatatatgaa

SEQ ID NO: 2511028 - DNA, 25 bp, Homo sapien
cccattctgcaaagtctttaatctg

SEQ ID NO: 2511029 - DNA, 25 bp, Homo sapien
gcccattctgcaaagtctttaatct

SEQ ID NO: 2511030 - DNA, 25 bp, Homo sapien
catgacagtagtggtgattagactt

SEQ ID NO: 2511031 - DNA, 25 bp, Homo sapien
gcagcacaggagatattacgaattt

SEQ ID NO: 2511032 - DNA, 25 bp, Homo sapien
cagtagtggtgattagacttcaaat

SEQ ID NO: 2511033 - DNA, 25 bp, Homo sapien
gatattacgaatttcatgctcagca

SEQ ID NO: 2511034 - DNA, 25 bp, Homo sapien
ccaatgaggctcttcaaatccctcg

SEQ ID NO: 2511035 - DNA, 25 bp, Homo sapien
ctcgccatcatgcttgcacgttgtt

SEQ ID NO: 2511036 - DNA, 25 bp, Homo sapien
tcctccctcagagcaagggcaggta

SEQ ID NO: 2511037 - DNA, 25 bp, Homo sapien
gcacgttgttcttgtgtcctgctcc

SEQ ID NO: 2511038 - DNA, 25 bp, Homo sapien
tctgttcccattgtctaagctataa

SEQ ID NO: 2511039 - DNA, 25 bp, Homo sapien
tgtctaagctataaggaaagctcat

SEQ ID NO: 2511040 - DNA, 25 bp, Homo sapien
tactactctgttcccattgtctaag

SEQ ID NO: 2511041 - DNA, 25 bp, Homo sapien
agccttctccccgactgtggaaact

SEQ ID NO: 2511042 - DNA, 25 bp, Homo sapien
tggtgagatctttaaatatgcttgc

SEQ ID NO: 2511043 - DNA, 25 bp, Homo sapien
tctggagtttatcaatctgctcctt

SEQ ID NO: 2511044 - DNA, 25 bp, Homo sapien
caaatcaaagtggcccactgacaca

SEQ ID NO: 2511045 - DNA, 25 bp, Homo sapien
aaagtggcccactgacacagcactg

SEQ ID NO: 2511046 - DNA, 25 bp, Homo sapien
aggtcactgggatgtggaccctgta

SEQ ID NO: 2511047 - DNA, 25 bp, Homo sapien
ccactgtcatactgggggagatcag

SEQ ID NO: 2511048 - DNA, 25 bp, Homo sapien
ccctgtatagccagttgaaattaac

SEQ ID NO: 2511049 - DNA, 25 bp, Homo sapien
ggggagatcagctaccttgcaggtc

SEQ ID NO: 2511050 - DNA, 25 bp, Homo sapien
ttgttgcatcaataaatttgactcc

SEQ ID NO: 2511051 - DNA, 25 bp, Homo sapien
gacagaaagaataatagtagggacc

SEQ ID NO: 2511052 - DNA, 25 bp, Homo sapien
agaataatagtagggaccttcttca

SEQ ID NO: 2511053 - DNA, 25 bp, Homo sapien
actcctttatatgagacagaaagaa

SEQ ID NO: 2511054 - DNA, 25 bp, Homo sapien
tttcagagagctctggtacccagag

SEQ ID NO: 2511055 - DNA, 25 bp, Homo sapien
gaccacaaatgtgattagagggtta

SEQ ID NO: 2511056 - DNA, 25 bp, Homo sapien
cagagccagcaaagaggccttgcaa

SEQ ID NO: 2511057 - DNA, 25 bp, Homo sapien
agcttgcaggaggaccacaaatgtg

SEQ ID NO: 2511058 - DNA, 25 bp, Homo sapien
agataccagcatagcctctatacac

SEQ ID NO: 2511059 - DNA, 25 bp, Homo sapien
tcagataccagcatagcctctatac

SEQ ID NO: 2511060 - DNA, 25 bp, Homo sapien
cagataccagcatagcctctataca

SEQ ID NO: 2511061 - DNA, 25 bp, Homo sapien
cctaagctcttttatcagcatagaa

SEQ ID NO: 2511062 - DNA, 25 bp, Homo sapien
ccccctaagctcttttatcagcata

SEQ ID NO: 2511063 - DNA, 25 bp, Homo sapien
gcatttttgcacaagcatcttgggt

SEQ ID NO: 2511064 - DNA, 25 bp, Homo sapien
gtccccctaagctcttttatcagca

SEQ ID NO: 2511065 - DNA, 25 bp, Homo sapien
gctgtggcttcattcggaggtcgca

SEQ ID NO: 2511066 - DNA, 25 bp, Homo sapien
gaagataagcttttctgggtgatgc

SEQ ID NO: 2511067 - DNA, 25 bp, Homo sapien
aaaagctttgtaatcacacgactgg

SEQ ID NO: 2511068 - DNA, 25 bp, Homo sapien
attcggaggtcgcaaggtaatggaa

SEQ ID NO: 2511069 - DNA, 25 bp, Homo sapien
ggtgctgtgaatgtaccaaaatgca

SEQ ID NO: 2511070 - DNA, 25 bp, Homo sapien
cttacacacaggtgctgtgaatgta

SEQ ID NO: 2511071 - DNA, 25 bp, Homo sapien
gtgctgtgaatgtaccaaaatgcat

SEQ ID NO: 2511072 - DNA, 25 bp, Homo sapien
acaggtgctgtgaatgtaccaaaat

SEQ ID NO: 2511073 - DNA, 25 bp, Homo sapien
cagccattgtgggaataacaagccc

SEQ ID NO: 2511074 - DNA, 25 bp, Homo sapien
caatctcggtctggaaatcactgaa

SEQ ID NO: 2511075 - DNA, 25 bp, Homo sapien
aataacaagccccagcacatacatt

SEQ ID NO: 2511076 - DNA, 25 bp, Homo sapien
ccacataagttgtagcagccattgt

SEQ ID NO: 2511077 - DNA, 25 bp, Homo sapien
ctgatggatcgctgagaaaggaaat

SEQ ID NO: 2511078 - DNA, 25 bp, Homo sapien
attatgaacctgatggatcgctgag

SEQ ID NO: 2511079 - DNA, 25 bp, Homo sapien
gattcgtccatatttcacagacaga

SEQ ID NO: 2511080 - DNA, 25 bp, Homo sapien
gaaatcctgcgttctgattcgtcca

SEQ ID NO: 2511081 - DNA, 25 bp, Homo sapien
caaaggaagacgtgtcagcttgcta

SEQ ID NO: 2511082 - DNA, 25 bp, Homo sapien
agacgtgtcagcttgctacccagca

SEQ ID NO: 2511083 - DNA, 25 bp, Homo sapien
gttaacaaaggaagacgtgtcagct

SEQ ID NO: 2511084 - DNA, 25 bp, Homo sapien
gtagttaacaaaggaagacgtgtca

SEQ ID NO: 2511085 - DNA, 25 bp, Homo sapien
ttgtctccaatagctctcctctgat

SEQ ID NO: 2511086 - DNA, 25 bp, Homo sapien
cttagacccattcactctgttggcc

SEQ ID NO: 2511087 - DNA, 25 bp, Homo sapien
ttctagcaagttcagtcttagaccc

SEQ ID NO: 2511088 - DNA, 25 bp, Homo sapien
tctccaatagctctcctctgatttg

SEQ ID NO: 2511089 - DNA, 25 bp, Homo sapien
tccttccctccttgtgtgtcagtct

SEQ ID NO: 2511090 - DNA, 25 bp, Homo sapien
ttgggcagactgcatcacttcctgg

SEQ ID NO: 2511091 - DNA, 25 bp, Homo sapien
tggataagagaagctcggtctgcgc

SEQ ID NO: 2511092 - DNA, 25 bp, Homo sapien
acttcctggtcactttgagtcatga

SEQ ID NO: 2511093 - DNA, 25 bp, Homo sapien
cacgggaatgcattctgtctcctct

SEQ ID NO: 2511094 - DNA, 25 bp, Homo sapien
gagcacgggaatgcattctgtctcc

SEQ ID NO: 2511095 - DNA, 25 bp, Homo sapien
caggattggagagcacgggaatgca

SEQ ID NO: 2511096 - DNA, 25 bp, Homo sapien
tggagagcacgggaatgcattctgt

SEQ ID NO: 2511097 - DNA, 25 bp, Homo sapien
taaataatttgtcaggctcacagag

SEQ ID NO: 2511098 - DNA, 25 bp, Homo sapien
gcgacttaaggcagacctgttgtaa

SEQ ID NO: 2511099 - DNA, 25 bp, Homo sapien
aaatcggatgcattccagataccgc

SEQ ID NO: 2511100 - DNA, 25 bp, Homo sapien
cagataccgcagtagttttgttagc

SEQ ID NO: 2511101 - DNA, 25 bp, Homo sapien
cacacttccggttaattgtaccaga

SEQ ID NO: 2511102 - DNA, 25 bp, Homo sapien
cataagctatgtcactgccaacaca

SEQ ID NO: 2511103 - DNA, 25 bp, Homo sapien
tgtcactgccaacacacttccggtt

SEQ ID NO: 2511104 - DNA, 25 bp, Homo sapien
gccacttgtgcctttcataagctat

SEQ ID NO: 2511105 - DNA, 25 bp, Homo sapien
tctgactgcacagaagaatcttcta

SEQ ID NO: 2511106 - DNA, 25 bp, Homo sapien
tcttctgactgcacagaagaatctt

SEQ ID NO: 2511107 - DNA, 25 bp, Homo sapien
taacagtacagttggtcatctgtat

SEQ ID NO: 2511108 - DNA, 25 bp, Homo sapien
ttaacagtacagttggtcatctgta

SEQ ID NO: 2511109 - DNA, 25 bp, Homo sapien
gagcaatgcagcaaaacagcacctg

SEQ ID NO: 2511110 - DNA, 25 bp, Homo sapien
gcctatacgcacagaattaaccaag

SEQ ID NO: 2511111 - DNA, 25 bp, Homo sapien
aagtccttgctgataaattacttta

SEQ ID NO: 2511112 - DNA, 25 bp, Homo sapien
tacttacatgcatctggaaaagtcc

SEQ ID NO: 2511113 - DNA, 25 bp, Homo sapien
gctgctcaatgtcaacaagcccaag

SEQ ID NO: 2511114 - DNA, 25 bp, Homo sapien
ttagcaagggcagattataacagcc

SEQ ID NO: 2511115 - DNA, 25 bp, Homo sapien
actgacctgtggacccaagaactgg

SEQ ID NO: 2511116 - DNA, 25 bp, Homo sapien
caagaactggactgcatgtaataag

SEQ ID NO: 2511117 - DNA, 25 bp, Homo sapien
caaataaccagtgcagttttgcatt

SEQ ID NO: 2511118 - DNA, 25 bp, Homo sapien
acaaacatgggagacaggcagcgtt

SEQ ID NO: 2511119 - DNA, 25 bp, Homo sapien
acatgggagacaggcagcgttctga

SEQ ID NO: 2511120 - DNA, 25 bp, Homo sapien
tttcacaaacatgggagacaggcag

SEQ ID NO: 2511121 - DNA, 25 bp, Homo sapien
gccacctctgagtgtttatacatag

SEQ ID NO: 2511122 - DNA, 25 bp, Homo sapien
ctaggccacctctgagtgtttatac

SEQ ID NO: 2511123 - DNA, 25 bp, Homo sapien
ttatacataggtagaagggtaagtc

SEQ ID NO: 2511124 - DNA, 25 bp, Homo sapien
tatacataggtagaagggtaagtcg

SEQ ID NO: 2511125 - DNA, 25 bp, Homo sapien
tctgcaggcagaatagccatggttt

SEQ ID NO: 2511126 - DNA, 25 bp, Homo sapien
catctgcaggcagaatagccatggt

SEQ ID NO: 2511127 - DNA, 25 bp, Homo sapien
tgcaggcagaatagccatggtttcc

SEQ ID NO: 2511128 - DNA, 25 bp, Homo sapien
gcaggcagaatagccatggtttcca

SEQ ID NO: 2511129 - DNA, 25 bp, Homo sapien
aaacatggaaaggtctgaacgtgac

SEQ ID NO: 2511130 - DNA, 25 bp, Homo sapien
tatgagaaaacgcaactagtcccag

SEQ ID NO: 2511131 - DNA, 25 bp, Homo sapien
tagttaggcacggacaataagcatc

SEQ ID NO: 2511132 - DNA, 25 bp, Homo sapien
tcccttcagggcaaagactttctgg

SEQ ID NO: 2511133 - DNA, 25 bp, Homo sapien
ccttgcatcgccctgcatgataatg

SEQ ID NO: 2511134 - DNA, 25 bp, Homo sapien
cctgcatgataatgtgaggaacgtc

SEQ ID NO: 2511135 - DNA, 25 bp, Homo sapien
gaacgtctagggagccaccagtggt

SEQ ID NO: 2511136 - DNA, 25 bp, Homo sapien
taatgtgaggaacgtctagggagcc

SEQ ID NO: 2511137 - DNA, 25 bp, Homo sapien
ctgaggaggagtgtgattaccactg

SEQ ID NO: 2511138 - DNA, 25 bp, Homo sapien
gatgccatgatgagaaagctaaaat

SEQ ID NO: 2511139 - DNA, 25 bp, Homo sapien
gacccaatgggtcttgatccttcat

SEQ ID NO: 2511140 - DNA, 25 bp, Homo sapien
aagctaaaatgagacccaatgggtc

SEQ ID NO: 2511141 - DNA, 25 bp, Homo sapien
catggtagatgccatgatgagaaag

SEQ ID NO: 2511142 - DNA, 25 bp, Homo sapien
tcagcttttcgacgaattttagaaa

SEQ ID NO: 2511143 - DNA, 25 bp, Homo sapien
tcttgtaggactcatgaacaccagt

SEQ ID NO: 2511144 - DNA, 25 bp, Homo sapien
accagtgactgccggccacttcttg

SEQ ID NO: 2511145 - DNA, 25 bp, Homo sapien
gagatctcagcttttcgacgaattt

SEQ ID NO: 2511146 - DNA, 25 bp, Homo sapien
gggcagagaaccagatgaatgtgct

SEQ ID NO: 2511147 - DNA, 25 bp, Homo sapien
acaaatagttcttaagataagggca

SEQ ID NO: 2511148 - DNA, 25 bp, Homo sapien
aatagttcttaagataagggcagag

SEQ ID NO: 2511149 - DNA, 25 bp, Homo sapien
agggcagagaaccagatgaatgtgc

SEQ ID NO: 2511150 - DNA, 25 bp, Homo sapien
tgggggatcgtcgtgcagcctgtct

SEQ ID NO: 2511151 - DNA, 25 bp, Homo sapien
gcttctgtgggggatcgtcgtgcag

SEQ ID NO: 2511152 - DNA, 25 bp, Homo sapien
tctgtgggggatcgtcgtgcagcct

SEQ ID NO: 2511153 - DNA, 25 bp, Homo sapien
ggggatcgtcgtgcagcctgtctcc

SEQ ID NO: 2511154 - DNA, 25 bp, Homo sapien
ctgtggccaatcaaattgattttta

SEQ ID NO: 2511155 - DNA, 25 bp, Homo sapien
aaagggaactgagaattgcagcgcc

SEQ ID NO: 2511156 - DNA, 25 bp, Homo sapien
gaactgagaattgcagcgcctcaat

SEQ ID NO: 2511157 - DNA, 25 bp, Homo sapien
ctgagaattgcagcgcctcaatcct

SEQ ID NO: 2511158 - DNA, 25 bp, Homo sapien
gaattgcagcgcctcaatcctcagc

SEQ ID NO: 2511159 - DNA, 25 bp, Homo sapien
ttggcctaaactgatgtagatttta

SEQ ID NO: 2511160 - DNA, 25 bp, Homo sapien
tttggcctaaactgatgtagatttt

SEQ ID NO: 2511161 - DNA, 25 bp, Homo sapien
gccctattcctttgacagccaccct

SEQ ID NO: 2511162 - DNA, 25 bp, Homo sapien
ccctattcctttgacagccaccctc

SEQ ID NO: 2511163 - DNA, 25 bp, Homo sapien
acgccctattcctttgacagccacc

SEQ ID NO: 2511164 - DNA, 25 bp, Homo sapien
ctacgccctattcctttgacagcca

SEQ ID NO: 2511165 - DNA, 25 bp, Homo sapien
tatagctgcttaaggtttgctgaaa

SEQ ID NO: 2511166 - DNA, 25 bp, Homo sapien
tggctcacaatattccaggtgtaag

SEQ ID NO: 2511167 - DNA, 25 bp, Homo sapien
atgatgaggagggtaaatgttagcc

SEQ ID NO: 2511168 - DNA, 25 bp, Homo sapien
aatgttagccaaggtgaatgtcccc

SEQ ID NO: 2511169 - DNA, 25 bp, Homo sapien
tgaggcttcttaagatgttgcttct

SEQ ID NO: 2511170 - DNA, 25 bp, Homo sapien
attggttatgtcatcatgaggcttc

SEQ ID NO: 2511171 - DNA, 25 bp, Homo sapien
ttttgacctttagctacactattgg

SEQ ID NO: 2511172 - DNA, 25 bp, Homo sapien
tagctacactattggttatgtcatc

SEQ ID NO: 2511173 - DNA, 25 bp, Homo sapien
aaactgcaagtgttctgagcagttc

SEQ ID NO: 2511174 - DNA, 25 bp, Homo sapien
taaatgccaagaatggaagttgcgg

SEQ ID NO: 2511175 - DNA, 25 bp, Homo sapien
cttgcatacagttttgaccatgaca

SEQ ID NO: 2511176 - DNA, 25 bp, Homo sapien
gttgcggtggaaactgatctgcttt

SEQ ID NO: 2511177 - DNA, 25 bp, Homo sapien
gcaaaagtgcctgtgtaaaattcca

SEQ ID NO: 2511178 - DNA, 25 bp, Homo sapien
gatactgaataacctctgggagcct

SEQ ID NO: 2511179 - DNA, 25 bp, Homo sapien
ttagggtggcataagatgaggatat

SEQ ID NO: 2511180 - DNA, 25 bp, Homo sapien
ctagaagttagggtggcataagatg

SEQ ID NO: 2511181 - DNA, 25 bp, Homo sapien
ctgaataacctctgggagcctagga

SEQ ID NO: 2511182 - DNA, 25 bp, Homo sapien
acaaatttcgcattgcatgctgaag

SEQ ID NO: 2511183 - DNA, 25 bp, Homo sapien
gggaccacaaatttcgcattgcatg

SEQ ID NO: 2511184 - DNA, 25 bp, Homo sapien
tttgaaagggaccacaaatttcgca

SEQ ID NO: 2511185 - DNA, 25 bp, Homo sapien
gaaagggaccacaaatttcgcattg

SEQ ID NO: 2511186 - DNA, 25 bp, Homo sapien
tgcaaattagagtactgatgttcct

SEQ ID NO: 2511187 - DNA, 25 bp, Homo sapien
tgcagctcggctggatcccagcttc

SEQ ID NO: 2511188 - DNA, 25 bp, Homo sapien
tatgacctctgctgctaacaggctc

SEQ ID NO: 2511189 - DNA, 25 bp, Homo sapien
tgggagacgccagctatgcaaatta

SEQ ID NO: 2511190 - DNA, 25 bp, Homo sapien
gctgactgttgtgtcctcagtatta

SEQ ID NO: 2511191 - DNA, 25 bp, Homo sapien
aaacacgagtttatattcctggagg

SEQ ID NO: 2511192 - DNA, 25 bp, Homo sapien
taaccgtaagagctggcgttctctc

SEQ ID NO: 2511193 - DNA, 25 bp, Homo sapien
tattattcacttcaataaccgtaag

SEQ ID NO: 2511194 - DNA, 25 bp, Homo sapien
ggccctaaagcaagagtgtccctgg

SEQ ID NO: 2511195 - DNA, 25 bp, Homo sapien
ggagggactcacacagatatctggg

SEQ ID NO: 2511196 - DNA, 25 bp, Homo sapien
caatagctggtatagagggcctgtc

SEQ ID NO: 2511197 - DNA, 25 bp, Homo sapien
gttgactgtatgtggctgggccctc

SEQ ID NO: 2511198 - DNA, 25 bp, Homo sapien
aagcttgtacaacaaatgcaaacac

SEQ ID NO: 2511199 - DNA, 25 bp, Homo sapien
acaaatgcaaacacttggctgtcag

SEQ ID NO: 2511200 - DNA, 25 bp, Homo sapien
aaatgcaaacacttggctgtcagct

SEQ ID NO: 2511201 - DNA, 25 bp, Homo sapien
gctaacaaagcttgtacaacaaatg

SEQ ID NO: 2511202 - DNA, 25 bp, Homo sapien
catcgggaggaaggtgtttaagagg

SEQ ID NO: 2511203 - DNA, 25 bp, Homo sapien
atctcatcgggaggaaggtgtttaa

SEQ ID NO: 2511204 - DNA, 25 bp, Homo sapien
tctcatcgggaggaaggtgtttaag

SEQ ID NO: 2511205 - DNA, 25 bp, Homo sapien
ctcatcgggaggaaggtgtttaaga

SEQ ID NO: 2511206 - DNA, 25 bp, Homo sapien
tcggaaagctacaaaatcaatcctg

SEQ ID NO: 2511207 - DNA, 25 bp, Homo sapien
aatcaatcctgaaagttttatctcc

SEQ ID NO: 2511208 - DNA, 25 bp, Homo sapien
caatcctgaaagttttatctcccat

SEQ ID NO: 2511209 - DNA, 25 bp, Homo sapien
cttcggaaagctacaaaatcaatcc

SEQ ID NO: 2511210 - DNA, 25 bp, Homo sapien
tatcacagagccgtcaacattacgg

SEQ ID NO: 2511211 - DNA, 25 bp, Homo sapien
gaataacccagataccagcggcatc

SEQ ID NO: 2511212 - DNA, 25 bp, Homo sapien
tcaacattacggactcgaataaccc

SEQ ID NO: 2511213 - DNA, 25 bp, Homo sapien
ctattttatcacagagccgtcaaca

SEQ ID NO: 2511214 - DNA, 25 bp, Homo sapien
gaaatgcagcgaggactcgccttcc

SEQ ID NO: 2511215 - DNA, 25 bp, Homo sapien
tggccagtctctgaaaacgcgaaac

SEQ ID NO: 2511216 - DNA, 25 bp, Homo sapien
gaaaccttcctgagctgtccatttg

SEQ ID NO: 2511217 - DNA, 25 bp, Homo sapien
aggagaaatgcagcgaggactcgcc

SEQ ID NO: 2511218 - DNA, 25 bp, Homo sapien
gaagcagcaaatcgcagtctctgct

SEQ ID NO: 2511219 - DNA, 25 bp, Homo sapien
gaccttcaccgaagcagcaaatcgc

SEQ ID NO: 2511220 - DNA, 25 bp, Homo sapien
taacattggaaagtccatgcccacg

SEQ ID NO: 2511221 - DNA, 25 bp, Homo sapien
gctctccaaggcttaacattggaaa

SEQ ID NO: 2511222 - DNA, 25 bp, Homo sapien
caaactcctcggaaccccaagaatg

SEQ ID NO: 2511223 - DNA, 25 bp, Homo sapien
agcgtctccgcagccttcccggctt

SEQ ID NO: 2511224 - DNA, 25 bp, Homo sapien
ccctccgtagagaccgctagctgag

SEQ ID NO: 2511225 - DNA, 25 bp, Homo sapien
tgggggaatcgataaccagaacagg

SEQ ID NO: 2511226 - DNA, 25 bp, Homo sapien
gggctggccgcgagccgggatccgc

SEQ ID NO: 2511227 - DNA, 25 bp, Homo sapien
ggccgcgagccgggatccgcgaggg

SEQ ID NO: 2511228 - DNA, 25 bp, Homo sapien
agccgctcgggctggccgcgagccg

SEQ ID NO: 2511229 - DNA, 25 bp, Homo sapien
gccgctcgggctggccgcgagccgg

SEQ ID NO: 2511230 - DNA, 25 bp, Homo sapien
gcgggctctggcccccgaggacgca

SEQ ID NO: 2511231 - DNA, 25 bp, Homo sapien
ctctggcccccgaggacgcagacat

SEQ ID NO: 2511232 - DNA, 25 bp, Homo sapien
gctctggcccccgaggacgcagaca

SEQ ID NO: 2511233 - DNA, 25 bp, Homo sapien
ctggcgggctctggcccccgaggac

SEQ ID NO: 2511234 - DNA, 25 bp, Homo sapien
ccgctcccctagccgttgcctctgt

SEQ ID NO: 2511235 - DNA, 25 bp, Homo sapien
ggcgagcgcgccgaggaagggcggg

SEQ ID NO: 2511236 - DNA, 25 bp, Homo sapien
ctgggcgcccccagcgaatgcgagc

SEQ ID NO: 2511237 - DNA, 25 bp, Homo sapien
cccagcgaatgcgagcggcgaggcg

SEQ ID NO: 2511238 - DNA, 25 bp, Homo sapien
gaccctcactgcgagagcgatgcgg

SEQ ID NO: 2511239 - DNA, 25 bp, Homo sapien
ggcggaccctcactgcgagagcgat

SEQ ID NO: 2511240 - DNA, 25 bp, Homo sapien
ctcgggcggaccctcactgcgagag

SEQ ID NO: 2511241 - DNA, 25 bp, Homo sapien
ctcactgcgagagcgatgcgggccc

SEQ ID NO: 2511242 - DNA, 25 bp, Homo sapien
tatggatttcaactaacacgtgact

SEQ ID NO: 2511243 - DNA, 25 bp, Homo sapien
tgatgtcatatgtcgagctggttgc

SEQ ID NO: 2511244 - DNA, 25 bp, Homo sapien
gatggactctaatcttgtggaactc

SEQ ID NO: 2511245 - DNA, 25 bp, Homo sapien
caaaggcagtgctattgctgtaaaa

SEQ ID NO: 2511246 - DNA, 25 bp, Homo sapien
taatgtcaactgtatggccctgaga

SEQ ID NO: 2511247 - DNA, 25 bp, Homo sapien
cacgggctctctgtcaacatatgga

SEQ ID NO: 2511248 - DNA, 25 bp, Homo sapien
tatcaggctcccaaaagagcagagg

SEQ ID NO: 2511249 - DNA, 25 bp, Homo sapien
taatctccagtgaagcagtgccaat

SEQ ID NO: 2511250 - DNA, 25 bp, Homo sapien
gaaatcatggccaagacgactgtca

SEQ ID NO: 2511251 - DNA, 25 bp, Homo sapien
ttttgtgtatgccataaggtccagt

SEQ ID NO: 2511252 - DNA, 25 bp, Homo sapien
tcttggcaccgtttgtgatgaccag

SEQ ID NO: 2511253 - DNA, 25 bp, Homo sapien
tcattgctttgtatgtcacgtccag

SEQ ID NO: 2511254 - DNA, 25 bp, Homo sapien
ctttgctctctatgtggcgggggca

SEQ ID NO: 2511255 - DNA, 25 bp, Homo sapien
cagtagtggcttgtgtgcaggcagc

SEQ ID NO: 2511256 - DNA, 25 bp, Homo sapien
gatgggagcctgaccttgggtcaca

SEQ ID NO: 2511257 - DNA, 25 bp, Homo sapien
gtcacaggcacacgaaaggcacagc

SEQ ID NO: 2511258 - DNA, 25 bp, Homo sapien
cacagctccagttgaagtcctttgc

SEQ ID NO: 2511259 - DNA, 25 bp, Homo sapien
cagaagccgatctctttgctaaacc

SEQ ID NO: 2511260 - DNA, 25 bp, Homo sapien
cctgactcggtagcctggcatctgt

SEQ ID NO: 2511261 - DNA, 25 bp, Homo sapien
tccacagaatatagccctgactcgg

SEQ ID NO: 2511262 - DNA, 25 bp, Homo sapien
ctaattgttccatgttccaagctaa

SEQ ID NO: 2511263 - DNA, 25 bp, Homo sapien
gttccaagctaactgtgctcctcgc

SEQ ID NO: 2511264 - DNA, 25 bp, Homo sapien
gctctcctaattgttccatgttcca

SEQ ID NO: 2511265 - DNA, 25 bp, Homo sapien
tcctgctgctctcctaattgttcca

SEQ ID NO: 2511266 - DNA, 25 bp, Homo sapien
ttcaaggccttcatcccatctctcc

SEQ ID NO: 2511267 - DNA, 25 bp, Homo sapien
tctccatctgtcaccgtgtaccctt

SEQ ID NO: 2511268 - DNA, 25 bp, Homo sapien
ccatctctccgtcagccagaaattt

SEQ ID NO: 2511269 - DNA, 25 bp, Homo sapien
atctgtcaccgtgtacccttgttca

SEQ ID NO: 2511270 - DNA, 25 bp, Homo sapien
gggcaatggtagcacacaaagggcc

SEQ ID NO: 2511271 - DNA, 25 bp, Homo sapien
ggcgtgagccactgtgcccagcata

SEQ ID NO: 2511272 - DNA, 25 bp, Homo sapien
gctgcaactacaggcgcataccacc

SEQ ID NO: 2511273 - DNA, 25 bp, Homo sapien
gtagctgcaactacaggcgcatacc

SEQ ID NO: 2511274 - DNA, 25 bp, Homo sapien
accaccacgcctggctcatttttgt

SEQ ID NO: 2511275 - DNA, 25 bp, Homo sapien
gctttccacataactgcaagatgca

SEQ ID NO: 2511276 - DNA, 25 bp, Homo sapien
tagtccgcactgacagcattctcaa

SEQ ID NO: 2511277 - DNA, 25 bp, Homo sapien
gctatttggccactacataacaaga

SEQ ID NO: 2511278 - DNA, 25 bp, Homo sapien
gtttgtgtggtaaaatactctggcc

SEQ ID NO: 2511279 - DNA, 25 bp, Homo sapien
gctgtgataagaacacaacatgagg

SEQ ID NO: 2511280 - DNA, 25 bp, Homo sapien
taagaacacaacatgaggtctaccc

SEQ ID NO: 2511281 - DNA, 25 bp, Homo sapien
tattatgctgtgataagaacacaac

SEQ ID NO: 2511282 - DNA, 25 bp, Homo sapien
aattttattatgctgtgataagaac

SEQ ID NO: 2511283 - DNA, 25 bp, Homo sapien
taacatagccgacacttcatgtact

SEQ ID NO: 2511284 - DNA, 25 bp, Homo sapien
ttcaggtcttgagccccgatttaat

SEQ ID NO: 2511285 - DNA, 25 bp, Homo sapien
ccagcctgaagcatagttgacaaag

SEQ ID NO: 2511286 - DNA, 25 bp, Homo sapien
tatttacagcgtacaacatggtgtt

SEQ ID NO: 2511287 - DNA, 25 bp, Homo sapien
ccaatgaggggttagcagaaagctg

SEQ ID NO: 2511288 - DNA, 25 bp, Homo sapien
tagcagaaagctggcgaaggattct

SEQ ID NO: 2511289 - DNA, 25 bp, Homo sapien
gaaagctggcgaaggattctggaaa

SEQ ID NO: 2511290 - DNA, 25 bp, Homo sapien
gttagcagaaagctggcgaaggatt

SEQ ID NO: 2511291 - DNA, 25 bp, Homo sapien
gtgatgcttggatataggtccgcca

SEQ ID NO: 2511292 - DNA, 25 bp, Homo sapien
aatgcagttgacagatgacactacc

SEQ ID NO: 2511293 - DNA, 25 bp, Homo sapien
cttaaacgtggatgtgatgcttgga

SEQ ID NO: 2511294 - DNA, 25 bp, Homo sapien
ttggatataggtccgccattctgtg

SEQ ID NO: 2511295 - DNA, 25 bp, Homo sapien
aacaaatgcgggagcgtagctgtga

SEQ ID NO: 2511296 - DNA, 25 bp, Homo sapien
gctaggaagggcgtcgctgttgttg

SEQ ID NO: 2511297 - DNA, 25 bp, Homo sapien
caactgttcattaaacagggaacaa

SEQ ID NO: 2511298 - DNA, 25 bp, Homo sapien
tgggactgcagtgcgctaggaaggg

SEQ ID NO: 2511299 - DNA, 25 bp, Homo sapien
tgtggcccggtgtgacagcaggtct

SEQ ID NO: 2511300 - DNA, 25 bp, Homo sapien
tcatagcaatcagccactcgggact

SEQ ID NO: 2511301 - DNA, 25 bp, Homo sapien
gggactttcttgcagtctgagctca

SEQ ID NO: 2511302 - DNA, 25 bp, Homo sapien
tactggtccaagagtgtcatttagg

SEQ ID NO: 2511303 - DNA, 25 bp, Homo sapien
ttctgaaggcttgattactggtcca

SEQ ID NO: 2511304 - DNA, 25 bp, Homo sapien
ttgaacacaatctctcagaagaatc

SEQ ID NO: 2511305 - DNA, 25 bp, Homo sapien
agttttgaacacaatctctcagaag

SEQ ID NO: 2511306 - DNA, 25 bp, Homo sapien
aaagttttgaacacaatctctcaga

SEQ ID NO: 2511307 - DNA, 25 bp, Homo sapien
tgaatctttgtaagcacgaacagag

SEQ ID NO: 2511308 - DNA, 25 bp, Homo sapien
cttcagttacggtccctgcagaatc

SEQ ID NO: 2511309 - DNA, 25 bp, Homo sapien
gatttgtagttcaaagaagagggcc

SEQ ID NO: 2511310 - DNA, 25 bp, Homo sapien
tgcgactctcctttattcattgaac

SEQ ID NO: 2511311 - DNA, 25 bp, Homo sapien
ggtgggccaggcattcagaaagttg

SEQ ID NO: 2511312 - DNA, 25 bp, Homo sapien
tgatctcctgtggtcaggggctaag

SEQ ID NO: 2511313 - DNA, 25 bp, Homo sapien
ctttatgtagctctccagcccatga

SEQ ID NO: 2511314 - DNA, 25 bp, Homo sapien
aactctatctctccataaggcaggg

SEQ ID NO: 2511315 - DNA, 25 bp, Homo sapien
ggccaatataccaatgtttgctata

SEQ ID NO: 2511316 - DNA, 25 bp, Homo sapien
cagatgttcataggcttgtattaac

SEQ ID NO: 2511317 - DNA, 25 bp, Homo sapien
gttaaactatcgtacattcctggga

SEQ ID NO: 2511318 - DNA, 25 bp, Homo sapien
tactgtaaatctgtattgaattttg

SEQ ID NO: 2511319 - DNA, 25 bp, Homo sapien
aaggactcaactttgttcgtactgg

SEQ ID NO: 2511320 - DNA, 25 bp, Homo sapien
tgctggcttaaccaacgataggtaa

SEQ ID NO: 2511321 - DNA, 25 bp, Homo sapien
ggctgcccttaactgcaaccaagtt

SEQ ID NO: 2511322 - DNA, 25 bp, Homo sapien
cagagatccatccttgacatggtaa

SEQ ID NO: 2511323 - DNA, 25 bp, Homo sapien
taaaacatagactggaggaagcctc

SEQ ID NO: 2511324 - DNA, 25 bp, Homo sapien
tgaagtacttgtcagggtaagcggt

SEQ ID NO: 2511325 - DNA, 25 bp, Homo sapien
gagagcaggttgatcaataaaacat

SEQ ID NO: 2511326 - DNA, 25 bp, Homo sapien
tatgaagggtgaattgctcacgctt

SEQ ID NO: 2511327 - DNA, 25 bp, Homo sapien
gatttggatgtgaatagacctgggc

SEQ ID NO: 2511328 - DNA, 25 bp, Homo sapien
atgggaatggtaacacctgccttac

SEQ ID NO: 2511329 - DNA, 25 bp, Homo sapien
aagaaggcagctttacacgtgacgt

SEQ ID NO: 2511330 - DNA, 25 bp, Homo sapien
cacgtgacgtaaagaagattgactg

SEQ ID NO: 2511331 - DNA, 25 bp, Homo sapien
caaggttgagtgactggcagtctgc

SEQ ID NO: 2511332 - DNA, 25 bp, Homo sapien
tgcctgggcacacgtcaaagagcac

SEQ ID NO: 2511333 - DNA, 25 bp, Homo sapien
aataggtgccacatgctgttatgac

SEQ ID NO: 2511334 - DNA, 25 bp, Homo sapien
ggaacagtcacgaaaccataatgtg

SEQ ID NO: 2511335 - DNA, 25 bp, Homo sapien
tcagggcacatcctgatgcagacag

SEQ ID NO: 2511336 - DNA, 25 bp, Homo sapien
cctgggggtgattttgatagtttct

SEQ ID NO: 2511337 - DNA, 25 bp, Homo sapien
agctgcaatgactgccgagttggct

SEQ ID NO: 2511338 - DNA, 25 bp, Homo sapien
atgcagacagcctgttggctctgac

SEQ ID NO: 2511339 - DNA, 25 bp, Homo sapien
taaagacctgtacttggcagccatc

SEQ ID NO: 2511340 - DNA, 25 bp, Homo sapien
tacacttgagatgacgttgtgagtt

SEQ ID NO: 2511341 - DNA, 25 bp, Homo sapien
tgagcaagagaatgcgaataataca

SEQ ID NO: 2511342 - DNA, 25 bp, Homo sapien
agatgacgttgtgagttgagagcct

SEQ ID NO: 2511343 - DNA, 25 bp, Homo sapien
tatctcctgggcatactgggaagct

SEQ ID NO: 2511344 - DNA, 25 bp, Homo sapien
gtccaggagcggaaagactttcagc

SEQ ID NO: 2511345 - DNA, 25 bp, Homo sapien
ctagagttagcatatcaagcagggc

SEQ ID NO: 2511346 - DNA, 25 bp, Homo sapien
caagcagggctatctatgcacccaa

SEQ ID NO: 2511347 - DNA, 25 bp, Homo sapien
aagggtcaaacggaagcagctttag

SEQ ID NO: 2511348 - DNA, 25 bp, Homo sapien
agataccctcaggttctatggaggc

SEQ ID NO: 2511349 - DNA, 25 bp, Homo sapien
tactctcttcttgatacatgggtta

SEQ ID NO: 2511350 - DNA, 25 bp, Homo sapien
cacactgtatgtcctactctttgct

SEQ ID NO: 2511351 - DNA, 25 bp, Homo sapien
cagtagtttgcaaaacaggctgcac

SEQ ID NO: 2511352 - DNA, 25 bp, Homo sapien
ttttcaaggcaacgggcatgaggca

SEQ ID NO: 2511353 - DNA, 25 bp, Homo sapien
cccaggtgccaacacgaaagatttc

SEQ ID NO: 2511354 - DNA, 25 bp, Homo sapien
taagacctcctgatacccaggtgcc

SEQ ID NO: 2511355 - DNA, 25 bp, Homo sapien
aggtgtcactaagagaccaacttac

SEQ ID NO: 2511356 - DNA, 25 bp, Homo sapien
tatcaagggttgaatagttaaggtg

SEQ ID NO: 2511357 - DNA, 25 bp, Homo sapien
tagttaaggtgtcactaagagacca

SEQ ID NO: 2511358 - DNA, 25 bp, Homo sapien
tgaatagttaaggtgtcactaagag

SEQ ID NO: 2511359 - DNA, 25 bp, Homo sapien
gaagtgtagccattaattagaaagg

SEQ ID NO: 2511360 - DNA, 25 bp, Homo sapien
tttttcaacaggtccatcgaagtgt

SEQ ID NO: 2511361 - DNA, 25 bp, Homo sapien
ggtccatcgaagtgtagccattaat

SEQ ID NO: 2511362 - DNA, 25 bp, Homo sapien
ggtgtagtcgcccagttcaatggaa

SEQ ID NO: 2511363 - DNA, 25 bp, Homo sapien
tacagaggtgggatggtagccatca

SEQ ID NO: 2511364 - DNA, 25 bp, Homo sapien
agccatcatgcccaatgggtctcat

SEQ ID NO: 2511365 - DNA, 25 bp, Homo sapien
atggtagccatcatgcccaatgggt

SEQ ID NO: 2511366 - DNA, 25 bp, Homo sapien
ctacagaggtgggatggtagccatc

SEQ ID NO: 2511367 - DNA, 25 bp, Homo sapien
tgtcatgcagaaactctgcatgcca

SEQ ID NO: 2511368 - DNA, 25 bp, Homo sapien
tctaatgttaccattattccaccga

SEQ ID NO: 2511369 - DNA, 25 bp, Homo sapien
tctatctatccttaaaaggtcctgt

SEQ ID NO: 2511370 - DNA, 25 bp, Homo sapien
tgtttaaacgttacctcctgtgtga

SEQ ID NO: 2511371 - DNA, 25 bp, Homo sapien
ttattccaccgaaaaatcatatctt

SEQ ID NO: 2511372 - DNA, 25 bp, Homo sapien
gatgggacaacttattaacctagaa

SEQ ID NO: 2511373 - DNA, 25 bp, Homo sapien
tcttatgagatgacggagccacagg

SEQ ID NO: 2511374 - DNA, 25 bp, Homo sapien
ccacaggatggaaggtatagcagga

SEQ ID NO: 2511375 - DNA, 25 bp, Homo sapien
ggaaccctgaaaagccaataatgga

SEQ ID NO: 2511376 - DNA, 25 bp, Homo sapien
taaccgaggagaatgagtaggcaga

SEQ ID NO: 2511377 - DNA, 25 bp, Homo sapien
cacagaatagactcgctctcctggg

SEQ ID NO: 2511378 - DNA, 25 bp, Homo sapien
actggctggaaccaataaggctgac

SEQ ID NO: 2511379 - DNA, 25 bp, Homo sapien
taactacgtattgtggaagccgaaa

SEQ ID NO: 2511380 - DNA, 25 bp, Homo sapien
agtactaaccagacccgaacttgct

SEQ ID NO: 2511381 - DNA, 25 bp, Homo sapien
gacccgaacttgcttagcttccgag

SEQ ID NO: 2511382 - DNA, 25 bp, Homo sapien
cagacccgaacttgcttagcttccg

SEQ ID NO: 2511383 - DNA, 25 bp, Homo sapien
taaccagacccgaacttgcttagct

SEQ ID NO: 2511384 - DNA, 25 bp, Homo sapien
gaaggagctggattgcctgtagaat

SEQ ID NO: 2511385 - DNA, 25 bp, Homo sapien
aggagctggattgcctgtagaattc

SEQ ID NO: 2511386 - DNA, 25 bp, Homo sapien
aaggagctggattgcctgtagaatt

SEQ ID NO: 2511387 - DNA, 25 bp, Homo sapien
gcctgtagaattctttgtctgtgcc

SEQ ID NO: 2511388 - DNA, 25 bp, Homo sapien
gcccttgtacgttcatcaagctctt

SEQ ID NO: 2511389 - DNA, 25 bp, Homo sapien
caaatgccctgtcactgtagatgct

SEQ ID NO: 2511390 - DNA, 25 bp, Homo sapien
cttgctccgaacaggcagggaacat

SEQ ID NO: 2511391 - DNA, 25 bp, Homo sapien
ccctgtcactgtagatgctgatgca

SEQ ID NO: 2511392 - DNA, 25 bp, Homo sapien
aggtctgtatcaaagccagatttaa

SEQ ID NO: 2511393 - DNA, 25 bp, Homo sapien
cagatttaagaaggagggtgtctac

SEQ ID NO: 2511394 - DNA, 25 bp, Homo sapien
taaggacatttgtgtcccacactgc

SEQ ID NO: 2511395 - DNA, 25 bp, Homo sapien
caaatgaacgaaagcagaggatgtc

SEQ ID NO: 2511396 - DNA, 25 bp, Homo sapien
agcgatgggcccacagtccttggac

SEQ ID NO: 2511397 - DNA, 25 bp, Homo sapien
aaggactctcctcaggatgagtggc

SEQ ID NO: 2511398 - DNA, 25 bp, Homo sapien
gatgagtggctaaacagttcagaga

SEQ ID NO: 2511399 - DNA, 25 bp, Homo sapien
cccttctgtgcccataagaaaggac

SEQ ID NO: 2511400 - DNA, 25 bp, Homo sapien
tgggcttggcaccttagatcatggg

SEQ ID NO: 2511401 - DNA, 25 bp, Homo sapien
agtctgaagggacaacggagcatgc

SEQ ID NO: 2511402 - DNA, 25 bp, Homo sapien
tctgttgagtcctaaaattgctgcc

SEQ ID NO: 2511403 - DNA, 25 bp, Homo sapien
ttccaaatcaaatgggtgaccagcc

SEQ ID NO: 2511404 - DNA, 25 bp, Homo sapien
ttccttgctattttgactagtttga

SEQ ID NO: 2511405 - DNA, 25 bp, Homo sapien
ttgacgcccctcagtcttacacaat

SEQ ID NO: 2511406 - DNA, 25 bp, Homo sapien
cctcagtcttacacaattccttgct

SEQ ID NO: 2511407 - DNA, 25 bp, Homo sapien
cagtcttacacaattccttgctatt

SEQ ID NO: 2511408 - DNA, 25 bp, Homo sapien
ggagctttcttgccagcctgctatg

SEQ ID NO: 2511409 - DNA, 25 bp, Homo sapien
gggagctttcttgccagcctgctat

SEQ ID NO: 2511410 - DNA, 25 bp, Homo sapien
agctttcttgccagcctgctatggt

SEQ ID NO: 2511411 - DNA, 25 bp, Homo sapien
gagctttcttgccagcctgctatgg

SEQ ID NO: 2511412 - DNA, 25 bp, Homo sapien
tatagggtgatactaattctgcatc

SEQ ID NO: 2511413 - DNA, 25 bp, Homo sapien
ttagaactggataagccttgagcca

SEQ ID NO: 2511414 - DNA, 25 bp, Homo sapien
gagccattgccaatatagggtgata

SEQ ID NO: 2511415 - DNA, 25 bp, Homo sapien
ggataagccttgagccattgccaat

SEQ ID NO: 2511416 - DNA, 25 bp, Homo sapien
ctgcaatgtcttggacttgtgcctt

SEQ ID NO: 2511417 - DNA, 25 bp, Homo sapien
ctctgcaatgtcttggacttgtgcc

SEQ ID NO: 2511418 - DNA, 25 bp, Homo sapien
gcaatgtcttggacttgtgcctttc

SEQ ID NO: 2511419 - DNA, 25 bp, Homo sapien
tgcaatgtcttggacttgtgccttt

SEQ ID NO: 2511420 - DNA, 25 bp, Homo sapien
aactctgtgctgtacttcgatcagc

SEQ ID NO: 2511421 - DNA, 25 bp, Homo sapien
tgtgctgtacttcgatcagcaaatg

SEQ ID NO: 2511422 - DNA, 25 bp, Homo sapien
tctccaactctgtgctgtacttcga

SEQ ID NO: 2511423 - DNA, 25 bp, Homo sapien
ctgtacttcgatcagcaaatgcttg

SEQ ID NO: 2511424 - DNA, 25 bp, Homo sapien
cctctatagtgccatcaaagtcaga

SEQ ID NO: 2511425 - DNA, 25 bp, Homo sapien
ggaatttttacttgcttaggctgaa

SEQ ID NO: 2511426 - DNA, 25 bp, Homo sapien
gaatccagattaggtggcatcatgt

SEQ ID NO: 2511427 - DNA, 25 bp, Homo sapien
agttcaaatgcctcacaggatggca

SEQ ID NO: 2511428 - DNA, 25 bp, Homo sapien
tctgattacagcttctaaagtgcac

SEQ ID NO: 2511429 - DNA, 25 bp, Homo sapien
ttctaacaggatctttgacaccaga

SEQ ID NO: 2511430 - DNA, 25 bp, Homo sapien
cattgaaatgggaagctctgattac

SEQ ID NO: 2511431 - DNA, 25 bp, Homo sapien
aataaaacgctttctaacaggatct

SEQ ID NO: 2511432 - DNA, 25 bp, Homo sapien
gagcagaagttgaataatgttaata

SEQ ID NO: 2511433 - DNA, 25 bp, Homo sapien
ggagcagaagttgaataatgttaat

SEQ ID NO: 2511434 - DNA, 25 bp, Homo sapien
aggagcagaagttgaataatgttaa

SEQ ID NO: 2511435 - DNA, 25 bp, Homo sapien
gatcttcacaccataaacacaacaa

SEQ ID NO: 2511436 - DNA, 25 bp, Homo sapien
taaccactaaatgctgatgctcaag

SEQ ID NO: 2511437 - DNA, 25 bp, Homo sapien
taaacgctctccataattgaccatc

SEQ ID NO: 2511438 - DNA, 25 bp, Homo sapien
gctaatgaactgaaggttgtccaca

SEQ ID NO: 2511439 - DNA, 25 bp, Homo sapien
ctgcctctgagccatgtaagacaca

SEQ ID NO: 2511440 - DNA, 25 bp, Homo sapien
agacaaaaggcagctccgtggacac

SEQ ID NO: 2511441 - DNA, 25 bp, Homo sapien
tataaatctgaccagttttggtgca

SEQ ID NO: 2511442 - DNA, 25 bp, Homo sapien
ttttggtgcaaatcaggctgcctct

SEQ ID NO: 2511443 - DNA, 25 bp, Homo sapien
cataaactgcacattgtcaaatcca

SEQ ID NO: 2511444 - DNA, 25 bp, Homo sapien
ataaactgcacattgtcaaatccat

SEQ ID NO: 2511445 - DNA, 25 bp, Homo sapien
taaactgcacattgtcaaatccatt

SEQ ID NO: 2511446 - DNA, 25 bp, Homo sapien
aggtggttctcgtactgaggtagcc

SEQ ID NO: 2511447 - DNA, 25 bp, Homo sapien
ttccaaccattgtcccactgtttgg

SEQ ID NO: 2511448 - DNA, 25 bp, Homo sapien
ctcgtactgaggtagcccaatgctt

SEQ ID NO: 2511449 - DNA, 25 bp, Homo sapien
accattgtcccactgtttggacagg

SEQ ID NO: 2511450 - DNA, 25 bp, Homo sapien
atgaagagggaagcgtttaagcagg

SEQ ID NO: 2511451 - DNA, 25 bp, Homo sapien
aagcgtttaagcagggagtagccgt

SEQ ID NO: 2511452 - DNA, 25 bp, Homo sapien
ccacggggtaatagcggtagtcctg

SEQ ID NO: 2511453 - DNA, 25 bp, Homo sapien
tttaagcagggagtagccgtccacg

SEQ ID NO: 2511454 - DNA, 25 bp, Homo sapien
gggaaagttgctatcaaaggagccc

SEQ ID NO: 2511455 - DNA, 25 bp, Homo sapien
aaagttgctatcaaaggagcccgcc

SEQ ID NO: 2511456 - DNA, 25 bp, Homo sapien
agttgctatcaaaggagcccgccag

SEQ ID NO: 2511457 - DNA, 25 bp, Homo sapien
gaaagttgctatcaaaggagcccgc

SEQ ID NO: 2511458 - DNA, 25 bp, Homo sapien
gattaatgttctcagcgagagagca

SEQ ID NO: 2511459 - DNA, 25 bp, Homo sapien
agtatgacttgatcctagctccaca

SEQ ID NO: 2511460 - DNA, 25 bp, Homo sapien
tccacaatgagcaatgcacggccgg

SEQ ID NO: 2511461 - DNA, 25 bp, Homo sapien
gaagaaggcatatcaagctgtcagc

SEQ ID NO: 2511462 - DNA, 25 bp, Homo sapien
actcatcagtatgcagctccatgct

SEQ ID NO: 2511463 - DNA, 25 bp, Homo sapien
tcatcagtatgcagctccatgctcc

SEQ ID NO: 2511464 - DNA, 25 bp, Homo sapien
tcagtatgcagctccatgctccttg

SEQ ID NO: 2511465 - DNA, 25 bp, Homo sapien
gtatgcagctccatgctccttgctc

SEQ ID NO: 2511466 - DNA, 25 bp, Homo sapien
ttcagtgctgtttccacatgggtgc

SEQ ID NO: 2511467 - DNA, 25 bp, Homo sapien
ttttgaaatattgcagcttcagtgc

SEQ ID NO: 2511468 - DNA, 25 bp, Homo sapien
gcaaagggctctgctgtgattttga

SEQ ID NO: 2511469 - DNA, 25 bp, Homo sapien
tttcatgtcagcaaagggctctgct

SEQ ID NO: 2511470 - DNA, 25 bp, Homo sapien
ttcttgcttccctgtttttgttcat

SEQ ID NO: 2511471 - DNA, 25 bp, Homo sapien
cttcttgcttccctgtttttgttca

SEQ ID NO: 2511472 - DNA, 25 bp, Homo sapien
gcttcttgcttccctgtttttgttc

SEQ ID NO: 2511473 - DNA, 25 bp, Homo sapien
cttagcttgtctaaattcaggaaag

SEQ ID NO: 2511474 - DNA, 25 bp, Homo sapien
taggtggggaagctagtgacctctt

SEQ ID NO: 2511475 - DNA, 25 bp, Homo sapien
ttcagaagttaagggggtgtagcca

SEQ ID NO: 2511476 - DNA, 25 bp, Homo sapien
ggtgtagccaaaacctggtgttatc

SEQ ID NO: 2511477 - DNA, 25 bp, Homo sapien
tcagagtcctacctcttttgcgttg

SEQ ID NO: 2511478 - DNA, 25 bp, Homo sapien
agagtcctacctcttttgcgttgca

SEQ ID NO: 2511479 - DNA, 25 bp, Homo sapien
gagtcctacctcttttgcgttgcat

SEQ ID NO: 2511480 - DNA, 25 bp, Homo sapien
gatcagagtcctacctcttttgcgt

SEQ ID NO: 2511481 - DNA, 25 bp, Homo sapien
gaagggtttgcattaccaggtgaca

SEQ ID NO: 2511482 - DNA, 25 bp, Homo sapien
gtgacaaatccaaactgctacagag

SEQ ID NO: 2511483 - DNA, 25 bp, Homo sapien
tgaggtgagtgaaatccgatctcca

SEQ ID NO: 2511484 - DNA, 25 bp, Homo sapien
tgaatgccctaaataaacgtagccc

SEQ ID NO: 2511485 - DNA, 25 bp, Homo sapien
ccacaaagtacaatgtagagcactg

SEQ ID NO: 2511486 - DNA, 25 bp, Homo sapien
gccacaaagtacaatgtagagcact

SEQ ID NO: 2511487 - DNA, 25 bp, Homo sapien
cacaaagtacaatgtagagcactgt

SEQ ID NO: 2511488 - DNA, 25 bp, Homo sapien
tagaaattgtggcaactcccgaagt

SEQ ID NO: 2511489 - DNA, 25 bp, Homo sapien
ttcccttaagtctgtctcataggcc

SEQ ID NO: 2511490 - DNA, 25 bp, Homo sapien
tggcaactcccgaagtctagcagca

SEQ ID NO: 2511491 - DNA, 25 bp, Homo sapien
gtctcataggcctgtaagtagaaat

SEQ ID NO: 2511492 - DNA, 25 bp, Homo sapien
cacagaacaggttaaatagagagcc

SEQ ID NO: 2511493 - DNA, 25 bp, Homo sapien
caattcctgggacttaagtaattga

SEQ ID NO: 2511494 - DNA, 25 bp, Homo sapien
taagtaattgatacacagaacaggt

SEQ ID NO: 2511495 - DNA, 25 bp, Homo sapien
cagaacaggttaaatagagagcctt

SEQ ID NO: 2511496 - DNA, 25 bp, Homo sapien
cccagttgcttctattaaaaatagt

SEQ ID NO: 2511497 - DNA, 25 bp, Homo sapien
tccccagttgcttctattaaaaata

SEQ ID NO: 2511498 - DNA, 25 bp, Homo sapien
ccccagttgcttctattaaaaatag

SEQ ID NO: 2511499 - DNA, 25 bp, Homo sapien
cattataatgtagaggaaggttgcc

SEQ ID NO: 2511500 - DNA, 25 bp, Homo sapien
ttcattataatgtagaggaaggttg

SEQ ID NO: 2511501 - DNA, 25 bp, Homo sapien
tattcattataatgtagaggaaggt

SEQ ID NO: 2511502 - DNA, 25 bp, Homo sapien
attataatgtagaggaaggttgcct

SEQ ID NO: 2511503 - DNA, 25 bp, Homo sapien
ctctttaagttcgttgttgattcca

SEQ ID NO: 2511504 - DNA, 25 bp, Homo sapien
aacatctatggaactcattattttg

SEQ ID NO: 2511505 - DNA, 25 bp, Homo sapien
attccaacatctatggaactcatta

SEQ ID NO: 2511506 - DNA, 25 bp, Homo sapien
tcatctctttaagttcgttgttgat

SEQ ID NO: 2511507 - DNA, 25 bp, Homo sapien
tgcaaagccttataggatgaacagc

SEQ ID NO: 2511508 - DNA, 25 bp, Homo sapien
tataggatgaacagcaagaagaaca

SEQ ID NO: 2511509 - DNA, 25 bp, Homo sapien
gccttataggatgaacagcaagaag

SEQ ID NO: 2511510 - DNA, 25 bp, Homo sapien
caactgcaaagccttataggatgaa

SEQ ID NO: 2511511 - DNA, 25 bp, Homo sapien
cgatcaaggctttaggcaatgacct

SEQ ID NO: 2511512 - DNA, 25 bp, Homo sapien
ggatcattgtcatcctgtcgggaga

SEQ ID NO: 2511513 - DNA, 25 bp, Homo sapien
ccactcctggttgatcttgtgccaa

SEQ ID NO: 2511514 - DNA, 25 bp, Homo sapien
gagcaggcctgcaaattgcccagga

SEQ ID NO: 2511515 - DNA, 25 bp, Homo sapien
tttcttaatacttcatcgtaactgc

SEQ ID NO: 2511516 - DNA, 25 bp, Homo sapien
acttcatcgtaactgcaaaggagaa

SEQ ID NO: 2511517 - DNA, 25 bp, Homo sapien
ggcccttgagatgtgaagggctcat

SEQ ID NO: 2511518 - DNA, 25 bp, Homo sapien
aaggcccttgagatgtgaagggctc

SEQ ID NO: 2511519 - DNA, 25 bp, Homo sapien
catccagactagtttgacaggaaca

SEQ ID NO: 2511520 - DNA, 25 bp, Homo sapien
gagctgctttcaattgctcaagcaa

SEQ ID NO: 2511521 - DNA, 25 bp, Homo sapien
gactagtttgacaggaacaattcag

SEQ ID NO: 2511522 - DNA, 25 bp, Homo sapien
tttgacaggaacaattcagagatga

SEQ ID NO: 2511523 - DNA, 25 bp, Homo sapien
agcatcagcagggaaattggccttt

SEQ ID NO: 2511524 - DNA, 25 bp, Homo sapien
gaatgagatctgtacttatcgatca

SEQ ID NO: 2511525 - DNA, 25 bp, Homo sapien
cagcagggaaattggcctttgtagg

SEQ ID NO: 2511526 - DNA, 25 bp, Homo sapien
cttatcgatcacagcatcagcaggg

SEQ ID NO: 2511527 - DNA, 25 bp, Homo sapien
ttgtgttcaggtctcaaggacaaag

SEQ ID NO: 2511528 - DNA, 25 bp, Homo sapien
tgtgttcaggtctcaaggacaaagc

SEQ ID NO: 2511529 - DNA, 25 bp, Homo sapien
cccctacctgaacaaatcgagtctt

SEQ ID NO: 2511530 - DNA, 25 bp, Homo sapien
gcatatctacctatctagctatcgg

SEQ ID NO: 2511531 - DNA, 25 bp, Homo sapien
tagctatcggaatcccagaaagaga

SEQ ID NO: 2511532 - DNA, 25 bp, Homo sapien
tacagcacttttgagcaggtagaaa

SEQ ID NO: 2511533 - DNA, 25 bp, Homo sapien
ctgattatccgagttaataaaatag

SEQ ID NO: 2511534 - DNA, 25 bp, Homo sapien
cctgattatccgagttaataaaata

SEQ ID NO: 2511535 - DNA, 25 bp, Homo sapien
tcctgattatccgagttaataaaat

SEQ ID NO: 2511536 - DNA, 25 bp, Homo sapien
catcactaatatgttgaaaggtctc

SEQ ID NO: 2511537 - DNA, 25 bp, Homo sapien
gctccaggccctaatacaagattcc

SEQ ID NO: 2511538 - DNA, 25 bp, Homo sapien
caagattcccaacctcataaatggc

SEQ ID NO: 2511539 - DNA, 25 bp, Homo sapien
gcacactggattctgatcatcacta

SEQ ID NO: 2511540 - DNA, 25 bp, Homo sapien
tcgaagcatgtgaagaacgctaggg

SEQ ID NO: 2511541 - DNA, 25 bp, Homo sapien
tgcaagaattggtgggagttaaaga

SEQ ID NO: 2511542 - DNA, 25 bp, Homo sapien
gtgtaagagatgcaatagtcgaagc

SEQ ID NO: 2511543 - DNA, 25 bp, Homo sapien
gacataatgtttgtaccctcccaaa

SEQ ID NO: 2511544 - DNA, 25 bp, Homo sapien
tgaaagccaactggactgccctggg

SEQ ID NO: 2511545 - DNA, 25 bp, Homo sapien
ggtctgaaagccaactggactgccc

SEQ ID NO: 2511546 - DNA, 25 bp, Homo sapien
tctgaaagccaactggactgccctg

SEQ ID NO: 2511547 - DNA, 25 bp, Homo sapien
caaggggagaggtgaccgctgcaga

SEQ ID NO: 2511548 - DNA, 25 bp, Homo sapien
acagatggccgacctggcagagact

SEQ ID NO: 2511549 - DNA, 25 bp, Homo sapien
taggaaagacagatggccgacctgg

SEQ ID NO: 2511550 - DNA, 25 bp, Homo sapien
ggaccactttgccagtgcgaggcga

SEQ ID NO: 2511551 - DNA, 25 bp, Homo sapien
gaccactttgccagtgcgaggcgag

SEQ ID NO: 2511552 - DNA, 25 bp, Homo sapien
ccagaatggtcttgacctaaatatg

SEQ ID NO: 2511553 - DNA, 25 bp, Homo sapien
cagaatggtcttgacctaaatatgc

SEQ ID NO: 2511554 - DNA, 25 bp, Homo sapien
ttcagaaaatcgatcatccccaaaa

SEQ ID NO: 2511555 - DNA, 25 bp, Homo sapien
cagaaaatcgatcatccccaaaaca

SEQ ID NO: 2511556 - DNA, 25 bp, Homo sapien
tattcagaaaatcgatcatccccaa

SEQ ID NO: 2511557 - DNA, 25 bp, Homo sapien
aaatattcagaaaatcgatcatccc

SEQ ID NO: 2511558 - DNA, 25 bp, Homo sapien
cagacatccttgatataagttctcc

SEQ ID NO: 2511559 - DNA, 25 bp, Homo sapien
tccggcttcaaagcatctcttaata

SEQ ID NO: 2511560 - DNA, 25 bp, Homo sapien
ccttgatataagttctccggcttca

SEQ ID NO: 2511561 - DNA, 25 bp, Homo sapien
gttgtctgttgattagttgataccg

SEQ ID NO: 2511562 - DNA, 25 bp, Homo sapien
ctagcaggaggactggcagtaaagc

SEQ ID NO: 2511563 - DNA, 25 bp, Homo sapien
caccctgtagatgtgttgatttcaa

SEQ ID NO: 2511564 - DNA, 25 bp, Homo sapien
tgattcattcggtgaaaatccagag

SEQ ID NO: 2511565 - DNA, 25 bp, Homo sapien
gacacaatggatgttcgctgtttag

SEQ ID NO: 2511566 - DNA, 25 bp, Homo sapien
gctcaggcttgagattcttcgcaga

SEQ ID NO: 2511567 - DNA, 25 bp, Homo sapien
gaggtctaatgaggatgtcaaatcc

SEQ ID NO: 2511568 - DNA, 25 bp, Homo sapien
ggctttgataaccatgccctgttgc

SEQ ID NO: 2511569 - DNA, 25 bp, Homo sapien
caacaaagctgattgctccacatag

SEQ ID NO: 2511570 - DNA, 25 bp, Homo sapien
ggattcagatcctaatgtcggtatt

SEQ ID NO: 2511571 - DNA, 25 bp, Homo sapien
tatgtttctaactaattcctatggg

SEQ ID NO: 2511572 - DNA, 25 bp, Homo sapien
tttgcagcaaagtagaattggattc

SEQ ID NO: 2511573 - DNA, 25 bp, Homo sapien
cacatatttgggagacaaaatagga

SEQ ID NO: 2511574 - DNA, 25 bp, Homo sapien
ttatgctagctggtgcttggatcct

SEQ ID NO: 2511575 - DNA, 25 bp, Homo sapien
atgctagctggtgcttggatcctac

SEQ ID NO: 2511576 - DNA, 25 bp, Homo sapien
tatgctagctggtgcttggatccta

SEQ ID NO: 2511577 - DNA, 25 bp, Homo sapien
gggcagccagggtagagtcaaggca

SEQ ID NO: 2511578 - DNA, 25 bp, Homo sapien
cattgggtgagtagggtatccttgt

SEQ ID NO: 2511579 - DNA, 25 bp, Homo sapien
ggtatccttgtagggtatcctccta

SEQ ID NO: 2511580 - DNA, 25 bp, Homo sapien
tatcctcctactggcagtgtgagga

SEQ ID NO: 2511581 - DNA, 25 bp, Homo sapien
cagaacgagccaggttgagaacacc

SEQ ID NO: 2511582 - DNA, 25 bp, Homo sapien
gaacaccaccaatttcgtgttctgg

SEQ ID NO: 2511583 - DNA, 25 bp, Homo sapien
ttatgaggcccattcagaacgagcc

SEQ ID NO: 2511584 - DNA, 25 bp, Homo sapien
caccaatttcgtgttctgggtccat

SEQ ID NO: 2511585 - DNA, 25 bp, Homo sapien
ggaggtgaacaatcaggtgttgggc

SEQ ID NO: 2511586 - DNA, 25 bp, Homo sapien
ttttgagggcagtatcaggggatgg

SEQ ID NO: 2511587 - DNA, 25 bp, Homo sapien
gatggaggtgaacaatcaggtgttg

SEQ ID NO: 2511588 - DNA, 25 bp, Homo sapien
gggatggaggtgaacaatcaggtgt

SEQ ID NO: 2511589 - DNA, 25 bp, Homo sapien
gttgagctgtttctatggttactag

SEQ ID NO: 2511590 - DNA, 25 bp, Homo sapien
gagctgtttctatggttactagttc

SEQ ID NO: 2511591 - DNA, 25 bp, Homo sapien
tgtttctatggttactagttcctgg

SEQ ID NO: 2511592 - DNA, 25 bp, Homo sapien
tctatggttactagttcctggagta

SEQ ID NO: 2511593 - DNA, 25 bp, Homo sapien
ctgtgaataaaaatagaactgccat

SEQ ID NO: 2511594 - DNA, 25 bp, Homo sapien
ggccaattgtgagtaagagatatta

SEQ ID NO: 2511595 - DNA, 25 bp, Homo sapien
gccaattgtgagtaagagatattac

SEQ ID NO: 2511596 - DNA, 25 bp, Homo sapien
caggccaattgtgagtaagagatat

SEQ ID NO: 2511597 - DNA, 25 bp, Homo sapien
tcaggccaattgtgagtaagagata

SEQ ID NO: 2511598 - DNA, 25 bp, Homo sapien
tgtgtccatgagatcacacagaaag

SEQ ID NO: 2511599 - DNA, 25 bp, Homo sapien
ttctaaggagcaaggtttctttgta

SEQ ID NO: 2511600 - DNA, 25 bp, Homo sapien
ttcttggggaaggtgcccttgcaat

SEQ ID NO: 2511601 - DNA, 25 bp, Homo sapien
ttctttgtaacagctgtgtccatga

SEQ ID NO: 2511602 - DNA, 25 bp, Homo sapien
agtgtaatttctcttctttggatag

SEQ ID NO: 2511603 - DNA, 25 bp, Homo sapien
aatttctcttctttggataggactc

SEQ ID NO: 2511604 - DNA, 25 bp, Homo sapien
gtaatttctcttctttggataggac

SEQ ID NO: 2511605 - DNA, 25 bp, Homo sapien
tgtaatttctcttctttggatagga

SEQ ID NO: 2511606 - DNA, 25 bp, Homo sapien
cacatcagagagtcaattatggtca

SEQ ID NO: 2511607 - DNA, 25 bp, Homo sapien
acatcagagagtcaattatggtcat

SEQ ID NO: 2511608 - DNA, 25 bp, Homo sapien
cacacatcagagagtcaattatggt

SEQ ID NO: 2511609 - DNA, 25 bp, Homo sapien
ctcacacatcagagagtcaattatg

SEQ ID NO: 2511610 - DNA, 25 bp, Homo sapien
gtttcctggcttctaagatccagtc

SEQ ID NO: 2511611 - DNA, 25 bp, Homo sapien
tttgtgtgttttgaaactcctctgg

SEQ ID NO: 2511612 - DNA, 25 bp, Homo sapien
tgtgtgttttgaaactcctctggtt

SEQ ID NO: 2511613 - DNA, 25 bp, Homo sapien
tctaagatccagtccatcaccaagt

SEQ ID NO: 2511614 - DNA, 25 bp, Homo sapien
cactcttgttgtcccacgtccatgt

SEQ ID NO: 2511615 - DNA, 25 bp, Homo sapien
ttgtcccacgtccatgttaaactag

SEQ ID NO: 2511616 - DNA, 25 bp, Homo sapien
cttgttgtcccacgtccatgttaaa

SEQ ID NO: 2511617 - DNA, 25 bp, Homo sapien
tgttgtcccacgtccatgttaaact

SEQ ID NO: 2511618 - DNA, 25 bp, Homo sapien
gtcttctgaattaagccattttaac

SEQ ID NO: 2511619 - DNA, 25 bp, Homo sapien
ttttcatacgcctgttttccagttg

SEQ ID NO: 2511620 - DNA, 25 bp, Homo sapien
ttgttcgcacactctatatattctg

SEQ ID NO: 2511621 - DNA, 25 bp, Homo sapien
tgttttccagttgtgtatgtcttct

SEQ ID NO: 2511622 - DNA, 25 bp, Homo sapien
ttctcaagggttatgcttctagctt

SEQ ID NO: 2511623 - DNA, 25 bp, Homo sapien
tctcaagggttatgcttctagcttt

SEQ ID NO: 2511624 - DNA, 25 bp, Homo sapien
ccagtacgatattgaatacaagtgg

SEQ ID NO: 2511625 - DNA, 25 bp, Homo sapien
ctctatcagatgattgtgactcctt

SEQ ID NO: 2511626 - DNA, 25 bp, Homo sapien
ttttcttatctaggcaggctgatgt

SEQ ID NO: 2511627 - DNA, 25 bp, Homo sapien
actagtgtggtcattctgaatacaa

SEQ ID NO: 2511628 - DNA, 25 bp, Homo sapien
ctatttgtgctattaatacttgaaa

SEQ ID NO: 2511629 - DNA, 25 bp, Homo sapien
gaggaagagagatctccatcagcca

SEQ ID NO: 2511630 - DNA, 25 bp, Homo sapien
tggagtagataaaggtatcaggacc

SEQ ID NO: 2511631 - DNA, 25 bp, Homo sapien
ggttctcaacatgaagcagcaggag

SEQ ID NO: 2511632 - DNA, 25 bp, Homo sapien
atcaggaccaagatatgctaaaggg

SEQ ID NO: 2511633 - DNA, 25 bp, Homo sapien
catcaccaaccactccccacaaggg

SEQ ID NO: 2511634 - DNA, 25 bp, Homo sapien
tcaccaaccactccccacaagggcc

SEQ ID NO: 2511635 - DNA, 25 bp, Homo sapien
aagggcccaaaggcacataactcac

SEQ ID NO: 2511636 - DNA, 25 bp, Homo sapien
acaagggcccaaaggcacataactc

SEQ ID NO: 2511637 - DNA, 25 bp, Homo sapien
aaggattcttaagccttgaaccttg

SEQ ID NO: 2511638 - DNA, 25 bp, Homo sapien
attgaagagtaaggattcttaagcc

SEQ ID NO: 2511639 - DNA, 25 bp, Homo sapien
cagctggaataagtgtgaaccctct

SEQ ID NO: 2511640 - DNA, 25 bp, Homo sapien
tggttgctctggtaaggattgaaga

SEQ ID NO: 2511641 - DNA, 25 bp, Homo sapien
cctcagccattagctcccaaaagac

SEQ ID NO: 2511642 - DNA, 25 bp, Homo sapien
tgagaaacaatgcctcagccattag

SEQ ID NO: 2511643 - DNA, 25 bp, Homo sapien
ttcatagacatgtcgttccaggcca

SEQ ID NO: 2511644 - DNA, 25 bp, Homo sapien
tattcatagacatgtcgttccaggc

SEQ ID NO: 2511645 - DNA, 25 bp, Homo sapien
caatgcctggagtacttgactgctc

SEQ ID NO: 2511646 - DNA, 25 bp, Homo sapien
cagacagctgtgaagacaatgcctg

SEQ ID NO: 2511647 - DNA, 25 bp, Homo sapien
cccagaaggctacaaaaggcaaggt

SEQ ID NO: 2511648 - DNA, 25 bp, Homo sapien
taaattgatcatgggaaacaggcta

SEQ ID NO: 2511649 - DNA, 25 bp, Homo sapien
tccctgagaccatattccatcttct

SEQ ID NO: 2511650 - DNA, 25 bp, Homo sapien
tctccctgagaccatattccatctt

SEQ ID NO: 2511651 - DNA, 25 bp, Homo sapien
ctctccctgagaccatattccatct

SEQ ID NO: 2511652 - DNA, 25 bp, Homo sapien
ctccctgagaccatattccatcttc

SEQ ID NO: 2511653 - DNA, 25 bp, Homo sapien
tcctctaagagtgtatggttcacaa

SEQ ID NO: 2511654 - DNA, 25 bp, Homo sapien
gtatggttcacaacccacaacagga

SEQ ID NO: 2511655 - DNA, 25 bp, Homo sapien
gagtgtatggttcacaacccacaac

SEQ ID NO: 2511656 - DNA, 25 bp, Homo sapien
tctaagagtgtatggttcacaaccc

SEQ ID NO: 2511657 - DNA, 25 bp, Homo sapien
ggttcctacatccattacacggagt

SEQ ID NO: 2511658 - DNA, 25 bp, Homo sapien
caaagtcctgatggcccacacgtat

SEQ ID NO: 2511659 - DNA, 25 bp, Homo sapien
tacacggagttaatgcttcccaaag

SEQ ID NO: 2511660 - DNA, 25 bp, Homo sapien
tggcccacacgtattttcatcatca

SEQ ID NO: 2511661 - DNA, 25 bp, Homo sapien
tgacaaattgattgtagatgaggtt

SEQ ID NO: 2511662 - DNA, 25 bp, Homo sapien
acaaattgattgtagatgaggttct

SEQ ID NO: 2511663 - DNA, 25 bp, Homo sapien
ctggtgacaaattgattgtagatga

SEQ ID NO: 2511664 - DNA, 25 bp, Homo sapien
ggtgacaaattgattgtagatgagg

SEQ ID NO: 2511665 - DNA, 25 bp, Homo sapien
tctaagattaatttggagttagctg

SEQ ID NO: 2511666 - DNA, 25 bp, Homo sapien
tttcaccacaaccatttgttccatg

SEQ ID NO: 2511667 - DNA, 25 bp, Homo sapien
cacaaaagctgcaacatttaagtct

SEQ ID NO: 2511668 - DNA, 25 bp, Homo sapien
gctgtgaatcctgtactgcatttat

SEQ ID NO: 2511669 - DNA, 25 bp, Homo sapien
ttacaaccaacctgaacttcctgtg

SEQ ID NO: 2511670 - DNA, 25 bp, Homo sapien
ccaacctgaacttcctgtgtgcata

SEQ ID NO: 2511671 - DNA, 25 bp, Homo sapien
aaccaacctgaacttcctgtgtgca

SEQ ID NO: 2511672 - DNA, 25 bp, Homo sapien
aacctgaacttcctgtgtgcataat

SEQ ID NO: 2511673 - DNA, 25 bp, Homo sapien
aacatttctagactcatttctctga

SEQ ID NO: 2511674 - DNA, 25 bp, Homo sapien
gcttcgctgtcttagagttattata

SEQ ID NO: 2511675 - DNA, 25 bp, Homo sapien
agctctcataggcttcgctgtctta

SEQ ID NO: 2511676 - DNA, 25 bp, Homo sapien
cataggcttcgctgtcttagagtta

SEQ ID NO: 2511677 - DNA, 25 bp, Homo sapien
tcgctgtcttagagttattataact

SEQ ID NO: 2511678 - DNA, 25 bp, Homo sapien
caaaatattcgttactcaaagctga

SEQ ID NO: 2511679 - DNA, 25 bp, Homo sapien
agcaaaatattcgttactcaaagct

SEQ ID NO: 2511680 - DNA, 25 bp, Homo sapien
gatatagacactatagttttctaag

SEQ ID NO: 2511681 - DNA, 25 bp, Homo sapien
tcatctgatatagacactatagttt

SEQ ID NO: 2511682 - DNA, 25 bp, Homo sapien
aatgatcccgcttctcactagttca

SEQ ID NO: 2511683 - DNA, 25 bp, Homo sapien
taggaaaagatataacatgtcaatt

SEQ ID NO: 2511684 - DNA, 25 bp, Homo sapien
tcagtaacaaagaatagattatagg

SEQ ID NO: 2511685 - DNA, 25 bp, Homo sapien
tctccaaattaagactttgcttctc

SEQ ID NO: 2511686 - DNA, 25 bp, Homo sapien
taggtgacctgtacttgactaaact

SEQ ID NO: 2511687 - DNA, 25 bp, Homo sapien
taaaacaggctacagaaaagggtca

SEQ ID NO: 2511688 - DNA, 25 bp, Homo sapien
taaaggtttgtcacaggaacgaaga

SEQ ID NO: 2511689 - DNA, 25 bp, Homo sapien
cattcgctaacaggtttctatcaga

SEQ ID NO: 2511690 - DNA, 25 bp, Homo sapien
tgtaactgattggtaacctggagac

SEQ ID NO: 2511691 - DNA, 25 bp, Homo sapien
aagtagaaggccagaagctgccagt

SEQ ID NO: 2511692 - DNA, 25 bp, Homo sapien
aataatcagggatatttgctcaaaa

SEQ ID NO: 2511693 - DNA, 25 bp, Homo sapien
cagggcatataagatattcattggg

SEQ ID NO: 2511694 - DNA, 25 bp, Homo sapien
tgttctcataatggacagtcactat

SEQ ID NO: 2511695 - DNA, 25 bp, Homo sapien
ggaggtaggactagccatggaacta

SEQ ID NO: 2511696 - DNA, 25 bp, Homo sapien
taacacagttcactctattactggc

SEQ ID NO: 2511697 - DNA, 25 bp, Homo sapien
tagcaagtgctatcccaggaaacag

SEQ ID NO: 2511698 - DNA, 25 bp, Homo sapien
aaactatacgtgtggctctgctctg

SEQ ID NO: 2511699 - DNA, 25 bp, Homo sapien
tctgagcttatcaaagagaaacctc

SEQ ID NO: 2511700 - DNA, 25 bp, Homo sapien
tagagagaccatgaagtgatctgtc

SEQ ID NO: 2511701 - DNA, 25 bp, Homo sapien
cattatgcccagtaaaactaaagga

SEQ ID NO: 2511702 - DNA, 25 bp, Homo sapien
agtggcggaatctgataatgcacca

SEQ ID NO: 2511703 - DNA, 25 bp, Homo sapien
actgacatcttagagtggcggaatc

SEQ ID NO: 2511704 - DNA, 25 bp, Homo sapien
ccaaagaacgtcaggaaaagagcaa

SEQ ID NO: 2511705 - DNA, 25 bp, Homo sapien
caaagaacgtcaggaaaagagcaat

SEQ ID NO: 2511706 - DNA, 25 bp, Homo sapien
agacagacacattatcttcattccc

SEQ ID NO: 2511707 - DNA, 25 bp, Homo sapien
aaagacagacacattatcttcattc

SEQ ID NO: 2511708 - DNA, 25 bp, Homo sapien
ctcttaagtgtacacactgaactgg

SEQ ID NO: 2511709 - DNA, 25 bp, Homo sapien
acactgaactggcaaagacagacac

SEQ ID NO: 2511710 - DNA, 25 bp, Homo sapien
agtggtctgatattgtgtggcacaa

SEQ ID NO: 2511711 - DNA, 25 bp, Homo sapien
tgctcaaattatctaagtagtggtc

SEQ ID NO: 2511712 - DNA, 25 bp, Homo sapien
gataattctccagtgacggtttcac

SEQ ID NO: 2511713 - DNA, 25 bp, Homo sapien
caagtcttcaaacgaataatccttt

SEQ ID NO: 2511714 - DNA, 25 bp, Homo sapien
caggctcttcgaggactgtagatct

SEQ ID NO: 2511715 - DNA, 25 bp, Homo sapien
tgtgttgcatcttcctgtacaggct

SEQ ID NO: 2511716 - DNA, 25 bp, Homo sapien
gctcttcgaggactgtagatcttcc

SEQ ID NO: 2511717 - DNA, 25 bp, Homo sapien
cctgtacaggctcttcgaggactgt

SEQ ID NO: 2511718 - DNA, 25 bp, Homo sapien
gcagccaatccataacaagtgtagg

SEQ ID NO: 2511719 - DNA, 25 bp, Homo sapien
taacaagtgtaggagataatcactg

SEQ ID NO: 2511720 - DNA, 25 bp, Homo sapien
accctcctctatcatacttgcagcc

SEQ ID NO: 2511721 - DNA, 25 bp, Homo sapien
acttgcagccaatccataacaagtg

SEQ ID NO: 2511722 - DNA, 25 bp, Homo sapien
tgtccaagacagttctacctaagct

SEQ ID NO: 2511723 - DNA, 25 bp, Homo sapien
aagctatcctttatgttggcatcaa

SEQ ID NO: 2511724 - DNA, 25 bp, Homo sapien
tgttctttcagaatgtccaagacag

SEQ ID NO: 2511725 - DNA, 25 bp, Homo sapien
cttgtaagagtgttgcaatctggag

SEQ ID NO: 2511726 - DNA, 25 bp, Homo sapien
ctgtttctaacagaactcgtacaac

SEQ ID NO: 2511727 - DNA, 25 bp, Homo sapien
aaagctgcttcatgaagtgcactcc

SEQ ID NO: 2511728 - DNA, 25 bp, Homo sapien
cagaactcgtacaacatccaccttt

SEQ ID NO: 2511729 - DNA, 25 bp, Homo sapien
gcttcatgaagtgcactcccctttt

SEQ ID NO: 2511730 - DNA, 25 bp, Homo sapien
ccagagaagagagtgccaaagaata

SEQ ID NO: 2511731 - DNA, 25 bp, Homo sapien
tcatatcaaaggaagcacccttctt

SEQ ID NO: 2511732 - DNA, 25 bp, Homo sapien
tactgctatatcctctggcacatag

SEQ ID NO: 2511733 - DNA, 25 bp, Homo sapien
ggacctagaaaaacatcgtgtgaag

SEQ ID NO: 2511734 - DNA, 25 bp, Homo sapien
ggtcagggataccaagaagcttact

SEQ ID NO: 2511735 - DNA, 25 bp, Homo sapien
aaatataaccccatctgtgagcacg

SEQ ID NO: 2511736 - DNA, 25 bp, Homo sapien
caatacccctttgaggagagagact

SEQ ID NO: 2511737 - DNA, 25 bp, Homo sapien
tgtgagcacgcattccacctggagt

SEQ ID NO: 2511738 - DNA, 25 bp, Homo sapien
ggagaacagcaactacttctgagtg

SEQ ID NO: 2511739 - DNA, 25 bp, Homo sapien
tctaattgtcgggtcagtgagctct

SEQ ID NO: 2511740 - DNA, 25 bp, Homo sapien
gagtgccgccaagtccaaaggtgtt

SEQ ID NO: 2511741 - DNA, 25 bp, Homo sapien
gcacgactgctttgtggccattgcg

SEQ ID NO: 2511742 - DNA, 25 bp, Homo sapien
tgtagggcagtttcattttcattgt

SEQ ID NO: 2511743 - DNA, 25 bp, Homo sapien
cacagtgtagggcagtttcattttc

SEQ ID NO: 2511744 - DNA, 25 bp, Homo sapien
ctgcacagtgtagggcagtttcatt

SEQ ID NO: 2511745 - DNA, 25 bp, Homo sapien
acagtgtagggcagtttcattttca

SEQ ID NO: 2511746 - DNA, 25 bp, Homo sapien
cctggaatgtgatggtccatgatga

SEQ ID NO: 2511747 - DNA, 25 bp, Homo sapien
taggaaaataccctttgttgtctgc

SEQ ID NO: 2511748 - DNA, 25 bp, Homo sapien
tgttgatgcctcatactgaagtagt

SEQ ID NO: 2511749 - DNA, 25 bp, Homo sapien
gttgtctgctacatttgttgatgcc

SEQ ID NO: 2511750 - DNA, 25 bp, Homo sapien
catcaatggtgtacctgcattcccc

SEQ ID NO: 2511751 - DNA, 25 bp, Homo sapien
gcatccttgccagtagctattatat

SEQ ID NO: 2511752 - DNA, 25 bp, Homo sapien
tgttaataagtaggttgatcccata

SEQ ID NO: 2511753 - DNA, 25 bp, Homo sapien
gaacctccatacttgtcgtccattg

SEQ ID NO: 2511754 - DNA, 25 bp, Homo sapien
ttaaggtatccacaaaggaacacat

SEQ ID NO: 2511755 - DNA, 25 bp, Homo sapien
tttaaggtatccacaaaggaacaca

SEQ ID NO: 2511756 - DNA, 25 bp, Homo sapien
tgtgcagttcacattggggcctcgc

SEQ ID NO: 2511757 - DNA, 25 bp, Homo sapien
agtgtaacccgaactgtctgtgcag

SEQ ID NO: 2511758 - DNA, 25 bp, Homo sapien
tttaaggctgcgtggtgtaaagcag

SEQ ID NO: 2511759 - DNA, 25 bp, Homo sapien
ttatgtccatttaaggctgcgtggt

SEQ ID NO: 2511760 - DNA, 25 bp, Homo sapien
gactagcactttctggtatcacacc

SEQ ID NO: 2511761 - DNA, 25 bp, Homo sapien
gctgaataaagggtacatgcttcca

SEQ ID NO: 2511762 - DNA, 25 bp, Homo sapien
taatatgatagaaacagtccctgct

SEQ ID NO: 2511763 - DNA, 25 bp, Homo sapien
taatgggcatatgtttcacactggg

SEQ ID NO: 2511764 - DNA, 25 bp, Homo sapien
tccaacaccatccaggcaataagca

SEQ ID NO: 2511765 - DNA, 25 bp, Homo sapien
ttatgcctcgtaacgtttgcctagt

SEQ ID NO: 2511766 - DNA, 25 bp, Homo sapien
acaccatccaggcaataagcatcaa

SEQ ID NO: 2511767 - DNA, 25 bp, Homo sapien
aacgtttgcctagtgatcttttcca

SEQ ID NO: 2511768 - DNA, 25 bp, Homo sapien
tttatgggccagcactttaccacac

SEQ ID NO: 2511769 - DNA, 25 bp, Homo sapien
tatgggccagcactttaccacactt

SEQ ID NO: 2511770 - DNA, 25 bp, Homo sapien
ccagcactttaccacacttggtcat

SEQ ID NO: 2511771 - DNA, 25 bp, Homo sapien
attttatgggccagcactttaccac

SEQ ID NO: 2511772 - DNA, 25 bp, Homo sapien
ttcctggtaaccactcttctattct

SEQ ID NO: 2511773 - DNA, 25 bp, Homo sapien
aaatctctgtgcttacgtgtcctac

SEQ ID NO: 2511774 - DNA, 25 bp, Homo sapien
tatactctcgttgacctccatctgc

SEQ ID NO: 2511775 - DNA, 25 bp, Homo sapien
tgtatgtgtgtggtacaagtaccta

SEQ ID NO: 2511776 - DNA, 25 bp, Homo sapien
tctaggagcgagcaacggaaatcca

SEQ ID NO: 2511777 - DNA, 25 bp, Homo sapien
ccagctactatggaaaggatggata

SEQ ID NO: 2511778 - DNA, 25 bp, Homo sapien
gagcagctgtgtatatggtgatcta

SEQ ID NO: 2511779 - DNA, 25 bp, Homo sapien
gatttctaggttacttgggttgagc

SEQ ID NO: 2511780 - DNA, 25 bp, Homo sapien
gccaatggattcaaggaagtgggcc

SEQ ID NO: 2511781 - DNA, 25 bp, Homo sapien
ctaatataactcattctccgctgaa

SEQ ID NO: 2511782 - DNA, 25 bp, Homo sapien
ctccgctgaacggaatttggttgat

SEQ ID NO: 2511783 - DNA, 25 bp, Homo sapien
gattcaaggaagtgggccatattca

SEQ ID NO: 2511784 - DNA, 25 bp, Homo sapien
ctgacgggggtgccttcctccagat

SEQ ID NO: 2511785 - DNA, 25 bp, Homo sapien
gacgggggtgccttcctccagatct

SEQ ID NO: 2511786 - DNA, 25 bp, Homo sapien
gccttcctccagatctgcccttcat

SEQ ID NO: 2511787 - DNA, 25 bp, Homo sapien
tccagatctgcccttcatctttcat

SEQ ID NO: 2511788 - DNA, 25 bp, Homo sapien
ttttttggtatatagctgctcacac

SEQ ID NO: 2511789 - DNA, 25 bp, Homo sapien
tactgaccttgcagaatgaacctgg

SEQ ID NO: 2511790 - DNA, 25 bp, Homo sapien
gtgattgatctgtgcatgttgaacc

SEQ ID NO: 2511791 - DNA, 25 bp, Homo sapien
aagtcattggatcctcggcttctct

SEQ ID NO: 2511792 - DNA, 25 bp, Homo sapien
tcatgatggcaaatttctggatctc

SEQ ID NO: 2511793 - DNA, 25 bp, Homo sapien
tcaccacctcattgacagcaggaga

SEQ ID NO: 2511794 - DNA, 25 bp, Homo sapien
gacagcaggagagcccttcttcttc

SEQ ID NO: 2511795 - DNA, 25 bp, Homo sapien
cccactcatggatgtgcttctgagt

SEQ ID NO: 2511796 - DNA, 25 bp, Homo sapien
ctgccaggccaaagttggaaagtaa

SEQ ID NO: 2511797 - DNA, 25 bp, Homo sapien
caaagttggaaagtaacctccatct

SEQ ID NO: 2511798 - DNA, 25 bp, Homo sapien
tgccaggccaaagttggaaagtaac

SEQ ID NO: 2511799 - DNA, 25 bp, Homo sapien
tagtactaagtcacaaaggtcaagg

SEQ ID NO: 2511800 - DNA, 25 bp, Homo sapien
gatatccaatgattgaaaacacagg

SEQ ID NO: 2511801 - DNA, 25 bp, Homo sapien
ggtgaagctcaagataaaggtcaga

SEQ ID NO: 2511802 - DNA, 25 bp, Homo sapien
tacatggtctatagacactctctcc

SEQ ID NO: 2511803 - DNA, 25 bp, Homo sapien
taagaaaaccctggactgtgtctga

SEQ ID NO: 2511804 - DNA, 25 bp, Homo sapien
cagggagtctggaaatgctaactag

SEQ ID NO: 2511805 - DNA, 25 bp, Homo sapien
gggctgtgaccatctatgcgaggta

SEQ ID NO: 2511806 - DNA, 25 bp, Homo sapien
ctgacacagctgagttgagaaggga

SEQ ID NO: 2511807 - DNA, 25 bp, Homo sapien
aaagggtgaagaggtgtctctgcag

SEQ ID NO: 2511808 - DNA, 25 bp, Homo sapien
ggtgaagaggtgtctctgcagaagg

SEQ ID NO: 2511809 - DNA, 25 bp, Homo sapien
gaggtgtctctgcagaaggacagcc

SEQ ID NO: 2511810 - DNA, 25 bp, Homo sapien
tcagatatgaaaagggtgaagaggt

SEQ ID NO: 2511811 - DNA, 25 bp, Homo sapien
catggtcggatttagatctgatgta

SEQ ID NO: 2511812 - DNA, 25 bp, Homo sapien
ctgaacctgactcatggtcggattt

SEQ ID NO: 2511813 - DNA, 25 bp, Homo sapien
gactcatggtcggatttagatctga

SEQ ID NO: 2511814 - DNA, 25 bp, Homo sapien
cctgactcatggtcggatttagatc

SEQ ID NO: 2511815 - DNA, 25 bp, Homo sapien
ccagaagaggtcgatggctttacta

SEQ ID NO: 2511816 - DNA, 25 bp, Homo sapien
tgtatccaacattctcttacgagcc

SEQ ID NO: 2511817 - DNA, 25 bp, Homo sapien
cgagcctggcaaaatccactccatt

SEQ ID NO: 2511818 - DNA, 25 bp, Homo sapien
ctattttggcctaatgttttgttgc

SEQ ID NO: 2511819 - DNA, 25 bp, Homo sapien
gaaagattctccaagcaataccagt

SEQ ID NO: 2511820 - DNA, 25 bp, Homo sapien
tacgacatcttcacgttaaaaggcc

SEQ ID NO: 2511821 - DNA, 25 bp, Homo sapien
tctcaagtatggaaatcaaccccgc

SEQ ID NO: 2511822 - DNA, 25 bp, Homo sapien
taaaaggcctctaccgtactccata

SEQ ID NO: 2511823 - DNA, 25 bp, Homo sapien
tgtgggatcataacccacggcacag

SEQ ID NO: 2511824 - DNA, 25 bp, Homo sapien
ttcactcagctatgtccaggtaact

SEQ ID NO: 2511825 - DNA, 25 bp, Homo sapien
cacaccctgtgctgaagacatctca

SEQ ID NO: 2511826 - DNA, 25 bp, Homo sapien
caccagaaagaaggttcactcactt

SEQ ID NO: 2511827 - DNA, 25 bp, Homo sapien
taaggcatcaatctgactgggaggc

SEQ ID NO: 2511828 - DNA, 25 bp, Homo sapien
tttaagaatgaatcgctggcagcca

SEQ ID NO: 2511829 - DNA, 25 bp, Homo sapien
caataaccgtgaggaggaggacgta

SEQ ID NO: 2511830 - DNA, 25 bp, Homo sapien
tgcataatgaggtgtgccaaccccg

SEQ ID NO: 2511831 - DNA, 25 bp, Homo sapien
tttccagtgcgagcagcttccagca

SEQ ID NO: 2511832 - DNA, 25 bp, Homo sapien
gggtccggatccaccgcccaggatc

SEQ ID NO: 2511833 - DNA, 25 bp, Homo sapien
cttagcagattagacaggggcaggg

SEQ ID NO: 2511834 - DNA, 25 bp, Homo sapien
ccacatttccagtgcgagcagcttc

SEQ ID NO: 2511835 - DNA, 25 bp, Homo sapien
cgccccaccctaaaataatgcaaga

SEQ ID NO: 2511836 - DNA, 25 bp, Homo sapien
ctcttcgccccaccctaaaataatg

SEQ ID NO: 2511837 - DNA, 25 bp, Homo sapien
tcagaccatgtcttgaaagaggggc

SEQ ID NO: 2511838 - DNA, 25 bp, Homo sapien
ttcggggcgcagcttttacaatggg

SEQ ID NO: 2511839 - DNA, 25 bp, Homo sapien
caaggcctcgttcccgcgggtgcgg

SEQ ID NO: 2511840 - DNA, 25 bp, Homo sapien
cgttcccgcgggtgcggcgtgaggg

SEQ ID NO: 2511841 - DNA, 25 bp, Homo sapien
cctcgttcccgcgggtgcggcgtga

SEQ ID NO: 2511842 - DNA, 25 bp, Homo sapien
ccaaggcctcgttcccgcgggtgcg

SEQ ID NO: 2511843 - DNA, 25 bp, Homo sapien
agcgcagggaacacccgcggtggca

SEQ ID NO: 2511844 - DNA, 25 bp, Homo sapien
ctcggcttcctcggcggttacgcgg

SEQ ID NO: 2511845 - DNA, 25 bp, Homo sapien
cggcggcggctcgtgcgctgtggcc

SEQ ID NO: 2511846 - DNA, 25 bp, Homo sapien
agagagtcctagctggagcgggagc

SEQ ID NO: 2511847 - DNA, 25 bp, Homo sapien
ggccatgaatgttgaaggccacaga

SEQ ID NO: 2511848 - DNA, 25 bp, Homo sapien
acagaacaccaatcacccatcttct

SEQ ID NO: 2511849 - DNA, 25 bp, Homo sapien
cccatcttctccaagttataattag

SEQ ID NO: 2511850 - DNA, 25 bp, Homo sapien
tttctgaagattcatggccatgaat

SEQ ID NO: 2511851 - DNA, 25 bp, Homo sapien
caagacagtctttgtagagtaaatg

SEQ ID NO: 2511852 - DNA, 25 bp, Homo sapien
agtaaatggtgtttcaaaggtcagg

SEQ ID NO: 2511853 - DNA, 25 bp, Homo sapien
caaaggtcaggtttagggcaggtgc

SEQ ID NO: 2511854 - DNA, 25 bp, Homo sapien
tactttatatttcgatctaagaggc

SEQ ID NO: 2511855 - DNA, 25 bp, Homo sapien
ttcaacgggttcaaacgatgctcct

SEQ ID NO: 2511856 - DNA, 25 bp, Homo sapien
caccacacttggctaatttttgtat

SEQ ID NO: 2511857 - DNA, 25 bp, Homo sapien
cgatgctcctgcctcaggctcccaa

SEQ ID NO: 2511858 - DNA, 25 bp, Homo sapien
gtagctggaactacaggcatgcacc

SEQ ID NO: 2511859 - DNA, 25 bp, Homo sapien
aagaaattcacagtttgttgccctt

SEQ ID NO: 2511860 - DNA, 25 bp, Homo sapien
catcatgagtcacaagacgagagat

SEQ ID NO: 2511861 - DNA, 25 bp, Homo sapien
atcaggatagtggatggtgcgagca

SEQ ID NO: 2511862 - DNA, 25 bp, Homo sapien
agcatcatgagtcacaagacgagag

SEQ ID NO: 2511863 - DNA, 25 bp, Homo sapien
gggatcaggatagtggatggtgcga

SEQ ID NO: 2511864 - DNA, 25 bp, Homo sapien
gatcagatggaaattctctcccgtc

SEQ ID NO: 2511865 - DNA, 25 bp, Homo sapien
cttggtgtcacagatcagatggaaa

SEQ ID NO: 2511866 - DNA, 25 bp, Homo sapien
gatggaaattctctcccgtcttgtc

SEQ ID NO: 2511867 - DNA, 25 bp, Homo sapien
ccttggtgtcacagatcagatggaa

SEQ ID NO: 2511868 - DNA, 25 bp, Homo sapien
cgatcttaatgaactgctgaatgca

SEQ ID NO: 2511869 - DNA, 25 bp, Homo sapien
gccatcgatcttaatgaactgctga

SEQ ID NO: 2511870 - DNA, 25 bp, Homo sapien
gaactgctgaatgcaaatcttcttt

SEQ ID NO: 2511871 - DNA, 25 bp, Homo sapien
catcgatcttaatgaactgctgaat

SEQ ID NO: 2511872 - DNA, 25 bp, Homo sapien
ctgtcagggcatacttaagtctgtt

SEQ ID NO: 2511873 - DNA, 25 bp, Homo sapien
tgtcagggcatacttaagtctgttc

SEQ ID NO: 2511874 - DNA, 25 bp, Homo sapien
taggaagatgatgagggagagacac

SEQ ID NO: 2511875 - DNA, 25 bp, Homo sapien
ggaagatgatgagggagagacacac

SEQ ID NO: 2511876 - DNA, 25 bp, Homo sapien
aagatgatgagggagagacacactc

SEQ ID NO: 2511877 - DNA, 25 bp, Homo sapien
cttaggaagatgatgagggagagac

SEQ ID NO: 2511878 - DNA, 25 bp, Homo sapien
cggtggatggacgaggatcaaacac

SEQ ID NO: 2511879 - DNA, 25 bp, Homo sapien
accggtggatggacgaggatcaaac

SEQ ID NO: 2511880 - DNA, 25 bp, Homo sapien
tgggaccggtggatggacgaggatc

SEQ ID NO: 2511881 - DNA, 25 bp, Homo sapien
ttgtgggaccggtggatggacgagg

SEQ ID NO: 2511882 - DNA, 25 bp, Homo sapien
tccaatgctttggagctgctaccca

SEQ ID NO: 2511883 - DNA, 25 bp, Homo sapien
tggtcaacttatccagcatccaatg

SEQ ID NO: 2511884 - DNA, 25 bp, Homo sapien
ccaatgctttggagctgctacccac

SEQ ID NO: 2511885 - DNA, 25 bp, Homo sapien
gcatccaatgctttggagctgctac

SEQ ID NO: 2511886 - DNA, 25 bp, Homo sapien
tcagatgcttcttgggatcacaagt

SEQ ID NO: 2511887 - DNA, 25 bp, Homo sapien
ttcagatgcttcttgggatcacaag

SEQ ID NO: 2511888 - DNA, 25 bp, Homo sapien
cagatgcttcttgggatcacaagtc

SEQ ID NO: 2511889 - DNA, 25 bp, Homo sapien
gatgcttcttgggatcacaagtcat

SEQ ID NO: 2511890 - DNA, 25 bp, Homo sapien
tcataaaattgagaggcatcacgcc

SEQ ID NO: 2511891 - DNA, 25 bp, Homo sapien
caccactggtaagtgtgcttctgag

SEQ ID NO: 2511892 - DNA, 25 bp, Homo sapien
tcatctcaggctcggtaaatcagga

SEQ ID NO: 2511893 - DNA, 25 bp, Homo sapien
gcatcacgccaaggtcccaatacat

SEQ ID NO: 2511894 - DNA, 25 bp, Homo sapien
tgtggccacgtactcggaagaatca

SEQ ID NO: 2511895 - DNA, 25 bp, Homo sapien
cagaaagagctagggtccgtcatca

SEQ ID NO: 2511896 - DNA, 25 bp, Homo sapien
catgtaaagggaagtcaactgagcc

SEQ ID NO: 2511897 - DNA, 25 bp, Homo sapien
gaatcagtactccagtccttagggt

SEQ ID NO: 2511898 - DNA, 25 bp, Homo sapien
tagaaataggatattaaaaagttgc

SEQ ID NO: 2511899 - DNA, 25 bp, Homo sapien
aatttactcattctatatccctctt

SEQ ID NO: 2511900 - DNA, 25 bp, Homo sapien
catcttcgtagttccaaagtcttga

SEQ ID NO: 2511901 - DNA, 25 bp, Homo sapien
aaatctcttccatcttcgtagttcc

SEQ ID NO: 2511902 - DNA, 25 bp, Homo sapien
tcgcaacagccacatcatatgttac

SEQ ID NO: 2511903 - DNA, 25 bp, Homo sapien
attggcagatcgcaacagccacatc

SEQ ID NO: 2511904 - DNA, 25 bp, Homo sapien
tcaaagccagatgacattctggcat

SEQ ID NO: 2511905 - DNA, 25 bp, Homo sapien
atcaaagccagatgacattctggca

SEQ ID NO: 2511906 - DNA, 25 bp, Homo sapien
taagtggcaacaagaataggtaacc

SEQ ID NO: 2511907 - DNA, 25 bp, Homo sapien
tccctgaggaagtgatgaactagct

SEQ ID NO: 2511908 - DNA, 25 bp, Homo sapien
cctctattgaggtgatgtgccagcc

SEQ ID NO: 2511909 - DNA, 25 bp, Homo sapien
caggtgagacgtataacaacgggtc

SEQ ID NO: 2511910 - DNA, 25 bp, Homo sapien
taggctttaagtctaaagaccagat

SEQ ID NO: 2511911 - DNA, 25 bp, Homo sapien
tataataaaagcatataactaggct

SEQ ID NO: 2511912 - DNA, 25 bp, Homo sapien
taattgtgatttcagtcatttgtcc

SEQ ID NO: 2511913 - DNA, 25 bp, Homo sapien
tgtgaattaatgactaagctataat

SEQ ID NO: 2511914 - DNA, 25 bp, Homo sapien
cagattatcataatctctaccgttt

SEQ ID NO: 2511915 - DNA, 25 bp, Homo sapien
tctaccgtttgtatgatttccttgg

SEQ ID NO: 2511916 - DNA, 25 bp, Homo sapien
taagcaattataatatacgatagag

SEQ ID NO: 2511917 - DNA, 25 bp, Homo sapien
tttgtatgatttccttgggaagacc

SEQ ID NO: 2511918 - DNA, 25 bp, Homo sapien
gaaacaatgttagctcggaagaagt

SEQ ID NO: 2511919 - DNA, 25 bp, Homo sapien
aatttagtatgtgcaaacacccacc

SEQ ID NO: 2511920 - DNA, 25 bp, Homo sapien
tatgtcatgccaaacacgcaaagca

SEQ ID NO: 2511921 - DNA, 25 bp, Homo sapien
cagactgtttttgccgaatgtatac

SEQ ID NO: 2511922 - DNA, 25 bp, Homo sapien
tattgatctgcttggactttttaca

SEQ ID NO: 2511923 - DNA, 25 bp, Homo sapien
ttattgatctgcttggactttttac

SEQ ID NO: 2511924 - DNA, 25 bp, Homo sapien
ttgatctgcttggactttttacaat

SEQ ID NO: 2511925 - DNA, 25 bp, Homo sapien
agtttattgatctgcttggactttt

SEQ ID NO: 2511926 - DNA, 25 bp, Homo sapien
ccaaaagattgtaatgcccgtacta

SEQ ID NO: 2511927 - DNA, 25 bp, Homo sapien
tagatcacaacagcttaaaagaggg

SEQ ID NO: 2511928 - DNA, 25 bp, Homo sapien
caattcagcaatctgtgtgaacaca

SEQ ID NO: 2511929 - DNA, 25 bp, Homo sapien
ttacactatgtgttgacttccctag

SEQ ID NO: 2511930 - DNA, 25 bp, Homo sapien
ttcctactccagagctataatttca

SEQ ID NO: 2511931 - DNA, 25 bp, Homo sapien
gccagttcctgtttaagagattcat

SEQ ID NO: 2511932 - DNA, 25 bp, Homo sapien
tttatatgatgaagaagagcatctt

SEQ ID NO: 2511933 - DNA, 25 bp, Homo sapien
gttttgactgccactcctgctattc

SEQ ID NO: 2511934 - DNA, 25 bp, Homo sapien
gagttcttcaatagtcacggatcat

SEQ ID NO: 2511935 - DNA, 25 bp, Homo sapien
caaaaatactgagatagcactggag

SEQ ID NO: 2511936 - DNA, 25 bp, Homo sapien
gcacctgggcacaataacaagcact

SEQ ID NO: 2511937 - DNA, 25 bp, Homo sapien
tgccttatcgaccaagtgaggtagt

SEQ ID NO: 2511938 - DNA, 25 bp, Homo sapien
aaggagaactcaggaaagttagctg

SEQ ID NO: 2511939 - DNA, 25 bp, Homo sapien
caggaaagttagctgactgagaagg

SEQ ID NO: 2511940 - DNA, 25 bp, Homo sapien
tcaggaaagttagctgactgagaag

SEQ ID NO: 2511941 - DNA, 25 bp, Homo sapien
gagaactcaggaaagttagctgact

SEQ ID NO: 2511942 - DNA, 25 bp, Homo sapien
tcagatcatactttccactggtcag

SEQ ID NO: 2511943 - DNA, 25 bp, Homo sapien
cagatcatactttccactggtcagc

SEQ ID NO: 2511944 - DNA, 25 bp, Homo sapien
cagcactgaatcgcttttgacattt

SEQ ID NO: 2511945 - DNA, 25 bp, Homo sapien
gcagcactgaatcgcttttgacatt

SEQ ID NO: 2511946 - DNA, 25 bp, Homo sapien
taaacccatgtgtctttaatcctta

SEQ ID NO: 2511947 - DNA, 25 bp, Homo sapien
ccatcaaccttgaggcgtgagcaaa

SEQ ID NO: 2511948 - DNA, 25 bp, Homo sapien
ttggccatggactcttatacaggac

SEQ ID NO: 2511949 - DNA, 25 bp, Homo sapien
gaaaatcatcatgacctcagatttg

SEQ ID NO: 2511950 - DNA, 25 bp, Homo sapien
aggagctggttcaagggatactgta

SEQ ID NO: 2511951 - DNA, 25 bp, Homo sapien
tatgaaaagagccatcgtcacttct

SEQ ID NO: 2511952 - DNA, 25 bp, Homo sapien
tcaagggatactgtactactccggg

SEQ ID NO: 2511953 - DNA, 25 bp, Homo sapien
gatcaatatgtacagttacaggagc

SEQ ID NO: 2511954 - DNA, 25 bp, Homo sapien
attttcgtgttagaaacttgtatct

SEQ ID NO: 2511955 - DNA, 25 bp, Homo sapien
gttagaaacttgtatcttcattggc

SEQ ID NO: 2511956 - DNA, 25 bp, Homo sapien
cgtgttagaaacttgtatcttcatt

SEQ ID NO: 2511957 - DNA, 25 bp, Homo sapien
ttcgtgttagaaacttgtatcttca

SEQ ID NO: 2511958 - DNA, 25 bp, Homo sapien
agagaagatgtaagaaactcagtgc

SEQ ID NO: 2511959 - DNA, 25 bp, Homo sapien
aaagagtgtattacagcaccaggcc

SEQ ID NO: 2511960 - DNA, 25 bp, Homo sapien
tcaaatctcagagaaatctcaggag

SEQ ID NO: 2511961 - DNA, 25 bp, Homo sapien
ttctatgtggcactgcagaaatcca

SEQ ID NO: 2511962 - DNA, 25 bp, Homo sapien
ggtgtcacctggttcacttgaagac

SEQ ID NO: 2511963 - DNA, 25 bp, Homo sapien
aatgccgaaggctgatattgcctaa

SEQ ID NO: 2511964 - DNA, 25 bp, Homo sapien
caactggacgattacaaaggtaatg

SEQ ID NO: 2511965 - DNA, 25 bp, Homo sapien
tattgcctaattggtctggtgtcac

SEQ ID NO: 2511966 - DNA, 25 bp, Homo sapien
cctgagcaccctctgaatttgtact

SEQ ID NO: 2511967 - DNA, 25 bp, Homo sapien
gaatttgtactgatggcatctggag

SEQ ID NO: 2511968 - DNA, 25 bp, Homo sapien
cctctgaatttgtactgatggcatc

SEQ ID NO: 2511969 - DNA, 25 bp, Homo sapien
caccctctgaatttgtactgatggc

SEQ ID NO: 2511970 - DNA, 25 bp, Homo sapien
cccctgtaatttgtagttgagttct

SEQ ID NO: 2511971 - DNA, 25 bp, Homo sapien
ctgtgcccctgtaatttgtagttga

SEQ ID NO: 2511972 - DNA, 25 bp, Homo sapien
gtgcccctgtaatttgtagttgagt

SEQ ID NO: 2511973 - DNA, 25 bp, Homo sapien
gcccctgtaatttgtagttgagttc

SEQ ID NO: 2511974 - DNA, 25 bp, Homo sapien
tactactctgtagtcagcttctaac

SEQ ID NO: 2511975 - DNA, 25 bp, Homo sapien
aaatggcccagggaaaatacctgtg

SEQ ID NO: 2511976 - DNA, 25 bp, Homo sapien
caaactatctgtggtaaaagacaat

SEQ ID NO: 2511977 - DNA, 25 bp, Homo sapien
aaattcagtagccatcacagatcaa

SEQ ID NO: 2511978 - DNA, 25 bp, Homo sapien
ttgacggtagttacttctgcagtgg

SEQ ID NO: 2511979 - DNA, 25 bp, Homo sapien
tggaaagactagttagggaccagag

SEQ ID NO: 2511980 - DNA, 25 bp, Homo sapien
caaatatgtatacatgcacgcatgc

SEQ ID NO: 2511981 - DNA, 25 bp, Homo sapien
ccagaggtaggctgatagtccagtt

SEQ ID NO: 2511982 - DNA, 25 bp, Homo sapien
aaatggtatccaatgacatttgtga

SEQ ID NO: 2511983 - DNA, 25 bp, Homo sapien
ccaatatcatgctgtcaagtgaaat

SEQ ID NO: 2511984 - DNA, 25 bp, Homo sapien
catcactttctaataactgttcttc

SEQ ID NO: 2511985 - DNA, 25 bp, Homo sapien
tccatcactttctaataactgttct

SEQ ID NO: 2511986 - DNA, 25 bp, Homo sapien
gaaagtatattcgaatcttctctgt

SEQ ID NO: 2511987 - DNA, 25 bp, Homo sapien
tctgatccaatttctcctgagccac

SEQ ID NO: 2511988 - DNA, 25 bp, Homo sapien
cagctttaaagatggactctatggt

SEQ ID NO: 2511989 - DNA, 25 bp, Homo sapien
ctgtgatttaagtgttctaactggg

SEQ ID NO: 2511990 - DNA, 25 bp, Homo sapien
tccactggatggagcaaaagagcca

SEQ ID NO: 2511991 - DNA, 25 bp, Homo sapien
agatgaatatctgcctctgacgagg

SEQ ID NO: 2511992 - DNA, 25 bp, Homo sapien
gatgtctgactagcaggactgccag

SEQ ID NO: 2511993 - DNA, 25 bp, Homo sapien
ggcaaataatcaggtaccactgggc

SEQ ID NO: 2511994 - DNA, 25 bp, Homo sapien
tcaactcgaacatcaacatgctcgt

SEQ ID NO: 2511995 - DNA, 25 bp, Homo sapien
ctttagcattaagccatcaactcga

SEQ ID NO: 2511996 - DNA, 25 bp, Homo sapien
cattcagctggctatagaggttggg

SEQ ID NO: 2511997 - DNA, 25 bp, Homo sapien
tacacagccatgaactgattaagac

SEQ ID NO: 2511998 - DNA, 25 bp, Homo sapien
tatgcaataacagacaatggccgtg

SEQ ID NO: 2511999 - DNA, 25 bp, Homo sapien
catggctggaatactatgattatgc

SEQ ID NO: 2512000 - DNA, 25 bp, Homo sapien
ttttactccctatgagatgcagagc

SEQ ID NO: 2512001 - DNA, 25 bp, Homo sapien
gatgcagagcagatgtcttccttca

SEQ ID NO: 2512002 - DNA, 25 bp, Homo sapien
ccatctggatagtaatattctgtga

SEQ ID NO: 2512003 - DNA, 25 bp, Homo sapien
ctgtgaattctatatagacagctga

SEQ ID NO: 2512004 - DNA, 25 bp, Homo sapien
tcttgtggaagatatagggattttt

SEQ ID NO: 2512005 - DNA, 25 bp, Homo sapien
gacatttcttgtggaagatataggg

SEQ ID NO: 2512006 - DNA, 25 bp, Homo sapien
acctcttaacatcagcgtgacatgt

SEQ ID NO: 2512007 - DNA, 25 bp, Homo sapien
atctaggaaataactgaattgcttt

SEQ ID NO: 2512008 - DNA, 25 bp, Homo sapien
agacaggacattggactgtggactt

SEQ ID NO: 2512009 - DNA, 25 bp, Homo sapien
tcagcgtgacatgtatgtgaaacat

SEQ ID NO: 2512010 - DNA, 25 bp, Homo sapien
ctagtgaattttgaaccagagggta

SEQ ID NO: 2512011 - DNA, 25 bp, Homo sapien
tagcgggcatagtacccgttaagta

SEQ ID NO: 2512012 - DNA, 25 bp, Homo sapien
aatttcacaacccaagtagcgggca

SEQ ID NO: 2512013 - DNA, 25 bp, Homo sapien
gcatctcttcctatggctggttgta

SEQ ID NO: 2512014 - DNA, 25 bp, Homo sapien
tactgaaggtgttctgcatgtccct

SEQ ID NO: 2512015 - DNA, 25 bp, Homo sapien
gcatgtccctttcagagggtagtcc

SEQ ID NO: 2512016 - DNA, 25 bp, Homo sapien
gaaatctgcaagtctaaccacaaca

SEQ ID NO: 2512017 - DNA, 25 bp, Homo sapien
caacagaactagacattagcttagc

SEQ ID NO: 2512018 - DNA, 25 bp, Homo sapien
tccacaagcctatgttggtctgagc

SEQ ID NO: 2512019 - DNA, 25 bp, Homo sapien
cagacaatgggtgattagtgaatac

SEQ ID NO: 2512020 - DNA, 25 bp, Homo sapien
taaatgtctgaggtgacgaatatgc

SEQ ID NO: 2512021 - DNA, 25 bp, Homo sapien
aaatacttggcttaggccgggcgtg

SEQ ID NO: 2512022 - DNA, 25 bp, Homo sapien
catgtgttggggatttaggaggtga

SEQ ID NO: 2512023 - DNA, 25 bp, Homo sapien
gagaggcatgtgttggggatttagg

SEQ ID NO: 2512024 - DNA, 25 bp, Homo sapien
tgtgttggggatttaggaggtgaac

SEQ ID NO: 2512025 - DNA, 25 bp, Homo sapien
ctggggagaggcatgtgttggggat

SEQ ID NO: 2512026 - DNA, 25 bp, Homo sapien
tcaacgttgcactcaaattcatgca

SEQ ID NO: 2512027 - DNA, 25 bp, Homo sapien
cacagcctgtttaagcatttcaacg

SEQ ID NO: 2512028 - DNA, 25 bp, Homo sapien
tgcaataactcattggcccatccat

SEQ ID NO: 2512029 - DNA, 25 bp, Homo sapien
gttttggttgcatcactaaaataca

SEQ ID NO: 2512030 - DNA, 25 bp, Homo sapien
tattatagtaatgcttccaatgaga

SEQ ID NO: 2512031 - DNA, 25 bp, Homo sapien
tctggaggagtttctatctagtacc

SEQ ID NO: 2512032 - DNA, 25 bp, Homo sapien
tacctggtaaacctgcattaaactg

SEQ ID NO: 2512033 - DNA, 25 bp, Homo sapien
tgactcgtcacccttcactggatgc

SEQ ID NO: 2512034 - DNA, 25 bp, Homo sapien
cctccagtaatacgtctgtttgact

SEQ ID NO: 2512035 - DNA, 25 bp, Homo sapien
gcccctccagtaatacgtctgtttg

SEQ ID NO: 2512036 - DNA, 25 bp, Homo sapien
ttgcattgcccctccagtaatacgt

SEQ ID NO: 2512037 - DNA, 25 bp, Homo sapien
cattgcccctccagtaatacgtctg

SEQ ID NO: 2512038 - DNA, 25 bp, Homo sapien
catcaggagcatttgaagtttgcgt

SEQ ID NO: 2512039 - DNA, 25 bp, Homo sapien
ttcacaattgcatcatttacatcag

SEQ ID NO: 2512040 - DNA, 25 bp, Homo sapien
taaatgatgggaggtttccttaaca

SEQ ID NO: 2512041 - DNA, 25 bp, Homo sapien
cacatatgtgtagatctagatgaga

SEQ ID NO: 2512042 - DNA, 25 bp, Homo sapien
gggcagatgcgactactgtagagct

SEQ ID NO: 2512043 - DNA, 25 bp, Homo sapien
ctgggcagatgcgactactgtagag

SEQ ID NO: 2512044 - DNA, 25 bp, Homo sapien
tgggcagatgcgactactgtagagc

SEQ ID NO: 2512045 - DNA, 25 bp, Homo sapien
ctcccttaaatctacttccttctgc

SEQ ID NO: 2512046 - DNA, 25 bp, Homo sapien
ccttaaatctacttccttctgcctt

SEQ ID NO: 2512047 - DNA, 25 bp, Homo sapien
ttaaatctacttccttctgccttcc

SEQ ID NO: 2512048 - DNA, 25 bp, Homo sapien
tcccttaaatctacttccttctgcc

SEQ ID NO: 2512049 - DNA, 25 bp, Homo sapien
tagctcattatgcttgtccctgttc

SEQ ID NO: 2512050 - DNA, 25 bp, Homo sapien
gattctctgcacagttaactctcac

SEQ ID NO: 2512051 - DNA, 25 bp, Homo sapien
gacaactccaacagaagttttgtgt

SEQ ID NO: 2512052 - DNA, 25 bp, Homo sapien
tgctccatacaaactaataatcact

SEQ ID NO: 2512053 - DNA, 25 bp, Homo sapien
gtcatcattagctttagtgcctaat

SEQ ID NO: 2512054 - DNA, 25 bp, Homo sapien
tattaaaacatcgaatacttttatg

SEQ ID NO: 2512055 - DNA, 25 bp, Homo sapien
atcattagctttagtgcctaataca

SEQ ID NO: 2512056 - DNA, 25 bp, Homo sapien
taaaacatcgaatacttttatgtca

SEQ ID NO: 2512057 - DNA, 25 bp, Homo sapien
tattgtaccatagctttcaactggg

SEQ ID NO: 2512058 - DNA, 25 bp, Homo sapien
ttcaactgggaatcagtcaaaaccc

SEQ ID NO: 2512059 - DNA, 25 bp, Homo sapien
taactttgttgctatgacattgcag

SEQ ID NO: 2512060 - DNA, 25 bp, Homo sapien
tgtaggttcaggagccatactcttc

SEQ ID NO: 2512061 - DNA, 25 bp, Homo sapien
cgaacaggagcacacataatttcaa

SEQ ID NO: 2512062 - DNA, 25 bp, Homo sapien
taatcgaacaggagcacacataatt

SEQ ID NO: 2512063 - DNA, 25 bp, Homo sapien
ggttattaatcgaacaggagcacac

SEQ ID NO: 2512064 - DNA, 25 bp, Homo sapien
gattggttggttattaatcgaacag

SEQ ID NO: 2512065 - DNA, 25 bp, Homo sapien
ctgtggatcctgaatacgagtaaat

SEQ ID NO: 2512066 - DNA, 25 bp, Homo sapien
tgatgcattgaaggcttttgctcca

SEQ ID NO: 2512067 - DNA, 25 bp, Homo sapien
tcccagtgtgcatttacactataga

SEQ ID NO: 2512068 - DNA, 25 bp, Homo sapien
ccgaagctgagaaagttcaaatgat

SEQ ID NO: 2512069 - DNA, 25 bp, Homo sapien
tatcaactatactaagcacacaagg

SEQ ID NO: 2512070 - DNA, 25 bp, Homo sapien
gcaggatgatgctacattacaaaga

SEQ ID NO: 2512071 - DNA, 25 bp, Homo sapien
gataaacctggcctttagtcaactc

SEQ ID NO: 2512072 - DNA, 25 bp, Homo sapien
tcttagaagtggaacgaatcaccat

SEQ ID NO: 2512073 - DNA, 25 bp, Homo sapien
tcatgcagattaatggaagtagctt

SEQ ID NO: 2512074 - DNA, 25 bp, Homo sapien
catgcagattaatggaagtagctta

SEQ ID NO: 2512075 - DNA, 25 bp, Homo sapien
atgcagattaatggaagtagcttac

SEQ ID NO: 2512076 - DNA, 25 bp, Homo sapien
tgaagcagttgcaattggtgatggg

SEQ ID NO: 2512077 - DNA, 25 bp, Homo sapien
aagcagttgcaattggtgatgggcc

SEQ ID NO: 2512078 - DNA, 25 bp, Homo sapien
gaagcagttgcaattggtgatgggc

SEQ ID NO: 2512079 - DNA, 25 bp, Homo sapien
agcagttgcaattggtgatgggcca

SEQ ID NO: 2512080 - DNA, 25 bp, Homo sapien
aagtgagcagagtcatttaagtgcc

SEQ ID NO: 2512081 - DNA, 25 bp, Homo sapien
tctcaaggcatttattatctggtgg

SEQ ID NO: 2512082 - DNA, 25 bp, Homo sapien
ctacaggtctaaaaagacaaatgcc

SEQ ID NO: 2512083 - DNA, 25 bp, Homo sapien
aaagaacacaaagcactcaatcagt

SEQ ID NO: 2512084 - DNA, 25 bp, Homo sapien
tactagatcactaaaaggagaaaca

SEQ ID NO: 2512085 - DNA, 25 bp, Homo sapien
gatgaaaaacctgagtcctatcaaa

SEQ ID NO: 2512086 - DNA, 25 bp, Homo sapien
tcccatagtacatcaacaaagagtt

SEQ ID NO: 2512087 - DNA, 25 bp, Homo sapien
tgttactgaaagaataatcccatag

SEQ ID NO: 2512088 - DNA, 25 bp, Homo sapien
gtgttttcagttttgtccatgggat

SEQ ID NO: 2512089 - DNA, 25 bp, Homo sapien
aaacagatgggatgtgttttcagtt

SEQ ID NO: 2512090 - DNA, 25 bp, Homo sapien
gatgtgttttcagttttgtccatgg

SEQ ID NO: 2512091 - DNA, 25 bp, Homo sapien
caaacagatgggatgtgttttcagt

SEQ ID NO: 2512092 - DNA, 25 bp, Homo sapien
tgatagcaagccatgttggcaaatc

SEQ ID NO: 2512093 - DNA, 25 bp, Homo sapien
caaaaaactttgttgatagcaagcc

SEQ ID NO: 2512094 - DNA, 25 bp, Homo sapien
tacttagatttatcttgtcaggaga

SEQ ID NO: 2512095 - DNA, 25 bp, Homo sapien
taagggtacttagatttatcttgtc

SEQ ID NO: 2512096 - DNA, 25 bp, Homo sapien
aacaggcagtgagccaaagcaggcc

SEQ ID NO: 2512097 - DNA, 25 bp, Homo sapien
aactaatggtgtgtctgtgatccaa

SEQ ID NO: 2512098 - DNA, 25 bp, Homo sapien
gaacagttggacatgcagctccctg

SEQ ID NO: 2512099 - DNA, 25 bp, Homo sapien
gcctttgtagctcctaagaaaacta

SEQ ID NO: 2512100 - DNA, 25 bp, Homo sapien
aaaatcttaaacttcaatgtgacag

SEQ ID NO: 2512101 - DNA, 25 bp, Homo sapien
acctagatagcattcccaatccttt

SEQ ID NO: 2512102 - DNA, 25 bp, Homo sapien
tacttttccacctagatagcattcc

SEQ ID NO: 2512103 - DNA, 25 bp, Homo sapien
agacaaaatctccaacccttccaat

SEQ ID NO: 2512104 - DNA, 25 bp, Homo sapien
tagtgcactgcctattacagatgac

SEQ ID NO: 2512105 - DNA, 25 bp, Homo sapien
cagatgactaatggagcaacaagcc

SEQ ID NO: 2512106 - DNA, 25 bp, Homo sapien
ttaatgtagcaaatgaggcccttgg

SEQ ID NO: 2512107 - DNA, 25 bp, Homo sapien
catttgtagactccgtatttccacc

SEQ ID NO: 2512108 - DNA, 25 bp, Homo sapien
ttgctaattgaaccatgggtagaca

SEQ ID NO: 2512109 - DNA, 25 bp, Homo sapien
agacaaaactgggtcacaaaggctt

SEQ ID NO: 2512110 - DNA, 25 bp, Homo sapien
tgctaattgaaccatgggtagacaa

SEQ ID NO: 2512111 - DNA, 25 bp, Homo sapien
catgggtagacaaaactgggtcaca

SEQ ID NO: 2512112 - DNA, 25 bp, Homo sapien
gccgatttgcaagcgcctgttcaca

SEQ ID NO: 2512113 - DNA, 25 bp, Homo sapien
tgaggtgaatgtctgcccagtcaac

SEQ ID NO: 2512114 - DNA, 25 bp, Homo sapien
caagacaaactgaccctggttgaca

SEQ ID NO: 2512115 - DNA, 25 bp, Homo sapien
tatacgatgactccaccgaggtgag

SEQ ID NO: 2512116 - DNA, 25 bp, Homo sapien
ggaggaattcagaacaatcacaagg

SEQ ID NO: 2512117 - DNA, 25 bp, Homo sapien
ggtgggaggaattcagaacaatcac

SEQ ID NO: 2512118 - DNA, 25 bp, Homo sapien
gagcgggaacgccaaggtgggagga

SEQ ID NO: 2512119 - DNA, 25 bp, Homo sapien
cctctgatgccacagagcgggaacg

SEQ ID NO: 2512120 - DNA, 25 bp, Homo sapien
actgagcgtccacactgcgccagaa

SEQ ID NO: 2512121 - DNA, 25 bp, Homo sapien
actgagaacacagcctccactgagc

SEQ ID NO: 2512122 - DNA, 25 bp, Homo sapien
gcgccagaagccctcggttaacgga

SEQ ID NO: 2512123 - DNA, 25 bp, Homo sapien
ttaacgttccactgagaacacagcc

SEQ ID NO: 2512124 - DNA, 25 bp, Homo sapien
ggaaggagcaccgaactcgagttag

SEQ ID NO: 2512125 - DNA, 25 bp, Homo sapien
tagagcccagcacattaaccaggca

SEQ ID NO: 2512126 - DNA, 25 bp, Homo sapien
caaggggaaggagcaccgaactcga

SEQ ID NO: 2512127 - DNA, 25 bp, Homo sapien
gcaccgaactcgagttagagcccag

SEQ ID NO: 2512128 - DNA, 25 bp, Homo sapien
tcaggggccgattcgtgaggccagc

SEQ ID NO: 2512129 - DNA, 25 bp, Homo sapien
ggaagtccgaaggtcgcctcccgca

SEQ ID NO: 2512130 - DNA, 25 bp, Homo sapien
ccgcaggctgactccagtgcgggct

SEQ ID NO: 2512131 - DNA, 25 bp, Homo sapien
cgccgccggcgacaagagatccggg

SEQ ID NO: 2512132 - DNA, 25 bp, Homo sapien
ctggagaggtgcttcaagatttgtt

SEQ ID NO: 2512133 - DNA, 25 bp, Homo sapien
tggagaggtgcttcaagatttgttt

SEQ ID NO: 2512134 - DNA, 25 bp, Homo sapien
ggagacgccgcggtctcgtcctgtt

SEQ ID NO: 2512135 - DNA, 25 bp, Homo sapien
agacgccgcggtctcgtcctgttgc

SEQ ID NO: 2512136 - DNA, 25 bp, Homo sapien
ctggagacgccgcggtctcgtcctg

SEQ ID NO: 2512137 - DNA, 25 bp, Homo sapien
gagacgccgcggtctcgtcctgttg

SEQ ID NO: 2512138 - DNA, 25 bp, Homo sapien
cctctcttcgtggccgtctcctctc

SEQ ID NO: 2512139 - DNA, 25 bp, Homo sapien
gcccggccggcggagaggcgctgat

SEQ ID NO: 2512140 - DNA, 25 bp, Homo sapien
ctagcccggccggcggagaggcgct

SEQ ID NO: 2512141 - DNA, 25 bp, Homo sapien
ggccggcggagaggcgctgatcgct

SEQ ID NO: 2512142 - DNA, 25 bp, Homo sapien
ccggccggcggagaggcgctgatcg

SEQ ID NO: 2512143 - DNA, 25 bp, Homo sapien
agccgccgccgagaacccggagcat

SEQ ID NO: 2512144 - DNA, 25 bp, Homo sapien
ctcaggccgccacggccgccgcggg

SEQ ID NO: 2512145 - DNA, 25 bp, Homo sapien
ggccgccacggccgccgcgggcgcc

SEQ ID NO: 2512146 - DNA, 25 bp, Homo sapien
caggccgccacggccgccgcgggcg

SEQ ID NO: 2512147 - DNA, 25 bp, Homo sapien
cacgctcaggccgccacggccgccg

SEQ ID NO: 2512148 - DNA, 25 bp, Homo sapien
ttatttgtctgactttggaatcttt

SEQ ID NO: 2512149 - DNA, 25 bp, Homo sapien
atttgtctgactttggaatctttac

SEQ ID NO: 2512150 - DNA, 25 bp, Homo sapien
tatttgtctgactttggaatcttta

SEQ ID NO: 2512151 - DNA, 25 bp, Homo sapien
tcttcttaggaaaatgaccaggttc

SEQ ID NO: 2512152 - DNA, 25 bp, Homo sapien
cttcttaggaaaatgaccaggttct

SEQ ID NO: 2512153 - DNA, 25 bp, Homo sapien
ttcttaggaaaatgaccaggttctg

SEQ ID NO: 2512154 - DNA, 25 bp, Homo sapien
ctaatgaggtttgttcctagcaaca

SEQ ID NO: 2512155 - DNA, 25 bp, Homo sapien
tcccgagatgtctgcaacagctgca

SEQ ID NO: 2512156 - DNA, 25 bp, Homo sapien
taacaagatccaaagttaggtctaa

SEQ ID NO: 2512157 - DNA, 25 bp, Homo sapien
cctagcaacattcgccatggaagga

SEQ ID NO: 2512158 - DNA, 25 bp, Homo sapien
tagacttgtaaatctatggccactg

SEQ ID NO: 2512159 - DNA, 25 bp, Homo sapien
tgtagccccccaaccagctgaggct

SEQ ID NO: 2512160 - DNA, 25 bp, Homo sapien
cttagacttgtaaatctatggccac

SEQ ID NO: 2512161 - DNA, 25 bp, Homo sapien
ctatgcgacctgtagccccccaacc

SEQ ID NO: 2512162 - DNA, 25 bp, Homo sapien
agcttcatcctcttggttcaagcaa

SEQ ID NO: 2512163 - DNA, 25 bp, Homo sapien
tggctgttgtgtagggctccccaaa

SEQ ID NO: 2512164 - DNA, 25 bp, Homo sapien
agccatgcatcccttttagcttcat

SEQ ID NO: 2512165 - DNA, 25 bp, Homo sapien
agcaatgttctttgtctgtcaggcc

SEQ ID NO: 2512166 - DNA, 25 bp, Homo sapien
cagctctctcctcacttttctctct

SEQ ID NO: 2512167 - DNA, 25 bp, Homo sapien
cgttttctctctgctttctctccaa

SEQ ID NO: 2512168 - DNA, 25 bp, Homo sapien
tcccgttttctctctgctttctctc

SEQ ID NO: 2512169 - DNA, 25 bp, Homo sapien
tcacttttctctctcccgttttctc

SEQ ID NO: 2512170 - DNA, 25 bp, Homo sapien
ctgccagccaatggggtcaggcaaa

SEQ ID NO: 2512171 - DNA, 25 bp, Homo sapien
cagccaatggggtcaggcaaatcca

SEQ ID NO: 2512172 - DNA, 25 bp, Homo sapien
agccaatggggtcaggcaaatccat

SEQ ID NO: 2512173 - DNA, 25 bp, Homo sapien
gccagccaatggggtcaggcaaatc

SEQ ID NO: 2512174 - DNA, 25 bp, Homo sapien
ggccctcttctacctctaaacagat

SEQ ID NO: 2512175 - DNA, 25 bp, Homo sapien
gccccagggccctcttctacctcta

SEQ ID NO: 2512176 - DNA, 25 bp, Homo sapien
agccccagggccctcttctacctct

SEQ ID NO: 2512177 - DNA, 25 bp, Homo sapien
cagggccctcttctacctctaaaca

SEQ ID NO: 2512178 - DNA, 25 bp, Homo sapien
tgtatacactcctacacatggccga

SEQ ID NO: 2512179 - DNA, 25 bp, Homo sapien
aactacaagagaacactgtccccca

SEQ ID NO: 2512180 - DNA, 25 bp, Homo sapien
agtgagcctccctgtcatgcctggc

SEQ ID NO: 2512181 - DNA, 25 bp, Homo sapien
tgtgtggcccgacagtctctaccag

SEQ ID NO: 2512182 - DNA, 25 bp, Homo sapien
cctggaaagcctccggagcttagca

SEQ ID NO: 2512183 - DNA, 25 bp, Homo sapien
ggacgcttcctggaaagcctccgga

SEQ ID NO: 2512184 - DNA, 25 bp, Homo sapien
atcctttccaagggacgcttcctgg

SEQ ID NO: 2512185 - DNA, 25 bp, Homo sapien
gaaagcctccggagcttagcaggct

SEQ ID NO: 2512186 - DNA, 25 bp, Homo sapien
ggtcttatgcttgctactgtgaggg

SEQ ID NO: 2512187 - DNA, 25 bp, Homo sapien
ttatttagtggccttttagattatg

SEQ ID NO: 2512188 - DNA, 25 bp, Homo sapien
tggtagggacatggtaggggcagag

SEQ ID NO: 2512189 - DNA, 25 bp, Homo sapien
tggccttttagattatggtgatctt

SEQ ID NO: 2512190 - DNA, 25 bp, Homo sapien
aaaaaggaatgcaagggctgctgcc

SEQ ID NO: 2512191 - DNA, 25 bp, Homo sapien
gaggttctgcatctcatgaagcagt

SEQ ID NO: 2512192 - DNA, 25 bp, Homo sapien
ctggtacaaaaaaggaatgcaaggg

SEQ ID NO: 2512193 - DNA, 25 bp, Homo sapien
ctggaggttctgcatctcatgaagc

SEQ ID NO: 2512194 - DNA, 25 bp, Homo sapien
ctgctgctcagtggggttgtcacag

SEQ ID NO: 2512195 - DNA, 25 bp, Homo sapien
cagactccccactgctggcaaggct

SEQ ID NO: 2512196 - DNA, 25 bp, Homo sapien
actccccactgctggcaaggctcac

SEQ ID NO: 2512197 - DNA, 25 bp, Homo sapien
acagggagaatgcttccccgcctct

SEQ ID NO: 2512198 - DNA, 25 bp, Homo sapien
cactgtgcctgaggactctactcac

SEQ ID NO: 2512199 - DNA, 25 bp, Homo sapien
tcactaccctggcttgtcagtagcc

SEQ ID NO: 2512200 - DNA, 25 bp, Homo sapien
tggcttgtcagtagccccaagctac

SEQ ID NO: 2512201 - DNA, 25 bp, Homo sapien
tgaggactctactcactaccctggc

SEQ ID NO: 2512202 - DNA, 25 bp, Homo sapien
ctatgccacttgttgcagtcgtcca

SEQ ID NO: 2512203 - DNA, 25 bp, Homo sapien
tgttgcagtcgtccacaagccacgc

SEQ ID NO: 2512204 - DNA, 25 bp, Homo sapien
gccacttgttgcagtcgtccacaag

SEQ ID NO: 2512205 - DNA, 25 bp, Homo sapien
acttgttgcagtcgtccacaagcca

SEQ ID NO: 2512206 - DNA, 25 bp, Homo sapien
tgggccagcctgctgatgcactcct

SEQ ID NO: 2512207 - DNA, 25 bp, Homo sapien
tctggctctggtacagtgcgatgta

SEQ ID NO: 2512208 - DNA, 25 bp, Homo sapien
cttcacctctcccttgtcctgggcc

SEQ ID NO: 2512209 - DNA, 25 bp, Homo sapien
gccctctggctctggtacagtgcga

SEQ ID NO: 2512210 - DNA, 25 bp, Homo sapien
ctcaaccctctccttcaagtccacc

SEQ ID NO: 2512211 - DNA, 25 bp, Homo sapien
gggcccctctgaccaatgtgcagct

SEQ ID NO: 2512212 - DNA, 25 bp, Homo sapien
tccagacagctagatgcagcaatgt

SEQ ID NO: 2512213 - DNA, 25 bp, Homo sapien
gcagctctctttgccgtgccctggc

SEQ ID NO: 2512214 - DNA, 25 bp, Homo sapien
ataatggggtcacattaaggcagcg

SEQ ID NO: 2512215 - DNA, 25 bp, Homo sapien
gtcacattaaggcagcgaccttcct

SEQ ID NO: 2512216 - DNA, 25 bp, Homo sapien
tggggtcacattaaggcagcgacct

SEQ ID NO: 2512217 - DNA, 25 bp, Homo sapien
cacattaaggcagcgaccttcctgc

SEQ ID NO: 2512218 - DNA, 25 bp, Homo sapien
cagcttctccatggccccctgcagg

SEQ ID NO: 2512219 - DNA, 25 bp, Homo sapien
ccacagcttctccatggccccctgc

SEQ ID NO: 2512220 - DNA, 25 bp, Homo sapien
acagcttctccatggccccctgcag

SEQ ID NO: 2512221 - DNA, 25 bp, Homo sapien
gcttctccatggccccctgcagggc

SEQ ID NO: 2512222 - DNA, 25 bp, Homo sapien
cacacatgggatcacccccagttct

SEQ ID NO: 2512223 - DNA, 25 bp, Homo sapien
ccacacatgggatcacccccagttc

SEQ ID NO: 2512224 - DNA, 25 bp, Homo sapien
cacatgggatcacccccagttcttg

SEQ ID NO: 2512225 - DNA, 25 bp, Homo sapien
acacatgggatcacccccagttctt

SEQ ID NO: 2512226 - DNA, 25 bp, Homo sapien
gcactagctacagctgagttgaaaa

SEQ ID NO: 2512227 - DNA, 25 bp, Homo sapien
agctacagctgagttgaaaaatgcc

SEQ ID NO: 2512228 - DNA, 25 bp, Homo sapien
ctcggcactagctacagctgagttg

SEQ ID NO: 2512229 - DNA, 25 bp, Homo sapien
ctagctacagctgagttgaaaaatg

SEQ ID NO: 2512230 - DNA, 25 bp, Homo sapien
tctggctctctagatcctccgggat

SEQ ID NO: 2512231 - DNA, 25 bp, Homo sapien
atggccttctggctctctagatcct

SEQ ID NO: 2512232 - DNA, 25 bp, Homo sapien
tggctctctagatcctccgggatgc

SEQ ID NO: 2512233 - DNA, 25 bp, Homo sapien
tagatcctccgggatgcttggcatg

SEQ ID NO: 2512234 - DNA, 25 bp, Homo sapien
tcctcagacaacccaacaagggcag

SEQ ID NO: 2512235 - DNA, 25 bp, Homo sapien
ccctcactgtgtaaccctaggccag

SEQ ID NO: 2512236 - DNA, 25 bp, Homo sapien
tcactgtgtaaccctaggccagccc

SEQ ID NO: 2512237 - DNA, 25 bp, Homo sapien
gtcctcagacaacccaacaagggca

SEQ ID NO: 2512238 - DNA, 25 bp, Homo sapien
gcagtcccactaccaataggcatgg

SEQ ID NO: 2512239 - DNA, 25 bp, Homo sapien
tgcagtcccactaccaataggcatg

SEQ ID NO: 2512240 - DNA, 25 bp, Homo sapien
aataggcatgggagttccgacctgc

SEQ ID NO: 2512241 - DNA, 25 bp, Homo sapien
actaccaataggcatgggagttccg

SEQ ID NO: 2512242 - DNA, 25 bp, Homo sapien
gtttcagctcctcaatcctatgctg

SEQ ID NO: 2512243 - DNA, 25 bp, Homo sapien
tctctcctcttcctgtgagcagtct

SEQ ID NO: 2512244 - DNA, 25 bp, Homo sapien
tcttcctgtgagcagtctccggtac

SEQ ID NO: 2512245 - DNA, 25 bp, Homo sapien
cctcttcctgtgagcagtctccggt

SEQ ID NO: 2512246 - DNA, 25 bp, Homo sapien
ctcctcttcctgtgagcagtctccg

SEQ ID NO: 2512247 - DNA, 25 bp, Homo sapien
tctgctggctgatagcttccaggtg

SEQ ID NO: 2512248 - DNA, 25 bp, Homo sapien
atgaggctcaactgggcctgaggct

SEQ ID NO: 2512249 - DNA, 25 bp, Homo sapien
aggctcaactgggcctgaggctgct

SEQ ID NO: 2512250 - DNA, 25 bp, Homo sapien
agccatgaggctcaactgggcctga

SEQ ID NO: 2512251 - DNA, 25 bp, Homo sapien
aggttgccaggtcgttaccctcagg

SEQ ID NO: 2512252 - DNA, 25 bp, Homo sapien
tgccaggtcgttaccctcagggccc

SEQ ID NO: 2512253 - DNA, 25 bp, Homo sapien
ccaggtcgttaccctcagggccctg

SEQ ID NO: 2512254 - DNA, 25 bp, Homo sapien
aaggttgccaggtcgttaccctcag

SEQ ID NO: 2512255 - DNA, 25 bp, Homo sapien
ttggccacagctttgctttgagctt

SEQ ID NO: 2512256 - DNA, 25 bp, Homo sapien
gcaactcttggcagcccatcttggc

SEQ ID NO: 2512257 - DNA, 25 bp, Homo sapien
cttggccacagctttgctttgagct

SEQ ID NO: 2512258 - DNA, 25 bp, Homo sapien
cccgcaactcttggcagcccatctt

SEQ ID NO: 2512259 - DNA, 25 bp, Homo sapien
ccagccgcacagcagatgaataaca

SEQ ID NO: 2512260 - DNA, 25 bp, Homo sapien
cacagaaagagttgtggcggccaca

SEQ ID NO: 2512261 - DNA, 25 bp, Homo sapien
taaatagggtagcaaggtcactgtg

SEQ ID NO: 2512262 - DNA, 25 bp, Homo sapien
tactcacaccgatattcagtgacag

SEQ ID NO: 2512263 - DNA, 25 bp, Homo sapien
tgctctattgctatcaactcaaggt

SEQ ID NO: 2512264 - DNA, 25 bp, Homo sapien
tgttatttgctctattgctatcaac

SEQ ID NO: 2512265 - DNA, 25 bp, Homo sapien
ttcccatgttatttgctctattgct

SEQ ID NO: 2512266 - DNA, 25 bp, Homo sapien
gctctattgctatcaactcaaggta

SEQ ID NO: 2512267 - DNA, 25 bp, Homo sapien
gtttgtgtctatatcctgtaacttc

SEQ ID NO: 2512268 - DNA, 25 bp, Homo sapien
tcttgttcattggagagtacaggtg

SEQ ID NO: 2512269 - DNA, 25 bp, Homo sapien
tgatcccctaaatctccccattttc

SEQ ID NO: 2512270 - DNA, 25 bp, Homo sapien
ttttgcattcagtcttgttcattgg

SEQ ID NO: 2512271 - DNA, 25 bp, Homo sapien
tacatgaggtgaaccaaggctgtcc

SEQ ID NO: 2512272 - DNA, 25 bp, Homo sapien
gacagggcacgatctaaagtgggaa

SEQ ID NO: 2512273 - DNA, 25 bp, Homo sapien
tgcacctgggtcacaaacatggagt

SEQ ID NO: 2512274 - DNA, 25 bp, Homo sapien
tacaggttgcagacaaagcaagagc

SEQ ID NO: 2512275 - DNA, 25 bp, Homo sapien
gagtcctgtagggtcagttccttca

SEQ ID NO: 2512276 - DNA, 25 bp, Homo sapien
aggttgggtcctagtcacgtcatgg

SEQ ID NO: 2512277 - DNA, 25 bp, Homo sapien
tgtccagagcttgttgccgtccgag

SEQ ID NO: 2512278 - DNA, 25 bp, Homo sapien
cgtccgaggacactgcattatccag

SEQ ID NO: 2512279 - DNA, 25 bp, Homo sapien
tataagtaggaatgcccaaggtggg

SEQ ID NO: 2512280 - DNA, 25 bp, Homo sapien
gcggcggtcatgttgcgcttgctca

SEQ ID NO: 2512281 - DNA, 25 bp, Homo sapien
tccagggctgtgttaccctttaaga

SEQ ID NO: 2512282 - DNA, 25 bp, Homo sapien
gaatagtgtaaaagcaacagtggcc

SEQ ID NO: 2512283 - DNA, 25 bp, Homo sapien
tggctccaggtctgcgagcttcctt

SEQ ID NO: 2512284 - DNA, 25 bp, Homo sapien
gctgagttcctggaagcacttgctg

SEQ ID NO: 2512285 - DNA, 25 bp, Homo sapien
gctgggcggaccttcgtgcacgcct

SEQ ID NO: 2512286 - DNA, 25 bp, Homo sapien
gcgagcttcctttgctgccaagtat

SEQ ID NO: 2512287 - DNA, 25 bp, Homo sapien
gtcaatcttgtattaccaggcaggc

SEQ ID NO: 2512288 - DNA, 25 bp, Homo sapien
ttaatgcctcttgcctaagaaaggg

SEQ ID NO: 2512289 - DNA, 25 bp, Homo sapien
tttggccacgcggtttcagcctcta

SEQ ID NO: 2512290 - DNA, 25 bp, Homo sapien
aaaccccagttgcacggcagatgaa

SEQ ID NO: 2512291 - DNA, 25 bp, Homo sapien
cgaccaccgagtagagagcaatcat

SEQ ID NO: 2512292 - DNA, 25 bp, Homo sapien
attaaatttgccgaccaccgagtag

SEQ ID NO: 2512293 - DNA, 25 bp, Homo sapien
gccctgacggcatttattcagcata

SEQ ID NO: 2512294 - DNA, 25 bp, Homo sapien
tagctggccctgacggcatttattc

SEQ ID NO: 2512295 - DNA, 25 bp, Homo sapien
gagccaaggccggaatctagtttga

SEQ ID NO: 2512296 - DNA, 25 bp, Homo sapien
ttaaactaggccacagactgatgga

SEQ ID NO: 2512297 - DNA, 25 bp, Homo sapien
tttgggaggctccatgactccagct

SEQ ID NO: 2512298 - DNA, 25 bp, Homo sapien
gaaaagtaggtgaccagtggagcca

SEQ ID NO: 2512299 - DNA, 25 bp, Homo sapien
tggtgatctccatgttctcattagt

SEQ ID NO: 2512300 - DNA, 25 bp, Homo sapien
acagagagaagcaattggcggccac

SEQ ID NO: 2512301 - DNA, 25 bp, Homo sapien
agaagcaattggcggccacccactg

SEQ ID NO: 2512302 - DNA, 25 bp, Homo sapien
agcaattggcggccacccactgcag

SEQ ID NO: 2512303 - DNA, 25 bp, Homo sapien
agagaagcaattggcggccacccac

SEQ ID NO: 2512304 - DNA, 25 bp, Homo sapien
ctggaagggtggaggcaggttagaa

SEQ ID NO: 2512305 - DNA, 25 bp, Homo sapien
tggaagggtggaggcaggttagaaa

SEQ ID NO: 2512306 - DNA, 25 bp, Homo sapien
tgatggtggtgcatttgttctgcat

SEQ ID NO: 2512307 - DNA, 25 bp, Homo sapien
gtgactctgcctgctcccgcaagag

SEQ ID NO: 2512308 - DNA, 25 bp, Homo sapien
caggatttgcctgcgtgactctgcc

SEQ ID NO: 2512309 - DNA, 25 bp, Homo sapien
aatccgttctgcagcggagacagct

SEQ ID NO: 2512310 - DNA, 25 bp, Homo sapien
ctggttcgggtgactgaagccctca

SEQ ID NO: 2512311 - DNA, 25 bp, Homo sapien
ggttcgggtgactgaagccctcagt

SEQ ID NO: 2512312 - DNA, 25 bp, Homo sapien
tggttcgggtgactgaagccctcag

SEQ ID NO: 2512313 - DNA, 25 bp, Homo sapien
ttcagccaagctcatctactgttct

SEQ ID NO: 2512314 - DNA, 25 bp, Homo sapien
catacgtatctctctccgtttgtag

SEQ ID NO: 2512315 - DNA, 25 bp, Homo sapien
tctccgtttgtagttatctaactga

SEQ ID NO: 2512316 - DNA, 25 bp, Homo sapien
cagattttcagcatacgtatctctc

SEQ ID NO: 2512317 - DNA, 25 bp, Homo sapien
gtatctctctccgtttgtagttatc

SEQ ID NO: 2512318 - DNA, 25 bp, Homo sapien
acatccctcccctgcaaagcttcac

SEQ ID NO: 2512319 - DNA, 25 bp, Homo sapien
ctgccctagatgtgctttcagctgt

SEQ ID NO: 2512320 - DNA, 25 bp, Homo sapien
gctgtttcgcatcaggggcttcaca

SEQ ID NO: 2512321 - DNA, 25 bp, Homo sapien
tgtttcgcatcaggggcttcacagt

SEQ ID NO: 2512322 - DNA, 25 bp, Homo sapien
tttcgcatcaggggcttcacagtgc

SEQ ID NO: 2512323 - DNA, 25 bp, Homo sapien
ctgctgtttcgcatcaggggcttca

SEQ ID NO: 2512324 - DNA, 25 bp, Homo sapien
tggggagcctgggccgttccacaca

SEQ ID NO: 2512325 - DNA, 25 bp, Homo sapien
gggagcctgggccgttccacacagt

SEQ ID NO: 2512326 - DNA, 25 bp, Homo sapien
ggagcctgggccgttccacacagtg

SEQ ID NO: 2512327 - DNA, 25 bp, Homo sapien
gagcctgggccgttccacacagtgc

SEQ ID NO: 2512328 - DNA, 25 bp, Homo sapien
tcttttgcggctcttctaaaataag

SEQ ID NO: 2512329 - DNA, 25 bp, Homo sapien
tttcttttgcggctcttctaaaata

SEQ ID NO: 2512330 - DNA, 25 bp, Homo sapien
ctcattgcttcggttatggccagaa

SEQ ID NO: 2512331 - DNA, 25 bp, Homo sapien
cattgcttcggttatggccagaagc

SEQ ID NO: 2512332 - DNA, 25 bp, Homo sapien
tcttgtataactccagcctgagggc

SEQ ID NO: 2512333 - DNA, 25 bp, Homo sapien
ctgttcttgtataactccagcctga

SEQ ID NO: 2512334 - DNA, 25 bp, Homo sapien
gggcgtctctctctttggttaactc

SEQ ID NO: 2512335 - DNA, 25 bp, Homo sapien
tgagggcgtctctctctttggttaa

SEQ ID NO: 2512336 - DNA, 25 bp, Homo sapien
gagcagttggccgaccggtaacaat

SEQ ID NO: 2512337 - DNA, 25 bp, Homo sapien
tgttgtacggcaaatacagaccaag

SEQ ID NO: 2512338 - DNA, 25 bp, Homo sapien
taagtcaggatatagcaggcagagg

SEQ ID NO: 2512339 - DNA, 25 bp, Homo sapien
ccaagcccatggtctcatttgtttt

SEQ ID NO: 2512340 - DNA, 25 bp, Homo sapien
aagtgcgggattccaagtatgagcc

SEQ ID NO: 2512341 - DNA, 25 bp, Homo sapien
ttgcctaagatcactcagacagagc

SEQ ID NO: 2512342 - DNA, 25 bp, Homo sapien
gatgatgcattcacatagtccaaag

SEQ ID NO: 2512343 - DNA, 25 bp, Homo sapien
gaaggtacagaagggaaatatcgcc

SEQ ID NO: 2512344 - DNA, 25 bp, Homo sapien
gcctggaatactaaaggcggctggc

SEQ ID NO: 2512345 - DNA, 25 bp, Homo sapien
ccacacactgcctggaatactaaag

SEQ ID NO: 2512346 - DNA, 25 bp, Homo sapien
tgcctggaatactaaaggcggctgg

SEQ ID NO: 2512347 - DNA, 25 bp, Homo sapien
gcatgctgagtgtaagccaggctgt

SEQ ID NO: 2512348 - DNA, 25 bp, Homo sapien
tctgatacaaggatttctacattct

SEQ ID NO: 2512349 - DNA, 25 bp, Homo sapien
tgatacaaggatttctacattctga

SEQ ID NO: 2512350 - DNA, 25 bp, Homo sapien
tgtaagccaggctgtaactcagctt

SEQ ID NO: 2512351 - DNA, 25 bp, Homo sapien
caggagggaacttcacactctctac

SEQ ID NO: 2512352 - DNA, 25 bp, Homo sapien
aggacaggagggaacttcacactct

SEQ ID NO: 2512353 - DNA, 25 bp, Homo sapien
gacaggagggaacttcacactctct

SEQ ID NO: 2512354 - DNA, 25 bp, Homo sapien
aggagggaacttcacactctctact

SEQ ID NO: 2512355 - DNA, 25 bp, Homo sapien
tgtaactgctcccttagggctccct

SEQ ID NO: 2512356 - DNA, 25 bp, Homo sapien
ctgtaactgctcccttagggctccc

SEQ ID NO: 2512357 - DNA, 25 bp, Homo sapien
agaacacttagtggactgggtccta

SEQ ID NO: 2512358 - DNA, 25 bp, Homo sapien
taaggcagcttgaaacctttcgttc

SEQ ID NO: 2512359 - DNA, 25 bp, Homo sapien
tttcgttcctagatcccatagtccc

SEQ ID NO: 2512360 - DNA, 25 bp, Homo sapien
ccagtctcgtggcagtaatgacagt

SEQ ID NO: 2512361 - DNA, 25 bp, Homo sapien
ggtcgcactagaatgcataataggg

SEQ ID NO: 2512362 - DNA, 25 bp, Homo sapien
tagtagcctaccacacagctgtgtg

SEQ ID NO: 2512363 - DNA, 25 bp, Homo sapien
ggaggtgtaaacaaggtcgcactag

SEQ ID NO: 2512364 - DNA, 25 bp, Homo sapien
tttcctccgatatcacagggcaggg

SEQ ID NO: 2512365 - DNA, 25 bp, Homo sapien
gtgttcctccggagctgtcttcatt

SEQ ID NO: 2512366 - DNA, 25 bp, Homo sapien
tctgtgccaggcctatgattttggc

SEQ ID NO: 2512367 - DNA, 25 bp, Homo sapien
tcttcattatccagcttctgtgcca

SEQ ID NO: 2512368 - DNA, 25 bp, Homo sapien
ccaatattccatcaattgaggtaca

SEQ ID NO: 2512369 - DNA, 25 bp, Homo sapien
ttgtagatgaagtttgaagcaactg

SEQ ID NO: 2512370 - DNA, 25 bp, Homo sapien
tttgtagatgaagtttgaagcaact

SEQ ID NO: 2512371 - DNA, 25 bp, Homo sapien
tgtagatgaagtttgaagcaactgt

SEQ ID NO: 2512372 - DNA, 25 bp, Homo sapien
ctgttgaaaaataaggaattataat

SEQ ID NO: 2512373 - DNA, 25 bp, Homo sapien
tgttgaaaaataaggaattataata

SEQ ID NO: 2512374 - DNA, 25 bp, Homo sapien
gaaatacctgctaataaagtgcctc

SEQ ID NO: 2512375 - DNA, 25 bp, Homo sapien
tacctgctaataaagtgcctcccac

SEQ ID NO: 2512376 - DNA, 25 bp, Homo sapien
ttaggccttatgcttctagaaatac

SEQ ID NO: 2512377 - DNA, 25 bp, Homo sapien
cataaaggaaacgcaagccccaatt

SEQ ID NO: 2512378 - DNA, 25 bp, Homo sapien
tatggactcctctaggtccttaggg

SEQ ID NO: 2512379 - DNA, 25 bp, Homo sapien
tcctgtactatggactcctctaggt

SEQ ID NO: 2512380 - DNA, 25 bp, Homo sapien
tgtactatggactcctctaggtcct

SEQ ID NO: 2512381 - DNA, 25 bp, Homo sapien
ttcttcctgtactatggactcctct

SEQ ID NO: 2512382 - DNA, 25 bp, Homo sapien
acgccgctggactcagtgtaccacg

SEQ ID NO: 2512383 - DNA, 25 bp, Homo sapien
gcctatggcaaggatctcacaacag

SEQ ID NO: 2512384 - DNA, 25 bp, Homo sapien
cacgacgtttcagtggccctgccta

SEQ ID NO: 2512385 - DNA, 25 bp, Homo sapien
cagccttctcttaggtggtatgtga

SEQ ID NO: 2512386 - DNA, 25 bp, Homo sapien
gggggtgcggtgccacttgccaagc

SEQ ID NO: 2512387 - DNA, 25 bp, Homo sapien
cagctttggcataagtgggcctcat

SEQ ID NO: 2512388 - DNA, 25 bp, Homo sapien
acagctttggcataagtgggcctca

SEQ ID NO: 2512389 - DNA, 25 bp, Homo sapien
caaaactcgtcttcagagcaaaacc

SEQ ID NO: 2512390 - DNA, 25 bp, Homo sapien
cctttaagtcaaaactcgtcttcag

SEQ ID NO: 2512391 - DNA, 25 bp, Homo sapien
tcagagcaaaaccatcactagcctc

SEQ ID NO: 2512392 - DNA, 25 bp, Homo sapien
cccacaccgcaaagaataagccatt

SEQ ID NO: 2512393 - DNA, 25 bp, Homo sapien
tcctggagcctctactttcagagag

SEQ ID NO: 2512394 - DNA, 25 bp, Homo sapien
cagcaaaattacataccctctccag

SEQ ID NO: 2512395 - DNA, 25 bp, Homo sapien
cagagagggtctgagtctagcttca

SEQ ID NO: 2512396 - DNA, 25 bp, Homo sapien
gtctgagtctagcttcatgacatca

SEQ ID NO: 2512397 - DNA, 25 bp, Homo sapien
gagctgatagcgcgccattgcgctc

SEQ ID NO: 2512398 - DNA, 25 bp, Homo sapien
gagcccgagagaacatgggaatcag

SEQ ID NO: 2512399 - DNA, 25 bp, Homo sapien
tgaattggcaaaagctgagtcgaca

SEQ ID NO: 2512400 - DNA, 25 bp, Homo sapien
gaatcagatcctgcttgaattggca

SEQ ID NO: 2512401 - DNA, 25 bp, Homo sapien
ggtctgaggaacagtcctgtgctca

SEQ ID NO: 2512402 - DNA, 25 bp, Homo sapien
gacccctcggaggtgacagagtcta

SEQ ID NO: 2512403 - DNA, 25 bp, Homo sapien
agtctagcccgctaaggactcccaa

SEQ ID NO: 2512404 - DNA, 25 bp, Homo sapien
gaggtgacagagtctagcccgctaa

SEQ ID NO: 2512405 - DNA, 25 bp, Homo sapien
gcaggtggacccctcggaggtgaca

SEQ ID NO: 2512406 - DNA, 25 bp, Homo sapien
ctcaagcaccgtggcggctcccgcg

SEQ ID NO: 2512407 - DNA, 25 bp, Homo sapien
ctgctatgtccaggtggccgagggg

SEQ ID NO: 2512408 - DNA, 25 bp, Homo sapien
tctgctatgtccaggtggccgaggg

SEQ ID NO: 2512409 - DNA, 25 bp, Homo sapien
ttctgctatgtccaggtggccgagg

SEQ ID NO: 2512410 - DNA, 25 bp, Homo sapien
cggtagccacgcagtcgcgctggtt

SEQ ID NO: 2512411 - DNA, 25 bp, Homo sapien
agcggcgcccgtccaacacgaaccg

SEQ ID NO: 2512412 - DNA, 25 bp, Homo sapien
cagtcgcgctggttcccgcgcggta

SEQ ID NO: 2512413 - DNA, 25 bp, Homo sapien
ccaacacgaaccgacggctgcggta

SEQ ID NO: 2512414 - DNA, 25 bp, Homo sapien
gcctccccatcgccgtcgctgccct

SEQ ID NO: 2512415 - DNA, 25 bp, Homo sapien
tgcagcctccccatcgccgtcgctg

SEQ ID NO: 2512416 - DNA, 25 bp, Homo sapien
cagcctccccatcgccgtcgctgcc

SEQ ID NO: 2512417 - DNA, 25 bp, Homo sapien
gcagcctccccatcgccgtcgctgc

SEQ ID NO: 2512418 - DNA, 25 bp, Homo sapien
taggacctttaccaaagcactggct

SEQ ID NO: 2512419 - DNA, 25 bp, Homo sapien
tcgcctctgcagtggcggaagcaat

SEQ ID NO: 2512420 - DNA, 25 bp, Homo sapien
cggaagcaatacttacctgtaagga

SEQ ID NO: 2512421 - DNA, 25 bp, Homo sapien
ccggcctaacttgtgaatctttaat

SEQ ID NO: 2512422 - DNA, 25 bp, Homo sapien
ggctttccatcgctatatgtttgtt

SEQ ID NO: 2512423 - DNA, 25 bp, Homo sapien
tgactgtgtcgctgacccctggcaa

SEQ ID NO: 2512424 - DNA, 25 bp, Homo sapien
gtatcataccatcaggatccctttg

SEQ ID NO: 2512425 - DNA, 25 bp, Homo sapien
tatgtgccctactcctttgtatttg

SEQ ID NO: 2512426 - DNA, 25 bp, Homo sapien
tacagtcagttaggattgcgtcact

SEQ ID NO: 2512427 - DNA, 25 bp, Homo sapien
tgaggttacagtcagttaggattgc

SEQ ID NO: 2512428 - DNA, 25 bp, Homo sapien
ggttacagtcagttaggattgcgtc

SEQ ID NO: 2512429 - DNA, 25 bp, Homo sapien
gtttgaggttacagtcagttaggat

SEQ ID NO: 2512430 - DNA, 25 bp, Homo sapien
cagacgcaacaacatggtaatatcc

SEQ ID NO: 2512431 - DNA, 25 bp, Homo sapien
tcatagtgatgactagcaaatccct

SEQ ID NO: 2512432 - DNA, 25 bp, Homo sapien
taattttctgaacagcagacgcaac

SEQ ID NO: 2512433 - DNA, 25 bp, Homo sapien
tgtcaaagtatccaccattcatagt

SEQ ID NO: 2512434 - DNA, 25 bp, Homo sapien
ggcttggtggcatgtttccaatatt

SEQ ID NO: 2512435 - DNA, 25 bp, Homo sapien
gacttctatcgaagagggcttggtg

SEQ ID NO: 2512436 - DNA, 25 bp, Homo sapien
tggaagtatactaacttcctcccca

SEQ ID NO: 2512437 - DNA, 25 bp, Homo sapien
aatattttcccggtatctcttcagg

SEQ ID NO: 2512438 - DNA, 25 bp, Homo sapien
aaaaaaaatatgcagattagggcag

SEQ ID NO: 2512439 - DNA, 25 bp, Homo sapien
aaaaaaaaatatgcagattagggca

SEQ ID NO: 2512440 - DNA, 25 bp, Homo sapien
gcgccacagccctcgtgaaaatttg

SEQ ID NO: 2512441 - DNA, 25 bp, Homo sapien
cacagccctcgtgaaaatttgctga

SEQ ID NO: 2512442 - DNA, 25 bp, Homo sapien
cagccctcgtgaaaatttgctgaca

SEQ ID NO: 2512443 - DNA, 25 bp, Homo sapien
gccacagccctcgtgaaaatttgct

SEQ ID NO: 2512444 - DNA, 25 bp, Homo sapien
agagcttgtgtatgaaaagctcctt

SEQ ID NO: 2512445 - DNA, 25 bp, Homo sapien
tcagagagcttgtgtatgaaaagct

SEQ ID NO: 2512446 - DNA, 25 bp, Homo sapien
gagagcttgtgtatgaaaagctcct

SEQ ID NO: 2512447 - DNA, 25 bp, Homo sapien
cagagagcttgtgtatgaaaagctc

SEQ ID NO: 2512448 - DNA, 25 bp, Homo sapien
tactattaatctcaagagccaactg

SEQ ID NO: 2512449 - DNA, 25 bp, Homo sapien
gatactgaattgtccttcccttctg

SEQ ID NO: 2512450 - DNA, 25 bp, Homo sapien
tatgtcaagggttggcaaaacgtaa

SEQ ID NO: 2512451 - DNA, 25 bp, Homo sapien
gagccaactggtgtagatactgaat

SEQ ID NO: 2512452 - DNA, 25 bp, Homo sapien
ttttctcattaaatctccagtatcc

SEQ ID NO: 2512453 - DNA, 25 bp, Homo sapien
aaatctccagtatcctaagctgtag

SEQ ID NO: 2512454 - DNA, 25 bp, Homo sapien
tccagtatcctaagctgtagatgtg

SEQ ID NO: 2512455 - DNA, 25 bp, Homo sapien
cctaagctgtagatgtgtagctgtt

SEQ ID NO: 2512456 - DNA, 25 bp, Homo sapien
tctacaagctttgattccctcagac

SEQ ID NO: 2512457 - DNA, 25 bp, Homo sapien
gattcattgatatggctgtctctca

SEQ ID NO: 2512458 - DNA, 25 bp, Homo sapien
cagactaggtggtcaggtaatcctc

SEQ ID NO: 2512459 - DNA, 25 bp, Homo sapien
cctctggcttgaacatatccctgtc

SEQ ID NO: 2512460 - DNA, 25 bp, Homo sapien
cttctccatgtagaagcttcttaag

SEQ ID NO: 2512461 - DNA, 25 bp, Homo sapien
ctaaccagatccaataaagtaactg

SEQ ID NO: 2512462 - DNA, 25 bp, Homo sapien
tcttaagtttcttactaaccagatc

SEQ ID NO: 2512463 - DNA, 25 bp, Homo sapien
ccagatccaataaagtaactggtgt

SEQ ID NO: 2512464 - DNA, 25 bp, Homo sapien
aaccagaccagttgttctgcccgca

SEQ ID NO: 2512465 - DNA, 25 bp, Homo sapien
tctgcccgcacttttaataatgatt

SEQ ID NO: 2512466 - DNA, 25 bp, Homo sapien
gagtggtactccagtggaaaccaga

SEQ ID NO: 2512467 - DNA, 25 bp, Homo sapien
ataatgatttggcttgcaaaactga

SEQ ID NO: 2512468 - DNA, 25 bp, Homo sapien
tcaggaccactgttttattatcata

SEQ ID NO: 2512469 - DNA, 25 bp, Homo sapien
aatggcaaaacttattgcaaaattt

SEQ ID NO: 2512470 - DNA, 25 bp, Homo sapien
gcaaaacttattgcaaaatttttca

SEQ ID NO: 2512471 - DNA, 25 bp, Homo sapien
tgtaaacagaaagattaacattagc

SEQ ID NO: 2512472 - DNA, 25 bp, Homo sapien
taacattagcataaatggtttttag

SEQ ID NO: 2512473 - DNA, 25 bp, Homo sapien
caacttgtaggcattgggctctgat

SEQ ID NO: 2512474 - DNA, 25 bp, Homo sapien
tgatgccattgccataaaagtaagt

SEQ ID NO: 2512475 - DNA, 25 bp, Homo sapien
tagccgtcgtaattcttctctaatg

SEQ ID NO: 2512476 - DNA, 25 bp, Homo sapien
tctctaatgttcagcaacagcaatc

SEQ ID NO: 2512477 - DNA, 25 bp, Homo sapien
tactcatcagttaataggcaatctc

SEQ ID NO: 2512478 - DNA, 25 bp, Homo sapien
tattaactggtcagggaaatactcc

SEQ ID NO: 2512479 - DNA, 25 bp, Homo sapien
aattgctgcattaagccagttatcg

SEQ ID NO: 2512480 - DNA, 25 bp, Homo sapien
gcattaactgctgactaactgtaac

SEQ ID NO: 2512481 - DNA, 25 bp, Homo sapien
agtataagcttataacatgaatatt

SEQ ID NO: 2512482 - DNA, 25 bp, Homo sapien
ttattagatcaaatgaggattcata

SEQ ID NO: 2512483 - DNA, 25 bp, Homo sapien
tcaaatgaggattcataatgataat

SEQ ID NO: 2512484 - DNA, 25 bp, Homo sapien
tagatcaaatgaggattcataatga

SEQ ID NO: 2512485 - DNA, 25 bp, Homo sapien
gcttggaataagttctctgtctagg

SEQ ID NO: 2512486 - DNA, 25 bp, Homo sapien
tgtctaggcaagtgttagtgataac

SEQ ID NO: 2512487 - DNA, 25 bp, Homo sapien
cctctttgtttagttgaagattttg

SEQ ID NO: 2512488 - DNA, 25 bp, Homo sapien
actggaggctccaaaatattgtcca

SEQ ID NO: 2512489 - DNA, 25 bp, Homo sapien
aatctgttaactggttgttatcaat

SEQ ID NO: 2512490 - DNA, 25 bp, Homo sapien
tgttaactggttgttatcaattagt

SEQ ID NO: 2512491 - DNA, 25 bp, Homo sapien
aaatctgttaactggttgttatcaa

SEQ ID NO: 2512492 - DNA, 25 bp, Homo sapien
tctgttaactggttgttatcaatta

SEQ ID NO: 2512493 - DNA, 25 bp, Homo sapien
tcttatctgatgtaattgctgtgta

SEQ ID NO: 2512494 - DNA, 25 bp, Homo sapien
cttatctgatgtaattgctgtgtag

SEQ ID NO: 2512495 - DNA, 25 bp, Homo sapien
tatctgatgtaattgctgtgtagaa

SEQ ID NO: 2512496 - DNA, 25 bp, Homo sapien
ctgtcttatctgatgtaattgctgt

SEQ ID NO: 2512497 - DNA, 25 bp, Homo sapien
ttgtatgaataagttcctcaattct

SEQ ID NO: 2512498 - DNA, 25 bp, Homo sapien
caatctcctgtgctagaggatttga

SEQ ID NO: 2512499 - DNA, 25 bp, Homo sapien
ggtttctgaactgtgatatttggac

SEQ ID NO: 2512500 - DNA, 25 bp, Homo sapien
tatttggacataaagctggattccc

SEQ ID NO: 2512501 - DNA, 25 bp, Homo sapien
tcgtaagatgatttattgcctagaa

SEQ ID NO: 2512502 - DNA, 25 bp, Homo sapien
tgtcttttgcaacaatcgtaagatg

SEQ ID NO: 2512503 - DNA, 25 bp, Homo sapien
ctagaaacctgtagagactaatgtt

SEQ ID NO: 2512504 - DNA, 25 bp, Homo sapien
cctgtagagactaatgttggaatct

SEQ ID NO: 2512505 - DNA, 25 bp, Homo sapien
tgattcattagaacttggcaaagat

SEQ ID NO: 2512506 - DNA, 25 bp, Homo sapien
gtgattcattagaacttggcaaaga

SEQ ID NO: 2512507 - DNA, 25 bp, Homo sapien
gattcattagaacttggcaaagatg

SEQ ID NO: 2512508 - DNA, 25 bp, Homo sapien
attcattagaacttggcaaagatga

SEQ ID NO: 2512509 - DNA, 25 bp, Homo sapien
gagatgtcattgctacttaggcacg

SEQ ID NO: 2512510 - DNA, 25 bp, Homo sapien
agacaagagatgtcattgctactta

SEQ ID NO: 2512511 - DNA, 25 bp, Homo sapien
tgtcattgctacttaggcacgtgtt

SEQ ID NO: 2512512 - DNA, 25 bp, Homo sapien
cattgctacttaggcacgtgttttg

SEQ ID NO: 2512513 - DNA, 25 bp, Homo sapien
gtctttgtatgtctgtaaatgatgc

SEQ ID NO: 2512514 - DNA, 25 bp, Homo sapien
tgggcctgaagagagtgaataatac

SEQ ID NO: 2512515 - DNA, 25 bp, Homo sapien
aaacagtctttgtatgtctgtaaat

SEQ ID NO: 2512516 - DNA, 25 bp, Homo sapien
ggcctgaagagagtgaataatacca

SEQ ID NO: 2512517 - DNA, 25 bp, Homo sapien
tgtcctccttttccggcagaagcca

SEQ ID NO: 2512518 - DNA, 25 bp, Homo sapien
gaagccatctctacggttcctggaa

SEQ ID NO: 2512519 - DNA, 25 bp, Homo sapien
cccggaagctcgttctgactgacaa

SEQ ID NO: 2512520 - DNA, 25 bp, Homo sapien
gactgacaagtctacggaacctcgg

SEQ ID NO: 2512521 - DNA, 25 bp, Homo sapien
gccgagtcctcgaaagaggccttga

SEQ ID NO: 2512522 - DNA, 25 bp, Homo sapien
cccgggatcgaagtcagctgccgga

SEQ ID NO: 2512523 - DNA, 25 bp, Homo sapien
catgccggctcgagagctcgggttt

SEQ ID NO: 2512524 - DNA, 25 bp, Homo sapien
cctttcggggacattggacactact

SEQ ID NO: 2512525 - DNA, 25 bp, Homo sapien
ggcttaactatgtctgataattaga

SEQ ID NO: 2512526 - DNA, 25 bp, Homo sapien
tcttaaaatttgtgaccagtgacag

SEQ ID NO: 2512527 - DNA, 25 bp, Homo sapien
tgtaatctgttctggcttaactatg

SEQ ID NO: 2512528 - DNA, 25 bp, Homo sapien
taacttggctgtacattgctaagtc

SEQ ID NO: 2512529 - DNA, 25 bp, Homo sapien
atctcttctctatcttccttgacca

SEQ ID NO: 2512530 - DNA, 25 bp, Homo sapien
catctcttctctatcttccttgacc

SEQ ID NO: 2512531 - DNA, 25 bp, Homo sapien
tctcttctctatcttccttgaccat

SEQ ID NO: 2512532 - DNA, 25 bp, Homo sapien
gaactgaggttgaaacgagcagttt

SEQ ID NO: 2512533 - DNA, 25 bp, Homo sapien
actgaggttgaaacgagcagtttga

SEQ ID NO: 2512534 - DNA, 25 bp, Homo sapien
aggttgaaacgagcagtttgatttc

SEQ ID NO: 2512535 - DNA, 25 bp, Homo sapien
gtgtgagtatatcttttcctggtca

SEQ ID NO: 2512536 - DNA, 25 bp, Homo sapien
tcactagtgctgtaatgggaaatcc

SEQ ID NO: 2512537 - DNA, 25 bp, Homo sapien
tgttggtcgacacattgccagtggt

SEQ ID NO: 2512538 - DNA, 25 bp, Homo sapien
taaacatgtcagttgagcaaacgag

SEQ ID NO: 2512539 - DNA, 25 bp, Homo sapien
caatattgcagccatggagtccatg

SEQ ID NO: 2512540 - DNA, 25 bp, Homo sapien
gcctgagatgtgtgtactttagcca

SEQ ID NO: 2512541 - DNA, 25 bp, Homo sapien
ctttagccagttagttctcaagcca

SEQ ID NO: 2512542 - DNA, 25 bp, Homo sapien
tatggcaccacattagttaacaaga

SEQ ID NO: 2512543 - DNA, 25 bp, Homo sapien
ggatcatctctcataaactgcctga

SEQ ID NO: 2512544 - DNA, 25 bp, Homo sapien
ttggagcagaccttctgactggcag

SEQ ID NO: 2512545 - DNA, 25 bp, Homo sapien
agccctcttattttatgctgtagga

SEQ ID NO: 2512546 - DNA, 25 bp, Homo sapien
gttcagcagcttaacaagaaacatt

SEQ ID NO: 2512547 - DNA, 25 bp, Homo sapien
cagtgagtccgaaaataaagaggac

SEQ ID NO: 2512548 - DNA, 25 bp, Homo sapien
gcatctgttactgtatgaattcttc

SEQ ID NO: 2512549 - DNA, 25 bp, Homo sapien
ctaccaccttgcatctgttactgta

SEQ ID NO: 2512550 - DNA, 25 bp, Homo sapien
tgttactgtatgaattcttctggaa

SEQ ID NO: 2512551 - DNA, 25 bp, Homo sapien
caccttgcatctgttactgtatgaa

SEQ ID NO: 2512552 - DNA, 25 bp, Homo sapien
atggtttcagttccaaacccatcct

SEQ ID NO: 2512553 - DNA, 25 bp, Homo sapien
tcaacttatggtttcagttccaaac

SEQ ID NO: 2512554 - DNA, 25 bp, Homo sapien
tatggtttcagttccaaacccatcc

SEQ ID NO: 2512555 - DNA, 25 bp, Homo sapien
cttatggtttcagttccaaacccat

SEQ ID NO: 2512556 - DNA, 25 bp, Homo sapien
tccctcggacaagtttcttcaccat

SEQ ID NO: 2512557 - DNA, 25 bp, Homo sapien
gctctgccactccatcaagcaactg

SEQ ID NO: 2512558 - DNA, 25 bp, Homo sapien
tggcccattccctcggacaagtttc

SEQ ID NO: 2512559 - DNA, 25 bp, Homo sapien
tccatcaagcaactgtcttccattc

SEQ ID NO: 2512560 - DNA, 25 bp, Homo sapien
tggtccggagctcatgttagcgtcc

SEQ ID NO: 2512561 - DNA, 25 bp, Homo sapien
cctggtggtccggagctcatgttag

SEQ ID NO: 2512562 - DNA, 25 bp, Homo sapien
ggtggtccggagctcatgttagcgt

SEQ ID NO: 2512563 - DNA, 25 bp, Homo sapien
ggtccggagctcatgttagcgtccc

SEQ ID NO: 2512564 - DNA, 25 bp, Homo sapien
gcgtgcagcttttgcaagggactga

SEQ ID NO: 2512565 - DNA, 25 bp, Homo sapien
agaggctgcgctcagtctgagagtg

SEQ ID NO: 2512566 - DNA, 25 bp, Homo sapien
gctcagtctgagagtggctgcctga

SEQ ID NO: 2512567 - DNA, 25 bp, Homo sapien
gagcgtgcagcttttgcaagggact

SEQ ID NO: 2512568 - DNA, 25 bp, Homo sapien
aggagggagttgtcttatcttggaa

SEQ ID NO: 2512569 - DNA, 25 bp, Homo sapien
gacttccaggtgttcaccaagggaa

SEQ ID NO: 2512570 - DNA, 25 bp, Homo sapien
gattttgagtagttccctccacgag

SEQ ID NO: 2512571 - DNA, 25 bp, Homo sapien
aagatccgagctgggtttcatctcc

SEQ ID NO: 2512572 - DNA, 25 bp, Homo sapien
tgatggttaagtgctcccaatcatc

SEQ ID NO: 2512573 - DNA, 25 bp, Homo sapien
taagtgctcccaatcatcccaattg

SEQ ID NO: 2512574 - DNA, 25 bp, Homo sapien
atcatcccaattgccactggttctg

SEQ ID NO: 2512575 - DNA, 25 bp, Homo sapien
ccaatcatcccaattgccactggtt

SEQ ID NO: 2512576 - DNA, 25 bp, Homo sapien
ccagctgggcaaggttttaaatatt

SEQ ID NO: 2512577 - DNA, 25 bp, Homo sapien
gctgcagctggatgatccttgggca

SEQ ID NO: 2512578 - DNA, 25 bp, Homo sapien
tcagttgtgttctcccttcaccagc

SEQ ID NO: 2512579 - DNA, 25 bp, Homo sapien
cactggtagcaataggctggatagc

SEQ ID NO: 2512580 - DNA, 25 bp, Homo sapien
ttcagggctttccctttgatcgtta

SEQ ID NO: 2512581 - DNA, 25 bp, Homo sapien
cctgagcccatgatcccttgaagtg

SEQ ID NO: 2512582 - DNA, 25 bp, Homo sapien
cacagctcctgatatcccatctcca

SEQ ID NO: 2512583 - DNA, 25 bp, Homo sapien
aagtgagatcctgtgctcagacccc

SEQ ID NO: 2512584 - DNA, 25 bp, Homo sapien
aagcagataccaagacaggactcgg

SEQ ID NO: 2512585 - DNA, 25 bp, Homo sapien
aagtctcgggatgtctaagatgaca

SEQ ID NO: 2512586 - DNA, 25 bp, Homo sapien
agaaagcagataccaagacaggact

SEQ ID NO: 2512587 - DNA, 25 bp, Homo sapien
ggaaagtctcgggatgtctaagatg

SEQ ID NO: 2512588 - DNA, 25 bp, Homo sapien
gggacagctacccatgaagcaacta

SEQ ID NO: 2512589 - DNA, 25 bp, Homo sapien
gaagcaactaataattaacatccct

SEQ ID NO: 2512590 - DNA, 25 bp, Homo sapien
gatatttgctacagttttctggttg

SEQ ID NO: 2512591 - DNA, 25 bp, Homo sapien
tcattaccacagttatatagtagag

SEQ ID NO: 2512592 - DNA, 25 bp, Homo sapien
aagctatggtaaagatgttggctct

SEQ ID NO: 2512593 - DNA, 25 bp, Homo sapien
agccagattgtgtggggccttgtaa

SEQ ID NO: 2512594 - DNA, 25 bp, Homo sapien
ggtaaagatgttggctcttaattct

SEQ ID NO: 2512595 - DNA, 25 bp, Homo sapien
ctatggtaaagatgttggctcttaa

SEQ ID NO: 2512596 - DNA, 25 bp, Homo sapien
tcctcgtcccggaggaggctatgaa

SEQ ID NO: 2512597 - DNA, 25 bp, Homo sapien
cccggaggaggctatgaaaattgga

SEQ ID NO: 2512598 - DNA, 25 bp, Homo sapien
aattggagacattaggatatgaggc

SEQ ID NO: 2512599 - DNA, 25 bp, Homo sapien
gatatgaggcgatggtggcagcagc

SEQ ID NO: 2512600 - DNA, 25 bp, Homo sapien
ctgggaagaaaggcaagtgtcaaag

SEQ ID NO: 2512601 - DNA, 25 bp, Homo sapien
tgggaagaaaggcaagtgtcaaagg

SEQ ID NO: 2512602 - DNA, 25 bp, Homo sapien
ctgttgagggagtgaggatgagcag

SEQ ID NO: 2512603 - DNA, 25 bp, Homo sapien
gttgagggagtgaggatgagcagac

SEQ ID NO: 2512604 - DNA, 25 bp, Homo sapien
tgttgagggagtgaggatgagcaga

SEQ ID NO: 2512605 - DNA, 25 bp, Homo sapien
ggttgctatagacacatttgctcat

SEQ ID NO: 2512606 - DNA, 25 bp, Homo sapien
tgtgttgtatgaccagcggctggcc

SEQ ID NO: 2512607 - DNA, 25 bp, Homo sapien
ttacgctatgcatgaaggtttctgg

SEQ ID NO: 2512608 - DNA, 25 bp, Homo sapien
gctggcctagcaacatgactcaata

SEQ ID NO: 2512609 - DNA, 25 bp, Homo sapien
tactcaaggggtagagtctgattgg

SEQ ID NO: 2512610 - DNA, 25 bp, Homo sapien
ctcaaggggtagagtctgattggct

SEQ ID NO: 2512611 - DNA, 25 bp, Homo sapien
ctgggagcatatactcaaggggtag

SEQ ID NO: 2512612 - DNA, 25 bp, Homo sapien
tcaaggggtagagtctgattggctg

SEQ ID NO: 2512613 - DNA, 25 bp, Homo sapien
cacccttggctagctacatgccttt

SEQ ID NO: 2512614 - DNA, 25 bp, Homo sapien
gtcccctagaggcacgtgactagtg

SEQ ID NO: 2512615 - DNA, 25 bp, Homo sapien
ccttttctatttccctctaagctct

SEQ ID NO: 2512616 - DNA, 25 bp, Homo sapien
cattccaggcatatcccacttatct

SEQ ID NO: 2512617 - DNA, 25 bp, Homo sapien
accatgtctgattagggaattctgc

SEQ ID NO: 2512618 - DNA, 25 bp, Homo sapien
gaattctgcaaagggtgttcaaagc

SEQ ID NO: 2512619 - DNA, 25 bp, Homo sapien
gaagatgcttgataaacccttgttc

SEQ ID NO: 2512620 - DNA, 25 bp, Homo sapien
tctgtgtgtaaagactgattggctc

SEQ ID NO: 2512621 - DNA, 25 bp, Homo sapien
catctgtccgtagaagagtttctcc

SEQ ID NO: 2512622 - DNA, 25 bp, Homo sapien
catttttcatctgtccgtagaagag

SEQ ID NO: 2512623 - DNA, 25 bp, Homo sapien
tttctccacgacatggacccaggga

SEQ ID NO: 2512624 - DNA, 25 bp, Homo sapien
taaagggttctaatcattagcactg

SEQ ID NO: 2512625 - DNA, 25 bp, Homo sapien
gctttgagctataaagaaatctgat

SEQ ID NO: 2512626 - DNA, 25 bp, Homo sapien
ctctaagaaactcacacctgagctt

SEQ ID NO: 2512627 - DNA, 25 bp, Homo sapien
tcctctaagaaactcacacctgagc

SEQ ID NO: 2512628 - DNA, 25 bp, Homo sapien
cctgagctttgagctataaagaaat

SEQ ID NO: 2512629 - DNA, 25 bp, Homo sapien
ccattggttgtgaggcctttgtact

SEQ ID NO: 2512630 - DNA, 25 bp, Homo sapien
tggagagggaaagtcatggaatcct

SEQ ID NO: 2512631 - DNA, 25 bp, Homo sapien
agtcatggaatccttgtccttcctc

SEQ ID NO: 2512632 - DNA, 25 bp, Homo sapien
ccaattgcaatggaatatccattgg

SEQ ID NO: 2512633 - DNA, 25 bp, Homo sapien
aatatacctgcttatagcatctgat

SEQ ID NO: 2512634 - DNA, 25 bp, Homo sapien
cctaggagactgacatatcttaatg

SEQ ID NO: 2512635 - DNA, 25 bp, Homo sapien
ggacaggaaatgataccctaggaga

SEQ ID NO: 2512636 - DNA, 25 bp, Homo sapien
tatgtctttcctagagagaggttta

SEQ ID NO: 2512637 - DNA, 25 bp, Homo sapien
ctgaatatggggctcattactttca

SEQ ID NO: 2512638 - DNA, 25 bp, Homo sapien
acattctgcagctctattctgaata

SEQ ID NO: 2512639 - DNA, 25 bp, Homo sapien
cattctgcagctctattctgaatat

SEQ ID NO: 2512640 - DNA, 25 bp, Homo sapien
aatatggggctcattactttcattc

SEQ ID NO: 2512641 - DNA, 25 bp, Homo sapien
tggcctttagctgcatttctaagga

SEQ ID NO: 2512642 - DNA, 25 bp, Homo sapien
ctatgtctggcctttagctgcattt

SEQ ID NO: 2512643 - DNA, 25 bp, Homo sapien
tgttgaccatggctatcacctgaca

SEQ ID NO: 2512644 - DNA, 25 bp, Homo sapien
catggctatcacctgacaatgttgt

SEQ ID NO: 2512645 - DNA, 25 bp, Homo sapien
aatgcagattgctctagtatcgccc

SEQ ID NO: 2512646 - DNA, 25 bp, Homo sapien
gaaactcacttctgtttgagctagg

SEQ ID NO: 2512647 - DNA, 25 bp, Homo sapien
tttctggtggacgactttcccagca

SEQ ID NO: 2512648 - DNA, 25 bp, Homo sapien
tatgtgctcactgaatatttgttgc

SEQ ID NO: 2512649 - DNA, 25 bp, Homo sapien
gcatgcagttcttgtacagtctctg

SEQ ID NO: 2512650 - DNA, 25 bp, Homo sapien
gagttctcttggtcccactgtggct

SEQ ID NO: 2512651 - DNA, 25 bp, Homo sapien
ctctcccggctgatgtgaaattcat

SEQ ID NO: 2512652 - DNA, 25 bp, Homo sapien
gcatggacatcttaccccagggttt

SEQ ID NO: 2512653 - DNA, 25 bp, Homo sapien
gaattggtcccttcaaagtgaacaa

SEQ ID NO: 2512654 - DNA, 25 bp, Homo sapien
tcgtgcgcaaacctcaggatcatgt

SEQ ID NO: 2512655 - DNA, 25 bp, Homo sapien
aaaggctagcgttagttctgtgcca

SEQ ID NO: 2512656 - DNA, 25 bp, Homo sapien
caattttcacagtcccctagagcag

SEQ ID NO: 2512657 - DNA, 25 bp, Homo sapien
gatcagaccgtgaatgaagacagtg

SEQ ID NO: 2512658 - DNA, 25 bp, Homo sapien
tgtgaagcagcatgcagatcagacc

SEQ ID NO: 2512659 - DNA, 25 bp, Homo sapien
ttcgagaccggcctagaatacatag

SEQ ID NO: 2512660 - DNA, 25 bp, Homo sapien
cctattatgtcttcagaaggatgct

SEQ ID NO: 2512661 - DNA, 25 bp, Homo sapien
gaactacgaaaacatactactgcct

SEQ ID NO: 2512662 - DNA, 25 bp, Homo sapien
gaaggatgctagttattagagatgc

SEQ ID NO: 2512663 - DNA, 25 bp, Homo sapien
ggttacccatgattacagctgcctg

SEQ ID NO: 2512664 - DNA, 25 bp, Homo sapien
gaagaaatcctagcatacttcggga

SEQ ID NO: 2512665 - DNA, 25 bp, Homo sapien
gagctgtgtccatgcatgttagaag

SEQ ID NO: 2512666 - DNA, 25 bp, Homo sapien
gcctgagaggcctgtctcgtggcat

SEQ ID NO: 2512667 - DNA, 25 bp, Homo sapien
actttcctgcactggattgtcagtg

SEQ ID NO: 2512668 - DNA, 25 bp, Homo sapien
ggattgtcagtgtgacccagattaa

SEQ ID NO: 2512669 - DNA, 25 bp, Homo sapien
tctgtgttacacacctttatattcc

SEQ ID NO: 2512670 - DNA, 25 bp, Homo sapien
ctctattttataggggacaaaactg

SEQ ID NO: 2512671 - DNA, 25 bp, Homo sapien
ggaagtctaactattactgattgct

SEQ ID NO: 2512672 - DNA, 25 bp, Homo sapien
tactgattgctgacgatatgattgt

SEQ ID NO: 2512673 - DNA, 25 bp, Homo sapien
aaagggcagggagtgtaagaacaag

SEQ ID NO: 2512674 - DNA, 25 bp, Homo sapien
agagttttacagttgggctgccagg

SEQ ID NO: 2512675 - DNA, 25 bp, Homo sapien
ggttagtgctgatttgtactgctca

SEQ ID NO: 2512676 - DNA, 25 bp, Homo sapien
cctcaaatagggcaacggtttggca

SEQ ID NO: 2512677 - DNA, 25 bp, Homo sapien
tcaatataagtgagattcgggtatc

SEQ ID NO: 2512678 - DNA, 25 bp, Homo sapien
tctgattcacgatttagggtcctgt

SEQ ID NO: 2512679 - DNA, 25 bp, Homo sapien
tgtaggcacagtctctcaagcatat

SEQ ID NO: 2512680 - DNA, 25 bp, Homo sapien
gttttccaatggcaagtagacagga

SEQ ID NO: 2512681 - DNA, 25 bp, Homo sapien
gcataaactccatcaacctaaggtg

SEQ ID NO: 2512682 - DNA, 25 bp, Homo sapien
gaataagcattttaagctggcgact

SEQ ID NO: 2512683 - DNA, 25 bp, Homo sapien
taaacttcggagcacaatgaaatgc

SEQ ID NO: 2512684 - DNA, 25 bp, Homo sapien
taaattactgaagtacctgggagaa

SEQ ID NO: 2512685 - DNA, 25 bp, Homo sapien
aaatgccttggtaaattggatgacc

SEQ ID NO: 2512686 - DNA, 25 bp, Homo sapien
ggatgacctctaactttactgtcca

SEQ ID NO: 2512687 - DNA, 25 bp, Homo sapien
ggcatatacaagaactagtgaacta

SEQ ID NO: 2512688 - DNA, 25 bp, Homo sapien
actcctgttgctcagattatatcaa

SEQ ID NO: 2512689 - DNA, 25 bp, Homo sapien
ccaggggaccgtaagggccatgata

SEQ ID NO: 2512690 - DNA, 25 bp, Homo sapien
gccatgataactcctgttcccggta

SEQ ID NO: 2512691 - DNA, 25 bp, Homo sapien
ttcttgatttccaatgccactggta

SEQ ID NO: 2512692 - DNA, 25 bp, Homo sapien
cttttcttgatttccaatgccactg

SEQ ID NO: 2512693 - DNA, 25 bp, Homo sapien
atgcccagccttgaatgtcttttct

SEQ ID NO: 2512694 - DNA, 25 bp, Homo sapien
cccagccttgaatgtcttttcttga

SEQ ID NO: 2512695 - DNA, 25 bp, Homo sapien
ggtgagtctcattccagggacagag

SEQ ID NO: 2512696 - DNA, 25 bp, Homo sapien
tccagggacagagataatctgattg

SEQ ID NO: 2512697 - DNA, 25 bp, Homo sapien
tcagcttcgatccttctccatcctg

SEQ ID NO: 2512698 - DNA, 25 bp, Homo sapien
tccatcctggtgagtctcattccag

SEQ ID NO: 2512699 - DNA, 25 bp, Homo sapien
gagtcatatgacacaaggttcataa

SEQ ID NO: 2512700 - DNA, 25 bp, Homo sapien
gcatacttcagatccaaatttggct

SEQ ID NO: 2512701 - DNA, 25 bp, Homo sapien
ccaaggagacaatccaataactcca

SEQ ID NO: 2512702 - DNA, 25 bp, Homo sapien
cacactcagagtccacgatgaagca

SEQ ID NO: 2512703 - DNA, 25 bp, Homo sapien
cgcatacggtaactggggccgtcgc

SEQ ID NO: 2512704 - DNA, 25 bp, Homo sapien
gtgcgcgccgctcctgaggggccga

SEQ ID NO: 2512705 - DNA, 25 bp, Homo sapien
ctgaggggccgatgttccgcggggt

SEQ ID NO: 2512706 - DNA, 25 bp, Homo sapien
aacttcggggttcgcctctgcggag

SEQ ID NO: 2512707 - DNA, 25 bp, Homo sapien
tgcacgcacatttaacactcaacat

SEQ ID NO: 2512708 - DNA, 25 bp, Homo sapien
ctgcacgcacatttaacactcaaca

SEQ ID NO: 2512709 - DNA, 25 bp, Homo sapien
ttaaacatccaagtagatgaaaaga

SEQ ID NO: 2512710 - DNA, 25 bp, Homo sapien
taaacatccaagtagatgaaaagac

SEQ ID NO: 2512711 - DNA, 25 bp, Homo sapien
ggagaccatagacccaaactgagac

SEQ ID NO: 2512712 - DNA, 25 bp, Homo sapien
agagtttgatatcagaaggagacca

SEQ ID NO: 2512713 - DNA, 25 bp, Homo sapien
aaactgagaccctctcgtctaagag

SEQ ID NO: 2512714 - DNA, 25 bp, Homo sapien
ccctctcgtctaagagaaaaccaat

SEQ ID NO: 2512715 - DNA, 25 bp, Homo sapien
ggagtgtagttctttaggcgctgat

SEQ ID NO: 2512716 - DNA, 25 bp, Homo sapien
ttattgcagttatgagcagaggcat

SEQ ID NO: 2512717 - DNA, 25 bp, Homo sapien
ctttggatgcactatagctaacttc

SEQ ID NO: 2512718 - DNA, 25 bp, Homo sapien
tctttaggcgctgatggttattgca

SEQ ID NO: 2512719 - DNA, 25 bp, Homo sapien
tgcaaatggtattccaacttctagg

SEQ ID NO: 2512720 - DNA, 25 bp, Homo sapien
gctgtggtattcaggctccccaaag

SEQ ID NO: 2512721 - DNA, 25 bp, Homo sapien
aagtcagcttgcctacgggtagaga

SEQ ID NO: 2512722 - DNA, 25 bp, Homo sapien
tccaacttctaggtaaaaacagaca

SEQ ID NO: 2512723 - DNA, 25 bp, Homo sapien
ctgggctgattggtcgctggcaata

SEQ ID NO: 2512724 - DNA, 25 bp, Homo sapien
tcgctggcaataactgatatggaat

SEQ ID NO: 2512725 - DNA, 25 bp, Homo sapien
tccttccactctaaagagactcctt

SEQ ID NO: 2512726 - DNA, 25 bp, Homo sapien
gaatactgatgttctctccggcagt

SEQ ID NO: 2512727 - DNA, 25 bp, Homo sapien
tctgctgtgatacgaatataagtgc

SEQ ID NO: 2512728 - DNA, 25 bp, Homo sapien
gatggtaaactgcagcagcgtgcag

SEQ ID NO: 2512729 - DNA, 25 bp, Homo sapien
tttccataaacgtgagctcttctgc

SEQ ID NO: 2512730 - DNA, 25 bp, Homo sapien
cgaatataagtgctctgtctttgtc

SEQ ID NO: 2512731 - DNA, 25 bp, Homo sapien
ccaaagaatagcttcgcagttgtaa

SEQ ID NO: 2512732 - DNA, 25 bp, Homo sapien
tggtccatttcactctagagagggt

SEQ ID NO: 2512733 - DNA, 25 bp, Homo sapien
ggtgatgacatcagacatatgcctt

SEQ ID NO: 2512734 - DNA, 25 bp, Homo sapien
caggtgtgtcgaactattttggtca

SEQ ID NO: 2512735 - DNA, 25 bp, Homo sapien
gcatttgtaaaagcatacgtttaaa

SEQ ID NO: 2512736 - DNA, 25 bp, Homo sapien
tccaaagtagatgcgtttgttgttg

SEQ ID NO: 2512737 - DNA, 25 bp, Homo sapien
ttatttcagtgaagggttccttgca

SEQ ID NO: 2512738 - DNA, 25 bp, Homo sapien
ctgggtccaaagtagatgcgtttgt

SEQ ID NO: 2512739 - DNA, 25 bp, Homo sapien
cccacaggggacctcctctgagtgt

SEQ ID NO: 2512740 - DNA, 25 bp, Homo sapien
atctttcctgttggtcccccacagg

SEQ ID NO: 2512741 - DNA, 25 bp, Homo sapien
tgagtgtcagagagggagtgagtgt

SEQ ID NO: 2512742 - DNA, 25 bp, Homo sapien
tcctctgagtgtcagagagggagtg

SEQ ID NO: 2512743 - DNA, 25 bp, Homo sapien
ccttgagggtacactttgccattca

SEQ ID NO: 2512744 - DNA, 25 bp, Homo sapien
gagggtacactttgccattcaaagt

SEQ ID NO: 2512745 - DNA, 25 bp, Homo sapien
ttgcccttgagggtacactttgcca

SEQ ID NO: 2512746 - DNA, 25 bp, Homo sapien
cttttgcccttgagggtacactttg

SEQ ID NO: 2512747 - DNA, 25 bp, Homo sapien
ctttaagcaatttcggagcctgaga

SEQ ID NO: 2512748 - DNA, 25 bp, Homo sapien
tcaggaaatagtaatcaaagccctg

SEQ ID NO: 2512749 - DNA, 25 bp, Homo sapien
gaggaataatttgggcggtcacaga

SEQ ID NO: 2512750 - DNA, 25 bp, Homo sapien
ctttttggactgacatgggagagga

SEQ ID NO: 2512751 - DNA, 25 bp, Homo sapien
gactcccctaaaccatggtagtcga

SEQ ID NO: 2512752 - DNA, 25 bp, Homo sapien
gttattattgtagccagagtgatgg

SEQ ID NO: 2512753 - DNA, 25 bp, Homo sapien
tgctgttgtcgtcatgagtcacaaa

SEQ ID NO: 2512754 - DNA, 25 bp, Homo sapien
gagtgatggataagatagactcccc

SEQ ID NO: 2512755 - DNA, 25 bp, Homo sapien
ttaaggggcccgagatgctgtagga

SEQ ID NO: 2512756 - DNA, 25 bp, Homo sapien
ttcttttctaaatggcagcagtaag

SEQ ID NO: 2512757 - DNA, 25 bp, Homo sapien
ggcccgagatgctgtaggaaagcca

SEQ ID NO: 2512758 - DNA, 25 bp, Homo sapien
tttctaaatggcagcagtaagaggt

SEQ ID NO: 2512759 - DNA, 25 bp, Homo sapien
tgggtaataatggacatcacatggg

SEQ ID NO: 2512760 - DNA, 25 bp, Homo sapien
ggactgcttcttgggtaataatgga

SEQ ID NO: 2512761 - DNA, 25 bp, Homo sapien
ggttctgtcatcacagaccatcagc

SEQ ID NO: 2512762 - DNA, 25 bp, Homo sapien
tgttcttacagcagatgaactgccc

SEQ ID NO: 2512763 - DNA, 25 bp, Homo sapien
tctactgtcctaaacatgtatgtgg

SEQ ID NO: 2512764 - DNA, 25 bp, Homo sapien
gacaattcaggactagttcagcagc

SEQ ID NO: 2512765 - DNA, 25 bp, Homo sapien
gaaacctggaggaagacaattcagg

SEQ ID NO: 2512766 - DNA, 25 bp, Homo sapien
tcctcatgttgacaagattgatgct

SEQ ID NO: 2512767 - DNA, 25 bp, Homo sapien
tgcactccactgaactcggatatgg

SEQ ID NO: 2512768 - DNA, 25 bp, Homo sapien
gctgttcacaagtatatggctccct

SEQ ID NO: 2512769 - DNA, 25 bp, Homo sapien
tgctagtatagttcggtccaggctc

SEQ ID NO: 2512770 - DNA, 25 bp, Homo sapien
tagtacagtatcgttccgtgctagt

SEQ ID NO: 2512771 - DNA, 25 bp, Homo sapien
tcatatttgtccgtgtctgcccaaa

SEQ ID NO: 2512772 - DNA, 25 bp, Homo sapien
attcccttgatatgagacccctcgt

SEQ ID NO: 2512773 - DNA, 25 bp, Homo sapien
tctgcccaaatgatcgcaatccagt

SEQ ID NO: 2512774 - DNA, 25 bp, Homo sapien
tctgcaacttttgttaggctctgag

SEQ ID NO: 2512775 - DNA, 25 bp, Homo sapien
ccttcaccatggggggcgtgctctt

SEQ ID NO: 2512776 - DNA, 25 bp, Homo sapien
ctcttgaacgtttgagaaatggacc

SEQ ID NO: 2512777 - DNA, 25 bp, Homo sapien
ggaatccgaaaactgcacaatatga

SEQ ID NO: 2512778 - DNA, 25 bp, Homo sapien
gatgtctgcaccatgtagcgtgcca

SEQ ID NO: 2512779 - DNA, 25 bp, Homo sapien
tagcgtgccaagtgcagaaggaaaa

SEQ ID NO: 2512780 - DNA, 25 bp, Homo sapien
cgtggaaacagggaacatgcaccag

SEQ ID NO: 2512781 - DNA, 25 bp, Homo sapien
ctccgtggaaacagggaacatgcac

SEQ ID NO: 2512782 - DNA, 25 bp, Homo sapien
gtggaaacagggaacatgcaccagt

SEQ ID NO: 2512783 - DNA, 25 bp, Homo sapien
tccgtggaaacagggaacatgcacc

SEQ ID NO: 2512784 - DNA, 25 bp, Homo sapien
tgtccttttgtccagaggcatagac

SEQ ID NO: 2512785 - DNA, 25 bp, Homo sapien
aatctcctaattggtttttcatgtc

SEQ ID NO: 2512786 - DNA, 25 bp, Homo sapien
ctatgttctgggttgataaaaagcc

SEQ ID NO: 2512787 - DNA, 25 bp, Homo sapien
ctgatccctccttgtggaaagtgac

SEQ ID NO: 2512788 - DNA, 25 bp, Homo sapien
agcacctgtttcattattattccat

SEQ ID NO: 2512789 - DNA, 25 bp, Homo sapien
acagttcgggatatacataaaaagc

SEQ ID NO: 2512790 - DNA, 25 bp, Homo sapien
cagaagtcagagagttcagtaacag

SEQ ID NO: 2512791 - DNA, 25 bp, Homo sapien
tattccattcagtttcggttgaagc

SEQ ID NO: 2512792 - DNA, 25 bp, Homo sapien
ggcttctatcttcaatctcctttcc

SEQ ID NO: 2512793 - DNA, 25 bp, Homo sapien
aactgacgatgggttttcttctcga

SEQ ID NO: 2512794 - DNA, 25 bp, Homo sapien
ttgctagttcaaactgtaactgacg

SEQ ID NO: 2512795 - DNA, 25 bp, Homo sapien
gggttttcttctcgactggcttcat

SEQ ID NO: 2512796 - DNA, 25 bp, Homo sapien
tgtatcctccgaaagcttgtttttc

SEQ ID NO: 2512797 - DNA, 25 bp, Homo sapien
tctgatattctaaattgaaggccac

SEQ ID NO: 2512798 - DNA, 25 bp, Homo sapien
tccacgttgtcagaaaatgttgcat

SEQ ID NO: 2512799 - DNA, 25 bp, Homo sapien
taaagcatactcatgtagttcagac

SEQ ID NO: 2512800 - DNA, 25 bp, Homo sapien
tctgaagcccagtgtatggtgtaca

SEQ ID NO: 2512801 - DNA, 25 bp, Homo sapien
cagccgtgtgtaatggaacctggac

SEQ ID NO: 2512802 - DNA, 25 bp, Homo sapien
gaagtgcacacagcatgcacagccg

SEQ ID NO: 2512803 - DNA, 25 bp, Homo sapien
catgtttgagtgtttggtttagtcg

SEQ ID NO: 2512804 - DNA, 25 bp, Homo sapien
tgcacagccgtgtgtaatggaacct

SEQ ID NO: 2512805 - DNA, 25 bp, Homo sapien
caggttgtttgtattgatccttaga

SEQ ID NO: 2512806 - DNA, 25 bp, Homo sapien
catatctatgttctggaaagtctta

SEQ ID NO: 2512807 - DNA, 25 bp, Homo sapien
tgaaaaaagccacgcatcttgagat

SEQ ID NO: 2512808 - DNA, 25 bp, Homo sapien
tattcggcattaggatcctcaatat

SEQ ID NO: 2512809 - DNA, 25 bp, Homo sapien
tgacgctcccatcttcctcgctgcc

SEQ ID NO: 2512810 - DNA, 25 bp, Homo sapien
gacgctcccatcttcctcgctgccc

SEQ ID NO: 2512811 - DNA, 25 bp, Homo sapien
cttgacgctcccatcttcctcgctg

SEQ ID NO: 2512812 - DNA, 25 bp, Homo sapien
ttgacgctcccatcttcctcgctgc

SEQ ID NO: 2512813 - DNA, 25 bp, Homo sapien
cctggggtttttgagtggacatcct

SEQ ID NO: 2512814 - DNA, 25 bp, Homo sapien
cacctggggtttttgagtggacatc

SEQ ID NO: 2512815 - DNA, 25 bp, Homo sapien
ctggggtttttgagtggacatcctt

SEQ ID NO: 2512816 - DNA, 25 bp, Homo sapien
aaagaagttttcatatatccctagg

SEQ ID NO: 2512817 - DNA, 25 bp, Homo sapien
tgttaccattaagtgtggtgctagc

SEQ ID NO: 2512818 - DNA, 25 bp, Homo sapien
tggtgctagctgtattgttttgtac

SEQ ID NO: 2512819 - DNA, 25 bp, Homo sapien
tctgacctgagggtgaaagtgttca

SEQ ID NO: 2512820 - DNA, 25 bp, Homo sapien
catgtgaattttacagacactgggc

SEQ ID NO: 2512821 - DNA, 25 bp, Homo sapien
tgtgaaatcacgttgcagtccagcg

SEQ ID NO: 2512822 - DNA, 25 bp, Homo sapien
tatccatagaccattcttgaccaag

SEQ ID NO: 2512823 - DNA, 25 bp, Homo sapien
tagccaaaaagtactgacatgagtg

SEQ ID NO: 2512824 - DNA, 25 bp, Homo sapien
gaaaatacatggtcattgttctgca

SEQ ID NO: 2512825 - DNA, 25 bp, Homo sapien
aattctatggtccttaataatttca

SEQ ID NO: 2512826 - DNA, 25 bp, Homo sapien
cataatattagatatgccagtggca

SEQ ID NO: 2512827 - DNA, 25 bp, Homo sapien
atcataatattagatatgccagtgg

SEQ ID NO: 2512828 - DNA, 25 bp, Homo sapien
catgatattgcaaattaacagctct

SEQ ID NO: 2512829 - DNA, 25 bp, Homo sapien
ctatctctacatcatgatattgcaa

SEQ ID NO: 2512830 - DNA, 25 bp, Homo sapien
aactggcaaatgacttttgtctcaa

SEQ ID NO: 2512831 - DNA, 25 bp, Homo sapien
ttaaaactggcaaatgacttttgtc

SEQ ID NO: 2512832 - DNA, 25 bp, Homo sapien
ttgacaacttgtatggattttcccc

SEQ ID NO: 2512833 - DNA, 25 bp, Homo sapien
ccctggcaatcaggtaagacaaaaa

SEQ ID NO: 2512834 - DNA, 25 bp, Homo sapien
gaatacatggcgtaactccctggca

SEQ ID NO: 2512835 - DNA, 25 bp, Homo sapien
taagggtatacaacttgtcaacagc

SEQ ID NO: 2512836 - DNA, 25 bp, Homo sapien
cataagaaatacatgaatatatagt

SEQ ID NO: 2512837 - DNA, 25 bp, Homo sapien
atatatccacataagaaatacatga

SEQ ID NO: 2512838 - DNA, 25 bp, Homo sapien
atccacataagaaatacatgaatat

SEQ ID NO: 2512839 - DNA, 25 bp, Homo sapien
cacataagaaatacatgaatatata

SEQ ID NO: 2512840 - DNA, 25 bp, Homo sapien
tgtagtcatctaactccatggagct

SEQ ID NO: 2512841 - DNA, 25 bp, Homo sapien
tacagtctaagaaaggcagtatcag

SEQ ID NO: 2512842 - DNA, 25 bp, Homo sapien
tagagtgcacaataaaacccaagtt

SEQ ID NO: 2512843 - DNA, 25 bp, Homo sapien
aagactttgatcattgggcccacgg

SEQ ID NO: 2512844 - DNA, 25 bp, Homo sapien
acaaacgagtcccattgctcttgcc

SEQ ID NO: 2512845 - DNA, 25 bp, Homo sapien
tcacaaacgagtcccattgctcttg

SEQ ID NO: 2512846 - DNA, 25 bp, Homo sapien
aaacgagtcccattgctcttgccac

SEQ ID NO: 2512847 - DNA, 25 bp, Homo sapien
aacgagtcccattgctcttgccact

SEQ ID NO: 2512848 - DNA, 25 bp, Homo sapien
tatctggggtctaagttctgttttc

SEQ ID NO: 2512849 - DNA, 25 bp, Homo sapien
cctctttggttagtatgtatctggg

SEQ ID NO: 2512850 - DNA, 25 bp, Homo sapien
aagtcctctttggttagtatgtatc

SEQ ID NO: 2512851 - DNA, 25 bp, Homo sapien
tatgtatctggggtctaagttctgt

SEQ ID NO: 2512852 - DNA, 25 bp, Homo sapien
ttccattatacaggcatttaacttg

SEQ ID NO: 2512853 - DNA, 25 bp, Homo sapien
ttaacttgttcacgttcaactccat

SEQ ID NO: 2512854 - DNA, 25 bp, Homo sapien
ggacaccagtaactacacagagaca

SEQ ID NO: 2512855 - DNA, 25 bp, Homo sapien
taaaaaggacaccagtaactacaca

SEQ ID NO: 2512856 - DNA, 25 bp, Homo sapien
attactggatcccagtcactgaggt

SEQ ID NO: 2512857 - DNA, 25 bp, Homo sapien
ctattactggatcccagtcactgag

SEQ ID NO: 2512858 - DNA, 25 bp, Homo sapien
ttctattactggatcccagtcactg

SEQ ID NO: 2512859 - DNA, 25 bp, Homo sapien
tgttttctattactggatcccagtc

SEQ ID NO: 2512860 - DNA, 25 bp, Homo sapien
tatgataaagaataccagttatcca

SEQ ID NO: 2512861 - DNA, 25 bp, Homo sapien
gacaagtatccccactaataatgtt

SEQ ID NO: 2512862 - DNA, 25 bp, Homo sapien
agttccaacagtgctgaagtacaga

SEQ ID NO: 2512863 - DNA, 25 bp, Homo sapien
taatgttaccaaagttccaacagtg

SEQ ID NO: 2512864 - DNA, 25 bp, Homo sapien
ttcatgcttttgcaccggtcgtttc

SEQ ID NO: 2512865 - DNA, 25 bp, Homo sapien
aacccttgtgctccagccctatgga

SEQ ID NO: 2512866 - DNA, 25 bp, Homo sapien
gtgctccagccctatggaactagga

SEQ ID NO: 2512867 - DNA, 25 bp, Homo sapien
gcttttgcaccggtcgtttcttcat

SEQ ID NO: 2512868 - DNA, 25 bp, Homo sapien
tatcaaggtgcaatggcaatgttct

SEQ ID NO: 2512869 - DNA, 25 bp, Homo sapien
ggtgctgttacagccttggatatca

SEQ ID NO: 2512870 - DNA, 25 bp, Homo sapien
gaaaaacactagtagtaaatggcat

SEQ ID NO: 2512871 - DNA, 25 bp, Homo sapien
tgtggttgtcatcaaatttgtctca

SEQ ID NO: 2512872 - DNA, 25 bp, Homo sapien
taagtggtccaccaaccataccaaa

SEQ ID NO: 2512873 - DNA, 25 bp, Homo sapien
ccataccaaatacgctgagtgctgc

SEQ ID NO: 2512874 - DNA, 25 bp, Homo sapien
gaacaggcccataagtggtccacca

SEQ ID NO: 2512875 - DNA, 25 bp, Homo sapien
aaccaaaatgcccaaagcgaacagg

SEQ ID NO: 2512876 - DNA, 25 bp, Homo sapien
cttaaacctccaggggccagctctc

SEQ ID NO: 2512877 - DNA, 25 bp, Homo sapien
ttatgacttaaacctccaggggcca

SEQ ID NO: 2512878 - DNA, 25 bp, Homo sapien
atgacttaaacctccaggggccagc

SEQ ID NO: 2512879 - DNA, 25 bp, Homo sapien
taaacctccaggggccagctctcac

SEQ ID NO: 2512880 - DNA, 25 bp, Homo sapien
ataagtgacgccagcgcagccattc

SEQ ID NO: 2512881 - DNA, 25 bp, Homo sapien
agcgcagccattccaatacacaggg

SEQ ID NO: 2512882 - DNA, 25 bp, Homo sapien
acaaagctcccataagtgacgccag

SEQ ID NO: 2512883 - DNA, 25 bp, Homo sapien
aatacacagggctccatacaccaca

SEQ ID NO: 2512884 - DNA, 25 bp, Homo sapien
taaggtttgattagatcttccacag

SEQ ID NO: 2512885 - DNA, 25 bp, Homo sapien
taaggcattaatactggaggacact

SEQ ID NO: 2512886 - DNA, 25 bp, Homo sapien
tgggaaatccaagacagagaccttt

SEQ ID NO: 2512887 - DNA, 25 bp, Homo sapien
gagacctttctgagagcgatctgaa

SEQ ID NO: 2512888 - DNA, 25 bp, Homo sapien
tgcagaatgtccagtaccaaataag

SEQ ID NO: 2512889 - DNA, 25 bp, Homo sapien
gtaagcacaggccacaaaaagtcca

SEQ ID NO: 2512890 - DNA, 25 bp, Homo sapien
ggaagtcctggataatcttgcagaa

SEQ ID NO: 2512891 - DNA, 25 bp, Homo sapien
tgtccagtaccaaataaggcatgag

SEQ ID NO: 2512892 - DNA, 25 bp, Homo sapien
attttctcggcccaccaagttgtat

SEQ ID NO: 2512893 - DNA, 25 bp, Homo sapien
ggtgtgtttatcaaaaggagggcat

SEQ ID NO: 2512894 - DNA, 25 bp, Homo sapien
caaaaggagggcataagttaagata

SEQ ID NO: 2512895 - DNA, 25 bp, Homo sapien
agttaagatagggttgagaaacagc

SEQ ID NO: 2512896 - DNA, 25 bp, Homo sapien
ctgtaagaaagacatggtactgaac

SEQ ID NO: 2512897 - DNA, 25 bp, Homo sapien
cttggctgtccaaggatcacagtca

SEQ ID NO: 2512898 - DNA, 25 bp, Homo sapien
tacctggaatatagggcgagcccac

SEQ ID NO: 2512899 - DNA, 25 bp, Homo sapien
tcccacaagattgatgtagagagac

SEQ ID NO: 2512900 - DNA, 25 bp, Homo sapien
agcatgtgaggattgcccagagtcc

SEQ ID NO: 2512901 - DNA, 25 bp, Homo sapien
gaaaagaggtaccatccctgaagtc

SEQ ID NO: 2512902 - DNA, 25 bp, Homo sapien
cactgaagtgtaggatagcaatgcc

SEQ ID NO: 2512903 - DNA, 25 bp, Homo sapien
gaagtctgcatccaatgacaaatgg

SEQ ID NO: 2512904 - DNA, 25 bp, Homo sapien
tgtaccataagtgaccctgggccag

SEQ ID NO: 2512905 - DNA, 25 bp, Homo sapien
gaaggtccctcctataataattgtc

SEQ ID NO: 2512906 - DNA, 25 bp, Homo sapien
cagaaggtgtgtctttgcaaagggt

SEQ ID NO: 2512907 - DNA, 25 bp, Homo sapien
tgcctggaatctgcttttacaagaa

SEQ ID NO: 2512908 - DNA, 25 bp, Homo sapien
ggttgacaccgtagatgctggtcca

SEQ ID NO: 2512909 - DNA, 25 bp, Homo sapien
tcacggatgcaaatccagccaccat

SEQ ID NO: 2512910 - DNA, 25 bp, Homo sapien
gcctgtataatcacggatgcaaatc

SEQ ID NO: 2512911 - DNA, 25 bp, Homo sapien
tcataggcatcatttaaaatagtgc

SEQ ID NO: 2512912 - DNA, 25 bp, Homo sapien
tgattccaccttgcatcaccacagc

SEQ ID NO: 2512913 - DNA, 25 bp, Homo sapien
tccagataactgctttaagaccacc

SEQ ID NO: 2512914 - DNA, 25 bp, Homo sapien
atcccaacttgaaaaacatctgtcc

SEQ ID NO: 2512915 - DNA, 25 bp, Homo sapien
caacttgaaaaacatctgtccagat

SEQ ID NO: 2512916 - DNA, 25 bp, Homo sapien
ttgaaaaacatctgtccagataact

SEQ ID NO: 2512917 - DNA, 25 bp, Homo sapien
gagggccccatcttctacaagatcc

SEQ ID NO: 2512918 - DNA, 25 bp, Homo sapien
cagtagaatgtgcagaccacccccg

SEQ ID NO: 2512919 - DNA, 25 bp, Homo sapien
tagaatgtgcagaccacccccgttg

SEQ ID NO: 2512920 - DNA, 25 bp, Homo sapien
taccgcgccccacagatcaaatcct

SEQ ID NO: 2512921 - DNA, 25 bp, Homo sapien
ccgttgccactaccgcgccccacag

SEQ ID NO: 2512922 - DNA, 25 bp, Homo sapien
gcatatcatttttgtgcaagggcca

SEQ ID NO: 2512923 - DNA, 25 bp, Homo sapien
aaatttgcatatcatttttgtgcaa

SEQ ID NO: 2512924 - DNA, 25 bp, Homo sapien
atttgcatatcatttttgtgcaagg

SEQ ID NO: 2512925 - DNA, 25 bp, Homo sapien
ttgcatatcatttttgtgcaagggc

SEQ ID NO: 2512926 - DNA, 25 bp, Homo sapien
cttcccaaatctagagagtatgggt

SEQ ID NO: 2512927 - DNA, 25 bp, Homo sapien
tcccaaatctagagagtatgggtac

SEQ ID NO: 2512928 - DNA, 25 bp, Homo sapien
catttatcttcccaaatctagagag

SEQ ID NO: 2512929 - DNA, 25 bp, Homo sapien
tgcatttatcttcccaaatctagag

SEQ ID NO: 2512930 - DNA, 25 bp, Homo sapien
tgtaagggcactacagacatctgtc

SEQ ID NO: 2512931 - DNA, 25 bp, Homo sapien
ggagcagtctgatcattcaaatcac

SEQ ID NO: 2512932 - DNA, 25 bp, Homo sapien
ttttgtcactaggagcagtctgatc

SEQ ID NO: 2512933 - DNA, 25 bp, Homo sapien
gttgagcagcacaatcttcctaaat

SEQ ID NO: 2512934 - DNA, 25 bp, Homo sapien
agaagtgtggagaagaaaagctttt

SEQ ID NO: 2512935 - DNA, 25 bp, Homo sapien
aagtgtggagaagaaaagcttttct

SEQ ID NO: 2512936 - DNA, 25 bp, Homo sapien
ttagaagtgtggagaagaaaagctt

SEQ ID NO: 2512937 - DNA, 25 bp, Homo sapien
gtgtggagaagaaaagcttttctcc

SEQ ID NO: 2512938 - DNA, 25 bp, Homo sapien
tgggctccaggttatagattcacaa

SEQ ID NO: 2512939 - DNA, 25 bp, Homo sapien
gggatgccgtcaatcctgactttgg

SEQ ID NO: 2512940 - DNA, 25 bp, Homo sapien
ctccaggttatagattcacaagagg

SEQ ID NO: 2512941 - DNA, 25 bp, Homo sapien
tcacaagaggggatgccgtcaatcc

SEQ ID NO: 2512942 - DNA, 25 bp, Homo sapien
gtaccacctggagaagtccacctct

SEQ ID NO: 2512943 - DNA, 25 bp, Homo sapien
tctacagacactttggagctgtcca

SEQ ID NO: 2512944 - DNA, 25 bp, Homo sapien
ggcacatcccagagaagtaccacct

SEQ ID NO: 2512945 - DNA, 25 bp, Homo sapien
cagagaagtaccacctggagaagtc

SEQ ID NO: 2512946 - DNA, 25 bp, Homo sapien
ggggcataaataacaattccagtat

SEQ ID NO: 2512947 - DNA, 25 bp, Homo sapien
cttgattcaaagccagggcaggggc

SEQ ID NO: 2512948 - DNA, 25 bp, Homo sapien
gcaggggcataaataacaattccag

SEQ ID NO: 2512949 - DNA, 25 bp, Homo sapien
gcataaataacaattccagtataca

SEQ ID NO: 2512950 - DNA, 25 bp, Homo sapien
tatgaagtccttcaaatgggaggtg

SEQ ID NO: 2512951 - DNA, 25 bp, Homo sapien
caaaaatgaactaactttccacagt

SEQ ID NO: 2512952 - DNA, 25 bp, Homo sapien
cacagtcattattctgtccaagttg

SEQ ID NO: 2512953 - DNA, 25 bp, Homo sapien
cagtagtgagtaagataaatacggt

SEQ ID NO: 2512954 - DNA, 25 bp, Homo sapien
ctgttccacagagacgaacacattt

SEQ ID NO: 2512955 - DNA, 25 bp, Homo sapien
cacatttgttaaatcgaagttctaa

SEQ ID NO: 2512956 - DNA, 25 bp, Homo sapien
acacatttgttaaatcgaagttcta

SEQ ID NO: 2512957 - DNA, 25 bp, Homo sapien
ttccacagagacgaacacatttgtt

SEQ ID NO: 2512958 - DNA, 25 bp, Homo sapien
aacctgagaaactgcatcctgctca

SEQ ID NO: 2512959 - DNA, 25 bp, Homo sapien
acctgagaaactgcatcctgctcac

SEQ ID NO: 2512960 - DNA, 25 bp, Homo sapien
tcacttctgagcaaacctgagaaac

SEQ ID NO: 2512961 - DNA, 25 bp, Homo sapien
cttctgagcaaacctgagaaactgc

SEQ ID NO: 2512962 - DNA, 25 bp, Homo sapien
cagccccagagtgaatggaaggcaa

SEQ ID NO: 2512963 - DNA, 25 bp, Homo sapien
caatgctgcccaggggtgcctcgcc

SEQ ID NO: 2512964 - DNA, 25 bp, Homo sapien
caatgtttgttgtgccgttaaggcc

SEQ ID NO: 2512965 - DNA, 25 bp, Homo sapien
tcaccaatgtttgttgtgccgttaa

SEQ ID NO: 2512966 - DNA, 25 bp, Homo sapien
ccagcgaaggcgtagtagatgccga

SEQ ID NO: 2512967 - DNA, 25 bp, Homo sapien
gtagtcccacaccacgaaggtgccg

SEQ ID NO: 2512968 - DNA, 25 bp, Homo sapien
cagtgacggctgacatgaagctagc

SEQ ID NO: 2512969 - DNA, 25 bp, Homo sapien
acgggcactgcggtcattctgcggc

SEQ ID NO: 2512970 - DNA, 25 bp, Homo sapien
cctgagcagatgagaactggagcct

SEQ ID NO: 2512971 - DNA, 25 bp, Homo sapien
ggacctcggaaaatcgacccgctgc

SEQ ID NO: 2512972 - DNA, 25 bp, Homo sapien
tcaaacccaggtatgggacctcgga

SEQ ID NO: 2512973 - DNA, 25 bp, Homo sapien
tgagtgctcaccacgtgaggaactg

SEQ ID NO: 2512974 - DNA, 25 bp, Homo sapien
gtttcttctgagcaataccagtgtt

SEQ ID NO: 2512975 - DNA, 25 bp, Homo sapien
cttctgagcaataccagtgtttgta

SEQ ID NO: 2512976 - DNA, 25 bp, Homo sapien
tctgagcaataccagtgtttgtatt

SEQ ID NO: 2512977 - DNA, 25 bp, Homo sapien
ttcttctgagcaataccagtgtttg

SEQ ID NO: 2512978 - DNA, 25 bp, Homo sapien
tcgttggtcccaccactgactcgga

SEQ ID NO: 2512979 - DNA, 25 bp, Homo sapien
agagcgtcggcagcaacctctgtgc

SEQ ID NO: 2512980 - DNA, 25 bp, Homo sapien
cacataactcttccagagcgtcggc

SEQ ID NO: 2512981 - DNA, 25 bp, Homo sapien
cttgttcgttggtcccaccactgac

SEQ ID NO: 2512982 - DNA, 25 bp, Homo sapien
ggtacattttcagcctatgagaatt

SEQ ID NO: 2512983 - DNA, 25 bp, Homo sapien
gaatagtgcctggtgaatgtaaaca

SEQ ID NO: 2512984 - DNA, 25 bp, Homo sapien
tgcttgaacccgttgaacctgagag

SEQ ID NO: 2512985 - DNA, 25 bp, Homo sapien
tatgtacgtattctatgttgacccc

SEQ ID NO: 2512986 - DNA, 25 bp, Homo sapien
agaaagaaatgccctctcttgagaa

SEQ ID NO: 2512987 - DNA, 25 bp, Homo sapien
gagaaagaaatgccctctcttgaga

SEQ ID NO: 2512988 - DNA, 25 bp, Homo sapien
tatcatgataacttttgggagtgac

SEQ ID NO: 2512989 - DNA, 25 bp, Homo sapien
ttatcatgataacttttgggagtga

SEQ ID NO: 2512990 - DNA, 25 bp, Homo sapien
tagtctaatggtacaagatgctgtg

SEQ ID NO: 2512991 - DNA, 25 bp, Homo sapien
tactggttggcatggattacctata

SEQ ID NO: 2512992 - DNA, 25 bp, Homo sapien
taccccacggcttaaggataagatc

SEQ ID NO: 2512993 - DNA, 25 bp, Homo sapien
gatgatccgaactaatggaaaaccc

SEQ ID NO: 2512994 - DNA, 25 bp, Homo sapien
tcctttaccagcattgggaaataag

SEQ ID NO: 2512995 - DNA, 25 bp, Homo sapien
ttttagaccattagtgtagtcagac

SEQ ID NO: 2512996 - DNA, 25 bp, Homo sapien
gaaataagattaatactgtctgtgc

SEQ ID NO: 2512997 - DNA, 25 bp, Homo sapien
aatttgcgtatttagcatgcccatc

SEQ ID NO: 2512998 - DNA, 25 bp, Homo sapien
gctgtcccggattgcaaaactggaa

SEQ ID NO: 2512999 - DNA, 25 bp, Homo sapien
tggaagctgcttattcgccgagaaa

SEQ ID NO: 2513000 - DNA, 25 bp, Homo sapien
tcggcgccgtagcaatggatcttgg

SEQ ID NO: 2513001 - DNA, 25 bp, Homo sapien
tgcatctttaagttcctcggcgccg

SEQ ID NO: 2513002 - DNA, 25 bp, Homo sapien
gagagagagatgaatagtggtctat

SEQ ID NO: 2513003 - DNA, 25 bp, Homo sapien
aaagaaaacttatatcaagataatt

SEQ ID NO: 2513004 - DNA, 25 bp, Homo sapien
gtattatatttgattgccctcttct

SEQ ID NO: 2513005 - DNA, 25 bp, Homo sapien
atagtggtctatgttatgccaggct

SEQ ID NO: 2513006 - DNA, 25 bp, Homo sapien
gaattactcaaaaagctggttgggc

SEQ ID NO: 2513007 - DNA, 25 bp, Homo sapien
tcctacctgtctctgatcattactc

SEQ ID NO: 2513008 - DNA, 25 bp, Homo sapien
tttgtgtgtgattagatcctttgct

SEQ ID NO: 2513009 - DNA, 25 bp, Homo sapien
tgctgaagaatctatcccaggaaat

SEQ ID NO: 2513010 - DNA, 25 bp, Homo sapien
tcggagtcctactgtactagctatg

SEQ ID NO: 2513011 - DNA, 25 bp, Homo sapien
ggaaaatgccagttatcaccagaat

SEQ ID NO: 2513012 - DNA, 25 bp, Homo sapien
gaatacctggattagtcggagtcct

SEQ ID NO: 2513013 - DNA, 25 bp, Homo sapien
catggtggagccataggaaatctta

SEQ ID NO: 2513014 - DNA, 25 bp, Homo sapien
tcctgataacattttctaacgttcg

SEQ ID NO: 2513015 - DNA, 25 bp, Homo sapien
gataacattttctaacgttcggcca

SEQ ID NO: 2513016 - DNA, 25 bp, Homo sapien
tgataacattttctaacgttcggcc

SEQ ID NO: 2513017 - DNA, 25 bp, Homo sapien
ctgataacattttctaacgttcggc

SEQ ID NO: 2513018 - DNA, 25 bp, Homo sapien
tgtgtgccaggtgcaccacactaga

SEQ ID NO: 2513019 - DNA, 25 bp, Homo sapien
cagtaaataagatacggtccctgcc

SEQ ID NO: 2513020 - DNA, 25 bp, Homo sapien
ccacactagatgcaacggatactaa

SEQ ID NO: 2513021 - DNA, 25 bp, Homo sapien
ttaaagtgcatctcaggtatttcag

SEQ ID NO: 2513022 - DNA, 25 bp, Homo sapien
taggattcaagatggccagcggcta

SEQ ID NO: 2513023 - DNA, 25 bp, Homo sapien
gagggatcaggcttaaccaagtgct

SEQ ID NO: 2513024 - DNA, 25 bp, Homo sapien
tctgaaatgccatatgccaggcgcc

SEQ ID NO: 2513025 - DNA, 25 bp, Homo sapien
caggcgccataccagatactaggga

SEQ ID NO: 2513026 - DNA, 25 bp, Homo sapien
taaccatttaggattatttatagta

SEQ ID NO: 2513027 - DNA, 25 bp, Homo sapien
gatcacttctactagtatagacaaa

SEQ ID NO: 2513028 - DNA, 25 bp, Homo sapien
tctttaatgtgttatgaattctatc

SEQ ID NO: 2513029 - DNA, 25 bp, Homo sapien
tatttatagtatgtcactgatcact

SEQ ID NO: 2513030 - DNA, 25 bp, Homo sapien
gaaccctgggttcacgtccatacag

SEQ ID NO: 2513031 - DNA, 25 bp, Homo sapien
catactgagtctaatctttggaaag

SEQ ID NO: 2513032 - DNA, 25 bp, Homo sapien
caagcttcctctaccgatcaactag

SEQ ID NO: 2513033 - DNA, 25 bp, Homo sapien
tattcctaccttacaagctagcagg

SEQ ID NO: 2513034 - DNA, 25 bp, Homo sapien
catagaacattcaggtgattcgatc

SEQ ID NO: 2513035 - DNA, 25 bp, Homo sapien
tatataccttaacacaagaaagcaa

SEQ ID NO: 2513036 - DNA, 25 bp, Homo sapien
taacatctagtagtgtgaagtacac

SEQ ID NO: 2513037 - DNA, 25 bp, Homo sapien
agtcagtcagtatatgccaataatc

SEQ ID NO: 2513038 - DNA, 25 bp, Homo sapien
actgtctgctttttaatgtttcaac

SEQ ID NO: 2513039 - DNA, 25 bp, Homo sapien
tgtctgctttttaatgtttcaacta

SEQ ID NO: 2513040 - DNA, 25 bp, Homo sapien
ttactgtctgctttttaatgtttca

SEQ ID NO: 2513041 - DNA, 25 bp, Homo sapien
tctgctttttaatgtttcaactaac

SEQ ID NO: 2513042 - DNA, 25 bp, Homo sapien
caaagtttcatcctcaacacgggag

SEQ ID NO: 2513043 - DNA, 25 bp, Homo sapien
cacgtggacgtgcatagctgcaagc

SEQ ID NO: 2513044 - DNA, 25 bp, Homo sapien
cacacaaatgcacagatggcttctg

SEQ ID NO: 2513045 - DNA, 25 bp, Homo sapien
cagtgagagaaaacgcttgaggaac

SEQ ID NO: 2513046 - DNA, 25 bp, Homo sapien
aagtgaatttgccatctctgaggaa

SEQ ID NO: 2513047 - DNA, 25 bp, Homo sapien
tccattgcctcatcaaggccggtgc

SEQ ID NO: 2513048 - DNA, 25 bp, Homo sapien
cattttcggtccttcaaggcaggta

SEQ ID NO: 2513049 - DNA, 25 bp, Homo sapien
gccggtgcctttggttgctgacgtt

SEQ ID NO: 2513050 - DNA, 25 bp, Homo sapien
tagggtattcgaaatgcacatgggc

SEQ ID NO: 2513051 - DNA, 25 bp, Homo sapien
tcaatgcagcctttgtagagttggg

SEQ ID NO: 2513052 - DNA, 25 bp, Homo sapien
ggctttgataaactgaatacatgca

SEQ ID NO: 2513053 - DNA, 25 bp, Homo sapien
ccaacagtgtataaaagtctccatc

SEQ ID NO: 2513054 - DNA, 25 bp, Homo sapien
tgaatagtaacatctccagtatggc

SEQ ID NO: 2513055 - DNA, 25 bp, Homo sapien
tgtttgaatagtaacatctccagta

SEQ ID NO: 2513056 - DNA, 25 bp, Homo sapien
tctgtgtttgaatagtaacatctcc

SEQ ID NO: 2513057 - DNA, 25 bp, Homo sapien
gtctactacataaatgactgcatct

SEQ ID NO: 2513058 - DNA, 25 bp, Homo sapien
tgccttaatgattcactgtttctgg

SEQ ID NO: 2513059 - DNA, 25 bp, Homo sapien
tgtcccacacatgttagaatcaatg

SEQ ID NO: 2513060 - DNA, 25 bp, Homo sapien
aggaagaaactgacatatcaattgc

SEQ ID NO: 2513061 - DNA, 25 bp, Homo sapien
tatcaattgccaattctgtcccaca

SEQ ID NO: 2513062 - DNA, 25 bp, Homo sapien
cttgtctgtcctcctaaatcccaga

SEQ ID NO: 2513063 - DNA, 25 bp, Homo sapien
gtttttgtacgtcaccgtctctaca

SEQ ID NO: 2513064 - DNA, 25 bp, Homo sapien
tgtcctcctaaatcccagacttgga

SEQ ID NO: 2513065 - DNA, 25 bp, Homo sapien
cgtcaccgtctctacattaaatcca

SEQ ID NO: 2513066 - DNA, 25 bp, Homo sapien
aacttcagttctaaactacagcatg

SEQ ID NO: 2513067 - DNA, 25 bp, Homo sapien
ggctgcagctttcaatctcacagcc

SEQ ID NO: 2513068 - DNA, 25 bp, Homo sapien
tgcagctttcaatctcacagcccat

SEQ ID NO: 2513069 - DNA, 25 bp, Homo sapien
cttcagttctaaactacagcatgga

SEQ ID NO: 2513070 - DNA, 25 bp, Homo sapien
ttctcatttcccgagttccaaacag

SEQ ID NO: 2513071 - DNA, 25 bp, Homo sapien
taggtatagtagtaacaacttctcc

SEQ ID NO: 2513072 - DNA, 25 bp, Homo sapien
gctccatctaatcccaaaattaaaa

SEQ ID NO: 2513073 - DNA, 25 bp, Homo sapien
tcccgagttccaaacagactggaaa

SEQ ID NO: 2513074 - DNA, 25 bp, Homo sapien
cagagttctccacgaagcaatatag

SEQ ID NO: 2513075 - DNA, 25 bp, Homo sapien
tcagagttctccacgaagcaatata

SEQ ID NO: 2513076 - DNA, 25 bp, Homo sapien
catctttcaccaagaaacctcggcg

SEQ ID NO: 2513077 - DNA, 25 bp, Homo sapien
ggcgaacctgcgactgacgcgttgc

SEQ ID NO: 2513078 - DNA, 25 bp, Homo sapien
agaatgattaagcttccactctggg

SEQ ID NO: 2513079 - DNA, 25 bp, Homo sapien
catgataagggtaaagaactcgaac

SEQ ID NO: 2513080 - DNA, 25 bp, Homo sapien
tgaaccccctgtcctccctcgccga

SEQ ID NO: 2513081 - DNA, 25 bp, Homo sapien
accccctgtcctccctcgccgatct

SEQ ID NO: 2513082 - DNA, 25 bp, Homo sapien
gatgaaccccctgtcctccctcgcc

SEQ ID NO: 2513083 - DNA, 25 bp, Homo sapien
atgaaccccctgtcctccctcgccg

SEQ ID NO: 2513084 - DNA, 25 bp, Homo sapien
cttggccttcggctgcagctccgag

SEQ ID NO: 2513085 - DNA, 25 bp, Homo sapien
gcggtttcctcgcaagcccagtcag

SEQ ID NO: 2513086 - DNA, 25 bp, Homo sapien
gattccttggccttcggctgcagct

SEQ ID NO: 2513087 - DNA, 25 bp, Homo sapien
ctgcagctccgaggcggtttcctcg

SEQ ID NO: 2513088 - DNA, 25 bp, Homo sapien
gcgggagcgagggtcagctgcgact

SEQ ID NO: 2513089 - DNA, 25 bp, Homo sapien
gcgggggcgggagcgagggtcagct

SEQ ID NO: 2513090 - DNA, 25 bp, Homo sapien
gggcgggagcgagggtcagctgcga

SEQ ID NO: 2513091 - DNA, 25 bp, Homo sapien
gggagcgagggtcagctgcgactgc

SEQ ID NO: 2513092 - DNA, 25 bp, Homo sapien
ggccagaagagacgaataattcaaa

SEQ ID NO: 2513093 - DNA, 25 bp, Homo sapien
ttctgacaccaaaaagtggcgaatc

SEQ ID NO: 2513094 - DNA, 25 bp, Homo sapien
gatgtagataccgtggaggccagaa

SEQ ID NO: 2513095 - DNA, 25 bp, Homo sapien
gacaccaaaaagtggcgaatctgac

SEQ ID NO: 2513096 - DNA, 25 bp, Homo sapien
taaccagaggtttttgtcttcgctg

SEQ ID NO: 2513097 - DNA, 25 bp, Homo sapien
aataataggaatggtaccgcgctgc

SEQ ID NO: 2513098 - DNA, 25 bp, Homo sapien
aactgaaaatgcgagtcgggcctcg

SEQ ID NO: 2513099 - DNA, 25 bp, Homo sapien
gcagccttgcacctgaggccagtaa

SEQ ID NO: 2513100 - DNA, 25 bp, Homo sapien
agtaatgtaggttttgatagtgaag

SEQ ID NO: 2513101 - DNA, 25 bp, Homo sapien
gaagtaatgtaggttttgatagtga

SEQ ID NO: 2513102 - DNA, 25 bp, Homo sapien
ggaagtaatgtaggttttgatagtg

SEQ ID NO: 2513103 - DNA, 25 bp, Homo sapien
gtaatgtaggttttgatagtgaagt

SEQ ID NO: 2513104 - DNA, 25 bp, Homo sapien
ttcaagctctttctcctgggcaaag

SEQ ID NO: 2513105 - DNA, 25 bp, Homo sapien
tctttctcctgggcaaagccttcca

SEQ ID NO: 2513106 - DNA, 25 bp, Homo sapien
cttttcaagctctttctcctgggca

SEQ ID NO: 2513107 - DNA, 25 bp, Homo sapien
ctttctcctgggcaaagccttccat

SEQ ID NO: 2513108 - DNA, 25 bp, Homo sapien
ggccagatgcgaggcacagtctcag

SEQ ID NO: 2513109 - DNA, 25 bp, Homo sapien
cagcatcaacagcttgggatagatc

SEQ ID NO: 2513110 - DNA, 25 bp, Homo sapien
gatgcctttggagggccagatgcga

SEQ ID NO: 2513111 - DNA, 25 bp, Homo sapien
atgatgcctttggagggccagatgc

SEQ ID NO: 2513112 - DNA, 25 bp, Homo sapien
cccactacggtagctttcctgtgtt

SEQ ID NO: 2513113 - DNA, 25 bp, Homo sapien
ccactacggtagctttcctgtgttt

SEQ ID NO: 2513114 - DNA, 25 bp, Homo sapien
cactacggtagctttcctgtgtttt

SEQ ID NO: 2513115 - DNA, 25 bp, Homo sapien
tccccactacggtagctttcctgtg

SEQ ID NO: 2513116 - DNA, 25 bp, Homo sapien
tttcaggtagttagaaggagatgtt

SEQ ID NO: 2513117 - DNA, 25 bp, Homo sapien
caggtagttagaaggagatgttatc

SEQ ID NO: 2513118 - DNA, 25 bp, Homo sapien
tagttagaaggagatgttatcccat

SEQ ID NO: 2513119 - DNA, 25 bp, Homo sapien
gatttcaggtagttagaaggagatg

SEQ ID NO: 2513120 - DNA, 25 bp, Homo sapien
ttcttttcaaatgccaccacagaga

SEQ ID NO: 2513121 - DNA, 25 bp, Homo sapien
caaatgccaccacagagagggccat

SEQ ID NO: 2513122 - DNA, 25 bp, Homo sapien
cagctttcttagcattcttttcaaa

SEQ ID NO: 2513123 - DNA, 25 bp, Homo sapien
cttttcaaatgccaccacagagagg

SEQ ID NO: 2513124 - DNA, 25 bp, Homo sapien
tccctgggcctgatctctgggagct

SEQ ID NO: 2513125 - DNA, 25 bp, Homo sapien
tccttcatgtccctctcttgtgtgc

SEQ ID NO: 2513126 - DNA, 25 bp, Homo sapien
tcagtccaggccaagagctccctgg

SEQ ID NO: 2513127 - DNA, 25 bp, Homo sapien
tagaatgtccagtgtcctcttttcc

SEQ ID NO: 2513128 - DNA, 25 bp, Homo sapien
ggaagatgaatctgtagcatccagg

SEQ ID NO: 2513129 - DNA, 25 bp, Homo sapien
tggaagatgaatctgtagcatccag

SEQ ID NO: 2513130 - DNA, 25 bp, Homo sapien
gaagatgaatctgtagcatccaggt

SEQ ID NO: 2513131 - DNA, 25 bp, Homo sapien
aagatgaatctgtagcatccaggtt

SEQ ID NO: 2513132 - DNA, 25 bp, Homo sapien
ctttgggacagcgagtgggaatgca

SEQ ID NO: 2513133 - DNA, 25 bp, Homo sapien
gaactgcaagcgattgggcctttgg

SEQ ID NO: 2513134 - DNA, 25 bp, Homo sapien
gatatcctggtgtcaggcataggag

SEQ ID NO: 2513135 - DNA, 25 bp, Homo sapien
tcaaggcacgacgtcggggaactgc

SEQ ID NO: 2513136 - DNA, 25 bp, Homo sapien
gagcaaagctcatcctgtgatgggt

SEQ ID NO: 2513137 - DNA, 25 bp, Homo sapien
tatgtctgggccacgaccatcgtgg

SEQ ID NO: 2513138 - DNA, 25 bp, Homo sapien
cagtgggtccccttctatgtctggg

SEQ ID NO: 2513139 - DNA, 25 bp, Homo sapien
cgcccctggacaaagagcgaaagga

SEQ ID NO: 2513140 - DNA, 25 bp, Homo sapien
taactcgcagatgcctgacagcagc

SEQ ID NO: 2513141 - DNA, 25 bp, Homo sapien
gaaaatgtcaatcctacaaatctgg

SEQ ID NO: 2513142 - DNA, 25 bp, Homo sapien
cataaggtagatttaaccaattggg

SEQ ID NO: 2513143 - DNA, 25 bp, Homo sapien
catgccttcttgaagtaactcgcag

SEQ ID NO: 2513144 - DNA, 25 bp, Homo sapien
gaagatttagtcaaactcagatcca

SEQ ID NO: 2513145 - DNA, 25 bp, Homo sapien
gttgccactgcaatactaccctcag

SEQ ID NO: 2513146 - DNA, 25 bp, Homo sapien
gatgtttacgccagagaatgttgcc

SEQ ID NO: 2513147 - DNA, 25 bp, Homo sapien
ctatgactcagagggatgtttacgc

SEQ ID NO: 2513148 - DNA, 25 bp, Homo sapien
ggtcaagaaatgaccattgggtgga

SEQ ID NO: 2513149 - DNA, 25 bp, Homo sapien
cctggaggcacatactggcatggtt

SEQ ID NO: 2513150 - DNA, 25 bp, Homo sapien
ttgggtggagagtcagtaagatcct

SEQ ID NO: 2513151 - DNA, 25 bp, Homo sapien
gaaatgaccattgggtggagagtca

SEQ ID NO: 2513152 - DNA, 25 bp, Homo sapien
gcagtcttagcaaaatacagtcttc

SEQ ID NO: 2513153 - DNA, 25 bp, Homo sapien
ggcagttgcagtcttagcaaaatac

SEQ ID NO: 2513154 - DNA, 25 bp, Homo sapien
tcaagcttgtggctggcagttgcag

SEQ ID NO: 2513155 - DNA, 25 bp, Homo sapien
gtggctggcagttgcagtcttagca

SEQ ID NO: 2513156 - DNA, 25 bp, Homo sapien
ctcctttgcactctgcagttgcaaa

SEQ ID NO: 2513157 - DNA, 25 bp, Homo sapien
cagcatctccaaacgtctaacatcc

SEQ ID NO: 2513158 - DNA, 25 bp, Homo sapien
gcatctccaaacgtctaacatccat

SEQ ID NO: 2513159 - DNA, 25 bp, Homo sapien
agcatctccaaacgtctaacatcca

SEQ ID NO: 2513160 - DNA, 25 bp, Homo sapien
agaccactctacaatagtagttggg

SEQ ID NO: 2513161 - DNA, 25 bp, Homo sapien
aagggagaaatagaccactctacaa

SEQ ID NO: 2513162 - DNA, 25 bp, Homo sapien
tacacatcaaacaacagttccccaa

SEQ ID NO: 2513163 - DNA, 25 bp, Homo sapien
tattgtcagaaaggtacagcattca

SEQ ID NO: 2513164 - DNA, 25 bp, Homo sapien
cagcaaactttttgcactcctgagt

SEQ ID NO: 2513165 - DNA, 25 bp, Homo sapien
catccagcaaactttttgcactcct

SEQ ID NO: 2513166 - DNA, 25 bp, Homo sapien
caaactttttgcactcctgagtcag

SEQ ID NO: 2513167 - DNA, 25 bp, Homo sapien
tccagcaaactttttgcactcctga

SEQ ID NO: 2513168 - DNA, 25 bp, Homo sapien
ttccttccagtaggcgagagagcag

SEQ ID NO: 2513169 - DNA, 25 bp, Homo sapien
acagatgtgagaaaggtccccatag

SEQ ID NO: 2513170 - DNA, 25 bp, Homo sapien
agaaaggtccccatagctgtcaagt

SEQ ID NO: 2513171 - DNA, 25 bp, Homo sapien
tccttccagtaggcgagagagcaga

SEQ ID NO: 2513172 - DNA, 25 bp, Homo sapien
tcccaaagaacaggctcctccagcc

SEQ ID NO: 2513173 - DNA, 25 bp, Homo sapien
tcttccccacagctcgtaaagccat

SEQ ID NO: 2513174 - DNA, 25 bp, Homo sapien
cccacagctcgtaaagccatgccca

SEQ ID NO: 2513175 - DNA, 25 bp, Homo sapien
ctcccaaagaacaggctcctccagc

SEQ ID NO: 2513176 - DNA, 25 bp, Homo sapien
ttaagttattccgatcaaattggga

SEQ ID NO: 2513177 - DNA, 25 bp, Homo sapien
ttattccgatcaaattgggaggatg

SEQ ID NO: 2513178 - DNA, 25 bp, Homo sapien
agttattccgatcaaattgggagga

SEQ ID NO: 2513179 - DNA, 25 bp, Homo sapien
tgggaggatgttgtaggcagtttca

SEQ ID NO: 2513180 - DNA, 25 bp, Homo sapien
gttagttcttgatggaaacagatgt

SEQ ID NO: 2513181 - DNA, 25 bp, Homo sapien
agagcatgtggccacatcttctttg

SEQ ID NO: 2513182 - DNA, 25 bp, Homo sapien
ctgagagcatgtggccacatcttct

SEQ ID NO: 2513183 - DNA, 25 bp, Homo sapien
tattattccatgttagttcttgatg

SEQ ID NO: 2513184 - DNA, 25 bp, Homo sapien
ggacactgctcaaaaccatgttaag

SEQ ID NO: 2513185 - DNA, 25 bp, Homo sapien
gaatgcagacagtgcaaactcctag

SEQ ID NO: 2513186 - DNA, 25 bp, Homo sapien
ccacgtgggcgcagtttgaaggtta

SEQ ID NO: 2513187 - DNA, 25 bp, Homo sapien
tgaatactaatcctggccacgtggg

SEQ ID NO: 2513188 - DNA, 25 bp, Homo sapien
taagaggcagacctactttaatgta

SEQ ID NO: 2513189 - DNA, 25 bp, Homo sapien
gacaccactgctattaagatacacc

SEQ ID NO: 2513190 - DNA, 25 bp, Homo sapien
tacctagaaacctctaagactgcac

SEQ ID NO: 2513191 - DNA, 25 bp, Homo sapien
tgttccaaatggtttgacacaccat

SEQ ID NO: 2513192 - DNA, 25 bp, Homo sapien
cacaaaggatgccagagaatcctgt

SEQ ID NO: 2513193 - DNA, 25 bp, Homo sapien
cagagtattatgtgacagccggtga

SEQ ID NO: 2513194 - DNA, 25 bp, Homo sapien
tgtcagatgacagatgattcagagt

SEQ ID NO: 2513195 - DNA, 25 bp, Homo sapien
cagagaatcctgtttatcaataact

SEQ ID NO: 2513196 - DNA, 25 bp, Homo sapien
tatggatcctaatgagtcttctggt

SEQ ID NO: 2513197 - DNA, 25 bp, Homo sapien
tgaggctcctctacactggcagcta

SEQ ID NO: 2513198 - DNA, 25 bp, Homo sapien
tcaccaggagctgttggcttcttct

SEQ ID NO: 2513199 - DNA, 25 bp, Homo sapien
gaaatctcttattgtggtcaccagg

SEQ ID NO: 2513200 - DNA, 25 bp, Homo sapien
gggagaaagagaacctgttgagtac

SEQ ID NO: 2513201 - DNA, 25 bp, Homo sapien
tactggataatccttgtttcacaca

SEQ ID NO: 2513202 - DNA, 25 bp, Homo sapien
ctgttgagtacaaatgcctcatgtt

SEQ ID NO: 2513203 - DNA, 25 bp, Homo sapien
gttatagctttgaaacccaacagat

SEQ ID NO: 2513204 - DNA, 25 bp, Homo sapien
caggttccttgtgagtaatcttaaa

SEQ ID NO: 2513205 - DNA, 25 bp, Homo sapien
catcttgagtgcgagcaggtggctc

SEQ ID NO: 2513206 - DNA, 25 bp, Homo sapien
taatgtgcttcaagagcctacatgg

SEQ ID NO: 2513207 - DNA, 25 bp, Homo sapien
ccactcttagcagttgcacctgatt

SEQ ID NO: 2513208 - DNA, 25 bp, Homo sapien
ttattcaaaatctgatgagtagttg

SEQ ID NO: 2513209 - DNA, 25 bp, Homo sapien
ctcagatgtaaatgggtgtggctta

SEQ ID NO: 2513210 - DNA, 25 bp, Homo sapien
tggcttgtgaactgttgtgaagcag

SEQ ID NO: 2513211 - DNA, 25 bp, Homo sapien
tgttgtggcttgtgaactgttgtga

SEQ ID NO: 2513212 - DNA, 25 bp, Homo sapien
taggctattatggaaggcagtggcc

SEQ ID NO: 2513213 - DNA, 25 bp, Homo sapien
tcttaggctattatggaaggcagtg

SEQ ID NO: 2513214 - DNA, 25 bp, Homo sapien
ccacttcttaggctattatggaagg

SEQ ID NO: 2513215 - DNA, 25 bp, Homo sapien
aaggcagtggccggataagaacaga

SEQ ID NO: 2513216 - DNA, 25 bp, Homo sapien
tctgaaaaacgaagctggagaggca

SEQ ID NO: 2513217 - DNA, 25 bp, Homo sapien
tgatatagctgaaagagatgactct

SEQ ID NO: 2513218 - DNA, 25 bp, Homo sapien
tctagaatcaagctgacatgtcaag

SEQ ID NO: 2513219 - DNA, 25 bp, Homo sapien
gtcctccaggtaaacgcacttctag

SEQ ID NO: 2513220 - DNA, 25 bp, Homo sapien
gactcctcttgcaaggcgtacctcc

SEQ ID NO: 2513221 - DNA, 25 bp, Homo sapien
tctgcgagacttacactcaagcaat

SEQ ID NO: 2513222 - DNA, 25 bp, Homo sapien
caaacataattgattcgtatctgcg

SEQ ID NO: 2513223 - DNA, 25 bp, Homo sapien
tgattcgtatctgcgagacttacac

SEQ ID NO: 2513224 - DNA, 25 bp, Homo sapien
ccttggactgttcatggcatcggta

SEQ ID NO: 2513225 - DNA, 25 bp, Homo sapien
gagaccctcattgctctaaggcagt

SEQ ID NO: 2513226 - DNA, 25 bp, Homo sapien
taatctgggttctactcattgtggg

SEQ ID NO: 2513227 - DNA, 25 bp, Homo sapien
cacactaaagatgaggagatccata

SEQ ID NO: 2513228 - DNA, 25 bp, Homo sapien
tgtgccaagtgtttgacgaagcccg

SEQ ID NO: 2513229 - DNA, 25 bp, Homo sapien
cgaagcccgtgaggcaaactgcact

SEQ ID NO: 2513230 - DNA, 25 bp, Homo sapien
gggccggtgacctaccaatgcgtgt

SEQ ID NO: 2513231 - DNA, 25 bp, Homo sapien
cacttgccgatagaggttgcgccac

SEQ ID NO: 2513232 - DNA, 25 bp, Homo sapien
tttatttaggataagcagtgccgag

SEQ ID NO: 2513233 - DNA, 25 bp, Homo sapien
tagatttaataacctcaataccaaa

SEQ ID NO: 2513234 - DNA, 25 bp, Homo sapien
gccgagaggatactaattcacatag

SEQ ID NO: 2513235 - DNA, 25 bp, Homo sapien
taatttattactatacagtgtcatg

SEQ ID NO: 2513236 - DNA, 25 bp, Homo sapien
agagctgaaagcttaatacatattc

SEQ ID NO: 2513237 - DNA, 25 bp, Homo sapien
taattgacagtgttagagagaaaaa

SEQ ID NO: 2513238 - DNA, 25 bp, Homo sapien
tgcttcttagctaacgttataattg

SEQ ID NO: 2513239 - DNA, 25 bp, Homo sapien
taacagaaagggaggtcttacaatg

SEQ ID NO: 2513240 - DNA, 25 bp, Homo sapien
gaagagacttccgaacacttgctat

SEQ ID NO: 2513241 - DNA, 25 bp, Homo sapien
gagacttccgaacacttgctatctc

SEQ ID NO: 2513242 - DNA, 25 bp, Homo sapien
acatggattgaagagacttccgaac

SEQ ID NO: 2513243 - DNA, 25 bp, Homo sapien
gattgaagagacttccgaacacttg

SEQ ID NO: 2513244 - DNA, 25 bp, Homo sapien
tcattgcttatattaatccttattt

SEQ ID NO: 2513245 - DNA, 25 bp, Homo sapien
cattgcttatattaatccttatttt

SEQ ID NO: 2513246 - DNA, 25 bp, Homo sapien
ttcattttgtgcaccagtaagtaga

SEQ ID NO: 2513247 - DNA, 25 bp, Homo sapien
taagtagattatcatgattcttctc

SEQ ID NO: 2513248 - DNA, 25 bp, Homo sapien
aaattcattttgtgcaccagtaagt

SEQ ID NO: 2513249 - DNA, 25 bp, Homo sapien
aagtagattatcatgattcttctcc

SEQ ID NO: 2513250 - DNA, 25 bp, Homo sapien
atcttttgttgctgtcgaaacatat

SEQ ID NO: 2513251 - DNA, 25 bp, Homo sapien
tcttttgttgctgtcgaaacatatt

SEQ ID NO: 2513252 - DNA, 25 bp, Homo sapien
ctatgcctgaagctaaactgccccg

SEQ ID NO: 2513253 - DNA, 25 bp, Homo sapien
gatgacagaacccagatgacactac

SEQ ID NO: 2513254 - DNA, 25 bp, Homo sapien
ccctcaggagaccaaaatgtgcaga

SEQ ID NO: 2513255 - DNA, 25 bp, Homo sapien
tgaatacacagatgcggaaccctta

SEQ ID NO: 2513256 - DNA, 25 bp, Homo sapien
ataaaaggctaggttgtccattcct

SEQ ID NO: 2513257 - DNA, 25 bp, Homo sapien
caataaaaggctaggttgtccattc

SEQ ID NO: 2513258 - DNA, 25 bp, Homo sapien
taaaaggctaggttgtccattccta

SEQ ID NO: 2513259 - DNA, 25 bp, Homo sapien
agacttggttgattataaacctaat

SEQ ID NO: 2513260 - DNA, 25 bp, Homo sapien
ttataaacctaatcatgataccaac

SEQ ID NO: 2513261 - DNA, 25 bp, Homo sapien
tggttgattataaacctaatcatga

SEQ ID NO: 2513262 - DNA, 25 bp, Homo sapien
tgattataaacctaatcatgatacc

SEQ ID NO: 2513263 - DNA, 25 bp, Homo sapien
caaagtcagaaactgctgagaatat

SEQ ID NO: 2513264 - DNA, 25 bp, Homo sapien
cagaaactgctgagaatattcttgg

SEQ ID NO: 2513265 - DNA, 25 bp, Homo sapien
tcagaaactgctgagaatattcttg

SEQ ID NO: 2513266 - DNA, 25 bp, Homo sapien
aagtcagaaactgctgagaatattc

SEQ ID NO: 2513267 - DNA, 25 bp, Homo sapien
gttactagttttgagagaagccttg

SEQ ID NO: 2513268 - DNA, 25 bp, Homo sapien
catgttcaattttctggttactagt

SEQ ID NO: 2513269 - DNA, 25 bp, Homo sapien
tttgagagaagccttggtatacatt

SEQ ID NO: 2513270 - DNA, 25 bp, Homo sapien
ggcaagaagagccttgttaatgtca

SEQ ID NO: 2513271 - DNA, 25 bp, Homo sapien
catttttacccataagaactgcatt

SEQ ID NO: 2513272 - DNA, 25 bp, Homo sapien
catgctgtagctgcactattacata

SEQ ID NO: 2513273 - DNA, 25 bp, Homo sapien
aataggtatctttcagtaatcatgc

SEQ ID NO: 2513274 - DNA, 25 bp, Homo sapien
gagctctttattgggcatttttacc

SEQ ID NO: 2513275 - DNA, 25 bp, Homo sapien
ccaactccttccagcatattctgca

SEQ ID NO: 2513276 - DNA, 25 bp, Homo sapien
ttccagcatattctgcacttcaccc

SEQ ID NO: 2513277 - DNA, 25 bp, Homo sapien
actccttccagcatattctgcactt

SEQ ID NO: 2513278 - DNA, 25 bp, Homo sapien
ctccaactccttccagcatattctg

SEQ ID NO: 2513279 - DNA, 25 bp, Homo sapien
tatattatttgttagcaacttttct

SEQ ID NO: 2513280 - DNA, 25 bp, Homo sapien
tggaagaaataccagatgccaagta

SEQ ID NO: 2513281 - DNA, 25 bp, Homo sapien
aagatccacaacataccatgcttgt

SEQ ID NO: 2513282 - DNA, 25 bp, Homo sapien
cttttcttgaagtgctttatctaag

SEQ ID NO: 2513283 - DNA, 25 bp, Homo sapien
ccatatcttcaactactcctgcaga

SEQ ID NO: 2513284 - DNA, 25 bp, Homo sapien
tcttcctacgtttctcaatgactgc

SEQ ID NO: 2513285 - DNA, 25 bp, Homo sapien
aactactcctgcagaagaccttttc

SEQ ID NO: 2513286 - DNA, 25 bp, Homo sapien
ccttttcttcctacgtttctcaatg

SEQ ID NO: 2513287 - DNA, 25 bp, Homo sapien
ttttgccaacatacagtttcaaagc

SEQ ID NO: 2513288 - DNA, 25 bp, Homo sapien
tttcaagtctccctgggttaatgtc

SEQ ID NO: 2513289 - DNA, 25 bp, Homo sapien
tttgccaacatacagtttcaaagca

SEQ ID NO: 2513290 - DNA, 25 bp, Homo sapien
tctccctgggttaatgtcacagtaa

SEQ ID NO: 2513291 - DNA, 25 bp, Homo sapien
aatgagaaacacaagtacagctggc

SEQ ID NO: 2513292 - DNA, 25 bp, Homo sapien
taactgcaaaagcaagagttgccga

SEQ ID NO: 2513293 - DNA, 25 bp, Homo sapien
tacagctggccatccgtgtcagcag

SEQ ID NO: 2513294 - DNA, 25 bp, Homo sapien
aagcttctgtaactccgatactgca

SEQ ID NO: 2513295 - DNA, 25 bp, Homo sapien
ggagggaagaccatacctgaaaatg

SEQ ID NO: 2513296 - DNA, 25 bp, Homo sapien
gaccatacctgaaaatgctttacaa

SEQ ID NO: 2513297 - DNA, 25 bp, Homo sapien
gaagaccatacctgaaaatgcttta

SEQ ID NO: 2513298 - DNA, 25 bp, Homo sapien
gggaagaccatacctgaaaatgctt

SEQ ID NO: 2513299 - DNA, 25 bp, Homo sapien
taagttgtacgatagtctcaatggg

SEQ ID NO: 2513300 - DNA, 25 bp, Homo sapien
cactgcccaacatgagatgtactgc

SEQ ID NO: 2513301 - DNA, 25 bp, Homo sapien
gtctcaatgggttcaaaacaaatga

SEQ ID NO: 2513302 - DNA, 25 bp, Homo sapien
gaaggacatcactgcccaacatgag

SEQ ID NO: 2513303 - DNA, 25 bp, Homo sapien
cataggctctcgtaaactgatcttc

SEQ ID NO: 2513304 - DNA, 25 bp, Homo sapien
ttccacagacggcttcccagatttc

SEQ ID NO: 2513305 - DNA, 25 bp, Homo sapien
ctcaaagtcataggctctcgtaaac

SEQ ID NO: 2513306 - DNA, 25 bp, Homo sapien
ggctctcgtaaactgatcttccaca

SEQ ID NO: 2513307 - DNA, 25 bp, Homo sapien
acaactcctccacaagcgcgcttca

SEQ ID NO: 2513308 - DNA, 25 bp, Homo sapien
tggtcgtcgacaggcgtcctccaca

SEQ ID NO: 2513309 - DNA, 25 bp, Homo sapien
cgcaatggccgaggaccagttactg

SEQ ID NO: 2513310 - DNA, 25 bp, Homo sapien
gaccagttactggtcgtcgacaggc

SEQ ID NO: 2513311 - DNA, 25 bp, Homo sapien
tgaggtggccccttctccgcgacgc

SEQ ID NO: 2513312 - DNA, 25 bp, Homo sapien
ctgaggtggccccttctccgcgacg

SEQ ID NO: 2513313 - DNA, 25 bp, Homo sapien
gaggtggccccttctccgcgacgct

SEQ ID NO: 2513314 - DNA, 25 bp, Homo sapien
aggtggccccttctccgcgacgctt

SEQ ID NO: 2513315 - DNA, 25 bp, Homo sapien
ggagaaaagccagtcccgcctcatc

SEQ ID NO: 2513316 - DNA, 25 bp, Homo sapien
gacgcagagcgcaggcgtgaactgg

SEQ ID NO: 2513317 - DNA, 25 bp, Homo sapien
gcctcatccggacacgtcgctgatt

SEQ ID NO: 2513318 - DNA, 25 bp, Homo sapien
ctgaggcaagctgggattcgcacag

SEQ ID NO: 2513319 - DNA, 25 bp, Homo sapien
cctttgaaattagacctgcacgtga

SEQ ID NO: 2513320 - DNA, 25 bp, Homo sapien
cacaggtggcctgcaataatttact

SEQ ID NO: 2513321 - DNA, 25 bp, Homo sapien
aaccaactgagagagatagctactg

SEQ ID NO: 2513322 - DNA, 25 bp, Homo sapien
aatactaattctcggctgggtgcac

SEQ ID NO: 2513323 - DNA, 25 bp, Homo sapien
gactagcttctttgtgtatcctcct

SEQ ID NO: 2513324 - DNA, 25 bp, Homo sapien
ctatactctgattcgattgggacta

SEQ ID NO: 2513325 - DNA, 25 bp, Homo sapien
gggaaatatcttccgcttaagtgca

SEQ ID NO: 2513326 - DNA, 25 bp, Homo sapien
cctccttctgggaaatatcttccgc

SEQ ID NO: 2513327 - DNA, 25 bp, Homo sapien
tattccttcatctgtaggaggaggc

SEQ ID NO: 2513328 - DNA, 25 bp, Homo sapien
tccttcatctgtaggaggaggcagg

SEQ ID NO: 2513329 - DNA, 25 bp, Homo sapien
tttgcccaaacataagacaccacgg

SEQ ID NO: 2513330 - DNA, 25 bp, Homo sapien
aagacaccacggtttgaatgatgag

SEQ ID NO: 2513331 - DNA, 25 bp, Homo sapien
acaatggtaacagacatcaagaaca

SEQ ID NO: 2513332 - DNA, 25 bp, Homo sapien
ggaacaatggtaacagacatcaaga

SEQ ID NO: 2513333 - DNA, 25 bp, Homo sapien
caggaacaatggtaacagacatcaa

SEQ ID NO: 2513334 - DNA, 25 bp, Homo sapien
ggtaacagacatcaagaacaagatg

SEQ ID NO: 2513335 - DNA, 25 bp, Homo sapien
gaagctctcagtacttaggtgcttg

SEQ ID NO: 2513336 - DNA, 25 bp, Homo sapien
tacgtttcatttgagtgacagctag

SEQ ID NO: 2513337 - DNA, 25 bp, Homo sapien
caacttggtgtacgtttcatttgag

SEQ ID NO: 2513338 - DNA, 25 bp, Homo sapien
tagaaaagctccactcaatagtcac

SEQ ID NO: 2513339 - DNA, 25 bp, Homo sapien
cagaggaaagcccaggtgtagaggg

SEQ ID NO: 2513340 - DNA, 25 bp, Homo sapien
agaggaaagcccaggtgtagagggg

SEQ ID NO: 2513341 - DNA, 25 bp, Homo sapien
tgtacatgcatgcagaggaaagccc

SEQ ID NO: 2513342 - DNA, 25 bp, Homo sapien
cataatcaatgttgctagtacacaa

SEQ ID NO: 2513343 - DNA, 25 bp, Homo sapien
cttcaatttgtctcgataagccctc

SEQ ID NO: 2513344 - DNA, 25 bp, Homo sapien
tagtaaacataatcaatgttgctag

SEQ ID NO: 2513345 - DNA, 25 bp, Homo sapien
tgctagtacacaatgggtccaaaac

SEQ ID NO: 2513346 - DNA, 25 bp, Homo sapien
cttctcaccacttctgagattctgc

SEQ ID NO: 2513347 - DNA, 25 bp, Homo sapien
tatactaaacaatcccttcacttac

SEQ ID NO: 2513348 - DNA, 25 bp, Homo sapien
gacctcatgtacctctcattttata

SEQ ID NO: 2513349 - DNA, 25 bp, Homo sapien
cacttacacattggtcaacaaacag

SEQ ID NO: 2513350 - DNA, 25 bp, Homo sapien
actatcagctcagcacataccgacc

SEQ ID NO: 2513351 - DNA, 25 bp, Homo sapien
tgagaacagccttcactgtctgagc

SEQ ID NO: 2513352 - DNA, 25 bp, Homo sapien
tcatgcatatgaaggaaacggtttc

SEQ ID NO: 2513353 - DNA, 25 bp, Homo sapien
tgtggtcaatgttgtcattcaggca

SEQ ID NO: 2513354 - DNA, 25 bp, Homo sapien
gattcatagaagtccctgagaacag

SEQ ID NO: 2513355 - DNA, 25 bp, Homo sapien
tccaaacgagaacagggtttataga

SEQ ID NO: 2513356 - DNA, 25 bp, Homo sapien
ctccaaacgagaacagggtttatag

SEQ ID NO: 2513357 - DNA, 25 bp, Homo sapien
aaaatgtctgtaaggttcacatctt

SEQ ID NO: 2513358 - DNA, 25 bp, Homo sapien
ttaaaatgtctgtaaggttcacatc

SEQ ID NO: 2513359 - DNA, 25 bp, Homo sapien
aaaatatagtttatatgccagtgtc

SEQ ID NO: 2513360 - DNA, 25 bp, Homo sapien
aaaaaaatatagtttatatgccagt

SEQ ID NO: 2513361 - DNA, 25 bp, Homo sapien
aatatagtttatatgccagtgtctt

SEQ ID NO: 2513362 - DNA, 25 bp, Homo sapien
aaaaaatatagtttatatgccagtg

SEQ ID NO: 2513363 - DNA, 25 bp, Homo sapien
tctgcatgggggaccctatctcaac

SEQ ID NO: 2513364 - DNA, 25 bp, Homo sapien
atctcaacttgcaactcctatctct

SEQ ID NO: 2513365 - DNA, 25 bp, Homo sapien
gttcttcgaagttcaggctcatccc

SEQ ID NO: 2513366 - DNA, 25 bp, Homo sapien
cagctccaacactgcctgcactgtt

SEQ ID NO: 2513367 - DNA, 25 bp, Homo sapien
tagggttttttcttatgtcatccaa

SEQ ID NO: 2513368 - DNA, 25 bp, Homo sapien
catccaactggccaaccacatgaga

SEQ ID NO: 2513369 - DNA, 25 bp, Homo sapien
cacatgagaaacgttggtacgaatc

SEQ ID NO: 2513370 - DNA, 25 bp, Homo sapien
tggtacgaatcattttaaaagcgat

SEQ ID NO: 2513371 - DNA, 25 bp, Homo sapien
tactggtttacagtttgttactaga

SEQ ID NO: 2513372 - DNA, 25 bp, Homo sapien
ggattttgtcagttactggtttaca

SEQ ID NO: 2513373 - DNA, 25 bp, Homo sapien
ctggtttacagtttgttactagact

SEQ ID NO: 2513374 - DNA, 25 bp, Homo sapien
tgtcagttactggtttacagtttgt

SEQ ID NO: 2513375 - DNA, 25 bp, Homo sapien
gattcctatctgctaatcccactag

SEQ ID NO: 2513376 - DNA, 25 bp, Homo sapien
gctaatcccactagagcaagttcct

SEQ ID NO: 2513377 - DNA, 25 bp, Homo sapien
ttcttgacctgctgattcctatctg

SEQ ID NO: 2513378 - DNA, 25 bp, Homo sapien
actagagcaagttcctttaaggctg

SEQ ID NO: 2513379 - DNA, 25 bp, Homo sapien
agctgcgtgatatcagcaggaagca

SEQ ID NO: 2513380 - DNA, 25 bp, Homo sapien
tttttgagcaatttattagcatgtg

SEQ ID NO: 2513381 - DNA, 25 bp, Homo sapien
tcatagtaggattcctgagttggtg

SEQ ID NO: 2513382 - DNA, 25 bp, Homo sapien
tagtaggattcctgagttggtggaa

SEQ ID NO: 2513383 - DNA, 25 bp, Homo sapien
tatcctcagaatggcgcactttgtg

SEQ ID NO: 2513384 - DNA, 25 bp, Homo sapien
gcagttcgtgaattctggtagccag

SEQ ID NO: 2513385 - DNA, 25 bp, Homo sapien
cttgagatatattcagtggctgcac

SEQ ID NO: 2513386 - DNA, 25 bp, Homo sapien
tggctgcactgcactcatgagataa

SEQ ID NO: 2513387 - DNA, 25 bp, Homo sapien
ggactttccgcgatgtgaatccaaa

SEQ ID NO: 2513388 - DNA, 25 bp, Homo sapien
ccggtcaatcatgtgaggcatgtga

SEQ ID NO: 2513389 - DNA, 25 bp, Homo sapien
tcttgcataacaatccggtcaatca

SEQ ID NO: 2513390 - DNA, 25 bp, Homo sapien
tgtgagcagggactttccgcgatgt

SEQ ID NO: 2513391 - DNA, 25 bp, Homo sapien
tatgccaattgtgtcttcaatgact

SEQ ID NO: 2513392 - DNA, 25 bp, Homo sapien
agtgaagtatgccaattgtgtcttc

SEQ ID NO: 2513393 - DNA, 25 bp, Homo sapien
atttttgctatcagtgaagtatgcc

SEQ ID NO: 2513394 - DNA, 25 bp, Homo sapien
ctcccagtatttttgctatcagtga

SEQ ID NO: 2513395 - DNA, 25 bp, Homo sapien
aaatggtagctataatgatattatc

SEQ ID NO: 2513396 - DNA, 25 bp, Homo sapien
aaagcatttagttccatggccggca

SEQ ID NO: 2513397 - DNA, 25 bp, Homo sapien
ggtagctataatgatattatcatga

SEQ ID NO: 2513398 - DNA, 25 bp, Homo sapien
cctgagcatgagaaagaatgaggct

SEQ ID NO: 2513399 - DNA, 25 bp, Homo sapien
gacactcctaagctgtttggcaaga

SEQ ID NO: 2513400 - DNA, 25 bp, Homo sapien
tcactgcaggaaaagtcaacctctg

SEQ ID NO: 2513401 - DNA, 25 bp, Homo sapien
tgtggagccaccaaactgtcatttg

SEQ ID NO: 2513402 - DNA, 25 bp, Homo sapien
cagtaacgcctatgtgattttcagc

SEQ ID NO: 2513403 - DNA, 25 bp, Homo sapien
tggattgtcactataggcaccttca

SEQ ID NO: 2513404 - DNA, 25 bp, Homo sapien
ctcaactgggcgtcttttggaagga

SEQ ID NO: 2513405 - DNA, 25 bp, Homo sapien
caaaaaggatttccgcctctggaag

SEQ ID NO: 2513406 - DNA, 25 bp, Homo sapien
cacttgttggcaatagaagcatgtc

SEQ ID NO: 2513407 - DNA, 25 bp, Homo sapien
attctttgagtctgagttttcactt

SEQ ID NO: 2513408 - DNA, 25 bp, Homo sapien
ggccatgctaatgcctaaactgttc

SEQ ID NO: 2513409 - DNA, 25 bp, Homo sapien
gggccatgctaatgcctaaactgtt

SEQ ID NO: 2513410 - DNA, 25 bp, Homo sapien
gggcttatttcactatctgaggcag

SEQ ID NO: 2513411 - DNA, 25 bp, Homo sapien
gatatcctaatacaacagttactgg

SEQ ID NO: 2513412 - DNA, 25 bp, Homo sapien
taccatgaaatagtgatcctgactc

SEQ ID NO: 2513413 - DNA, 25 bp, Homo sapien
tctgaggcagtcacaataattacca

SEQ ID NO: 2513414 - DNA, 25 bp, Homo sapien
aacaccagactgcaacaataacagg

SEQ ID NO: 2513415 - DNA, 25 bp, Homo sapien
tgcaaggctggtaaagggatacaca

SEQ ID NO: 2513416 - DNA, 25 bp, Homo sapien
cataactagtttgaatgcaaggctg

SEQ ID NO: 2513417 - DNA, 25 bp, Homo sapien
tcaaaactctctctacctgtcaagg

SEQ ID NO: 2513418 - DNA, 25 bp, Homo sapien
ttggtcacagaacttatcagcgagc

SEQ ID NO: 2513419 - DNA, 25 bp, Homo sapien
caatatagcgactccctccactgtt

SEQ ID NO: 2513420 - DNA, 25 bp, Homo sapien
gaattcgcacatccctgattacagt

SEQ ID NO: 2513421 - DNA, 25 bp, Homo sapien
caagacattgcatgcttggtcacag

SEQ ID NO: 2513422 - DNA, 25 bp, Homo sapien
cataaagaatgtttggttaagtcta

SEQ ID NO: 2513423 - DNA, 25 bp, Homo sapien
gtttggttaagtctatagcacatgt

SEQ ID NO: 2513424 - DNA, 25 bp, Homo sapien
aagaatgtttggttaagtctatagc

SEQ ID NO: 2513425 - DNA, 25 bp, Homo sapien
gaatgtttggttaagtctatagcac

SEQ ID NO: 2513426 - DNA, 25 bp, Homo sapien
tccataaaaatgaacgaattacagt

SEQ ID NO: 2513427 - DNA, 25 bp, Homo sapien
ccataaaaatgaacgaattacagtt

SEQ ID NO: 2513428 - DNA, 25 bp, Homo sapien
cataaaaatgaacgaattacagttt

SEQ ID NO: 2513429 - DNA, 25 bp, Homo sapien
aatgaacgaattacagtttaacaca

SEQ ID NO: 2513430 - DNA, 25 bp, Homo sapien
gcagccctcggcacagtttggcaca

SEQ ID NO: 2513431 - DNA, 25 bp, Homo sapien
tagccatccttaatccaggaacctg

SEQ ID NO: 2513432 - DNA, 25 bp, Homo sapien
caccatcccaatcgcaggctgaatt

SEQ ID NO: 2513433 - DNA, 25 bp, Homo sapien
tacaagccttgtcacaatagccatc

SEQ ID NO: 2513434 - DNA, 25 bp, Homo sapien
taaacttctgggacagcccttcgat

SEQ ID NO: 2513435 - DNA, 25 bp, Homo sapien
gaatgtgactttcaatagcaggtga

SEQ ID NO: 2513436 - DNA, 25 bp, Homo sapien
gcccttcgatgcgatgaatgtgact

SEQ ID NO: 2513437 - DNA, 25 bp, Homo sapien
gaactaaaggtaggcaagtggctca

SEQ ID NO: 2513438 - DNA, 25 bp, Homo sapien
tcagccaggatggaatctgcccgtt

SEQ ID NO: 2513439 - DNA, 25 bp, Homo sapien
catggtgcatgcctctcgatagatc

SEQ ID NO: 2513440 - DNA, 25 bp, Homo sapien
gaggattgtcaaggttcagccagga

SEQ ID NO: 2513441 - DNA, 25 bp, Homo sapien
gaaaatattccgaacccatggtgca

SEQ ID NO: 2513442 - DNA, 25 bp, Homo sapien
tggctgatggcgctcagatcccata

SEQ ID NO: 2513443 - DNA, 25 bp, Homo sapien
gaagcgctacactggcctctgaata

SEQ ID NO: 2513444 - DNA, 25 bp, Homo sapien
gggttattcagttttagaagcgcta

SEQ ID NO: 2513445 - DNA, 25 bp, Homo sapien
taataaatatgcaggacttatggtc

SEQ ID NO: 2513446 - DNA, 25 bp, Homo sapien
tctttaatcttgaaatggtaagaca

SEQ ID NO: 2513447 - DNA, 25 bp, Homo sapien
ctttaatcttgaaatggtaagacaa

SEQ ID NO: 2513448 - DNA, 25 bp, Homo sapien
cctgaagtgcttccatgggaaaact

SEQ ID NO: 2513449 - DNA, 25 bp, Homo sapien
actgcctgaagtgcttccatgggaa

SEQ ID NO: 2513450 - DNA, 25 bp, Homo sapien
tgaagtgcttccatgggaaaactac

SEQ ID NO: 2513451 - DNA, 25 bp, Homo sapien
tgcctgaagtgcttccatgggaaaa

SEQ ID NO: 2513452 - DNA, 25 bp, Homo sapien
tctaagcgtgaacatcacaaacatc

SEQ ID NO: 2513453 - DNA, 25 bp, Homo sapien
tctgttctgactctgtatcacacaa

SEQ ID NO: 2513454 - DNA, 25 bp, Homo sapien
caaacatcaagttccacaaacaggc

SEQ ID NO: 2513455 - DNA, 25 bp, Homo sapien
gggcaatcataaatctaagcgtgaa

SEQ ID NO: 2513456 - DNA, 25 bp, Homo sapien
tcttttacttagtgagtgcctggca

SEQ ID NO: 2513457 - DNA, 25 bp, Homo sapien
gcagtttcctgagcgtatgtagtcc

SEQ ID NO: 2513458 - DNA, 25 bp, Homo sapien
ttgcctcagcatatgtgccgggtgc

SEQ ID NO: 2513459 - DNA, 25 bp, Homo sapien
gattagtagtctgcctgggtccctg

SEQ ID NO: 2513460 - DNA, 25 bp, Homo sapien
cttatacattttcacgaagtcccga

SEQ ID NO: 2513461 - DNA, 25 bp, Homo sapien
tatacattttcacgaagtcccgaag

SEQ ID NO: 2513462 - DNA, 25 bp, Homo sapien
cctgcttatacattttcacgaagtc

SEQ ID NO: 2513463 - DNA, 25 bp, Homo sapien
tgcttatacattttcacgaagtccc

SEQ ID NO: 2513464 - DNA, 25 bp, Homo sapien
tcggaaggcagtgggcgaagctgag

SEQ ID NO: 2513465 - DNA, 25 bp, Homo sapien
ggctgcaggccagtttcaggcccag

SEQ ID NO: 2513466 - DNA, 25 bp, Homo sapien
ttgcgaaggtccagggtcggaaggc

SEQ ID NO: 2513467 - DNA, 25 bp, Homo sapien
tggcttggcgtaacctcgaagaagg

SEQ ID NO: 2513468 - DNA, 25 bp, Homo sapien
gataagaaggtatatcactaaaact

SEQ ID NO: 2513469 - DNA, 25 bp, Homo sapien
taagaaggtatatcactaaaactat

SEQ ID NO: 2513470 - DNA, 25 bp, Homo sapien
ctttgtttgataagaaggtatatca

SEQ ID NO: 2513471 - DNA, 25 bp, Homo sapien
gtttgataagaaggtatatcactaa

SEQ ID NO: 2513472 - DNA, 25 bp, Homo sapien
tagtgagaatctgtagggcagagct

SEQ ID NO: 2513473 - DNA, 25 bp, Homo sapien
tacccgtggcctagtgagaatctgt

SEQ ID NO: 2513474 - DNA, 25 bp, Homo sapien
gcctagtgagaatctgtagggcaga

SEQ ID NO: 2513475 - DNA, 25 bp, Homo sapien
cctgagatacccgtggcctagtgag

SEQ ID NO: 2513476 - DNA, 25 bp, Homo sapien
cacatccgaaactgagctctgggtc

SEQ ID NO: 2513477 - DNA, 25 bp, Homo sapien
cctcctgaatagcttgtaagtcacc

SEQ ID NO: 2513478 - DNA, 25 bp, Homo sapien
gtaagtcaccaagtgatgttgagtg

SEQ ID NO: 2513479 - DNA, 25 bp, Homo sapien
ggtctccttccaaaagacacttgct

SEQ ID NO: 2513480 - DNA, 25 bp, Homo sapien
cattgtaggagctcgtctacggcca

SEQ ID NO: 2513481 - DNA, 25 bp, Homo sapien
gaatagcaggcatcttgacgtaagg

SEQ ID NO: 2513482 - DNA, 25 bp, Homo sapien
tcaggtaagctaaacccagtggcag

SEQ ID NO: 2513483 - DNA, 25 bp, Homo sapien
catgttaaggaaaaggcacgtccca

SEQ ID NO: 2513484 - DNA, 25 bp, Homo sapien
tggaaatccactcaggaaagccaaa

SEQ ID NO: 2513485 - DNA, 25 bp, Homo sapien
tccttgaatgttggtggaaatccac

SEQ ID NO: 2513486 - DNA, 25 bp, Homo sapien
aaagccaaatcttgcattagcacta

SEQ ID NO: 2513487 - DNA, 25 bp, Homo sapien
aatccagggacttctttatctgttg

SEQ ID NO: 2513488 - DNA, 25 bp, Homo sapien
atttcctttaagcagtccagagtgg

SEQ ID NO: 2513489 - DNA, 25 bp, Homo sapien
gcccctccatactgtctgtctgcta

SEQ ID NO: 2513490 - DNA, 25 bp, Homo sapien
caagtagcccctccatactgtctgt

SEQ ID NO: 2513491 - DNA, 25 bp, Homo sapien
gctatttcctttaagcagtccagag

SEQ ID NO: 2513492 - DNA, 25 bp, Homo sapien
ggggctggacgaagcaggggatgta

SEQ ID NO: 2513493 - DNA, 25 bp, Homo sapien
aagtggggctggacgaagcagggga

SEQ ID NO: 2513494 - DNA, 25 bp, Homo sapien
agtggggctggacgaagcaggggat

SEQ ID NO: 2513495 - DNA, 25 bp, Homo sapien
tggggctggacgaagcaggggatgt

SEQ ID NO: 2513496 - DNA, 25 bp, Homo sapien
caaatagagacaatccatgcagagg

SEQ ID NO: 2513497 - DNA, 25 bp, Homo sapien
agaagacgcaggttatgggctcagc

SEQ ID NO: 2513498 - DNA, 25 bp, Homo sapien
ttaagctgggaggtatgacactgat

SEQ ID NO: 2513499 - DNA, 25 bp, Homo sapien
acaagaggctagagcagaagacgca

SEQ ID NO: 2513500 - DNA, 25 bp, Homo sapien
agagtgccagcacgcttgggttttg

SEQ ID NO: 2513501 - DNA, 25 bp, Homo sapien
tttatgccaggaattaccattttaa

SEQ ID NO: 2513502 - DNA, 25 bp, Homo sapien
tgagggtactcttctaggttgcaga

SEQ ID NO: 2513503 - DNA, 25 bp, Homo sapien
agatggcatcttctcataacgtcac

SEQ ID NO: 2513504 - DNA, 25 bp, Homo sapien
acatccaatgataacatgattttaa

SEQ ID NO: 2513505 - DNA, 25 bp, Homo sapien
aacatccaatgataacatgatttta

SEQ ID NO: 2513506 - DNA, 25 bp, Homo sapien
cattggcaccttaatgcagtgtgtt

SEQ ID NO: 2513507 - DNA, 25 bp, Homo sapien
catccttagtactgtcaaaaacaac

SEQ ID NO: 2513508 - DNA, 25 bp, Homo sapien
acaacaactgagacattggtagaag

SEQ ID NO: 2513509 - DNA, 25 bp, Homo sapien
tgggtccaggacaagcattggcacc

SEQ ID NO: 2513510 - DNA, 25 bp, Homo sapien
ctcttcttagtaggttccgttgtgt

SEQ ID NO: 2513511 - DNA, 25 bp, Homo sapien
caagatctgtgccattcacccaggt

SEQ ID NO: 2513512 - DNA, 25 bp, Homo sapien
gctgtagttccttcagtagttcaag

SEQ ID NO: 2513513 - DNA, 25 bp, Homo sapien
tctctgacctgctgtagttccttca

SEQ ID NO: 2513514 - DNA, 25 bp, Homo sapien
caggtgtaaacaacgtcaatcggca

SEQ ID NO: 2513515 - DNA, 25 bp, Homo sapien
ctgatactactttagatcagcagtg

SEQ ID NO: 2513516 - DNA, 25 bp, Homo sapien
tactactttagatcagcagtgtcca

SEQ ID NO: 2513517 - DNA, 25 bp, Homo sapien
gatactactttagatcagcagtgtc

SEQ ID NO: 2513518 - DNA, 25 bp, Homo sapien
tactttagatcagcagtgtccaatc

SEQ ID NO: 2513519 - DNA, 25 bp, Homo sapien
gctgtcaacagaattccggccaggg

SEQ ID NO: 2513520 - DNA, 25 bp, Homo sapien
gaatggcggcactaagaagcttggc

SEQ ID NO: 2513521 - DNA, 25 bp, Homo sapien
taagcagcaagagtgaccaatggag

SEQ ID NO: 2513522 - DNA, 25 bp, Homo sapien
tcagaaaccgctgtgtagtagccac

SEQ ID NO: 2513523 - DNA, 25 bp, Homo sapien
aaatatcttacggaatacttcatga

SEQ ID NO: 2513524 - DNA, 25 bp, Homo sapien
aaaatatcttacggaatacttcatg

SEQ ID NO: 2513525 - DNA, 25 bp, Homo sapien
aatatcttacggaatacttcatgaa

SEQ ID NO: 2513526 - DNA, 25 bp, Homo sapien
tctataactcagaaagaccccttaa

SEQ ID NO: 2513527 - DNA, 25 bp, Homo sapien
tcatgacttacgatttaggtccaaa

SEQ ID NO: 2513528 - DNA, 25 bp, Homo sapien
ttacaggatggctatttcatgactt

SEQ ID NO: 2513529 - DNA, 25 bp, Homo sapien
tcagatgggcatactcctgagtaaa

SEQ ID NO: 2513530 - DNA, 25 bp, Homo sapien
tattgatctcggctccattccagaa

SEQ ID NO: 2513531 - DNA, 25 bp, Homo sapien
aacaaaacatggtattgatctcggc

SEQ ID NO: 2513532 - DNA, 25 bp, Homo sapien
gaaaggactttccagcaatattgtc

SEQ ID NO: 2513533 - DNA, 25 bp, Homo sapien
tgtctctataggaatcaaacaaaac

SEQ ID NO: 2513534 - DNA, 25 bp, Homo sapien
gaaacgttttcttcgcatcaaagac

SEQ ID NO: 2513535 - DNA, 25 bp, Homo sapien
catacatcgtgttagatccaggtga

SEQ ID NO: 2513536 - DNA, 25 bp, Homo sapien
tcatgtattcacttactgcctacca

SEQ ID NO: 2513537 - DNA, 25 bp, Homo sapien
tcattagaattgctagagaaatggg

SEQ ID NO: 2513538 - DNA, 25 bp, Homo sapien
gaaaatgcgctttaacgtgggtcca

SEQ ID NO: 2513539 - DNA, 25 bp, Homo sapien
tcatcgatgagaaaggatatctgcc

SEQ ID NO: 2513540 - DNA, 25 bp, Homo sapien
gagatgcacctgcagaccaaaaggc

SEQ ID NO: 2513541 - DNA, 25 bp, Homo sapien
ggatgcattgtctctgaagtcagga

SEQ ID NO: 2513542 - DNA, 25 bp, Homo sapien
gagactcccggacataacaccatga

SEQ ID NO: 2513543 - DNA, 25 bp, Homo sapien
tccagttacggcagatggagactcc

SEQ ID NO: 2513544 - DNA, 25 bp, Homo sapien
aatgggaaactgtgcctacctctga

SEQ ID NO: 2513545 - DNA, 25 bp, Homo sapien
tcaaaagggcccgaacagaatggga

SEQ ID NO: 2513546 - DNA, 25 bp, Homo sapien
tcaaggagctgacattcctgttaag

SEQ ID NO: 2513547 - DNA, 25 bp, Homo sapien
tttgcatgaaatgatgtaggactac

SEQ ID NO: 2513548 - DNA, 25 bp, Homo sapien
catatttttccacggagagagagct

SEQ ID NO: 2513549 - DNA, 25 bp, Homo sapien
taataaacactgttagacaaaagga

SEQ ID NO: 2513550 - DNA, 25 bp, Homo sapien
taggcaaagcaatcctgaaagactg

SEQ ID NO: 2513551 - DNA, 25 bp, Homo sapien
taaggcagcaataaacaatgttagc

SEQ ID NO: 2513552 - DNA, 25 bp, Homo sapien
gtccaaagccaaacaataaggcagc

SEQ ID NO: 2513553 - DNA, 25 bp, Homo sapien
gatgtcagagcattgcttatgccca

SEQ ID NO: 2513554 - DNA, 25 bp, Homo sapien
attcatttgacaagggtttaataat

SEQ ID NO: 2513555 - DNA, 25 bp, Homo sapien
ttcatttgacaagggtttaataatc

SEQ ID NO: 2513556 - DNA, 25 bp, Homo sapien
caagaagcacacgtagagcccatac

SEQ ID NO: 2513557 - DNA, 25 bp, Homo sapien
atggtgacaacgacgcccaagaagc

SEQ ID NO: 2513558 - DNA, 25 bp, Homo sapien
aacgacgcccaagaagcacacgtag

SEQ ID NO: 2513559 - DNA, 25 bp, Homo sapien
agacgatggtgacaacgacgcccaa

SEQ ID NO: 2513560 - DNA, 25 bp, Homo sapien
ggacaggcaggtataggtctgtctc

SEQ ID NO: 2513561 - DNA, 25 bp, Homo sapien
ctgtctctgcaggagcttgaacagc

SEQ ID NO: 2513562 - DNA, 25 bp, Homo sapien
gtctctgcaggagcttgaacagcat

SEQ ID NO: 2513563 - DNA, 25 bp, Homo sapien
caggcaggtataggtctgtctctgc

SEQ ID NO: 2513564 - DNA, 25 bp, Homo sapien
cgcgcgcaggtcacagcctccgggc

SEQ ID NO: 2513565 - DNA, 25 bp, Homo sapien
gccgcccgggtctggccgggcgaga

SEQ ID NO: 2513566 - DNA, 25 bp, Homo sapien
agcgagccgccattcaggggccccg

SEQ ID NO: 2513567 - DNA, 25 bp, Homo sapien
ctcattgcagctccggcgacggacg

SEQ ID NO: 2513568 - DNA, 25 bp, Homo sapien
atgtaatcatcttcacatcaatgat

SEQ ID NO: 2513569 - DNA, 25 bp, Homo sapien
aatgtaatcatcttcacatcaatga

SEQ ID NO: 2513570 - DNA, 25 bp, Homo sapien
aaatgtaatcatcttcacatcaatg

SEQ ID NO: 2513571 - DNA, 25 bp, Homo sapien
ttctgtgcctccatcaatggcacca

SEQ ID NO: 2513572 - DNA, 25 bp, Homo sapien
taacttctgtgcctccatcaatggc

SEQ ID NO: 2513573 - DNA, 25 bp, Homo sapien
tctgtgcctccatcaatggcaccat

SEQ ID NO: 2513574 - DNA, 25 bp, Homo sapien
aacttctgtgcctccatcaatggca

SEQ ID NO: 2513575 - DNA, 25 bp, Homo sapien
taccctttccatagaaccccatcca

SEQ ID NO: 2513576 - DNA, 25 bp, Homo sapien
ttccatagaaccccatccaacagcg

SEQ ID NO: 2513577 - DNA, 25 bp, Homo sapien
ctctaccctttccatagaaccccat

SEQ ID NO: 2513578 - DNA, 25 bp, Homo sapien
cctttccatagaaccccatccaaca

SEQ ID NO: 2513579 - DNA, 25 bp, Homo sapien
tcgtactctgctcgcgtgtatacat

SEQ ID NO: 2513580 - DNA, 25 bp, Homo sapien
actctgctcgcgtgtatacatactc

SEQ ID NO: 2513581 - DNA, 25 bp, Homo sapien
gtactctgctcgcgtgtatacatac

SEQ ID NO: 2513582 - DNA, 25 bp, Homo sapien
actcgtactctgctcgcgtgtatac

SEQ ID NO: 2513583 - DNA, 25 bp, Homo sapien
tccccagtatggcatttagaatcag

SEQ ID NO: 2513584 - DNA, 25 bp, Homo sapien
tgatctagtgggttagcagaaaccc

SEQ ID NO: 2513585 - DNA, 25 bp, Homo sapien
ccggcccctgatggtctaatgtttt

SEQ ID NO: 2513586 - DNA, 25 bp, Homo sapien
ttggcaaatggctcttatacacatg

SEQ ID NO: 2513587 - DNA, 25 bp, Homo sapien
gactttcagtagctcaaatcgaggg

SEQ ID NO: 2513588 - DNA, 25 bp, Homo sapien
tgctactacgaaaccctgccccaga

SEQ ID NO: 2513589 - DNA, 25 bp, Homo sapien
tcagtagctcaaatcgagggaggga

SEQ ID NO: 2513590 - DNA, 25 bp, Homo sapien
ctgactttcagtagctcaaatcgag

SEQ ID NO: 2513591 - DNA, 25 bp, Homo sapien
cataaacggatttcctaggcacaac

SEQ ID NO: 2513592 - DNA, 25 bp, Homo sapien
caggcacagttaggccacccaaata

SEQ ID NO: 2513593 - DNA, 25 bp, Homo sapien
gtagagagactactgctgccaggct

SEQ ID NO: 2513594 - DNA, 25 bp, Homo sapien
cagtgtactgaatcaggcacccagg

SEQ ID NO: 2513595 - DNA, 25 bp, Homo sapien
atgtggctgtctgaggttcagaatt

SEQ ID NO: 2513596 - DNA, 25 bp, Homo sapien
tctgtgtttgctccgatgcctggca

SEQ ID NO: 2513597 - DNA, 25 bp, Homo sapien
tgtttgctccgatgcctggcatgtg

SEQ ID NO: 2513598 - DNA, 25 bp, Homo sapien
cttctcctctgtgtttgctccgatg

SEQ ID NO: 2513599 - DNA, 25 bp, Homo sapien
attagaattttcaaacgcgatttat

SEQ ID NO: 2513600 - DNA, 25 bp, Homo sapien
tgtgtttatgtgtatttaacatgcc

SEQ ID NO: 2513601 - DNA, 25 bp, Homo sapien
ctccagcttgaggttgaactgtctg

SEQ ID NO: 2513602 - DNA, 25 bp, Homo sapien
gctccagcttgaggttgaactgtct

SEQ ID NO: 2513603 - DNA, 25 bp, Homo sapien
tgctccagcttgaggttgaactgtc

SEQ ID NO: 2513604 - DNA, 25 bp, Homo sapien
tgtgctccagcttgaggttgaactg

SEQ ID NO: 2513605 - DNA, 25 bp, Homo sapien
tcttttggtagtcaaacagccacat

SEQ ID NO: 2513606 - DNA, 25 bp, Homo sapien
cgacatgccacatacggatggtcat

SEQ ID NO: 2513607 - DNA, 25 bp, Homo sapien
cccagtggaacagtctctcgacatg

SEQ ID NO: 2513608 - DNA, 25 bp, Homo sapien
agtggaacagtctctcgacatgcca

SEQ ID NO: 2513609 - DNA, 25 bp, Homo sapien
tctcgacatgccacatacggatggt

SEQ ID NO: 2513610 - DNA, 25 bp, Homo sapien
gagtgttagacagaagcaatgcctg

SEQ ID NO: 2513611 - DNA, 25 bp, Homo sapien
ttattagatgagtgttagacagaag

SEQ ID NO: 2513612 - DNA, 25 bp, Homo sapien
gcccaacctgcagactttcgaacgg

SEQ ID NO: 2513613 - DNA, 25 bp, Homo sapien
cgaacggtaaagcaaatagaaagag

SEQ ID NO: 2513614 - DNA, 25 bp, Homo sapien
tcattcagctatcaaccaaatgttt

SEQ ID NO: 2513615 - DNA, 25 bp, Homo sapien
cattcagctatcaaccaaatgttta

SEQ ID NO: 2513616 - DNA, 25 bp, Homo sapien
tctggactggaggtaagaggtaaag

SEQ ID NO: 2513617 - DNA, 25 bp, Homo sapien
gtttattgagtcctgttctggactg

SEQ ID NO: 2513618 - DNA, 25 bp, Homo sapien
tagaagccatcttccttgttcaggg

SEQ ID NO: 2513619 - DNA, 25 bp, Homo sapien
tcctactgtaggctggtcaggtcct

SEQ ID NO: 2513620 - DNA, 25 bp, Homo sapien
tgtgaccatgacaaggagagtgaag

SEQ ID NO: 2513621 - DNA, 25 bp, Homo sapien
tgtgacctagcatgaaaacagtggg

SEQ ID NO: 2513622 - DNA, 25 bp, Homo sapien
ctggatgaaaacaggatcaaagaaa

SEQ ID NO: 2513623 - DNA, 25 bp, Homo sapien
gtcaagccctttgtgttaagcaaga

SEQ ID NO: 2513624 - DNA, 25 bp, Homo sapien
agaagaaaggcccaagagcgagaca

SEQ ID NO: 2513625 - DNA, 25 bp, Homo sapien
tctaagtgaatacggaagaccttgg

SEQ ID NO: 2513626 - DNA, 25 bp, Homo sapien
cattcgtagtgggtgtaatgccagg

SEQ ID NO: 2513627 - DNA, 25 bp, Homo sapien
gcagcccatgtagacagcttcggag

SEQ ID NO: 2513628 - DNA, 25 bp, Homo sapien
tcaaatcctagagcataaacccatg

SEQ ID NO: 2513629 - DNA, 25 bp, Homo sapien
ggccaagtgagatcagccctcaagg

SEQ ID NO: 2513630 - DNA, 25 bp, Homo sapien
cccatgtagacagcttcggagggca

SEQ ID NO: 2513631 - DNA, 25 bp, Homo sapien
acacccctaccgctgccatttgggc

SEQ ID NO: 2513632 - DNA, 25 bp, Homo sapien
agctgcctcccctctatgtgtttag

SEQ ID NO: 2513633 - DNA, 25 bp, Homo sapien
ggctcagtggcaggtacctctgcaa

SEQ ID NO: 2513634 - DNA, 25 bp, Homo sapien
tgttattagaacatgtccgacaccc

SEQ ID NO: 2513635 - DNA, 25 bp, Homo sapien
ctttaagacgcatcataaatggttt

SEQ ID NO: 2513636 - DNA, 25 bp, Homo sapien
gacagagatacacctttgtaagaaa

SEQ ID NO: 2513637 - DNA, 25 bp, Homo sapien
agagtttgacagagatacacctttg

SEQ ID NO: 2513638 - DNA, 25 bp, Homo sapien
ttaagacgcatcataaatggttttc

SEQ ID NO: 2513639 - DNA, 25 bp, Homo sapien
ggacctgtggtggaatgaatccata

SEQ ID NO: 2513640 - DNA, 25 bp, Homo sapien
tgcctcacttcgagcagacttttgt

SEQ ID NO: 2513641 - DNA, 25 bp, Homo sapien
tgttctcggcgctcctcacgatgga

SEQ ID NO: 2513642 - DNA, 25 bp, Homo sapien
agacttttgttctcggcgctcctca

SEQ ID NO: 2513643 - DNA, 25 bp, Homo sapien
taaaggctggtcaagtgcagcagtg

SEQ ID NO: 2513644 - DNA, 25 bp, Homo sapien
gtgagagtggagaaggaagaaaaaa

SEQ ID NO: 2513645 - DNA, 25 bp, Homo sapien
gcagcagtgagagtggagaaggaag

SEQ ID NO: 2513646 - DNA, 25 bp, Homo sapien
aaaggctggtcaagtgcagcagtga

SEQ ID NO: 2513647 - DNA, 25 bp, Homo sapien
aaacaccactgcactcggacaagcc

SEQ ID NO: 2513648 - DNA, 25 bp, Homo sapien
tttgcctctgaacctccagagcgag

SEQ ID NO: 2513649 - DNA, 25 bp, Homo sapien
tgattggtgtctccagaaagcccca

SEQ ID NO: 2513650 - DNA, 25 bp, Homo sapien
cacagcctcagagtggcttttgcct

SEQ ID NO: 2513651 - DNA, 25 bp, Homo sapien
gaggacactgtgatgggccacagcc

SEQ ID NO: 2513652 - DNA, 25 bp, Homo sapien
tctcctcttgcaatctggctatggg

SEQ ID NO: 2513653 - DNA, 25 bp, Homo sapien
taggaatggatgggctaggcagggc

SEQ ID NO: 2513654 - DNA, 25 bp, Homo sapien
agattagctaccatgaggttttttg

SEQ ID NO: 2513655 - DNA, 25 bp, Homo sapien
gcagattagctaccatgaggttttt

SEQ ID NO: 2513656 - DNA, 25 bp, Homo sapien
gagtagcccaaggagagtacacaga

SEQ ID NO: 2513657 - DNA, 25 bp, Homo sapien
gaggaaccagagaaggcatagctat

SEQ ID NO: 2513658 - DNA, 25 bp, Homo sapien
agtacacagattgggcagagtagcc

SEQ ID NO: 2513659 - DNA, 25 bp, Homo sapien
cctgctgagtagaagaggtagccac

SEQ ID NO: 2513660 - DNA, 25 bp, Homo sapien
tttggaggtaaatgtgtgaaaccag

SEQ ID NO: 2513661 - DNA, 25 bp, Homo sapien
cacgtggcagctgttaagtgctctt

SEQ ID NO: 2513662 - DNA, 25 bp, Homo sapien
cccactgtgcgaaggagaacctaga

SEQ ID NO: 2513663 - DNA, 25 bp, Homo sapien
gtatgacggtcatgttgtttcagcc

SEQ ID NO: 2513664 - DNA, 25 bp, Homo sapien
ctggggatccacatgaggcgggatg

SEQ ID NO: 2513665 - DNA, 25 bp, Homo sapien
cacagcaactcatgacaggcctcac

SEQ ID NO: 2513666 - DNA, 25 bp, Homo sapien
gatgagcagagctgcgtcctttgga

SEQ ID NO: 2513667 - DNA, 25 bp, Homo sapien
agcagagctgcgtcctttggagcca

SEQ ID NO: 2513668 - DNA, 25 bp, Homo sapien
gagcagagctgcgtcctttggagcc

SEQ ID NO: 2513669 - DNA, 25 bp, Homo sapien
atgagcagagctgcgtcctttggag

SEQ ID NO: 2513670 - DNA, 25 bp, Homo sapien
cagaggagtaagaagctgcatgtcc

SEQ ID NO: 2513671 - DNA, 25 bp, Homo sapien
gccagccagtaaactgtgttgggca

SEQ ID NO: 2513672 - DNA, 25 bp, Homo sapien
tcaggtagtgtgaaggatcctagcc

SEQ ID NO: 2513673 - DNA, 25 bp, Homo sapien
tgaaggatcctagccatggagtggc

SEQ ID NO: 2513674 - DNA, 25 bp, Homo sapien
tgattattgagttggcatatacctc

SEQ ID NO: 2513675 - DNA, 25 bp, Homo sapien
ttcaaaatgctgttggtactcttac

SEQ ID NO: 2513676 - DNA, 25 bp, Homo sapien
tacttaataaactggagcaagcaat

SEQ ID NO: 2513677 - DNA, 25 bp, Homo sapien
gactgtggttgggttcccagtacca

SEQ ID NO: 2513678 - DNA, 25 bp, Homo sapien
aatatcccattgtagcactgggaac

SEQ ID NO: 2513679 - DNA, 25 bp, Homo sapien
ctttataaatatcccattgtagcac

SEQ ID NO: 2513680 - DNA, 25 bp, Homo sapien
catggcaccccgctggttccccatc

SEQ ID NO: 2513681 - DNA, 25 bp, Homo sapien
tataaatatcccattgtagcactgg

SEQ ID NO: 2513682 - DNA, 25 bp, Homo sapien
gaacactgcttcctccaaatgggat

SEQ ID NO: 2513683 - DNA, 25 bp, Homo sapien
aacactgcttcctccaaatgggatg

SEQ ID NO: 2513684 - DNA, 25 bp, Homo sapien
tgccttgaacactgcttcctccaaa

SEQ ID NO: 2513685 - DNA, 25 bp, Homo sapien
agaccagcccctttttgacaagaag

SEQ ID NO: 2513686 - DNA, 25 bp, Homo sapien
caagaagttgtagtccatggatgat

SEQ ID NO: 2513687 - DNA, 25 bp, Homo sapien
aattgtcagctacagggctcagaca

SEQ ID NO: 2513688 - DNA, 25 bp, Homo sapien
cacaggtctcatagccaagaagttg

SEQ ID NO: 2513689 - DNA, 25 bp, Homo sapien
tacatttgttgctaaactgaacgca

SEQ ID NO: 2513690 - DNA, 25 bp, Homo sapien
accctccatgagctgatacttcaga

SEQ ID NO: 2513691 - DNA, 25 bp, Homo sapien
tgagctctacaccagttagttatgt

SEQ ID NO: 2513692 - DNA, 25 bp, Homo sapien
gacgtcctgctggtacctcaaatgc

SEQ ID NO: 2513693 - DNA, 25 bp, Homo sapien
tctgccaaggcaacgtattaataaa

SEQ ID NO: 2513694 - DNA, 25 bp, Homo sapien
ctattaagagggctggtgttctgcc

SEQ ID NO: 2513695 - DNA, 25 bp, Homo sapien
tcatgcgaacgttgaaattggccct

SEQ ID NO: 2513696 - DNA, 25 bp, Homo sapien
gcagccaattcagcaggatacgtga

SEQ ID NO: 2513697 - DNA, 25 bp, Homo sapien
tcataatagaaactacctaaaatga

SEQ ID NO: 2513698 - DNA, 25 bp, Homo sapien
ttcataatagaaactacctaaaatg

SEQ ID NO: 2513699 - DNA, 25 bp, Homo sapien
cataatagaaactacctaaaatgaa

SEQ ID NO: 2513700 - DNA, 25 bp, Homo sapien
agttgatggcaacgatggttactca

SEQ ID NO: 2513701 - DNA, 25 bp, Homo sapien
ttatgaaccacactgaaacgacctt

SEQ ID NO: 2513702 - DNA, 25 bp, Homo sapien
tttaggtaatacaggagttgatggc

SEQ ID NO: 2513703 - DNA, 25 bp, Homo sapien
tgttttggtcaacatcccctaagat

SEQ ID NO: 2513704 - DNA, 25 bp, Homo sapien
tagtatttgtagcactaattgtact

SEQ ID NO: 2513705 - DNA, 25 bp, Homo sapien
tattgatcactaaactcacactgac

SEQ ID NO: 2513706 - DNA, 25 bp, Homo sapien
tctatcttagtatttgtagcactaa

SEQ ID NO: 2513707 - DNA, 25 bp, Homo sapien
caccgtgcctgactgtaattgctca

SEQ ID NO: 2513708 - DNA, 25 bp, Homo sapien
gaatgtaaatgtacccctatgcatg

SEQ ID NO: 2513709 - DNA, 25 bp, Homo sapien
agaagaagcttggtagtggacatgt

SEQ ID NO: 2513710 - DNA, 25 bp, Homo sapien
gagttcaggctcaatctcttacaga

SEQ ID NO: 2513711 - DNA, 25 bp, Homo sapien
gccatttgatgtttttatgactaag

SEQ ID NO: 2513712 - DNA, 25 bp, Homo sapien
taaaagaagattcgctatctgaact

SEQ ID NO: 2513713 - DNA, 25 bp, Homo sapien
cactaaaagaagattcgctatctga

SEQ ID NO: 2513714 - DNA, 25 bp, Homo sapien
gaagattcgctatctgaactttctt

SEQ ID NO: 2513715 - DNA, 25 bp, Homo sapien
aagaagattcgctatctgaactttc

SEQ ID NO: 2513716 - DNA, 25 bp, Homo sapien
cgccatcaggcactggagcatctgg

SEQ ID NO: 2513717 - DNA, 25 bp, Homo sapien
atcaggcactggagcatctggcctc

SEQ ID NO: 2513718 - DNA, 25 bp, Homo sapien
tttcgccatcaggcactggagcatc

SEQ ID NO: 2513719 - DNA, 25 bp, Homo sapien
catcaggcactggagcatctggcct

SEQ ID NO: 2513720 - DNA, 25 bp, Homo sapien
gattcaatgctatgcctgtagaggc

SEQ ID NO: 2513721 - DNA, 25 bp, Homo sapien
catggagacccaattatagacagag

SEQ ID NO: 2513722 - DNA, 25 bp, Homo sapien
tgtagaggccgcgacagtattttct

SEQ ID NO: 2513723 - DNA, 25 bp, Homo sapien
tcttgccagtccttacatagtgcgc

SEQ ID NO: 2513724 - DNA, 25 bp, Homo sapien
gatgctatattacatagtaactaag

SEQ ID NO: 2513725 - DNA, 25 bp, Homo sapien
agctgtgaccatgcctgggcactcc

SEQ ID NO: 2513726 - DNA, 25 bp, Homo sapien
actaagaatataggctctgggtaca

SEQ ID NO: 2513727 - DNA, 25 bp, Homo sapien
tcattaatttatgtgtgtaaccatt

SEQ ID NO: 2513728 - DNA, 25 bp, Homo sapien
tccacaccgtcagcaacacttgtta

SEQ ID NO: 2513729 - DNA, 25 bp, Homo sapien
tttctccacaccgtcagcaacactt

SEQ ID NO: 2513730 - DNA, 25 bp, Homo sapien
caatttctccacaccgtcagcaaca

SEQ ID NO: 2513731 - DNA, 25 bp, Homo sapien
acaccgtcagcaacacttgttattg

SEQ ID NO: 2513732 - DNA, 25 bp, Homo sapien
tactctagatgcctcatacaagtgg

SEQ ID NO: 2513733 - DNA, 25 bp, Homo sapien
cgtccagctgctgacaaccactatt

SEQ ID NO: 2513734 - DNA, 25 bp, Homo sapien
tagtacaatgtcctaaaagtccatc

SEQ ID NO: 2513735 - DNA, 25 bp, Homo sapien
taacattcccttatccgtccagctg

SEQ ID NO: 2513736 - DNA, 25 bp, Homo sapien
ttccaggcgggatattcatattttc

SEQ ID NO: 2513737 - DNA, 25 bp, Homo sapien
taccatcatttccaggcgggatatt

SEQ ID NO: 2513738 - DNA, 25 bp, Homo sapien
gggaacagaaatttggctctgcata

SEQ ID NO: 2513739 - DNA, 25 bp, Homo sapien
tggctctgcatattatgatcataaa

SEQ ID NO: 2513740 - DNA, 25 bp, Homo sapien
gcaataggtggtcttaagagagtca

SEQ ID NO: 2513741 - DNA, 25 bp, Homo sapien
tctgtcagagctatgcgatggcaat

SEQ ID NO: 2513742 - DNA, 25 bp, Homo sapien
cacataaagttataaagtcacatgg

SEQ ID NO: 2513743 - DNA, 25 bp, Homo sapien
agtcacatggtactgttgtcaatta

SEQ ID NO: 2513744 - DNA, 25 bp, Homo sapien
tatttaaggcgcgatatacccattc

SEQ ID NO: 2513745 - DNA, 25 bp, Homo sapien
tgtattaacctttggccaaagacca

SEQ ID NO: 2513746 - DNA, 25 bp, Homo sapien
tatctttttatctcggtggtactga

SEQ ID NO: 2513747 - DNA, 25 bp, Homo sapien
tctaggaaaattgccaggatctctt

SEQ ID NO: 2513748 - DNA, 25 bp, Homo sapien
gatctgggtctagtccttctgatat

SEQ ID NO: 2513749 - DNA, 25 bp, Homo sapien
gaagatctgggtctagtccttctga

SEQ ID NO: 2513750 - DNA, 25 bp, Homo sapien
tctgggtctagtccttctgatatca

SEQ ID NO: 2513751 - DNA, 25 bp, Homo sapien
gggtctagtccttctgatatcattt

SEQ ID NO: 2513752 - DNA, 25 bp, Homo sapien
aacatgctacttcatgcttgactgg

SEQ ID NO: 2513753 - DNA, 25 bp, Homo sapien
ttgtttgtcatctaaagaacatgct

SEQ ID NO: 2513754 - DNA, 25 bp, Homo sapien
ggagttctctaaaccatggaaagcc

SEQ ID NO: 2513755 - DNA, 25 bp, Homo sapien
caaggtgcataccttcttgatggac

SEQ ID NO: 2513756 - DNA, 25 bp, Homo sapien
aaggcatggagaccaaaaaacaagg

SEQ ID NO: 2513757 - DNA, 25 bp, Homo sapien
gtgacatgacttgatgtgatggcaa

SEQ ID NO: 2513758 - DNA, 25 bp, Homo sapien
atctctcagagggtagtaatccagc

SEQ ID NO: 2513759 - DNA, 25 bp, Homo sapien
tattcctaggcaatgaaattttctc

SEQ ID NO: 2513760 - DNA, 25 bp, Homo sapien
ttgaaccattttgagatatctggca

SEQ ID NO: 2513761 - DNA, 25 bp, Homo sapien
taagatattttctgctgatacttca

SEQ ID NO: 2513762 - DNA, 25 bp, Homo sapien
attttctgctgatacttcactttcc

SEQ ID NO: 2513763 - DNA, 25 bp, Homo sapien
gaaccattttgagatatctggcata

SEQ ID NO: 2513764 - DNA, 25 bp, Homo sapien
tcaacactatattggttccttaaaa

SEQ ID NO: 2513765 - DNA, 25 bp, Homo sapien
tgctttacttgtccccagagtgctg

SEQ ID NO: 2513766 - DNA, 25 bp, Homo sapien
tgtttctttccataattctaaggca

SEQ ID NO: 2513767 - DNA, 25 bp, Homo sapien
tcatttcagagaaggttacatttca

SEQ ID NO: 2513768 - DNA, 25 bp, Homo sapien
tatcatatctctcaactgtccttca

SEQ ID NO: 2513769 - DNA, 25 bp, Homo sapien
ttctcaaatcaatctcactctgcac

SEQ ID NO: 2513770 - DNA, 25 bp, Homo sapien
tgaatgacccattaaatcctctatc

SEQ ID NO: 2513771 - DNA, 25 bp, Homo sapien
cactctgcacaattggatattctat

SEQ ID NO: 2513772 - DNA, 25 bp, Homo sapien
aggagatacttcaactgtgacatca

SEQ ID NO: 2513773 - DNA, 25 bp, Homo sapien
aaggagatacttcaactgtgacatc

SEQ ID NO: 2513774 - DNA, 25 bp, Homo sapien
ttaaaggagatacttcaactgtgac

SEQ ID NO: 2513775 - DNA, 25 bp, Homo sapien
taaaggagatacttcaactgtgaca

SEQ ID NO: 2513776 - DNA, 25 bp, Homo sapien
tcctgatatcaatgacacgcatttg

SEQ ID NO: 2513777 - DNA, 25 bp, Homo sapien
tctatggccatggaaataactaagg

SEQ ID NO: 2513778 - DNA, 25 bp, Homo sapien
cacgcatttgtcgatgtttggctaa

SEQ ID NO: 2513779 - DNA, 25 bp, Homo sapien
catttaatgtgcgaccttggactct

SEQ ID NO: 2513780 - DNA, 25 bp, Homo sapien
atttgttggatacgaagtgaaaggt

SEQ ID NO: 2513781 - DNA, 25 bp, Homo sapien
tttgttggatacgaagtgaaaggtc

SEQ ID NO: 2513782 - DNA, 25 bp, Homo sapien
aatttgttggatacgaagtgaaagg

SEQ ID NO: 2513783 - DNA, 25 bp, Homo sapien
caatttgttggatacgaagtgaaag

SEQ ID NO: 2513784 - DNA, 25 bp, Homo sapien
ggtcaacatggtgaaaccccaactc

SEQ ID NO: 2513785 - DNA, 25 bp, Homo sapien
atctgaggtcaggatggtcaacatg

SEQ ID NO: 2513786 - DNA, 25 bp, Homo sapien
tcaacatggtgaaaccccaactcta

SEQ ID NO: 2513787 - DNA, 25 bp, Homo sapien
tcatctgaggtcaggatggtcaaca

SEQ ID NO: 2513788 - DNA, 25 bp, Homo sapien
gagctaagttcactccactacactc

SEQ ID NO: 2513789 - DNA, 25 bp, Homo sapien
gcagtgagctaagttcactccacta

SEQ ID NO: 2513790 - DNA, 25 bp, Homo sapien
gctaagttcactccactacactcca

SEQ ID NO: 2513791 - DNA, 25 bp, Homo sapien
gtgagctaagttcactccactacac

SEQ ID NO: 2513792 - DNA, 25 bp, Homo sapien
ggctatggggataagagtatttgct

SEQ ID NO: 2513793 - DNA, 25 bp, Homo sapien
tctgctagtaatcctgggacagtcc

SEQ ID NO: 2513794 - DNA, 25 bp, Homo sapien
cctttccagatacttctccatcttg

SEQ ID NO: 2513795 - DNA, 25 bp, Homo sapien
gggataagagtatttgcttctttct

SEQ ID NO: 2513796 - DNA, 25 bp, Homo sapien
tgtagaaaagcggttgaggaactgt

SEQ ID NO: 2513797 - DNA, 25 bp, Homo sapien
tagctatcgcaaccggcgtgtgtcg

SEQ ID NO: 2513798 - DNA, 25 bp, Homo sapien
gaagcgacagttgggagatgcacac

SEQ ID NO: 2513799 - DNA, 25 bp, Homo sapien
gaccccatttcaaggtggactgtgg

SEQ ID NO: 2513800 - DNA, 25 bp, Homo sapien
gggagtctagcaccgtcttttacaa

SEQ ID NO: 2513801 - DNA, 25 bp, Homo sapien
gtctatgcctgaccccatgagagga

SEQ ID NO: 2513802 - DNA, 25 bp, Homo sapien
ggtcaggtctatgcctgaccccatg

SEQ ID NO: 2513803 - DNA, 25 bp, Homo sapien
ccatgagaggaagcccgtcctcatc

SEQ ID NO: 2513804 - DNA, 25 bp, Homo sapien
cttggtcaggtctatgcctgacccc

SEQ ID NO: 2513805 - DNA, 25 bp, Homo sapien
gcggtggaccccgagttcacccaca

SEQ ID NO: 2513806 - DNA, 25 bp, Homo sapien
caacccggtaatcacgtctcaactt

SEQ ID NO: 2513807 - DNA, 25 bp, Homo sapien
ttcacccacaaacccctcccagatg

SEQ ID NO: 2513808 - DNA, 25 bp, Homo sapien
cgcccaacccggtaatcacgtctca

SEQ ID NO: 2513809 - DNA, 25 bp, Homo sapien
cttagtctcaaaccctttggctcaa

SEQ ID NO: 2513810 - DNA, 25 bp, Homo sapien
aatgatcctcatgccttggcctccc

SEQ ID NO: 2513811 - DNA, 25 bp, Homo sapien
tgatcctcatgccttggcctcccta

SEQ ID NO: 2513812 - DNA, 25 bp, Homo sapien
tagtctcaaaccctttggctcaaat

SEQ ID NO: 2513813 - DNA, 25 bp, Homo sapien
ggacttgaccaagctctcatgagga

SEQ ID NO: 2513814 - DNA, 25 bp, Homo sapien
gatatattggaacacaatgctgctt

SEQ ID NO: 2513815 - DNA, 25 bp, Homo sapien
taggctcagagctaaggctattatt

SEQ ID NO: 2513816 - DNA, 25 bp, Homo sapien
tgtgattaggtaacaaatggttgct

SEQ ID NO: 2513817 - DNA, 25 bp, Homo sapien
tagccctttggctatcctgatgctt

SEQ ID NO: 2513818 - DNA, 25 bp, Homo sapien
caacaatttttgaacacactagcct

SEQ ID NO: 2513819 - DNA, 25 bp, Homo sapien
tgtaagagtcactattgatagccct

SEQ ID NO: 2513820 - DNA, 25 bp, Homo sapien
tttcttggacatatcctgaaatgac

SEQ ID NO: 2513821 - DNA, 25 bp, Homo sapien
caaaataatgattcctatctgtact

SEQ ID NO: 2513822 - DNA, 25 bp, Homo sapien
ggaaatgaagcttcaaaaagggcat

SEQ ID NO: 2513823 - DNA, 25 bp, Homo sapien
aacttgcaggaatgggcagtttgtc

SEQ ID NO: 2513824 - DNA, 25 bp, Homo sapien
tgtatgtgactgacaagcagaacca

SEQ ID NO: 2513825 - DNA, 25 bp, Homo sapien
gagagggtgaacacagttccattgc

SEQ ID NO: 2513826 - DNA, 25 bp, Homo sapien
catctcaaaaacacttaagtttctt

SEQ ID NO: 2513827 - DNA, 25 bp, Homo sapien
cattgccaacaggtcccatctcaaa

SEQ ID NO: 2513828 - DNA, 25 bp, Homo sapien
ttagataacgttgattttaatgatc

SEQ ID NO: 2513829 - DNA, 25 bp, Homo sapien
ctgcgtataataaacagggttgagc

SEQ ID NO: 2513830 - DNA, 25 bp, Homo sapien
ggtaacttttgatcccatatatcag

SEQ ID NO: 2513831 - DNA, 25 bp, Homo sapien
cacctcgtccaaaggaatctgcgta

SEQ ID NO: 2513832 - DNA, 25 bp, Homo sapien
gggttgagcaatataatcaatcaca

SEQ ID NO: 2513833 - DNA, 25 bp, Homo sapien
caaagtttgtgaatctaaggtacag

SEQ ID NO: 2513834 - DNA, 25 bp, Homo sapien
aatacaaagtttgtgaatctaaggt

SEQ ID NO: 2513835 - DNA, 25 bp, Homo sapien
gacattttctaaagtatacggtata

SEQ ID NO: 2513836 - DNA, 25 bp, Homo sapien
aaagcaactgagacattttctaaag

SEQ ID NO: 2513837 - DNA, 25 bp, Homo sapien
agagttcgatgccaggacagtccag

SEQ ID NO: 2513838 - DNA, 25 bp, Homo sapien
gtggtctcctccaattacacacaga

SEQ ID NO: 2513839 - DNA, 25 bp, Homo sapien
cagatccaacggctacagaacccat

SEQ ID NO: 2513840 - DNA, 25 bp, Homo sapien
agtcacccaaaacaacagcttgtgg

SEQ ID NO: 2513841 - DNA, 25 bp, Homo sapien
taaaaatatgctcccttacaggtga

SEQ ID NO: 2513842 - DNA, 25 bp, Homo sapien
agaattaaagaagcacagtaagtcc

SEQ ID NO: 2513843 - DNA, 25 bp, Homo sapien
tacacattattgatacgcagctgaa

SEQ ID NO: 2513844 - DNA, 25 bp, Homo sapien
gcagctgaaacatgggatacaatcc

SEQ ID NO: 2513845 - DNA, 25 bp, Homo sapien
cagattttcactaattgtggaccac

SEQ ID NO: 2513846 - DNA, 25 bp, Homo sapien
ctgagggtgtcctaaatgatgaatt

SEQ ID NO: 2513847 - DNA, 25 bp, Homo sapien
gataaccagtggttgcaaacagatt

SEQ ID NO: 2513848 - DNA, 25 bp, Homo sapien
cattttgccaggataaccagtggtt

SEQ ID NO: 2513849 - DNA, 25 bp, Homo sapien
agaagtgctaacaaaactcactgta

SEQ ID NO: 2513850 - DNA, 25 bp, Homo sapien
tagcacctagacagaaacaggtttc

SEQ ID NO: 2513851 - DNA, 25 bp, Homo sapien
gtgtgtactacgatgcccaggtaag

SEQ ID NO: 2513852 - DNA, 25 bp, Homo sapien
tgagccatagcacctagacagaaac

SEQ ID NO: 2513853 - DNA, 25 bp, Homo sapien
gatgagctgctcaacaagccctgag

SEQ ID NO: 2513854 - DNA, 25 bp, Homo sapien
tgtaactatgaagcaacaagtccca

SEQ ID NO: 2513855 - DNA, 25 bp, Homo sapien
gagtacttctcttatgcctggaact

SEQ ID NO: 2513856 - DNA, 25 bp, Homo sapien
gaaaggatgaaaagggtctgagctc

SEQ ID NO: 2513857 - DNA, 25 bp, Homo sapien
aataagcaggctcgatccatgtgaa

SEQ ID NO: 2513858 - DNA, 25 bp, Homo sapien
aagcaggctcgatccatgtgaacag

SEQ ID NO: 2513859 - DNA, 25 bp, Homo sapien
tgaataagcaggctcgatccatgtg

SEQ ID NO: 2513860 - DNA, 25 bp, Homo sapien
taagcaggctcgatccatgtgaaca

SEQ ID NO: 2513861 - DNA, 25 bp, Homo sapien
aagagataaaatagcctgttgggcc

SEQ ID NO: 2513862 - DNA, 25 bp, Homo sapien
caccagtgtgctgacattaatggca

SEQ ID NO: 2513863 - DNA, 25 bp, Homo sapien
taaccaatcatttcctgcaacggct

SEQ ID NO: 2513864 - DNA, 25 bp, Homo sapien
tgcaacggctccaactttgaaggtg

SEQ ID NO: 2513865 - DNA, 25 bp, Homo sapien
tgaaaaatccttgagggtgtaaata

SEQ ID NO: 2513866 - DNA, 25 bp, Homo sapien
tctggttctattaagttgaaaaatc

SEQ ID NO: 2513867 - DNA, 25 bp, Homo sapien
tagtagtggtagattggcaagaatg

SEQ ID NO: 2513868 - DNA, 25 bp, Homo sapien
gttgagtgacctggagttatctttc

SEQ ID NO: 2513869 - DNA, 25 bp, Homo sapien
tatagacctcaccatgaacagtgct

SEQ ID NO: 2513870 - DNA, 25 bp, Homo sapien
agttgctgcaaacactcaactagtg

SEQ ID NO: 2513871 - DNA, 25 bp, Homo sapien
gatgactgatcaatacgtagctttt

SEQ ID NO: 2513872 - DNA, 25 bp, Homo sapien
aatacacagttaggttccctgccag

SEQ ID NO: 2513873 - DNA, 25 bp, Homo sapien
tcatcaaggccaagcataagaggct

SEQ ID NO: 2513874 - DNA, 25 bp, Homo sapien
cactgaaacgactgtagagcactgt

SEQ ID NO: 2513875 - DNA, 25 bp, Homo sapien
aacgtatggcagagcactgaaagcc

SEQ ID NO: 2513876 - DNA, 25 bp, Homo sapien
tctgggcttgcagagcactgaaacg

SEQ ID NO: 2513877 - DNA, 25 bp, Homo sapien
gctgtttgcactccttccaagttcc

SEQ ID NO: 2513878 - DNA, 25 bp, Homo sapien
agctgtttgcactccttccaagttc

SEQ ID NO: 2513879 - DNA, 25 bp, Homo sapien
gagctgtttgcactccttccaagtt

SEQ ID NO: 2513880 - DNA, 25 bp, Homo sapien
agctggccatggttgacgattaaag

SEQ ID NO: 2513881 - DNA, 25 bp, Homo sapien
caagctggccatggttgacgattaa

SEQ ID NO: 2513882 - DNA, 25 bp, Homo sapien
aagctggccatggttgacgattaaa

SEQ ID NO: 2513883 - DNA, 25 bp, Homo sapien
gctctccatttcaattgctttacca

SEQ ID NO: 2513884 - DNA, 25 bp, Homo sapien
tggctctccatttcaattgctttac

SEQ ID NO: 2513885 - DNA, 25 bp, Homo sapien
caattgctttaccattgcagaggga

SEQ ID NO: 2513886 - DNA, 25 bp, Homo sapien
ctttaccattgcagagggagagcaa

SEQ ID NO: 2513887 - DNA, 25 bp, Homo sapien
ggagagaaggtcagcagattaacac

SEQ ID NO: 2513888 - DNA, 25 bp, Homo sapien
agaaggtcagcagattaacacgtga

SEQ ID NO: 2513889 - DNA, 25 bp, Homo sapien
gagagaaggtcagcagattaacacg

SEQ ID NO: 2513890 - DNA, 25 bp, Homo sapien
gagaaggtcagcagattaacacgtg

SEQ ID NO: 2513891 - DNA, 25 bp, Homo sapien
cattaatgaaatcggtatggccctc

SEQ ID NO: 2513892 - DNA, 25 bp, Homo sapien
tgaaatcggtatggccctctaaaac

SEQ ID NO: 2513893 - DNA, 25 bp, Homo sapien
taatgaaatcggtatggccctctaa

SEQ ID NO: 2513894 - DNA, 25 bp, Homo sapien
caaaccattaatgaaatcggtatgg

SEQ ID NO: 2513895 - DNA, 25 bp, Homo sapien
ctgaagatctgaagtaaataatcta

SEQ ID NO: 2513896 - DNA, 25 bp, Homo sapien
tttcatatcagcagctgaagtacaa

SEQ ID NO: 2513897 - DNA, 25 bp, Homo sapien
tgaagatctgaagtaaataatctaa

SEQ ID NO: 2513898 - DNA, 25 bp, Homo sapien
catatcagcagctgaagtacaaaat

SEQ ID NO: 2513899 - DNA, 25 bp, Homo sapien
gaaatgttcgaagtgttttatactg

SEQ ID NO: 2513900 - DNA, 25 bp, Homo sapien
gaatgccttcaacgtctgcttcttc

SEQ ID NO: 2513901 - DNA, 25 bp, Homo sapien
tctgggctccaagctatgccatcaa

SEQ ID NO: 2513902 - DNA, 25 bp, Homo sapien
gaatcaagtctagtctctgggctcc

SEQ ID NO: 2513903 - DNA, 25 bp, Homo sapien
caagacaagaggcatgaaactgggt

SEQ ID NO: 2513904 - DNA, 25 bp, Homo sapien
aggcatgaaactgggtgcaatggaa

SEQ ID NO: 2513905 - DNA, 25 bp, Homo sapien
gacaagaggcatgaaactgggtgca

SEQ ID NO: 2513906 - DNA, 25 bp, Homo sapien
caagaggcatgaaactgggtgcaat

SEQ ID NO: 2513907 - DNA, 25 bp, Homo sapien
agtgtaggcagcatttcttgaggca

SEQ ID NO: 2513908 - DNA, 25 bp, Homo sapien
cgtacacgtgccaatgaccacataa

SEQ ID NO: 2513909 - DNA, 25 bp, Homo sapien
tctcaaagggattaaattctaccac

SEQ ID NO: 2513910 - DNA, 25 bp, Homo sapien
caccatatgcaattaggtttcctga

SEQ ID NO: 2513911 - DNA, 25 bp, Homo sapien
ttgtatgtcaaaattcaagcagttg

SEQ ID NO: 2513912 - DNA, 25 bp, Homo sapien
gccttctactggacaaggtcacgaa

SEQ ID NO: 2513913 - DNA, 25 bp, Homo sapien
tatgtcaaaattcaagcagttgtga

SEQ ID NO: 2513914 - DNA, 25 bp, Homo sapien
tgtgaaaattaaatagccttctact

SEQ ID NO: 2513915 - DNA, 25 bp, Homo sapien
tgggcggccggcagaaaagcatccc

SEQ ID NO: 2513916 - DNA, 25 bp, Homo sapien
gcagaaaagcatcccggcctctcgg

SEQ ID NO: 2513917 - DNA, 25 bp, Homo sapien
ctcctgggaatagagtggcaaggct

SEQ ID NO: 2513918 - DNA, 25 bp, Homo sapien
ggccggcagaaaagcatcccggcct

SEQ ID NO: 2513919 - DNA, 25 bp, Homo sapien
tgccgcgacgcgctgtggctctgct

SEQ ID NO: 2513920 - DNA, 25 bp, Homo sapien
tcgtcaaagagatcaagctgagccc

SEQ ID NO: 2513921 - DNA, 25 bp, Homo sapien
cctctccagggaatgaaccttcaat

SEQ ID NO: 2513922 - DNA, 25 bp, Homo sapien
tgatgctcagacaccagataattga

SEQ ID NO: 2513923 - DNA, 25 bp, Homo sapien
gcaaaactagacttgactcctgcca

SEQ ID NO: 2513924 - DNA, 25 bp, Homo sapien
ccattatattggtattccttgtacc

SEQ ID NO: 2513925 - DNA, 25 bp, Homo sapien
taccaagaactagtaaggaagaaca

SEQ ID NO: 2513926 - DNA, 25 bp, Homo sapien
tggtccaagatgactgttggagctc

SEQ ID NO: 2513927 - DNA, 25 bp, Homo sapien
ttttatggtccaagatgactgttgg

SEQ ID NO: 2513928 - DNA, 25 bp, Homo sapien
gaatgtggtcacttaaacagtgccc

SEQ ID NO: 2513929 - DNA, 25 bp, Homo sapien
ccaaatgtcatcgtgtcatcaggag

SEQ ID NO: 2513930 - DNA, 25 bp, Homo sapien
gcattttaaccgtggaagatcaaca

SEQ ID NO: 2513931 - DNA, 25 bp, Homo sapien
gagaatggatattggcaggcagctt

SEQ ID NO: 2513932 - DNA, 25 bp, Homo sapien
tctcggagcatacaaggccttagat

SEQ ID NO: 2513933 - DNA, 25 bp, Homo sapien
tgaccctcaagccaagaagtagctg

SEQ ID NO: 2513934 - DNA, 25 bp, Homo sapien
gaagtagctgaatagatgggctcac

SEQ ID NO: 2513935 - DNA, 25 bp, Homo sapien
tgaggcttgggagaacacaagactc

SEQ ID NO: 2513936 - DNA, 25 bp, Homo sapien
tgcgtaacagaacagagctactggg

SEQ ID NO: 2513937 - DNA, 25 bp, Homo sapien
cacacgtgcgtaacagaacagagct

SEQ ID NO: 2513938 - DNA, 25 bp, Homo sapien
tagctgcaacacacgtgcgtaacag

SEQ ID NO: 2513939 - DNA, 25 bp, Homo sapien
agaaggatgagttagctgcaacaca

SEQ ID NO: 2513940 - DNA, 25 bp, Homo sapien
aaaaaagaaggcagtgcacctgcgt

SEQ ID NO: 2513941 - DNA, 25 bp, Homo sapien
aagaaggcagtgcacctgcgtgggc

SEQ ID NO: 2513942 - DNA, 25 bp, Homo sapien
aaaaagaaggcagtgcacctgcgtg

SEQ ID NO: 2513943 - DNA, 25 bp, Homo sapien
aaaagaaggcagtgcacctgcgtgg

SEQ ID NO: 2513944 - DNA, 25 bp, Homo sapien
gcaccttttaataggaagcatttgc

SEQ ID NO: 2513945 - DNA, 25 bp, Homo sapien
tttccaggctgaaccaatctttacc

SEQ ID NO: 2513946 - DNA, 25 bp, Homo sapien
taaaccagagactcctttctactga

SEQ ID NO: 2513947 - DNA, 25 bp, Homo sapien
tctattgtttctaagggtggccacc

SEQ ID NO: 2513948 - DNA, 25 bp, Homo sapien
gccagtaggtctgtctaccccacag

SEQ ID NO: 2513949 - DNA, 25 bp, Homo sapien
cccttgccataaacagtcagctctt

SEQ ID NO: 2513950 - DNA, 25 bp, Homo sapien
tgccataaacagtcagctcttgagg

SEQ ID NO: 2513951 - DNA, 25 bp, Homo sapien
tctgccagtaggtctgtctacccca

SEQ ID NO: 2513952 - DNA, 25 bp, Homo sapien
aataagacgctccaaagcagtgctg

SEQ ID NO: 2513953 - DNA, 25 bp, Homo sapien
gccctgcgaagagtctaaaattgat

SEQ ID NO: 2513954 - DNA, 25 bp, Homo sapien
ccaaagcagtgctgacacaggaaca

SEQ ID NO: 2513955 - DNA, 25 bp, Homo sapien
tgacacaggaacatgtaacaaagcc

SEQ ID NO: 2513956 - DNA, 25 bp, Homo sapien
tgtttaaaaatactagtaagtcata

SEQ ID NO: 2513957 - DNA, 25 bp, Homo sapien
tatgttaagcattgtttaaaaatac

SEQ ID NO: 2513958 - DNA, 25 bp, Homo sapien
tagtatgttaagcattgtttaaaaa

SEQ ID NO: 2513959 - DNA, 25 bp, Homo sapien
ggttagtatgttaagcattgtttaa

SEQ ID NO: 2513960 - DNA, 25 bp, Homo sapien
tatagtagcagtatgggcttctcct

SEQ ID NO: 2513961 - DNA, 25 bp, Homo sapien
acagagaaagcatatcatttcagtt

SEQ ID NO: 2513962 - DNA, 25 bp, Homo sapien
tactgatacatcttaacactacttt

SEQ ID NO: 2513963 - DNA, 25 bp, Homo sapien
taacatacacaagttatagtagcag

SEQ ID NO: 2513964 - DNA, 25 bp, Homo sapien
caacaaggtcggtagactcttccca

SEQ ID NO: 2513965 - DNA, 25 bp, Homo sapien
ttgtttaaaggactataattatcac

SEQ ID NO: 2513966 - DNA, 25 bp, Homo sapien
tgtttaaaggactataattatcaca

SEQ ID NO: 2513967 - DNA, 25 bp, Homo sapien
attgtttaaaggactataattatca

SEQ ID NO: 2513968 - DNA, 25 bp, Homo sapien
tgattcagtattctgaactccattc

SEQ ID NO: 2513969 - DNA, 25 bp, Homo sapien
ttgattcagtattctgaactccatt

SEQ ID NO: 2513970 - DNA, 25 bp, Homo sapien
ttcgttcatgaaactgctctcatca

SEQ ID NO: 2513971 - DNA, 25 bp, Homo sapien
tcttcgttcatgaaactgctctcat

SEQ ID NO: 2513972 - DNA, 25 bp, Homo sapien
tcgttcatgaaactgctctcatcat

SEQ ID NO: 2513973 - DNA, 25 bp, Homo sapien
cttcgttcatgaaactgctctcatc

SEQ ID NO: 2513974 - DNA, 25 bp, Homo sapien
catctaaatttcttatggacttgga

SEQ ID NO: 2513975 - DNA, 25 bp, Homo sapien
gacttggatgctgaaagtaaaatac

SEQ ID NO: 2513976 - DNA, 25 bp, Homo sapien
taaatttcttatggacttggatgct

SEQ ID NO: 2513977 - DNA, 25 bp, Homo sapien
gtcatcatctaaatttcttatggac

SEQ ID NO: 2513978 - DNA, 25 bp, Homo sapien
tataggaagagagattcatttttgc

SEQ ID NO: 2513979 - DNA, 25 bp, Homo sapien
atgtttgcatacagtcaaacaagaa

SEQ ID NO: 2513980 - DNA, 25 bp, Homo sapien
tgcatacagtcaaacaagaaagaaa

SEQ ID NO: 2513981 - DNA, 25 bp, Homo sapien
cttagtttgatgtttgcatacagtc

SEQ ID NO: 2513982 - DNA, 25 bp, Homo sapien
tagtttgatgtttgcatacagtcaa

SEQ ID NO: 2513983 - DNA, 25 bp, Homo sapien
gagagtgcttccttgaccctatgag

SEQ ID NO: 2513984 - DNA, 25 bp, Homo sapien
ttacctaggtctgctgtgacaaatt

SEQ ID NO: 2513985 - DNA, 25 bp, Homo sapien
ttcctctaatgccagtgagggagat

SEQ ID NO: 2513986 - DNA, 25 bp, Homo sapien
cagagtatcaagaacagagtctggc

SEQ ID NO: 2513987 - DNA, 25 bp, Homo sapien
catttagggcccaccaggattatct

SEQ ID NO: 2513988 - DNA, 25 bp, Homo sapien
gccttgtggtagcatcctctgctct

SEQ ID NO: 2513989 - DNA, 25 bp, Homo sapien
gtgactgttggcattcactgccttg

SEQ ID NO: 2513990 - DNA, 25 bp, Homo sapien
tctttgtgtctgttcctaatattcc

SEQ ID NO: 2513991 - DNA, 25 bp, Homo sapien
ctcttaaccgctccagatgtggcct

SEQ ID NO: 2513992 - DNA, 25 bp, Homo sapien
tatgtgccaagcttcgtcccaagta

SEQ ID NO: 2513993 - DNA, 25 bp, Homo sapien
taaaataattgctctaggctcggtg

SEQ ID NO: 2513994 - DNA, 25 bp, Homo sapien
catatacctagtaagcggtggtgag

SEQ ID NO: 2513995 - DNA, 25 bp, Homo sapien
cgttgcaggtatctgttgagattag

SEQ ID NO: 2513996 - DNA, 25 bp, Homo sapien
cctgcttatctactgtttgctgtcg

SEQ ID NO: 2513997 - DNA, 25 bp, Homo sapien
gcacctgcttatctactgtttgctg

SEQ ID NO: 2513998 - DNA, 25 bp, Homo sapien
tgtttgctgtcgttgcaggtatctg

SEQ ID NO: 2513999 - DNA, 25 bp, Homo sapien
cttagtgtgggcaccccatttgtat

SEQ ID NO: 2514000 - DNA, 25 bp, Homo sapien
tagtagatgaaactacagttgtgtg

SEQ ID NO: 2514001 - DNA, 25 bp, Homo sapien
cggtcttcctagtagatgaaactac

SEQ ID NO: 2514002 - DNA, 25 bp, Homo sapien
gaacgggagtttcgatctgcttcat

SEQ ID NO: 2514003 - DNA, 25 bp, Homo sapien
tctatcacatggtaacgttggcctt

SEQ ID NO: 2514004 - DNA, 25 bp, Homo sapien
ttgggcataggcacagctctccatg

SEQ ID NO: 2514005 - DNA, 25 bp, Homo sapien
tcatctattctgtccctcctttggc

SEQ ID NO: 2514006 - DNA, 25 bp, Homo sapien
gctctccatgcttttgcttcaaatg

SEQ ID NO: 2514007 - DNA, 25 bp, Homo sapien
tggcccacctagaagtcctaagatc

SEQ ID NO: 2514008 - DNA, 25 bp, Homo sapien
taactatagtcagttctctgacaca

SEQ ID NO: 2514009 - DNA, 25 bp, Homo sapien
tcagggtccataatgtcttttgagt

SEQ ID NO: 2514010 - DNA, 25 bp, Homo sapien
ttaagcatgcttactttaactatag

SEQ ID NO: 2514011 - DNA, 25 bp, Homo sapien
cagttattttcaagaggttccttca

SEQ ID NO: 2514012 - DNA, 25 bp, Homo sapien
cattaggtgcctagtattcacggcc

SEQ ID NO: 2514013 - DNA, 25 bp, Homo sapien
taactttgtatagatccttggctgg

SEQ ID NO: 2514014 - DNA, 25 bp, Homo sapien
catgatttttatctgggcagtgaca

SEQ ID NO: 2514015 - DNA, 25 bp, Homo sapien
cagataagctccctctaaagaccag

SEQ ID NO: 2514016 - DNA, 25 bp, Homo sapien
ggtccagataagctccctctaaaga

SEQ ID NO: 2514017 - DNA, 25 bp, Homo sapien
gagaaggtccagataagctccctct

SEQ ID NO: 2514018 - DNA, 25 bp, Homo sapien
taagctccctctaaagaccaggcat

SEQ ID NO: 2514019 - DNA, 25 bp, Homo sapien
tggttttgcctctcatattgtgtca

SEQ ID NO: 2514020 - DNA, 25 bp, Homo sapien
cagatgtctataggtatttccctgc

SEQ ID NO: 2514021 - DNA, 25 bp, Homo sapien
caaatattgtagttcgaggttacag

SEQ ID NO: 2514022 - DNA, 25 bp, Homo sapien
tgaactgtactctacctggtttagt

SEQ ID NO: 2514023 - DNA, 25 bp, Homo sapien
tttctgctgctatttggcacctcca

SEQ ID NO: 2514024 - DNA, 25 bp, Homo sapien
tttgatgtttctgctgctatttggc

SEQ ID NO: 2514025 - DNA, 25 bp, Homo sapien
gatgtttctgctgctatttggcacc

SEQ ID NO: 2514026 - DNA, 25 bp, Homo sapien
catttgccttttgatgtttctgctg

SEQ ID NO: 2514027 - DNA, 25 bp, Homo sapien
ctccttgcccttgagggattgctgc

SEQ ID NO: 2514028 - DNA, 25 bp, Homo sapien
cttgcccttgagggattgctgcaaa

SEQ ID NO: 2514029 - DNA, 25 bp, Homo sapien
ccttgcccttgagggattgctgcaa

SEQ ID NO: 2514030 - DNA, 25 bp, Homo sapien
ttgctgcaaagcctgtctcattgtt

SEQ ID NO: 2514031 - DNA, 25 bp, Homo sapien
ggctccttcaatcgttgctaatacg

SEQ ID NO: 2514032 - DNA, 25 bp, Homo sapien
tccttcaatcgttgctaatacgagg

SEQ ID NO: 2514033 - DNA, 25 bp, Homo sapien
caatcgttgctaatacgaggtggat

SEQ ID NO: 2514034 - DNA, 25 bp, Homo sapien
tcgttgctaatacgaggtggattgt

SEQ ID NO: 2514035 - DNA, 25 bp, Homo sapien
actgcttctgctgtagagttagctt

SEQ ID NO: 2514036 - DNA, 25 bp, Homo sapien
ctgcttctgctgtagagttagcttc

SEQ ID NO: 2514037 - DNA, 25 bp, Homo sapien
tcactgcttctgctgtagagttagc

SEQ ID NO: 2514038 - DNA, 25 bp, Homo sapien
cactgcttctgctgtagagttagct

SEQ ID NO: 2514039 - DNA, 25 bp, Homo sapien
gattgccttccccagtatggttggg

SEQ ID NO: 2514040 - DNA, 25 bp, Homo sapien
tagactgagtgaagtagattgcctt

SEQ ID NO: 2514041 - DNA, 25 bp, Homo sapien
aagggagttattgtgtagactgagt

SEQ ID NO: 2514042 - DNA, 25 bp, Homo sapien
gggcttcgtgcaatccattgaaggc

SEQ ID NO: 2514043 - DNA, 25 bp, Homo sapien
attgctgtcactagtgtggtccaag

SEQ ID NO: 2514044 - DNA, 25 bp, Homo sapien
gtcactagtgtggtccaagctgtca

SEQ ID NO: 2514045 - DNA, 25 bp, Homo sapien
tgtctggacttctttgtcaaccaga

SEQ ID NO: 2514046 - DNA, 25 bp, Homo sapien
tgtcaaccagaggatctcacagctt

SEQ ID NO: 2514047 - DNA, 25 bp, Homo sapien
aatgatccagccctgcctatttcca

SEQ ID NO: 2514048 - DNA, 25 bp, Homo sapien
cctgcaaggccgtgaatgatccagc

SEQ ID NO: 2514049 - DNA, 25 bp, Homo sapien
aaggccgtgaatgatccagccctgc

SEQ ID NO: 2514050 - DNA, 25 bp, Homo sapien
ggcaactcaatctcaactcctcacc

SEQ ID NO: 2514051 - DNA, 25 bp, Homo sapien
cctgatccaattacaggctttgctg

SEQ ID NO: 2514052 - DNA, 25 bp, Homo sapien
gatccaattacaggctttgctgatt

SEQ ID NO: 2514053 - DNA, 25 bp, Homo sapien
tcaaggctctattacctgatccaat

SEQ ID NO: 2514054 - DNA, 25 bp, Homo sapien
ttaatcaaggctctattacctgatc

SEQ ID NO: 2514055 - DNA, 25 bp, Homo sapien
cacactgtactggggctctccatca

SEQ ID NO: 2514056 - DNA, 25 bp, Homo sapien
agtcttgtgcaacatattattacaa

SEQ ID NO: 2514057 - DNA, 25 bp, Homo sapien
gtgcaacatattattacaatcagct

SEQ ID NO: 2514058 - DNA, 25 bp, Homo sapien
tctccatcaccatagctccttcagt

SEQ ID NO: 2514059 - DNA, 25 bp, Homo sapien
gttctttcagcatctgtagtggcag

SEQ ID NO: 2514060 - DNA, 25 bp, Homo sapien
ttctttcagcatctgtagtggcagc

SEQ ID NO: 2514061 - DNA, 25 bp, Homo sapien
tcccagttctttcagcatctgtagt

SEQ ID NO: 2514062 - DNA, 25 bp, Homo sapien
cagttctttcagcatctgtagtggc

SEQ ID NO: 2514063 - DNA, 25 bp, Homo sapien
cattcaagggtatccggctagaaag

SEQ ID NO: 2514064 - DNA, 25 bp, Homo sapien
tatccggctagaaagttcccccagc

SEQ ID NO: 2514065 - DNA, 25 bp, Homo sapien
ggctagaaagttcccccagcaagca

SEQ ID NO: 2514066 - DNA, 25 bp, Homo sapien
attcaagggtatccggctagaaagt

SEQ ID NO: 2514067 - DNA, 25 bp, Homo sapien
aaattactggctcggagaactaact

SEQ ID NO: 2514068 - DNA, 25 bp, Homo sapien
gtgaaaattactggctcggagaact

SEQ ID NO: 2514069 - DNA, 25 bp, Homo sapien
ttactggctcggagaactaacttat

SEQ ID NO: 2514070 - DNA, 25 bp, Homo sapien
ggacaaccccctccaaggtcattca

SEQ ID NO: 2514071 - DNA, 25 bp, Homo sapien
gtctttgtaatttcatagtatgcca

SEQ ID NO: 2514072 - DNA, 25 bp, Homo sapien
tctttgtaatttcatagtatgccat

SEQ ID NO: 2514073 - DNA, 25 bp, Homo sapien
ttttgtctttgtaatttcatagtat

SEQ ID NO: 2514074 - DNA, 25 bp, Homo sapien
ttgtctttgtaatttcatagtatgc

SEQ ID NO: 2514075 - DNA, 25 bp, Homo sapien
atgcacatgaaactgtcatgctcat

SEQ ID NO: 2514076 - DNA, 25 bp, Homo sapien
tttcagagacaacaccatgaacaaa

SEQ ID NO: 2514077 - DNA, 25 bp, Homo sapien
ttttcagagacaacaccatgaacaa

SEQ ID NO: 2514078 - DNA, 25 bp, Homo sapien
aacagtagaattcttaaggaatgac

SEQ ID NO: 2514079 - DNA, 25 bp, Homo sapien
cattacaccaacattatccaaaaga

SEQ ID NO: 2514080 - DNA, 25 bp, Homo sapien
catgtttatttattgcaatgacctt

SEQ ID NO: 2514081 - DNA, 25 bp, Homo sapien
gaactaattaatcaaacatgactaa

SEQ ID NO: 2514082 - DNA, 25 bp, Homo sapien
taactcgtgcagagcaaaggatcct

SEQ ID NO: 2514083 - DNA, 25 bp, Homo sapien
cacacagtggtgagtccatgacaca

SEQ ID NO: 2514084 - DNA, 25 bp, Homo sapien
taagacagatgtaacgaatggccag

SEQ ID NO: 2514085 - DNA, 25 bp, Homo sapien
caaacattgacgttccaaggagagg

SEQ ID NO: 2514086 - DNA, 25 bp, Homo sapien
gtttcctgcactccctctacttgcg

SEQ ID NO: 2514087 - DNA, 25 bp, Homo sapien
ttcctgcactccctctacttgcgtt

SEQ ID NO: 2514088 - DNA, 25 bp, Homo sapien
tgcactccctctacttgcgttcttc

SEQ ID NO: 2514089 - DNA, 25 bp, Homo sapien
actccctctacttgcgttcttcaaa

SEQ ID NO: 2514090 - DNA, 25 bp, Homo sapien
gataagaactttcttaggggctctc

SEQ ID NO: 2514091 - DNA, 25 bp, Homo sapien
acaataggcaatgaaagttataatt

SEQ ID NO: 2514092 - DNA, 25 bp, Homo sapien
attgagttcctggtatgataagaac

SEQ ID NO: 2514093 - DNA, 25 bp, Homo sapien
gaatcagacatggactcataaacct

SEQ ID NO: 2514094 - DNA, 25 bp, Homo sapien
tccacaggacatgaattcttagtta

SEQ ID NO: 2514095 - DNA, 25 bp, Homo sapien
ccacaggacatgaattcttagttat

SEQ ID NO: 2514096 - DNA, 25 bp, Homo sapien
tttccacaggacatgaattcttagt

SEQ ID NO: 2514097 - DNA, 25 bp, Homo sapien
ctttccacaggacatgaattcttag

SEQ ID NO: 2514098 - DNA, 25 bp, Homo sapien
cgctttctagggcattacatttttc

SEQ ID NO: 2514099 - DNA, 25 bp, Homo sapien
actgtctttctttgcgctttctagg

SEQ ID NO: 2514100 - DNA, 25 bp, Homo sapien
ctccatgtttcttagcgagattctc

SEQ ID NO: 2514101 - DNA, 25 bp, Homo sapien
gcgagattctctaaaaggttacttc

SEQ ID NO: 2514102 - DNA, 25 bp, Homo sapien
gcatttctacttccaatctccctcc

SEQ ID NO: 2514103 - DNA, 25 bp, Homo sapien
gcctctgcattcagcatttctactt

SEQ ID NO: 2514104 - DNA, 25 bp, Homo sapien
cctcctggatgtgtctttggccaac

SEQ ID NO: 2514105 - DNA, 25 bp, Homo sapien
tcctctgatctgcagacttgcttct

SEQ ID NO: 2514106 - DNA, 25 bp, Homo sapien
tctgagacttcgtgttcttgttggt

SEQ ID NO: 2514107 - DNA, 25 bp, Homo sapien
tctctgagacttcgtgttcttgttg

SEQ ID NO: 2514108 - DNA, 25 bp, Homo sapien
cttctctgagacttcgtgttcttgt

SEQ ID NO: 2514109 - DNA, 25 bp, Homo sapien
ctctgagacttcgtgttcttgttgg

SEQ ID NO: 2514110 - DNA, 25 bp, Homo sapien
ccttagatcacagctccggaagcag

SEQ ID NO: 2514111 - DNA, 25 bp, Homo sapien
tccgactgctggagccataccctgt

SEQ ID NO: 2514112 - DNA, 25 bp, Homo sapien
tcttgggcatgtcggtgtggcgctg

SEQ ID NO: 2514113 - DNA, 25 bp, Homo sapien
catccacgatgcctgtctgaggcgc

SEQ ID NO: 2514114 - DNA, 25 bp, Homo sapien
cacaaatcaaacagagtggcctcat

SEQ ID NO: 2514115 - DNA, 25 bp, Homo sapien
tgcacaaatcaaacagagtggcctc

SEQ ID NO: 2514116 - DNA, 25 bp, Homo sapien
gcacaaatcaaacagagtggcctca

SEQ ID NO: 2514117 - DNA, 25 bp, Homo sapien
ctgcacaaatcaaacagagtggcct

SEQ ID NO: 2514118 - DNA, 25 bp, Homo sapien
tatttcagaactccagacacattgc

SEQ ID NO: 2514119 - DNA, 25 bp, Homo sapien
taactaaggattgattacacaacca

SEQ ID NO: 2514120 - DNA, 25 bp, Homo sapien
tccctgggccgccttatttaatata

SEQ ID NO: 2514121 - DNA, 25 bp, Homo sapien
tattttgcatgagatactagtagga

SEQ ID NO: 2514122 - DNA, 25 bp, Homo sapien
tgttgggaggtggacgctccttaaa

SEQ ID NO: 2514123 - DNA, 25 bp, Homo sapien
tccttaaagagaggcatccgggcct

SEQ ID NO: 2514124 - DNA, 25 bp, Homo sapien
actcagggacctgttttttgctcag

SEQ ID NO: 2514125 - DNA, 25 bp, Homo sapien
ggcacatctggaccttgtcccaggg

SEQ ID NO: 2514126 - DNA, 25 bp, Homo sapien
ctacagcagcagaaacagctcttgg

SEQ ID NO: 2514127 - DNA, 25 bp, Homo sapien
tacagcagcagaaacagctcttggc

SEQ ID NO: 2514128 - DNA, 25 bp, Homo sapien
acagcagcagaaacagctcttggca

SEQ ID NO: 2514129 - DNA, 25 bp, Homo sapien
cctttctgagaactagagactgttg

SEQ ID NO: 2514130 - DNA, 25 bp, Homo sapien
tctgagaactagagactgttgcccc

SEQ ID NO: 2514131 - DNA, 25 bp, Homo sapien
gaactagagactgttgccccagaag

SEQ ID NO: 2514132 - DNA, 25 bp, Homo sapien
ctagagactgttgccccagaagtca

SEQ ID NO: 2514133 - DNA, 25 bp, Homo sapien
tgttttcaattactagtgcagtttc

SEQ ID NO: 2514134 - DNA, 25 bp, Homo sapien
ctgttttcaattactagtgcagttt

SEQ ID NO: 2514135 - DNA, 25 bp, Homo sapien
cctgtgagttagaataaatgaacca

SEQ ID NO: 2514136 - DNA, 25 bp, Homo sapien
gttttttatttgcacagtctgtgtc

SEQ ID NO: 2514137 - DNA, 25 bp, Homo sapien
ggcaggaaatccatattgggagcac

SEQ ID NO: 2514138 - DNA, 25 bp, Homo sapien
catcagaatttctcgagcgagtgat

SEQ ID NO: 2514139 - DNA, 25 bp, Homo sapien
tccatacataagtggcaggaagaag

SEQ ID NO: 2514140 - DNA, 25 bp, Homo sapien
taaatccaacagtgcccaaaggcag

SEQ ID NO: 2514141 - DNA, 25 bp, Homo sapien
atctggcaacactgcttcttaactt

SEQ ID NO: 2514142 - DNA, 25 bp, Homo sapien
ctggcaacactgcttcttaacttga

SEQ ID NO: 2514143 - DNA, 25 bp, Homo sapien
tctggcaacactgcttcttaacttg

SEQ ID NO: 2514144 - DNA, 25 bp, Homo sapien
gtggcatagagctactttgcacagc

SEQ ID NO: 2514145 - DNA, 25 bp, Homo sapien
gataacctcctcttgaatgaacaaa

SEQ ID NO: 2514146 - DNA, 25 bp, Homo sapien
ggctggctactaatgcctccaatgt

SEQ ID NO: 2514147 - DNA, 25 bp, Homo sapien
tgagagtacataactgaagcaacag

SEQ ID NO: 2514148 - DNA, 25 bp, Homo sapien
aaatctccctacttttatgcgactc

SEQ ID NO: 2514149 - DNA, 25 bp, Homo sapien
tatgcgactctcctagaaattgctc

SEQ ID NO: 2514150 - DNA, 25 bp, Homo sapien
tatttgccttttggcgctgctttcc

SEQ ID NO: 2514151 - DNA, 25 bp, Homo sapien
ggatgtgacaggaattgtatttgcc

SEQ ID NO: 2514152 - DNA, 25 bp, Homo sapien
aaaactgtaggccattcagcatgct

SEQ ID NO: 2514153 - DNA, 25 bp, Homo sapien
catatccctagcatctgttatagag

SEQ ID NO: 2514154 - DNA, 25 bp, Homo sapien
gaaggcatggtgctcctcttgctgt

SEQ ID NO: 2514155 - DNA, 25 bp, Homo sapien
tcttgctgtgattattgaccctctg

SEQ ID NO: 2514156 - DNA, 25 bp, Homo sapien
ttgaagcaactgtgttccagggaca

SEQ ID NO: 2514157 - DNA, 25 bp, Homo sapien
ctgctgcccgagagatgtatttaat

SEQ ID NO: 2514158 - DNA, 25 bp, Homo sapien
tgaagcaactgtgttccagggacag

SEQ ID NO: 2514159 - DNA, 25 bp, Homo sapien
gaagcaactgtgttccagggacagc

SEQ ID NO: 2514160 - DNA, 25 bp, Homo sapien
tcttcattccgtgagtcaccactac

SEQ ID NO: 2514161 - DNA, 25 bp, Homo sapien
caaatttcttcattccgtgagtcac

SEQ ID NO: 2514162 - DNA, 25 bp, Homo sapien
gtgagtcaccactaccttctgccaa

SEQ ID NO: 2514163 - DNA, 25 bp, Homo sapien
taccttctgccaaactaaatatgtc

SEQ ID NO: 2514164 - DNA, 25 bp, Homo sapien
aggttctggccagttgcagaaagca

SEQ ID NO: 2514165 - DNA, 25 bp, Homo sapien
gttgcagaaagcaatatgccagatg

SEQ ID NO: 2514166 - DNA, 25 bp, Homo sapien
aaagcaatatgccagatgtaaagta

SEQ ID NO: 2514167 - DNA, 25 bp, Homo sapien
atgcaaaggttctggccagttgcag

SEQ ID NO: 2514168 - DNA, 25 bp, Homo sapien
gaggtgtacgatggaactctgccag

SEQ ID NO: 2514169 - DNA, 25 bp, Homo sapien
gagcaaagcccttgcaggctgttat

SEQ ID NO: 2514170 - DNA, 25 bp, Homo sapien
ggcggcagctcaatgcgaaaacgat

SEQ ID NO: 2514171 - DNA, 25 bp, Homo sapien
cgattttttgccaccatgggttgtc

SEQ ID NO: 2514172 - DNA, 25 bp, Homo sapien
taagagataagtgattctgtacttg

SEQ ID NO: 2514173 - DNA, 25 bp, Homo sapien
gtgatatcattgatgggtcccggag

SEQ ID NO: 2514174 - DNA, 25 bp, Homo sapien
tccagatggtgatatcattgatggg

SEQ ID NO: 2514175 - DNA, 25 bp, Homo sapien
agtgattctgtacttgtcagagacc

SEQ ID NO: 2514176 - DNA, 25 bp, Homo sapien
gcacagcgccaggtagaagagatgc

SEQ ID NO: 2514177 - DNA, 25 bp, Homo sapien
ccacacacgaactgaagagcatcca

SEQ ID NO: 2514178 - DNA, 25 bp, Homo sapien
gtctccggtccagccgtggcagagc

SEQ ID NO: 2514179 - DNA, 25 bp, Homo sapien
cctgtctccacacacgaactgaaga

SEQ ID NO: 2514180 - DNA, 25 bp, Homo sapien
tctaagtagtagaaaccatgctaag

SEQ ID NO: 2514181 - DNA, 25 bp, Homo sapien
gaaaccatgctaagatgatcattaa

SEQ ID NO: 2514182 - DNA, 25 bp, Homo sapien
tagtagaaaccatgctaagatgatc

SEQ ID NO: 2514183 - DNA, 25 bp, Homo sapien
accatgctaagatgatcattaagtt

SEQ ID NO: 2514184 - DNA, 25 bp, Homo sapien
acttctctcagatgcatctactttc

SEQ ID NO: 2514185 - DNA, 25 bp, Homo sapien
tctcagatgcatctactttcagcat

SEQ ID NO: 2514186 - DNA, 25 bp, Homo sapien
ccaagaagcctctcaaggtgagtgg

SEQ ID NO: 2514187 - DNA, 25 bp, Homo sapien
tccaagaagcctctcaaggtgagtg

SEQ ID NO: 2514188 - DNA, 25 bp, Homo sapien
gtagtggcaggtccattcaacccca

SEQ ID NO: 2514189 - DNA, 25 bp, Homo sapien
gaaggctaagcacctgcaactgtag

SEQ ID NO: 2514190 - DNA, 25 bp, Homo sapien
tcctttagtgtagggaacagtccag

SEQ ID NO: 2514191 - DNA, 25 bp, Homo sapien
caaaacactgggactggaagaagca

SEQ ID NO: 2514192 - DNA, 25 bp, Homo sapien
gcataagtgcagagttccgggacct

SEQ ID NO: 2514193 - DNA, 25 bp, Homo sapien
tgtagcagcccagatagtgacccaa

SEQ ID NO: 2514194 - DNA, 25 bp, Homo sapien
tagaactacggccagcaatcggaaa

SEQ ID NO: 2514195 - DNA, 25 bp, Homo sapien
caattgaatcggtggagccagtgac

SEQ ID NO: 2514196 - DNA, 25 bp, Homo sapien
tgaagaacagttctaggcagaagca

SEQ ID NO: 2514197 - DNA, 25 bp, Homo sapien
ttctgtaatgacaccacggaagccc

SEQ ID NO: 2514198 - DNA, 25 bp, Homo sapien
tccccaatgacttcaaagagtaaga

SEQ ID NO: 2514199 - DNA, 25 bp, Homo sapien
ctatagcccttagccatagagagga

SEQ ID NO: 2514200 - DNA, 25 bp, Homo sapien
aaaagcagcacttaaataattgggt

SEQ ID NO: 2514201 - DNA, 25 bp, Homo sapien
taattgggttggaagactgctgatt

SEQ ID NO: 2514202 - DNA, 25 bp, Homo sapien
gcagcacttaaataattgggttgga

SEQ ID NO: 2514203 - DNA, 25 bp, Homo sapien
ttaaataattgggttggaagactgc

SEQ ID NO: 2514204 - DNA, 25 bp, Homo sapien
tattccattgcgcaggctctatctg

SEQ ID NO: 2514205 - DNA, 25 bp, Homo sapien
agtgacagtgagatttagcaaacag

SEQ ID NO: 2514206 - DNA, 25 bp, Homo sapien
tgctctgaatttagcagtgacagtg

SEQ ID NO: 2514207 - DNA, 25 bp, Homo sapien
gagatgttgagagcaatgtcacatt

SEQ ID NO: 2514208 - DNA, 25 bp, Homo sapien
gaagttaggacactcaattgcagcg

SEQ ID NO: 2514209 - DNA, 25 bp, Homo sapien
tgcagcggggatgctgcatccagaa

SEQ ID NO: 2514210 - DNA, 25 bp, Homo sapien
agttaggacactcaattgcagcggg

SEQ ID NO: 2514211 - DNA, 25 bp, Homo sapien
tccagaagagccctttgtaatgctc

SEQ ID NO: 2514212 - DNA, 25 bp, Homo sapien
tagttccctttaatcaactgctctc

SEQ ID NO: 2514213 - DNA, 25 bp, Homo sapien
cctttaatcaactgctctctggctt

SEQ ID NO: 2514214 - DNA, 25 bp, Homo sapien
aatcaactgctctctggcttcacat

SEQ ID NO: 2514215 - DNA, 25 bp, Homo sapien
atcaactgctctctggcttcacatc

SEQ ID NO: 2514216 - DNA, 25 bp, Homo sapien
ggaaagcgaagacatccagaggcaa

SEQ ID NO: 2514217 - DNA, 25 bp, Homo sapien
gcttgggttcccatcgaggtagcaa

SEQ ID NO: 2514218 - DNA, 25 bp, Homo sapien
tggtgagcttctctgcgaggtgcca

SEQ ID NO: 2514219 - DNA, 25 bp, Homo sapien
gtagcaatcccacatcctggactgg

SEQ ID NO: 2514220 - DNA, 25 bp, Homo sapien
gaatcgtacaagaaatatatgttcc

SEQ ID NO: 2514221 - DNA, 25 bp, Homo sapien
caaaggtacttgatccaagtatgga

SEQ ID NO: 2514222 - DNA, 25 bp, Homo sapien
acaaaggtacttgatccaagtatgg

SEQ ID NO: 2514223 - DNA, 25 bp, Homo sapien
aagctgagctatgaatcgtacaaga

SEQ ID NO: 2514224 - DNA, 25 bp, Homo sapien
atgtttatttgatgacgccaaagag

SEQ ID NO: 2514225 - DNA, 25 bp, Homo sapien
atttgatgacgccaaagagctttag

SEQ ID NO: 2514226 - DNA, 25 bp, Homo sapien
tgacgccaaagagctttagtgaagc

SEQ ID NO: 2514227 - DNA, 25 bp, Homo sapien
tgatgacgccaaagagctttagtga

SEQ ID NO: 2514228 - DNA, 25 bp, Homo sapien
catgaaacttgtgaactgctgctgt

SEQ ID NO: 2514229 - DNA, 25 bp, Homo sapien
aaagcttttcaacatttggctgagg

SEQ ID NO: 2514230 - DNA, 25 bp, Homo sapien
ggttatgacactcttttaggcaggg

SEQ ID NO: 2514231 - DNA, 25 bp, Homo sapien
gaaagtcccctaagtggttatgaca

SEQ ID NO: 2514232 - DNA, 25 bp, Homo sapien
gcctgagaactgagagccgttgaat

SEQ ID NO: 2514233 - DNA, 25 bp, Homo sapien
tacaagccaccctgacacttaatgg

SEQ ID NO: 2514234 - DNA, 25 bp, Homo sapien
ccgttgaatggcgacacttgcagca

SEQ ID NO: 2514235 - DNA, 25 bp, Homo sapien
gttgaaagaaccacctccaagatga

SEQ ID NO: 2514236 - DNA, 25 bp, Homo sapien
tataagagtctgctccaagctgaac

SEQ ID NO: 2514237 - DNA, 25 bp, Homo sapien
tgaacaggcctatttaaaccagagg

SEQ ID NO: 2514238 - DNA, 25 bp, Homo sapien
tcccacttaatataagagtctgctc

SEQ ID NO: 2514239 - DNA, 25 bp, Homo sapien
gaggccatgactaggccaccaggaa

SEQ ID NO: 2514240 - DNA, 25 bp, Homo sapien
gaggtagatccagagaaggactgcc

SEQ ID NO: 2514241 - DNA, 25 bp, Homo sapien
aggactgcctgttcagcagggagca

SEQ ID NO: 2514242 - DNA, 25 bp, Homo sapien
caaaggtagtggaattggcaatgga

SEQ ID NO: 2514243 - DNA, 25 bp, Homo sapien
gagactgagataaggaccaggaccc

SEQ ID NO: 2514244 - DNA, 25 bp, Homo sapien
tgagcactggcataagtggatgcga

SEQ ID NO: 2514245 - DNA, 25 bp, Homo sapien
ctgacaccagtgccgggtgagcact

SEQ ID NO: 2514246 - DNA, 25 bp, Homo sapien
accagtgccgggtgagcactggcat

SEQ ID NO: 2514247 - DNA, 25 bp, Homo sapien
gacgccaatatttccatgtgcctgg

SEQ ID NO: 2514248 - DNA, 25 bp, Homo sapien
tggttcttaatttgacgccaatatt

SEQ ID NO: 2514249 - DNA, 25 bp, Homo sapien
taatttgacgccaatatttccatgt

SEQ ID NO: 2514250 - DNA, 25 bp, Homo sapien
gccaatatttccatgtgcctggaaa

SEQ ID NO: 2514251 - DNA, 25 bp, Homo sapien
gaacatacaggtagggatttaatgg

SEQ ID NO: 2514252 - DNA, 25 bp, Homo sapien
gtgagacagaacatacaggtaggga

SEQ ID NO: 2514253 - DNA, 25 bp, Homo sapien
caggtagggatttaatggtcttggc

SEQ ID NO: 2514254 - DNA, 25 bp, Homo sapien
gatttaatggtcttggcaatgaaag

SEQ ID NO: 2514255 - DNA, 25 bp, Homo sapien
tgaagctgttgaaggtgtcagcccc

SEQ ID NO: 2514256 - DNA, 25 bp, Homo sapien
gactgaagctgttgaaggtgtcagc

SEQ ID NO: 2514257 - DNA, 25 bp, Homo sapien
aatgttcaactcgatggttcgtctg

SEQ ID NO: 2514258 - DNA, 25 bp, Homo sapien
actcgatggttcgtctgtgacatca

SEQ ID NO: 2514259 - DNA, 25 bp, Homo sapien
aggccaaatgagaggtccaaatttc

SEQ ID NO: 2514260 - DNA, 25 bp, Homo sapien
gatgactgagtaactgttgagaatg

SEQ ID NO: 2514261 - DNA, 25 bp, Homo sapien
cttgatgactgagtaactgttgaga

SEQ ID NO: 2514262 - DNA, 25 bp, Homo sapien
ccaaatgagaggtccaaatttctcc

SEQ ID NO: 2514263 - DNA, 25 bp, Homo sapien
aaataggacccatgctttgtgctcc

SEQ ID NO: 2514264 - DNA, 25 bp, Homo sapien
cggagcttatggctgcccacccctt

SEQ ID NO: 2514265 - DNA, 25 bp, Homo sapien
tatggctgcccaccccttcttggaa

SEQ ID NO: 2514266 - DNA, 25 bp, Homo sapien
ctttggaaaataggacccatgcttt

SEQ ID NO: 2514267 - DNA, 25 bp, Homo sapien
tgtgtgtttcatcccccttgctcct

SEQ ID NO: 2514268 - DNA, 25 bp, Homo sapien
tgttagatacaaggacactgtgtgt

SEQ ID NO: 2514269 - DNA, 25 bp, Homo sapien
cttgctccttaaccagccccttaca

SEQ ID NO: 2514270 - DNA, 25 bp, Homo sapien
caagtgttttgttagatacaaggac

SEQ ID NO: 2514271 - DNA, 25 bp, Homo sapien
gccgttgctttcgttgctttccctg

SEQ ID NO: 2514272 - DNA, 25 bp, Homo sapien
ccattgtctgggaaccgattgaagt

SEQ ID NO: 2514273 - DNA, 25 bp, Homo sapien
ggttggcttagttaattcatcccac

SEQ ID NO: 2514274 - DNA, 25 bp, Homo sapien
gattgaagtccaactgccgttgctt

SEQ ID NO: 2514275 - DNA, 25 bp, Homo sapien
gggttcacgtcagtatgctcattcc

SEQ ID NO: 2514276 - DNA, 25 bp, Homo sapien
atccaaacccacttctaacccagag

SEQ ID NO: 2514277 - DNA, 25 bp, Homo sapien
agctcatgccacacaaccaatccaa

SEQ ID NO: 2514278 - DNA, 25 bp, Homo sapien
agagccaacccgagtcttcaaagcg

SEQ ID NO: 2514279 - DNA, 25 bp, Homo sapien
ttgggacagggttagcagagagttt

SEQ ID NO: 2514280 - DNA, 25 bp, Homo sapien
cattaagttctagaactgctgagca

SEQ ID NO: 2514281 - DNA, 25 bp, Homo sapien
gtttctcattaagttctagaactgc

SEQ ID NO: 2514282 - DNA, 25 bp, Homo sapien
gggacagggttagcagagagtttct

SEQ ID NO: 2514283 - DNA, 25 bp, Homo sapien
tggccctcggatcgggctctactct

SEQ ID NO: 2514284 - DNA, 25 bp, Homo sapien
tattaacttccatatctttatctgt

SEQ ID NO: 2514285 - DNA, 25 bp, Homo sapien
gatcgggctctactctcttctgtgt

SEQ ID NO: 2514286 - DNA, 25 bp, Homo sapien
gccaggccatcttccaccaaccatc

SEQ ID NO: 2514287 - DNA, 25 bp, Homo sapien
tcttcatgggtgaaactcgagtgcc

SEQ ID NO: 2514288 - DNA, 25 bp, Homo sapien
gagaagtttgtgataaagcacctac

SEQ ID NO: 2514289 - DNA, 25 bp, Homo sapien
gcagccccttcagtgctggtaggga

SEQ ID NO: 2514290 - DNA, 25 bp, Homo sapien
gtgcccgggcactagaaatagccag

SEQ ID NO: 2514291 - DNA, 25 bp, Homo sapien
tatttgaaatcactagggctacgta

SEQ ID NO: 2514292 - DNA, 25 bp, Homo sapien
gggctacgtactccatatattcaag

SEQ ID NO: 2514293 - DNA, 25 bp, Homo sapien
ggatgaatccctttatatgcaccaa

SEQ ID NO: 2514294 - DNA, 25 bp, Homo sapien
gggatttcagaacttgtgttctcat

SEQ ID NO: 2514295 - DNA, 25 bp, Homo sapien
ctggaccatcatgatacctctccag

SEQ ID NO: 2514296 - DNA, 25 bp, Homo sapien
tgatagatgatgcatgttgttgatg

SEQ ID NO: 2514297 - DNA, 25 bp, Homo sapien
tgttgatagatgatgcatgttgttg

SEQ ID NO: 2514298 - DNA, 25 bp, Homo sapien
ttaaatatttaggtggacagatggc

SEQ ID NO: 2514299 - DNA, 25 bp, Homo sapien
gggacatttatgtccaaagttggct

SEQ ID NO: 2514300 - DNA, 25 bp, Homo sapien
caagcctacaagcagtgggtcatgg

SEQ ID NO: 2514301 - DNA, 25 bp, Homo sapien
tgtgaggcacctgtgagcacaccct

SEQ ID NO: 2514302 - DNA, 25 bp, Homo sapien
gaggcacctgtgagcacacccttgt

SEQ ID NO: 2514303 - DNA, 25 bp, Homo sapien
tttgaacgaggttttgatgtatgaa

SEQ ID NO: 2514304 - DNA, 25 bp, Homo sapien
gaaaatgttcgtttcctgcaggaca

SEQ ID NO: 2514305 - DNA, 25 bp, Homo sapien
tggagagctagagagaactcttgca

SEQ ID NO: 2514306 - DNA, 25 bp, Homo sapien
ggtgaccagacacgatcagggattt

SEQ ID NO: 2514307 - DNA, 25 bp, Homo sapien
gcagatgtaaacctatatgttctcc

SEQ ID NO: 2514308 - DNA, 25 bp, Homo sapien
tatttatgatggatcttgtggtcag

SEQ ID NO: 2514309 - DNA, 25 bp, Homo sapien
accaccctgtcagttattacgtctg

SEQ ID NO: 2514310 - DNA, 25 bp, Homo sapien
ttttcccagggtgtctttagcaaca

SEQ ID NO: 2514311 - DNA, 25 bp, Homo sapien
aaattcaggtaaagagatatgccta

SEQ ID NO: 2514312 - DNA, 25 bp, Homo sapien
ttcaggtaaagagatatgcctatac

SEQ ID NO: 2514313 - DNA, 25 bp, Homo sapien
taaattcaggtaaagagatatgcct

SEQ ID NO: 2514314 - DNA, 25 bp, Homo sapien
aattcaggtaaagagatatgcctat

SEQ ID NO: 2514315 - DNA, 25 bp, Homo sapien
cctcttggaaattggattcctatct

SEQ ID NO: 2514316 - DNA, 25 bp, Homo sapien
gattccacctgttgtttgttgccat

SEQ ID NO: 2514317 - DNA, 25 bp, Homo sapien
tatctatcctcttggaaattggatt

SEQ ID NO: 2514318 - DNA, 25 bp, Homo sapien
ggattccacctgttgtttgttgcca

SEQ ID NO: 2514319 - DNA, 25 bp, Homo sapien
cagagctttgcttgctaagcctgga

SEQ ID NO: 2514320 - DNA, 25 bp, Homo sapien
caaccatcacccttacttcatccag

SEQ ID NO: 2514321 - DNA, 25 bp, Homo sapien
ctttttgcctagatacaaccatcac

SEQ ID NO: 2514322 - DNA, 25 bp, Homo sapien
atttctttttgcctagatacaacca

SEQ ID NO: 2514323 - DNA, 25 bp, Homo sapien
caatgttgagaaccaggacttgcat

SEQ ID NO: 2514324 - DNA, 25 bp, Homo sapien
ctctgtctccccttttcatctaaat

SEQ ID NO: 2514325 - DNA, 25 bp, Homo sapien
tttcatctaaatttggaagaacaat

SEQ ID NO: 2514326 - DNA, 25 bp, Homo sapien
ctaaatttggaagaacaatgttgag

SEQ ID NO: 2514327 - DNA, 25 bp, Homo sapien
cataaggtcatatttaaagctggtg

SEQ ID NO: 2514328 - DNA, 25 bp, Homo sapien
gagcgttataagacccataaggtca

SEQ ID NO: 2514329 - DNA, 25 bp, Homo sapien
gtagatggaaataaagcttgccatg

SEQ ID NO: 2514330 - DNA, 25 bp, Homo sapien
gaaagctctgtgataatcttagtag

SEQ ID NO: 2514331 - DNA, 25 bp, Homo sapien
ttgatgatattcgctactaaagaat

SEQ ID NO: 2514332 - DNA, 25 bp, Homo sapien
atgatattcgctactaaagaatttc

SEQ ID NO: 2514333 - DNA, 25 bp, Homo sapien
tgatgatattcgctactaaagaatt

SEQ ID NO: 2514334 - DNA, 25 bp, Homo sapien
gatgatattcgctactaaagaattt

SEQ ID NO: 2514335 - DNA, 25 bp, Homo sapien
ctgaaatctctctccgattgaaagc

SEQ ID NO: 2514336 - DNA, 25 bp, Homo sapien
ctctctccgattgaaagccatcttt

SEQ ID NO: 2514337 - DNA, 25 bp, Homo sapien
tttcataacactgaaaagatgtaac

SEQ ID NO: 2514338 - DNA, 25 bp, Homo sapien
aatctctctccgattgaaagccatc

SEQ ID NO: 2514339 - DNA, 25 bp, Homo sapien
gaagccactatgtggttgggtacag

SEQ ID NO: 2514340 - DNA, 25 bp, Homo sapien
cactatgtggttgggtacagggtct

SEQ ID NO: 2514341 - DNA, 25 bp, Homo sapien
tcttcacttcttgtgtagtgagagg

SEQ ID NO: 2514342 - DNA, 25 bp, Homo sapien
cttcacttcttgtgtagtgagagga

SEQ ID NO: 2514343 - DNA, 25 bp, Homo sapien
gaaccgtcagacactcccatcaaaa

SEQ ID NO: 2514344 - DNA, 25 bp, Homo sapien
actccgtgcagaaccgtcagacact

SEQ ID NO: 2514345 - DNA, 25 bp, Homo sapien
ggagggactccgtgcagaaccgtca

SEQ ID NO: 2514346 - DNA, 25 bp, Homo sapien
ctgaagttgggagggactccgtgca

SEQ ID NO: 2514347 - DNA, 25 bp, Homo sapien
cttggagaggtcagaaacttttggc

SEQ ID NO: 2514348 - DNA, 25 bp, Homo sapien
ttggagaggtcagaaacttttggct

SEQ ID NO: 2514349 - DNA, 25 bp, Homo sapien
tggagaggtcagaaacttttggcta

SEQ ID NO: 2514350 - DNA, 25 bp, Homo sapien
ggagaggtcagaaacttttggctac

SEQ ID NO: 2514351 - DNA, 25 bp, Homo sapien
ttgctaccaatttgcctgaaccatg

SEQ ID NO: 2514352 - DNA, 25 bp, Homo sapien
tcccttgttctaattgctaccaatt

SEQ ID NO: 2514353 - DNA, 25 bp, Homo sapien
caagattgctttatccccttggatg

SEQ ID NO: 2514354 - DNA, 25 bp, Homo sapien
gatgtcatcatacttggcttgccaa

SEQ ID NO: 2514355 - DNA, 25 bp, Homo sapien
actgtccacacatccccaagtcctg

SEQ ID NO: 2514356 - DNA, 25 bp, Homo sapien
cagctgcctcaatttgatatatgta

SEQ ID NO: 2514357 - DNA, 25 bp, Homo sapien
ctcttggaaagtttggagcctgtcc

SEQ ID NO: 2514358 - DNA, 25 bp, Homo sapien
tcccccagctgcctcaatttgatat

SEQ ID NO: 2514359 - DNA, 25 bp, Homo sapien
ggatctcattacaatctcaataagc

SEQ ID NO: 2514360 - DNA, 25 bp, Homo sapien
ccaggcaaaaatggactgtttggtg

SEQ ID NO: 2514361 - DNA, 25 bp, Homo sapien
gatgaccgtgtcgaatgtgttgtta

SEQ ID NO: 2514362 - DNA, 25 bp, Homo sapien
ataagaagtaatgcccgtcacagtg

SEQ ID NO: 2514363 - DNA, 25 bp, Homo sapien
ctgcatctttgaagtctggctggga

SEQ ID NO: 2514364 - DNA, 25 bp, Homo sapien
ccttggagttccaactctgcatctt

SEQ ID NO: 2514365 - DNA, 25 bp, Homo sapien
caggtggcatggtcttactgcctgg

SEQ ID NO: 2514366 - DNA, 25 bp, Homo sapien
ctggaattgccaaccttggagttcc

SEQ ID NO: 2514367 - DNA, 25 bp, Homo sapien
gcatctggggaaggtttgttctcct

SEQ ID NO: 2514368 - DNA, 25 bp, Homo sapien
cttttcaaattgaaggccctgacct

SEQ ID NO: 2514369 - DNA, 25 bp, Homo sapien
tttcaaattgaaggccctgacctgg

SEQ ID NO: 2514370 - DNA, 25 bp, Homo sapien
tctccttttcaaattgaaggccctg

SEQ ID NO: 2514371 - DNA, 25 bp, Homo sapien
tactccctgctttccactgcagttg

SEQ ID NO: 2514372 - DNA, 25 bp, Homo sapien
ttctgtttggttgttttctgcactg

SEQ ID NO: 2514373 - DNA, 25 bp, Homo sapien
gttttctgcactggctcttggctct

SEQ ID NO: 2514374 - DNA, 25 bp, Homo sapien
tgcagttgctctcacctgaatgcat

SEQ ID NO: 2514375 - DNA, 25 bp, Homo sapien
tgggtgattggagccctcttcagta

SEQ ID NO: 2514376 - DNA, 25 bp, Homo sapien
cttgggtgattggagccctcttcag

SEQ ID NO: 2514377 - DNA, 25 bp, Homo sapien
ttgggtgattggagccctcttcagt

SEQ ID NO: 2514378 - DNA, 25 bp, Homo sapien
ggtgattggagccctcttcagtagg

SEQ ID NO: 2514379 - DNA, 25 bp, Homo sapien
ttggacataagaaatgctctccttt

SEQ ID NO: 2514380 - DNA, 25 bp, Homo sapien
aagaaatgctctccttttcagcatc

SEQ ID NO: 2514381 - DNA, 25 bp, Homo sapien
gaaatctgtcttctcgattgcccct

SEQ ID NO: 2514382 - DNA, 25 bp, Homo sapien
ccttaaattctggactcagattggg

SEQ ID NO: 2514383 - DNA, 25 bp, Homo sapien
cttcccaggtggggagctcagctgt

SEQ ID NO: 2514384 - DNA, 25 bp, Homo sapien
cttctgctcgtggctcatctgtctc

SEQ ID NO: 2514385 - DNA, 25 bp, Homo sapien
ctgctcgtggctcatctgtctctct

SEQ ID NO: 2514386 - DNA, 25 bp, Homo sapien
tcgtggctcatctgtctctctcctt

SEQ ID NO: 2514387 - DNA, 25 bp, Homo sapien
taaaggccagtaatacatccctaag

SEQ ID NO: 2514388 - DNA, 25 bp, Homo sapien
ggccagtaatacatccctaaggaaa

SEQ ID NO: 2514389 - DNA, 25 bp, Homo sapien
cacaagaatagcttcatacatccag

SEQ ID NO: 2514390 - DNA, 25 bp, Homo sapien
caagaatagcttcatacatccaggt

SEQ ID NO: 2514391 - DNA, 25 bp, Homo sapien
gcttcatcttcaagccagaggcctg

SEQ ID NO: 2514392 - DNA, 25 bp, Homo sapien
cagctcccaaggcatgagggtttgt

SEQ ID NO: 2514393 - DNA, 25 bp, Homo sapien
tggcttagtcctggcttcatcttca

SEQ ID NO: 2514394 - DNA, 25 bp, Homo sapien
ttttcccgattaccctgctggctta

SEQ ID NO: 2514395 - DNA, 25 bp, Homo sapien
tgaatcagaggtggcccatcctgaa

SEQ ID NO: 2514396 - DNA, 25 bp, Homo sapien
ccatcctgaagcttgccagagactt

SEQ ID NO: 2514397 - DNA, 25 bp, Homo sapien
cctgggttgacttttgacttcacca

SEQ ID NO: 2514398 - DNA, 25 bp, Homo sapien
cttttgacttcaccagaaatggcac

SEQ ID NO: 2514399 - DNA, 25 bp, Homo sapien
ttgaagaccatcttgactctttggg

SEQ ID NO: 2514400 - DNA, 25 bp, Homo sapien
gagtccaacacatctatgctgcagc

SEQ ID NO: 2514401 - DNA, 25 bp, Homo sapien
gggtgagtccaacacatctatgctg

SEQ ID NO: 2514402 - DNA, 25 bp, Homo sapien
agctgatcatattgtagcctgctga

SEQ ID NO: 2514403 - DNA, 25 bp, Homo sapien
tcccaatctttatatgcctggatgg

SEQ ID NO: 2514404 - DNA, 25 bp, Homo sapien
ccacaaaatagatgggctgaaagtc

SEQ ID NO: 2514405 - DNA, 25 bp, Homo sapien
cacaaaatagatgggctgaaagtcc

SEQ ID NO: 2514406 - DNA, 25 bp, Homo sapien
tatatgcctggatggcagcagcttc

SEQ ID NO: 2514407 - DNA, 25 bp, Homo sapien
ccaacgtgaagctgtgtgttaccaa

SEQ ID NO: 2514408 - DNA, 25 bp, Homo sapien
cagtcataaattccaattggacggg

SEQ ID NO: 2514409 - DNA, 25 bp, Homo sapien
gggccttctgccacttccagtcata

SEQ ID NO: 2514410 - DNA, 25 bp, Homo sapien
ggtgagacattgctataatgcgggc

SEQ ID NO: 2514411 - DNA, 25 bp, Homo sapien
aatacctctgcctctcgatttggag

SEQ ID NO: 2514412 - DNA, 25 bp, Homo sapien
ccaggcctggtgctaaaatgacatg

SEQ ID NO: 2514413 - DNA, 25 bp, Homo sapien
tactatacagagaaatgcgccaggc

SEQ ID NO: 2514414 - DNA, 25 bp, Homo sapien
tctgtgggacgttgctcatgccttt

SEQ ID NO: 2514415 - DNA, 25 bp, Homo sapien
aacaagtcctgtcccataggcttcg

SEQ ID NO: 2514416 - DNA, 25 bp, Homo sapien
gctccactctgcttgcaaagatcaa

SEQ ID NO: 2514417 - DNA, 25 bp, Homo sapien
tctgcttgcaaagatcaaactctaa

SEQ ID NO: 2514418 - DNA, 25 bp, Homo sapien
tcctgtcccataggcttcgatggct

SEQ ID NO: 2514419 - DNA, 25 bp, Homo sapien
cactcccaagagatatcaagctggg

SEQ ID NO: 2514420 - DNA, 25 bp, Homo sapien
aagtacactcccaagagatatcaag

SEQ ID NO: 2514421 - DNA, 25 bp, Homo sapien
ttcttctgtggtccagtaagtacac

SEQ ID NO: 2514422 - DNA, 25 bp, Homo sapien
ggtccagtaagtacactcccaagag

SEQ ID NO: 2514423 - DNA, 25 bp, Homo sapien
ccagtgaagtgaaccttctctgttt

SEQ ID NO: 2514424 - DNA, 25 bp, Homo sapien
ctccacccagtgaagtgaaccttct

SEQ ID NO: 2514425 - DNA, 25 bp, Homo sapien
cttgatcactagaaccagcagaagg

SEQ ID NO: 2514426 - DNA, 25 bp, Homo sapien
tgattcgatctataatgtgatcttc

SEQ ID NO: 2514427 - DNA, 25 bp, Homo sapien
cagtgtgccccgatgcataagaaca

SEQ ID NO: 2514428 - DNA, 25 bp, Homo sapien
tcttgacagcagctagcttgtgcag

SEQ ID NO: 2514429 - DNA, 25 bp, Homo sapien
gaagccaccaatgtgtcttgacagc

SEQ ID NO: 2514430 - DNA, 25 bp, Homo sapien
catatttggccccaactaaagagcc

SEQ ID NO: 2514431 - DNA, 25 bp, Homo sapien
catggcactatgatctaataattca

SEQ ID NO: 2514432 - DNA, 25 bp, Homo sapien
ccttatctgcaaacatggcactatg

SEQ ID NO: 2514433 - DNA, 25 bp, Homo sapien
gcaaacatggcactatgatctaata

SEQ ID NO: 2514434 - DNA, 25 bp, Homo sapien
gatctaataattcatgacggcaacc

SEQ ID NO: 2514435 - DNA, 25 bp, Homo sapien
caagaggtgataaatacgattcata

SEQ ID NO: 2514436 - DNA, 25 bp, Homo sapien
taaatacgattcatagtcacatagc

SEQ ID NO: 2514437 - DNA, 25 bp, Homo sapien
tggagaagaaaaacaagaggtgata

SEQ ID NO: 2514438 - DNA, 25 bp, Homo sapien
tagtcacatagcaaagaccacagga

SEQ ID NO: 2514439 - DNA, 25 bp, Homo sapien
ctaaaagtgtttatccagagactgc

SEQ ID NO: 2514440 - DNA, 25 bp, Homo sapien
gaaatatgtaaggactgcgatggca

SEQ ID NO: 2514441 - DNA, 25 bp, Homo sapien
tcttcccatgggtagtgcaggtggc

SEQ ID NO: 2514442 - DNA, 25 bp, Homo sapien
tagcagtagactggagtggctctca

SEQ ID NO: 2514443 - DNA, 25 bp, Homo sapien
cgtggagccaggagtgatactcgaa

SEQ ID NO: 2514444 - DNA, 25 bp, Homo sapien
gccctgcagctaaaagtctcttctt

SEQ ID NO: 2514445 - DNA, 25 bp, Homo sapien
tattgggtgctctggaggatctgga

SEQ ID NO: 2514446 - DNA, 25 bp, Homo sapien
gggtatttgatgtattgggtgctct

SEQ ID NO: 2514447 - DNA, 25 bp, Homo sapien
ctcgggggactgcttcatggaatga

SEQ ID NO: 2514448 - DNA, 25 bp, Homo sapien
tacgcctttcagcagtcttctgatg

SEQ ID NO: 2514449 - DNA, 25 bp, Homo sapien
tagaaggttagccagaaaaactgtc

SEQ ID NO: 2514450 - DNA, 25 bp, Homo sapien
tggtcagagccttgttgacaaatct

SEQ ID NO: 2514451 - DNA, 25 bp, Homo sapien
tagtgcttcgagaaaagtttacgcc

SEQ ID NO: 2514452 - DNA, 25 bp, Homo sapien
cacccttgcctcctttgtctgaatt

SEQ ID NO: 2514453 - DNA, 25 bp, Homo sapien
ccttgcctcctttgtctgaattaac

SEQ ID NO: 2514454 - DNA, 25 bp, Homo sapien
catcattcaaatcagccaaaccacc

SEQ ID NO: 2514455 - DNA, 25 bp, Homo sapien
attcaaatcagccaaaccacccttg

SEQ ID NO: 2514456 - DNA, 25 bp, Homo sapien
cacggctattgttgctaaggaggcg

SEQ ID NO: 2514457 - DNA, 25 bp, Homo sapien
attgttgctaaggaggcgatggcca

SEQ ID NO: 2514458 - DNA, 25 bp, Homo sapien
tgagtgtgtacacggctattgttgc

SEQ ID NO: 2514459 - DNA, 25 bp, Homo sapien
cgatggccagccatgggtaatggct

SEQ ID NO: 2514460 - DNA, 25 bp, Homo sapien
gcggctttgctggagccctcacatc

SEQ ID NO: 2514461 - DNA, 25 bp, Homo sapien
tgtgaccctctcacatagccagagc

SEQ ID NO: 2514462 - DNA, 25 bp, Homo sapien
ccatgaggtaatgaatgtgaccctc

SEQ ID NO: 2514463 - DNA, 25 bp, Homo sapien
cacacacgagctaatttggagagca

SEQ ID NO: 2514464 - DNA, 25 bp, Homo sapien
caaaactatattaggcccggcgcag

SEQ ID NO: 2514465 - DNA, 25 bp, Homo sapien
taaacatcgtgagaagtcctgcagg

SEQ ID NO: 2514466 - DNA, 25 bp, Homo sapien
gcccctgcttggagaactgctgaca

SEQ ID NO: 2514467 - DNA, 25 bp, Homo sapien
gaaagaccttggctggaaacccaga

SEQ ID NO: 2514468 - DNA, 25 bp, Homo sapien
tattactgttcaatatgagccgttt

SEQ ID NO: 2514469 - DNA, 25 bp, Homo sapien
tactgttcaatatgagccgttttgt

SEQ ID NO: 2514470 - DNA, 25 bp, Homo sapien
tttgtattactgttcaatatgagcc

SEQ ID NO: 2514471 - DNA, 25 bp, Homo sapien
tgttcaatatgagccgttttgtgga

SEQ ID NO: 2514472 - DNA, 25 bp, Homo sapien
tccagttgggttcagccgatggaga

SEQ ID NO: 2514473 - DNA, 25 bp, Homo sapien
aaattcacgagctttctgtcatgga

SEQ ID NO: 2514474 - DNA, 25 bp, Homo sapien
tccgctcccgatgtgtagaaagaat

SEQ ID NO: 2514475 - DNA, 25 bp, Homo sapien
tcagcctgaacggactgagtcatgg

SEQ ID NO: 2514476 - DNA, 25 bp, Homo sapien
ggatcatcatcagtaaatcggggga

SEQ ID NO: 2514477 - DNA, 25 bp, Homo sapien
aagatggaaactgcctgacagggtg

SEQ ID NO: 2514478 - DNA, 25 bp, Homo sapien
agaagatggaaactgcctgacaggg

SEQ ID NO: 2514479 - DNA, 25 bp, Homo sapien
aatcgggggatacgtcttgtttctg

SEQ ID NO: 2514480 - DNA, 25 bp, Homo sapien
attaggcttgccctctttggcctta

SEQ ID NO: 2514481 - DNA, 25 bp, Homo sapien
caacaccattcagtaaattacacca

SEQ ID NO: 2514482 - DNA, 25 bp, Homo sapien
cctttgcaatcccttctgggaatgg

SEQ ID NO: 2514483 - DNA, 25 bp, Homo sapien
tacaccatgtaactggcttaggcct

SEQ ID NO: 2514484 - DNA, 25 bp, Homo sapien
ctggcttaagcttccggtagtagct

SEQ ID NO: 2514485 - DNA, 25 bp, Homo sapien
cttaagcttccggtagtagctgtct

SEQ ID NO: 2514486 - DNA, 25 bp, Homo sapien
gcttccggtagtagctgtcttgtga

SEQ ID NO: 2514487 - DNA, 25 bp, Homo sapien
ccggtagtagctgtcttgtgagtga

SEQ ID NO: 2514488 - DNA, 25 bp, Homo sapien
agtttggttcctggaaatattcttg

SEQ ID NO: 2514489 - DNA, 25 bp, Homo sapien
agggtgaaagtggtccataccagat

SEQ ID NO: 2514490 - DNA, 25 bp, Homo sapien
gaaagtggtccataccagattcatg

SEQ ID NO: 2514491 - DNA, 25 bp, Homo sapien
ccagattcatgattggttaccaggt

SEQ ID NO: 2514492 - DNA, 25 bp, Homo sapien
ccaggtgattgcagttgtcaagatc

SEQ ID NO: 2514493 - DNA, 25 bp, Homo sapien
ctgtaagaaggagaaatgaagatat

SEQ ID NO: 2514494 - DNA, 25 bp, Homo sapien
taagaaggagaaatgaagatatccg

SEQ ID NO: 2514495 - DNA, 25 bp, Homo sapien
agaaggagaaatgaagatatccgag

SEQ ID NO: 2514496 - DNA, 25 bp, Homo sapien
tgtaagaaggagaaatgaagatatc

SEQ ID NO: 2514497 - DNA, 25 bp, Homo sapien
ctgaattctaaatgacgaatctttg

SEQ ID NO: 2514498 - DNA, 25 bp, Homo sapien
tccatgggacctgaagattggcagg

SEQ ID NO: 2514499 - DNA, 25 bp, Homo sapien
ccatgggacctgaagattggcaggt

SEQ ID NO: 2514500 - DNA, 25 bp, Homo sapien
ctccatgggacctgaagattggcag

SEQ ID NO: 2514501 - DNA, 25 bp, Homo sapien
tggggagtgtgaagacctaccagtg

SEQ ID NO: 2514502 - DNA, 25 bp, Homo sapien
ggggagtgtgaagacctaccagtgg

SEQ ID NO: 2514503 - DNA, 25 bp, Homo sapien
aacgacgtgggatactttgaaagca

SEQ ID NO: 2514504 - DNA, 25 bp, Homo sapien
caccctccatctccgggggctccgc

SEQ ID NO: 2514505 - DNA, 25 bp, Homo sapien
tcaccctccatctccgggggctccg

SEQ ID NO: 2514506 - DNA, 25 bp, Homo sapien
ctgaacgacgtgggatactttgaaa

SEQ ID NO: 2514507 - DNA, 25 bp, Homo sapien
cttgtcctccgggtgaaactgcaga

SEQ ID NO: 2514508 - DNA, 25 bp, Homo sapien
aagggcaggccgacccgatctgcag

SEQ ID NO: 2514509 - DNA, 25 bp, Homo sapien
gggtgaaactgcagaccgcacagcg

SEQ ID NO: 2514510 - DNA, 25 bp, Homo sapien
cagagcaagggcaggccgacccgat

SEQ ID NO: 2514511 - DNA, 25 bp, Homo sapien
ggagctgtccgtggttctggccggc

SEQ ID NO: 2514512 - DNA, 25 bp, Homo sapien
tctggccggcgtcgacccgtgggta

SEQ ID NO: 2514513 - DNA, 25 bp, Homo sapien
gctgtccgtggttctggccggcgtc

SEQ ID NO: 2514514 - DNA, 25 bp, Homo sapien
ctggccggcgtcgacccgtgggtat

SEQ ID NO: 2514515 - DNA, 25 bp, Homo sapien
cttttcggtttctccgtcagtgcca

SEQ ID NO: 2514516 - DNA, 25 bp, Homo sapien
tctgcgccctttgcagcgcaaatca

SEQ ID NO: 2514517 - DNA, 25 bp, Homo sapien
gcaaggtctgagagccgcgtttctg

SEQ ID NO: 2514518 - DNA, 25 bp, Homo sapien
gcaaatcaccgctggtgagaatctg

SEQ ID NO: 2514519 - DNA, 25 bp, Homo sapien
agtgccagcgacttttgtgttaaaa

SEQ ID NO: 2514520 - DNA, 25 bp, Homo sapien
tggccacagtgccagcgacttttgt

SEQ ID NO: 2514521 - DNA, 25 bp, Homo sapien
gccacagtgccagcgacttttgtgt

SEQ ID NO: 2514522 - DNA, 25 bp, Homo sapien
cacagtgccagcgacttttgtgtta

SEQ ID NO: 2514523 - DNA, 25 bp, Homo sapien
cagtactggcaacaaatgtgggtgc

SEQ ID NO: 2514524 - DNA, 25 bp, Homo sapien
tccactctggaaggcatgtatagtc

SEQ ID NO: 2514525 - DNA, 25 bp, Homo sapien
gccctcagtactggcaacaaatgtg

SEQ ID NO: 2514526 - DNA, 25 bp, Homo sapien
ctctggaaggcatgtatagtctgct

SEQ ID NO: 2514527 - DNA, 25 bp, Homo sapien
tctggacatcgtgtaccacctaaga

SEQ ID NO: 2514528 - DNA, 25 bp, Homo sapien
tggacatcgtgtaccacctaagaat

SEQ ID NO: 2514529 - DNA, 25 bp, Homo sapien
ttcctctggacatcgtgtaccacct

SEQ ID NO: 2514530 - DNA, 25 bp, Homo sapien
gacatcgtgtaccacctaagaatga

SEQ ID NO: 2514531 - DNA, 25 bp, Homo sapien
taaaattcagattcctactttcaga

SEQ ID NO: 2514532 - DNA, 25 bp, Homo sapien
catcaatgccacatgcttagaattt

SEQ ID NO: 2514533 - DNA, 25 bp, Homo sapien
aattatataacttagaaacctacag

SEQ ID NO: 2514534 - DNA, 25 bp, Homo sapien
tattttgattgtactcagcaagatc

SEQ ID NO: 2514535 - DNA, 25 bp, Homo sapien
catagctatagactgggcttttata

SEQ ID NO: 2514536 - DNA, 25 bp, Homo sapien
taaatcccatagctatagactgggc

SEQ ID NO: 2514537 - DNA, 25 bp, Homo sapien
tcccatagctatagactgggctttt

SEQ ID NO: 2514538 - DNA, 25 bp, Homo sapien
tttattaaatcccatagctatagac

SEQ ID NO: 2514539 - DNA, 25 bp, Homo sapien
ggtattgtaacaccccatcagtgga

SEQ ID NO: 2514540 - DNA, 25 bp, Homo sapien
catcagtggatcaggcatagctata

SEQ ID NO: 2514541 - DNA, 25 bp, Homo sapien
tacttaaaaatacaggtctctgggc

SEQ ID NO: 2514542 - DNA, 25 bp, Homo sapien
ggcagactgaccaccacaaatcagg

SEQ ID NO: 2514543 - DNA, 25 bp, Homo sapien
tttgagtgtcacaaggagcccctgc

SEQ ID NO: 2514544 - DNA, 25 bp, Homo sapien
aagtccgttgactgtccaggcatga

SEQ ID NO: 2514545 - DNA, 25 bp, Homo sapien
tctggccattttctcatgttacaaa

SEQ ID NO: 2514546 - DNA, 25 bp, Homo sapien
gggttggagatatgagcctctggcc

SEQ ID NO: 2514547 - DNA, 25 bp, Homo sapien
caaaacagacttgataattaattgg

SEQ ID NO: 2514548 - DNA, 25 bp, Homo sapien
tagtcaacatctgctgcatcataaa

SEQ ID NO: 2514549 - DNA, 25 bp, Homo sapien
caaccaagcctttagtcaacatctg

SEQ ID NO: 2514550 - DNA, 25 bp, Homo sapien
ttcctgaatatctaccaaccaagcc

SEQ ID NO: 2514551 - DNA, 25 bp, Homo sapien
ctccatcttgtaaaggatttaaggc

SEQ ID NO: 2514552 - DNA, 25 bp, Homo sapien
tcttgatgaaatgcgacagattact

SEQ ID NO: 2514553 - DNA, 25 bp, Homo sapien
caattgagagtatgggattatcatc

SEQ ID NO: 2514554 - DNA, 25 bp, Homo sapien
cttgaatgaagcaggtcccaaattt

SEQ ID NO: 2514555 - DNA, 25 bp, Homo sapien
agggcactgcaaaggattccaattt

SEQ ID NO: 2514556 - DNA, 25 bp, Homo sapien
gcactgcaaaggattccaatttcac

SEQ ID NO: 2514557 - DNA, 25 bp, Homo sapien
ttttctggagggcactgcaaaggat

SEQ ID NO: 2514558 - DNA, 25 bp, Homo sapien
tctggagggcactgcaaaggattcc

SEQ ID NO: 2514559 - DNA, 25 bp, Homo sapien
ccgagtggcctcgtaaggtgtaaat

SEQ ID NO: 2514560 - DNA, 25 bp, Homo sapien
tgagaaaccgagtggcctcgtaagg

SEQ ID NO: 2514561 - DNA, 25 bp, Homo sapien
gattactgagaaaccgagtggcctc

SEQ ID NO: 2514562 - DNA, 25 bp, Homo sapien
acagtcttcgattactgagaaaccg

SEQ ID NO: 2514563 - DNA, 25 bp, Homo sapien
tgtatgggtcgtagcgaactgagaa

SEQ ID NO: 2514564 - DNA, 25 bp, Homo sapien
ccaagacctcaatcctttgggtgta

SEQ ID NO: 2514565 - DNA, 25 bp, Homo sapien
atcagccaaaatcttaagctgctgg

SEQ ID NO: 2514566 - DNA, 25 bp, Homo sapien
ccgaggtattgtggcagcaaagttc

SEQ ID NO: 2514567 - DNA, 25 bp, Homo sapien
ccacaggcttgagtgaagggcacca

SEQ ID NO: 2514568 - DNA, 25 bp, Homo sapien
gatggagtaccttctatgttccaag

SEQ ID NO: 2514569 - DNA, 25 bp, Homo sapien
gctctcaagtggtgaagaaagcact

SEQ ID NO: 2514570 - DNA, 25 bp, Homo sapien
cctagagcagggtcttcaacagcca

SEQ ID NO: 2514571 - DNA, 25 bp, Homo sapien
tctgggagaaatccaccatgagggc

SEQ ID NO: 2514572 - DNA, 25 bp, Homo sapien
tctggtgaacctataagctgctgta

SEQ ID NO: 2514573 - DNA, 25 bp, Homo sapien
tgttacgggagacagtagggacctc

SEQ ID NO: 2514574 - DNA, 25 bp, Homo sapien
caagtttggcaagagtggctcccca

SEQ ID NO: 2514575 - DNA, 25 bp, Homo sapien
gctaggctcccagtttaggagagaa

SEQ ID NO: 2514576 - DNA, 25 bp, Homo sapien
gaaatagtcattttaggccacacca

SEQ ID NO: 2514577 - DNA, 25 bp, Homo sapien
ccctgctggtctgggactgatcact

SEQ ID NO: 2514578 - DNA, 25 bp, Homo sapien
cacttgctggttagagagttgtctc

SEQ ID NO: 2514579 - DNA, 25 bp, Homo sapien
cttgcaaatgtaaggtaagtgaatg

SEQ ID NO: 2514580 - DNA, 25 bp, Homo sapien
aaggaaggactaagatgtatgttca

SEQ ID NO: 2514581 - DNA, 25 bp, Homo sapien
aaaggaaggactaagatgtatgttc

SEQ ID NO: 2514582 - DNA, 25 bp, Homo sapien
gaaaggaaggactaagatgtatgtt

SEQ ID NO: 2514583 - DNA, 25 bp, Homo sapien
agaaaggaaggactaagatgtatgt

SEQ ID NO: 2514584 - DNA, 25 bp, Homo sapien
actccgtgacagtgtaattttggat

SEQ ID NO: 2514585 - DNA, 25 bp, Homo sapien
aatagaggggctggaactccgtgac

SEQ ID NO: 2514586 - DNA, 25 bp, Homo sapien
cagtgtaattttggatggctgtctt

SEQ ID NO: 2514587 - DNA, 25 bp, Homo sapien
catcattaaaactctctgccacgta

SEQ ID NO: 2514588 - DNA, 25 bp, Homo sapien
gagcccaaactccacagtaaaccag

SEQ ID NO: 2514589 - DNA, 25 bp, Homo sapien
tcaccaaaggatgacaggagcccag

SEQ ID NO: 2514590 - DNA, 25 bp, Homo sapien
ttatggagtctccttgtttgcagag

SEQ ID NO: 2514591 - DNA, 25 bp, Homo sapien
ctgtaattcaccaaaggatgacagg

SEQ ID NO: 2514592 - DNA, 25 bp, Homo sapien
tggcgagcttttcaatgtattcatc

SEQ ID NO: 2514593 - DNA, 25 bp, Homo sapien
tttcaatgtattcatcaggtgcacc

SEQ ID NO: 2514594 - DNA, 25 bp, Homo sapien
gtattcatcaggtgcacccagagag

SEQ ID NO: 2514595 - DNA, 25 bp, Homo sapien
cacccagagaggcaaggccaatttc

SEQ ID NO: 2514596 - DNA, 25 bp, Homo sapien
taagttcatttgatgtgccaggcag

SEQ ID NO: 2514597 - DNA, 25 bp, Homo sapien
gcagataagtggtgacatcggtcca

SEQ ID NO: 2514598 - DNA, 25 bp, Homo sapien
taaacaagagggactaagagctcca

SEQ ID NO: 2514599 - DNA, 25 bp, Homo sapien
tgctcatgatcacagggtcggttag

SEQ ID NO: 2514600 - DNA, 25 bp, Homo sapien
tggagaggtagagggtaaacaggac

SEQ ID NO: 2514601 - DNA, 25 bp, Homo sapien
caataccagggcaccgaaaggctga

SEQ ID NO: 2514602 - DNA, 25 bp, Homo sapien
aataccagggcaccgaaaggctgag

SEQ ID NO: 2514603 - DNA, 25 bp, Homo sapien
tagagggtaaacaggacaccaggag

SEQ ID NO: 2514604 - DNA, 25 bp, Homo sapien
gggaaaactgggcaaagctgcgatc

SEQ ID NO: 2514605 - DNA, 25 bp, Homo sapien
tcccaacagctcatggcagatgtca

SEQ ID NO: 2514606 - DNA, 25 bp, Homo sapien
gctgcgatctgaaaacaagggcaca

SEQ ID NO: 2514607 - DNA, 25 bp, Homo sapien
cgatctgaaaacaagggcacatgtc

SEQ ID NO: 2514608 - DNA, 25 bp, Homo sapien
ggacatgctcccatatacctaagtg

SEQ ID NO: 2514609 - DNA, 25 bp, Homo sapien
gacttccctgggcagatacaatatg

SEQ ID NO: 2514610 - DNA, 25 bp, Homo sapien
cagaggttgggatcataaaaggcag

SEQ ID NO: 2514611 - DNA, 25 bp, Homo sapien
gcagccaagggtcttaagagtatcc

SEQ ID NO: 2514612 - DNA, 25 bp, Homo sapien
gactttggaacttgattgggatctc

SEQ ID NO: 2514613 - DNA, 25 bp, Homo sapien
gatcacaggatgaccaaatctccaa

SEQ ID NO: 2514614 - DNA, 25 bp, Homo sapien
ctgccaagggagttctgagttattg

SEQ ID NO: 2514615 - DNA, 25 bp, Homo sapien
gcaacttcgtagctttgactttgga

SEQ ID NO: 2514616 - DNA, 25 bp, Homo sapien
tgcagcaggaaaagatggcgctcat

SEQ ID NO: 2514617 - DNA, 25 bp, Homo sapien
attgtgcctggcaactggtagctgg

SEQ ID NO: 2514618 - DNA, 25 bp, Homo sapien
gccagcaatgaacccaaacctcatt

SEQ ID NO: 2514619 - DNA, 25 bp, Homo sapien
cagtctagacaactagtcctgtgga

SEQ ID NO: 2514620 - DNA, 25 bp, Homo sapien
ccacaggtcggaggcggaaaccagt

SEQ ID NO: 2514621 - DNA, 25 bp, Homo sapien
tggaagactcggaaggccaggccac

SEQ ID NO: 2514622 - DNA, 25 bp, Homo sapien
tgtactgtgtgcagtggaagactcg

SEQ ID NO: 2514623 - DNA, 25 bp, Homo sapien
aagaaatcccgagaggaaagcaggc

SEQ ID NO: 2514624 - DNA, 25 bp, Homo sapien
actgcccagggacataggctttgac

SEQ ID NO: 2514625 - DNA, 25 bp, Homo sapien
ggctttgacgctaggcagacttggc

SEQ ID NO: 2514626 - DNA, 25 bp, Homo sapien
gaaaactcaaagctcatcaccactg

SEQ ID NO: 2514627 - DNA, 25 bp, Homo sapien
ggagtagtacacataactgcccagg

SEQ ID NO: 2514628 - DNA, 25 bp, Homo sapien
tcctggaggaatcaacctgcatgca

SEQ ID NO: 2514629 - DNA, 25 bp, Homo sapien
ctcataacacagcaggaactacagg

SEQ ID NO: 2514630 - DNA, 25 bp, Homo sapien
cttttcagggacaggtacacggcaa

SEQ ID NO: 2514631 - DNA, 25 bp, Homo sapien
taccagatgcacagactcagagctc

SEQ ID NO: 2514632 - DNA, 25 bp, Homo sapien
gtattccactcgagggatgggctgc

SEQ ID NO: 2514633 - DNA, 25 bp, Homo sapien
ggaagccacagtacttttcaagaag

SEQ ID NO: 2514634 - DNA, 25 bp, Homo sapien
tagcaagcatgggttttatacaagg

SEQ ID NO: 2514635 - DNA, 25 bp, Homo sapien
aaatgtgattgtactcatagcaagc

SEQ ID NO: 2514636 - DNA, 25 bp, Homo sapien
tatgtaggccacgaatctgagatcc

SEQ ID NO: 2514637 - DNA, 25 bp, Homo sapien
gaggatttgctctcactttcgggaa

SEQ ID NO: 2514638 - DNA, 25 bp, Homo sapien
gcacgggccagtcaggtatcacaaa

SEQ ID NO: 2514639 - DNA, 25 bp, Homo sapien
tagaaattcacttacctgcacgggc

SEQ ID NO: 2514640 - DNA, 25 bp, Homo sapien
tggcggtagttgtaggcaatgtcag

SEQ ID NO: 2514641 - DNA, 25 bp, Homo sapien
gcggtagttgtaggcaatgtcagca

SEQ ID NO: 2514642 - DNA, 25 bp, Homo sapien
cagcaaactgcttccgtcttgcacg

SEQ ID NO: 2514643 - DNA, 25 bp, Homo sapien
aactgcttccgtcttgcacggtaca

SEQ ID NO: 2514644 - DNA, 25 bp, Homo sapien
tttgatttagcatgagcctccttgc

SEQ ID NO: 2514645 - DNA, 25 bp, Homo sapien
tgacaccttattagtaacttctttg

SEQ ID NO: 2514646 - DNA, 25 bp, Homo sapien
gatttagcatgagcctccttgctgt

SEQ ID NO: 2514647 - DNA, 25 bp, Homo sapien
cagatattgtgagtgacaccttatt

SEQ ID NO: 2514648 - DNA, 25 bp, Homo sapien
tgttctgagaatctgcggcattgat

SEQ ID NO: 2514649 - DNA, 25 bp, Homo sapien
gttctgagaatctgcggcattgatt

SEQ ID NO: 2514650 - DNA, 25 bp, Homo sapien
tttgttctgagaatctgcggcattg

SEQ ID NO: 2514651 - DNA, 25 bp, Homo sapien
atttgttctgagaatctgcggcatt

SEQ ID NO: 2514652 - DNA, 25 bp, Homo sapien
gctgtgtatatttcagctaggccaa

SEQ ID NO: 2514653 - DNA, 25 bp, Homo sapien
gccaataacaagaggctttttgcat

SEQ ID NO: 2514654 - DNA, 25 bp, Homo sapien
cagctaggccaataacaagaggctt

SEQ ID NO: 2514655 - DNA, 25 bp, Homo sapien
tgtgtatatttcagctaggccaata

SEQ ID NO: 2514656 - DNA, 25 bp, Homo sapien
ttcccagccctcgtgtaaataggaa

SEQ ID NO: 2514657 - DNA, 25 bp, Homo sapien
caagtacattgctccaagtagagaa

SEQ ID NO: 2514658 - DNA, 25 bp, Homo sapien
cgtgtaaataggaacacaataagtg

SEQ ID NO: 2514659 - DNA, 25 bp, Homo sapien
tacattgctccaagtagagaaggta

SEQ ID NO: 2514660 - DNA, 25 bp, Homo sapien
tcttgaatggttcttgggaaccagg

SEQ ID NO: 2514661 - DNA, 25 bp, Homo sapien
gagaatctgattggcaaatctgtcc

SEQ ID NO: 2514662 - DNA, 25 bp, Homo sapien
ctgagaatctgattggcaaatctgt

SEQ ID NO: 2514663 - DNA, 25 bp, Homo sapien
ccagctcttgaatggttcttgggaa

SEQ ID NO: 2514664 - DNA, 25 bp, Homo sapien
cctctatgttcaggaccatggataa

SEQ ID NO: 2514665 - DNA, 25 bp, Homo sapien
tgttcaggaccatggataatctcat

SEQ ID NO: 2514666 - DNA, 25 bp, Homo sapien
tatgttcaggaccatggataatctc

SEQ ID NO: 2514667 - DNA, 25 bp, Homo sapien
tctttcctctatgttcaggaccatg

SEQ ID NO: 2514668 - DNA, 25 bp, Homo sapien
gatgaaggagaagcggtcatccatc

SEQ ID NO: 2514669 - DNA, 25 bp, Homo sapien
tatgcacagggtactccacataatc

SEQ ID NO: 2514670 - DNA, 25 bp, Homo sapien
tggaagggtgtcagatggaattcaa

SEQ ID NO: 2514671 - DNA, 25 bp, Homo sapien
ataatcccctccatgagccacagga

SEQ ID NO: 2514672 - DNA, 25 bp, Homo sapien
cccctttgatacagtgggagactgc

SEQ ID NO: 2514673 - DNA, 25 bp, Homo sapien
tcaccaatcctataaggcagaggct

SEQ ID NO: 2514674 - DNA, 25 bp, Homo sapien
caaagtcacaccgagtgtggtcgcc

SEQ ID NO: 2514675 - DNA, 25 bp, Homo sapien
tgtggtcgccgtgcttcctgaatct

SEQ ID NO: 2514676 - DNA, 25 bp, Homo sapien
ggtttactatatattccctggctcc

SEQ ID NO: 2514677 - DNA, 25 bp, Homo sapien
tggtttactatatattccctggctc

SEQ ID NO: 2514678 - DNA, 25 bp, Homo sapien
gtttactatatattccctggctcct

SEQ ID NO: 2514679 - DNA, 25 bp, Homo sapien
ttactatatattccctggctcctcc

SEQ ID NO: 2514680 - DNA, 25 bp, Homo sapien
ttgctttgatttccttcctcatggc

SEQ ID NO: 2514681 - DNA, 25 bp, Homo sapien
tcaattgctttgatttccttcctca

SEQ ID NO: 2514682 - DNA, 25 bp, Homo sapien
tcctcatggccccagctggcccagc

SEQ ID NO: 2514683 - DNA, 25 bp, Homo sapien
aattgctttgatttccttcctcatg

SEQ ID NO: 2514684 - DNA, 25 bp, Homo sapien
tctggcaggccctttgtccaaaggg

SEQ ID NO: 2514685 - DNA, 25 bp, Homo sapien
ctgaattgccccaggatctggcagg

SEQ ID NO: 2514686 - DNA, 25 bp, Homo sapien
aggctgaattgccccaggatctggc

SEQ ID NO: 2514687 - DNA, 25 bp, Homo sapien
tggcaggccctttgtccaaagggtc

SEQ ID NO: 2514688 - DNA, 25 bp, Homo sapien
gcagtcattggggaagcagcttggg

SEQ ID NO: 2514689 - DNA, 25 bp, Homo sapien
agagcaggtggccggaaaaaagcaa

SEQ ID NO: 2514690 - DNA, 25 bp, Homo sapien
tgagagcaggtggccggaaaaaagc

SEQ ID NO: 2514691 - DNA, 25 bp, Homo sapien
agcaggtggccggaaaaaagcaagg

SEQ ID NO: 2514692 - DNA, 25 bp, Homo sapien
aggaattccaagtgcctgccctcca

SEQ ID NO: 2514693 - DNA, 25 bp, Homo sapien
agggaggaattccaagtgcctgccc

SEQ ID NO: 2514694 - DNA, 25 bp, Homo sapien
aagaaggcaggataggactaatcca

SEQ ID NO: 2514695 - DNA, 25 bp, Homo sapien
gataggactaatccagggaggaatt

SEQ ID NO: 2514696 - DNA, 25 bp, Homo sapien
acactggagtgggctttccttgcct

SEQ ID NO: 2514697 - DNA, 25 bp, Homo sapien
ctccacaaggccagaacactggagt

SEQ ID NO: 2514698 - DNA, 25 bp, Homo sapien
tgggctttccttgccttggttatac

SEQ ID NO: 2514699 - DNA, 25 bp, Homo sapien
gcatggctgtccactctccacaagg

SEQ ID NO: 2514700 - DNA, 25 bp, Homo sapien
tctcctagaaaggccatggagctac

SEQ ID NO: 2514701 - DNA, 25 bp, Homo sapien
ttacggggtggatcttgtctcattt

SEQ ID NO: 2514702 - DNA, 25 bp, Homo sapien
cggggtggatcttgtctcattttaa

SEQ ID NO: 2514703 - DNA, 25 bp, Homo sapien
tagaaaggccatggagctacctttt

SEQ ID NO: 2514704 - DNA, 25 bp, Homo sapien
agcaggcaggctacgtttatccaaa

SEQ ID NO: 2514705 - DNA, 25 bp, Homo sapien
gctcatggacagtggcaccaatgtc

SEQ ID NO: 2514706 - DNA, 25 bp, Homo sapien
tcttatctcgtgaaagctcatggac

SEQ ID NO: 2514707 - DNA, 25 bp, Homo sapien
tgatgatgtttgtcagagcaggcag

SEQ ID NO: 2514708 - DNA, 25 bp, Homo sapien
acaacacacccctgagggctgtggc

SEQ ID NO: 2514709 - DNA, 25 bp, Homo sapien
actgcagacaacacacccctgaggg

SEQ ID NO: 2514710 - DNA, 25 bp, Homo sapien
tttatggctccaactgcagacaaca

SEQ ID NO: 2514711 - DNA, 25 bp, Homo sapien
ttatggctccaactgcagacaacac

SEQ ID NO: 2514712 - DNA, 25 bp, Homo sapien
gaaagcactcttgatattactccaa

SEQ ID NO: 2514713 - DNA, 25 bp, Homo sapien
aaagcactcttgatattactccaag

SEQ ID NO: 2514714 - DNA, 25 bp, Homo sapien
aagcactcttgatattactccaagt

SEQ ID NO: 2514715 - DNA, 25 bp, Homo sapien
agcactcttgatattactccaagtg

SEQ ID NO: 2514716 - DNA, 25 bp, Homo sapien
accatcttttgggatctcactcttg

SEQ ID NO: 2514717 - DNA, 25 bp, Homo sapien
ccaaagaccatcttttgggatctca

SEQ ID NO: 2514718 - DNA, 25 bp, Homo sapien
agaccatcttttgggatctcactct

SEQ ID NO: 2514719 - DNA, 25 bp, Homo sapien
aaagaccatcttttgggatctcact

SEQ ID NO: 2514720 - DNA, 25 bp, Homo sapien
gagctcagagctctgtacatctgct

SEQ ID NO: 2514721 - DNA, 25 bp, Homo sapien
agctcagagctctgtacatctgctt

SEQ ID NO: 2514722 - DNA, 25 bp, Homo sapien
taacagcggttgataatagatggaa

SEQ ID NO: 2514723 - DNA, 25 bp, Homo sapien
gatatgtccaaatgttaacagcggt

SEQ ID NO: 2514724 - DNA, 25 bp, Homo sapien
cctcaccccaagaatgagagactgg

SEQ ID NO: 2514725 - DNA, 25 bp, Homo sapien
gactgggaccaggatatttgcattt

SEQ ID NO: 2514726 - DNA, 25 bp, Homo sapien
tgtgacagtcgctcagacagtactt

SEQ ID NO: 2514727 - DNA, 25 bp, Homo sapien
taccaagaatgcataccatcaacat

SEQ ID NO: 2514728 - DNA, 25 bp, Homo sapien
gagttttcaggagtaatggtcatgt

SEQ ID NO: 2514729 - DNA, 25 bp, Homo sapien
gtcacatggctgaggtgtctttgtc

SEQ ID NO: 2514730 - DNA, 25 bp, Homo sapien
tgcaaccactgtcataccacaggaa

SEQ ID NO: 2514731 - DNA, 25 bp, Homo sapien
tataaacatgactgagacaaggttc

SEQ ID NO: 2514732 - DNA, 25 bp, Homo sapien
gacataatgtatatgctgagcacgc

SEQ ID NO: 2514733 - DNA, 25 bp, Homo sapien
gccagcttctgggatatgcaaccac

SEQ ID NO: 2514734 - DNA, 25 bp, Homo sapien
catggaagtttgctacgacattatc

SEQ ID NO: 2514735 - DNA, 25 bp, Homo sapien
gtttgctacgacattatccaagaca

SEQ ID NO: 2514736 - DNA, 25 bp, Homo sapien
gaaaagaacatggaagtttgctacg

SEQ ID NO: 2514737 - DNA, 25 bp, Homo sapien
ttatccaagacaaacatgattgtag

SEQ ID NO: 2514738 - DNA, 25 bp, Homo sapien
tttgagtgagaagatcagtgatatg

SEQ ID NO: 2514739 - DNA, 25 bp, Homo sapien
tcaaataagcgcaatactttggcca

SEQ ID NO: 2514740 - DNA, 25 bp, Homo sapien
gcagttgtcttcaatatagcttgtt

SEQ ID NO: 2514741 - DNA, 25 bp, Homo sapien
gatatggcaccattttgattgcagt

SEQ ID NO: 2514742 - DNA, 25 bp, Homo sapien
ttcattcctgtgaaagccaccgagg

SEQ ID NO: 2514743 - DNA, 25 bp, Homo sapien
gatattctcatcagcttccaacgaa

SEQ ID NO: 2514744 - DNA, 25 bp, Homo sapien
caggaagcaccagcagtcttcggat

SEQ ID NO: 2514745 - DNA, 25 bp, Homo sapien
tggaggcccaaattcccctaactga

SEQ ID NO: 2514746 - DNA, 25 bp, Homo sapien
cagagagtttcctgcccaagcctgg

SEQ ID NO: 2514747 - DNA, 25 bp, Homo sapien
ccccgggagtgaggtctctggcttt

SEQ ID NO: 2514748 - DNA, 25 bp, Homo sapien
tggggctgaaggttttaacctcgca

SEQ ID NO: 2514749 - DNA, 25 bp, Homo sapien
tccccgggagtgaggtctctggctt

SEQ ID NO: 2514750 - DNA, 25 bp, Homo sapien
aaacagcacgtggggctgaaggttt

SEQ ID NO: 2514751 - DNA, 25 bp, Homo sapien
tagacaggtttaggcacttccggga

SEQ ID NO: 2514752 - DNA, 25 bp, Homo sapien
tggactaagcctgcgaccgtctggt

SEQ ID NO: 2514753 - DNA, 25 bp, Homo sapien
aaagggtgtctcttgcgtggtgcat

SEQ ID NO: 2514754 - DNA, 25 bp, Homo sapien
tctcagaagcctgggaagcgagttc

SEQ ID NO: 2514755 - DNA, 25 bp, Homo sapien
gaggtctgctgagtcaagattcaca

SEQ ID NO: 2514756 - DNA, 25 bp, Homo sapien
cacttgagtaaatcaagaggtctgc

SEQ ID NO: 2514757 - DNA, 25 bp, Homo sapien
aagaggtctgctgagtcaagattca

SEQ ID NO: 2514758 - DNA, 25 bp, Homo sapien
agaccagacatcacttgagtaaatc

SEQ ID NO: 2514759 - DNA, 25 bp, Homo sapien
caggcacatcggaaaggttatctca

SEQ ID NO: 2514760 - DNA, 25 bp, Homo sapien
tcatacaatgagtcataatcacatc

SEQ ID NO: 2514761 - DNA, 25 bp, Homo sapien
tctacagtccaatgagatacgcttt

SEQ ID NO: 2514762 - DNA, 25 bp, Homo sapien
cacttagttattcagtaccaggcac

SEQ ID NO: 2514763 - DNA, 25 bp, Homo sapien
taatccacagttaggtatgactgcc

SEQ ID NO: 2514764 - DNA, 25 bp, Homo sapien
gagttactaggtcttaaggtcttga

SEQ ID NO: 2514765 - DNA, 25 bp, Homo sapien
ctgtctaggtgtaagaagagattcc

SEQ ID NO: 2514766 - DNA, 25 bp, Homo sapien
gagaattcctgtttgtaaggcacaa

SEQ ID NO: 2514767 - DNA, 25 bp, Homo sapien
tgagtttgaaagtactcccttcact

SEQ ID NO: 2514768 - DNA, 25 bp, Homo sapien
ggaagacttcattatggcttaggtc

SEQ ID NO: 2514769 - DNA, 25 bp, Homo sapien
ccaatttagtggtgtacagttgctc

SEQ ID NO: 2514770 - DNA, 25 bp, Homo sapien
ccttaagatgcattgatagcttgtt

SEQ ID NO: 2514771 - DNA, 25 bp, Homo sapien
ctgtgcttagtattaccagtaagtt

SEQ ID NO: 2514772 - DNA, 25 bp, Homo sapien
tcaatgtattgacaagttgttgttg

SEQ ID NO: 2514773 - DNA, 25 bp, Homo sapien
tactcatcttttcgtcattctactc

SEQ ID NO: 2514774 - DNA, 25 bp, Homo sapien
taatttatacactatatttacaatg

SEQ ID NO: 2514775 - DNA, 25 bp, Homo sapien
ttatatagttctcaccatctgggct

SEQ ID NO: 2514776 - DNA, 25 bp, Homo sapien
atagttctcaccatctgggcttgtt

SEQ ID NO: 2514777 - DNA, 25 bp, Homo sapien
tatagttctcaccatctgggcttgt

SEQ ID NO: 2514778 - DNA, 25 bp, Homo sapien
tatatagttctcaccatctgggctt

SEQ ID NO: 2514779 - DNA, 25 bp, Homo sapien
cctttcagtgatataaaactaaaat

SEQ ID NO: 2514780 - DNA, 25 bp, Homo sapien
gcgtactgtgatggcttacctgatt

SEQ ID NO: 2514781 - DNA, 25 bp, Homo sapien
aactaaaatagcgtactgtgatggc

SEQ ID NO: 2514782 - DNA, 25 bp, Homo sapien
tataaaactaaaatagcgtactgtg

SEQ ID NO: 2514783 - DNA, 25 bp, Homo sapien
cctaaagagtccatgagagtgaata

SEQ ID NO: 2514784 - DNA, 25 bp, Homo sapien
ccctgcccgtgctgcaaatacttgg

SEQ ID NO: 2514785 - DNA, 25 bp, Homo sapien
aaggcctgaaaatcagttactggtc

SEQ ID NO: 2514786 - DNA, 25 bp, Homo sapien
cctcttcctctcaaaaggcctgaaa

SEQ ID NO: 2514787 - DNA, 25 bp, Homo sapien
tcagtcacttcggtaaactgccctt

SEQ ID NO: 2514788 - DNA, 25 bp, Homo sapien
attcctcgccccagccggtagtctc

SEQ ID NO: 2514789 - DNA, 25 bp, Homo sapien
tccaaggctctaggcgcctgcattc

SEQ ID NO: 2514790 - DNA, 25 bp, Homo sapien
aactgcccttgctttccggaggcgg

SEQ ID NO: 2514791 - DNA, 25 bp, Homo sapien
ttaaagcccttcctcgcggatgaga

SEQ ID NO: 2514792 - DNA, 25 bp, Homo sapien
cggatgagacccttggtgcgttcca

SEQ ID NO: 2514793 - DNA, 25 bp, Homo sapien
caagtccccaagagctctcagaggt

SEQ ID NO: 2514794 - DNA, 25 bp, Homo sapien
cagaggttcctgaccctgagcgtta

SEQ ID NO: 2514795 - DNA, 25 bp, Homo sapien
atccccagggtagtagtactgaact

SEQ ID NO: 2514796 - DNA, 25 bp, Homo sapien
actcgcctggtgaatctacatagca

SEQ ID NO: 2514797 - DNA, 25 bp, Homo sapien
tactgaactcgcctggtgaatctac

SEQ ID NO: 2514798 - DNA, 25 bp, Homo sapien
gaatctacatagcaccctaacttct

SEQ ID NO: 2514799 - DNA, 25 bp, Homo sapien
tgggagatttgatgggctgaaatcc

SEQ ID NO: 2514800 - DNA, 25 bp, Homo sapien
tgttgggtacaccttccagaagaac

SEQ ID NO: 2514801 - DNA, 25 bp, Homo sapien
gggagaacctaaagtttgctggagc

SEQ ID NO: 2514802 - DNA, 25 bp, Homo sapien
ttgggctgagtagcatgttgggtac

SEQ ID NO: 2514803 - DNA, 25 bp, Homo sapien
gtagggtattcttagaggcagtaga

SEQ ID NO: 2514804 - DNA, 25 bp, Homo sapien
ggcagtagattgtgcagtaaagtcc

SEQ ID NO: 2514805 - DNA, 25 bp, Homo sapien
tcttagaggcagtagattgtgcagt

SEQ ID NO: 2514806 - DNA, 25 bp, Homo sapien
agattgtgcagtaaagtccttttca

SEQ ID NO: 2514807 - DNA, 25 bp, Homo sapien
tcagcaaaggtggtactggcctggc

SEQ ID NO: 2514808 - DNA, 25 bp, Homo sapien
catacataggtcttgagcttcagca

SEQ ID NO: 2514809 - DNA, 25 bp, Homo sapien
aaattaaggtggcaggagactcagg

SEQ ID NO: 2514810 - DNA, 25 bp, Homo sapien
tttggccactaggaaagccatctcc

SEQ ID NO: 2514811 - DNA, 25 bp, Homo sapien
caaaggggatcagtgctttgtcctt

SEQ ID NO: 2514812 - DNA, 25 bp, Homo sapien
gatcagtgctttgtccttcccactc

SEQ ID NO: 2514813 - DNA, 25 bp, Homo sapien
ggggatcagtgctttgtccttccca

SEQ ID NO: 2514814 - DNA, 25 bp, Homo sapien
aaggggatcagtgctttgtccttcc

SEQ ID NO: 2514815 - DNA, 25 bp, Homo sapien
ccctccctctcggcgccagcacgcg

SEQ ID NO: 2514816 - DNA, 25 bp, Homo sapien
ctccctctcggcgccagcacgcggc

SEQ ID NO: 2514817 - DNA, 25 bp, Homo sapien
ctccccctccctctcggcgccagca

SEQ ID NO: 2514818 - DNA, 25 bp, Homo sapien
cctctcggcgccagcacgcggcccc

SEQ ID NO: 2514819 - DNA, 25 bp, Homo sapien
gttcctgcacccaagttctctctgt

SEQ ID NO: 2514820 - DNA, 25 bp, Homo sapien
cgtcagggctcccgcttcatatttc

SEQ ID NO: 2514821 - DNA, 25 bp, Homo sapien
tagaaacaagaaggcgccagcggca

SEQ ID NO: 2514822 - DNA, 25 bp, Homo sapien
tttgctcccactctaagaagtctcc

SEQ ID NO: 2514823 - DNA, 25 bp, Homo sapien
aaagctctgccaagatggagagcgg

SEQ ID NO: 2514824 - DNA, 25 bp, Homo sapien
ggatcgctctgattccgcgactcct

SEQ ID NO: 2514825 - DNA, 25 bp, Homo sapien
cttggccgccgctgcgcatggaaag

SEQ ID NO: 2514826 - DNA, 25 bp, Homo sapien
cgctgcgcatggaaagctctgccaa

SEQ ID NO: 2514827 - DNA, 25 bp, Homo sapien
cggcgcggccaacaagaagatgagt

SEQ ID NO: 2514828 - DNA, 25 bp, Homo sapien
gagcttctcgacttcaccaactggt

SEQ ID NO: 2514829 - DNA, 25 bp, Homo sapien
aacgacttgaactccatggccggct

SEQ ID NO: 2514830 - DNA, 25 bp, Homo sapien
caagttggtcaacctgggctttgcc

SEQ ID NO: 2514831 - DNA, 25 bp, Homo sapien
cactagcctacacgttcaaattaac

SEQ ID NO: 2514832 - DNA, 25 bp, Homo sapien
tagggtgatcgcacaacctgcatct

SEQ ID NO: 2514833 - DNA, 25 bp, Homo sapien
tactggtgaaccgaatactgggaca

SEQ ID NO: 2514834 - DNA, 25 bp, Homo sapien
catgttaaaagagatgtctacctga

SEQ ID NO: 2514835 - DNA, 25 bp, Homo sapien
tctatccgaatagcgtgagctgcgt

SEQ ID NO: 2514836 - DNA, 25 bp, Homo sapien
ggtagccagcacgtcttccagagtt

SEQ ID NO: 2514837 - DNA, 25 bp, Homo sapien
tgagctgcgtgtaaaagtacccaat

SEQ ID NO: 2514838 - DNA, 25 bp, Homo sapien
gattcagtttgcgtgtctccagcca

SEQ ID NO: 2514839 - DNA, 25 bp, Homo sapien
aaactcgaggcaaagttagtcgttg

SEQ ID NO: 2514840 - DNA, 25 bp, Homo sapien
tgcgaaggcaaactcgaaaaattca

SEQ ID NO: 2514841 - DNA, 25 bp, Homo sapien
cgttgtttgccacaatgcgaaggca

SEQ ID NO: 2514842 - DNA, 25 bp, Homo sapien
tctgaatgggaaatatccagtctcg

SEQ ID NO: 2514843 - DNA, 25 bp, Homo sapien
cgcatccgggcgttgattggctgca

SEQ ID NO: 2514844 - DNA, 25 bp, Homo sapien
cgggaactctccaggctacctgaag

SEQ ID NO: 2514845 - DNA, 25 bp, Homo sapien
ttattcaagctgcagcgcatccggg

SEQ ID NO: 2514846 - DNA, 25 bp, Homo sapien
attggctgcaggcatgcgtccgctg

SEQ ID NO: 2514847 - DNA, 25 bp, Homo sapien
gatgggggaaagccgccaacccaca

SEQ ID NO: 2514848 - DNA, 25 bp, Homo sapien
aaagccgcctttgatgctctggcta

SEQ ID NO: 2514849 - DNA, 25 bp, Homo sapien
gctctggctaccagggctattttgg

SEQ ID NO: 2514850 - DNA, 25 bp, Homo sapien
tctgcaaagtgcgttggagaggact

SEQ ID NO: 2514851 - DNA, 25 bp, Homo sapien
aagtggatgtaggggacaaaagctc

SEQ ID NO: 2514852 - DNA, 25 bp, Homo sapien
agtggatgtaggggacaaaagctcc

SEQ ID NO: 2514853 - DNA, 25 bp, Homo sapien
tggatgtaggggacaaaagctccgc

SEQ ID NO: 2514854 - DNA, 25 bp, Homo sapien
gatgtaggggacaaaagctccgcac

SEQ ID NO: 2514855 - DNA, 25 bp, Homo sapien
aagcttgcactaccgggctcagcgc

SEQ ID NO: 2514856 - DNA, 25 bp, Homo sapien
ggaagcttgcactaccgggctcagc

SEQ ID NO: 2514857 - DNA, 25 bp, Homo sapien
cgggaagcttgcactaccgggctca

SEQ ID NO: 2514858 - DNA, 25 bp, Homo sapien
tagagagagcctccccctcgccgct

SEQ ID NO: 2514859 - DNA, 25 bp, Homo sapien
gatgcctgggagaggtcatacaaga

SEQ ID NO: 2514860 - DNA, 25 bp, Homo sapien
cagatgaatgaccacccagaccagg

SEQ ID NO: 2514861 - DNA, 25 bp, Homo sapien
catacaagatagtactgcaggtggg

SEQ ID NO: 2514862 - DNA, 25 bp, Homo sapien
tgggcagatgaatgaccacccagac

SEQ ID NO: 2514863 - DNA, 25 bp, Homo sapien
ctgctagcccggagaagaaagccat

SEQ ID NO: 2514864 - DNA, 25 bp, Homo sapien
tgcctggggagatctatattactct

SEQ ID NO: 2514865 - DNA, 25 bp, Homo sapien
ctgctgctagcccggagaagaaagc

SEQ ID NO: 2514866 - DNA, 25 bp, Homo sapien
tctatattactctggggaagacaag

SEQ ID NO: 2514867 - DNA, 25 bp, Homo sapien
tttcactcgaggagaataaggttgt

SEQ ID NO: 2514868 - DNA, 25 bp, Homo sapien
tttcttgccatctcccgcttgagtg

SEQ ID NO: 2514869 - DNA, 25 bp, Homo sapien
cctttctttcactcgaggagaataa

SEQ ID NO: 2514870 - DNA, 25 bp, Homo sapien
tctcccgcttgagtggtttgtcggc

SEQ ID NO: 2514871 - DNA, 25 bp, Homo sapien
cagcataggaaaacaacagaacatg

SEQ ID NO: 2514872 - DNA, 25 bp, Homo sapien
atgttatcacaacaaacagcatagg

SEQ ID NO: 2514873 - DNA, 25 bp, Homo sapien
tctagcaactggctcttgcaagctg

SEQ ID NO: 2514874 - DNA, 25 bp, Homo sapien
aaacaataggaaaatctagcaactg

SEQ ID NO: 2514875 - DNA, 25 bp, Homo sapien
caataggccttttagagaatccagg

SEQ ID NO: 2514876 - DNA, 25 bp, Homo sapien
cctggcaaccagcaacaataggcct

SEQ ID NO: 2514877 - DNA, 25 bp, Homo sapien
agaatccagggcaaacagtgaccgt

SEQ ID NO: 2514878 - DNA, 25 bp, Homo sapien
tgttccggaaattccctgcacaaag

SEQ ID NO: 2514879 - DNA, 25 bp, Homo sapien
catagtcatttagggactcaggctg

SEQ ID NO: 2514880 - DNA, 25 bp, Homo sapien
gccttcagatttgcctggcagggaa

SEQ ID NO: 2514881 - DNA, 25 bp, Homo sapien
aggctgacagaagcatcctttcaac

SEQ ID NO: 2514882 - DNA, 25 bp, Homo sapien
tagattgggagaaccatatcctggt

SEQ ID NO: 2514883 - DNA, 25 bp, Homo sapien
taagtcttaagcatttgaccatgga

SEQ ID NO: 2514884 - DNA, 25 bp, Homo sapien
tctgcgcacataactacaatgctat

SEQ ID NO: 2514885 - DNA, 25 bp, Homo sapien
gattactacgtcttaagcatttgcc

SEQ ID NO: 2514886 - DNA, 25 bp, Homo sapien
taatcttctcgaaaatcgctcttgg

SEQ ID NO: 2514887 - DNA, 25 bp, Homo sapien
agccagcccacttcaactgctggtc

SEQ ID NO: 2514888 - DNA, 25 bp, Homo sapien
agcccacttcaactgctggtcttca

SEQ ID NO: 2514889 - DNA, 25 bp, Homo sapien
ttcatgctgtaagccagcccacttc

SEQ ID NO: 2514890 - DNA, 25 bp, Homo sapien
ttattcatgctgtaagccagcccac

SEQ ID NO: 2514891 - DNA, 25 bp, Homo sapien
caggtttactcctctgtgaagtttt

SEQ ID NO: 2514892 - DNA, 25 bp, Homo sapien
tgttcattgaactgtctggctcttg

SEQ ID NO: 2514893 - DNA, 25 bp, Homo sapien
cagtgtctcaggtttactcctctgt

SEQ ID NO: 2514894 - DNA, 25 bp, Homo sapien
aaactaccccgattatcctgttcat

SEQ ID NO: 2514895 - DNA, 25 bp, Homo sapien
ggacacaagtctggctcaggagagc

SEQ ID NO: 2514896 - DNA, 25 bp, Homo sapien
tcaggagagcaacggataaaactgc

SEQ ID NO: 2514897 - DNA, 25 bp, Homo sapien
aatcttgcccgcagaatcggtgagc

SEQ ID NO: 2514898 - DNA, 25 bp, Homo sapien
gacacgaccacttgttgacattgaa

SEQ ID NO: 2514899 - DNA, 25 bp, Homo sapien
cccggacaatggcatgcatgaatgc

SEQ ID NO: 2514900 - DNA, 25 bp, Homo sapien
taaactgggctgctataggcccaga

SEQ ID NO: 2514901 - DNA, 25 bp, Homo sapien
ctcactaatgagctctgaatgccca

SEQ ID NO: 2514902 - DNA, 25 bp, Homo sapien
tgagctctgaatgcccattaaactg

SEQ ID NO: 2514903 - DNA, 25 bp, Homo sapien
gaggaaatctgccatctcactgaat

SEQ ID NO: 2514904 - DNA, 25 bp, Homo sapien
tgaattatcaattgaggagtccaca

SEQ ID NO: 2514905 - DNA, 25 bp, Homo sapien
cactgaattatcaattgaggagtcc

SEQ ID NO: 2514906 - DNA, 25 bp, Homo sapien
gctgttggttgaagatctttgatat

SEQ ID NO: 2514907 - DNA, 25 bp, Homo sapien
attgtgacccctagaacctggatgg

SEQ ID NO: 2514908 - DNA, 25 bp, Homo sapien
gatccttgttcacatgataagctgg

SEQ ID NO: 2514909 - DNA, 25 bp, Homo sapien
ttataattctgcaggactccaagag

SEQ ID NO: 2514910 - DNA, 25 bp, Homo sapien
gctacagggtttttacccattgtga

SEQ ID NO: 2514911 - DNA, 25 bp, Homo sapien
ctcctagacatggttgttttattga

SEQ ID NO: 2514912 - DNA, 25 bp, Homo sapien
agaaaacaaatgatgccaagacagc

SEQ ID NO: 2514913 - DNA, 25 bp, Homo sapien
ctagacatggttgttttattgaaag

SEQ ID NO: 2514914 - DNA, 25 bp, Homo sapien
gaaaacaaatgatgccaagacagct

SEQ ID NO: 2514915 - DNA, 25 bp, Homo sapien
tccgtgtcacttctgggaagagctt

SEQ ID NO: 2514916 - DNA, 25 bp, Homo sapien
ttccgtgtcacttctgggaagagct

SEQ ID NO: 2514917 - DNA, 25 bp, Homo sapien
aggagttaaaattcatgagcgtccc

SEQ ID NO: 2514918 - DNA, 25 bp, Homo sapien
aaattcatgagcgtcccatgcctgg

SEQ ID NO: 2514919 - DNA, 25 bp, Homo sapien
gttaaaattcatgagcgtcccatgc

SEQ ID NO: 2514920 - DNA, 25 bp, Homo sapien
attcatgagcgtcccatgcctggga

SEQ ID NO: 2514921 - DNA, 25 bp, Homo sapien
caccgcaaaagagtcggaggtctgt

SEQ ID NO: 2514922 - DNA, 25 bp, Homo sapien
cggaggtctgttgggccatctgtta

SEQ ID NO: 2514923 - DNA, 25 bp, Homo sapien
aagctggccaacaccgcaaaagagt

SEQ ID NO: 2514924 - DNA, 25 bp, Homo sapien
tacataatagtcaacaatctcaaaa

SEQ ID NO: 2514925 - DNA, 25 bp, Homo sapien
tctgtttacccaagacacatggacc

SEQ ID NO: 2514926 - DNA, 25 bp, Homo sapien
tctgtaaagccgcaattgtgtgagg

SEQ ID NO: 2514927 - DNA, 25 bp, Homo sapien
tacagtatatgtcaccgtgtacagg

SEQ ID NO: 2514928 - DNA, 25 bp, Homo sapien
tggaccagcagcagtcaagatagcc

SEQ ID NO: 2514929 - DNA, 25 bp, Homo sapien
ttgcccacagtcacacgactttttc

SEQ ID NO: 2514930 - DNA, 25 bp, Homo sapien
cacagtcacacgactttttcttcca

SEQ ID NO: 2514931 - DNA, 25 bp, Homo sapien
agtcacacgactttttcttccactc

SEQ ID NO: 2514932 - DNA, 25 bp, Homo sapien
tttttcttccactccagtggtgcat

SEQ ID NO: 2514933 - DNA, 25 bp, Homo sapien
atttccccatgattaagctttgacc

SEQ ID NO: 2514934 - DNA, 25 bp, Homo sapien
cgagaccactgaaattgcttgctgc

SEQ ID NO: 2514935 - DNA, 25 bp, Homo sapien
actggacactgatcctccatcgaga

SEQ ID NO: 2514936 - DNA, 25 bp, Homo sapien
tgacctccttagatcagcacactgg

SEQ ID NO: 2514937 - DNA, 25 bp, Homo sapien
ggctgaagatgcagtatctgccaag

SEQ ID NO: 2514938 - DNA, 25 bp, Homo sapien
tttgtactaagccaacttctcctgg

SEQ ID NO: 2514939 - DNA, 25 bp, Homo sapien
ttctcctggctgaagatgcagtatc

SEQ ID NO: 2514940 - DNA, 25 bp, Homo sapien
tcaaaagcccttttgtactaagcca

SEQ ID NO: 2514941 - DNA, 25 bp, Homo sapien
ccgaaacctgaaaggggctagtgct

SEQ ID NO: 2514942 - DNA, 25 bp, Homo sapien
tgaaaggggctagtgctttagagca

SEQ ID NO: 2514943 - DNA, 25 bp, Homo sapien
cattcagactttctgtccattcagc

SEQ ID NO: 2514944 - DNA, 25 bp, Homo sapien
agagaggccacgtgtccgaaacctg

SEQ ID NO: 2514945 - DNA, 25 bp, Homo sapien
aaatgactcgccgagtgttttgatc

SEQ ID NO: 2514946 - DNA, 25 bp, Homo sapien
gactcgccgagtgttttgatctcca

SEQ ID NO: 2514947 - DNA, 25 bp, Homo sapien
tcctgtgaaatgactcgccgagtgt

SEQ ID NO: 2514948 - DNA, 25 bp, Homo sapien
cctgtgaaatgactcgccgagtgtt

SEQ ID NO: 2514949 - DNA, 25 bp, Homo sapien
cctgtggagtactggaaggatccca

SEQ ID NO: 2514950 - DNA, 25 bp, Homo sapien
cagtgatctctagaacttgccaagg

SEQ ID NO: 2514951 - DNA, 25 bp, Homo sapien
tacgatttcctgtggagtactggaa

SEQ ID NO: 2514952 - DNA, 25 bp, Homo sapien
ttctctaaacctacgatttcctgtg

SEQ ID NO: 2514953 - DNA, 25 bp, Homo sapien
cttccccatttgtcaagatgtggtt

SEQ ID NO: 2514954 - DNA, 25 bp, Homo sapien
ctgaagtttcctcacctagctttgc

SEQ ID NO: 2514955 - DNA, 25 bp, Homo sapien
gtctgaagtttcctcacctagcttt

SEQ ID NO: 2514956 - DNA, 25 bp, Homo sapien
tcctcacctagctttgcccttccct

SEQ ID NO: 2514957 - DNA, 25 bp, Homo sapien
ctattcagatgcttcacgaaggctt

SEQ ID NO: 2514958 - DNA, 25 bp, Homo sapien
cagatgcttcacgaaggcttgttga

SEQ ID NO: 2514959 - DNA, 25 bp, Homo sapien
ttcagatgcttcacgaaggcttgtt

SEQ ID NO: 2514960 - DNA, 25 bp, Homo sapien
gatgcttcacgaaggcttgttgaat

SEQ ID NO: 2514961 - DNA, 25 bp, Homo sapien
cctagaccaaacctcaccaaaattg

SEQ ID NO: 2514962 - DNA, 25 bp, Homo sapien
tagaccaaacctcaccaaaattgtc

SEQ ID NO: 2514963 - DNA, 25 bp, Homo sapien
gaccaaacctcaccaaaattgtcca

SEQ ID NO: 2514964 - DNA, 25 bp, Homo sapien
ctagaccaaacctcaccaaaattgt

SEQ ID NO: 2514965 - DNA, 25 bp, Homo sapien
agtcagccaggattaacctgctttg

SEQ ID NO: 2514966 - DNA, 25 bp, Homo sapien
aaacaaatcgccagtcagccaggat

SEQ ID NO: 2514967 - DNA, 25 bp, Homo sapien
acctgctttgttgctgacgattagc

SEQ ID NO: 2514968 - DNA, 25 bp, Homo sapien
tgttgctccaaaggttcccaaacaa

SEQ ID NO: 2514969 - DNA, 25 bp, Homo sapien
tctgggcatacacgtgcaagtcaca

SEQ ID NO: 2514970 - DNA, 25 bp, Homo sapien
ccatctgggcatacacgtgcaagtc

SEQ ID NO: 2514971 - DNA, 25 bp, Homo sapien
ggccatctgggcatacacgtgcaag

SEQ ID NO: 2514972 - DNA, 25 bp, Homo sapien
tcaggccatctgggcatacacgtgc

SEQ ID NO: 2514973 - DNA, 25 bp, Homo sapien
tttcctctactttcagtctcttcct

SEQ ID NO: 2514974 - DNA, 25 bp, Homo sapien
gaatcttgctctgttatttctctca

SEQ ID NO: 2514975 - DNA, 25 bp, Homo sapien
ttctctcatcttttcctctactttc

SEQ ID NO: 2514976 - DNA, 25 bp, Homo sapien
atcttgctctgttatttctctcatc

SEQ ID NO: 2514977 - DNA, 25 bp, Homo sapien
tgcttcaagtgggattaggggcgtc

SEQ ID NO: 2514978 - DNA, 25 bp, Homo sapien
caagtgggattaggggcgtcgtggg

SEQ ID NO: 2514979 - DNA, 25 bp, Homo sapien
ctgcttcaagtgggattaggggcgt

SEQ ID NO: 2514980 - DNA, 25 bp, Homo sapien
cttcaagtgggattaggggcgtcgt

SEQ ID NO: 2514981 - DNA, 25 bp, Homo sapien
cttccactgtgagagttacccgaag

SEQ ID NO: 2514982 - DNA, 25 bp, Homo sapien
ggcaatttagactgcactcagcatg

SEQ ID NO: 2514983 - DNA, 25 bp, Homo sapien
gaccaaggtggtaactggtgctacg

SEQ ID NO: 2514984 - DNA, 25 bp, Homo sapien
tccttcattggttagtgcagacttg

SEQ ID NO: 2514985 - DNA, 25 bp, Homo sapien
tgttccgttggacaaagaaagtcac

SEQ ID NO: 2514986 - DNA, 25 bp, Homo sapien
ggtaaatacaactgaacagatcaag

SEQ ID NO: 2514987 - DNA, 25 bp, Homo sapien
gaaagcaaacatattgaaaggtaaa

SEQ ID NO: 2514988 - DNA, 25 bp, Homo sapien
cagatcaagtaaccacgtccggtgg

SEQ ID NO: 2514989 - DNA, 25 bp, Homo sapien
tggagctggcctctcttgttcagaa

SEQ ID NO: 2514990 - DNA, 25 bp, Homo sapien
tgcatacggtttaattccagttttg

SEQ ID NO: 2514991 - DNA, 25 bp, Homo sapien
caaaggatgtgtaattatgtgtcaa

SEQ ID NO: 2514992 - DNA, 25 bp, Homo sapien
aaattatgatacacctctatggtgg

SEQ ID NO: 2514993 - DNA, 25 bp, Homo sapien
aattgaaatcggatgtgtgcaacag

SEQ ID NO: 2514994 - DNA, 25 bp, Homo sapien
gcaaatggccaagctaaacagtcac

SEQ ID NO: 2514995 - DNA, 25 bp, Homo sapien
tctatttgaggtaggagcagcaaat

SEQ ID NO: 2514996 - DNA, 25 bp, Homo sapien
atttgaggtaggagcagcaaatggc

SEQ ID NO: 2514997 - DNA, 25 bp, Homo sapien
cttctatttgaggtaggagcagcaa

SEQ ID NO: 2514998 - DNA, 25 bp, Homo sapien
tgaaggtgttttagagatgacaaag

SEQ ID NO: 2514999 - DNA, 25 bp, Homo sapien
aggacacttcgtttctcagtgaagg

SEQ ID NO: 2515000 - DNA, 25 bp, Homo sapien
tgagaaggacacttcgtttctcagt

SEQ ID NO: 2515001 - DNA, 25 bp, Homo sapien
gtgaaggtgttttagagatgacaaa

SEQ ID NO: 2515002 - DNA, 25 bp, Homo sapien
aaatcctcctgaacttgtaagcaag

SEQ ID NO: 2515003 - DNA, 25 bp, Homo sapien
aattgattgactcccctctagaagg

SEQ ID NO: 2515004 - DNA, 25 bp, Homo sapien
gccaccactcaggatcaagctcatg

SEQ ID NO: 2515005 - DNA, 25 bp, Homo sapien
tgatttttccccgattcaaagagag

SEQ ID NO: 2515006 - DNA, 25 bp, Homo sapien
gttgatcagctattccattatttga

SEQ ID NO: 2515007 - DNA, 25 bp, Homo sapien
tcttttgtgtggagacccagttgat

SEQ ID NO: 2515008 - DNA, 25 bp, Homo sapien
aataagtatctgatgtcttgttttc

SEQ ID NO: 2515009 - DNA, 25 bp, Homo sapien
catggataactctcttttgtgtgga

SEQ ID NO: 2515010 - DNA, 25 bp, Homo sapien
ctgccaagaaagatgataaattacc

SEQ ID NO: 2515011 - DNA, 25 bp, Homo sapien
aagatgataaattaccatttggtgc

SEQ ID NO: 2515012 - DNA, 25 bp, Homo sapien
agagctctacaagtacagggctgcc

SEQ ID NO: 2515013 - DNA, 25 bp, Homo sapien
ggtgctagcgaccagagctctacaa

SEQ ID NO: 2515014 - DNA, 25 bp, Homo sapien
ctgggctcaactcggaggaagcact

SEQ ID NO: 2515015 - DNA, 25 bp, Homo sapien
actctgccccagatcaatcgcattg

SEQ ID NO: 2515016 - DNA, 25 bp, Homo sapien
cagggccatactcatattgtgtttc

SEQ ID NO: 2515017 - DNA, 25 bp, Homo sapien
ctcaactcggaggaagcactctgcc

SEQ ID NO: 2515018 - DNA, 25 bp, Homo sapien
taaagataagatagaagacccagtc

SEQ ID NO: 2515019 - DNA, 25 bp, Homo sapien
gctctagtggagagggacaaatcca

SEQ ID NO: 2515020 - DNA, 25 bp, Homo sapien
accactggcaatggactattctaaa

SEQ ID NO: 2515021 - DNA, 25 bp, Homo sapien
cttgagcccctaaaatgtacctggc

SEQ ID NO: 2515022 - DNA, 25 bp, Homo sapien
aagtgcaggaaagggcttctaggag

SEQ ID NO: 2515023 - DNA, 25 bp, Homo sapien
aaagggcttctaggagtggtgacat

SEQ ID NO: 2515024 - DNA, 25 bp, Homo sapien
ggaagtgcaggaaagggcttctagg

SEQ ID NO: 2515025 - DNA, 25 bp, Homo sapien
gcaggaaagggcttctaggagtggt

SEQ ID NO: 2515026 - DNA, 25 bp, Homo sapien
tctgagtcagcgttaatatgtgagc

SEQ ID NO: 2515027 - DNA, 25 bp, Homo sapien
tgatgcactcacagcaggtctcctc

SEQ ID NO: 2515028 - DNA, 25 bp, Homo sapien
ctgatgacttcatgggtctgagtca

SEQ ID NO: 2515029 - DNA, 25 bp, Homo sapien
tatgtgagcagtttcagactgatgc

SEQ ID NO: 2515030 - DNA, 25 bp, Homo sapien
agctctagagacctcttccctggta

SEQ ID NO: 2515031 - DNA, 25 bp, Homo sapien
ttgttcgcaagtgtgaccatcccat

SEQ ID NO: 2515032 - DNA, 25 bp, Homo sapien
tgcaagagtgaacttcccatcccat

SEQ ID NO: 2515033 - DNA, 25 bp, Homo sapien
ggtactctccccattgcaagagtga

SEQ ID NO: 2515034 - DNA, 25 bp, Homo sapien
gtttttgatttagccctcctcatca

SEQ ID NO: 2515035 - DNA, 25 bp, Homo sapien
gctgaccaatatagtacactgtagg

SEQ ID NO: 2515036 - DNA, 25 bp, Homo sapien
tctatttgtgcaattgatgaacagg

SEQ ID NO: 2515037 - DNA, 25 bp, Homo sapien
cataacgtaatgaaagctgaccaat

SEQ ID NO: 2515038 - DNA, 25 bp, Homo sapien
aggtgaagaaccatagctccctgta

SEQ ID NO: 2515039 - DNA, 25 bp, Homo sapien
gctccctgtaatttctgtgtggcct

SEQ ID NO: 2515040 - DNA, 25 bp, Homo sapien
caaggtgaagaaccatagctccctg

SEQ ID NO: 2515041 - DNA, 25 bp, Homo sapien
ttcaaggtgaagaaccatagctccc

SEQ ID NO: 2515042 - DNA, 25 bp, Homo sapien
agcaaaaatataggcaatgtttgga

SEQ ID NO: 2515043 - DNA, 25 bp, Homo sapien
ttccacacatgctagttcactgttc

SEQ ID NO: 2515044 - DNA, 25 bp, Homo sapien
cttccacacatgctagttcactgtt

SEQ ID NO: 2515045 - DNA, 25 bp, Homo sapien
tctcgtgttgaaagatgggacacca

SEQ ID NO: 2515046 - DNA, 25 bp, Homo sapien
tggagacagcaggtaacccagacat

SEQ ID NO: 2515047 - DNA, 25 bp, Homo sapien
cctcttatgggtttgaatacaggca

SEQ ID NO: 2515048 - DNA, 25 bp, Homo sapien
gaaaaaccagtgtcatgagagagca

SEQ ID NO: 2515049 - DNA, 25 bp, Homo sapien
taaattatactacaatgatgcaata

SEQ ID NO: 2515050 - DNA, 25 bp, Homo sapien
tagaggagcagataacaattataca

SEQ ID NO: 2515051 - DNA, 25 bp, Homo sapien
gatattgcaaagatgtcaacagttc

SEQ ID NO: 2515052 - DNA, 25 bp, Homo sapien
gctaatgtagatcaccgtttgttga

SEQ ID NO: 2515053 - DNA, 25 bp, Homo sapien
ttgcacctgtcaaaacgtctgtcat

SEQ ID NO: 2515054 - DNA, 25 bp, Homo sapien
cctgtcaaaacgtctgtcatcttct

SEQ ID NO: 2515055 - DNA, 25 bp, Homo sapien
tcaaaacgtctgtcatcttctatag

SEQ ID NO: 2515056 - DNA, 25 bp, Homo sapien
cacctgtcaaaacgtctgtcatctt

SEQ ID NO: 2515057 - DNA, 25 bp, Homo sapien
gtctccttcctctagccaactcctc

SEQ ID NO: 2515058 - DNA, 25 bp, Homo sapien
actcctccatctgaaagccattgag

SEQ ID NO: 2515059 - DNA, 25 bp, Homo sapien
ccatctgaaagccattgagctccat

SEQ ID NO: 2515060 - DNA, 25 bp, Homo sapien
tcctccatctgaaagccattgagct

SEQ ID NO: 2515061 - DNA, 25 bp, Homo sapien
ccaaaggcgaagttggcaagtgaaa

SEQ ID NO: 2515062 - DNA, 25 bp, Homo sapien
tgaagatgggcagcactcgccgaac

SEQ ID NO: 2515063 - DNA, 25 bp, Homo sapien
aagatgggcagcactcgccgaacaa

SEQ ID NO: 2515064 - DNA, 25 bp, Homo sapien
atgggcagcactcgccgaacaattc

SEQ ID NO: 2515065 - DNA, 25 bp, Homo sapien
gatgggcagcactcgccgaacaatt

SEQ ID NO: 2515066 - DNA, 25 bp, Homo sapien
tcaatgtaagtgagcattcaccacc

SEQ ID NO: 2515067 - DNA, 25 bp, Homo sapien
tcaccaccggcctagaaagggcctg

SEQ ID NO: 2515068 - DNA, 25 bp, Homo sapien
tgtgaacaaaccgtatggaaacgcc

SEQ ID NO: 2515069 - DNA, 25 bp, Homo sapien
gggcctgtgaacaaaccgtatggaa

SEQ ID NO: 2515070 - DNA, 25 bp, Homo sapien
ggcagtggaaggtctggcggcagaa

SEQ ID NO: 2515071 - DNA, 25 bp, Homo sapien
atggcaaccgcgccttttccgacgg

SEQ ID NO: 2515072 - DNA, 25 bp, Homo sapien
tttccggacgcgcccaggagtctgc

SEQ ID NO: 2515073 - DNA, 25 bp, Homo sapien
ctctcctccggctcgagctctgtgt

SEQ ID NO: 2515074 - DNA, 25 bp, Homo sapien
cagtttcactggatggtgctggaga

SEQ ID NO: 2515075 - DNA, 25 bp, Homo sapien
gaaactgtgcttacagaacacctgg

SEQ ID NO: 2515076 - DNA, 25 bp, Homo sapien
gaacaggatttactgagtgtgccca

SEQ ID NO: 2515077 - DNA, 25 bp, Homo sapien
aaatgaactgttccaagcctgcttg

SEQ ID NO: 2515078 - DNA, 25 bp, Homo sapien
taaatacattcgtttgaaaaattca

SEQ ID NO: 2515079 - DNA, 25 bp, Homo sapien
ctgtgaaaggtaaatacattcgttt

SEQ ID NO: 2515080 - DNA, 25 bp, Homo sapien
tgaaaggtaaatacattcgtttgaa

SEQ ID NO: 2515081 - DNA, 25 bp, Homo sapien
atacattcgtttgaaaaattcacca

SEQ ID NO: 2515082 - DNA, 25 bp, Homo sapien
tcatagaatcttcaccccagaacat

SEQ ID NO: 2515083 - DNA, 25 bp, Homo sapien
agtggttttctccttcgcacagcag

SEQ ID NO: 2515084 - DNA, 25 bp, Homo sapien
tcctggtgaccaatcaggagtggtc

SEQ ID NO: 2515085 - DNA, 25 bp, Homo sapien
aaaggcacatgatacttcctggtga

SEQ ID NO: 2515086 - DNA, 25 bp, Homo sapien
gctgagcacagcactttgaccatac

SEQ ID NO: 2515087 - DNA, 25 bp, Homo sapien
tatggcgaataattagtttttcgac

SEQ ID NO: 2515088 - DNA, 25 bp, Homo sapien
gttgctgcgccaaccaccatatggc

SEQ ID NO: 2515089 - DNA, 25 bp, Homo sapien
ccaccatatggcgaataattagttt

SEQ ID NO: 2515090 - DNA, 25 bp, Homo sapien
gcttcagcaattgttgctgcgccaa

SEQ ID NO: 2515091 - DNA, 25 bp, Homo sapien
catccagttggtgggtgtcaaaccc

SEQ ID NO: 2515092 - DNA, 25 bp, Homo sapien
catatcatatgcagtggtacagcca

SEQ ID NO: 2515093 - DNA, 25 bp, Homo sapien
catggaccatatccctctaggtggg

SEQ ID NO: 2515094 - DNA, 25 bp, Homo sapien
gagactaccctaggaaacactggca

SEQ ID NO: 2515095 - DNA, 25 bp, Homo sapien
gggctagatcaactggctggaaagt

SEQ ID NO: 2515096 - DNA, 25 bp, Homo sapien
gatcaactggctggaaagtctggtg

SEQ ID NO: 2515097 - DNA, 25 bp, Homo sapien
acaggggctagatcaactggctgga

SEQ ID NO: 2515098 - DNA, 25 bp, Homo sapien
aattgaggcacaggggctagatcaa

SEQ ID NO: 2515099 - DNA, 25 bp, Homo sapien
gccccacttgacattgtaattcttc

SEQ ID NO: 2515100 - DNA, 25 bp, Homo sapien
ttcacttacccattgccctgatctg

SEQ ID NO: 2515101 - DNA, 25 bp, Homo sapien
cctctttgccccacttgacattgta

SEQ ID NO: 2515102 - DNA, 25 bp, Homo sapien
tccctggttcttcacttacccattg

SEQ ID NO: 2515103 - DNA, 25 bp, Homo sapien
gactgatggccgtggtactcataga

SEQ ID NO: 2515104 - DNA, 25 bp, Homo sapien
tccacagggtttggaccaatggact

SEQ ID NO: 2515105 - DNA, 25 bp, Homo sapien
ggccgtggtactcatagaaaatgtc

SEQ ID NO: 2515106 - DNA, 25 bp, Homo sapien
ggtttggaccaatggactgatggcc

SEQ ID NO: 2515107 - DNA, 25 bp, Homo sapien
cactcttgtctgcatatacttctgt

SEQ ID NO: 2515108 - DNA, 25 bp, Homo sapien
atatacttctgtattggtgtatgta

SEQ ID NO: 2515109 - DNA, 25 bp, Homo sapien
catatggatctctgaagagcgtgat

SEQ ID NO: 2515110 - DNA, 25 bp, Homo sapien
gtaggtgtgtttgcacatacatgca

SEQ ID NO: 2515111 - DNA, 25 bp, Homo sapien
gtcagatgtcatacattttggctgg

SEQ ID NO: 2515112 - DNA, 25 bp, Homo sapien
gatgtcatacattttggctggtcat

SEQ ID NO: 2515113 - DNA, 25 bp, Homo sapien
aagtcagatgtcatacattttggct

SEQ ID NO: 2515114 - DNA, 25 bp, Homo sapien
cagatgtcatacattttggctggtc

SEQ ID NO: 2515115 - DNA, 25 bp, Homo sapien
gaaaactccttctttgatcattgcc

SEQ ID NO: 2515116 - DNA, 25 bp, Homo sapien
tgggcctggcatctgacatcatgat

SEQ ID NO: 2515117 - DNA, 25 bp, Homo sapien
tcagccatttgggactccgaaaact

SEQ ID NO: 2515118 - DNA, 25 bp, Homo sapien
ctggcatctgacatcatgatcataa

SEQ ID NO: 2515119 - DNA, 25 bp, Homo sapien
cattatctcttaggtagtaaattgg

SEQ ID NO: 2515120 - DNA, 25 bp, Homo sapien
gtcctaaaaacttcattatctctta

SEQ ID NO: 2515121 - DNA, 25 bp, Homo sapien
gtaaattggacaggcacatttaaat

SEQ ID NO: 2515122 - DNA, 25 bp, Homo sapien
taggtagtaaattggacaggcacat

SEQ ID NO: 2515123 - DNA, 25 bp, Homo sapien
tacgaaatttaggagattcagagaa

SEQ ID NO: 2515124 - DNA, 25 bp, Homo sapien
tgaagttctttcataacaagggatg

SEQ ID NO: 2515125 - DNA, 25 bp, Homo sapien
tggaaaattcagaaagtgtagacta

SEQ ID NO: 2515126 - DNA, 25 bp, Homo sapien
catgtgattaatgaatctggagcag

SEQ ID NO: 2515127 - DNA, 25 bp, Homo sapien
gaatgtatttaccagaccggtaaca

SEQ ID NO: 2515128 - DNA, 25 bp, Homo sapien
tccctcaccgtcagaatgggaaagg

SEQ ID NO: 2515129 - DNA, 25 bp, Homo sapien
aaacaccagcccaagaatgtattta

SEQ ID NO: 2515130 - DNA, 25 bp, Homo sapien
ctttccaatgacaggtccctcaccg

SEQ ID NO: 2515131 - DNA, 25 bp, Homo sapien
tctccctgaaagtagtaatggccat

SEQ ID NO: 2515132 - DNA, 25 bp, Homo sapien
ggcaccaacttgtctctatgattat

SEQ ID NO: 2515133 - DNA, 25 bp, Homo sapien
caggatcaccataggcaccaacttg

SEQ ID NO: 2515134 - DNA, 25 bp, Homo sapien
ctatgattattctccctgaaagtag

SEQ ID NO: 2515135 - DNA, 25 bp, Homo sapien
tgtgatcccaggaaaattacttcac

SEQ ID NO: 2515136 - DNA, 25 bp, Homo sapien
ttcacctccctaagcttcaatagct

SEQ ID NO: 2515137 - DNA, 25 bp, Homo sapien
cctccctaagcttcaatagcttgat

SEQ ID NO: 2515138 - DNA, 25 bp, Homo sapien
tacttcacctccctaagcttcaata

SEQ ID NO: 2515139 - DNA, 25 bp, Homo sapien
gaaacttgggtgcttgtcaagtaca

SEQ ID NO: 2515140 - DNA, 25 bp, Homo sapien
tatagcattcctacaccccactctg

SEQ ID NO: 2515141 - DNA, 25 bp, Homo sapien
tgccccatgccgctgttaagctgtg

SEQ ID NO: 2515142 - DNA, 25 bp, Homo sapien
gcttgtcaagtacactctctttctc

SEQ ID NO: 2515143 - DNA, 25 bp, Homo sapien
gatgacaccagaggggccatagcct

SEQ ID NO: 2515144 - DNA, 25 bp, Homo sapien
ggctcttgagagaaactggtaaggg

SEQ ID NO: 2515145 - DNA, 25 bp, Homo sapien
cttgagagaaactggtaagggagga

SEQ ID NO: 2515146 - DNA, 25 bp, Homo sapien
agatgacaccagaggggccatagcc

SEQ ID NO: 2515147 - DNA, 25 bp, Homo sapien
ggcctggatgcattctggcttgttc

SEQ ID NO: 2515148 - DNA, 25 bp, Homo sapien
gcctggatgcattctggcttgttct

SEQ ID NO: 2515149 - DNA, 25 bp, Homo sapien
tgcagtccaaggttacaaacctgtt

SEQ ID NO: 2515150 - DNA, 25 bp, Homo sapien
tccaaggttacaaacctgtttatga

SEQ ID NO: 2515151 - DNA, 25 bp, Homo sapien
aagatgcagtccaaggttacaaacc

SEQ ID NO: 2515152 - DNA, 25 bp, Homo sapien
gtggaaaagatgcagtccaaggtta

SEQ ID NO: 2515153 - DNA, 25 bp, Homo sapien
tagatccttggtcattagttggcaa

SEQ ID NO: 2515154 - DNA, 25 bp, Homo sapien
taatgaatggagtagtacatatctg

SEQ ID NO: 2515155 - DNA, 25 bp, Homo sapien
taagtatatgagatatgggcactaa

SEQ ID NO: 2515156 - DNA, 25 bp, Homo sapien
tgggagagtgcatccagaccaggtc

SEQ ID NO: 2515157 - DNA, 25 bp, Homo sapien
tttgtttgcattccaggatgatgaa

SEQ ID NO: 2515158 - DNA, 25 bp, Homo sapien
ggtggaaattgttgagtcaaatttg

SEQ ID NO: 2515159 - DNA, 25 bp, Homo sapien
ttgttgagtcaaatttgtttgcatt

SEQ ID NO: 2515160 - DNA, 25 bp, Homo sapien
cattccaggatgatgaatactagag

SEQ ID NO: 2515161 - DNA, 25 bp, Homo sapien
tccatgttcacatcgtagtcattca

SEQ ID NO: 2515162 - DNA, 25 bp, Homo sapien
ccatctccatgttcacatcgtagtc

SEQ ID NO: 2515163 - DNA, 25 bp, Homo sapien
ccatgttcacatcgtagtcattcat

SEQ ID NO: 2515164 - DNA, 25 bp, Homo sapien
tctccatgttcacatcgtagtcatt

SEQ ID NO: 2515165 - DNA, 25 bp, Homo sapien
gtgcttctatcccacagggtggcac

SEQ ID NO: 2515166 - DNA, 25 bp, Homo sapien
gtggcactgctcacaatgggaatat

SEQ ID NO: 2515167 - DNA, 25 bp, Homo sapien
tgggtgtgcttctatcccacagggt

SEQ ID NO: 2515168 - DNA, 25 bp, Homo sapien
cactgctcacaatgggaatatagca

SEQ ID NO: 2515169 - DNA, 25 bp, Homo sapien
aaattactgcccgattttggccaag

SEQ ID NO: 2515170 - DNA, 25 bp, Homo sapien
cggaaaccaggagatagcttttgaa

SEQ ID NO: 2515171 - DNA, 25 bp, Homo sapien
caaatacttgctttgcctctgagac

SEQ ID NO: 2515172 - DNA, 25 bp, Homo sapien
cctctgagactggaacggaaaccag

SEQ ID NO: 2515173 - DNA, 25 bp, Homo sapien
ttttttctgaacaataggacgggca

SEQ ID NO: 2515174 - DNA, 25 bp, Homo sapien
taaaagatagtggtatccctgctgg

SEQ ID NO: 2515175 - DNA, 25 bp, Homo sapien
tccctgctggtaagatgggcttcca

SEQ ID NO: 2515176 - DNA, 25 bp, Homo sapien
ggacgggcagaagttagatttacaa

SEQ ID NO: 2515177 - DNA, 25 bp, Homo sapien
gaatatctacccatacttcaaccat

SEQ ID NO: 2515178 - DNA, 25 bp, Homo sapien
attgtcatggccacaagcaagcccc

SEQ ID NO: 2515179 - DNA, 25 bp, Homo sapien
gtcatggccacaagcaagccccagg

SEQ ID NO: 2515180 - DNA, 25 bp, Homo sapien
aggatggatggggaatatctaccca

SEQ ID NO: 2515181 - DNA, 25 bp, Homo sapien
tatttaacatgaattcatgaattgc

SEQ ID NO: 2515182 - DNA, 25 bp, Homo sapien
cttacgtgaagagcaattatttaac

SEQ ID NO: 2515183 - DNA, 25 bp, Homo sapien
tacgtgaagagcaattatttaacat

SEQ ID NO: 2515184 - DNA, 25 bp, Homo sapien
cgtgaagagcaattatttaacatga

SEQ ID NO: 2515185 - DNA, 25 bp, Homo sapien
gtatttttccttcgatgcccccaga

SEQ ID NO: 2515186 - DNA, 25 bp, Homo sapien
tatttttccttcgatgcccccagaa

SEQ ID NO: 2515187 - DNA, 25 bp, Homo sapien
aaatagagacatctggatagagccc

SEQ ID NO: 2515188 - DNA, 25 bp, Homo sapien
gtgtgacaatttgtgggccctcccc

SEQ ID NO: 2515189 - DNA, 25 bp, Homo sapien
tggcctgcctgaatgctgtaaatag

SEQ ID NO: 2515190 - DNA, 25 bp, Homo sapien
tcagctgagtatcctctgtgaagaa

SEQ ID NO: 2515191 - DNA, 25 bp, Homo sapien
cagcacctaatggagtcaggtttga

SEQ ID NO: 2515192 - DNA, 25 bp, Homo sapien
aaagggagagtcctcaaaagcagca

SEQ ID NO: 2515193 - DNA, 25 bp, Homo sapien
atgagcagcacctaatggagtcagg

SEQ ID NO: 2515194 - DNA, 25 bp, Homo sapien
ttctgaactcggatatctctgtgga

SEQ ID NO: 2515195 - DNA, 25 bp, Homo sapien
aagctgtcttcaagatgtgcagaac

SEQ ID NO: 2515196 - DNA, 25 bp, Homo sapien
gctgtcttcaagatgtgcagaacaa

SEQ ID NO: 2515197 - DNA, 25 bp, Homo sapien
agctgtcttcaagatgtgcagaaca

SEQ ID NO: 2515198 - DNA, 25 bp, Homo sapien
attcagatgagcaaatgtgaaaaca

SEQ ID NO: 2515199 - DNA, 25 bp, Homo sapien
aatgtgttctcaaatgacagaaact

SEQ ID NO: 2515200 - DNA, 25 bp, Homo sapien
caggaaatgtgttctcaaatgacag

SEQ ID NO: 2515201 - DNA, 25 bp, Homo sapien
cagatgagcaaatgtgaaaacagga

SEQ ID NO: 2515202 - DNA, 25 bp, Homo sapien
gttctatcttctgtggccatactca

SEQ ID NO: 2515203 - DNA, 25 bp, Homo sapien
gttagttctatcttctgtggccata

SEQ ID NO: 2515204 - DNA, 25 bp, Homo sapien
tagttctatcttctgtggccatact

SEQ ID NO: 2515205 - DNA, 25 bp, Homo sapien
tgttagttctatcttctgtggccat

SEQ ID NO: 2515206 - DNA, 25 bp, Homo sapien
tcgtacccacatctctgatgtaaag

SEQ ID NO: 2515207 - DNA, 25 bp, Homo sapien
taattcgtacccacatctctgatgt

SEQ ID NO: 2515208 - DNA, 25 bp, Homo sapien
tgctcataattcgtacccacatctc

SEQ ID NO: 2515209 - DNA, 25 bp, Homo sapien
tacccacatctctgatgtaaagcat

SEQ ID NO: 2515210 - DNA, 25 bp, Homo sapien
gtttgcaaaaggtctgatggttagc

SEQ ID NO: 2515211 - DNA, 25 bp, Homo sapien
caaaaggtctgatggttagcaagaa

SEQ ID NO: 2515212 - DNA, 25 bp, Homo sapien
gtttcatacatatcactgtagacat

SEQ ID NO: 2515213 - DNA, 25 bp, Homo sapien
gtctgatggttagcaagaattcttc

SEQ ID NO: 2515214 - DNA, 25 bp, Homo sapien
ccgctccttggcctttgctgccgtg

SEQ ID NO: 2515215 - DNA, 25 bp, Homo sapien
tgcctcttctcacgggcgcggctgg

SEQ ID NO: 2515216 - DNA, 25 bp, Homo sapien
agagagcaaacggtccggctctacc

SEQ ID NO: 2515217 - DNA, 25 bp, Homo sapien
tggcctttgctgccgtgctgcctct

SEQ ID NO: 2515218 - DNA, 25 bp, Homo sapien
tgcagggtccctatcccggggcgcc

SEQ ID NO: 2515219 - DNA, 25 bp, Homo sapien
gctgcagggtccctatcccggggcg

SEQ ID NO: 2515220 - DNA, 25 bp, Homo sapien
ctgcagggtccctatcccggggcgc

SEQ ID NO: 2515221 - DNA, 25 bp, Homo sapien
caaggacatttagctgtgccaacaa

SEQ ID NO: 2515222 - DNA, 25 bp, Homo sapien
tcaaggacatttagctgtgccaaca

SEQ ID NO: 2515223 - DNA, 25 bp, Homo sapien
gccaacaaaggtcgttctcatctgc

SEQ ID NO: 2515224 - DNA, 25 bp, Homo sapien
agctgtgccaacaaaggtcgttctc

SEQ ID NO: 2515225 - DNA, 25 bp, Homo sapien
cccctaattcctgcccataagctgt

SEQ ID NO: 2515226 - DNA, 25 bp, Homo sapien
ctaattcctgcccataagctgtcca

SEQ ID NO: 2515227 - DNA, 25 bp, Homo sapien
aattcctgcccataagctgtccata

SEQ ID NO: 2515228 - DNA, 25 bp, Homo sapien
ttcctgcccataagctgtccatagg

SEQ ID NO: 2515229 - DNA, 25 bp, Homo sapien
acctggcatcccgagtgtaactggc

SEQ ID NO: 2515230 - DNA, 25 bp, Homo sapien
cagccaagtataaggaccctggtca

SEQ ID NO: 2515231 - DNA, 25 bp, Homo sapien
cccggatggattctgtcccagaatc

SEQ ID NO: 2515232 - DNA, 25 bp, Homo sapien
tgaacaggatgacagggtcatgccc

SEQ ID NO: 2515233 - DNA, 25 bp, Homo sapien
cataacccctggaataagagctgca

SEQ ID NO: 2515234 - DNA, 25 bp, Homo sapien
accccggcagcatggagatcagaac

SEQ ID NO: 2515235 - DNA, 25 bp, Homo sapien
atgggaccaccctgatccaacggga

SEQ ID NO: 2515236 - DNA, 25 bp, Homo sapien
aagagctgcaccctcaatgggacca

SEQ ID NO: 2515237 - DNA, 25 bp, Homo sapien
gagttttgtctgctcgtggccaggc

SEQ ID NO: 2515238 - DNA, 25 bp, Homo sapien
caacctgtttgtagcgtgggctgga

SEQ ID NO: 2515239 - DNA, 25 bp, Homo sapien
gcatgatcatcgtggacagcgtgga

SEQ ID NO: 2515240 - DNA, 25 bp, Homo sapien
gctgcctgaacaacgccagatctgg

SEQ ID NO: 2515241 - DNA, 25 bp, Homo sapien
aggcagcccccggacaggtctctct

SEQ ID NO: 2515242 - DNA, 25 bp, Homo sapien
ccacttgaagaatcagggcaaggca

SEQ ID NO: 2515243 - DNA, 25 bp, Homo sapien
cttgaagaatcagggcaaggcagcc

SEQ ID NO: 2515244 - DNA, 25 bp, Homo sapien
gcacagccacttgaagaatcagggc

SEQ ID NO: 2515245 - DNA, 25 bp, Homo sapien
gggaatccacaaattcacggctggc

SEQ ID NO: 2515246 - DNA, 25 bp, Homo sapien
gaaagacctgtcacgggaatccaca

SEQ ID NO: 2515247 - DNA, 25 bp, Homo sapien
atcctggaaagacctgtcacgggaa

SEQ ID NO: 2515248 - DNA, 25 bp, Homo sapien
aaattcacggctggcaagtgagccc

SEQ ID NO: 2515249 - DNA, 25 bp, Homo sapien
cggatgcacaggtctttgtacacag

SEQ ID NO: 2515250 - DNA, 25 bp, Homo sapien
gtacacagtctccttctgtggccat

SEQ ID NO: 2515251 - DNA, 25 bp, Homo sapien
ggatgcacaggtctttgtacacagt

SEQ ID NO: 2515252 - DNA, 25 bp, Homo sapien
tttgtacacagtctccttctgtggc

SEQ ID NO: 2515253 - DNA, 25 bp, Homo sapien
gtggctgtagagaggactgaaaggg

SEQ ID NO: 2515254 - DNA, 25 bp, Homo sapien
agaagtgctgagaagtggctgtaga

SEQ ID NO: 2515255 - DNA, 25 bp, Homo sapien
ctgagaagtggctgtagagaggact

SEQ ID NO: 2515256 - DNA, 25 bp, Homo sapien
ctatatagaagtgctgagaagtggc

SEQ ID NO: 2515257 - DNA, 25 bp, Homo sapien
aaagctatggaatcctcaacctcct

SEQ ID NO: 2515258 - DNA, 25 bp, Homo sapien
cagtctctgacaaacattccatggg

SEQ ID NO: 2515259 - DNA, 25 bp, Homo sapien
taaagcacattctttatagccccag

SEQ ID NO: 2515260 - DNA, 25 bp, Homo sapien
catcttggaagtcaaagctatggaa

SEQ ID NO: 2515261 - DNA, 25 bp, Homo sapien
ctccttacacttcccactttgaatg

SEQ ID NO: 2515262 - DNA, 25 bp, Homo sapien
tccttacacttcccactttgaatgg

SEQ ID NO: 2515263 - DNA, 25 bp, Homo sapien
ctcaacacgctcaacctgtgcagga

SEQ ID NO: 2515264 - DNA, 25 bp, Homo sapien
acctgtgcaggactttgggttccca

SEQ ID NO: 2515265 - DNA, 25 bp, Homo sapien
cactcaggtagctctggatgataat

SEQ ID NO: 2515266 - DNA, 25 bp, Homo sapien
aaattggcccaatgatcctccaccg

SEQ ID NO: 2515267 - DNA, 25 bp, Homo sapien
taatgtacctatagcactctcttct

SEQ ID NO: 2515268 - DNA, 25 bp, Homo sapien
ggtcccttaaattgccactcaggta

SEQ ID NO: 2515269 - DNA, 25 bp, Homo sapien
ggtttcaacgcgtcccattgtactg

SEQ ID NO: 2515270 - DNA, 25 bp, Homo sapien
tgtactgttgatttaatgaggcctc

SEQ ID NO: 2515271 - DNA, 25 bp, Homo sapien
ctacaggcggcattcctccgcgagg

SEQ ID NO: 2515272 - DNA, 25 bp, Homo sapien
gctgcgcttaggtttcaacgcgtcc

SEQ ID NO: 2515273 - DNA, 25 bp, Homo sapien
cagagacacagacatctcggtgttc

SEQ ID NO: 2515274 - DNA, 25 bp, Homo sapien
ccagagacacagacatctcggtgtt

SEQ ID NO: 2515275 - DNA, 25 bp, Homo sapien
agacacagacatctcggtgttctga

SEQ ID NO: 2515276 - DNA, 25 bp, Homo sapien
gagacacagacatctcggtgttctg

SEQ ID NO: 2515277 - DNA, 25 bp, Homo sapien
tagtcggctccaagtgttgcatgct

SEQ ID NO: 2515278 - DNA, 25 bp, Homo sapien
cacttgtaaatcagacacaatggta

SEQ ID NO: 2515279 - DNA, 25 bp, Homo sapien
cacaatggtactgagttcctgatag

SEQ ID NO: 2515280 - DNA, 25 bp, Homo sapien
gaatagggcataaatatcacttgta

SEQ ID NO: 2515281 - DNA, 25 bp, Homo sapien
tgacaaaccctaagggattgtacag

SEQ ID NO: 2515282 - DNA, 25 bp, Homo sapien
ctaagggattgtacagtccgaaagg

SEQ ID NO: 2515283 - DNA, 25 bp, Homo sapien
tggagagttgacaaaccctaaggga

SEQ ID NO: 2515284 - DNA, 25 bp, Homo sapien
ctttggagagttgacaaaccctaag

SEQ ID NO: 2515285 - DNA, 25 bp, Homo sapien
gcaggaacagaatcaccgtccacca

SEQ ID NO: 2515286 - DNA, 25 bp, Homo sapien
ctgcaggaacagaatcaccgtccac

SEQ ID NO: 2515287 - DNA, 25 bp, Homo sapien
caggaacagaatcaccgtccaccat

SEQ ID NO: 2515288 - DNA, 25 bp, Homo sapien
tgcaggaacagaatcaccgtccacc

SEQ ID NO: 2515289 - DNA, 25 bp, Homo sapien
tgtctctccccggatgccgccatat

SEQ ID NO: 2515290 - DNA, 25 bp, Homo sapien
tccaacctcggtgttgtcctggccg

SEQ ID NO: 2515291 - DNA, 25 bp, Homo sapien
catatttgtaggaaggactatctcc

SEQ ID NO: 2515292 - DNA, 25 bp, Homo sapien
aaggactatctccaacctcggtgtt

SEQ ID NO: 2515293 - DNA, 25 bp, Homo sapien
tacatttccgtaaggataaggccat

SEQ ID NO: 2515294 - DNA, 25 bp, Homo sapien
aaaccttgactatcactttacattt

SEQ ID NO: 2515295 - DNA, 25 bp, Homo sapien
aaccttgactatcactttacatttc

SEQ ID NO: 2515296 - DNA, 25 bp, Homo sapien
agcaaaaccttgactatcactttac

SEQ ID NO: 2515297 - DNA, 25 bp, Homo sapien
ggccctgtgttgttctgagcaagcc

SEQ ID NO: 2515298 - DNA, 25 bp, Homo sapien
ccctgtgttgttctgagcaagccca

SEQ ID NO: 2515299 - DNA, 25 bp, Homo sapien
gccctgtgttgttctgagcaagccc

SEQ ID NO: 2515300 - DNA, 25 bp, Homo sapien
gtaggtgtttaagcgcatccttgca

SEQ ID NO: 2515301 - DNA, 25 bp, Homo sapien
catccttgcagaatgcttgtgtgca

SEQ ID NO: 2515302 - DNA, 25 bp, Homo sapien
cacgaatgaatacatctgagctgtt

SEQ ID NO: 2515303 - DNA, 25 bp, Homo sapien
tatccctggcaactagcacacttag

SEQ ID NO: 2515304 - DNA, 25 bp, Homo sapien
tgacagtccatgagaaagattgctc

SEQ ID NO: 2515305 - DNA, 25 bp, Homo sapien
ttgggtctaatgtcaaccacctggg

SEQ ID NO: 2515306 - DNA, 25 bp, Homo sapien
gtctgatttttgtgtaatcaccaca

SEQ ID NO: 2515307 - DNA, 25 bp, Homo sapien
gacgacaacttatttggacccagct

SEQ ID NO: 2515308 - DNA, 25 bp, Homo sapien
tccttcccaagggcatgttcctggc

SEQ ID NO: 2515309 - DNA, 25 bp, Homo sapien
tctccttcccaagggcatgttcctg

SEQ ID NO: 2515310 - DNA, 25 bp, Homo sapien
gtctccttcccaagggcatgttcct

SEQ ID NO: 2515311 - DNA, 25 bp, Homo sapien
ccttcccaagggcatgttcctggca

SEQ ID NO: 2515312 - DNA, 25 bp, Homo sapien
aatttgcatctgagttgggagcagg

SEQ ID NO: 2515313 - DNA, 25 bp, Homo sapien
caggagggcaatcttagtgacaagg

SEQ ID NO: 2515314 - DNA, 25 bp, Homo sapien
gggcaatcttagtgacaaggacaac

SEQ ID NO: 2515315 - DNA, 25 bp, Homo sapien
ggacaacacttgtaatttgcatctg

SEQ ID NO: 2515316 - DNA, 25 bp, Homo sapien
agagcttgataataccttgcccagg

SEQ ID NO: 2515317 - DNA, 25 bp, Homo sapien
tgatcttaatgaaaaccctgtgagg

SEQ ID NO: 2515318 - DNA, 25 bp, Homo sapien
ccaggtttagcatatatagttgtca

SEQ ID NO: 2515319 - DNA, 25 bp, Homo sapien
tctgtgcaagacactaaagtgagtg

SEQ ID NO: 2515320 - DNA, 25 bp, Homo sapien
aatgctttatgcagcagccccacga

SEQ ID NO: 2515321 - DNA, 25 bp, Homo sapien
ggtaggagccaaaagaagccctcaa

SEQ ID NO: 2515322 - DNA, 25 bp, Homo sapien
gaaattagacacatgggtaggagcc

SEQ ID NO: 2515323 - DNA, 25 bp, Homo sapien
taacaaaggcattacccctgagtcc

SEQ ID NO: 2515324 - DNA, 25 bp, Homo sapien
ctgaagagcggctgtgcccggtact

SEQ ID NO: 2515325 - DNA, 25 bp, Homo sapien
tccaggcactcttcacacacagatg

SEQ ID NO: 2515326 - DNA, 25 bp, Homo sapien
catgctcttgggtcctagggtccac

SEQ ID NO: 2515327 - DNA, 25 bp, Homo sapien
caggtggcccgtgcttgctgttgtc

SEQ ID NO: 2515328 - DNA, 25 bp, Homo sapien
agaacgttggctccacaagcatgag

SEQ ID NO: 2515329 - DNA, 25 bp, Homo sapien
tccccaacttagaacgttggctcca

SEQ ID NO: 2515330 - DNA, 25 bp, Homo sapien
aattcatacattgactcttccccaa

SEQ ID NO: 2515331 - DNA, 25 bp, Homo sapien
tgtctgttcgcacagtgttagagcc

SEQ ID NO: 2515332 - DNA, 25 bp, Homo sapien
taagggactcgtgcagtgtcacaca

SEQ ID NO: 2515333 - DNA, 25 bp, Homo sapien
gagatggacccttgcacaggactaa

SEQ ID NO: 2515334 - DNA, 25 bp, Homo sapien
cacaggagcaaaggatggagccatt

SEQ ID NO: 2515335 - DNA, 25 bp, Homo sapien
agaagtaccccgaccacatttgagc

SEQ ID NO: 2515336 - DNA, 25 bp, Homo sapien
gaaaacccaatatcaagctaatgaa

SEQ ID NO: 2515337 - DNA, 25 bp, Homo sapien
ccaatatcaagctaatgaaccacaa

SEQ ID NO: 2515338 - DNA, 25 bp, Homo sapien
gtgtgaaaacccaatatcaagctaa

SEQ ID NO: 2515339 - DNA, 25 bp, Homo sapien
aacccaatatcaagctaatgaacca

SEQ ID NO: 2515340 - DNA, 25 bp, Homo sapien
gaaaagaccttagcaaatcacccca

SEQ ID NO: 2515341 - DNA, 25 bp, Homo sapien
tttgcctgcagtgtgtacgcctcct

SEQ ID NO: 2515342 - DNA, 25 bp, Homo sapien
gaatctccaaggctagaaaagacct

SEQ ID NO: 2515343 - DNA, 25 bp, Homo sapien
tgaacacagtggtcgtccagagaga

SEQ ID NO: 2515344 - DNA, 25 bp, Homo sapien
cacaggtaagccacctttgtgcaca

SEQ ID NO: 2515345 - DNA, 25 bp, Homo sapien
gaaggtgacggaatcacatgcacag

SEQ ID NO: 2515346 - DNA, 25 bp, Homo sapien
cacgtgtgagtgtaacctggattat

SEQ ID NO: 2515347 - DNA, 25 bp, Homo sapien
cctggattatgaaggtgacggaatc

SEQ ID NO: 2515348 - DNA, 25 bp, Homo sapien
tctcacagggtgctcaatattgtac

SEQ ID NO: 2515349 - DNA, 25 bp, Homo sapien
gctggagctaatctatcgttgggtc

SEQ ID NO: 2515350 - DNA, 25 bp, Homo sapien
ttccagggtctcaagtggctgcata

SEQ ID NO: 2515351 - DNA, 25 bp, Homo sapien
caaggcattccagaagtgagtcagc

SEQ ID NO: 2515352 - DNA, 25 bp, Homo sapien
tgaaaactgataccaaagtcaagcc

SEQ ID NO: 2515353 - DNA, 25 bp, Homo sapien
tattctgaaaactgataccaaagtc

SEQ ID NO: 2515354 - DNA, 25 bp, Homo sapien
aatttattctgaaaactgataccaa

SEQ ID NO: 2515355 - DNA, 25 bp, Homo sapien
ccaaatttattctgaaaactgatac

SEQ ID NO: 2515356 - DNA, 25 bp, Homo sapien
gatccatttcgtcatctactcccag

SEQ ID NO: 2515357 - DNA, 25 bp, Homo sapien
ccctcatatggagaatagagaccca

SEQ ID NO: 2515358 - DNA, 25 bp, Homo sapien
taataatgccacaatggtgtgtggg

SEQ ID NO: 2515359 - DNA, 25 bp, Homo sapien
gaacagttgggatcaagagcttatt

SEQ ID NO: 2515360 - DNA, 25 bp, Homo sapien
aggatgggccaccaaaggaagcgct

SEQ ID NO: 2515361 - DNA, 25 bp, Homo sapien
cacttcgtagcatctctgagtccca

SEQ ID NO: 2515362 - DNA, 25 bp, Homo sapien
caagcattagcaacacagcaccagt

SEQ ID NO: 2515363 - DNA, 25 bp, Homo sapien
aatcctaagctatggtttggcccct

SEQ ID NO: 2515364 - DNA, 25 bp, Homo sapien
tgtatgagagcacaacctcagctcc

SEQ ID NO: 2515365 - DNA, 25 bp, Homo sapien
gaatatctcgaaccccttgtatgag

SEQ ID NO: 2515366 - DNA, 25 bp, Homo sapien
tcccagaggcaaagggtggcttgct

SEQ ID NO: 2515367 - DNA, 25 bp, Homo sapien
tccaaacagtcggaagaggacatta

SEQ ID NO: 2515368 - DNA, 25 bp, Homo sapien
tttgggactgcaccagaggaggagt

SEQ ID NO: 2515369 - DNA, 25 bp, Homo sapien
agttgaactctgaaggcaaaatcca

SEQ ID NO: 2515370 - DNA, 25 bp, Homo sapien
gggccttttcaatcaatcagacacc

SEQ ID NO: 2515371 - DNA, 25 bp, Homo sapien
gacaccagccttataaattcttctg

SEQ ID NO: 2515372 - DNA, 25 bp, Homo sapien
taagtgagcctgtaagcctttggga

SEQ ID NO: 2515373 - DNA, 25 bp, Homo sapien
catggaaatgaccagtagaaatgca

SEQ ID NO: 2515374 - DNA, 25 bp, Homo sapien
aaatgcagactgacacgggtgtgat

SEQ ID NO: 2515375 - DNA, 25 bp, Homo sapien
tgattcacgactcaaataccaggag

SEQ ID NO: 2515376 - DNA, 25 bp, Homo sapien
gggaaactcctcataagggctggaa

SEQ ID NO: 2515377 - DNA, 25 bp, Homo sapien
tctggaaaggtcatccgggcagctg

SEQ ID NO: 2515378 - DNA, 25 bp, Homo sapien
caagggaatcttgccattgccgcca

SEQ ID NO: 2515379 - DNA, 25 bp, Homo sapien
ttctagacaaggagccccaagtggt

SEQ ID NO: 2515380 - DNA, 25 bp, Homo sapien
aagaacaccagcgcattcttttaga

SEQ ID NO: 2515381 - DNA, 25 bp, Homo sapien
cttttagaaccccgacaccgagcag

SEQ ID NO: 2515382 - DNA, 25 bp, Homo sapien
gaacaccagcgcattcttttagaac

SEQ ID NO: 2515383 - DNA, 25 bp, Homo sapien
tcttttagaaccccgacaccgagca

SEQ ID NO: 2515384 - DNA, 25 bp, Homo sapien
taagtgtcagcctccaatacaccct

SEQ ID NO: 2515385 - DNA, 25 bp, Homo sapien
gtgtcagcctccaatacaccctgat

SEQ ID NO: 2515386 - DNA, 25 bp, Homo sapien
aacacacacccattaagtgtcagcc

SEQ ID NO: 2515387 - DNA, 25 bp, Homo sapien
ctgggcgcaacacacacccattaag

SEQ ID NO: 2515388 - DNA, 25 bp, Homo sapien
tagtcgcacaaacatcacaggagtg

SEQ ID NO: 2515389 - DNA, 25 bp, Homo sapien
caaggagcccatggaatgccagact

SEQ ID NO: 2515390 - DNA, 25 bp, Homo sapien
tgaaggatactacaaatgcaggtgc

SEQ ID NO: 2515391 - DNA, 25 bp, Homo sapien
gcagacattcccatagcactcagag

SEQ ID NO: 2515392 - DNA, 25 bp, Homo sapien
gaaggctgttccactagctggcagg

SEQ ID NO: 2515393 - DNA, 25 bp, Homo sapien
cccactcgtttcttgcagaaggctc

SEQ ID NO: 2515394 - DNA, 25 bp, Homo sapien
tcttcaaacccactcgtttcttgca

SEQ ID NO: 2515395 - DNA, 25 bp, Homo sapien
ggctctacagaaggctgttccacta

SEQ ID NO: 2515396 - DNA, 25 bp, Homo sapien
cagcgttttaccattgtggagccca

SEQ ID NO: 2515397 - DNA, 25 bp, Homo sapien
caagtggtctcacctatcccaggaa

SEQ ID NO: 2515398 - DNA, 25 bp, Homo sapien
tccatggaggagtcaagaaccgttt

SEQ ID NO: 2515399 - DNA, 25 bp, Homo sapien
tgtgccagaatgtcaaagccttagt

SEQ ID NO: 2515400 - DNA, 25 bp, Homo sapien
cctgcaggagaggggttccgaaggt

SEQ ID NO: 2515401 - DNA, 25 bp, Homo sapien
ggctgacgtcatagttcaggaggca

SEQ ID NO: 2515402 - DNA, 25 bp, Homo sapien
cgacaggcgccttaggaagtaggtt

SEQ ID NO: 2515403 - DNA, 25 bp, Homo sapien
tggtctgtgcggaacaggcttccaa

SEQ ID NO: 2515404 - DNA, 25 bp, Homo sapien
tcagagacgccatgtagatgtcagc

SEQ ID NO: 2515405 - DNA, 25 bp, Homo sapien
ctcctgcaaaaccagctgtgactca

SEQ ID NO: 2515406 - DNA, 25 bp, Homo sapien
tgcaaaaccagctgtgactcagcat

SEQ ID NO: 2515407 - DNA, 25 bp, Homo sapien
caaaaccagctgtgactcagcatct

SEQ ID NO: 2515408 - DNA, 25 bp, Homo sapien
tttttccactcctgcaaaaccagct

SEQ ID NO: 2515409 - DNA, 25 bp, Homo sapien
gccagaatccaaggtgcacatgatc

SEQ ID NO: 2515410 - DNA, 25 bp, Homo sapien
tgcacatgatcgcagggaacaggcc

SEQ ID NO: 2515411 - DNA, 25 bp, Homo sapien
gttcttatggctaaacagaaacact

SEQ ID NO: 2515412 - DNA, 25 bp, Homo sapien
ccaaggttcttatggctaaacagaa

SEQ ID NO: 2515413 - DNA, 25 bp, Homo sapien
tgagaagcggctaccaatgccagca

SEQ ID NO: 2515414 - DNA, 25 bp, Homo sapien
ctgagaagcggctaccaatgccagc

SEQ ID NO: 2515415 - DNA, 25 bp, Homo sapien
gcagccaggtcatggtttgaatgta

SEQ ID NO: 2515416 - DNA, 25 bp, Homo sapien
gaatgtattgctccgtgttcatgat

SEQ ID NO: 2515417 - DNA, 25 bp, Homo sapien
aataagccagtcaaggtctgcagcc

SEQ ID NO: 2515418 - DNA, 25 bp, Homo sapien
tccagccatgctttagggtcaaatc

SEQ ID NO: 2515419 - DNA, 25 bp, Homo sapien
taatggttagttattcaccaagctg

SEQ ID NO: 2515420 - DNA, 25 bp, Homo sapien
tcagttctggaaataattgccgtga

SEQ ID NO: 2515421 - DNA, 25 bp, Homo sapien
aataattgccgtgagtcacaacccc

SEQ ID NO: 2515422 - DNA, 25 bp, Homo sapien
tattcaccaagctgaattcaatgaa

SEQ ID NO: 2515423 - DNA, 25 bp, Homo sapien
caggtcactgtatatatggtcacca

SEQ ID NO: 2515424 - DNA, 25 bp, Homo sapien
atatggtcaccaaaatacaacactc

SEQ ID NO: 2515425 - DNA, 25 bp, Homo sapien
gtcactgtatatatggtcaccaaaa

SEQ ID NO: 2515426 - DNA, 25 bp, Homo sapien
tatatggtcaccaaaatacaacact

SEQ ID NO: 2515427 - DNA, 25 bp, Homo sapien
ccagagtaagacacctttctcattc

SEQ ID NO: 2515428 - DNA, 25 bp, Homo sapien
gcttgtatatctggcctttctgcaa

SEQ ID NO: 2515429 - DNA, 25 bp, Homo sapien
ggattttatcccagagtaagacacc

SEQ ID NO: 2515430 - DNA, 25 bp, Homo sapien
ggcctttctgcaacttatggatttt

SEQ ID NO: 2515431 - DNA, 25 bp, Homo sapien
tctatgaaataccagttattcacta

SEQ ID NO: 2515432 - DNA, 25 bp, Homo sapien
tctgctctatgaaataccagttatt

SEQ ID NO: 2515433 - DNA, 25 bp, Homo sapien
tcactatcacaggaagtagctccct

SEQ ID NO: 2515434 - DNA, 25 bp, Homo sapien
cattatgacatggagtagtacaggc

SEQ ID NO: 2515435 - DNA, 25 bp, Homo sapien
cattttcttgagtcccaccaagcat

SEQ ID NO: 2515436 - DNA, 25 bp, Homo sapien
gagtcccaccaagcatttttgagtc

SEQ ID NO: 2515437 - DNA, 25 bp, Homo sapien
tttcttgagtcccaccaagcatttt

SEQ ID NO: 2515438 - DNA, 25 bp, Homo sapien
ttgagtcccaccaagcatttttgag

SEQ ID NO: 2515439 - DNA, 25 bp, Homo sapien
tttcccaacgatataactcatccct

SEQ ID NO: 2515440 - DNA, 25 bp, Homo sapien
cagtctttcccaacgatataactca

SEQ ID NO: 2515441 - DNA, 25 bp, Homo sapien
gtccctccagtctttcccaacgata

SEQ ID NO: 2515442 - DNA, 25 bp, Homo sapien
caacgatataactcatccctttgtc

SEQ ID NO: 2515443 - DNA, 25 bp, Homo sapien
gattaactgtgtctgtaactttttc

SEQ ID NO: 2515444 - DNA, 25 bp, Homo sapien
aagtcagccaggttagtctaacatt

SEQ ID NO: 2515445 - DNA, 25 bp, Homo sapien
cattaaagagattaactgtgtctgt

SEQ ID NO: 2515446 - DNA, 25 bp, Homo sapien
gccaggttagtctaacattaaagag

SEQ ID NO: 2515447 - DNA, 25 bp, Homo sapien
ttgccatgatcagccagtttggcca

SEQ ID NO: 2515448 - DNA, 25 bp, Homo sapien
gtttggccaacactgcgcgggtctg

SEQ ID NO: 2515449 - DNA, 25 bp, Homo sapien
tgctcagcatagcagatgtactttt

SEQ ID NO: 2515450 - DNA, 25 bp, Homo sapien
ttcttgccatgatcagccagtttgg

SEQ ID NO: 2515451 - DNA, 25 bp, Homo sapien
tgcaaagtaaaatgccggcatggtt

SEQ ID NO: 2515452 - DNA, 25 bp, Homo sapien
acagaaaggctgaaactctcttcgt

SEQ ID NO: 2515453 - DNA, 25 bp, Homo sapien
cttcgtgatactgctgagcacatac

SEQ ID NO: 2515454 - DNA, 25 bp, Homo sapien
gccggcatggttgcaaaagaaacag

SEQ ID NO: 2515455 - DNA, 25 bp, Homo sapien
tgatgtggacgtctcgaattgaatc

SEQ ID NO: 2515456 - DNA, 25 bp, Homo sapien
tattcctttgatgtggacgtctcga

SEQ ID NO: 2515457 - DNA, 25 bp, Homo sapien
aattgctctgtacattattcctttg

SEQ ID NO: 2515458 - DNA, 25 bp, Homo sapien
tctgtacattattcctttgatgtgg

SEQ ID NO: 2515459 - DNA, 25 bp, Homo sapien
ttcttgaggaagtattcattcacgc

SEQ ID NO: 2515460 - DNA, 25 bp, Homo sapien
tattcattcacgcaggacaggaggg

SEQ ID NO: 2515461 - DNA, 25 bp, Homo sapien
gatgcacaggctcatagtcgatgtt

SEQ ID NO: 2515462 - DNA, 25 bp, Homo sapien
gaactgcttcatcgtgtttccatga

SEQ ID NO: 2515463 - DNA, 25 bp, Homo sapien
ctttccgtaaaagtcactcatctgc

SEQ ID NO: 2515464 - DNA, 25 bp, Homo sapien
ccgtaaaagtcactcatctgctcca

SEQ ID NO: 2515465 - DNA, 25 bp, Homo sapien
tgggacccctcgtacatttcaatga

SEQ ID NO: 2515466 - DNA, 25 bp, Homo sapien
tgctccaagggcacgtgggacccct

SEQ ID NO: 2515467 - DNA, 25 bp, Homo sapien
acagtgaacttccctacagcctcat

SEQ ID NO: 2515468 - DNA, 25 bp, Homo sapien
aatgcctcatacactgtccatactc

SEQ ID NO: 2515469 - DNA, 25 bp, Homo sapien
attctgaacgctccttctccctgaa

SEQ ID NO: 2515470 - DNA, 25 bp, Homo sapien
acccttctcagcagcgatgcaacag

SEQ ID NO: 2515471 - DNA, 25 bp, Homo sapien
gacacaatggacagtgtatatacaa

SEQ ID NO: 2515472 - DNA, 25 bp, Homo sapien
acacaatggacagtgtatatacaag

SEQ ID NO: 2515473 - DNA, 25 bp, Homo sapien
cagttcccagctggatataatgaaa

SEQ ID NO: 2515474 - DNA, 25 bp, Homo sapien
acagttcccagctggatataatgaa

SEQ ID NO: 2515475 - DNA, 25 bp, Homo sapien
aaatttgggtcatactcatacttcc

SEQ ID NO: 2515476 - DNA, 25 bp, Homo sapien
tgaagtccacgaattgcaaaatttg

SEQ ID NO: 2515477 - DNA, 25 bp, Homo sapien
tgtacatcataatgaagtccacgaa

SEQ ID NO: 2515478 - DNA, 25 bp, Homo sapien
tgcaaaatttgggtcatactcatac

SEQ ID NO: 2515479 - DNA, 25 bp, Homo sapien
gcgtttccaagaattgagaaccctg

SEQ ID NO: 2515480 - DNA, 25 bp, Homo sapien
ccaagaattgagaaccctgtgtatg

SEQ ID NO: 2515481 - DNA, 25 bp, Homo sapien
ccattcatgggcgtttccaagaatt

SEQ ID NO: 2515482 - DNA, 25 bp, Homo sapien
gagaaccctgtgtatggtcctgcat

SEQ ID NO: 2515483 - DNA, 25 bp, Homo sapien
tgtaatcataatcgaagccatagat

SEQ ID NO: 2515484 - DNA, 25 bp, Homo sapien
tcaatgtctgacaggctcatttcat

SEQ ID NO: 2515485 - DNA, 25 bp, Homo sapien
cattaaatatcagcgtgtggaggtg

SEQ ID NO: 2515486 - DNA, 25 bp, Homo sapien
cggtgttcattgatgagaaggtccc

SEQ ID NO: 2515487 - DNA, 25 bp, Homo sapien
taatcttgagaatcctaggaggcct

SEQ ID NO: 2515488 - DNA, 25 bp, Homo sapien
gtttcaaacactcatagatagcact

SEQ ID NO: 2515489 - DNA, 25 bp, Homo sapien
tctcccttatggtggcttatttgtg

SEQ ID NO: 2515490 - DNA, 25 bp, Homo sapien
agagtttgcactggcttctaccagg

SEQ ID NO: 2515491 - DNA, 25 bp, Homo sapien
aactggtagatcagcgagccacctc

SEQ ID NO: 2515492 - DNA, 25 bp, Homo sapien
agaagcactaaatgagcactgggtc

SEQ ID NO: 2515493 - DNA, 25 bp, Homo sapien
aatatcattattccaggcaggcttc

SEQ ID NO: 2515494 - DNA, 25 bp, Homo sapien
tctaaaaaacagtccccatgctgag

SEQ ID NO: 2515495 - DNA, 25 bp, Homo sapien
catcggtacttcttctgactgtgcc

SEQ ID NO: 2515496 - DNA, 25 bp, Homo sapien
tcatcggtacttcttctgactgtgc

SEQ ID NO: 2515497 - DNA, 25 bp, Homo sapien
tcggtacttcttctgactgtgcctt

SEQ ID NO: 2515498 - DNA, 25 bp, Homo sapien
atcggtacttcttctgactgtgcct

SEQ ID NO: 2515499 - DNA, 25 bp, Homo sapien
agcgctcccacaggtagcgcttcat

SEQ ID NO: 2515500 - DNA, 25 bp, Homo sapien
tagcgctcccacaggtagcgcttca

SEQ ID NO: 2515501 - DNA, 25 bp, Homo sapien
ccggggcggtcccgggtgcagtgca

SEQ ID NO: 2515502 - DNA, 25 bp, Homo sapien
tccggggcggtcccgggtgcagtgc

SEQ ID NO: 2515503 - DNA, 25 bp, Homo sapien
cggggcggtcccgggtgcagtgcac

SEQ ID NO: 2515504 - DNA, 25 bp, Homo sapien
ggcccgcacacggccgcccccgagc

SEQ ID NO: 2515505 - DNA, 25 bp, Homo sapien
cccccgagccgcggtcccgcagcca

SEQ ID NO: 2515506 - DNA, 25 bp, Homo sapien
ccgcagccaccccgcaaagccgccg

SEQ ID NO: 2515507 - DNA, 25 bp, Homo sapien
gcccgcacacggccgcccccgagcc

SEQ ID NO: 2515508 - DNA, 25 bp, Homo sapien
cgctctgcgactgctgctgcccggc

SEQ ID NO: 2515509 - DNA, 25 bp, Homo sapien
cgccgcgccgctctgcgactgctgc

SEQ ID NO: 2515510 - DNA, 25 bp, Homo sapien
ccgccgcgccgctctgcgactgctg

SEQ ID NO: 2515511 - DNA, 25 bp, Homo sapien
cgccgctctgcgactgctgctgccc

SEQ ID NO: 2515512 - DNA, 25 bp, Homo sapien
tgtattagaactctgagcactgtgg

SEQ ID NO: 2515513 - DNA, 25 bp, Homo sapien
ttttgtgctaacaggccatggcagg

SEQ ID NO: 2515514 - DNA, 25 bp, Homo sapien
tgaggccaatatctccggctccgga

SEQ ID NO: 2515515 - DNA, 25 bp, Homo sapien
gaatgttgctggctcataccttgag

SEQ ID NO: 2515516 - DNA, 25 bp, Homo sapien
attccatggattgatgaatgagaag

SEQ ID NO: 2515517 - DNA, 25 bp, Homo sapien
gatctgtataaatagcctactgcct

SEQ ID NO: 2515518 - DNA, 25 bp, Homo sapien
tcccaggtggatcacccttaaatca

SEQ ID NO: 2515519 - DNA, 25 bp, Homo sapien
gaatgagaagatcccaggtggatca

SEQ ID NO: 2515520 - DNA, 25 bp, Homo sapien
gacgtgatgacaagagtcacttgcc

SEQ ID NO: 2515521 - DNA, 25 bp, Homo sapien
acgtgatgacaagagtcacttgcca

SEQ ID NO: 2515522 - DNA, 25 bp, Homo sapien
cgtgatgacaagagtcacttgccaa

SEQ ID NO: 2515523 - DNA, 25 bp, Homo sapien
ctgtcaagcccttgagcctggtaaa

SEQ ID NO: 2515524 - DNA, 25 bp, Homo sapien
gccccttagtgctggaaatcctaca

SEQ ID NO: 2515525 - DNA, 25 bp, Homo sapien
tggtaaaccttgctgattccttcag

SEQ ID NO: 2515526 - DNA, 25 bp, Homo sapien
actctccccattccagagtttcaaa

SEQ ID NO: 2515527 - DNA, 25 bp, Homo sapien
tacataacacattggattgcacttc

SEQ ID NO: 2515528 - DNA, 25 bp, Homo sapien
ccaatgtccgtcacagtacataaca

SEQ ID NO: 2515529 - DNA, 25 bp, Homo sapien
aatgctcctcatgaacttcttcacc

SEQ ID NO: 2515530 - DNA, 25 bp, Homo sapien
ccttcttgcctcgtttctgtgcatc

SEQ ID NO: 2515531 - DNA, 25 bp, Homo sapien
gcttgtcaccccaacaagaccacaa

SEQ ID NO: 2515532 - DNA, 25 bp, Homo sapien
tgcttgtcaccccaacaagaccaca

SEQ ID NO: 2515533 - DNA, 25 bp, Homo sapien
gtgcttgtcaccccaacaagaccac

SEQ ID NO: 2515534 - DNA, 25 bp, Homo sapien
tataacaaatagaagggcgtgatta

SEQ ID NO: 2515535 - DNA, 25 bp, Homo sapien
ataacaaatagaagggcgtgattac

SEQ ID NO: 2515536 - DNA, 25 bp, Homo sapien
atataacaaatagaagggcgtgatt

SEQ ID NO: 2515537 - DNA, 25 bp, Homo sapien
tttacacaacgtatcgctgaggctg

SEQ ID NO: 2515538 - DNA, 25 bp, Homo sapien
acaacgtatcgctgaggctgatgct

SEQ ID NO: 2515539 - DNA, 25 bp, Homo sapien
gagtgaggacttggccagagtttct

SEQ ID NO: 2515540 - DNA, 25 bp, Homo sapien
ctaatttacacaacgtatcgctgag

SEQ ID NO: 2515541 - DNA, 25 bp, Homo sapien
caaaggaccttgagtgcaaacctaa

SEQ ID NO: 2515542 - DNA, 25 bp, Homo sapien
ccacaggtgcgaagggagatttact

SEQ ID NO: 2515543 - DNA, 25 bp, Homo sapien
ccagttaggccggaggaagaagatc

SEQ ID NO: 2515544 - DNA, 25 bp, Homo sapien
gatgagtatgactaacccttgccct

SEQ ID NO: 2515545 - DNA, 25 bp, Homo sapien
aacagatgaaagcatatggctgctg

SEQ ID NO: 2515546 - DNA, 25 bp, Homo sapien
ggtgtatgtgtccagtcttgagcac

SEQ ID NO: 2515547 - DNA, 25 bp, Homo sapien
gggtgccagtggaatactcaagtga

SEQ ID NO: 2515548 - DNA, 25 bp, Homo sapien
tgaggatgtccagtaaacagatgaa

SEQ ID NO: 2515549 - DNA, 25 bp, Homo sapien
cttacggaacagcagctgaagacct

SEQ ID NO: 2515550 - DNA, 25 bp, Homo sapien
ggtcctggtggggctgatgtgctcc

SEQ ID NO: 2515551 - DNA, 25 bp, Homo sapien
gcagctgaagacctgggtcctggtg

SEQ ID NO: 2515552 - DNA, 25 bp, Homo sapien
agctgaagacctgggtcctggtggg

SEQ ID NO: 2515553 - DNA, 25 bp, Homo sapien
gctcgtctcagattgagcgcattag

SEQ ID NO: 2515554 - DNA, 25 bp, Homo sapien
ctatgctcgtctcagattgagcgca

SEQ ID NO: 2515555 - DNA, 25 bp, Homo sapien
gtctcagattgagcgcattagcccc

SEQ ID NO: 2515556 - DNA, 25 bp, Homo sapien
tcgtctcagattgagcgcattagcc

SEQ ID NO: 2515557 - DNA, 25 bp, Homo sapien
gccaaggatgctgaccgaaggataa

SEQ ID NO: 2515558 - DNA, 25 bp, Homo sapien
attccataaggtgactgtgccaagg

SEQ ID NO: 2515559 - DNA, 25 bp, Homo sapien
taaggtgactgtgccaaggatgctg

SEQ ID NO: 2515560 - DNA, 25 bp, Homo sapien
tgactgtgccaaggatgctgaccga

SEQ ID NO: 2515561 - DNA, 25 bp, Homo sapien
gatggctggctactccgttgtttcg

SEQ ID NO: 2515562 - DNA, 25 bp, Homo sapien
gctggctactccgttgtttcgaagg

SEQ ID NO: 2515563 - DNA, 25 bp, Homo sapien
actccgttgtttcgaaggttggctg

SEQ ID NO: 2515564 - DNA, 25 bp, Homo sapien
ttcgaaggttggctgttgacagtga

SEQ ID NO: 2515565 - DNA, 25 bp, Homo sapien
gctgagggctgcatagagacccaga

SEQ ID NO: 2515566 - DNA, 25 bp, Homo sapien
tagagacccagaagtaagagcatct

SEQ ID NO: 2515567 - DNA, 25 bp, Homo sapien
tgtggtaccacagacaacggccatg

SEQ ID NO: 2515568 - DNA, 25 bp, Homo sapien
gagagcaggatggtgtggtaccaca

SEQ ID NO: 2515569 - DNA, 25 bp, Homo sapien
tcttgccaaacaagcttttcctgat

SEQ ID NO: 2515570 - DNA, 25 bp, Homo sapien
tccaaccagcatgtttttcttgcca

SEQ ID NO: 2515571 - DNA, 25 bp, Homo sapien
tagcaaatccgctaaaaattccata

SEQ ID NO: 2515572 - DNA, 25 bp, Homo sapien
cactctcgaagtttcatttttgcaa

SEQ ID NO: 2515573 - DNA, 25 bp, Homo sapien
ggtagcttgatcacggggattgtta

SEQ ID NO: 2515574 - DNA, 25 bp, Homo sapien
cttcgatgtatttcatggtagcttg

SEQ ID NO: 2515575 - DNA, 25 bp, Homo sapien
tccagtaagttggaaatttcagttg

SEQ ID NO: 2515576 - DNA, 25 bp, Homo sapien
tcacggggattgttatccagtaagt

SEQ ID NO: 2515577 - DNA, 25 bp, Homo sapien
tttcaagatacagttctccaatagc

SEQ ID NO: 2515578 - DNA, 25 bp, Homo sapien
gacgcagcatgcttgaccatgcttt

SEQ ID NO: 2515579 - DNA, 25 bp, Homo sapien
gttctccaatagcattctgtacttt

SEQ ID NO: 2515580 - DNA, 25 bp, Homo sapien
cactgagtgaaagacgcagcatgct

SEQ ID NO: 2515581 - DNA, 25 bp, Homo sapien
cattaatcgacatttgtcaaggaca

SEQ ID NO: 2515582 - DNA, 25 bp, Homo sapien
agaacaactcttctgcttcattggt

SEQ ID NO: 2515583 - DNA, 25 bp, Homo sapien
taacatgtcctcaacactcaagaac

SEQ ID NO: 2515584 - DNA, 25 bp, Homo sapien
taagttcaataagcctgcactgcag

SEQ ID NO: 2515585 - DNA, 25 bp, Homo sapien
caaaaccaaggtattagcaaggcca

SEQ ID NO: 2515586 - DNA, 25 bp, Homo sapien
tagtgaactgcgcatgtacctctga

SEQ ID NO: 2515587 - DNA, 25 bp, Homo sapien
taaaaggtgatgttacccaggcatg

SEQ ID NO: 2515588 - DNA, 25 bp, Homo sapien
cacggtgatggactggaacactcaa

SEQ ID NO: 2515589 - DNA, 25 bp, Homo sapien
cactgatctgctttaatcttggcca

SEQ ID NO: 2515590 - DNA, 25 bp, Homo sapien
ggcactgatctgctttaatcttggc

SEQ ID NO: 2515591 - DNA, 25 bp, Homo sapien
ctgagagtgtaccgctcttcctcat

SEQ ID NO: 2515592 - DNA, 25 bp, Homo sapien
taccgctcttcctcattgtatggca

SEQ ID NO: 2515593 - DNA, 25 bp, Homo sapien
catagccggcctccaataatacatt

SEQ ID NO: 2515594 - DNA, 25 bp, Homo sapien
gaaagtaaataggcctcagagacat

SEQ ID NO: 2515595 - DNA, 25 bp, Homo sapien
tgtccagaagcccaggctttggatt

SEQ ID NO: 2515596 - DNA, 25 bp, Homo sapien
attccagaagtgaatgaggtgcagc

SEQ ID NO: 2515597 - DNA, 25 bp, Homo sapien
aaagccgcacaacccccgcaagcat

SEQ ID NO: 2515598 - DNA, 25 bp, Homo sapien
agaaagccgcacaacccccgcaagc

SEQ ID NO: 2515599 - DNA, 25 bp, Homo sapien
ccgcacaacccccgcaagcatccac

SEQ ID NO: 2515600 - DNA, 25 bp, Homo sapien
catgtagggcttgagagaaagccgc

SEQ ID NO: 2515601 - DNA, 25 bp, Homo sapien
tatgccatggcaattcttgatacac

SEQ ID NO: 2515602 - DNA, 25 bp, Homo sapien
ctgatcaacacttggtgaaaatgtg

SEQ ID NO: 2515603 - DNA, 25 bp, Homo sapien
tgccgctggaagtatctgatcaaca

SEQ ID NO: 2515604 - DNA, 25 bp, Homo sapien
tctccagaaagaggtttgccgctgg

SEQ ID NO: 2515605 - DNA, 25 bp, Homo sapien
tgagggtgcctgatgaaacagaata

SEQ ID NO: 2515606 - DNA, 25 bp, Homo sapien
aacagaataatctttaggcccacag

SEQ ID NO: 2515607 - DNA, 25 bp, Homo sapien
tcaccagttgatttgcatgggccat

SEQ ID NO: 2515608 - DNA, 25 bp, Homo sapien
ccacagaagtcaagatcaccagttg

SEQ ID NO: 2515609 - DNA, 25 bp, Homo sapien
ggtgcagcattacaagaagaaatga

SEQ ID NO: 2515610 - DNA, 25 bp, Homo sapien
agggtgcagcattacaagaagaaat

SEQ ID NO: 2515611 - DNA, 25 bp, Homo sapien
gggtgcagcattacaagaagaaatg

SEQ ID NO: 2515612 - DNA, 25 bp, Homo sapien
acagtaagcacagagcgtcggccac

SEQ ID NO: 2515613 - DNA, 25 bp, Homo sapien
caccatgcgacaggcacagtaagca

SEQ ID NO: 2515614 - DNA, 25 bp, Homo sapien
aaagctggagtagctcatcctcagc

SEQ ID NO: 2515615 - DNA, 25 bp, Homo sapien
cccactgtttggtggcgttgcggaa

SEQ ID NO: 2515616 - DNA, 25 bp, Homo sapien
agccacagtgtctgaatttgccctt

SEQ ID NO: 2515617 - DNA, 25 bp, Homo sapien
ccagcgtttgagaaccaattcccag

SEQ ID NO: 2515618 - DNA, 25 bp, Homo sapien
cacaacgacttgtaggacaggctgg

SEQ ID NO: 2515619 - DNA, 25 bp, Homo sapien
ccatcatgggaatggagagatgctt

SEQ ID NO: 2515620 - DNA, 25 bp, Homo sapien
ggttttttcctcaacgcctgtgtgc

SEQ ID NO: 2515621 - DNA, 25 bp, Homo sapien
caagccatctgagtcttcgttgaga

SEQ ID NO: 2515622 - DNA, 25 bp, Homo sapien
tacttccacaagaaatgagaagacc

SEQ ID NO: 2515623 - DNA, 25 bp, Homo sapien
tctgacctgaaatcccataaatgcc

SEQ ID NO: 2515624 - DNA, 25 bp, Homo sapien
catctagtacaagtatgcatggctt

SEQ ID NO: 2515625 - DNA, 25 bp, Homo sapien
ggtgctgcccacaaaatgaggaatc

SEQ ID NO: 2515626 - DNA, 25 bp, Homo sapien
tgaggaatcaacaacatgctcggat

SEQ ID NO: 2515627 - DNA, 25 bp, Homo sapien
cacaaccgtgttctctagacaagag

SEQ ID NO: 2515628 - DNA, 25 bp, Homo sapien
cagttggcaatcagagtggacttcc

SEQ ID NO: 2515629 - DNA, 25 bp, Homo sapien
ctggaatctgctgccacattgttaa

SEQ ID NO: 2515630 - DNA, 25 bp, Homo sapien
tgatagaaacgttcaaaactgtgct

SEQ ID NO: 2515631 - DNA, 25 bp, Homo sapien
gggacagaatctaaactggaatctg

SEQ ID NO: 2515632 - DNA, 25 bp, Homo sapien
tgcacttctcagtaaactcttcgtg

SEQ ID NO: 2515633 - DNA, 25 bp, Homo sapien
agtttcacattttcgattctacatg

SEQ ID NO: 2515634 - DNA, 25 bp, Homo sapien
tttgtacatagaatcctacttacga

SEQ ID NO: 2515635 - DNA, 25 bp, Homo sapien
tattccagatttcacagcccattca

SEQ ID NO: 2515636 - DNA, 25 bp, Homo sapien
tacgattccaagttatttcatgacc

SEQ ID NO: 2515637 - DNA, 25 bp, Homo sapien
tatgagattttggagctacctaggt

SEQ ID NO: 2515638 - DNA, 25 bp, Homo sapien
gacagaatctggatgacctcacagt

SEQ ID NO: 2515639 - DNA, 25 bp, Homo sapien
taaggcttccgtctaaagcaaggaa

SEQ ID NO: 2515640 - DNA, 25 bp, Homo sapien
ccaatagtctcagggatcttcaagg

SEQ ID NO: 2515641 - DNA, 25 bp, Homo sapien
gctgaggctgccaatccatgaatca

SEQ ID NO: 2515642 - DNA, 25 bp, Homo sapien
gctctagactcacttaacggccaga

SEQ ID NO: 2515643 - DNA, 25 bp, Homo sapien
tgaaggagcaaaatcggccctggtt

SEQ ID NO: 2515644 - DNA, 25 bp, Homo sapien
tcagttgacctggaatggagctcaa

SEQ ID NO: 2515645 - DNA, 25 bp, Homo sapien
ttaaagtggctggatgaagtttttc

SEQ ID NO: 2515646 - DNA, 25 bp, Homo sapien
cattaaagtggctggatgaagtttt

SEQ ID NO: 2515647 - DNA, 25 bp, Homo sapien
attaaagtggctggatgaagttttt

SEQ ID NO: 2515648 - DNA, 25 bp, Homo sapien
tcactataaaatctcacagggagcc

SEQ ID NO: 2515649 - DNA, 25 bp, Homo sapien
caatgtttcctcttcgttggttgaa

SEQ ID NO: 2515650 - DNA, 25 bp, Homo sapien
gccttaagctttccaatcctcaatg

SEQ ID NO: 2515651 - DNA, 25 bp, Homo sapien
actataaaatctcacagggagccct

SEQ ID NO: 2515652 - DNA, 25 bp, Homo sapien
gattatctcaaactccgtcagactg

SEQ ID NO: 2515653 - DNA, 25 bp, Homo sapien
tctcaaactccgtcagactgcagct

SEQ ID NO: 2515654 - DNA, 25 bp, Homo sapien
attatctcaaactccgtcagactgc

SEQ ID NO: 2515655 - DNA, 25 bp, Homo sapien
ttatctcaaactccgtcagactgca

SEQ ID NO: 2515656 - DNA, 25 bp, Homo sapien
ccaaggataaccgtttttggcagca

SEQ ID NO: 2515657 - DNA, 25 bp, Homo sapien
tactttggataagcttgacaagcga

SEQ ID NO: 2515658 - DNA, 25 bp, Homo sapien
tggataagcttgacaagcgagtcac

SEQ ID NO: 2515659 - DNA, 25 bp, Homo sapien
ttctactttggataagcttgacaag

SEQ ID NO: 2515660 - DNA, 25 bp, Homo sapien
tttggataagcttgacaagcgagtc

SEQ ID NO: 2515661 - DNA, 25 bp, Homo sapien
tttggaggtcatgaaatgtgagtag

SEQ ID NO: 2515662 - DNA, 25 bp, Homo sapien
tcatgaaatgtgagtagtcagggag

SEQ ID NO: 2515663 - DNA, 25 bp, Homo sapien
gtcatgaaatgtgagtagtcaggga

SEQ ID NO: 2515664 - DNA, 25 bp, Homo sapien
gaggtcatgaaatgtgagtagtcag

SEQ ID NO: 2515665 - DNA, 25 bp, Homo sapien
ggatttcggggcctttaatgctgac

SEQ ID NO: 2515666 - DNA, 25 bp, Homo sapien
gttcacatagtcaaggcagagcttc

SEQ ID NO: 2515667 - DNA, 25 bp, Homo sapien
cgttgggagcgaagacaagaatact

SEQ ID NO: 2515668 - DNA, 25 bp, Homo sapien
cagagcttcagacgttgggagcgaa

SEQ ID NO: 2515669 - DNA, 25 bp, Homo sapien
gagggaagatgttgtttgccaaaaa

SEQ ID NO: 2515670 - DNA, 25 bp, Homo sapien
cacggctttgaaatatgtgccccag

SEQ ID NO: 2515671 - DNA, 25 bp, Homo sapien
tgccccaggaattgcagagttcatt

SEQ ID NO: 2515672 - DNA, 25 bp, Homo sapien
cagagtcgagcagatgtaaggctga

SEQ ID NO: 2515673 - DNA, 25 bp, Homo sapien
aggaattgggtatacctttctacat

SEQ ID NO: 2515674 - DNA, 25 bp, Homo sapien
tgaaggaattgggtatacctttcta

SEQ ID NO: 2515675 - DNA, 25 bp, Homo sapien
gcttctaatcttcctcccaattatg

SEQ ID NO: 2515676 - DNA, 25 bp, Homo sapien
gcttggggacaacactatgcataaa

SEQ ID NO: 2515677 - DNA, 25 bp, Homo sapien
attttcatcctagcacagccaccga

SEQ ID NO: 2515678 - DNA, 25 bp, Homo sapien
cccaattatgtttgctatgaacagg

SEQ ID NO: 2515679 - DNA, 25 bp, Homo sapien
gagtcatgtaaaccttgccgcaggg

SEQ ID NO: 2515680 - DNA, 25 bp, Homo sapien
cagtggcacctcctactttgttggg

SEQ ID NO: 2515681 - DNA, 25 bp, Homo sapien
gctgtaaatccggaatactgacctt

SEQ ID NO: 2515682 - DNA, 25 bp, Homo sapien
cagcaactggcatcacagtggcacc

SEQ ID NO: 2515683 - DNA, 25 bp, Homo sapien
cagcttgccttgcaactaaggtata

SEQ ID NO: 2515684 - DNA, 25 bp, Homo sapien
gcccgactggttgcactgatctgtt

SEQ ID NO: 2515685 - DNA, 25 bp, Homo sapien
gtataataagtagcctccaaacagg

SEQ ID NO: 2515686 - DNA, 25 bp, Homo sapien
catcattctttttcacttcgcagca

SEQ ID NO: 2515687 - DNA, 25 bp, Homo sapien
gtgagcacacttaagcagccctatg

SEQ ID NO: 2515688 - DNA, 25 bp, Homo sapien
tgctgtgagcacacttaagcagccc

SEQ ID NO: 2515689 - DNA, 25 bp, Homo sapien
ctgccatgctgtgagcacacttaag

SEQ ID NO: 2515690 - DNA, 25 bp, Homo sapien
catgctgtgagcacacttaagcagc

SEQ ID NO: 2515691 - DNA, 25 bp, Homo sapien
ctacccagttaggtgcttctggatt

SEQ ID NO: 2515692 - DNA, 25 bp, Homo sapien
ggcccgccatcttatgccagcctac

SEQ ID NO: 2515693 - DNA, 25 bp, Homo sapien
caagggacagagttgatcagacaac

SEQ ID NO: 2515694 - DNA, 25 bp, Homo sapien
aatcttcaagggacagagttgatca

SEQ ID NO: 2515695 - DNA, 25 bp, Homo sapien
agttgatcagacaacggcccgccat

SEQ ID NO: 2515696 - DNA, 25 bp, Homo sapien
catttgcagtttcagaactggttgc

SEQ ID NO: 2515697 - DNA, 25 bp, Homo sapien
gaaacgtctacccacaagcagtggc

SEQ ID NO: 2515698 - DNA, 25 bp, Homo sapien
gaactggttgcttacttattcagaa

SEQ ID NO: 2515699 - DNA, 25 bp, Homo sapien
tcttgtgctctgtctgcctcatgaa

SEQ ID NO: 2515700 - DNA, 25 bp, Homo sapien
aaagcacagaagcatacataaagca

SEQ ID NO: 2515701 - DNA, 25 bp, Homo sapien
ataaggcaccaccacaacacgtgag

SEQ ID NO: 2515702 - DNA, 25 bp, Homo sapien
tgtaattcacactctagtatgctct

SEQ ID NO: 2515703 - DNA, 25 bp, Homo sapien
attgggcagatgtaaataaggcacc

SEQ ID NO: 2515704 - DNA, 25 bp, Homo sapien
gctgctcgcgatttccctaaggtgg

SEQ ID NO: 2515705 - DNA, 25 bp, Homo sapien
tgtaacatctaagacgcagggcagg

SEQ ID NO: 2515706 - DNA, 25 bp, Homo sapien
cacagaaagggttctacgaccgtca

SEQ ID NO: 2515707 - DNA, 25 bp, Homo sapien
cacttgtaggcggattcggaaactc

SEQ ID NO: 2515708 - DNA, 25 bp, Homo sapien
tctgaaagggttctaggggatttgc

SEQ ID NO: 2515709 - DNA, 25 bp, Homo sapien
ctgaaagggttctaggggatttgca

SEQ ID NO: 2515710 - DNA, 25 bp, Homo sapien
tgaaagggttctaggggatttgcaa

SEQ ID NO: 2515711 - DNA, 25 bp, Homo sapien
atctgaaagggttctaggggatttg

SEQ ID NO: 2515712 - DNA, 25 bp, Homo sapien
tgtttcttctttccgagaagcgccg

SEQ ID NO: 2515713 - DNA, 25 bp, Homo sapien
tttcttctttccgagaagcgccgcc

SEQ ID NO: 2515714 - DNA, 25 bp, Homo sapien
ttcttctttccgagaagcgccgcca

SEQ ID NO: 2515715 - DNA, 25 bp, Homo sapien
tgtgtttcttctttccgagaagcgc

SEQ ID NO: 2515716 - DNA, 25 bp, Homo sapien
aaagctggccgcgaaagtcgtgctg

SEQ ID NO: 2515717 - DNA, 25 bp, Homo sapien
gcatagatgggaaagggtgaagaac

SEQ ID NO: 2515718 - DNA, 25 bp, Homo sapien
gaaagtcgtgctggaatcacttcca

SEQ ID NO: 2515719 - DNA, 25 bp, Homo sapien
aacgaaaccccaggcatagatggga

SEQ ID NO: 2515720 - DNA, 25 bp, Homo sapien
tctctaaaaggatggatgtgttctc

SEQ ID NO: 2515721 - DNA, 25 bp, Homo sapien
taggatccggaagtagttccgccgc

SEQ ID NO: 2515722 - DNA, 25 bp, Homo sapien
cccggtcacggaataaacgctctct

SEQ ID NO: 2515723 - DNA, 25 bp, Homo sapien
ttccgccgcgacctctctaaaagga

SEQ ID NO: 2515724 - DNA, 25 bp, Homo sapien
tcattggacgttttcccttagaggc

SEQ ID NO: 2515725 - DNA, 25 bp, Homo sapien
attcattggacgttttcccttagag

SEQ ID NO: 2515726 - DNA, 25 bp, Homo sapien
cttagaggccaaggccgcccaggca

SEQ ID NO: 2515727 - DNA, 25 bp, Homo sapien
tcccttagaggccaaggccgcccag

SEQ ID NO: 2515728 - DNA, 25 bp, Homo sapien
gcccgcggagccatttgattggaga

SEQ ID NO: 2515729 - DNA, 25 bp, Homo sapien
ctgaccaatcggaaggagccacgct

SEQ ID NO: 2515730 - DNA, 25 bp, Homo sapien
cggagccatttgattggagaaaagc

SEQ ID NO: 2515731 - DNA, 25 bp, Homo sapien
accctgaccaatcggaaggagccac

SEQ ID NO: 2515732 - DNA, 25 bp, Homo sapien
gacagctccgattggtggacttccg

SEQ ID NO: 2515733 - DNA, 25 bp, Homo sapien
acagctccgattggtggacttccgc

SEQ ID NO: 2515734 - DNA, 25 bp, Homo sapien
ctggacagctccgattggtggactt

SEQ ID NO: 2515735 - DNA, 25 bp, Homo sapien
agctccgattggtggacttccgccc

SEQ ID NO: 2515736 - DNA, 25 bp, Homo sapien
gctgcgtcctgctgaccttcggtga

SEQ ID NO: 2515737 - DNA, 25 bp, Homo sapien
ggtgggccaagggacgtcaccattc

SEQ ID NO: 2515738 - DNA, 25 bp, Homo sapien
cattcctcgaaagagggcaagggaa

SEQ ID NO: 2515739 - DNA, 25 bp, Homo sapien
cgcacgccatgagggccctgtgggt

SEQ ID NO: 2515740 - DNA, 25 bp, Homo sapien
agcggaatggcagtgtcagcgtgtt

SEQ ID NO: 2515741 - DNA, 25 bp, Homo sapien
gggccagcggaatggcagtgtcagc

SEQ ID NO: 2515742 - DNA, 25 bp, Homo sapien
ctggggccagcggaatggcagtgtc

SEQ ID NO: 2515743 - DNA, 25 bp, Homo sapien
ccagcggaatggcagtgtcagcgtg

SEQ ID NO: 2515744 - DNA, 25 bp, Homo sapien
gaaggatagggcaatcattcccaag

SEQ ID NO: 2515745 - DNA, 25 bp, Homo sapien
ttccatgcagggaacgatggctgct

SEQ ID NO: 2515746 - DNA, 25 bp, Homo sapien
tggctgctaacacctatccaggacc

SEQ ID NO: 2515747 - DNA, 25 bp, Homo sapien
tatgtagtcttatccactgccacgg

SEQ ID NO: 2515748 - DNA, 25 bp, Homo sapien
gcactgcccggtagaattttatata

SEQ ID NO: 2515749 - DNA, 25 bp, Homo sapien
tcaagatatggactacctactgtgc

SEQ ID NO: 2515750 - DNA, 25 bp, Homo sapien
tacttggaatgtggcagcataactg

SEQ ID NO: 2515751 - DNA, 25 bp, Homo sapien
tccattttggcgatcaccagccaca

SEQ ID NO: 2515752 - DNA, 25 bp, Homo sapien
tagagctaagttccatggaagaaac

SEQ ID NO: 2515753 - DNA, 25 bp, Homo sapien
tacttactgtagttcaagggcacac

SEQ ID NO: 2515754 - DNA, 25 bp, Homo sapien
gcacatctgaatttgaactagctac

SEQ ID NO: 2515755 - DNA, 25 bp, Homo sapien
taattttgtcatttaggcagggtgg

SEQ ID NO: 2515756 - DNA, 25 bp, Homo sapien
cagaatctccgtgtgctttggtggc

SEQ ID NO: 2515757 - DNA, 25 bp, Homo sapien
tgtggtgtctcagcgcctgacagaa

SEQ ID NO: 2515758 - DNA, 25 bp, Homo sapien
gattatcaagtaagtgcccctacaa

SEQ ID NO: 2515759 - DNA, 25 bp, Homo sapien
cagtacggatggtctggcaacatgg

SEQ ID NO: 2515760 - DNA, 25 bp, Homo sapien
gaaacagcaacgcttcggtcagggt

SEQ ID NO: 2515761 - DNA, 25 bp, Homo sapien
ttgtgtttaggtggaagaagagccc

SEQ ID NO: 2515762 - DNA, 25 bp, Homo sapien
gaagagcccgaagaagaacctgaag

SEQ ID NO: 2515763 - DNA, 25 bp, Homo sapien
gaaagaatgcttcgcctcagtttga

SEQ ID NO: 2515764 - DNA, 25 bp, Homo sapien
aatgtgggattatgggtcacaggaa

SEQ ID NO: 2515765 - DNA, 25 bp, Homo sapien
tatttaactgactattcttgatgta

SEQ ID NO: 2515766 - DNA, 25 bp, Homo sapien
tcaccatttggatcctgtgtggaga

SEQ ID NO: 2515767 - DNA, 25 bp, Homo sapien
tgtggagagggaatgtgaaatttac

SEQ ID NO: 2515768 - DNA, 25 bp, Homo sapien
cccaatactggtttcttaactgacg

SEQ ID NO: 2515769 - DNA, 25 bp, Homo sapien
taccatggtagcttaagatgacaac

SEQ ID NO: 2515770 - DNA, 25 bp, Homo sapien
gatgacaacattcatagaaacagcg

SEQ ID NO: 2515771 - DNA, 25 bp, Homo sapien
aaacagcgtggcgtatatgggaact

SEQ ID NO: 2515772 - DNA, 25 bp, Homo sapien
gaagctgaccattgaaagctgctgg

SEQ ID NO: 2515773 - DNA, 25 bp, Homo sapien
tttgggccccttcaggaggcatggc

SEQ ID NO: 2515774 - DNA, 25 bp, Homo sapien
tttgagcaaggccaccatagccgag

SEQ ID NO: 2515775 - DNA, 25 bp, Homo sapien
tcacgtgctgaagtggccaggcctt

SEQ ID NO: 2515776 - DNA, 25 bp, Homo sapien
acgtatcggctaaacatccactgag

SEQ ID NO: 2515777 - DNA, 25 bp, Homo sapien
tcacgcaaaaggtgagcaatgcccc

SEQ ID NO: 2515778 - DNA, 25 bp, Homo sapien
ggaggtatgcggtgcttctaaagca

SEQ ID NO: 2515779 - DNA, 25 bp, Homo sapien
tcacgtggtccactgggtgacgacg

SEQ ID NO: 2515780 - DNA, 25 bp, Homo sapien
ccgttttgagttctccacgctttgg

SEQ ID NO: 2515781 - DNA, 25 bp, Homo sapien
taagttcctcctgttgagaaacttg

SEQ ID NO: 2515782 - DNA, 25 bp, Homo sapien
gttctccacgctttggtggaatttc

SEQ ID NO: 2515783 - DNA, 25 bp, Homo sapien
caaaagctccgttttgagttctcca

SEQ ID NO: 2515784 - DNA, 25 bp, Homo sapien
tgtagcagttctccccaacacagca

SEQ ID NO: 2515785 - DNA, 25 bp, Homo sapien
gttctccccaacacagcactgagca

SEQ ID NO: 2515786 - DNA, 25 bp, Homo sapien
agcagttctccccaacacagcactg

SEQ ID NO: 2515787 - DNA, 25 bp, Homo sapien
ctgtagcagttctccccaacacagc

SEQ ID NO: 2515788 - DNA, 25 bp, Homo sapien
cagaccttccagttctccgaccgaa

SEQ ID NO: 2515789 - DNA, 25 bp, Homo sapien
tccagttctccgaccgaaagacttg

SEQ ID NO: 2515790 - DNA, 25 bp, Homo sapien
cgaccgaaagacttgtgatccagtt

SEQ ID NO: 2515791 - DNA, 25 bp, Homo sapien
agtcatcatggtctcctctgctcga

SEQ ID NO: 2515792 - DNA, 25 bp, Homo sapien
acaaagtggttgacaacagtgacag

SEQ ID NO: 2515793 - DNA, 25 bp, Homo sapien
aacaaagtggttgacaacagtgaca

SEQ ID NO: 2515794 - DNA, 25 bp, Homo sapien
gaacaaagtggttgacaacagtgac

SEQ ID NO: 2515795 - DNA, 25 bp, Homo sapien
aaatcgtctcactaagctatgtgac

SEQ ID NO: 2515796 - DNA, 25 bp, Homo sapien
gctatgtgactttgagaaatcaact

SEQ ID NO: 2515797 - DNA, 25 bp, Homo sapien
cttcagatcctcaaatcgtctcact

SEQ ID NO: 2515798 - DNA, 25 bp, Homo sapien
gatcctcaaatcgtctcactaagct

SEQ ID NO: 2515799 - DNA, 25 bp, Homo sapien
acataagtgcaaatacaaatggagc

SEQ ID NO: 2515800 - DNA, 25 bp, Homo sapien
taagtgcaaatacaaatggagccag

SEQ ID NO: 2515801 - DNA, 25 bp, Homo sapien
aataaaacataagtgcaaatacaaa

SEQ ID NO: 2515802 - DNA, 25 bp, Homo sapien
tgcaaatacaaatggagccaggcac

SEQ ID NO: 2515803 - DNA, 25 bp, Homo sapien
aaacagaaatgactgctcccaacat

SEQ ID NO: 2515804 - DNA, 25 bp, Homo sapien
aacagaaatgactgctcccaacatt

SEQ ID NO: 2515805 - DNA, 25 bp, Homo sapien
tccggtcggtagtacctgtgcacca

SEQ ID NO: 2515806 - DNA, 25 bp, Homo sapien
cacttctgcccctgcgcacatggcc

SEQ ID NO: 2515807 - DNA, 25 bp, Homo sapien
caggtccggtcggtagtacctgtgc

SEQ ID NO: 2515808 - DNA, 25 bp, Homo sapien
tcggtagtacctgtgcaccacttct

SEQ ID NO: 2515809 - DNA, 25 bp, Homo sapien
ggcccagccccaatcgtttatcagt

SEQ ID NO: 2515810 - DNA, 25 bp, Homo sapien
gcgccggcctgcgtgcggcattaaa

SEQ ID NO: 2515811 - DNA, 25 bp, Homo sapien
gagctcttgatcagcaagcggaaaa

SEQ ID NO: 2515812 - DNA, 25 bp, Homo sapien
ctcctttacgagctgagggcactga

SEQ ID NO: 2515813 - DNA, 25 bp, Homo sapien
tctctgcctctatacacgcgctcta

SEQ ID NO: 2515814 - DNA, 25 bp, Homo sapien
gaggaactgtggacttcactcctct

SEQ ID NO: 2515815 - DNA, 25 bp, Homo sapien
tacacgcgctctactagagactgta

SEQ ID NO: 2515816 - DNA, 25 bp, Homo sapien
tctatacacgcgctctactagagac

SEQ ID NO: 2515817 - DNA, 25 bp, Homo sapien
ggagcggacggcgagcaggccggac

SEQ ID NO: 2515818 - DNA, 25 bp, Homo sapien
tgggcaacaggtctaagggcggacg

SEQ ID NO: 2515819 - DNA, 25 bp, Homo sapien
gcaggccggacccaaaatacaggga

SEQ ID NO: 2515820 - DNA, 25 bp, Homo sapien
ccgcaccggacaggaaagtgggagc

SEQ ID NO: 2515821 - DNA, 25 bp, Homo sapien
agattgctaaaagctctggtgggcc

SEQ ID NO: 2515822 - DNA, 25 bp, Homo sapien
ccagactcagatgcaggatgttgag

SEQ ID NO: 2515823 - DNA, 25 bp, Homo sapien
gtttgctgcaactgcttcaccattt

SEQ ID NO: 2515824 - DNA, 25 bp, Homo sapien
gacactgatgggataaaagccagtt

SEQ ID NO: 2515825 - DNA, 25 bp, Homo sapien
tctgtatttactcacgaaagcctgg

SEQ ID NO: 2515826 - DNA, 25 bp, Homo sapien
gaaagcctggatcctagaatgaaga

SEQ ID NO: 2515827 - DNA, 25 bp, Homo sapien
gggtaattccccgagtgcagacatc

SEQ ID NO: 2515828 - DNA, 25 bp, Homo sapien
acagtgagagaagcccttgctgcca

SEQ ID NO: 2515829 - DNA, 25 bp, Homo sapien
ggtggaaaggactagataatgctga

SEQ ID NO: 2515830 - DNA, 25 bp, Homo sapien
aggactagataatgctgataagcgt

SEQ ID NO: 2515831 - DNA, 25 bp, Homo sapien
aacacagtctttaatcggggcgaat

SEQ ID NO: 2515832 - DNA, 25 bp, Homo sapien
gaaaggactagataatgctgataag

SEQ ID NO: 2515833 - DNA, 25 bp, Homo sapien
ttgtcttaccgcagtgagtaccacg

SEQ ID NO: 2515834 - DNA, 25 bp, Homo sapien
ctggagacaaaagctgacgtcggca

SEQ ID NO: 2515835 - DNA, 25 bp, Homo sapien
gattgggctgtcctacatcacgtga

SEQ ID NO: 2515836 - DNA, 25 bp, Homo sapien
taccacgcggtactacagagaccgg

SEQ ID NO: 2515837 - DNA, 25 bp, Homo sapien
gttccccgcgataaccagttgacta

SEQ ID NO: 2515838 - DNA, 25 bp, Homo sapien
ttggttccccgcgataaccagttga

SEQ ID NO: 2515839 - DNA, 25 bp, Homo sapien
tggttccccgcgataaccagttgac

SEQ ID NO: 2515840 - DNA, 25 bp, Homo sapien
ttagccctcgtactgttgtgaaaca

SEQ ID NO: 2515841 - DNA, 25 bp, Homo sapien
tcctgattaggaaaaccagttgccc

SEQ ID NO: 2515842 - DNA, 25 bp, Homo sapien
tcaaattcaaatggtttagccctcg

SEQ ID NO: 2515843 - DNA, 25 bp, Homo sapien
taaataatacaacccagacaagcct

SEQ ID NO: 2515844 - DNA, 25 bp, Homo sapien
gctaagtatggttccctccacatgt

SEQ ID NO: 2515845 - DNA, 25 bp, Homo sapien
cacatgtgtattcctttcaaagacg

SEQ ID NO: 2515846 - DNA, 25 bp, Homo sapien
tcaaagacggtttggtcaggattgg

SEQ ID NO: 2515847 - DNA, 25 bp, Homo sapien
ttctcttcaaatgggctaagtatgg

SEQ ID NO: 2515848 - DNA, 25 bp, Homo sapien
tctggtagatattaaagctgggtac

SEQ ID NO: 2515849 - DNA, 25 bp, Homo sapien
tgatttcatacgtacccagggagca

SEQ ID NO: 2515850 - DNA, 25 bp, Homo sapien
gctacaaataatccagactaccagg

SEQ ID NO: 2515851 - DNA, 25 bp, Homo sapien
ccccaggaggttatatgattgctct

SEQ ID NO: 2515852 - DNA, 25 bp, Homo sapien
gatatatcctatacatgacagtgtg

SEQ ID NO: 2515853 - DNA, 25 bp, Homo sapien
tgttgatatatcctatacatgacag

SEQ ID NO: 2515854 - DNA, 25 bp, Homo sapien
cagatgagtagtaaatgttgatata

SEQ ID NO: 2515855 - DNA, 25 bp, Homo sapien
gacagtgtgagactttttcattaaa

SEQ ID NO: 2515856 - DNA, 25 bp, Homo sapien
tgctgttatctagatgggtctcttc

SEQ ID NO: 2515857 - DNA, 25 bp, Homo sapien
taatcaatgcctatatggtccaagg

SEQ ID NO: 2515858 - DNA, 25 bp, Homo sapien
ggttggcaacctgttaaggagatct

SEQ ID NO: 2515859 - DNA, 25 bp, Homo sapien
caatgttatagttggctacaaaggg

SEQ ID NO: 2515860 - DNA, 25 bp, Homo sapien
cataagtcgttgtgaacactaggga

SEQ ID NO: 2515861 - DNA, 25 bp, Homo sapien
tgctccgaatatctggcatctggat

SEQ ID NO: 2515862 - DNA, 25 bp, Homo sapien
cagggtcaggaacaaaccagctttc

SEQ ID NO: 2515863 - DNA, 25 bp, Homo sapien
tgagtttaaatatccctgcagggtc

SEQ ID NO: 2515864 - DNA, 25 bp, Homo sapien
ttgtgtatagagaaaaaataatagg

SEQ ID NO: 2515865 - DNA, 25 bp, Homo sapien
cttcattgtgtatagagaaaaaata

SEQ ID NO: 2515866 - DNA, 25 bp, Homo sapien
cattgtgtatagagaaaaaataata

SEQ ID NO: 2515867 - DNA, 25 bp, Homo sapien
tcattgtgtatagagaaaaaataat

SEQ ID NO: 2515868 - DNA, 25 bp, Homo sapien
ccagggagctgctatagaggttttc

SEQ ID NO: 2515869 - DNA, 25 bp, Homo sapien
aacacaatcagcattggggaggtgg

SEQ ID NO: 2515870 - DNA, 25 bp, Homo sapien
ccacagggggttaattgtggaatat

SEQ ID NO: 2515871 - DNA, 25 bp, Homo sapien
ccaggtgccttatgtgccacagggg

SEQ ID NO: 2515872 - DNA, 25 bp, Homo sapien
tatccagatacacaagactgctagg

SEQ ID NO: 2515873 - DNA, 25 bp, Homo sapien
tctaacccttgaactatgtgtggaa

SEQ ID NO: 2515874 - DNA, 25 bp, Homo sapien
aaaaaatggtagagaagccttcacg

SEQ ID NO: 2515875 - DNA, 25 bp, Homo sapien
gactgctaggcaatacaatgatggg

SEQ ID NO: 2515876 - DNA, 25 bp, Homo sapien
gatggccttcttccggtagtccaga

SEQ ID NO: 2515877 - DNA, 25 bp, Homo sapien
tctccaattgcttggtgatgcgctg

SEQ ID NO: 2515878 - DNA, 25 bp, Homo sapien
tccattctgtcatgttggcaacaat

SEQ ID NO: 2515879 - DNA, 25 bp, Homo sapien
tcacaccaggattgaaagagcaggt

SEQ ID NO: 2515880 - DNA, 25 bp, Homo sapien
tcatctgagaaagccgccgcgtggc

SEQ ID NO: 2515881 - DNA, 25 bp, Homo sapien
cccagggccaaggtggtgtcataca

SEQ ID NO: 2515882 - DNA, 25 bp, Homo sapien
gcagagggcaaatcgcagtcatctg

SEQ ID NO: 2515883 - DNA, 25 bp, Homo sapien
aagtcccacgagtctgtttatgtcc

SEQ ID NO: 2515884 - DNA, 25 bp, Homo sapien
agatagagccttagagcttaaacag

SEQ ID NO: 2515885 - DNA, 25 bp, Homo sapien
gagccttagagcttaaacagctctt

SEQ ID NO: 2515886 - DNA, 25 bp, Homo sapien
aacaccaccaagtaaaacattatag

SEQ ID NO: 2515887 - DNA, 25 bp, Homo sapien
atttgtttttgggctagatagagcc

SEQ ID NO: 2515888 - DNA, 25 bp, Homo sapien
cagtcaaaacttgctgcacaattag

SEQ ID NO: 2515889 - DNA, 25 bp, Homo sapien
acttgctgcacaattagttatttga

SEQ ID NO: 2515890 - DNA, 25 bp, Homo sapien
tcacaacttaaataagcagtcaaaa

SEQ ID NO: 2515891 - DNA, 25 bp, Homo sapien
cttaaataagcagtcaaaacttgct

SEQ ID NO: 2515892 - DNA, 25 bp, Homo sapien
tgttcttggcagttagcgagagtac

SEQ ID NO: 2515893 - DNA, 25 bp, Homo sapien
tttccaagtgttcttggcagttagc

SEQ ID NO: 2515894 - DNA, 25 bp, Homo sapien
aagtgttcttggcagttagcgagag

SEQ ID NO: 2515895 - DNA, 25 bp, Homo sapien
caagtgttcttggcagttagcgaga

SEQ ID NO: 2515896 - DNA, 25 bp, Homo sapien
ttctcgtgttggtggataagtagag

SEQ ID NO: 2515897 - DNA, 25 bp, Homo sapien
tacaattacatcatcgtccaaatag

SEQ ID NO: 2515898 - DNA, 25 bp, Homo sapien
aatagatgactttctcgtgttggtg

SEQ ID NO: 2515899 - DNA, 25 bp, Homo sapien
ggagataaaatcgaacaaagttcag

SEQ ID NO: 2515900 - DNA, 25 bp, Homo sapien
gatcggccgttctcctagatacaaa

SEQ ID NO: 2515901 - DNA, 25 bp, Homo sapien
tttggagcggaataaaacaggagct

SEQ ID NO: 2515902 - DNA, 25 bp, Homo sapien
aagatgtctcatctgagcttcccag

SEQ ID NO: 2515903 - DNA, 25 bp, Homo sapien
gagtcggctttgaccatggcctcag

SEQ ID NO: 2515904 - DNA, 25 bp, Homo sapien
aagtcatggcttgtactctgacaac

SEQ ID NO: 2515905 - DNA, 25 bp, Homo sapien
taggaacttcgaagtttcattactg

SEQ ID NO: 2515906 - DNA, 25 bp, Homo sapien
aacattgcttcctccgaagtcatgg

SEQ ID NO: 2515907 - DNA, 25 bp, Homo sapien
tgtgggtaggaacttcgaagtttca

SEQ ID NO: 2515908 - DNA, 25 bp, Homo sapien
ggcagctttaacgtacaatcacagt

SEQ ID NO: 2515909 - DNA, 25 bp, Homo sapien
tccaatgctaggaaaagagatggtg

SEQ ID NO: 2515910 - DNA, 25 bp, Homo sapien
gttttttcttagctgtcggacactc

SEQ ID NO: 2515911 - DNA, 25 bp, Homo sapien
cactttttatgcaggagagggtccc

SEQ ID NO: 2515912 - DNA, 25 bp, Homo sapien
gctggagcaattcaggcctcgatga

SEQ ID NO: 2515913 - DNA, 25 bp, Homo sapien
tatttctctcagtttggaatgttca

SEQ ID NO: 2515914 - DNA, 25 bp, Homo sapien
tctggtctgatcttccctttgagga

SEQ ID NO: 2515915 - DNA, 25 bp, Homo sapien
gaggaccatcgggttgaattccacg

SEQ ID NO: 2515916 - DNA, 25 bp, Homo sapien
ccatctggtctgactttaaatcttt

SEQ ID NO: 2515917 - DNA, 25 bp, Homo sapien
tcaatctgttgcctccctagaaagt

SEQ ID NO: 2515918 - DNA, 25 bp, Homo sapien
ccatttgcctattgccccaaggtca

SEQ ID NO: 2515919 - DNA, 25 bp, Homo sapien
gagtttagtccaataaatccctctg

SEQ ID NO: 2515920 - DNA, 25 bp, Homo sapien
cctgcactgggtaatgttgttctgt

SEQ ID NO: 2515921 - DNA, 25 bp, Homo sapien
cttagaaaatgcacattgtataaat

SEQ ID NO: 2515922 - DNA, 25 bp, Homo sapien
cacattgtataaataaggaataagc

SEQ ID NO: 2515923 - DNA, 25 bp, Homo sapien
tgccaacctgatgagtgaagattgt

SEQ ID NO: 2515924 - DNA, 25 bp, Homo sapien
caagatgttggcgtcagtgttgctg

SEQ ID NO: 2515925 - DNA, 25 bp, Homo sapien
gagtcagagtattccggagtcccac

SEQ ID NO: 2515926 - DNA, 25 bp, Homo sapien
gagtcccactacatagaacaagatg

SEQ ID NO: 2515927 - DNA, 25 bp, Homo sapien
tagatgctattgatggcagccatag

SEQ ID NO: 2515928 - DNA, 25 bp, Homo sapien
aaaactggtgtcttggaacatgaaa

SEQ ID NO: 2515929 - DNA, 25 bp, Homo sapien
ggtgtcttggaacatgaaagaattt

SEQ ID NO: 2515930 - DNA, 25 bp, Homo sapien
gagccagtttaatgcatcttccata

SEQ ID NO: 2515931 - DNA, 25 bp, Homo sapien
tcacagtagagccagtttaatgcat

SEQ ID NO: 2515932 - DNA, 25 bp, Homo sapien
gtgggacagctgcgagtgaccagca

SEQ ID NO: 2515933 - DNA, 25 bp, Homo sapien
gggacagctgcgagtgaccagcaca

SEQ ID NO: 2515934 - DNA, 25 bp, Homo sapien
agtgggacagctgcgagtgaccagc

SEQ ID NO: 2515935 - DNA, 25 bp, Homo sapien
tgggacagctgcgagtgaccagcac

SEQ ID NO: 2515936 - DNA, 25 bp, Homo sapien
gtccatgcacttaattgcctttaaa

SEQ ID NO: 2515937 - DNA, 25 bp, Homo sapien
ggtaggccttatcccagtaagactg

SEQ ID NO: 2515938 - DNA, 25 bp, Homo sapien
gaacagtttattgaggtgtagatac

SEQ ID NO: 2515939 - DNA, 25 bp, Homo sapien
tgttaacgtcttagcttccagcatc

SEQ ID NO: 2515940 - DNA, 25 bp, Homo sapien
ccactgtatttgagctggggcaaca

SEQ ID NO: 2515941 - DNA, 25 bp, Homo sapien
tgtagttccaacttcctggggtgct

SEQ ID NO: 2515942 - DNA, 25 bp, Homo sapien
tagttccaacttcctggggtgctga

SEQ ID NO: 2515943 - DNA, 25 bp, Homo sapien
gggagctgctattgtgccactgtat

SEQ ID NO: 2515944 - DNA, 25 bp, Homo sapien
gggcacagtccccttatgaactttc

SEQ ID NO: 2515945 - DNA, 25 bp, Homo sapien
ttgggcacagtccccttatgaactt

SEQ ID NO: 2515946 - DNA, 25 bp, Homo sapien
aatcacacagagggtcacgatcaga

SEQ ID NO: 2515947 - DNA, 25 bp, Homo sapien
gaatcacacagagggtcacgatcag

SEQ ID NO: 2515948 - DNA, 25 bp, Homo sapien
gtgtattcacgcggataagaactgt

SEQ ID NO: 2515949 - DNA, 25 bp, Homo sapien
gtattcacgcggataagaactgtaa

SEQ ID NO: 2515950 - DNA, 25 bp, Homo sapien
tattcacgcggataagaactgtaac

SEQ ID NO: 2515951 - DNA, 25 bp, Homo sapien
tgtattcacgcggataagaactgta

SEQ ID NO: 2515952 - DNA, 25 bp, Homo sapien
tcttccacgctctgcaccttctaac

SEQ ID NO: 2515953 - DNA, 25 bp, Homo sapien
gaacttcctttcctatggcaggccc

SEQ ID NO: 2515954 - DNA, 25 bp, Homo sapien
gggactattcaagaacagatgtcca

SEQ ID NO: 2515955 - DNA, 25 bp, Homo sapien
gaacagatgtccaatactcagctca

SEQ ID NO: 2515956 - DNA, 25 bp, Homo sapien
gaaacgtgtactgattgcagcccat

SEQ ID NO: 2515957 - DNA, 25 bp, Homo sapien
cacagaagatcagctaccctcctgt

SEQ ID NO: 2515958 - DNA, 25 bp, Homo sapien
cagctaccctcctgtgagagtctga

SEQ ID NO: 2515959 - DNA, 25 bp, Homo sapien
gagagtctgaaggatactattgcca

SEQ ID NO: 2515960 - DNA, 25 bp, Homo sapien
ggtcctgtccaagtgtatctttcac

SEQ ID NO: 2515961 - DNA, 25 bp, Homo sapien
ttcctgccttgtttcatggcagtga

SEQ ID NO: 2515962 - DNA, 25 bp, Homo sapien
cctcataccaatataggatcagctc

SEQ ID NO: 2515963 - DNA, 25 bp, Homo sapien
catctgagcataactgtactaaatc

SEQ ID NO: 2515964 - DNA, 25 bp, Homo sapien
ggctgcttctaagatcccattggaa

SEQ ID NO: 2515965 - DNA, 25 bp, Homo sapien
tcctctggctaagtgcaaaacatgc

SEQ ID NO: 2515966 - DNA, 25 bp, Homo sapien
agagcgttcaaatcgtggctggccc

SEQ ID NO: 2515967 - DNA, 25 bp, Homo sapien
ccctttgcttgcgttgacttcggaa

SEQ ID NO: 2515968 - DNA, 25 bp, Homo sapien
actttacccaatatatacaagatgt

SEQ ID NO: 2515969 - DNA, 25 bp, Homo sapien
tttactttacccaatatatacaaga

SEQ ID NO: 2515970 - DNA, 25 bp, Homo sapien
ctttacccaatatatacaagatgtt

SEQ ID NO: 2515971 - DNA, 25 bp, Homo sapien
tactttacccaatatatacaagatg

SEQ ID NO: 2515972 - DNA, 25 bp, Homo sapien
tcatttaaggtaatggatatcccag

SEQ ID NO: 2515973 - DNA, 25 bp, Homo sapien
aagtaaattcacgagtccaggttgg

SEQ ID NO: 2515974 - DNA, 25 bp, Homo sapien
agtactcagtagtcaatgtggctag

SEQ ID NO: 2515975 - DNA, 25 bp, Homo sapien
tatggccatactacactagaaccta

SEQ ID NO: 2515976 - DNA, 25 bp, Homo sapien
cggtgttgacttgatatgcatgtac

SEQ ID NO: 2515977 - DNA, 25 bp, Homo sapien
cattttctacactagatccccagaa

SEQ ID NO: 2515978 - DNA, 25 bp, Homo sapien
tacattcaagatgtacggtgttgac

SEQ ID NO: 2515979 - DNA, 25 bp, Homo sapien
tttaactgagaaagactgaatacat

SEQ ID NO: 2515980 - DNA, 25 bp, Homo sapien
tgagtcctcaattgagattaaagac

SEQ ID NO: 2515981 - DNA, 25 bp, Homo sapien
tgcccaggatctctgctatcgagtt

SEQ ID NO: 2515982 - DNA, 25 bp, Homo sapien
gacctctggcaataagcctttggcc

SEQ ID NO: 2515983 - DNA, 25 bp, Homo sapien
gctatcgagttctgcccacttgcta

SEQ ID NO: 2515984 - DNA, 25 bp, Homo sapien
tcctggcatggctccgcacaaagct

SEQ ID NO: 2515985 - DNA, 25 bp, Homo sapien
cgcccggcaggctttgtagcgacct

SEQ ID NO: 2515986 - DNA, 25 bp, Homo sapien
gtggctcacggttcccaagcttcct

SEQ ID NO: 2515987 - DNA, 25 bp, Homo sapien
aagctgccttcggttcgcccggcag

SEQ ID NO: 2515988 - DNA, 25 bp, Homo sapien
gattgcatgtatgaaggactcctgc

SEQ ID NO: 2515989 - DNA, 25 bp, Homo sapien
tcttcccagtcaggtaagcagttca

SEQ ID NO: 2515990 - DNA, 25 bp, Homo sapien
taagagatcttagagctgtgtgctg

SEQ ID NO: 2515991 - DNA, 25 bp, Homo sapien
gcaactctggctctcataagtagta

SEQ ID NO: 2515992 - DNA, 25 bp, Homo sapien
gagtgcctagagatgtcagggtgtt

SEQ ID NO: 2515993 - DNA, 25 bp, Homo sapien
aagagtgcctagagatgtcagggtg

SEQ ID NO: 2515994 - DNA, 25 bp, Homo sapien
agagtgcctagagatgtcagggtgt

SEQ ID NO: 2515995 - DNA, 25 bp, Homo sapien
tgcatgacctggaaaagatgttccc

SEQ ID NO: 2515996 - DNA, 25 bp, Homo sapien
tgcaacatgggccaaggaagacaga

SEQ ID NO: 2515997 - DNA, 25 bp, Homo sapien
tctttcccatcagagtatgaagtcc

SEQ ID NO: 2515998 - DNA, 25 bp, Homo sapien
tatctgataatcaaagaccaagtgc

SEQ ID NO: 2515999 - DNA, 25 bp, Homo sapien
caccaagtttaacagggcagacaat

SEQ ID NO: 2516000 - DNA, 25 bp, Homo sapien
cattaacaggcacgatgaacagtgt

SEQ ID NO: 2516001 - DNA, 25 bp, Homo sapien
ccatttcaagagcactaggactaca

SEQ ID NO: 2516002 - DNA, 25 bp, Homo sapien
tgtaaacactgttaatgggcaccaa

SEQ ID NO: 2516003 - DNA, 25 bp, Homo sapien
caaggtataaccaagacaaactcaa

SEQ ID NO: 2516004 - DNA, 25 bp, Homo sapien
agaaatctagctaggttatcatgca

SEQ ID NO: 2516005 - DNA, 25 bp, Homo sapien
taataaaggcaacttgcattcaaaa

SEQ ID NO: 2516006 - DNA, 25 bp, Homo sapien
caaatttataataaaggcaacttgc

SEQ ID NO: 2516007 - DNA, 25 bp, Homo sapien
taacccagccgcttacttgaattac

SEQ ID NO: 2516008 - DNA, 25 bp, Homo sapien
catacaggagtcatacagagcaaca

SEQ ID NO: 2516009 - DNA, 25 bp, Homo sapien
gaattaacccagccgcttacttgaa

SEQ ID NO: 2516010 - DNA, 25 bp, Homo sapien
tacaatgcatacaggagtcatacag

SEQ ID NO: 2516011 - DNA, 25 bp, Homo sapien
ttctcaagtcagaattaacacctca

SEQ ID NO: 2516012 - DNA, 25 bp, Homo sapien
tcatgaaaactgaatttgctgaaca

SEQ ID NO: 2516013 - DNA, 25 bp, Homo sapien
actgaatttgctgaacaccagaaat

SEQ ID NO: 2516014 - DNA, 25 bp, Homo sapien
aaactgaatttgctgaacaccagaa

SEQ ID NO: 2516015 - DNA, 25 bp, Homo sapien
tgaaaactgaatttgctgaacacca

SEQ ID NO: 2516016 - DNA, 25 bp, Homo sapien
ctgtggttattaagccagctggtaa

SEQ ID NO: 2516017 - DNA, 25 bp, Homo sapien
tcttcacttagtccatctgtagctg

SEQ ID NO: 2516018 - DNA, 25 bp, Homo sapien
cttcacttagtccatctgtagctgt

SEQ ID NO: 2516019 - DNA, 25 bp, Homo sapien
ctcttcacttagtccatctgtagct

SEQ ID NO: 2516020 - DNA, 25 bp, Homo sapien
caccaccaatattgagcttataaat

SEQ ID NO: 2516021 - DNA, 25 bp, Homo sapien
aacaccaccaatattgagcttataa

SEQ ID NO: 2516022 - DNA, 25 bp, Homo sapien
gcaaaacaccaccaatattgagctt

SEQ ID NO: 2516023 - DNA, 25 bp, Homo sapien
aaaacaccaccaatattgagcttat

SEQ ID NO: 2516024 - DNA, 25 bp, Homo sapien
tctgaaggtataatttcagaggttc

SEQ ID NO: 2516025 - DNA, 25 bp, Homo sapien
tgaaggtataatttcagaggttcca

SEQ ID NO: 2516026 - DNA, 25 bp, Homo sapien
tttctgaaggtataatttcagaggt

SEQ ID NO: 2516027 - DNA, 25 bp, Homo sapien
ctctctgaatttctgaaggtataat

SEQ ID NO: 2516028 - DNA, 25 bp, Homo sapien
agcctaaagtagacatagcaaagag

SEQ ID NO: 2516029 - DNA, 25 bp, Homo sapien
taaagtagacatagcaaagagaata

SEQ ID NO: 2516030 - DNA, 25 bp, Homo sapien
ataactgtcaaagcctaaagtagac

SEQ ID NO: 2516031 - DNA, 25 bp, Homo sapien
gtcaaagcctaaagtagacatagca

SEQ ID NO: 2516032 - DNA, 25 bp, Homo sapien
aacacatcttcactttatgactatt

SEQ ID NO: 2516033 - DNA, 25 bp, Homo sapien
acacatcttcactttatgactattt

SEQ ID NO: 2516034 - DNA, 25 bp, Homo sapien
cacatcttcactttatgactattta

SEQ ID NO: 2516035 - DNA, 25 bp, Homo sapien
aaaatagctgtttccaaataccagg

SEQ ID NO: 2516036 - DNA, 25 bp, Homo sapien
tatcagaccaatacgacctaaattt

SEQ ID NO: 2516037 - DNA, 25 bp, Homo sapien
caaactgtaagttctaagcttagtg

SEQ ID NO: 2516038 - DNA, 25 bp, Homo sapien
cagaccaagtgatgagcaatgacaa

SEQ ID NO: 2516039 - DNA, 25 bp, Homo sapien
tttttcattatcctagccacgtttg

SEQ ID NO: 2516040 - DNA, 25 bp, Homo sapien
tgaggctgtataacataatgacttc

SEQ ID NO: 2516041 - DNA, 25 bp, Homo sapien
cccacaatttgtccacgattcaaga

SEQ ID NO: 2516042 - DNA, 25 bp, Homo sapien
tgatataagcataaggccaatagcg

SEQ ID NO: 2516043 - DNA, 25 bp, Homo sapien
aatatagtaccacaggcaaccctga

SEQ ID NO: 2516044 - DNA, 25 bp, Homo sapien
gccaatagcgacaaggaaatgaatc

SEQ ID NO: 2516045 - DNA, 25 bp, Homo sapien
caggttcatgctatgtgctggtcac

SEQ ID NO: 2516046 - DNA, 25 bp, Homo sapien
tcagcttgcaggacaaatgttacat

SEQ ID NO: 2516047 - DNA, 25 bp, Homo sapien
tgtcctcagcttgcaggacaaatgt

SEQ ID NO: 2516048 - DNA, 25 bp, Homo sapien
gtcacgtagctgtcaacaacagaca

SEQ ID NO: 2516049 - DNA, 25 bp, Homo sapien
aatactgtcagaaccgtgttgtcag

SEQ ID NO: 2516050 - DNA, 25 bp, Homo sapien
tcagaaccgtgttgtcagtggtgct

SEQ ID NO: 2516051 - DNA, 25 bp, Homo sapien
ctaaaaaggtgtctaatctttgtga

SEQ ID NO: 2516052 - DNA, 25 bp, Homo sapien
gaaccgtgttgtcagtggtgctgaa

SEQ ID NO: 2516053 - DNA, 25 bp, Homo sapien
gtagcacgaaccacgcaactatggg

SEQ ID NO: 2516054 - DNA, 25 bp, Homo sapien
tccatgcgggttagtgggatgccat

SEQ ID NO: 2516055 - DNA, 25 bp, Homo sapien
aagagagatgaaaccaccccagtga

SEQ ID NO: 2516056 - DNA, 25 bp, Homo sapien
gattagtgccactgatattgatccg

SEQ ID NO: 2516057 - DNA, 25 bp, Homo sapien
tagtccaatccgaagggcttccttc

SEQ ID NO: 2516058 - DNA, 25 bp, Homo sapien
cttagtccaatccgaagggcttcct

SEQ ID NO: 2516059 - DNA, 25 bp, Homo sapien
ggcaagtacagggaccgcaaaccgc

SEQ ID NO: 2516060 - DNA, 25 bp, Homo sapien
cgcaaaccgccagatggctgcattc

SEQ ID NO: 2516061 - DNA, 25 bp, Homo sapien
gctgcggggaagctaaagccatgcc

SEQ ID NO: 2516062 - DNA, 25 bp, Homo sapien
tctttacgcgcaaaccaggctgcgg

SEQ ID NO: 2516063 - DNA, 25 bp, Homo sapien
ctgcgagtgccaggaggccgccccc

SEQ ID NO: 2516064 - DNA, 25 bp, Homo sapien
agtgccaggaggccgcccccagagc

SEQ ID NO: 2516065 - DNA, 25 bp, Homo sapien
cgagtgccaggaggccgcccccaga

SEQ ID NO: 2516066 - DNA, 25 bp, Homo sapien
tgcgagtgccaggaggccgccccca

SEQ ID NO: 2516067 - DNA, 25 bp, Homo sapien
cgatcattggccgaagcgagacaca

SEQ ID NO: 2516068 - DNA, 25 bp, Homo sapien
ttaggagcgatcattggccgaagcg

SEQ ID NO: 2516069 - DNA, 25 bp, Homo sapien
tcattggccgaagcgagacacaaac

SEQ ID NO: 2516070 - DNA, 25 bp, Homo sapien
taggagcgatcattggccgaagcga

SEQ ID NO: 2516071 - DNA, 25 bp, Homo sapien
gcggagctccgcttccaggactcgg

SEQ ID NO: 2516072 - DNA, 25 bp, Homo sapien
tgcagccctggttggctcccgtctc

SEQ ID NO: 2516073 - DNA, 25 bp, Homo sapien
tcccgtctccaatcggctgtttggt

SEQ ID NO: 2516074 - DNA, 25 bp, Homo sapien
aaatggctgcgaaggaaccagtccc

SEQ ID NO: 2516075 - DNA, 25 bp, Homo sapien
tgccctgttcgagtcctgctctccc

SEQ ID NO: 2516076 - DNA, 25 bp, Homo sapien
tggtttgaagttccgatatacatgt

SEQ ID NO: 2516077 - DNA, 25 bp, Homo sapien
cacgggtgctcagtccaggcaactg

SEQ ID NO: 2516078 - DNA, 25 bp, Homo sapien
tcccgcgggagatgctcccacgggt

SEQ ID NO: 2516079 - DNA, 25 bp, Homo sapien
ggtctgcacgctggccgggttgtcg

SEQ ID NO: 2516080 - DNA, 25 bp, Homo sapien
gccgggttgtcgaagctcaggaagc

SEQ ID NO: 2516081 - DNA, 25 bp, Homo sapien
ttcatggcctggatggcggtctgca

SEQ ID NO: 2516082 - DNA, 25 bp, Homo sapien
acgctggccgggttgtcgaagctca

SEQ ID NO: 2516083 - DNA, 25 bp, Homo sapien
taatgagaacccattcaaaggataa

SEQ ID NO: 2516084 - DNA, 25 bp, Homo sapien
ccagttccacactgattgagtttaa

SEQ ID NO: 2516085 - DNA, 25 bp, Homo sapien
ccacctgtatgcctccagttccaca

SEQ ID NO: 2516086 - DNA, 25 bp, Homo sapien
gctgcctcaaaatcagagatcttcc

SEQ ID NO: 2516087 - DNA, 25 bp, Homo sapien
aaacttgaccccagggagagcaaga

SEQ ID NO: 2516088 - DNA, 25 bp, Homo sapien
gagagcaagagtcagtccctttctg

SEQ ID NO: 2516089 - DNA, 25 bp, Homo sapien
ctggtggctgttgcttgacttgcca

SEQ ID NO: 2516090 - DNA, 25 bp, Homo sapien
gtatcaaagctgggtggagctgccc

SEQ ID NO: 2516091 - DNA, 25 bp, Homo sapien
ctccatttttctttttccatgtcca

SEQ ID NO: 2516092 - DNA, 25 bp, Homo sapien
tccatttttctttttccatgtccat

SEQ ID NO: 2516093 - DNA, 25 bp, Homo sapien
gcccataatggtaaacgaaaggtga

SEQ ID NO: 2516094 - DNA, 25 bp, Homo sapien
ctagtgtaaggcccataatggtaaa

SEQ ID NO: 2516095 - DNA, 25 bp, Homo sapien
taatggtaaacgaaaggtgattctc

SEQ ID NO: 2516096 - DNA, 25 bp, Homo sapien
tgtaaggcccataatggtaaacgaa

SEQ ID NO: 2516097 - DNA, 25 bp, Homo sapien
gaagacgaccaatgtcatcagtttc

SEQ ID NO: 2516098 - DNA, 25 bp, Homo sapien
cccctccctgaagacgaccaatgtc

SEQ ID NO: 2516099 - DNA, 25 bp, Homo sapien
tccctgaagacgaccaatgtcatca

SEQ ID NO: 2516100 - DNA, 25 bp, Homo sapien
cctgaagacgaccaatgtcatcagt

SEQ ID NO: 2516101 - DNA, 25 bp, Homo sapien
taggcaagaaccagtagtaaccgtg

SEQ ID NO: 2516102 - DNA, 25 bp, Homo sapien
gaacatgctaacagtagttgcctcc

SEQ ID NO: 2516103 - DNA, 25 bp, Homo sapien
tcatttgcatgacacaagaaaagca

SEQ ID NO: 2516104 - DNA, 25 bp, Homo sapien
ggctaatctgattttcacccctaga

SEQ ID NO: 2516105 - DNA, 25 bp, Homo sapien
gatagttatgtaaaatgtctacagc

SEQ ID NO: 2516106 - DNA, 25 bp, Homo sapien
gagggcagacaataaccaagatagt

SEQ ID NO: 2516107 - DNA, 25 bp, Homo sapien
gttcctgccctgatgagtgtccatt

SEQ ID NO: 2516108 - DNA, 25 bp, Homo sapien
agtgaatgaatgctgtcccaagatc

SEQ ID NO: 2516109 - DNA, 25 bp, Homo sapien
tgggaataacataccactaagctgg

SEQ ID NO: 2516110 - DNA, 25 bp, Homo sapien
tggaggtagcaatctcttggtggtt

SEQ ID NO: 2516111 - DNA, 25 bp, Homo sapien
tgatgcctgattgggccagcacaaa

SEQ ID NO: 2516112 - DNA, 25 bp, Homo sapien
tggttttgactggtgatgatgccca

SEQ ID NO: 2516113 - DNA, 25 bp, Homo sapien
tgttggctacgtaatcttcccaggg

SEQ ID NO: 2516114 - DNA, 25 bp, Homo sapien
gatctggttcatgtcttcgaggagc

SEQ ID NO: 2516115 - DNA, 25 bp, Homo sapien
cagttggccttagccacacaggaga

SEQ ID NO: 2516116 - DNA, 25 bp, Homo sapien
ggaacaccgttctacatgtgcagtt

SEQ ID NO: 2516117 - DNA, 25 bp, Homo sapien
cggagagcacgccatgaaggcctcg

SEQ ID NO: 2516118 - DNA, 25 bp, Homo sapien
taccgcatgcgaatctttgcgccta

SEQ ID NO: 2516119 - DNA, 25 bp, Homo sapien
gattgtctactgtgggcaggtgttt

SEQ ID NO: 2516120 - DNA, 25 bp, Homo sapien
ctaatcatgtcgtcgccaagtcccg

SEQ ID NO: 2516121 - DNA, 25 bp, Homo sapien
taatttcatctagtcccatggagtg

SEQ ID NO: 2516122 - DNA, 25 bp, Homo sapien
gtaaagctagtgaccctccataatg

SEQ ID NO: 2516123 - DNA, 25 bp, Homo sapien
tttgcagtttgagcgtgccagggct

SEQ ID NO: 2516124 - DNA, 25 bp, Homo sapien
tcaacttggctagcatacggtgccc

SEQ ID NO: 2516125 - DNA, 25 bp, Homo sapien
gttttcttcactccggcatttgcag

SEQ ID NO: 2516126 - DNA, 25 bp, Homo sapien
catttgcagcagagcgaaaggtggt

SEQ ID NO: 2516127 - DNA, 25 bp, Homo sapien
tcgggtgaaaccagacaaagccgcg

SEQ ID NO: 2516128 - DNA, 25 bp, Homo sapien
caaattcttgtaagctctgcgtcgg

SEQ ID NO: 2516129 - DNA, 25 bp, Homo sapien
gccggcggggacgacagcattgcgc

SEQ ID NO: 2516130 - DNA, 25 bp, Homo sapien
tgccggcggggacgacagcattgcg

SEQ ID NO: 2516131 - DNA, 25 bp, Homo sapien
ctgccggcggggacgacagcattgc

SEQ ID NO: 2516132 - DNA, 25 bp, Homo sapien
atctgcccgttgtgtttgtgaaaca

SEQ ID NO: 2516133 - DNA, 25 bp, Homo sapien
ccctggaaggaacgctctcggaatt

SEQ ID NO: 2516134 - DNA, 25 bp, Homo sapien
tgccacacagaggacggtcgggccc

SEQ ID NO: 2516135 - DNA, 25 bp, Homo sapien
gaattggccgcggaaaccgatctgc

SEQ ID NO: 2516136 - DNA, 25 bp, Homo sapien
catcattgcgcgtgttgggagcgcc

SEQ ID NO: 2516137 - DNA, 25 bp, Homo sapien
cgttacctcagagatacccgtggcc

SEQ ID NO: 2516138 - DNA, 25 bp, Homo sapien
aagaatagctgtcccctgagcgggc

SEQ ID NO: 2516139 - DNA, 25 bp, Homo sapien
cgtggccggcatgttggttgaaaaa

SEQ ID NO: 2516140 - DNA, 25 bp, Homo sapien
cttatcatcattggaggtggctcag

SEQ ID NO: 2516141 - DNA, 25 bp, Homo sapien
ggaggtggctcaggaggtctggcag

SEQ ID NO: 2516142 - DNA, 25 bp, Homo sapien
ggtggctcaggaggtctggcagctg

SEQ ID NO: 2516143 - DNA, 25 bp, Homo sapien
ttatcatcattggaggtggctcagg

SEQ ID NO: 2516144 - DNA, 25 bp, Homo sapien
cagtctgggcaaccaaagggttgat

SEQ ID NO: 2516145 - DNA, 25 bp, Homo sapien
aaagctgatgggctggattggccca

SEQ ID NO: 2516146 - DNA, 25 bp, Homo sapien
gggcatagggtctctagtagctact

SEQ ID NO: 2516147 - DNA, 25 bp, Homo sapien
tggcccatggtgcagtttgccagcc

SEQ ID NO: 2516148 - DNA, 25 bp, Homo sapien
cagctgcgctcaaatgtggactgac

SEQ ID NO: 2516149 - DNA, 25 bp, Homo sapien
actgggtccaaatgctggagaagtt

SEQ ID NO: 2516150 - DNA, 25 bp, Homo sapien
caaggctttgcagctgcgctcaaat

SEQ ID NO: 2516151 - DNA, 25 bp, Homo sapien
ccaaatgctggagaagttacacaag

SEQ ID NO: 2516152 - DNA, 25 bp, Homo sapien
tcagtgggcttgttgaaagactgct

SEQ ID NO: 2516153 - DNA, 25 bp, Homo sapien
gaggctattgtgctgtgatccagca

SEQ ID NO: 2516154 - DNA, 25 bp, Homo sapien
cagcagcgtacatggcagcatctgg

SEQ ID NO: 2516155 - DNA, 25 bp, Homo sapien
tgatccagcagcagcgtacatggca

SEQ ID NO: 2516156 - DNA, 25 bp, Homo sapien
ggacacaggacgtctcctgaagccc

SEQ ID NO: 2516157 - DNA, 25 bp, Homo sapien
tgaggacacaggacgtctcctgaag

SEQ ID NO: 2516158 - DNA, 25 bp, Homo sapien
agtgaggacacaggacgtctcctga

SEQ ID NO: 2516159 - DNA, 25 bp, Homo sapien
ctgagcagaaggatgcagtgaggac

SEQ ID NO: 2516160 - DNA, 25 bp, Homo sapien
tgattgactcgaactccattcagtg

SEQ ID NO: 2516161 - DNA, 25 bp, Homo sapien
tgtcacagcatcgtattgcaaagag

SEQ ID NO: 2516162 - DNA, 25 bp, Homo sapien
tacaggcaatcttgagcagtagcaa

SEQ ID NO: 2516163 - DNA, 25 bp, Homo sapien
caaggagaacttgttagtcactgca

SEQ ID NO: 2516164 - DNA, 25 bp, Homo sapien
gtttccgtgcccaaatccaaggcga

SEQ ID NO: 2516165 - DNA, 25 bp, Homo sapien
cattgtctgtgaccaagcgctctgg

SEQ ID NO: 2516166 - DNA, 25 bp, Homo sapien
tgtggatgctgttgccaagactgca

SEQ ID NO: 2516167 - DNA, 25 bp, Homo sapien
tgctgaggttaagccccagtgtgga

SEQ ID NO: 2516168 - DNA, 25 bp, Homo sapien
caccgcccaaggcccccttggatct

SEQ ID NO: 2516169 - DNA, 25 bp, Homo sapien
gggtcactgacagacttgaagctga

SEQ ID NO: 2516170 - DNA, 25 bp, Homo sapien
gctgacatttggcagggcatcgaag

SEQ ID NO: 2516171 - DNA, 25 bp, Homo sapien
ggagttggtgaatagaaggcaggca

SEQ ID NO: 2516172 - DNA, 25 bp, Homo sapien
catcgaagggatgcatccatgaagt

SEQ ID NO: 2516173 - DNA, 25 bp, Homo sapien
ggctagagtatccatgcaaggtgtc

SEQ ID NO: 2516174 - DNA, 25 bp, Homo sapien
ggctatgtaggcttgtcccgggaaa

SEQ ID NO: 2516175 - DNA, 25 bp, Homo sapien
gaggcagacatacaccagaaatggg

SEQ ID NO: 2516176 - DNA, 25 bp, Homo sapien
ccattatttgtcatggaggcagaca

SEQ ID NO: 2516177 - DNA, 25 bp, Homo sapien
gataatcaggcctaatcatgttgtg

SEQ ID NO: 2516178 - DNA, 25 bp, Homo sapien
aattgaggcagttgaccatattcag

SEQ ID NO: 2516179 - DNA, 25 bp, Homo sapien
cagtaggcggtatgagataatcagg

SEQ ID NO: 2516180 - DNA, 25 bp, Homo sapien
gagtggaatgttctatccccacaag

SEQ ID NO: 2516181 - DNA, 25 bp, Homo sapien
gatggtgataccctcttgtatgtcg

SEQ ID NO: 2516182 - DNA, 25 bp, Homo sapien
ccttttgtgtatgatggtgataccc

SEQ ID NO: 2516183 - DNA, 25 bp, Homo sapien
gataccctcttgtatgtcgggaaaa

SEQ ID NO: 2516184 - DNA, 25 bp, Homo sapien
gtcgggaaaatgaggtagaacctgc

SEQ ID NO: 2516185 - DNA, 25 bp, Homo sapien
tgtagcaatagagacagagaggccc

SEQ ID NO: 2516186 - DNA, 25 bp, Homo sapien
ggtgatacgttctttctggatgcaa

SEQ ID NO: 2516187 - DNA, 25 bp, Homo sapien
cagttatgacctgacctgaaccgcc

SEQ ID NO: 2516188 - DNA, 25 bp, Homo sapien
tgaaccgccattcccttggatgtag

SEQ ID NO: 2516189 - DNA, 25 bp, Homo sapien
cacctggaccttggataaagggctc

SEQ ID NO: 2516190 - DNA, 25 bp, Homo sapien
aaagggctcaccgaggcaaatgtcc

SEQ ID NO: 2516191 - DNA, 25 bp, Homo sapien
ggcccaaagcagtcattcaacctgt

SEQ ID NO: 2516192 - DNA, 25 bp, Homo sapien
ttctgaaccggcagctggactcagg

SEQ ID NO: 2516193 - DNA, 25 bp, Homo sapien
cgaaggagtaacactggtgctcagc

SEQ ID NO: 2516194 - DNA, 25 bp, Homo sapien
ccggcactatgtgggaagattctaa

SEQ ID NO: 2516195 - DNA, 25 bp, Homo sapien
cagagaatccaagtgcatgagggct

SEQ ID NO: 2516196 - DNA, 25 bp, Homo sapien
tccagggattgtgaacctaagccag

SEQ ID NO: 2516197 - DNA, 25 bp, Homo sapien
cgatgactatgaacgtcttgtgtgg

SEQ ID NO: 2516198 - DNA, 25 bp, Homo sapien
gatgctacttttttcctgacgatga

SEQ ID NO: 2516199 - DNA, 25 bp, Homo sapien
tttttcctgacgatgactatgaacg

SEQ ID NO: 2516200 - DNA, 25 bp, Homo sapien
gtctggccgttgagggatgctactt

SEQ ID NO: 2516201 - DNA, 25 bp, Homo sapien
gacaccacacctttgcccattctca

SEQ ID NO: 2516202 - DNA, 25 bp, Homo sapien
gaggacaccacacctttgcccattc

SEQ ID NO: 2516203 - DNA, 25 bp, Homo sapien
aatgaggcagcttgatgttttgtgg

SEQ ID NO: 2516204 - DNA, 25 bp, Homo sapien
agcccctgtccttaatgaggcagct

SEQ ID NO: 2516205 - DNA, 25 bp, Homo sapien
ttggccccacccaagtagggcgcca

SEQ ID NO: 2516206 - DNA, 25 bp, Homo sapien
caccaaaataggtcccggcggagat

SEQ ID NO: 2516207 - DNA, 25 bp, Homo sapien
acccaagtagggcgccagggagaca

SEQ ID NO: 2516208 - DNA, 25 bp, Homo sapien
accaaaataggtcccggcggagatg

SEQ ID NO: 2516209 - DNA, 25 bp, Homo sapien
cttgagtgaattatagtgggaattc

SEQ ID NO: 2516210 - DNA, 25 bp, Homo sapien
gctgccagatgagaagggtcttagt

SEQ ID NO: 2516211 - DNA, 25 bp, Homo sapien
agttttggaccttctgcttgagtga

SEQ ID NO: 2516212 - DNA, 25 bp, Homo sapien
cactgaggttcctgttgggccttcc

SEQ ID NO: 2516213 - DNA, 25 bp, Homo sapien
tgagatgctgattcctccacatgcc

SEQ ID NO: 2516214 - DNA, 25 bp, Homo sapien
ggcagtcccgatgtaaacccacagt

SEQ ID NO: 2516215 - DNA, 25 bp, Homo sapien
gacagcattcttgacaggcagagcc

SEQ ID NO: 2516216 - DNA, 25 bp, Homo sapien
cacagtttcgaggaaccagttggcc

SEQ ID NO: 2516217 - DNA, 25 bp, Homo sapien
tccgtgtgggctgctgagacaagca

SEQ ID NO: 2516218 - DNA, 25 bp, Homo sapien
ccgtgtgggctgctgagacaagcat

SEQ ID NO: 2516219 - DNA, 25 bp, Homo sapien
ctccgtgtgggctgctgagacaagc

SEQ ID NO: 2516220 - DNA, 25 bp, Homo sapien
agccaggccactggcggcgcccatt

SEQ ID NO: 2516221 - DNA, 25 bp, Homo sapien
tttcacatgggacttccccagcact

SEQ ID NO: 2516222 - DNA, 25 bp, Homo sapien
tctcagctcaaacgccaaggcagca

SEQ ID NO: 2516223 - DNA, 25 bp, Homo sapien
agctcaaacgccaaggcagcagcca

SEQ ID NO: 2516224 - DNA, 25 bp, Homo sapien
ggcgttgattgacttgttcactgcc

SEQ ID NO: 2516225 - DNA, 25 bp, Homo sapien
ggtcagctgaacctgttttaccact

SEQ ID NO: 2516226 - DNA, 25 bp, Homo sapien
tgtgatgatggcgttgattgacttg

SEQ ID NO: 2516227 - DNA, 25 bp, Homo sapien
tcaggaaggtcagctgaacctgttt

SEQ ID NO: 2516228 - DNA, 25 bp, Homo sapien
ggacaatgtgttccccacaactgtg

SEQ ID NO: 2516229 - DNA, 25 bp, Homo sapien
ctgagaagggagtcggtgagctata

SEQ ID NO: 2516230 - DNA, 25 bp, Homo sapien
gattgcaccaaatgacaagggaact

SEQ ID NO: 2516231 - DNA, 25 bp, Homo sapien
gggattgcaccaaatgacaagggaa

SEQ ID NO: 2516232 - DNA, 25 bp, Homo sapien
cttcccagatccatccttcttcttc

SEQ ID NO: 2516233 - DNA, 25 bp, Homo sapien
tcttcccagatccatccttcttctt

SEQ ID NO: 2516234 - DNA, 25 bp, Homo sapien
ttcttcccagatccatccttcttct

SEQ ID NO: 2516235 - DNA, 25 bp, Homo sapien
ttcatcaaatccctcaggcaaggtg

SEQ ID NO: 2516236 - DNA, 25 bp, Homo sapien
cttcatcaaatccctcaggcaaggt

SEQ ID NO: 2516237 - DNA, 25 bp, Homo sapien
gccttcatcaaatccctcaggcaag

SEQ ID NO: 2516238 - DNA, 25 bp, Homo sapien
ccttcatcaaatccctcaggcaagg

SEQ ID NO: 2516239 - DNA, 25 bp, Homo sapien
tggaaagactccatagaaagacctg

SEQ ID NO: 2516240 - DNA, 25 bp, Homo sapien
cctggaaagactccatagaaagacc

SEQ ID NO: 2516241 - DNA, 25 bp, Homo sapien
ggaaagactccatagaaagacctgg

SEQ ID NO: 2516242 - DNA, 25 bp, Homo sapien
gaaagactccatagaaagacctgga

SEQ ID NO: 2516243 - DNA, 25 bp, Homo sapien
gcaggggcaaagtgaaaaaaacaca

SEQ ID NO: 2516244 - DNA, 25 bp, Homo sapien
gctggagtcggcttagggtagggcc

SEQ ID NO: 2516245 - DNA, 25 bp, Homo sapien
ccacagacctggtcctcagtaaggg

SEQ ID NO: 2516246 - DNA, 25 bp, Homo sapien
gggcagctggagtcggcttagggta

SEQ ID NO: 2516247 - DNA, 25 bp, Homo sapien
cagacctggtcctcagtaagggagg

SEQ ID NO: 2516248 - DNA, 25 bp, Homo sapien
gttcagaaaagcctgcaaagcagag

SEQ ID NO: 2516249 - DNA, 25 bp, Homo sapien
gcaaagcagagcctgctctcagagt

SEQ ID NO: 2516250 - DNA, 25 bp, Homo sapien
cttgttcagaaaagcctgcaaagca

SEQ ID NO: 2516251 - DNA, 25 bp, Homo sapien
caaagcagagcctgctctcagagtc

SEQ ID NO: 2516252 - DNA, 25 bp, Homo sapien
taatctgccggaatgaggaggcgct

SEQ ID NO: 2516253 - DNA, 25 bp, Homo sapien
tgcagaaaagggcatcgttgccagg

SEQ ID NO: 2516254 - DNA, 25 bp, Homo sapien
cagtgcattgtaggtataatctgcc

SEQ ID NO: 2516255 - DNA, 25 bp, Homo sapien
cgttgccaggtttgcaagatcgtaa

SEQ ID NO: 2516256 - DNA, 25 bp, Homo sapien
cctaaatgcatggaattggaaactg

SEQ ID NO: 2516257 - DNA, 25 bp, Homo sapien
gataaggcacaaaggttagtctaac

SEQ ID NO: 2516258 - DNA, 25 bp, Homo sapien
ttttccctgacatacgagtgatccc

SEQ ID NO: 2516259 - DNA, 25 bp, Homo sapien
gagtgatccctacactattggctgt

SEQ ID NO: 2516260 - DNA, 25 bp, Homo sapien
tggacttggttgaggtggcttccta

SEQ ID NO: 2516261 - DNA, 25 bp, Homo sapien
cttttccagcagttttctggacttg

SEQ ID NO: 2516262 - DNA, 25 bp, Homo sapien
ctgccagtgctatggctggcttggc

SEQ ID NO: 2516263 - DNA, 25 bp, Homo sapien
tgccagtgctatggctggcttggct

SEQ ID NO: 2516264 - DNA, 25 bp, Homo sapien
ggtagcagagttttgcaacccacag

SEQ ID NO: 2516265 - DNA, 25 bp, Homo sapien
atggtgggtgtcagagattctgtct

SEQ ID NO: 2516266 - DNA, 25 bp, Homo sapien
cttttgccttgaggaatggtggtga

SEQ ID NO: 2516267 - DNA, 25 bp, Homo sapien
tttggaggatgctctaccctttggg

SEQ ID NO: 2516268 - DNA, 25 bp, Homo sapien
tggcagcaccgaggcgattttcttc

SEQ ID NO: 2516269 - DNA, 25 bp, Homo sapien
ggtcgtgcagtttccttaaccctga

SEQ ID NO: 2516270 - DNA, 25 bp, Homo sapien
aaataattgccagccaccagaaacc

SEQ ID NO: 2516271 - DNA, 25 bp, Homo sapien
tgagcgtcggaaaatgggcactcgc

SEQ ID NO: 2516272 - DNA, 25 bp, Homo sapien
tcgttggagcgcaatgaagtagcct

SEQ ID NO: 2516273 - DNA, 25 bp, Homo sapien
ccagccccggaatatatagatcgtt

SEQ ID NO: 2516274 - DNA, 25 bp, Homo sapien
caaagtatgttgcacccaggtaggg

SEQ ID NO: 2516275 - DNA, 25 bp, Homo sapien
gggccgcgagttgcatttggtaaaa

SEQ ID NO: 2516276 - DNA, 25 bp, Homo sapien
gtcaccgcgtcgggatggggaggag

SEQ ID NO: 2516277 - DNA, 25 bp, Homo sapien
aaggtgtgcttcgccctcttcttcc

SEQ ID NO: 2516278 - DNA, 25 bp, Homo sapien
agaagggaaggtgtgcttcgccctc

SEQ ID NO: 2516279 - DNA, 25 bp, Homo sapien
ggtcaccgcgtcgggatggggagga

SEQ ID NO: 2516280 - DNA, 25 bp, Homo sapien
gcagggaaacggagaggtgtgggaa

SEQ ID NO: 2516281 - DNA, 25 bp, Homo sapien
ctgctgccgaggtcggaggatgaaa

SEQ ID NO: 2516282 - DNA, 25 bp, Homo sapien
ccgaggtcggaggatgaaagagtta

SEQ ID NO: 2516283 - DNA, 25 bp, Homo sapien
tctgtctgcgaggtagcagggaaac

SEQ ID NO: 2516284 - DNA, 25 bp, Homo sapien
tacgccccggcgaggttgcgagtcc

SEQ ID NO: 2516285 - DNA, 25 bp, Homo sapien
tggtcgggtgcccagcgttgcccct

SEQ ID NO: 2516286 - DNA, 25 bp, Homo sapien
ctgcgcccgggcgagccgcctcttc

SEQ ID NO: 2516287 - DNA, 25 bp, Homo sapien
caggtgtggagagtggtcgggtgcc

SEQ ID NO: 2516288 - DNA, 25 bp, Homo sapien
tggaaactccgagctcctgggtcac

SEQ ID NO: 2516289 - DNA, 25 bp, Homo sapien
tcccttgtggctcaggcaaagttcc

SEQ ID NO: 2516290 - DNA, 25 bp, Homo sapien
gcaaagttccacgtccgaaatctgg

SEQ ID NO: 2516291 - DNA, 25 bp, Homo sapien
cacgccttgaccactgcagttttgg

SEQ ID NO: 2516292 - DNA, 25 bp, Homo sapien
ccgggccacgttggctcagaaatcc

SEQ ID NO: 2516293 - DNA, 25 bp, Homo sapien
ggccacgttggctcagaaatccatt

SEQ ID NO: 2516294 - DNA, 25 bp, Homo sapien
tgccgggccacgttggctcagaaat

SEQ ID NO: 2516295 - DNA, 25 bp, Homo sapien
cctgccgggccacgttggctcagaa

SEQ ID NO: 2516296 - DNA, 25 bp, Homo sapien
gttgcctttctcagcgtagtcacag

SEQ ID NO: 2516297 - DNA, 25 bp, Homo sapien
ttgcctttctcagcgtagtcacagc

SEQ ID NO: 2516298 - DNA, 25 bp, Homo sapien
tcagcgtagtcacagcaataatttg

SEQ ID NO: 2516299 - DNA, 25 bp, Homo sapien
tctcagcgtagtcacagcaataatt

SEQ ID NO: 2516300 - DNA, 25 bp, Homo sapien
gtctcctcacccaaacctgcggttg

SEQ ID NO: 2516301 - DNA, 25 bp, Homo sapien
ccaaacctgcggttgtgaaacttat

SEQ ID NO: 2516302 - DNA, 25 bp, Homo sapien
cctgcggttgtgaaacttataaagg

SEQ ID NO: 2516303 - DNA, 25 bp, Homo sapien
ctcacccaaacctgcggttgtgaaa

SEQ ID NO: 2516304 - DNA, 25 bp, Homo sapien
gaatgccagtaatgctctgtacgaa

SEQ ID NO: 2516305 - DNA, 25 bp, Homo sapien
tgtacgaatgcccagaacacggatg

SEQ ID NO: 2516306 - DNA, 25 bp, Homo sapien
ttcagcaggaatgcgcttgagcttc

SEQ ID NO: 2516307 - DNA, 25 bp, Homo sapien
tacagatacactcgggttcaaacag

SEQ ID NO: 2516308 - DNA, 25 bp, Homo sapien
gggttccagatacctacatgtgaaa

SEQ ID NO: 2516309 - DNA, 25 bp, Homo sapien
catggcacggattgtgtagctaaaa

SEQ ID NO: 2516310 - DNA, 25 bp, Homo sapien
tagctaaaaatttggaggcctctgg

SEQ ID NO: 2516311 - DNA, 25 bp, Homo sapien
caatgggttccaggcttcgttggtg

SEQ ID NO: 2516312 - DNA, 25 bp, Homo sapien
tgcgcagaactcagaaggaggagcc

SEQ ID NO: 2516313 - DNA, 25 bp, Homo sapien
aagataagcctttccacctcggtca

SEQ ID NO: 2516314 - DNA, 25 bp, Homo sapien
gattgtcatgtacaaacagcatctg

SEQ ID NO: 2516315 - DNA, 25 bp, Homo sapien
gaatgtagtggcaccgtctggctcc

SEQ ID NO: 2516316 - DNA, 25 bp, Homo sapien
ggttcctcgttcaaggatgtgaatc

SEQ ID NO: 2516317 - DNA, 25 bp, Homo sapien
tcctcgttcaaggatgtgaatctcc

SEQ ID NO: 2516318 - DNA, 25 bp, Homo sapien
ctcgttcaaggatgtgaatctccat

SEQ ID NO: 2516319 - DNA, 25 bp, Homo sapien
tgtgtggttcctcgttcaaggatgt

SEQ ID NO: 2516320 - DNA, 25 bp, Homo sapien
gctcttcctgtataggggtcagtcc

SEQ ID NO: 2516321 - DNA, 25 bp, Homo sapien
tccataaccctgatctgggctaggc

SEQ ID NO: 2516322 - DNA, 25 bp, Homo sapien
gaaatttagttcaaagactccataa

SEQ ID NO: 2516323 - DNA, 25 bp, Homo sapien
gctaggcccggcattcttcaacctg

SEQ ID NO: 2516324 - DNA, 25 bp, Homo sapien
tctcaaaatgaactcggggccattt

SEQ ID NO: 2516325 - DNA, 25 bp, Homo sapien
tcaaaatgaactcggggccatttgg

SEQ ID NO: 2516326 - DNA, 25 bp, Homo sapien
tttctcaaaatgaactcggggccat

SEQ ID NO: 2516327 - DNA, 25 bp, Homo sapien
catttggaaatcgtttctattatca

SEQ ID NO: 2516328 - DNA, 25 bp, Homo sapien
gggcaacgatatcagatatggcaaa

SEQ ID NO: 2516329 - DNA, 25 bp, Homo sapien
cgatatcagatatggcaaagattgg

SEQ ID NO: 2516330 - DNA, 25 bp, Homo sapien
tccttctgtagggagcggtcatgga

SEQ ID NO: 2516331 - DNA, 25 bp, Homo sapien
atggattctctcacgcgtcgatggg

SEQ ID NO: 2516332 - DNA, 25 bp, Homo sapien
gttttccatgaggaaccaaagtctc

SEQ ID NO: 2516333 - DNA, 25 bp, Homo sapien
tacatcctgttttctctacactgtt

SEQ ID NO: 2516334 - DNA, 25 bp, Homo sapien
accaaagtctcttggtctctgctaa

SEQ ID NO: 2516335 - DNA, 25 bp, Homo sapien
tcttggtctctgctaaccttcttac

SEQ ID NO: 2516336 - DNA, 25 bp, Homo sapien
tgggtctgtgatagtgggtgacatg

SEQ ID NO: 2516337 - DNA, 25 bp, Homo sapien
ctgggtctgtgatagtgggtgacat

SEQ ID NO: 2516338 - DNA, 25 bp, Homo sapien
gggtctgtgatagtgggtgacatgg

SEQ ID NO: 2516339 - DNA, 25 bp, Homo sapien
atgggactgcccccacaggttctgg

SEQ ID NO: 2516340 - DNA, 25 bp, Homo sapien
cacaggttctggggacattttctga

SEQ ID NO: 2516341 - DNA, 25 bp, Homo sapien
cccacaggttctggggacattttct

SEQ ID NO: 2516342 - DNA, 25 bp, Homo sapien
ccatgggactgcccccacaggttct

SEQ ID NO: 2516343 - DNA, 25 bp, Homo sapien
tctgtaggatcacgggtgggagggc

SEQ ID NO: 2516344 - DNA, 25 bp, Homo sapien
ctaggctctgatctctgtaggatca

SEQ ID NO: 2516345 - DNA, 25 bp, Homo sapien
tctgatctctgtaggatcacgggtg

SEQ ID NO: 2516346 - DNA, 25 bp, Homo sapien
gctctgatctctgtaggatcacggg

SEQ ID NO: 2516347 - DNA, 25 bp, Homo sapien
gccttcggagtccttcaggatcttg

SEQ ID NO: 2516348 - DNA, 25 bp, Homo sapien
tgctgttcaggacacttcattatgc

SEQ ID NO: 2516349 - DNA, 25 bp, Homo sapien
tcaggatcttgaggatcagagggta

SEQ ID NO: 2516350 - DNA, 25 bp, Homo sapien
tcagagggtatctaagtttttctgc

SEQ ID NO: 2516351 - DNA, 25 bp, Homo sapien
gtgggacatcagcacgggacacagt

SEQ ID NO: 2516352 - DNA, 25 bp, Homo sapien
tcagcacgggacacagttagtaccc

SEQ ID NO: 2516353 - DNA, 25 bp, Homo sapien
gcctccgctctcctgattatgatgg

SEQ ID NO: 2516354 - DNA, 25 bp, Homo sapien
ggccctgtatcttgtgtcccctaga

SEQ ID NO: 2516355 - DNA, 25 bp, Homo sapien
gcagcggcagaaaagtcccatttct

SEQ ID NO: 2516356 - DNA, 25 bp, Homo sapien
tcccatagttttgcagcggcagaaa

SEQ ID NO: 2516357 - DNA, 25 bp, Homo sapien
tcagtgcctcccatagttttgcagc

SEQ ID NO: 2516358 - DNA, 25 bp, Homo sapien
ctcctctgggcccacttcagtgcct

SEQ ID NO: 2516359 - DNA, 25 bp, Homo sapien
tctgagaactgtttcggcaaagcct

SEQ ID NO: 2516360 - DNA, 25 bp, Homo sapien
tgcagggttggttcctaaaggacag

SEQ ID NO: 2516361 - DNA, 25 bp, Homo sapien
cagcatggaaacatggttgagtggg

SEQ ID NO: 2516362 - DNA, 25 bp, Homo sapien
tcattcctctaaggctgcagcatgg

SEQ ID NO: 2516363 - DNA, 25 bp, Homo sapien
tcaagtgatcctagaacttgtggcc

SEQ ID NO: 2516364 - DNA, 25 bp, Homo sapien
ggaatgcagtatcatgatcatagtt

SEQ ID NO: 2516365 - DNA, 25 bp, Homo sapien
agagacagtctcagttacataggct

SEQ ID NO: 2516366 - DNA, 25 bp, Homo sapien
gccactgctcctaattcttaagaga

SEQ ID NO: 2516367 - DNA, 25 bp, Homo sapien
tgttcagtgacaactctgttcagta

SEQ ID NO: 2516368 - DNA, 25 bp, Homo sapien
cacctgccactctttagatatggaa

SEQ ID NO: 2516369 - DNA, 25 bp, Homo sapien
ttgcaaacgtaggaagaaattgttc

SEQ ID NO: 2516370 - DNA, 25 bp, Homo sapien
tctgttcagtagaaccatcatgagt

SEQ ID NO: 2516371 - DNA, 25 bp, Homo sapien
cctggaacacttgaccgaggcagct

SEQ ID NO: 2516372 - DNA, 25 bp, Homo sapien
taaacagcttgtccctgaggcagct

SEQ ID NO: 2516373 - DNA, 25 bp, Homo sapien
tctcagtggtacaggtgtggagcac

SEQ ID NO: 2516374 - DNA, 25 bp, Homo sapien
aacaggttgtgtgttggcagccgca

SEQ ID NO: 2516375 - DNA, 25 bp, Homo sapien
acagggctccttcaccgctcatcac

SEQ ID NO: 2516376 - DNA, 25 bp, Homo sapien
ttcaccgctcatcaccagctgggaa

SEQ ID NO: 2516377 - DNA, 25 bp, Homo sapien
tccttcaccgctcatcaccagctgg

SEQ ID NO: 2516378 - DNA, 25 bp, Homo sapien
agggctccttcaccgctcatcacca

SEQ ID NO: 2516379 - DNA, 25 bp, Homo sapien
gggtcaccacggaggagcctgctca

SEQ ID NO: 2516380 - DNA, 25 bp, Homo sapien
gcactgtcatccacccgaaatggaa

SEQ ID NO: 2516381 - DNA, 25 bp, Homo sapien
ttcgcagaaatacgggtcaccacgg

SEQ ID NO: 2516382 - DNA, 25 bp, Homo sapien
ggacactagtgctctggttggtgtt

SEQ ID NO: 2516383 - DNA, 25 bp, Homo sapien
ccacagaggtcaagtgggcagggtt

SEQ ID NO: 2516384 - DNA, 25 bp, Homo sapien
cagaggtcaagtgggcagggttagg

SEQ ID NO: 2516385 - DNA, 25 bp, Homo sapien
cttaggtcccacagaggtcaagtgg

SEQ ID NO: 2516386 - DNA, 25 bp, Homo sapien
ttaggtcccacagaggtcaagtggg

SEQ ID NO: 2516387 - DNA, 25 bp, Homo sapien
cgaagggatttagacttcctactgc

SEQ ID NO: 2516388 - DNA, 25 bp, Homo sapien
gaagggatttagacttcctactgcc

SEQ ID NO: 2516389 - DNA, 25 bp, Homo sapien
tcgaagggatttagacttcctactg

SEQ ID NO: 2516390 - DNA, 25 bp, Homo sapien
catttcgaagggatttagacttcct

SEQ ID NO: 2516391 - DNA, 25 bp, Homo sapien
ctgtaaacacagagaagatgaggcc

SEQ ID NO: 2516392 - DNA, 25 bp, Homo sapien
cccctgcacctgagttactctggta

SEQ ID NO: 2516393 - DNA, 25 bp, Homo sapien
cgcagagcccgtaatagtggtcaga

SEQ ID NO: 2516394 - DNA, 25 bp, Homo sapien
tctggtaggaaaaagcgcagagccc

SEQ ID NO: 2516395 - DNA, 25 bp, Homo sapien
tggcaggaaataaacccatccttct

SEQ ID NO: 2516396 - DNA, 25 bp, Homo sapien
tggtgttcttgttctggatctggtg

SEQ ID NO: 2516397 - DNA, 25 bp, Homo sapien
tggtggttttcagcgcacatgtaag

SEQ ID NO: 2516398 - DNA, 25 bp, Homo sapien
gggtttggagtaggctctgcttggc

SEQ ID NO: 2516399 - DNA, 25 bp, Homo sapien
cttgggagagcagggatggtctgtg

SEQ ID NO: 2516400 - DNA, 25 bp, Homo sapien
cactcctttgtgcttccccttttgc

SEQ ID NO: 2516401 - DNA, 25 bp, Homo sapien
tgtggcagccacattctcactcctt

SEQ ID NO: 2516402 - DNA, 25 bp, Homo sapien
ggatggtctgtgtggcagccacatt

SEQ ID NO: 2516403 - DNA, 25 bp, Homo sapien
cagacctattggattgatcagcagc

SEQ ID NO: 2516404 - DNA, 25 bp, Homo sapien
gagtgcatcatagctcttaggtaca

SEQ ID NO: 2516405 - DNA, 25 bp, Homo sapien
agctctgtggctgagtgcatcatag

SEQ ID NO: 2516406 - DNA, 25 bp, Homo sapien
cagaggatgtctgagtccattttgc

SEQ ID NO: 2516407 - DNA, 25 bp, Homo sapien
gtattggggtggcaccattgaccat

SEQ ID NO: 2516408 - DNA, 25 bp, Homo sapien
ctgctattgaaggtgatgttggtgc

SEQ ID NO: 2516409 - DNA, 25 bp, Homo sapien
gggaataagtcctgctattgaaggt

SEQ ID NO: 2516410 - DNA, 25 bp, Homo sapien
tgcccagtttatggagccacagggg

SEQ ID NO: 2516411 - DNA, 25 bp, Homo sapien
tgcaggcaacaggtttggaggccac

SEQ ID NO: 2516412 - DNA, 25 bp, Homo sapien
caggagcttgccattaagggatgca

SEQ ID NO: 2516413 - DNA, 25 bp, Homo sapien
ctgcatgagccagctgtcagggtaa

SEQ ID NO: 2516414 - DNA, 25 bp, Homo sapien
tgcgagtcctctgtgataatccggg

SEQ ID NO: 2516415 - DNA, 25 bp, Homo sapien
tctattgtgatgagagcgctgggtc

SEQ ID NO: 2516416 - DNA, 25 bp, Homo sapien
agcgctgggtccgttggctgtctct

SEQ ID NO: 2516417 - DNA, 25 bp, Homo sapien
tcagaaccccctgcctctattgtga

SEQ ID NO: 2516418 - DNA, 25 bp, Homo sapien
aagatctttatctttctggttgcat

SEQ ID NO: 2516419 - DNA, 25 bp, Homo sapien
tgaatttgaggagatttgtcttggc

SEQ ID NO: 2516420 - DNA, 25 bp, Homo sapien
tggctcgggcacaggtggtctcaaa

SEQ ID NO: 2516421 - DNA, 25 bp, Homo sapien
aaagggcctgttaccctggagctgc

SEQ ID NO: 2516422 - DNA, 25 bp, Homo sapien
cctgcatcttagcaagcctcagaag

SEQ ID NO: 2516423 - DNA, 25 bp, Homo sapien
cccagctcacaggtggccgcaagct

SEQ ID NO: 2516424 - DNA, 25 bp, Homo sapien
cacccagctcacaggtggccgcaag

SEQ ID NO: 2516425 - DNA, 25 bp, Homo sapien
gtttctaacacatctggctgcttcc

SEQ ID NO: 2516426 - DNA, 25 bp, Homo sapien
cagctcacaggtggccgcaagctct

SEQ ID NO: 2516427 - DNA, 25 bp, Homo sapien
tgcccaattaatgaacaagcattta

SEQ ID NO: 2516428 - DNA, 25 bp, Homo sapien
gtctcaagcggttgcccagactaga

SEQ ID NO: 2516429 - DNA, 25 bp, Homo sapien
cccaattaatgaacaagcatttatt

SEQ ID NO: 2516430 - DNA, 25 bp, Homo sapien
gcccaattaatgaacaagcatttat

SEQ ID NO: 2516431 - DNA, 25 bp, Homo sapien
tttatagagccgtacagcatccccg

SEQ ID NO: 2516432 - DNA, 25 bp, Homo sapien
tggccttaggcaattgctggtctac

SEQ ID NO: 2516433 - DNA, 25 bp, Homo sapien
gccacttttcgggttacagcctcag

SEQ ID NO: 2516434 - DNA, 25 bp, Homo sapien
tgcagcctatgacccagacttgagt

SEQ ID NO: 2516435 - DNA, 25 bp, Homo sapien
tcgttggccccatctggcacagttt

SEQ ID NO: 2516436 - DNA, 25 bp, Homo sapien
aaatgaagatgcctcaccctagctg

SEQ ID NO: 2516437 - DNA, 25 bp, Homo sapien
taggtgccgcatgacccttgtaagt

SEQ ID NO: 2516438 - DNA, 25 bp, Homo sapien
gctggcccgtcccttggctattagg

SEQ ID NO: 2516439 - DNA, 25 bp, Homo sapien
tggacagggatcttatactttcgga

SEQ ID NO: 2516440 - DNA, 25 bp, Homo sapien
ctctaaaagagggaatgggttggct

SEQ ID NO: 2516441 - DNA, 25 bp, Homo sapien
ctttcggaagtaggcatgctgtctg

SEQ ID NO: 2516442 - DNA, 25 bp, Homo sapien
tgctgtctgggcatgtttctgcaga

SEQ ID NO: 2516443 - DNA, 25 bp, Homo sapien
tccagggtaacgtggcgttgaattc

SEQ ID NO: 2516444 - DNA, 25 bp, Homo sapien
cgttgaattccgctgacagaagagg

SEQ ID NO: 2516445 - DNA, 25 bp, Homo sapien
taacgtggcgttgaattccgctgac

SEQ ID NO: 2516446 - DNA, 25 bp, Homo sapien
ttgtccagggtaacgtggcgttgaa

SEQ ID NO: 2516447 - DNA, 25 bp, Homo sapien
gcaaggagctgtccggccagttgtg

SEQ ID NO: 2516448 - DNA, 25 bp, Homo sapien
ccagttgtggattggctcacgggat

SEQ ID NO: 2516449 - DNA, 25 bp, Homo sapien
ctgtccggccagttgtggattggct

SEQ ID NO: 2516450 - DNA, 25 bp, Homo sapien
attggctcacgggatggagaactgc

SEQ ID NO: 2516451 - DNA, 25 bp, Homo sapien
agccaccctcccagcgtgcacctcc

SEQ ID NO: 2516452 - DNA, 25 bp, Homo sapien
gccaccctcccagcgtgcacctcct

SEQ ID NO: 2516453 - DNA, 25 bp, Homo sapien
tgtccatggaagctcctggacaccc

SEQ ID NO: 2516454 - DNA, 25 bp, Homo sapien
ctcctggatatctgtccatggaagc

SEQ ID NO: 2516455 - DNA, 25 bp, Homo sapien
ggactcccgcatgcacttgctgcat

SEQ ID NO: 2516456 - DNA, 25 bp, Homo sapien
ggtggactcccgcatgcacttgctg

SEQ ID NO: 2516457 - DNA, 25 bp, Homo sapien
tgggtggactcccgcatgcacttgc

SEQ ID NO: 2516458 - DNA, 25 bp, Homo sapien
ttccctgcatctgggtggactcccg

SEQ ID NO: 2516459 - DNA, 25 bp, Homo sapien
cgcttatgattccactcggtggcct

SEQ ID NO: 2516460 - DNA, 25 bp, Homo sapien
tcgtctcaggttgccttttgactct

SEQ ID NO: 2516461 - DNA, 25 bp, Homo sapien
tgtctttcctcagccatcttgtaag

SEQ ID NO: 2516462 - DNA, 25 bp, Homo sapien
tcagtgtctaacgtgtggccaatcc

SEQ ID NO: 2516463 - DNA, 25 bp, Homo sapien
tctttctaggggagctttcctgctt

SEQ ID NO: 2516464 - DNA, 25 bp, Homo sapien
ctccctgcagctggcgtggtgctgc

SEQ ID NO: 2516465 - DNA, 25 bp, Homo sapien
tgggcatcctgccaagccagcatgc

SEQ ID NO: 2516466 - DNA, 25 bp, Homo sapien
tggttttcaaatccttgaagcagca

SEQ ID NO: 2516467 - DNA, 25 bp, Homo sapien
gctctgcctgtcatgatcaagctcg

SEQ ID NO: 2516468 - DNA, 25 bp, Homo sapien
ggtgaatggacccaggtaatggctc

SEQ ID NO: 2516469 - DNA, 25 bp, Homo sapien
gatttctttctgagtcccgcatgca

SEQ ID NO: 2516470 - DNA, 25 bp, Homo sapien
cgtcatcatggtggcttcagcaaac

SEQ ID NO: 2516471 - DNA, 25 bp, Homo sapien
ctggaggatgccatcgggtggctgc

SEQ ID NO: 2516472 - DNA, 25 bp, Homo sapien
ctctggaggatgccatcgggtggct

SEQ ID NO: 2516473 - DNA, 25 bp, Homo sapien
tggaggatgccatcgggtggctgct

SEQ ID NO: 2516474 - DNA, 25 bp, Homo sapien
tctggaggatgccatcgggtggctg

SEQ ID NO: 2516475 - DNA, 25 bp, Homo sapien
cttgaaaaccagagctaaacacttg

SEQ ID NO: 2516476 - DNA, 25 bp, Homo sapien
ttgaaaaccagagctaaacacttgc

SEQ ID NO: 2516477 - DNA, 25 bp, Homo sapien
tcttgaaaaccagagctaaacactt

SEQ ID NO: 2516478 - DNA, 25 bp, Homo sapien
caaagttacaacttaggagcagagt

SEQ ID NO: 2516479 - DNA, 25 bp, Homo sapien
ctacatttgaattcacttagtccaa

SEQ ID NO: 2516480 - DNA, 25 bp, Homo sapien
agttacaacttaggagcagagtcat

SEQ ID NO: 2516481 - DNA, 25 bp, Homo sapien
cacttagtccaaccagagtttcaaa

SEQ ID NO: 2516482 - DNA, 25 bp, Homo sapien
aaaaatggcacggacaatgatggta

SEQ ID NO: 2516483 - DNA, 25 bp, Homo sapien
aaggaaagcagctccccgatgagtt

SEQ ID NO: 2516484 - DNA, 25 bp, Homo sapien
taattgtcggcagcgggataattga

SEQ ID NO: 2516485 - DNA, 25 bp, Homo sapien
ccgatgagttgagcccgtgggctcc

SEQ ID NO: 2516486 - DNA, 25 bp, Homo sapien
cagggggccaagattcttttcccag

SEQ ID NO: 2516487 - DNA, 25 bp, Homo sapien
gcagggggccaagattcttttccca

SEQ ID NO: 2516488 - DNA, 25 bp, Homo sapien
taatggaaccctgtatgggtgtcag

SEQ ID NO: 2516489 - DNA, 25 bp, Homo sapien
cagaatgtaatggaaccctgtatgg

SEQ ID NO: 2516490 - DNA, 25 bp, Homo sapien
ggtctcgagcaagccgtagatatgt

SEQ ID NO: 2516491 - DNA, 25 bp, Homo sapien
cccagttgcagaatgtaatggaacc

SEQ ID NO: 2516492 - DNA, 25 bp, Homo sapien
ctccagtgtggtgtgtcgggaacat

SEQ ID NO: 2516493 - DNA, 25 bp, Homo sapien
gatggctggacttgcattcttgagg

SEQ ID NO: 2516494 - DNA, 25 bp, Homo sapien
cttcacgctctggactccgatggct

SEQ ID NO: 2516495 - DNA, 25 bp, Homo sapien
cttgctcaataagcatctgtgtctg

SEQ ID NO: 2516496 - DNA, 25 bp, Homo sapien
ctggacccgaataaagacacgcttt

SEQ ID NO: 2516497 - DNA, 25 bp, Homo sapien
tggacccgaataaagacacgcttta

SEQ ID NO: 2516498 - DNA, 25 bp, Homo sapien
agctgaatggctgggtttgatggca

SEQ ID NO: 2516499 - DNA, 25 bp, Homo sapien
gagccaccgtcttgctcttcagccc

SEQ ID NO: 2516500 - DNA, 25 bp, Homo sapien
aaaacatggctatggtagtttcttc

SEQ ID NO: 2516501 - DNA, 25 bp, Homo sapien
tgcggcattgccattgcccacgggc

SEQ ID NO: 2516502 - DNA, 25 bp, Homo sapien
gagtctagctccacctgcaatcttg

SEQ ID NO: 2516503 - DNA, 25 bp, Homo sapien
actgagtctagctccacctgcaatc

SEQ ID NO: 2516504 - DNA, 25 bp, Homo sapien
gtctagctccacctgcaatcttgat

SEQ ID NO: 2516505 - DNA, 25 bp, Homo sapien
tgagtctagctccacctgcaatctt

SEQ ID NO: 2516506 - DNA, 25 bp, Homo sapien
caggattagaacatggaatcttggc

SEQ ID NO: 2516507 - DNA, 25 bp, Homo sapien
gtcaggattagaacatggaatcttg

SEQ ID NO: 2516508 - DNA, 25 bp, Homo sapien
tcaggattagaacatggaatcttgg

SEQ ID NO: 2516509 - DNA, 25 bp, Homo sapien
cctgagcctcgtttctcagtctgag

SEQ ID NO: 2516510 - DNA, 25 bp, Homo sapien
ttctcagtctgagatgaatcagtga

SEQ ID NO: 2516511 - DNA, 25 bp, Homo sapien
aacatcctgagcctcgtttctcagt

SEQ ID NO: 2516512 - DNA, 25 bp, Homo sapien
catcctgagcctcgtttctcagtct

SEQ ID NO: 2516513 - DNA, 25 bp, Homo sapien
tcaaattcagtatccaaggctccac

SEQ ID NO: 2516514 - DNA, 25 bp, Homo sapien
ggaataataccagtgtcctgctgca

SEQ ID NO: 2516515 - DNA, 25 bp, Homo sapien
tccttccgttgttcttgggactctg

SEQ ID NO: 2516516 - DNA, 25 bp, Homo sapien
cctctgtctgcgtgttgaattctag

SEQ ID NO: 2516517 - DNA, 25 bp, Homo sapien
acagtggatggccaacaaatgtttc

SEQ ID NO: 2516518 - DNA, 25 bp, Homo sapien
actctgaaatacagtggatggccaa

SEQ ID NO: 2516519 - DNA, 25 bp, Homo sapien
aatacagtggatggccaacaaatgt

SEQ ID NO: 2516520 - DNA, 25 bp, Homo sapien
tgaaatacagtggatggccaacaaa

SEQ ID NO: 2516521 - DNA, 25 bp, Homo sapien
tgtccgatggcagcaacccccatag

SEQ ID NO: 2516522 - DNA, 25 bp, Homo sapien
cgatggcagcaacccccatagatgt

SEQ ID NO: 2516523 - DNA, 25 bp, Homo sapien
gcagcaacccccatagatgtatggg

SEQ ID NO: 2516524 - DNA, 25 bp, Homo sapien
cagtctgtccgatggcagcaacccc

SEQ ID NO: 2516525 - DNA, 25 bp, Homo sapien
agcattccttctgacccgtcagtga

SEQ ID NO: 2516526 - DNA, 25 bp, Homo sapien
ggcattgggacactgaagttagcaa

SEQ ID NO: 2516527 - DNA, 25 bp, Homo sapien
cttgtaggcgtgtggcattgggaca

SEQ ID NO: 2516528 - DNA, 25 bp, Homo sapien
tagcaaatcggccagtgactcatca

SEQ ID NO: 2516529 - DNA, 25 bp, Homo sapien
tgtccagctgtcttgtggcaagtgt

SEQ ID NO: 2516530 - DNA, 25 bp, Homo sapien
gggcccggctgtccagctgtcttgt

SEQ ID NO: 2516531 - DNA, 25 bp, Homo sapien
tcagctctggcttgcggagtaatgg

SEQ ID NO: 2516532 - DNA, 25 bp, Homo sapien
ggctcgtgtgagtgatgtgtgtgca

SEQ ID NO: 2516533 - DNA, 25 bp, Homo sapien
tggaaccaattcaggccccggagcc

SEQ ID NO: 2516534 - DNA, 25 bp, Homo sapien
gcctggaaccaattcaggccccgga

SEQ ID NO: 2516535 - DNA, 25 bp, Homo sapien
gaccgagggcatatacgtttgtctg

SEQ ID NO: 2516536 - DNA, 25 bp, Homo sapien
ggagaccgagggcatatacgtttgt

SEQ ID NO: 2516537 - DNA, 25 bp, Homo sapien
gctgtgctctgagagagagtcctct

SEQ ID NO: 2516538 - DNA, 25 bp, Homo sapien
cagtaaagactagaaagttggttga

SEQ ID NO: 2516539 - DNA, 25 bp, Homo sapien
ctcaggtgcagaagacagtaaagac

SEQ ID NO: 2516540 - DNA, 25 bp, Homo sapien
ttagccgctgatccagcgcttggct

SEQ ID NO: 2516541 - DNA, 25 bp, Homo sapien
gtggtcaagccaagggttgttgact

SEQ ID NO: 2516542 - DNA, 25 bp, Homo sapien
cttacacatcagaggcactaagtaa

SEQ ID NO: 2516543 - DNA, 25 bp, Homo sapien
taaaagcaccttacacatcagaggc

SEQ ID NO: 2516544 - DNA, 25 bp, Homo sapien
tgttgactgaattcgtaaaagcacc

SEQ ID NO: 2516545 - DNA, 25 bp, Homo sapien
cctgcatggcatcagatgggccttc

SEQ ID NO: 2516546 - DNA, 25 bp, Homo sapien
tcacacttgaatttggcaacagtgt

SEQ ID NO: 2516547 - DNA, 25 bp, Homo sapien
tgtgttttctgtgcatcacttccct

SEQ ID NO: 2516548 - DNA, 25 bp, Homo sapien
tggcaacagtgtggttgtgttttct

SEQ ID NO: 2516549 - DNA, 25 bp, Homo sapien
cagctgctccgacgcatgcagtgct

SEQ ID NO: 2516550 - DNA, 25 bp, Homo sapien
agcacagctgctccgacgcatgcag

SEQ ID NO: 2516551 - DNA, 25 bp, Homo sapien
tgctccgacgcatgcagtgctccct

SEQ ID NO: 2516552 - DNA, 25 bp, Homo sapien
gctccgacgcatgcagtgctccctg

SEQ ID NO: 2516553 - DNA, 25 bp, Homo sapien
cagagtaacttggacgtgacgcttc

SEQ ID NO: 2516554 - DNA, 25 bp, Homo sapien
tgtaaataaatgatgtgaccctccc

SEQ ID NO: 2516555 - DNA, 25 bp, Homo sapien
tggcattgccacgtacagagtaact

SEQ ID NO: 2516556 - DNA, 25 bp, Homo sapien
tggaggagccaacccgatgaataac

SEQ ID NO: 2516557 - DNA, 25 bp, Homo sapien
taggcagtgctaccactcaactgtc

SEQ ID NO: 2516558 - DNA, 25 bp, Homo sapien
gcagtgctaccactcaactgtctgt

SEQ ID NO: 2516559 - DNA, 25 bp, Homo sapien
agtgctaccactcaactgtctgtta

SEQ ID NO: 2516560 - DNA, 25 bp, Homo sapien
ggcagtgctaccactcaactgtctg

SEQ ID NO: 2516561 - DNA, 25 bp, Homo sapien
caattcgacgtttctccaagggcgg

SEQ ID NO: 2516562 - DNA, 25 bp, Homo sapien
ccagcagattggacgccgttcagat

SEQ ID NO: 2516563 - DNA, 25 bp, Homo sapien
ttcagatctaactcgagcctggcgc

SEQ ID NO: 2516564 - DNA, 25 bp, Homo sapien
gcctggcgccctttgcagacttgga

SEQ ID NO: 2516565 - DNA, 25 bp, Homo sapien
tgggaactgctgctggttagaggag

SEQ ID NO: 2516566 - DNA, 25 bp, Homo sapien
caggttctgcccaggcattctggga

SEQ ID NO: 2516567 - DNA, 25 bp, Homo sapien
tgggacccagctgccttgaccgtca

SEQ ID NO: 2516568 - DNA, 25 bp, Homo sapien
gtcactgcttgtggcctttctctgc

SEQ ID NO: 2516569 - DNA, 25 bp, Homo sapien
ctttagccagaagagtctgagaatg

SEQ ID NO: 2516570 - DNA, 25 bp, Homo sapien
gccagaagagtctgagaatgaaggc

SEQ ID NO: 2516571 - DNA, 25 bp, Homo sapien
tttagccagaagagtctgagaatga

SEQ ID NO: 2516572 - DNA, 25 bp, Homo sapien
agaagagtctgagaatgaaggccat

SEQ ID NO: 2516573 - DNA, 25 bp, Homo sapien
aaggctccagcacgatgaccctgta

SEQ ID NO: 2516574 - DNA, 25 bp, Homo sapien
cagaaggctccagcacgatgaccct

SEQ ID NO: 2516575 - DNA, 25 bp, Homo sapien
gctccagcacgatgaccctgtatta

SEQ ID NO: 2516576 - DNA, 25 bp, Homo sapien
ggctccagcacgatgaccctgtatt

SEQ ID NO: 2516577 - DNA, 25 bp, Homo sapien
tgccccagtgagcatcggttgaaaa

SEQ ID NO: 2516578 - DNA, 25 bp, Homo sapien
gccttacggagaggagatgacaaag

SEQ ID NO: 2516579 - DNA, 25 bp, Homo sapien
cttagtagcttcatagaatgtggcc

SEQ ID NO: 2516580 - DNA, 25 bp, Homo sapien
agtgtgtcattttcaccttagtagc

SEQ ID NO: 2516581 - DNA, 25 bp, Homo sapien
gtgtatagccaaatgtaaagaaatt

SEQ ID NO: 2516582 - DNA, 25 bp, Homo sapien
aaacggctctgtatgaagataaaag

SEQ ID NO: 2516583 - DNA, 25 bp, Homo sapien
tcaaaacggctctgtatgaagataa

SEQ ID NO: 2516584 - DNA, 25 bp, Homo sapien
aaatttttcaaaacggctctgtatg

SEQ ID NO: 2516585 - DNA, 25 bp, Homo sapien
gccgacttggctgactcctgaggcc

SEQ ID NO: 2516586 - DNA, 25 bp, Homo sapien
aaggatgccgtgctgggccactctt

SEQ ID NO: 2516587 - DNA, 25 bp, Homo sapien
tcccaaaggagtcctgctggtgaag

SEQ ID NO: 2516588 - DNA, 25 bp, Homo sapien
gggccactcttctgtttgccgactt

SEQ ID NO: 2516589 - DNA, 25 bp, Homo sapien
ctgctagtagaggaccatgggacct

SEQ ID NO: 2516590 - DNA, 25 bp, Homo sapien
gcttgtttttcccaccatagtggtg

SEQ ID NO: 2516591 - DNA, 25 bp, Homo sapien
tttttcccaccatagtggtgatctg

SEQ ID NO: 2516592 - DNA, 25 bp, Homo sapien
agtagaggaccatgggaccttggtc

SEQ ID NO: 2516593 - DNA, 25 bp, Homo sapien
gtgtcgcgcctttctctcgttgaga

SEQ ID NO: 2516594 - DNA, 25 bp, Homo sapien
ttagatccgcgtttaatggacagcc

SEQ ID NO: 2516595 - DNA, 25 bp, Homo sapien
tatcgctcagggatgaaagggttct

SEQ ID NO: 2516596 - DNA, 25 bp, Homo sapien
taaatgagctcgtgtgtgtcgcgcc

SEQ ID NO: 2516597 - DNA, 25 bp, Homo sapien
gtgccaagggctctgtcatatttag

SEQ ID NO: 2516598 - DNA, 25 bp, Homo sapien
tatttagccctttgaatatcagccc

SEQ ID NO: 2516599 - DNA, 25 bp, Homo sapien
atatcagccccagagccaatgtcgc

SEQ ID NO: 2516600 - DNA, 25 bp, Homo sapien
gagtcacaccgtccttcttctctgg

SEQ ID NO: 2516601 - DNA, 25 bp, Homo sapien
cctcttagctgggacccctctttat

SEQ ID NO: 2516602 - DNA, 25 bp, Homo sapien
gctggcgttatcagcatttttcaag

SEQ ID NO: 2516603 - DNA, 25 bp, Homo sapien
gactggctggcgttatcagcatttt

SEQ ID NO: 2516604 - DNA, 25 bp, Homo sapien
cagggcaaatgactggctggcgtta

SEQ ID NO: 2516605 - DNA, 25 bp, Homo sapien
cccagggaacactgtgtcccagctg

SEQ ID NO: 2516606 - DNA, 25 bp, Homo sapien
tgtcccagctgcttctacgtaacaa

SEQ ID NO: 2516607 - DNA, 25 bp, Homo sapien
aatccaggccatggctttccttgtc

SEQ ID NO: 2516608 - DNA, 25 bp, Homo sapien
acgtaacaatccaggccatggcttt

SEQ ID NO: 2516609 - DNA, 25 bp, Homo sapien
acccctgtcccctgaagataaatga

SEQ ID NO: 2516610 - DNA, 25 bp, Homo sapien
tcaaacagtgtgacgtgctgcggtc

SEQ ID NO: 2516611 - DNA, 25 bp, Homo sapien
ggaacaccacgagctttctgttgct

SEQ ID NO: 2516612 - DNA, 25 bp, Homo sapien
aacccacagacgtttggcctttgag

SEQ ID NO: 2516613 - DNA, 25 bp, Homo sapien
gctggtcctcggctaagctggcttc

SEQ ID NO: 2516614 - DNA, 25 bp, Homo sapien
gttcacctctcctagtgagcctgga

SEQ ID NO: 2516615 - DNA, 25 bp, Homo sapien
atgtgccccgcagcgtttgctccag

SEQ ID NO: 2516616 - DNA, 25 bp, Homo sapien
aaaatgacagcacgtcttatagacg

SEQ ID NO: 2516617 - DNA, 25 bp, Homo sapien
aagtgtgatgcccaaactcagcact

SEQ ID NO: 2516618 - DNA, 25 bp, Homo sapien
caaactaagtgtgatgcccaaactc

SEQ ID NO: 2516619 - DNA, 25 bp, Homo sapien
gaagcacaaactaagtgtgatgccc

SEQ ID NO: 2516620 - DNA, 25 bp, Homo sapien
ggctactgggaagcacaaactaagt

SEQ ID NO: 2516621 - DNA, 25 bp, Homo sapien
tagtatattttgtatattgactgaa

SEQ ID NO: 2516622 - DNA, 25 bp, Homo sapien
tatattttgtatattgactgaactg

SEQ ID NO: 2516623 - DNA, 25 bp, Homo sapien
attttgtatattgactgaactgcag

SEQ ID NO: 2516624 - DNA, 25 bp, Homo sapien
tattttgtatattgactgaactgca

SEQ ID NO: 2516625 - DNA, 25 bp, Homo sapien
gctatggtggacgtagcctggcacc

SEQ ID NO: 2516626 - DNA, 25 bp, Homo sapien
gaaacacagtgtaagtgcctctgta

SEQ ID NO: 2516627 - DNA, 25 bp, Homo sapien
cgtcatcgtttctgcttgtggaaga

SEQ ID NO: 2516628 - DNA, 25 bp, Homo sapien
gaattgtgcctttgcagacgttcaa

SEQ ID NO: 2516629 - DNA, 25 bp, Homo sapien
tagtctttccctccaccggtggagc

SEQ ID NO: 2516630 - DNA, 25 bp, Homo sapien
gaacagttgctggaggactccctta

SEQ ID NO: 2516631 - DNA, 25 bp, Homo sapien
tgctggaggactcccttagtctttc

SEQ ID NO: 2516632 - DNA, 25 bp, Homo sapien
gggctttctgggccgctccttgccc

SEQ ID NO: 2516633 - DNA, 25 bp, Homo sapien
tataggccaattcttatcacccttt

SEQ ID NO: 2516634 - DNA, 25 bp, Homo sapien
cacctaatacttgcaatcgtgggaa

SEQ ID NO: 2516635 - DNA, 25 bp, Homo sapien
tcaaaagtgtacatgatacctcaat

SEQ ID NO: 2516636 - DNA, 25 bp, Homo sapien
tggagcctagctttcaaccctggac

SEQ ID NO: 2516637 - DNA, 25 bp, Homo sapien
gattggttttcttggagagtgggca

SEQ ID NO: 2516638 - DNA, 25 bp, Homo sapien
ttttcttggagagtgggcagtgggt

SEQ ID NO: 2516639 - DNA, 25 bp, Homo sapien
cagggattggttttcttggagagtg

SEQ ID NO: 2516640 - DNA, 25 bp, Homo sapien
gttttcttggagagtgggcagtggg

SEQ ID NO: 2516641 - DNA, 25 bp, Homo sapien
aatccctttgtgtccatctcttgag

SEQ ID NO: 2516642 - DNA, 25 bp, Homo sapien
atcactcaccagactcaagcaggac

SEQ ID NO: 2516643 - DNA, 25 bp, Homo sapien
cctatggtgaataggcctgagccaa

SEQ ID NO: 2516644 - DNA, 25 bp, Homo sapien
cagaccacacggagctcttcagtct

SEQ ID NO: 2516645 - DNA, 25 bp, Homo sapien
gacactggatctgccgttgagcata

SEQ ID NO: 2516646 - DNA, 25 bp, Homo sapien
gtgaagtccatatttgtacatcccc

SEQ ID NO: 2516647 - DNA, 25 bp, Homo sapien
caaaattgggtggtcttgtaggcca

SEQ ID NO: 2516648 - DNA, 25 bp, Homo sapien
gcagagtccacgcttgaagcagaca

SEQ ID NO: 2516649 - DNA, 25 bp, Homo sapien
caccagtgtaattgtggataagtgg

SEQ ID NO: 2516650 - DNA, 25 bp, Homo sapien
ttttgtctggtccaccaagctgcct

SEQ ID NO: 2516651 - DNA, 25 bp, Homo sapien
tggcatttttgtctggtccaccaag

SEQ ID NO: 2516652 - DNA, 25 bp, Homo sapien
caccaagctgccttagttcaccagt

SEQ ID NO: 2516653 - DNA, 25 bp, Homo sapien
gtgagcaaggtccaccaggtgggag

SEQ ID NO: 2516654 - DNA, 25 bp, Homo sapien
taagtagcattacactggctgggca

SEQ ID NO: 2516655 - DNA, 25 bp, Homo sapien
tctgcggagagtaggttgggtttag

SEQ ID NO: 2516656 - DNA, 25 bp, Homo sapien
tgggcaggtagtcaccctcatcctc

SEQ ID NO: 2516657 - DNA, 25 bp, Homo sapien
gactggctggtgtcagctgacagcg

SEQ ID NO: 2516658 - DNA, 25 bp, Homo sapien
agactggctggtgtcagctgacagc

SEQ ID NO: 2516659 - DNA, 25 bp, Homo sapien
ctgtcagactggctggtgtcagctg

SEQ ID NO: 2516660 - DNA, 25 bp, Homo sapien
tggctggtgtcagctgacagcggag

SEQ ID NO: 2516661 - DNA, 25 bp, Homo sapien
ttcccagaagggctctacaaggctc

SEQ ID NO: 2516662 - DNA, 25 bp, Homo sapien
tacaaggctcctgggttgcagctgc

SEQ ID NO: 2516663 - DNA, 25 bp, Homo sapien
tcgtccacactgttcatctctagga

SEQ ID NO: 2516664 - DNA, 25 bp, Homo sapien
gccaggttgaatccaaggccaactt

SEQ ID NO: 2516665 - DNA, 25 bp, Homo sapien
tgctccacttacgagctgtcttcct

SEQ ID NO: 2516666 - DNA, 25 bp, Homo sapien
tgtccgtgctccacttacgagctgt

SEQ ID NO: 2516667 - DNA, 25 bp, Homo sapien
atttgctgtccgtgctccacttacg

SEQ ID NO: 2516668 - DNA, 25 bp, Homo sapien
ccacttacgagctgtcttcctcagg

SEQ ID NO: 2516669 - DNA, 25 bp, Homo sapien
cttgtttatctgtgtgccttgacat

SEQ ID NO: 2516670 - DNA, 25 bp, Homo sapien
ttcttgccctatctctgagtctcct

SEQ ID NO: 2516671 - DNA, 25 bp, Homo sapien
cattagaaatagaccttcttgccct

SEQ ID NO: 2516672 - DNA, 25 bp, Homo sapien
tcacattagaaatagaccttcttgc

SEQ ID NO: 2516673 - DNA, 25 bp, Homo sapien
gaccttcttgccctatctctgagtc

SEQ ID NO: 2516674 - DNA, 25 bp, Homo sapien
tgcttttgacgttgtaaggtaggag

SEQ ID NO: 2516675 - DNA, 25 bp, Homo sapien
agccttctgatgatgccatgatggc

SEQ ID NO: 2516676 - DNA, 25 bp, Homo sapien
tgaggaggggaaccctgcttttgac

SEQ ID NO: 2516677 - DNA, 25 bp, Homo sapien
gcggggggcgctttgagccttctga

SEQ ID NO: 2516678 - DNA, 25 bp, Homo sapien
tagatcactggcggagcaccaggaa

SEQ ID NO: 2516679 - DNA, 25 bp, Homo sapien
ctagatcactggcggagcaccagga

SEQ ID NO: 2516680 - DNA, 25 bp, Homo sapien
gaatatggtgaggtctgaaagcccc

SEQ ID NO: 2516681 - DNA, 25 bp, Homo sapien
tcccttaggtgcaagaaagcgcagt

SEQ ID NO: 2516682 - DNA, 25 bp, Homo sapien
gggctgggtcatccgagacatcatc

SEQ ID NO: 2516683 - DNA, 25 bp, Homo sapien
gaaagccccacagttagcgggaaga

SEQ ID NO: 2516684 - DNA, 25 bp, Homo sapien
gttggaggttcctgtgggacattcc

SEQ ID NO: 2516685 - DNA, 25 bp, Homo sapien
catgggcaatgtccaacgggaaggt

SEQ ID NO: 2516686 - DNA, 25 bp, Homo sapien
agtgaccactctcagacattccaag

SEQ ID NO: 2516687 - DNA, 25 bp, Homo sapien
aggttcctgtgggacattccatggg

SEQ ID NO: 2516688 - DNA, 25 bp, Homo sapien
tcgcctctggtataaatcctccctt

SEQ ID NO: 2516689 - DNA, 25 bp, Homo sapien
tctcgcctctggtataaatcctccc

SEQ ID NO: 2516690 - DNA, 25 bp, Homo sapien
gcttctcgcctctggtataaatcct

SEQ ID NO: 2516691 - DNA, 25 bp, Homo sapien
ttctcgcctctggtataaatcctcc

SEQ ID NO: 2516692 - DNA, 25 bp, Homo sapien
cagagaatgccacttagtgtataaa

SEQ ID NO: 2516693 - DNA, 25 bp, Homo sapien
gaccggcctgccctgtcattttggg

SEQ ID NO: 2516694 - DNA, 25 bp, Homo sapien
aattatgtctgctacacttcctttc

SEQ ID NO: 2516695 - DNA, 25 bp, Homo sapien
cgccctgctggaccggtgtaattat

SEQ ID NO: 2516696 - DNA, 25 bp, Homo sapien
tgcataactggcagtcactggactg

SEQ ID NO: 2516697 - DNA, 25 bp, Homo sapien
aggccaaggatggagctgccaccag

SEQ ID NO: 2516698 - DNA, 25 bp, Homo sapien
ctgtggcctgtttgcataactggca

SEQ ID NO: 2516699 - DNA, 25 bp, Homo sapien
tggactgattcaggccaaggatgga

SEQ ID NO: 2516700 - DNA, 25 bp, Homo sapien
tctgaagctcatccagggcaaagcg

SEQ ID NO: 2516701 - DNA, 25 bp, Homo sapien
cagtctgaagctcatccagggcaaa

SEQ ID NO: 2516702 - DNA, 25 bp, Homo sapien
tgaagctcatccagggcaaagcggg

SEQ ID NO: 2516703 - DNA, 25 bp, Homo sapien
aagctcatccagggcaaagcgggac

SEQ ID NO: 2516704 - DNA, 25 bp, Homo sapien
taataaaatgggtcactcacttctt

SEQ ID NO: 2516705 - DNA, 25 bp, Homo sapien
tagtagggtcactggcctttaaaga

SEQ ID NO: 2516706 - DNA, 25 bp, Homo sapien
gagctctgaaatcaggccagcccag

SEQ ID NO: 2516707 - DNA, 25 bp, Homo sapien
cataggaatgttatggcaccacaca

SEQ ID NO: 2516708 - DNA, 25 bp, Homo sapien
tctgggccccgggtctgtgtccctg

SEQ ID NO: 2516709 - DNA, 25 bp, Homo sapien
tgtatcttcatgtcctcggccatgg

SEQ ID NO: 2516710 - DNA, 25 bp, Homo sapien
cactatgattgagaatgggccgtcc

SEQ ID NO: 2516711 - DNA, 25 bp, Homo sapien
gaagccgcagagatgtctgacttcc

SEQ ID NO: 2516712 - DNA, 25 bp, Homo sapien
tcggccatggcctaagaagccgcag

SEQ ID NO: 2516713 - DNA, 25 bp, Homo sapien
gcagaacccgctcatgtaaaagcga

SEQ ID NO: 2516714 - DNA, 25 bp, Homo sapien
gacaaatgtgtttggcgttcactgc

SEQ ID NO: 2516715 - DNA, 25 bp, Homo sapien
gcgttcactgcagaacccgctcatg

SEQ ID NO: 2516716 - DNA, 25 bp, Homo sapien
cgctcatgtaaaagcgacgctcaat

SEQ ID NO: 2516717 - DNA, 25 bp, Homo sapien
cttgggggctgatccagaggccaac

SEQ ID NO: 2516718 - DNA, 25 bp, Homo sapien
tgggggctgatccagaggccaacac

SEQ ID NO: 2516719 - DNA, 25 bp, Homo sapien
ctggcttgggggctgatccagaggc

SEQ ID NO: 2516720 - DNA, 25 bp, Homo sapien
ggggctgatccagaggccaacacca

SEQ ID NO: 2516721 - DNA, 25 bp, Homo sapien
aaatccttcgtagggaaggacagct

SEQ ID NO: 2516722 - DNA, 25 bp, Homo sapien
gaaataggatgggtcgtccttgtct

SEQ ID NO: 2516723 - DNA, 25 bp, Homo sapien
gatgatgctgcgagcagcatagtga

SEQ ID NO: 2516724 - DNA, 25 bp, Homo sapien
tagaagtgaatactgcaacactgtc

SEQ ID NO: 2516725 - DNA, 25 bp, Homo sapien
tgaaaacctcacattcggagcaggc

SEQ ID NO: 2516726 - DNA, 25 bp, Homo sapien
gagcaacagcagaaggtccatgacc

SEQ ID NO: 2516727 - DNA, 25 bp, Homo sapien
tactaggccctgaagatagagcgtt

SEQ ID NO: 2516728 - DNA, 25 bp, Homo sapien
tccaactgatgggtaatgtctgcct

SEQ ID NO: 2516729 - DNA, 25 bp, Homo sapien
gaaatccacttgtgaagtgtgcctg

SEQ ID NO: 2516730 - DNA, 25 bp, Homo sapien
gaaagctctagatgattcccgcagc

SEQ ID NO: 2516731 - DNA, 25 bp, Homo sapien
tgcatgcttagctggagaaaagtac

SEQ ID NO: 2516732 - DNA, 25 bp, Homo sapien
tttaaagaccaggtacagccagggc

SEQ ID NO: 2516733 - DNA, 25 bp, Homo sapien
tcaaatctgccttgcccctgatgga

SEQ ID NO: 2516734 - DNA, 25 bp, Homo sapien
cttgtgcttctcatattttattgtc

SEQ ID NO: 2516735 - DNA, 25 bp, Homo sapien
tcaggaatctagttttatcttgtgc

SEQ ID NO: 2516736 - DNA, 25 bp, Homo sapien
gggttttcatgtaattcaaatctgc

SEQ ID NO: 2516737 - DNA, 25 bp, Homo sapien
aggattgagagggtatggagccctt

SEQ ID NO: 2516738 - DNA, 25 bp, Homo sapien
aagaggattgagagggtatggagcc

SEQ ID NO: 2516739 - DNA, 25 bp, Homo sapien
gagggaagaggattgagagggtatg

SEQ ID NO: 2516740 - DNA, 25 bp, Homo sapien
ttgagagggtatggagcccttccaa

SEQ ID NO: 2516741 - DNA, 25 bp, Homo sapien
tgccttaggagtagacaccagggct

SEQ ID NO: 2516742 - DNA, 25 bp, Homo sapien
ggcaggaatggcaccaacaggagta

SEQ ID NO: 2516743 - DNA, 25 bp, Homo sapien
tctgctatgtgcaacattccatggc

SEQ ID NO: 2516744 - DNA, 25 bp, Homo sapien
aacattccatggcttcaattcaagg

SEQ ID NO: 2516745 - DNA, 25 bp, Homo sapien
ctaccactcgctcctgcagaaatag

SEQ ID NO: 2516746 - DNA, 25 bp, Homo sapien
accactcgctcctgcagaaatagct

SEQ ID NO: 2516747 - DNA, 25 bp, Homo sapien
actcgctcctgcagaaatagctcac

SEQ ID NO: 2516748 - DNA, 25 bp, Homo sapien
cactcgctcctgcagaaatagctca

SEQ ID NO: 2516749 - DNA, 25 bp, Homo sapien
gcagtttctgttgacgccatcaggg

SEQ ID NO: 2516750 - DNA, 25 bp, Homo sapien
tctggataagggtgagctctgatgc

SEQ ID NO: 2516751 - DNA, 25 bp, Homo sapien
cagcgagcgcggtctcagtgaagga

SEQ ID NO: 2516752 - DNA, 25 bp, Homo sapien
gacctgtggattctccgtggccact

SEQ ID NO: 2516753 - DNA, 25 bp, Homo sapien
tttatatgatgcacatcattgtgtg

SEQ ID NO: 2516754 - DNA, 25 bp, Homo sapien
tatatgatgcacatcattgtgtgca

SEQ ID NO: 2516755 - DNA, 25 bp, Homo sapien
tatgatgcacatcattgtgtgcata

SEQ ID NO: 2516756 - DNA, 25 bp, Homo sapien
cttcctggtgatttatatgatgcac

SEQ ID NO: 2516757 - DNA, 25 bp, Homo sapien
gtccaatcaccatgtgatatctgct

SEQ ID NO: 2516758 - DNA, 25 bp, Homo sapien
tctgtgagaggactcacggcactgg

SEQ ID NO: 2516759 - DNA, 25 bp, Homo sapien
gagccaaagatgagtcattagattt

SEQ ID NO: 2516760 - DNA, 25 bp, Homo sapien
ttaacttggccacagcagatcagaa

SEQ ID NO: 2516761 - DNA, 25 bp, Homo sapien
gctctaaccaaggttgggtagcaaa

SEQ ID NO: 2516762 - DNA, 25 bp, Homo sapien
tctgttgcatacttacgtgaaggct

SEQ ID NO: 2516763 - DNA, 25 bp, Homo sapien
taatcggcgaattggtgactaatgt

SEQ ID NO: 2516764 - DNA, 25 bp, Homo sapien
catgccttttagacatttggttgct

SEQ ID NO: 2516765 - DNA, 25 bp, Homo sapien
tacgattcaaagcttggttgggcac

SEQ ID NO: 2516766 - DNA, 25 bp, Homo sapien
tagtatgcctgggatacagcacatc

SEQ ID NO: 2516767 - DNA, 25 bp, Homo sapien
tgggtcccacgtagaaataagcctg

SEQ ID NO: 2516768 - DNA, 25 bp, Homo sapien
gaacaataattgaggtaacccacca

SEQ ID NO: 2516769 - DNA, 25 bp, Homo sapien
gaagattaccctggcaaaagtcaaa

SEQ ID NO: 2516770 - DNA, 25 bp, Homo sapien
gaatcagggccaactgaagattacc

SEQ ID NO: 2516771 - DNA, 25 bp, Homo sapien
catttattctatgaaaagcagcacg

SEQ ID NO: 2516772 - DNA, 25 bp, Homo sapien
tcttccttggtaacttgagagcagt

SEQ ID NO: 2516773 - DNA, 25 bp, Homo sapien
taacagagctgtcccgagcagatca

SEQ ID NO: 2516774 - DNA, 25 bp, Homo sapien
gagcagatcacccaatgctgttagg

SEQ ID NO: 2516775 - DNA, 25 bp, Homo sapien
tcagcaatccacagcaaggtaaata

SEQ ID NO: 2516776 - DNA, 25 bp, Homo sapien
tccagaagtgatggaccatccagtc

SEQ ID NO: 2516777 - DNA, 25 bp, Homo sapien
tttcaaacccctgaagcagcaaaat

SEQ ID NO: 2516778 - DNA, 25 bp, Homo sapien
ttttcaaacccctgaagcagcaaaa

SEQ ID NO: 2516779 - DNA, 25 bp, Homo sapien
caagtaggccgtgggtgtgaggcat

SEQ ID NO: 2516780 - DNA, 25 bp, Homo sapien
gctatcattttagctctaacacctt

SEQ ID NO: 2516781 - DNA, 25 bp, Homo sapien
gaagacatgtacctattccaaaggc

SEQ ID NO: 2516782 - DNA, 25 bp, Homo sapien
agagtggcttgtccaaacgtaggaa

SEQ ID NO: 2516783 - DNA, 25 bp, Homo sapien
taactagcgtacacactaggtacag

SEQ ID NO: 2516784 - DNA, 25 bp, Homo sapien
taactgggacacactagataactag

SEQ ID NO: 2516785 - DNA, 25 bp, Homo sapien
gtaacacactaggacggtacagcca

SEQ ID NO: 2516786 - DNA, 25 bp, Homo sapien
ggtacagccacgacatcactaggtg

SEQ ID NO: 2516787 - DNA, 25 bp, Homo sapien
gagctcggtgtaaatagtcatatga

SEQ ID NO: 2516788 - DNA, 25 bp, Homo sapien
gccactccacaatgaatacatatat

SEQ ID NO: 2516789 - DNA, 25 bp, Homo sapien
aacctgaaggattttagacactgga

SEQ ID NO: 2516790 - DNA, 25 bp, Homo sapien
tctggcacagaatataagtatcata

SEQ ID NO: 2516791 - DNA, 25 bp, Homo sapien
ctcacaggaatcaagcatgctgtgc

SEQ ID NO: 2516792 - DNA, 25 bp, Homo sapien
aggaatcaagcatgctgtgcctcca

SEQ ID NO: 2516793 - DNA, 25 bp, Homo sapien
agcatgctgtgcctccaataaagca

SEQ ID NO: 2516794 - DNA, 25 bp, Homo sapien
gaatcaagcatgctgtgcctccaat

SEQ ID NO: 2516795 - DNA, 25 bp, Homo sapien
acttgacttcagtaggcattgattc

SEQ ID NO: 2516796 - DNA, 25 bp, Homo sapien
ggcattgattcggtatggatcctgt

SEQ ID NO: 2516797 - DNA, 25 bp, Homo sapien
ggaatggattcctacttgacttcag

SEQ ID NO: 2516798 - DNA, 25 bp, Homo sapien
gaatatccttctggggcaatatgcc

SEQ ID NO: 2516799 - DNA, 25 bp, Homo sapien
cagtattaagacaatggtgatgacc

SEQ ID NO: 2516800 - DNA, 25 bp, Homo sapien
agtattaagacaatggtgatgacca

SEQ ID NO: 2516801 - DNA, 25 bp, Homo sapien
gtattaagacaatggtgatgaccat

SEQ ID NO: 2516802 - DNA, 25 bp, Homo sapien
taaaaggaaggccagcaatgcccat

SEQ ID NO: 2516803 - DNA, 25 bp, Homo sapien
tagactacgagaccttgagcacaga

SEQ ID NO: 2516804 - DNA, 25 bp, Homo sapien
ggcatggtctcaaccctcaagaagg

SEQ ID NO: 2516805 - DNA, 25 bp, Homo sapien
tgcaaatgcaaaggtctactctggc

SEQ ID NO: 2516806 - DNA, 25 bp, Homo sapien
taggacttatcgcactgaagaaggt

SEQ ID NO: 2516807 - DNA, 25 bp, Homo sapien
ggaaacactatacatgccaactaat

SEQ ID NO: 2516808 - DNA, 25 bp, Homo sapien
taccaaatctacaaagtttagcaag

SEQ ID NO: 2516809 - DNA, 25 bp, Homo sapien
tcctacacgccaaactccttgaaag

SEQ ID NO: 2516810 - DNA, 25 bp, Homo sapien
tccaggaatcactaaaagcagtaga

SEQ ID NO: 2516811 - DNA, 25 bp, Homo sapien
agattatagttaaagaagtatgacc

SEQ ID NO: 2516812 - DNA, 25 bp, Homo sapien
gtaacacagcgccaaataaatacac

SEQ ID NO: 2516813 - DNA, 25 bp, Homo sapien
aagcagtagaacttgagcagactta

SEQ ID NO: 2516814 - DNA, 25 bp, Homo sapien
tgtaaatggaggtaggtagaaatcc

SEQ ID NO: 2516815 - DNA, 25 bp, Homo sapien
tagtaacaacctttgggttcatcag

SEQ ID NO: 2516816 - DNA, 25 bp, Homo sapien
caacctttgggttcatcaggcaatt

SEQ ID NO: 2516817 - DNA, 25 bp, Homo sapien
gctagcctgaatggccaccaaatta

SEQ ID NO: 2516818 - DNA, 25 bp, Homo sapien
ccaaccaagtttgggtctgatacag

SEQ ID NO: 2516819 - DNA, 25 bp, Homo sapien
tgatacagttgtgtccagaataagg

SEQ ID NO: 2516820 - DNA, 25 bp, Homo sapien
ttaataactggcgtgtaaacaacaa

SEQ ID NO: 2516821 - DNA, 25 bp, Homo sapien
cgtgtaaacaacaatcccaaccaag

SEQ ID NO: 2516822 - DNA, 25 bp, Homo sapien
aaacattgccagtcctaatattcca

SEQ ID NO: 2516823 - DNA, 25 bp, Homo sapien
agtttctgggtctgtgtagtataaa

SEQ ID NO: 2516824 - DNA, 25 bp, Homo sapien
aatattccatgggatcctgtgccca

SEQ ID NO: 2516825 - DNA, 25 bp, Homo sapien
catgggatcctgtgcccaaatcttc

SEQ ID NO: 2516826 - DNA, 25 bp, Homo sapien
ataaccatagctgttatgacaggct

SEQ ID NO: 2516827 - DNA, 25 bp, Homo sapien
ccatagctgttatgacaggctccca

SEQ ID NO: 2516828 - DNA, 25 bp, Homo sapien
atagctgttatgacaggctcccagc

SEQ ID NO: 2516829 - DNA, 25 bp, Homo sapien
aaccatagctgttatgacaggctcc

SEQ ID NO: 2516830 - DNA, 25 bp, Homo sapien
tgttcttgtggctggatgtttggca

SEQ ID NO: 2516831 - DNA, 25 bp, Homo sapien
ctgagtggagaactgttcttgtggc

SEQ ID NO: 2516832 - DNA, 25 bp, Homo sapien
ggctggatgtttggcagctattata

SEQ ID NO: 2516833 - DNA, 25 bp, Homo sapien
gatgtttggcagctattataatcca

SEQ ID NO: 2516834 - DNA, 25 bp, Homo sapien
ctaatggagaaatgtagtaataggt

SEQ ID NO: 2516835 - DNA, 25 bp, Homo sapien
aatggagaaatgtagtaataggtct

SEQ ID NO: 2516836 - DNA, 25 bp, Homo sapien
taatggagaaatgtagtaataggtc

SEQ ID NO: 2516837 - DNA, 25 bp, Homo sapien
tgagaaggatttggattggccttga

SEQ ID NO: 2516838 - DNA, 25 bp, Homo sapien
agaaggatttggattggccttgatg

SEQ ID NO: 2516839 - DNA, 25 bp, Homo sapien
aaatgagaaggatttggattggcct

SEQ ID NO: 2516840 - DNA, 25 bp, Homo sapien
aatgagaaggatttggattggcctt

SEQ ID NO: 2516841 - DNA, 25 bp, Homo sapien
gatggttctatacagagaacactgc

SEQ ID NO: 2516842 - DNA, 25 bp, Homo sapien
tgctgtacacttacaggaaaggaca

SEQ ID NO: 2516843 - DNA, 25 bp, Homo sapien
taactgccatgaagctacttattgg

SEQ ID NO: 2516844 - DNA, 25 bp, Homo sapien
caggttgactcctagctgctgtaca

SEQ ID NO: 2516845 - DNA, 25 bp, Homo sapien
tataccagtcttctttgaaccaacg

SEQ ID NO: 2516846 - DNA, 25 bp, Homo sapien
caagacaggagtataagccctgact

SEQ ID NO: 2516847 - DNA, 25 bp, Homo sapien
tataaggtcgccaaaactagcagca

SEQ ID NO: 2516848 - DNA, 25 bp, Homo sapien
tgacttatccaagccaatatggcaa

SEQ ID NO: 2516849 - DNA, 25 bp, Homo sapien
tgcagaagagatgcaatgaaggcag

SEQ ID NO: 2516850 - DNA, 25 bp, Homo sapien
cagaagagatgcaatgaaggcagtt

SEQ ID NO: 2516851 - DNA, 25 bp, Homo sapien
gcagaagagatgcaatgaaggcagt

SEQ ID NO: 2516852 - DNA, 25 bp, Homo sapien
ctgcagaagagatgcaatgaaggca

SEQ ID NO: 2516853 - DNA, 25 bp, Homo sapien
gaagtatggaatgatcaaggtaata

SEQ ID NO: 2516854 - DNA, 25 bp, Homo sapien
acagctgctagaaaacccactactg

SEQ ID NO: 2516855 - DNA, 25 bp, Homo sapien
ggaatgatcaaggtaatattttcct

SEQ ID NO: 2516856 - DNA, 25 bp, Homo sapien
tggaatccagcccaatataattgct

SEQ ID NO: 2516857 - DNA, 25 bp, Homo sapien
aagccaagttgccaattattaggtt

SEQ ID NO: 2516858 - DNA, 25 bp, Homo sapien
agccaagttgccaattattaggttc

SEQ ID NO: 2516859 - DNA, 25 bp, Homo sapien
aaagccaagttgccaattattaggt

SEQ ID NO: 2516860 - DNA, 25 bp, Homo sapien
agaaactttaggaaactggcagttg

SEQ ID NO: 2516861 - DNA, 25 bp, Homo sapien
ctcaagaaactttaggaaactggca

SEQ ID NO: 2516862 - DNA, 25 bp, Homo sapien
gaaactttaggaaactggcagttgc

SEQ ID NO: 2516863 - DNA, 25 bp, Homo sapien
caagaaactttaggaaactggcagt

SEQ ID NO: 2516864 - DNA, 25 bp, Homo sapien
cctggcatcaaaggaggcaagtaac

SEQ ID NO: 2516865 - DNA, 25 bp, Homo sapien
cttcctgggataaaagagggcctat

SEQ ID NO: 2516866 - DNA, 25 bp, Homo sapien
gaaggatctgtaccaaaatattagt

SEQ ID NO: 2516867 - DNA, 25 bp, Homo sapien
tcaaccaaccatcgaaccacaaaga

SEQ ID NO: 2516868 - DNA, 25 bp, Homo sapien
tgcagtggataatctggatgccaat

SEQ ID NO: 2516869 - DNA, 25 bp, Homo sapien
tccctttgagaccaagaagtgcagg

SEQ ID NO: 2516870 - DNA, 25 bp, Homo sapien
tccaagttccctttgagaccaagaa

SEQ ID NO: 2516871 - DNA, 25 bp, Homo sapien
taacttttctgaacacctcccagtg

SEQ ID NO: 2516872 - DNA, 25 bp, Homo sapien
gaaactgttccaaaaccagctagca

SEQ ID NO: 2516873 - DNA, 25 bp, Homo sapien
tattggcatgaaaagactgctctga

SEQ ID NO: 2516874 - DNA, 25 bp, Homo sapien
gcagcttgatgatgcgtgcccatta

SEQ ID NO: 2516875 - DNA, 25 bp, Homo sapien
ccagctagcaaaaagggcacaagta

SEQ ID NO: 2516876 - DNA, 25 bp, Homo sapien
tcactggaaccatactcaagagtaa

SEQ ID NO: 2516877 - DNA, 25 bp, Homo sapien
tccatcttgccaaatgccgtttgct

SEQ ID NO: 2516878 - DNA, 25 bp, Homo sapien
tggaccaccacttgttttatcggta

SEQ ID NO: 2516879 - DNA, 25 bp, Homo sapien
tactaaaagtctgtactgcagttga

SEQ ID NO: 2516880 - DNA, 25 bp, Homo sapien
tgtactccttagatctcaagcttcg

SEQ ID NO: 2516881 - DNA, 25 bp, Homo sapien
gaatcagaaccgcacaaacactggt

SEQ ID NO: 2516882 - DNA, 25 bp, Homo sapien
ttgacttcattgtgtagaaaatatt

SEQ ID NO: 2516883 - DNA, 25 bp, Homo sapien
gatctcaagcttcgggaaccacagc

SEQ ID NO: 2516884 - DNA, 25 bp, Homo sapien
tgtgttagcatactctatgatacgc

SEQ ID NO: 2516885 - DNA, 25 bp, Homo sapien
gagtaatgtgctatacaaacctgta

SEQ ID NO: 2516886 - DNA, 25 bp, Homo sapien
ccttggcgtgtggtaggctctacca

SEQ ID NO: 2516887 - DNA, 25 bp, Homo sapien
tataacacgttactgtactgtagcc

SEQ ID NO: 2516888 - DNA, 25 bp, Homo sapien
tcctcaggtggtggcctaacatcac

SEQ ID NO: 2516889 - DNA, 25 bp, Homo sapien
tgaagcacattacctcccattagat

SEQ ID NO: 2516890 - DNA, 25 bp, Homo sapien
ctaacatcaccttcccttactggga

SEQ ID NO: 2516891 - DNA, 25 bp, Homo sapien
tatttggaggactcatccacaaggc

SEQ ID NO: 2516892 - DNA, 25 bp, Homo sapien
tgattaccctcgctacctgattacc

SEQ ID NO: 2516893 - DNA, 25 bp, Homo sapien
ccagctggccctcgctttctgatta

SEQ ID NO: 2516894 - DNA, 25 bp, Homo sapien
gttaggttggtttggtctgaatatc

SEQ ID NO: 2516895 - DNA, 25 bp, Homo sapien
ccccaggtggtgtctgatcactctg

SEQ ID NO: 2516896 - DNA, 25 bp, Homo sapien
tttttcaagtcagtgccagtatcca

SEQ ID NO: 2516897 - DNA, 25 bp, Homo sapien
ttttcaagtcagtgccagtatccaa

SEQ ID NO: 2516898 - DNA, 25 bp, Homo sapien
tcggtatcagattggttggattttt

SEQ ID NO: 2516899 - DNA, 25 bp, Homo sapien
ataagcattaagtttttcggtatca

SEQ ID NO: 2516900 - DNA, 25 bp, Homo sapien
cgcggccgaagccgagacttcccct

SEQ ID NO: 2516901 - DNA, 25 bp, Homo sapien
ctccctcccgcacctgatgcgcccg

SEQ ID NO: 2516902 - DNA, 25 bp, Homo sapien
cccgcacctgatgcgcccgaacgcg

SEQ ID NO: 2516903 - DNA, 25 bp, Homo sapien
gcggccgaagccgagacttcccctc

SEQ ID NO: 2516904 - DNA, 25 bp, Homo sapien
tcagaccagcggcctctttttggct

SEQ ID NO: 2516905 - DNA, 25 bp, Homo sapien
tctttttggctgaggtcatgtttct

SEQ ID NO: 2516906 - DNA, 25 bp, Homo sapien
gaccagcggcctctttttggctgag

SEQ ID NO: 2516907 - DNA, 25 bp, Homo sapien
ctttttggctgaggtcatgtttctt

SEQ ID NO: 2516908 - DNA, 25 bp, Homo sapien
ctttggtgtcctttgtctcagacag

SEQ ID NO: 2516909 - DNA, 25 bp, Homo sapien
tttgtctcagacagcactttgccac

SEQ ID NO: 2516910 - DNA, 25 bp, Homo sapien
ctttgtctcagacagcactttgcca

SEQ ID NO: 2516911 - DNA, 25 bp, Homo sapien
ggtgtcctttgtctcagacagcact

SEQ ID NO: 2516912 - DNA, 25 bp, Homo sapien
accaagattgaactcctcgccatct

SEQ ID NO: 2516913 - DNA, 25 bp, Homo sapien
atcaccaagattgaactcctcgcca

SEQ ID NO: 2516914 - DNA, 25 bp, Homo sapien
gggcatcaccaagattgaactcctc

SEQ ID NO: 2516915 - DNA, 25 bp, Homo sapien
ctatccggcagtggtggtcttttgg

SEQ ID NO: 2516916 - DNA, 25 bp, Homo sapien
ggcactgtccctctgccagggtctg

SEQ ID NO: 2516917 - DNA, 25 bp, Homo sapien
tccaggtgcaacaggatcccattga

SEQ ID NO: 2516918 - DNA, 25 bp, Homo sapien
ctccatctgcagggtgtggcgggcc

SEQ ID NO: 2516919 - DNA, 25 bp, Homo sapien
tgcagggtgtggcgggcctccacct

SEQ ID NO: 2516920 - DNA, 25 bp, Homo sapien
cactttggcgatttcctcattcttc

SEQ ID NO: 2516921 - DNA, 25 bp, Homo sapien
cttggcgaggcactgagatttaagg

SEQ ID NO: 2516922 - DNA, 25 bp, Homo sapien
tcttggcgaggcactgagatttaag

SEQ ID NO: 2516923 - DNA, 25 bp, Homo sapien
tgaccactttggcgatttcctcatt

SEQ ID NO: 2516924 - DNA, 25 bp, Homo sapien
cccatggatgtcatgggccatggcc

SEQ ID NO: 2516925 - DNA, 25 bp, Homo sapien
gagcccatggatgtcatgggccatg

SEQ ID NO: 2516926 - DNA, 25 bp, Homo sapien
cggagcccatggatgtcatgggcca

SEQ ID NO: 2516927 - DNA, 25 bp, Homo sapien
agcccatggatgtcatgggccatgg

SEQ ID NO: 2516928 - DNA, 25 bp, Homo sapien
catcagcagcaagacagacattgtc

SEQ ID NO: 2516929 - DNA, 25 bp, Homo sapien
agcagcaagacagacattgtcgatc

SEQ ID NO: 2516930 - DNA, 25 bp, Homo sapien
gcaagacagacattgtcgatctgca

SEQ ID NO: 2516931 - DNA, 25 bp, Homo sapien
tcgatctgcagaacgatgcaggcat

SEQ ID NO: 2516932 - DNA, 25 bp, Homo sapien
ttctggttcttggtcaccaggctcc

SEQ ID NO: 2516933 - DNA, 25 bp, Homo sapien
cagcttctggttcttggtcaccagg

SEQ ID NO: 2516934 - DNA, 25 bp, Homo sapien
gcttctggttcttggtcaccaggct

SEQ ID NO: 2516935 - DNA, 25 bp, Homo sapien
ccagcttctggttcttggtcaccag

SEQ ID NO: 2516936 - DNA, 25 bp, Homo sapien
ggctttgcatggtctccttctcgtt

SEQ ID NO: 2516937 - DNA, 25 bp, Homo sapien
caggcagtcgttcaggctttgcatg

SEQ ID NO: 2516938 - DNA, 25 bp, Homo sapien
caggctttgcatggtctccttctcg

SEQ ID NO: 2516939 - DNA, 25 bp, Homo sapien
ttcaggctttgcatggtctccttct

SEQ ID NO: 2516940 - DNA, 25 bp, Homo sapien
gcaacccggaagctggtgaagcagc

SEQ ID NO: 2516941 - DNA, 25 bp, Homo sapien
aacccggaagctggtgaagcagcac

SEQ ID NO: 2516942 - DNA, 25 bp, Homo sapien
caacccggaagctggtgaagcagca

SEQ ID NO: 2516943 - DNA, 25 bp, Homo sapien
agatccgggaatgagagcccctgct

SEQ ID NO: 2516944 - DNA, 25 bp, Homo sapien
acactgctgactggccaggcgccat

SEQ ID NO: 2516945 - DNA, 25 bp, Homo sapien
tggccaggcgccatagctgggcgtc

SEQ ID NO: 2516946 - DNA, 25 bp, Homo sapien
ccgggaatgagagcccctgctgcct

SEQ ID NO: 2516947 - DNA, 25 bp, Homo sapien
ggaggcaggcgaaaggacaggactc

SEQ ID NO: 2516948 - DNA, 25 bp, Homo sapien
ggcaggcgaaaggacaggactcaga

SEQ ID NO: 2516949 - DNA, 25 bp, Homo sapien
ctggggaggcaggcgaaaggacagg

SEQ ID NO: 2516950 - DNA, 25 bp, Homo sapien
ggggaggcaggcgaaaggacaggac

SEQ ID NO: 2516951 - DNA, 25 bp, Homo sapien
aagttggccgcagctatctgtagtc

SEQ ID NO: 2516952 - DNA, 25 bp, Homo sapien
tctgtagtctcttcttgtatcccca

SEQ ID NO: 2516953 - DNA, 25 bp, Homo sapien
tgtcagctggtccttttatgggcgc

SEQ ID NO: 2516954 - DNA, 25 bp, Homo sapien
tgtatccccaacacttagccattca

SEQ ID NO: 2516955 - DNA, 25 bp, Homo sapien
taagagatatttgtaccaccatgtt

SEQ ID NO: 2516956 - DNA, 25 bp, Homo sapien
tgtctgggtatgtatcccaaagcat

SEQ ID NO: 2516957 - DNA, 25 bp, Homo sapien
cagcagcgttcacaatgaccacgag

SEQ ID NO: 2516958 - DNA, 25 bp, Homo sapien
aatcccatgtctgggtatgtatccc

SEQ ID NO: 2516959 - DNA, 25 bp, Homo sapien
tagtaacagaaagtagaacgatggt

SEQ ID NO: 2516960 - DNA, 25 bp, Homo sapien
agctcatagtaacagaaagtagaac

SEQ ID NO: 2516961 - DNA, 25 bp, Homo sapien
aaagtagaacgatggtagctgggca

SEQ ID NO: 2516962 - DNA, 25 bp, Homo sapien
taacagaaagtagaacgatggtagc

SEQ ID NO: 2516963 - DNA, 25 bp, Homo sapien
ccgcggaggtgacggacgggtgacg

SEQ ID NO: 2516964 - DNA, 25 bp, Homo sapien
aggtccatggcaagcccaaggctag

SEQ ID NO: 2516965 - DNA, 25 bp, Homo sapien
aaggctagcccgagttgttcgtcgc

SEQ ID NO: 2516966 - DNA, 25 bp, Homo sapien
gcttgagggaagcatggaggtccat

SEQ ID NO: 2516967 - DNA, 25 bp, Homo sapien
agggagacatgcatccaggaaatcc

SEQ ID NO: 2516968 - DNA, 25 bp, Homo sapien
aaggcttgggcatgttgtcagtaaa

SEQ ID NO: 2516969 - DNA, 25 bp, Homo sapien
taaaagcacgagttcgaatcccagc

SEQ ID NO: 2516970 - DNA, 25 bp, Homo sapien
cactagtaattaactggtgggactt

SEQ ID NO: 2516971 - DNA, 25 bp, Homo sapien
taccttctggagatcatgtggctag

SEQ ID NO: 2516972 - DNA, 25 bp, Homo sapien
tccgggtattagaaatagggtgtgc

SEQ ID NO: 2516973 - DNA, 25 bp, Homo sapien
ttgaattcaagtagtctggctccag

SEQ ID NO: 2516974 - DNA, 25 bp, Homo sapien
gatcacgaatccagtaggccttaag

SEQ ID NO: 2516975 - DNA, 25 bp, Homo sapien
gaaagtggctctagtatccaccaga

SEQ ID NO: 2516976 - DNA, 25 bp, Homo sapien
taacagttctggttcaggagagtca

SEQ ID NO: 2516977 - DNA, 25 bp, Homo sapien
tatctctagagttaagaccttgtgg

SEQ ID NO: 2516978 - DNA, 25 bp, Homo sapien
tttgccttggagagcaagtcttgcc

SEQ ID NO: 2516979 - DNA, 25 bp, Homo sapien
gctgatggaactttgtctgctaatg

SEQ ID NO: 2516980 - DNA, 25 bp, Homo sapien
gagctgatggaactttgtctgctaa

SEQ ID NO: 2516981 - DNA, 25 bp, Homo sapien
tgatggaactttgtctgctaatgtt

SEQ ID NO: 2516982 - DNA, 25 bp, Homo sapien
tgtctgctaatgttttcgggttttc

SEQ ID NO: 2516983 - DNA, 25 bp, Homo sapien
tctcttcaaacttgtggcgtaccgt

SEQ ID NO: 2516984 - DNA, 25 bp, Homo sapien
cttaggtgtgagttgatggcagttt

SEQ ID NO: 2516985 - DNA, 25 bp, Homo sapien
tgtggcgtaccgtctttctatggct

SEQ ID NO: 2516986 - DNA, 25 bp, Homo sapien
gcagttgcactcctaaaatgagtga

SEQ ID NO: 2516987 - DNA, 25 bp, Homo sapien
gctgtatcatacagcctaggcatgt

SEQ ID NO: 2516988 - DNA, 25 bp, Homo sapien
caatcacctcatgatgcattgctca

SEQ ID NO: 2516989 - DNA, 25 bp, Homo sapien
gaaatcatgcgacacatgactgtgt

SEQ ID NO: 2516990 - DNA, 25 bp, Homo sapien
agaaaggaggcacatgacgagatga

SEQ ID NO: 2516991 - DNA, 25 bp, Homo sapien
tcatatcctactcttagcccagatt

SEQ ID NO: 2516992 - DNA, 25 bp, Homo sapien
ttggaacaatctcagatatcatctg

SEQ ID NO: 2516993 - DNA, 25 bp, Homo sapien
taaaaatctactcaggcatcatttg

SEQ ID NO: 2516994 - DNA, 25 bp, Homo sapien
caaattatggttgagtcagtcttac

SEQ ID NO: 2516995 - DNA, 25 bp, Homo sapien
caatacttaatatgtgcccacagct

SEQ ID NO: 2516996 - DNA, 25 bp, Homo sapien
tagttaaaaccaccagatgcattgc

SEQ ID NO: 2516997 - DNA, 25 bp, Homo sapien
taggccctgatttaggcattaggaa

SEQ ID NO: 2516998 - DNA, 25 bp, Homo sapien
aaaagcttttatagataatgtccat

SEQ ID NO: 2516999 - DNA, 25 bp, Homo sapien
tagctaggagcaagatcagtaggcc

SEQ ID NO: 2517000 - DNA, 25 bp, Homo sapien
gactacttctgtctgccaatgggaa

SEQ ID NO: 2517001 - DNA, 25 bp, Homo sapien
taatccgtgatctaaagcaacagcg

SEQ ID NO: 2517002 - DNA, 25 bp, Homo sapien
ctaaggtctttcatacaggaggccc

SEQ ID NO: 2517003 - DNA, 25 bp, Homo sapien
tggttttgagatattcatttagagc

SEQ ID NO: 2517004 - DNA, 25 bp, Homo sapien
tttgagatattcatttagagcttcc

SEQ ID NO: 2517005 - DNA, 25 bp, Homo sapien
cgtcttggttttgagatattcattt

SEQ ID NO: 2517006 - DNA, 25 bp, Homo sapien
agatattcatttagagcttcctcac

SEQ ID NO: 2517007 - DNA, 25 bp, Homo sapien
ggtgatttgaatccactgtgcagct

SEQ ID NO: 2517008 - DNA, 25 bp, Homo sapien
tatagtaaaacagacctggagctgg

SEQ ID NO: 2517009 - DNA, 25 bp, Homo sapien
cagggatgcctcactttctaataat

SEQ ID NO: 2517010 - DNA, 25 bp, Homo sapien
taaggttgacaaccactgggctaag

SEQ ID NO: 2517011 - DNA, 25 bp, Homo sapien
cctggcatgtgtttcgcactgaaag

SEQ ID NO: 2517012 - DNA, 25 bp, Homo sapien
gagaattgcctttgcttatacaggc

SEQ ID NO: 2517013 - DNA, 25 bp, Homo sapien
cctctgagctcgtgtgagaattgcc

SEQ ID NO: 2517014 - DNA, 25 bp, Homo sapien
ctattgcttgaaaggtgttagtgtc

SEQ ID NO: 2517015 - DNA, 25 bp, Homo sapien
ccaaagccagattgtttaactccgc

SEQ ID NO: 2517016 - DNA, 25 bp, Homo sapien
agattgtttaactccgccaaatggg

SEQ ID NO: 2517017 - DNA, 25 bp, Homo sapien
aaccatactctgtactatttgctcg

SEQ ID NO: 2517018 - DNA, 25 bp, Homo sapien
ccctgaggccaaaccatactctgta

SEQ ID NO: 2517019 - DNA, 25 bp, Homo sapien
tatactatgatctacgatggttagc

SEQ ID NO: 2517020 - DNA, 25 bp, Homo sapien
cagctaaaagcccattatgttggcc

SEQ ID NO: 2517021 - DNA, 25 bp, Homo sapien
tatgttggccattaattgaagctga

SEQ ID NO: 2517022 - DNA, 25 bp, Homo sapien
taagttacattgtgtctgaagaacc

SEQ ID NO: 2517023 - DNA, 25 bp, Homo sapien
ccacatctgtgaacacggtcggctc

SEQ ID NO: 2517024 - DNA, 25 bp, Homo sapien
aaggattcctctttggcgaggtaca

SEQ ID NO: 2517025 - DNA, 25 bp, Homo sapien
ggcgaggtacatgtagtcttccaca

SEQ ID NO: 2517026 - DNA, 25 bp, Homo sapien
gaacacggtcggctccatgaaaaag

SEQ ID NO: 2517027 - DNA, 25 bp, Homo sapien
tccagatgagccttatgattttggg

SEQ ID NO: 2517028 - DNA, 25 bp, Homo sapien
cagtggatctgtcaagtggatcacc

SEQ ID NO: 2517029 - DNA, 25 bp, Homo sapien
cactccagtttcacagtattgcagc

SEQ ID NO: 2517030 - DNA, 25 bp, Homo sapien
ggcccatgatcagtggatctgtcaa

SEQ ID NO: 2517031 - DNA, 25 bp, Homo sapien
taagtgcacccaaccactaaatact

SEQ ID NO: 2517032 - DNA, 25 bp, Homo sapien
gcctagaggggttaagtaagtgcac

SEQ ID NO: 2517033 - DNA, 25 bp, Homo sapien
gcgtccggctattctcatgtcttag

SEQ ID NO: 2517034 - DNA, 25 bp, Homo sapien
cactgcgtccggctattctcatgtc

SEQ ID NO: 2517035 - DNA, 25 bp, Homo sapien
aattcgtcgtggatggattcttcca

SEQ ID NO: 2517036 - DNA, 25 bp, Homo sapien
aacaaccgcccagcagcaatacagt

SEQ ID NO: 2517037 - DNA, 25 bp, Homo sapien
tgttgaaaaatactgctcccatgcc

SEQ ID NO: 2517038 - DNA, 25 bp, Homo sapien
tcttgtcacaaattcgtcgtggatg

SEQ ID NO: 2517039 - DNA, 25 bp, Homo sapien
cacagccttgtcaagttcacagtca

SEQ ID NO: 2517040 - DNA, 25 bp, Homo sapien
caccaagctcaagggaaactttctt

SEQ ID NO: 2517041 - DNA, 25 bp, Homo sapien
tattataagtggagacttgccacca

SEQ ID NO: 2517042 - DNA, 25 bp, Homo sapien
cattcgcacagccttgtcaagttca

SEQ ID NO: 2517043 - DNA, 25 bp, Homo sapien
caagtttgcggatgtcaggatgttc

SEQ ID NO: 2517044 - DNA, 25 bp, Homo sapien
tggatccagtgaaaccaagtttgcg

SEQ ID NO: 2517045 - DNA, 25 bp, Homo sapien
tcatgatctgtttgccaataggagt

SEQ ID NO: 2517046 - DNA, 25 bp, Homo sapien
gacagacgttgtcctgctatgccac

SEQ ID NO: 2517047 - DNA, 25 bp, Homo sapien
ctgagcctggaatgatgttgatgac

SEQ ID NO: 2517048 - DNA, 25 bp, Homo sapien
gcctgctttcacagacagttctgca

SEQ ID NO: 2517049 - DNA, 25 bp, Homo sapien
tgcaaacttcaaagcagtcaagggc

SEQ ID NO: 2517050 - DNA, 25 bp, Homo sapien
acaatcacattggttgtctctggga

SEQ ID NO: 2517051 - DNA, 25 bp, Homo sapien
gactatctctgggatatctaagcca

SEQ ID NO: 2517052 - DNA, 25 bp, Homo sapien
cacatgaccatgtagctatgccaaa

SEQ ID NO: 2517053 - DNA, 25 bp, Homo sapien
tactccacgacttatgcacctcaga

SEQ ID NO: 2517054 - DNA, 25 bp, Homo sapien
ctgctgccaaacacgcagcactctt

SEQ ID NO: 2517055 - DNA, 25 bp, Homo sapien
tgctgccaaacacgcagcactcttc

SEQ ID NO: 2517056 - DNA, 25 bp, Homo sapien
cctgctgccaaacacgcagcactct

SEQ ID NO: 2517057 - DNA, 25 bp, Homo sapien
cgggtagttccagggaataataatg

SEQ ID NO: 2517058 - DNA, 25 bp, Homo sapien
tagttccagggaataataatggcac

SEQ ID NO: 2517059 - DNA, 25 bp, Homo sapien
ccagggaataataatggcacagaca

SEQ ID NO: 2517060 - DNA, 25 bp, Homo sapien
ttccagggaataataatggcacaga

SEQ ID NO: 2517061 - DNA, 25 bp, Homo sapien
tttggacgggcctggttgattggaa

SEQ ID NO: 2517062 - DNA, 25 bp, Homo sapien
ttggacgggcctggttgattggaat

SEQ ID NO: 2517063 - DNA, 25 bp, Homo sapien
tcagattgcgatttggacgggcctg

SEQ ID NO: 2517064 - DNA, 25 bp, Homo sapien
aggtcagattgcgatttggacgggc

SEQ ID NO: 2517065 - DNA, 25 bp, Homo sapien
tcaagggcttcaatagttgccagct

SEQ ID NO: 2517066 - DNA, 25 bp, Homo sapien
tgaattttgtcgcaccagccagcaa

SEQ ID NO: 2517067 - DNA, 25 bp, Homo sapien
cattccaatgtgtgtcttcagggcc

SEQ ID NO: 2517068 - DNA, 25 bp, Homo sapien
caaggtatagacagcccctgaatca

SEQ ID NO: 2517069 - DNA, 25 bp, Homo sapien
gaagcgtaggatactttgcatattg

SEQ ID NO: 2517070 - DNA, 25 bp, Homo sapien
gctttatcaacatccgccaaagaag

SEQ ID NO: 2517071 - DNA, 25 bp, Homo sapien
tccgccaaagaagcgtaggatactt

SEQ ID NO: 2517072 - DNA, 25 bp, Homo sapien
cccattcaccgttttcaaaagcatc

SEQ ID NO: 2517073 - DNA, 25 bp, Homo sapien
cactggtatggcatttttaccatga

SEQ ID NO: 2517074 - DNA, 25 bp, Homo sapien
agatccatctgttgggttgatagtg

SEQ ID NO: 2517075 - DNA, 25 bp, Homo sapien
gtctttccatcgtctgcatctgtga

SEQ ID NO: 2517076 - DNA, 25 bp, Homo sapien
gatagtgtcgtaagtctttccatcg

SEQ ID NO: 2517077 - DNA, 25 bp, Homo sapien
tattggcgaggatatggagaagttg

SEQ ID NO: 2517078 - DNA, 25 bp, Homo sapien
ccctcatacattggtgggattacat

SEQ ID NO: 2517079 - DNA, 25 bp, Homo sapien
ctcatacattggtgggattacataa

SEQ ID NO: 2517080 - DNA, 25 bp, Homo sapien
gacagatgagagcaaatattggcga

SEQ ID NO: 2517081 - DNA, 25 bp, Homo sapien
ggatctcactgatttagggttgcaa

SEQ ID NO: 2517082 - DNA, 25 bp, Homo sapien
tatgccatctgaattagatctcagt

SEQ ID NO: 2517083 - DNA, 25 bp, Homo sapien
aaatgggcaacaggcacagcagtct

SEQ ID NO: 2517084 - DNA, 25 bp, Homo sapien
tcttttatagtgtatggatctcact

SEQ ID NO: 2517085 - DNA, 25 bp, Homo sapien
tttctgtctgatctcttcaaccagc

SEQ ID NO: 2517086 - DNA, 25 bp, Homo sapien
ttcctcacgaccttttggataaagc

SEQ ID NO: 2517087 - DNA, 25 bp, Homo sapien
cagtttcctcacgaccttttggata

SEQ ID NO: 2517088 - DNA, 25 bp, Homo sapien
tcctcacgaccttttggataaagcc

SEQ ID NO: 2517089 - DNA, 25 bp, Homo sapien
caacatccattgagcttgctccaga

SEQ ID NO: 2517090 - DNA, 25 bp, Homo sapien
ctgttgagtcttcaataatggggac

SEQ ID NO: 2517091 - DNA, 25 bp, Homo sapien
tcaataatggggacattgcttaaaa

SEQ ID NO: 2517092 - DNA, 25 bp, Homo sapien
ttgctccagatttaaagaagtctgt

SEQ ID NO: 2517093 - DNA, 25 bp, Homo sapien
tgatggtctctgccactttcacctc

SEQ ID NO: 2517094 - DNA, 25 bp, Homo sapien
taccactgacgtctcacccgttgaa

SEQ ID NO: 2517095 - DNA, 25 bp, Homo sapien
cagctgtcagttctaccactgacgt

SEQ ID NO: 2517096 - DNA, 25 bp, Homo sapien
ccgttgaaaagtactgagaggcagg

SEQ ID NO: 2517097 - DNA, 25 bp, Homo sapien
cagagctattcagtaatgtcgagcc

SEQ ID NO: 2517098 - DNA, 25 bp, Homo sapien
cagtaatgtcgagccatagaaagtg

SEQ ID NO: 2517099 - DNA, 25 bp, Homo sapien
gaccaggcttcttggcacctttaat

SEQ ID NO: 2517100 - DNA, 25 bp, Homo sapien
ccatttttggtaacgagaccaggct

SEQ ID NO: 2517101 - DNA, 25 bp, Homo sapien
gctccagggactttatcatgacctc

SEQ ID NO: 2517102 - DNA, 25 bp, Homo sapien
cttcggcagactggtcccaagaaat

SEQ ID NO: 2517103 - DNA, 25 bp, Homo sapien
ccagttatgtaaaacttcggcagac

SEQ ID NO: 2517104 - DNA, 25 bp, Homo sapien
ggactttatcatgacctcgaatcca

SEQ ID NO: 2517105 - DNA, 25 bp, Homo sapien
tctggataccttcatatgttgcccc

SEQ ID NO: 2517106 - DNA, 25 bp, Homo sapien
ccatcagctatgagttggacagctt

SEQ ID NO: 2517107 - DNA, 25 bp, Homo sapien
gctggggtatacgaggagcttttcc

SEQ ID NO: 2517108 - DNA, 25 bp, Homo sapien
gcttttccatcagctatgagttgga

SEQ ID NO: 2517109 - DNA, 25 bp, Homo sapien
gaaaccgattataaagtgcatccac

SEQ ID NO: 2517110 - DNA, 25 bp, Homo sapien
tctgaagaaggatgggtcctgtatc

SEQ ID NO: 2517111 - DNA, 25 bp, Homo sapien
ggtcctgtatccaagccatcatcag

SEQ ID NO: 2517112 - DNA, 25 bp, Homo sapien
gtatcattgggttcaacatcacatg

SEQ ID NO: 2517113 - DNA, 25 bp, Homo sapien
gggtccaattcctacatcgtatttg

SEQ ID NO: 2517114 - DNA, 25 bp, Homo sapien
tccaattcctacatcgtatttgacc

SEQ ID NO: 2517115 - DNA, 25 bp, Homo sapien
ctgggtccaattcctacatcgtatt

SEQ ID NO: 2517116 - DNA, 25 bp, Homo sapien
ggtccaattcctacatcgtatttga

SEQ ID NO: 2517117 - DNA, 25 bp, Homo sapien
tgcccttgaccctccatttaggaag

SEQ ID NO: 2517118 - DNA, 25 bp, Homo sapien
aatgaactgagtgcagaaagggagc

SEQ ID NO: 2517119 - DNA, 25 bp, Homo sapien
tgataaatgatagagccgtgctttg

SEQ ID NO: 2517120 - DNA, 25 bp, Homo sapien
tttagctctgcacccacggatctgt

SEQ ID NO: 2517121 - DNA, 25 bp, Homo sapien
tactcggtggccctctttgcggagg

SEQ ID NO: 2517122 - DNA, 25 bp, Homo sapien
cggaggtggctatagacttcttgtc

SEQ ID NO: 2517123 - DNA, 25 bp, Homo sapien
tgtgaacacccctactactcggtgg

SEQ ID NO: 2517124 - DNA, 25 bp, Homo sapien
agaggctctggccaattagtgccaa

SEQ ID NO: 2517125 - DNA, 25 bp, Homo sapien
tagtctgtcccactaatctatgaac

SEQ ID NO: 2517126 - DNA, 25 bp, Homo sapien
tcttttgggttatgagagtctgaaa

SEQ ID NO: 2517127 - DNA, 25 bp, Homo sapien
ggattaaaggagtacacagtcgccc

SEQ ID NO: 2517128 - DNA, 25 bp, Homo sapien
tgggatgcttaacctagtacctact

SEQ ID NO: 2517129 - DNA, 25 bp, Homo sapien
gccaaagtcctagcagagcaggtct

SEQ ID NO: 2517130 - DNA, 25 bp, Homo sapien
aacaggctcaggcattgggcacagc

SEQ ID NO: 2517131 - DNA, 25 bp, Homo sapien
gacaagtcagtgaaaggtgttgaca

SEQ ID NO: 2517132 - DNA, 25 bp, Homo sapien
tctgggatcccatgtgccacgtggt

SEQ ID NO: 2517133 - DNA, 25 bp, Homo sapien
tataaaaggtgactatacctcaaag

SEQ ID NO: 2517134 - DNA, 25 bp, Homo sapien
cctcaaagtaactagaactggttgc

SEQ ID NO: 2517135 - DNA, 25 bp, Homo sapien
tagaactggttgcaaagagtaaaac

SEQ ID NO: 2517136 - DNA, 25 bp, Homo sapien
tggttgcaaagagtaaaacgaattc

SEQ ID NO: 2517137 - DNA, 25 bp, Homo sapien
gcagcgcctggcaattctagaaatt

SEQ ID NO: 2517138 - DNA, 25 bp, Homo sapien
agctgatgcaattccaaggcgcggg

SEQ ID NO: 2517139 - DNA, 25 bp, Homo sapien
gaatagtgttccagcgtggctgcct

SEQ ID NO: 2517140 - DNA, 25 bp, Homo sapien
tgccattatctgaaccggccctgcg

SEQ ID NO: 2517141 - DNA, 25 bp, Homo sapien
gtctggaaaccaggacagggtgaca

SEQ ID NO: 2517142 - DNA, 25 bp, Homo sapien
tttagcaaagtctaagcatcgctgc

SEQ ID NO: 2517143 - DNA, 25 bp, Homo sapien
gaaaggaagcagactctgtcctcct

SEQ ID NO: 2517144 - DNA, 25 bp, Homo sapien
gacttgacacgtccaaaaactgcat

SEQ ID NO: 2517145 - DNA, 25 bp, Homo sapien
gagaagcgccggagcgcctggctgc

SEQ ID NO: 2517146 - DNA, 25 bp, Homo sapien
ccggccagtggagaagcgccggagc

SEQ ID NO: 2517147 - DNA, 25 bp, Homo sapien
agaagcgccggagcgcctggctgcc

SEQ ID NO: 2517148 - DNA, 25 bp, Homo sapien
gccagtggagaagcgccggagcgcc

SEQ ID NO: 2517149 - DNA, 25 bp, Homo sapien
agcgctagcactggcgacgcggcag

SEQ ID NO: 2517150 - DNA, 25 bp, Homo sapien
aggagcgctagcactggcgacgcgg

SEQ ID NO: 2517151 - DNA, 25 bp, Homo sapien
tggagaggagcgctagcactggcga

SEQ ID NO: 2517152 - DNA, 25 bp, Homo sapien
ctagcactggcgacgcggcagcgcg

SEQ ID NO: 2517153 - DNA, 25 bp, Homo sapien
caaaattatagtggcaaccttgagc

SEQ ID NO: 2517154 - DNA, 25 bp, Homo sapien
tctcatgggtgctgccaagcagtga

SEQ ID NO: 2517155 - DNA, 25 bp, Homo sapien
gcatcagtataagcactaccctgtg

SEQ ID NO: 2517156 - DNA, 25 bp, Homo sapien
tcactgacagatcttcagctgtggg

SEQ ID NO: 2517157 - DNA, 25 bp, Homo sapien
tataactacccaactgccattttag

SEQ ID NO: 2517158 - DNA, 25 bp, Homo sapien
gccgagggtagagtacactggtgca

SEQ ID NO: 2517159 - DNA, 25 bp, Homo sapien
tacccaactgccattttagtgtgaa

SEQ ID NO: 2517160 - DNA, 25 bp, Homo sapien
caactgccattttagtgtgaagcag

SEQ ID NO: 2517161 - DNA, 25 bp, Homo sapien
ggcactgaactgtatcaaagagata

SEQ ID NO: 2517162 - DNA, 25 bp, Homo sapien
gatgtttatagagcatacagacaag

SEQ ID NO: 2517163 - DNA, 25 bp, Homo sapien
tttagattccttaacaaacagtgcc

SEQ ID NO: 2517164 - DNA, 25 bp, Homo sapien
cctagcattatacttggcactgaac

SEQ ID NO: 2517165 - DNA, 25 bp, Homo sapien
atactgtaattctatgtttggtttt

SEQ ID NO: 2517166 - DNA, 25 bp, Homo sapien
cccagcctgtttttagatatatacc

SEQ ID NO: 2517167 - DNA, 25 bp, Homo sapien
gatatatacccaggagagggattgt

SEQ ID NO: 2517168 - DNA, 25 bp, Homo sapien
cataccaactgcatcatcttacagt

SEQ ID NO: 2517169 - DNA, 25 bp, Homo sapien
gctctcctgcaaagctataccctag

SEQ ID NO: 2517170 - DNA, 25 bp, Homo sapien
catttcacctcaagacatctgctga

SEQ ID NO: 2517171 - DNA, 25 bp, Homo sapien
aagttgagcttgacatttggcacca

SEQ ID NO: 2517172 - DNA, 25 bp, Homo sapien
ccaggacagtgaggattcgaggaac

SEQ ID NO: 2517173 - DNA, 25 bp, Homo sapien
ggaactcctacggtggcgacagaga

SEQ ID NO: 2517174 - DNA, 25 bp, Homo sapien
agcacagtgaatggtggcgaagccc

SEQ ID NO: 2517175 - DNA, 25 bp, Homo sapien
aacaatccgtacagaatgtgcggga

SEQ ID NO: 2517176 - DNA, 25 bp, Homo sapien
aaaatcgtctagagagagcagggcg

SEQ ID NO: 2517177 - DNA, 25 bp, Homo sapien
gtcgtcgccgcacgggctggttggg

SEQ ID NO: 2517178 - DNA, 25 bp, Homo sapien
gggtgaggccgtcgtcgccgcacgg

SEQ ID NO: 2517179 - DNA, 25 bp, Homo sapien
gtgatggcggtggagactctgtccc

SEQ ID NO: 2517180 - DNA, 25 bp, Homo sapien
ctgggagtttgaccgcgttgacgac

SEQ ID NO: 2517181 - DNA, 25 bp, Homo sapien
gacgaggtttcattatgttgggcag

SEQ ID NO: 2517182 - DNA, 25 bp, Homo sapien
actgggtttcaccacgtcagtcagg

SEQ ID NO: 2517183 - DNA, 25 bp, Homo sapien
gccaccgcgccaacgcctggctaat

SEQ ID NO: 2517184 - DNA, 25 bp, Homo sapien
tgagccaccgcgccaacgcctggct

SEQ ID NO: 2517185 - DNA, 25 bp, Homo sapien
gagtaactacttatggctggtcatt

SEQ ID NO: 2517186 - DNA, 25 bp, Homo sapien
tgcaaaagccaatgaccaaaacctc

SEQ ID NO: 2517187 - DNA, 25 bp, Homo sapien
aaacctcagttaaggcattgtgcag

SEQ ID NO: 2517188 - DNA, 25 bp, Homo sapien
tctctcaattgaataaaggaactag

SEQ ID NO: 2517189 - DNA, 25 bp, Homo sapien
cagtactaagggatcatattacaga

SEQ ID NO: 2517190 - DNA, 25 bp, Homo sapien
tcattctatttctgtggccaaggta

SEQ ID NO: 2517191 - DNA, 25 bp, Homo sapien
ctaaatggaccaagcacaaagcaac

SEQ ID NO: 2517192 - DNA, 25 bp, Homo sapien
gacaaaaaatacagcgaacagcgtc

SEQ ID NO: 2517193 - DNA, 25 bp, Homo sapien
tgagtaaattttgtgcccagcaagc

SEQ ID NO: 2517194 - DNA, 25 bp, Homo sapien
tattaaatggttaatcatggccttt

SEQ ID NO: 2517195 - DNA, 25 bp, Homo sapien
aagtgatacctttacaatgaagaca

SEQ ID NO: 2517196 - DNA, 25 bp, Homo sapien
aaagcgctagcaagatacatcactt

SEQ ID NO: 2517197 - DNA, 25 bp, Homo sapien
gactccctggatacctacagttgag

SEQ ID NO: 2517198 - DNA, 25 bp, Homo sapien
tcagggtaacttgccagcccaagat

SEQ ID NO: 2517199 - DNA, 25 bp, Homo sapien
tagagttcacatgctgactccctgg

SEQ ID NO: 2517200 - DNA, 25 bp, Homo sapien
gaatgggtgtacaatgccctgtttg

SEQ ID NO: 2517201 - DNA, 25 bp, Homo sapien
ttcagaacgacaggcacttaaagct

SEQ ID NO: 2517202 - DNA, 25 bp, Homo sapien
gaaactagacctgtatcgcgcatct

SEQ ID NO: 2517203 - DNA, 25 bp, Homo sapien
caagtctcagtatcaaggcatcaag

SEQ ID NO: 2517204 - DNA, 25 bp, Homo sapien
tagatgggtgggaacgctgtcaacc

SEQ ID NO: 2517205 - DNA, 25 bp, Homo sapien
gattctgcgcctctatgttcgtttg

SEQ ID NO: 2517206 - DNA, 25 bp, Homo sapien
catctggttgatcgtttaacagtac

SEQ ID NO: 2517207 - DNA, 25 bp, Homo sapien
aacagtacatattttccgtcattgg

SEQ ID NO: 2517208 - DNA, 25 bp, Homo sapien
tggacagcattaattgagccagtgc

SEQ ID NO: 2517209 - DNA, 25 bp, Homo sapien
ttattggaaaacagctgcggccatt

SEQ ID NO: 2517210 - DNA, 25 bp, Homo sapien
gcaaactatggtcatttggctaacc

SEQ ID NO: 2517211 - DNA, 25 bp, Homo sapien
cctgcttttgtcttatgatagcaga

SEQ ID NO: 2517212 - DNA, 25 bp, Homo sapien
tggtgcggcggttggagacagagtc

SEQ ID NO: 2517213 - DNA, 25 bp, Homo sapien
tctgaacctcaataatttcttttcc

SEQ ID NO: 2517214 - DNA, 25 bp, Homo sapien
cttctgaacctcaataatttctttt

SEQ ID NO: 2517215 - DNA, 25 bp, Homo sapien
ttcccaaattaatagcataacatat

SEQ ID NO: 2517216 - DNA, 25 bp, Homo sapien
ttttcccaaattaatagcataacat

SEQ ID NO: 2517217 - DNA, 25 bp, Homo sapien
tattccaggtaagtgaaactcaggt

SEQ ID NO: 2517218 - DNA, 25 bp, Homo sapien
gggcatttgcgtccaactgtcctga

SEQ ID NO: 2517219 - DNA, 25 bp, Homo sapien
tgtcctgacctctgttgccaattta

SEQ ID NO: 2517220 - DNA, 25 bp, Homo sapien
aggagactcatcacatagggcccgg

SEQ ID NO: 2517221 - DNA, 25 bp, Homo sapien
gaacacggatgacaaaaccaaccag

SEQ ID NO: 2517222 - DNA, 25 bp, Homo sapien
cttctccagtggattcaggaacacg

SEQ ID NO: 2517223 - DNA, 25 bp, Homo sapien
gattcaggaacacggatgacaaaac

SEQ ID NO: 2517224 - DNA, 25 bp, Homo sapien
cagtggattcaggaacacggatgac

SEQ ID NO: 2517225 - DNA, 25 bp, Homo sapien
gcccttgatacttgagtctgtggat

SEQ ID NO: 2517226 - DNA, 25 bp, Homo sapien
tggcccttgatacttgagtctgtgg

SEQ ID NO: 2517227 - DNA, 25 bp, Homo sapien
attggcccttgatacttgagtctgt

SEQ ID NO: 2517228 - DNA, 25 bp, Homo sapien
ggcccttgatacttgagtctgtgga

SEQ ID NO: 2517229 - DNA, 25 bp, Homo sapien
accgcgccaggccttcagaatatat

SEQ ID NO: 2517230 - DNA, 25 bp, Homo sapien
gcgagatagctgtgtgtgaccacgt

SEQ ID NO: 2517231 - DNA, 25 bp, Homo sapien
tctgcctttaaggaacctgtgtagc

SEQ ID NO: 2517232 - DNA, 25 bp, Homo sapien
tttaatgtccctgaagtgcaagatc

SEQ ID NO: 2517233 - DNA, 25 bp, Homo sapien
ttcttcacagtgctgatggttttta

SEQ ID NO: 2517234 - DNA, 25 bp, Homo sapien
cttcacagtgctgatggtttttaca

SEQ ID NO: 2517235 - DNA, 25 bp, Homo sapien
ttcacagtgctgatggtttttacat

SEQ ID NO: 2517236 - DNA, 25 bp, Homo sapien
tcttcacagtgctgatggtttttac

SEQ ID NO: 2517237 - DNA, 25 bp, Homo sapien
gcagttcctataaccttttatccag

SEQ ID NO: 2517238 - DNA, 25 bp, Homo sapien
agcagttcctataaccttttatcca

SEQ ID NO: 2517239 - DNA, 25 bp, Homo sapien
ttttatccagattcttagcttcctc

SEQ ID NO: 2517240 - DNA, 25 bp, Homo sapien
tatccagattcttagcttcctcgca

SEQ ID NO: 2517241 - DNA, 25 bp, Homo sapien
aatacttgtctcatcgcttcataaa

SEQ ID NO: 2517242 - DNA, 25 bp, Homo sapien
catcagatgggattctgtcatgcgg

SEQ ID NO: 2517243 - DNA, 25 bp, Homo sapien
atgcggaagatgttatgaatagccc

SEQ ID NO: 2517244 - DNA, 25 bp, Homo sapien
gaatagcccgagcagccaatacttg

SEQ ID NO: 2517245 - DNA, 25 bp, Homo sapien
gccattgatcccaaaaaccgaacta

SEQ ID NO: 2517246 - DNA, 25 bp, Homo sapien
tgccattgatcccaaaaaccgaact

SEQ ID NO: 2517247 - DNA, 25 bp, Homo sapien
cattgatcccaaaaaccgaactata

SEQ ID NO: 2517248 - DNA, 25 bp, Homo sapien
ctgccattgatcccaaaaaccgaac

SEQ ID NO: 2517249 - DNA, 25 bp, Homo sapien
cagcattttccactcaggatctcat

SEQ ID NO: 2517250 - DNA, 25 bp, Homo sapien
gaagacagcattttccactcaggat

SEQ ID NO: 2517251 - DNA, 25 bp, Homo sapien
gacagcattttccactcaggatctc

SEQ ID NO: 2517252 - DNA, 25 bp, Homo sapien
tggaagacagcattttccactcagg

SEQ ID NO: 2517253 - DNA, 25 bp, Homo sapien
tggctgctgacagtggcgcataact

SEQ ID NO: 2517254 - DNA, 25 bp, Homo sapien
ttcatagcctaaaggaagtcagtcc

SEQ ID NO: 2517255 - DNA, 25 bp, Homo sapien
ccagggtcagatgtgctagttttgc

SEQ ID NO: 2517256 - DNA, 25 bp, Homo sapien
taacttgacaaaactgactcccagc

SEQ ID NO: 2517257 - DNA, 25 bp, Homo sapien
ggttttctaaaatgacacagcgtat

SEQ ID NO: 2517258 - DNA, 25 bp, Homo sapien
cagcgtgccggccatcagatacgtt

SEQ ID NO: 2517259 - DNA, 25 bp, Homo sapien
gaatgtgataacagattcagatttc

SEQ ID NO: 2517260 - DNA, 25 bp, Homo sapien
gaaagacttaaatatcatttgtgtc

SEQ ID NO: 2517261 - DNA, 25 bp, Homo sapien
atcctcagtttcaccaaaagggttg

SEQ ID NO: 2517262 - DNA, 25 bp, Homo sapien
tctgcttctggaaatgattcatcct

SEQ ID NO: 2517263 - DNA, 25 bp, Homo sapien
ttcatcctcagtttcaccaaaaggg

SEQ ID NO: 2517264 - DNA, 25 bp, Homo sapien
tctggaaatgattcatcctcagttt

SEQ ID NO: 2517265 - DNA, 25 bp, Homo sapien
gctgcagctagaagggcacttaaca

SEQ ID NO: 2517266 - DNA, 25 bp, Homo sapien
agttgaacaaacacgacagctgcag

SEQ ID NO: 2517267 - DNA, 25 bp, Homo sapien
ctgcagctagaagggcacttaacac

SEQ ID NO: 2517268 - DNA, 25 bp, Homo sapien
gccagagttgaacaaacacgacagc

SEQ ID NO: 2517269 - DNA, 25 bp, Homo sapien
tagcaggaagcacaatatcgaattg

SEQ ID NO: 2517270 - DNA, 25 bp, Homo sapien
tctgttctgatcaaggaattctgta

SEQ ID NO: 2517271 - DNA, 25 bp, Homo sapien
gttccaggcgcgatcagctcctctg

SEQ ID NO: 2517272 - DNA, 25 bp, Homo sapien
gatcaaggaattctgtagcaggaag

SEQ ID NO: 2517273 - DNA, 25 bp, Homo sapien
gttgctttgggaacaatcttgtcat

SEQ ID NO: 2517274 - DNA, 25 bp, Homo sapien
tgttgctttgggaacaatcttgtca

SEQ ID NO: 2517275 - DNA, 25 bp, Homo sapien
ctgttgctttgggaacaatcttgtc

SEQ ID NO: 2517276 - DNA, 25 bp, Homo sapien
tgctttgggaacaatcttgtcattt

SEQ ID NO: 2517277 - DNA, 25 bp, Homo sapien
ccacactcattgctgacattgtggc

SEQ ID NO: 2517278 - DNA, 25 bp, Homo sapien
ggcacagtcttgcggccctgtgtgc

SEQ ID NO: 2517279 - DNA, 25 bp, Homo sapien
cacagtcttgcggccctgtgtgcct

SEQ ID NO: 2517280 - DNA, 25 bp, Homo sapien
acactcattgctgacattgtggccc

SEQ ID NO: 2517281 - DNA, 25 bp, Homo sapien
cttgaatattatcttcacagccagg

SEQ ID NO: 2517282 - DNA, 25 bp, Homo sapien
ttgaatattatcttcacagccaggc

SEQ ID NO: 2517283 - DNA, 25 bp, Homo sapien
ttggctccacaaaagctagtttttc

SEQ ID NO: 2517284 - DNA, 25 bp, Homo sapien
ctccacaaaagctagtttttctttg

SEQ ID NO: 2517285 - DNA, 25 bp, Homo sapien
tcatttcgtattcctaatcaataat

SEQ ID NO: 2517286 - DNA, 25 bp, Homo sapien
tcgtattcctaatcaataatttggc

SEQ ID NO: 2517287 - DNA, 25 bp, Homo sapien
cactgcttgcagagcggtctgattc

SEQ ID NO: 2517288 - DNA, 25 bp, Homo sapien
ttccaaaacttgtaatgggagtcac

SEQ ID NO: 2517289 - DNA, 25 bp, Homo sapien
taatgggagtcactgcttgcagagc

SEQ ID NO: 2517290 - DNA, 25 bp, Homo sapien
tctgattcaacttgatcgcgactgc

SEQ ID NO: 2517291 - DNA, 25 bp, Homo sapien
tgagatgccggtggctgataattac

SEQ ID NO: 2517292 - DNA, 25 bp, Homo sapien
ccaggttgagaaaagggctgagatg

SEQ ID NO: 2517293 - DNA, 25 bp, Homo sapien
gaaaagggctgagatgccggtggct

SEQ ID NO: 2517294 - DNA, 25 bp, Homo sapien
gctgagatgccggtggctgataatt

SEQ ID NO: 2517295 - DNA, 25 bp, Homo sapien
tcggtcaggtagatctgtctggaga

SEQ ID NO: 2517296 - DNA, 25 bp, Homo sapien
atctgtctggagatgttgtttattg

SEQ ID NO: 2517297 - DNA, 25 bp, Homo sapien
tcagggttgtcggtcaggtagatct

SEQ ID NO: 2517298 - DNA, 25 bp, Homo sapien
ggttgtcggtcaggtagatctgtct

SEQ ID NO: 2517299 - DNA, 25 bp, Homo sapien
gctctcagcctggaggattattccc

SEQ ID NO: 2517300 - DNA, 25 bp, Homo sapien
gcgccaccactaacgtgcccggcca

SEQ ID NO: 2517301 - DNA, 25 bp, Homo sapien
cgccaccactaacgtgcccggccaa

SEQ ID NO: 2517302 - DNA, 25 bp, Homo sapien
tgcgccaccactaacgtgcccggcc

SEQ ID NO: 2517303 - DNA, 25 bp, Homo sapien
ttcgcaatccacggccatcactgag

SEQ ID NO: 2517304 - DNA, 25 bp, Homo sapien
actgagcagttgtccaggtcctgga

SEQ ID NO: 2517305 - DNA, 25 bp, Homo sapien
tgatctggaagcagtagcgccggtc

SEQ ID NO: 2517306 - DNA, 25 bp, Homo sapien
tttccattgggcgtggtgatctgga

SEQ ID NO: 2517307 - DNA, 25 bp, Homo sapien
gattcccgccttgggtgaagaaata

SEQ ID NO: 2517308 - DNA, 25 bp, Homo sapien
gacacatgagattcccgccttgggt

SEQ ID NO: 2517309 - DNA, 25 bp, Homo sapien
ctgggctgacacatgagattcccgc

SEQ ID NO: 2517310 - DNA, 25 bp, Homo sapien
tgagattcccgccttgggtgaagaa

SEQ ID NO: 2517311 - DNA, 25 bp, Homo sapien
tggcaaataacgacagaacccggta

SEQ ID NO: 2517312 - DNA, 25 bp, Homo sapien
gagtagcaactatgtccaaaggcac

SEQ ID NO: 2517313 - DNA, 25 bp, Homo sapien
tctaacttcgtaaagcaggtgcagt

SEQ ID NO: 2517314 - DNA, 25 bp, Homo sapien
tggcaacggctgacatctgagtgct

SEQ ID NO: 2517315 - DNA, 25 bp, Homo sapien
ttagtgcagtttggcgcctgggccc

SEQ ID NO: 2517316 - DNA, 25 bp, Homo sapien
taaaaactgtcagtggtccaggacg

SEQ ID NO: 2517317 - DNA, 25 bp, Homo sapien
ccttgcaggtaggtctccagcacat

SEQ ID NO: 2517318 - DNA, 25 bp, Homo sapien
caggctcttagaggactcgtttcca

SEQ ID NO: 2517319 - DNA, 25 bp, Homo sapien
tctggagtgtaaacagattcatcaa

SEQ ID NO: 2517320 - DNA, 25 bp, Homo sapien
tgttgatctgtggtgcggccacatc

SEQ ID NO: 2517321 - DNA, 25 bp, Homo sapien
aagattaaggtaaccagccttctgg

SEQ ID NO: 2517322 - DNA, 25 bp, Homo sapien
tgtggtgcggccacatcagagtctg

SEQ ID NO: 2517323 - DNA, 25 bp, Homo sapien
ttttccgcctcggcttccagttcta

SEQ ID NO: 2517324 - DNA, 25 bp, Homo sapien
cttttccgcctcggcttccagttct

SEQ ID NO: 2517325 - DNA, 25 bp, Homo sapien
tttccgcctcggcttccagttctac

SEQ ID NO: 2517326 - DNA, 25 bp, Homo sapien
gcagaccctgacgttaatgcccggg

SEQ ID NO: 2517327 - DNA, 25 bp, Homo sapien
tgccccggctgagagaatggaacgt

SEQ ID NO: 2517328 - DNA, 25 bp, Homo sapien
taacagccatagttctgccctgagg

SEQ ID NO: 2517329 - DNA, 25 bp, Homo sapien
tgaaatggtagtcatgcctcccctg

SEQ ID NO: 2517330 - DNA, 25 bp, Homo sapien
caagggcactgttagcgagcatttc

SEQ ID NO: 2517331 - DNA, 25 bp, Homo sapien
tattggcagctaaggcaagggcact

SEQ ID NO: 2517332 - DNA, 25 bp, Homo sapien
tactgccacgtactctcaaagaaag

SEQ ID NO: 2517333 - DNA, 25 bp, Homo sapien
cagaactcgtcgcaagcgcttggga

SEQ ID NO: 2517334 - DNA, 25 bp, Homo sapien
gtctgcaacggaggataaaaagctg

SEQ ID NO: 2517335 - DNA, 25 bp, Homo sapien
gataaaaagctgtccatacgtttgg

SEQ ID NO: 2517336 - DNA, 25 bp, Homo sapien
ggaggataaaaagctgtccatacgt

SEQ ID NO: 2517337 - DNA, 25 bp, Homo sapien
agctgtccatacgtttggaaaacat

SEQ ID NO: 2517338 - DNA, 25 bp, Homo sapien
tccagggaagtgatcagtgaactca

SEQ ID NO: 2517339 - DNA, 25 bp, Homo sapien
cagaaagtctgggtcccctgacaaa

SEQ ID NO: 2517340 - DNA, 25 bp, Homo sapien
tctgtgtattagtggcatctgcacc

SEQ ID NO: 2517341 - DNA, 25 bp, Homo sapien
tcactgaaggtgagacaggcagcgt

SEQ ID NO: 2517342 - DNA, 25 bp, Homo sapien
cagccatgacttttacaaatctgcc

SEQ ID NO: 2517343 - DNA, 25 bp, Homo sapien
caaatctgcccattaggtatgaact

SEQ ID NO: 2517344 - DNA, 25 bp, Homo sapien
ctgcccattaggtatgaactgctcc

SEQ ID NO: 2517345 - DNA, 25 bp, Homo sapien
tgctggttgggaggtaacagtaaca

SEQ ID NO: 2517346 - DNA, 25 bp, Homo sapien
gacggctttgcatctattccccaga

SEQ ID NO: 2517347 - DNA, 25 bp, Homo sapien
cattaacccggctcgtctgtctgac

SEQ ID NO: 2517348 - DNA, 25 bp, Homo sapien
taaaccctgattgccaaggtcggat

SEQ ID NO: 2517349 - DNA, 25 bp, Homo sapien
tggtgccgagaagcctgatgagtct

SEQ ID NO: 2517350 - DNA, 25 bp, Homo sapien
tctcaacaatgatgctcctgccact

SEQ ID NO: 2517351 - DNA, 25 bp, Homo sapien
ggctacatgtgtgctacggtaccca

SEQ ID NO: 2517352 - DNA, 25 bp, Homo sapien
cctgccactgaataatgacggtgtg

SEQ ID NO: 2517353 - DNA, 25 bp, Homo sapien
gtgtgctacggtacccacagctcct

SEQ ID NO: 2517354 - DNA, 25 bp, Homo sapien
gaggtagtccttggccatgaatgag

SEQ ID NO: 2517355 - DNA, 25 bp, Homo sapien
tgtggccagagcactcacttaagag

SEQ ID NO: 2517356 - DNA, 25 bp, Homo sapien
gcaggacaccctcttatcaagcaag

SEQ ID NO: 2517357 - DNA, 25 bp, Homo sapien
gatgctagatctgagacccttcccg

SEQ ID NO: 2517358 - DNA, 25 bp, Homo sapien
agaacaaagagagccccggcattct

SEQ ID NO: 2517359 - DNA, 25 bp, Homo sapien
agagaacaaagagagccccggcatt

SEQ ID NO: 2517360 - DNA, 25 bp, Homo sapien
gagagccccggcattctctaatatg

SEQ ID NO: 2517361 - DNA, 25 bp, Homo sapien
ccggcattctctaatatggcaaggc

SEQ ID NO: 2517362 - DNA, 25 bp, Homo sapien
gggcaacagtatgagttactgcaca

SEQ ID NO: 2517363 - DNA, 25 bp, Homo sapien
ggcaacagtatgagttactgcacac

SEQ ID NO: 2517364 - DNA, 25 bp, Homo sapien
agatctgctgaggactgatgccgcc

SEQ ID NO: 2517365 - DNA, 25 bp, Homo sapien
ctgtgtgcacaagtgcccatcataa

SEQ ID NO: 2517366 - DNA, 25 bp, Homo sapien
gcacaagtgcccatcataagcacct

SEQ ID NO: 2517367 - DNA, 25 bp, Homo sapien
atctgctgaggactgatgccgccca

SEQ ID NO: 2517368 - DNA, 25 bp, Homo sapien
ttttgttgaatgacactgacgtgaa

SEQ ID NO: 2517369 - DNA, 25 bp, Homo sapien
gattaacaaggaagacaactgagct

SEQ ID NO: 2517370 - DNA, 25 bp, Homo sapien
tttaagtatcacttccaaaggcaca

SEQ ID NO: 2517371 - DNA, 25 bp, Homo sapien
caactgagcttggatatcttccgaa

SEQ ID NO: 2517372 - DNA, 25 bp, Homo sapien
tagcttaggtttcagccctcaggga

SEQ ID NO: 2517373 - DNA, 25 bp, Homo sapien
tgaatcccacaaagtagccagggag

SEQ ID NO: 2517374 - DNA, 25 bp, Homo sapien
ttctttctacgacgatgcttcagtg

SEQ ID NO: 2517375 - DNA, 25 bp, Homo sapien
gcagaacgccacagctagcttaggt

SEQ ID NO: 2517376 - DNA, 25 bp, Homo sapien
catgggcaaagcctatcatgggctc

SEQ ID NO: 2517377 - DNA, 25 bp, Homo sapien
tactgcagcgcgttgagggcacagt

SEQ ID NO: 2517378 - DNA, 25 bp, Homo sapien
catgggctccatcatggccatttgc

SEQ ID NO: 2517379 - DNA, 25 bp, Homo sapien
gctttctgtactgcagcgcgttgag

SEQ ID NO: 2517380 - DNA, 25 bp, Homo sapien
tattttgccattgagaggtcatgct

SEQ ID NO: 2517381 - DNA, 25 bp, Homo sapien
tgtattttgccattgagaggtcatg

SEQ ID NO: 2517382 - DNA, 25 bp, Homo sapien
ttaggcagcctgctgtattttgcca

SEQ ID NO: 2517383 - DNA, 25 bp, Homo sapien
tctcctttttcttaggcagcctgct

SEQ ID NO: 2517384 - DNA, 25 bp, Homo sapien
caccaggaatggagaaggtgcctac

SEQ ID NO: 2517385 - DNA, 25 bp, Homo sapien
cacaccaggaatggagaaggtgcct

SEQ ID NO: 2517386 - DNA, 25 bp, Homo sapien
acacaccaggaatggagaaggtgcc

SEQ ID NO: 2517387 - DNA, 25 bp, Homo sapien
ccacacaccaggaatggagaaggtg

SEQ ID NO: 2517388 - DNA, 25 bp, Homo sapien
gctagcgagtccaaatagatccttt

SEQ ID NO: 2517389 - DNA, 25 bp, Homo sapien
ttgctagcgagtccaaatagatcct

SEQ ID NO: 2517390 - DNA, 25 bp, Homo sapien
gcgagtccaaatagatcctttaaag

SEQ ID NO: 2517391 - DNA, 25 bp, Homo sapien
cattgctagcgagtccaaatagatc

SEQ ID NO: 2517392 - DNA, 25 bp, Homo sapien
acccagtgaccctgatggcctgagc

SEQ ID NO: 2517393 - DNA, 25 bp, Homo sapien
tggaacatacggcttcaaccatgcc

SEQ ID NO: 2517394 - DNA, 25 bp, Homo sapien
cacccagtgaccctgatggcctgag

SEQ ID NO: 2517395 - DNA, 25 bp, Homo sapien
atacggcttcaaccatgccccacac

SEQ ID NO: 2517396 - DNA, 25 bp, Homo sapien
gtggacaggtacttttcatggagac

SEQ ID NO: 2517397 - DNA, 25 bp, Homo sapien
gccagctctgtatggagaagattaa

SEQ ID NO: 2517398 - DNA, 25 bp, Homo sapien
ctgtgagatccttttctcggaattg

SEQ ID NO: 2517399 - DNA, 25 bp, Homo sapien
ctcggaattgtatgataggtagaac

SEQ ID NO: 2517400 - DNA, 25 bp, Homo sapien
tagaaccattgtgtctgccaactgt

SEQ ID NO: 2517401 - DNA, 25 bp, Homo sapien
aatagtggagtgttgaaattacttc

SEQ ID NO: 2517402 - DNA, 25 bp, Homo sapien
atagtggagtgttgaaattacttct

SEQ ID NO: 2517403 - DNA, 25 bp, Homo sapien
aaatagtggagtgttgaaattactt

SEQ ID NO: 2517404 - DNA, 25 bp, Homo sapien
aaaatagtggagtgttgaaattact

SEQ ID NO: 2517405 - DNA, 25 bp, Homo sapien
tccacaccgacgtcctttcttctcc

SEQ ID NO: 2517406 - DNA, 25 bp, Homo sapien
tgcagaacacgaccctccacaccga

SEQ ID NO: 2517407 - DNA, 25 bp, Homo sapien
cttctccaagagcacgtcctatcag

SEQ ID NO: 2517408 - DNA, 25 bp, Homo sapien
gagcacgtcctatcagaagtgtcta

SEQ ID NO: 2517409 - DNA, 25 bp, Homo sapien
tagaaagctgttgtgtggccaggca

SEQ ID NO: 2517410 - DNA, 25 bp, Homo sapien
ttagaaagctgttgtgtggccaggc

SEQ ID NO: 2517411 - DNA, 25 bp, Homo sapien
tgagttcatcggaaaccaacatgct

SEQ ID NO: 2517412 - DNA, 25 bp, Homo sapien
tcctcagagcttactggcaaatgct

SEQ ID NO: 2517413 - DNA, 25 bp, Homo sapien
tctgtgcagccagtatgagttcatc

SEQ ID NO: 2517414 - DNA, 25 bp, Homo sapien
cagctgccttccaaaacgacttcga

SEQ ID NO: 2517415 - DNA, 25 bp, Homo sapien
caacaagtgtacaaggcatttgggc

SEQ ID NO: 2517416 - DNA, 25 bp, Homo sapien
caatggcacttcggccaggaaggga

SEQ ID NO: 2517417 - DNA, 25 bp, Homo sapien
tttgtcaggcttgcggtcagtctca

SEQ ID NO: 2517418 - DNA, 25 bp, Homo sapien
catttgggcacactggcgaagggca

SEQ ID NO: 2517419 - DNA, 25 bp, Homo sapien
taaatgatgtttttcggattccaat

SEQ ID NO: 2517420 - DNA, 25 bp, Homo sapien
ggagagaatgcccactctgcggtat

SEQ ID NO: 2517421 - DNA, 25 bp, Homo sapien
ccactctgcggtatccaggtgaggg

SEQ ID NO: 2517422 - DNA, 25 bp, Homo sapien
caacctctgagggaagttcaggatg

SEQ ID NO: 2517423 - DNA, 25 bp, Homo sapien
ctgggctccatagacgcgctgcatt

SEQ ID NO: 2517424 - DNA, 25 bp, Homo sapien
agcagctggttggtatagtctgtga

SEQ ID NO: 2517425 - DNA, 25 bp, Homo sapien
ccatagacgcgctgcattgcctgga

SEQ ID NO: 2517426 - DNA, 25 bp, Homo sapien
cctggagcagctggttggtatagtc

SEQ ID NO: 2517427 - DNA, 25 bp, Homo sapien
cagaggcagatctactcaagggatt

SEQ ID NO: 2517428 - DNA, 25 bp, Homo sapien
tatcattttcatccacggtgctcag

SEQ ID NO: 2517429 - DNA, 25 bp, Homo sapien
catactggatggtgtacgaacaaga

SEQ ID NO: 2517430 - DNA, 25 bp, Homo sapien
acaagaattaaggtgcacagaggca

SEQ ID NO: 2517431 - DNA, 25 bp, Homo sapien
catttaattcttctagcaactctcc

SEQ ID NO: 2517432 - DNA, 25 bp, Homo sapien
ccaaggtagattccatggttccatt

SEQ ID NO: 2517433 - DNA, 25 bp, Homo sapien
tcttctagcaactctccaaggtaga

SEQ ID NO: 2517434 - DNA, 25 bp, Homo sapien
caactctccaaggtagattccatgg

SEQ ID NO: 2517435 - DNA, 25 bp, Homo sapien
tctcatcagcgagcatgatctttgg

SEQ ID NO: 2517436 - DNA, 25 bp, Homo sapien
ggtggctctcatcagcgagcatgat

SEQ ID NO: 2517437 - DNA, 25 bp, Homo sapien
ttggtccacagcgtacagccctgac

SEQ ID NO: 2517438 - DNA, 25 bp, Homo sapien
tcagcgagcatgatctttggtccac

SEQ ID NO: 2517439 - DNA, 25 bp, Homo sapien
cacttttaagggtatgctcggccag

SEQ ID NO: 2517440 - DNA, 25 bp, Homo sapien
aatgttaacaccactgactactgag

SEQ ID NO: 2517441 - DNA, 25 bp, Homo sapien
cagattcaggagtggaattccatcc

SEQ ID NO: 2517442 - DNA, 25 bp, Homo sapien
gctcggccagagaaacaaatccaag

SEQ ID NO: 2517443 - DNA, 25 bp, Homo sapien
tctttgttccgttatgccaatcgca

SEQ ID NO: 2517444 - DNA, 25 bp, Homo sapien
tgttgtcttcaccttacctcaaaag

SEQ ID NO: 2517445 - DNA, 25 bp, Homo sapien
tcttgtttgaggaaagaaaggcctg

SEQ ID NO: 2517446 - DNA, 25 bp, Homo sapien
aaaacacaaaccgagcaagcaacag

SEQ ID NO: 2517447 - DNA, 25 bp, Homo sapien
aggagctcaaagctgcatttgtgtt

SEQ ID NO: 2517448 - DNA, 25 bp, Homo sapien
gctgcatttgtgttcctatcgcagc

SEQ ID NO: 2517449 - DNA, 25 bp, Homo sapien
gttcctatcgcagcaggattcacac

SEQ ID NO: 2517450 - DNA, 25 bp, Homo sapien
catttgtgttcctatcgcagcagga

SEQ ID NO: 2517451 - DNA, 25 bp, Homo sapien
gactagttttacaatgcatcgtgca

SEQ ID NO: 2517452 - DNA, 25 bp, Homo sapien
attcccaacagccagtagtgccagg

SEQ ID NO: 2517453 - DNA, 25 bp, Homo sapien
gagcagaggcttctaaacaacaatg

SEQ ID NO: 2517454 - DNA, 25 bp, Homo sapien
tgttcagcttcccacatatgagagg

SEQ ID NO: 2517455 - DNA, 25 bp, Homo sapien
ctctagcaggagcttgtccacggcg

SEQ ID NO: 2517456 - DNA, 25 bp, Homo sapien
gggctgtcctgcaacgcctcctcta

SEQ ID NO: 2517457 - DNA, 25 bp, Homo sapien
tctagcaggagcttgtccacggcgg

SEQ ID NO: 2517458 - DNA, 25 bp, Homo sapien
ctgcaacgcctcctctagcaggagc

SEQ ID NO: 2517459 - DNA, 25 bp, Homo sapien
ccgagagcactccccggctctgggc

SEQ ID NO: 2517460 - DNA, 25 bp, Homo sapien
tcaggcgacgcggcggccactccgt

SEQ ID NO: 2517461 - DNA, 25 bp, Homo sapien
ggcggccactccgtgcccgcggcgg

SEQ ID NO: 2517462 - DNA, 25 bp, Homo sapien
cgacgcggcggccactccgtgcccg

SEQ ID NO: 2517463 - DNA, 25 bp, Homo sapien
cggccactccgtgcccgcggcggcc

SEQ ID NO: 2517464 - DNA, 25 bp, Homo sapien
ccgagccggatcaacaggaagtgtg

SEQ ID NO: 2517465 - DNA, 25 bp, Homo sapien
cggccgagccggatcaacaggaagt

SEQ ID NO: 2517466 - DNA, 25 bp, Homo sapien
cccggccgagccggatcaacaggaa

SEQ ID NO: 2517467 - DNA, 25 bp, Homo sapien
agcccccggccgagccggatcaaca

SEQ ID NO: 2517468 - DNA, 25 bp, Homo sapien
tagctcctggtcgtatctttctccc

SEQ ID NO: 2517469 - DNA, 25 bp, Homo sapien
agacctcacaagcttgtgctaccca

SEQ ID NO: 2517470 - DNA, 25 bp, Homo sapien
tgtgctacccacaaggactggtcct

SEQ ID NO: 2517471 - DNA, 25 bp, Homo sapien
tctgcccgctaattccttgcacatc

SEQ ID NO: 2517472 - DNA, 25 bp, Homo sapien
cctcgccgacagaggaagggtctct

SEQ ID NO: 2517473 - DNA, 25 bp, Homo sapien
tagagatgtcagcagacaagctcct

SEQ ID NO: 2517474 - DNA, 25 bp, Homo sapien
tttgcaagtaaagctccctcgccga

SEQ ID NO: 2517475 - DNA, 25 bp, Homo sapien
tccctgatgatctggcatttgccac

SEQ ID NO: 2517476 - DNA, 25 bp, Homo sapien
gagcactgcccagtaagacaaaagc

SEQ ID NO: 2517477 - DNA, 25 bp, Homo sapien
ctgagcactgcccagtaagacaaaa

SEQ ID NO: 2517478 - DNA, 25 bp, Homo sapien
aagacaaaagcctgccccagaggtt

SEQ ID NO: 2517479 - DNA, 25 bp, Homo sapien
agacaaaagcctgccccagaggttc

SEQ ID NO: 2517480 - DNA, 25 bp, Homo sapien
caagtcctgggcttgcactcagata

SEQ ID NO: 2517481 - DNA, 25 bp, Homo sapien
cactgggttcttgtccactgccgta

SEQ ID NO: 2517482 - DNA, 25 bp, Homo sapien
cactgccgtagtgatgcccttgccg

SEQ ID NO: 2517483 - DNA, 25 bp, Homo sapien
gccaaggtaagtgcacaggcctctt

SEQ ID NO: 2517484 - DNA, 25 bp, Homo sapien
gatttgtagacaactgataggaatg

SEQ ID NO: 2517485 - DNA, 25 bp, Homo sapien
tctgtgtaaggacaattgattcccc

SEQ ID NO: 2517486 - DNA, 25 bp, Homo sapien
tgaaccgaaagattactgagtgtct

SEQ ID NO: 2517487 - DNA, 25 bp, Homo sapien
atttttatctagcacacctttctgg

SEQ ID NO: 2517488 - DNA, 25 bp, Homo sapien
tgttctttaattttgctatatccaa

SEQ ID NO: 2517489 - DNA, 25 bp, Homo sapien
aagtttgcatttaatagtttccaca

SEQ ID NO: 2517490 - DNA, 25 bp, Homo sapien
acatttgttctttaattttgctata

SEQ ID NO: 2517491 - DNA, 25 bp, Homo sapien
tattctttcccaaagtttgcattta

SEQ ID NO: 2517492 - DNA, 25 bp, Homo sapien
gcaggttgaattggccatgtggatg

SEQ ID NO: 2517493 - DNA, 25 bp, Homo sapien
caggttgaattggccatgtggatgg

SEQ ID NO: 2517494 - DNA, 25 bp, Homo sapien
aggttgaattggccatgtggatggc

SEQ ID NO: 2517495 - DNA, 25 bp, Homo sapien
agcaggttgaattggccatgtggat

SEQ ID NO: 2517496 - DNA, 25 bp, Homo sapien
caagggttatgccagtcaggttcga

SEQ ID NO: 2517497 - DNA, 25 bp, Homo sapien
taatcagccatatgtacgtgggaac

SEQ ID NO: 2517498 - DNA, 25 bp, Homo sapien
cagggctttaataaagtgactccac

SEQ ID NO: 2517499 - DNA, 25 bp, Homo sapien
gggtgcagtaccctttgtgcaagat

SEQ ID NO: 2517500 - DNA, 25 bp, Homo sapien
cacagatacgtggaagacagttgag

SEQ ID NO: 2517501 - DNA, 25 bp, Homo sapien
cctgaggggtagaagcgttgaggtc

SEQ ID NO: 2517502 - DNA, 25 bp, Homo sapien
tgtctgcgctcagagaagtgctgag

SEQ ID NO: 2517503 - DNA, 25 bp, Homo sapien
tgctgtctgcgctcagagaagtgct

SEQ ID NO: 2517504 - DNA, 25 bp, Homo sapien
tataatactgaagacatgctggaca

SEQ ID NO: 2517505 - DNA, 25 bp, Homo sapien
ctgaagacatgctggacagtatgat

SEQ ID NO: 2517506 - DNA, 25 bp, Homo sapien
aaatgtttgaatctgtataatactg

SEQ ID NO: 2517507 - DNA, 25 bp, Homo sapien
aagacatgctggacagtatgattca

SEQ ID NO: 2517508 - DNA, 25 bp, Homo sapien
tggttacaagcttctcagtaaccac

SEQ ID NO: 2517509 - DNA, 25 bp, Homo sapien
cctggttacaagcttctcagtaacc

SEQ ID NO: 2517510 - DNA, 25 bp, Homo sapien
ctggttacaagcttctcagtaacca

SEQ ID NO: 2517511 - DNA, 25 bp, Homo sapien
gttctgtagggcatgtgtgttatcc

SEQ ID NO: 2517512 - DNA, 25 bp, Homo sapien
tagtgtgtctttctcctcagaacct

SEQ ID NO: 2517513 - DNA, 25 bp, Homo sapien
cagcattttggacctttcttgtggg

SEQ ID NO: 2517514 - DNA, 25 bp, Homo sapien
gggcttctgcgacctcatgcttctt

SEQ ID NO: 2517515 - DNA, 25 bp, Homo sapien
cgtgttgggtttatatcgtagttct

SEQ ID NO: 2517516 - DNA, 25 bp, Homo sapien
gggtttatatcgtagttcttcatgt

SEQ ID NO: 2517517 - DNA, 25 bp, Homo sapien
gttgggtttatatcgtagttcttca

SEQ ID NO: 2517518 - DNA, 25 bp, Homo sapien
tgttgggtttatatcgtagttcttc

SEQ ID NO: 2517519 - DNA, 25 bp, Homo sapien
tatattcccattggtagccatgatg

SEQ ID NO: 2517520 - DNA, 25 bp, Homo sapien
gaaatacttgactgcaagacatgtg

SEQ ID NO: 2517521 - DNA, 25 bp, Homo sapien
aggtcggaccctgtgaaataggagc

SEQ ID NO: 2517522 - DNA, 25 bp, Homo sapien
tccttaggtcggaccctgtgaaata

SEQ ID NO: 2517523 - DNA, 25 bp, Homo sapien
cgaggggctgatggatagggaggac

SEQ ID NO: 2517524 - DNA, 25 bp, Homo sapien
gaatgatgggactatcgaaaggagg

SEQ ID NO: 2517525 - DNA, 25 bp, Homo sapien
gagctgatgttgcaataagaaagca

SEQ ID NO: 2517526 - DNA, 25 bp, Homo sapien
aaacacgaggggctgatggataggg

SEQ ID NO: 2517527 - DNA, 25 bp, Homo sapien
tgtttcgaccaaaccccagcacttg

SEQ ID NO: 2517528 - DNA, 25 bp, Homo sapien
ctgtaaagcggatgatgtttcgacc

SEQ ID NO: 2517529 - DNA, 25 bp, Homo sapien
ggcacagctgtaaagcggatgatgt

SEQ ID NO: 2517530 - DNA, 25 bp, Homo sapien
ggcttcctccagcactctttggact

SEQ ID NO: 2517531 - DNA, 25 bp, Homo sapien
tctttcgtgaaaggcatgtgcaact

SEQ ID NO: 2517532 - DNA, 25 bp, Homo sapien
tgggttgctcattctacatcacgac

SEQ ID NO: 2517533 - DNA, 25 bp, Homo sapien
tcaaggacttgcgatggatggttag

SEQ ID NO: 2517534 - DNA, 25 bp, Homo sapien
gacttgtgtatctacttagtattgc

SEQ ID NO: 2517535 - DNA, 25 bp, Homo sapien
aaaattttagatccatagaagcaca

SEQ ID NO: 2517536 - DNA, 25 bp, Homo sapien
tatatgaagagttcctgtatgcgct

SEQ ID NO: 2517537 - DNA, 25 bp, Homo sapien
tgtatgcgcttaacccagctacttc

SEQ ID NO: 2517538 - DNA, 25 bp, Homo sapien
ggtacaatgtgataaactacagcct

SEQ ID NO: 2517539 - DNA, 25 bp, Homo sapien
tcaaggctcttcacatgagtggtgg

SEQ ID NO: 2517540 - DNA, 25 bp, Homo sapien
tgaaagacccgatccatgcactcaa

SEQ ID NO: 2517541 - DNA, 25 bp, Homo sapien
gcaatggttactggggtacagctga

SEQ ID NO: 2517542 - DNA, 25 bp, Homo sapien
tcaccagttgagttcttgctgtgcc

SEQ ID NO: 2517543 - DNA, 25 bp, Homo sapien
agcttaggtgcttaagggccgtcat

SEQ ID NO: 2517544 - DNA, 25 bp, Homo sapien
ctgtcatggagcttaggtgcttaag

SEQ ID NO: 2517545 - DNA, 25 bp, Homo sapien
tgaacttctgaagcctgtgagaagc

SEQ ID NO: 2517546 - DNA, 25 bp, Homo sapien
ctttgaacttctgaagcctgtgaga

SEQ ID NO: 2517547 - DNA, 25 bp, Homo sapien
tcactcttgagtgtactggggagat

SEQ ID NO: 2517548 - DNA, 25 bp, Homo sapien
cactcttgagtgtactggggagatc

SEQ ID NO: 2517549 - DNA, 25 bp, Homo sapien
gatgcatactccttttggagaagca

SEQ ID NO: 2517550 - DNA, 25 bp, Homo sapien
cctttgtgacaaggatgcatactcc

SEQ ID NO: 2517551 - DNA, 25 bp, Homo sapien
catgaagaagtggagaccatcgtcc

SEQ ID NO: 2517552 - DNA, 25 bp, Homo sapien
caggatgcatgcgtgatccctttgt

SEQ ID NO: 2517553 - DNA, 25 bp, Homo sapien
cacactgttgaggacgatggctatg

SEQ ID NO: 2517554 - DNA, 25 bp, Homo sapien
gatggctatggggttccctaaagct

SEQ ID NO: 2517555 - DNA, 25 bp, Homo sapien
ctaaagctttaccttccagggacat

SEQ ID NO: 2517556 - DNA, 25 bp, Homo sapien
ggacgatggctatggggttccctaa

SEQ ID NO: 2517557 - DNA, 25 bp, Homo sapien
gacagaagggctactaataagaggc

SEQ ID NO: 2517558 - DNA, 25 bp, Homo sapien
ttcagaggccgccaagacttgaggg

SEQ ID NO: 2517559 - DNA, 25 bp, Homo sapien
ggcagaatttttggctgtcctgcag

SEQ ID NO: 2517560 - DNA, 25 bp, Homo sapien
gaggcatttgcccactatgggtatg

SEQ ID NO: 2517561 - DNA, 25 bp, Homo sapien
taattagcagcacatggaactgtcc

SEQ ID NO: 2517562 - DNA, 25 bp, Homo sapien
cctatcaggaggtacaaaggtagtg

SEQ ID NO: 2517563 - DNA, 25 bp, Homo sapien
tcggcattctaataatacctagcgt

SEQ ID NO: 2517564 - DNA, 25 bp, Homo sapien
gttaaagctcgccaacctcatgttt

SEQ ID NO: 2517565 - DNA, 25 bp, Homo sapien
gaagcagacccatcagttccagtca

SEQ ID NO: 2517566 - DNA, 25 bp, Homo sapien
gaacgacatgtgcatgagcctccag

SEQ ID NO: 2517567 - DNA, 25 bp, Homo sapien
tgatagctagcaaatggtcccaatg

SEQ ID NO: 2517568 - DNA, 25 bp, Homo sapien
gaactactcagctaaggtgctccag

SEQ ID NO: 2517569 - DNA, 25 bp, Homo sapien
acagagtccacctgctaactcgagg

SEQ ID NO: 2517570 - DNA, 25 bp, Homo sapien
accagcgtcagtcctcctggcaaga

SEQ ID NO: 2517571 - DNA, 25 bp, Homo sapien
taactcgaggtgctgaacaccagcg

SEQ ID NO: 2517572 - DNA, 25 bp, Homo sapien
gaggtgctgaacaccagcgtcagtc

SEQ ID NO: 2517573 - DNA, 25 bp, Homo sapien
ggcgcaagtcgtgctctctggttct

SEQ ID NO: 2517574 - DNA, 25 bp, Homo sapien
tcgcaggaaccggagttggacttta

SEQ ID NO: 2517575 - DNA, 25 bp, Homo sapien
gggtcatttgaaggcgaaagcagat

SEQ ID NO: 2517576 - DNA, 25 bp, Homo sapien
ctggaacacaaagaagcttgggcct

SEQ ID NO: 2517577 - DNA, 25 bp, Homo sapien
ttaatttcttatatcccacaggagc

SEQ ID NO: 2517578 - DNA, 25 bp, Homo sapien
caggcaagaaggactgagggcctga

SEQ ID NO: 2517579 - DNA, 25 bp, Homo sapien
tttctatgcccaatccacaggcaag

SEQ ID NO: 2517580 - DNA, 25 bp, Homo sapien
cccacaggagctcaattgttctcaa

SEQ ID NO: 2517581 - DNA, 25 bp, Homo sapien
gtgtctccttgtgatgataaactcc

SEQ ID NO: 2517582 - DNA, 25 bp, Homo sapien
gataaactccctgttaaactgcctg

SEQ ID NO: 2517583 - DNA, 25 bp, Homo sapien
tgataaactccctgttaaactgcct

SEQ ID NO: 2517584 - DNA, 25 bp, Homo sapien
gatgataaactccctgttaaactgc

SEQ ID NO: 2517585 - DNA, 25 bp, Homo sapien
cttccattaacacgctgccctgggt

SEQ ID NO: 2517586 - DNA, 25 bp, Homo sapien
gtgccttcgtcagatgcatttgtgc

SEQ ID NO: 2517587 - DNA, 25 bp, Homo sapien
tccattaacacgctgccctgggtgc

SEQ ID NO: 2517588 - DNA, 25 bp, Homo sapien
tgccctgggtgccttcgtcagatgc

SEQ ID NO: 2517589 - DNA, 25 bp, Homo sapien
ccagagcgatttgccggcaggcgct

SEQ ID NO: 2517590 - DNA, 25 bp, Homo sapien
tttgctggtccccacatctggacac

SEQ ID NO: 2517591 - DNA, 25 bp, Homo sapien
gaatgcagccccagagcgatttgcc

SEQ ID NO: 2517592 - DNA, 25 bp, Homo sapien
ttccctagtgctgtgaaatctcccc

SEQ ID NO: 2517593 - DNA, 25 bp, Homo sapien
gatgcaggactgtgtcccgatctga

SEQ ID NO: 2517594 - DNA, 25 bp, Homo sapien
ggcagatgcaggactgtgtcccgat

SEQ ID NO: 2517595 - DNA, 25 bp, Homo sapien
cgatctgaatacagactccaggctt

SEQ ID NO: 2517596 - DNA, 25 bp, Homo sapien
gactgtgtcccgatctgaatacaga

SEQ ID NO: 2517597 - DNA, 25 bp, Homo sapien
aaaaactgaggatcttcgtgggtct

SEQ ID NO: 2517598 - DNA, 25 bp, Homo sapien
gcaagttagctaatctcctgaggcc

SEQ ID NO: 2517599 - DNA, 25 bp, Homo sapien
cctgttgagggcttctatgaactcg

SEQ ID NO: 2517600 - DNA, 25 bp, Homo sapien
tgaattctaaaggaaagccagccag

SEQ ID NO: 2517601 - DNA, 25 bp, Homo sapien
ttctcaataccgaggcgaatgcact

SEQ ID NO: 2517602 - DNA, 25 bp, Homo sapien
tgtatttctcaataccgaggcgaat

SEQ ID NO: 2517603 - DNA, 25 bp, Homo sapien
cgaatgcactagatgccatcacagg

SEQ ID NO: 2517604 - DNA, 25 bp, Homo sapien
taccgaggcgaatgcactagatgcc

SEQ ID NO: 2517605 - DNA, 25 bp, Homo sapien
taccccatgggtgaacagggaacaa

SEQ ID NO: 2517606 - DNA, 25 bp, Homo sapien
gggtgaagacttctagctggagcaa

SEQ ID NO: 2517607 - DNA, 25 bp, Homo sapien
gagggtgaagacttctagctggagc

SEQ ID NO: 2517608 - DNA, 25 bp, Homo sapien
caatgatggggctggggtaccccat

SEQ ID NO: 2517609 - DNA, 25 bp, Homo sapien
gataggccacaatggcgaagtccct

SEQ ID NO: 2517610 - DNA, 25 bp, Homo sapien
gggcctgcgtcagataggccacaat

SEQ ID NO: 2517611 - DNA, 25 bp, Homo sapien
tggcgaagtccctgggaacatgatc

SEQ ID NO: 2517612 - DNA, 25 bp, Homo sapien
ggaacatgatcacaagggaccaggg

SEQ ID NO: 2517613 - DNA, 25 bp, Homo sapien
tccccactctcttacacaagggtag

SEQ ID NO: 2517614 - DNA, 25 bp, Homo sapien
tggatgatccaaaccgccggcctca

SEQ ID NO: 2517615 - DNA, 25 bp, Homo sapien
ctgtggatgatccaaaccgccggcc

SEQ ID NO: 2517616 - DNA, 25 bp, Homo sapien
caagggtagttcacggtgctccagc

SEQ ID NO: 2517617 - DNA, 25 bp, Homo sapien
tagagaagaaagctttcagcaggca

SEQ ID NO: 2517618 - DNA, 25 bp, Homo sapien
caagtttcccagtctatagctaatt

SEQ ID NO: 2517619 - DNA, 25 bp, Homo sapien
cataatgatgccaactaggagtgac

SEQ ID NO: 2517620 - DNA, 25 bp, Homo sapien
tattctttggcggatactgatacag

SEQ ID NO: 2517621 - DNA, 25 bp, Homo sapien
catcttttgggctcgtggtagtaca

SEQ ID NO: 2517622 - DNA, 25 bp, Homo sapien
gagcctcattgggagtgtcatcttt

SEQ ID NO: 2517623 - DNA, 25 bp, Homo sapien
agctcaagagcctcattgggagtgt

SEQ ID NO: 2517624 - DNA, 25 bp, Homo sapien
gccttcccacaagctgactgaggat

SEQ ID NO: 2517625 - DNA, 25 bp, Homo sapien
tttcatggtcaagctcaacgatgag

SEQ ID NO: 2517626 - DNA, 25 bp, Homo sapien
aagagggaatttgaggttttcatgg

SEQ ID NO: 2517627 - DNA, 25 bp, Homo sapien
ttttcatggtcaagctcaacgatga

SEQ ID NO: 2517628 - DNA, 25 bp, Homo sapien
tgcccgccctgggagtaactgcttt

SEQ ID NO: 2517629 - DNA, 25 bp, Homo sapien
tgtactcataggcagttccatctgc

SEQ ID NO: 2517630 - DNA, 25 bp, Homo sapien
ctgtagcctgagagtgtactcatag

SEQ ID NO: 2517631 - DNA, 25 bp, Homo sapien
gcccgccctgggagtaactgctttg

SEQ ID NO: 2517632 - DNA, 25 bp, Homo sapien
ggaacaagccgcatgacaggcagtg

SEQ ID NO: 2517633 - DNA, 25 bp, Homo sapien
tttgctttgcccttgggtaggagag

SEQ ID NO: 2517634 - DNA, 25 bp, Homo sapien
gagaggccaaggaacaagccgcatg

SEQ ID NO: 2517635 - DNA, 25 bp, Homo sapien
ggccaaggaacaagccgcatgacag

SEQ ID NO: 2517636 - DNA, 25 bp, Homo sapien
gaacgacagagctttgtgaggtggt

SEQ ID NO: 2517637 - DNA, 25 bp, Homo sapien
gaaacaactgatgctcttcctggga

SEQ ID NO: 2517638 - DNA, 25 bp, Homo sapien
agaggaaggaccactttgaggaacg

SEQ ID NO: 2517639 - DNA, 25 bp, Homo sapien
aaacaactgatgctcttcctgggaa

SEQ ID NO: 2517640 - DNA, 25 bp, Homo sapien
actcgaccagtcttcaggatgtgct

SEQ ID NO: 2517641 - DNA, 25 bp, Homo sapien
gattggtcccattaccataagccca

SEQ ID NO: 2517642 - DNA, 25 bp, Homo sapien
tctaccaggtaaactgattggtccc

SEQ ID NO: 2517643 - DNA, 25 bp, Homo sapien
tggttcccatgtgggtttccagccc

SEQ ID NO: 2517644 - DNA, 25 bp, Homo sapien
cagtcagccacgatggggcaccgat

SEQ ID NO: 2517645 - DNA, 25 bp, Homo sapien
ggaagaagaccaaatcctagatccc

SEQ ID NO: 2517646 - DNA, 25 bp, Homo sapien
gggcaccgatgctcaccaggggcta

SEQ ID NO: 2517647 - DNA, 25 bp, Homo sapien
tcgggcagaagagataagtacaaat

SEQ ID NO: 2517648 - DNA, 25 bp, Homo sapien
taacaaacatgagtactggtggaaa

SEQ ID NO: 2517649 - DNA, 25 bp, Homo sapien
atataacaaacatgagtactggtgg

SEQ ID NO: 2517650 - DNA, 25 bp, Homo sapien
aacatgagtactggtggaaatgtgc

SEQ ID NO: 2517651 - DNA, 25 bp, Homo sapien
caaacatgagtactggtggaaatgt

SEQ ID NO: 2517652 - DNA, 25 bp, Homo sapien
gatgcgtgaatgaattgtcctttac

SEQ ID NO: 2517653 - DNA, 25 bp, Homo sapien
tctgggagttcatgcaacaaatctg

SEQ ID NO: 2517654 - DNA, 25 bp, Homo sapien
gatctcaaacatccatatcttggtg

SEQ ID NO: 2517655 - DNA, 25 bp, Homo sapien
caatgcatatgaagctagatctcaa

SEQ ID NO: 2517656 - DNA, 25 bp, Homo sapien
cctgggctatgttttgctcaaagag

SEQ ID NO: 2517657 - DNA, 25 bp, Homo sapien
gtaagatgaaagcaaacttccttga

SEQ ID NO: 2517658 - DNA, 25 bp, Homo sapien
ggttggaccatatctcctgggctat

SEQ ID NO: 2517659 - DNA, 25 bp, Homo sapien
gctcaaagaggcctctatactcctc

SEQ ID NO: 2517660 - DNA, 25 bp, Homo sapien
ctgtatagaatccaggaccgtcctg

SEQ ID NO: 2517661 - DNA, 25 bp, Homo sapien
tgagtctgggcatccctgtgggaat

SEQ ID NO: 2517662 - DNA, 25 bp, Homo sapien
tcagctgacacaggaaagctctttt

SEQ ID NO: 2517663 - DNA, 25 bp, Homo sapien
gctgcttgcccctggttgactttca

SEQ ID NO: 2517664 - DNA, 25 bp, Homo sapien
ctcttccctttgtgcactggagccc

SEQ ID NO: 2517665 - DNA, 25 bp, Homo sapien
tcatcaacaagcccgtgctggagct

SEQ ID NO: 2517666 - DNA, 25 bp, Homo sapien
ttcatcaacaagcccgtgctggagc

SEQ ID NO: 2517667 - DNA, 25 bp, Homo sapien
ctttgtgcactggagcccccagtgc

SEQ ID NO: 2517668 - DNA, 25 bp, Homo sapien
gtactccttgatagcagcctcactc

SEQ ID NO: 2517669 - DNA, 25 bp, Homo sapien
ggcagcagaacgtactccttgatag

SEQ ID NO: 2517670 - DNA, 25 bp, Homo sapien
cagaacgtactccttgatagcagcc

SEQ ID NO: 2517671 - DNA, 25 bp, Homo sapien
ctctggacaggcctttgtgggacgt

SEQ ID NO: 2517672 - DNA, 25 bp, Homo sapien
tcagttcagaggctgaccctgagga

SEQ ID NO: 2517673 - DNA, 25 bp, Homo sapien
ccctagaatgttctgccctgcccgg

SEQ ID NO: 2517674 - DNA, 25 bp, Homo sapien
ctgaccctgaggatttttccctaga

SEQ ID NO: 2517675 - DNA, 25 bp, Homo sapien
aggccaagcagtgctccagcaggtg

SEQ ID NO: 2517676 - DNA, 25 bp, Homo sapien
tcagtggcctcaaggctctgaatgc

SEQ ID NO: 2517677 - DNA, 25 bp, Homo sapien
ggagcccagcgtcagggcttgctgg

SEQ ID NO: 2517678 - DNA, 25 bp, Homo sapien
cccctttgcttggtctctgatttgc

SEQ ID NO: 2517679 - DNA, 25 bp, Homo sapien
tttgcattctagatttctcagtggc

SEQ ID NO: 2517680 - DNA, 25 bp, Homo sapien
tcctccttatttggaccaacatgac

SEQ ID NO: 2517681 - DNA, 25 bp, Homo sapien
agaaatatgtgccagttccctccat

SEQ ID NO: 2517682 - DNA, 25 bp, Homo sapien
gacagggtggctgaaacggcatact

SEQ ID NO: 2517683 - DNA, 25 bp, Homo sapien
cagttccctccataggtttttgtgt

SEQ ID NO: 2517684 - DNA, 25 bp, Homo sapien
gacacctgacacaacccaagtgggt

SEQ ID NO: 2517685 - DNA, 25 bp, Homo sapien
ggagatggcaaaatatgatgtgtcc

SEQ ID NO: 2517686 - DNA, 25 bp, Homo sapien
tgtctgtggttgcacttgagtggca

SEQ ID NO: 2517687 - DNA, 25 bp, Homo sapien
gagaatgtcagccatgtttgtcgag

SEQ ID NO: 2517688 - DNA, 25 bp, Homo sapien
gaggctcccacagcttgtgaccttg

SEQ ID NO: 2517689 - DNA, 25 bp, Homo sapien
catcttcctctatcccaaccctggg

SEQ ID NO: 2517690 - DNA, 25 bp, Homo sapien
tgttatccctaggcccaagcttcat

SEQ ID NO: 2517691 - DNA, 25 bp, Homo sapien
tcctcatcttcctctatcccaaccc

SEQ ID NO: 2517692 - DNA, 25 bp, Homo sapien
tgggaaagaagtatccaggagaccc

SEQ ID NO: 2517693 - DNA, 25 bp, Homo sapien
ccagtgggaaagaagtatccaggag

SEQ ID NO: 2517694 - DNA, 25 bp, Homo sapien
ggaaagaagtatccaggagacccat

SEQ ID NO: 2517695 - DNA, 25 bp, Homo sapien
gtgggaaagaagtatccaggagacc

SEQ ID NO: 2517696 - DNA, 25 bp, Homo sapien
tggccatactctgggcccgcttggg

SEQ ID NO: 2517697 - DNA, 25 bp, Homo sapien
gcctgtccctaataaagcctatgtg

SEQ ID NO: 2517698 - DNA, 25 bp, Homo sapien
tgggtagacaggtgggtaaacactc

SEQ ID NO: 2517699 - DNA, 25 bp, Homo sapien
tctgacacatgtaatgaaggcctct

SEQ ID NO: 2517700 - DNA, 25 bp, Homo sapien
tgcacagatcatgtattgcccttgt

SEQ ID NO: 2517701 - DNA, 25 bp, Homo sapien
gcagctgcacagatcatgtattgcc

SEQ ID NO: 2517702 - DNA, 25 bp, Homo sapien
cagatcatgtattgcccttgtctgt

SEQ ID NO: 2517703 - DNA, 25 bp, Homo sapien
gctgcacagatcatgtattgccctt

SEQ ID NO: 2517704 - DNA, 25 bp, Homo sapien
cagagagggtcatcaaagggtttta

SEQ ID NO: 2517705 - DNA, 25 bp, Homo sapien
tatgacccaaacagtccatacagtt

SEQ ID NO: 2517706 - DNA, 25 bp, Homo sapien
taagtaagcacagaccaggctttgg

SEQ ID NO: 2517707 - DNA, 25 bp, Homo sapien
catacagttaagctggatcctgtgt

SEQ ID NO: 2517708 - DNA, 25 bp, Homo sapien
tctgttgccctctccctccatagca

SEQ ID NO: 2517709 - DNA, 25 bp, Homo sapien
cttcttctgttgccctctccctcca

SEQ ID NO: 2517710 - DNA, 25 bp, Homo sapien
tctccaacttcttctgttgccctct

SEQ ID NO: 2517711 - DNA, 25 bp, Homo sapien
cttattggactgctgtccacatctc

SEQ ID NO: 2517712 - DNA, 25 bp, Homo sapien
tgttctctcaaaatcctctgctcag

SEQ ID NO: 2517713 - DNA, 25 bp, Homo sapien
tttgttctctcaaaatcctctgctc

SEQ ID NO: 2517714 - DNA, 25 bp, Homo sapien
gttctctcaaaatcctctgctcagt

SEQ ID NO: 2517715 - DNA, 25 bp, Homo sapien
ttgttgatggtgttgaaagtgtcat

SEQ ID NO: 2517716 - DNA, 25 bp, Homo sapien
tgtgaacatgaacatccaatagcgc

SEQ ID NO: 2517717 - DNA, 25 bp, Homo sapien
ttatgtgaacatgaacatccaatag

SEQ ID NO: 2517718 - DNA, 25 bp, Homo sapien
catgaacatccaatagcgctgccca

SEQ ID NO: 2517719 - DNA, 25 bp, Homo sapien
tgaacatgaacatccaatagcgctg

SEQ ID NO: 2517720 - DNA, 25 bp, Homo sapien
tgtaaatggactaaatgctccaatt

SEQ ID NO: 2517721 - DNA, 25 bp, Homo sapien
atgtaaatggactaaatgctccaat

SEQ ID NO: 2517722 - DNA, 25 bp, Homo sapien
gctccaattaaaagacacagactgg

SEQ ID NO: 2517723 - DNA, 25 bp, Homo sapien
ccaattaaaagacacagactggcaa

SEQ ID NO: 2517724 - DNA, 25 bp, Homo sapien
tccttataaggagggctgtcacatc

SEQ ID NO: 2517725 - DNA, 25 bp, Homo sapien
ataaggtcgtattctgaagtactgg

SEQ ID NO: 2517726 - DNA, 25 bp, Homo sapien
cggattaaaggtccactctattcca

SEQ ID NO: 2517727 - DNA, 25 bp, Homo sapien
attcttcggattgtggcagcattgc

SEQ ID NO: 2517728 - DNA, 25 bp, Homo sapien
ccactgggcctggataccctgctat

SEQ ID NO: 2517729 - DNA, 25 bp, Homo sapien
tgatgacatctgcttaacctcctgg

SEQ ID NO: 2517730 - DNA, 25 bp, Homo sapien
gcttgtcgccaagagggcttcctcc

SEQ ID NO: 2517731 - DNA, 25 bp, Homo sapien
cctgcatgtttgtgtctgagtctgg

SEQ ID NO: 2517732 - DNA, 25 bp, Homo sapien
gcaaggcaggctttctcagtccagc

SEQ ID NO: 2517733 - DNA, 25 bp, Homo sapien
tctcagtccagcacaggcgttggct

SEQ ID NO: 2517734 - DNA, 25 bp, Homo sapien
ggcaggctttctcagtccagcacag

SEQ ID NO: 2517735 - DNA, 25 bp, Homo sapien
ctactagagcaaggcaggctttctc

SEQ ID NO: 2517736 - DNA, 25 bp, Homo sapien
tttcttctctcaccgtctctgccag

SEQ ID NO: 2517737 - DNA, 25 bp, Homo sapien
aggaagctgccctggactcccacag

SEQ ID NO: 2517738 - DNA, 25 bp, Homo sapien
ccaggaagctgccctggactcccac

SEQ ID NO: 2517739 - DNA, 25 bp, Homo sapien
aagctgccctggactcccacagacc

SEQ ID NO: 2517740 - DNA, 25 bp, Homo sapien
gcccaggaagctgccctggactccc

SEQ ID NO: 2517741 - DNA, 25 bp, Homo sapien
caatgggcaggaatgttactgtaca

SEQ ID NO: 2517742 - DNA, 25 bp, Homo sapien
gacaatgggcaggaatgttactgta

SEQ ID NO: 2517743 - DNA, 25 bp, Homo sapien
ctggacaatgggcaggaatgttact

SEQ ID NO: 2517744 - DNA, 25 bp, Homo sapien
atgggcaggaatgttactgtacaag

SEQ ID NO: 2517745 - DNA, 25 bp, Homo sapien
tctttttgacaactggacacctgct

SEQ ID NO: 2517746 - DNA, 25 bp, Homo sapien
tgctgccaagagcaataatccccat

SEQ ID NO: 2517747 - DNA, 25 bp, Homo sapien
ggccaagaccaatctgtctttttga

SEQ ID NO: 2517748 - DNA, 25 bp, Homo sapien
cacctgctgccaagagcaataatcc

SEQ ID NO: 2517749 - DNA, 25 bp, Homo sapien
cactggaactctgtttgtaggatga

SEQ ID NO: 2517750 - DNA, 25 bp, Homo sapien
ggtgaaaactgatatgaccacttga

SEQ ID NO: 2517751 - DNA, 25 bp, Homo sapien
aaatacctgcagaagatgtaatgcc

SEQ ID NO: 2517752 - DNA, 25 bp, Homo sapien
aatccagtttacagtgaattcaggg

SEQ ID NO: 2517753 - DNA, 25 bp, Homo sapien
aaggctgtagttgctgctgaagaca

SEQ ID NO: 2517754 - DNA, 25 bp, Homo sapien
taaataggggttctgctgtttcaaa

SEQ ID NO: 2517755 - DNA, 25 bp, Homo sapien
gaagacacatagtaaataggggttc

SEQ ID NO: 2517756 - DNA, 25 bp, Homo sapien
ctaaggctgtagttgctgctgaaga

SEQ ID NO: 2517757 - DNA, 25 bp, Homo sapien
gatatccagtttccaggtaggtcct

SEQ ID NO: 2517758 - DNA, 25 bp, Homo sapien
gctgattttctgacagccccttctc

SEQ ID NO: 2517759 - DNA, 25 bp, Homo sapien
tccttccaggtaggcgcccccctga

SEQ ID NO: 2517760 - DNA, 25 bp, Homo sapien
gagctgattttctgacagccccttc

SEQ ID NO: 2517761 - DNA, 25 bp, Homo sapien
agaaggtaaactctgaccagctgca

SEQ ID NO: 2517762 - DNA, 25 bp, Homo sapien
cacaggggtaggacatagaaggtaa

SEQ ID NO: 2517763 - DNA, 25 bp, Homo sapien
tgctgccccacagcagtatctgaag

SEQ ID NO: 2517764 - DNA, 25 bp, Homo sapien
catgtgcagctacctctgcagaaaa

SEQ ID NO: 2517765 - DNA, 25 bp, Homo sapien
gcttttgttaaaatataaatctgta

SEQ ID NO: 2517766 - DNA, 25 bp, Homo sapien
aggcttttgttaaaatataaatctg

SEQ ID NO: 2517767 - DNA, 25 bp, Homo sapien
gggaggaggcttctttgaaggccac

SEQ ID NO: 2517768 - DNA, 25 bp, Homo sapien
tctgggaggaggcttctttgaaggc

SEQ ID NO: 2517769 - DNA, 25 bp, Homo sapien
cttctgggaggaggcttctttgaag

SEQ ID NO: 2517770 - DNA, 25 bp, Homo sapien
ctgggaggaggcttctttgaaggcc

SEQ ID NO: 2517771 - DNA, 25 bp, Homo sapien
cgatcgcgtggtttctgattctccc

SEQ ID NO: 2517772 - DNA, 25 bp, Homo sapien
tgattctccccgtagtgatcgtgcc

SEQ ID NO: 2517773 - DNA, 25 bp, Homo sapien
tttgcgtggccgatgtgtgaacttt

SEQ ID NO: 2517774 - DNA, 25 bp, Homo sapien
cgtagtgatcgtgccttcccaggta

SEQ ID NO: 2517775 - DNA, 25 bp, Homo sapien
tcagcttgcgctgacaacaggagac

SEQ ID NO: 2517776 - DNA, 25 bp, Homo sapien
tgccgtcagcttgcgctgacaacag

SEQ ID NO: 2517777 - DNA, 25 bp, Homo sapien
gccttgccgtcagcttgcgctgaca

SEQ ID NO: 2517778 - DNA, 25 bp, Homo sapien
ttgcgctgacaacaggagaccaggc

SEQ ID NO: 2517779 - DNA, 25 bp, Homo sapien
tataaaatttgactgagctcctcct

SEQ ID NO: 2517780 - DNA, 25 bp, Homo sapien
tctctcggcaagatcaaacttggtc

SEQ ID NO: 2517781 - DNA, 25 bp, Homo sapien
gggtttacagaacgaggatctctcg

SEQ ID NO: 2517782 - DNA, 25 bp, Homo sapien
agctcctcctcgtgaaatggattca

SEQ ID NO: 2517783 - DNA, 25 bp, Homo sapien
taaagctagagtcctaatcccctct

SEQ ID NO: 2517784 - DNA, 25 bp, Homo sapien
ttgcctttgctctccctatcaccca

SEQ ID NO: 2517785 - DNA, 25 bp, Homo sapien
gataccggttaaagctagagtccta

SEQ ID NO: 2517786 - DNA, 25 bp, Homo sapien
tatcacccaccttagagataccggt

SEQ ID NO: 2517787 - DNA, 25 bp, Homo sapien
tcttcaggccccgctaatctccatg

SEQ ID NO: 2517788 - DNA, 25 bp, Homo sapien
ttcaggccccgctaatctccatggc

SEQ ID NO: 2517789 - DNA, 25 bp, Homo sapien
atccagttcttcaggccccgctaat

SEQ ID NO: 2517790 - DNA, 25 bp, Homo sapien
tcatccagttcttcaggccccgcta

SEQ ID NO: 2517791 - DNA, 25 bp, Homo sapien
acaaagatgttgagaaggacttcca

SEQ ID NO: 2517792 - DNA, 25 bp, Homo sapien
cgttgacagtaatgatgcacatgtc

SEQ ID NO: 2517793 - DNA, 25 bp, Homo sapien
tgaattggctatggccttgtgacca

SEQ ID NO: 2517794 - DNA, 25 bp, Homo sapien
cttgtgaccaagttccagccaggga

SEQ ID NO: 2517795 - DNA, 25 bp, Homo sapien
tggacctactaaaatcctcatcctt

SEQ ID NO: 2517796 - DNA, 25 bp, Homo sapien
tctggacctactaaaatcctcatcc

SEQ ID NO: 2517797 - DNA, 25 bp, Homo sapien
tttctggacctactaaaatcctcat

SEQ ID NO: 2517798 - DNA, 25 bp, Homo sapien
tcatttctggacctactaaaatcct

SEQ ID NO: 2517799 - DNA, 25 bp, Homo sapien
tacacgcagttgaggccacaaatca

SEQ ID NO: 2517800 - DNA, 25 bp, Homo sapien
ttttggaaattgtgcacacccatgt

SEQ ID NO: 2517801 - DNA, 25 bp, Homo sapien
cttggataggaagcacgaataagcc

SEQ ID NO: 2517802 - DNA, 25 bp, Homo sapien
tccaggtggatcaactctacataga

SEQ ID NO: 2517803 - DNA, 25 bp, Homo sapien
tcaacacgttaatgggagggcacaa

SEQ ID NO: 2517804 - DNA, 25 bp, Homo sapien
tcagattagatcaaggccactctca

SEQ ID NO: 2517805 - DNA, 25 bp, Homo sapien
cctttccttgacttagagatggctg

SEQ ID NO: 2517806 - DNA, 25 bp, Homo sapien
tctgggagtacaagatcaaggtgtt

SEQ ID NO: 2517807 - DNA, 25 bp, Homo sapien
tgcagatattggcaatgcctgactc

SEQ ID NO: 2517808 - DNA, 25 bp, Homo sapien
tgcctgactcaggtaccctagactt

SEQ ID NO: 2517809 - DNA, 25 bp, Homo sapien
gactcaggtaccctagactttcttc

SEQ ID NO: 2517810 - DNA, 25 bp, Homo sapien
tattggcaatgcctgactcaggtac

SEQ ID NO: 2517811 - DNA, 25 bp, Homo sapien
ttgtaaatcccctgaaacagcatgg

SEQ ID NO: 2517812 - DNA, 25 bp, Homo sapien
tgtaaatcccctgaaacagcatggg

SEQ ID NO: 2517813 - DNA, 25 bp, Homo sapien
agaaggtggtgctcttgatacccaa

SEQ ID NO: 2517814 - DNA, 25 bp, Homo sapien
gctcttgatacccaatgggaccagg

SEQ ID NO: 2517815 - DNA, 25 bp, Homo sapien
tgccgctgtggccatttttccaacc

SEQ ID NO: 2517816 - DNA, 25 bp, Homo sapien
catgagcttcagctgagaatcttcc

SEQ ID NO: 2517817 - DNA, 25 bp, Homo sapien
tgtggccatttttccaaccatgagc

SEQ ID NO: 2517818 - DNA, 25 bp, Homo sapien
tgagcttcagctgagaatcttccat

SEQ ID NO: 2517819 - DNA, 25 bp, Homo sapien
tggaagtgctagaatagcgctcaat

SEQ ID NO: 2517820 - DNA, 25 bp, Homo sapien
gaagatctttctttggcaggtcttt

SEQ ID NO: 2517821 - DNA, 25 bp, Homo sapien
ctttggcaggtctttctttgctgag

SEQ ID NO: 2517822 - DNA, 25 bp, Homo sapien
agtgctagaatagcgctcaattgtt

SEQ ID NO: 2517823 - DNA, 25 bp, Homo sapien
catctattcaaggaaggcttaagcc

SEQ ID NO: 2517824 - DNA, 25 bp, Homo sapien
tgtaagaaaccagcttggagaatcc

SEQ ID NO: 2517825 - DNA, 25 bp, Homo sapien
cattatagccctcatggaagctgga

SEQ ID NO: 2517826 - DNA, 25 bp, Homo sapien
ccttgagtcaaatcccagagtgaga

SEQ ID NO: 2517827 - DNA, 25 bp, Homo sapien
tgagaactttcgctgtggactgtta

SEQ ID NO: 2517828 - DNA, 25 bp, Homo sapien
agaactttcgctgtggactgttagg

SEQ ID NO: 2517829 - DNA, 25 bp, Homo sapien
aaatgagaactttcgctgtggactg

SEQ ID NO: 2517830 - DNA, 25 bp, Homo sapien
aatgagaactttcgctgtggactgt

SEQ ID NO: 2517831 - DNA, 25 bp, Homo sapien
cattttccaaggaggtttgcatcca

SEQ ID NO: 2517832 - DNA, 25 bp, Homo sapien
gagaaggatggcctatcccaaggtc

SEQ ID NO: 2517833 - DNA, 25 bp, Homo sapien
ccaaggtcccttgcggttctgaatg

SEQ ID NO: 2517834 - DNA, 25 bp, Homo sapien
gaatgtggttctgcgtagtccatag

SEQ ID NO: 2517835 - DNA, 25 bp, Homo sapien
ttttcgactcgtcaggagcttgggt

SEQ ID NO: 2517836 - DNA, 25 bp, Homo sapien
ctgaggtccacggagatcacagggt

SEQ ID NO: 2517837 - DNA, 25 bp, Homo sapien
gaaagacggttccaagcttcttggc

SEQ ID NO: 2517838 - DNA, 25 bp, Homo sapien
gagaaagacggttccaagcttcttg

SEQ ID NO: 2517839 - DNA, 25 bp, Homo sapien
tggaaatgtattcatcagaccctgt

SEQ ID NO: 2517840 - DNA, 25 bp, Homo sapien
ctggaaatgtattcatcagaccctg

SEQ ID NO: 2517841 - DNA, 25 bp, Homo sapien
ttactgttaattccctgagggcttc

SEQ ID NO: 2517842 - DNA, 25 bp, Homo sapien
gctttttccaataacttgcctccac

SEQ ID NO: 2517843 - DNA, 25 bp, Homo sapien
ggcattttactgttaattccctgag

SEQ ID NO: 2517844 - DNA, 25 bp, Homo sapien
ctcaactgaaatggcccatcctggc

SEQ ID NO: 2517845 - DNA, 25 bp, Homo sapien
agccttccaggaatcaagtcctgca

SEQ ID NO: 2517846 - DNA, 25 bp, Homo sapien
ccttccaggaatcaagtcctgcact

SEQ ID NO: 2517847 - DNA, 25 bp, Homo sapien
ttccaggaatcaagtcctgcacttg

SEQ ID NO: 2517848 - DNA, 25 bp, Homo sapien
tccaggaatcaagtcctgcacttgg

SEQ ID NO: 2517849 - DNA, 25 bp, Homo sapien
ctgccccagaatttccggaaatgat

SEQ ID NO: 2517850 - DNA, 25 bp, Homo sapien
ccagaatttccggaaatgattaagg

SEQ ID NO: 2517851 - DNA, 25 bp, Homo sapien
gccccagaatttccggaaatgatta

SEQ ID NO: 2517852 - DNA, 25 bp, Homo sapien
agaatttccggaaatgattaaggag

SEQ ID NO: 2517853 - DNA, 25 bp, Homo sapien
tgagtgtaccggtgactgggaaaca

SEQ ID NO: 2517854 - DNA, 25 bp, Homo sapien
tgactgggaaacaccacaactccct

SEQ ID NO: 2517855 - DNA, 25 bp, Homo sapien
gctgcctggtgtgagaataccccat

SEQ ID NO: 2517856 - DNA, 25 bp, Homo sapien
aagggtttgtgggacagttgccaat

SEQ ID NO: 2517857 - DNA, 25 bp, Homo sapien
caggactcagcccacccaatttcta

SEQ ID NO: 2517858 - DNA, 25 bp, Homo sapien
aggactcagcccacccaatttctac

SEQ ID NO: 2517859 - DNA, 25 bp, Homo sapien
tgctgaggtacaagatcaccagact

SEQ ID NO: 2517860 - DNA, 25 bp, Homo sapien
tgaggtacaagatcaccagacttac

SEQ ID NO: 2517861 - DNA, 25 bp, Homo sapien
cccccgcaggattgcttcccccagg

SEQ ID NO: 2517862 - DNA, 25 bp, Homo sapien
tgtgggtgccccccgcaggattgct

SEQ ID NO: 2517863 - DNA, 25 bp, Homo sapien
aaagccaggcccaccagtccatgat

SEQ ID NO: 2517864 - DNA, 25 bp, Homo sapien
ggcccaccagtccatgataacctgg

SEQ ID NO: 2517865 - DNA, 25 bp, Homo sapien
cgaggagtagtgaaaattccagttc

SEQ ID NO: 2517866 - DNA, 25 bp, Homo sapien
caggaaataaataagtcgaggagta

SEQ ID NO: 2517867 - DNA, 25 bp, Homo sapien
catattcaaattggtggcacagtca

SEQ ID NO: 2517868 - DNA, 25 bp, Homo sapien
cctgctgcaaacacgggcatgtgtc

SEQ ID NO: 2517869 - DNA, 25 bp, Homo sapien
gctgaaagggctgattccttccaca

SEQ ID NO: 2517870 - DNA, 25 bp, Homo sapien
taaaaagccatagcacgccctgctg

SEQ ID NO: 2517871 - DNA, 25 bp, Homo sapien
ccttcttggatctggaccacattca

SEQ ID NO: 2517872 - DNA, 25 bp, Homo sapien
ttggatctggaccacattcagggat

SEQ ID NO: 2517873 - DNA, 25 bp, Homo sapien
cattcagggatgcactctttttctt

SEQ ID NO: 2517874 - DNA, 25 bp, Homo sapien
cttggccttcttggatctggaccac

SEQ ID NO: 2517875 - DNA, 25 bp, Homo sapien
cctgggcattgggttcggaatttat

SEQ ID NO: 2517876 - DNA, 25 bp, Homo sapien
tagtctctagcagggattccattcc

SEQ ID NO: 2517877 - DNA, 25 bp, Homo sapien
cacatgcctgggtgtttcacaatgc

SEQ ID NO: 2517878 - DNA, 25 bp, Homo sapien
tatagagacagattgacttctagtc

SEQ ID NO: 2517879 - DNA, 25 bp, Homo sapien
tgctgtccagtgatgttccagtgcc

SEQ ID NO: 2517880 - DNA, 25 bp, Homo sapien
gatgtcagagtgctgtccagtgtga

SEQ ID NO: 2517881 - DNA, 25 bp, Homo sapien
tccagtgtgatatcagagtgctgtc

SEQ ID NO: 2517882 - DNA, 25 bp, Homo sapien
gactatttgagacacttgcactgag

SEQ ID NO: 2517883 - DNA, 25 bp, Homo sapien
ggttgtctgtattctccagacagca

SEQ ID NO: 2517884 - DNA, 25 bp, Homo sapien
agacagcaccagcttgacatgacct

SEQ ID NO: 2517885 - DNA, 25 bp, Homo sapien
gacatgacctccttacctagatcct

SEQ ID NO: 2517886 - DNA, 25 bp, Homo sapien
tttgccttggattgagcccagctgg

SEQ ID NO: 2517887 - DNA, 25 bp, Homo sapien
tattcaacccatagggcccagactt

SEQ ID NO: 2517888 - DNA, 25 bp, Homo sapien
gtccaccatattcaacccatagggc

SEQ ID NO: 2517889 - DNA, 25 bp, Homo sapien
cccatagggcccagacttgtgacct

SEQ ID NO: 2517890 - DNA, 25 bp, Homo sapien
tgtccaccatattcaacccataggg

SEQ ID NO: 2517891 - DNA, 25 bp, Homo sapien
ggtcccatgtgaagctctagagcca

SEQ ID NO: 2517892 - DNA, 25 bp, Homo sapien
aatatacacagggagacatgtcagg

SEQ ID NO: 2517893 - DNA, 25 bp, Homo sapien
tctagagccagtaatgaggatgatc

SEQ ID NO: 2517894 - DNA, 25 bp, Homo sapien
tcattgaatccatagtgaggcccca

SEQ ID NO: 2517895 - DNA, 25 bp, Homo sapien
tgacctcaaaggaactaactgctga

SEQ ID NO: 2517896 - DNA, 25 bp, Homo sapien
tatgacctcaaaggaactaactgct

SEQ ID NO: 2517897 - DNA, 25 bp, Homo sapien
aacccattctgagctatgacctcaa

SEQ ID NO: 2517898 - DNA, 25 bp, Homo sapien
acctcaaaggaactaactgctgata

SEQ ID NO: 2517899 - DNA, 25 bp, Homo sapien
caaatgagccttatcatcattgctt

SEQ ID NO: 2517900 - DNA, 25 bp, Homo sapien
tccaaatgagccttatcatcattgc

SEQ ID NO: 2517901 - DNA, 25 bp, Homo sapien
ttctggaaagccacaattacagatt

SEQ ID NO: 2517902 - DNA, 25 bp, Homo sapien
cacaattacagattccaaatgagcc

SEQ ID NO: 2517903 - DNA, 25 bp, Homo sapien
gagcccaggtatgctggacttaagg

SEQ ID NO: 2517904 - DNA, 25 bp, Homo sapien
ggacttaagggcctctgcgactgat

SEQ ID NO: 2517905 - DNA, 25 bp, Homo sapien
tgtaaagcacccacaggattgagcc

SEQ ID NO: 2517906 - DNA, 25 bp, Homo sapien
tgtttcacaattagtccgaacctgc

SEQ ID NO: 2517907 - DNA, 25 bp, Homo sapien
tcatgtaaggtttctatgggccaag

SEQ ID NO: 2517908 - DNA, 25 bp, Homo sapien
cccacttcaggcttggaacacagag

SEQ ID NO: 2517909 - DNA, 25 bp, Homo sapien
cagcccgttagcattgacttgatca

SEQ ID NO: 2517910 - DNA, 25 bp, Homo sapien
aaaataagccttcggacttgccagc

SEQ ID NO: 2517911 - DNA, 25 bp, Homo sapien
gcttccatgatcgaaagggtcaggg

SEQ ID NO: 2517912 - DNA, 25 bp, Homo sapien
caaaccatgagatgcctcctagaag

SEQ ID NO: 2517913 - DNA, 25 bp, Homo sapien
tcctagaagctagccttgtccctag

SEQ ID NO: 2517914 - DNA, 25 bp, Homo sapien
gggtttccgtgaatcctcctcataa

SEQ ID NO: 2517915 - DNA, 25 bp, Homo sapien
ccaccaggcatcacaggcaaccatc

SEQ ID NO: 2517916 - DNA, 25 bp, Homo sapien
accaccaggcatcacaggcaaccat

SEQ ID NO: 2517917 - DNA, 25 bp, Homo sapien
tttgtgggagcaccaccaggcatca

SEQ ID NO: 2517918 - DNA, 25 bp, Homo sapien
gggagcaccaccaggcatcacaggc

SEQ ID NO: 2517919 - DNA, 25 bp, Homo sapien
taacaggacagctggcaaataagga

SEQ ID NO: 2517920 - DNA, 25 bp, Homo sapien
caggacagctggcaaataaggattc

SEQ ID NO: 2517921 - DNA, 25 bp, Homo sapien
ggacagctggcaaataaggattcat

SEQ ID NO: 2517922 - DNA, 25 bp, Homo sapien
aacaggacagctggcaaataaggat

SEQ ID NO: 2517923 - DNA, 25 bp, Homo sapien
gggccttgcagctgtcgaagcctgt

SEQ ID NO: 2517924 - DNA, 25 bp, Homo sapien
tggcatccccttcagagcacagatc

SEQ ID NO: 2517925 - DNA, 25 bp, Homo sapien
tgatgggcagagaacattgtgctcc

SEQ ID NO: 2517926 - DNA, 25 bp, Homo sapien
gatcatcataggtctcagaaatgcc

SEQ ID NO: 2517927 - DNA, 25 bp, Homo sapien
catctgtcttggcatacacagacac

SEQ ID NO: 2517928 - DNA, 25 bp, Homo sapien
tttgagtctgagatgctaatctgcc

SEQ ID NO: 2517929 - DNA, 25 bp, Homo sapien
ttagcaccgggagcagcctgggagt

SEQ ID NO: 2517930 - DNA, 25 bp, Homo sapien
tggacgtgtctgaggcgagatgtgg

SEQ ID NO: 2517931 - DNA, 25 bp, Homo sapien
cacaggcaaccaattgaatagccat

SEQ ID NO: 2517932 - DNA, 25 bp, Homo sapien
attgaatggtataagatccacagac

SEQ ID NO: 2517933 - DNA, 25 bp, Homo sapien
aattgaatggtataagatccacaga

SEQ ID NO: 2517934 - DNA, 25 bp, Homo sapien
agacacaggcaaccaattgaatagc

SEQ ID NO: 2517935 - DNA, 25 bp, Homo sapien
ggtgtttctcgaagacacaccacca

SEQ ID NO: 2517936 - DNA, 25 bp, Homo sapien
tggtgtttctcgaagacacaccacc

SEQ ID NO: 2517937 - DNA, 25 bp, Homo sapien
taggaagggcgagtctgtggccaaa

SEQ ID NO: 2517938 - DNA, 25 bp, Homo sapien
gggcgagtctgtggccaaatccatt

SEQ ID NO: 2517939 - DNA, 25 bp, Homo sapien
gaagggcgagtctgtggccaaatcc

SEQ ID NO: 2517940 - DNA, 25 bp, Homo sapien
attaggaagggcgagtctgtggcca

SEQ ID NO: 2517941 - DNA, 25 bp, Homo sapien
ggacgccttccagaagaagcacagg

SEQ ID NO: 2517942 - DNA, 25 bp, Homo sapien
gagacaggacgccttccagaagaag

SEQ ID NO: 2517943 - DNA, 25 bp, Homo sapien
aaatttgagaatctaccagagacag

SEQ ID NO: 2517944 - DNA, 25 bp, Homo sapien
gaatctaccagagacaggacgcctt

SEQ ID NO: 2517945 - DNA, 25 bp, Homo sapien
cagagatggggctccataattacct

SEQ ID NO: 2517946 - DNA, 25 bp, Homo sapien
ccataattaccttcagtggccctaa

SEQ ID NO: 2517947 - DNA, 25 bp, Homo sapien
gggctccataattaccttcagtggc

SEQ ID NO: 2517948 - DNA, 25 bp, Homo sapien
gatggggctccataattaccttcag

SEQ ID NO: 2517949 - DNA, 25 bp, Homo sapien
cacatcagataccaaagcagggaga

SEQ ID NO: 2517950 - DNA, 25 bp, Homo sapien
agggcaaaccgcaagctctggatgg

SEQ ID NO: 2517951 - DNA, 25 bp, Homo sapien
ttcttgggccacttgcgggtacaca

SEQ ID NO: 2517952 - DNA, 25 bp, Homo sapien
tttgtccatgacaaggaccctcggg

SEQ ID NO: 2517953 - DNA, 25 bp, Homo sapien
cgggtagccagcagtagggttgttc

SEQ ID NO: 2517954 - DNA, 25 bp, Homo sapien
gcttgatttgatgccccacttatcc

SEQ ID NO: 2517955 - DNA, 25 bp, Homo sapien
gttgttcagctcctaggaaccccca

SEQ ID NO: 2517956 - DNA, 25 bp, Homo sapien
tgagttctgtcccaaccaacagctg

SEQ ID NO: 2517957 - DNA, 25 bp, Homo sapien
gttgctcgaagttactttgatggtc

SEQ ID NO: 2517958 - DNA, 25 bp, Homo sapien
tgcaagttgctcgaagttactttga

SEQ ID NO: 2517959 - DNA, 25 bp, Homo sapien
ctcgaagttactttgatggtcaggg

SEQ ID NO: 2517960 - DNA, 25 bp, Homo sapien
gaatgcaagttgctcgaagttactt

SEQ ID NO: 2517961 - DNA, 25 bp, Homo sapien
tttggcactacatggctgatagctg

SEQ ID NO: 2517962 - DNA, 25 bp, Homo sapien
cctttgctctttggcactacatggc

SEQ ID NO: 2517963 - DNA, 25 bp, Homo sapien
gaagatggtggcgttcacagggcag

SEQ ID NO: 2517964 - DNA, 25 bp, Homo sapien
ggtggcattcacgagggttaggctg

SEQ ID NO: 2517965 - DNA, 25 bp, Homo sapien
tgctggctcacctcgggcttctggt

SEQ ID NO: 2517966 - DNA, 25 bp, Homo sapien
gtttggcaatcagaacgctccttcc

SEQ ID NO: 2517967 - DNA, 25 bp, Homo sapien
tgtaaacagcgtgtgggctcctcgg

SEQ ID NO: 2517968 - DNA, 25 bp, Homo sapien
ggatggcatccaagcaaaggcttct

SEQ ID NO: 2517969 - DNA, 25 bp, Homo sapien
tctttcctctcgacatttataaaaa

SEQ ID NO: 2517970 - DNA, 25 bp, Homo sapien
gctgtgggttgaacgcgtgcttcac

SEQ ID NO: 2517971 - DNA, 25 bp, Homo sapien
gatgccagggcttgtaaaccaaatc

SEQ ID NO: 2517972 - DNA, 25 bp, Homo sapien
gcttcactggataccaccaaggcca

SEQ ID NO: 2517973 - DNA, 25 bp, Homo sapien
gagaagaatggcttcatcaagtgga

SEQ ID NO: 2517974 - DNA, 25 bp, Homo sapien
cttcatcaagtggaatctgtttgaa

SEQ ID NO: 2517975 - DNA, 25 bp, Homo sapien
gaactggggtgtaatcccattaatg

SEQ ID NO: 2517976 - DNA, 25 bp, Homo sapien
ttgaaatcatccctgtaaacaaccc

SEQ ID NO: 2517977 - DNA, 25 bp, Homo sapien
ccacttggttagttgcaaacagtgt

SEQ ID NO: 2517978 - DNA, 25 bp, Homo sapien
tagttgcaaacagtgttgggttgtc

SEQ ID NO: 2517979 - DNA, 25 bp, Homo sapien
tttttggagaagctaagcagaatgt

SEQ ID NO: 2517980 - DNA, 25 bp, Homo sapien
ctccacactgggaactagctgtgta

SEQ ID NO: 2517981 - DNA, 25 bp, Homo sapien
ggacatagcaattcctcatctcttt

SEQ ID NO: 2517982 - DNA, 25 bp, Homo sapien
aagaggacatagcaattcctcatct

SEQ ID NO: 2517983 - DNA, 25 bp, Homo sapien
gaggacatagcaattcctcatctct

SEQ ID NO: 2517984 - DNA, 25 bp, Homo sapien
gacatagcaattcctcatctctttc

SEQ ID NO: 2517985 - DNA, 25 bp, Homo sapien
gttacactcatcatttgacacccac

SEQ ID NO: 2517986 - DNA, 25 bp, Homo sapien
aaaatgtccatccatggttacactc

SEQ ID NO: 2517987 - DNA, 25 bp, Homo sapien
tgtccatccatggttacactcatca

SEQ ID NO: 2517988 - DNA, 25 bp, Homo sapien
tccatggttacactcatcatttgac

SEQ ID NO: 2517989 - DNA, 25 bp, Homo sapien
tttcataggcttctaaagaatgcag

SEQ ID NO: 2517990 - DNA, 25 bp, Homo sapien
ttcataggcttctaaagaatgcagt

SEQ ID NO: 2517991 - DNA, 25 bp, Homo sapien
atgtagttcatttgcacagaattcc

SEQ ID NO: 2517992 - DNA, 25 bp, Homo sapien
tgttgctgaatgtagttcatttgca

SEQ ID NO: 2517993 - DNA, 25 bp, Homo sapien
ctccaacaggccacttgacagcaga

SEQ ID NO: 2517994 - DNA, 25 bp, Homo sapien
tctccaacaggccacttgacagcag

SEQ ID NO: 2517995 - DNA, 25 bp, Homo sapien
cccatacaccctacacagccctcac

SEQ ID NO: 2517996 - DNA, 25 bp, Homo sapien
accttcccccatacaccctacacag

SEQ ID NO: 2517997 - DNA, 25 bp, Homo sapien
ccccatacaccctacacagccctca

SEQ ID NO: 2517998 - DNA, 25 bp, Homo sapien
ttcccccatacaccctacacagccc

SEQ ID NO: 2517999 - DNA, 25 bp, Homo sapien
gggtgtcccaaaacatccaggcatc

SEQ ID NO: 2518000 - DNA, 25 bp, Homo sapien
tctggcaacagtccttgggtgtccc

SEQ ID NO: 2518001 - DNA, 25 bp, Homo sapien
atgatgatctggcatggcttcccca

SEQ ID NO: 2518002 - DNA, 25 bp, Homo sapien
agaggcctccgctcttgctgttctg

SEQ ID NO: 2518003 - DNA, 25 bp, Homo sapien
atgaaggccaaagcagtccctgcat

SEQ ID NO: 2518004 - DNA, 25 bp, Homo sapien
gaccatctgatccacccactcccaa

SEQ ID NO: 2518005 - DNA, 25 bp, Homo sapien
ctgatccacccactcccaaaatcca

SEQ ID NO: 2518006 - DNA, 25 bp, Homo sapien
atccatgaaggccaaagcagtccct

SEQ ID NO: 2518007 - DNA, 25 bp, Homo sapien
caggcctcaggccaagaaaactctg

SEQ ID NO: 2518008 - DNA, 25 bp, Homo sapien
tgtgacccacaaaactcctgcgaga

SEQ ID NO: 2518009 - DNA, 25 bp, Homo sapien
tgttctttacaaccggcactgcctg

SEQ ID NO: 2518010 - DNA, 25 bp, Homo sapien
gtttcacgtctctctctttcacgag

SEQ ID NO: 2518011 - DNA, 25 bp, Homo sapien
atgtgcaagttcctgggtgcaccac

SEQ ID NO: 2518012 - DNA, 25 bp, Homo sapien
tcttgcttggaacatgtgcaagttc

SEQ ID NO: 2518013 - DNA, 25 bp, Homo sapien
tgaagagatactagggtgaggaatg

SEQ ID NO: 2518014 - DNA, 25 bp, Homo sapien
tgttcaggtatccagaagctgttct

SEQ ID NO: 2518015 - DNA, 25 bp, Homo sapien
ggccatctctgttatcacttggtga

SEQ ID NO: 2518016 - DNA, 25 bp, Homo sapien
taaaaatggctaccagtagtatctc

SEQ ID NO: 2518017 - DNA, 25 bp, Homo sapien
tctcttagttctgtggtgctctttc

SEQ ID NO: 2518018 - DNA, 25 bp, Homo sapien
gtagtatctctaggtttacatcatc

SEQ ID NO: 2518019 - DNA, 25 bp, Homo sapien
tctcttgttacatcatgaggaaaag

SEQ ID NO: 2518020 - DNA, 25 bp, Homo sapien
cattaactgaggcataaacttccta

SEQ ID NO: 2518021 - DNA, 25 bp, Homo sapien
cctaattgtgaagagcatgattggc

SEQ ID NO: 2518022 - DNA, 25 bp, Homo sapien
gcggtgaatacctcatcgttctcaa

SEQ ID NO: 2518023 - DNA, 25 bp, Homo sapien
gcaacatgatcccaccactctagat

SEQ ID NO: 2518024 - DNA, 25 bp, Homo sapien
ttcactttgaaatctccttctcaac

SEQ ID NO: 2518025 - DNA, 25 bp, Homo sapien
ccaacgtagcttcatgggcaacatg

SEQ ID NO: 2518026 - DNA, 25 bp, Homo sapien
tcaacagggagcactcctattagct

SEQ ID NO: 2518027 - DNA, 25 bp, Homo sapien
gacaggagccataaagcatgttgca

SEQ ID NO: 2518028 - DNA, 25 bp, Homo sapien
tgggctcaaaccaatcaaatgagtg

SEQ ID NO: 2518029 - DNA, 25 bp, Homo sapien
aacactttgggtggttatccagctt

SEQ ID NO: 2518030 - DNA, 25 bp, Homo sapien
gcatgttgcaccaattaaattacac

SEQ ID NO: 2518031 - DNA, 25 bp, Homo sapien
catttgtactcaagacagcaggcct

SEQ ID NO: 2518032 - DNA, 25 bp, Homo sapien
ccagtttggcaacaagcagtcagtc

SEQ ID NO: 2518033 - DNA, 25 bp, Homo sapien
tgtaaactaagacggtgcaaggccc

SEQ ID NO: 2518034 - DNA, 25 bp, Homo sapien
ggcctgggcaaaactcgcctgaatt

SEQ ID NO: 2518035 - DNA, 25 bp, Homo sapien
tatctacacgtctaccagtggtggc

SEQ ID NO: 2518036 - DNA, 25 bp, Homo sapien
caaagaggtaaccagcctgtgagcc

SEQ ID NO: 2518037 - DNA, 25 bp, Homo sapien
caaggagctaaatcaccatgggctg

SEQ ID NO: 2518038 - DNA, 25 bp, Homo sapien
caacctgaaggaacgcataagccaa

SEQ ID NO: 2518039 - DNA, 25 bp, Homo sapien
caagtcaaaagagtcgctggacagc

SEQ ID NO: 2518040 - DNA, 25 bp, Homo sapien
gatctccagcgcttgcttgtagacc

SEQ ID NO: 2518041 - DNA, 25 bp, Homo sapien
ttttctgcagagacgcagctgcgga

SEQ ID NO: 2518042 - DNA, 25 bp, Homo sapien
tcatcgctgatgacactggaagggc

SEQ ID NO: 2518043 - DNA, 25 bp, Homo sapien
tcattactgtccaacagctccgaag

SEQ ID NO: 2518044 - DNA, 25 bp, Homo sapien
ctccgaagactcactgcgctctggg

SEQ ID NO: 2518045 - DNA, 25 bp, Homo sapien
tgtgtttcaagatgcccttcctccg

SEQ ID NO: 2518046 - DNA, 25 bp, Homo sapien
ccatggtgcccgctgagtatttgct

SEQ ID NO: 2518047 - DNA, 25 bp, Homo sapien
gactcagagtcatggagggcatcac

SEQ ID NO: 2518048 - DNA, 25 bp, Homo sapien
tgccagtcaatgatccgagccagga

SEQ ID NO: 2518049 - DNA, 25 bp, Homo sapien
aatgtcctcaatagtggcccggcga

SEQ ID NO: 2518050 - DNA, 25 bp, Homo sapien
acttggatgggctttcaggcactgc

SEQ ID NO: 2518051 - DNA, 25 bp, Homo sapien
tctgagaccaacactcagtgagctt

SEQ ID NO: 2518052 - DNA, 25 bp, Homo sapien
caacactcagtgagcttgccttctt

SEQ ID NO: 2518053 - DNA, 25 bp, Homo sapien
ctgggcagtaagcgtggccatctcc

SEQ ID NO: 2518054 - DNA, 25 bp, Homo sapien
tccaaagctggcctcgccccaaggt

SEQ ID NO: 2518055 - DNA, 25 bp, Homo sapien
gcactgaggaaggtccaccattcag

SEQ ID NO: 2518056 - DNA, 25 bp, Homo sapien
gagcactgaggaaggtccaccattc

SEQ ID NO: 2518057 - DNA, 25 bp, Homo sapien
actgaggaaggtccaccattcagcc

SEQ ID NO: 2518058 - DNA, 25 bp, Homo sapien
tgaggaaggtccaccattcagcccc

SEQ ID NO: 2518059 - DNA, 25 bp, Homo sapien
tgatcgaaaccatcgaagggcattg

SEQ ID NO: 2518060 - DNA, 25 bp, Homo sapien
aagagtgtaaagcaacacacccagg

SEQ ID NO: 2518061 - DNA, 25 bp, Homo sapien
ggctgtgttggctcccggtactctc

SEQ ID NO: 2518062 - DNA, 25 bp, Homo sapien
tccgctgctgatttgccgaatgagg

SEQ ID NO: 2518063 - DNA, 25 bp, Homo sapien
cccattgacaatctcaggagatgca

SEQ ID NO: 2518064 - DNA, 25 bp, Homo sapien
ggccctcggtaaggtctcccattga

SEQ ID NO: 2518065 - DNA, 25 bp, Homo sapien
agagtggactcccacaaaacgtttg

SEQ ID NO: 2518066 - DNA, 25 bp, Homo sapien
cgtttgtaagaacttatccttctgg

SEQ ID NO: 2518067 - DNA, 25 bp, Homo sapien
tggtttcttgaagtgttttatgtgt

SEQ ID NO: 2518068 - DNA, 25 bp, Homo sapien
cttgaagtgttttatgtgttatcat

SEQ ID NO: 2518069 - DNA, 25 bp, Homo sapien
cattctcttctcctttggtttcttg

SEQ ID NO: 2518070 - DNA, 25 bp, Homo sapien
ggagtcattctcttctcctttggtt

SEQ ID NO: 2518071 - DNA, 25 bp, Homo sapien
tcacagactgatgtttatcagcctc

SEQ ID NO: 2518072 - DNA, 25 bp, Homo sapien
tatgttatggcccactcctatcctc

SEQ ID NO: 2518073 - DNA, 25 bp, Homo sapien
tgtagccgttctggagaagtgtgtt

SEQ ID NO: 2518074 - DNA, 25 bp, Homo sapien
cctcatttgctctgtagccgttctg

SEQ ID NO: 2518075 - DNA, 25 bp, Homo sapien
cagcagcaagtacatgaaggagcac

SEQ ID NO: 2518076 - DNA, 25 bp, Homo sapien
ggttccagggcataagaagttttgc

SEQ ID NO: 2518077 - DNA, 25 bp, Homo sapien
caagccgtacagtttctccaacaga

SEQ ID NO: 2518078 - DNA, 25 bp, Homo sapien
gcccctcgctctaaaagtgaagcag

SEQ ID NO: 2518079 - DNA, 25 bp, Homo sapien
cataaaggggagttattgctgtcag

SEQ ID NO: 2518080 - DNA, 25 bp, Homo sapien
attgctgtcaggtggctgacgagga

SEQ ID NO: 2518081 - DNA, 25 bp, Homo sapien
tcaggtggctgacgaggaaatgcac

SEQ ID NO: 2518082 - DNA, 25 bp, Homo sapien
gttctacataaaggggagttattgc

SEQ ID NO: 2518083 - DNA, 25 bp, Homo sapien
cctgagttgccaggaagtgaaggca

SEQ ID NO: 2518084 - DNA, 25 bp, Homo sapien
tgtgtaactcttcgggaagacagca

SEQ ID NO: 2518085 - DNA, 25 bp, Homo sapien
tccggccttggagttgatcgctgtg

SEQ ID NO: 2518086 - DNA, 25 bp, Homo sapien
tcagaggatctaagctcatgctgcc

SEQ ID NO: 2518087 - DNA, 25 bp, Homo sapien
catgtgacaagtttaaaccagtagc

SEQ ID NO: 2518088 - DNA, 25 bp, Homo sapien
agtagcatttatataggcttcctag

SEQ ID NO: 2518089 - DNA, 25 bp, Homo sapien
gtgacaagtttaaaccagtagcatt

SEQ ID NO: 2518090 - DNA, 25 bp, Homo sapien
tataggcttcctaggccaaagtcct

SEQ ID NO: 2518091 - DNA, 25 bp, Homo sapien
ccttgaaacgtggaaaatggatcca

SEQ ID NO: 2518092 - DNA, 25 bp, Homo sapien
ggatcttgctgctcatgtcccgctg

SEQ ID NO: 2518093 - DNA, 25 bp, Homo sapien
gctctcttgagcacagaggccggct

SEQ ID NO: 2518094 - DNA, 25 bp, Homo sapien
tgtcccgctggttcgtggctcgtgt

SEQ ID NO: 2518095 - DNA, 25 bp, Homo sapien
agttgtcatcgagcagtatattttc

SEQ ID NO: 2518096 - DNA, 25 bp, Homo sapien
cagcttcaagtcccggtggaccaca

SEQ ID NO: 2518097 - DNA, 25 bp, Homo sapien
gcttcaagtcccggtggaccacacc

SEQ ID NO: 2518098 - DNA, 25 bp, Homo sapien
cttcaagtcccggtggaccacaccg

SEQ ID NO: 2518099 - DNA, 25 bp, Homo sapien
agcttcaagtcccggtggaccacac

SEQ ID NO: 2518100 - DNA, 25 bp, Homo sapien
agacaaagagggaattgaatgggag

SEQ ID NO: 2518101 - DNA, 25 bp, Homo sapien
caaagagggaattgaatgggagcgg

SEQ ID NO: 2518102 - DNA, 25 bp, Homo sapien
gacaaagagggaattgaatgggagc

SEQ ID NO: 2518103 - DNA, 25 bp, Homo sapien
acaaagagggaattgaatgggagcg

SEQ ID NO: 2518104 - DNA, 25 bp, Homo sapien
agagcattagtcacttgctgtgtgg

SEQ ID NO: 2518105 - DNA, 25 bp, Homo sapien
cagcgaccaaccagcgacaggagag

SEQ ID NO: 2518106 - DNA, 25 bp, Homo sapien
cacttgctgtgtggttaagggaaaa

SEQ ID NO: 2518107 - DNA, 25 bp, Homo sapien
gggattctttgtcggaatgtaattc

SEQ ID NO: 2518108 - DNA, 25 bp, Homo sapien
gctgaacttcaatgaccagcagcca

SEQ ID NO: 2518109 - DNA, 25 bp, Homo sapien
aacttcaatgaccagcagccagcca

SEQ ID NO: 2518110 - DNA, 25 bp, Homo sapien
ctgaacttcaatgaccagcagccag

SEQ ID NO: 2518111 - DNA, 25 bp, Homo sapien
gaggctgaacttcaatgaccagcag

SEQ ID NO: 2518112 - DNA, 25 bp, Homo sapien
cctttgctggcatattccatgatga

SEQ ID NO: 2518113 - DNA, 25 bp, Homo sapien
tctgccggaagaagtgccgggtctc

SEQ ID NO: 2518114 - DNA, 25 bp, Homo sapien
gatgtaatcgtacagctcccctttg

SEQ ID NO: 2518115 - DNA, 25 bp, Homo sapien
gaggcgtcgccgctcactgatgtaa

SEQ ID NO: 2518116 - DNA, 25 bp, Homo sapien
caatgaagaactgagttgacctgga

SEQ ID NO: 2518117 - DNA, 25 bp, Homo sapien
tgagttgacctggaacctaccctag

SEQ ID NO: 2518118 - DNA, 25 bp, Homo sapien
ctgtcctcccataccttgttgctgg

SEQ ID NO: 2518119 - DNA, 25 bp, Homo sapien
gtcctcccataccttgttgctggct

SEQ ID NO: 2518120 - DNA, 25 bp, Homo sapien
tgagggaaacgctgatgagtgagga

SEQ ID NO: 2518121 - DNA, 25 bp, Homo sapien
cagtgctctggtctgagggaaacgc

SEQ ID NO: 2518122 - DNA, 25 bp, Homo sapien
aacgctgatgagtgaggagatcctg

SEQ ID NO: 2518123 - DNA, 25 bp, Homo sapien
aaacagtgctctggtctgagggaaa

SEQ ID NO: 2518124 - DNA, 25 bp, Homo sapien
cacgtgacagccgaatatactggac

SEQ ID NO: 2518125 - DNA, 25 bp, Homo sapien
cagccgaatatactggactgttttg

SEQ ID NO: 2518126 - DNA, 25 bp, Homo sapien
cgtgacagccgaatatactggactg

SEQ ID NO: 2518127 - DNA, 25 bp, Homo sapien
ctggccacgtgacagccgaatatac

SEQ ID NO: 2518128 - DNA, 25 bp, Homo sapien
ggtcagtacagtcctcacagaaagt

SEQ ID NO: 2518129 - DNA, 25 bp, Homo sapien
catcaggtccgtctcctaggtgaca

SEQ ID NO: 2518130 - DNA, 25 bp, Homo sapien
agtacctttccactcctcaagggtg

SEQ ID NO: 2518131 - DNA, 25 bp, Homo sapien
tttcaaacacctcgtgggctcacag

SEQ ID NO: 2518132 - DNA, 25 bp, Homo sapien
aagtggactccacggaaggcagaag

SEQ ID NO: 2518133 - DNA, 25 bp, Homo sapien
ccaatgaggccacccactgccagaa

SEQ ID NO: 2518134 - DNA, 25 bp, Homo sapien
tctttctggatgttggctggcatgc

SEQ ID NO: 2518135 - DNA, 25 bp, Homo sapien
tggcatgcccgaagaaaaccacagc

SEQ ID NO: 2518136 - DNA, 25 bp, Homo sapien
catccgtgcctgctaggattaatag

SEQ ID NO: 2518137 - DNA, 25 bp, Homo sapien
caagacccatccgtgcctgctagga

SEQ ID NO: 2518138 - DNA, 25 bp, Homo sapien
gccttgccaagacccatccgtgcct

SEQ ID NO: 2518139 - DNA, 25 bp, Homo sapien
taggattaatagtgccaatggggcc

SEQ ID NO: 2518140 - DNA, 25 bp, Homo sapien
cgggactaagaaatgtttcagacga

SEQ ID NO: 2518141 - DNA, 25 bp, Homo sapien
tcgtctgaaacatttcttagtcccg

SEQ ID NO: 2518142 - DNA, 25 bp, Homo sapien
caatcctgaatgtgagaaagccccg

SEQ ID NO: 2518143 - DNA, 25 bp, Homo sapien
tacttgatgccgtgaacttctgaaa

SEQ ID NO: 2518144 - DNA, 25 bp, Homo sapien
ggctttggcacagggattcatctca

SEQ ID NO: 2518145 - DNA, 25 bp, Homo sapien
gaaagccccggcaattgatcagaac

SEQ ID NO: 2518146 - DNA, 25 bp, Homo sapien
gaaactcattagaaacgtggctgga

SEQ ID NO: 2518147 - DNA, 25 bp, Homo sapien
acttgaaggtcaaatagctaactta

SEQ ID NO: 2518148 - DNA, 25 bp, Homo sapien
gcaggacagcctgggagtagcatta

SEQ ID NO: 2518149 - DNA, 25 bp, Homo sapien
ggctcacagctgaagcactcgttca

SEQ ID NO: 2518150 - DNA, 25 bp, Homo sapien
cagtctgcagggacttcatgtggaa

SEQ ID NO: 2518151 - DNA, 25 bp, Homo sapien
gggacttcatgtggaacgtgtgaat

SEQ ID NO: 2518152 - DNA, 25 bp, Homo sapien
gagtcctcagtttggatccagtctg

SEQ ID NO: 2518153 - DNA, 25 bp, Homo sapien
ggcgagtcctcagtttggatccagt

SEQ ID NO: 2518154 - DNA, 25 bp, Homo sapien
tgctcaaatgcattattaagcagtt

SEQ ID NO: 2518155 - DNA, 25 bp, Homo sapien
tcaaatgcattattaagcagtttac

SEQ ID NO: 2518156 - DNA, 25 bp, Homo sapien
ctgctcaaatgcattattaagcagt

SEQ ID NO: 2518157 - DNA, 25 bp, Homo sapien
gctcaaatgcattattaagcagttt

SEQ ID NO: 2518158 - DNA, 25 bp, Homo sapien
atggagcagcaacactttctgattc

SEQ ID NO: 2518159 - DNA, 25 bp, Homo sapien
tggagcagcaacactttctgattcc

SEQ ID NO: 2518160 - DNA, 25 bp, Homo sapien
tgcagaaacatcttacacaagcccc

SEQ ID NO: 2518161 - DNA, 25 bp, Homo sapien
tctgcagaaacatcttacacaagcc

SEQ ID NO: 2518162 - DNA, 25 bp, Homo sapien
tgaggaaaaatacttggcttctgcc

SEQ ID NO: 2518163 - DNA, 25 bp, Homo sapien
ccaagtaagagataacacccgacta

SEQ ID NO: 2518164 - DNA, 25 bp, Homo sapien
gcccagaagggcaattatctcaaag

SEQ ID NO: 2518165 - DNA, 25 bp, Homo sapien
gacagaataaggtatccgccagaga

SEQ ID NO: 2518166 - DNA, 25 bp, Homo sapien
tgtccttacgaatggattttatagc

SEQ ID NO: 2518167 - DNA, 25 bp, Homo sapien
catgatctcaatctctcgtctgatg

SEQ ID NO: 2518168 - DNA, 25 bp, Homo sapien
ccttacgaatggattttatagcaac

SEQ ID NO: 2518169 - DNA, 25 bp, Homo sapien
cgtctgatgtgaaccatgtcttgtt

SEQ ID NO: 2518170 - DNA, 25 bp, Homo sapien
aaacagatgcaaatcagccattggg

SEQ ID NO: 2518171 - DNA, 25 bp, Homo sapien
ggctgcttaacatggccagagtcgt

SEQ ID NO: 2518172 - DNA, 25 bp, Homo sapien
ggcaacagaaaacatcaggtttgac

SEQ ID NO: 2518173 - DNA, 25 bp, Homo sapien
gttacttgttggcagaactgacaat

SEQ ID NO: 2518174 - DNA, 25 bp, Homo sapien
aggaaaagtgtgttcgccaatggat

SEQ ID NO: 2518175 - DNA, 25 bp, Homo sapien
aaagtgtgttcgccaatggattcat

SEQ ID NO: 2518176 - DNA, 25 bp, Homo sapien
ggaaaagtgtgttcgccaatggatt

SEQ ID NO: 2518177 - DNA, 25 bp, Homo sapien
gaaaagtgtgttcgccaatggattc

SEQ ID NO: 2518178 - DNA, 25 bp, Homo sapien
taaagatatgactggatggctttat

SEQ ID NO: 2518179 - DNA, 25 bp, Homo sapien
aagatatgactggatggctttattt

SEQ ID NO: 2518180 - DNA, 25 bp, Homo sapien
aaagatatgactggatggctttatt

SEQ ID NO: 2518181 - DNA, 25 bp, Homo sapien
tgtaaagatatgactggatggcttt

SEQ ID NO: 2518182 - DNA, 25 bp, Homo sapien
catgcccggcattgcggaggaaacc

SEQ ID NO: 2518183 - DNA, 25 bp, Homo sapien
caagtaccggctacacaaaagggag

SEQ ID NO: 2518184 - DNA, 25 bp, Homo sapien
tacataattaccctcatggccaggg

SEQ ID NO: 2518185 - DNA, 25 bp, Homo sapien
tgaacccaaaaagcaatcccaggag

SEQ ID NO: 2518186 - DNA, 25 bp, Homo sapien
aggcacagccccaccgaggccacac

SEQ ID NO: 2518187 - DNA, 25 bp, Homo sapien
ggccacaccggtccaaagctcccag

SEQ ID NO: 2518188 - DNA, 25 bp, Homo sapien
gctggaggctgtaaagtgctcctgc

SEQ ID NO: 2518189 - DNA, 25 bp, Homo sapien
cagagtgtggggcaaggcacagccc

SEQ ID NO: 2518190 - DNA, 25 bp, Homo sapien
cagaagaacccgagccagtactgct

SEQ ID NO: 2518191 - DNA, 25 bp, Homo sapien
gaacccgagccagtactgctaagaa

SEQ ID NO: 2518192 - DNA, 25 bp, Homo sapien
tactgctaagaaatccagcatctgc

SEQ ID NO: 2518193 - DNA, 25 bp, Homo sapien
gagccagtactgctaagaaatccag

SEQ ID NO: 2518194 - DNA, 25 bp, Homo sapien
tcctgtaagcaaggtcccatcttga

SEQ ID NO: 2518195 - DNA, 25 bp, Homo sapien
ggagagcagacccttgaacttctgc

SEQ ID NO: 2518196 - DNA, 25 bp, Homo sapien
cttcaggagagcagacccttgaact

SEQ ID NO: 2518197 - DNA, 25 bp, Homo sapien
agacccttgaacttctgctgtcagc

SEQ ID NO: 2518198 - DNA, 25 bp, Homo sapien
tcaagaagccaagctctcctgggtg

SEQ ID NO: 2518199 - DNA, 25 bp, Homo sapien
ggaagaataagtggtgtccacaggg

SEQ ID NO: 2518200 - DNA, 25 bp, Homo sapien
aatgtgcccaatcactgctaaagcc

SEQ ID NO: 2518201 - DNA, 25 bp, Homo sapien
cctgggtgctcaatgtgcccaatca

SEQ ID NO: 2518202 - DNA, 25 bp, Homo sapien
aacctgctgcaatcaagcacctttg

SEQ ID NO: 2518203 - DNA, 25 bp, Homo sapien
tcaagcacctttgtggcccgtgagc

SEQ ID NO: 2518204 - DNA, 25 bp, Homo sapien
cgtttgaacctgctgcaatcaagca

SEQ ID NO: 2518205 - DNA, 25 bp, Homo sapien
aggcttcgtttgaacctgctgcaat

SEQ ID NO: 2518206 - DNA, 25 bp, Homo sapien
gggcttctcagatggagggctggac

SEQ ID NO: 2518207 - DNA, 25 bp, Homo sapien
tgggcttctcagatggagggctgga

SEQ ID NO: 2518208 - DNA, 25 bp, Homo sapien
ggcttctcagatggagggctggact

SEQ ID NO: 2518209 - DNA, 25 bp, Homo sapien
ctgggcttctcagatggagggctgg

SEQ ID NO: 2518210 - DNA, 25 bp, Homo sapien
cttggtaggatacttcatagctgca

SEQ ID NO: 2518211 - DNA, 25 bp, Homo sapien
gaaggtcactgggtactccacccta

SEQ ID NO: 2518212 - DNA, 25 bp, Homo sapien
ttttcaagagcctactatgcaccag

SEQ ID NO: 2518213 - DNA, 25 bp, Homo sapien
tctcacttggtaggatattttgcac

SEQ ID NO: 2518214 - DNA, 25 bp, Homo sapien
tatcttcccaacctcaactcttgca

SEQ ID NO: 2518215 - DNA, 25 bp, Homo sapien
tcaactcttgcaaaaactccctgct

SEQ ID NO: 2518216 - DNA, 25 bp, Homo sapien
caagccagcacaccaaactgacggg

SEQ ID NO: 2518217 - DNA, 25 bp, Homo sapien
gacgggctcaacaccccactgtgat

SEQ ID NO: 2518218 - DNA, 25 bp, Homo sapien
caccttcccagtgcgattcttcagc

SEQ ID NO: 2518219 - DNA, 25 bp, Homo sapien
gctcgaactgcgtctgtttttcatt

SEQ ID NO: 2518220 - DNA, 25 bp, Homo sapien
aacctgcagctcgaactgcgtctgt

SEQ ID NO: 2518221 - DNA, 25 bp, Homo sapien
attctcaacctgcagctcgaactgc

SEQ ID NO: 2518222 - DNA, 25 bp, Homo sapien
tgctgactggcacccccatgttttt

SEQ ID NO: 2518223 - DNA, 25 bp, Homo sapien
tatagacccaaacatcaaatctgag

SEQ ID NO: 2518224 - DNA, 25 bp, Homo sapien
ttatccgggtatccagatatttgag

SEQ ID NO: 2518225 - DNA, 25 bp, Homo sapien
gggactgaactttgctgactggcac

SEQ ID NO: 2518226 - DNA, 25 bp, Homo sapien
tcccttgcagtcacagcagtatcag

SEQ ID NO: 2518227 - DNA, 25 bp, Homo sapien
cacagcagtatcagggcgatgcaga

SEQ ID NO: 2518228 - DNA, 25 bp, Homo sapien
tcaaaaacaggcaagagtcgccctc

SEQ ID NO: 2518229 - DNA, 25 bp, Homo sapien
aacaggcaagagtcgccctcccttg

SEQ ID NO: 2518230 - DNA, 25 bp, Homo sapien
tcctgcagctcgtagcggtgcttca

SEQ ID NO: 2518231 - DNA, 25 bp, Homo sapien
tggtgatgccgcttcaccccgtgcg

SEQ ID NO: 2518232 - DNA, 25 bp, Homo sapien
actcggccagaaaacctctcggtgg

SEQ ID NO: 2518233 - DNA, 25 bp, Homo sapien
ccgcttgactttgccgtaggtgcct

SEQ ID NO: 2518234 - DNA, 25 bp, Homo sapien
gtgttcggttacaggcggtgactca

SEQ ID NO: 2518235 - DNA, 25 bp, Homo sapien
gagaaccccaagagcggcgctttgg

SEQ ID NO: 2518236 - DNA, 25 bp, Homo sapien
ttttcttgtaggtgtcgccgcagcc

SEQ ID NO: 2518237 - DNA, 25 bp, Homo sapien
ggaagccgctgtacgctcaaggtcg

SEQ ID NO: 2518238 - DNA, 25 bp, Homo sapien
tctgggcgtatacgtgcaagtcaca

SEQ ID NO: 2518239 - DNA, 25 bp, Homo sapien
gggtgggggtcgtgaggtgctcagt

SEQ ID NO: 2518240 - DNA, 25 bp, Homo sapien
aggatgagccaggaagagccaggaa

SEQ ID NO: 2518241 - DNA, 25 bp, Homo sapien
gggggagctttttgagccaggatga

SEQ ID NO: 2518242 - DNA, 25 bp, Homo sapien
gtaagtgttaaaccatacagctgca

SEQ ID NO: 2518243 - DNA, 25 bp, Homo sapien
catcacagtagcgactgagggcagt

SEQ ID NO: 2518244 - DNA, 25 bp, Homo sapien
ggtacagcaatctgagactcaactg

SEQ ID NO: 2518245 - DNA, 25 bp, Homo sapien
tgaacatgccacttcctgatatatg

SEQ ID NO: 2518246 - DNA, 25 bp, Homo sapien
gtagccctttccgtggccacagcct

SEQ ID NO: 2518247 - DNA, 25 bp, Homo sapien
ctgtagccctttccgtggccacagc

SEQ ID NO: 2518248 - DNA, 25 bp, Homo sapien
cctgtagccctttccgtggccacag

SEQ ID NO: 2518249 - DNA, 25 bp, Homo sapien
tgtagccctttccgtggccacagcc

SEQ ID NO: 2518250 - DNA, 25 bp, Homo sapien
cagctcttcacactctcaagaggtt

SEQ ID NO: 2518251 - DNA, 25 bp, Homo sapien
cactctcaagaggttcagacttaga

SEQ ID NO: 2518252 - DNA, 25 bp, Homo sapien
cttttaacagagaatggactggcag

SEQ ID NO: 2518253 - DNA, 25 bp, Homo sapien
ggttcagacttagaatagcctttta

SEQ ID NO: 2518254 - DNA, 25 bp, Homo sapien
tggtcatggcagtaaacacactgat

SEQ ID NO: 2518255 - DNA, 25 bp, Homo sapien
ggcctattaaatgctgttgaccact

SEQ ID NO: 2518256 - DNA, 25 bp, Homo sapien
cttgacccaagctaggccaattgga

SEQ ID NO: 2518257 - DNA, 25 bp, Homo sapien
acacactgatgggtacttaagggcc

SEQ ID NO: 2518258 - DNA, 25 bp, Homo sapien
gaagaataattaatgtgtcttgtgt

SEQ ID NO: 2518259 - DNA, 25 bp, Homo sapien
gtgattcacggggaagaataattaa

SEQ ID NO: 2518260 - DNA, 25 bp, Homo sapien
gttccatatgattctttggaaaact

SEQ ID NO: 2518261 - DNA, 25 bp, Homo sapien
cttggatggcatttggggtgattca

SEQ ID NO: 2518262 - DNA, 25 bp, Homo sapien
aaataacatagaaacgaggcaggaa

SEQ ID NO: 2518263 - DNA, 25 bp, Homo sapien
ggatacttttttacagcacagagac

SEQ ID NO: 2518264 - DNA, 25 bp, Homo sapien
gtccagggctcagccaaaggaggta

SEQ ID NO: 2518265 - DNA, 25 bp, Homo sapien
cagctagcaaaagtaatattgtcat

SEQ ID NO: 2518266 - DNA, 25 bp, Homo sapien
catagacatgcttccggaaacactt

SEQ ID NO: 2518267 - DNA, 25 bp, Homo sapien
tcccatagacatgcttccggaaaca

SEQ ID NO: 2518268 - DNA, 25 bp, Homo sapien
tgcttccggaaacacttaattggag

SEQ ID NO: 2518269 - DNA, 25 bp, Homo sapien
gacatgcttccggaaacacttaatt

SEQ ID NO: 2518270 - DNA, 25 bp, Homo sapien
cagagctcattctctcccggcttct

SEQ ID NO: 2518271 - DNA, 25 bp, Homo sapien
cacagagctcattctctcccggctt

SEQ ID NO: 2518272 - DNA, 25 bp, Homo sapien
ccacagagctcattctctcccggct

SEQ ID NO: 2518273 - DNA, 25 bp, Homo sapien
agctcattctctcccggcttctctt

SEQ ID NO: 2518274 - DNA, 25 bp, Homo sapien
ggagtgtaaatggaagccgccctgc

SEQ ID NO: 2518275 - DNA, 25 bp, Homo sapien
cccaaggagtgtaaatggaagccgc

SEQ ID NO: 2518276 - DNA, 25 bp, Homo sapien
aaggagtgtaaatggaagccgccct

SEQ ID NO: 2518277 - DNA, 25 bp, Homo sapien
caaggagtgtaaatggaagccgccc

SEQ ID NO: 2518278 - DNA, 25 bp, Homo sapien
tgggcgtagccctttggacaccaca

SEQ ID NO: 2518279 - DNA, 25 bp, Homo sapien
ggtcacctgagaaattggccgggtc

SEQ ID NO: 2518280 - DNA, 25 bp, Homo sapien
caactgaggcatgcaaggtcgggcc

SEQ ID NO: 2518281 - DNA, 25 bp, Homo sapien
tattgtgaggacgaagtcctcctgc

SEQ ID NO: 2518282 - DNA, 25 bp, Homo sapien
gactctttacgatgaagggcaagca

SEQ ID NO: 2518283 - DNA, 25 bp, Homo sapien
gggatttctgccaccagttggactc

SEQ ID NO: 2518284 - DNA, 25 bp, Homo sapien
tgggcaaccgctgggatttctgcca

SEQ ID NO: 2518285 - DNA, 25 bp, Homo sapien
ccaccagttggactctttacgatga

SEQ ID NO: 2518286 - DNA, 25 bp, Homo sapien
ttgagcttgtttctcttcaggcacc

SEQ ID NO: 2518287 - DNA, 25 bp, Homo sapien
agttctccagaatcattatttgagc

SEQ ID NO: 2518288 - DNA, 25 bp, Homo sapien
tcagttcactcgagcaatatgtttc

SEQ ID NO: 2518289 - DNA, 25 bp, Homo sapien
tggtcagggcaaaagcgaaagttct

SEQ ID NO: 2518290 - DNA, 25 bp, Homo sapien
aaatgctaagaattttggagcggtc

SEQ ID NO: 2518291 - DNA, 25 bp, Homo sapien
ttccgggtgattgaacagagccttg

SEQ ID NO: 2518292 - DNA, 25 bp, Homo sapien
tatgtttctaccagcttttaagccc

SEQ ID NO: 2518293 - DNA, 25 bp, Homo sapien
ggagcggtcactgtctaaacaaccc

SEQ ID NO: 2518294 - DNA, 25 bp, Homo sapien
aagcagaactgatgggggcagggca

SEQ ID NO: 2518295 - DNA, 25 bp, Homo sapien
ggcagggcatctggatctgtgctca

SEQ ID NO: 2518296 - DNA, 25 bp, Homo sapien
cagcttctcaacattctgagtttcc

SEQ ID NO: 2518297 - DNA, 25 bp, Homo sapien
cttggtgcaagcagaactgatgggg

SEQ ID NO: 2518298 - DNA, 25 bp, Homo sapien
cagaaccacttttagcaaaagctct

SEQ ID NO: 2518299 - DNA, 25 bp, Homo sapien
cccagaaccacttttagcaaaagct

SEQ ID NO: 2518300 - DNA, 25 bp, Homo sapien
ccagaaccacttttagcaaaagctc

SEQ ID NO: 2518301 - DNA, 25 bp, Homo sapien
cctgcgattccctgacataggccat

SEQ ID NO: 2518302 - DNA, 25 bp, Homo sapien
tctgccattgatgaaattggccacc

SEQ ID NO: 2518303 - DNA, 25 bp, Homo sapien
ggaagttgtcaatgtgctggttctc

SEQ ID NO: 2518304 - DNA, 25 bp, Homo sapien
gaatgtccccagtcatggaagttgt

SEQ ID NO: 2518305 - DNA, 25 bp, Homo sapien
caatcacacattgggtttctaaaca

SEQ ID NO: 2518306 - DNA, 25 bp, Homo sapien
tttcaatcacacattgggtttctaa

SEQ ID NO: 2518307 - DNA, 25 bp, Homo sapien
cacacattgggtttctaaacatgtg

SEQ ID NO: 2518308 - DNA, 25 bp, Homo sapien
atcacacattgggtttctaaacatg

SEQ ID NO: 2518309 - DNA, 25 bp, Homo sapien
cattgttctctcaaaactccatggc

SEQ ID NO: 2518310 - DNA, 25 bp, Homo sapien
tcagctccactctgcatgtaggcac

SEQ ID NO: 2518311 - DNA, 25 bp, Homo sapien
tctgcatgtaggcactgatcctgcg

SEQ ID NO: 2518312 - DNA, 25 bp, Homo sapien
gagtcctagaatattgtccctccat

SEQ ID NO: 2518313 - DNA, 25 bp, Homo sapien
aagaatggtatcaacgcctctttgt

SEQ ID NO: 2518314 - DNA, 25 bp, Homo sapien
tattagcctggctactggtctatcc

SEQ ID NO: 2518315 - DNA, 25 bp, Homo sapien
gaaagaatggtatcaacgcctcttt

SEQ ID NO: 2518316 - DNA, 25 bp, Homo sapien
ggctactggtctatccgttaatctt

SEQ ID NO: 2518317 - DNA, 25 bp, Homo sapien
ctgctaaaggtagccctctcccgtg

SEQ ID NO: 2518318 - DNA, 25 bp, Homo sapien
gagcacacctgctaaaggtagccct

SEQ ID NO: 2518319 - DNA, 25 bp, Homo sapien
ctaccatgcggagagctcttgcctg

SEQ ID NO: 2518320 - DNA, 25 bp, Homo sapien
tgcggagagctcttgcctggcatga

SEQ ID NO: 2518321 - DNA, 25 bp, Homo sapien
aggctcagtggaaagactgctggat

SEQ ID NO: 2518322 - DNA, 25 bp, Homo sapien
ccaggctcagtggaaagactgctgg

SEQ ID NO: 2518323 - DNA, 25 bp, Homo sapien
cagtggaaagactgctggattcagg

SEQ ID NO: 2518324 - DNA, 25 bp, Homo sapien
gtggaaagactgctggattcaggac

SEQ ID NO: 2518325 - DNA, 25 bp, Homo sapien
gccagcaggccacgtattagaaaaa

SEQ ID NO: 2518326 - DNA, 25 bp, Homo sapien
ggaagccttattcacatgcagcatt

SEQ ID NO: 2518327 - DNA, 25 bp, Homo sapien
gatgacctggtgttagccaagtgaa

SEQ ID NO: 2518328 - DNA, 25 bp, Homo sapien
cagagggactaggttgtgccaagat

SEQ ID NO: 2518329 - DNA, 25 bp, Homo sapien
taataccaggacagcgggtaagagg

SEQ ID NO: 2518330 - DNA, 25 bp, Homo sapien
caagtccaagggtaataccaggaca

SEQ ID NO: 2518331 - DNA, 25 bp, Homo sapien
gagggccacagccacggatgcagga

SEQ ID NO: 2518332 - DNA, 25 bp, Homo sapien
gctccagaaacaagtccaagggtaa

SEQ ID NO: 2518333 - DNA, 25 bp, Homo sapien
cctgaacaagtctcacccaccctat

SEQ ID NO: 2518334 - DNA, 25 bp, Homo sapien
aagtctcacccaccctatccagcgc

SEQ ID NO: 2518335 - DNA, 25 bp, Homo sapien
ctatccagcgctcacacttctggtg

SEQ ID NO: 2518336 - DNA, 25 bp, Homo sapien
cccaccctatccagcgctcacactt

SEQ ID NO: 2518337 - DNA, 25 bp, Homo sapien
gctctgacatctcctcagcatagac

SEQ ID NO: 2518338 - DNA, 25 bp, Homo sapien
gtggctctgacatctcctcagcata

SEQ ID NO: 2518339 - DNA, 25 bp, Homo sapien
ctgacatctcctcagcatagacttt

SEQ ID NO: 2518340 - DNA, 25 bp, Homo sapien
tgacatctcctcagcatagactttc

SEQ ID NO: 2518341 - DNA, 25 bp, Homo sapien
gctttagttcttggctagaagagcc

SEQ ID NO: 2518342 - DNA, 25 bp, Homo sapien
gatgtacaaagccatgaagtcacag

SEQ ID NO: 2518343 - DNA, 25 bp, Homo sapien
ggactgccatggtgggctttagttc

SEQ ID NO: 2518344 - DNA, 25 bp, Homo sapien
tcccgtgaaggctaggaggaaagta

SEQ ID NO: 2518345 - DNA, 25 bp, Homo sapien
acaatgtccatgtaattcatctcac

SEQ ID NO: 2518346 - DNA, 25 bp, Homo sapien
ttaaaagaggtcgacaaagagccca

SEQ ID NO: 2518347 - DNA, 25 bp, Homo sapien
taaaagaggtcgacaaagagcccaa

SEQ ID NO: 2518348 - DNA, 25 bp, Homo sapien
ccatcaggttgacaatgtccatgta

SEQ ID NO: 2518349 - DNA, 25 bp, Homo sapien
ctgcaaggatcaaaacaccaaatgc

SEQ ID NO: 2518350 - DNA, 25 bp, Homo sapien
ccaaatgcttccaggagccagacag

SEQ ID NO: 2518351 - DNA, 25 bp, Homo sapien
tgcaaggatcaaaacaccaaatgct

SEQ ID NO: 2518352 - DNA, 25 bp, Homo sapien
aaacaccaaatgcttccaggagcca

SEQ ID NO: 2518353 - DNA, 25 bp, Homo sapien
gcttgagccgctctggattttttac

SEQ ID NO: 2518354 - DNA, 25 bp, Homo sapien
tggattttttactggtgcatcccgg

SEQ ID NO: 2518355 - DNA, 25 bp, Homo sapien
agtcagctgatttggggctattccc

SEQ ID NO: 2518356 - DNA, 25 bp, Homo sapien
ttttactggtgcatcccggcatctt

SEQ ID NO: 2518357 - DNA, 25 bp, Homo sapien
ctgagtgttcgctgccacacgcggg

SEQ ID NO: 2518358 - DNA, 25 bp, Homo sapien
gctcctgagtgttcgctgccacacg

SEQ ID NO: 2518359 - DNA, 25 bp, Homo sapien
tattgctcctgagtgttcgctgcca

SEQ ID NO: 2518360 - DNA, 25 bp, Homo sapien
ccaacaggtattgctcctgagtgtt

SEQ ID NO: 2518361 - DNA, 25 bp, Homo sapien
tgcagcaactcaactgccctgattc

SEQ ID NO: 2518362 - DNA, 25 bp, Homo sapien
cctgccaagagtgggttttgctgcc

SEQ ID NO: 2518363 - DNA, 25 bp, Homo sapien
ttcctgccaagagtgggttttgctg

SEQ ID NO: 2518364 - DNA, 25 bp, Homo sapien
caactgccctgattcttcgcttact

SEQ ID NO: 2518365 - DNA, 25 bp, Homo sapien
gaacaggacagatattccacaggcc

SEQ ID NO: 2518366 - DNA, 25 bp, Homo sapien
gagggacccagagtgactgacagca

SEQ ID NO: 2518367 - DNA, 25 bp, Homo sapien
aaggatgaggtccaaagcttagccc

SEQ ID NO: 2518368 - DNA, 25 bp, Homo sapien
gatgctgtcccagttagagcaagga

SEQ ID NO: 2518369 - DNA, 25 bp, Homo sapien
tcatttcacagtaaactaaacaaaa

SEQ ID NO: 2518370 - DNA, 25 bp, Homo sapien
ttcatttcacagtaaactaaacaaa

SEQ ID NO: 2518371 - DNA, 25 bp, Homo sapien
gttcatttcacagtaaactaaacaa

SEQ ID NO: 2518372 - DNA, 25 bp, Homo sapien
agttcatttcacagtaaactaaaca

SEQ ID NO: 2518373 - DNA, 25 bp, Homo sapien
cagacggcaaacctcttcatggaca

SEQ ID NO: 2518374 - DNA, 25 bp, Homo sapien
aaacaattacacaaacgcagtatgc

SEQ ID NO: 2518375 - DNA, 25 bp, Homo sapien
gccattaaagaacaatacagctcag

SEQ ID NO: 2518376 - DNA, 25 bp, Homo sapien
atgcacgctccttgccgacagggct

SEQ ID NO: 2518377 - DNA, 25 bp, Homo sapien
tgacctccggagagagaacatgggc

SEQ ID NO: 2518378 - DNA, 25 bp, Homo sapien
tctggtagtcgaaacctgtgcattc

SEQ ID NO: 2518379 - DNA, 25 bp, Homo sapien
cagaaccgcctggatgctttgcata

SEQ ID NO: 2518380 - DNA, 25 bp, Homo sapien
cacaagatgcgtcaggaagagaaac

SEQ ID NO: 2518381 - DNA, 25 bp, Homo sapien
tgactagagacatccatgaaaagcc

SEQ ID NO: 2518382 - DNA, 25 bp, Homo sapien
cagctatgagctttaaccggttcaa

SEQ ID NO: 2518383 - DNA, 25 bp, Homo sapien
aatgccttggtgttcaggtggtgac

SEQ ID NO: 2518384 - DNA, 25 bp, Homo sapien
tctcataaaaatttcggccagaaca

SEQ ID NO: 2518385 - DNA, 25 bp, Homo sapien
ttagaccttttcgtgaatcttctcc

SEQ ID NO: 2518386 - DNA, 25 bp, Homo sapien
gtaaacccttggctgattccagatt

SEQ ID NO: 2518387 - DNA, 25 bp, Homo sapien
tctattttgaccgagtatgcaacca

SEQ ID NO: 2518388 - DNA, 25 bp, Homo sapien
ttcaagtccgcctccacttggctga

SEQ ID NO: 2518389 - DNA, 25 bp, Homo sapien
tcctgactgagcagcgtgtgcacct

SEQ ID NO: 2518390 - DNA, 25 bp, Homo sapien
cgctgctcgtgctcctggctcttgg

SEQ ID NO: 2518391 - DNA, 25 bp, Homo sapien
tcaccgtagagcaccagctgggtct

SEQ ID NO: 2518392 - DNA, 25 bp, Homo sapien
tggctcttggacaggagggactcca

SEQ ID NO: 2518393 - DNA, 25 bp, Homo sapien
gaatcggacttcagctggcggagct

SEQ ID NO: 2518394 - DNA, 25 bp, Homo sapien
gatggatttggtgagctccgtcagc

SEQ ID NO: 2518395 - DNA, 25 bp, Homo sapien
acctcggtgtagatgtcagactcca

SEQ ID NO: 2518396 - DNA, 25 bp, Homo sapien
gatcccatccgagaggtctttgaga

SEQ ID NO: 2518397 - DNA, 25 bp, Homo sapien
tatcccctggatctgccaggacaac

SEQ ID NO: 2518398 - DNA, 25 bp, Homo sapien
ctggacccacttctgcctagtaaat

SEQ ID NO: 2518399 - DNA, 25 bp, Homo sapien
tagaggccctaaagctgaactgcca

SEQ ID NO: 2518400 - DNA, 25 bp, Homo sapien
tgtgctatggccatgcaacaccaac

SEQ ID NO: 2518401 - DNA, 25 bp, Homo sapien
gccaaaaggcaggaggataaactga

SEQ ID NO: 2518402 - DNA, 25 bp, Homo sapien
tcctcaacccatgccaaaaggcagg

SEQ ID NO: 2518403 - DNA, 25 bp, Homo sapien
aaatatcctcaacccatgccaaaag

SEQ ID NO: 2518404 - DNA, 25 bp, Homo sapien
ctggtaagtctgcagattcctagaa

SEQ ID NO: 2518405 - DNA, 25 bp, Homo sapien
taaaggacactctgtgaaggtactg

SEQ ID NO: 2518406 - DNA, 25 bp, Homo sapien
aaaggacactctgtgaaggtactgg

SEQ ID NO: 2518407 - DNA, 25 bp, Homo sapien
cttaaaggacactctgtgaaggtac

SEQ ID NO: 2518408 - DNA, 25 bp, Homo sapien
aggacactctgtgaaggtactggag

SEQ ID NO: 2518409 - DNA, 25 bp, Homo sapien
cgctggctcttcacaaatggttagg

SEQ ID NO: 2518410 - DNA, 25 bp, Homo sapien
aagagagactgccaactcctgaagc

SEQ ID NO: 2518411 - DNA, 25 bp, Homo sapien
tatatcacgctggatctgccagggc

SEQ ID NO: 2518412 - DNA, 25 bp, Homo sapien
gcctagagatgaactgccaacactt

SEQ ID NO: 2518413 - DNA, 25 bp, Homo sapien
gaagccctgactccttagccagaga

SEQ ID NO: 2518414 - DNA, 25 bp, Homo sapien
taaataaatagctggacgtgcttgt

SEQ ID NO: 2518415 - DNA, 25 bp, Homo sapien
taaatagctggacgtgcttgtgcat

SEQ ID NO: 2518416 - DNA, 25 bp, Homo sapien
aaatagctggacgtgcttgtgcatg

SEQ ID NO: 2518417 - DNA, 25 bp, Homo sapien
aataaatagctggacgtgcttgtgc

SEQ ID NO: 2518418 - DNA, 25 bp, Homo sapien
tccctcttctgaactttcacaggag

SEQ ID NO: 2518419 - DNA, 25 bp, Homo sapien
cctcttctgaactttcacaggagtt

SEQ ID NO: 2518420 - DNA, 25 bp, Homo sapien
tcttctgaactttcacaggagttac

SEQ ID NO: 2518421 - DNA, 25 bp, Homo sapien
ctccctcttctgaactttcacagga

SEQ ID NO: 2518422 - DNA, 25 bp, Homo sapien
tgcgctgcacaagtgattcgtgtct

SEQ ID NO: 2518423 - DNA, 25 bp, Homo sapien
tgacacctccttatgcgctgcacaa

SEQ ID NO: 2518424 - DNA, 25 bp, Homo sapien
caagtgattcgtgtcttttgctcct

SEQ ID NO: 2518425 - DNA, 25 bp, Homo sapien
ccttatgcgctgcacaagtgattcg

SEQ ID NO: 2518426 - DNA, 25 bp, Homo sapien
ggcctgcagcgtttagcaggctgac

SEQ ID NO: 2518427 - DNA, 25 bp, Homo sapien
ccttggcctgcagcgtttagcaggc

SEQ ID NO: 2518428 - DNA, 25 bp, Homo sapien
cctgcagcgtttagcaggctgactc

SEQ ID NO: 2518429 - DNA, 25 bp, Homo sapien
tgcagcgtttagcaggctgactcat

SEQ ID NO: 2518430 - DNA, 25 bp, Homo sapien
gggtgcactggcaggatttccgctc

SEQ ID NO: 2518431 - DNA, 25 bp, Homo sapien
ggtgcactggcaggatttccgctca

SEQ ID NO: 2518432 - DNA, 25 bp, Homo sapien
tggggtgcactggcaggatttccgc

SEQ ID NO: 2518433 - DNA, 25 bp, Homo sapien
ggggtgcactggcaggatttccgct

SEQ ID NO: 2518434 - DNA, 25 bp, Homo sapien
aggactacgtcaaaggcccacctgg

SEQ ID NO: 2518435 - DNA, 25 bp, Homo sapien
agctgaagtaggactacgtcaaagg

SEQ ID NO: 2518436 - DNA, 25 bp, Homo sapien
ggacctaaagatagatggtatttca

SEQ ID NO: 2518437 - DNA, 25 bp, Homo sapien
ccaatacaggacaagggacctaaag

SEQ ID NO: 2518438 - DNA, 25 bp, Homo sapien
gaagtcctggtggctgcgccggacc

SEQ ID NO: 2518439 - DNA, 25 bp, Homo sapien
agtcctggtggctgcgccggacctg

SEQ ID NO: 2518440 - DNA, 25 bp, Homo sapien
aagtcctggtggctgcgccggacct

SEQ ID NO: 2518441 - DNA, 25 bp, Homo sapien
tcctccctctgccgggagaagtcct

SEQ ID NO: 2518442 - DNA, 25 bp, Homo sapien
ctcctccaggacgtggtggacgcac

SEQ ID NO: 2518443 - DNA, 25 bp, Homo sapien
caggacgtggtggacgcaccagccc

SEQ ID NO: 2518444 - DNA, 25 bp, Homo sapien
tccaggacgtggtggacgcaccagc

SEQ ID NO: 2518445 - DNA, 25 bp, Homo sapien
ctccaggacgtggtggacgcaccag

SEQ ID NO: 2518446 - DNA, 25 bp, Homo sapien
agagaaagttgagcgccctgccgag

SEQ ID NO: 2518447 - DNA, 25 bp, Homo sapien
ccaccagggcgaggtagaagagaaa

SEQ ID NO: 2518448 - DNA, 25 bp, Homo sapien
cgccaccagggcgaggtagaagaga

SEQ ID NO: 2518449 - DNA, 25 bp, Homo sapien
gaagagaaagttgagcgccctgccg

SEQ ID NO: 2518450 - DNA, 25 bp, Homo sapien
tgcgcgagcaggacgccgaggacga

SEQ ID NO: 2518451 - DNA, 25 bp, Homo sapien
cgcgagcaggacgccgaggacgagg

SEQ ID NO: 2518452 - DNA, 25 bp, Homo sapien
gcgcgagcaggacgccgaggacgag

SEQ ID NO: 2518453 - DNA, 25 bp, Homo sapien
ctgcgcgagcaggacgccgaggacg

SEQ ID NO: 2518454 - DNA, 25 bp, Homo sapien
cggtggccgcccttgccgtgcgcct

SEQ ID NO: 2518455 - DNA, 25 bp, Homo sapien
ccgccgcggtggccgcccttgccgt

SEQ ID NO: 2518456 - DNA, 25 bp, Homo sapien
cgcggtggccgcccttgccgtgcgc

SEQ ID NO: 2518457 - DNA, 25 bp, Homo sapien
gccgcggtggccgcccttgccgtgc

SEQ ID NO: 2518458 - DNA, 25 bp, Homo sapien
acgtcatccgcgccgcccgacgggt

SEQ ID NO: 2518459 - DNA, 25 bp, Homo sapien
cgacgggtgggcacccttctccgag

SEQ ID NO: 2518460 - DNA, 25 bp, Homo sapien
ggcggcggcttcttcgccacgtcat

SEQ ID NO: 2518461 - DNA, 25 bp, Homo sapien
gctcgcggcgccgtggccgcccttg

SEQ ID NO: 2518462 - DNA, 25 bp, Homo sapien
cgcgggctgggaggcgagcgagcgc

SEQ ID NO: 2518463 - DNA, 25 bp, Homo sapien
ggcgcgcggcccgggaaacttgcag

SEQ ID NO: 2518464 - DNA, 25 bp, Homo sapien
cgcgcggcccgggaaacttgcaggg

SEQ ID NO: 2518465 - DNA, 25 bp, Homo sapien
gctcccccgggactgggcgagcggc

SEQ ID NO: 2518466 - DNA, 25 bp, Homo sapien
cgagccgggagagcttgccacgcac

SEQ ID NO: 2518467 - DNA, 25 bp, Homo sapien
ctcccggtaagggaggccgagcgag

SEQ ID NO: 2518468 - DNA, 25 bp, Homo sapien
ccgggagagcttgccacgcacgccg

SEQ ID NO: 2518469 - DNA, 25 bp, Homo sapien
agccgggagagcttgccacgcacgc

SEQ ID NO: 2518470 - DNA, 25 bp, Homo sapien
caggagctattgtaggagcctctag

SEQ ID NO: 2518471 - DNA, 25 bp, Homo sapien
gttcaacagggcacaggtctctgac

SEQ ID NO: 2518472 - DNA, 25 bp, Homo sapien
agcctctaggttcaacagggcacag

SEQ ID NO: 2518473 - DNA, 25 bp, Homo sapien
ggagctattgtaggagcctctaggt

SEQ ID NO: 2518474 - DNA, 25 bp, Homo sapien
accaaaacttcactggccagaggga

SEQ ID NO: 2518475 - DNA, 25 bp, Homo sapien
caaccaaaacttcactggccagagg

SEQ ID NO: 2518476 - DNA, 25 bp, Homo sapien
gaagccttcctgtgcacaagtttca

SEQ ID NO: 2518477 - DNA, 25 bp, Homo sapien
cagctggcatgagtgatgttaaatt

SEQ ID NO: 2518478 - DNA, 25 bp, Homo sapien
agtcccctggatcccttcattgtat

SEQ ID NO: 2518479 - DNA, 25 bp, Homo sapien
cttcattgtataggtccatgaccag

SEQ ID NO: 2518480 - DNA, 25 bp, Homo sapien
atcccttgagggaagggcaagtgca

SEQ ID NO: 2518481 - DNA, 25 bp, Homo sapien
cccttgagggaagggcaagtgcacc

SEQ ID NO: 2518482 - DNA, 25 bp, Homo sapien
tgtccctctggtacctcaccagttc

SEQ ID NO: 2518483 - DNA, 25 bp, Homo sapien
attgggcaagctggttggtctcttt

SEQ ID NO: 2518484 - DNA, 25 bp, Homo sapien
tggtacctcaccagttcccatcttc

SEQ ID NO: 2518485 - DNA, 25 bp, Homo sapien
ttgggcaagctggttggtctctttc

SEQ ID NO: 2518486 - DNA, 25 bp, Homo sapien
cagctttatctgccacaatttccca

SEQ ID NO: 2518487 - DNA, 25 bp, Homo sapien
accagctttatctgccacaatttcc

SEQ ID NO: 2518488 - DNA, 25 bp, Homo sapien
cagaccagctttatctgccacaatt

SEQ ID NO: 2518489 - DNA, 25 bp, Homo sapien
gctttatctgccacaatttcccaca

SEQ ID NO: 2518490 - DNA, 25 bp, Homo sapien
attggtgaggctgtaactctggcag

SEQ ID NO: 2518491 - DNA, 25 bp, Homo sapien
tggtgaggctgtaactctggcagct

SEQ ID NO: 2518492 - DNA, 25 bp, Homo sapien
gaattggtgaggctgtaactctggc

SEQ ID NO: 2518493 - DNA, 25 bp, Homo sapien
gatttttcaaaccagcaccgaagcc

SEQ ID NO: 2518494 - DNA, 25 bp, Homo sapien
gatctcaccagtgaatggctactgc

SEQ ID NO: 2518495 - DNA, 25 bp, Homo sapien
cagtgaatggctactgcacatcagc

SEQ ID NO: 2518496 - DNA, 25 bp, Homo sapien
cgtgatgatctcaccagtgaatggc

SEQ ID NO: 2518497 - DNA, 25 bp, Homo sapien
atgctgtagcgcgtgatgatctcac

SEQ ID NO: 2518498 - DNA, 25 bp, Homo sapien
tcagctggtgttcctcatgtctccc

SEQ ID NO: 2518499 - DNA, 25 bp, Homo sapien
agctggtgttcctcatgtctccctt

SEQ ID NO: 2518500 - DNA, 25 bp, Homo sapien
tgttcagctggtgttcctcatgtct

SEQ ID NO: 2518501 - DNA, 25 bp, Homo sapien
ttcagctggtgttcctcatgtctcc

SEQ ID NO: 2518502 - DNA, 25 bp, Homo sapien
catctgcaagatcatttggtggctt

SEQ ID NO: 2518503 - DNA, 25 bp, Homo sapien
catttggtggcttgagcaacagaag

SEQ ID NO: 2518504 - DNA, 25 bp, Homo sapien
ggtggcttgagcaacagaagatact

SEQ ID NO: 2518505 - DNA, 25 bp, Homo sapien
taccatgagcatctgcaagatcatt

SEQ ID NO: 2518506 - DNA, 25 bp, Homo sapien
caacactgaagcagtttaaaccaat

SEQ ID NO: 2518507 - DNA, 25 bp, Homo sapien
taaaccaatccagatttttagctaa

SEQ ID NO: 2518508 - DNA, 25 bp, Homo sapien
tgagctgccgtttttgaaaattata

SEQ ID NO: 2518509 - DNA, 25 bp, Homo sapien
ccaaagtgagctgccgtttttgaaa

SEQ ID NO: 2518510 - DNA, 25 bp, Homo sapien
gattttgtgttatgactgtctgagc

SEQ ID NO: 2518511 - DNA, 25 bp, Homo sapien
agccctctgagcaacaatgtgatac

SEQ ID NO: 2518512 - DNA, 25 bp, Homo sapien
cagaaagccataaacataacctgag

SEQ ID NO: 2518513 - DNA, 25 bp, Homo sapien
cttttgccaagagtgatagaccaca

SEQ ID NO: 2518514 - DNA, 25 bp, Homo sapien
ccaggactggaaccatagaggagtc

SEQ ID NO: 2518515 - DNA, 25 bp, Homo sapien
tatccccagagaccaagatctcatg

SEQ ID NO: 2518516 - DNA, 25 bp, Homo sapien
cacaatccagacataatttcggcac

SEQ ID NO: 2518517 - DNA, 25 bp, Homo sapien
tttttgaacggtggtggccaatctg

SEQ ID NO: 2518518 - DNA, 25 bp, Homo sapien
aggtgtagacgcaactggagatgac

SEQ ID NO: 2518519 - DNA, 25 bp, Homo sapien
aaatctagacccgtgtttatgtgga

SEQ ID NO: 2518520 - DNA, 25 bp, Homo sapien
taatcgtcccgtgcaggtgcaaatc

SEQ ID NO: 2518521 - DNA, 25 bp, Homo sapien
atgacccggttagtggctgacgtgc

SEQ ID NO: 2518522 - DNA, 25 bp, Homo sapien
tctggttcaaactgacgaagactgt

SEQ ID NO: 2518523 - DNA, 25 bp, Homo sapien
taggttcagtctgtgagcgctcggc

SEQ ID NO: 2518524 - DNA, 25 bp, Homo sapien
tcggctttcggagactgaagggccc

SEQ ID NO: 2518525 - DNA, 25 bp, Homo sapien
tatccggttttgtgatggccgcgcc

SEQ ID NO: 2518526 - DNA, 25 bp, Homo sapien
tcggaggccgcttcgccgctgttta

SEQ ID NO: 2518527 - DNA, 25 bp, Homo sapien
tcgaactgccgtcccgcgtgggagc

SEQ ID NO: 2518528 - DNA, 25 bp, Homo sapien
gtggacacggacttcgggcctcgga

SEQ ID NO: 2518529 - DNA, 25 bp, Homo sapien
cgctgtttaaatcctgctggacagg

SEQ ID NO: 2518530 - DNA, 25 bp, Homo sapien
ggctcgaacgctgaaccctcaggtg

SEQ ID NO: 2518531 - DNA, 25 bp, Homo sapien
ggtaatagcaatgatttgaggtggc

SEQ ID NO: 2518532 - DNA, 25 bp, Homo sapien
caaagctgctactgtaggtggcacc

SEQ ID NO: 2518533 - DNA, 25 bp, Homo sapien
tttgttttgacaggaaacctggtgc

SEQ ID NO: 2518534 - DNA, 25 bp, Homo sapien
ttgtccccagtgggtgtctcagcac

SEQ ID NO: 2518535 - DNA, 25 bp, Homo sapien
gtgaagaaactggacaagttgtcct

SEQ ID NO: 2518536 - DNA, 25 bp, Homo sapien
tgtccccagtgggtgtctcagcacc

SEQ ID NO: 2518537 - DNA, 25 bp, Homo sapien
actgtgaagaaactggacaagttgt

SEQ ID NO: 2518538 - DNA, 25 bp, Homo sapien
cagggccgaagatacccagtcatgt

SEQ ID NO: 2518539 - DNA, 25 bp, Homo sapien
gggatttcatgcatcaccctgacag

SEQ ID NO: 2518540 - DNA, 25 bp, Homo sapien
aagttgcctgatttgaagaggccca

SEQ ID NO: 2518541 - DNA, 25 bp, Homo sapien
cttgaggaggctccctgccgtggtc

SEQ ID NO: 2518542 - DNA, 25 bp, Homo sapien
tccccaggaaaagccgaggttgcag

SEQ ID NO: 2518543 - DNA, 25 bp, Homo sapien
tgagaaccactatgccacactgttg

SEQ ID NO: 2518544 - DNA, 25 bp, Homo sapien
agtgaagtctctgccgatccctaag

SEQ ID NO: 2518545 - DNA, 25 bp, Homo sapien
gatccctaagagaagagccaacgtt

SEQ ID NO: 2518546 - DNA, 25 bp, Homo sapien
catttccacttgcagaagcgagccc

SEQ ID NO: 2518547 - DNA, 25 bp, Homo sapien
ccagggatcatactgcataaactag

SEQ ID NO: 2518548 - DNA, 25 bp, Homo sapien
taaacttgtctaaagtggaaggaca

SEQ ID NO: 2518549 - DNA, 25 bp, Homo sapien
tagcccttgccaaataccagggatc

SEQ ID NO: 2518550 - DNA, 25 bp, Homo sapien
cccggcctcatttgccattcttgag

SEQ ID NO: 2518551 - DNA, 25 bp, Homo sapien
caaaccttgcaaagttgggcactag

SEQ ID NO: 2518552 - DNA, 25 bp, Homo sapien
tcatttgccattcttgagcgttaaa

SEQ ID NO: 2518553 - DNA, 25 bp, Homo sapien
tcttgagcgttaaatcaaaccttgc

SEQ ID NO: 2518554 - DNA, 25 bp, Homo sapien
atcccttagcatgttgtttatttgg

SEQ ID NO: 2518555 - DNA, 25 bp, Homo sapien
tattaaatgccatacacacattttc

SEQ ID NO: 2518556 - DNA, 25 bp, Homo sapien
aatttgtattaaatgccatacacac

SEQ ID NO: 2518557 - DNA, 25 bp, Homo sapien
taaattgtatcccttagcatgttgt

SEQ ID NO: 2518558 - DNA, 25 bp, Homo sapien
tcctccttcgtgagcagcatggacg

SEQ ID NO: 2518559 - DNA, 25 bp, Homo sapien
cgagctacaccagagggcgtacttt

SEQ ID NO: 2518560 - DNA, 25 bp, Homo sapien
acattatttactggacaggccatcc

SEQ ID NO: 2518561 - DNA, 25 bp, Homo sapien
gaattggcaagaaacctgacagctg

SEQ ID NO: 2518562 - DNA, 25 bp, Homo sapien
gagtttgggaacctgactccggagc

SEQ ID NO: 2518563 - DNA, 25 bp, Homo sapien
cgcgcttgcgagtcttttttccaga

SEQ ID NO: 2518564 - DNA, 25 bp, Homo sapien
gcgccgatcccgactgtagaggtca

SEQ ID NO: 2518565 - DNA, 25 bp, Homo sapien
agcgtcagggacaaggatgcgccct

SEQ ID NO: 2518566 - DNA, 25 bp, Homo sapien
gagctcaggccatttgcatgaggca

SEQ ID NO: 2518567 - DNA, 25 bp, Homo sapien
gggacgtattgcatgtttgcagtct

SEQ ID NO: 2518568 - DNA, 25 bp, Homo sapien
tttgcagtcttacagaggacacggg

SEQ ID NO: 2518569 - DNA, 25 bp, Homo sapien
aaaccagatcgtctgaattccaagc

SEQ ID NO: 2518570 - DNA, 25 bp, Homo sapien
gtatacccctgaaccctagaaagca

SEQ ID NO: 2518571 - DNA, 25 bp, Homo sapien
taactcctgcctgaaggttggagct

SEQ ID NO: 2518572 - DNA, 25 bp, Homo sapien
ctgggtggtcaggtagtgaactact

SEQ ID NO: 2518573 - DNA, 25 bp, Homo sapien
gtgtcccatggatagaacttgttga

SEQ ID NO: 2518574 - DNA, 25 bp, Homo sapien
aaatgtttaaagctcacaccctgag

SEQ ID NO: 2518575 - DNA, 25 bp, Homo sapien
tcttcttgaatgtcacccatctgaa

SEQ ID NO: 2518576 - DNA, 25 bp, Homo sapien
tgtttcctgaccagagccttgcctc

SEQ ID NO: 2518577 - DNA, 25 bp, Homo sapien
gccagaggcatgacagtagtaaaag

SEQ ID NO: 2518578 - DNA, 25 bp, Homo sapien
ctggctttctgtgtcgatttcatgg

SEQ ID NO: 2518579 - DNA, 25 bp, Homo sapien
tgcacagctgtgttagatctgcagt

SEQ ID NO: 2518580 - DNA, 25 bp, Homo sapien
agcagagggtagaagccgcaatgat

SEQ ID NO: 2518581 - DNA, 25 bp, Homo sapien
ccattgttccgcaagtcagcagagg

SEQ ID NO: 2518582 - DNA, 25 bp, Homo sapien
cctcctgcgaactgctgcttaaggg

SEQ ID NO: 2518583 - DNA, 25 bp, Homo sapien
ttctcttgatggagggtggacaggc

SEQ ID NO: 2518584 - DNA, 25 bp, Homo sapien
aaattacattctcccccgagctcgt

SEQ ID NO: 2518585 - DNA, 25 bp, Homo sapien
tgcttaaggggtgccgagatttctc

SEQ ID NO: 2518586 - DNA, 25 bp, Homo sapien
tatgtgtaaacttcaaactaggcca

SEQ ID NO: 2518587 - DNA, 25 bp, Homo sapien
gacctatgcgggcttacacaggagt

SEQ ID NO: 2518588 - DNA, 25 bp, Homo sapien
caagtgaggcacttagaacagggcc

SEQ ID NO: 2518589 - DNA, 25 bp, Homo sapien
gagccaaggtgcttccactaataag

SEQ ID NO: 2518590 - DNA, 25 bp, Homo sapien
ccatctgacgagcggccattcatca

SEQ ID NO: 2518591 - DNA, 25 bp, Homo sapien
gccggctggcctatcaatgacattg

SEQ ID NO: 2518592 - DNA, 25 bp, Homo sapien
ccacaatgggcttcacagtgcgcct

SEQ ID NO: 2518593 - DNA, 25 bp, Homo sapien
ttttcccatgaaacatccgcaaaca

SEQ ID NO: 2518594 - DNA, 25 bp, Homo sapien
tgccaaaggcctgggtgccagtcac

SEQ ID NO: 2518595 - DNA, 25 bp, Homo sapien
tcatcagctggtgccctttgcaggg

SEQ ID NO: 2518596 - DNA, 25 bp, Homo sapien
gaggctgatgcccactgccaaaggc

SEQ ID NO: 2518597 - DNA, 25 bp, Homo sapien
tgtttgggatttagccacgttccca

SEQ ID NO: 2518598 - DNA, 25 bp, Homo sapien
gaaatgaaacgtttggcagccccat

SEQ ID NO: 2518599 - DNA, 25 bp, Homo sapien
ggaaatgaaacgtttggcagcccca

SEQ ID NO: 2518600 - DNA, 25 bp, Homo sapien
gaggggaaatgaaacgtttggcagc

SEQ ID NO: 2518601 - DNA, 25 bp, Homo sapien
atgaggggaaatgaaacgtttggca

SEQ ID NO: 2518602 - DNA, 25 bp, Homo sapien
taactgccaggcactactgccagct

SEQ ID NO: 2518603 - DNA, 25 bp, Homo sapien
cagagttcttgcacgtaacccctga

SEQ ID NO: 2518604 - DNA, 25 bp, Homo sapien
tgttttcaccttgagagatgctctc

SEQ ID NO: 2518605 - DNA, 25 bp, Homo sapien
tcaattcaggtagtcgagttccaga

SEQ ID NO: 2518606 - DNA, 25 bp, Homo sapien
gcagtttcctcagttaaccaccaga

SEQ ID NO: 2518607 - DNA, 25 bp, Homo sapien
gtcaaagtaagcaccggacggccat

SEQ ID NO: 2518608 - DNA, 25 bp, Homo sapien
acctgcagagcgcacatctatgggc

SEQ ID NO: 2518609 - DNA, 25 bp, Homo sapien
caccagaagactcgggacccgagga

SEQ ID NO: 2518610 - DNA, 25 bp, Homo sapien
tggtcaaacagaagagtggatggat

SEQ ID NO: 2518611 - DNA, 25 bp, Homo sapien
gtctttgaggaatcagtggctccga

SEQ ID NO: 2518612 - DNA, 25 bp, Homo sapien
ggcaattcaaaatgttggtcaaaca

SEQ ID NO: 2518613 - DNA, 25 bp, Homo sapien
taaggtttcagccttggtacgatta

SEQ ID NO: 2518614 - DNA, 25 bp, Homo sapien
aagccaccggaaccatgctcctccc

SEQ ID NO: 2518615 - DNA, 25 bp, Homo sapien
tgaagccaccggaaccatgctcctc

SEQ ID NO: 2518616 - DNA, 25 bp, Homo sapien
ctgaagccaccggaaccatgctcct

SEQ ID NO: 2518617 - DNA, 25 bp, Homo sapien
ccaccggaaccatgctcctccccca

SEQ ID NO: 2518618 - DNA, 25 bp, Homo sapien
caatgtaagctgtcccaccagggat

SEQ ID NO: 2518619 - DNA, 25 bp, Homo sapien
tataggcatctcgaacagtgatcca

SEQ ID NO: 2518620 - DNA, 25 bp, Homo sapien
tttacaccatggaagactctcgcga

SEQ ID NO: 2518621 - DNA, 25 bp, Homo sapien
ttttaacaacccatgagctaacgag

SEQ ID NO: 2518622 - DNA, 25 bp, Homo sapien
gcagactgcaggtatactgctccaa

SEQ ID NO: 2518623 - DNA, 25 bp, Homo sapien
gaatatatgttcatgtcccggtgaa

SEQ ID NO: 2518624 - DNA, 25 bp, Homo sapien
caagggcttccaacatgcagactgc

SEQ ID NO: 2518625 - DNA, 25 bp, Homo sapien
aaatatcaaccccatgtaggcagga

SEQ ID NO: 2518626 - DNA, 25 bp, Homo sapien
tgccacatctgtggaagtgccacct

SEQ ID NO: 2518627 - DNA, 25 bp, Homo sapien
cctatctctatccacagcagaagtc

SEQ ID NO: 2518628 - DNA, 25 bp, Homo sapien
cagaagtccgagaagagatcatctt

SEQ ID NO: 2518629 - DNA, 25 bp, Homo sapien
tatccacagcagaagtccgagaaga

SEQ ID NO: 2518630 - DNA, 25 bp, Homo sapien
cctgggttaaaggattcagtccaag

SEQ ID NO: 2518631 - DNA, 25 bp, Homo sapien
tgggttaaaggattcagtccaagat

SEQ ID NO: 2518632 - DNA, 25 bp, Homo sapien
taacaggccacggtccggtactggc

SEQ ID NO: 2518633 - DNA, 25 bp, Homo sapien
cttgtgcggcccagttcctaacagg

SEQ ID NO: 2518634 - DNA, 25 bp, Homo sapien
attaggaaagccttggcgtgctgtc

SEQ ID NO: 2518635 - DNA, 25 bp, Homo sapien
aagccttggcgtgctgtccatagtc

SEQ ID NO: 2518636 - DNA, 25 bp, Homo sapien
agcacaggggtatgcgccagtgttt

SEQ ID NO: 2518637 - DNA, 25 bp, Homo sapien
agacaccacctacgcccttctccct

SEQ ID NO: 2518638 - DNA, 25 bp, Homo sapien
tgtagccacctagactccagggagc

SEQ ID NO: 2518639 - DNA, 25 bp, Homo sapien
gtagccacctagactccagggagca

SEQ ID NO: 2518640 - DNA, 25 bp, Homo sapien
ttccctgtagccacctagactccag

SEQ ID NO: 2518641 - DNA, 25 bp, Homo sapien
cctgtagccacctagactccaggga

SEQ ID NO: 2518642 - DNA, 25 bp, Homo sapien
cagtgggactgggtttctgtagcca

SEQ ID NO: 2518643 - DNA, 25 bp, Homo sapien
gggactgggtttctgtagccaagcc

SEQ ID NO: 2518644 - DNA, 25 bp, Homo sapien
tagagcactatctcgggcaggccat

SEQ ID NO: 2518645 - DNA, 25 bp, Homo sapien
ttgactgtttctgtagagcactatc

SEQ ID NO: 2518646 - DNA, 25 bp, Homo sapien
tcagtgtgataattgtgtctacagc

SEQ ID NO: 2518647 - DNA, 25 bp, Homo sapien
gacatcggatgtttcagcaactgtt

SEQ ID NO: 2518648 - DNA, 25 bp, Homo sapien
aatagttttatctgtacagttgtgc

SEQ ID NO: 2518649 - DNA, 25 bp, Homo sapien
cagttgtgcaagatatgaatggttt

SEQ ID NO: 2518650 - DNA, 25 bp, Homo sapien
tggtgctataacacagagtgaggct

SEQ ID NO: 2518651 - DNA, 25 bp, Homo sapien
ggcagtgattcaggcagggagccac

SEQ ID NO: 2518652 - DNA, 25 bp, Homo sapien
caaaaaacggagtagactggcagct

SEQ ID NO: 2518653 - DNA, 25 bp, Homo sapien
gagtgaggctcatgagtccaacccc

SEQ ID NO: 2518654 - DNA, 25 bp, Homo sapien
gacgtgggccacaagagatgaagaa

SEQ ID NO: 2518655 - DNA, 25 bp, Homo sapien
tggtgtaggtgggacggaagacgtg

SEQ ID NO: 2518656 - DNA, 25 bp, Homo sapien
taggtgggacggaagacgtgggcca

SEQ ID NO: 2518657 - DNA, 25 bp, Homo sapien
gacggaagacgtgggccacaagaga

SEQ ID NO: 2518658 - DNA, 25 bp, Homo sapien
gctttcaagttcaaccaagttggtg

SEQ ID NO: 2518659 - DNA, 25 bp, Homo sapien
tttcaagttcaaccaagttggtgtc

SEQ ID NO: 2518660 - DNA, 25 bp, Homo sapien
tcaagttcaaccaagttggtgtcat

SEQ ID NO: 2518661 - DNA, 25 bp, Homo sapien
ctttcaagttcaaccaagttggtgt

SEQ ID NO: 2518662 - DNA, 25 bp, Homo sapien
ttcggcacgccagtaaattagatgg

SEQ ID NO: 2518663 - DNA, 25 bp, Homo sapien
aattagatggaagagcgggatagcc

SEQ ID NO: 2518664 - DNA, 25 bp, Homo sapien
gccgggttgctctagtcctttgaga

SEQ ID NO: 2518665 - DNA, 25 bp, Homo sapien
gaattgcagtccatttagcggctgg

SEQ ID NO: 2518666 - DNA, 25 bp, Homo sapien
gcctgactccgcctcggtccgctag

SEQ ID NO: 2518667 - DNA, 25 bp, Homo sapien
aagactggacagttctccgagggag

SEQ ID NO: 2518668 - DNA, 25 bp, Homo sapien
ttaaaagactggacagttctccgag

SEQ ID NO: 2518669 - DNA, 25 bp, Homo sapien
aaaagactggacagttctccgaggg

SEQ ID NO: 2518670 - DNA, 25 bp, Homo sapien
tcgaccgagtcctgggccttgtcag

SEQ ID NO: 2518671 - DNA, 25 bp, Homo sapien
ccttgtcaggggcggccgtgaggcg

SEQ ID NO: 2518672 - DNA, 25 bp, Homo sapien
ggcctcgaccgagtcctgggccttg

SEQ ID NO: 2518673 - DNA, 25 bp, Homo sapien
caggcctcgaccgagtcctgggcct

SEQ ID NO: 2518674 - DNA, 25 bp, Homo sapien
cggtgacgtcgcggggtgaaagttg

SEQ ID NO: 2518675 - DNA, 25 bp, Homo sapien
tgacgtcgcggggtgaaagttgagg

SEQ ID NO: 2518676 - DNA, 25 bp, Homo sapien
tgaggggcggtgacgtcgggccggc

SEQ ID NO: 2518677 - DNA, 25 bp, Homo sapien
gtgaaagttgaggggcggtgacgtc

SEQ ID NO: 2518678 - DNA, 25 bp, Homo sapien
gcgggttggaggcaggacggaggga

SEQ ID NO: 2518679 - DNA, 25 bp, Homo sapien
cgggttggaggcaggacggagggag

SEQ ID NO: 2518680 - DNA, 25 bp, Homo sapien
tggcgggttggaggcaggacggagg

SEQ ID NO: 2518681 - DNA, 25 bp, Homo sapien
ctggcgggttggaggcaggacggag

SEQ ID NO: 2518682 - DNA, 25 bp, Homo sapien
aggcagcggcttgggcgcgcagagc

SEQ ID NO: 2518683 - DNA, 25 bp, Homo sapien
gccctctacatcgtccgggccggcg

SEQ ID NO: 2518684 - DNA, 25 bp, Homo sapien
cccgcacctgcggccatggatgagg

SEQ ID NO: 2518685 - DNA, 25 bp, Homo sapien
catggatgaggagcgcgccctctac

SEQ ID NO: 2518686 - DNA, 25 bp, Homo sapien
cccccggaatccgtagatgtgcatc

SEQ ID NO: 2518687 - DNA, 25 bp, Homo sapien
ggtcctcctctcaagcgtgcaagtc

SEQ ID NO: 2518688 - DNA, 25 bp, Homo sapien
cataaaaatacgtgcttccctgcat

SEQ ID NO: 2518689 - DNA, 25 bp, Homo sapien
aaacgtttccggcttgggcatgcgt

SEQ ID NO: 2518690 - DNA, 25 bp, Homo sapien
ggccctgaggtatggagtagtatca

SEQ ID NO: 2518691 - DNA, 25 bp, Homo sapien
caaactgtgactaagggccctgagg

SEQ ID NO: 2518692 - DNA, 25 bp, Homo sapien
taaccagagacgtggcttggtggcc

SEQ ID NO: 2518693 - DNA, 25 bp, Homo sapien
gaatcctttggctactgttgggtcc

SEQ ID NO: 2518694 - DNA, 25 bp, Homo sapien
agaagcatgtttagtgggctgttcc

SEQ ID NO: 2518695 - DNA, 25 bp, Homo sapien
tagagtatgtaaatatccaggacca

SEQ ID NO: 2518696 - DNA, 25 bp, Homo sapien
tccaggaccatgtaagaggactttt

SEQ ID NO: 2518697 - DNA, 25 bp, Homo sapien
cctgatattgggacagttctataaa

SEQ ID NO: 2518698 - DNA, 25 bp, Homo sapien
taccaagggatgactacatttaaaa

SEQ ID NO: 2518699 - DNA, 25 bp, Homo sapien
tttgtagctgatgactatgtgcaca

SEQ ID NO: 2518700 - DNA, 25 bp, Homo sapien
tatgtgcacatagcctaggtttcct

SEQ ID NO: 2518701 - DNA, 25 bp, Homo sapien
gcgtccagccttctataccatttta

SEQ ID NO: 2518702 - DNA, 25 bp, Homo sapien
ggagacagactgtgccattgaggcc

SEQ ID NO: 2518703 - DNA, 25 bp, Homo sapien
acggtagacagttggaaggtgcata

SEQ ID NO: 2518704 - DNA, 25 bp, Homo sapien
taattggtctgggacatccctagag

SEQ ID NO: 2518705 - DNA, 25 bp, Homo sapien
gctctcttcaatgtgacggtagaca

SEQ ID NO: 2518706 - DNA, 25 bp, Homo sapien
tcagtgtggcatctggatacgtctc

SEQ ID NO: 2518707 - DNA, 25 bp, Homo sapien
tgacttttaggaaatacgatgaccc

SEQ ID NO: 2518708 - DNA, 25 bp, Homo sapien
gatacgtctccatagttctcagaag

SEQ ID NO: 2518709 - DNA, 25 bp, Homo sapien
cctgagcaaataatggatgggtggt

SEQ ID NO: 2518710 - DNA, 25 bp, Homo sapien
gaaataaatgacaaggctatgggtt

SEQ ID NO: 2518711 - DNA, 25 bp, Homo sapien
taaacatgactctagatgtaggtct

SEQ ID NO: 2518712 - DNA, 25 bp, Homo sapien
ctaatgtacagccaaggctagaaat

SEQ ID NO: 2518713 - DNA, 25 bp, Homo sapien
taaagggactctacgcccctatcta

SEQ ID NO: 2518714 - DNA, 25 bp, Homo sapien
gttttgaatcaggttttcgaggatg

SEQ ID NO: 2518715 - DNA, 25 bp, Homo sapien
gtccttccataagaattggtatgtc

SEQ ID NO: 2518716 - DNA, 25 bp, Homo sapien
ggatggtgagcactgagtccttcca

SEQ ID NO: 2518717 - DNA, 25 bp, Homo sapien
gcaagaatggcaagataggttttga

SEQ ID NO: 2518718 - DNA, 25 bp, Homo sapien
gataacagtacgtagtaagcaagcc

SEQ ID NO: 2518719 - DNA, 25 bp, Homo sapien
tgcccaaccgaaagtctcaaagacg

SEQ ID NO: 2518720 - DNA, 25 bp, Homo sapien
gagaaaagccctagtcagtaaagaa

SEQ ID NO: 2518721 - DNA, 25 bp, Homo sapien
caaagacgggttgcaagctggctac

SEQ ID NO: 2518722 - DNA, 25 bp, Homo sapien
ttggctggtacaagatactgtgatc

SEQ ID NO: 2518723 - DNA, 25 bp, Homo sapien
taaacactcattgccctctgtggtc

SEQ ID NO: 2518724 - DNA, 25 bp, Homo sapien
tgtctaggccagatcaaacctaatt

SEQ ID NO: 2518725 - DNA, 25 bp, Homo sapien
gatatacctgtctcttggtaggcta

SEQ ID NO: 2518726 - DNA, 25 bp, Homo sapien
cattccacagttgagctcttcgtag

SEQ ID NO: 2518727 - DNA, 25 bp, Homo sapien
tcttgagactccagattgtgtgcta

SEQ ID NO: 2518728 - DNA, 25 bp, Homo sapien
cagccctgtgaattaaatagcgtca

SEQ ID NO: 2518729 - DNA, 25 bp, Homo sapien
gatttagaggacatgcattactgct

SEQ ID NO: 2518730 - DNA, 25 bp, Homo sapien
tggcaagcgggaagctgaaactcgt

SEQ ID NO: 2518731 - DNA, 25 bp, Homo sapien
tctgcaagtgggaaacaagaatgca

SEQ ID NO: 2518732 - DNA, 25 bp, Homo sapien
tgagtcgttatcaagctaagtggca

SEQ ID NO: 2518733 - DNA, 25 bp, Homo sapien
gccctgtagtacacagagcagacaa

SEQ ID NO: 2518734 - DNA, 25 bp, Homo sapien
aggcaaacggtggctcaggaaaatg

SEQ ID NO: 2518735 - DNA, 25 bp, Homo sapien
gagtaatgggagttctttcatggcc

SEQ ID NO: 2518736 - DNA, 25 bp, Homo sapien
agtgtgcattctgaggtctaacccg

SEQ ID NO: 2518737 - DNA, 25 bp, Homo sapien
gacagtgggcctagctcatcagtgg

SEQ ID NO: 2518738 - DNA, 25 bp, Homo sapien
gatggtttagttctcaggcagctac

SEQ ID NO: 2518739 - DNA, 25 bp, Homo sapien
ttactacaagattgggatcatgctg

SEQ ID NO: 2518740 - DNA, 25 bp, Homo sapien
gcagtacaagtgactctaaacaccc

SEQ ID NO: 2518741 - DNA, 25 bp, Homo sapien
gaccctttcagatgcccagtagtcc

SEQ ID NO: 2518742 - DNA, 25 bp, Homo sapien
tctttataaatgaggacacagaatg

SEQ ID NO: 2518743 - DNA, 25 bp, Homo sapien
ggaatctcaccaacaccctggaaag

SEQ ID NO: 2518744 - DNA, 25 bp, Homo sapien
gaggtaagcatgtccacgagcagtg

SEQ ID NO: 2518745 - DNA, 25 bp, Homo sapien
cagcgtctcactggaatctcaccaa

SEQ ID NO: 2518746 - DNA, 25 bp, Homo sapien
cccttgattggtgatgaaaacttgc

SEQ ID NO: 2518747 - DNA, 25 bp, Homo sapien
caaatttatcatcttcaaccacaca

SEQ ID NO: 2518748 - DNA, 25 bp, Homo sapien
tcctccagcatatctgttccaaatt

SEQ ID NO: 2518749 - DNA, 25 bp, Homo sapien
ataatcctgaaaagcagcgatctgc

SEQ ID NO: 2518750 - DNA, 25 bp, Homo sapien
tcaaccacacactgtatttgaagtt

SEQ ID NO: 2518751 - DNA, 25 bp, Homo sapien
gaatgcttctgactcactcctttca

SEQ ID NO: 2518752 - DNA, 25 bp, Homo sapien
ctttcattttgccatatctgtctca

SEQ ID NO: 2518753 - DNA, 25 bp, Homo sapien
ggtttcatgtctaagatggaagact

SEQ ID NO: 2518754 - DNA, 25 bp, Homo sapien
catcccaaggtttcatgtctaagat

SEQ ID NO: 2518755 - DNA, 25 bp, Homo sapien
ttcccttaacctctttgcttcttca

SEQ ID NO: 2518756 - DNA, 25 bp, Homo sapien
tattgtgcaaggtgtttgttcttcc

SEQ ID NO: 2518757 - DNA, 25 bp, Homo sapien
tcatattgtgcaaggtgtttgttct

SEQ ID NO: 2518758 - DNA, 25 bp, Homo sapien
attgtgcaaggtgtttgttcttccc

SEQ ID NO: 2518759 - DNA, 25 bp, Homo sapien
tgtagtgtcttccaccttagcagga

SEQ ID NO: 2518760 - DNA, 25 bp, Homo sapien
ttccaccttagcaggaccatacctg

SEQ ID NO: 2518761 - DNA, 25 bp, Homo sapien
agatccaaggagatcaatttcatca

SEQ ID NO: 2518762 - DNA, 25 bp, Homo sapien
cttagcaggaccatacctgcccaca

SEQ ID NO: 2518763 - DNA, 25 bp, Homo sapien
agcaggcggtgggccggacactgct

SEQ ID NO: 2518764 - DNA, 25 bp, Homo sapien
ggcggtgggccggacactgcttcat

SEQ ID NO: 2518765 - DNA, 25 bp, Homo sapien
gtcagcaggcggtgggccggacact

SEQ ID NO: 2518766 - DNA, 25 bp, Homo sapien
ggtgggccggacactgcttcataga

SEQ ID NO: 2518767 - DNA, 25 bp, Homo sapien
tagctcttgtccaccaggtaatcgt

SEQ ID NO: 2518768 - DNA, 25 bp, Homo sapien
tcgatgtagctcttgtccaccaggt

SEQ ID NO: 2518769 - DNA, 25 bp, Homo sapien
cctcgatgtagctcttgtccaccag

SEQ ID NO: 2518770 - DNA, 25 bp, Homo sapien
tgtccaccaggtaatcgttgagcac

SEQ ID NO: 2518771 - DNA, 25 bp, Homo sapien
tggaggctagccgggcttttcagat

SEQ ID NO: 2518772 - DNA, 25 bp, Homo sapien
gaggctagccgggcttttcagatct

SEQ ID NO: 2518773 - DNA, 25 bp, Homo sapien
ggaggctagccgggcttttcagatc

SEQ ID NO: 2518774 - DNA, 25 bp, Homo sapien
cccaacgtctctgcttggtgaactc

SEQ ID NO: 2518775 - DNA, 25 bp, Homo sapien
ggtgaactccgctttcaaaatccat

SEQ ID NO: 2518776 - DNA, 25 bp, Homo sapien
tggtgaactccgctttcaaaatcca

SEQ ID NO: 2518777 - DNA, 25 bp, Homo sapien
actgatgaatcccaacgtctctgct

SEQ ID NO: 2518778 - DNA, 25 bp, Homo sapien
acaaggcaaaacgaaattgatcatc

SEQ ID NO: 2518779 - DNA, 25 bp, Homo sapien
gtagactccagctccttatgaaaag

SEQ ID NO: 2518780 - DNA, 25 bp, Homo sapien
aattgatcatcctcgctaacaacta

SEQ ID NO: 2518781 - DNA, 25 bp, Homo sapien
gaaagtacatgctgggttacaagct

SEQ ID NO: 2518782 - DNA, 25 bp, Homo sapien
ggacccagatgaacacgcaatgcct

SEQ ID NO: 2518783 - DNA, 25 bp, Homo sapien
ggaacagtctgagaaaagccccatt

SEQ ID NO: 2518784 - DNA, 25 bp, Homo sapien
caccgagacgcttatggacccagat

SEQ ID NO: 2518785 - DNA, 25 bp, Homo sapien
taaggctggtaagtagcgcttccac

SEQ ID NO: 2518786 - DNA, 25 bp, Homo sapien
tgccaagaagccccggcccgcaggt

SEQ ID NO: 2518787 - DNA, 25 bp, Homo sapien
ccaagaagccccggcccgcaggtgc

SEQ ID NO: 2518788 - DNA, 25 bp, Homo sapien
ggaggtggaggagctgccagaaggc

SEQ ID NO: 2518789 - DNA, 25 bp, Homo sapien
ggaggagctgccagaaggcatcagc

SEQ ID NO: 2518790 - DNA, 25 bp, Homo sapien
ctgccagaaggcatcagcccattca

SEQ ID NO: 2518791 - DNA, 25 bp, Homo sapien
tgccagaaggcatcagcccattcat

SEQ ID NO: 2518792 - DNA, 25 bp, Homo sapien
gctggttgagaagtggtcttctctg

SEQ ID NO: 2518793 - DNA, 25 bp, Homo sapien
ctggttgagaagtggtcttctctgt

SEQ ID NO: 2518794 - DNA, 25 bp, Homo sapien
tggttgagaagtggtcttctctgtg

SEQ ID NO: 2518795 - DNA, 25 bp, Homo sapien
ctgctgcttcgcacaaatgcaggtg

SEQ ID NO: 2518796 - DNA, 25 bp, Homo sapien
ccctgctgcttcgcacaaatgcagg

SEQ ID NO: 2518797 - DNA, 25 bp, Homo sapien
tgctgcttcgcacaaatgcaggtga

SEQ ID NO: 2518798 - DNA, 25 bp, Homo sapien
gctgcttcgcacaaatgcaggtgac

SEQ ID NO: 2518799 - DNA, 25 bp, Homo sapien
gttcttctgacaaagccccgcttgt

SEQ ID NO: 2518800 - DNA, 25 bp, Homo sapien
tcttctgacaaagccccgcttgttg

SEQ ID NO: 2518801 - DNA, 25 bp, Homo sapien
gcttgttggaaacgctgagtctcag

SEQ ID NO: 2518802 - DNA, 25 bp, Homo sapien
caaagccccgcttgttggaaacgct

SEQ ID NO: 2518803 - DNA, 25 bp, Homo sapien
agaaaccatggtgaagaactagcaa

SEQ ID NO: 2518804 - DNA, 25 bp, Homo sapien
tgaagaaaccatggtgaagaactag

SEQ ID NO: 2518805 - DNA, 25 bp, Homo sapien
ccatggtgaagaactagcaacagtg

SEQ ID NO: 2518806 - DNA, 25 bp, Homo sapien
aaccatggtgaagaactagcaacag

SEQ ID NO: 2518807 - DNA, 25 bp, Homo sapien
tcaaactaacaatcttctgtacagc

SEQ ID NO: 2518808 - DNA, 25 bp, Homo sapien
catatgacaggggttaatagccaga

SEQ ID NO: 2518809 - DNA, 25 bp, Homo sapien
aacagattttgctaataagacccca

SEQ ID NO: 2518810 - DNA, 25 bp, Homo sapien
gaatagacaaggagttcaaacattt

SEQ ID NO: 2518811 - DNA, 25 bp, Homo sapien
gattaggctcatgtaaggatgtgcc

SEQ ID NO: 2518812 - DNA, 25 bp, Homo sapien
gcaaataagtgattaggctcatgta

SEQ ID NO: 2518813 - DNA, 25 bp, Homo sapien
ctagcacagcgactctaaaacgtta

SEQ ID NO: 2518814 - DNA, 25 bp, Homo sapien
ctctaaaacgttaattattctcttg

SEQ ID NO: 2518815 - DNA, 25 bp, Homo sapien
caggcgggtttttactctcaaggag

SEQ ID NO: 2518816 - DNA, 25 bp, Homo sapien
ttcaacaaattcgagcgcctggcag

SEQ ID NO: 2518817 - DNA, 25 bp, Homo sapien
ccctggacgaagaaagtgctggaga

SEQ ID NO: 2518818 - DNA, 25 bp, Homo sapien
gctttctaatgtacaatccgcggct

SEQ ID NO: 2518819 - DNA, 25 bp, Homo sapien
cctctagtctaggatatgcctggca

SEQ ID NO: 2518820 - DNA, 25 bp, Homo sapien
tcttaagtcctaggcacaccactgc

SEQ ID NO: 2518821 - DNA, 25 bp, Homo sapien
gcagccccaggcgagagtgaaatct

SEQ ID NO: 2518822 - DNA, 25 bp, Homo sapien
tctgagaatatacccggaagcagcc

SEQ ID NO: 2518823 - DNA, 25 bp, Homo sapien
tatagtaataacctgcataaggctg

SEQ ID NO: 2518824 - DNA, 25 bp, Homo sapien
gataggacacaactgtgcaggccac

SEQ ID NO: 2518825 - DNA, 25 bp, Homo sapien
caggagcctacctagttgagctggg

SEQ ID NO: 2518826 - DNA, 25 bp, Homo sapien
ggagttccgtatcagagctattaag

SEQ ID NO: 2518827 - DNA, 25 bp, Homo sapien
gaacatttacttactggtcagaagg

SEQ ID NO: 2518828 - DNA, 25 bp, Homo sapien
ccctttttagaatctcaggagtagt

SEQ ID NO: 2518829 - DNA, 25 bp, Homo sapien
tctaataccctgaatatgtgctgtt

SEQ ID NO: 2518830 - DNA, 25 bp, Homo sapien
caaattgtacacttctcagcctggg

SEQ ID NO: 2518831 - DNA, 25 bp, Homo sapien
ggtgataccttgcagtaagtaagtc

SEQ ID NO: 2518832 - DNA, 25 bp, Homo sapien
taagtaagtcgaaatagcatgcctg

SEQ ID NO: 2518833 - DNA, 25 bp, Homo sapien
caaggattgtaatccaagcctggga

SEQ ID NO: 2518834 - DNA, 25 bp, Homo sapien
gactccactgtgctttgtgtctgaa

SEQ ID NO: 2518835 - DNA, 25 bp, Homo sapien
gtcagagcccagttaataaacccag

SEQ ID NO: 2518836 - DNA, 25 bp, Homo sapien
gaatgcacatggtgttttataagag

SEQ ID NO: 2518837 - DNA, 25 bp, Homo sapien
gggtgacttctcttatgccaattca

SEQ ID NO: 2518838 - DNA, 25 bp, Homo sapien
taagcaaactgaccacacaagtagg

SEQ ID NO: 2518839 - DNA, 25 bp, Homo sapien
gcttcctaacatgaaatgtggtgta

SEQ ID NO: 2518840 - DNA, 25 bp, Homo sapien
ttcatggctagtagtgagaaagact

SEQ ID NO: 2518841 - DNA, 25 bp, Homo sapien
ccatttcttagaagtgattcactta

SEQ ID NO: 2518842 - DNA, 25 bp, Homo sapien
ccttgaattaaggaagcacttgtcc

SEQ ID NO: 2518843 - DNA, 25 bp, Homo sapien
cagaagctaagcaggttcttaaaat

SEQ ID NO: 2518844 - DNA, 25 bp, Homo sapien
atatgccatttaatagtatatgagt

SEQ ID NO: 2518845 - DNA, 25 bp, Homo sapien
tatggcacatgagtcagaatttatc

SEQ ID NO: 2518846 - DNA, 25 bp, Homo sapien
tagagataacttaaatacaacacag

SEQ ID NO: 2518847 - DNA, 25 bp, Homo sapien
tacaaactgcctgaatttttgtctt

SEQ ID NO: 2518848 - DNA, 25 bp, Homo sapien
gtctttgctagttagtttcaccctg

SEQ ID NO: 2518849 - DNA, 25 bp, Homo sapien
ctacaaactgcctgaatttttgtct

SEQ ID NO: 2518850 - DNA, 25 bp, Homo sapien
tttgtctttgctagttagtttcacc

SEQ ID NO: 2518851 - DNA, 25 bp, Homo sapien
aatggtgccacagggttaaataatg

SEQ ID NO: 2518852 - DNA, 25 bp, Homo sapien
atggtgccacagggttaaataatgg

SEQ ID NO: 2518853 - DNA, 25 bp, Homo sapien
tggtgccacagggttaaataatggc

SEQ ID NO: 2518854 - DNA, 25 bp, Homo sapien
ttcagtttccttatcctgtactgta

SEQ ID NO: 2518855 - DNA, 25 bp, Homo sapien
cagtttccttatcctgtactgtact

SEQ ID NO: 2518856 - DNA, 25 bp, Homo sapien
tcagtttccttatcctgtactgtac

SEQ ID NO: 2518857 - DNA, 25 bp, Homo sapien
taattcaagaaccattggcgtctct

SEQ ID NO: 2518858 - DNA, 25 bp, Homo sapien
gaaattccttctctcaataatcctt

SEQ ID NO: 2518859 - DNA, 25 bp, Homo sapien
aaagctggtgaaaccttgctcctgg

SEQ ID NO: 2518860 - DNA, 25 bp, Homo sapien
gcttcaggtcatgatctgtgcattt

SEQ ID NO: 2518861 - DNA, 25 bp, Homo sapien
tacatctagataactctcttggaga

SEQ ID NO: 2518862 - DNA, 25 bp, Homo sapien
ggcctcagagccacctacatctaga

SEQ ID NO: 2518863 - DNA, 25 bp, Homo sapien
aaactttcatgttggcctcagagcc

SEQ ID NO: 2518864 - DNA, 25 bp, Homo sapien
tagtagccaaactttcatgttggcc

SEQ ID NO: 2518865 - DNA, 25 bp, Homo sapien
ttatgaaaaacattaggtgcagctg

SEQ ID NO: 2518866 - DNA, 25 bp, Homo sapien
gctgtcaaaagtctgctaatgacca

SEQ ID NO: 2518867 - DNA, 25 bp, Homo sapien
aaacattaggtgcagctgtcaaaag

SEQ ID NO: 2518868 - DNA, 25 bp, Homo sapien
ttagtcccaactcttgaaagaactg

SEQ ID NO: 2518869 - DNA, 25 bp, Homo sapien
tccgggcagcgttccaaaatactgg

SEQ ID NO: 2518870 - DNA, 25 bp, Homo sapien
taacagcggttggactacagacaat

SEQ ID NO: 2518871 - DNA, 25 bp, Homo sapien
tactggctacagcagtctcatcggc

SEQ ID NO: 2518872 - DNA, 25 bp, Homo sapien
tcatcggcacctagttcttgtaaaa

SEQ ID NO: 2518873 - DNA, 25 bp, Homo sapien
gtctgtattttggaggtgatcgcat

SEQ ID NO: 2518874 - DNA, 25 bp, Homo sapien
aggtctgtattttggaggtgatcgc

SEQ ID NO: 2518875 - DNA, 25 bp, Homo sapien
agaaaggtctgtattttggaggtga

SEQ ID NO: 2518876 - DNA, 25 bp, Homo sapien
ctaagaaaggtctgtattttggagg

SEQ ID NO: 2518877 - DNA, 25 bp, Homo sapien
cagcctgcaggactgggatctcagc

SEQ ID NO: 2518878 - DNA, 25 bp, Homo sapien
ctttctgaaagaacacagcctgcag

SEQ ID NO: 2518879 - DNA, 25 bp, Homo sapien
ggactgggatctcagcagcagcttc

SEQ ID NO: 2518880 - DNA, 25 bp, Homo sapien
gcaggactgggatctcagcagcagc

SEQ ID NO: 2518881 - DNA, 25 bp, Homo sapien
gcaatctactagctagtttccaccg

SEQ ID NO: 2518882 - DNA, 25 bp, Homo sapien
tccaccgtcctgggacttaaatgga

SEQ ID NO: 2518883 - DNA, 25 bp, Homo sapien
cgtcctgggacttaaatggactcat

SEQ ID NO: 2518884 - DNA, 25 bp, Homo sapien
ggctgcaatctactagctagtttcc

SEQ ID NO: 2518885 - DNA, 25 bp, Homo sapien
ttgctgaataactatcacccaaaat

SEQ ID NO: 2518886 - DNA, 25 bp, Homo sapien
gaattgtaatacacttctccacaac

SEQ ID NO: 2518887 - DNA, 25 bp, Homo sapien
caagaccaaagagttcaaaggttca

SEQ ID NO: 2518888 - DNA, 25 bp, Homo sapien
taagttgatgtttacctgaagcaga

SEQ ID NO: 2518889 - DNA, 25 bp, Homo sapien
aggctgcacctctgtaccacacgtg

SEQ ID NO: 2518890 - DNA, 25 bp, Homo sapien
cccttgggtaagttagcctcagaga

SEQ ID NO: 2518891 - DNA, 25 bp, Homo sapien
ggcgcagcatgatgaagcacaggca

SEQ ID NO: 2518892 - DNA, 25 bp, Homo sapien
caagacagcagtgattagaacagcg

SEQ ID NO: 2518893 - DNA, 25 bp, Homo sapien
gttaatctgccttgcttagtctctg

SEQ ID NO: 2518894 - DNA, 25 bp, Homo sapien
tgttcagatgagtcgtctttactag

SEQ ID NO: 2518895 - DNA, 25 bp, Homo sapien
tgaaaatctcttatgcagacaccac

SEQ ID NO: 2518896 - DNA, 25 bp, Homo sapien
gagtcgtctttactagttaatctgc

SEQ ID NO: 2518897 - DNA, 25 bp, Homo sapien
caaagcagttaatttcacgtggtca

SEQ ID NO: 2518898 - DNA, 25 bp, Homo sapien
gacttgtaaaactgcaatcgttctg

SEQ ID NO: 2518899 - DNA, 25 bp, Homo sapien
gcttttaagtaccagatgatcagta

SEQ ID NO: 2518900 - DNA, 25 bp, Homo sapien
tattttagcataccaaagtagcccc

SEQ ID NO: 2518901 - DNA, 25 bp, Homo sapien
tacagtctctccccacagatcttgt

SEQ ID NO: 2518902 - DNA, 25 bp, Homo sapien
cagtctctccccacagatcttgtcc

SEQ ID NO: 2518903 - DNA, 25 bp, Homo sapien
agtctctccccacagatcttgtcct

SEQ ID NO: 2518904 - DNA, 25 bp, Homo sapien
cttacagtctctccccacagatctt

SEQ ID NO: 2518905 - DNA, 25 bp, Homo sapien
catggacttttacacttgcgcacaa

SEQ ID NO: 2518906 - DNA, 25 bp, Homo sapien
cctgcactagatttacaagcgttgg

SEQ ID NO: 2518907 - DNA, 25 bp, Homo sapien
gattttagcaggattcatggacacc

SEQ ID NO: 2518908 - DNA, 25 bp, Homo sapien
tcaacactacatggacagactggtc

SEQ ID NO: 2518909 - DNA, 25 bp, Homo sapien
aacgagggtccacggaagatctcca

SEQ ID NO: 2518910 - DNA, 25 bp, Homo sapien
tcgtaacacatatgccctgctgcca

SEQ ID NO: 2518911 - DNA, 25 bp, Homo sapien
aattgaccaacgtttataagcaagg

SEQ ID NO: 2518912 - DNA, 25 bp, Homo sapien
aaacagacgcaggtaaaggaacttg

SEQ ID NO: 2518913 - DNA, 25 bp, Homo sapien
ttccagagaaacccggcaggctgag

SEQ ID NO: 2518914 - DNA, 25 bp, Homo sapien
tttccagagaaacccggcaggctga

SEQ ID NO: 2518915 - DNA, 25 bp, Homo sapien
tccgcttttccagagaaacccggca

SEQ ID NO: 2518916 - DNA, 25 bp, Homo sapien
gcttttccagagaaacccggcaggc

SEQ ID NO: 2518917 - DNA, 25 bp, Homo sapien
gtctggcgaggcgtggggttttgcg

SEQ ID NO: 2518918 - DNA, 25 bp, Homo sapien
tctggcgaggcgtggggttttgcgg

SEQ ID NO: 2518919 - DNA, 25 bp, Homo sapien
gggttttgcgggccctgaccgctgc

SEQ ID NO: 2518920 - DNA, 25 bp, Homo sapien
ttttgcgggccctgaccgctgcggc

SEQ ID NO: 2518921 - DNA, 25 bp, Homo sapien
ttcggtcctcggtctcaagaagctc

SEQ ID NO: 2518922 - DNA, 25 bp, Homo sapien
gcctggagccgggatttcggtcctc

SEQ ID NO: 2518923 - DNA, 25 bp, Homo sapien
gcgtcagctccaagcaaggcacagg

SEQ ID NO: 2518924 - DNA, 25 bp, Homo sapien
ccgtcggcgtcagctccaagcaagg

SEQ ID NO: 2518925 - DNA, 25 bp, Homo sapien
caaagagtgcaaagttagatcaaac

SEQ ID NO: 2518926 - DNA, 25 bp, Homo sapien
cagaggctacaataccaatttggat

SEQ ID NO: 2518927 - DNA, 25 bp, Homo sapien
catgatacttccacaagtttgggtc

SEQ ID NO: 2518928 - DNA, 25 bp, Homo sapien
tgaaaagtattgaactccccaccaa

SEQ ID NO: 2518929 - DNA, 25 bp, Homo sapien
gatgcatgtctcttgaccaaaaatt

SEQ ID NO: 2518930 - DNA, 25 bp, Homo sapien
caattaaattgaatgcaggcaaggc

SEQ ID NO: 2518931 - DNA, 25 bp, Homo sapien
ttctgatacttctaataagggccag

SEQ ID NO: 2518932 - DNA, 25 bp, Homo sapien
aaactaggtaaagcttgattgcaaa

SEQ ID NO: 2518933 - DNA, 25 bp, Homo sapien
aggacgtttcccaccactgagacca

SEQ ID NO: 2518934 - DNA, 25 bp, Homo sapien
tttaggaccaatactctgtgtgtcc

SEQ ID NO: 2518935 - DNA, 25 bp, Homo sapien
gtgtcctcttcctgactaggacgtt

SEQ ID NO: 2518936 - DNA, 25 bp, Homo sapien
ggaccaatactctgtgtgtcctctt

SEQ ID NO: 2518937 - DNA, 25 bp, Homo sapien
gaacagtatgctccaatgcttcatt

SEQ ID NO: 2518938 - DNA, 25 bp, Homo sapien
ggaaaaagaacagtatgctccaatg

SEQ ID NO: 2518939 - DNA, 25 bp, Homo sapien
gtatgctccaatgcttcattcttac

SEQ ID NO: 2518940 - DNA, 25 bp, Homo sapien
aaaagaacagtatgctccaatgctt

SEQ ID NO: 2518941 - DNA, 25 bp, Homo sapien
gagtttgctgactgtcgccatgagc

SEQ ID NO: 2518942 - DNA, 25 bp, Homo sapien
tttgctgactgtcgccatgagcata

SEQ ID NO: 2518943 - DNA, 25 bp, Homo sapien
caggtgagtttgctgactgtcgcca

SEQ ID NO: 2518944 - DNA, 25 bp, Homo sapien
ctgactgtcgccatgagcatagtgt

SEQ ID NO: 2518945 - DNA, 25 bp, Homo sapien
tacaagctttggagctagtcagact

SEQ ID NO: 2518946 - DNA, 25 bp, Homo sapien
cattccatttgcagaggaggcccaa

SEQ ID NO: 2518947 - DNA, 25 bp, Homo sapien
tctactgggcaaaggtaggcagtca

SEQ ID NO: 2518948 - DNA, 25 bp, Homo sapien
caatgatgcaggaagaagtacaagc

SEQ ID NO: 2518949 - DNA, 25 bp, Homo sapien
tccattcccattaggattagaaggt

SEQ ID NO: 2518950 - DNA, 25 bp, Homo sapien
cactgctgctacaacctgggatatt

SEQ ID NO: 2518951 - DNA, 25 bp, Homo sapien
taggattagaaggtactgatgccag

SEQ ID NO: 2518952 - DNA, 25 bp, Homo sapien
tgcagaatatcccatgaagcctcca

SEQ ID NO: 2518953 - DNA, 25 bp, Homo sapien
tagtcctctatatcgtgaaagctgc

SEQ ID NO: 2518954 - DNA, 25 bp, Homo sapien
aaacggcttgcctcagcatggttca

SEQ ID NO: 2518955 - DNA, 25 bp, Homo sapien
accttttggataccttctggtgcat

SEQ ID NO: 2518956 - DNA, 25 bp, Homo sapien
gcattccagggatcatagatatatt

SEQ ID NO: 2518957 - DNA, 25 bp, Homo sapien
agtctccattgggatctgttctcct

SEQ ID NO: 2518958 - DNA, 25 bp, Homo sapien
ctgatatagtctccattgggatctg

SEQ ID NO: 2518959 - DNA, 25 bp, Homo sapien
ggatctgttctcctaccaaaaccaa

SEQ ID NO: 2518960 - DNA, 25 bp, Homo sapien
tccattgggatctgttctcctacca

SEQ ID NO: 2518961 - DNA, 25 bp, Homo sapien
tatgctccaatctgcatcaagcaat

SEQ ID NO: 2518962 - DNA, 25 bp, Homo sapien
tccaatctgcatcaagcaataattc

SEQ ID NO: 2518963 - DNA, 25 bp, Homo sapien
gctccaatctgcatcaagcaataat

SEQ ID NO: 2518964 - DNA, 25 bp, Homo sapien
caatctgcatcaagcaataattctt

SEQ ID NO: 2518965 - DNA, 25 bp, Homo sapien
atccaaccctcctgacgaagctgtg

SEQ ID NO: 2518966 - DNA, 25 bp, Homo sapien
tctgaacacagatagggtttccttc

SEQ ID NO: 2518967 - DNA, 25 bp, Homo sapien
gccataacagttgcccataaaggga

SEQ ID NO: 2518968 - DNA, 25 bp, Homo sapien
ccctcgtgtcaggaagcaagcaact

SEQ ID NO: 2518969 - DNA, 25 bp, Homo sapien
agtattaaacaataagctctaattt

SEQ ID NO: 2518970 - DNA, 25 bp, Homo sapien
ttaaacaataagctctaattttaga

SEQ ID NO: 2518971 - DNA, 25 bp, Homo sapien
aaacaataagctctaattttagaga

SEQ ID NO: 2518972 - DNA, 25 bp, Homo sapien
taaacaataagctctaattttagag

SEQ ID NO: 2518973 - DNA, 25 bp, Homo sapien
caaccaaatcggagataaggactaa

SEQ ID NO: 2518974 - DNA, 25 bp, Homo sapien
gcagagaattcgcattcattcgagg

SEQ ID NO: 2518975 - DNA, 25 bp, Homo sapien
cattcgaggtctttcaaaatttgcc

SEQ ID NO: 2518976 - DNA, 25 bp, Homo sapien
taaggactaagtccagtagggcttg

SEQ ID NO: 2518977 - DNA, 25 bp, Homo sapien
aaatgcctttccaaacgagtaagtg

SEQ ID NO: 2518978 - DNA, 25 bp, Homo sapien
ctgcagaggataagccatctgtatc

SEQ ID NO: 2518979 - DNA, 25 bp, Homo sapien
tttccaaacgagtaagtgcttcagt

SEQ ID NO: 2518980 - DNA, 25 bp, Homo sapien
ccacactgcagaggataagccatct

SEQ ID NO: 2518981 - DNA, 25 bp, Homo sapien
ttataagttagaggcggttgtccac

SEQ ID NO: 2518982 - DNA, 25 bp, Homo sapien
ggttgtccaccattgagttctatga

SEQ ID NO: 2518983 - DNA, 25 bp, Homo sapien
catcatggtcatcagacagaggagt

SEQ ID NO: 2518984 - DNA, 25 bp, Homo sapien
tcttccagtgaagggactccatatt

SEQ ID NO: 2518985 - DNA, 25 bp, Homo sapien
ctataacaagagttagtaaaatgta

SEQ ID NO: 2518986 - DNA, 25 bp, Homo sapien
acaagagttagtaaaatgtagttag

SEQ ID NO: 2518987 - DNA, 25 bp, Homo sapien
agagttagtaaaatgtagttagtat

SEQ ID NO: 2518988 - DNA, 25 bp, Homo sapien
ataacaagagttagtaaaatgtagt

SEQ ID NO: 2518989 - DNA, 25 bp, Homo sapien
attttggctaataagctcccaaaag

SEQ ID NO: 2518990 - DNA, 25 bp, Homo sapien
gggtgttagcttgttataatgacca

SEQ ID NO: 2518991 - DNA, 25 bp, Homo sapien
gcttctagacatcctctgggtatca

SEQ ID NO: 2518992 - DNA, 25 bp, Homo sapien
aaattaatcactgaagtctttgagg

SEQ ID NO: 2518993 - DNA, 25 bp, Homo sapien
ttaatgagtccaaaaatcattctcc

SEQ ID NO: 2518994 - DNA, 25 bp, Homo sapien
agaaagtaatacagaaagcaatcac

SEQ ID NO: 2518995 - DNA, 25 bp, Homo sapien
agtaatacagaaagcaatcaccata

SEQ ID NO: 2518996 - DNA, 25 bp, Homo sapien
cagaaagcaatcaccataaaagata

SEQ ID NO: 2518997 - DNA, 25 bp, Homo sapien
acagaaagcaatcaccataaaagat

SEQ ID NO: 2518998 - DNA, 25 bp, Homo sapien
tgtctaggtcatataatgtatgtga

SEQ ID NO: 2518999 - DNA, 25 bp, Homo sapien
ttgtctaggtcatataatgtatgtg

SEQ ID NO: 2519000 - DNA, 25 bp, Homo sapien
gtttcttaatagctgcgtctcgttc

SEQ ID NO: 2519001 - DNA, 25 bp, Homo sapien
caattgaaagtttagtaatgttcca

SEQ ID NO: 2519002 - DNA, 25 bp, Homo sapien
gctgcgtctcgttcctttccaaagg

SEQ ID NO: 2519003 - DNA, 25 bp, Homo sapien
tctactccagcttcagttgccagtt

SEQ ID NO: 2519004 - DNA, 25 bp, Homo sapien
tatgaggtggtaagctaataatcca

SEQ ID NO: 2519005 - DNA, 25 bp, Homo sapien
ccatcttccactaggattgtgaggc

SEQ ID NO: 2519006 - DNA, 25 bp, Homo sapien
tcctatcttgggtagaaagcattca

SEQ ID NO: 2519007 - DNA, 25 bp, Homo sapien
ctcctggagcttattgagaaagagt

SEQ ID NO: 2519008 - DNA, 25 bp, Homo sapien
gactttagccatgtgtcactgtttc

SEQ ID NO: 2519009 - DNA, 25 bp, Homo sapien
taatgcttcagtgtggccatctata

SEQ ID NO: 2519010 - DNA, 25 bp, Homo sapien
cattctatcaagcatgtgtcatgaa

SEQ ID NO: 2519011 - DNA, 25 bp, Homo sapien
cagtatctgttgaatacattctatc

SEQ ID NO: 2519012 - DNA, 25 bp, Homo sapien
tatattagggcccatgtggaaaccc

SEQ ID NO: 2519013 - DNA, 25 bp, Homo sapien
gatagtttggcccaataatgtgcta

SEQ ID NO: 2519014 - DNA, 25 bp, Homo sapien
tgctattttaggcagaagaaatctc

SEQ ID NO: 2519015 - DNA, 25 bp, Homo sapien
ccctctatggctctagatatggtaa

SEQ ID NO: 2519016 - DNA, 25 bp, Homo sapien
gggattgatcttctcattcacataa

SEQ ID NO: 2519017 - DNA, 25 bp, Homo sapien
gagctgttctcttctacattaagaa

SEQ ID NO: 2519018 - DNA, 25 bp, Homo sapien
ggtttgggatctatgtcctcaccca

SEQ ID NO: 2519019 - DNA, 25 bp, Homo sapien
aaaaaggctaagtaatgcttatttg

SEQ ID NO: 2519020 - DNA, 25 bp, Homo sapien
cacgaatcacaaacagacgggagtt

SEQ ID NO: 2519021 - DNA, 25 bp, Homo sapien
tctgctggttgtccacgaatcacaa

SEQ ID NO: 2519022 - DNA, 25 bp, Homo sapien
ggagtttaattttcgtagattggca

SEQ ID NO: 2519023 - DNA, 25 bp, Homo sapien
taattttcgtagattggcatcaaga

SEQ ID NO: 2519024 - DNA, 25 bp, Homo sapien
agggagctaaagtcagctttagccc

SEQ ID NO: 2519025 - DNA, 25 bp, Homo sapien
ttctgcagagccctgagaactctga

SEQ ID NO: 2519026 - DNA, 25 bp, Homo sapien
agtcagctttagccctggggatttc

SEQ ID NO: 2519027 - DNA, 25 bp, Homo sapien
agctaaagtcagctttagccctggg

SEQ ID NO: 2519028 - DNA, 25 bp, Homo sapien
tgagggccgttctacaaaacatttg

SEQ ID NO: 2519029 - DNA, 25 bp, Homo sapien
tctgtctctagccagtttgggatga

SEQ ID NO: 2519030 - DNA, 25 bp, Homo sapien
tcagagtcaacaacaccagtgatag

SEQ ID NO: 2519031 - DNA, 25 bp, Homo sapien
caaaggagacgtatgactagatgca

SEQ ID NO: 2519032 - DNA, 25 bp, Homo sapien
tactgggagtcaatcacatgtgtcc

SEQ ID NO: 2519033 - DNA, 25 bp, Homo sapien
gaaaatgatgttcaggttctactgg

SEQ ID NO: 2519034 - DNA, 25 bp, Homo sapien
gagtgagttgggaactcattgaaag

SEQ ID NO: 2519035 - DNA, 25 bp, Homo sapien
aggttctactgggagtcaatcacat

SEQ ID NO: 2519036 - DNA, 25 bp, Homo sapien
gcagctacagggctactacgctatg

SEQ ID NO: 2519037 - DNA, 25 bp, Homo sapien
tctggcggtgagtagccgtgactct

SEQ ID NO: 2519038 - DNA, 25 bp, Homo sapien
tctgagactaagatgcaactgaacc

SEQ ID NO: 2519039 - DNA, 25 bp, Homo sapien
tacgctatgccatcgtagaattgga

SEQ ID NO: 2519040 - DNA, 25 bp, Homo sapien
tggtctaggacaaccaaatcagcca

SEQ ID NO: 2519041 - DNA, 25 bp, Homo sapien
gtttggtctaggacaaccaaatcag

SEQ ID NO: 2519042 - DNA, 25 bp, Homo sapien
ctggtgtttggtctaggacaaccaa

SEQ ID NO: 2519043 - DNA, 25 bp, Homo sapien
agaaatgcccagtttaacatgtatt

SEQ ID NO: 2519044 - DNA, 25 bp, Homo sapien
gaaatggccctaattgctataaaac

SEQ ID NO: 2519045 - DNA, 25 bp, Homo sapien
taaggcattcaaggaagtaaggaga

SEQ ID NO: 2519046 - DNA, 25 bp, Homo sapien
gaaaatggagtggttacaaaagaca

SEQ ID NO: 2519047 - DNA, 25 bp, Homo sapien
gataggcaggtagcaccaaaaaagg

SEQ ID NO: 2519048 - DNA, 25 bp, Homo sapien
gaggactggcatataattgagtaaa

SEQ ID NO: 2519049 - DNA, 25 bp, Homo sapien
tttcaaagatgagaggactggcata

SEQ ID NO: 2519050 - DNA, 25 bp, Homo sapien
caaagatgagaggactggcatataa

SEQ ID NO: 2519051 - DNA, 25 bp, Homo sapien
gatgagaggactggcatataattga

SEQ ID NO: 2519052 - DNA, 25 bp, Homo sapien
aagctagtactgtgtcagcgctgac

SEQ ID NO: 2519053 - DNA, 25 bp, Homo sapien
tttccttgatgctcaaagctagtac

SEQ ID NO: 2519054 - DNA, 25 bp, Homo sapien
gtgtcagcgctgacataatatatat

SEQ ID NO: 2519055 - DNA, 25 bp, Homo sapien
gatgctcaaagctagtactgtgtca

SEQ ID NO: 2519056 - DNA, 25 bp, Homo sapien
acttaaagctatgtttggggcaagt

SEQ ID NO: 2519057 - DNA, 25 bp, Homo sapien
tatgtttggggcaagtttttcaatg

SEQ ID NO: 2519058 - DNA, 25 bp, Homo sapien
agctatgtttggggcaagtttttca

SEQ ID NO: 2519059 - DNA, 25 bp, Homo sapien
cacttaaagctatgtttggggcaag

SEQ ID NO: 2519060 - DNA, 25 bp, Homo sapien
tggtagaacccaactatgaaactat

SEQ ID NO: 2519061 - DNA, 25 bp, Homo sapien
tgtgctcaagtagtatagtcaagtc

SEQ ID NO: 2519062 - DNA, 25 bp, Homo sapien
ggaagactagatttaacggcaggta

SEQ ID NO: 2519063 - DNA, 25 bp, Homo sapien
gggactatcatagcaattgtggtac

SEQ ID NO: 2519064 - DNA, 25 bp, Homo sapien
gaacagatgggaaaggtaggcacaa

SEQ ID NO: 2519065 - DNA, 25 bp, Homo sapien
taataggcaatatcagtctgcgggt

SEQ ID NO: 2519066 - DNA, 25 bp, Homo sapien
tgtaaaaaatgctggtggcctggat

SEQ ID NO: 2519067 - DNA, 25 bp, Homo sapien
tgtgccacgtattgagccaccagac

SEQ ID NO: 2519068 - DNA, 25 bp, Homo sapien
tgcctactatgtataagccactatg

SEQ ID NO: 2519069 - DNA, 25 bp, Homo sapien
gagacagcagtatctcttccactga

SEQ ID NO: 2519070 - DNA, 25 bp, Homo sapien
gaagaactagtaaggatgtaggcac

SEQ ID NO: 2519071 - DNA, 25 bp, Homo sapien
gaaactcgttttgaaaagagacagc

SEQ ID NO: 2519072 - DNA, 25 bp, Homo sapien
tgtttatttctcaccacgtccacga

SEQ ID NO: 2519073 - DNA, 25 bp, Homo sapien
cacctggatgaatgccaacagcttc

SEQ ID NO: 2519074 - DNA, 25 bp, Homo sapien
cttgaaaactgcttataaggctctc

SEQ ID NO: 2519075 - DNA, 25 bp, Homo sapien
caatctggccctaagtcaactctga

SEQ ID NO: 2519076 - DNA, 25 bp, Homo sapien
cctttcggaaccagtgcacggcgtt

SEQ ID NO: 2519077 - DNA, 25 bp, Homo sapien
gtgtcggcgccctgaatgcactcct

SEQ ID NO: 2519078 - DNA, 25 bp, Homo sapien
tcgtggagccggagcccctttcgga

SEQ ID NO: 2519079 - DNA, 25 bp, Homo sapien
tgatgcccacattggaggagccggc

SEQ ID NO: 2519080 - DNA, 25 bp, Homo sapien
ccacggagaaattcaaggaaggagg

SEQ ID NO: 2519081 - DNA, 25 bp, Homo sapien
ggaggctccggctcatagccgacac

SEQ ID NO: 2519082 - DNA, 25 bp, Homo sapien
gacgcataacttcgagggcctcgga

SEQ ID NO: 2519083 - DNA, 25 bp, Homo sapien
ggccccaggagattcgtcacggaaa

SEQ ID NO: 2519084 - DNA, 25 bp, Homo sapien
cttcgcttccaagagaattgcctca

SEQ ID NO: 2519085 - DNA, 25 bp, Homo sapien
gtgtgacgccctttaggagcccgcg

SEQ ID NO: 2519086 - DNA, 25 bp, Homo sapien
gaagcaaatcgcgttgaccacaggc

SEQ ID NO: 2519087 - DNA, 25 bp, Homo sapien
gatcccaaacttgttgaccctcgtc

SEQ ID NO: 2519088 - DNA, 25 bp, Homo sapien
gggtaatctgctcgcgcttcggtcg

SEQ ID NO: 2519089 - DNA, 25 bp, Homo sapien
tggtggccgtcccttggaagcaaat

SEQ ID NO: 2519090 - DNA, 25 bp, Homo sapien
tcgttcaatcctgatatgatgtgaa

SEQ ID NO: 2519091 - DNA, 25 bp, Homo sapien
cagctcgttcaatcctgatatgatg

SEQ ID NO: 2519092 - DNA, 25 bp, Homo sapien
cagtctgttcagctcgttcaatcct

SEQ ID NO: 2519093 - DNA, 25 bp, Homo sapien
gttcagctcgttcaatcctgatatg

SEQ ID NO: 2519094 - DNA, 25 bp, Homo sapien
atttcacttaactcactaattaatg

SEQ ID NO: 2519095 - DNA, 25 bp, Homo sapien
cactaattaatgaaggaacccatat

SEQ ID NO: 2519096 - DNA, 25 bp, Homo sapien
acttaactcactaattaatgaagga

SEQ ID NO: 2519097 - DNA, 25 bp, Homo sapien
tgaacatgtcaaaaatttcacttaa

SEQ ID NO: 2519098 - DNA, 25 bp, Homo sapien
gttctctatttacttttgtcgtggc

SEQ ID NO: 2519099 - DNA, 25 bp, Homo sapien
tcgtggcaccaattatgatctgtgt

SEQ ID NO: 2519100 - DNA, 25 bp, Homo sapien
tcatccaggccacggagtggagtcg

SEQ ID NO: 2519101 - DNA, 25 bp, Homo sapien
tattctcagtcaacctatgcctgct

SEQ ID NO: 2519102 - DNA, 25 bp, Homo sapien
aatttttacaacagcccctatgaga

SEQ ID NO: 2519103 - DNA, 25 bp, Homo sapien
caaaccaagggctatcagagcatgg

SEQ ID NO: 2519104 - DNA, 25 bp, Homo sapien
gaggtccagagtggttaagttctca

SEQ ID NO: 2519105 - DNA, 25 bp, Homo sapien
acttgtctttgaagctaaaagaggc

SEQ ID NO: 2519106 - DNA, 25 bp, Homo sapien
caagggcttatggagcagggaatcc

SEQ ID NO: 2519107 - DNA, 25 bp, Homo sapien
tccacgtttgggttatgattactat

SEQ ID NO: 2519108 - DNA, 25 bp, Homo sapien
tgctaaaagactcccaccatcgcca

SEQ ID NO: 2519109 - DNA, 25 bp, Homo sapien
tgattactattgtcagaggtgtttg

SEQ ID NO: 2519110 - DNA, 25 bp, Homo sapien
ttttggccaaatacccaagggctga

SEQ ID NO: 2519111 - DNA, 25 bp, Homo sapien
acttgtctgagccatagccttctgg

SEQ ID NO: 2519112 - DNA, 25 bp, Homo sapien
ccttggtatgtaacgggaatgccct

SEQ ID NO: 2519113 - DNA, 25 bp, Homo sapien
tccactcgggttcagattctgggct

SEQ ID NO: 2519114 - DNA, 25 bp, Homo sapien
aagtactctgatcgggcagtgattc

SEQ ID NO: 2519115 - DNA, 25 bp, Homo sapien
tgtgaaatacgggaagtactctgat

SEQ ID NO: 2519116 - DNA, 25 bp, Homo sapien
gatcgggcagtgattccgaccagag

SEQ ID NO: 2519117 - DNA, 25 bp, Homo sapien
tacgggaagtactctgatcgggcag

SEQ ID NO: 2519118 - DNA, 25 bp, Homo sapien
cagggctgctcaaagattcctgctc

SEQ ID NO: 2519119 - DNA, 25 bp, Homo sapien
tgctttacccagtggagacacagaa

SEQ ID NO: 2519120 - DNA, 25 bp, Homo sapien
gccttggtattgctttacccagtgg

SEQ ID NO: 2519121 - DNA, 25 bp, Homo sapien
gggtcatcagggctgctcaaagatt

SEQ ID NO: 2519122 - DNA, 25 bp, Homo sapien
tgggccagatcagccacgagaccca

SEQ ID NO: 2519123 - DNA, 25 bp, Homo sapien
cattttgctgatccttcacttgggc

SEQ ID NO: 2519124 - DNA, 25 bp, Homo sapien
tcacttgggccagatcagccacgag

SEQ ID NO: 2519125 - DNA, 25 bp, Homo sapien
acttgggccagatcagccacgagac

SEQ ID NO: 2519126 - DNA, 25 bp, Homo sapien
ggttttatcacagctctatgctgag

SEQ ID NO: 2519127 - DNA, 25 bp, Homo sapien
ttatcacagctctatgctgagtcat

SEQ ID NO: 2519128 - DNA, 25 bp, Homo sapien
ttttatcacagctctatgctgagtc

SEQ ID NO: 2519129 - DNA, 25 bp, Homo sapien
ctggttttatcacagctctatgctg

SEQ ID NO: 2519130 - DNA, 25 bp, Homo sapien
acctaacaagtggtcgctgctagcc

SEQ ID NO: 2519131 - DNA, 25 bp, Homo sapien
aagtggtcgctgctagcccccatat

SEQ ID NO: 2519132 - DNA, 25 bp, Homo sapien
ctaacaagtggtcgctgctagcccc

SEQ ID NO: 2519133 - DNA, 25 bp, Homo sapien
tggtcgctgctagcccccatatctg

SEQ ID NO: 2519134 - DNA, 25 bp, Homo sapien
ttctgtgagtgtagacggcaagcct

SEQ ID NO: 2519135 - DNA, 25 bp, Homo sapien
tgtgagtgtagacggcaagcctccc

SEQ ID NO: 2519136 - DNA, 25 bp, Homo sapien
ttaagattctgtgagtgtagacggc

SEQ ID NO: 2519137 - DNA, 25 bp, Homo sapien
gattctgtgagtgtagacggcaagc

SEQ ID NO: 2519138 - DNA, 25 bp, Homo sapien
tcatgggtgcgcatatggatttaga

SEQ ID NO: 2519139 - DNA, 25 bp, Homo sapien
taaggcttcagctgtattcagtttc

SEQ ID NO: 2519140 - DNA, 25 bp, Homo sapien
cgcatatggatttagagcagctggg

SEQ ID NO: 2519141 - DNA, 25 bp, Homo sapien
ggcgagatgggctatggttcccctt

SEQ ID NO: 2519142 - DNA, 25 bp, Homo sapien
ctgcctgtgatcctcaggaatccct

SEQ ID NO: 2519143 - DNA, 25 bp, Homo sapien
aatccctggtgggaagccttgagct

SEQ ID NO: 2519144 - DNA, 25 bp, Homo sapien
aggaatccctggtgggaagccttga

SEQ ID NO: 2519145 - DNA, 25 bp, Homo sapien
tccctggtgggaagccttgagcttg

SEQ ID NO: 2519146 - DNA, 25 bp, Homo sapien
gggaagtttgcctcttgatatccag

SEQ ID NO: 2519147 - DNA, 25 bp, Homo sapien
tctgggagtctctccacgccagttt

SEQ ID NO: 2519148 - DNA, 25 bp, Homo sapien
ctctttaaggcactaccaaagttgg

SEQ ID NO: 2519149 - DNA, 25 bp, Homo sapien
tgagcttttagaagcctctttttac

SEQ ID NO: 2519150 - DNA, 25 bp, Homo sapien
atctttgggtaaggtgacatgggcc

SEQ ID NO: 2519151 - DNA, 25 bp, Homo sapien
ggtgacatgggcctcatagaacata

SEQ ID NO: 2519152 - DNA, 25 bp, Homo sapien
tgggtaaggtgacatgggcctcata

SEQ ID NO: 2519153 - DNA, 25 bp, Homo sapien
aattggcccaatcatctttgggtaa

SEQ ID NO: 2519154 - DNA, 25 bp, Homo sapien
gcctgtctgagtgccagatacagca

SEQ ID NO: 2519155 - DNA, 25 bp, Homo sapien
agcctgtctgagtgccagatacagc

SEQ ID NO: 2519156 - DNA, 25 bp, Homo sapien
tcaatcacggacatgtggatttgcc

SEQ ID NO: 2519157 - DNA, 25 bp, Homo sapien
gcttcccctcagaatcaatcacgga

SEQ ID NO: 2519158 - DNA, 25 bp, Homo sapien
cttgtcgggcatccctcttatcaac

SEQ ID NO: 2519159 - DNA, 25 bp, Homo sapien
tgtcgggcatccctcttatcaactt

SEQ ID NO: 2519160 - DNA, 25 bp, Homo sapien
cgggcatccctcttatcaactttgg

SEQ ID NO: 2519161 - DNA, 25 bp, Homo sapien
tcgggcatccctcttatcaactttg

SEQ ID NO: 2519162 - DNA, 25 bp, Homo sapien
gccccttcctttagccctctgctac

SEQ ID NO: 2519163 - DNA, 25 bp, Homo sapien
tctgctaccttgcatgaagccctgg

SEQ ID NO: 2519164 - DNA, 25 bp, Homo sapien
aatctctgacatcctctttaacatt

SEQ ID NO: 2519165 - DNA, 25 bp, Homo sapien
tgacatcctctttaacattctcaaa

SEQ ID NO: 2519166 - DNA, 25 bp, Homo sapien
ctgcggggaactaggctgggtagaa

SEQ ID NO: 2519167 - DNA, 25 bp, Homo sapien
gggaactaggctgggtagaagatgc

SEQ ID NO: 2519168 - DNA, 25 bp, Homo sapien
actaggctgggtagaagatgcctca

SEQ ID NO: 2519169 - DNA, 25 bp, Homo sapien
tgggtagaagatgcctcattttctt

SEQ ID NO: 2519170 - DNA, 25 bp, Homo sapien
acacacatggctacatgatctctta

SEQ ID NO: 2519171 - DNA, 25 bp, Homo sapien
acacatggctacatgatctcttatt

SEQ ID NO: 2519172 - DNA, 25 bp, Homo sapien
acatggctacatgatctcttatttt

SEQ ID NO: 2519173 - DNA, 25 bp, Homo sapien
cacacatggctacatgatctcttat

SEQ ID NO: 2519174 - DNA, 25 bp, Homo sapien
cagacaacatcaggtgcgttcagag

SEQ ID NO: 2519175 - DNA, 25 bp, Homo sapien
ctcagatcagacaacatcaggtgcg

SEQ ID NO: 2519176 - DNA, 25 bp, Homo sapien
tcagatcagacaacatcaggtgcgt

SEQ ID NO: 2519177 - DNA, 25 bp, Homo sapien
acaacatcaggtgcgttcagagtgg

SEQ ID NO: 2519178 - DNA, 25 bp, Homo sapien
aaattgcttgctaacacttccagta

SEQ ID NO: 2519179 - DNA, 25 bp, Homo sapien
ttagatttggccaaattgcttgcta

SEQ ID NO: 2519180 - DNA, 25 bp, Homo sapien
gggccaataggtttagagctgatga

SEQ ID NO: 2519181 - DNA, 25 bp, Homo sapien
gctgatgataatgctttacaagcat

SEQ ID NO: 2519182 - DNA, 25 bp, Homo sapien
tcatccttcacgtagccatcaaagt

SEQ ID NO: 2519183 - DNA, 25 bp, Homo sapien
tctctgcatcctctaattcatcctt

SEQ ID NO: 2519184 - DNA, 25 bp, Homo sapien
taattcatccttcacgtagccatca

SEQ ID NO: 2519185 - DNA, 25 bp, Homo sapien
ttcatccttcacgtagccatcaaag

SEQ ID NO: 2519186 - DNA, 25 bp, Homo sapien
ttgacccaaggatatctaaatccat

SEQ ID NO: 2519187 - DNA, 25 bp, Homo sapien
acacgtcgtgtgtaaaccagcattc

SEQ ID NO: 2519188 - DNA, 25 bp, Homo sapien
atccatcttctcacacgtcgtgtgt

SEQ ID NO: 2519189 - DNA, 25 bp, Homo sapien
gacccaaggatatctaaatccatct

SEQ ID NO: 2519190 - DNA, 25 bp, Homo sapien
ttcccgcctgtccttcattcggcaa

SEQ ID NO: 2519191 - DNA, 25 bp, Homo sapien
cccgcctgtccttcattcggcaacc

SEQ ID NO: 2519192 - DNA, 25 bp, Homo sapien
ccgcctgtccttcattcggcaaccc

SEQ ID NO: 2519193 - DNA, 25 bp, Homo sapien
tcccgcctgtccttcattcggcaac

SEQ ID NO: 2519194 - DNA, 25 bp, Homo sapien
actggaacccaagtcaacctggtga

SEQ ID NO: 2519195 - DNA, 25 bp, Homo sapien
tgaatgagcgacttcaggatacgcg

SEQ ID NO: 2519196 - DNA, 25 bp, Homo sapien
ccagaaaccctataaagtgagtgcg

SEQ ID NO: 2519197 - DNA, 25 bp, Homo sapien
gaacaagccctaagctcagaaatgg

SEQ ID NO: 2519198 - DNA, 25 bp, Homo sapien
tatatgagcatagcagctatagggc

SEQ ID NO: 2519199 - DNA, 25 bp, Homo sapien
cagatttgaggctcactggtatgag

SEQ ID NO: 2519200 - DNA, 25 bp, Homo sapien
ggccatccatcaatgtacaagggtt

SEQ ID NO: 2519201 - DNA, 25 bp, Homo sapien
caaagtgggaggtgatcagcatgta

SEQ ID NO: 2519202 - DNA, 25 bp, Homo sapien
taaagagtcgacgtataaatgagat

SEQ ID NO: 2519203 - DNA, 25 bp, Homo sapien
tgatgaggacatgtgagactactct

SEQ ID NO: 2519204 - DNA, 25 bp, Homo sapien
tggcctttgaccaatattgtcccct

SEQ ID NO: 2519205 - DNA, 25 bp, Homo sapien
cattagctctccagaacatattgat

SEQ ID NO: 2519206 - DNA, 25 bp, Homo sapien
tccaagttcatgatgttactgcaaa

SEQ ID NO: 2519207 - DNA, 25 bp, Homo sapien
tctccaagttcatgatgttactgca

SEQ ID NO: 2519208 - DNA, 25 bp, Homo sapien
caagttcatgatgttactgcaaatg

SEQ ID NO: 2519209 - DNA, 25 bp, Homo sapien
tattctccaagttcatgatgttact

SEQ ID NO: 2519210 - DNA, 25 bp, Homo sapien
tgaacatggaagtgcatctctccct

SEQ ID NO: 2519211 - DNA, 25 bp, Homo sapien
acatggaagtgcatctctcccttca

SEQ ID NO: 2519212 - DNA, 25 bp, Homo sapien
caatgaacatggaagtgcatctctc

SEQ ID NO: 2519213 - DNA, 25 bp, Homo sapien
aaactgcaatgaacatggaagtgca

SEQ ID NO: 2519214 - DNA, 25 bp, Homo sapien
caacctagtgttgcaagggcccaga

SEQ ID NO: 2519215 - DNA, 25 bp, Homo sapien
gaatcgagttaacgcgccctagtgg

SEQ ID NO: 2519216 - DNA, 25 bp, Homo sapien
gctatttggaaagatgcccaccagg

SEQ ID NO: 2519217 - DNA, 25 bp, Homo sapien
tgccaggactatgcatgggaacccc

SEQ ID NO: 2519218 - DNA, 25 bp, Homo sapien
ggaggcagccgaaagtactaacagt

SEQ ID NO: 2519219 - DNA, 25 bp, Homo sapien
tgcaccaagtacgagatccagagcg

SEQ ID NO: 2519220 - DNA, 25 bp, Homo sapien
taagaagcccgtggtgagaacgctg

SEQ ID NO: 2519221 - DNA, 25 bp, Homo sapien
taccagcacctgatctgcgggaaga

SEQ ID NO: 2519222 - DNA, 25 bp, Homo sapien
tggtggtgacacaagcggtggggaa

SEQ ID NO: 2519223 - DNA, 25 bp, Homo sapien
agaggtggaaggctccttgtcagcc

SEQ ID NO: 2519224 - DNA, 25 bp, Homo sapien
aggtccagggcggtgcctgcaagga

SEQ ID NO: 2519225 - DNA, 25 bp, Homo sapien
ggacaccaggcattcagaggtggaa

SEQ ID NO: 2519226 - DNA, 25 bp, Homo sapien
gttctggtgttgatagagttggact

SEQ ID NO: 2519227 - DNA, 25 bp, Homo sapien
gaagcccagcacatcgtcatggtaa

SEQ ID NO: 2519228 - DNA, 25 bp, Homo sapien
tgttgatagagttggacttgtctaa

SEQ ID NO: 2519229 - DNA, 25 bp, Homo sapien
catcgtcatggtaaatctgacacat

SEQ ID NO: 2519230 - DNA, 25 bp, Homo sapien
tgtccagccagacacttcccaacct

SEQ ID NO: 2519231 - DNA, 25 bp, Homo sapien
tgtcatttgtcaaacttggcacatc

SEQ ID NO: 2519232 - DNA, 25 bp, Homo sapien
agaaagaatgggccaccgtcctggg

SEQ ID NO: 2519233 - DNA, 25 bp, Homo sapien
gaatgggccaccgtcctgggctcct

SEQ ID NO: 2519234 - DNA, 25 bp, Homo sapien
ccagaaagaatgggccaccgtcctg

SEQ ID NO: 2519235 - DNA, 25 bp, Homo sapien
aaagaatgggccaccgtcctgggct

SEQ ID NO: 2519236 - DNA, 25 bp, Homo sapien
ccatagtgggcctttctggaggaac

SEQ ID NO: 2519237 - DNA, 25 bp, Homo sapien
tttcccatagtgggcctttctggag

SEQ ID NO: 2519238 - DNA, 25 bp, Homo sapien
catagtgggcctttctggaggaacc

SEQ ID NO: 2519239 - DNA, 25 bp, Homo sapien
ttcccatagtgggcctttctggagg

SEQ ID NO: 2519240 - DNA, 25 bp, Homo sapien
atgaggactgcccggtgagagacat

SEQ ID NO: 2519241 - DNA, 25 bp, Homo sapien
aagatgaggactgcccggtgagaga

SEQ ID NO: 2519242 - DNA, 25 bp, Homo sapien
aggccattctgtgttgcaccggatt

SEQ ID NO: 2519243 - DNA, 25 bp, Homo sapien
gttgcaccggattcttgaaaagatg

SEQ ID NO: 2519244 - DNA, 25 bp, Homo sapien
tgaaatataagatcatgggctacct

SEQ ID NO: 2519245 - DNA, 25 bp, Homo sapien
ttcagggtatttagtgcatagagat

SEQ ID NO: 2519246 - DNA, 25 bp, Homo sapien
ggtatttagtgcatagagataaaca

SEQ ID NO: 2519247 - DNA, 25 bp, Homo sapien
catgaaatataagatcatgggctac

SEQ ID NO: 2519248 - DNA, 25 bp, Homo sapien
agagatctttcgcatgtctccccag

SEQ ID NO: 2519249 - DNA, 25 bp, Homo sapien
agcctcacaggagactccgcctttt

SEQ ID NO: 2519250 - DNA, 25 bp, Homo sapien
tgggctcaccgtctatgagctggag

SEQ ID NO: 2519251 - DNA, 25 bp, Homo sapien
tgagcgggggctttttatagtttga

SEQ ID NO: 2519252 - DNA, 25 bp, Homo sapien
gccaggcccattggaaggcaacaag

SEQ ID NO: 2519253 - DNA, 25 bp, Homo sapien
ggcaacaagcgaaggttgtgctcac

SEQ ID NO: 2519254 - DNA, 25 bp, Homo sapien
ctaatggctctgtttccaaagggga

SEQ ID NO: 2519255 - DNA, 25 bp, Homo sapien
cattggaaggcaacaagcgaaggtt

SEQ ID NO: 2519256 - DNA, 25 bp, Homo sapien
ggagttctctccattagtcactggg

SEQ ID NO: 2519257 - DNA, 25 bp, Homo sapien
ttctctccattagtcactgggtaca

SEQ ID NO: 2519258 - DNA, 25 bp, Homo sapien
agttctctccattagtcactgggta

SEQ ID NO: 2519259 - DNA, 25 bp, Homo sapien
tctctccattagtcactgggtacat

SEQ ID NO: 2519260 - DNA, 25 bp, Homo sapien
gaccttcccaccaatgagcacactt

SEQ ID NO: 2519261 - DNA, 25 bp, Homo sapien
tcagttctttcgttccttctgtgta

SEQ ID NO: 2519262 - DNA, 25 bp, Homo sapien
ccatggtggcccatgtcggttcgtg

SEQ ID NO: 2519263 - DNA, 25 bp, Homo sapien
tggaagcttcccgttgaccttccca

SEQ ID NO: 2519264 - DNA, 25 bp, Homo sapien
cttggagacaaaggtagatgtagat

SEQ ID NO: 2519265 - DNA, 25 bp, Homo sapien
ttggagacaaaggtagatgtagatg

SEQ ID NO: 2519266 - DNA, 25 bp, Homo sapien
gccttccctgtttcccttgtcacaa

SEQ ID NO: 2519267 - DNA, 25 bp, Homo sapien
tccacacactggctcgccttccctg

SEQ ID NO: 2519268 - DNA, 25 bp, Homo sapien
ttccccttgagctgtctagttctgc

SEQ ID NO: 2519269 - DNA, 25 bp, Homo sapien
ctcattccccttgagctgtctagtt

SEQ ID NO: 2519270 - DNA, 25 bp, Homo sapien
ggtccttgacatgaagaagaaaatg

SEQ ID NO: 2519271 - DNA, 25 bp, Homo sapien
tgcagggtaggagggtccttgacat

SEQ ID NO: 2519272 - DNA, 25 bp, Homo sapien
agaaaatgggcttgtcggtgcccct

SEQ ID NO: 2519273 - DNA, 25 bp, Homo sapien
cctcaatggcaccttcgcccttcat

SEQ ID NO: 2519274 - DNA, 25 bp, Homo sapien
ttaaagaagcaatgtgactcaagct

SEQ ID NO: 2519275 - DNA, 25 bp, Homo sapien
tggtaattgggactgcacttctgta

SEQ ID NO: 2519276 - DNA, 25 bp, Homo sapien
tatgagctgcaggtgagtgttaacc

SEQ ID NO: 2519277 - DNA, 25 bp, Homo sapien
gagccagaggctatgagattcacct

SEQ ID NO: 2519278 - DNA, 25 bp, Homo sapien
agaggtaggaggcagtgtcagtact

SEQ ID NO: 2519279 - DNA, 25 bp, Homo sapien
gtgtcagtactggtttctgccctct

SEQ ID NO: 2519280 - DNA, 25 bp, Homo sapien
gcagtgtcagtactggtttctgccc

SEQ ID NO: 2519281 - DNA, 25 bp, Homo sapien
taggaggcagtgtcagtactggttt

SEQ ID NO: 2519282 - DNA, 25 bp, Homo sapien
gggcacacgctgaaggctgcagaag

SEQ ID NO: 2519283 - DNA, 25 bp, Homo sapien
cagggcctctgtcggtgcttctgca

SEQ ID NO: 2519284 - DNA, 25 bp, Homo sapien
gatttatacgtaggtgactcaggaa

SEQ ID NO: 2519285 - DNA, 25 bp, Homo sapien
tacgtaggtgactcaggaaacgctt

SEQ ID NO: 2519286 - DNA, 25 bp, Homo sapien
aagccaatgatttatacgtaggtga

SEQ ID NO: 2519287 - DNA, 25 bp, Homo sapien
ggtgggctcccaccgagaacagaaa

SEQ ID NO: 2519288 - DNA, 25 bp, Homo sapien
gggtgggctcccaccgagaacagaa

SEQ ID NO: 2519289 - DNA, 25 bp, Homo sapien
aagcctgatgcatcgagcagggcca

SEQ ID NO: 2519290 - DNA, 25 bp, Homo sapien
atgcatcgagcagggccagacgcca

SEQ ID NO: 2519291 - DNA, 25 bp, Homo sapien
tacccacatgtgccaggctgatgac

SEQ ID NO: 2519292 - DNA, 25 bp, Homo sapien
tccacattcacatgcaggaccacgt

SEQ ID NO: 2519293 - DNA, 25 bp, Homo sapien
taccaagacttgtctcctggccgca

SEQ ID NO: 2519294 - DNA, 25 bp, Homo sapien
ggaccacgtagtaccaagacttgtc

SEQ ID NO: 2519295 - DNA, 25 bp, Homo sapien
acaaatgaggtggctgtctgtacca

SEQ ID NO: 2519296 - DNA, 25 bp, Homo sapien
gacaaatgaggtggctgtctgtacc

SEQ ID NO: 2519297 - DNA, 25 bp, Homo sapien
caaatgaggtggctgtctgtaccat

SEQ ID NO: 2519298 - DNA, 25 bp, Homo sapien
taacgatactgcctctcatgtgggc

SEQ ID NO: 2519299 - DNA, 25 bp, Homo sapien
gcctgttagcccagttctatctcga

SEQ ID NO: 2519300 - DNA, 25 bp, Homo sapien
cagcaacaatggaaagtggactctt

SEQ ID NO: 2519301 - DNA, 25 bp, Homo sapien
gaccctgcagcttatgtgcttaacg

SEQ ID NO: 2519302 - DNA, 25 bp, Homo sapien
cctgcccccctacccaaatcagaag

SEQ ID NO: 2519303 - DNA, 25 bp, Homo sapien
agggaactctaaaaatgccagggag

SEQ ID NO: 2519304 - DNA, 25 bp, Homo sapien
gaactctaaaaatgccagggagaga

SEQ ID NO: 2519305 - DNA, 25 bp, Homo sapien
tgcccccctacccaaatcagaagta

SEQ ID NO: 2519306 - DNA, 25 bp, Homo sapien
tattcatccaagcaggacacattag

SEQ ID NO: 2519307 - DNA, 25 bp, Homo sapien
attcatccaagcaggacacattagt

SEQ ID NO: 2519308 - DNA, 25 bp, Homo sapien
ttattcatccaagcaggacacatta

SEQ ID NO: 2519309 - DNA, 25 bp, Homo sapien
tctgaaataattcgggcaggcgcag

SEQ ID NO: 2519310 - DNA, 25 bp, Homo sapien
gagtctgaaataattcgggcaggcg

SEQ ID NO: 2519311 - DNA, 25 bp, Homo sapien
gtctgaaataattcgggcaggcgca

SEQ ID NO: 2519312 - DNA, 25 bp, Homo sapien
agtctgaaataattcgggcaggcgc

SEQ ID NO: 2519313 - DNA, 25 bp, Homo sapien
tccattcaggcccatattccttctc

SEQ ID NO: 2519314 - DNA, 25 bp, Homo sapien
ctgcaggtaaacatcaaggtggcag

SEQ ID NO: 2519315 - DNA, 25 bp, Homo sapien
actgcaggtaaacatcaaggtggca

SEQ ID NO: 2519316 - DNA, 25 bp, Homo sapien
gattcgttttctccagggctctgca

SEQ ID NO: 2519317 - DNA, 25 bp, Homo sapien
gattcttgaaagtctactagctgcc

SEQ ID NO: 2519318 - DNA, 25 bp, Homo sapien
gggctctgcacacaagatagtctgc

SEQ ID NO: 2519319 - DNA, 25 bp, Homo sapien
ggttctgagaggtttgactcaatgg

SEQ ID NO: 2519320 - DNA, 25 bp, Homo sapien
tctggacggccacaggcctcccctg

SEQ ID NO: 2519321 - DNA, 25 bp, Homo sapien
acggccacaggcctcccctgcagac

SEQ ID NO: 2519322 - DNA, 25 bp, Homo sapien
cagctctggacggccacaggcctcc

SEQ ID NO: 2519323 - DNA, 25 bp, Homo sapien
tggacggccacaggcctcccctgca

SEQ ID NO: 2519324 - DNA, 25 bp, Homo sapien
cttcactcgggcccagtgtcctttg

SEQ ID NO: 2519325 - DNA, 25 bp, Homo sapien
gcccagtgtcctttgccccgaggag

SEQ ID NO: 2519326 - DNA, 25 bp, Homo sapien
tggctgtcagccaagccacccccat

SEQ ID NO: 2519327 - DNA, 25 bp, Homo sapien
tgtcctttgccccgaggagggcctg

SEQ ID NO: 2519328 - DNA, 25 bp, Homo sapien
aatcagacaatattgggcatgttca

SEQ ID NO: 2519329 - DNA, 25 bp, Homo sapien
gtttatgagctttgtgcccttgagc

SEQ ID NO: 2519330 - DNA, 25 bp, Homo sapien
ggaaaaacctagtgccacttgtctg

SEQ ID NO: 2519331 - DNA, 25 bp, Homo sapien
gtgccacttgtctgcctgtttatga

SEQ ID NO: 2519332 - DNA, 25 bp, Homo sapien
cagagataaactgccttgccctgca

SEQ ID NO: 2519333 - DNA, 25 bp, Homo sapien
ttagtaggtattggtgctgctgtta

SEQ ID NO: 2519334 - DNA, 25 bp, Homo sapien
tggtgctgctgttaggaccagaatg

SEQ ID NO: 2519335 - DNA, 25 bp, Homo sapien
tgctgctgttaggaccagaatgaca

SEQ ID NO: 2519336 - DNA, 25 bp, Homo sapien
tagtaggtattggtgctgctgttag

SEQ ID NO: 2519337 - DNA, 25 bp, Homo sapien
cacggtaaaaggggctctgacagaa

SEQ ID NO: 2519338 - DNA, 25 bp, Homo sapien
gtaaaaggggctctgacagaagagc

SEQ ID NO: 2519339 - DNA, 25 bp, Homo sapien
cggtaaaaggggctctgacagaaga

SEQ ID NO: 2519340 - DNA, 25 bp, Homo sapien
cccacggtaaaaggggctctgacag

SEQ ID NO: 2519341 - DNA, 25 bp, Homo sapien
acgggctcagccacgctctggtgtt

SEQ ID NO: 2519342 - DNA, 25 bp, Homo sapien
tctggtgttcccgcgttcgtgtgct

SEQ ID NO: 2519343 - DNA, 25 bp, Homo sapien
agccacgctctggtgttcccgcgtt

SEQ ID NO: 2519344 - DNA, 25 bp, Homo sapien
cgggctcagccacgctctggtgttc

SEQ ID NO: 2519345 - DNA, 25 bp, Homo sapien
gcagaacagacttgaggcaggcagc

SEQ ID NO: 2519346 - DNA, 25 bp, Homo sapien
gggctcctagctgccactgtgtgct

SEQ ID NO: 2519347 - DNA, 25 bp, Homo sapien
ggggcttgggccagattgtccccca

SEQ ID NO: 2519348 - DNA, 25 bp, Homo sapien
cccaagccccagcggggatggcccg

SEQ ID NO: 2519349 - DNA, 25 bp, Homo sapien
cttgctgtgtaagcccctctccttt

SEQ ID NO: 2519350 - DNA, 25 bp, Homo sapien
ccttttttcccatgtcaggagggca

SEQ ID NO: 2519351 - DNA, 25 bp, Homo sapien
gagggcattgagtctgaggcacatc

SEQ ID NO: 2519352 - DNA, 25 bp, Homo sapien
cccatgtcaggagggcattgagtct

SEQ ID NO: 2519353 - DNA, 25 bp, Homo sapien
tgccctctccctggccccccatgac

SEQ ID NO: 2519354 - DNA, 25 bp, Homo sapien
gctgccctctccctggccccccatg

SEQ ID NO: 2519355 - DNA, 25 bp, Homo sapien
ctgctgccctctccctggcccccca

SEQ ID NO: 2519356 - DNA, 25 bp, Homo sapien
cctgctgccctctccctggcccccc

SEQ ID NO: 2519357 - DNA, 25 bp, Homo sapien
cgttgtctggattgtgcttccccat

SEQ ID NO: 2519358 - DNA, 25 bp, Homo sapien
ttcgttgtctggattgtgcttcccc

SEQ ID NO: 2519359 - DNA, 25 bp, Homo sapien
tcttcgttgtctggattgtgcttcc

SEQ ID NO: 2519360 - DNA, 25 bp, Homo sapien
ctcttcgttgtctggattgtgcttc

SEQ ID NO: 2519361 - DNA, 25 bp, Homo sapien
gcactatctgtagaaatcacctcct

SEQ ID NO: 2519362 - DNA, 25 bp, Homo sapien
ttggtcagtcacgtgcgtctgggca

SEQ ID NO: 2519363 - DNA, 25 bp, Homo sapien
agagatgcttccttggtcagtcacg

SEQ ID NO: 2519364 - DNA, 25 bp, Homo sapien
tgcgtctgggcactatctgtagaaa

SEQ ID NO: 2519365 - DNA, 25 bp, Homo sapien
tcatgattacacaaaagaggtgcac

SEQ ID NO: 2519366 - DNA, 25 bp, Homo sapien
taaatagtaagtcacaggtccacac

SEQ ID NO: 2519367 - DNA, 25 bp, Homo sapien
cctgcatgctaatcgtggtttcggg

SEQ ID NO: 2519368 - DNA, 25 bp, Homo sapien
tgcatgggcccgaacctgtgaaatg

SEQ ID NO: 2519369 - DNA, 25 bp, Homo sapien
gccacgctgccatacttggtggtct

SEQ ID NO: 2519370 - DNA, 25 bp, Homo sapien
gggccacgctgccatacttggtggt

SEQ ID NO: 2519371 - DNA, 25 bp, Homo sapien
cacgctgccatacttggtggtctgt

SEQ ID NO: 2519372 - DNA, 25 bp, Homo sapien
acgctgccatacttggtggtctgtg

SEQ ID NO: 2519373 - DNA, 25 bp, Homo sapien
tgagctgagatgacaactacctata

SEQ ID NO: 2519374 - DNA, 25 bp, Homo sapien
ttttagaccaccactgagggtcttg

SEQ ID NO: 2519375 - DNA, 25 bp, Homo sapien
tataacgataaatggaaaaggagct

SEQ ID NO: 2519376 - DNA, 25 bp, Homo sapien
tcttttggaatgtgctaccctaggt

SEQ ID NO: 2519377 - DNA, 25 bp, Homo sapien
tttcatgaggatgattcatttgtcc

SEQ ID NO: 2519378 - DNA, 25 bp, Homo sapien
tgaggatgattcatttgtccctgaa

SEQ ID NO: 2519379 - DNA, 25 bp, Homo sapien
ttcatgaggatgattcatttgtccc

SEQ ID NO: 2519380 - DNA, 25 bp, Homo sapien
catgaggatgattcatttgtccctg

SEQ ID NO: 2519381 - DNA, 25 bp, Homo sapien
cataaaccgtggttacctccctgag

SEQ ID NO: 2519382 - DNA, 25 bp, Homo sapien
tgtggaagaaccagcatgctgcgct

SEQ ID NO: 2519383 - DNA, 25 bp, Homo sapien
tgactctgagctacctttgcagtag

SEQ ID NO: 2519384 - DNA, 25 bp, Homo sapien
tgataacgaagatgagtggcctgag

SEQ ID NO: 2519385 - DNA, 25 bp, Homo sapien
cattctgtgcctagtgctatacaag

SEQ ID NO: 2519386 - DNA, 25 bp, Homo sapien
tgttatcaaagacaagaggcagacc

SEQ ID NO: 2519387 - DNA, 25 bp, Homo sapien
aaatatccggtctttgtgcttgctc

SEQ ID NO: 2519388 - DNA, 25 bp, Homo sapien
agtattctcagtgcaactcgtagag

SEQ ID NO: 2519389 - DNA, 25 bp, Homo sapien
caggcacctgccgaaactttggaaa

SEQ ID NO: 2519390 - DNA, 25 bp, Homo sapien
tgacttaactaagctgggaccctga

SEQ ID NO: 2519391 - DNA, 25 bp, Homo sapien
gcaaggaccgtttagaatgttacca

SEQ ID NO: 2519392 - DNA, 25 bp, Homo sapien
tgcttctgagaaacgctggatgtgc

SEQ ID NO: 2519393 - DNA, 25 bp, Homo sapien
gaggtgggccctttgcaggttttca

SEQ ID NO: 2519394 - DNA, 25 bp, Homo sapien
tcctctggtgctgacgaactggagg

SEQ ID NO: 2519395 - DNA, 25 bp, Homo sapien
gaaagagactcatccgctgaataca

SEQ ID NO: 2519396 - DNA, 25 bp, Homo sapien
acttgggacacttgatctggcgttc

SEQ ID NO: 2519397 - DNA, 25 bp, Homo sapien
ctagggctataggatgtgggtaaac

SEQ ID NO: 2519398 - DNA, 25 bp, Homo sapien
gaacccttagaattccctggagcag

SEQ ID NO: 2519399 - DNA, 25 bp, Homo sapien
tgaaccccatgtctttatgaaagcc

SEQ ID NO: 2519400 - DNA, 25 bp, Homo sapien
cagtcgggcgttctgaagcctggct

SEQ ID NO: 2519401 - DNA, 25 bp, Homo sapien
tggtaccaaggcatgaaacagatga

SEQ ID NO: 2519402 - DNA, 25 bp, Homo sapien
ccatagtgtggctgctgactcttac

SEQ ID NO: 2519403 - DNA, 25 bp, Homo sapien
ccttggcttggctacatggaacaca

SEQ ID NO: 2519404 - DNA, 25 bp, Homo sapien
gatccttcagtgtctcgccattatt

SEQ ID NO: 2519405 - DNA, 25 bp, Homo sapien
gcttgaggtcctgcctccgcataaa

SEQ ID NO: 2519406 - DNA, 25 bp, Homo sapien
gtcacagtaatcacacttaagattc

SEQ ID NO: 2519407 - DNA, 25 bp, Homo sapien
tgagtgtggatgagcacgtgctgct

SEQ ID NO: 2519408 - DNA, 25 bp, Homo sapien
tgcctccgcataaacaacttgtcac

SEQ ID NO: 2519409 - DNA, 25 bp, Homo sapien
gctctaatgagaggctcagactcag

SEQ ID NO: 2519410 - DNA, 25 bp, Homo sapien
ccaggcaccttccaactatggtggg

SEQ ID NO: 2519411 - DNA, 25 bp, Homo sapien
aggaatctcagttaaaccacgaagg

SEQ ID NO: 2519412 - DNA, 25 bp, Homo sapien
gactcagaagcttctatttaagacc

SEQ ID NO: 2519413 - DNA, 25 bp, Homo sapien
tatgtatcttgaggtgggtccgcag

SEQ ID NO: 2519414 - DNA, 25 bp, Homo sapien
ctgtatgtatcttgaggtgggtccg

SEQ ID NO: 2519415 - DNA, 25 bp, Homo sapien
ggtccgcaggttgctgggatcacta

SEQ ID NO: 2519416 - DNA, 25 bp, Homo sapien
ccgcaggttgctgggatcactaaaa

SEQ ID NO: 2519417 - DNA, 25 bp, Homo sapien
tccttgccacagttacagagatgca

SEQ ID NO: 2519418 - DNA, 25 bp, Homo sapien
cccataaagtggacatgaagtttgg

SEQ ID NO: 2519419 - DNA, 25 bp, Homo sapien
catggctgccgctatgtccctgggt

SEQ ID NO: 2519420 - DNA, 25 bp, Homo sapien
ctctgtgtaagaattgcactccttg

SEQ ID NO: 2519421 - DNA, 25 bp, Homo sapien
gcctaaggaacttcaatgccccaaa

SEQ ID NO: 2519422 - DNA, 25 bp, Homo sapien
tatgcaggttaaatcaaaccgaggg

SEQ ID NO: 2519423 - DNA, 25 bp, Homo sapien
tatctcaatggtgctagctcgaaaa

SEQ ID NO: 2519424 - DNA, 25 bp, Homo sapien
aaccgagggacttcgctgtccttca

SEQ ID NO: 2519425 - DNA, 25 bp, Homo sapien
tcatgaggataagccaccaaattct

SEQ ID NO: 2519426 - DNA, 25 bp, Homo sapien
atttttccatcatgaggataagcca

SEQ ID NO: 2519427 - DNA, 25 bp, Homo sapien
cttgtgaggtgcagaaaaagatttt

SEQ ID NO: 2519428 - DNA, 25 bp, Homo sapien
tcattttcaggagggatatcttgtg

SEQ ID NO: 2519429 - DNA, 25 bp, Homo sapien
tacttcaacatattagctgatgacc

SEQ ID NO: 2519430 - DNA, 25 bp, Homo sapien
gctgatgaccttttgtagtcaaaaa

SEQ ID NO: 2519431 - DNA, 25 bp, Homo sapien
gtaatttcccgtcctatctatgaga

SEQ ID NO: 2519432 - DNA, 25 bp, Homo sapien
cctatatgaaagcttaggcagaact

SEQ ID NO: 2519433 - DNA, 25 bp, Homo sapien
taatgatgcagaattctaggacacc

SEQ ID NO: 2519434 - DNA, 25 bp, Homo sapien
ctggctttgcgcacaaacatcatcc

SEQ ID NO: 2519435 - DNA, 25 bp, Homo sapien
ggctttgcgcacaaacatcatccaa

SEQ ID NO: 2519436 - DNA, 25 bp, Homo sapien
tttcatcagttgtaatgatgcagaa

SEQ ID NO: 2519437 - DNA, 25 bp, Homo sapien
aggtccaaagcaagtccgcacagga

SEQ ID NO: 2519438 - DNA, 25 bp, Homo sapien
tccagatatggttaactgccttgtc

SEQ ID NO: 2519439 - DNA, 25 bp, Homo sapien
tgctacttccatggagtgactctgc

SEQ ID NO: 2519440 - DNA, 25 bp, Homo sapien
tctgctggccaattagaggtccaaa

SEQ ID NO: 2519441 - DNA, 25 bp, Homo sapien
tgctctctattggagtgtcaggaac

SEQ ID NO: 2519442 - DNA, 25 bp, Homo sapien
tgctctgctctctattggagtgtca

SEQ ID NO: 2519443 - DNA, 25 bp, Homo sapien
gctctgctctctattggagtgtcag

SEQ ID NO: 2519444 - DNA, 25 bp, Homo sapien
tctgctctctattggagtgtcagga

SEQ ID NO: 2519445 - DNA, 25 bp, Homo sapien
gataggcgcggtcacacagagtaca

SEQ ID NO: 2519446 - DNA, 25 bp, Homo sapien
cactggtccatgttcgggacagtcc

SEQ ID NO: 2519447 - DNA, 25 bp, Homo sapien
acagtccgagggataggcgcggtca

SEQ ID NO: 2519448 - DNA, 25 bp, Homo sapien
ccatgttcgggacagtccgagggat

SEQ ID NO: 2519449 - DNA, 25 bp, Homo sapien
ggttctaggcacttacaggtgccag

SEQ ID NO: 2519450 - DNA, 25 bp, Homo sapien
tttattctcacattgcagcaaagcc

SEQ ID NO: 2519451 - DNA, 25 bp, Homo sapien
tatccaatcgataagctcaactggg

SEQ ID NO: 2519452 - DNA, 25 bp, Homo sapien
tgtccttaaggtctgtgctaacatg

SEQ ID NO: 2519453 - DNA, 25 bp, Homo sapien
gctgggactattcacaggtgggatc

SEQ ID NO: 2519454 - DNA, 25 bp, Homo sapien
cagctttactagaatttacccctat

SEQ ID NO: 2519455 - DNA, 25 bp, Homo sapien
aggtgtgatcgcagcatactatagc

SEQ ID NO: 2519456 - DNA, 25 bp, Homo sapien
gggatcacagaacactatagcctga

SEQ ID NO: 2519457 - DNA, 25 bp, Homo sapien
gtcttccatttgcagtgaaggtgat

SEQ ID NO: 2519458 - DNA, 25 bp, Homo sapien
aagaaagactgtctgaagatacatc

SEQ ID NO: 2519459 - DNA, 25 bp, Homo sapien
ccttgtttgaattggagtcttccat

SEQ ID NO: 2519460 - DNA, 25 bp, Homo sapien
gactgtctgaagatacatctacatg

SEQ ID NO: 2519461 - DNA, 25 bp, Homo sapien
tgtgaggtagagagtgccacgctta

SEQ ID NO: 2519462 - DNA, 25 bp, Homo sapien
aggttctaggctgaggccaacttca

SEQ ID NO: 2519463 - DNA, 25 bp, Homo sapien
ggccaacttcatggagggaaacaga

SEQ ID NO: 2519464 - DNA, 25 bp, Homo sapien
gaaacagattctagggaggcaaggt

SEQ ID NO: 2519465 - DNA, 25 bp, Homo sapien
cagaggttcatgacttctggagcca

SEQ ID NO: 2519466 - DNA, 25 bp, Homo sapien
tgtgtgttcacagagcgagagtcta

SEQ ID NO: 2519467 - DNA, 25 bp, Homo sapien
catctgtcgaaattgggctggtaac

SEQ ID NO: 2519468 - DNA, 25 bp, Homo sapien
gacatgccattgacccgacttgcaa

SEQ ID NO: 2519469 - DNA, 25 bp, Homo sapien
ggaggtggtctgtcagctaaataag

SEQ ID NO: 2519470 - DNA, 25 bp, Homo sapien
ttttaatatacatatggttgcaatt

SEQ ID NO: 2519471 - DNA, 25 bp, Homo sapien
tgagtcctaaggtgtaaaatttgct

SEQ ID NO: 2519472 - DNA, 25 bp, Homo sapien
attcctgagtcctaaggtgtaaaat

SEQ ID NO: 2519473 - DNA, 25 bp, Homo sapien
tttaatatacatatggttgcaattc

SEQ ID NO: 2519474 - DNA, 25 bp, Homo sapien
tggaggtagggtgtagtttctttca

SEQ ID NO: 2519475 - DNA, 25 bp, Homo sapien
gatccccaatacccattggtagcat

SEQ ID NO: 2519476 - DNA, 25 bp, Homo sapien
aggtaacccacacatcacccctcga

SEQ ID NO: 2519477 - DNA, 25 bp, Homo sapien
tgaaataactgctctccaggtgagg

SEQ ID NO: 2519478 - DNA, 25 bp, Homo sapien
gaactgacagcttatcattgtaata

SEQ ID NO: 2519479 - DNA, 25 bp, Homo sapien
ccaatacataacaatgtcattgatc

SEQ ID NO: 2519480 - DNA, 25 bp, Homo sapien
taaaagtacagtgacggctggcgcg

SEQ ID NO: 2519481 - DNA, 25 bp, Homo sapien
cattgatcctaaagaactgacagct

SEQ ID NO: 2519482 - DNA, 25 bp, Homo sapien
caaacctggtggaatataaagccca

SEQ ID NO: 2519483 - DNA, 25 bp, Homo sapien
aattctagacctggtacacttgcag

SEQ ID NO: 2519484 - DNA, 25 bp, Homo sapien
gcgttccatgtaaaagccccaggta

SEQ ID NO: 2519485 - DNA, 25 bp, Homo sapien
cctatacgattttgctgtgtatgga

SEQ ID NO: 2519486 - DNA, 25 bp, Homo sapien
tgagactggcaaggcattgctcaca

SEQ ID NO: 2519487 - DNA, 25 bp, Homo sapien
ccaggtgacttcctgagactggcaa

SEQ ID NO: 2519488 - DNA, 25 bp, Homo sapien
gactggcaaggcattgctcacagag

SEQ ID NO: 2519489 - DNA, 25 bp, Homo sapien
aggtgacttcctgagactggcaagg

SEQ ID NO: 2519490 - DNA, 25 bp, Homo sapien
tggactcaggttcatttcattcatc

SEQ ID NO: 2519491 - DNA, 25 bp, Homo sapien
ccccactggactcaggttcatttca

SEQ ID NO: 2519492 - DNA, 25 bp, Homo sapien
cccactggactcaggttcatttcat

SEQ ID NO: 2519493 - DNA, 25 bp, Homo sapien
cactggactcaggttcatttcattc

SEQ ID NO: 2519494 - DNA, 25 bp, Homo sapien
caatcccggaagaaggcaagaatca

SEQ ID NO: 2519495 - DNA, 25 bp, Homo sapien
gacttggagacgtccctaggcaaca

SEQ ID NO: 2519496 - DNA, 25 bp, Homo sapien
aaccagtagtgttttaggcagcgca

SEQ ID NO: 2519497 - DNA, 25 bp, Homo sapien
caaaccagagtttaatgcgagaggc

SEQ ID NO: 2519498 - DNA, 25 bp, Homo sapien
tggcaccaaaaacaacggcactgac

SEQ ID NO: 2519499 - DNA, 25 bp, Homo sapien
tcctttgcaaatcacacctgtaacc

SEQ ID NO: 2519500 - DNA, 25 bp, Homo sapien
tcactcgccagagtttccaacgatg

SEQ ID NO: 2519501 - DNA, 25 bp, Homo sapien
gtttccaacgatgtcaccagtgctg

SEQ ID NO: 2519502 - DNA, 25 bp, Homo sapien
ggcttggggccaaatatcagagaaa

SEQ ID NO: 2519503 - DNA, 25 bp, Homo sapien
acaggcatcagggtttgcgttccag

SEQ ID NO: 2519504 - DNA, 25 bp, Homo sapien
gagaaaggagcgctcgggtggtggg

SEQ ID NO: 2519505 - DNA, 25 bp, Homo sapien
tgcgttccagggtcacgtgctacca

SEQ ID NO: 2519506 - DNA, 25 bp, Homo sapien
tggggccttccgtccagaagcttcg

SEQ ID NO: 2519507 - DNA, 25 bp, Homo sapien
ccgctgcaccgacgcggccactcgt

SEQ ID NO: 2519508 - DNA, 25 bp, Homo sapien
tgcaccccgccacgggttggggcat

SEQ ID NO: 2519509 - DNA, 25 bp, Homo sapien
catctcggggaacacctggggcctt

SEQ ID NO: 2519510 - DNA, 25 bp, Homo sapien
aagggctgtggattagcccgcccgc

SEQ ID NO: 2519511 - DNA, 25 bp, Homo sapien
agctacccgaaagccccaggcgctg

SEQ ID NO: 2519512 - DNA, 25 bp, Homo sapien
ccgacaccgccacccaagggctgtg

SEQ ID NO: 2519513 - DNA, 25 bp, Homo sapien
gggacaagagcggtcaccaaaacca

SEQ ID NO: 2519514 - DNA, 25 bp, Homo sapien
cactgctttgttcctcatccgggca

SEQ ID NO: 2519515 - DNA, 25 bp, Homo sapien
ggcagagttcgcctcggggccctgc

SEQ ID NO: 2519516 - DNA, 25 bp, Homo sapien
gcccgcggcctcctctgggccgcac

SEQ ID NO: 2519517 - DNA, 25 bp, Homo sapien
gcgcacgcgcctgccccactgcttt

SEQ ID NO: 2519518 - DNA, 25 bp, Homo sapien
gccgctccgcccctcgtgcgtgcgc

SEQ ID NO: 2519519 - DNA, 25 bp, Homo sapien
gctccgcccctcgtgcgtgcgccct

SEQ ID NO: 2519520 - DNA, 25 bp, Homo sapien
ctcagccactctcagcgcccgccgc

SEQ ID NO: 2519521 - DNA, 25 bp, Homo sapien
gcgcgtttccggatcctcagccact

SEQ ID NO: 2519522 - DNA, 25 bp, Homo sapien
ggcactggccgcgagaggctcggcc

SEQ ID NO: 2519523 - DNA, 25 bp, Homo sapien
gcgtgcgcacggcagaggcactggc

SEQ ID NO: 2519524 - DNA, 25 bp, Homo sapien
gccgcgagaggctcggccgggagtt

SEQ ID NO: 2519525 - DNA, 25 bp, Homo sapien
tcggccgggagttccgcgtctccat

SEQ ID NO: 2519526 - DNA, 25 bp, Homo sapien
gtcccatgggggcccgatcagtcca

SEQ ID NO: 2519527 - DNA, 25 bp, Homo sapien
cccatgggggcccgatcagtccaat

SEQ ID NO: 2519528 - DNA, 25 bp, Homo sapien
cgatcagtccaatgagacctgggtg

SEQ ID NO: 2519529 - DNA, 25 bp, Homo sapien
gggcccgatcagtccaatgagacct

SEQ ID NO: 2519530 - DNA, 25 bp, Homo sapien
cttgtgaagcttgacttctccttca

SEQ ID NO: 2519531 - DNA, 25 bp, Homo sapien
tgaagcttgacttctccttcatccc

SEQ ID NO: 2519532 - DNA, 25 bp, Homo sapien
tgtgaagcttgacttctccttcatc

SEQ ID NO: 2519533 - DNA, 25 bp, Homo sapien
gaagcttgacttctccttcatcccc

SEQ ID NO: 2519534 - DNA, 25 bp, Homo sapien
atacgtacggtgttttttggctgtg

SEQ ID NO: 2519535 - DNA, 25 bp, Homo sapien
aggaagggtctccagacaaaagcag

SEQ ID NO: 2519536 - DNA, 25 bp, Homo sapien
tctggattatcacctgcacactcct

SEQ ID NO: 2519537 - DNA, 25 bp, Homo sapien
tcctctggattatcacctgcacact

SEQ ID NO: 2519538 - DNA, 25 bp, Homo sapien
cctcctctggattatcacctgcaca

SEQ ID NO: 2519539 - DNA, 25 bp, Homo sapien
cctctggattatcacctgcacactc

SEQ ID NO: 2519540 - DNA, 25 bp, Homo sapien
tagagtgacagttggtgcatttgtg

SEQ ID NO: 2519541 - DNA, 25 bp, Homo sapien
gtgacagttggtgcatttgtgctgt

SEQ ID NO: 2519542 - DNA, 25 bp, Homo sapien
catagagtgacagttggtgcatttg

SEQ ID NO: 2519543 - DNA, 25 bp, Homo sapien
gagtgacagttggtgcatttgtgct

SEQ ID NO: 2519544 - DNA, 25 bp, Homo sapien
ctgctctattcttcctgtgctgttg

SEQ ID NO: 2519545 - DNA, 25 bp, Homo sapien
tgacctcgcattgactggcttccct

SEQ ID NO: 2519546 - DNA, 25 bp, Homo sapien
gcactcaatgccatccaatgaagga

SEQ ID NO: 2519547 - DNA, 25 bp, Homo sapien
ccggcactcaatgccatccaatgaa

SEQ ID NO: 2519548 - DNA, 25 bp, Homo sapien
atttgccctatctttgacctcgcat

SEQ ID NO: 2519549 - DNA, 25 bp, Homo sapien
taagggcaaggctaggatcggcatc

SEQ ID NO: 2519550 - DNA, 25 bp, Homo sapien
tgaggcgtacatatgcgaaacactg

SEQ ID NO: 2519551 - DNA, 25 bp, Homo sapien
ttcatccgggatcacacacactagt

SEQ ID NO: 2519552 - DNA, 25 bp, Homo sapien
cagcagctaatactaagatgaggcg

SEQ ID NO: 2519553 - DNA, 25 bp, Homo sapien
taaaatgtacctgcctgtttctgcc

SEQ ID NO: 2519554 - DNA, 25 bp, Homo sapien
aaagccaaacttctcgatctaaagg

SEQ ID NO: 2519555 - DNA, 25 bp, Homo sapien
aggaatacctggcaaatcgctgcag

SEQ ID NO: 2519556 - DNA, 25 bp, Homo sapien
tgcaggacatctggttgagttcagc

SEQ ID NO: 2519557 - DNA, 25 bp, Homo sapien
actgcagatgagcaaaaggcccttg

SEQ ID NO: 2519558 - DNA, 25 bp, Homo sapien
tttaacaggaattgggtctgtgagt

SEQ ID NO: 2519559 - DNA, 25 bp, Homo sapien
tgaagtagaggcagtgctgtacact

SEQ ID NO: 2519560 - DNA, 25 bp, Homo sapien
ccagcgtgccgagaagactgaccag

SEQ ID NO: 2519561 - DNA, 25 bp, Homo sapien
gaattcattaccacctcagaagcta

SEQ ID NO: 2519562 - DNA, 25 bp, Homo sapien
tcagaagctaacaccaagatccatg

SEQ ID NO: 2519563 - DNA, 25 bp, Homo sapien
ataaacagtgagtggacggacaggc

SEQ ID NO: 2519564 - DNA, 25 bp, Homo sapien
cccatatcaacaccaaaatcagctg

SEQ ID NO: 2519565 - DNA, 25 bp, Homo sapien
tagtatcagaggtatacgggccttc

SEQ ID NO: 2519566 - DNA, 25 bp, Homo sapien
caactgatggcagggttgtgagcca

SEQ ID NO: 2519567 - DNA, 25 bp, Homo sapien
tagacccatgtaaacctaggactgg

SEQ ID NO: 2519568 - DNA, 25 bp, Homo sapien
taagctctgtgactactgtagccac

SEQ ID NO: 2519569 - DNA, 25 bp, Homo sapien
tctgcatgctgtcacaggaaaacta

SEQ ID NO: 2519570 - DNA, 25 bp, Homo sapien
ctctgcatgctgtcacaggaaaact

SEQ ID NO: 2519571 - DNA, 25 bp, Homo sapien
tgctcaaggttgtgcttacccactc

SEQ ID NO: 2519572 - DNA, 25 bp, Homo sapien
ggagcttttccagtgagcccagagt

SEQ ID NO: 2519573 - DNA, 25 bp, Homo sapien
ggtcctagcataagggcacccatta

SEQ ID NO: 2519574 - DNA, 25 bp, Homo sapien
tattatcgaactggtaatggccatg

SEQ ID NO: 2519575 - DNA, 25 bp, Homo sapien
ttcttctttgatgttttctttgcag

SEQ ID NO: 2519576 - DNA, 25 bp, Homo sapien
cttcttctttgatgttttctttgca

SEQ ID NO: 2519577 - DNA, 25 bp, Homo sapien
cttctttgatgttttctttgcaggc

SEQ ID NO: 2519578 - DNA, 25 bp, Homo sapien
tcttctttgatgttttctttgcagg

SEQ ID NO: 2519579 - DNA, 25 bp, Homo sapien
ttcaaactcagaaactctggctcca

SEQ ID NO: 2519580 - DNA, 25 bp, Homo sapien
caggaatccgagtagaagtggtcag

SEQ ID NO: 2519581 - DNA, 25 bp, Homo sapien
aatccgagtagaagtggtcagggat

SEQ ID NO: 2519582 - DNA, 25 bp, Homo sapien
agcccagggccacctcatccttctt

SEQ ID NO: 2519583 - DNA, 25 bp, Homo sapien
tcctcctggagccaaacagcttctt

SEQ ID NO: 2519584 - DNA, 25 bp, Homo sapien
aggaggagcgcgtcccggtgtagcg

SEQ ID NO: 2519585 - DNA, 25 bp, Homo sapien
gctgcttggagtagacaggatttgt

SEQ ID NO: 2519586 - DNA, 25 bp, Homo sapien
tttcctcccgtcctaggaggagcga

SEQ ID NO: 2519587 - DNA, 25 bp, Homo sapien
gcgtcccggtgtagcggtggctgga

SEQ ID NO: 2519588 - DNA, 25 bp, Homo sapien
tggagtgtgcagatctcagcgaaca

SEQ ID NO: 2519589 - DNA, 25 bp, Homo sapien
ggactctgccagaaacagcaacgaa

SEQ ID NO: 2519590 - DNA, 25 bp, Homo sapien
cagcagagacgccaaacccagtgca

SEQ ID NO: 2519591 - DNA, 25 bp, Homo sapien
ggcgtcctccctatggctcctggag

SEQ ID NO: 2519592 - DNA, 25 bp, Homo sapien
aacactggatagtaacttgaagcca

SEQ ID NO: 2519593 - DNA, 25 bp, Homo sapien
aaacactggatagtaacttgaagcc

SEQ ID NO: 2519594 - DNA, 25 bp, Homo sapien
cccatagacagtattatactgaatg

SEQ ID NO: 2519595 - DNA, 25 bp, Homo sapien
catagacagtattatactgaatggg

SEQ ID NO: 2519596 - DNA, 25 bp, Homo sapien
tagacagtattatactgaatgggca

SEQ ID NO: 2519597 - DNA, 25 bp, Homo sapien
acccatagacagtattatactgaat

SEQ ID NO: 2519598 - DNA, 25 bp, Homo sapien
cccacatggccttaagtgcttttgg

SEQ ID NO: 2519599 - DNA, 25 bp, Homo sapien
tcccacatggccttaagtgcttttg

SEQ ID NO: 2519600 - DNA, 25 bp, Homo sapien
ccacatggccttaagtgcttttgga

SEQ ID NO: 2519601 - DNA, 25 bp, Homo sapien
cacatggccttaagtgcttttggaa

SEQ ID NO: 2519602 - DNA, 25 bp, Homo sapien
ttggggccactgttggcattgagat

SEQ ID NO: 2519603 - DNA, 25 bp, Homo sapien
gggccactgttggcattgagatgct

SEQ ID NO: 2519604 - DNA, 25 bp, Homo sapien
ttggaaacccatggggagtgtgtgc

SEQ ID NO: 2519605 - DNA, 25 bp, Homo sapien
agggattggggccactgttggcatt

SEQ ID NO: 2519606 - DNA, 25 bp, Homo sapien
tgctcctctggacaaagatgcccac

SEQ ID NO: 2519607 - DNA, 25 bp, Homo sapien
tgggtgggcgtgtgtccacttctgc

SEQ ID NO: 2519608 - DNA, 25 bp, Homo sapien
agatgcccacgtcggaaacgcccat

SEQ ID NO: 2519609 - DNA, 25 bp, Homo sapien
tctggacaaagatgcccacgtcgga

SEQ ID NO: 2519610 - DNA, 25 bp, Homo sapien
tgacgctcccaccactccgatacag

SEQ ID NO: 2519611 - DNA, 25 bp, Homo sapien
agcacgaccactgaccttctctgta

SEQ ID NO: 2519612 - DNA, 25 bp, Homo sapien
tcagagcacgaccactgaccttctc

SEQ ID NO: 2519613 - DNA, 25 bp, Homo sapien
cactccgatacagccccacctgcac

SEQ ID NO: 2519614 - DNA, 25 bp, Homo sapien
ttgcagtcccagttctcaattccac

SEQ ID NO: 2519615 - DNA, 25 bp, Homo sapien
gttgcagtcccagttctcaattcca

SEQ ID NO: 2519616 - DNA, 25 bp, Homo sapien
tgcagtcccagttctcaattccaca

SEQ ID NO: 2519617 - DNA, 25 bp, Homo sapien
gcagtcccagttctcaattccacat

SEQ ID NO: 2519618 - DNA, 25 bp, Homo sapien
gattcattccttctcgtgagagctg

SEQ ID NO: 2519619 - DNA, 25 bp, Homo sapien
tggctttgtggattcattccttctc

SEQ ID NO: 2519620 - DNA, 25 bp, Homo sapien
tggattcattccttctcgtgagagc

SEQ ID NO: 2519621 - DNA, 25 bp, Homo sapien
ttgtggattcattccttctcgtgag

SEQ ID NO: 2519622 - DNA, 25 bp, Homo sapien
gctgatgtctggcacctgaaactga

SEQ ID NO: 2519623 - DNA, 25 bp, Homo sapien
taaggaatctgtataccctgcccct

SEQ ID NO: 2519624 - DNA, 25 bp, Homo sapien
ggaggctggtttcgcacattaagga

SEQ ID NO: 2519625 - DNA, 25 bp, Homo sapien
aacatcaggctcaatcggcagctgg

SEQ ID NO: 2519626 - DNA, 25 bp, Homo sapien
taaattttcctaggccagatcccac

SEQ ID NO: 2519627 - DNA, 25 bp, Homo sapien
aatatacccgtgtctatgtcgtggc

SEQ ID NO: 2519628 - DNA, 25 bp, Homo sapien
taagtccaggcatgggacctctgtc

SEQ ID NO: 2519629 - DNA, 25 bp, Homo sapien
caagtgagggcttttaaggtatcca

SEQ ID NO: 2519630 - DNA, 25 bp, Homo sapien
tgatggggccattaaattctgatgt

SEQ ID NO: 2519631 - DNA, 25 bp, Homo sapien
gatggggccattaaattctgatgta

SEQ ID NO: 2519632 - DNA, 25 bp, Homo sapien
atggggccattaaattctgatgtag

SEQ ID NO: 2519633 - DNA, 25 bp, Homo sapien
ctcttctagacacattgagaccttt

SEQ ID NO: 2519634 - DNA, 25 bp, Homo sapien
tctagacacattgagacctttcttc

SEQ ID NO: 2519635 - DNA, 25 bp, Homo sapien
tagacacattgagacctttcttcca

SEQ ID NO: 2519636 - DNA, 25 bp, Homo sapien
agacctttcttccaagcattaagtt

SEQ ID NO: 2519637 - DNA, 25 bp, Homo sapien
gtggaaggcgtcttcgcggccgggc

SEQ ID NO: 2519638 - DNA, 25 bp, Homo sapien
tgggtagctgattcctagaaactcg

SEQ ID NO: 2519639 - DNA, 25 bp, Homo sapien
cagacttaagttggagatacaccga

SEQ ID NO: 2519640 - DNA, 25 bp, Homo sapien
tgtggtctggagttgtaaggtccaa

SEQ ID NO: 2519641 - DNA, 25 bp, Homo sapien
gaagaagagcgacggtcgcacagct

SEQ ID NO: 2519642 - DNA, 25 bp, Homo sapien
cgccggaagaagagcgacggtcgca

SEQ ID NO: 2519643 - DNA, 25 bp, Homo sapien
ccggaagaagagcgacggtcgcaca

SEQ ID NO: 2519644 - DNA, 25 bp, Homo sapien
gccgccggaagaagagcgacggtcg

SEQ ID NO: 2519645 - DNA, 25 bp, Homo sapien
ccgcccagcctgctgggaaactgct

SEQ ID NO: 2519646 - DNA, 25 bp, Homo sapien
ccacgttggccgcccgcccagcctg

SEQ ID NO: 2519647 - DNA, 25 bp, Homo sapien
gcccgcccagcctgctgggaaactg

SEQ ID NO: 2519648 - DNA, 25 bp, Homo sapien
gcccagcctgctgggaaactgctcg

SEQ ID NO: 2519649 - DNA, 25 bp, Homo sapien
tgcagctgagaagtacagtgactgc

SEQ ID NO: 2519650 - DNA, 25 bp, Homo sapien
tgaaataaaccaagggccctctgtc

SEQ ID NO: 2519651 - DNA, 25 bp, Homo sapien
ggtgggactggaatgctacctctgt

SEQ ID NO: 2519652 - DNA, 25 bp, Homo sapien
actgtaggcagcagggagtatccca

SEQ ID NO: 2519653 - DNA, 25 bp, Homo sapien
taagacaattgaagagcctcacacc

SEQ ID NO: 2519654 - DNA, 25 bp, Homo sapien
ctggaggaggaaggccctgcagaac

SEQ ID NO: 2519655 - DNA, 25 bp, Homo sapien
tggaggaggaaggccctgcagaacc

SEQ ID NO: 2519656 - DNA, 25 bp, Homo sapien
cacaggaggcatagaggtagccact

SEQ ID NO: 2519657 - DNA, 25 bp, Homo sapien
gaacaattattcctggcgctgggtc

SEQ ID NO: 2519658 - DNA, 25 bp, Homo sapien
tcctgtgcattagtcccagagggtg

SEQ ID NO: 2519659 - DNA, 25 bp, Homo sapien
ttgcttgcaagtggtattaggcccc

SEQ ID NO: 2519660 - DNA, 25 bp, Homo sapien
ggaggtacagcgtcagaggctcccc

SEQ ID NO: 2519661 - DNA, 25 bp, Homo sapien
cccacaatgcacttttgatgcatag

SEQ ID NO: 2519662 - DNA, 25 bp, Homo sapien
ggtcttcagccgtgagtcggaaccc

SEQ ID NO: 2519663 - DNA, 25 bp, Homo sapien
cacttttgatgcatagcagcactgt

SEQ ID NO: 2519664 - DNA, 25 bp, Homo sapien
ttctgcccttgtgttgcatctgctg

SEQ ID NO: 2519665 - DNA, 25 bp, Homo sapien
tggaggtgagtttctgcccttgtgt

SEQ ID NO: 2519666 - DNA, 25 bp, Homo sapien
ggaaacttgcatcgaaggggccagt

SEQ ID NO: 2519667 - DNA, 25 bp, Homo sapien
ctgtggatgcgagggagccattctt

SEQ ID NO: 2519668 - DNA, 25 bp, Homo sapien
ggatgttgtctccaagaggctctaa

SEQ ID NO: 2519669 - DNA, 25 bp, Homo sapien
gcaaagctttcacgggtaacgggca

SEQ ID NO: 2519670 - DNA, 25 bp, Homo sapien
gcacagcgaggttggcgagttctcc

SEQ ID NO: 2519671 - DNA, 25 bp, Homo sapien
tcagtggcgggaaacctcctgtggt

SEQ ID NO: 2519672 - DNA, 25 bp, Homo sapien
cttccattctttctccagcaggctt

SEQ ID NO: 2519673 - DNA, 25 bp, Homo sapien
tccattctttctccagcaggctttc

SEQ ID NO: 2519674 - DNA, 25 bp, Homo sapien
cattctttctccagcaggctttcct

SEQ ID NO: 2519675 - DNA, 25 bp, Homo sapien
tctttctccagcaggctttcctctg

SEQ ID NO: 2519676 - DNA, 25 bp, Homo sapien
gatgatgaagatggtagtactggct

SEQ ID NO: 2519677 - DNA, 25 bp, Homo sapien
tgatgaagatggtagtactggcttc

SEQ ID NO: 2519678 - DNA, 25 bp, Homo sapien
gatgaagatggtagtactggcttcc

SEQ ID NO: 2519679 - DNA, 25 bp, Homo sapien
tgaagatggtagtactggcttccat

SEQ ID NO: 2519680 - DNA, 25 bp, Homo sapien
ctgagcaccaccatttctaattcct

SEQ ID NO: 2519681 - DNA, 25 bp, Homo sapien
gagcaccaccatttctaattccttc

SEQ ID NO: 2519682 - DNA, 25 bp, Homo sapien
gcaccaccatttctaattccttcga

SEQ ID NO: 2519683 - DNA, 25 bp, Homo sapien
accaccatttctaattccttcgatc

SEQ ID NO: 2519684 - DNA, 25 bp, Homo sapien
tgatggggctcctggtggttttcat

SEQ ID NO: 2519685 - DNA, 25 bp, Homo sapien
ctgctgatggggctcctggtggttt

SEQ ID NO: 2519686 - DNA, 25 bp, Homo sapien
ctgatggggctcctggtggttttca

SEQ ID NO: 2519687 - DNA, 25 bp, Homo sapien
gctgatggggctcctggtggttttc

SEQ ID NO: 2519688 - DNA, 25 bp, Homo sapien
gctgtaaaacatgggtgacaggcag

SEQ ID NO: 2519689 - DNA, 25 bp, Homo sapien
agctcgagttgttctgaaatcaata

SEQ ID NO: 2519690 - DNA, 25 bp, Homo sapien
tcatcgagagggctgtaaaacatgg

SEQ ID NO: 2519691 - DNA, 25 bp, Homo sapien
gaatttgcttttcatcgagagggct

SEQ ID NO: 2519692 - DNA, 25 bp, Homo sapien
gactggacgtgcatgtaagccagat

SEQ ID NO: 2519693 - DNA, 25 bp, Homo sapien
gctcagcataccaaggacctgcact

SEQ ID NO: 2519694 - DNA, 25 bp, Homo sapien
gcaacaaacatgtgagcaatagaat

SEQ ID NO: 2519695 - DNA, 25 bp, Homo sapien
aaaggaatgtagtagaagggcaggg

SEQ ID NO: 2519696 - DNA, 25 bp, Homo sapien
tgcttagaactgaatatgcagatgc

SEQ ID NO: 2519697 - DNA, 25 bp, Homo sapien
taactgagaagggctttgaactgct

SEQ ID NO: 2519698 - DNA, 25 bp, Homo sapien
tctctataggccacctgatgctcag

SEQ ID NO: 2519699 - DNA, 25 bp, Homo sapien
gctagcattagccaagacttccagc

SEQ ID NO: 2519700 - DNA, 25 bp, Homo sapien
tccattcatgtttatgatctctgaa

SEQ ID NO: 2519701 - DNA, 25 bp, Homo sapien
tgtggacacttcagccatgtggtct

SEQ ID NO: 2519702 - DNA, 25 bp, Homo sapien
ggatgggtgggagtcgcagacctct

SEQ ID NO: 2519703 - DNA, 25 bp, Homo sapien
gaatcattaaggtccatttgtggac

SEQ ID NO: 2519704 - DNA, 25 bp, Homo sapien
tgaccaaggcctcagagcgtgcaga

SEQ ID NO: 2519705 - DNA, 25 bp, Homo sapien
gggtctgagttacgcttagagactg

SEQ ID NO: 2519706 - DNA, 25 bp, Homo sapien
tgatttacaagaggcctcatttgca

SEQ ID NO: 2519707 - DNA, 25 bp, Homo sapien
gtagctgccaagacggctgtgttca

SEQ ID NO: 2519708 - DNA, 25 bp, Homo sapien
gactgttcagaattagtagctgcca

SEQ ID NO: 2519709 - DNA, 25 bp, Homo sapien
ggttcccttggatgtccctgattcc

SEQ ID NO: 2519710 - DNA, 25 bp, Homo sapien
catggtttcctgtaaattctgtcta

SEQ ID NO: 2519711 - DNA, 25 bp, Homo sapien
cttgcatcctattgggagtggttcc

SEQ ID NO: 2519712 - DNA, 25 bp, Homo sapien
ttctgtctaatcatggagtcttgca

SEQ ID NO: 2519713 - DNA, 25 bp, Homo sapien
aaaatagttggttgcatagagaggg

SEQ ID NO: 2519714 - DNA, 25 bp, Homo sapien
cggctcctgcaggtaggaaaatagt

SEQ ID NO: 2519715 - DNA, 25 bp, Homo sapien
acagccacttgcaaaggatgtgggc

SEQ ID NO: 2519716 - DNA, 25 bp, Homo sapien
cagccacttgcaaaggatgtgggca

SEQ ID NO: 2519717 - DNA, 25 bp, Homo sapien
aatcacaaggcatttaaaggtcagc

SEQ ID NO: 2519718 - DNA, 25 bp, Homo sapien
tctgctgcttggaccagggaccttt

SEQ ID NO: 2519719 - DNA, 25 bp, Homo sapien
gcctctcagtagttagaaagatgtt

SEQ ID NO: 2519720 - DNA, 25 bp, Homo sapien
taatgatgctgattattcccctgtc

SEQ ID NO: 2519721 - DNA, 25 bp, Homo sapien
atcgtaatgaggcgttgaaagctag

SEQ ID NO: 2519722 - DNA, 25 bp, Homo sapien
tatcgtaatgaggcgttgaaagcta

SEQ ID NO: 2519723 - DNA, 25 bp, Homo sapien
ctatcgtaatgaggcgttgaaagct

SEQ ID NO: 2519724 - DNA, 25 bp, Homo sapien
agacttctttcttgcatgacaaaga

SEQ ID NO: 2519725 - DNA, 25 bp, Homo sapien
tcatgtggtctctagtgatgagatg

SEQ ID NO: 2519726 - DNA, 25 bp, Homo sapien
tgagatgttgcccttgatgtcagag

SEQ ID NO: 2519727 - DNA, 25 bp, Homo sapien
tatggtgtgatcacccttgaggaac

SEQ ID NO: 2519728 - DNA, 25 bp, Homo sapien
caagctgccacaagtattgtttgtc

SEQ ID NO: 2519729 - DNA, 25 bp, Homo sapien
gaagcagttgtagcccatccttttc

SEQ ID NO: 2519730 - DNA, 25 bp, Homo sapien
tgtccgtcccgcctttcgggaagca

SEQ ID NO: 2519731 - DNA, 25 bp, Homo sapien
cactagcctcaggattggttgatct

SEQ ID NO: 2519732 - DNA, 25 bp, Homo sapien
ttctccaggtacctatggcctactc

SEQ ID NO: 2519733 - DNA, 25 bp, Homo sapien
cttactatcaaagccagcaatctca

SEQ ID NO: 2519734 - DNA, 25 bp, Homo sapien
ggggacatgctctccagaactgaca

SEQ ID NO: 2519735 - DNA, 25 bp, Homo sapien
tactcccactttcttactatcaaag

SEQ ID NO: 2519736 - DNA, 25 bp, Homo sapien
gttcgcatgtcctcattatacagat

SEQ ID NO: 2519737 - DNA, 25 bp, Homo sapien
ttctgttcgcatgtcctcattatac

SEQ ID NO: 2519738 - DNA, 25 bp, Homo sapien
tgtcctcattatacagataccccat

SEQ ID NO: 2519739 - DNA, 25 bp, Homo sapien
atgtcctcattatacagatacccca

SEQ ID NO: 2519740 - DNA, 25 bp, Homo sapien
tttctgagtctggaatcccatttct

SEQ ID NO: 2519741 - DNA, 25 bp, Homo sapien
caggcagctccttatttttctgagt

SEQ ID NO: 2519742 - DNA, 25 bp, Homo sapien
gctccttatttttctgagtctggaa

SEQ ID NO: 2519743 - DNA, 25 bp, Homo sapien
tcaggacttttgtctccatagagct

SEQ ID NO: 2519744 - DNA, 25 bp, Homo sapien
ttggggccacggtctggaagccctg

SEQ ID NO: 2519745 - DNA, 25 bp, Homo sapien
cctgggctgtgttgttattcctcat

SEQ ID NO: 2519746 - DNA, 25 bp, Homo sapien
tggtttggggccacggtctggaagc

SEQ ID NO: 2519747 - DNA, 25 bp, Homo sapien
ggaagccctgggctgtgttgttatt

SEQ ID NO: 2519748 - DNA, 25 bp, Homo sapien
gccagagagcccccgaggacagcag

SEQ ID NO: 2519749 - DNA, 25 bp, Homo sapien
agccagagagcccccgaggacagca

SEQ ID NO: 2519750 - DNA, 25 bp, Homo sapien
aaagccagagagcccccgaggacag

SEQ ID NO: 2519751 - DNA, 25 bp, Homo sapien
aaaagccagagagcccccgaggaca

SEQ ID NO: 2519752 - DNA, 25 bp, Homo sapien
gatttcaaccctgccaatgtccagg

SEQ ID NO: 2519753 - DNA, 25 bp, Homo sapien
gcagaaccaggctttgagaggacct

SEQ ID NO: 2519754 - DNA, 25 bp, Homo sapien
cagggtgggtaagacaacagaagcc

SEQ ID NO: 2519755 - DNA, 25 bp, Homo sapien
gatttctagtgctggagtgcagaca

SEQ ID NO: 2519756 - DNA, 25 bp, Homo sapien
ggtcatacgcgttatgcattcagca

SEQ ID NO: 2519757 - DNA, 25 bp, Homo sapien
ctgggtcatacgcgttatgcattca

SEQ ID NO: 2519758 - DNA, 25 bp, Homo sapien
gggtcatacgcgttatgcattcagc

SEQ ID NO: 2519759 - DNA, 25 bp, Homo sapien
gtcatacgcgttatgcattcagcat

SEQ ID NO: 2519760 - DNA, 25 bp, Homo sapien
gatgatgacgaacttcccctcttgg

SEQ ID NO: 2519761 - DNA, 25 bp, Homo sapien
atagtgcattttcagggtgagccac

SEQ ID NO: 2519762 - DNA, 25 bp, Homo sapien
gctgatgctgtgtaattcagccctg

SEQ ID NO: 2519763 - DNA, 25 bp, Homo sapien
cagaaacccacgatgtggccagaga

SEQ ID NO: 2519764 - DNA, 25 bp, Homo sapien
tggaggctcagcttaccagaaccaa

SEQ ID NO: 2519765 - DNA, 25 bp, Homo sapien
tatgctaggttcagatccctaaact

SEQ ID NO: 2519766 - DNA, 25 bp, Homo sapien
caatctatatgctaggttcagatcc

SEQ ID NO: 2519767 - DNA, 25 bp, Homo sapien
taccagaaccaatctatatgctagg

SEQ ID NO: 2519768 - DNA, 25 bp, Homo sapien
tcttccaagcctgaagacaacgttg

SEQ ID NO: 2519769 - DNA, 25 bp, Homo sapien
gacaacgttggccacgttgttctca

SEQ ID NO: 2519770 - DNA, 25 bp, Homo sapien
tggccacgttgttctcatttcctcc

SEQ ID NO: 2519771 - DNA, 25 bp, Homo sapien
gcctgaagacaacgttggccacgtt

SEQ ID NO: 2519772 - DNA, 25 bp, Homo sapien
gcataaaaatccacgatcaccatct

SEQ ID NO: 2519773 - DNA, 25 bp, Homo sapien
tctgcataaaaatccacgatcacca

SEQ ID NO: 2519774 - DNA, 25 bp, Homo sapien
taaaaatccacgatcaccatcttgt

SEQ ID NO: 2519775 - DNA, 25 bp, Homo sapien
aaaatccacgatcaccatcttgtca

SEQ ID NO: 2519776 - DNA, 25 bp, Homo sapien
ttcccacaagagcagccttggtgga

SEQ ID NO: 2519777 - DNA, 25 bp, Homo sapien
tggtgaccagcatctatggtgacca

SEQ ID NO: 2519778 - DNA, 25 bp, Homo sapien
ctacccctctccttggcatagatgg

SEQ ID NO: 2519779 - DNA, 25 bp, Homo sapien
gtcttcatagcgtcttccctctgga

SEQ ID NO: 2519780 - DNA, 25 bp, Homo sapien
tctggatgtatctgtcctgatttcc

SEQ ID NO: 2519781 - DNA, 25 bp, Homo sapien
tgccaaaagggagattcttgctccc

SEQ ID NO: 2519782 - DNA, 25 bp, Homo sapien
ttgccaggcaatttagagatgactt

SEQ ID NO: 2519783 - DNA, 25 bp, Homo sapien
tctttctgtatatcgttgtgtttcc

SEQ ID NO: 2519784 - DNA, 25 bp, Homo sapien
tatcgttgtgtttccatccatctgt

SEQ ID NO: 2519785 - DNA, 25 bp, Homo sapien
gacatacggttaggaatataggctt

SEQ ID NO: 2519786 - DNA, 25 bp, Homo sapien
tagatataggtctccctcatagaaa

SEQ ID NO: 2519787 - DNA, 25 bp, Homo sapien
ttacaagaccagaatagacatacgg

SEQ ID NO: 2519788 - DNA, 25 bp, Homo sapien
cctgtacacacatctactatgggat

SEQ ID NO: 2519789 - DNA, 25 bp, Homo sapien
gaccatctgcatcaagacgcacgaa

SEQ ID NO: 2519790 - DNA, 25 bp, Homo sapien
agcggacggaccatctgcatcaaga

SEQ ID NO: 2519791 - DNA, 25 bp, Homo sapien
actggcgcagcggacggaccatctg

SEQ ID NO: 2519792 - DNA, 25 bp, Homo sapien
agacgcacgaaagcggccagaaaga

SEQ ID NO: 2519793 - DNA, 25 bp, Homo sapien
gctgggaagtttctccgtggcctta

SEQ ID NO: 2519794 - DNA, 25 bp, Homo sapien
gctattgtaaaaacttggccccaga

SEQ ID NO: 2519795 - DNA, 25 bp, Homo sapien
tgagatttcgcagcccccttctcat

SEQ ID NO: 2519796 - DNA, 25 bp, Homo sapien
tgctggcaccgatgtttaactcagg

SEQ ID NO: 2519797 - DNA, 25 bp, Homo sapien
gaggtgaccttgagatcctgatacc

SEQ ID NO: 2519798 - DNA, 25 bp, Homo sapien
agcccacgaggatggtcacatgcca

SEQ ID NO: 2519799 - DNA, 25 bp, Homo sapien
gaatttgacttaagagagagcccca

SEQ ID NO: 2519800 - DNA, 25 bp, Homo sapien
caggtgagacagcaagagtgttctt

SEQ ID NO: 2519801 - DNA, 25 bp, Homo sapien
tacttttgcttctttgcacattctc

SEQ ID NO: 2519802 - DNA, 25 bp, Homo sapien
cattctctccttccaagttccagga

SEQ ID NO: 2519803 - DNA, 25 bp, Homo sapien
tctccttccaagttccaggagctgc

SEQ ID NO: 2519804 - DNA, 25 bp, Homo sapien
tctctccttccaagttccaggagct

SEQ ID NO: 2519805 - DNA, 25 bp, Homo sapien
tcaagggctttatccgtggtcctga

SEQ ID NO: 2519806 - DNA, 25 bp, Homo sapien
cgtggtcctgaaataccctttatgc

SEQ ID NO: 2519807 - DNA, 25 bp, Homo sapien
cgtgtctactgtgtcaagggcttta

SEQ ID NO: 2519808 - DNA, 25 bp, Homo sapien
gaaataccctttatgcctaggcacc

SEQ ID NO: 2519809 - DNA, 25 bp, Homo sapien
caaagcctggctgggtaggatgccc

SEQ ID NO: 2519810 - DNA, 25 bp, Homo sapien
gcagtgcctaaacttccggaggtca

SEQ ID NO: 2519811 - DNA, 25 bp, Homo sapien
tccaggagatgtaccagatgaccag

SEQ ID NO: 2519812 - DNA, 25 bp, Homo sapien
gatgcagcctcgagttgcagaacca

SEQ ID NO: 2519813 - DNA, 25 bp, Homo sapien
tgtgattccaaacagcccatggcct

SEQ ID NO: 2519814 - DNA, 25 bp, Homo sapien
gaaaagcagcatcctacaagccagg

SEQ ID NO: 2519815 - DNA, 25 bp, Homo sapien
atctaaggctggcaaaggcatcccg

SEQ ID NO: 2519816 - DNA, 25 bp, Homo sapien
gaagaagttgggcattcaggcagct

SEQ ID NO: 2519817 - DNA, 25 bp, Homo sapien
gaaggtagggttttctggccagcta

SEQ ID NO: 2519818 - DNA, 25 bp, Homo sapien
gctatgacactctgtggccacaggg

SEQ ID NO: 2519819 - DNA, 25 bp, Homo sapien
gaaattaaccagaatgagaagcccc

SEQ ID NO: 2519820 - DNA, 25 bp, Homo sapien
gactctccggagttgcttcccaaag

SEQ ID NO: 2519821 - DNA, 25 bp, Homo sapien
cataaattgctagtccaaggctgta

SEQ ID NO: 2519822 - DNA, 25 bp, Homo sapien
aagcataaattgctagtccaaggct

SEQ ID NO: 2519823 - DNA, 25 bp, Homo sapien
gcataaattgctagtccaaggctgt

SEQ ID NO: 2519824 - DNA, 25 bp, Homo sapien
aaattgctagtccaaggctgtatgg

SEQ ID NO: 2519825 - DNA, 25 bp, Homo sapien
ttccaggccctagattcccagcata

SEQ ID NO: 2519826 - DNA, 25 bp, Homo sapien
aaattggtggatgctaaagaggttc

SEQ ID NO: 2519827 - DNA, 25 bp, Homo sapien
gatcttcagaagacatatccttggg

SEQ ID NO: 2519828 - DNA, 25 bp, Homo sapien
ccctgggttgagagagtccattgag

SEQ ID NO: 2519829 - DNA, 25 bp, Homo sapien
tggctgtcccgaaaacccagtggta

SEQ ID NO: 2519830 - DNA, 25 bp, Homo sapien
gatgatcaccagaccattgcccaga

SEQ ID NO: 2519831 - DNA, 25 bp, Homo sapien
cacttagagcattgaccaggcgaga

SEQ ID NO: 2519832 - DNA, 25 bp, Homo sapien
gaatcccgaggaagcagacgatgct

SEQ ID NO: 2519833 - DNA, 25 bp, Homo sapien
tgatggaagtgttgtaatcttcatc

SEQ ID NO: 2519834 - DNA, 25 bp, Homo sapien
atcagggtattcatcaccgtaactg

SEQ ID NO: 2519835 - DNA, 25 bp, Homo sapien
caccgtaactgatggaagtgttgta

SEQ ID NO: 2519836 - DNA, 25 bp, Homo sapien
caatggagtctaaataatcagggta

SEQ ID NO: 2519837 - DNA, 25 bp, Homo sapien
agtccctgtacacagctagaaacac

SEQ ID NO: 2519838 - DNA, 25 bp, Homo sapien
ctgcagctctccaatgtgagtcctc

SEQ ID NO: 2519839 - DNA, 25 bp, Homo sapien
agtcctcagccaatcagtccctgta

SEQ ID NO: 2519840 - DNA, 25 bp, Homo sapien
tcaccgttatgttgtctgcagctct

SEQ ID NO: 2519841 - DNA, 25 bp, Homo sapien
tctccatgggtcgacttggccacag

SEQ ID NO: 2519842 - DNA, 25 bp, Homo sapien
ggttctttacatcgcaaagcactgg

SEQ ID NO: 2519843 - DNA, 25 bp, Homo sapien
caagttcatatggatccagggcctc

SEQ ID NO: 2519844 - DNA, 25 bp, Homo sapien
agtgagttctccttgccattaccag

SEQ ID NO: 2519845 - DNA, 25 bp, Homo sapien
caggccaaatgcaggggctttatca

SEQ ID NO: 2519846 - DNA, 25 bp, Homo sapien
cagcagccactctgtcaatctgctg

SEQ ID NO: 2519847 - DNA, 25 bp, Homo sapien
tgctgtctctttcatcgcaggctac

SEQ ID NO: 2519848 - DNA, 25 bp, Homo sapien
tttcatcgcaggctaccactaacct

SEQ ID NO: 2519849 - DNA, 25 bp, Homo sapien
ggacgactgtaggtgctgatgtctt

SEQ ID NO: 2519850 - DNA, 25 bp, Homo sapien
ttcaccagatctcctaccctccagg

SEQ ID NO: 2519851 - DNA, 25 bp, Homo sapien
tcctaccctccagggcagagagaag

SEQ ID NO: 2519852 - DNA, 25 bp, Homo sapien
tccccctggcctggacgactgtagg

SEQ ID NO: 2519853 - DNA, 25 bp, Homo sapien
gcaggggctcggcgggataggtgat

SEQ ID NO: 2519854 - DNA, 25 bp, Homo sapien
ccctgatcccatagcagccagagcc

SEQ ID NO: 2519855 - DNA, 25 bp, Homo sapien
tggtccctgatcccatagcagccag

SEQ ID NO: 2519856 - DNA, 25 bp, Homo sapien
ctgccaatggcaggtttccagtgtg

SEQ ID NO: 2519857 - DNA, 25 bp, Homo sapien
gtccctgatcccatagcagccagag

SEQ ID NO: 2519858 - DNA, 25 bp, Homo sapien
ccttcttccatcttcccctcagcct

SEQ ID NO: 2519859 - DNA, 25 bp, Homo sapien
cttcctcctccatgtctccttccgt

SEQ ID NO: 2519860 - DNA, 25 bp, Homo sapien
caaaagcaaagatttctccttcctt

SEQ ID NO: 2519861 - DNA, 25 bp, Homo sapien
ctccttcttccatcttcccctcagc

SEQ ID NO: 2519862 - DNA, 25 bp, Homo sapien
gtagaacaagcacatctcagctgtc

SEQ ID NO: 2519863 - DNA, 25 bp, Homo sapien
tgttgtagaacaagcacatctcagc

SEQ ID NO: 2519864 - DNA, 25 bp, Homo sapien
tcacgcttgttgtagaacaagcaca

SEQ ID NO: 2519865 - DNA, 25 bp, Homo sapien
gctgcatgtgatcacgcttgttgta

SEQ ID NO: 2519866 - DNA, 25 bp, Homo sapien
aggctcctcatccagggcacaggac

SEQ ID NO: 2519867 - DNA, 25 bp, Homo sapien
cagttctgcagaaagtgcaaggacc

SEQ ID NO: 2519868 - DNA, 25 bp, Homo sapien
gttctgcagaaagtgcaaggacccc

SEQ ID NO: 2519869 - DNA, 25 bp, Homo sapien
gcagaaagtgcaaggaccccaggct

SEQ ID NO: 2519870 - DNA, 25 bp, Homo sapien
atggaatcatcatgggtgactgtga

SEQ ID NO: 2519871 - DNA, 25 bp, Homo sapien
tggaatcatcatgggtgactgtgac

SEQ ID NO: 2519872 - DNA, 25 bp, Homo sapien
aatggaatcatcatgggtgactgtg

SEQ ID NO: 2519873 - DNA, 25 bp, Homo sapien
tcaacaggagctccctgtatcccat

SEQ ID NO: 2519874 - DNA, 25 bp, Homo sapien
ctgtctcccactcaacaggagctcc

SEQ ID NO: 2519875 - DNA, 25 bp, Homo sapien
gtctcccactcaacaggagctccct

SEQ ID NO: 2519876 - DNA, 25 bp, Homo sapien
actcaacaggagctccctgtatccc

SEQ ID NO: 2519877 - DNA, 25 bp, Homo sapien
tgctatcattgttgcagagccctga

SEQ ID NO: 2519878 - DNA, 25 bp, Homo sapien
gatgctgtgctagtcccagcctaga

SEQ ID NO: 2519879 - DNA, 25 bp, Homo sapien
ccaagcagttctgctggagagatgg

SEQ ID NO: 2519880 - DNA, 25 bp, Homo sapien
caacagaaagtggtagaagtgatgc

SEQ ID NO: 2519881 - DNA, 25 bp, Homo sapien
ccttgtgctccttgcagcccatgag

SEQ ID NO: 2519882 - DNA, 25 bp, Homo sapien
tgtgctccttgcagcccatgagcca

SEQ ID NO: 2519883 - DNA, 25 bp, Homo sapien
agagaaggagcccttgtgctccttg

SEQ ID NO: 2519884 - DNA, 25 bp, Homo sapien
aggagcccttgtgctccttgcagcc

SEQ ID NO: 2519885 - DNA, 25 bp, Homo sapien
agccgctggtacttccaacattgcc

SEQ ID NO: 2519886 - DNA, 25 bp, Homo sapien
cctgctgagtcagccgctggtactt

SEQ ID NO: 2519887 - DNA, 25 bp, Homo sapien
gagtcagccgctggtacttccaaca

SEQ ID NO: 2519888 - DNA, 25 bp, Homo sapien
tccaacattgccagagactgtctat

SEQ ID NO: 2519889 - DNA, 25 bp, Homo sapien
tgttcattcaagatccccctctgaa

SEQ ID NO: 2519890 - DNA, 25 bp, Homo sapien
gctgttggggagacttgcacaccct

SEQ ID NO: 2519891 - DNA, 25 bp, Homo sapien
ggtctctgcccggaaggtcttcctg

SEQ ID NO: 2519892 - DNA, 25 bp, Homo sapien
gtgactgcaggccactcgaggctgt

SEQ ID NO: 2519893 - DNA, 25 bp, Homo sapien
caggactattcctgacagcaaggag

SEQ ID NO: 2519894 - DNA, 25 bp, Homo sapien
gattcatacgaaagcctaaaggact

SEQ ID NO: 2519895 - DNA, 25 bp, Homo sapien
ggagggcgtggtctggtaggaacaa

SEQ ID NO: 2519896 - DNA, 25 bp, Homo sapien
gattcacgcttaggattcatacgaa

SEQ ID NO: 2519897 - DNA, 25 bp, Homo sapien
cagcttccatgcatctaacacagcc

SEQ ID NO: 2519898 - DNA, 25 bp, Homo sapien
aacagcttccatgcatctaacacag

SEQ ID NO: 2519899 - DNA, 25 bp, Homo sapien
caacagcttccatgcatctaacaca

SEQ ID NO: 2519900 - DNA, 25 bp, Homo sapien
acagcttccatgcatctaacacagc

SEQ ID NO: 2519901 - DNA, 25 bp, Homo sapien
tcagcagaagtctaaaaaacccagc

SEQ ID NO: 2519902 - DNA, 25 bp, Homo sapien
tatacactgaaagacccagagggcc

SEQ ID NO: 2519903 - DNA, 25 bp, Homo sapien
ccagcattccttgtttgggcgctga

SEQ ID NO: 2519904 - DNA, 25 bp, Homo sapien
cacgattcatgtagccaagaaggca

SEQ ID NO: 2519905 - DNA, 25 bp, Homo sapien
tcttgtgaggatgtgattctcagag

SEQ ID NO: 2519906 - DNA, 25 bp, Homo sapien
ttgtcaccacgagaggaatccttgc

SEQ ID NO: 2519907 - DNA, 25 bp, Homo sapien
cacagtccctttaataaaagagtgg

SEQ ID NO: 2519908 - DNA, 25 bp, Homo sapien
ggatctggatgctatcttgtgagga

SEQ ID NO: 2519909 - DNA, 25 bp, Homo sapien
gatagttaagtacctatgcctttgg

SEQ ID NO: 2519910 - DNA, 25 bp, Homo sapien
tcctggaactaccttccagaactac

SEQ ID NO: 2519911 - DNA, 25 bp, Homo sapien
cctttggtaacacggaaccatcctg

SEQ ID NO: 2519912 - DNA, 25 bp, Homo sapien
tacctttcaccaggcattttggtaa

SEQ ID NO: 2519913 - DNA, 25 bp, Homo sapien
aggcatcgacaagactgaggctgga

SEQ ID NO: 2519914 - DNA, 25 bp, Homo sapien
gagcctgtgcctgacttaaccctag

SEQ ID NO: 2519915 - DNA, 25 bp, Homo sapien
gactttggtgtaggaatcaactcca

SEQ ID NO: 2519916 - DNA, 25 bp, Homo sapien
tataatacagtgtggctcattccag

SEQ ID NO: 2519917 - DNA, 25 bp, Homo sapien
tgtaattgacaagctagagccccag

SEQ ID NO: 2519918 - DNA, 25 bp, Homo sapien
ctgtaattgacaagctagagcccca

SEQ ID NO: 2519919 - DNA, 25 bp, Homo sapien
gtaattgacaagctagagccccagg

SEQ ID NO: 2519920 - DNA, 25 bp, Homo sapien
tccaacagacatacacgtgcacaaa

SEQ ID NO: 2519921 - DNA, 25 bp, Homo sapien
cttctaccctctcaactctatttct

SEQ ID NO: 2519922 - DNA, 25 bp, Homo sapien
ataaacttctaccctctcaactcta

SEQ ID NO: 2519923 - DNA, 25 bp, Homo sapien
aacttctaccctctcaactctattt

SEQ ID NO: 2519924 - DNA, 25 bp, Homo sapien
atctgtaagggcgcaatagaattaa

SEQ ID NO: 2519925 - DNA, 25 bp, Homo sapien
tctgtaagggcgcaatagaattaac

SEQ ID NO: 2519926 - DNA, 25 bp, Homo sapien
catgtcttgcaggtcaggaatccag

SEQ ID NO: 2519927 - DNA, 25 bp, Homo sapien
gtggttatggttcagtgtctcccat

SEQ ID NO: 2519928 - DNA, 25 bp, Homo sapien
tgtcttgcaggtcaggaatccaggg

SEQ ID NO: 2519929 - DNA, 25 bp, Homo sapien
ttcatgtcttgcaggtcaggaatcc

SEQ ID NO: 2519930 - DNA, 25 bp, Homo sapien
gatggcagatcctctccgtgtgggc

SEQ ID NO: 2519931 - DNA, 25 bp, Homo sapien
ggcagatcctctccgtgtgggcctc

SEQ ID NO: 2519932 - DNA, 25 bp, Homo sapien
ctccgtgtgggcctctccacgggag

SEQ ID NO: 2519933 - DNA, 25 bp, Homo sapien
ctggcgatggcagatcctctccgtg

SEQ ID NO: 2519934 - DNA, 25 bp, Homo sapien
caagagacaattcttggatctcgcg

SEQ ID NO: 2519935 - DNA, 25 bp, Homo sapien
gacaattcttggatctcgcgtaaga

SEQ ID NO: 2519936 - DNA, 25 bp, Homo sapien
tcagtggtttcctcactatagtccc

SEQ ID NO: 2519937 - DNA, 25 bp, Homo sapien
agagacaattcttggatctcgcgta

SEQ ID NO: 2519938 - DNA, 25 bp, Homo sapien
taaatggggagcaatctccaggagc

SEQ ID NO: 2519939 - DNA, 25 bp, Homo sapien
ggagctgtggatcccgatttttcct

SEQ ID NO: 2519940 - DNA, 25 bp, Homo sapien
acgtgcaggctagatgatgctggca

SEQ ID NO: 2519941 - DNA, 25 bp, Homo sapien
gccaggagctgtggatcccgatttt

SEQ ID NO: 2519942 - DNA, 25 bp, Homo sapien
tttatcgcccagctgagagatggcc

SEQ ID NO: 2519943 - DNA, 25 bp, Homo sapien
tggaggagatgtactcaagcagcat

SEQ ID NO: 2519944 - DNA, 25 bp, Homo sapien
cagctgagagatggccagcttggag

SEQ ID NO: 2519945 - DNA, 25 bp, Homo sapien
ccagcttggaggagatgtactcaag

SEQ ID NO: 2519946 - DNA, 25 bp, Homo sapien
gggagaattcttctgcctgcagata

SEQ ID NO: 2519947 - DNA, 25 bp, Homo sapien
tatggagtaggttttgatggaccct

SEQ ID NO: 2519948 - DNA, 25 bp, Homo sapien
ttttgatggaccctgggagaattct

SEQ ID NO: 2519949 - DNA, 25 bp, Homo sapien
cattggctatggagtaggttttgat

SEQ ID NO: 2519950 - DNA, 25 bp, Homo sapien
ctctttccccttcttaacagtatgc

SEQ ID NO: 2519951 - DNA, 25 bp, Homo sapien
cttcttaacagtatgcagcagagga

SEQ ID NO: 2519952 - DNA, 25 bp, Homo sapien
tccccttcttaacagtatgcagcag

SEQ ID NO: 2519953 - DNA, 25 bp, Homo sapien
tttccccttcttaacagtatgcagc

SEQ ID NO: 2519954 - DNA, 25 bp, Homo sapien
ggaatgtgcccacgggtccttctgg

SEQ ID NO: 2519955 - DNA, 25 bp, Homo sapien
cccacgggtccttctggtgttgaca

SEQ ID NO: 2519956 - DNA, 25 bp, Homo sapien
caggaatgtgcccacgggtccttct

SEQ ID NO: 2519957 - DNA, 25 bp, Homo sapien
atgtgcccacgggtccttctggtgt

SEQ ID NO: 2519958 - DNA, 25 bp, Homo sapien
attcacccacatggggatacaggcc

SEQ ID NO: 2519959 - DNA, 25 bp, Homo sapien
cccagcccagaaggcaggatggctc

SEQ ID NO: 2519960 - DNA, 25 bp, Homo sapien
cattcacccacatggggatacaggc

SEQ ID NO: 2519961 - DNA, 25 bp, Homo sapien
ggcaggatggctcacattcacccac

SEQ ID NO: 2519962 - DNA, 25 bp, Homo sapien
tgagagcaagagcaagcctgcatat

SEQ ID NO: 2519963 - DNA, 25 bp, Homo sapien
tccagcaagcaaatgcttggatgag

SEQ ID NO: 2519964 - DNA, 25 bp, Homo sapien
ctggtcctcaatcctcaactccagc

SEQ ID NO: 2519965 - DNA, 25 bp, Homo sapien
gagcaagcctgcatatcccttctgc

SEQ ID NO: 2519966 - DNA, 25 bp, Homo sapien
cacccagaatcaagggatggtcctg

SEQ ID NO: 2519967 - DNA, 25 bp, Homo sapien
cagggcatccccaagaaccgtggat

SEQ ID NO: 2519968 - DNA, 25 bp, Homo sapien
catctgcagcttcagtatttgagct

SEQ ID NO: 2519969 - DNA, 25 bp, Homo sapien
gtcctgctcaaaggtaaactccagt

SEQ ID NO: 2519970 - DNA, 25 bp, Homo sapien
tgggcttgaacatatctgaggacac

SEQ ID NO: 2519971 - DNA, 25 bp, Homo sapien
gattcttttgggcttgaacatatct

SEQ ID NO: 2519972 - DNA, 25 bp, Homo sapien
tccaggtataagattcttttgggct

SEQ ID NO: 2519973 - DNA, 25 bp, Homo sapien
ctggggggtccaggtataagattct

SEQ ID NO: 2519974 - DNA, 25 bp, Homo sapien
caggaatcatcttgctcacctttct

SEQ ID NO: 2519975 - DNA, 25 bp, Homo sapien
gagaggccttaccaccatcaggaat

SEQ ID NO: 2519976 - DNA, 25 bp, Homo sapien
ttcccagactatgaggcacacacca

SEQ ID NO: 2519977 - DNA, 25 bp, Homo sapien
caactcagatgtcgcttctttggag

SEQ ID NO: 2519978 - DNA, 25 bp, Homo sapien
gtggccagtgggtacacatccaggg

SEQ ID NO: 2519979 - DNA, 25 bp, Homo sapien
acatgtggccagtgggtacacatcc

SEQ ID NO: 2519980 - DNA, 25 bp, Homo sapien
gccagtgggtacacatccagggacc

SEQ ID NO: 2519981 - DNA, 25 bp, Homo sapien
catgtggccagtgggtacacatcca

SEQ ID NO: 2519982 - DNA, 25 bp, Homo sapien
gcctggaattaacactgcctatgcg

SEQ ID NO: 2519983 - DNA, 25 bp, Homo sapien
taagcaggtcggcatcgcctggaat

SEQ ID NO: 2519984 - DNA, 25 bp, Homo sapien
gcctatgcggctgggaaagcatctc

SEQ ID NO: 2519985 - DNA, 25 bp, Homo sapien
catctctccagtgatgattgtagaa

SEQ ID NO: 2519986 - DNA, 25 bp, Homo sapien
gatgttgccagcagacggcatcttg

SEQ ID NO: 2519987 - DNA, 25 bp, Homo sapien
cggcatcttggcaatgggaaaggca

SEQ ID NO: 2519988 - DNA, 25 bp, Homo sapien
tgtgaggccagctgaccggcatttg

SEQ ID NO: 2519989 - DNA, 25 bp, Homo sapien
ccggcatttgccatgatcagtcata

SEQ ID NO: 2519990 - DNA, 25 bp, Homo sapien
gatctcacttgatccatgcattggg

SEQ ID NO: 2519991 - DNA, 25 bp, Homo sapien
catcccatatccgtgtctttgatct

SEQ ID NO: 2519992 - DNA, 25 bp, Homo sapien
ttgatctcacttgatccatgcattg

SEQ ID NO: 2519993 - DNA, 25 bp, Homo sapien
gtctttgatctcacttgatccatgc

SEQ ID NO: 2519994 - DNA, 25 bp, Homo sapien
ctggtaagctcacagattgcaaaat

SEQ ID NO: 2519995 - DNA, 25 bp, Homo sapien
gtcccaggcatagtcagtcaatcag

SEQ ID NO: 2519996 - DNA, 25 bp, Homo sapien
gaattgaaaaccatggagagcccct

SEQ ID NO: 2519997 - DNA, 25 bp, Homo sapien
gattcatactcagggactttgggca

SEQ ID NO: 2519998 - DNA, 25 bp, Homo sapien
ttcaacgtgcacacaatcagctggg

SEQ ID NO: 2519999 - DNA, 25 bp, Homo sapien
ggccactggaggctctccactggca

SEQ ID NO: 2520000 - DNA, 25 bp, Homo sapien
tggccactggaggctctccactggc

SEQ ID NO: 2520001 - DNA, 25 bp, Homo sapien
cttcaacaaccagcttccagactct

SEQ ID NO: 2520002 - DNA, 25 bp, Homo sapien
cctgtacactgaagagcagagaaag

SEQ ID NO: 2520003 - DNA, 25 bp, Homo sapien
tgagaattttgaatgtggcacgatg

SEQ ID NO: 2520004 - DNA, 25 bp, Homo sapien
tcaagtcagactctctctgaatggc

SEQ ID NO: 2520005 - DNA, 25 bp, Homo sapien
tgttttccatcctgtacactgaaga

SEQ ID NO: 2520006 - DNA, 25 bp, Homo sapien
ggaaccaagcacaccactttctgtg

SEQ ID NO: 2520007 - DNA, 25 bp, Homo sapien
caggaaccaagcacaccactttctg

SEQ ID NO: 2520008 - DNA, 25 bp, Homo sapien
aaccaagcacaccactttctgtgca

SEQ ID NO: 2520009 - DNA, 25 bp, Homo sapien
gggccaggaaccaagcacaccactt

SEQ ID NO: 2520010 - DNA, 25 bp, Homo sapien
gcttccaaataaagcccaggtgctt

SEQ ID NO: 2520011 - DNA, 25 bp, Homo sapien
cgcttccaaataaagcccaggtgct

SEQ ID NO: 2520012 - DNA, 25 bp, Homo sapien
cttccaaataaagcccaggtgcttt

SEQ ID NO: 2520013 - DNA, 25 bp, Homo sapien
ccttgtctgtaaaatggagctagcg

SEQ ID NO: 2520014 - DNA, 25 bp, Homo sapien
gtctgtaaaatggagctagcggtag

SEQ ID NO: 2520015 - DNA, 25 bp, Homo sapien
cttgtctgtaaaatggagctagcgg

SEQ ID NO: 2520016 - DNA, 25 bp, Homo sapien
tgtctgtaaaatggagctagcggta

SEQ ID NO: 2520017 - DNA, 25 bp, Homo sapien
gatttccatgggcaagagacccaga

SEQ ID NO: 2520018 - DNA, 25 bp, Homo sapien
ctttgaatcatatggtacaggtgcc

SEQ ID NO: 2520019 - DNA, 25 bp, Homo sapien
tatggccgggtttccaagctgtcat

SEQ ID NO: 2520020 - DNA, 25 bp, Homo sapien
gataaaccgcctacctaggtgggca

SEQ ID NO: 2520021 - DNA, 25 bp, Homo sapien
tatatgtcgtgggaatcaactcctc

SEQ ID NO: 2520022 - DNA, 25 bp, Homo sapien
cttgctgaatggtactcagatgtgc

SEQ ID NO: 2520023 - DNA, 25 bp, Homo sapien
tctggagaaagacgtcagggaatcc

SEQ ID NO: 2520024 - DNA, 25 bp, Homo sapien
ttaagtttttgtgcatcagtcgggt

SEQ ID NO: 2520025 - DNA, 25 bp, Homo sapien
tgggtgtaccttgctttacctaata

SEQ ID NO: 2520026 - DNA, 25 bp, Homo sapien
cagtttgacactggagcttttgagc

SEQ ID NO: 2520027 - DNA, 25 bp, Homo sapien
tatagaaaacccgactgatgcacaa

SEQ ID NO: 2520028 - DNA, 25 bp, Homo sapien
ggattccctgacgtctttctccaga

SEQ ID NO: 2520029 - DNA, 25 bp, Homo sapien
aagcttcccctactgaactggccaa

SEQ ID NO: 2520030 - DNA, 25 bp, Homo sapien
gctcaaaagctccagtgtcaaactg

SEQ ID NO: 2520031 - DNA, 25 bp, Homo sapien
tattaggtaaagcaaggtacaccca

SEQ ID NO: 2520032 - DNA, 25 bp, Homo sapien
aaatgaggagttgattcccacgaca

SEQ ID NO: 2520033 - DNA, 25 bp, Homo sapien
cctagtgactagtgacctgtgttgt

SEQ ID NO: 2520034 - DNA, 25 bp, Homo sapien
aatggcagatgctagtaattcacag

SEQ ID NO: 2520035 - DNA, 25 bp, Homo sapien
tgaggcacagaagcgaaacgagaac

SEQ ID NO: 2520036 - DNA, 25 bp, Homo sapien
gcctttcagtgctccctcatattga

SEQ ID NO: 2520037 - DNA, 25 bp, Homo sapien
gtgtgctgcgtgctcgcaaccacag

SEQ ID NO: 2520038 - DNA, 25 bp, Homo sapien
cagatggctcctcggctttagacag

SEQ ID NO: 2520039 - DNA, 25 bp, Homo sapien
tcaatatgagggagcactgaaaggc

SEQ ID NO: 2520040 - DNA, 25 bp, Homo sapien
tctgtggttgcgagcacgcagcaca

SEQ ID NO: 2520041 - DNA, 25 bp, Homo sapien
caacacaggtcactagtcactaggc

SEQ ID NO: 2520042 - DNA, 25 bp, Homo sapien
tgtctaaagccgaggagccatctgt

SEQ ID NO: 2520043 - DNA, 25 bp, Homo sapien
tgtccatccccagtgcactgctggg

SEQ ID NO: 2520044 - DNA, 25 bp, Homo sapien
tctgtgaattactagcatctgccat

SEQ ID NO: 2520045 - DNA, 25 bp, Homo sapien
aagatgtccaatgccgattttgcca

SEQ ID NO: 2520046 - DNA, 25 bp, Homo sapien
tgtccaatgccgattttgccaagct

SEQ ID NO: 2520047 - DNA, 25 bp, Homo sapien
caccgaggcacccaagatgtccaat

SEQ ID NO: 2520048 - DNA, 25 bp, Homo sapien
agcagccaccgaggcacccaagatg

SEQ ID NO: 2520049 - DNA, 25 bp, Homo sapien
aggctgagaacggccctgccgcggc

SEQ ID NO: 2520050 - DNA, 25 bp, Homo sapien
gtccaatgccgattttgccaagctg

SEQ ID NO: 2520051 - DNA, 25 bp, Homo sapien
gcttggcaaaatcggcattggacat

SEQ ID NO: 2520052 - DNA, 25 bp, Homo sapien
tggcaaaatcggcattggacatctt

SEQ ID NO: 2520053 - DNA, 25 bp, Homo sapien
gccgcggcagggccgttctcagcct

SEQ ID NO: 2520054 - DNA, 25 bp, Homo sapien
attggacatcttgggtgcctcggtg

SEQ ID NO: 2520055 - DNA, 25 bp, Homo sapien
cagcttggcaaaatcggcattggac

SEQ ID NO: 2520056 - DNA, 25 bp, Homo sapien
catcttgggtgcctcggtggctgct

SEQ ID NO: 2520057 - DNA, 25 bp, Homo sapien
gacgcagctgtctctactgcctcgt

SEQ ID NO: 2520058 - DNA, 25 bp, Homo sapien
acgcagctgtctctactgcctcgtg

SEQ ID NO: 2520059 - DNA, 25 bp, Homo sapien
gaaggacgcagctgtctctactgcc

SEQ ID NO: 2520060 - DNA, 25 bp, Homo sapien
ggacgcagctgtctctactgcctcg

SEQ ID NO: 2520061 - DNA, 25 bp, Homo sapien
aagggaaggacgcagctgtctctac

SEQ ID NO: 2520062 - DNA, 25 bp, Homo sapien
gtctctactgcctcgtgccctgcag

SEQ ID NO: 2520063 - DNA, 25 bp, Homo sapien
acgaggcagtagagacagctgcgtc

SEQ ID NO: 2520064 - DNA, 25 bp, Homo sapien
cacgaggcagtagagacagctgcgt

SEQ ID NO: 2520065 - DNA, 25 bp, Homo sapien
gtagagacagctgcgtccttccctt

SEQ ID NO: 2520066 - DNA, 25 bp, Homo sapien
tgcagggcacgaggcagtagagaca

SEQ ID NO: 2520067 - DNA, 25 bp, Homo sapien
ggcagtagagacagctgcgtccttc

SEQ ID NO: 2520068 - DNA, 25 bp, Homo sapien
cgaggcagtagagacagctgcgtcc

SEQ ID NO: 2520069 - DNA, 25 bp, Homo sapien
tagtgcaaacttcgtcctggctggc

SEQ ID NO: 2520070 - DNA, 25 bp, Homo sapien
ccagagcaggatgcaagcctaggca

SEQ ID NO: 2520071 - DNA, 25 bp, Homo sapien
taacccgggatgaattagcttcctg

SEQ ID NO: 2520072 - DNA, 25 bp, Homo sapien
tacccatgtgtgtgccagtctacgg

SEQ ID NO: 2520073 - DNA, 25 bp, Homo sapien
tgctcagggttgatctttgccaaaa

SEQ ID NO: 2520074 - DNA, 25 bp, Homo sapien
tggttccactggagcaaggcgtcca

SEQ ID NO: 2520075 - DNA, 25 bp, Homo sapien
tggtgccagccaggacgaagtttgc

SEQ ID NO: 2520076 - DNA, 25 bp, Homo sapien
taacaggaagctaattcatcccggg

SEQ ID NO: 2520077 - DNA, 25 bp, Homo sapien
cgtagactggcacacacatgggtat

SEQ ID NO: 2520078 - DNA, 25 bp, Homo sapien
taaattggccagtaccaggcagagg

SEQ ID NO: 2520079 - DNA, 25 bp, Homo sapien
ttttggcaaagatcaaccctgagca

SEQ ID NO: 2520080 - DNA, 25 bp, Homo sapien
tatgtggatcatagctagggccgta

SEQ ID NO: 2520081 - DNA, 25 bp, Homo sapien
tgcttttgccgcagacatacggagc

SEQ ID NO: 2520082 - DNA, 25 bp, Homo sapien
cccaggcgtcgcaggctgtgatgaa

SEQ ID NO: 2520083 - DNA, 25 bp, Homo sapien
atgaaaatgaatcccaggcgtcgca

SEQ ID NO: 2520084 - DNA, 25 bp, Homo sapien
ggtggccccatgcttttgccgcaga

SEQ ID NO: 2520085 - DNA, 25 bp, Homo sapien
gatggacggcatgactatcaaagag

SEQ ID NO: 2520086 - DNA, 25 bp, Homo sapien
gcctggcctacgtggagtatgaaaa

SEQ ID NO: 2520087 - DNA, 25 bp, Homo sapien
ttcatcacagcctgcgacgcctggg

SEQ ID NO: 2520088 - DNA, 25 bp, Homo sapien
gctccgtatgtctgcggcaaaagca

SEQ ID NO: 2520089 - DNA, 25 bp, Homo sapien
ttttcatactccacgtaggccaggc

SEQ ID NO: 2520090 - DNA, 25 bp, Homo sapien
tctctttgatagtcatgccgtccat

SEQ ID NO: 2520091 - DNA, 25 bp, Homo sapien
tgcgacgcctgggattcattttcat

SEQ ID NO: 2520092 - DNA, 25 bp, Homo sapien
tagtcatgccgtccatcttcatcac

SEQ ID NO: 2520093 - DNA, 25 bp, Homo sapien
acaagctgttcatctcaggcctgcc

SEQ ID NO: 2520094 - DNA, 25 bp, Homo sapien
aaggctcatggcaccgtgaaggacc

SEQ ID NO: 2520095 - DNA, 25 bp, Homo sapien
caccaaccgggctggcaaaccaaag

SEQ ID NO: 2520096 - DNA, 25 bp, Homo sapien
gagaaacacaagctgttcatctcag

SEQ ID NO: 2520097 - DNA, 25 bp, Homo sapien
tcaggctggtcaccaaccgggctgg

SEQ ID NO: 2520098 - DNA, 25 bp, Homo sapien
tagaagaaatctgtaaggctcatgg

SEQ ID NO: 2520099 - DNA, 25 bp, Homo sapien
ggtccttcacggtgccatgagcctt

SEQ ID NO: 2520100 - DNA, 25 bp, Homo sapien
gccatgagccttacagatttcttct

SEQ ID NO: 2520101 - DNA, 25 bp, Homo sapien
caggcctgagatgaacagcttgtgt

SEQ ID NO: 2520102 - DNA, 25 bp, Homo sapien
ccagcccggttggtgaccagcctga

SEQ ID NO: 2520103 - DNA, 25 bp, Homo sapien
ggcaggcctgagatgaacagcttgt

SEQ ID NO: 2520104 - DNA, 25 bp, Homo sapien
ctttggtttgccagcccggttggtg

SEQ ID NO: 2520105 - DNA, 25 bp, Homo sapien
cagcatcaccgtctttgtcagcaac

SEQ ID NO: 2520106 - DNA, 25 bp, Homo sapien
gaggtggtccagatccgacccatct

SEQ ID NO: 2520107 - DNA, 25 bp, Homo sapien
gatttccgaggttactgctacgtgg

SEQ ID NO: 2520108 - DNA, 25 bp, Homo sapien
gaagctcaggccactcttcgaggcc

SEQ ID NO: 2520109 - DNA, 25 bp, Homo sapien
tcaggcactggagatggaccggaaa

SEQ ID NO: 2520110 - DNA, 25 bp, Homo sapien
tgccctacagcatgcaggagccgga

SEQ ID NO: 2520111 - DNA, 25 bp, Homo sapien
aagagtggcctgagcttcgtgtccg

SEQ ID NO: 2520112 - DNA, 25 bp, Homo sapien
gaagatgggtcggatctggaccacc

SEQ ID NO: 2520113 - DNA, 25 bp, Homo sapien
tgtccggctcctgcatgctgtaggg

SEQ ID NO: 2520114 - DNA, 25 bp, Homo sapien
cggaaatccccacggttgctgaaga

SEQ ID NO: 2520115 - DNA, 25 bp, Homo sapien
taaactccacgtagcagtaacctcg

SEQ ID NO: 2520116 - DNA, 25 bp, Homo sapien
ggttgctgacaaagacggtgatgct

SEQ ID NO: 2520117 - DNA, 25 bp, Homo sapien
agcagccttccaaacgcagaagggt

SEQ ID NO: 2520118 - DNA, 25 bp, Homo sapien
cgcagaagggtcgagaacagcatcc

SEQ ID NO: 2520119 - DNA, 25 bp, Homo sapien
agaagggtcgagaacagcatccctg

SEQ ID NO: 2520120 - DNA, 25 bp, Homo sapien
aaacgcagaagggtcgagaacagca

SEQ ID NO: 2520121 - DNA, 25 bp, Homo sapien
tccaaacgcagaagggtcgagaaca

SEQ ID NO: 2520122 - DNA, 25 bp, Homo sapien
ccttccaaacgcagaagggtcgaga

SEQ ID NO: 2520123 - DNA, 25 bp, Homo sapien
tctcgacccttctgcgtttggaagg

SEQ ID NO: 2520124 - DNA, 25 bp, Homo sapien
gacccttctgcgtttggaaggctgc

SEQ ID NO: 2520125 - DNA, 25 bp, Homo sapien
gatgctgttctcgacccttctgcgt

SEQ ID NO: 2520126 - DNA, 25 bp, Homo sapien
tgttctcgacccttctgcgtttgga

SEQ ID NO: 2520127 - DNA, 25 bp, Homo sapien
ggatgctgttctcgacccttctgcg

SEQ ID NO: 2520128 - DNA, 25 bp, Homo sapien
cagggatgctgttctcgacccttct

SEQ ID NO: 2520129 - DNA, 25 bp, Homo sapien
aacggaaaagagctcgggctgagaa

SEQ ID NO: 2520130 - DNA, 25 bp, Homo sapien
aacaacggaaaagagctcgggctga

SEQ ID NO: 2520131 - DNA, 25 bp, Homo sapien
aggcccagagaagcgcggagcagat

SEQ ID NO: 2520132 - DNA, 25 bp, Homo sapien
aaaggctgaacaacggaaaagagct

SEQ ID NO: 2520133 - DNA, 25 bp, Homo sapien
gctgaacaacggaaaagagctcggg

SEQ ID NO: 2520134 - DNA, 25 bp, Homo sapien
tgaacaacggaaaagagctcgggct

SEQ ID NO: 2520135 - DNA, 25 bp, Homo sapien
gcccgagctcttttccgttgttcag

SEQ ID NO: 2520136 - DNA, 25 bp, Homo sapien
gagctcttttccgttgttcagcctt

SEQ ID NO: 2520137 - DNA, 25 bp, Homo sapien
tctcagcccgagctcttttccgttg

SEQ ID NO: 2520138 - DNA, 25 bp, Homo sapien
atctgctccgcgcttctctgggcct

SEQ ID NO: 2520139 - DNA, 25 bp, Homo sapien
tcagcccgagctcttttccgttgtt

SEQ ID NO: 2520140 - DNA, 25 bp, Homo sapien
ttctcagcccgagctcttttccgtt

SEQ ID NO: 2520141 - DNA, 25 bp, Homo sapien
cccgattagctcgtgtcaatgagca

SEQ ID NO: 2520142 - DNA, 25 bp, Homo sapien
aaactgaaacccgattagctcgtgt

SEQ ID NO: 2520143 - DNA, 25 bp, Homo sapien
agctcgtgtcaatgagcagagaatg

SEQ ID NO: 2520144 - DNA, 25 bp, Homo sapien
gattagctcgtgtcaatgagcagag

SEQ ID NO: 2520145 - DNA, 25 bp, Homo sapien
gaaacccgattagctcgtgtcaatg

SEQ ID NO: 2520146 - DNA, 25 bp, Homo sapien
tctttagaagattgggatatagctg

SEQ ID NO: 2520147 - DNA, 25 bp, Homo sapien
tgctcattgacacgagctaatcggg

SEQ ID NO: 2520148 - DNA, 25 bp, Homo sapien
acagctatatcccaatcttctaaag

SEQ ID NO: 2520149 - DNA, 25 bp, Homo sapien
gacacgagctaatcgggtttcagtt

SEQ ID NO: 2520150 - DNA, 25 bp, Homo sapien
gctatatcccaatcttctaaagaac

SEQ ID NO: 2520151 - DNA, 25 bp, Homo sapien
cattgacacgagctaatcgggtttc

SEQ ID NO: 2520152 - DNA, 25 bp, Homo sapien
cattctctgctcattgacacgagct

SEQ ID NO: 2520153 - DNA, 25 bp, Homo sapien
gggcaggatccctcctttgagagtc

SEQ ID NO: 2520154 - DNA, 25 bp, Homo sapien
ggattttgggtatggacccctcaga

SEQ ID NO: 2520155 - DNA, 25 bp, Homo sapien
gagtcactgtgctctagtacaacat

SEQ ID NO: 2520156 - DNA, 25 bp, Homo sapien
ccttcagtgttagctagaaccaata

SEQ ID NO: 2520157 - DNA, 25 bp, Homo sapien
aaatgtctcttgatgggcaggatcc

SEQ ID NO: 2520158 - DNA, 25 bp, Homo sapien
tacaacatctatccaacaaaggagc

SEQ ID NO: 2520159 - DNA, 25 bp, Homo sapien
gagatctctcccatcaaacaataag

SEQ ID NO: 2520160 - DNA, 25 bp, Homo sapien
gatgttgtactagagcacagtgact

SEQ ID NO: 2520161 - DNA, 25 bp, Homo sapien
ggatcctgcccatcaagagacattt

SEQ ID NO: 2520162 - DNA, 25 bp, Homo sapien
tttaacaagggatgcaaaggacaca

SEQ ID NO: 2520163 - DNA, 25 bp, Homo sapien
tattggttctagctaacactgaagg

SEQ ID NO: 2520164 - DNA, 25 bp, Homo sapien
gactctcaaaggagggatcctgccc

SEQ ID NO: 2520165 - DNA, 25 bp, Homo sapien
agtgcaccagtgactacccagagca

SEQ ID NO: 2520166 - DNA, 25 bp, Homo sapien
tctgcgaagtgttactcaccatgga

SEQ ID NO: 2520167 - DNA, 25 bp, Homo sapien
tacccagagcacgtctgcgaagtgt

SEQ ID NO: 2520168 - DNA, 25 bp, Homo sapien
gggccgtccagtgcaccagtgacta

SEQ ID NO: 2520169 - DNA, 25 bp, Homo sapien
agctcatggtgacacccagcactgc

SEQ ID NO: 2520170 - DNA, 25 bp, Homo sapien
agcactgccggaaggctctgcaccg

SEQ ID NO: 2520171 - DNA, 25 bp, Homo sapien
tccggcagtgctgggtgtcaccatg

SEQ ID NO: 2520172 - DNA, 25 bp, Homo sapien
taacacttcgcagacgtgctctggg

SEQ ID NO: 2520173 - DNA, 25 bp, Homo sapien
gtagtcactggtgcactggacggcc

SEQ ID NO: 2520174 - DNA, 25 bp, Homo sapien
tccatggtgagtaacacttcgcaga

SEQ ID NO: 2520175 - DNA, 25 bp, Homo sapien
cggtgcagagccttccggcagtgct

SEQ ID NO: 2520176 - DNA, 25 bp, Homo sapien
cgtgctctgggtagtcactggtgca

SEQ ID NO: 2520177 - DNA, 25 bp, Homo sapien
gaagagtgagtttctacctgggaga

SEQ ID NO: 2520178 - DNA, 25 bp, Homo sapien
ttcagggaaatacttcgtaggtgac

SEQ ID NO: 2520179 - DNA, 25 bp, Homo sapien
gctggttgcagatcacaatatcagg

SEQ ID NO: 2520180 - DNA, 25 bp, Homo sapien
cgtaggtgactgtagagactctgga

SEQ ID NO: 2520181 - DNA, 25 bp, Homo sapien
ggagaagacggcctctcccttcgag

SEQ ID NO: 2520182 - DNA, 25 bp, Homo sapien
cagtagcccctacatggctgaggga

SEQ ID NO: 2520183 - DNA, 25 bp, Homo sapien
cctgatattgtgatctgcaaccagc

SEQ ID NO: 2520184 - DNA, 25 bp, Homo sapien
tcccaggtagaaactcactcttcag

SEQ ID NO: 2520185 - DNA, 25 bp, Homo sapien
tcacctacgaagtatttccctgaag

SEQ ID NO: 2520186 - DNA, 25 bp, Homo sapien
gcactcgaagggagaggccgtcttc

SEQ ID NO: 2520187 - DNA, 25 bp, Homo sapien
gagaagaccttagctttcagatcta

SEQ ID NO: 2520188 - DNA, 25 bp, Homo sapien
tccagagtctctacagtcacctacg

SEQ ID NO: 2520189 - DNA, 25 bp, Homo sapien
tacactgttgcataacagttatgat

SEQ ID NO: 2520190 - DNA, 25 bp, Homo sapien
gaattgtgtagctgttgtgattagc

SEQ ID NO: 2520191 - DNA, 25 bp, Homo sapien
tgtgattagcagtgtacaaaaagga

SEQ ID NO: 2520192 - DNA, 25 bp, Homo sapien
ctctgaatttattctgagcatcata

SEQ ID NO: 2520193 - DNA, 25 bp, Homo sapien
tacgtggatcttactttgagaacca

SEQ ID NO: 2520194 - DNA, 25 bp, Homo sapien
cagttatgattagcagaattgtgta

SEQ ID NO: 2520195 - DNA, 25 bp, Homo sapien
taagatccacgtacccctgaggatc

SEQ ID NO: 2520196 - DNA, 25 bp, Homo sapien
tacacaattctgctaatcataactg

SEQ ID NO: 2520197 - DNA, 25 bp, Homo sapien
tatgatgctcagaataaattcagag

SEQ ID NO: 2520198 - DNA, 25 bp, Homo sapien
actggttctcaaagtaagatccacg

SEQ ID NO: 2520199 - DNA, 25 bp, Homo sapien
taatcacaacagctacacaattctg

SEQ ID NO: 2520200 - DNA, 25 bp, Homo sapien
tgtacactgctaatcacaacagcta

SEQ ID NO: 2520201 - DNA, 25 bp, Homo sapien
cccagagtggcagcctcactttgtt

SEQ ID NO: 2520202 - DNA, 25 bp, Homo sapien
tctgagtaactgaccgtggtttgtc

SEQ ID NO: 2520203 - DNA, 25 bp, Homo sapien
ttattctgacctaggagaagacagc

SEQ ID NO: 2520204 - DNA, 25 bp, Homo sapien
catgcagctcttccaatgttgacat

SEQ ID NO: 2520205 - DNA, 25 bp, Homo sapien
gacagagtctgttacagtaataccc

SEQ ID NO: 2520206 - DNA, 25 bp, Homo sapien
tgccaaatacccaggtctgagtaac

SEQ ID NO: 2520207 - DNA, 25 bp, Homo sapien
aaaatgacttgattagcttgcaact

SEQ ID NO: 2520208 - DNA, 25 bp, Homo sapien
agttgcaagctaatcaagtcatttt

SEQ ID NO: 2520209 - DNA, 25 bp, Homo sapien
gacaaaccacggtcagttactcaga

SEQ ID NO: 2520210 - DNA, 25 bp, Homo sapien
aacaaagtgaggctgccactctggg

SEQ ID NO: 2520211 - DNA, 25 bp, Homo sapien
tatgtcaacattggaagagctgcat

SEQ ID NO: 2520212 - DNA, 25 bp, Homo sapien
tctcctaggtcagaataatgtgcaa

SEQ ID NO: 2520213 - DNA, 25 bp, Homo sapien
gacagaatcagtaacagacatgaga

SEQ ID NO: 2520214 - DNA, 25 bp, Homo sapien
gttactcagacctgggtatttggca

SEQ ID NO: 2520215 - DNA, 25 bp, Homo sapien
caggatccattttccactcttaaaa

SEQ ID NO: 2520216 - DNA, 25 bp, Homo sapien
taaagcttgttgaatatccccctag

SEQ ID NO: 2520217 - DNA, 25 bp, Homo sapien
tccggctaaacgtgacagtttctta

SEQ ID NO: 2520218 - DNA, 25 bp, Homo sapien
cattttccactcttaaaattggagg

SEQ ID NO: 2520219 - DNA, 25 bp, Homo sapien
ccatatccggctaaacgtgacagtt

SEQ ID NO: 2520220 - DNA, 25 bp, Homo sapien
acagtttcttacaatcccaccccag

SEQ ID NO: 2520221 - DNA, 25 bp, Homo sapien
tctagggggatattcaacaagcttt

SEQ ID NO: 2520222 - DNA, 25 bp, Homo sapien
ttttaagagtggaaaatggatcctg

SEQ ID NO: 2520223 - DNA, 25 bp, Homo sapien
ttaagagtggaaaatggatcctgag

SEQ ID NO: 2520224 - DNA, 25 bp, Homo sapien
aactgtcacgtttagccggatatgg

SEQ ID NO: 2520225 - DNA, 25 bp, Homo sapien
taagaaactgtcacgtttagccgga

SEQ ID NO: 2520226 - DNA, 25 bp, Homo sapien
cctccaattttaagagtggaaaatg

SEQ ID NO: 2520227 - DNA, 25 bp, Homo sapien
caacatgtggctagagtattacaac

SEQ ID NO: 2520228 - DNA, 25 bp, Homo sapien
caagtacgccaacatgtggctagag

SEQ ID NO: 2520229 - DNA, 25 bp, Homo sapien
gaaatgccaagtacgccaacatgtg

SEQ ID NO: 2520230 - DNA, 25 bp, Homo sapien
actctgggatagcatcatgaccaga

SEQ ID NO: 2520231 - DNA, 25 bp, Homo sapien
ggctagagtattacaacctggaaag

SEQ ID NO: 2520232 - DNA, 25 bp, Homo sapien
atcatgaccagaggaaatgccaagt

SEQ ID NO: 2520233 - DNA, 25 bp, Homo sapien
tctggtcatgatgctatcccagagt

SEQ ID NO: 2520234 - DNA, 25 bp, Homo sapien
cacatgttggcgtacttggcatttc

SEQ ID NO: 2520235 - DNA, 25 bp, Homo sapien
tccaggttgtaatactctagccaca

SEQ ID NO: 2520236 - DNA, 25 bp, Homo sapien
acttggcatttcctctggtcatgat

SEQ ID NO: 2520237 - DNA, 25 bp, Homo sapien
ctttccaggttgtaatactctagcc

SEQ ID NO: 2520238 - DNA, 25 bp, Homo sapien
taatactctagccacatgttggcgt

SEQ ID NO: 2520239 - DNA, 25 bp, Homo sapien
acgtcataaggttcaggtctcctaa

SEQ ID NO: 2520240 - DNA, 25 bp, Homo sapien
tctcctaacagcctgctgatgcact

SEQ ID NO: 2520241 - DNA, 25 bp, Homo sapien
tcgacgtcataaggttcaggtctcc

SEQ ID NO: 2520242 - DNA, 25 bp, Homo sapien
ctaacagcctgctgatgcactttag

SEQ ID NO: 2520243 - DNA, 25 bp, Homo sapien
gttgtatgatgggtgtcgacgtcat

SEQ ID NO: 2520244 - DNA, 25 bp, Homo sapien
ggtgtcgacgtcataaggttcaggt

SEQ ID NO: 2520245 - DNA, 25 bp, Homo sapien
atgacgtcgacacccatcatacaac

SEQ ID NO: 2520246 - DNA, 25 bp, Homo sapien
ggagacctgaaccttatgacgtcga

SEQ ID NO: 2520247 - DNA, 25 bp, Homo sapien
acctgaaccttatgacgtcgacacc

SEQ ID NO: 2520248 - DNA, 25 bp, Homo sapien
ttaggagacctgaaccttatgacgt

SEQ ID NO: 2520249 - DNA, 25 bp, Homo sapien
ctaaagtgcatcagcaggctgttag

SEQ ID NO: 2520250 - DNA, 25 bp, Homo sapien
aagtgcatcagcaggctgttaggag

SEQ ID NO: 2520251 - DNA, 25 bp, Homo sapien
gcgtgattatgcagaactgggctag

SEQ ID NO: 2520252 - DNA, 25 bp, Homo sapien
agagtggtgatccaagctgcgtgat

SEQ ID NO: 2520253 - DNA, 25 bp, Homo sapien
gctgcgtgattatgcagaactgggc

SEQ ID NO: 2520254 - DNA, 25 bp, Homo sapien
gatccaagctgcgtgattatgcaga

SEQ ID NO: 2520255 - DNA, 25 bp, Homo sapien
tccaagctgcgtgattatgcagaac

SEQ ID NO: 2520256 - DNA, 25 bp, Homo sapien
ggtgatccaagctgcgtgattatgc

SEQ ID NO: 2520257 - DNA, 25 bp, Homo sapien
tagcccagttctgcataatcacgca

SEQ ID NO: 2520258 - DNA, 25 bp, Homo sapien
cataatcacgcagcttggatcacca

SEQ ID NO: 2520259 - DNA, 25 bp, Homo sapien
taatcacgcagcttggatcaccact

SEQ ID NO: 2520260 - DNA, 25 bp, Homo sapien
gttctgcataatcacgcagcttgga

SEQ ID NO: 2520261 - DNA, 25 bp, Homo sapien
ctagcccagttctgcataatcacgc

SEQ ID NO: 2520262 - DNA, 25 bp, Homo sapien
tgcataatcacgcagcttggatcac

SEQ ID NO: 2520263 - DNA, 25 bp, Homo sapien
ccttgtctgtactatttcctggttg

SEQ ID NO: 2520264 - DNA, 25 bp, Homo sapien
cctggttgatgtaccttttcagcca

SEQ ID NO: 2520265 - DNA, 25 bp, Homo sapien
agcgactatctgtctccaagttcct

SEQ ID NO: 2520266 - DNA, 25 bp, Homo sapien
tgtctgtactatttcctggttgatg

SEQ ID NO: 2520267 - DNA, 25 bp, Homo sapien
cagccagcgactatctgtctccaag

SEQ ID NO: 2520268 - DNA, 25 bp, Homo sapien
taccttttcagccagcgactatctg

SEQ ID NO: 2520269 - DNA, 25 bp, Homo sapien
gagacagatagtcgctggctgaaaa

SEQ ID NO: 2520270 - DNA, 25 bp, Homo sapien
tcaaccaggaaatagtacagacaag

SEQ ID NO: 2520271 - DNA, 25 bp, Homo sapien
aggaacttggagacagatagtcgct

SEQ ID NO: 2520272 - DNA, 25 bp, Homo sapien
aacttggagacagatagtcgctggc

SEQ ID NO: 2520273 - DNA, 25 bp, Homo sapien
ggctgaaaaggtacatcaaccagga

SEQ ID NO: 2520274 - DNA, 25 bp, Homo sapien
cagatagtcgctggctgaaaaggta

SEQ ID NO: 2520275 - DNA, 25 bp, Homo sapien
tactcgtgccttggagtatctgaag

SEQ ID NO: 2520276 - DNA, 25 bp, Homo sapien
ggccgcctttactcgtgccttggag

SEQ ID NO: 2520277 - DNA, 25 bp, Homo sapien
tgagggccgcctttactcgtgcctt

SEQ ID NO: 2520278 - DNA, 25 bp, Homo sapien
ctcgtgccttggagtatctgaagca

SEQ ID NO: 2520279 - DNA, 25 bp, Homo sapien
gttgagggccgcctttactcgtgcc

SEQ ID NO: 2520280 - DNA, 25 bp, Homo sapien
cgcctttactcgtgccttggagtat

SEQ ID NO: 2520281 - DNA, 25 bp, Homo sapien
tgcttcagatactccaaggcacgag

SEQ ID NO: 2520282 - DNA, 25 bp, Homo sapien
tactccaaggcacgagtaaaggcgg

SEQ ID NO: 2520283 - DNA, 25 bp, Homo sapien
gatactccaaggcacgagtaaaggc

SEQ ID NO: 2520284 - DNA, 25 bp, Homo sapien
aggcacgagtaaaggcggccctcaa

SEQ ID NO: 2520285 - DNA, 25 bp, Homo sapien
tcagatactccaaggcacgagtaaa

SEQ ID NO: 2520286 - DNA, 25 bp, Homo sapien
ctccaaggcacgagtaaaggcggcc

SEQ ID NO: 2520287 - DNA, 25 bp, Homo sapien
gtaatcgtttatactggctcctgcc

SEQ ID NO: 2520288 - DNA, 25 bp, Homo sapien
gattgggcaaatgatgtagactagg

SEQ ID NO: 2520289 - DNA, 25 bp, Homo sapien
gagatgtcccagttccccagataca

SEQ ID NO: 2520290 - DNA, 25 bp, Homo sapien
ccccagatacattgtgattgggcaa

SEQ ID NO: 2520291 - DNA, 25 bp, Homo sapien
aatacaacttttggcgagatgtccc

SEQ ID NO: 2520292 - DNA, 25 bp, Homo sapien
caagtcatgatgtggattgtaaagc

SEQ ID NO: 2520293 - DNA, 25 bp, Homo sapien
cctctgtgggatcctttgccccttc

SEQ ID NO: 2520294 - DNA, 25 bp, Homo sapien
tcttgaaataagtctgctgtgtttt

SEQ ID NO: 2520295 - DNA, 25 bp, Homo sapien
acttcttgaaataagtctgctgtgt

SEQ ID NO: 2520296 - DNA, 25 bp, Homo sapien
acctctgtgggatcctttgcccctt

SEQ ID NO: 2520297 - DNA, 25 bp, Homo sapien
cttgaaataagtctgctgtgtttta

SEQ ID NO: 2520298 - DNA, 25 bp, Homo sapien
ataagtctgctgtgttttagaaaaa

SEQ ID NO: 2520299 - DNA, 25 bp, Homo sapien
aaggggcaaaggatcccacagaggt

SEQ ID NO: 2520300 - DNA, 25 bp, Homo sapien
taaaacacagcagacttatttcaag

SEQ ID NO: 2520301 - DNA, 25 bp, Homo sapien
acacagcagacttatttcaagaagt

SEQ ID NO: 2520302 - DNA, 25 bp, Homo sapien
tttttctaaaacacagcagacttat

SEQ ID NO: 2520303 - DNA, 25 bp, Homo sapien
aaaacacagcagacttatttcaaga

SEQ ID NO: 2520304 - DNA, 25 bp, Homo sapien
gaaggggcaaaggatcccacagagg

SEQ ID NO: 2520305 - DNA, 25 bp, Homo sapien
ggaactgggacatctcgccaaaagt

SEQ ID NO: 2520306 - DNA, 25 bp, Homo sapien
gctttacaatccacatcatgacttg

SEQ ID NO: 2520307 - DNA, 25 bp, Homo sapien
tacctagtctacatcatttgcccaa

SEQ ID NO: 2520308 - DNA, 25 bp, Homo sapien
atgagagctaagactaaaaaggctg

SEQ ID NO: 2520309 - DNA, 25 bp, Homo sapien
catttgcccaatcacaatgtatctg

SEQ ID NO: 2520310 - DNA, 25 bp, Homo sapien
ggcaggagccagtataaacgattac

SEQ ID NO: 2520311 - DNA, 25 bp, Homo sapien
tggcaggcataccttgattacctga

SEQ ID NO: 2520312 - DNA, 25 bp, Homo sapien
ggagatttggcaggcataccttgat

SEQ ID NO: 2520313 - DNA, 25 bp, Homo sapien
tttgaatgccggcttcatccaggcc

SEQ ID NO: 2520314 - DNA, 25 bp, Homo sapien
gaaagctttgaatgccggcttcatc

SEQ ID NO: 2520315 - DNA, 25 bp, Homo sapien
tatgtggagatttggcaggcatacc

SEQ ID NO: 2520316 - DNA, 25 bp, Homo sapien
gatttggcaggcataccttgattac

SEQ ID NO: 2520317 - DNA, 25 bp, Homo sapien
ggcctggatgaagccggcattcaaa

SEQ ID NO: 2520318 - DNA, 25 bp, Homo sapien
gatgaagccggcattcaaagctttc

SEQ ID NO: 2520319 - DNA, 25 bp, Homo sapien
ggtaatcaaggtatgcctgccaaat

SEQ ID NO: 2520320 - DNA, 25 bp, Homo sapien
ggtatgcctgccaaatctccacata

SEQ ID NO: 2520321 - DNA, 25 bp, Homo sapien
tcaggtaatcaaggtatgcctgcca

SEQ ID NO: 2520322 - DNA, 25 bp, Homo sapien
caaggtatgcctgccaaatctccac

SEQ ID NO: 2520323 - DNA, 25 bp, Homo sapien
ggaacttttcttgcagggcgtcttg

SEQ ID NO: 2520324 - DNA, 25 bp, Homo sapien
ggcttcttagagctttttaacatgc

SEQ ID NO: 2520325 - DNA, 25 bp, Homo sapien
tctttgggttatggagtgtagtgac

SEQ ID NO: 2520326 - DNA, 25 bp, Homo sapien
gtcttcaacattcctgtctagctca

SEQ ID NO: 2520327 - DNA, 25 bp, Homo sapien
cacagtctgtagagtgctgtagcaa

SEQ ID NO: 2520328 - DNA, 25 bp, Homo sapien
gatgaactggttatatttgtggctt

SEQ ID NO: 2520329 - DNA, 25 bp, Homo sapien
gaagttgctacagcactctacagac

SEQ ID NO: 2520330 - DNA, 25 bp, Homo sapien
caagacgccctgcaagaaaagttcc

SEQ ID NO: 2520331 - DNA, 25 bp, Homo sapien
taagaagccacaaatataaccagtt

SEQ ID NO: 2520332 - DNA, 25 bp, Homo sapien
tgtcactacactccataacccaaag

SEQ ID NO: 2520333 - DNA, 25 bp, Homo sapien
gcatgttaaaaagctctaagaagcc

SEQ ID NO: 2520334 - DNA, 25 bp, Homo sapien
tgagctagacaggaatgttgaagac

SEQ ID NO: 2520335 - DNA, 25 bp, Homo sapien
acagttgccttatggagtcggtacc

SEQ ID NO: 2520336 - DNA, 25 bp, Homo sapien
tgccttatggagtcggtacctcttg

SEQ ID NO: 2520337 - DNA, 25 bp, Homo sapien
tggagtcggtacctcttggccatgg

SEQ ID NO: 2520338 - DNA, 25 bp, Homo sapien
gttgccttatggagtcggtacctct

SEQ ID NO: 2520339 - DNA, 25 bp, Homo sapien
gagagacatggagttgatcatcaag

SEQ ID NO: 2520340 - DNA, 25 bp, Homo sapien
ttatggagtcggtacctcttggcca

SEQ ID NO: 2520341 - DNA, 25 bp, Homo sapien
tggccaagaggtaccgactccataa

SEQ ID NO: 2520342 - DNA, 25 bp, Homo sapien
cttgatgatcaactccatgtctctc

SEQ ID NO: 2520343 - DNA, 25 bp, Homo sapien
caagaggtaccgactccataaggca

SEQ ID NO: 2520344 - DNA, 25 bp, Homo sapien
ccatggccaagaggtaccgactcca

SEQ ID NO: 2520345 - DNA, 25 bp, Homo sapien
gaggtaccgactccataaggcaact

SEQ ID NO: 2520346 - DNA, 25 bp, Homo sapien
ggtaccgactccataaggcaactgt

SEQ ID NO: 2520347 - DNA, 25 bp, Homo sapien
aggatttggttttatctgtacataa

SEQ ID NO: 2520348 - DNA, 25 bp, Homo sapien
ttatgtacagataaaaccaaatcct

SEQ ID NO: 2520349 - DNA, 25 bp, Homo sapien
tcgacaactgaaagtaaaggatttg

SEQ ID NO: 2520350 - DNA, 25 bp, Homo sapien
gatcgacaactgaaagtaaaggatt

SEQ ID NO: 2520351 - DNA, 25 bp, Homo sapien
aaggatttggttttatctgtacata

SEQ ID NO: 2520352 - DNA, 25 bp, Homo sapien
cgacaactgaaagtaaaggatttgg

SEQ ID NO: 2520353 - DNA, 25 bp, Homo sapien
atcgacaactgaaagtaaaggattt

SEQ ID NO: 2520354 - DNA, 25 bp, Homo sapien
aggatttggttttatctgtacataa

SEQ ID NO: 2520355 - DNA, 25 bp, Homo sapien
aatcctttactttcagttgtcgatc

SEQ ID NO: 2520356 - DNA, 25 bp, Homo sapien
ccaaatcctttactttcagttgtcg

SEQ ID NO: 2520357 - DNA, 25 bp, Homo sapien
ttatgtacagataaaaccaaatcct

SEQ ID NO: 2520358 - DNA, 25 bp, Homo sapien
caaatcctttactttcagttgtcga

SEQ ID NO: 2520359 - DNA, 25 bp, Homo sapien
tatgtacagataaaaccaaatcctt

SEQ ID NO: 2520360 - DNA, 25 bp, Homo sapien
aaatcctttactttcagttgtcgat

SEQ ID NO: 2520361 - DNA, 25 bp, Homo sapien
gaactgccttgtcccagacttatgg

SEQ ID NO: 2520362 - DNA, 25 bp, Homo sapien
gtcccagacttatggatccgttaca

SEQ ID NO: 2520363 - DNA, 25 bp, Homo sapien
gcgccctggtcgagaactgccttgt

SEQ ID NO: 2520364 - DNA, 25 bp, Homo sapien
tgaaaattggcgatcctgctcgcat

SEQ ID NO: 2520365 - DNA, 25 bp, Homo sapien
agttgatctttgagcgcgccctggt

SEQ ID NO: 2520366 - DNA, 25 bp, Homo sapien
cctgctcgcattcagttgatctttg

SEQ ID NO: 2520367 - DNA, 25 bp, Homo sapien
tgtaacggatccataagtctgggac

SEQ ID NO: 2520368 - DNA, 25 bp, Homo sapien
caaagatcaactgaatgcgagcagg

SEQ ID NO: 2520369 - DNA, 25 bp, Homo sapien
tgcgagcaggatcgccaattttcat

SEQ ID NO: 2520370 - DNA, 25 bp, Homo sapien
acaaggcagttctcgaccagggcgc

SEQ ID NO: 2520371 - DNA, 25 bp, Homo sapien
ccagggcgcgctcaaagatcaactg

SEQ ID NO: 2520372 - DNA, 25 bp, Homo sapien
ccataagtctgggacaaggcagttc

SEQ ID NO: 2520373 - DNA, 25 bp, Homo sapien
ttttcacgtggattggccattcaaa

SEQ ID NO: 2520374 - DNA, 25 bp, Homo sapien
agagttctcgttgcttgtgccaatc

SEQ ID NO: 2520375 - DNA, 25 bp, Homo sapien
tgttttccaggttatcagtttgcac

SEQ ID NO: 2520376 - DNA, 25 bp, Homo sapien
cgtacttaggaatgactttgctgga

SEQ ID NO: 2520377 - DNA, 25 bp, Homo sapien
ggagcagcgccactctgaacattct

SEQ ID NO: 2520378 - DNA, 25 bp, Homo sapien
agatcagcctggcagcgtagcacaa

SEQ ID NO: 2520379 - DNA, 25 bp, Homo sapien
gaatgttcagagtggcgctgctcct

SEQ ID NO: 2520380 - DNA, 25 bp, Homo sapien
gattggcacaagcaacgagaactct

SEQ ID NO: 2520381 - DNA, 25 bp, Homo sapien
gcagtgaaaacaaatgcaccggagt

SEQ ID NO: 2520382 - DNA, 25 bp, Homo sapien
tccagcaaagtcattcctaagtacg

SEQ ID NO: 2520383 - DNA, 25 bp, Homo sapien
gcagtgcaaactgataacctggaaa

SEQ ID NO: 2520384 - DNA, 25 bp, Homo sapien
ggttgtgctacgctgccaggctgat

SEQ ID NO: 2520385 - DNA, 25 bp, Homo sapien
gcccctctccgattgcctcctcctc

SEQ ID NO: 2520386 - DNA, 25 bp, Homo sapien
cccctctccgattgcctcctcctcc

SEQ ID NO: 2520387 - DNA, 25 bp, Homo sapien
gaggaggaggcaatcggagaggggc

SEQ ID NO: 2520388 - DNA, 25 bp, Homo sapien
ggaggaggaggcaatcggagagggg

SEQ ID NO: 2520389 - DNA, 25 bp, Homo sapien
acattgccagtaccttagaagtctc

SEQ ID NO: 2520390 - DNA, 25 bp, Homo sapien
ttagaagtctcctatgtgcccctct

SEQ ID NO: 2520391 - DNA, 25 bp, Homo sapien
atgtgcccctctccgattgcctcct

SEQ ID NO: 2520392 - DNA, 25 bp, Homo sapien
tagaacattgccagtaccttagaag

SEQ ID NO: 2520393 - DNA, 25 bp, Homo sapien
gccagtaccttagaagtctcctatg

SEQ ID NO: 2520394 - DNA, 25 bp, Homo sapien
taagaaatagaacattgccagtacc

SEQ ID NO: 2520395 - DNA, 25 bp, Homo sapien
taggagacttctaaggtactggcaa

SEQ ID NO: 2520396 - DNA, 25 bp, Homo sapien
gggcacataggagacttctaaggta

SEQ ID NO: 2520397 - DNA, 25 bp, Homo sapien
tactggcaatgttctatttcttaac

SEQ ID NO: 2520398 - DNA, 25 bp, Homo sapien
cataggagacttctaaggtactggc

SEQ ID NO: 2520399 - DNA, 25 bp, Homo sapien
agagggaggaggaggcaatcggaga

SEQ ID NO: 2520400 - DNA, 25 bp, Homo sapien
gagacttctaaggtactggcaatgt

SEQ ID NO: 2520401 - DNA, 25 bp, Homo sapien
ccaataccagagtcagtaattcaga

SEQ ID NO: 2520402 - DNA, 25 bp, Homo sapien
ggtcagaagacccaataccagagtc

SEQ ID NO: 2520403 - DNA, 25 bp, Homo sapien
tcagaactataacaaagcactacag

SEQ ID NO: 2520404 - DNA, 25 bp, Homo sapien
gaatggtcagaagacccaataccag

SEQ ID NO: 2520405 - DNA, 25 bp, Homo sapien
tcagaagacccaataccagagtcag

SEQ ID NO: 2520406 - DNA, 25 bp, Homo sapien
gaagacccaataccagagtcagtaa

SEQ ID NO: 2520407 - DNA, 25 bp, Homo sapien
tggtattgggtcttctgaccattct

SEQ ID NO: 2520408 - DNA, 25 bp, Homo sapien
gctgtagtgctttgttatagttctg

SEQ ID NO: 2520409 - DNA, 25 bp, Homo sapien
tctgaattactgactctggtattgg

SEQ ID NO: 2520410 - DNA, 25 bp, Homo sapien
gactctggtattgggtcttctgacc

SEQ ID NO: 2520411 - DNA, 25 bp, Homo sapien
tactgactctggtattgggtcttct

SEQ ID NO: 2520412 - DNA, 25 bp, Homo sapien
gaattactgactctggtattgggtc

SEQ ID NO: 2520413 - DNA, 25 bp, Homo sapien
tcttttccggcgacagttggcgatc

SEQ ID NO: 2520414 - DNA, 25 bp, Homo sapien
cgacagttggcgatcccactctatg

SEQ ID NO: 2520415 - DNA, 25 bp, Homo sapien
ttttccggcgacagttggcgatccc

SEQ ID NO: 2520416 - DNA, 25 bp, Homo sapien
aagtccacagtcttttccggcgaca

SEQ ID NO: 2520417 - DNA, 25 bp, Homo sapien
tccacagtcttttccggcgacagtt

SEQ ID NO: 2520418 - DNA, 25 bp, Homo sapien
gcgacagttggcgatcccactctat

SEQ ID NO: 2520419 - DNA, 25 bp, Homo sapien
agtgggatcgccaactgtcgccgga

SEQ ID NO: 2520420 - DNA, 25 bp, Homo sapien
catagagtgggatcgccaactgtcg

SEQ ID NO: 2520421 - DNA, 25 bp, Homo sapien
actgtcgccggaaaagactgtggac

SEQ ID NO: 2520422 - DNA, 25 bp, Homo sapien
tgtcgccggaaaagactgtggactt

SEQ ID NO: 2520423 - DNA, 25 bp, Homo sapien
atcgccaactgtcgccggaaaagac

SEQ ID NO: 2520424 - DNA, 25 bp, Homo sapien
caactgtcgccggaaaagactgtgg

SEQ ID NO: 2520425 - DNA, 25 bp, Homo sapien
ccgggaacaaacctttgattcacag

SEQ ID NO: 2520426 - DNA, 25 bp, Homo sapien
tagctggcttcctttccccttttga

SEQ ID NO: 2520427 - DNA, 25 bp, Homo sapien
tgaccgggaacaaacctttgattca

SEQ ID NO: 2520428 - DNA, 25 bp, Homo sapien
tcaaaaggggaaaggaagccagcta

SEQ ID NO: 2520429 - DNA, 25 bp, Homo sapien
tgaatcaaaggtttgttcccggtca

SEQ ID NO: 2520430 - DNA, 25 bp, Homo sapien
ctgtgaatcaaaggtttgttcccgg

SEQ ID NO: 2520431 - DNA, 25 bp, Homo sapien
gagtatggccagtactcagttggtg

SEQ ID NO: 2520432 - DNA, 25 bp, Homo sapien
cctaacatttggctagagtatggcc

SEQ ID NO: 2520433 - DNA, 25 bp, Homo sapien
gaaaggtggccttgagaaagttcgc

SEQ ID NO: 2520434 - DNA, 25 bp, Homo sapien
cgctccgtgtttgaaagggctctct

SEQ ID NO: 2520435 - DNA, 25 bp, Homo sapien
gagaaagttcgctccgtgtttgaaa

SEQ ID NO: 2520436 - DNA, 25 bp, Homo sapien
tactcagttggtgggattggtcaga

SEQ ID NO: 2520437 - DNA, 25 bp, Homo sapien
gcttaccgagagtttgaaagtgcga

SEQ ID NO: 2520438 - DNA, 25 bp, Homo sapien
cgtctgttggtttacatatgaccaa

SEQ ID NO: 2520439 - DNA, 25 bp, Homo sapien
gaaagtgcgattgtggaagctgctc

SEQ ID NO: 2520440 - DNA, 25 bp, Homo sapien
aaggactcgccctctgggaggctta

SEQ ID NO: 2520441 - DNA, 25 bp, Homo sapien
tatgaccaaaggactcgccctctgg

SEQ ID NO: 2520442 - DNA, 25 bp, Homo sapien
agggctctctcgtctgttggtttac

SEQ ID NO: 2520443 - DNA, 25 bp, Homo sapien
gagcagcttccacaatcgcactttc

SEQ ID NO: 2520444 - DNA, 25 bp, Homo sapien
tgtaaaccaacagacgagagagccc

SEQ ID NO: 2520445 - DNA, 25 bp, Homo sapien
ggtcatatgtaaaccaacagacgag

SEQ ID NO: 2520446 - DNA, 25 bp, Homo sapien
ccagagggcgagtcctttggtcata

SEQ ID NO: 2520447 - DNA, 25 bp, Homo sapien
taagcctcccagagggcgagtcctt

SEQ ID NO: 2520448 - DNA, 25 bp, Homo sapien
gcactttcaaactctcggtaagcct

SEQ ID NO: 2520449 - DNA, 25 bp, Homo sapien
caaacacggagcgaactttctcaag

SEQ ID NO: 2520450 - DNA, 25 bp, Homo sapien
tttctgaccaatcccaccaactgag

SEQ ID NO: 2520451 - DNA, 25 bp, Homo sapien
gcgaactttctcaaggccacctttc

SEQ ID NO: 2520452 - DNA, 25 bp, Homo sapien
gagagccctttcaaacacggagcga

SEQ ID NO: 2520453 - DNA, 25 bp, Homo sapien
caccaactgagtactggccatactc

SEQ ID NO: 2520454 - DNA, 25 bp, Homo sapien
ggccatactctagccaaatgttagg

SEQ ID NO: 2520455 - DNA, 25 bp, Homo sapien
gcctggacagagagcacgtgtatga

SEQ ID NO: 2520456 - DNA, 25 bp, Homo sapien
ctggacagagagcacgtgtatgacc

SEQ ID NO: 2520457 - DNA, 25 bp, Homo sapien
cctggacagagagcacgtgtatgac

SEQ ID NO: 2520458 - DNA, 25 bp, Homo sapien
tggcctggacagagagcacgtgtat

SEQ ID NO: 2520459 - DNA, 25 bp, Homo sapien
tggacagagagcacgtgtatgacct

SEQ ID NO: 2520460 - DNA, 25 bp, Homo sapien
ggcctggacagagagcacgtgtatg

SEQ ID NO: 2520461 - DNA, 25 bp, Homo sapien
gtcatacacgtgctctctgtccagg

SEQ ID NO: 2520462 - DNA, 25 bp, Homo sapien
aggtcatacacgtgctctctgtcca

SEQ ID NO: 2520463 - DNA, 25 bp, Homo sapien
atacacgtgctctctgtccaggcca

SEQ ID NO: 2520464 - DNA, 25 bp, Homo sapien
tcatacacgtgctctctgtccaggc

SEQ ID NO: 2520465 - DNA, 25 bp, Homo sapien
ggtcatacacgtgctctctgtccag

SEQ ID NO: 2520466 - DNA, 25 bp, Homo sapien
agtgaaatctttcccttgactgaag

SEQ ID NO: 2520467 - DNA, 25 bp, Homo sapien
ggatggcccgccagaagatgagtga

SEQ ID NO: 2520468 - DNA, 25 bp, Homo sapien
catgtggacttgatcagactgctca

SEQ ID NO: 2520469 - DNA, 25 bp, Homo sapien
tggacttgatcagactgctcaggct

SEQ ID NO: 2520470 - DNA, 25 bp, Homo sapien
tgatcagactgctcaggctggaagg

SEQ ID NO: 2520471 - DNA, 25 bp, Homo sapien
gtctatgactacaactgccatgtgg

SEQ ID NO: 2520472 - DNA, 25 bp, Homo sapien
cttcagtcaagggaaagatttcact

SEQ ID NO: 2520473 - DNA, 25 bp, Homo sapien
cactcatcttctggcgggccatcct

SEQ ID NO: 2520474 - DNA, 25 bp, Homo sapien
ccttccagcctgagcagtctgatca

SEQ ID NO: 2520475 - DNA, 25 bp, Homo sapien
tgagcagtctgatcaagtccacatg

SEQ ID NO: 2520476 - DNA, 25 bp, Homo sapien
catcctcaccttggtaagctcccct

SEQ ID NO: 2520477 - DNA, 25 bp, Homo sapien
ccacatggcagttgtagtcatagac

SEQ ID NO: 2520478 - DNA, 25 bp, Homo sapien
acttctcaaacatcccaaactgcgg

SEQ ID NO: 2520479 - DNA, 25 bp, Homo sapien
gtacaagagtttctcaccagatgca

SEQ ID NO: 2520480 - DNA, 25 bp, Homo sapien
tcagcctatcgtgtgatcatcggat

SEQ ID NO: 2520481 - DNA, 25 bp, Homo sapien
aacacttgtgtcctgatctggtcca

SEQ ID NO: 2520482 - DNA, 25 bp, Homo sapien
tgctccgcaagcacactctattgag

SEQ ID NO: 2520483 - DNA, 25 bp, Homo sapien
tcatgatagcccatttaagaaccag

SEQ ID NO: 2520484 - DNA, 25 bp, Homo sapien
taaatgggctatcatgacacactga

SEQ ID NO: 2520485 - DNA, 25 bp, Homo sapien
tggaccagatcaggacacaagtgtt

SEQ ID NO: 2520486 - DNA, 25 bp, Homo sapien
tcaatagagtgtgcttgcggagcac

SEQ ID NO: 2520487 - DNA, 25 bp, Homo sapien
tcacacaaagtaaccgcagtttggg

SEQ ID NO: 2520488 - DNA, 25 bp, Homo sapien
tccgatgatcacacgataggctgaa

SEQ ID NO: 2520489 - DNA, 25 bp, Homo sapien
tgcatctggtgagaaactcttgtac

SEQ ID NO: 2520490 - DNA, 25 bp, Homo sapien
taactgcttttatggcggagcataa

SEQ ID NO: 2520491 - DNA, 25 bp, Homo sapien
gcttttatggcggagcataatgatg

SEQ ID NO: 2520492 - DNA, 25 bp, Homo sapien
ttttatggcggagcataatgatgaa

SEQ ID NO: 2520493 - DNA, 25 bp, Homo sapien
aactgcttttatggcggagcataat

SEQ ID NO: 2520494 - DNA, 25 bp, Homo sapien
tgtaactgcttttatggcggagcat

SEQ ID NO: 2520495 - DNA, 25 bp, Homo sapien
gtaactgcttttatggcggagcata

SEQ ID NO: 2520496 - DNA, 25 bp, Homo sapien
attatgctccgccataaaagcagtt

SEQ ID NO: 2520497 - DNA, 25 bp, Homo sapien
tcatcattatgctccgccataaaag

SEQ ID NO: 2520498 - DNA, 25 bp, Homo sapien
catcattatgctccgccataaaagc

SEQ ID NO: 2520499 - DNA, 25 bp, Homo sapien
tatgctccgccataaaagcagttac

SEQ ID NO: 2520500 - DNA, 25 bp, Homo sapien
ttcatcattatgctccgccataaaa

SEQ ID NO: 2520501 - DNA, 25 bp, Homo sapien
ttatgctccgccataaaagcagtta

SEQ ID NO: 2520502 - DNA, 25 bp, Homo sapien
taagaaaaatattgaccgcgatggt

SEQ ID NO: 2520503 - DNA, 25 bp, Homo sapien
gaaggaagccctgttatctatcccc

SEQ ID NO: 2520504 - DNA, 25 bp, Homo sapien
tgacggcgatgatgaaacttgtggt

SEQ ID NO: 2520505 - DNA, 25 bp, Homo sapien
caaacccgcttttcgtgacagtagc

SEQ ID NO: 2520506 - DNA, 25 bp, Homo sapien
gataaagccgccaaggctgcaaacc

SEQ ID NO: 2520507 - DNA, 25 bp, Homo sapien
taaccacacgtccaacagtagaaat

SEQ ID NO: 2520508 - DNA, 25 bp, Homo sapien
gcctcagttctagctgttcaactct

SEQ ID NO: 2520509 - DNA, 25 bp, Homo sapien
tgttcaactcttgtatgtgcttgta

SEQ ID NO: 2520510 - DNA, 25 bp, Homo sapien
tctcgacttccttatctgcagattg

SEQ ID NO: 2520511 - DNA, 25 bp, Homo sapien
ctagctgttcaactcttgtatgtgc

SEQ ID NO: 2520512 - DNA, 25 bp, Homo sapien
cgacttccttatctgcagattggga

SEQ ID NO: 2520513 - DNA, 25 bp, Homo sapien
ccttatctgcagattgggagcaaca

SEQ ID NO: 2520514 - DNA, 25 bp, Homo sapien
tcccaatctgcagataaggaagtcg

SEQ ID NO: 2520515 - DNA, 25 bp, Homo sapien
gcacatacaagagttgaacagctag

SEQ ID NO: 2520516 - DNA, 25 bp, Homo sapien
agagttgaacagctagaactgaggc

SEQ ID NO: 2520517 - DNA, 25 bp, Homo sapien
tacaagcacatacaagagttgaaca

SEQ ID NO: 2520518 - DNA, 25 bp, Homo sapien
caatctgcagataaggaagtcgaga

SEQ ID NO: 2520519 - DNA, 25 bp, Homo sapien
tgttgctcccaatctgcagataagg

SEQ ID NO: 2520520 - DNA, 25 bp, Homo sapien
gaaactttcctccacgagcctcagt

SEQ ID NO: 2520521 - DNA, 25 bp, Homo sapien
caggagctactgtcacgaaaagcgg

SEQ ID NO: 2520522 - DNA, 25 bp, Homo sapien
tcacagggtcgtggcgaggattcaa

SEQ ID NO: 2520523 - DNA, 25 bp, Homo sapien
taagcactcaaatccgacaggagct

SEQ ID NO: 2520524 - DNA, 25 bp, Homo sapien
cgaaaagcgggtttgcagccttggc

SEQ ID NO: 2520525 - DNA, 25 bp, Homo sapien
gataacgtttgcaaggcaatgggca

SEQ ID NO: 2520526 - DNA, 25 bp, Homo sapien
cccgggggtgggcagcgggcatctt

SEQ ID NO: 2520527 - DNA, 25 bp, Homo sapien
cgggggtgggcagcgggcatcttcc

SEQ ID NO: 2520528 - DNA, 25 bp, Homo sapien
tccagtctttcaggtcctcgggtcc

SEQ ID NO: 2520529 - DNA, 25 bp, Homo sapien
cttccagtctttcaggtcctcgggt

SEQ ID NO: 2520530 - DNA, 25 bp, Homo sapien
ccgggggtgggcagcgggcatcttc

SEQ ID NO: 2520531 - DNA, 25 bp, Homo sapien
ttccagtctttcaggtcctcgggtc

SEQ ID NO: 2520532 - DNA, 25 bp, Homo sapien
gaagatgcccgctgcccacccccgg

SEQ ID NO: 2520533 - DNA, 25 bp, Homo sapien
ggaagatgcccgctgcccacccccg

SEQ ID NO: 2520534 - DNA, 25 bp, Homo sapien
acccgaggacctgaaagactggaag

SEQ ID NO: 2520535 - DNA, 25 bp, Homo sapien
gacccgaggacctgaaagactggaa

SEQ ID NO: 2520536 - DNA, 25 bp, Homo sapien
ggacccgaggacctgaaagactgga

SEQ ID NO: 2520537 - DNA, 25 bp, Homo sapien
aagatgcccgctgcccacccccggg

SEQ ID NO: 2520538 - DNA, 25 bp, Homo sapien
agcgggcatcttccagtctttcagg

SEQ ID NO: 2520539 - DNA, 25 bp, Homo sapien
tccagtctttcaggtcctcgggtcc

SEQ ID NO: 2520540 - DNA, 25 bp, Homo sapien
cttccagtctttcaggtcctcgggt

SEQ ID NO: 2520541 - DNA, 25 bp, Homo sapien
aggtcctcgggtccccatgtcctgg

SEQ ID NO: 2520542 - DNA, 25 bp, Homo sapien
tgggcagcgggcatcttccagtctt

SEQ ID NO: 2520543 - DNA, 25 bp, Homo sapien
tctttcaggtcctcgggtccccatg

SEQ ID NO: 2520544 - DNA, 25 bp, Homo sapien
gacctgaaagactggaagatgcccg

SEQ ID NO: 2520545 - DNA, 25 bp, Homo sapien
cctgaaagactggaagatgcccgct

SEQ ID NO: 2520546 - DNA, 25 bp, Homo sapien
ccaggacatggggacccgaggacct

SEQ ID NO: 2520547 - DNA, 25 bp, Homo sapien
acccgaggacctgaaagactggaag

SEQ ID NO: 2520548 - DNA, 25 bp, Homo sapien
aagactggaagatgcccgctgccca

SEQ ID NO: 2520549 - DNA, 25 bp, Homo sapien
ggacccgaggacctgaaagactgga

SEQ ID NO: 2520550 - DNA, 25 bp, Homo sapien
gccatggcttcctccgcggagagct

SEQ ID NO: 2520551 - DNA, 25 bp, Homo sapien
cgaaacctcggcttcagaacccgag

SEQ ID NO: 2520552 - DNA, 25 bp, Homo sapien
tgtggccgctgcgacatacaagacc

SEQ ID NO: 2520553 - DNA, 25 bp, Homo sapien
gcgactgcggccgaaacctcggctt

SEQ ID NO: 2520554 - DNA, 25 bp, Homo sapien
gatgagtacgccatggcttcctccg

SEQ ID NO: 2520555 - DNA, 25 bp, Homo sapien
agtacgagtgggaatatgacgaaga

SEQ ID NO: 2520556 - DNA, 25 bp, Homo sapien
agctctccgcggaggaagccatggc

SEQ ID NO: 2520557 - DNA, 25 bp, Homo sapien
gaagccatggcgtactcatccccat

SEQ ID NO: 2520558 - DNA, 25 bp, Homo sapien
tcttcgtcatattcccactcgtact

SEQ ID NO: 2520559 - DNA, 25 bp, Homo sapien
tgaagccgaggtttcggccgcagtc

SEQ ID NO: 2520560 - DNA, 25 bp, Homo sapien
cacgctggccccatggtcttgtatg

SEQ ID NO: 2520561 - DNA, 25 bp, Homo sapien
ggtcttgtatgtcgcagcggccaca

SEQ ID NO: 2520562 - DNA, 25 bp, Homo sapien
tcctgttatctaagttcccagtttc

SEQ ID NO: 2520563 - DNA, 25 bp, Homo sapien
cgggaagacccgagagtcattagaa

SEQ ID NO: 2520564 - DNA, 25 bp, Homo sapien
cagtttctctttcaatggcaagaaa

SEQ ID NO: 2520565 - DNA, 25 bp, Homo sapien
tatatctggtgggagcttttacagg

SEQ ID NO: 2520566 - DNA, 25 bp, Homo sapien
agttgtgacggaacgcatgccatta

SEQ ID NO: 2520567 - DNA, 25 bp, Homo sapien
agcttctgcctcagcgggtcttcgg

SEQ ID NO: 2520568 - DNA, 25 bp, Homo sapien
gctcccaccagatataaaaactcat

SEQ ID NO: 2520569 - DNA, 25 bp, Homo sapien
cgaagacccgctgaggcagaagctg

SEQ ID NO: 2520570 - DNA, 25 bp, Homo sapien
tataccctgtaaaagctcccaccag

SEQ ID NO: 2520571 - DNA, 25 bp, Homo sapien
aatgactctcgggtcttcccgcggc

SEQ ID NO: 2520572 - DNA, 25 bp, Homo sapien
taatggcatgcgttccgtcacaact

SEQ ID NO: 2520573 - DNA, 25 bp, Homo sapien
gaaactgggaacttagataacagga

SEQ ID NO: 2520574 - DNA, 25 bp, Homo sapien
gatcggcgtgcttactactaaccag

SEQ ID NO: 2520575 - DNA, 25 bp, Homo sapien
tacaaaggatactgtgcgtggagtc

SEQ ID NO: 2520576 - DNA, 25 bp, Homo sapien
taaacaacagttaccgctcatcggg

SEQ ID NO: 2520577 - DNA, 25 bp, Homo sapien
ttttaaattcgccaacagcccagga

SEQ ID NO: 2520578 - DNA, 25 bp, Homo sapien
gatgacaggctgtgaaatacggtaa

SEQ ID NO: 2520579 - DNA, 25 bp, Homo sapien
tgtgttttgttgagggtacaccctg

SEQ ID NO: 2520580 - DNA, 25 bp, Homo sapien
catagcattgttccctgtgtaacag

SEQ ID NO: 2520581 - DNA, 25 bp, Homo sapien
tgaagaaacttggactagcagcctt

SEQ ID NO: 2520582 - DNA, 25 bp, Homo sapien
tccagctcattagccactgaatggg

SEQ ID NO: 2520583 - DNA, 25 bp, Homo sapien
gctgtggttccgcaattgcctccag

SEQ ID NO: 2520584 - DNA, 25 bp, Homo sapien
gatgctaggtttaaaacatttggct

SEQ ID NO: 2520585 - DNA, 25 bp, Homo sapien
gggaagattgtggatgctaggttta

SEQ ID NO: 2520586 - DNA, 25 bp, Homo sapien
aaacacagatatcgccaaggagctc

SEQ ID NO: 2520587 - DNA, 25 bp, Homo sapien
gtggaggaagccttgactatcaaaa

SEQ ID NO: 2520588 - DNA, 25 bp, Homo sapien
tcaaaaacacagatatcgccaagga

SEQ ID NO: 2520589 - DNA, 25 bp, Homo sapien
gccttcctcccgtgaaactgcactg

SEQ ID NO: 2520590 - DNA, 25 bp, Homo sapien
tggtcaaactctcgatcactagagg

SEQ ID NO: 2520591 - DNA, 25 bp, Homo sapien
taaggaactagcctgggatcacaga

SEQ ID NO: 2520592 - DNA, 25 bp, Homo sapien
gatcacccgcaggagtaactcagct

SEQ ID NO: 2520593 - DNA, 25 bp, Homo sapien
gccgccctggctgattacaaattga

SEQ ID NO: 2520594 - DNA, 25 bp, Homo sapien
tgcagtcaccttagatgttcagaag

SEQ ID NO: 2520595 - DNA, 25 bp, Homo sapien
cagtcaccttagatgttcagaagcc

SEQ ID NO: 2520596 - DNA, 25 bp, Homo sapien
gtgcagtcaccttagatgttcagaa

SEQ ID NO: 2520597 - DNA, 25 bp, Homo sapien
gcagtcaccttagatgttcagaagc

SEQ ID NO: 2520598 - DNA, 25 bp, Homo sapien
ggcacgtgccatcgtgccaagataa

SEQ ID NO: 2520599 - DNA, 25 bp, Homo sapien
gcacgtgccatcgtgccaagataat

SEQ ID NO: 2520600 - DNA, 25 bp, Homo sapien
tatgatcacctcaaggcttccaagc

SEQ ID NO: 2520601 - DNA, 25 bp, Homo sapien
tgcatccatgcaggagacaccctga

SEQ ID NO: 2520602 - DNA, 25 bp, Homo sapien
acaataaaatgaggtgggccgcaga

SEQ ID NO: 2520603 - DNA, 25 bp, Homo sapien
gggccgcagattaccatgactaata

SEQ ID NO: 2520604 - DNA, 25 bp, Homo sapien
agggctgttatttgctttgcagctg

SEQ ID NO: 2520605 - DNA, 25 bp, Homo sapien
cagcagggctgttatttgctttgca

SEQ ID NO: 2520606 - DNA, 25 bp, Homo sapien
gtcactacagggccccagtgggtgg

SEQ ID NO: 2520607 - DNA, 25 bp, Homo sapien
tggtagacatcgcaggggcctcagt

SEQ ID NO: 2520608 - DNA, 25 bp, Homo sapien
gggctgggatcctcaactttagtac

SEQ ID NO: 2520609 - DNA, 25 bp, Homo sapien
tgatgttggatgagtcacttgaccc

SEQ ID NO: 2520610 - DNA, 25 bp, Homo sapien
cacaagagacctgattcctgcccag

SEQ ID NO: 2520611 - DNA, 25 bp, Homo sapien
taaggtttgacactccaactactgg

SEQ ID NO: 2520612 - DNA, 25 bp, Homo sapien
gtagttgggacaacacgcacgccac

SEQ ID NO: 2520613 - DNA, 25 bp, Homo sapien
agttgggacaacacgcacgccactg

SEQ ID NO: 2520614 - DNA, 25 bp, Homo sapien
tagttgggacaacacgcacgccact

SEQ ID NO: 2520615 - DNA, 25 bp, Homo sapien
cagagggttaattaatcccaacagg

SEQ ID NO: 2520616 - DNA, 25 bp, Homo sapien
aggagcagattggatgattctaggc

SEQ ID NO: 2520617 - DNA, 25 bp, Homo sapien
ccagagggttaattaatcccaacag

SEQ ID NO: 2520618 - DNA, 25 bp, Homo sapien
cgaatattgtggacacaggctgcca

SEQ ID NO: 2520619 - DNA, 25 bp, Homo sapien
gctccctgtcgaggactgacgaata

SEQ ID NO: 2520620 - DNA, 25 bp, Homo sapien
gcagtagcgggatgagaaactcacc

SEQ ID NO: 2520621 - DNA, 25 bp, Homo sapien
caggctgccagacaatgtgtgagca

SEQ ID NO: 2520622 - DNA, 25 bp, Homo sapien
tgcatgttgccttacgaacgctggg

SEQ ID NO: 2520623 - DNA, 25 bp, Homo sapien
tcaaaatactgcttcacgccaggct

SEQ ID NO: 2520624 - DNA, 25 bp, Homo sapien
aatcttgtttccgtagagtgcctcg

SEQ ID NO: 2520625 - DNA, 25 bp, Homo sapien
gaaatgctcatttagggacctgtcg

SEQ ID NO: 2520626 - DNA, 25 bp, Homo sapien
tttctgcctgctgtagaatcagcac

SEQ ID NO: 2520627 - DNA, 25 bp, Homo sapien
ggctgtcacagggacacgtgccctc

SEQ ID NO: 2520628 - DNA, 25 bp, Homo sapien
tgtgctgtaggatgtagccctttgg

SEQ ID NO: 2520629 - DNA, 25 bp, Homo sapien
gaaggatgatggcacttggtaagat

SEQ ID NO: 2520630 - DNA, 25 bp, Homo sapien
ctgggctaacaagagagacccttcc

SEQ ID NO: 2520631 - DNA, 25 bp, Homo sapien
cctgggctaacaagagagacccttc

SEQ ID NO: 2520632 - DNA, 25 bp, Homo sapien
catgtccctggacttcctggtcccc

SEQ ID NO: 2520633 - DNA, 25 bp, Homo sapien
tcaaggacccctgagcacggctcct

SEQ ID NO: 2520634 - DNA, 25 bp, Homo sapien
ctgcgcctctggtgtctccactggg

SEQ ID NO: 2520635 - DNA, 25 bp, Homo sapien
actgggaccccatgtccctggactt

SEQ ID NO: 2520636 - DNA, 25 bp, Homo sapien
gccaagatgtcggcctggagctgcc

SEQ ID NO: 2520637 - DNA, 25 bp, Homo sapien
ctgggtggcggccaagatgtcggcc

SEQ ID NO: 2520638 - DNA, 25 bp, Homo sapien
ccgggaggaatccagggcttcctcg

SEQ ID NO: 2520639 - DNA, 25 bp, Homo sapien
gccgggaggaatccagggcttcctc

SEQ ID NO: 2520640 - DNA, 25 bp, Homo sapien
cggcccggtcactctggtccacgta

SEQ ID NO: 2520641 - DNA, 25 bp, Homo sapien
cccggcccggtcactctggtccacg

SEQ ID NO: 2520642 - DNA, 25 bp, Homo sapien
ccggcccggtcactctggtccacgt

SEQ ID NO: 2520643 - DNA, 25 bp, Homo sapien
ggcccggtcactctggtccacgtac

SEQ ID NO: 2520644 - DNA, 25 bp, Homo sapien
cactatcccatccaggaagttggtg

SEQ ID NO: 2520645 - DNA, 25 bp, Homo sapien
cgatgggtaataggccgaggccttc

SEQ ID NO: 2520646 - DNA, 25 bp, Homo sapien
tactggcggaagaagtccactatcc

SEQ ID NO: 2520647 - DNA, 25 bp, Homo sapien
accgcggcacagacgatgaacatca

SEQ ID NO: 2520648 - DNA, 25 bp, Homo sapien
ggcgtcggtagcaggcacagacccc

SEQ ID NO: 2520649 - DNA, 25 bp, Homo sapien
gggcgtcggtagcaggcacagaccc

SEQ ID NO: 2520650 - DNA, 25 bp, Homo sapien
gcgtcggtagcaggcacagacccca

SEQ ID NO: 2520651 - DNA, 25 bp, Homo sapien
cgggcgtcggtagcaggcacagacc

SEQ ID NO: 2520652 - DNA, 25 bp, Homo sapien
ttgtggtcccaggtaccgaggagac

SEQ ID NO: 2520653 - DNA, 25 bp, Homo sapien
ccaggtaccgaggagaccgaggtgg

SEQ ID NO: 2520654 - DNA, 25 bp, Homo sapien
acttgtggtcccaggtaccgaggag

SEQ ID NO: 2520655 - DNA, 25 bp, Homo sapien
tggtcccaggtaccgaggagaccga

SEQ ID NO: 2520656 - DNA, 25 bp, Homo sapien
acaggactgggtgctcccgccgaat

SEQ ID NO: 2520657 - DNA, 25 bp, Homo sapien
cagttccttggcgtacaggactggg

SEQ ID NO: 2520658 - DNA, 25 bp, Homo sapien
tgctcccgccgaatggagcgagagt

SEQ ID NO: 2520659 - DNA, 25 bp, Homo sapien
gctggaagagagagtccgtgctggt

SEQ ID NO: 2520660 - DNA, 25 bp, Homo sapien
gtagcgctctgagagtccgctccag

SEQ ID NO: 2520661 - DNA, 25 bp, Homo sapien
tcctcgttcatcctaagagactcat

SEQ ID NO: 2520662 - DNA, 25 bp, Homo sapien
gactgcactactatggttcccaggg

SEQ ID NO: 2520663 - DNA, 25 bp, Homo sapien
catgttccacgttctctagttcggg

SEQ ID NO: 2520664 - DNA, 25 bp, Homo sapien
agcaggctgtgccgctcacttgtag

SEQ ID NO: 2520665 - DNA, 25 bp, Homo sapien
gcaggctgtgccgctcacttgtagc

SEQ ID NO: 2520666 - DNA, 25 bp, Homo sapien
gtgcccgccgtgcaattagccgccg

SEQ ID NO: 2520667 - DNA, 25 bp, Homo sapien
gccgtgcaattagccgccggggtcc

SEQ ID NO: 2520668 - DNA, 25 bp, Homo sapien
gcccgccgtgcaattagccgccggg

SEQ ID NO: 2520669 - DNA, 25 bp, Homo sapien
ctgtgcccgccgtgcaattagccgc

SEQ ID NO: 2520670 - DNA, 25 bp, Homo sapien
ctcgatctgtgccagggtcctcccc

SEQ ID NO: 2520671 - DNA, 25 bp, Homo sapien
gctcctggggcagccaccctgccca

SEQ ID NO: 2520672 - DNA, 25 bp, Homo sapien
cgatctgtgccagggtcctccccat

SEQ ID NO: 2520673 - DNA, 25 bp, Homo sapien
ccccatctgctcctggggcagccac

SEQ ID NO: 2520674 - DNA, 25 bp, Homo sapien
acctaggctggtattctggctcaac

SEQ ID NO: 2520675 - DNA, 25 bp, Homo sapien
gatggatcagttgacaccacctagg

SEQ ID NO: 2520676 - DNA, 25 bp, Homo sapien
tccgggcaaactgggacgactggtc

SEQ ID NO: 2520677 - DNA, 25 bp, Homo sapien
cgcagccgggaacagaagacatgaa

SEQ ID NO: 2520678 - DNA, 25 bp, Homo sapien
caagctttaatcagtcaggcccctg

SEQ ID NO: 2520679 - DNA, 25 bp, Homo sapien
gttgcaggctgcatctaggatcacc

SEQ ID NO: 2520680 - DNA, 25 bp, Homo sapien
aacagaggctatggtgttgcaacag

SEQ ID NO: 2520681 - DNA, 25 bp, Homo sapien
taggatcaccaataagctactggct

SEQ ID NO: 2520682 - DNA, 25 bp, Homo sapien
cccctgttgtccaagaggcaaaact

SEQ ID NO: 2520683 - DNA, 25 bp, Homo sapien
ccaaaactgggtaatggaggaagtg

SEQ ID NO: 2520684 - DNA, 25 bp, Homo sapien
tgaagtcaacctaacagcccatgaa

SEQ ID NO: 2520685 - DNA, 25 bp, Homo sapien
tctttaacaggaggatagattgatg

SEQ ID NO: 2520686 - DNA, 25 bp, Homo sapien
aggtgcccaagaagacccaagctgc

SEQ ID NO: 2520687 - DNA, 25 bp, Homo sapien
tgtctcaagtaaatggcctcctgcc

SEQ ID NO: 2520688 - DNA, 25 bp, Homo sapien
ccaaaagacaatggcagtgcagtgc

SEQ ID NO: 2520689 - DNA, 25 bp, Homo sapien
cctcggctgaaatgtggctgggctt

SEQ ID NO: 2520690 - DNA, 25 bp, Homo sapien
gaggaagctgtgcagggtgaggtca

SEQ ID NO: 2520691 - DNA, 25 bp, Homo sapien
taagggaggaagctgtgcagggtga

SEQ ID NO: 2520692 - DNA, 25 bp, Homo sapien
gtgcagggtgaggtcatccccctca

SEQ ID NO: 2520693 - DNA, 25 bp, Homo sapien
gctgtgcagggtgaggtcatccccc

SEQ ID NO: 2520694 - DNA, 25 bp, Homo sapien
ccatcaggcaacagggatgagatgc

SEQ ID NO: 2520695 - DNA, 25 bp, Homo sapien
tacatgtggcccttgcgggagaggc

SEQ ID NO: 2520696 - DNA, 25 bp, Homo sapien
cagcgccaagattaggatggccagc

SEQ ID NO: 2520697 - DNA, 25 bp, Homo sapien
cagtgcacacgaagaagatagtggc

SEQ ID NO: 2520698 - DNA, 25 bp, Homo sapien
gggaatgcccttgtgagtaacagag

SEQ ID NO: 2520699 - DNA, 25 bp, Homo sapien
gacggacaaattgctggctgccatg

SEQ ID NO: 2520700 - DNA, 25 bp, Homo sapien
cgtcagtcgagttgtctgtgcctct

SEQ ID NO: 2520701 - DNA, 25 bp, Homo sapien
tttggtagtaggttccatggacagg

SEQ ID NO: 2520702 - DNA, 25 bp, Homo sapien
gtctgtgcctccgtgggcactggtt

SEQ ID NO: 2520703 - DNA, 25 bp, Homo sapien
tgtgcctccgtgggcactggttgag

SEQ ID NO: 2520704 - DNA, 25 bp, Homo sapien
tgcctccgtgggcactggttgagtg

SEQ ID NO: 2520705 - DNA, 25 bp, Homo sapien
tctgtgcctccgtgggcactggttg

SEQ ID NO: 2520706 - DNA, 25 bp, Homo sapien
ggtctgtatctccatagctgctgaa

SEQ ID NO: 2520707 - DNA, 25 bp, Homo sapien
gctgctggttgagtggtctgtatct

SEQ ID NO: 2520708 - DNA, 25 bp, Homo sapien
gctgctgaatccgtggacaggttcc

SEQ ID NO: 2520709 - DNA, 25 bp, Homo sapien
ccatagctgctgaatccgtggacag

SEQ ID NO: 2520710 - DNA, 25 bp, Homo sapien
catccaggccagtagaacgccttgc

SEQ ID NO: 2520711 - DNA, 25 bp, Homo sapien
tcctgcatccaggccagtagaacgc

SEQ ID NO: 2520712 - DNA, 25 bp, Homo sapien
tgcatccaggccagtagaacgcctt

SEQ ID NO: 2520713 - DNA, 25 bp, Homo sapien
tccaggccagtagaacgccttgcag

SEQ ID NO: 2520714 - DNA, 25 bp, Homo sapien
ggaaatcataatctaggtactcata

SEQ ID NO: 2520715 - DNA, 25 bp, Homo sapien
aggctccacagtggtagactcaggg

SEQ ID NO: 2520716 - DNA, 25 bp, Homo sapien
tggaggctccgtttctggcaggaaa

SEQ ID NO: 2520717 - DNA, 25 bp, Homo sapien
ggtactcatattcggtggcctgtct

SEQ ID NO: 2520718 - DNA, 25 bp, Homo sapien
gacccaaggctttctcggcttcatc

SEQ ID NO: 2520719 - DNA, 25 bp, Homo sapien
ggctttctcggcttcatctgcccag

SEQ ID NO: 2520720 - DNA, 25 bp, Homo sapien
caggggacccaaggctttctcggct

SEQ ID NO: 2520721 - DNA, 25 bp, Homo sapien
gctttctcggcttcatctgcccagg

SEQ ID NO: 2520722 - DNA, 25 bp, Homo sapien
ccagggcccagtaggatcagcaaca

SEQ ID NO: 2520723 - DNA, 25 bp, Homo sapien
agggcccagtaggatcagcaacagg

SEQ ID NO: 2520724 - DNA, 25 bp, Homo sapien
gggcccagtaggatcagcaacagga

SEQ ID NO: 2520725 - DNA, 25 bp, Homo sapien
ggcccagtaggatcagcaacaggag

SEQ ID NO: 2520726 - DNA, 25 bp, Homo sapien
agccatcttatctccttctagacca

SEQ ID NO: 2520727 - DNA, 25 bp, Homo sapien
gccatcttatctccttctagaccac

SEQ ID NO: 2520728 - DNA, 25 bp, Homo sapien
cagccatcttatctccttctagacc

SEQ ID NO: 2520729 - DNA, 25 bp, Homo sapien
cagagcatgggacagctgcctcgtg

SEQ ID NO: 2520730 - DNA, 25 bp, Homo sapien
tgcggcagtcccggatccgagcaac

SEQ ID NO: 2520731 - DNA, 25 bp, Homo sapien
cccctgcggcagtcccggatccgag

SEQ ID NO: 2520732 - DNA, 25 bp, Homo sapien
ctctgctttagtgacaaggtcccag

SEQ ID NO: 2520733 - DNA, 25 bp, Homo sapien
tcagcagcaatggacagtcggggcc

SEQ ID NO: 2520734 - DNA, 25 bp, Homo sapien
acttcagcagcaatggacagtcggg

SEQ ID NO: 2520735 - DNA, 25 bp, Homo sapien
ttcagcagcaatggacagtcggggc

SEQ ID NO: 2520736 - DNA, 25 bp, Homo sapien
ttacttcagcagcaatggacagtcg

SEQ ID NO: 2520737 - DNA, 25 bp, Homo sapien
actaggaaccagtttctgggctgga

SEQ ID NO: 2520738 - DNA, 25 bp, Homo sapien
ccagtttctgggctggagactgcag

SEQ ID NO: 2520739 - DNA, 25 bp, Homo sapien
ggccccagattttcgctgccaatct

SEQ ID NO: 2520740 - DNA, 25 bp, Homo sapien
caatctgggcggcactaggaaccag

SEQ ID NO: 2520741 - DNA, 25 bp, Homo sapien
gctgggggtagccagcgctgctggt

SEQ ID NO: 2520742 - DNA, 25 bp, Homo sapien
gcttgggctgggggtagccagcgct

SEQ ID NO: 2520743 - DNA, 25 bp, Homo sapien
gggtagccagcgctgctggtcccag

SEQ ID NO: 2520744 - DNA, 25 bp, Homo sapien
gtagccagcgctgctggtcccagac

SEQ ID NO: 2520745 - DNA, 25 bp, Homo sapien
cccctccacatttcagccaatccaa

SEQ ID NO: 2520746 - DNA, 25 bp, Homo sapien
tcttgggatgcgcagtaattcccat

SEQ ID NO: 2520747 - DNA, 25 bp, Homo sapien
atttcagccaatccaaccaactcag

SEQ ID NO: 2520748 - DNA, 25 bp, Homo sapien
caactcagcagtcaccttatcctca

SEQ ID NO: 2520749 - DNA, 25 bp, Homo sapien
taatgtgcccgcagaaagagaaggg

SEQ ID NO: 2520750 - DNA, 25 bp, Homo sapien
catacccgcttttcgcaggagagga

SEQ ID NO: 2520751 - DNA, 25 bp, Homo sapien
tgcccttgacggtgactcatgtccg

SEQ ID NO: 2520752 - DNA, 25 bp, Homo sapien
caagggttgcccgtctgaagcagga

SEQ ID NO: 2520753 - DNA, 25 bp, Homo sapien
cgggcacctcgggtctacagagagc

SEQ ID NO: 2520754 - DNA, 25 bp, Homo sapien
tcaaggtggcccgagtgagaaaaca

SEQ ID NO: 2520755 - DNA, 25 bp, Homo sapien
tgcagccacgagtggaccaagaaca

SEQ ID NO: 2520756 - DNA, 25 bp, Homo sapien
tagtcataaacagaccaccacgcgt

SEQ ID NO: 2520757 - DNA, 25 bp, Homo sapien
gggcaaagttccagctaaccgagga

SEQ ID NO: 2520758 - DNA, 25 bp, Homo sapien
aaataatccacaatgctttgggcgc

SEQ ID NO: 2520759 - DNA, 25 bp, Homo sapien
taaccgaggaatgaacaggtgacca

SEQ ID NO: 2520760 - DNA, 25 bp, Homo sapien
gagccgacctaggagtaattcactg

SEQ ID NO: 2520761 - DNA, 25 bp, Homo sapien
ggcctatcgctggttgacaaatctg

SEQ ID NO: 2520762 - DNA, 25 bp, Homo sapien
gaaaagaagaaatacgacgtgagct

SEQ ID NO: 2520763 - DNA, 25 bp, Homo sapien
ttcttactggaatgtggcctatcgc

SEQ ID NO: 2520764 - DNA, 25 bp, Homo sapien
ggtacttgggcacgacacaatcaga

SEQ ID NO: 2520765 - DNA, 25 bp, Homo sapien
ctcatcttgattgcagattgtgtct

SEQ ID NO: 2520766 - DNA, 25 bp, Homo sapien
acttggaaatacgctcatcttgatt

SEQ ID NO: 2520767 - DNA, 25 bp, Homo sapien
tcatcttgattgcagattgtgtctt

SEQ ID NO: 2520768 - DNA, 25 bp, Homo sapien
tgtacccgtgcttcaaggagatgag

SEQ ID NO: 2520769 - DNA, 25 bp, Homo sapien
tgcagtgggcttgctatccagaatg

SEQ ID NO: 2520770 - DNA, 25 bp, Homo sapien
gaccaccttgagatccctgtttttg

SEQ ID NO: 2520771 - DNA, 25 bp, Homo sapien
gatgctgatcaggtcgcacttcttg

SEQ ID NO: 2520772 - DNA, 25 bp, Homo sapien
gaacagtcataataataggttcaca

SEQ ID NO: 2520773 - DNA, 25 bp, Homo sapien
tcctgggaacagtcataataatagg

SEQ ID NO: 2520774 - DNA, 25 bp, Homo sapien
aggttcacactttctctcatgaagt

SEQ ID NO: 2520775 - DNA, 25 bp, Homo sapien
tgggaacagtcataataataggttc

SEQ ID NO: 2520776 - DNA, 25 bp, Homo sapien
tctacaacgcgggtacaaggtcttc

SEQ ID NO: 2520777 - DNA, 25 bp, Homo sapien
tcactatgctaggaactggcagact

SEQ ID NO: 2520778 - DNA, 25 bp, Homo sapien
tagtgttcccggttgacagatgaga

SEQ ID NO: 2520779 - DNA, 25 bp, Homo sapien
tgagagaacggaagctgagagtcac

SEQ ID NO: 2520780 - DNA, 25 bp, Homo sapien
tgagaaaaaagcctgtcccttagga

SEQ ID NO: 2520781 - DNA, 25 bp, Homo sapien
tccactcatagggtaggaaaaccac

SEQ ID NO: 2520782 - DNA, 25 bp, Homo sapien
gatacactgctctaacgcatcaggg

SEQ ID NO: 2520783 - DNA, 25 bp, Homo sapien
tctgaaactgggcaggagtccattg

SEQ ID NO: 2520784 - DNA, 25 bp, Homo sapien
caacctagaatacttgacaatctcg

SEQ ID NO: 2520785 - DNA, 25 bp, Homo sapien
tatccttagaaagtgccatctcatg

SEQ ID NO: 2520786 - DNA, 25 bp, Homo sapien
caaataattgtcacacagttacacc

SEQ ID NO: 2520787 - DNA, 25 bp, Homo sapien
tgagatctgaagtatatgctagtcc

SEQ ID NO: 2520788 - DNA, 25 bp, Homo sapien
caaaatagcgaatactgctgtcacc

SEQ ID NO: 2520789 - DNA, 25 bp, Homo sapien
catcaagtcccctcttgggcatgta

SEQ ID NO: 2520790 - DNA, 25 bp, Homo sapien
gggattcatccgtgatctcaaaata

SEQ ID NO: 2520791 - DNA, 25 bp, Homo sapien
tctcacatttgttaacatcaagtcc

SEQ ID NO: 2520792 - DNA, 25 bp, Homo sapien
ctgtgtctgattgttaactgaaaca

SEQ ID NO: 2520793 - DNA, 25 bp, Homo sapien
ccagagacaagtctgtgtctgattg

SEQ ID NO: 2520794 - DNA, 25 bp, Homo sapien
tgtgtctgattgttaactgaaacat

SEQ ID NO: 2520795 - DNA, 25 bp, Homo sapien
aagaaaccagagacaagtctgtgtc

SEQ ID NO: 2520796 - DNA, 25 bp, Homo sapien
caccaaacatcaaaattactgttta

SEQ ID NO: 2520797 - DNA, 25 bp, Homo sapien
ttaacaccaaacatcaaaattactg

SEQ ID NO: 2520798 - DNA, 25 bp, Homo sapien
aacaccaaacatcaaaattactgtt

SEQ ID NO: 2520799 - DNA, 25 bp, Homo sapien
taacaccaaacatcaaaattactgt

SEQ ID NO: 2520800 - DNA, 25 bp, Homo sapien
gcagcaacaccccattgctagtgtc

SEQ ID NO: 2520801 - DNA, 25 bp, Homo sapien
gaaaggcagcaacaccccattgcta

SEQ ID NO: 2520802 - DNA, 25 bp, Homo sapien
gtccatctcatgaagagcaattggt

SEQ ID NO: 2520803 - DNA, 25 bp, Homo sapien
aacaccccattgctagtgtccatct

SEQ ID NO: 2520804 - DNA, 25 bp, Homo sapien
ctatttccttccgacacatgtacac

SEQ ID NO: 2520805 - DNA, 25 bp, Homo sapien
atctatttccttccgacacatgtac

SEQ ID NO: 2520806 - DNA, 25 bp, Homo sapien
gatctatttccttccgacacatgta

SEQ ID NO: 2520807 - DNA, 25 bp, Homo sapien
tctatttccttccgacacatgtaca

SEQ ID NO: 2520808 - DNA, 25 bp, Homo sapien
ctcaagtgaaagcaagtggaaagcc

SEQ ID NO: 2520809 - DNA, 25 bp, Homo sapien
gctcaagtgaaagcaagtggaaagc

SEQ ID NO: 2520810 - DNA, 25 bp, Homo sapien
gagaaagctcaagtgaaagcaagtg

SEQ ID NO: 2520811 - DNA, 25 bp, Homo sapien
aaagctcaagtgaaagcaagtggaa

SEQ ID NO: 2520812 - DNA, 25 bp, Homo sapien
agtggtgaagacattgccatcggcc

SEQ ID NO: 2520813 - DNA, 25 bp, Homo sapien
aagacattgccatcggccaggaaga

SEQ ID NO: 2520814 - DNA, 25 bp, Homo sapien
tggtgaagacattgccatcggccag

SEQ ID NO: 2520815 - DNA, 25 bp, Homo sapien
tgaagacattgccatcggccaggaa

SEQ ID NO: 2520816 - DNA, 25 bp, Homo sapien
tggagagcaaaaaggcacatgccac

SEQ ID NO: 2520817 - DNA, 25 bp, Homo sapien
gcaaaaaggcacatgccacacatta

SEQ ID NO: 2520818 - DNA, 25 bp, Homo sapien
aaaaaggcacatgccacacattaaa

SEQ ID NO: 2520819 - DNA, 25 bp, Homo sapien
agagcaaaaaggcacatgccacaca

SEQ ID NO: 2520820 - DNA, 25 bp, Homo sapien
gagttttcatcctaggaatactcac

SEQ ID NO: 2520821 - DNA, 25 bp, Homo sapien
tgagttttcatcctaggaatactca

SEQ ID NO: 2520822 - DNA, 25 bp, Homo sapien
gtttcctgggatcaatgactctcac

SEQ ID NO: 2520823 - DNA, 25 bp, Homo sapien
agcaacaatctcttgtttcctggga

SEQ ID NO: 2520824 - DNA, 25 bp, Homo sapien
caacaatctcttgtttcctgggatc

SEQ ID NO: 2520825 - DNA, 25 bp, Homo sapien
cttgtttcctgggatcaatgactct

SEQ ID NO: 2520826 - DNA, 25 bp, Homo sapien
gtaaatcatgtctgaatgcatatcg

SEQ ID NO: 2520827 - DNA, 25 bp, Homo sapien
tctgaatgcatatcgtccaagttta

SEQ ID NO: 2520828 - DNA, 25 bp, Homo sapien
tccggttccagctcacattgtaaat

SEQ ID NO: 2520829 - DNA, 25 bp, Homo sapien
tggaagctgtgcagatcagactgcc

SEQ ID NO: 2520830 - DNA, 25 bp, Homo sapien
gctggtagacccaagtgacttcaag

SEQ ID NO: 2520831 - DNA, 25 bp, Homo sapien
aaaacaagcatcagggtgttgctgc

SEQ ID NO: 2520832 - DNA, 25 bp, Homo sapien
gatgcggctgattgtcagaggccct

SEQ ID NO: 2520833 - DNA, 25 bp, Homo sapien
cagaggccctacttactaacagcgt

SEQ ID NO: 2520834 - DNA, 25 bp, Homo sapien
taaagatggtacaacagtggaaggg

SEQ ID NO: 2520835 - DNA, 25 bp, Homo sapien
caagagtaaggcctgtttgctcaca

SEQ ID NO: 2520836 - DNA, 25 bp, Homo sapien
gaagcccaaactgtaatcaagtagc

SEQ ID NO: 2520837 - DNA, 25 bp, Homo sapien
gaaaaataggccaagactgctctga

SEQ ID NO: 2520838 - DNA, 25 bp, Homo sapien
tggatgccaagccacgatgccgact

SEQ ID NO: 2520839 - DNA, 25 bp, Homo sapien
ctttgagtggccttccaaaatcacc

SEQ ID NO: 2520840 - DNA, 25 bp, Homo sapien
tgcactaagaagcacattgcgggcc

SEQ ID NO: 2520841 - DNA, 25 bp, Homo sapien
tcaccacaggttcagtcagggaaag

SEQ ID NO: 2520842 - DNA, 25 bp, Homo sapien
gttgtctgctactctgggtgatggc

SEQ ID NO: 2520843 - DNA, 25 bp, Homo sapien
ggcctgctcggtttggactgatgtt

SEQ ID NO: 2520844 - DNA, 25 bp, Homo sapien
agggttgtctgctactctgggtgat

SEQ ID NO: 2520845 - DNA, 25 bp, Homo sapien
gggttgtctgctactctgggtgatg

SEQ ID NO: 2520846 - DNA, 25 bp, Homo sapien
gaacttcatcgataaacgctgtgtg

SEQ ID NO: 2520847 - DNA, 25 bp, Homo sapien
tcaaccctaaggcaagtctatctgc

SEQ ID NO: 2520848 - DNA, 25 bp, Homo sapien
tgttttctcattgctccaccacctg

SEQ ID NO: 2520849 - DNA, 25 bp, Homo sapien
tttccaacagcgtatgttcactgtc

SEQ ID NO: 2520850 - DNA, 25 bp, Homo sapien
gcactggtcctgtgtggccacatac

SEQ ID NO: 2520851 - DNA, 25 bp, Homo sapien
gcagtcctctgaaccgctggcaatg

SEQ ID NO: 2520852 - DNA, 25 bp, Homo sapien
caatgacctgatcgttatgtgggca

SEQ ID NO: 2520853 - DNA, 25 bp, Homo sapien
tatgtgggcaccagtctatgtccag

SEQ ID NO: 2520854 - DNA, 25 bp, Homo sapien
ggagtatgggcctacagagacttca

SEQ ID NO: 2520855 - DNA, 25 bp, Homo sapien
tatatgacttgtgcacaggctggtc

SEQ ID NO: 2520856 - DNA, 25 bp, Homo sapien
gaggtgctctggaataaaccctaca

SEQ ID NO: 2520857 - DNA, 25 bp, Homo sapien
gcagcagaccaaaaagacgggtgca

SEQ ID NO: 2520858 - DNA, 25 bp, Homo sapien
cgattagctgcgataacaggcgtgt

SEQ ID NO: 2520859 - DNA, 25 bp, Homo sapien
gaaaaattcgttcacactcagtaga

SEQ ID NO: 2520860 - DNA, 25 bp, Homo sapien
taaggactcagcaacctaagttcta

SEQ ID NO: 2520861 - DNA, 25 bp, Homo sapien
acaacctcacggtcttggacaacca

SEQ ID NO: 2520862 - DNA, 25 bp, Homo sapien
caaatacaattcttagtgaactgtc

SEQ ID NO: 2520863 - DNA, 25 bp, Homo sapien
catcagagtctaatggtttcacaaa

SEQ ID NO: 2520864 - DNA, 25 bp, Homo sapien
ttcaattacatcagagtctaatggt

SEQ ID NO: 2520865 - DNA, 25 bp, Homo sapien
aaggcgtgtggaacttaacttcaat

SEQ ID NO: 2520866 - DNA, 25 bp, Homo sapien
gaaacttgctctgtcgtaccactcg

SEQ ID NO: 2520867 - DNA, 25 bp, Homo sapien
tggtcatttttcaccgcttgcccaa

SEQ ID NO: 2520868 - DNA, 25 bp, Homo sapien
ccgcttgcccaaatacatgccgaaa

SEQ ID NO: 2520869 - DNA, 25 bp, Homo sapien
gagggaggacaaggaacgctcctcc

SEQ ID NO: 2520870 - DNA, 25 bp, Homo sapien
aggcctggagtgatacagcagtaac

SEQ ID NO: 2520871 - DNA, 25 bp, Homo sapien
tactgggctaggaagctatttgaca

SEQ ID NO: 2520872 - DNA, 25 bp, Homo sapien
cctggagtgatacagcagtaacagt

SEQ ID NO: 2520873 - DNA, 25 bp, Homo sapien
ttgacagtaaaccagacttgaggaa

SEQ ID NO: 2520874 - DNA, 25 bp, Homo sapien
gactaccagggccatacattttgag

SEQ ID NO: 2520875 - DNA, 25 bp, Homo sapien
gcaaatgattcgtggccagggtcct

SEQ ID NO: 2520876 - DNA, 25 bp, Homo sapien
tgtagccgggctgaagtaagagacc

SEQ ID NO: 2520877 - DNA, 25 bp, Homo sapien
caacgcatgtgtgaaagtggcctct

SEQ ID NO: 2520878 - DNA, 25 bp, Homo sapien
atcttcaagcaagtgtttcaaaagt

SEQ ID NO: 2520879 - DNA, 25 bp, Homo sapien
ttcaagcaagtgtttcaaaagtaag

SEQ ID NO: 2520880 - DNA, 25 bp, Homo sapien
cagcatcttcaagcaagtgtttcaa

SEQ ID NO: 2520881 - DNA, 25 bp, Homo sapien
agcatcttcaagcaagtgtttcaaa

SEQ ID NO: 2520882 - DNA, 25 bp, Homo sapien
tatttatgcgatttctcagatccaa

SEQ ID NO: 2520883 - DNA, 25 bp, Homo sapien
gacctaaggtacaacacaattctca

SEQ ID NO: 2520884 - DNA, 25 bp, Homo sapien
tgtccaatcctcagtacacacgact

SEQ ID NO: 2520885 - DNA, 25 bp, Homo sapien
tgtcaaaaatgtgtgctcctgacgt

SEQ ID NO: 2520886 - DNA, 25 bp, Homo sapien
gaacagacggtacaaagcaactgct

SEQ ID NO: 2520887 - DNA, 25 bp, Homo sapien
aacaggtatctatttgccttcacaa

SEQ ID NO: 2520888 - DNA, 25 bp, Homo sapien
tctgaaatgtatagaaccaagtcca

SEQ ID NO: 2520889 - DNA, 25 bp, Homo sapien
agcaactgcttatacttaatcatgt

SEQ ID NO: 2520890 - DNA, 25 bp, Homo sapien
catgtagagcaagcactttagacac

SEQ ID NO: 2520891 - DNA, 25 bp, Homo sapien
caagggcagcctacattacggccaa

SEQ ID NO: 2520892 - DNA, 25 bp, Homo sapien
taaatcgtgatgcagtaaagcctac

SEQ ID NO: 2520893 - DNA, 25 bp, Homo sapien
gaatcccacgtttgcaacatgtaga

SEQ ID NO: 2520894 - DNA, 25 bp, Homo sapien
atcctcagtcatttcggcgcagcgg

SEQ ID NO: 2520895 - DNA, 25 bp, Homo sapien
tcctcagtcatttcggcgcagcggg

SEQ ID NO: 2520896 - DNA, 25 bp, Homo sapien
tgcacctcgctcctttttactgcgt

SEQ ID NO: 2520897 - DNA, 25 bp, Homo sapien
ctttttactgcgtccctcgccagct

SEQ ID NO: 2520898 - DNA, 25 bp, Homo sapien
tgacccccaaccgagatctgcaggg

SEQ ID NO: 2520899 - DNA, 25 bp, Homo sapien
cccgatccgacagccttcctgcttc

SEQ ID NO: 2520900 - DNA, 25 bp, Homo sapien
tgaatcacccagttcactcggacac

SEQ ID NO: 2520901 - DNA, 25 bp, Homo sapien
ctctgaatcacccagttcactcgga

SEQ ID NO: 2520902 - DNA, 25 bp, Homo sapien
gggccgaggtgcctgaggcgccgcc

SEQ ID NO: 2520903 - DNA, 25 bp, Homo sapien
gccgggcgaagcctccaaccgctgc

SEQ ID NO: 2520904 - DNA, 25 bp, Homo sapien
cgccgccgaagtccccgctgcaaag

SEQ ID NO: 2520905 - DNA, 25 bp, Homo sapien
agcctggcactgagcgccgtgcggg

SEQ ID NO: 2520906 - DNA, 25 bp, Homo sapien
acttcttgatagagtgtgccacctt

SEQ ID NO: 2520907 - DNA, 25 bp, Homo sapien
tcttgatagagtgtgccaccttctc

SEQ ID NO: 2520908 - DNA, 25 bp, Homo sapien
gatagagtgtgccaccttctccgtg

SEQ ID NO: 2520909 - DNA, 25 bp, Homo sapien
tacttcttgatagagtgtgccacct

SEQ ID NO: 2520910 - DNA, 25 bp, Homo sapien
tcctccagacggtacacgacggggc

SEQ ID NO: 2520911 - DNA, 25 bp, Homo sapien
cttcttcctgttggaccttgggact

SEQ ID NO: 2520912 - DNA, 25 bp, Homo sapien
cgctctggagcctgtgcacctggag

SEQ ID NO: 2520913 - DNA, 25 bp, Homo sapien
cttgggactggccggtcccctctag

SEQ ID NO: 2520914 - DNA, 25 bp, Homo sapien
cagagcaccttgtgggcgtggtcgc

SEQ ID NO: 2520915 - DNA, 25 bp, Homo sapien
ggaagtggcgcagtgggcgtctgca

SEQ ID NO: 2520916 - DNA, 25 bp, Homo sapien
gcccgaaggcacttgcgcagaggtc

SEQ ID NO: 2520917 - DNA, 25 bp, Homo sapien
tgtgggcgtggtcgctggaggcagc

SEQ ID NO: 2520918 - DNA, 25 bp, Homo sapien
gcggaggccacctccacgcccattt

SEQ ID NO: 2520919 - DNA, 25 bp, Homo sapien
gggctgcggaggccacctccacgcc

SEQ ID NO: 2520920 - DNA, 25 bp, Homo sapien
aggccacctccacgcccatttgcca

SEQ ID NO: 2520921 - DNA, 25 bp, Homo sapien
gctgcggaggccacctccacgccca

SEQ ID NO: 2520922 - DNA, 25 bp, Homo sapien
tgcacctgtctataagtacttgccc

SEQ ID NO: 2520923 - DNA, 25 bp, Homo sapien
ctcatactgaacaacaagttctcag

SEQ ID NO: 2520924 - DNA, 25 bp, Homo sapien
tcagttgcaaaaggagatttattgt

SEQ ID NO: 2520925 - DNA, 25 bp, Homo sapien
taagtacttgcccacaagttaaaca

SEQ ID NO: 2520926 - DNA, 25 bp, Homo sapien
ggagtcaggcactcccagcctctgc

SEQ ID NO: 2520927 - DNA, 25 bp, Homo sapien
tggtggggtagaaattgcatgaatt

SEQ ID NO: 2520928 - DNA, 25 bp, Homo sapien
atggcatatctcatttactccctca

SEQ ID NO: 2520929 - DNA, 25 bp, Homo sapien
tactgccctctaagcattgcacaca

SEQ ID NO: 2520930 - DNA, 25 bp, Homo sapien
gcaagaagtgggtccaatttcccag

SEQ ID NO: 2520931 - DNA, 25 bp, Homo sapien
ttgtgtcaccccaatagcctttgga

SEQ ID NO: 2520932 - DNA, 25 bp, Homo sapien
aaaccacaagggagatcaagatgca

SEQ ID NO: 2520933 - DNA, 25 bp, Homo sapien
tggagcaagaagtgggtccaatttc

SEQ ID NO: 2520934 - DNA, 25 bp, Homo sapien
aagttccaagccgtcctctgtgctg

SEQ ID NO: 2520935 - DNA, 25 bp, Homo sapien
ttttaggaggcaaggatgcgtgggt

SEQ ID NO: 2520936 - DNA, 25 bp, Homo sapien
tccaggggattctttatgtaaagca

SEQ ID NO: 2520937 - DNA, 25 bp, Homo sapien
gtgctgcctttggagcctctcccga

SEQ ID NO: 2520938 - DNA, 25 bp, Homo sapien
caggttttctagcaaagaactgagc

SEQ ID NO: 2520939 - DNA, 25 bp, Homo sapien
gacgatgtatcagactgttttggca

SEQ ID NO: 2520940 - DNA, 25 bp, Homo sapien
gaaaacagactagttccaggaggaa

SEQ ID NO: 2520941 - DNA, 25 bp, Homo sapien
gatgctcaataaagactggccatgt

SEQ ID NO: 2520942 - DNA, 25 bp, Homo sapien
gatatcttaacgcaattcacgggaa

SEQ ID NO: 2520943 - DNA, 25 bp, Homo sapien
tcactgagttaatctggcggaccca

SEQ ID NO: 2520944 - DNA, 25 bp, Homo sapien
tgtcaattaccatccgagagcagcc

SEQ ID NO: 2520945 - DNA, 25 bp, Homo sapien
gataagagtgcattagtccagggcc

SEQ ID NO: 2520946 - DNA, 25 bp, Homo sapien
caacaacagcgtgggactactcatc

SEQ ID NO: 2520947 - DNA, 25 bp, Homo sapien
tagatgggccctagtggacctaagc

SEQ ID NO: 2520948 - DNA, 25 bp, Homo sapien
catccgagagttttctgcgaggcca

SEQ ID NO: 2520949 - DNA, 25 bp, Homo sapien
ccaagaatgagctagaacgtgtgcc

SEQ ID NO: 2520950 - DNA, 25 bp, Homo sapien
cacaggatttataggaaggcttcac

SEQ ID NO: 2520951 - DNA, 25 bp, Homo sapien
gacactgtggatgctatcgctgctg

SEQ ID NO: 2520952 - DNA, 25 bp, Homo sapien
tagctctttggtgtgcttgcggacc

SEQ ID NO: 2520953 - DNA, 25 bp, Homo sapien
tagggtacatgcagtcggcacagga

SEQ ID NO: 2520954 - DNA, 25 bp, Homo sapien
taagcaccaggttgaagctcaaacc

SEQ ID NO: 2520955 - DNA, 25 bp, Homo sapien
gagaaccacggctgtcctgtgagat

SEQ ID NO: 2520956 - DNA, 25 bp, Homo sapien
tatggaggtcgacagatgcaactgc

SEQ ID NO: 2520957 - DNA, 25 bp, Homo sapien
gctcaaaccttgtggcagataatcc

SEQ ID NO: 2520958 - DNA, 25 bp, Homo sapien
ggtatgcactacgtacccaccagca

SEQ ID NO: 2520959 - DNA, 25 bp, Homo sapien
gccctgcccagggtatgaataaggt

SEQ ID NO: 2520960 - DNA, 25 bp, Homo sapien
tgtgcagagatatgtgttattccca

SEQ ID NO: 2520961 - DNA, 25 bp, Homo sapien
tattcccaacagattctcaatttgc

SEQ ID NO: 2520962 - DNA, 25 bp, Homo sapien
gtaggccaattagagtgggatggaa

SEQ ID NO: 2520963 - DNA, 25 bp, Homo sapien
caccctgtgaaagaaccctcaggtc

SEQ ID NO: 2520964 - DNA, 25 bp, Homo sapien
tgaaagaaccctcaggtccctggag

SEQ ID NO: 2520965 - DNA, 25 bp, Homo sapien
gaggctgaggtaggccaattagagt

SEQ ID NO: 2520966 - DNA, 25 bp, Homo sapien
taggttctccgagttgagcaggttt

SEQ ID NO: 2520967 - DNA, 25 bp, Homo sapien
cgagttgagcaggttttgatcgagc

SEQ ID NO: 2520968 - DNA, 25 bp, Homo sapien
tgctgttgttgtttaggttctccga

SEQ ID NO: 2520969 - DNA, 25 bp, Homo sapien
atcgagctgggttggaagctgcccc

SEQ ID NO: 2520970 - DNA, 25 bp, Homo sapien
tgctcccaggccctcctccctttcc

SEQ ID NO: 2520971 - DNA, 25 bp, Homo sapien
tccctgctcccaggccctcctccct

SEQ ID NO: 2520972 - DNA, 25 bp, Homo sapien
ctccctgctcccaggccctcctccc

SEQ ID NO: 2520973 - DNA, 25 bp, Homo sapien
cctgctcccaggccctcctcccttt

SEQ ID NO: 2520974 - DNA, 25 bp, Homo sapien
tcacagagtccggaaccttgctggg

SEQ ID NO: 2520975 - DNA, 25 bp, Homo sapien
ccaggtggaccaagctgccagtttc

SEQ ID NO: 2520976 - DNA, 25 bp, Homo sapien
caagaagtcgccaggtcctgcaggg

SEQ ID NO: 2520977 - DNA, 25 bp, Homo sapien
gtctgctgacgccacagcttgttgt

SEQ ID NO: 2520978 - DNA, 25 bp, Homo sapien
agccattctcccgcctcagccttcc

SEQ ID NO: 2520979 - DNA, 25 bp, Homo sapien
tgaactcctggtctcccaggttcaa

SEQ ID NO: 2520980 - DNA, 25 bp, Homo sapien
acgccaccacacccagctaattctt

SEQ ID NO: 2520981 - DNA, 25 bp, Homo sapien
cacgccaccacacccagctaattct

SEQ ID NO: 2520982 - DNA, 25 bp, Homo sapien
cacaccaggtgtgagtacccaaaaa

SEQ ID NO: 2520983 - DNA, 25 bp, Homo sapien
aagcagcagttggacgtcaggaaga

SEQ ID NO: 2520984 - DNA, 25 bp, Homo sapien
cctcactggtagaaggcagctgcct

SEQ ID NO: 2520985 - DNA, 25 bp, Homo sapien
ctcacacgatgaagcaaagggccca

SEQ ID NO: 2520986 - DNA, 25 bp, Homo sapien
tcacgcccattttgcaatgcaccag

SEQ ID NO: 2520987 - DNA, 25 bp, Homo sapien
gaggccagccgaattccttcattgc

SEQ ID NO: 2520988 - DNA, 25 bp, Homo sapien
gctgcgcttctgctttacatagtta

SEQ ID NO: 2520989 - DNA, 25 bp, Homo sapien
gctgcctcataaagcccgcgttggg

SEQ ID NO: 2520990 - DNA, 25 bp, Homo sapien
ttgtttataaaatgatacgcttcat

SEQ ID NO: 2520991 - DNA, 25 bp, Homo sapien
tgatacgcttcattccagtgggcga

SEQ ID NO: 2520992 - DNA, 25 bp, Homo sapien
gtctcttcatcgtagactcggatgt

SEQ ID NO: 2520993 - DNA, 25 bp, Homo sapien
cagtgggcgaggaggtctgtggtct

SEQ ID NO: 2520994 - DNA, 25 bp, Homo sapien
tcctccagattggatgcattccatt

SEQ ID NO: 2520995 - DNA, 25 bp, Homo sapien
cctccagattggatgcattccattc

SEQ ID NO: 2520996 - DNA, 25 bp, Homo sapien
tcctctatagcctctctgactttga

SEQ ID NO: 2520997 - DNA, 25 bp, Homo sapien
tgattttcattacaccactaggcct

SEQ ID NO: 2520998 - DNA, 25 bp, Homo sapien
agtcacatagccgctgaggctgagg

SEQ ID NO: 2520999 - DNA, 25 bp, Homo sapien
attttagtaacgtgccttcctctat

SEQ ID NO: 2521000 - DNA, 25 bp, Homo sapien
taaagatgatcgaagataagggagg

SEQ ID NO: 2521001 - DNA, 25 bp, Homo sapien
gttccttcaagttacaattcatctg

SEQ ID NO: 2521002 - DNA, 25 bp, Homo sapien
tctgtttctctaattcattacgaat

SEQ ID NO: 2521003 - DNA, 25 bp, Homo sapien
ccatctgtcccaagataagtagcat

SEQ ID NO: 2521004 - DNA, 25 bp, Homo sapien
atgaggcgctcggtcctttcccctt

SEQ ID NO: 2521005 - DNA, 25 bp, Homo sapien
ttctagatcctggctcatcatgatg

SEQ ID NO: 2521006 - DNA, 25 bp, Homo sapien
tttgatgaggcgctcggtcctttcc

SEQ ID NO: 2521007 - DNA, 25 bp, Homo sapien
catcatgatgcttcggagcttggct

SEQ ID NO: 2521008 - DNA, 25 bp, Homo sapien
gaaagctagggttctcactcaaggg

SEQ ID NO: 2521009 - DNA, 25 bp, Homo sapien
cccctgctttaaacgctggttctga

SEQ ID NO: 2521010 - DNA, 25 bp, Homo sapien
gggtgcgctcacaccagaggcacct

SEQ ID NO: 2521011 - DNA, 25 bp, Homo sapien
ggcctgtgtcacagacccctgcttt

SEQ ID NO: 2521012 - DNA, 25 bp, Homo sapien
tccgggccacttcgcaggccttgtg

SEQ ID NO: 2521013 - DNA, 25 bp, Homo sapien
agtcgggccgcgtagactccaggtc

SEQ ID NO: 2521014 - DNA, 25 bp, Homo sapien
gcagctctcatagtaggtagcccag

SEQ ID NO: 2521015 - DNA, 25 bp, Homo sapien
catggcgttccactcgttgatgcag

SEQ ID NO: 2521016 - DNA, 25 bp, Homo sapien
ggcgaggagaagacagggtcaggcc

SEQ ID NO: 2521017 - DNA, 25 bp, Homo sapien
tggggcgaggagaagacagggtcag

SEQ ID NO: 2521018 - DNA, 25 bp, Homo sapien
ctggggcgaggagaagacagggtca

SEQ ID NO: 2521019 - DNA, 25 bp, Homo sapien
gggcgaggagaagacagggtcaggc

SEQ ID NO: 2521020 - DNA, 25 bp, Homo sapien
acagacacaggcttaaatatgtgca

SEQ ID NO: 2521021 - DNA, 25 bp, Homo sapien
ctccatcaaggtggattttcgtgtc

SEQ ID NO: 2521022 - DNA, 25 bp, Homo sapien
cacagtcggagaaccatcccaatgg

SEQ ID NO: 2521023 - DNA, 25 bp, Homo sapien
ggagaaccatcccaatggtgcagct

SEQ ID NO: 2521024 - DNA, 25 bp, Homo sapien
ttttcgtgtcgctccacagtcggag

SEQ ID NO: 2521025 - DNA, 25 bp, Homo sapien
agcgtctacccacctacgtgtacag

SEQ ID NO: 2521026 - DNA, 25 bp, Homo sapien
tgtggagtcagcgtctacccaccta

SEQ ID NO: 2521027 - DNA, 25 bp, Homo sapien
ggagtcagcgtctacccacctacgt

SEQ ID NO: 2521028 - DNA, 25 bp, Homo sapien
agtcagcgtctacccacctacgtgt

SEQ ID NO: 2521029 - DNA, 25 bp, Homo sapien
ataggaaccgttcactgatgaattc

SEQ ID NO: 2521030 - DNA, 25 bp, Homo sapien
tacgtgtgggagtaggctgtctgca

SEQ ID NO: 2521031 - DNA, 25 bp, Homo sapien
ggctgtctgcataggaaccgttcac

SEQ ID NO: 2521032 - DNA, 25 bp, Homo sapien
ccaggacgggctgttggacgtacgt

SEQ ID NO: 2521033 - DNA, 25 bp, Homo sapien
tgcagtgtgggctgaccgcacgccc

SEQ ID NO: 2521034 - DNA, 25 bp, Homo sapien
ctgtggacacaactccgtaagtgct

SEQ ID NO: 2521035 - DNA, 25 bp, Homo sapien
aactccgtaagtgctcagctgaggc

SEQ ID NO: 2521036 - DNA, 25 bp, Homo sapien
gcccactctacagcagggaggcagc

SEQ ID NO: 2521037 - DNA, 25 bp, Homo sapien
gaaatgagaccgaatgactgcagag

SEQ ID NO: 2521038 - DNA, 25 bp, Homo sapien
tcccggagctcactttcagacctgt

SEQ ID NO: 2521039 - DNA, 25 bp, Homo sapien
tgttttgcccatcctaccagtgaaa

SEQ ID NO: 2521040 - DNA, 25 bp, Homo sapien
tgcacctgcgcctttagtgtggctg

SEQ ID NO: 2521041 - DNA, 25 bp, Homo sapien
ataaggaggtgggtacagcacagag

SEQ ID NO: 2521042 - DNA, 25 bp, Homo sapien
aggaactcataaggaggtgggtaca

SEQ ID NO: 2521043 - DNA, 25 bp, Homo sapien
ctcataaggaggtgggtacagcaca

SEQ ID NO: 2521044 - DNA, 25 bp, Homo sapien
aaggaggtgggtacagcacagagag

SEQ ID NO: 2521045 - DNA, 25 bp, Homo sapien
tgcagagagcacaggacgggggcag

SEQ ID NO: 2521046 - DNA, 25 bp, Homo sapien
ctgcagagagcacaggacgggggca

SEQ ID NO: 2521047 - DNA, 25 bp, Homo sapien
ccccgggattccctgggcacagaag

SEQ ID NO: 2521048 - DNA, 25 bp, Homo sapien
ctggtgcccgggcaatgtgggagct

SEQ ID NO: 2521049 - DNA, 25 bp, Homo sapien
gcttagttccggttcccatcaggcc

SEQ ID NO: 2521050 - DNA, 25 bp, Homo sapien
ctgtgtcaggcccagcgacaggaaa

SEQ ID NO: 2521051 - DNA, 25 bp, Homo sapien
agaactgaagtcggggtgccgaggg

SEQ ID NO: 2521052 - DNA, 25 bp, Homo sapien
ggagaactgaagtcggggtgccgag

SEQ ID NO: 2521053 - DNA, 25 bp, Homo sapien
gagaactgaagtcggggtgccgagg

SEQ ID NO: 2521054 - DNA, 25 bp, Homo sapien
gggagaactgaagtcggggtgccga

SEQ ID NO: 2521055 - DNA, 25 bp, Homo sapien
gtacttgggaatcagtggagtatca

SEQ ID NO: 2521056 - DNA, 25 bp, Homo sapien
acttcaagcctctgactaggacctg

SEQ ID NO: 2521057 - DNA, 25 bp, Homo sapien
aagcctctgactaggacctgccatg

SEQ ID NO: 2521058 - DNA, 25 bp, Homo sapien
taggacctgccatgaagtacttggg

SEQ ID NO: 2521059 - DNA, 25 bp, Homo sapien
ccagcaagatattctcctcggtgtc

SEQ ID NO: 2521060 - DNA, 25 bp, Homo sapien
tccttactggaaaagtccactccca

SEQ ID NO: 2521061 - DNA, 25 bp, Homo sapien
actggaaaagtccactcccagcaag

SEQ ID NO: 2521062 - DNA, 25 bp, Homo sapien
gcgcccgctgctgtacaccaccacc

SEQ ID NO: 2521063 - DNA, 25 bp, Homo sapien
gctctcactaacctgcctttggagg

SEQ ID NO: 2521064 - DNA, 25 bp, Homo sapien
ctctcactaacctgcctttggaggt

SEQ ID NO: 2521065 - DNA, 25 bp, Homo sapien
caacactttcagtgttctacctttc

SEQ ID NO: 2521066 - DNA, 25 bp, Homo sapien
aagatcaacactttcagtgttctac

SEQ ID NO: 2521067 - DNA, 25 bp, Homo sapien
tttcagtgttctacctttccctctg

SEQ ID NO: 2521068 - DNA, 25 bp, Homo sapien
cactttcagtgttctacctttccct

SEQ ID NO: 2521069 - DNA, 25 bp, Homo sapien
aataaggcagggtggtacacacttg

SEQ ID NO: 2521070 - DNA, 25 bp, Homo sapien
tttaacttgacattctcactgcttc

SEQ ID NO: 2521071 - DNA, 25 bp, Homo sapien
taaaaataaggcagggtggtacaca

SEQ ID NO: 2521072 - DNA, 25 bp, Homo sapien
acttgacattctcactgcttcttac

SEQ ID NO: 2521073 - DNA, 25 bp, Homo sapien
ctgtcttcgcaacgcagaaggttga

SEQ ID NO: 2521074 - DNA, 25 bp, Homo sapien
cagcttgattctgtcttcgcaacgc

SEQ ID NO: 2521075 - DNA, 25 bp, Homo sapien
acgcagaaggttgatcatcacctga

SEQ ID NO: 2521076 - DNA, 25 bp, Homo sapien
gatcatcacctgaagatgttgaggc

SEQ ID NO: 2521077 - DNA, 25 bp, Homo sapien
tgttggaccaataaagaaagcttta

SEQ ID NO: 2521078 - DNA, 25 bp, Homo sapien
ctgttggaccaataaagaaagcttt

SEQ ID NO: 2521079 - DNA, 25 bp, Homo sapien
ttcactgtgttgttcgggttagtct

SEQ ID NO: 2521080 - DNA, 25 bp, Homo sapien
agcaacacagtgagcaacatagtga

SEQ ID NO: 2521081 - DNA, 25 bp, Homo sapien
tgtgttgttcgggttagtctggaac

SEQ ID NO: 2521082 - DNA, 25 bp, Homo sapien
gagcaacacagtgagcaacatagtg

SEQ ID NO: 2521083 - DNA, 25 bp, Homo sapien
ggtcactgcaaacctgcgtccacta

SEQ ID NO: 2521084 - DNA, 25 bp, Homo sapien
tcagcaacatcaccaacaatggaag

SEQ ID NO: 2521085 - DNA, 25 bp, Homo sapien
catcaccaacaatggaagtttcctc

SEQ ID NO: 2521086 - DNA, 25 bp, Homo sapien
gtccactatgtctaaggccttcaaa

SEQ ID NO: 2521087 - DNA, 25 bp, Homo sapien
aagagtatcaacttagagccctcac

SEQ ID NO: 2521088 - DNA, 25 bp, Homo sapien
gtaagagtatcaacttagagccctc

SEQ ID NO: 2521089 - DNA, 25 bp, Homo sapien
tgtaagagtatcaacttagagccct

SEQ ID NO: 2521090 - DNA, 25 bp, Homo sapien
taagagtatcaacttagagccctca

SEQ ID NO: 2521091 - DNA, 25 bp, Homo sapien
tgcttccctgttgtaagaagagggc

SEQ ID NO: 2521092 - DNA, 25 bp, Homo sapien
tgaagactccgctggccttgagggc

SEQ ID NO: 2521093 - DNA, 25 bp, Homo sapien
gagggctgcgcctttcaccatgaaa

SEQ ID NO: 2521094 - DNA, 25 bp, Homo sapien
ctgttgtaagaagagggctgcgcct

SEQ ID NO: 2521095 - DNA, 25 bp, Homo sapien
cagaatactggacagggatctcact

SEQ ID NO: 2521096 - DNA, 25 bp, Homo sapien
taagaccagagcacagttagaccgg

SEQ ID NO: 2521097 - DNA, 25 bp, Homo sapien
ccaaagttctacataggctctccag

SEQ ID NO: 2521098 - DNA, 25 bp, Homo sapien
aaagctttagcgtggacaaatggca

SEQ ID NO: 2521099 - DNA, 25 bp, Homo sapien
acagccaaccattaacgatgacctt

SEQ ID NO: 2521100 - DNA, 25 bp, Homo sapien
cattaacgatgacctttgccttgga

SEQ ID NO: 2521101 - DNA, 25 bp, Homo sapien
acctttgccttggaaaccatgagca

SEQ ID NO: 2521102 - DNA, 25 bp, Homo sapien
gacctttgccttggaaaccatgagc

SEQ ID NO: 2521103 - DNA, 25 bp, Homo sapien
taaaagaggttcgtggctgcagtgc

SEQ ID NO: 2521104 - DNA, 25 bp, Homo sapien
ccctatggagatcaggaaaagccag

SEQ ID NO: 2521105 - DNA, 25 bp, Homo sapien
aaatggctcttgtggaactcttgtc

SEQ ID NO: 2521106 - DNA, 25 bp, Homo sapien
gagtcctacccgaaaagcaaatggc

SEQ ID NO: 2521107 - DNA, 25 bp, Homo sapien
aaggtataaaggctgcactgtgcgg

SEQ ID NO: 2521108 - DNA, 25 bp, Homo sapien
ggatctaagccccttcacgagggca

SEQ ID NO: 2521109 - DNA, 25 bp, Homo sapien
tcatctgctctaccaggatctaagc

SEQ ID NO: 2521110 - DNA, 25 bp, Homo sapien
tcaggccccatggaagctggagcta

SEQ ID NO: 2521111 - DNA, 25 bp, Homo sapien
agtgggacgaccacggctcacgcag

SEQ ID NO: 2521112 - DNA, 25 bp, Homo sapien
tatcggtaggtaataaaagcttcag

SEQ ID NO: 2521113 - DNA, 25 bp, Homo sapien
aagcttcagatgattttactgatca

SEQ ID NO: 2521114 - DNA, 25 bp, Homo sapien
tctccacttaattcgattttggtaa

SEQ ID NO: 2521115 - DNA, 25 bp, Homo sapien
tactttctttctaaacggacgctgc

SEQ ID NO: 2521116 - DNA, 25 bp, Homo sapien
tgcgagtactttctttctaaacgga

SEQ ID NO: 2521117 - DNA, 25 bp, Homo sapien
ctaaacggacgctgctttgtgtatg

SEQ ID NO: 2521118 - DNA, 25 bp, Homo sapien
ctaaagatgcgagtactttctttct

SEQ ID NO: 2521119 - DNA, 25 bp, Homo sapien
caagtgcaaaagttccaagcccaga

SEQ ID NO: 2521120 - DNA, 25 bp, Homo sapien
ggcctcattaccacccggatgttct

SEQ ID NO: 2521121 - DNA, 25 bp, Homo sapien
caggcttgtgacaacaagatgacag

SEQ ID NO: 2521122 - DNA, 25 bp, Homo sapien
ctactttgcaggcttgtgacaacaa

SEQ ID NO: 2521123 - DNA, 25 bp, Homo sapien
caattcccacagtctgaacggcaca

SEQ ID NO: 2521124 - DNA, 25 bp, Homo sapien
aaagagggactacgagcggccagca

SEQ ID NO: 2521125 - DNA, 25 bp, Homo sapien
agtctgaacggcacagcttccaaag

SEQ ID NO: 2521126 - DNA, 25 bp, Homo sapien
ttccaaagagggactacgagcggcc

SEQ ID NO: 2521127 - DNA, 25 bp, Homo sapien
tccctttgggagaggaacaagagca

SEQ ID NO: 2521128 - DNA, 25 bp, Homo sapien
aaattggcatattctttttgaacgt

SEQ ID NO: 2521129 - DNA, 25 bp, Homo sapien
gcattccttacctgcttgggagaaa

SEQ ID NO: 2521130 - DNA, 25 bp, Homo sapien
gaacaagaattgaaagtctgcttac

SEQ ID NO: 2521131 - DNA, 25 bp, Homo sapien
ctgaggtttaattttcgatcttctt

SEQ ID NO: 2521132 - DNA, 25 bp, Homo sapien
tgaggtttaattttcgatcttcttc

SEQ ID NO: 2521133 - DNA, 25 bp, Homo sapien
cgcctcgggcggcagtctcacattt

SEQ ID NO: 2521134 - DNA, 25 bp, Homo sapien
tcacattttctaccccggtactgga

SEQ ID NO: 2521135 - DNA, 25 bp, Homo sapien
tatccaggaaacctagctacttcta

SEQ ID NO: 2521136 - DNA, 25 bp, Homo sapien
aggcaccactgtcaacacgcctcgg

SEQ ID NO: 2521137 - DNA, 25 bp, Homo sapien
aggaggcggcgctgggcgtgggcga

SEQ ID NO: 2521138 - DNA, 25 bp, Homo sapien
tcgctgttgctggccgaggaggagg

SEQ ID NO: 2521139 - DNA, 25 bp, Homo sapien
gaggaggaggcggcgctgggcgtgg

SEQ ID NO: 2521140 - DNA, 25 bp, Homo sapien
ctcgctgttgctggccgaggaggag

SEQ ID NO: 2521141 - DNA, 25 bp, Homo sapien
gcgccacagacgtctcgagctagag

SEQ ID NO: 2521142 - DNA, 25 bp, Homo sapien
tgcgagggcgccacagacgtctcga

SEQ ID NO: 2521143 - DNA, 25 bp, Homo sapien
agacgtctcgagctagagccgccac

SEQ ID NO: 2521144 - DNA, 25 bp, Homo sapien
agggcgccacagacgtctcgagcta

SEQ ID NO: 2521145 - DNA, 25 bp, Homo sapien
tgaccacttgccacgttatgatctg

SEQ ID NO: 2521146 - DNA, 25 bp, Homo sapien
tgctaaagggcaggccaatgccacc

SEQ ID NO: 2521147 - DNA, 25 bp, Homo sapien
ttgtctgcaccaccctgctaaaggg

SEQ ID NO: 2521148 - DNA, 25 bp, Homo sapien
tgagagtttatgcacatgtcactgc

SEQ ID NO: 2521149 - DNA, 25 bp, Homo sapien
ccatgaggtttcaagcacagggtca

SEQ ID NO: 2521150 - DNA, 25 bp, Homo sapien
gttcctggccacgaaaacagtgctg

SEQ ID NO: 2521151 - DNA, 25 bp, Homo sapien
tcagctggaagggagttgcagcccc

SEQ ID NO: 2521152 - DNA, 25 bp, Homo sapien
gacccatggtggaacaacatcagct

SEQ ID NO: 2521153 - DNA, 25 bp, Homo sapien
ggcaggctatttacaaggcaaagag

SEQ ID NO: 2521154 - DNA, 25 bp, Homo sapien
ttcgtaactctaagagaaacatggc

SEQ ID NO: 2521155 - DNA, 25 bp, Homo sapien
aatgttctcagctaaaggtctcaca

SEQ ID NO: 2521156 - DNA, 25 bp, Homo sapien
caccaccaaggtcagttatatgttt

SEQ ID NO: 2521157 - DNA, 25 bp, Homo sapien
tgtgtaatgatcaagacgtccctgg

SEQ ID NO: 2521158 - DNA, 25 bp, Homo sapien
aaatcccagaagtgatgttgcctgc

SEQ ID NO: 2521159 - DNA, 25 bp, Homo sapien
tgttgcctgcggagaccaactcaaa

SEQ ID NO: 2521160 - DNA, 25 bp, Homo sapien
taacggcgttctgaggttgtcacct

SEQ ID NO: 2521161 - DNA, 25 bp, Homo sapien
tagtcttcccatgtagatccacagg

SEQ ID NO: 2521162 - DNA, 25 bp, Homo sapien
gagcctggacggtatctacagagag

SEQ ID NO: 2521163 - DNA, 25 bp, Homo sapien
tgagtgtgggagaaacctactgaac

SEQ ID NO: 2521164 - DNA, 25 bp, Homo sapien
gaccacacctagatcgcctgcaatt

SEQ ID NO: 2521165 - DNA, 25 bp, Homo sapien
tggtccaggtcatactcttgggtga

SEQ ID NO: 2521166 - DNA, 25 bp, Homo sapien
agtgacaatcagtgccccagttggg

SEQ ID NO: 2521167 - DNA, 25 bp, Homo sapien
tcaagacacaaaaccctgttggtcc

SEQ ID NO: 2521168 - DNA, 25 bp, Homo sapien
tcttgggtgagttcttgatgtcggc

SEQ ID NO: 2521169 - DNA, 25 bp, Homo sapien
ctgcaccgtgcattcctcggccgac

SEQ ID NO: 2521170 - DNA, 25 bp, Homo sapien
gccagagtcaggtacacagaggatt

SEQ ID NO: 2521171 - DNA, 25 bp, Homo sapien
ggtctcaatgggcaaaaagcaggag

SEQ ID NO: 2521172 - DNA, 25 bp, Homo sapien
gccactgtaaactgccagagtcagg

SEQ ID NO: 2521173 - DNA, 25 bp, Homo sapien
ctttggtctcaatgggcaaaaagca

SEQ ID NO: 2521174 - DNA, 25 bp, Homo sapien
cccactcttgccatgccgctgcagg

SEQ ID NO: 2521175 - DNA, 25 bp, Homo sapien
tgagagcacccactcttgccatgcc

SEQ ID NO: 2521176 - DNA, 25 bp, Homo sapien
cgatgaacggagtgatgagagcacc

SEQ ID NO: 2521177 - DNA, 25 bp, Homo sapien
aggccgagggcccgcgttgccgtgg

SEQ ID NO: 2521178 - DNA, 25 bp, Homo sapien
acatatgccgcttgaaagcctccag

SEQ ID NO: 2521179 - DNA, 25 bp, Homo sapien
ctcaggtgtgtaaacatatgccgct

SEQ ID NO: 2521180 - DNA, 25 bp, Homo sapien
taaacgctcttgcaatgaagagtaa

SEQ ID NO: 2521181 - DNA, 25 bp, Homo sapien
tgaagagtaacagagtgagcacatt

SEQ ID NO: 2521182 - DNA, 25 bp, Homo sapien
tgtatctgcacccactcctgggcct

SEQ ID NO: 2521183 - DNA, 25 bp, Homo sapien
ccacacttgggccaatacccgcaac

SEQ ID NO: 2521184 - DNA, 25 bp, Homo sapien
cccacttgtacccacacttgggcca

SEQ ID NO: 2521185 - DNA, 25 bp, Homo sapien
cttgtacccacacttgggccaatac

SEQ ID NO: 2521186 - DNA, 25 bp, Homo sapien
atggtcttcttgcgccccaggcggt

SEQ ID NO: 2521187 - DNA, 25 bp, Homo sapien
gaaggagaagatgacaaagcacagg

SEQ ID NO: 2521188 - DNA, 25 bp, Homo sapien
tcttgcgccccaggcggtcaataat

SEQ ID NO: 2521189 - DNA, 25 bp, Homo sapien
ttccaacacagataaacagcaggag

SEQ ID NO: 2521190 - DNA, 25 bp, Homo sapien
aaaaggtgggtatcaagcagttgcc

SEQ ID NO: 2521191 - DNA, 25 bp, Homo sapien
gtattgtttaaaggctgctcccagg

SEQ ID NO: 2521192 - DNA, 25 bp, Homo sapien
tagaacatgcgccttggagttttcc

SEQ ID NO: 2521193 - DNA, 25 bp, Homo sapien
aggcatcgacttgggaggtaatcca

SEQ ID NO: 2521194 - DNA, 25 bp, Homo sapien
gaaactcagagagggtggtccacag

SEQ ID NO: 2521195 - DNA, 25 bp, Homo sapien
caggtactcgcaggccaggctgcat

SEQ ID NO: 2521196 - DNA, 25 bp, Homo sapien
tctacagccttcttccgactggaga

SEQ ID NO: 2521197 - DNA, 25 bp, Homo sapien
agtccatgtaatcctcctcactcag

SEQ ID NO: 2521198 - DNA, 25 bp, Homo sapien
ggaatccttgtgcagagtccatgct

SEQ ID NO: 2521199 - DNA, 25 bp, Homo sapien
catcaatttgcatggaatccttgtg

SEQ ID NO: 2521200 - DNA, 25 bp, Homo sapien
cagaaatatggcatgcttcatcaat

SEQ ID NO: 2521201 - DNA, 25 bp, Homo sapien
tgcatggaatccttgtgcagagtcc

SEQ ID NO: 2521202 - DNA, 25 bp, Homo sapien
ctgtggtgagtagaactaacccgta

SEQ ID NO: 2521203 - DNA, 25 bp, Homo sapien
gaactaacccgtagtaagagaatgc

SEQ ID NO: 2521204 - DNA, 25 bp, Homo sapien
gccgcagacatctcctgcctggaag

SEQ ID NO: 2521205 - DNA, 25 bp, Homo sapien
cccgtagtaagagaatgcattggaa

SEQ ID NO: 2521206 - DNA, 25 bp, Homo sapien
tcaggaggatgatgttcgaactact

SEQ ID NO: 2521207 - DNA, 25 bp, Homo sapien
gcagtaagctaggagagcgccactg

SEQ ID NO: 2521208 - DNA, 25 bp, Homo sapien
tgaaatttgcaaacgctgcctgaaa

SEQ ID NO: 2521209 - DNA, 25 bp, Homo sapien
gataacctggatatgacggaaatca

SEQ ID NO: 2521210 - DNA, 25 bp, Homo sapien
aatggggtgtgaaaaggtccctcat

SEQ ID NO: 2521211 - DNA, 25 bp, Homo sapien
gtgtgaaaaggtccctcattttgcc

SEQ ID NO: 2521212 - DNA, 25 bp, Homo sapien
tgtccatctaaaatggggtgtgaaa

SEQ ID NO: 2521213 - DNA, 25 bp, Homo sapien
ggtccctcattttgcctcggtcttc

SEQ ID NO: 2521214 - DNA, 25 bp, Homo sapien
tgtttcaaaacaaggacatagtgtt

SEQ ID NO: 2521215 - DNA, 25 bp, Homo sapien
gatacgcacattgcagagtctattg

SEQ ID NO: 2521216 - DNA, 25 bp, Homo sapien
tgcatgcaccccgatacgcacattg

SEQ ID NO: 2521217 - DNA, 25 bp, Homo sapien
tgcaccccgatacgcacattgcaga

SEQ ID NO: 2521218 - DNA, 25 bp, Homo sapien
cacattgcagagtctattggtccag

SEQ ID NO: 2521219 - DNA, 25 bp, Homo sapien
catcataccttgcactttcaggcag

SEQ ID NO: 2521220 - DNA, 25 bp, Homo sapien
tcctctttaaggtggcgattgcctt

SEQ ID NO: 2521221 - DNA, 25 bp, Homo sapien
gatgatgagtttccccagcggcatg

SEQ ID NO: 2521222 - DNA, 25 bp, Homo sapien
gccttttcctggttccctgacagca

SEQ ID NO: 2521223 - DNA, 25 bp, Homo sapien
tggtggatgacgagccctccggttt

SEQ ID NO: 2521224 - DNA, 25 bp, Homo sapien
tgcgccaggatgagcccttctcatg

SEQ ID NO: 2521225 - DNA, 25 bp, Homo sapien
ctgccttagctggaataagtcctcc

SEQ ID NO: 2521226 - DNA, 25 bp, Homo sapien
ctcatggcccttacatggtagtggt

SEQ ID NO: 2521227 - DNA, 25 bp, Homo sapien
gtttacattctgctcactggagtag

SEQ ID NO: 2521228 - DNA, 25 bp, Homo sapien
tcagcctatcctgacttttgacaca

SEQ ID NO: 2521229 - DNA, 25 bp, Homo sapien
tggtcagctgttgtgtctaaacttc

SEQ ID NO: 2521230 - DNA, 25 bp, Homo sapien
ggtgtgtaacgcaatccttgcttgg

SEQ ID NO: 2521231 - DNA, 25 bp, Homo sapien
tatgaatggagcctaagcaaatctg

SEQ ID NO: 2521232 - DNA, 25 bp, Homo sapien
cgctgtctcgggaaccgtcgtatcc

SEQ ID NO: 2521233 - DNA, 25 bp, Homo sapien
gacgtggtccgtcagctattgctct

SEQ ID NO: 2521234 - DNA, 25 bp, Homo sapien
tccggtgcggctgcaatgctgagct

SEQ ID NO: 2521235 - DNA, 25 bp, Homo sapien
gggcactccagtcttgtcaaggccc

SEQ ID NO: 2521236 - DNA, 25 bp, Homo sapien
agtccttcggcaacaccaattctgt

SEQ ID NO: 2521237 - DNA, 25 bp, Homo sapien
cccgcgcgggcattctggaaggttc

SEQ ID NO: 2521238 - DNA, 25 bp, Homo sapien
cagcttgggcccgtgacggcttttt

SEQ ID NO: 2521239 - DNA, 25 bp, Homo sapien
ccttatgctgccaaagtcatggaca

SEQ ID NO: 2521240 - DNA, 25 bp, Homo sapien
ggaatggagtttccaaagtcgccac

SEQ ID NO: 2521241 - DNA, 25 bp, Homo sapien
tctcctcgtgatgtcattttgcaga

SEQ ID NO: 2521242 - DNA, 25 bp, Homo sapien
tgaacttcgtggttttaagcacaga

SEQ ID NO: 2521243 - DNA, 25 bp, Homo sapien
tacgagcgcgtcctttccaggatgc

SEQ ID NO: 2521244 - DNA, 25 bp, Homo sapien
catggagacatgcactctggacact

SEQ ID NO: 2521245 - DNA, 25 bp, Homo sapien
tgtactgttgcgtgtgcaagcggcc

SEQ ID NO: 2521246 - DNA, 25 bp, Homo sapien
tgttctaagagcaggctccacctgg

SEQ ID NO: 2521247 - DNA, 25 bp, Homo sapien
ttgtctaatcaacgtttccacttag

SEQ ID NO: 2521248 - DNA, 25 bp, Homo sapien
cctttgtctaatcaacgtttccact

SEQ ID NO: 2521249 - DNA, 25 bp, Homo sapien
tcagaggggaggtacctttgtctaa

SEQ ID NO: 2521250 - DNA, 25 bp, Homo sapien
taatcaacgtttccacttagatctt

SEQ ID NO: 2521251 - DNA, 25 bp, Homo sapien
ggaacaaatgcccaatcatgtgacc

SEQ ID NO: 2521252 - DNA, 25 bp, Homo sapien
tacccaagtctggtggaacaaatgc

SEQ ID NO: 2521253 - DNA, 25 bp, Homo sapien
tctggtggaacaaatgcccaatcat

SEQ ID NO: 2521254 - DNA, 25 bp, Homo sapien
tgttttacccaagtctggtggaaca

SEQ ID NO: 2521255 - DNA, 25 bp, Homo sapien
tgtgaacaatagctgtgcaaagcct

SEQ ID NO: 2521256 - DNA, 25 bp, Homo sapien
tattatgcattaagtagcagcccaa

SEQ ID NO: 2521257 - DNA, 25 bp, Homo sapien
cagagaccagggtttgagccaaggc

SEQ ID NO: 2521258 - DNA, 25 bp, Homo sapien
gggctgagccttggaatatatggtt

SEQ ID NO: 2521259 - DNA, 25 bp, Homo sapien
gttacataacaagccctacgcttta

SEQ ID NO: 2521260 - DNA, 25 bp, Homo sapien
ttgttacataacaagccctacgctt

SEQ ID NO: 2521261 - DNA, 25 bp, Homo sapien
tgcattgttacataacaagccctac

SEQ ID NO: 2521262 - DNA, 25 bp, Homo sapien
gcattgttacataacaagccctacg

SEQ ID NO: 2521263 - DNA, 25 bp, Homo sapien
agcaaaattttacgaaaagtcagat

SEQ ID NO: 2521264 - DNA, 25 bp, Homo sapien
catcattagtaagctcccgtgggcc

SEQ ID NO: 2521265 - DNA, 25 bp, Homo sapien
cacgggaatccttatgccggaagac

SEQ ID NO: 2521266 - DNA, 25 bp, Homo sapien
tctgcaggcaccgaaggagacagag

SEQ ID NO: 2521267 - DNA, 25 bp, Homo sapien
tctcacgggaagactgtggtaccag

SEQ ID NO: 2521268 - DNA, 25 bp, Homo sapien
acagtgcataaaaacaaccctctcc

SEQ ID NO: 2521269 - DNA, 25 bp, Homo sapien
gagaaaacaaacacagtgcataaaa

SEQ ID NO: 2521270 - DNA, 25 bp, Homo sapien
tgcataaaaacaaccctctcctgaa

SEQ ID NO: 2521271 - DNA, 25 bp, Homo sapien
aacacagtgcataaaaacaaccctc

SEQ ID NO: 2521272 - DNA, 25 bp, Homo sapien
tgccgttgtttctgcgagggcttga

SEQ ID NO: 2521273 - DNA, 25 bp, Homo sapien
gctgtacctgccgttgtttctgcga

SEQ ID NO: 2521274 - DNA, 25 bp, Homo sapien
tttctgcgagggcttgaggtccaca

SEQ ID NO: 2521275 - DNA, 25 bp, Homo sapien
tacctgccgttgtttctgcgagggc

SEQ ID NO: 2521276 - DNA, 25 bp, Homo sapien
tgagcacaaagttgaaggtctgtcc

SEQ ID NO: 2521277 - DNA, 25 bp, Homo sapien
ctgttgatgagcacaaagttgaagg

SEQ ID NO: 2521278 - DNA, 25 bp, Homo sapien
gcacaaagttgaaggtctgtccagt

SEQ ID NO: 2521279 - DNA, 25 bp, Homo sapien
caaagttgaaggtctgtccagtcac

SEQ ID NO: 2521280 - DNA, 25 bp, Homo sapien
gacgtgatcccggatgcgctctaga

SEQ ID NO: 2521281 - DNA, 25 bp, Homo sapien
cccagagacgtgatcccggatgcgc

SEQ ID NO: 2521282 - DNA, 25 bp, Homo sapien
ccggatgcgctctagaactgggatc

SEQ ID NO: 2521283 - DNA, 25 bp, Homo sapien
gtgatcccggatgcgctctagaact

SEQ ID NO: 2521284 - DNA, 25 bp, Homo sapien
aaatgtgtaggtcagcccagcgtcg

SEQ ID NO: 2521285 - DNA, 25 bp, Homo sapien
actgtgccacttcccgaatacctgg

SEQ ID NO: 2521286 - DNA, 25 bp, Homo sapien
cacttcccgaatacctggactctgg

SEQ ID NO: 2521287 - DNA, 25 bp, Homo sapien
gtcgccatacgttgcctgcttcctg

SEQ ID NO: 2521288 - DNA, 25 bp, Homo sapien
ctcagcccgaatgtgccgccagcta

SEQ ID NO: 2521289 - DNA, 25 bp, Homo sapien
ggccctcagcccgaatgtgccgcca

SEQ ID NO: 2521290 - DNA, 25 bp, Homo sapien
cgaatgtgccgccagctagggcctg

SEQ ID NO: 2521291 - DNA, 25 bp, Homo sapien
cagcccgaatgtgccgccagctagg

SEQ ID NO: 2521292 - DNA, 25 bp, Homo sapien
gggtctcacagcaacattcctagtt

SEQ ID NO: 2521293 - DNA, 25 bp, Homo sapien
aattgctcaagttctatccccagtg

SEQ ID NO: 2521294 - DNA, 25 bp, Homo sapien
ccagtgcaaaaatctgtttgtccaa

SEQ ID NO: 2521295 - DNA, 25 bp, Homo sapien
caggaaagaagggacgtcagtggcg

SEQ ID NO: 2521296 - DNA, 25 bp, Homo sapien
cagaagatgttaaagccggaaggga

SEQ ID NO: 2521297 - DNA, 25 bp, Homo sapien
gaactacctcctgggaattcgcacg

SEQ ID NO: 2521298 - DNA, 25 bp, Homo sapien
gctggctagcttgcaaaaacccaga

SEQ ID NO: 2521299 - DNA, 25 bp, Homo sapien
ttcgcacgccacagctaaacttaga

SEQ ID NO: 2521300 - DNA, 25 bp, Homo sapien
gatacgattcagaagcgagacgcaa

SEQ ID NO: 2521301 - DNA, 25 bp, Homo sapien
tcagaagcgagacgcaaagaggtta

SEQ ID NO: 2521302 - DNA, 25 bp, Homo sapien
ttaaaatagatcagtctagtgatgc

SEQ ID NO: 2521303 - DNA, 25 bp, Homo sapien
gatgctcaagtggatacgattcaga

SEQ ID NO: 2521304 - DNA, 25 bp, Homo sapien
gcagctccggcgcagatcggaatcc

SEQ ID NO: 2521305 - DNA, 25 bp, Homo sapien
ggaatcccgcagtcaccctggtggc

SEQ ID NO: 2521306 - DNA, 25 bp, Homo sapien
tcactgcaacacgtccgtggggtgg

SEQ ID NO: 2521307 - DNA, 25 bp, Homo sapien
agagtgctctagcatcgcagctccg

SEQ ID NO: 2521308 - DNA, 25 bp, Homo sapien
tgaagcagcttagagttgcagcaac

SEQ ID NO: 2521309 - DNA, 25 bp, Homo sapien
tcacagtaacttcataagctgggcg

SEQ ID NO: 2521310 - DNA, 25 bp, Homo sapien
ggattctttagagctctgcagggct

SEQ ID NO: 2521311 - DNA, 25 bp, Homo sapien
cctgtgctgcttgcgtgtgtgttca

SEQ ID NO: 2521312 - DNA, 25 bp, Homo sapien
tattgggtctgcacctccatccttg

SEQ ID NO: 2521313 - DNA, 25 bp, Homo sapien
gattttctcctagggttatgtccag

SEQ ID NO: 2521314 - DNA, 25 bp, Homo sapien
caggcccctcgcagcataaggatgt

SEQ ID NO: 2521315 - DNA, 25 bp, Homo sapien
taagagaccgagagaagtaagctgg

SEQ ID NO: 2521316 - DNA, 25 bp, Homo sapien
tgtttctagactccgagacatctgg

SEQ ID NO: 2521317 - DNA, 25 bp, Homo sapien
acatctggaactcggaagtgaggcc

SEQ ID NO: 2521318 - DNA, 25 bp, Homo sapien
ccagtgtccgaagaaagaagccaca

SEQ ID NO: 2521319 - DNA, 25 bp, Homo sapien
ggaagactccctgatgacgcactgg

SEQ ID NO: 2521320 - DNA, 25 bp, Homo sapien
gattctttagaaactaggcaactca

SEQ ID NO: 2521321 - DNA, 25 bp, Homo sapien
tgattctttagaaactaggcaactc

SEQ ID NO: 2521322 - DNA, 25 bp, Homo sapien
tcaagagactttcgcagtggcccaa

SEQ ID NO: 2521323 - DNA, 25 bp, Homo sapien
gaatgccatgtatacctccaagctg

SEQ ID NO: 2521324 - DNA, 25 bp, Homo sapien
gactgataggcctttagactgcgga

SEQ ID NO: 2521325 - DNA, 25 bp, Homo sapien
tttagagtcaggtagcccagggtcg

SEQ ID NO: 2521326 - DNA, 25 bp, Homo sapien
cccttctggacaggcgtctgacaga

SEQ ID NO: 2521327 - DNA, 25 bp, Homo sapien
tctgacagatgaaccccttggaaca

SEQ ID NO: 2521328 - DNA, 25 bp, Homo sapien
gggctgttgtgattacaggactgtt

SEQ ID NO: 2521329 - DNA, 25 bp, Homo sapien
catctgtcgatgctgttttcctgtc

SEQ ID NO: 2521330 - DNA, 25 bp, Homo sapien
aggactgagcagtttctcgtgttca

SEQ ID NO: 2521331 - DNA, 25 bp, Homo sapien
caggactgagcagtttctcgtgttc

SEQ ID NO: 2521332 - DNA, 25 bp, Homo sapien
ggactgagcagtttctcgtgttcat

SEQ ID NO: 2521333 - DNA, 25 bp, Homo sapien
ggttatttcagcgaagggcagcagc

SEQ ID NO: 2521334 - DNA, 25 bp, Homo sapien
tggcatctggttttcgggtccgctg

SEQ ID NO: 2521335 - DNA, 25 bp, Homo sapien
ctgttgcttgggttaggtttgcaag

SEQ ID NO: 2521336 - DNA, 25 bp, Homo sapien
gcagcttgtcatgatagcgtccaca

SEQ ID NO: 2521337 - DNA, 25 bp, Homo sapien
tagacatgtgtgctggtgcctgctg

SEQ ID NO: 2521338 - DNA, 25 bp, Homo sapien
gttccagcctgttggaaacaacgca

SEQ ID NO: 2521339 - DNA, 25 bp, Homo sapien
taatgaactgtagtgagaatcccac

SEQ ID NO: 2521340 - DNA, 25 bp, Homo sapien
catatcaaaatgaggctgaggtcca

SEQ ID NO: 2521341 - DNA, 25 bp, Homo sapien
tggcctgttttcatgattctgatac

SEQ ID NO: 2521342 - DNA, 25 bp, Homo sapien
tgattctgatacattatatttttac

SEQ ID NO: 2521343 - DNA, 25 bp, Homo sapien
tacacatttataggatacatgtaaa

SEQ ID NO: 2521344 - DNA, 25 bp, Homo sapien
cgtggccttcctgtgaagtgaattt

SEQ ID NO: 2521345 - DNA, 25 bp, Homo sapien
tttttattgagagagtgaaatgcta

SEQ ID NO: 2521346 - DNA, 25 bp, Homo sapien
ttttttattgagagagtgaaatgct

SEQ ID NO: 2521347 - DNA, 25 bp, Homo sapien
tattgagagagtgaaatgctatttt

SEQ ID NO: 2521348 - DNA, 25 bp, Homo sapien
tttattgagagagtgaaatgctatt

SEQ ID NO: 2521349 - DNA, 25 bp, Homo sapien
ttgatgagcaccgatggtgggatct

SEQ ID NO: 2521350 - DNA, 25 bp, Homo sapien
tgctcccttggagggccacttgagt

SEQ ID NO: 2521351 - DNA, 25 bp, Homo sapien
gttactgttgcttcctcgcctgctg

SEQ ID NO: 2521352 - DNA, 25 bp, Homo sapien
ccacggcccagcttgctcacgagtg

SEQ ID NO: 2521353 - DNA, 25 bp, Homo sapien
gaccatgccgatttgctcagggaga

SEQ ID NO: 2521354 - DNA, 25 bp, Homo sapien
cctggtcaatgtggaagcccatgag

SEQ ID NO: 2521355 - DNA, 25 bp, Homo sapien
ggatgctgaatgtaatgcctggtca

SEQ ID NO: 2521356 - DNA, 25 bp, Homo sapien
ctcagggagaacgttgcaatgcacc

SEQ ID NO: 2521357 - DNA, 25 bp, Homo sapien
tgacaccacagctgagaccttgagt

SEQ ID NO: 2521358 - DNA, 25 bp, Homo sapien
tgacatctgactgtgcttgtacctt

SEQ ID NO: 2521359 - DNA, 25 bp, Homo sapien
atctgactgtgcttgtaccttcttt

SEQ ID NO: 2521360 - DNA, 25 bp, Homo sapien
gacatctgactgtgcttgtaccttc

SEQ ID NO: 2521361 - DNA, 25 bp, Homo sapien
cattgacatctgactgtgcttgtac

SEQ ID NO: 2521362 - DNA, 25 bp, Homo sapien
taggtgtttccggttgctgaaccag

SEQ ID NO: 2521363 - DNA, 25 bp, Homo sapien
agctagggatccctaggtgtttccg

SEQ ID NO: 2521364 - DNA, 25 bp, Homo sapien
tccggttgctgaaccagggctggat

SEQ ID NO: 2521365 - DNA, 25 bp, Homo sapien
gattttggagaacagtctgctgaca

SEQ ID NO: 2521366 - DNA, 25 bp, Homo sapien
tgtgacccggacatccaattcctct

SEQ ID NO: 2521367 - DNA, 25 bp, Homo sapien
gtgacccggacatccaattcctctg

SEQ ID NO: 2521368 - DNA, 25 bp, Homo sapien
cttccctcgctcacccagctggccc

SEQ ID NO: 2521369 - DNA, 25 bp, Homo sapien
gcttccctcgctcacccagctggcc

SEQ ID NO: 2521370 - DNA, 25 bp, Homo sapien
gcccgcagacccaggcggtggcaga

SEQ ID NO: 2521371 - DNA, 25 bp, Homo sapien
cagacccaggcggtggcagaactcc

SEQ ID NO: 2521372 - DNA, 25 bp, Homo sapien
atgctgaaatccagacgcccgcaga

SEQ ID NO: 2521373 - DNA, 25 bp, Homo sapien
gacccaggcggtggcagaactcctg

SEQ ID NO: 2521374 - DNA, 25 bp, Homo sapien
tctaacagactatcggaaaggtggg

SEQ ID NO: 2521375 - DNA, 25 bp, Homo sapien
gatgttgcccaaacacggagtcttt

SEQ ID NO: 2521376 - DNA, 25 bp, Homo sapien
catcctggctctagggttcgggaac

SEQ ID NO: 2521377 - DNA, 25 bp, Homo sapien
gagaagtctcactcaacacgggcag

SEQ ID NO: 2521378 - DNA, 25 bp, Homo sapien
ggcaacttcgccacaggtccaggag

SEQ ID NO: 2521379 - DNA, 25 bp, Homo sapien
ttcggggacaatgagggacctgcct

SEQ ID NO: 2521380 - DNA, 25 bp, Homo sapien
agttctctgcccaagccgggtgccg

SEQ ID NO: 2521381 - DNA, 25 bp, Homo sapien
tctgggaacaccctgttctagtcag

SEQ ID NO: 2521382 - DNA, 25 bp, Homo sapien
aagcagggctataggcttgttcccc

SEQ ID NO: 2521383 - DNA, 25 bp, Homo sapien
tcaaagcagggctataggcttgttc

SEQ ID NO: 2521384 - DNA, 25 bp, Homo sapien
gctataggcttgttcccctgtgcac

SEQ ID NO: 2521385 - DNA, 25 bp, Homo sapien
gggctataggcttgttcccctgtgc

SEQ ID NO: 2521386 - DNA, 25 bp, Homo sapien
cactgtccggagtggagtacgctgt

SEQ ID NO: 2521387 - DNA, 25 bp, Homo sapien
gagtacgctgtgtagagacccgtca

SEQ ID NO: 2521388 - DNA, 25 bp, Homo sapien
gcagccacactgtccggagtggagt

SEQ ID NO: 2521389 - DNA, 25 bp, Homo sapien
gagctggtgcccgatgcagccacac

SEQ ID NO: 2521390 - DNA, 25 bp, Homo sapien
tgcaagtctgggaaggactggtcgc

SEQ ID NO: 2521391 - DNA, 25 bp, Homo sapien
ctgcaaaggcgcccagtgtgtccaa

SEQ ID NO: 2521392 - DNA, 25 bp, Homo sapien
tgccacccgaggcaggggttaggcc

SEQ ID NO: 2521393 - DNA, 25 bp, Homo sapien
agtctgcaaaggcgcccagtgtgtc

SEQ ID NO: 2521394 - DNA, 25 bp, Homo sapien
ctacaggagcccttcccatggcggg

SEQ ID NO: 2521395 - DNA, 25 bp, Homo sapien
cctgcagagcgaagtccatgatgct

SEQ ID NO: 2521396 - DNA, 25 bp, Homo sapien
catgatgctcgggtcgagggcatcc

SEQ ID NO: 2521397 - DNA, 25 bp, Homo sapien
acctcagtgttcatgtcggtgctga

SEQ ID NO: 2521398 - DNA, 25 bp, Homo sapien
atctagcaaaacatcataccctctg

SEQ ID NO: 2521399 - DNA, 25 bp, Homo sapien
gaataagagacgacatcaaaggctg

SEQ ID NO: 2521400 - DNA, 25 bp, Homo sapien
tcatcagataataacactagcccct

SEQ ID NO: 2521401 - DNA, 25 bp, Homo sapien
cacacggttgttgtggaaatgtaac

SEQ ID NO: 2521402 - DNA, 25 bp, Homo sapien
caatccatgggtaccatttgcaggt

SEQ ID NO: 2521403 - DNA, 25 bp, Homo sapien
tctgggcaagaaactatggatgaca

SEQ ID NO: 2521404 - DNA, 25 bp, Homo sapien
aacccctattgtgagatgtctggac

SEQ ID NO: 2521405 - DNA, 25 bp, Homo sapien
gatgacaagtgagatccaacagctt

SEQ ID NO: 2521406 - DNA, 25 bp, Homo sapien
gctacgctccggtggatggcggcca

SEQ ID NO: 2521407 - DNA, 25 bp, Homo sapien
ggttggctacgctccggtggatggc

SEQ ID NO: 2521408 - DNA, 25 bp, Homo sapien
tggctacgctccggtggatggcggc

SEQ ID NO: 2521409 - DNA, 25 bp, Homo sapien
cggggttggctacgctccggtggat

SEQ ID NO: 2521410 - DNA, 25 bp, Homo sapien
ttggccatgctccagtggatgccag

SEQ ID NO: 2521411 - DNA, 25 bp, Homo sapien
cgggattggccatgctccagtggat

SEQ ID NO: 2521412 - DNA, 25 bp, Homo sapien
gattggccatgctccagtggatggc

SEQ ID NO: 2521413 - DNA, 25 bp, Homo sapien
atgctccagtggatggcagccaggt

SEQ ID NO: 2521414 - DNA, 25 bp, Homo sapien
tgctccagtggatggcagccaggtc

SEQ ID NO: 2521415 - DNA, 25 bp, Homo sapien
gttgcccatgctccggtggatggca

SEQ ID NO: 2521416 - DNA, 25 bp, Homo sapien
tggggttgcccatgctccggtggat

SEQ ID NO: 2521417 - DNA, 25 bp, Homo sapien
gcccatgctccggtggatggcagcc

SEQ ID NO: 2521418 - DNA, 25 bp, Homo sapien
gggttgcccatgctccggtggatgg

SEQ ID NO: 2521419 - DNA, 25 bp, Homo sapien
ttggccatgctctggtggatgtcgg

SEQ ID NO: 2521420 - DNA, 25 bp, Homo sapien
gggttggccatgctctggtggatgt

SEQ ID NO: 2521421 - DNA, 25 bp, Homo sapien
tggccatgctctggtggatgtcggc

SEQ ID NO: 2521422 - DNA, 25 bp, Homo sapien
gccatgctctggtggatgtcggcca

SEQ ID NO: 2521423 - DNA, 25 bp, Homo sapien
cgggaggagccgctcatcttgttct

SEQ ID NO: 2521424 - DNA, 25 bp, Homo sapien
gggaggagccgctcatcttgttctc

SEQ ID NO: 2521425 - DNA, 25 bp, Homo sapien
gagacaggttgtgccgcaccgagtt

SEQ ID NO: 2521426 - DNA, 25 bp, Homo sapien
agagacaggttgtgccgcaccgagt

SEQ ID NO: 2521427 - DNA, 25 bp, Homo sapien
cagagacaggttgtgccgcaccgag

SEQ ID NO: 2521428 - DNA, 25 bp, Homo sapien
gacaggttgtgccgcaccgagttct

SEQ ID NO: 2521429 - DNA, 25 bp, Homo sapien
aggcaggctgcctgtcttgctgttc

SEQ ID NO: 2521430 - DNA, 25 bp, Homo sapien
ccttcatgaagctgtagatctcgct

SEQ ID NO: 2521431 - DNA, 25 bp, Homo sapien
gtagatctcgctcacaggcaggctg

SEQ ID NO: 2521432 - DNA, 25 bp, Homo sapien
tcttcagggccatggcgatcagaca

SEQ ID NO: 2521433 - DNA, 25 bp, Homo sapien
agggcaggacagggcaggccaggca

SEQ ID NO: 2521434 - DNA, 25 bp, Homo sapien
gggcaggacagggcaggccaggcat

SEQ ID NO: 2521435 - DNA, 25 bp, Homo sapien
cagggcaggacagggcaggccaggc

SEQ ID NO: 2521436 - DNA, 25 bp, Homo sapien
gaaagggtctcaggctgacagccca

SEQ ID NO: 2521437 - DNA, 25 bp, Homo sapien
gtagatgggcttggggtagtgtttg

SEQ ID NO: 2521438 - DNA, 25 bp, Homo sapien
ggcttggggtagtgtttggggtgca

SEQ ID NO: 2521439 - DNA, 25 bp, Homo sapien
agatgggcttggggtagtgtttggg

SEQ ID NO: 2521440 - DNA, 25 bp, Homo sapien
gagtagatgggcttggggtagtgtt

SEQ ID NO: 2521441 - DNA, 25 bp, Homo sapien
cgcaccccaaatggggggccataga

SEQ ID NO: 2521442 - DNA, 25 bp, Homo sapien
gatgaatgcacagccacgtggggct

SEQ ID NO: 2521443 - DNA, 25 bp, Homo sapien
aaatggggggccatagaggcccaca

SEQ ID NO: 2521444 - DNA, 25 bp, Homo sapien
gagatgaatgcacagccacgtgggg

SEQ ID NO: 2521445 - DNA, 25 bp, Homo sapien
gggtggcaggtgagtacagatgcgg

SEQ ID NO: 2521446 - DNA, 25 bp, Homo sapien
gagcgggaactgtggttgggtggca

SEQ ID NO: 2521447 - DNA, 25 bp, Homo sapien
gtgagtacagatgcggcgggtcctg

SEQ ID NO: 2521448 - DNA, 25 bp, Homo sapien
gccagatgagggctggccccccacg

SEQ ID NO: 2521449 - DNA, 25 bp, Homo sapien
ccagacctggcatgcctcggggggc

SEQ ID NO: 2521450 - DNA, 25 bp, Homo sapien
tgtggccagttatggggcccagacc

SEQ ID NO: 2521451 - DNA, 25 bp, Homo sapien
gtggccagttatggggcccagacct

SEQ ID NO: 2521452 - DNA, 25 bp, Homo sapien
gacctggcatgcctcggggggccat

SEQ ID NO: 2521453 - DNA, 25 bp, Homo sapien
atgcaggtcggccaccccagccaag

SEQ ID NO: 2521454 - DNA, 25 bp, Homo sapien
tgcaggtcggccaccccagccaagg

SEQ ID NO: 2521455 - DNA, 25 bp, Homo sapien
gcaggtcggccaccccagccaaggc

SEQ ID NO: 2521456 - DNA, 25 bp, Homo sapien
ctgggtgtggatgtggcacgcaggg

SEQ ID NO: 2521457 - DNA, 25 bp, Homo sapien
gtgagccacgacagcgactgcaggt

SEQ ID NO: 2521458 - DNA, 25 bp, Homo sapien
tgcaggtccccgggaaggtcatcat

SEQ ID NO: 2521459 - DNA, 25 bp, Homo sapien
tgctgcagccgaggcacatccaccg

SEQ ID NO: 2521460 - DNA, 25 bp, Homo sapien
gggatagccatgtcactccccagtg

SEQ ID NO: 2521461 - DNA, 25 bp, Homo sapien
tcatgggcaaaacatcggttgtagt

SEQ ID NO: 2521462 - DNA, 25 bp, Homo sapien
tgtagtggatgtaggatagctgccc

SEQ ID NO: 2521463 - DNA, 25 bp, Homo sapien
ccagccgcaacagattcatgggcaa

SEQ ID NO: 2521464 - DNA, 25 bp, Homo sapien
cagtaacctgctgtgactccccact

SEQ ID NO: 2521465 - DNA, 25 bp, Homo sapien
tcagtaacctgctgtgactccccac

SEQ ID NO: 2521466 - DNA, 25 bp, Homo sapien
actggccagacaacctcccggcgcc

SEQ ID NO: 2521467 - DNA, 25 bp, Homo sapien
cctggtggtgcaagccatgctcctg

SEQ ID NO: 2521468 - DNA, 25 bp, Homo sapien
cttgcccataaggtcacctgaggag

SEQ ID NO: 2521469 - DNA, 25 bp, Homo sapien
tcttccttgcccataaggtcacctg

SEQ ID NO: 2521470 - DNA, 25 bp, Homo sapien
aaggtcacctgaggagctgttctct

SEQ ID NO: 2521471 - DNA, 25 bp, Homo sapien
tccttgcccataaggtcacctgagg

SEQ ID NO: 2521472 - DNA, 25 bp, Homo sapien
aataattcctgacattatggatgag

SEQ ID NO: 2521473 - DNA, 25 bp, Homo sapien
atgaggtgtcactttctatcatctc

SEQ ID NO: 2521474 - DNA, 25 bp, Homo sapien
tatggatgaggtgtcactttctatc

SEQ ID NO: 2521475 - DNA, 25 bp, Homo sapien
gagtttcgaataattcctgacatta

SEQ ID NO: 2521476 - DNA, 25 bp, Homo sapien
aatttggccgccgtcgcagctcgaa

SEQ ID NO: 2521477 - DNA, 25 bp, Homo sapien
tcgcgttccgcaatttggccgccgt

SEQ ID NO: 2521478 - DNA, 25 bp, Homo sapien
gccgtcgcagctcgaaccgttttta

SEQ ID NO: 2521479 - DNA, 25 bp, Homo sapien
tcagagcatgcgcagtagccgtgcg

SEQ ID NO: 2521480 - DNA, 25 bp, Homo sapien
tcttcttcgcatcagcccttgatga

SEQ ID NO: 2521481 - DNA, 25 bp, Homo sapien
ttcgcatcagcccttgatgacatag

SEQ ID NO: 2521482 - DNA, 25 bp, Homo sapien
ggttcttcttcgcatcagcccttga

SEQ ID NO: 2521483 - DNA, 25 bp, Homo sapien
ctgggttcttcttcgcatcagccct

SEQ ID NO: 2521484 - DNA, 25 bp, Homo sapien
gagtaaatagatcagctttcattct

SEQ ID NO: 2521485 - DNA, 25 bp, Homo sapien
tctgccaggagtaaatagatcagct

SEQ ID NO: 2521486 - DNA, 25 bp, Homo sapien
tgccaggagtaaatagatcagcttt

SEQ ID NO: 2521487 - DNA, 25 bp, Homo sapien
ccaggagtaaatagatcagctttca

SEQ ID NO: 2521488 - DNA, 25 bp, Homo sapien
ctgaatcatcaaagacataacaaat

SEQ ID NO: 2521489 - DNA, 25 bp, Homo sapien
gaatcatcaaagacataacaaattg

SEQ ID NO: 2521490 - DNA, 25 bp, Homo sapien
tctgaatcatcaaagacataacaaa

SEQ ID NO: 2521491 - DNA, 25 bp, Homo sapien
gctcaactgagaatccaaacttgta

SEQ ID NO: 2521492 - DNA, 25 bp, Homo sapien
ttgctcaactgagaatccaaacttg

SEQ ID NO: 2521493 - DNA, 25 bp, Homo sapien
tcaactgagaatccaaacttgtact

SEQ ID NO: 2521494 - DNA, 25 bp, Homo sapien
tcattgctcaactgagaatccaaac

SEQ ID NO: 2521495 - DNA, 25 bp, Homo sapien
actccatgacatgcttgatgttgag

SEQ ID NO: 2521496 - DNA, 25 bp, Homo sapien
acttatacgcacaatcttgaatgca

SEQ ID NO: 2521497 - DNA, 25 bp, Homo sapien
aaatggcacacttatacgcacaatc

SEQ ID NO: 2521498 - DNA, 25 bp, Homo sapien
tcttgaatgcagatcactttacagt

SEQ ID NO: 2521499 - DNA, 25 bp, Homo sapien
ggtgaatcagacttctcgggcacaa

SEQ ID NO: 2521500 - DNA, 25 bp, Homo sapien
gaatcagacttctcgggcacaacct

SEQ ID NO: 2521501 - DNA, 25 bp, Homo sapien
aagaggtgaatcagacttctcgggc

SEQ ID NO: 2521502 - DNA, 25 bp, Homo sapien
agacttctcgggcacaacctgctgg

SEQ ID NO: 2521503 - DNA, 25 bp, Homo sapien
tccataggcaccagtctcctctaag

SEQ ID NO: 2521504 - DNA, 25 bp, Homo sapien
ggactcatggtgcatggatcatcca

SEQ ID NO: 2521505 - DNA, 25 bp, Homo sapien
cctctctgaggactcatggtgcatg

SEQ ID NO: 2521506 - DNA, 25 bp, Homo sapien
catggtgcatggatcatccattgcc

SEQ ID NO: 2521507 - DNA, 25 bp, Homo sapien
caaggcatacaatgtggtgggtgat

SEQ ID NO: 2521508 - DNA, 25 bp, Homo sapien
gccatgatcctgttgcagcagcagg

SEQ ID NO: 2521509 - DNA, 25 bp, Homo sapien
aggcatacaatgtggtgggtgatgg

SEQ ID NO: 2521510 - DNA, 25 bp, Homo sapien
ttagccatgatcctgttgcagcagc

SEQ ID NO: 2521511 - DNA, 25 bp, Homo sapien
tcaggtagacaatggtaaagctctc

SEQ ID NO: 2521512 - DNA, 25 bp, Homo sapien
tgaattttgattcctaaacttgtaa

SEQ ID NO: 2521513 - DNA, 25 bp, Homo sapien
aacttgtaattctagatgtttcaaa

SEQ ID NO: 2521514 - DNA, 25 bp, Homo sapien
acttgtaattctagatgtttcaaat

SEQ ID NO: 2521515 - DNA, 25 bp, Homo sapien
ttgaattttgattcctaaacttgta

SEQ ID NO: 2521516 - DNA, 25 bp, Homo sapien
ttcagtgcaatagcaaaattcagaa

SEQ ID NO: 2521517 - DNA, 25 bp, Homo sapien
tctgtcttatcacaaatcattcagt

SEQ ID NO: 2521518 - DNA, 25 bp, Homo sapien
gtcttatcacaaatcattcagtgca

SEQ ID NO: 2521519 - DNA, 25 bp, Homo sapien
tcctcccttgccataataagctata

SEQ ID NO: 2521520 - DNA, 25 bp, Homo sapien
tcccttgccataataagctataaaa

SEQ ID NO: 2521521 - DNA, 25 bp, Homo sapien
ttcttgcatatttgtcacacaaggg

SEQ ID NO: 2521522 - DNA, 25 bp, Homo sapien
ctggctaacacagtcgaatctcttg

SEQ ID NO: 2521523 - DNA, 25 bp, Homo sapien
ctcttgtgggttttctagatccacc

SEQ ID NO: 2521524 - DNA, 25 bp, Homo sapien
tgctaaagtttgcatcctgcatgta

SEQ ID NO: 2521525 - DNA, 25 bp, Homo sapien
cttgtgggttttctagatccaccag

SEQ ID NO: 2521526 - DNA, 25 bp, Homo sapien
ttgcatcctgcatgtaaaattcctg

SEQ ID NO: 2521527 - DNA, 25 bp, Homo sapien
tggaaaggtgatgtctcaactcggg

SEQ ID NO: 2521528 - DNA, 25 bp, Homo sapien
ttcgtgtttagtgagccaggaagca

SEQ ID NO: 2521529 - DNA, 25 bp, Homo sapien
tgcagcattaatttctggttcgtgt

SEQ ID NO: 2521530 - DNA, 25 bp, Homo sapien
tcaactcgggttttaaatagcattc

SEQ ID NO: 2521531 - DNA, 25 bp, Homo sapien
gtctgtgcccgggagatggccttcc

SEQ ID NO: 2521532 - DNA, 25 bp, Homo sapien
tcgctgatgtatagcaagtgtttca

SEQ ID NO: 2521533 - DNA, 25 bp, Homo sapien
ggcctgtggtccctcgctgatgtat

SEQ ID NO: 2521534 - DNA, 25 bp, Homo sapien
tcaaactcttgttagcaaagatggt

SEQ ID NO: 2521535 - DNA, 25 bp, Homo sapien
caggtggaatgaaatatcgggcagt

SEQ ID NO: 2521536 - DNA, 25 bp, Homo sapien
tgatgtcgccggcataacaagaaag

SEQ ID NO: 2521537 - DNA, 25 bp, Homo sapien
tttcatgtgcggagctgatgtcgcc

SEQ ID NO: 2521538 - DNA, 25 bp, Homo sapien
gacaagcaaagtagcagaggagaga

SEQ ID NO: 2521539 - DNA, 25 bp, Homo sapien
gtcctggtggtagatatcttctttc

SEQ ID NO: 2521540 - DNA, 25 bp, Homo sapien
agtcctggtggtagatatcttcttt

SEQ ID NO: 2521541 - DNA, 25 bp, Homo sapien
taagggtgtgacctggaactaagcc

SEQ ID NO: 2521542 - DNA, 25 bp, Homo sapien
aacccagtgctggaggtaagcgatc

SEQ ID NO: 2521543 - DNA, 25 bp, Homo sapien
caggtcagtcaaaatgggcaggtca

SEQ ID NO: 2521544 - DNA, 25 bp, Homo sapien
tccagggaggtcactaagtgagaca

SEQ ID NO: 2521545 - DNA, 25 bp, Homo sapien
tacagtatgtcagtaatgtgtcact

SEQ ID NO: 2521546 - DNA, 25 bp, Homo sapien
tttcgacactggactggaagaacaa

SEQ ID NO: 2521547 - DNA, 25 bp, Homo sapien
tcttctgtagaccaaaggttgagag

SEQ ID NO: 2521548 - DNA, 25 bp, Homo sapien
gaatttaataagtgaatttcttctg

SEQ ID NO: 2521549 - DNA, 25 bp, Homo sapien
ccatggctacgttagggagaagtct

SEQ ID NO: 2521550 - DNA, 25 bp, Homo sapien
gagaagtctagcctgagcacacaag

SEQ ID NO: 2521551 - DNA, 25 bp, Homo sapien
taacaagcacagaggtttgggaacc

SEQ ID NO: 2521552 - DNA, 25 bp, Homo sapien
cagtggtcctcgctggctgctagta

SEQ ID NO: 2521553 - DNA, 25 bp, Homo sapien
gataactgtttccttttgcgcaaag

SEQ ID NO: 2521554 - DNA, 25 bp, Homo sapien
gaagtcctgatagaggatgacgtct

SEQ ID NO: 2521555 - DNA, 25 bp, Homo sapien
gaagggctgtaaaccgaagtgtgac

SEQ ID NO: 2521556 - DNA, 25 bp, Homo sapien
cccaggtgtcagtccggaggaagtc

SEQ ID NO: 2521557 - DNA, 25 bp, Homo sapien
cactagctcattaggcatagaggcc

SEQ ID NO: 2521558 - DNA, 25 bp, Homo sapien
tgattacgacacaccaaagctgttc

SEQ ID NO: 2521559 - DNA, 25 bp, Homo sapien
taatgcagccgacagaattgttcac

SEQ ID NO: 2521560 - DNA, 25 bp, Homo sapien
ttgggtagggccctaaagacagcac

SEQ ID NO: 2521561 - DNA, 25 bp, Homo sapien
caaaagtatctccaggctccaaggg

SEQ ID NO: 2521562 - DNA, 25 bp, Homo sapien
gagtcgggtcaatcaggagaacaac

SEQ ID NO: 2521563 - DNA, 25 bp, Homo sapien
tctgtgtttatagcagggaagctcc

SEQ ID NO: 2521564 - DNA, 25 bp, Homo sapien
gaggacaaagggtatgggccacact

SEQ ID NO: 2521565 - DNA, 25 bp, Homo sapien
atcctgggcctcatacagcaaaatg

SEQ ID NO: 2521566 - DNA, 25 bp, Homo sapien
tcagggcgcttgatgtggatcctcc

SEQ ID NO: 2521567 - DNA, 25 bp, Homo sapien
tggcctccaggagcgcattgtcagg

SEQ ID NO: 2521568 - DNA, 25 bp, Homo sapien
tctcctcataaatccgggcttcggg

SEQ ID NO: 2521569 - DNA, 25 bp, Homo sapien
ctgtgttcccacagtatacagggca

SEQ ID NO: 2521570 - DNA, 25 bp, Homo sapien
tgtgttcccacagtatacagggcag

SEQ ID NO: 2521571 - DNA, 25 bp, Homo sapien
cagggcaggtaagttatggcccacc

SEQ ID NO: 2521572 - DNA, 25 bp, Homo sapien
gtatacagggcaggtaagttatggc

SEQ ID NO: 2521573 - DNA, 25 bp, Homo sapien
gatctggctaattaagctttaaaat

SEQ ID NO: 2521574 - DNA, 25 bp, Homo sapien
gaccacatggtctgatcccaactgt

SEQ ID NO: 2521575 - DNA, 25 bp, Homo sapien
ttcacagaccaggttcaggagtggc

SEQ ID NO: 2521576 - DNA, 25 bp, Homo sapien
tcatttttagagcttaataaggagc

SEQ ID NO: 2521577 - DNA, 25 bp, Homo sapien
cttggctaccttaagaacaatatct

SEQ ID NO: 2521578 - DNA, 25 bp, Homo sapien
atgtcttgccaatgtggagagagag

SEQ ID NO: 2521579 - DNA, 25 bp, Homo sapien
agaggcagcccaggtatatttttaa

SEQ ID NO: 2521580 - DNA, 25 bp, Homo sapien
ggcagatgattctggttcaccccct

SEQ ID NO: 2521581 - DNA, 25 bp, Homo sapien
gacttcagcaatcttccggccctga

SEQ ID NO: 2521582 - DNA, 25 bp, Homo sapien
ggcatagacgatggaggtacaacag

SEQ ID NO: 2521583 - DNA, 25 bp, Homo sapien
gatggaggtacaacagacttcagca

SEQ ID NO: 2521584 - DNA, 25 bp, Homo sapien
tcttccggccctgaccataaaagga

SEQ ID NO: 2521585 - DNA, 25 bp, Homo sapien
tttcaacatattgtcgtcagaattg

SEQ ID NO: 2521586 - DNA, 25 bp, Homo sapien
aaagcgcagagacagcttatcaaac

SEQ ID NO: 2521587 - DNA, 25 bp, Homo sapien
tgtttttcaacatattgtcgtcaga

SEQ ID NO: 2521588 - DNA, 25 bp, Homo sapien
cttccgttaaagcgcagagacagct

SEQ ID NO: 2521589 - DNA, 25 bp, Homo sapien
tagatagtcgttatggcctcacaac

SEQ ID NO: 2521590 - DNA, 25 bp, Homo sapien
tatctatccaggcagagaggtacag

SEQ ID NO: 2521591 - DNA, 25 bp, Homo sapien
aatggagctgtctttcccggctgac

SEQ ID NO: 2521592 - DNA, 25 bp, Homo sapien
tcatctgaaggtacgaagaagagct

SEQ ID NO: 2521593 - DNA, 25 bp, Homo sapien
tgttacttctgttgtagagcaactt

SEQ ID NO: 2521594 - DNA, 25 bp, Homo sapien
gttacttctgttgtagagcaacttc

SEQ ID NO: 2521595 - DNA, 25 bp, Homo sapien
gttgttacttctgttgtagagcaac

SEQ ID NO: 2521596 - DNA, 25 bp, Homo sapien
tgttgttacttctgttgtagagcaa

SEQ ID NO: 2521597 - DNA, 25 bp, Homo sapien
gatgacctgtagcttcccactgtga

SEQ ID NO: 2521598 - DNA, 25 bp, Homo sapien
gatgcaatgaactactagcttccca

SEQ ID NO: 2521599 - DNA, 25 bp, Homo sapien
cagacaagcatagcttgctggctgg

SEQ ID NO: 2521600 - DNA, 25 bp, Homo sapien
gcctcactcaggcaattatacatgt

SEQ ID NO: 2521601 - DNA, 25 bp, Homo sapien
tatttgaagtcgctataagtttttg

SEQ ID NO: 2521602 - DNA, 25 bp, Homo sapien
tgatcacagggaccttgcagaaagg

SEQ ID NO: 2521603 - DNA, 25 bp, Homo sapien
tgcagaaaggctcataagtatcttt

SEQ ID NO: 2521604 - DNA, 25 bp, Homo sapien
tgttcttccttggatgaggtgatca

SEQ ID NO: 2521605 - DNA, 25 bp, Homo sapien
aaagttgaccggctggacaggctct

SEQ ID NO: 2521606 - DNA, 25 bp, Homo sapien
gaggcctgcctagcactgcattttt

SEQ ID NO: 2521607 - DNA, 25 bp, Homo sapien
tgctttcagcctaggaggcctgcct

SEQ ID NO: 2521608 - DNA, 25 bp, Homo sapien
aacaaaacatgctttcagcctagga

SEQ ID NO: 2521609 - DNA, 25 bp, Homo sapien
ggctgagctgcgattctgaaaacgg

SEQ ID NO: 2521610 - DNA, 25 bp, Homo sapien
aaataaacccttgacgtggcagcag

SEQ ID NO: 2521611 - DNA, 25 bp, Homo sapien
cacaggtgagcgttaaccaaggaga

SEQ ID NO: 2521612 - DNA, 25 bp, Homo sapien
cacactaagtgatgagcaaccccag

SEQ ID NO: 2521613 - DNA, 25 bp, Homo sapien
caccgccccgtctcgaaggtagttg

SEQ ID NO: 2521614 - DNA, 25 bp, Homo sapien
ccaggccttggactaggtagtactt

SEQ ID NO: 2521615 - DNA, 25 bp, Homo sapien
gagtatcgtaccaaagtgcttccca

SEQ ID NO: 2521616 - DNA, 25 bp, Homo sapien
ggtagtacttggcttctgctagcag

SEQ ID NO: 2521617 - DNA, 25 bp, Homo sapien
gagataagcaagctaagccctgggt

SEQ ID NO: 2521618 - DNA, 25 bp, Homo sapien
tcacagaagcatggcagagataagc

SEQ ID NO: 2521619 - DNA, 25 bp, Homo sapien
tgagaccaaaagcttcggccacttg

SEQ ID NO: 2521620 - DNA, 25 bp, Homo sapien
caagtcaagatggtgggagtcccca

SEQ ID NO: 2521621 - DNA, 25 bp, Homo sapien
gaaggaagtggtgcgggtagcagcc

SEQ ID NO: 2521622 - DNA, 25 bp, Homo sapien
gtcctgcttggtcagcgtctgcatg

SEQ ID NO: 2521623 - DNA, 25 bp, Homo sapien
tgagcacttccatgcgcccgctgaa

SEQ ID NO: 2521624 - DNA, 25 bp, Homo sapien
agcgtctgcatggtggtatagtaga

SEQ ID NO: 2521625 - DNA, 25 bp, Homo sapien
ccacactttctcctgacatctcttc

SEQ ID NO: 2521626 - DNA, 25 bp, Homo sapien
ctgagctcaccacactttctcctga

SEQ ID NO: 2521627 - DNA, 25 bp, Homo sapien
gagctcaccacactttctcctgaca

SEQ ID NO: 2521628 - DNA, 25 bp, Homo sapien
gctcaccacactttctcctgacatc

SEQ ID NO: 2521629 - DNA, 25 bp, Homo sapien
tacagtggctgatttacgcaggcct

SEQ ID NO: 2521630 - DNA, 25 bp, Homo sapien
tgaatgggattccagctggcactcc

SEQ ID NO: 2521631 - DNA, 25 bp, Homo sapien
gatagcatggctgactctctgtaca

SEQ ID NO: 2521632 - DNA, 25 bp, Homo sapien
tatccggcacatgtgtactcagagc

SEQ ID NO: 2521633 - DNA, 25 bp, Homo sapien
tcaacctaatagtaggcaaggccct

SEQ ID NO: 2521634 - DNA, 25 bp, Homo sapien
aacttaggacacgaggcagtggacc

SEQ ID NO: 2521635 - DNA, 25 bp, Homo sapien
tgactaagagataaaggcaggagcc

SEQ ID NO: 2521636 - DNA, 25 bp, Homo sapien
gcagcattcgtgtccttgagcccaa

SEQ ID NO: 2521637 - DNA, 25 bp, Homo sapien
ttctcataacctgcccattcattct

SEQ ID NO: 2521638 - DNA, 25 bp, Homo sapien
attcattctccttcataatcctcca

SEQ ID NO: 2521639 - DNA, 25 bp, Homo sapien
cttctcataacctgcccattcattc

SEQ ID NO: 2521640 - DNA, 25 bp, Homo sapien
cccattcattctccttcataatcct

SEQ ID NO: 2521641 - DNA, 25 bp, Homo sapien
aaaagtcggaggacgcaggagtctc

SEQ ID NO: 2521642 - DNA, 25 bp, Homo sapien
aaacccggactgagagaggcaggaa

SEQ ID NO: 2521643 - DNA, 25 bp, Homo sapien
aggacgcaggagtctccaaacccgg

SEQ ID NO: 2521644 - DNA, 25 bp, Homo sapien
ggagtctccaaacccggactgagag

SEQ ID NO: 2521645 - DNA, 25 bp, Homo sapien
tttaaatgagctcacattgaagctc

SEQ ID NO: 2521646 - DNA, 25 bp, Homo sapien
gataaactagtctaaagtgtatgtt

SEQ ID NO: 2521647 - DNA, 25 bp, Homo sapien
cagtctatttagcaacttagattat

SEQ ID NO: 2521648 - DNA, 25 bp, Homo sapien
ccaagtgagagaatccaaatacagg

SEQ ID NO: 2521649 - DNA, 25 bp, Homo sapien
cctcatgtgcccattatcagcttca

SEQ ID NO: 2521650 - DNA, 25 bp, Homo sapien
agtagaaaggataatataatgaacc

SEQ ID NO: 2521651 - DNA, 25 bp, Homo sapien
catccaaatgcccacctgcttttct

SEQ ID NO: 2521652 - DNA, 25 bp, Homo sapien
cagtaccacctcacagccagttttg

SEQ ID NO: 2521653 - DNA, 25 bp, Homo sapien
tcaagaaatttagacgcccacgaca

SEQ ID NO: 2521654 - DNA, 25 bp, Homo sapien
gaacacgggctttgaactctcctag

SEQ ID NO: 2521655 - DNA, 25 bp, Homo sapien
caactacagcaagaagagcgtcctc

SEQ ID NO: 2521656 - DNA, 25 bp, Homo sapien
caaagcctactgtgcgtgagatcct

SEQ ID NO: 2521657 - DNA, 25 bp, Homo sapien
tgcaccaccaaggttgatgccggat

SEQ ID NO: 2521658 - DNA, 25 bp, Homo sapien
ttttccaacaagagctgtcacagtg

SEQ ID NO: 2521659 - DNA, 25 bp, Homo sapien
cacgctgggcgggttcgtgcataca

SEQ ID NO: 2521660 - DNA, 25 bp, Homo sapien
tgccggattcgaagccaggaaggcc

SEQ ID NO: 2521661 - DNA, 25 bp, Homo sapien
cagcccaggtagtgattaaaacgac

SEQ ID NO: 2521662 - DNA, 25 bp, Homo sapien
tgagacagcaggatctatcagagcc

SEQ ID NO: 2521663 - DNA, 25 bp, Homo sapien
taaaacgactgtcaagcggcagtgg

SEQ ID NO: 2521664 - DNA, 25 bp, Homo sapien
caagggtgacattgccactgacggg

SEQ ID NO: 2521665 - DNA, 25 bp, Homo sapien
aatgtaaggaagtgcccacaaactc

SEQ ID NO: 2521666 - DNA, 25 bp, Homo sapien
aatctacgataagcaagggatcacg

SEQ ID NO: 2521667 - DNA, 25 bp, Homo sapien
atgacactaaacaccccattccagg

SEQ ID NO: 2521668 - DNA, 25 bp, Homo sapien
cagggatcgagtagtatttgtgtgc

SEQ ID NO: 2521669 - DNA, 25 bp, Homo sapien
tctgagaacgcgactgttaacatcc

SEQ ID NO: 2521670 - DNA, 25 bp, Homo sapien
ttaacatccaggctgtgacacccgg

SEQ ID NO: 2521671 - DNA, 25 bp, Homo sapien
tgaaccgggagacagatacagaggc

SEQ ID NO: 2521672 - DNA, 25 bp, Homo sapien
caggacttggcaacaggtgaacggc

SEQ ID NO: 2521673 - DNA, 25 bp, Homo sapien
tgactcagtccaaccagacagggaa

SEQ ID NO: 2521674 - DNA, 25 bp, Homo sapien
cagtgtcgtttcatagcaggaggga

SEQ ID NO: 2521675 - DNA, 25 bp, Homo sapien
tgaaactggacaagagcctgccctt

SEQ ID NO: 2521676 - DNA, 25 bp, Homo sapien
gaaataaatacagccgtggcaccga

SEQ ID NO: 2521677 - DNA, 25 bp, Homo sapien
cagctccttctcattgcagcaatca

SEQ ID NO: 2521678 - DNA, 25 bp, Homo sapien
caagaggtgtagatcaaagctgagc

SEQ ID NO: 2521679 - DNA, 25 bp, Homo sapien
ggacagaatccccaaagggtcacag

SEQ ID NO: 2521680 - DNA, 25 bp, Homo sapien
ggccatcgccatggagggatcctcc

SEQ ID NO: 2521681 - DNA, 25 bp, Homo sapien
tagcgtgaagagatagtcactgagt

SEQ ID NO: 2521682 - DNA, 25 bp, Homo sapien
ttcatggctgcatatctggctagcg

SEQ ID NO: 2521683 - DNA, 25 bp, Homo sapien
gactcggccgatgggtcatttttca

SEQ ID NO: 2521684 - DNA, 25 bp, Homo sapien
tcagagtccctcagactcggccgat

SEQ ID NO: 2521685 - DNA, 25 bp, Homo sapien
tcccatatccgcctacaaggaggag

SEQ ID NO: 2521686 - DNA, 25 bp, Homo sapien
tataaatgacgcactctgggcacat

SEQ ID NO: 2521687 - DNA, 25 bp, Homo sapien
gatcaacgctaactgggtcttccca

SEQ ID NO: 2521688 - DNA, 25 bp, Homo sapien
ggactaggccctactgacattctgg

SEQ ID NO: 2521689 - DNA, 25 bp, Homo sapien
caagggcctgaggtcactttctaga

SEQ ID NO: 2521690 - DNA, 25 bp, Homo sapien
cactttctagacacccaggacagct

SEQ ID NO: 2521691 - DNA, 25 bp, Homo sapien
gaggagtggccacagtcaagggcct

SEQ ID NO: 2521692 - DNA, 25 bp, Homo sapien
tggccacagtcaagggcctgaggtc

SEQ ID NO: 2521693 - DNA, 25 bp, Homo sapien
ttgttggttcatgctgccgcaggcc

SEQ ID NO: 2521694 - DNA, 25 bp, Homo sapien
caggaacccgcagagcaggctttgg

SEQ ID NO: 2521695 - DNA, 25 bp, Homo sapien
tctaaatcttatcgggacaggcaca

SEQ ID NO: 2521696 - DNA, 25 bp, Homo sapien
acccagcctctaagaacgccctttg

SEQ ID NO: 2521697 - DNA, 25 bp, Homo sapien
cataaacactaagggaatgaaggag

SEQ ID NO: 2521698 - DNA, 25 bp, Homo sapien
tcataaacactaagggaatgaagga

SEQ ID NO: 2521699 - DNA, 25 bp, Homo sapien
ttcagagaggaacccccaggttcca

SEQ ID NO: 2521700 - DNA, 25 bp, Homo sapien
cggctttcagagaggaacccccagg

SEQ ID NO: 2521701 - DNA, 25 bp, Homo sapien
ctcggctttcagagaggaaccccca

SEQ ID NO: 2521702 - DNA, 25 bp, Homo sapien
cagagaggaacccccaggttccacg

SEQ ID NO: 2521703 - DNA, 25 bp, Homo sapien
gaacttggccacgttcgcatcggtc

SEQ ID NO: 2521704 - DNA, 25 bp, Homo sapien
gccacgttcgcatcggtctctccca

SEQ ID NO: 2521705 - DNA, 25 bp, Homo sapien
taagaacttggccacgttcgcatcg

SEQ ID NO: 2521706 - DNA, 25 bp, Homo sapien
ctgtttaagaacttggccacgttcg

SEQ ID NO: 2521707 - DNA, 25 bp, Homo sapien
acctgcacaggctcggccggcagtg

SEQ ID NO: 2521708 - DNA, 25 bp, Homo sapien
caccgctcaacctgaacctgcacag

SEQ ID NO: 2521709 - DNA, 25 bp, Homo sapien
caggtgggtttaaacaggccatcgg

SEQ ID NO: 2521710 - DNA, 25 bp, Homo sapien
ggcctaaaccttgagcagcatttca

SEQ ID NO: 2521711 - DNA, 25 bp, Homo sapien
ccggcagaaatgcagcgccgagctg

SEQ ID NO: 2521712 - DNA, 25 bp, Homo sapien
gcggcacacggcccggcagaaatgc

SEQ ID NO: 2521713 - DNA, 25 bp, Homo sapien
tgcagcgccgagctgatcttgcctc

SEQ ID NO: 2521714 - DNA, 25 bp, Homo sapien
aaatgcagcgccgagctgatcttgc

SEQ ID NO: 2521715 - DNA, 25 bp, Homo sapien
caaaccgggcagtgttctgcctcca

SEQ ID NO: 2521716 - DNA, 25 bp, Homo sapien
ctgcggacaggagctcctctgaagt

SEQ ID NO: 2521717 - DNA, 25 bp, Homo sapien
tgggaaaggtgtgcccactgcggac

SEQ ID NO: 2521718 - DNA, 25 bp, Homo sapien
gtgcccactgcggacaggagctcct

SEQ ID NO: 2521719 - DNA, 25 bp, Homo sapien
gctgggagggaccggtgaggacctg

SEQ ID NO: 2521720 - DNA, 25 bp, Homo sapien
gagggacttggggaactggaggaca

SEQ ID NO: 2521721 - DNA, 25 bp, Homo sapien
gggaactggaggacagcgtctgtca

SEQ ID NO: 2521722 - DNA, 25 bp, Homo sapien
gggcacgctgctccagagtgggcag

SEQ ID NO: 2521723 - DNA, 25 bp, Homo sapien
ctggctggtgtacttgtcgatccac

SEQ ID NO: 2521724 - DNA, 25 bp, Homo sapien
tggtgtacttgtcgatccactgctc

SEQ ID NO: 2521725 - DNA, 25 bp, Homo sapien
gatgaaggccgtgagtggtgggagc

SEQ ID NO: 2521726 - DNA, 25 bp, Homo sapien
gtgtacttgtcgatccactgctcca

SEQ ID NO: 2521727 - DNA, 25 bp, Homo sapien
agcagagggaactgccatgaggcca

SEQ ID NO: 2521728 - DNA, 25 bp, Homo sapien
gggaactgccatgaggccatcaccc

SEQ ID NO: 2521729 - DNA, 25 bp, Homo sapien
ggaactgccatgaggccatcaccca

SEQ ID NO: 2521730 - DNA, 25 bp, Homo sapien
aactgccatgaggccatcacccacc

SEQ ID NO: 2521731 - DNA, 25 bp, Homo sapien
taagtgagcctcccgggccgaggag

SEQ ID NO: 2521732 - DNA, 25 bp, Homo sapien
gtcgccagggccgagccgacgtcct

SEQ ID NO: 2521733 - DNA, 25 bp, Homo sapien
ggccgagccgacgtcctgcaatgtg

SEQ ID NO: 2521734 - DNA, 25 bp, Homo sapien
cagggccgagccgacgtcctgcaat

SEQ ID NO: 2521735 - DNA, 25 bp, Homo sapien
ccgtgcttgaagttctctgcgtggg

SEQ ID NO: 2521736 - DNA, 25 bp, Homo sapien
tgcgtgggtcagaggccccctcctt

SEQ ID NO: 2521737 - DNA, 25 bp, Homo sapien
catgtggaggtggaaagtgcggcac

SEQ ID NO: 2521738 - DNA, 25 bp, Homo sapien
ggtggtgaccctgtctccgtgcttg

SEQ ID NO: 2521739 - DNA, 25 bp, Homo sapien
tacctggcctgtccgcattttacag

SEQ ID NO: 2521740 - DNA, 25 bp, Homo sapien
caaagagtaactggtggctggatgc

SEQ ID NO: 2521741 - DNA, 25 bp, Homo sapien
tacaggcttaattgaaccatggtgc

SEQ ID NO: 2521742 - DNA, 25 bp, Homo sapien
tggatgctgagtcccgtgatggcca

SEQ ID NO: 2521743 - DNA, 25 bp, Homo sapien
gcttgggtgagatggtgttactcac

SEQ ID NO: 2521744 - DNA, 25 bp, Homo sapien
gggctgaagattcccagcttgggtg

SEQ ID NO: 2521745 - DNA, 25 bp, Homo sapien
tcccagcttgggtgagatggtgtta

SEQ ID NO: 2521746 - DNA, 25 bp, Homo sapien
cagcttgggtgagatggtgttactc

SEQ ID NO: 2521747 - DNA, 25 bp, Homo sapien
aagctcttcggcaaatgtatggccc

SEQ ID NO: 2521748 - DNA, 25 bp, Homo sapien
agctcttcggcaaatgtatggccct

SEQ ID NO: 2521749 - DNA, 25 bp, Homo sapien
ctgaagctcttcggcaaatgtatgg

SEQ ID NO: 2521750 - DNA, 25 bp, Homo sapien
gaagctcttcggcaaatgtatggcc

SEQ ID NO: 2521751 - DNA, 25 bp, Homo sapien
aggcccgccatggagaaatggtagc

SEQ ID NO: 2521752 - DNA, 25 bp, Homo sapien
gcccgccatggagaaatggtagcca

SEQ ID NO: 2521753 - DNA, 25 bp, Homo sapien
ccatggagaaatggtagccaggaac

SEQ ID NO: 2521754 - DNA, 25 bp, Homo sapien
gtagccaggaacaggtaagtgttaa

SEQ ID NO: 2521755 - DNA, 25 bp, Homo sapien
cacatcttgggtaaacctcactggc

SEQ ID NO: 2521756 - DNA, 25 bp, Homo sapien
tgggtaaacctcactggcgacaaca

SEQ ID NO: 2521757 - DNA, 25 bp, Homo sapien
aacctcactggcgacaacactgaca

SEQ ID NO: 2521758 - DNA, 25 bp, Homo sapien
tcttgggtaaacctcactggcgaca

SEQ ID NO: 2521759 - DNA, 25 bp, Homo sapien
taagtcaggagattttggggttgtc

SEQ ID NO: 2521760 - DNA, 25 bp, Homo sapien
cctgtgatgggcatgaagtgggaac

SEQ ID NO: 2521761 - DNA, 25 bp, Homo sapien
gtgatcacagcatgacctggcccat

SEQ ID NO: 2521762 - DNA, 25 bp, Homo sapien
atccttgagtccaccttctaaactt

SEQ ID NO: 2521763 - DNA, 25 bp, Homo sapien
tctcctgtgaaggtactagaaaacc

SEQ ID NO: 2521764 - DNA, 25 bp, Homo sapien
tagttcccacggcttcaaacacttg

SEQ ID NO: 2521765 - DNA, 25 bp, Homo sapien
cacggcttcaaacacttggtcatct

SEQ ID NO: 2521766 - DNA, 25 bp, Homo sapien
gaacttaattcatctgtagttccca

SEQ ID NO: 2521767 - DNA, 25 bp, Homo sapien
gggtgtcttcgaggaaggctgtggc

SEQ ID NO: 2521768 - DNA, 25 bp, Homo sapien
tgggtgtcttcgaggaaggctgtgg

SEQ ID NO: 2521769 - DNA, 25 bp, Homo sapien
gcggtgacctcacggcggtgtgacg

SEQ ID NO: 2521770 - DNA, 25 bp, Homo sapien
ctgacggttgccgcggtgacctcac

SEQ ID NO: 2521771 - DNA, 25 bp, Homo sapien
acggttgccgcggtgacctcacggc

SEQ ID NO: 2521772 - DNA, 25 bp, Homo sapien
cctcacggcggtgtgacgtacccat

SEQ ID NO: 2521773 - DNA, 25 bp, Homo sapien
cttccacgccctgagggccgcggct

SEQ ID NO: 2521774 - DNA, 25 bp, Homo sapien
tctggaaacggggatacaggagcct

SEQ ID NO: 2521775 - DNA, 25 bp, Homo sapien
gaagcacccgcgcaggccaagacgg

SEQ ID NO: 2521776 - DNA, 25 bp, Homo sapien
ctgtccccgtcttccacgccctgag

SEQ ID NO: 2521777 - DNA, 25 bp, Homo sapien
gagccaggctgcttgacgggacctg

SEQ ID NO: 2521778 - DNA, 25 bp, Homo sapien
cttgacgggacctgaccccgccagg

SEQ ID NO: 2521779 - DNA, 25 bp, Homo sapien
caggctgcttgacgggacctgaccc

SEQ ID NO: 2521780 - DNA, 25 bp, Homo sapien
gccaggctgcttgacgggacctgac

SEQ ID NO: 2521781 - DNA, 25 bp, Homo sapien
aggctgccagcctgggctcctaaga

SEQ ID NO: 2521782 - DNA, 25 bp, Homo sapien
ccagcctgggctcctaagaggggtc

SEQ ID NO: 2521783 - DNA, 25 bp, Homo sapien
gcctgggctcctaagaggggtccac

SEQ ID NO: 2521784 - DNA, 25 bp, Homo sapien
ggctgccagcctgggctcctaagag

SEQ ID NO: 2521785 - DNA, 25 bp, Homo sapien
tggaaacaggtctcagctccgctgt

SEQ ID NO: 2521786 - DNA, 25 bp, Homo sapien
cacaagcttgggaagtaaccagggc

SEQ ID NO: 2521787 - DNA, 25 bp, Homo sapien
taatgggcttggcttaggaagctcc

SEQ ID NO: 2521788 - DNA, 25 bp, Homo sapien
gcaggaaagtgcacctagagagcct

SEQ ID NO: 2521789 - DNA, 25 bp, Homo sapien
tccagaatcacaagcacccacgaga

SEQ ID NO: 2521790 - DNA, 25 bp, Homo sapien
gaatcacaagcacccacgagagcac

SEQ ID NO: 2521791 - DNA, 25 bp, Homo sapien
cagaatcacaagcacccacgagagc

SEQ ID NO: 2521792 - DNA, 25 bp, Homo sapien
ttcctagctccagaatcacaagcac

SEQ ID NO: 2521793 - DNA, 25 bp, Homo sapien
ttatattgcagtcagcttggtgctt

SEQ ID NO: 2521794 - DNA, 25 bp, Homo sapien
tattgcagtcagcttggtgctttcc

SEQ ID NO: 2521795 - DNA, 25 bp, Homo sapien
cagcttggtgctttccgaaatgcca

SEQ ID NO: 2521796 - DNA, 25 bp, Homo sapien
cagtcagcttggtgctttccgaaat

SEQ ID NO: 2521797 - DNA, 25 bp, Homo sapien
ccttgtagttggtgccttgccagcc

SEQ ID NO: 2521798 - DNA, 25 bp, Homo sapien
gaaacccttgtagttggtgccttgc

SEQ ID NO: 2521799 - DNA, 25 bp, Homo sapien
tagccatcaggaaacccttgtagtt

SEQ ID NO: 2521800 - DNA, 25 bp, Homo sapien
tcaggaaacccttgtagttggtgcc

SEQ ID NO: 2521801 - DNA, 25 bp, Homo sapien
ggccggcgcagggatttcaggatga

SEQ ID NO: 2521802 - DNA, 25 bp, Homo sapien
tgcaaagaggccgagtggaaaggtg

SEQ ID NO: 2521803 - DNA, 25 bp, Homo sapien
ttcagtgcgcgtctgcccttggcca

SEQ ID NO: 2521804 - DNA, 25 bp, Homo sapien
aggtgaaagcgattcagtgcgcgtc

SEQ ID NO: 2521805 - DNA, 25 bp, Homo sapien
caaagaggcggtcacatagcactga

SEQ ID NO: 2521806 - DNA, 25 bp, Homo sapien
ttgcgaggggaacagcagtgccttt

SEQ ID NO: 2521807 - DNA, 25 bp, Homo sapien
agcactgacaccttctttgcgaggg

SEQ ID NO: 2521808 - DNA, 25 bp, Homo sapien
ctttcaggtcataagctggagccgc

SEQ ID NO: 2521809 - DNA, 25 bp, Homo sapien
ggctgttctccgaaagaagtggtgt

SEQ ID NO: 2521810 - DNA, 25 bp, Homo sapien
tgttgatgtcggcaggtgcctgtca

SEQ ID NO: 2521811 - DNA, 25 bp, Homo sapien
tccgttggcgttttcatcagatggg

SEQ ID NO: 2521812 - DNA, 25 bp, Homo sapien
gtcattgcctatctctgcgtttgag

SEQ ID NO: 2521813 - DNA, 25 bp, Homo sapien
ttaggttcctcgcggcccccgctgc

SEQ ID NO: 2521814 - DNA, 25 bp, Homo sapien
attaggttcctcgcggcccccgctg

SEQ ID NO: 2521815 - DNA, 25 bp, Homo sapien
tcgcggcccccgctgcgctccgccg

SEQ ID NO: 2521816 - DNA, 25 bp, Homo sapien
ggcccccgctgcgctccgccggcat

SEQ ID NO: 2521817 - DNA, 25 bp, Homo sapien
tcacaccaaccaatgatttcctgca

SEQ ID NO: 2521818 - DNA, 25 bp, Homo sapien
cacaccaaccaatgatttcctgcaa

SEQ ID NO: 2521819 - DNA, 25 bp, Homo sapien
ccaaccaatgatttcctgcaattat

SEQ ID NO: 2521820 - DNA, 25 bp, Homo sapien
caccaaccaatgatttcctgcaatt

SEQ ID NO: 2521821 - DNA, 25 bp, Homo sapien
tggagatgcagacaaaattgggcac

SEQ ID NO: 2521822 - DNA, 25 bp, Homo sapien
tcatcaaagtacttgccaggcctga

SEQ ID NO: 2521823 - DNA, 25 bp, Homo sapien
acattcagggtagcacggctacaga

SEQ ID NO: 2521824 - DNA, 25 bp, Homo sapien
gaccctacgtagctttggagatgca

SEQ ID NO: 2521825 - DNA, 25 bp, Homo sapien
tttgcagtaatgaattgcggacggg

SEQ ID NO: 2521826 - DNA, 25 bp, Homo sapien
ccgggtgaaggagtgcgccggccat

SEQ ID NO: 2521827 - DNA, 25 bp, Homo sapien
cgccaggtctggcacgggtaattta

SEQ ID NO: 2521828 - DNA, 25 bp, Homo sapien
agatgaccagggtcgtttgcagtaa

SEQ ID NO: 2521829 - DNA, 25 bp, Homo sapien
ggactccgtgtgtatctctgtaaca

SEQ ID NO: 2521830 - DNA, 25 bp, Homo sapien
tttgggactccgtgtgtatctctgt

SEQ ID NO: 2521831 - DNA, 25 bp, Homo sapien
ctccgtgtgtatctctgtaacactg

SEQ ID NO: 2521832 - DNA, 25 bp, Homo sapien
tgggactccgtgtgtatctctgtaa

SEQ ID NO: 2521833 - DNA, 25 bp, Homo sapien
ggggaagtgcccggagctggctctt

SEQ ID NO: 2521834 - DNA, 25 bp, Homo sapien
gaagtgcccggagctggctcttcct

SEQ ID NO: 2521835 - DNA, 25 bp, Homo sapien
gcaggggaagtgcccggagctggct

SEQ ID NO: 2521836 - DNA, 25 bp, Homo sapien
ggaagtgcccggagctggctcttcc

SEQ ID NO: 2521837 - DNA, 25 bp, Homo sapien
ggctgaagatcaatgcggtttgtgt

SEQ ID NO: 2521838 - DNA, 25 bp, Homo sapien
ctgaagatcaatgcggtttgtgtgc

SEQ ID NO: 2521839 - DNA, 25 bp, Homo sapien
aagatcaatgcggtttgtgtgcaca

SEQ ID NO: 2521840 - DNA, 25 bp, Homo sapien
gatcaatgcggtttgtgtgcacatg

SEQ ID NO: 2521841 - DNA, 25 bp, Homo sapien
ctgcaggacgtgtggtgtccccaga

SEQ ID NO: 2521842 - DNA, 25 bp, Homo sapien
tgcaggacgtgtggtgtccccagaa

SEQ ID NO: 2521843 - DNA, 25 bp, Homo sapien
tccctctcacggtgcctggaatcca

SEQ ID NO: 2521844 - DNA, 25 bp, Homo sapien
tctcttccctctcacggtgcctgga

SEQ ID NO: 2521845 - DNA, 25 bp, Homo sapien
cagcgagcacggctttgctggtaaa

SEQ ID NO: 2521846 - DNA, 25 bp, Homo sapien
gggaatgtcgcctaatgcattcata

SEQ ID NO: 2521847 - DNA, 25 bp, Homo sapien
tatcaaacaatagcgcctcatacat

SEQ ID NO: 2521848 - DNA, 25 bp, Homo sapien
tgctggtaaagtctttatcgggaat

SEQ ID NO: 2521849 - DNA, 25 bp, Homo sapien
gaaagataatggtcttcgttatctc

SEQ ID NO: 2521850 - DNA, 25 bp, Homo sapien
aatggtcttcgttatctccaggctc

SEQ ID NO: 2521851 - DNA, 25 bp, Homo sapien
aagataatggtcttcgttatctcca

SEQ ID NO: 2521852 - DNA, 25 bp, Homo sapien
gataatggtcttcgttatctccagg

SEQ ID NO: 2521853 - DNA, 25 bp, Homo sapien
agccatggatgtgctttaaacggat

SEQ ID NO: 2521854 - DNA, 25 bp, Homo sapien
agaaagttcaaagccatggatgtgc

SEQ ID NO: 2521855 - DNA, 25 bp, Homo sapien
ctagaaagttcaaagccatggatgt

SEQ ID NO: 2521856 - DNA, 25 bp, Homo sapien
gatgtgctttaaacggatagatttt

SEQ ID NO: 2521857 - DNA, 25 bp, Homo sapien
aagcccttgaacagtgctatgtcag

SEQ ID NO: 2521858 - DNA, 25 bp, Homo sapien
agtggcagccatgattattgttaat

SEQ ID NO: 2521859 - DNA, 25 bp, Homo sapien
aaaccactgtccgagctggcagttg

SEQ ID NO: 2521860 - DNA, 25 bp, Homo sapien
tctgcgtggaatcaaatactttgta

SEQ ID NO: 2521861 - DNA, 25 bp, Homo sapien
ccatttatctgaatgtcattggcag

SEQ ID NO: 2521862 - DNA, 25 bp, Homo sapien
ttccatgggaccagccgggctgaca

SEQ ID NO: 2521863 - DNA, 25 bp, Homo sapien
tcgacacgcctttccatgggaccag

SEQ ID NO: 2521864 - DNA, 25 bp, Homo sapien
tcattggcagtaaactggcgcaggg

SEQ ID NO: 2521865 - DNA, 25 bp, Homo sapien
acggatggcgggataaggttccata

SEQ ID NO: 2521866 - DNA, 25 bp, Homo sapien
ggttccatatgtcaagcagtgggct

SEQ ID NO: 2521867 - DNA, 25 bp, Homo sapien
gagagatacacaggcattacttgac

SEQ ID NO: 2521868 - DNA, 25 bp, Homo sapien
gactcctagagtccataagctaaga

SEQ ID NO: 2521869 - DNA, 25 bp, Homo sapien
ggctaaggcgggcagatctgttgag

SEQ ID NO: 2521870 - DNA, 25 bp, Homo sapien
ctaaggcgggcagatctgttgaggt

SEQ ID NO: 2521871 - DNA, 25 bp, Homo sapien
cagctattcaggaggatgagccgag

SEQ ID NO: 2521872 - DNA, 25 bp, Homo sapien
gctattcaggaggatgagccgagat

SEQ ID NO: 2521873 - DNA, 25 bp, Homo sapien
atcaatgggttgacagacttcacag

SEQ ID NO: 2521874 - DNA, 25 bp, Homo sapien
gcgatcaatgggttgacagacttca

SEQ ID NO: 2521875 - DNA, 25 bp, Homo sapien
tggcgatcaatgggttgacagactt

SEQ ID NO: 2521876 - DNA, 25 bp, Homo sapien
cagggattgttgtcctctttgacca

SEQ ID NO: 2521877 - DNA, 25 bp, Homo sapien
ggatgagtgtcttcgggcggcggca

SEQ ID NO: 2521878 - DNA, 25 bp, Homo sapien
gatgagtgtcttcgggcggcggcag

SEQ ID NO: 2521879 - DNA, 25 bp, Homo sapien
tgccttctccggacagccacagagg

SEQ ID NO: 2521880 - DNA, 25 bp, Homo sapien
tctccggacagccacagagggtgtc

SEQ ID NO: 2521881 - DNA, 25 bp, Homo sapien
ccggacagccacagagggtgtcatt

SEQ ID NO: 2521882 - DNA, 25 bp, Homo sapien
cagccacagagggtgtcattcatgg

SEQ ID NO: 2521883 - DNA, 25 bp, Homo sapien
atccatcattgctgcatggtctgtc

SEQ ID NO: 2521884 - DNA, 25 bp, Homo sapien
ggtcccagatgacccaggggcttct

SEQ ID NO: 2521885 - DNA, 25 bp, Homo sapien
aatccatcattgctgcatggtctgt

SEQ ID NO: 2521886 - DNA, 25 bp, Homo sapien
tccatcattgctgcatggtctgtcc

SEQ ID NO: 2521887 - DNA, 25 bp, Homo sapien
cgggatttatccccctgtcttcatg

SEQ ID NO: 2521888 - DNA, 25 bp, Homo sapien
tgttgaaactgtaaaaacgctgaac

SEQ ID NO: 2521889 - DNA, 25 bp, Homo sapien
atgccaccccatgccaggtcagagg

SEQ ID NO: 2521890 - DNA, 25 bp, Homo sapien
tcagagggggcctagccatctctcc

SEQ ID NO: 2521891 - DNA, 25 bp, Homo sapien
tcacaaccaattcttatatcacact

SEQ ID NO: 2521892 - DNA, 25 bp, Homo sapien
ccggcctcacaaccaattcttatat

SEQ ID NO: 2521893 - DNA, 25 bp, Homo sapien
catacacagatgatagtatgcatgt

SEQ ID NO: 2521894 - DNA, 25 bp, Homo sapien
catagatacatagttcattaataca

SEQ ID NO: 2521895 - DNA, 25 bp, Homo sapien
taactccctgtttatgtaacgcctg

SEQ ID NO: 2521896 - DNA, 25 bp, Homo sapien
ctatcgaagacgaagggcccaatca

SEQ ID NO: 2521897 - DNA, 25 bp, Homo sapien
ggccagacattgatttctactgctg

SEQ ID NO: 2521898 - DNA, 25 bp, Homo sapien
atcaatgctatctccccgggccatg

SEQ ID NO: 2521899 - DNA, 25 bp, Homo sapien
gcgaagatgcgtcgcctgagcgccc

SEQ ID NO: 2521900 - DNA, 25 bp, Homo sapien
gagggcttcgtcaggcagcctctgc

SEQ ID NO: 2521901 - DNA, 25 bp, Homo sapien
ctgcatggctgcgacccgtcgagcg

SEQ ID NO: 2521902 - DNA, 25 bp, Homo sapien
gctgagacctggtgcccttcgacgg

SEQ ID NO: 2521903 - DNA, 25 bp, Homo sapien
gttcacagcagtggcgctttcttga

SEQ ID NO: 2521904 - DNA, 25 bp, Homo sapien
gcagtggcgctttcttgatttagct

SEQ ID NO: 2521905 - DNA, 25 bp, Homo sapien
gctgcaggccggagatataattagt

SEQ ID NO: 2521906 - DNA, 25 bp, Homo sapien
gatgaaagatgaaggttcgtgacca

SEQ ID NO: 2521907 - DNA, 25 bp, Homo sapien
gcttgaagcaaatgtcaggcgccaa

SEQ ID NO: 2521908 - DNA, 25 bp, Homo sapien
aaagccggcccggaatcctgtctgt

SEQ ID NO: 2521909 - DNA, 25 bp, Homo sapien
taatgccaatcaggcccggaaaaaa

SEQ ID NO: 2521910 - DNA, 25 bp, Homo sapien
ccaagttgtgctttgtaaacgctca

SEQ ID NO: 2521911 - DNA, 25 bp, Homo sapien
atatgaggctcccattattacattt

SEQ ID NO: 2521912 - DNA, 25 bp, Homo sapien
ttacatatgaggctcccattattac

SEQ ID NO: 2521913 - DNA, 25 bp, Homo sapien
tttaatttcctcttactgctagaaa

SEQ ID NO: 2521914 - DNA, 25 bp, Homo sapien
cctcttactgctagaaaatgtacaa

SEQ ID NO: 2521915 - DNA, 25 bp, Homo sapien
gaaaggcttggtctggctcccttga

SEQ ID NO: 2521916 - DNA, 25 bp, Homo sapien
gcatttacaatgagcgccagtcgcc

SEQ ID NO: 2521917 - DNA, 25 bp, Homo sapien
tctacgcaggagagatgtgcgctac

SEQ ID NO: 2521918 - DNA, 25 bp, Homo sapien
gctatggaagccactaggtgagctc

SEQ ID NO: 2521919 - DNA, 25 bp, Homo sapien
tttgcccgttgcacacagtgttccg

SEQ ID NO: 2521920 - DNA, 25 bp, Homo sapien
agtgtcatctggtggcatccctcct

SEQ ID NO: 2521921 - DNA, 25 bp, Homo sapien
gaagctgttcagtatcgattctcag

SEQ ID NO: 2521922 - DNA, 25 bp, Homo sapien
agtgttccgtcttccgggatcccag

SEQ ID NO: 2521923 - DNA, 25 bp, Homo sapien
catgattgtgagtctccatagacca

SEQ ID NO: 2521924 - DNA, 25 bp, Homo sapien
tgagtctccatagaccatccgactg

SEQ ID NO: 2521925 - DNA, 25 bp, Homo sapien
tccagattgcacatgattgtgagtc

SEQ ID NO: 2521926 - DNA, 25 bp, Homo sapien
ccatccgactgtgcgtaagagggtg

SEQ ID NO: 2521927 - DNA, 25 bp, Homo sapien
tgggcgggagacagaccagtacttc

SEQ ID NO: 2521928 - DNA, 25 bp, Homo sapien
ggccttggtcccctcattggtcgaa

SEQ ID NO: 2521929 - DNA, 25 bp, Homo sapien
gcatggatcaaggttcaagagcccc

SEQ ID NO: 2521930 - DNA, 25 bp, Homo sapien
tcgaataagggaaatgggtgtctgc

SEQ ID NO: 2521931 - DNA, 25 bp, Homo sapien
tgcctcccgagttcaagtgattctc

SEQ ID NO: 2521932 - DNA, 25 bp, Homo sapien
ctcggctcaccgcaatctcggctca

SEQ ID NO: 2521933 - DNA, 25 bp, Homo sapien
ctgcctcccgagttcaagtgattct

SEQ ID NO: 2521934 - DNA, 25 bp, Homo sapien
gccaacagcccgctgtccatcaaga

SEQ ID NO: 2521935 - DNA, 25 bp, Homo sapien
cctatgccgagaaggtggccaacag

SEQ ID NO: 2521936 - DNA, 25 bp, Homo sapien
cagcagaactggacgcctatgccga

SEQ ID NO: 2521937 - DNA, 25 bp, Homo sapien
gctacccgagcccagcagaactgga

SEQ ID NO: 2521938 - DNA, 25 bp, Homo sapien
gaacttgccatccaaacagcgactc

SEQ ID NO: 2521939 - DNA, 25 bp, Homo sapien
ttttcttcactcatatccctgtctt

SEQ ID NO: 2521940 - DNA, 25 bp, Homo sapien
aacagcgactcctaactttgcccta

SEQ ID NO: 2521941 - DNA, 25 bp, Homo sapien
ggaaactgagacaagttccaacttc

SEQ ID NO: 2521942 - DNA, 25 bp, Homo sapien
ggcatgtctgctaacatcccattgg

SEQ ID NO: 2521943 - DNA, 25 bp, Homo sapien
agtcacatgctcaaccccgggtatg

SEQ ID NO: 2521944 - DNA, 25 bp, Homo sapien
tctgatctcagctaggttgcctggg

SEQ ID NO: 2521945 - DNA, 25 bp, Homo sapien
taaccattagctattgctgcctgca

SEQ ID NO: 2521946 - DNA, 25 bp, Homo sapien
cacagtgcctgacgcgtggttggaa

SEQ ID NO: 2521947 - DNA, 25 bp, Homo sapien
ggccagctaggacacttcagggaaa

SEQ ID NO: 2521948 - DNA, 25 bp, Homo sapien
ccttgaggaaagctggtgtaacaaa

SEQ ID NO: 2521949 - DNA, 25 bp, Homo sapien
tggtcaataatacaagaggagaggc

SEQ ID NO: 2521950 - DNA, 25 bp, Homo sapien
ggaggcaccatcccacttagccagg

SEQ ID NO: 2521951 - DNA, 25 bp, Homo sapien
gccctcccagtataattgtcccctg

SEQ ID NO: 2521952 - DNA, 25 bp, Homo sapien
aagagggtcagcctcacctccggct

SEQ ID NO: 2521953 - DNA, 25 bp, Homo sapien
caggcaggcagtcctcaaggaggca

SEQ ID NO: 2521954 - DNA, 25 bp, Homo sapien
ggcaaatcccagacactacagaaca

SEQ ID NO: 2521955 - DNA, 25 bp, Homo sapien
gggtcacgtcgcttcctgagagcag

SEQ ID NO: 2521956 - DNA, 25 bp, Homo sapien
tgtgactccataggagcaagacagg

SEQ ID NO: 2521957 - DNA, 25 bp, Homo sapien
cttggccgggcagtgcacttggaac

SEQ ID NO: 2521958 - DNA, 25 bp, Homo sapien
ttcagttccaccacgcggggtacca

SEQ ID NO: 2521959 - DNA, 25 bp, Homo sapien
cacgcggggtaccaccgaggaccag

SEQ ID NO: 2521960 - DNA, 25 bp, Homo sapien
cgtccgggttcgagttcttgttcag

SEQ ID NO: 2521961 - DNA, 25 bp, Homo sapien
tcagtcctccacttgcgggggtaac

SEQ ID NO: 2521962 - DNA, 25 bp, Homo sapien
attcttgcccgggtcctcgttgatg

SEQ ID NO: 2521963 - DNA, 25 bp, Homo sapien
ggaggcggcccacggtatgcgagaa

SEQ ID NO: 2521964 - DNA, 25 bp, Homo sapien
gaagccataatactggtaggtctca

SEQ ID NO: 2521965 - DNA, 25 bp, Homo sapien
tatgcgagaagccataatactggta

SEQ ID NO: 2521966 - DNA, 25 bp, Homo sapien
tgcggtcaggagtgccgtccgagct

SEQ ID NO: 2521967 - DNA, 25 bp, Homo sapien
ggaaggagcgctcaatgtccaggat

SEQ ID NO: 2521968 - DNA, 25 bp, Homo sapien
ttcctcaggaatacggggaaggagc

SEQ ID NO: 2521969 - DNA, 25 bp, Homo sapien
catctccccagagcggaaggccttc

SEQ ID NO: 2521970 - DNA, 25 bp, Homo sapien
agttggtctggtcctcattgcacac

SEQ ID NO: 2521971 - DNA, 25 bp, Homo sapien
tcatgttggcacacgggttcaggag

SEQ ID NO: 2521972 - DNA, 25 bp, Homo sapien
actgtctcgcccatgagggcaatga

SEQ ID NO: 2521973 - DNA, 25 bp, Homo sapien
tggtcagcttaaacaggtccaggag

SEQ ID NO: 2521974 - DNA, 25 bp, Homo sapien
cccactactgataagcgtaggagtt

SEQ ID NO: 2521975 - DNA, 25 bp, Homo sapien
aatcccactactgataagcgtagga

SEQ ID NO: 2521976 - DNA, 25 bp, Homo sapien
tactgataagcgtaggagttttgac

SEQ ID NO: 2521977 - DNA, 25 bp, Homo sapien
actactgataagcgtaggagttttg

SEQ ID NO: 2521978 - DNA, 25 bp, Homo sapien
tagacgagcaggaatcggaaaaggt

SEQ ID NO: 2521979 - DNA, 25 bp, Homo sapien
gaatcggaaaaggtccttgaagaga

SEQ ID NO: 2521980 - DNA, 25 bp, Homo sapien
tgaagcgtagccgatcatgaagagc

SEQ ID NO: 2521981 - DNA, 25 bp, Homo sapien
catgaagagcaagtagacgagcagg

SEQ ID NO: 2521982 - DNA, 25 bp, Homo sapien
gatcatgatgctataggtccccgtc

SEQ ID NO: 2521983 - DNA, 25 bp, Homo sapien
gtagagggctgctgagacgatcacc

SEQ ID NO: 2521984 - DNA, 25 bp, Homo sapien
gggcaaagaccatcacggccaggta

SEQ ID NO: 2521985 - DNA, 25 bp, Homo sapien
ccacgggtgaagtaaagggcattca

SEQ ID NO: 2521986 - DNA, 25 bp, Homo sapien
gaaggagccatcaatgaagagagaa

SEQ ID NO: 2521987 - DNA, 25 bp, Homo sapien
tggaaggagccatcaatgaagagag

SEQ ID NO: 2521988 - DNA, 25 bp, Homo sapien
agctggaaggagccatcaatgaaga

SEQ ID NO: 2521989 - DNA, 25 bp, Homo sapien
gctggaaggagccatcaatgaagag

SEQ ID NO: 2521990 - DNA, 25 bp, Homo sapien
agccgcaggtagtccaccgtggtgc

SEQ ID NO: 2521991 - DNA, 25 bp, Homo sapien
accccagtgaagagcgtaatgacct

SEQ ID NO: 2521992 - DNA, 25 bp, Homo sapien
aagagcgtaatgacctcgccagcca

SEQ ID NO: 2521993 - DNA, 25 bp, Homo sapien
cagccgcaggtagtccaccgtggtg

SEQ ID NO: 2521994 - DNA, 25 bp, Homo sapien
cctccagcggctggtagtaggcggt

SEQ ID NO: 2521995 - DNA, 25 bp, Homo sapien
tgatgtagaaggagacggccccgaa

SEQ ID NO: 2521996 - DNA, 25 bp, Homo sapien
cacacaggtaggagaccacgttgat

SEQ ID NO: 2521997 - DNA, 25 bp, Homo sapien
cacttgtcccgcagcagttcattga

SEQ ID NO: 2521998 - DNA, 25 bp, Homo sapien
ggacaggtgccgtgtgtcctcatcc

SEQ ID NO: 2521999 - DNA, 25 bp, Homo sapien
tcataaagcgaggaatacactggcc

SEQ ID NO: 2522000 - DNA, 25 bp, Homo sapien
tcttgctgttgtacaccaggatctc

SEQ ID NO: 2522001 - DNA, 25 bp, Homo sapien
cagtccttgaacttgcgggacaggt

SEQ ID NO: 2522002 - DNA, 25 bp, Homo sapien
actgtgttgcctcgcgagtcctggc

SEQ ID NO: 2522003 - DNA, 25 bp, Homo sapien
cagcaggtcgtacatcttggtaaca

SEQ ID NO: 2522004 - DNA, 25 bp, Homo sapien
tcacgggtgttgtcagcaatggcca

SEQ ID NO: 2522005 - DNA, 25 bp, Homo sapien
aacaaacttggtgttctcacgggtg

SEQ ID NO: 2522006 - DNA, 25 bp, Homo sapien
aggtcagcgaagggggcccagggtg

SEQ ID NO: 2522007 - DNA, 25 bp, Homo sapien
gtgggaggtcagcgaagggggccca

SEQ ID NO: 2522008 - DNA, 25 bp, Homo sapien
tgggaggtcagcgaagggggcccag

SEQ ID NO: 2522009 - DNA, 25 bp, Homo sapien
tgcagcgacgctcaatggcgatgtg

SEQ ID NO: 2522010 - DNA, 25 bp, Homo sapien
tgggccacgagaagttccacgtagt

SEQ ID NO: 2522011 - DNA, 25 bp, Homo sapien
caaagtagaagtagcccccctcatc

SEQ ID NO: 2522012 - DNA, 25 bp, Homo sapien
ttgggctggaagaagcgcccacggg

SEQ ID NO: 2522013 - DNA, 25 bp, Homo sapien
aactccctcatgttgccggtgcgct

SEQ ID NO: 2522014 - DNA, 25 bp, Homo sapien
tcgatagtagatgtcacggaagggc

SEQ ID NO: 2522015 - DNA, 25 bp, Homo sapien
cacggaagggcgagttaatgaactc

SEQ ID NO: 2522016 - DNA, 25 bp, Homo sapien
tcgttgcggccattgctcaggttca

SEQ ID NO: 2522017 - DNA, 25 bp, Homo sapien
ctgtcagagcatcgaatccttttcc

SEQ ID NO: 2522018 - DNA, 25 bp, Homo sapien
ttgacaattgccaaattggaggttg

SEQ ID NO: 2522019 - DNA, 25 bp, Homo sapien
tctaaattgacaattgccaaattgg

SEQ ID NO: 2522020 - DNA, 25 bp, Homo sapien
caggtggcgaagtggctctgcccag

SEQ ID NO: 2522021 - DNA, 25 bp, Homo sapien
ttgccaaattggaggttgtgaaact

SEQ ID NO: 2522022 - DNA, 25 bp, Homo sapien
tcacggccagtttaataatggctta

SEQ ID NO: 2522023 - DNA, 25 bp, Homo sapien
agatcacggccagtttaataatggc

SEQ ID NO: 2522024 - DNA, 25 bp, Homo sapien
gatcacggccagtttaataatggct

SEQ ID NO: 2522025 - DNA, 25 bp, Homo sapien
cacggccagtttaataatggcttac

SEQ ID NO: 2522026 - DNA, 25 bp, Homo sapien
agcacattgcaggtggctgatttgg

SEQ ID NO: 2522027 - DNA, 25 bp, Homo sapien
ttttgaatctggacaaggctgaagg

SEQ ID NO: 2522028 - DNA, 25 bp, Homo sapien
tggagcagaccccaagaagtagaat

SEQ ID NO: 2522029 - DNA, 25 bp, Homo sapien
agtagaatcaggactaccagcccag

SEQ ID NO: 2522030 - DNA, 25 bp, Homo sapien
ttcagcctaggaagtggagccctaa

SEQ ID NO: 2522031 - DNA, 25 bp, Homo sapien
ggacacgatgtcaaagaggataggc

SEQ ID NO: 2522032 - DNA, 25 bp, Homo sapien
tcagttaggcgtttcttgtgggtca

SEQ ID NO: 2522033 - DNA, 25 bp, Homo sapien
gtcagcaagaatgggagcagcccgt

SEQ ID NO: 2522034 - DNA, 25 bp, Homo sapien
aactcctcatcagttaggcgtttct

SEQ ID NO: 2522035 - DNA, 25 bp, Homo sapien
aggcaccaccgaggactcatatagg

SEQ ID NO: 2522036 - DNA, 25 bp, Homo sapien
gaggactcatatagggtggactcca

SEQ ID NO: 2522037 - DNA, 25 bp, Homo sapien
gccgtagtcaaacagtgagtccatg

SEQ ID NO: 2522038 - DNA, 25 bp, Homo sapien
tgttgtcactggagtggtgacgata

SEQ ID NO: 2522039 - DNA, 25 bp, Homo sapien
gccagcagggcgactggcatcagcc

SEQ ID NO: 2522040 - DNA, 25 bp, Homo sapien
ctcaaacagattggccagggaggag

SEQ ID NO: 2522041 - DNA, 25 bp, Homo sapien
gggtgccactctcatccccggggag

SEQ ID NO: 2522042 - DNA, 25 bp, Homo sapien
cgactggcatcagccggtgagggcg

SEQ ID NO: 2522043 - DNA, 25 bp, Homo sapien
gggggccttcgctggaatccgccat

SEQ ID NO: 2522044 - DNA, 25 bp, Homo sapien
cccgcgcgggggccttcgctggaat

SEQ ID NO: 2522045 - DNA, 25 bp, Homo sapien
gcgcgggggccttcgctggaatccg

SEQ ID NO: 2522046 - DNA, 25 bp, Homo sapien
cgggggccttcgctggaatccgcca

SEQ ID NO: 2522047 - DNA, 25 bp, Homo sapien
tgccccaggcccgtctgcactgctc

SEQ ID NO: 2522048 - DNA, 25 bp, Homo sapien
ccccaggcccgtctgcactgctcag

SEQ ID NO: 2522049 - DNA, 25 bp, Homo sapien
cctgccccaggcccgtctgcactgc

SEQ ID NO: 2522050 - DNA, 25 bp, Homo sapien
cccaggcccgtctgcactgctcagc

SEQ ID NO: 2522051 - DNA, 25 bp, Homo sapien
aagggaatgaaaggggagtcaggca

SEQ ID NO: 2522052 - DNA, 25 bp, Homo sapien
caagggaatgaaaggggagtcaggc

SEQ ID NO: 2522053 - DNA, 25 bp, Homo sapien
ctgcaagggaatgaaaggggagtca

SEQ ID NO: 2522054 - DNA, 25 bp, Homo sapien
agtcaggcagaacccggccaggggc

SEQ ID NO: 2522055 - DNA, 25 bp, Homo sapien
ctttcacgaacctggaaacacaaat

SEQ ID NO: 2522056 - DNA, 25 bp, Homo sapien
ggaactgcaacaggagcctctttca

SEQ ID NO: 2522057 - DNA, 25 bp, Homo sapien
actcccagatgtggttggccgccag

SEQ ID NO: 2522058 - DNA, 25 bp, Homo sapien
agcctcaggcgggaactgcaacagg

SEQ ID NO: 2522059 - DNA, 25 bp, Homo sapien
acacgaagtcctttcgactggccag

SEQ ID NO: 2522060 - DNA, 25 bp, Homo sapien
gatctggatccctagtccctcatgg

SEQ ID NO: 2522061 - DNA, 25 bp, Homo sapien
tggagacacgaagtcctttcgactg

SEQ ID NO: 2522062 - DNA, 25 bp, Homo sapien
ggatctggatccctagtccctcatg

SEQ ID NO: 2522063 - DNA, 25 bp, Homo sapien
aggggcctttgctgggatccgccat

SEQ ID NO: 2522064 - DNA, 25 bp, Homo sapien
cacaggggcctttgctgggatccgc

SEQ ID NO: 2522065 - DNA, 25 bp, Homo sapien
ctgcacaggggcctttgctgggatc

SEQ ID NO: 2522066 - DNA, 25 bp, Homo sapien
tgcacaggggcctttgctgggatcc

SEQ ID NO: 2522067 - DNA, 25 bp, Homo sapien
gccattccaaatcagtcttgccggg

SEQ ID NO: 2522068 - DNA, 25 bp, Homo sapien
taggctgtaagatcagggacctgaa

SEQ ID NO: 2522069 - DNA, 25 bp, Homo sapien
acctgaagttccaggcagggttgca

SEQ ID NO: 2522070 - DNA, 25 bp, Homo sapien
taaacacaactgtgagtgcctgcca

SEQ ID NO: 2522071 - DNA, 25 bp, Homo sapien
ccagcgtggccacggcagtcatttg

SEQ ID NO: 2522072 - DNA, 25 bp, Homo sapien
gccagcgtggccacggcagtcattt

SEQ ID NO: 2522073 - DNA, 25 bp, Homo sapien
cagcgtggccacggcagtcatttgg

SEQ ID NO: 2522074 - DNA, 25 bp, Homo sapien
gcgtggccacggcagtcatttggtc

SEQ ID NO: 2522075 - DNA, 25 bp, Homo sapien
ctgggggataagctggaagaaaaca

SEQ ID NO: 2522076 - DNA, 25 bp, Homo sapien
tctgggggataagctggaagaaaac

SEQ ID NO: 2522077 - DNA, 25 bp, Homo sapien
tgggggataagctggaagaaaacat

SEQ ID NO: 2522078 - DNA, 25 bp, Homo sapien
gggagatccgcgcttcctgaatccc

SEQ ID NO: 2522079 - DNA, 25 bp, Homo sapien
gagatccgcgcttcctgaatcccgg

SEQ ID NO: 2522080 - DNA, 25 bp, Homo sapien
cggccgggagatccgcgcttcctga

SEQ ID NO: 2522081 - DNA, 25 bp, Homo sapien
ccgggagatccgcgcttcctgaatc

SEQ ID NO: 2522082 - DNA, 25 bp, Homo sapien
ggctcaaatcatgacgaaaagaagg

SEQ ID NO: 2522083 - DNA, 25 bp, Homo sapien
ccagagaggtgaaggaacctcccca

SEQ ID NO: 2522084 - DNA, 25 bp, Homo sapien
gaggctgcagacaatcagtgctctg

SEQ ID NO: 2522085 - DNA, 25 bp, Homo sapien
aagcaccagggctaacaagtatgca

SEQ ID NO: 2522086 - DNA, 25 bp, Homo sapien
tcagatgaccgttgccatgggcaca

SEQ ID NO: 2522087 - DNA, 25 bp, Homo sapien
gatgaccgttgccatgggcacagct

SEQ ID NO: 2522088 - DNA, 25 bp, Homo sapien
cagatgaccgttgccatgggcacag

SEQ ID NO: 2522089 - DNA, 25 bp, Homo sapien
gaccgttgccatgggcacagctact

SEQ ID NO: 2522090 - DNA, 25 bp, Homo sapien
aaggcaggctgattcaggacttcca

SEQ ID NO: 2522091 - DNA, 25 bp, Homo sapien
gcctccatatgaaggtgatggcaca

SEQ ID NO: 2522092 - DNA, 25 bp, Homo sapien
tctaggcctcggtcccaaggaaggc

SEQ ID NO: 2522093 - DNA, 25 bp, Homo sapien
agctggccacgggcacttcaaagat

SEQ ID NO: 2522094 - DNA, 25 bp, Homo sapien
cagagcgagaatccatctccaacaa

SEQ ID NO: 2522095 - DNA, 25 bp, Homo sapien
acagagcgagaatccatctccaaca

SEQ ID NO: 2522096 - DNA, 25 bp, Homo sapien
caagcgcaggcgctcaatgcgcagg

SEQ ID NO: 2522097 - DNA, 25 bp, Homo sapien
gggctcaagcgcaggcgctcaatgc

SEQ ID NO: 2522098 - DNA, 25 bp, Homo sapien
tgaagggtcgtgtccccatataacc

SEQ ID NO: 2522099 - DNA, 25 bp, Homo sapien
caaaactgaagggtcgtgtccccat

SEQ ID NO: 2522100 - DNA, 25 bp, Homo sapien
tagagcttagaatgaacagtaacat

SEQ ID NO: 2522101 - DNA, 25 bp, Homo sapien
tttagagcttagaatgaacagtaac

SEQ ID NO: 2522102 - DNA, 25 bp, Homo sapien
ggagagacagaattctgtatttcta

SEQ ID NO: 2522103 - DNA, 25 bp, Homo sapien
catccctaatctgaggactattaaa

SEQ ID NO: 2522104 - DNA, 25 bp, Homo sapien
gaaagagcagggtttacaatagtgc

SEQ ID NO: 2522105 - DNA, 25 bp, Homo sapien
cgagagcctcataaggtcacgtgct

SEQ ID NO: 2522106 - DNA, 25 bp, Homo sapien
catcaagggcttgctggttggtttc

SEQ ID NO: 2522107 - DNA, 25 bp, Homo sapien
acatgagaatacacaccagtttgct

SEQ ID NO: 2522108 - DNA, 25 bp, Homo sapien
cagtctgtgctgtcgtgaaattcca

SEQ ID NO: 2522109 - DNA, 25 bp, Homo sapien
tttttaaagcgaggtggatgacacc

SEQ ID NO: 2522110 - DNA, 25 bp, Homo sapien
tcggtttttaccacgctgaaatgaa

SEQ ID NO: 2522111 - DNA, 25 bp, Homo sapien
gctgtgttcctcgttggcaacaaaa

SEQ ID NO: 2522112 - DNA, 25 bp, Homo sapien
cttatagggtgctgcgtacagtgct

SEQ ID NO: 2522113 - DNA, 25 bp, Homo sapien
cagacttatagggtgctgcgtacag

SEQ ID NO: 2522114 - DNA, 25 bp, Homo sapien
aggaagtcagacttatagggtgctg

SEQ ID NO: 2522115 - DNA, 25 bp, Homo sapien
gaagtcagacttatagggtgctgcg

SEQ ID NO: 2522116 - DNA, 25 bp, Homo sapien
cctcgttctcatggccgccagggtg

SEQ ID NO: 2522117 - DNA, 25 bp, Homo sapien
tggaaccatactggcttctgcccca

SEQ ID NO: 2522118 - DNA, 25 bp, Homo sapien
ctcgttctcatggccgccagggtgg

SEQ ID NO: 2522119 - DNA, 25 bp, Homo sapien
tcgttctcatggccgccagggtggg

SEQ ID NO: 2522120 - DNA, 25 bp, Homo sapien
ttgagggccatctcgtaggccttgg

SEQ ID NO: 2522121 - DNA, 25 bp, Homo sapien
cgctccccgtcgcagatgctctgga

SEQ ID NO: 2522122 - DNA, 25 bp, Homo sapien
gccatggtacttcttgagggccatc

SEQ ID NO: 2522123 - DNA, 25 bp, Homo sapien
tcttctgcacgatccagccatggta

SEQ ID NO: 2522124 - DNA, 25 bp, Homo sapien
tagaaaggctcagtcacaggccagg

SEQ ID NO: 2522125 - DNA, 25 bp, Homo sapien
tgagttcaaactagcccataggatg

SEQ ID NO: 2522126 - DNA, 25 bp, Homo sapien
tgcaaattagaactcctcctcacgg

SEQ ID NO: 2522127 - DNA, 25 bp, Homo sapien
gctggtagagaacagcatgagttca

SEQ ID NO: 2522128 - DNA, 25 bp, Homo sapien
agtgtggcccctactttgggccact

SEQ ID NO: 2522129 - DNA, 25 bp, Homo sapien
tgtggcccctactttgggccactct

SEQ ID NO: 2522130 - DNA, 25 bp, Homo sapien
gtgtggcccctactttgggccactc

SEQ ID NO: 2522131 - DNA, 25 bp, Homo sapien
cagtgtggcccctactttgggccac

SEQ ID NO: 2522132 - DNA, 25 bp, Homo sapien
ggttggtgtcgtacacagctttgat

SEQ ID NO: 2522133 - DNA, 25 bp, Homo sapien
gttctgcagggtccggaacttggct

SEQ ID NO: 2522134 - DNA, 25 bp, Homo sapien
ttggctgggttggtgtcgtacacag

SEQ ID NO: 2522135 - DNA, 25 bp, Homo sapien
ggatgttctgcagggtccggaactt

SEQ ID NO: 2522136 - DNA, 25 bp, Homo sapien
gccacgtacttgcttgtgaccttaa

SEQ ID NO: 2522137 - DNA, 25 bp, Homo sapien
gaagtccaggaacgaaggcctctga

SEQ ID NO: 2522138 - DNA, 25 bp, Homo sapien
aagcgagtccttcaacccctctgag

SEQ ID NO: 2522139 - DNA, 25 bp, Homo sapien
gttccgaggattccaagaagtccag

SEQ ID NO: 2522140 - DNA, 25 bp, Homo sapien
gcttatgtctgccttgatgggagta

SEQ ID NO: 2522141 - DNA, 25 bp, Homo sapien
tgccttgatgggagtaaacactggg

SEQ ID NO: 2522142 - DNA, 25 bp, Homo sapien
ctgccttgatgggagtaaacactgg

SEQ ID NO: 2522143 - DNA, 25 bp, Homo sapien
tctgccttgatgggagtaaacactg

SEQ ID NO: 2522144 - DNA, 25 bp, Homo sapien
agtgatttttcagggccaccgcagg

SEQ ID NO: 2522145 - DNA, 25 bp, Homo sapien
aatgagaagacagattgagattcgc

SEQ ID NO: 2522146 - DNA, 25 bp, Homo sapien
gacagattgagattcgcagcaagag

SEQ ID NO: 2522147 - DNA, 25 bp, Homo sapien
gattcgcagcaagagtgatttttca

SEQ ID NO: 2522148 - DNA, 25 bp, Homo sapien
tcagtgtagcacactacagccaaga

SEQ ID NO: 2522149 - DNA, 25 bp, Homo sapien
gggccagttcacacctctttaagca

SEQ ID NO: 2522150 - DNA, 25 bp, Homo sapien
acctggtggtcctctttgccaggag

SEQ ID NO: 2522151 - DNA, 25 bp, Homo sapien
agttcacacctctttaagcaacctg

SEQ ID NO: 2522152 - DNA, 25 bp, Homo sapien
gactgcctaactgccagggtggaaa

SEQ ID NO: 2522153 - DNA, 25 bp, Homo sapien
gagggctgatccactgcaatgactt

SEQ ID NO: 2522154 - DNA, 25 bp, Homo sapien
gacagagatctcagaagggagtgaa

SEQ ID NO: 2522155 - DNA, 25 bp, Homo sapien
taaggaacttggaggaacagcaagg

SEQ ID NO: 2522156 - DNA, 25 bp, Homo sapien
ttcacgtggatataggctgggcgcc

SEQ ID NO: 2522157 - DNA, 25 bp, Homo sapien
aatcctcgtccttctggcagcagag

SEQ ID NO: 2522158 - DNA, 25 bp, Homo sapien
taatcacattgtcatgccagccggg

SEQ ID NO: 2522159 - DNA, 25 bp, Homo sapien
gacctgctgtaaagtcctgtggacc

SEQ ID NO: 2522160 - DNA, 25 bp, Homo sapien
tgtggtggttaacccattgtggacc

SEQ ID NO: 2522161 - DNA, 25 bp, Homo sapien
gaacggatgtgcaacctcgctgaaa

SEQ ID NO: 2522162 - DNA, 25 bp, Homo sapien
tggtgaacagtaaacagctctggtg

SEQ ID NO: 2522163 - DNA, 25 bp, Homo sapien
cactgcggcttctgtataaatggta

SEQ ID NO: 2522164 - DNA, 25 bp, Homo sapien
cagaatgcctaagggagatggaaga

SEQ ID NO: 2522165 - DNA, 25 bp, Homo sapien
cacggatgatcagggggcatttggg

SEQ ID NO: 2522166 - DNA, 25 bp, Homo sapien
tttgggggatatgtaggactgtgag

SEQ ID NO: 2522167 - DNA, 25 bp, Homo sapien
ttacagaatgcctaagggagatgga

SEQ ID NO: 2522168 - DNA, 25 bp, Homo sapien
gtgggacaccgcctcgaggaagggc

SEQ ID NO: 2522169 - DNA, 25 bp, Homo sapien
tcgatctgcttgtccgcgggcagcg

SEQ ID NO: 2522170 - DNA, 25 bp, Homo sapien
gtctcgatctgcttgtccgcgggca

SEQ ID NO: 2522171 - DNA, 25 bp, Homo sapien
agaagggcggcaggtgggacaccgc

SEQ ID NO: 2522172 - DNA, 25 bp, Homo sapien
gcgccgcgggcgtcgacaccgcccc

SEQ ID NO: 2522173 - DNA, 25 bp, Homo sapien
ggcgccgcgggcgtcgacaccgccc

SEQ ID NO: 2522174 - DNA, 25 bp, Homo sapien
cggcgccgcgggcgtcgacaccgcc

SEQ ID NO: 2522175 - DNA, 25 bp, Homo sapien
gatgcactgagataggtcattgctc

SEQ ID NO: 2522176 - DNA, 25 bp, Homo sapien
aaatatgattagtgcctggcctagg

SEQ ID NO: 2522177 - DNA, 25 bp, Homo sapien
cactatggctgattcaagaagcacc

SEQ ID NO: 2522178 - DNA, 25 bp, Homo sapien
gaagcaccttgccatagaacatagg

SEQ ID NO: 2522179 - DNA, 25 bp, Homo sapien
gagggaacagcatagcaggaaaggt

SEQ ID NO: 2522180 - DNA, 25 bp, Homo sapien
tacactgggatcctgaagtctgagt

SEQ ID NO: 2522181 - DNA, 25 bp, Homo sapien
gcttcaatgaaagctatggaagaaa

SEQ ID NO: 2522182 - DNA, 25 bp, Homo sapien
tcagagggaatcaggagggcttctc

SEQ ID NO: 2522183 - DNA, 25 bp, Homo sapien
ttaattgtcaacctccagtgttgac

SEQ ID NO: 2522184 - DNA, 25 bp, Homo sapien
taattgtcaacctccagtgttgact

SEQ ID NO: 2522185 - DNA, 25 bp, Homo sapien
tgagtgactgatcccaacatgtatg

SEQ ID NO: 2522186 - DNA, 25 bp, Homo sapien
taccttagaaggtcacctggttggc

SEQ ID NO: 2522187 - DNA, 25 bp, Homo sapien
catggacgcattccagaaaagtggc

SEQ ID NO: 2522188 - DNA, 25 bp, Homo sapien
ggaacactctgacgtccatggacgc

SEQ ID NO: 2522189 - DNA, 25 bp, Homo sapien
tatatcagcgtgatacaggtctaca

SEQ ID NO: 2522190 - DNA, 25 bp, Homo sapien
ctcccaccattatatcagcgtgata

SEQ ID NO: 2522191 - DNA, 25 bp, Homo sapien
tcagaaccacagaccggccagaaat

SEQ ID NO: 2522192 - DNA, 25 bp, Homo sapien
gcgtgatacaggtctacattcattt

SEQ ID NO: 2522193 - DNA, 25 bp, Homo sapien
tgagcagcacgttcatcacgcatgc

SEQ ID NO: 2522194 - DNA, 25 bp, Homo sapien
tcacgcatgctctctgttgcgttcc

SEQ ID NO: 2522195 - DNA, 25 bp, Homo sapien
cactgtcctgtagaaacagatcaag

SEQ ID NO: 2522196 - DNA, 25 bp, Homo sapien
gctgcaaaccacgtccttcatctgt

SEQ ID NO: 2522197 - DNA, 25 bp, Homo sapien
tcctggctttgttacggattttctg

SEQ ID NO: 2522198 - DNA, 25 bp, Homo sapien
agatgtccagtaatggtgaaataaa

SEQ ID NO: 2522199 - DNA, 25 bp, Homo sapien
gttacggattttctgattgactgcc

SEQ ID NO: 2522200 - DNA, 25 bp, Homo sapien
ttctgattgactgccgttaagtgca

SEQ ID NO: 2522201 - DNA, 25 bp, Homo sapien
aagaaaccactcacttcatctggct

SEQ ID NO: 2522202 - DNA, 25 bp, Homo sapien
agaaaccactcacttcatctggctg

SEQ ID NO: 2522203 - DNA, 25 bp, Homo sapien
cgagatcacgtcgagccgagatcgc

SEQ ID NO: 2522204 - DNA, 25 bp, Homo sapien
cctatttgctaagcacagaggaaga

SEQ ID NO: 2522205 - DNA, 25 bp, Homo sapien
ctaatgatggcgttttgggagaact

SEQ ID NO: 2522206 - DNA, 25 bp, Homo sapien
gcagagccccaaagcatatgaaaca

SEQ ID NO: 2522207 - DNA, 25 bp, Homo sapien
gaatcacttgagaagccgtgcacag

SEQ ID NO: 2522208 - DNA, 25 bp, Homo sapien
tactattggaaagctcatgggtgcc

SEQ ID NO: 2522209 - DNA, 25 bp, Homo sapien
taatgagtgacagggatcaaacacg

SEQ ID NO: 2522210 - DNA, 25 bp, Homo sapien
cagctcccgagttgtgcgtttagaa

SEQ ID NO: 2522211 - DNA, 25 bp, Homo sapien
gctgtgtttgatctttgggcccaat

SEQ ID NO: 2522212 - DNA, 25 bp, Homo sapien
gaactatttgcattccaaggcagat

SEQ ID NO: 2522213 - DNA, 25 bp, Homo sapien
gcagatgacgatttctgtgaaagga

SEQ ID NO: 2522214 - DNA, 25 bp, Homo sapien
actgttctttggcaaataagaacta

SEQ ID NO: 2522215 - DNA, 25 bp, Homo sapien
cttctagaaggcatcccgggagcat

SEQ ID NO: 2522216 - DNA, 25 bp, Homo sapien
taaggtgcgatttgccaacaggagc

SEQ ID NO: 2522217 - DNA, 25 bp, Homo sapien
aacataacacacagggttggccggc

SEQ ID NO: 2522218 - DNA, 25 bp, Homo sapien
tataaaggtgtgcatcgatcagtcc

SEQ ID NO: 2522219 - DNA, 25 bp, Homo sapien
cactggatgacctgctgcgtgacca

SEQ ID NO: 2522220 - DNA, 25 bp, Homo sapien
gtcagtaaacgaagggaagtcctca

SEQ ID NO: 2522221 - DNA, 25 bp, Homo sapien
tcggtaggcactggacgtcagtaaa

SEQ ID NO: 2522222 - DNA, 25 bp, Homo sapien
ttggcgatgtcgtacgcacactgga

SEQ ID NO: 2522223 - DNA, 25 bp, Homo sapien
gccttttagcacgacttgtatatcc

SEQ ID NO: 2522224 - DNA, 25 bp, Homo sapien
gacagccgtttaccctgaactgcag

SEQ ID NO: 2522225 - DNA, 25 bp, Homo sapien
agtgcatgcagggtaattttagtag

SEQ ID NO: 2522226 - DNA, 25 bp, Homo sapien
gcccacagcgtaagagatgctgaaa

SEQ ID NO: 2522227 - DNA, 25 bp, Homo sapien
tctgtaacagctacgtgtatcctct

SEQ ID NO: 2522228 - DNA, 25 bp, Homo sapien
agctacgtgtatcctctctgagcag

SEQ ID NO: 2522229 - DNA, 25 bp, Homo sapien
aacagctacgtgtatcctctctgag

SEQ ID NO: 2522230 - DNA, 25 bp, Homo sapien
catttctgtaacagctacgtgtatc

SEQ ID NO: 2522231 - DNA, 25 bp, Homo sapien
ggttgcttacatggatcaagaggag

SEQ ID NO: 2522232 - DNA, 25 bp, Homo sapien
cacacgatagaaaagcgagcacacc

SEQ ID NO: 2522233 - DNA, 25 bp, Homo sapien
aaggttttcgtgcataatatgtcat

SEQ ID NO: 2522234 - DNA, 25 bp, Homo sapien
cacccggattaatgaggaagccctc

SEQ ID NO: 2522235 - DNA, 25 bp, Homo sapien
tgacatcttcggtgctagggagagt

SEQ ID NO: 2522236 - DNA, 25 bp, Homo sapien
tgctcttaagagctcctgtatgttt

SEQ ID NO: 2522237 - DNA, 25 bp, Homo sapien
ttcttgggctgctcttaagagctcc

SEQ ID NO: 2522238 - DNA, 25 bp, Homo sapien
ttctgctgtgtctggtaccaagcca

SEQ ID NO: 2522239 - DNA, 25 bp, Homo sapien
caggtgggccaactccttgggtaca

SEQ ID NO: 2522240 - DNA, 25 bp, Homo sapien
gaagtgttgactctcacaggaaggg

SEQ ID NO: 2522241 - DNA, 25 bp, Homo sapien
catggtaaggctctaaaatcggcta

SEQ ID NO: 2522242 - DNA, 25 bp, Homo sapien
tgtttataaagccatcctcaggtgg

SEQ ID NO: 2522243 - DNA, 25 bp, Homo sapien
tgtcgttgggagtgttgtcgtagtc

SEQ ID NO: 2522244 - DNA, 25 bp, Homo sapien
gagtgttgtcgtagtcactctcagg

SEQ ID NO: 2522245 - DNA, 25 bp, Homo sapien
cgttgggagtgttgtcgtagtcact

SEQ ID NO: 2522246 - DNA, 25 bp, Homo sapien
gtcactctcaggtgtgctgttctgc

SEQ ID NO: 2522247 - DNA, 25 bp, Homo sapien
aattgttacctgttaggctactggc

SEQ ID NO: 2522248 - DNA, 25 bp, Homo sapien
gagggaccctcatgagtttgtaaca

SEQ ID NO: 2522249 - DNA, 25 bp, Homo sapien
tacaaactaacagacatgcaaggca

SEQ ID NO: 2522250 - DNA, 25 bp, Homo sapien
tcttctcaggagtcttccccaggaa

SEQ ID NO: 2522251 - DNA, 25 bp, Homo sapien
acttatatgaccacagaccttcagc

SEQ ID NO: 2522252 - DNA, 25 bp, Homo sapien
gattatctcattgagccccatatga

SEQ ID NO: 2522253 - DNA, 25 bp, Homo sapien
aacatgccagcacttatatgaccac

SEQ ID NO: 2522254 - DNA, 25 bp, Homo sapien
tcctgctacctccaatatttcatgc

SEQ ID NO: 2522255 - DNA, 25 bp, Homo sapien
ggtttttatatatacacccacacag

SEQ ID NO: 2522256 - DNA, 25 bp, Homo sapien
aacatatagcagcaaccacccagga

SEQ ID NO: 2522257 - DNA, 25 bp, Homo sapien
taagtccttccatcgttgtcaacaa

SEQ ID NO: 2522258 - DNA, 25 bp, Homo sapien
tgtcaggaacaatcagggtgatcag

SEQ ID NO: 2522259 - DNA, 25 bp, Homo sapien
gcatgcagagccaaaagctattggt

SEQ ID NO: 2522260 - DNA, 25 bp, Homo sapien
tgcacccagccgagactttaagtac

SEQ ID NO: 2522261 - DNA, 25 bp, Homo sapien
tgacttacccaaacgctgtgtatgg

SEQ ID NO: 2522262 - DNA, 25 bp, Homo sapien
gaactgggacgtggatttcaaagcc

SEQ ID NO: 2522263 - DNA, 25 bp, Homo sapien
taaccaacccgtacaagtgaacagc

SEQ ID NO: 2522264 - DNA, 25 bp, Homo sapien
ctttcgtccctcgaccaggaaagtg

SEQ ID NO: 2522265 - DNA, 25 bp, Homo sapien
cgtccctcgaccaggaaagtgtgga

SEQ ID NO: 2522266 - DNA, 25 bp, Homo sapien
gggcgctttcgtccctcgaccagga

SEQ ID NO: 2522267 - DNA, 25 bp, Homo sapien
tccctcgaccaggaaagtgtggagg

SEQ ID NO: 2522268 - DNA, 25 bp, Homo sapien
tctcatcctgctctcttcggggcgg

SEQ ID NO: 2522269 - DNA, 25 bp, Homo sapien
ggagatatggtttctgacctgatcc

SEQ ID NO: 2522270 - DNA, 25 bp, Homo sapien
acatgggcctactgccccgggcaga

SEQ ID NO: 2522271 - DNA, 25 bp, Homo sapien
gatccggtctcgtacatggacatgg

SEQ ID NO: 2522272 - DNA, 25 bp, Homo sapien
tgtttcctgaggttcgaattttcac

SEQ ID NO: 2522273 - DNA, 25 bp, Homo sapien
tactcagaaccagtttgcacctgat

SEQ ID NO: 2522274 - DNA, 25 bp, Homo sapien
cagtttgcacctgatatacattggt

SEQ ID NO: 2522275 - DNA, 25 bp, Homo sapien
tatacattggttgtggcctgtttcc

SEQ ID NO: 2522276 - DNA, 25 bp, Homo sapien
aataaggacagtaacagctagccgg

SEQ ID NO: 2522277 - DNA, 25 bp, Homo sapien
aaagaaatgtttggcagtgggactg

SEQ ID NO: 2522278 - DNA, 25 bp, Homo sapien
tagccgggctgaaagtaaaaagcca

SEQ ID NO: 2522279 - DNA, 25 bp, Homo sapien
aatcaactcccttcatcacgtaagc

SEQ ID NO: 2522280 - DNA, 25 bp, Homo sapien
tagagactgtcacttggaggccctg

SEQ ID NO: 2522281 - DNA, 25 bp, Homo sapien
gacatcttcgcatggatgctccacg

SEQ ID NO: 2522282 - DNA, 25 bp, Homo sapien
agcacgcttgcttccgtctggtgag

SEQ ID NO: 2522283 - DNA, 25 bp, Homo sapien
tgagtgatcatctttcggccagggc

SEQ ID NO: 2522284 - DNA, 25 bp, Homo sapien
gaaagatcagatacaaatcatgcta

SEQ ID NO: 2522285 - DNA, 25 bp, Homo sapien
tacaaatcatgctactttgtcaact

SEQ ID NO: 2522286 - DNA, 25 bp, Homo sapien
gatcagatacaaatcatgctacttt

SEQ ID NO: 2522287 - DNA, 25 bp, Homo sapien
catgctactttgtcaactttatgta

SEQ ID NO: 2522288 - DNA, 25 bp, Homo sapien
tgtctcgtttacagctgcacggcag

SEQ ID NO: 2522289 - DNA, 25 bp, Homo sapien
aaagagtccaggcacacatggagtg

SEQ ID NO: 2522290 - DNA, 25 bp, Homo sapien
tagaccaaaccccaggcaaaagtgc

SEQ ID NO: 2522291 - DNA, 25 bp, Homo sapien
caagtgtctgttcgtttaaggctag

SEQ ID NO: 2522292 - DNA, 25 bp, Homo sapien
tgaatgctgataaacatgcccctgc

SEQ ID NO: 2522293 - DNA, 25 bp, Homo sapien
gtgatcatccttccctagcaatggg

SEQ ID NO: 2522294 - DNA, 25 bp, Homo sapien
gaagcacagaatagtccaagggtta

SEQ ID NO: 2522295 - DNA, 25 bp, Homo sapien
gattaaagcgtcaaccgtcctggca

SEQ ID NO: 2522296 - DNA, 25 bp, Homo sapien
gcataattctcagctcgtcactcaa

SEQ ID NO: 2522297 - DNA, 25 bp, Homo sapien
aattctcagctcgtcactcaagttg

SEQ ID NO: 2522298 - DNA, 25 bp, Homo sapien
cataattctcagctcgtcactcaag

SEQ ID NO: 2522299 - DNA, 25 bp, Homo sapien
tctcagctcgtcactcaagttgtta

SEQ ID NO: 2522300 - DNA, 25 bp, Homo sapien
ttttgacctccataaattcctgtac

SEQ ID NO: 2522301 - DNA, 25 bp, Homo sapien
taaattcctgtacagtgactggtcc

SEQ ID NO: 2522302 - DNA, 25 bp, Homo sapien
agtgactggtccatctgataaatct

SEQ ID NO: 2522303 - DNA, 25 bp, Homo sapien
ctcagaagccactagagcgtttttg

SEQ ID NO: 2522304 - DNA, 25 bp, Homo sapien
gcagctttggcagggctagccctca

SEQ ID NO: 2522305 - DNA, 25 bp, Homo sapien
tgatgcgtgcttgcccttccatggg

SEQ ID NO: 2522306 - DNA, 25 bp, Homo sapien
ttggcctgagctagtaacaaaccca

SEQ ID NO: 2522307 - DNA, 25 bp, Homo sapien
ttataaagtctcaactgcagcaggg

SEQ ID NO: 2522308 - DNA, 25 bp, Homo sapien
cacgctgtcatagtcgggctgatcg

SEQ ID NO: 2522309 - DNA, 25 bp, Homo sapien
ggttttcagtatgagctccacattg

SEQ ID NO: 2522310 - DNA, 25 bp, Homo sapien
tgtgtcttcgtctgatgccacgctg

SEQ ID NO: 2522311 - DNA, 25 bp, Homo sapien
tcttgactctcaacgctgtgctggt

SEQ ID NO: 2522312 - DNA, 25 bp, Homo sapien
gcaaattgttaaactggagccagaa

SEQ ID NO: 2522313 - DNA, 25 bp, Homo sapien
aaggcaggttcccaagtttctagag

SEQ ID NO: 2522314 - DNA, 25 bp, Homo sapien
tagagcctagctccaggtcatgaag

SEQ ID NO: 2522315 - DNA, 25 bp, Homo sapien
catgttacagggagtgtctatccca

SEQ ID NO: 2522316 - DNA, 25 bp, Homo sapien
gggaatgtgatactgactgaaaact

SEQ ID NO: 2522317 - DNA, 25 bp, Homo sapien
tcatgggcgttgaaccgagctaact

SEQ ID NO: 2522318 - DNA, 25 bp, Homo sapien
cctcttggcgtcactgagaatgtca

SEQ ID NO: 2522319 - DNA, 25 bp, Homo sapien
tgaccagcgtggcaaactcatgggc

SEQ ID NO: 2522320 - DNA, 25 bp, Homo sapien
tgaaccgagctaacttctgtctgcc

SEQ ID NO: 2522321 - DNA, 25 bp, Homo sapien
tgatttcgtgttgatgagtactcag

SEQ ID NO: 2522322 - DNA, 25 bp, Homo sapien
cgctgtggttttgcgtggcaagcca

SEQ ID NO: 2522323 - DNA, 25 bp, Homo sapien
tactcaggattgaccggaagaaagg

SEQ ID NO: 2522324 - DNA, 25 bp, Homo sapien
ttgtctcggttaccagggcgctgtg

SEQ ID NO: 2522325 - DNA, 25 bp, Homo sapien
aacacacgcaaaggcaaacgtcgac

SEQ ID NO: 2522326 - DNA, 25 bp, Homo sapien
gcaaaggcaaacgtcgacactcgca

SEQ ID NO: 2522327 - DNA, 25 bp, Homo sapien
cacgcaaaggcaaacgtcgacactc

SEQ ID NO: 2522328 - DNA, 25 bp, Homo sapien
agccaacacacgcaaaggcaaacgt

SEQ ID NO: 2522329 - DNA, 25 bp, Homo sapien
actgcccactgataacagaagctta

SEQ ID NO: 2522330 - DNA, 25 bp, Homo sapien
attagataaagccacgtcaagtcac

SEQ ID NO: 2522331 - DNA, 25 bp, Homo sapien
cagaaattggactagtaaaacactg

SEQ ID NO: 2522332 - DNA, 25 bp, Homo sapien
aaattggactagtaaaacactgagc

SEQ ID NO: 2522333 - DNA, 25 bp, Homo sapien
gtcaacttcatcgtacacatccatg

SEQ ID NO: 2522334 - DNA, 25 bp, Homo sapien
tcatcgtacacatccatggcaagtt

SEQ ID NO: 2522335 - DNA, 25 bp, Homo sapien
gtctctcgcctgtcaacttcatcgt

SEQ ID NO: 2522336 - DNA, 25 bp, Homo sapien
tgcatccgtctctcgcctgtcaact

SEQ ID NO: 2522337 - DNA, 25 bp, Homo sapien
cagagtaggtatcagcagggtgcac

SEQ ID NO: 2522338 - DNA, 25 bp, Homo sapien
gaacgcgtgccctacttactcatga

SEQ ID NO: 2522339 - DNA, 25 bp, Homo sapien
cagtgaatctatgggactcgccacc

SEQ ID NO: 2522340 - DNA, 25 bp, Homo sapien
gaacaactgcctaatgccaaaggtg

SEQ ID NO: 2522341 - DNA, 25 bp, Homo sapien
gcttttgccaattcagacaaatcca

SEQ ID NO: 2522342 - DNA, 25 bp, Homo sapien
gcagcttttgccaattcagacaaat

SEQ ID NO: 2522343 - DNA, 25 bp, Homo sapien
agcagcttttgccaattcagacaaa

SEQ ID NO: 2522344 - DNA, 25 bp, Homo sapien
ttagcagcttttgccaattcagaca

SEQ ID NO: 2522345 - DNA, 25 bp, Homo sapien
acatacaaagctaataagcaaataa

SEQ ID NO: 2522346 - DNA, 25 bp, Homo sapien
catacaaagctaataagcaaataaa

SEQ ID NO: 2522347 - DNA, 25 bp, Homo sapien
gagaaaaatgtatgggctttgttaa

SEQ ID NO: 2522348 - DNA, 25 bp, Homo sapien
tttccaaatggtatagccataaaag

SEQ ID NO: 2522349 - DNA, 25 bp, Homo sapien
cttatttccaaatggtatagccata

SEQ ID NO: 2522350 - DNA, 25 bp, Homo sapien
tccaaatggtatagccataaaagag

SEQ ID NO: 2522351 - DNA, 25 bp, Homo sapien
tgccatttgaggtattataaagtgc

SEQ ID NO: 2522352 - DNA, 25 bp, Homo sapien
tataaagtgctgtccatttttgtga

SEQ ID NO: 2522353 - DNA, 25 bp, Homo sapien
gaggtattataaagtgctgtccatt

SEQ ID NO: 2522354 - DNA, 25 bp, Homo sapien
tttgaggtattataaagtgctgtcc

SEQ ID NO: 2522355 - DNA, 25 bp, Homo sapien
tcggttcgctataacctccgcttcc

SEQ ID NO: 2522356 - DNA, 25 bp, Homo sapien
aagttcactttcctgcacatggatg

SEQ ID NO: 2522357 - DNA, 25 bp, Homo sapien
gttgaagttcactttcctgcacatg

SEQ ID NO: 2522358 - DNA, 25 bp, Homo sapien
gtccggttgtcccaatgcattaaaa

SEQ ID NO: 2522359 - DNA, 25 bp, Homo sapien
cacagtctacttagaaatcctattt

SEQ ID NO: 2522360 - DNA, 25 bp, Homo sapien
tttacatttccagtagaaggtagaa

SEQ ID NO: 2522361 - DNA, 25 bp, Homo sapien
tcagtggttatggtagaaattacta

SEQ ID NO: 2522362 - DNA, 25 bp, Homo sapien
tggcttgtagtcttctttcagtggt

SEQ ID NO: 2522363 - DNA, 25 bp, Homo sapien
tctgataacgccaacatttgtgtca

SEQ ID NO: 2522364 - DNA, 25 bp, Homo sapien
ttatagcatggtcttactagctgct

SEQ ID NO: 2522365 - DNA, 25 bp, Homo sapien
caagtcattatggatgatatcctag

SEQ ID NO: 2522366 - DNA, 25 bp, Homo sapien
agtacatgagaattactcagatgtc

SEQ ID NO: 2522367 - DNA, 25 bp, Homo sapien
gctgatgacacttttgagttcccta

SEQ ID NO: 2522368 - DNA, 25 bp, Homo sapien
tgaagtcctatcagaagtaagacaa

SEQ ID NO: 2522369 - DNA, 25 bp, Homo sapien
gagttccctaatctaccaaccagga

SEQ ID NO: 2522370 - DNA, 25 bp, Homo sapien
gcactcattatgtacctccaggttt

SEQ ID NO: 2522371 - DNA, 25 bp, Homo sapien
atgttcaagaactgtggtacccatt

SEQ ID NO: 2522372 - DNA, 25 bp, Homo sapien
attcctagtcccaccatgttcaaga

SEQ ID NO: 2522373 - DNA, 25 bp, Homo sapien
tgttccctatcacaaatagccaagt

SEQ ID NO: 2522374 - DNA, 25 bp, Homo sapien
caaaggttattgctttgctcctaca

SEQ ID NO: 2522375 - DNA, 25 bp, Homo sapien
acagagatagaaggctagtctgtcc

SEQ ID NO: 2522376 - DNA, 25 bp, Homo sapien
gaggcgctctgccagctcatggtgc

SEQ ID NO: 2522377 - DNA, 25 bp, Homo sapien
catactgtatttccacgaggcgctc

SEQ ID NO: 2522378 - DNA, 25 bp, Homo sapien
gtctgtccgttagctcatactgtat

SEQ ID NO: 2522379 - DNA, 25 bp, Homo sapien
aagaaggtccttcccctaggtgatg

SEQ ID NO: 2522380 - DNA, 25 bp, Homo sapien
tcagtgagagacacgccaacctaac

SEQ ID NO: 2522381 - DNA, 25 bp, Homo sapien
gagtctagtaaccacttcaaaggct

SEQ ID NO: 2522382 - DNA, 25 bp, Homo sapien
cagggctctcgtccaagatcaagta

SEQ ID NO: 2522383 - DNA, 25 bp, Homo sapien
tagatgtctactacccaaaccttac

SEQ ID NO: 2522384 - DNA, 25 bp, Homo sapien
tactatacttgtttaatcacatatc

SEQ ID NO: 2522385 - DNA, 25 bp, Homo sapien
ctggcctagagtgagcacttagatg

SEQ ID NO: 2522386 - DNA, 25 bp, Homo sapien
ttggaatctgactacagctcaaaca

SEQ ID NO: 2522387 - DNA, 25 bp, Homo sapien
gcctgggtctgctccatatactgcc

SEQ ID NO: 2522388 - DNA, 25 bp, Homo sapien
cttgcataatcaacgggagttttcc

SEQ ID NO: 2522389 - DNA, 25 bp, Homo sapien
actagaatcctgtgtgcctgggtct

SEQ ID NO: 2522390 - DNA, 25 bp, Homo sapien
tactgccaataattcagcctgtaaa

SEQ ID NO: 2522391 - DNA, 25 bp, Homo sapien
ctgttctcacgctcgaatggagttg

SEQ ID NO: 2522392 - DNA, 25 bp, Homo sapien
cagtctcaaacaggtttcaagattc

SEQ ID NO: 2522393 - DNA, 25 bp, Homo sapien
gattccctgttctcacgctcgaatg

SEQ ID NO: 2522394 - DNA, 25 bp, Homo sapien
tcaaacaggtttcaagattccctgt

SEQ ID NO: 2522395 - DNA, 25 bp, Homo sapien
tcgtcatcccggcagggcaagcgat

SEQ ID NO: 2522396 - DNA, 25 bp, Homo sapien
gatacttggctctgatgaattccgc

SEQ ID NO: 2522397 - DNA, 25 bp, Homo sapien
ggcaagcgatggacgaacgctaaca

SEQ ID NO: 2522398 - DNA, 25 bp, Homo sapien
taagatctttggcagtcacactatc

SEQ ID NO: 2522399 - DNA, 25 bp, Homo sapien
gacgcagggtccagcaaagaatgct

SEQ ID NO: 2522400 - DNA, 25 bp, Homo sapien
gctttacgtcttccactcataatag

SEQ ID NO: 2522401 - DNA, 25 bp, Homo sapien
ccgttattatacaaggtctcaacca

SEQ ID NO: 2522402 - DNA, 25 bp, Homo sapien
gctcccatatagagttagcaccgtt

SEQ ID NO: 2522403 - DNA, 25 bp, Homo sapien
tagactccgatggacactgcagcac

SEQ ID NO: 2522404 - DNA, 25 bp, Homo sapien
tgtgtttcagatgcctcacttggga

SEQ ID NO: 2522405 - DNA, 25 bp, Homo sapien
gcagcactcatcacataaaaacgtt

SEQ ID NO: 2522406 - DNA, 25 bp, Homo sapien
cacttgggagatatggcgccctaga

SEQ ID NO: 2522407 - DNA, 25 bp, Homo sapien
catcttgttggatggtatgacctac

SEQ ID NO: 2522408 - DNA, 25 bp, Homo sapien
tatgctcatcaatgcatcaggctgg

SEQ ID NO: 2522409 - DNA, 25 bp, Homo sapien
tggcagggataccagcaggttgcta

SEQ ID NO: 2522410 - DNA, 25 bp, Homo sapien
gctataccgccagatggcaaaagat

SEQ ID NO: 2522411 - DNA, 25 bp, Homo sapien
ggctgattaggtacaatgttaattg

SEQ ID NO: 2522412 - DNA, 25 bp, Homo sapien
gctgattaggtacaatgttaattga

SEQ ID NO: 2522413 - DNA, 25 bp, Homo sapien
gttcagggccacagtttgtagccct

SEQ ID NO: 2522414 - DNA, 25 bp, Homo sapien
acagtttgtagccctaatgtggatc

SEQ ID NO: 2522415 - DNA, 25 bp, Homo sapien
ctaatgtggatctaccatttcagat

SEQ ID NO: 2522416 - DNA, 25 bp, Homo sapien
gatctaccatttcagatgcatgctt

SEQ ID NO: 2522417 - DNA, 25 bp, Homo sapien
ggtgacaataggtgccacttaagct

SEQ ID NO: 2522418 - DNA, 25 bp, Homo sapien
gaataatttcatacttggcaagcag

SEQ ID NO: 2522419 - DNA, 25 bp, Homo sapien
gaagttgcaataacagcagcttcac

SEQ ID NO: 2522420 - DNA, 25 bp, Homo sapien
taaactaccaagtccaatcctgcaa

SEQ ID NO: 2522421 - DNA, 25 bp, Homo sapien
tgtgtttggaagaccccgatctcct

SEQ ID NO: 2522422 - DNA, 25 bp, Homo sapien
tggtaacacctgcactgtacgggcc

SEQ ID NO: 2522423 - DNA, 25 bp, Homo sapien
tcagaacagttgcaaagccagtggt

SEQ ID NO: 2522424 - DNA, 25 bp, Homo sapien
attctcccgggcagagtagctgtcg

SEQ ID NO: 2522425 - DNA, 25 bp, Homo sapien
agcgggcccggccggtgcgactcac

SEQ ID NO: 2522426 - DNA, 25 bp, Homo sapien
ccggcccgctgcagtcagcgcacac

SEQ ID NO: 2522427 - DNA, 25 bp, Homo sapien
cgctgctccggagccgtttcgacat

SEQ ID NO: 2522428 - DNA, 25 bp, Homo sapien
aactagaggccgggggacagcaaag

SEQ ID NO: 2522429 - DNA, 25 bp, Homo sapien
gaactagaggccgggggacagcaaa

SEQ ID NO: 2522430 - DNA, 25 bp, Homo sapien
cacctgcggggaactagaggccggg

SEQ ID NO: 2522431 - DNA, 25 bp, Homo sapien
ctcccacctgcggggaactagaggc

SEQ ID NO: 2522432 - DNA, 25 bp, Homo sapien
cgctgacggcggcgcctctcccctc

SEQ ID NO: 2522433 - DNA, 25 bp, Homo sapien
gcgctgacggcggcgcctctcccct

SEQ ID NO: 2522434 - DNA, 25 bp, Homo sapien
ggcgctgacggcggcgcctctcccc

SEQ ID NO: 2522435 - DNA, 25 bp, Homo sapien
cctgaggcaatcaatggtcaagttc

SEQ ID NO: 2522436 - DNA, 25 bp, Homo sapien
ccttcctgaggcaatcaatggtcaa

SEQ ID NO: 2522437 - DNA, 25 bp, Homo sapien
cacaaccttcctgaggcaatcaatg

SEQ ID NO: 2522438 - DNA, 25 bp, Homo sapien
gaggcaatcaatggtcaagttcatt

SEQ ID NO: 2522439 - DNA, 25 bp, Homo sapien
gccgggcacagtggcaggagcctgt

SEQ ID NO: 2522440 - DNA, 25 bp, Homo sapien
ggttgcagtgagctgagatcacgcc

SEQ ID NO: 2522441 - DNA, 25 bp, Homo sapien
caggagcctgtaatctcagttactt

SEQ ID NO: 2522442 - DNA, 25 bp, Homo sapien
gggaggctgaggcaggagcttgaac

SEQ ID NO: 2522443 - DNA, 25 bp, Homo sapien
tgcccagttcaatatgtgccgaggt

SEQ ID NO: 2522444 - DNA, 25 bp, Homo sapien
cattgagtcaaggaggcatagtgcc

SEQ ID NO: 2522445 - DNA, 25 bp, Homo sapien
taaacttcatattcgcagactgtgg

SEQ ID NO: 2522446 - DNA, 25 bp, Homo sapien
ccatggttagagtctccgggtgcca

SEQ ID NO: 2522447 - DNA, 25 bp, Homo sapien
cagaacacatgggtagcgagtggcc

SEQ ID NO: 2522448 - DNA, 25 bp, Homo sapien
taagcatgcagtaattgttcaccag

SEQ ID NO: 2522449 - DNA, 25 bp, Homo sapien
gaatggcgcctgcagtatgtggtaa

SEQ ID NO: 2522450 - DNA, 25 bp, Homo sapien
gagttacgacgtggaagcctttaga

SEQ ID NO: 2522451 - DNA, 25 bp, Homo sapien
tgaacagcccactctatgtaaaggc

SEQ ID NO: 2522452 - DNA, 25 bp, Homo sapien
caggacctcaccacggaatgtgcta

SEQ ID NO: 2522453 - DNA, 25 bp, Homo sapien
tagctggttaacacgtccacctcag

SEQ ID NO: 2522454 - DNA, 25 bp, Homo sapien
tttccactatcaaagctagacaggg

SEQ ID NO: 2522455 - DNA, 25 bp, Homo sapien
tagagggtgctcatacaaaattcca

SEQ ID NO: 2522456 - DNA, 25 bp, Homo sapien
gaaaagctaagcttgagtggcccaa

SEQ ID NO: 2522457 - DNA, 25 bp, Homo sapien
gtgttgccagtgaaacgttcccaga

SEQ ID NO: 2522458 - DNA, 25 bp, Homo sapien
taaagactgcttccttagagggtgc

SEQ ID NO: 2522459 - DNA, 25 bp, Homo sapien
aacacttgggaaataactggtggag

SEQ ID NO: 2522460 - DNA, 25 bp, Homo sapien
caaacacttgggaaataactggtgg

SEQ ID NO: 2522461 - DNA, 25 bp, Homo sapien
tacaggcactcacaaggttaccatg

SEQ ID NO: 2522462 - DNA, 25 bp, Homo sapien
gcattctaggctaactcaggtgaga

SEQ ID NO: 2522463 - DNA, 25 bp, Homo sapien
tcaaatgcagggcaagggagatcaa

SEQ ID NO: 2522464 - DNA, 25 bp, Homo sapien
cctcaagtttcagaccgtgggctag

SEQ ID NO: 2522465 - DNA, 25 bp, Homo sapien
tcaccgacgccgaatgggcttgtag

SEQ ID NO: 2522466 - DNA, 25 bp, Homo sapien
caccgacgccgaatgggcttgtaga

SEQ ID NO: 2522467 - DNA, 25 bp, Homo sapien
ccgacgccgaatgggcttgtagaca

SEQ ID NO: 2522468 - DNA, 25 bp, Homo sapien
accgacgccgaatgggcttgtagac

SEQ ID NO: 2522469 - DNA, 25 bp, Homo sapien
tgtgtctgtagggatgtgggcccat

SEQ ID NO: 2522470 - DNA, 25 bp, Homo sapien
ccaggttccagctagggcctaacca

SEQ ID NO: 2522471 - DNA, 25 bp, Homo sapien
caagcaaatgtacactgatgtgtgt

SEQ ID NO: 2522472 - DNA, 25 bp, Homo sapien
tgttcttcagtctcattactgttcc

SEQ ID NO: 2522473 - DNA, 25 bp, Homo sapien
gaaccccagacgcggaggttgcagc

SEQ ID NO: 2522474 - DNA, 25 bp, Homo sapien
aaccccagacgcggaggttgcagcg

SEQ ID NO: 2522475 - DNA, 25 bp, Homo sapien
agccgagatcgcaccattgcactcc

SEQ ID NO: 2522476 - DNA, 25 bp, Homo sapien
cactccagcctgggcgacagggact

SEQ ID NO: 2522477 - DNA, 25 bp, Homo sapien
aaatttaaaactctcggctgtgcgc

SEQ ID NO: 2522478 - DNA, 25 bp, Homo sapien
cttgcatctcgcattttggaagaac

SEQ ID NO: 2522479 - DNA, 25 bp, Homo sapien
tgtcaaacaaaatctccaacctacg

SEQ ID NO: 2522480 - DNA, 25 bp, Homo sapien
taaatgtcatgtcttaaaatagccc

SEQ ID NO: 2522481 - DNA, 25 bp, Homo sapien
taaatgatgtgccttgttgcctagc

SEQ ID NO: 2522482 - DNA, 25 bp, Homo sapien
aggagaggacccagaatgagaccca

SEQ ID NO: 2522483 - DNA, 25 bp, Homo sapien
gagacccaggtctcccgattgcagt

SEQ ID NO: 2522484 - DNA, 25 bp, Homo sapien
tattgagagcttactggacaccatg

SEQ ID NO: 2522485 - DNA, 25 bp, Homo sapien
cgcccgccagcccgagggccgctca

SEQ ID NO: 2522486 - DNA, 25 bp, Homo sapien
gcccgccagcccgagggccgctcac

SEQ ID NO: 2522487 - DNA, 25 bp, Homo sapien
ggatccacggggctcggggcctctg

SEQ ID NO: 2522488 - DNA, 25 bp, Homo sapien
gcagcaccgcgtacggccggctccg

SEQ ID NO: 2522489 - DNA, 25 bp, Homo sapien
ccctcgcagcaccgcgtacggccgg

SEQ ID NO: 2522490 - DNA, 25 bp, Homo sapien
tcgcagcaccgcgtacggccggctc

SEQ ID NO: 2522491 - DNA, 25 bp, Homo sapien
gccacggtaacgctggacgcagcat

SEQ ID NO: 2522492 - DNA, 25 bp, Homo sapien
tacagccacggtaacgctggacgca

SEQ ID NO: 2522493 - DNA, 25 bp, Homo sapien
cagccacggtaacgctggacgcagc

SEQ ID NO: 2522494 - DNA, 25 bp, Homo sapien
ccacggtaacgctggacgcagcatc

SEQ ID NO: 2522495 - DNA, 25 bp, Homo sapien
tgtaacgtatttctggcaaccacag

SEQ ID NO: 2522496 - DNA, 25 bp, Homo sapien
ggaattgagctaagtgtttggccca

SEQ ID NO: 2522497 - DNA, 25 bp, Homo sapien
cagaagggactatagtgcagaaacc

SEQ ID NO: 2522498 - DNA, 25 bp, Homo sapien
tgcagaaacctgacccaatggctac

SEQ ID NO: 2522499 - DNA, 25 bp, Homo sapien
aaggtgtaatctgccatgttaaaga

SEQ ID NO: 2522500 - DNA, 25 bp, Homo sapien
ctgccatgttaaagacactgtgcac

SEQ ID NO: 2522501 - DNA, 25 bp, Homo sapien
gtaatctgccatgttaaagacactg

SEQ ID NO: 2522502 - DNA, 25 bp, Homo sapien
aatctgccatgttaaagacactgtg

SEQ ID NO: 2522503 - DNA, 25 bp, Homo sapien
ttccaatcctagctcggctgcatga

SEQ ID NO: 2522504 - DNA, 25 bp, Homo sapien
tgcttccgtgtgactcgttttccct

SEQ ID NO: 2522505 - DNA, 25 bp, Homo sapien
cacaggaaagcatcaatgggaggca

SEQ ID NO: 2522506 - DNA, 25 bp, Homo sapien
agcatcaatgggaggcatagcacag

SEQ ID NO: 2522507 - DNA, 25 bp, Homo sapien
tcaacatggaaataacctaacactg

SEQ ID NO: 2522508 - DNA, 25 bp, Homo sapien
tacatgctattacatcgatgaacct

SEQ ID NO: 2522509 - DNA, 25 bp, Homo sapien
ctagagctgtgcatatcaacatgga

SEQ ID NO: 2522510 - DNA, 25 bp, Homo sapien
aaatccaaagccacaccatgtactc

SEQ ID NO: 2522511 - DNA, 25 bp, Homo sapien
aatctgtctcccctagcaatcaggg

SEQ ID NO: 2522512 - DNA, 25 bp, Homo sapien
caatcagggaatggagtttttaagg

SEQ ID NO: 2522513 - DNA, 25 bp, Homo sapien
ttgtaactgctcaaagggttcacct

SEQ ID NO: 2522514 - DNA, 25 bp, Homo sapien
agaagaagagtaattcgtgcagagc

SEQ ID NO: 2522515 - DNA, 25 bp, Homo sapien
catggaaccctcaggctgcttgtgc

SEQ ID NO: 2522516 - DNA, 25 bp, Homo sapien
ggggcactcacaggcaagtctggat

SEQ ID NO: 2522517 - DNA, 25 bp, Homo sapien
tccatcaaggggcactcacaggcaa

SEQ ID NO: 2522518 - DNA, 25 bp, Homo sapien
atggaaccctcaggctgcttgtgct

SEQ ID NO: 2522519 - DNA, 25 bp, Homo sapien
tgaatataagtgactttcgcagact

SEQ ID NO: 2522520 - DNA, 25 bp, Homo sapien
atataagtgactttcgcagacttac

SEQ ID NO: 2522521 - DNA, 25 bp, Homo sapien
catgctctgaatataagtgactttc

SEQ ID NO: 2522522 - DNA, 25 bp, Homo sapien
aatccacatgctctgaatataagtg

SEQ ID NO: 2522523 - DNA, 25 bp, Homo sapien
cattgcaggtaggatgggccccatg

SEQ ID NO: 2522524 - DNA, 25 bp, Homo sapien
ttgcaggtaggatgggccccatgcc

SEQ ID NO: 2522525 - DNA, 25 bp, Homo sapien
attgcaggtaggatgggccccatgc

SEQ ID NO: 2522526 - DNA, 25 bp, Homo sapien
gcattgcaggtaggatgggccccat

SEQ ID NO: 2522527 - DNA, 25 bp, Homo sapien
gaggatgtgcctttcagcaaagttc

SEQ ID NO: 2522528 - DNA, 25 bp, Homo sapien
cagggaggatgtgcctttcagcaaa

SEQ ID NO: 2522529 - DNA, 25 bp, Homo sapien
tgcagggaggatgtgcctttcagca

SEQ ID NO: 2522530 - DNA, 25 bp, Homo sapien
cagcaaagttcctctcccccttaca

SEQ ID NO: 2522531 - DNA, 25 bp, Homo sapien
ccaaagggctgagcctccaaagtga

SEQ ID NO: 2522532 - DNA, 25 bp, Homo sapien
cacggagaagctgagcatgcagcct

SEQ ID NO: 2522533 - DNA, 25 bp, Homo sapien
tcatggacccctaaagaacagtggc

SEQ ID NO: 2522534 - DNA, 25 bp, Homo sapien
ggttgaggacccaagagatgctctg

SEQ ID NO: 2522535 - DNA, 25 bp, Homo sapien
cctaatatgtccttaccatgtgcca

SEQ ID NO: 2522536 - DNA, 25 bp, Homo sapien
ccaactctataaggaaggtgctagt

SEQ ID NO: 2522537 - DNA, 25 bp, Homo sapien
tacaggcagttccatatggctcaag

SEQ ID NO: 2522538 - DNA, 25 bp, Homo sapien
taggccatagctatagaatacaggc

SEQ ID NO: 2522539 - DNA, 25 bp, Homo sapien
gaatgaagcgagaagcttgtccaag

SEQ ID NO: 2522540 - DNA, 25 bp, Homo sapien
ctccacctaatagccgaacaaactg

SEQ ID NO: 2522541 - DNA, 25 bp, Homo sapien
tcacatggtaaacagcagcgccagc

SEQ ID NO: 2522542 - DNA, 25 bp, Homo sapien
taatagccgaacaaactgtggtatg

SEQ ID NO: 2522543 - DNA, 25 bp, Homo sapien
attcttctccttctatggggtcacc

SEQ ID NO: 2522544 - DNA, 25 bp, Homo sapien
tggtcccgtgtatcacgtggctgga

SEQ ID NO: 2522545 - DNA, 25 bp, Homo sapien
gggtcacctccagaactgggtcatc

SEQ ID NO: 2522546 - DNA, 25 bp, Homo sapien
atttactgttctcttggtcccgtgt

SEQ ID NO: 2522547 - DNA, 25 bp, Homo sapien
ttcagctggaggaggcccagaccca

SEQ ID NO: 2522548 - DNA, 25 bp, Homo sapien
ctattcagctggaggaggcccagac

SEQ ID NO: 2522549 - DNA, 25 bp, Homo sapien
cagacccacaggtgtgtggccaccc

SEQ ID NO: 2522550 - DNA, 25 bp, Homo sapien
agacccacaggtgtgtggccaccca

SEQ ID NO: 2522551 - DNA, 25 bp, Homo sapien
cgaactggtacagcaacaccatctc

SEQ ID NO: 2522552 - DNA, 25 bp, Homo sapien
atagccacgaactggtacagcaaca

SEQ ID NO: 2522553 - DNA, 25 bp, Homo sapien
cacgaactggtacagcaacaccatc

SEQ ID NO: 2522554 - DNA, 25 bp, Homo sapien
gccacgaactggtacagcaacacca

SEQ ID NO: 2522555 - DNA, 25 bp, Homo sapien
tgtggttcagtagggctcacactgc

SEQ ID NO: 2522556 - DNA, 25 bp, Homo sapien
cacactgctccgtcatcttctcgaa

SEQ ID NO: 2522557 - DNA, 25 bp, Homo sapien
tttcccattttgtctggtaacagga

SEQ ID NO: 2522558 - DNA, 25 bp, Homo sapien
tgtctggtaacaggatcttccttcc

SEQ ID NO: 2522559 - DNA, 25 bp, Homo sapien
attgtactagttatattattctctc

SEQ ID NO: 2522560 - DNA, 25 bp, Homo sapien
taattgtactagttatattattctc

SEQ ID NO: 2522561 - DNA, 25 bp, Homo sapien
aattgtactagttatattattctct

SEQ ID NO: 2522562 - DNA, 25 bp, Homo sapien
gcctagtgacatagtgtgaccctct

SEQ ID NO: 2522563 - DNA, 25 bp, Homo sapien
aaagaaattgtatgctgggcccagg

SEQ ID NO: 2522564 - DNA, 25 bp, Homo sapien
tccattggtcctatgatagctgctc

SEQ ID NO: 2522565 - DNA, 25 bp, Homo sapien
ccaggaatgtcaggaagtcccatca

SEQ ID NO: 2522566 - DNA, 25 bp, Homo sapien
ccaaacttggacatggttactctga

SEQ ID NO: 2522567 - DNA, 25 bp, Homo sapien
gtcacaaccctatgaacagatgcag

SEQ ID NO: 2522568 - DNA, 25 bp, Homo sapien
taagttgccttgactcttagtaaac

SEQ ID NO: 2522569 - DNA, 25 bp, Homo sapien
caatcatcatgataagggctcctca

SEQ ID NO: 2522570 - DNA, 25 bp, Homo sapien
acagttcctccaagggtgaaacata

SEQ ID NO: 2522571 - DNA, 25 bp, Homo sapien
accttgttcgcaatgtttatggaag

SEQ ID NO: 2522572 - DNA, 25 bp, Homo sapien
aaaagtgttccatccatgcaatgga

SEQ ID NO: 2522573 - DNA, 25 bp, Homo sapien
tccacataaaaccttgttcgcaatg

SEQ ID NO: 2522574 - DNA, 25 bp, Homo sapien
ggctggcacggttacagcctccctt

SEQ ID NO: 2522575 - DNA, 25 bp, Homo sapien
taacataggaaaagacgatcacgtg

SEQ ID NO: 2522576 - DNA, 25 bp, Homo sapien
gccataattgatgctttggatccgg

SEQ ID NO: 2522577 - DNA, 25 bp, Homo sapien
gatccgggcgactttgtttgtctca

SEQ ID NO: 2522578 - DNA, 25 bp, Homo sapien
ggccacagcaagccccctcccagta

SEQ ID NO: 2522579 - DNA, 25 bp, Homo sapien
ctcaactctcccagatggggccaca

SEQ ID NO: 2522580 - DNA, 25 bp, Homo sapien
atggggccacagcaagccccctccc

SEQ ID NO: 2522581 - DNA, 25 bp, Homo sapien
gggccacagcaagccccctcccagt

SEQ ID NO: 2522582 - DNA, 25 bp, Homo sapien
ccaacatcaaggagactaagctgag

SEQ ID NO: 2522583 - DNA, 25 bp, Homo sapien
accaacatcaaggagactaagctga

SEQ ID NO: 2522584 - DNA, 25 bp, Homo sapien
acatcaaggagactaagctgaggca

SEQ ID NO: 2522585 - DNA, 25 bp, Homo sapien
aacatcaaggagactaagctgaggc

SEQ ID NO: 2522586 - DNA, 25 bp, Homo sapien
tggtgttccatacttcttcccacag

SEQ ID NO: 2522587 - DNA, 25 bp, Homo sapien
ctggtgttccatacttcttcccaca

SEQ ID NO: 2522588 - DNA, 25 bp, Homo sapien
gctggtgttccatacttcttcccac

SEQ ID NO: 2522589 - DNA, 25 bp, Homo sapien
ggctggtgttccatacttcttccca

SEQ ID NO: 2522590 - DNA, 25 bp, Homo sapien
acaggtttgagccagtaggcctggc

SEQ ID NO: 2522591 - DNA, 25 bp, Homo sapien
ccacaacaaatttcctctcgtgttt

SEQ ID NO: 2522592 - DNA, 25 bp, Homo sapien
taggcctggcccctacatctttctt

SEQ ID NO: 2522593 - DNA, 25 bp, Homo sapien
tgaacccgggagttctagacaggtc

SEQ ID NO: 2522594 - DNA, 25 bp, Homo sapien
catcatccccaattcaggaatatca

SEQ ID NO: 2522595 - DNA, 25 bp, Homo sapien
gagaaagacaacatcatccccaatt

SEQ ID NO: 2522596 - DNA, 25 bp, Homo sapien
tgagaaagacaacatcatccccaat

SEQ ID NO: 2522597 - DNA, 25 bp, Homo sapien
tcaggaatatcatgttagtcccatt

SEQ ID NO: 2522598 - DNA, 25 bp, Homo sapien
taaaatcttacgatgcaggacagcc

SEQ ID NO: 2522599 - DNA, 25 bp, Homo sapien
tgagggcaggatactactagcagct

SEQ ID NO: 2522600 - DNA, 25 bp, Homo sapien
tctcattggccagaaatggatcacg

SEQ ID NO: 2522601 - DNA, 25 bp, Homo sapien
cactagccagggaatgagattgaca

SEQ ID NO: 2522602 - DNA, 25 bp, Homo sapien
cctggcactcgctgaatactcgtgc

SEQ ID NO: 2522603 - DNA, 25 bp, Homo sapien
ctcgtgcagaatccagaaatatctc

SEQ ID NO: 2522604 - DNA, 25 bp, Homo sapien
cagatgggatagcatcttgaatcct

SEQ ID NO: 2522605 - DNA, 25 bp, Homo sapien
gcctgcagaatagccccagatggga

SEQ ID NO: 2522606 - DNA, 25 bp, Homo sapien
ctctcctccagtggaagatggtgaa

SEQ ID NO: 2522607 - DNA, 25 bp, Homo sapien
tgaagcccatccatgtaagcagcat

SEQ ID NO: 2522608 - DNA, 25 bp, Homo sapien
tttgaagcccatccatgtaagcagc

SEQ ID NO: 2522609 - DNA, 25 bp, Homo sapien
cctctcctccagtggaagatggtga

SEQ ID NO: 2522610 - DNA, 25 bp, Homo sapien
tttgaggtaacctcgccaactcgcg

SEQ ID NO: 2522611 - DNA, 25 bp, Homo sapien
tctgggattcgagcggatccaggcc

SEQ ID NO: 2522612 - DNA, 25 bp, Homo sapien
gatgcagcacctcgcaagtggaagg

SEQ ID NO: 2522613 - DNA, 25 bp, Homo sapien
cgaaataggagagagctcccgtcct

SEQ ID NO: 2522614 - DNA, 25 bp, Homo sapien
tcaagatcacaaacctatccatcac

SEQ ID NO: 2522615 - DNA, 25 bp, Homo sapien
ttttaagctccgcacacattaagta

SEQ ID NO: 2522616 - DNA, 25 bp, Homo sapien
catacactggtgaaaccatcagctt

SEQ ID NO: 2522617 - DNA, 25 bp, Homo sapien
tacttttgacatacgcatacactgg

SEQ ID NO: 2522618 - DNA, 25 bp, Homo sapien
gcctaggcagtagagtgagactccg

SEQ ID NO: 2522619 - DNA, 25 bp, Homo sapien
cctaggcagtagagtgagactccgt

SEQ ID NO: 2522620 - DNA, 25 bp, Homo sapien
gagactccgtctcaaacaaacaaac

SEQ ID NO: 2522621 - DNA, 25 bp, Homo sapien
agactccgtctcaaacaaacaaaca

SEQ ID NO: 2522622 - DNA, 25 bp, Homo sapien
ttctccaggaaattgtccccactga

SEQ ID NO: 2522623 - DNA, 25 bp, Homo sapien
tgtttcagagccatgtttgggacct

SEQ ID NO: 2522624 - DNA, 25 bp, Homo sapien
gacaagggcatgcattgtttcagag

SEQ ID NO: 2522625 - DNA, 25 bp, Homo sapien
cttgtctgaacattacttgagagga

SEQ ID NO: 2522626 - DNA, 25 bp, Homo sapien
ccatagtttagacatcactggcgtc

SEQ ID NO: 2522627 - DNA, 25 bp, Homo sapien
gggaggaccggctaatactgtgaat

SEQ ID NO: 2522628 - DNA, 25 bp, Homo sapien
ttttagaatgtaataacccagtggc

SEQ ID NO: 2522629 - DNA, 25 bp, Homo sapien
ccattggtcaggtaattcaggaggg

SEQ ID NO: 2522630 - DNA, 25 bp, Homo sapien
gggaaccagcacatcatatggaaag

SEQ ID NO: 2522631 - DNA, 25 bp, Homo sapien
gcaggagcgagaggtcaggggcagt

SEQ ID NO: 2522632 - DNA, 25 bp, Homo sapien
aaccagcacatcatatggaaagagc

SEQ ID NO: 2522633 - DNA, 25 bp, Homo sapien
gagcgagaggtcaggggcagttgtc

SEQ ID NO: 2522634 - DNA, 25 bp, Homo sapien
gactaaatatattgctgaaactaaa

SEQ ID NO: 2522635 - DNA, 25 bp, Homo sapien
gctgtctctacaaaggcaaagtcaa

SEQ ID NO: 2522636 - DNA, 25 bp, Homo sapien
ctttttaaggtaacacaatacagag

SEQ ID NO: 2522637 - DNA, 25 bp, Homo sapien
cttctgagttgaatatgaaaaatgg

SEQ ID NO: 2522638 - DNA, 25 bp, Homo sapien
gagtaaactatgcacattgttgtac

SEQ ID NO: 2522639 - DNA, 25 bp, Homo sapien
tgttgtacaacggatctccagaatg

SEQ ID NO: 2522640 - DNA, 25 bp, Homo sapien
taatgtcctcaagaacactgctatc

SEQ ID NO: 2522641 - DNA, 25 bp, Homo sapien
tccatgtcagttatactttaatagc

SEQ ID NO: 2522642 - DNA, 25 bp, Homo sapien
gcctaattgccttagctagaacttc

SEQ ID NO: 2522643 - DNA, 25 bp, Homo sapien
tgcctaattgccttagctagaactt

SEQ ID NO: 2522644 - DNA, 25 bp, Homo sapien
tacttcagtgtatgagatacattgg

SEQ ID NO: 2522645 - DNA, 25 bp, Homo sapien
ttttcatgagggtgttttacttcag

SEQ ID NO: 2522646 - DNA, 25 bp, Homo sapien
gagccacaacgccgggcctcagttt

SEQ ID NO: 2522647 - DNA, 25 bp, Homo sapien
ggaacacctgttctatgccaaacac

SEQ ID NO: 2522648 - DNA, 25 bp, Homo sapien
agcattgctacattaggcaggaatc

SEQ ID NO: 2522649 - DNA, 25 bp, Homo sapien
acaccagatactccaggttgtccca

SEQ ID NO: 2522650 - DNA, 25 bp, Homo sapien
gcccgccacaccagatactccaggt

SEQ ID NO: 2522651 - DNA, 25 bp, Homo sapien
cagcattgctacattaggcaggaat

SEQ ID NO: 2522652 - DNA, 25 bp, Homo sapien
tatactaagaactgaatgaatgatc

SEQ ID NO: 2522653 - DNA, 25 bp, Homo sapien
ttgcctggcctcatctgcagataag

SEQ ID NO: 2522654 - DNA, 25 bp, Homo sapien
tcctacttcatctgcagttattttg

SEQ ID NO: 2522655 - DNA, 25 bp, Homo sapien
tatttatcaaggtagtactatacta

SEQ ID NO: 2522656 - DNA, 25 bp, Homo sapien
tcctatagcaaaattactgagtcat

SEQ ID NO: 2522657 - DNA, 25 bp, Homo sapien
taaagtatcattacgtgttatcaag

SEQ ID NO: 2522658 - DNA, 25 bp, Homo sapien
ttacgtgttatcaagtgactttcca

SEQ ID NO: 2522659 - DNA, 25 bp, Homo sapien
tatcattacgtgttatcaagtgact

SEQ ID NO: 2522660 - DNA, 25 bp, Homo sapien
agttgtaaatccatgaataattatc

SEQ ID NO: 2522661 - DNA, 25 bp, Homo sapien
attatcacagagagcagtgtcatca

SEQ ID NO: 2522662 - DNA, 25 bp, Homo sapien
cagttgtaaatccatgaataattat

SEQ ID NO: 2522663 - DNA, 25 bp, Homo sapien
tctggatgaagctactttaagggtg

SEQ ID NO: 2522664 - DNA, 25 bp, Homo sapien
gaagctactttaagggtgcatcatg

SEQ ID NO: 2522665 - DNA, 25 bp, Homo sapien
gatgaagctactttaagggtgcatc

SEQ ID NO: 2522666 - DNA, 25 bp, Homo sapien
tactttaagggtgcatcatggaggg

SEQ ID NO: 2522667 - DNA, 25 bp, Homo sapien
ggcagaggggacttcaaatcctccc

SEQ ID NO: 2522668 - DNA, 25 bp, Homo sapien
attcagttctatcaggtcttccctg

SEQ ID NO: 2522669 - DNA, 25 bp, Homo sapien
ggatctttggcccacatactggaca

SEQ ID NO: 2522670 - DNA, 25 bp, Homo sapien
cgcccagcctggacattcagttcta

SEQ ID NO: 2522671 - DNA, 25 bp, Homo sapien
tgaaaatctcgaagcaccatcttca

SEQ ID NO: 2522672 - DNA, 25 bp, Homo sapien
ggtccacctggaacagattatctga

SEQ ID NO: 2522673 - DNA, 25 bp, Homo sapien
gaaaatctcgaagcaccatcttcac

SEQ ID NO: 2522674 - DNA, 25 bp, Homo sapien
acctggtccacctggaacagattat

SEQ ID NO: 2522675 - DNA, 25 bp, Homo sapien
gcacttgggaagttaatcccactgt

SEQ ID NO: 2522676 - DNA, 25 bp, Homo sapien
ggcttgtttgcgttgctgtgcagtt

SEQ ID NO: 2522677 - DNA, 25 bp, Homo sapien
tgggaagttaatcccactgtcctgg

SEQ ID NO: 2522678 - DNA, 25 bp, Homo sapien
cttgggaagttaatcccactgtcct

SEQ ID NO: 2522679 - DNA, 25 bp, Homo sapien
tcagggagctatggttttgagaacc

SEQ ID NO: 2522680 - DNA, 25 bp, Homo sapien
tgtgcctggcactacactggtcgct

SEQ ID NO: 2522681 - DNA, 25 bp, Homo sapien
aatagaattcaggtcgagtccacag

SEQ ID NO: 2522682 - DNA, 25 bp, Homo sapien
taaactacattatcccatcagggag

SEQ ID NO: 2522683 - DNA, 25 bp, Homo sapien
aaagcaaaggaaaagctgggcgcgg

SEQ ID NO: 2522684 - DNA, 25 bp, Homo sapien
tctccagcttagtgctccaaaagca

SEQ ID NO: 2522685 - DNA, 25 bp, Homo sapien
gggtgtgcacaaatcccagagaaaa

SEQ ID NO: 2522686 - DNA, 25 bp, Homo sapien
ctaaactggagaattagaaactgga

SEQ ID NO: 2522687 - DNA, 25 bp, Homo sapien
caggtcaagaagcttaaggagagat

SEQ ID NO: 2522688 - DNA, 25 bp, Homo sapien
agaacgcgcacaccaagacggtgga

SEQ ID NO: 2522689 - DNA, 25 bp, Homo sapien
acttcggcgtcaacgagagtacggg

SEQ ID NO: 2522690 - DNA, 25 bp, Homo sapien
accttttcggcgcgcaaggctcgga

SEQ ID NO: 2522691 - DNA, 25 bp, Homo sapien
tgctggaacttgtgattgagcagtt

SEQ ID NO: 2522692 - DNA, 25 bp, Homo sapien
tattactggcagcatgtatatcttt

SEQ ID NO: 2522693 - DNA, 25 bp, Homo sapien
attgagcagtttgaagacttgctag

SEQ ID NO: 2522694 - DNA, 25 bp, Homo sapien
gacttgctagttaggattttattac

SEQ ID NO: 2522695 - DNA, 25 bp, Homo sapien
tcctgacggtgacaagaatgatgac

SEQ ID NO: 2522696 - DNA, 25 bp, Homo sapien
aatgatgacggctgtgatggcaccc

SEQ ID NO: 2522697 - DNA, 25 bp, Homo sapien
taggagttgtcccagagtgtggcat

SEQ ID NO: 2522698 - DNA, 25 bp, Homo sapien
ccttcctggtaatggcaaggtgaca

SEQ ID NO: 2522699 - DNA, 25 bp, Homo sapien
gccaagtattgtgtagccattaata

SEQ ID NO: 2522700 - DNA, 25 bp, Homo sapien
gaaccttttctgtggttttcattga

SEQ ID NO: 2522701 - DNA, 25 bp, Homo sapien
gggacttacatagcaaaccattcag

SEQ ID NO: 2522702 - DNA, 25 bp, Homo sapien
catcttttaagtagatagtggcagc

SEQ ID NO: 2522703 - DNA, 25 bp, Homo sapien
aaatacacttcggatctcccaacag

SEQ ID NO: 2522704 - DNA, 25 bp, Homo sapien
aaatgtcatatggaggataacctac

SEQ ID NO: 2522705 - DNA, 25 bp, Homo sapien
ggttatctctgaagtgctgtgttgc

SEQ ID NO: 2522706 - DNA, 25 bp, Homo sapien
acagctttgcggttctgaaacagcc

SEQ ID NO: 2522707 - DNA, 25 bp, Homo sapien
taacgtgccatttctcttctaggtt

SEQ ID NO: 2522708 - DNA, 25 bp, Homo sapien
tattagtagccaatgcaattgtggg

SEQ ID NO: 2522709 - DNA, 25 bp, Homo sapien
cggccagtgctagccactttttaaa

SEQ ID NO: 2522710 - DNA, 25 bp, Homo sapien
tgtatggcaggtaagcaaaaattcc

SEQ ID NO: 2522711 - DNA, 25 bp, Homo sapien
tatttggtcagggcatggtagctca

SEQ ID NO: 2522712 - DNA, 25 bp, Homo sapien
attatatttggtcagggcatggtag

SEQ ID NO: 2522713 - DNA, 25 bp, Homo sapien
gccaacatggcaagtccccgtcgct

SEQ ID NO: 2522714 - DNA, 25 bp, Homo sapien
tatatttggtcagggcatggtagct

SEQ ID NO: 2522715 - DNA, 25 bp, Homo sapien
tatcgacaggacagaaagagtgtgc

SEQ ID NO: 2522716 - DNA, 25 bp, Homo sapien
gaagcccttaaggaatatgagcctg

SEQ ID NO: 2522717 - DNA, 25 bp, Homo sapien
tgctgaaaatgccatcgaagccctt

SEQ ID NO: 2522718 - DNA, 25 bp, Homo sapien
gagtgtgcagcggattaaagctaaa

SEQ ID NO: 2522719 - DNA, 25 bp, Homo sapien
ttagccaggatgacctcgtgatcct

SEQ ID NO: 2522720 - DNA, 25 bp, Homo sapien
tgttagccaggatgacctcgtgatc

SEQ ID NO: 2522721 - DNA, 25 bp, Homo sapien
acgattgcggcccactgcaagcttc

SEQ ID NO: 2522722 - DNA, 25 bp, Homo sapien
aaagacggaatcttgaactgtcgcc

SEQ ID NO: 2522723 - DNA, 25 bp, Homo sapien
cgtatatattgctttgacgttgggc

SEQ ID NO: 2522724 - DNA, 25 bp, Homo sapien
tgctttgacgttgggctctgttttt

SEQ ID NO: 2522725 - DNA, 25 bp, Homo sapien
tgctaaaaagcgtatatattgcttt

SEQ ID NO: 2522726 - DNA, 25 bp, Homo sapien
aaaaagcgtatatattgctttgacg

SEQ ID NO: 2522727 - DNA, 25 bp, Homo sapien
tgtcatccagatgatgagtatagat

SEQ ID NO: 2522728 - DNA, 25 bp, Homo sapien
cacagatagtttttcagccctcgcc

SEQ ID NO: 2522729 - DNA, 25 bp, Homo sapien
gtatagatgatgagtatagtacttc

SEQ ID NO: 2522730 - DNA, 25 bp, Homo sapien
cccactttttggagtgcccagtgtt

SEQ ID NO: 2522731 - DNA, 25 bp, Homo sapien
catgttgaggaagcctagttacagc

SEQ ID NO: 2522732 - DNA, 25 bp, Homo sapien
tctcataggcgggtgccctttatca

SEQ ID NO: 2522733 - DNA, 25 bp, Homo sapien
ggttactaggaccagcaggtcattg

SEQ ID NO: 2522734 - DNA, 25 bp, Homo sapien
tgacataggtgtgggtctcataggc

SEQ ID NO: 2522735 - DNA, 25 bp, Homo sapien
gctgatataaggttaacttccatca

SEQ ID NO: 2522736 - DNA, 25 bp, Homo sapien
agagttgaccagtcaattctcacag

SEQ ID NO: 2522737 - DNA, 25 bp, Homo sapien
tctaccacactaagagttgaccagt

SEQ ID NO: 2522738 - DNA, 25 bp, Homo sapien
caaagttcctgctgatataaggtta

SEQ ID NO: 2522739 - DNA, 25 bp, Homo sapien
atcaagcacactgatcccgtccctg

SEQ ID NO: 2522740 - DNA, 25 bp, Homo sapien
acgagctgtcaaccaagataaaaag

SEQ ID NO: 2522741 - DNA, 25 bp, Homo sapien
ctgacccacgagctgtcaaccaaga

SEQ ID NO: 2522742 - DNA, 25 bp, Homo sapien
cccacgagctgtcaaccaagataaa

SEQ ID NO: 2522743 - DNA, 25 bp, Homo sapien
tcttggaactcgcagaatggcaaag

SEQ ID NO: 2522744 - DNA, 25 bp, Homo sapien
tgttcgaagcctcccgtctgtggaa

SEQ ID NO: 2522745 - DNA, 25 bp, Homo sapien
aatattgggcacttcaatgacccgg

SEQ ID NO: 2522746 - DNA, 25 bp, Homo sapien
caagatccgggatgaaatggtggca

SEQ ID NO: 2522747 - DNA, 25 bp, Homo sapien
taactggatcaacttatgcacctat

SEQ ID NO: 2522748 - DNA, 25 bp, Homo sapien
tcaacttatgcacctattggagaag

SEQ ID NO: 2522749 - DNA, 25 bp, Homo sapien
agtttaccataactggatcaactta

SEQ ID NO: 2522750 - DNA, 25 bp, Homo sapien
taccataactggatcaacttatgca

SEQ ID NO: 2522751 - DNA, 25 bp, Homo sapien
atgatggtctggtagaattagcaac

SEQ ID NO: 2522752 - DNA, 25 bp, Homo sapien
gtagaattagcaacaatttgtgctc

SEQ ID NO: 2522753 - DNA, 25 bp, Homo sapien
tgtgctctttgtaatgactctgctt

SEQ ID NO: 2522754 - DNA, 25 bp, Homo sapien
tgaattgtcaccagtatgatggtct

SEQ ID NO: 2522755 - DNA, 25 bp, Homo sapien
caaagggtgtgtatgaaaaagttgg

SEQ ID NO: 2522756 - DNA, 25 bp, Homo sapien
gaagctacagagactgctctcactt

SEQ ID NO: 2522757 - DNA, 25 bp, Homo sapien
aaaaagttggagaagctacagagac

SEQ ID NO: 2522758 - DNA, 25 bp, Homo sapien
ctgctctcacttgcctagtagagaa

SEQ ID NO: 2522759 - DNA, 25 bp, Homo sapien
tagttgagccagcagacattgtcag

SEQ ID NO: 2522760 - DNA, 25 bp, Homo sapien
catcagttttaacgagaggtatgcc

SEQ ID NO: 2522761 - DNA, 25 bp, Homo sapien
gcagagtcttgctacctcagtcagt

SEQ ID NO: 2522762 - DNA, 25 bp, Homo sapien
tatgcctgtactcgcttgtgcagaa

SEQ ID NO: 2522763 - DNA, 25 bp, Homo sapien
tggctttcatagacctccacaggct

SEQ ID NO: 2522764 - DNA, 25 bp, Homo sapien
tcgagatgagtctcaccaacagtgt

SEQ ID NO: 2522765 - DNA, 25 bp, Homo sapien
caggctgcctaggacaagatgacca

SEQ ID NO: 2522766 - DNA, 25 bp, Homo sapien
gctttagcctaaaggtgactgccac

SEQ ID NO: 2522767 - DNA, 25 bp, Homo sapien
cataccacgtctgcagtgcctgtga

SEQ ID NO: 2522768 - DNA, 25 bp, Homo sapien
caaacacccgctgcagttagcaaga

SEQ ID NO: 2522769 - DNA, 25 bp, Homo sapien
caagcatctagccactgtccagggc

SEQ ID NO: 2522770 - DNA, 25 bp, Homo sapien
taagacctgagaccacaagattagc

SEQ ID NO: 2522771 - DNA, 25 bp, Homo sapien
ggtattctaacgtttcctctctgta

SEQ ID NO: 2522772 - DNA, 25 bp, Homo sapien
gcgtgcatgtgcgtttttagcaaca

SEQ ID NO: 2522773 - DNA, 25 bp, Homo sapien
tcagcaatactggagtaaccgcttc

SEQ ID NO: 2522774 - DNA, 25 bp, Homo sapien
atctaccaaccctgtgcatgactga

SEQ ID NO: 2522775 - DNA, 25 bp, Homo sapien
gccgaacttagcgcaaacacccgat

SEQ ID NO: 2522776 - DNA, 25 bp, Homo sapien
cgaacttagcgcaaacacccgattg

SEQ ID NO: 2522777 - DNA, 25 bp, Homo sapien
ccgaacttagcgcaaacacccgatt

SEQ ID NO: 2522778 - DNA, 25 bp, Homo sapien
cacatttcccatcagaccattatgg

SEQ ID NO: 2522779 - DNA, 25 bp, Homo sapien
caactgacttcaacaaagcctcttt

SEQ ID NO: 2522780 - DNA, 25 bp, Homo sapien
gcttctaccgaactgggcatcatat

SEQ ID NO: 2522781 - DNA, 25 bp, Homo sapien
tcatatctatcttgctacacacatt

SEQ ID NO: 2522782 - DNA, 25 bp, Homo sapien
ctggagtgcagcagcgagatcttgg

SEQ ID NO: 2522783 - DNA, 25 bp, Homo sapien
tggagtgcagcagcgagatcttggc

SEQ ID NO: 2522784 - DNA, 25 bp, Homo sapien
caggctggagtgcagcagcgagatc

SEQ ID NO: 2522785 - DNA, 25 bp, Homo sapien
ggctggagtgcagcagcgagatctt

SEQ ID NO: 2522786 - DNA, 25 bp, Homo sapien
tgggagcggagcaaagctgtccagt

SEQ ID NO: 2522787 - DNA, 25 bp, Homo sapien
gggcctcacctggacaataagtgac

SEQ ID NO: 2522788 - DNA, 25 bp, Homo sapien
tgggcctcacctggacaataagtga

SEQ ID NO: 2522789 - DNA, 25 bp, Homo sapien
tacaagcgctgtcccaggactcatc

SEQ ID NO: 2522790 - DNA, 25 bp, Homo sapien
ctacaagcgctgtcccaggactcat

SEQ ID NO: 2522791 - DNA, 25 bp, Homo sapien
acaagcgctgtcccaggactcatcg

SEQ ID NO: 2522792 - DNA, 25 bp, Homo sapien
cttctctaaggagcaggtgaaagag

SEQ ID NO: 2522793 - DNA, 25 bp, Homo sapien
gatggctgggatgcttcttggaacc

SEQ ID NO: 2522794 - DNA, 25 bp, Homo sapien
tggctgggatgcttcttggaaccgc

SEQ ID NO: 2522795 - DNA, 25 bp, Homo sapien
aaggagcaggtgaaagagtgatggc

SEQ ID NO: 2522796 - DNA, 25 bp, Homo sapien
aagagtgcaggttcactacaccggg

SEQ ID NO: 2522797 - DNA, 25 bp, Homo sapien
gaaagtagattaatactgggaggag

SEQ ID NO: 2522798 - DNA, 25 bp, Homo sapien
aatgctctggatttactggggatgg

SEQ ID NO: 2522799 - DNA, 25 bp, Homo sapien
cactttaaaagggcattatggaatg

SEQ ID NO: 2522800 - DNA, 25 bp, Homo sapien
taaaggcaaaagattgtgtacatct

SEQ ID NO: 2522801 - DNA, 25 bp, Homo sapien
gactcttgttcatgaactgtctctt

SEQ ID NO: 2522802 - DNA, 25 bp, Homo sapien
tgtccaggtcctgaaagactcttgt

SEQ ID NO: 2522803 - DNA, 25 bp, Homo sapien
tgtctcttcacaaagcaagtccacc

SEQ ID NO: 2522804 - DNA, 25 bp, Homo sapien
ggtcctgaaagactcttgttcatga

SEQ ID NO: 2522805 - DNA, 25 bp, Homo sapien
tgaacagcggggtcaaattacaata

SEQ ID NO: 2522806 - DNA, 25 bp, Homo sapien
cagcggggtcaaattacaatagaat

SEQ ID NO: 2522807 - DNA, 25 bp, Homo sapien
gaatgaacagcggggtcaaattaca

SEQ ID NO: 2522808 - DNA, 25 bp, Homo sapien
caagagagaacaacacagaatgaac

SEQ ID NO: 2522809 - DNA, 25 bp, Homo sapien
gctgggtttatcattctgagggtcg

SEQ ID NO: 2522810 - DNA, 25 bp, Homo sapien
tgagggtcgaaaactttctcacaaa

SEQ ID NO: 2522811 - DNA, 25 bp, Homo sapien
gtctcttgccttagctgttgtaaat

SEQ ID NO: 2522812 - DNA, 25 bp, Homo sapien
actttctcacaaagtctcagtccag

SEQ ID NO: 2522813 - DNA, 25 bp, Homo sapien
gccaagaatcgtttgtgagagtgac

SEQ ID NO: 2522814 - DNA, 25 bp, Homo sapien
tatgatttcactctcaatctgtaca

SEQ ID NO: 2522815 - DNA, 25 bp, Homo sapien
gataatgtacttcctatgatttcac

SEQ ID NO: 2522816 - DNA, 25 bp, Homo sapien
caaatgtactggttgcagctctgga

SEQ ID NO: 2522817 - DNA, 25 bp, Homo sapien
tgggaaaattagtgattcccagcgt

SEQ ID NO: 2522818 - DNA, 25 bp, Homo sapien
gtttgcaggtttggcataaattgcg

SEQ ID NO: 2522819 - DNA, 25 bp, Homo sapien
aaattagtgattcccagcgtataca

SEQ ID NO: 2522820 - DNA, 25 bp, Homo sapien
ttagtgattcccagcgtatacattt

SEQ ID NO: 2522821 - DNA, 25 bp, Homo sapien
actgggagggtaaatgcctctcagc

SEQ ID NO: 2522822 - DNA, 25 bp, Homo sapien
ccaggttaagaacccttgagtcaag

SEQ ID NO: 2522823 - DNA, 25 bp, Homo sapien
gaagaattctatccttggaccccag

SEQ ID NO: 2522824 - DNA, 25 bp, Homo sapien
tgagtcaagggcttaaaaggaattc

SEQ ID NO: 2522825 - DNA, 25 bp, Homo sapien
tatatatatcaaggtcctatcagct

SEQ ID NO: 2522826 - DNA, 25 bp, Homo sapien
tcagaaatgtagagagttatatata

SEQ ID NO: 2522827 - DNA, 25 bp, Homo sapien
gagagttatatatatcaaggtccta

SEQ ID NO: 2522828 - DNA, 25 bp, Homo sapien
ttttgcagtttcttcagacattcag

SEQ ID NO: 2522829 - DNA, 25 bp, Homo sapien
aatgtatgcattccatctttgtctt

SEQ ID NO: 2522830 - DNA, 25 bp, Homo sapien
atctttgtcttctgattatctgctg

SEQ ID NO: 2522831 - DNA, 25 bp, Homo sapien
caatgtatgcattccatctttgtct

SEQ ID NO: 2522832 - DNA, 25 bp, Homo sapien
tataggaagaagtaacaaagctgcc

SEQ ID NO: 2522833 - DNA, 25 bp, Homo sapien
tgaactgctccatatggttggctaa

SEQ ID NO: 2522834 - DNA, 25 bp, Homo sapien
aaggatctgtgtcaacagcccctca

SEQ ID NO: 2522835 - DNA, 25 bp, Homo sapien
tgccccagggttcccaaggatctgt

SEQ ID NO: 2522836 - DNA, 25 bp, Homo sapien
tagtttttgaagaagacattggcct

SEQ ID NO: 2522837 - DNA, 25 bp, Homo sapien
attggccttgaagtaatagatggct

SEQ ID NO: 2522838 - DNA, 25 bp, Homo sapien
agtaatagatggcttcatccacaat

SEQ ID NO: 2522839 - DNA, 25 bp, Homo sapien
cttgaagtaatagatggcttcatcc

SEQ ID NO: 2522840 - DNA, 25 bp, Homo sapien
tacaaaacataacaactatcaaagc

SEQ ID NO: 2522841 - DNA, 25 bp, Homo sapien
tcaaagccataaagggaaaacacat

SEQ ID NO: 2522842 - DNA, 25 bp, Homo sapien
taacaactatcaaagccataaaggg

SEQ ID NO: 2522843 - DNA, 25 bp, Homo sapien
tatcaaagccataaagggaaaacac

SEQ ID NO: 2522844 - DNA, 25 bp, Homo sapien
cattgccctgtggaagaatttcaac

SEQ ID NO: 2522845 - DNA, 25 bp, Homo sapien
tggcagttggtttcagcagtgctga

SEQ ID NO: 2522846 - DNA, 25 bp, Homo sapien
gactgttaacgttctcgcacagcag

SEQ ID NO: 2522847 - DNA, 25 bp, Homo sapien
aactctagacttgtgttccttgcaa

SEQ ID NO: 2522848 - DNA, 25 bp, Homo sapien
ggcatgtggcattctagacgtaaca

SEQ ID NO: 2522849 - DNA, 25 bp, Homo sapien
gaattcagttcagacccttgcaggg

SEQ ID NO: 2522850 - DNA, 25 bp, Homo sapien
ccttgcagggtacagggaaaccatg

SEQ ID NO: 2522851 - DNA, 25 bp, Homo sapien
tctcagaaagcatcagaagagtctc

SEQ ID NO: 2522852 - DNA, 25 bp, Homo sapien
gacttctgataggcaacagtgccat

SEQ ID NO: 2522853 - DNA, 25 bp, Homo sapien
cctttgaattgacttctgataggca

SEQ ID NO: 2522854 - DNA, 25 bp, Homo sapien
tgaattgacttctgataggcaacag

SEQ ID NO: 2522855 - DNA, 25 bp, Homo sapien
attgacttctgataggcaacagtgc

SEQ ID NO: 2522856 - DNA, 25 bp, Homo sapien
cgatgagtttggtatcaggatccat

SEQ ID NO: 2522857 - DNA, 25 bp, Homo sapien
ttccgatgagtttggtatcaggatc

SEQ ID NO: 2522858 - DNA, 25 bp, Homo sapien
gtttccgatgagtttggtatcagga

SEQ ID NO: 2522859 - DNA, 25 bp, Homo sapien
gtatcaggatccatgagagaagagt

SEQ ID NO: 2522860 - DNA, 25 bp, Homo sapien
ccagaggagcaggatccaggtacag

SEQ ID NO: 2522861 - DNA, 25 bp, Homo sapien
cctgggcgaggtaggcggaagcgaa

SEQ ID NO: 2522862 - DNA, 25 bp, Homo sapien
acagcggagcgcttccggtctggca

SEQ ID NO: 2522863 - DNA, 25 bp, Homo sapien
gacgtggagcttccggccttgcagt

SEQ ID NO: 2522864 - DNA, 25 bp, Homo sapien
gtcaccttttcagggccgggcatag

SEQ ID NO: 2522865 - DNA, 25 bp, Homo sapien
cagaatctgagatcaatcacctctt

SEQ ID NO: 2522866 - DNA, 25 bp, Homo sapien
tccagaatctgagatcaatcacctc

SEQ ID NO: 2522867 - DNA, 25 bp, Homo sapien
aatgtcaccttttcagggccgggca

SEQ ID NO: 2522868 - DNA, 25 bp, Homo sapien
taaaatgaatcaaattagacactgc

SEQ ID NO: 2522869 - DNA, 25 bp, Homo sapien
aaaatgaatcaaattagacactgca

SEQ ID NO: 2522870 - DNA, 25 bp, Homo sapien
cagtggtcttatatatatccttgca

SEQ ID NO: 2522871 - DNA, 25 bp, Homo sapien
tagaccagccttaaccttagctcag

SEQ ID NO: 2522872 - DNA, 25 bp, Homo sapien
gcatgaggctgataaagaacgaagt

SEQ ID NO: 2522873 - DNA, 25 bp, Homo sapien
ttctactattgcatcctttgaagag

SEQ ID NO: 2522874 - DNA, 25 bp, Homo sapien
aaatattcgtcaaacatagaggaag

SEQ ID NO: 2522875 - DNA, 25 bp, Homo sapien
cgtcaaacatagaggaagactcatc

SEQ ID NO: 2522876 - DNA, 25 bp, Homo sapien
tcttgaaaatattcgtcaaacatag

SEQ ID NO: 2522877 - DNA, 25 bp, Homo sapien
cattcttgaaaatattcgtcaaaca

SEQ ID NO: 2522878 - DNA, 25 bp, Homo sapien
aaatcaatatgctgcaatacaatgt

SEQ ID NO: 2522879 - DNA, 25 bp, Homo sapien
tatgctgcaatacaatgttcatgct

SEQ ID NO: 2522880 - DNA, 25 bp, Homo sapien
ctaggtcttctccatattgaatggc

SEQ ID NO: 2522881 - DNA, 25 bp, Homo sapien
tcaatatgctgcaatacaatgttca

SEQ ID NO: 2522882 - DNA, 25 bp, Homo sapien
aaaatcgaaccatgctgtagtcatc

SEQ ID NO: 2522883 - DNA, 25 bp, Homo sapien
aaaaatcgaaccatgctgtagtcat

SEQ ID NO: 2522884 - DNA, 25 bp, Homo sapien
taaaaatcgaaccatgctgtagtca

SEQ ID NO: 2522885 - DNA, 25 bp, Homo sapien
tgatcgtaaggtaaaaatcgaacca

SEQ ID NO: 2522886 - DNA, 25 bp, Homo sapien
agccactgcacacctggcgcccttt

SEQ ID NO: 2522887 - DNA, 25 bp, Homo sapien
tgcacacctggcgccctttttgttt

SEQ ID NO: 2522888 - DNA, 25 bp, Homo sapien
gagcacagtgacatgatctgatcat

SEQ ID NO: 2522889 - DNA, 25 bp, Homo sapien
agtcttgctgttgttggaccgggct

SEQ ID NO: 2522890 - DNA, 25 bp, Homo sapien
cagtccacatatagctttagtcagt

SEQ ID NO: 2522891 - DNA, 25 bp, Homo sapien
ttttgcttcttaagtcacttgtaga

SEQ ID NO: 2522892 - DNA, 25 bp, Homo sapien
tccacatatagctttagtcagtttc

SEQ ID NO: 2522893 - DNA, 25 bp, Homo sapien
ttcttaagtcacttgtagaatcttc

SEQ ID NO: 2522894 - DNA, 25 bp, Homo sapien
tcaggagactaggtttataaaccag

SEQ ID NO: 2522895 - DNA, 25 bp, Homo sapien
gcaactgagatctgataataatgga

SEQ ID NO: 2522896 - DNA, 25 bp, Homo sapien
tataaaccagccaaacttcccatct

SEQ ID NO: 2522897 - DNA, 25 bp, Homo sapien
gactgatgaattcaggagactaggt

SEQ ID NO: 2522898 - DNA, 25 bp, Homo sapien
gcttttttactcagcagatccattt

SEQ ID NO: 2522899 - DNA, 25 bp, Homo sapien
tgttgacttgcggaatttctagaga

SEQ ID NO: 2522900 - DNA, 25 bp, Homo sapien
tttgtcatgatgttgacttgcggaa

SEQ ID NO: 2522901 - DNA, 25 bp, Homo sapien
cagggctgccaagatgccagaaata

SEQ ID NO: 2522902 - DNA, 25 bp, Homo sapien
tcacaggcaggtgagtgtacaactc

SEQ ID NO: 2522903 - DNA, 25 bp, Homo sapien
gagctgctggaccagctgtttcatc

SEQ ID NO: 2522904 - DNA, 25 bp, Homo sapien
ttgaatgactccaccatgaactgag

SEQ ID NO: 2522905 - DNA, 25 bp, Homo sapien
gaaaaactccacagactcggaactc

SEQ ID NO: 2522906 - DNA, 25 bp, Homo sapien
taccagtcacacctcatgacaattg

SEQ ID NO: 2522907 - DNA, 25 bp, Homo sapien
tgtctcctaccagtcacacctcatg

SEQ ID NO: 2522908 - DNA, 25 bp, Homo sapien
aaagaaaattcacgatttggcttca

SEQ ID NO: 2522909 - DNA, 25 bp, Homo sapien
cacgatttggcttcagaagccatga

SEQ ID NO: 2522910 - DNA, 25 bp, Homo sapien
gcaaaataccaatcctccgttggga

SEQ ID NO: 2522911 - DNA, 25 bp, Homo sapien
tccgttgggaccgaatcgcagagaa

SEQ ID NO: 2522912 - DNA, 25 bp, Homo sapien
gatatagtcgtcctctacatggcca

SEQ ID NO: 2522913 - DNA, 25 bp, Homo sapien
ggcaaagtactccatgcaaaatacc

SEQ ID NO: 2522914 - DNA, 25 bp, Homo sapien
tacatcatccacctcgatcagttcc

SEQ ID NO: 2522915 - DNA, 25 bp, Homo sapien
catcatccacctcgatcagttcccg

SEQ ID NO: 2522916 - DNA, 25 bp, Homo sapien
tcatccacctcgatcagttcccgga

SEQ ID NO: 2522917 - DNA, 25 bp, Homo sapien
tccacctcgatcagttcccggatgt

SEQ ID NO: 2522918 - DNA, 25 bp, Homo sapien
acattcacaagcacatctatggagt

SEQ ID NO: 2522919 - DNA, 25 bp, Homo sapien
ttcacaagcacatctatggagtggg

SEQ ID NO: 2522920 - DNA, 25 bp, Homo sapien
tcacaagcacatctatggagtgggc

SEQ ID NO: 2522921 - DNA, 25 bp, Homo sapien
aagcacatctatggagtgggcttca

SEQ ID NO: 2522922 - DNA, 25 bp, Homo sapien
atgagcctccgcgcccggccccatt

SEQ ID NO: 2522923 - DNA, 25 bp, Homo sapien
gagcctccgcgcccggccccattta

SEQ ID NO: 2522924 - DNA, 25 bp, Homo sapien
acagaccggttgagggcttcacagt

SEQ ID NO: 2522925 - DNA, 25 bp, Homo sapien
cagccatcacggagtagttgaagtg

SEQ ID NO: 2522926 - DNA, 25 bp, Homo sapien
tgctggatccaggtttacaacttgg

SEQ ID NO: 2522927 - DNA, 25 bp, Homo sapien
catcacggagtagttgaagtgttct

SEQ ID NO: 2522928 - DNA, 25 bp, Homo sapien
tttctctccttgtccccgcagatcc

SEQ ID NO: 2522929 - DNA, 25 bp, Homo sapien
tctctccttgtccccgcagatcctc

SEQ ID NO: 2522930 - DNA, 25 bp, Homo sapien
tctccttgtccccgcagatcctcac

SEQ ID NO: 2522931 - DNA, 25 bp, Homo sapien
ttttctctccttgtccccgcagatc

SEQ ID NO: 2522932 - DNA, 25 bp, Homo sapien
ggcccatgaccagctgcgcataccg

SEQ ID NO: 2522933 - DNA, 25 bp, Homo sapien
gcggggcccatgaccagctgcgcat

SEQ ID NO: 2522934 - DNA, 25 bp, Homo sapien
tgaccagctgcgcataccgaggcat

SEQ ID NO: 2522935 - DNA, 25 bp, Homo sapien
ccatgaccagctgcgcataccgagg

SEQ ID NO: 2522936 - DNA, 25 bp, Homo sapien
agttctaccacacctcctactacgg

SEQ ID NO: 2522937 - DNA, 25 bp, Homo sapien
acattctttctacgcctccagttct

SEQ ID NO: 2522938 - DNA, 25 bp, Homo sapien
cgcccactgagctccgggaaagtga

SEQ ID NO: 2522939 - DNA, 25 bp, Homo sapien
gaagtgcgaaccaatcgcaatccac

SEQ ID NO: 2522940 - DNA, 25 bp, Homo sapien
tggaaatcggccgttgggatgctgt

SEQ ID NO: 2522941 - DNA, 25 bp, Homo sapien
cgagggagaggatttgcgcgtgcgc

SEQ ID NO: 2522942 - DNA, 25 bp, Homo sapien
tgcgcgtgcgcaaaagtagttgatg

SEQ ID NO: 2522943 - DNA, 25 bp, Homo sapien
caaaagtagttgatggaaatcggcc

SEQ ID NO: 2522944 - DNA, 25 bp, Homo sapien
gaccctcgcgatttgcaaatgtgct

SEQ ID NO: 2522945 - DNA, 25 bp, Homo sapien
cttcggtccgtggtttgcgtgcaga

SEQ ID NO: 2522946 - DNA, 25 bp, Homo sapien
gataaagctccgcatccttgcgcca

SEQ ID NO: 2522947 - DNA, 25 bp, Homo sapien
tttgacctgtatggtgaccctcgcg

SEQ ID NO: 2522948 - DNA, 25 bp, Homo sapien
tgtatatttccctcctgtgacgcac

SEQ ID NO: 2522949 - DNA, 25 bp, Homo sapien
cacagagaggtgcaaacgtgcaaac

SEQ ID NO: 2522950 - DNA, 25 bp, Homo sapien
tatttccctcctgtgacgcactgct

SEQ ID NO: 2522951 - DNA, 25 bp, Homo sapien
cagagaggtgcaaacgtgcaaacgc

SEQ ID NO: 2522952 - DNA, 25 bp, Homo sapien
gcgaccgcagcgctcctgcccctcc

SEQ ID NO: 2522953 - DNA, 25 bp, Homo sapien
tcagcgaccgcagcgctcctgcccc

SEQ ID NO: 2522954 - DNA, 25 bp, Homo sapien
cgaccgcagcgctcctgcccctccc

SEQ ID NO: 2522955 - DNA, 25 bp, Homo sapien
cgcagcgctcctgcccctcccccac

SEQ ID NO: 2522956 - DNA, 25 bp, Homo sapien
ttcgggcagtgtccgaacggcttcg

SEQ ID NO: 2522957 - DNA, 25 bp, Homo sapien
ggcgagaagccagcatccgagccgc

SEQ ID NO: 2522958 - DNA, 25 bp, Homo sapien
taactccggggtcgcggatctgccc

SEQ ID NO: 2522959 - DNA, 25 bp, Homo sapien
cgctctcccgaagctgttcgggcag

SEQ ID NO: 2522960 - DNA, 25 bp, Homo sapien
gacggagcgtagctcttctgcagag

SEQ ID NO: 2522961 - DNA, 25 bp, Homo sapien
tgctcccgcacacggctcgcggtct

SEQ ID NO: 2522962 - DNA, 25 bp, Homo sapien
gagcgtagctcttctgcagagccgc

SEQ ID NO: 2522963 - DNA, 25 bp, Homo sapien
tccgactggacggagcgtagctctt

SEQ ID NO: 2522964 - DNA, 25 bp, Homo sapien
ggaggactgcctcgcggttgaggga

SEQ ID NO: 2522965 - DNA, 25 bp, Homo sapien
gagggtctctgagggaagcttcgga

SEQ ID NO: 2522966 - DNA, 25 bp, Homo sapien
aagcttcggaggagcgtttggtgca

SEQ ID NO: 2522967 - DNA, 25 bp, Homo sapien
gagcagttttgttgtggacagaggg

SEQ ID NO: 2522968 - DNA, 25 bp, Homo sapien
ctgggacgtttgctgtctggcacag

SEQ ID NO: 2522969 - DNA, 25 bp, Homo sapien
actgtgtgtccaccgaaaggcgagg

SEQ ID NO: 2522970 - DNA, 25 bp, Homo sapien
cgtttgctgtctggcacaggactgt

SEQ ID NO: 2522971 - DNA, 25 bp, Homo sapien
aggaagatgtcccccggttcaactg

SEQ ID NO: 2522972 - DNA, 25 bp, Homo sapien
tatttcctagatagtgaagacagcg

SEQ ID NO: 2522973 - DNA, 25 bp, Homo sapien
gacagcgagctgttgaagtcactgc

SEQ ID NO: 2522974 - DNA, 25 bp, Homo sapien
agtcactgctggagactctacctcc

SEQ ID NO: 2522975 - DNA, 25 bp, Homo sapien
caagaactgcgatatgtttgccgtt

SEQ ID NO: 2522976 - DNA, 25 bp, Homo sapien
agtcaacgcgcccagtcttgtcatc

SEQ ID NO: 2522977 - DNA, 25 bp, Homo sapien
acaggtgcacccccaccacgcctag

SEQ ID NO: 2522978 - DNA, 25 bp, Homo sapien
tacaggtgcacccccaccacgccta

SEQ ID NO: 2522979 - DNA, 25 bp, Homo sapien
caggtgcacccccaccacgcctagc

SEQ ID NO: 2522980 - DNA, 25 bp, Homo sapien
tacatgcacgtacttcagcacagct

SEQ ID NO: 2522981 - DNA, 25 bp, Homo sapien
cctttggcggccagtgagaaacaaa

SEQ ID NO: 2522982 - DNA, 25 bp, Homo sapien
caggtgtcctcactcatcacagaag

SEQ ID NO: 2522983 - DNA, 25 bp, Homo sapien
gaagcgttacctgtgcagcattgct

SEQ ID NO: 2522984 - DNA, 25 bp, Homo sapien
caagagaatttgctgtacagtaact

SEQ ID NO: 2522985 - DNA, 25 bp, Homo sapien
caggcaatttgtctttactacaggc

SEQ ID NO: 2522986 - DNA, 25 bp, Homo sapien
gatgaggtgactaagagccttgaaa

SEQ ID NO: 2522987 - DNA, 25 bp, Homo sapien
taaaacaggacttagtaacaagaga

SEQ ID NO: 2522988 - DNA, 25 bp, Homo sapien
tgacagtcttgtctcgtgtattgaa

SEQ ID NO: 2522989 - DNA, 25 bp, Homo sapien
tgaattcgtgccaaaggtgagggta

SEQ ID NO: 2522990 - DNA, 25 bp, Homo sapien
tgagttgtgtcctgtatgtttagga

SEQ ID NO: 2522991 - DNA, 25 bp, Homo sapien
caatgtaattggtctgatgtagttc

SEQ ID NO: 2522992 - DNA, 25 bp, Homo sapien
gacaaatgcatcgtatttcttcttt

SEQ ID NO: 2522993 - DNA, 25 bp, Homo sapien
atattagaatatcctacaagggcca

SEQ ID NO: 2522994 - DNA, 25 bp, Homo sapien
tttaaatctgacaaatgcatcgtat

SEQ ID NO: 2522995 - DNA, 25 bp, Homo sapien
tattagaatatcctacaagggccag

SEQ ID NO: 2522996 - DNA, 25 bp, Homo sapien
taacttgggactctcggactagatt

SEQ ID NO: 2522997 - DNA, 25 bp, Homo sapien
gatgatgctctgacttgcaaagtag

SEQ ID NO: 2522998 - DNA, 25 bp, Homo sapien
tattactctagtatgcttccttgct

SEQ ID NO: 2522999 - DNA, 25 bp, Homo sapien
gagtagttacactaacaagaggatt

SEQ ID NO: 2523000 - DNA, 25 bp, Homo sapien
aatgtcggcatggtatattatttag

SEQ ID NO: 2523001 - DNA, 25 bp, Homo sapien
aatctgagtccaacattatgacaca

SEQ ID NO: 2523002 - DNA, 25 bp, Homo sapien
acattatgacacaatgtaagagaag

SEQ ID NO: 2523003 - DNA, 25 bp, Homo sapien
atcactgttaatgtcggcatggtat

SEQ ID NO: 2523004 - DNA, 25 bp, Homo sapien
ttaatatttatatccgtagtttcac

SEQ ID NO: 2523005 - DNA, 25 bp, Homo sapien
aaggtcatctcgtccactttaatat

SEQ ID NO: 2523006 - DNA, 25 bp, Homo sapien
ttatatccgtagtttcacttggttc

SEQ ID NO: 2523007 - DNA, 25 bp, Homo sapien
gaaaggtcatctcgtccactttaat

SEQ ID NO: 2523008 - DNA, 25 bp, Homo sapien
tcttaacaagtgaccaattactgtg

SEQ ID NO: 2523009 - DNA, 25 bp, Homo sapien
gcttggagcaattatgtattaacag

SEQ ID NO: 2523010 - DNA, 25 bp, Homo sapien
taattgtttattactggagaagaga

SEQ ID NO: 2523011 - DNA, 25 bp, Homo sapien
ttcttatagtttacaggaagcttgg

SEQ ID NO: 2523012 - DNA, 25 bp, Homo sapien
tacttgatttcaacaggacaatgaa

SEQ ID NO: 2523013 - DNA, 25 bp, Homo sapien
gtttaattacttgatttcaacagga

SEQ ID NO: 2523014 - DNA, 25 bp, Homo sapien
ccaaaaatcatcaagacaggcctgg

SEQ ID NO: 2523015 - DNA, 25 bp, Homo sapien
accaaaaatcatcaagacaggcctg

SEQ ID NO: 2523016 - DNA, 25 bp, Homo sapien
tagctgatacacataggtgaccact

SEQ ID NO: 2523017 - DNA, 25 bp, Homo sapien
agaagcctggatatccatcaacaca

SEQ ID NO: 2523018 - DNA, 25 bp, Homo sapien
acatcatctccaattagctgataca

SEQ ID NO: 2523019 - DNA, 25 bp, Homo sapien
tagaagcctggatatccatcaacac

SEQ ID NO: 2523020 - DNA, 25 bp, Homo sapien
cacacatgcaattattttactaaag

SEQ ID NO: 2523021 - DNA, 25 bp, Homo sapien
catgcaattattttactaaagcccc

SEQ ID NO: 2523022 - DNA, 25 bp, Homo sapien
aattcccaaattctatactactcac

SEQ ID NO: 2523023 - DNA, 25 bp, Homo sapien
caaattcccaaattctatactactc

SEQ ID NO: 2523024 - DNA, 25 bp, Homo sapien
gtttccaaggcattatatgccccag

SEQ ID NO: 2523025 - DNA, 25 bp, Homo sapien
tctgcaacagggctaagctggccat

SEQ ID NO: 2523026 - DNA, 25 bp, Homo sapien
gcagaacctggattaatgtagaatt

SEQ ID NO: 2523027 - DNA, 25 bp, Homo sapien
gtcccgagataagaatgtccacatc

SEQ ID NO: 2523028 - DNA, 25 bp, Homo sapien
tctccccatggaataacttgatgtc

SEQ ID NO: 2523029 - DNA, 25 bp, Homo sapien
cagtcacaactttctgttctggata

SEQ ID NO: 2523030 - DNA, 25 bp, Homo sapien
cagaccaattttgaactgtccaaca

SEQ ID NO: 2523031 - DNA, 25 bp, Homo sapien
cttgatgtccatggatcagaccaat

SEQ ID NO: 2523032 - DNA, 25 bp, Homo sapien
gtatgagccaggcactactgtaggg

SEQ ID NO: 2523033 - DNA, 25 bp, Homo sapien
gcatgtaagttagggtgtgttcaaa

SEQ ID NO: 2523034 - DNA, 25 bp, Homo sapien
gttttgatgtagtaccccacaacac

SEQ ID NO: 2523035 - DNA, 25 bp, Homo sapien
gaatatgggttcttttgcgcatgct

SEQ ID NO: 2523036 - DNA, 25 bp, Homo sapien
gggaagtgatctgccaaaaatccca

SEQ ID NO: 2523037 - DNA, 25 bp, Homo sapien
caaactagaatcaggtttattatgc

SEQ ID NO: 2523038 - DNA, 25 bp, Homo sapien
gctacaccatacaatgttggcactg

SEQ ID NO: 2523039 - DNA, 25 bp, Homo sapien
tccagtcatatttactaaggatcag

SEQ ID NO: 2523040 - DNA, 25 bp, Homo sapien
tgcacacggctgtgtaagcactgcc

SEQ ID NO: 2523041 - DNA, 25 bp, Homo sapien
catgccctataaagtcagcctttga

SEQ ID NO: 2523042 - DNA, 25 bp, Homo sapien
aataaactggaaggagcaagggtag

SEQ ID NO: 2523043 - DNA, 25 bp, Homo sapien
tacttaaaaaggatcacgctggttg

SEQ ID NO: 2523044 - DNA, 25 bp, Homo sapien
tactaggtgatctaaatcagtgatt

SEQ ID NO: 2523045 - DNA, 25 bp, Homo sapien
ttaaacgacagcataaaacagtaac

SEQ ID NO: 2523046 - DNA, 25 bp, Homo sapien
aatcaagaaagggagatatttgaga

SEQ ID NO: 2523047 - DNA, 25 bp, Homo sapien
cctggtctaaagataaagcttatgt

SEQ ID NO: 2523048 - DNA, 25 bp, Homo sapien
gaagtctcctctcacaatatgaaca

SEQ ID NO: 2523049 - DNA, 25 bp, Homo sapien
ttgaatttagctggcaaactgttgc

SEQ ID NO: 2523050 - DNA, 25 bp, Homo sapien
caaactgttgcaccggtgtgggatg

SEQ ID NO: 2523051 - DNA, 25 bp, Homo sapien
gtcataactctctttggtgcaaagg

SEQ ID NO: 2523052 - DNA, 25 bp, Homo sapien
ctactgggccctatagaatttggca

SEQ ID NO: 2523053 - DNA, 25 bp, Homo sapien
caactatgtgcaagcataatagcca

SEQ ID NO: 2523054 - DNA, 25 bp, Homo sapien
tatctgtactagactgacaactatg

SEQ ID NO: 2523055 - DNA, 25 bp, Homo sapien
tctcataagagatcccgaatcccag

SEQ ID NO: 2523056 - DNA, 25 bp, Homo sapien
gagatatacaacagccttcagtttc

SEQ ID NO: 2523057 - DNA, 25 bp, Homo sapien
agagatatacaacagccttcagttt

SEQ ID NO: 2523058 - DNA, 25 bp, Homo sapien
tatggtctggattaaattgctcata

SEQ ID NO: 2523059 - DNA, 25 bp, Homo sapien
tgctcatatatcctcggtatagttc

SEQ ID NO: 2523060 - DNA, 25 bp, Homo sapien
atatatcctcggtatagttccccaa

SEQ ID NO: 2523061 - DNA, 25 bp, Homo sapien
ttatggtctggattaaattgctcat

SEQ ID NO: 2523062 - DNA, 25 bp, Homo sapien
tggtttagagctgcaacatagtctc

SEQ ID NO: 2523063 - DNA, 25 bp, Homo sapien
taaatttagcataaggtggtttaga

SEQ ID NO: 2523064 - DNA, 25 bp, Homo sapien
tcatgtatattagagcattaaaaca

SEQ ID NO: 2523065 - DNA, 25 bp, Homo sapien
aggtggtttagagctgcaacatagt

SEQ ID NO: 2523066 - DNA, 25 bp, Homo sapien
gacacagagttatcgggacatagtt

SEQ ID NO: 2523067 - DNA, 25 bp, Homo sapien
gactagtttcagcaggtatttgttg

SEQ ID NO: 2523068 - DNA, 25 bp, Homo sapien
gtttcaatgcagatctcagtggaca

SEQ ID NO: 2523069 - DNA, 25 bp, Homo sapien
tgtaatctcaaagtaacacaaggtt

SEQ ID NO: 2523070 - DNA, 25 bp, Homo sapien
aaagagccaacccaatcaaagcatg

SEQ ID NO: 2523071 - DNA, 25 bp, Homo sapien
tactttgaaacatgttcccgcccaa

SEQ ID NO: 2523072 - DNA, 25 bp, Homo sapien
caaagcatgggaattcggttacttc

SEQ ID NO: 2523073 - DNA, 25 bp, Homo sapien
tagggatccttactaggacagaatc

SEQ ID NO: 2523074 - DNA, 25 bp, Homo sapien
gtaggagctaagtgaagaaacttac

SEQ ID NO: 2523075 - DNA, 25 bp, Homo sapien
ctgttagtaggagctaagtgaagaa

SEQ ID NO: 2523076 - DNA, 25 bp, Homo sapien
tagtaggagctaagtgaagaaactt

SEQ ID NO: 2523077 - DNA, 25 bp, Homo sapien
cactgttagtaggagctaagtgaag

SEQ ID NO: 2523078 - DNA, 25 bp, Homo sapien
aaaaagggtgaaacatgaccaatgt

SEQ ID NO: 2523079 - DNA, 25 bp, Homo sapien
aagaagttgattgcagacagggggg

SEQ ID NO: 2523080 - DNA, 25 bp, Homo sapien
ggtgaaacatgaccaatgttaaaag

SEQ ID NO: 2523081 - DNA, 25 bp, Homo sapien
aagggtgaaacatgaccaatgttaa

SEQ ID NO: 2523082 - DNA, 25 bp, Homo sapien
tatgtcttctcccatggataggtgt

SEQ ID NO: 2523083 - DNA, 25 bp, Homo sapien
taatcatgaaagaactggctaatgc

SEQ ID NO: 2523084 - DNA, 25 bp, Homo sapien
tgcctgtcagaggtagacgtccctt

SEQ ID NO: 2523085 - DNA, 25 bp, Homo sapien
ggaaaattatgctgcggctaggtga

SEQ ID NO: 2523086 - DNA, 25 bp, Homo sapien
ccaacagtttcaatgagttcacaca

SEQ ID NO: 2523087 - DNA, 25 bp, Homo sapien
gactaggtaagtctccaacaccggc

SEQ ID NO: 2523088 - DNA, 25 bp, Homo sapien
gaaaatatgattacaggccgggcgc

SEQ ID NO: 2523089 - DNA, 25 bp, Homo sapien
ctctctagtagaggcccccagtttt

SEQ ID NO: 2523090 - DNA, 25 bp, Homo sapien
agaaacagttccagcaattgcaagc

SEQ ID NO: 2523091 - DNA, 25 bp, Homo sapien
gagcacacctgctcatctcaatggc

SEQ ID NO: 2523092 - DNA, 25 bp, Homo sapien
cagctagatgttatttcaggagcga

SEQ ID NO: 2523093 - DNA, 25 bp, Homo sapien
cgtagcaacccgtggaaagaaacag

SEQ ID NO: 2523094 - DNA, 25 bp, Homo sapien
tctgcattcgagaggccagcttcca

SEQ ID NO: 2523095 - DNA, 25 bp, Homo sapien
taaacgggtacgaaattctgctcgc

SEQ ID NO: 2523096 - DNA, 25 bp, Homo sapien
cattcgaggtataggaccaaaggcc

SEQ ID NO: 2523097 - DNA, 25 bp, Homo sapien
ttttaccccttggatggcctctggc

SEQ ID NO: 2523098 - DNA, 25 bp, Homo sapien
accgtcgccgccctcttcctcaggc

SEQ ID NO: 2523099 - DNA, 25 bp, Homo sapien
caccgtcgccgccctcttcctcagg

SEQ ID NO: 2523100 - DNA, 25 bp, Homo sapien
gtcaccaccaccgtcgccgccctct

SEQ ID NO: 2523101 - DNA, 25 bp, Homo sapien
tcagtcaccaccaccgtcgccgccc

SEQ ID NO: 2523102 - DNA, 25 bp, Homo sapien
agctgaggcgcgccttccgagcctg

SEQ ID NO: 2523103 - DNA, 25 bp, Homo sapien
tgggccgtcgagctgaggcgcgcct

SEQ ID NO: 2523104 - DNA, 25 bp, Homo sapien
agcctgctttttagggcggatggca

SEQ ID NO: 2523105 - DNA, 25 bp, Homo sapien
ccttccgagcctgctttttagggcg

SEQ ID NO: 2523106 - DNA, 25 bp, Homo sapien
cctggtccacatggtgaaactcctt

SEQ ID NO: 2523107 - DNA, 25 bp, Homo sapien
catttaaaaattgaggccgggcgcg

SEQ ID NO: 2523108 - DNA, 25 bp, Homo sapien
ttaaaaattgaggccgggcgcgatg

SEQ ID NO: 2523109 - DNA, 25 bp, Homo sapien
ggtccacatggtgaaactccttctc

SEQ ID NO: 2523110 - DNA, 25 bp, Homo sapien
ccatgcgcggccaaggtttggtttt

SEQ ID NO: 2523111 - DNA, 25 bp, Homo sapien
accatgcgcggccaaggtttggttt

SEQ ID NO: 2523112 - DNA, 25 bp, Homo sapien
catgcgcggccaaggtttggtttta

SEQ ID NO: 2523113 - DNA, 25 bp, Homo sapien
atgcgcggccaaggtttggttttag

SEQ ID NO: 2523114 - DNA, 25 bp, Homo sapien
aagagttagctttttacctgcacaa

SEQ ID NO: 2523115 - DNA, 25 bp, Homo sapien
cgtaaggaagtgttaactggcaagc

SEQ ID NO: 2523116 - DNA, 25 bp, Homo sapien
aatgtcttatgatgtgtgcctctcc

SEQ ID NO: 2523117 - DNA, 25 bp, Homo sapien
caattataacctgacaaacgagact

SEQ ID NO: 2523118 - DNA, 25 bp, Homo sapien
tactatgggtccaacacagcctctg

SEQ ID NO: 2523119 - DNA, 25 bp, Homo sapien
gcacagtaacaacccatggaagctt

SEQ ID NO: 2523120 - DNA, 25 bp, Homo sapien
gttcagaatcagacccaccaagtgg

SEQ ID NO: 2523121 - DNA, 25 bp, Homo sapien
cacacgcagctgatagaggagagga

SEQ ID NO: 2523122 - DNA, 25 bp, Homo sapien
cacatggactcactggatttggtgc

SEQ ID NO: 2523123 - DNA, 25 bp, Homo sapien
tagaaagcaaggctactaataaaag

SEQ ID NO: 2523124 - DNA, 25 bp, Homo sapien
taaaaggtctgagagtacgagtatg

SEQ ID NO: 2523125 - DNA, 25 bp, Homo sapien
tttggtgcatgctctatagaaagca

SEQ ID NO: 2523126 - DNA, 25 bp, Homo sapien
caaagaaatgtggtcctgccagcag

SEQ ID NO: 2523127 - DNA, 25 bp, Homo sapien
tgaaaagtaacagccacggtggcac

SEQ ID NO: 2523128 - DNA, 25 bp, Homo sapien
tgctgccggcagatatgagctagtg

SEQ ID NO: 2523129 - DNA, 25 bp, Homo sapien
caaagactatgcctgtggagtacac

SEQ ID NO: 2523130 - DNA, 25 bp, Homo sapien
tactcagccactattgaaagaagga

SEQ ID NO: 2523131 - DNA, 25 bp, Homo sapien
atactcagccactattgaaagaagg

SEQ ID NO: 2523132 - DNA, 25 bp, Homo sapien
ctcagccactattgaaagaaggacg

SEQ ID NO: 2523133 - DNA, 25 bp, Homo sapien
cagccactattgaaagaaggacggt

SEQ ID NO: 2523134 - DNA, 25 bp, Homo sapien
tactaggagacaaatgcttgcattc

SEQ ID NO: 2523135 - DNA, 25 bp, Homo sapien
gaaagttacatgcttctatacccac

SEQ ID NO: 2523136 - DNA, 25 bp, Homo sapien
tacaacaggagctctattcaaacag

SEQ ID NO: 2523137 - DNA, 25 bp, Homo sapien
gctctgatatgctagcaccaacatg

SEQ ID NO: 2523138 - DNA, 25 bp, Homo sapien
ttaaactgttaggaatgtccacgca

SEQ ID NO: 2523139 - DNA, 25 bp, Homo sapien
taaactgttaggaatgtccacgcac

SEQ ID NO: 2523140 - DNA, 25 bp, Homo sapien
gccgccaatgaggttcagttctgaa

SEQ ID NO: 2523141 - DNA, 25 bp, Homo sapien
cagagctcggaagccttttgggttc

SEQ ID NO: 2523142 - DNA, 25 bp, Homo sapien
tgggttcaggtccaagcattgcggt

SEQ ID NO: 2523143 - DNA, 25 bp, Homo sapien
caagcattgcggtggcggcaataaa

SEQ ID NO: 2523144 - DNA, 25 bp, Homo sapien
cataggccagctcatgagcttgctc

SEQ ID NO: 2523145 - DNA, 25 bp, Homo sapien
ctctcacattcaatccattgtcaca

SEQ ID NO: 2523146 - DNA, 25 bp, Homo sapien
tgcaaaaggtgacatataatttggg

SEQ ID NO: 2523147 - DNA, 25 bp, Homo sapien
tccattgtcacatgcaaactgtgca

SEQ ID NO: 2523148 - DNA, 25 bp, Homo sapien
agtctgttgtatactctcataattt

SEQ ID NO: 2523149 - DNA, 25 bp, Homo sapien
ggcagtctgttgtatactctcataa

SEQ ID NO: 2523150 - DNA, 25 bp, Homo sapien
ctggcagtctgttgtatactctcat

SEQ ID NO: 2523151 - DNA, 25 bp, Homo sapien
gcagtctgttgtatactctcataat

SEQ ID NO: 2523152 - DNA, 25 bp, Homo sapien
tgggaacacgaggtccacttcagct

SEQ ID NO: 2523153 - DNA, 25 bp, Homo sapien
tgtcgagctgtgaaatcttgggcca

SEQ ID NO: 2523154 - DNA, 25 bp, Homo sapien
caaaagcttccttgcttaggaacac

SEQ ID NO: 2523155 - DNA, 25 bp, Homo sapien
gctaccagttgctctagtgaaaata

SEQ ID NO: 2523156 - DNA, 25 bp, Homo sapien
tttgcctgattcaacacctgctggg

SEQ ID NO: 2523157 - DNA, 25 bp, Homo sapien
tcagctatccagagagggccacttt

SEQ ID NO: 2523158 - DNA, 25 bp, Homo sapien
cagcctatgaaaaccttgggtagga

SEQ ID NO: 2523159 - DNA, 25 bp, Homo sapien
cctgctgggtgttagaagaataaaa

SEQ ID NO: 2523160 - DNA, 25 bp, Homo sapien
gaatcatataatcaggcatgttgtc

SEQ ID NO: 2523161 - DNA, 25 bp, Homo sapien
caggataatgtctcctagctggaca

SEQ ID NO: 2523162 - DNA, 25 bp, Homo sapien
aagagtccatctgttgccgtcagga

SEQ ID NO: 2523163 - DNA, 25 bp, Homo sapien
gacatcgaaagacgtgctatcagca

SEQ ID NO: 2523164 - DNA, 25 bp, Homo sapien
gaatcgcccaggtttgctgtgtgta

SEQ ID NO: 2523165 - DNA, 25 bp, Homo sapien
tgctgctcatctgatcggtgcacga

SEQ ID NO: 2523166 - DNA, 25 bp, Homo sapien
tgacaaccaggaagcctgaatcgcc

SEQ ID NO: 2523167 - DNA, 25 bp, Homo sapien
gagtgttgaagtaatgctgctgctc

SEQ ID NO: 2523168 - DNA, 25 bp, Homo sapien
tgttcattcgacagagactctgggc

SEQ ID NO: 2523169 - DNA, 25 bp, Homo sapien
tcctgatcagggttaacacggtggg

SEQ ID NO: 2523170 - DNA, 25 bp, Homo sapien
cactcactatgaggtaacaagacca

SEQ ID NO: 2523171 - DNA, 25 bp, Homo sapien
tcactcacatttaagacagggcaca

SEQ ID NO: 2523172 - DNA, 25 bp, Homo sapien
tttactaaacgttcacacgtccgca

SEQ ID NO: 2523173 - DNA, 25 bp, Homo sapien
tgagatggatcaactccatagtctc

SEQ ID NO: 2523174 - DNA, 25 bp, Homo sapien
cacagtagcttgtggtgagaattcc

SEQ ID NO: 2523175 - DNA, 25 bp, Homo sapien
cacgtccgcattaaagtccctgaga

SEQ ID NO: 2523176 - DNA, 25 bp, Homo sapien
tctgggggctcacgactgcctgtcg

SEQ ID NO: 2523177 - DNA, 25 bp, Homo sapien
gcgaaagaatacggccgggctgtct

SEQ ID NO: 2523178 - DNA, 25 bp, Homo sapien
tgtcggccggcgatcccgcagcctg

SEQ ID NO: 2523179 - DNA, 25 bp, Homo sapien
catccaggcggcgaaagaatacggc

SEQ ID NO: 2523180 - DNA, 25 bp, Homo sapien
ccgggccacgaagcacgcgtcgtcc

SEQ ID NO: 2523181 - DNA, 25 bp, Homo sapien
cgtccccgtagcacgcgcccttctt

SEQ ID NO: 2523182 - DNA, 25 bp, Homo sapien
agcacgtccgcggaacggtgccggg

SEQ ID NO: 2523183 - DNA, 25 bp, Homo sapien
aagcacgcgtcgtccccgtagcacg

SEQ ID NO: 2523184 - DNA, 25 bp, Homo sapien
tcggtctgcgagaggccgccgagca

SEQ ID NO: 2523185 - DNA, 25 bp, Homo sapien
ggccgtcaccagtccgtagtcgccg

SEQ ID NO: 2523186 - DNA, 25 bp, Homo sapien
ccggccgtcaccagtccgtagtcgc

SEQ ID NO: 2523187 - DNA, 25 bp, Homo sapien
gccggccctggggtcggtctgcgag

SEQ ID NO: 2523188 - DNA, 25 bp, Homo sapien
cagccgcccgtacgagaggaccgag

SEQ ID NO: 2523189 - DNA, 25 bp, Homo sapien
caccagccgcccgtacgagaggacc

SEQ ID NO: 2523190 - DNA, 25 bp, Homo sapien
gcccgtacgagaggaccgagaacat

SEQ ID NO: 2523191 - DNA, 25 bp, Homo sapien
gccgcccgtacgagaggaccgagaa

SEQ ID NO: 2523192 - DNA, 25 bp, Homo sapien
gcgctcctcagggcggcgcgcagtg

SEQ ID NO: 2523193 - DNA, 25 bp, Homo sapien
tcagccgcgcgcaccggagccagag

SEQ ID NO: 2523194 - DNA, 25 bp, Homo sapien
agagcgaggtcagaagcggcggctc

SEQ ID NO: 2523195 - DNA, 25 bp, Homo sapien
tctctcctcagccgcagtcgcgccg

SEQ ID NO: 2523196 - DNA, 25 bp, Homo sapien
cgctccactagcgtgttccgggcgg

SEQ ID NO: 2523197 - DNA, 25 bp, Homo sapien
atcttccgctccactagcgtgttcc

SEQ ID NO: 2523198 - DNA, 25 bp, Homo sapien
ttccgctccactagcgtgttccggg

SEQ ID NO: 2523199 - DNA, 25 bp, Homo sapien
ctccactagcgtgttccgggcggtg

SEQ ID NO: 2523200 - DNA, 25 bp, Homo sapien
ccaaggttgaacatgcgcagagggt

SEQ ID NO: 2523201 - DNA, 25 bp, Homo sapien
ttagtaggaattgcaggtgggccac

SEQ ID NO: 2523202 - DNA, 25 bp, Homo sapien
ggattcctcagacgcgggacctatg

SEQ ID NO: 2523203 - DNA, 25 bp, Homo sapien
tatagtcccggagtcgtagtcactt

SEQ ID NO: 2523204 - DNA, 25 bp, Homo sapien
ggctgagtatactggtgcacatcta

SEQ ID NO: 2523205 - DNA, 25 bp, Homo sapien
gaatattatgtgatttatatctcaa

SEQ ID NO: 2523206 - DNA, 25 bp, Homo sapien
aaaaaatttggctgagtatactggt

SEQ ID NO: 2523207 - DNA, 25 bp, Homo sapien
tatactggtgcacatctacagtccc

SEQ ID NO: 2523208 - DNA, 25 bp, Homo sapien
catgaactttgatcacggtttagca

SEQ ID NO: 2523209 - DNA, 25 bp, Homo sapien
ttttgtaatacctctttaagcaaca

SEQ ID NO: 2523210 - DNA, 25 bp, Homo sapien
tgcggctgggcaagttgactttgat

SEQ ID NO: 2523211 - DNA, 25 bp, Homo sapien
caacctgtagactccggcgggtaga

SEQ ID NO: 2523212 - DNA, 25 bp, Homo sapien
cttcgcaagccccttcccgtgatgc

SEQ ID NO: 2523213 - DNA, 25 bp, Homo sapien
cttcgccccagtcagtctccggcag

SEQ ID NO: 2523214 - DNA, 25 bp, Homo sapien
cgcgcctggctgtcgcggttgccgg

SEQ ID NO: 2523215 - DNA, 25 bp, Homo sapien
agcttctcgcggcttcgcaagcccc

SEQ ID NO: 2523216 - DNA, 25 bp, Homo sapien
gagagagcttctccttacaggttga

SEQ ID NO: 2523217 - DNA, 25 bp, Homo sapien
tccaggactttcacggtggctgtgt

SEQ ID NO: 2523218 - DNA, 25 bp, Homo sapien
tcaggttctctgtcgtaacaccagc

SEQ ID NO: 2523219 - DNA, 25 bp, Homo sapien
tctcttgtgattgaaaacaggcaga

SEQ ID NO: 2523220 - DNA, 25 bp, Homo sapien
cactttctggttggcagatgacaca

SEQ ID NO: 2523221 - DNA, 25 bp, Homo sapien
tacagcagcccggaaattctgaggg

SEQ ID NO: 2523222 - DNA, 25 bp, Homo sapien
tgaaccaggctgttaagtgcaccag

SEQ ID NO: 2523223 - DNA, 25 bp, Homo sapien
tgatttctagcgtttctggtgaacc

SEQ ID NO: 2523224 - DNA, 25 bp, Homo sapien
tctaggtacctgattcaagaaaaaa

SEQ ID NO: 2523225 - DNA, 25 bp, Homo sapien
tcttcaactcgagatctgaaaaagc

SEQ ID NO: 2523226 - DNA, 25 bp, Homo sapien
tttatctaggtacctgattcaagaa

SEQ ID NO: 2523227 - DNA, 25 bp, Homo sapien
atatactcttcaactcgagatctga

SEQ ID NO: 2523228 - DNA, 25 bp, Homo sapien
actgatgtgctgcagccgactctcg

SEQ ID NO: 2523229 - DNA, 25 bp, Homo sapien
tgttcagtccatcgtcattcagtct

SEQ ID NO: 2523230 - DNA, 25 bp, Homo sapien
gactctcgtcaacgctggacacttt

SEQ ID NO: 2523231 - DNA, 25 bp, Homo sapien
ctcacccgacgggaggacactgatg

SEQ ID NO: 2523232 - DNA, 25 bp, Homo sapien
ctcccgtgtcagctcgtagcacaga

SEQ ID NO: 2523233 - DNA, 25 bp, Homo sapien
ccatccacttcatcacccagtcatt

SEQ ID NO: 2523234 - DNA, 25 bp, Homo sapien
cgtgtcagctcgtagcacagaaggt

SEQ ID NO: 2523235 - DNA, 25 bp, Homo sapien
tgtcagctcgtagcacagaaggtga

SEQ ID NO: 2523236 - DNA, 25 bp, Homo sapien
tgttcctctcgtgacagcacaggcc

SEQ ID NO: 2523237 - DNA, 25 bp, Homo sapien
gcagaaaacaatggagccacctaga

SEQ ID NO: 2523238 - DNA, 25 bp, Homo sapien
ccacctagaagctggctgatgcagc

SEQ ID NO: 2523239 - DNA, 25 bp, Homo sapien
cagctcttggtggtactggaccttc

SEQ ID NO: 2523240 - DNA, 25 bp, Homo sapien
cgcaatagtttgttaagtctttcaa

SEQ ID NO: 2523241 - DNA, 25 bp, Homo sapien
ccatgctgtcgcaatagtttgttaa

SEQ ID NO: 2523242 - DNA, 25 bp, Homo sapien
gctgtcgcaatagtttgttaagtct

SEQ ID NO: 2523243 - DNA, 25 bp, Homo sapien
agaagtccatgctgtcgcaatagtt

SEQ ID NO: 2523244 - DNA, 25 bp, Homo sapien
tgagaagacaaacgtgggggacctg

SEQ ID NO: 2523245 - DNA, 25 bp, Homo sapien
tacaatcagataggcttcactgagc

SEQ ID NO: 2523246 - DNA, 25 bp, Homo sapien
ctgctacaatcagataggcttcact

SEQ ID NO: 2523247 - DNA, 25 bp, Homo sapien
gctacaatcagataggcttcactga

SEQ ID NO: 2523248 - DNA, 25 bp, Homo sapien
tcagggaggatgtgacgcctgggct

SEQ ID NO: 2523249 - DNA, 25 bp, Homo sapien
cacagcttcagggaggatgtgacgc

SEQ ID NO: 2523250 - DNA, 25 bp, Homo sapien
gggatgtgggggtgggcacagcttc

SEQ ID NO: 2523251 - DNA, 25 bp, Homo sapien
cagcttcagggaggatgtgacgcct

SEQ ID NO: 2523252 - DNA, 25 bp, Homo sapien
caaggtgttgaatcttggcggccaa

SEQ ID NO: 2523253 - DNA, 25 bp, Homo sapien
tggcggccaattgtacattcatctg

SEQ ID NO: 2523254 - DNA, 25 bp, Homo sapien
taaccttaagagttgccgttctgaa

SEQ ID NO: 2523255 - DNA, 25 bp, Homo sapien
cgttctgaacgtgtcttaactgaga

SEQ ID NO: 2523256 - DNA, 25 bp, Homo sapien
aacttgtggtgaaagaactccaggc

SEQ ID NO: 2523257 - DNA, 25 bp, Homo sapien
acagccggagcagaatcagcaggcc

SEQ ID NO: 2523258 - DNA, 25 bp, Homo sapien
caggatctcaaacttgtggtgaaag

SEQ ID NO: 2523259 - DNA, 25 bp, Homo sapien
ggaacaggaggacaatgtcgaggat

SEQ ID NO: 2523260 - DNA, 25 bp, Homo sapien
atctgatggtgctcttatggctcca

SEQ ID NO: 2523261 - DNA, 25 bp, Homo sapien
gacaataagtatggcaggtatgtta

SEQ ID NO: 2523262 - DNA, 25 bp, Homo sapien
tcaaatggccagacggaagcgtgtg

SEQ ID NO: 2523263 - DNA, 25 bp, Homo sapien
gaagagagccaagtgcagtgtcgca

SEQ ID NO: 2523264 - DNA, 25 bp, Homo sapien
ggcagcatagttattcttgtcgggc

SEQ ID NO: 2523265 - DNA, 25 bp, Homo sapien
ttgtcgggctggatgatcttcaggt

SEQ ID NO: 2523266 - DNA, 25 bp, Homo sapien
tcttgtcgggctggatgatcttcag

SEQ ID NO: 2523267 - DNA, 25 bp, Homo sapien
atggcagcatagttattcttgtcgg

SEQ ID NO: 2523268 - DNA, 25 bp, Homo sapien
gagggcatccagaaccaccaagcag

SEQ ID NO: 2523269 - DNA, 25 bp, Homo sapien
gaaccaccaagcagatgatgatgac

SEQ ID NO: 2523270 - DNA, 25 bp, Homo sapien
gggcatccagaaccaccaagcagat

SEQ ID NO: 2523271 - DNA, 25 bp, Homo sapien
atccagaaccaccaagcagatgatg

SEQ ID NO: 2523272 - DNA, 25 bp, Homo sapien
tcaatggaatcctacactctggcct

SEQ ID NO: 2523273 - DNA, 25 bp, Homo sapien
tgtggcagccgccaatctgcttcct

SEQ ID NO: 2523274 - DNA, 25 bp, Homo sapien
ccactgtatggatagaacacattcg

SEQ ID NO: 2523275 - DNA, 25 bp, Homo sapien
tgtggcatggatcagcacttctttg

SEQ ID NO: 2523276 - DNA, 25 bp, Homo sapien
gaacagtttcctcaacatgcccctg

SEQ ID NO: 2523277 - DNA, 25 bp, Homo sapien
ctcaacatgcccctgaagtcaaggg

SEQ ID NO: 2523278 - DNA, 25 bp, Homo sapien
tgggagctgaacagtttcctcaaca

SEQ ID NO: 2523279 - DNA, 25 bp, Homo sapien
agtttcctcaacatgcccctgaagt

SEQ ID NO: 2523280 - DNA, 25 bp, Homo sapien
ggcaggggcaacgtcaggggctgca

SEQ ID NO: 2523281 - DNA, 25 bp, Homo sapien
ggcaacgtcaggggctgcagctctg

SEQ ID NO: 2523282 - DNA, 25 bp, Homo sapien
gggcaggggcaacgtcaggggctgc

SEQ ID NO: 2523283 - DNA, 25 bp, Homo sapien
aggggcaacgtcaggggctgcagct

SEQ ID NO: 2523284 - DNA, 25 bp, Homo sapien
atgttccaggcatggtagtcgtctc

SEQ ID NO: 2523285 - DNA, 25 bp, Homo sapien
tccaggcatggtagtcgtctcccac

SEQ ID NO: 2523286 - DNA, 25 bp, Homo sapien
ttctcccatttcttgtagttgatgt

SEQ ID NO: 2523287 - DNA, 25 bp, Homo sapien
tgttccaggcatggtagtcgtctcc

SEQ ID NO: 2523288 - DNA, 25 bp, Homo sapien
cttgctcatcctctcagcgggagcc

SEQ ID NO: 2523289 - DNA, 25 bp, Homo sapien
aagtgccttaagaacttgctcatcc

SEQ ID NO: 2523290 - DNA, 25 bp, Homo sapien
aacttgctcatcctctcagcgggag

SEQ ID NO: 2523291 - DNA, 25 bp, Homo sapien
gaagtgccttaagaacttgctcatc

SEQ ID NO: 2523292 - DNA, 25 bp, Homo sapien
agagcaagagcttcaggcagttggc

SEQ ID NO: 2523293 - DNA, 25 bp, Homo sapien
ggacagagagcaagagcttcaggca

SEQ ID NO: 2523294 - DNA, 25 bp, Homo sapien
cagagagcaagagcttcaggcagtt

SEQ ID NO: 2523295 - DNA, 25 bp, Homo sapien
gagcaagagcttcaggcagttggcc

SEQ ID NO: 2523296 - DNA, 25 bp, Homo sapien
cagtggacgttgacaggcaggtcat

SEQ ID NO: 2523297 - DNA, 25 bp, Homo sapien
caaatatcggtgagggcgtgaagca

SEQ ID NO: 2523298 - DNA, 25 bp, Homo sapien
acatcttttcactcctcaggttggc

SEQ ID NO: 2523299 - DNA, 25 bp, Homo sapien
gagaaaactcaaatagccaagatgc

SEQ ID NO: 2523300 - DNA, 25 bp, Homo sapien
tcttttacaggtattagaccagaaa

SEQ ID NO: 2523301 - DNA, 25 bp, Homo sapien
tacaggtattagaccagaaaaacta

SEQ ID NO: 2523302 - DNA, 25 bp, Homo sapien
ctcttttacaggtattagaccagaa

SEQ ID NO: 2523303 - DNA, 25 bp, Homo sapien
ggagtaaaggtgacttttggcatgt

SEQ ID NO: 2523304 - DNA, 25 bp, Homo sapien
caaagcattcaatgcctgctgttaa

SEQ ID NO: 2523305 - DNA, 25 bp, Homo sapien
gttgtataagggaagtaaggcataa

SEQ ID NO: 2523306 - DNA, 25 bp, Homo sapien
tgtataagggaagtaaggcataaaa

SEQ ID NO: 2523307 - DNA, 25 bp, Homo sapien
gtggaaggtggaatgaaacccctga

SEQ ID NO: 2523308 - DNA, 25 bp, Homo sapien
taaggtgcacgcatagtgttgtctc

SEQ ID NO: 2523309 - DNA, 25 bp, Homo sapien
ggctgggcctgacaattgatcggtt

SEQ ID NO: 2523310 - DNA, 25 bp, Homo sapien
cgtcagattcgcacctgttcagagg

SEQ ID NO: 2523311 - DNA, 25 bp, Homo sapien
tatcacagtaaatggcagcacatgg

SEQ ID NO: 2523312 - DNA, 25 bp, Homo sapien
tggccataaggtacaggaggaaagc

SEQ ID NO: 2523313 - DNA, 25 bp, Homo sapien
cagtctatttcctactcgagatggc

SEQ ID NO: 2523314 - DNA, 25 bp, Homo sapien
gagtcaggccaggttgaaatcccaa

SEQ ID NO: 2523315 - DNA, 25 bp, Homo sapien
caaacctgcacctcacatatcaaag

SEQ ID NO: 2523316 - DNA, 25 bp, Homo sapien
ggctcagggaattgaagggcacaca

SEQ ID NO: 2523317 - DNA, 25 bp, Homo sapien
gggatatcctctaatgctgcaagac

SEQ ID NO: 2523318 - DNA, 25 bp, Homo sapien
tagttattaacatacagggctggga

SEQ ID NO: 2523319 - DNA, 25 bp, Homo sapien
cagaattatcctctcaaggctggga

SEQ ID NO: 2523320 - DNA, 25 bp, Homo sapien
taagttgcagctctcaagatggagg

SEQ ID NO: 2523321 - DNA, 25 bp, Homo sapien
tctagaagttgggaaggcaagcaaa

SEQ ID NO: 2523322 - DNA, 25 bp, Homo sapien
tcccttcagggtgtggtaggcaaaa

SEQ ID NO: 2523323 - DNA, 25 bp, Homo sapien
ttgactcgagcccactgagaccgat

SEQ ID NO: 2523324 - DNA, 25 bp, Homo sapien
ggctgtccggaaatcctgcagatct

SEQ ID NO: 2523325 - DNA, 25 bp, Homo sapien
gacaggccaagtcacgaagctgagc

SEQ ID NO: 2523326 - DNA, 25 bp, Homo sapien
gcagggacgatgcatccgaggactt

SEQ ID NO: 2523327 - DNA, 25 bp, Homo sapien
caatcctgcgaggtaggtacatgct

SEQ ID NO: 2523328 - DNA, 25 bp, Homo sapien
acctcatgggacagatgcggaaact

SEQ ID NO: 2523329 - DNA, 25 bp, Homo sapien
ctgtgtgacccaaggcaaggggctt

SEQ ID NO: 2523330 - DNA, 25 bp, Homo sapien
tgcctcctttggctgtgtgacccaa

SEQ ID NO: 2523331 - DNA, 25 bp, Homo sapien
ctggttgtgagttctggctctgcct

SEQ ID NO: 2523332 - DNA, 25 bp, Homo sapien
gcttggcctctctgcgtcttggttt

SEQ ID NO: 2523333 - DNA, 25 bp, Homo sapien
ccgcccgtgggagcgaatcgcggat

SEQ ID NO: 2523334 - DNA, 25 bp, Homo sapien
aggtcccgcccgtgggagcgaatcg

SEQ ID NO: 2523335 - DNA, 25 bp, Homo sapien
ctgggcctcccgcagttacaaaggt

SEQ ID NO: 2523336 - DNA, 25 bp, Homo sapien
tgggcctcccgcagttacaaaggtc

SEQ ID NO: 2523337 - DNA, 25 bp, Homo sapien
acgctctgacgaatgagcaacctct

SEQ ID NO: 2523338 - DNA, 25 bp, Homo sapien
cgtcccctgcacagtttctgccatg

SEQ ID NO: 2523339 - DNA, 25 bp, Homo sapien
ggtctcctgattccttggcctcgtc

SEQ ID NO: 2523340 - DNA, 25 bp, Homo sapien
gtgggcagcacgctctgacgaatga

SEQ ID NO: 2523341 - DNA, 25 bp, Homo sapien
ctgggccgccttgctccgggccaac

SEQ ID NO: 2523342 - DNA, 25 bp, Homo sapien
ctgcctgtcctgggccgccttgctc

SEQ ID NO: 2523343 - DNA, 25 bp, Homo sapien
cttgctccgggccaactcgtacggc

SEQ ID NO: 2523344 - DNA, 25 bp, Homo sapien
ggccaactcgtacggccccgcaggc

SEQ ID NO: 2523345 - DNA, 25 bp, Homo sapien
cattttagttgggaaagtgaggcca

SEQ ID NO: 2523346 - DNA, 25 bp, Homo sapien
taacacgtgaccacctactgtgtgg

SEQ ID NO: 2523347 - DNA, 25 bp, Homo sapien
atacttaaaggagaaggccgggcat

SEQ ID NO: 2523348 - DNA, 25 bp, Homo sapien
tactgtgtggtaggccctttcaagg

SEQ ID NO: 2523349 - DNA, 25 bp, Homo sapien
ttgttccacctgctggttgctagtg

SEQ ID NO: 2523350 - DNA, 25 bp, Homo sapien
gttccgccctccaggccaactagag

SEQ ID NO: 2523351 - DNA, 25 bp, Homo sapien
aactagaggcttccgcagccgctgc

SEQ ID NO: 2523352 - DNA, 25 bp, Homo sapien
aagtgctctccacacctcggttccg

SEQ ID NO: 2523353 - DNA, 25 bp, Homo sapien
catgtgatcatcaaatgctctggcc

SEQ ID NO: 2523354 - DNA, 25 bp, Homo sapien
atgtgatcatcaaatgctctggcca

SEQ ID NO: 2523355 - DNA, 25 bp, Homo sapien
ctgttgcagcagaggtcatgtgatc

SEQ ID NO: 2523356 - DNA, 25 bp, Homo sapien
tgcagcagaggtcatgtgatcatca

SEQ ID NO: 2523357 - DNA, 25 bp, Homo sapien
gagaggagtggacctgtttactcat

SEQ ID NO: 2523358 - DNA, 25 bp, Homo sapien
cctccttccgtttttgagaggagtg

SEQ ID NO: 2523359 - DNA, 25 bp, Homo sapien
ttttgagaggagtggacctgtttac

SEQ ID NO: 2523360 - DNA, 25 bp, Homo sapien
cagtgctgagtcactccgtccactg

SEQ ID NO: 2523361 - DNA, 25 bp, Homo sapien
gacttggccagacttgacctttgct

SEQ ID NO: 2523362 - DNA, 25 bp, Homo sapien
acttggccagacttgacctttgctg

SEQ ID NO: 2523363 - DNA, 25 bp, Homo sapien
agacttggccagacttgacctttgc

SEQ ID NO: 2523364 - DNA, 25 bp, Homo sapien
ttaggctgggtgcggtggctcacac

SEQ ID NO: 2523365 - DNA, 25 bp, Homo sapien
aattaggctgggtgcggtggctcac

SEQ ID NO: 2523366 - DNA, 25 bp, Homo sapien
aaaattaggctgggtgcggtggctc

SEQ ID NO: 2523367 - DNA, 25 bp, Homo sapien
aacaaaaattaggctgggtgcggtg

SEQ ID NO: 2523368 - DNA, 25 bp, Homo sapien
ctgtgtttgaaattattggaatact

SEQ ID NO: 2523369 - DNA, 25 bp, Homo sapien
gatgattgagcgactaaggatgcct

SEQ ID NO: 2523370 - DNA, 25 bp, Homo sapien
tgcaactagacatgggcaggcctag

SEQ ID NO: 2523371 - DNA, 25 bp, Homo sapien
cacatggtgtctgcaaactgccaaa

SEQ ID NO: 2523372 - DNA, 25 bp, Homo sapien
tgtatgttactcgagaactctggcc

SEQ ID NO: 2523373 - DNA, 25 bp, Homo sapien
gagcaatttattcaggaaaatctat

SEQ ID NO: 2523374 - DNA, 25 bp, Homo sapien
agagcaatttattcaggaaaatcta

SEQ ID NO: 2523375 - DNA, 25 bp, Homo sapien
tcaatatgccatcaacagttctcct

SEQ ID NO: 2523376 - DNA, 25 bp, Homo sapien
cctgtgtgtattgtgctgataaata

SEQ ID NO: 2523377 - DNA, 25 bp, Homo sapien
tctcctgtgtgtattgtgctgataa

SEQ ID NO: 2523378 - DNA, 25 bp, Homo sapien
atatgccatcaacagttctcctgtg

SEQ ID NO: 2523379 - DNA, 25 bp, Homo sapien
caccgcagaataaagaatgtaggcc

SEQ ID NO: 2523380 - DNA, 25 bp, Homo sapien
tcaccacacggtattgtacacggtc

SEQ ID NO: 2523381 - DNA, 25 bp, Homo sapien
taatcggtcactcgtatagaacagt

SEQ ID NO: 2523382 - DNA, 25 bp, Homo sapien
aatggacgggttcaggcctgatgca

SEQ ID NO: 2523383 - DNA, 25 bp, Homo sapien
ctgtttttgaatccccaagaaggca

SEQ ID NO: 2523384 - DNA, 25 bp, Homo sapien
gaaggcagcatgtgtatacaaccat

SEQ ID NO: 2523385 - DNA, 25 bp, Homo sapien
caaccataccaccttgtacttaggg

SEQ ID NO: 2523386 - DNA, 25 bp, Homo sapien
ttatcgttagtagcttaaacagcac

SEQ ID NO: 2523387 - DNA, 25 bp, Homo sapien
gatctatctgagcaagctgaccagt

SEQ ID NO: 2523388 - DNA, 25 bp, Homo sapien
cagtggtttgtatcaacagtatgca

SEQ ID NO: 2523389 - DNA, 25 bp, Homo sapien
tatacatcataccagtgatgctggc

SEQ ID NO: 2523390 - DNA, 25 bp, Homo sapien
gatcaattgtacacttactcctcag

SEQ ID NO: 2523391 - DNA, 25 bp, Homo sapien
caagtcccgactaggcagtgtcaaa

SEQ ID NO: 2523392 - DNA, 25 bp, Homo sapien
ccgactaggcagtgtcaaaacgaca

SEQ ID NO: 2523393 - DNA, 25 bp, Homo sapien
gtcccgactaggcagtgtcaaaacg

SEQ ID NO: 2523394 - DNA, 25 bp, Homo sapien
ttacaagtcccgactaggcagtgtc

SEQ ID NO: 2523395 - DNA, 25 bp, Homo sapien
ctatttctttgcttgctttgtgatc

SEQ ID NO: 2523396 - DNA, 25 bp, Homo sapien
tttctttgcttgctttgtgatcata

SEQ ID NO: 2523397 - DNA, 25 bp, Homo sapien
ttctttgcttgctttgtgatcatac

SEQ ID NO: 2523398 - DNA, 25 bp, Homo sapien
tatttctttgcttgctttgtgatca

SEQ ID NO: 2523399 - DNA, 25 bp, Homo sapien
caggtctcgtggcatttggcttctt

SEQ ID NO: 2523400 - DNA, 25 bp, Homo sapien
gaggcgttacaggtctcgtggcatt

SEQ ID NO: 2523401 - DNA, 25 bp, Homo sapien
cccttggaggcgttacaggtctcgt

SEQ ID NO: 2523402 - DNA, 25 bp, Homo sapien
cgttacaggtctcgtggcatttggc

SEQ ID NO: 2523403 - DNA, 25 bp, Homo sapien
tactcagcataagtgaacactaggc

SEQ ID NO: 2523404 - DNA, 25 bp, Homo sapien
aaagagccataagcattaaggagcc

SEQ ID NO: 2523405 - DNA, 25 bp, Homo sapien
taattcaacactgggaaaaggtgcc

SEQ ID NO: 2523406 - DNA, 25 bp, Homo sapien
tcttttacaagggatccacacatta

SEQ ID NO: 2523407 - DNA, 25 bp, Homo sapien
cacattagtgtttcatccacactca

SEQ ID NO: 2523408 - DNA, 25 bp, Homo sapien
aagaacacattagtgtttcatccac

SEQ ID NO: 2523409 - DNA, 25 bp, Homo sapien
aacacattagtgtttcatccacact

SEQ ID NO: 2523410 - DNA, 25 bp, Homo sapien
ctgaaaagaacacattagtgtttca

SEQ ID NO: 2523411 - DNA, 25 bp, Homo sapien
ctgcattgtcaaactctccgcaata

SEQ ID NO: 2523412 - DNA, 25 bp, Homo sapien
gaccaactgcctctttgcaaaaaat

SEQ ID NO: 2523413 - DNA, 25 bp, Homo sapien
tcaaactctccgcaataattgggcg

SEQ ID NO: 2523414 - DNA, 25 bp, Homo sapien
ataattgggcgcagaaaacagagtg

SEQ ID NO: 2523415 - DNA, 25 bp, Homo sapien
tcacacacatgctcttaagtgtaca

SEQ ID NO: 2523416 - DNA, 25 bp, Homo sapien
tattaggtgagtaaaaccatgtttc

SEQ ID NO: 2523417 - DNA, 25 bp, Homo sapien
cattgagcctgatatcttgtgttcc

SEQ ID NO: 2523418 - DNA, 25 bp, Homo sapien
taaataagcaatacctacccaccaa

SEQ ID NO: 2523419 - DNA, 25 bp, Homo sapien
ccatagattgaagatctggtgataa

SEQ ID NO: 2523420 - DNA, 25 bp, Homo sapien
ggtcagaccacaaaagatcacaaag

SEQ ID NO: 2523421 - DNA, 25 bp, Homo sapien
ctggtacatcagttggtcgcataat

SEQ ID NO: 2523422 - DNA, 25 bp, Homo sapien
tatggagaaattttgcaaccacttc

SEQ ID NO: 2523423 - DNA, 25 bp, Homo sapien
ctatttggaacaaaaatcagcccac

SEQ ID NO: 2523424 - DNA, 25 bp, Homo sapien
ttggaacaaaaatcagcccacctac

SEQ ID NO: 2523425 - DNA, 25 bp, Homo sapien
tatttggaacaaaaatcagcccacc

SEQ ID NO: 2523426 - DNA, 25 bp, Homo sapien
tttggaacaaaaatcagcccaccta

SEQ ID NO: 2523427 - DNA, 25 bp, Homo sapien
cggtaaacagttaaaacagtctgtg

SEQ ID NO: 2523428 - DNA, 25 bp, Homo sapien
tccatagtttaatgttgtatcttct

SEQ ID NO: 2523429 - DNA, 25 bp, Homo sapien
gcagaatatcttctcatccacgatg

SEQ ID NO: 2523430 - DNA, 25 bp, Homo sapien
catccacgatggctgctatcggtaa

SEQ ID NO: 2523431 - DNA, 25 bp, Homo sapien
tcccaccctgtaatgcaaatcaagc

SEQ ID NO: 2523432 - DNA, 25 bp, Homo sapien
tcctttgagagttagagccagccca

SEQ ID NO: 2523433 - DNA, 25 bp, Homo sapien
caatgactgggtctaacactgacta

SEQ ID NO: 2523434 - DNA, 25 bp, Homo sapien
tagggagtttaccacagggcttgaa

SEQ ID NO: 2523435 - DNA, 25 bp, Homo sapien
aattctgttgatgctggcacattca

SEQ ID NO: 2523436 - DNA, 25 bp, Homo sapien
tccataaattctgttgatgctggca

SEQ ID NO: 2523437 - DNA, 25 bp, Homo sapien
ttgatgctggcacattcatggttcc

SEQ ID NO: 2523438 - DNA, 25 bp, Homo sapien
tctgttgatgctggcacattcatgg

SEQ ID NO: 2523439 - DNA, 25 bp, Homo sapien
gccagtaagaggcagatcgtctcca

SEQ ID NO: 2523440 - DNA, 25 bp, Homo sapien
cagcaaatcatagtattgtccatgg

SEQ ID NO: 2523441 - DNA, 25 bp, Homo sapien
tctggtgggaaaccaccgtactcaa

SEQ ID NO: 2523442 - DNA, 25 bp, Homo sapien
cgtactcaaaaagtcgcagcaaatc

SEQ ID NO: 2523443 - DNA, 25 bp, Homo sapien
tggaagcaagaattttgttacacag

SEQ ID NO: 2523444 - DNA, 25 bp, Homo sapien
aattttgttacacagtgttcccata

SEQ ID NO: 2523445 - DNA, 25 bp, Homo sapien
gcaagaattttgttacacagtgttc

SEQ ID NO: 2523446 - DNA, 25 bp, Homo sapien
ctggaagcaagaattttgttacaca

SEQ ID NO: 2523447 - DNA, 25 bp, Homo sapien
caagctattcgcaaacaggataatc

SEQ ID NO: 2523448 - DNA, 25 bp, Homo sapien
tagttccaagctattcgcaaacagg

SEQ ID NO: 2523449 - DNA, 25 bp, Homo sapien
agctattcgcaaacaggataatcat

SEQ ID NO: 2523450 - DNA, 25 bp, Homo sapien
taagtagttccaagctattcgcaaa

SEQ ID NO: 2523451 - DNA, 25 bp, Homo sapien
gatttcacgagactttaagcacagt

SEQ ID NO: 2523452 - DNA, 25 bp, Homo sapien
ttcattctcctgaagctggacattc

SEQ ID NO: 2523453 - DNA, 25 bp, Homo sapien
tctagtaggataggctgactgagaa

SEQ ID NO: 2523454 - DNA, 25 bp, Homo sapien
gagtggtgcttcaagttctagtagg

SEQ ID NO: 2523455 - DNA, 25 bp, Homo sapien
cgttgaattgtctaacagagatttc

SEQ ID NO: 2523456 - DNA, 25 bp, Homo sapien
tcttaaaagttgtcatatcaggctg

SEQ ID NO: 2523457 - DNA, 25 bp, Homo sapien
tcttaaatttcacgttgaattgtct

SEQ ID NO: 2523458 - DNA, 25 bp, Homo sapien
gtatgaaaatctagaattactctta

SEQ ID NO: 2523459 - DNA, 25 bp, Homo sapien
cgctggaacccacggggcaggttgc

SEQ ID NO: 2523460 - DNA, 25 bp, Homo sapien
ggaacccacggggcaggttgcagtg

SEQ ID NO: 2523461 - DNA, 25 bp, Homo sapien
aatcgctggaacccacggggcaggt

SEQ ID NO: 2523462 - DNA, 25 bp, Homo sapien
tggaacccacggggcaggttgcagt

SEQ ID NO: 2523463 - DNA, 25 bp, Homo sapien
taagctttactgtcggtgatgacca

SEQ ID NO: 2523464 - DNA, 25 bp, Homo sapien
tttgctgtaagctttactgtcggtg

SEQ ID NO: 2523465 - DNA, 25 bp, Homo sapien
gctgtaagctttactgtcggtgatg

SEQ ID NO: 2523466 - DNA, 25 bp, Homo sapien
ttactgtcggtgatgaccactacct

SEQ ID NO: 2523467 - DNA, 25 bp, Homo sapien
cagagcctgacatggtcttgcactt

SEQ ID NO: 2523468 - DNA, 25 bp, Homo sapien
gatgcttcttgcaaaccaagatgtg

SEQ ID NO: 2523469 - DNA, 25 bp, Homo sapien
tattatctttaggaccagggatggc

SEQ ID NO: 2523470 - DNA, 25 bp, Homo sapien
tgtgaagtaagttacaaccacctgc

SEQ ID NO: 2523471 - DNA, 25 bp, Homo sapien
cagagaaataaagccacacatatcc

SEQ ID NO: 2523472 - DNA, 25 bp, Homo sapien
tcagagaaataaagccacacatatc

SEQ ID NO: 2523473 - DNA, 25 bp, Homo sapien
tccaaagacccgtccagtgcgcggg

SEQ ID NO: 2523474 - DNA, 25 bp, Homo sapien
ttccacggccgggaggaagcctgca

SEQ ID NO: 2523475 - DNA, 25 bp, Homo sapien
gagcggagttttcaaattccacggc

SEQ ID NO: 2523476 - DNA, 25 bp, Homo sapien
acggcacacgtcgtccaggaggctg

SEQ ID NO: 2523477 - DNA, 25 bp, Homo sapien
gataatgctgtcgatgttgagttta

SEQ ID NO: 2523478 - DNA, 25 bp, Homo sapien
ccgttggataatgctgtcgatgttg

SEQ ID NO: 2523479 - DNA, 25 bp, Homo sapien
agcagccgttggataatgctgtcga

SEQ ID NO: 2523480 - DNA, 25 bp, Homo sapien
cttccagcagccgttggataatgct

SEQ ID NO: 2523481 - DNA, 25 bp, Homo sapien
cttcccaccgccgaccctcccgcag

SEQ ID NO: 2523482 - DNA, 25 bp, Homo sapien
caccgccgaccctcccgcagcggcg

SEQ ID NO: 2523483 - DNA, 25 bp, Homo sapien
cgccgaccctcccgcagcggcgccg

SEQ ID NO: 2523484 - DNA, 25 bp, Homo sapien
tcccaccgccgaccctcccgcagcg

SEQ ID NO: 2523485 - DNA, 25 bp, Homo sapien
cttagacagcctcgggcggcgcacg

SEQ ID NO: 2523486 - DNA, 25 bp, Homo sapien
acaaaatggccgccgactccttaga

SEQ ID NO: 2523487 - DNA, 25 bp, Homo sapien
aatggccgccgactccttagacagc

SEQ ID NO: 2523488 - DNA, 25 bp, Homo sapien
tttcccacgccacgagcagaggcgg

SEQ ID NO: 2523489 - DNA, 25 bp, Homo sapien
tgaaagctgttcacagcggaagttg

SEQ ID NO: 2523490 - DNA, 25 bp, Homo sapien
actgaaagctgttcacagcggaagt

SEQ ID NO: 2523491 - DNA, 25 bp, Homo sapien
aaagctgttcacagcggaagttgat

SEQ ID NO: 2523492 - DNA, 25 bp, Homo sapien
gaaagctgttcacagcggaagttga

SEQ ID NO: 2523493 - DNA, 25 bp, Homo sapien
aaacaaggaagctgttaaatgatcc

SEQ ID NO: 2523494 - DNA, 25 bp, Homo sapien
taaatgatccagctgttctgtctga

SEQ ID NO: 2523495 - DNA, 25 bp, Homo sapien
tgcgtgtcttcatgtagatatgctg

SEQ ID NO: 2523496 - DNA, 25 bp, Homo sapien
tgaatacgttgcacatctggtggcc

SEQ ID NO: 2523497 - DNA, 25 bp, Homo sapien
gcagttgccaggcagtcagggtcac

SEQ ID NO: 2523498 - DNA, 25 bp, Homo sapien
gccaggcagtcagggtcacccttgg

SEQ ID NO: 2523499 - DNA, 25 bp, Homo sapien
ttgccaggcagtcagggtcaccctt

SEQ ID NO: 2523500 - DNA, 25 bp, Homo sapien
ggcagtcagggtcacccttggtcat

SEQ ID NO: 2523501 - DNA, 25 bp, Homo sapien
ttgccttgtggggtatagtcacttt

SEQ ID NO: 2523502 - DNA, 25 bp, Homo sapien
ctaattgccttgtggggtatagtca

SEQ ID NO: 2523503 - DNA, 25 bp, Homo sapien
tgccttgtggggtatagtcactttt

SEQ ID NO: 2523504 - DNA, 25 bp, Homo sapien
aattgccttgtggggtatagtcact

SEQ ID NO: 2523505 - DNA, 25 bp, Homo sapien
agagctgttggtgcctcccatgcat

SEQ ID NO: 2523506 - DNA, 25 bp, Homo sapien
aggcagagctgttggtgcctcccat

SEQ ID NO: 2523507 - DNA, 25 bp, Homo sapien
ggcagagctgttggtgcctcccatg

SEQ ID NO: 2523508 - DNA, 25 bp, Homo sapien
cagccctgcattcatgaggcagccc

SEQ ID NO: 2523509 - DNA, 25 bp, Homo sapien
tttaagtcatgtaatgatgagttgg

SEQ ID NO: 2523510 - DNA, 25 bp, Homo sapien
taatgatgagttggttagaggctca

SEQ ID NO: 2523511 - DNA, 25 bp, Homo sapien
cacgctgttggtttgcaaagccctc

SEQ ID NO: 2523512 - DNA, 25 bp, Homo sapien
aaagccctccatgtgtggctctttg

SEQ ID NO: 2523513 - DNA, 25 bp, Homo sapien
ttcccagctccggggccagcgtgac

SEQ ID NO: 2523514 - DNA, 25 bp, Homo sapien
aattcccagctccggggccagcgtg

SEQ ID NO: 2523515 - DNA, 25 bp, Homo sapien
ctaaattcccagctccggggccagc

SEQ ID NO: 2523516 - DNA, 25 bp, Homo sapien
taaattcccagctccggggccagcg

SEQ ID NO: 2523517 - DNA, 25 bp, Homo sapien
gtcattgtgcttgagcacccagtat

SEQ ID NO: 2523518 - DNA, 25 bp, Homo sapien
ctgggtatcttttggcaaggctgtc

SEQ ID NO: 2523519 - DNA, 25 bp, Homo sapien
cttgagcacccagtatgtgagggaa

SEQ ID NO: 2523520 - DNA, 25 bp, Homo sapien
ctgaagcgtgttccctgggtatctt

SEQ ID NO: 2523521 - DNA, 25 bp, Homo sapien
catatactgcttggggcaccaggtc

SEQ ID NO: 2523522 - DNA, 25 bp, Homo sapien
cacacgggtacatatactgcttggg

SEQ ID NO: 2523523 - DNA, 25 bp, Homo sapien
gcagcacacgggtacatatactgct

SEQ ID NO: 2523524 - DNA, 25 bp, Homo sapien
agctgggcagcacacgggtacatat

SEQ ID NO: 2523525 - DNA, 25 bp, Homo sapien
cctgagctaccactcctccgaaagc

SEQ ID NO: 2523526 - DNA, 25 bp, Homo sapien
gagctaccactcctccgaaagccat

SEQ ID NO: 2523527 - DNA, 25 bp, Homo sapien
ggagtcaacaggtcctgtctcacag

SEQ ID NO: 2523528 - DNA, 25 bp, Homo sapien
gccctgagctaccactcctccgaaa

SEQ ID NO: 2523529 - DNA, 25 bp, Homo sapien
tgcatcttcttcaggctctttttgt

SEQ ID NO: 2523530 - DNA, 25 bp, Homo sapien
ggcctgcatcttcttcaggctcttt

SEQ ID NO: 2523531 - DNA, 25 bp, Homo sapien
ccatggccttggcattgttggcctg

SEQ ID NO: 2523532 - DNA, 25 bp, Homo sapien
tcttcaggctctttttgttgtgctt

SEQ ID NO: 2523533 - DNA, 25 bp, Homo sapien
tcagaattttttgaggccatttctg

SEQ ID NO: 2523534 - DNA, 25 bp, Homo sapien
atgtctgcaccgtaacctgcagccc

SEQ ID NO: 2523535 - DNA, 25 bp, Homo sapien
tggttgtccgcagtgtggttcttgg

SEQ ID NO: 2523536 - DNA, 25 bp, Homo sapien
ggttgtccgcagtgtggttcttgga

SEQ ID NO: 2523537 - DNA, 25 bp, Homo sapien
ccagcgattgcatggcgttggccga

SEQ ID NO: 2523538 - DNA, 25 bp, Homo sapien
ttagctgcgtgtgaagtctgtacct

SEQ ID NO: 2523539 - DNA, 25 bp, Homo sapien
gaacgtccatgtttgtgcgagtcac

SEQ ID NO: 2523540 - DNA, 25 bp, Homo sapien
cacttagcgtcatgagggtccgggt

SEQ ID NO: 2523541 - DNA, 25 bp, Homo sapien
tttgtatctcaaactggtcccctct

SEQ ID NO: 2523542 - DNA, 25 bp, Homo sapien
cataagatctgtagtaatgctcctt

SEQ ID NO: 2523543 - DNA, 25 bp, Homo sapien
taggttaagcagctgacctggcgcg

SEQ ID NO: 2523544 - DNA, 25 bp, Homo sapien
tccctaacgagatgtgattgtgcct

SEQ ID NO: 2523545 - DNA, 25 bp, Homo sapien
caactctggagtgcagggaagccgt

SEQ ID NO: 2523546 - DNA, 25 bp, Homo sapien
ctgagtccagggtgtcttgcccaga

SEQ ID NO: 2523547 - DNA, 25 bp, Homo sapien
tgagtcccgccttcttggtgccgga

SEQ ID NO: 2523548 - DNA, 25 bp, Homo sapien
agaaccacgcactgccctggagtgt

SEQ ID NO: 2523549 - DNA, 25 bp, Homo sapien
gaggcattccgatggcatcccaagg

SEQ ID NO: 2523550 - DNA, 25 bp, Homo sapien
aagtcaccctcttaggattagcagg

SEQ ID NO: 2523551 - DNA, 25 bp, Homo sapien
tctcaaagcgctagcatcacaggcg

SEQ ID NO: 2523552 - DNA, 25 bp, Homo sapien
ttctgagtggctgcaaaggtctacc

SEQ ID NO: 2523553 - DNA, 25 bp, Homo sapien
tttccaactgtaggatgtgcggcca

SEQ ID NO: 2523554 - DNA, 25 bp, Homo sapien
catggctaacagacaaggtagggac

SEQ ID NO: 2523555 - DNA, 25 bp, Homo sapien
cagggaccactctgcaaagacgagc

SEQ ID NO: 2523556 - DNA, 25 bp, Homo sapien
gccacccaggctgcaaagaagatgg

SEQ ID NO: 2523557 - DNA, 25 bp, Homo sapien
cttgtagtccaagttgccagtcacg

SEQ ID NO: 2523558 - DNA, 25 bp, Homo sapien
tgtgcaccaggttcttgtagtccaa

SEQ ID NO: 2523559 - DNA, 25 bp, Homo sapien
gcaccaggttcttgtagtccaagtt

SEQ ID NO: 2523560 - DNA, 25 bp, Homo sapien
caggttcttgtagtccaagttgcca

SEQ ID NO: 2523561 - DNA, 25 bp, Homo sapien
acatgacagtatgtggcggcccttc

SEQ ID NO: 2523562 - DNA, 25 bp, Homo sapien
tggaacttgatggaaacaggcctgt

SEQ ID NO: 2523563 - DNA, 25 bp, Homo sapien
taagcaggtctctatgcatcgtgag

SEQ ID NO: 2523564 - DNA, 25 bp, Homo sapien
cacacagcaggtggaaagtgaaggc

SEQ ID NO: 2523565 - DNA, 25 bp, Homo sapien
ctctccgcctgcgtggtcagcattt

SEQ ID NO: 2523566 - DNA, 25 bp, Homo sapien
cctccttggaaaacctctccgcctg

SEQ ID NO: 2523567 - DNA, 25 bp, Homo sapien
tctccgcctgcgtggtcagcatttc

SEQ ID NO: 2523568 - DNA, 25 bp, Homo sapien
tggaaaacctctccgcctgcgtggt

SEQ ID NO: 2523569 - DNA, 25 bp, Homo sapien
ctttgaatgcgttgagaatggtttc

SEQ ID NO: 2523570 - DNA, 25 bp, Homo sapien
caaacactttgaatgcgttgagaat

SEQ ID NO: 2523571 - DNA, 25 bp, Homo sapien
ttgaatgcgttgagaatggtttcct

SEQ ID NO: 2523572 - DNA, 25 bp, Homo sapien
gggtcaaacactttgaatgcgttga

SEQ ID NO: 2523573 - DNA, 25 bp, Homo sapien
caaacattgtgaggaacacagtaaa

SEQ ID NO: 2523574 - DNA, 25 bp, Homo sapien
ttaattggacccggagcctccttga

SEQ ID NO: 2523575 - DNA, 25 bp, Homo sapien
gaggaacacagtaaagttaattgga

SEQ ID NO: 2523576 - DNA, 25 bp, Homo sapien
tggacccggagcctccttgatcatt

SEQ ID NO: 2523577 - DNA, 25 bp, Homo sapien
aggtgtctctcagatcgttcttgtc

SEQ ID NO: 2523578 - DNA, 25 bp, Homo sapien
ctcagatcgttcttgtcaatgaagc

SEQ ID NO: 2523579 - DNA, 25 bp, Homo sapien
gtctctcagatcgttcttgtcaatg

SEQ ID NO: 2523580 - DNA, 25 bp, Homo sapien
gtgtctctcagatcgttcttgtcaa

SEQ ID NO: 2523581 - DNA, 25 bp, Homo sapien
ccctcgcaacggctggaaaatgaat

SEQ ID NO: 2523582 - DNA, 25 bp, Homo sapien
cattttagcatagttccctctggaa

SEQ ID NO: 2523583 - DNA, 25 bp, Homo sapien
gagcctgtccatccaagcccgtgtg

SEQ ID NO: 2523584 - DNA, 25 bp, Homo sapien
tgagtcagtgtgagccctcgcaacg

SEQ ID NO: 2523585 - DNA, 25 bp, Homo sapien
aaaattcacacatccgttcaggccg

SEQ ID NO: 2523586 - DNA, 25 bp, Homo sapien
tccaggcggatgattcaatagctgc

SEQ ID NO: 2523587 - DNA, 25 bp, Homo sapien
tccctcgtgggtgggatttccatcc

SEQ ID NO: 2523588 - DNA, 25 bp, Homo sapien
ctaatgaaaggtccctgctgggaat

SEQ ID NO: 2523589 - DNA, 25 bp, Homo sapien
tgttcgaacatggagaacacgttgg

SEQ ID NO: 2523590 - DNA, 25 bp, Homo sapien
taaattcctggatttgggtctgttc

SEQ ID NO: 2523591 - DNA, 25 bp, Homo sapien
gagaacacgttggagttggcgcccc

SEQ ID NO: 2523592 - DNA, 25 bp, Homo sapien
gatttgggtctgttcgaacatggag

SEQ ID NO: 2523593 - DNA, 25 bp, Homo sapien
tcctcgagaggtcagtagacaagcc

SEQ ID NO: 2523594 - DNA, 25 bp, Homo sapien
gaacttgggcattctgactccagag

SEQ ID NO: 2523595 - DNA, 25 bp, Homo sapien
tttgtgtttgtgagtccccgagagc

SEQ ID NO: 2523596 - DNA, 25 bp, Homo sapien
aacattctttttcccagctgcctga

SEQ ID NO: 2523597 - DNA, 25 bp, Homo sapien
tttggcagtcataggtgaggcgggc

SEQ ID NO: 2523598 - DNA, 25 bp, Homo sapien
gtgaggcgggcaccacctaaggccc

SEQ ID NO: 2523599 - DNA, 25 bp, Homo sapien
gcactgcctcccgagaagaattcca

SEQ ID NO: 2523600 - DNA, 25 bp, Homo sapien
aataaccccatgaccgcttttggca

SEQ ID NO: 2523601 - DNA, 25 bp, Homo sapien
ggtttgataaaaggatacatgctca

SEQ ID NO: 2523602 - DNA, 25 bp, Homo sapien
gtttgataaaaggatacatgctcac

SEQ ID NO: 2523603 - DNA, 25 bp, Homo sapien
tttctccaaactgcccagcaggggg

SEQ ID NO: 2523604 - DNA, 25 bp, Homo sapien
attcccaggtgtacttgtttgaaat

SEQ ID NO: 2523605 - DNA, 25 bp, Homo sapien
gacccgtctcatccgtgctgctgct

SEQ ID NO: 2523606 - DNA, 25 bp, Homo sapien
ctggcgaaccaagggcgcggaatct

SEQ ID NO: 2523607 - DNA, 25 bp, Homo sapien
gggcaggcaactcaaagctacgcaa

SEQ ID NO: 2523608 - DNA, 25 bp, Homo sapien
gaggcagcattcagagaacccagaa

SEQ ID NO: 2523609 - DNA, 25 bp, Homo sapien
ccttgtggacataaaatggctgctg

SEQ ID NO: 2523610 - DNA, 25 bp, Homo sapien
tcaaggaagctacccaagataccag

SEQ ID NO: 2523611 - DNA, 25 bp, Homo sapien
cctctttcacttatagggacccttg

SEQ ID NO: 2523612 - DNA, 25 bp, Homo sapien
tcaaagtgtcagcacagctgcattc

SEQ ID NO: 2523613 - DNA, 25 bp, Homo sapien
tccaaagcgcttgtactatcttaca

SEQ ID NO: 2523614 - DNA, 25 bp, Homo sapien
cagaatggctggatcctgcagcagg

SEQ ID NO: 2523615 - DNA, 25 bp, Homo sapien
ggcagaagtataggaatgtattcac

SEQ ID NO: 2523616 - DNA, 25 bp, Homo sapien
cagtgtgtgtagatggtgtcacctg

SEQ ID NO: 2523617 - DNA, 25 bp, Homo sapien
tcgtattatgcttatcggttcagct

SEQ ID NO: 2523618 - DNA, 25 bp, Homo sapien
tggctacacatgagtatcaaagaca

SEQ ID NO: 2523619 - DNA, 25 bp, Homo sapien
cccttaggcctggacagtaagtgga

SEQ ID NO: 2523620 - DNA, 25 bp, Homo sapien
tggactccatcaattccacagcctg

SEQ ID NO: 2523621 - DNA, 25 bp, Homo sapien
cagtaagtggactccatcaattcca

SEQ ID NO: 2523622 - DNA, 25 bp, Homo sapien
taggcctggacagtaagtggactcc

SEQ ID NO: 2523623 - DNA, 25 bp, Homo sapien
gacactcgcagcttcagtttcccag

SEQ ID NO: 2523624 - DNA, 25 bp, Homo sapien
gcagaccccagagacatcccagggt

SEQ ID NO: 2523625 - DNA, 25 bp, Homo sapien
agggtccctcggacactcgcagctt

SEQ ID NO: 2523626 - DNA, 25 bp, Homo sapien
gctcctccatgggtacctacgcaga

SEQ ID NO: 2523627 - DNA, 25 bp, Homo sapien
caaggtctttttccagatctaaggc

SEQ ID NO: 2523628 - DNA, 25 bp, Homo sapien
agtgctactttgtaccctaccctgg

SEQ ID NO: 2523629 - DNA, 25 bp, Homo sapien
tcatattcgaacctgagctcttggc

SEQ ID NO: 2523630 - DNA, 25 bp, Homo sapien
ggaagaggtagctcatattcgaacc

SEQ ID NO: 2523631 - DNA, 25 bp, Homo sapien
tatatcgtgacagcagcctttgaca

SEQ ID NO: 2523632 - DNA, 25 bp, Homo sapien
catttctaacagagcatgtatgggc

SEQ ID NO: 2523633 - DNA, 25 bp, Homo sapien
tgttcagctatgaaactaaccctgg

SEQ ID NO: 2523634 - DNA, 25 bp, Homo sapien
tgccacttgctggaagcaacagctt

SEQ ID NO: 2523635 - DNA, 25 bp, Homo sapien
tcgccttcccagtttctcggaagga

SEQ ID NO: 2523636 - DNA, 25 bp, Homo sapien
ctggatattcctgttaccagaaaaa

SEQ ID NO: 2523637 - DNA, 25 bp, Homo sapien
aacaaagagctggatcgccttccca

SEQ ID NO: 2523638 - DNA, 25 bp, Homo sapien
ggatattcctgttaccagaaaaaca

SEQ ID NO: 2523639 - DNA, 25 bp, Homo sapien
aggcagtgaaggcttctttggccac

SEQ ID NO: 2523640 - DNA, 25 bp, Homo sapien
ctgctttgatcccaggcagtgaagg

SEQ ID NO: 2523641 - DNA, 25 bp, Homo sapien
tgctttgatcccaggcagtgaaggc

SEQ ID NO: 2523642 - DNA, 25 bp, Homo sapien
cccaggcagtgaaggcttctttggc

SEQ ID NO: 2523643 - DNA, 25 bp, Homo sapien
tgtgggccactgtctgtacgagaat

SEQ ID NO: 2523644 - DNA, 25 bp, Homo sapien
gggccacgctagtgattacctctga

SEQ ID NO: 2523645 - DNA, 25 bp, Homo sapien
tgtacgagaatccagattacccttg

SEQ ID NO: 2523646 - DNA, 25 bp, Homo sapien
ccttgagggccacgctagtgattac

SEQ ID NO: 2523647 - DNA, 25 bp, Homo sapien
ttggcagagtcaagtcaatgggagc

SEQ ID NO: 2523648 - DNA, 25 bp, Homo sapien
ggctgcccataattcgaccacggaa

SEQ ID NO: 2523649 - DNA, 25 bp, Homo sapien
cgtctaacgtagaggagccagtccc

SEQ ID NO: 2523650 - DNA, 25 bp, Homo sapien
aagttgaaacaaagactgagttggc

SEQ ID NO: 2523651 - DNA, 25 bp, Homo sapien
gacagacaggttgtgtgaattgccc

SEQ ID NO: 2523652 - DNA, 25 bp, Homo sapien
tgcagaagctggttattacctaggc

SEQ ID NO: 2523653 - DNA, 25 bp, Homo sapien
gaattgccctcagtacttctcattg

SEQ ID NO: 2523654 - DNA, 25 bp, Homo sapien
taggcttgtgtttaccgacagacag

SEQ ID NO: 2523655 - DNA, 25 bp, Homo sapien
gaagagctgccatttgtcgagccca

SEQ ID NO: 2523656 - DNA, 25 bp, Homo sapien
gctagctggagtagaacaagtcact

SEQ ID NO: 2523657 - DNA, 25 bp, Homo sapien
tattggaggcaatctagtggctgag

SEQ ID NO: 2523658 - DNA, 25 bp, Homo sapien
tacctgtttcgcagatgagggaacc

SEQ ID NO: 2523659 - DNA, 25 bp, Homo sapien
cagatgagcccagaacgcaaaggct

SEQ ID NO: 2523660 - DNA, 25 bp, Homo sapien
gacctgcgcagtccagctttctttc

SEQ ID NO: 2523661 - DNA, 25 bp, Homo sapien
ggctgtgcatctccccggaatcttc

SEQ ID NO: 2523662 - DNA, 25 bp, Homo sapien
tcacacgttgaaggccagatgagcc

SEQ ID NO: 2523663 - DNA, 25 bp, Homo sapien
attgttgtgtctccaacaccaagca

SEQ ID NO: 2523664 - DNA, 25 bp, Homo sapien
gactgtgatagccaaaaggatagta

SEQ ID NO: 2523665 - DNA, 25 bp, Homo sapien
cttgagacgtcgtcattgttgtgtc

SEQ ID NO: 2523666 - DNA, 25 bp, Homo sapien
ccaagcacaaagtgggtttgatgaa

SEQ ID NO: 2523667 - DNA, 25 bp, Homo sapien
ggagcccactcattgtgtccactgg

SEQ ID NO: 2523668 - DNA, 25 bp, Homo sapien
gaacaaatcataagctcctctggac

SEQ ID NO: 2523669 - DNA, 25 bp, Homo sapien
gaacatatttttgcagacccactgg

SEQ ID NO: 2523670 - DNA, 25 bp, Homo sapien
tgtatctgaaagtgtccgggaatcc

SEQ ID NO: 2523671 - DNA, 25 bp, Homo sapien
tttaattgcctcaaagcacgtgctc

SEQ ID NO: 2523672 - DNA, 25 bp, Homo sapien
cacaaatattggaaaatcatcaaaa

SEQ ID NO: 2523673 - DNA, 25 bp, Homo sapien
aactttaattgcctcaaagcacgtg

SEQ ID NO: 2523674 - DNA, 25 bp, Homo sapien
taaaaactttaattgcctcaaagca

SEQ ID NO: 2523675 - DNA, 25 bp, Homo sapien
tatggtcgattgacttgcccagccg

SEQ ID NO: 2523676 - DNA, 25 bp, Homo sapien
ttaagactctgtgagccgccgtcgc

SEQ ID NO: 2523677 - DNA, 25 bp, Homo sapien
tcctaggccttgctgctacagatgc

SEQ ID NO: 2523678 - DNA, 25 bp, Homo sapien
gagtgtctgtcatctgctacgagtg

SEQ ID NO: 2523679 - DNA, 25 bp, Homo sapien
tgtagtgaaataaccccaaaatgac

SEQ ID NO: 2523680 - DNA, 25 bp, Homo sapien
taattagcacagtaatcagaggctg

SEQ ID NO: 2523681 - DNA, 25 bp, Homo sapien
gaatgctttagattggtggaggagt

SEQ ID NO: 2523682 - DNA, 25 bp, Homo sapien
cacagtaatcagaggctgtacacag

SEQ ID NO: 2523683 - DNA, 25 bp, Homo sapien
tgaacgcgctaactccgttagcagc

SEQ ID NO: 2523684 - DNA, 25 bp, Homo sapien
ggacgcctgggtaatgactgaacgc

SEQ ID NO: 2523685 - DNA, 25 bp, Homo sapien
aatgaatttgatgtcatctgcccag

SEQ ID NO: 2523686 - DNA, 25 bp, Homo sapien
taatttggcccctcaggcaacagca

SEQ ID NO: 2523687 - DNA, 25 bp, Homo sapien
tggtgctccagtaactccagcaggg

SEQ ID NO: 2523688 - DNA, 25 bp, Homo sapien
cactttgagatacggtgggcttccg

SEQ ID NO: 2523689 - DNA, 25 bp, Homo sapien
gggcttccgttttagatcagtctgg

SEQ ID NO: 2523690 - DNA, 25 bp, Homo sapien
caggtcccaaccagcataggtggct

SEQ ID NO: 2523691 - DNA, 25 bp, Homo sapien
ccagccggccgatttctgtcctttg

SEQ ID NO: 2523692 - DNA, 25 bp, Homo sapien
ctttgaagacgcttgtcagcgagtg

SEQ ID NO: 2523693 - DNA, 25 bp, Homo sapien
agccagccggccgatttctgtcctt

SEQ ID NO: 2523694 - DNA, 25 bp, Homo sapien
ccagccagccggccgatttctgtcc

SEQ ID NO: 2523695 - DNA, 25 bp, Homo sapien
gacccaggagcgcatccattttctg

SEQ ID NO: 2523696 - DNA, 25 bp, Homo sapien
gatgaaaagcgatgctggtttgagc

SEQ ID NO: 2523697 - DNA, 25 bp, Homo sapien
gagatgaaaagcgatgctggtttga

SEQ ID NO: 2523698 - DNA, 25 bp, Homo sapien
tggagacgcctgcaacagtgagctt

SEQ ID NO: 2523699 - DNA, 25 bp, Homo sapien
ctgctctgccttgcgtggttcaact

SEQ ID NO: 2523700 - DNA, 25 bp, Homo sapien
tctgccttgcgtggttcaactccgc

SEQ ID NO: 2523701 - DNA, 25 bp, Homo sapien
cttcttccctgattcgtgtgcccat

SEQ ID NO: 2523702 - DNA, 25 bp, Homo sapien
gctctgccttgcgtggttcaactcc

SEQ ID NO: 2523703 - DNA, 25 bp, Homo sapien
gagaggagacggggtgccggtaatg

SEQ ID NO: 2523704 - DNA, 25 bp, Homo sapien
cctgacttgaggcctaggcacacac

SEQ ID NO: 2523705 - DNA, 25 bp, Homo sapien
ccctgacttgaggcctaggcacaca

SEQ ID NO: 2523706 - DNA, 25 bp, Homo sapien
tccctgacttgaggcctaggcacac

SEQ ID NO: 2523707 - DNA, 25 bp, Homo sapien
ggagtttgtaagtctctgaactgcc

SEQ ID NO: 2523708 - DNA, 25 bp, Homo sapien
gctctgcctggtcttacaaggagtt

SEQ ID NO: 2523709 - DNA, 25 bp, Homo sapien
catgctctgcctggtcttacaagga

SEQ ID NO: 2523710 - DNA, 25 bp, Homo sapien
taagtctctgaactgcccacagcag

SEQ ID NO: 2523711 - DNA, 25 bp, Homo sapien
caaaatcgagagttgccgtatcctc

SEQ ID NO: 2523712 - DNA, 25 bp, Homo sapien
tgggtgtgcctgaagacatcctgcc

SEQ ID NO: 2523713 - DNA, 25 bp, Homo sapien
ggacaaccttctagggccacacaag

SEQ ID NO: 2523714 - DNA, 25 bp, Homo sapien
tcttggtgtggtatgttctatgggc

SEQ ID NO: 2523715 - DNA, 25 bp, Homo sapien
accagaaccaactgcattgatttct

SEQ ID NO: 2523716 - DNA, 25 bp, Homo sapien
accaactgcattgatttctggctgc

SEQ ID NO: 2523717 - DNA, 25 bp, Homo sapien
caactgcattgatttctggctgcag

SEQ ID NO: 2523718 - DNA, 25 bp, Homo sapien
gaaccaactgcattgatttctggct

SEQ ID NO: 2523719 - DNA, 25 bp, Homo sapien
ggagccgtcagaccgcagccaacta

SEQ ID NO: 2523720 - DNA, 25 bp, Homo sapien
tggagccgtcagaccgcagccaact

SEQ ID NO: 2523721 - DNA, 25 bp, Homo sapien
gaccgcagccaactaggcgggccga

SEQ ID NO: 2523722 - DNA, 25 bp, Homo sapien
cgtcagaccgcagccaactaggcgg

SEQ ID NO: 2523723 - DNA, 25 bp, Homo sapien
tcaataagcgttgcattgtggagac

SEQ ID NO: 2523724 - DNA, 25 bp, Homo sapien
taagcgttgcattgtggagacagga

SEQ ID NO: 2523725 - DNA, 25 bp, Homo sapien
tttgggggccatacgcaaattccca

SEQ ID NO: 2523726 - DNA, 25 bp, Homo sapien
actcactcaataagcgttgcattgt

SEQ ID NO: 2523727 - DNA, 25 bp, Homo sapien
gattatctcccacctcaaatggcag

SEQ ID NO: 2523728 - DNA, 25 bp, Homo sapien
tggcagcatttgattcatcttctga

SEQ ID NO: 2523729 - DNA, 25 bp, Homo sapien
ctggaagaaattgaccagattatct

SEQ ID NO: 2523730 - DNA, 25 bp, Homo sapien
ttctgattagttgggaaatccatgg

SEQ ID NO: 2523731 - DNA, 25 bp, Homo sapien
gatgagcagggtgaccagccagaga

SEQ ID NO: 2523732 - DNA, 25 bp, Homo sapien
tagcctggggtgcatcaaagaagga

SEQ ID NO: 2523733 - DNA, 25 bp, Homo sapien
caactggaactgtgtagcctggggt

SEQ ID NO: 2523734 - DNA, 25 bp, Homo sapien
caggtttggctgacctgattatttc

SEQ ID NO: 2523735 - DNA, 25 bp, Homo sapien
ttttcatcaaaagaatcaggtttgg

SEQ ID NO: 2523736 - DNA, 25 bp, Homo sapien
catgagatgtccgaccgggcagctg

SEQ ID NO: 2523737 - DNA, 25 bp, Homo sapien
cagctgggtgccatggtacccccgt

SEQ ID NO: 2523738 - DNA, 25 bp, Homo sapien
tggtacccccgtctgacgaggctga

SEQ ID NO: 2523739 - DNA, 25 bp, Homo sapien
ctgtcgtgcatggacatgagatgtc

SEQ ID NO: 2523740 - DNA, 25 bp, Homo sapien
ccagggccaggtgagcgggcaccat

SEQ ID NO: 2523741 - DNA, 25 bp, Homo sapien
gagtctggtccgcattcttgccaac

SEQ ID NO: 2523742 - DNA, 25 bp, Homo sapien
gtgatggttccaggattaagtgtgc

SEQ ID NO: 2523743 - DNA, 25 bp, Homo sapien
ctcagagcagttatcaccagagtct

SEQ ID NO: 2523744 - DNA, 25 bp, Homo sapien
tcaacaagtggctcgtggatgagtg

SEQ ID NO: 2523745 - DNA, 25 bp, Homo sapien
tctggacacttctgggagccttgga

SEQ ID NO: 2523746 - DNA, 25 bp, Homo sapien
tgctgctgacgggccctcggagcgg

SEQ ID NO: 2523747 - DNA, 25 bp, Homo sapien
ctgtgtctggacacttctgggagcc

SEQ ID NO: 2523748 - DNA, 25 bp, Homo sapien
acacttctgggagccttggacggct

SEQ ID NO: 2523749 - DNA, 25 bp, Homo sapien
gacatctgagcattggtggcagaca

SEQ ID NO: 2523750 - DNA, 25 bp, Homo sapien
tgtccaaagccgactgacatctgag

SEQ ID NO: 2523751 - DNA, 25 bp, Homo sapien
cctccgagggaggatctagcaagct

SEQ ID NO: 2523752 - DNA, 25 bp, Homo sapien
ggttgtgggcatccgagactgtttt

SEQ ID NO: 2523753 - DNA, 25 bp, Homo sapien
gcagcccattgagcttcagagacac

SEQ ID NO: 2523754 - DNA, 25 bp, Homo sapien
aagttcatggaacaccaagagtcag

SEQ ID NO: 2523755 - DNA, 25 bp, Homo sapien
aacagcagcccattgagcttcagag

SEQ ID NO: 2523756 - DNA, 25 bp, Homo sapien
tggaacaccaagagtcagattggcc

SEQ ID NO: 2523757 - DNA, 25 bp, Homo sapien
gctgcagttcccaccgtattctgtt

SEQ ID NO: 2523758 - DNA, 25 bp, Homo sapien
taatcaggcaaagatgtcatgtaca

SEQ ID NO: 2523759 - DNA, 25 bp, Homo sapien
gtcatgtacatgtcacttacaattc

SEQ ID NO: 2523760 - DNA, 25 bp, Homo sapien
ttgcctcagggagttccgggagctg

SEQ ID NO: 2523761 - DNA, 25 bp, Homo sapien
agggccggaccagcttccatgaggc

SEQ ID NO: 2523762 - DNA, 25 bp, Homo sapien
caatggatccaactggtcccagggc

SEQ ID NO: 2523763 - DNA, 25 bp, Homo sapien
gaggctgctgcattgggacaatagt

SEQ ID NO: 2523764 - DNA, 25 bp, Homo sapien
cagcctcaatccaggaccacctggc

SEQ ID NO: 2523765 - DNA, 25 bp, Homo sapien
aaaacgttgacttgagcattgatgg

SEQ ID NO: 2523766 - DNA, 25 bp, Homo sapien
tcatctgataggcaaaaacgttgac

SEQ ID NO: 2523767 - DNA, 25 bp, Homo sapien
gacttgagcattgatggactggaag

SEQ ID NO: 2523768 - DNA, 25 bp, Homo sapien
tctgataggcaaaaacgttgacttg

SEQ ID NO: 2523769 - DNA, 25 bp, Homo sapien
gacaattgacaattgaaggcaactc

SEQ ID NO: 2523770 - DNA, 25 bp, Homo sapien
ccttccaggtcagcgctgcttgcaa

SEQ ID NO: 2523771 - DNA, 25 bp, Homo sapien
cagaggagcgagaacagcaggtcct

SEQ ID NO: 2523772 - DNA, 25 bp, Homo sapien
tacagggacttaatttcccaggcag

SEQ ID NO: 2523773 - DNA, 25 bp, Homo sapien
tataaagctgctcccggcttgtaat

SEQ ID NO: 2523774 - DNA, 25 bp, Homo sapien
tgaatcgaggaaccctgaaactcct

SEQ ID NO: 2523775 - DNA, 25 bp, Homo sapien
aatttctagctgatgactgcagtct

SEQ ID NO: 2523776 - DNA, 25 bp, Homo sapien
aatttgctggttgggatgaatcgag

SEQ ID NO: 2523777 - DNA, 25 bp, Homo sapien
cactgctgtccgtgggttgagctat

SEQ ID NO: 2523778 - DNA, 25 bp, Homo sapien
tgagctatgcttaaatcccctttgt

SEQ ID NO: 2523779 - DNA, 25 bp, Homo sapien
gagggggtgcctatccaaggatctt

SEQ ID NO: 2523780 - DNA, 25 bp, Homo sapien
cccctttgttgaaggcagcagttga

SEQ ID NO: 2523781 - DNA, 25 bp, Homo sapien
gagccataagcattgatctttctga

SEQ ID NO: 2523782 - DNA, 25 bp, Homo sapien
tctgagccataagcattgatctttc

SEQ ID NO: 2523783 - DNA, 25 bp, Homo sapien
tgagccataagcattgatctttctg

SEQ ID NO: 2523784 - DNA, 25 bp, Homo sapien
ctgagccataagcattgatctttct

SEQ ID NO: 2523785 - DNA, 25 bp, Homo sapien
ctttcaggcctcatcagttttacat

SEQ ID NO: 2523786 - DNA, 25 bp, Homo sapien
taagccatatgcactactttcaggc

SEQ ID NO: 2523787 - DNA, 25 bp, Homo sapien
tgctactgaaaaggatttgagtgaa

SEQ ID NO: 2523788 - DNA, 25 bp, Homo sapien
cattgattcctagtgaagtgtttaa

SEQ ID NO: 2523789 - DNA, 25 bp, Homo sapien
tgcggcaatctgattgtcatgcagt

SEQ ID NO: 2523790 - DNA, 25 bp, Homo sapien
tcagcctggcgccacgatgtaatca

SEQ ID NO: 2523791 - DNA, 25 bp, Homo sapien
tggcgccacgatgtaatcagagcct

SEQ ID NO: 2523792 - DNA, 25 bp, Homo sapien
tgtttgcggcaatctgattgtcatg

SEQ ID NO: 2523793 - DNA, 25 bp, Homo sapien
tgatcatcgtaaccttgacgtggaa

SEQ ID NO: 2523794 - DNA, 25 bp, Homo sapien
gggccacctttttgatcatcgtaac

SEQ ID NO: 2523795 - DNA, 25 bp, Homo sapien
ccttgacgtggaagaataatttatc

SEQ ID NO: 2523796 - DNA, 25 bp, Homo sapien
cagccgggccacctttttgatcatc

SEQ ID NO: 2523797 - DNA, 25 bp, Homo sapien
taaaatgggacctcgtgcctgggag

SEQ ID NO: 2523798 - DNA, 25 bp, Homo sapien
caacggtcttgcaagagagactcca

SEQ ID NO: 2523799 - DNA, 25 bp, Homo sapien
tatttatgaaggcaagtcggcacgt

SEQ ID NO: 2523800 - DNA, 25 bp, Homo sapien
cagaagtggtaggacaaaagtctcc

SEQ ID NO: 2523801 - DNA, 25 bp, Homo sapien
tggtgactcagccagtcatgaaggt

SEQ ID NO: 2523802 - DNA, 25 bp, Homo sapien
aaagctgaggaaccccattcagcag

SEQ ID NO: 2523803 - DNA, 25 bp, Homo sapien
agaacctgtttttcagccatcctgg

SEQ ID NO: 2523804 - DNA, 25 bp, Homo sapien
atgggaaagactcctgaaggtccct

SEQ ID NO: 2523805 - DNA, 25 bp, Homo sapien
tatgcctgtgatgagggctcagatg

SEQ ID NO: 2523806 - DNA, 25 bp, Homo sapien
gaagtccaatgatttatgcctgtga

SEQ ID NO: 2523807 - DNA, 25 bp, Homo sapien
ctgagctggaagaccgtgtgcatgt

SEQ ID NO: 2523808 - DNA, 25 bp, Homo sapien
gacatttatgggatggccgtttgga

SEQ ID NO: 2523809 - DNA, 25 bp, Homo sapien
ctcctctcagcctgagtctgcagac

SEQ ID NO: 2523810 - DNA, 25 bp, Homo sapien
gaattgctcctctcagcctgagtct

SEQ ID NO: 2523811 - DNA, 25 bp, Homo sapien
ttgctcctctcagcctgagtctgca

SEQ ID NO: 2523812 - DNA, 25 bp, Homo sapien
ttaagaattgctcctctcagcctga

SEQ ID NO: 2523813 - DNA, 25 bp, Homo sapien
gaaatgatccttcagccgccagctg

SEQ ID NO: 2523814 - DNA, 25 bp, Homo sapien
caccgaagaacccttgacatgtggc

SEQ ID NO: 2523815 - DNA, 25 bp, Homo sapien
gcattcaaatcttgggctaagaaat

SEQ ID NO: 2523816 - DNA, 25 bp, Homo sapien
caaatcttgggctaagaaatgatcc

SEQ ID NO: 2523817 - DNA, 25 bp, Homo sapien
ggcccctctcggctgtggagtctat

SEQ ID NO: 2523818 - DNA, 25 bp, Homo sapien
tggagtctattaggcaagccagcag

SEQ ID NO: 2523819 - DNA, 25 bp, Homo sapien
gaaatttattgctcttccgctgggc

SEQ ID NO: 2523820 - DNA, 25 bp, Homo sapien
ttcattgcagcaaaacagatgttca

SEQ ID NO: 2523821 - DNA, 25 bp, Homo sapien
gaacaaattaggcattctcttttac

SEQ ID NO: 2523822 - DNA, 25 bp, Homo sapien
tgaagagtgggctccaggtaattgc

SEQ ID NO: 2523823 - DNA, 25 bp, Homo sapien
ggtaattgcaggtatgaacaaatta

SEQ ID NO: 2523824 - DNA, 25 bp, Homo sapien
aaattaggcattctcttttacatac

SEQ ID NO: 2523825 - DNA, 25 bp, Homo sapien
cagcatcctggcgttgggcaaatcc

SEQ ID NO: 2523826 - DNA, 25 bp, Homo sapien
cagttgatccgtcttctcagagcca

SEQ ID NO: 2523827 - DNA, 25 bp, Homo sapien
cattcatcatcctgacgttctccag

SEQ ID NO: 2523828 - DNA, 25 bp, Homo sapien
cgtccttgacggtggaacagttgta

SEQ ID NO: 2523829 - DNA, 25 bp, Homo sapien
tccctcaaggacatatttcgaaaac

SEQ ID NO: 2523830 - DNA, 25 bp, Homo sapien
tggcatagccctggaaatcgatgac

SEQ ID NO: 2523831 - DNA, 25 bp, Homo sapien
tttcgaaaaccttcagtgggctggc

SEQ ID NO: 2523832 - DNA, 25 bp, Homo sapien
gctgtgtggcatagccctggaaatc

SEQ ID NO: 2523833 - DNA, 25 bp, Homo sapien
agccgacctgctcgcagatccagca

SEQ ID NO: 2523834 - DNA, 25 bp, Homo sapien
acagccgacctgctcgcagatccag

SEQ ID NO: 2523835 - DNA, 25 bp, Homo sapien
agcagctgagcacagccgacctgct

SEQ ID NO: 2523836 - DNA, 25 bp, Homo sapien
gcacagccgacctgctcgcagatcc

SEQ ID NO: 2523837 - DNA, 25 bp, Homo sapien
cgcacatctgctggataaagacgga

SEQ ID NO: 2523838 - DNA, 25 bp, Homo sapien
ctcctgatgagatgtcaaggtcggg

SEQ ID NO: 2523839 - DNA, 25 bp, Homo sapien
tattgtaattgtaacgccggccgca

SEQ ID NO: 2523840 - DNA, 25 bp, Homo sapien
gaacaggccccttgttcgggatcca

SEQ ID NO: 2523841 - DNA, 25 bp, Homo sapien
cttgttggcaagcagcgtgtaggca

SEQ ID NO: 2523842 - DNA, 25 bp, Homo sapien
caagcagcgtgtaggcatcttgagg

SEQ ID NO: 2523843 - DNA, 25 bp, Homo sapien
tgctactggcttgttggcaagcagc

SEQ ID NO: 2523844 - DNA, 25 bp, Homo sapien
tactggcttgttggcaagcagcgtg

SEQ ID NO: 2523845 - DNA, 25 bp, Homo sapien
aacaccctccttcagaaatgtgact

SEQ ID NO: 2523846 - DNA, 25 bp, Homo sapien
aaaacaacaccctccttcagaaatg

SEQ ID NO: 2523847 - DNA, 25 bp, Homo sapien
gacttgaaaaatagcactgggttca

SEQ ID NO: 2523848 - DNA, 25 bp, Homo sapien
accctccttcagaaatgtgacttga

SEQ ID NO: 2523849 - DNA, 25 bp, Homo sapien
ctaagttgggaatgtgcgtgccctg

SEQ ID NO: 2523850 - DNA, 25 bp, Homo sapien
gggaatgtgcgtgccctgcatcctg

SEQ ID NO: 2523851 - DNA, 25 bp, Homo sapien
aagttgggaatgtgcgtgccctgca

SEQ ID NO: 2523852 - DNA, 25 bp, Homo sapien
ttgggaatgtgcgtgccctgcatcc

SEQ ID NO: 2523853 - DNA, 25 bp, Homo sapien
tggtctagggcaggccggtctgtca

SEQ ID NO: 2523854 - DNA, 25 bp, Homo sapien
atgagatgggtggagagaaggtcac

SEQ ID NO: 2523855 - DNA, 25 bp, Homo sapien
gtcacggatccacaggccctggtct

SEQ ID NO: 2523856 - DNA, 25 bp, Homo sapien
gagaaggtcacggatccacaggccc

SEQ ID NO: 2523857 - DNA, 25 bp, Homo sapien
caggaagtccagcagaattggtggg

SEQ ID NO: 2523858 - DNA, 25 bp, Homo sapien
gatgtacgtataggatgcagccaaa

SEQ ID NO: 2523859 - DNA, 25 bp, Homo sapien
caggaacatttagttcgacctctca

SEQ ID NO: 2523860 - DNA, 25 bp, Homo sapien
ggtgtcgtcacttggctcagtgtct

SEQ ID NO: 2523861 - DNA, 25 bp, Homo sapien
ttctagttgctgggaggcattggct

SEQ ID NO: 2523862 - DNA, 25 bp, Homo sapien
ccctggccggggcttctagttgctg

SEQ ID NO: 2523863 - DNA, 25 bp, Homo sapien
gctgggaggcattggctccttgcca

SEQ ID NO: 2523864 - DNA, 25 bp, Homo sapien
agcctccctggccggggcttctagt

SEQ ID NO: 2523865 - DNA, 25 bp, Homo sapien
caggcataattgtctgtgaggacac

SEQ ID NO: 2523866 - DNA, 25 bp, Homo sapien
gaacatagtgtcagacacggccggg

SEQ ID NO: 2523867 - DNA, 25 bp, Homo sapien
gcattgtgggaaggcaccagtgtcc

SEQ ID NO: 2523868 - DNA, 25 bp, Homo sapien
tggttggacttatcctgctctgcaa

SEQ ID NO: 2523869 - DNA, 25 bp, Homo sapien
cttctgaatccaggagtcttcaatg

SEQ ID NO: 2523870 - DNA, 25 bp, Homo sapien
cttccttgcatataagccagcaaag

SEQ ID NO: 2523871 - DNA, 25 bp, Homo sapien
ttcttctgaatccaggagtcttcaa

SEQ ID NO: 2523872 - DNA, 25 bp, Homo sapien
ccttgcatataagccagcaaagcac

SEQ ID NO: 2523873 - DNA, 25 bp, Homo sapien
tcggcgtcccccagccgtgaagcag

SEQ ID NO: 2523874 - DNA, 25 bp, Homo sapien
tgtgctcggcgtcccccagccgtga

SEQ ID NO: 2523875 - DNA, 25 bp, Homo sapien
cgtgaagcagatgaggcggcatgct

SEQ ID NO: 2523876 - DNA, 25 bp, Homo sapien
tcctgctcgcgcctgtgctcggcgt

SEQ ID NO: 2523877 - DNA, 25 bp, Homo sapien
gcccacgtccatagagttcctcaga

SEQ ID NO: 2523878 - DNA, 25 bp, Homo sapien
cagacatttgcagagctcgaatggg

SEQ ID NO: 2523879 - DNA, 25 bp, Homo sapien
gaagacagcccacgtccatagagtt

SEQ ID NO: 2523880 - DNA, 25 bp, Homo sapien
ggggtataaacccagcctagactgc

SEQ ID NO: 2523881 - DNA, 25 bp, Homo sapien
ctcttctgagctggtatttcggaga

SEQ ID NO: 2523882 - DNA, 25 bp, Homo sapien
ctggtatttcggagaacttgtcagg

SEQ ID NO: 2523883 - DNA, 25 bp, Homo sapien
gttcttttagctccgctcttctgag

SEQ ID NO: 2523884 - DNA, 25 bp, Homo sapien
tcagtgacatttgggcagccgcctt

SEQ ID NO: 2523885 - DNA, 25 bp, Homo sapien
tggaggttcggctggcagtttgcca

SEQ ID NO: 2523886 - DNA, 25 bp, Homo sapien
cagtttgccagccatagggggagga

SEQ ID NO: 2523887 - DNA, 25 bp, Homo sapien
gaagcagaagtaggacaaggaccag

SEQ ID NO: 2523888 - DNA, 25 bp, Homo sapien
tttgccagccatagggggaggaggt

SEQ ID NO: 2523889 - DNA, 25 bp, Homo sapien
catcattgcaggttgaggcatagag

SEQ ID NO: 2523890 - DNA, 25 bp, Homo sapien
gttgaggcatagagggcagaatctg

SEQ ID NO: 2523891 - DNA, 25 bp, Homo sapien
agagttgctgtgcaccccgtgccca

SEQ ID NO: 2523892 - DNA, 25 bp, Homo sapien
gaatctggaagctggacctgcacat

SEQ ID NO: 2523893 - DNA, 25 bp, Homo sapien
ttctgtgtggccccctgatctgcat

SEQ ID NO: 2523894 - DNA, 25 bp, Homo sapien
tgtgtggccccctgatctgcatgcc

SEQ ID NO: 2523895 - DNA, 25 bp, Homo sapien
ctgagcccccctcgtactcttgcct

SEQ ID NO: 2523896 - DNA, 25 bp, Homo sapien
tgagcccccctcgtactcttgcctc

SEQ ID NO: 2523897 - DNA, 25 bp, Homo sapien
cctcctctcgcttgtccaccagtct

SEQ ID NO: 2523898 - DNA, 25 bp, Homo sapien
tggaattcctgccacatcagacgtc

SEQ ID NO: 2523899 - DNA, 25 bp, Homo sapien
ctgcctcctctcgcttgtccaccag

SEQ ID NO: 2523900 - DNA, 25 bp, Homo sapien
gaattcctgccacatcagacgtcca

SEQ ID NO: 2523901 - DNA, 25 bp, Homo sapien
tagttggcttgtaaggcagcggcat

SEQ ID NO: 2523902 - DNA, 25 bp, Homo sapien
gctgcaataacctgtggcctgggaa

SEQ ID NO: 2523903 - DNA, 25 bp, Homo sapien
tccgggaacagctggcctctgtcaa

SEQ ID NO: 2523904 - DNA, 25 bp, Homo sapien
cagaggctgctatttcttgtcccca

SEQ ID NO: 2523905 - DNA, 25 bp, Homo sapien
tctcagctcaggagtaaccccagag

SEQ ID NO: 2523906 - DNA, 25 bp, Homo sapien
tatagtcttttgaacacggaaatcc

SEQ ID NO: 2523907 - DNA, 25 bp, Homo sapien
tgtacttaaagctagcggacccgtg

SEQ ID NO: 2523908 - DNA, 25 bp, Homo sapien
tgacgggatttgattaagcacttag

SEQ ID NO: 2523909 - DNA, 25 bp, Homo sapien
tatacgcagactccgattcctagag

SEQ ID NO: 2523910 - DNA, 25 bp, Homo sapien
gaacctgctagaaggtcacctcggg

SEQ ID NO: 2523911 - DNA, 25 bp, Homo sapien
gagagtctgtaaacctacgccagga

SEQ ID NO: 2523912 - DNA, 25 bp, Homo sapien
gaccagggccaacgtaccttgagag

SEQ ID NO: 2523913 - DNA, 25 bp, Homo sapien
gactgtaaacatgacccagggtgag

SEQ ID NO: 2523914 - DNA, 25 bp, Homo sapien
cctgtgagagccaccacggagacac

SEQ ID NO: 2523915 - DNA, 25 bp, Homo sapien
tcaaggagtgtctggagagccctgt

SEQ ID NO: 2523916 - DNA, 25 bp, Homo sapien
agggcccgcggccagagagccactg

SEQ ID NO: 2523917 - DNA, 25 bp, Homo sapien
gacacagacagggcccgcggccaga

SEQ ID NO: 2523918 - DNA, 25 bp, Homo sapien
ctgcactaactgtgcatttgctttt

SEQ ID NO: 2523919 - DNA, 25 bp, Homo sapien
accctgaaggcctggtcaggagctg

SEQ ID NO: 2523920 - DNA, 25 bp, Homo sapien
tcctctggcaggtcccggagcaagg

SEQ ID NO: 2523921 - DNA, 25 bp, Homo sapien
cctggattctccttagtgttgcacg

SEQ ID NO: 2523922 - DNA, 25 bp, Homo sapien
catggtcctaaaggcccactcagaa

SEQ ID NO: 2523923 - DNA, 25 bp, Homo sapien
cacatggtcctaaaggcccactcag

SEQ ID NO: 2523924 - DNA, 25 bp, Homo sapien
ggtcctaaaggcccactcagaatcc

SEQ ID NO: 2523925 - DNA, 25 bp, Homo sapien
tcacatggtcctaaaggcccactca

SEQ ID NO: 2523926 - DNA, 25 bp, Homo sapien
aaaaccaggccactcagggcctggg

SEQ ID NO: 2523927 - DNA, 25 bp, Homo sapien
tgcccatgatttccctcaggatctg

SEQ ID NO: 2523928 - DNA, 25 bp, Homo sapien
cagtctctccaggacccggcctgtc

SEQ ID NO: 2523929 - DNA, 25 bp, Homo sapien
tgtcccagagggcatagagcttgtg

SEQ ID NO: 2523930 - DNA, 25 bp, Homo sapien
gtgcagccgggcgaagggggccatg

SEQ ID NO: 2523931 - DNA, 25 bp, Homo sapien
ggcccggatctcctggccatagcac

SEQ ID NO: 2523932 - DNA, 25 bp, Homo sapien
ctggccatagcactcgtgcagccgg

SEQ ID NO: 2523933 - DNA, 25 bp, Homo sapien
ggatctcctggccatagcactcgtg

SEQ ID NO: 2523934 - DNA, 25 bp, Homo sapien
cttgggcgggagggcactgggccgg

SEQ ID NO: 2523935 - DNA, 25 bp, Homo sapien
cagagggcagggacgggggcaaggg

SEQ ID NO: 2523936 - DNA, 25 bp, Homo sapien
gggcagaaggcagggatgggactgg

SEQ ID NO: 2523937 - DNA, 25 bp, Homo sapien
ctgggaccggggctggggcagaagg

SEQ ID NO: 2523938 - DNA, 25 bp, Homo sapien
tggggcagggccatgccacccccgc

SEQ ID NO: 2523939 - DNA, 25 bp, Homo sapien
ctggggcagggccatgccacccccg

SEQ ID NO: 2523940 - DNA, 25 bp, Homo sapien
gcagggccatgccacccccgccacg

SEQ ID NO: 2523941 - DNA, 25 bp, Homo sapien
gggccatgccacccccgccacgtac

SEQ ID NO: 2523942 - DNA, 25 bp, Homo sapien
ccagctgctgctccagctcgcgcac

SEQ ID NO: 2523943 - DNA, 25 bp, Homo sapien
agccgccagctgctgctccagctcg

SEQ ID NO: 2523944 - DNA, 25 bp, Homo sapien
cgccagctgctgctccagctcgcgc

SEQ ID NO: 2523945 - DNA, 25 bp, Homo sapien
gccgccagctgctgctccagctcgc

SEQ ID NO: 2523946 - DNA, 25 bp, Homo sapien
aagctggcacgcgacagggccttga

SEQ ID NO: 2523947 - DNA, 25 bp, Homo sapien
cagccgcaggtagtcgaagctggca

SEQ ID NO: 2523948 - DNA, 25 bp, Homo sapien
gggtccccgcaaagcgcacagcgaa

SEQ ID NO: 2523949 - DNA, 25 bp, Homo sapien
acagcgaaggcgaactcctcggcgg

SEQ ID NO: 2523950 - DNA, 25 bp, Homo sapien
gatgatgacgcccacgggctcacgg

SEQ ID NO: 2523951 - DNA, 25 bp, Homo sapien
gcagcacgaaccagcgccggtggta

SEQ ID NO: 2523952 - DNA, 25 bp, Homo sapien
gctggcagcgtcctcgaagtagaag

SEQ ID NO: 2523953 - DNA, 25 bp, Homo sapien
agtagaagagcatgttcccgcgcag

SEQ ID NO: 2523954 - DNA, 25 bp, Homo sapien
gggcgtcacaggtggcgtagaaggc

SEQ ID NO: 2523955 - DNA, 25 bp, Homo sapien
ggtggcgtagaaggccaggctgcgc

SEQ ID NO: 2523956 - DNA, 25 bp, Homo sapien
tccaccggggcgtcacaggtggcgt

SEQ ID NO: 2523957 - DNA, 25 bp, Homo sapien
tcacaggtggcgtagaaggccaggc

SEQ ID NO: 2523958 - DNA, 25 bp, Homo sapien
ggtggcaatcgcggggcctggaggg

SEQ ID NO: 2523959 - DNA, 25 bp, Homo sapien
ctgacgctcatagggtggaagcagc

SEQ ID NO: 2523960 - DNA, 25 bp, Homo sapien
gcacaaggccactgacgctaggtca

SEQ ID NO: 2523961 - DNA, 25 bp, Homo sapien
tgaggaaactgacgctcatagggtg

SEQ ID NO: 2523962 - DNA, 25 bp, Homo sapien
tagaagggctgttatgcacaaggcc

SEQ ID NO: 2523963 - DNA, 25 bp, Homo sapien
cataacctcctaccctcctgtatcc

SEQ ID NO: 2523964 - DNA, 25 bp, Homo sapien
ccccagacagcctcataacctccta

SEQ ID NO: 2523965 - DNA, 25 bp, Homo sapien
aacctcctaccctcctgtatccctg

SEQ ID NO: 2523966 - DNA, 25 bp, Homo sapien
agacagcctcataacctcctaccct

SEQ ID NO: 2523967 - DNA, 25 bp, Homo sapien
ttgcggggaaatagatggagctgga

SEQ ID NO: 2523968 - DNA, 25 bp, Homo sapien
atcatgtcctttgcggggaaataga

SEQ ID NO: 2523969 - DNA, 25 bp, Homo sapien
gatcatgtcctttgcggggaaatag

SEQ ID NO: 2523970 - DNA, 25 bp, Homo sapien
tcctttgcggggaaatagatggagc

SEQ ID NO: 2523971 - DNA, 25 bp, Homo sapien
cctgcttgcccagttccgctcctac

SEQ ID NO: 2523972 - DNA, 25 bp, Homo sapien
ccctgcttgcccagttccgctccta

SEQ ID NO: 2523973 - DNA, 25 bp, Homo sapien
ccgccctgcttgcccagttccgctc

SEQ ID NO: 2523974 - DNA, 25 bp, Homo sapien
gccctgcttgcccagttccgctcct

SEQ ID NO: 2523975 - DNA, 25 bp, Homo sapien
cagctcgctcttctctggattcaaa

SEQ ID NO: 2523976 - DNA, 25 bp, Homo sapien
gattcaaatgtcagctctgcagcat

SEQ ID NO: 2523977 - DNA, 25 bp, Homo sapien
ctccagcctcagctcgctcttctct

SEQ ID NO: 2523978 - DNA, 25 bp, Homo sapien
ctctcaggccaccacttgcctccct

SEQ ID NO: 2523979 - DNA, 25 bp, Homo sapien
aggcaggctattcatctctctgggc

SEQ ID NO: 2523980 - DNA, 25 bp, Homo sapien
ccaggcaggctattcatctctctgg

SEQ ID NO: 2523981 - DNA, 25 bp, Homo sapien
gaccccaggcaggctattcatctct

SEQ ID NO: 2523982 - DNA, 25 bp, Homo sapien
cccaggcaggctattcatctctctg

SEQ ID NO: 2523983 - DNA, 25 bp, Homo sapien
tctgaattctagtgcctggcatgca

SEQ ID NO: 2523984 - DNA, 25 bp, Homo sapien
atttctgcctgcaggggcgtttgtg

SEQ ID NO: 2523985 - DNA, 25 bp, Homo sapien
ggcgtttgtggtctgaattctagtg

SEQ ID NO: 2523986 - DNA, 25 bp, Homo sapien
tgtggtctgaattctagtgcctggc

SEQ ID NO: 2523987 - DNA, 25 bp, Homo sapien
catggttcgggactggcccggtggc

SEQ ID NO: 2523988 - DNA, 25 bp, Homo sapien
gggagcaaccggacagtccgcgacc

SEQ ID NO: 2523989 - DNA, 25 bp, Homo sapien
agcgcggatccgacggaaggaggcg

SEQ ID NO: 2523990 - DNA, 25 bp, Homo sapien
gcagcgctttgtctcctgggcggcc

SEQ ID NO: 2523991 - DNA, 25 bp, Homo sapien
gcgatgatgaaagccgtggtcgcta

SEQ ID NO: 2523992 - DNA, 25 bp, Homo sapien
tgatgaaagccgtggtcgctattgc

SEQ ID NO: 2523993 - DNA, 25 bp, Homo sapien
cagccctgcgggcactgataaggcc

SEQ ID NO: 2523994 - DNA, 25 bp, Homo sapien
gaaagccgtggtcgctattgcaccg

SEQ ID NO: 2523995 - DNA, 25 bp, Homo sapien
gacctgccggcgttgagtgggtggg

SEQ ID NO: 2523996 - DNA, 25 bp, Homo sapien
ctggtgacctgccggcgttgagtgg

SEQ ID NO: 2523997 - DNA, 25 bp, Homo sapien
tgagtgggtggggctaaagtcgccc

SEQ ID NO: 2523998 - DNA, 25 bp, Homo sapien
gtgacctgccggcgttgagtgggtg

SEQ ID NO: 2523999 - DNA, 25 bp, Homo sapien
cagccgcggactagcgggattggta

SEQ ID NO: 2524000 - DNA, 25 bp, Homo sapien
gtggcttcgcaaggcctcgcctttt

SEQ ID NO: 2524001 - DNA, 25 bp, Homo sapien
cgcgaaatcgggtgggcacgtggtg

SEQ ID NO: 2524002 - DNA, 25 bp, Homo sapien
tcttcagactgtgggacgcgaaatc

SEQ ID NO: 2524003 - DNA, 25 bp, Homo sapien
ccacacacgtgttagggagagcgtt

SEQ ID NO: 2524004 - DNA, 25 bp, Homo sapien
gctaagagggtagcgccctgattca

SEQ ID NO: 2524005 - DNA, 25 bp, Homo sapien
cagccaactcggatggaggcgttcc

SEQ ID NO: 2524006 - DNA, 25 bp, Homo sapien
tgaggcgctggccattttccgagcc

SEQ ID NO: 2524007 - DNA, 25 bp, Homo sapien
caaggtaagtaagccctgcccgcgg

SEQ ID NO: 2524008 - DNA, 25 bp, Homo sapien
ccgaccgcgtgctggagctcttcga

SEQ ID NO: 2524009 - DNA, 25 bp, Homo sapien
agctcttcgacccacccaaggtaag

SEQ ID NO: 2524010 - DNA, 25 bp, Homo sapien
agtgtccagagggaactaggccctc

SEQ ID NO: 2524011 - DNA, 25 bp, Homo sapien
ttcaagtacgtagcatgccacagca

SEQ ID NO: 2524012 - DNA, 25 bp, Homo sapien
gagacaggaactcttgatcccaagg

SEQ ID NO: 2524013 - DNA, 25 bp, Homo sapien
gagagtgtataacccagctccaggc

SEQ ID NO: 2524014 - DNA, 25 bp, Homo sapien
caacctaaagtggagagatttcaca

SEQ ID NO: 2524015 - DNA, 25 bp, Homo sapien
ctctgcgcctcagtggctcattaca

SEQ ID NO: 2524016 - DNA, 25 bp, Homo sapien
tacagaaaatgggatgccagcactt

SEQ ID NO: 2524017 - DNA, 25 bp, Homo sapien
gggcagatggacagggtcaggttca

SEQ ID NO: 2524018 - DNA, 25 bp, Homo sapien
ttagtgggttgttttgagccaactg

SEQ ID NO: 2524019 - DNA, 25 bp, Homo sapien
ccccgcccactgtttggcctctgga

SEQ ID NO: 2524020 - DNA, 25 bp, Homo sapien
tatctcccctctgagttgaggagga

SEQ ID NO: 2524021 - DNA, 25 bp, Homo sapien
ggaaccactgggtgacagtgtacat

SEQ ID NO: 2524022 - DNA, 25 bp, Homo sapien
tgtttggcctctggaaccactgggt

SEQ ID NO: 2524023 - DNA, 25 bp, Homo sapien
ttttgctggtatagatgaccctggg

SEQ ID NO: 2524024 - DNA, 25 bp, Homo sapien
tatgagcacttctgatccgttcttg

SEQ ID NO: 2524025 - DNA, 25 bp, Homo sapien
ccataaaattcgcttgtgtaaagcg

SEQ ID NO: 2524026 - DNA, 25 bp, Homo sapien
tatgtcagtcttggtgcccacttct

SEQ ID NO: 2524027 - DNA, 25 bp, Homo sapien
tgtgaagtagtttctcagtgtggtg

SEQ ID NO: 2524028 - DNA, 25 bp, Homo sapien
gtcttcttgattgtagccatcccag

SEQ ID NO: 2524029 - DNA, 25 bp, Homo sapien
cagccatcttaaagggtgtgaagta

SEQ ID NO: 2524030 - DNA, 25 bp, Homo sapien
catcattgcgtgagaggactccagt

SEQ ID NO: 2524031 - DNA, 25 bp, Homo sapien
ttctgtttctggcattggggggctc

SEQ ID NO: 2524032 - DNA, 25 bp, Homo sapien
tgtctgggaaatagggggatgttct

SEQ ID NO: 2524033 - DNA, 25 bp, Homo sapien
aaagggcttttctggcagccatgtg

SEQ ID NO: 2524034 - DNA, 25 bp, Homo sapien
caggaaagggcttttctggcagcca

SEQ ID NO: 2524035 - DNA, 25 bp, Homo sapien
ttttgaaaaatgttgccggcctgtg

SEQ ID NO: 2524036 - DNA, 25 bp, Homo sapien
tcgtgtccttgatggtgtgacgccc

SEQ ID NO: 2524037 - DNA, 25 bp, Homo sapien
tctggaaccatgacgtcctacttgg

SEQ ID NO: 2524038 - DNA, 25 bp, Homo sapien
caggattgtcctttgctctggaacc

SEQ ID NO: 2524039 - DNA, 25 bp, Homo sapien
cctccagtaagaaggtcaacaggac

SEQ ID NO: 2524040 - DNA, 25 bp, Homo sapien
caggatctggaatttgctctgcgcc

SEQ ID NO: 2524041 - DNA, 25 bp, Homo sapien
tagtgtcctgcccaaggtttcaaag

SEQ ID NO: 2524042 - DNA, 25 bp, Homo sapien
gaaagcaaactgaacctccagttag

SEQ ID NO: 2524043 - DNA, 25 bp, Homo sapien
gcataggtgtggcagaggcgtggct

SEQ ID NO: 2524044 - DNA, 25 bp, Homo sapien
ctgctgtacaccgatgaatgtgggc

SEQ ID NO: 2524045 - DNA, 25 bp, Homo sapien
tggtgctggagggtcgactgaggcc

SEQ ID NO: 2524046 - DNA, 25 bp, Homo sapien
acaccgatgaatgtgggctcaaagg

SEQ ID NO: 2524047 - DNA, 25 bp, Homo sapien
gtgggcggtctctccccaaggctgg

SEQ ID NO: 2524048 - DNA, 25 bp, Homo sapien
agaccaccagggagctagtgtggcc

SEQ ID NO: 2524049 - DNA, 25 bp, Homo sapien
ggtgggcggtctctccccaaggctg

SEQ ID NO: 2524050 - DNA, 25 bp, Homo sapien
ccaccagggagctagtgtggcctgg

SEQ ID NO: 2524051 - DNA, 25 bp, Homo sapien
agaaaaagctcaagctgattcccac

SEQ ID NO: 2524052 - DNA, 25 bp, Homo sapien
aaagctcaagctgattcccacagcc

SEQ ID NO: 2524053 - DNA, 25 bp, Homo sapien
aaaaagctcaagctgattcccacag

SEQ ID NO: 2524054 - DNA, 25 bp, Homo sapien
gctcaagctgattcccacagccttg

SEQ ID NO: 2524055 - DNA, 25 bp, Homo sapien
tccacgtaggtgtggtcacgccacc

SEQ ID NO: 2524056 - DNA, 25 bp, Homo sapien
cgtaggtgtggtcacgccaccagag

SEQ ID NO: 2524057 - DNA, 25 bp, Homo sapien
ggcctttgactggtgtgtccagccc

SEQ ID NO: 2524058 - DNA, 25 bp, Homo sapien
gccttgctctccacgtaggtgtggt

SEQ ID NO: 2524059 - DNA, 25 bp, Homo sapien
tggtgcacacggcttgagatgcctg

SEQ ID NO: 2524060 - DNA, 25 bp, Homo sapien
catccaggaggtccggtggtgcaca

SEQ ID NO: 2524061 - DNA, 25 bp, Homo sapien
gatgcctgacaacctttacaccttt

SEQ ID NO: 2524062 - DNA, 25 bp, Homo sapien
tcaaggcccaagctacaagcagctt

SEQ ID NO: 2524063 - DNA, 25 bp, Homo sapien
gaaaactcccatggctctaggaaga

SEQ ID NO: 2524064 - DNA, 25 bp, Homo sapien
tccgcacaggaaaggtacccagtag

SEQ ID NO: 2524065 - DNA, 25 bp, Homo sapien
aactcataggactgactgcctggga

SEQ ID NO: 2524066 - DNA, 25 bp, Homo sapien
catacatctctcaggtggtgccaag

SEQ ID NO: 2524067 - DNA, 25 bp, Homo sapien
ttggcctttcggttcctccagggca

SEQ ID NO: 2524068 - DNA, 25 bp, Homo sapien
gctgatgtgttcatgactttcaagg

SEQ ID NO: 2524069 - DNA, 25 bp, Homo sapien
ggtccaagtatcttccactgcaagt

SEQ ID NO: 2524070 - DNA, 25 bp, Homo sapien
taacttccagtttcggcaagcagag

SEQ ID NO: 2524071 - DNA, 25 bp, Homo sapien
caactgctgttggtggtgggcttgt

SEQ ID NO: 2524072 - DNA, 25 bp, Homo sapien
aactgctgttggtggtgggcttgta

SEQ ID NO: 2524073 - DNA, 25 bp, Homo sapien
ttacaactgctgttggtggtgggct

SEQ ID NO: 2524074 - DNA, 25 bp, Homo sapien
tacaactgctgttggtggtgggctt

SEQ ID NO: 2524075 - DNA, 25 bp, Homo sapien
gattgtaaactatcctcgtgctagc

SEQ ID NO: 2524076 - DNA, 25 bp, Homo sapien
tccacctgtgcgagcagaatgcttt

SEQ ID NO: 2524077 - DNA, 25 bp, Homo sapien
cagactgtgaagtatcgccatggca

SEQ ID NO: 2524078 - DNA, 25 bp, Homo sapien
tgtgcacactcctggacgggtcttg

SEQ ID NO: 2524079 - DNA, 25 bp, Homo sapien
ccgggtggctgtgtcgtcattagca

SEQ ID NO: 2524080 - DNA, 25 bp, Homo sapien
cagttggatgagaaggaaccattcc

SEQ ID NO: 2524081 - DNA, 25 bp, Homo sapien
gaaatgcgctgttgtcgagactgga

SEQ ID NO: 2524082 - DNA, 25 bp, Homo sapien
catcattggcgcatgggcagttgga

SEQ ID NO: 2524083 - DNA, 25 bp, Homo sapien
gaaacagagagctcttttacgcata

SEQ ID NO: 2524084 - DNA, 25 bp, Homo sapien
tccggcttcaacaacatgtcaactg

SEQ ID NO: 2524085 - DNA, 25 bp, Homo sapien
tttacgcatacaggcaacatctccg

SEQ ID NO: 2524086 - DNA, 25 bp, Homo sapien
ctgtgttcctttcactgggctggga

SEQ ID NO: 2524087 - DNA, 25 bp, Homo sapien
tgttctagactacgataagccttgg

SEQ ID NO: 2524088 - DNA, 25 bp, Homo sapien
ctaaactttgcagggtgaggacgcc

SEQ ID NO: 2524089 - DNA, 25 bp, Homo sapien
tatctattgacctgaagacgcgctt

SEQ ID NO: 2524090 - DNA, 25 bp, Homo sapien
tagacactggatccaagggcagctt

SEQ ID NO: 2524091 - DNA, 25 bp, Homo sapien
gatccaactgagtcgcatctctagc

SEQ ID NO: 2524092 - DNA, 25 bp, Homo sapien
gagagatagatccaactgagtcgca

SEQ ID NO: 2524093 - DNA, 25 bp, Homo sapien
gatagatccaactgagtcgcatctc

SEQ ID NO: 2524094 - DNA, 25 bp, Homo sapien
aactgagtcgcatctctagcccaca

SEQ ID NO: 2524095 - DNA, 25 bp, Homo sapien
tgagactctgtgaaggccatcatcc

SEQ ID NO: 2524096 - DNA, 25 bp, Homo sapien
cccttagggccagatcacgtgtatt

SEQ ID NO: 2524097 - DNA, 25 bp, Homo sapien
tcaaggccagcgttagagcccaact

SEQ ID NO: 2524098 - DNA, 25 bp, Homo sapien
taacaatcaagttgacaggccccgg

SEQ ID NO: 2524099 - DNA, 25 bp, Homo sapien
tattctgtggcgactgcgtgttgga

SEQ ID NO: 2524100 - DNA, 25 bp, Homo sapien
ggatggatcgtaaagacagtctgtt

SEQ ID NO: 2524101 - DNA, 25 bp, Homo sapien
tatacgccggctgaacgtgagaagg

SEQ ID NO: 2524102 - DNA, 25 bp, Homo sapien
cagtctgttgtgctgctgggaaact

SEQ ID NO: 2524103 - DNA, 25 bp, Homo sapien
tggccagatggagagcctgggcggc

SEQ ID NO: 2524104 - DNA, 25 bp, Homo sapien
gatggagagcctgggcggcctggtg

SEQ ID NO: 2524105 - DNA, 25 bp, Homo sapien
gccagatggagagcctgggcggcct

SEQ ID NO: 2524106 - DNA, 25 bp, Homo sapien
cagatggagagcctgggcggcctgg

SEQ ID NO: 2524107 - DNA, 25 bp, Homo sapien
ctgggtgcaggatgacttccaccat

SEQ ID NO: 2524108 - DNA, 25 bp, Homo sapien
gactgggtgcaggatgacttccacc

SEQ ID NO: 2524109 - DNA, 25 bp, Homo sapien
actgggtgcaggatgacttccacca

SEQ ID NO: 2524110 - DNA, 25 bp, Homo sapien
gtagcgttagggtgcgcatactgct

SEQ ID NO: 2524111 - DNA, 25 bp, Homo sapien
tagggtgcgcatactgctgagcaag

SEQ ID NO: 2524112 - DNA, 25 bp, Homo sapien
tgggtgcagggtagcgttagggtgc

SEQ ID NO: 2524113 - DNA, 25 bp, Homo sapien
ctgagggtgtggagtatgtgggtgc

SEQ ID NO: 2524114 - DNA, 25 bp, Homo sapien
taggtgcacactctttagctcaagg

SEQ ID NO: 2524115 - DNA, 25 bp, Homo sapien
actgtgtatggtatgtggcaaggcc

SEQ ID NO: 2524116 - DNA, 25 bp, Homo sapien
cctggagcaatgtcctgagggcaca

SEQ ID NO: 2524117 - DNA, 25 bp, Homo sapien
ggagcatgtacacaaccgatgtctg

SEQ ID NO: 2524118 - DNA, 25 bp, Homo sapien
cagaagcagagtaggatgtgttcac

SEQ ID NO: 2524119 - DNA, 25 bp, Homo sapien
tctttgtgaatctcagcgtgggcca

SEQ ID NO: 2524120 - DNA, 25 bp, Homo sapien
caaaggacaacatgatgggccagtt

SEQ ID NO: 2524121 - DNA, 25 bp, Homo sapien
caaaaacagtaagttgagaatcaga

SEQ ID NO: 2524122 - DNA, 25 bp, Homo sapien
ctcctccaagttgtataggcactga

SEQ ID NO: 2524123 - DNA, 25 bp, Homo sapien
ttggtggcttattaacaggccctcc

SEQ ID NO: 2524124 - DNA, 25 bp, Homo sapien
ggcttattaacaggccctccatcat

SEQ ID NO: 2524125 - DNA, 25 bp, Homo sapien
cattaagtttacttccagctcctcc

SEQ ID NO: 2524126 - DNA, 25 bp, Homo sapien
ttcgaacctgagtttgttgtacttg

SEQ ID NO: 2524127 - DNA, 25 bp, Homo sapien
tttgatgtaaatttcgaacctgagt

SEQ ID NO: 2524128 - DNA, 25 bp, Homo sapien
gatgtaaatttcgaacctgagtttg

SEQ ID NO: 2524129 - DNA, 25 bp, Homo sapien
atttcgaacctgagtttgttgtact

SEQ ID NO: 2524130 - DNA, 25 bp, Homo sapien
tagtgatgtctacagttgtccatgg

SEQ ID NO: 2524131 - DNA, 25 bp, Homo sapien
tccatggtcccctactgttaaacca

SEQ ID NO: 2524132 - DNA, 25 bp, Homo sapien
tagctaatacggtggacagtgcagt

SEQ ID NO: 2524133 - DNA, 25 bp, Homo sapien
gcccagccacaaaatgttctactgg

SEQ ID NO: 2524134 - DNA, 25 bp, Homo sapien
attatgcccatgaaatctcataatt

SEQ ID NO: 2524135 - DNA, 25 bp, Homo sapien
atatgtatcatacgttgtaaacaaa

SEQ ID NO: 2524136 - DNA, 25 bp, Homo sapien
aaatatgtatcatacgttgtaaaca

SEQ ID NO: 2524137 - DNA, 25 bp, Homo sapien
aatatgtatcatacgttgtaaacaa

SEQ ID NO: 2524138 - DNA, 25 bp, Homo sapien
cctccttgaatttgaaattgggaga

SEQ ID NO: 2524139 - DNA, 25 bp, Homo sapien
taataacactaaccacattccagaa

SEQ ID NO: 2524140 - DNA, 25 bp, Homo sapien
gattctaaacatatgatcagtcaaa

SEQ ID NO: 2524141 - DNA, 25 bp, Homo sapien
ggcagtgggttctgacccacacata

SEQ ID NO: 2524142 - DNA, 25 bp, Homo sapien
gtttcccactcagtgttccttgaca

SEQ ID NO: 2524143 - DNA, 25 bp, Homo sapien
tccagaagaaagctctgcccagact

SEQ ID NO: 2524144 - DNA, 25 bp, Homo sapien
acctgtgctgtccaagataatgacc

SEQ ID NO: 2524145 - DNA, 25 bp, Homo sapien
ttacaaattgccctacaaataggaa

SEQ ID NO: 2524146 - DNA, 25 bp, Homo sapien
catgaaggagcaactatttctgtac

SEQ ID NO: 2524147 - DNA, 25 bp, Homo sapien
gcttgtctccttgttgtatggtaat

SEQ ID NO: 2524148 - DNA, 25 bp, Homo sapien
ggcttgtctccttgttgtatggtaa

SEQ ID NO: 2524149 - DNA, 25 bp, Homo sapien
gtctccttgttgtatggtaatttgg

SEQ ID NO: 2524150 - DNA, 25 bp, Homo sapien
ccttgttgtatggtaatttgggaca

SEQ ID NO: 2524151 - DNA, 25 bp, Homo sapien
tgtatttaaatacacctggaaggat

SEQ ID NO: 2524152 - DNA, 25 bp, Homo sapien
gtggagggattatggatgcttttca

SEQ ID NO: 2524153 - DNA, 25 bp, Homo sapien
taattcaatagacacacaattttgc

SEQ ID NO: 2524154 - DNA, 25 bp, Homo sapien
taatggctctagttagtcggaaaag

SEQ ID NO: 2524155 - DNA, 25 bp, Homo sapien
gttttcaatgcctttggctatggct

SEQ ID NO: 2524156 - DNA, 25 bp, Homo sapien
aactgttcagtaatgttagcatatg

SEQ ID NO: 2524157 - DNA, 25 bp, Homo sapien
cattttgcagtcattagtggtccta

SEQ ID NO: 2524158 - DNA, 25 bp, Homo sapien
ctaagatagctagaaagaggtcaag

SEQ ID NO: 2524159 - DNA, 25 bp, Homo sapien
tatacaaattcctatcagcagtgag

SEQ ID NO: 2524160 - DNA, 25 bp, Homo sapien
tttgtggcagacaagaacctccagg

SEQ ID NO: 2524161 - DNA, 25 bp, Homo sapien
ctggcatgaaagaaccggctctaat

SEQ ID NO: 2524162 - DNA, 25 bp, Homo sapien
tacaattaaattacggatgggcctc

SEQ ID NO: 2524163 - DNA, 25 bp, Homo sapien
tctcattaacctacggaatgttaaa

SEQ ID NO: 2524164 - DNA, 25 bp, Homo sapien
gaaggatgattgctgctgcccaagt

SEQ ID NO: 2524165 - DNA, 25 bp, Homo sapien
gctgcccaagtcctattctcattaa

SEQ ID NO: 2524166 - DNA, 25 bp, Homo sapien
caggaaggatgattgctgctgccca

SEQ ID NO: 2524167 - DNA, 25 bp, Homo sapien
ctcgttcaggacatctaaacttaaa

SEQ ID NO: 2524168 - DNA, 25 bp, Homo sapien
taaacatactcgttcaggacatcta

SEQ ID NO: 2524169 - DNA, 25 bp, Homo sapien
catactcgttcaggacatctaaact

SEQ ID NO: 2524170 - DNA, 25 bp, Homo sapien
ttgcctaaacatactcgttcaggac

SEQ ID NO: 2524171 - DNA, 25 bp, Homo sapien
tatgtaatgccagtgaccctcagat

SEQ ID NO: 2524172 - DNA, 25 bp, Homo sapien
tcgtaggcaggatataccaaagcat

SEQ ID NO: 2524173 - DNA, 25 bp, Homo sapien
aaattctcttgcatgtcgtaggcag

SEQ ID NO: 2524174 - DNA, 25 bp, Homo sapien
ttcatgctggagaacacctttatgc

SEQ ID NO: 2524175 - DNA, 25 bp, Homo sapien
gtacagaagtagaaactatttgcca

SEQ ID NO: 2524176 - DNA, 25 bp, Homo sapien
actggaagagacaaacaaagtgctt

SEQ ID NO: 2524177 - DNA, 25 bp, Homo sapien
tcttgaccctcaatgtcataaaagg

SEQ ID NO: 2524178 - DNA, 25 bp, Homo sapien
agagatctgaagaccaggtacagaa

SEQ ID NO: 2524179 - DNA, 25 bp, Homo sapien
catacatcgcatgcgtctgctcatg

SEQ ID NO: 2524180 - DNA, 25 bp, Homo sapien
catgagccccgtactgagttgctga

SEQ ID NO: 2524181 - DNA, 25 bp, Homo sapien
ggtggtgccatcattctagcattac

SEQ ID NO: 2524182 - DNA, 25 bp, Homo sapien
catgcgtctgctcatgagccccgta

SEQ ID NO: 2524183 - DNA, 25 bp, Homo sapien
ctgtattacaggactatagacatga

SEQ ID NO: 2524184 - DNA, 25 bp, Homo sapien
gaaagcacattaacactgcaaatag

SEQ ID NO: 2524185 - DNA, 25 bp, Homo sapien
aagcacattaacactgcaaatagag

SEQ ID NO: 2524186 - DNA, 25 bp, Homo sapien
aagaaagcacattaacactgcaaat

SEQ ID NO: 2524187 - DNA, 25 bp, Homo sapien
gcacattaacactgcaaatagagcc

SEQ ID NO: 2524188 - DNA, 25 bp, Homo sapien
ctgagactgataatgtggcacatgc

SEQ ID NO: 2524189 - DNA, 25 bp, Homo sapien
gaactgctgaggactgtaggcaaca

SEQ ID NO: 2524190 - DNA, 25 bp, Homo sapien
tgctgacgctgggtgcatcatggca

SEQ ID NO: 2524191 - DNA, 25 bp, Homo sapien
taggcaacatattgcgtggagtaag

SEQ ID NO: 2524192 - DNA, 25 bp, Homo sapien
tcatggccctcagacttgatcaagt

SEQ ID NO: 2524193 - DNA, 25 bp, Homo sapien
tgtgttcacatggtctaggaggctc

SEQ ID NO: 2524194 - DNA, 25 bp, Homo sapien
catatggtattttctgggacgggca

SEQ ID NO: 2524195 - DNA, 25 bp, Homo sapien
taggaggctctgaatgatttgaccc

SEQ ID NO: 2524196 - DNA, 25 bp, Homo sapien
tagaacttgttcataaaatcctaag

SEQ ID NO: 2524197 - DNA, 25 bp, Homo sapien
tttgcccgattatgctaactgagct

SEQ ID NO: 2524198 - DNA, 25 bp, Homo sapien
aaaaagctagtcaagtatactatgg

SEQ ID NO: 2524199 - DNA, 25 bp, Homo sapien
taactgcaaatttgtggctaaacat

SEQ ID NO: 2524200 - DNA, 25 bp, Homo sapien
ccgggcccagccaagatatatttta

SEQ ID NO: 2524201 - DNA, 25 bp, Homo sapien
tcctattagattagtgaagcagagt

SEQ ID NO: 2524202 - DNA, 25 bp, Homo sapien
cagaaaattcaaggtaatctgaaaa

SEQ ID NO: 2524203 - DNA, 25 bp, Homo sapien
gaattacattattatctatccatct

SEQ ID NO: 2524204 - DNA, 25 bp, Homo sapien
tgaaatcaaccatatacctaaccat

SEQ ID NO: 2524205 - DNA, 25 bp, Homo sapien
gcttgataaataaggcttcattaaa

SEQ ID NO: 2524206 - DNA, 25 bp, Homo sapien
ctcttcaaaaaaaaccgcagactgg

SEQ ID NO: 2524207 - DNA, 25 bp, Homo sapien
aaaattaacaatactggctcttcaa

SEQ ID NO: 2524208 - DNA, 25 bp, Homo sapien
cccgcaacctcgctcaagcgattgt

SEQ ID NO: 2524209 - DNA, 25 bp, Homo sapien
gatcacccctccatcgccctccaaa

SEQ ID NO: 2524210 - DNA, 25 bp, Homo sapien
cataggaatgcgcttctgtgcctgg

SEQ ID NO: 2524211 - DNA, 25 bp, Homo sapien
actgcaacctcgatcacccctccat

SEQ ID NO: 2524212 - DNA, 25 bp, Homo sapien
tcagcaattccaattctaggtattt

SEQ ID NO: 2524213 - DNA, 25 bp, Homo sapien
agcaattccaattctaggtatttaa

SEQ ID NO: 2524214 - DNA, 25 bp, Homo sapien
tacctcagcaattccaattctaggt

SEQ ID NO: 2524215 - DNA, 25 bp, Homo sapien
catacctcagcaattccaattctag

SEQ ID NO: 2524216 - DNA, 25 bp, Homo sapien
tggtcttaaaactcccggtcatgtg

SEQ ID NO: 2524217 - DNA, 25 bp, Homo sapien
tacgaaggctctttaaccacacaag

SEQ ID NO: 2524218 - DNA, 25 bp, Homo sapien
tgcaactacattatacgacaactcc

SEQ ID NO: 2524219 - DNA, 25 bp, Homo sapien
acaccatgacggctggctaagattt

SEQ ID NO: 2524220 - DNA, 25 bp, Homo sapien
aaacttagttactcaattcatgcag

SEQ ID NO: 2524221 - DNA, 25 bp, Homo sapien
tgcaaactacaagcaaacacaggca

SEQ ID NO: 2524222 - DNA, 25 bp, Homo sapien
caaacacaggcaggattattctcac

SEQ ID NO: 2524223 - DNA, 25 bp, Homo sapien
catcaaaaagtcagagctaaactac

SEQ ID NO: 2524224 - DNA, 25 bp, Homo sapien
gattcactggcatgggcgtcatagg

SEQ ID NO: 2524225 - DNA, 25 bp, Homo sapien
gcgtcataggtattgggtataaagg

SEQ ID NO: 2524226 - DNA, 25 bp, Homo sapien
ttggcttgattcactggcatgggcg

SEQ ID NO: 2524227 - DNA, 25 bp, Homo sapien
gctctatatgtcttggcttgattca

SEQ ID NO: 2524228 - DNA, 25 bp, Homo sapien
cactgggactggatacatcatattt

SEQ ID NO: 2524229 - DNA, 25 bp, Homo sapien
tcatatttggtgcaaaacaaacagg

SEQ ID NO: 2524230 - DNA, 25 bp, Homo sapien
caaacaggctgagtataaactggag

SEQ ID NO: 2524231 - DNA, 25 bp, Homo sapien
aactggagttggctgttgatgaccc

SEQ ID NO: 2524232 - DNA, 25 bp, Homo sapien
actcctttgcattgggattcaatgt

SEQ ID NO: 2524233 - DNA, 25 bp, Homo sapien
ctgagagaaggaacgtgggttgaac

SEQ ID NO: 2524234 - DNA, 25 bp, Homo sapien
acgtgggttgaactcctttgcattg

SEQ ID NO: 2524235 - DNA, 25 bp, Homo sapien
tgcattgggattcaatgttgatttc

SEQ ID NO: 2524236 - DNA, 25 bp, Homo sapien
ttttcaatgaaagaatccttagcac

SEQ ID NO: 2524237 - DNA, 25 bp, Homo sapien
gctggaagtctgaaccccttgggaa

SEQ ID NO: 2524238 - DNA, 25 bp, Homo sapien
ccttagcacttggttcaattttgtc

SEQ ID NO: 2524239 - DNA, 25 bp, Homo sapien
aggtcccctcttgtgctccgtgtta

SEQ ID NO: 2524240 - DNA, 25 bp, Homo sapien
gtaaagtgtcagctagtctaaggtg

SEQ ID NO: 2524241 - DNA, 25 bp, Homo sapien
tgctaagagagtctatagaaaaagc

SEQ ID NO: 2524242 - DNA, 25 bp, Homo sapien
tcatttaaataagatcagacacttc

SEQ ID NO: 2524243 - DNA, 25 bp, Homo sapien
gatggagaatagtctaagtaaaagg

SEQ ID NO: 2524244 - DNA, 25 bp, Homo sapien
tgagaaagttcaacgaaatccaaga

SEQ ID NO: 2524245 - DNA, 25 bp, Homo sapien
ggacaccagtgaccaattcccaagt

SEQ ID NO: 2524246 - DNA, 25 bp, Homo sapien
cccaagtgataagagatatgtgaac

SEQ ID NO: 2524247 - DNA, 25 bp, Homo sapien
gaactttcagacagaattcaagctg

SEQ ID NO: 2524248 - DNA, 25 bp, Homo sapien
cctacacagccaaaaaggttgcctt

SEQ ID NO: 2524249 - DNA, 25 bp, Homo sapien
taggacaacggacctaagccacagc

SEQ ID NO: 2524250 - DNA, 25 bp, Homo sapien
taactgagggagtacaattgcaacg

SEQ ID NO: 2524251 - DNA, 25 bp, Homo sapien
taaagtagactgcaaaaccaaggac

SEQ ID NO: 2524252 - DNA, 25 bp, Homo sapien
gggcgtgtcacttgagtccaagtgt

SEQ ID NO: 2524253 - DNA, 25 bp, Homo sapien
cgagtccgcagtgcaaggtgaaagc

SEQ ID NO: 2524254 - DNA, 25 bp, Homo sapien
gtcactctcctatgaccttttttaa

SEQ ID NO: 2524255 - DNA, 25 bp, Homo sapien
tgagcaccaagtcactctcctatga

SEQ ID NO: 2524256 - DNA, 25 bp, Homo sapien
cgtgcccgccaacaaatgaaaactt

SEQ ID NO: 2524257 - DNA, 25 bp, Homo sapien
tgttaccaataagtcaagaatgaag

SEQ ID NO: 2524258 - DNA, 25 bp, Homo sapien
gcctgtgctaagacagagaaataat

SEQ ID NO: 2524259 - DNA, 25 bp, Homo sapien
tcctttctaagaagctaagtttcaa

SEQ ID NO: 2524260 - DNA, 25 bp, Homo sapien
taaatcatcaatctgttttctatgt

SEQ ID NO: 2524261 - DNA, 25 bp, Homo sapien
ttaaatcatcaatctgttttctatg

SEQ ID NO: 2524262 - DNA, 25 bp, Homo sapien
aaatcatcaatctgttttctatgtt

SEQ ID NO: 2524263 - DNA, 25 bp, Homo sapien
ctttaaatcatcaatctgttttcta

SEQ ID NO: 2524264 - DNA, 25 bp, Homo sapien
cagcttttgagaagctaggtgatgt

SEQ ID NO: 2524265 - DNA, 25 bp, Homo sapien
cctctgatcttgaagcctggaatct

SEQ ID NO: 2524266 - DNA, 25 bp, Homo sapien
ctaggtgatgtttcattgggtttaa

SEQ ID NO: 2524267 - DNA, 25 bp, Homo sapien
gagaagctaggtgatgtttcattgg

SEQ ID NO: 2524268 - DNA, 25 bp, Homo sapien
ttcgatgcaggactagcaggcgtag

SEQ ID NO: 2524269 - DNA, 25 bp, Homo sapien
tctgttcgatgcaggactagcaggc

SEQ ID NO: 2524270 - DNA, 25 bp, Homo sapien
actagcaggcgtaggagatgcagct

SEQ ID NO: 2524271 - DNA, 25 bp, Homo sapien
gggtaacagctctgttcgatgcagg

SEQ ID NO: 2524272 - DNA, 25 bp, Homo sapien
aacagcttcagttggaataatacca

SEQ ID NO: 2524273 - DNA, 25 bp, Homo sapien
ggcaacagcttcagttggaataata

SEQ ID NO: 2524274 - DNA, 25 bp, Homo sapien
caacagcttcagttggaataatacc

SEQ ID NO: 2524275 - DNA, 25 bp, Homo sapien
acagcttcagttggaataataccag

SEQ ID NO: 2524276 - DNA, 25 bp, Homo sapien
tgagttttaggggataatcttggaa

SEQ ID NO: 2524277 - DNA, 25 bp, Homo sapien
ctatgagttttaggggataatcttg

SEQ ID NO: 2524278 - DNA, 25 bp, Homo sapien
ggtctatgagttttaggggataatc

SEQ ID NO: 2524279 - DNA, 25 bp, Homo sapien
agacctgggtctatgagttttaggg

SEQ ID NO: 2524280 - DNA, 25 bp, Homo sapien
agtcttaagataattgaagaccaag

SEQ ID NO: 2524281 - DNA, 25 bp, Homo sapien
tgtgcatcacatgaagctgagcaga

SEQ ID NO: 2524282 - DNA, 25 bp, Homo sapien
ttacaagaacgcgccacaatgccca

SEQ ID NO: 2524283 - DNA, 25 bp, Homo sapien
cctgaccggctgaagaagattttta

SEQ ID NO: 2524284 - DNA, 25 bp, Homo sapien
ggaattagtgccatatacagatgct

SEQ ID NO: 2524285 - DNA, 25 bp, Homo sapien
atatgatgaataagtggtagagccc

SEQ ID NO: 2524286 - DNA, 25 bp, Homo sapien
tcaaacagagttgtagctcagccct

SEQ ID NO: 2524287 - DNA, 25 bp, Homo sapien
catcattatgcccaagtgttaccta

SEQ ID NO: 2524288 - DNA, 25 bp, Homo sapien
ggttgtgggatacaaattctaggcc

SEQ ID NO: 2524289 - DNA, 25 bp, Homo sapien
aactctgtgatttcgaggatgtcgc

SEQ ID NO: 2524290 - DNA, 25 bp, Homo sapien
ctggatatggaacccctcccagcag

SEQ ID NO: 2524291 - DNA, 25 bp, Homo sapien
ccccgagggactggtccttgctact

SEQ ID NO: 2524292 - DNA, 25 bp, Homo sapien
acaaaaacatgaacaaattgtggta

SEQ ID NO: 2524293 - DNA, 25 bp, Homo sapien
aaaacatgaacaaattgtggtattg

SEQ ID NO: 2524294 - DNA, 25 bp, Homo sapien
caaaaacatgaacaaattgtggtat

SEQ ID NO: 2524295 - DNA, 25 bp, Homo sapien
acatgaacaaattgtggtattgtac

SEQ ID NO: 2524296 - DNA, 25 bp, Homo sapien
gactggtagcgagaaggtgggcgag

SEQ ID NO: 2524297 - DNA, 25 bp, Homo sapien
ctggagaaccatgagcagaggggtg

SEQ ID NO: 2524298 - DNA, 25 bp, Homo sapien
agagttgggacctgactggtagcga

SEQ ID NO: 2524299 - DNA, 25 bp, Homo sapien
ggtgggcgagaggaaggagatgggc

SEQ ID NO: 2524300 - DNA, 25 bp, Homo sapien
caaatgatatgaaggaaagtataaa

SEQ ID NO: 2524301 - DNA, 25 bp, Homo sapien
ctgacagaacaaatgatatgaagga

SEQ ID NO: 2524302 - DNA, 25 bp, Homo sapien
agaacaaatgatatgaaggaaagta

SEQ ID NO: 2524303 - DNA, 25 bp, Homo sapien
gaacaaatgatatgaaggaaagtat

SEQ ID NO: 2524304 - DNA, 25 bp, Homo sapien
attttaaccctttgaggacagtcat

SEQ ID NO: 2524305 - DNA, 25 bp, Homo sapien
catttgatttgtgataagttttagc

SEQ ID NO: 2524306 - DNA, 25 bp, Homo sapien
atgatttcttgtacattttaaccct

SEQ ID NO: 2524307 - DNA, 25 bp, Homo sapien
cctttgaggacagtcatttgatttg

SEQ ID NO: 2524308 - DNA, 25 bp, Homo sapien
aggctggcccatacgcggtgaattc

SEQ ID NO: 2524309 - DNA, 25 bp, Homo sapien
ttcgggttgaaatctgaagtgtgag

SEQ ID NO: 2524310 - DNA, 25 bp, Homo sapien
tctttggtctgaaccagaattcggg

SEQ ID NO: 2524311 - DNA, 25 bp, Homo sapien
ctctatttctttgtccaggaggaat

SEQ ID NO: 2524312 - DNA, 25 bp, Homo sapien
taggtggttaccaaattctcacagt

SEQ ID NO: 2524313 - DNA, 25 bp, Homo sapien
tcaggctcatcccttaactaggtgg

SEQ ID NO: 2524314 - DNA, 25 bp, Homo sapien
tcatcaggtgataaactcttctccc

SEQ ID NO: 2524315 - DNA, 25 bp, Homo sapien
gggtgctctttagcatgacatgcca

SEQ ID NO: 2524316 - DNA, 25 bp, Homo sapien
cttgagttgtgtatccaaaatactg

SEQ ID NO: 2524317 - DNA, 25 bp, Homo sapien
tccaaaatactgcatcatgatttcc

SEQ ID NO: 2524318 - DNA, 25 bp, Homo sapien
ttgagttgtgtatccaaaatactgc

SEQ ID NO: 2524319 - DNA, 25 bp, Homo sapien
ctagtgtttatgctgtgcccctcac

SEQ ID NO: 2524320 - DNA, 25 bp, Homo sapien
tccagggccactcgagctttgtact

SEQ ID NO: 2524321 - DNA, 25 bp, Homo sapien
ttctgagttatctctttctaagggc

SEQ ID NO: 2524322 - DNA, 25 bp, Homo sapien
tgagttatctctttctaagggcact

SEQ ID NO: 2524323 - DNA, 25 bp, Homo sapien
cgagctttgtactgggcacttgact

SEQ ID NO: 2524324 - DNA, 25 bp, Homo sapien
cattatatcgaaacatatcattggg

SEQ ID NO: 2524325 - DNA, 25 bp, Homo sapien
gtatacgaagataaactgctatcat

SEQ ID NO: 2524326 - DNA, 25 bp, Homo sapien
tatcgaaacatatcattgggatccc

SEQ ID NO: 2524327 - DNA, 25 bp, Homo sapien
catacgtagacactacaccataatt

SEQ ID NO: 2524328 - DNA, 25 bp, Homo sapien
cactgatagcagagtcagtaaaagc

SEQ ID NO: 2524329 - DNA, 25 bp, Homo sapien
tcgccattcactttagcactgatag

SEQ ID NO: 2524330 - DNA, 25 bp, Homo sapien
ctttgtgttcgccattcactttagc

SEQ ID NO: 2524331 - DNA, 25 bp, Homo sapien
ctgatagcagagtcagtaaaagcat

SEQ ID NO: 2524332 - DNA, 25 bp, Homo sapien
cagctccaccagcagcactactccc

SEQ ID NO: 2524333 - DNA, 25 bp, Homo sapien
gctccaccagcagcactactcccat

SEQ ID NO: 2524334 - DNA, 25 bp, Homo sapien
ctctgggcttagctgccagctccac

SEQ ID NO: 2524335 - DNA, 25 bp, Homo sapien
ctgggcttagctgccagctccacca

SEQ ID NO: 2524336 - DNA, 25 bp, Homo sapien
tggagagttagcacgaaatgaggct

SEQ ID NO: 2524337 - DNA, 25 bp, Homo sapien
tataagtaatgcatttcaggccaac

SEQ ID NO: 2524338 - DNA, 25 bp, Homo sapien
ggccaacattgcatcattagctaga

SEQ ID NO: 2524339 - DNA, 25 bp, Homo sapien
caagatctgggtatccattctgcac

SEQ ID NO: 2524340 - DNA, 25 bp, Homo sapien
cagtatagatgcttttgatttccca

SEQ ID NO: 2524341 - DNA, 25 bp, Homo sapien
cggaaatagttgtggtactgcttaa

SEQ ID NO: 2524342 - DNA, 25 bp, Homo sapien
acagaacttaggaggctatgtttcc

SEQ ID NO: 2524343 - DNA, 25 bp, Homo sapien
tgaaagcaggatgctacaacgccgt

SEQ ID NO: 2524344 - DNA, 25 bp, Homo sapien
tataagtatttcagtggtggctcac

SEQ ID NO: 2524345 - DNA, 25 bp, Homo sapien
aacatttgaagacatcagtgtccca

SEQ ID NO: 2524346 - DNA, 25 bp, Homo sapien
cagccccagcgtatttcccatatat

SEQ ID NO: 2524347 - DNA, 25 bp, Homo sapien
tcacagctgtgtaacccatggatag

SEQ ID NO: 2524348 - DNA, 25 bp, Homo sapien
aacagaatttaggaattgaaatgcc

SEQ ID NO: 2524349 - DNA, 25 bp, Homo sapien
cagaattaggttaaggaaaagtcag

SEQ ID NO: 2524350 - DNA, 25 bp, Homo sapien
tctcaaacctatggcaaaagtgttc

SEQ ID NO: 2524351 - DNA, 25 bp, Homo sapien
taattccaattcttacagctgtaca

SEQ ID NO: 2524352 - DNA, 25 bp, Homo sapien
aaggtatcgatcttttacttcatga

SEQ ID NO: 2524353 - DNA, 25 bp, Homo sapien
tatctaatttgtccccaatgtccca

SEQ ID NO: 2524354 - DNA, 25 bp, Homo sapien
tcacagatttgctccagtgtagtct

SEQ ID NO: 2524355 - DNA, 25 bp, Homo sapien
tttgctctggtagtcatgcttataa

SEQ ID NO: 2524356 - DNA, 25 bp, Homo sapien
cacagcaaagttgaggccgtaaaca

SEQ ID NO: 2524357 - DNA, 25 bp, Homo sapien
gagaacacaacagcacaccagaata

SEQ ID NO: 2524358 - DNA, 25 bp, Homo sapien
gactttggcaaacatgatagggtag

SEQ ID NO: 2524359 - DNA, 25 bp, Homo sapien
tgtcacgccgttcagaagagatccc

SEQ ID NO: 2524360 - DNA, 25 bp, Homo sapien
gctttcatcagcatatcaagacagt

SEQ ID NO: 2524361 - DNA, 25 bp, Homo sapien
taatttagtgctcctagacataaac

SEQ ID NO: 2524362 - DNA, 25 bp, Homo sapien
ttccttgtatgggatgctgaaggcc

SEQ ID NO: 2524363 - DNA, 25 bp, Homo sapien
gacaaggacatttgagaagattcaa

SEQ ID NO: 2524364 - DNA, 25 bp, Homo sapien
ttaaactgtaccacaacaaagtctg

SEQ ID NO: 2524365 - DNA, 25 bp, Homo sapien
catatctttaaactgtaccacaaca

SEQ ID NO: 2524366 - DNA, 25 bp, Homo sapien
tatctttaaactgtaccacaacaaa

SEQ ID NO: 2524367 - DNA, 25 bp, Homo sapien
gtccatatctttaaactgtaccaca

SEQ ID NO: 2524368 - DNA, 25 bp, Homo sapien
tctgtacttttctcatgtgcggcat

SEQ ID NO: 2524369 - DNA, 25 bp, Homo sapien
tacttttctcatgtgcggcatcaag

SEQ ID NO: 2524370 - DNA, 25 bp, Homo sapien
cgtttcggccccgaactggattctg

SEQ ID NO: 2524371 - DNA, 25 bp, Homo sapien
catgtgcggcatcaagtaccaaatc

SEQ ID NO: 2524372 - DNA, 25 bp, Homo sapien
tccctctattagctcacaatgctta

SEQ ID NO: 2524373 - DNA, 25 bp, Homo sapien
caagagaatcataccctttttccca

SEQ ID NO: 2524374 - DNA, 25 bp, Homo sapien
gaattctttagctcatcaaggtacc

SEQ ID NO: 2524375 - DNA, 25 bp, Homo sapien
tcaaggtaccagttcttatatgcct

SEQ ID NO: 2524376 - DNA, 25 bp, Homo sapien
aaaactccttcatatatacctccat

SEQ ID NO: 2524377 - DNA, 25 bp, Homo sapien
aaaaactccttcatatatacctcca

SEQ ID NO: 2524378 - DNA, 25 bp, Homo sapien
taaaaactccttcatatatacctcc

SEQ ID NO: 2524379 - DNA, 25 bp, Homo sapien
tgtaagtatatgaaccatcctcata

SEQ ID NO: 2524380 - DNA, 25 bp, Homo sapien
tgatgtaagtatatgaaccatcctc

SEQ ID NO: 2524381 - DNA, 25 bp, Homo sapien
tttgcatagattccatcaaaagaaa

SEQ ID NO: 2524382 - DNA, 25 bp, Homo sapien
ttgcatagattccatcaaaagaaat

SEQ ID NO: 2524383 - DNA, 25 bp, Homo sapien
ccatcatgtgggacttatagtttct

SEQ ID NO: 2524384 - DNA, 25 bp, Homo sapien
catgtgggacttatagtttctgccc

SEQ ID NO: 2524385 - DNA, 25 bp, Homo sapien
tcaaaaatttgtgatagcttctcat

SEQ ID NO: 2524386 - DNA, 25 bp, Homo sapien
tcatgtgggacttatagtttctgcc

SEQ ID NO: 2524387 - DNA, 25 bp, Homo sapien
gaggcagtcctttgttactgtttcg

SEQ ID NO: 2524388 - DNA, 25 bp, Homo sapien
cgtagactgaggcagtcctttgtta

SEQ ID NO: 2524389 - DNA, 25 bp, Homo sapien
gcagtcctttgttactgtttcgacc

SEQ ID NO: 2524390 - DNA, 25 bp, Homo sapien
tgaggcagtcctttgttactgtttc

SEQ ID NO: 2524391 - DNA, 25 bp, Homo sapien
gcatttctggtaaagactggaaaac

SEQ ID NO: 2524392 - DNA, 25 bp, Homo sapien
tgtgatggcaatacatgcatacctc

SEQ ID NO: 2524393 - DNA, 25 bp, Homo sapien
tgcctagcctccagtacttctaaaa

SEQ ID NO: 2524394 - DNA, 25 bp, Homo sapien
ttttgacaagctgaccgtctgtgga

SEQ ID NO: 2524395 - DNA, 25 bp, Homo sapien
agaaagggataaaaggcttggtcat

SEQ ID NO: 2524396 - DNA, 25 bp, Homo sapien
ccttcagtgcctttaccccttgagt

SEQ ID NO: 2524397 - DNA, 25 bp, Homo sapien
tgcctttaccccttgagtccctcta

SEQ ID NO: 2524398 - DNA, 25 bp, Homo sapien
gagaaagggataaaaggcttggtca

SEQ ID NO: 2524399 - DNA, 25 bp, Homo sapien
ctgtcgcctgggatggtatacagtg

SEQ ID NO: 2524400 - DNA, 25 bp, Homo sapien
cctgggatggtatacagtggcgcaa

SEQ ID NO: 2524401 - DNA, 25 bp, Homo sapien
cgcctgggatggtatacagtggcgc

SEQ ID NO: 2524402 - DNA, 25 bp, Homo sapien
actctgtcgcctgggatggtataca

SEQ ID NO: 2524403 - DNA, 25 bp, Homo sapien
aggcgcccgcccagccccaagtctg

SEQ ID NO: 2524404 - DNA, 25 bp, Homo sapien
cgcccgcccagccccaagtctggtt

SEQ ID NO: 2524405 - DNA, 25 bp, Homo sapien
tacaggcgcccgcccagccccaagt

SEQ ID NO: 2524406 - DNA, 25 bp, Homo sapien
ggcgcccgcccagccccaagtctgg

SEQ ID NO: 2524407 - DNA, 25 bp, Homo sapien
tgggcctgagaactcgaggttgcaa

SEQ ID NO: 2524408 - DNA, 25 bp, Homo sapien
cttgggcctgagaactcgaggttgc

SEQ ID NO: 2524409 - DNA, 25 bp, Homo sapien
cacttgggcctgagaactcgaggtt

SEQ ID NO: 2524410 - DNA, 25 bp, Homo sapien
gggcctgagaactcgaggttgcaat

SEQ ID NO: 2524411 - DNA, 25 bp, Homo sapien
cttggccccatagattgaggctgca

SEQ ID NO: 2524412 - DNA, 25 bp, Homo sapien
ggagaggtgtaataaaatcctacaa

SEQ ID NO: 2524413 - DNA, 25 bp, Homo sapien
gggagaggtgtaataaaatcctaca

SEQ ID NO: 2524414 - DNA, 25 bp, Homo sapien
ttggccccatagattgaggctgcac

SEQ ID NO: 2524415 - DNA, 25 bp, Homo sapien
ggcctcgaacagcaatgcggatcgg

SEQ ID NO: 2524416 - DNA, 25 bp, Homo sapien
actgcggcctcgaacagcaatgcgg

SEQ ID NO: 2524417 - DNA, 25 bp, Homo sapien
tcgaacagcaatgcggatcggccac

SEQ ID NO: 2524418 - DNA, 25 bp, Homo sapien
tgcggcctcgaacagcaatgcggat

SEQ ID NO: 2524419 - DNA, 25 bp, Homo sapien
accctgatgattccggaggagcccg

SEQ ID NO: 2524420 - DNA, 25 bp, Homo sapien
cacatggagccccacgatttcaggg

SEQ ID NO: 2524421 - DNA, 25 bp, Homo sapien
ccgatctttcccaggactcggaggg

SEQ ID NO: 2524422 - DNA, 25 bp, Homo sapien
ggacatgttccggaaaacgccacca

SEQ ID NO: 2524423 - DNA, 25 bp, Homo sapien
agactcggtggccaccgcgggactc

SEQ ID NO: 2524424 - DNA, 25 bp, Homo sapien
gccgggcttgcggacattggcagcc

SEQ ID NO: 2524425 - DNA, 25 bp, Homo sapien
taccaaaacagtctgaggcggaggg

SEQ ID NO: 2524426 - DNA, 25 bp, Homo sapien
ggcgggcgacgctagaaggccgctg

SEQ ID NO: 2524427 - DNA, 25 bp, Homo sapien
tgcggatagggactctttaccggaa

SEQ ID NO: 2524428 - DNA, 25 bp, Homo sapien
tgggagcggaggtgcggatagggac

SEQ ID NO: 2524429 - DNA, 25 bp, Homo sapien
gtcggaggggtcagacggaagcaga

SEQ ID NO: 2524430 - DNA, 25 bp, Homo sapien
gaagcagaacgtgaggtggccccgg

SEQ ID NO: 2524431 - DNA, 25 bp, Homo sapien
tcttggtcatctcaccctggactat

SEQ ID NO: 2524432 - DNA, 25 bp, Homo sapien
tagcaccaggtatagtttctgcaca

SEQ ID NO: 2524433 - DNA, 25 bp, Homo sapien
cagctgcttgtccagaaatgtgtga

SEQ ID NO: 2524434 - DNA, 25 bp, Homo sapien
tgccttccggaatgcagaacaaagc

SEQ ID NO: 2524435 - DNA, 25 bp, Homo sapien
cctcccaagtatccaggactatacc

SEQ ID NO: 2524436 - DNA, 25 bp, Homo sapien
cacaatcatggctttctgcagactc

SEQ ID NO: 2524437 - DNA, 25 bp, Homo sapien
ttgagagagggtctcctgctgtcat

SEQ ID NO: 2524438 - DNA, 25 bp, Homo sapien
gagagggtctcctgctgtcatccag

SEQ ID NO: 2524439 - DNA, 25 bp, Homo sapien
gcttctctgagtgaggccttgcata

SEQ ID NO: 2524440 - DNA, 25 bp, Homo sapien
ccattccttcgtttattccagtagc

SEQ ID NO: 2524441 - DNA, 25 bp, Homo sapien
tctgagtgaggccttgcataaatgg

SEQ ID NO: 2524442 - DNA, 25 bp, Homo sapien
aagttgtccccactttcaaaatgca

SEQ ID NO: 2524443 - DNA, 25 bp, Homo sapien
gatgcttcagggaacactcacttta

SEQ ID NO: 2524444 - DNA, 25 bp, Homo sapien
tgagacctgaagtaagagaaggcct

SEQ ID NO: 2524445 - DNA, 25 bp, Homo sapien
aacagaactgttgccgtgaaggaaa

SEQ ID NO: 2524446 - DNA, 25 bp, Homo sapien
ttcaaagggttcaggaggtcattcc

SEQ ID NO: 2524447 - DNA, 25 bp, Homo sapien
gactggccaacagaaaaggtctgcc

SEQ ID NO: 2524448 - DNA, 25 bp, Homo sapien
aatactcggtggcttcctaaactcg

SEQ ID NO: 2524449 - DNA, 25 bp, Homo sapien
ccaagagaagtgatgcagcagagtc

SEQ ID NO: 2524450 - DNA, 25 bp, Homo sapien
taaactcgattaaggtgacagcctg

SEQ ID NO: 2524451 - DNA, 25 bp, Homo sapien
ccaccgcacccaaccaaggggctga

SEQ ID NO: 2524452 - DNA, 25 bp, Homo sapien
tttggtagagattgggtctggccat

SEQ ID NO: 2524453 - DNA, 25 bp, Homo sapien
catgcccggctaatcaaaaactttt

SEQ ID NO: 2524454 - DNA, 25 bp, Homo sapien
tggtagagattgggtctggccatgt

SEQ ID NO: 2524455 - DNA, 25 bp, Homo sapien
taagaccttttcgaacgcagcgcct

SEQ ID NO: 2524456 - DNA, 25 bp, Homo sapien
cacaattagctagtcagaggcctca

SEQ ID NO: 2524457 - DNA, 25 bp, Homo sapien
tagatgctaggatacccactctgag

SEQ ID NO: 2524458 - DNA, 25 bp, Homo sapien
tgagtctacccaatgtgccccgggt

SEQ ID NO: 2524459 - DNA, 25 bp, Homo sapien
tcagggatgtctgttgctctgaagg

SEQ ID NO: 2524460 - DNA, 25 bp, Homo sapien
tgagctcgttggtgagtttggccac

SEQ ID NO: 2524461 - DNA, 25 bp, Homo sapien
ggccatggcgatgttgatctgtccc

SEQ ID NO: 2524462 - DNA, 25 bp, Homo sapien
gacttggttggctcgcaaacacttg

SEQ ID NO: 2524463 - DNA, 25 bp, Homo sapien
tctttttggtcacaggtctccttca

SEQ ID NO: 2524464 - DNA, 25 bp, Homo sapien
gatcatttagtttgtgctctagatt

SEQ ID NO: 2524465 - DNA, 25 bp, Homo sapien
gtgctctagattatcacacttctca

SEQ ID NO: 2524466 - DNA, 25 bp, Homo sapien
tagattatcacacttctcaattgtt

SEQ ID NO: 2524467 - DNA, 25 bp, Homo sapien
tcttttaggagatcatttagtttgt

SEQ ID NO: 2524468 - DNA, 25 bp, Homo sapien
agtagattcgctgagattccagctg

SEQ ID NO: 2524469 - DNA, 25 bp, Homo sapien
ccttctctatccgaactatcttgtt

SEQ ID NO: 2524470 - DNA, 25 bp, Homo sapien
cttgttttcccagtagattcgctga

SEQ ID NO: 2524471 - DNA, 25 bp, Homo sapien
gctgtgtccttctctatccgaacta

SEQ ID NO: 2524472 - DNA, 25 bp, Homo sapien
ttgcaaccagtcgatgaacatagtt

SEQ ID NO: 2524473 - DNA, 25 bp, Homo sapien
tggcaagtatccccctcacattcat

SEQ ID NO: 2524474 - DNA, 25 bp, Homo sapien
tgcaaccagtcgatgaacatagtta

SEQ ID NO: 2524475 - DNA, 25 bp, Homo sapien
ccctcacattcatactgtactattt

SEQ ID NO: 2524476 - DNA, 25 bp, Homo sapien
tataagcatgtcgactgacataccg

SEQ ID NO: 2524477 - DNA, 25 bp, Homo sapien
tgtggccgcatattaaacaaatcca

SEQ ID NO: 2524478 - DNA, 25 bp, Homo sapien
cagactcgatggttggtaagctgca

SEQ ID NO: 2524479 - DNA, 25 bp, Homo sapien
taagctgcatggcatacgtgtgctg

SEQ ID NO: 2524480 - DNA, 25 bp, Homo sapien
gctcgggcgtttgacagtaccggca

SEQ ID NO: 2524481 - DNA, 25 bp, Homo sapien
actggctcgggcgtttgacagtacc

SEQ ID NO: 2524482 - DNA, 25 bp, Homo sapien
tgaacaccacactcaaaacacttat

SEQ ID NO: 2524483 - DNA, 25 bp, Homo sapien
cgtttgacagtaccggcaaacagga

SEQ ID NO: 2524484 - DNA, 25 bp, Homo sapien
tggtatcgtcccagcgctgtagaca

SEQ ID NO: 2524485 - DNA, 25 bp, Homo sapien
tcagtcaggtccatcactgggaggc

SEQ ID NO: 2524486 - DNA, 25 bp, Homo sapien
gatgccattcacagactcgtccatg

SEQ ID NO: 2524487 - DNA, 25 bp, Homo sapien
tacataacgttgtgaggatgccatt

SEQ ID NO: 2524488 - DNA, 25 bp, Homo sapien
taaaactgaggcctcgtgcagcagc

SEQ ID NO: 2524489 - DNA, 25 bp, Homo sapien
tcagggagcacacacttatggacag

SEQ ID NO: 2524490 - DNA, 25 bp, Homo sapien
cgttaagtccaaaaaacagtcagct

SEQ ID NO: 2524491 - DNA, 25 bp, Homo sapien
gacagtgcttgacttgacgcttcca

SEQ ID NO: 2524492 - DNA, 25 bp, Homo sapien
tatgatttggctcaagttctggtgg

SEQ ID NO: 2524493 - DNA, 25 bp, Homo sapien
gaagatacacaagacccattaaggt

SEQ ID NO: 2524494 - DNA, 25 bp, Homo sapien
gaagcacattcgaaatactgattta

SEQ ID NO: 2524495 - DNA, 25 bp, Homo sapien
tgcttacagcaactagctaataaac

SEQ ID NO: 2524496 - DNA, 25 bp, Homo sapien
ctactttatgatgacttgaaacaaa

SEQ ID NO: 2524497 - DNA, 25 bp, Homo sapien
gctaagcatctgtatccactgatag

SEQ ID NO: 2524498 - DNA, 25 bp, Homo sapien
tcttttaagagctaagcatctgtat

SEQ ID NO: 2524499 - DNA, 25 bp, Homo sapien
tgatagcaatgcaatacctacttta

SEQ ID NO: 2524500 - DNA, 25 bp, Homo sapien
gtgttaatagttgtctctaaaaata

SEQ ID NO: 2524501 - DNA, 25 bp, Homo sapien
ttgaaccctaacttattagtgtaca

SEQ ID NO: 2524502 - DNA, 25 bp, Homo sapien
agtgtacagctcaatatttaaacaa

SEQ ID NO: 2524503 - DNA, 25 bp, Homo sapien
ttagtgtacagctcaatatttaaac

SEQ ID NO: 2524504 - DNA, 25 bp, Homo sapien
cctaacttattagtgtacagctcaa

SEQ ID NO: 2524505 - DNA, 25 bp, Homo sapien
tgcttctggagatttcctctggttc

SEQ ID NO: 2524506 - DNA, 25 bp, Homo sapien
tattgaaggagtttggtccagctga

SEQ ID NO: 2524507 - DNA, 25 bp, Homo sapien
tcctctggttcactatcttcatctt

SEQ ID NO: 2524508 - DNA, 25 bp, Homo sapien
cagctgatgttggtgtatcccttcc

SEQ ID NO: 2524509 - DNA, 25 bp, Homo sapien
tttggcttatttgatccaagtttga

SEQ ID NO: 2524510 - DNA, 25 bp, Homo sapien
ttcttttggcttatttgatccaagt

SEQ ID NO: 2524511 - DNA, 25 bp, Homo sapien
tttgatggatattgttgatgctttc

SEQ ID NO: 2524512 - DNA, 25 bp, Homo sapien
ctgaaaaagtgcttggagcaagagt

SEQ ID NO: 2524513 - DNA, 25 bp, Homo sapien
aacttggagatcactgtaggctttg

SEQ ID NO: 2524514 - DNA, 25 bp, Homo sapien
tccaaacttggagatcactgtaggc

SEQ ID NO: 2524515 - DNA, 25 bp, Homo sapien
aatccaaacttggagatcactgtag

SEQ ID NO: 2524516 - DNA, 25 bp, Homo sapien
aaggcaaatccaaacttggagatca

SEQ ID NO: 2524517 - DNA, 25 bp, Homo sapien
ctcgctgagacttttcagccttctt

SEQ ID NO: 2524518 - DNA, 25 bp, Homo sapien
gtttctcaatgctgcgactggaact

SEQ ID NO: 2524519 - DNA, 25 bp, Homo sapien
tcgctgagacttttcagccttcttc

SEQ ID NO: 2524520 - DNA, 25 bp, Homo sapien
cgtttctcaatgctgcgactggaac

SEQ ID NO: 2524521 - DNA, 25 bp, Homo sapien
acaaggttgtgcaactgtcatcact

SEQ ID NO: 2524522 - DNA, 25 bp, Homo sapien
aaatataggaacaattcacacttac

SEQ ID NO: 2524523 - DNA, 25 bp, Homo sapien
ctatggactggcctattctgggtat

SEQ ID NO: 2524524 - DNA, 25 bp, Homo sapien
tgtatcctgttagcaggcactcccc

SEQ ID NO: 2524525 - DNA, 25 bp, Homo sapien
ggcggccattgcatgtcatataaaa

SEQ ID NO: 2524526 - DNA, 25 bp, Homo sapien
tcttcagatttgagcacttcagctc

SEQ ID NO: 2524527 - DNA, 25 bp, Homo sapien
tctattgagttgaactggcggccat

SEQ ID NO: 2524528 - DNA, 25 bp, Homo sapien
cactagctggcaaacgtcatcttct

SEQ ID NO: 2524529 - DNA, 25 bp, Homo sapien
ggtactgaagtgcaacaagctgaaa

SEQ ID NO: 2524530 - DNA, 25 bp, Homo sapien
tggtaggctaatcacactctgtaag

SEQ ID NO: 2524531 - DNA, 25 bp, Homo sapien
gagtttttacctgaactggcagaag

SEQ ID NO: 2524532 - DNA, 25 bp, Homo sapien
gcctggaaccaaataataactgacg

SEQ ID NO: 2524533 - DNA, 25 bp, Homo sapien
taaatggggcaacaaacttcataag

SEQ ID NO: 2524534 - DNA, 25 bp, Homo sapien
tcaattacttcgttaaatggggcaa

SEQ ID NO: 2524535 - DNA, 25 bp, Homo sapien
catttgttcaattacttcgttaaat

SEQ ID NO: 2524536 - DNA, 25 bp, Homo sapien
ttcataaggtcatgactggtcattg

SEQ ID NO: 2524537 - DNA, 25 bp, Homo sapien
ctgcgccgcacatcttcttttaagg

SEQ ID NO: 2524538 - DNA, 25 bp, Homo sapien
atggcactgcgccgcacatcttctt

SEQ ID NO: 2524539 - DNA, 25 bp, Homo sapien
cactgcgccgcacatcttcttttaa

SEQ ID NO: 2524540 - DNA, 25 bp, Homo sapien
cagcatggcactgcgccgcacatct

SEQ ID NO: 2524541 - DNA, 25 bp, Homo sapien
ttgtcttatataggtgcataatacc

SEQ ID NO: 2524542 - DNA, 25 bp, Homo sapien
ccatgaactatttcaactgatggat

SEQ ID NO: 2524543 - DNA, 25 bp, Homo sapien
tataggtgcataataccatgaacta

SEQ ID NO: 2524544 - DNA, 25 bp, Homo sapien
taccatgaactatttcaactgatgg

SEQ ID NO: 2524545 - DNA, 25 bp, Homo sapien
ccttactgtgatctttacttctttg

SEQ ID NO: 2524546 - DNA, 25 bp, Homo sapien
tactgtgatctttacttctttgcgc

SEQ ID NO: 2524547 - DNA, 25 bp, Homo sapien
tgatctttacttctttgcgcagtgg

SEQ ID NO: 2524548 - DNA, 25 bp, Homo sapien
ggggcagcgtttatgcattccttac

SEQ ID NO: 2524549 - DNA, 25 bp, Homo sapien
ccgagatgctgatggataatcgcta

SEQ ID NO: 2524550 - DNA, 25 bp, Homo sapien
taatcgctactttctctcctggtga

SEQ ID NO: 2524551 - DNA, 25 bp, Homo sapien
tggtgacttgccttctaaacaggct

SEQ ID NO: 2524552 - DNA, 25 bp, Homo sapien
catctgtcatttctcgacggccgag

SEQ ID NO: 2524553 - DNA, 25 bp, Homo sapien
tagttaattatctgaggaccaagga

SEQ ID NO: 2524554 - DNA, 25 bp, Homo sapien
tgcattccccactaaggagcttcct

SEQ ID NO: 2524555 - DNA, 25 bp, Homo sapien
tccagctcactgagttagaatccca

SEQ ID NO: 2524556 - DNA, 25 bp, Homo sapien
taaaaagctcagactcaagtccagc

SEQ ID NO: 2524557 - DNA, 25 bp, Homo sapien
tgggcaacagccctcgccgcgggct

SEQ ID NO: 2524558 - DNA, 25 bp, Homo sapien
ctgggcaacagccctcgccgcgggc

SEQ ID NO: 2524559 - DNA, 25 bp, Homo sapien
ggcaacagccctcgccgcgggcttt

SEQ ID NO: 2524560 - DNA, 25 bp, Homo sapien
caacagccctcgccgcgggcttttc

SEQ ID NO: 2524561 - DNA, 25 bp, Homo sapien
gagctccaatcggataacaaccagt

SEQ ID NO: 2524562 - DNA, 25 bp, Homo sapien
gagtgttccgcgagctccaatcgga

SEQ ID NO: 2524563 - DNA, 25 bp, Homo sapien
gacaggcgagtgttccgcgagctcc

SEQ ID NO: 2524564 - DNA, 25 bp, Homo sapien
aatcggataacaaccagtgacacac

SEQ ID NO: 2524565 - DNA, 25 bp, Homo sapien
gccctcggagccacaacaacctcca

SEQ ID NO: 2524566 - DNA, 25 bp, Homo sapien
cgccaccacctcaatgcagttgccg

SEQ ID NO: 2524567 - DNA, 25 bp, Homo sapien
gcagctcctcgaacagccctcggag

SEQ ID NO: 2524568 - DNA, 25 bp, Homo sapien
aggctggaaggcgagccgagaggcc

SEQ ID NO: 2524569 - DNA, 25 bp, Homo sapien
tccagactgcagtggtcctatcttg

SEQ ID NO: 2524570 - DNA, 25 bp, Homo sapien
cgtccagtccagactgcagtggtcc

SEQ ID NO: 2524571 - DNA, 25 bp, Homo sapien
cagtccagactgcagtggtcctatc

SEQ ID NO: 2524572 - DNA, 25 bp, Homo sapien
tccagtccagactgcagtggtccta

SEQ ID NO: 2524573 - DNA, 25 bp, Homo sapien
ttgcccaggctaactaaggctcttt

SEQ ID NO: 2524574 - DNA, 25 bp, Homo sapien
tctaagtgcctgtgatgaccaagca

SEQ ID NO: 2524575 - DNA, 25 bp, Homo sapien
gataatagttgccaacatggcgccc

SEQ ID NO: 2524576 - DNA, 25 bp, Homo sapien
ttgacgctggcgtgctagatatggt

SEQ ID NO: 2524577 - DNA, 25 bp, Homo sapien
cagagtctggaaagctggtcttcag

SEQ ID NO: 2524578 - DNA, 25 bp, Homo sapien
aagacgtctctgcaagaagcctgga

SEQ ID NO: 2524579 - DNA, 25 bp, Homo sapien
cactgatgtgcctcgaaagatccgg

SEQ ID NO: 2524580 - DNA, 25 bp, Homo sapien
tggaatgcaacccacattgtaaagc

SEQ ID NO: 2524581 - DNA, 25 bp, Homo sapien
gtagtgatgaacgaggactctggct

SEQ ID NO: 2524582 - DNA, 25 bp, Homo sapien
gtccagcactctacaccatatgaaa

SEQ ID NO: 2524583 - DNA, 25 bp, Homo sapien
gttgtatgtagatagacagatctcc

SEQ ID NO: 2524584 - DNA, 25 bp, Homo sapien
aaatcattggctcaacctgtacaaa

SEQ ID NO: 2524585 - DNA, 25 bp, Homo sapien
tgggcttggtggcaggcgcctatag

SEQ ID NO: 2524586 - DNA, 25 bp, Homo sapien
tgggaggtcgcggcggggggatcac

SEQ ID NO: 2524587 - DNA, 25 bp, Homo sapien
aggtcgcggcggggggatcacgagg

SEQ ID NO: 2524588 - DNA, 25 bp, Homo sapien
tcaggaaatcgagaccatcctggct

SEQ ID NO: 2524589 - DNA, 25 bp, Homo sapien
tggctcacgcctgtaatcccagcac

SEQ ID NO: 2524590 - DNA, 25 bp, Homo sapien
atggtggctcacgcctgtaatccca

SEQ ID NO: 2524591 - DNA, 25 bp, Homo sapien
acaaacaaacagaccgggcatggtg

SEQ ID NO: 2524592 - DNA, 25 bp, Homo sapien
ggtggctcacgcctgtaatcccagc

SEQ ID NO: 2524593 - DNA, 25 bp, Homo sapien
tctgaaacgcttcctataactcgag

SEQ ID NO: 2524594 - DNA, 25 bp, Homo sapien
cataagaatcatgcaagcttcctcc

SEQ ID NO: 2524595 - DNA, 25 bp, Homo sapien
gaaaaatgatccttgcgtgctgaat

SEQ ID NO: 2524596 - DNA, 25 bp, Homo sapien
aaggcaactgctacaccctgctttg

SEQ ID NO: 2524597 - DNA, 25 bp, Homo sapien
aatctgatgcccaatcctgtggccc

SEQ ID NO: 2524598 - DNA, 25 bp, Homo sapien
gaagtattaactgtgcacccactac

SEQ ID NO: 2524599 - DNA, 25 bp, Homo sapien
ggaactgtacttggagccttctcaa

SEQ ID NO: 2524600 - DNA, 25 bp, Homo sapien
ttaatgacagggtctaactccgtcg

SEQ ID NO: 2524601 - DNA, 25 bp, Homo sapien
gccttaggaaccaagtgagctggct

SEQ ID NO: 2524602 - DNA, 25 bp, Homo sapien
gagggccccaatggaagccagagtt

SEQ ID NO: 2524603 - DNA, 25 bp, Homo sapien
taccaagatgtgagcatcactggag

SEQ ID NO: 2524604 - DNA, 25 bp, Homo sapien
gagttcacaggtgcggtctccgttc

SEQ ID NO: 2524605 - DNA, 25 bp, Homo sapien
tcaacacaagtttatttattctcac

SEQ ID NO: 2524606 - DNA, 25 bp, Homo sapien
aacacaagtttatttattctcacat

SEQ ID NO: 2524607 - DNA, 25 bp, Homo sapien
caacacaagtttatttattctcaca

SEQ ID NO: 2524608 - DNA, 25 bp, Homo sapien
gcacacctcttctggtcactttccg

SEQ ID NO: 2524609 - DNA, 25 bp, Homo sapien
acaatactgagtggatatttaggtc

SEQ ID NO: 2524610 - DNA, 25 bp, Homo sapien
agtggatatttaggtcagtaaggca

SEQ ID NO: 2524611 - DNA, 25 bp, Homo sapien
ggagtaacagcacaggggagcacct

SEQ ID NO: 2524612 - DNA, 25 bp, Homo sapien
caagtttttcactcactcaatggca

SEQ ID NO: 2524613 - DNA, 25 bp, Homo sapien
aatgcagtgtaggtgtatgtccgac

SEQ ID NO: 2524614 - DNA, 25 bp, Homo sapien
taattcggtagacaaataagtctcc

SEQ ID NO: 2524615 - DNA, 25 bp, Homo sapien
gctctggtatgtctcaaattaacct

SEQ ID NO: 2524616 - DNA, 25 bp, Homo sapien
tcttaaatccatcttctcagccagg

SEQ ID NO: 2524617 - DNA, 25 bp, Homo sapien
aaatatgtcttaaatccatcttctc

SEQ ID NO: 2524618 - DNA, 25 bp, Homo sapien
aactcaggggttggagagcagccgg

SEQ ID NO: 2524619 - DNA, 25 bp, Homo sapien
ggggcaatgtggagagacccaatct

SEQ ID NO: 2524620 - DNA, 25 bp, Homo sapien
tcttagcatcagactcgggcttttt

SEQ ID NO: 2524621 - DNA, 25 bp, Homo sapien
atgtgccggtaccatgtgttgttcc

SEQ ID NO: 2524622 - DNA, 25 bp, Homo sapien
cctgaaagatccatgtgccggtacc

SEQ ID NO: 2524623 - DNA, 25 bp, Homo sapien
ccaatgtctagtagatttggcacat

SEQ ID NO: 2524624 - DNA, 25 bp, Homo sapien
cattctagcttgaccacttctcggc

SEQ ID NO: 2524625 - DNA, 25 bp, Homo sapien
tctcggctgtgcacaaactagtcta

SEQ ID NO: 2524626 - DNA, 25 bp, Homo sapien
ccctttgataggttatcggtggaga

SEQ ID NO: 2524627 - DNA, 25 bp, Homo sapien
tgaagaaccattgacagacgattag

SEQ ID NO: 2524628 - DNA, 25 bp, Homo sapien
aactccacgtaaggttaatgctccg

SEQ ID NO: 2524629 - DNA, 25 bp, Homo sapien
caggcgtgaatctccgcagagtgga

SEQ ID NO: 2524630 - DNA, 25 bp, Homo sapien
cagaagagcgttttccaggcgtgaa

SEQ ID NO: 2524631 - DNA, 25 bp, Homo sapien
tatgacgtcattagcgcagcgccat

SEQ ID NO: 2524632 - DNA, 25 bp, Homo sapien
cccactgagtatgtcggaggagagc

SEQ ID NO: 2524633 - DNA, 25 bp, Homo sapien
gaggagagcgacatggacaaagcca

SEQ ID NO: 2524634 - DNA, 25 bp, Homo sapien
atgaggctaggaggcggccgcgtgg

SEQ ID NO: 2524635 - DNA, 25 bp, Homo sapien
cctggcgagcccaggtctaagcggc

SEQ ID NO: 2524636 - DNA, 25 bp, Homo sapien
gtggatcgcgctttacagccctggg

SEQ ID NO: 2524637 - DNA, 25 bp, Homo sapien
gcgttgtcctgtggcgttcttctcg

SEQ ID NO: 2524638 - DNA, 25 bp, Homo sapien
tgtaggtgtgtgtccgactcccgcc

SEQ ID NO: 2524639 - DNA, 25 bp, Homo sapien
tgagaggttccatcgactaccgggt

SEQ ID NO: 2524640 - DNA, 25 bp, Homo sapien
atgatctaccacgtccagctgactc

SEQ ID NO: 2524641 - DNA, 25 bp, Homo sapien
catgatctaccacgtccagctgact

SEQ ID NO: 2524642 - DNA, 25 bp, Homo sapien
ggcatgatctaccacgtccagctga

SEQ ID NO: 2524643 - DNA, 25 bp, Homo sapien
gcatgatctaccacgtccagctgac

SEQ ID NO: 2524644 - DNA, 25 bp, Homo sapien
gatggtaacagatggcttgaagctc

SEQ ID NO: 2524645 - DNA, 25 bp, Homo sapien
gacctgagtatttccctggctgatg

SEQ ID NO: 2524646 - DNA, 25 bp, Homo sapien
gaggaatctcctctaggaacttcat

SEQ ID NO: 2524647 - DNA, 25 bp, Homo sapien
gcataggcataagggctatccccag

SEQ ID NO: 2524648 - DNA, 25 bp, Homo sapien
tcccacgaatcccaataatgacagc

SEQ ID NO: 2524649 - DNA, 25 bp, Homo sapien
tatagatttagggtgcaggacttaa

SEQ ID NO: 2524650 - DNA, 25 bp, Homo sapien
aaaagctcagttctagagacatact

SEQ ID NO: 2524651 - DNA, 25 bp, Homo sapien
gagacatactattactttaggactg

SEQ ID NO: 2524652 - DNA, 25 bp, Homo sapien
ctgtctgggttttgtgttggcatcc

SEQ ID NO: 2524653 - DNA, 25 bp, Homo sapien
tttggttagtatgccctgtatgtgt

SEQ ID NO: 2524654 - DNA, 25 bp, Homo sapien
gaagtgggactattggattatcatg

SEQ ID NO: 2524655 - DNA, 25 bp, Homo sapien
gatcaaaattgatctcaccagcaac

SEQ ID NO: 2524656 - DNA, 25 bp, Homo sapien
gaaactttttcaggacatgctatct

SEQ ID NO: 2524657 - DNA, 25 bp, Homo sapien
ggcccaattgttttagtcaccagaa

SEQ ID NO: 2524658 - DNA, 25 bp, Homo sapien
tgattggttgttctaacttgcccta

SEQ ID NO: 2524659 - DNA, 25 bp, Homo sapien
taacaactacctattatgtgaggac

SEQ ID NO: 2524660 - DNA, 25 bp, Homo sapien
ccacaaactctttcggaggcagaaa

SEQ ID NO: 2524661 - DNA, 25 bp, Homo sapien
gaggcctgtgacctatccagagacc

SEQ ID NO: 2524662 - DNA, 25 bp, Homo sapien
tcttaggacaacaaagtggtaggtc

SEQ ID NO: 2524663 - DNA, 25 bp, Homo sapien
gggaagtgcccatatctcagataca

SEQ ID NO: 2524664 - DNA, 25 bp, Homo sapien
gatggtatcccttgcaaagaacaag

SEQ ID NO: 2524665 - DNA, 25 bp, Homo sapien
cagaagcctagagaatcagtgcatt

SEQ ID NO: 2524666 - DNA, 25 bp, Homo sapien
cgagtggtgccacacagatatatac

SEQ ID NO: 2524667 - DNA, 25 bp, Homo sapien
gagtactttaatggcacctccgagt

SEQ ID NO: 2524668 - DNA, 25 bp, Homo sapien
gaatgactactaacaatggcactat

SEQ ID NO: 2524669 - DNA, 25 bp, Homo sapien
gcgtagaataactccagttcctgga

SEQ ID NO: 2524670 - DNA, 25 bp, Homo sapien
tctgggaataactggagagatactc

SEQ ID NO: 2524671 - DNA, 25 bp, Homo sapien
taacacgagtctatctctgagatgg

SEQ ID NO: 2524672 - DNA, 25 bp, Homo sapien
gcaggaaaagtcagggtggattcca

SEQ ID NO: 2524673 - DNA, 25 bp, Homo sapien
gctatagaatctcttctgtgagcat

SEQ ID NO: 2524674 - DNA, 25 bp, Homo sapien
gaatttaagcccctgctatagaatc

SEQ ID NO: 2524675 - DNA, 25 bp, Homo sapien
ataataatggtgtctgggtatctgc

SEQ ID NO: 2524676 - DNA, 25 bp, Homo sapien
gaccctgagatgttgccgttagagc

SEQ ID NO: 2524677 - DNA, 25 bp, Homo sapien
gtgctgcgtccagccatatactcca

SEQ ID NO: 2524678 - DNA, 25 bp, Homo sapien
gtggaatttgtgctgcgtccagcca

SEQ ID NO: 2524679 - DNA, 25 bp, Homo sapien
gagtagaccctgagatgttgccgtt

SEQ ID NO: 2524680 - DNA, 25 bp, Homo sapien
cagcccatgcttcaggttttcaggg

SEQ ID NO: 2524681 - DNA, 25 bp, Homo sapien
ttcagggatccagggaataattctc

SEQ ID NO: 2524682 - DNA, 25 bp, Homo sapien
tctcactccccttattcataaagca

SEQ ID NO: 2524683 - DNA, 25 bp, Homo sapien
tgaactcactgtctacactacactg

SEQ ID NO: 2524684 - DNA, 25 bp, Homo sapien
ctggcagatcttgtttatttttgct

SEQ ID NO: 2524685 - DNA, 25 bp, Homo sapien
tcttgtttatttttgctgcccattc

SEQ ID NO: 2524686 - DNA, 25 bp, Homo sapien
gatcttgtttatttttgctgcccat

SEQ ID NO: 2524687 - DNA, 25 bp, Homo sapien
cagatcttgtttatttttgctgccc

SEQ ID NO: 2524688 - DNA, 25 bp, Homo sapien
tcacattcttcataactgagtgtaa

SEQ ID NO: 2524689 - DNA, 25 bp, Homo sapien
gcaatgtagaagtacccggagggaa

SEQ ID NO: 2524690 - DNA, 25 bp, Homo sapien
ttttgcaatgtagaagtacccggag

SEQ ID NO: 2524691 - DNA, 25 bp, Homo sapien
tcataactgagtgtaaataatacat

SEQ ID NO: 2524692 - DNA, 25 bp, Homo sapien
taagaaaataggataagcgggtgta

SEQ ID NO: 2524693 - DNA, 25 bp, Homo sapien
aataggataagcgggtgtaagaaca

SEQ ID NO: 2524694 - DNA, 25 bp, Homo sapien
gaaaataggataagcgggtgtaaga

SEQ ID NO: 2524695 - DNA, 25 bp, Homo sapien
taggataagcgggtgtaagaacaga

SEQ ID NO: 2524696 - DNA, 25 bp, Homo sapien
gccatgtgaagcttggtgtcctgtg

SEQ ID NO: 2524697 - DNA, 25 bp, Homo sapien
ggccatgtgaagcttggtgtcctgt

SEQ ID NO: 2524698 - DNA, 25 bp, Homo sapien
agctttatgatcattagaatgacag

SEQ ID NO: 2524699 - DNA, 25 bp, Homo sapien
aagggccatgtgaagcttggtgtcc

SEQ ID NO: 2524700 - DNA, 25 bp, Homo sapien
aagtgtaaaccttcttgtcagccct

SEQ ID NO: 2524701 - DNA, 25 bp, Homo sapien
tcagccctgactgtctgaagtatca

SEQ ID NO: 2524702 - DNA, 25 bp, Homo sapien
tgtcagccctgactgtctgaagtat

SEQ ID NO: 2524703 - DNA, 25 bp, Homo sapien
tacacaaagtgtaaaccttcttgtc

SEQ ID NO: 2524704 - DNA, 25 bp, Homo sapien
tgttttctcctcttatatcatggtg

SEQ ID NO: 2524705 - DNA, 25 bp, Homo sapien
gaagggcaggtgttaatatctccaa

SEQ ID NO: 2524706 - DNA, 25 bp, Homo sapien
tggtgcatctcatgtctaattatct

SEQ ID NO: 2524707 - DNA, 25 bp, Homo sapien
aggaagggcaggtgttaatatctcc

SEQ ID NO: 2524708 - DNA, 25 bp, Homo sapien
aaggccactgggtagaagcgcaccc

SEQ ID NO: 2524709 - DNA, 25 bp, Homo sapien
caatgtctgggctcggataagtaag

SEQ ID NO: 2524710 - DNA, 25 bp, Homo sapien
tggtccacaatgtgaatcactgccc

SEQ ID NO: 2524711 - DNA, 25 bp, Homo sapien
tatacaatgtctgggctcggataag

SEQ ID NO: 2524712 - DNA, 25 bp, Homo sapien
tactaggctagggaaatggacaggt

SEQ ID NO: 2524713 - DNA, 25 bp, Homo sapien
gaaaacttcatgagccacttagcac

SEQ ID NO: 2524714 - DNA, 25 bp, Homo sapien
gaaccttacatcaacctctgggcat

SEQ ID NO: 2524715 - DNA, 25 bp, Homo sapien
taaatatgagtacagcagtgagcag

SEQ ID NO: 2524716 - DNA, 25 bp, Homo sapien
taggaccacaagaagtgcctctctg

SEQ ID NO: 2524717 - DNA, 25 bp, Homo sapien
cctatactagttgtagagtgagcat

SEQ ID NO: 2524718 - DNA, 25 bp, Homo sapien
gagtgtcatcctaactatgtaaagg

SEQ ID NO: 2524719 - DNA, 25 bp, Homo sapien
tatattgtcaagatctcctagctac

SEQ ID NO: 2524720 - DNA, 25 bp, Homo sapien
ctacagacagatgtgttggcagaag

SEQ ID NO: 2524721 - DNA, 25 bp, Homo sapien
ctgcccaggaaaatggcgataccat

SEQ ID NO: 2524722 - DNA, 25 bp, Homo sapien
aggaaaatggcgataccataaaaat

SEQ ID NO: 2524723 - DNA, 25 bp, Homo sapien
tacagacagatgtgttggcagaagg

SEQ ID NO: 2524724 - DNA, 25 bp, Homo sapien
ctgatggtggtgagtgcatcaagat

SEQ ID NO: 2524725 - DNA, 25 bp, Homo sapien
gatggtggtgagtgcatcaagatac

SEQ ID NO: 2524726 - DNA, 25 bp, Homo sapien
ggctgatggtggtgagtgcatcaag

SEQ ID NO: 2524727 - DNA, 25 bp, Homo sapien
atggtggtgagtgcatcaagataca

SEQ ID NO: 2524728 - DNA, 25 bp, Homo sapien
tagtatttcccagacagaatacagg

SEQ ID NO: 2524729 - DNA, 25 bp, Homo sapien
agtatttcccagacagaatacaggt

SEQ ID NO: 2524730 - DNA, 25 bp, Homo sapien
gacaaactcgacaagtataatctat

SEQ ID NO: 2524731 - DNA, 25 bp, Homo sapien
tgacaaactcgacaagtataatcta

SEQ ID NO: 2524732 - DNA, 25 bp, Homo sapien
caaactcgacaagtataatctatca

SEQ ID NO: 2524733 - DNA, 25 bp, Homo sapien
aaactcgacaagtataatctatcac

SEQ ID NO: 2524734 - DNA, 25 bp, Homo sapien
tctgtccactctgggtgtgtttcat

SEQ ID NO: 2524735 - DNA, 25 bp, Homo sapien
atgtaattgacggtgtagagaaatg

SEQ ID NO: 2524736 - DNA, 25 bp, Homo sapien
cagatgtaattgacggtgtagagaa

SEQ ID NO: 2524737 - DNA, 25 bp, Homo sapien
ccagatgtaattgacggtgtagaga

SEQ ID NO: 2524738 - DNA, 25 bp, Homo sapien
taattgacggtgtagagaaatgagg

SEQ ID NO: 2524739 - DNA, 25 bp, Homo sapien
ggccataaagatacatttaaggagg

SEQ ID NO: 2524740 - DNA, 25 bp, Homo sapien
ggtgcaaaggtgaaaattaggccat

SEQ ID NO: 2524741 - DNA, 25 bp, Homo sapien
tgggaggcccaagcggtgaatcact

SEQ ID NO: 2524742 - DNA, 25 bp, Homo sapien
attaggccataaagatacatttaag

SEQ ID NO: 2524743 - DNA, 25 bp, Homo sapien
tctccataggaaactgtctgaagcc

SEQ ID NO: 2524744 - DNA, 25 bp, Homo sapien
tggtcagcctatcttgtcagacaga

SEQ ID NO: 2524745 - DNA, 25 bp, Homo sapien
caacctggcaggcttatcagaagaa

SEQ ID NO: 2524746 - DNA, 25 bp, Homo sapien
taatgccttaacagaccagcttggt

SEQ ID NO: 2524747 - DNA, 25 bp, Homo sapien
gattatcttaatcttggaccttcca

SEQ ID NO: 2524748 - DNA, 25 bp, Homo sapien
ctgctgattatcttaatcttggacc

SEQ ID NO: 2524749 - DNA, 25 bp, Homo sapien
tgattatcttaatcttggaccttcc

SEQ ID NO: 2524750 - DNA, 25 bp, Homo sapien
gctgattatcttaatcttggacctt

SEQ ID NO: 2524751 - DNA, 25 bp, Homo sapien
gaagtgtctccgtgagccagcaaag

SEQ ID NO: 2524752 - DNA, 25 bp, Homo sapien
aagctcagataaaaaagtggtctta

SEQ ID NO: 2524753 - DNA, 25 bp, Homo sapien
agctcagataaaaaagtggtcttat

SEQ ID NO: 2524754 - DNA, 25 bp, Homo sapien
ctccgtgagccagcaaagtcccagg

SEQ ID NO: 2524755 - DNA, 25 bp, Homo sapien
ggtgaactccttcaatgtgccacac

SEQ ID NO: 2524756 - DNA, 25 bp, Homo sapien
catgggtgaactccttcaatgtgcc

SEQ ID NO: 2524757 - DNA, 25 bp, Homo sapien
gcatgggtgaactccttcaatgtgc

SEQ ID NO: 2524758 - DNA, 25 bp, Homo sapien
tgggtgaactccttcaatgtgccac

SEQ ID NO: 2524759 - DNA, 25 bp, Homo sapien
ggtactagtacagggatggacaaat

SEQ ID NO: 2524760 - DNA, 25 bp, Homo sapien
tgaagctagaacaattgggtatcca

SEQ ID NO: 2524761 - DNA, 25 bp, Homo sapien
gaacaagcgcccctcatgtgtctat

SEQ ID NO: 2524762 - DNA, 25 bp, Homo sapien
caaaaaatcagttctaggacgggca

SEQ ID NO: 2524763 - DNA, 25 bp, Homo sapien
tacaagatcaaactggtctcagggt

SEQ ID NO: 2524764 - DNA, 25 bp, Homo sapien
tagtcctaagagacagggcaagtca

SEQ ID NO: 2524765 - DNA, 25 bp, Homo sapien
gaaatagccctatgaggctgggcgc

SEQ ID NO: 2524766 - DNA, 25 bp, Homo sapien
ggcaagtcattttggcaactacaag

SEQ ID NO: 2524767 - DNA, 25 bp, Homo sapien
cagcctttattccaataatgaccta

SEQ ID NO: 2524768 - DNA, 25 bp, Homo sapien
ttacttacttacttcctgagcctcc

SEQ ID NO: 2524769 - DNA, 25 bp, Homo sapien
aacttctgctagcatctcttctgag

SEQ ID NO: 2524770 - DNA, 25 bp, Homo sapien
gacctaaataataacttctgctagc

SEQ ID NO: 2524771 - DNA, 25 bp, Homo sapien
catcacagttgttacagattgaata

SEQ ID NO: 2524772 - DNA, 25 bp, Homo sapien
ccgaatccaccaattctctggtcta

SEQ ID NO: 2524773 - DNA, 25 bp, Homo sapien
gcagcatggcgatggcactgacaca

SEQ ID NO: 2524774 - DNA, 25 bp, Homo sapien
tctcatcacagttgttacagattga

SEQ ID NO: 2524775 - DNA, 25 bp, Homo sapien
caatctaccactgaaacttcaaaat

SEQ ID NO: 2524776 - DNA, 25 bp, Homo sapien
ctaccactgaaacttcaaaatccat

SEQ ID NO: 2524777 - DNA, 25 bp, Homo sapien
tctaccactgaaacttcaaaatcca

SEQ ID NO: 2524778 - DNA, 25 bp, Homo sapien
acagtcacaatctaccactgaaact

SEQ ID NO: 2524779 - DNA, 25 bp, Homo sapien
cagagactaggtcaataaaaagttc

SEQ ID NO: 2524780 - DNA, 25 bp, Homo sapien
ggagccctactgaccatgccaaaaa

SEQ ID NO: 2524781 - DNA, 25 bp, Homo sapien
tttcaccacttacaggtaacatctg

SEQ ID NO: 2524782 - DNA, 25 bp, Homo sapien
tatctcattgtatcatcatgacaaa

SEQ ID NO: 2524783 - DNA, 25 bp, Homo sapien
tggagatttctgtatattatggaat

SEQ ID NO: 2524784 - DNA, 25 bp, Homo sapien
ctgtatattatggaatacagcatag

SEQ ID NO: 2524785 - DNA, 25 bp, Homo sapien
gcataggcaataagtgaacttgaac

SEQ ID NO: 2524786 - DNA, 25 bp, Homo sapien
atacagcataggcaataagtgaact

SEQ ID NO: 2524787 - DNA, 25 bp, Homo sapien
tagccatgacaaattgtatccactg

SEQ ID NO: 2524788 - DNA, 25 bp, Homo sapien
ctcagagtagccatgacaaattgta

SEQ ID NO: 2524789 - DNA, 25 bp, Homo sapien
tgacaaattgtatccactgtattgc

SEQ ID NO: 2524790 - DNA, 25 bp, Homo sapien
ttgtatccactgtattgcaggaaga

SEQ ID NO: 2524791 - DNA, 25 bp, Homo sapien
tgaggtaagacgatcacttgaggcc

SEQ ID NO: 2524792 - DNA, 25 bp, Homo sapien
ctgaggtaagacgatcacttgaggc

SEQ ID NO: 2524793 - DNA, 25 bp, Homo sapien
gagcagccgatccttcctagtcagg

SEQ ID NO: 2524794 - DNA, 25 bp, Homo sapien
tgggctcctcctatactgaatcctg

SEQ ID NO: 2524795 - DNA, 25 bp, Homo sapien
aaaggtcatagggacttcagtccca

SEQ ID NO: 2524796 - DNA, 25 bp, Homo sapien
tgtcctccagaatgctagcgtctag

SEQ ID NO: 2524797 - DNA, 25 bp, Homo sapien
tctcttaggcttgttgacccatagg

SEQ ID NO: 2524798 - DNA, 25 bp, Homo sapien
tctctgtaggcaggttgtccatcag

SEQ ID NO: 2524799 - DNA, 25 bp, Homo sapien
ccaagcccgctctgagattggagca

SEQ ID NO: 2524800 - DNA, 25 bp, Homo sapien
cagctggctgccatcaatagggcaa

SEQ ID NO: 2524801 - DNA, 25 bp, Homo sapien
agcaattacactgcactgtttagat

SEQ ID NO: 2524802 - DNA, 25 bp, Homo sapien
aattacactgcactgtttagatcat

SEQ ID NO: 2524803 - DNA, 25 bp, Homo sapien
caattacactgcactgtttagatca

SEQ ID NO: 2524804 - DNA, 25 bp, Homo sapien
gcaattacactgcactgtttagatc

SEQ ID NO: 2524805 - DNA, 25 bp, Homo sapien
gttggagcgggtcccaaccaactgc

SEQ ID NO: 2524806 - DNA, 25 bp, Homo sapien
caaacgaattgctatagcgtcccca

SEQ ID NO: 2524807 - DNA, 25 bp, Homo sapien
gaaacgatggtaggccttgtcatct

SEQ ID NO: 2524808 - DNA, 25 bp, Homo sapien
cctcaagcggagcaggaacggaact

SEQ ID NO: 2524809 - DNA, 25 bp, Homo sapien
cggcgcacccttgcttttgcagcat

SEQ ID NO: 2524810 - DNA, 25 bp, Homo sapien
tacaggcctagtggactctgagcgg

SEQ ID NO: 2524811 - DNA, 25 bp, Homo sapien
gaatgttatgaccaccgggcatgca

SEQ ID NO: 2524812 - DNA, 25 bp, Homo sapien
ctgtagcaacggtcccagagcttcc

SEQ ID NO: 2524813 - DNA, 25 bp, Homo sapien
tgatgtagtatgcagagggtctcct

SEQ ID NO: 2524814 - DNA, 25 bp, Homo sapien
gcctcctgggatgatgagcatgaca

SEQ ID NO: 2524815 - DNA, 25 bp, Homo sapien
tcagggtttactgcgaaaggcctcc

SEQ ID NO: 2524816 - DNA, 25 bp, Homo sapien
gcaattaaaagtcttggccctgaca

SEQ ID NO: 2524817 - DNA, 25 bp, Homo sapien
aaaactcggcttccagcgatgatct

SEQ ID NO: 2524818 - DNA, 25 bp, Homo sapien
tgaaaactcggcttccagcgatgat

SEQ ID NO: 2524819 - DNA, 25 bp, Homo sapien
ctgaaaactcggcttccagcgatga

SEQ ID NO: 2524820 - DNA, 25 bp, Homo sapien
gaaaactcggcttccagcgatgatc

SEQ ID NO: 2524821 - DNA, 25 bp, Homo sapien
cttaatcacaagtagacccccagca

SEQ ID NO: 2524822 - DNA, 25 bp, Homo sapien
tttaaatgatttgcctagtgctgca

SEQ ID NO: 2524823 - DNA, 25 bp, Homo sapien
gcacccgtccgagcttaatactctt

SEQ ID NO: 2524824 - DNA, 25 bp, Homo sapien
cgagcttaatactcttaatcacaag

SEQ ID NO: 2524825 - DNA, 25 bp, Homo sapien
tggttgcctgcctgtatacgacgcc

SEQ ID NO: 2524826 - DNA, 25 bp, Homo sapien
tagctggagcacttactcaggtggc

SEQ ID NO: 2524827 - DNA, 25 bp, Homo sapien
taacccacgattctgagccctgagt

SEQ ID NO: 2524828 - DNA, 25 bp, Homo sapien
agatgacacggatcgccaggctgat

SEQ ID NO: 2524829 - DNA, 25 bp, Homo sapien
gaaccaacattgatggaccatggtg

SEQ ID NO: 2524830 - DNA, 25 bp, Homo sapien
tgaggtacacatagcaaattcttag

SEQ ID NO: 2524831 - DNA, 25 bp, Homo sapien
tattcagactgacatggattgactg

SEQ ID NO: 2524832 - DNA, 25 bp, Homo sapien
taacactgtggaaactggcatacct

SEQ ID NO: 2524833 - DNA, 25 bp, Homo sapien
tatccaggttggtatatatttagtt

SEQ ID NO: 2524834 - DNA, 25 bp, Homo sapien
ttatccaggttggtatatatttagt

SEQ ID NO: 2524835 - DNA, 25 bp, Homo sapien
atccaggttggtatatatttagttc

SEQ ID NO: 2524836 - DNA, 25 bp, Homo sapien
caaaaactaagtgcctgtggtcatc

SEQ ID NO: 2524837 - DNA, 25 bp, Homo sapien
gaaagctagtcctcagcgggcttaa

SEQ ID NO: 2524838 - DNA, 25 bp, Homo sapien
gatgggcaacacaactaggcatttg

SEQ ID NO: 2524839 - DNA, 25 bp, Homo sapien
gaggtcccagatatctttaggcaag

SEQ ID NO: 2524840 - DNA, 25 bp, Homo sapien
tttccagaagtgagtgcagataact

SEQ ID NO: 2524841 - DNA, 25 bp, Homo sapien
cagataactgctctgcaccttccct

SEQ ID NO: 2524842 - DNA, 25 bp, Homo sapien
ccccatttccagaagtgagtgcaga

SEQ ID NO: 2524843 - DNA, 25 bp, Homo sapien
ccagaagtgagtgcagataactgct

SEQ ID NO: 2524844 - DNA, 25 bp, Homo sapien
ttcgatgtgattcttcatggaaacc

SEQ ID NO: 2524845 - DNA, 25 bp, Homo sapien
ttgctttagcatcattactctttca

SEQ ID NO: 2524846 - DNA, 25 bp, Homo sapien
cacgaatgggtatttttcgatgtga

SEQ ID NO: 2524847 - DNA, 25 bp, Homo sapien
aaggcaaaaggtcatcacgaatggg

SEQ ID NO: 2524848 - DNA, 25 bp, Homo sapien
cataattacttctcatgtccagcat

SEQ ID NO: 2524849 - DNA, 25 bp, Homo sapien
taattacttctcatgtccagcattt

SEQ ID NO: 2524850 - DNA, 25 bp, Homo sapien
attacttctcatgtccagcatttct

SEQ ID NO: 2524851 - DNA, 25 bp, Homo sapien
aattacttctcatgtccagcatttc

SEQ ID NO: 2524852 - DNA, 25 bp, Homo sapien
taatatgatccacaacattggaaat

SEQ ID NO: 2524853 - DNA, 25 bp, Homo sapien
tagatgtgtttcaagccctttaata

SEQ ID NO: 2524854 - DNA, 25 bp, Homo sapien
caagtttaagtgcaattagatgtgt

SEQ ID NO: 2524855 - DNA, 25 bp, Homo sapien
gaagcccagtaacatagtcttggaa

SEQ ID NO: 2524856 - DNA, 25 bp, Homo sapien
ttcaaaccagtggtttcaagtgaat

SEQ ID NO: 2524857 - DNA, 25 bp, Homo sapien
gaaacattatcaaacatattaccca

SEQ ID NO: 2524858 - DNA, 25 bp, Homo sapien
agggaatttaaatagtggcatttca

SEQ ID NO: 2524859 - DNA, 25 bp, Homo sapien
gctactgaaagatgtgagggaattt

SEQ ID NO: 2524860 - DNA, 25 bp, Homo sapien
cctttatgggttactctgatatcag

SEQ ID NO: 2524861 - DNA, 25 bp, Homo sapien
ccttctggatagcaggtttgtttac

SEQ ID NO: 2524862 - DNA, 25 bp, Homo sapien
tgaaaaaatgtccaagataccctgt

SEQ ID NO: 2524863 - DNA, 25 bp, Homo sapien
gctatctgacatgttctagggctga

SEQ ID NO: 2524864 - DNA, 25 bp, Homo sapien
ttacgggtttgcgacgcattcaaag

SEQ ID NO: 2524865 - DNA, 25 bp, Homo sapien
gtttacgggtttgcgacgcattcaa

SEQ ID NO: 2524866 - DNA, 25 bp, Homo sapien
agtttacgggtttgcgacgcattca

SEQ ID NO: 2524867 - DNA, 25 bp, Homo sapien
tttacgggtttgcgacgcattcaaa

SEQ ID NO: 2524868 - DNA, 25 bp, Homo sapien
taggacactctcacagtaactggat

SEQ ID NO: 2524869 - DNA, 25 bp, Homo sapien
tagtttgtatggtcgtaggacactc

SEQ ID NO: 2524870 - DNA, 25 bp, Homo sapien
tctgtaaatttagtttgtatggtcg

SEQ ID NO: 2524871 - DNA, 25 bp, Homo sapien
ctcacagtaactggatacccaaagg

SEQ ID NO: 2524872 - DNA, 25 bp, Homo sapien
gctcagaatactacaatggcctaac

SEQ ID NO: 2524873 - DNA, 25 bp, Homo sapien
tatcagttgctggacactatcacaa

SEQ ID NO: 2524874 - DNA, 25 bp, Homo sapien
tcctaggcatggaatccaaaggttc

SEQ ID NO: 2524875 - DNA, 25 bp, Homo sapien
gtttgccaatcaccagaacagtgta

SEQ ID NO: 2524876 - DNA, 25 bp, Homo sapien
agaacaacaatgtcttttaggaaga

SEQ ID NO: 2524877 - DNA, 25 bp, Homo sapien
gaacaacaatgtcttttaggaagag

SEQ ID NO: 2524878 - DNA, 25 bp, Homo sapien
ttcaagttaccatctttaacttcta

SEQ ID NO: 2524879 - DNA, 25 bp, Homo sapien
tcacctttacatttactgaagacat

SEQ ID NO: 2524880 - DNA, 25 bp, Homo sapien
ttctaaaagagtaggatgtgttttc

SEQ ID NO: 2524881 - DNA, 25 bp, Homo sapien
cataatgaaccaaactccaaaggat

SEQ ID NO: 2524882 - DNA, 25 bp, Homo sapien
taatgaaccaaactccaaaggatag

SEQ ID NO: 2524883 - DNA, 25 bp, Homo sapien
attttccataatgaaccaaactcca

SEQ ID NO: 2524884 - DNA, 25 bp, Homo sapien
tccataatgaaccaaactccaaagg

SEQ ID NO: 2524885 - DNA, 25 bp, Homo sapien
cttcacctggacaataaaatataag

SEQ ID NO: 2524886 - DNA, 25 bp, Homo sapien
ataaaatataagaccgagccacgct

SEQ ID NO: 2524887 - DNA, 25 bp, Homo sapien
atataagaccgagccacgcttggtg

SEQ ID NO: 2524888 - DNA, 25 bp, Homo sapien
aaatataagaccgagccacgcttgg

SEQ ID NO: 2524889 - DNA, 25 bp, Homo sapien
gcccggccagaaagactcttataga

SEQ ID NO: 2524890 - DNA, 25 bp, Homo sapien
gatacaagatgcatatatgtgccct

SEQ ID NO: 2524891 - DNA, 25 bp, Homo sapien
ttacgcagtcttgaaaataaatggg

SEQ ID NO: 2524892 - DNA, 25 bp, Homo sapien
taatatgtcaccaattgcgataaca

SEQ ID NO: 2524893 - DNA, 25 bp, Homo sapien
tattttctattcgttcctgaatctc

SEQ ID NO: 2524894 - DNA, 25 bp, Homo sapien
actattttctattcgttcctgaatc

SEQ ID NO: 2524895 - DNA, 25 bp, Homo sapien
attttctattcgttcctgaatctcc

SEQ ID NO: 2524896 - DNA, 25 bp, Homo sapien
ttttctattcgttcctgaatctcca

SEQ ID NO: 2524897 - DNA, 25 bp, Homo sapien
taaaccactggtatccagctcataa

SEQ ID NO: 2524898 - DNA, 25 bp, Homo sapien
tccacccattctggtaggtacagga

SEQ ID NO: 2524899 - DNA, 25 bp, Homo sapien
cagccagaattaaagaatccaccca

SEQ ID NO: 2524900 - DNA, 25 bp, Homo sapien
taaaaagagcttatctggcactgag

SEQ ID NO: 2524901 - DNA, 25 bp, Homo sapien
ggatcggattcttaaccacaaggtc

SEQ ID NO: 2524902 - DNA, 25 bp, Homo sapien
ggaggataccccattctcggcagtc

SEQ ID NO: 2524903 - DNA, 25 bp, Homo sapien
ggaagtccacttatcagcctcaatg

SEQ ID NO: 2524904 - DNA, 25 bp, Homo sapien
tccagctgttgaaggagcaaacgaa

SEQ ID NO: 2524905 - DNA, 25 bp, Homo sapien
ttggatcccagctgaaaaaaacatt

SEQ ID NO: 2524906 - DNA, 25 bp, Homo sapien
gttgtctcgcaaatcttcccatgga

SEQ ID NO: 2524907 - DNA, 25 bp, Homo sapien
tcttcttctggcctaaggttcattg

SEQ ID NO: 2524908 - DNA, 25 bp, Homo sapien
ggcctaaggttcattgactttatac

SEQ ID NO: 2524909 - DNA, 25 bp, Homo sapien
cgttcagtacggacttgtgcaaaat

SEQ ID NO: 2524910 - DNA, 25 bp, Homo sapien
tgcttcaagtagaaggtctaacagc

SEQ ID NO: 2524911 - DNA, 25 bp, Homo sapien
cagcctgttcctaaaagcgataaac

SEQ ID NO: 2524912 - DNA, 25 bp, Homo sapien
gcaccatatttgtaagcttgaataa

SEQ ID NO: 2524913 - DNA, 25 bp, Homo sapien
cacctcggcgagctgtttgcctgca

SEQ ID NO: 2524914 - DNA, 25 bp, Homo sapien
cagggttcatttcaggccgcgggat

SEQ ID NO: 2524915 - DNA, 25 bp, Homo sapien
tgatatacagccttgcagggttcat

SEQ ID NO: 2524916 - DNA, 25 bp, Homo sapien
gccacgggcgctaattcaactgcat

SEQ ID NO: 2524917 - DNA, 25 bp, Homo sapien
taaaagtgtcctgtcaaagagctag

SEQ ID NO: 2524918 - DNA, 25 bp, Homo sapien
tccaagagtgacagctggagtgcag

SEQ ID NO: 2524919 - DNA, 25 bp, Homo sapien
ttgaaatgcatcagtcacccaagga

SEQ ID NO: 2524920 - DNA, 25 bp, Homo sapien
ggttgaacacacacagtaagacact

SEQ ID NO: 2524921 - DNA, 25 bp, Homo sapien
gaaaaccaagtaggcagtgaccacc

SEQ ID NO: 2524922 - DNA, 25 bp, Homo sapien
ccttaattgctggtagaccatgaga

SEQ ID NO: 2524923 - DNA, 25 bp, Homo sapien
gagtgtttgccaagaagaaccccag

SEQ ID NO: 2524924 - DNA, 25 bp, Homo sapien
tcattatctaagcacaagaggctgc

SEQ ID NO: 2524925 - DNA, 25 bp, Homo sapien
cgaagttacaggattgggacgcagc

SEQ ID NO: 2524926 - DNA, 25 bp, Homo sapien
gattgggacgcagcagcatactgac

SEQ ID NO: 2524927 - DNA, 25 bp, Homo sapien
cctgagtgcgaagttacaggattgg

SEQ ID NO: 2524928 - DNA, 25 bp, Homo sapien
tgaaaaaacctgagtgcgaagttac

SEQ ID NO: 2524929 - DNA, 25 bp, Homo sapien
gattcagcatatcgggtcaaaagat

SEQ ID NO: 2524930 - DNA, 25 bp, Homo sapien
gagattcagcatatcgggtcaaaag

SEQ ID NO: 2524931 - DNA, 25 bp, Homo sapien
agagattcagcatatcgggtcaaaa

SEQ ID NO: 2524932 - DNA, 25 bp, Homo sapien
ttcagcatatcgggtcaaaagataa

SEQ ID NO: 2524933 - DNA, 25 bp, Homo sapien
tggtatagctggctgctcattattc

SEQ ID NO: 2524934 - DNA, 25 bp, Homo sapien
ggtatagctggctgctcattattca

SEQ ID NO: 2524935 - DNA, 25 bp, Homo sapien
catacagtagattcgaacaagcagc

SEQ ID NO: 2524936 - DNA, 25 bp, Homo sapien
gatatgcttagcatcgaggctggag

SEQ ID NO: 2524937 - DNA, 25 bp, Homo sapien
aatttgaactgagcattggaagggc

SEQ ID NO: 2524938 - DNA, 25 bp, Homo sapien
gctggagtaaagatccaccactggt

SEQ ID NO: 2524939 - DNA, 25 bp, Homo sapien
catacatcaataagcgcatggacag

SEQ ID NO: 2524940 - DNA, 25 bp, Homo sapien
ataagcgcatggacagcaaggagac

SEQ ID NO: 2524941 - DNA, 25 bp, Homo sapien
gtttccctccatacatcaataagcg

SEQ ID NO: 2524942 - DNA, 25 bp, Homo sapien
aatagtcagaaaattgcaattctgt

SEQ ID NO: 2524943 - DNA, 25 bp, Homo sapien
tatccatggtgtggtacaagccaag

SEQ ID NO: 2524944 - DNA, 25 bp, Homo sapien
cagagctctgatgtcagcaggcagt

SEQ ID NO: 2524945 - DNA, 25 bp, Homo sapien
aagccaagtaacctcgtcagctgca

SEQ ID NO: 2524946 - DNA, 25 bp, Homo sapien
gcttatcctctgttggtgtcgacaa

SEQ ID NO: 2524947 - DNA, 25 bp, Homo sapien
cagatcaagaatatgtgaagaggcc

SEQ ID NO: 2524948 - DNA, 25 bp, Homo sapien
gatcaagaatatgtgaagaggccgg

SEQ ID NO: 2524949 - DNA, 25 bp, Homo sapien
tcaagaatatgtgaagaggccggga

SEQ ID NO: 2524950 - DNA, 25 bp, Homo sapien
ttcaagatcagcctcggcacatagt

SEQ ID NO: 2524951 - DNA, 25 bp, Homo sapien
tgtaaaacaacaaggtttatcgcca

SEQ ID NO: 2524952 - DNA, 25 bp, Homo sapien
tctgtaaaacaacaaggtttatcgc

SEQ ID NO: 2524953 - DNA, 25 bp, Homo sapien
gtagcaggtaagaggtcaacaaaca

SEQ ID NO: 2524954 - DNA, 25 bp, Homo sapien
caatttagctagatgtggtcctcgg

SEQ ID NO: 2524955 - DNA, 25 bp, Homo sapien
tggtcctcggagatggcgagaactt

SEQ ID NO: 2524956 - DNA, 25 bp, Homo sapien
tgtactcatcgttacaaccttgact

SEQ ID NO: 2524957 - DNA, 25 bp, Homo sapien
ttgacttcgtaaacgcctaatcagc

SEQ ID NO: 2524958 - DNA, 25 bp, Homo sapien
tccaggcctcttcaatcagtcgaaa

SEQ ID NO: 2524959 - DNA, 25 bp, Homo sapien
gaaagacagaatcgaaataagtcag

SEQ ID NO: 2524960 - DNA, 25 bp, Homo sapien
taagtcagatagaactgccagtcat

SEQ ID NO: 2524961 - DNA, 25 bp, Homo sapien
ttcaatcagtcgaaagacagaatcg

SEQ ID NO: 2524962 - DNA, 25 bp, Homo sapien
aatgatgcacacaggattaaaccca

SEQ ID NO: 2524963 - DNA, 25 bp, Homo sapien
taaacccaagttgtgacagatcttc

SEQ ID NO: 2524964 - DNA, 25 bp, Homo sapien
aggattaaacccaagttgtgacaga

SEQ ID NO: 2524965 - DNA, 25 bp, Homo sapien
ctaaaatcagattgaatgatgcaca

SEQ ID NO: 2524966 - DNA, 25 bp, Homo sapien
tagtatgtagtaggttggcttaccc

SEQ ID NO: 2524967 - DNA, 25 bp, Homo sapien
tattttagtatgtagtaggttggct

SEQ ID NO: 2524968 - DNA, 25 bp, Homo sapien
ccacccactccatgtttcctttgca

SEQ ID NO: 2524969 - DNA, 25 bp, Homo sapien
ttttagtatgtagtaggttggctta

SEQ ID NO: 2524970 - DNA, 25 bp, Homo sapien
gcttcttgtacatagccatgcattt

SEQ ID NO: 2524971 - DNA, 25 bp, Homo sapien
aagaggcgccgggaaagggcattgc

SEQ ID NO: 2524972 - DNA, 25 bp, Homo sapien
gctcagcttcttgtacatagccatg

SEQ ID NO: 2524973 - DNA, 25 bp, Homo sapien
gcgccgggaaagggcattgcactct

SEQ ID NO: 2524974 - DNA, 25 bp, Homo sapien
actttcccaaacgttccaggatcat

SEQ ID NO: 2524975 - DNA, 25 bp, Homo sapien
ctttcccaaacgttccaggatcata

SEQ ID NO: 2524976 - DNA, 25 bp, Homo sapien
ttcccaaacgttccaggatcatata

SEQ ID NO: 2524977 - DNA, 25 bp, Homo sapien
cccaaacgttccaggatcatataat

SEQ ID NO: 2524978 - DNA, 25 bp, Homo sapien
cagtgattagacctacgctgagggc

SEQ ID NO: 2524979 - DNA, 25 bp, Homo sapien
gcctagagtacttgctggaaacagg

SEQ ID NO: 2524980 - DNA, 25 bp, Homo sapien
cagatttacccaaaggccaaaagtg

SEQ ID NO: 2524981 - DNA, 25 bp, Homo sapien
gtctatacacatctcagcctagagt

SEQ ID NO: 2524982 - DNA, 25 bp, Homo sapien
ggttttcatcctgtgccgatataga

SEQ ID NO: 2524983 - DNA, 25 bp, Homo sapien
agaggttttcatcctgtgccgatat

SEQ ID NO: 2524984 - DNA, 25 bp, Homo sapien
tttcaccattttttcgaccattctc

SEQ ID NO: 2524985 - DNA, 25 bp, Homo sapien
ttcaccattttttcgaccattctct

SEQ ID NO: 2524986 - DNA, 25 bp, Homo sapien
ttggggacaatcttatatagagcca

SEQ ID NO: 2524987 - DNA, 25 bp, Homo sapien
gcataattaagctcatcacagacca

SEQ ID NO: 2524988 - DNA, 25 bp, Homo sapien
ttgcataattaagctcatcacagac

SEQ ID NO: 2524989 - DNA, 25 bp, Homo sapien
tcacagaccaaaagtagtagggatt

SEQ ID NO: 2524990 - DNA, 25 bp, Homo sapien
ttcttgtattcacccactctggcat

SEQ ID NO: 2524991 - DNA, 25 bp, Homo sapien
gccatgaagaggtgagagtgatact

SEQ ID NO: 2524992 - DNA, 25 bp, Homo sapien
tactcctcactattgggaactttct

SEQ ID NO: 2524993 - DNA, 25 bp, Homo sapien
gaggtgagagtgatactcctcacta

SEQ ID NO: 2524994 - DNA, 25 bp, Homo sapien
tcatctgtgggttcaagggctgcca

SEQ ID NO: 2524995 - DNA, 25 bp, Homo sapien
tctctgtaaaccaattgcctttaaa

SEQ ID NO: 2524996 - DNA, 25 bp, Homo sapien
ctgccacctcctgtgcaagagtaaa

SEQ ID NO: 2524997 - DNA, 25 bp, Homo sapien
tgcatctcccggtaaaggatagtca

SEQ ID NO: 2524998 - DNA, 25 bp, Homo sapien
acaatgaagatccttatgtttcttc

SEQ ID NO: 2524999 - DNA, 25 bp, Homo sapien
ttattattaccattgtcaagataat

SEQ ID NO: 2525000 - DNA, 25 bp, Homo sapien
ccacatgccctggagaagaggtcct

SEQ ID NO: 2525001 - DNA, 25 bp, Homo sapien
gaagctactagtccttggagatgca

SEQ ID NO: 2525002 - DNA, 25 bp, Homo sapien
tttgttgaatgaacgcacaagctgc

SEQ ID NO: 2525003 - DNA, 25 bp, Homo sapien
cacaagctgcactcctgaggtaaca

SEQ ID NO: 2525004 - DNA, 25 bp, Homo sapien
taaaagccggactaactgtggccag

SEQ ID NO: 2525005 - DNA, 25 bp, Homo sapien
catcaaggtcttcaagtctgcgggt

SEQ ID NO: 2525006 - DNA, 25 bp, Homo sapien
gaaaaaacagtagccacctcttgag

SEQ ID NO: 2525007 - DNA, 25 bp, Homo sapien
ccattaagtgagatagaccaagacc

SEQ ID NO: 2525008 - DNA, 25 bp, Homo sapien
gagatctccggtctccctaggagcg

SEQ ID NO: 2525009 - DNA, 25 bp, Homo sapien
cggcggtaacgatgcagcctgcggg

SEQ ID NO: 2525010 - DNA, 25 bp, Homo sapien
tgtctgcagaaccacgcgtcccacg

SEQ ID NO: 2525011 - DNA, 25 bp, Homo sapien
tgcgggtagcgcaggtgtctgcaga

SEQ ID NO: 2525012 - DNA, 25 bp, Homo sapien
aggcgcctgtcgttagggtcctgca

SEQ ID NO: 2525013 - DNA, 25 bp, Homo sapien
ttagggtcctgcacatggccccgcg

SEQ ID NO: 2525014 - DNA, 25 bp, Homo sapien
gtcgttagggtcctgcacatggccc

SEQ ID NO: 2525015 - DNA, 25 bp, Homo sapien
cctgtcgttagggtcctgcacatgg

SEQ ID NO: 2525016 - DNA, 25 bp, Homo sapien
taaatagtgtggtaaggctggcttg

SEQ ID NO: 2525017 - DNA, 25 bp, Homo sapien
tagtgtgagcctgtaaccccggcta

SEQ ID NO: 2525018 - DNA, 25 bp, Homo sapien
ggtagtgtgagcctgtaaccccggc

SEQ ID NO: 2525019 - DNA, 25 bp, Homo sapien
catggtgataaatgctactgagaaa

SEQ ID NO: 2525020 - DNA, 25 bp, Homo sapien
ccagggagccaatcgacgcgcagaa

SEQ ID NO: 2525021 - DNA, 25 bp, Homo sapien
gcttcgtgcctctggttccagatgt

SEQ ID NO: 2525022 - DNA, 25 bp, Homo sapien
ctccagggagccaatcgacgcgcag

SEQ ID NO: 2525023 - DNA, 25 bp, Homo sapien
cagcttcgtgcctctggttccagat

SEQ ID NO: 2525024 - DNA, 25 bp, Homo sapien
gaaatatgggaagttaaatctgtca

SEQ ID NO: 2525025 - DNA, 25 bp, Homo sapien
cccaagagtaggattattgtgttac

SEQ ID NO: 2525026 - DNA, 25 bp, Homo sapien
gaaaatattcatacataatcccaag

SEQ ID NO: 2525027 - DNA, 25 bp, Homo sapien
tactaccaccagtaatgtattaaag

SEQ ID NO: 2525028 - DNA, 25 bp, Homo sapien
gctttcccaaatgtcgagattacag

SEQ ID NO: 2525029 - DNA, 25 bp, Homo sapien
tctacctgcataggtggtactacag

SEQ ID NO: 2525030 - DNA, 25 bp, Homo sapien
gccaaaactggccaacgttgaatga

SEQ ID NO: 2525031 - DNA, 25 bp, Homo sapien
tactacaggtataggcctctatgcc

SEQ ID NO: 2525032 - DNA, 25 bp, Homo sapien
agtctcatggcggtcccaggtctct

SEQ ID NO: 2525033 - DNA, 25 bp, Homo sapien
gccaagcctccagtgtggcagagca

SEQ ID NO: 2525034 - DNA, 25 bp, Homo sapien
aacttggacttcatgttggccctaa

SEQ ID NO: 2525035 - DNA, 25 bp, Homo sapien
tatgtgaggccgaccagtctcatgg

SEQ ID NO: 2525036 - DNA, 25 bp, Homo sapien
ccaactaccgcagcagaactgcaaa

SEQ ID NO: 2525037 - DNA, 25 bp, Homo sapien
gaaggtggcaggaattcccgggtca

SEQ ID NO: 2525038 - DNA, 25 bp, Homo sapien
tgtggttcaaagattgttcctttgg

SEQ ID NO: 2525039 - DNA, 25 bp, Homo sapien
tgcagctgccaactaccgcagcaga

SEQ ID NO: 2525040 - DNA, 25 bp, Homo sapien
ggcttttgggcaacctctccgtgta

SEQ ID NO: 2525041 - DNA, 25 bp, Homo sapien
gcgctctggtaaggtgctcaggcca

SEQ ID NO: 2525042 - DNA, 25 bp, Homo sapien
tgtactgcgtctgtccacactcgat

SEQ ID NO: 2525043 - DNA, 25 bp, Homo sapien
ccccaggtgtgtatgaggcgctctg

SEQ ID NO: 2525044 - DNA, 25 bp, Homo sapien
ccacagcaggtatgttgggctctgc

SEQ ID NO: 2525045 - DNA, 25 bp, Homo sapien
agcaggtatgttgggctctgcccca

SEQ ID NO: 2525046 - DNA, 25 bp, Homo sapien
acagcaggtatgttgggctctgccc

SEQ ID NO: 2525047 - DNA, 25 bp, Homo sapien
gcaggtatgttgggctctgccccag

SEQ ID NO: 2525048 - DNA, 25 bp, Homo sapien
atgccagcctttgaacttgctcagc

SEQ ID NO: 2525049 - DNA, 25 bp, Homo sapien
aatatcagagccatccaagcatgcc

SEQ ID NO: 2525050 - DNA, 25 bp, Homo sapien
cttgctcagcaagagtagatgatca

SEQ ID NO: 2525051 - DNA, 25 bp, Homo sapien
tcctagccacttggcagcacttaaa

SEQ ID NO: 2525052 - DNA, 25 bp, Homo sapien
tcaatgtgctctcggagaagcagcc

SEQ ID NO: 2525053 - DNA, 25 bp, Homo sapien
gaagcagccacgttagcagcagata

SEQ ID NO: 2525054 - DNA, 25 bp, Homo sapien
cacagcatggtgtaaatagcatcag

SEQ ID NO: 2525055 - DNA, 25 bp, Homo sapien
ggtagctgacaagtccattcaaggg

SEQ ID NO: 2525056 - DNA, 25 bp, Homo sapien
ccacttctaataaatcgaaaggctc

SEQ ID NO: 2525057 - DNA, 25 bp, Homo sapien
cacactcaaaggagctgtggccgct

SEQ ID NO: 2525058 - DNA, 25 bp, Homo sapien
cttattgtcaggaatacatcctggc

SEQ ID NO: 2525059 - DNA, 25 bp, Homo sapien
ccaagaatttaaagatgtagggagg

SEQ ID NO: 2525060 - DNA, 25 bp, Homo sapien
ggatcctttctataatggtccttga

SEQ ID NO: 2525061 - DNA, 25 bp, Homo sapien
cagagttgacttgcatccaatacaa

SEQ ID NO: 2525062 - DNA, 25 bp, Homo sapien
ccaatacaactgatgcagctgtcat

SEQ ID NO: 2525063 - DNA, 25 bp, Homo sapien
ggtcgatttcatccttaggtcaggg

SEQ ID NO: 2525064 - DNA, 25 bp, Homo sapien
gcaaggcccaaagtgacagtgtcca

SEQ ID NO: 2525065 - DNA, 25 bp, Homo sapien
tgtgaactaaggtcgggatgaaccc

SEQ ID NO: 2525066 - DNA, 25 bp, Homo sapien
tctgctgaaagcacgagcgctctgt

SEQ ID NO: 2525067 - DNA, 25 bp, Homo sapien
tgggatgcacccagctaggctctgt

SEQ ID NO: 2525068 - DNA, 25 bp, Homo sapien
ctggaatgtggacgaaagtttggaa

SEQ ID NO: 2525069 - DNA, 25 bp, Homo sapien
tggaatgtggacgaaagtttggaaa

SEQ ID NO: 2525070 - DNA, 25 bp, Homo sapien
ccctggagggacgggccgcagtggt

SEQ ID NO: 2525071 - DNA, 25 bp, Homo sapien
gccgcagtggtggcttcccaagcca

SEQ ID NO: 2525072 - DNA, 25 bp, Homo sapien
tccacgcggatgtagcgagagtctg

SEQ ID NO: 2525073 - DNA, 25 bp, Homo sapien
gaatggcacaacgaagtttctccag

SEQ ID NO: 2525074 - DNA, 25 bp, Homo sapien
atgcaggtctccacgcggatgtagc

SEQ ID NO: 2525075 - DNA, 25 bp, Homo sapien
gggtcttcacggtagtgaatggcac

SEQ ID NO: 2525076 - DNA, 25 bp, Homo sapien
gccagcatcagagggttgggcccac

SEQ ID NO: 2525077 - DNA, 25 bp, Homo sapien
ttgggcccacatctgtgaggctccc

SEQ ID NO: 2525078 - DNA, 25 bp, Homo sapien
tccaggtttgcctccttgggtagcc

SEQ ID NO: 2525079 - DNA, 25 bp, Homo sapien
ttgggtagccccaagccaatcctgg

SEQ ID NO: 2525080 - DNA, 25 bp, Homo sapien
gagaaagtatctaacagcaggcctg

SEQ ID NO: 2525081 - DNA, 25 bp, Homo sapien
gggccctaatcctcaatgatgtctg

SEQ ID NO: 2525082 - DNA, 25 bp, Homo sapien
aacagagaaaggctagtgtgtccct

SEQ ID NO: 2525083 - DNA, 25 bp, Homo sapien
tggctggttcctgccgggccctaat

SEQ ID NO: 2525084 - DNA, 25 bp, Homo sapien
catcagccccacttggtacatggtg

SEQ ID NO: 2525085 - DNA, 25 bp, Homo sapien
aactcgatgtgctggtccgtctcca

SEQ ID NO: 2525086 - DNA, 25 bp, Homo sapien
ccccagaagaactcgatgtgctggt

SEQ ID NO: 2525087 - DNA, 25 bp, Homo sapien
acatgggcagtgtcgggacccccat

SEQ ID NO: 2525088 - DNA, 25 bp, Homo sapien
tgatgacaatgatacaggtctgtgg

SEQ ID NO: 2525089 - DNA, 25 bp, Homo sapien
gtctgcaggccaggcccaatcctgg

SEQ ID NO: 2525090 - DNA, 25 bp, Homo sapien
atgatgacaatgatacaggtctgtg

SEQ ID NO: 2525091 - DNA, 25 bp, Homo sapien
ggtctgcaggccaggcccaatcctg

SEQ ID NO: 2525092 - DNA, 25 bp, Homo sapien
tgaggaactcgaggttgatgtaggg

SEQ ID NO: 2525093 - DNA, 25 bp, Homo sapien
cggccgtcacgcactccacattctg

SEQ ID NO: 2525094 - DNA, 25 bp, Homo sapien
tggctgccgcgtagatgtccttgtt

SEQ ID NO: 2525095 - DNA, 25 bp, Homo sapien
cagccgcaggctccggatggctgcc

SEQ ID NO: 2525096 - DNA, 25 bp, Homo sapien
tggtcaggtaggtgaacctgcagca

SEQ ID NO: 2525097 - DNA, 25 bp, Homo sapien
cccgtcatggtcaggtaggtgaacc

SEQ ID NO: 2525098 - DNA, 25 bp, Homo sapien
cctcgcccgtcatggtcaggtaggt

SEQ ID NO: 2525099 - DNA, 25 bp, Homo sapien
gaggcgatctcagcgcacagggcct

SEQ ID NO: 2525100 - DNA, 25 bp, Homo sapien
gacactccactgatacaagtcgaga

SEQ ID NO: 2525101 - DNA, 25 bp, Homo sapien
cacatatggcgaccaggatcagcgt

SEQ ID NO: 2525102 - DNA, 25 bp, Homo sapien
tggacattcgggtctaagcctggag

SEQ ID NO: 2525103 - DNA, 25 bp, Homo sapien
gaggcctgagaccaataccagatga

SEQ ID NO: 2525104 - DNA, 25 bp, Homo sapien
tgatgatggaataaagccctccgcc

SEQ ID NO: 2525105 - DNA, 25 bp, Homo sapien
tgaacggaaggactgtggactccat

SEQ ID NO: 2525106 - DNA, 25 bp, Homo sapien
tctgtgcgtggcgtacgcatgccct

SEQ ID NO: 2525107 - DNA, 25 bp, Homo sapien
caacatgaaggagacgagcctggac

SEQ ID NO: 2525108 - DNA, 25 bp, Homo sapien
ggtcctctgtgggatcccaacccag

SEQ ID NO: 2525109 - DNA, 25 bp, Homo sapien
ccctaaggtcctctgtgggatccca

SEQ ID NO: 2525110 - DNA, 25 bp, Homo sapien
catgaaataagccttcctggcacat

SEQ ID NO: 2525111 - DNA, 25 bp, Homo sapien
tgaaataagccttcctggcacatgg

SEQ ID NO: 2525112 - DNA, 25 bp, Homo sapien
ggacgtctgcccgaattgcaatccc

SEQ ID NO: 2525113 - DNA, 25 bp, Homo sapien
caccagcgtcttccagaaggagggc

SEQ ID NO: 2525114 - DNA, 25 bp, Homo sapien
taggtgaggatatccgcttcctgca

SEQ ID NO: 2525115 - DNA, 25 bp, Homo sapien
tcaaacttcttgacgtaattgtagg

SEQ ID NO: 2525116 - DNA, 25 bp, Homo sapien
agcagcgacagcgaggaactctgca

SEQ ID NO: 2525117 - DNA, 25 bp, Homo sapien
gcagctccttacacacctgccacag

SEQ ID NO: 2525118 - DNA, 25 bp, Homo sapien
cagcagcgacagcgaggaactctgc

SEQ ID NO: 2525119 - DNA, 25 bp, Homo sapien
ccagtgaagcggatgttgaaggcat

SEQ ID NO: 2525120 - DNA, 25 bp, Homo sapien
gccactggccagcttgacgcagagc

SEQ ID NO: 2525121 - DNA, 25 bp, Homo sapien
gacgcagagctgagacgacggcact

SEQ ID NO: 2525122 - DNA, 25 bp, Homo sapien
ctgagacgacggcactgaggccagc

SEQ ID NO: 2525123 - DNA, 25 bp, Homo sapien
tgtgccttagcactcatggctccca

SEQ ID NO: 2525124 - DNA, 25 bp, Homo sapien
tatacgctgtggcagagactctggg

SEQ ID NO: 2525125 - DNA, 25 bp, Homo sapien
ccatttttggcaggcacatggctga

SEQ ID NO: 2525126 - DNA, 25 bp, Homo sapien
tctctgccctcagaacaccttagag

SEQ ID NO: 2525127 - DNA, 25 bp, Homo sapien
gcgtggtccgctgtcctctgcacag

SEQ ID NO: 2525128 - DNA, 25 bp, Homo sapien
tccaaggtgatctcaggggccgcgt

SEQ ID NO: 2525129 - DNA, 25 bp, Homo sapien
cacaatttccagtgggtccaaggtg

SEQ ID NO: 2525130 - DNA, 25 bp, Homo sapien
gcattcagcactcgattcatcacgg

SEQ ID NO: 2525131 - DNA, 25 bp, Homo sapien
taaacagaccttcatatatgatttc

SEQ ID NO: 2525132 - DNA, 25 bp, Homo sapien
gtgtctgtttatatgtcaagagaaa

SEQ ID NO: 2525133 - DNA, 25 bp, Homo sapien
tcatctgttaacaatgtcacttctg

SEQ ID NO: 2525134 - DNA, 25 bp, Homo sapien
ggggctgcccaaggacgctgcccgt

SEQ ID NO: 2525135 - DNA, 25 bp, Homo sapien
aggcgcaggctctcgatgggcacgt

SEQ ID NO: 2525136 - DNA, 25 bp, Homo sapien
tccttcagcagggcggcgatgctgt

SEQ ID NO: 2525137 - DNA, 25 bp, Homo sapien
tatacatgggtgtctggcgcagctc

SEQ ID NO: 2525138 - DNA, 25 bp, Homo sapien
tccagtgtggtgttgagggactgca

SEQ ID NO: 2525139 - DNA, 25 bp, Homo sapien
ggagcagtcaggctgagatctcggc

SEQ ID NO: 2525140 - DNA, 25 bp, Homo sapien
agtcaggctgagatctcggccaggt

SEQ ID NO: 2525141 - DNA, 25 bp, Homo sapien
cagtcaggctgagatctcggccagg

SEQ ID NO: 2525142 - DNA, 25 bp, Homo sapien
agcagtcaggctgagatctcggcca

SEQ ID NO: 2525143 - DNA, 25 bp, Homo sapien
ggttgatgtactgcacaagtgccac

SEQ ID NO: 2525144 - DNA, 25 bp, Homo sapien
catgtcggacatcgatgcatgcgca

SEQ ID NO: 2525145 - DNA, 25 bp, Homo sapien
tggcggcatagctggttgatgtact

SEQ ID NO: 2525146 - DNA, 25 bp, Homo sapien
aagtgccacgtccatctccagggtc

SEQ ID NO: 2525147 - DNA, 25 bp, Homo sapien
gcctggctcggtcaataacaaattt

SEQ ID NO: 2525148 - DNA, 25 bp, Homo sapien
tctcaaagtgaagatcgtaaccaca

SEQ ID NO: 2525149 - DNA, 25 bp, Homo sapien
gctacggatatcttgcctggctcgg

SEQ ID NO: 2525150 - DNA, 25 bp, Homo sapien
acaggacaagatcgccctccagacg

SEQ ID NO: 2525151 - DNA, 25 bp, Homo sapien
tggcttcttctcacttaaggcagtc

SEQ ID NO: 2525152 - DNA, 25 bp, Homo sapien
ttggcttcacagttggcttcttctc

SEQ ID NO: 2525153 - DNA, 25 bp, Homo sapien
catctggtttgctcttttctggtga

SEQ ID NO: 2525154 - DNA, 25 bp, Homo sapien
gggtccttttcatctggtttgctct

SEQ ID NO: 2525155 - DNA, 25 bp, Homo sapien
ctcgttctgtcaccagtgcagtggt

SEQ ID NO: 2525156 - DNA, 25 bp, Homo sapien
gcttcttgagtagcttcttgagtag

SEQ ID NO: 2525157 - DNA, 25 bp, Homo sapien
cttcttgagtagcttcttgagtagc

SEQ ID NO: 2525158 - DNA, 25 bp, Homo sapien
tcagcttcttgagtagcttcttgag

SEQ ID NO: 2525159 - DNA, 25 bp, Homo sapien
aaacttgggctttggcacgccatac

SEQ ID NO: 2525160 - DNA, 25 bp, Homo sapien
gtgataggccgcttggtgctcacca

SEQ ID NO: 2525161 - DNA, 25 bp, Homo sapien
tgggctttggcacgccatacttcct

SEQ ID NO: 2525162 - DNA, 25 bp, Homo sapien
gtacttgctcttgtcaaacttgggc

SEQ ID NO: 2525163 - DNA, 25 bp, Homo sapien
tatctccgtcagaacctctctggct

SEQ ID NO: 2525164 - DNA, 25 bp, Homo sapien
tctgctctgaatgggcacaactctt

SEQ ID NO: 2525165 - DNA, 25 bp, Homo sapien
agcaccttttttggcggccggacat

SEQ ID NO: 2525166 - DNA, 25 bp, Homo sapien
agagactctgatgggcttcgctggt

SEQ ID NO: 2525167 - DNA, 25 bp, Homo sapien
ctgatttactacagacacggttaga

SEQ ID NO: 2525168 - DNA, 25 bp, Homo sapien
acggttagaatctcttctgttgaca

SEQ ID NO: 2525169 - DNA, 25 bp, Homo sapien
ccatccaaacttgacaaaccaatca

SEQ ID NO: 2525170 - DNA, 25 bp, Homo sapien
gagtatcaaagagactctgatttac

SEQ ID NO: 2525171 - DNA, 25 bp, Homo sapien
atgtccgacaccgaggccgtctctg

SEQ ID NO: 2525172 - DNA, 25 bp, Homo sapien
cagggaagtgactgtgtacatggag

SEQ ID NO: 2525173 - DNA, 25 bp, Homo sapien
tacatggagcccatgtccgacaccg

SEQ ID NO: 2525174 - DNA, 25 bp, Homo sapien
ctccacgactgcgaagcctttgatg

SEQ ID NO: 2525175 - DNA, 25 bp, Homo sapien
ctgccggtgctgcacagggaaatgt

SEQ ID NO: 2525176 - DNA, 25 bp, Homo sapien
ccggtgctgcacagggaaatgtcca

SEQ ID NO: 2525177 - DNA, 25 bp, Homo sapien
gggaaatgtccaggctttcctggct

SEQ ID NO: 2525178 - DNA, 25 bp, Homo sapien
cagggaaatgtccaggctttcctgg

SEQ ID NO: 2525179 - DNA, 25 bp, Homo sapien
atgggcagctcgaggccggcaggca

SEQ ID NO: 2525180 - DNA, 25 bp, Homo sapien
agggatgggcagctcgaggccggca

SEQ ID NO: 2525181 - DNA, 25 bp, Homo sapien
aggcccggagggatgggcagctcga

SEQ ID NO: 2525182 - DNA, 25 bp, Homo sapien
cggagggatgggcagctcgaggccg

SEQ ID NO: 2525183 - DNA, 25 bp, Homo sapien
atgccctgcgagctgcagatggagg

SEQ ID NO: 2525184 - DNA, 25 bp, Homo sapien
aaggccagtgtcttctcgggctcaa

SEQ ID NO: 2525185 - DNA, 25 bp, Homo sapien
tgtcttctcgggctcaactttcccg

SEQ ID NO: 2525186 - DNA, 25 bp, Homo sapien
gcgctgatgctcatggcgggggtca

SEQ ID NO: 2525187 - DNA, 25 bp, Homo sapien
cagcgggatgtagatctcgtctttg

SEQ ID NO: 2525188 - DNA, 25 bp, Homo sapien
ctgcagcgggatgtagatctcgtct

SEQ ID NO: 2525189 - DNA, 25 bp, Homo sapien
tgcagcgggatgtagatctcgtctt

SEQ ID NO: 2525190 - DNA, 25 bp, Homo sapien
cgggatgtagatctcgtctttgaag

SEQ ID NO: 2525191 - DNA, 25 bp, Homo sapien
tgagtgcgcggtggaaccacagcat

SEQ ID NO: 2525192 - DNA, 25 bp, Homo sapien
ccggagatcaccagcaagcggctgt

SEQ ID NO: 2525193 - DNA, 25 bp, Homo sapien
tgctgcctccgatgctgagcacggt

SEQ ID NO: 2525194 - DNA, 25 bp, Homo sapien
tccgagtccacggtgcgggaagact

SEQ ID NO: 2525195 - DNA, 25 bp, Homo sapien
gctgtgacactcatgttagtaggca

SEQ ID NO: 2525196 - DNA, 25 bp, Homo sapien
tagtaggcagggtcacttcggccac

SEQ ID NO: 2525197 - DNA, 25 bp, Homo sapien
gccaggcacccttccatgagtgcat

SEQ ID NO: 2525198 - DNA, 25 bp, Homo sapien
catgaaaatacgtagagaacctgcc

SEQ ID NO: 2525199 - DNA, 25 bp, Homo sapien
agcccccgcaggcgccgcctgagac

SEQ ID NO: 2525200 - DNA, 25 bp, Homo sapien
cccggagcccccgcaggcgccgcct

SEQ ID NO: 2525201 - DNA, 25 bp, Homo sapien
cggagcccccgcaggcgccgcctga

SEQ ID NO: 2525202 - DNA, 25 bp, Homo sapien
gagcccccgcaggcgccgcctgaga

SEQ ID NO: 2525203 - DNA, 25 bp, Homo sapien
ctccgactgcaaggccatcagcatg

SEQ ID NO: 2525204 - DNA, 25 bp, Homo sapien
tacagcttgtggagctccgactgca

SEQ ID NO: 2525205 - DNA, 25 bp, Homo sapien
gtcgtacagcttgtggagctccgac

SEQ ID NO: 2525206 - DNA, 25 bp, Homo sapien
ttgtggagctccgactgcaaggcca

SEQ ID NO: 2525207 - DNA, 25 bp, Homo sapien
gatggaaaacaagctccttcacgca

SEQ ID NO: 2525208 - DNA, 25 bp, Homo sapien
aggagatggaaaacaagctccttca

SEQ ID NO: 2525209 - DNA, 25 bp, Homo sapien
ctgccaggagatggaaaacaagctc

SEQ ID NO: 2525210 - DNA, 25 bp, Homo sapien
aaaacaagctccttcacgcaggctg

SEQ ID NO: 2525211 - DNA, 25 bp, Homo sapien
catagccttaagagaaagtgggcca

SEQ ID NO: 2525212 - DNA, 25 bp, Homo sapien
ttaagagaaagtgggccagagtccc

SEQ ID NO: 2525213 - DNA, 25 bp, Homo sapien
ggaacagcattcagctagatttttg

SEQ ID NO: 2525214 - DNA, 25 bp, Homo sapien
ctggccggctggcatagccttaaga

SEQ ID NO: 2525215 - DNA, 25 bp, Homo sapien
taaatgctgacaggcacaatttgtg

SEQ ID NO: 2525216 - DNA, 25 bp, Homo sapien
tgtgccaaggtctccttcataccag

SEQ ID NO: 2525217 - DNA, 25 bp, Homo sapien
gatggaccacacgtttgtgccaagg

SEQ ID NO: 2525218 - DNA, 25 bp, Homo sapien
gaaacactgtctagaaccacaagat

SEQ ID NO: 2525219 - DNA, 25 bp, Homo sapien
ccagatggctcttgtacaggataaa

SEQ ID NO: 2525220 - DNA, 25 bp, Homo sapien
cactgcttgcgaattctggttggaa

SEQ ID NO: 2525221 - DNA, 25 bp, Homo sapien
tgtcctggaacatgggctctcatag

SEQ ID NO: 2525222 - DNA, 25 bp, Homo sapien
tagcattcatgtaagacgaccttgg

SEQ ID NO: 2525223 - DNA, 25 bp, Homo sapien
gattttgcaacattgttcatttcca

SEQ ID NO: 2525224 - DNA, 25 bp, Homo sapien
tatgcagttataacctttgattttg

SEQ ID NO: 2525225 - DNA, 25 bp, Homo sapien
gttcatttccacaccacccttcacc

SEQ ID NO: 2525226 - DNA, 25 bp, Homo sapien
tcacccctaaagttacaataatggc

SEQ ID NO: 2525227 - DNA, 25 bp, Homo sapien
tgtcaggctcatcttcggacttccc

SEQ ID NO: 2525228 - DNA, 25 bp, Homo sapien
cctgcaggaggacggatgtcggaat

SEQ ID NO: 2525229 - DNA, 25 bp, Homo sapien
ccaggggcagggaatgtaacaccag

SEQ ID NO: 2525230 - DNA, 25 bp, Homo sapien
aaggccatagccagtgggaactcca

SEQ ID NO: 2525231 - DNA, 25 bp, Homo sapien
ccagtttgatgtggaccctgtctgt

SEQ ID NO: 2525232 - DNA, 25 bp, Homo sapien
tgaggttcagctggccatttcgctt

SEQ ID NO: 2525233 - DNA, 25 bp, Homo sapien
catttcgcttcactttgtggccgag

SEQ ID NO: 2525234 - DNA, 25 bp, Homo sapien
tgtggccgaggccatatacgagcac

SEQ ID NO: 2525235 - DNA, 25 bp, Homo sapien
tggattcggaaattgggaactcttc

SEQ ID NO: 2525236 - DNA, 25 bp, Homo sapien
tgccccggggaaattcacgtccatg

SEQ ID NO: 2525237 - DNA, 25 bp, Homo sapien
tgttgactttggattcggaaattgg

SEQ ID NO: 2525238 - DNA, 25 bp, Homo sapien
aattcacgtccatgttgactttgga

SEQ ID NO: 2525239 - DNA, 25 bp, Homo sapien
tgccctggtaaaagaggtccgtggc

SEQ ID NO: 2525240 - DNA, 25 bp, Homo sapien
tgtttcgtcagctctaaaaggctct

SEQ ID NO: 2525241 - DNA, 25 bp, Homo sapien
tctctcactgtctgggagttgccct

SEQ ID NO: 2525242 - DNA, 25 bp, Homo sapien
gcaatgctgtaaagactgcgccagg

SEQ ID NO: 2525243 - DNA, 25 bp, Homo sapien
tagtgctgagggcagactcatcacc

SEQ ID NO: 2525244 - DNA, 25 bp, Homo sapien
caggtatatttcagggcatctaagt

SEQ ID NO: 2525245 - DNA, 25 bp, Homo sapien
tggaacagcctcagcagaacttatg

SEQ ID NO: 2525246 - DNA, 25 bp, Homo sapien
tatggaccagtagcgatgtagtgca

SEQ ID NO: 2525247 - DNA, 25 bp, Homo sapien
gggcgaagatattgagcagggccat

SEQ ID NO: 2525248 - DNA, 25 bp, Homo sapien
tggacagcagttgcaggtgctccag

SEQ ID NO: 2525249 - DNA, 25 bp, Homo sapien
tccagggtaatgtcccggatggcag

SEQ ID NO: 2525250 - DNA, 25 bp, Homo sapien
agtgaacaagtgaggcaacttcggg

SEQ ID NO: 2525251 - DNA, 25 bp, Homo sapien
tgtgaccagcccattggtggcagtc

SEQ ID NO: 2525252 - DNA, 25 bp, Homo sapien
agcacaccttcactgcggaggtacg

SEQ ID NO: 2525253 - DNA, 25 bp, Homo sapien
aggataccagtatcgcaccagcaca

SEQ ID NO: 2525254 - DNA, 25 bp, Homo sapien
gaggtacgtttctacctgcaccagt

SEQ ID NO: 2525255 - DNA, 25 bp, Homo sapien
gatggggtttcattatgttggctag

SEQ ID NO: 2525256 - DNA, 25 bp, Homo sapien
gagatggggtttcattatgttggct

SEQ ID NO: 2525257 - DNA, 25 bp, Homo sapien
tcaccgcaacctctgtctctggggt

SEQ ID NO: 2525258 - DNA, 25 bp, Homo sapien
ctggggttcaagcaattctcctgcc

SEQ ID NO: 2525259 - DNA, 25 bp, Homo sapien
gaacagtttgaacatgtcggacaga

SEQ ID NO: 2525260 - DNA, 25 bp, Homo sapien
tacagatatgcccaccatgactagc

SEQ ID NO: 2525261 - DNA, 25 bp, Homo sapien
cacagctttgagactggagagccta

SEQ ID NO: 2525262 - DNA, 25 bp, Homo sapien
gaaagctcaggcaagtcaattggca

SEQ ID NO: 2525263 - DNA, 25 bp, Homo sapien
ttcagcatccctcggatggcaaatt

SEQ ID NO: 2525264 - DNA, 25 bp, Homo sapien
tccctcggatggcaaattttggcag

SEQ ID NO: 2525265 - DNA, 25 bp, Homo sapien
actgctggctacattattgctgtct

SEQ ID NO: 2525266 - DNA, 25 bp, Homo sapien
tctggagagcgggttactactgtga

SEQ ID NO: 2525267 - DNA, 25 bp, Homo sapien
gtctcttgggatgccaccattctct

SEQ ID NO: 2525268 - DNA, 25 bp, Homo sapien
ctcttcgtagagaaattcaaccgtc

SEQ ID NO: 2525269 - DNA, 25 bp, Homo sapien
tcaatggtgggaagataaaggtctc

SEQ ID NO: 2525270 - DNA, 25 bp, Homo sapien
tcaaccgtctgtcgggcaatatcca

SEQ ID NO: 2525271 - DNA, 25 bp, Homo sapien
tcattttcgttaactcaaaataaca

SEQ ID NO: 2525272 - DNA, 25 bp, Homo sapien
gtgttcatcagtacaaaatgactaa

SEQ ID NO: 2525273 - DNA, 25 bp, Homo sapien
taacaaattacaggacaaatggaga

SEQ ID NO: 2525274 - DNA, 25 bp, Homo sapien
aaatgactaaaaatggtccattatt

SEQ ID NO: 2525275 - DNA, 25 bp, Homo sapien
gcccgatttccgctctgcttcattg

SEQ ID NO: 2525276 - DNA, 25 bp, Homo sapien
gaagcgtcttcggatggtaggaaaa

SEQ ID NO: 2525277 - DNA, 25 bp, Homo sapien
ccatgctttcaccagcagggcgtag

SEQ ID NO: 2525278 - DNA, 25 bp, Homo sapien
ttatctggtccaggcccgatttccg

SEQ ID NO: 2525279 - DNA, 25 bp, Homo sapien
ttcatcatctgcaatgggaggcggg

SEQ ID NO: 2525280 - DNA, 25 bp, Homo sapien
atcatctgcaatgggaggcgggtga

SEQ ID NO: 2525281 - DNA, 25 bp, Homo sapien
tcatcatctgcaatgggaggcgggt

SEQ ID NO: 2525282 - DNA, 25 bp, Homo sapien
catctgcaatgggaggcgggtgagg

SEQ ID NO: 2525283 - DNA, 25 bp, Homo sapien
ataatgacaggaggtgtcactatca

SEQ ID NO: 2525284 - DNA, 25 bp, Homo sapien
atgacaggaggtgtcactatcatat

SEQ ID NO: 2525285 - DNA, 25 bp, Homo sapien
tgacaggaggtgtcactatcatatt

SEQ ID NO: 2525286 - DNA, 25 bp, Homo sapien
tttataatgacaggaggtgtcacta

SEQ ID NO: 2525287 - DNA, 25 bp, Homo sapien
taggacaatttttgaaaatgagtaa

SEQ ID NO: 2525288 - DNA, 25 bp, Homo sapien
ggacaatttttgaaaatgagtaaca

SEQ ID NO: 2525289 - DNA, 25 bp, Homo sapien
ttaggacaatttttgaaaatgagta

SEQ ID NO: 2525290 - DNA, 25 bp, Homo sapien
ggtctgatgcaatactggtgccagc

SEQ ID NO: 2525291 - DNA, 25 bp, Homo sapien
cacggcagcaatccggcatggtggc

SEQ ID NO: 2525292 - DNA, 25 bp, Homo sapien
tctgctaggtcagtgcacaggtcag

SEQ ID NO: 2525293 - DNA, 25 bp, Homo sapien
cagggcctcaaagttagcgctgatc

SEQ ID NO: 2525294 - DNA, 25 bp, Homo sapien
gagaccaaatgaaggatttggaaag

SEQ ID NO: 2525295 - DNA, 25 bp, Homo sapien
caaatgaaggatttggaaagactta

SEQ ID NO: 2525296 - DNA, 25 bp, Homo sapien
tggaaaggagaccaaatgaaggatt

SEQ ID NO: 2525297 - DNA, 25 bp, Homo sapien
ctggaaaggagaccaaatgaaggat

SEQ ID NO: 2525298 - DNA, 25 bp, Homo sapien
cttggaagaatagcccgaggtgtgt

SEQ ID NO: 2525299 - DNA, 25 bp, Homo sapien
ttggaagaatagcccgaggtgtgtg

SEQ ID NO: 2525300 - DNA, 25 bp, Homo sapien
tggccacatgccaccagagacgtct

SEQ ID NO: 2525301 - DNA, 25 bp, Homo sapien
caagatatggtgagaggcgctgccc

SEQ ID NO: 2525302 - DNA, 25 bp, Homo sapien
ggcgctgcccgcagtatgtgaagta

SEQ ID NO: 2525303 - DNA, 25 bp, Homo sapien
gctgcccgcagtatgtgaagtacac

SEQ ID NO: 2525304 - DNA, 25 bp, Homo sapien
gaggtggagtcccctcagttctctc

SEQ ID NO: 2525305 - DNA, 25 bp, Homo sapien
aggaggtggagtcccctcagttctc

SEQ ID NO: 2525306 - DNA, 25 bp, Homo sapien
ggaggtggagtcccctcagttctct

SEQ ID NO: 2525307 - DNA, 25 bp, Homo sapien
gaggaggtggagtcccctcagttct

SEQ ID NO: 2525308 - DNA, 25 bp, Homo sapien
gggagagagtcacgtctaagcgaac

SEQ ID NO: 2525309 - DNA, 25 bp, Homo sapien
ccattatagtgcacggctcggccgt

SEQ ID NO: 2525310 - DNA, 25 bp, Homo sapien
gaacgctcttccactgtaacaaact

SEQ ID NO: 2525311 - DNA, 25 bp, Homo sapien
caaactggagccattatagtgcacg

SEQ ID NO: 2525312 - DNA, 25 bp, Homo sapien
cataggaaacgatttcaatttccca

SEQ ID NO: 2525313 - DNA, 25 bp, Homo sapien
gcttctgtagtgaagccaaaggaaa

SEQ ID NO: 2525314 - DNA, 25 bp, Homo sapien
aggaaactatgggtccggtgtcatc

SEQ ID NO: 2525315 - DNA, 25 bp, Homo sapien
tgtcatcatcggtgtctccatagga

SEQ ID NO: 2525316 - DNA, 25 bp, Homo sapien
ctcgcgaggggctccaagtaatctc

SEQ ID NO: 2525317 - DNA, 25 bp, Homo sapien
tcgaacaggcggaaacactcgcgag

SEQ ID NO: 2525318 - DNA, 25 bp, Homo sapien
tgagaacatgcaggctcgaacaggc

SEQ ID NO: 2525319 - DNA, 25 bp, Homo sapien
gcagtggtgaagtggcatagataaa

SEQ ID NO: 2525320 - DNA, 25 bp, Homo sapien
agcttctctatcagataaaagcaac

SEQ ID NO: 2525321 - DNA, 25 bp, Homo sapien
tgaagtgtataagtcaatgttttgt

SEQ ID NO: 2525322 - DNA, 25 bp, Homo sapien
tatatttatggggtaagtcaatggt

SEQ ID NO: 2525323 - DNA, 25 bp, Homo sapien
atttgaagtgtataagtcaatgttt

SEQ ID NO: 2525324 - DNA, 25 bp, Homo sapien
tgtacctccacaactgcaagtcgct

SEQ ID NO: 2525325 - DNA, 25 bp, Homo sapien
tgtcttcggtcagcctgcaaaggag

SEQ ID NO: 2525326 - DNA, 25 bp, Homo sapien
gccgagcacagtcccggtagagcat

SEQ ID NO: 2525327 - DNA, 25 bp, Homo sapien
agagcatcctcagccgttcacactg

SEQ ID NO: 2525328 - DNA, 25 bp, Homo sapien
actcccgcaactcccaagtgggtgc

SEQ ID NO: 2525329 - DNA, 25 bp, Homo sapien
cgcaactcccaagtgggtgctgact

SEQ ID NO: 2525330 - DNA, 25 bp, Homo sapien
tcccgcaactcccaagtgggtgctg

SEQ ID NO: 2525331 - DNA, 25 bp, Homo sapien
cccgcaactcccaagtgggtgctga

SEQ ID NO: 2525332 - DNA, 25 bp, Homo sapien
cctctggtgcagtccaactcctgga

SEQ ID NO: 2525333 - DNA, 25 bp, Homo sapien
tttgtcttccataacgtagcccagc

SEQ ID NO: 2525334 - DNA, 25 bp, Homo sapien
caacaatgagggcaagtgcttagcc

SEQ ID NO: 2525335 - DNA, 25 bp, Homo sapien
caaataccccgagacatctttgtct

SEQ ID NO: 2525336 - DNA, 25 bp, Homo sapien
caagggatccagttaatgtctcagg

SEQ ID NO: 2525337 - DNA, 25 bp, Homo sapien
cactgttctgcaaagtaacccggaa

SEQ ID NO: 2525338 - DNA, 25 bp, Homo sapien
tccggtagcctgctgtctgggacca

SEQ ID NO: 2525339 - DNA, 25 bp, Homo sapien
gccacttaattcatcccagaagagg

SEQ ID NO: 2525340 - DNA, 25 bp, Homo sapien
caaaatcatgtgagaccactgctct

SEQ ID NO: 2525341 - DNA, 25 bp, Homo sapien
tatgtcttcgaatgcaatctaagcc

SEQ ID NO: 2525342 - DNA, 25 bp, Homo sapien
tcagaggcagtgaactaaggaccta

SEQ ID NO: 2525343 - DNA, 25 bp, Homo sapien
tataagaggatacccagaaacagtc

SEQ ID NO: 2525344 - DNA, 25 bp, Homo sapien
attaggaagttaaacactgactaga

SEQ ID NO: 2525345 - DNA, 25 bp, Homo sapien
gtaaactttatttggatcctcattc

SEQ ID NO: 2525346 - DNA, 25 bp, Homo sapien
taataatttagataggtgataatgg

SEQ ID NO: 2525347 - DNA, 25 bp, Homo sapien
gataatggtgttgtagttatttaag

SEQ ID NO: 2525348 - DNA, 25 bp, Homo sapien
cagctcggctgttttgatgtgtgtg

SEQ ID NO: 2525349 - DNA, 25 bp, Homo sapien
tgaagacacttaacataccattatc

SEQ ID NO: 2525350 - DNA, 25 bp, Homo sapien
tttctaggtctgtgatgcacgtgag

SEQ ID NO: 2525351 - DNA, 25 bp, Homo sapien
caggtgttgtccttacagctcggct

SEQ ID NO: 2525352 - DNA, 25 bp, Homo sapien
cagcactacattcctgggctactag

SEQ ID NO: 2525353 - DNA, 25 bp, Homo sapien
cattcctgggctactaggttaagaa

SEQ ID NO: 2525354 - DNA, 25 bp, Homo sapien
ggctactaggttaagaacttcaaca

SEQ ID NO: 2525355 - DNA, 25 bp, Homo sapien
taggttaagaacttcaacagctgct

SEQ ID NO: 2525356 - DNA, 25 bp, Homo sapien
gtcatcagtgttcattgtctaaaaa

SEQ ID NO: 2525357 - DNA, 25 bp, Homo sapien
atttcaaagtcatcagtgttcattg

SEQ ID NO: 2525358 - DNA, 25 bp, Homo sapien
tcaaagtcatcagtgttcattgtct

SEQ ID NO: 2525359 - DNA, 25 bp, Homo sapien
aagtcatcagtgttcattgtctaaa

SEQ ID NO: 2525360 - DNA, 25 bp, Homo sapien
gcttgcaccatgtcagcacataagg

SEQ ID NO: 2525361 - DNA, 25 bp, Homo sapien
cagcttgcaccatgtcagcacataa

SEQ ID NO: 2525362 - DNA, 25 bp, Homo sapien
gtcagcttgcaccatgtcagcacat

SEQ ID NO: 2525363 - DNA, 25 bp, Homo sapien
cttgcaccatgtcagcacataaggc

SEQ ID NO: 2525364 - DNA, 25 bp, Homo sapien
catctcctgttgcaggaagtgaggt

SEQ ID NO: 2525365 - DNA, 25 bp, Homo sapien
tttcagcaaggagccgaacgactgc

SEQ ID NO: 2525366 - DNA, 25 bp, Homo sapien
gtgaggtgtgaatagagagacttcc

SEQ ID NO: 2525367 - DNA, 25 bp, Homo sapien
gagccgaacgactgccatcacagga

SEQ ID NO: 2525368 - DNA, 25 bp, Homo sapien
caacatggactggactgcctgtact

SEQ ID NO: 2525369 - DNA, 25 bp, Homo sapien
aggaagcaacatggactggactgcc

SEQ ID NO: 2525370 - DNA, 25 bp, Homo sapien
gcctgtactaccttctcagtaatgg

SEQ ID NO: 2525371 - DNA, 25 bp, Homo sapien
gactggactgcctgtactaccttct

SEQ ID NO: 2525372 - DNA, 25 bp, Homo sapien
ggtcatctagatgaaaattttcaca

SEQ ID NO: 2525373 - DNA, 25 bp, Homo sapien
gagcatgtgcatagactcattacag

SEQ ID NO: 2525374 - DNA, 25 bp, Homo sapien
cattgtagaagagccctaaccaaca

SEQ ID NO: 2525375 - DNA, 25 bp, Homo sapien
tacagtacagttaccattggcagac

SEQ ID NO: 2525376 - DNA, 25 bp, Homo sapien
agtctttctacagtctatgggtggg

SEQ ID NO: 2525377 - DNA, 25 bp, Homo sapien
tggaatagtcaatgtgtctgacgct

SEQ ID NO: 2525378 - DNA, 25 bp, Homo sapien
tcttggaacacaaagtctagacaat

SEQ ID NO: 2525379 - DNA, 25 bp, Homo sapien
ggtgggaatctgactgtagctatac

SEQ ID NO: 2525380 - DNA, 25 bp, Homo sapien
ttcattgatagaagccactactcca

SEQ ID NO: 2525381 - DNA, 25 bp, Homo sapien
tgttcattgatagaagccactactc

SEQ ID NO: 2525382 - DNA, 25 bp, Homo sapien
actactccaatgcttcctgaaattc

SEQ ID NO: 2525383 - DNA, 25 bp, Homo sapien
ctccaatgcttcctgaaattcctct

SEQ ID NO: 2525384 - DNA, 25 bp, Homo sapien
gattagcactaccaaccagctctga

SEQ ID NO: 2525385 - DNA, 25 bp, Homo sapien
cagacatagattagcactaccaacc

SEQ ID NO: 2525386 - DNA, 25 bp, Homo sapien
aaccagctctgacgtgtgggcagct

SEQ ID NO: 2525387 - DNA, 25 bp, Homo sapien
actaccaaccagctctgacgtgtgg

SEQ ID NO: 2525388 - DNA, 25 bp, Homo sapien
aattcaagaatttctcagattcctt

SEQ ID NO: 2525389 - DNA, 25 bp, Homo sapien
tacagctggttggataatacttgtc

SEQ ID NO: 2525390 - DNA, 25 bp, Homo sapien
attaatggatgcttatatatatggg

SEQ ID NO: 2525391 - DNA, 25 bp, Homo sapien
tccttatttagcttgaagaaacagg

SEQ ID NO: 2525392 - DNA, 25 bp, Homo sapien
cggcctggcgtgcaattctctgaag

SEQ ID NO: 2525393 - DNA, 25 bp, Homo sapien
gaagtttggcaagtttcctgccact

SEQ ID NO: 2525394 - DNA, 25 bp, Homo sapien
tgaacctcggatcctatcttgattg

SEQ ID NO: 2525395 - DNA, 25 bp, Homo sapien
ccccaattgtggaatgtacatcagt

SEQ ID NO: 2525396 - DNA, 25 bp, Homo sapien
taaatatagaagcagcccgtgcact

SEQ ID NO: 2525397 - DNA, 25 bp, Homo sapien
caggtatggccaatgacatctgccc

SEQ ID NO: 2525398 - DNA, 25 bp, Homo sapien
actctggacatgtgagggaccaaaa

SEQ ID NO: 2525399 - DNA, 25 bp, Homo sapien
cccgtgcactaggagttaaagcttt

SEQ ID NO: 2525400 - DNA, 25 bp, Homo sapien
ttgagcagcatttgattcaggtgcc

SEQ ID NO: 2525401 - DNA, 25 bp, Homo sapien
aggtgccatgagcaagctatgtagc

SEQ ID NO: 2525402 - DNA, 25 bp, Homo sapien
tgttgtggtccatatttgagcagca

SEQ ID NO: 2525403 - DNA, 25 bp, Homo sapien
gcaagctatgtagcaaggcgatcac

SEQ ID NO: 2525404 - DNA, 25 bp, Homo sapien
tgatgaagggacgcacaggatcagt

SEQ ID NO: 2525405 - DNA, 25 bp, Homo sapien
ctgatgaagggacgcacaggatcag

SEQ ID NO: 2525406 - DNA, 25 bp, Homo sapien
gatgaagggacgcacaggatcagtc

SEQ ID NO: 2525407 - DNA, 25 bp, Homo sapien
tgtcagtgcccagtgatggttaaga

SEQ ID NO: 2525408 - DNA, 25 bp, Homo sapien
tgtcaacaggaaaaagtgtcagtgc

SEQ ID NO: 2525409 - DNA, 25 bp, Homo sapien
tcaacaggaaaaagtgtcagtgccc

SEQ ID NO: 2525410 - DNA, 25 bp, Homo sapien
caggaaaaagtgtcagtgcccagtg

SEQ ID NO: 2525411 - DNA, 25 bp, Homo sapien
ctttttgtcgcctgtggatagtcca

SEQ ID NO: 2525412 - DNA, 25 bp, Homo sapien
gagttcctctctcggcaaatggaag

SEQ ID NO: 2525413 - DNA, 25 bp, Homo sapien
ccaatgctgacgatgaggcctgact

SEQ ID NO: 2525414 - DNA, 25 bp, Homo sapien
tgatagactctacaggtggcccaat

SEQ ID NO: 2525415 - DNA, 25 bp, Homo sapien
tttctccatgttggcgccagtacca

SEQ ID NO: 2525416 - DNA, 25 bp, Homo sapien
tggtcatgtctcgatccatcttcac

SEQ ID NO: 2525417 - DNA, 25 bp, Homo sapien
cgccagtaccaagtcggaagggccg

SEQ ID NO: 2525418 - DNA, 25 bp, Homo sapien
tcggaagggccgtccttctgaacta

SEQ ID NO: 2525419 - DNA, 25 bp, Homo sapien
tatggtcagagaagactacatctgc

SEQ ID NO: 2525420 - DNA, 25 bp, Homo sapien
cagttgcacttagagagacagtacc

SEQ ID NO: 2525421 - DNA, 25 bp, Homo sapien
ggccgaggcagtcgatacatgtaca

SEQ ID NO: 2525422 - DNA, 25 bp, Homo sapien
tcagagcttgggttctatggtcaga

SEQ ID NO: 2525423 - DNA, 25 bp, Homo sapien
ggataaatatcgagagcttgccatc

SEQ ID NO: 2525424 - DNA, 25 bp, Homo sapien
caatgtggtgtcaggttcagaagcg

SEQ ID NO: 2525425 - DNA, 25 bp, Homo sapien
gggatgactggtcttcccgcttgtg

SEQ ID NO: 2525426 - DNA, 25 bp, Homo sapien
ttttgtcaatgtggtgtcaggttca

SEQ ID NO: 2525427 - DNA, 25 bp, Homo sapien
tttggcggctctgctaaaatgaaaa

SEQ ID NO: 2525428 - DNA, 25 bp, Homo sapien
ttgttttggcggctctgctaaaatg

SEQ ID NO: 2525429 - DNA, 25 bp, Homo sapien
cattcaggaaaactgcagtgttgtt

SEQ ID NO: 2525430 - DNA, 25 bp, Homo sapien
ctgcagtgttgttttggcggctctg

SEQ ID NO: 2525431 - DNA, 25 bp, Homo sapien
tgggagctccacgtttccacagtct

SEQ ID NO: 2525432 - DNA, 25 bp, Homo sapien
gtttggacacacaagctggctggct

SEQ ID NO: 2525433 - DNA, 25 bp, Homo sapien
ccacagtcttctacgctcatcaggg

SEQ ID NO: 2525434 - DNA, 25 bp, Homo sapien
ttgctaagagcagggaggcgatctt

SEQ ID NO: 2525435 - DNA, 25 bp, Homo sapien
aggacatcctggagcgcgtcattcc

SEQ ID NO: 2525436 - DNA, 25 bp, Homo sapien
ttgagaagactaaggacatcctgga

SEQ ID NO: 2525437 - DNA, 25 bp, Homo sapien
gatcattgagaagactaaggacatc

SEQ ID NO: 2525438 - DNA, 25 bp, Homo sapien
tcctggagcgcgtcattcccagcag

SEQ ID NO: 2525439 - DNA, 25 bp, Homo sapien
gccgggccagacctgagtgcacagc

SEQ ID NO: 2525440 - DNA, 25 bp, Homo sapien
ctgtggctcgggcaagatggttagt

SEQ ID NO: 2525441 - DNA, 25 bp, Homo sapien
caagatggttagtgagaaggctgga

SEQ ID NO: 2525442 - DNA, 25 bp, Homo sapien
aaggctggacacctgccgggccaga

SEQ ID NO: 2525443 - DNA, 25 bp, Homo sapien
acagcggttggcaagcacctggaag

SEQ ID NO: 2525444 - DNA, 25 bp, Homo sapien
gcacaaggccactgcgtaccaggca

SEQ ID NO: 2525445 - DNA, 25 bp, Homo sapien
gctacacagtcgatccatgagctgc

SEQ ID NO: 2525446 - DNA, 25 bp, Homo sapien
gctggactcggtctgattgctcaag

SEQ ID NO: 2525447 - DNA, 25 bp, Homo sapien
tcgaccatcccaccacatgtgagtt

SEQ ID NO: 2525448 - DNA, 25 bp, Homo sapien
ttgcgcaagcgatagggtaacgagc

SEQ ID NO: 2525449 - DNA, 25 bp, Homo sapien
gaggtcatggtctcgccaaaggctt

SEQ ID NO: 2525450 - DNA, 25 bp, Homo sapien
aagagtccaatgctatttgcgcaag

SEQ ID NO: 2525451 - DNA, 25 bp, Homo sapien
ctccctgaaggaccatcgtcactgg

SEQ ID NO: 2525452 - DNA, 25 bp, Homo sapien
gactcgtacggcagctgtcagcaat

SEQ ID NO: 2525453 - DNA, 25 bp, Homo sapien
agcaattcccgcatgtgcaccagtg

SEQ ID NO: 2525454 - DNA, 25 bp, Homo sapien
gtcactggacccacaagatgcgtca

SEQ ID NO: 2525455 - DNA, 25 bp, Homo sapien
tgctgcggtggctggtcacgtggcg

SEQ ID NO: 2525456 - DNA, 25 bp, Homo sapien
aagcaaacagctgccctagcaggac

SEQ ID NO: 2525457 - DNA, 25 bp, Homo sapien
tcaatggccagcgactgcaggagtg

SEQ ID NO: 2525458 - DNA, 25 bp, Homo sapien
ggttggtgccgatgaaagcaaacag

SEQ ID NO: 2525459 - DNA, 25 bp, Homo sapien
gacatgctgcgaagaaaaacaggct

SEQ ID NO: 2525460 - DNA, 25 bp, Homo sapien
caggctgcctgacagcgtgagatat

SEQ ID NO: 2525461 - DNA, 25 bp, Homo sapien
cctgacagcgtgagatatcactttt

SEQ ID NO: 2525462 - DNA, 25 bp, Homo sapien
tccaggtcagaaggagctgacatgc

SEQ ID NO: 2525463 - DNA, 25 bp, Homo sapien
tttctcagagtacccaagagtgaat

SEQ ID NO: 2525464 - DNA, 25 bp, Homo sapien
gagtatattctctgttcatataaca

SEQ ID NO: 2525465 - DNA, 25 bp, Homo sapien
ttcatataacagaagccgattaggg

SEQ ID NO: 2525466 - DNA, 25 bp, Homo sapien
tatagctgtgtgtcttatatgaaca

SEQ ID NO: 2525467 - DNA, 25 bp, Homo sapien
gagatgcttctcgtgaggcccgact

SEQ ID NO: 2525468 - DNA, 25 bp, Homo sapien
cccgactgggctgcgatggtgacat

SEQ ID NO: 2525469 - DNA, 25 bp, Homo sapien
cactaacgtctttgttttagccagt

SEQ ID NO: 2525470 - DNA, 25 bp, Homo sapien
gtgacatgcagcaacagctcggctc

SEQ ID NO: 2525471 - DNA, 25 bp, Homo sapien
tcattcccatcaaaggagacttcct

SEQ ID NO: 2525472 - DNA, 25 bp, Homo sapien
gttttcaagatcattcccatcaaag

SEQ ID NO: 2525473 - DNA, 25 bp, Homo sapien
ccttcattgaacataaaagttctag

SEQ ID NO: 2525474 - DNA, 25 bp, Homo sapien
ggagacttccttcattgaacataaa

SEQ ID NO: 2525475 - DNA, 25 bp, Homo sapien
gaaaggcatgttgttctccagtttc

SEQ ID NO: 2525476 - DNA, 25 bp, Homo sapien
catggcatcatcaacttcactttgc

SEQ ID NO: 2525477 - DNA, 25 bp, Homo sapien
ctcattaaaatggtaatcataaaag

SEQ ID NO: 2525478 - DNA, 25 bp, Homo sapien
tccagtttcccctgcatggcatcat

SEQ ID NO: 2525479 - DNA, 25 bp, Homo sapien
ggaaatttattagagactgcagtgc

SEQ ID NO: 2525480 - DNA, 25 bp, Homo sapien
caccatttcctccatcacgtctggc

SEQ ID NO: 2525481 - DNA, 25 bp, Homo sapien
catggcattgagtttcttaaaggtc

SEQ ID NO: 2525482 - DNA, 25 bp, Homo sapien
gtgcatcaaccaagttcaagtgctt

SEQ ID NO: 2525483 - DNA, 25 bp, Homo sapien
aatcagtcagatatatgccatgctc

SEQ ID NO: 2525484 - DNA, 25 bp, Homo sapien
gatcacaatggaaatcagtcagata

SEQ ID NO: 2525485 - DNA, 25 bp, Homo sapien
caatggaaatcagtcagatatatgc

SEQ ID NO: 2525486 - DNA, 25 bp, Homo sapien
tgtgatcacaatggaaatcagtcag

SEQ ID NO: 2525487 - DNA, 25 bp, Homo sapien
tttagcatgcatcagtcaaatggga

SEQ ID NO: 2525488 - DNA, 25 bp, Homo sapien
ggaaacttgttaagctgcgccccat

SEQ ID NO: 2525489 - DNA, 25 bp, Homo sapien
caaattttgagagcccctagtctgg

SEQ ID NO: 2525490 - DNA, 25 bp, Homo sapien
gagataaacctagcacttgtcacac

SEQ ID NO: 2525491 - DNA, 25 bp, Homo sapien
tgaggtctagcacgcccagaaattt

SEQ ID NO: 2525492 - DNA, 25 bp, Homo sapien
cctggaggcagtctgatccgaggca

SEQ ID NO: 2525493 - DNA, 25 bp, Homo sapien
tccgaggcagatcaaagtagtttcc

SEQ ID NO: 2525494 - DNA, 25 bp, Homo sapien
tacttggtctaaattgaggtctagc

SEQ ID NO: 2525495 - DNA, 25 bp, Homo sapien
aagcctcctgagacatcctccgaag

SEQ ID NO: 2525496 - DNA, 25 bp, Homo sapien
ggattcttaacatggaacaagctaa

SEQ ID NO: 2525497 - DNA, 25 bp, Homo sapien
taaaagtttggaccgcaatagctcc

SEQ ID NO: 2525498 - DNA, 25 bp, Homo sapien
gtctaccagaaagggcaagcctcct

SEQ ID NO: 2525499 - DNA, 25 bp, Homo sapien
ctgagcgcgaactgtgcaagcaaag

SEQ ID NO: 2525500 - DNA, 25 bp, Homo sapien
gtgttgtgttcacggccacttctca

SEQ ID NO: 2525501 - DNA, 25 bp, Homo sapien
tcaggagtgttgtgttcacggccac

SEQ ID NO: 2525502 - DNA, 25 bp, Homo sapien
aaggagaaggtgactgtatctcctt

SEQ ID NO: 2525503 - DNA, 25 bp, Homo sapien
atggctttatcaggagtgttgtgtt

SEQ ID NO: 2525504 - DNA, 25 bp, Homo sapien
tgccatatcccagtgtgttgcctcc

SEQ ID NO: 2525505 - DNA, 25 bp, Homo sapien
ccagttcctaagacactacggctgc

SEQ ID NO: 2525506 - DNA, 25 bp, Homo sapien
tgttaggccccgcatatatcaccaa

SEQ ID NO: 2525507 - DNA, 25 bp, Homo sapien
tcaccaagtctttcggccaaccagt

SEQ ID NO: 2525508 - DNA, 25 bp, Homo sapien
tcaaaacagaaaatatactgttaga

SEQ ID NO: 2525509 - DNA, 25 bp, Homo sapien
cttcaaaacagaaaatatactgtta

SEQ ID NO: 2525510 - DNA, 25 bp, Homo sapien
ttcaaaacagaaaatatactgttag

SEQ ID NO: 2525511 - DNA, 25 bp, Homo sapien
ggggccttttgctgacaccagccag

SEQ ID NO: 2525512 - DNA, 25 bp, Homo sapien
tggggccttttgctgacaccagcca

SEQ ID NO: 2525513 - DNA, 25 bp, Homo sapien
tgagacctttctagatgaatggaca

SEQ ID NO: 2525514 - DNA, 25 bp, Homo sapien
gaaaatgcttcaacccctaagatgc

SEQ ID NO: 2525515 - DNA, 25 bp, Homo sapien
tgctaggatttaagcccatttgccc

SEQ ID NO: 2525516 - DNA, 25 bp, Homo sapien
tataaaccagatcctagcacctctg

SEQ ID NO: 2525517 - DNA, 25 bp, Homo sapien
gagctcctgggatatggaccgtttc

SEQ ID NO: 2525518 - DNA, 25 bp, Homo sapien
gggcaggaatctttaaaccagtgag

SEQ ID NO: 2525519 - DNA, 25 bp, Homo sapien
tagtcatattgcgaagagcatctgc

SEQ ID NO: 2525520 - DNA, 25 bp, Homo sapien
tatcaaatctaaggtacaggcagcg

SEQ ID NO: 2525521 - DNA, 25 bp, Homo sapien
tttttcaagggcgaagcccagttga

SEQ ID NO: 2525522 - DNA, 25 bp, Homo sapien
ccacagggttagcatcctgtaaaca

SEQ ID NO: 2525523 - DNA, 25 bp, Homo sapien
gatatccaagagaagacctgatcaa

SEQ ID NO: 2525524 - DNA, 25 bp, Homo sapien
ggccactttgcaaatcccacagggt

SEQ ID NO: 2525525 - DNA, 25 bp, Homo sapien
gagtactacgctttcacccaaagaa

SEQ ID NO: 2525526 - DNA, 25 bp, Homo sapien
ggagtactacgctttcacccaaaga

SEQ ID NO: 2525527 - DNA, 25 bp, Homo sapien
aggagtactacgctttcacccaaag

SEQ ID NO: 2525528 - DNA, 25 bp, Homo sapien
cacttctggtctggtgcaccacacg

SEQ ID NO: 2525529 - DNA, 25 bp, Homo sapien
tcatcagggaacagcctgcacttct

SEQ ID NO: 2525530 - DNA, 25 bp, Homo sapien
cacctcagcaaaaaccggacactgg

SEQ ID NO: 2525531 - DNA, 25 bp, Homo sapien
cactgggttttaagcagcaacgccg

SEQ ID NO: 2525532 - DNA, 25 bp, Homo sapien
attatgtcttccagggctactgtca

SEQ ID NO: 2525533 - DNA, 25 bp, Homo sapien
cattatgtcttccagggctactgtc

SEQ ID NO: 2525534 - DNA, 25 bp, Homo sapien
ttatgtcttccagggctactgtcag

SEQ ID NO: 2525535 - DNA, 25 bp, Homo sapien
tggctggtatagagtaccagctgca

SEQ ID NO: 2525536 - DNA, 25 bp, Homo sapien
gctggtatagagtaccagctgcact

SEQ ID NO: 2525537 - DNA, 25 bp, Homo sapien
ctgcactagctgaggcatcagggca

SEQ ID NO: 2525538 - DNA, 25 bp, Homo sapien
gtaccagctgcactagctgaggcat

SEQ ID NO: 2525539 - DNA, 25 bp, Homo sapien
cactggaagaaggtgaccaagcata

SEQ ID NO: 2525540 - DNA, 25 bp, Homo sapien
tagccttagtaacttgttccaagcc

SEQ ID NO: 2525541 - DNA, 25 bp, Homo sapien
ggtgaccaagcatagtagccttagt

SEQ ID NO: 2525542 - DNA, 25 bp, Homo sapien
catagtagccttagtaacttgttcc

SEQ ID NO: 2525543 - DNA, 25 bp, Homo sapien
gaagtctgccctctatataggtcag

SEQ ID NO: 2525544 - DNA, 25 bp, Homo sapien
tacccttagatcatggctgttggcc

SEQ ID NO: 2525545 - DNA, 25 bp, Homo sapien
tgttggcccaatctcacctgaaagc

SEQ ID NO: 2525546 - DNA, 25 bp, Homo sapien
cagagattaggctgtgccctccaca

SEQ ID NO: 2525547 - DNA, 25 bp, Homo sapien
tatttatgagggcagttgtgacctg

SEQ ID NO: 2525548 - DNA, 25 bp, Homo sapien
tctgctcacggtctgctatgtcact

SEQ ID NO: 2525549 - DNA, 25 bp, Homo sapien
catccagtcaggatttgggtggcaa

SEQ ID NO: 2525550 - DNA, 25 bp, Homo sapien
tagcatttccaacacttcatcacat

SEQ ID NO: 2525551 - DNA, 25 bp, Homo sapien
ctattagagagttcgtgggagtaca

SEQ ID NO: 2525552 - DNA, 25 bp, Homo sapien
cagaacagtaaaaggcgcatgtaga

SEQ ID NO: 2525553 - DNA, 25 bp, Homo sapien
tatttcagagggatcacactgagtc

SEQ ID NO: 2525554 - DNA, 25 bp, Homo sapien
taaagtagcaagcagttacaggcta

SEQ ID NO: 2525555 - DNA, 25 bp, Homo sapien
gtgttactgagaaggtgattctgaa

SEQ ID NO: 2525556 - DNA, 25 bp, Homo sapien
gaaggtgattctgaactgccatcag

SEQ ID NO: 2525557 - DNA, 25 bp, Homo sapien
catcagatagcgcaggcaggaggat

SEQ ID NO: 2525558 - DNA, 25 bp, Homo sapien
gaactgccatcagatagcgcaggca

SEQ ID NO: 2525559 - DNA, 25 bp, Homo sapien
tcgtacaacaatcttcagaatgtag

SEQ ID NO: 2525560 - DNA, 25 bp, Homo sapien
tctttagagacagtttggcacttgg

SEQ ID NO: 2525561 - DNA, 25 bp, Homo sapien
aagatacaggattctcgtacaacaa

SEQ ID NO: 2525562 - DNA, 25 bp, Homo sapien
tggcacttggtgattaagatacagg

SEQ ID NO: 2525563 - DNA, 25 bp, Homo sapien
atcggttgttttggagctgttcagc

SEQ ID NO: 2525564 - DNA, 25 bp, Homo sapien
cacatcccgtagctgggagagtcca

SEQ ID NO: 2525565 - DNA, 25 bp, Homo sapien
atcctcatcactgccaaatcggttg

SEQ ID NO: 2525566 - DNA, 25 bp, Homo sapien
cagccaggttggttaggatcacatc

SEQ ID NO: 2525567 - DNA, 25 bp, Homo sapien
agtttcacctgggtacaagatattt

SEQ ID NO: 2525568 - DNA, 25 bp, Homo sapien
tgggtacaagatatttaaaccagag

SEQ ID NO: 2525569 - DNA, 25 bp, Homo sapien
tcacctgggtacaagatatttaaac

SEQ ID NO: 2525570 - DNA, 25 bp, Homo sapien
cctgggtacaagatatttaaaccag

SEQ ID NO: 2525571 - DNA, 25 bp, Homo sapien
cagtgtacaatctgataagtctgac

SEQ ID NO: 2525572 - DNA, 25 bp, Homo sapien
caatcattgccttaatgctccacag

SEQ ID NO: 2525573 - DNA, 25 bp, Homo sapien
tgctccacagaaagagattcgaagc

SEQ ID NO: 2525574 - DNA, 25 bp, Homo sapien
ccaaaagtttcctcagagcatcaga

SEQ ID NO: 2525575 - DNA, 25 bp, Homo sapien
ccttctgaatttcagggcaaatttg

SEQ ID NO: 2525576 - DNA, 25 bp, Homo sapien
aatttgatcttttggagccatcaac

SEQ ID NO: 2525577 - DNA, 25 bp, Homo sapien
cagggcaaatttgatcttttggagc

SEQ ID NO: 2525578 - DNA, 25 bp, Homo sapien
ctgatggcaaggcagacttccttct

SEQ ID NO: 2525579 - DNA, 25 bp, Homo sapien
gaccgtcgaatgatgtctcgattcc

SEQ ID NO: 2525580 - DNA, 25 bp, Homo sapien
tgccaaagaagcaatcccgaccgtc

SEQ ID NO: 2525581 - DNA, 25 bp, Homo sapien
gaagcaatcccgaccgtcgaatgat

SEQ ID NO: 2525582 - DNA, 25 bp, Homo sapien
gatgtctcgattcctttcagtttgt

SEQ ID NO: 2525583 - DNA, 25 bp, Homo sapien
tgcttcaattggatgctgcttgccc

SEQ ID NO: 2525584 - DNA, 25 bp, Homo sapien
aatactgctaagatgatgtgcttca

SEQ ID NO: 2525585 - DNA, 25 bp, Homo sapien
tacaggtatctccattaaccatggc

SEQ ID NO: 2525586 - DNA, 25 bp, Homo sapien
tgaaagacaacgagaatgcagcgta

SEQ ID NO: 2525587 - DNA, 25 bp, Homo sapien
taattggtttataacctcattcgtg

SEQ ID NO: 2525588 - DNA, 25 bp, Homo sapien
acctcattcgtggttatagcctctt

SEQ ID NO: 2525589 - DNA, 25 bp, Homo sapien
cgcaccaacgtggtgcaataattgg

SEQ ID NO: 2525590 - DNA, 25 bp, Homo sapien
caccaacgtggtgcaataattggtt

SEQ ID NO: 2525591 - DNA, 25 bp, Homo sapien
aacttctagctagtcagctgggcca

SEQ ID NO: 2525592 - DNA, 25 bp, Homo sapien
gaagtgcagcaaagttcacgcggtt

SEQ ID NO: 2525593 - DNA, 25 bp, Homo sapien
tgtttgccaccaagatgactactgt

SEQ ID NO: 2525594 - DNA, 25 bp, Homo sapien
tgggatcaagatctaagacctgctg

SEQ ID NO: 2525595 - DNA, 25 bp, Homo sapien
tctctggcagacataatggaaggct

SEQ ID NO: 2525596 - DNA, 25 bp, Homo sapien
gaaggcttgattcccagggttacac

SEQ ID NO: 2525597 - DNA, 25 bp, Homo sapien
ggttacaccactgatcgatatagtc

SEQ ID NO: 2525598 - DNA, 25 bp, Homo sapien
agtgataatgtgactgactccaagt

SEQ ID NO: 2525599 - DNA, 25 bp, Homo sapien
aatattatacaccaagctggaggct

SEQ ID NO: 2525600 - DNA, 25 bp, Homo sapien
ccaatcctggtacgagagcaccacg

SEQ ID NO: 2525601 - DNA, 25 bp, Homo sapien
tgagatctgcacgacttgtaaactg

SEQ ID NO: 2525602 - DNA, 25 bp, Homo sapien
ctgaccatccgaaatattatacacc

SEQ ID NO: 2525603 - DNA, 25 bp, Homo sapien
agagctgcctgatccccctggagga

SEQ ID NO: 2525604 - DNA, 25 bp, Homo sapien
accacttgttccaccaaaaagagat

SEQ ID NO: 2525605 - DNA, 25 bp, Homo sapien
ccaaaaagagatcgggtggcagagc

SEQ ID NO: 2525606 - DNA, 25 bp, Homo sapien
gcatcaccaagtaggtgccacaggt

SEQ ID NO: 2525607 - DNA, 25 bp, Homo sapien
tagaggcagcccacagctagtattt

SEQ ID NO: 2525608 - DNA, 25 bp, Homo sapien
agaggcagcccacagctagtatttg

SEQ ID NO: 2525609 - DNA, 25 bp, Homo sapien
ttagaggcagcccacagctagtatt

SEQ ID NO: 2525610 - DNA, 25 bp, Homo sapien
ttttagaggcagcccacagctagta

SEQ ID NO: 2525611 - DNA, 25 bp, Homo sapien
ctcaataagacgtagctgaacagag

SEQ ID NO: 2525612 - DNA, 25 bp, Homo sapien
cgaagtgctcaataagacgtagctg

SEQ ID NO: 2525613 - DNA, 25 bp, Homo sapien
cacggacgaagtgctcaataagacg

SEQ ID NO: 2525614 - DNA, 25 bp, Homo sapien
ggctttgtacagcacggacgaagtg

SEQ ID NO: 2525615 - DNA, 25 bp, Homo sapien
gaaagtctacttagaagcatctcat

SEQ ID NO: 2525616 - DNA, 25 bp, Homo sapien
gaagtgggttggctacaaatacacc

SEQ ID NO: 2525617 - DNA, 25 bp, Homo sapien
tagaattgtacgttcctgaagtggg

SEQ ID NO: 2525618 - DNA, 25 bp, Homo sapien
ggaggctctataccgagaaagtcta

SEQ ID NO: 2525619 - DNA, 25 bp, Homo sapien
tctcttccaacttaagaatcttggg

SEQ ID NO: 2525620 - DNA, 25 bp, Homo sapien
tcttcatcattagtgtctccctctc

SEQ ID NO: 2525621 - DNA, 25 bp, Homo sapien
tgaagatgaacccttccacttctgc

SEQ ID NO: 2525622 - DNA, 25 bp, Homo sapien
tctagatccaagaactgggtcccca

SEQ ID NO: 2525623 - DNA, 25 bp, Homo sapien
acttccttgcaggtcgcgccatcac

SEQ ID NO: 2525624 - DNA, 25 bp, Homo sapien
tgcaggtcgcgccatcactgccatc

SEQ ID NO: 2525625 - DNA, 25 bp, Homo sapien
ccttgcaggtcgcgccatcactgcc

SEQ ID NO: 2525626 - DNA, 25 bp, Homo sapien
ttgcaggtcgcgccatcactgccat

SEQ ID NO: 2525627 - DNA, 25 bp, Homo sapien
actgtgctggcgagtgaagccagca

SEQ ID NO: 2525628 - DNA, 25 bp, Homo sapien
tgtctctctctttgctggtcaacat

SEQ ID NO: 2525629 - DNA, 25 bp, Homo sapien
tcactgtgctggcgagtgaagccag

SEQ ID NO: 2525630 - DNA, 25 bp, Homo sapien
ctctgtgtaaagtgctcactgtgct

SEQ ID NO: 2525631 - DNA, 25 bp, Homo sapien
aggcgctcttcagggtaagaagctg

SEQ ID NO: 2525632 - DNA, 25 bp, Homo sapien
aaaggcgctcttcagggtaagaagc

SEQ ID NO: 2525633 - DNA, 25 bp, Homo sapien
gcaaaggcgctcttcagggtaagaa

SEQ ID NO: 2525634 - DNA, 25 bp, Homo sapien
gcgctcttcagggtaagaagctgct

SEQ ID NO: 2525635 - DNA, 25 bp, Homo sapien
gcagagacttgatatccacttgtcc

SEQ ID NO: 2525636 - DNA, 25 bp, Homo sapien
ccaagctaagctcccagttgaatga

SEQ ID NO: 2525637 - DNA, 25 bp, Homo sapien
tgggccatagagcaacacaatgtct

SEQ ID NO: 2525638 - DNA, 25 bp, Homo sapien
gaaaaccagcttccatgatgtcgag

SEQ ID NO: 2525639 - DNA, 25 bp, Homo sapien
gcatggctagttagattctgctctc

SEQ ID NO: 2525640 - DNA, 25 bp, Homo sapien
cattttgagaggtaagcatggctag

SEQ ID NO: 2525641 - DNA, 25 bp, Homo sapien
tttggtataatcaagctgagctgac

SEQ ID NO: 2525642 - DNA, 25 bp, Homo sapien
cctgagtcttaggtaccaagagatc

SEQ ID NO: 2525643 - DNA, 25 bp, Homo sapien
gacctcaggtaatcctcccgcttcg

SEQ ID NO: 2525644 - DNA, 25 bp, Homo sapien
tcaggtaatcctcccgcttcggcct

SEQ ID NO: 2525645 - DNA, 25 bp, Homo sapien
caggtaatcctcccgcttcggcctc

SEQ ID NO: 2525646 - DNA, 25 bp, Homo sapien
cctgacctcaggtaatcctcccgct

SEQ ID NO: 2525647 - DNA, 25 bp, Homo sapien
actcagtagagaatttcagggctag

SEQ ID NO: 2525648 - DNA, 25 bp, Homo sapien
tggcccagcaaatcataggaggtct

SEQ ID NO: 2525649 - DNA, 25 bp, Homo sapien
tatggctaagccctatcatttgtga

SEQ ID NO: 2525650 - DNA, 25 bp, Homo sapien
ttttcacatcaaacccctggagaga

SEQ ID NO: 2525651 - DNA, 25 bp, Homo sapien
caaggcaggccggactacttgagtc

SEQ ID NO: 2525652 - DNA, 25 bp, Homo sapien
gtactattctagcaccggagggcgc

SEQ ID NO: 2525653 - DNA, 25 bp, Homo sapien
catatctacaaccacagcactttgg

SEQ ID NO: 2525654 - DNA, 25 bp, Homo sapien
gcttctactgtgtgccgggtactat

SEQ ID NO: 2525655 - DNA, 25 bp, Homo sapien
ctcagcaactggctaatattaattt

SEQ ID NO: 2525656 - DNA, 25 bp, Homo sapien
tctacctcagcaactggctaatatt

SEQ ID NO: 2525657 - DNA, 25 bp, Homo sapien
taagcaggggagacggtcaataaat

SEQ ID NO: 2525658 - DNA, 25 bp, Homo sapien
tctaagcaggggagacggtcaataa

SEQ ID NO: 2525659 - DNA, 25 bp, Homo sapien
tgggtgcagagggtataggcgcagc

SEQ ID NO: 2525660 - DNA, 25 bp, Homo sapien
gtaggtgcaaagggtgtgagtacag

SEQ ID NO: 2525661 - DNA, 25 bp, Homo sapien
taggtgcagaggatgtaggcacaca

SEQ ID NO: 2525662 - DNA, 25 bp, Homo sapien
tggatgtaggtgcattggacgtagg

SEQ ID NO: 2525663 - DNA, 25 bp, Homo sapien
cagaggaagtaggtgcattggatgt

SEQ ID NO: 2525664 - DNA, 25 bp, Homo sapien
ggaggtgcagtggatgtaggtgcag

SEQ ID NO: 2525665 - DNA, 25 bp, Homo sapien
ggtgcagtggatgtaggtgcagatg

SEQ ID NO: 2525666 - DNA, 25 bp, Homo sapien
gcagtggatgtaggtgcagatggtg

SEQ ID NO: 2525667 - DNA, 25 bp, Homo sapien
tgcagtggatgtaggtgcagatggt

SEQ ID NO: 2525668 - DNA, 25 bp, Homo sapien
tggatgtaggtgcagagggtgtagg

SEQ ID NO: 2525669 - DNA, 25 bp, Homo sapien
gcagtggatgtaggtgcagatggtg

SEQ ID NO: 2525670 - DNA, 25 bp, Homo sapien
ggtgcagtggatgtaggtgcagatg

SEQ ID NO: 2525671 - DNA, 25 bp, Homo sapien
ggatgtaggtgcagagggtgtaggt

SEQ ID NO: 2525672 - DNA, 25 bp, Homo sapien
gggaggtcaagcccggtggatcacc

SEQ ID NO: 2525673 - DNA, 25 bp, Homo sapien
tgggaggtataggttgcagtcagcc

SEQ ID NO: 2525674 - DNA, 25 bp, Homo sapien
ctttgggaggtcaagcccggtggat

SEQ ID NO: 2525675 - DNA, 25 bp, Homo sapien
tgaggtcaggagatcaagaccagcc

SEQ ID NO: 2525676 - DNA, 25 bp, Homo sapien
gtactgctccattttcgcatccagg

SEQ ID NO: 2525677 - DNA, 25 bp, Homo sapien
gcctggtgcttttcgaattgctcaa

SEQ ID NO: 2525678 - DNA, 25 bp, Homo sapien
aaaacaatttccctcagaattctga

SEQ ID NO: 2525679 - DNA, 25 bp, Homo sapien
tcatgatggtgtgggcattttgcat

SEQ ID NO: 2525680 - DNA, 25 bp, Homo sapien
ccctgataattcctttttgaggcat

SEQ ID NO: 2525681 - DNA, 25 bp, Homo sapien
gcgatctcagctccgccttggtgga

SEQ ID NO: 2525682 - DNA, 25 bp, Homo sapien
caagattttagatggatggctccac

SEQ ID NO: 2525683 - DNA, 25 bp, Homo sapien
gacctccgcctgtattatttcttga

SEQ ID NO: 2525684 - DNA, 25 bp, Homo sapien
tcattatttttatgtacagaaaact

SEQ ID NO: 2525685 - DNA, 25 bp, Homo sapien
atgtacagaaaactcaacagtatac

SEQ ID NO: 2525686 - DNA, 25 bp, Homo sapien
cattatttttatgtacagaaaactc

SEQ ID NO: 2525687 - DNA, 25 bp, Homo sapien
tttatgtacagaaaactcaacagta

SEQ ID NO: 2525688 - DNA, 25 bp, Homo sapien
tgccttttcgagcttggcaatgcaa

SEQ ID NO: 2525689 - DNA, 25 bp, Homo sapien
cttttcgagcttggcaatgcaagcc

SEQ ID NO: 2525690 - DNA, 25 bp, Homo sapien
gccttttcgagcttggcaatgcaag

SEQ ID NO: 2525691 - DNA, 25 bp, Homo sapien
tttgccttttcgagcttggcaatgc

SEQ ID NO: 2525692 - DNA, 25 bp, Homo sapien
tccccagtgacagcagatctcatcg

SEQ ID NO: 2525693 - DNA, 25 bp, Homo sapien
ctgtcattgtcattggtcctgatac

SEQ ID NO: 2525694 - DNA, 25 bp, Homo sapien
ctcatcgtatctgtcattgtcattg

SEQ ID NO: 2525695 - DNA, 25 bp, Homo sapien
ggacccaagatattgcctccccagt

SEQ ID NO: 2525696 - DNA, 25 bp, Homo sapien
aaccagctcgatggaatccacatcg

SEQ ID NO: 2525697 - DNA, 25 bp, Homo sapien
gaatccacatcgtgtgcaatcacca

SEQ ID NO: 2525698 - DNA, 25 bp, Homo sapien
tggaatccacatcgtgtgcaatcac

SEQ ID NO: 2525699 - DNA, 25 bp, Homo sapien
ccagctcgatggaatccacatcgtg

SEQ ID NO: 2525700 - DNA, 25 bp, Homo sapien
taagcagttgagtaactgtttggca

SEQ ID NO: 2525701 - DNA, 25 bp, Homo sapien
cagttgagtaactgtttggcagttc

SEQ ID NO: 2525702 - DNA, 25 bp, Homo sapien
ttgagtaactgtttggcagttcagg

SEQ ID NO: 2525703 - DNA, 25 bp, Homo sapien
gcagttgagtaactgtttggcagtt

SEQ ID NO: 2525704 - DNA, 25 bp, Homo sapien
ttcacaaagtaggtgagttctcttt

SEQ ID NO: 2525705 - DNA, 25 bp, Homo sapien
ccatttcacaaagtaggtgagttct

SEQ ID NO: 2525706 - DNA, 25 bp, Homo sapien
atttcacaaagtaggtgagttctct

SEQ ID NO: 2525707 - DNA, 25 bp, Homo sapien
tgagttctcttttgggctggatgtc

SEQ ID NO: 2525708 - DNA, 25 bp, Homo sapien
tgcttcttcacaacagcaggggccg

SEQ ID NO: 2525709 - DNA, 25 bp, Homo sapien
cttcttcacaacagcaggggccggg

SEQ ID NO: 2525710 - DNA, 25 bp, Homo sapien
ttcttcacaacagcaggggccgggg

SEQ ID NO: 2525711 - DNA, 25 bp, Homo sapien
cttcacaacagcaggggccggggcc

SEQ ID NO: 2525712 - DNA, 25 bp, Homo sapien
tgcaggcccttatgtaaactcacgg

SEQ ID NO: 2525713 - DNA, 25 bp, Homo sapien
ggctttctccacacggaagtatgag

SEQ ID NO: 2525714 - DNA, 25 bp, Homo sapien
tgtggtcatgcacgcctaagtccca

SEQ ID NO: 2525715 - DNA, 25 bp, Homo sapien
gctaacatgctctaaggctggtggg

SEQ ID NO: 2525716 - DNA, 25 bp, Homo sapien
tggcaggagaccagatccaatagaa

SEQ ID NO: 2525717 - DNA, 25 bp, Homo sapien
ccaatagaagtaagtgccatctgaa

SEQ ID NO: 2525718 - DNA, 25 bp, Homo sapien
cacaagttcaaaaatgtccatgaag

SEQ ID NO: 2525719 - DNA, 25 bp, Homo sapien
gacagaatgtcccttcggtgttttc

SEQ ID NO: 2525720 - DNA, 25 bp, Homo sapien
ctcgttccggcagtacacaaaacct

SEQ ID NO: 2525721 - DNA, 25 bp, Homo sapien
agaagactgccgctgccaaaagcca

SEQ ID NO: 2525722 - DNA, 25 bp, Homo sapien
tattatcgaaagagacaggccggtg

SEQ ID NO: 2525723 - DNA, 25 bp, Homo sapien
ctgaagggtgttctggtcaatgacc

SEQ ID NO: 2525724 - DNA, 25 bp, Homo sapien
tgagagtaccatgtaatccagatcc

SEQ ID NO: 2525725 - DNA, 25 bp, Homo sapien
gagagtaccatgtaatccagatccc

SEQ ID NO: 2525726 - DNA, 25 bp, Homo sapien
agagtaccatgtaatccagatccca

SEQ ID NO: 2525727 - DNA, 25 bp, Homo sapien
ctgagagtaccatgtaatccagatc

SEQ ID NO: 2525728 - DNA, 25 bp, Homo sapien
tgttgctatccggcgcaggcaacat

SEQ ID NO: 2525729 - DNA, 25 bp, Homo sapien
ctatccggcgcaggcaacatgtctt

SEQ ID NO: 2525730 - DNA, 25 bp, Homo sapien
tgctatccggcgcaggcaacatgtc

SEQ ID NO: 2525731 - DNA, 25 bp, Homo sapien
ttgctatccggcgcaggcaacatgt

SEQ ID NO: 2525732 - DNA, 25 bp, Homo sapien
ggcagggaccctagatccgtctgtt

SEQ ID NO: 2525733 - DNA, 25 bp, Homo sapien
gtttctgtaatagatggactgtgtg

SEQ ID NO: 2525734 - DNA, 25 bp, Homo sapien
cctagatccgtctgtttctgtaata

SEQ ID NO: 2525735 - DNA, 25 bp, Homo sapien
gaccctagatccgtctgtttctgta

SEQ ID NO: 2525736 - DNA, 25 bp, Homo sapien
tccattgagacagtcagcaggctcc

SEQ ID NO: 2525737 - DNA, 25 bp, Homo sapien
gtcagaagtctcctctagccaagag

SEQ ID NO: 2525738 - DNA, 25 bp, Homo sapien
tcaaaggctggcagtcacgaaggca

SEQ ID NO: 2525739 - DNA, 25 bp, Homo sapien
catcctcgatgtgaagggcgcttgc

SEQ ID NO: 2525740 - DNA, 25 bp, Homo sapien
tcccacaaacagagcgcaaacgttc

SEQ ID NO: 2525741 - DNA, 25 bp, Homo sapien
cagccgggcataggcattgctctga

SEQ ID NO: 2525742 - DNA, 25 bp, Homo sapien
ttcaggcggtattccagcagccggg

SEQ ID NO: 2525743 - DNA, 25 bp, Homo sapien
cacagtcctcgcaaggcattcaggc

SEQ ID NO: 2525744 - DNA, 25 bp, Homo sapien
acacatcatctacaaaagaagtagg

SEQ ID NO: 2525745 - DNA, 25 bp, Homo sapien
gtgttactggcaaagcaaagagcct

SEQ ID NO: 2525746 - DNA, 25 bp, Homo sapien
catacattcttctactgatgtcaag

SEQ ID NO: 2525747 - DNA, 25 bp, Homo sapien
gacaaccaccaaaggtgttactggc

SEQ ID NO: 2525748 - DNA, 25 bp, Homo sapien
tccaaaaattggaccctcatcaaaa

SEQ ID NO: 2525749 - DNA, 25 bp, Homo sapien
gagagaaaacagcacaaactgccag

SEQ ID NO: 2525750 - DNA, 25 bp, Homo sapien
agaaaacagcacaaactgccagtac

SEQ ID NO: 2525751 - DNA, 25 bp, Homo sapien
ctgaaagatgagagaaaacagcaca

SEQ ID NO: 2525752 - DNA, 25 bp, Homo sapien
tgagagaaaacagcacaaactgcca

SEQ ID NO: 2525753 - DNA, 25 bp, Homo sapien
ctggcaggacaaagaaaggctgcat

SEQ ID NO: 2525754 - DNA, 25 bp, Homo sapien
caagtactccagttatatttagcat

SEQ ID NO: 2525755 - DNA, 25 bp, Homo sapien
gacaaaatctgttgctaactccaaa

SEQ ID NO: 2525756 - DNA, 25 bp, Homo sapien
tattaaacatgagtacttctgaaat

SEQ ID NO: 2525757 - DNA, 25 bp, Homo sapien
aaaagacaagtgcactgaaagaatt

SEQ ID NO: 2525758 - DNA, 25 bp, Homo sapien
ttccagtgaagagtctaattggcaa

SEQ ID NO: 2525759 - DNA, 25 bp, Homo sapien
agtgaagagtctaattggcaaagat

SEQ ID NO: 2525760 - DNA, 25 bp, Homo sapien
ccagtgaagagtctaattggcaaag

SEQ ID NO: 2525761 - DNA, 25 bp, Homo sapien
tccagtgaagagtctaattggcaaa

SEQ ID NO: 2525762 - DNA, 25 bp, Homo sapien
cataagcttttaagtattctaccca

SEQ ID NO: 2525763 - DNA, 25 bp, Homo sapien
cattgattttagagcagcatcgtca

SEQ ID NO: 2525764 - DNA, 25 bp, Homo sapien
taaacgtgccattctcatgatatgc

SEQ ID NO: 2525765 - DNA, 25 bp, Homo sapien
tctacccaagaatctgcttctgaga

SEQ ID NO: 2525766 - DNA, 25 bp, Homo sapien
taatagtagaaaaccaggccagtgg

SEQ ID NO: 2525767 - DNA, 25 bp, Homo sapien
caaaatgtgtggtcagcttggtcac

SEQ ID NO: 2525768 - DNA, 25 bp, Homo sapien
tcatctctaaccaaatgtgcagggc

SEQ ID NO: 2525769 - DNA, 25 bp, Homo sapien
tcatgatcgcgtcagaagtggtggt

SEQ ID NO: 2525770 - DNA, 25 bp, Homo sapien
gtagctaagaccacatgtatatgcc

SEQ ID NO: 2525771 - DNA, 25 bp, Homo sapien
ccacaaccagcccaacataagtgtt

SEQ ID NO: 2525772 - DNA, 25 bp, Homo sapien
tagctaagaccacatgtatatgcca

SEQ ID NO: 2525773 - DNA, 25 bp, Homo sapien
caaccagcccaacataagtgtttta

SEQ ID NO: 2525774 - DNA, 25 bp, Homo sapien
tagtggtttttagccagcacagtgg

SEQ ID NO: 2525775 - DNA, 25 bp, Homo sapien
tgtgctcgacaggattaataatagt

SEQ ID NO: 2525776 - DNA, 25 bp, Homo sapien
ggtgtggtgggaaactacaaccaga

SEQ ID NO: 2525777 - DNA, 25 bp, Homo sapien
catagaatccacttgcttgctgaaa

SEQ ID NO: 2525778 - DNA, 25 bp, Homo sapien
aattgagagtggcaatttcatgacc

SEQ ID NO: 2525779 - DNA, 25 bp, Homo sapien
ctttatccttaaattgagagtggca

SEQ ID NO: 2525780 - DNA, 25 bp, Homo sapien
cctttatccttaaattgagagtggc

SEQ ID NO: 2525781 - DNA, 25 bp, Homo sapien
tccttaaattgagagtggcaatttc

SEQ ID NO: 2525782 - DNA, 25 bp, Homo sapien
caaacttccaggctcaatcagtcct

SEQ ID NO: 2525783 - DNA, 25 bp, Homo sapien
tggagtgcactggcaaaatcagctc

SEQ ID NO: 2525784 - DNA, 25 bp, Homo sapien
gtgcactggcaaaatcagctcactg

SEQ ID NO: 2525785 - DNA, 25 bp, Homo sapien
ctgagcctctagagtagcagggact

SEQ ID NO: 2525786 - DNA, 25 bp, Homo sapien
aaatcaaaggtcaggccaggtacag

SEQ ID NO: 2525787 - DNA, 25 bp, Homo sapien
tgatcatagaacaactaagttaagc

SEQ ID NO: 2525788 - DNA, 25 bp, Homo sapien
ttttagaacgatgatcaaagcaaca

SEQ ID NO: 2525789 - DNA, 25 bp, Homo sapien
tcaaggtactgctactcaataaaag

SEQ ID NO: 2525790 - DNA, 25 bp, Homo sapien
actgaaacagagactatctattatc

SEQ ID NO: 2525791 - DNA, 25 bp, Homo sapien
tattatctcatctgcctagccacac

SEQ ID NO: 2525792 - DNA, 25 bp, Homo sapien
gactatctattatctcatctgccta

SEQ ID NO: 2525793 - DNA, 25 bp, Homo sapien
tagccacactgcaaacaaattgaga

SEQ ID NO: 2525794 - DNA, 25 bp, Homo sapien
catgaaacgacactgccagtattcc

SEQ ID NO: 2525795 - DNA, 25 bp, Homo sapien
cctccatgaaacgacactgccagta

SEQ ID NO: 2525796 - DNA, 25 bp, Homo sapien
tggcctccatgaaacgacactgcca

SEQ ID NO: 2525797 - DNA, 25 bp, Homo sapien
tccatgaaacgacactgccagtatt

SEQ ID NO: 2525798 - DNA, 25 bp, Homo sapien
tcaaaagaaaaccacaaatgaaatc

SEQ ID NO: 2525799 - DNA, 25 bp, Homo sapien
gggtgccgggcgagtgggtcagtcc

SEQ ID NO: 2525800 - DNA, 25 bp, Homo sapien
gcgagtgggtcagtccgatggcggg

SEQ ID NO: 2525801 - DNA, 25 bp, Homo sapien
tgccgggcgagtgggtcagtccgat

SEQ ID NO: 2525802 - DNA, 25 bp, Homo sapien
ccgggcgagtgggtcagtccgatgg

SEQ ID NO: 2525803 - DNA, 25 bp, Homo sapien
gggccccgaggatctcgctgggcag

SEQ ID NO: 2525804 - DNA, 25 bp, Homo sapien
tcggccaggtcggtgacccggatca

SEQ ID NO: 2525805 - DNA, 25 bp, Homo sapien
tcggtgacccggatcagcccgtcgt

SEQ ID NO: 2525806 - DNA, 25 bp, Homo sapien
cggatcagcccgtcgtgcaggaaga

SEQ ID NO: 2525807 - DNA, 25 bp, Homo sapien
gccgccgccgcggccgccgacgagc

SEQ ID NO: 2525808 - DNA, 25 bp, Homo sapien
ctgcgccgagtcagcggccgccgcc

SEQ ID NO: 2525809 - DNA, 25 bp, Homo sapien
cgccgccgcggccgccgacgagccc

SEQ ID NO: 2525810 - DNA, 25 bp, Homo sapien
ccgccgcggccgccgacgagcccat

SEQ ID NO: 2525811 - DNA, 25 bp, Homo sapien
cgatctgtgtttgctctgacgaatg

SEQ ID NO: 2525812 - DNA, 25 bp, Homo sapien
aatatgagattacggagcagcgcaa

SEQ ID NO: 2525813 - DNA, 25 bp, Homo sapien
acctgcgatctgtgtttgctctgac

SEQ ID NO: 2525814 - DNA, 25 bp, Homo sapien
tgagattacggagcagcgcaagatt

SEQ ID NO: 2525815 - DNA, 25 bp, Homo sapien
aaatatgagattacggagcagcgca

SEQ ID NO: 2525816 - DNA, 25 bp, Homo sapien
tatgagattacggagcagcgcaaga

SEQ ID NO: 2525817 - DNA, 25 bp, Homo sapien
ttgcgctgctccgtaatctcatatt

SEQ ID NO: 2525818 - DNA, 25 bp, Homo sapien
gtcagagcaaacacagatcgcaggt

SEQ ID NO: 2525819 - DNA, 25 bp, Homo sapien
tcttgcgctgctccgtaatctcata

SEQ ID NO: 2525820 - DNA, 25 bp, Homo sapien
aatcttgcgctgctccgtaatctca

SEQ ID NO: 2525821 - DNA, 25 bp, Homo sapien
cattcgtcagagcaaacacagatcg

SEQ ID NO: 2525822 - DNA, 25 bp, Homo sapien
tgcgctgctccgtaatctcatattt

SEQ ID NO: 2525823 - DNA, 25 bp, Homo sapien
tcttttggcagtctgggagctcaac

SEQ ID NO: 2525824 - DNA, 25 bp, Homo sapien
tagcactggcccttctacctgggag

SEQ ID NO: 2525825 - DNA, 25 bp, Homo sapien
tgtgtgggaattaactgctaccatc

SEQ ID NO: 2525826 - DNA, 25 bp, Homo sapien
ctaccatcgtattgggaatgtgccc

SEQ ID NO: 2525827 - DNA, 25 bp, Homo sapien
ggactccttagttgacctacaagta

SEQ ID NO: 2525828 - DNA, 25 bp, Homo sapien
taaaaaatgggttgtgtttcacagc

SEQ ID NO: 2525829 - DNA, 25 bp, Homo sapien
gggcacattcccaatacgatggtag

SEQ ID NO: 2525830 - DNA, 25 bp, Homo sapien
gattctaagttgagctcccagactg

SEQ ID NO: 2525831 - DNA, 25 bp, Homo sapien
tcccaggtagaagggccagtgctaa

SEQ ID NO: 2525832 - DNA, 25 bp, Homo sapien
tgtctcacaagtactaatccccaag

SEQ ID NO: 2525833 - DNA, 25 bp, Homo sapien
gatggtagcagttaattcccacaca

SEQ ID NO: 2525834 - DNA, 25 bp, Homo sapien
tacttgtaggtcaactaaggagtcc

SEQ ID NO: 2525835 - DNA, 25 bp, Homo sapien
acttcaaccaaaatcgatatcagca

SEQ ID NO: 2525836 - DNA, 25 bp, Homo sapien
ttcaaccaaaatcgatatcagcaat

SEQ ID NO: 2525837 - DNA, 25 bp, Homo sapien
attgccacttcaaccaaaatcgata

SEQ ID NO: 2525838 - DNA, 25 bp, Homo sapien
gccacttcaaccaaaatcgatatca

SEQ ID NO: 2525839 - DNA, 25 bp, Homo sapien
cacttcaaccaaaatcgatatcagc

SEQ ID NO: 2525840 - DNA, 25 bp, Homo sapien
caagaagaagaagctgcggaagccc

SEQ ID NO: 2525841 - DNA, 25 bp, Homo sapien
ggcttccgcagcttcttcttcttga

SEQ ID NO: 2525842 - DNA, 25 bp, Homo sapien
tgctgatatcgattttggttgaagt

SEQ ID NO: 2525843 - DNA, 25 bp, Homo sapien
tatcgattttggttgaagtggcaat

SEQ ID NO: 2525844 - DNA, 25 bp, Homo sapien
tgatatcgattttggttgaagtggc

SEQ ID NO: 2525845 - DNA, 25 bp, Homo sapien
gctgatatcgattttggttgaagtg

SEQ ID NO: 2525846 - DNA, 25 bp, Homo sapien
attgctgatatcgattttggttgaa

SEQ ID NO: 2525847 - DNA, 25 bp, Homo sapien
tattgccacaagtgtctgaggccca

SEQ ID NO: 2525848 - DNA, 25 bp, Homo sapien
tgcaagtgggttagacaagtggtct

SEQ ID NO: 2525849 - DNA, 25 bp, Homo sapien
ccttggattgtgatgttctgtgaaa

SEQ ID NO: 2525850 - DNA, 25 bp, Homo sapien
gcaacataacaagtaatggtcacct

SEQ ID NO: 2525851 - DNA, 25 bp, Homo sapien
taaatgcttgcagtatacacgtttg

SEQ ID NO: 2525852 - DNA, 25 bp, Homo sapien
acacgtttgtttgctactgcctaca

SEQ ID NO: 2525853 - DNA, 25 bp, Homo sapien
caaacgtgtatactgcaagcattta

SEQ ID NO: 2525854 - DNA, 25 bp, Homo sapien
gaagaccacttgtctaacccacttg

SEQ ID NO: 2525855 - DNA, 25 bp, Homo sapien
tgaaatgggcctcagacacttgtgg

SEQ ID NO: 2525856 - DNA, 25 bp, Homo sapien
tttcacagaacatcacaatccaagg

SEQ ID NO: 2525857 - DNA, 25 bp, Homo sapien
tgtaggcagtagcaaacaaacgtgt

SEQ ID NO: 2525858 - DNA, 25 bp, Homo sapien
cacttgcacacaaggcaatgaaatg

SEQ ID NO: 2525859 - DNA, 25 bp, Homo sapien
gctggctagtggcttattacttgtg

SEQ ID NO: 2525860 - DNA, 25 bp, Homo sapien
ctggctagtggcttattacttgtga

SEQ ID NO: 2525861 - DNA, 25 bp, Homo sapien
cagctggctagtggcttattacttg

SEQ ID NO: 2525862 - DNA, 25 bp, Homo sapien
gcagctggctagtggcttattactt

SEQ ID NO: 2525863 - DNA, 25 bp, Homo sapien
gctagtggcttattacttgtgactg

SEQ ID NO: 2525864 - DNA, 25 bp, Homo sapien
aagcagctggctagtggcttattac

SEQ ID NO: 2525865 - DNA, 25 bp, Homo sapien
gtaataagccactagccagctgctt

SEQ ID NO: 2525866 - DNA, 25 bp, Homo sapien
caagtaataagccactagccagctg

SEQ ID NO: 2525867 - DNA, 25 bp, Homo sapien
tcacaagtaataagccactagccag

SEQ ID NO: 2525868 - DNA, 25 bp, Homo sapien
cagtcacaagtaataagccactagc

SEQ ID NO: 2525869 - DNA, 25 bp, Homo sapien
aagtaataagccactagccagctgc

SEQ ID NO: 2525870 - DNA, 25 bp, Homo sapien
cacaagtaataagccactagccagc

SEQ ID NO: 2525871 - DNA, 25 bp, Homo sapien
taccttagtagcttgctgtggttgc

SEQ ID NO: 2525872 - DNA, 25 bp, Homo sapien
aataagaagtgtaatccatggtgat

SEQ ID NO: 2525873 - DNA, 25 bp, Homo sapien
tggtgatttattagccatttcctgc

SEQ ID NO: 2525874 - DNA, 25 bp, Homo sapien
tttacccaaatttagatgcctgtga

SEQ ID NO: 2525875 - DNA, 25 bp, Homo sapien
aacgtgtttatgtctggagtactac

SEQ ID NO: 2525876 - DNA, 25 bp, Homo sapien
gaactgccgagctgtatacatatac

SEQ ID NO: 2525877 - DNA, 25 bp, Homo sapien
tatacagctcggcagttctggaagc

SEQ ID NO: 2525878 - DNA, 25 bp, Homo sapien
ggtagtactccagacataaacacgt

SEQ ID NO: 2525879 - DNA, 25 bp, Homo sapien
gcaggaaatggctaataaatcacca

SEQ ID NO: 2525880 - DNA, 25 bp, Homo sapien
tgtatatgtatacagctcggcagtt

SEQ ID NO: 2525881 - DNA, 25 bp, Homo sapien
tcacaggcatctaaatttgggtaaa

SEQ ID NO: 2525882 - DNA, 25 bp, Homo sapien
gcaaccacagcaagctactaaggta

SEQ ID NO: 2525883 - DNA, 25 bp, Homo sapien
atcatcctcactggacgccacaggg

SEQ ID NO: 2525884 - DNA, 25 bp, Homo sapien
ttacccccgggaccattctgatcat

SEQ ID NO: 2525885 - DNA, 25 bp, Homo sapien
ttgagccacggcaaaaaacccttca

SEQ ID NO: 2525886 - DNA, 25 bp, Homo sapien
cgtgagaaaactgcgagccagcatt

SEQ ID NO: 2525887 - DNA, 25 bp, Homo sapien
ttatcctactgaagatgtgcctcga

SEQ ID NO: 2525888 - DNA, 25 bp, Homo sapien
caaaaaacccttcagtcagcacgtg

SEQ ID NO: 2525889 - DNA, 25 bp, Homo sapien
tgaagggttttttgccgtggctcaa

SEQ ID NO: 2525890 - DNA, 25 bp, Homo sapien
cacgtgctgactgaagggttttttg

SEQ ID NO: 2525891 - DNA, 25 bp, Homo sapien
tcgaggcacatcttcagtaggataa

SEQ ID NO: 2525892 - DNA, 25 bp, Homo sapien
tgcccctgtggcgtccagtgaggat

SEQ ID NO: 2525893 - DNA, 25 bp, Homo sapien
aatgctggctcgcagttttctcacg

SEQ ID NO: 2525894 - DNA, 25 bp, Homo sapien
ccctgtggcgtccagtgaggatgat

SEQ ID NO: 2525895 - DNA, 25 bp, Homo sapien
gtttggctgacatagcttgcttcta

SEQ ID NO: 2525896 - DNA, 25 bp, Homo sapien
caaaggtgacttgcttgatgctttc

SEQ ID NO: 2525897 - DNA, 25 bp, Homo sapien
gaattggaaaacaagccatgtatcc

SEQ ID NO: 2525898 - DNA, 25 bp, Homo sapien
cacacgtgtaatctctgaggtttag

SEQ ID NO: 2525899 - DNA, 25 bp, Homo sapien
cagatgaagtggctaggatatggac

SEQ ID NO: 2525900 - DNA, 25 bp, Homo sapien
tatggacacactttacttgaattgg

SEQ ID NO: 2525901 - DNA, 25 bp, Homo sapien
gatcctcacagcaacaagtcttact

SEQ ID NO: 2525902 - DNA, 25 bp, Homo sapien
taaagtgtgtccatatcctagccac

SEQ ID NO: 2525903 - DNA, 25 bp, Homo sapien
gaaagcatcaagcaagtcacctttg

SEQ ID NO: 2525904 - DNA, 25 bp, Homo sapien
tagaagcaagctatgtcagccaaac

SEQ ID NO: 2525905 - DNA, 25 bp, Homo sapien
tgcagattagggatacatggcttgt

SEQ ID NO: 2525906 - DNA, 25 bp, Homo sapien
ctaaacctcagagattacacgtgtg

SEQ ID NO: 2525907 - DNA, 25 bp, Homo sapien
tgcataccggagaatttctgataga

SEQ ID NO: 2525908 - DNA, 25 bp, Homo sapien
cgtctgtgctttgttcctttgcata

SEQ ID NO: 2525909 - DNA, 25 bp, Homo sapien
cataccggagaatttctgatagaaa

SEQ ID NO: 2525910 - DNA, 25 bp, Homo sapien
taatttaaattactcgtctgtgctt

SEQ ID NO: 2525911 - DNA, 25 bp, Homo sapien
tactcgtctgtgctttgttcctttg

SEQ ID NO: 2525912 - DNA, 25 bp, Homo sapien
aaattactcgtctgtgctttgttcc

SEQ ID NO: 2525913 - DNA, 25 bp, Homo sapien
ttttctatcagaaattctccggtat

SEQ ID NO: 2525914 - DNA, 25 bp, Homo sapien
tatgcaaaggaacaaagcacagacg

SEQ ID NO: 2525915 - DNA, 25 bp, Homo sapien
caaaggaacaaagcacagacgagta

SEQ ID NO: 2525916 - DNA, 25 bp, Homo sapien
tctatcagaaattctccggtatgca

SEQ ID NO: 2525917 - DNA, 25 bp, Homo sapien
caaagcacagacgagtaatttaaat

SEQ ID NO: 2525918 - DNA, 25 bp, Homo sapien
tatatgcaaaggaacaaagcacaga

SEQ ID NO: 2525919 - DNA, 25 bp, Homo sapien
gatgtggggactgtaaattggattt

SEQ ID NO: 2525920 - DNA, 25 bp, Homo sapien
agatgtttttgaatacttagatact

SEQ ID NO: 2525921 - DNA, 25 bp, Homo sapien
agatgtggggactgtaaattggatt

SEQ ID NO: 2525922 - DNA, 25 bp, Homo sapien
gtaagatgtggggactgtaaattgg

SEQ ID NO: 2525923 - DNA, 25 bp, Homo sapien
agtatctaagtattcaaaaacatct

SEQ ID NO: 2525924 - DNA, 25 bp, Homo sapien
ccaatttacagtccccacatcttac

SEQ ID NO: 2525925 - DNA, 25 bp, Homo sapien
aaatccaatttacagtccccacatc

SEQ ID NO: 2525926 - DNA, 25 bp, Homo sapien
aatccaatttacagtccccacatct

SEQ ID NO: 2525927 - DNA, 25 bp, Homo sapien
tgaatactgtgaagatgtttttgaa

SEQ ID NO: 2525928 - DNA, 25 bp, Homo sapien
gatgtggggactgtaaattggattt

SEQ ID NO: 2525929 - DNA, 25 bp, Homo sapien
tctgtttatgcttgaatactgtgaa

SEQ ID NO: 2525930 - DNA, 25 bp, Homo sapien
agatgtttttgaatacttagatact

SEQ ID NO: 2525931 - DNA, 25 bp, Homo sapien
ttatgcttgaatactgtgaagatgt

SEQ ID NO: 2525932 - DNA, 25 bp, Homo sapien
gactgtaaattggattttctgttta

SEQ ID NO: 2525933 - DNA, 25 bp, Homo sapien
gaaaatccaatttacagtccccaca

SEQ ID NO: 2525934 - DNA, 25 bp, Homo sapien
cacagtattcaagcataaacagaaa

SEQ ID NO: 2525935 - DNA, 25 bp, Homo sapien
aaaacatcttcacagtattcaagca

SEQ ID NO: 2525936 - DNA, 25 bp, Homo sapien
taaacagaaaatccaatttacagtc

SEQ ID NO: 2525937 - DNA, 25 bp, Homo sapien
agtatctaagtattcaaaaacatct

SEQ ID NO: 2525938 - DNA, 25 bp, Homo sapien
aatccaatttacagtccccacatct

SEQ ID NO: 2525939 - DNA, 25 bp, Homo sapien
gttctcgcaactgttacaaaaccag

SEQ ID NO: 2525940 - DNA, 25 bp, Homo sapien
aaagaaggagaaggttctcgcaact

SEQ ID NO: 2525941 - DNA, 25 bp, Homo sapien
gaaggagaaggttctcgcaactgtt

SEQ ID NO: 2525942 - DNA, 25 bp, Homo sapien
gaaaaagaaggagaaggttctcgca

SEQ ID NO: 2525943 - DNA, 25 bp, Homo sapien
aagaaggagaaggttctcgcaactg

SEQ ID NO: 2525944 - DNA, 25 bp, Homo sapien
tggtggtgacaagaacggcggtacc

SEQ ID NO: 2525945 - DNA, 25 bp, Homo sapien
aacagttgcgagaaccttctccttc

SEQ ID NO: 2525946 - DNA, 25 bp, Homo sapien
gtaacagttgcgagaaccttctcct

SEQ ID NO: 2525947 - DNA, 25 bp, Homo sapien
ctggttttgtaacagttgcgagaac

SEQ ID NO: 2525948 - DNA, 25 bp, Homo sapien
acagttgcgagaaccttctccttct

SEQ ID NO: 2525949 - DNA, 25 bp, Homo sapien
agttgcgagaaccttctccttcttt

SEQ ID NO: 2525950 - DNA, 25 bp, Homo sapien
ggtaccgccgttcttgtcaccacca

SEQ ID NO: 2525951 - DNA, 25 bp, Homo sapien
cattatgtcttaaccttaattggca

SEQ ID NO: 2525952 - DNA, 25 bp, Homo sapien
ccattatgtcttaaccttaattggc

SEQ ID NO: 2525953 - DNA, 25 bp, Homo sapien
gaggaccacggaccattatgtctta

SEQ ID NO: 2525954 - DNA, 25 bp, Homo sapien
aagaggaccacggaccattatgtct

SEQ ID NO: 2525955 - DNA, 25 bp, Homo sapien
ttatgtcttaaccttaattggcatt

SEQ ID NO: 2525956 - DNA, 25 bp, Homo sapien
agaggaccacggaccattatgtctt

SEQ ID NO: 2525957 - DNA, 25 bp, Homo sapien
tgccaattaaggttaagacataatg

SEQ ID NO: 2525958 - DNA, 25 bp, Homo sapien
taagacataatggtccgtggtcctc

SEQ ID NO: 2525959 - DNA, 25 bp, Homo sapien
aatgccaattaaggttaagacataa

SEQ ID NO: 2525960 - DNA, 25 bp, Homo sapien
ccaattaaggttaagacataatggt

SEQ ID NO: 2525961 - DNA, 25 bp, Homo sapien
aagacataatggtccgtggtcctct

SEQ ID NO: 2525962 - DNA, 25 bp, Homo sapien
agacataatggtccgtggtcctctt

SEQ ID NO: 2525963 - DNA, 25 bp, Homo sapien
ccgatctgccatgtattccagaaag

SEQ ID NO: 2525964 - DNA, 25 bp, Homo sapien
cgcaaccctgtccttgtcagaggaa

SEQ ID NO: 2525965 - DNA, 25 bp, Homo sapien
gcaaccctgtccttgtcagaggaat

SEQ ID NO: 2525966 - DNA, 25 bp, Homo sapien
gtattcccgatctgccatgtattcc

SEQ ID NO: 2525967 - DNA, 25 bp, Homo sapien
ccatgtattccagaaaggccatgta

SEQ ID NO: 2525968 - DNA, 25 bp, Homo sapien
aattggcaggtattcccgatctgcc

SEQ ID NO: 2525969 - DNA, 25 bp, Homo sapien
ctttctggaatacatggcagatcgg

SEQ ID NO: 2525970 - DNA, 25 bp, Homo sapien
ggcagatcgggaatacctgccaatt

SEQ ID NO: 2525971 - DNA, 25 bp, Homo sapien
ttcctctgacaaggacagggttgcg

SEQ ID NO: 2525972 - DNA, 25 bp, Homo sapien
tcctctgacaaggacagggttgcgg

SEQ ID NO: 2525973 - DNA, 25 bp, Homo sapien
ggaatacatggcagatcgggaatac

SEQ ID NO: 2525974 - DNA, 25 bp, Homo sapien
tacatggcctttctggaatacatgg

SEQ ID NO: 2525975 - DNA, 25 bp, Homo sapien
ccgaagccaagaaggttgatgctgg

SEQ ID NO: 2525976 - DNA, 25 bp, Homo sapien
cctcaaagctaaaaagcccaagaag

SEQ ID NO: 2525977 - DNA, 25 bp, Homo sapien
ctcaaagctaaaaagcccaagaagg

SEQ ID NO: 2525978 - DNA, 25 bp, Homo sapien
cccgaagccaagaaggttgatgctg

SEQ ID NO: 2525979 - DNA, 25 bp, Homo sapien
cgaagccaagaaggttgatgctggt

SEQ ID NO: 2525980 - DNA, 25 bp, Homo sapien
aacccgaagccaagaaggttgatgc

SEQ ID NO: 2525981 - DNA, 25 bp, Homo sapien
accagcatcaaccttcttggcttcg

SEQ ID NO: 2525982 - DNA, 25 bp, Homo sapien
agcatcaaccttcttggcttcgggt

SEQ ID NO: 2525983 - DNA, 25 bp, Homo sapien
cagcatcaaccttcttggcttcggg

SEQ ID NO: 2525984 - DNA, 25 bp, Homo sapien
ccttcttgggctttttagctttgag

SEQ ID NO: 2525985 - DNA, 25 bp, Homo sapien
ccagcatcaaccttcttggcttcgg

SEQ ID NO: 2525986 - DNA, 25 bp, Homo sapien
gcatcaaccttcttggcttcgggtt

SEQ ID NO: 2525987 - DNA, 25 bp, Homo sapien
gacttctgaccgctcagtatttggc

SEQ ID NO: 2525988 - DNA, 25 bp, Homo sapien
ggatttcaagttctggtcttggtgc

SEQ ID NO: 2525989 - DNA, 25 bp, Homo sapien
ccccaaatgagtcatagtgaaggtt

SEQ ID NO: 2525990 - DNA, 25 bp, Homo sapien
aataatggttgtacggacttctgac

SEQ ID NO: 2525991 - DNA, 25 bp, Homo sapien
agaggaaggcctgtatcttaccggg

SEQ ID NO: 2525992 - DNA, 25 bp, Homo sapien
gtggacacattctgcatctaagttt

SEQ ID NO: 2525993 - DNA, 25 bp, Homo sapien
aaacttagatgcagaatgtgtccac

SEQ ID NO: 2525994 - DNA, 25 bp, Homo sapien
ggtcagaagtccgtacaaccattat

SEQ ID NO: 2525995 - DNA, 25 bp, Homo sapien
tgccaaatactgagcggtcagaagt

SEQ ID NO: 2525996 - DNA, 25 bp, Homo sapien
caaccttcactatgactcatttggg

SEQ ID NO: 2525997 - DNA, 25 bp, Homo sapien
cccggtaagatacaggccttcctct

SEQ ID NO: 2525998 - DNA, 25 bp, Homo sapien
gcaccaagaccagaacttgaaatcc

SEQ ID NO: 2525999 - DNA, 25 bp, Homo sapien
tctggctcaatttgggctgattccg

SEQ ID NO: 2526000 - DNA, 25 bp, Homo sapien
gagacactggtcttaagggttaaga

SEQ ID NO: 2526001 - DNA, 25 bp, Homo sapien
tgtgtccgcaattcctaaatcgagt

SEQ ID NO: 2526002 - DNA, 25 bp, Homo sapien
ggaagtcgcctcttggtctttgcga

SEQ ID NO: 2526003 - DNA, 25 bp, Homo sapien
gggctgattccgtttgtgtccgcaa

SEQ ID NO: 2526004 - DNA, 25 bp, Homo sapien
aatcgagtttcttgaaaagagacac

SEQ ID NO: 2526005 - DNA, 25 bp, Homo sapien
tcttaacccttaagaccagtgtctc

SEQ ID NO: 2526006 - DNA, 25 bp, Homo sapien
caaagaccaagaggcgacttccggt

SEQ ID NO: 2526007 - DNA, 25 bp, Homo sapien
ccagagaaaaagatcgcaaagacca

SEQ ID NO: 2526008 - DNA, 25 bp, Homo sapien
gaaactcgatttaggaattgcggac

SEQ ID NO: 2526009 - DNA, 25 bp, Homo sapien
aattgcggacacaaacggaatcagc

SEQ ID NO: 2526010 - DNA, 25 bp, Homo sapien
cggaatcagcccaaattgagccaga

SEQ ID NO: 2526011 - DNA, 25 bp, Homo sapien
acactgagcctgtcgcagccacgtt

SEQ ID NO: 2526012 - DNA, 25 bp, Homo sapien
gggagacggcgcgtgcactgtgttc

SEQ ID NO: 2526013 - DNA, 25 bp, Homo sapien
ccacgttggggttccgcactgaagc

SEQ ID NO: 2526014 - DNA, 25 bp, Homo sapien
ctgagcctgtcgcagccacgttggg

SEQ ID NO: 2526015 - DNA, 25 bp, Homo sapien
tcgcagccacgttggggttccgcac

SEQ ID NO: 2526016 - DNA, 25 bp, Homo sapien
atgacactgagcctgtcgcagccac

SEQ ID NO: 2526017 - DNA, 25 bp, Homo sapien
gaacacagtgcacgcgccgtctccc

SEQ ID NO: 2526018 - DNA, 25 bp, Homo sapien
cgtggctgcgacaggctcagtgtca

SEQ ID NO: 2526019 - DNA, 25 bp, Homo sapien
gcttcagtgcggaaccccaacgtgg

SEQ ID NO: 2526020 - DNA, 25 bp, Homo sapien
caacgtggctgcgacaggctcagtg

SEQ ID NO: 2526021 - DNA, 25 bp, Homo sapien
agtgcggaaccccaacgtggctgcg

SEQ ID NO: 2526022 - DNA, 25 bp, Homo sapien
ggaaccccaacgtggctgcgacagg

SEQ ID NO: 2526023 - DNA, 25 bp, Homo sapien
tccggttcttcgccactctcttggg

SEQ ID NO: 2526024 - DNA, 25 bp, Homo sapien
atgccgtagtggctccctccggttc

SEQ ID NO: 2526025 - DNA, 25 bp, Homo sapien
gaatgccgtagtggctccctccggt

SEQ ID NO: 2526026 - DNA, 25 bp, Homo sapien
gtagaatgccgtagtggctccctcc

SEQ ID NO: 2526027 - DNA, 25 bp, Homo sapien
tagaatgccgtagtggctccctccg

SEQ ID NO: 2526028 - DNA, 25 bp, Homo sapien
agaatgccgtagtggctccctccgg

SEQ ID NO: 2526029 - DNA, 25 bp, Homo sapien
ggagggagccactacggcattctac

SEQ ID NO: 2526030 - DNA, 25 bp, Homo sapien
cccaagagagtggcgaagaaccgga

SEQ ID NO: 2526031 - DNA, 25 bp, Homo sapien
accggagggagccactacggcattc

SEQ ID NO: 2526032 - DNA, 25 bp, Homo sapien
ccggagggagccactacggcattct

SEQ ID NO: 2526033 - DNA, 25 bp, Homo sapien
gaaccggagggagccactacggcat

SEQ ID NO: 2526034 - DNA, 25 bp, Homo sapien
cggagggagccactacggcattcta

SEQ ID NO: 2526035 - DNA, 25 bp, Homo sapien
ggctaactgagaggccttccagacg

SEQ ID NO: 2526036 - DNA, 25 bp, Homo sapien
tccaaggctaactgagaggccttcc

SEQ ID NO: 2526037 - DNA, 25 bp, Homo sapien
ggacatgtccaaggctaactgagag

SEQ ID NO: 2526038 - DNA, 25 bp, Homo sapien
taactgagaggccttccagacgctt

SEQ ID NO: 2526039 - DNA, 25 bp, Homo sapien
ctgagaggccttccagacgcttcat

SEQ ID NO: 2526040 - DNA, 25 bp, Homo sapien
catgtccaaggctaactgagaggcc

SEQ ID NO: 2526041 - DNA, 25 bp, Homo sapien
ggaaggcctctcagttagccttgga

SEQ ID NO: 2526042 - DNA, 25 bp, Homo sapien
gaagcgtctggaaggcctctcagtt

SEQ ID NO: 2526043 - DNA, 25 bp, Homo sapien
ctctcagttagccttggacatgtcc

SEQ ID NO: 2526044 - DNA, 25 bp, Homo sapien
ggcctctcagttagccttggacatg

SEQ ID NO: 2526045 - DNA, 25 bp, Homo sapien
atgaagcgtctggaaggcctctcag

SEQ ID NO: 2526046 - DNA, 25 bp, Homo sapien
cgtctggaaggcctctcagttagcc

SEQ ID NO: 2526047 - DNA, 25 bp, Homo sapien
ttcgccatccgaacctggagggcat

SEQ ID NO: 2526048 - DNA, 25 bp, Homo sapien
gaacctggagggcatccagtcgaca

SEQ ID NO: 2526049 - DNA, 25 bp, Homo sapien
aatccttcgccatccgaacctggag

SEQ ID NO: 2526050 - DNA, 25 bp, Homo sapien
gggcatccagtcgacacctacaggg

SEQ ID NO: 2526051 - DNA, 25 bp, Homo sapien
gcctgtctgcaagacttgagttcag

SEQ ID NO: 2526052 - DNA, 25 bp, Homo sapien
agaatcgcgggcctgtctgcaagac

SEQ ID NO: 2526053 - DNA, 25 bp, Homo sapien
ccctgtaggtgtcgactggatgccc

SEQ ID NO: 2526054 - DNA, 25 bp, Homo sapien
cctccaggttcggatggcgaaggat

SEQ ID NO: 2526055 - DNA, 25 bp, Homo sapien
tggatgccctccaggttcggatggc

SEQ ID NO: 2526056 - DNA, 25 bp, Homo sapien
gtaggtgtcgactggatgccctcca

SEQ ID NO: 2526057 - DNA, 25 bp, Homo sapien
aagtcttgcagacaggcccgcgatt

SEQ ID NO: 2526058 - DNA, 25 bp, Homo sapien
tgaactcaagtcttgcagacaggcc

SEQ ID NO: 2526059 - DNA, 25 bp, Homo sapien
attgcttatagaccggaagccggga

SEQ ID NO: 2526060 - DNA, 25 bp, Homo sapien
cggaaggaagtgagactcgcacttc

SEQ ID NO: 2526061 - DNA, 25 bp, Homo sapien
gtgagactcgcacttcccatgattg

SEQ ID NO: 2526062 - DNA, 25 bp, Homo sapien
cttcccatgattgcttatagaccgg

SEQ ID NO: 2526063 - DNA, 25 bp, Homo sapien
tgccccagatccggaaggaagtgag

SEQ ID NO: 2526064 - DNA, 25 bp, Homo sapien
catgattgcttatagaccggaagcc

SEQ ID NO: 2526065 - DNA, 25 bp, Homo sapien
ccggtctataagcaatcatgggaag

SEQ ID NO: 2526066 - DNA, 25 bp, Homo sapien
gcttccggtctataagcaatcatgg

SEQ ID NO: 2526067 - DNA, 25 bp, Homo sapien
tcccggcttccggtctataagcaat

SEQ ID NO: 2526068 - DNA, 25 bp, Homo sapien
gaagtgcgagtctcacttccttccg

SEQ ID NO: 2526069 - DNA, 25 bp, Homo sapien
tctataagcaatcatgggaagtgcg

SEQ ID NO: 2526070 - DNA, 25 bp, Homo sapien
caatcatgggaagtgcgagtctcac

SEQ ID NO: 2526071 - DNA, 25 bp, Homo sapien
tcctccggcctggcctacagaatga

SEQ ID NO: 2526072 - DNA, 25 bp, Homo sapien
cctccggcctggcctacagaatgag

SEQ ID NO: 2526073 - DNA, 25 bp, Homo sapien
tgtgtctctgggaatcatttagcct

SEQ ID NO: 2526074 - DNA, 25 bp, Homo sapien
ttctagcttgcgttttccattttcc

SEQ ID NO: 2526075 - DNA, 25 bp, Homo sapien
gattttttcagatcgaaaccacctg

SEQ ID NO: 2526076 - DNA, 25 bp, Homo sapien
tcgaaaccacctgcttcatggctgt

SEQ ID NO: 2526077 - DNA, 25 bp, Homo sapien
gaggatacaaatacaatgatcagat

SEQ ID NO: 2526078 - DNA, 25 bp, Homo sapien
ggatacaaatacaatgatcagatga

SEQ ID NO: 2526079 - DNA, 25 bp, Homo sapien
ctgaggatacaaatacaatgatcag

SEQ ID NO: 2526080 - DNA, 25 bp, Homo sapien
atacaaatacaatgatcagatgaac

SEQ ID NO: 2526081 - DNA, 25 bp, Homo sapien
gaagacagggatgcaagaaacagct

SEQ ID NO: 2526082 - DNA, 25 bp, Homo sapien
caggcactactccaggcatataaag

SEQ ID NO: 2526083 - DNA, 25 bp, Homo sapien
gatgtgctaagggaaggagttcaac

SEQ ID NO: 2526084 - DNA, 25 bp, Homo sapien
gcacaggccatatctagaacggact

SEQ ID NO: 2526085 - DNA, 25 bp, Homo sapien
ggcttaagttatcttcccgccgcag

SEQ ID NO: 2526086 - DNA, 25 bp, Homo sapien
aatgaaatcgatgtggcagcgggcc

SEQ ID NO: 2526087 - DNA, 25 bp, Homo sapien
tggcttaagcgaacctcttgccgca

SEQ ID NO: 2526088 - DNA, 25 bp, Homo sapien
cgaggctcggagacagtaggtaatt

SEQ ID NO: 2526089 - DNA, 25 bp, Homo sapien
gcgtcgcgagcggtgacatcacggg

SEQ ID NO: 2526090 - DNA, 25 bp, Homo sapien
tggcggccgcggtttccaggaggaa

SEQ ID NO: 2526091 - DNA, 25 bp, Homo sapien
gctttggacactgtgcgtggcgcct

SEQ ID NO: 2526092 - DNA, 25 bp, Homo sapien
gtcgctcggtcctccgctgacggga

SEQ ID NO: 2526093 - DNA, 25 bp, Homo sapien
tcccgagcgggcctccctcgggcca

SEQ ID NO: 2526094 - DNA, 25 bp, Homo sapien
ccggctggctctgccccgcgtccgg

SEQ ID NO: 2526095 - DNA, 25 bp, Homo sapien
tggaggggggtctgtgcgcggccgg

SEQ ID NO: 2526096 - DNA, 25 bp, Homo sapien
tcgggccagcccgatgtgaccgagc

SEQ ID NO: 2526097 - DNA, 25 bp, Homo sapien
agcaaggagcgggtccgtcgcggag

SEQ ID NO: 2526098 - DNA, 25 bp, Homo sapien
gcgggaggaacatgacatcgcggag

SEQ ID NO: 2526099 - DNA, 25 bp, Homo sapien
aggagcgggtccgtcgcggagccgg

SEQ ID NO: 2526100 - DNA, 25 bp, Homo sapien
ggaacatgacatcgcggaggtgagg

SEQ ID NO: 2526101 - DNA, 25 bp, Homo sapien
cctccccgagttccggctgcggcag

SEQ ID NO: 2526102 - DNA, 25 bp, Homo sapien
agcgccgcattcctgacccattgcc

SEQ ID NO: 2526103 - DNA, 25 bp, Homo sapien
ggaaccacgggtgccagcggccagg

SEQ ID NO: 2526104 - DNA, 25 bp, Homo sapien
gcccggggcaggtagagccgccgag

SEQ ID NO: 2526105 - DNA, 25 bp, Homo sapien
ttctgtaggtagccatttctattaa

SEQ ID NO: 2526106 - DNA, 25 bp, Homo sapien
attctgtaggtagccatttctatta

SEQ ID NO: 2526107 - DNA, 25 bp, Homo sapien
cattctgtaggtagccatttctatt

SEQ ID NO: 2526108 - DNA, 25 bp, Homo sapien
gggcttcttcgaaacagaagagcat

SEQ ID NO: 2526109 - DNA, 25 bp, Homo sapien
tgagagacttgaaactgacgtcctt

SEQ ID NO: 2526110 - DNA, 25 bp, Homo sapien
ttttaattcggccattgattgacac

SEQ ID NO: 2526111 - DNA, 25 bp, Homo sapien
tagtcaatggatgtgctagccgctc

SEQ ID NO: 2526112 - DNA, 25 bp, Homo sapien
gaaaatgggatatctggcagcctgt

SEQ ID NO: 2526113 - DNA, 25 bp, Homo sapien
tagcagcttttgtgccctagggact

SEQ ID NO: 2526114 - DNA, 25 bp, Homo sapien
ggtgtctgtaactagcctctggtcc

SEQ ID NO: 2526115 - DNA, 25 bp, Homo sapien
tcagcttgacaggtcattagcagct

SEQ ID NO: 2526116 - DNA, 25 bp, Homo sapien
gtctcactctagatggatggcatct

SEQ ID NO: 2526117 - DNA, 25 bp, Homo sapien
tggagcttagaaccataagcctggt

SEQ ID NO: 2526118 - DNA, 25 bp, Homo sapien
tgggcagagcatggaaagtcacaac

SEQ ID NO: 2526119 - DNA, 25 bp, Homo sapien
ggaggaagcgcccttagcatttggt

SEQ ID NO: 2526120 - DNA, 25 bp, Homo sapien
actgtgcactgttcaagccccaagt

SEQ ID NO: 2526121 - DNA, 25 bp, Homo sapien
gtgcactgttcaagccccaagtccg

SEQ ID NO: 2526122 - DNA, 25 bp, Homo sapien
atcttgactgtgcactgttcaagcc

SEQ ID NO: 2526123 - DNA, 25 bp, Homo sapien
ttgactgtgcactgttcaagcccca

SEQ ID NO: 2526124 - DNA, 25 bp, Homo sapien
cctcctgtcctcgagcaaaaatacc

SEQ ID NO: 2526125 - DNA, 25 bp, Homo sapien
cctgtcctcgagcaaaaataccgat

SEQ ID NO: 2526126 - DNA, 25 bp, Homo sapien
ctcctgtcctcgagcaaaaataccg

SEQ ID NO: 2526127 - DNA, 25 bp, Homo sapien
tcctgtcctcgagcaaaaataccga

SEQ ID NO: 2526128 - DNA, 25 bp, Homo sapien
tcagaagttgacctttgcactggca

SEQ ID NO: 2526129 - DNA, 25 bp, Homo sapien
gaccaattatagttcggctgttgac

SEQ ID NO: 2526130 - DNA, 25 bp, Homo sapien
aactgttagtcaatctgagctgggc

SEQ ID NO: 2526131 - DNA, 25 bp, Homo sapien
taagtccagaattgtcacagtgtcc

SEQ ID NO: 2526132 - DNA, 25 bp, Homo sapien
tgactctttcttaatgccactgggt

SEQ ID NO: 2526133 - DNA, 25 bp, Homo sapien
cctccagccaggttgaatgagctca

SEQ ID NO: 2526134 - DNA, 25 bp, Homo sapien
tgagaaggaacagccctaacaggcc

SEQ ID NO: 2526135 - DNA, 25 bp, Homo sapien
gggttttagtcaggccacagtgaga

SEQ ID NO: 2526136 - DNA, 25 bp, Homo sapien
taagatactgtcattattaccgttt

SEQ ID NO: 2526137 - DNA, 25 bp, Homo sapien
cacttatgctactaattccaggtac

SEQ ID NO: 2526138 - DNA, 25 bp, Homo sapien
acaacaaccactaccatcacttatg

SEQ ID NO: 2526139 - DNA, 25 bp, Homo sapien
agaggtgaaagcacttgcctaaggt

SEQ ID NO: 2526140 - DNA, 25 bp, Homo sapien
cctcatctttagctgccatgtagat

SEQ ID NO: 2526141 - DNA, 25 bp, Homo sapien
tttagctgccatgtagatgaggtca

SEQ ID NO: 2526142 - DNA, 25 bp, Homo sapien
atctttagctgccatgtagatgagg

SEQ ID NO: 2526143 - DNA, 25 bp, Homo sapien
gctgccatgtagatgaggtcaatat

SEQ ID NO: 2526144 - DNA, 25 bp, Homo sapien
cagacaactccaactgcttgccttt

SEQ ID NO: 2526145 - DNA, 25 bp, Homo sapien
tcagacaactccaactgcttgcctt

SEQ ID NO: 2526146 - DNA, 25 bp, Homo sapien
gagttgggagtcaggttctgcagat

SEQ ID NO: 2526147 - DNA, 25 bp, Homo sapien
ttgggagtcaggttctgcagattca

SEQ ID NO: 2526148 - DNA, 25 bp, Homo sapien
gttgggagtcaggttctgcagattc

SEQ ID NO: 2526149 - DNA, 25 bp, Homo sapien
agttgggagtcaggttctgcagatt

SEQ ID NO: 2526150 - DNA, 25 bp, Homo sapien
tgcagccacaatgtaggtcactgac

SEQ ID NO: 2526151 - DNA, 25 bp, Homo sapien
agccacaatgtaggtcactgacagg

SEQ ID NO: 2526152 - DNA, 25 bp, Homo sapien
gccacaatgtaggtcactgacagga

SEQ ID NO: 2526153 - DNA, 25 bp, Homo sapien
tctcatgtttaactgctacaatcca

SEQ ID NO: 2526154 - DNA, 25 bp, Homo sapien
caatccagctgagcagttgatgatg

SEQ ID NO: 2526155 - DNA, 25 bp, Homo sapien
aatccagctgagcagttgatgatgt

SEQ ID NO: 2526156 - DNA, 25 bp, Homo sapien
ctcatgtttaactgctacaatccag

SEQ ID NO: 2526157 - DNA, 25 bp, Homo sapien
tatgcagagagacatcctggcattc

SEQ ID NO: 2526158 - DNA, 25 bp, Homo sapien
gcatatgcagagagacatcctggca

SEQ ID NO: 2526159 - DNA, 25 bp, Homo sapien
catatgcagagagacatcctggcat

SEQ ID NO: 2526160 - DNA, 25 bp, Homo sapien
tgcagagagacatcctggcattcct

SEQ ID NO: 2526161 - DNA, 25 bp, Homo sapien
tccggttcaggaattaccgctggct

SEQ ID NO: 2526162 - DNA, 25 bp, Homo sapien
cggttcaggaattaccgctggctgc

SEQ ID NO: 2526163 - DNA, 25 bp, Homo sapien
ttctccggttcaggaattaccgctg

SEQ ID NO: 2526164 - DNA, 25 bp, Homo sapien
tttttgatagagcttctttatggat

SEQ ID NO: 2526165 - DNA, 25 bp, Homo sapien
gcctgtaagtttcagtgtcttaaca

SEQ ID NO: 2526166 - DNA, 25 bp, Homo sapien
caggtgaatgtaggttgtattaatc

SEQ ID NO: 2526167 - DNA, 25 bp, Homo sapien
ggattagtcgggacaagaccagctg

SEQ ID NO: 2526168 - DNA, 25 bp, Homo sapien
ttgaagactgaagagctgagaacct

SEQ ID NO: 2526169 - DNA, 25 bp, Homo sapien
tggagcatgaagacaagttgatatc

SEQ ID NO: 2526170 - DNA, 25 bp, Homo sapien
gtctgggccactgtgctatcattag

SEQ ID NO: 2526171 - DNA, 25 bp, Homo sapien
cctttagtgattgagtgcctcttgt

SEQ ID NO: 2526172 - DNA, 25 bp, Homo sapien
gaatttgtccttttagctacatcct

SEQ ID NO: 2526173 - DNA, 25 bp, Homo sapien
tccagagggacaccgagtgacatca

SEQ ID NO: 2526174 - DNA, 25 bp, Homo sapien
caagcagcaagtgttcgtggagagt

SEQ ID NO: 2526175 - DNA, 25 bp, Homo sapien
tcagcaaagcgttaggaccagcgtg

SEQ ID NO: 2526176 - DNA, 25 bp, Homo sapien
tcagagaattatcaagcgcccaggg

SEQ ID NO: 2526177 - DNA, 25 bp, Homo sapien
tgccatatggctggggcttttcact

SEQ ID NO: 2526178 - DNA, 25 bp, Homo sapien
ttttctcatcaattgcctttcctgt

SEQ ID NO: 2526179 - DNA, 25 bp, Homo sapien
gctctcttatctcagcttctctcat

SEQ ID NO: 2526180 - DNA, 25 bp, Homo sapien
ctcccctgtgctgccatatggctgg

SEQ ID NO: 2526181 - DNA, 25 bp, Homo sapien
ttcatgttgccatgatagatgtctc

SEQ ID NO: 2526182 - DNA, 25 bp, Homo sapien
atgttgccatgatagatgtctcttc

SEQ ID NO: 2526183 - DNA, 25 bp, Homo sapien
catgttgccatgatagatgtctctt

SEQ ID NO: 2526184 - DNA, 25 bp, Homo sapien
tcatgttgccatgatagatgtctct

SEQ ID NO: 2526185 - DNA, 25 bp, Homo sapien
gacttcaactgcttggaaatcttca

SEQ ID NO: 2526186 - DNA, 25 bp, Homo sapien
cttcaactgcttggaaatcttcagt

SEQ ID NO: 2526187 - DNA, 25 bp, Homo sapien
acttcaactgcttggaaatcttcag

SEQ ID NO: 2526188 - DNA, 25 bp, Homo sapien
tcaactgcttggaaatcttcagttt

SEQ ID NO: 2526189 - DNA, 25 bp, Homo sapien
catcctccagcagtggggtgcacca

SEQ ID NO: 2526190 - DNA, 25 bp, Homo sapien
ttcccatagctcatcttccagcaat

SEQ ID NO: 2526191 - DNA, 25 bp, Homo sapien
catagctcatcttccagcaatggcc

SEQ ID NO: 2526192 - DNA, 25 bp, Homo sapien
ggtcaggggaggtggcttccaattc

SEQ ID NO: 2526193 - DNA, 25 bp, Homo sapien
tgttccacgtggctgcgactttaga

SEQ ID NO: 2526194 - DNA, 25 bp, Homo sapien
gaggttcttgggtttgtcgtctgat

SEQ ID NO: 2526195 - DNA, 25 bp, Homo sapien
tggaaagggctcgcaagaggttctt

SEQ ID NO: 2526196 - DNA, 25 bp, Homo sapien
cgtctgattgaacacgactgttcca

SEQ ID NO: 2526197 - DNA, 25 bp, Homo sapien
cttctggcagtggtatttctttttg

SEQ ID NO: 2526198 - DNA, 25 bp, Homo sapien
ctccgcttctggcagtggtatttct

SEQ ID NO: 2526199 - DNA, 25 bp, Homo sapien
cgcttctggcagtggtatttctttt

SEQ ID NO: 2526200 - DNA, 25 bp, Homo sapien
gttttctccgcttctggcagtggta

SEQ ID NO: 2526201 - DNA, 25 bp, Homo sapien
aggcttttcatgcaaggtgctgcca

SEQ ID NO: 2526202 - DNA, 25 bp, Homo sapien
ccagccattgatggcggggcggcat

SEQ ID NO: 2526203 - DNA, 25 bp, Homo sapien
ttgggaggcttttcatgcaaggtgc

SEQ ID NO: 2526204 - DNA, 25 bp, Homo sapien
tgtgaatggaagcagctttcagcag

SEQ ID NO: 2526205 - DNA, 25 bp, Homo sapien
gttcatgactccaaaaggtctcagg

SEQ ID NO: 2526206 - DNA, 25 bp, Homo sapien
agctaatacttagccaggagaccca

SEQ ID NO: 2526207 - DNA, 25 bp, Homo sapien
cagacatgctggagagagatgctga

SEQ ID NO: 2526208 - DNA, 25 bp, Homo sapien
tgtcaggtgagagctttgaacaagc

SEQ ID NO: 2526209 - DNA, 25 bp, Homo sapien
gtcaccctgactgtacaaagggcgg

SEQ ID NO: 2526210 - DNA, 25 bp, Homo sapien
ctgcagctatggtctggttaccaga

SEQ ID NO: 2526211 - DNA, 25 bp, Homo sapien
agtcttatcaccaagctcaagctga

SEQ ID NO: 2526212 - DNA, 25 bp, Homo sapien
tttgcagtttatccctccagaaagg

SEQ ID NO: 2526213 - DNA, 25 bp, Homo sapien
ggagctggaccgcttcatccaggac

SEQ ID NO: 2526214 - DNA, 25 bp, Homo sapien
catccagctagaccctaaccagaag

SEQ ID NO: 2526215 - DNA, 25 bp, Homo sapien
ccgggaatggccttggacctgtctc

SEQ ID NO: 2526216 - DNA, 25 bp, Homo sapien
caatgctgtgtacccaagagcaggg

SEQ ID NO: 2526217 - DNA, 25 bp, Homo sapien
ggtaatccaaagctagaactctcag

SEQ ID NO: 2526218 - DNA, 25 bp, Homo sapien
caactcaggtgcatgatacaaggag

SEQ ID NO: 2526219 - DNA, 25 bp, Homo sapien
ccaagttgtccagcagcagagtggc

SEQ ID NO: 2526220 - DNA, 25 bp, Homo sapien
cacacacatatccaagagctcaggg

SEQ ID NO: 2526221 - DNA, 25 bp, Homo sapien
aagagggttgcatttcttgcagcca

SEQ ID NO: 2526222 - DNA, 25 bp, Homo sapien
aaatagaccaatgcagttaggtggc

SEQ ID NO: 2526223 - DNA, 25 bp, Homo sapien
catggcgctggtacgtaaatagacc

SEQ ID NO: 2526224 - DNA, 25 bp, Homo sapien
taactagagccatatcacagatgca

SEQ ID NO: 2526225 - DNA, 25 bp, Homo sapien
gccctggagctgcttacggtgtatg

SEQ ID NO: 2526226 - DNA, 25 bp, Homo sapien
ccctggagctgcttacggtgtatgc

SEQ ID NO: 2526227 - DNA, 25 bp, Homo sapien
gacacagacatcctctatgccagca

SEQ ID NO: 2526228 - DNA, 25 bp, Homo sapien
cataactctgtgatcttgctctcgg

SEQ ID NO: 2526229 - DNA, 25 bp, Homo sapien
ggagtatcctcttgccaaatcaaaa

SEQ ID NO: 2526230 - DNA, 25 bp, Homo sapien
taaagatacttgaaggtctaggtgc

SEQ ID NO: 2526231 - DNA, 25 bp, Homo sapien
acttcgcctggctgctcataggcct

SEQ ID NO: 2526232 - DNA, 25 bp, Homo sapien
tggctgctcataggccttctcgatg

SEQ ID NO: 2526233 - DNA, 25 bp, Homo sapien
agacacagcgaattccagattgagt

SEQ ID NO: 2526234 - DNA, 25 bp, Homo sapien
agattgagtgttcccacttcgcctg

SEQ ID NO: 2526235 - DNA, 25 bp, Homo sapien
aggggccccatttcagtccccagag

SEQ ID NO: 2526236 - DNA, 25 bp, Homo sapien
agagacacccaaacagtccttctca

SEQ ID NO: 2526237 - DNA, 25 bp, Homo sapien
tgacttccaggggccccatttcagt

SEQ ID NO: 2526238 - DNA, 25 bp, Homo sapien
cccagagacacccaaacagtccttc

SEQ ID NO: 2526239 - DNA, 25 bp, Homo sapien
tccgtccgtcggccgggcagtctgt

SEQ ID NO: 2526240 - DNA, 25 bp, Homo sapien
ccgggcagtctgtccacgcgcggaa

SEQ ID NO: 2526241 - DNA, 25 bp, Homo sapien
gccggctcctgcgtccgtccgtcgg

SEQ ID NO: 2526242 - DNA, 25 bp, Homo sapien
tgtccacgcgcggaaagctcggcgc

SEQ ID NO: 2526243 - DNA, 25 bp, Homo sapien
aggcggcggtgctggagcgcgagcc

SEQ ID NO: 2526244 - DNA, 25 bp, Homo sapien
ctgggagggaacgggcgcggaggcg

SEQ ID NO: 2526245 - DNA, 25 bp, Homo sapien
cggcggtgctggagcgcgagccgga

SEQ ID NO: 2526246 - DNA, 25 bp, Homo sapien
cgcggaggcgggaccgcggctccct

SEQ ID NO: 2526247 - DNA, 25 bp, Homo sapien
cagggcgggaggcagagacgatcca

SEQ ID NO: 2526248 - DNA, 25 bp, Homo sapien
gaggcagagacgatccagctcctgg

SEQ ID NO: 2526249 - DNA, 25 bp, Homo sapien
tggcttcgccccctccgcgacgcga

SEQ ID NO: 2526250 - DNA, 25 bp, Homo sapien
agctcctggcttcgccccctccgcg

SEQ ID NO: 2526251 - DNA, 25 bp, Homo sapien
gcagacaggtctacccactgtcact

SEQ ID NO: 2526252 - DNA, 25 bp, Homo sapien
caggcagacaggtctacccactgtc

SEQ ID NO: 2526253 - DNA, 25 bp, Homo sapien
gggtctttgaggagccaggcagaca

SEQ ID NO: 2526254 - DNA, 25 bp, Homo sapien
cagccctcccaaccctggtctcttt

SEQ ID NO: 2526255 - DNA, 25 bp, Homo sapien
ccaagatcgagccactgcactccag

SEQ ID NO: 2526256 - DNA, 25 bp, Homo sapien
tcccttgagcccaggttgcagtgag

SEQ ID NO: 2526257 - DNA, 25 bp, Homo sapien
tacctagacaacgtgctggctgagc

SEQ ID NO: 2526258 - DNA, 25 bp, Homo sapien
agtttggatccaacctcacgggcca

SEQ ID NO: 2526259 - DNA, 25 bp, Homo sapien
gagatccaccacaagaccgagtttg

SEQ ID NO: 2526260 - DNA, 25 bp, Homo sapien
gacaccgtggtgtggaacgagatcc

SEQ ID NO: 2526261 - DNA, 25 bp, Homo sapien
gaccccagccttaaatcagcctctc

SEQ ID NO: 2526262 - DNA, 25 bp, Homo sapien
tcatcaggatctcagagcttgtcag

SEQ ID NO: 2526263 - DNA, 25 bp, Homo sapien
tcagctcatcaggatctcagagctt

SEQ ID NO: 2526264 - DNA, 25 bp, Homo sapien
tctcagagcttgtcaggaccctgtc

SEQ ID NO: 2526265 - DNA, 25 bp, Homo sapien
ccagtttggtgaagtagagacccca

SEQ ID NO: 2526266 - DNA, 25 bp, Homo sapien
gcaacaacatcacatgggcatcagg

SEQ ID NO: 2526267 - DNA, 25 bp, Homo sapien
tcaaggcacacaggactaggcacgt

SEQ ID NO: 2526268 - DNA, 25 bp, Homo sapien
agagagagataaacagcctggccca

SEQ ID NO: 2526269 - DNA, 25 bp, Homo sapien
actcctcgtgggcacgatccaggtc

SEQ ID NO: 2526270 - DNA, 25 bp, Homo sapien
gggcacgatccaggtctgcgagcac

SEQ ID NO: 2526271 - DNA, 25 bp, Homo sapien
tcgtgggcacgatccaggtctgcga

SEQ ID NO: 2526272 - DNA, 25 bp, Homo sapien
tcctcgtgggcacgatccaggtctg

SEQ ID NO: 2526273 - DNA, 25 bp, Homo sapien
ttgctgctctttgccgggccaggac

SEQ ID NO: 2526274 - DNA, 25 bp, Homo sapien
gctgctctttgccgggccaggacct

SEQ ID NO: 2526275 - DNA, 25 bp, Homo sapien
caggcgggcagttgctgctctttgc

SEQ ID NO: 2526276 - DNA, 25 bp, Homo sapien
cagcaggcgggcagttgctgctctt

SEQ ID NO: 2526277 - DNA, 25 bp, Homo sapien
tccagagttgtatccatgttagaat

SEQ ID NO: 2526278 - DNA, 25 bp, Homo sapien
gtatccatgttagaatcctccagta

SEQ ID NO: 2526279 - DNA, 25 bp, Homo sapien
cagagttgtatccatgttagaatcc

SEQ ID NO: 2526280 - DNA, 25 bp, Homo sapien
agttgtatccatgttagaatcctcc

SEQ ID NO: 2526281 - DNA, 25 bp, Homo sapien
gagcagctgccgatacactgtctgg

SEQ ID NO: 2526282 - DNA, 25 bp, Homo sapien
agcagctgccgatacactgtctggg

SEQ ID NO: 2526283 - DNA, 25 bp, Homo sapien
ggagcagctgccgatacactgtctg

SEQ ID NO: 2526284 - DNA, 25 bp, Homo sapien
caggagcagctgccgatacactgtc

SEQ ID NO: 2526285 - DNA, 25 bp, Homo sapien
gaggcatccactggaatctcaaacg

SEQ ID NO: 2526286 - DNA, 25 bp, Homo sapien
tgggtcagaggcatccactggaatc

SEQ ID NO: 2526287 - DNA, 25 bp, Homo sapien
ggtcacatttaagcagcacctcctc

SEQ ID NO: 2526288 - DNA, 25 bp, Homo sapien
tctgctctactcaggtcacatttaa

SEQ ID NO: 2526289 - DNA, 25 bp, Homo sapien
gctgattgacgggtggggagggcgg

SEQ ID NO: 2526290 - DNA, 25 bp, Homo sapien
ggcggaagtgggacacccgctgatt

SEQ ID NO: 2526291 - DNA, 25 bp, Homo sapien
cccaggcggaagtgggacacccgct

SEQ ID NO: 2526292 - DNA, 25 bp, Homo sapien
ggaagtgggacacccgctgattgac

SEQ ID NO: 2526293 - DNA, 25 bp, Homo sapien
caaggccgagagccactggttgagc

SEQ ID NO: 2526294 - DNA, 25 bp, Homo sapien
agcaggtccagcgcgcgctgcggaa

SEQ ID NO: 2526295 - DNA, 25 bp, Homo sapien
gtccagcgcgcgctgcggaaggcac

SEQ ID NO: 2526296 - DNA, 25 bp, Homo sapien
caggcggccagcttgttcgggttgg

SEQ ID NO: 2526297 - DNA, 25 bp, Homo sapien
ggaggtaggtggtgtgcagcgcccc

SEQ ID NO: 2526298 - DNA, 25 bp, Homo sapien
tggaggtaggtggtgtgcagcgccc

SEQ ID NO: 2526299 - DNA, 25 bp, Homo sapien
tgtgcagcgcccccgtgccgtcctg

SEQ ID NO: 2526300 - DNA, 25 bp, Homo sapien
gcagcgcccccgtgccgtcctgcgt

SEQ ID NO: 2526301 - DNA, 25 bp, Homo sapien
gttggaaggcgccctcgtctacgcg

SEQ ID NO: 2526302 - DNA, 25 bp, Homo sapien
gcagttggaaggcgccctcgtctac

SEQ ID NO: 2526303 - DNA, 25 bp, Homo sapien
agttggaaggcgccctcgtctacgc

SEQ ID NO: 2526304 - DNA, 25 bp, Homo sapien
gggcagttggaaggcgccctcgtct

SEQ ID NO: 2526305 - DNA, 25 bp, Homo sapien
ctccacggcgcggatgtgagacacg

SEQ ID NO: 2526306 - DNA, 25 bp, Homo sapien
ggcgcggatgtgagacacggggatg

SEQ ID NO: 2526307 - DNA, 25 bp, Homo sapien
ccacggcgcggatgtgagacacggg

SEQ ID NO: 2526308 - DNA, 25 bp, Homo sapien
cgcggatgtgagacacggggatgga

SEQ ID NO: 2526309 - DNA, 25 bp, Homo sapien
cttctcgaacaatggccgagggcgg

SEQ ID NO: 2526310 - DNA, 25 bp, Homo sapien
gctgagccagacgtagcgcttcttg

SEQ ID NO: 2526311 - DNA, 25 bp, Homo sapien
tcctccttgcgcttcagcagatagc

SEQ ID NO: 2526312 - DNA, 25 bp, Homo sapien
tcttgaaggcaaagcgcgtggccag

SEQ ID NO: 2526313 - DNA, 25 bp, Homo sapien
gccggtccaggaagtctctcacacg

SEQ ID NO: 2526314 - DNA, 25 bp, Homo sapien
cacgtgagacacactgcagcaggaa

SEQ ID NO: 2526315 - DNA, 25 bp, Homo sapien
ggaagtctctcacacgtgagacaca

SEQ ID NO: 2526316 - DNA, 25 bp, Homo sapien
catccacagttccttgccttggccc

SEQ ID NO: 2526317 - DNA, 25 bp, Homo sapien
tccgcgtgttggtcccgaaggtcaa

SEQ ID NO: 2526318 - DNA, 25 bp, Homo sapien
caacagcagtgagcggctagtctgg

SEQ ID NO: 2526319 - DNA, 25 bp, Homo sapien
cgaagaatcgcaagaagagaaatcc

SEQ ID NO: 2526320 - DNA, 25 bp, Homo sapien
gagaaatccactgatggccaggtac

SEQ ID NO: 2526321 - DNA, 25 bp, Homo sapien
tatatttagcctgagagtctgcgcc

SEQ ID NO: 2526322 - DNA, 25 bp, Homo sapien
tattggctcaccatacgaggtctag

SEQ ID NO: 2526323 - DNA, 25 bp, Homo sapien
tgaggctcagtagtgaacccagtct

SEQ ID NO: 2526324 - DNA, 25 bp, Homo sapien
aaagaaccggtgtcagtgcagcaga

SEQ ID NO: 2526325 - DNA, 25 bp, Homo sapien
tactatcattcttgggacccggacc

SEQ ID NO: 2526326 - DNA, 25 bp, Homo sapien
agtgccggcagcctaggttctggtc

SEQ ID NO: 2526327 - DNA, 25 bp, Homo sapien
gcagcctaggttctggtcacagttc

SEQ ID NO: 2526328 - DNA, 25 bp, Homo sapien
caggacagaatgctctagtgccggc

SEQ ID NO: 2526329 - DNA, 25 bp, Homo sapien
tgcttgaaggcgaggcgcatggcgg

SEQ ID NO: 2526330 - DNA, 25 bp, Homo sapien
tcctccgagagtgcgcctttgaagg

SEQ ID NO: 2526331 - DNA, 25 bp, Homo sapien
gggccccaggtagcccgtcagcagc

SEQ ID NO: 2526332 - DNA, 25 bp, Homo sapien
cggagcccacgatggcgtccacgat

SEQ ID NO: 2526333 - DNA, 25 bp, Homo sapien
tcaggacctcgtgcaggtagggcat

SEQ ID NO: 2526334 - DNA, 25 bp, Homo sapien
cacggctaatcacaggcttcaggac

SEQ ID NO: 2526335 - DNA, 25 bp, Homo sapien
agggatccagctccatgtacttctt

SEQ ID NO: 2526336 - DNA, 25 bp, Homo sapien
ggtgcggcccaggtccatcttgcag

SEQ ID NO: 2526337 - DNA, 25 bp, Homo sapien
tcataaactgttccatcgacttgga

SEQ ID NO: 2526338 - DNA, 25 bp, Homo sapien
tgccagggagttagaacggaagagg

SEQ ID NO: 2526339 - DNA, 25 bp, Homo sapien
taaactgttccatcgacttggatgc

SEQ ID NO: 2526340 - DNA, 25 bp, Homo sapien
ttccatcgacttggatgccagggag

SEQ ID NO: 2526341 - DNA, 25 bp, Homo sapien
tcacgccgggtgagatagtccagaa

SEQ ID NO: 2526342 - DNA, 25 bp, Homo sapien
cgagccacctcacgccgggtgagat

SEQ ID NO: 2526343 - DNA, 25 bp, Homo sapien
aggtcctggcggcagtcccccaagg

SEQ ID NO: 2526344 - DNA, 25 bp, Homo sapien
cagcttggtggcaaggtcctggcgg

SEQ ID NO: 2526345 - DNA, 25 bp, Homo sapien
ggtcctcaatcaggcgtaccttcac

SEQ ID NO: 2526346 - DNA, 25 bp, Homo sapien
aggcgtaccttcactcgcagggcac

SEQ ID NO: 2526347 - DNA, 25 bp, Homo sapien
gcggtcctcaatcaggcgtaccttc

SEQ ID NO: 2526348 - DNA, 25 bp, Homo sapien
tcaatcaggcgtaccttcactcgca

SEQ ID NO: 2526349 - DNA, 25 bp, Homo sapien
aggaggcggaaccagcctttaggtg

SEQ ID NO: 2526350 - DNA, 25 bp, Homo sapien
cctcctcggctctgggaaagggcag

SEQ ID NO: 2526351 - DNA, 25 bp, Homo sapien
gcggaaccagcctttaggtggcttc

SEQ ID NO: 2526352 - DNA, 25 bp, Homo sapien
ggaaccagcctttaggtggcttctg

SEQ ID NO: 2526353 - DNA, 25 bp, Homo sapien
cagcacttcatcccagtgcgggaag

SEQ ID NO: 2526354 - DNA, 25 bp, Homo sapien
gcacttcatcccagtgcgggaagcg

SEQ ID NO: 2526355 - DNA, 25 bp, Homo sapien
gggacggggcacctggcatctcccg

SEQ ID NO: 2526356 - DNA, 25 bp, Homo sapien
agcacttcatcccagtgcgggaagc

SEQ ID NO: 2526357 - DNA, 25 bp, Homo sapien
tccaagctctggctgccccaaaaca

SEQ ID NO: 2526358 - DNA, 25 bp, Homo sapien
tgaggtctccaagctctggctgccc

SEQ ID NO: 2526359 - DNA, 25 bp, Homo sapien
aagctctggctgccccaaaacacac

SEQ ID NO: 2526360 - DNA, 25 bp, Homo sapien
ctccaagctctggctgccccaaaac

SEQ ID NO: 2526361 - DNA, 25 bp, Homo sapien
atgtgccagagatgtctctgggagc

SEQ ID NO: 2526362 - DNA, 25 bp, Homo sapien
tgtgccagagatgtctctgggagcc

SEQ ID NO: 2526363 - DNA, 25 bp, Homo sapien
tgaagcacatggcagcgaaggcagc

SEQ ID NO: 2526364 - DNA, 25 bp, Homo sapien
gcatctgggtccactcggctcaagt

SEQ ID NO: 2526365 - DNA, 25 bp, Homo sapien
gggtccactcggctcaagttaatcc

SEQ ID NO: 2526366 - DNA, 25 bp, Homo sapien
catctgcactgacaggcagatctca

SEQ ID NO: 2526367 - DNA, 25 bp, Homo sapien
gggtcggctgtaatcgcctccctgc

SEQ ID NO: 2526368 - DNA, 25 bp, Homo sapien
gctcagcgagatcttgccgatgatg

SEQ ID NO: 2526369 - DNA, 25 bp, Homo sapien
ctcgggggtcggctgtaatcgcctc

SEQ ID NO: 2526370 - DNA, 25 bp, Homo sapien
gatcttgccgatgatgtcgtcgtgc

SEQ ID NO: 2526371 - DNA, 25 bp, Homo sapien
ggcacaccctcgtgggctgtggacc

SEQ ID NO: 2526372 - DNA, 25 bp, Homo sapien
agggcacaccctcgtgggctgtgga

SEQ ID NO: 2526373 - DNA, 25 bp, Homo sapien
acaccctcgtgggctgtggacccac

SEQ ID NO: 2526374 - DNA, 25 bp, Homo sapien
accctcgtgggctgtggacccacat

SEQ ID NO: 2526375 - DNA, 25 bp, Homo sapien
gtcctcatccagcacgtagaaggcc

SEQ ID NO: 2526376 - DNA, 25 bp, Homo sapien
cattcacttggactatgggcccagc

SEQ ID NO: 2526377 - DNA, 25 bp, Homo sapien
tcctgtaggagctagtcaggcaaag

SEQ ID NO: 2526378 - DNA, 25 bp, Homo sapien
ggttagctcaatcgcccctggttgg

SEQ ID NO: 2526379 - DNA, 25 bp, Homo sapien
ggcgctctctcccagcaattaggac

SEQ ID NO: 2526380 - DNA, 25 bp, Homo sapien
tgcccacgcgcacagacatccccag

SEQ ID NO: 2526381 - DNA, 25 bp, Homo sapien
caaccagtccagccaagcgtgagat

SEQ ID NO: 2526382 - DNA, 25 bp, Homo sapien
gtccagccaagcgtgagatgcccgc

SEQ ID NO: 2526383 - DNA, 25 bp, Homo sapien
accagtccagccaagcgtgagatgc

SEQ ID NO: 2526384 - DNA, 25 bp, Homo sapien
ctcgtcgtccactttcactaggcag

SEQ ID NO: 2526385 - DNA, 25 bp, Homo sapien
cgtcgtccactttcactaggcagta

SEQ ID NO: 2526386 - DNA, 25 bp, Homo sapien
cgtccactttcactaggcagtaggg

SEQ ID NO: 2526387 - DNA, 25 bp, Homo sapien
tggccaccacctcgtcgtccacttt

SEQ ID NO: 2526388 - DNA, 25 bp, Homo sapien
tatagatccacaaatgcctctggga

SEQ ID NO: 2526389 - DNA, 25 bp, Homo sapien
agtgtaggccgtctcattcccaggg

SEQ ID NO: 2526390 - DNA, 25 bp, Homo sapien
tatatgaagtgttaagcacagggcc

SEQ ID NO: 2526391 - DNA, 25 bp, Homo sapien
caggttaccgtaagccagtgtccag

SEQ ID NO: 2526392 - DNA, 25 bp, Homo sapien
cgcggccctccaccacgcgaacatt

SEQ ID NO: 2526393 - DNA, 25 bp, Homo sapien
tccaccacgcgaacattcagggagc

SEQ ID NO: 2526394 - DNA, 25 bp, Homo sapien
ggccctccaccacgcgaacattcag

SEQ ID NO: 2526395 - DNA, 25 bp, Homo sapien
agcgcgcggccctccaccacgcgaa

SEQ ID NO: 2526396 - DNA, 25 bp, Homo sapien
ggctccctgcctcgtggtcccagtg

SEQ ID NO: 2526397 - DNA, 25 bp, Homo sapien
tgccgcctgtccgagacccgggtag

SEQ ID NO: 2526398 - DNA, 25 bp, Homo sapien
cgctcaggttccgaggctggaccag

SEQ ID NO: 2526399 - DNA, 25 bp, Homo sapien
ggacgtctacatgtcacctgcttca

SEQ ID NO: 2526400 - DNA, 25 bp, Homo sapien
gcccgtccggactctacaggtagga

SEQ ID NO: 2526401 - DNA, 25 bp, Homo sapien
taggagccgtgctccgagcaggagg

SEQ ID NO: 2526402 - DNA, 25 bp, Homo sapien
tccggactctacaggtaggagccgt

SEQ ID NO: 2526403 - DNA, 25 bp, Homo sapien
gagccgtgctccgagcaggaggagc

SEQ ID NO: 2526404 - DNA, 25 bp, Homo sapien
ccctgggggtccgttcagagtcaag

SEQ ID NO: 2526405 - DNA, 25 bp, Homo sapien
ggtgggaggcgtcgccagagagagg

SEQ ID NO: 2526406 - DNA, 25 bp, Homo sapien
cgcatgttccctgggggtccgttca

SEQ ID NO: 2526407 - DNA, 25 bp, Homo sapien
cccggtccaggagcaagtattagtg

SEQ ID NO: 2526408 - DNA, 25 bp, Homo sapien
acctcctacttgagcctcttcagaa

SEQ ID NO: 2526409 - DNA, 25 bp, Homo sapien
tcttcagaaagctgccagagcaggc

SEQ ID NO: 2526410 - DNA, 25 bp, Homo sapien
actccagacacagtggtgagatgtg

SEQ ID NO: 2526411 - DNA, 25 bp, Homo sapien
gctatgatgattagaccactgcact

SEQ ID NO: 2526412 - DNA, 25 bp, Homo sapien
aactggagtagtggaaattaagaag

SEQ ID NO: 2526413 - DNA, 25 bp, Homo sapien
gtccaactggagtagtggaaattaa

SEQ ID NO: 2526414 - DNA, 25 bp, Homo sapien
ccaactggagtagtggaaattaaga

SEQ ID NO: 2526415 - DNA, 25 bp, Homo sapien
ttagtccaactggagtagtggaaat

SEQ ID NO: 2526416 - DNA, 25 bp, Homo sapien
gaacggtttaggatctcagtcacca

SEQ ID NO: 2526417 - DNA, 25 bp, Homo sapien
tcatcgctaaatggacaaggcagca

SEQ ID NO: 2526418 - DNA, 25 bp, Homo sapien
cccacggagataagagtaggtcaca

SEQ ID NO: 2526419 - DNA, 25 bp, Homo sapien
taggagggcccacatttccaatggg

SEQ ID NO: 2526420 - DNA, 25 bp, Homo sapien
ctaaggccaatcaaggagccacggg

SEQ ID NO: 2526421 - DNA, 25 bp, Homo sapien
ggctttgctggcgaactcctgcaca

SEQ ID NO: 2526422 - DNA, 25 bp, Homo sapien
cacacagtggtgcacgggaacgtct

SEQ ID NO: 2526423 - DNA, 25 bp, Homo sapien
tctgaacccagaacacatggaagca

SEQ ID NO: 2526424 - DNA, 25 bp, Homo sapien
gcatcttgcccttcttggagcgggc

SEQ ID NO: 2526425 - DNA, 25 bp, Homo sapien
ttggtcttgagttccgggcggactc

SEQ ID NO: 2526426 - DNA, 25 bp, Homo sapien
accccggccgaaggcgccctgctgc

SEQ ID NO: 2526427 - DNA, 25 bp, Homo sapien
cagcttctgggcccggcgccgctgc

SEQ ID NO: 2526428 - DNA, 25 bp, Homo sapien
tgcctggggcgtggggccgggatgc

SEQ ID NO: 2526429 - DNA, 25 bp, Homo sapien
gtgcctggggcgtggggccgggatg

SEQ ID NO: 2526430 - DNA, 25 bp, Homo sapien
cctggggcgtggggccgggatgcac

SEQ ID NO: 2526431 - DNA, 25 bp, Homo sapien
gcctggggcgtggggccgggatgca

SEQ ID NO: 2526432 - DNA, 25 bp, Homo sapien
gcacggcaatgctcgcagcagaagc

SEQ ID NO: 2526433 - DNA, 25 bp, Homo sapien
cactgcacggcaatgctcgcagcag

SEQ ID NO: 2526434 - DNA, 25 bp, Homo sapien
tgcacggcaatgctcgcagcagaag

SEQ ID NO: 2526435 - DNA, 25 bp, Homo sapien
acgcccactgcacggcaatgctcgc

SEQ ID NO: 2526436 - DNA, 25 bp, Homo sapien
ttggccacggtctcgcttcccacct

SEQ ID NO: 2526437 - DNA, 25 bp, Homo sapien
cgagtcacgatcatcaattttctgt

SEQ ID NO: 2526438 - DNA, 25 bp, Homo sapien
gggcctcgccggtcagatgcccctt

SEQ ID NO: 2526439 - DNA, 25 bp, Homo sapien
ttcttcgtccgagtcacgatcatca

SEQ ID NO: 2526440 - DNA, 25 bp, Homo sapien
agcccctgggatgggagaaggctcc

SEQ ID NO: 2526441 - DNA, 25 bp, Homo sapien
cactgccccagcagacagagttccg

SEQ ID NO: 2526442 - DNA, 25 bp, Homo sapien
tgggatgggagaaggctcctcccca

SEQ ID NO: 2526443 - DNA, 25 bp, Homo sapien
ctgccccagcagacagagttccgtt

SEQ ID NO: 2526444 - DNA, 25 bp, Homo sapien
cacaggtcccactagttcgagatgc

SEQ ID NO: 2526445 - DNA, 25 bp, Homo sapien
ggtcccactagttcgagatgctgct

SEQ ID NO: 2526446 - DNA, 25 bp, Homo sapien
acaggtcccactagttcgagatgct

SEQ ID NO: 2526447 - DNA, 25 bp, Homo sapien
aggtcccactagttcgagatgctgc

SEQ ID NO: 2526448 - DNA, 25 bp, Homo sapien
tgtagcggccgctctctgtcttaat

SEQ ID NO: 2526449 - DNA, 25 bp, Homo sapien
aggtctcgcttgtaggagctgctga

SEQ ID NO: 2526450 - DNA, 25 bp, Homo sapien
gactgtcccacaaaccgcttcttct

SEQ ID NO: 2526451 - DNA, 25 bp, Homo sapien
ttgtcttcctgtcctgactgtccca

SEQ ID NO: 2526452 - DNA, 25 bp, Homo sapien
cctgcagtccaggtctcaaaaggga

SEQ ID NO: 2526453 - DNA, 25 bp, Homo sapien
accctcttgtcaggttgttggagca

SEQ ID NO: 2526454 - DNA, 25 bp, Homo sapien
aggtcagaggactgccgccagcact

SEQ ID NO: 2526455 - DNA, 25 bp, Homo sapien
catgtctggcatgcagttggcgctc

SEQ ID NO: 2526456 - DNA, 25 bp, Homo sapien
ctcactcgatcactcaccccaggca

SEQ ID NO: 2526457 - DNA, 25 bp, Homo sapien
atggaggggcggctcactcgatcac

SEQ ID NO: 2526458 - DNA, 25 bp, Homo sapien
catggaggggcggctcactcgatca

SEQ ID NO: 2526459 - DNA, 25 bp, Homo sapien
gagcatggaggggcggctcactcga

SEQ ID NO: 2526460 - DNA, 25 bp, Homo sapien
cccgagcatggaggggcggctcact

SEQ ID NO: 2526461 - DNA, 25 bp, Homo sapien
tgctgccggcccctcgtcaggttct

SEQ ID NO: 2526462 - DNA, 25 bp, Homo sapien
tgccggcccctcgtcaggttctggg

SEQ ID NO: 2526463 - DNA, 25 bp, Homo sapien
cccctcgtcaggttctgggcttcat

SEQ ID NO: 2526464 - DNA, 25 bp, Homo sapien
tcgtcaggttctgggcttcatcccc

SEQ ID NO: 2526465 - DNA, 25 bp, Homo sapien
atgtagaattcctggtcccgctgcc

SEQ ID NO: 2526466 - DNA, 25 bp, Homo sapien
tccgcctcttggctcccctgttggg

SEQ ID NO: 2526467 - DNA, 25 bp, Homo sapien
tggctcccctgttgggtcctgaccg

SEQ ID NO: 2526468 - DNA, 25 bp, Homo sapien
agaattcctggtcccgctgccgggc

SEQ ID NO: 2526469 - DNA, 25 bp, Homo sapien
aaacatgagagagggacatcctggg

SEQ ID NO: 2526470 - DNA, 25 bp, Homo sapien
cttggctactgaaccctctgtccaa

SEQ ID NO: 2526471 - DNA, 25 bp, Homo sapien
caggctatgtgacagccggccctgc

SEQ ID NO: 2526472 - DNA, 25 bp, Homo sapien
gggtctccaactggtcttcttggct

SEQ ID NO: 2526473 - DNA, 25 bp, Homo sapien
ttctcctgcagtgctgggcggctcg

SEQ ID NO: 2526474 - DNA, 25 bp, Homo sapien
gcttctcctgcagtgctgggcggct

SEQ ID NO: 2526475 - DNA, 25 bp, Homo sapien
tctcctgcagtgctgggcggctcgg

SEQ ID NO: 2526476 - DNA, 25 bp, Homo sapien
tcctgcagtgctgggcggctcgggg

SEQ ID NO: 2526477 - DNA, 25 bp, Homo sapien
ttggcgcgcatcacctggctgcaca

SEQ ID NO: 2526478 - DNA, 25 bp, Homo sapien
cggctggaggcgttgatctcaaaga

SEQ ID NO: 2526479 - DNA, 25 bp, Homo sapien
ggcgatggccttgcggtccttctgc

SEQ ID NO: 2526480 - DNA, 25 bp, Homo sapien
ctggaagcgggcgatggccttgcgg

SEQ ID NO: 2526481 - DNA, 25 bp, Homo sapien
cgcccgggagcggtagttctttatg

SEQ ID NO: 2526482 - DNA, 25 bp, Homo sapien
gagcggtagttctttatgctgtcca

SEQ ID NO: 2526483 - DNA, 25 bp, Homo sapien
cccgggagcggtagttctttatgct

SEQ ID NO: 2526484 - DNA, 25 bp, Homo sapien
gtagttctttatgctgtccaccagc

SEQ ID NO: 2526485 - DNA, 25 bp, Homo sapien
ctggtaggaaagcagcaaggtgtga

SEQ ID NO: 2526486 - DNA, 25 bp, Homo sapien
ggtaggaaagcagcaaggtgtgagg

SEQ ID NO: 2526487 - DNA, 25 bp, Homo sapien
gtaggaaagcagcaaggtgtgaggc

SEQ ID NO: 2526488 - DNA, 25 bp, Homo sapien
tggtaggaaagcagcaaggtgtgag

SEQ ID NO: 2526489 - DNA, 25 bp, Homo sapien
cctcttgatggactcaggcgagggc

SEQ ID NO: 2526490 - DNA, 25 bp, Homo sapien
catctccttggccctcttgatggac

SEQ ID NO: 2526491 - DNA, 25 bp, Homo sapien
cgtgagcgcacatactgctgctggg

SEQ ID NO: 2526492 - DNA, 25 bp, Homo sapien
gcgttatcagcaacgcgggccaggc

SEQ ID NO: 2526493 - DNA, 25 bp, Homo sapien
cttgaggggtcgggcgagggtgagg

SEQ ID NO: 2526494 - DNA, 25 bp, Homo sapien
ccttgaggggtcgggcgagggtgag

SEQ ID NO: 2526495 - DNA, 25 bp, Homo sapien
tccttgaggggtcgggcgagggtga

SEQ ID NO: 2526496 - DNA, 25 bp, Homo sapien
gctgtgccacttcggccagcccgag

SEQ ID NO: 2526497 - DNA, 25 bp, Homo sapien
cagcaggtaggggatttcatcaggg

SEQ ID NO: 2526498 - DNA, 25 bp, Homo sapien
aaggagtaggctgtgccacttcggc

SEQ ID NO: 2526499 - DNA, 25 bp, Homo sapien
accaaggagtaggctgtgccacttc

SEQ ID NO: 2526500 - DNA, 25 bp, Homo sapien
ctgtcgggtctagggcactgtagat

SEQ ID NO: 2526501 - DNA, 25 bp, Homo sapien
ggcggccaggtcagtcacaatgaga

SEQ ID NO: 2526502 - DNA, 25 bp, Homo sapien
aatgagagtggagcacttgccaagc

SEQ ID NO: 2526503 - DNA, 25 bp, Homo sapien
aatttggcgagattgatcttgcggg

SEQ ID NO: 2526504 - DNA, 25 bp, Homo sapien
taaaaatgaccatcttgagcccagg

SEQ ID NO: 2526505 - DNA, 25 bp, Homo sapien
aggctcctggtccgctctcgtgctg

SEQ ID NO: 2526506 - DNA, 25 bp, Homo sapien
aaaatgaccatcttgagcccaggcc

SEQ ID NO: 2526507 - DNA, 25 bp, Homo sapien
gtccgctctcgtgctgccctctagt

SEQ ID NO: 2526508 - DNA, 25 bp, Homo sapien
cgtggtgcttcgtggccacaaacac

SEQ ID NO: 2526509 - DNA, 25 bp, Homo sapien
cctggggccgcaccacgttgtgcag

SEQ ID NO: 2526510 - DNA, 25 bp, Homo sapien
tcagtgaggtactcggcgtggtgct

SEQ ID NO: 2526511 - DNA, 25 bp, Homo sapien
tactcggcgtggtgcttcgtggcca

SEQ ID NO: 2526512 - DNA, 25 bp, Homo sapien
ggtgtcctcccgcacgaggaagaag

SEQ ID NO: 2526513 - DNA, 25 bp, Homo sapien
cttggtgtcctcccgcacgaggaag

SEQ ID NO: 2526514 - DNA, 25 bp, Homo sapien
tgtcctcccgcacgaggaagaagga

SEQ ID NO: 2526515 - DNA, 25 bp, Homo sapien
cctcccgcacgaggaagaaggaggt

SEQ ID NO: 2526516 - DNA, 25 bp, Homo sapien
tcgttgagcttggtatccacgtcaa

SEQ ID NO: 2526517 - DNA, 25 bp, Homo sapien
tgagcttggtatccacgtcaagccg

SEQ ID NO: 2526518 - DNA, 25 bp, Homo sapien
tatccacgtcaagccggatgagcac

SEQ ID NO: 2526519 - DNA, 25 bp, Homo sapien
gtcaagccggatgagcacgggctcc

SEQ ID NO: 2526520 - DNA, 25 bp, Homo sapien
ggaaagtgggggagtcgcagaggga

SEQ ID NO: 2526521 - DNA, 25 bp, Homo sapien
agtttgggcagcgtggcggagaaca

SEQ ID NO: 2526522 - DNA, 25 bp, Homo sapien
gggaggcgggcgatgatctcctgca

SEQ ID NO: 2526523 - DNA, 25 bp, Homo sapien
gagaacagcaccgtctggtggcccc

SEQ ID NO: 2526524 - DNA, 25 bp, Homo sapien
cggagaacagcaccgtctggtggcc

SEQ ID NO: 2526525 - DNA, 25 bp, Homo sapien
caaccgtccgggcgtggcaataatt

SEQ ID NO: 2526526 - DNA, 25 bp, Homo sapien
gtcagcttcatcgaacaccacgtat

SEQ ID NO: 2526527 - DNA, 25 bp, Homo sapien
acagccacatgcaccaaccgtccgg

SEQ ID NO: 2526528 - DNA, 25 bp, Homo sapien
acaccacgtattccacactctgcag

SEQ ID NO: 2526529 - DNA, 25 bp, Homo sapien
gtcgggattttcgtgcagggctgca

SEQ ID NO: 2526530 - DNA, 25 bp, Homo sapien
atgtcgggattttcgtgcagggctg

SEQ ID NO: 2526531 - DNA, 25 bp, Homo sapien
tcgggattttcgtgcagggctgcaa

SEQ ID NO: 2526532 - DNA, 25 bp, Homo sapien
gggattttcgtgcagggctgcaaac

SEQ ID NO: 2526533 - DNA, 25 bp, Homo sapien
ggtatgaggcaaaggcattgccctg

SEQ ID NO: 2526534 - DNA, 25 bp, Homo sapien
gagatgggctcaactacagacctca

SEQ ID NO: 2526535 - DNA, 25 bp, Homo sapien
ggaacacagacccaaggcttggaac

SEQ ID NO: 2526536 - DNA, 25 bp, Homo sapien
ttgccctgacaagagatacaagctg

SEQ ID NO: 2526537 - DNA, 25 bp, Homo sapien
agttctgataacctgctaccactgg

SEQ ID NO: 2526538 - DNA, 25 bp, Homo sapien
ttaatgatactaatgttggtaagtt

SEQ ID NO: 2526539 - DNA, 25 bp, Homo sapien
aactttaatgatactaatgttggta

SEQ ID NO: 2526540 - DNA, 25 bp, Homo sapien
tgataacctgctaccactggaccag

SEQ ID NO: 2526541 - DNA, 25 bp, Homo sapien
gggcagtcttgaggccagtgaactt

SEQ ID NO: 2526542 - DNA, 25 bp, Homo sapien
agggcagtcttgaggccagtgaact

SEQ ID NO: 2526543 - DNA, 25 bp, Homo sapien
gagaaagtgattgagagagggcagg

SEQ ID NO: 2526544 - DNA, 25 bp, Homo sapien
tgtgtccggtcccaagtcagccctt

SEQ ID NO: 2526545 - DNA, 25 bp, Homo sapien
cagcctctagccaagctcagacaca

SEQ ID NO: 2526546 - DNA, 25 bp, Homo sapien
tgagatgacagcacactcgtggcct

SEQ ID NO: 2526547 - DNA, 25 bp, Homo sapien
ttgagccgctcgaacattgggagga

SEQ ID NO: 2526548 - DNA, 25 bp, Homo sapien
caccacgtccttgccatccaagatc

SEQ ID NO: 2526549 - DNA, 25 bp, Homo sapien
ttgccactgcccgtccgggccatgg

SEQ ID NO: 2526550 - DNA, 25 bp, Homo sapien
tcgggtcggcgagaggatgagggcg

SEQ ID NO: 2526551 - DNA, 25 bp, Homo sapien
cctctggatgggtgttggcaccttg

SEQ ID NO: 2526552 - DNA, 25 bp, Homo sapien
tcctctggatgggtgttggcacctt

SEQ ID NO: 2526553 - DNA, 25 bp, Homo sapien
cttcctctggatgggtgttggcacc

SEQ ID NO: 2526554 - DNA, 25 bp, Homo sapien
ctggatgggtgttggcaccttgtac

SEQ ID NO: 2526555 - DNA, 25 bp, Homo sapien
tgcctttgaacaccgggtagctcag

SEQ ID NO: 2526556 - DNA, 25 bp, Homo sapien
tgatgcctttgaacaccgggtagct

SEQ ID NO: 2526557 - DNA, 25 bp, Homo sapien
cttcatgatgcctttgaacaccggg

SEQ ID NO: 2526558 - DNA, 25 bp, Homo sapien
tcatgatgcctttgaacaccgggta

SEQ ID NO: 2526559 - DNA, 25 bp, Homo sapien
cgggtgtccggctccacatccgagg

SEQ ID NO: 2526560 - DNA, 25 bp, Homo sapien
tgggcacgcaccatctcccgggtgt

SEQ ID NO: 2526561 - DNA, 25 bp, Homo sapien
gtccggctccacatccgaggtgcat

SEQ ID NO: 2526562 - DNA, 25 bp, Homo sapien
cttcttgttctgggcacgcaccatc

SEQ ID NO: 2526563 - DNA, 25 bp, Homo sapien
tgggcaggggtcttccaggtcccag

SEQ ID NO: 2526564 - DNA, 25 bp, Homo sapien
gtgggcaggggtcttccaggtccca

SEQ ID NO: 2526565 - DNA, 25 bp, Homo sapien
aaactcgccgtcctccgagtcgctg

SEQ ID NO: 2526566 - DNA, 25 bp, Homo sapien
ggcccgggcgtcatcttccgcctgg

SEQ ID NO: 2526567 - DNA, 25 bp, Homo sapien
cggcgcttccggagccctttcttct

SEQ ID NO: 2526568 - DNA, 25 bp, Homo sapien
gggaggccgcgcctcggcgcttccg

SEQ ID NO: 2526569 - DNA, 25 bp, Homo sapien
ggcagctcgcgaccgaggtccagcc

SEQ ID NO: 2526570 - DNA, 25 bp, Homo sapien
cagctcgcgaccgaggtccagccgc

SEQ ID NO: 2526571 - DNA, 25 bp, Homo sapien
ccagccgccgggcccttgtcggccg

SEQ ID NO: 2526572 - DNA, 25 bp, Homo sapien
ccgccgggcccttgtcggccgccat

SEQ ID NO: 2526573 - DNA, 25 bp, Homo sapien
gtggcctgaggagcgcaccaactgc

SEQ ID NO: 2526574 - DNA, 25 bp, Homo sapien
agggggcgtggcctgaggagcgcac

SEQ ID NO: 2526575 - DNA, 25 bp, Homo sapien
gggggcgtggcctgaggagcgcacc

SEQ ID NO: 2526576 - DNA, 25 bp, Homo sapien
ggcgtggcctgaggagcgcaccaac

SEQ ID NO: 2526577 - DNA, 25 bp, Homo sapien
gaaaaataggaactaatgcaaattg

SEQ ID NO: 2526578 - DNA, 25 bp, Homo sapien
aattgaaaatggttcttgctgcatt

SEQ ID NO: 2526579 - DNA, 25 bp, Homo sapien
attagaattagattatttggactgt

SEQ ID NO: 2526580 - DNA, 25 bp, Homo sapien
aattagattatttggactgtttcag

SEQ ID NO: 2526581 - DNA, 25 bp, Homo sapien
agaaaagaaaatgggcacggtggct

SEQ ID NO: 2526582 - DNA, 25 bp, Homo sapien
agactctgtctcagaaaaaaaaaga

SEQ ID NO: 2526583 - DNA, 25 bp, Homo sapien
gactctgtctcagaaaaaaaaagaa

SEQ ID NO: 2526584 - DNA, 25 bp, Homo sapien
tgatgagtcgctgtttggctcccga

SEQ ID NO: 2526585 - DNA, 25 bp, Homo sapien
tcccgatctgaaggcgccagcttcg

SEQ ID NO: 2526586 - DNA, 25 bp, Homo sapien
ccagggaggcaccactgcgagccat

SEQ ID NO: 2526587 - DNA, 25 bp, Homo sapien
gggatgccgcaaagctccgtgctct

SEQ ID NO: 2526588 - DNA, 25 bp, Homo sapien
cagttagcatttcagtgccatctac

SEQ ID NO: 2526589 - DNA, 25 bp, Homo sapien
cccttggaaatgatactctttcatc

SEQ ID NO: 2526590 - DNA, 25 bp, Homo sapien
ctggtgacttccagggctcgctcag

SEQ ID NO: 2526591 - DNA, 25 bp, Homo sapien
tgccatctaccccacgacgaggtgg

SEQ ID NO: 2526592 - DNA, 25 bp, Homo sapien
cactaacttgtggttggccggctct

SEQ ID NO: 2526593 - DNA, 25 bp, Homo sapien
tggagggtccaagaaagccagacag

SEQ ID NO: 2526594 - DNA, 25 bp, Homo sapien
cagatagtacaaggatgtggcaggc

SEQ ID NO: 2526595 - DNA, 25 bp, Homo sapien
tttgcgcagatggaattgcacccag

SEQ ID NO: 2526596 - DNA, 25 bp, Homo sapien
ccagttggaagccacatcatctggt

SEQ ID NO: 2526597 - DNA, 25 bp, Homo sapien
cacatcatctggttggtacgtctgc

SEQ ID NO: 2526598 - DNA, 25 bp, Homo sapien
gaagccacatcatctggttggtacg

SEQ ID NO: 2526599 - DNA, 25 bp, Homo sapien
tggaagccacatcatctggttggta

SEQ ID NO: 2526600 - DNA, 25 bp, Homo sapien
ggctgaagtaaggaaccataatctc

SEQ ID NO: 2526601 - DNA, 25 bp, Homo sapien
ttcccactaaggctgaagtaaggaa

SEQ ID NO: 2526602 - DNA, 25 bp, Homo sapien
gtaaggaaccataatctctgggctg

SEQ ID NO: 2526603 - DNA, 25 bp, Homo sapien
ctaaggctgaagtaaggaaccataa

SEQ ID NO: 2526604 - DNA, 25 bp, Homo sapien
tggtctctgggaagataagggtcag

SEQ ID NO: 2526605 - DNA, 25 bp, Homo sapien
taagggtcaggagcgggctgggtgg

SEQ ID NO: 2526606 - DNA, 25 bp, Homo sapien
gtgaatttagtgctctccatctcgg

SEQ ID NO: 2526607 - DNA, 25 bp, Homo sapien
gtcaggagcgggctgggtggagagc

SEQ ID NO: 2526608 - DNA, 25 bp, Homo sapien
tctccttgtcctttgctttgccctt

SEQ ID NO: 2526609 - DNA, 25 bp, Homo sapien
ttgccccgcttcttcttggatctga

SEQ ID NO: 2526610 - DNA, 25 bp, Homo sapien
ttgctttgcccttgccccgcttctt

SEQ ID NO: 2526611 - DNA, 25 bp, Homo sapien
cttcttggatctgagcagggagcgc

SEQ ID NO: 2526612 - DNA, 25 bp, Homo sapien
ttttcttggagttgatctcccgctc

SEQ ID NO: 2526613 - DNA, 25 bp, Homo sapien
ctcttcccggatctgcgcaaactct

SEQ ID NO: 2526614 - DNA, 25 bp, Homo sapien
cctggatgagcgtggccgcccgtac

SEQ ID NO: 2526615 - DNA, 25 bp, Homo sapien
tcctccctgtgaacagcgtccagat

SEQ ID NO: 2526616 - DNA, 25 bp, Homo sapien
gatccagttctcgatttccgtttcc

SEQ ID NO: 2526617 - DNA, 25 bp, Homo sapien
tccagttctcgatttccgtttccac

SEQ ID NO: 2526618 - DNA, 25 bp, Homo sapien
tttctggatccagttctcgatttcc

SEQ ID NO: 2526619 - DNA, 25 bp, Homo sapien
tctggatccagttctcgatttccgt

SEQ ID NO: 2526620 - DNA, 25 bp, Homo sapien
gacatgctatcttacttgcccaagg

SEQ ID NO: 2526621 - DNA, 25 bp, Homo sapien
caggacatcctaggcagagaaagca

SEQ ID NO: 2526622 - DNA, 25 bp, Homo sapien
gcgaggaggaaagtggtccccaaca

SEQ ID NO: 2526623 - DNA, 25 bp, Homo sapien
cgcctattgaacaaggaggttccct

SEQ ID NO: 2526624 - DNA, 25 bp, Homo sapien
tcggcccatcctcgctgcttcccgg

SEQ ID NO: 2526625 - DNA, 25 bp, Homo sapien
cccctcggcccatcctcgctgcttc

SEQ ID NO: 2526626 - DNA, 25 bp, Homo sapien
gggccccctcggcccatcctcgctg

SEQ ID NO: 2526627 - DNA, 25 bp, Homo sapien
cctcggcccatcctcgctgcttccc

SEQ ID NO: 2526628 - DNA, 25 bp, Homo sapien
tctgagaacttgagcacctggtgca

SEQ ID NO: 2526629 - DNA, 25 bp, Homo sapien
cctggcctgtgatgcccggaaatcg

SEQ ID NO: 2526630 - DNA, 25 bp, Homo sapien
catgaccaggttgtaaaactgtgac

SEQ ID NO: 2526631 - DNA, 25 bp, Homo sapien
gcttagtgcgaacgaggctgttctc

SEQ ID NO: 2526632 - DNA, 25 bp, Homo sapien
taacacagccccagtgacgggtggt

SEQ ID NO: 2526633 - DNA, 25 bp, Homo sapien
tgtactcatacaccatctcacaggg

SEQ ID NO: 2526634 - DNA, 25 bp, Homo sapien
gctgggtgtggctacaagatatgca

SEQ ID NO: 2526635 - DNA, 25 bp, Homo sapien
gtagaatgtggagcataacacagcc

SEQ ID NO: 2526636 - DNA, 25 bp, Homo sapien
caaccaacaaaagatttgtgtggct

SEQ ID NO: 2526637 - DNA, 25 bp, Homo sapien
tttcagcaatactatgaaacaatac

SEQ ID NO: 2526638 - DNA, 25 bp, Homo sapien
gtaatttcagcaatactatgaaaca

SEQ ID NO: 2526639 - DNA, 25 bp, Homo sapien
acccaaccaacaaaagatttgtgtg

SEQ ID NO: 2526640 - DNA, 25 bp, Homo sapien
tactgatatcctgtaagaactgggc

SEQ ID NO: 2526641 - DNA, 25 bp, Homo sapien
gaaaccacggagctctatcaggctg

SEQ ID NO: 2526642 - DNA, 25 bp, Homo sapien
tcaggctgtcaataaaattctgggc

SEQ ID NO: 2526643 - DNA, 25 bp, Homo sapien
ttgctgagcaagagtctaaggacgt

SEQ ID NO: 2526644 - DNA, 25 bp, Homo sapien
cataagtggtgagaggctggatttc

SEQ ID NO: 2526645 - DNA, 25 bp, Homo sapien
agtggtgagaggctggatttctgca

SEQ ID NO: 2526646 - DNA, 25 bp, Homo sapien
ctgcataagtggtgagaggctggat

SEQ ID NO: 2526647 - DNA, 25 bp, Homo sapien
gtggtgagaggctggatttctgcag

SEQ ID NO: 2526648 - DNA, 25 bp, Homo sapien
ggaaaggaggcggtctctgagccac

SEQ ID NO: 2526649 - DNA, 25 bp, Homo sapien
gaaaggaggcggtctctgagccacc

SEQ ID NO: 2526650 - DNA, 25 bp, Homo sapien
gttttcaaggaggacctggcagaga

SEQ ID NO: 2526651 - DNA, 25 bp, Homo sapien
ggcagagatcctcatgctctctcac

SEQ ID NO: 2526652 - DNA, 25 bp, Homo sapien
gacctggcagagatcctcatgctct

SEQ ID NO: 2526653 - DNA, 25 bp, Homo sapien
ttcaaggaggacctggcagagatcc

SEQ ID NO: 2526654 - DNA, 25 bp, Homo sapien
gccctcatgacgtcctcccccagca

SEQ ID NO: 2526655 - DNA, 25 bp, Homo sapien
tgccctcatgacgtcctcccccagc

SEQ ID NO: 2526656 - DNA, 25 bp, Homo sapien
catatcctctctgttggatgccaca

SEQ ID NO: 2526657 - DNA, 25 bp, Homo sapien
cccagcatcccctccatatcctctc

SEQ ID NO: 2526658 - DNA, 25 bp, Homo sapien
tgatccttttggcctcaatggtggt

SEQ ID NO: 2526659 - DNA, 25 bp, Homo sapien
gatccttttggcctcaatggtggtg

SEQ ID NO: 2526660 - DNA, 25 bp, Homo sapien
accagctccaccttgtagatcgcct

SEQ ID NO: 2526661 - DNA, 25 bp, Homo sapien
caccttgtagatcgcctcatccagg

SEQ ID NO: 2526662 - DNA, 25 bp, Homo sapien
gagaaccaagggttttagtggatca

SEQ ID NO: 2526663 - DNA, 25 bp, Homo sapien
ctagagagaaccaagggttttagtg

SEQ ID NO: 2526664 - DNA, 25 bp, Homo sapien
agaaccaagggttttagtggatcag

SEQ ID NO: 2526665 - DNA, 25 bp, Homo sapien
ccttttagatgggtctgtctttggc

SEQ ID NO: 2526666 - DNA, 25 bp, Homo sapien
caggggcctgatacaaaggggccat

SEQ ID NO: 2526667 - DNA, 25 bp, Homo sapien
tctttggccctattctgttgatggc

SEQ ID NO: 2526668 - DNA, 25 bp, Homo sapien
tagatgggtctgtctttggccctat

SEQ ID NO: 2526669 - DNA, 25 bp, Homo sapien
cttgtgagcagccctctgtgcctct

SEQ ID NO: 2526670 - DNA, 25 bp, Homo sapien
agccctctgtgcctctgtaggtcca

SEQ ID NO: 2526671 - DNA, 25 bp, Homo sapien
tctgtaggtccacagagatggagac

SEQ ID NO: 2526672 - DNA, 25 bp, Homo sapien
tgtgcctctgtaggtccacagagat

SEQ ID NO: 2526673 - DNA, 25 bp, Homo sapien
gactacttgggtctcgtgcttttat

SEQ ID NO: 2526674 - DNA, 25 bp, Homo sapien
tagactacttgggtctcgtgctttt

SEQ ID NO: 2526675 - DNA, 25 bp, Homo sapien
cttgggtctcgtgcttttattgtct

SEQ ID NO: 2526676 - DNA, 25 bp, Homo sapien
ggtctcgtgcttttattgtctctgg

SEQ ID NO: 2526677 - DNA, 25 bp, Homo sapien
ggaccagccaggcatacagacagca

SEQ ID NO: 2526678 - DNA, 25 bp, Homo sapien
taggtcctctgtcgcttttacacag

SEQ ID NO: 2526679 - DNA, 25 bp, Homo sapien
aaaatgaagaagtaggtgtgagtgc

SEQ ID NO: 2526680 - DNA, 25 bp, Homo sapien
ctttgtgagggtgttagggccacaa

SEQ ID NO: 2526681 - DNA, 25 bp, Homo sapien
cagtaagccaagtttgcatcactgt

SEQ ID NO: 2526682 - DNA, 25 bp, Homo sapien
tactcaggttaaccccagttactca

SEQ ID NO: 2526683 - DNA, 25 bp, Homo sapien
gtaagccaagtttgcatcactgtac

SEQ ID NO: 2526684 - DNA, 25 bp, Homo sapien
tcaggttaaccccagttactcagga

SEQ ID NO: 2526685 - DNA, 25 bp, Homo sapien
agttactacttacaggttacctgtg

SEQ ID NO: 2526686 - DNA, 25 bp, Homo sapien
tggccttcccattatccagggagtg

SEQ ID NO: 2526687 - DNA, 25 bp, Homo sapien
cattgagctctagctgccatactgc

SEQ ID NO: 2526688 - DNA, 25 bp, Homo sapien
gcaccaatgaaagctgtaagttact

SEQ ID NO: 2526689 - DNA, 25 bp, Homo sapien
ctagccacagttaccgccgcggtcc

SEQ ID NO: 2526690 - DNA, 25 bp, Homo sapien
tacccgccaatctcagaaggcgaga

SEQ ID NO: 2526691 - DNA, 25 bp, Homo sapien
cgcggtccctgcgttgctaggttac

SEQ ID NO: 2526692 - DNA, 25 bp, Homo sapien
tctgaccgctccaggtttccctagc

SEQ ID NO: 2526693 - DNA, 25 bp, Homo sapien
tatgcaactttagaccgctactgtt

SEQ ID NO: 2526694 - DNA, 25 bp, Homo sapien
ccaggcaaagggagatttgaagcca

SEQ ID NO: 2526695 - DNA, 25 bp, Homo sapien
gagtctatggagtgctcattctaca

SEQ ID NO: 2526696 - DNA, 25 bp, Homo sapien
tacattctccgttcttatcttcatc

SEQ ID NO: 2526697 - DNA, 25 bp, Homo sapien
tgttcttccgagcactggctttctg

SEQ ID NO: 2526698 - DNA, 25 bp, Homo sapien
tgcaggggaaccagagcgcaccagt

SEQ ID NO: 2526699 - DNA, 25 bp, Homo sapien
tgctgacctcttgcaggggaaccag

SEQ ID NO: 2526700 - DNA, 25 bp, Homo sapien
cttgagtctcaagccaaacttgttc

SEQ ID NO: 2526701 - DNA, 25 bp, Homo sapien
caggactccgcagatggtgaagaca

SEQ ID NO: 2526702 - DNA, 25 bp, Homo sapien
tgagagtttcccaaaggcgcttgcc

SEQ ID NO: 2526703 - DNA, 25 bp, Homo sapien
tagacatcggaagccgtggcactca

SEQ ID NO: 2526704 - DNA, 25 bp, Homo sapien
ttcactggagcggagcaagtatgcc

SEQ ID NO: 2526705 - DNA, 25 bp, Homo sapien
taatagaagcgtttgaccttgggca

SEQ ID NO: 2526706 - DNA, 25 bp, Homo sapien
aatatctcacaaagcaccgtgtggg

SEQ ID NO: 2526707 - DNA, 25 bp, Homo sapien
ttggcagctaaggaaaatatctcac

SEQ ID NO: 2526708 - DNA, 25 bp, Homo sapien
tccgggaacacaagagactcaggca

SEQ ID NO: 2526709 - DNA, 25 bp, Homo sapien
tccagagcgagttaatgtgtccatc

SEQ ID NO: 2526710 - DNA, 25 bp, Homo sapien
cctgtatgacatctgagcgtggtgg

SEQ ID NO: 2526711 - DNA, 25 bp, Homo sapien
cagcagtgtcaacagacgggagtcc

SEQ ID NO: 2526712 - DNA, 25 bp, Homo sapien
cagaggtcgctttggttccgcttcc

SEQ ID NO: 2526713 - DNA, 25 bp, Homo sapien
tctttaccagcataaggcagtcagg

SEQ ID NO: 2526714 - DNA, 25 bp, Homo sapien
ggcagtcaggcaaacctaagagttg

SEQ ID NO: 2526715 - DNA, 25 bp, Homo sapien
gcttatttcggcaacataaggcggg

SEQ ID NO: 2526716 - DNA, 25 bp, Homo sapien
cgggctggcatcgttttggaagcaa

SEQ ID NO: 2526717 - DNA, 25 bp, Homo sapien
tgcagaaatgctccggtccctgggc

SEQ ID NO: 2526718 - DNA, 25 bp, Homo sapien
aggccacagcactaagcggcttcag

SEQ ID NO: 2526719 - DNA, 25 bp, Homo sapien
ggctttattaacgtggcaaggagaa

SEQ ID NO: 2526720 - DNA, 25 bp, Homo sapien
tcagggttgggcagccacttgtgtc

SEQ ID NO: 2526721 - DNA, 25 bp, Homo sapien
agtgaggagggccacgacaaggaag

SEQ ID NO: 2526722 - DNA, 25 bp, Homo sapien
ggacccacaccagcagtccgtctgg

SEQ ID NO: 2526723 - DNA, 25 bp, Homo sapien
aggcagaagccatagactctgctga

SEQ ID NO: 2526724 - DNA, 25 bp, Homo sapien
ccacgacaaggaagttcaggtagaa

SEQ ID NO: 2526725 - DNA, 25 bp, Homo sapien
caatatggatgcgttaggccgggca

SEQ ID NO: 2526726 - DNA, 25 bp, Homo sapien
aacaacaatgcaatctcagccgagc

SEQ ID NO: 2526727 - DNA, 25 bp, Homo sapien
tagtcaacgacatgcacaagcggat

SEQ ID NO: 2526728 - DNA, 25 bp, Homo sapien
ggagttcgacctgtattggccagga

SEQ ID NO: 2526729 - DNA, 25 bp, Homo sapien
caggcactgtcgtctttgatctaac

SEQ ID NO: 2526730 - DNA, 25 bp, Homo sapien
tatggtgggtactaggatggactcc

SEQ ID NO: 2526731 - DNA, 25 bp, Homo sapien
tgccaggcattgtgcgaagggccta

SEQ ID NO: 2526732 - DNA, 25 bp, Homo sapien
taagtatctactgagtgcctgctct

SEQ ID NO: 2526733 - DNA, 25 bp, Homo sapien
tagcaggtatatccaacacgcagtg

SEQ ID NO: 2526734 - DNA, 25 bp, Homo sapien
cacgcagtgaagacatgaggtaccg

SEQ ID NO: 2526735 - DNA, 25 bp, Homo sapien
catcttggacttagggtggccccta

SEQ ID NO: 2526736 - DNA, 25 bp, Homo sapien
ggcagcactagggaactaacactat

SEQ ID NO: 2526737 - DNA, 25 bp, Homo sapien
gcaccgtggcgtttcgtcttcccag

SEQ ID NO: 2526738 - DNA, 25 bp, Homo sapien
caccgtggcgtttcgtcttcccagc

SEQ ID NO: 2526739 - DNA, 25 bp, Homo sapien
ttcgggagatctggagcaggcagcc

SEQ ID NO: 2526740 - DNA, 25 bp, Homo sapien
tcacttctgtgtggcttcgggagat

SEQ ID NO: 2526741 - DNA, 25 bp, Homo sapien
cttcacttctgtgtggcttcgggag

SEQ ID NO: 2526742 - DNA, 25 bp, Homo sapien
cttctgtgtggcttcgggagatctg

SEQ ID NO: 2526743 - DNA, 25 bp, Homo sapien
ctgcagcccagctcaggaagctttg

SEQ ID NO: 2526744 - DNA, 25 bp, Homo sapien
agcccgttcctcctactgtgttcat

SEQ ID NO: 2526745 - DNA, 25 bp, Homo sapien
atagcccgttcctcctactgtgttc

SEQ ID NO: 2526746 - DNA, 25 bp, Homo sapien
cataacccaaccacatagcccgttc

SEQ ID NO: 2526747 - DNA, 25 bp, Homo sapien
ctcctactgtgttcatccccagggc

SEQ ID NO: 2526748 - DNA, 25 bp, Homo sapien
gtgacaccagtgctaaggccaagaa

SEQ ID NO: 2526749 - DNA, 25 bp, Homo sapien
gctaaggccaagaacagaccacaaa

SEQ ID NO: 2526750 - DNA, 25 bp, Homo sapien
caccagtgctaaggccaagaacaga

SEQ ID NO: 2526751 - DNA, 25 bp, Homo sapien
agtgctaaggccaagaacagaccac

SEQ ID NO: 2526752 - DNA, 25 bp, Homo sapien
cctggcgagccagtgtgaaatccga

SEQ ID NO: 2526753 - DNA, 25 bp, Homo sapien
gccgccaaagcaggcggagaacgcc

SEQ ID NO: 2526754 - DNA, 25 bp, Homo sapien
ccatccgtgggtagccctggcgagc

SEQ ID NO: 2526755 - DNA, 25 bp, Homo sapien
gccagtgtgaaatccgagaaggcat

SEQ ID NO: 2526756 - DNA, 25 bp, Homo sapien
tttaccccactctttcacaccagga

SEQ ID NO: 2526757 - DNA, 25 bp, Homo sapien
tcattcaggcaacaaacacagatgg

SEQ ID NO: 2526758 - DNA, 25 bp, Homo sapien
tgcagtggtgagtcgcttcccccac

SEQ ID NO: 2526759 - DNA, 25 bp, Homo sapien
ggtcatccacgccttcattctcacc

SEQ ID NO: 2526760 - DNA, 25 bp, Homo sapien
acagtgttgctcagccggaagacca

SEQ ID NO: 2526761 - DNA, 25 bp, Homo sapien
ccacacccagggaccgcaagatgtt

SEQ ID NO: 2526762 - DNA, 25 bp, Homo sapien
cgcaagatgttcaccacctctgtgg

SEQ ID NO: 2526763 - DNA, 25 bp, Homo sapien
cacagggcgctggtcagaaagccca

SEQ ID NO: 2526764 - DNA, 25 bp, Homo sapien
gcggagggaatggtttgctgtggga

SEQ ID NO: 2526765 - DNA, 25 bp, Homo sapien
tgcggagggaatggtttgctgtggg

SEQ ID NO: 2526766 - DNA, 25 bp, Homo sapien
ctgcggagggaatggtttgctgtgg

SEQ ID NO: 2526767 - DNA, 25 bp, Homo sapien
tctctctgaatgtgcctcgtggaca

SEQ ID NO: 2526768 - DNA, 25 bp, Homo sapien
cccttcggttggtacattcattgag

SEQ ID NO: 2526769 - DNA, 25 bp, Homo sapien
tactcattagcggtcactccctagc

SEQ ID NO: 2526770 - DNA, 25 bp, Homo sapien
cacacgtcggtacttgaaaaaacag

SEQ ID NO: 2526771 - DNA, 25 bp, Homo sapien
ccacgcccagccaaaatgaaaatat

SEQ ID NO: 2526772 - DNA, 25 bp, Homo sapien
ggctgaagtgccatgatgcgatctc

SEQ ID NO: 2526773 - DNA, 25 bp, Homo sapien
acgcccagccaaaatgaaaatatta

SEQ ID NO: 2526774 - DNA, 25 bp, Homo sapien
cccagccaaaatgaaaatattaagt

SEQ ID NO: 2526775 - DNA, 25 bp, Homo sapien
aaaggtcactgaagccaaggctgtg

SEQ ID NO: 2526776 - DNA, 25 bp, Homo sapien
gaggccgcctatctcatagacacca

SEQ ID NO: 2526777 - DNA, 25 bp, Homo sapien
gggctggctgtcagatgtggcaaaa

SEQ ID NO: 2526778 - DNA, 25 bp, Homo sapien
caccacgacccagacgggaacgagg

SEQ ID NO: 2526779 - DNA, 25 bp, Homo sapien
ggaccacaaccagggggctgataac

SEQ ID NO: 2526780 - DNA, 25 bp, Homo sapien
ggctgataaccagatgcagacagtt

SEQ ID NO: 2526781 - DNA, 25 bp, Homo sapien
gcagacagttgaggggccgtttcca

SEQ ID NO: 2526782 - DNA, 25 bp, Homo sapien
aggtccccgactgcagggtcaggac

SEQ ID NO: 2526783 - DNA, 25 bp, Homo sapien
gagggctttccagtatgctgatttc

SEQ ID NO: 2526784 - DNA, 25 bp, Homo sapien
attgagggcccggaccaggatctga

SEQ ID NO: 2526785 - DNA, 25 bp, Homo sapien
tcatgtaatccaggggattgagggc

SEQ ID NO: 2526786 - DNA, 25 bp, Homo sapien
tttccttctccacttcatgtaatcc

SEQ ID NO: 2526787 - DNA, 25 bp, Homo sapien
agaagaacagcggccggtactcatc

SEQ ID NO: 2526788 - DNA, 25 bp, Homo sapien
aagaacagcggccggtactcatcac

SEQ ID NO: 2526789 - DNA, 25 bp, Homo sapien
ctggtagaagaacagcggccggtac

SEQ ID NO: 2526790 - DNA, 25 bp, Homo sapien
ggtagaagaacagcggccggtactc

SEQ ID NO: 2526791 - DNA, 25 bp, Homo sapien
tattagaagatacccggtcctcctc

SEQ ID NO: 2526792 - DNA, 25 bp, Homo sapien
tgttggtattagaagatacccggtc

SEQ ID NO: 2526793 - DNA, 25 bp, Homo sapien
tggtattagaagatacccggtcctc

SEQ ID NO: 2526794 - DNA, 25 bp, Homo sapien
tagctgttggtattagaagataccc

SEQ ID NO: 2526795 - DNA, 25 bp, Homo sapien
tctccgttgccgttggtagatccag

SEQ ID NO: 2526796 - DNA, 25 bp, Homo sapien
ccgttggtagatccaggtgcagaga

SEQ ID NO: 2526797 - DNA, 25 bp, Homo sapien
gatcctctccgttgccgttggtaga

SEQ ID NO: 2526798 - DNA, 25 bp, Homo sapien
acagagatcctctccgttgccgttg

SEQ ID NO: 2526799 - DNA, 25 bp, Homo sapien
tgttagcccatccaggtaccagtgg

SEQ ID NO: 2526800 - DNA, 25 bp, Homo sapien
tcctggtgcaggtctagagaacaac

SEQ ID NO: 2526801 - DNA, 25 bp, Homo sapien
tagcggtggcaatctgtgttagccc

SEQ ID NO: 2526802 - DNA, 25 bp, Homo sapien
gaggtaatacccaagcacagcgaga

SEQ ID NO: 2526803 - DNA, 25 bp, Homo sapien
ccttgagccgtctgaatggaacatg

SEQ ID NO: 2526804 - DNA, 25 bp, Homo sapien
tttgctgtcacgatccgggtggccc

SEQ ID NO: 2526805 - DNA, 25 bp, Homo sapien
cacgcttggccaaaaaattgtgaca

SEQ ID NO: 2526806 - DNA, 25 bp, Homo sapien
caggcctctttggttatgtgaccca

SEQ ID NO: 2526807 - DNA, 25 bp, Homo sapien
ccaccatgtagaaaacgatgtccct

SEQ ID NO: 2526808 - DNA, 25 bp, Homo sapien
ccatgtagaaaacgatgtccctgaa

SEQ ID NO: 2526809 - DNA, 25 bp, Homo sapien
catgtagaaaacgatgtccctgaag

SEQ ID NO: 2526810 - DNA, 25 bp, Homo sapien
gaccctgccacggaagagcatgagg

SEQ ID NO: 2526811 - DNA, 25 bp, Homo sapien
gtgtaggatggtaatgcctccggcc

SEQ ID NO: 2526812 - DNA, 25 bp, Homo sapien
actgtggtaaccagcacgccagcgc

SEQ ID NO: 2526813 - DNA, 25 bp, Homo sapien
accactgtggtaaccagcacgccag

SEQ ID NO: 2526814 - DNA, 25 bp, Homo sapien
atgcctccggccaccactgtggtaa

SEQ ID NO: 2526815 - DNA, 25 bp, Homo sapien
ggccagagctcagccaccctgcacc

SEQ ID NO: 2526816 - DNA, 25 bp, Homo sapien
ctggggggaggaggccagagctcag

SEQ ID NO: 2526817 - DNA, 25 bp, Homo sapien
ctgctgctttccccgcccccctcac

SEQ ID NO: 2526818 - DNA, 25 bp, Homo sapien
agccaccctgcaccctctcctgctg

SEQ ID NO: 2526819 - DNA, 25 bp, Homo sapien
agggccaggccggctgtgtgcgggt

SEQ ID NO: 2526820 - DNA, 25 bp, Homo sapien
aagggccaggccggctgtgtgcggg

SEQ ID NO: 2526821 - DNA, 25 bp, Homo sapien
gggccaggccggctgtgtgcgggtc

SEQ ID NO: 2526822 - DNA, 25 bp, Homo sapien
gaagatgtcaggtgcaccattccca

SEQ ID NO: 2526823 - DNA, 25 bp, Homo sapien
gatgtcaggtgcaccattcccaaat

SEQ ID NO: 2526824 - DNA, 25 bp, Homo sapien
tgtcaggtgcaccattcccaaatgc

SEQ ID NO: 2526825 - DNA, 25 bp, Homo sapien
ctgaagatgtcaggtgcaccattcc

SEQ ID NO: 2526826 - DNA, 25 bp, Homo sapien
gtggggagcatgtcaaggcgggcca

SEQ ID NO: 2526827 - DNA, 25 bp, Homo sapien
ggagcatgtcaaggcgggccaggat

SEQ ID NO: 2526828 - DNA, 25 bp, Homo sapien
gggagcatgtcaaggcgggccagga

SEQ ID NO: 2526829 - DNA, 25 bp, Homo sapien
catgtcaaggcgggccaggatcgca

SEQ ID NO: 2526830 - DNA, 25 bp, Homo sapien
ccaggccttcgaccctatcccccag

SEQ ID NO: 2526831 - DNA, 25 bp, Homo sapien
ggatagacatgaccctatctcccag

SEQ ID NO: 2526832 - DNA, 25 bp, Homo sapien
cggggatagacatgaccctatctcc

SEQ ID NO: 2526833 - DNA, 25 bp, Homo sapien
cacacggggatagacatgaccctat

SEQ ID NO: 2526834 - DNA, 25 bp, Homo sapien
tccccacacggggatagacatgacc

SEQ ID NO: 2526835 - DNA, 25 bp, Homo sapien
aatggccgacaagttggggcagaaa

SEQ ID NO: 2526836 - DNA, 25 bp, Homo sapien
gtgtggtagaaatggccgacaagtt

SEQ ID NO: 2526837 - DNA, 25 bp, Homo sapien
agtgtggtagaaatggccgacaagt
